(19) United States
(12) Patent Application Publication
(10) Pub. No.: US 2024/0294917 A1
(43) Pub. Date: Sep. 5, 2024

(54) CRISPR/CAS-RELATED METHODS AND COMPOSITIONS FOR TREATING HERPES SIMPLEX VIRUS TYPE 1 (HSV-1)

(71) Applicant: EDITAS MEDICINE, INC., CAMBRIDGE, MA (US)

(72) Inventors: Morgan L. Maeder, Jamaica Plain, MA (US); Ari E. Friedland, Boston, MA (US); G. Grant Welstead, Cambridge, MA (US); David A. Bumcrot, Belmont, MA (US)

(73) Assignee: EDITAS MEDICINE, INC, CAMBRIDGE, MA (US)

(21) Appl. No.: 18/452,233

(22) Filed: Aug. 18, 2023

Related U.S. Application Data
(63) Continuation of application No. 15/281,579, filed on Sep. 30, 2016, now abandoned.
Application No. 15/281,579 is a continuation of application No. PCT/US2015/023916, filed on Apr. 1, 2015.
(60) Provisional application No. 61/973,793, filed on Apr. 1, 2014.

(51) Int. Cl. C12N 15/113; C12N 15/63; C12N 15/85

(52) U.S. Cl. CPC C12N 15/1133; C12N 15/63; C12N 15/85; C12N 2310/10; C12N 2310/20; C12N 2310/3513; C12N 2800/80

(57) ABSTRACT

CRISPR/CAS-related compositions and methods for treatment of HSV-1 are disclosed.

### REFERENCE TO RELATED APPLICATIONS

[0001] This application is a continuation of U.S. patent application Ser. No. 15/281,579, filed on Sep. 30, 2016, which is a continuation of International Patent Application No. PCT/US2015/023916, filed on Apr. 1, 2015, which claims the benefit of U.S. Provisional Application No. 61/973,793, filed Apr. 1, 2014, the contents of each of which are hereby incorporated by reference in their entirety herein, and to each of which priority is claimed.

### SEQUENCE LISTING

[0002] The instant application contains a Sequence Listing which has been submitted in XML format electronically and is hereby incorporated by reference in its entirety. Said XML copy, created on Sep. 16, 2023, is named 084177_0280.xml and is 25,249,007 bytes in size. The Sequence Listing, electronically filed herewith, does not extend beyond the scope of the specification and thus does not contain new matter.

### FIELD OF THE INVENTION

[0003] The invention relates to CRISPR/CAS-related methods and components for editing of a target nucleic acid sequence, or modulating expression of a target nucleic acid sequence, and applications thereof in connection with herpes simplex virus type 1 (HSV-1).

### BACKGROUND

[0004] Herpes simplex virus type 1 (HSV-1) causes intermittent sores of the mouth and mucous membranes. It is a ubiquitous and highly contagious pathogen. The majority of the population develops the infection during childhood. By adulthood, up to 80% of the population in the United States is infected with HSV-1. New HSV-1 infections occur at a rate of 1.6 cases per 100 person years (Langenberg et al., 1999; New England Journal of Medicine 341:1432-1438). The most severe manifestations of HSV-1 infection include, e.g., keratitis, encephalitis, and meningitis.

[0005] Infection of HSV-1 is permanent. After initial infection with HSV-1, the virus establishes latent infection that lasts for the lifetime of the host. Initial infection with HSV-1 generally causes painful blistering of the mucous membranes of the lips and mouth or genital region. After initial infection, HSV-1 establishes latent infection in all subjects. Following establishment of latent infection, reactivation of HSV-1 can occur at any point during the lifetime of the subject. Reactivation of HSV-1 is more likely to occur in the elderly and in immunocompromised individuals, including in those who have cancer, those who have HIV/AIDs and in those who have undergone solid organ or hematopoietic stem cell transplant.

[0006] HSV-1 encephalitis and HSV-1 meningitis are among the most severe and debilitating types of HSV infections. HSV encephalitis is the most common form of non-epidemic encephalitis. The annual incidence of HSV encephalitis is 0.2-0.4 in 100,000 individuals (Saba et al., 2012; British Medical Journal 344: e3166). Subjects who develop HSV-1 encephalitis and/or meningitis commonly have permanent neurologic sequelae.

[0007] Ocular herpes can affect the epithelium of the eye, causing keratitis, or the retina, where it may lead to acute retinal necrosis. Keratitis is the most common form of ocular herpes. HSV-1 keratitis is the most common cause of infectious blindness in the developed world (Dawson et. al., Suvey of Ophthalmology 1976; 21(2): 121-135). Worldwide, there are approximately 1.5 million cases of HSV-related ophthalmologic disease and 40,000 cases of HSV-related blindness or severe monocular visual impairment annually (Krawczyk et. al., Public Library of Science One 2015; 10(1): e0116800. Farooq and Shukla 2012; Survey of Ophthalmology 57(5): 448-462.). HSV-1 retinitis most often affects adults and can cause acute retinal necrosis (ARN). ARN causes permanent visual damage in more than 50% of subjects (Roy et al., Ocular Immunology and Inflammation 2014; 22(3):170-174).

[0008] Newborns are a population at particular risk for developing severe HSV-1 infections. The disease is transmitted from the mother to the fetus during childbirth. The chance of maternal-fetal transmission is highest in cases where the mother developed primary HSV infection during pregnancy. The incidence of neonatal herpes is approximately 4-30 per 100,000 births (Brown Z A, et al., 2003; Journal of the American Medical Association; 289(2): 203-209. Dinh T-H, et al., 2008; Sexually Transmitted Disease; 35(1): 19-21). Neonates can develop severe HSV-1 keratitis, retinitis, encephalitis and/or meningitis. Neonatal ocular herpes can result in immediate, permanent vision loss. Ocular HSV-1 puts neonates at risk for later developing ARN. Untreated HSV-1 encephalitis leads to death in 50% of neonates. Even with prompt treatment with antiviral therapy, the majority of neonates who contract HSV-1 encephalitis or meningitis will suffer from permanent neurologic sequelae.

[0009] There are no curative or preventative treatments for HSV-1. Therapy is primarily given during acute infection. Primary HSV-1 infections can be treated with antiviral therapy, including acyclovir, valacyclovir and famciclovir. These therapies may reduce viral shedding, decrease pain and improve healing time of lesions. Re-activated, latent infections may resolve without treatment (may be self-limiting) or may be treated with anti-viral therapy. Antiviral therapy may be given prophylactically in certain situations, including during childbirth in a mother with a recent HSV-1 infection or reactivation.

[0010] Vaccines are in development for the prevention of HSV-1 infection. However, in controlled clinical trials, vaccination efficacy has been limited. A recent vaccine for both HSV-1 and HSV-2 infections was only 35% effective in preventing HSV-1 infection (Belshe et al., 2012; New England Journal of Medicine 366(1): 34-43).

[0011] Despite advances in antiretroviral therapies, there remains a need for the treatment and prevention of HSV-1 infection, particularly the treatment and prevention of HSV-1 associated keratitis, retinitis, encephalitis and meningitis. A therapy that can cure, prevent, or treat HSV-1 infections would be superior to the current standard of care.

### SUMMARY OF THE INVENTION

[0012] Methods and compositions discussed herein, provide for the treatment or prevention of herpes simplex virus type 1 (HSV-1), which causes intermittent sores of the mouth and mucous membranes. HSV-1 is contained within an icosahedral particle. The virus enters the host via infection of epithelial cells within the skin and mucous membranes. The virus produces immediate early genes within the epithelial cells, which encode enzymes and binding proteins necessary for viral synthesis. After primary infection, the virus travels up sensory nerve axons via retrograde transport to the sensory dorsal root ganglion (DRG).

[0013] Within the DRG, it establishes a latent infection. The latent infection persists for the lifetime of the host. Within the DRG cell, the virus uncoats, viral DNA is transported into the nucleus, and key viral RNAs associated with latency are transcribed (including the LAT RNAs).

[0014] Methods and compositions discussed herein provide for treatment or prevention of herpes simplex virus type 1 (HSV-1), or its symptoms, e.g., by knocking out one or more of the HSV-1 viral genes, e.g., by knocking out one or more of UL19, UL30, UL48 and/or UL54 gene(s). In one aspect, methods and compositions discussed herein may be used to alter one or more of UL19, UL30, UL48 and/or UL54 gene(s) to treat or prevent HSV-1 by targeting the gene, e.g., the non-coding or coding regions, e.g., the promoter region, or a transcribed sequence, e.g., intronic or exonic sequence. In an embodiment, coding sequence, e.g., a coding region, e.g., an early coding region, of one or more of UL19, UL30, UL48 and/or UL54 gene(s), is targeted for alteration and knockout of expression.

[0015] In another aspect, the methods and compositions discussed herein may be used to alter one or more of UL19, UL30, UL48 and/or UL54 gene(s) to treat or prevent herpes simplex virus type 1 (HSV-1) by targeting the coding sequence of one or more of UL19, UL30, UL48 and/or UL54 gene(s). In one embodiment, the gene, e.g., the coding sequence of one or more of the UL19, UL30, UL48 and/or UL54 gene(s), are targeted to knockout one or more of UL19, UL30, UL48 and/or UL54 gene(s), e.g., to eliminate expression of one or more of UL19, UL30, UL48 and/or UL54 gene(s), e.g., to knockout one or more copies of one or more of UL19, UL30, UL48 and/or UL54 gene(s), e.g., by induction of an alteration comprising a deletion or mutation in one or more of UL19, UL30, UL48 and/or UL54 gene(s). In an embodiment, the method provides an alteration that comprises an insertion or deletion. As described herein, a targeted knockout approach is mediated by non-homologous end joining (NHEJ) using a CRISPR/Cas system comprising an enzymatically active Cas9 (eaCas9) molecule.

[0016] In one embodiment, an early coding sequence of one or more of UL19, UL30, UL48 and/or UL54 gene(s) are targeted to knockout one or more of UL19, UL30, UL48 and/or UL54 gene(s). In an embodiment, targeting affects one or more copies of the UL19, UL30, UL48 and/or UL54 gene(s). In an embodiment, a targeted knockout approach reduces or eliminates expression of one or more functional UL19, UL30, UL48 and/or UL54 gene product(s). In an embodiment, the method provides an alteration that comprises an insertion or deletion.

[0017] In another aspect, the methods and compositions discussed herein may be used to alter one or more of UL19, UL30, UL48 and/or UL54 gene(s) to treat or prevent HSV-1 by targeting non-coding sequence of the UL19, UL30, UL48 and/or UL54 gene(s), e.g., promoter, an enhancer, an intron, 3′UTR, and/or polyadenylation signal. In one embodiment, the gene(s), e.g., the non-coding sequence of one or more UL19, UL30, UL48 and/or UL54 gene(s), is targeted to knockout the gene(s), e.g., to eliminate expression of the gene(s), e.g., to knockout one or more copies of the UL19, UL30, UL48 and/or UL54 gene(s), e.g., by induction of an alteration comprising a deletion or mutation in the UL19, UL30, UL48 and/or UL54 gene(s). In an embodiment, the method provides an alteration that comprises an insertion or deletion.

[0018] “HSV-1 target UL19 position”, as used herein, refers to a position in the UL19 gene, which if altered by NHEJ-mediated alteration, results in reduction or elimination of expression of functional UL19 gene product. In an embodiment, the position is in the UL19 gene coding region, e.g., an early coding region.

[0019] “HSV-1 target UL30 position”, as used herein, refers to a position in the UL30 gene, which if altered by NHEJ-mediated alteration, results in reduction or elimination of expression of functional UL30 gene product. In an embodiment, the position is in the UL30 gene coding region, e.g., an early coding region.

[0020] “HSV-1 target UL48 position”, as used herein, refers to a position in the UL48 gene, which if altered by NHEJ-mediated alteration, results in reduction or elimination of expression of functional UL48 gene product. In an embodiment, the position is in the UL48 gene coding region, e.g., an early coding region.

[0021] “HSV-1 target UL54 position”, as used herein, refers to a position in the UL54 gene, which if altered by NHEJ-mediated alteration, results in reduction or elimination of expression of functional UL54 gene product. In an embodiment, the position is in the UL54 gene coding region, e.g., an early coding region.

[0022] “HSV-1 target position”, as used herein, refers to any of a HSV-1 target UL19 target position, a HSV-1 target UL30 target position, a HSV-1 target UL48 target position and/or a HSV-1 target UL54 target position.

[0023] In one aspect, disclosed herein is a gRNA molecule, e.g., an isolated or non-naturally occurring gRNA molecule, comprising a targeting domain which is complementary with a target domain from the UL19, UL30, UL48 or UL54 gene.

[0024] In an embodiment, the targeting domain of the gRNA molecule is configured to provide a cleavage event, e.g., a double strand break or a single strand break, sufficiently close to a HSV-1 target position in the UL19, UL30, UL48 or UL54 gene to allow alteration, e.g., alteration associated with NHEJ, of a HSV-1 target position in the UL19, UL30, UL48 or UL54 gene. In an embodiment, the targeting domain is configured such that a cleavage event, e.g., a double strand or single strand break, is positioned within 1, 2, 3, 4, 5, 10, 15, 20, 25, 30, 35, 40, 45, 50, 60, 70, 80, 90, 100, 150 or 200 nucleotides of a HSV-1 target position. The break, e.g., a double strand or single strand break, can be positioned upstream or downstream of a HSV-1 target position in the UL19, UL30, UL48 or UL54 gene. In an embodiment, the targeting domain of the gRNA molecule is configured to provide a cleavage event selected from a double strand break and a single strand break, within 500 (e.g., within 500, 400, 300, 250, 200, 150, 100, 80, 60, 40, 20, or 10) nucleotides of a HSV-1 target position.

[0025] In an embodiment, a second gRNA molecule comprising a second targeting domain is configured to provide a cleavage event, e.g., a double strand break or a single strand break, sufficiently close to the HSV-1 target position in the UL19, UL30, UL48 or UL54 gene, to allow alteration, e.g., alteration associated with NHEJ, of the HSV-1 target position in the UL19, UL30, UL48 or UL54 gene, either alone or in combination with the break positioned by said first gRNA molecule. In an embodiment, the targeting domains of the first and second gRNA molecules are configured such that a cleavage event, e.g., a double strand or single strand break, is positioned, independently for each of the gRNA molecules, within 1, 2, 3, 4, 5, 10, 15, 20, 25, 30, 35, 40, 45, 50, 60, 70, 80, 90, 100, 150 or 200 nucleotides of the target position. In an embodiment, the breaks, e.g., double strand or single strand breaks, are positioned on both sides of a nucleotide of a HSV-1 target position in the UL19, UL30, UL48 or UL54 gene. In an embodiment, the breaks, e.g., double strand or single strand breaks, are positioned on one side, e.g., upstream or downstream, of a nucleotide of a HSV-1 target position in the UL19, UL30, UL48 or UL54 gene. In an embodiment, the targeting domain of the first and/or second gRNA molecule is configured to provide a cleavage event selected from a double strand break and a single strand break, within 500 (e.g., within 500, 400, 300, 250, 200, 150, 100, 80, 60, 40, 20, or 10) nucleotides of a HSV-1 target position.

[0026] In an embodiment, a single strand break is accompanied by an additional single strand break, positioned by a second gRNA molecule, as discussed below. For example, the targeting domains are configured such that a cleavage event, e.g., the two single strand breaks, are positioned within 1, 2, 3, 4, 5, 10, 15, 20, 25, 30, 35, 40, 45, 50, 60, 70, 80, 90, 100, 150 or 200 nucleotides of a HSV-1 target position. In an embodiment, the first and second gRNA molecules are configured such, that when guiding a Cas9 molecule, e.g., a Cas9 nickase, a single strand break will be accompanied by an additional single strand break, positioned by a second gRNA, sufficiently close to one another to result in alteration of a HSV-1 target position in the UL19, UL30, UL48 or UL54 gene. In an embodiment, the first and second gRNA molecules are configured such that a single strand break positioned by said second gRNA is within 10, 20, 30, 40, or 50 nucleotides of the break positioned by said first gRNA molecule, e.g., when the Cas9 molecule is a nickase. In an embodiment, the two gRNA molecules are configured to position cuts at the same position, or within a few nucleotides of one another, on different strands, e.g., essentially mimicking a double strand break.

[0027] In an embodiment, a double strand break can be accompanied by an additional double strand break, positioned by a second gRNA molecule, as is discussed below. For example, the targeting domain of a first gRNA molecule is configured such that a double strand break is positioned upstream of a HSV-1 target position in the UL19, UL30, UL48 or UL54 gene, e.g., within 1, 2, 3, 4, 5, 10, 15, 20, 25, 30, 35, 40, 45, 50, 60, 70, 80, 90, 100, 150 or 200 nucleotides of the target position; and the targeting domain of a second gRNA molecule is configured such that a double strand break is positioned downstream of a HSV-1 target position in the UL19, UL30, UL48 or UL54 gene, e.g., within 1, 2, 3, 4, 5, 10, 15, 20, 25, 30, 35, 40, 45, 50, 60, 70, 80, 90, 100, 150 or 200 nucleotides of the target position.

[0028] In an embodiment, a double strand break can be accompanied by two additional single strand breaks, positioned by a second gRNA molecule and a third gRNA molecule. For example, the targeting domain of a first gRNA molecule is configured such that a double strand break is positioned upstream of a HSV-1 target position in the UL19, UL30, UL48 or UL54 gene, e.g., within 1, 2, 3, 4, 5, 10, 15, 20, 25, 30, 35, 40, 45, 50, 60, 70, 80, 90, 100, 150 or 200 nucleotides of the target position; and the targeting domains of a second and third gRNA molecule are configured such that two single strand breaks are positioned downstream of a HSV-1 target position in the UL19, UL30, UL48 or UL54 gene, e.g., within 1, 2, 3, 4, 5, 10, 15, 20, 25, 30, 35, 40, 45, 50, 60, 70, 80, 90, 100, 150 or 200 nucleotides of the target position. In an embodiment, the targeting domain of the first, second and third gRNA molecules are configured such that a cleavage event, e.g., a double strand or single strand break, is positioned, independently for each of the gRNA molecules.

[0029] In an embodiment, a first and second single strand breaks can be accompanied by two additional single strand breaks positioned by a third gRNA molecule and a fourth gRNA molecule. For example, the targeting domain of a first and second gRNA molecule are configured such that two single strand breaks are positioned upstream of a HSV-1 target position in the UL19, UL30, UL48 or UL54 gene, e.g., within 1, 2, 3, 4, 5, 10, 15, 20, 25, 30, 35, 40, 45, 50, 60, 70, 80, 90, 100, 150 or 200 nucleotides of the target position; and the targeting domains of a third and fourth gRNA molecule are configured such that two single strand breaks are positioned downstream of a HSV-1 target position in the UL19, UL30, UL48 or UL54 gene, e.g., within 1, 2, 3, 4, 5, 10, 15, 20, 25, 30, 35, 40, 45, 50, 60, 70, 80, 90, 100, 150 or 200 nucleotides of the target position. In an embodiment, the targeting domain of the first, second, third, and/or fourth gRNA molecule is configured to provide a cleavage event selected from a double strand break and a single strand break, within 500 (e.g., within 500, 400, 300, 250, 200, 150, 100, 80, 60, 40, 20, or 10) nucleotides of a HSV-1 target position.

[0030] It is contemplated herein that, in an embodiment, when multiple gRNAs are used to generate (1) two single stranded breaks in close proximity, (2) two double stranded breaks, e.g., flanking a HSV-1 target position (e.g., to remove a piece of DNA, e.g., to create a deletion mutation) or to create more than one indel in the gene, e.g., in a coding region, e.g., an early coding region, (3) one double stranded break and two paired nicks flanking a HSV-1 target position (e.g., to remove a piece of DNA, e.g., to insert a deletion) or (4) four single stranded breaks, two on each side of a position, that they are targeting the same HSV-1 target position. It is further contemplated herein that multiple gRNAs may be used to target more than one HSV-1 target position in the same gene, e.g., one or more of UL19, UL30, UL48 and/or UL54 gene(s).

[0031] In an embodiment, the targeting domain of the first gRNA molecule and the targeting domain of the second gRNA molecules are complementary to opposite strands of the target nucleic acid molecule. In an embodiment, the gRNA molecule and the second gRNA molecule are configured such that the PAMs are oriented outward.

[0032] In an embodiment, the targeting domain of a gRNA molecule is configured to avoid unwanted target chromosome elements, such as repeat elements, e.g., Alu repeats, in the target domain. The gRNA molecule may be a first, second, third and/or fourth gRNA molecule, as described herein.

[0033] In an embodiment, the targeting domain of a gRNA molecule is configured to position a cleavage event sufficiently far from a preselected nucleotide, e.g., the nucleotide of a coding region, such that the nucleotide is not altered. In an embodiment, the targeting domain of a gRNA molecule is configured to position an intronic cleavage event sufficiently far from an intron/exon border, or naturally occurring splice signal, to avoid alteration of the exonic sequence or unwanted splicing events. The gRNA molecule may be a first, second, third and/or fourth gRNA molecule, as described herein.

[0034] In an embodiment, the targeting domain comprises a sequence that is the same as, or differs by no more than 1, 2, 3, 4, or 5 nucleotides from, a targeting domain sequence described herein, e.g., from any one of Tables 1A-1G, Tables 2A-2G, Tables 3A-3G, Tables 4A-4F, Tables 5A-5E, Tables 6A-6G, Tables 7A-7D, Tables 8A-8E, Tables 9A-9G, Tables 10A-10C, Tables 11A-11E, Tables 12A-12G, Tables 13A-13C, Tables 14A-14E, Tables 15A-15G, Tables 16A-16C, or Table 27. In an embodiment, the targeting domain comprises a sequence that is the same as a targeting domain sequence described herein, e.g., from any one of Tables 1A-1G, Tables 2A-2G, Tables 3A-3G, Tables 4A-4F, Tables 5A-5E, Tables 6A-6G, Tables 7A-7D, Tables 8A-8E, Tables 9A-9G, Tables 10A-10C, Tables 11A-11E, Tables 12A-12G, Tables 13A-13C, Tables 14A-14E, Tables 15A-15G, Tables 16A-16C, or Table 27.

[0035] In other embodiments, a HSV-1 target position in the coding region, e.g., the early coding region, of the UL19, UL30, UL48 or UL54 gene is targeted, e.g., for knockout. In an embodiment, the targeting domain comprises a sequence that is the same as, or differs by no more than 1, 2, 3, 4, or 5 nucleotides from, a targeting domain sequence from any one of Tables 1A-1G, Tables 2A-2G, Tables 3A-3G, or Tables 4A-4F.

[0036] In an embodiment, the targeting domain is independently selected from those in Tables 1A-1G. In an embodiment, the targeting domain is independently selected from Table 1A.

[0037] In an embodiment, the targeting domain is independently selected from those in Tables 2A-2G. In an embodiment, the targeting domain is independently selected from Table 2A.

[0038] In an embodiment, the targeting domain is independently selected from those in Tables 3A-3G. In an embodiment, the targeting domain is independently selected from Table 3A.

[0039] In an embodiment, the targeting domain is independently selected from those in Tables 4A-4F. In an embodiment, the targeting domain is independently selected from Table 4A.

[0040] In an embodiment, the targeting domain is independently selected from those in Tables 5A-5E. In an embodiment, the targeting domain is independently selected from Table 5A.

[0041] In an embodiment, the targeting domain is independently selected from those in Tables 6A-6G. In an embodiment, the targeting domain is independently selected from Table 6A.

[0042] In an embodiment, the targeting domain is independently selected from those in Tables 7A-7D. In an embodiment, the targeting domain is independently selected from Table 7A.

[0043] In an embodiment, the targeting domain is independently selected from those in Tables 8A-8E. In an embodiment, the targeting domain is independently selected from Table 8A.

[0044] In an embodiment, the targeting domain is independently selected from those in Tables 9A-9G. In an embodiment, the targeting domain is independently selected from Table 9A.

[0045] In an embodiment, the targeting domain is independently selected from those in Tables 10A-10C. In an embodiment, the targeting domain is independently selected from Table 10A.

[0046] In an embodiment, the targeting domain is independently selected from those in Tables 11A-11E. In an embodiment, the targeting domain is independently selected from Table 11A.

[0047] In an embodiment, the targeting domain is independently selected from those in Tables 12A-12G. In an embodiment, the targeting domain is independently selected from Table 12A.

[0048] In an embodiment, the targeting domain is independently selected from those in Tables 13A-13C. In an embodiment, the targeting domain is independently selected from Table 13A.

[0049] In an embodiment, the targeting domain is independently selected from those in Tables 14A-14E. In an embodiment, the targeting domain is independently selected from Table 14A.

[0050] In an embodiment, the targeting domain is independently selected from those in Tables 15A-15G. In an embodiment, the targeting domain is independently selected from Table 15A.

[0051] In an embodiment, the targeting domain is independently selected from those in Tables 16A-16C. In an embodiment, the targeting domain is independently selected from Table 16A.

[0052] In an embodiment, the targeting domain is independently selected from those in Table 27.

[0053] In an embodiment, when the HSV-1 target position is the UL19 gene coding region, e.g., an early coding region, and more than one gRNA is used to position breaks, e.g., two single stranded breaks or two double stranded breaks, or a combination of single strand and double strand breaks, e.g., to create one or more indels, in the target nucleic acid sequence, the targeting domain of each guide RNA is independently selected from any of Tables 1A-1G, Tables 5A-5E, Tables 6A-6G, or Tables 7A-7D.

[0054] In an embodiment, when the HSV-1 target position is the UL30 gene coding region, e.g., an early coding region, and more than one gRNA is used to position breaks, e.g., two single stranded breaks or two double stranded breaks, or a combination of single strand and double strand breaks, e.g., to create one or more indels, in the target nucleic acid sequence, the targeting domain of each guide RNA is independently selected from any of Tables 2A-2G, Tables 8A-E, Tables 9A-9G, or Tables 10A-10C.

[0055] In an embodiment, when the HSV-1 target position is the UL48 gene coding region, e.g., an early coding region, and more than one gRNA is used to position breaks, e.g., two single stranded breaks or two double stranded breaks, or a combination of single strand and double strand breaks, e.g., to create one or more indels, in the target nucleic acid sequence, the targeting domain of each guide RNA is independently selected from any of Tables 3A-3G, Tables 11A-11E, Tables 12A-12G, or Tables 13A-13C.

[0056] In an embodiment, when the HSV-1 target position is the UL54 gene coding region, e.g., an early coding region, and more than one gRNA is used to position breaks, e.g., two single stranded breaks or two double stranded breaks, or a combination of single strand and double strand breaks, e.g., to create one or more indels, in the target nucleic acid sequence, the targeting domain of each guide RNA is independently selected from any of Tables 4A-4F, Tables 14A-14E, Tables 15A-15G, or Tables 16A-16C.

[0057] In an embodiment, the gRNA, e.g., a gRNA comprising a targeting domain, which is complementary with the UL19, UL30, UL48 or UL54 gene, is a modular gRNA. In other embodiments, the gRNA is a unimolecular or chimeric gRNA.

[0058] In an embodiment, the targeting domain which is complementary with a target domain from the HSV-1 target position in the UL19, UL30, UL48 or UL54 gene is 16 nucleotides or more in length. In an embodiment, the targeting domain is 16 nucleotides in length. In an embodiment, the targeting domain is 17 nucleotides in length. In another embodiment, the targeting domain is 18 nucleotides in length. In still another embodiment, the targeting domain is 19 nucleotides in length. In still another embodiment, the targeting domain is 20 nucleotides in length. In still another embodiment, the targeting domain is 21 nucleotides in length. In still another embodiment, the targeting domain is 22 nucleotides in length. In still another embodiment, the targeting domain is 23 nucleotides in length. In still another embodiment, the targeting domain is 24 nucleotides in length. In still another embodiment, the targeting domain is 25 nucleotides in length. In still another embodiment, the targeting domain is 26 nucleotides in length.

[0059] In an embodiment, the targeting domain comprises 16 nucleotides.

[0060] In an embodiment, the targeting domain comprises 17 nucleotides.

[0061] In an embodiment, the targeting domain comprises 18 nucleotides.

[0062] In an embodiment, the targeting domain comprises 19 nucleotides.

[0063] In an embodiment, the targeting domain comprises 20 nucleotides.

[0064] In an embodiment, the targeting domain comprises 21 nucleotides.

[0065] In an embodiment, the targeting domain comprises 22 nucleotides.

[0066] In an embodiment, the targeting domain comprises 23 nucleotides.

[0067] In an embodiment, the targeting domain comprises 24 nucleotides.

[0068] In an embodiment, the targeting domain comprises 25 nucleotides.

[0069] In an embodiment, the targeting domain comprises 26 nucleotides.

[0070] A gRNA as described herein may comprise from 5′ to 3′: a targeting domain (comprising a “core domain”, and optionally a “secondary domain”); a first complementarity domain; a linking domain; a second complementarity domain; a proximal domain; and a tail domain. In some embodiments, the proximal domain and tail domain are taken together as a single domain.

[0071] In an embodiment, a gRNA comprises a linking domain of no more than 25 nucleotides in length; a proximal and tail domain, that taken together, are at least 20 nucleotides in length; and a targeting domain equal to or greater than 16, 17, 18, 19, 20, 21, 22, 23, 24, 25 or 26 nucleotides in length.

[0072] In another embodiment, a gRNA comprises a linking domain of no more than 25 nucleotides in length; a proximal and tail domain, that taken together, are at least 25 nucleotides in length; and a targeting domain equal to or greater than 16, 17, 18, 19, 20, 21, 22, 23, 24, 25 or 26 nucleotides in length.

[0073] In another embodiment, a gRNA comprises a linking domain of no more than 25 nucleotides in length; a proximal and tail domain, that taken together, are at least 30 nucleotides in length; and a targeting domain equal to or greater than 16, 17, 18, 19, 20, 21, 22, 23, 24, 25 or 26 nucleotides in length.

[0074] In another embodiment, a gRNA comprises a linking domain of no more than 25 nucleotides in length; a proximal and tail domain, that taken together, are at least 40 nucleotides in length; and a targeting domain equal to or greater than 16, 17, 18, 19, 20, 21, 22, 23, 24, 25 or 26 nucleotides in length.

[0075] A cleavage event, e.g., a double strand or single strand break, is generated by a Cas9 molecule. The Cas9 molecule may be an enzymatically active Cas9 (eaCas9) molecule, e.g., an eaCas9 molecule that forms a double strand break in a target nucleic acid or an eaCas9 molecule forms a single strand break in a target nucleic acid (e.g., a nickase molecule).

[0076] In an embodiment, the eaCas9 molecule catalyzes a double strand break.

[0077] In some embodiments, the eaCas9 molecule comprises HNH-like domain cleavage activity but has no, or no significant, N-terminal RuvC-like domain cleavage activity. In this case, the eaCas9 molecule is an HNH-like domain nickase, e.g., the eaCas9 molecule comprises a mutation at D10, e.g., D10A. In other embodiments, the eaCas9 molecule comprises N-terminal RuvC-like domain cleavage activity but has no, or no significant, HNH-like domain cleavage activity. In an embodiment, the eaCas9 molecule is an N-terminal RuvC-like domain nickase, e.g., the eaCas9 molecule comprises a mutation at H840, e.g., H840A. In an embodiment, the eaCas9 molecule is an N-terminal RuvC-like domain nickase, e.g., the eaCas9 molecule comprises a mutation at N863, e.g., N863A.

[0078] In an embodiment, a single strand break is formed in the strand of the target nucleic acid to which the targeting domain of said gRNA is complementary. In another embodiment, a single strand break is formed in the strand of the target nucleic acid other than the strand to which the targeting domain of said gRNA is complementary.

[0079] In another aspect, disclosed herein is a nucleic acid, e.g., an isolated or non-naturally occurring nucleic acid, e.g., DNA, that comprises (a) a sequence that encodes a gRNA molecule comprising a targeting domain that is complementary with a target domain, e.g., with a HSV-1 target position in UL19, UL30, UL48 or UL54 gene as disclosed herein.

[0080] In an embodiment, the nucleic acid encodes a gRNA molecule, e.g., a first gRNA molecule, comprising a targeting domain configured to provide a cleavage event, e.g., a double strand break or a single strand break, sufficiently close to a HSV-1 target position in the UL19, UL30, UL48 or UL54 gene to allow alteration, e.g., alteration associated with NHEJ, of a HSV-1 target position in the UL19, UL30, UL48 or UL54 gene.

[0081] In an embodiment, the nucleic acid encodes a gRNA molecule, e.g., the first gRNA molecule, comprising a targeting domain comprising a sequence that is the same as, or differs by no more than 1, 2, 3, 4, or 5 nucleotides from, a targeting domain sequence from any one of Tables 1A-1G, Tables 2A-2G, Tables 3A-3G, Tables 4A-4F, Tables 5A-5E, Tables 6A-6G, Tables 7A-7D, Tables 8A-8E, Tables 9A-9G, Tables 10A-10C, Tables 11A-11E, Tables 12A-12G, Tables 13A-13C, Tables 14A-14E, Tables 15A-15G, Tables 16A-16C, or Table 27. In an embodiment, the nucleic acid encodes a gRNA molecule comprising a targeting domain is selected from those in Tables 1A-1G, Tables 2A-2G, Tables 3A-3G, Tables 4A-4F, Tables 5A-5E, Tables 6A-6G, Tables 7A-7D, Tables 8A-8E, Tables 9A-9G, Tables 10A-10C, Tables 11A-11E, Tables 12A-12G, Tables 13A-13C, Tables 14A-14E, Tables 15A-15G, Tables 16A-16C, or Table 27.

[0082] In an embodiment, the nucleic acid encodes a modular gRNA, e.g., one or more nucleic acids encode a modular gRNA. In another embodiment, the nucleic acid encodes a chimeric gRNA. The nucleic acid may encode a gRNA, e.g., the first gRNA molecule, comprising a targeting domain comprising 16 nucleotides or more in length. In an embodiment, the nucleic acid encodes a gRNA, e.g., the first gRNA molecule, comprising a targeting domain that is 16 nucleotides in length. In another embodiment, the nucleic acid encodes a gRNA, e.g., the first gRNA molecule, comprising a targeting domain that is 17 nucleotides in length. In yet another embodiment, the nucleic acid encodes a gRNA, e.g., the first gRNA molecule, comprising a targeting domain that is 18 nucleotides in length. In still another embodiment, the nucleic acid encodes a gRNA, e.g., the first gRNA molecule, comprising a targeting domain that is 19 nucleotides in length. In still another embodiment, the nucleic acid encodes a gRNA, e.g., the first gRNA molecule, comprising a targeting domain that is 20 nucleotides in length. In still another embodiment, the nucleic acid encodes a gRNA, e.g., the first gRNA molecule, comprising a targeting domain that is 21 nucleotides in length. In still another embodiment, the nucleic acid encodes a gRNA, e.g., the first gRNA molecule, comprising a targeting domain that is 22 nucleotides in length. In still another embodiment, the nucleic acid encodes a gRNA, e.g., the first gRNA molecule, comprising a targeting domain that is 23 nucleotides in length. In still another embodiment, the nucleic acid encodes a gRNA, e.g., the first gRNA molecule, comprising a targeting domain that is 24 nucleotides in length. In still another embodiment, the nucleic acid encodes a gRNA, e.g., the first gRNA molecule, comprising a targeting domain that is 25 nucleotides in length. In still another embodiment, the nucleic acid encodes a gRNA, e.g., the first gRNA molecule, comprising a targeting domain that is 26 nucleotides in length.

[0083] In an embodiment, the targeting domain comprises 16 nucleotides.

[0084] In an embodiment, the targeting domain comprises 17 nucleotides.

[0085] In an embodiment, the targeting domain comprises 18 nucleotides.

[0086] In an embodiment, the targeting domain comprises 19 nucleotides.

[0087] In an embodiment, the targeting domain comprises 20 nucleotides.

[0088] In an embodiment, the targeting domain comprises 21 nucleotides.

[0089] In an embodiment, the targeting domain comprises 22 nucleotides.

[0090] In an embodiment, the targeting domain comprises 23 nucleotides.

[0091] In an embodiment, the targeting domain comprises 24 nucleotides.

[0092] In an embodiment, the targeting domain comprises 25 nucleotides.

[0093] In an embodiment, the targeting domain comprises 26 nucleotides.

[0094] In an embodiment, a nucleic acid encodes a gRNA comprising from 5′ to 3′: a targeting domain (comprising a “core domain”, and optionally a “secondary domain”); a first complementarity domain; a linking domain; a second complementarity domain; a proximal domain; and a tail domain. In some embodiments, the proximal domain and tail domain are taken together as a single domain.

[0095] In an embodiment, a nucleic acid encodes a gRNA e.g., the first gRNA molecule, comprising a linking domain of no more than 25 nucleotides in length; a proximal and tail domain, that taken together, are at least 20 nucleotides in length; and a targeting domain equal to or greater than 16, 17, 18, 19, 20, 21, 22, 23, 24, 25 or 26 nucleotides in length.

[0096] In an embodiment, a nucleic acid encodes a gRNA e.g., the first gRNA molecule, comprising a linking domain of no more than 25 nucleotides in length; a proximal and tail domain, that taken together, are at least 25 nucleotides in length; and a targeting domain equal to or greater than 16, 17, 18, 19, 20, 21, 22, 23, 24, 25 or 26 nucleotides in length.

[0097] In an embodiment, a nucleic acid encodes a gRNA e.g., the first gRNA molecule, comprising a linking domain of no more than 25 nucleotides in length; a proximal and tail domain, that taken together, are at least 30 nucleotides in length; and a targeting domain equal to or greater than 16, 17, 18, 19, 20, 21, 22, 23, 24, 25 or 26 nucleotides in length.

[0098] In an embodiment, a nucleic acid encodes a gRNA comprising e.g., the first gRNA molecule, a linking domain of no more than 25 nucleotides in length; a proximal and tail domain, that taken together, are at least 40 nucleotides in length; and a targeting domain equal to or greater than 16, 17, 18, 19, 20, 21, 22, 23, 24, 25 or 26 nucleotides in length.

[0099] In an embodiment, a nucleic acid comprises (a) a sequence that encodes a gRNA molecule, e.g., the first gRNA molecule, comprising a targeting domain that is complementary with a target domain in the UL19, UL30, UL48 or UL54 gene as disclosed herein, and further comprising (b) a sequence that encodes a Cas9 molecule.

[0100] The Cas9 molecule may be a nickase molecule, an enzymatically activating Cas9 (eaCas9) molecule, e.g., an eaCas9 molecule that forms a double strand break in a target nucleic acid and/or an eaCas9 molecule that forms a single strand break in a target nucleic acid. In an embodiment, a single strand break is formed in the strand of the target nucleic acid to which the targeting domain of said gRNA is complementary. In another embodiment, a single strand break is formed in the strand of the target nucleic acid other than the strand to which to which the targeting domain of said gRNA is complementary.

[0101] In an embodiment, the eaCas9 molecule catalyzes a double strand break.

[0102] In an embodiment, the eaCas9 molecule comprises HNH-like domain cleavage activity but has no, or no significant, N-terminal RuvC-like domain cleavage activity. In another embodiment, the said eaCas9 molecule is an HNH-like domain nickase, e.g., the eaCas9 molecule comprises a mutation at D10, e.g., D10A. In another embodiment, the eaCas9 molecule comprises N-terminal RuvC-like domain cleavage activity but has no, or no significant, HNH-like domain cleavage activity. In another embodiment, the eaCas9 molecule is an N-terminal RuvC-like domain nickase, e.g., the eaCas9 molecule comprises a mutation at H840, e.g., H840A. In another embodiment, the eaCas9 molecule is an N-terminal RuvC-like domain nickase, e.g., the eaCas9 molecule comprises a mutation at N863, e.g., N863A.

[0103] A nucleic acid disclosed herein may comprise (a) a sequence that encodes a gRNA molecule comprising a targeting domain that is complementary with a target domain in the CCR5 gene as disclosed herein; (b) a sequence that encodes a Cas9 molecule.

[0104] A nucleic acid disclosed herein may comprise (a) a sequence that encodes a gRNA molecule comprising a targeting domain that is complementary with a target domain in the UL19, UL30, UL48 or UL54 gene as disclosed herein; (b) a sequence that encodes a Cas9 molecule; and further may comprise (c)(i) a sequence that encodes a second gRNA molecule described herein having a targeting domain that is complementary to a second target domain of the UL19, UL30, UL48 or UL54 gene, and optionally, (c)(ii) a sequence that encodes a third gRNA molecule described herein having a targeting domain that is complementary to a third target domain of the UL19, UL30, UL48 or UL54 gene; and optionally, (c)(iii) a sequence that encodes a fourth gRNA molecule described herein having a targeting domain that is complementary to a fourth target domain of the UL19, UL30, UL48 or UL54 gene.

[0105] In an embodiment, a nucleic acid encodes a second gRNA molecule comprising a targeting domain configured to provide a cleavage event, e.g., a double strand break or a single strand break, sufficiently close to a HSV-1 target position in the UL19, UL30, UL48 or UL54 gene, to allow alteration, e.g., alteration associated with NHEJ, of a HSV-1 target position in the UL19, UL30, UL48 or UL54 gene, either alone or in combination with the break positioned by said first gRNA molecule.

[0106] In an embodiment, a nucleic acid encodes a third gRNA molecule comprising a targeting domain configured to provide a cleavage event, e.g., a double strand break or a single strand break, sufficiently close to a HSV-1 target position in the UL19, UL30, UL48 or UL54 gene to allow alteration, e.g., alteration associated with NHEJ, of a HSV-1 target position in the UL19, UL30, UL48 or UL54 gene, either alone or in combination with the break positioned by the first and/or second gRNA molecule.

[0107] In an embodiment, a nucleic acid encodes a fourth gRNA molecule comprising a targeting domain configured to provide a cleavage event, e.g., a double strand break or a single strand break, sufficiently close to a HSV-1 target position in the UL19, UL30, UL48 or UL54 gene to allow alteration, e.g., alteration associated with NHEJ, of a HSV-1 target position in the UL19, UL30, UL48 or UL54 gene, either alone or in combination with the break positioned by the first gRNA molecule, the second gRNA molecule and/or the third gRNA molecule.

[0108] In an embodiment, the nucleic acid encodes a second gRNA molecule. The second gRNA is selected to target the same HSV-1 target position as the first gRNA molecule. Optionally, the nucleic acid may encode a third gRNA, and further optionally, the nucleic acid may encode a fourth gRNA molecule. The third gRNA molecule and the fourth gRNA molecule are selected to target the same HSV-1 target position as the first and second gRNA molecules.

[0109] In an embodiment, the nucleic acid encodes a second gRNA molecule comprising a targeting domain comprising a sequence that is the same as, or differs by no more than 1, 2, 3, 4, or 5 nucleotides from, a targeting domain sequence from one of Tables 1A-1G, Tables 2A-2G, Tables 3A-3G, Tables 4A-4F, Tables 5A-5E, Tables 6A-6G, Tables 7A-7D, Tables 8A-8E, Tables 9A-9G, Tables 10A-10C, Tables 11A-11E, Tables 12A-12G, Tables 13A-13C, Tables 14A-14E, Tables 15A-15G, Tables 16A-16C, or Table 27. In an embodiment, the nucleic acid encodes a second gRNA molecule comprising a targeting domain selected from those in Tables 1A-1G, Tables 2A-2G, Tables 3A-3G, Tables 4A-4F, Tables 5A-5E, Tables 6A-6G, Tables 7A-7D, Tables 8A-8E, Tables 9A-9G, Tables 10A-10C, Tables 11A-11E, Tables 12A-12G, Tables 13A-13C, Tables 14A-14E, Tables 15A-15G, Tables 16A-16C, or Table 27. In an embodiment, when a third or fourth gRNA molecule are present, the third and fourth gRNA molecules may independently comprise a targeting domain comprising a sequence that is the same as, or differs by no more than 1, 2, 3, 4, or 5 nucleotides from, a targeting domain sequence from one of Tables 1A-1G, Tables 2A-2G, Tables 3A-3G, Tables 4A-4F, Tables 5A-5E, Tables 6A-6G, Tables 7A-7D, Tables 8A-8E, Tables 9A-9G, Tables 10A-10C, Tables 11A-11E, Tables 12A-12G, Tables 13A-13C, Tables 14A-14E, Tables 15A-15G, Tables 16A-16C, or Table 27. In a further embodiment, when a third or fourth gRNA molecule are present, the third and fourth gRNA molecules may independently comprise a targeting domain selected from those in Tables 1A-1G, Tables 2A-2G, Tables 3A-3G, Tables 4A-4F, Tables 5A-5E, Tables 6A-6G, Tables 7A-7D, Tables 8A-8E, Tables 9A-9G, Tables 10A-10C, Tables 11A-11E, Tables 12A-12G, Tables 13A-13C, Tables 14A-14E, Tables 15A-15G, Tables 16A-16C, Table 27.

[0110] In an embodiment, the nucleic acid encodes a second gRNA which is a modular gRNA, e.g., wherein one or more nucleic acid molecules encode a modular gRNA. In another embodiment, the nucleic acid encoding a second gRNA is a chimeric gRNA. In another embodiment, when a nucleic acid encodes a third or fourth gRNA, the third and fourth gRNA may be a modular gRNA or a chimeric gRNA. When multiple gRNAs are used, any combination of modular or chimeric gRNAs may be used.

[0111] A nucleic acid may encode a second, a third, and/or a fourth gRNA, each independently, comprising a targeting domain comprising 16 nucleotides or more in length. In an embodiment, the nucleic acid encodes a second gRNA comprising a targeting domain that is 16 nucleotides in length. In another embodiment, the nucleic acid encodes a second gRNA comprising a targeting domain that is 17 nucleotides in length. In another embodiment, the nucleic acid encodes a second gRNA comprising a targeting domain that is 18 nucleotides in length. In still another embodiment, the nucleic acid encodes a second gRNA comprising a targeting domain that is 19 nucleotides in length. In still another embodiment, the nucleic acid encodes a second gRNA comprising a targeting domain that is 20 nucleotides in length. In still another embodiment, the nucleic acid encodes a second gRNA comprising a targeting domain that is 21 nucleotides in length. In still another embodiment, the nucleic acid encodes a second gRNA comprising a targeting domain that is 22 nucleotides in length. In still another embodiment, the nucleic acid encodes a second gRNA comprising a targeting domain that is 23 nucleotides in length. In still another embodiment, the nucleic acid encodes a second gRNA comprising a targeting domain that is 24 nucleotides in length. In still another embodiment, the nucleic acid encodes a second gRNA comprising a targeting domain that is 25 nucleotides in length. In still another embodiment, the nucleic acid encodes a second gRNA comprising a targeting domain that is 26 nucleotides in length.

[0112] In an embodiment, the targeting domain comprises 16 nucleotides.

[0113] In an embodiment, the targeting domain comprises 17 nucleotides.

[0114] In an embodiment, the targeting domain comprises 18 nucleotides.

[0115] In an embodiment, the targeting domain comprises 19 nucleotides.

[0116] In an embodiment, the targeting domain comprises 20 nucleotides.

[0117] In an embodiment, the targeting domain comprises 21 nucleotides.

[0118] In an embodiment, the targeting domain comprises 22 nucleotides.

[0119] In an embodiment, the targeting domain comprises 23 nucleotides.

[0120] In an embodiment, the targeting domain comprises 24 nucleotides.

[0121] In an embodiment, the targeting domain comprises 25 nucleotides.

[0122] In an embodiment, the targeting domain comprises 26 nucleotides.

[0123] In an embodiment, a nucleic acid encodes a second, a third, and/or a fourth gRNA, each independently, comprising from 5′ to 3′: a targeting domain (comprising a “core domain”, and optionally a “secondary domain”); a first complementarity domain; a linking domain; a second complementarity domain; a proximal domain; and a tail domain. In some embodiments, the proximal domain and tail domain are taken together as a single domain.

[0124] In an embodiment, a nucleic acid encodes a second, a third, and/or a fourth gRNA comprising a linking domain of no more than 25 nucleotides in length; a proximal and tail domain, that taken together, are at least 20 nucleotides in length; and a targeting domain equal to or greater than 16, 17, 18, 19, 20, 21, 22, 23, 24, 25 or 26 nucleotides in length.

[0125] In an embodiment, a nucleic acid encodes a second, a third, and/or a fourth gRNA comprising a linking domain of no more than 25 nucleotides in length; a proximal and tail domain, that taken together, are at least 25 nucleotides in length; and a targeting domain equal to or greater than 16, 17, 18, 19, 20, 21, 22, 23, 24, 25 or 26 nucleotides in length.

[0126] In an embodiment, a nucleic acid encodes a second, a third, and/or a fourth gRNA comprising a linking domain of no more than 25 nucleotides in length; a proximal and tail domain, that taken together, are at least 30 nucleotides in length; and a targeting domain equal to or greater than 16, 17, 18, 19, 20, 21, 22, 23, 24, 25 or 26 nucleotides in length.

[0127] In an embodiment, a nucleic acid encodes a second, a third, and/or a fourth gRNA comprising a linking domain of no more than 25 nucleotides in length; a proximal and tail domain, that taken together, are at least 40 nucleotides in length; and a targeting domain equal to or greater than 16, 17, 18, 19, 20, 21, 22, 23, 24, 25 or 26 nucleotides in length.

[0128] In an embodiment, a nucleic acid encodes (a) a sequence that encodes a gRNA molecule comprising a targeting domain that is complementary with a target domain in the UL19, UL30, UL48 or UL54 gene, as disclosed herein, and (b) a sequence that encodes a Cas9 molecule, e.g., a Cas9 molecule described herein. In an embodiment, (a) and (b) are present on the same nucleic acid molecule, e.g., the same vector, e.g., the same viral vector, e.g., the same adeno-associated virus (AAV) vector. In an embodiment, the nucleic acid molecule is an AAV vector. Exemplary AAV vectors that may be used in any of the described compositions and methods include an AAV2 vector, a modified AAV2 vector, an AAV3 vector, a modified AAV3 vector, an AAV6 vector, a modified AAV6 vector, an AAV8 vector and an AAV9 vector.

[0129] In another embodiment, (a) is present on a first nucleic acid molecule, e.g. a first vector, e.g., a first viral vector, e.g., a first AAV vector; and (b) is present on a second nucleic acid molecule, e.g., a second vector, e.g., a second vector, e.g., a second AAV vector. The first and second nucleic acid molecules may be AAV vectors.

[0130] In another embodiment, a nucleic acid encodes (a) a sequence that encodes a gRNA molecule comprising a targeting domain that is complementary with a target domain in the UL19, UL30, UL48 or UL54 gene as disclosed herein, and (b) a sequence that encodes a Cas9 molecule, e.g., a Cas9 molecule described herein; and further comprises (c)(i) a sequence that encodes a second gRNA molecule as described herein, and optionally (c)(ii) a sequence that encodes a third gRNA molecule described herein having a targeting domain that is complementary to a third target domain of the UL19, UL30, UL48 or UL54 gene; and optionally, (c)(iii) a sequence that encodes a fourth gRNA molecule described herein having a targeting domain that is complementary to a fourth target domain of the UL19, UL30, UL48 or UL54 gene. In an embodiment, the nucleic acid comprises (a), (b) and (c)(i). In an embodiment, the nucleic acid comprises (a), (b), (c)(i) and (c)(ii). In an embodiment, the nucleic acid comprises (a), (b), (c)(i), (c)(ii) and (c)(iii). Each of (a) and (c)(i) may be present on the same nucleic acid molecule, e.g., the same vector, e.g., the same viral vector, e.g., the same adeno-associated virus (AAV) vector. In an embodiment, the nucleic acid molecule is an AAV vector.

[0131] In another embodiment, (a) and (c)(i) are on different vectors. For example, (a) may be present on a first nucleic acid molecule, e.g. a first vector, e.g., a first viral vector, e.g., a first AAV vector; and (c)(i) may be present on a second nucleic acid molecule, e.g., a second vector, e.g., a second vector, e.g., a second AAV vector. In an embodiment, the first and second nucleic acid molecules are AAV vectors.

[0132] In another embodiment, each of (a), (b), and (c)(i) are present on the same nucleic acid molecule, e.g., the same vector, e.g., the same viral vector, e.g., an AAV vector. In an embodiment, the nucleic acid molecule is an AAV vector. In an alternate embodiment, one of (a), (b), and (c)(i) is encoded on a first nucleic acid molecule, e.g., a first vector, e.g., a first viral vector, e.g., a first AAV vector; and a second and third of (a), (b), and (c)(i) is encoded on a second nucleic acid molecule, e.g., a second vector, e.g., a second vector, e.g., a second AAV vector. The first and second nucleic acid molecule may be AAV vectors.

[0133] In an embodiment, (a) is present on a first nucleic acid molecule, e.g., a first vector, e.g., a first viral vector, a first AAV vector; and (b) and (c)(i) are present on a second nucleic acid molecule, e.g., a second vector, e.g., a second vector, e.g., a second AAV vector. The first and second nucleic acid molecule may be AAV vectors.

[0134] In another embodiment, (b) is present on a first nucleic acid molecule, e.g., a first vector, e.g., a first viral vector, e.g., a first AAV vector; and (a) and (c)(i) are present on a second nucleic acid molecule, e.g., a second vector, e.g., a second vector, e.g., a second AAV vector. The first and second nucleic acid molecule may be AAV vectors.

[0135] In another embodiment, (c)(i) is present on a first nucleic acid molecule, e.g., a first vector, e.g., a first viral vector, e.g., a first AAV vector; and (b) and (a) are present on a second nucleic acid molecule, e.g., a second vector, e.g., a second vector, e.g., a second AAV vector. The first and second nucleic acid molecule may be AAV vectors.

[0136] In another embodiment, each of (a), (b) and (c)(i) are present on different nucleic acid molecules, e.g., different vectors, e.g., different viral vectors, e.g., different AAV vector. For example, (a) may be on a first nucleic acid molecule, (b) on a second nucleic acid molecule, and (c)(i) on a third nucleic acid molecule. The first, second and third nucleic acid molecule may be AAV vectors.

[0137] In another embodiment, when a third and/or fourth gRNA molecule are present, each of (a), (b), (c)(i), (c)(ii) and (c)(iii) may be present on the same nucleic acid molecule, e.g., the same vector, e.g., the same viral vector, e.g., an AAV vector. In an embodiment, the nucleic acid molecule is an AAV vector. In an alternate embodiment, each of (a), (b), (c)(i), (c)(ii) and (c)(iii) may be present on the different nucleic acid molecules, e.g., different vectors, e.g., the different viral vectors, e.g., different AAV vectors. In a further embodiment, each of (a), (b), (c)(i), (c) (ii) and (c)(iii) may be present on more than one nucleic acid molecule, but fewer than five nucleic acid molecules, e.g., AAV vectors.

[0138] The nucleic acids described herein may comprise a promoter operably linked to the sequence that encodes the gRNA molecule of (a), e.g., a promoter described herein. The nucleic acid may further comprise a second promoter operably linked to the sequence that encodes the second, third and/or fourth gRNA molecule of (c), e.g., a promoter described herein. The promoter and second promoter differ from one another. In some embodiments, the promoter and second promoter are the same.

[0139] The nucleic acids described herein may further comprise a promoter operably linked to the sequence that encodes the Cas9 molecule of (b), e.g., a promoter described herein.

[0140] In another aspect, disclosed herein is a composition comprising (a) a gRNA molecule comprising a targeting domain that is complementary with a target domain in the UL19, UL30, UL48 or UL54 gene, as described herein. The composition of (a) may further comprise (b) a Cas9 molecule, e.g., a Cas9 molecule as described herein. A composition of (a) and (b) may further comprise (c) a second, third and/or fourth gRNA molecule, e.g., a second, third and/or fourth gRNA molecule described herein. In an embodiment, the composition is a pharmaceutical composition. The compositions described herein, e.g., pharmaceutical compositions described herein, can be used in the treatment or prevention of HSV-1 in a subject, e.g., in accordance with a method disclosed herein.

[0141] In another aspect, disclosed herein is a method of altering a cell, e.g., altering the structure, e.g., altering the sequence, of a target nucleic acid of a cell, comprising contacting said cell with: (a) a gRNA that targets the UL19, UL30, UL48 or UL54 gene, e.g., a gRNA as described herein; (b) a Cas9 molecule, e.g., a Cas9 molecule as described herein; and optionally, (c) a second, third and/or fourth gRNA that targets UL19, UL30, UL48 or UL54 gene, e.g., a second, third and/or fourth gRNA, as described herein.

[0142] In an embodiment, the method comprises contacting said cell with (a) and (b).

[0143] In an embodiment, the method comprises contacting said cell with (a), (b), and (c).

[0144] The targeting domain of the gRNA of (a) and optionally (c) may be selected from any of Tables 1A-1G, Tables 2A-2G, Tables 3A-3G, Tables 4A-4F, Tables 5A-5E, Tables 6A-6G, Tables 7A-7D, Tables 8A-8E, Tables 9A-9G, Tables 10A-10C, Tables 11A-11E, Tables 12A-12G, Tables 13A-13C, Tables 14A-14E, Tables 15A-15G, Tables 16A-16C, or Table 27, or a targeting domain of a gRNA that differs by no more than 1, 2, 3, 4, or 5 nucleotides from, a targeting domain sequence from any of Tables 1A-1G, Tables 2A-2G, Tables 3A-3G, Tables 4A-4F, Tables 5A-5E, Tables 6A-6G, Tables 7A-7D, Tables 8A-8E, Tables 9A-9G, Tables 10A-10C, Tables 11A-11E, Tables 12A-12G, Tables 13A-13C, Tables 14A-14E, Tables 15A-15G, Tables 16A-16C, or Table 27.

[0145] In an embodiment, the method comprises contacting a cell from a subject suffering from or likely to develop HSV-1. The cell may be from a subject that would benefit from having a mutation at a HSV-1 target position.

[0146] In an embodiment, the contacting step may be performed in vivo.

[0147] In an embodiment, the method of altering a cell as described herein comprises acquiring knowledge of the sequence of a HSV-1 target position in said cell, prior to the contacting step. Acquiring knowledge of the sequence of a HSV-1 target position in the cell may be by sequencing one or more of the UL19, UL30, UL48 and/or UL54 gene, or a portion of the UL19, UL30, UL48 and/or UL54 gene.

[0148] In an embodiment, the contacting step of the method comprises contacting the cell with a nucleic acid, e.g., a vector, e.g., an AAV vector, that expresses at least one of (a), (b), and (c). In an embodiment, the contacting step of the method comprises contacting the cell with a nucleic acid, e.g., a vector, e.g., an AAV vector, that expresses each of (a), (b), and (c). In another embodiment, the contacting step of the method comprises delivering to the cell a Cas9 molecule of (b) and a nucleic acid which encodes a gRNA of (a) and optionally, a second gRNA (c)(i) and further optionally, a third gRNA (c)(ii) and/or fourth gRNA (c)(iii).

[0149] In an embodiment, the contacting step of the method comprises contacting the cell with a nucleic acid, e.g., a vector, e.g., an AAV vector, that expresses at least one of (a), (b), (c) and (d). In some embodiments, the contacting step of the method comprises contacting the cell with a nucleic acid, e.g., a vector, e.g., an AAV vector, that expresses each of (a), (b), and (c). In another embodiment, the contacting step of the method comprises delivering to the cell a Cas9 molecule of (b), a nucleic acid which encodes a gRNA of (a) and a template nucleic acid of (d), and optionally, a second gRNA (c)(i) and further optionally, a third gRNA (c)(ii) and/or fourth gRNA (c)(iii).

[0150] In an embodiment, contacting comprises contacting the cell with a nucleic acid, e.g., a vector, e.g., an AAV vector, e.g., an AAV2 vector, a modified AAV2 vector, an AAV3 vector, a modified AAV3 vector, an AAV6 vector, a modified AAV6 vector, an AAV8 vector or an AAV9 vector, as described herein.

[0151] In an embodiment, contacting comprises delivering to the cell a Cas9 molecule of (b), as a protein or an mRNA, and a nucleic acid which encodes a gRNA of (a) and optionally a second, third and/or fourth gRNA of (c).

[0152] In an embodiment, contacting comprises delivering to the cell a Cas9 molecule of (b), as a protein or an mRNA, said gRNA of (a), as an RNA, and optionally said second, third and/or fourth gRNA of (c), as an RNA.

[0153] In an embodiment, contacting comprises delivering to the cell a gRNA of (a) as an RNA, optionally the second, third and/or fourth gRNA of (c) as an RNA, and a nucleic acid that encodes the Cas9 molecule of (b).

[0154] In another aspect, disclosed herein is a method of treating a subject suffering from or likely to develop HSV-1, e.g., altering the structure, e.g., sequence, of a target nucleic acid of the subject, comprising contacting the subject (or a cell from the subject) with:
[0155] (a) a gRNA that targets the UL19, UL30, UL48 or UL54 gene, e.g., a gRNA disclosed herein;
[0156] (b) a Cas9 molecule, e.g., a Cas9 molecule disclosed herein; and optionally, (c)(i) a second gRNA that targets the UL19, UL30, UL48 or UL54 gene, e.g., a second gRNA disclosed herein, and further optionally, (c)(ii) a third gRNA, and still further optionally, (c)(iii) a fourth gRNA that target the UL19, UL30, UL48 or UL54 gene, e.g., a third and fourth gRNA disclosed herein.

[0157] In some embodiments, contacting comprises contacting with (a) and (b).

[0158] In some embodiments, contacting comprises contacting with (a), (b), and (c)(i).

[0159] In some embodiments, contacting comprises contacting with (a), (b), (c)(i) and (c)(ii).

[0160] In some embodiments, contacting comprises contacting with (a), (b), (c)(i), (c)(ii) and (c)(iii).

[0161] The targeting domain of the gRNA of (a) or (c) (e.g., (c)(i), (c)(ii), or (c)(iii)) may be selected from any of Tables 1A-1G, Tables 2A-2G, Tables 3A-3G, Tables 4A-4F, Tables 5A-5E, Tables 6A-6G, Tables 7A-7D, Tables 8A-8E, Tables 9A-9G, Tables 10A-10C, Tables 11A-11E, Tables 12A-12G, Tables 13A-13C, Tables 14A-14E, Tables 15A-15G, Tables 16A-16C, or Table 27, or a targeting domain of a gRNA that differs by no more than 1, 2, 3, 4, or 5 nucleotides from, a targeting domain sequence from any of Tables 1A-1G, Tables 2A-2G, Tables 3A-3G, Tables 4A-4F, Tables 5A-5E, Tables 6A-6G, Tables 7A-7D, Tables 8A-8E, Tables 9A-9G, Tables 10A-10C, Tables 11A-11E, Tables 12A-12G, Tables 13A-13C, Tables 14A-14E, Tables 15A-15G, Tables 16A-16C, or Table 27.

[0162] In an embodiment, the method comprises acquiring knowledge of the sequence at a HSV-1 target position in said subject.

[0163] In an embodiment, the method comprises acquiring knowledge of the sequence at a HSV-1 target position in said subject by sequencing one or more of the UL19, UL30, UL48 and/or UL54 gene(s) or a portion of the UL19, UL30, UL48 and/or UL54 gene.

[0164] In an embodiment, the method comprises introducing a mutation at a HSV-1 target position.

[0165] In an embodiment, the method comprises introducing a mutation at a HSV-1 target position by NHEJ.

[0166] In an embodiment, a cell of the subject is contacted is in vivo with (a), (b) and optionally (c)(i), further optionally (c)(ii), and still further optionally (c)(iii).

[0167] In an embodiment, the cell of the subject is contacted in vivo by intravenous delivery of (a), (b), and optionally (c)(i), further optionally (c)(ii), and still further optionally (c)(iii).

[0168] In an embodiment, the contacting step comprises contacting the subject with a nucleic acid, e.g., a vector, e.g., an AAV vector, described herein, e.g., a nucleic acid that encodes at least one of (a), (b), and optionally (c)(i), further optionally (c)(ii), and still further optionally (c)(iii).

[0169] In an embodiment, the contacting step comprises delivering to said subject said Cas9 molecule of (b), as a protein or mRNA, and a nucleic acid which encodes (a), and optionally (c)(i), further optionally (c)(ii), and still further optionally (c)(iii).

[0170] In an embodiment, the contacting step comprises delivering to the subject the Cas9 molecule of (b), as a protein or mRNA, the gRNA of (a), as an RNA, and optionally the second gRNA of (c)(i), further optionally said third gRNA of (c)(ii), and still further optionally said fourth gRNA of (c)(iii), as an RNA.

[0171] In an embodiment, the contacting step comprises delivering to the subject the gRNA of (a), as an RNA, optionally said second gRNA of (c)(i), further optionally said third gRNA of (c)(ii), and still further optionally said fourth gRNA of (c)(iii), as an RNA, a nucleic acid that encodes the Cas9 molecule of (b).

[0172] When the method comprises (1) introducing a mutation at a HSV-1 target position by NHEJ or (2) knocking down expression of one or more of the UL19, UL30, UL48 and/or UL54 gene(s), e.g., by targeting the promoter region, a Cas9 molecule of (b) and at least one guide RNA, e.g., a guide RNA of (a) are included in the contacting step.

[0173] In an embodiment, a cell of the subject is contacted is in vivo with (a), (b) and optionally (c)(i), further optionally (c)(ii), and still further optionally (c)(iii). In an embodiment, the cell of the subject is contacted in vivo by intravenous delivery of (a), (b) and optionally (c)(i), further optionally (c)(ii), and still further optionally (c)(iii).

[0174] In an embodiment, the contacting step comprises contacting the subject with a nucleic acid, e.g., a vector, e.g., an AAV vector, described herein, e.g., a nucleic acid that encodes at least one of (a), (b), and optionally (c)(i), further optionally (c)(ii), and still further optionally (c)(iii).

[0175] In an embodiment, the contacting step comprises delivering to said subject said Cas9 molecule of (b), as a protein or mRNA, and a nucleic acid which encodes (a) and optionally (c)(i), further optionally (c)(ii), and still further optionally (c)(iii).

[0176] In an embodiment, the contacting step comprises delivering to the subject the Cas9 molecule of (b), as a protein or mRNA, the gRNA of (a), as an RNA, and optionally the second gRNA of (c)(i), further optionally said third gRNA of (c)(ii), and still further optionally said fourth gRNA of (c)(iii), as an RNA.

[0177] In an embodiment, the contacting step comprises delivering to the subject the gRNA of (a), as an RNA, optionally said second gRNA of (c)(i), further optionally said third gRNA of (c)(ii), and still further optionally said fourth gRNA of (c)(iii), as an RNA, and a nucleic acid that encodes the Cas9 molecule of (b).

[0178] In another aspect, disclosed herein is a reaction mixture comprising a gRNA molecule, a nucleic acid, or a composition described herein, and a cell, e.g., a cell from a subject having, or likely to develop HSV-1, or a subject which would benefit from a mutation at a HSV-1 target position.

[0179] In another aspect, disclosed herein is a kit comprising, (a) a gRNA molecule described herein, or nucleic acid that encodes the gRNA, and one or more of the following:
[0180] (b) a Cas9 molecule, e.g., a Cas9 molecule described herein, or a nucleic acid or mRNA that encodes the Cas9;
[0181] (c)(i) a second gRNA molecule, e.g., a second gRNA molecule described herein or a nucleic acid that encodes (c)(i);
[0182] (c)(ii) a third gRNA molecule, e.g., a second gRNA molecule described herein or a nucleic acid that encodes (c)(ii);
[0183] (c)(iii) a fourth gRNA molecule, e.g., a second gRNA molecule described herein or a nucleic acid that encodes (c)(iii).

[0184] In an embodiment, the kit comprises nucleic acid, e.g., an AAV vector, that encodes one or more of (a), (b), (c)(i), (c)(ii), and (c)(iii).

[0185] In yet another aspect, disclosed herein is a gRNA molecule, e.g., a gRNA molecule described herein, for use in treating, or delaying the onset or progression of HSV-1 infection in a subject, e.g., in accordance with a method of treating, or delaying the onset or progression of HSV-1 infection as described herein.

[0186] In an embodiment, the gRNA molecule is used in combination with a Cas9 molecule, e.g., a Cas9 molecule described herein. Additionally or alternatively, in an embodiment, the gRNA molecule is used in combination with a second, third and/or fourth gRNA molecule, e.g., a second, third and/or fourth gRNA molecule described herein.

[0187] In still another aspect, disclosed herein is use of a gRNA molecule, e.g., a gRNA molecule described herein, in the manufacture of a medicament for treating, or delaying the onset or progression of HSV-1 in a subject, e.g., in accordance with a method of treating, or delaying the onset or progression of HSV-1 as described herein.

[0188] In an embodiment, the medicament comprises a Cas9 molecule, e.g., a Cas9 molecule described herein. Additionally or alternatively, in an embodiment, the medicament comprises a second, third and/or fourth gRNA molecule, e.g., a second, third and/or fourth gRNA molecule described herein.

[0189] The gRNA molecules and methods, as disclosed herein, can be used in combination with a governing gRNA molecule. As used herein, a governing gRNA molecule refers to a gRNA molecule comprising a targeting domain which is complementary to a target domain on a nucleic acid that encodes a component of the CRISPR/Cas system introduced into a cell or subject. For example, the methods described herein can further include contacting a cell or subject with a governing gRNA molecule or a nucleic acid encoding a governing molecule. In an embodiment, the governing gRNA molecule targets a nucleic acid that encodes a Cas9 molecule or a nucleic acid that encodes a target gene gRNA molecule. In an embodiment, the governing gRNA comprises a targeting domain that is complementary to a target domain in a sequence that encodes a Cas9 component, e.g., a Cas9 molecule or target gene gRNA molecule. In an embodiment, the target domain is designed with, or has, minimal homology to other nucleic acid sequences in the cell, e.g., to minimize off-target cleavage. For example, the targeting domain on the governing gRNA can be selected to reduce or minimize off-target effects. In an embodiment, a target domain for a governing gRNA can be disposed in the control or coding region of a Cas9 molecule or disposed between a control region and a transcribed region. In an embodiment, a target domain for a governing gRNA can be disposed in the control or coding region of a target gene gRNA molecule or disposed between a control region and a transcribed region for a target gene gRNA. While not wishing to be bound by theory, in an embodiment, it is believed that altering, e.g., inactivating, a nucleic acid that encodes a Cas9 molecule or a nucleic acid that encodes a target gene gRNA molecule can be effected by cleavage of the targeted nucleic acid sequence or by binding of a Cas9 molecule/governing gRNA molecule complex to the targeted nucleic acid sequence.

[0190] The compositions, reaction mixtures and kits, as disclosed herein, can also include a governing gRNA molecule, e.g., a governing gRNA molecule disclosed herein.

[0191] Unless otherwise defined, all technical and scientific terms used herein have the same meaning as commonly understood by one of ordinary skill in the art to which this invention belongs. Although methods and materials similar or equivalent to those described herein can be used in the practice or testing of the present invention, suitable methods and materials are described below. All publications, patent applications, patents, and other references mentioned herein are incorporated by reference in their entirety. In addition, the materials, methods, and examples are illustrative only and not intended to be limiting.

[0192] Headings, including numeric and alphabetical headings and subheadings, are for organization and presentation and are not intended to be limiting.

[0193] Other features and advantages of the invention will be apparent from the detailed description, drawings, and from the claims.

### BRIEF DESCRIPTION OF THE DRAWINGS

[0194] FIGS. 1A-1I are representations of several exemplary gRNAs.

[0195] FIG. 1A depicts a modular gRNA molecule derived in part (or modeled on a sequence in part) from Streptococcus pyogenes (S. pyogenes) as a duplexed structure (SEQ ID NOS: 42 and 43, respectively, in order of appearance);

[0196] FIG. 1B depicts a unimolecular (or chimeric) gRNA molecule derived in part from S. pyogenes as a duplexed structure (SEQ ID NO: 44);

[0197] FIG. 1C depicts a unimolecular gRNA molecule derived in part from S. pyogenes as a duplexed structure (SEQ ID NO: 45);

[0198] FIG. 1D depicts a unimolecular gRNA molecule derived in part from S. pyogenes as a duplexed structure (SEQ ID NO: 46);

[0199] FIG. 1E depicts a unimolecular gRNA molecule derived in part from S. pyogenes as a duplexed structure (SEQ ID NO: 47);

[0200] FIG. 1F depicts a modular gRNA molecule derived in part from Streptococcus thermophilus (S. thermophilus) as a duplexed structure (SEQ ID NOS: 48 and 49, respectively, in order of appearance);

[0201] FIG. 1G depicts an alignment of modular gRNA molecules of S. pyogenes and S. thermophilus (SEQ ID NOS: 50-53, respectively, in order of appearance).

[0202] FIGS. 1H-1I depicts additional exemplary structures of unimolecular gRNA molecules. FIG. 1H shows an exemplary structure of a unimolecular gRNA molecule derived in part from S. pyogenes as a duplexed structure (SEQ ID NO: 45). FIG. 1I shows an exemplary structure of a unimolecular gRNA molecule derived in part from S. aureus as a duplexed structure (SEQ ID NO: 40).

[0203] FIGS. 2A-2G depict an alignment of Cas9 sequences from Chylinski et al. (RNA Biol. 2013; 10(5): 726-737). The N-terminal RuvC-like domain is boxed and indicated with a “Y”. The other two RuvC-like domains are boxed and indicated with a “B”. The HNH-like domain is boxed and indicated by a “G”. Sm: S. mutans (SEQ ID NO: 1); Sp: S. pyogenes (SEQ ID NO: 2); St: S. thermophilus (SEQ ID NO: 3); Li: L. innocua (SEQ ID NO: 4). Motif: this is a motif based on the four sequences: residues conserved in all four sequences are indicated by single letter amino acid abbreviation; “*” indicates any amino acid found in the corresponding position of any of the four sequences; and “-” indicates any amino acid, e.g., any of the 20 naturally occurring amino acids, or absent.

[0204] FIGS. 3A-3B show an alignment of the N-terminal RuvC-like domain from the Cas9 molecules disclosed in Chylinski et al (SEQ ID NOS: 54-103, respectively, in order of appearance). The last line of FIG. 3B identifies 4 highly conserved residues.

[0205] FIGS. 4A-4B show an alignment of the N-terminal RuvC-like domain from the Cas9 molecules disclosed in Chylinski et al. with sequence outliers removed (SEQ ID NOS: 104-177, respectively, in order of appearance). The last line of FIG. 4B identifies 3 highly conserved residues.

[0206] FIGS. 5A-5C show an alignment of the HNH-like domain from the Cas9 molecules disclosed in Chylinski et al (SEQ ID NOS: 178-252, respectively, in order of appearance). The last line of FIG. 5C identifies conserved residues.

[0207] FIGS. 6A-6B show an alignment of the HNH-like domain from the Cas9 molecules disclosed in Chylinski et al. with sequence outliers removed (SEQ ID NOS: 253-302, respectively, in order of appearance). The last line of FIG. 6B identifies 3 highly conserved residues.

[0208] FIGS. 7A-7B depict an alignment of Cas9 sequences from S. pyogenes and Neisseria meningitidis (N. meningitidis). The N-terminal RuvC-like domain is boxed and indicated with a “Y”. The other two RuvC-like domains are boxed and indicated with a “B”. The HNH-like domain is boxed and indicated with a “G”. Sp: S. pyogenes; Nm: N. meningitidis. Motif: this is a motif based on the two sequences: residues conserved in both sequences are indicated by a single amino acid designation; “*” indicates any amino acid found in the corresponding position of any of the two sequences; “-” indicates any amino acid, e.g., any of the 20 naturally occurring amino acids, and “-” indicates any amino acid, e.g., any of the 20 naturally occurring amino acids, or absent.

[0209] FIG. 8 shows a nucleic acid sequence encoding Cas9 of N. meningitidis (SEQ ID NO: 303). Sequence indicated by an “R” is an SV40 NLS; sequence indicated as “G” is an HA tag; and sequence indicated by an “O” is a synthetic NLS sequence; the remaining (unmarked) sequence is the open reading frame (ORF).

[0210] FIGS. 9A and 9B are schematic representations of the domain organization of S. pyogenes Cas 9. FIG. 9A shows the organization of the Cas9 domains, including amino acid positions, in reference to the two lobes of Cas9 (recognition (REC) and nuclease (NUC) lobes). FIG. 9B shows the percent homology of each domain across 83 Cas9 orthologs.

[0211] FIG. 10A is a schematic showing the plasmid map for the reporter plasmid, pAF025.

[0212] FIG. 10B is a graph showing the decrease in fluorescence from green fluorescent protein (GFP) in cells transfected with various gRNAs that target HSV-1 target sequences.

### DETAILED DESCRIPTION

### Definitions

[0213] “Domain”, as used herein, is used to describe segments of a protein or nucleic acid. Unless otherwise indicated, a domain is not required to have any specific functional property.

[0214] Calculations of homology or sequence identity between two sequences (the terms are used interchangeably herein) are performed as follows. The sequences are aligned for optimal comparison purposes (e.g., gaps can be introduced in one or both of a first and a second amino acid or nucleic acid sequence for optimal alignment and non-homologous sequences can be disregarded for comparison purposes). The optimal alignment is determined as the best score using the GAP program in the GCG software package with a Blossum 62 scoring matrix with a gap penalty of 12, a gap extend penalty of 4, and a frame shift gap penalty of 5. The amino acid residues or nucleotides at corresponding amino acid positions or nucleotide positions are then compared. When a position in the first sequence is occupied by the same amino acid residue or nucleotide as the corresponding position in the second sequence, then the molecules are identical at that position. The percent identity between the two sequences is a function of the number of identical positions shared by the sequences.

[0215] “Governing gRNA molecule”, as used herein, refers to a gRNA molecule that comprises a targeting domain that is complementary to a target domain on a nucleic acid that comprises a sequence that encodes a component of the CRISPR/Cas system that is introduced into a cell or subject. A governing gRNA does not target an endogenous cell or subject sequence. In an embodiment, a governing gRNA molecule comprises a targeting domain that is complementary with a target sequence on: (a) a nucleic acid that encodes a Cas9 molecule; (b) a nucleic acid that encodes a gRNA which comprises a targeting domain that targets the UL19, UL30, UL48 or UL54 gene (a target gene gRNA); or on more than one nucleic acid that encodes a CRISPR/Cas component, e.g., both (a) and (b). In an embodiment, a nucleic acid molecule that encodes a CRISPR/Cas component, e.g., that encodes a Cas9 molecule or a target gene gRNA, comprises more than one target domain that is complementary with a governing gRNA targeting domain. While not wishing to be bound by theory, in an embodiment, it is believed that a governing gRNA molecule complexes with a Cas9 molecule and results in Cas9 mediated inactivation of the targeted nucleic acid, e.g., by cleavage or by binding to the nucleic acid, and results in cessation or reduction of the production of a CRISPR/Cas system component. In an embodiment, the Cas9 molecule forms two complexes: a complex comprising a Cas9 molecule with a target gene gRNA, which complex will alter the UL19, UL30, UL48 or UL54 gene; and a complex comprising a Cas9 molecule with a governing gRNA molecule, which complex will act to prevent further production of a CRISPR/Cas system component, e.g., a Cas9 molecule or a target gene gRNA molecule. In an embodiment, a governing gRNA molecule/Cas9 molecule complex binds to or promotes cleavage of a control region sequence, e.g., a promoter, operably linked to a sequence that encodes a Cas9 molecule, a sequence that encodes a transcribed region, an exon, or an intron, for the Cas9 molecule. In an embodiment, a governing gRNA molecule/Cas9 molecule complex binds to or promotes cleavage of a control region sequence, e.g., a promoter, operably linked to a gRNA molecule, or a sequence that encodes the gRNA molecule. In an embodiment, the governing gRNA, e.g., a Cas9-targeting governing gRNA molecule, or a target gene gRNA-targeting governing gRNA molecule, limits the effect of the Cas9 molecule/target gene gRNA molecule complex-mediated gene targeting. In an embodiment, a governing gRNA places temporal, level of expression, or other limits, on activity of the Cas9 molecule/target gene gRNA molecule complex. In an embodiment, a governing gRNA reduces off-target or other unwanted activity. In an embodiment, a governing gRNA molecule inhibits, e.g., entirely or substantially entirely inhibits, the production of a component of the Cas9 system and thereby limits, or governs, its activity.

[0216] “Modulator”, as used herein, refers to an entity, e.g., a drug, that can alter the activity (e.g., enzymatic activity, transcriptional activity, or translational activity), amount, distribution, or structure of a subject molecule or genetic sequence. In an embodiment, modulation comprises cleavage, e.g., breaking of a covalent or non-covalent bond, or the forming of a covalent or non-covalent bond, e.g., the attachment of a moiety, to the subject molecule. In an embodiment, a modulator alters the, three dimensional, secondary, tertiary, or quaternary structure, of a subject molecule. A modulator can increase, decrease, initiate, or eliminate a subject activity.

[0217] “Large molecule”, as used herein, refers to a molecule having a molecular weight of at least 2, 3, 5, 10, 20, 30, 40, 50, 60, 70, 80, 90, or 100 kD. Large molecules include proteins, polypeptides, nucleic acids, biologics, and carbohydrates.

[0218] “Polypeptide”, as used herein, refers to a polymer of amino acids having less than 100 amino acid residues. In an embodiment, it has less than 50, 20, or 10 amino acid residues.

[0219] “Reference molecule”, e.g., a reference Cas9 molecule or reference gRNA, as used herein, refers to a molecule to which a subject molecule, e.g., a subject Cas9 molecule of subject gRNA molecule, e.g., a modified or candidate Cas9 molecule is compared. For example, a Cas9 molecule can be characterized as having no more than 10% of the nuclease activity of a reference Cas9 molecule. Examples of reference Cas9 molecules include naturally occurring unmodified Cas9 molecules, e.g., a naturally occurring Cas9 molecule such as a Cas9 molecule of S. pyogenes, S. aureus or S. thermophilus. In an embodiment, the reference Cas9 molecule is the naturally occurring Cas9 molecule having the closest sequence identity or homology with the Cas9 molecule to which it is being compared. In an embodiment, the reference Cas9 molecule is a sequence, e.g., a naturally occurring or known sequence, which is the parental form on which a change, e.g., a mutation has been made.

[0220] “Replacement”, or “replaced”, as used herein with reference to a modification of a molecule does not require a process limitation but merely indicates that the replacement entity is present.

[0221] “Small molecule”, as used herein, refers to a compound having a molecular weight less than about 2 kD, e.g., less than about 2 kD, less than about 1.5 kD, less than about 1 kD, or less than about 0.75 kD.

[0222] “Subject”, as used herein, may mean either a human or non-human animal. The term includes, but is not limited to, mammals (e.g., humans, other primates, pigs, rodents (e.g., mice and rats or hamsters), rabbits, guinea pigs, cows, horses, cats, dogs, sheep, and goats). In an embodiment, the subject is a human. In other embodiments, the subject is poultry.

[0223] “Treat”, “treating” and “treatment”, as used herein, mean the treatment of a disease in a mammal, e.g., in a human, including (a) inhibiting the disease, i.e., arresting or preventing its development; (b) relieving the disease, i.e., causing regression of the disease state; and (c) curing the disease.

[0224] “Prevent”, “preventing” and “prevention”, as used herein, means the prevention of a disease in a mammal, e.g., in a human, including (a) avoiding or precluding the disease; (2) affecting the predisposition toward the disease, e.g., preventing at least one symptom of the disease or to delay onset of at least one symptom of the disease.

[0225] “X” as used herein in the context of an amino acid sequence, refers to any amino acid (e.g., any of the twenty natural amino acids) unless otherwise specified.

### Herpes Simplex Virus Type 1

[0226] Herpes simplex virus type 1 (HSV-1) causes intermittent sores of the mouth and mucous membranes. It is a ubiquitous and highly contagious pathogen. Most subjects develop the infection during childhood. By adulthood, up to 80% of the population in the United States is infected with HSV-1. Initial infection with HSV-1 generally causes painful blistering of the mucous membranes of the lips and mouth.

[0227] HSV-1 infection persists for the lifetime of the host. Primary and re-activation infections can cause permanent neurologic sequelae and blindness. There is a considerable need for methods to treat and prevent HSV1 infections.

[0228] During primary infection, the virus most often infects cells of the oropharynx and ano-genital region, causing painful vesicles in the affected region. Re-activation of HSV-1 infections most often occurs in the oropharynx and ano-genital region. However, re-activation infections of the eye and central nervous system are the most severe and damaging HSV manifestations, as they can lead to blindness and permanent neurologic disability, respectively.

[0229] HSV-1 is contained within an icosahedral particle. The virus enters the host via infection of epithelial cells within the skin and mucous membranes. The virus produces immediate early genes within the epithelial cells, which encode enzymes and binding proteins necessary for viral synthesis. After primary infection, the virus travels up sensory nerve axons via retrograde transport to the sensory dorsal root ganglion (DRG). Within the DRG, it establishes a latent infection. The latent infection persists for the lifetime of the host. Within the DRG cell, the virus uncoats, viral DNA is transported into the nucleus, and key viral RNAs associated with latency are transcribed (including the LAT RNAs).

[0230] Host immune defense is very important to combating HSV infection. CD4+ T-cells and CD8+ cells are responsible for recognizing and clearing the pathogen. Subjects with impaired T-cell responses, including those with HIV, those receiving immunosuppressants following organ transplants, and neonates with developing immune systems, are subject to the most severe manifestations of HSV-1 infections.

[0231] During the primary infection, subjects generally experience painful blistering in the oral or ano-genital region that lasts 4-15 days. The sores most commonly involve the lips, gums and nasal mucous membranes. HSV-1 primary infections may also involve the ano-genital region, including the vagina, labia, cervix, penis, scrotum, anus and skin around the thighs. Less commonly, HSV-1 primary infection may involve the eyes, central nervous system, the fingers and fingernail beds (herpetic whitlow). The infection is transmitted primarily through saliva and/or sexual activity. The blisters may break, releasing clear fluid that is highly infectious. Primary infection is often accompanied by a flu-like illness, including fever, chills and muscle aches.

[0232] Reactivations of latent infections are generally less severe and may be of shorter duration. Reactivation can affect the oral region, the ano-genital region, the eye, the central nervous system (CNS), the fingernails, and the pharynx. Reactivation generally affects the oral region but can also affect other mucous membranes, including those of the ano-genital area, fingernails, and the pharynx. Ophthalmologic disease may also occur, including epithelial keratitis, stromal keratitis and disciform keratitis. Generally, ophthalmologic manifestations of HSV-1 are self-limiting. However, HSV-1 keratitis may, in rare instances, cause scarring, secondary infection with bacterial pathogens and rarely, blindness.

[0233] In some cases, reactivation can occur in the central nervous system (CNS) via retrograde transport of the virus into the CNS. Generally, patients who are immune compromised develop HSV-1 induced encephalitis and/or meningitis. HSV-1 encephalitis or meningitis are both extremely severe. Subjects generally experience permanent neurologic damage in spite of treatment with antiviral therapy.

[0234] Primary infections and reactivation infections in the CNS, called encephalitis and meningitis, are particularly damaging. In a study of infants with HSV-encephalitis or meningitis treated with high dose antiviral therapy, there was found to be a 4% mortality rate and 69% of survivors had permanent neurologic sequelae (Kimberlin et al., Pediatrics. 2001; 108: 230-238). The majority of infants and adults who develop HSV-1 encephalitis or meningitis will experience permanent neurologic damage in spite of treatment with antiviral therapy. Reactivation infections in the CNS occur via anterograde transport of the virus into the CNS. Most commonly, patients who are immune compromised or infants develop HSV-1 induced encephalitis and/or meningitis. Healthy adults may more rarely develop HSV-1 disease of the CNS.

[0235] Reactivation infections occur in the eye via anterograde transport of the virus into the eye from the trigeminal ganglion, along the ophthalmic branch of the trigeminal nerve (the fifth cranial nerve) and into the eye. Re-activation of the virus may also occur from within the cornea. Latency within the trigeminal ganglion is established via one of two mechanisms. First, HSV-1 can travel via retrograde transport along the trigeminal nerve from the eye (after an eye infection) into the trigeminal ganglion. Alternatively, it can spread to the trigeminal ganglion via hematogenous spread following infection of the oral mucosa, genital region, or other extraocular site. After establishing latent infection of the trigeminal ganglion, at any time, particularly in the event of an immunocompromised host, the virus can re-establish infection by traveling anterograde along the trigeminal nerve and into the eye.

[0236] Ocular herpes can affect the anterior chamber of the eye, where it causes keratitis, or the posterior chamber, where it causes retinitis. In adults, HSV-1 is responsible for the majority of cases of HSV-retinitis (Pepose et al., Ocular Infection and Immunity 1996; Mosby 1155-1168). HSV-1 retinitis can lead to acute retinal necrosis (ARN), which will destroy the retina within 2 weeks without treatment (Banerjee and Rouse, Human Herpesviruses 2007; Cambridge University Press, Chapter 35). Even with treatment, the risk of permanent visual damage following ARN is higher than 50% (Roy et al., Ocular Immunology and Inflammation 2014; 22(3):170-174).

[0237] Keratitis is the most common form of ocular herpes. HSV keratitis can manifest as dentritic keratitis, stromal keratitis, blepharatis and conjunctivitis. HSV-1 is responsible for the majority of HSV-associated keratitis, accounting for 58% of cases (Dawson et. al., Suvey of Ophthalmology 1976; 21(2): 121-135). In the United States, there are approximately 48,000 cases of recurrent or primary HSV-related keratitis infections annually (Liesegang et al. 1989; 107(8): 1155-1159). Of all cases of HSV-related keratitis, approximately 1.5-3% of subjects experience severe, permanent visual impairment (Wilhelmus et. al_, Archives of Ophthalmology 1981; 99(9): 1578-82).

[0238] Overall, stromal keratitis represents approximately 15% of keratitis cases and is associated with the highest risk of permanent visual damage. Stromal keratitis results in scarring and irregular astigmatism. Previous ocular HSV infection increases the risk for developing stromal infection, which means that subjects who have had a prior ocular HSV infection have an increased risk for permanent visual damage on reactivation. In children, stromal keratitis represents up to 60% of all keratitis cases so children are particularly at risk for permanent visual damage from HSV-associated keratitis. A retrospective study in the United States from 1950-1982 found that there are approximately 2.6 new or recurrent stromal keratitis cases per 100,000 person years, or approximately 8,000 cases of stromal keratitis annually (Liesegang et. al., 1989; 107(8): 1155-1159). A more recent study in France in 2002 estimated the incidence of new or recurrent stromal keratitis cases to be 9.6 per 100,000 (Labetoulle et al., Ophthalmology 2005; 112(5):888-895). The incidence of HSV-associated keratitis may be increasing in the developed world (Farooq and Shukla 2012; Survey of Ophthalmology 57(5): 448-462).

[0239] The compositions and methods described herein can be used for the treatment and prevention of HSV-1 ocular infections, including but not limited to HSV-1 stromal keratitis, HSV-1 retinitis, HSV-1 encephalitis and HSV-1 meningitis.

[0240] Newborns are a population at particular risk for developing severe HSV-1 infections. The disease is transmitted from the mother to the fetus during childbirth. The chance of maternal-fetal transmission is highest in cases where the mother developed primary HSV infection during pregnancy. The incidence of neonatal herpes is approximately 4-30 per 100,000 births. Neonates may develop severe HSV-1 encephalitis and/or meningitis. In spite of prompt treatment with antiviral therapy, the rate of permanent neurologic sequelae in newborns infected with HSV-1 is significant.

[0241] Primary HSV-1 infections may be treated with antiviral therapy, including acyclovir, valacyclovir and famciclovir. These therapies have been demonstrated to reduce viral shedding, decrease pain and improve healing time of lesions. Re-activation of latent infections may resolve without treatment (it may be self-limiting) or may be treated with anti-viral therapy. Therapy is primarily given during acute infection. There are no curative or preventative treatments. Therapy may be given prophylactically in certain situations, including during childbirth in a mother with a recent HSV-1 infection or reactivation.

### Methods to Treat, Prevent or Reduce HSV-1 Infection

[0242] Disclosed herein are the approaches to treat, prevent, or reduce HSV-1 infection, using the compositions and methods described herein.

[0243] HSV-1 relies on the genes UL19, UL30, UL48 and/or UL54 for infection, proliferation and assembly. Knockout of any of these genes individually or in combination can prevent or treat HSV-1 infections. As the HSV-1 virus establishes latency in discrete, localized regions within the body, local delivery that delivers a treatment in the region of latency can be used. Targeting knockout to a discrete region or regions (e.g., the trigeminal dorsal root ganglion, e.g., the cervical dorsal root gangliq, e.g., the sacral dorsal root ganglia) can reduce or eliminate latent infection by disabling the HSV-1 virus.

[0244] Described herein are the approaches to treat or prevent HSV-1 by knocking out viral genes. Methods described herein include the knockout of any of the following HSV-1 encoded genes: UL19, UL30, UL48 or UL54, or any combination thereof (e.g., any two, three or all of the UL19, UL30, UL48 or UL54 gene).

[0245] UL19 (also known as VP5) encodes the HSV-1 major capsid protein, VP5. Proper assembly of the viral capsid is known to be an essential part of viral replication, assembly, maturation and infection (Homa et al., Reviews of Medical Virology 1997; 7(2):107-122). RNAi-mediated knockdown of VP5 along with another capsid capsid protein, VP23, in vitro, greatly diminished HSV-1 proliferation (Jin et al., PLoS One 2014; 9(5): e96623). Knockout of UL19 can disable HSV-1 proliferation and therefore prevent, treat or cure HSV-1 infection.

[0246] UL30 encodes the DNA polymerase catalytic subunit (HSV-1 pol). The 5′ domain of HSV-1 pol is required for viral replication. Knock out of UL30 can disable HSV-1 replication and therefore prevent and/or cure HSV-1 infection.

[0247] UL48 encodes the viral protein known as VP16 in HSV-1. VP-16 has been shown to be important in viral egress, the process by which the assembled viral capsid leaves the host nucleus and enters the cytoplasm (Mossman et al., Journal of Virology 2000; 74(14): 6287-6289). Mutation of UL48 in cell culture decreased the ability of HSV-1 to assemble efficiently (Svobodova et al., Journal of Virology 2012; 86(1): 473-483). Knockout of UL48 can disable HSV-1 assembly and egress and therefore prevent and/or cure HSV-1 infection.

[0248] UL54 encodes ICP27, a highly conserved, multi-functional protein. ICP27 is involved in transcription, RNA processing, RNA export and translation (Sandri-Goldin, Frontiers in Bioscience 2008; 13:5241-5256). ICP27 also shuts off host gene expression during HSV-1 infection. Knockout of UL54 can disable HSV-1 transcription, translation and RNA processing and therefore prevent and/or cure HSV-1 infection.

[0249] Knockout of the genes UL19, UL30, UL48 or UL54, individually or in combination, can reduce HSV-1 infectivity, replication, packaging and can therefore prevent or treat HSV-1 infection.

[0250] In addition, knock out of vital HSV-1 genes, e.g., UL19, UL30, UL48 and UL54, individually or in combination, can make HSV-1 more susceptible to antiviral therapy. Mutations in important genes can render HSV-1 and other viruses more susceptible to treatment with antivirals (Zhou et al., Journal of Virology 2014; 88(19): 11121-11129). Knocking out of UL19, UL30, UL48 and UL54, individually or in combination, may be combined with antiviral therapy to prevent or treat HSV-1 infection. The compositions and methods described herein can be used in combination with another antiviral therapy, e.g., another anti-HSV-1 therapy described herein, to treat or prevent HSV-1 infection.

[0251] In one approach, one or more of the UL19, UL30, UL48 and/or UL54 gene(s) is targeted as a targeted knockout, e.g., to inhibit essential viral functions, including, e.g. viral gene transcription, viral genome replication and viral capsid formation. In an embodiment, said approach comprises knocking out one HSV-1 gene (e.g., UL19, UL30, UL48 or UL54 gene). In another embodiment, said approach comprises knocking out two HSV-1 genes, e.g., two of UL19, UL30, UL48 or UL54 gene(s). In another embodiment, said approach comprises knocking out three HSV-1 genes, e.g., three or more of UL19, UL30, UL48 or UL54 gene(s). In another embodiment, said approach comprises knocking out four HSV-1 genes, e.g., each of UL19, UL30, UL48 and UL54 genes.

[0252] While not wishing to be bound by theory, it is considered that inhibiting essential viral functions, e.g., viral gene transcription, viral genome replication and viral capsid formation, decreases the duration of primary or recurrent infection and/or decrease shedding of viral particles. Subjects also experience shorter duration(s) of illness, decreased risk of transmission to sexual partners, decreased risk of transmission to the fetus in the case of pregnancy and/or the potential for full clearance of HSV-1 (cure).

[0253] Knockout of one or more copies (e.g., 1, 2, 3, 4, 5, 6, 7, 8, 9 or 10 copies) of one or more target genes (e.g., UL19, UL30, UL48 or UL54 gene) may be performed prior to disease onset or after disease onset, but preferably early in the disease course.

[0254] In an embodiment, the method comprises initiating treatment of a subject prior to disease onset.

[0255] In an embodiment, the method comprises initiating treatment of a subject after disease onset.

[0256] In an embodiment, the method comprises initiating treatment of a subject well after disease onset, e.g., 1, 2, 3, 4, 5, 6, 7, 8, 9, 10, 12, 16, 24, 36, 48 or more months after onset of HSV-1 infection. In an embodiment, the method comprises initiating treatment of a subject well after disease onset, e.g., 1, 2, 3, 4, 5, 10, 15, 20, 25, 40, 50 or 60 years after onset of HSV-1 infection. While not wishing to be bound by theory it is believed that this may be effective as disease progression is slow in some cases and a subject may present well into the course of illness.

[0257] In an embodiment, the method comprises initiating treatment of a subject in an advanced stage of disease, e.g., during acute or latent periods. In an embodiment, the method comprises initiating treatment of a subject in the case of severe, acute disease affecting the central nervous system, eyes, oropharynx, genital region, and/or other region.

[0258] Overall, initiation of treatment for subjects at all stages of disease is expected to improve healing, decrease duration of disease and be of benefit to subjects.

[0259] In an embodiment, the method comprises initiating treatment of a subject prior to disease expression. In an embodiment, the method comprises initiating treatment of a subject in an early stage of disease, e.g., when a subject has been exposed to HSV-1 or is thought to have been exposed to HSV-1.

[0260] In an embodiment, the method comprises initiating treatment of a subject prior to disease expression. In an embodiment, the method comprises initiating treatment of a subject in an early stage of disease, e.g., when a subject has tested positive for HSV-1 infections but has no signs or symptoms.

[0261] In an embodiment, the method comprises initiating treatment of a subject at the appearance of painful blistering in or around the mouth, e.g., oral or oropharynx, e.g., in an infant, child, adult or young adult.

[0262] In an embodiment, the method comprises initiating treatment of a subject at the appearance of painful blistering in the genital region, e.g., in an infant, child, adult or young adult.

[0263] In an embodiment, the method comprises initiating treatment of a subject suspected of having HSV-1 meningitis and/or HSV-1 encephalitis.

[0264] In an embodiment, the method comprises initiating treatment at the appearance of any of the following symptoms consistent or associated with HSV-1 meningitis and/or encephalitis: fever, headache, vomiting, photophobia, seizure, decline in level of consciousness, lethargy, or drowsiness.

[0265] In an embodiment, the method comprises initiating treatment at the appearance of any of the following signs consistent or associated with HSV meningitis and/or encephalitis: positive CSF culture for HSV-1, elevated WBC in CSF, neck stiffness/positive Brudzinski's sign. In an embodiment, the method comprises initiating treatment in a patient with signs consistent with HSV-1 encephalitis and/or meningitis on EEG, CSF exam, MRI, PCR of CSF specimen, and/or PCR of brain biopsy specimen.

[0266] In an embodiment, the method comprises initiating treatment at the appearance of any of the following symptoms consistent or associated with optic HSV-1: pain, photophobia, blurred vision, tearing, redness/injection, loss of vision, floaters, or flashes.

[0267] In an embodiment, the method comprises initiating treatment at the appearance of any of the following findings on ophthalmologic exam consistent or associated with optic HSV-1, also known as HSV-1 keratitis: small, raised clear vesicles on corneal epithelium; irregular corneal surface, punctate epithelial erosions; dense stromal infiltrate; ulceration; necrosis; focal, multifocal, or diffuse cellular infiltrates; immune rings; neovascularization; or ghost vessels at any level of the cornea.

[0268] In an embodiment, the method comprises initiating treatment at the appearance of any of the following findings on ophthalmologic exam consistent or associated with HSV-1 retinitis or acute retinal necrosis: reduced visual acuity; uveitis; vitritis; scleral injection; inflammation of the anterior and/or vitreous chamber/s; vitreous haze; optic nerve edema; peripheral retinal whitening; retinal tear; retinal detachment; retinal necrosis; evidence of occlusive vasculopathy with arterial involvement, including arterioloar sheathing and arteriolar attenuation.

[0269] In an embodiment, the method comprises initiating treatment at the appearance of symptoms and/or signs consistent or associated with either an HSV-1 or an HSV-2 infection of the eye, oropharynx, ano-genital region or central nervous system. While not wishing to be bound by theory, initiating treatment for HSV-1 infection in a case of suspected HSV-1 or HSV-2 infection early in the disease course is beneficial.

[0270] In an embodiment, the method comprises initiating treatment in utero in case of high risk of maternal-to-fetal transmission.

[0271] In an embodiment, the method comprises initiating treatment during pregnancy in case of mother who has active HSV-1 infection or has recent primary HSV-1 infection.

[0272] In an embodiment, the method comprises initiating treatment prior to organ transplantation or immediately following organ transplantation.

[0273] In an embodiment, the method comprises initiating treatment in case of suspected exposure to HSV-1.

[0274] In an embodiment, the method comprises initiating treatment prophylactically, especially in case of suspected HSV-encephalitis or meningitis.

[0275] In an embodiment, the method comprises initiating treatment of a subject who suffers from or is at risk of developing severe manifestations of HSV-1 infections, e.g., neonates, subjects with HIV, subjects who are on immunosuppressant therapy following organ transplantation, subjects who have cancer, subjects who are undergoing chemotherapy, subjects who will undergo chemotherapy, subjects who are undergoing radiation therapy, subjects who will undergo radiation therapy.

[0276] While not wishing to be bound by theory, it is considered that both HIV positive subjects and post-transplant subjects may experience severe HSV-1 activation or reactivation, including HSV-encephalitis and meningitis, due to immunodeficiency. Neonates are also at risk for severe HSV-encephalitis due to maternal-fetal transmission during childbirth. Inhibiting essential viral functions, e.g., viral gene transcription, viral genome replication and viral capsid formation, may provide superior protection to said populations at risk for severe HSV-1 infections. Subjects may experience lower rates of HSV-1 encephalitis and/or lower rates of severe neurologic sequelae following HSV-1 encephalitis, which will profoundly improve quality of life.

[0277] In an embodiment, the method comprises initiating treatment of a subject who has tested positive for HSV-1.

[0278] In an embodiment, the method comprises initiating treatment at the appearance of any one or more of the following findings consistent or associated with HSV-1: appearance of blistering in the oropharynx, ano-genital area, oral or ano-genital ulcers and/or flu-like illness.

[0279] In an embodiment, the method comprises initiating treatment at the appearance of any of the following findings consistent or associated with HSV-1 infection: fever, headache, body aches, oral or ano-genital blistering, oral ulceration, encephalitis, meningitis or keratitis.

[0280] In an embodiment, the method comprises initiating treatment in a subject who has tested positive for HSV-1 infection via viral culture, direct fluorescent antibody study, skin biopsy, PCR, blood serologic test, CSF serologic test, CSF PCR, or brain biopsy. In an embodiment, the method comprises initiating treatment in a subject who has tested positive for HSV-2 infection via diagnostic vitrectomy, endoretinal biopsy, PCR of aqueous fluid, PCR of vitreous sample.

[0281] In an embodiment, the method comprises initiating treatment in any subject exposed to HSV-1 and at high risk for severe sequelae from HSV infection.

[0282] In some embodiments, a cell is manipulated by editing (e.g., introducing a mutation in) one or more target genes, e.g., UL19, UL30, UL48 or UL54 gene. In some embodiments, the expression of one or more target genes (e.g., one or more UL19, UL30, UL48 or UL54 gene described herein) is modulated, e.g., in vivo.

[0283] In an embodiment, the method comprises delivery of gRNA by an AAV. In an embodiment, the method comprises delivery of gRNA by a lentivirus. In an embodiment, the method comprises delivery of gRNA by a nanoparticle. In an embodiment, the method comprises delivery of gRNA by a gel-based AAV for topical therapy.

[0284] In an embodiment, the method further comprising treating the subject a second antiviral therapy, e.g., an anti-HSV-1 therapy described herein. The compositions described herein can be administered concurrently with, prior to, or subsequent to, one or more additional therapies or therapeutic agents. The composition and the other therapy or therapeutic agent can be administered in any order. In an embodiment, the effect of the two treatments is synergistic. Exemplary anti-HSV-1 therapies include, but are not limited to, acyclovir, valacyclovir, famciclovir, penciclovir, or a vaccine.

Methods of Altering UL19, UL30, UL48 and/or UL54 Gene(s)

[0285] As disclosed herein, a HSV-1 target position, e.g., one or more of UL19, UL30, UL48 or UL54 gene(s), can be altered by gene editing, e.g., using CRISPR-Cas9 mediated methods as described herein.

[0286] Methods and compositions discussed herein, provide for altering a HSV-1 target position in one or more of the UL19, UL30, UL48 and/or UL54 gene(s). A HSV-1 target position can be altered by gene editing, e.g., using CRISPR-Cas9 mediated methods to alter one or more of the UL19, UL30, UL48 and/or UL54 gene(s).

[0287] An alteration of one or more of the UL19, UL30, UL48 and/or UL54 gene(s) can be mediated by any mechanism. Exemplary mechanisms that can be associated with an alteration of one or more of the UL19, UL30, UL48 and/or UL54 gene(s) include, but are not limited to, non-homologous end joining (e.g., classical or alternative), microhomology-mediated end joining (MMEJ), homology-directed repair (e.g., endogenous donor template mediated), SDSA (synthesis dependent strand annealing), single strand annealing or single strand invasion.

[0288] In an embodiment, a single strand break is introduced (e.g., positioned by one gRNA molecule) at or in close proximity to a HSV-1 target position in the UL19, UL30, UL48 and/or UL54 gene. In an embodiment, a single gRNA molecule (e.g., with a Cas9 nickase) is used to create a single strand break at or in close proximity to the HSV-1 target position, e.g., the gRNA is configured such that the single strand break is positioned either upstream (e.g., within 200 bp upstream) or downstream (e.g., within 200 bp downstream) of the HSV-1 target position. In an embodiment, the break is positioned to avoid unwanted target chromosome elements, such as repeat elements, e.g., an Alu repeat.

[0289] In an embodiment, a double strand break is introduced (e.g., positioned by one gRNA molecule) at or in close proximity to a HSV-1 target position in the UL19, UL30, UL48 and/or UL54 gene. In an embodiment, a single gRNA molecule (e.g., with a Cas9 nuclease other than a Cas9 nickase) is used to create a double strand break at or in close proximity to the HSV-1 target position, e.g., the gRNA molecule is configured such that the double strand break is positioned either upstream (e.g., within 200 bp upstream) or downstream of (e.g., within 200 bp downstream) of a HSV-1 target position. In an embodiment, the break is positioned to avoid unwanted target chromosome elements, such as repeat elements, e.g., an Alu repeat.

[0290] In an embodiment, two single strand breaks are introduced (e.g., positioned by two gRNA molecules) at or in close proximity to a HSV-1 target position in the UL19, UL30, UL48 and/or UL54 gene. In an embodiment, two gRNA molecules (e.g., with one or two Cas9 nickcases) are used to create two single strand breaks at or in close proximity to the HSV-1 target position, e.g., the gRNAs molecules are configured such that both of the single strand breaks are positioned upstream (e.g., within 200 bp upstream) or downstream (e.g., within 200 bp downstream) of the HSV-1 target position. In another embodiment, two gRNA molecules (e.g., with two Cas9 nickcases) are used to create two single strand breaks at or in close proximity to the HSV-1 target position, e.g., the gRNAs molecules are configured such that one single strand break is positioned upstream (e.g., within 200 bp upstream) and a second single strand break is positioned downstream (e.g., within 200 bp downstream) of the HSV-1 target position. In an embodiment, the breaks are positioned to avoid unwanted target chromosome elements, such as repeat elements, e.g., an Alu repeat.

[0291] In an embodiment, two double strand breaks are introduced (e.g., positioned by two gRNA molecules) at or in close proximity to a HSV-1 target position in the UL19, UL30, UL48 and/or UL54 gene. In an embodiment, two gRNA molecules (e.g., with one or two Cas9 nucleases that are not Cas9 nickases) are used to create two double strand breaks to flank a HSV-1 target position, e.g., the gRNA molecules are configured such that one double strand break is positioned upstream (e.g., within 200 bp upstream) and a second double strand break is positioned downstream (e.g., within 200 bp downstream) of the HSV-1 target position. In an embodiment, the breaks are positioned to avoid unwanted target chromosome elements, such as repeat elements, e.g., an Alu repeat.

[0292] In an embodiment, one double strand break and two single strand breaks are introduced (e.g., positioned by three gRNA molecules) at or in close proximity to a HSV-1 target position in the UL19, UL30, UL48 and/or UL54 gene. In an embodiment, three gRNA molecules (e.g., with a Cas9 nuclease other than a Cas9 nickase and one or two Cas9 nickases) to create one double strand break and two single strand breaks to flank a HSV-1 target position, e.g., the gRNA molecules are configured such that the double strand break is positioned upstream or downstream of (e.g., within 200 bp upstream or downstream) of the HSV-1 target position, and the two single strand breaks are positioned at the opposite site, e.g., downstream or upstream (within 200 bp downstream or upstream), of the HSV-1 target position. In an embodiment, the breaks are positioned to avoid unwanted target chromosome elements, such as repeat elements, e.g., an Alu repeat.

[0293] In an embodiment, four single strand breaks are introduced (e.g., positioned by four gRNA molecules) at or in close proximity to a HSV-1 target position in the UL19, UL30, UL48 and/or UL54 gene. In an embodiment, four gRNA molecule (e.g., with one or more Cas9 nickases are used to create four single strand breaks to flank a HSV-1 target position in the UL19, UL30, UL48 and/or UL54 gene, e.g., the gRNA molecules are configured such that a first and second single strand breaks are positioned upstream (e.g., within 200 bp upstream) of the HSV-1 target position, and a third and a fourth single stranded breaks are positioned downstream (e.g., within 200 bp downstream) of the HSV-1 target position. In an embodiment, the breaks are positioned to avoid unwanted target chromosome elements, such as repeat elements, e.g., an Alu repeat.

[0294] In an embodiment, two or more (e.g., three or four) gRNA molecules are used with one Cas9 molecule. In another embodiment, when two or more (e.g., three or four) gRNAs are used with two or more Cas9 molecules, at least one Cas9 molecule is from a different species than the other Cas9 molecule(s). For example, when two gRNA molecules are used with two Cas9 molecules, one Cas9 molecule can be from one species and the other Cas9 molecule can be from a different species. Both Cas9 species are used to generate a single or double-strand break, as desired.

I. gRNA Molecules

[0295] A gRNA molecule, as that term is used herein, refers to a nucleic acid that promotes the specific targeting or homing of a gRNA molecule/Cas9 molecule complex to a target nucleic acid. gRNA molecules can be unimolecular (having a single RNA molecule), sometimes referred to herein as “chimeric” gRNAs, or modular (comprising more than one, and typically two, separate RNA molecules). A gRNA molecule comprises a number of domains. The gRNA molecule domains are described in more detail below.

[0296] Several exemplary gRNA structures, with domains indicated thereon, are provided in FIG. 1. While not wishing to be bound by theory, in an embodiment, with regard to the three dimensional form, or intra- or inter-strand interactions of an active form of a gRNA, regions of high complementarity are sometimes shown as duplexes in FIGS. 1A-1G and other depictions provided herein.

[0297] In an embodiment, a unimolecular, or chimeric, gRNA comprises, preferably from 5′ to 3′:
[0298] a targeting domain (which is complementary to a target nucleic acid in the UL19, UL30, UL48 or UL54 gene, e.g., a targeting domain from any of Tables 1A-1G, Tables 2A-2G, Tables 3A-3G, Tables 4A-4F, Tables 5A-5E, Tables 6A-6G, Tables 7A-7D, Tables 8A-8E, Tables 9A-9G, Tables 10A-10C, Tables 11A-11E, Tables 12A-12G, Tables 13A-13C, Tables 14A-14E, Tables 15A-15G, Tables 16A-16C, or Table 27;
[0299] a first complementarity domain;
[0300] a linking domain;
[0301] a second complementarity domain (which is complementary to the first complementarity domain);
[0302] a proximal domain; and optionally, a tail domain.

[0303] In an embodiment, a modular gRNA comprises:
[0304] a first strand comprising, preferably from 5′ to 3′;
   [0305] a targeting domain (which is complementary to a target nucleic acid in the UL19, UL30, UL48 or UL54 gene, e.g., a targeting domain from Tables 1A-1G, Tables 2A-2G, Tables 3A-3G, Tables 4A-4F, Tables 5A-5E, Tables 6A-6G, Tables 7A-7D, Tables 8A-8E, Tables 9A-9G, Tables 10A-10C, Tables 11A-11E, Tables 12A-12G, Tables 13A-13C, Tables 14A-14E, Tables 15A-15G, Tables 16A-16C, or Table 27); and
   [0306] a first complementarity domain; and
[0307] a second strand, comprising, preferably from 5′ to 3′: optionally, a 5′ extension domain;
   [0308] a second complementarity domain;
   [0309] a proximal domain; and
   [0310] optionally, a tail domain.

[0311] The domains are discussed briefly below.

### The Targeting Domain

[0312] FIGS. 1A-1G provide examples of the placement of targeting domains.

[0313] The targeting domain comprises a nucleotide sequence that is complementary, e.g., at least 80, 85, 90, or 95% complementary, e.g., fully complementary, to the target sequence on the target nucleic acid. The targeting domain is part of an RNA molecule and will therefore comprise the base uracil (U), while any DNA encoding the gRNA molecule will comprise the base thymine (T). While not wishing to be bound by theory, in an embodiment, it is believed that the complementarity of the targeting domain with the target sequence contributes to specificity of the interaction of the gRNA molecule/Cas9 molecule complex with a target nucleic acid. It is understood that in a targeting domain and target sequence pair, the uracil bases in the targeting domain will pair with the adenine bases in the target sequence. In an embodiment, the target domain itself comprises in the 5′ to 3′ direction, an optional secondary domain, and a core domain. In an embodiment, the core domain is fully complementary with the target sequence. In an embodiment, the targeting domain is 5 to 50 nucleotides in length. The strand of the target nucleic acid with which the targeting domain is complementary is referred to herein as the complementary strand. Some or all of the nucleotides of the domain can have a modification, e.g., a modification found in Section VIII herein.

[0314] In an embodiment, the targeting domain is 16 nucleotides in length.

[0315] In an embodiment, the targeting domain is 17 nucleotides in length.

[0316] In an embodiment, the targeting domain is 18 nucleotides in length.

[0317] In an embodiment, the targeting domain is 19 nucleotides in length.

[0318] In an embodiment, the targeting domain is 20 nucleotides in length.

[0319] In an embodiment, the targeting domain is 21 nucleotides in length.

[0320] In an embodiment, the targeting domain is 22 nucleotides in length.

[0321] In an embodiment, the targeting domain is 23 nucleotides in length.

[0322] In an embodiment, the targeting domain is 24 nucleotides in length.

[0323] In an embodiment, the targeting domain is 25 nucleotides in length.

[0324] In an embodiment, the targeting domain is 26 nucleotides in length.

[0325] In an embodiment, the targeting domain comprises 16 nucleotides.

[0326] In an embodiment, the targeting domain comprises 17 nucleotides.

[0327] In an embodiment, the targeting domain comprises 18 nucleotides.

[0328] In an embodiment, the targeting domain comprises 19 nucleotides.

[0329] In an embodiment, the targeting domain comprises 20 nucleotides.

[0330] In an embodiment, the targeting domain comprises 21 nucleotides.

[0331] In an embodiment, the targeting domain comprises 22 nucleotides.

[0332] In an embodiment, the targeting domain comprises 23 nucleotides.

[0333] In an embodiment, the targeting domain comprises 24 nucleotides.

[0334] In an embodiment, the targeting domain comprises 25 nucleotides.

[0335] In an embodiment, the targeting domain comprises 26 nucleotides.

[0336] Targeting domains are discussed in more detail below.

### The First Complementarity Domain

[0337] FIGS. 1A-IG provide examples of first complementarity domains.

[0338] The first complementarity domain is complementary with the second complementarity domain, and in an embodiment, has sufficient complementarity to the second complementarity domain to form a duplexed region under at least some physiological conditions. In an embodiment, the first complementarity domain is 5 to 30 nucleotides in length. In an embodiment, the first complementarity domain is 5 to 25 nucleotides in length. In an embodiment, the first complementary domain is 7 to 25 nucleotides in length. In an embodiment, the first complementary domain is 7 to 22 nucleotides in length. In an embodiment, the first complementary domain is 7 to 18 nucleotides in length. In an embodiment, the first complementary domain is 7 to 15 nucleotides in length. In an embodiment, the first complementary domain is 5, 6, 7, 8, 9, 10, 11, 12, 13, 14, 15, 16, 17, 18, 19, 20, 21, 22, 23, 24, or 25 nucleotides in length.

[0339] In an embodiment, the first complementarity domain comprises 3 subdomains, which, in the 5′ to 3′ direction are: a 5′ subdomain, a central subdomain, and a 3′ subdomain. In an embodiment, the 5′ subdomain is 4 to 9, e.g., 4, 5, 6, 7, 8 or 9 nucleotides in length. In an embodiment, the central subdomain is 1, 2, or 3, e.g., 1, nucleotide in length. In an embodiment, the 3′ subdomain is 3 to 25, e.g., 4 to 22, 4 to 18, or 4 to 10, or 3, 4, 5, 6, 7, 8, 9, 10, 11, 12, 13, 14, 15, 16, 17, 18, 19, 20, 21, 22, 23, 24, or 25 nucleotides in length.

[0340] The first complementarity domain can share homology with, or be derived from, a naturally occurring first complementarity domain. In an embodiment, it has at least 50% homology with a first complementarity domain disclosed herein, e.g., an S. pyogenes, S. aureus or S. thermophilus, first complementarity domain.

[0341] Some or all of the nucleotides of the domain can have a modification, e.g., a modification found in Section VIII herein.

[0342] First complementarity domains are discussed in more detail below.

### The Linking Domain

[0343] FIGS. 1A-1G provide examples of linking domains.

[0344] A linking domain serves to link the first complementarity domain with the second complementarity domain of a unimolecular gRNA. The linking domain can link the first and second complementarity domains covalently or non-covalently. In an embodiment, the linkage is covalent. In an embodiment, the linking domain covalently couples the first and second complementarity domains, see, e.g., FIGS. 1B-1E. In an embodiment, the linking domain is, or comprises, a covalent bond interposed between the first complementarity domain and the second complementarity domain. Typically the linking domain comprises one or more, e.g., 2, 3, 4, 5, 6, 7, 8, 9, or 10 nucleotides.

[0345] In modular gRNA molecules the two molecules are associated by virtue of the hybridization of the complementarity domains see e.g., FIG. 1A.

[0346] A wide variety of linking domains are suitable for use in unimolecular gRNA molecules. Linking domains can consist of a covalent bond, or be as short as one or a few nucleotides, e.g., 1, 2, 3, 4, or 5 nucleotides in length. In an embodiment, a linking domain is 2, 3, 4, 5, 6, 7, 8, 9, 10, 15, 20, or 25 or more nucleotides in length. In an embodiment, a linking domain is 2 to 50, 2 to 40, 2 to 30, 2 to 20, 2 to 10, or 2 to 5 nucleotides in length. In an embodiment, a linking domain shares homology with, or is derived from, a naturally occurring sequence, e.g., the sequence of a tracrRNA that is 5′ to the second complementarity domain. In an embodiment, the linking domain has at least 50% homology with a linking domain disclosed herein.

[0347] Some or all of the nucleotides of the domain can have a modification, e.g., a modification found in Section VIII herein.

[0348] Linking domains are discussed in more detail below.

### The 5′ Extension Domain

[0349] In an embodiment, a modular gRNA can comprise additional sequence, 5′ to the second complementarity domain, referred to herein as the 5′ extension domain, see, e.g., FIG. 1A. In an embodiment, the 5′ extension domain is, 2 to 10, 2 to 9, 2 to 8, 2 to 7, 2 to 6, 2 to 5, or 2 to 4 nucleotides in length. In an embodiment, the 5′ extension domain is 2, 3, 4, 5, 6, 7, 8, 9, or 10 or more nucleotides in length.

### The Second Complementarity Domain

[0350] FIGS. 1A-1G provide examples of second complementarity domains.

[0351] The second complementarity domain is complementary with the first complementarity domain, and in an embodiment, has sufficient complementarity to the second complementarity domain to form a duplexed region under at least some physiological conditions. In an embodiment, e.g., as shown in FIGS. 1A-1B, the second complementarity domain can include sequence that lacks complementarity with the first complementarity domain, e.g., sequence that loops out from the duplexed region.

[0352] In an embodiment, the second complementarity domain is 5 to 27 nucleotides in length. In an embodiment, it is longer than the first complementarity region. In an embodiment the second complementary domain is 7 to 27 nucleotides in length. In an embodiment, the second complementary domain is 7 to 25 nucleotides in length. In an embodiment, the second complementary domain is 7 to 20 nucleotides in length. In an embodiment, the second complementary domain is 7 to 17 nucleotides in length. In an embodiment, the complementary domain is 5, 6, 7, 8, 9, 10, 11, 12, 13, 14, 15, 16, 17, 18, 19, 20, 21, 22, 23, 24 or 25 nucleotides in length.

[0353] In an embodiment, the second complementarity domain comprises 3 subdomains, which, in the 5′ to 3′ direction are: a 5′ subdomain, a central subdomain, and a 3′ subdomain. In an embodiment, the 5′ subdomain is 3 to 25, e.g., 4 to 22, 4 to 18, or 4 to 10, or 3, 4, 5, 6, 7, 8, 9, 10, 11, 12, 13, 14, 15, 16, 17, 18, 19, 20, 21, 22, 23, 24, or 25 nucleotides in length. In an embodiment, the central subdomain is 1, 2, 3, 4 or 5, e.g., 3, nucleotides in length. In an embodiment, the 3′ subdomain is 4 to 9, e.g., 4, 5, 6, 7, 8 or 9 nucleotides in length.

[0354] In an embodiment, the 5′ subdomain and the 3′ subdomain of the first complementarity domain, are respectively, complementary, e.g., fully complementary, with the 3′ subdomain and the 5′ subdomain of the second complementarity domain.

[0355] The second complementarity domain can share homology with or be derived from a naturally occurring second complementarity domain. In an embodiment, it has at least 50% homology with a second complementarity domain disclosed herein, e.g., an S. pyogenes, S. aureus or S. thermophilus, first complementarity domain.

[0356] Some or all of the nucleotides of the domain can have a modification, e.g., a modification found in Section VIII herein.

A Proximal domain

[0357] FIGS. 1A-1G provide examples of proximal domains.

[0358] In an embodiment, the proximal domain is 5 to 20 nucleotides in length. In an embodiment, the proximal domain can share homology with or be derived from a naturally occurring proximal domain. In an embodiment, it has at least 50% homology with a proximal domain disclosed herein, e.g., an S. pyogenes, S. aureus or S. thermophilus, proximal domain.

[0359] Some or all of the nucleotides of the domain can have a modification, e.g., a modification found in Section VIII herein.

### A Tail Domain

[0360] FIGS. 1A-1G provide examples of tail domains.

[0361] As can be seen by inspection of the tail domains in FIGS. 1A-1E, a broad spectrum of tail domains are suitable for use in gRNA molecules. In an embodiment, the tail domain is 0 (absent), 1, 2, 3, 4, 5, 6, 7, 8, 9, or 10 nucleotides in length. In embodiment, the tail domain nucleotides are from or share homology with sequence from the 5′ end of a naturally occurring tail domain, see e.g., FIG. 1D or FIG. 1E. In an embodiment, the tail domain includes sequences that are complementary to each other and which, under at least some physiological conditions, form a duplexed region.

[0362] In an embodiment, the tail domain is absent or is 1 to 50 nucleotides in length. In an embodiment, the tail domain can share homology with or be derived from a naturally occurring proximal tail domain. In an embodiment, it has at least 50% homology with a tail domain disclosed herein, e.g., an S. pyogenes, S. aureus or S. thermophilus, tail domain.

[0363] In an embodiment, the tail domain includes nucleotides at the 3′ end that are related to the method of in vitro or in vivo transcription. When a T7 promoter is used for in vitro transcription of the gRNA, these nucleotides may be any nucleotides present before the 3′ end of the DNA template. When a U6 promoter is used for in vivo transcription, these nucleotides may be the sequence UUUUUU. When alternate pol-III promoters are used, these nucleotides may be various numbers or uracil bases or may include alternate bases.

[0364] The domains of gRNA molecules are described in more detail below.

### The Targeting Domain

[0365] The “targeting domain” of the gRNA is complementary to the “target domain” on the target nucleic acid. The strand of the target nucleic acid comprising the nucleotide sequence complementary to the core domain of the gRNA is referred to herein as the “complementary strand” of the target nucleic acid. Guidance on the selection of targeting domains can be found, e.g., in Fu Y et al., Nat Biotechnol 2014 (doi: 10.1038/nbt.2808) and Sternberg S H et al., Nature 2014 (doi: 10.1038/nature13011).

[0366] In an embodiment, the targeting domain is 16, 17, 18, 19, 20, 21, 22, 23, 24, 25 or 26 nucleotides in length.

[0367] In an embodiment, the targeting domain is 16 nucleotides in length.

[0368] In an embodiment, the targeting domain is 17 nucleotides in length.

[0369] In an embodiment, the targeting domain is 18 nucleotides in length.

[0370] In an embodiment, the targeting domain is 19 nucleotides in length.

[0371] In an embodiment, the targeting domain is 20 nucleotides in length.

[0372] In an embodiment, the targeting domain is 21 nucleotides in length.

[0373] In an embodiment, the targeting domain is 22 nucleotides in length.

[0374] In an embodiment, the targeting domain is 23 nucleotides in length.

[0375] In an embodiment, the targeting domain is 24 nucleotides in length.

[0376] In an embodiment, the targeting domain is 25 nucleotides in length.

[0377] In an embodiment, the targeting domain is 26 nucleotides in length.

[0378] In an embodiment, the targeting domain comprises 16 nucleotides.

[0379] In an embodiment, the targeting domain comprises 17 nucleotides.

[0380] In an embodiment, the targeting domain comprises 18 nucleotides.

[0381] In an embodiment, the targeting domain comprises 19 nucleotides.

[0382] In an embodiment, the targeting domain comprises 20 nucleotides.

[0383] In an embodiment, the targeting domain comprises 21 nucleotides.

[0384] In an embodiment, the targeting domain comprises 22 nucleotides.

[0385] In an embodiment, the targeting domain comprises 23 nucleotides.

[0386] In an embodiment, the targeting domain comprises 24 nucleotides.

[0387] In an embodiment, the targeting domain comprises 25 nucleotides.

[0388] In an embodiment, the targeting domain comprises 26 nucleotides.

[0389] In an embodiment, the targeting domain is 10+/−5, 20+/−5, 30+/−5, 40+/−5, 50+/−5, 60+/−5, 70+/−5, 80+/−5, 90+/−5, or 100+/−5 nucleotides, in length.

[0390] In an embodiment, the targeting domain is 20+/−5 nucleotides in length.

[0391] In an embodiment, the targeting domain is 20+/−10, 30+/−10, 40+/−10, 50+/−10, 60+/−10, 70+/−10, 80+/−10, 90+/−10, or 100+/−10 nucleotides, in length.

[0392] In an embodiment, the targeting domain is 30+/−10 nucleotides in length.

[0393] In an embodiment, the targeting domain is 10 to 100, 10 to 90, 10 to 80, 10 to 70, 10 to 60, 10 to 50, 10 to 40, 10 to 30, 10 to 20 or 10 to 15 nucleotides in length. In another embodiment, the targeting domain is 20 to 100, 20 to 90, 20 to 80, 20 to 70, 20 to 60, 20 to 50, 20 to 40, 20 to 30, or 20 to 25 nucleotides in length.

[0394] Typically the targeting domain has full complementarity with the target sequence. In an embodiment the targeting domain has or includes 1, 2, 3, 4, 5, 6, 7 or 8 nucleotides that are not complementary with the corresponding nucleotide of the targeting domain.

[0395] In an embodiment, the target domain includes 1, 2, 3, 4 or 5 nucleotides that are complementary with the corresponding nucleotide of the targeting domain within 5 nucleotides of its 5′ end. In an embodiment, the target domain includes 1, 2, 3, 4 or 5 nucleotides that are complementary with the corresponding nucleotide of the targeting domain within 5 nucleotides of its 3′ end.

[0396] In an embodiment, the target domain includes 1, 2, 3, or 4 nucleotides that are not complementary with the corresponding nucleotide of the targeting domain within 5 nucleotides of its 5′ end. In an embodiment, the target domain includes 1, 2, 3, or 4 nucleotides that are not complementary with the corresponding nucleotide of the targeting domain within 5 nucleotides of its 3′ end.

[0397] In an embodiment, the degree of complementarity, together with other properties of the gRNA, is sufficient to allow targeting of a Cas9 molecule to the target nucleic acid.

[0398] In some embodiments, the targeting domain comprises two consecutive nucleotides that are not complementary to the target domain (“non-complementary nucleotides”), e.g., two consecutive noncomplementary nucleotides that are within 5 nucleotides of the 5′ end of the targeting domain, within 5 nucleotides of the 3′ end of the targeting domain, or more than 5 nucleotides away from one or both ends of the targeting domain.

[0399] In an embodiment, no two consecutive nucleotides within 5 nucleotides of the 5′ end of the targeting domain, within 5 nucleotides of the 3′ end of the targeting domain, or within a region that is more than 5 nucleotides away from one or both ends of the targeting domain, are not complementary to the targeting domain.

[0400] In an embodiment, there are no noncomplementary nucleotides within 5 nucleotides of the 5′ end of the targeting domain, within 5 nucleotides of the 3′ end of the targeting domain, or within a region that is more than 5 nucleotides away from one or both ends of the targeting domain.

[0401] In an embodiment, the targeting domain nucleotides do not comprise modifications, e.g., modifications of the type provided in Section VIII. However, in an embodiment, the targeting domain comprises one or more modifications, e.g., modifications that it render it less susceptible to degradation or more bio-compatible, e.g., less immunogenic. By way of example, the backbone of the targeting domain can be modified with a phosphorothioate, or other modification(s) from Section VIII. In an embodiment, a nucleotide of the targeting domain can comprise a 2′ modification, e.g., a 2-acetylation, e.g., a 2′ methylation, or other modification(s) from Section VIII.

[0402] In some embodiments, the targeting domain includes 1, 2, 3, 4, 5, 6, 7 or 8 or more modifications. In an embodiment, the targeting domain includes 1, 2, 3, or 4 modifications within 5 nucleotides of its 5′ end. In an embodiment, the targeting domain comprises as many as 1, 2, 3, or 4 modifications within 5 nucleotides of its 3′ end.

[0403] In some embodiments, the targeting domain comprises modifications at two consecutive nucleotides, e.g., two consecutive nucleotides that are within 5 nucleotides of the 5′ end of the targeting domain, within 5 nucleotides of the 3′ end of the targeting domain, or more than 5 nucleotides away from one or both ends of the targeting domain.

[0404] In an embodiment, no two consecutive nucleotides are modified within 5 nucleotides of the 5′ end of the targeting domain, within 5 nucleotides of the 3′ end of the targeting domain, or within a region that is more than 5 nucleotides away from one or both ends of the targeting domain. In an embodiment, no nucleotide is modified within 5 nucleotides of the 5′ end of the targeting domain, within 5 nucleotides of the 3′ end of the targeting domain, or within a region that is more than 5 nucleotides away from one or both ends of the targeting domain.

[0405] Modifications in the targeting domain can be selected so as to not interfere with targeting efficacy, which can be evaluated by testing a candidate modification in the system described in Section IV. gRNAs having a candidate targeting domain having a selected length, sequence, degree of complementarity, or degree of modification, can be evaluated in a system in Section IV. The candidate targeting domain can be placed, either alone, or with one or more other candidate changes in a gRNA molecule/Cas9 molecule system known to be functional with a selected target and evaluated.

[0406] In an embodiment, all of the modified nucleotides are complementary to and capable of hybridizing to corresponding nucleotides present in the target domain. In another embodiment, 1, 2, 3, 4, 5, 6, 7 or 8 or more modified nucleotides are not complementary to or capable of hybridizing to corresponding nucleotides present in the target domain.

[0407] In an embodiment, the targeting domain comprises, preferably in the 5′-3′ direction: a secondary domain and a core domain. These domains are discussed in more detail below.

### The Core Domain and Secondary Domain of the Targeting Domain

[0408] The “core domain” of the targeting domain is complementary to the “core domain target” on the target nucleic acid. In an embodiment, the core domain comprises about 8 to about 13 nucleotides from the 3′ end of the targeting domain (e.g., the most 3′ 8 to 13 nucleotides of the targeting domain).

[0409] In an embodiment, the core domain and targeting domain, are independently, 6+/−2, 7+/−2, 8+/−2, 9+/−2, 10+/−2, 11+/−2, 12+/−2, 13+/−2, 14+/−2, 15+/−2, or 16+−2, nucleotides in length.

[0410] In an embodiment, the core domain and targeting domain, are independently, 10+/−2 nucleotides in length.

[0411] In an embodiment, the core domain and targeting domain, are independently, 10+/−4 nucleotides in length.

[0412] In an embodiment, the core domain and targeting domain are independently 6, 7, 8, 9, 10, 11, 12, 13, 14, 15, 16, 17, or 18 nucleotides in length.

[0413] In an embodiment, the core domain and targeting domain are independently 3 to 20, 4 to 20, 5 to 20, 6 to 20, 7 to 20, 8 to 20, 9 to 20, 10 to 20 or 15 to 20 nucleotides in length.

[0414] In an embodiment, the core domain and targeting domain are independently 3 to 15, e.g., 6 to 15, 7 to 14, 7 to 13, 6 to 12, 7 to 12, 7 to 11, 7 to 10, 8 to 14, 8 to 13, 8 to 12, 8 to 11, 8 to 10 or 8 to 9 nucleotides in length.

[0415] The core domain is complementary with the core domain target. Typically the core domain has exact complementarity with the core domain target. In some embodiments, the core domain can have 1, 2, 3, 4 or 5 nucleotides that are not complementary with the corresponding nucleotide of the core domain. In an embodiment, the degree of complementarity, together with other properties of the gRNA, is sufficient to allow targeting of a Cas9 molecule to the target nucleic acid.

[0416] The “secondary domain” of the targeting domain of the gRNA is complementary to the “secondary domain target” of the target nucleic acid.

[0417] In an embodiment, the secondary domain is positioned 5′ to the core domain.

[0418] In an embodiment, the secondary domain is absent or optional.

[0419] In an embodiment, if the targeting domain is 26 nucleotides in length and the core domain (counted from the 3′ end of the targeting domain) is 8 to 13 nucleotides in length, the secondary domain is 12 to 17 nucleotides in length.

[0420] In an embodiment, if the targeting domain is 25 nucleotides in length and the core domain (counted from the 3′ end of the targeting domain) is 8 to 13 nucleotides in length, the secondary domain is 12 to 17 nucleotides in length.

[0421] In an embodiment, if the targeting domain is 24 nucleotides in length and the core domain (counted from the 3′ end of the targeting domain) is 8 to 13 nucleotides in length, the secondary domain is 11 to 16 nucleotides in length.

[0422] In an embodiment, if the targeting domain is 23 nucleotides in length and the core domain (counted from the 3′ end of the targeting domain) is 8 to 13 nucleotides in length, the secondary domain is 10 to 15 nucleotides in length.

[0423] In an embodiment, if the targeting domain is 22 nucleotides in length and the core domain (counted from the 3′ end of the targeting domain) is 8 to 13 nucleotides in length, the secondary domain is 9 to 14 nucleotides in length.

[0424] In an embodiment, if the targeting domain is 21 nucleotides in length and the core domain (counted from the 3′ end of the targeting domain) is 8 to 13 nucleotides in length, the secondary domain is 8 to 13 nucleotides in length.

[0425] In an embodiment, if the targeting domain is 20 nucleotides in length and the core domain (counted from the 3′ end of the targeting domain) is 8 to 13 nucleotides in length, the secondary domain is 7 to 12 nucleotides in length.

[0426] In an embodiment, if the targeting domain is 19 nucleotides in length and the core domain (counted from the 3′ end of the targeting domain) is 8 to 13 nucleotides in length, the secondary domain is 6 to 11 nucleotides in length.

[0427] In an embodiment, if the targeting domain is 18 nucleotides in length and the core domain (counted from the 3′ end of the targeting domain) is 8 to 13 nucleotides in length, the secondary domain is 5 to 10 nucleotides in length.

[0428] In an embodiment, if the targeting domain is 17 nucleotides in length and the core domain (counted from the 3′ end of the targeting domain) is 8 to 13 nucleotides in length, the secondary domain is 4 to 9 nucleotides in length.

[0429] In an embodiment, if the targeting domain is 16 nucleotides in length and the core domain (counted from the 3′ end of the targeting domain) is 8 to 13 nucleotides in length, the secondary domain is 3 to 8 nucleotides in length.

[0430] In an embodiment, the secondary domain is 0, 1, 2, 3, 4, 5, 6, 7, 8, 9, 10, 11, 12, 13, 14 or 15 nucleotides in length.

[0431] The secondary domain is complementary with the secondary domain target. Typically the secondary domain has exact complementarity with the secondary domain target. In some embodiments the secondary domain can have 1, 2, 3, 4 or 5 nucleotides that are not complementary with the corresponding nucleotide of the secondary domain. In an embodiment, the degree of complementarity, together with other properties of the gRNA, is sufficient to allow targeting of a Cas9 molecule to the target nucleic acid.

[0432] In an embodiment, the core domain nucleotides do not comprise modifications, e.g., modifications of the type provided in Section VIII. However, in an embodiment, the core domain comprises one or more modifications, e.g., modifications that it render it less susceptible to degradation or more bio-compatible, e.g., less immunogenic. By way of example, the backbone of the core domain can be modified with a phosphorothioate, or other modification(s) from Section VIII. In an embodiment a nucleotide of the core domain can comprise a 2′ modification, e.g., a 2-acetylation, e.g., a 2′ methylation, or other modification(s) from Section VIII. Typically, a core domain will contain no more than 1, 2, or 3 modifications.

[0433] Modifications in the core domain can be selected so as to not interfere with targeting efficacy, which can be evaluated by testing a candidate modification in the system described in Section IV. gRNAs having a candidate core domain having a selected length, sequence, degree of complementarity, or degree of modification, can be evaluated in the system described at Section IV. The candidate core domain can be placed, either alone, or with one or more other candidate changes in a gRNA molecule/Cas9 molecule system known to be functional with a selected target and evaluated.

[0434] In an embodiment, the secondary domain nucleotides do not comprise modifications, e.g., modifications of the type provided in Section VIII. However, in an embodiment, the secondary domain comprises one or more modifications, e.g., modifications that render it less susceptible to degradation or more bio-compatible, e.g., less immunogenic. By way of example, the backbone of the secondary domain can be modified with a phosphorothioate, or other modification(s) from Section VIII. In an embodiment a nucleotide of the secondary domain can comprise a 2′ modification, e.g., a 2-acetylation, e.g., a 2′ methylation, or other modification(s) from Section VIII. Typically, a secondary domain will contain no more than 1, 2, or 3 modifications.

[0435] Modifications in the secondary domain can be selected to not interfere with targeting efficacy, which can be evaluated by testing a candidate modification in the system described in Section IV. gRNAs having a candidate secondary domain having a selected length, sequence, degree of complementarity, or degree of modification, can be evaluated in the system described at Section IV. The candidate secondary domain can be placed, either alone, or with one or more other candidate changes in a gRNA molecule/Cas9 molecule system known to be functional with a selected target and evaluated.

[0436] In an embodiment, (1) the degree of complementarity between the core domain and its target, and (2) the degree of complementarity between the secondary domain and its target, may differ. In an embodiment, (1) may be greater than (2). In an embodiment, (1) may be less than (2). In an embodiment, (1) and (2) are the same, e.g., each may be completely complementary with its target.

[0437] In an embodiment, (1) the number of modifications (e.g., modifications from Section VIII) of the nucleotides of the core domain and (2) the number of modifications (e.g., modifications from Section VIII) of the nucleotides of the secondary domain may differ. In an embodiment, (1) may be less than (2). In an embodiment, (1) may be greater than (2). In an embodiment, (1) and (2) may be the same, e.g., each may be free of modifications.

### The First and Second Complementarity Domains

[0438] The first complementarity domain is complementary with the second complementarity domain.

[0439] Typically the first domain does not have exact complementarity with the second complementarity domain target. In some embodiments, the first complementarity domain can have 1, 2, 3, 4 or 5 nucleotides that are not complementary with the corresponding nucleotide of the second complementarity domain. In an embodiment, 1, 2, 3, 4, 5 or 6, e.g., 3 nucleotides, will not pair in the duplex, and, e.g., form a non-duplexed or looped-out region. In an embodiment, an unpaired, or loop-out, region, e.g., a loop-out of 3 nucleotides, is present on the second complementarity domain. In an embodiment, the unpaired region begins 1, 2, 3, 4, 5, or 6, e.g., 4, nucleotides from the 5′ end of the second complementarity domain.

[0440] In an embodiment, the degree of complementarity, together with other properties of the gRNA, is sufficient to allow targeting of a Cas9 molecule to the target nucleic acid.

[0441] In an embodiment, the first and second complementarity domains are:
[0442] independently, 6+/−2, 7+/−2, 8+/−2, 9+/−2, 10+/−2, 11+/−2, 12+/−2, 13+/−2, 14+/−2, 15+/−2, 16+/−2, 17+/−2, 18+/−2, 19+/−2, or 20+/−2, 21+/−2, 22+/−2, 23+/−2, or 24+/−2 nucleotides in length;
[0443] independently, 6, 7, 8, 9, 10, 11, 12, 13, 14, 14, 16, 17, 18, 19, 20, 21, 22, 23, 24, 25, or 26 nucleotides in length; or
[0444] independently, 5 to 24, 5 to 23, 5 to 22, 5 to 21, 5 to 20, 7 to 18, 9 to 16, or 10 to 14 nucleotides in length.

[0445] In an embodiment, the second complementarity domain is longer than the first complementarity domain, e.g., 2, 3, 4, 5, or 6, e.g., 6, nucleotides longer.

[0446] In an embodiment, the first and second complementary domains, independently, do not comprise modifications, e.g., modifications of the type provided in Section VIII.

[0447] In an embodiment, the first and second complementary domains, independently, comprise one or more modifications, e.g., modifications that the render the domain less susceptible to degradation or more bio-compatible, e.g., less immunogenic. By way of example, the backbone of the domain can be modified with a phosphorothioate, or other modification(s) from Section VIII. In an embodiment a nucleotide of the domain can comprise a 2′ modification, e.g., a 2-acetylation, e.g., a 2′ methylation, or other modification(s) from Section VIII.

[0448] In an embodiment, the first and second complementary domains, independently, include 1, 2, 3, 4, 5, 6, 7 or 8 or more modifications. In an embodiment, the first and second complementary domains, independently, include 1, 2, 3, or 4 modifications within 5 nucleotides of its 5′ end. In an embodiment, the first and second complementary domains, independently, include as many as 1, 2, 3, or 4 modifications within 5 nucleotides of its 3′ end.

[0449] In an embodiment, the first and second complementary domains, independently, include modifications at two consecutive nucleotides, e.g., two consecutive nucleotides that are within 5 nucleotides of the 5′ end of the domain, within 5 nucleotides of the 3′ end of the domain, or more than 5 nucleotides away from one or both ends of the domain. In an embodiment, the first and second complementary domains, independently, include no two consecutive nucleotides that are modified, within 5 nucleotides of the 5′ end of the domain, within 5 nucleotides of the 3′ end of the domain, or within a region that is more than 5 nucleotides away from one or both ends of the domain. In an embodiment, the first and second complementary domains, independently, include no nucleotide that is modified within 5 nucleotides of the 5′ end of the domain, within 5 nucleotides of the 3′ end of the domain, or within a region that is more than 5 nucleotides away from one or both ends of the domain.

[0450] Modifications in a complementarity domain can be selected so as to not interfere with targeting efficacy, which can be evaluated by testing a candidate modification in the system described in Section IV. gRNAs having a candidate complementarity domain having a selected length, sequence, degree of complementarity, or degree of modification, can be evaluated in the system described in Section IV. The candidate complementarity domain can be placed, either alone, or with one or more other candidate changes in a gRNA molecule/Cas9 molecule system known to be functional with a selected target and evaluated.

[0451] In an embodiment, the first complementarity domain has at least 60, 70, 80, 85%, 90% or 95% homology with, or differs by no more than 1, 2, 3, 4, 5, or 6 nucleotides from, a reference first complementarity domain, e.g., a naturally occurring, e.g., an S. pyogenes, S. aureus or S. thermophilus, first complementarity domain, or a first complementarity domain described herein, e.g., from FIGS. 1A-1G.

[0452] In an embodiment, the second complementarity domain has at least 60, 70, 80, 85%, 90%, or 95% homology with, or differs by no more than 1, 2, 3, 4, 5, or 6 nucleotides from, a reference second complementarity domain, e.g., a naturally occurring, e.g., an S. pyogenes, S. aureus or S. thermophilus, second complementarity domain, or a second complementarity domain described herein, e.g., from FIGS. 1A-1G.

[0453] The duplexed region formed by first and second complementarity domains is typically 6, 7, 8, 9, 10, 11, 12, 13, 14, 15, 16, 17, 18, 19, 20, 21 or 22 base pairs in length (excluding any looped out or unpaired nucleotides).

[0454] In some embodiments, the first and second complementarity domains, when duplexed, comprise 11 paired nucleotides, for example, in the gRNA sequence (one paired strand underlined, one bolded):

(SEQ ID NO: 5)
NNNNNNNNNNNNNNNNNNNNGUUUUAGAGCUAGAAAUAGCAAGUUAAAAU
AAGGCUAGUCCGUUAUCAACUUGAAAAAGUGGCACCGAGUCGGUGC.

[0455] In some embodiments, the first and second complementarity domains, when duplexed, comprise 15 paired nucleotides, for example in the gRNA sequence (one paired strand underlined, one bolded):

(SEQ ID NO: 27)
NNNNNNNNNNNNNNNNNNNNGUUUUAGAGCUAUGCUGAAAAGCAUAGCAA
GUUAAAAUAAGGCUAGUCCGUUAUCAACUUGAAAAAGUGGCACCGAGUCG
GUGC.

[0456] In some embodiments the first and second complementarity domains, when duplexed, comprise 16 paired nucleotides, for example in the gRNA sequence (one paired strand underlined, one bolded):

(SEQ ID NO: 28)
NNNNNNNNNNNNNNNNNNNNGUUUUAGAGCUAUGCUGGAAACAGCAUAGC
AAGUUAAAAUAAGGCUAGUCCGUUAUCAACUUGAAAAAGUGGCACCGAGU
CGGUGC.

[0457] In some embodiments the first and second complementarity domains, when duplexed, comprise 21 paired nucleotides, for example in the gRNA sequence (one paired strand underlined, one bolded):

(SEQ ID NO: 29)
NNNNNNNNNNNNNNNNNNNNGUUUUAGAGCUAUGCUGUUUUGGAAACAAA
ACAGCAUAGCAAGUUAAAAUAAGGCUAGUCCGUUAUCAACUUGAAAAAGU
GGCACCGAGUCGGUGC.

[0458] In some embodiments, nucleotides are exchanged to remove poly-U tracts, for example in the gRNA sequences (exchanged nucleotides underlined):

(SEQ ID NO: 30)
NNNNNNNNNNNNNNNNNNNNGUAUUAGAGCUAGAAAUAGCAAGUUAAUAU
AAGGCUAGUCCGUUAUCAACUUGAAAAAGUGGCACCGAGUCGGUGC;
(SEQ ID NO: 31)
NNNNNNNNNNNNNNNNNNNNGUUUAAGAGCUAGAAAUAGCAAGUUUAAAU
AAGGCUAGUCCGUUAUCAACUUGAAAAAGUGGCACCGAGUCGGUGC;
or
(SEQ ID NO: 32)
NNNNNNNNNNNNNNNNNNNNGUAUUAGAGCUAUGCUGUAUUGGAAACAAU
ACAGCAUAGCAAGUUAAUAUAAGGCUAGUCCGUUAUCAACUUGAAAAAGU
GGCACCGAGUCGGUGC.

### The 5′ Extension Domain

[0459] In an embodiment, a modular gRNA can comprise additional sequence, 5′ to the second complementarity domain. In an embodiment, the 5′ extension domain is 2 to 10, 2 to 9, 2 to 8, 2 to 7, 2 to 6, 2 to 5, or 2 to 4 nucleotides in length. In an embodiment, the 5′ extension domain is 2, 3, 4, 5, 6, 7, 8, 9, or 10 or more nucleotides in length.

[0460] In an embodiment, the 5′ extension domain nucleotides do not comprise modifications, e.g., modifications of the type provided in Section VIII. However, in an embodiment, the 5′ extension domain comprises one or more modifications, e.g., modifications that it render it less susceptible to degradation or more bio-compatible, e.g., less immunogenic. By way of example, the backbone of the 5′ extension domain can be modified with a phosphorothioate, or other modification(s) from Section VIII. In an embodiment, a nucleotide of the 5′ extension domain can comprise a 2′ modification, e.g., a 2-acetylation, e.g., a 2′ methylation, or other modification(s) from Section VIII.

[0461] In an embodiment, the 5′ extension domain can comprise as many as 1, 2, 3, 4, 5, 6, 7 or 8 modifications. In an embodiment, the 5′ extension domain comprises as many as 1, 2, 3, or 4 modifications within 5 nucleotides of its 5′ end, e.g., in a modular gRNA molecule. In an embodiment, the 5′ extension domain comprises as many as 1, 2, 3, or 4 modifications within 5 nucleotides of its 3′ end, e.g., in a modular gRNA molecule.

[0462] In an embodiment, the 5′ extension domain comprises modifications at two consecutive nucleotides, e.g., two consecutive nucleotides that are within 5 nucleotides of the 5′ end of the 5′ extension domain, within 5 nucleotides of the 3′ end of the 5′ extension domain, or more than 5 nucleotides away from one or both ends of the 5′ extension domain.

[0463] In an embodiment, no two consecutive nucleotides are modified within 5 nucleotides of the 5′ end of the 5′ extension domain, within 5 nucleotides of the 3′ end of the 5′ extension domain, or within a region that is more than 5 nucleotides away from one or both ends of the 5′ extension domain. In an embodiment, no nucleotide is modified within 5 nucleotides of the 5′ end of the 5′ extension domain, within 5 nucleotides of the 3′ end of the 5′ extension domain, or within a region that is more than 5 nucleotides away from one or both ends of the 5′ extension domain.

[0464] Modifications in the 5′ extension domain can be selected so as to not interfere with gRNA molecule efficacy, which can be evaluated by testing a candidate modification in the system described in Section IV. gRNAs having a candidate 5′ extension domain having a selected length, sequence, degree of complementarity, or degree of modification, can be evaluated in the system described at Section IV. The candidate 5′ extension domain can be placed, either alone, or with one or more other candidate changes in a gRNA molecule/Cas9 molecule system known to be functional with a selected target and evaluated.

[0465] In an embodiment, the 5′ extension domain has at least 60, 70, 80, 85, 90 or 95% homology with, or differs by no more than 1, 2, 3, 4, 5, or 6 nucleotides from, a reference 5′ extension domain, e.g., a naturally occurring, e.g., an S. pyogenes, S. aureus or S. thermophilus, 5′ extension domain, or a 5′ extension domain described herein, e.g., from FIGS. 1A-1G.

### The Linking Domain

[0466] In a unimolecular gRNA molecule the linking domain is disposed between the first and second complementarity domains. In a modular gRNA molecule, the two molecules are associated with one another by the complementarity domains.

[0467] In an embodiment, the linking domain is 10+/−5, 20+/−5, 30+/−5, 40+/−5, 50+/−5, 60+/−5, 70+/−5, 80+/−5, 90+/−5, or 100+/−5 nucleotides, in length.

[0468] In an embodiment, the linking domain is 20+/−10, 30+/−10, 40+/−10, 50+/−10, 60+/−10, 70+/−10, 80+/−10, 90+/−10, or 100+/−10 nucleotides, in length.

[0469] In an embodiment, the linking domain is 10 to 100, 10 to 90, 10 to 80, 10 to 70, 10 to 60, 10 to 50, 10 to 40, 10 to 30, 10 to 20 or 10 to 15 nucleotides in length. In other embodiments, the linking domain is 20 to 100, 20 to 90, 20 to 80, 20 to 70, 20 to 60, 20 to 50, 20 to 40, 20 to 30, or 20 to 25 nucleotides in length.

[0470] In an embodiment, the linking domain is 1, 2, 3, 4, 5, 6, 7, 8, 9, 10, 11, 12, 13, 14, 15, 16, 17, 18, 19, or 20 nucleotides in length.

[0471] In an embodiment, the linking domain is a covalent bond.

[0472] In an embodiment, the linking domain comprises a duplexed region, typically adjacent to or within 1, 2, or 3 nucleotides of the 3′ end of the first complementarity domain and/or the 5-end of the second complementarity domain. In an embodiment, the duplexed region can be 20+/−10 base pairs in length. In an embodiment, the duplexed region can be 10+/−5, 15+/−5, 20+/−5, or 30+/−5 base pairs in length. In an embodiment, the duplexed region can be 1, 2, 3, 4, 5, 6, 7, 8, 9, 10, 11, 12, 13, 14, or 15 base pairs in length.

[0473] Typically the sequences forming the duplexed region have exact complementarity with one another, though in some embodiments as many as 1, 2, 3, 4, 5, 6, 7 or 8 nucleotides are not complementary with the corresponding nucleotides.

[0474] In an embodiment, the linking domain nucleotides do not comprise modifications, e.g., modifications of the type provided in Section VIII. However, in an embodiment, the linking domain comprises one or more modifications, e.g., modifications that it render it less susceptible to degradation or more bio-compatible, e.g., less immunogenic. By way of example, the backbone of the linking domain can be modified with a phosphorothioate, or other modification(s) from Section VIII. In an embodiment a nucleotide of the linking domain can comprise a 2′ modification, e.g., a 2-acetylation, e.g., a 2′ methylation, or other modification(s) from Section VIII. In an embodiment, the linking domain can comprise as many as 1, 2, 3, 4, 5, 6, 7 or 8 modifications.

[0475] Modifications in a linking domain can be selected so as to not interfere with targeting efficacy, which can be evaluated by testing a candidate modification in the system described in Section IV. gRNAs having a candidate linking domain having a selected length, sequence, degree of complementarity, or degree of modification, can be evaluated a system described in Section IV. A candidate linking domain can be placed, either alone, or with one or more other candidate changes in a gRNA molecule/Cas9 molecule system known to be functional with a selected target and evaluated.

[0476] In an embodiment, the linking domain has at least 60, 70, 80, 85, 90 or 95% homology with, or differs by no more than 1, 2, 3, 4, 5, or 6 nucleotides from, a reference linking domain, e.g., a linking domain described herein, e.g., from FIGS. 1A-1G.

### The Proximal Domain

[0477] In an embodiment, the proximal domain is 6+/−2, 7+/−2, 8+/−2, 9+/−2, 10+/−2, 11+/−2, 12+/−2, 13+/−2, 14+/−2, 14+/−2, 16+/−2, 17+/−2, 18+/−2, 19+/−2, or 20+/−2 nucleotides in length.

[0478] In an embodiment, the proximal domain is 6, 7, 8, 9, 10, 11, 12, 13, 14, 15, 16, 17, 18, 19, 20, 21, 22, 23, 24, 25 or 26 nucleotides in length.

[0479] In an embodiment, the proximal domain is 5 to 20, 7, to 18, 9 to 16, or 10 to 14 nucleotides in length.

[0480] In an embodiment, the proximal domain nucleotides do not comprise modifications, e.g., modifications of the type provided in Section VIII. However, in an embodiment, the proximal domain comprises one or more modifications, e.g., modifications that it render it less susceptible to degradation or more bio-compatible, e.g., less immunogenic. By way of example, the backbone of the proximal domain can be modified with a phosphorothioate, or other modification(s) from Section VIII. In an embodiment a nucleotide of the proximal domain can comprise a 2′ modification, e.g., a 2-acetylation, e.g., a 2′ methylation, or other modification(s) from Section VIII.

[0481] In an embodiment, the proximal domain can comprise as many as 1, 2, 3, 4, 5, 6, 7 or 8 modifications. In an embodiment, the proximal domain comprises as many as 1, 2, 3, or 4 modifications within 5 nucleotides of its 5′ end, e.g., in a modular gRNA molecule. In an embodiment, the target domain comprises as many as 1, 2, 3, or 4 modifications within 5 nucleotides of its 3′ end, e.g., in a modular gRNA molecule.

[0482] In an embodiment, the proximal domain comprises modifications at two consecutive nucleotides, e.g., two consecutive nucleotides that are within 5 nucleotides of the 5′ end of the proximal domain, within 5 nucleotides of the 3′ end of the proximal domain, or more than 5 nucleotides away from one or both ends of the proximal domain. In an embodiment, no two consecutive nucleotides are modified within 5 nucleotides of the 5′ end of the proximal domain, within 5 nucleotides of the 3′ end of the proximal domain, or within a region that is more than 5 nucleotides away from one or both ends of the proximal domain. In an embodiment, no nucleotide is modified within 5 nucleotides of the 5′ end of the proximal domain, within 5 nucleotides of the 3′ end of the proximal domain, or within a region that is more than 5 nucleotides away from one or both ends of the proximal domain.

[0483] Modifications in the proximal domain can be selected so as to not interfere with gRNA molecule efficacy, which can be evaluated by testing a candidate modification in the system described in Section IV. gRNAs having a candidate proximal domain having a selected length, sequence, degree of complementarity, or degree of modification, can be evaluated in the system described at Section IV. The candidate proximal domain can be placed, either alone, or with one or more other candidate changes in a gRNA molecule/Cas9 molecule system known to be functional with a selected target and evaluated.

[0484] In an embodiment, the proximal domain has at least 60, 70, 80, 85, 90 or 95% homology with, or differs by no more than 1, 2, 3, 4, 5, or 6 nucleotides from, a reference proximal domain, e.g., a naturally occurring, e.g., an S. pyogenes, S. aureus or S. thermophilus, proximal domain, or a proximal domain described herein, e.g., from FIGS. 1A-1G.

### The Tail Domain

[0485] In an embodiment, the tail domain is 10+/−5, 20+/−5, 30+/−5, 40+/−5, 50+/−5, 60+/−5, 70+/−5, 80+/−5, 90+/−5, or 100+/−5 nucleotides, in length.

[0486] In an embodiment, the tail domain is 20+/−5 nucleotides in length.

[0487] In an embodiment, the tail domain is 20+/−10, 30+/−10, 40+/−10, 50+/−10, 60+/−10, 70+/−10, 80+/−10, 90+/−10, or 100+/−10 nucleotides, in length.

[0488] In an embodiment, the tail domain is 25+/−10 nucleotides in length.

[0489] In an embodiment, the tail domain is 10 to 100, 10 to 90, 10 to 80, 10 to 70, 10 to 60, 10 to 50, 10 to 40, 10 to 30, 10 to 20 or 10 to 15 nucleotides in length.

[0490] In other embodiments, the tail domain is 20 to 100, 20 to 90, 20 to 80, 20 to 70, 20 to 60, 20 to 50, 20 to 40, 20 to 30, or 20 to 25 nucleotides in length.

[0491] In an embodiment, the tail domain is 1 to 20, 1 to 15, 1 to 10, or 1 to 5 nucleotides in length.

[0492] In an embodiment, the tail domain nucleotides do not comprise modifications, e.g., modifications of the type provided in Section VIII. However, in an embodiment, the tail domain comprises one or more modifications, e.g., modifications that it render it less susceptible to degradation or more bio-compatible, e.g., less immunogenic. By way of example, the backbone of the tail domain can be modified with a phosphorothioate, or other modification(s) from Section VIII. In an embodiment a nucleotide of the tail domain can comprise a 2′ modification, e.g., a 2-acetylation, e.g., a 2′ methylation, or other modification(s) from Section VIII.

[0493] In some embodiments, the tail domain can have as many as 1, 2, 3, 4, 5, 6, 7 or 8 modifications. In an embodiment, the target domain comprises as many as 1, 2, 3, or 4 modifications within 5 nucleotides of its 5′ end. In an embodiment, the target domain comprises as many as 1, 2, 3, or 4 modifications within 5 nucleotides of its 3′ end.

[0494] In an embodiment, the tail domain comprises a tail duplex domain, which can form a tail duplexed region. In an embodiment, the tail duplexed region can be 3, 4, 5, 6, 7, 8, 9, 10, 11, or 12 base pairs in length. In an embodiment, a further single stranded domain, exists 3′ to the tail duplexed domain. In an embodiment, this domain is 3, 4, 5, 6, 7, 8, 9, or 10 nucleotides in length. In an embodiment it is 4 to 6 nucleotides in length.

[0495] In an embodiment, the tail domain has at least 60, 70, 80, or 90% homology with, or differs by no more than 1, 2, 3, 4, 5, or 6 nucleotides from, a reference tail domain, e.g., a naturally occurring, e.g., an S. pyogenes, S. aureus or S. thermophilus, tail domain, or a tail domain described herein, e.g., from FIGS. 1A-1G.

[0496] In an embodiment, the proximal and tail domain, taken together, comprise the following sequences:

(SEQ ID NO: 33)
AAGGCUAGUCCGUUAUCAACUUGAAAAAGUGGCACCGAGUCGGUGCU,
or
(SEQ ID NO: 34)
AAGGCUAGUCCGUUAUCAACUUGAAAAAGUGGCACCGAGUCGGUGGUGC,
or
(SEQ ID NO: 35)
AAGGCUAGUCCGUUAUCAACUUGAAAAAGUGGCACCGAGUCGGUGCGGAU
C,
or
(SEQ ID NO: 36)
AAGGCUAGUCCGUUAUCAACUUGAAAAAGUG,
or
(SEQ ID NO: 37)
AAGGCUAGUCCGUUAUCA,
or
(SEQ ID NO: 38)
AAGGCUAGUCCG.

[0497] In an embodiment, the tail domain comprises the 3′ sequence UUUUUU, e.g., if a U6 promoter is used for transcription.

[0498] In an embodiment, the tail domain comprises the 3′ sequence UUUU, e.g., if an H1 promoter is used for transcription.

[0499] In an embodiment, tail domain comprises variable numbers of 3′ Us depending, e.g., on the termination signal of the pol-III promoter used.

[0500] In an embodiment, the tail domain comprises variable 3′ sequence derived from the DNA template if a T7 promoter is used.

[0501] In an embodiment, the tail domain comprises variable 3′ sequence derived from the DNA template, e.g., if in vitro transcription is used to generate the RNA molecule.

[0502] In an embodiment, the tail domain comprises variable 3′ sequence derived from the DNA template, e., if a pol-II promoter is used to drive transcription.

[0503] Modifications in the tail domain can be selected so as to not interfere with targeting efficacy, which can be evaluated by testing a candidate modification in the system described in Section IV. gRNAs having a candidate tail domain having a selected length, sequence, degree of complementarity, or degree of modification, can be evaluated in the system described in Section IV. The candidate tail domain can be placed, either alone, or with one or more other candidate changes in a gRNA molecule/Cas9 molecule system known to be functional with a selected target and evaluated.

[0504] In an embodiment, the tail domain comprises modifications at two consecutive nucleotides, e.g., two consecutive nucleotides that are within 5 nucleotides of the 5′ end of the tail domain, within 5 nucleotides of the 3′ end of the tail domain, or more than 5 nucleotides away from one or both ends of the tail domain. In an embodiment, no two consecutive nucleotides are modified within 5 nucleotides of the 5′ end of the tail domain, within 5 nucleotides of the 3′ end of the tail domain, or within a region that is more than 5 nucleotides away from one or both ends of the tail domain. In an embodiment, no nucleotide is modified within 5 nucleotides of the 5′ end of the tail domain, within 5 nucleotides of the 3′ end of the tail domain, or within a region that is more than 5 nucleotides away from one or both ends of the tail domain.

[0505] In an embodiment a gRNA has the following structure:
[0506] 5′ [targeting domain]-[first complementarity domain]-[linking domain]-[second complementarity domain]-[proximal domain]-[tail domain]-3′
[0507] wherein, the targeting domain comprises a core domain and optionally a secondary domain, and is 10 to 50 nucleotides in length;
[0508] the first complementarity domain is 5 to 25 nucleotides in length and, In an embodiment has at least 50, 60, 70, 80, 85, 90 or 95% homology with a reference first complementarity domain disclosed herein;
[0509] the linking domain is 1 to 5 nucleotides in length;
[0510] the second complementarity domain is 5 to 27 nucleotides in length and, in an embodiment has at least 50, 60, 70, 80, 85, 90 or 95% homology with a reference second complementarity domain disclosed herein;
[0511] the proximal domain is 5 to 20 nucleotides in length and, in an embodiment has at least 50, 60, 70, 80, 85, 90 or 95% homology with a reference proximal domain disclosed herein; and
[0512] the tail domain is absent or a nucleotide sequence is 1 to 50 nucleotides in length and, in an embodiment has at least 50, 60, 70, 80, 85, 90 or 95% homology with a reference tail domain disclosed herein.
   Exemplary Chimeric gRNAs

[0513] In an embodiment, a unimolecular, or chimeric, gRNA comprises, preferably from 5′ to 3′:
[0514] a targeting domain (which is complementary to a target nucleic acid);
[0515] a first complementarity domain, e.g., comprising 15, 16, 17, 18, 19, 20, 21, 22, 23, 24, 25, or 26 nucleotides;
[0516] a linking domain;
[0517] a second complementarity domain (which is complementary to the first complementarity domain);
[0518] a proximal domain; and
[0519] a tail domain,
[0520] wherein,
[0521] (a) the proximal and tail domain, when taken together, comprise at least 15, 18, 20, 25, 30, 31, 35, 40, 45, 49, 50, or 53 nucleotides;
[0522] (b) there are at least 15, 18, 20, 25, 30, 31, 35, 40, 45, 49, 50, or 53 nucleotides 3′ to the last nucleotide of the second complementarity domain; or
[0523] (c) there are at least 16, 19, 21, 26, 31, 32, 36, 41, 46, 50, 51, or 54 nucleotides 3′ to the last nucleotide of the second complementarity domain that is complementary to its corresponding nucleotide of the first complementarity domain.

[0524] In an embodiment, the sequence from (a), (b), or (c), has at least 60, 75, 80, 85, 90, 95, or 99% homology with the corresponding sequence of a naturally occurring gRNA, or with a gRNA described herein.

[0525] In an embodiment, the proximal and tail domain, when taken together, comprise at least 15, 18, 20, 25, 30, 31, 35, 40, 45, 49, 50, or 53 nucleotides.

[0526] In an embodiment, there are at least 15, 18, 20, 25, 30, 31, 35, 40, 45, 49, 50, or 53 nucleotides 3′ to the last nucleotide of the second complementarity domain.

[0527] In an embodiment, there are at least 16, 19, 21, 26, 31, 32, 36, 41, 46, 50, 51, or 54 nucleotides 3′ to the last nucleotide of the second complementarity domain that is complementary to its corresponding nucleotide of the first complementarity domain.

[0528] In an embodiment, the targeting domain comprises, has, or consists of, 16, 17, 18, 19, 20, 21, 22, 23, 24, 25 or 26 nucleotides (e.g., 16, 17, 18, 19, 20, 21, 22, 23, 24, 25 or 26 consecutive nucleotides) having complementarity with the target domain, e.g., the targeting domain is 16, 17, 18, 19, 20, 21, 22, 23, 24, 25 or 26 nucleotides in length.

[0529] In an embodiment, the targeting domain comprises, has, or consists of, 16 nucleotides (e.g., 16 consecutive nucleotides) having complementarity with the target domain, e.g., the targeting domain is 16 nucleotides in length.

[0530] In an embodiment, the targeting domain comprises, has, or consists of, 17 nucleotides (e.g., 17 consecutive nucleotides) having complementarity with the target domain, e.g., the targeting domain is 17 nucleotides in length.

[0531] In an embodiment, the targeting domain comprises, has, or consists of, 18 nucleotides (e.g., 18 consecutive nucleotides) having complementarity with the target domain, e.g., the targeting domain is 18 nucleotides in length.

[0532] In an embodiment, the targeting domain comprises, has, or consists of, 19 nucleotides (e.g., 19 consecutive nucleotides) having complementarity with the target domain, e.g., the targeting domain is 19 nucleotides in length.

[0533] In an embodiment, the targeting domain comprises, has, or consists of, 20 nucleotides (e.g., 20 consecutive nucleotides) having complementarity with the target domain, e.g., the targeting domain is 20 nucleotides in length.

[0534] In an embodiment, the targeting domain comprises, has, or consists of, 21 nucleotides (e.g., 21 consecutive nucleotides) having complementarity with the target domain, e.g., the targeting domain is 21 nucleotides in length.

[0535] In an embodiment, the targeting domain comprises, has, or consists of, 22 nucleotides (e.g., 22 consecutive nucleotides) having complementarity with the target domain, e.g., the targeting domain is 22 nucleotides in length.

[0536] In an embodiment, the targeting domain comprises, has, or consists of, 23 nucleotides (e.g., 23 consecutive nucleotides) having complementarity with the target domain, e.g., the targeting domain is 23 nucleotides in length.

[0537] In an embodiment, the targeting domain comprises, has, or consists of, 24 nucleotides (e.g., 24 consecutive nucleotides) having complementarity with the target domain, e.g., the targeting domain is 24 nucleotides in length.

[0538] In an embodiment, the targeting domain comprises, has, or consists of, 25 nucleotides (e.g., 25 consecutive nucleotides) having complementarity with the target domain, e.g., the targeting domain is 25 nucleotides in length.

[0539] In an embodiment, the targeting domain comprises, has, or consists of, 26 nucleotides (e.g., 26 consecutive nucleotides) having complementarity with the target domain, e.g., the targeting domain is 26 nucleotides in length.

[0540] In an embodiment, the targeting domain comprises, has, or consists of, 16 nucleotides (e.g., 16 consecutive nucleotides) having complementarity with the target domain, e.g., the targeting domain is 16 nucleotides in length; and the proximal and tail domain, when taken together, comprise at least 15, 18, 20, 25, 30, 31, 35, 40, 45, 49, 50, or 53 nucleotides.

[0541] In an embodiment, the targeting domain comprises, has, or consists of, 16 nucleotides (e.g., 16 consecutive nucleotides) having complementarity with the target domain, e.g., the targeting domain is 16 nucleotides in length; and there are at least 15, 18, 20, 25, 30, 31, 35, 40, 45, 49, 50, or 53 nucleotides 3′ to the last nucleotide of the second complementarity domain.

[0542] In an embodiment, the targeting domain comprises, has, or consists of, 16 nucleotides (e.g., 16 consecutive nucleotides) having complementarity with the target domain, e.g., the targeting domain is 16 nucleotides in length; and there are at least 16, 19, 21, 26, 31, 32, 36, 41, 46, 50, 51, or 54 nucleotides 3′ to the last nucleotide of the second complementarity domain that is complementary to its corresponding nucleotide of the first complementarity domain.

[0543] In an embodiment, the targeting domain comprises, has, or consists of, 17 nucleotides (e.g., 17 consecutive nucleotides) having complementarity with the target domain, e.g., the targeting domain is 17 nucleotides in length; and the proximal and tail domain, when taken together, comprise at least 15, 18, 20, 25, 30, 31, 35, 40, 45, 49, 50, or 53 nucleotides.

[0544] In an embodiment, the targeting domain comprises, has, or consists of, 17 nucleotides (e.g., 17 consecutive nucleotides) having complementarity with the target domain, e.g., the targeting domain is 17 nucleotides in length; and there are at least 15, 18, 20, 25, 30, 31, 35, 40, 45, 49, 50, or 53 nucleotides 3′ to the last nucleotide of the second complementarity domain.

[0545] In an embodiment, the targeting domain comprises, has, or consists of, 17 nucleotides (e.g., 17 consecutive nucleotides) having complementarity with the target domain, e.g., the targeting domain is 17 nucleotides in length; and there are at least 16, 19, 21, 26, 31, 32, 36, 41, 46, 50, 51, or 54 nucleotides 3′ to the last nucleotide of the second complementarity domain that is complementary to its corresponding nucleotide of the first complementarity domain.

[0546] In an embodiment, the targeting domain comprises, has, or consists of, 18 nucleotides (e.g., 18 consecutive nucleotides) having complementarity with the target domain, e.g., the targeting domain is 18 nucleotides in length; and the proximal and tail domain, when taken together, comprise at least 15, 18, 20, 25, 30, 31, 35, 40, 45, 49, 50, or 53 nucleotides.

[0547] In an embodiment, the targeting domain comprises, has, or consists of, 18 nucleotides (e.g., 18 consecutive nucleotides) having complementarity with the target domain, e.g., the targeting domain is 18 nucleotides in length; and there are at least 15, 18, 20, 25, 30, 31, 35, 40, 45, 49, 50, or 53 nucleotides 3′ to the last nucleotide of the second complementarity domain.

[0548] In an embodiment, the targeting domain comprises, has, or consists of, 18 nucleotides (e.g., 18 consecutive nucleotides) having complementarity with the target domain, e.g., the targeting domain is 18 nucleotides in length; and there are at least 16, 19, 21, 26, 31, 32, 36, 41, 46, 50, 51, or 54 nucleotides 3′ to the last nucleotide of the second complementarity domain that is complementary to its corresponding nucleotide of the first complementarity domain.

[0549] In an embodiment, the targeting domain comprises, has, or consists of, 19 nucleotides (e.g., 19 consecutive nucleotides) having complementarity with the target domain, e.g., the targeting domain is 19 nucleotides in length; and the proximal and tail domain, when taken together, comprise at least 15, 18, 20, 25, 30, 31, 35, 40, 45, 49, 50, or 53 nucleotides.

[0550] In an embodiment, the targeting domain comprises, has, or consists of, 19 nucleotides (e.g., 19 consecutive nucleotides) having complementarity with the target domain, e.g., the targeting domain is 19 nucleotides in length; and there are at least 15, 18, 20, 25, 30, 31, 35, 40, 45, 49, 50, or 53 nucleotides 3′ to the last nucleotide of the second complementarity domain.

[0551] In an embodiment, the targeting domain comprises, has, or consists of, 19 nucleotides (e.g., 19 consecutive nucleotides) having complementarity with the target domain, e.g., the targeting domain is 19 nucleotides in length; and there are at least 16, 19, 21, 26, 31, 32, 36, 41, 46, 50, 51, or 54 nucleotides 3′ to the last nucleotide of the second complementarity domain that is complementary to its corresponding nucleotide of the first complementarity domain.

[0552] In an embodiment, the targeting domain comprises, has, or consists of, 20 nucleotides (e.g., 20 consecutive nucleotides) having complementarity with the target domain, e.g., the targeting domain is 20 nucleotides in length; and the proximal and tail domain, when taken together, comprise at least 15, 18, 20, 25, 30, 31, 35, 40, 45, 49, 50, or 53 nucleotides.

[0553] In an embodiment, the targeting domain comprises, has, or consists of, 20 nucleotides (e.g., 20 consecutive nucleotides) having complementarity with the target domain, e.g., the targeting domain is 20 nucleotides in length; and there are at least 15, 18, 20, 25, 30, 31, 35, 40, 45, 49, 50, or 53 nucleotides 3′ to the last nucleotide of the second complementarity domain.

[0554] In an embodiment, the targeting domain comprises, has, or consists of, 20 nucleotides (e.g., 20 consecutive nucleotides) having complementarity with the target domain, e.g., the targeting domain is 20 nucleotides in length; and there are at least 16, 19, 21, 26, 31, 32, 36, 41, 46, 50, 51, or 54 nucleotides 3′ to the last nucleotide of the second complementarity domain that is complementary to its corresponding nucleotide of the first complementarity domain.

[0555] In an embodiment, the targeting domain comprises, has, or consists of, 21 nucleotides (e.g., 21 consecutive nucleotides) having complementarity with the target domain, e.g., the targeting domain is 21 nucleotides in length; and the proximal and tail domain, when taken together, comprise at least 15, 18, 20, 25, 30, 31, 35, 40, 45, 49, 50, or 53 nucleotides.

[0556] In an embodiment, the targeting domain comprises, has, or consists of, 21 nucleotides (e.g., 21 consecutive nucleotides) having complementarity with the target domain, e.g., the targeting domain is 21 nucleotides in length; and there are at least 15, 18, 20, 25, 30, 31, 35, 40, 45, 49, 50, or 53 nucleotides 3′ to the last nucleotide of the second complementarity domain.

[0557] In an embodiment, the targeting domain comprises, has, or consists of, 21 nucleotides (e.g., 21 consecutive nucleotides) having complementarity with the target domain, e.g., the targeting domain is 21 nucleotides in length; and there are at least 16, 19, 21, 26, 31, 32, 36, 41, 46, 50, 51, or 54 nucleotides 3′ to the last nucleotide of the second complementarity domain that is complementary to its corresponding nucleotide of the first complementarity domain.

[0558] In an embodiment, the targeting domain comprises, has, or consists of, 22 nucleotides (e.g., 22 consecutive nucleotides) having complementarity with the target domain, e.g., the targeting domain is 22 nucleotides in length; and the proximal and tail domain, when taken together, comprise at least 15, 18, 20, 25, 30, 31, 35, 40, 45, 49, 50, or 53 nucleotides.

[0559] In an embodiment, the targeting domain comprises, has, or consists of, 22 nucleotides (e.g., 22 consecutive nucleotides) having complementarity with the target domain, e.g., the targeting domain is 22 nucleotides in length; and there are at least 15, 18, 20, 25, 30, 31, 35, 40, 45, 49, 50, or 53 nucleotides 3′ to the last nucleotide of the second complementarity domain.

[0560] In an embodiment, the targeting domain comprises, has, or consists of, 22 nucleotides (e.g., 22 consecutive nucleotides) having complementarity with the target domain, e.g., the targeting domain is 22 nucleotides in length; and there are at least 16, 19, 21, 26, 31, 32, 36, 41, 46, 50, 51, or 54 nucleotides 3′ to the last nucleotide of the second complementarity domain that is complementary to its corresponding nucleotide of the first complementarity domain.

[0561] In an embodiment, the targeting domain comprises, has, or consists of, 23 nucleotides (e.g., 23 consecutive nucleotides) having complementarity with the target domain, e.g., the targeting domain is 23 nucleotides in length; and the proximal and tail domain, when taken together, comprise at least 15, 18, 20, 25, 30, 31, 35, 40, 45, 49, 50, or 53 nucleotides.

[0562] In an embodiment, the targeting domain comprises, has, or consists of, 23 nucleotides (e.g., 23 consecutive nucleotides) having complementarity with the target domain, e.g., the targeting domain is 23 nucleotides in length; and there are at least 15, 18, 20, 25, 30, 31, 35, 40, 45, 49, 50, or 53 nucleotides 3′ to the last nucleotide of the second complementarity domain.

[0563] In an embodiment, the targeting domain comprises, has, or consists of, 23 nucleotides (e.g., 23 consecutive nucleotides) having complementarity with the target domain, e.g., the targeting domain is 23 nucleotides in length; and there are at least 16, 19, 21, 26, 31, 32, 36, 41, 46, 50, 51, or 54 nucleotides 3′ to the last nucleotide of the second complementarity domain that is complementary to its corresponding nucleotide of the first complementarity domain.

[0564] In an embodiment, the targeting domain comprises, has, or consists of, 24 nucleotides (e.g., 24 consecutive nucleotides) having complementarity with the target domain, e.g., the targeting domain is 24 nucleotides in length; and the proximal and tail domain, when taken together, comprise at least 15, 18, 20, 25, 30, 31, 35, 40, 45, 49, 50, or 53 nucleotides.

[0565] In an embodiment, the targeting domain comprises, has, or consists of, 24 nucleotides (e.g., 24 consecutive nucleotides) having complementarity with the target domain, e.g., the targeting domain is 24 nucleotides in length; and there are at least 15, 18, 20, 25, 30, 31, 35, 40, 45, 49, 50, or 53 nucleotides 3′ to the last nucleotide of the second complementarity domain.

[0566] In an embodiment, the targeting domain comprises, has, or consists of, 24 nucleotides (e.g., 24 consecutive nucleotides) having complementarity with the target domain, e.g., the targeting domain is 24 nucleotides in length; and there are at least 16, 19, 21, 26, 31, 32, 36, 41, 46, 50, 51, or 54 nucleotides 3′ to the last nucleotide of the second complementarity domain that is complementary to its corresponding nucleotide of the first complementarity domain.

[0567] In an embodiment, the targeting domain comprises, has, or consists of, 25 nucleotides (e.g., 25 consecutive nucleotides) having complementarity with the target domain, e.g., the targeting domain is 25 nucleotides in length; and the proximal and tail domain, when taken together, comprise at least 15, 18, 20, 25, 30, 31, 35, 40, 45, 49, 50, or 53 nucleotides.

[0568] In an embodiment, the targeting domain comprises, has, or consists of, 25 nucleotides (e.g., 25 consecutive nucleotides) having complementarity with the target domain, e.g., the targeting domain is 25 nucleotides in length; and there are at least 15, 18, 20, 25, 30, 31, 35, 40, 45, 49, 50, or 53 nucleotides 3′ to the last nucleotide of the second complementarity domain.

[0569] In an embodiment, the targeting domain comprises, has, or consists of, 25 nucleotides (e.g., 25 consecutive nucleotides) having complementarity with the target domain, e.g., the targeting domain is 25 nucleotides in length; and there are at least 16, 19, 21, 26, 31, 32, 36, 41, 46, 50, 51, or 54 nucleotides 3′ to the last nucleotide of the second complementarity domain that is complementary to its corresponding nucleotide of the first complementarity domain.

[0570] In an embodiment, the targeting domain comprises, has, or consists of, 26 nucleotides (e.g., 26 consecutive nucleotides) having complementarity with the target domain, e.g., the targeting domain is 26 nucleotides in length; and the proximal and tail domain, when taken together, comprise at least 15, 18, 20, 25, 30, 31, 35, 40, 45, 49, 50, or 53 nucleotides.

[0571] In an embodiment, the targeting domain comprises, has, or consists of, 26 nucleotides (e.g., 26 consecutive nucleotides) having complementarity with the target domain, e.g., the targeting domain is 26 nucleotides in length; and there are at least 15, 18, 20, 25, 30, 31, 35, 40, 45, 49, 50, or 53 nucleotides 3′ to the last nucleotide of the second complementarity domain.

[0572] In an embodiment, the targeting domain comprises, has, or consists of, 26 nucleotides (e.g., 26 consecutive nucleotides) having complementarity with the target domain, e.g., the targeting domain is 26 nucleotides in length; and there are at least 16, 19, 21, 26, 31, 32, 36, 41, 46, 50, 51, or 54 nucleotides 3′ to the last nucleotide of the second complementarity domain that is complementary to its corresponding nucleotide of the first complementarity domain.

[0573] In an embodiment, the unimolecular, or chimeric, gRNA molecule (comprising a targeting domain, a first complementary domain, a linking domain, a second complementary domain, a proximal domain and, optionally, a tail domain) comprises the following sequence in which the targeting domain is depicted as 20 Ns but could be any sequence and range in length from 16 to 26 nucleotides and in which the gRNA sequence is followed by 6 Us, which serve as a termination signal for the U6 promoter, but which could be either absent or fewer in number:
[0574] NNNNNNNNNNNNNNNNGUUUUAGAGCUAGAAAUAGCAAGUUAAAAUAA GGCUAGUCCGUUAUCAACUUGAAAAAGUGGCACCGAGUCGGUGCUUUUUU
   (SEQ ID NO: 45). In an embodiment, the unimolecular, or chimeric, gRNA molecule is a S. pyogenes gRNA molecule.

[0575] In some embodiments, the unimolecular, or chimeric, gRNA molecule (comprising a targeting domain, a first complementary domain, a linking domain, a second complementary domain, a proximal domain and, optionally, a tail domain) comprises the following sequence in which the targeting domain is depicted as 20 Ns but could be any sequence and range in length from 16 to 26 nucleotides and in which the gRNA sequence is followed by 6 Us, which serve as a termination signal for the U6 promoter, but which could be either absent or fewer in number:
[0576] NNNNNNNNNNNNNNNNNNGUUUUAGUACUCUGGAAACAGAAUCUACUAAA ACAAGGCAAAAUGCCGUGUUUAUCUCGUCAACUUGUUGGCGAGAUUUUUU
   (SEQ ID NO: 40). In an embodiment, the unimolecular, or chimeric, gRNA molecule is a S. aureus gRNA molecule.
   Exemplary Modular gRNAs

[0577] In an embodiment, a modular gRNA comprises:
[0578] a first strand comprising, preferably from 5′ to 3′;
   [0579] a targeting domain, e.g., comprising 15, 16, 17, 18, 19, 20, 21, 22, 23, 24, 25, or 26 nucleotides;
   [0580] a first complementarity domain; and
   [0581] a second strand, comprising, preferably from 5′ to 3′:
      [0582] optionally a 5′ extension domain;
   [0583] a second complementarity domain;
   [0584] a proximal domain; and
   [0585] a tail domain,
[0586] wherein:
   [0587] (a) the proximal and tail domain, when taken together, comprise at least 15, 18, 20, 25, 30, 31, 35, 40, 45, 49, 50, or 53 nucleotides;
[0588] (b) there are at least 15, 18, 20, 25, 30, 31, 35, 40, 45, 49, 50, or 53 nucleotides 3′ to the last nucleotide of the second complementarity domain; or
[0589] (c) there are at least 16, 19, 21, 26, 31, 32, 36, 41, 46, 50, 51, or 54 nucleotides 3′ to the last nucleotide of the second complementarity domain that is complementary to its corresponding nucleotide of the first complementarity domain.

[0590] In an embodiment, the sequence from (a), (b), or (c), has at least 60, 75, 80, 85, 90, 95, or 99% homology with the corresponding sequence of a naturally occurring gRNA, or with a gRNA described herein.

[0591] In an embodiment, the proximal and tail domain, when taken together, comprise at least 15, 18, 20, 25, 30, 31, 35, 40, 45, 49, 50, or 53 nucleotides.

[0592] In an embodiment there are at least 15, 18, 20, 25, 30, 31, 35, 40, 45, 49, 50, or 53 nucleotides 3′ to the last nucleotide of the second complementarity domain.

[0593] In an embodiment, there are at least 16, 19, 21, 26, 31, 32, 36, 41, 46, 50, 51, or 54 nucleotides 3′ to the last nucleotide of the second complementarity domain that is complementary to its corresponding nucleotide of the first complementarity domain.

[0594] In an embodiment, the targeting domain comprises, has, or consists of, 16, 17, 18, 19, 20, 21, 22, 23, 24, 25 or 26 nucleotides (e.g., 16, 17, 18, 19, 20, 21, 22, 23, 24, 25 or 26 consecutive nucleotides) having complementarity with the target domain, e.g., the targeting domain is 16, 17, 18, 19, 20, 21, 22, 23, 24, 25 or 26 nucleotides in length.

[0595] In an embodiment, the targeting domain comprises, has, or consists of, 16 nucleotides (e.g., 16 consecutive nucleotides) having complementarity with the target domain, e.g., the targeting domain is 16 nucleotides in length.

[0596] In an embodiment, the targeting domain comprises, has, or consists of, 17 nucleotides (e.g., 17 consecutive nucleotides) having complementarity with the target domain, e.g., the targeting domain is 17 nucleotides in length.

[0597] In an embodiment, the targeting domain comprises, has, or consists of, 18 nucleotides (e.g., 18 consecutive nucleotides) having complementarity with the target domain, e.g., the targeting domain is 18 nucleotides in length.

[0598] In an embodiment, the targeting domain comprises, has, or consists of, 19 nucleotides (e.g., 19 consecutive nucleotides) having complementarity with the target domain, e.g., the targeting domain is 19 nucleotides in length.

[0599] In an embodiment, the targeting domain comprises, has, or consists of, 20 nucleotides (e.g., 20 consecutive nucleotides) having complementarity with the target domain, e.g., the targeting domain is 20 nucleotides in length.

[0600] In an embodiment, the targeting domain comprises, has, or consists of, 21 nucleotides (e.g., 21 consecutive nucleotides) having complementarity with the target domain, e.g., the targeting domain is 21 nucleotides in length.

[0601] In an embodiment, the targeting domain comprises, has, or consists of, 22 nucleotides (e.g., 22 consecutive nucleotides) having complementarity with the target domain, e.g., the targeting domain is 22 nucleotides in length.

[0602] In an embodiment, the targeting domain comprises, has, or consists of, 23 nucleotides (e.g., 23 consecutive nucleotides) having complementarity with the target domain, e.g., the targeting domain is 23 nucleotides in length.

[0603] In an embodiment, the targeting domain comprises, has, or consists of, 24 nucleotides (e.g., 24 consecutive nucleotides) having complementarity with the target domain, e.g., the targeting domain is 24 nucleotides in length.

[0604] In an embodiment, the targeting domain comprises, has, or consists of, 25 nucleotides (e.g., 25 consecutive nucleotides) having complementarity with the target domain, e.g., the targeting domain is 25 nucleotides in length.

[0605] In an embodiment, the targeting domain comprises, has, or consists of, 26 nucleotides (e.g., 26 consecutive nucleotides) having complementarity with the target domain, e.g., the targeting domain is 26 nucleotides in length.

[0606] In an embodiment, the targeting domain comprises, has, or consists of, 16 nucleotides (e.g., 16 consecutive nucleotides) having complementarity with the target domain, e.g., the targeting domain is 16 nucleotides in length; and the proximal and tail domain, when taken together, comprise at least 15, 18, 20, 25, 30, 31, 35, 40, 45, 49, 50, or 53 nucleotides.

[0607] In an embodiment, the targeting domain comprises, has, or consists of, 16 nucleotides (e.g., 16 consecutive nucleotides) having complementarity with the target domain, e.g., the targeting domain is 16 nucleotides in length; and there are at least 15, 18, 20, 25, 30, 31, 35, 40, 45, 49, 50, or 53 nucleotides 3′ to the last nucleotide of the second complementarity domain.

[0608] In an embodiment, the targeting domain comprises, has, or consists of, 16 nucleotides (e.g., 16 consecutive nucleotides) having complementarity with the target domain, e.g., the targeting domain is 16 nucleotides in length; and there are at least 16, 19, 21, 26, 31, 32, 36, 41, 46, 50, 51, or 54 nucleotides 3′ to the last nucleotide of the second complementarity domain that is complementary to its corresponding nucleotide of the first complementarity domain.

[0609] In an embodiment, the targeting domain comprises, has, or consists of, 17 nucleotides (e.g., 17 consecutive nucleotides) having complementarity with the target domain, e.g., the targeting domain is 17 nucleotides in length; and the proximal and tail domain, when taken together, comprise at least 15, 18, 20, 25, 30, 31, 35, 40, 45, 49, 50, or 53 nucleotides.

[0610] In an embodiment, the targeting domain comprises, has, or consists of, 17 nucleotides (e.g., 17 consecutive nucleotides) having complementarity with the target domain, e.g., the targeting domain is 17 nucleotides in length; and there are at least 15, 18, 20, 25, 30, 31, 35, 40, 45, 49, 50, or 53 nucleotides 3′ to the last nucleotide of the second complementarity domain.

[0611] In an embodiment, the targeting domain comprises, has, or consists of, 17 nucleotides (e.g., 17 consecutive nucleotides) having complementarity with the target domain, e.g., the targeting domain is 17 nucleotides in length; and there are at least 16, 19, 21, 26, 31, 32, 36, 41, 46, 50, 51, or 54 nucleotides 3′ to the last nucleotide of the second complementarity domain that is complementary to its corresponding nucleotide of the first complementarity domain.

[0612] In an embodiment, the targeting domain comprises, has, or consists of, 18 nucleotides (e.g., 18 consecutive nucleotides) having complementarity with the target domain, e.g., the targeting domain is 18 nucleotides in length; and the proximal and tail domain, when taken together, comprise at least 15, 18, 20, 25, 30, 31, 35, 40, 45, 49, 50, or 53 nucleotides.

[0613] In an embodiment, the targeting domain comprises, has, or consists of, 18 nucleotides (e.g., 18 consecutive nucleotides) having complementarity with the target domain, e.g., the targeting domain is 18 nucleotides in length; and there are at least 15, 18, 20, 25, 30, 31, 35, 40, 45, 49, 50, or 53 nucleotides 3′ to the last nucleotide of the second complementarity domain.

[0614] In an embodiment, the targeting domain comprises, has, or consists of, 18 nucleotides (e.g., 18 consecutive nucleotides) having complementarity with the target domain, e.g., the targeting domain is 18 nucleotides in length; and there are at least 16, 19, 21, 26, 31, 32, 36, 41, 46, 50, 51, or 54 nucleotides 3′ to the last nucleotide of the second complementarity domain that is complementary to its corresponding nucleotide of the first complementarity domain.

[0615] In an embodiment, the targeting domain comprises, has, or consists of, 19 nucleotides (e.g., 19 consecutive nucleotides) having complementarity with the target domain, e.g., the targeting domain is 19 nucleotides in length; and the proximal and tail domain, when taken together, comprise at least 15, 18, 20, 25, 30, 31, 35, 40, 45, 49, 50, or 53 nucleotides.

[0616] In an embodiment, the targeting domain comprises, has, or consists of, 19 nucleotides (e.g., 19 consecutive nucleotides) having complementarity with the target domain, e.g., the targeting domain is 19 nucleotides in length; and there are at least 15, 18, 20, 25, 30, 31, 35, 40, 45, 49, 50, or 53 nucleotides 3′ to the last nucleotide of the second complementarity domain.

[0617] In an embodiment, the targeting domain comprises, has, or consists of, 19 nucleotides (e.g., 19 consecutive nucleotides) having complementarity with the target domain, e.g., the targeting domain is 19 nucleotides in length; and there are at least 16, 19, 21, 26, 31, 32, 36, 41, 46, 50, 51, or 54 nucleotides 3′ to the last nucleotide of the second complementarity domain that is complementary to its corresponding nucleotide of the first complementarity domain.

[0618] In an embodiment, the targeting domain comprises, has, or consists of, 20 nucleotides (e.g., 20 consecutive nucleotides) having complementarity with the target domain, e.g., the targeting domain is 20 nucleotides in length; and the proximal and tail domain, when taken together, comprise at least 15, 18, 20, 25, 30, 31, 35, 40, 45, 49, 50, or 53 nucleotides.

[0619] In an embodiment, the targeting domain comprises, has, or consists of, 20 nucleotides (e.g., 20 consecutive nucleotides) having complementarity with the target domain, e.g., the targeting domain is 20 nucleotides in length; and there are at least 15, 18, 20, 25, 30, 31, 35, 40, 45, 49, 50, or 53 nucleotides 3′ to the last nucleotide of the second complementarity domain.

[0620] In an embodiment, the targeting domain comprises, has, or consists of, 20 nucleotides (e.g., 20 consecutive nucleotides) having complementarity with the target domain, e.g., the targeting domain is 20 nucleotides in length; and there are at least 16, 19, 21, 26, 31, 32, 36, 41, 46, 50, 51, or 54 nucleotides 3′ to the last nucleotide of the second complementarity domain that is complementary to its corresponding nucleotide of the first complementarity domain.

[0621] In an embodiment, the targeting domain comprises, has, or consists of, 21 nucleotides (e.g., 21 consecutive nucleotides) having complementarity with the target domain, e.g., the targeting domain is 21 nucleotides in length; and the proximal and tail domain, when taken together, comprise at least 15, 18, 20, 25, 30, 31, 35, 40, 45, 49, 50, or 53 nucleotides.

[0622] In an embodiment, the targeting domain comprises, has, or consists of, 21 nucleotides (e.g., 21 consecutive nucleotides) having complementarity with the target domain, e.g., the targeting domain is 21 nucleotides in length; and there are at least 15, 18, 20, 25, 30, 31, 35, 40, 45, 49, 50, or 53 nucleotides 3′ to the last nucleotide of the second complementarity domain.

[0623] In an embodiment, the targeting domain comprises, has, or consists of, 21 nucleotides (e.g., 21 consecutive nucleotides) having complementarity with the target domain, e.g., the targeting domain is 21 nucleotides in length; and there are at least 16, 19, 21, 26, 31, 32, 36, 41, 46, 50, 51, or 54 nucleotides 3′ to the last nucleotide of the second complementarity domain that is complementary to its corresponding nucleotide of the first complementarity domain.

[0624] In an embodiment, the targeting domain comprises, has, or consists of, 22 nucleotides (e.g., 22 consecutive nucleotides) having complementarity with the target domain, e.g., the targeting domain is 22 nucleotides in length; and the proximal and tail domain, when taken together, comprise at least 15, 18, 20, 25, 30, 31, 35, 40, 45, 49, 50, or 53 nucleotides.

[0625] In an embodiment, the targeting domain comprises, has, or consists of, 22 nucleotides (e.g., 22 consecutive nucleotides) having complementarity with the target domain, e.g., the targeting domain is 22 nucleotides in length; and there are at least 15, 18, 20, 25, 30, 31, 35, 40, 45, 49, 50, or 53 nucleotides 3′ to the last nucleotide of the second complementarity domain.

[0626] In an embodiment, the targeting domain comprises, has, or consists of, 22 nucleotides (e.g., 22 consecutive nucleotides) having complementarity with the target domain, e.g., the targeting domain is 22 nucleotides in length; and there are at least 16, 19, 21, 26, 31, 32, 36, 41, 46, 50, 51, or 54 nucleotides 3′ to the last nucleotide of the second complementarity domain that is complementary to its corresponding nucleotide of the first complementarity domain.

[0627] In an embodiment, the targeting domain comprises, has, or consists of, 23 nucleotides (e.g., 23 consecutive nucleotides) having complementarity with the target domain, e.g., the targeting domain is 23 nucleotides in length; and the proximal and tail domain, when taken together, comprise at least 15, 18, 20, 25, 30, 31, 35, 40, 45, 49, 50, or 53 nucleotides.

[0628] In an embodiment, the targeting domain comprises, has, or consists of, 23 nucleotides (e.g., 23 consecutive nucleotides) having complementarity with the target domain, e.g., the targeting domain is 23 nucleotides in length; and there are at least 15, 18, 20, 25, 30, 31, 35, 40, 45, 49, 50, or 53 nucleotides 3′ to the last nucleotide of the second complementarity domain.

[0629] In an embodiment, the targeting domain comprises, has, or consists of, 23 nucleotides (e.g., 23 consecutive nucleotides) having complementarity with the target domain, e.g., the targeting domain is 23 nucleotides in length; and there are at least 16, 19, 21, 26, 31, 32, 36, 41, 46, 50, 51, or 54 nucleotides 3′ to the last nucleotide of the second complementarity domain that is complementary to its corresponding nucleotide of the first complementarity domain.

[0630] In an embodiment, the targeting domain comprises, has, or consists of, 24 nucleotides (e.g., 24 consecutive nucleotides) having complementarity with the target domain, e.g., the targeting domain is 24 nucleotides in length; and the proximal and tail domain, when taken together, comprise at least 15, 18, 20, 25, 30, 31, 35, 40, 45, 49, 50, or 53 nucleotides.

[0631] In an embodiment, the targeting domain comprises, has, or consists of, 24 nucleotides (e.g., 24 consecutive nucleotides) having complementarity with the target domain, e.g., the targeting domain is 24 nucleotides in length; and there are at least 15, 18, 20, 25, 30, 31, 35, 40, 45, 49, 50, or 53 nucleotides 3′ to the last nucleotide of the second complementarity domain.

[0632] In an embodiment, the targeting domain comprises, has, or consists of, 24 nucleotides (e.g., 24 consecutive nucleotides) having complementarity with the target domain, e.g., the targeting domain is 24 nucleotides in length; and there are at least 16, 19, 21, 26, 31, 32, 36, 41, 46, 50, 51, or 54 nucleotides 3′ to the last nucleotide of the second complementarity domain that is complementary to its corresponding nucleotide of the first complementarity domain.

[0633] In an embodiment, the targeting domain comprises, has, or consists of, 25 nucleotides (e.g., 25 consecutive nucleotides) having complementarity with the target domain, e.g., the targeting domain is 25 nucleotides in length; and the proximal and tail domain, when taken together, comprise at least 15, 18, 20, 25, 30, 31, 35, 40, 45, 49, 50, or 53 nucleotides.

[0634] In an embodiment, the targeting domain comprises, has, or consists of, 25 nucleotides (e.g., 25 consecutive nucleotides) having complementarity with the target domain, e.g., the targeting domain is 25 nucleotides in length; and there are at least 15, 18, 20, 25, 30, 31, 35, 40, 45, 49, 50, or 53 nucleotides 3′ to the last nucleotide of the second complementarity domain.

[0635] In an embodiment, the targeting domain comprises, has, or consists of, 25 nucleotides (e.g., 25 consecutive nucleotides) having complementarity with the target domain, e.g., the targeting domain is 25 nucleotides in length; and there are at least 16, 19, 21, 26, 31, 32, 36, 41, 46, 50, 51, or 54 nucleotides 3′ to the last nucleotide of the second complementarity domain that is complementary to its corresponding nucleotide of the first complementarity domain.

[0636] In an embodiment, the targeting domain comprises, has, or consists of, 26 nucleotides (e.g., 26 consecutive nucleotides) having complementarity with the target domain, e.g., the targeting domain is 26 nucleotides in length; and the proximal and tail domain, when taken together, comprise at least 15, 18, 20, 25, 30, 31, 35, 40, 45, 49, 50, or 53 nucleotides.

[0637] In an embodiment, the targeting domain comprises, has, or consists of, 26 nucleotides (e.g., 26 consecutive nucleotides) having complementarity with the target domain, e.g., the targeting domain is 26 nucleotides in length; and there are at least 15, 18, 20, 25, 30, 31, 35, 40, 45, 49, 50, or 53 nucleotides 3′ to the last nucleotide of the second complementarity domain.

[0638] In an embodiment, the targeting domain comprises, has, or consists of, 26 nucleotides (e.g., 26 consecutive nucleotides) having complementarity with the target domain, e.g., the targeting domain is 26 nucleotides in length; and there are at least 16, 19, 21, 26, 31, 32, 36, 41, 46, 50, 51, or 54 nucleotides 3′ to the last nucleotide of the second complementarity domain that is complementary to its corresponding nucleotide of the first complementarity domain.

I. Methods for Designing gRNAs

[0639] Methods for designing gRNAs are described herein, including methods for selecting, designing and validating target domains. Exemplary targeting domains are also provided herein. Targeting domains discussed herein can be incorporated into the gRNAs described herein.

[0640] Methods for selection and validation of target sequences as well as off-target analyses are described, e.g., in Mali et al., 2013 SCIENCE 339(6121): 823-826; Hsu et al. NAT BIOTECHNOL, 31(9): 827-32; Fu et al., 2014 NAT BIOTECHNOL, doi: 10.1038/nbt.2808. PubMed PMID: 24463574; Heigwer et al., 2014 NAT METHODS 11(2):122-3. doi: 10.1038/nmeth.2812. PubMed PMID: 24481216; Bae et al., 2014 BIOINFORMATICS PubMed PMID: 24463181; Xiao A et al., 2014 BIOINFORMATICS PubMed PMID: 24389662.

[0641] For example, a software tool can be used to optimize the choice of gRNA within a user's target sequence, e.g., to minimize total off-target activity across the genome. Off target activity may be other than cleavage. For each possible gRNA choice using S. pyogenes Cas9, the tool can identify all off-target sequences (preceding either NAG or NGG PAMs) across the genome that contain up to a certain number (e.g., 1, 2, 3, 4, 5, 6, 7, 8, 9, or 10) of mismatched base-pairs. The cleavage efficiency at each off-target sequence can be predicted, e.g., using an experimentally-derived weighting scheme. Each possible gRNA is then ranked according to its total predicted off-target cleavage; the top-ranked gRNAs represent those that are likely to have the greatest on-target and the least off-target cleavage. Other functions, e.g., automated reagent design for CRISPR construction, primer design for the on-target Surveyor assay, and primer design for high-throughput detection and quantification of off-target cleavage via next-gen sequencing, can also be included in the tool. Candidate gRNA molecules can be evaluated by art-known methods or as described in Section IV herein.

[0642] The Targeting domains discussed herein can be incorporated into the gRNAs described herein.

Strategies to Identify gRNAs for S. pyogenes, S. Aureus, and N. meningitidis to Knock Out the UL19 Gene

[0643] As an example, three strategies were utilized to identify gRNAs for use with S. pyogenes, S. aureus and N. meningitidis Cas9 enzymes.

[0644] In the first strategy, guide RNAs (gRNAs) for use with the S. pyogenes (Tables 1A-1C) Cas9 were identified using the publically available web-based ZiFiT server (Fu et al., Improving CRISPR-Cas nuclease specificity using truncated guide RNAs. Nat Biotechnol. 2014 Jan. 26. doi: 10.1038/nbt.2808. PubMed PMID: 24463574, for the original references see Sander et al., 2007, NAR 35:W599-605; Sander et al., 2010, NAR 38: W462-8). In addition to identifying potential gRNA sites adjacent to PAM sequences, the software also identifies all PAM adjacent sequences that differ by 1, 2, 3 or more nucleotides from the selected gRNA sites. Genomic DNA sequence for each gene was obtained from the UCSC Genome browser and sequences were screened for repeat elements using the publically available Repeat-Masker program. RepeatMmasker searches input DNA sequences for repeated elements and regions of low complexity. The output is a detailed annotation of the repeats present in a given query sequence. Following identification, gRNAs for use with a S. pyogenes Cas9 were ranked into 3 tiers.

[0645] The gRNAs in tier 1 were selected based on their distance to the target site and their orthogonality in the genome (based on the ZiFiT identification of close matches in the human genome containing an NGG PAM). As an example, for all targets, both 17-mer and 20-mer gRNAs were designed. gRNAs were also selected both for single-gRNA nuclease cutting and for the dual gRNA nickase strategy. Criteria for selecting gRNAs and the determination for which gRNAs can be used for which strategy is based on several considerations:
[0646] 1. For the dual nickase strategy, gRNA pairs should be oriented on the DNA such that PAMs are facing out and cutting with the D10A Cas9 nickase will result in 5′ overhangs.
[0647] 2. An assumption that cleaving with dual nickase pairs will result in deletion of the entire intervening sequence at a reasonable frequency. However, it will also often result in indel mutations at the site of only one of the gRNAs. Candidate pair members can be tested for how efficiently they remove the entire sequence versus just causing indel mutations at the site of one gRNA.

[0648] While it can be desirable to have gRNAs start with a 5′ G, this requirement was relaxed for some gRNAs in tier 1 in order to identify guides in the correct orientation, within a reasonable distance to the target position (i.e., within the first 500 bp of the coding sequence) and with a high level of orthogonality against the human genome. In order to find a pair for the dual-nickase strategy it was necessary to either extend the distance from the target position or remove the requirement for the 5′G. Tier 2 gRNAs were selected based on location within the first 500 bp of the coding sequence in the HSV gene. Tier 3 gRNAs were selected based on their location in the coding sequence, but downstream of the first 500 bp of the HSV gene. Note that tiers are non-inclusive (each gRNA is listed only once). In certain instances, no gRNA was identified based on the criteria of the particular tier.

[0649] As discussed above, gRNAs were identified for single-gRNA nuclease cleavage as well as for a dual-gRNA paired “nickase” strategy, as indicated.

[0650] gRNAs for use with the N. meningitidis (Tables 1F-1G) and S. aureus (Tables 1D-1E) Cas9s were identified manually by scanning genomic DNA sequence for the presence of PAM sequences. These gRNAs were separated into two tiers for each species. The first tier includes gRNAs selected based on location in the first 500 bp of the coding sequence of the HSV gene. The second tier includes gRNAs selected based on location in the coding sequence, but downstream of the first 500 bp of the HSV gene.

[0651] In a second strategy, Guide RNAs (gRNAs) for use with S. pyogenes, S. aureus and N. meningitidis Cas9s were identified using a DNA sequence searching algorithm. Guide RNA design was carried out using a custom guide RNA design software based on the public tool cas-offinder (reference:Cas-OFFinder: a fast and versatile algorithm that searches for potential off-target sites of Cas9 RNA-guided endonucleases., Bioinformatics. 2014 Feb. 17. Bae S, Park J, Kim J S. PMID: 24463181). Said custom guide RNA design software scores guides after calculating their genomewide off-target propensity. Typically matches ranging from perfect matches to 7 mismatches are considered for guides ranging in length from 17 to 24. Once the off-target sites are computationally determined, an aggregate score is calculated for each guide and summarized in a tabular output using a web-interface. In addition to identifying potential gRNA sites adjacent to PAM sequences, the software also identifies all PAM adjacent sequences that differ by 1, 2, 3 or more nucleotides from the selected gRNA sites. Genomic DNA sequence for each gene was obtained from the UCSC Genome browser and sequences were screened for repeat elements using the publically available RepeatMasker program. RepeatMasker searches input DNA sequences for repeated elements and regions of low complexity. The output is a detailed annotation of the repeats present in a given query sequence.

[0652] Following identification, gRNAs were ranked into tiers based on their distance to the target site, their orthogonality and presence of a 5′ G (based on identification of close matches in the human genome containing a relevant PAM (e.g., in the case of S. pyogenes, a NGG PAM, in the case of S. aureus, a NNGRRT or NNGRRV PAM, and in the case of N. meningitidis, a NNNNGATT or NNNNGCTT PAM). Orthogonality refers to the number of sequences in the human genome that contain a minimum number of mismatches to the target sequence. A “high level of orthogonality” or “good orthogonality” may, for example, refer to 20-mer gRNAs that have no identical sequences in the human genome besides the intended target, nor any sequences that contain one or two mismatches in the target sequence. Targeting domains with good orthogonality are selected to minimize off-target DNA cleavage.

[0653] As an example, for S. pyogenes and N. meningitidis targets, 17-mer, or 20-mer gRNAs were designed. As another example, for S. aureus targets, 18-mer, 19-mer, 20-mer, 21-mer, 22-mer, 23-mer and 24-mer gRNAs were designed. Targeting domains, disclosed herein, may comprise the 17-mer described in Tables 5A-5E, 6A-6G or 7A-7D, e.g., the targeting domains of 18 or more nucleotides may comprise the 17-mer gRNAs described in Tables 5A-5E, 6A-6G or 7A-7D. Targeting domains, disclosed herein, may comprises the 18-mer described in Tables 5A-5E, 6A-6G or 7A-7D, e.g., the targeting domains of 19 or more nucleotides may comprise the 18-mer gRNAs described in Tables 5A-5E, 6A-6G or 7A-7D. Targeting domains, disclosed herein, may comprises the 19-mer described in Tables 5A-5E, 6A-6G or 7A-7D, e.g., the targeting domains of 20 or more nucleotides may comprise the 19-mer gRNAs described in Tables 5A-5E, 6A-6G or 7A-7D. Targeting domains, disclosed herein, may comprises the 20-mer gRNAs described in Tables 5A-5E, 6A-6G or 7A-7D, e.g., the targeting domains of 21 or more nucleotides may comprise the 20-mer gRNAs described in Tables 5A-5E, 6A-6G or 7A-7D. Targeting domains, disclosed herein, may comprises the 21-mer described in Tables 5A-5E, 6A-6G or 7A-7D, e.g., the targeting domains of 22 or more nucleotides may comprise the 21-mer gRNAs described in Tables 5A-5E, 6A-6G or 7A-7D. Targeting domains, disclosed herein, may comprises the 22-mer described in Tables 5A-5E, 6A-6G or 7A-7D, e.g., the targeting domains of 23 or more nucleotides may comprise the 22-mer gRNAs described in Tables 5A-5E, 6A-6G or 7A-7D. Targeting domains, disclosed herein, may comprises the 23-mer described in Tables 5A-5E, 6A-6G or 7A-7D, e.g., the targeting domains of 24 or more nucleotides may comprise the 23-mer gRNAs described in Tables 5A-5E, 6A-6G or 7A-7D. Targeting domains, disclosed herein, may comprises the 24-mer described in Tables 5A-5E, 6A-6G or 7A-7D, e.g., the targeting domains of 25 or more nucleotides may comprise the 24-mer gRNAs described in Tables 5A-5E, 6A-6G or 7A-7D. gRNAs were identified for both single-gRNA nuclease cleavage and for a dual-gRNA paired “nickase” strategy. Criteria for selecting gRNAs and the determination for which gRNAs can be used for the dual-gRNA paired “nickase” strategy is based on two considerations:
[0654] 1. gRNA pairs should be oriented on the DNA such that PAMs are facing out and cutting with the D10A Cas9 nickase will result in 5′ overhangs.
[0655] 2. An assumption that cleaving with dual nickase pairs will result in deletion of the entire intervening sequence at a reasonable frequency. However, cleaving with dual nickase pairs can also result in indel mutations at the site of only one of the gRNAs. Candidate pair members can be tested for how efficiently they remove the entire sequence versus causing indel mutations at the site of one gRNA.

[0656] The targeting domains discussed herein can be incorporated into the gRNAs described herein.

[0657] gRNAs were identified and ranked into 5 tiers for S. pyogenes (Tables 5A-5E), and N. meningitidis (Tables 7A-7D); and 7 tiers for S. aureus (Tables 6A-6G). For S. pyogenes, and N. meningitidis, the targeting domain for tier 1 gRNA molecules were selected based on (1) distance to a target site (e.g., start codon), e.g., within 500 bp (e.g., downstream) of the target site (e.g., start codon), (2) a high level of orthogonality and (3) the presence of 5′G. The targeting domain for tier 2 gRNA molecules were selected based on (1) distance to a target site (e.g., start codon), e.g., within 500 bp (e.g., downstream) of the target site (e.g., start codon) and (2) a high level of orthogonality. The targeting domain for tier 3 gRNA molecules were selected based on (1) distance to a target site (e.g., start codon), e.g., within 500 bp (e.g., downstream) of the target site (e.g., start codon) and (2) the presence of 5′G. The targeting domain for tier 4 gRNA molecules were selected based on distance to a target site (e.g., start codon), e.g., within 500 bp (e.g., downstream) of the target site (e.g., start codon). The targeting domain for tier 5 gRNA molecules were selected based on distance to the target site (e.g., start codon), e.g., within reminder of the coding sequence, e.g., downstream of the first 500 bp of coding sequence (e.g., anywhere from +500 (relative to the start codon) to the stop codon). For S. aureus, the targeting domain for tier 1 gRNA molecules were selected based on (1) distance to a target site (e.g., start codon), e.g., within 500 bp (e.g., downstream) of the target site (e.g., start codon), (2) a high level of orthogonality, (3) the presence of 5′G and (4) PAM is NNGRRT. The targeting domain for tier 2 gRNA molecules were selected based on (1) distance to a target site (e.g., start codon), e.g., within 500 bp (e.g., downstream) of the target site (e.g., start codon), (2) a high level of orthogonality, and (3) PAM is NNGRRT. The targeting domain for tier 3 gRNA molecules were selected based on (1) distance to a target site (e.g., start codon), e.g., within 500 bp (e.g., downstream) of the target site (e.g., start codon) and (2) PAM is NNGRRT. The targeting domain for tier 4 gRNA molecules were selected based on (1) distance to a target site (e.g., start codon), e.g., within 500 bp (e.g., downstream) of the target site (e.g., start codon) and (2) PAM is NNGRRV. The targeting domain for tier 5 gRNA molecules were selected based on (1) distance to the target site (e.g., start codon), e.g., within reminder of the coding sequence, e.g., downstream of the first 500 bp of coding sequence (e.g., anywhere from +500 (relative to the start codon) to the stop codon), (2) the presence of 5′G and (3) PAM is NNGRRT. The targeting domain for tier 6 gRNA molecules were selected based on (1) distance to the target site (e.g., start codon), e.g., within reminder of the coding sequence, e.g., downstream of the first 500 bp of coding sequence (e.g., anywhere from +500 (relative to the start codon) to the stop codon) and (2) PAM is NNGRRT. The targeting domain for tier 7 gRNA molecules were selected based on (1) distance to the target site (e.g., start codon), e.g., within reminder of the coding sequence, e.g., downstream of the first 500 bp of coding sequence (e.g., anywhere from +500 (relative to the start codon) to the stop codon) and (2) PAM is NNGRRV. Note that tiers are non-inclusive (each gRNA is listed only once for the strategy). In certain instances, no gRNA was identified based on the criteria of the particular tier.

Strategies to Identify gRNAs for S. pyogenes, S. Aureus, and N. meningitidis to Knock Out the UL30 Gene

[0658] As an example, three strategies were utilized to identify gRNAs for use with S. pyogenes, S. aureus and N. meningitidis Cas9 enzymes.

[0659] In the first strategy, guide RNAs (gRNAs) for use with the S. pyogenes (Tables 2A-2C) Cas9 were identified using the publically available web-based ZiFiT server (Fu et al., Improving CRISPR-Cas nuclease specificity using truncated guide RNAs. Nat Biotechnol. 2014 Jan. 26. doi: 10.1038/nbt.2808. PubMed PMID: 24463574, for the original references see Sander et al., 2007, NAR 35:W599-605; Sander et al., 2010, NAR 38: W462-8). In addition to identifying potential gRNA sites adjacent to PAM sequences, the software also identifies all PAM adjacent sequences that differ by 1, 2, 3 or more nucleotides from the selected gRNA sites. Genomic DNA sequence for each gene was obtained from the UCSC Genome browser and sequences were screened for repeat elements using the publically available Repeat-Masker program. RepeatMmasker searches input DNA sequences for repeated elements and regions of low complexity. The output is a detailed annotation of the repeats present in a given query sequence. Following identification, gRNAs for use with a S. pyogenes Cas9 were ranked into 3 tiers.

[0660] The gRNAs in tier 1 were selected based on their distance to the target site and their orthogonality in the genome (based on the ZiFiT identification of close matches in the human genome containing an NGG PAM). As an example, for all targets, both 17-mer and 20-mer gRNAs were designed. gRNAs were also selected both for single-gRNA nuclease cutting and for the dual gRNA nickase strategy. Criteria for selecting gRNAs and the determination for which gRNAs can be used for which strategy is based on several considerations:
[0661] 1. For the dual nickase strategy, gRNA pairs should be oriented on the DNA such that PAMs are facing out and cutting with the D10A Cas9 nickase will result in 5′ overhangs.
[0662] 2. An assumption that cleaving with dual nickase pairs will result in deletion of the entire intervening sequence at a reasonable frequency. However, it will also often result in indel mutations at the site of only one of the gRNAs. Candidate pair members can be tested for how efficiently they remove the entire sequence versus just causing indel mutations at the site of one gRNA.

[0663] While it can be desirable to have gRNAs start with a 5′ G, this requirement was relaxed for some gRNAs in tier 1 in order to identify guides in the correct orientation, within a reasonable distance to the target position (i.e., within the first 500 bp of the coding sequence) and with a high level of orthogonality against the human genome. In order to find a pair for the dual-nickase strategy it was necessary to either extend the distance from the target position or remove the requirement for the 5′G. Tier 2 gRNAs were selected based on location within the first 500 bp of the coding sequence in the HSV gene. Tier 3 gRNAs were selected based on their location in the coding sequence, but downstream of the first 500 bp of the HSV gene. Note that tiers are non-inclusive (each gRNA is listed only once). In certain instances, no gRNA was identified based on the criteria of the particular tier.

[0664] As discussed above, gRNAs were identified for single-gRNA nuclease cleavage as well as for a dual-gRNA paired “nickase” strategy, as indicated. gRNAs for use with the N. meningitidis (Tables 2F-2G) and S. aureus (Tables 2D-2E) Cas9s were identified manually by scanning genomic DNA sequence for the presence of PAM sequences. These gRNAs were separated into two tiers for each species. The first tier includes gRNAs selected based on location in the first 500 bp of the coding sequence of the HSV gene. The second tier includes gRNAs selected based on location in the coding sequence, but downstream of the first 500 bp of the HSV gene.

[0665] In a second strategy, Guide RNAs (gRNAs) for use with S. pyogenes, S. aureus and N. meningitidis Cas9s were identified using a DNA sequence searching algorithm. Guide RNA design was carried out using a custom guide RNA design software based on the public tool cas-offinder (reference:Cas-OFFinder: a fast and versatile algorithm that searches for potential off-target sites of Cas9 RNA-guided endonucleases., Bioinformatics. 2014 Feb. 17. Bae S, Park J, Kim J S. PMID: 24463181). Said custom guide RNA design software scores guides after calculating their genome wide off-target propensity. Typically matches ranging from perfect matches to 7 mismatches are considered for guides ranging in length from 17 to 24. Once the off-target sites are computationally determined, an aggregate score is calculated for each guide and summarized in a tabular output using a web-interface. In addition to identifying potential gRNA sites adjacent to PAM sequences, the software also identifies all PAM adjacent sequences that differ by 1, 2, 3 or more nucleotides from the selected gRNA sites. Genomic DNA sequence for each gene was obtained from the UCSC Genome browser and sequences were screened for repeat elements using the publically available RepeatMasker program. RepeatMasker searches input DNA sequences for repeated elements and regions of low complexity. The output is a detailed annotation of the repeats present in a given query sequence.

[0666] Following identification, gRNAs were ranked into tiers based on their distance to the target site, their orthogonality and presence of a 5′ G (based on identification of close matches in the human genome containing a relevant PAM (e.g., in the case of S. pyogenes, a NGG PAM, in the case of S. aureus, a NNGRRT or NNGRRV PAM, and in the case of N. meningitidis, a NNNNGATT or NNNNGCTT PAM). Orthogonality refers to the number of sequences in the human genome that contain a minimum number of mismatches to the target sequence. A “high level of orthogonality” or “good orthogonality” may, for example, refer to 20-mer gRNAs that have no identical sequences in the human genome besides the intended target, nor any sequences that contain one or two mismatches in the target sequence. Targeting domains with good orthogonality are selected to minimize off-target DNA cleavage.

[0667] As an example, for S. pyogenes and N. meningitidis targets, 17-mer, or 20-mer gRNAs were designed. As another example, for S. aureus targets, 18-mer, 19-mer, 20-mer, 21-mer, 22-mer, 23-mer and 24-mer gRNAs were designed. Targeting domains, disclosed herein, may comprise the 17-mer described in Tables 8A-8E, 9A-9G or 10A-10C, e.g., the targeting domains of 18 or more nucleotides may comprise the 17-mer gRNAs described in Tables 8A-8E, 9A-9G or 10A-10C. Targeting domains, disclosed herein, may comprises the 18-mer described in Tables 8A-8E, 9A-9G or 10A-10C, e.g., the targeting domains of 19 or more nucleotides may comprise the 18-mer gRNAs described in Tables 8A-8E, 9A-9G or 10A-10C. Targeting domains, disclosed herein, may comprises the 19-mer described in Tables 8A-8E, 9A-9G or 10A-10C, e.g., the targeting domains of 20 or more nucleotides may comprise the 19-mer gRNAs described in Tables 8A-8E, 9A-9G or 10A-10C. Targeting domains, disclosed herein, may comprises the 20-mer gRNAs described in Tables 8A-8E, 9A-9G or 10A-10C, e.g., the targeting domains of 21 or more nucleotides may comprise the 20-mer gRNAs described in Tables 8A-8E, 9A-9G or 10A-10C. Targeting domains, disclosed herein, may comprises the 21-mer described in Tables 8A-8E, 9A-9G or 10A-10C, e.g., the targeting domains of 22 or more nucleotides may comprise the 21-mer gRNAs described in Tables 8A-8E, 9A-9G or 10A-10C. Targeting domains, disclosed herein, may comprises the 22-mer described in Tables 8A-8E, 9A-9G or 10A-10C, e.g., the targeting domains of 23 or more nucleotides may comprise the 22-mer gRNAs described in Tables 8A-8E, 9A-9G or 10A-10C. Targeting domains, disclosed herein, may comprises the 23-mer described in Tables 8A-8E, 9A-9G or 10A-10C, e.g., the targeting domains of 24 or more nucleotides may comprise the 23-mer gRNAs described in Tables 8A-8E, 9A-9G or 10A-10C. Targeting domains, disclosed herein, may comprises the 24-mer described in Tables 8A-8E, 9A-9G or 10A-10C, e.g., the targeting domains of 25 or more nucleotides may comprise the 24-mer gRNAs described in Tables 8A-8E, 9A-9G or 10A-10C. gRNAs were identified for both single-gRNA nuclease cleavage and for a dual-gRNA paired “nickase” strategy. Criteria for selecting gRNAs and the determination for which gRNAs can be used for the dual-gRNA paired “nickase” strategy is based on two considerations:
[0668] 1. gRNA pairs should be oriented on the DNA such that PAMs are facing out and cutting with the D10A Cas9 nickase will result in 5′ overhangs.
[0669] 2. An assumption that cleaving with dual nickase pairs will result in deletion of the entire intervening sequence at a reasonable frequency. However, cleaving with dual nickase pairs can also result in indel mutations at the site of only one of the gRNAs. Candidate pair members can be tested for how efficiently they remove the entire sequence versus causing indel mutations at the site of one gRNA.

[0670] The targeting domains discussed herein can be incorporated into the gRNAs described herein.

[0671] gRNAs were identified and ranked into 5 tiers for S. pyogenes (Tables 8A-8E), and N. meningitidis (Tables 10A-10C); and 7 tiers for S. aureus (Tables 9A-9G). For S. pyogenes, and N. meningitidis, the targeting domain for tier 1 gRNA molecules were selected based on (1) distance to a target site (e.g., start codon), e.g., within 500 bp (e.g., downstream) of the target site (e.g., start codon), (2) a high level of orthogonality and (3) the presence of 5′G. The targeting domain for tier 2 gRNA molecules were selected based on (1) distance to a target site (e.g., start codon), e.g., within 500 bp (e.g., downstream) of the target site (e.g., start codon) and (2) a high level of orthogonality. The targeting domain for tier 3 gRNA molecules were selected based on (1) distance to a target site (e.g., start codon), e.g., within 500 bp (e.g., downstream) of the target site (e.g., start codon) and (2) the presence of 5′G. The targeting domain for tier 4 gRNA molecules were selected based on distance to a target site (e.g., start codon), e.g., within 500 bp (e.g., downstream) of the target site (e.g., start codon). The targeting domain for tier 5 gRNA molecules were selected based on distance to the target site (e.g., start codon), e.g., within reminder of the coding sequence, e.g., downstream of the first 500 bp of coding sequence (e.g., anywhere from +500 (relative to the start codon) to the stop codon). For S. aureus, the targeting domain for tier 1 gRNA molecules were selected based on (1) distance to a target site (e.g., start codon), e.g., within 500 bp (e.g., downstream) of the target site (e.g., start codon), (2) a high level of orthogonality, (3) the presence of 5′G and (4) PAM is NNGRRT. The targeting domain for tier 2 gRNA molecules were selected based on (1) distance to a target site (e.g., start codon), e.g., within 500 bp (e.g., downstream) of the target site (e.g., start codon), (2) a high level of orthogonality, and (3) PAM is NNGRRT. The targeting domain for tier 3 gRNA molecules were selected based on (1) distance to a target site (e.g., start codon), e.g., within 500 bp (e.g., downstream) of the target site (e.g., start codon) and (2) PAM is NNGRRT. The targeting domain for tier 4 gRNA molecules were selected based on (1) distance to a target site (e.g., start codon), e.g., within 500 bp (e.g., downstream) of the target site (e.g., start codon) and (2) PAM is NNGRRV. The targeting domain for tier 5 gRNA molecules were selected based on (1) distance to the target site (e.g., start codon), e.g., within reminder of the coding sequence, e.g., downstream of the first 500 bp of coding sequence (e.g., anywhere from +500 (relative to the start codon) to the stop codon), (2) the presence of 5′G and (3) PAM is NNGRRT. The targeting domain for tier 6 gRNA molecules were selected based on (1) distance to the target site (e.g., start codon), e.g., within reminder of the coding sequence, e.g., downstream of the first 500 bp of coding sequence (e.g., anywhere from +500 (relative to the start codon) to the stop codon) and (2) PAM is NNGRRT. The targeting domain for tier 7 gRNA molecules were selected based on (1) distance to the target site (e.g., start codon), e.g., within reminder of the coding sequence, e.g., downstream of the first 500 bp of coding sequence (e.g., anywhere from +500 (relative to the start codon) to the stop codon) and (2) PAM is NNGRRV. Note that tiers are non-inclusive (each gRNA is listed only once for the strategy). In certain instances, no gRNA was identified based on the criteria of the particular tier.

Strategies to Identify gRNAs for S. pyogenes, S. Aureus, and N. meningitidis to Knock Out The UL48 gene

[0672] As an example, three strategies were utilized to identify gRNAs for use with S. pyogenes, S. aureus and N. meningitidis Cas9 enzymes.

[0673] In the first strategy, guide RNAs (gRNAs) for use with the S. pyogenes (Tables 3A-3C) Cas9 were identified using the publically available web-based ZiFiT server (Fu et al., Improving CRISPR-Cas nuclease specificity using truncated guide RNAs. Nat Biotechnol. 2014 Jan. 26. doi: 10.1038/nbt.2808. PubMed PMID: 24463574, for the original references see Sander et al., 2007, NAR 35:W599-605; Sander et al., 2010, NAR 38: W462-8). In addition to identifying potential gRNA sites adjacent to PAM sequences, the software also identifies all PAM adjacent sequences that differ by 1, 2, 3 or more nucleotides from the selected gRNA sites. Genomic DNA sequence for each gene was obtained from the UCSC Genome browser and sequences were screened for repeat elements using the publically available Repeat-Masker program. RepeatMmasker searches input DNA sequences for repeated elements and regions of low complexity. The output is a detailed annotation of the repeats present in a given query sequence. Following identification, gRNAs for use with a S. pyogenes Cas9 were ranked into 3 tiers.

[0674] The gRNAs in tier 1 were selected based on their distance to the target site and their orthogonality in the genome (based on the ZiFiT identification of close matches in the human genome containing an NGG PAM). As an example, for all targets, both 17-mer and 20-mer gRNAs were designed. gRNAs were also selected both for single-gRNA nuclease cutting and for the dual gRNA nickase strategy. Criteria for selecting gRNAs and the determination for which gRNAs can be used for which strategy is based on several considerations:
[0675] 1. For the dual nickase strategy, gRNA pairs should be oriented on the DNA such that PAMs are facing out and cutting with the D10A Cas9 nickase will result in 5′ overhangs.
[0676] 2. An assumption that cleaving with dual nickase pairs will result in deletion of the entire intervening sequence at a reasonable frequency. However, it will also often result in indel mutations at the site of only one of the gRNAs. Candidate pair members can be tested for how efficiently they remove the entire sequence versus just causing indel mutations at the site of one gRNA.

[0677] While it can be desirable to have gRNAs start with a 5′ G, this requirement was relaxed for some gRNAs in tier 1 in order to identify guides in the correct orientation, within a reasonable distance to the target position (i.e., within the first 500 bp of the coding sequence) and with a high level of orthogonality against the human genome. In order to find a pair for the dual-nickase strategy it was necessary to either extend the distance from the target position or remove the requirement for the 5′G. Tier 2 gRNAs were selected based on location within the first 500 bp of the coding sequence in the HSV gene. Tier 3 gRNAs were selected based on their location in the coding sequence, but downstream of the first 500 bp of the HSV gene. Note that tiers are non-inclusive (each gRNA is listed only once). In certain instances, no gRNA was identified based on the criteria of the particular tier.

[0678] As discussed above, gRNAs were identified for single-gRNA nuclease cleavage as well as for a dual-gRNA paired “nickase” strategy, as indicated.

[0679] gRNAs for use with the N. meningitidis (Tables 3F-3G) and S. aureus (Tables 3D-3E) Cas9s were identified manually by scanning genomic DNA sequence for the presence of PAM sequences. These gRNAs were separated into two tiers for each species. The first tier includes gRNAs selected based on location in the first 500 bp of the coding sequence of the HSV gene. The second tier includes gRNAs selected based on location in the coding sequence, but downstream of the first 500 bp of the HSV gene.

[0680] In a second strategy, Guide RNAs (gRNAs) for use with S. pyogenes, S. aureus and N. meningitidis Cas9s were identified using a DNA sequence searching algorithm. Guide RNA design was carried out using a custom guide RNA design software based on the public tool cas-offinder (reference:Cas-OFFinder: a fast and versatile algorithm that searches for potential off-target sites of Cas9 RNA-guided endonucleases., Bioinformatics. 2014 Feb. 17.

[0681] Bae S, Park J, Kim J S. PMID: 24463181). Said custom guide RNA design software scores guides after calculating their genomewide off-target propensity. Typically matches ranging from perfect matches to 7 mismatches are considered for guides ranging in length from 17 to 24. Once the off-target sites are computationally determined, an aggregate score is calculated for each guide and summarized in a tabular output using a web-interface. In addition to identifying potential gRNA sites adjacent to PAM sequences, the software also identifies all PAM adjacent sequences that differ by 1, 2, 3 or more nucleotides from the selected gRNA sites. Genomic DNA sequence for each gene was obtained from the UCSC Genome browser and sequences were screened for repeat elements using the publically available RepeatMasker program. RepeatMasker searches input DNA sequences for repeated elements and regions of low complexity. The output is a detailed annotation of the repeats present in a given query sequence.

[0682] Following identification, gRNAs were ranked into tiers based on their distance to the target site, their orthogonality and presence of a 5′ G (based on identification of close matches in the human genome containing a relavant PAM (e.g., in the case of S. pyogenes, a NGG PAM, in the case of S. aureus, a NNGRRT or NNGRRV PAM, and in the case of N. meningitidis, a NNNNGATT or NNNNGCTT PAM). Orthogonality refers to the number of sequences in the human genome that contain a minimum number of mismatches to the target sequence. A “high level of orthogonality” or “good orthogonality” may, for example, refer to 20-mer gRNAs that have no identical sequences in the human genome besides the intended target, nor any sequences that contain one or two mismatches in the target sequence. Targeting domains with good orthogonality are selected to minimize off-target DNA cleavage.

[0683] As an example, for S. pyogenes and N. meningitidis targets, 17-mer, or 20-mer gRNAs were designed. As another example, for S. aureus targets, 18-mer, 19-mer, 20-mer, 21-mer, 22-mer, 23-mer and 24-mer gRNAs were designed. Targeting domains, disclosed herein, may comprise the 17-mer described in Tables 11A-11E, 12A-12G or 13A-13C, e.g., the targeting domains of 18 or more nucleotides may comprise the 17-mer gRNAs described in Tables 11A-11E, 12A-12G or 13A-13C. Targeting domains, disclosed herein, may comprises the 18-mer described in Tables 11A-11E, 12A-12G or 13A-13C, e.g., the targeting domains of 19 or more nucleotides may comprise the 18-mer gRNAs described in Tables 11A-11E, 12A-12G or 13A-13C. Targeting domains, disclosed herein, may comprises the 19-mer described in Tables 11A-11E, 12A-12G or 13A-13C, e.g., the targeting domains of 20 or more nucleotides may comprise the 19-mer gRNAs described in Tables 11A-11E, 12A-12G or 13A-13C. Targeting domains, disclosed herein, may comprises the 20-mer gRNAs described in Tables 11A-11E, 12A-12G or 13A-13C, e.g., the targeting domains of 21 or more nucleotides may comprise the 20-mer gRNAs described in Tables 11A-11E, 12A-12G or 13A-13C. Targeting domains, disclosed herein, may comprises the 21-mer described in Tables 11A-11E, 12A-12G or 13A-13C, e.g., the targeting domains of 22 or more nucleotides may comprise the 21-mer gRNAs described in Tables 11A-11E, 12A-12G or 13A-13C. Targeting domains, disclosed herein, may comprises the 22-mer described in Tables 11A-11E, 12A-12G or 13A-13C, e.g., the targeting domains of 23 or more nucleotides may comprise the 22-mer gRNAs described in Tables 11A-11E, 12A-12G or 13A-13C. Targeting domains, disclosed herein, may comprises the 23-mer described in Tables 11A-11E, 12A-12G or 13A-13C, e.g., the targeting domains of 24 or more nucleotides may comprise the 23-mer gRNAs described in Tables 11A-11E, 12A-12G or 13A-13C. Targeting domains, disclosed herein, may comprises the 24-mer described in Tables 11A-11E, 12A-12G or 13A-13C, e.g., the targeting domains of 25 or more nucleotides may comprise the 24-mer gRNAs described in Tables 11A-11E, 12A-12G or 13A-13C.gRNAs were identified for both single-gRNA nuclease cleavage and for a dual-gRNA paired “nickase” strategy. Criteria for selecting gRNAs and the determination for which gRNAs can be used for the dual-gRNA paired “nickase” strategy is based on two considerations:
[0684] 1. gRNA pairs should be oriented on the DNA such that PAMs are facing out and cutting with the D10A Cas9 nickase will result in 5′ overhangs.
[0685] 2. An assumption that cleaving with dual nickase pairs will result in deletion of the entire intervening sequence at a reasonable frequency. However, cleaving with dual nickase pairs can also result in indel mutations at the site of only one of the gRNAs. Candidate pair members can be tested for how efficiently they remove the entire sequence versus causing indel mutations at the site of one gRNA.

[0686] The targeting domains discussed herein can be incorporated into the gRNAs described herein.

[0687] gRNAs were identified and ranked into 5 tiers for S. pyogenes (Tables 11A-11E), and N. meningitidis (Tables 13A-13C); and 7 tiers for S. aureus (Tables 12A-12G). For S. pyogenes, and N. meningitidis, the targeting domain for tier 1 gRNA molecules were selected based on (1) distance to a target site (e.g., start codon), e.g., within 500 bp (e.g., downstream) of the target site (e.g., start codon), (2) a high level of orthogonality and (3) the presence of 5′G. The targeting domain for tier 2 gRNA molecules were selected based on (1) distance to a target site (e.g., start codon), e.g., within 500 bp (e.g., downstream) of the target site (e.g., start codon) and (2) a high level of orthogonality. The targeting domain for tier 3 gRNA molecules were selected based on (1) distance to a target site (e.g., start codon), e.g., within 500 bp (e.g., downstream) of the target site (e.g., start codon) and (2) the presence of 5′G. The targeting domain for tier 4 gRNA molecules were selected based on distance to a target site (e.g., start codon), e.g., within 500 bp (e.g., downstream) of the target site (e.g., start codon). The targeting domain for tier 5 gRNA molecules were selected based on distance to the target site (e.g., start codon), e.g., within reminder of the coding sequence, e.g., downstream of the first 500 bp of coding sequence (e.g., anywhere from +500 (relative to the start codon) to the stop codon). For S. aureus, the targeting domain for tier 1 gRNA molecules were selected based on (1) distance to a target site (e.g., start codon), e.g., within 500 bp (e.g., downstream) of the target site (e.g., start codon), (2) a high level of orthogonality, (3) the presence of 5′G and (4) PAM is NNGRRT. The targeting domain for tier 2 gRNA molecules were selected based on (1) distance to a target site (e.g., start codon), e.g., within 500 bp (e.g., downstream) of the target site (e.g., start codon), (2) a high level of orthogonality, and (3) PAM is NNGRRT. The targeting domain for tier 3 gRNA molecules were selected based on (1) distance to a target site (e.g., start codon), e.g., within 500 bp (e.g., downstream) of the target site (e.g., start codon) and (2) PAM is NNGRRT. The targeting domain for tier 4 gRNA molecules were selected based on (1) distance to a target site (e.g., start codon), e.g., within 500 bp (e.g., downstream) of the target site (e.g., start codon) and (2) PAM is NNGRRV. The targeting domain for tier 5 gRNA molecules were selected based on (1) distance to the target site (e.g., start codon), e.g., within reminder of the coding sequence, e.g., downstream of the first 500 bp of coding sequence (e.g., anywhere from +500 (relative to the start codon) to the stop codon), (2) the presence of 5′G and (3) PAM is NNGRRT. The targeting domain for tier 6 gRNA molecules were selected based on (1) distance to the target site (e.g., start codon), e.g., within reminder of the coding sequence, e.g., downstream of the first 500 bp of coding sequence (e.g., anywhere from +500 (relative to the start codon) to the stop codon) and (2) PAM is NNGRRT. The targeting domain for tier 7 gRNA molecules were selected based on (1) distance to the target site (e.g., start codon), e.g., within reminder of the coding sequence, e.g., downstream of the first 500 bp of coding sequence (e.g., anywhere from +500 (relative to the start codon) to the stop codon) and (2) PAM is NNGRRV. Note that tiers are non-inclusive (each gRNA is listed only once for the strategy). In certain instances, no gRNA was identified based on the criteria of the particular tier.

Strategies to Identify gRNAs for S. pyogenes. S. Aureus, and N. meningitidis to Knock Out the UL54 Gene

[0688] As an example, three strategies were utilized to identify gRNAs for use with S. pyogenes, S. aureus and N. meningitidis Cas9 enzymes.

[0689] In the first strategy, guide RNAs (gRNAs) for use with the S. pyogenes (Tables 4A-4C) Cas9 were identified using the publically available web-based ZiFiT server (Fu et al., Improving CRISPR-Cas nuclease specificity using truncated guide RNAs. Nat Biotechnol. 2014 Jan. 26. doi: 10.1038/nbt.2808. PubMed PMID: 24463574, for the original references see Sander et al., 2007, NAR 35:W599-605; Sander et al., 2010, NAR 38: W462-8). In addition to identifying potential gRNA sites adjacent to PAM sequences, the software also identifies all PAM adjacent sequences that differ by 1, 2, 3 or more nucleotides from the selected gRNA sites. Genomic DNA sequence for each gene was obtained from the UCSC Genome browser and sequences were screened for repeat elements using the publically available Repeat-Masker program. RepeatMmasker searches input DNA sequences for repeated elements and regions of low complexity. The output is a detailed annotation of the repeats present in a given query sequence. Following identification, gRNAs for use with a S. pyogenes Cas9 were ranked into 3 tiers.

[0690] The gRNAs in tier 1 were selected based on their distance to the target site and their orthogonality in the genome (based on the ZiFiT identification of close matches in the human genome containing an NGG PAM). As an example, for all targets, both 17-mer and 20-mer gRNAs were designed. gRNAs were also selected both for single-gRNA nuclease cutting and for the dual gRNA nickase strategy. Criteria for selecting gRNAs and the determination for which gRNAs can be used for which strategy is based on several considerations:
[0691] 1. For the dual nickase strategy, gRNA pairs should be oriented on the DNA such that PAMs are facing out and cutting with the D10A Cas9 nickase will result in 5′ overhangs.
[0692] 2. An assumption that cleaving with dual nickase pairs will result in deletion of the entire intervening sequence at a reasonable frequency. However, it will also often result in indel mutations at the site of only one of the gRNAs. Candidate pair members can be tested for how efficiently they remove the entire sequence versus just causing indel mutations at the site of one gRNA.

[0693] While it can be desirable to have gRNAs start with a 5′ G, this requirement was relaxed for some gRNAs in tier 1 in order to identify guides in the correct orientation, within a reasonable distance to the target position (i.e., within the first 500 bp of the coding sequence) and with a high level of orthogonality against the human genome. In order to find a pair for the dual-nickase strategy it was necessary to either extend the distance from the target position or remove the requirement for the 5′G. Tier 2 gRNAs were selected based on location within the first 500 bp of the coding sequence in the HSV gene. Tier 3 gRNAs were selected based on their location in the coding sequence, but downstream of the first 500 bp of the HSV gene. Note that tiers are non-inclusive (each gRNA is listed only once). In certain instances, no gRNA was identified based on the criteria of the particular tier.

[0694] As discussed above, gRNAs were identified for single-gRNA nuclease cleavage as well as for a dual-gRNA paired “nickase” strategy, as indicated.

[0695] gRNAs for use with the N. meningitidis (Tables 4F) and S. aureus (Tables 4D-4E) Cas9s were identified manually by scanning genomic DNA sequence for the presence of PAM sequences. These gRNAs were separated into two tiers for each species. The first tier includes gRNAs selected based on location in the first 500 bp of the coding sequence of the HSV gene. The second tier includes gRNAs selected based on location in the coding sequence, but downstream of the first 500 bp of the HSV gene.

[0696] In a second strategy, Guide RNAs (gRNAs) for use with S. pyogenes, S. aureus and N. meningitidis Cas9s were identified using a DNA sequence searching algorithm. Guide RNA design was carried out using a custom guide RNA design software based on the public tool cas-offinder (reference:Cas-OFFinder: a fast and versatile algorithm that searches for potential off-target sites of Cas9 RNA-guided endonucleases., Bioinformatics. 2014 Feb. 17. Bae S, Park J, Kim J S. PMID: 24463181). Said custom guide RNA design software scores guides after calculating their genome wide off-target propensity. Typically matches ranging from perfect matches to 7 mismatches are considered for guides ranging in length from 17 to 24. Once the off-target sites are computationally determined, an aggregate score is calculated for each guide and summarized in a tabular output using a web-interface. In addition to identifying potential gRNA sites adjacent to PAM sequences, the software also identifies all PAM adjacent sequences that differ by 1, 2, 3 or more nucleotides from the selected gRNA sites. Genomic DNA sequence for each gene was obtained from the UCSC Genome browser and sequences were screened for repeat elements using the publically available RepeatMasker program. RepeatMasker searches input DNA sequences for repeated elements and regions of low complexity. The output is a detailed annotation of the repeats present in a given query sequence.

[0697] Following identification, gRNAs were ranked into tiers based on their distance to the target site, their orthogonality and presence of a 5′ G (based on identification of close matches in the human genome containing a relavant PAM (e.g., in the case of S. pyogenes, a NGG PAM, in the case of S. aureus, a NNGRRT or NNGRRV PAM, and in the case of N. meningitidis, a NNNNGATT or NNNNGCTT PAM). Orthogonality refers to the number of sequences in the human genome that contain a minimum number of mismatches to the target sequence. A “high level of orthogonality” or “good orthogonality” may, for example, refer to 20-mer gRNAs that have no identical sequences in the human genome besides the intended target, nor any sequences that contain one or two mismatches in the target sequence. Targeting domains with good orthogonality are selected to minimize off-target DNA cleavage.

[0698] As an example, for S. pyogenes and N. meningitidis targets, 17-mer, or 20-mer gRNAs were designed. As another example, for S. aureus targets, 18-mer, 19-mer, 20-mer, 21-mer, 22-mer, 23-mer and 24-mer gRNAs were designed. Targeting domains, disclosed herein, may comprise the 17-mer described in Tables 14A-14E, 15A-15G or 16A-16C, e.g., the targeting domains of 18 or more nucleotides may comprise the 17-mer gRNAs described in Tables 14A-14E, 15A-15G or 16A-16C. Targeting domains, disclosed herein, may comprises the 18-mer described in Tables 14A-14E, 15A-15G or 16A-16C, e.g., the targeting domains of 19 or more nucleotides may comprise the 18-mer gRNAs described in Tables 14A-14E, 15A-15G or 16A-16C. Targeting domains, disclosed herein, may comprises the 19-mer described in Tables 14A-14E, 15A-15G or 16A-16C, e.g., the targeting domains of 20 or more nucleotides may comprise the 19-mer gRNAs described in Tables 14A-14E, 15A-15G or 16A-16C. Targeting domains, disclosed herein, may comprises the 20-mer gRNAs described in Tables 14A-14E, 15A-15G or 16A-16C, e.g., the targeting domains of 21 or more nucleotides may comprise the 20-mer gRNAs described in Tables 14A-14E, 15A-15G or 16A-16C. Targeting domains, disclosed herein, may comprises the 21-mer described in Tables 14A-14E, 15A-15G or 16A-16C, e.g., the targeting domains of 22 or more nucleotides may comprise the 21-mer gRNAs described in Tables 14A-14E, 15A-15G or 16A-16C. Targeting domains, disclosed herein, may comprises the 22-mer described in Tables 14A-14E, 15A-15G or 16A-16C, e.g., the targeting domains of 23 or more nucleotides may comprise the 22-mer gRNAs described in Tables 14A-14E, 15A-15G or 16A-16C. Targeting domains, disclosed herein, may comprises the 23-mer described in Tables 14A-14E, 15A-15G or 16A-16C, e.g., the targeting domains of 24 or more nucleotides may comprise the 23-mer gRNAs described in Tables 14A-14E, 15A-15G or 16A-16C. Targeting domains, disclosed herein, may comprises the 24-mer described in Tables 14A-14E, 15A-15G or 16A-16C, e.g., the targeting domains of 25 or more nucleotides may comprise the 24-mer gRNAs described in Tables 14A-14E, 15A-15G or 16A-16C. gRNAs were identified for both single-gRNA nuclease cleavage and for a dual-gRNA paired “nickase” strategy. Criteria for selecting gRNAs and the determination for which gRNAs can be used for the dual-gRNA paired “nickase” strategy is based on two considerations:
[0699] 1. gRNA pairs should be oriented on the DNA such that PAMs are facing out and cutting with the D10A Cas9 nickase will result in 5′ overhangs.
[0700] 2. An assumption that cleaving with dual nickase pairs will result in deletion of the entire intervening sequence at a reasonable frequency. However, cleaving with dual nickase pairs can also result in indel mutations at the site of only one of the gRNAs. Candidate pair members can be tested for how efficiently they remove the entire sequence versus causing indel mutations at the site of one gRNA.

[0701] The targeting domains discussed herein can be incorporated into the gRNAs described herein.

[0702] gRNAs were identified and ranked into 5 tiers for S. pyogenes (Tables 14A-14E), and N. meningitidis (Tables 16A-16C); and 7 tiers for S. aureus (Tables 15A-15G). For S. pyogenes, and N. meningitidis, the targeting domain for tier 1 gRNA molecules were selected based on (1) distance to a target site (e.g., start codon), e.g., within 500 bp (e.g., downstream) of the target site (e.g., start codon), (2) a high level of orthogonality and (3) the presence of 5′G. The targeting domain for tier 2 gRNA molecules were selected based on (1) distance to a target site (e.g., start codon), e.g., within 500 bp (e.g., downstream) of the target site (e.g., start codon) and (2) a high level of orthogonality. The targeting domain for tier 3 gRNA molecules were selected based on (1) distance to a target site (e.g., start codon), e.g., within 500 bp (e.g., downstream) of the target site (e.g., start codon) and (2) the presence of 5′G. The targeting domain for tier 4 gRNA molecules were selected based on distance to a target site (e.g., start codon), e.g., within 500 bp (e.g., downstream) of the target site (e.g., start codon). The targeting domain for tier 5 gRNA molecules were selected based on distance to the target site (e.g., start codon), e.g., within reminder of the coding sequence, e.g., downstream of the first 500 bp of coding sequence (e.g., anywhere from +500 (relative to the start codon) to the stop codon). For S. aureus, the targeting domain for tier 1 gRNA molecules were selected based on (1) distance to a target site (e.g., start codon), e.g., within 500 bp (e.g., downstream) of the target site (e.g., start codon), (2) a high level of orthogonality, (3) the presence of 5′G and (4) PAM is NNGRRT. The targeting domain for tier 2 gRNA molecules were selected based on (1) distance to a target site (e.g., start codon), e.g., within 500 bp (e.g., downstream) of the target site (e.g., start codon), (2) a high level of orthogonality, and (3) PAM is NNGRRT. The targeting domain for tier 3 gRNA molecules were selected based on (1) distance to a target site (e.g., start codon), e.g., within 500 bp (e.g., downstream) of the target site (e.g., start codon) and (2) PAM is NNGRRT. The targeting domain for tier 4 gRNA molecules were selected based on (1) distance to a target site (e.g., start codon), e.g., within 500 bp (e.g., downstream) of the target site (e.g., start codon) and (2) PAM is NNGRRV. The targeting domain for tier 5 gRNA molecules were selected based on (1) distance to the target site (e.g., start codon), e.g., within reminder of the coding sequence, e.g., downstream of the first 500 bp of coding sequence (e.g., anywhere from +500 (relative to the start codon) to the stop codon), (2) the presence of 5′G and (3) PAM is NNGRRT. The targeting domain for tier 6 gRNA molecules were selected based on (1) distance to the target site (e.g., start codon), e.g., within reminder of the coding sequence, e.g., downstream of the first 500 bp of coding sequence (e.g., anywhere from +500 (relative to the start codon) to the stop codon) and (2) PAM is NNGRRT. The targeting domain for tier 7 gRNA molecules were selected based on (1) distance to the target site (e.g., start codon), e.g., within reminder of the coding sequence, e.g., downstream of the first 500 bp of coding sequence (e.g., anywhere from +500 (relative to the start codon) to the stop codon) and (2) PAM is NNGRRV. Note that tiers are non-inclusive (each gRNA is listed only once for the strategy). In certain instances, no gRNA was identified based on the criteria of the particular tier.

[0703] In an embodiment, two or more (e.g., three or four) gRNA molecules are used with one Cas9 molecule. In another embodiment, when two or more (e.g., three or four) gRNAs are used with two or more Cas9 molecules, at least one Cas9 molecule is from a different species than the other Cas9 molecule(s). For example, when two gRNA molecules are used with two Cas9 molecules, one Cas9 molecule can be from one species and the other Cas9 molecule can be from a different species. Both Cas9 species are used to generate a single or double-strand break, as desired.

[0704] Any of the targeting domains in the tables described herein can be used with a Cas9 nickase molecule to generate a single strand break.

[0705] Any of the targeting domains in the tables described herein can be used with a Cas9 nuclease molecule to generate a double strand break.

[0706] When two gRNAs designed for use to target two Cas9 molecules, one Cas9 can be one species, the second Cas9 can be from a different species. Both Cas9 species are used to generate a single or double-strand break, as desired.

[0707] It is contemplated herein that any upstream gRNA described herein may be paired with any downstream gRNA described herein. When an upstream gRNA designed for use with one species of Cas9 is paired with a downstream gRNA designed for use from a different species of Cas9, both Cas9 species are used to generate a single or double-strand break, as desired.

### Exemplary Targeting Domains

[0708] Table 1A provides exemplary targeting domains for knocking out the UL19 gene selected according to first tier parameters. The targeting domains are selected based on location within the first 500 bp of the coding sequence of the UL19 gene and orthogonality against the human genome. It is contemplated herein that the targeting domain hybridizes to the target domain through complementary base pairing. Any of the targeting domains in the table can be used with a S. pyogenes Cas9 molecule that gives double stranded cleavage. Any of the targeting domains in the table can be used with a S. pyogenes Cas9 single-stranded break nucleases (nickases). In an embodiment, dual targeting is used to create two nicks on opposite DNA strands by using S. pyogenes Cas9 nickases with two targeting domains that are complementary to opposite DNA strands, e.g., a gRNA comprising any minus strand targeting domain may be paired any gRNA comprising a plus strand targeting domain provided that the two gRNAs are oriented on the DNA such that PAMs face outward and the distance between the 5′ ends of the gRNAs is 0-50 bp.

TABLE 2A

| 1st Tier | DNA | | Target Site | |
|---|---|---|---|---|
| gRNA Name | Strand | Targeting Domain | Length | Seq ID |
| HSV1-UL19-3 | − | ACCGCGACCCUCCGGGAUAC | 20 | 387 |
| HSV1-UL19-4 | − | UCCGGGAUACCGGUAUGCCG | 20 | 388 |
| HSV1-UL19-5 | − | AUACCGGUAUGCCGCGGCCA | 20 | 389 |
| HSV1-UL19-97 | − | GCGACCCUCCGGGAUAC | 17 | 390 |
| HSV1-UL19-98 | − | GGGAUACCGGUAUGCCG | 17 | 391 |
| HSV1-UL19-99 | − | CCGGUAUGCCGCGGCCA | 17 | 392 |
| HSV1-UL19-11 | − | GUCGAGUUCGACGCCCUGCU | 20 | 393 |
| HSV1-UL19-12 | − | UCGAGUUCGACGCCCUGCUG | 20 | 394 |
| HSV1-UL19-13 | − | CCUGUCGCUCGUGCGCUUUC | 20 | 395 |
| HSV1-UL19-14 | − | CUCGUGCGCUUUCUGGAGCU | 20 | 396 |
| HSV1-UL19-15 | − | UCGUGCGCUUUCUGGAGCUC | 20 | 397 |
| HSV1-UL19-105 | − | GAGUUCGACGCCCUGCU | 17 | 398 |
| HSV1-UL19-106 | − | AGUUCGACGCCCUGCUG | 17 | 399 |
| HSV1-UL19-107 | − | GUCGCUCGUGCGCUUUC | 17 | 400 |
| HSV1-UL19-108 | − | GUGCGCUUUCUGGAGCU | 17 | 401 |
| HSV1-UL19-109 | − | UGCGCUUUCUGGAGCUC | 17 | 402 |
| HSV1-UL19-17 | − | UCUGGAGCUCGGGUUGUCGG | 20 | 403 |
| HSV1-UL19-18 | − | GUGCGUGUGUACCAAGUUUC | 20 | 404 |
| HSV1-UL19-19 | − | GUGUACCAAGUUUCCGGAGC | 20 | 405 |
| HSV1-UL19-111 | − | GGAGCUCGGGUUGUCGG | 17 | 406 |
| HSV1-UL19-112 | − | CGUGUGUACCAAGUUUC | 17 | 407 |
| HSV1-UL19-113 | − | UACCAAGUUUCCGGAGC | 17 | 408 |
| HSV1-UL19-23 | − | CGAGGGGCGCGUACAGUUCG | 20 | 409 |
| HSV1-UL19-24 | − | CAGCCGCUGAUUGCCCGCGA | 20 | 410 |
| HSV1-UL19-25 | − | UGACCAAGAUUAUCGACCGC | 20 | 411 |
| HSV1-UL19-26 | − | GACCAAGAUUAUCGACCGCC | 20 | 412 |
| HSV1-UL19-117 | − | GGGGCGCGUACAGUUCG | 17 | 413 |
| HSV1-UL19-118 | − | CCGCUGAUUGCCCGCGA | 17 | 414 |
| HSV1-UL19-119 | − | CCAAGAUUAUCGACCGC | 17 | 415 |
| HSV1-UL19-120 | − | CAAGAUUAUCGACCGCC | 17 | 416 |
| HSV1-UL19-31 | − | AGGCCAUCGCCCUGCUCACG | 20 | 417 |
| HSV1-UL19-125 | − | CCAUCGCCCUGCUCACG | 17 | 418 |
| HSV1-UL19-33 | − | CAUCGCCCUGCUCACGGGGG | 20 | 419 |
| HSV1-UL19-127 | − | CGCCCUGCUCACGGGGG | 17 | 420 |
| HSV1-UL19-40 | + | GCUGUUGGAUGGCGCGCAAC | 20 | 421 |
| HSV1-UL19-134 | + | GUUGGAUGGCGCGCAAC | 17 | 422 |
| HSV1-UL19-41 | + | CGCCGAUACCCGUCCCGUCC | 20 | 423 |
| HSV1-UL19-135 | + | CGAUACCCGUCCCGUCC | 17 | 424 |
| HSV1-UL19-58 | + | AUUGUGUGUGGGUUGCUCGA | 20 | 425 |
| HSV1-UL19-59 | + | UUGUGUGUGGGUUGCUCGAU | 20 | 426 |
| HSV1-UL19-152 | + | GUGUGUGGGUUGCUCGA | 17 | 427 |
| HSV1-UL19-153 | + | UGUGUGGGUUGCUCGAU | 17 | 428 |
| HSV1-UL19-64 | + | GAUGGGGUGCGGGCCGUCGC | 20 | 429 |
| HSV1-UL19-65 | + | GGGCCGUCGCGGGCAAUCAG | 20 | 430 |
| HSV1-UL19-158 | + | GGGGUGCGGGCCGUCGC | 17 | 431 |
| HSV1-UL19-159 | + | CCGUCGCGGGCAAUCAG | 17 | 432 |
| HSV1-UL19-67 | + | CGCGGGCAAUCAGCGGCUGG | 20 | 433 |
| HSV1-UL19-161 | + | GGGCAAUCAGCGGCUGG | 17 | 434 |
| HSV1-UL19-69 | + | UCGUUCAUGUAGGCCAGCUC | 20 | 435 |
| HSV1-UL19-70 | + | GUAGGCCAGCUCCGGAAACU | 20 | 436 |
| HSV1-UL19-71 | + | CCAGAAAGCGCACGAGCGAC | 20 | 437 |
| HSV1-UL19-72 | + | CAGAAAGCGCACGAGCGACA | 20 | 438 |
| HSV1-UL19-73 | + | UGUUGCAAUACGACCCCAGC | 20 | 439 |
| HSV1-UL19-74 | + | GUUGCAAUACGACCCCAGCA | 20 | 440 |
| HSV1-UL19-75 | + | CGUCGAACUCGACGUCGUAC | 20 | 441 |
| HSV1-UL19-76 | + | GUCGUACAGGCUGUUUGCAU | 20 | 442 |
| HSV1-UL19-163 | + | UUCAUGUAGGCCAGCUC | 17 | 443 |
| HSV1-UL19-164 | + | GGCCAGCUCCGGAAACU | 17 | 444 |
| HSV1-UL19-165 | + | GAAAGCGCACGAGCGAC | 17 | 445 |
| HSV1-UL19-166 | + | AAAGCGCACGAGCGACA | 17 | 446 |
| HSV1-UL19-167 | + | UGCAAUACGACCCCAGC | 17 | 447 |
| HSV1-UL19-168 | + | GCAAUACGACCCCAGCA | 17 | 448 |
| HSV1-UL19-169 | + | CGAACUCGACGUCGUAC | 17 | 449 |
| HSV1-UL19-170 | + | GUACAGGCUGUUUGCAU | 17 | 450 |
| HSV1-UL19-82 | + | CACCUCGAUCGUGCUAAGGA | 20 | 451 |
| HSV1-UL19-176 | + | CUCGAUCGUGCUAAGGA | 17 | 452 |
| HSV1-UL19-87 | + | GCACCAUGGCCGCGGCAUAC | 20 | 453 |
| HSV1-UL19-181 | + | CCAUGGCCGCGGCAUAC | 17 | 454 |
| HSV1-UL19-91 | + | ACCGGUAUCCCGGAGGGUCG | 20 | 455 |
| HSV1-UL19-92 | + | GUAUCCCGGAGGGUCGCGGU | 20 | 456 |
| HSV1-UL19-93 | + | UAUCCCGGAGGGUCGCGGUU | 20 | 457 |
| HSV1-UL19-185 | + | GGUAUCCCGGAGGGUCG | 17 | 458 |
| HSV1-UL19-186 | + | UCCCGGAGGGUCGCGGU | 17 | 459 |
| HSV1-UL19-187 | + | CCCGGAGGGUCGCGGUU | 17 | 460 |

[0709] Table 1B provides exemplary targeting domains for knocking out the UL19 gene selected according to the second tier parameters. The targeting domains are selected based on location within the first 500 bp of the coding sequence of the UL19 gene. It is contemplated herein that the targeting domain hybridizes to the target domain through complementary base pairing. Any of the targeting domains in the table can be used with a S. pyogenes Cas9 molecule that gives double stranded cleavage. Any of the targeting domains in the table can be used with a S. pyogenes Cas9 single-stranded break nucleases (nickases). In an embodiment, dual targeting is used to create two nicks on opposite DNA strands by using S. pyogenes Cas9 nickases with two targeting domains that are complementary to opposite DNA strands, e.g., a gRNA comprising any minus strand targeting domain may be paired any gRNA comprising a plus strand targeting domain provided that the two gRNAs are oriented on the DNA such that PAMs face outward and the distance between the 5′ ends of the gRNAs is 0-50 bp.

TABLE 1B

| 2nd Tier | DNA | | Target Site | |
|---|---|---|---|---|
| gRNA Name | Strand | Targeting Domain | Length | Seq ID |
| HSV1-UL19-1 | − | CGCUCCCAACCGCGACCCUC | 20 | 461 |
| HSV1-UL19-2 | − | GCUCCCAACCGCGACCCUCC | 20 | 462 |
| HSV1-UL19-6 | − | GCCGCGGCCAUGGUGCCGAC | 20 | 463 |
| HSV1-UL19-7 | − | CCGCGGCCAUGGUGCCGACC | 20 | 464 |
| HSV1-UL19-8 | − | GUCCCUCCUUAGCACGAUCG | 20 | 465 |
| HSV1-UL19-9 | − | CCUCCUUAGCACGAUCGAGG | 20 | 466 |
| HSV1-UL19-10 | − | CGUCGAGUUCGACGCCCUGC | 20 | 467 |
| HSV1-UL19-16 | − | CUUUCUGGAGCUCGGGUUGU | 20 | 468 |
| HSV1-UL19-20 | − | GGAGCUGGCCUACAUGAACG | 20 | 469 |
| HSV1-UL19-21 | − | GAGCUGGCCUACAUGAACGA | 20 | 470 |
| HSV1-UL19-22 | − | AGCUGGCCUACAUGAACGAG | 20 | 471 |
| HSV1-UL19-27 | − | CCUGAACGCCGCCUUCAGCC | 20 | 472 |
| HSV1-UL19-28 | − | CGCCUUCAGCCUGGCCACCG | 20 | 473 |
| HSV1-UL19-29 | − | CGAGGCCAUCGCCCUGCUCA | 20 | 474 |
| HSV1-UL19-30 | − | GAGGCCAUCGCCCUGCUCAC | 20 | 475 |
| HSV1-UL19-32 | − | GGCCAUCGCCCUGCUCACGG | 20 | 476 |
| HSV1-UL19-34 | − | CCUGCUCACGGGGGAGGCCC | 20 | 477 |
| HSV1-UL19-35 | − | CUCACGGGGGAGGCCCUGGA | 20 | 478 |
| HSV1-UL19-36 | − | UCACGGGGGAGGCCCUGGAC | 20 | 479 |
| HSV1-UL19-37 | − | GGGGGAGGCCCUGGACGGGA | 20 | 480 |
| HSV1-UL19-38 | − | GGGGAGGCCCUGGACGGGAC | 20 | 481 |
| HSV1-UL19-39 | − | GCCCUGGACGGGACGGGUAU | 20 | 482 |
| HSV1-UL19-42 | + | GCCGAUACCCGUCCCGUCCA | 20 | 483 |
| HSV1-UL19-43 | + | CCAGGGCCUCCCCCGUGAGC | 20 | 484 |
| HSV1-UL19-44 | + | CAGGGCCUCCCCCGUGAGCA | 20 | 485 |
| HSV1-UL19-45 | + | CUCCCCCGUGAGCAGGGCGA | 20 | 486 |
| HSV1-UL19-46 | + | CGUGAGCAGGGCGAUGGCCU | 20 | 487 |
| HSV1-UL19-47 | + | GAGCAGGGCGAUGGCCUCGG | 20 | 488 |
| HSV1-UL19-48 | + | GGGCGAUGGCCUCGGUGGCC | 20 | 489 |
| HSV1-UL19-49 | + | GGCCUCGGUGGCCAGGCUGA | 20 | 490 |
| HSV1-UL19-50 | + | CUCGGUGGCCAGGCUGAAGG | 20 | 491 |
| HSV1-UL19-51 | + | CCAGGCUGAAGGCGGCGUUC | 20 | 492 |
| HSV1-UL19-52 | + | CAGGCUGAAGGCGGCGUUCA | 20 | 493 |
| HSV1-UL19-53 | + | UGAAGGCGGCGUUCAGGGCC | 20 | 494 |
| HSV1-UL19-54 | + | AGGCGGCGUUCAGGGCCCGG | 20 | 495 |
| HSV1-UL19-55 | + | GGCCCGGCGGUCGAUAAUCU | 20 | 496 |
| HSV1-UL19-56 | + | CUUGGUCAUGUAAUUGUGUG | 20 | 497 |
| HSV1-UL19-57 | + | UUGGUCAUGUAAUUGUGUGU | 20 | 498 |
| HSV1-UL19-60 | + | UGUGUGUGGGUUGCUCGAUG | 20 | 499 |
| HSV1-UL19-61 | + | GUGGGUUGCUCGAUGGGGUG | 20 | 500 |
| HSV1-UL19-62 | + | UGGGUUGCUCGAUGGGGUGC | 20 | 501 |
| HSV1-UL19-63 | + | CGAUGGGGUGCGGGCCGUCG | 20 | 502 |
| HSV1-UL19-66 | + | CGUCGCGGGCAAUCAGCGGC | 20 | 503 |
| HSV1-UL19-68 | + | UACGCGCCCCUCGUUCAUGU | 20 | 504 |
| HSV1-UL19-77 | + | UGUUUGCAUCGGAGCGCACG | 20 | 505 |
| HSV1-UL19-78 | + | GUUUGCAUCGGAGCGCACGC | 20 | 506 |
| HSV1-UL19-79 | + | CGCGGGAAAAAAAAUCAAAC | 20 | 507 |
| HSV1-UL19-80 | + | ACGCCACCUCGAUCGUGCUA | 20 | 508 |
| HSV1-UL19-81 | + | CCACCUCGAUCGUGCUAAGG | 20 | 509 |
| HSV1-UL19-83 | + | GAUCGUGCUAAGGAGGGACC | 20 | 510 |
| HSV1-UL19-84 | + | GUGCUAAGGAGGGACCCGGU | 20 | 511 |
| HSV1-UL19-85 | + | GAGGGACCCGGUCGGCACCA | 20 | 512 |
| HSV1-UL19-86 | + | CCCGGUCGGCACCAUGGCCG | 20 | 513 |
| HSV1-UL19-88 | + | GCCGCGGCAUACCGGUAUCC | 20 | 514 |
| HSV1-UL19-89 | + | GCGGCAUACCGGUAUCCCGG | 20 | 515 |
| HSV1-UL19-90 | + | CGGCAUACCGGUAUCCCGGA | 20 | 516 |
| HSV1-UL19-94 | + | CGGAGGGUCGCGGUUGGGAG | 20 | 517 |
| HSV1-UL19-95 | − | UCCCAACCGCGACCCUC | 17 | 518 |
| HSV1-UL19-96 | − | CCCAACCGCGACCCUCC | 17 | 519 |
| HSV1-UL19-100 | − | GCGGCCAUGGUGCCGAC | 17 | 520 |
| HSV1-UL19-101 | − | CGGCCAUGGUGCCGACC | 17 | 521 |
| HSV1-UL19-102 | − | CCUCCUUAGCACGAUCG | 17 | 522 |
| HSV1-UL19-103 | − | CCUUAGCACGAUCGAGG | 17 | 523 |
| HSV1-UL19-104 | − | CGAGUUCGACGCCCUGC | 17 | 524 |
| HSV1-UL19-110 | − | UCUGGAGCUCGGGUUGU | 17 | 525 |
| HSV1-UL19-114 | − | GCUGGCCUACAUGAACG | 17 | 526 |
| HSV1-UL19-115 | − | CUGGCCUACAUGAACGA | 17 | 527 |
| HSV1-UL19-116 | − | UGGCCUACAUGAACGAG | 17 | 528 |
| HSV1-UL19-121 | − | GAACGCCGCCUUCAGCC | 17 | 529 |
| HSV1-UL19-122 | − | CUUCAGCCUGGCCACCG | 17 | 530 |
| HSV1-UL19-123 | − | GGCCAUCGCCCUGCUCA | 17 | 531 |
| HSV1-UL19-124 | − | GCCAUCGCCCUGCUCAC | 17 | 532 |
| HSV1-UL19-126 | − | CAUCGCCCUGCUCACGG | 17 | 533 |
| HSV1-UL19-128 | − | GCUCACGGGGGAGGCCC | 17 | 534 |
| HSV1-UL19-129 | − | ACGGGGGAGGCCCUGGA | 17 | 535 |
| HSV1-UL19-130 | − | CGGGGGAGGCCCUGGAC | 17 | 536 |
| HSV1-UL19-131 | − | GGAGGCCCUGGACGGGA | 17 | 537 |
| HSV1-UL19-132 | − | GAGGCCCUGGACGGGAC | 17 | 538 |
| HSV1-UL19-133 | − | CUGGACGGGACGGGUAU | 17 | 539 |
| HSV1-UL19-136 | + | GAUACCCGUCCCGUCCA | 17 | 540 |
| HSV1-UL19-137 | + | GGGCCUCCCCCGUGAGC | 17 | 541 |
| HSV1-UL19-138 | + | GGCCUCCCCCGUGAGCA | 17 | 542 |
| HSV1-UL19-139 | + | CCCCGUGAGCAGGGCGA | 17 | 543 |
| HSV1-UL19-140 | + | GAGCAGGGCGAUGGCCU | 17 | 544 |
| HSV1-UL19-141 | + | CAGGGCGAUGGCCUCGG | 17 | 545 |
| HSV1-UL19-142 | + | CGAUGGCCUCGGUGGCC | 17 | 546 |
| HSV1-UL19-143 | + | CUCGGUGGCCAGGCUGA | 17 | 547 |
| HSV1-UL19-144 | + | GGUGGCCAGGCUGAAGG | 17 | 548 |
| HSV1-UL19-145 | + | GGCUGAAGGCGGCGUUC | 17 | 549 |
| HSV1-UL19-146 | + | GCUGAAGGCGGCGUUCA | 17 | 550 |
| HSV1-UL19-147 | + | AGGCGGCGUUCAGGGCC | 17 | 551 |
| HSV1-UL19-148 | + | CGGCGUUCAGGGCCCGG | 17 | 552 |
| HSV1-UL19-149 | + | CCGGCGGUCGAUAAUCU | 17 | 553 |
| HSV1-UL19-150 | + | GGUCAUGUAAUUGUGUG | 17 | 554 |
| HSV1-UL19-151 | + | GUCAUGUAAUUGUGUGU | 17 | 555 |
| HSV1-UL19-154 | + | GUGUGGGUUGCUCGAUG | 17 | 556 |
| HSV1-UL19-155 | + | GGUUGCUCGAUGGGGUG | 17 | 557 |
| HSV1-UL19-156 | + | GUUGCUCGAUGGGGUGC | 17 | 558 |
| HSV1-UL19-157 | + | UGGGGUGCGGGCCGUCG | 17 | 559 |
| HSV1-UL19-160 | + | CGCGGGCAAUCAGCGGC | 17 | 560 |
| HSV1-UL19-162 | + | GCGCCCCUCGUUCAUGU | 17 | 561 |
| HSV1-UL19-171 | + | UUGCAUCGGAGCGCACG | 17 | 562 |
| HSV1-UL19-172 | + | UGCAUCGGAGCGCACGC | 17 | 563 |
| HSV1-UL19-173 | + | GGGAAAAAAAAUCAAAC | 17 | 564 |
| HSV1-UL19-174 | + | CCACCUCGAUCGUGCUA | 17 | 565 |
| HSV1-UL19-175 | + | CCUCGAUCGUGCUAAGG | 17 | 566 |
| HSV1-UL19-177 | + | CGUGCUAAGGAGGGACC | 17 | 567 |
| HSV1-UL19-178 | + | CUAAGGAGGGACCCGGU | 17 | 568 |
| HSV1-UL19-179 | + | GGACCCGGUCGGCACCA | 17 | 569 |
| HSV1-UL19-180 | + | GGUCGGCACCAUGGCCG | 17 | 570 |
| HSV1-UL19-182 | + | GCGGCAUACCGGUAUCC | 17 | 571 |
| HSV1-UL19-183 | + | GCAUACCGGUAUCCCGG | 17 | 572 |
| HSV1-UL19-184 | + | CAUACCGGUAUCCCGGA | 17 | 573 |
| HSV1-UL19-188 | + | AGGGUCGCGGUUGGGAG | 17 | 574 |

[0710] Table 1C provides exemplary targeting domains for knocking out the UL19 gene selected according to the third tier parameters. The targeting domains are selected based on location within the coding sequence, but downstream of the first 500 bp of the UL19 gene. It is contemplated herein that the targeting domain hybridizes to the target domain through complementary base pairing. Any of the targeting domains in the table can be used with a S. pyogenes Cas9 molecule that gives double stranded cleavage. Any of the targeting domains in the table can be used with a S. pyogenes Cas9 single-stranded break nucleases (nickases). In an embodiment, dual targeting is used to create two nicks on opposite DNA strands by using S. pyogenes Cas9 nickases with two targeting domains that are complementary to opposite DNA strands, e.g., a gRNA comprising any minus strand targeting domain may be paired any gRNA comprising a plus strand targeting domain provided that the two gRNAs are oriented on the DNA such that PAMs face outward and the distance between the 5′ ends of the gRNAs is 0-50 bp.

TABLE 1C

| 3rd Tier | DNA | | Target Site | |
|---|---|---|---|---|
| gRNA Name | Strand | Targeting Domain | Length | Seq ID |
| HSV1-UL19-189 | − | CGCAACGUCCAGGCCGUCCU | 20 | 575 |
| HSV1-UL19-190 | − | GCAACGUCCAGGCCGUCCUC | 20 | 576 |
| HSV1-UL19-191 | − | CAACGUCCAGGCCGUCCUCG | 20 | 577 |
| HSV1-UL19-192 | − | GUCCUCGGGGCGUUUGAGCG | 20 | 578 |
| HSV1-UL19-193 | − | CGGGGCGUUUGAGCGCGGCA | 20 | 579 |
| HSV1-UL19-194 | − | CCAGAUGCUGCACGUGCUGC | 20 | 580 |
| HSV1-UL19-195 | − | GCUGCACGUGCUGCUGGAAA | 20 | 581 |
| HSV1-UL19-196 | − | GCUGGAAAAGGCGCCGCCCC | 20 | 582 |
| HSV1-UL19-197 | − | GUUGCCGAUGCAACGAUACC | 20 | 583 |
| HSV1-UL19-198 | − | AUGCAACGAUACCUGGACAA | 20 | 584 |
| HSV1-UL19-199 | − | AUACCUGGACAACGGCCGCC | 20 | 585 |
| HSV1-UL19-200 | − | ACAACGGCCGCCUGGCCACC | 20 | 586 |
| HSV1-UL19-201 | − | CAACGGCCGCCUGGCCACCA | 20 | 587 |
| HSV1-UL19-202 | − | CGGCCGCCUGGCCACCAGGG | 20 | 588 |
| HSV1-UL19-203 | − | GCCUGGCCACCAGGGUGGCC | 20 | 589 |
| HSV1-UL19-204 | − | CCUGGCCACCAGGGUGGCCC | 20 | 590 |
| HSV1-UL19-205 | − | CAGGGUGGCCCGGGCGACCC | 20 | 591 |
| HSV1-UL19-206 | − | CUGCGAGACGAGCUUUUUCC | 20 | 592 |
| HSV1-UL19-207 | − | UGCGAGACGAGCUUUUUCCU | 20 | 593 |
| HSV1-UL19-208 | − | GACGAGCUUUUUCCUGGGCA | 20 | 594 |
| HSV1-UL19-209 | − | GAGCUUUUUCCUGGGCAAGG | 20 | 595 |
| HSV1-UL19-210 | − | AGCUUUUUCCUGGGCAAGGC | 20 | 596 |
| HSV1-UL19-211 | − | UGGGCAAGGCGGGCCACCGC | 20 | 597 |
| HSV1-UL19-212 | − | GGGCAAGGCGGGCCACCGCC | 20 | 598 |
| HSV1-UL19-213 | − | CAAGGCGGGCCACCGCCGGG | 20 | 599 |
| HSV1-UL19-214 | − | CCACCGCCGGGAGGCCGUCG | 20 | 600 |
| HSV1-UL19-215 | − | GCCGGGAGGCCGUCGAGGCC | 20 | 601 |
| HSV1-UL19-216 | − | GGCCGUCGAGGCCUGGCUCG | 20 | 602 |
| HSV1-UL19-217 | − | CUGGCUCGUGGACCUCACCA | 20 | 603 |
| HSV1-UL19-218 | − | CACGGCCACGCAGCCCUCCG | 20 | 604 |
| HSV1-UL19-219 | − | CUGACGCAUGCCGACACGCG | 20 | 605 |
| HSV1-UL19-220 | − | UGACGCAUGCCGACACGCGC | 20 | 606 |
| HSV1-UL19-221 | − | CGCAUGCCGACACGCGCGGG | 20 | 607 |
| HSV1-UL19-222 | − | UGCCGACACGCGCGGGCGGC | 20 | 608 |
| HSV1-UL19-223 | − | ACGCGCGGGCGGCCGGUCGA | 20 | 609 |
| HSV1-UL19-224 | − | CGCGCGGGCGGCCGGUCGAC | 20 | 610 |
| HSV1-UL19-225 | − | GCGCGGGCGGCCGGUCGACG | 20 | 611 |
| HSV1-UL19-226 | − | CCUGCAGUCCUUCCUGAAAG | 20 | 612 |
| HSV1-UL19-227 | − | GCAGUCCUUCCUGAAAGUGG | 20 | 613 |
| HSV1-UL19-228 | − | GGACACCGAAGCCGACGUGC | 20 | 614 |
| HSV1-UL19-229 | − | GCCGACGUGCCGGUGACGUA | 20 | 615 |
| HSV1-UL19-230 | − | GCCGGUGACGUACGGCGAGA | 20 | 616 |
| HSV1-UL19-231 | − | UACGGCGAGAUGGUCCUGAA | 20 | 617 |
| HSV1-UL19-232 | − | ACGGCGAGAUGGUCCUGAAC | 20 | 618 |
| HSV1-UL19-233 | − | CGGCGAGAUGGUCCUGAACG | 20 | 619 |
| HSV1-UL19-234 | − | GGUCCUGAACGGGGCCAACC | 20 | 620 |
| HSV1-UL19-235 | − | GAACGGGGCCAACCUGGUCA | 20 | 621 |
| HSV1-UL19-236 | − | CCUGGUCACGGCGCUCGUGA | 20 | 622 |
| HSV1-UL19-237 | − | CUGGUCACGGCGCUCGUGAU | 20 | 623 |
| HSV1-UL19-238 | − | CACGGCGCUCGUGAUGGGCA | 20 | 624 |
| HSV1-UL19-239 | − | GGGCAAGGCCGUGCGAAGUC | 20 | 625 |
| HSV1-UL19-240 | − | CGUGCGAAGUCUGGACGACG | 20 | 626 |
| HSV1-UL19-241 | − | GUGCGAAGUCUGGACGACGU | 20 | 627 |
| HSV1-UL19-242 | − | CGACGUGGGCCGCCACCUGC | 20 | 628 |
| HSV1-UL19-243 | − | CCGCCACCUGCUGGAGAUGC | 20 | 629 |
| HSV1-UL19-244 | − | CCACCUGCUGGAGAUGCAGG | 20 | 630 |
| HSV1-UL19-245 | − | AGGAGCAGCUCGACCUGAAC | 20 | 631 |
| HSV1-UL19-246 | − | CGACCUGAACCGGCAGACGC | 20 | 632 |
| HSV1-UL19-247 | − | CCAGACGACGCGCGUGCGCG | 20 | 633 |
| HSV1-UL19-248 | − | GACGCGCGUGCGCGCGGAUC | 20 | 634 |
| HSV1-UL19-249 | − | CGCGCGGAUCUGGUGUCCAU | 20 | 635 |
| HSV1-UL19-250 | − | GGUGUCCAUCGGCGAGAAGC | 20 | 636 |
| HSV1-UL19-251 | − | CGGCGAGAAGCUGGUCUUUC | 20 | 637 |
| HSV1-UL19-252 | − | CGAGAAGCUGGUCUUUCUGG | 20 | 638 |
| HSV1-UL19-253 | − | GCUGGUCUUUCUGGAGGCCC | 20 | 639 |
| HSV1-UL19-254 | − | CACCAACGUUCCCUACCCCC | 20 | 640 |
| HSV1-UL19-255 | − | CAACGUUCCCUACCCCCUGG | 20 | 641 |
| HSV1-UL19-256 | − | AACGUUCCCUACCCCCUGGU | 20 | 642 |
| HSV1-UL19-257 | − | CUACCCCCUGGUGGGCGCCA | 20 | 643 |
| HSV1-UL19-258 | − | CCUGACGUUCGUCCUGCCCC | 20 | 644 |
| HSV1-UL19-259 | − | CUGACGUUCGUCCUGCCCCU | 20 | 645 |
| HSV1-UL19-260 | − | GCCCCUGGGCCUGUUCAAUC | 20 | 646 |
| HSV1-UL19-261 | − | GGGCCUGUUCAAUCCGGUCA | 20 | 647 |
| HSV1-UL19-262 | − | UGUUCAAUCCGGUCAUGGAA | 20 | 648 |
| HSV1-UL19-263 | − | GAACGGUUUGCCGCGCACGC | 20 | 649 |
| HSV1-UL19-264 | − | AACGGUUUGCCGCGCACGCC | 20 | 650 |
| HSV1-UL19-265 | − | ACGGUUUGCCGCGCACGCCG | 20 | 651 |
| HSV1-UL19-266 | − | GGGGACCUAGUCCCCGCCCC | 20 | 652 |
| HSV1-UL19-267 | − | AGUCCCCGCCCCCGGCCACC | 20 | 653 |
| HSV1-UL19-268 | − | CGCCCCGCCAGCUGUUUUUU | 20 | 654 |
| HSV1-UL19-269 | − | GCCCCGCCAGCUGUUUUUUU | 20 | 655 |
| HSV1-UL19-270 | − | CCCCGCCAGCUGUUUUUUUG | 20 | 656 |
| HSV1-UL19-271 | − | CCCGCCAGCUGUUUUUUUGG | 20 | 657 |
| HSV1-UL19-272 | − | CCAGCUGUUUUUUUGGGGGA | 20 | 658 |
| HSV1-UL19-273 | − | UUUUUGGGGGAAGGACCGCC | 20 | 659 |
| HSV1-UL19-274 | − | CCAGGUGCUGCGCCUGUCUC | 20 | 660 |
| HSV1-UL19-275 | − | CUGUCUCUGGAACACGCGAU | 20 | 661 |
| HSV1-UL19-276 | − | UGUCUCUGGAACACGCGAUC | 20 | 662 |
| HSV1-UL19-277 | − | UUCGCUGAUGAACGUUGACG | 20 | 663 |
| HSV1-UL19-278 | − | GCUGAUGAACGUUGACGCGG | 20 | 664 |
| HSV1-UL19-279 | − | AUGAACGUUGACGCGGCGGU | 20 | 665 |
| HSV1-UL19-280 | − | UGAACGUUGACGCGGCGGUC | 20 | 666 |
| HSV1-UL19-281 | − | GAACGUUGACGCGGCGGUCG | 20 | 667 |
| HSV1-UL19-282 | − | AACGUUGACGCGGCGGUCGG | 20 | 668 |
| HSV1-UL19-283 | − | GUCGAAGCCGCCAAUCCGUA | 20 | 669 |
| HSV1-UL19-284 | − | UCGAAGCCGCCAAUCCGUAC | 20 | 670 |
| HSV1-UL19-285 | − | CGAAGCCGCCAAUCCGUACG | 20 | 671 |
| HSV1-UL19-286 | − | CAAUCCGUACGGGGCGUACG | 20 | 672 |
| HSV1-UL19-287 | − | UCCGUACGGGGCGUACGUGG | 20 | 673 |
| HSV1-UL19-288 | − | CGGGGCGUACGUGGCGGCCC | 20 | 674 |
| HSV1-UL19-289 | − | GCGUACGUGGCGGCCCCGGC | 20 | 675 |
| HSV1-UL19-290 | − | AGCAGCUGUUUUUGAACGCC | 20 | 676 |
| HSV1-UL19-291 | − | GCAGCUGUUUUUGAACGCCU | 20 | 677 |
| HSV1-UL19-292 | − | CAGCUGUUUUUGAACGCCUG | 20 | 678 |
| HSV1-UL19-293 | − | AGCUGUUUUUGAACGCCUGG | 20 | 679 |
| HSV1-UL19-294 | − | GAACGCCUGGGGGCAGCGCC | 20 | 680 |
| HSV1-UL19-295 | − | UGGGGGCAGCGCCUGGCCCA | 20 | 681 |
| HSV1-UL19-296 | − | GGGGGCAGCGCCUGGCCCAC | 20 | 682 |
| HSV1-UL19-297 | − | GGCAGCGCCUGGCCCACGGG | 20 | 683 |
| HSV1-UL19-298 | − | GCAGCGCCUGGCCCACGGGC | 20 | 684 |
| HSV1-UL19-299 | − | UGGCCCACGGGCGGGUCCGA | 20 | 685 |
| HSV1-UL19-300 | − | GGCCCACGGGCGGGUCCGAU | 20 | 686 |
| HSV1-UL19-301 | − | CGGGCGGGUCCGAUGGGUCG | 20 | 687 |
| HSV1-UL19-302 | − | CGGGUCCGAUGGGUCGCGGA | 20 | 688 |
| HSV1-UL19-303 | − | CGCGGAAGGCCAGAUGACCC | 20 | 689 |
| HSV1-UL19-304 | − | GCAGCCCGACAACGCCAACC | 20 | 690 |
| HSV1-UL19-305 | − | CCCCGCGUUCGACUUCUUUG | 20 | 691 |
| HSV1-UL19-306 | − | CCCGCGUUCGACUUCUUUGU | 20 | 692 |
| HSV1-UL19-307 | − | CCGCGUUCGACUUCUUUGUG | 20 | 693 |
| HSV1-UL19-308 | − | CGCGUUCGACUUCUUUGUGG | 20 | 694 |
| HSV1-UL19-309 | − | GUUCGACUUCUUUGUGGGGG | 20 | 695 |
| HSV1-UL19-310 | − | CUUUGUGGGGGUGGCCGACG | 20 | 696 |
| HSV1-UL19-311 | − | GGUGGCCGACGUGGAGCUGC | 20 | 697 |
| HSV1-UL19-312 | − | GUGGCCGACGUGGAGCUGCC | 20 | 698 |
| HSV1-UL19-313 | − | UGGCCGACGUGGAGCUGCCG | 20 | 699 |
| HSV1-UL19-314 | − | GGCCGACGUGGAGCUGCCGG | 20 | 700 |
| HSV1-UL19-315 | − | GCCGACGUGGAGCUGCCGGG | 20 | 701 |
| HSV1-UL19-316 | − | CCGACGUGGAGCUGCCGGGG | 20 | 702 |
| HSV1-UL19-317 | − | CGACGUGGAGCUGCCGGGGG | 20 | 703 |
| HSV1-UL19-318 | − | GCCGGGGGGGGACGUUCCCC | 20 | 704 |
| HSV1-UL19-319 | − | GGGGGGGACGUUCCCCCGGC | 20 | 705 |
| HSV1-UL19-320 | − | GGACGUUCCCCCGGCCGGCC | 20 | 706 |
| HSV1-UL19-321 | − | GACGUUCCCCCGGCCGGCCC | 20 | 707 |
| HSV1-UL19-322 | − | ACGUUCCCCCGGCCGGCCCG | 20 | 708 |
| HSV1-UL19-323 | − | CGUUCCCCCGGCCGGCCCGG | 20 | 709 |
| HSV1-UL19-324 | − | GGCCGGCCCGGGGGAGAUCC | 20 | 710 |
| HSV1-UL19-325 | − | CGGGGGAGAUCCAGGCCACC | 20 | 711 |
| HSV1-UL19-326 | − | GAUCCAGGCCACCUGGCGCG | 20 | 712 |
| HSV1-UL19-327 | − | GCCACCUGGCGCGUGGUGAA | 20 | 713 |
| HSV1-UL19-328 | − | GGUGAACGGCAACUUGCCCC | 20 | 714 |
| HSV1-UL19-329 | − | CUUGCCCCUGGCGCUAUGUC | 20 | 715 |
| HSV1-UL19-330 | − | GCCCCUGGCGCUAUGUCCGG | 20 | 716 |
| HSV1-UL19-331 | − | CGCUAUGUCCGGCGGCGUUC | 20 | 717 |
| HSV1-UL19-332 | − | GCUAUGUCCGGCGGCGUUCC | 20 | 718 |
| HSV1-UL19-333 | − | CGGCGGCGUUCCGGGACGCC | 20 | 719 |
| HSV1-UL19-334 | − | GGCGGCGUUCCGGGACGCCC | 20 | 720 |
| HSV1-UL19-335 | − | GCGGCGUUCCGGGACGCCCG | 20 | 721 |
| HSV1-UL19-336 | − | GUUCCGGGACGCCCGGGGCC | 20 | 722 |
| HSV1-UL19-337 | − | GGACGCCCGGGGCCUGGAGC | 20 | 723 |
| HSV1-UL19-338 | − | GACGCCCGGGGCCUGGAGCU | 20 | 724 |
| HSV1-UL19-339 | − | ACGCCCGGGGCCUGGAGCUG | 20 | 725 |
| HSV1-UL19-340 | − | CGCCCGGGGCCUGGAGCUGG | 20 | 726 |
| HSV1-UL19-341 | − | CCGGGGCCUGGAGCUGGGGG | 20 | 727 |
| HSV1-UL19-342 | − | CGGGGCCUGGAGCUGGGGGU | 20 | 728 |
| HSV1-UL19-343 | − | GGGGGUGGGACGCCACGCCA | 20 | 729 |
| HSV1-UL19-344 | − | GCCACCAUCGCCGCCGUUCG | 20 | 730 |
| HSV1-UL19-345 | − | CCACCAUCGCCGCCGUUCGC | 20 | 731 |
| HSV1-UL19-346 | − | CACCAUCGCCGCCGUUCGCG | 20 | 732 |
| HSV1-UL19-347 | − | GUUCGACGACCGCAACUACC | 20 | 733 |
| HSV1-UL19-348 | − | CGACGACCGCAACUACCCGG | 20 | 734 |
| HSV1-UL19-349 | − | GGCGGUGUUUUACCUGCUGC | 20 | 735 |
| HSV1-UL19-350 | − | CUGCUGCAGGCCGCCAUACA | 20 | 736 |
| HSV1-UL19-351 | − | CGAGCACGUCUUCUGCGCCC | 20 | 737 |
| HSV1-UL19-352 | − | ACGUCUUCUGCGCCCUGGCC | 20 | 738 |
| HSV1-UL19-353 | − | CUGCGCCCUGGCCCGGCUCG | 20 | 739 |
| HSV1-UL19-354 | − | UCCAGUGCAUCACCAGCUAC | 20 | 740 |
| HSV1-UL19-355 | − | CCAGCUACUGGAACAACACG | 20 | 741 |
| HSV1-UL19-356 | − | CUGGAACAACACGCGGUGCG | 20 | 742 |
| HSV1-UL19-357 | − | GUUCGUGAACGACUACUCGC | 20 | 743 |
| HSV1-UL19-358 | − | UCGUACGUCGUGACCUACCU | 20 | 744 |
| HSV1-UL19-359 | − | CGUACGUCGUGACCUACCUC | 20 | 745 |
| HSV1-UL19-360 | − | GUACGUCGUGACCUACCUCG | 20 | 746 |
| HSV1-UL19-361 | − | UACGUCGUGACCUACCUCGG | 20 | 747 |
| HSV1-UL19-362 | − | CCUCGGGGGAGACCUUCCCG | 20 | 748 |
| HSV1-UL19-363 | − | AGACCUUCCCGAGGAGUGCA | 20 | 749 |
| HSV1-UL19-364 | − | AGGAGUGCAUGGCCGUGUAC | 20 | 750 |
| HSV1-UL19-365 | − | GGAGUGCAUGGCCGUGUACC | 20 | 751 |
| HSV1-UL19-366 | − | CAUGGCCGUGUACCGGGACC | 20 | 752 |
| HSV1-UL19-367 | − | GGCCGUGUACCGGGACCUGG | 20 | 753 |
| HSV1-UL19-368 | − | GGACCUGGUGGCGCACGUCG | 20 | 754 |
| HSV1-UL19-369 | − | GGUGGCGCACGUCGAGGCCC | 20 | 755 |
| HSV1-UL19-370 | − | CGUCGAGGCCCUGGCCCAGC | 20 | 756 |
| HSV1-UL19-371 | − | GUUGAUGACUUUACCCUGAC | 20 | 757 |
| HSV1-UL19-372 | − | UGACUUUACCCUGACCGGCC | 20 | 758 |
| HSV1-UL19-373 | − | UACCCUGACCGGCCCGGAGC | 20 | 759 |
| HSV1-UL19-374 | − | ACCCUGACCGGCCCGGAGCU | 20 | 760 |
| HSV1-UL19-375 | − | CUGACCGGCCCGGAGCUGGG | 20 | 761 |
| HSV1-UL19-376 | − | UGACCGGCCCGGAGCUGGGC | 20 | 762 |
| HSV1-UL19-377 | − | CGGCCCGGAGCUGGGCGGGC | 20 | 763 |
| HSV1-UL19-378 | − | GAAUCACCUAAUGCGAGACC | 20 | 764 |
| HSV1-UL19-379 | − | CGCUGCUGCCACCCCUCGUG | 20 | 765 |
| HSV1-UL19-380 | − | GCUGCUGCCACCCCUCGUGU | 20 | 766 |
| HSV1-UL19-381 | − | GGGACUGUGACGCCCUGAUG | 20 | 767 |
| HSV1-UL19-382 | − | UGACGCCCUGAUGCGGCGCG | 20 | 768 |
| HSV1-UL19-383 | − | CCUGAUGCGGCGCGCGGCCC | 20 | 769 |
| HSV1-UL19-384 | − | UGGACCGCCAUCGCGACUGC | 20 | 770 |
| HSV1-UL19-385 | − | GGACCGCCAUCGCGACUGCC | 20 | 771 |
| HSV1-UL19-386 | − | UCGCGACUGCCGGGUUAGCG | 20 | 772 |
| HSV1-UL19-387 | − | CGCGACUGCCGGGUUAGCGC | 20 | 773 |
| HSV1-UL19-388 | − | GCGACUGCCGGGUUAGCGCG | 20 | 774 |
| HSV1-UL19-389 | − | CGACUGCCGGGUUAGCGCGG | 20 | 775 |
| HSV1-UL19-390 | − | GACUGCCGGGUUAGCGCGGG | 20 | 776 |
| HSV1-UL19-391 | − | GGGCCACGACCCCGUGUACG | 20 | 777 |
| HSV1-UL19-392 | − | CCACGACCCCGUGUACGCGG | 20 | 778 |
| HSV1-UL19-393 | − | GUACGCGGCGGCAUGUAACG | 20 | 779 |
| HSV1-UL19-394 | − | GGCAUGUAACGUGGCGACCG | 20 | 780 |
| HSV1-UL19-395 | − | GCGGACUUCAACCGCAACGA | 20 | 781 |
| HSV1-UL19-396 | − | CCAGCUGCUGCACAACACCC | 20 | 782 |
| HSV1-UL19-397 | − | CAACACCCAGGCCCGAGCCG | 20 | 783 |
| HSV1-UL19-398 | − | GGCCCGAGCCGCGGACGCCG | 20 | 784 |
| HSV1-UL19-399 | − | CCGCGGACGCCGCGGAUGAC | 20 | 785 |
| HSV1-UL19-400 | − | CCGCGGAUGACCGGCCGCAC | 20 | 786 |
| HSV1-UL19-401 | − | CGCGGAUGACCGGCCGCACC | 20 | 787 |
| HSV1-UL19-402 | − | GCGGAUGACCGGCCGCACCG | 20 | 788 |
| HSV1-UL19-403 | − | CGGAUGACCGGCCGCACCGG | 20 | 789 |
| HSV1-UL19-404 | − | GGAUGACCGGCCGCACCGGG | 20 | 790 |
| HSV1-UL19-405 | − | UGACCGGCCGCACCGGGGGG | 20 | 791 |
| HSV1-UL19-406 | − | GGCCGCACCGGGGGGCGGAC | 20 | 792 |
| HSV1-UL19-407 | − | CAAGAUUUACUACUACGUGA | 20 | 793 |
| HSV1-UL19-408 | − | UGAUGGUGCCCGCCUUCUCG | 20 | 794 |
| HSV1-UL19-409 | − | GAUGGUGCCCGCCUUCUCGC | 20 | 795 |
| HSV1-UL19-410 | − | AUGGUGCCCGCCUUCUCGCG | 20 | 796 |
| HSV1-UL19-411 | − | GCGGGGCCGCUGCUGCACCG | 20 | 797 |
| HSV1-UL19-412 | − | CGGGGCCGCUGCUGCACCGC | 20 | 798 |
| HSV1-UL19-413 | − | GGGGCCGCUGCUGCACCGCG | 20 | 799 |
| HSV1-UL19-414 | − | GGGCCGCUGCUGCACCGCGG | 20 | 800 |
| HSV1-UL19-415 | − | AUACGCCACCCUGCAGAACA | 20 | 801 |
| HSV1-UL19-416 | − | CGCCACCCUGCAGAACAUGG | 20 | 802 |
| HSV1-UL19-417 | − | CCUGCAGAACAUGGUGGUCC | 20 | 803 |
| HSV1-UL19-418 | − | GUGGUCCCGGAGAUCGCCCC | 20 | 804 |
| HSV1-UL19-419 | − | CCCGGAGAUCGCCCCCGGCG | 20 | 805 |
| HSV1-UL19-420 | − | GUGCCCCAGCGACCCCGUGA | 20 | 806 |
| HSV1-UL19-421 | − | CCCCGCGCACCCCCUGCACC | 20 | 807 |
| HSV1-UL19-422 | − | CCCCCUGCACCCGGCCAAUC | 20 | 808 |
| HSV1-UL19-423 | − | CCUGCACCCGGCCAAUCUGG | 20 | 809 |
| HSV1-UL19-424 | − | GGCCAAUCUGGUGGCCAACA | 20 | 810 |
| HSV1-UL19-425 | − | GUCAACGCCAUGUUUCACAA | 20 | 811 |
| HSV1-UL19-426 | − | UCAACGCCAUGUUUCACAAC | 20 | 812 |
| HSV1-UL19-427 | − | CAUGUUUCACAACGGGCGCG | 20 | 813 |
| HSV1-UL19-428 | − | UCACAACGGGCGCGUGGUAG | 20 | 814 |
| HSV1-UL19-429 | − | AACGGGCGCGUGGUAGUGGA | 20 | 815 |
| HSV1-UL19-430 | − | ACGGGCGCGUGGUAGUGGAC | 20 | 816 |
| HSV1-UL19-431 | − | GCCCGCCAUGCUCACGCUGC | 20 | 817 |
| HSV1-UL19-432 | − | CAUGCUCACGCUGCAGGUGC | 20 | 818 |
| HSV1-UL19-433 | − | GCAGGUGCUGGCCCACAACA | 20 | 819 |
| HSV1-UL19-434 | − | CAACAUGGCCGAACGCACAA | 20 | 820 |
| HSV1-UL19-435 | − | CACAACGGCGCUGCUCUGCU | 20 | 821 |
| HSV1-UL19-436 | − | AACGGCGCUGCUCUGCUCGG | 20 | 822 |
| HSV1-UL19-437 | − | CUGCUCGGCGGCGCCCGACG | 20 | 823 |
| HSV1-UL19-438 | − | UGCUCGGCGGCGCCCGACGC | 20 | 824 |
| HSV1-UL19-439 | − | ACCAACAUGCGCAUAUUCGA | 20 | 825 |
| HSV1-UL19-440 | − | CCAACAUGCGCAUAUUCGAC | 20 | 826 |
| HSV1-UL19-441 | − | CAACAUGCGCAUAUUCGACG | 20 | 827 |
| HSV1-UL19-442 | − | UUCGACGGGGCGUUGCACGC | 20 | 828 |
| HSV1-UL19-443 | − | GCACGCCGGAAUCCUGCUGA | 20 | 829 |
| HSV1-UL19-444 | − | GCUGAUGGCCCCCCAGCAUC | 20 | 830 |
| HSV1-UL19-445 | − | CUGGACCAUACCAUCCAAAA | 20 | 831 |
| HSV1-UL19-446 | − | CCCGUCCACGCGCUGUUCGC | 20 | 832 |
| HSV1-UL19-447 | − | CCGUCCACGCGCUGUUCGCC | 20 | 833 |
| HSV1-UL19-448 | − | CGUCCACGCGCUGUUCGCCG | 20 | 834 |
| HSV1-UL19-449 | − | GUUCGCCGGGGCCGACCACG | 20 | 835 |
| HSV1-UL19-450 | − | GAACGCGCCCAAUUUCCCCC | 20 | 836 |
| HSV1-UL19-451 | − | CGGCCCUGCGCGACCUGUCG | 20 | 837 |
| HSV1-UL19-452 | − | CCUGCGCGACCUGUCGCGGC | 20 | 838 |
| HSV1-UL19-453 | − | CCUGUCGCGGCAGGUCCCCC | 20 | 839 |
| HSV1-UL19-454 | − | GCAGGUCCCCCUGGUCCCCC | 20 | 840 |
| HSV1-UL19-455 | − | CCCCCUGGUCCCCCCGGCUC | 20 | 841 |
| HSV1-UL19-456 | − | CCCCUGGUCCCCCCGGCUCU | 20 | 842 |
| HSV1-UL19-457 | − | CCCUGGUCCCCCCGGCUCUG | 20 | 843 |
| HSV1-UL19-458 | − | CCUGGUCCCCCCGGCUCUGG | 20 | 844 |
| HSV1-UL19-459 | − | GCAGCACGUCCGCGAGAGCG | 20 | 845 |
| HSV1-UL19-460 | − | CACGUCCGCGAGAGCGCGGC | 20 | 846 |
| HSV1-UL19-461 | − | ACGUCCGCGAGAGCGCGGCC | 20 | 847 |
| HSV1-UL19-462 | − | CGUCCGCGAGAGCGCGGCCG | 20 | 848 |
| HSV1-UL19-463 | − | CGCGCUGACCUACGCGCUCA | 20 | 849 |
| HSV1-UL19-464 | − | GCUGACCUACGCGCUCAUGG | 20 | 850 |
| HSV1-UL19-465 | − | CUGACCUACGCGCUCAUGGC | 20 | 851 |
| HSV1-UL19-466 | − | UGACCUACGCGCUCAUGGCG | 20 | 852 |
| HSV1-UL19-467 | − | GUACUUCAAGAUCAGUCCCG | 20 | 853 |
| HSV1-UL19-468 | − | CUUGCAUCAUCAGCUCAAGA | 20 | 854 |
| HSV1-UL19-469 | − | UUGCAUCAUCAGCUCAAGAC | 20 | 855 |
| HSV1-UL19-470 | − | CUCAAGACGGGCCUCCAUCC | 20 | 856 |
| HSV1-UL19-471 | − | UCAAGACGGGCCUCCAUCCC | 20 | 857 |
| HSV1-UL19-472 | − | ACGGGCCUCCAUCCCGGGUU | 20 | 858 |
| HSV1-UL19-473 | − | CGGGCCUCCAUCCCGGGUUU | 20 | 859 |
| HSV1-UL19-474 | − | UGGGUUCACCGUCGUCCGAC | 20 | 860 |
| HSV1-UL19-475 | − | GACUGAGAACGUGCUGUUCU | 20 | 861 |
| HSV1-UL19-476 | − | GCUGUUCUCGGAGCGCGCGU | 20 | 862 |
| HSV1-UL19-477 | − | GUUCUCGGAGCGCGCGUCGG | 20 | 863 |
| HSV1-UL19-478 | − | CGCGUCGGAGGCGUACUUCC | 20 | 864 |
| HSV1-UL19-479 | − | GCGUCGGAGGCGUACUUCCU | 20 | 865 |
| HSV1-UL19-480 | − | GUACUUCCUGGGCCAGCUCC | 20 | 866 |
| HSV1-UL19-481 | − | CUUCCUGGGCCAGCUCCAGG | 20 | 867 |
| HSV1-UL19-482 | − | UGGGCCAGCUCCAGGUGGCC | 20 | 868 |
| HSV1-UL19-483 | − | CAGGUGGCCCGGCACGAAAC | 20 | 869 |
| HSV1-UL19-484 | − | GUGGCCCGGCACGAAACUGG | 20 | 870 |
| HSV1-UL19-485 | − | UGGCCCGGCACGAAACUGGC | 20 | 871 |
| HSV1-UL19-486 | − | GGCCCGGCACGAAACUGGCG | 20 | 872 |
| HSV1-UL19-487 | − | GCCCGGCACGAAACUGGCGG | 20 | 873 |
| HSV1-UL19-488 | − | CCCGGCACGAAACUGGCGGG | 20 | 874 |
| HSV1-UL19-489 | − | CCGGCACGAAACUGGCGGGG | 20 | 875 |
| HSV1-UL19-490 | − | CACCCAGCCGCGCGCGAACG | 20 | 876 |
| HSV1-UL19-491 | − | GCCGCGCGCGAACGUGGACC | 20 | 877 |
| HSV1-UL19-492 | − | CCGCGCGCGAACGUGGACCU | 20 | 878 |
| HSV1-UL19-493 | − | CGCGAACGUGGACCUGGGCG | 20 | 879 |
| HSV1-UL19-494 | − | GCGAACGUGGACCUGGGCGU | 20 | 880 |
| HSV1-UL19-495 | − | CGUGGGCUACACCGCCGUCG | 20 | 881 |
| HSV1-UL19-496 | − | CUACACCGCCGUCGUGGCCA | 20 | 882 |
| HSV1-UL19-497 | − | CCGCAACCCCGUCACCGACA | 20 | 883 |
| HSV1-UL19-498 | − | CGCAACCCCGUCACCGACAU | 20 | 884 |
| HSV1-UL19-499 | − | CCUUCCCCAAAACUUUUACC | 20 | 885 |
| HSV1-UL19-500 | − | CUUCCCCAAAACUUUUACCU | 20 | 886 |
| HSV1-UL19-501 | − | CAAAACUUUUACCUGGGCCG | 20 | 887 |
| HSV1-UL19-502 | − | AAAACUUUUACCUGGGCCGC | 20 | 888 |
| HSV1-UL19-503 | − | AAACUUUUACCUGGGCCGCG | 20 | 889 |
| HSV1-UL19-504 | − | CCGCGGGGCUCCCCCUCUCC | 20 | 890 |
| HSV1-UL19-505 | − | UCCCCCUCUCCUGGACAACG | 20 | 891 |
| HSV1-UL19-506 | − | ACGCGGCAGCCGUGUACCUG | 20 | 892 |
| HSV1-UL19-507 | − | AGCCGUGUACCUGCGGAACG | 20 | 893 |
| HSV1-UL19-508 | − | GUACCUGCGGAACGCGGUCG | 20 | 894 |
| HSV1-UL19-509 | − | CCUGCGGAACGCGGUCGUGG | 20 | 895 |
| HSV1-UL19-510 | − | CUGCGGAACGCGGUCGUGGC | 20 | 896 |
| HSV1-UL19-511 | − | GGUCGUGGCGGGAAACCGCC | 20 | 897 |
| HSV1-UL19-512 | − | GUCGUGGCGGGAAACCGCCU | 20 | 898 |
| HSV1-UL19-513 | − | UCGUGGCGGGAAACCGCCUG | 20 | 899 |
| HSV1-UL19-514 | − | GGCGGGAAACCGCCUGGGGC | 20 | 900 |
| HSV1-UL19-515 | − | GCCCAGCCCGUCCCCGUGUU | 20 | 901 |
| HSV1-UL19-516 | − | CCCAGCCCGUCCCCGUGUUC | 20 | 902 |
| HSV1-UL19-517 | − | CCCCGUGUUCGGGUGCGCCC | 20 | 903 |
| HSV1-UL19-518 | − | UCGGGUGCGCCCAGGUGCCG | 20 | 904 |
| HSV1-UL19-519 | − | GCCCAGGUGCCGCGGCGCGC | 20 | 905 |
| HSV1-UL19-520 | − | CCCAGGUGCCGCGGCGCGCA | 20 | 906 |
| HSV1-UL19-521 | − | GGUGCCGCGGCGCGCAGGGA | 20 | 907 |
| HSV1-UL19-522 | − | CGGCGCGCAGGGAUGGACCA | 20 | 908 |
| HSV1-UL19-523 | − | CGCAGGGAUGGACCACGGCC | 20 | 909 |
| HSV1-UL19-524 | − | CCGACGUCAACUACUUCCGC | 20 | 910 |
| HSV1-UL19-525 | − | UCCGCCGGCCCUGCAACCCC | 20 | 911 |
| HSV1-UL19-526 | − | CCGCCGGCCCUGCAACCCCC | 20 | 912 |
| HSV1-UL19-527 | − | CGCCGGCCCUGCAACCCCCG | 20 | 913 |
| HSV1-UL19-528 | − | AACCCCCGGGGACGCGCCGC | 20 | 914 |
| HSV1-UL19-529 | − | ACCCCCGGGGACGCGCCGCC | 20 | 915 |
| HSV1-UL19-530 | − | CCCCCGGGGACGCGCCGCCG | 20 | 916 |
| HSV1-UL19-531 | − | CCCCGGGGACGCGCCGCCGG | 20 | 917 |
| HSV1-UL19-532 | − | CGCCGCCGGGGGCGUUUACG | 20 | 918 |
| HSV1-UL19-533 | − | GCCGCCGGGGGCGUUUACGC | 20 | 919 |
| HSV1-UL19-534 | − | CCGCCGGGGGCGUUUACGCG | 20 | 920 |
| HSV1-UL19-535 | − | CGCCGGGGGCGUUUACGCGG | 20 | 921 |
| HSV1-UL19-536 | − | GGGCGUUUACGCGGGGGACA | 20 | 922 |
| HSV1-UL19-537 | − | CGUUUACGCGGGGGACAAGG | 20 | 923 |
| HSV1-UL19-538 | − | GUUUACGCGGGGGACAAGGA | 20 | 924 |
| HSV1-UL19-539 | − | UUUACGCGGGGGACAAGGAG | 20 | 925 |
| HSV1-UL19-540 | − | UUACGCGGGGGACAAGGAGG | 20 | 926 |
| HSV1-UL19-541 | − | ACCGCCCUCAUGUACGACCA | 20 | 927 |
| HSV1-UL19-542 | − | ACGGCCAGAGCGACCCGUCC | 20 | 928 |
| HSV1-UL19-543 | − | CGGCCAGAGCGACCCGUCCC | 20 | 929 |
| HSV1-UL19-544 | − | CGACCCGUCCCGGGCCUUCG | 20 | 930 |
| HSV1-UL19-545 | − | GUCCCGGGCCUUCGCGGCCA | 20 | 931 |
| HSV1-UL19-546 | − | UCGCGGCCACGGCCAACCCG | 20 | 932 |
| HSV1-UL19-547 | − | CGCGGCCACGGCCAACCCGU | 20 | 933 |
| HSV1-UL19-548 | − | GCGUCGCAGCGAUUUUCGUA | 20 | 934 |
| HSV1-UL19-549 | − | CGUCGCAGCGAUUUUCGUAC | 20 | 935 |
| HSV1-UL19-550 | − | GUCGCAGCGAUUUUCGUACG | 20 | 936 |
| HSV1-UL19-551 | − | UACGGGGACCUGCUCUAUAA | 20 | 937 |
| HSV1-UL19-552 | − | ACGGGGACCUGCUCUAUAAC | 20 | 938 |
| HSV1-UL19-553 | − | CGGGGACCUGCUCUAUAACG | 20 | 939 |
| HSV1-UL19-554 | − | AACGGGGCCUACCACCUCAA | 20 | 940 |
| HSV1-UL19-555 | − | ACGGGGCCUACCACCUCAAC | 20 | 941 |
| HSV1-UL19-556 | − | CGGGGCCUACCACCUCAACG | 20 | 942 |
| HSV1-UL19-557 | − | CCACCUCAACGGGGCCUCGC | 20 | 943 |
| HSV1-UL19-558 | − | CUGCUUUAAGUUCUUUACGU | 20 | 944 |
| HSV1-UL19-559 | − | CGCCGCCAAACAUCGCUGCC | 20 | 945 |
| HSV1-UL19-560 | − | CUGCCUGGAGCGCCUGAUCG | 20 | 946 |
| HSV1-UL19-561 | − | GGAGCGCCUGAUCGUGGAGA | 20 | 947 |
| HSV1-UL19-562 | − | GAGCGCCUGAUCGUGGAGAC | 20 | 948 |
| HSV1-UL19-563 | − | CCUGAUCGUGGAGACGGGUU | 20 | 949 |
| HSV1-UL19-564 | − | GAUCGUGGAGACGGGUUCGG | 20 | 950 |
| HSV1-UL19-565 | − | GACGGGUUCGGCGGUGUCCA | 20 | 951 |
| HSV1-UL19-566 | − | CGUACAGUUUAAGCGCCCCC | 20 | 952 |
| HSV1-UL19-567 | − | GUACAGUUUAAGCGCCCCCC | 20 | 953 |
| HSV1-UL19-568 | − | UACAGUUUAAGCGCCCCCCG | 20 | 954 |
| HSV1-UL19-569 | − | CCCGGGGUGCCGCGAACUCG | 20 | 955 |
| HSV1-UL19-570 | − | GGGGUGCCGCGAACUCGUGG | 20 | 956 |
| HSV1-UL19-571 | − | GAACUCGUGGAGGACCCGUG | 20 | 957 |
| HSV1-UL19-572 | − | GGACCCGUGUGGCCUGUUUC | 20 | 958 |
| HSV1-UL19-573 | − | CCCGUGUGGCCUGUUUCAGG | 20 | 959 |
| HSV1-UL19-574 | − | CUCCUCCGCAGUGCCCGCAA | 20 | 960 |
| HSV1-UL19-575 | − | UCCUCCGCAGUGCCCGCAAC | 20 | 961 |
| HSV1-UL19-576 | − | CCUCCGCAGUGCCCGCAACG | 20 | 962 |
| HSV1-UL19-577 | − | GCAACGGGGAAGCCCACGCG | 20 | 963 |
| HSV1-UL19-578 | − | CAACGGGGAAGCCCACGCGC | 20 | 964 |
| HSV1-UL19-579 | − | CUAUGACGCAUCCCCGCUCA | 20 | 965 |
| HSV1-UL19-580 | − | UAUGACGCAUCCCCGCUCAA | 20 | 966 |
| HSV1-UL19-581 | − | CGCAUCCCCGCUCAAGGGAC | 20 | 967 |
| HSV1-UL19-582 | − | AACGUCCAGGCCGUCCU | 17 | 968 |
| HSV1-UL19-583 | − | ACGUCCAGGCCGUCCUC | 17 | 969 |
| HSV1-UL19-584 | − | CGUCCAGGCCGUCCUCG | 17 | 970 |
| HSV1-UL19-585 | − | CUCGGGGCGUUUGAGCG | 17 | 971 |
| HSV1-UL19-586 | − | GGCGUUUGAGCGCGGCA | 17 | 972 |
| HSV1-UL19-587 | − | GAUGCUGCACGUGCUGC | 17 | 973 |
| HSV1-UL19-588 | − | GCACGUGCUGCUGGAAA | 17 | 974 |
| HSV1-UL19-589 | − | GGAAAAGGCGCCGCCCC | 17 | 975 |
| HSV1-UL19-590 | − | GCCGAUGCAACGAUACC | 17 | 976 |
| HSV1-UL19-591 | − | CAACGAUACCUGGACAA | 17 | 977 |
| HSV1-UL19-592 | − | CCUGGACAACGGCCGCC | 17 | 978 |
| HSV1-UL19-593 | − | ACGGCCGCCUGGCCACC | 17 | 979 |
| HSV1-UL19-594 | − | CGGCCGCCUGGCCACCA | 17 | 980 |
| HSV1-UL19-595 | − | CCGCCUGGCCACCAGGG | 17 | 981 |
| HSV1-UL19-596 | − | UGGCCACCAGGGUGGCC | 17 | 982 |
| HSV1-UL19-597 | − | GGCCACCAGGGUGGCCC | 17 | 983 |
| HSV1-UL19-598 | − | GGUGGCCCGGGCGACCC | 17 | 984 |
| HSV1-UL19-599 | − | CGAGACGAGCUUUUUCC | 17 | 985 |
| HSV1-UL19-600 | − | GAGACGAGCUUUUUCCU | 17 | 986 |
| HSV1-UL19-601 | − | GAGCUUUUUCCUGGGCA | 17 | 987 |
| HSV1-UL19-602 | − | CUUUUUCCUGGGCAAGG | 17 | 988 |
| HSV1-UL19-603 | − | UUUUUCCUGGGCAAGGC | 17 | 989 |
| HSV1-UL19-604 | − | GCAAGGCGGGCCACCGC | 17 | 990 |
| HSV1-UL19-605 | − | CAAGGCGGGCCACCGCC | 17 | 991 |
| HSV1-UL19-606 | − | GGCGGGCCACCGCCGGG | 17 | 992 |
| HSV1-UL19-607 | − | CCGCCGGGAGGCCGUCG | 17 | 993 |
| HSV1-UL19-608 | − | GGGAGGCCGUCGAGGCC | 17 | 994 |
| HSV1-UL19-609 | − | CGUCGAGGCCUGGCUCG | 17 | 995 |
| HSV1-UL19-610 | − | GCUCGUGGACCUCACCA | 17 | 996 |
| HSV1-UL19-611 | − | GGCCACGCAGCCCUCCG | 17 | 997 |
| HSV1-UL19-612 | − | ACGCAUGCCGACACGCG | 17 | 998 |
| HSV1-UL19-613 | − | CGCAUGCCGACACGCGC | 17 | 999 |
| HSV1-UL19-614 | − | AUGCCGACACGCGCGGG | 17 | 1000 |
| HSV1-UL19-615 | − | CGACACGCGCGGGCGGC | 17 | 1001 |
| HSV1-UL19-616 | − | CGCGGGCGGCCGGUCGA | 17 | 1002 |
| HSV1-UL19-617 | − | GCGGGCGGCCGGUCGAC | 17 | 1003 |
| HSV1-UL19-618 | − | CGGGCGGCCGGUCGACG | 17 | 1004 |
| HSV1-UL19-619 | − | GCAGUCCUUCCUGAAAG | 17 | 1005 |
| HSV1-UL19-620 | − | GUCCUUCCUGAAAGUGG | 17 | 1006 |
| HSV1-UL19-621 | − | CACCGAAGCCGACGUGC | 17 | 1007 |
| HSV1-UL19-622 | − | GACGUGCCGGUGACGUA | 17 | 1008 |
| HSV1-UL19-623 | − | GGUGACGUACGGCGAGA | 17 | 1009 |
| HSV1-UL19-624 | − | GGCGAGAUGGUCCUGAA | 17 | 1010 |
| HSV1-UL19-625 | − | GCGAGAUGGUCCUGAAC | 17 | 1011 |
| HSV1-UL19-626 | − | CGAGAUGGUCCUGAACG | 17 | 1012 |
| HSV1-UL19-627 | − | CCUGAACGGGGCCAACC | 17 | 1013 |
| HSV1-UL19-628 | − | CGGGGCCAACCUGGUCA | 17 | 1014 |
| HSV1-UL19-629 | − | GGUCACGGCGCUCGUGA | 17 | 1015 |
| HSV1-UL19-630 | − | GUCACGGCGCUCGUGAU | 17 | 1016 |
| HSV1-UL19-631 | − | GGCGCUCGUGAUGGGCA | 17 | 1017 |
| HSV1-UL19-632 | − | CAAGGCCGUGCGAAGUC | 17 | 1018 |
| HSV1-UL19-633 | − | GCGAAGUCUGGACGACG | 17 | 1019 |
| HSV1-UL19-634 | − | CGAAGUCUGGACGACGU | 17 | 1020 |
| HSV1-UL19-635 | − | CGUGGGCCGCCACCUGC | 17 | 1021 |
| HSV1-UL19-636 | − | CCACCUGCUGGAGAUGC | 17 | 1022 |
| HSV1-UL19-637 | − | CCUGCUGGAGAUGCAGG | 17 | 1023 |
| HSV1-UL19-638 | − | AGCAGCUCGACCUGAAC | 17 | 1024 |
| HSV1-UL19-639 | − | CCUGAACCGGCAGACGC | 17 | 1025 |
| HSV1-UL19-640 | − | GACGACGCGCGUGCGCG | 17 | 1026 |
| HSV1-UL19-641 | − | GCGCGUGCGCGCGGAUC | 17 | 1027 |
| HSV1-UL19-642 | − | GCGGAUCUGGUGUCCAU | 17 | 1028 |
| HSV1-UL19-643 | − | GUCCAUCGGCGAGAAGC | 17 | 1029 |
| HSV1-UL19-644 | − | CGAGAAGCUGGUCUUUC | 17 | 1030 |
| HSV1-UL19-645 | − | GAAGCUGGUCUUUCUGG | 17 | 1031 |
| HSV1-UL19-646 | − | GGUCUUUCUGGAGGCCC | 17 | 1032 |
| HSV1-UL19-647 | − | CAACGUUCCCUACCCCC | 17 | 1033 |
| HSV1-UL19-648 | − | CGUUCCCUACCCCCUGG | 17 | 1034 |
| HSV1-UL19-649 | − | GUUCCCUACCCCCUGGU | 17 | 1035 |
| HSV1-UL19-650 | − | CCCCCUGGUGGGCGCCA | 17 | 1036 |
| HSV1-UL19-651 | − | GACGUUCGUCCUGCCCC | 17 | 1037 |
| HSV1-UL19-652 | − | ACGUUCGUCCUGCCCCU | 17 | 1038 |
| HSV1-UL19-653 | − | CCUGGGCCUGUUCAAUC | 17 | 1039 |
| HSV1-UL19-654 | − | CCUGUUCAAUCCGGUCA | 17 | 1040 |
| HSV1-UL19-655 | − | UCAAUCCGGUCAUGGAA | 17 | 1041 |
| HSV1-UL19-656 | − | CGGUUUGCCGCGCACGC | 17 | 1042 |
| HSV1-UL19-657 | − | GGUUUGCCGCGCACGCC | 17 | 1043 |
| HSV1-UL19-658 | − | GUUUGCCGCGCACGCCG | 17 | 1044 |
| HSV1-UL19-659 | − | GACCUAGUCCCCGCCCC | 17 | 1045 |
| HSV1-UL19-660 | − | CCCCGCCCCCGGCCACC | 17 | 1046 |
| HSV1-UL19-661 | − | CCCGCCAGCUGUUUUUU | 17 | 1047 |
| HSV1-UL19-662 | − | CCGCCAGCUGUUUUUUU | 17 | 1048 |
| HSV1-UL19-663 | − | CGCCAGCUGUUUUUUUG | 17 | 1049 |
| HSV1-UL19-664 | − | GCCAGCUGUUUUUUUGG | 17 | 1050 |
| HSV1-UL19-665 | − | GCUGUUUUUUUGGGGGA | 17 | 1051 |
| HSV1-UL19-666 | − | UUGGGGGAAGGACCGCC | 17 | 1052 |
| HSV1-UL19-667 | − | GGUGCUGCGCCUGUCUC | 17 | 1053 |
| HSV1-UL19-668 | − | UCUCUGGAACACGCGAU | 17 | 1054 |
| HSV1-UL19-669 | − | CUCUGGAACACGCGAUC | 17 | 1055 |
| HSV1-UL19-670 | − | GCUGAUGAACGUUGACG | 17 | 1056 |
| HSV1-UL19-671 | − | GAUGAACGUUGACGCGG | 17 | 1057 |
| HSV1-UL19-672 | − | AACGUUGACGCGGCGGU | 17 | 1058 |
| HSV1-UL19-673 | − | ACGUUGACGCGGCGGUC | 17 | 1059 |
| HSV1-UL19-674 | − | CGUUGACGCGGCGGUCG | 17 | 1060 |
| HSV1-UL19-675 | − | GUUGACGCGGCGGUCGG | 17 | 1061 |
| HSV1-UL19-676 | − | GAAGCCGCCAAUCCGUA | 17 | 1062 |
| HSV1-UL19-677 | − | AAGCCGCCAAUCCGUAC | 17 | 1063 |
| HSV1-UL19-678 | − | AGCCGCCAAUCCGUACG | 17 | 1064 |
| HSV1-UL19-679 | − | UCCGUACGGGGCGUACG | 17 | 1065 |
| HSV1-UL19-680 | − | GUACGGGGCGUACGUGG | 17 | 1066 |
| HSV1-UL19-681 | − | GGCGUACGUGGCGGCCC | 17 | 1067 |
| HSV1-UL19-682 | − | UACGUGGCGGCCCCGGC | 17 | 1068 |
| HSV1-UL19-683 | − | AGCUGUUUUUGAACGCC | 17 | 1069 |
| HSV1-UL19-684 | − | GCUGUUUUUGAACGCCU | 17 | 1070 |
| HSV1-UL19-685 | − | CUGUUUUUGAACGCCUG | 17 | 1071 |
| HSV1-UL19-686 | − | UGUUUUUGAACGCCUGG | 17 | 1072 |
| HSV1-UL19-687 | − | CGCCUGGGGGCAGCGCC | 17 | 1073 |
| HSV1-UL19-688 | − | GGGCAGCGCCUGGCCCA | 17 | 1074 |
| HSV1-UL19-689 | − | GGCAGCGCCUGGCCCAC | 17 | 1075 |
| HSV1-UL19-690 | − | AGCGCCUGGCCCACGGG | 17 | 1076 |
| HSV1-UL19-691 | − | GCGCCUGGCCCACGGGC | 17 | 1077 |
| HSV1-UL19-692 | − | CCCACGGGCGGGUCCGA | 17 | 1078 |
| HSV1-UL19-693 | − | CCACGGGCGGGUCCGAU | 17 | 1079 |
| HSV1-UL19-694 | − | GCGGGUCCGAUGGGUCG | 17 | 1080 |
| HSV1-UL19-695 | − | GUCCGAUGGGUCGCGGA | 17 | 1081 |
| HSV1-UL19-696 | − | GGAAGGCCAGAUGACCC | 17 | 1082 |
| HSV1-UL19-697 | − | GCCCGACAACGCCAACC | 17 | 1083 |
| HSV1-UL19-698 | − | CGCGUUCGACUUCUUUG | 17 | 1084 |
| HSV1-UL19-699 | − | GCGUUCGACUUCUUUGU | 17 | 1085 |
| HSV1-UL19-700 | − | CGUUCGACUUCUUUGUG | 17 | 1086 |
| HSV1-UL19-701 | − | GUUCGACUUCUUUGUGG | 17 | 1087 |
| HSV1-UL19-702 | − | CGACUUCUUUGUGGGGG | 17 | 1088 |
| HSV1-UL19-703 | − | UGUGGGGGUGGCCGACG | 17 | 1089 |
| HSV1-UL19-704 | − | GGCCGACGUGGAGCUGC | 17 | 1090 |
| HSV1-UL19-705 | − | GCCGACGUGGAGCUGCC | 17 | 1091 |
| HSV1-UL19-706 | − | CCGACGUGGAGCUGCCG | 17 | 1092 |
| HSV1-UL19-707 | − | CGACGUGGAGCUGCCGG | 17 | 1093 |
| HSV1-UL19-708 | − | GACGUGGAGCUGCCGGG | 17 | 1094 |
| HSV1-UL19-709 | − | ACGUGGAGCUGCCGGGG | 17 | 1095 |
| HSV1-UL19-710 | − | CGUGGAGCUGCCGGGGG | 17 | 1096 |
| HSV1-UL19-711 | − | GGGGGGGGACGUUCCCC | 17 | 1097 |
| HSV1-UL19-712 | − | GGGGACGUUCCCCCGGC | 17 | 1098 |
| HSV1-UL19-713 | − | CGUUCCCCCGGCCGGCC | 17 | 1099 |
| HSV1-UL19-714 | − | GUUCCCCCGGCCGGCCC | 17 | 1100 |
| HSV1-UL19-715 | − | UUCCCCCGGCCGGCCCG | 17 | 1101 |
| HSV1-UL19-716 | − | UCCCCCGGCCGGCCCGG | 17 | 1102 |
| HSV1-UL19-717 | − | CGGCCCGGGGGAGAUCC | 17 | 1103 |
| HSV1-UL19-718 | − | GGGAGAUCCAGGCCACC | 17 | 1104 |
| HSV1-UL19-719 | − | CCAGGCCACCUGGCGCG | 17 | 1105 |
| HSV1-UL19-720 | − | ACCUGGCGCGUGGUGAA | 17 | 1106 |
| HSV1-UL19-721 | − | GAACGGCAACUUGCCCC | 17 | 1107 |
| HSV1-UL19-722 | − | GCCCCUGGCGCUAUGUC | 17 | 1108 |
| HSV1-UL19-723 | − | CCUGGCGCUAUGUCCGG | 17 | 1109 |
| HSV1-UL19-724 | − | UAUGUCCGGCGGCGUUC | 17 | 1110 |
| HSV1-UL19-725 | − | AUGUCCGGCGGCGUUCC | 17 | 1111 |
| HSV1-UL19-726 | − | CGGCGUUCCGGGACGCC | 17 | 1112 |
| HSV1-UL19-727 | − | GGCGUUCCGGGACGCCC | 17 | 1113 |
| HSV1-UL19-728 | − | GCGUUCCGGGACGCCCG | 17 | 1114 |
| HSV1-UL19-729 | − | CCGGGACGCCCGGGGCC | 17 | 1115 |
| HSV1-UL19-730 | − | CGCCCGGGGCCUGGAGC | 17 | 1116 |
| HSV1-UL19-731 | − | GCCCGGGGCCUGGAGCU | 17 | 1117 |
| HSV1-UL19-732 | − | CCCGGGGCCUGGAGCUG | 17 | 1118 |
| HSV1-UL19-733 | − | CCGGGGCCUGGAGCUGG | 17 | 1119 |
| HSV1-UL19-734 | − | GGGCCUGGAGCUGGGGG | 17 | 1120 |
| HSV1-UL19-735 | − | GGCCUGGAGCUGGGGGU | 17 | 1121 |
| HSV1-UL19-736 | − | GGUGGGACGCCACGCCA | 17 | 1122 |
| HSV1-UL19-737 | − | ACCAUCGCCGCCGUUCG | 17 | 1123 |
| HSV1-UL19-738 | − | CCAUCGCCGCCGUUCGC | 17 | 1124 |
| HSV1-UL19-739 | − | CAUCGCCGCCGUUCGCG | 17 | 1125 |
| HSV1-UL19-740 | − | CGACGACCGCAACUACC | 17 | 1126 |
| HSV1-UL19-741 | − | CGACCGCAACUACCCGG | 17 | 1127 |
| HSV1-UL19-742 | − | GGUGUUUUACCUGCUGC | 17 | 1128 |
| HSV1-UL19-743 | − | CUGCAGGCCGCCAUACA | 17 | 1129 |
| HSV1-UL19-744 | − | GCACGUCUUCUGCGCCC | 17 | 1130 |
| HSV1-UL19-745 | − | UCUUCUGCGCCCUGGCC | 17 | 1131 |
| HSV1-UL19-746 | − | CGCCCUGGCCCGGCUCG | 17 | 1132 |
| HSV1-UL19-747 | − | AGUGCAUCACCAGCUAC | 17 | 1133 |
| HSV1-UL19-748 | − | GCUACUGGAACAACACG | 17 | 1134 |
| HSV1-UL19-749 | − | GAACAACACGCGGUGCG | 17 | 1135 |
| HSV1-UL19-750 | − | CGUGAACGACUACUCGC | 17 | 1136 |
| HSV1-UL19-751 | − | UACGUCGUGACCUACCU | 17 | 1137 |
| HSV1-UL19-752 | − | ACGUCGUGACCUACCUC | 17 | 1138 |
| HSV1-UL19-753 | − | CGUCGUGACCUACCUCG | 17 | 1139 |
| HSV1-UL19-754 | − | GUCGUGACCUACCUCGG | 17 | 1140 |
| HSV1-UL19-755 | − | CGGGGGAGACCUUCCCG | 17 | 1141 |
| HSV1-UL19-756 | − | CCUUCCCGAGGAGUGCA | 17 | 1142 |
| HSV1-UL19-757 | − | AGUGCAUGGCCGUGUAC | 17 | 1143 |
| HSV1-UL19-758 | − | GUGCAUGGCCGUGUACC | 17 | 1144 |
| HSV1-UL19-759 | − | GGCCGUGUACCGGGACC | 17 | 1145 |
| HSV1-UL19-760 | − | CGUGUACCGGGACCUGG | 17 | 1146 |
| HSV1-UL19-761 | − | CCUGGUGGCGCACGUCG | 17 | 1147 |
| HSV1-UL19-762 | − | GGCGCACGUCGAGGCCC | 17 | 1148 |
| HSV1-UL19-763 | − | CGAGGCCCUGGCCCAGC | 17 | 1149 |
| HSV1-UL19-764 | − | GAUGACUUUACCCUGAC | 17 | 1150 |
| HSV1-UL19-765 | − | CUUUACCCUGACCGGCC | 17 | 1151 |
| HSV1-UL19-766 | − | CCUGACCGGCCCGGAGC | 17 | 1152 |
| HSV1-UL19-767 | − | CUGACCGGCCCGGAGCU | 17 | 1153 |
| HSV1-UL19-768 | − | ACCGGCCCGGAGCUGGG | 17 | 1154 |
| HSV1-UL19-769 | − | CCGGCCCGGAGCUGGGC | 17 | 1155 |
| HSV1-UL19-770 | − | CCCGGAGCUGGGCGGGC | 17 | 1156 |
| HSV1-UL19-771 | − | UCACCUAAUGCGAGACC | 17 | 1157 |
| HSV1-UL19-772 | − | UGCUGCCACCCCUCGUG | 17 | 1158 |
| HSV1-UL19-773 | − | GCUGCCACCCCUCGUGU | 17 | 1159 |
| HSV1-UL19-774 | − | ACUGUGACGCCCUGAUG | 17 | 1160 |
| HSV1-UL19-775 | − | CGCCCUGAUGCGGCGCG | 17 | 1161 |
| HSV1-UL19-776 | − | GAUGCGGCGCGCGGCCC | 17 | 1162 |
| HSV1-UL19-777 | − | ACCGCCAUCGCGACUGC | 17 | 1163 |
| HSV1-UL19-778 | − | CCGCCAUCGCGACUGCC | 17 | 1164 |
| HSV1-UL19-779 | − | CGACUGCCGGGUUAGCG | 17 | 1165 |
| HSV1-UL19-780 | − | GACUGCCGGGUUAGCGC | 17 | 1166 |
| HSV1-UL19-781 | − | ACUGCCGGGUUAGCGCG | 17 | 1167 |
| HSV1-UL19-782 | − | CUGCCGGGUUAGCGCGG | 17 | 1168 |
| HSV1-UL19-783 | − | UGCCGGGUUAGCGCGGG | 17 | 1169 |
| HSV1-UL19-784 | − | CCACGACCCCGUGUACG | 17 | 1170 |
| HSV1-UL19-785 | − | CGACCCCGUGUACGCGG | 17 | 1171 |
| HSV1-UL19-786 | − | CGCGGCGGCAUGUAACG | 17 | 1172 |
| HSV1-UL19-787 | − | AUGUAACGUGGCGACCG | 17 | 1173 |
| HSV1-UL19-788 | − | GACUUCAACCGCAACGA | 17 | 1174 |
| HSV1-UL19-789 | − | GCUGCUGCACAACACCC | 17 | 1175 |
| HSV1-UL19-790 | − | CACCCAGGCCCGAGCCG | 17 | 1176 |
| HSV1-UL19-791 | − | CCGAGCCGCGGACGCCG | 17 | 1177 |
| HSV1-UL19-792 | − | CGGACGCCGCGGAUGAC | 17 | 1178 |
| HSV1-UL19-793 | − | CGGAUGACCGGCCGCAC | 17 | 1179 |
| HSV1-UL19-794 | − | GGAUGACCGGCCGCACC | 17 | 1180 |
| HSV1-UL19-795 | − | GAUGACCGGCCGCACCG | 17 | 1181 |
| HSV1-UL19-796 | − | AUGACCGGCCGCACCGG | 17 | 1182 |
| HSV1-UL19-797 | − | UGACCGGCCGCACCGGG | 17 | 1183 |
| HSV1-UL19-798 | − | CCGGCCGCACCGGGGGG | 17 | 1184 |
| HSV1-UL19-799 | − | CGCACCGGGGGGCGGAC | 17 | 1185 |
| HSV1-UL19-800 | − | GAUUUACUACUACGUGA | 17 | 1186 |
| HSV1-UL19-801 | − | UGGUGCCCGCCUUCUCG | 17 | 1187 |
| HSV1-UL19-802 | − | GGUGCCCGCCUUCUCGC | 17 | 1188 |
| HSV1-UL19-803 | − | GUGCCCGCCUUCUCGCG | 17 | 1189 |
| HSV1-UL19-804 | − | GGGCCGCUGCUGCACCG | 17 | 1190 |
| HSV1-UL19-805 | − | GGCCGCUGCUGCACCGC | 17 | 1191 |
| HSV1-UL19-806 | − | GCCGCUGCUGCACCGCG | 17 | 1192 |
| HSV1-UL19-807 | − | CCGCUGCUGCACCGCGG | 17 | 1193 |
| HSV1-UL19-808 | − | CGCCACCCUGCAGAACA | 17 | 1194 |
| HSV1-UL19-809 | − | CACCCUGCAGAACAUGG | 17 | 1195 |
| HSV1-UL19-810 | − | GCAGAACAUGGUGGUCC | 17 | 1196 |
| HSV1-UL19-811 | − | GUCCCGGAGAUCGCCCC | 17 | 1197 |
| HSV1-UL19-812 | − | GGAGAUCGCCCCCGGCG | 17 | 1198 |
| HSV1-UL19-813 | − | CCCCAGCGACCCCGUGA | 17 | 1199 |
| HSV1-UL19-814 | − | CGCGCACCCCCUGCACC | 17 | 1200 |
| HSV1-UL19-815 | − | CCUGCACCCGGCCAAUC | 17 | 1201 |
| HSV1-UL19-816 | − | GCACCCGGCCAAUCUGG | 17 | 1202 |
| HSV1-UL19-817 | − | CAAUCUGGUGGCCAACA | 17 | 1203 |
| HSV1-UL19-818 | − | AACGCCAUGUUUCACAA | 17 | 1204 |
| HSV1-UL19-819 | − | ACGCCAUGUUUCACAAC | 17 | 1205 |
| HSV1-UL19-820 | − | GUUUCACAACGGGCGCG | 17 | 1206 |
| HSV1-UL19-821 | − | CAACGGGCGCGUGGUAG | 17 | 1207 |
| HSV1-UL19-822 | − | GGGCGCGUGGUAGUGGA | 17 | 1208 |
| HSV1-UL19-823 | − | GGCGCGUGGUAGUGGAC | 17 | 1209 |
| HSV1-UL19-824 | − | CGCCAUGCUCACGCUGC | 17 | 1210 |
| HSV1-UL19-825 | − | GCUCACGCUGCAGGUGC | 17 | 1211 |
| HSV1-UL19-826 | − | GGUGCUGGCCCACAACA | 17 | 1212 |
| HSV1-UL19-827 | − | CAUGGCCGAACGCACAA | 17 | 1213 |
| HSV1-UL19-828 | − | AACGGCGCUGCUCUGCU | 17 | 1214 |
| HSV1-UL19-829 | − | GGCGCUGCUCUGCUCGG | 17 | 1215 |
| HSV1-UL19-830 | − | CUCGGCGGCGCCCGACG | 17 | 1216 |
| HSV1-UL19-831 | − | UCGGCGGCGCCCGACGC | 17 | 1217 |
| HSV1-UL19-832 | − | AACAUGCGCAUAUUCGA | 17 | 1218 |
| HSV1-UL19-833 | − | ACAUGCGCAUAUUCGAC | 17 | 1219 |
| HSV1-UL19-834 | − | CAUGCGCAUAUUCGACG | 17 | 1220 |
| HSV1-UL19-835 | − | GACGGGGCGUUGCACGC | 17 | 1221 |
| HSV1-UL19-836 | − | CGCCGGAAUCCUGCUGA | 17 | 1222 |
| HSV1-UL19-837 | − | GAUGGCCCCCCAGCAUC | 17 | 1223 |
| HSV1-UL19-838 | − | GACCAUACCAUCCAAAA | 17 | 1224 |
| HSV1-UL19-839 | − | GUCCACGCGCUGUUCGC | 17 | 1225 |
| HSV1-UL19-840 | − | UCCACGCGCUGUUCGCC | 17 | 1226 |
| HSV1-UL19-841 | − | CCACGCGCUGUUCGCCG | 17 | 1227 |
| HSV1-UL19-842 | − | CGCCGGGGCCGACCACG | 17 | 1228 |
| HSV1-UL19-843 | − | CGCGCCCAAUUUCCCCC | 17 | 1229 |
| HSV1-UL19-844 | − | CCCUGCGCGACCUGUCG | 17 | 1230 |
| HSV1-UL19-845 | − | GCGCGACCUGUCGCGGC | 17 | 1231 |
| HSV1-UL19-846 | − | GUCGCGGCAGGUCCCCC | 17 | 1232 |
| HSV1-UL19-847 | − | GGUCCCCCUGGUCCCCC | 17 | 1233 |
| HSV1-UL19-848 | − | CCUGGUCCCCCCGGCUC | 17 | 1234 |
| HSV1-UL19-849 | − | CUGGUCCCCCCGGCUCU | 17 | 1235 |
| HSV1-UL19-850 | − | UGGUCCCCCCGGCUCUG | 17 | 1236 |
| HSV1-UL19-851 | − | GGUCCCCCCGGCUCUGG | 17 | 1237 |
| HSV1-UL19-852 | − | GCACGUCCGCGAGAGCG | 17 | 1238 |
| HSV1-UL19-853 | − | GUCCGCGAGAGCGCGGC | 17 | 1239 |
| HSV1-UL19-854 | − | UCCGCGAGAGCGCGGCC | 17 | 1240 |
| HSV1-UL19-855 | − | CCGCGAGAGCGCGGCCG | 17 | 1241 |
| HSV1-UL19-856 | − | GCUGACCUACGCGCUCA | 17 | 1242 |
| HSV1-UL19-857 | − | GACCUACGCGCUCAUGG | 17 | 1243 |
| HSV1-UL19-858 | − | ACCUACGCGCUCAUGGC | 17 | 1244 |
| HSV1-UL19-859 | − | CCUACGCGCUCAUGGCG | 17 | 1245 |
| HSV1-UL19-860 | − | CUUCAAGAUCAGUCCCG | 17 | 1246 |
| HSV1-UL19-861 | − | GCAUCAUCAGCUCAAGA | 17 | 1247 |
| HSV1-UL19-862 | − | CAUCAUCAGCUCAAGAC | 17 | 1248 |
| HSV1-UL19-863 | − | AAGACGGGCCUCCAUCC | 17 | 1249 |
| HSV1-UL19-864 | − | AGACGGGCCUCCAUCCC | 17 | 1250 |
| HSV1-UL19-865 | − | GGCCUCCAUCCCGGGUU | 17 | 1251 |
| HSV1-UL19-866 | − | GCCUCCAUCCCGGGUUU | 17 | 1252 |
| HSV1-UL19-867 | − | GUUCACCGUCGUCCGAC | 17 | 1253 |
| HSV1-UL19-868 | − | UGAGAACGUGCUGUUCU | 17 | 1254 |
| HSV1-UL19-869 | − | GUUCUCGGAGCGCGCGU | 17 | 1255 |
| HSV1-UL19-870 | − | CUCGGAGCGCGCGUCGG | 17 | 1256 |
| HSV1-UL19-871 | − | GUCGGAGGCGUACUUCC | 17 | 1257 |
| HSV1-UL19-872 | − | UCGGAGGCGUACUUCCU | 17 | 1258 |
| HSV1-UL19-873 | − | CUUCCUGGGCCAGCUCC | 17 | 1259 |
| HSV1-UL19-874 | − | CCUGGGCCAGCUCCAGG | 17 | 1260 |
| HSV1-UL19-875 | − | GCCAGCUCCAGGUGGCC | 17 | 1261 |
| HSV1-UL19-876 | − | GUGGCCCGGCACGAAAC | 17 | 1262 |
| HSV1-UL19-877 | − | GCCCGGCACGAAACUGG | 17 | 1263 |
| HSV1-UL19-878 | − | CCCGGCACGAAACUGGC | 17 | 1264 |
| HSV1-UL19-879 | − | CCGGCACGAAACUGGCG | 17 | 1265 |
| HSV1-UL19-880 | − | CGGCACGAAACUGGCGG | 17 | 1266 |
| HSV1-UL19-881 | − | GGCACGAAACUGGCGGG | 17 | 1267 |
| HSV1-UL19-882 | − | GCACGAAACUGGCGGGG | 17 | 1268 |
| HSV1-UL19-883 | − | CCAGCCGCGCGCGAACG | 17 | 1269 |
| HSV1-UL19-884 | − | GCGCGCGAACGUGGACC | 17 | 1270 |
| HSV1-UL19-885 | − | CGCGCGAACGUGGACCU | 17 | 1271 |
| HSV1-UL19-886 | − | GAACGUGGACCUGGGCG | 17 | 1272 |
| HSV1-UL19-887 | − | AACGUGGACCUGGGCGU | 17 | 1273 |
| HSV1-UL19-888 | − | GGGCUACACCGCCGUCG | 17 | 1274 |
| HSV1-UL19-889 | − | CACCGCCGUCGUGGCCA | 17 | 1275 |
| HSV1-UL19-890 | − | CAACCCCGUCACCGACA | 17 | 1276 |
| HSV1-UL19-891 | − | AACCCCGUCACCGACAU | 17 | 1277 |
| HSV1-UL19-892 | − | UCCCCAAAACUUUUACC | 17 | 1278 |
| HSV1-UL19-893 | − | CCCCAAAACUUUUACCU | 17 | 1279 |
| HSV1-UL19-894 | − | AACUUUUACCUGGGCCG | 17 | 1280 |
| HSV1-UL19-895 | − | ACUUUUACCUGGGCCGC | 17 | 1281 |
| HSV1-UL19-896 | − | CUUUUACCUGGGCCGCG | 17 | 1282 |
| HSV1-UL19-897 | − | CGGGGCUCCCCCUCUCC | 17 | 1283 |
| HSV1-UL19-898 | − | CCCUCUCCUGGACAACG | 17 | 1284 |
| HSV1-UL19-899 | − | CGGCAGCCGUGUACCUG | 17 | 1285 |
| HSV1-UL19-900 | − | CGUGUACCUGCGGAACG | 17 | 1286 |
| HSV1-UL19-901 | − | CCUGCGGAACGCGGUCG | 17 | 1287 |
| HSV1-UL19-902 | − | GCGGAACGCGGUCGUGG | 17 | 1288 |
| HSV1-UL19-903 | − | CGGAACGCGGUCGUGGC | 17 | 1289 |
| HSV1-UL19-904 | − | CGUGGCGGGAAACCGCC | 17 | 1290 |
| HSV1-UL19-905 | − | GUGGCGGGAAACCGCCU | 17 | 1291 |
| HSV1-UL19-906 | − | UGGCGGGAAACCGCCUG | 17 | 1292 |
| HSV1-UL19-907 | − | GGGAAACCGCCUGGGGC | 17 | 1293 |
| HSV1-UL19-908 | − | CAGCCCGUCCCCGUGUU | 17 | 1294 |
| HSV1-UL19-909 | − | AGCCCGUCCCCGUGUUC | 17 | 1295 |
| HSV1-UL19-910 | − | CGUGUUCGGGUGCGCCC | 17 | 1296 |
| HSV1-UL19-911 | − | GGUGCGCCCAGGUGCCG | 17 | 1297 |
| HSV1-UL19-912 | − | CAGGUGCCGCGGCGCGC | 17 | 1298 |
| HSV1-UL19-913 | − | AGGUGCCGCGGCGCGCA | 17 | 1299 |
| HSV1-UL19-914 | − | GCCGCGGCGCGCAGGGA | 17 | 1300 |
| HSV1-UL19-915 | − | CGCGCAGGGAUGGACCA | 17 | 1301 |
| HSV1-UL19-916 | − | AGGGAUGGACCACGGCC | 17 | 1302 |
| HSV1-UL19-917 | − | ACGUCAACUACUUCCGC | 17 | 1303 |
| HSV1-UL19-918 | − | GCCGGCCCUGCAACCCC | 17 | 1304 |
| HSV1-UL19-919 | − | CCGGCCCUGCAACCCCC | 17 | 1305 |
| HSV1-UL19-920 | − | CGGCCCUGCAACCCCCG | 17 | 1306 |
| HSV1-UL19-921 | − | CCCCGGGGACGCGCCGC | 17 | 1307 |
| HSV1-UL19-922 | − | CCCGGGGACGCGCCGCC | 17 | 1308 |
| HSV1-UL19-923 | − | CCGGGGACGCGCCGCCG | 17 | 1309 |
| HSV1-UL19-924 | − | CGGGGACGCGCCGCCGG | 17 | 1310 |
| HSV1-UL19-925 | − | CGCCGGGGGCGUUUACG | 17 | 1311 |
| HSV1-UL19-926 | − | GCCGGGGGCGUUUACGC | 17 | 1312 |
| HSV1-UL19-927 | − | CCGGGGGCGUUUACGCG | 17 | 1313 |
| HSV1-UL19-928 | − | CGGGGGCGUUUACGCGG | 17 | 1314 |
| HSV1-UL19-929 | − | CGUUUACGCGGGGGACA | 17 | 1315 |
| HSV1-UL19-930 | − | UUACGCGGGGGACAAGG | 17 | 1316 |
| HSV1-UL19-931 | − | UACGCGGGGGACAAGGA | 17 | 1317 |
| HSV1-UL19-932 | − | ACGCGGGGGACAAGGAG | 17 | 1318 |
| HSV1-UL19-933 | − | CGCGGGGGACAAGGAGG | 17 | 1319 |
| HSV1-UL19-934 | − | GCCCUCAUGUACGACCA | 17 | 1320 |
| HSV1-UL19-935 | − | GCCAGAGCGACCCGUCC | 17 | 1321 |
| HSV1-UL19-936 | − | CCAGAGCGACCCGUCCC | 17 | 1322 |
| HSV1-UL19-937 | − | CCCGUCCCGGGCCUUCG | 17 | 1323 |
| HSV1-UL19-938 | − | CCGGGCCUUCGCGGCCA | 17 | 1324 |
| HSV1-UL19-939 | − | CGGCCACGGCCAACCCG | 17 | 1325 |
| HSV1-UL19-940 | − | GGCCACGGCCAACCCGU | 17 | 1326 |
| HSV1-UL19-941 | − | UCGCAGCGAUUUUCGUA | 17 | 1327 |
| HSV1-UL19-942 | − | CGCAGCGAUUUUCGUAC | 17 | 1328 |
| HSV1-UL19-943 | − | GCAGCGAUUUUCGUACG | 17 | 1329 |
| HSV1-UL19-944 | − | GGGGACCUGCUCUAUAA | 17 | 1330 |
| HSV1-UL19-945 | − | GGGACCUGCUCUAUAAC | 17 | 1331 |
| HSV1-UL19-946 | − | GGACCUGCUCUAUAACG | 17 | 1332 |
| HSV1-UL19-947 | − | GGGGCCUACCACCUCAA | 17 | 1333 |
| HSV1-UL19-948 | − | GGGCCUACCACCUCAAC | 17 | 1334 |
| HSV1-UL19-949 | − | GGCCUACCACCUCAACG | 17 | 1335 |
| HSV1-UL19-950 | − | CCUCAACGGGGCCUCGC | 17 | 1336 |
| HSV1-UL19-951 | − | CUUUAAGUUCUUUACGU | 17 | 1337 |
| HSV1-UL19-952 | − | CGCCAAACAUCGCUGCC | 17 | 1338 |
| HSV1-UL19-953 | − | CCUGGAGCGCCUGAUCG | 17 | 1339 |
| HSV1-UL19-954 | − | GCGCCUGAUCGUGGAGA | 17 | 1340 |
| HSV1-UL19-955 | − | CGCCUGAUCGUGGAGAC | 17 | 1341 |
| HSV1-UL19-956 | − | GAUCGUGGAGACGGGUU | 17 | 1342 |
| HSV1-UL19-957 | − | CGUGGAGACGGGUUCGG | 17 | 1343 |
| HSV1-UL19-958 | − | GGGUUCGGCGGUGUCCA | 17 | 1344 |
| HSV1-UL19-959 | − | ACAGUUUAAGCGCCCCC | 17 | 1345 |
| HSV1-UL19-960 | − | CAGUUUAAGCGCCCCCC | 17 | 1346 |
| HSV1-UL19-961 | − | AGUUUAAGCGCCCCCCG | 17 | 1347 |
| HSV1-UL19-962 | − | GGGGUGCCGCGAACUCG | 17 | 1348 |
| HSV1-UL19-963 | − | GUGCCGCGAACUCGUGG | 17 | 1349 |
| HSV1-UL19-964 | − | CUCGUGGAGGACCCGUG | 17 | 1350 |
| HSV1-UL19-965 | − | CCCGUGUGGCCUGUUUC | 17 | 1351 |
| HSV1-UL19-966 | − | GUGUGGCCUGUUUCAGG | 17 | 1352 |
| HSV1-UL19-967 | − | CUCCGCAGUGCCCGCAA | 17 | 1353 |
| HSV1-UL19-968 | − | UCCGCAGUGCCCGCAAC | 17 | 1354 |
| HSV1-UL19-969 | − | CCGCAGUGCCCGCAACG | 17 | 1355 |
| HSV1-UL19-970 | − | ACGGGGAAGCCCACGCG | 17 | 1356 |
| HSV1-UL19-971 | − | CGGGGAAGCCCACGCGC | 17 | 1357 |
| HSV1-UL19-972 | − | UGACGCAUCCCCGCUCA | 17 | 1358 |
| HSV1-UL19-973 | − | GACGCAUCCCCGCUCAA | 17 | 1359 |
| HSV1-UL19-974 | − | AUCCCCGCUCAAGGGAC | 17 | 1360 |
| HSV1-UL19-975 | + | CAAACGCCCCGAGGACGGCC | 20 | 1361 |
| HSV1-UL19-976 | + | GCGCUCAAACGCCCCGAGGA | 20 | 1362 |
| HSV1-UL19-977 | + | UGCCGCGCUCAAACGCCCCG | 20 | 1363 |
| HSV1-UL19-978 | + | CAGCACGUGCAGCAUCUGGU | 20 | 1364 |
| HSV1-UL19-979 | + | CCAGCAGCACGUGCAGCAUC | 20 | 1365 |
| HSV1-UL19-980 | + | GGCAACAACAAAGCCAGGGG | 20 | 1366 |
| HSV1-UL19-981 | + | AUCGGCAACAACAAAGCCAG | 20 | 1367 |
| HSV1-UL19-982 | + | CAUCGGCAACAACAAAGCCA | 20 | 1368 |
| HSV1-UL19-983 | + | GCAUCGGCAACAACAAAGCC | 20 | 1369 |
| HSV1-UL19-984 | + | UUGUCCAGGUAUCGUUGCAU | 20 | 1370 |
| HSV1-UL19-985 | + | UGGCCAGGCGGCCGUUGUCC | 20 | 1371 |
| HSV1-UL19-986 | + | GGGCCACCCUGGUGGCCAGG | 20 | 1372 |
| HSV1-UL19-987 | + | CCCGGGCCACCCUGGUGGCC | 20 | 1373 |
| HSV1-UL19-988 | + | GGUCGCCCGGGCCACCCUGG | 20 | 1374 |
| HSV1-UL19-989 | + | CAGGGUCGCCCGGGCCACCC | 20 | 1375 |
| HSV1-UL19-990 | + | CUCGGCGACCAGGGUCGCCC | 20 | 1376 |
| HSV1-UL19-991 | + | GCUCGGCGACCAGGGUCGCC | 20 | 1377 |
| HSV1-UL19-992 | + | UCGCUUUAGCUCGGCGACCA | 20 | 1378 |
| HSV1-UL19-993 | + | UUCGCUUUAGCUCGGCGACC | 20 | 1379 |
| HSV1-UL19-994 | + | GCAGAAGCUUCGCUUUAGCU | 20 | 1380 |
| HSV1-UL19-995 | + | GGCGGUGGCCCGCCUUGCCC | 20 | 1381 |
| HSV1-UL19-996 | + | CCUCGACGGCCUCCCGGCGG | 20 | 1382 |
| HSV1-UL19-997 | + | AGGCCUCGACGGCCUCCCGG | 20 | 1383 |
| HSV1-UL19-998 | + | GCCAGGCCUCGACGGCCUCC | 20 | 1384 |
| HSV1-UL19-999 | + | GUCCACGAGCCAGGCCUCGA | 20 | 1385 |
| HSV1-UL19-1000 | + | CGUGGUGAGGUCCACGAGCC | 20 | 1386 |
| HSV1-UL19-1001 | + | AGGGCUGCGUGGCCGUGGUG | 20 | 1387 |
| HSV1-UL19-1002 | + | CACGGAGGGCUGCGUGGCCG | 20 | 1388 |
| HSV1-UL19-1003 | + | CACGGCCACGGAGGGCUGCG | 20 | 1389 |
| HSV1-UL19-1004 | + | AGACGGGGCACGGCCACGGA | 20 | 1390 |
| HSV1-UL19-1005 | + | CAGACGGGGCACGGCCACGG | 20 | 1391 |
| HSV1-UL19-1006 | + | CGUCAGACGGGGCACGGCCA | 20 | 1392 |
| HSV1-UL19-1007 | + | GGCAUGCGUCAGACGGGGCA | 20 | 1393 |
| HSV1-UL19-1008 | + | GUGUCGGCAUGCGUCAGACG | 20 | 1394 |
| HSV1-UL19-1009 | + | CGUGUCGGCAUGCGUCAGAC | 20 | 1395 |
| HSV1-UL19-1010 | + | GCGUGUCGGCAUGCGUCAGA | 20 | 1396 |
| HSV1-UL19-1011 | + | GACCGGCCGCCCGCGCGUGU | 20 | 1397 |
| HSV1-UL19-1012 | + | GUGACGAGCACCCCGUCGAC | 20 | 1398 |
| HSV1-UL19-1013 | + | GCGCUGUUUGAUCGGGGCGG | 20 | 1399 |
| HSV1-UL19-1014 | + | GAGGCGCUGUUUGAUCGGGG | 20 | 1400 |
| HSV1-UL19-1015 | + | CAGGAGGCGCUGUUUGAUCG | 20 | 1401 |
| HSV1-UL19-1016 | + | GCAGGAGGCGCUGUUUGAUC | 20 | 1402 |
| HSV1-UL19-1017 | + | UGCAGGAGGCGCUGUUUGAU | 20 | 1403 |
| HSV1-UL19-1018 | + | CUUUCAGGAAGGACUGCAGG | 20 | 1404 |
| HSV1-UL19-1019 | + | CCACUUUCAGGAAGGACUGC | 20 | 1405 |
| HSV1-UL19-1020 | + | GGUGUCCUCCACUUUCAGGA | 20 | 1406 |
| HSV1-UL19-1021 | + | CUUCGGUGUCCUCCACUUUC | 20 | 1407 |
| HSV1-UL19-1022 | + | CGUCACCGGCACGUCGGCUU | 20 | 1408 |
| HSV1-UL19-1023 | + | GCCGUACGUCACCGGCACGU | 20 | 1409 |
| HSV1-UL19-1024 | + | ACCAUCUCGCCGUACGUCAC | 20 | 1410 |
| HSV1-UL19-1025 | + | UGACCAGGUUGGCCCCGUUC | 20 | 1411 |
| HSV1-UL19-1026 | + | CACGAGCGCCGUGACCAGGU | 20 | 1412 |
| HSV1-UL19-1027 | + | CCAUCACGAGCGCCGUGACC | 20 | 1413 |
| HSV1-UL19-1028 | + | CACGUCGUCCAGACUUCGCA | 20 | 1414 |
| HSV1-UL19-1029 | + | CCUGCAUCUCCAGCAGGUGG | 20 | 1415 |
| HSV1-UL19-1030 | + | CCUCCUGCAUCUCCAGCAGG | 20 | 1416 |
| HSV1-UL19-1031 | + | GCUCCUCCUGCAUCUCCAGC | 20 | 1417 |
| HSV1-UL19-1032 | + | CGUCCAGCGUCUGCCGGUUC | 20 | 1418 |
| HSV1-UL19-1033 | + | CGAGCUCGUCCAGCGUCUGC | 20 | 1419 |
| HSV1-UL19-1034 | + | GCGCACGCGCGUCGUCUGGG | 20 | 1420 |
| HSV1-UL19-1035 | + | CGCGCACGCGCGUCGUCUGG | 20 | 1421 |
| HSV1-UL19-1036 | + | GCGCGCACGCGCGUCGUCUG | 20 | 1422 |
| HSV1-UL19-1037 | + | CGCGCGCACGCGCGUCGUCU | 20 | 1423 |
| HSV1-UL19-1038 | + | CCGCGCGCACGCGCGUCGUC | 20 | 1424 |
| HSV1-UL19-1039 | + | AAAGACCAGCUUCUCGCCGA | 20 | 1425 |
| HSV1-UL19-1040 | + | GGCGUAGAUGCGCUUCUCCA | 20 | 1426 |
| HSV1-UL19-1041 | + | CGGCGUAGAUGCGCUUCUCC | 20 | 1427 |
| HSV1-UL19-1042 | + | GGGGUAGGGAACGUUGGUGG | 20 | 1428 |
| HSV1-UL19-1043 | + | CAGGGGGUAGGGAACGUUGG | 20 | 1429 |
| HSV1-UL19-1044 | + | CACCAGGGGGUAGGGAACGU | 20 | 1430 |
| HSV1-UL19-1045 | + | AUGGCGCCCACCAGGGGGUA | 20 | 1431 |
| HSV1-UL19-1046 | + | CAUGGCGCCCACCAGGGGGU | 20 | 1432 |
| HSV1-UL19-1047 | + | GGUCCAUGGCGCCCACCAGG | 20 | 1433 |
| HSV1-UL19-1048 | + | AGGUCCAUGGCGCCCACCAG | 20 | 1434 |
| HSV1-UL19-1049 | + | CAGGUCCAUGGCGCCCACCA | 20 | 1435 |
| HSV1-UL19-1050 | + | UCAGGUCCAUGGCGCCCACC | 20 | 1436 |
| HSV1-UL19-1051 | + | CAGGACGAACGUCAGGUCCA | 20 | 1437 |
| HSV1-UL19-1052 | + | CCAGGGGCAGGACGAACGUC | 20 | 1438 |
| HSV1-UL19-1053 | + | GAUUGAACAGGCCCAGGGGC | 20 | 1439 |
| HSV1-UL19-1054 | + | ACCGGAUUGAACAGGCCCAG | 20 | 1440 |
| HSV1-UL19-1055 | + | GACCGGAUUGAACAGGCCCA | 20 | 1441 |
| HSV1-UL19-1056 | + | UGACCGGAUUGAACAGGCCC | 20 | 1442 |
| HSV1-UL19-1057 | + | GUUCCAUGACCGGAUUGAAC | 20 | 1443 |
| HSV1-UL19-1058 | + | GCGGCAAACCGUUCCAUGAC | 20 | 1444 |
| HSV1-UL19-1059 | + | GACUAGGUCCCCGGCGUGCG | 20 | 1445 |
| HSV1-UL19-1060 | + | GGGGGCGGGGACUAGGUCCC | 20 | 1446 |
| HSV1-UL19-1061 | + | GGUGGCCGGGGGCGGGGACU | 20 | 1447 |
| HSV1-UL19-1062 | + | GAUCCGGGUGGCCGGGGGCG | 20 | 1448 |
| HSV1-UL19-1063 | + | GGAUCCGGGUGGCCGGGGGC | 20 | 1449 |
| HSV1-UL19-1064 | + | GGGAUCCGGGUGGCCGGGGG | 20 | 1450 |
| HSV1-UL19-1065 | + | GCGGGGAUCCGGGUGGCCGG | 20 | 1451 |
| HSV1-UL19-1066 | + | CGCGGGGAUCCGGGUGGCCG | 20 | 1452 |
| HSV1-UL19-1067 | + | GCGCGGGGAUCCGGGUGGCC | 20 | 1453 |
| HSV1-UL19-1068 | + | GGCGCGGGGAUCCGGGUGGC | 20 | 1454 |
| HSV1-UL19-1069 | + | GGAAGGCGCGGGGAUCCGGG | 20 | 1455 |
| HSV1-UL19-1070 | + | GCGGGAAGGCGCGGGGAUCC | 20 | 1456 |
| HSV1-UL19-1071 | + | GGCGGGAAGGCGCGGGGAUC | 20 | 1457 |
| HSV1-UL19-1072 | + | UGGCGGGGCGGGAAGGCGCG | 20 | 1458 |
| HSV1-UL19-1073 | + | CUGGCGGGGCGGGAAGGCGC | 20 | 1459 |
| HSV1-UL19-1074 | + | GCUGGCGGGGCGGGAAGGCG | 20 | 1460 |
| HSV1-UL19-1075 | + | AAACAGCUGGCGGGGCGGGA | 20 | 1461 |
| HSV1-UL19-1076 | + | AAAAAAACAGCUGGCGGGGC | 20 | 1462 |
| HSV1-UL19-1077 | + | CAAAAAAACAGCUGGCGGGG | 20 | 1463 |
| HSV1-UL19-1078 | + | CCCCAAAAAAACAGCUGGCG | 20 | 1464 |
| HSV1-UL19-1079 | + | CCCCCAAAAAAACAGCUGGC | 20 | 1465 |
| HSV1-UL19-1080 | + | UCCCCCAAAAAAACAGCUGG | 20 | 1466 |
| HSV1-UL19-1081 | + | CCUUCCCCCAAAAAAACAGC | 20 | 1467 |
| HSV1-UL19-1082 | + | GAGACAGGCGCAGCACCUGG | 20 | 1468 |
| HSV1-UL19-1083 | + | CCAGAGACAGGCGCAGCACC | 20 | 1469 |
| HSV1-UL19-1084 | + | CGAUCGCGUGUUCCAGAGAC | 20 | 1470 |
| HSV1-UL19-1085 | + | CAUCAGCGAAGGGUGGCACA | 20 | 1471 |
| HSV1-UL19-1086 | + | CAACGUUCAUCAGCGAAGGG | 20 | 1472 |
| HSV1-UL19-1087 | + | CGUCAACGUUCAUCAGCGAA | 20 | 1473 |
| HSV1-UL19-1088 | + | GCGUCAACGUUCAUCAGCGA | 20 | 1474 |
| HSV1-UL19-1089 | + | CUUCGACGGGGUCGCGGUUA | 20 | 1475 |
| HSV1-UL19-1090 | + | UGGCGGCUUCGACGGGGUCG | 20 | 1476 |
| HSV1-UL19-1091 | + | ACGGAUUGGCGGCUUCGACG | 20 | 1477 |
| HSV1-UL19-1092 | + | UACGGAUUGGCGGCUUCGAC | 20 | 1478 |
| HSV1-UL19-1093 | + | GUACGGAUUGGCGGCUUCGA | 20 | 1479 |
| HSV1-UL19-1094 | + | GUACGCCCCGUACGGAUUGG | 20 | 1480 |
| HSV1-UL19-1095 | + | CACGUACGCCCCGUACGGAU | 20 | 1481 |
| HSV1-UL19-1096 | + | GCCGCCACGUACGCCCCGUA | 20 | 1482 |
| HSV1-UL19-1097 | + | GUCUGCGGCGGGGCCGGCCG | 20 | 1483 |
| HSV1-UL19-1098 | + | UGUCUGCGGCGGGGCCGGCC | 20 | 1484 |
| HSV1-UL19-1099 | + | AUGUCUGCGGCGGGGCCGGC | 20 | 1485 |
| HSV1-UL19-1100 | + | CUGCAUGUCUGCGGCGGGGC | 20 | 1486 |
| HSV1-UL19-1101 | + | GCUGCUGCAUGUCUGCGGCG | 20 | 1487 |
| HSV1-UL19-1102 | + | AGCUGCUGCAUGUCUGCGGC | 20 | 1488 |
| HSV1-UL19-1103 | + | CAGCUGCUGCAUGUCUGCGG | 20 | 1489 |
| HSV1-UL19-1104 | + | AAACAGCUGCUGCAUGUCUG | 20 | 1490 |
| HSV1-UL19-1105 | + | GUGGGCCAGGCGCUGCCCCC | 20 | 1491 |
| HSV1-UL19-1106 | + | AUCGGACCCGCCCGUGGGCC | 20 | 1492 |
| HSV1-UL19-1107 | + | GACCCAUCGGACCCGCCCGU | 20 | 1493 |
| HSV1-UL19-1108 | + | CGACCCAUCGGACCCGCCCG | 20 | 1494 |
| HSV1-UL19-1109 | + | UCUGGCCUUCCGCGACCCAU | 20 | 1495 |
| HSV1-UL19-1110 | + | UAAACUGCUCCGGGGUCAUC | 20 | 1496 |
| HSV1-UL19-1111 | + | GGGCUGCAUAAACUGCUCCG | 20 | 1497 |
| HSV1-UL19-1112 | + | CGGGCUGCAUAAACUGCUCC | 20 | 1498 |
| HSV1-UL19-1113 | + | UCGGGCUGCAUAAACUGCUC | 20 | 1499 |
| HSV1-UL19-1114 | + | AGAGCCAGGUUGGCGUUGUC | 20 | 1500 |
| HSV1-UL19-1115 | + | AAGAGCCAGGUUGGCGUUGU | 20 | 1501 |
| HSV1-UL19-1116 | + | GUGCAGCUCAAGAGCCAGGU | 20 | 1502 |
| HSV1-UL19-1117 | + | CGGGGUGCAGCUCAAGAGCC | 20 | 1503 |
| HSV1-UL19-1118 | + | CCACAAAGAAGUCGAACGCG | 20 | 1504 |
| HSV1-UL19-1119 | + | CCCACAAAGAAGUCGAACGC | 20 | 1505 |
| HSV1-UL19-1120 | + | CCCCACAAAGAAGUCGAACG | 20 | 1506 |
| HSV1-UL19-1121 | + | CCCCCCCGGCAGCUCCACGU | 20 | 1507 |
| HSV1-UL19-1122 | + | GCCGGGGGAACGUCCCCCCC | 20 | 1508 |
| HSV1-UL19-1123 | + | AUCUCCCCCGGGCCGGCCGG | 20 | 1509 |
| HSV1-UL19-1124 | + | GAUCUCCCCCGGGCCGGCCG | 20 | 1510 |
| HSV1-UL19-1125 | + | GGAUCUCCCCCGGGCCGGCC | 20 | 1511 |
| HSV1-UL19-1126 | + | UGGAUCUCCCCCGGGCCGGC | 20 | 1512 |
| HSV1-UL19-1127 | + | GGCCUGGAUCUCCCCCGGGC | 20 | 1513 |
| HSV1-UL19-1128 | + | AGGUGGCCUGGAUCUCCCCC | 20 | 1514 |
| HSV1-UL19-1129 | + | CAGGUGGCCUGGAUCUCCCC | 20 | 1515 |
| HSV1-UL19-1130 | + | UCACCACGCGCCAGGUGGCC | 20 | 1516 |
| HSV1-UL19-1131 | + | GCCGUUCACCACGCGCCAGG | 20 | 1517 |
| HSV1-UL19-1132 | + | GUUGCCGUUCACCACGCGCC | 20 | 1518 |
| HSV1-UL19-1133 | + | GCCGCCGGACAUAGCGCCAG | 20 | 1519 |
| HSV1-UL19-1134 | + | CGCCGCCGGACAUAGCGCCA | 20 | 1520 |
| HSV1-UL19-1135 | + | ACGCCGCCGGACAUAGCGCC | 20 | 1521 |
| HSV1-UL19-1136 | + | CGGGCGUCCCGGAACGCCGC | 20 | 1522 |
| HSV1-UL19-1137 | + | GCUCCAGGCCCCGGGCGUCC | 20 | 1523 |
| HSV1-UL19-1138 | + | CACCCCCAGCUCCAGGCCCC | 20 | 1524 |
| HSV1-UL19-1139 | + | CCACCCCCAGCUCCAGGCCC | 20 | 1525 |
| HSV1-UL19-1140 | + | GGCGUCCCACCCCCAGCUCC | 20 | 1526 |
| HSV1-UL19-1141 | + | UGGUGGCGGGGGCCAUGGCG | 20 | 1527 |
| HSV1-UL19-1142 | + | GGCGAUGGUGGCGGGGGCCA | 20 | 1528 |
| HSV1-UL19-1143 | + | AACGGCGGCGAUGGUGGCGG | 20 | 1529 |
| HSV1-UL19-1144 | + | GAACGGCGGCGAUGGUGGCG | 20 | 1530 |
| HSV1-UL19-1145 | + | CGAACGGCGGCGAUGGUGGC | 20 | 1531 |
| HSV1-UL19-1146 | + | GCGAACGGCGGCGAUGGUGG | 20 | 1532 |
| HSV1-UL19-1147 | + | CCCGCGAACGGCGGCGAUGG | 20 | 1533 |
| HSV1-UL19-1148 | + | CGCCCCGCGAACGGCGGCGA | 20 | 1534 |
| HSV1-UL19-1149 | + | GUCGAACGCCCCGCGAACGG | 20 | 1535 |
| HSV1-UL19-1150 | + | GUCGUCGAACGCCCCGCGAA | 20 | 1536 |
| HSV1-UL19-1151 | + | AAAACACCGCCGGGUAGUUG | 20 | 1537 |
| HSV1-UL19-1152 | + | GCAGCAGGUAAAACACCGCC | 20 | 1538 |
| HSV1-UL19-1153 | + | UGCAGCAGGUAAAACACCGC | 20 | 1539 |
| HSV1-UL19-1154 | + | CGUGUAUGGCGGCCUGCAGC | 20 | 1540 |
| HSV1-UL19-1155 | + | GUGCUCGCUGCCGUGUAUGG | 20 | 1541 |
| HSV1-UL19-1156 | + | GACGUGCUCGCUGCCGUGUA | 20 | 1542 |
| HSV1-UL19-1157 | + | CUGGACCACGAGCCGGGCCA | 20 | 1543 |
| HSV1-UL19-1158 | + | ACUGGACCACGAGCCGGGCC | 20 | 1544 |
| HSV1-UL19-1159 | + | GAUGCACUGGACCACGAGCC | 20 | 1545 |
| HSV1-UL19-1160 | + | UGAUGCACUGGACCACGAGC | 20 | 1546 |
| HSV1-UL19-1161 | + | UCCAGUAGCUGGUGAUGCAC | 20 | 1547 |
| HSV1-UL19-1162 | + | CCGCGUGUUGUUCCAGUAGC | 20 | 1548 |
| HSV1-UL19-1163 | + | GGGAAGGUCUCCCCCGAGGU | 20 | 1549 |
| HSV1-UL19-1164 | + | CCUCGGGAAGGUCUCCCCCG | 20 | 1550 |
| HSV1-UL19-1165 | + | CGGCCAUGCACUCCUCGGGA | 20 | 1551 |
| HSV1-UL19-1166 | + | UACACGGCCAUGCACUCCUC | 20 | 1552 |
| HSV1-UL19-1167 | + | GUACACGGCCAUGCACUCCU | 20 | 1553 |
| HSV1-UL19-1168 | + | CGCCACCAGGUCCCGGUACA | 20 | 1554 |
| HSV1-UL19-1169 | + | CGACGUGCGCCACCAGGUCC | 20 | 1555 |
| HSV1-UL19-1170 | + | GGGCCUCGACGUGCGCCACC | 20 | 1556 |
| HSV1-UL19-1171 | + | GUCAUCAACCAGCUGGGCCA | 20 | 1557 |
| HSV1-UL19-1172 | + | AGUCAUCAACCAGCUGGGCC | 20 | 1558 |
| HSV1-UL19-1173 | + | GGUAAAGUCAUCAACCAGCU | 20 | 1559 |
| HSV1-UL19-1174 | + | GGGUAAAGUCAUCAACCAGC | 20 | 1560 |
| HSV1-UL19-1175 | + | GCCCAGCUCCGGGCCGGUCA | 20 | 1561 |
| HSV1-UL19-1176 | + | CGCCCAGCUCCGGGCCGGUC | 20 | 1562 |
| HSV1-UL19-1177 | + | CUGCCCGCCCAGCUCCGGGC | 20 | 1563 |
| HSV1-UL19-1178 | + | GCGCCUGCCCGCCCAGCUCC | 20 | 1564 |
| HSV1-UL19-1179 | + | UGCGCCUGCCCGCCCAGCUC | 20 | 1565 |
| HSV1-UL19-1180 | + | UCGCAUUAGGUGAUUCAGCU | 20 | 1566 |
| HSV1-UL19-1181 | + | GCAGCGCCGGGUCUCGCAUU | 20 | 1567 |
| HSV1-UL19-1182 | + | CGAGGGGUGGCAGCAGCGCC | 20 | 1568 |
| HSV1-UL19-1183 | + | ACGAGGGGUGGCAGCAGCGC | 20 | 1569 |
| HSV1-UL19-1184 | + | UCACAGUCCCACACGAGGGG | 20 | 1570 |
| HSV1-UL19-1185 | + | GCGUCACAGUCCCACACGAG | 20 | 1571 |
| HSV1-UL19-1186 | + | GGCGUCACAGUCCCACACGA | 20 | 1572 |
| HSV1-UL19-1187 | + | GGGCGUCACAGUCCCACACG | 20 | 1573 |
| HSV1-UL19-1188 | + | CAGGGCCGCGCGCCGCAUCA | 20 | 1574 |
| HSV1-UL19-1189 | + | CCAGGGCCGCGCGCCGCAUC | 20 | 1575 |
| HSV1-UL19-1190 | + | GCAGUCGCGAUGGCGGUCCA | 20 | 1576 |
| HSV1-UL19-1191 | + | GGCAGUCGCGAUGGCGGUCC | 20 | 1577 |
| HSV1-UL19-1192 | + | UAACCCGGCAGUCGCGAUGG | 20 | 1578 |
| HSV1-UL19-1193 | + | CGCUAACCCGGCAGUCGCGA | 20 | 1579 |
| HSV1-UL19-1194 | + | CGUGGCCCCCCGCGCUAACC | 20 | 1580 |
| HSV1-UL19-1195 | + | CCGCCGCGUACACGGGGUCG | 20 | 1581 |
| HSV1-UL19-1196 | + | UACAUGCCGCCGCGUACACG | 20 | 1582 |
| HSV1-UL19-1197 | + | UUACAUGCCGCCGCGUACAC | 20 | 1583 |
| HSV1-UL19-1198 | + | GUUACAUGCCGCCGCGUACA | 20 | 1584 |
| HSV1-UL19-1199 | + | GUCGUUGCGGUUGAAGUCCG | 20 | 1585 |
| HSV1-UL19-1200 | + | GCAGCAGCUGGCCGUCGUUG | 20 | 1586 |
| HSV1-UL19-1201 | + | CCUGGGUGUUGUGCAGCAGC | 20 | 1587 |
| HSV1-UL19-1202 | + | GGCGUCCGCGGCUCGGGCCU | 20 | 1588 |
| HSV1-UL19-1203 | + | CGGCGUCCGCGGCUCGGGCC | 20 | 1589 |
| HSV1-UL19-1204 | + | AUCCGCGGCGUCCGCGGCUC | 20 | 1590 |
| HSV1-UL19-1205 | + | CAUCCGCGGCGUCCGCGGCU | 20 | 1591 |
| HSV1-UL19-1206 | + | CCGGUCAUCCGCGGCGUCCG | 20 | 1592 |
| HSV1-UL19-1207 | + | CCGGUGCGGCCGGUCAUCCG | 20 | 1593 |
| HSV1-UL19-1208 | + | AGUCCGCCCCCCGGUGCGGC | 20 | 1594 |
| HSV1-UL19-1209 | + | GUCCAGUCCGCCCCCCGGUG | 20 | 1595 |
| HSV1-UL19-1210 | + | GCACGGUCCAGUCCGCCCCC | 20 | 1596 |
| HSV1-UL19-1211 | + | GUAGUAAAUCUUGUGGUGCA | 20 | 1597 |
| HSV1-UL19-1212 | + | UCACGUAGUAGUAAAUCUUG | 20 | 1598 |
| HSV1-UL19-1213 | + | CAGCGGCCCCGCGAGAAGGC | 20 | 1599 |
| HSV1-UL19-1214 | + | GCAGCGGCCCCGCGAGAAGG | 20 | 1600 |
| HSV1-UL19-1215 | + | GCAGCAGCGGCCCCGCGAGA | 20 | 1601 |
| HSV1-UL19-1216 | + | GAACCCCCGCGGUGCAGCAG | 20 | 1602 |
| HSV1-UL19-1217 | + | GCGGUCGAAGCGAACCCCCG | 20 | 1603 |
| HSV1-UL19-1218 | + | UCUGCAGGGUGGCGUAUACG | 20 | 1604 |
| HSV1-UL19-1219 | + | GACCACCAUGUUCUGCAGGG | 20 | 1605 |
| HSV1-UL19-1220 | + | CGGGACCACCAUGUUCUGCA | 20 | 1606 |
| HSV1-UL19-1221 | + | CCGGGACCACCAUGUUCUGC | 20 | 1607 |
| HSV1-UL19-1222 | + | CCUCGCCGGGGGCGAUCUCC | 20 | 1608 |
| HSV1-UL19-1223 | + | UCCUCGCCGGGGGCGAUCUC | 20 | 1609 |
| HSV1-UL19-1224 | + | GCUGGGGCACUCCUCGCCGG | 20 | 1610 |
| HSV1-UL19-1225 | + | CGCUGGGGCACUCCUCGCCG | 20 | 1611 |
| HSV1-UL19-1226 | + | UCGCUGGGGCACUCCUCGCC | 20 | 1612 |
| HSV1-UL19-1227 | + | GUCGCUGGGGCACUCCUCGC | 20 | 1613 |
| HSV1-UL19-1228 | + | GGUCCGUCACGGGGUCGCUG | 20 | 1614 |
| HSV1-UL19-1229 | + | GGGUCCGUCACGGGGUCGCU | 20 | 1615 |
| HSV1-UL19-1230 | + | GGGGUCCGUCACGGGGUCGC | 20 | 1616 |
| HSV1-UL19-1231 | + | GGUGCGCGGGGUCCGUCACG | 20 | 1617 |
| HSV1-UL19-1232 | + | GGGUGCGCGGGGUCCGUCAC | 20 | 1618 |
| HSV1-UL19-1233 | + | GGGGUGCGCGGGGUCCGUCA | 20 | 1619 |
| HSV1-UL19-1234 | + | CCGGGUGCAGGGGGUGCGCG | 20 | 1620 |
| HSV1-UL19-1235 | + | GCCGGGUGCAGGGGGUGCGC | 20 | 1621 |
| HSV1-UL19-1236 | + | GGCCGGGUGCAGGGGGUGCG | 20 | 1622 |
| HSV1-UL19-1237 | + | CCAGAUUGGCCGGGUGCAGG | 20 | 1623 |
| HSV1-UL19-1238 | + | ACCAGAUUGGCCGGGUGCAG | 20 | 1624 |
| HSV1-UL19-1239 | + | CACCAGAUUGGCCGGGUGCA | 20 | 1625 |
| HSV1-UL19-1240 | + | CCACCAGAUUGGCCGGGUGC | 20 | 1626 |
| HSV1-UL19-1241 | + | UGUUGGCCACCAGAUUGGCC | 20 | 1627 |
| HSV1-UL19-1242 | + | GUGUUGGCCACCAGAUUGGC | 20 | 1628 |
| HSV1-UL19-1243 | + | GACCGUGUUGGCCACCAGAU | 20 | 1629 |
| HSV1-UL19-1244 | + | AAACAUGGCGUUGACCGUGU | 20 | 1630 |
| HSV1-UL19-1245 | + | CACGCGCCCGUUGUGAAACA | 20 | 1631 |
| HSV1-UL19-1246 | + | ACCUGCAGCGUGAGCAUGGC | 20 | 1632 |
| HSV1-UL19-1247 | + | CACCUGCAGCGUGAGCAUGG | 20 | 1633 |
| HSV1-UL19-1248 | + | CAGCACCUGCAGCGUGAGCA | 20 | 1634 |
| HSV1-UL19-1249 | + | UGUGCGUUCGGCCAUGUUGU | 20 | 1635 |
| HSV1-UL19-1250 | + | UUGUGCGUUCGGCCAUGUUG | 20 | 1636 |
| HSV1-UL19-1251 | + | GAGCAGCGCCGUUGUGCGUU | 20 | 1637 |
| HSV1-UL19-1252 | + | GCGGUGUUGGCGCCCGCGUC | 20 | 1638 |
| HSV1-UL19-1253 | + | CGCGGUGUUGGCGCCCGCGU | 20 | 1639 |
| HSV1-UL19-1254 | + | GUUGGUGGUGGACGCGGUGU | 20 | 1640 |
| HSV1-UL19-1255 | + | GCGCAUGUUGGUGGUGGACG | 20 | 1641 |
| HSV1-UL19-1256 | + | GAAUAUGCGCAUGUUGGUGG | 20 | 1642 |
| HSV1-UL19-1257 | + | GUCGAAUAUGCGCAUGUUGG | 20 | 1643 |
| HSV1-UL19-1258 | + | CCCGUCGAAUAUGCGCAUGU | 20 | 1644 |
| HSV1-UL19-1259 | + | GGGGGCCAUCAGCAGGAUUC | 20 | 1645 |
| HSV1-UL19-1260 | + | GAUGCUGGGGGGCCAUCAGC | 20 | 1646 |
| HSV1-UL19-1261 | + | GGUAUGGUCCAGAUGCUGGG | 20 | 1647 |
| HSV1-UL19-1262 | + | UGGUAUGGUCCAGAUGCUGG | 20 | 1648 |
| HSV1-UL19-1263 | + | AUGGUAUGGUCCAGAUGCUG | 20 | 1649 |
| HSV1-UL19-1264 | + | GAUGGUAUGGUCCAGAUGCU | 20 | 1650 |
| HSV1-UL19-1265 | + | GGAUGGUAUGGUCCAGAUGC | 20 | 1651 |
| HSV1-UL19-1266 | + | AGUCGCCAUUUUGGAUGGUA | 20 | 1652 |
| HSV1-UL19-1267 | + | AAAAUAGUCGCCAUUUUGGA | 20 | 1653 |
| HSV1-UL19-1268 | + | GGUAAAAAUAGUCGCCAUUU | 20 | 1654 |
| HSV1-UL19-1269 | + | ACAGCGCGUGGACGGGGAGG | 20 | 1655 |
| HSV1-UL19-1270 | + | AACAGCGCGUGGACGGGGAG | 20 | 1656 |
| HSV1-UL19-1271 | + | GAACAGCGCGUGGACGGGGA | 20 | 1657 |
| HSV1-UL19-1272 | + | CGAACAGCGCGUGGACGGGG | 20 | 1658 |
| HSV1-UL19-1273 | + | CGGCGAACAGCGCGUGGACG | 20 | 1659 |
| HSV1-UL19-1274 | + | CCGGCGAACAGCGCGUGGAC | 20 | 1660 |
| HSV1-UL19-1275 | + | CCCGGCGAACAGCGCGUGGA | 20 | 1661 |
| HSV1-UL19-1276 | + | CGGCCCCGGCGAACAGCGCG | 20 | 1662 |
| HSV1-UL19-1277 | + | GUUCGCCACGUGGUCGGCCC | 20 | 1663 |
| HSV1-UL19-1278 | + | GGGCGCGUUCGCCACGUGGU | 20 | 1664 |
| HSV1-UL19-1279 | + | AAUUGGGCGCGUUCGCCACG | 20 | 1665 |
| HSV1-UL19-1280 | + | CGCAGGGCCGGGGGGAAAUU | 20 | 1666 |
| HSV1-UL19-1281 | + | GCGCAGGGCCGGGGGGAAAU | 20 | 1667 |
| HSV1-UL19-1282 | + | ACAGGUCGCGCAGGGCCGGG | 20 | 1668 |
| HSV1-UL19-1283 | + | GACAGGUCGCGCAGGGCCGG | 20 | 1669 |
| HSV1-UL19-1284 | + | CGACAGGUCGCGCAGGGCCG | 20 | 1670 |
| HSV1-UL19-1285 | + | GCGACAGGUCGCGCAGGGCC | 20 | 1671 |
| HSV1-UL19-1286 | + | CGCGACAGGUCGCGCAGGGC | 20 | 1672 |
| HSV1-UL19-1287 | + | CUGCCGCGACAGGUCGCGCA | 20 | 1673 |
| HSV1-UL19-1288 | + | CCUGCCGCGACAGGUCGCGC | 20 | 1674 |
| HSV1-UL19-1289 | + | CCAGGGGGACCUGCCGCGAC | 20 | 1675 |
| HSV1-UL19-1290 | + | CCAGAGCCGGGGGGACCAGG | 20 | 1676 |
| HSV1-UL19-1291 | + | CCCAGAGCCGGGGGGACCAG | 20 | 1677 |
| HSV1-UL19-1292 | + | CCCCAGAGCCGGGGGGACCA | 20 | 1678 |
| HSV1-UL19-1293 | + | CCCCCAGAGCCGGGGGGACC | 20 | 1679 |
| HSV1-UL19-1294 | + | AGUUGGCCCCCAGAGCCGGG | 20 | 1680 |
| HSV1-UL19-1295 | + | UAGUUGGCCCCCAGAGCCGG | 20 | 1681 |
| HSV1-UL19-1296 | + | GUAGUUGGCCCCCAGAGCCG | 20 | 1682 |
| HSV1-UL19-1297 | + | AGUAGUUGGCCCCCAGAGCC | 20 | 1683 |
| HSV1-UL19-1298 | + | AAGUAGUUGGCCCCCAGAGC | 20 | 1684 |
| HSV1-UL19-1299 | + | UCGGAUCGACGAAAAGUAGU | 20 | 1685 |
| HSV1-UL19-1300 | + | CGUGCUGCACGACGGGCUGU | 20 | 1686 |
| HSV1-UL19-1301 | + | UCGCGGACGUGCUGCACGAC | 20 | 1687 |
| HSV1-UL19-1302 | + | CUCGCGGACGUGCUGCACGA | 20 | 1688 |
| HSV1-UL19-1303 | + | UCUCCCCGGCCGCGCUCUCG | 20 | 1689 |
| HSV1-UL19-1304 | + | GUAGGUCAGCGCGUUCUCCC | 20 | 1690 |
| HSV1-UL19-1305 | + | GUACCCCGCCAUGAGCGCGU | 20 | 1691 |
| HSV1-UL19-1306 | + | AGCUGAUGAUGCAAGGCCAC | 20 | 1692 |
| HSV1-UL19-1307 | + | GAGCUGAUGAUGCAAGGCCA | 20 | 1693 |
| HSV1-UL19-1308 | + | CGUCUUGAGCUGAUGAUGCA | 20 | 1694 |
| HSV1-UL19-1309 | + | UGAACCCAAACCCGGGAUGG | 20 | 1695 |
| HSV1-UL19-1310 | + | CGGUGAACCCAAACCCGGGA | 20 | 1696 |
| HSV1-UL19-1311 | + | ACGACGGUGAACCCAAACCC | 20 | 1697 |
| HSV1-UL19-1312 | + | GACGACGGUGAACCCAAACC | 20 | 1698 |
| HSV1-UL19-1313 | + | AAAGCGGUCCUGUCGGACGA | 20 | 1699 |
| HSV1-UL19-1314 | + | CAGUCACAAAGCGGUCCUGU | 20 | 1700 |
| HSV1-UL19-1315 | + | GCACGUUCUCAGUCACAAAG | 20 | 1701 |
| HSV1-UL19-1316 | + | GGGCCACCUGGAGCUGGCCC | 20 | 1702 |
| HSV1-UL19-1317 | + | CGUGCCGGGCCACCUGGAGC | 20 | 1703 |
| HSV1-UL19-1318 | + | CAGUUUCGUGCCGGGCCACC | 20 | 1704 |
| HSV1-UL19-1319 | + | CCCCCCGCCAGUUUCGUGCC | 20 | 1705 |
| HSV1-UL19-1320 | + | CCCCCCCGCCAGUUUCGUGC | 20 | 1706 |
| HSV1-UL19-1321 | + | GUCCACGUUCGCGCGCGGCU | 20 | 1707 |
| HSV1-UL19-1322 | + | GGUCCACGUUCGCGCGCGGC | 20 | 1708 |
| HSV1-UL19-1323 | + | CCCAGGUCCACGUUCGCGCG | 20 | 1709 |
| HSV1-UL19-1324 | + | CGGCGGUGUAGCCCACGCCC | 20 | 1710 |
| HSV1-UL19-1325 | + | GGUUGCCGUGGCCACGACGG | 20 | 1711 |
| HSV1-UL19-1326 | + | GACGGUUGCCGUGGCCACGA | 20 | 1712 |
| HSV1-UL19-1327 | + | GGGGUUGCGGACGGUUGCCG | 20 | 1713 |
| HSV1-UL19-1328 | + | GUCGGUGACGGGGUUGCGGA | 20 | 1714 |
| HSV1-UL19-1329 | + | CCAUGUCGGUGACGGGGUUG | 20 | 1715 |
| HSV1-UL19-1330 | + | GGUUGCCCAUGUCGGUGACG | 20 | 1716 |
| HSV1-UL19-1331 | + | AGGUUGCCCAUGUCGGUGAC | 20 | 1717 |
| HSV1-UL19-1332 | + | AAGGUUGCCCAUGUCGGUGA | 20 | 1718 |
| HSV1-UL19-1333 | + | UUGGGGAAGGUUGCCCAUGU | 20 | 1719 |
| HSV1-UL19-1334 | + | CCAGGUAAAAGUUUUGGGGA | 20 | 1720 |
| HSV1-UL19-1335 | + | CGGCCCAGGUAAAAGUUUUG | 20 | 1721 |
| HSV1-UL19-1336 | + | GCGGCCCAGGUAAAAGUUUU | 20 | 1722 |
| HSV1-UL19-1337 | + | CGCGGCCCAGGUAAAAGUUU | 20 | 1723 |
| HSV1-UL19-1338 | + | GAGGGGGAGCCCCGCGGCCC | 20 | 1724 |
| HSV1-UL19-1339 | + | CCAGGAGAGGGGGAGCCCCG | 20 | 1725 |
| HSV1-UL19-1340 | + | GCCGCGUUGUCCAGGAGAGG | 20 | 1726 |
| HSV1-UL19-1341 | + | UGCCGCGUUGUCCAGGAGAG | 20 | 1727 |
| HSV1-UL19-1342 | + | CUGCCGCGUUGUCCAGGAGA | 20 | 1728 |
| HSV1-UL19-1343 | + | GCUGCCGCGUUGUCCAGGAG | 20 | 1729 |
| HSV1-UL19-1344 | + | ACACGGCUGCCGCGUUGUCC | 20 | 1730 |
| HSV1-UL19-1345 | + | GACCGCGUUCCGCAGGUACA | 20 | 1731 |
| HSV1-UL19-1346 | + | CCGCCACGACCGCGUUCCGC | 20 | 1732 |
| HSV1-UL19-1347 | + | CGGGCUGGGCCGGCCCCAGG | 20 | 1733 |
| HSV1-UL19-1348 | + | GGACGGGCUGGGCCGGCCCC | 20 | 1734 |
| HSV1-UL19-1349 | + | AACACGGGGACGGGCUGGGC | 20 | 1735 |
| HSV1-UL19-1350 | + | CCCGAACACGGGGACGGGCU | 20 | 1736 |
| HSV1-UL19-1351 | + | ACCCGAACACGGGGACGGGC | 20 | 1737 |
| HSV1-UL19-1352 | + | GCGCACCCGAACACGGGGAC | 20 | 1738 |
| HSV1-UL19-1353 | + | GGCGCACCCGAACACGGGGA | 20 | 1739 |
| HSV1-UL19-1354 | + | CCUGGGCGCACCCGAACACG | 20 | 1740 |
| HSV1-UL19-1355 | + | ACCUGGGCGCACCCGAACAC | 20 | 1741 |
| HSV1-UL19-1356 | + | CACCUGGGCGCACCCGAACA | 20 | 1742 |
| HSV1-UL19-1357 | + | CCCUGCGCGCCGCGGCACCU | 20 | 1743 |
| HSV1-UL19-1358 | + | UCCCUGCGCGCCGCGGCACC | 20 | 1744 |
| HSV1-UL19-1359 | + | UGGUCCAUCCCUGCGCGCCG | 20 | 1745 |
| HSV1-UL19-1360 | + | CACACACGGCGUCCUGGCCG | 20 | 1746 |
| HSV1-UL19-1361 | + | UAAACUCACACACGGCGUCC | 20 | 1747 |
| HSV1-UL19-1362 | + | GGUGGCGAUAAACUCACACA | 20 | 1748 |
| HSV1-UL19-1363 | + | GACGUCGGUCGACACGGGGG | 20 | 1749 |
| HSV1-UL19-1364 | + | GUUGACGUCGGUCGACACGG | 20 | 1750 |
| HSV1-UL19-1365 | + | AGUUGACGUCGGUCGACACG | 20 | 1751 |
| HSV1-UL19-1366 | + | UAGUUGACGUCGGUCGACAC | 20 | 1752 |
| HSV1-UL19-1367 | + | GUAGUUGACGUCGGUCGACA | 20 | 1753 |
| HSV1-UL19-1368 | + | CCGGCGGAAGUAGUUGACGU | 20 | 1754 |
| HSV1-UL19-1369 | + | CCCGGGGGUUGCAGGGCCGG | 20 | 1755 |
| HSV1-UL19-1370 | + | GUCCCCGGGGGUUGCAGGGC | 20 | 1756 |
| HSV1-UL19-1371 | + | GCGCGUCCCCGGGGGUUGCA | 20 | 1757 |
| HSV1-UL19-1372 | + | GGCGCGUCCCCGGGGGUUGC | 20 | 1758 |
| HSV1-UL19-1373 | + | CCCCGGCGGCGCGUCCCCGG | 20 | 1759 |
| HSV1-UL19-1374 | + | CCCCCGGCGGCGCGUCCCCG | 20 | 1760 |
| HSV1-UL19-1375 | + | GCCCCCGGCGGCGCGUCCCC | 20 | 1761 |
| HSV1-UL19-1376 | + | CGCCCCCGGCGGCGCGUCCC | 20 | 1762 |
| HSV1-UL19-1377 | + | CCCCGCGUAAACGCCCCCGG | 20 | 1763 |
| HSV1-UL19-1378 | + | GUCCCCCGCGUAAACGCCCC | 20 | 1764 |
| HSV1-UL19-1379 | + | GCCGUGGUCGUACAUGAGGG | 20 | 1765 |
| HSV1-UL19-1380 | + | CUGGCCGUGGUCGUACAUGA | 20 | 1766 |
| HSV1-UL19-1381 | + | UCUGGCCGUGGUCGUACAUG | 20 | 1767 |
| HSV1-UL19-1382 | + | GGGACGGGUCGCUCUGGCCG | 20 | 1768 |
| HSV1-UL19-1383 | + | AGGCCCGGGACGGGUCGCUC | 20 | 1769 |
| HSV1-UL19-1384 | + | UGGCCGCGAAGGCCCGGGAC | 20 | 1770 |
| HSV1-UL19-1385 | + | GUGGCCGCGAAGGCCCGGGA | 20 | 1771 |
| HSV1-UL19-1386 | + | GGCCGUGGCCGCGAAGGCCC | 20 | 1772 |
| HSV1-UL19-1387 | + | UGGCCGUGGCCGCGAAGGCC | 20 | 1773 |
| HSV1-UL19-1388 | + | CGGGUUGGCCGUGGCCGCGA | 20 | 1774 |
| HSV1-UL19-1389 | + | CGACGCCCACGGGUUGGCCG | 20 | 1775 |
| HSV1-UL19-1390 | + | UCGCUGCGACGCCCACGGGU | 20 | 1776 |
| HSV1-UL19-1391 | + | AAAAUCGCUGCGACGCCCAC | 20 | 1777 |
| HSV1-UL19-1392 | + | GAAAAUCGCUGCGACGCCCA | 20 | 1778 |
| HSV1-UL19-1393 | + | GGUAGGCCCCGUUAUAGAGC | 20 | 1779 |
| HSV1-UL19-1394 | + | CGAGGCCCCGUUGAGGUGGU | 20 | 1780 |
| HSV1-UL19-1395 | + | CCGGCGAGGCCCCGUUGAGG | 20 | 1781 |
| HSV1-UL19-1396 | + | GCACCGGCGAGGCCCCGUUG | 20 | 1782 |
| HSV1-UL19-1397 | + | GCAGGGGCUGAGCACCGGCG | 20 | 1783 |
| HSV1-UL19-1398 | + | UUAAAGCAGGGGCUGAGCAC | 20 | 1784 |
| HSV1-UL19-1399 | + | ACGUAAAGAACUUAAAGCAG | 20 | 1785 |
| HSV1-UL19-1400 | + | GACGUAAAGAACUUAAAGCA | 20 | 1786 |
| HSV1-UL19-1401 | + | CGACGUAAAGAACUUAAAGC | 20 | 1787 |
| HSV1-UL19-1402 | + | GCGAUGUUUGGCGGCGAUGU | 20 | 1788 |
| HSV1-UL19-1403 | + | CUCCAGGCAGCGAUGUUUGG | 20 | 1789 |
| HSV1-UL19-1404 | + | GCGCUCCAGGCAGCGAUGUU | 20 | 1790 |
| HSV1-UL19-1405 | + | UCUCCACGAUCAGGCGCUCC | 20 | 1791 |
| HSV1-UL19-1406 | + | CCGAACCCGUCUCCACGAUC | 20 | 1792 |
| HSV1-UL19-1407 | + | GUCGCUGGCGGCGGUGGCCG | 20 | 1793 |
| HSV1-UL19-1408 | + | CUGUACGUCGCUGGCGGCGG | 20 | 1794 |
| HSV1-UL19-1409 | + | AAACUGUACGUCGCUGGCGG | 20 | 1795 |
| HSV1-UL19-1410 | + | CUUAAACUGUACGUCGCUGG | 20 | 1796 |
| HSV1-UL19-1411 | + | GCGCUUAAACUGUACGUCGC | 20 | 1797 |
| HSV1-UL19-1412 | + | CGAGUUCGCGGCACCCCGGG | 20 | 1798 |
| HSV1-UL19-1413 | + | ACGAGUUCGCGGCACCCCGG | 20 | 1799 |
| HSV1-UL19-1414 | + | CACGAGUUCGCGGCACCCCG | 20 | 1800 |
| HSV1-UL19-1415 | + | CCACGAGUUCGCGGCACCCC | 20 | 1801 |
| HSV1-UL19-1416 | + | UCCACGAGUUCGCGGCACCC | 20 | 1802 |
| HSV1-UL19-1417 | + | ACGGGUCCUCCACGAGUUCG | 20 | 1803 |
| HSV1-UL19-1418 | + | CCUCCUGAAACAGGCCACAC | 20 | 1804 |
| HSV1-UL19-1419 | + | GCCUCCUGAAACAGGCCACA | 20 | 1805 |
| HSV1-UL19-1420 | + | GCGGGUAGGCCUCCUGAAAC | 20 | 1806 |
| HSV1-UL19-1421 | + | GCUGGCGCAGGUGAGCGGGU | 20 | 1807 |
| HSV1-UL19-1422 | + | GGUCGCUGGCGCAGGUGAGC | 20 | 1808 |
| HSV1-UL19-1423 | + | GGGUCGCUGGCGCAGGUGAG | 20 | 1809 |
| HSV1-UL19-1424 | + | GAGGGCGGGGUCGCUGGCGC | 20 | 1810 |
| HSV1-UL19-1425 | + | GCGGAGGAGGGCGGGGUCGC | 20 | 1811 |
| HSV1-UL19-1426 | + | GGGCACUGCGGAGGAGGGCG | 20 | 1812 |
| HSV1-UL19-1427 | + | CGGGCACUGCGGAGGAGGGC | 20 | 1813 |
| HSV1-UL19-1428 | + | GCGGGCACUGCGGAGGAGGG | 20 | 1814 |
| HSV1-UL19-1429 | + | GUUGCGGGCACUGCGGAGGA | 20 | 1815 |
| HSV1-UL19-1430 | + | CGUUGCGGGCACUGCGGAGG | 20 | 1816 |
| HSV1-UL19-1431 | + | CCCCGUUGCGGGCACUGCGG | 20 | 1817 |
| HSV1-UL19-1432 | + | CUUCCCCGUUGCGGGCACUG | 20 | 1818 |
| HSV1-UL19-1433 | + | CGCGUGGGCUUCCCCGUUGC | 20 | 1819 |
| HSV1-UL19-1434 | + | GCGCGUGGGCUUCCCCGUUG | 20 | 1820 |
| HSV1-UL19-1435 | + | GAAGUGGGUCUCCCGCGCGU | 20 | 1821 |
| HSV1-UL19-1436 | + | CGAAGUGGGUCUCCCGCGCG | 20 | 1822 |
| HSV1-UL19-1437 | + | GACGAGAUACUGCGCGAAGU | 20 | 1823 |
| HSV1-UL19-1438 | + | AGACGAGAUACUGCGCGAAG | 20 | 1824 |
| HSV1-UL19-1439 | + | CAGAGCCAGUCCCUUGAGCG | 20 | 1825 |
| HSV1-UL19-1440 | + | ACAGAGCCAGUCCCUUGAGC | 20 | 1826 |
| HSV1-UL19-1441 | + | UACAGAGCCAGUCCCUUGAG | 20 | 1827 |
| HSV1-UL19-1442 | + | ACGCCCCGAGGACGGCC | 17 | 1828 |
| HSV1-UL19-1443 | + | CUCAAACGCCCCGAGGA | 17 | 1829 |
| HSV1-UL19-1444 | + | CGCGCUCAAACGCCCCG | 17 | 1830 |
| HSV1-UL19-1445 | + | CACGUGCAGCAUCUGGU | 17 | 1831 |
| HSV1-UL19-1446 | + | GCAGCACGUGCAGCAUC | 17 | 1832 |
| HSV1-UL19-1447 | + | AACAACAAAGCCAGGGG | 17 | 1833 |
| HSV1-UL19-1448 | + | GGCAACAACAAAGCCAG | 17 | 1834 |
| HSV1-UL19-1449 | + | CGGCAACAACAAAGCCA | 17 | 1835 |
| HSV1-UL19-1450 | + | UCGGCAACAACAAAGCC | 17 | 1836 |
| HSV1-UL19-1451 | + | UCCAGGUAUCGUUGCAU | 17 | 1837 |
| HSV1-UL19-1452 | + | CCAGGCGGCCGUUGUCC | 17 | 1838 |
| HSV1-UL19-1453 | + | CCACCCUGGUGGCCAGG | 17 | 1839 |
| HSV1-UL19-1454 | + | GGGCCACCCUGGUGGCC | 17 | 1840 |
| HSV1-UL19-1455 | + | CGCCCGGGCCACCCUGG | 17 | 1841 |
| HSV1-UL19-1456 | + | GGUCGCCCGGGCCACCC | 17 | 1842 |
| HSV1-UL19-1457 | + | GGCGACCAGGGUCGCCC | 17 | 1843 |
| HSV1-UL19-1458 | + | CGGCGACCAGGGUCGCC | 17 | 1844 |
| HSV1-UL19-1459 | + | CUUUAGCUCGGCGACCA | 17 | 1845 |
| HSV1-UL19-1460 | + | GCUUUAGCUCGGCGACC | 17 | 1846 |
| HSV1-UL19-1461 | + | GAAGCUUCGCUUUAGCU | 17 | 1847 |
| HSV1-UL19-1462 | + | GGUGGCCCGCCUUGCCC | 17 | 1848 |
| HSV1-UL19-1463 | + | CGACGGCCUCCCGGCGG | 17 | 1849 |
| HSV1-UL19-1464 | + | CCUCGACGGCCUCCCGG | 17 | 1850 |
| HSV1-UL19-1465 | + | AGGCCUCGACGGCCUCC | 17 | 1851 |
| HSV1-UL19-1466 | + | CACGAGCCAGGCCUCGA | 17 | 1852 |
| HSV1-UL19-1467 | + | GGUGAGGUCCACGAGCC | 17 | 1853 |
| HSV1-UL19-1468 | + | GCUGCGUGGCCGUGGUG | 17 | 1854 |
| HSV1-UL19-1469 | + | GGAGGGCUGCGUGGCCG | 17 | 1855 |
| HSV1-UL19-1470 | + | GGCCACGGAGGGCUGCG | 17 | 1856 |
| HSV1-UL19-1471 | + | CGGGGCACGGCCACGGA | 17 | 1857 |
| HSV1-UL19-1472 | + | ACGGGGCACGGCCACGG | 17 | 1858 |
| HSV1-UL19-1473 | + | CAGACGGGGCACGGCCA | 17 | 1859 |
| HSV1-UL19-1474 | + | AUGCGUCAGACGGGGCA | 17 | 1860 |
| HSV1-UL19-1475 | + | UCGGCAUGCGUCAGACG | 17 | 1861 |
| HSV1-UL19-1476 | + | GUCGGCAUGCGUCAGAC | 17 | 1862 |
| HSV1-UL19-1477 | + | UGUCGGCAUGCGUCAGA | 17 | 1863 |
| HSV1-UL19-1478 | + | CGGCCGCCCGCGCGUGU | 17 | 1864 |
| HSV1-UL19-1479 | + | ACGAGCACCCCGUCGAC | 17 | 1865 |
| HSV1-UL19-1480 | + | CUGUUUGAUCGGGGCGG | 17 | 1866 |
| HSV1-UL19-1481 | + | GCGCUGUUUGAUCGGGG | 17 | 1867 |
| HSV1-UL19-1482 | + | GAGGCGCUGUUUGAUCG | 17 | 1868 |
| HSV1-UL19-1483 | + | GGAGGCGCUGUUUGAUC | 17 | 1869 |
| HSV1-UL19-1484 | + | AGGAGGCGCUGUUUGAU | 17 | 1870 |
| HSV1-UL19-1485 | + | UCAGGAAGGACUGCAGG | 17 | 1871 |
| HSV1-UL19-1486 | + | CUUUCAGGAAGGACUGC | 17 | 1872 |
| HSV1-UL19-1487 | + | GUCCUCCACUUUCAGGA | 17 | 1873 |
| HSV1-UL19-1488 | + | CGGUGUCCUCCACUUUC | 17 | 1874 |
| HSV1-UL19-1489 | + | CACCGGCACGUCGGCUU | 17 | 1875 |
| HSV1-UL19-1490 | + | GUACGUCACCGGCACGU | 17 | 1876 |
| HSV1-UL19-1491 | + | AUCUCGCCGUACGUCAC | 17 | 1877 |
| HSV1-UL19-1492 | + | CCAGGUUGGCCCCGUUC | 17 | 1878 |
| HSV1-UL19-1493 | + | GAGCGCCGUGACCAGGU | 17 | 1879 |
| HSV1-UL19-1494 | + | UCACGAGCGCCGUGACC | 17 | 1880 |
| HSV1-UL19-1495 | + | GUCGUCCAGACUUCGCA | 17 | 1881 |
| HSV1-UL19-1496 | + | GCAUCUCCAGCAGGUGG | 17 | 1882 |
| HSV1-UL19-1497 | + | CCUGCAUCUCCAGCAGG | 17 | 1883 |
| HSV1-UL19-1498 | + | CCUCCUGCAUCUCCAGC | 17 | 1884 |
| HSV1-UL19-1499 | + | CCAGCGUCUGCCGGUUC | 17 | 1885 |
| HSV1-UL19-1500 | + | GCUCGUCCAGCGUCUGC | 17 | 1886 |
| HSV1-UL19-1501 | + | CACGCGCGUCGUCUGGG | 17 | 1887 |
| HSV1-UL19-1502 | + | GCACGCGCGUCGUCUGG | 17 | 1888 |
| HSV1-UL19-1503 | + | CGCACGCGCGUCGUCUG | 17 | 1889 |
| HSV1-UL19-1504 | + | GCGCACGCGCGUCGUCU | 17 | 1890 |
| HSV1-UL19-1505 | + | CGCGCACGCGCGUCGUC | 17 | 1891 |
| HSV1-UL19-1506 | + | GACCAGCUUCUCGCCGA | 17 | 1892 |
| HSV1-UL19-1507 | + | GUAGAUGCGCUUCUCCA | 17 | 1893 |
| HSV1-UL19-1508 | + | CGUAGAUGCGCUUCUCC | 17 | 1894 |
| HSV1-UL19-1509 | + | GUAGGGAACGUUGGUGG | 17 | 1895 |
| HSV1-UL19-1510 | + | GGGGUAGGGAACGUUGG | 17 | 1896 |
| HSV1-UL19-1511 | + | CAGGGGGUAGGGAACGU | 17 | 1897 |
| HSV1-UL19-1512 | + | GCGCCCACCAGGGGGUA | 17 | 1898 |
| HSV1-UL19-1513 | + | GGCGCCCACCAGGGGGU | 17 | 1899 |
| HSV1-UL19-1514 | + | CCAUGGCGCCCACCAGG | 17 | 1900 |
| HSV1-UL19-1515 | + | UCCAUGGCGCCCACCAG | 17 | 1901 |
| HSV1-UL19-1516 | + | GUCCAUGGCGCCCACCA | 17 | 1902 |
| HSV1-UL19-1517 | + | GGUCCAUGGCGCCCACC | 17 | 1903 |
| HSV1-UL19-1518 | + | GACGAACGUCAGGUCCA | 17 | 1904 |
| HSV1-UL19-1519 | + | GGGGCAGGACGAACGUC | 17 | 1905 |
| HSV1-UL19-1520 | + | UGAACAGGCCCAGGGGC | 17 | 1906 |
| HSV1-UL19-1521 | + | GGAUUGAACAGGCCCAG | 17 | 1907 |
| HSV1-UL19-1522 | + | CGGAUUGAACAGGCCCA | 17 | 1908 |
| HSV1-UL19-1523 | + | CCGGAUUGAACAGGCCC | 17 | 1909 |
| HSV1-UL19-1524 | + | CCAUGACCGGAUUGAAC | 17 | 1910 |
| HSV1-UL19-1525 | + | GCAAACCGUUCCAUGAC | 17 | 1911 |
| HSV1-UL19-1526 | + | UAGGUCCCCGGCGUGCG | 17 | 1912 |
| HSV1-UL19-1527 | + | GGCGGGGACUAGGUCCC | 17 | 1913 |
| HSV1-UL19-1528 | + | GGCCGGGGGCGGGGACU | 17 | 1914 |
| HSV1-UL19-1529 | + | CCGGGUGGCCGGGGGCG | 17 | 1915 |
| HSV1-UL19-1530 | + | UCCGGGUGGCCGGGGGC | 17 | 1916 |
| HSV1-UL19-1531 | + | AUCCGGGUGGCCGGGGG | 17 | 1917 |
| HSV1-UL19-1532 | + | GGGAUCCGGGUGGCCGG | 17 | 1918 |
| HSV1-UL19-1533 | + | GGGGAUCCGGGUGGCCG | 17 | 1919 |
| HSV1-UL19-1534 | + | CGGGGAUCCGGGUGGCC | 17 | 1920 |
| HSV1-UL19-1535 | + | GCGGGGAUCCGGGUGGC | 17 | 1921 |
| HSV1-UL19-1536 | + | AGGCGCGGGGAUCCGGG | 17 | 1922 |
| HSV1-UL19-1537 | + | GGAAGGCGCGGGGAUCC | 17 | 1923 |
| HSV1-UL19-1538 | + | GGGAAGGCGCGGGGAUC | 17 | 1924 |
| HSV1-UL19-1539 | + | CGGGGCGGGAAGGCGCG | 17 | 1925 |
| HSV1-UL19-1540 | + | GCGGGGCGGGAAGGCGC | 17 | 1926 |
| HSV1-UL19-1541 | + | GGCGGGGCGGGAAGGCG | 17 | 1927 |
| HSV1-UL19-1542 | + | CAGCUGGCGGGGCGGGA | 17 | 1928 |
| HSV1-UL19-1543 | + | AAAACAGCUGGCGGGGC | 17 | 1929 |
| HSV1-UL19-1544 | + | AAAAACAGCUGGCGGGG | 17 | 1930 |
| HSV1-UL19-1545 | + | CAAAAAAACAGCUGGCG | 17 | 1931 |
| HSV1-UL19-1546 | + | CCAAAAAAACAGCUGGC | 17 | 1932 |
| HSV1-UL19-1547 | + | CCCAAAAAAACAGCUGG | 17 | 1933 |
| HSV1-UL19-1548 | + | UCCCCCAAAAAAACAGC | 17 | 1934 |
| HSV1-UL19-1549 | + | ACAGGCGCAGCACCUGG | 17 | 1935 |
| HSV1-UL19-1550 | + | GAGACAGGCGCAGCACC | 17 | 1936 |
| HSV1-UL19-1551 | + | UCGCGUGUUCCAGAGAC | 17 | 1937 |
| HSV1-UL19-1552 | + | CAGCGAAGGGUGGCACA | 17 | 1938 |
| HSV1-UL19-1553 | + | CGUUCAUCAGCGAAGGG | 17 | 1939 |
| HSV1-UL19-1554 | + | CAACGUUCAUCAGCGAA | 17 | 1940 |
| HSV1-UL19-1555 | + | UCAACGUUCAUCAGCGA | 17 | 1941 |
| HSV1-UL19-1556 | + | CGACGGGGUCGCGGUUA | 17 | 1942 |
| HSV1-UL19-1557 | + | CGGCUUCGACGGGGUCG | 17 | 1943 |
| HSV1-UL19-1558 | + | GAUUGGCGGCUUCGACG | 17 | 1944 |
| HSV1-UL19-1559 | + | GGAUUGGCGGCUUCGAC | 17 | 1945 |
| HSV1-UL19-1560 | + | CGGAUUGGCGGCUUCGA | 17 | 1946 |
| HSV1-UL19-1561 | + | CGCCCCGUACGGAUUGG | 17 | 1947 |
| HSV1-UL19-1562 | + | GUACGCCCCGUACGGAU | 17 | 1948 |
| HSV1-UL19-1563 | + | GCCACGUACGCCCCGUA | 17 | 1949 |
| HSV1-UL19-1564 | + | UGCGGCGGGGCCGGCCG | 17 | 1950 |
| HSV1-UL19-1565 | + | CUGCGGCGGGGCCGGCC | 17 | 1951 |
| HSV1-UL19-1566 | + | UCUGCGGCGGGGCCGGC | 17 | 1952 |
| HSV1-UL19-1567 | + | CAUGUCUGCGGCGGGGC | 17 | 1953 |
| HSV1-UL19-1568 | + | GCUGCAUGUCUGCGGCG | 17 | 1954 |
| HSV1-UL19-1569 | + | UGCUGCAUGUCUGCGGC | 17 | 1955 |
| HSV1-UL19-1570 | + | CUGCUGCAUGUCUGCGG | 17 | 1956 |
| HSV1-UL19-1571 | + | CAGCUGCUGCAUGUCUG | 17 | 1957 |
| HSV1-UL19-1572 | + | GGCCAGGCGCUGCCCCC | 17 | 1958 |
| HSV1-UL19-1573 | + | GGACCCGCCCGUGGGCC | 17 | 1959 |
| HSV1-UL19-1574 | + | CCAUCGGACCCGCCCGU | 17 | 1960 |
| HSV1-UL19-1575 | + | CCCAUCGGACCCGCCCG | 17 | 1961 |
| HSV1-UL19-1576 | + | GGCCUUCCGCGACCCAU | 17 | 1962 |
| HSV1-UL19-1577 | + | ACUGCUCCGGGGUCAUC | 17 | 1963 |
| HSV1-UL19-1578 | + | CUGCAUAAACUGCUCCG | 17 | 1964 |
| HSV1-UL19-1579 | + | GCUGCAUAAACUGCUCC | 17 | 1965 |
| HSV1-UL19-1580 | + | GGCUGCAUAAACUGCUC | 17 | 1966 |
| HSV1-UL19-1581 | + | GCCAGGUUGGCGUUGUC | 17 | 1967 |
| HSV1-UL19-1582 | + | AGCCAGGUUGGCGUUGU | 17 | 1968 |
| HSV1-UL19-1583 | + | CAGCUCAAGAGCCAGGU | 17 | 1969 |
| HSV1-UL19-1584 | + | GGUGCAGCUCAAGAGCC | 17 | 1970 |
| HSV1-UL19-1585 | + | CAAAGAAGUCGAACGCG | 17 | 1971 |
| HSV1-UL19-1586 | + | ACAAAGAAGUCGAACGC | 17 | 1972 |
| HSV1-UL19-1587 | + | CACAAAGAAGUCGAACG | 17 | 1973 |
| HSV1-UL19-1588 | + | CCCCGGCAGCUCCACGU | 17 | 1974 |
| HSV1-UL19-1589 | + | GGGGGAACGUCCCCCCC | 17 | 1975 |
| HSV1-UL19-1590 | + | UCCCCCGGGCCGGCCGG | 17 | 1976 |
| HSV1-UL19-1591 | + | CUCCCCCGGGCCGGCCG | 17 | 1977 |
| HSV1-UL19-1592 | + | UCUCCCCCGGGCCGGCC | 17 | 1978 |
| HSV1-UL19-1593 | + | AUCUCCCCCGGGCCGGC | 17 | 1979 |
| HSV1-UL19-1594 | + | CUGGAUCUCCCCCGGGC | 17 | 1980 |
| HSV1-UL19-1595 | + | UGGCCUGGAUCUCCCCC | 17 | 1981 |
| HSV1-UL19-1596 | + | GUGGCCUGGAUCUCCCC | 17 | 1982 |
| HSV1-UL19-1597 | + | CCACGCGCCAGGUGGCC | 17 | 1983 |
| HSV1-UL19-1598 | + | GUUCACCACGCGCCAGG | 17 | 1984 |
| HSV1-UL19-1599 | + | GCCGUUCACCACGCGCC | 17 | 1985 |
| HSV1-UL19-1600 | + | GCCGGACAUAGCGCCAG | 17 | 1986 |
| HSV1-UL19-1601 | + | CGCCGGACAUAGCGCCA | 17 | 1987 |
| HSV1-UL19-1602 | + | CCGCCGGACAUAGCGCC | 17 | 1988 |
| HSV1-UL19-1603 | + | GCGUCCCGGAACGCCGC | 17 | 1989 |
| HSV1-UL19-1604 | + | CCAGGCCCCGGGCGUCC | 17 | 1990 |
| HSV1-UL19-1605 | + | CCCCAGCUCCAGGCCCC | 17 | 1991 |
| HSV1-UL19-1606 | + | CCCCCAGCUCCAGGCCC | 17 | 1992 |
| HSV1-UL19-1607 | + | GUCCCACCCCCAGCUCC | 17 | 1993 |
| HSV1-UL19-1608 | + | UGGCGGGGGCCAUGGCG | 17 | 1994 |
| HSV1-UL19-1609 | + | GAUGGUGGCGGGGGCCA | 17 | 1995 |
| HSV1-UL19-1610 | + | GGCGGCGAUGGUGGCGG | 17 | 1996 |
| HSV1-UL19-1611 | + | CGGCGGCGAUGGUGGCG | 17 | 1997 |
| HSV1-UL19-1612 | + | ACGGCGGCGAUGGUGGC | 17 | 1998 |
| HSV1-UL19-1613 | + | AACGGCGGCGAUGGUGG | 17 | 1999 |
| HSV1-UL19-1614 | + | GCGAACGGCGGCGAUGG | 17 | 2000 |
| HSV1-UL19-1615 | + | CCCGCGAACGGCGGCGA | 17 | 2001 |
| HSV1-UL19-1616 | + | GAACGCCCCGCGAACGG | 17 | 2002 |
| HSV1-UL19-1617 | + | GUCGAACGCCCCGCGAA | 17 | 2003 |
| HSV1-UL19-1618 | + | ACACCGCCGGGUAGUUG | 17 | 2004 |
| HSV1-UL19-1619 | + | GCAGGUAAAACACCGCC | 17 | 2005 |
| HSV1-UL19-1620 | + | AGCAGGUAAAACACCGC | 17 | 2006 |
| HSV1-UL19-1621 | + | GUAUGGCGGCCUGCAGC | 17 | 2007 |
| HSV1-UL19-1622 | + | CUCGCUGCCGUGUAUGG | 17 | 2008 |
| HSV1-UL19-1623 | + | GUGCUCGCUGCCGUGUA | 17 | 2009 |
| HSV1-UL19-1624 | + | GACCACGAGCCGGGCCA | 17 | 2010 |
| HSV1-UL19-1625 | + | GGACCACGAGCCGGGCC | 17 | 2011 |
| HSV1-UL19-1626 | + | GCACUGGACCACGAGCC | 17 | 2012 |
| HSV1-UL19-1627 | + | UGCACUGGACCACGAGC | 17 | 2013 |
| HSV1-UL19-1628 | + | AGUAGCUGGUGAUGCAC | 17 | 2014 |
| HSV1-UL19-1629 | + | CGUGUUGUUCCAGUAGC | 17 | 2015 |
| HSV1-UL19-1630 | + | AAGGUCUCCCCCGAGGU | 17 | 2016 |
| HSV1-UL19-1631 | + | CGGGAAGGUCUCCCCCG | 17 | 2017 |
| HSV1-UL19-1632 | + | CCAUGCACUCCUCGGGA | 17 | 2018 |
| HSV1-UL19-1633 | + | ACGGCCAUGCACUCCUC | 17 | 2019 |
| HSV1-UL19-1634 | + | CACGGCCAUGCACUCCU | 17 | 2020 |
| HSV1-UL19-1635 | + | CACCAGGUCCCGGUACA | 17 | 2021 |
| HSV1-UL19-1636 | + | CGUGCGCCACCAGGUCC | 17 | 2022 |
| HSV1-UL19-1637 | + | CCUCGACGUGCGCCACC | 17 | 2023 |
| HSV1-UL19-1638 | + | AUCAACCAGCUGGGCCA | 17 | 2024 |
| HSV1-UL19-1639 | + | CAUCAACCAGCUGGGCC | 17 | 2025 |
| HSV1-UL19-1640 | + | AAAGUCAUCAACCAGCU | 17 | 2026 |
| HSV1-UL19-1641 | + | UAAAGUCAUCAACCAGC | 17 | 2027 |
| HSV1-UL19-1642 | + | CAGCUCCGGGCCGGUCA | 17 | 2028 |
| HSV1-UL19-1643 | + | CCAGCUCCGGGCCGGUC | 17 | 2029 |
| HSV1-UL19-1644 | + | CCCGCCCAGCUCCGGGC | 17 | 2030 |
| HSV1-UL19-1645 | + | CCUGCCCGCCCAGCUCC | 17 | 2031 |
| HSV1-UL19-1646 | + | GCCUGCCCGCCCAGCUC | 17 | 2032 |
| HSV1-UL19-1647 | + | CAUUAGGUGAUUCAGCU | 17 | 2033 |
| HSV1-UL19-1648 | + | GCGCCGGGUCUCGCAUU | 17 | 2034 |
| HSV1-UL19-1649 | + | GGGGUGGCAGCAGCGCC | 17 | 2035 |
| HSV1-UL19-1650 | + | AGGGGUGGCAGCAGCGC | 17 | 2036 |
| HSV1-UL19-1651 | + | CAGUCCCACACGAGGGG | 17 | 2037 |
| HSV1-UL19-1652 | + | UCACAGUCCCACACGAG | 17 | 2038 |
| HSV1-UL19-1653 | + | GUCACAGUCCCACACGA | 17 | 2039 |
| HSV1-UL19-1654 | + | CGUCACAGUCCCACACG | 17 | 2040 |
| HSV1-UL19-1655 | + | GGCCGCGCGCCGCAUCA | 17 | 2041 |
| HSV1-UL19-1656 | + | GGGCCGCGCGCCGCAUC | 17 | 2042 |
| HSV1-UL19-1657 | + | GUCGCGAUGGCGGUCCA | 17 | 2043 |
| HSV1-UL19-1658 | + | AGUCGCGAUGGCGGUCC | 17 | 2044 |
| HSV1-UL19-1659 | + | CCCGGCAGUCGCGAUGG | 17 | 2045 |
| HSV1-UL19-1660 | + | UAACCCGGCAGUCGCGA | 17 | 2046 |
| HSV1-UL19-1661 | + | GGCCCCCCGCGCUAACC | 17 | 2047 |
| HSV1-UL19-1662 | + | CCGCGUACACGGGGUCG | 17 | 2048 |
| HSV1-UL19-1663 | + | AUGCCGCCGCGUACACG | 17 | 2049 |
| HSV1-UL19-1664 | + | CAUGCCGCCGCGUACAC | 17 | 2050 |
| HSV1-UL19-1665 | + | ACAUGCCGCCGCGUACA | 17 | 2051 |
| HSV1-UL19-1666 | + | GUUGCGGUUGAAGUCCG | 17 | 2052 |
| HSV1-UL19-1667 | + | GCAGCUGGCCGUCGUUG | 17 | 2053 |
| HSV1-UL19-1668 | + | GGGUGUUGUGCAGCAGC | 17 | 2054 |
| HSV1-UL19-1669 | + | GUCCGCGGCUCGGGCCU | 17 | 2055 |
| HSV1-UL19-1670 | + | CGUCCGCGGCUCGGGCC | 17 | 2056 |
| HSV1-UL19-1671 | + | CGCGGCGUCCGCGGCUC | 17 | 2057 |
| HSV1-UL19-1672 | + | CCGCGGCGUCCGCGGCU | 17 | 2058 |
| HSV1-UL19-1673 | + | GUCAUCCGCGGCGUCCG | 17 | 2059 |
| HSV1-UL19-1674 | + | GUGCGGCCGGUCAUCCG | 17 | 2060 |
| HSV1-UL19-1675 | + | CCGCCCCCCGGUGCGGC | 17 | 2061 |
| HSV1-UL19-1676 | + | CAGUCCGCCCCCCGGUG | 17 | 2062 |
| HSV1-UL19-1677 | + | CGGUCCAGUCCGCCCCC | 17 | 2063 |
| HSV1-UL19-1678 | + | GUAAAUCUUGUGGUGCA | 17 | 2064 |
| HSV1-UL19-1679 | + | CGUAGUAGUAAAUCUUG | 17 | 2065 |
| HSV1-UL19-1680 | + | CGGCCCCGCGAGAAGGC | 17 | 2066 |
| HSV1-UL19-1681 | + | GCGGCCCCGCGAGAAGG | 17 | 2067 |
| HSV1-UL19-1682 | + | GCAGCGGCCCCGCGAGA | 17 | 2068 |
| HSV1-UL19-1683 | + | CCCCCGCGGUGCAGCAG | 17 | 2069 |
| HSV1-UL19-1684 | + | GUCGAAGCGAACCCCCG | 17 | 2070 |
| HSV1-UL19-1685 | + | GCAGGGUGGCGUAUACG | 17 | 2071 |
| HSV1-UL19-1686 | + | CACCAUGUUCUGCAGGG | 17 | 2072 |
| HSV1-UL19-1687 | + | GACCACCAUGUUCUGCA | 17 | 2073 |
| HSV1-UL19-1688 | + | GGACCACCAUGUUCUGC | 17 | 2074 |
| HSV1-UL19-1689 | + | CGCCGGGGGCGAUCUCC | 17 | 2075 |
| HSV1-UL19-1690 | + | UCGCCGGGGGCGAUCUC | 17 | 2076 |
| HSV1-UL19-1691 | + | GGGGCACUCCUCGCCGG | 17 | 2077 |
| HSV1-UL19-1692 | + | UGGGGCACUCCUCGCCG | 17 | 2078 |
| HSV1-UL19-1693 | + | CUGGGGCACUCCUCGCC | 17 | 2079 |
| HSV1-UL19-1694 | + | GCUGGGGCACUCCUCGC | 17 | 2080 |
| HSV1-UL19-1695 | + | CCGUCACGGGGUCGCUG | 17 | 2081 |
| HSV1-UL19-1696 | + | UCCGUCACGGGGUCGCU | 17 | 2082 |
| HSV1-UL19-1697 | + | GUCCGUCACGGGGUCGC | 17 | 2083 |
| HSV1-UL19-1698 | + | GCGCGGGGUCCGUCACG | 17 | 2084 |
| HSV1-UL19-1699 | + | UGCGCGGGGUCCGUCAC | 17 | 2085 |
| HSV1-UL19-1700 | + | GUGCGCGGGGUCCGUCA | 17 | 2086 |
| HSV1-UL19-1701 | + | GGUGCAGGGGGUGCGCG | 17 | 2087 |
| HSV1-UL19-1702 | + | GGGUGCAGGGGGUGCGC | 17 | 2088 |
| HSV1-UL19-1703 | + | CGGGUGCAGGGGGUGCG | 17 | 2089 |
| HSV1-UL19-1704 | + | GAUUGGCCGGGUGCAGG | 17 | 2090 |
| HSV1-UL19-1705 | + | AGAUUGGCCGGGUGCAG | 17 | 2091 |
| HSV1-UL19-1706 | + | CAGAUUGGCCGGGUGCA | 17 | 2092 |
| HSV1-UL19-1707 | + | CCAGAUUGGCCGGGUGC | 17 | 2093 |
| HSV1-UL19-1708 | + | UGGCCACCAGAUUGGCC | 17 | 2094 |
| HSV1-UL19-1709 | + | UUGGCCACCAGAUUGGC | 17 | 2095 |
| HSV1-UL19-1710 | + | CGUGUUGGCCACCAGAU | 17 | 2096 |
| HSV1-UL19-1711 | + | CAUGGCGUUGACCGUGU | 17 | 2097 |
| HSV1-UL19-1712 | + | GCGCCCGUUGUGAAACA | 17 | 2098 |
| HSV1-UL19-1713 | + | UGCAGCGUGAGCAUGGC | 17 | 2099 |
| HSV1-UL19-1714 | + | CUGCAGCGUGAGCAUGG | 17 | 2100 |
| HSV1-UL19-1715 | + | CACCUGCAGCGUGAGCA | 17 | 2101 |
| HSV1-UL19-1716 | + | GCGUUCGGCCAUGUUGU | 17 | 2102 |
| HSV1-UL19-1717 | + | UGCGUUCGGCCAUGUUG | 17 | 2103 |
| HSV1-UL19-1718 | + | CAGCGCCGUUGUGCGUU | 17 | 2104 |
| HSV1-UL19-1719 | + | GUGUUGGCGCCCGCGUC | 17 | 2105 |
| HSV1-UL19-1720 | + | GGUGUUGGCGCCCGCGU | 17 | 2106 |
| HSV1-UL19-1721 | + | GGUGGUGGACGCGGUGU | 17 | 2107 |
| HSV1-UL19-1722 | + | CAUGUUGGUGGUGGACG | 17 | 2108 |
| HSV1-UL19-1723 | + | UAUGCGCAUGUUGGUGG | 17 | 2109 |
| HSV1-UL19-1724 | + | GAAUAUGCGCAUGUUGG | 17 | 2110 |
| HSV1-UL19-1725 | + | GUCGAAUAUGCGCAUGU | 17 | 2111 |
| HSV1-UL19-1726 | + | GGCCAUCAGCAGGAUUC | 17 | 2112 |
| HSV1-UL19-1727 | + | GCUGGGGGGCCAUCAGC | 17 | 2113 |
| HSV1-UL19-1728 | + | AUGGUCCAGAUGCUGGG | 17 | 2114 |
| HSV1-UL19-1729 | + | UAUGGUCCAGAUGCUGG | 17 | 2115 |
| HSV1-UL19-1730 | + | GUAUGGUCCAGAUGCUG | 17 | 2116 |
| HSV1-UL19-1731 | + | GGUAUGGUCCAGAUGCU | 17 | 2117 |
| HSV1-UL19-1732 | + | UGGUAUGGUCCAGAUGC | 17 | 2118 |
| HSV1-UL19-1733 | + | CGCCAUUUUGGAUGGUA | 17 | 2119 |
| HSV1-UL19-1734 | + | AUAGUCGCCAUUUUGGA | 17 | 2120 |
| HSV1-UL19-1735 | + | AAAAAUAGUCGCCAUUU | 17 | 2121 |
| HSV1-UL19-1736 | + | GCGCGUGGACGGGGAGG | 17 | 2122 |
| HSV1-UL19-1737 | + | AGCGCGUGGACGGGGAG | 17 | 2123 |
| HSV1-UL19-1738 | + | CAGCGCGUGGACGGGGA | 17 | 2124 |
| HSV1-UL19-1739 | + | ACAGCGCGUGGACGGGG | 17 | 2125 |
| HSV1-UL19-1740 | + | CGAACAGCGCGUGGACG | 17 | 2126 |
| HSV1-UL19-1741 | + | GCGAACAGCGCGUGGAC | 17 | 2127 |
| HSV1-UL19-1742 | + | GGCGAACAGCGCGUGGA | 17 | 2128 |
| HSV1-UL19-1743 | + | CCCCGGCGAACAGCGCG | 17 | 2129 |
| HSV1-UL19-1744 | + | CGCCACGUGGUCGGCCC | 17 | 2130 |
| HSV1-UL19-1745 | + | CGCGUUCGCCACGUGGU | 17 | 2131 |
| HSV1-UL19-1746 | + | UGGGCGCGUUCGCCACG | 17 | 2132 |
| HSV1-UL19-1747 | + | AGGGCCGGGGGGAAAUU | 17 | 2133 |
| HSV1-UL19-1748 | + | CAGGGCCGGGGGGAAAU | 17 | 2134 |
| HSV1-UL19-1749 | + | GGUCGCGCAGGGCCGGG | 17 | 2135 |
| HSV1-UL19-1750 | + | AGGUCGCGCAGGGCCGG | 17 | 2136 |
| HSV1-UL19-1751 | + | CAGGUCGCGCAGGGCCG | 17 | 2137 |
| HSV1-UL19-1752 | + | ACAGGUCGCGCAGGGCC | 17 | 2138 |
| HSV1-UL19-1753 | + | GACAGGUCGCGCAGGGC | 17 | 2139 |
| HSV1-UL19-1754 | + | CCGCGACAGGUCGCGCA | 17 | 2140 |
| HSV1-UL19-1755 | + | GCCGCGACAGGUCGCGC | 17 | 2141 |
| HSV1-UL19-1756 | + | GGGGGACCUGCCGCGAC | 17 | 2142 |
| HSV1-UL19-1757 | + | GAGCCGGGGGGACCAGG | 17 | 2143 |
| HSV1-UL19-1758 | + | AGAGCCGGGGGGACCAG | 17 | 2144 |
| HSV1-UL19-1759 | + | CAGAGCCGGGGGGACCA | 17 | 2145 |
| HSV1-UL19-1760 | + | CCAGAGCCGGGGGGACC | 17 | 2146 |
| HSV1-UL19-1761 | + | UGGCCCCCAGAGCCGGG | 17 | 2147 |
| HSV1-UL19-1762 | + | UUGGCCCCCAGAGCCGG | 17 | 2148 |
| HSV1-UL19-1763 | + | GUUGGCCCCCAGAGCCG | 17 | 2149 |
| HSV1-UL19-1764 | + | AGUUGGCCCCCAGAGCC | 17 | 2150 |
| HSV1-UL19-1765 | + | UAGUUGGCCCCCAGAGC | 17 | 2151 |
| HSV1-UL19-1766 | + | GAUCGACGAAAAGUAGU | 17 | 2152 |
| HSV1-UL19-1767 | + | GCUGCACGACGGGCUGU | 17 | 2153 |
| HSV1-UL19-1768 | + | CGGACGUGCUGCACGAC | 17 | 2154 |
| HSV1-UL19-1769 | + | GCGGACGUGCUGCACGA | 17 | 2155 |
| HSV1-UL19-1770 | + | CCCCGGCCGCGCUCUCG | 17 | 2156 |
| HSV1-UL19-1771 | + | GGUCAGCGCGUUCUCCC | 17 | 2157 |
| HSV1-UL19-1772 | + | CCCCGCCAUGAGCGCGU | 17 | 2158 |
| HSV1-UL19-1773 | + | UGAUGAUGCAAGGCCAC | 17 | 2159 |
| HSV1-UL19-1774 | + | CUGAUGAUGCAAGGCCA | 17 | 2160 |
| HSV1-UL19-1775 | + | CUUGAGCUGAUGAUGCA | 17 | 2161 |
| HSV1-UL19-1776 | + | ACCCAAACCCGGGAUGG | 17 | 2162 |
| HSV1-UL19-1777 | + | UGAACCCAAACCCGGGA | 17 | 2163 |
| HSV1-UL19-1778 | + | ACGGUGAACCCAAACCC | 17 | 2164 |
| HSV1-UL19-1779 | + | GACGGUGAACCCAAACC | 17 | 2165 |
| HSV1-UL19-1780 | + | GCGGUCCUGUCGGACGA | 17 | 2166 |
| HSV1-UL19-1781 | + | UCACAAAGCGGUCCUGU | 17 | 2167 |
| HSV1-UL19-1782 | + | CGUUCUCAGUCACAAAG | 17 | 2168 |
| HSV1-UL19-1783 | + | CCACCUGGAGCUGGCCC | 17 | 2169 |
| HSV1-UL19-1784 | + | GCCGGGCCACCUGGAGC | 17 | 2170 |
| HSV1-UL19-1785 | + | UUUCGUGCCGGGCCACC | 17 | 2171 |
| HSV1-UL19-1786 | + | CCCGCCAGUUUCGUGCC | 17 | 2172 |
| HSV1-UL19-1787 | + | CCCCGCCAGUUUCGUGC | 17 | 2173 |
| HSV1-UL19-1788 | + | CACGUUCGCGCGCGGCU | 17 | 2174 |
| HSV1-UL19-1789 | + | CCACGUUCGCGCGCGGC | 17 | 2175 |
| HSV1-UL19-1790 | + | AGGUCCACGUUCGCGCG | 17 | 2176 |
| HSV1-UL19-1791 | + | CGGUGUAGCCCACGCCC | 17 | 2177 |
| HSV1-UL19-1792 | + | UGCCGUGGCCACGACGG | 17 | 2178 |
| HSV1-UL19-1793 | + | GGUUGCCGUGGCCACGA | 17 | 2179 |
| HSV1-UL19-1794 | + | GUUGCGGACGGUUGCCG | 17 | 2180 |
| HSV1-UL19-1795 | + | GGUGACGGGGUUGCGGA | 17 | 2181 |
| HSV1-UL19-1796 | + | UGUCGGUGACGGGGUUG | 17 | 2182 |
| HSV1-UL19-1797 | + | UGCCCAUGUCGGUGACG | 17 | 2183 |
| HSV1-UL19-1798 | + | UUGCCCAUGUCGGUGAC | 17 | 2184 |
| HSV1-UL19-1799 | + | GUUGCCCAUGUCGGUGA | 17 | 2185 |
| HSV1-UL19-1800 | + | GGGAAGGUUGCCCAUGU | 17 | 2186 |
| HSV1-UL19-1801 | + | GGUAAAAGUUUUGGGGA | 17 | 2187 |
| HSV1-UL19-1802 | + | CCCAGGUAAAAGUUUUG | 17 | 2188 |
| HSV1-UL19-1803 | + | GCCCAGGUAAAAGUUUU | 17 | 2189 |
| HSV1-UL19-1804 | + | GGCCCAGGUAAAAGUUU | 17 | 2190 |
| HSV1-UL19-1805 | + | GGGGAGCCCCGCGGCCC | 17 | 2191 |
| HSV1-UL19-1806 | + | GGAGAGGGGGAGCCCCG | 17 | 2192 |
| HSV1-UL19-1807 | + | GCGUUGUCCAGGAGAGG | 17 | 2193 |
| HSV1-UL19-1808 | + | CGCGUUGUCCAGGAGAG | 17 | 2194 |
| HSV1-UL19-1809 | + | CCGCGUUGUCCAGGAGA | 17 | 2195 |
| HSV1-UL19-1810 | + | GCCGCGUUGUCCAGGAG | 17 | 2196 |
| HSV1-UL19-1811 | + | CGGCUGCCGCGUUGUCC | 17 | 2197 |
| HSV1-UL19-1812 | + | CGCGUUCCGCAGGUACA | 17 | 2198 |
| HSV1-UL19-1813 | + | CCACGACCGCGUUCCGC | 17 | 2199 |
| HSV1-UL19-1814 | + | GCUGGGCCGGCCCCAGG | 17 | 2200 |
| HSV1-UL19-1815 | + | CGGGCUGGGCCGGCCCC | 17 | 2201 |
| HSV1-UL19-1816 | + | ACGGGGACGGGCUGGGC | 17 | 2202 |
| HSV1-UL19-1817 | + | GAACACGGGGACGGGCU | 17 | 2203 |
| HSV1-UL19-1818 | + | CGAACACGGGGACGGGC | 17 | 2204 |
| HSV1-UL19-1819 | + | CACCCGAACACGGGGAC | 17 | 2205 |
| HSV1-UL19-1820 | + | GCACCCGAACACGGGGA | 17 | 2206 |
| HSV1-UL19-1821 | + | GGGCGCACCCGAACACG | 17 | 2207 |
| HSV1-UL19-1822 | + | UGGGCGCACCCGAACAC | 17 | 2208 |
| HSV1-UL19-1823 | + | CUGGGCGCACCCGAACA | 17 | 2209 |
| HSV1-UL19-1824 | + | UGCGCGCCGCGGCACCU | 17 | 2210 |
| HSV1-UL19-1825 | + | CUGCGCGCCGCGGCACC | 17 | 2211 |
| HSV1-UL19-1826 | + | UCCAUCCCUGCGCGCCG | 17 | 2212 |
| HSV1-UL19-1827 | + | ACACGGCGUCCUGGCCG | 17 | 2213 |
| HSV1-UL19-1828 | + | ACUCACACACGGCGUCC | 17 | 2214 |
| HSV1-UL19-1829 | + | GGCGAUAAACUCACACA | 17 | 2215 |
| HSV1-UL19-1830 | + | GUCGGUCGACACGGGGG | 17 | 2216 |
| HSV1-UL19-1831 | + | GACGUCGGUCGACACGG | 17 | 2217 |
| HSV1-UL19-1832 | + | UGACGUCGGUCGACACG | 17 | 2218 |
| HSV1-UL19-1833 | + | UUGACGUCGGUCGACAC | 17 | 2219 |
| HSV1-UL19-1834 | + | GUUGACGUCGGUCGACA | 17 | 2220 |
| HSV1-UL19-1835 | + | GCGGAAGUAGUUGACGU | 17 | 2221 |
| HSV1-UL19-1836 | + | GGGGGUUGCAGGGCCGG | 17 | 2222 |
| HSV1-UL19-1837 | + | CCCGGGGGUUGCAGGGC | 17 | 2223 |
| HSV1-UL19-1838 | + | CGUCCCCGGGGGUUGCA | 17 | 2224 |
| HSV1-UL19-1839 | + | GCGUCCCCGGGGGUUGC | 17 | 2225 |
| HSV1-UL19-1840 | + | CGGCGGCGCGUCCCCGG | 17 | 2226 |
| HSV1-UL19-1841 | + | CCGGCGGCGCGUCCCCG | 17 | 2227 |
| HSV1-UL19-1842 | + | CCCGGCGGCGCGUCCCC | 17 | 2228 |
| HSV1-UL19-1843 | + | CCCCGGCGGCGCGUCCC | 17 | 2229 |
| HSV1-UL19-1844 | + | CGCGUAAACGCCCCCGG | 17 | 2230 |
| HSV1-UL19-1845 | + | CCCCGCGUAAACGCCCC | 17 | 2231 |
| HSV1-UL19-1846 | + | GUGGUCGUACAUGAGGG | 17 | 2232 |
| HSV1-UL19-1847 | + | GCCGUGGUCGUACAUGA | 17 | 2233 |
| HSV1-UL19-1848 | + | GGCCGUGGUCGUACAUG | 17 | 2234 |
| HSV1-UL19-1849 | + | ACGGGUCGCUCUGGCCG | 17 | 2235 |
| HSV1-UL19-1850 | + | CCCGGGACGGGUCGCUC | 17 | 2236 |
| HSV1-UL19-1851 | + | CCGCGAAGGCCCGGGAC | 17 | 2237 |
| HSV1-UL19-1852 | + | GCCGCGAAGGCCCGGGA | 17 | 2238 |
| HSV1-UL19-1853 | + | CGUGGCCGCGAAGGCCC | 17 | 2239 |
| HSV1-UL19-1854 | + | CCGUGGCCGCGAAGGCC | 17 | 2240 |
| HSV1-UL19-1855 | + | GUUGGCCGUGGCCGCGA | 17 | 2241 |
| HSV1-UL19-1856 | + | CGCCCACGGGUUGGCCG | 17 | 2242 |
| HSV1-UL19-1857 | + | CUGCGACGCCCACGGGU | 17 | 2243 |
| HSV1-UL19-1858 | + | AUCGCUGCGACGCCCAC | 17 | 2244 |
| HSV1-UL19-1859 | + | AAUCGCUGCGACGCCCA | 17 | 2245 |
| HSV1-UL19-1860 | + | AGGCCCCGUUAUAGAGC | 17 | 2246 |
| HSV1-UL19-1861 | + | GGCCCCGUUGAGGUGGU | 17 | 2247 |
| HSV1-UL19-1862 | + | GCGAGGCCCCGUUGAGG | 17 | 2248 |
| HSV1-UL19-1863 | + | CCGGCGAGGCCCCGUUG | 17 | 2249 |
| HSV1-UL19-1864 | + | GGGGCUGAGCACCGGCG | 17 | 2250 |
| HSV1-UL19-1865 | + | AAGCAGGGGCUGAGCAC | 17 | 2251 |
| HSV1-UL19-1866 | + | UAAAGAACUUAAAGCAG | 17 | 2252 |
| HSV1-UL19-1867 | + | GUAAAGAACUUAAAGCA | 17 | 2253 |
| HSV1-UL19-1868 | + | CGUAAAGAACUUAAAGC | 17 | 2254 |
| HSV1-UL19-1869 | + | AUGUUUGGCGGCGAUGU | 17 | 2255 |
| HSV1-UL19-1870 | + | CAGGCAGCGAUGUUUGG | 17 | 2256 |
| HSV1-UL19-1871 | + | CUCCAGGCAGCGAUGUU | 17 | 2257 |
| HSV1-UL19-1872 | + | CCACGAUCAGGCGCUCC | 17 | 2258 |
| HSV1-UL19-1873 | + | AACCCGUCUCCACGAUC | 17 | 2259 |
| HSV1-UL19-1874 | + | GCUGGCGGCGGUGGCCG | 17 | 2260 |
| HSV1-UL19-1875 | + | UACGUCGCUGGCGGCGG | 17 | 2261 |
| HSV1-UL19-1876 | + | CUGUACGUCGCUGGCGG | 17 | 2262 |
| HSV1-UL19-1877 | + | AAACUGUACGUCGCUGG | 17 | 2263 |
| HSV1-UL19-1878 | + | CUUAAACUGUACGUCGC | 17 | 2264 |
| HSV1-UL19-1879 | + | GUUCGCGGCACCCCGGG | 17 | 2265 |
| HSV1-UL19-1880 | + | AGUUCGCGGCACCCCGG | 17 | 2266 |
| HSV1-UL19-1881 | + | GAGUUCGCGGCACCCCG | 17 | 2267 |
| HSV1-UL19-1882 | + | CGAGUUCGCGGCACCCC | 17 | 2268 |
| HSV1-UL19-1883 | + | ACGAGUUCGCGGCACCC | 17 | 2269 |
| HSV1-UL19-1884 | + | GGUCCUCCACGAGUUCG | 17 | 2270 |
| HSV1-UL19-1885 | + | CCUGAAACAGGCCACAC | 17 | 2271 |
| HSV1-UL19-1886 | + | UCCUGAAACAGGCCACA | 17 | 2272 |
| HSV1-UL19-1887 | + | GGUAGGCCUCCUGAAAC | 17 | 2273 |
| HSV1-UL19-1888 | + | GGCGCAGGUGAGCGGGU | 17 | 2274 |
| HSV1-UL19-1889 | + | CGCUGGCGCAGGUGAGC | 17 | 2275 |
| HSV1-UL19-1890 | + | UCGCUGGCGCAGGUGAG | 17 | 2276 |
| HSV1-UL19-1891 | + | GGCGGGGUCGCUGGCGC | 17 | 2277 |
| HSV1-UL19-1892 | + | GAGGAGGGCGGGGUCGC | 17 | 2278 |
| HSV1-UL19-1893 | + | CACUGCGGAGGAGGGCG | 17 | 2279 |
| HSV1-UL19-1894 | + | GCACUGCGGAGGAGGGC | 17 | 2280 |
| HSV1-UL19-1895 | + | GGCACUGCGGAGGAGGG | 17 | 2281 |
| HSV1-UL19-1896 | + | GCGGGCACUGCGGAGGA | 17 | 2282 |
| HSV1-UL19-1897 | + | UGCGGGCACUGCGGAGG | 17 | 2283 |
| HSV1-UL19-1898 | + | CGUUGCGGGCACUGCGG | 17 | 2284 |
| HSV1-UL19-1899 | + | CCCCGUUGCGGGCACUG | 17 | 2285 |
| HSV1-UL19-1900 | + | GUGGGCUUCCCCGUUGC | 17 | 2286 |
| HSV1-UL19-1901 | + | CGUGGGCUUCCCCGUUG | 17 | 2287 |
| HSV1-UL19-1902 | + | GUGGGUCUCCCGCGCGU | 17 | 2288 |
| HSV1-UL19-1903 | + | AGUGGGUCUCCCGCGCG | 17 | 2289 |
| HSV1-UL19-1904 | + | GAGAUACUGCGCGAAGU | 17 | 2290 |
| HSV1-UL19-1905 | + | CGAGAUACUGCGCGAAG | 17 | 2291 |
| HSV1-UL19-1906 | + | AGCCAGUCCCUUGAGCG | 17 | 2292 |
| HSV1-UL19-1907 | + | GAGCCAGUCCCUUGAGC | 17 | 2293 |
| HSV1-UL19-1908 | + | AGAGCCAGUCCCUUGAG | 17 | 2294 |

[0711] Table 1D provides exemplary targeting domains for knocking out the UL19 gene selected according to the first tier parameters. The targeting domains are selected based on location within first 500 bp of the coding sequence of the UL19 gene. It is contemplated herein that the targeting domain hybridizes to the target domain through complementary base pairing. Any of the targeting domains in the table can be used with a S. aureus Cas9 molecule that gives double stranded cleavage. Any of the targeting domains in the table can be used with a S. aureus Cas9 single-stranded break nucleases (nickases). In an embodiment, dual targeting is used to create two nicks on opposite DNA strands by using S. aureus Cas9 nickases with two targeting domains that are complementary to opposite DNA strands, e.g., a gRNA comprising any minus strand targeting domain may be paired any gRNA comprising a plus strand targeting domain provided that the two gRNAs are oriented on the DNA such that PAMs face outward and the distance between the 5′ ends of the gRNAs is 0-50 bp.

TABLE 1D
1st Tier

| | | | Target | |
|---|---|---|---|---|
| | DNA | | Site | |
| gRNA Name | Strand | Targeting Domain | Length | Seq ID |
| HSV1-UL19-1909 | − | CCGCUCCCAACCGCGAC | 20 | 2295 |
| | | CCU | | |
| HSV1-UL19-1 | − | CGCUCCCAACCGCGACC | 20 | 461 |
| | | CUC | | |
| HSV1-UL19-1911 | − | UGCCGCGGCCAUGGUGC | 20 | 2296 |
| | | CGA | | |
| HSV1-UL19-1912 | − | CGGGUCCCUCCUUAGCA | 20 | 2297 |
| | | CGA | | |
| HSV1-UL19-1913 | − | UGCAAACAGCCUGUACG | 20 | 2298 |
| | | ACG | | |
| HSV1-UL19-1914 | − | ACGUCGAGUUCGACGCC | 20 | 2299 |
| | | CUG | | |
| HSV1-UL19-10 | − | CGUCGAGUUCGACGCCC | 20 | 467 |
| | | UGC | | |
| HSV1-UL19-1916 | − | CCCUGUCGCUCGUGCGC | 20 | 2300 |
| | | UUU | | |
| HSV1-UL19-13 | − | CCUGUCGCUCGUGCGCU | 20 | 395 |
| | | UUC | | |
| HSV1-UL19-1918 | − | GCUCGUGCGCUUUCUGG | 20 | 2301 |
| | | AGC | | |
| HSV1-UL19-1919 | − | CGUGCGUGUGUACCAAG | 20 | 2302 |
| | | UUU | | |
| HSV1-UL19-18 | − | GUGCGUGUGUACCAAGU | 20 | 404 |
| | | UUC | | |
| HSV1-UL19-1921 | − | AGUUUCCGGAGCUGGCC | 20 | 2303 |
| | | UAC | | |
| HSV1-UL19-1922 | − | UCCGGAGCUGGCCUACA | 20 | 2304 |
| | | UGA | | |
| HSV1-UL19-1923 | − | CGGAGCUGGCCUACAUG | 20 | 2305 |
| | | AAC | | |
| HSV1-UL19-20 | − | GGAGCUGGCCUACAUGA | 20 | 469 |
| | | ACG | | |
| HSV1-UL19-1925 | − | GAACGAGGGGCGCGUAC | 20 | 2306 |
| | | AGU | | |
| HSV1-UL19-1926 | − | CCGCGACGGCCCGCACC | 20 | 2307 |
| | | CCA | | |
| HSV1-UL19-1927 | − | AUGACCAAGAUUAUCGA | 20 | 2308 |
| | | CCG | | |
| HSV1-UL19-1928 | − | AGAUUAUCGACCGCCGG | 20 | 2309 |
| | | GCC | | |
| HSV1-UL19-1929 | − | CGCCGCCUUCAGCCUGG | 20 | 2310 |
| | | CCA | | |
| HSV1-UL19-1930 | − | CCGAGGCCAUCGCCCUG | 20 | 2311 |
| | | CUC | | |
| HSV1-UL19-29 | − | CGAGGCCAUCGCCCUGC | 20 | 474 |
| | | UCA | | |
| HSV1-UL19-30 | − | GAGGCCAUCGCCCUGCU | 20 | 475 |
| | | CAC | | |
| HSV1-UL19-31 | − | AGGCCAUCGCCCUGCUC | 20 | 417 |
| | | ACG | | |
| HSV1-UL19-32 | − | GGCCAUCGCCCUGCUCA | 20 | 476 |
| | | CGG | | |
| HSV1-UL19-1935 | − | CCCUGCUCACGGGGGAG | 20 | 2312 |
| | | GCC | | |
| HSV1-UL19-1936 | − | GCUCACGGGGGAGGCCC | 20 | 2313 |
| | | UGG | | |
| HSV1-UL19-35 | − | CUCACGGGGGAGGCCCU | 20 | 478 |
| | | GGA | | |
| HSV1-UL19-1938 | − | CGGGGGAGGCCCUGGAC | 20 | 2314 |
| | | GGG | | |
| HSV1-UL19-1939 | − | CUCCCAACCGCGACCCU | 17 | 2315 |
| HSV1-UL19-95 | − | UCCCAACCGCGACCCUC | 17 | 518 |
| HSV1-UL19-1941 | − | CGCGGCCAUGGUGCCGA | 17 | 2316 |
| HSV1-UL19-1942 | − | GUCCCUCCUUAGCACGA | 17 | 2317 |
| HSV1-UL19-1943 | − | AAACAGCCUGUACGACG | 17 | 2318 |
| HSV1-UL19-1944 | − | UCGAGUUCGACGCCCUG | 17 | 2319 |
| HSV1-UL19-104 | − | CGAGUUCGACGCCCUGC | 17 | 524 |
| HSV1-UL19-1946 | − | UGUCGCUCGUGCGCUUU | 17 | 2320 |
| HSV1-UL19-107 | − | GUCGCUCGUGCGCUUUC | 17 | 400 |
| HSV1-UL19-1948 | − | CGUGCGCUUUCUGGAGC | 17 | 2321 |
| HSV1-UL19-1949 | − | GCGUGUGUACCAAGUUU | 17 | 2322 |
| HSV1-UL19-112 | − | CGUGUGUACCAAGUUUC | 17 | 407 |
| HSV1-UL19-1951 | − | UUCCGGAGCUGGCCUAC | 17 | 2323 |
| HSV1-UL19-1952 | − | GGAGCUGGCCUACAUGA | 17 | 2324 |
| HSV1-UL19-1953 | − | AGCUGGCCUACAUGAAC | 17 | 2325 |
| HSV1-UL19-114 | − | GCUGGCCUACAUGAACG | 17 | 526 |
| HSV1-UL19-1955 | − | CGAGGGGCGCGUACAGU | 17 | 2326 |
| HSV1-UL19-1956 | − | CGACGGCCCGCACCCCA | 17 | 2327 |
| HSV1-UL19-1957 | − | ACCAAGAUUAUCGACCG | 17 | 2328 |
| HSV1-UL19-1958 | − | UUAUCGACCGCCGGGCC | 17 | 2329 |
| HSV1-UL19-1959 | − | CGCCUUCAGCCUGGCCA | 17 | 2330 |
| HSV1-UL19-1960 | − | AGGCCAUCGCCCUGCUC | 17 | 2331 |
| HSV1-UL19-123 | − | GGCCAUCGCCCUGCUCA | 17 | 531 |
| HSV1-UL19-124 | − | GCCAUCGCCCUGCUCAC | 17 | 532 |
| HSV1-UL19-125 | − | CCAUCGCCCUGCUCACG | 17 | 418 |
| HSV1-UL19-126 | − | CAUCGCCCUGCUCACGG | 17 | 533 |
| HSV1-UL19-1965 | − | UGCUCACGGGGGAGGCC | 17 | 2332 |
| HSV1-UL19-1966 | − | CACGGGGGAGGCCCUGG | 17 | 2333 |
| HSV1-UL19-129 | − | ACGGGGGAGGCCCUGGA | 17 | 535 |
| HSV1-UL19-1968 | − | GGGAGGCCCUGGACGGG | 17 | 2334 |
| HSV1-UL19-93 | + | UAUCCCGGAGGGUCGCG | 20 | 457 |
| | | GUU | | |
| HSV1-UL19-92 | + | GUAUCCCGGAGGGUCGC | 20 | 456 |
| | | GGU | | |
| HSV1-UL19-1971 | + | GGUAUCCCGGAGGGUCG | 20 | 2335 |
| | | CGG | | |
| HSV1-UL19-1972 | + | CGCGGCAUACCGGUAUC | 20 | 2336 |
| | | CCG | | |
| HSV1-UL19-88 | + | GCCGCGGCAUACCGGUA | 20 | 514 |
| | | UCC | | |
| HSV1-UL19-1974 | + | GGCCGCGGCAUACCGGU | 20 | 2337 |
| | | AUC | | |
| HSV1-UL19-81 | + | CCACCUCGAUCGUGCUA | 20 | 509 |
| | | AGG | | |
| HSV1-UL19-1976 | + | GCCACCUCGAUCGUGCU | 20 | 2338 |
| | | AAG | | |
| HSV1-UL19-80 | + | ACGCCACCUCGAUCGUG | 20 | 508 |
| | | CUA | | |
| HSV1-UL19-1978 | + | GACGCCACCUCGAUCGU | 20 | 2339 |
| | | GCU | | |
| HSV1-UL19-78 | + | GUUUGCAUCGGAGCGCA | 20 | 506 |
| | | CGC | | |
| HSV1-UL19-77 | + | UGUUUGCAUCGGAGCGC | 20 | 505 |
| | | ACG | | |
| HSV1-UL19-1981 | + | CUGUUUGCAUCGGAGCG | 20 | 2340 |
| | | CAC | | |
| HSV1-UL19-76 | + | GUCGUACAGGCUGUUUG | 20 | 442 |
| | | CAU | | |
| HSV1-UL19-1983 | + | CGUCGUACAGGCUGUUU | 20 | 2341 |
| | | GCA | | |
| HSV1-UL19-1984 | + | AAUACGACCCCAGCAGG | 20 | 2342 |
| | | GCG | | |
| HSV1-UL19-1985 | + | GUGUUGCAAUACGACCC | 20 | 2343 |
| | | CAG | | |
| HSV1-UL19-1986 | + | UCCAGAAAGCGCACGAG | 20 | 2344 |
| | | CGA | | |
| HSV1-UL19-1987 | + | ACCCGAGCUCCAGAAAG | 20 | 2345 |
| | | CGC | | |
| HSV1-UL19-1988 | + | GCCACCGACAACCCGAG | 20 | 2346 |
| | | CUC | | |
| HSV1-UL19-1989 | + | ACACGCACGCCACCGAC | 20 | 2347 |
| | | AAC | | |
| HSV1-UL19-69 | + | UCGUUCAUGUAGGCCAG | 20 | 435 |
| | | CUC | | |
| HSV1-UL19-1991 | + | CUCGUUCAUGUAGGCCA | 20 | 2348 |
| | | GCU | | |
| HSV1-UL19-1992 | + | CAAUCAGCGGCUGGUGG | 20 | 2349 |
| | | ACC | | |
| HSV1-UL19-1993 | + | UCGCGGGCAAUCAGCGG | 20 | 2350 |
| | | CUG | | |
| HSV1-UL19-1994 | + | UCGAUGGGGUGCGGGCC | 20 | 2351 |
| | | GUC | | |
| HSV1-UL19-1995 | + | UGUGGGUUGCUCGAUGG | 20 | 2352 |
| | | GGU | | |
| HSV1-UL19-58 | + | AUUGUGUGUGGGUUGCU | 20 | 425 |
| | | CGA | | |
| HSV1-UL19-1997 | + | AAUUGUGUGUGGGUUGC | 20 | 2353 |
| | | UCG | | |
| HSV1-UL19-1998 | + | UCUUGGUCAUGUAAUUG | 20 | 2354 |
| | | UGU | | |
| HSV1-UL19-1999 | + | GCCAGGCUGAAGGCGGC | 20 | 2355 |
| | | GUU | | |
| HSV1-UL19-2000 | + | CGAUGGCCUCGGUGGCC | 20 | 2356 |
| | | AGG | | |
| HSV1-UL19-2001 | + | UCCAGGGCCUCCCCCGU | 20 | 2357 |
| | | GAG | | |
| HSV1-UL19-2002 | + | UCCCGUCCAGGGCCUCC | 20 | 2358 |
| | | CCC | | |
| HSV1-UL19-2003 | + | GCGCCGAUACCCGUCCC | 20 | 2359 |
| | | GUC | | |
| HSV1-UL19-187 | + | CCCGGAGGGUCGCGGUU | 17 | 460 |
| HSV1-UL19-186 | + | UCCCGGAGGGUCGCGGU | 17 | 459 |
| HSV1-UL19-2006 | + | AUCCCGGAGGGUCGCGG | 17 | 2360 |
| HSV1-UL19-2007 | + | GGCAUACCGGUAUCCCG | 17 | 2361 |
| HSV1-UL19-182 | + | GCGGCAUACCGGUAUCC | 17 | 571 |
| HSV1-UL19-2009 | + | CGCGGCAUACCGGUAUC | 17 | 2362 |
| HSV1-UL19-175 | + | CCUCGAUCGUGCUAAGG | 17 | 566 |
| HSV1-UL19-2011 | + | ACCUCGAUCGUGCUAAG | 17 | 2363 |
| HSV1-UL19-174 | + | CCACCUCGAUCGUGCUA | 17 | 565 |
| HSV1-UL19-2013 | + | GCCACCUCGAUCGUGCU | 17 | 2364 |
| HSV1-UL19-172 | + | UGCAUCGGAGCGCACGC | 17 | 563 |
| HSV1-UL19-171 | + | UUGCAUCGGAGCGCACG | 17 | 562 |
| HSV1-UL19-2016 | + | UUUGCAUCGGAGCGCAC | 17 | 2365 |
| HSV1-UL19-170 | + | GUACAGGCUGUUUGCAU | 17 | 450 |
| HSV1-UL19-2018 | + | CGUACAGGCUGUUUGCA | 17 | 2366 |
| HSV1-UL19-2019 | + | ACGACCCCAGCAGGGCG | 17 | 2367 |
| HSV1-UL19-2020 | + | UUGCAAUACGACCCCAG | 17 | 2368 |
| HSV1-UL19-2021 | + | AGAAAGCGCACGAGCGA | 17 | 2369 |
| HSV1-UL19-2022 | + | CGAGCUCCAGAAAGCGC | 17 | 2370 |
| HSV1-UL19-2023 | + | ACCGACAACCCGAGCUC | 17 | 2371 |
| HSV1-UL19-2024 | + | CGCACGCCACCGACAAC | 17 | 2372 |
| HSV1-UL19-163 | + | UUCAUGUAGGCCAGCUC | 17 | 443 |
| HSV1-UL19-2026 | + | GUUCAUGUAGGCCAGCU | 17 | 2373 |
| HSV1-UL19-2027 | + | UCAGCGGCUGGUGGACC | 17 | 2374 |
| HSV1-UL19-2028 | + | CGGGCAAUCAGCGGCUG | 17 | 2375 |
| HSV1-UL19-2029 | + | AUGGGGUGCGGGCCGUC | 17 | 2376 |
| HSV1-UL19-2030 | + | GGGUUGCUCGAUGGGGU | 17 | 2377 |
| HSV1-UL19-152 | + | GUGUGUGGGUUGCUCGA | 17 | 427 |
| HSV1-UL19-2032 | + | UGUGUGUGGGUUGCUCG | 17 | 2378 |
| HSV1-UL19-2033 | + | UGGUCAUGUAAUUGUGU | 17 | 2379 |
| HSV1-UL19-2034 | + | AGGCUGAAGGCGGCGUU | 17 | 2380 |
| HSV1-UL19-2035 | + | UGGCCUCGGUGGCCAGG | 17 | 2381 |
| HSV1-UL19-2036 | + | AGGGCCUCCCCCGUGAG | 17 | 2382 |
| HSV1-UL19-2037 | + | CGUCCAGGGCCUCCCCC | 17 | 2383 |
| HSV1-UL19-2038 | + | CCGAUACCCGUCCCGUC | 17 | 2384 |

[0712] Table 1E provides exemplary targeting domains for knocking out the UL19 gene selected according to the second tier parameters. The targeting domains are selected based on location within the coding sequence, but downstream of the first 500 bp of the UL19 gene. It is contemplated herein that the targeting domain hybridizes to the target domain through complementary base pairing. Any of the targeting domains in the table can be used with a S. aureus Cas9 molecule that gives double stranded cleavage. Any of the targeting domains in the table can be used with a S. aureus Cas9 single-stranded break nucleases (nickases). In an embodiment, dual targeting is used to create two nicks on opposite DNA strands by using S. aureus Cas9 nickases with two targeting domains that are complementary to opposite DNA strands, e.g., a gRNA comprising any minus strand targeting domain may be paired any gRNA comprising a plus strand targeting domain provided that the two gRNAs are oriented on the DNA such that PAMs face outward and the distance between the 5′ ends of the gRNAs is 0-50 bp.

TABLE 1E
2nd Tier

| | | | Target | |
|---|---|---|---|---|
| | DNA | | Site | |
| gRNA Name | Strand | Targeting Domain | Length | Seq ID |
| HSV1-UL19-189 | − | CGCAACGUCCAGGCCGUCCU | 20 | 575 |
| HSV1-UL19-2040 | − | CCAGGCCGUCCUCGGGGCGU | 20 | 2385 |
| HSV1-UL19-2041 | − | ACCAGAUGCUGCACGUGCUG | 20 | 2386 |
| HSV1-UL19-194 | − | CCAGAUGCUGCACGUGCUGC | 20 | 580 |
| HSV1-UL19-2043 | − | UGUUGCCGAUGCAACGAUAC | 20 | 2387 |
| HSV1-UL19-2044 | − | GACAACGGCCGCCUGGCCAC | 20 | 2388 |
| HSV1-UL19-2045 | − | CGCCUGGCCACCAGGGUGGC | 20 | 2389 |
| HSV1-UL19-2046 | − | GGCCCGGGCGACCCUGGUCG | 20 | 2390 |
| HSV1-UL19-2047 | − | ACCCUGGUCGCCGAGCUAAA | 20 | 2391 |
| HSV1-UL19-2048 | − | CGAGCUAAAGCGAAGCUUCU | 20 | 2392 |
| HSV1-UL19-2049 | − | UAAAGCGAAGCUUCUGCGAG | 20 | 2393 |
| HSV1-UL19-2050 | − | UCUGCGAGACGAGCUUUUUC | 20 | 2394 |
| HSV1-UL19-2051 | − | CGAGCUUUUUCCUGGGCAAG | 20 | 2395 |
| HSV1-UL19-2052 | − | CUGGGCAAGGCGGGCCACCG | 20 | 2396 |
| HSV1-UL19-211 | − | UGGGCAAGGCGGGCCACCGC | 20 | 597 |
| HSV1-UL19-212 | − | GGGCAAGGCGGGCCACCGCC | 20 | 598 |
| HSV1-UL19-2055 | − | GGGCCACCGCCGGGAGGCCG | 20 | 2397 |
| HSV1-UL19-2056 | − | AGGCCGUCGAGGCCUGGCUC | 20 | 2398 |
| HSV1-UL19-2057 | − | UCUGACGCAUGCCGACACGC | 20 | 2399 |
| HSV1-UL19-2058 | − | CACGCGCGGGCGGCCGGUCG | 20 | 2400 |
| HSV1-UL19-223 | − | ACGCGCGGGCGGCCGGUCGA | 20 | 609 |
| HSV1-UL19-2060 | − | AGCGCCUCCUGCAGUCCUUC | 20 | 2401 |
| HSV1-UL19-2061 | − | UCCUGCAGUCCUUCCUGAAA | 20 | 2402 |
| HSV1-UL19-226 | − | CCUGCAGUCCUUCCUGAAAG | 20 | 612 |
| HSV1-UL19-2063 | − | UGCAGUCCUUCCUGAAAGUG | 20 | 2403 |
| HSV1-UL19-2064 | − | CUUCCUGAAAGUGGAGGACA | 20 | 2404 |
| HSV1-UL19-2065 | − | CGACGUGCCGGUGACGUACG | 20 | 2405 |
| HSV1-UL19-2066 | − | UGACGUACGGCGAGAUGGUC | 20 | 2406 |
| HSV1-UL19-2067 | − | GUACGGCGAGAUGGUCCUGA | 20 | 2407 |
| HSV1-UL19-231 | − | UACGGCGAGAUGGUCCUGAA | 20 | 617 |
| HSV1-UL19-2069 | − | ACCUGGUCACGGCGCUCGUG | 20 | 2408 |
| HSV1-UL19-2070 | − | CUCGUGAUGGGCAAGGCCGU | 20 | 2409 |
| HSV1-UL19-2071 | − | UGGGCAAGGCCGUGCGAAGU | 20 | 2410 |
| HSV1-UL19-2072 | − | CCGUGCGAAGUCUGGACGAC | 20 | 2411 |
| HSV1-UL19-2073 | − | ACGACGUGGGCCGCCACCUG | 20 | 2412 |
| HSV1-UL19-242 | − | CGACGUGGGCCGCCACCUGC | 20 | 628 |
| HSV1-UL19-2075 | − | GCCGCCACCUGCUGGAGAUG | 20 | 2413 |
| HSV1-UL19-243 | − | CCGCCACCUGCUGGAGAUGC | 20 | 629 |
| HSV1-UL19-2077 | − | GCCACCUGCUGGAGAUGCAG | 20 | 2414 |
| HSV1-UL19-244 | − | CCACCUGCUGGAGAUGCAGG | 20 | 630 |
| HSV1-UL19-2079 | − | UGCAGGAGGAGCAGCUCGAC | 20 | 2415 |
| HSV1-UL19-2080 | − | UCGACCUGAACCGGCAGACG | 20 | 2416 |
| HSV1-UL19-2081 | − | CCUGAACCGGCAGACGCUGG | 20 | 2417 |
| HSV1-UL19-2082 | − | CCGGCAGACGCUGGACGAGC | 20 | 2418 |
| HSV1-UL19-2083 | − | GGCAGACGCUGGACGAGCUC | 20 | 2419 |
| HSV1-UL19-2084 | − | CCCAGACGACGCGCGUGCGC | 20 | 2420 |
| HSV1-UL19-2085 | − | CGCGGAUCUGGUGUCCAUCG | 20 | 2421 |
| HSV1-UL19-2086 | − | CGGAUCUGGUGUCCAUCGGC | 20 | 2422 |
| HSV1-UL19-2087 | − | UCGGCGAGAAGCUGGUCUUU | 20 | 2423 |
| HSV1-UL19-251 | − | CGGCGAGAAGCUGGUCUUUC | 20 | 637 |
| HSV1-UL19-2089 | − | AGCUGGUCUUUCUGGAGGCC | 20 | 2424 |
| HSV1-UL19-253 | − | GCUGGUCUUUCUGGAGGCCC | 20 | 639 |
| HSV1-UL19-2091 | − | UGGUCUUUCUGGAGGCCCUG | 20 | 2425 |
| HSV1-UL19-2092 | − | CCAACGUUCCCUACCCCCUG | 20 | 2426 |
| HSV1-UL19-2093 | − | CCUACCCCCUGGUGGGCGCC | 20 | 2427 |
| HSV1-UL19-2094 | − | ACCUGACGUUCGUCCUGCCC | 20 | 2428 |
| HSV1-UL19-2095 | − | UGGGCCUGUUCAAUCCGGUC | 20 | 2429 |
| HSV1-UL19-261 | − | GGGCCUGUUCAAUCCGGUCA | 20 | 647 |
| HSV1-UL19-2097 | − | GGAACGGUUUGCCGCGCACG | 20 | 2430 |
| HSV1-UL19-263 | − | GAACGGUUUGCCGCGCACGC | 20 | 649 |
| HSV1-UL19-264 | − | AACGGUUUGCCGCGCACGCC | 20 | 650 |
| HSV1-UL19-2100 | − | UAGUCCCCGCCCCCGGCCAC | 20 | 2431 |
| HSV1-UL19-2101 | − | CCGCCCCGCCAGCUGUUUUU | 20 | 2432 |
| HSV1-UL19-268 | − | CGCCCCGCCAGCUGUUUUUU | 20 | 654 |
| HSV1-UL19-269 | − | GCCCCGCCAGCUGUUUUUUU | 20 | 655 |
| HSV1-UL19-270 | − | CCCCGCCAGCUGUUUUUUUG | 20 | 656 |
| HSV1-UL19-271 | − | CCCGCCAGCUGUUUUUUUGG | 20 | 657 |
| HSV1-UL19-2106 | − | GCCAGCUGUUUUUUUGGGGG | 20 | 2433 |
| HSV1-UL19-2107 | − | GCCAGGUGCUGCGCCUGUCU | 20 | 2434 |
| HSV1-UL19-274 | − | CCAGGUGCUGCGCCUGUCUC | 20 | 660 |
| HSV1-UL19-2109 | − | CCUGUCUCUGGAACACGCGA | 20 | 2435 |
| HSV1-UL19-275 | − | CUGUCUCUGGAACACGCGAU | 20 | 661 |
| HSV1-UL19-2111 | − | CCGUGUGCCACCCUUCGCUG | 20 | 2436 |
| HSV1-UL19-2112 | − | GAUGAACGUUGACGCGGCGG | 20 | 2437 |
| HSV1-UL19-279 | − | AUGAACGUUGACGCGGCGGU | 20 | 665 |
| HSV1-UL19-280 | − | UGAACGUUGACGCGGCGGUC | 20 | 666 |
| HSV1-UL19-2115 | − | GGGCCUUAACCGCGACCCCG | 20 | 2438 |
| HSV1-UL19-2116 | − | CGUCGAAGCCGCCAAUCCGU | 20 | 2439 |
| HSV1-UL19-283 | − | GUCGAAGCCGCCAAUCCGUA | 20 | 669 |
| HSV1-UL19-2118 | − | CAGACAUGCAGCAGCUGUUU | 20 | 2440 |
| HSV1-UL19-2119 | − | CAGCAGCUGUUUUUGAACGC | 20 | 2441 |
| HSV1-UL19-290 | − | AGCAGCUGUUUUUGAACGCC | 20 | 676 |
| HSV1-UL19-291 | − | GCAGCUGUUUUUGAACGCCU | 20 | 677 |
| HSV1-UL19-2122 | − | CUGGGGGCAGCGCCUGGCCC | 20 | 2442 |
| HSV1-UL19-2123 | − | GGGCAGCGCCUGGCCCACGG | 20 | 2443 |
| HSV1-UL19-2124 | − | CUGGCCCACGGGCGGGUCCG | 20 | 2444 |
| HSV1-UL19-2125 | − | ACGGGCGGGUCCGAUGGGUC | 20 | 2445 |
| HSV1-UL19-301 | − | CGGGCGGGUCCGAUGGGUCG | 20 | 687 |
| HSV1-UL19-2127 | − | UCGCGGAAGGCCAGAUGACC | 20 | 2446 |
| HSV1-UL19-303 | − | CGCGGAAGGCCAGAUGACCC | 20 | 689 |
| HSV1-UL19-2129 | − | CGACAACGCCAACCUGGCUC | 20 | 2447 |
| HSV1-UL19-2130 | − | ACCCCGCGUUCGACUUCUUU | 20 | 2448 |
| HSV1-UL19-305 | − | CCCCGCGUUCGACUUCUUUG | 20 | 691 |
| HSV1-UL19-306 | − | CCCGCGUUCGACUUCUUUGU | 20 | 692 |
| HSV1-UL19-2133 | − | UCUUUGUGGGGGUGGCCGAC | 20 | 2449 |
| HSV1-UL19-310 | − | CUUUGUGGGGGUGGCCGACG | 20 | 696 |
| HSV1-UL19-2135 | − | GGGUGGCCGACGUGGAGCUG | 20 | 2450 |
| HSV1-UL19-311 | − | GGUGGCCGACGUGGAGCUGC | 20 | 697 |
| HSV1-UL19-312 | − | GUGGCCGACGUGGAGCUGCC | 20 | 698 |
| HSV1-UL19-313 | − | UGGCCGACGUGGAGCUGCCG | 20 | 699 |
| HSV1-UL19-314 | − | GGCCGACGUGGAGCUGCCGG | 20 | 700 |
| HSV1-UL19-315 | − | GCCGACGUGGAGCUGCCGGG | 20 | 701 |
| HSV1-UL19-316 | − | CCGACGUGGAGCUGCCGGGG | 20 | 702 |
| HSV1-UL19-2142 | − | GGGACGUUCCCCCGGCCGGC | 20 | 2451 |
| HSV1-UL19-320 | − | GGACGUUCCCCCGGCCGGCC | 20 | 706 |
| HSV1-UL19-321 | − | GACGUUCCCCCGGCCGGCCC | 20 | 707 |
| HSV1-UL19-322 | − | ACGUUCCCCCGGCCGGCCCG | 20 | 708 |
| HSV1-UL19-323 | − | CGUUCCCCCGGCCGGCCCGG | 20 | 709 |
| HSV1-UL19-2147 | − | UCCAGGCCACCUGGCGCGUG | 20 | 2452 |
| HSV1-UL19-2148 | − | GCGCUAUGUCCGGCGGCGUU | 20 | 2453 |
| HSV1-UL19-331 | − | CGCUAUGUCCGGCGGCGUUC | 20 | 717 |
| HSV1-UL19-2150 | − | CCGGCGGCGUUCCGGGACGC | 20 | 2454 |
| HSV1-UL19-333 | − | CGGCGGCGUUCCGGGACGCC | 20 | 719 |
| HSV1-UL19-2152 | − | CGUUCCGGGACGCCCGGGGC | 20 | 2455 |
| HSV1-UL19-336 | − | GUUCCGGGACGCCCGGGGCC | 20 | 722 |
| HSV1-UL19-2154 | − | GGGACGCCCGGGGCCUGGAG | 20 | 2456 |
| HSV1-UL19-337 | − | GGACGCCCGGGGCCUGGAGC | 20 | 723 |
| HSV1-UL19-338 | − | GACGCCCGGGGCCUGGAGCU | 20 | 724 |
| HSV1-UL19-2157 | − | CCCGGGGCCUGGAGCUGGGG | 20 | 2457 |
| HSV1-UL19-341 | − | CCGGGGCCUGGAGCUGGGGG | 20 | 727 |
| HSV1-UL19-2159 | − | CGCCACCAUCGCCGCCGUUC | 20 | 2458 |
| HSV1-UL19-344 | − | GCCACCAUCGCCGCCGUUCG | 20 | 730 |
| HSV1-UL19-2161 | − | GCAGGCCGCCAUACACGGCA | 20 | 2459 |
| HSV1-UL19-2162 | − | GUCCAGUGCAUCACCAGCUA | 20 | 2460 |
| HSV1-UL19-354 | − | UCCAGUGCAUCACCAGCUAC | 20 | 740 |
| HSV1-UL19-2164 | − | ACACGCGGUGCGCGGCGUUC | 20 | 2461 |
| HSV1-UL19-2165 | − | CUCGUACGUCGUGACCUACC | 20 | 2462 |
| HSV1-UL19-358 | − | UCGUACGUCGUGACCUACCU | 20 | 744 |
| HSV1-UL19-359 | − | CGUACGUCGUGACCUACCUC | 20 | 745 |
| HSV1-UL19-360 | − | GUACGUCGUGACCUACCUCG | 20 | 746 |
| HSV1-UL19-361 | − | UACGUCGUGACCUACCUCGG | 20 | 747 |
| HSV1-UL19-2170 | − | CUACCUCGGGGGAGACCUUC | 20 | 2463 |
| HSV1-UL19-2171 | − | ACCUCGGGGGAGACCUUCCC | 20 | 2464 |
| HSV1-UL19-362 | − | CCUCGGGGGAGACCUUCCCG | 20 | 748 |
| HSV1-UL19-2173 | − | GAGGAGUGCAUGGCCGUGUA | 20 | 2465 |
| HSV1-UL19-364 | − | AGGAGUGCAUGGCCGUGUAC | 20 | 750 |
| HSV1-UL19-2175 | − | CCGGGACCUGGUGGCGCACG | 20 | 2466 |
| HSV1-UL19-2176 | − | AUGACUUUACCCUGACCGGC | 20 | 2467 |
| HSV1-UL19-372 | − | UGACUUUACCCUGACCGGCC | 20 | 758 |
| HSV1-UL19-2178 | − | UUACCCUGACCGGCCCGGAG | 20 | 2468 |
| HSV1-UL19-2179 | − | CCUGACCGGCCCGGAGCUGG | 20 | 2469 |
| HSV1-UL19-2180 | − | GCUGGGCGGGCAGGCGCAAG | 20 | 2470 |
| HSV1-UL19-2181 | − | GCGGGCAGGCGCAAGCCGAG | 20 | 2471 |
| HSV1-UL19-2182 | − | GCCGAGCUGAAUCACCUAAU | 20 | 2472 |
| HSV1-UL19-2183 | − | GCGCUGCUGCCACCCCUCGU | 20 | 2473 |
| HSV1-UL19-379 | − | CGCUGCUGCCACCCCUCGUG | 20 | 765 |
| HSV1-UL19-2185 | − | CCCUGAUGCGGCGCGCGGCC | 20 | 2474 |
| HSV1-UL19-2186 | − | CUGGACCGCCAUCGCGACUG | 20 | 2475 |
| HSV1-UL19-2187 | − | AUCGCGACUGCCGGGUUAGC | 20 | 2476 |
| HSV1-UL19-386 | − | UCGCGACUGCCGGGUUAGCG | 20 | 772 |
| HSV1-UL19-387 | − | CGCGACUGCCGGGUUAGCGC | 20 | 773 |
| HSV1-UL19-388 | − | GCGACUGCCGGGUUAGCGCG | 20 | 774 |
| HSV1-UL19-2191 | − | CGGCAUGUAACGUGGCGACC | 20 | 2477 |
| HSV1-UL19-2192 | − | CUGCUGCACAACACCCAGGC | 20 | 2478 |
| HSV1-UL19-2193 | − | ACAACACCCAGGCCCGAGCC | 20 | 2479 |
| HSV1-UL19-2194 | − | AGGCCCGAGCCGCGGACGCC | 20 | 2480 |
| HSV1-UL19-2195 | − | GCCGCGGAUGACCGGCCGCA | 20 | 2481 |
| HSV1-UL19-400 | − | CCGCGGAUGACCGGCCGCAC | 20 | 786 |
| HSV1-UL19-401 | − | CGCGGAUGACCGGCCGCACC | 20 | 787 |
| HSV1-UL19-402 | − | GCGGAUGACCGGCCGCACCG | 20 | 788 |
| HSV1-UL19-2199 | − | AUGACCGGCCGCACCGGGGG | 20 | 2482 |
| HSV1-UL19-2200 | − | CGGCCGCACCGGGGGGCGGA | 20 | 2483 |
| HSV1-UL19-2201 | − | GUGAUGGUGCCCGCCUUCUC | 20 | 2484 |
| HSV1-UL19-408 | − | UGAUGGUGCCCGCCUUCUCG | 20 | 794 |
| HSV1-UL19-2203 | − | CGCGGGGCCGCUGCUGCACC | 20 | 2485 |
| HSV1-UL19-411 | − | GCGGGGCCGCUGCUGCACCG | 20 | 797 |
| HSV1-UL19-412 | − | CGGGGCCGCUGCUGCACCGC | 20 | 798 |
| HSV1-UL19-2206 | − | ACCGCGUAUACGCCACCCUG | 20 | 2486 |
| HSV1-UL19-2207 | − | CCCUGCAGAACAUGGUGGUC | 20 | 2487 |
| HSV1-UL19-417 | − | CCUGCAGAACAUGGUGGUCC | 20 | 803 |
| HSV1-UL19-2209 | − | GGUCCCGGAGAUCGCCCCCG | 20 | 2488 |
| HSV1-UL19-2210 | − | UCCCGGAGAUCGCCCCCGGC | 20 | 2489 |
| HSV1-UL19-419 | − | CCCGGAGAUCGCCCCCGGCG | 20 | 805 |
| HSV1-UL19-2212 | − | AGUGCCCCAGCGACCCCGUG | 20 | 2490 |
| HSV1-UL19-2213 | − | GGUCAACGCCAUGUUUCACA | 20 | 2491 |
| HSV1-UL19-2214 | − | UUCACAACGGGCGCGUGGUA | 20 | 2492 |
| HSV1-UL19-2215 | − | CAACGGGCGCGUGGUAGUGG | 20 | 2493 |
| HSV1-UL19-2216 | − | GGUGCUGGCCCACAACAUGG | 20 | 2494 |
| HSV1-UL19-2217 | − | UCUGCUCGGCGGCGCCCGAC | 20 | 2495 |
| HSV1-UL19-2218 | − | CACCAACAUGCGCAUAUUCG | 20 | 2496 |
| HSV1-UL19-439 | − | ACCAACAUGCGCAUAUUCGA | 20 | 825 |
| HSV1-UL19-2220 | − | AUUCGACGGGGCGUUGCACG | 20 | 2497 |
| HSV1-UL19-442 | − | UUCGACGGGGCGUUGCACGC | 20 | 828 |
| HSV1-UL19-2222 | − | UGCUGAUGGCCCCCCAGCAU | 20 | 2498 |
| HSV1-UL19-2223 | − | CCCCGUCCACGCGCUGUUCG | 20 | 2499 |
| HSV1-UL19-446 | − | CCCGUCCACGCGCUGUUCGC | 20 | 832 |
| HSV1-UL19-2225 | − | UCGCCGGGGCCGACCACGUG | 20 | 2500 |
| HSV1-UL19-2226 | − | UCCCCCUGGUCCCCCCGGCU | 20 | 2501 |
| HSV1-UL19-455 | − | CCCCCUGGUCCCCCCGGCUC | 20 | 841 |
| HSV1-UL19-456 | − | CCCCUGGUCCCCCCGGCUCU | 20 | 842 |
| HSV1-UL19-2229 | − | GCCCGUCGUGCAGCACGUCC | 20 | 2502 |
| HSV1-UL19-2230 | − | CCGUCGUGCAGCACGUCCGC | 20 | 2503 |
| HSV1-UL19-2231 | − | GCACGUCCGCGAGAGCGCGG | 20 | 2504 |
| HSV1-UL19-460 | − | CACGUCCGCGAGAGCGCGGC | 20 | 846 |
| HSV1-UL19-461 | − | ACGUCCGCGAGAGCGCGGCC | 20 | 847 |
| HSV1-UL19-462 | − | CGUCCGCGAGAGCGCGGCCG | 20 | 848 |
| HSV1-UL19-2235 | − | UCCGCGAGAGCGCGGCCGGG | 20 | 2505 |
| HSV1-UL19-2236 | − | CGCUGACCUACGCGCUCAUG | 20 | 2506 |
| HSV1-UL19-464 | − | GCUGACCUACGCGCUCAUGG | 20 | 850 |
| HSV1-UL19-2238 | − | CCUUGCAUCAUCAGCUCAAG | 20 | 2507 |
| HSV1-UL19-2239 | − | GCUCAAGACGGGCCUCCAUC | 20 | 2508 |
| HSV1-UL19-2240 | − | GACGGGCCUCCAUCCCGGGU | 20 | 2509 |
| HSV1-UL19-2241 | − | UUGGGUUCACCGUCGUCCGA | 20 | 2510 |
| HSV1-UL19-2242 | − | CCGACAGGACCGCUUUGUGA | 20 | 2511 |
| HSV1-UL19-2243 | − | GACAGGACCGCUUUGUGACU | 20 | 2512 |
| HSV1-UL19-2244 | − | UGACUGAGAACGUGCUGUUC | 20 | 2513 |
| HSV1-UL19-475 | − | GACUGAGAACGUGCUGUUCU | 20 | 861 |
| HSV1-UL19-2246 | − | UGCUGUUCUCGGAGCGCGCG | 20 | 2514 |
| HSV1-UL19-476 | − | GCUGUUCUCGGAGCGCGCGU | 20 | 862 |
| HSV1-UL19-2248 | − | GCGCGUCGGAGGCGUACUUC | 20 | 2515 |
| HSV1-UL19-2249 | − | CCAGCUCCAGGUGGCCCGGC | 20 | 2516 |
| HSV1-UL19-2250 | − | GGUGGCCCGGCACGAAACUG | 20 | 2517 |
| HSV1-UL19-484 | − | GUGGCCCGGCACGAAACUGG | 20 | 870 |
| HSV1-UL19-485 | − | UGGCCCGGCACGAAACUGGC | 20 | 871 |
| HSV1-UL19-486 | − | GGCCCGGCACGAAACUGGCG | 20 | 872 |
| HSV1-UL19-487 | − | GCCCGGCACGAAACUGGCGG | 20 | 873 |
| HSV1-UL19-2255 | − | UCACGCUCACCCAGCCGCGC | 20 | 2518 |
| HSV1-UL19-2256 | − | UCACCCAGCCGCGCGCGAAC | 20 | 2519 |
| HSV1-UL19-2257 | − | AGCCGCGCGCGAACGUGGAC | 20 | 2520 |
| HSV1-UL19-2258 | − | GCGCGAACGUGGACCUGGGC | 20 | 2521 |
| HSV1-UL19-2259 | − | UCCGCAACCCCGUCACCGAC | 20 | 2522 |
| HSV1-UL19-2260 | − | ACCUUCCCCAAAACUUUUAC | 20 | 2523 |
| HSV1-UL19-2261 | − | CCAAAACUUUUACCUGGGCC | 20 | 2524 |
| HSV1-UL19-501 | − | CAAAACUUUUACCUGGGCCG | 20 | 887 |
| HSV1-UL19-2263 | − | GCCGCGGGGCUCCCCCUCUC | 20 | 2525 |
| HSV1-UL19-2264 | − | AACGCGGCAGCCGUGUACCU | 20 | 2526 |
| HSV1-UL19-506 | − | ACGCGGCAGCCGUGUACCUG | 20 | 892 |
| HSV1-UL19-2266 | − | ACCUGCGGAACGCGGUCGUG | 20 | 2527 |
| HSV1-UL19-509 | − | CCUGCGGAACGCGGUCGUGG | 20 | 895 |
| HSV1-UL19-510 | − | CUGCGGAACGCGGUCGUGGC | 20 | 896 |
| HSV1-UL19-2269 | − | CGGUCGUGGCGGGAAACCGC | 20 | 2528 |
| HSV1-UL19-511 | − | GGUCGUGGCGGGAAACCGCC | 20 | 897 |
| HSV1-UL19-2271 | − | GGCCCAGCCCGUCCCCGUGU | 20 | 2529 |
| HSV1-UL19-2272 | − | CGCCCAGGUGCCGCGGCGCG | 20 | 2530 |
| HSV1-UL19-519 | − | GCCCAGGUGCCGCGGCGCGC | 20 | 905 |
| HSV1-UL19-2274 | − | AGGUGCCGCGGCGCGCAGGG | 20 | 2531 |
| HSV1-UL19-2275 | − | GCGCAGGGAUGGACCACGGC | 20 | 2532 |
| HSV1-UL19-2276 | − | CCACGGCCAGGACGCCGUGU | 20 | 2533 |
| HSV1-UL19-2277 | − | UUCCGCCGGCCCUGCAACCC | 20 | 2534 |
| HSV1-UL19-525 | − | UCCGCCGGCCCUGCAACCCC | 20 | 911 |
| HSV1-UL19-526 | − | CCGCCGGCCCUGCAACCCCC | 20 | 912 |
| HSV1-UL19-2280 | − | CAACCCCCGGGGACGCGCCG | 20 | 2535 |
| HSV1-UL19-528 | − | AACCCCCGGGGACGCGCCGC | 20 | 914 |
| HSV1-UL19-529 | − | ACCCCCGGGGACGCGCCGCC | 20 | 915 |
| HSV1-UL19-2283 | − | GCGCCGCCGGGGGCGUUUAC | 20 | 2536 |
| HSV1-UL19-532 | − | CGCCGCCGGGGGCGUUUACG | 20 | 918 |
| HSV1-UL19-533 | − | GCCGCCGGGGGCGUUUACGC | 20 | 919 |
| HSV1-UL19-534 | − | CCGCCGGGGGCGUUUACGCG | 20 | 920 |
| HSV1-UL19-2287 | − | GGGGCGUUUACGCGGGGGAC | 20 | 2537 |
| HSV1-UL19-536 | − | GGGCGUUUACGCGGGGGACA | 20 | 922 |
| HSV1-UL19-2289 | − | GCGUUUACGCGGGGGACAAG | 20 | 2538 |
| HSV1-UL19-537 | − | CGUUUACGCGGGGGACAAGG | 20 | 923 |
| HSV1-UL19-538 | − | GUUUACGCGGGGGACAAGGA | 20 | 924 |
| HSV1-UL19-539 | − | UUUACGCGGGGGACAAGGAG | 20 | 925 |
| HSV1-UL19-2293 | − | CCCUCAUGUACGACCACGGC | 20 | 2539 |
| HSV1-UL19-2294 | − | CACGGCCAGAGCGACCCGUC | 20 | 2540 |
| HSV1-UL19-2295 | − | UUCGCGGCCACGGCCAACCC | 20 | 2541 |
| HSV1-UL19-2296 | − | GGCGUCGCAGCGAUUUUCGU | 20 | 2542 |
| HSV1-UL19-548 | − | GCGUCGCAGCGAUUUUCGUA | 20 | 934 |
| HSV1-UL19-549 | − | CGUCGCAGCGAUUUUCGUAC | 20 | 935 |
| HSV1-UL19-2299 | − | GUACGGGGACCUGCUCUAUA | 20 | 2543 |
| HSV1-UL19-551 | − | UACGGGGACCUGCUCUAUAA | 20 | 937 |
| HSV1-UL19-2301 | − | UAACGGGGCCUACCACCUCA | 20 | 2544 |
| HSV1-UL19-554 | − | AACGGGGCCUACCACCUCAA | 20 | 940 |
| HSV1-UL19-2303 | − | UCGCCGCCAAACAUCGCUGC | 20 | 2545 |
| HSV1-UL19-559 | − | CGCCGCCAAACAUCGCUGCC | 20 | 945 |
| HSV1-UL19-2305 | − | GCUGCCUGGAGCGCCUGAUC | 20 | 2546 |
| HSV1-UL19-560 | − | CUGCCUGGAGCGCCUGAUCG | 20 | 946 |
| HSV1-UL19-2307 | − | UGGAGCGCCUGAUCGUGGAG | 20 | 2547 |
| HSV1-UL19-2308 | − | ACGUACAGUUUAAGCGCCCC | 20 | 2548 |
| HSV1-UL19-566 | − | CGUACAGUUUAAGCGCCCCC | 20 | 952 |
| HSV1-UL19-2310 | − | UAAGCGCCCCCCGGGGUGCC | 20 | 2549 |
| HSV1-UL19-2311 | − | CCCCGGGGUGCCGCGAACUC | 20 | 2550 |
| HSV1-UL19-569 | − | CCCGGGGUGCCGCGAACUCG | 20 | 955 |
| HSV1-UL19-2313 | − | CGGGGUGCCGCGAACUCGUG | 20 | 2551 |
| HSV1-UL19-2314 | − | AGGACCCGUGUGGCCUGUUU | 20 | 2552 |
| HSV1-UL19-572 | − | GGACCCGUGUGGCCUGUUUC | 20 | 958 |
| HSV1-UL19-2316 | − | CCUCCUCCGCAGUGCCCGCA | 20 | 2553 |
| HSV1-UL19-574 | − | CUCCUCCGCAGUGCCCGCAA | 20 | 960 |
| HSV1-UL19-575 | − | UCCUCCGCAGUGCCCGCAAC | 20 | 961 |
| HSV1-UL19-576 | − | CCUCCGCAGUGCCCGCAACG | 20 | 962 |
| HSV1-UL19-2320 | − | CGCAACGGGGAAGCCCACGC | 20 | 2554 |
| HSV1-UL19-577 | − | GCAACGGGGAAGCCCACGCG | 20 | 963 |
| HSV1-UL19-578 | − | CAACGGGGAAGCCCACGCGC | 20 | 964 |
| HSV1-UL19-2323 | − | UCUAUGACGCAUCCCCGCUC | 20 | 2555 |
| HSV1-UL19-579 | − | CUAUGACGCAUCCCCGCUCA | 20 | 965 |
| HSV1-UL19-582 | − | AACGUCCAGGCCGUCCU | 17 | 968 |
| HSV1-UL19-2326 | − | GGCCGUCCUCGGGGCGU | 17 | 2556 |
| HSV1-UL19-2327 | − | AGAUGCUGCACGUGCUG | 17 | 2557 |
| HSV1-UL19-587 | − | GAUGCUGCACGUGCUGC | 17 | 973 |
| HSV1-UL19-2329 | − | UGCCGAUGCAACGAUAC | 17 | 2558 |
| HSV1-UL19-2330 | − | AACGGCCGCCUGGCCAC | 17 | 2559 |
| HSV1-UL19-2331 | − | CUGGCCACCAGGGUGGC | 17 | 2560 |
| HSV1-UL19-2332 | − | CCGGGCGACCCUGGUCG | 17 | 2561 |
| HSV1-UL19-2333 | − | CUGGUCGCCGAGCUAAA | 17 | 2562 |
| HSV1-UL19-2334 | − | GCUAAAGCGAAGCUUCU | 17 | 2563 |
| HSV1-UL19-2335 | − | AGCGAAGCUUCUGCGAG | 17 | 2564 |
| HSV1-UL19-2336 | − | GCGAGACGAGCUUUUUC | 17 | 2565 |
| HSV1-UL19-2337 | − | GCUUUUUCCUGGGCAAG | 17 | 2566 |
| HSV1-UL19-2338 | − | GGCAAGGCGGGCCACCG | 17 | 2567 |
| HSV1-UL19-604 | − | GCAAGGCGGGCCACCGC | 17 | 990 |
| HSV1-UL19-605 | − | CAAGGCGGGCCACCGCC | 17 | 991 |
| HSV1-UL19-2341 | − | CCACCGCCGGGAGGCCG | 17 | 2568 |
| HSV1-UL19-2342 | − | CCGUCGAGGCCUGGCUC | 17 | 2569 |
| HSV1-UL19-2343 | − | GACGCAUGCCGACACGC | 17 | 2570 |
| HSV1-UL19-2344 | − | GCGCGGGCGGCCGGUCG | 17 | 2571 |
| HSV1-UL19-616 | − | CGCGGGCGGCCGGUCGA | 17 | 1002 |
| HSV1-UL19-2346 | − | GCCUCCUGCAGUCCUUC | 17 | 2572 |
| HSV1-UL19-2347 | − | UGCAGUCCUUCCUGAAA | 17 | 2573 |
| HSV1-UL19-619 | − | GCAGUCCUUCCUGAAAG | 17 | 1005 |
| HSV1-UL19-2349 | − | AGUCCUUCCUGAAAGUG | 17 | 2574 |
| HSV1-UL19-2350 | − | CCUGAAAGUGGAGGACA | 17 | 2575 |
| HSV1-UL19-2351 | − | CGUGCCGGUGACGUACG | 17 | 2576 |
| HSV1-UL19-2352 | − | CGUACGGCGAGAUGGUC | 17 | 2577 |
| HSV1-UL19-2353 | − | CGGCGAGAUGGUCCUGA | 17 | 2578 |
| HSV1-UL19-624 | − | GGCGAGAUGGUCCUGAA | 17 | 1010 |
| HSV1-UL19-2355 | − | UGGUCACGGCGCUCGUG | 17 | 2579 |
| HSV1-UL19-2356 | − | GUGAUGGGCAAGGCCGU | 17 | 2580 |
| HSV1-UL19-2357 | − | GCAAGGCCGUGCGAAGU | 17 | 2581 |
| HSV1-UL19-2358 | − | UGCGAAGUCUGGACGAC | 17 | 2582 |
| HSV1-UL19-2359 | − | ACGUGGGCCGCCACCUG | 17 | 2583 |
| HSV1-UL19-635 | − | CGUGGGCCGCCACCUGC | 17 | 1021 |
| HSV1-UL19-2361 | − | GCCACCUGCUGGAGAUG | 17 | 2584 |
| HSV1-UL19-636 | − | CCACCUGCUGGAGAUGC | 17 | 1022 |
| HSV1-UL19-2363 | − | ACCUGCUGGAGAUGCAG | 17 | 2585 |
| HSV1-UL19-637 | − | CCUGCUGGAGAUGCAGG | 17 | 1023 |
| HSV1-UL19-2365 | − | AGGAGGAGCAGCUCGAC | 17 | 2586 |
| HSV1-UL19-2366 | − | ACCUGAACCGGCAGACG | 17 | 2587 |
| HSV1-UL19-2367 | − | GAACCGGCAGACGCUGG | 17 | 2588 |
| HSV1-UL19-2368 | − | GCAGACGCUGGACGAGC | 17 | 2589 |
| HSV1-UL19-2369 | − | AGACGCUGGACGAGCUC | 17 | 2590 |
| HSV1-UL19-2370 | − | AGACGACGCGCGUGCGC | 17 | 2591 |
| HSV1-UL19-2371 | − | GGAUCUGGUGUCCAUCG | 17 | 2592 |
| HSV1-UL19-2372 | − | AUCUGGUGUCCAUCGGC | 17 | 2593 |
| HSV1-UL19-2373 | − | GCGAGAAGCUGGUCUUU | 17 | 2594 |
| HSV1-UL19-644 | − | CGAGAAGCUGGUCUUUC | 17 | 1030 |
| HSV1-UL19-2375 | − | UGGUCUUUCUGGAGGCC | 17 | 2595 |
| HSV1-UL19-646 | − | GGUCUUUCUGGAGGCCC | 17 | 1032 |
| HSV1-UL19-2377 | − | UCUUUCUGGAGGCCCUG | 17 | 2596 |
| HSV1-UL19-2378 | − | ACGUUCCCUACCCCCUG | 17 | 2597 |
| HSV1-UL19-2379 | − | ACCCCCUGGUGGGCGCC | 17 | 2598 |
| HSV1-UL19-2380 | − | UGACGUUCGUCCUGCCC | 17 | 2599 |
| HSV1-UL19-2381 | − | GCCUGUUCAAUCCGGUC | 17 | 2600 |
| HSV1-UL19-654 | − | CCUGUUCAAUCCGGUCA | 17 | 1040 |
| HSV1-UL19-2383 | − | ACGGUUUGCCGCGCACG | 17 | 2601 |
| HSV1-UL19-656 | − | CGGUUUGCCGCGCACGC | 17 | 1042 |
| HSV1-UL19-657 | − | GGUUUGCCGCGCACGCC | 17 | 1043 |
| HSV1-UL19-2386 | − | UCCCCGCCCCCGGCCAC | 17 | 2602 |
| HSV1-UL19-2387 | − | CCCCGCCAGCUGUUUUU | 17 | 2603 |
| HSV1-UL19-661 | − | CCCGCCAGCUGUUUUUU | 17 | 1047 |
| HSV1-UL19-662 | − | CCGCCAGCUGUUUUUUU | 17 | 1048 |
| HSV1-UL19-663 | − | CGCCAGCUGUUUUUUUG | 17 | 1049 |
| HSV1-UL19-664 | − | GCCAGCUGUUUUUUUGG | 17 | 1050 |
| HSV1-UL19-2392 | − | AGCUGUUUUUUUGGGGG | 17 | 2604 |
| HSV1-UL19-2393 | − | AGGUGCUGCGCCUGUCU | 17 | 2605 |
| HSV1-UL19-667 | − | GGUGCUGCGCCUGUCUC | 17 | 1053 |
| HSV1-UL19-2395 | − | GUCUCUGGAACACGCGA | 17 | 2606 |
| HSV1-UL19-668 | − | UCUCUGGAACACGCGAU | 17 | 1054 |
| HSV1-UL19-2397 | − | UGUGCCACCCUUCGCUG | 17 | 2607 |
| HSV1-UL19-2398 | − | GAACGUUGACGCGGCGG | 17 | 2608 |
| HSV1-UL19-672 | − | AACGUUGACGCGGCGGU | 17 | 1058 |
| HSV1-UL19-673 | − | ACGUUGACGCGGCGGUC | 17 | 1059 |
| HSV1-UL19-2401 | − | CCUUAACCGCGACCCCG | 17 | 2609 |
| HSV1-UL19-2402 | − | CGAAGCCGCCAAUCCGU | 17 | 2610 |
| HSV1-UL19-676 | − | GAAGCCGCCAAUCCGUA | 17 | 1062 |
| HSV1-UL19-2404 | − | ACAUGCAGCAGCUGUUU | 17 | 2611 |
| HSV1-UL19-2405 | − | CAGCUGUUUUUGAACGC | 17 | 2612 |
| HSV1-UL19-683 | − | AGCUGUUUUUGAACGCC | 17 | 1069 |
| HSV1-UL19-684 | − | GCUGUUUUUGAACGCCU | 17 | 1070 |
| HSV1-UL19-2408 | − | GGGGCAGCGCCUGGCCC | 17 | 2613 |
| HSV1-UL19-2409 | − | CAGCGCCUGGCCCACGG | 17 | 2614 |
| HSV1-UL19-2410 | − | GCCCACGGGCGGGUCCG | 17 | 2615 |
| HSV1-UL19-2411 | − | GGCGGGUCCGAUGGGUC | 17 | 2616 |
| HSV1-UL19-694 | − | GCGGGUCCGAUGGGUCG | 17 | 1080 |
| HSV1-UL19-2413 | − | CGGAAGGCCAGAUGACC | 17 | 2617 |
| HSV1-UL19-696 | − | GGAAGGCCAGAUGACCC | 17 | 1082 |
| HSV1-UL19-2415 | − | CAACGCCAACCUGGCUC | 17 | 2618 |
| HSV1-UL19-2416 | − | CCGCGUUCGACUUCUUU | 17 | 2619 |
| HSV1-UL19-698 | − | CGCGUUCGACUUCUUUG | 17 | 1084 |
| HSV1-UL19-699 | − | GCGUUCGACUUCUUUGU | 17 | 1085 |
| HSV1-UL19-2419 | − | UUGUGGGGGUGGCCGAC | 17 | 2620 |
| HSV1-UL19-703 | − | UGUGGGGGUGGCCGACG | 17 | 1089 |
| HSV1-UL19-2421 | − | UGGCCGACGUGGAGCUG | 17 | 2621 |
| HSV1-UL19-704 | − | GGCCGACGUGGAGCUGC | 17 | 1090 |
| HSV1-UL19-705 | − | GCCGACGUGGAGCUGCC | 17 | 1091 |
| HSV1-UL19-706 | − | CCGACGUGGAGCUGCCG | 17 | 1092 |
| HSV1-UL19-707 | − | CGACGUGGAGCUGCCGG | 17 | 1093 |
| HSV1-UL19-708 | − | GACGUGGAGCUGCCGGG | 17 | 1094 |
| HSV1-UL19-709 | − | ACGUGGAGCUGCCGGGG | 17 | 1095 |
| HSV1-UL19-2428 | − | ACGUUCCCCCGGCCGGC | 17 | 2622 |
| HSV1-UL19-713 | − | CGUUCCCCCGGCCGGCC | 17 | 1099 |
| HSV1-UL19-714 | − | GUUCCCCCGGCCGGCCC | 17 | 1100 |
| HSV1-UL19-715 | − | UUCCCCCGGCCGGCCCG | 17 | 1101 |
| HSV1-UL19-716 | − | UCCCCCGGCCGGCCCGG | 17 | 1102 |
| HSV1-UL19-2433 | − | AGGCCACCUGGCGCGUG | 17 | 2623 |
| HSV1-UL19-2434 | − | CUAUGUCCGGCGGCGUU | 17 | 2624 |
| HSV1-UL19-724 | − | UAUGUCCGGCGGCGUUC | 17 | 1110 |
| HSV1-UL19-2436 | − | GCGGCGUUCCGGGACGC | 17 | 2625 |
| HSV1-UL19-726 | − | CGGCGUUCCGGGACGCC | 17 | 1112 |
| HSV1-UL19-2438 | − | UCCGGGACGCCCGGGGC | 17 | 2626 |
| HSV1-UL19-729 | − | CCGGGACGCCCGGGGCC | 17 | 1115 |
| HSV1-UL19-2440 | − | ACGCCCGGGGCCUGGAG | 17 | 2627 |
| HSV1-UL19-730 | − | CGCCCGGGGCCUGGAGC | 17 | 1116 |
| HSV1-UL19-731 | − | GCCCGGGGCCUGGAGCU | 17 | 1117 |
| HSV1-UL19-2443 | − | GGGGCCUGGAGCUGGGG | 17 | 2628 |
| HSV1-UL19-734 | − | GGGCCUGGAGCUGGGGG | 17 | 1120 |
| HSV1-UL19-2445 | − | CACCAUCGCCGCCGUUC | 17 | 2629 |
| HSV1-UL19-737 | − | ACCAUCGCCGCCGUUCG | 17 | 1123 |
| HSV1-UL19-2447 | − | GGCCGCCAUACACGGCA | 17 | 2630 |
| HSV1-UL19-2448 | − | CAGUGCAUCACCAGCUA | 17 | 2631 |
| HSV1-UL19-747 | − | AGUGCAUCACCAGCUAC | 17 | 1133 |
| HSV1-UL19-2450 | − | CGCGGUGCGCGGCGUUC | 17 | 2632 |
| HSV1-UL19-2451 | − | GUACGUCGUGACCUACC | 17 | 2633 |
| HSV1-UL19-751 | − | UACGUCGUGACCUACCU | 17 | 1137 |
| HSV1-UL19-752 | − | ACGUCGUGACCUACCUC | 17 | 1138 |
| HSV1-UL19-753 | − | CGUCGUGACCUACCUCG | 17 | 1139 |
| HSV1-UL19-754 | − | GUCGUGACCUACCUCGG | 17 | 1140 |
| HSV1-UL19-2456 | − | CCUCGGGGGAGACCUUC | 17 | 2634 |
| HSV1-UL19-2457 | − | UCGGGGGAGACCUUCCC | 17 | 2635 |
| HSV1-UL19-755 | − | CGGGGGAGACCUUCCCG | 17 | 1141 |
| HSV1-UL19-2459 | − | GAGUGCAUGGCCGUGUA | 17 | 2636 |
| HSV1-UL19-757 | − | AGUGCAUGGCCGUGUAC | 17 | 1143 |
| HSV1-UL19-2461 | − | GGACCUGGUGGCGCACG | 17 | 2637 |
| HSV1-UL19-2462 | − | ACUUUACCCUGACCGGC | 17 | 2638 |
| HSV1-UL19-765 | − | CUUUACCCUGACCGGCC | 17 | 1151 |
| HSV1-UL19-2464 | − | CCCUGACCGGCCCGGAG | 17 | 2639 |
| HSV1-UL19-2465 | − | GACCGGCCCGGAGCUGG | 17 | 2640 |
| HSV1-UL19-2466 | − | GGGCGGGCAGGCGCAAG | 17 | 2641 |
| HSV1-UL19-2467 | − | GGCAGGCGCAAGCCGAG | 17 | 2642 |
| HSV1-UL19-2468 | − | GAGCUGAAUCACCUAAU | 17 | 2643 |
| HSV1-UL19-2469 | − | CUGCUGCCACCCCUCGU | 17 | 2644 |
| HSV1-UL19-772 | − | UGCUGCCACCCCUCGUG | 17 | 1158 |
| HSV1-UL19-2471 | − | UGAUGCGGCGCGCGGCC | 17 | 2645 |
| HSV1-UL19-2472 | − | GACCGCCAUCGCGACUG | 17 | 2646 |
| HSV1-UL19-2473 | − | GCGACUGCCGGGUUAGC | 17 | 2647 |
| HSV1-UL19-779 | − | CGACUGCCGGGUUAGCG | 17 | 1165 |
| HSV1-UL19-780 | − | GACUGCCGGGUUAGCGC | 17 | 1166 |
| HSV1-UL19-781 | − | ACUGCCGGGUUAGCGCG | 17 | 1167 |
| HSV1-UL19-2477 | − | CAUGUAACGUGGCGACC | 17 | 2648 |
| HSV1-UL19-2478 | − | CUGCACAACACCCAGGC | 17 | 2649 |
| HSV1-UL19-2479 | − | ACACCCAGGCCCGAGCC | 17 | 2650 |
| HSV1-UL19-2480 | − | CCCGAGCCGCGGACGCC | 17 | 2651 |
| HSV1-UL19-2481 | − | GCGGAUGACCGGCCGCA | 17 | 2652 |
| HSV1-UL19-793 | − | CGGAUGACCGGCCGCAC | 17 | 1179 |
| HSV1-UL19-794 | − | GGAUGACCGGCCGCACC | 17 | 1180 |
| HSV1-UL19-795 | − | GAUGACCGGCCGCACCG | 17 | 1181 |
| HSV1-UL19-2485 | − | ACCGGCCGCACCGGGGG | 17 | 2653 |
| HSV1-UL19-2486 | − | CCGCACCGGGGGGCGGA | 17 | 2654 |
| HSV1-UL19-2487 | − | AUGGUGCCCGCCUUCUC | 17 | 2655 |
| HSV1-UL19-801 | − | UGGUGCCCGCCUUCUCG | 17 | 1187 |
| HSV1-UL19-2489 | − | GGGGCCGCUGCUGCACC | 17 | 2656 |
| HSV1-UL19-804 | − | GGGCCGCUGCUGCACCG | 17 | 1190 |
| HSV1-UL19-805 | − | GGCCGCUGCUGCACCGC | 17 | 1191 |
| HSV1-UL19-2492 | − | GCGUAUACGCCACCCUG | 17 | 2657 |
| HSV1-UL19-2493 | − | UGCAGAACAUGGUGGUC | 17 | 2658 |
| HSV1-UL19-810 | − | GCAGAACAUGGUGGUCC | 17 | 1196 |
| HSV1-UL19-2495 | − | CCCGGAGAUCGCCCCCG | 17 | 2659 |
| HSV1-UL19-2496 | − | CGGAGAUCGCCCCCGGC | 17 | 2660 |
| HSV1-UL19-812 | − | GGAGAUCGCCCCCGGCG | 17 | 1198 |
| HSV1-UL19-2498 | − | GCCCCAGCGACCCCGUG | 17 | 2661 |
| HSV1-UL19-2499 | − | CAACGCCAUGUUUCACA | 17 | 2662 |
| HSV1-UL19-2500 | − | ACAACGGGCGCGUGGUA | 17 | 2663 |
| HSV1-UL19-2501 | − | CGGGCGCGUGGUAGUGG | 17 | 2664 |
| HSV1-UL19-2502 | − | GCUGGCCCACAACAUGG | 17 | 2665 |
| HSV1-UL19-2503 | − | GCUCGGCGGCGCCCGAC | 17 | 2666 |
| HSV1-UL19-2504 | − | CAACAUGCGCAUAUUCG | 17 | 2667 |
| HSV1-UL19-832 | − | AACAUGCGCAUAUUCGA | 17 | 1218 |
| HSV1-UL19-2506 | − | CGACGGGGCGUUGCACG | 17 | 2668 |
| HSV1-UL19-835 | − | GACGGGGCGUUGCACGC | 17 | 1221 |
| HSV1-UL19-2508 | − | UGAUGGCCCCCCAGCAU | 17 | 2669 |
| HSV1-UL19-2509 | − | CGUCCACGCGCUGUUCG | 17 | 2670 |
| HSV1-UL19-839 | − | GUCCACGCGCUGUUCGC | 17 | 1225 |
| HSV1-UL19-2511 | − | CCGGGGCCGACCACGUG | 17 | 2671 |
| HSV1-UL19-2512 | − | CCCUGGUCCCCCCGGCU | 17 | 2672 |
| HSV1-UL19-848 | − | CCUGGUCCCCCCGGCUC | 17 | 1234 |
| HSV1-UL19-849 | − | CUGGUCCCCCCGGCUCU | 17 | 1235 |
| HSV1-UL19-2515 | − | CGUCGUGCAGCACGUCC | 17 | 2673 |
| HSV1-UL19-2516 | − | UCGUGCAGCACGUCCGC | 17 | 2674 |
| HSV1-UL19-2517 | − | CGUCCGCGAGAGCGCGG | 17 | 2675 |
| HSV1-UL19-853 | − | GUCCGCGAGAGCGCGGC | 17 | 1239 |
| HSV1-UL19-854 | − | UCCGCGAGAGCGCGGCC | 17 | 1240 |
| HSV1-UL19-855 | − | CCGCGAGAGCGCGGCCG | 17 | 1241 |
| HSV1-UL19-2521 | − | GCGAGAGCGCGGCCGGG | 17 | 2676 |
| HSV1-UL19-2522 | − | UGACCUACGCGCUCAUG | 17 | 2677 |
| HSV1-UL19-857 | − | GACCUACGCGCUCAUGG | 17 | 1243 |
| HSV1-UL19-2524 | − | UGCAUCAUCAGCUCAAG | 17 | 2678 |
| HSV1-UL19-2525 | − | CAAGACGGGCCUCCAUC | 17 | 2679 |
| HSV1-UL19-2526 | − | GGGCCUCCAUCCCGGGU | 17 | 2680 |
| HSV1-UL19-2527 | − | GGUUCACCGUCGUCCGA | 17 | 2681 |
| HSV1-UL19-2528 | − | ACAGGACCGCUUUGUGA | 17 | 2682 |
| HSV1-UL19-2529 | − | AGGACCGCUUUGUGACU | 17 | 2683 |
| HSV1-UL19-2530 | − | CUGAGAACGUGCUGUUC | 17 | 2684 |
| HSV1-UL19-868 | − | UGAGAACGUGCUGUUCU | 17 | 1254 |
| HSV1-UL19-2532 | − | UGUUCUCGGAGCGCGCG | 17 | 2685 |
| HSV1-UL19-869 | − | GUUCUCGGAGCGCGCGU | 17 | 1255 |
| HSV1-UL19-2534 | − | CGUCGGAGGCGUACUUC | 17 | 2686 |
| HSV1-UL19-2535 | − | GCUCCAGGUGGCCCGGC | 17 | 2687 |
| HSV1-UL19-2536 | − | GGCCCGGCACGAAACUG | 17 | 2688 |
| HSV1-UL19-877 | − | GCCCGGCACGAAACUGG | 17 | 1263 |
| HSV1-UL19-878 | − | CCCGGCACGAAACUGGC | 17 | 1264 |
| HSV1-UL19-879 | − | CCGGCACGAAACUGGCG | 17 | 1265 |
| HSV1-UL19-880 | − | CGGCACGAAACUGGCGG | 17 | 1266 |
| HSV1-UL19-2541 | − | CGCUCACCCAGCCGCGC | 17 | 2689 |
| HSV1-UL19-2542 | − | CCCAGCCGCGCGCGAAC | 17 | 2690 |
| HSV1-UL19-2543 | − | CGCGCGCGAACGUGGAC | 17 | 2691 |
| HSV1-UL19-2544 | − | CGAACGUGGACCUGGGC | 17 | 2692 |
| HSV1-UL19-2545 | − | GCAACCCCGUCACCGAC | 17 | 2693 |
| HSV1-UL19-2546 | − | UUCCCCAAAACUUUUAC | 17 | 2694 |
| HSV1-UL19-2547 | − | AAACUUUUACCUGGGCC | 17 | 2695 |
| HSV1-UL19-894 | − | AACUUUUACCUGGGCCG | 17 | 1280 |
| HSV1-UL19-2549 | − | GCGGGGCUCCCCCUCUC | 17 | 2696 |
| HSV1-UL19-2550 | − | GCGGCAGCCGUGUACCU | 17 | 2697 |
| HSV1-UL19-899 | − | CGGCAGCCGUGUACCUG | 17 | 1285 |
| HSV1-UL19-2552 | − | UGCGGAACGCGGUCGUG | 17 | 2698 |
| HSV1-UL19-902 | − | GCGGAACGCGGUCGUGG | 17 | 1288 |
| HSV1-UL19-903 | − | CGGAACGCGGUCGUGGC | 17 | 1289 |
| HSV1-UL19-2555 | − | UCGUGGCGGGAAACCGC | 17 | 2699 |
| HSV1-UL19-904 | − | CGUGGCGGGAAACCGCC | 17 | 1290 |
| HSV1-UL19-2557 | − | CCAGCCCGUCCCCGUGU | 17 | 2700 |
| HSV1-UL19-2558 | − | CCAGGUGCCGCGGCGCG | 17 | 2701 |
| HSV1-UL19-912 | − | CAGGUGCCGCGGCGCGC | 17 | 1298 |
| HSV1-UL19-2560 | − | UGCCGCGGCGCGCAGGG | 17 | 2702 |
| HSV1-UL19-2561 | − | CAGGGAUGGACCACGGC | 17 | 2703 |
| HSV1-UL19-2562 | − | CGGCCAGGACGCCGUGU | 17 | 2704 |
| HSV1-UL19-2563 | − | CGCCGGCCCUGCAACCC | 17 | 2705 |
| HSV1-UL19-918 | − | GCCGGCCCUGCAACCCC | 17 | 1304 |
| HSV1-UL19-919 | − | CCGGCCCUGCAACCCCC | 17 | 1305 |
| HSV1-UL19-2566 | − | CCCCCGGGGACGCGCCG | 17 | 2706 |
| HSV1-UL19-921 | − | CCCCGGGGACGCGCCGC | 17 | 1307 |
| HSV1-UL19-922 | − | CCCGGGGACGCGCCGCC | 17 | 1308 |
| HSV1-UL19-2569 | − | CCGCCGGGGGCGUUUAC | 17 | 2707 |
| HSV1-UL19-925 | − | CGCCGGGGGCGUUUACG | 17 | 1311 |
| HSV1-UL19-926 | − | GCCGGGGGCGUUUACGC | 17 | 1312 |
| HSV1-UL19-927 | − | CCGGGGGCGUUUACGCG | 17 | 1313 |
| HSV1-UL19-2573 | − | GCGUUUACGCGGGGGAC | 17 | 2708 |
| HSV1-UL19-929 | − | CGUUUACGCGGGGGACA | 17 | 1315 |
| HSV1-UL19-2575 | − | UUUACGCGGGGGACAAG | 17 | 2709 |
| HSV1-UL19-930 | − | UUACGCGGGGGACAAGG | 17 | 1316 |
| HSV1-UL19-931 | − | UACGCGGGGGACAAGGA | 17 | 1317 |
| HSV1-UL19-932 | − | ACGCGGGGGACAAGGAG | 17 | 1318 |
| HSV1-UL19-2579 | − | UCAUGUACGACCACGGC | 17 | 2710 |
| HSV1-UL19-2580 | − | GGCCAGAGCGACCCGUC | 17 | 2711 |
| HSV1-UL19-2581 | − | GCGGCCACGGCCAACCC | 17 | 2712 |
| HSV1-UL19-2582 | − | GUCGCAGCGAUUUUCGU | 17 | 2713 |
| HSV1-UL19-941 | − | UCGCAGCGAUUUUCGUA | 17 | 1327 |
| HSV1-UL19-942 | − | CGCAGCGAUUUUCGUAC | 17 | 1328 |
| HSV1-UL19-2585 | − | CGGGGACCUGCUCUAUA | 17 | 2714 |
| HSV1-UL19-944 | − | GGGGACCUGCUCUAUAA | 17 | 1330 |
| HSV1-UL19-2587 | − | CGGGGCCUACCACCUCA | 17 | 2715 |
| HSV1-UL19-947 | − | GGGGCCUACCACCUCAA | 17 | 1333 |
| HSV1-UL19-2589 | − | CCGCCAAACAUCGCUGC | 17 | 2716 |
| HSV1-UL19-952 | − | CGCCAAACAUCGCUGCC | 17 | 1338 |
| HSV1-UL19-2591 | − | GCCUGGAGCGCCUGAUC | 17 | 2717 |
| HSV1-UL19-953 | − | CCUGGAGCGCCUGAUCG | 17 | 1339 |
| HSV1-UL19-2593 | − | AGCGCCUGAUCGUGGAG | 17 | 2718 |
| HSV1-UL19-2594 | − | UACAGUUUAAGCGCCCC | 17 | 2719 |
| HSV1-UL19-959 | − | ACAGUUUAAGCGCCCCC | 17 | 1345 |
| HSV1-UL19-2596 | − | GCGCCCCCCGGGGUGCC | 17 | 2720 |
| HSV1-UL19-2597 | − | CGGGGUGCCGCGAACUC | 17 | 2721 |
| HSV1-UL19-962 | − | GGGGUGCCGCGAACUCG | 17 | 1348 |
| HSV1-UL19-2599 | − | GGUGCCGCGAACUCGUG | 17 | 2722 |
| HSV1-UL19-2600 | − | ACCCGUGUGGCCUGUUU | 17 | 2723 |
| HSV1-UL19-965 | − | CCCGUGUGGCCUGUUUC | 17 | 1351 |
| HSV1-UL19-2602 | − | CCUCCGCAGUGCCCGCA | 17 | 2724 |
| HSV1-UL19-967 | − | CUCCGCAGUGCCCGCAA | 17 | 1353 |
| HSV1-UL19-968 | − | UCCGCAGUGCCCGCAAC | 17 | 1354 |
| HSV1-UL19-969 | − | CCGCAGUGCCCGCAACG | 17 | 1355 |
| HSV1-UL19-2606 | − | AACGGGGAAGCCCACGC | 17 | 2725 |
| HSV1-UL19-970 | − | ACGGGGAAGCCCACGCG | 17 | 1356 |
| HSV1-UL19-971 | − | CGGGGAAGCCCACGCGC | 17 | 1357 |
| HSV1-UL19-2609 | − | AUGACGCAUCCCCGCUC | 17 | 2726 |
| HSV1-UL19-972 | − | UGACGCAUCCCCGCUCA | 17 | 1358 |
| HSV1-UL19-2611 | + | UCAAACGCCCCGAGGACGGC | 20 | 2727 |
| HSV1-UL19-2612 | + | GUGCCGCGCUCAAACGCCCC | 20 | 2728 |
| HSV1-UL19-2613 | + | CCGUGCCGCGCUCAAACGCC | 20 | 2729 |
| HSV1-UL19-983 | + | GCAUCGGCAACAACAAAGCC | 20 | 1369 |
| HSV1-UL19-2615 | + | UGCAUCGGCAACAACAAAGC | 20 | 2730 |
| HSV1-UL19-2616 | + | AGCUCGGCGACCAGGGUCGC | 20 | 2731 |
| HSV1-UL19-2617 | + | CUUCGCUUUAGCUCGGCGAC | 20 | 2732 |
| HSV1-UL19-2618 | + | CCAGGAAAAAGCUCGUCUCG | 20 | 2733 |
| HSV1-UL19-995 | + | GGCGGUGGCCCGCCUUGCCC | 20 | 1381 |
| HSV1-UL19-2620 | + | CGGCGGUGGCCCGCCUUGCC | 20 | 2734 |
| HSV1-UL19-2621 | + | GCGUGGCCGUGGUGAGGUCC | 20 | 2735 |
| HSV1-UL19-2622 | + | CGGAGGGCUGCGUGGCCGUG | 20 | 2736 |
| HSV1-UL19-2623 | + | UCAGACGGGGCACGGCCACG | 20 | 2737 |
| HSV1-UL19-1006 | + | CGUCAGACGGGGCACGGCCA | 20 | 1392 |
| HSV1-UL19-2625 | + | GCGUCAGACGGGGCACGGCC | 20 | 2738 |
| HSV1-UL19-1010 | + | GCGUGUCGGCAUGCGUCAGA | 20 | 1396 |
| HSV1-UL19-2627 | + | CGCGUGUCGGCAUGCGUCAG | 20 | 2739 |
| HSV1-UL19-2628 | + | GUUUGAUCGGGGCGGUGGUG | 20 | 2740 |
| HSV1-UL19-1017 | + | UGCAGGAGGCGCUGUUUGAU | 20 | 1403 |
| HSV1-UL19-2630 | + | CUGCAGGAGGCGCUGUUUGA | 20 | 2741 |
| HSV1-UL19-1019 | + | CCACUUUCAGGAAGGACUGC | 20 | 1405 |
| HSV1-UL19-2632 | + | UCCACUUUCAGGAAGGACUG | 20 | 2742 |
| HSV1-UL19-2633 | + | CGGUGUCCUCCACUUUCAGG | 20 | 2743 |
| HSV1-UL19-1021 | + | CUUCGGUGUCCUCCACUUUC | 20 | 1407 |
| HSV1-UL19-2635 | + | GCUUCGGUGUCCUCCACUUU | 20 | 2744 |
| HSV1-UL19-2636 | + | GUGACCAGGUUGGCCCCGUU | 20 | 2745 |
| HSV1-UL19-2637 | + | UUCGCACGGCCUUGCCCAUC | 20 | 2746 |
| HSV1-UL19-2638 | + | CCAGCGUCUGCCGGUUCAGG | 20 | 2747 |
| HSV1-UL19-2639 | + | GCGUCGUCUGGGGGGCGCUC | 20 | 2748 |
| HSV1-UL19-1036 | + | GCGCGCACGCGCGUCGUCUG | 20 | 1422 |
| HSV1-UL19-1037 | + | CGCGCGCACGCGCGUCGUCU | 20 | 1423 |
| HSV1-UL19-1038 | + | CCGCGCGCACGCGCGUCGUC | 20 | 1424 |
| HSV1-UL19-2643 | + | UCCGCGCGCACGCGCGUCGU | 20 | 2749 |
| HSV1-UL19-2644 | + | GAAAGACCAGCUUCUCGCCG | 20 | 2750 |
| HSV1-UL19-2645 | + | AUGCGCUUCUCCAGGGCCUC | 20 | 2751 |
| HSV1-UL19-2646 | + | GCGGCGUAGAUGCGCUUCUC | 20 | 2752 |
| HSV1-UL19-1045 | + | AUGGCGCCCACCAGGGGGUA | 20 | 1431 |
| HSV1-UL19-1046 | + | CAUGGCGCCCACCAGGGGGU | 20 | 1432 |
| HSV1-UL19-2649 | + | CCAUGGCGCCCACCAGGGGG | 20 | 2753 |
| HSV1-UL19-1049 | + | CAGGUCCAUGGCGCCCACCA | 20 | 1435 |
| HSV1-UL19-1050 | + | UCAGGUCCAUGGCGCCCACC | 20 | 1436 |
| HSV1-UL19-2652 | + | GUCAGGUCCAUGGCGCCCAC | 20 | 2754 |
| HSV1-UL19-2653 | + | UGAACAGGCCCAGGGGCAGG | 20 | 2755 |
| HSV1-UL19-2654 | + | GGAUUGAACAGGCCCAGGGG | 20 | 2756 |
| HSV1-UL19-1056 | + | UGACCGGAUUGAACAGGCCC | 20 | 1442 |
| HSV1-UL19-2656 | + | AUGACCGGAUUGAACAGGCC | 20 | 2757 |
| HSV1-UL19-2657 | + | CAAACCGUUCCAUGACCGGA | 20 | 2758 |
| HSV1-UL19-2658 | + | CGCGGCAAACCGUUCCAUGA | 20 | 2759 |
| HSV1-UL19-1063 | + | GGAUCCGGGUGGCCGGGGGC | 20 | 1449 |
| HSV1-UL19-1064 | + | GGGAUCCGGGUGGCCGGGGG | 20 | 1450 |
| HSV1-UL19-2661 | + | GGGGAUCCGGGUGGCCGGGG | 20 | 2760 |
| HSV1-UL19-1067 | + | GCGCGGGGAUCCGGGUGGCC | 20 | 1453 |
| HSV1-UL19-1068 | + | GGCGCGGGGAUCCGGGUGGC | 20 | 1454 |
| HSV1-UL19-2664 | + | AGGCGCGGGGAUCCGGGUGG | 20 | 2761 |
| HSV1-UL19-2665 | + | GGGCGGGAAGGCGCGGGGAU | 20 | 2762 |
| HSV1-UL19-1073 | + | CUGGCGGGGCGGGAAGGCGC | 20 | 1459 |
| HSV1-UL19-1074 | + | GCUGGCGGGGCGGGAAGGCG | 20 | 1460 |
| HSV1-UL19-2668 | + | AGCUGGCGGGGCGGGAAGGC | 20 | 2763 |
| HSV1-UL19-1076 | + | AAAAAAACAGCUGGCGGGGC | 20 | 1462 |
| HSV1-UL19-1077 | + | CAAAAAAACAGCUGGCGGGG | 20 | 1463 |
| HSV1-UL19-2671 | + | CCAAAAAAACAGCUGGCGGG | 20 | 2764 |
| HSV1-UL19-1080 | + | UCCCCCAAAAAAACAGCUGG | 20 | 1466 |
| HSV1-UL19-2673 | + | UUCCCCCAAAAAAACAGCUG | 20 | 2765 |
| HSV1-UL19-2674 | + | ACGGUCCCGAUCGCGUGUUC | 20 | 2766 |
| HSV1-UL19-2675 | + | CGCGUCAACGUUCAUCAGCG | 20 | 2767 |
| HSV1-UL19-2676 | + | CGCCGCGUCAACGUUCAUCA | 20 | 2768 |
| HSV1-UL19-1093 | + | GUACGGAUUGGCGGCUUCGA | 20 | 1479 |
| HSV1-UL19-2678 | + | CGUACGGAUUGGCGGCUUCG | 20 | 2769 |
| HSV1-UL19-2679 | + | GGCCGCCACGUACGCCCCGU | 20 | 2770 |
| HSV1-UL19-1099 | + | AUGUCUGCGGCGGGGCCGGC | 20 | 1485 |
| HSV1-UL19-2681 | + | CAUGUCUGCGGCGGGGCCGG | 20 | 2771 |
| HSV1-UL19-1103 | + | CAGCUGCUGCAUGUCUGCGG | 20 | 1489 |
| HSV1-UL19-2683 | + | ACAGCUGCUGCAUGUCUGCG | 20 | 2772 |
| HSV1-UL19-2684 | + | GCGACCCAUCGGACCCGCCC | 20 | 2773 |
| HSV1-UL19-2685 | + | AUCUGGCCUUCCGCGACCCA | 20 | 2774 |
| HSV1-UL19-1113 | + | UCGGGCUGCAUAAACUGCUC | 20 | 1499 |
| HSV1-UL19-2687 | + | GUCGGGCUGCAUAAACUGCU | 20 | 2775 |
| HSV1-UL19-2688 | + | CAAGAGCCAGGUUGGCGUUG | 20 | 2776 |
| HSV1-UL19-2689 | + | UCGAACGCGGGGUGCAGCUC | 20 | 2777 |
| HSV1-UL19-1120 | + | CCCCACAAAGAAGUCGAACG | 20 | 1506 |
| HSV1-UL19-2691 | + | CCCCCACAAAGAAGUCGAAC | 20 | 2778 |
| HSV1-UL19-2692 | + | CGGCCACCCCCACAAAGAAG | 20 | 2779 |
| HSV1-UL19-2693 | + | CCACGUCGGCCACCCCCACA | 20 | 2780 |
| HSV1-UL19-1123 | + | AUCUCCCCCGGGCCGGCCGG | 20 | 1509 |
| HSV1-UL19-1124 | + | GAUCUCCCCCGGGCCGGCCG | 20 | 1510 |
| HSV1-UL19-1125 | + | GGAUCUCCCCCGGGCCGGCC | 20 | 1511 |
| HSV1-UL19-1126 | + | UGGAUCUCCCCCGGGCCGGC | 20 | 1512 |
| HSV1-UL19-2698 | + | CUGGAUCUCCCCCGGGCCGG | 20 | 2781 |
| HSV1-UL19-2699 | + | CCAGGUGGCCUGGAUCUCCC | 20 | 2782 |
| HSV1-UL19-2700 | + | UUCACCACGCGCCAGGUGGC | 20 | 2783 |
| HSV1-UL19-1135 | + | ACGCCGCCGGACAUAGCGCC | 20 | 1521 |
| HSV1-UL19-2702 | + | AACGCCGCCGGACAUAGCGC | 20 | 2784 |
| HSV1-UL19-2703 | + | CCGGGCGUCCCGGAACGCCG | 20 | 2785 |
| HSV1-UL19-1137 | + | GCUCCAGGCCCCGGGCGUCC | 20 | 1523 |
| HSV1-UL19-2705 | + | AGCUCCAGGCCCCGGGCGUC | 20 | 2786 |
| HSV1-UL19-2706 | + | CCCACCCCCAGCUCCAGGCC | 20 | 2787 |
| HSV1-UL19-1145 | + | CGAACGGCGGCGAUGGUGGC | 20 | 1531 |
| HSV1-UL19-1146 | + | GCGAACGGCGGCGAUGGUGG | 20 | 1532 |
| HSV1-UL19-2709 | + | CGCGAACGGCGGCGAUGGUG | 20 | 2788 |
| HSV1-UL19-2710 | + | UUGCGGUCGUCGAACGCCCC | 20 | 2789 |
| HSV1-UL19-2711 | + | CCGCCGGGUAGUUGCGGUCG | 20 | 2790 |
| HSV1-UL19-2712 | + | CUGCAGCAGGUAAAACACCG | 20 | 2791 |
| HSV1-UL19-2713 | + | CCACGAGCCGGGCCAGGGCG | 20 | 2792 |
| HSV1-UL19-2714 | + | CACUGGACCACGAGCCGGGC | 20 | 2793 |
| HSV1-UL19-2715 | + | GUGAUGCACUGGACCACGAG | 20 | 2794 |
| HSV1-UL19-2716 | + | AGCUGGUGAUGCACUGGACC | 20 | 2795 |
| HSV1-UL19-2717 | + | UUCCAGUAGCUGGUGAUGCA | 20 | 2796 |
| HSV1-UL19-2718 | + | AGACCAGCGAGUAGUCGUUC | 20 | 2797 |
| HSV1-UL19-2719 | + | GGUCACGACGUACGAGACCA | 20 | 2798 |
| HSV1-UL19-2720 | + | CCCGAGGUAGGUCACGACGU | 20 | 2799 |
| HSV1-UL19-2721 | + | ACUCCUCGGGAAGGUCUCCC | 20 | 2800 |
| HSV1-UL19-1166 | + | UACACGGCCAUGCACUCCUC | 20 | 1552 |
| HSV1-UL19-1167 | + | GUACACGGCCAUGCACUCCU | 20 | 1553 |
| HSV1-UL19-2724 | + | GGUACACGGCCAUGCACUCC | 20 | 2801 |
| HSV1-UL19-2725 | + | AAGUCAUCAACCAGCUGGGC | 20 | 2802 |
| HSV1-UL19-2726 | + | AGGGUAAAGUCAUCAACCAG | 20 | 2803 |
| HSV1-UL19-2727 | + | CCGCCCAGCUCCGGGCCGGU | 20 | 2804 |
| HSV1-UL19-2728 | + | UUGCGCCUGCCCGCCCAGCU | 20 | 2805 |
| HSV1-UL19-2729 | + | CACGAGGGGUGGCAGCAGCG | 20 | 2806 |
| HSV1-UL19-1187 | + | GGGCGUCACAGUCCCACACG | 20 | 1573 |
| HSV1-UL19-2731 | + | AGGGCGUCACAGUCCCACAC | 20 | 2807 |
| HSV1-UL19-2732 | + | UCAGGGCGUCACAGUCCCAC | 20 | 2808 |
| HSV1-UL19-2733 | + | UCCAGGGCCGCGCGCCGCAU | 20 | 2809 |
| HSV1-UL19-2734 | + | CGGCAGUCGCGAUGGCGGUC | 20 | 2810 |
| HSV1-UL19-1198 | + | GUUACAUGCCGCCGCGUACA | 20 | 1584 |
| HSV1-UL19-2736 | + | CGUUACAUGCCGCCGCGUAC | 20 | 2811 |
| HSV1-UL19-2737 | + | GCAGCUGGCCGUCGUUGCGG | 20 | 2812 |
| HSV1-UL19-2738 | + | GCGGCGUCCGCGGCUCGGGC | 20 | 2813 |
| HSV1-UL19-2739 | + | UCAUCCGCGGCGUCCGCGGC | 20 | 2814 |
| HSV1-UL19-2740 | + | AGCAGCGGCCCCGCGAGAAG | 20 | 2815 |
| HSV1-UL19-2741 | + | CGGUGCAGCAGCGGCCCCGC | 20 | 2816 |
| HSV1-UL19-2742 | + | CGCGGUGCAGCAGCGGCCCC | 20 | 2817 |
| HSV1-UL19-2743 | + | GUGGCGUAUACGCGGUCGAA | 20 | 2818 |
| HSV1-UL19-2744 | + | GCAGGGUGGCGUAUACGCGG | 20 | 2819 |
| HSV1-UL19-2745 | + | UCCGGGACCACCAUGUUCUG | 20 | 2820 |
| HSV1-UL19-1223 | + | UCCUCGCCGGGGGCGAUCUC | 20 | 1609 |
| HSV1-UL19-2747 | + | CUCCUCGCCGGGGGCGAUCU | 20 | 2821 |
| HSV1-UL19-1226 | + | UCGCUGGGGCACUCCUCGCC | 20 | 1612 |
| HSV1-UL19-1227 | + | GUCGCUGGGGCACUCCUCGC | 20 | 1613 |
| HSV1-UL19-2750 | + | GGUCGCUGGGGCACUCCUCG | 20 | 2822 |
| HSV1-UL19-1230 | + | GGGGUCCGUCACGGGGUCGC | 20 | 1616 |
| HSV1-UL19-2752 | + | CGGGGUCCGUCACGGGGUCG | 20 | 2823 |
| HSV1-UL19-1233 | + | GGGGUGCGCGGGGUCCGUCA | 20 | 1619 |
| HSV1-UL19-2754 | + | GGGGGUGCGCGGGGUCCGUC | 20 | 2824 |
| HSV1-UL19-1236 | + | GGCCGGGUGCAGGGGGUGCG | 20 | 1622 |
| HSV1-UL19-2756 | + | UGGCCGGGUGCAGGGGGUGC | 20 | 2825 |
| HSV1-UL19-1239 | + | CACCAGAUUGGCCGGGUGCA | 20 | 1625 |
| HSV1-UL19-1240 | + | CCACCAGAUUGGCCGGGUGC | 20 | 1626 |
| HSV1-UL19-2759 | + | GCCACCAGAUUGGCCGGGUG | 20 | 2826 |
| HSV1-UL19-2760 | + | CGUGUUGGCCACCAGAUUGG | 20 | 2827 |
| HSV1-UL19-2761 | + | UCCACUACCACGCGCCCGUU | 20 | 2828 |
| HSV1-UL19-2762 | + | GCACCUGCAGCGUGAGCAUG | 20 | 2829 |
| HSV1-UL19-2763 | + | UGUGGGCCAGCACCUGCAGC | 20 | 2830 |
| HSV1-UL19-2764 | + | GUUGUGCGUUCGGCCAUGUU | 20 | 2831 |
| HSV1-UL19-2765 | + | CCGCGUCGGGCGCCGCCGAG | 20 | 2832 |
| HSV1-UL19-2766 | + | GGCGCCCGCGUCGGGCGCCG | 20 | 2833 |
| HSV1-UL19-2767 | + | ACGCGGUGUUGGCGCCCGCG | 20 | 2834 |
| HSV1-UL19-2768 | + | CGAAUAUGCGCAUGUUGGUG | 20 | 2835 |
| HSV1-UL19-2769 | + | UUCCGGCGUGCAACGCCCCG | 20 | 2836 |
| HSV1-UL19-2770 | + | AGAUGCUGGGGGGCCAUCAG | 20 | 2837 |
| HSV1-UL19-1263 | + | AUGGUAUGGUCCAGAUGCUG | 20 | 1649 |
| HSV1-UL19-1264 | + | GAUGGUAUGGUCCAGAUGCU | 20 | 1650 |
| HSV1-UL19-1265 | + | GGAUGGUAUGGUCCAGAUGC | 20 | 1651 |
| HSV1-UL19-2774 | + | UGGAUGGUAUGGUCCAGAUG | 20 | 2838 |
| HSV1-UL19-2775 | + | GGGUAAAAAUAGUCGCCAUU | 20 | 2839 |
| HSV1-UL19-1271 | + | GAACAGCGCGUGGACGGGGA | 20 | 1657 |
| HSV1-UL19-1272 | + | CGAACAGCGCGUGGACGGGG | 20 | 1658 |
| HSV1-UL19-2778 | + | GCGAACAGCGCGUGGACGGG | 20 | 2840 |
| HSV1-UL19-1273 | + | CGGCGAACAGCGCGUGGACG | 20 | 1659 |
| HSV1-UL19-1274 | + | CCGGCGAACAGCGCGUGGAC | 20 | 1660 |
| HSV1-UL19-1275 | + | CCCGGCGAACAGCGCGUGGA | 20 | 1661 |
| HSV1-UL19-2782 | + | CCCCGGCGAACAGCGCGUGG | 20 | 2841 |
| HSV1-UL19-2783 | + | UCGGCCCCGGCGAACAGCGC | 20 | 2842 |
| HSV1-UL19-2784 | + | UCGCCACGUGGUCGGCCCCG | 20 | 2843 |
| HSV1-UL19-2785 | + | CGCGCAGGGCCGGGGGGAAA | 20 | 2844 |
| HSV1-UL19-1282 | + | ACAGGUCGCGCAGGGCCGGG | 20 | 1668 |
| HSV1-UL19-1283 | + | GACAGGUCGCGCAGGGCCGG | 20 | 1669 |
| HSV1-UL19-1284 | + | CGACAGGUCGCGCAGGGCCG | 20 | 1670 |
| HSV1-UL19-1285 | + | GCGACAGGUCGCGCAGGGCC | 20 | 1671 |
| HSV1-UL19-1286 | + | CGCGACAGGUCGCGCAGGGC | 20 | 1672 |
| HSV1-UL19-2791 | + | CCGCGACAGGUCGCGCAGGG | 20 | 2845 |
| HSV1-UL19-2792 | + | ACCUGCCGCGACAGGUCGCG | 20 | 2846 |
| HSV1-UL19-1291 | + | CCCAGAGCCGGGGGGACCAG | 20 | 1677 |
| HSV1-UL19-1292 | + | CCCCAGAGCCGGGGGGACCA | 20 | 1678 |
| HSV1-UL19-1293 | + | CCCCCAGAGCCGGGGGGACC | 20 | 1679 |
| HSV1-UL19-2796 | + | GCCCCCAGAGCCGGGGGGAC | 20 | 2847 |
| HSV1-UL19-1295 | + | UAGUUGGCCCCCAGAGCCGG | 20 | 1681 |
| HSV1-UL19-1296 | + | GUAGUUGGCCCCCAGAGCCG | 20 | 1682 |
| HSV1-UL19-1297 | + | AGUAGUUGGCCCCCAGAGCC | 20 | 1683 |
| HSV1-UL19-1298 | + | AAGUAGUUGGCCCCCAGAGC | 20 | 1684 |
| HSV1-UL19-2801 | + | AAAGUAGUUGGCCCCCAGAG | 20 | 2848 |
| HSV1-UL19-2802 | + | GACGAAAAGUAGUUGGCCCC | 20 | 2849 |
| HSV1-UL19-2803 | + | CACGACGGGCUGUCGGAUCG | 20 | 2850 |
| HSV1-UL19-2804 | + | ACGUGCUGCACGACGGGCUG | 20 | 2851 |
| HSV1-UL19-2805 | + | UCUCGCGGACGUGCUGCACG | 20 | 2852 |
| HSV1-UL19-2806 | + | UUCUCCCCGGCCGCGCUCUC | 20 | 2853 |
| HSV1-UL19-2807 | + | UGAUCUUGAAGUACCCCGCC | 20 | 2854 |
| HSV1-UL19-2808 | + | GCAAGGCCACGGGACUGAUC | 20 | 2855 |
| HSV1-UL19-1307 | + | GAGCUGAUGAUGCAAGGCCA | 20 | 1693 |
| HSV1-UL19-2810 | + | UGAGCUGAUGAUGCAAGGCC | 20 | 2856 |
| HSV1-UL19-2811 | + | ACCCGGGAUGGAGGCCCGUC | 20 | 2857 |
| HSV1-UL19-1310 | + | CGGUGAACCCAAACCCGGGA | 20 | 1696 |
| HSV1-UL19-2813 | + | ACGGUGAACCCAAACCCGGG | 20 | 2858 |
| HSV1-UL19-1312 | + | GACGACGGUGAACCCAAACC | 20 | 1698 |
| HSV1-UL19-2815 | + | GGACGACGGUGAACCCAAAC | 20 | 2859 |
| HSV1-UL19-2816 | + | AGCGGUCCUGUCGGACGACG | 20 | 2860 |
| HSV1-UL19-2817 | + | UCAGUCACAAAGCGGUCCUG | 20 | 2861 |
| HSV1-UL19-2818 | + | ACGCCUCCGACGCGCGCUCC | 20 | 2862 |
| HSV1-UL19-2819 | + | GUACGCCUCCGACGCGCGCU | 20 | 2863 |
| HSV1-UL19-1316 | + | GGGCCACCUGGAGCUGGCCC | 20 | 1702 |
| HSV1-UL19-2821 | + | CGGGCCACCUGGAGCUGGCC | 20 | 2864 |
| HSV1-UL19-1318 | + | CAGUUUCGUGCCGGGCCACC | 20 | 1704 |
| HSV1-UL19-2823 | + | CCAGUUUCGUGCCGGGCCAC | 20 | 2865 |
| HSV1-UL19-2824 | + | ACCCCCCCGCCAGUUUCGUG | 20 | 2866 |
| HSV1-UL19-2825 | + | UCGCGCGCGGCUGGGUGAGC | 20 | 2867 |
| HSV1-UL19-2826 | + | CCACGUUCGCGCGCGGCUGG | 20 | 2868 |
| HSV1-UL19-2827 | + | AGGUCCACGUUCGCGCGCGG | 20 | 2869 |
| HSV1-UL19-2828 | + | CCCAUGUCGGUGACGGGGUU | 20 | 2870 |
| HSV1-UL19-1332 | + | AAGGUUGCCCAUGUCGGUGA | 20 | 1718 |
| HSV1-UL19-2830 | + | GAAGGUUGCCCAUGUCGGUG | 20 | 2871 |
| HSV1-UL19-1335 | + | CGGCCCAGGUAAAAGUUUUG | 20 | 1721 |
| HSV1-UL19-1336 | + | GCGGCCCAGGUAAAAGUUUU | 20 | 1722 |
| HSV1-UL19-1337 | + | CGCGGCCCAGGUAAAAGUUU | 20 | 1723 |
| HSV1-UL19-2834 | + | CCGCGGCCCAGGUAAAAGUU | 20 | 2872 |
| HSV1-UL19-1340 | + | GCCGCGUUGUCCAGGAGAGG | 20 | 1726 |
| HSV1-UL19-1341 | + | UGCCGCGUUGUCCAGGAGAG | 20 | 1727 |
| HSV1-UL19-1342 | + | CUGCCGCGUUGUCCAGGAGA | 20 | 1728 |
| HSV1-UL19-1343 | + | GCUGCCGCGUUGUCCAGGAG | 20 | 1729 |
| HSV1-UL19-2839 | + | GGCUGCCGCGUUGUCCAGGA | 20 | 2873 |
| HSV1-UL19-2840 | + | ACGGCUGCCGCGUUGUCCAG | 20 | 2874 |
| HSV1-UL19-1344 | + | ACACGGCUGCCGCGUUGUCC | 20 | 1730 |
| HSV1-UL19-2842 | + | UACACGGCUGCCGCGUUGUC | 20 | 2875 |
| HSV1-UL19-2843 | + | CACCCGAACACGGGGACGGG | 20 | 2876 |
| HSV1-UL19-2844 | + | GGGCGCACCCGAACACGGGG | 20 | 2877 |
| HSV1-UL19-1355 | + | ACCUGGGCGCACCCGAACAC | 20 | 1741 |
| HSV1-UL19-1356 | + | CACCUGGGCGCACCCGAACA | 20 | 1742 |
| HSV1-UL19-2847 | + | GCACCUGGGCGCACCCGAAC | 20 | 2878 |
| HSV1-UL19-2848 | + | GCCGCGGCACCUGGGCGCAC | 20 | 2879 |
| HSV1-UL19-2849 | + | AUCCCUGCGCGCCGCGGCAC | 20 | 2880 |
| HSV1-UL19-1366 | + | UAGUUGACGUCGGUCGACAC | 20 | 1752 |
| HSV1-UL19-1367 | + | GUAGUUGACGUCGGUCGACA | 20 | 1753 |
| HSV1-UL19-2852 | + | AGUAGUUGACGUCGGUCGAC | 20 | 2881 |
| HSV1-UL19-1369 | + | CCCGGGGGUUGCAGGGCCGG | 20 | 1755 |
| HSV1-UL19-2854 | + | CCCCGGGGGUUGCAGGGCCG | 20 | 2882 |
| HSV1-UL19-2855 | + | CGGCGCGUCCCCGGGGGUUG | 20 | 2883 |
| HSV1-UL19-1375 | + | GCCCCCGGCGGCGCGUCCCC | 20 | 1761 |
| HSV1-UL19-1376 | + | CGCCCCCGGCGGCGCGUCCC | 20 | 1762 |
| HSV1-UL19-2858 | + | ACGCCCCCGGCGGCGCGUCC | 20 | 2884 |
| HSV1-UL19-2859 | + | CUCUGGCCGUGGUCGUACAU | 20 | 2885 |
| HSV1-UL19-2860 | + | CGCUCUGGCCGUGGUCGUAC | 20 | 2886 |
| HSV1-UL19-2861 | + | CGUGGCCGCGAAGGCCCGGG | 20 | 2887 |
| HSV1-UL19-1387 | + | UGGCCGUGGCCGCGAAGGCC | 20 | 1773 |
| HSV1-UL19-2863 | + | UUGGCCGUGGCCGCGAAGGC | 20 | 2888 |
| HSV1-UL19-2864 | + | CCCACGGGUUGGCCGUGGCC | 20 | 2889 |
| HSV1-UL19-2865 | + | CGAAAAUCGCUGCGACGCCC | 20 | 2890 |
| HSV1-UL19-2866 | + | GUUAUAGAGCAGGUCCCCGU | 20 | 2891 |
| HSV1-UL19-2867 | + | UGAGGUGGUAGGCCCCGUUA | 20 | 2892 |
| HSV1-UL19-2868 | + | UGAGCACCGGCGAGGCCCCG | 20 | 2893 |
| HSV1-UL19-2869 | + | AAAGCAGGGGCUGAGCACCG | 20 | 2894 |
| HSV1-UL19-2870 | + | UAAAGAACUUAAAGCAGGGG | 20 | 2895 |
| HSV1-UL19-1401 | + | CGACGUAAAGAACUUAAAGC | 20 | 1787 |
| HSV1-UL19-2872 | + | CCGACGUAAAGAACUUAAAG | 20 | 2896 |
| HSV1-UL19-2873 | + | CGGCGAUGUCGGCCGACGUA | 20 | 2897 |
| HSV1-UL19-2874 | + | GGCGGUGGCCGUGGACACCG | 20 | 2898 |
| HSV1-UL19-2875 | + | CGUCGCUGGCGGCGGUGGCC | 20 | 2899 |
| HSV1-UL19-1414 | + | CACGAGUUCGCGGCACCCCG | 20 | 1800 |
| HSV1-UL19-1415 | + | CCACGAGUUCGCGGCACCCC | 20 | 1801 |
| HSV1-UL19-1416 | + | UCCACGAGUUCGCGGCACCC | 20 | 1802 |
| HSV1-UL19-2879 | + | CUCCACGAGUUCGCGGCACC | 20 | 2900 |
| HSV1-UL19-2880 | + | ACAGGCCACACGGGUCCUCC | 20 | 2901 |
| HSV1-UL19-2881 | + | GGCCUCCUGAAACAGGCCAC | 20 | 2902 |
| HSV1-UL19-2882 | + | CAGGUGAGCGGGUAGGCCUC | 20 | 2903 |
| HSV1-UL19-2883 | + | GGGGUCGCUGGCGCAGGUGA | 20 | 2904 |
| HSV1-UL19-2884 | + | GGGCGGGGUCGCUGGCGCAG | 20 | 2905 |
| HSV1-UL19-1428 | + | GCGGGCACUGCGGAGGAGGG | 20 | 1814 |
| HSV1-UL19-2886 | + | UGCGGGCACUGCGGAGGAGG | 20 | 2906 |
| HSV1-UL19-2887 | + | CCGUUGCGGGCACUGCGGAG | 20 | 2907 |
| HSV1-UL19-1431 | + | CCCCGUUGCGGGCACUGCGG | 20 | 1817 |
| HSV1-UL19-2889 | + | UCCCCGUUGCGGGCACUGCG | 20 | 2908 |
| HSV1-UL19-1432 | + | CUUCCCCGUUGCGGGCACUG | 20 | 1818 |
| HSV1-UL19-2891 | + | GCUUCCCCGUUGCGGGCACU | 20 | 2909 |
| HSV1-UL19-2892 | + | CGCGCGUGGGCUUCCCCGUU | 20 | 2910 |
| HSV1-UL19-2893 | + | GCGAAGUGGGUCUCCCGCGC | 20 | 2911 |
| HSV1-UL19-2894 | + | UAGACGAGAUACUGCGCGAA | 20 | 2912 |
| HSV1-UL19-2895 | + | CGUCAUAGACGAGAUACUGC | 20 | 2913 |
| HSV1-UL19-2896 | + | UGAGCGGGGAUGCGUCAUAG | 20 | 2914 |
| HSV1-UL19-1440 | + | ACAGAGCCAGUCCCUUGAGC | 20 | 1826 |
| HSV1-UL19-1441 | + | UACAGAGCCAGUCCCUUGAG | 20 | 1827 |
| HSV1-UL19-2899 | + | UUACAGAGCCAGUCCCUUGA | 20 | 2915 |
| HSV1-UL19-2900 | + | AACGCCCCGAGGACGGC | 17 | 2916 |
| HSV1-UL19-2901 | + | CCGCGCUCAAACGCCCC | 17 | 2917 |
| HSV1-UL19-2902 | + | UGCCGCGCUCAAACGCC | 17 | 2918 |
| HSV1-UL19-1450 | + | UCGGCAACAACAAAGCC | 17 | 1836 |
| HSV1-UL19-2904 | + | AUCGGCAACAACAAAGC | 17 | 2919 |
| HSV1-UL19-2905 | + | UCGGCGACCAGGGUCGC | 17 | 2920 |
| HSV1-UL19-2906 | + | CGCUUUAGCUCGGCGAC | 17 | 2921 |
| HSV1-UL19-2907 | + | GGAAAAAGCUCGUCUCG | 17 | 2922 |
| HSV1-UL19-1462 | + | GGUGGCCCGCCUUGCCC | 17 | 1848 |
| HSV1-UL19-2909 | + | CGGUGGCCCGCCUUGCC | 17 | 2923 |
| HSV1-UL19-2910 | + | UGGCCGUGGUGAGGUCC | 17 | 2924 |
| HSV1-UL19-2911 | + | AGGGCUGCGUGGCCGUG | 17 | 2925 |
| HSV1-UL19-2912 | + | GACGGGGCACGGCCACG | 17 | 2926 |
| HSV1-UL19-1473 | + | CAGACGGGGCACGGCCA | 17 | 1859 |
| HSV1-UL19-2914 | + | UCAGACGGGGCACGGCC | 17 | 2927 |
| HSV1-UL19-1477 | + | UGUCGGCAUGCGUCAGA | 17 | 1863 |
| HSV1-UL19-2916 | + | GUGUCGGCAUGCGUCAG | 17 | 2928 |
| HSV1-UL19-2917 | + | UGAUCGGGGCGGUGGUG | 17 | 2929 |
| HSV1-UL19-1484 | + | AGGAGGCGCUGUUUGAU | 17 | 1870 |
| HSV1-UL19-2919 | + | CAGGAGGCGCUGUUUGA | 17 | 2930 |
| HSV1-UL19-1486 | + | CUUUCAGGAAGGACUGC | 17 | 1872 |
| HSV1-UL19-2921 | + | ACUUUCAGGAAGGACUG | 17 | 2931 |
| HSV1-UL19-2922 | + | UGUCCUCCACUUUCAGG | 17 | 2932 |
| HSV1-UL19-1488 | + | CGGUGUCCUCCACUUUC | 17 | 1874 |
| HSV1-UL19-2924 | + | UCGGUGUCCUCCACUUU | 17 | 2933 |
| HSV1-UL19-2925 | + | ACCAGGUUGGCCCCGUU | 17 | 2934 |
| HSV1-UL19-2926 | + | GCACGGCCUUGCCCAUC | 17 | 2935 |
| HSV1-UL19-2927 | + | GCGUCUGCCGGUUCAGG | 17 | 2936 |
| HSV1-UL19-2928 | + | UCGUCUGGGGGGCGCUC | 17 | 2937 |
| HSV1-UL19-1503 | + | CGCACGCGCGUCGUCUG | 17 | 1889 |
| HSV1-UL19-1504 | + | GCGCACGCGCGUCGUCU | 17 | 1890 |
| HSV1-UL19-1505 | + | CGCGCACGCGCGUCGUC | 17 | 1891 |
| HSV1-UL19-2932 | + | GCGCGCACGCGCGUCGU | 17 | 2938 |
| HSV1-UL19-2933 | + | AGACCAGCUUCUCGCCG | 17 | 2939 |
| HSV1-UL19-2934 | + | CGCUUCUCCAGGGCCUC | 17 | 2940 |
| HSV1-UL19-2935 | + | GCGUAGAUGCGCUUCUC | 17 | 2941 |
| HSV1-UL19-1512 | + | GCGCCCACCAGGGGGUA | 17 | 1898 |
| HSV1-UL19-1513 | + | GGCGCCCACCAGGGGGU | 17 | 1899 |
| HSV1-UL19-2938 | + | UGGCGCCCACCAGGGGG | 17 | 2942 |
| HSV1-UL19-1516 | + | GUCCAUGGCGCCCACCA | 17 | 1902 |
| HSV1-UL19-1517 | + | GGUCCAUGGCGCCCACC | 17 | 1903 |
| HSV1-UL19-2941 | + | AGGUCCAUGGCGCCCAC | 17 | 2943 |
| HSV1-UL19-2942 | + | ACAGGCCCAGGGGCAGG | 17 | 2944 |
| HSV1-UL19-2943 | + | UUGAACAGGCCCAGGGG | 17 | 2945 |
| HSV1-UL19-1523 | + | CCGGAUUGAACAGGCCC | 17 | 1909 |
| HSV1-UL19-2945 | + | ACCGGAUUGAACAGGCC | 17 | 2946 |
| HSV1-UL19-2946 | + | ACCGUUCCAUGACCGGA | 17 | 2947 |
| HSV1-UL19-2947 | + | GGCAAACCGUUCCAUGA | 17 | 2948 |
| HSV1-UL19-1530 | + | UCCGGGUGGCCGGGGGC | 17 | 1916 |
| HSV1-UL19-1531 | + | AUCCGGGUGGCCGGGGG | 17 | 1917 |
| HSV1-UL19-2950 | + | GAUCCGGGUGGCCGGGG | 17 | 2949 |
| HSV1-UL19-1534 | + | CGGGGAUCCGGGUGGCC | 17 | 1920 |
| HSV1-UL19-1535 | + | GCGGGGAUCCGGGUGGC | 17 | 1921 |
| HSV1-UL19-2953 | + | CGCGGGGAUCCGGGUGG | 17 | 2950 |
| HSV1-UL19-2954 | + | CGGGAAGGCGCGGGGAU | 17 | 2951 |
| HSV1-UL19-1540 | + | GCGGGGCGGGAAGGCGC | 17 | 1926 |
| HSV1-UL19-1541 | + | GGCGGGGCGGGAAGGCG | 17 | 1927 |
| HSV1-UL19-2957 | + | UGGCGGGGCGGGAAGGC | 17 | 2952 |
| HSV1-UL19-1543 | + | AAAACAGCUGGCGGGGC | 17 | 1929 |
| HSV1-UL19-1544 | + | AAAAACAGCUGGCGGGG | 17 | 1930 |
| HSV1-UL19-2960 | + | AAAAAACAGCUGGCGGG | 17 | 2953 |
| HSV1-UL19-1547 | + | CCCAAAAAAACAGCUGG | 17 | 1933 |
| HSV1-UL19-2962 | + | CCCCAAAAAAACAGCUG | 17 | 2954 |
| HSV1-UL19-2963 | + | GUCCCGAUCGCGUGUUC | 17 | 2955 |
| HSV1-UL19-2964 | + | GUCAACGUUCAUCAGCG | 17 | 2956 |
| HSV1-UL19-2965 | + | CGCGUCAACGUUCAUCA | 17 | 2957 |
| HSV1-UL19-1560 | + | CGGAUUGGCGGCUUCGA | 17 | 1946 |
| HSV1-UL19-2967 | + | ACGGAUUGGCGGCUUCG | 17 | 2958 |
| HSV1-UL19-2968 | + | CGCCACGUACGCCCCGU | 17 | 2959 |
| HSV1-UL19-1566 | + | UCUGCGGCGGGGCCGGC | 17 | 1952 |
| HSV1-UL19-2970 | + | GUCUGCGGCGGGGCCGG | 17 | 2960 |
| HSV1-UL19-1570 | + | CUGCUGCAUGUCUGCGG | 17 | 1956 |
| HSV1-UL19-2972 | + | GCUGCUGCAUGUCUGCG | 17 | 2961 |
| HSV1-UL19-2973 | + | ACCCAUCGGACCCGCCC | 17 | 2962 |
| HSV1-UL19-2974 | + | UGGCCUUCCGCGACCCA | 17 | 2963 |
| HSV1-UL19-1580 | + | GGCUGCAUAAACUGCUC | 17 | 1966 |
| HSV1-UL19-2976 | + | GGGCUGCAUAAACUGCU | 17 | 2964 |
| HSV1-UL19-2977 | + | GAGCCAGGUUGGCGUUG | 17 | 2965 |
| HSV1-UL19-2978 | + | AACGCGGGGUGCAGCUC | 17 | 2966 |
| HSV1-UL19-1587 | + | CACAAAGAAGUCGAACG | 17 | 1973 |
| HSV1-UL19-2980 | + | CCACAAAGAAGUCGAAC | 17 | 2967 |
| HSV1-UL19-2981 | + | CCACCCCCACAAAGAAG | 17 | 2968 |
| HSV1-UL19-2982 | + | CGUCGGCCACCCCCACA | 17 | 2969 |
| HSV1-UL19-1590 | + | UCCCCCGGGCCGGCCGG | 17 | 1976 |
| HSV1-UL19-1591 | + | CUCCCCCGGGCCGGCCG | 17 | 1977 |
| HSV1-UL19-1592 | + | UCUCCCCCGGGCCGGCC | 17 | 1978 |
| HSV1-UL19-1593 | + | AUCUCCCCCGGGCCGGC | 17 | 1979 |
| HSV1-UL19-2987 | + | GAUCUCCCCCGGGCCGG | 17 | 2970 |
| HSV1-UL19-2988 | + | GGUGGCCUGGAUCUCCC | 17 | 2971 |
| HSV1-UL19-2989 | + | ACCACGCGCCAGGUGGC | 17 | 2972 |
| HSV1-UL19-1602 | + | CCGCCGGACAUAGCGCC | 17 | 1988 |
| HSV1-UL19-2991 | + | GCCGCCGGACAUAGCGC | 17 | 2973 |
| HSV1-UL19-2992 | + | GGCGUCCCGGAACGCCG | 17 | 2974 |
| HSV1-UL19-1604 | + | CCAGGCCCCGGGCGUCC | 17 | 1990 |
| HSV1-UL19-2994 | + | UCCAGGCCCCGGGCGUC | 17 | 2975 |
| HSV1-UL19-2995 | + | ACCCCCAGCUCCAGGCC | 17 | 2976 |
| HSV1-UL19-1612 | + | ACGGCGGCGAUGGUGGC | 17 | 1998 |
| HSV1-UL19-1613 | + | AACGGCGGCGAUGGUGG | 17 | 1999 |
| HSV1-UL19-2998 | + | GAACGGCGGCGAUGGUG | 17 | 2977 |
| HSV1-UL19-2999 | + | CGGUCGUCGAACGCCCC | 17 | 2978 |
| HSV1-UL19-3000 | + | CCGGGUAGUUGCGGUCG | 17 | 2979 |
| HSV1-UL19-3001 | + | CAGCAGGUAAAACACCG | 17 | 2980 |
| HSV1-UL19-3002 | + | CGAGCCGGGCCAGGGCG | 17 | 2981 |
| HSV1-UL19-3003 | + | UGGACCACGAGCCGGGC | 17 | 2982 |
| HSV1-UL19-3004 | + | AUGCACUGGACCACGAG | 17 | 2983 |
| HSV1-UL19-3005 | + | UGGUGAUGCACUGGACC | 17 | 2984 |
| HSV1-UL19-3006 | + | CAGUAGCUGGUGAUGCA | 17 | 2985 |
| HSV1-UL19-3007 | + | CCAGCGAGUAGUCGUUC | 17 | 2986 |
| HSV1-UL19-3008 | + | CACGACGUACGAGACCA | 17 | 2987 |
| HSV1-UL19-3009 | + | GAGGUAGGUCACGACGU | 17 | 2988 |
| HSV1-UL19-3010 | + | CCUCGGGAAGGUCUCCC | 17 | 2989 |
| HSV1-UL19-1633 | + | ACGGCCAUGCACUCCUC | 17 | 2019 |
| HSV1-UL19-1634 | + | CACGGCCAUGCACUCCU | 17 | 2020 |
| HSV1-UL19-3013 | + | ACACGGCCAUGCACUCC | 17 | 2990 |
| HSV1-UL19-3014 | + | UCAUCAACCAGCUGGGC | 17 | 2991 |
| HSV1-UL19-3015 | + | GUAAAGUCAUCAACCAG | 17 | 2992 |
| HSV1-UL19-3016 | + | CCCAGCUCCGGGCCGGU | 17 | 2993 |
| HSV1-UL19-3017 | + | CGCCUGCCCGCCCAGCU | 17 | 2994 |
| HSV1-UL19-3018 | + | GAGGGGUGGCAGCAGCG | 17 | 2995 |
| HSV1-UL19-1654 | + | CGUCACAGUCCCACACG | 17 | 2040 |
| HSV1-UL19-3020 | + | GCGUCACAGUCCCACAC | 17 | 2996 |
| HSV1-UL19-3021 | + | GGGCGUCACAGUCCCAC | 17 | 2997 |
| HSV1-UL19-3022 | + | AGGGCCGCGCGCCGCAU | 17 | 2998 |
| HSV1-UL19-3023 | + | CAGUCGCGAUGGCGGUC | 17 | 2999 |
| HSV1-UL19-1665 | + | ACAUGCCGCCGCGUACA | 17 | 2051 |
| HSV1-UL19-3025 | + | UACAUGCCGCCGCGUAC | 17 | 3000 |
| HSV1-UL19-3026 | + | GCUGGCCGUCGUUGCGG | 17 | 3001 |
| HSV1-UL19-3027 | + | GCGUCCGCGGCUCGGGC | 17 | 3002 |
| HSV1-UL19-3028 | + | UCCGCGGCGUCCGCGGC | 17 | 3003 |
| HSV1-UL19-3029 | + | AGCGGCCCCGCGAGAAG | 17 | 3004 |
| HSV1-UL19-3030 | + | UGCAGCAGCGGCCCCGC | 17 | 3005 |
| HSV1-UL19-3031 | + | GGUGCAGCAGCGGCCCC | 17 | 3006 |
| HSV1-UL19-3032 | + | GCGUAUACGCGGUCGAA | 17 | 3007 |
| HSV1-UL19-3033 | + | GGGUGGCGUAUACGCGG | 17 | 3008 |
| HSV1-UL19-3034 | + | GGGACCACCAUGUUCUG | 17 | 3009 |
| HSV1-UL19-1690 | + | UCGCCGGGGGCGAUCUC | 17 | 2076 |
| HSV1-UL19-3036 | + | CUCGCCGGGGGCGAUCU | 17 | 3010 |
| HSV1-UL19-1693 | + | CUGGGGCACUCCUCGCC | 17 | 2079 |
| HSV1-UL19-1694 | + | GCUGGGGCACUCCUCGC | 17 | 2080 |
| HSV1-UL19-3039 | + | CGCUGGGGCACUCCUCG | 17 | 3011 |
| HSV1-UL19-1697 | + | GUCCGUCACGGGGUCGC | 17 | 2083 |
| HSV1-UL19-3041 | + | GGUCCGUCACGGGGUCG | 17 | 3012 |
| HSV1-UL19-1700 | + | GUGCGCGGGGUCCGUCA | 17 | 2086 |
| HSV1-UL19-3043 | + | GGUGCGCGGGGUCCGUC | 17 | 3013 |
| HSV1-UL19-1703 | + | CGGGUGCAGGGGGUGCG | 17 | 2089 |
| HSV1-UL19-3045 | + | CCGGGUGCAGGGGGUGC | 17 | 3014 |
| HSV1-UL19-1706 | + | CAGAUUGGCCGGGUGCA | 17 | 2092 |
| HSV1-UL19-1707 | + | CCAGAUUGGCCGGGUGC | 17 | 2093 |
| HSV1-UL19-3048 | + | ACCAGAUUGGCCGGGUG | 17 | 3015 |
| HSV1-UL19-3049 | + | GUUGGCCACCAGAUUGG | 17 | 3016 |
| HSV1-UL19-3050 | + | ACUACCACGCGCCCGUU | 17 | 3017 |
| HSV1-UL19-3051 | + | CCUGCAGCGUGAGCAUG | 17 | 3018 |
| HSV1-UL19-3052 | + | GGGCCAGCACCUGCAGC | 17 | 3019 |
| HSV1-UL19-3053 | + | GUGCGUUCGGCCAUGUU | 17 | 3020 |
| HSV1-UL19-3054 | + | CGUCGGGCGCCGCCGAG | 17 | 3021 |
| HSV1-UL19-3055 | + | GCCCGCGUCGGGCGCCG | 17 | 3022 |
| HSV1-UL19-3056 | + | CGGUGUUGGCGCCCGCG | 17 | 3023 |
| HSV1-UL19-3057 | + | AUAUGCGCAUGUUGGUG | 17 | 3024 |
| HSV1-UL19-3058 | + | CGGCGUGCAACGCCCCG | 17 | 3025 |
| HSV1-UL19-3059 | + | UGCUGGGGGGCCAUCAG | 17 | 3026 |
| HSV1-UL19-1730 | + | GUAUGGUCCAGAUGCUG | 17 | 2116 |
| HSV1-UL19-1731 | + | GGUAUGGUCCAGAUGCU | 17 | 2117 |
| HSV1-UL19-1732 | + | UGGUAUGGUCCAGAUGC | 17 | 2118 |
| HSV1-UL19-3063 | + | AUGGUAUGGUCCAGAUG | 17 | 3027 |
| HSV1-UL19-3064 | + | UAAAAAUAGUCGCCAUU | 17 | 3028 |
| HSV1-UL19-1738 | + | CAGCGCGUGGACGGGGA | 17 | 2124 |
| HSV1-UL19-1739 | + | ACAGCGCGUGGACGGGG | 17 | 2125 |
| HSV1-UL19-3067 | + | AACAGCGCGUGGACGGG | 17 | 3029 |
| HSV1-UL19-1740 | + | CGAACAGCGCGUGGACG | 17 | 2126 |
| HSV1-UL19-1741 | + | GCGAACAGCGCGUGGAC | 17 | 2127 |
| HSV1-UL19-1742 | + | GGCGAACAGCGCGUGGA | 17 | 2128 |
| HSV1-UL19-3071 | + | CGGCGAACAGCGCGUGG | 17 | 3030 |
| HSV1-UL19-3072 | + | GCCCCGGCGAACAGCGC | 17 | 3031 |
| HSV1-UL19-3073 | + | CCACGUGGUCGGCCCCG | 17 | 3032 |
| HSV1-UL19-3074 | + | GCAGGGCCGGGGGGAAA | 17 | 3033 |
| HSV1-UL19-1749 | + | GGUCGCGCAGGGCCGGG | 17 | 2135 |
| HSV1-UL19-1750 | + | AGGUCGCGCAGGGCCGG | 17 | 2136 |
| HSV1-UL19-1751 | + | CAGGUCGCGCAGGGCCG | 17 | 2137 |
| HSV1-UL19-1752 | + | ACAGGUCGCGCAGGGCC | 17 | 2138 |
| HSV1-UL19-1753 | + | GACAGGUCGCGCAGGGC | 17 | 2139 |
| HSV1-UL19-3080 | + | CGACAGGUCGCGCAGGG | 17 | 3034 |
| HSV1-UL19-3081 | + | UGCCGCGACAGGUCGCG | 17 | 3035 |
| HSV1-UL19-1758 | + | AGAGCCGGGGGGACCAG | 17 | 2144 |
| HSV1-UL19-1759 | + | CAGAGCCGGGGGGACCA | 17 | 2145 |
| HSV1-UL19-1760 | + | CCAGAGCCGGGGGGACC | 17 | 2146 |
| HSV1-UL19-3085 | + | CCCAGAGCCGGGGGGAC | 17 | 3036 |
| HSV1-UL19-1762 | + | UUGGCCCCCAGAGCCGG | 17 | 2148 |
| HSV1-UL19-1763 | + | GUUGGCCCCCAGAGCCG | 17 | 2149 |
| HSV1-UL19-1764 | + | AGUUGGCCCCCAGAGCC | 17 | 2150 |
| HSV1-UL19-1765 | + | UAGUUGGCCCCCAGAGC | 17 | 2151 |
| HSV1-UL19-3090 | + | GUAGUUGGCCCCCAGAG | 17 | 3037 |
| HSV1-UL19-3091 | + | GAAAAGUAGUUGGCCCC | 17 | 3038 |
| HSV1-UL19-3092 | + | GACGGGCUGUCGGAUCG | 17 | 3039 |
| HSV1-UL19-3093 | + | UGCUGCACGACGGGCUG | 17 | 3040 |
| HSV1-UL19-3094 | + | CGCGGACGUGCUGCACG | 17 | 3041 |
| HSV1-UL19-3095 | + | UCCCCGGCCGCGCUCUC | 17 | 3042 |
| HSV1-UL19-3096 | + | UCUUGAAGUACCCCGCC | 17 | 3043 |
| HSV1-UL19-3097 | + | AGGCCACGGGACUGAUC | 17 | 3044 |
| HSV1-UL19-1774 | + | CUGAUGAUGCAAGGCCA | 17 | 2160 |
| HSV1-UL19-3099 | + | GCUGAUGAUGCAAGGCC | 17 | 3045 |
| HSV1-UL19-3100 | + | CGGGAUGGAGGCCCGUC | 17 | 3046 |
| HSV1-UL19-1777 | + | UGAACCCAAACCCGGGA | 17 | 2163 |
| HSV1-UL19-3102 | + | GUGAACCCAAACCCGGG | 17 | 3047 |
| HSV1-UL19-1779 | + | GACGGUGAACCCAAACC | 17 | 2165 |
| HSV1-UL19-3104 | + | CGACGGUGAACCCAAAC | 17 | 3048 |
| HSV1-UL19-3105 | + | GGUCCUGUCGGACGACG | 17 | 3049 |
| HSV1-UL19-3106 | + | GUCACAAAGCGGUCCUG | 17 | 3050 |
| HSV1-UL19-3107 | + | CCUCCGACGCGCGCUCC | 17 | 3051 |
| HSV1-UL19-3108 | + | CGCCUCCGACGCGCGCU | 17 | 3052 |
| HSV1-UL19-1783 | + | CCACCUGGAGCUGGCCC | 17 | 2169 |
| HSV1-UL19-3110 | + | GCCACCUGGAGCUGGCC | 17 | 3053 |
| HSV1-UL19-1785 | + | UUUCGUGCCGGGCCACC | 17 | 2171 |
| HSV1-UL19-3112 | + | GUUUCGUGCCGGGCCAC | 17 | 3054 |
| HSV1-UL19-3113 | + | CCCCCGCCAGUUUCGUG | 17 | 3055 |
| HSV1-UL19-3114 | + | CGCGCGGCUGGGUGAGC | 17 | 3056 |
| HSV1-UL19-3115 | + | CGUUCGCGCGCGGCUGG | 17 | 3057 |
| HSV1-UL19-3116 | + | UCCACGUUCGCGCGCGG | 17 | 3058 |
| HSV1-UL19-3117 | + | AUGUCGGUGACGGGGUU | 17 | 3059 |
| HSV1-UL19-1799 | + | GUUGCCCAUGUCGGUGA | 17 | 2185 |
| HSV1-UL19-3119 | + | GGUUGCCCAUGUCGGUG | 17 | 3060 |
| HSV1-UL19-1802 | + | CCCAGGUAAAAGUUUUG | 17 | 2188 |
| HSV1-UL19-1803 | + | GCCCAGGUAAAAGUUUU | 17 | 2189 |
| HSV1-UL19-1804 | + | GGCCCAGGUAAAAGUUU | 17 | 2190 |
| HSV1-UL19-3123 | + | CGGCCCAGGUAAAAGUU | 17 | 3061 |
| HSV1-UL19-1807 | + | GCGUUGUCCAGGAGAGG | 17 | 2193 |
| HSV1-UL19-1808 | + | CGCGUUGUCCAGGAGAG | 17 | 2194 |
| HSV1-UL19-1809 | + | CCGCGUUGUCCAGGAGA | 17 | 2195 |
| HSV1-UL19-1810 | + | GCCGCGUUGUCCAGGAG | 17 | 2196 |
| HSV1-UL19-3128 | + | UGCCGCGUUGUCCAGGA | 17 | 3062 |
| HSV1-UL19-3129 | + | GCUGCCGCGUUGUCCAG | 17 | 3063 |
| HSV1-UL19-1811 | + | CGGCUGCCGCGUUGUCC | 17 | 2197 |
| HSV1-UL19-3131 | + | ACGGCUGCCGCGUUGUC | 17 | 3064 |
| HSV1-UL19-3132 | + | CCGAACACGGGGACGGG | 17 | 3065 |
| HSV1-UL19-3133 | + | CGCACCCGAACACGGGG | 17 | 3066 |
| HSV1-UL19-1822 | + | UGGGCGCACCCGAACAC | 17 | 2208 |
| HSV1-UL19-1823 | + | CUGGGCGCACCCGAACA | 17 | 2209 |
| HSV1-UL19-3136 | + | CCUGGGCGCACCCGAAC | 17 | 3067 |
| HSV1-UL19-3137 | + | GCGGCACCUGGGCGCAC | 17 | 3068 |
| HSV1-UL19-3138 | + | CCUGCGCGCCGCGGCAC | 17 | 3069 |
| HSV1-UL19-1833 | + | UUGACGUCGGUCGACAC | 17 | 2219 |
| HSV1-UL19-1834 | + | GUUGACGUCGGUCGACA | 17 | 2220 |
| HSV1-UL19-3141 | + | AGUUGACGUCGGUCGAC | 17 | 3070 |
| HSV1-UL19-1836 | + | GGGGGUUGCAGGGCCGG | 17 | 2222 |
| HSV1-UL19-3143 | + | CGGGGGUUGCAGGGCCG | 17 | 3071 |
| HSV1-UL19-3144 | + | CGCGUCCCCGGGGGUUG | 17 | 3072 |
| HSV1-UL19-1842 | + | CCCGGCGGCGCGUCCCC | 17 | 2228 |
| HSV1-UL19-1843 | + | CCCCGGCGGCGCGUCCC | 17 | 2229 |
| HSV1-UL19-3147 | + | CCCCCGGCGGCGCGUCC | 17 | 3073 |
| HSV1-UL19-3148 | + | UGGCCGUGGUCGUACAU | 17 | 3074 |
| HSV1-UL19-3149 | + | UCUGGCCGUGGUCGUAC | 17 | 3075 |
| HSV1-UL19-3150 | + | GGCCGCGAAGGCCCGGG | 17 | 3076 |
| HSV1-UL19-1854 | + | CCGUGGCCGCGAAGGCC | 17 | 2240 |
| HSV1-UL19-3152 | + | GCCGUGGCCGCGAAGGC | 17 | 3077 |
| HSV1-UL19-3153 | + | ACGGGUUGGCCGUGGCC | 17 | 3078 |
| HSV1-UL19-3154 | + | AAAUCGCUGCGACGCCC | 17 | 3079 |
| HSV1-UL19-3155 | + | AUAGAGCAGGUCCCCGU | 17 | 3080 |
| HSV1-UL19-3156 | + | GGUGGUAGGCCCCGUUA | 17 | 3081 |
| HSV1-UL19-3157 | + | GCACCGGCGAGGCCCCG | 17 | 3082 |
| HSV1-UL19-3158 | + | GCAGGGGCUGAGCACCG | 17 | 3083 |
| HSV1-UL19-3159 | + | AGAACUUAAAGCAGGGG | 17 | 3084 |
| HSV1-UL19-1868 | + | CGUAAAGAACUUAAAGC | 17 | 2254 |
| HSV1-UL19-3161 | + | ACGUAAAGAACUUAAAG | 17 | 3085 |
| HSV1-UL19-3162 | + | CGAUGUCGGCCGACGUA | 17 | 3086 |
| HSV1-UL19-3163 | + | GGUGGCCGUGGACACCG | 17 | 3087 |
| HSV1-UL19-3164 | + | CGCUGGCGGCGGUGGCC | 17 | 3088 |
| HSV1-UL19-1881 | + | GAGUUCGCGGCACCCCG | 17 | 2267 |
| HSV1-UL19-1882 | + | CGAGUUCGCGGCACCCC | 17 | 2268 |
| HSV1-UL19-1883 | + | ACGAGUUCGCGGCACCC | 17 | 2269 |
| HSV1-UL19-3168 | + | CACGAGUUCGCGGCACC | 17 | 3089 |
| HSV1-UL19-3169 | + | GGCCACACGGGUCCUCC | 17 | 3090 |
| HSV1-UL19-3170 | + | CUCCUGAAACAGGCCAC | 17 | 3091 |
| HSV1-UL19-3171 | + | GUGAGCGGGUAGGCCUC | 17 | 3092 |
| HSV1-UL19-3172 | + | GUCGCUGGCGCAGGUGA | 17 | 3093 |
| HSV1-UL19-3173 | + | CGGGGUCGCUGGCGCAG | 17 | 3094 |
| HSV1-UL19-1895 | + | GGCACUGCGGAGGAGGG | 17 | 2281 |
| HSV1-UL19-3175 | + | GGGCACUGCGGAGGAGG | 17 | 3095 |
| HSV1-UL19-3176 | + | UUGCGGGCACUGCGGAG | 17 | 3096 |
| HSV1-UL19-1898 | + | CGUUGCGGGCACUGCGG | 17 | 2284 |
| HSV1-UL19-3178 | + | CCGUUGCGGGCACUGCG | 17 | 3097 |
| HSV1-UL19-1899 | + | CCCCGUUGCGGGCACUG | 17 | 2285 |
| HSV1-UL19-3180 | + | UCCCCGUUGCGGGCACU | 17 | 3098 |
| HSV1-UL19-3181 | + | GCGUGGGCUUCCCCGUU | 17 | 3099 |
| HSV1-UL19-3182 | + | AAGUGGGUCUCCCGCGC | 17 | 3100 |
| HSV1-UL19-3183 | + | ACGAGAUACUGCGCGAA | 17 | 3101 |
| HSV1-UL19-3184 | + | CAUAGACGAGAUACUGC | 17 | 3102 |
| HSV1-UL19-3185 | + | GCGGGGAUGCGUCAUAG | 17 | 3103 |
| HSV1-UL19-1907 | + | GAGCCAGUCCCUUGAGC | 17 | 2293 |
| HSV1-UL19-1908 | + | AGAGCCAGUCCCUUGAG | 17 | 2294 |
| HSV1-UL19-3188 | + | CAGAGCCAGUCCCUUGA | 17 | 3104 |

[0713] Table 1F provides exemplary targeting domains for knocking out the UL19 gene selected according to the first tier parameters. The targeting domains are selected based on location within first 500 bp of the coding sequence of the UL19 gene. It is contemplated herein that the targeting domain hybridizes to the target domain through complementary base pairing. Any of the targeting domains in the table can be used with a N. meningitidis Cas9 molecule that gives double stranded cleavage. Any of the targeting domains in the table can be used with a N. meningitidis Cas9 single-stranded break nucleases (nickases). In an embodiment, dual targeting is used to create two nicks on opposite DNA strands by using N. meningitidis Cas9 nickases with two targeting domains that are complementary to opposite DNA strands, e.g., a gRNA comprising any minus strand targeting domain may be paired any gRNA comprising a plus strand targeting domain provided that the two gRNAs are oriented on the DNA such that PAMs face outward and the distance between the 5′ ends of the gRNAs is 0-50 bp.

TABLE 1F

| | | | Target | |
|---|---|---|---|---|
| 1st Tier | DNA | | Site | Seq |
| gRNA Name | Strand | Targeting Domain | Length | ID |
| HSV1-UL19-3189 | − | GUGGCGUCGCAUCGACG | 20 | 3105 |
| | | CCU | | |
| HSV1-UL19-3190 | − | ACAGUUCGAGGUCCACC | 20 | 3106 |
| | | AGC | | |
| HSV1-UL19-3191 | − | ACCCACACACAAUUACA | 20 | 3107 |
| | | UGA | | |
| HSV1-UL19-3192 | − | GCGUCGCAUCGACGCCU | 17 | 3108 |
| HSV1-UL19-3193 | − | GUUCGAGGUCCACCAGC | 17 | 3109 |
| HSV1-UL19-3194 | − | CACACACAAUUACAUGA | 17 | 3110 |

[0714] Table 1G provides exemplary targeting domains for knocking out the UL19 gene selected according to the second tier parameters. The targeting domains are selected based on location within the coding sequence, but downstream of the first 500 bp of the UL19 gene. It is contemplated herein that the targeting domain hybridizes to the target domain through complementary base pairing. Any of the targeting domains in the table can be used with a N. meningitidis Cas9 molecule that gives double stranded cleavage. Any of the targeting domains in the table can be used with a N. meningitidis Cas9 single-stranded break nucleases (nickases). In an embodiment, dual targeting is used to create two nicks on opposite DNA strands by using N. meningitidis Cas9 nickases with two targeting domains that are complementary to opposite DNA strands, e.g., a gRNA comprising any minus strand targeting domain may be paired any gRNA comprising a plus strand targeting domain provided that the two gRNAs are oriented on the DNA such that PAMs face outward and the distance between the 5′ ends of the gRNAs is 0-50 bp.

TABLE 1G

| | | | Target | |
|---|---|---|---|---|
| 2nd Tier | DNA | | Site | Seq |
| gRNA Name | Strand | Targeting Domain | Length | ID |
| HSV1-UL19-3195 | − | CGGCCAACCCGUGGGCG | 20 | 3111 |
| | | UCG | | |
| HSV1-UL19-3196 | − | GGCGGACUGGACCGUGC | 20 | 3112 |
| | | ACC | | |
| HSV1-UL19-3197 | − | CCAACCCGUGGGCGUCG | 17 | 3113 |
| HSV1-UL19-3198 | − | GGACUGGACCGUGCACC | 17 | 3114 |
| HSV1-UL19-3199 | + | GCGCGGCAAACCGUUCC | 20 | 3115 |
| | | AUG | | |
| HSV1-UL19-3200 | + | GGGCCGCCACGUACGCC | 20 | 3116 |
| | | CCG | | |
| HSV1-UL19-1181 | + | GCAGCGCCGGGUCUCGC | 20 | 1567 |
| | | AUU | | |
| HSV1-UL19-3202 | + | UGGCGUUGACCGUGUUG | 20 | 3117 |
| | | GCC | | |
| HSV1-UL19-3203 | + | CAGAUGCUGGGGGGCCA | 20 | 3118 |
| | | UCA | | |
| HSV1-UL19-3204 | + | CGGCAAACCGUUCCAUG | 17 | 3119 |
| HSV1-UL19-3205 | + | CCGCCACGUACGCCCCG | 17 | 3120 |
| HSV1-UL19-1648 | + | GCGCCGGGUCUCGCAUU | 17 | 2034 |
| HSV1-UL19-3207 | + | CGUUGACCGUGUUGGCC | 17 | 3121 |
| HSV1-UL19-3208 | + | AUGCUGGGGGGCCAUCA | 17 | 3122 |

[0715] Table 2A provides exemplary targeting domains for knocking out the UL30 gene selected according to first tier parameters. The targeting domains are selected based on location within the first 500 bp of the coding sequence of the UL30 gene and orthogonality against the human genome. It is contemplated herein that the targeting domain hybridizes to the target domain through complementary base pairing. Any of the targeting domains in the table can be used with a S. pyogenes Cas9 molecule that gives double stranded cleavage. Any of the targeting domains in the table can be used with a S. pyogenes Cas9 single-stranded break nucleases (nickases). In an embodiment, dual targeting is used to create two nicks on opposite DNA strands by using S. pyogenes Cas9 nickases with two targeting domains that are complementary to opposite DNA strands, e.g., a gRNA comprising any minus strand targeting domain may be paired any gRNA comprising a plus strand targeting domain provided that the two gRNAs are oriented on the DNA such that PAMs face outward and the distance between the 5′ ends of the gRNAs is 0-50 bp.

TABLE 2A

| | | | Target | |
|---|---|---|---|---|
| 1st Tier | DNA | | Site | Seq |
| gRNA Name | Strand | Targeting Domain | Length | ID |
| HSV1-UL30-4 | − | GUCCCCCGGAGGAAAGUCGG | 20 | 3123 |
| HSV1-UL30-5 | − | CCGGAGGAAAGUCGGCGGCC | 20 | 3124 |
| HSV1-UL30-11 | − | UUUGCGCCCGCCGGCCCUCG | 20 | 3125 |
| HSV1-UL30-18 | − | GGGACGCAACAGAAGCCGAC | 20 | 3126 |
| HSV1-UL30-19 | − | GGACGCAACAGAAGCCGACC | 20 | 3127 |
| HSV1-UL30-20 | − | AAUUUCGAUUCAUCGCCCCG | 20 | 3128 |
| HSV1-UL30-21 | − | AUUUCGAUUCAUCGCCCCGC | 20 | 3129 |
| HSV1-UL30-22 | − | AUUCAUCGCCCCGCGGGUGC | 20 | 3130 |
| HSV1-UL30-25 | − | GCCCCCCCGGAGAAGCGCGC | 20 | 3131 |
| HSV1-UL30-27 | − | CCCCCCGGAGAAGCGCGCCG | 20 | 3132 |
| HSV1-UL30-28 | − | AAGCGCGCCGGGGUGCACGA | 20 | 3133 |
| HSV1-UL30-29 | − | UCACCUCAAGCGCGCCCCCA | 20 | 3134 |
| HSV1-UL30-30 | − | CGCGCCCCCAAGGUGUACUG | 20 | 3135 |
| HSV1-UL30-31 | − | GCGCCCCCAAGGUGUACUGC | 20 | 3136 |
| HSV1-UL30-32 | − | CGCCCCCAAGGUGUACUGCG | 20 | 3137 |
| HSV1-UL30-33 | − | GCCCCCAAGGUGUACUGCGG | 20 | 3138 |
| HSV1-UL30-36 | − | GAGCGCGACGUCCUCCGCGU | 20 | 3139 |
| HSV1-UL30-37 | − | AGCGCGACGUCCUCCGCGUC | 20 | 3140 |
| HSV1-UL30-38 | − | CGACGUCCUCCGCGUCGGGU | 20 | 3141 |
| HSV1-UL30-39 | − | GACGUCCUCCGCGUCGGGUC | 20 | 3142 |
| HSV1-UL30-40 | − | GUCCUCCGCGUCGGGUCGGG | 20 | 3143 |
| HSV1-UL30-50 | − | GGCGUGGACCACGCCCCGGC | 20 | 3144 |
| HSV1-UL30-51 | − | GCGUGGACCACGCCCCGGCG | 20 | 3145 |
| HSV1-UL30-52 | − | CUUUCACGUGUACGACAUCC | 20 | 3146 |
| HSV1-UL30-53 | − | GUACGACAUCCUGGAGAACG | 20 | 3147 |
| HSV1-UL30-54 | − | GAGAACGUGGAGCACGCGUA | 20 | 3148 |
| HSV1-UL30-56 | + | ACGCGUGCUCCACGUUCUCC | 20 | 3149 |
| HSV1-UL30-57 | + | GAUGUCGUACACGUGAAAGA | 20 | 3150 |
| HSV1-UL30-61 | + | CGUGAAAGACGGUGACGGUG | 20 | 3151 |
| HSV1-UL30-62 | + | ACGGUGGGGUUGAACCCCGC | 20 | 3152 |
| HSV1-UL30-64 | + | GGUGGGGUUGAACCCCGCCG | 20 | 3153 |
| HSV1-UL30-65 | + | GGUUGAACCCCGCCGGGGCG | 20 | 3154 |
| HSV1-UL30-68 | + | AGAAGCCGCCCGACCCGACG | 20 | 3155 |
| HSV1-UL30-69 | + | AGCCGCCCGACCCGACGCGG | 20 | 3156 |
| HSV1-UL30-70 | + | GUCCCCCCCGCAGUACACCU | 20 | 3157 |
| HSV1-UL30-74 | + | ACACCUUGGGGGCGCGCUUG | 20 | 3158 |
| HSV1-UL30-75 | + | GAGGUGACCGUCGUGCACCC | 20 | 3159 |
| HSV1-UL30-80 | + | CCCCGGCGCGCUUCUCCGGG | 20 | 3160 |
| HSV1-UL30-82 | + | GCAUCCUCGUCCAGCACCCG | 20 | 3161 |
| HSV1-UL30-84 | + | AUCCUCGUCCAGCACCCGCG | 20 | 3162 |
| HSV1-UL30-87 | + | GCUAUAGUACGUAUGGCGCU | 20 | 3163 |
| HSV1-UL30-88 | + | UAGUACGUAUGGCGCUGGGU | 20 | 3164 |
| HSV1-UL30-89 | + | CGUAUGGCGCUGGGUUGGCC | 20 | 3165 |
| HSV1-UL30-91 | + | GGCUUCUGUUGCGUCCCGAC | 20 | 3166 |
| HSV1-UL30-92 | + | GCUUCUGUUGCGUCCCGACU | 20 | 3167 |
| HSV1-UL30-93 | + | CUUCUGUUGCGUCCCGACUG | 20 | 3168 |
| HSV1-UL30-94 | + | GUUGCGUCCCGACUGGGGCG | 20 | 3169 |
| HSV1-UL30-95 | + | CGUCCCGACUGGGGCGAGGU | 20 | 3170 |
| HSV1-UL30-101 | + | GUUUUGCCUCAAACAAGGCG | 20 | 3171 |
| HSV1-UL30-102 | + | UUUUGCCUCAAACAAGGCGG | 20 | 3172 |
| HSV1-UL30-103 | + | UCAAACAAGGCGGGGGUCCC | 20 | 3173 |
| HSV1-UL30-110 | + | GCCGGCGGGCGCAAAAAACC | 20 | 3174 |
| HSV1-UL30-111 | + | AAAAAACCCGGACGCCGCCC | 20 | 3175 |
| HSV1-UL30-114 | + | UGGCCGCCGACUUUCCUCCG | 20 | 3176 |
| HSV1-UL30-115 | + | GGCCGCCGACUUUCCUCCGG | 20 | 3177 |
| HSV1-UL30-121 | − | GUCCCCCGGAGGAAAGU | 17 | 3178 |
| HSV1-UL30-125 | − | AAAGUCGGCGGCCAGGG | 17 | 3179 |
| HSV1-UL30-128 | − | GGGUUUUUUGCGCCCGC | 17 | 3180 |
| HSV1-UL30-136 | − | ACGCAACAGAAGCCGAC | 17 | 3181 |
| HSV1-UL30-137 | − | CGCAACAGAAGCCGACC | 17 | 3182 |
| HSV1-UL30-138 | − | UUCGAUUCAUCGCCCCG | 17 | 3183 |
| HSV1-UL30-139 | − | UCGAUUCAUCGCCCCGC | 17 | 3184 |
| HSV1-UL30-140 | − | CAUCGCCCCGCGGGUGC | 17 | 3185 |
| HSV1-UL30-144 | − | CCCCGGAGAAGCGCGCC | 17 | 3186 |
| HSV1-UL30-146 | − | CGCGCCGGGGUGCACGA | 17 | 3187 |
| HSV1-UL30-147 | − | CCUCAAGCGCGCCCCCA | 17 | 3188 |
| HSV1-UL30-148 | − | GCCCCCAAGGUGUACUG | 17 | 3189 |
| HSV1-UL30-150 | − | CCCCAAGGUGUACUGCG | 17 | 3190 |
| HSV1-UL30-155 | − | GCGACGUCCUCCGCGUC | 17 | 3191 |
| HSV1-UL30-156 | − | CGUCCUCCGCGUCGGGU | 17 | 3192 |
| HSV1-UL30-157 | − | GUCCUCCGCGUCGGGUC | 17 | 3193 |
| HSV1-UL30-158 | − | CUCCGCGUCGGGUCGGG | 17 | 3194 |
| HSV1-UL30-163 | − | CGGCGCUCGCGCCUGUG | 17 | 3195 |
| HSV1-UL30-164 | − | CGCUCGCGCCUGUGGGG | 17 | 3196 |
| HSV1-UL30-167 | − | CGUGGACCACGCCCCGG | 17 | 3197 |
| HSV1-UL30-168 | − | GUGGACCACGCCCCGGC | 17 | 3198 |
| HSV1-UL30-169 | − | UGGACCACGCCCCGGCG | 17 | 3199 |
| HSV1-UL30-170 | − | UCACGUGUACGACAUCC | 17 | 3200 |
| HSV1-UL30-171 | − | CGACAUCCUGGAGAACG | 17 | 3201 |
| HSV1-UL30-172 | − | AACGUGGAGCACGCGUA | 17 | 3202 |
| HSV1-UL30-175 | + | GUCGUACACGUGAAAGA | 17 | 3203 |
| HSV1-UL30-178 | + | UGAAAGACGGUGACGGU | 17 | 3204 |
| HSV1-UL30-182 | + | GGGGUUGAACCCCGCCG | 17 | 3205 |
| HSV1-UL30-185 | + | CACAGGCGCGAGCGCCG | 17 | 3206 |
| HSV1-UL30-186 | + | AGCCGCCCGACCCGACG | 17 | 3207 |
| HSV1-UL30-187 | + | CGCCCGACCCGACGCGG | 17 | 3208 |
| HSV1-UL30-188 | + | CCCCCCGCAGUACACCU | 17 | 3209 |
| HSV1-UL30-189 | + | CCCCCGCAGUACACCUU | 17 | 3210 |
| HSV1-UL30-190 | + | CCCCGCAGUACACCUUG | 17 | 3211 |
| HSV1-UL30-193 | + | GUGACCGUCGUGCACCC | 17 | 3212 |
| HSV1-UL30-196 | + | CCCGGCGCGCUUCUCCG | 17 | 3213 |
| HSV1-UL30-197 | + | CCGGCGCGCUUCUCCGG | 17 | 3214 |
| HSV1-UL30-198 | + | CGGCGCGCUUCUCCGGG | 17 | 3215 |
| HSV1-UL30-199 | + | GGCGCGCUUCUCCGGGG | 17 | 3216 |
| HSV1-UL30-202 | + | CUCGUCCAGCACCCGCG | 17 | 3217 |
| HSV1-UL30-203 | + | AUUCGCUAUAGUACGUA | 17 | 3218 |
| HSV1-UL30-204 | + | UAUAGUACGUAUGGCGC | 17 | 3219 |
| HSV1-UL30-205 | + | AUAGUACGUAUGGCGCU | 17 | 3220 |
| HSV1-UL30-206 | + | UACGUAUGGCGCUGGGU | 17 | 3221 |
| HSV1-UL30-209 | + | UUCUGUUGCGUCCCGAC | 17 | 3222 |
| HSV1-UL30-210 | + | UCUGUUGCGUCCCGACU | 17 | 3223 |
| HSV1-UL30-211 | + | CUGUUGCGUCCCGACUG | 17 | 3224 |
| HSV1-UL30-212 | + | GCGUCCCGACUGGGGCG | 17 | 3225 |
| HSV1-UL30-215 | + | CGACUGGGGCGAGGUAG | 17 | 3226 |
| HSV1-UL30-228 | + | GGCGGGCGCAAAAAACC | 17 | 3227 |
| HSV1-UL30-230 | + | GGCCGCCGACUUUCCUC | 17 | 3228 |
| HSV1-UL30-231 | + | GCCGCCGACUUUCCUCC | 17 | 3229 |
| HSV1-UL30-232 | + | CCGCCGACUUUCCUCCG | 17 | 3230 |
| HSV1-UL30-233 | + | CGCCGACUUUCCUCCGG | 17 | 3231 |

[0716] Table 2B provides exemplary targeting domains for knocking out the UL30 gene selected according to the second tier parameters. The targeting domains are selected based on location within the first 500 bp of the coding sequence of the UL30 gene. It is contemplated herein that the targeting domain hybridizes to the target domain through complementary base pairing. Any of the targeting domains in the table can be used with a S. pyogenes Cas9 molecule that gives double stranded cleavage. Any of the targeting domains in the table can be used with a S. pyogenes Cas9 single-stranded break nucleases (nickases). In an embodiment, dual targeting is used to create two nicks on opposite DNA strands by using S. pyogenes Cas9 nickases with two targeting domains that are complementary to opposite DNA strands, e.g., a gRNA comprising any minus strand targeting domain may be paired any gRNA comprising a plus strand targeting domain provided that the two gRNAs are oriented on the DNA such that PAMs face outward and the distance between the 5′ ends of the gRNAs is 0-50 bp.

TABLE 2B

| | | | Target | |
|---|---|---|---|---|
| 2nd Tier | DNA | | Site | |
| gRNA Name | Strand | Targeting Domain | Length | Seq ID |
| HSV1-UL30-1 | − | GGCGGCGGCCCGCUGUCCCC | 20 | 3232 |
| HSV1-UL30-2 | − | GGCGGCCCGCUGUCCCCCGG | 20 | 3233 |
| HSV1-UL30-3 | − | GCUGUCCCCCGGAGGAAAGU | 20 | 3234 |
| HSV1-UL30-6 | − | CGGAGGAAAGUCGGCGGCCA | 20 | 3235 |
| HSV1-UL30-7 | − | AGGAAAGUCGGCGGCCAGGG | 20 | 3236 |
| HSV1-UL30-8 | − | UCGGCGGCCAGGGCGGCGUC | 20 | 3237 |
| HSV1-UL30-9 | − | CGGCGGCCAGGGCGGCGUCC | 20 | 3238 |
| HSV1-UL30-10 | − | UCCGGGUUUUUUGCGCCCGC | 20 | 3239 |
| HSV1-UL30-12 | − | CCGGCCCUCGCGGAGCCAGC | 20 | 3240 |
| HSV1-UL30-13 | − | CGGCCCUCGCGGAGCCAGCC | 20 | 3241 |
| HSV1-UL30-14 | − | GGCCCUCGCGGAGCCAGCCG | 20 | 3242 |
| HSV1-UL30-15 | − | GGGGACCCCCGCCUUGUUUG | 20 | 3243 |
| HSV1-UL30-16 | − | AACCCCUACCUCGCCCCAGU | 20 | 3244 |
| HSV1-UL30-17 | − | ACCCCUACCUCGCCCCAGUC | 20 | 3245 |
| HSV1-UL30-23 | − | CGCCCCGCGGGUGCUGGACG | 20 | 3246 |
| HSV1-UL30-24 | − | GCUGGACGAGGAUGCCCCCC | 20 | 3247 |
| HSV1-UL30-26 | − | CCCCCCCGGAGAAGCGCGCC | 20 | 3248 |
| HSV1-UL30-34 | − | CCCCCAAGGUGUACUGCGGG | 20 | 3249 |
| HSV1-UL30-35 | − | CCCCAAGGUGUACUGCGGGG | 20 | 3250 |
| HSV1-UL30-41 | − | GCGUCGGGUCGGGCGGCUUC | 20 | 3251 |
| HSV1-UL30-42 | − | GGUCGGGCGGCUUCUGGCCG | 20 | 3252 |
| HSV1-UL30-43 | − | GGCCGCGGCGCUCGCGCCUG | 20 | 3253 |
| HSV1-UL30-44 | − | GCCGCGGCGCUCGCGCCUGU | 20 | 3254 |
| HSV1-UL30-45 | − | CCGCGGCGCUCGCGCCUGUG | 20 | 3255 |
| HSV1-UL30-46 | − | CGGCGCUCGCGCCUGUGGGG | 20 | 3256 |
| HSV1-UL30-47 | − | CUCGCGCCUGUGGGGCGGCG | 20 | 3257 |
| HSV1-UL30-48 | − | GGGCGGCGUGGACCACGCCC | 20 | 3258 |
| HSV1-UL30-49 | − | CGGCGUGGACCACGCCCCGG | 20 | 3259 |
| HSV1-UL30-55 | − | GCACGCGUACGGCAUGCGCG | 20 | 3260 |
| HSV1-UL30-58 | + | GUACACGUGAAAGACGGUGA | 20 | 3261 |
| HSV1-UL30-59 | + | CACGUGAAAGACGGUGACGG | 20 | 3262 |
| HSV1-UL30-60 | + | ACGUGAAAGACGGUGACGGU | 20 | 3263 |
| HSV1-UL30-63 | + | CGGUGGGGUUGAACCCCGCC | 20 | 3264 |
| HSV1-UL30-66 | + | CGUGGUCCACGCCGCCCCAC | 20 | 3265 |
| HSV1-UL30-67 | + | CCCCACAGGCGCGAGCGCCG | 20 | 3266 |
| HSV1-UL30-71 | + | UCCCCCCCGCAGUACACCUU | 20 | 3267 |
| HSV1-UL30-72 | + | CCCCCCCGCAGUACACCUUG | 20 | 3268 |
| HSV1-UL30-73 | + | CCCCCCGCAGUACACCUUGG | 20 | 3269 |
| HSV1-UL30-76 | + | UGCACCCCGGCGCGCUUCUC | 20 | 3270 |
| HSV1-UL30-77 | + | GCACCCCGGCGCGCUUCUCC | 20 | 3271 |
| HSV1-UL30-78 | + | CACCCCGGCGCGCUUCUCCG | 20 | 3272 |
| HSV1-UL30-79 | + | ACCCCGGCGCGCUUCUCCGG | 20 | 3273 |
| HSV1-UL30-81 | + | CCCGGCGCGCUUCUCCGGGG | 20 | 3274 |
| HSV1-UL30-83 | + | CAUCCUCGUCCAGCACCCGC | 20 | 3275 |
| HSV1-UL30-85 | + | CGCAUUCGCUAUAGUACGUA | 20 | 3276 |
| HSV1-UL30-86 | + | CGCUAUAGUACGUAUGGCGC | 20 | 3277 |
| HSV1-UL30-90 | + | UGGCGCUGGGUUGGCCCGGU | 20 | 3278 |
| HSV1-UL30-96 | + | GUCCCGACUGGGGCGAGGUA | 20 | 3279 |
| HSV1-UL30-97 | + | UCCCGACUGGGGCGAGGUAG | 20 | 3280 |
| HSV1-UL30-98 | + | UAAAAGUUUUGCCUCAAACA | 20 | 3281 |
| HSV1-UL30-99 | + | AAGUUUUGCCUCAAACAAGG | 20 | 3282 |
| HSV1-UL30-100 | + | AGUUUUGCCUCAAACAAGGC | 20 | 3283 |
| HSV1-UL30-104 | + | ACAAGGCGGGGGUCCCCGGC | 20 | 3284 |
| HSV1-UL30-105 | + | GGUCCCCGGCUGGCUCCGCG | 20 | 3285 |
| HSV1-UL30-106 | + | GUCCCCGGCUGGCUCCGCGA | 20 | 3286 |
| HSV1-UL30-107 | + | CCGGCUGGCUCCGCGAGGGC | 20 | 3287 |
| HSV1-UL30-108 | + | GCUGGCUCCGCGAGGGCCGG | 20 | 3288 |
| HSV1-UL30-109 | + | CUGGCUCCGCGAGGGCCGGC | 20 | 3289 |
| HSV1-UL30-112 | + | CCUGGCCGCCGACUUUCCUC | 20 | 3290 |
| HSV1-UL30-113 | + | CUGGCCGCCGACUUUCCUCC | 20 | 3291 |
| HSV1-UL30-116 | + | GACUUUCCUCCGGGGGACAG | 20 | 3292 |
| HSV1-UL30-117 | + | ACUUUCCUCCGGGGGACAGC | 20 | 3293 |
| HSV1-UL30-118 | + | GGACAGCGGGCCGCCGCCAC | 20 | 3294 |
| HSV1-UL30-119 | − | GGCGGCCCGCUGUCCCC | 17 | 3295 |
| HSV1-UL30-120 | − | GGCCCGCUGUCCCCCGG | 17 | 3296 |
| HSV1-UL30-122 | − | CCCCGGAGGAAAGUCGG | 17 | 3297 |
| HSV1-UL30-123 | − | GAGGAAAGUCGGCGGCC | 17 | 3298 |
| HSV1-UL30-124 | − | AGGAAAGUCGGCGGCCA | 17 | 3299 |
| HSV1-UL30-126 | − | GCGGCCAGGGCGGCGUC | 17 | 3300 |
| HSV1-UL30-127 | − | CGGCCAGGGCGGCGUCC | 17 | 3301 |
| HSV1-UL30-129 | − | GCGCCCGCCGGCCCUCG | 17 | 3302 |
| HSV1-UL30-130 | − | GCCCUCGCGGAGCCAGC | 17 | 3303 |
| HSV1-UL30-131 | − | CCCUCGCGGAGCCAGCC | 17 | 3304 |
| HSV1-UL30-132 | − | CCUCGCGGAGCCAGCCG | 17 | 3305 |
| HSV1-UL30-133 | − | GACCCCCGCCUUGUUUG | 17 | 3306 |
| HSV1-UL30-134 | − | CCCUACCUCGCCCCAGU | 17 | 3307 |
| HSV1-UL30-135 | − | CCUACCUCGCCCCAGUC | 17 | 3308 |
| HSV1-UL30-141 | − | CCCGCGGGUGCUGGACG | 17 | 3309 |
| HSV1-UL30-142 | − | GGACGAGGAUGCCCCCC | 17 | 3310 |
| HSV1-UL30-143 | − | CCCCCGGAGAAGCGCGC | 17 | 3311 |
| HSV1-UL30-145 | − | CCCGGAGAAGCGCGCCG | 17 | 3312 |
| HSV1-UL30-149 | − | CCCCCAAGGUGUACUGC | 17 | 3313 |
| HSV1-UL30-151 | − | CCCAAGGUGUACUGCGG | 17 | 3314 |
| HSV1-UL30-152 | − | CCAAGGUGUACUGCGGG | 17 | 3315 |
| HSV1-UL30-153 | − | CAAGGUGUACUGCGGGG | 17 | 3316 |
| HSV1-UL30-154 | − | CGCGACGUCCUCCGCGU | 17 | 3317 |
| HSV1-UL30-159 | − | UCGGGUCGGGCGGCUUC | 17 | 3318 |
| HSV1-UL30-160 | − | CGGGCGGCUUCUGGCCG | 17 | 3319 |
| HSV1-UL30-161 | − | CGCGGCGCUCGCGCCUG | 17 | 3320 |
| HSV1-UL30-162 | − | GCGGCGCUCGCGCCUGU | 17 | 3321 |
| HSV1-UL30-165 | − | GCGCCUGUGGGGCGGCG | 17 | 3322 |
| HSV1-UL30-166 | − | CGGCGUGGACCACGCCC | 17 | 3323 |
| HSV1-UL30-173 | − | CGCGUACGGCAUGCGCG | 17 | 3324 |
| HSV1-UL30-174 | + | CGUGCUCCACGUUCUCC | 17 | 3325 |
| HSV1-UL30-176 | + | CACGUGAAAGACGGUGA | 17 | 3326 |
| HSV1-UL30-177 | + | GUGAAAGACGGUGACGG | 17 | 3327 |
| HSV1-UL30-179 | + | GAAAGACGGUGACGGUG | 17 | 3328 |
| HSV1-UL30-180 | + | GUGGGGUUGAACCCCGC | 17 | 3329 |
| HSV1-UL30-181 | + | UGGGGUUGAACCCCGCC | 17 | 3330 |
| HSV1-UL30-183 | + | UGAACCCCGCCGGGGCG | 17 | 3331 |
| HSV1-UL30-184 | + | GGUCCACGCCGCCCCAC | 17 | 3332 |
| HSV1-UL30-191 | + | CCCGCAGUACACCUUGG | 17 | 3333 |
| HSV1-UL30-192 | + | CCUUGGGGGCGCGCUUG | 17 | 3334 |
| HSV1-UL30-194 | + | ACCCCGGCGCGCUUCUC | 17 | 3335 |
| HSV1-UL30-195 | + | CCCCGGCGCGCUUCUCC | 17 | 3336 |
| HSV1-UL30-200 | + | UCCUCGUCCAGCACCCG | 17 | 3337 |
| HSV1-UL30-201 | + | CCUCGUCCAGCACCCGC | 17 | 3338 |
| HSV1-UL30-207 | + | AUGGCGCUGGGUUGGCC | 17 | 3339 |
| HSV1-UL30-208 | + | CGCUGGGUUGGCCCGGU | 17 | 3340 |
| HSV1-UL30-213 | + | CCCGACUGGGGCGAGGU | 17 | 3341 |
| HSV1-UL30-214 | + | CCGACUGGGGCGAGGUA | 17 | 3342 |
| HSV1-UL30-216 | + | AAGUUUUGCCUCAAACA | 17 | 3343 |
| HSV1-UL30-217 | + | UUUUGCCUCAAACAAGG | 17 | 3344 |
| HSV1-UL30-218 | + | UUUGCCUCAAACAAGGC | 17 | 3345 |
| HSV1-UL30-219 | + | UUGCCUCAAACAAGGCG | 17 | 3346 |
| HSV1-UL30-220 | + | UGCCUCAAACAAGGCGG | 17 | 3347 |
| HSV1-UL30-221 | + | AACAAGGCGGGGGUCCC | 17 | 3348 |
| HSV1-UL30-222 | + | AGGCGGGGGUCCCCGGC | 17 | 3349 |
| HSV1-UL30-223 | + | CCCCGGCUGGCUCCGCG | 17 | 3350 |
| HSV1-UL30-224 | + | CCCGGCUGGCUCCGCGA | 17 | 3351 |
| HSV1-UL30-225 | + | GCUGGCUCCGCGAGGGC | 17 | 3352 |
| HSV1-UL30-226 | + | GGCUCCGCGAGGGCCGG | 17 | 3353 |
| HSV1-UL30-227 | + | GCUCCGCGAGGGCCGGC | 17 | 3354 |
| HSV1-UL30-229 | + | AAACCCGGACGCCGCCC | 17 | 3355 |
| HSV1-UL30-234 | + | UUUCCUCCGGGGGACAG | 17 | 3356 |
| HSV1-UL30-235 | + | UUCCUCCGGGGGACAGC | 17 | 3357 |
| HSV1-UL30-236 | + | CAGCGGGCCGCCGCCAC | 17 | 3358 |

[0717] Table 2C provides exemplary targeting domains for knocking out the UL30 gene selected according to the third tier parameters. The targeting domains are selected based on location within the coding sequence, but downstream of the first 500 bp of the UL30 gene. It is contemplated herein that the targeting domain hybridizes to the target domain through complementary base pairing. Any of the targeting domains in the table can be used with a S. pyogenes Cas9 molecule that gives double stranded cleavage. Any of the targeting domains in the table can be used with a S. pyogenes Cas9 single-stranded break nucleases (nickases). In an embodiment, dual targeting is used to create two nicks on opposite DNA strands by using S. pyogenes Cas9 nickases with two targeting domains that are complementary to opposite DNA strands, e.g., a gRNA comprising any minus strand targeting domain may be paired any gRNA comprising a plus strand targeting domain provided that the two gRNAs are oriented on the DNA such that PAMs face outward and the distance between the 5′ ends of the gRNAs is 0-50 bp.

TABLE 2C

| | | | Target | |
|---|---|---|---|---|
| 3rd Tier | DNA | | Site | |
| gRNA Name | Strand | Targeting Domain | Length | Seq ID |
| HSV1-UL30-421 | − | TATGGACGCCATCACACCGA | 20 | 3359 |
| HSV1-UL30-422 | − | ATGGACGCCATCACACCGAC | 20 | 3360 |
| HSV1-UL30-423 | − | TGGACGCCATCACACCGACG | 20 | 3361 |
| HSV1-UL30-424 | − | GGGGACCGTCATCACGCTCC | 20 | 3362 |
| HSV1-UL30-425 | − | GGGACCGTCATCACGCTCCT | 20 | 3363 |
| HSV1-UL30-426 | − | CACGCTCCTGGGCCTGACTC | 20 | 3364 |
| HSV1-UL30-427 | − | CTCCTGGGCCTGACTCCGGA | 20 | 3365 |
| HSV1-UL30-428 | − | GCCTGACTCCGGAAGGCCAC | 20 | 3366 |
| HSV1-UL30-429 | − | CCTGACTCCGGAAGGCCACC | 20 | 3367 |
| HSV1-UL30-430 | − | GACTCCGGAAGGCCACCGGG | 20 | 3368 |
| HSV1-UL30-431 | − | CGGGTGGCCGTTCACGTTTA | 20 | 3369 |
| HSV1-UL30-432 | − | CCGTTCACGTTTACGGCACG | 20 | 3370 |
| HSV1-UL30-433 | − | GCAGTACTTTTACATGAACA | 20 | 3371 |
| HSV1-UL30-434 | − | GTACTTTTACATGAACAAGG | 20 | 3372 |
| HSV1-UL30-435 | − | CTTTTACATGAACAAGGAGG | 20 | 3373 |
| HSV1-UL30-436 | − | TGAACAAGGAGGAGGTCGAC | 20 | 3374 |
| HSV1-UL30-437 | − | ACGAGATCTCTGCGAGCGCA | 20 | 3375 |
| HSV1-UL30-438 | − | TCTCTGCGAGCGCATGGCCG | 20 | 3376 |
| HSV1-UL30-439 | − | CGCGGCCCTGCGCGAGTCCC | 20 | 3377 |
| HSV1-UL30-440 | − | GCGGCCCTGCGCGAGTCCCC | 20 | 3378 |
| HSV1-UL30-441 | − | TCCCCGGGCGCGTCGTTCCG | 20 | 3379 |
| HSV1-UL30-442 | − | GTCGTTCCGCGGCATCTCCG | 20 | 3380 |
| HSV1-UL30-443 | − | CATCTCCGCGGACCACTTCG | 20 | 3381 |
| HSV1-UL30-444 | − | CTCCGCGGACCACTTCGAGG | 20 | 3382 |
| HSV1-UL30-445 | − | CGCGGACCACTTCGAGGCGG | 20 | 3383 |
| HSV1-UL30-446 | − | GGACCACTTCGAGGCGGAGG | 20 | 3384 |
| HSV1-UL30-447 | − | CCACTTCGAGGCGGAGGTGG | 20 | 3385 |
| HSV1-UL30-448 | − | TACCGCGTCTACGTCCGAAG | 20 | 3386 |
| HSV1-UL30-449 | − | ACCGCGTCTACGTCCGAAGC | 20 | 3387 |
| HSV1-UL30-450 | − | CCTGTGCGACAACTTCTGCC | 20 | 3388 |
| HSV1-UL30-451 | − | CCCGGCCATCAAGAAGTACG | 20 | 3389 |
| HSV1-UL30-452 | − | CCGGCCATCAAGAAGTACGA | 20 | 3390 |
| HSV1-UL30-453 | − | GCCATCAAGAAGTACGAGGG | 20 | 3391 |
| HSV1-UL30-454 | − | CCATCAAGAAGTACGAGGGT | 20 | 3392 |
| HSV1-UL30-455 | − | CATCAAGAAGTACGAGGGTG | 20 | 3393 |
| HSV1-UL30-456 | − | GTGGGGTCGACGCCACCACC | 20 | 3394 |
| HSV1-UL30-457 | − | CGCCACCACCCGGTTCATCC | 20 | 3395 |
| HSV1-UL30-458 | − | CGGTTCATCCTGGACAACCC | 20 | 3396 |
| HSV1-UL30-459 | − | GGTTCATCCTGGACAACCCC | 20 | 3397 |
| HSV1-UL30-460 | − | AACCCCGGGTTCGTCACCTT | 20 | 3398 |
| HSV1-UL30-461 | − | CCGGGTTCGTCACCTTCGGC | 20 | 3399 |
| HSV1-UL30-462 | − | CGGCTGGTACCGTCTCAAAC | 20 | 3400 |
| HSV1-UL30-463 | − | GGCTGGTACCGTCTCAAACC | 20 | 3401 |
| HSV1-UL30-464 | − | GGTACCGTCTCAAACCGGGC | 20 | 3402 |
| HSV1-UL30-465 | − | GAACAACACGCTAGCCCAGC | 20 | 3403 |
| HSV1-UL30-466 | − | CAACACGCTAGCCCAGCCGG | 20 | 3404 |
| HSV1-UL30-467 | − | AGCCCAGCCGGCGGCCCCGA | 20 | 3405 |
| HSV1-UL30-468 | − | CCGGCGGCCCCGATGGCCTT | 20 | 3406 |
| HSV1-UL30-469 | − | CGGCGGCCCCGATGGCCTTC | 20 | 3407 |
| HSV1-UL30-470 | − | CGACGTCGAGTTTAACTGTA | 20 | 3408 |
| HSV1-UL30-471 | − | CGTCGAGTTTAACTGTACGG | 20 | 3409 |
| HSV1-UL30-472 | − | TAACTGTACGGCGGACAACC | 20 | 3410 |
| HSV1-UL30-473 | − | GGCGGACAACCTGGCCATCG | 20 | 3411 |
| HSV1-UL30-474 | − | GCGGACAACCTGGCCATCGA | 20 | 3412 |
| HSV1-UL30-475 | − | CGGACAACCTGGCCATCGAG | 20 | 3413 |
| HSV1-UL30-476 | − | GGACAACCTGGCCATCGAGG | 20 | 3414 |
| HSV1-UL30-477 | − | GACAACCTGGCCATCGAGGG | 20 | 3415 |
| HSV1-UL30-478 | − | GGGGGGCATGAGCGACCTAC | 20 | 3416 |
| HSV1-UL30-479 | − | GTGCTTCGATATCGAATGCA | 20 | 3417 |
| HSV1-UL30-480 | − | CTTCGATATCGAATGCAAGG | 20 | 3418 |
| HSV1-UL30-481 | − | TTCGATATCGAATGCAAGGC | 20 | 3419 |
| HSV1-UL30-482 | − | TCGATATCGAATGCAAGGCG | 20 | 3420 |
| HSV1-UL30-483 | − | CGATATCGAATGCAAGGCGG | 20 | 3421 |
| HSV1-UL30-484 | − | GATATCGAATGCAAGGCGGG | 20 | 3422 |
| HSV1-UL30-485 | − | ATATCGAATGCAAGGCGGGG | 20 | 3423 |
| HSV1-UL30-486 | − | TATCGAATGCAAGGCGGGGG | 20 | 3424 |
| HSV1-UL30-487 | − | CGAATGCAAGGCGGGGGGGG | 20 | 3425 |
| HSV1-UL30-488 | − | GGCGGGGGGGGAGGACGAGC | 20 | 3426 |
| HSV1-UL30-489 | − | GGAGGACGAGCTGGCCTTTC | 20 | 3427 |
| HSV1-UL30-490 | − | GGACGAGCTGGCCTTTCCGG | 20 | 3428 |
| HSV1-UL30-491 | − | GAGCTGGCCTTTCCGGTGGC | 20 | 3429 |
| HSV1-UL30-492 | − | AGCTGGCCTTTCCGGTGGCC | 20 | 3430 |
| HSV1-UL30-493 | − | CTTTCCGGTGGCCGGGCACC | 20 | 3431 |
| HSV1-UL30-494 | − | TCCGGTGGCCGGGCACCCGG | 20 | 3432 |
| HSV1-UL30-495 | − | GGCCGGGCACCCGGAGGACC | 20 | 3433 |
| HSV1-UL30-496 | − | CGACCTGTCCACCACCGCCC | 20 | 3434 |
| HSV1-UL30-497 | − | CACGTCCTCCTGTTTTCGCT | 20 | 3435 |
| HSV1-UL30-498 | − | CGAATCCCACCTGAACGAGC | 20 | 3436 |
| HSV1-UL30-499 | − | ATCCCACCTGAACGAGCTGG | 20 | 3437 |
| HSV1-UL30-500 | − | ACCTGAACGAGCTGGCGGCC | 20 | 3438 |
| HSV1-UL30-501 | − | CCTGAACGAGCTGGCGGCCA | 20 | 3439 |
| HSV1-UL30-502 | − | CTGAACGAGCTGGCGGCCAG | 20 | 3440 |
| HSV1-UL30-503 | − | CAGGGGCCTGCCCACGCCCG | 20 | 3441 |
| HSV1-UL30-504 | − | CCTGCCCACGCCCGTGGTTC | 20 | 3442 |
| HSV1-UL30-505 | − | CAGCGAATTCGAGATGCTGT | 20 | 3443 |
| HSV1-UL30-506 | − | ATGACCCTTGTGAAACAGTA | 20 | 3444 |
| HSV1-UL30-507 | − | TACGGCCCCGAGTTCGTGAC | 20 | 3445 |
| HSV1-UL30-508 | − | ACGGCCCCGAGTTCGTGACC | 20 | 3446 |
| HSV1-UL30-509 | − | ACAACATCATCAACTTCGAC | 20 | 3447 |
| HSV1-UL30-510 | − | CTTCGACTGGCCCTTCTTGC | 20 | 3448 |
| HSV1-UL30-511 | − | CTTCTTGCTGGCCAAGCTGA | 20 | 3449 |
| HSV1-UL30-512 | − | CAAGCTGACGGACATTTACA | 20 | 3450 |
| HSV1-UL30-513 | − | GGACATTTACAAGGTCCCCC | 20 | 3451 |
| HSV1-UL30-514 | − | ATTTACAAGGTCCCCCTGGA | 20 | 3452 |
| HSV1-UL30-515 | − | TTTACAAGGTCCCCCTGGAC | 20 | 3453 |
| HSV1-UL30-516 | − | AAGGTCCCCCTGGACGGGTA | 20 | 3454 |
| HSV1-UL30-517 | − | GACGGGTACGGCCGCATGAA | 20 | 3455 |
| HSV1-UL30-518 | − | GGTACGGCCGCATGAACGGC | 20 | 3456 |
| HSV1-UL30-519 | − | GTACGGCCGCATGAACGGCC | 20 | 3457 |
| HSV1-UL30-520 | − | TACGGCCGCATGAACGGCCG | 20 | 3458 |
| HSV1-UL30-521 | − | GCCGGGGCGTGTTTCGCGTG | 20 | 3459 |
| HSV1-UL30-522 | − | CCGGGGCGTGTTTCGCGTGT | 20 | 3460 |
| HSV1-UL30-523 | − | GTGTTTCGCGTGTGGGACAT | 20 | 3461 |
| HSV1-UL30-524 | − | CCAGAAGCGCAGCAAGATAA | 20 | 3462 |
| HSV1-UL30-525 | − | CGCAGCAAGATAAAGGTGAA | 20 | 3463 |
| HSV1-UL30-526 | − | CAAGATAAAGGTGAACGGCA | 20 | 3464 |
| HSV1-UL30-527 | − | ATGGTGAACATCGACATGTA | 20 | 3465 |
| HSV1-UL30-528 | − | TGGTGAACATCGACATGTAC | 20 | 3466 |
| HSV1-UL30-529 | − | GAGCTACAAGCTCAACGCCG | 20 | 3467 |
| HSV1-UL30-530 | − | CGTGGCCGAAGCCGTCCTGA | 20 | 3468 |
| HSV1-UL30-531 | − | CGTCCTGAAGGACAAGAAGA | 20 | 3469 |
| HSV1-UL30-532 | − | ATCCCCGCCTACTACGCCGC | 20 | 3470 |
| HSV1-UL30-533 | − | TCCCCGCCTACTACGCCGCC | 20 | 3471 |
| HSV1-UL30-534 | − | GCCGCCGGGCCCGCGCAACG | 20 | 3472 |
| HSV1-UL30-535 | − | CCGCCGGGCCCGCGCAACGC | 20 | 3473 |
| HSV1-UL30-536 | − | CGCCGGGCCCGCGCAACGCG | 20 | 3474 |
| HSV1-UL30-537 | − | CCCGCGCAACGCGGGGTGAT | 20 | 3475 |
| HSV1-UL30-538 | − | GATCGGCGAGTACTGCATAC | 20 | 3476 |
| HSV1-UL30-539 | − | CTGCATACAGGATTCCCTGC | 20 | 3477 |
| HSV1-UL30-540 | − | CATACAGGATTCCCTGCTGG | 20 | 3478 |
| HSV1-UL30-541 | − | ATACAGGATTCCCTGCTGGT | 20 | 3479 |
| HSV1-UL30-542 | − | TTTTAAGTTTTTGCCCCATC | 20 | 3480 |
| HSV1-UL30-543 | − | TTTGCCCCATCTGGAGCTCT | 20 | 3481 |
| HSV1-UL30-544 | − | GCTCTCGGCCGTCGCGCGCT | 20 | 3482 |
| HSV1-UL30-545 | − | CTCGGCCGTCGCGCGCTTGG | 20 | 3483 |
| HSV1-UL30-546 | − | TCGGCCGTCGCGCGCTTGGC | 20 | 3484 |
| HSV1-UL30-547 | − | ATCACCCGCACCATCTACGA | 20 | 3485 |
| HSV1-UL30-548 | − | CTTTACGTGCCTGCTGCGCC | 20 | 3486 |
| HSV1-UL30-549 | − | GCTGCGCCTGGCCGACCAGA | 20 | 3487 |
| HSV1-UL30-550 | − | CTGCGCCTGGCCGACCAGAA | 20 | 3488 |
| HSV1-UL30-551 | − | CCAGAAGGGCTTTATTCTGC | 20 | 3489 |
| HSV1-UL30-552 | − | CTTTATTCTGCCGGACACCC | 20 | 3490 |
| HSV1-UL30-553 | − | TTTATTCTGCCGGACACCCA | 20 | 3491 |
| HSV1-UL30-554 | − | TTATTCTGCCGGACACCCAG | 20 | 3492 |
| HSV1-UL30-555 | − | CGGACACCCAGGGGCGATTT | 20 | 3493 |
| HSV1-UL30-556 | − | GGACACCCAGGGGCGATTTA | 20 | 3494 |
| HSV1-UL30-557 | − | GACACCCAGGGGCGATTTAG | 20 | 3495 |
| HSV1-UL30-558 | − | CAGGGGCGATTTAGGGGCGC | 20 | 3496 |
| HSV1-UL30-559 | − | AGGGGCGATTTAGGGGCGCC | 20 | 3497 |
| HSV1-UL30-560 | − | GGGGCGATTTAGGGGCGCCG | 20 | 3498 |
| HSV1-UL30-561 | − | GGGCGATTTAGGGGCGCCGG | 20 | 3499 |
| HSV1-UL30-562 | − | GGCGATTTAGGGGCGCCGGG | 20 | 3500 |
| HSV1-UL30-563 | − | GCGATTTAGGGGCGCCGGGG | 20 | 3501 |
| HSV1-UL30-564 | − | ATTTAGGGGCGCCGGGGGGG | 20 | 3502 |
| HSV1-UL30-565 | − | GGGGGAGGCGCCCAAGCGTC | 20 | 3503 |
| HSV1-UL30-566 | − | CCAAGCGTCCGGCCGCAGCC | 20 | 3504 |
| HSV1-UL30-567 | − | CAAGCGTCCGGCCGCAGCCC | 20 | 3505 |
| HSV1-UL30-568 | − | GCGTCCGGCCGCAGCCCGGG | 20 | 3506 |
| HSV1-UL30-569 | − | GGCCGCAGCCCGGGAGGACG | 20 | 3507 |
| HSV1-UL30-570 | − | CAGCCCGGGAGGACGAGGAG | 20 | 3508 |
| HSV1-UL30-571 | − | GGAGGACGAGGAGCGGCCAG | 20 | 3509 |
| HSV1-UL30-572 | − | GGACGAGGAGCGGCCAGAGG | 20 | 3510 |
| HSV1-UL30-573 | − | CGAGGAGCGGCCAGAGGAGG | 20 | 3511 |
| HSV1-UL30-574 | − | GAGGAGCGGCCAGAGGAGGA | 20 | 3512 |
| HSV1-UL30-575 | − | AGGAGCGGCCAGAGGAGGAG | 20 | 3513 |
| HSV1-UL30-576 | − | GGAGCGGCCAGAGGAGGAGG | 20 | 3514 |
| HSV1-UL30-577 | − | GCGGCCAGAGGAGGAGGGGG | 20 | 3515 |
| HSV1-UL30-578 | − | AGAGGAGGAGGGGGAGGACG | 20 | 3516 |
| HSV1-UL30-579 | − | GGAGGACGAGGACGAACGCG | 20 | 3517 |
| HSV1-UL30-580 | − | GGACGAGGACGAACGCGAGG | 20 | 3518 |
| HSV1-UL30-581 | − | GACGAGGACGAACGCGAGGA | 20 | 3519 |
| HSV1-UL30-582 | − | GAGGACGAACGCGAGGAGGG | 20 | 3520 |
| HSV1-UL30-583 | − | AGGACGAACGCGAGGAGGGC | 20 | 3521 |
| HSV1-UL30-584 | − | GGACGAACGCGAGGAGGGCG | 20 | 3522 |
| HSV1-UL30-585 | − | GACGAACGCGAGGAGGGCGG | 20 | 3523 |
| HSV1-UL30-586 | − | GCGAGGAGGGCGGGGGCGAG | 20 | 3524 |
| HSV1-UL30-587 | − | CGAGGAGGGCGGGGGCGAGC | 20 | 3525 |
| HSV1-UL30-588 | − | GGGCGGGGGCGAGCGGGAGC | 20 | 3526 |
| HSV1-UL30-589 | − | CGGGGGCGAGCGGGAGCCGG | 20 | 3527 |
| HSV1-UL30-590 | − | GGGGGCGAGCGGGAGCCGGA | 20 | 3528 |
| HSV1-UL30-591 | − | AGCGGGAGCCGGAGGGCGCG | 20 | 3529 |
| HSV1-UL30-592 | − | GCGGGAGCCGGAGGGCGCGC | 20 | 3530 |
| HSV1-UL30-593 | − | GAGGGCGCGCGGGAGACCGC | 20 | 3531 |
| HSV1-UL30-594 | − | GCGCGCGGGAGACCGCCGGC | 20 | 3532 |
| HSV1-UL30-595 | − | GGAGACCGCCGGCAGGCACG | 20 | 3533 |
| HSV1-UL30-596 | − | GAGACCGCCGGCAGGCACGT | 20 | 3534 |
| HSV1-UL30-597 | − | AGACCGCCGGCAGGCACGTG | 20 | 3535 |
| HSV1-UL30-598 | − | CGGCAGGCACGTGGGGTACC | 20 | 3536 |
| HSV1-UL30-599 | − | GGCAGGCACGTGGGGTACCA | 20 | 3537 |
| HSV1-UL30-600 | − | GCAGGCACGTGGGGTACCAG | 20 | 3538 |
| HSV1-UL30-601 | − | CAGGCACGTGGGGTACCAGG | 20 | 3539 |
| HSV1-UL30-602 | − | ACGTGGGGTACCAGGGGGCC | 20 | 3540 |
| HSV1-UL30-603 | − | CGTGGGGTACCAGGGGGCCA | 20 | 3541 |
| HSV1-UL30-604 | − | AGGGTCCTTGACCCCACTTC | 20 | 3542 |
| HSV1-UL30-605 | − | GGGTCCTTGACCCCACTTCC | 20 | 3543 |
| HSV1-UL30-606 | − | CGGGTTTCACGTGAACCCCG | 20 | 3544 |
| HSV1-UL30-607 | − | GTTTCACGTGAACCCCGTGG | 20 | 3545 |
| HSV1-UL30-608 | − | CCTGTACCCCAGCATCATCC | 20 | 3546 |
| HSV1-UL30-609 | − | GCTTCAGCACGCTCTCCCTG | 20 | 3547 |
| HSV1-UL30-610 | − | CTTCAGCACGCTCTCCCTGA | 20 | 3548 |
| HSV1-UL30-611 | − | CTCCCTGAGGGCCGACGCAG | 20 | 3549 |
| HSV1-UL30-612 | − | GGCCGACGCAGTGGCGCACC | 20 | 3550 |
| HSV1-UL30-613 | − | CGACGCAGTGGCGCACCTGG | 20 | 3551 |
| HSV1-UL30-614 | − | CGCAGTGGCGCACCTGGAGG | 20 | 3552 |
| HSV1-UL30-615 | − | GCAGTGGCGCACCTGGAGGC | 20 | 3553 |
| HSV1-UL30-616 | − | GGCGCACCTGGAGGCGGGCA | 20 | 3554 |
| HSV1-UL30-617 | − | GGAGGCGGGCAAGGACTACC | 20 | 3555 |
| HSV1-UL30-618 | − | CAAGGACTACCTGGAGATCG | 20 | 3556 |
| HSV1-UL30-619 | − | GGACTACCTGGAGATCGAGG | 20 | 3557 |
| HSV1-UL30-620 | − | GACTACCTGGAGATCGAGGT | 20 | 3558 |
| HSV1-UL30-621 | − | ACTACCTGGAGATCGAGGTG | 20 | 3559 |
| HSV1-UL30-622 | − | CTACCTGGAGATCGAGGTGG | 20 | 3560 |
| HSV1-UL30-623 | − | TACCTGGAGATCGAGGTGGG | 20 | 3561 |
| HSV1-UL30-624 | − | ACCTGGAGATCGAGGTGGGG | 20 | 3562 |
| HSV1-UL30-625 | − | AGATCGAGGTGGGGGGGCGA | 20 | 3563 |
| HSV1-UL30-626 | − | GCGACGGCTGTTCTTCGTCA | 20 | 3564 |
| HSV1-UL30-627 | − | GCCTCCTCAGCATCCTCCTG | 20 | 3565 |
| HSV1-UL30-628 | − | CCTCCTCAGCATCCTCCTGC | 20 | 3566 |
| HSV1-UL30-629 | − | TCAGCATCCTCCTGCGGGAC | 20 | 3567 |
| HSV1-UL30-630 | − | TGCGAAAGCAGATCCGCTCG | 20 | 3568 |
| HSV1-UL30-631 | − | GATTCCCCAGAGCAGCCCCG | 20 | 3569 |
| HSV1-UL30-632 | − | TCCCCAGAGCAGCCCCGAGG | 20 | 3570 |
| HSV1-UL30-633 | − | CCCCGAGGAGGCCGTGCTCC | 20 | 3571 |
| HSV1-UL30-634 | − | CGTGCTCCTGGACAAGCAGC | 20 | 3572 |
| HSV1-UL30-635 | − | CAAGCAGCAGGCCGCCATCA | 20 | 3573 |
| HSV1-UL30-636 | − | CATCAAGGTCGTGTGTAACT | 20 | 3574 |
| HSV1-UL30-637 | − | GTCGTGTGTAACTCGGTGTA | 20 | 3575 |
| HSV1-UL30-638 | − | TCGTGTGTAACTCGGTGTAC | 20 | 3576 |
| HSV1-UL30-639 | − | TAACTCGGTGTACGGGTTCA | 20 | 3577 |
| HSV1-UL30-640 | − | AACTCGGTGTACGGGTTCAC | 20 | 3578 |
| HSV1-UL30-641 | − | GGGTTCACGGGAGTGCAGCA | 20 | 3579 |
| HSV1-UL30-642 | − | GTGCCTGCACGTTGCCGCGA | 20 | 3580 |
| HSV1-UL30-643 | − | GCCGCGACGGTGACGACCAT | 20 | 3581 |
| HSV1-UL30-644 | − | GCGAGTACGTCCACGCGCGC | 20 | 3582 |
| HSV1-UL30-645 | − | CGAGTACGTCCACGCGCGCT | 20 | 3583 |
| HSV1-UL30-646 | − | GTACGTCCACGCGCGCTGGG | 20 | 3584 |
| HSV1-UL30-647 | − | GGCGGCCTTCGAACAGCTCC | 20 | 3585 |
| HSV1-UL30-648 | − | ACAGCTCCTGGCCGATTTCC | 20 | 3586 |
| HSV1-UL30-649 | − | GCTCCTGGCCGATTTCCCGG | 20 | 3587 |
| HSV1-UL30-650 | − | CCTGGCCGATTTCCCGGAGG | 20 | 3588 |
| HSV1-UL30-651 | − | GCGGCCGACATGCGCGCCCC | 20 | 3589 |
| HSV1-UL30-652 | − | CGGCCGACATGCGCGCCCCC | 20 | 3590 |
| HSV1-UL30-653 | − | TATTCCATGCGCATCATCTA | 20 | 3591 |
| HSV1-UL30-654 | − | ATTCCATGCGCATCATCTAC | 20 | 3592 |
| HSV1-UL30-655 | − | TTCCATGCGCATCATCTACG | 20 | 3593 |
| HSV1-UL30-656 | − | GCGCATCATCTACGGGGACA | 20 | 3594 |
| HSV1-UL30-657 | − | TCCATCTTTGTGCTGTGCCG | 20 | 3595 |
| HSV1-UL30-658 | − | TGTGCTGTGCCGCGGCCTCA | 20 | 3596 |
| HSV1-UL30-659 | − | TGCCGCGGCCTCACGGCCGC | 20 | 3597 |
| HSV1-UL30-660 | − | GCCGCGGCCTCACGGCCGCC | 20 | 3598 |
| HSV1-UL30-661 | − | CCTCACGGCCGCCGGGCTGA | 20 | 3599 |
| HSV1-UL30-662 | − | GGCCGCCGGGCTGACGGCCG | 20 | 3600 |
| HSV1-UL30-663 | − | GCCGCCGGGCTGACGGCCGT | 20 | 3601 |
| HSV1-UL30-664 | − | GACGGCCGTGGGCGACAAGA | 20 | 3602 |
| HSV1-UL30-665 | − | ATCGCCAAGAAAAAGTACAT | 20 | 3603 |
| HSV1-UL30-666 | − | AAGTACATCGGCGTCATCTA | 20 | 3604 |
| HSV1-UL30-667 | − | AGTACATCGGCGTCATCTAC | 20 | 3605 |
| HSV1-UL30-668 | − | GTACATCGGCGTCATCTACG | 20 | 3606 |
| HSV1-UL30-669 | − | TACATCGGCGTCATCTACGG | 20 | 3607 |
| HSV1-UL30-670 | − | CGGGGGTAAGATGCTCATCA | 20 | 3608 |
| HSV1-UL30-671 | − | GGGGGTAAGATGCTCATCAA | 20 | 3609 |
| HSV1-UL30-672 | − | TAAGATGCTCATCAAGGGCG | 20 | 3610 |
| HSV1-UL30-673 | − | GCTCATCAAGGGCGTGGATC | 20 | 3611 |
| HSV1-UL30-674 | − | CGTTTATCAACCGCACCTCC | 20 | 3612 |
| HSV1-UL30-675 | − | GTTTATCAACCGCACCTCCA | 20 | 3613 |
| HSV1-UL30-676 | − | CAACCGCACCTCCAGGGCCC | 20 | 3614 |
| HSV1-UL30-677 | − | TTTTACGACGATACCGTCTC | 20 | 3615 |
| HSV1-UL30-678 | − | CGACGATACCGTCTCCGGAG | 20 | 3616 |
| HSV1-UL30-679 | − | CGCGTTAGCCGAGCGCCCCG | 20 | 3617 |
| HSV1-UL30-680 | − | GTTAGCCGAGCGCCCCGCGG | 20 | 3618 |
| HSV1-UL30-681 | − | CCGAGCGCCCCGCGGAGGAG | 20 | 3619 |
| HSV1-UL30-682 | − | GCGCCCCGCGGAGGAGTGGC | 20 | 3620 |
| HSV1-UL30-683 | − | GCTGGCGCGACCCCTGCCCG | 20 | 3621 |
| HSV1-UL30-684 | − | CTGGCGCGACCCCTGCCCGA | 20 | 3622 |
| HSV1-UL30-685 | − | ACCCCTGCCCGAGGGACTGC | 20 | 3623 |
| HSV1-UL30-686 | − | CCCGAGGGACTGCAGGCGTT | 20 | 3624 |
| HSV1-UL30-687 | − | CCGAGGGACTGCAGGCGTTC | 20 | 3625 |
| HSV1-UL30-688 | − | CGAGGGACTGCAGGCGTTCG | 20 | 3626 |
| HSV1-UL30-689 | − | CCGTCCTCGTAGACGCCCAT | 20 | 3627 |
| HSV1-UL30-690 | − | CCATCGGCGCATCACCGACC | 20 | 3628 |
| HSV1-UL30-691 | − | GGCGCATCACCGACCCGGAG | 20 | 3629 |
| HSV1-UL30-692 | − | GCGCATCACCGACCCGGAGA | 20 | 3630 |
| HSV1-UL30-693 | − | CGACCCGGAGAGGGACATCC | 20 | 3631 |
| HSV1-UL30-694 | − | CGCGTACACCAACAAGCGCC | 20 | 3632 |
| HSV1-UL30-695 | − | CAAGCGCCTGGCCCACCTGA | 20 | 3633 |
| HSV1-UL30-696 | − | GACGGTGTATTACAAGCTCA | 20 | 3634 |
| HSV1-UL30-697 | − | GCTCATGGCCCGCCGCGCGC | 20 | 3635 |
| HSV1-UL30-698 | − | CGCGCAGGTCCCGTCCATCA | 20 | 3636 |
| HSV1-UL30-699 | − | AGGTCCCGTCCATCAAGGAC | 20 | 3637 |
| HSV1-UL30-700 | − | CCGGATCCCGTACGTGATCG | 20 | 3638 |
| HSV1-UL30-701 | − | GATCGTGGCCCAGACCCGCG | 20 | 3639 |
| HSV1-UL30-702 | − | GGCCCAGACCCGCGAGGTAG | 20 | 3640 |
| HSV1-UL30-703 | − | GACCCGCGAGGTAGAGGAGA | 20 | 3641 |
| HSV1-UL30-704 | − | AGGTAGAGGAGACGGTCGCG | 20 | 3642 |
| HSV1-UL30-705 | − | AGAGGAGACGGTCGCGCGGC | 20 | 3643 |
| HSV1-UL30-706 | − | GAGCTAGACGCCGCCGCCCC | 20 | 3644 |
| HSV1-UL30-707 | − | AGCTAGACGCCGCCGCCCCA | 20 | 3645 |
| HSV1-UL30-708 | − | GCTAGACGCCGCCGCCCCAG | 20 | 3646 |
| HSV1-UL30-709 | − | GGACGAGCCCGCCCCCCCCG | 20 | 3647 |
| HSV1-UL30-710 | − | CCCCGCGGCCCTGCCCTCCC | 20 | 3648 |
| HSV1-UL30-711 | − | CCTCCCCGGCCAAGCGCCCC | 20 | 3649 |
| HSV1-UL30-712 | − | CTCCCCGGCCAAGCGCCCCC | 20 | 3650 |
| HSV1-UL30-713 | − | GCCGTCGCCTGCCGACCCCC | 20 | 3651 |
| HSV1-UL30-714 | − | CCGTCGCCTGCCGACCCCCC | 20 | 3652 |
| HSV1-UL30-715 | − | TCGCCTGCCGACCCCCCGGG | 20 | 3653 |
| HSV1-UL30-716 | − | GTCCAAGCCCCGCAAGCTGC | 20 | 3654 |
| HSV1-UL30-717 | − | CAAGCTGCTGGTGTCCGAGC | 20 | 3655 |
| HSV1-UL30-718 | − | GCTGGTGTCCGAGCTGGCCG | 20 | 3656 |
| HSV1-UL30-719 | − | CCCGCATACGCCATTGCCCA | 20 | 3657 |
| HSV1-UL30-720 | − | CCACGGCGTCGCCCTGAACA | 20 | 3658 |
| HSV1-UL30-721 | − | CTATTACTTCTCCCACCTGT | 20 | 3659 |
| HSV1-UL30-722 | − | TATTACTTCTCCCACCTGTT | 20 | 3660 |
| HSV1-UL30-723 | − | ATTACTTCTCCCACCTGTTG | 20 | 3661 |
| HSV1-UL30-724 | − | TTACTTCTCCCACCTGTTGG | 20 | 3662 |
| HSV1-UL30-725 | − | CTTCTCCCACCTGTTGGGGG | 20 | 3663 |
| HSV1-UL30-726 | − | GGCGGCGTGCGTGACATTCA | 20 | 3664 |
| HSV1-UL30-727 | − | GTGACATTCAAGGCCCTGTT | 20 | 3665 |
| HSV1-UL30-728 | − | TGACATTCAAGGCCCTGTTT | 20 | 3666 |
| HSV1-UL30-729 | − | TCACCGAGAGTCTGTTAAAA | 20 | 3667 |
| HSV1-UL30-730 | − | AAAGGTTTATTCCCGAAGTG | 20 | 3668 |
| HSV1-UL30-731 | − | TCCCGAAGTGTGGCACCCCC | 20 | 3669 |
| HSV1-UL30-732 | − | GTGGCACCCCCCGGACGACG | 20 | 3670 |
| HSV1-UL30-733 | − | CCCCGGACGACGTGGCCGCG | 20 | 3671 |
| HSV1-UL30-734 | − | ACGACGTGGCCGCGCGGCTC | 20 | 3672 |
| HSV1-UL30-735 | − | GCCGCGCGGCTCCGGACCGC | 20 | 3673 |
| HSV1-UL30-736 | − | CCGCGCGGCTCCGGACCGCA | 20 | 3674 |
| HSV1-UL30-737 | − | CGGCTCCGGACCGCAGGGTT | 20 | 3675 |
| HSV1-UL30-738 | − | GGCTCCGGACCGCAGGGTTC | 20 | 3676 |
| HSV1-UL30-739 | − | GCTCCGGACCGCAGGGTTCG | 20 | 3677 |
| HSV1-UL30-740 | − | CCGGACCGCAGGGTTCGGGG | 20 | 3678 |
| HSV1-UL30-741 | − | GACCGCAGGGTTCGGGGCGG | 20 | 3679 |
| HSV1-UL30-742 | − | ACCGCAGGGTTCGGGGCGGT | 20 | 3680 |
| HSV1-UL30-743 | − | GGGTTCGGGGCGGTGGGTGC | 20 | 3681 |
| HSV1-UL30-744 | − | GGCGGTGGGTGCCGGCGCTA | 20 | 3682 |
| HSV1-UL30-745 | − | GGTGGGTGCCGGCGCTACGG | 20 | 3683 |
| HSV1-UL30-746 | − | GGGTGCCGGCGCTACGGCGG | 20 | 3684 |
| HSV1-UL30-747 | − | GGACGCCATCACACCGA | 17 | 3685 |
| HSV1-UL30-748 | − | GACGCCATCACACCGAC | 17 | 3686 |
| HSV1-UL30-749 | − | ACGCCATCACACCGACG | 17 | 3687 |
| HSV1-UL30-750 | − | GACCGTCATCACGCTCC | 17 | 3688 |
| HSV1-UL30-751 | − | ACCGTCATCACGCTCCT | 17 | 3689 |
| HSV1-UL30-752 | − | GCTCCTGGGCCTGACTC | 17 | 3690 |
| HSV1-UL30-753 | − | CTGGGCCTGACTCCGGA | 17 | 3691 |
| HSV1-UL30-754 | − | TGACTCCGGAAGGCCAC | 17 | 3692 |
| HSV1-UL30-755 | − | GACTCCGGAAGGCCACC | 17 | 3693 |
| HSV1-UL30-756 | − | TCCGGAAGGCCACCGGG | 17 | 3694 |
| HSV1-UL30-757 | − | GTGGCCGTTCACGTTTA | 17 | 3695 |
| HSV1-UL30-758 | − | TTCACGTTTACGGCACG | 17 | 3696 |
| HSV1-UL30-759 | − | GTACTTTTACATGAACA | 17 | 3697 |
| HSV1-UL30-760 | − | CTTTTACATGAACAAGG | 17 | 3698 |
| HSV1-UL30-761 | − | TTACATGAACAAGGAGG | 17 | 3699 |
| HSV1-UL30-762 | − | ACAAGGAGGAGGTCGAC | 17 | 3700 |
| HSV1-UL30-763 | − | AGATCTCTGCGAGCGCA | 17 | 3701 |
| HSV1-UL30-764 | − | CTGCGAGCGCATGGCCG | 17 | 3702 |
| HSV1-UL30-765 | − | GGCCCTGCGCGAGTCCC | 17 | 3703 |
| HSV1-UL30-766 | − | GCCCTGCGCGAGTCCCC | 17 | 3704 |
| HSV1-UL30-767 | − | CCGGGCGCGTCGTTCCG | 17 | 3705 |
| HSV1-UL30-768 | − | GTTCCGCGGCATCTCCG | 17 | 3706 |
| HSV1-UL30-769 | − | CTCCGCGGACCACTTCG | 17 | 3707 |
| HSV1-UL30-770 | − | CGCGGACCACTTCGAGG | 17 | 3708 |
| HSV1-UL30-771 | − | GGACCACTTCGAGGCGG | 17 | 3709 |
| HSV1-UL30-772 | − | CCACTTCGAGGCGGAGG | 17 | 3710 |
| HSV1-UL30-773 | − | CTTCGAGGCGGAGGTGG | 17 | 3711 |
| HSV1-UL30-774 | − | CGCGTCTACGTCCGAAG | 17 | 3712 |
| HSV1-UL30-775 | − | GCGTCTACGTCCGAAGC | 17 | 3713 |
| HSV1-UL30-776 | − | GTGCGACAACTTCTGCC | 17 | 3714 |
| HSV1-UL30-777 | − | GGCCATCAAGAAGTACG | 17 | 3715 |
| HSV1-UL30-778 | − | GCCATCAAGAAGTACGA | 17 | 3716 |
| HSV1-UL30-779 | − | ATCAAGAAGTACGAGGG | 17 | 3717 |
| HSV1-UL30-780 | − | TCAAGAAGTACGAGGGT | 17 | 3718 |
| HSV1-UL30-781 | − | CAAGAAGTACGAGGGTG | 17 | 3719 |
| HSV1-UL30-782 | − | GGGTCGACGCCACCACC | 17 | 3720 |
| HSV1-UL30-783 | − | CACCACCCGGTTCATCC | 17 | 3721 |
| HSV1-UL30-784 | − | TTCATCCTGGACAACCC | 17 | 3722 |
| HSV1-UL30-785 | − | TCATCCTGGACAACCCC | 17 | 3723 |
| HSV1-UL30-786 | − | CCCGGGTTCGTCACCTT | 17 | 3724 |
| HSV1-UL30-787 | − | GGTTCGTCACCTTCGGC | 17 | 3725 |
| HSV1-UL30-788 | − | CTGGTACCGTCTCAAAC | 17 | 3726 |
| HSV1-UL30-789 | − | TGGTACCGTCTCAAACC | 17 | 3727 |
| HSV1-UL30-790 | − | ACCGTCTCAAACCGGGC | 17 | 3728 |
| HSV1-UL30-791 | − | CAACACGCTAGCCCAGC | 17 | 3729 |
| HSV1-UL30-792 | − | CACGCTAGCCCAGCCGG | 17 | 3730 |
| HSV1-UL30-793 | − | CCAGCCGGCGGCCCCGA | 17 | 3731 |
| HSV1-UL30-794 | − | GCGGCCCCGATGGCCTT | 17 | 3732 |
| HSV1-UL30-795 | − | CGGCCCCGATGGCCTTC | 17 | 3733 |
| HSV1-UL30-796 | − | CGTCGAGTTTAACTGTA | 17 | 3734 |
| HSV1-UL30-797 | − | CGAGTTTAACTGTACGG | 17 | 3735 |
| HSV1-UL30-798 | − | CTGTACGGCGGACAACC | 17 | 3736 |
| HSV1-UL30-799 | − | GGACAACCTGGCCATCG | 17 | 3737 |
| HSV1-UL30-800 | − | GACAACCTGGCCATCGA | 17 | 3738 |
| HSV1-UL30-801 | − | ACAACCTGGCCATCGAG | 17 | 3739 |
| HSV1-UL30-802 | − | CAACCTGGCCATCGAGG | 17 | 3740 |
| HSV1-UL30-803 | − | AACCTGGCCATCGAGGG | 17 | 3741 |
| HSV1-UL30-804 | − | GGGCATGAGCGACCTAC | 17 | 3742 |
| HSV1-UL30-805 | − | CTTCGATATCGAATGCA | 17 | 3743 |
| HSV1-UL30-806 | − | CGATATCGAATGCAAGG | 17 | 3744 |
| HSV1-UL30-807 | − | GATATCGAATGCAAGGC | 17 | 3745 |
| HSV1-UL30-808 | − | ATATCGAATGCAAGGCG | 17 | 3746 |
| HSV1-UL30-809 | − | TATCGAATGCAAGGCGG | 17 | 3747 |
| HSV1-UL30-810 | − | ATCGAATGCAAGGCGGG | 17 | 3748 |
| HSV1-UL30-811 | − | TCGAATGCAAGGCGGGG | 17 | 3749 |
| HSV1-UL30-812 | − | CGAATGCAAGGCGGGGG | 17 | 3750 |
| HSV1-UL30-813 | − | ATGCAAGGCGGGGGGGG | 17 | 3751 |
| HSV1-UL30-814 | − | GGGGGGGGAGGACGAGC | 17 | 3752 |
| HSV1-UL30-815 | − | GGACGAGCTGGCCTTTC | 17 | 3753 |
| HSV1-UL30-816 | − | CGAGCTGGCCTTTCCGG | 17 | 3754 |
| HSV1-UL30-817 | − | CTGGCCTTTCCGGTGGC | 17 | 3755 |
| HSV1-UL30-818 | − | TGGCCTTTCCGGTGGCC | 17 | 3756 |
| HSV1-UL30-819 | − | TCCGGTGGCCGGGCACC | 17 | 3757 |
| HSV1-UL30-820 | − | GGTGGCCGGGCACCCGG | 17 | 3758 |
| HSV1-UL30-821 | − | CGGGCACCCGGAGGACC | 17 | 3759 |
| HSV1-UL30-822 | − | CCTGTCCACCACCGCCC | 17 | 3760 |
| HSV1-UL30-823 | − | GTCCTCCTGTTTTCGCT | 17 | 3761 |
| HSV1-UL30-824 | − | ATCCCACCTGAACGAGC | 17 | 3762 |
| HSV1-UL30-825 | − | CCACCTGAACGAGCTGG | 17 | 3763 |
| HSV1-UL30-826 | − | TGAACGAGCTGGCGGCC | 17 | 3764 |
| HSV1-UL30-827 | − | GAACGAGCTGGCGGCCA | 17 | 3765 |
| HSV1-UL30-828 | − | AACGAGCTGGCGGCCAG | 17 | 3766 |
| HSV1-UL30-829 | − | GGGCCTGCCCACGCCCG | 17 | 3767 |
| HSV1-UL30-830 | − | GCCCACGCCCGTGGTTC | 17 | 3768 |
| HSV1-UL30-831 | − | CGAATTCGAGATGCTGT | 17 | 3769 |
| HSV1-UL30-832 | − | ACCCTTGTGAAACAGTA | 17 | 3770 |
| HSV1-UL30-833 | − | GGCCCCGAGTTCGTGAC | 17 | 3771 |
| HSV1-UL30-834 | − | GCCCCGAGTTCGTGACC | 17 | 3772 |
| HSV1-UL30-835 | − | ACATCATCAACTTCGAC | 17 | 3773 |
| HSV1-UL30-836 | − | CGACTGGCCCTTCTTGC | 17 | 3774 |
| HSV1-UL30-837 | − | CTTGCTGGCCAAGCTGA | 17 | 3775 |
| HSV1-UL30-838 | − | GCTGACGGACATTTACA | 17 | 3776 |
| HSV1-UL30-839 | − | CATTTACAAGGTCCCCC | 17 | 3777 |
| HSV1-UL30-840 | − | TACAAGGTCCCCCTGGA | 17 | 3778 |
| HSV1-UL30-841 | − | ACAAGGTCCCCCTGGAC | 17 | 3779 |
| HSV1-UL30-842 | − | GTCCCCCTGGACGGGTA | 17 | 3780 |
| HSV1-UL30-843 | − | GGGTACGGCCGCATGAA | 17 | 3781 |
| HSV1-UL30-844 | − | ACGGCCGCATGAACGGC | 17 | 3782 |
| HSV1-UL30-845 | − | CGGCCGCATGAACGGCC | 17 | 3783 |
| HSV1-UL30-846 | − | GGCCGCATGAACGGCCG | 17 | 3784 |
| HSV1-UL30-847 | − | GGGGCGTGTTTCGCGTG | 17 | 3785 |
| HSV1-UL30-848 | − | GGGCGTGTTTCGCGTGT | 17 | 3786 |
| HSV1-UL30-849 | − | TTTCGCGTGTGGGACAT | 17 | 3787 |
| HSV1-UL30-850 | − | GAAGCGCAGCAAGATAA | 17 | 3788 |
| HSV1-UL30-851 | − | AGCAAGATAAAGGTGAA | 17 | 3789 |
| HSV1-UL30-852 | − | GATAAAGGTGAACGGCA | 17 | 3790 |
| HSV1-UL30-853 | − | GTGAACATCGACATGTA | 17 | 3791 |
| HSV1-UL30-854 | − | TGAACATCGACATGTAC | 17 | 3792 |
| HSV1-UL30-855 | − | CTACAAGCTCAACGCCG | 17 | 3793 |
| HSV1-UL30-856 | − | GGCCGAAGCCGTCCTGA | 17 | 3794 |
| HSV1-UL30-857 | − | CCTGAAGGACAAGAAGA | 17 | 3795 |
| HSV1-UL30-858 | − | CCCGCCTACTACGCCGC | 17 | 3796 |
| HSV1-UL30-859 | − | CCGCCTACTACGCCGCC | 17 | 3797 |
| HSV1-UL30-860 | − | GCCGGGCCCGCGCAACG | 17 | 3798 |
| HSV1-UL30-861 | − | CCGGGCCCGCGCAACGC | 17 | 3799 |
| HSV1-UL30-862 | − | CGGGCCCGCGCAACGCG | 17 | 3800 |
| HSV1-UL30-863 | − | GCGCAACGCGGGGTGAT | 17 | 3801 |
| HSV1-UL30-864 | − | CGGCGAGTACTGCATAC | 17 | 3802 |
| HSV1-UL30-865 | − | CATACAGGATTCCCTGC | 17 | 3803 |
| HSV1-UL30-866 | − | ACAGGATTCCCTGCTGG | 17 | 3804 |
| HSV1-UL30-867 | − | CAGGATTCCCTGCTGGT | 17 | 3805 |
| HSV1-UL30-868 | − | TAAGTTTTTGCCCCATC | 17 | 3806 |
| HSV1-UL30-869 | − | GCCCCATCTGGAGCTCT | 17 | 3807 |
| HSV1-UL30-870 | − | CTCGGCCGTCGCGCGCT | 17 | 3808 |
| HSV1-UL30-871 | − | GGCCGTCGCGCGCTTGG | 17 | 3809 |
| HSV1-UL30-872 | − | GCCGTCGCGCGCTTGGC | 17 | 3810 |
| HSV1-UL30-873 | − | ACCCGCACCATCTACGA | 17 | 3811 |
| HSV1-UL30-874 | − | TACGTGCCTGCTGCGCC | 17 | 3812 |
| HSV1-UL30-875 | − | GCGCCTGGCCGACCAGA | 17 | 3813 |
| HSV1-UL30-876 | − | CGCCTGGCCGACCAGAA | 17 | 3814 |
| HSV1-UL30-877 | − | GAAGGGCTTTATTCTGC | 17 | 3815 |
| HSV1-UL30-878 | − | TATTCTGCCGGACACCC | 17 | 3816 |
| HSV1-UL30-879 | − | ATTCTGCCGGACACCCA | 17 | 3817 |
| HSV1-UL30-880 | − | TTCTGCCGGACACCCAG | 17 | 3818 |
| HSV1-UL30-881 | − | ACACCCAGGGGCGATTT | 17 | 3819 |
| HSV1-UL30-882 | − | CACCCAGGGGCGATTTA | 17 | 3820 |
| HSV1-UL30-883 | − | ACCCAGGGGCGATTTAG | 17 | 3821 |
| HSV1-UL30-884 | − | GGGCGATTTAGGGGCGC | 17 | 3822 |
| HSV1-UL30-885 | − | GGCGATTTAGGGGCGCC | 17 | 3823 |
| HSV1-UL30-886 | − | GCGATTTAGGGGCGCCG | 17 | 3824 |
| HSV1-UL30-887 | − | CGATTTAGGGGCGCCGG | 17 | 3825 |
| HSV1-UL30-888 | − | GATTTAGGGGCGCCGGG | 17 | 3826 |
| HSV1-UL30-889 | − | ATTTAGGGGCGCCGGGG | 17 | 3827 |
| HSV1-UL30-890 | − | TAGGGGCGCCGGGGGGG | 17 | 3828 |
| HSV1-UL30-891 | − | GGAGGCGCCCAAGCGTC | 17 | 3829 |
| HSV1-UL30-892 | − | AGCGTCCGGCCGCAGCC | 17 | 3830 |
| HSV1-UL30-893 | − | GCGTCCGGCCGCAGCCC | 17 | 3831 |
| HSV1-UL30-894 | − | TCCGGCCGCAGCCCGGG | 17 | 3832 |
| HSV1-UL30-895 | − | CGCAGCCCGGGAGGACG | 17 | 3833 |
| HSV1-UL30-896 | − | CCCGGGAGGACGAGGAG | 17 | 3834 |
| HSV1-UL30-897 | − | GGACGAGGAGCGGCCAG | 17 | 3835 |
| HSV1-UL30-898 | − | CGAGGAGCGGCCAGAGG | 17 | 3836 |
| HSV1-UL30-899 | − | GGAGCGGCCAGAGGAGG | 17 | 3837 |
| HSV1-UL30-900 | − | GAGCGGCCAGAGGAGGA | 17 | 3838 |
| HSV1-UL30-901 | − | AGCGGCCAGAGGAGGAG | 17 | 3839 |
| HSV1-UL30-902 | − | GCGGCCAGAGGAGGAGG | 17 | 3840 |
| HSV1-UL30-903 | − | GCCAGAGGAGGAGGGGG | 17 | 3841 |
| HSV1-UL30-904 | − | GGAGGAGGGGGAGGACG | 17 | 3842 |
| HSV1-UL30-905 | − | GGACGAGGACGAACGCG | 17 | 3843 |
| HSV1-UL30-906 | − | CGAGGACGAACGCGAGG | 17 | 3844 |
| HSV1-UL30-907 | − | GAGGACGAACGCGAGGA | 17 | 3845 |
| HSV1-UL30-908 | − | GACGAACGCGAGGAGGG | 17 | 3846 |
| HSV1-UL30-909 | − | ACGAACGCGAGGAGGGC | 17 | 3847 |
| HSV1-UL30-910 | − | CGAACGCGAGGAGGGCG | 17 | 3848 |
| HSV1-UL30-911 | − | GAACGCGAGGAGGGCGG | 17 | 3849 |
| HSV1-UL30-912 | − | AGGAGGGCGGGGGCGAG | 17 | 3850 |
| HSV1-UL30-913 | − | GGAGGGCGGGGGCGAGC | 17 | 3851 |
| HSV1-UL30-914 | − | CGGGGGCGAGCGGGAGC | 17 | 3852 |
| HSV1-UL30-915 | − | GGGCGAGCGGGAGCCGG | 17 | 3853 |
| HSV1-UL30-916 | − | GGCGAGCGGGAGCCGGA | 17 | 3854 |
| HSV1-UL30-917 | − | GGGAGCCGGAGGGCGCG | 17 | 3855 |
| HSV1-UL30-918 | − | GGAGCCGGAGGGCGCGC | 17 | 3856 |
| HSV1-UL30-919 | − | GGCGCGCGGGAGACCGC | 17 | 3857 |
| HSV1-UL30-920 | − | CGCGGGAGACCGCCGGC | 17 | 3858 |
| HSV1-UL30-921 | − | GACCGCCGGCAGGCACG | 17 | 3859 |
| HSV1-UL30-922 | − | ACCGCCGGCAGGCACGT | 17 | 3860 |
| HSV1-UL30-923 | − | CCGCCGGCAGGCACGTG | 17 | 3861 |
| HSV1-UL30-924 | − | CAGGCACGTGGGGTACC | 17 | 3862 |
| HSV1-UL30-925 | − | AGGCACGTGGGGTACCA | 17 | 3863 |
| HSV1-UL30-926 | − | GGCACGTGGGGTACCAG | 17 | 3864 |
| HSV1-UL30-927 | − | GCACGTGGGGTACCAGG | 17 | 3865 |
| HSV1-UL30-928 | − | TGGGGTACCAGGGGGCC | 17 | 3866 |
| HSV1-UL30-929 | − | GGGGTACCAGGGGGCCA | 17 | 3867 |
| HSV1-UL30-930 | − | GTCCTTGACCCCACTTC | 17 | 3868 |
| HSV1-UL30-931 | − | TCCTTGACCCCACTTCC | 17 | 3869 |
| HSV1-UL30-932 | − | GTTTCACGTGAACCCCG | 17 | 3870 |
| HSV1-UL30-933 | − | TCACGTGAACCCCGTGG | 17 | 3871 |
| HSV1-UL30-934 | − | GTACCCCAGCATCATCC | 17 | 3872 |
| HSV1-UL30-935 | − | TCAGCACGCTCTCCCTG | 17 | 3873 |
| HSV1-UL30-936 | − | CAGCACGCTCTCCCTGA | 17 | 3874 |
| HSV1-UL30-937 | − | CCTGAGGGCCGACGCAG | 17 | 3875 |
| HSV1-UL30-938 | − | CGACGCAGTGGCGCACC | 17 | 3876 |
| HSV1-UL30-939 | − | CGCAGTGGCGCACCTGG | 17 | 3877 |
| HSV1-UL30-940 | − | AGTGGCGCACCTGGAGG | 17 | 3878 |
| HSV1-UL30-941 | − | GTGGCGCACCTGGAGGC | 17 | 3879 |
| HSV1-UL30-942 | − | GCACCTGGAGGCGGGCA | 17 | 3880 |
| HSV1-UL30-943 | − | GGCGGGCAAGGACTACC | 17 | 3881 |
| HSV1-UL30-944 | − | GGACTACCTGGAGATCG | 17 | 3882 |
| HSV1-UL30-945 | − | CTACCTGGAGATCGAGG | 17 | 3883 |
| HSV1-UL30-946 | − | TACCTGGAGATCGAGGT | 17 | 3884 |
| HSV1-UL30-947 | − | ACCTGGAGATCGAGGTG | 17 | 3885 |
| HSV1-UL30-948 | − | CCTGGAGATCGAGGTGG | 17 | 3886 |
| HSV1-UL30-949 | − | CTGGAGATCGAGGTGGG | 17 | 3887 |
| HSV1-UL30-950 | − | TGGAGATCGAGGTGGGG | 17 | 3888 |
| HSV1-UL30-951 | − | TCGAGGTGGGGGGGCGA | 17 | 3889 |
| HSV1-UL30-952 | − | ACGGCTGTTCTTCGTCA | 17 | 3890 |
| HSV1-UL30-953 | − | TCCTCAGCATCCTCCTG | 17 | 3891 |
| HSV1-UL30-954 | − | CCTCAGCATCCTCCTGC | 17 | 3892 |
| HSV1-UL30-955 | − | GCATCCTCCTGCGGGAC | 17 | 3893 |
| HSV1-UL30-956 | − | GAAAGCAGATCCGCTCG | 17 | 3894 |
| HSV1-UL30-957 | − | TCCCCAGAGCAGCCCCG | 17 | 3895 |
| HSV1-UL30-958 | − | CCAGAGCAGCCCCGAGG | 17 | 3896 |
| HSV1-UL30-959 | − | CGAGGAGGCCGTGCTCC | 17 | 3897 |
| HSV1-UL30-960 | − | GCTCCTGGACAAGCAGC | 17 | 3898 |
| HSV1-UL30-961 | − | GCAGCAGGCCGCCATCA | 17 | 3899 |
| HSV1-UL30-962 | − | CAAGGTCGTGTGTAACT | 17 | 3900 |
| HSV1-UL30-963 | − | GTGTGTAACTCGGTGTA | 17 | 3901 |
| HSV1-UL30-964 | − | TGTGTAACTCGGTGTAC | 17 | 3902 |
| HSV1-UL30-965 | − | CTCGGTGTACGGGTTCA | 17 | 3903 |
| HSV1-UL30-966 | − | TCGGTGTACGGGTTCAC | 17 | 3904 |
| HSV1-UL30-967 | − | TTCACGGGAGTGCAGCA | 17 | 3905 |
| HSV1-UL30-968 | − | CCTGCACGTTGCCGCGA | 17 | 3906 |
| HSV1-UL30-969 | − | GCGACGGTGACGACCAT | 17 | 3907 |
| HSV1-UL30-970 | − | AGTACGTCCACGCGCGC | 17 | 3908 |
| HSV1-UL30-971 | − | GTACGTCCACGCGCGCT | 17 | 3909 |
| HSV1-UL30-972 | − | CGTCCACGCGCGCTGGG | 17 | 3910 |
| HSV1-UL30-973 | − | GGCCTTCGAACAGCTCC | 17 | 3911 |
| HSV1-UL30-974 | − | GCTCCTGGCCGATTTCC | 17 | 3912 |
| HSV1-UL30-975 | − | CCTGGCCGATTTCCCGG | 17 | 3913 |
| HSV1-UL30-976 | − | GGCCGATTTCCCGGAGG | 17 | 3914 |
| HSV1-UL30-977 | − | GCCGACATGCGCGCCCC | 17 | 3915 |
| HSV1-UL30-978 | − | CCGACATGCGCGCCCCC | 17 | 3916 |
| HSV1-UL30-979 | − | TCCATGCGCATCATCTA | 17 | 3917 |
| HSV1-UL30-980 | − | CCATGCGCATCATCTAC | 17 | 3918 |
| HSV1-UL30-981 | − | CATGCGCATCATCTACG | 17 | 3919 |
| HSV1-UL30-982 | − | CATCATCTACGGGGACA | 17 | 3920 |
| HSV1-UL30-983 | − | ATCTTTGTGCTGTGCCG | 17 | 3921 |
| HSV1-UL30-984 | − | GCTGTGCCGCGGCCTCA | 17 | 3922 |
| HSV1-UL30-985 | − | CGCGGCCTCACGGCCGC | 17 | 3923 |
| HSV1-UL30-986 | − | GCGGCCTCACGGCCGCC | 17 | 3924 |
| HSV1-UL30-987 | − | CACGGCCGCCGGGCTGA | 17 | 3925 |
| HSV1-UL30-988 | − | CGCCGGGCTGACGGCCG | 17 | 3926 |
| HSV1-UL30-989 | − | GCCGGGCTGACGGCCGT | 17 | 3927 |
| HSV1-UL30-990 | − | GGCCGTGGGCGACAAGA | 17 | 3928 |
| HSV1-UL30-991 | − | GCCAAGAAAAAGTACAT | 17 | 3929 |
| HSV1-UL30-992 | − | TACATCGGCGTCATCTA | 17 | 3930 |
| HSV1-UL30-993 | − | ACATCGGCGTCATCTAC | 17 | 3931 |
| HSV1-UL30-994 | − | CATCGGCGTCATCTACG | 17 | 3932 |
| HSV1-UL30-995 | − | ATCGGCGTCATCTACGG | 17 | 3933 |
| HSV1-UL30-996 | − | GGGTAAGATGCTCATCA | 17 | 3934 |
| HSV1-UL30-997 | − | GGTAAGATGCTCATCAA | 17 | 3935 |
| HSV1-UL30-998 | − | GATGCTCATCAAGGGCG | 17 | 3936 |
| HSV1-UL30-999 | − | CATCAAGGGCGTGGATC | 17 | 3937 |
| HSV1-UL30-1000 | − | TTATCAACCGCACCTCC | 17 | 3938 |
| HSV1-UL30-1001 | − | TATCAACCGCACCTCCA | 17 | 3939 |
| HSV1-UL30-1002 | − | CCGCACCTCCAGGGCCC | 17 | 3940 |
| HSV1-UL30-1003 | − | TACGACGATACCGTCTC | 17 | 3941 |
| HSV1-UL30-1004 | − | CGATACCGTCTCCGGAG | 17 | 3942 |
| HSV1-UL30-1005 | − | GTTAGCCGAGCGCCCCG | 17 | 3943 |
| HSV1-UL30-1006 | − | AGCCGAGCGCCCCGCGG | 17 | 3944 |
| HSV1-UL30-1007 | − | AGCGCCCCGCGGAGGAG | 17 | 3945 |
| HSV1-UL30-1008 | − | CCCCGCGGAGGAGTGGC | 17 | 3946 |
| HSV1-UL30-1009 | − | GGCGCGACCCCTGCCCG | 17 | 3947 |
| HSV1-UL30-1010 | − | GCGCGACCCCTGCCCGA | 17 | 3948 |
| HSV1-UL30-1011 | − | CCTGCCCGAGGGACTGC | 17 | 3949 |
| HSV1-UL30-1012 | − | GAGGGACTGCAGGCGTT | 17 | 3950 |
| HSV1-UL30-1013 | − | AGGGACTGCAGGCGTTC | 17 | 3951 |
| HSV1-UL30-1014 | − | GGGACTGCAGGCGTTCG | 17 | 3952 |
| HSV1-UL30-1015 | − | TCCTCGTAGACGCCCAT | 17 | 3953 |
| HSV1-UL30-1016 | − | TCGGCGCATCACCGACC | 17 | 3954 |
| HSV1-UL30-1017 | − | GCATCACCGACCCGGAG | 17 | 3955 |
| HSV1-UL30-1018 | − | CATCACCGACCCGGAGA | 17 | 3956 |
| HSV1-UL30-1019 | − | CCCGGAGAGGGACATCC | 17 | 3957 |
| HSV1-UL30-1020 | − | GTACACCAACAAGCGCC | 17 | 3958 |
| HSV1-UL30-1021 | − | GCGCCTGGCCCACCTGA | 17 | 3959 |
| HSV1-UL30-1022 | − | GGTGTATTACAAGCTCA | 17 | 3960 |
| HSV1-UL30-1023 | − | CATGGCCCGCCGCGCGC | 17 | 3961 |
| HSV1-UL30-1024 | − | GCAGGTCCCGTCCATCA | 17 | 3962 |
| HSV1-UL30-1025 | − | TCCCGTCCATCAAGGAC | 17 | 3963 |
| HSV1-UL30-1026 | − | GATCCCGTACGTGATCG | 17 | 3964 |
| HSV1-UL30-1027 | − | CGTGGCCCAGACCCGCG | 17 | 3965 |
| HSV1-UL30-1028 | − | CCAGACCCGCGAGGTAG | 17 | 3966 |
| HSV1-UL30-1029 | − | CCGCGAGGTAGAGGAGA | 17 | 3967 |
| HSV1-UL30-1030 | − | TAGAGGAGACGGTCGCG | 17 | 3968 |
| HSV1-UL30-1031 | − | GGAGACGGTCGCGCGGC | 17 | 3969 |
| HSV1-UL30-1032 | − | CTAGACGCCGCCGCCCC | 17 | 3970 |
| HSV1-UL30-1033 | − | TAGACGCCGCCGCCCCA | 17 | 3971 |
| HSV1-UL30-1034 | − | AGACGCCGCCGCCCCAG | 17 | 3972 |
| HSV1-UL30-1035 | − | CGAGCCCGCCCCCCCCG | 17 | 3973 |
| HSV1-UL30-1036 | − | CGCGGCCCTGCCCTCCC | 17 | 3974 |
| HSV1-UL30-1037 | − | CCCCGGCCAAGCGCCCC | 17 | 3975 |
| HSV1-UL30-1038 | − | CCCGGCCAAGCGCCCCC | 17 | 3976 |
| HSV1-UL30-1039 | − | GTCGCCTGCCGACCCCC | 17 | 3977 |
| HSV1-UL30-1040 | − | TCGCCTGCCGACCCCCC | 17 | 3978 |
| HSV1-UL30-1041 | − | CCTGCCGACCCCCCGGG | 17 | 3979 |
| HSV1-UL30-1042 | − | CAAGCCCCGCAAGCTGC | 17 | 3980 |
| HSV1-UL30-1043 | − | GCTGCTGGTGTCCGAGC | 17 | 3981 |
| HSV1-UL30-1044 | − | GGTGTCCGAGCTGGCCG | 17 | 3982 |
| HSV1-UL30-1045 | − | GCATACGCCATTGCCCA | 17 | 3983 |
| HSV1-UL30-1046 | − | CGGCGTCGCCCTGAACA | 17 | 3984 |
| HSV1-UL30-1047 | − | TTACTTCTCCCACCTGT | 17 | 3985 |
| HSV1-UL30-1048 | − | TACTTCTCCCACCTGTT | 17 | 3986 |
| HSV1-UL30-1049 | − | ACTTCTCCCACCTGTTG | 17 | 3987 |
| HSV1-UL30-1050 | − | CTTCTCCCACCTGTTGG | 17 | 3988 |
| HSV1-UL30-1051 | − | CTCCCACCTGTTGGGGG | 17 | 3989 |
| HSV1-UL30-1052 | − | GGCGTGCGTGACATTCA | 17 | 3990 |
| HSV1-UL30-1053 | − | ACATTCAAGGCCCTGTT | 17 | 3991 |
| HSV1-UL30-1054 | − | CATTCAAGGCCCTGTTT | 17 | 3992 |
| HSV1-UL30-1055 | − | CCGAGAGTCTGTTAAAA | 17 | 3993 |
| HSV1-UL30-1056 | − | GGTTTATTCCCGAAGTG | 17 | 3994 |
| HSV1-UL30-1057 | − | CGAAGTGTGGCACCCCC | 17 | 3995 |
| HSV1-UL30-1058 | − | GCACCCCCCGGACGACG | 17 | 3996 |
| HSV1-UL30-1059 | − | CGGACGACGTGGCCGCG | 17 | 3997 |
| HSV1-UL30-1060 | − | ACGTGGCCGCGCGGCTC | 17 | 3998 |
| HSV1-UL30-1061 | − | GCGCGGCTCCGGACCGC | 17 | 3999 |
| HSV1-UL30-1062 | − | CGCGGCTCCGGACCGCA | 17 | 4000 |
| HSV1-UL30-1063 | − | CTCCGGACCGCAGGGTT | 17 | 4001 |
| HSV1-UL30-1064 | − | TCCGGACCGCAGGGTTC | 17 | 4002 |
| HSV1-UL30-1065 | − | CCGGACCGCAGGGTTCG | 17 | 4003 |
| HSV1-UL30-1066 | − | GACCGCAGGGTTCGGGG | 17 | 4004 |
| HSV1-UL30-1067 | − | CGCAGGGTTCGGGGCGG | 17 | 4005 |
| HSV1-UL30-1068 | − | GCAGGGTTCGGGGCGGT | 17 | 4006 |
| HSV1-UL30-1069 | − | TTCGGGGCGGTGGGTGC | 17 | 4007 |
| HSV1-UL30-1070 | − | GGTGGGTGCCGGCGCTA | 17 | 4008 |
| HSV1-UL30-1071 | − | GGGTGCCGGCGCTACGG | 17 | 4009 |
| HSV1-UL30-1072 | − | TGCCGGCGCTACGGCGG | 17 | 4010 |
| HSV1-UL30-1073 | + | AGTTTCCTCCGCCGTAGCGC | 20 | 4011 |
| HSV1-UL30-1074 | + | ACCCACCGCCCCGAACCCTG | 20 | 4012 |
| HSV1-UL30-1075 | + | CCGCCCCGAACCCTGCGGTC | 20 | 4013 |
| HSV1-UL30-1076 | + | CCCTGCGGTCCGGAGCCGCG | 20 | 4014 |
| HSV1-UL30-1077 | + | AGCCGCGCGGCCACGTCGTC | 20 | 4015 |
| HSV1-UL30-1078 | + | GCCGCGCGGCCACGTCGTCC | 20 | 4016 |
| HSV1-UL30-1079 | + | CCGCGCGGCCACGTCGTCCG | 20 | 4017 |
| HSV1-UL30-1080 | + | CGCGCGGCCACGTCGTCCGG | 20 | 4018 |
| HSV1-UL30-1081 | + | GCGCGGCCACGTCGTCCGGG | 20 | 4019 |
| HSV1-UL30-1082 | + | GTCCGGGGGGTGCCACACTT | 20 | 4020 |
| HSV1-UL30-1083 | + | TCCGGGGGGTGCCACACTTC | 20 | 4021 |
| HSV1-UL30-1084 | + | AAACCTTTTTAACAGACTCT | 20 | 4022 |
| HSV1-UL30-1085 | + | TAACAGACTCTCGGTGATCT | 20 | 4023 |
| HSV1-UL30-1086 | + | TCTTGGCGTTATTCCCAAAC | 20 | 4024 |
| HSV1-UL30-1087 | + | CTTGGCGTTATTCCCAAACA | 20 | 4025 |
| HSV1-UL30-1088 | + | TCACGCACGCCGCCCCCAAC | 20 | 4026 |
| HSV1-UL30-1089 | + | CGCACGCCGCCCCCAACAGG | 20 | 4027 |
| HSV1-UL30-1090 | + | GCACGCCGCCCCCAACAGGT | 20 | 4028 |
| HSV1-UL30-1091 | + | AGAAGTAATAGTCCGTGTTC | 20 | 4029 |
| HSV1-UL30-1092 | + | GAAGTAATAGTCCGTGTTCA | 20 | 4030 |
| HSV1-UL30-1093 | + | CCGTGTTCAGGGCGACGCCG | 20 | 4031 |
| HSV1-UL30-1094 | + | CGTGTTCAGGGCGACGCCGT | 20 | 4032 |
| HSV1-UL30-1095 | + | CAGGGCGACGCCGTGGGCAA | 20 | 4033 |
| HSV1-UL30-1096 | + | GCCGTGGGCAATGGCGTATG | 20 | 4034 |
| HSV1-UL30-1097 | + | CCGTGGGCAATGGCGTATGC | 20 | 4035 |
| HSV1-UL30-1098 | + | AATGGCGTATGCGGGATCCT | 20 | 4036 |
| HSV1-UL30-1099 | + | TGCGGGATCCTCGGCCAGCT | 20 | 4037 |
| HSV1-UL30-1100 | + | GCTCGGACACCAGCAGCTTG | 20 | 4038 |
| HSV1-UL30-1101 | + | CTCGGACACCAGCAGCTTGC | 20 | 4039 |
| HSV1-UL30-1102 | + | TCGGACACCAGCAGCTTGCG | 20 | 4040 |
| HSV1-UL30-1103 | + | CACCAGCAGCTTGCGGGGCT | 20 | 4041 |
| HSV1-UL30-1104 | + | CGGGGCTTGGACGCGCCTCC | 20 | 4042 |
| HSV1-UL30-1105 | + | GGGGCTTGGACGCGCCTCCC | 20 | 4043 |
| HSV1-UL30-1106 | + | GGGCTTGGACGCGCCTCCCG | 20 | 4044 |
| HSV1-UL30-1107 | + | GGCTTGGACGCGCCTCCCGG | 20 | 4045 |
| HSV1-UL30-1108 | + | GCTTGGACGCGCCTCCCGGG | 20 | 4046 |
| HSV1-UL30-1109 | + | GGACGCGCCTCCCGGGGGGT | 20 | 4047 |
| HSV1-UL30-1110 | + | GCGCCTCCCGGGGGGTCGGC | 20 | 4048 |
| HSV1-UL30-1111 | + | CCCGGGGGGTCGGCAGGCGA | 20 | 4049 |
| HSV1-UL30-1112 | + | CGGCAGGCGACGGCGTCTCC | 20 | 4050 |
| HSV1-UL30-1113 | + | GGCAGGCGACGGCGTCTCCC | 20 | 4051 |
| HSV1-UL30-1114 | + | GCAGGCGACGGCGTCTCCCG | 20 | 4052 |
| HSV1-UL30-1115 | + | CAGGCGACGGCGTCTCCCGG | 20 | 4053 |
| HSV1-UL30-1116 | + | CGGCGTCTCCCGGGGGCGCT | 20 | 4054 |
| HSV1-UL30-1117 | + | GTCTCCCGGGGGCGCTTGGC | 20 | 4055 |
| HSV1-UL30-1118 | + | TCTCCCGGGGGCGCTTGGCC | 20 | 4056 |
| HSV1-UL30-1119 | + | CTCCCGGGGGCGCTTGGCCG | 20 | 4057 |
| HSV1-UL30-1120 | + | CCGGGGGCGCTTGGCCGGGG | 20 | 4058 |
| HSV1-UL30-1121 | + | CGGGGGCGCTTGGCCGGGGA | 20 | 4059 |
| HSV1-UL30-1122 | + | GGCGCTTGGCCGGGGAGGGC | 20 | 4060 |
| HSV1-UL30-1123 | + | GCGCTTGGCCGGGGAGGGCA | 20 | 4061 |
| HSV1-UL30-1124 | + | GGCCGGGGAGGGCAGGGCCG | 20 | 4062 |
| HSV1-UL30-1125 | + | GCCGGGGAGGGCAGGGCCGC | 20 | 4063 |
| HSV1-UL30-1126 | + | CCGGGGAGGGCAGGGCCGCG | 20 | 4064 |
| HSV1-UL30-1127 | + | CGGGGAGGGCAGGGCCGCGG | 20 | 4065 |
| HSV1-UL30-1128 | + | GGGGAGGGCAGGGCCGCGGG | 20 | 4066 |
| HSV1-UL30-1129 | + | GGGAGGGCAGGGCCGCGGGG | 20 | 4067 |
| HSV1-UL30-1130 | + | GGAGGGCAGGGCCGCGGGGG | 20 | 4068 |
| HSV1-UL30-1131 | + | GGGCAGGGCCGCGGGGGGGG | 20 | 4069 |
| HSV1-UL30-1132 | + | GGCAGGGCCGCGGGGGGGGC | 20 | 4070 |
| HSV1-UL30-1133 | + | GGGGGGGCGGGCTCGTCCCC | 20 | 4071 |
| HSV1-UL30-1134 | + | GGGGGGCGGGCTCGTCCCCT | 20 | 4072 |
| HSV1-UL30-1135 | + | GGGGGCGGGCTCGTCCCCTG | 20 | 4073 |
| HSV1-UL30-1136 | + | GGCGGGCTCGTCCCCTGGGG | 20 | 4074 |
| HSV1-UL30-1137 | + | GGGCTCGTCCCCTGGGGCGG | 20 | 4075 |
| HSV1-UL30-1138 | + | GGGCGGCGGCGTCTAGCTCG | 20 | 4076 |
| HSV1-UL30-1139 | + | CGGCGGCGTCTAGCTCGCGG | 20 | 4077 |
| HSV1-UL30-1140 | + | GGCGGCGTCTAGCTCGCGGA | 20 | 4078 |
| HSV1-UL30-1141 | + | GGCGTCTAGCTCGCGGAGGG | 20 | 4079 |
| HSV1-UL30-1142 | + | CGACCGTCTCCTCTACCTCG | 20 | 4080 |
| HSV1-UL30-1143 | + | GACCGTCTCCTCTACCTCGC | 20 | 4081 |
| HSV1-UL30-1144 | + | TCTCCTCTACCTCGCGGGTC | 20 | 4082 |
| HSV1-UL30-1145 | + | CTCCTCTACCTCGCGGGTCT | 20 | 4083 |
| HSV1-UL30-1146 | + | GTCTGGGCCACGATCACGTA | 20 | 4084 |
| HSV1-UL30-1147 | + | TCTGGGCCACGATCACGTAC | 20 | 4085 |
| HSV1-UL30-1148 | + | CCACGATCACGTACGGGATC | 20 | 4086 |
| HSV1-UL30-1149 | + | GTACGGGATCCGGTCCTTGA | 20 | 4087 |
| HSV1-UL30-1150 | + | GGGATCCGGTCCTTGATGGA | 20 | 4088 |
| HSV1-UL30-1151 | + | GGATCCGGTCCTTGATGGAC | 20 | 4089 |
| HSV1-UL30-1152 | + | TGATGGACGGGACCTGCGCG | 20 | 4090 |
| HSV1-UL30-1153 | + | TGGACGGGACCTGCGCGCGG | 20 | 4091 |
| HSV1-UL30-1154 | + | GGACGGGACCTGCGCGCGGC | 20 | 4092 |
| HSV1-UL30-1155 | + | TGAGCTTGTAATACACCGTC | 20 | 4093 |
| HSV1-UL30-1156 | + | GCTTGTAATACACCGTCAGG | 20 | 4094 |
| HSV1-UL30-1157 | + | CTTGTAATACACCGTCAGGT | 20 | 4095 |
| HSV1-UL30-1158 | + | AATACACCGTCAGGTGGGCC | 20 | 4096 |
| HSV1-UL30-1159 | + | CAGGTGGGCCAGGCGCTTGT | 20 | 4097 |
| HSV1-UL30-1160 | + | CGCTTGTTGGTGTACGCGCG | 20 | 4098 |
| HSV1-UL30-1161 | + | GCTTGTTGGTGTACGCGCGC | 20 | 4099 |
| HSV1-UL30-1162 | + | GCGCGGGTGTCTGCTCAGTT | 20 | 4100 |
| HSV1-UL30-1163 | + | CGGGTGTCTGCTCAGTTCGG | 20 | 4101 |
| HSV1-UL30-1164 | + | GTCTGCTCAGTTCGGCGGTG | 20 | 4102 |
| HSV1-UL30-1165 | + | CGGCGGTGAGGACAAAGTCC | 20 | 4103 |
| HSV1-UL30-1166 | + | AAGTCCTGGATGTCCCTCTC | 20 | 4104 |
| HSV1-UL30-1167 | + | AGTCCTGGATGTCCCTCTCC | 20 | 4105 |
| HSV1-UL30-1168 | + | CTGGATGTCCCTCTCCGGGT | 20 | 4106 |
| HSV1-UL30-1169 | + | CCGGGTCGGTGATGCGCCGA | 20 | 4107 |
| HSV1-UL30-1170 | + | CGGGTCGGTGATGCGCCGAT | 20 | 4108 |
| HSV1-UL30-1171 | + | TGCGCCGATGGGCGTCTACG | 20 | 4109 |
| HSV1-UL30-1172 | + | CCGATGGGCGTCTACGAGGA | 20 | 4110 |
| HSV1-UL30-1173 | + | CCCGAACGCCTGCAGTCCCT | 20 | 4111 |
| HSV1-UL30-1174 | + | CCGAACGCCTGCAGTCCCTC | 20 | 4112 |
| HSV1-UL30-1175 | + | ACGCCTGCAGTCCCTCGGGC | 20 | 4113 |
| HSV1-UL30-1176 | + | CGCCTGCAGTCCCTCGGGCA | 20 | 4114 |
| HSV1-UL30-1177 | + | GCCTGCAGTCCCTCGGGCAG | 20 | 4115 |
| HSV1-UL30-1178 | + | TCGCGCCAGCCACTCCTCCG | 20 | 4116 |
| HSV1-UL30-1179 | + | CGCGCCAGCCACTCCTCCGC | 20 | 4117 |
| HSV1-UL30-1180 | + | GCGCCAGCCACTCCTCCGCG | 20 | 4118 |
| HSV1-UL30-1181 | + | CCACTCCTCCGCGGGGCGCT | 20 | 4119 |
| HSV1-UL30-1182 | + | CGCGGGGCGCTCGGCTAACG | 20 | 4120 |
| HSV1-UL30-1183 | + | GGGGCGCTCGGCTAACGCGG | 20 | 4121 |
| HSV1-UL30-1184 | + | GGCTAACGCGGCGGCCGCTC | 20 | 4122 |
| HSV1-UL30-1185 | + | CGCGGCGGCCGCTCCGGAGA | 20 | 4123 |
| HSV1-UL30-1186 | + | CGGTATCGTCGTAAAACAGC | 20 | 4124 |
| HSV1-UL30-1187 | + | CGTAAAACAGCAGGTCGACC | 20 | 4125 |
| HSV1-UL30-1188 | + | GTAAAACAGCAGGTCGACCA | 20 | 4126 |
| HSV1-UL30-1189 | + | CAGCAGGTCGACCAGGGCCC | 20 | 4127 |
| HSV1-UL30-1190 | + | CAGGTCGACCAGGGCCCTGG | 20 | 4128 |
| HSV1-UL30-1191 | + | CGACCAGGGCCCTGGAGGTG | 20 | 4129 |
| HSV1-UL30-1192 | + | GACGCCGATGTACTTTTTCT | 20 | 4130 |
| HSV1-UL30-1193 | + | CTTGGCGATCAGCAGCAGCT | 20 | 4131 |
| HSV1-UL30-1194 | + | CTTTTCGCACTCGAGTTTGA | 20 | 4132 |
| HSV1-UL30-1195 | + | TTTTCGCACTCGAGTTTGAT | 20 | 4133 |
| HSV1-UL30-1196 | + | TTTCGCACTCGAGTTTGATG | 20 | 4134 |
| HSV1-UL30-1197 | + | TTCGCACTCGAGTTTGATGG | 20 | 4135 |
| HSV1-UL30-1198 | + | TCGCACTCGAGTTTGATGGG | 20 | 4136 |
| HSV1-UL30-1199 | + | GAAACAGCGCGCGCGAGATG | 20 | 4137 |
| HSV1-UL30-1200 | + | GCTCGCCATCTTGTCGCCCA | 20 | 4138 |
| HSV1-UL30-1201 | + | GTCGCCCACGGCCGTCAGCC | 20 | 4139 |
| HSV1-UL30-1202 | + | GCCCACGGCCGTCAGCCCGG | 20 | 4140 |
| HSV1-UL30-1203 | + | CCGTCAGCCCGGCGGCCGTG | 20 | 4141 |
| HSV1-UL30-1204 | + | GCCCGGCGGCCGTGAGGCCG | 20 | 4142 |
| HSV1-UL30-1205 | + | GCCGCGGCACAGCACAAAGA | 20 | 4143 |
| HSV1-UL30-1206 | + | GTCCCCGTAGATGATGCGCA | 20 | 4144 |
| HSV1-UL30-1207 | + | GTAGATGATGCGCATGGAAT | 20 | 4145 |
| HSV1-UL30-1208 | + | TAGATGATGCGCATGGAATA | 20 | 4146 |
| HSV1-UL30-1209 | + | GATGCGCATGGAATAGGGCC | 20 | 4147 |
| HSV1-UL30-1210 | + | ATGCGCATGGAATAGGGCCC | 20 | 4148 |
| HSV1-UL30-1211 | + | TGCGCATGGAATAGGGCCCG | 20 | 4149 |
| HSV1-UL30-1212 | + | GCGCATGGAATAGGGCCCGG | 20 | 4150 |
| HSV1-UL30-1213 | + | GGGCCCGGGGGCGCGCATGT | 20 | 4151 |
| HSV1-UL30-1214 | + | GCGCGCATGTCGGCCGCCTC | 20 | 4152 |
| HSV1-UL30-1215 | + | CGCGCATGTCGGCCGCCTCC | 20 | 4153 |
| HSV1-UL30-1216 | + | GTCGGCCGCCTCCGGGAAAT | 20 | 4154 |
| HSV1-UL30-1217 | + | CCGCCTCCGGGAAATCGGCC | 20 | 4155 |
| HSV1-UL30-1218 | + | ATCGGCCAGGAGCTGTTCGA | 20 | 4156 |
| HSV1-UL30-1219 | + | CGAAGGCCGCCCAGCGCGCG | 20 | 4157 |
| HSV1-UL30-1220 | + | AGCGCGCGTGGACGTACTCG | 20 | 4158 |
| HSV1-UL30-1221 | + | GCGCGCGTGGACGTACTCGC | 20 | 4159 |
| HSV1-UL30-1222 | + | GGGTCGCGAGCAGCATCTCG | 20 | 4160 |
| HSV1-UL30-1223 | + | GAGCAGCATCTCGCGGCCGA | 20 | 4161 |
| HSV1-UL30-1224 | + | GCCGATGGTCGTCACCGTCG | 20 | 4162 |
| HSV1-UL30-1225 | + | TCACCGTCGCGGCAACGTGC | 20 | 4163 |
| HSV1-UL30-1226 | + | GTCGCGGCAACGTGCAGGCA | 20 | 4164 |
| HSV1-UL30-1227 | + | CGGCAACGTGCAGGCACGGC | 20 | 4165 |
| HSV1-UL30-1228 | + | CGAGTTACACACGACCTTGA | 20 | 4166 |
| HSV1-UL30-1229 | + | GTTACACACGACCTTGATGG | 20 | 4167 |
| HSV1-UL30-1230 | + | TGGCGGCCTGCTGCTTGTCC | 20 | 4168 |
| HSV1-UL30-1231 | + | CTGCTGCTTGTCCAGGAGCA | 20 | 4169 |
| HSV1-UL30-1232 | + | GTCCAGGAGCACGGCCTCCT | 20 | 4170 |
| HSV1-UL30-1233 | + | TCCAGGAGCACGGCCTCCTC | 20 | 4171 |
| HSV1-UL30-1234 | + | CCAGGAGCACGGCCTCCTCG | 20 | 4172 |
| HSV1-UL30-1235 | + | CGGCCTCCTCGGGGCTGCTC | 20 | 4173 |
| HSV1-UL30-1236 | + | GGCCTCCTCGGGGCTGCTCT | 20 | 4174 |
| HSV1-UL30-1237 | + | GCCTCCTCGGGGCTGCTCTG | 20 | 4175 |
| HSV1-UL30-1238 | + | TGCTCTGGGGAATCCGCGAG | 20 | 4176 |
| HSV1-UL30-1239 | + | CGAGCGGATCTGCTTTCGCA | 20 | 4177 |
| HSV1-UL30-1240 | + | GCATGGCGAGCCAGTCCCGC | 20 | 4178 |
| HSV1-UL30-1241 | + | TGGCGAGCCAGTCCCGCAGG | 20 | 4179 |
| HSV1-UL30-1242 | + | AGTCCCGCAGGAGGATGCTG | 20 | 4180 |
| HSV1-UL30-1243 | + | CCCGCAGGAGGATGCTGAGG | 20 | 4181 |
| HSV1-UL30-1244 | + | GCCCCCCCACCTCGATCTCC | 20 | 4182 |
| HSV1-UL30-1245 | + | GGTAGTCCTTGCCCGCCTCC | 20 | 4183 |
| HSV1-UL30-1246 | + | CTCCAGGTGCGCCACTGCGT | 20 | 4184 |
| HSV1-UL30-1247 | + | GCGCCACTGCGTCGGCCCTC | 20 | 4185 |
| HSV1-UL30-1248 | + | CGCCACTGCGTCGGCCCTCA | 20 | 4186 |
| HSV1-UL30-1249 | + | GGGAGAGCGTGCTGAAGCAC | 20 | 4187 |
| HSV1-UL30-1250 | + | GCGTGCTGAAGCACAGGTTG | 20 | 4188 |
| HSV1-UL30-1251 | + | CGTGCTGAAGCACAGGTTGT | 20 | 4189 |
| HSV1-UL30-1252 | + | TGAAGCACAGGTTGTGGGCC | 20 | 4190 |
| HSV1-UL30-1253 | + | GTTGTGGGCCTGGATGATGC | 20 | 4191 |
| HSV1-UL30-1254 | + | TTGTGGGCCTGGATGATGCT | 20 | 4192 |
| HSV1-UL30-1255 | + | TGTGGGCCTGGATGATGCTG | 20 | 4193 |
| HSV1-UL30-1256 | + | CCTGGATGATGCTGGGGTAC | 20 | 4194 |
| HSV1-UL30-1257 | + | GATGATGCTGGGGTACAGGC | 20 | 4195 |
| HSV1-UL30-1258 | + | GGCAAAGTCGAACACCACCA | 20 | 4196 |
| HSV1-UL30-1259 | + | GCAAAGTCGAACACCACCAC | 20 | 4197 |
| HSV1-UL30-1260 | + | CAAAGTCGAACACCACCACG | 20 | 4198 |
| HSV1-UL30-1261 | + | CACGGGGTTCACGTGAAACC | 20 | 4199 |
| HSV1-UL30-1262 | + | GTTCACGTGAAACCCGGAAG | 20 | 4200 |
| HSV1-UL30-1263 | + | TTCACGTGAAACCCGGAAGT | 20 | 4201 |
| HSV1-UL30-1264 | + | TCACGTGAAACCCGGAAGTG | 20 | 4202 |
| HSV1-UL30-1265 | + | GAAACCCGGAAGTGGGGTCA | 20 | 4203 |
| HSV1-UL30-1266 | + | GGAAGTGGGGTCAAGGACCC | 20 | 4204 |
| HSV1-UL30-1267 | + | GGTCAAGGACCCTGGCCCCC | 20 | 4205 |
| HSV1-UL30-1268 | + | CTGGTACCCCACGTGCCTGC | 20 | 4206 |
| HSV1-UL30-1269 | + | GTACCCCACGTGCCTGCCGG | 20 | 4207 |
| HSV1-UL30-1270 | + | GCGGTCTCCCGCGCGCCCTC | 20 | 4208 |
| HSV1-UL30-1271 | + | TCGTCCTCCCCCTCCTCCTC | 20 | 4209 |
| HSV1-UL30-1272 | + | CTGGCCGCTCCTCGTCCTCC | 20 | 4210 |
| HSV1-UL30-1273 | + | TGGCCGCTCCTCGTCCTCCC | 20 | 4211 |
| HSV1-UL30-1274 | + | CTCCTCGTCCTCCCGGGCTG | 20 | 4212 |
| HSV1-UL30-1275 | + | TCGTCCTCCCGGGCTGCGGC | 20 | 4213 |
| HSV1-UL30-1276 | + | CCGGGCTGCGGCCGGACGCT | 20 | 4214 |
| HSV1-UL30-1277 | + | CGGGCTGCGGCCGGACGCTT | 20 | 4215 |
| HSV1-UL30-1278 | + | ACGCTTGGGCGCCTCCCCCC | 20 | 4216 |
| HSV1-UL30-1279 | + | CGGCGCCCCTAAATCGCCCC | 20 | 4217 |
| HSV1-UL30-1280 | + | GGCGCCCCTAAATCGCCCCT | 20 | 4218 |
| HSV1-UL30-1281 | + | CTAAATCGCCCCTGGGTGTC | 20 | 4219 |
| HSV1-UL30-1282 | + | CCGGCAGAATAAAGCCCTTC | 20 | 4220 |
| HSV1-UL30-1283 | + | CAGAATAAAGCCCTTCTGGT | 20 | 4221 |
| HSV1-UL30-1284 | + | TAAAGCCCTTCTGGTCGGCC | 20 | 4222 |
| HSV1-UL30-1285 | + | TCTGGTCGGCCAGGCGCAGC | 20 | 4223 |
| HSV1-UL30-1286 | + | GCAGCAGGCACGTAAAGACG | 20 | 4224 |
| HSV1-UL30-1287 | + | ACGTAAAGACGCGGATCTGC | 20 | 4225 |
| HSV1-UL30-1288 | + | GATCTGCTGGCCGTCGTAGA | 20 | 4226 |
| HSV1-UL30-1289 | + | GCTGGCCGTCGTAGATGGTG | 20 | 4227 |
| HSV1-UL30-1290 | + | CTGGCCGTCGTAGATGGTGC | 20 | 4228 |
| HSV1-UL30-1291 | + | AATACCCGCCAAGCGCGCGA | 20 | 4229 |
| HSV1-UL30-1292 | + | CGACGGCCGAGAGCTCCAGA | 20 | 4230 |
| HSV1-UL30-1293 | + | GACGGCCGAGAGCTCCAGAT | 20 | 4231 |
| HSV1-UL30-1294 | + | ACGGCCGAGAGCTCCAGATG | 20 | 4232 |
| HSV1-UL30-1295 | + | GCAAAAACTTAAAAAACAGC | 20 | 4233 |
| HSV1-UL30-1296 | + | AAAACAGCTGGCCCACCAGC | 20 | 4234 |
| HSV1-UL30-1297 | + | AAACAGCTGGCCCACCAGCA | 20 | 4235 |
| HSV1-UL30-1298 | + | GCCGATCACCCCGCGTTGCG | 20 | 4236 |
| HSV1-UL30-1299 | + | CCGATCACCCCGCGTTGCGC | 20 | 4237 |
| HSV1-UL30-1300 | + | CACCCCGCGTTGCGCGGGCC | 20 | 4238 |
| HSV1-UL30-1301 | + | CCCGCGTTGCGCGGGCCCGG | 20 | 4239 |
| HSV1-UL30-1302 | + | CGCGGGCCCGGCGGCGTAGT | 20 | 4240 |
| HSV1-UL30-1303 | + | GGGCCCGGCGGCGTAGTAGG | 20 | 4241 |
| HSV1-UL30-1304 | + | GGCCCGGCGGCGTAGTAGGC | 20 | 4242 |
| HSV1-UL30-1305 | + | GCCCGGCGGCGTAGTAGGCG | 20 | 4243 |
| HSV1-UL30-1306 | + | CGGGGATGTCGCGATAGCTC | 20 | 4244 |
| HSV1-UL30-1307 | + | GGTCCTTCTTCTTGTCCTTC | 20 | 4245 |
| HSV1-UL30-1308 | + | CTTCTTCTTGTCCTTCAGGA | 20 | 4246 |
| HSV1-UL30-1309 | + | CTTGTCCTTCAGGACGGCTT | 20 | 4247 |
| HSV1-UL30-1310 | + | CTTCAGGACGGCTTCGGCCA | 20 | 4248 |
| HSV1-UL30-1311 | + | GCTCGAGAGCTTGATCTTGT | 20 | 4249 |
| HSV1-UL30-1312 | + | CCTTTATCTTGCTGCGCTTC | 20 | 4250 |
| HSV1-UL30-1313 | + | TCTTGCTGCGCTTCTGGAAG | 20 | 4251 |
| HSV1-UL30-1314 | + | TGCGCTTCTGGAAGTGGCTC | 20 | 4252 |
| HSV1-UL30-1315 | + | CCCACACGCGAAACACGCCC | 20 | 4253 |
| HSV1-UL30-1316 | + | ACACGCCCCGGCCGTTCATG | 20 | 4254 |
| HSV1-UL30-1317 | + | TCATGCGGCCGTACCCGTCC | 20 | 4255 |
| HSV1-UL30-1318 | + | CATGCGGCCGTACCCGTCCA | 20 | 4256 |
| HSV1-UL30-1319 | + | ATGCGGCCGTACCCGTCCAG | 20 | 4257 |
| HSV1-UL30-1320 | + | TGCGGCCGTACCCGTCCAGG | 20 | 4258 |
| HSV1-UL30-1321 | + | CTTGTAAATGTCCGTCAGCT | 20 | 4259 |
| HSV1-UL30-1322 | + | CGTCAGCTTGGCCAGCAAGA | 20 | 4260 |
| HSV1-UL30-1323 | + | GTCAGCTTGGCCAGCAAGAA | 20 | 4261 |
| HSV1-UL30-1324 | + | GAAGTTGATGATGTTGTACC | 20 | 4262 |
| HSV1-UL30-1325 | + | GTTGTACCCGGTCACGAACT | 20 | 4263 |
| HSV1-UL30-1326 | + | TTGTACCCGGTCACGAACTC | 20 | 4264 |
| HSV1-UL30-1327 | + | TGTACCCGGTCACGAACTCG | 20 | 4265 |
| HSV1-UL30-1328 | + | CGGGGCCGTACTGTTTCACA | 20 | 4266 |
| HSV1-UL30-1329 | + | GGGGCCGTACTGTTTCACAA | 20 | 4267 |
| HSV1-UL30-1330 | + | CTGTTTCACAAGGGTCATGA | 20 | 4268 |
| HSV1-UL30-1331 | + | GCTGTCGAATTCCAGAACCA | 20 | 4269 |
| HSV1-UL30-1332 | + | CTGTCGAATTCCAGAACCAC | 20 | 4270 |
| HSV1-UL30-1333 | + | GAATTCCAGAACCACGGGCG | 20 | 4271 |
| HSV1-UL30-1334 | + | AATTCCAGAACCACGGGCGT | 20 | 4272 |
| HSV1-UL30-1335 | + | CCAGAACCACGGGCGTGGGC | 20 | 4273 |
| HSV1-UL30-1336 | + | CACGGGCGTGGGCAGGCCCC | 20 | 4274 |
| HSV1-UL30-1337 | + | CCCTGGCCGCCAGCTCGTTC | 20 | 4275 |
| HSV1-UL30-1338 | + | TGGCCGCCAGCTCGTTCAGG | 20 | 4276 |
| HSV1-UL30-1339 | + | GGCCGCCAGCTCGTTCAGGT | 20 | 4277 |
| HSV1-UL30-1340 | + | CAGCTCGTTCAGGTGGGATT | 20 | 4278 |
| HSV1-UL30-1341 | + | AGCTCGTTCAGGTGGGATTC | 20 | 4279 |
| HSV1-UL30-1342 | + | GCTCGTTCAGGTGGGATTCG | 20 | 4280 |
| HSV1-UL30-1343 | + | CGTTCAGGTGGGATTCGGGG | 20 | 4281 |
| HSV1-UL30-1344 | + | GTGGGATTCGGGGAGGTCGC | 20 | 4282 |
| HSV1-UL30-1345 | + | CGCAGGAACCGAGCGAAAAC | 20 | 4283 |
| HSV1-UL30-1346 | + | AGGAACCGAGCGAAAACAGG | 20 | 4284 |
| HSV1-UL30-1347 | + | AAAACAGGAGGACGTGCTCC | 20 | 4285 |
| HSV1-UL30-1348 | + | AAACAGGAGGACGTGCTCCA | 20 | 4286 |
| HSV1-UL30-1349 | + | CAGGAGGACGTGCTCCAGGG | 20 | 4287 |
| HSV1-UL30-1350 | + | GAGGACGTGCTCCAGGGCGG | 20 | 4288 |
| HSV1-UL30-1351 | + | GACGTGCTCCAGGGCGGTGG | 20 | 4289 |
| HSV1-UL30-1352 | + | GCTCCAGGGCGGTGGTGGAC | 20 | 4290 |
| HSV1-UL30-1353 | + | GGACAGGTCGTAGAGCAGAC | 20 | 4291 |
| HSV1-UL30-1354 | + | CGTAGAGCAGACAGGATATC | 20 | 4292 |
| HSV1-UL30-1355 | + | GACAGGATATCTGGATGACC | 20 | 4293 |
| HSV1-UL30-1356 | + | ATCTGGATGACCAGGTCCTC | 20 | 4294 |
| HSV1-UL30-1357 | + | TCTGGATGACCAGGTCCTCC | 20 | 4295 |
| HSV1-UL30-1358 | + | GACCAGGTCCTCCGGGTGCC | 20 | 4296 |
| HSV1-UL30-1359 | + | TCCTCCGGGTGCCCGGCCAC | 20 | 4297 |
| HSV1-UL30-1360 | + | CGGGTGCCCGGCCACCGGAA | 20 | 4298 |
| HSV1-UL30-1361 | + | AAGCACATGAGCTTGTATGC | 20 | 4299 |
| HSV1-UL30-1362 | + | ACATGAGCTTGTATGCCGGT | 20 | 4300 |
| HSV1-UL30-1363 | + | GTCGCTCATGCCCCCCTCGA | 20 | 4301 |
| HSV1-UL30-1364 | + | TCATGCCCCCCTCGATGGCC | 20 | 4302 |
| HSV1-UL30-1365 | + | ACAGTTAAACTCGACGTCGC | 20 | 4303 |
| HSV1-UL30-1366 | + | GACGTCGCTGGATGTCCCGA | 20 | 4304 |
| HSV1-UL30-1367 | + | CTGGATGTCCCGAAGGCCAT | 20 | 4305 |
| HSV1-UL30-1368 | + | TGGATGTCCCGAAGGCCATC | 20 | 4306 |
| HSV1-UL30-1369 | + | GGATGTCCCGAAGGCCATCG | 20 | 4307 |
| HSV1-UL30-1370 | + | CCGAAGGCCATCGGGGCCGC | 20 | 4308 |
| HSV1-UL30-1371 | + | AGGCCATCGGGGCCGCCGGC | 20 | 4309 |
| HSV1-UL30-1372 | + | GGCCATCGGGGCCGCCGGCT | 20 | 4310 |
| HSV1-UL30-1373 | + | GCTGGGCTAGCGTGTTGTTC | 20 | 4311 |
| HSV1-UL30-1374 | + | GCTAGCGTGTTGTTCCGGCC | 20 | 4312 |
| HSV1-UL30-1375 | + | TGTTCCGGCCCGGTTTGAGA | 20 | 4313 |
| HSV1-UL30-1376 | + | TTTGAGACGGTACCAGCCGA | 20 | 4314 |
| HSV1-UL30-1377 | + | CCAGCCGAAGGTGACGAACC | 20 | 4315 |
| HSV1-UL30-1378 | + | CAGCCGAAGGTGACGAACCC | 20 | 4316 |
| HSV1-UL30-1379 | + | AGCCGAAGGTGACGAACCCG | 20 | 4317 |
| HSV1-UL30-1380 | + | TGACGAACCCGGGGTTGTCC | 20 | 4318 |
| HSV1-UL30-1381 | + | CGGGGTTGTCCAGGATGAAC | 20 | 4319 |
| HSV1-UL30-1382 | + | GGGGTTGTCCAGGATGAACC | 20 | 4320 |
| HSV1-UL30-1383 | + | GTTGTCCAGGATGAACCGGG | 20 | 4321 |
| HSV1-UL30-1384 | + | GTCCAGGATGAACCGGGTGG | 20 | 4322 |
| HSV1-UL30-1385 | + | CCCACCCTCGTACTTCTTGA | 20 | 4323 |
| HSV1-UL30-1386 | + | CCCTCGTACTTCTTGATGGC | 20 | 4324 |
| HSV1-UL30-1387 | + | CCTCGTACTTCTTGATGGCC | 20 | 4325 |
| HSV1-UL30-1388 | + | CCGGGCAGAAGTTGTCGCAC | 20 | 4326 |
| HSV1-UL30-1389 | + | ACGACAGCACACGCCCGCTT | 20 | 4327 |
| HSV1-UL30-1390 | + | GCCCGCTTCGGACGTAGACG | 20 | 4328 |
| HSV1-UL30-1391 | + | GTAGACGCGGTAAAACAGAG | 20 | 4329 |
| HSV1-UL30-1392 | + | TAGACGCGGTAAAACAGAGC | 20 | 4330 |
| HSV1-UL30-1393 | + | AGACGCGGTAAAACAGAGCG | 20 | 4331 |
| HSV1-UL30-1394 | + | CGTCTCGTAGTAGTACACGT | 20 | 4332 |
| HSV1-UL30-1395 | + | CCACCACCTCCGCCTCGAAG | 20 | 4333 |
| HSV1-UL30-1396 | + | CTCCGCCTCGAAGTGGTCCG | 20 | 4334 |
| HSV1-UL30-1397 | + | AGTGGTCCGCGGAGATGCCG | 20 | 4335 |
| HSV1-UL30-1398 | + | ATGCCGCGGAACGACGCGCC | 20 | 4336 |
| HSV1-UL30-1399 | + | TGCCGCGGAACGACGCGCCC | 20 | 4337 |
| HSV1-UL30-1400 | + | GCCGCGGAACGACGCGCCCG | 20 | 4338 |
| HSV1-UL30-1401 | + | ACGCGCCCGGGGACTCGCGC | 20 | 4339 |
| HSV1-UL30-1402 | + | CGCGCCCGGGGACTCGCGCA | 20 | 4340 |
| HSV1-UL30-1403 | + | CGGGGACTCGCGCAGGGCCG | 20 | 4341 |
| HSV1-UL30-1404 | + | ATGCGCTCGCAGAGATCTCG | 20 | 4342 |
| HSV1-UL30-1405 | + | TGCGCTCGCAGAGATCTCGT | 20 | 4343 |
| HSV1-UL30-1406 | + | GCGCTCGCAGAGATCTCGTG | 20 | 4344 |
| HSV1-UL30-1407 | + | CGCAGAGATCTCGTGGGGCG | 20 | 4345 |
| HSV1-UL30-1408 | + | CTCGTGGGGCGCGGCATTGT | 20 | 4346 |
| HSV1-UL30-1409 | + | CCGCGTGCCGTAAACGTGAA | 20 | 4347 |
| HSV1-UL30-1410 | + | CGTAAACGTGAACGGCCACC | 20 | 4348 |
| HSV1-UL30-1411 | + | AAACGTGAACGGCCACCCGG | 20 | 4349 |
| HSV1-UL30-1412 | + | ACGGCCACCCGGTGGCCTTC | 20 | 4350 |
| HSV1-UL30-1413 | + | CCCGGTGGCCTTCCGGAGTC | 20 | 4351 |
| HSV1-UL30-1414 | + | GGCCTTCCGGAGTCAGGCCC | 20 | 4352 |
| HSV1-UL30-1415 | + | CAGGCCCAGGAGCGTGATGA | 20 | 4353 |
| HSV1-UL30-1416 | + | AGCGTGATGACGGTCCCCGT | 20 | 4354 |
| HSV1-UL30-1417 | + | GACGGTCCCCGTCGGTGTGA | 20 | 4355 |
| HSV1-UL30-1418 | + | TGGCGTCCATAAACCGCGCG | 20 | 4356 |
| HSV1-UL30-1419 | + | GGCGTCCATAAACCGCGCGT | 20 | 4357 |
| HSV1-UL30-1420 | + | GCGTCCATAAACCGCGCGTG | 20 | 4358 |
| HSV1-UL30-1421 | + | CGTCCATAAACCGCGCGTGG | 20 | 4359 |
| HSV1-UL30-1422 | + | TTCCTCCGCCGTAGCGC | 17 | 4360 |
| HSV1-UL30-1423 | + | CACCGCCCCGAACCCTG | 17 | 4361 |
| HSV1-UL30-1424 | + | CCCCGAACCCTGCGGTC | 17 | 4362 |
| HSV1-UL30-1425 | + | TGCGGTCCGGAGCCGCG | 17 | 4363 |
| HSV1-UL30-1426 | + | CGCGCGGCCACGTCGTC | 17 | 4364 |
| HSV1-UL30-1427 | + | GCGCGGCCACGTCGTCC | 17 | 4365 |
| HSV1-UL30-1428 | + | CGCGGCCACGTCGTCCG | 17 | 4366 |
| HSV1-UL30-1429 | + | GCGGCCACGTCGTCCGG | 17 | 4367 |
| HSV1-UL30-1430 | + | CGGCCACGTCGTCCGGG | 17 | 4368 |
| HSV1-UL30-1431 | + | CGGGGGGTGCCACACTT | 17 | 4369 |
| HSV1-UL30-1432 | + | GGGGGGTGCCACACTTC | 17 | 4370 |
| HSV1-UL30-1433 | + | CCTTTTTAACAGACTCT | 17 | 4371 |
| HSV1-UL30-1434 | + | CAGACTCTCGGTGATCT | 17 | 4372 |
| HSV1-UL30-1435 | + | TGGCGTTATTCCCAAAC | 17 | 4373 |
| HSV1-UL30-1436 | + | GGCGTTATTCCCAAACA | 17 | 4374 |
| HSV1-UL30-1437 | + | CGCACGCCGCCCCCAAC | 17 | 4375 |
| HSV1-UL30-1438 | + | ACGCCGCCCCCAACAGG | 17 | 4376 |
| HSV1-UL30-1439 | + | CGCCGCCCCCAACAGGT | 17 | 4377 |
| HSV1-UL30-1440 | + | AGTAATAGTCCGTGTTC | 17 | 4378 |
| HSV1-UL30-1441 | + | GTAATAGTCCGTGTTCA | 17 | 4379 |
| HSV1-UL30-1442 | + | TGTTCAGGGCGACGCCG | 17 | 4380 |
| HSV1-UL30-1443 | + | GTTCAGGGCGACGCCGT | 17 | 4381 |
| HSV1-UL30-1444 | + | GGCGACGCCGTGGGCAA | 17 | 4382 |
| HSV1-UL30-1445 | + | GTGGGCAATGGCGTATG | 17 | 4383 |
| HSV1-UL30-1446 | + | TGGGCAATGGCGTATGC | 17 | 4384 |
| HSV1-UL30-1447 | + | GGCGTATGCGGGATCCT | 17 | 4385 |
| HSV1-UL30-1448 | + | GGGATCCTCGGCCAGCT | 17 | 4386 |
| HSV1-UL30-1449 | + | CGGACACCAGCAGCTTG | 17 | 4387 |
| HSV1-UL30-1450 | + | GGACACCAGCAGCTTGC | 17 | 4388 |
| HSV1-UL30-1451 | + | GACACCAGCAGCTTGCG | 17 | 4389 |
| HSV1-UL30-1452 | + | CAGCAGCTTGCGGGGCT | 17 | 4390 |
| HSV1-UL30-1453 | + | GGCTTGGACGCGCCTCC | 17 | 4391 |
| HSV1-UL30-1454 | + | GCTTGGACGCGCCTCCC | 17 | 4392 |
| HSV1-UL30-1455 | + | CTTGGACGCGCCTCCCG | 17 | 4393 |
| HSV1-UL30-1456 | + | TTGGACGCGCCTCCCGG | 17 | 4394 |
| HSV1-UL30-1457 | + | TGGACGCGCCTCCCGGG | 17 | 4395 |
| HSV1-UL30-1458 | + | CGCGCCTCCCGGGGGGT | 17 | 4396 |
| HSV1-UL30-1459 | + | CCTCCCGGGGGGTCGGC | 17 | 4397 |
| HSV1-UL30-1460 | + | GGGGGGTCGGCAGGCGA | 17 | 4398 |
| HSV1-UL30-1461 | + | CAGGCGACGGCGTCTCC | 17 | 4399 |
| HSV1-UL30-1462 | + | AGGCGACGGCGTCTCCC | 17 | 4400 |
| HSV1-UL30-1463 | + | GGCGACGGCGTCTCCCG | 17 | 4401 |
| HSV1-UL30-1464 | + | GCGACGGCGTCTCCCGG | 17 | 4402 |
| HSV1-UL30-1465 | + | CGTCTCCCGGGGGCGCT | 17 | 4403 |
| HSV1-UL30-1466 | + | TCCCGGGGGCGCTTGGC | 17 | 4404 |
| HSV1-UL30-1467 | + | CCCGGGGGCGCTTGGCC | 17 | 4405 |
| HSV1-UL30-1468 | + | CCGGGGGCGCTTGGCCG | 17 | 4406 |
| HSV1-UL30-1469 | + | GGGGCGCTTGGCCGGGG | 17 | 4407 |
| HSV1-UL30-1470 | + | GGGCGCTTGGCCGGGGA | 17 | 4408 |
| HSV1-UL30-1471 | + | GCTTGGCCGGGGAGGGC | 17 | 4409 |
| HSV1-UL30-1472 | + | CTTGGCCGGGGAGGGCA | 17 | 4410 |
| HSV1-UL30-1473 | + | CGGGGAGGGCAGGGCCG | 17 | 4411 |
| HSV1-UL30-1474 | + | GGGGAGGGCAGGGCCGC | 17 | 4412 |
| HSV1-UL30-1475 | + | GGGAGGGCAGGGCCGCG | 17 | 4413 |
| HSV1-UL30-1476 | + | GGAGGGCAGGGCCGCGG | 17 | 4414 |
| HSV1-UL30-1477 | + | GAGGGCAGGGCCGCGGG | 17 | 4415 |
| HSV1-UL30-1478 | + | AGGGCAGGGCCGCGGGG | 17 | 4416 |
| HSV1-UL30-1479 | + | GGGCAGGGCCGCGGGGG | 17 | 4417 |
| HSV1-UL30-1480 | + | CAGGGCCGCGGGGGGGG | 17 | 4418 |
| HSV1-UL30-1481 | + | AGGGCCGCGGGGGGGGC | 17 | 4419 |
| HSV1-UL30-1482 | + | GGGGCGGGCTCGTCCCC | 17 | 4420 |
| HSV1-UL30-1483 | + | GGGCGGGCTCGTCCCCT | 17 | 4421 |
| HSV1-UL30-1484 | + | GGCGGGCTCGTCCCCTG | 17 | 4422 |
| HSV1-UL30-1485 | + | GGGCTCGTCCCCTGGGG | 17 | 4423 |
| HSV1-UL30-1486 | + | CTCGTCCCCTGGGGCGG | 17 | 4424 |
| HSV1-UL30-1487 | + | CGGCGGCGTCTAGCTCG | 17 | 4425 |
| HSV1-UL30-1488 | + | CGGCGTCTAGCTCGCGG | 17 | 4426 |
| HSV1-UL30-1489 | + | GGCGTCTAGCTCGCGGA | 17 | 4427 |
| HSV1-UL30-1490 | + | GTCTAGCTCGCGGAGGG | 17 | 4428 |
| HSV1-UL30-1491 | + | CCGTCTCCTCTACCTCG | 17 | 4429 |
| HSV1-UL30-1492 | + | CGTCTCCTCTACCTCGC | 17 | 4430 |
| HSV1-UL30-1493 | + | CCTCTACCTCGCGGGTC | 17 | 4431 |
| HSV1-UL30-1494 | + | CTCTACCTCGCGGGTCT | 17 | 4432 |
| HSV1-UL30-1495 | + | TGGGCCACGATCACGTA | 17 | 4433 |
| HSV1-UL30-1496 | + | GGGCCACGATCACGTAC | 17 | 4434 |
| HSV1-UL30-1497 | + | CGATCACGTACGGGATC | 17 | 4435 |
| HSV1-UL30-1498 | + | CGGGATCCGGTCCTTGA | 17 | 4436 |
| HSV1-UL30-1499 | + | ATCCGGTCCTTGATGGA | 17 | 4437 |
| HSV1-UL30-1500 | + | TCCGGTCCTTGATGGAC | 17 | 4438 |
| HSV1-UL30-1501 | + | TGGACGGGACCTGCGCG | 17 | 4439 |
| HSV1-UL30-1502 | + | ACGGGACCTGCGCGCGG | 17 | 4440 |
| HSV1-UL30-1503 | + | CGGGACCTGCGCGCGGC | 17 | 4441 |
| HSV1-UL30-1504 | + | GCTTGTAATACACCGTC | 17 | 4442 |
| HSV1-UL30-1505 | + | TGTAATACACCGTCAGG | 17 | 4443 |
| HSV1-UL30-1506 | + | GTAATACACCGTCAGGT | 17 | 4444 |
| HSV1-UL30-1507 | + | ACACCGTCAGGTGGGCC | 17 | 4445 |
| HSV1-UL30-1508 | + | GTGGGCCAGGCGCTTGT | 17 | 4446 |
| HSV1-UL30-1509 | + | TTGTTGGTGTACGCGCG | 17 | 4447 |
| HSV1-UL30-1510 | + | TGTTGGTGTACGCGCGC | 17 | 4448 |
| HSV1-UL30-1511 | + | CGGGTGTCTGCTCAGTT | 17 | 4449 |
| HSV1-UL30-1512 | + | GTGTCTGCTCAGTTCGG | 17 | 4450 |
| HSV1-UL30-1513 | + | TGCTCAGTTCGGCGGTG | 17 | 4451 |
| HSV1-UL30-1514 | + | CGGTGAGGACAAAGTCC | 17 | 4452 |
| HSV1-UL30-1515 | + | TCCTGGATGTCCCTCTC | 17 | 4453 |
| HSV1-UL30-1516 | + | CCTGGATGTCCCTCTCC | 17 | 4454 |
| HSV1-UL30-1517 | + | GATGTCCCTCTCCGGGT | 17 | 4455 |
| HSV1-UL30-1518 | + | GGTCGGTGATGCGCCGA | 17 | 4456 |
| HSV1-UL30-1519 | + | GTCGGTGATGCGCCGAT | 17 | 4457 |
| HSV1-UL30-1520 | + | GCCGATGGGCGTCTACG | 17 | 4458 |
| HSV1-UL30-1521 | + | ATGGGCGTCTACGAGGA | 17 | 4459 |
| HSV1-UL30-1522 | + | GAACGCCTGCAGTCCCT | 17 | 4460 |
| HSV1-UL30-1523 | + | AACGCCTGCAGTCCCTC | 17 | 4461 |
| HSV1-UL30-1524 | + | CCTGCAGTCCCTCGGGC | 17 | 4462 |
| HSV1-UL30-1525 | + | CTGCAGTCCCTCGGGCA | 17 | 4463 |
| HSV1-UL30-1526 | + | TGCAGTCCCTCGGGCAG | 17 | 4464 |
| HSV1-UL30-1527 | + | CGCCAGCCACTCCTCCG | 17 | 4465 |
| HSV1-UL30-1528 | + | GCCAGCCACTCCTCCGC | 17 | 4466 |
| HSV1-UL30-1529 | + | CCAGCCACTCCTCCGCG | 17 | 4467 |
| HSV1-UL30-1530 | + | CTCCTCCGCGGGGCGCT | 17 | 4468 |
| HSV1-UL30-1531 | + | GGGGCGCTCGGCTAACG | 17 | 4469 |
| HSV1-UL30-1532 | + | GCGCTCGGCTAACGCGG | 17 | 4470 |
| HSV1-UL30-1533 | + | TAACGCGGCGGCCGCTC | 17 | 4471 |
| HSV1-UL30-1534 | + | GGCGGCCGCTCCGGAGA | 17 | 4472 |
| HSV1-UL30-1535 | + | TATCGTCGTAAAACAGC | 17 | 4473 |
| HSV1-UL30-1536 | + | AAAACAGCAGGTCGACC | 17 | 4474 |
| HSV1-UL30-1537 | + | AAACAGCAGGTCGACCA | 17 | 4475 |
| HSV1-UL30-1538 | + | CAGGTCGACCAGGGCCC | 17 | 4476 |
| HSV1-UL30-1539 | + | GTCGACCAGGGCCCTGG | 17 | 4477 |
| HSV1-UL30-1540 | + | CCAGGGCCCTGGAGGTG | 17 | 4478 |
| HSV1-UL30-1541 | + | GCCGATGTACTTTTTCT | 17 | 4479 |
| HSV1-UL30-1542 | + | GGCGATCAGCAGCAGCT | 17 | 4480 |
| HSV1-UL30-1543 | + | TTCGCACTCGAGTTTGA | 17 | 4481 |
| HSV1-UL30-1544 | + | TCGCACTCGAGTTTGAT | 17 | 4482 |
| HSV1-UL30-1545 | + | CGCACTCGAGTTTGATG | 17 | 4483 |
| HSV1-UL30-1546 | + | GCACTCGAGTTTGATGG | 17 | 4484 |
| HSV1-UL30-1547 | + | CACTCGAGTTTGATGGG | 17 | 4485 |
| HSV1-UL30-1548 | + | ACAGCGCGCGCGAGATG | 17 | 4486 |
| HSV1-UL30-1549 | + | CGCCATCTTGTCGCCCA | 17 | 4487 |
| HSV1-UL30-1550 | + | GCCCACGGCCGTCAGCC | 17 | 4488 |
| HSV1-UL30-1551 | + | CACGGCCGTCAGCCCGG | 17 | 4489 |
| HSV1-UL30-1552 | + | TCAGCCCGGCGGCCGTG | 17 | 4490 |
| HSV1-UL30-1553 | + | CGGCGGCCGTGAGGCCG | 17 | 4491 |
| HSV1-UL30-1554 | + | GCGGCACAGCACAAAGA | 17 | 4492 |
| HSV1-UL30-1555 | + | CCCGTAGATGATGCGCA | 17 | 4493 |
| HSV1-UL30-1556 | + | GATGATGCGCATGGAAT | 17 | 4494 |
| HSV1-UL30-1557 | + | ATGATGCGCATGGAATA | 17 | 4495 |
| HSV1-UL30-1558 | + | GCGCATGGAATAGGGCC | 17 | 4496 |
| HSV1-UL30-1559 | + | CGCATGGAATAGGGCCC | 17 | 4497 |
| HSV1-UL30-1560 | + | GCATGGAATAGGGCCCG | 17 | 4498 |
| HSV1-UL30-1561 | + | CATGGAATAGGGCCCGG | 17 | 4499 |
| HSV1-UL30-1562 | + | CCCGGGGGCGCGCATGT | 17 | 4500 |
| HSV1-UL30-1563 | + | CGCATGTCGGCCGCCTC | 17 | 4501 |
| HSV1-UL30-1564 | + | GCATGTCGGCCGCCTCC | 17 | 4502 |
| HSV1-UL30-1565 | + | GGCCGCCTCCGGGAAAT | 17 | 4503 |
| HSV1-UL30-1566 | + | CCTCCGGGAAATCGGCC | 17 | 4504 |
| HSV1-UL30-1567 | + | GGCCAGGAGCTGTTCGA | 17 | 4505 |
| HSV1-UL30-1568 | + | AGGCCGCCCAGCGCGCG | 17 | 4506 |
| HSV1-UL30-1569 | + | GCGCGTGGACGTACTCG | 17 | 4507 |
| HSV1-UL30-1570 | + | CGCGTGGACGTACTCGC | 17 | 4508 |
| HSV1-UL30-1571 | + | TCGCGAGCAGCATCTCG | 17 | 4509 |
| HSV1-UL30-1572 | + | CAGCATCTCGCGGCCGA | 17 | 4510 |
| HSV1-UL30-1573 | + | GATGGTCGTCACCGTCG | 17 | 4511 |
| HSV1-UL30-1574 | + | CCGTCGCGGCAACGTGC | 17 | 4512 |
| HSV1-UL30-1575 | + | GCGGCAACGTGCAGGCA | 17 | 4513 |
| HSV1-UL30-1576 | + | CAACGTGCAGGCACGGC | 17 | 4514 |
| HSV1-UL30-1577 | + | GTTACACACGACCTTGA | 17 | 4515 |
| HSV1-UL30-1578 | + | ACACACGACCTTGATGG | 17 | 4516 |
| HSV1-UL30-1579 | + | CGGCCTGCTGCTTGTCC | 17 | 4517 |
| HSV1-UL30-1580 | + | CTGCTTGTCCAGGAGCA | 17 | 4518 |
| HSV1-UL30-1581 | + | CAGGAGCACGGCCTCCT | 17 | 4519 |
| HSV1-UL30-1582 | + | AGGAGCACGGCCTCCTC | 17 | 4520 |
| HSV1-UL30-1583 | + | GGAGCACGGCCTCCTCG | 17 | 4521 |
| HSV1-UL30-1584 | + | CCTCCTCGGGGCTGCTC | 17 | 4522 |
| HSV1-UL30-1585 | + | CTCCTCGGGGCTGCTCT | 17 | 4523 |
| HSV1-UL30-1586 | + | TCCTCGGGGCTGCTCTG | 17 | 4524 |
| HSV1-UL30-1587 | + | TCTGGGGAATCCGCGAG | 17 | 4525 |
| HSV1-UL30-1588 | + | GCGGATCTGCTTTCGCA | 17 | 4526 |
| HSV1-UL30-1589 | + | TGGCGAGCCAGTCCCGC | 17 | 4527 |
| HSV1-UL30-1590 | + | CGAGCCAGTCCCGCAGG | 17 | 4528 |
| HSV1-UL30-1591 | + | CCCGCAGGAGGATGCTG | 17 | 4529 |
| HSV1-UL30-1592 | + | GCAGGAGGATGCTGAGG | 17 | 4530 |
| HSV1-UL30-1593 | + | CCCCCACCTCGATCTCC | 17 | 4531 |
| HSV1-UL30-1594 | + | AGTCCTTGCCCGCCTCC | 17 | 4532 |
| HSV1-UL30-1595 | + | CAGGTGCGCCACTGCGT | 17 | 4533 |
| HSV1-UL30-1596 | + | CCACTGCGTCGGCCCTC | 17 | 4534 |
| HSV1-UL30-1597 | + | CACTGCGTCGGCCCTCA | 17 | 4535 |
| HSV1-UL30-1598 | + | AGAGCGTGCTGAAGCAC | 17 | 4536 |
| HSV1-UL30-1599 | + | TGCTGAAGCACAGGTTG | 17 | 4537 |
| HSV1-UL30-1600 | + | GCTGAAGCACAGGTTGT | 17 | 4538 |
| HSV1-UL30-1601 | + | AGCACAGGTTGTGGGCC | 17 | 4539 |
| HSV1-UL30-1602 | + | GTGGGCCTGGATGATGC | 17 | 4540 |
| HSV1-UL30-1603 | + | TGGGCCTGGATGATGCT | 17 | 4541 |
| HSV1-UL30-1604 | + | GGGCCTGGATGATGCTG | 17 | 4542 |
| HSV1-UL30-1605 | + | GGATGATGCTGGGGTAC | 17 | 4543 |
| HSV1-UL30-1606 | + | GATGCTGGGGTACAGGC | 17 | 4544 |
| HSV1-UL30-1607 | + | AAAGTCGAACACCACCA | 17 | 4545 |
| HSV1-UL30-1608 | + | AAGTCGAACACCACCAC | 17 | 4546 |
| HSV1-UL30-1609 | + | AGTCGAACACCACCACG | 17 | 4547 |
| HSV1-UL30-1610 | + | GGGGTTCACGTGAAACC | 17 | 4548 |
| HSV1-UL30-1611 | + | CACGTGAAACCCGGAAG | 17 | 4549 |
| HSV1-UL30-1612 | + | ACGTGAAACCCGGAAGT | 17 | 4550 |
| HSV1-UL30-1613 | + | CGTGAAACCCGGAAGTG | 17 | 4551 |
| HSV1-UL30-1614 | + | ACCCGGAAGTGGGGTCA | 17 | 4552 |
| HSV1-UL30-1615 | + | AGTGGGGTCAAGGACCC | 17 | 4553 |
| HSV1-UL30-1616 | + | CAAGGACCCTGGCCCCC | 17 | 4554 |
| HSV1-UL30-1617 | + | GTACCCCACGTGCCTGC | 17 | 4555 |
| HSV1-UL30-1618 | + | CCCCACGTGCCTGCCGG | 17 | 4556 |
| HSV1-UL30-1619 | + | GTCTCCCGCGCGCCCTC | 17 | 4557 |
| HSV1-UL30-1620 | + | TCCTCCCCCTCCTCCTC | 17 | 4558 |
| HSV1-UL30-1621 | + | GCCGCTCCTCGTCCTCC | 17 | 4559 |
| HSV1-UL30-1622 | + | CCGCTCCTCGTCCTCCC | 17 | 4560 |
| HSV1-UL30-1623 | + | CTCGTCCTCCCGGGCTG | 17 | 4561 |
| HSV1-UL30-1624 | + | TCCTCCCGGGCTGCGGC | 17 | 4562 |
| HSV1-UL30-1625 | + | GGCTGCGGCCGGACGCT | 17 | 4563 |
| HSV1-UL30-1626 | + | GCTGCGGCCGGACGCTT | 17 | 4564 |
| HSV1-UL30-1627 | + | CTTGGGCGCCTCCCCCC | 17 | 4565 |
| HSV1-UL30-1628 | + | CGCCCCTAAATCGCCCC | 17 | 4566 |
| HSV1-UL30-1629 | + | GCCCCTAAATCGCCCCT | 17 | 4567 |
| HSV1-UL30-1630 | + | AATCGCCCCTGGGTGTC | 17 | 4568 |
| HSV1-UL30-1631 | + | GCAGAATAAAGCCCTTC | 17 | 4569 |
| HSV1-UL30-1632 | + | AATAAAGCCCTTCTGGT | 17 | 4570 |
| HSV1-UL30-1633 | + | AGCCCTTCTGGTCGGCC | 17 | 4571 |
| HSV1-UL30-1634 | + | GGTCGGCCAGGCGCAGC | 17 | 4572 |
| HSV1-UL30-1635 | + | GCAGGCACGTAAAGACG | 17 | 4573 |
| HSV1-UL30-1636 | + | TAAAGACGCGGATCTGC | 17 | 4574 |
| HSV1-UL30-1637 | + | CTGCTGGCCGTCGTAGA | 17 | 4575 |
| HSV1-UL30-1638 | + | GGCCGTCGTAGATGGTG | 17 | 4576 |
| HSV1-UL30-1639 | + | GCCGTCGTAGATGGTGC | 17 | 4577 |
| HSV1-UL30-1640 | + | ACCCGCCAAGCGCGCGA | 17 | 4578 |
| HSV1-UL30-1641 | + | CGGCCGAGAGCTCCAGA | 17 | 4579 |
| HSV1-UL30-1642 | + | GGCCGAGAGCTCCAGAT | 17 | 4580 |
| HSV1-UL30-1643 | + | GCCGAGAGCTCCAGATG | 17 | 4581 |
| HSV1-UL30-1644 | + | AAAACTTAAAAAACAGC | 17 | 4582 |
| HSV1-UL30-1645 | + | ACAGCTGGCCCACCAGC | 17 | 4583 |
| HSV1-UL30-1646 | + | CAGCTGGCCCACCAGCA | 17 | 4584 |
| HSV1-UL30-1647 | + | GATCACCCCGCGTTGCG | 17 | 4585 |
| HSV1-UL30-1648 | + | ATCACCCCGCGTTGCGC | 17 | 4586 |
| HSV1-UL30-1649 | + | CCCGCGTTGCGCGGGCC | 17 | 4587 |
| HSV1-UL30-1650 | + | GCGTTGCGCGGGCCCGG | 17 | 4588 |
| HSV1-UL30-1651 | + | GGGCCCGGCGGCGTAGT | 17 | 4589 |
| HSV1-UL30-1652 | + | CCCGGCGGCGTAGTAGG | 17 | 4590 |
| HSV1-UL30-1653 | + | CCGGCGGCGTAGTAGGC | 17 | 4591 |
| HSV1-UL30-1654 | + | CGGCGGCGTAGTAGGCG | 17 | 4592 |
| HSV1-UL30-1655 | + | GGATGTCGCGATAGCTC | 17 | 4593 |
| HSV1-UL30-1656 | + | CCTTCTTCTTGTCCTTC | 17 | 4594 |
| HSV1-UL30-1657 | + | CTTCTTGTCCTTCAGGA | 17 | 4595 |
| HSV1-UL30-1658 | + | GTCCTTCAGGACGGCTT | 17 | 4596 |
| HSV1-UL30-1659 | + | CAGGACGGCTTCGGCCA | 17 | 4597 |
| HSV1-UL30-1660 | + | CGAGAGCTTGATCTTGT | 17 | 4598 |
| HSV1-UL30-1661 | + | TTATCTTGCTGCGCTTC | 17 | 4599 |
| HSV1-UL30-1662 | + | TGCTGCGCTTCTGGAAG | 17 | 4600 |
| HSV1-UL30-1663 | + | GCTTCTGGAAGTGGCTC | 17 | 4601 |
| HSV1-UL30-1664 | + | ACACGCGAAACACGCCC | 17 | 4602 |
| HSV1-UL30-1665 | + | CGCCCCGGCCGTTCATG | 17 | 4603 |
| HSV1-UL30-1666 | + | TGCGGCCGTACCCGTCC | 17 | 4604 |
| HSV1-UL30-1667 | + | GCGGCCGTACCCGTCCA | 17 | 4605 |
| HSV1-UL30-1668 | + | CGGCCGTACCCGTCCAG | 17 | 4606 |
| HSV1-UL30-1669 | + | GGCCGTACCCGTCCAGG | 17 | 4607 |
| HSV1-UL30-1670 | + | GTAAATGTCCGTCAGCT | 17 | 4608 |
| HSV1-UL30-1671 | + | CAGCTTGGCCAGCAAGA | 17 | 4609 |
| HSV1-UL30-1672 | + | AGCTTGGCCAGCAAGAA | 17 | 4610 |
| HSV1-UL30-1673 | + | GTTGATGATGTTGTACC | 17 | 4611 |
| HSV1-UL30-1674 | + | GTACCCGGTCACGAACT | 17 | 4612 |
| HSV1-UL30-1675 | + | TACCCGGTCACGAACTC | 17 | 4613 |
| HSV1-UL30-1676 | + | ACCCGGTCACGAACTCG | 17 | 4614 |
| HSV1-UL30-1677 | + | GGCCGTACTGTTTCACA | 17 | 4615 |
| HSV1-UL30-1678 | + | GCCGTACTGTTTCACAA | 17 | 4616 |
| HSV1-UL30-1679 | + | TTTCACAAGGGTCATGA | 17 | 4617 |
| HSV1-UL30-1680 | + | GTCGAATTCCAGAACCA | 17 | 4618 |
| HSV1-UL30-1681 | + | TCGAATTCCAGAACCAC | 17 | 4619 |
| HSV1-UL30-1682 | + | TTCCAGAACCACGGGCG | 17 | 4620 |
| HSV1-UL30-1683 | + | TCCAGAACCACGGGCGT | 17 | 4621 |
| HSV1-UL30-1684 | + | GAACCACGGGCGTGGGC | 17 | 4622 |
| HSV1-UL30-1685 | + | GGGCGTGGGCAGGCCCC | 17 | 4623 |
| HSV1-UL30-1686 | + | TGGCCGCCAGCTCGTTC | 17 | 4624 |
| HSV1-UL30-1687 | + | CCGCCAGCTCGTTCAGG | 17 | 4625 |
| HSV1-UL30-1688 | + | CGCCAGCTCGTTCAGGT | 17 | 4626 |
| HSV1-UL30-1689 | + | CTCGTTCAGGTGGGATT | 17 | 4627 |
| HSV1-UL30-1690 | + | TCGTTCAGGTGGGATTC | 17 | 4628 |
| HSV1-UL30-1691 | + | CGTTCAGGTGGGATTCG | 17 | 4629 |
| HSV1-UL30-1692 | + | TCAGGTGGGATTCGGGG | 17 | 4630 |
| HSV1-UL30-1693 | + | GGATTCGGGGAGGTCGC | 17 | 4631 |
| HSV1-UL30-1694 | + | AGGAACCGAGCGAAAAC | 17 | 4632 |
| HSV1-UL30-1695 | + | AACCGAGCGAAAACAGG | 17 | 4633 |
| HSV1-UL30-1696 | + | ACAGGAGGACGTGCTCC | 17 | 4634 |
| HSV1-UL30-1697 | + | CAGGAGGACGTGCTCCA | 17 | 4635 |
| HSV1-UL30-1698 | + | GAGGACGTGCTCCAGGG | 17 | 4636 |
| HSV1-UL30-1699 | + | GACGTGCTCCAGGGCGG | 17 | 4637 |
| HSV1-UL30-1700 | + | GTGCTCCAGGGCGGTGG | 17 | 4638 |
| HSV1-UL30-1701 | + | CCAGGGCGGTGGTGGAC | 17 | 4639 |
| HSV1-UL30-1702 | + | CAGGTCGTAGAGCAGAC | 17 | 4640 |
| HSV1-UL30-1703 | + | AGAGCAGACAGGATATC | 17 | 4641 |
| HSV1-UL30-1704 | + | AGGATATCTGGATGACC | 17 | 4642 |
| HSV1-UL30-1705 | + | TGGATGACCAGGTCCTC | 17 | 4643 |
| HSV1-UL30-1706 | + | GGATGACCAGGTCCTCC | 17 | 4644 |
| HSV1-UL30-1707 | + | CAGGTCCTCCGGGTGCC | 17 | 4645 |
| HSV1-UL30-1708 | + | TCCGGGTGCCCGGCCAC | 17 | 4646 |
| HSV1-UL30-1709 | + | GTGCCCGGCCACCGGAA | 17 | 4647 |
| HSV1-UL30-1710 | + | CACATGAGCTTGTATGC | 17 | 4648 |
| HSV1-UL30-1711 | + | TGAGCTTGTATGCCGGT | 17 | 4649 |
| HSV1-UL30-1712 | + | GCTCATGCCCCCCTCGA | 17 | 4650 |
| HSV1-UL30-1713 | + | TGCCCCCCTCGATGGCC | 17 | 4651 |
| HSV1-UL30-1714 | + | GTTAAACTCGACGTCGC | 17 | 4652 |
| HSV1-UL30-1715 | + | GTCGCTGGATGTCCCGA | 17 | 4653 |
| HSV1-UL30-1716 | + | GATGTCCCGAAGGCCAT | 17 | 4654 |
| HSV1-UL30-1717 | + | ATGTCCCGAAGGCCATC | 17 | 4655 |
| HSV1-UL30-1718 | + | TGTCCCGAAGGCCATCG | 17 | 4656 |
| HSV1-UL30-1719 | + | AAGGCCATCGGGGCCGC | 17 | 4657 |
| HSV1-UL30-1720 | + | CCATCGGGGCCGCCGGC | 17 | 4658 |
| HSV1-UL30-1721 | + | CATCGGGGCCGCCGGCT | 17 | 4659 |
| HSV1-UL30-1722 | + | GGGCTAGCGTGTTGTTC | 17 | 4660 |
| HSV1-UL30-1723 | + | AGCGTGTTGTTCCGGCC | 17 | 4661 |
| HSV1-UL30-1724 | + | TCCGGCCCGGTTTGAGA | 17 | 4662 |
| HSV1-UL30-1725 | + | GAGACGGTACCAGCCGA | 17 | 4663 |
| HSV1-UL30-1726 | + | GCCGAAGGTGACGAACC | 17 | 4664 |
| HSV1-UL30-1727 | + | CCGAAGGTGACGAACCC | 17 | 4665 |
| HSV1-UL30-1728 | + | CGAAGGTGACGAACCCG | 17 | 4666 |
| HSV1-UL30-1729 | + | CGAACCCGGGGTTGTCC | 17 | 4667 |
| HSV1-UL30-1730 | + | GGTTGTCCAGGATGAAC | 17 | 4668 |
| HSV1-UL30-1731 | + | GTTGTCCAGGATGAACC | 17 | 4669 |
| HSV1-UL30-1732 | + | GTCCAGGATGAACCGGG | 17 | 4670 |
| HSV1-UL30-1733 | + | CAGGATGAACCGGGTGG | 17 | 4671 |
| HSV1-UL30-1734 | + | ACCCTCGTACTTCTTGA | 17 | 4672 |
| HSV1-UL30-1735 | + | TCGTACTTCTTGATGGC | 17 | 4673 |
| HSV1-UL30-1736 | + | CGTACTTCTTGATGGCC | 17 | 4674 |
| HSV1-UL30-1737 | + | GGCAGAAGTTGTCGCAC | 17 | 4675 |
| HSV1-UL30-1738 | + | ACAGCACACGCCCGCTT | 17 | 4676 |
| HSV1-UL30-1739 | + | CGCTTCGGACGTAGACG | 17 | 4677 |
| HSV1-UL30-1740 | + | GACGCGGTAAAACAGAG | 17 | 4678 |
| HSV1-UL30-1741 | + | ACGCGGTAAAACAGAGC | 17 | 4679 |
| HSV1-UL30-1742 | + | CGCGGTAAAACAGAGCG | 17 | 4680 |
| HSV1-UL30-1743 | + | CTCGTAGTAGTACACGT | 17 | 4681 |
| HSV1-UL30-1744 | + | CCACCTCCGCCTCGAAG | 17 | 4682 |
| HSV1-UL30-1745 | + | CGCCTCGAAGTGGTCCG | 17 | 4683 |
| HSV1-UL30-1746 | + | GGTCCGCGGAGATGCCG | 17 | 4684 |
| HSV1-UL30-1747 | + | CCGCGGAACGACGCGCC | 17 | 4685 |
| HSV1-UL30-1748 | + | CGCGGAACGACGCGCCC | 17 | 4686 |
| HSV1-UL30-1749 | + | GCGGAACGACGCGCCCG | 17 | 4687 |
| HSV1-UL30-1750 | + | CGCCCGGGGACTCGCGC | 17 | 4688 |
| HSV1-UL30-1751 | + | GCCCGGGGACTCGCGCA | 17 | 4689 |
| HSV1-UL30-1752 | + | GGACTCGCGCAGGGCCG | 17 | 4690 |
| HSV1-UL30-1753 | + | CGCTCGCAGAGATCTCG | 17 | 4691 |
| HSV1-UL30-1754 | + | GCTCGCAGAGATCTCGT | 17 | 4692 |
| HSV1-UL30-1755 | + | CTCGCAGAGATCTCGTG | 17 | 4693 |
| HSV1-UL30-1756 | + | AGAGATCTCGTGGGGCG | 17 | 4694 |
| HSV1-UL30-1757 | + | GTGGGGCGCGGCATTGT | 17 | 4695 |
| HSV1-UL30-1758 | + | CGTGCCGTAAACGTGAA | 17 | 4696 |
| HSV1-UL30-1759 | + | AAACGTGAACGGCCACC | 17 | 4697 |
| HSV1-UL30-1760 | + | CGTGAACGGCCACCCGG | 17 | 4698 |
| HSV1-UL30-1761 | + | GCCACCCGGTGGCCTTC | 17 | 4699 |
| HSV1-UL30-1762 | + | GGTGGCCTTCCGGAGTC | 17 | 4700 |
| HSV1-UL30-1763 | + | CTTCCGGAGTCAGGCCC | 17 | 4701 |
| HSV1-UL30-1764 | + | GCCCAGGAGCGTGATGA | 17 | 4702 |
| HSV1-UL30-1765 | + | GTGATGACGGTCCCCGT | 17 | 4703 |
| HSV1-UL30-1766 | + | GGTCCCCGTCGGTGTGA | 17 | 4704 |
| HSV1-UL30-1767 | + | CGTCCATAAACCGCGCG | 17 | 4705 |
| HSV1-UL30-1768 | + | GTCCATAAACCGCGCGT | 17 | 4706 |
| HSV1-UL30-1769 | + | TCCATAAACCGCGCGTG | 17 | 4707 |
| HSV1-UL30-1770 | + | CCATAAACCGCGCGTGG | 17 | 4708 |

[0718] Table 2D) provides exemplary targeting domains for knocking out the UL30 gene selected according to the first tier parameters. The targeting domains are selected based on location within first 500 bp of the coding sequence of the UL30 gene. It is contemplated herein that the targeting domain hybridizes to the target domain through complementary base pairing. Any of the targeting domains in the table can be used with a S. aureus Cas9 molecule that gives double stranded cleavage. Any of the targeting domains in the table can be used with a S. aureus Cas9 single-stranded break nucleases (nickases). In an embodiment, dual targeting is used to create two nicks on opposite DNA strands by using S. aureus Cas9 nickases with two targeting domains that are complementary to opposite DNA strands, e.g., a gRNA comprising any minus strand targeting domain may be paired any gRNA comprising a plus strand targeting domain provided that the two gRNAs are oriented on the DNA such that PAMs face outward and the distance between the 5′ ends of the gRNAs is 0-50 bp.

TABLE 2D

| 1st Tier | | | Target Site | Seq |
|---|---|---|---|---|
| gRNA Name | DNA Strand | Targeting Domain | Length | ID |
| HSV1-UL30-237 | − | UGGCGGCGGCCCGCUGUCCC | 20 | 4709 |
| HSV1-UL30-1 | − | GGCGGCGGCCCGCUGUCCCC | 20 | 3232 |
| HSV1-UL30-239 | − | CGGCGGCCCGCUGUCCCCCG | 20 | 4710 |
| HSV1-UL30-2 | − | GGCGGCCCGCUGUCCCCCGG | 20 | 3233 |
| HSV1-UL30-241 | − | CCCGGAGGAAAGUCGGCGGC | 20 | 4711 |
| HSV1-UL30-242 | − | GUCGGCGGCCAGGGCGGCGU | 20 | 4712 |
| HSV1-UL30-243 | − | UUUUGCGCCCGCCGGCCCUC | 20 | 4713 |
| HSV1-UL30-11 | − | UUUGCGCCCGCCGGCCCUCG | 20 | 3125 |
| HSV1-UL30-245 | − | GCCGGCCCUCGCGGAGCCAG | 20 | 4714 |
| HSV1-UL30-12 | − | CCGGCCCUCGCGGAGCCAGC | 20 | 3240 |
| HSV1-UL30-13 | − | CGGCCCUCGCGGAGCCAGCC | 20 | 3241 |
| HSV1-UL30-248 | − | GCCGGGGACCCCCGCCUUGU | 20 | 4715 |
| HSV1-UL30-249 | − | CAACCCCUACCUCGCCCCAG | 20 | 4716 |
| HSV1-UL30-16 | − | AACCCCUACCUCGCCCCAGU | 20 | 3244 |
| HSV1-UL30-251 | − | UCGCCCCAGUCGGGACGCAA | 20 | 4717 |
| HSV1-UL30-252 | − | CGGGACGCAACAGAAGCCGA | 20 | 4718 |
| HSV1-UL30-253 | − | CCAGCGCCAUACGUACUAUA | 20 | 4719 |
| HSV1-UL30-254 | − | UACGUACUAUAGCGAAUGCG | 20 | 4720 |
| HSV1-UL30-255 | − | GAAUUUCGAUUCAUCGCCCC | 20 | 4721 |
| HSV1-UL30-256 | − | GAUUCAUCGCCCCGCGGGUG | 20 | 4722 |
| HSV1-UL30-257 | − | CAUCGCCCCGCGGGUGCUGG | 20 | 4723 |
| HSV1-UL30-258 | − | UCGCCCCGCGGGUGCUGGAC | 20 | 4724 |
| HSV1-UL30-259 | − | UGCUGGACGAGGAUGCCCCC | 20 | 4725 |
| HSV1-UL30-24 | − | GCUGGACGAGGAUGCCCCCC | 20 | 3247 |
| HSV1-UL30-261 | − | UGGACGAGGAUGCCCCCCCG | 20 | 4726 |
| HSV1-UL30-262 | − | UGCCCCCCCGGAGAAGCGCG | 20 | 4727 |
| HSV1-UL30-25 | − | GCCCCCCCGGAGAAGCGCGC | 20 | 3131 |
| HSV1-UL30-264 | − | GCGCGCCCCCAAGGUGUACU | 20 | 4728 |
| HSV1-UL30-30 | − | CGCGCCCCCAAGGUGUACUG | 20 | 3135 |
| HSV1-UL30-31 | − | GCGCCCCCAAGGUGUACUGC | 20 | 3136 |
| HSV1-UL30-32 | − | CGCCCCCAAGGUGUACUGCG | 20 | 3137 |
| HSV1-UL30-33 | − | GCCCCCAAGGUGUACUGCGG | 20 | 3138 |
| HSV1-UL30-34 | − | CCCCCAAGGUGUACUGCGGG | 20 | 3249 |
| HSV1-UL30-270 | − | CAAGGUGUACUGCGGGGGGG | 20 | 4729 |
| HSV1-UL30-271 | − | CGAGCGCGACGUCCUCCGCG | 20 | 4730 |
| HSV1-UL30-272 | − | GCGACGUCCUCCGCGUCGGG | 20 | 4731 |
| HSV1-UL30-273 | − | UGGCCGCGGCGCUCGCGCCU | 20 | 4732 |
| HSV1-UL30-43 | − | GGCCGCGGCGCUCGCGCCUG | 20 | 3253 |
| HSV1-UL30-275 | − | GCUCGCGCCUGUGGGGCGGC | 20 | 4733 |
| HSV1-UL30-276 | − | GCGGCGUGGACCACGCCCCG | 20 | 4734 |
| HSV1-UL30-49 | − | CGGCGUGGACCACGCCCCGG | 20 | 3259 |
| HSV1-UL30-278 | − | UCUUUCACGUGUACGACAUC | 20 | 4735 |
| HSV1-UL30-52 | − | CUUUCACGUGUACGACAUCC | 20 | 3146 |
| HSV1-UL30-280 | − | UUCACGUGUACGACAUCCUG | 20 | 4736 |
| HSV1-UL30-281 | − | UGUACGACAUCCUGGAGAAC | 20 | 4737 |
| HSV1-UL30-53 | − | GUACGACAUCCUGGAGAACG | 20 | 3147 |
| HSV1-UL30-283 | − | CGGCGGCCCGCUGUCCC | 17 | 4738 |
| HSV1-UL30-119 | − | GGCGGCCCGCUGUCCCC | 17 | 3295 |
| HSV1-UL30-285 | − | CGGCCCGCUGUCCCCCG | 17 | 4739 |
| HSV1-UL30-120 | − | GGCCCGCUGUCCCCCGG | 17 | 3296 |
| HSV1-UL30-287 | − | GGAGGAAAGUCGGCGGC | 17 | 4740 |
| HSV1-UL30-288 | − | GGCGGCCAGGGCGGCGU | 17 | 4741 |
| HSV1-UL30-289 | − | UGCGCCCGCCGGCCCUC | 17 | 4742 |
| HSV1-UL30-129 | − | GCGCCCGCCGGCCCUCG | 17 | 3302 |
| HSV1-UL30-291 | − | GGCCCUCGCGGAGCCAG | 17 | 4743 |
| HSV1-UL30-130 | − | GCCCUCGCGGAGCCAGC | 17 | 3303 |
| HSV1-UL30-131 | − | CCCUCGCGGAGCCAGCC | 17 | 3304 |
| HSV1-UL30-294 | − | GGGGACCCCCGCCUUGU | 17 | 4744 |
| HSV1-UL30-295 | − | CCCCUACCUCGCCCCAG | 17 | 4745 |
| HSV1-UL30-134 | − | CCCUACCUCGCCCCAGU | 17 | 3307 |
| HSV1-UL30-297 | − | CCCCAGUCGGGACGCAA | 17 | 4746 |
| HSV1-UL30-298 | − | GACGCAACAGAAGCCGA | 17 | 4747 |
| HSV1-UL30-299 | − | GCGCCAUACGUACUAUA | 17 | 4748 |
| HSV1-UL30-300 | − | GUACUAUAGCGAAUGCG | 17 | 4749 |
| HSV1-UL30-301 | − | UUUCGAUUCAUCGCCCC | 17 | 4750 |
| HSV1-UL30-302 | − | UCAUCGCCCCGCGGGUG | 17 | 4751 |
| HSV1-UL30-303 | − | CGCCCCGCGGGUGCUGG | 17 | 4752 |
| HSV1-UL30-304 | − | CCCCGCGGGUGCUGGAC | 17 | 4753 |
| HSV1-UL30-305 | − | UGGACGAGGAUGCCCCC | 17 | 4754 |
| HSV1-UL30-142 | − | GGACGAGGAUGCCCCCC | 17 | 3310 |
| HSV1-UL30-307 | − | ACGAGGAUGCCCCCCCG | 17 | 4755 |
| HSV1-UL30-308 | − | CCCCCCGGAGAAGCGCG | 17 | 4756 |
| HSV1-UL30-143 | − | CCCCCGGAGAAGCGCGC | 17 | 3311 |
| HSV1-UL30-310 | − | CGCCCCCAAGGUGUACU | 17 | 4757 |
| HSV1-UL30-148 | − | GCCCCCAAGGUGUACUG | 17 | 3189 |
| HSV1-UL30-149 | − | CCCCCAAGGUGUACUGC | 17 | 3313 |
| HSV1-UL30-150 | − | CCCCAAGGUGUACUGCG | 17 | 3190 |
| HSV1-UL30-151 | − | CCCAAGGUGUACUGCGG | 17 | 3314 |
| HSV1-UL30-152 | − | CCAAGGUGUACUGCGGG | 17 | 3315 |
| HSV1-UL30-316 | − | GGUGUACUGCGGGGGGG | 17 | 4758 |
| HSV1-UL30-317 | − | GCGCGACGUCCUCCGCG | 17 | 4759 |
| HSV1-UL30-318 | − | ACGUCCUCCGCGUCGGG | 17 | 4760 |
| HSV1-UL30-319 | − | CCGCGGCGCUCGCGCCU | 17 | 4761 |
| HSV1-UL30-161 | − | CGCGGCGCUCGCGCCUG | 17 | 3320 |
| HSV1-UL30-321 | − | CGCGCCUGUGGGGCGGC | 17 | 4762 |
| HSV1-UL30-322 | − | GCGUGGACCACGCCCCG | 17 | 4763 |
| HSV1-UL30-167 | − | CGUGGACCACGCCCCGG | 17 | 3197 |
| HSV1-UL30-324 | − | UUCACGUGUACGACAUC | 17 | 4764 |
| HSV1-UL30-170 | − | UCACGUGUACGACAUCC | 17 | 3200 |
| HSV1-UL30-326 | − | ACGUGUACGACAUCCUG | 17 | 4765 |
| HSV1-UL30-327 | − | ACGACAUCCUGGAGAAC | 17 | 4766 |
| HSV1-UL30-171 | − | CGACAUCCUGGAGAACG | 17 | 3201 |
| HSV1-UL30-329 | + | UACGCGUGCUCCACGUUCUC | 20 | 4767 |
| HSV1-UL30-330 | + | UUCUCCAGGAUGUCGUACAC | 20 | 4768 |
| HSV1-UL30-331 | + | ACACGUGAAAGACGGUGACG | 20 | 4769 |
| HSV1-UL30-59 | + | CACGUGAAAGACGGUGACGG | 20 | 3262 |
| HSV1-UL30-333 | + | GAAAGACGGUGACGGUGGGG | 20 | 4770 |
| HSV1-UL30-334 | + | GACGGUGGGGUUGAACCCCG | 20 | 4771 |
| HSV1-UL30-62 | + | ACGGUGGGGUUGAACCCCGC | 20 | 3152 |
| HSV1-UL30-336 | + | GUCCACGCCGCCCCACAGGC | 20 | 4772 |
| HSV1-UL30-337 | + | ACAGGCGCGAGCGCCGCGGC | 20 | 4773 |
| HSV1-UL30-338 | + | CAGAAGCCGCCCGACCCGAC | 20 | 4774 |
| HSV1-UL30-68 | + | AGAAGCCGCCCGACCCGACG | 20 | 3155 |
| HSV1-UL30-340 | + | AAGCCGCCCGACCCGACGCG | 20 | 4775 |
| HSV1-UL30-341 | + | CGUCCCCCCCGCAGUACACC | 20 | 4776 |
| HSV1-UL30-70 | + | GUCCCCCCCGCAGUACACCU | 20 | 3157 |
| HSV1-UL30-71 | + | UCCCCCCCGCAGUACACCUU | 20 | 3267 |
| HSV1-UL30-344 | + | AGUACACCUUGGGGGCGCGC | 20 | 4777 |
| HSV1-UL30-345 | + | GUGCACCCCGGCGCGCUUCU | 20 | 4778 |
| HSV1-UL30-76 | + | UGCACCCCGGCGCGCUUCUC | 20 | 3270 |
| HSV1-UL30-77 | + | GCACCCCGGCGCGCUUCUCC | 20 | 3271 |
| HSV1-UL30-78 | + | CACCCCGGCGCGCUUCUCCG | 20 | 3272 |
| HSV1-UL30-79 | + | ACCCCGGCGCGCUUCUCCGG | 20 | 3273 |
| HSV1-UL30-350 | + | GGCAUCCUCGUCCAGCACCC | 20 | 4779 |
| HSV1-UL30-82 | + | GCAUCCUCGUCCAGCACCCG | 20 | 3161 |
| HSV1-UL30-352 | + | CGUCCAGCACCCGCGGGGCG | 20 | 4780 |
| HSV1-UL30-353 | + | AGCACCCGCGGGGCGAUGAA | 20 | 4781 |
| HSV1-UL30-354 | + | UCGCUAUAGUACGUAUGGCG | 20 | 4782 |
| HSV1-UL30-355 | + | CGGCUUCUGUUGCGUCCCGA | 20 | 4783 |
| HSV1-UL30-91 | + | GGCUUCUGUUGCGUCCCGAC | 20 | 3166 |
| HSV1-UL30-357 | + | UCUGUUGCGUCCCGACUGGG | 20 | 4784 |
| HSV1-UL30-358 | + | GCGUCCCGACUGGGGCGAGG | 20 | 4785 |
| HSV1-UL30-95 | + | CGUCCCGACUGGGGCGAGGU | 20 | 3170 |
| HSV1-UL30-360 | + | AAAGUUUUGCCUCAAACAAG | 20 | 4786 |
| HSV1-UL30-99 | + | AAGUUUUGCCUCAAACAAGG | 20 | 3282 |
| HSV1-UL30-100 | + | AGUUUUGCCUCAAACAAGGC | 20 | 3283 |
| HSV1-UL30-363 | + | GGGGGUCCCCGGCUGGCUCC | 20 | 4787 |
| HSV1-UL30-364 | + | GGGUCCCCGGCUGGCUCCGC | 20 | 4788 |
| HSV1-UL30-365 | + | GGCUGGCUCCGCGAGGGCCG | 20 | 4789 |
| HSV1-UL30-366 | + | GGCCGGCGGGCGCAAAAAAC | 20 | 4790 |
| HSV1-UL30-367 | + | CCCUGGCCGCCGACUUUCCU | 20 | 4791 |
| HSV1-UL30-112 | + | CCUGGCCGCCGACUUUCCUC | 20 | 3290 |
| HSV1-UL30-113 | + | CUGGCCGCCGACUUUCCUCC | 20 | 3291 |
| HSV1-UL30-114 | + | UGGCCGCCGACUUUCCUCCG | 20 | 3176 |
| HSV1-UL30-371 | + | CGACUUUCCUCCGGGGGACA | 20 | 4792 |
| HSV1-UL30-372 | + | GGGACAGCGGGCCGCCGCCA | 20 | 4793 |
| HSV1-UL30-118 | + | GGACAGCGGGCCGCCGCCAC | 20 | 3294 |
| HSV1-UL30-374 | + | GCGUGCUCCACGUUCUC | 17 | 4794 |
| HSV1-UL30-375 | + | UCCAGGAUGUCGUACAC | 17 | 4795 |
| HSV1-UL30-376 | + | CGUGAAAGACGGUGACG | 17 | 4796 |
| HSV1-UL30-177 | + | GUGAAAGACGGUGACGG | 17 | 3327 |
| HSV1-UL30-378 | + | AGACGGUGACGGUGGGG | 17 | 4797 |
| HSV1-UL30-379 | + | GGUGGGGUUGAACCCCG | 17 | 4798 |
| HSV1-UL30-180 | + | GUGGGGUUGAACCCCGC | 17 | 3329 |
| HSV1-UL30-381 | + | CACGCCGCCCCACAGGC | 17 | 4799 |
| HSV1-UL30-382 | + | GGCGCGAGCGCCGCGGC | 17 | 4800 |
| HSV1-UL30-383 | + | AAGCCGCCCGACCCGAC | 17 | 4801 |
| HSV1-UL30-186 | + | AGCCGCCCGACCCGACG | 17 | 3207 |
| HSV1-UL30-385 | + | CCGCCCGACCCGACGCG | 17 | 4802 |
| HSV1-UL30-386 | + | CCCCCCCGCAGUACACC | 17 | 4803 |
| HSV1-UL30-188 | + | CCCCCCGCAGUACACCU | 17 | 3209 |
| HSV1-UL30-189 | + | CCCCCGCAGUACACCUU | 17 | 3210 |
| HSV1-UL30-389 | + | ACACCUUGGGGGCGCGC | 17 | 4804 |
| HSV1-UL30-390 | + | CACCCCGGCGCGCUUCU | 17 | 4805 |
| HSV1-UL30-194 | + | ACCCCGGCGCGCUUCUC | 17 | 3335 |
| HSV1-UL30-195 | + | CCCCGGCGCGCUUCUCC | 17 | 3336 |
| HSV1-UL30-196 | + | CCCGGCGCGCUUCUCCG | 17 | 3213 |
| HSV1-UL30-197 | + | CCGGCGCGCUUCUCCGG | 17 | 3214 |
| HSV1-UL30-395 | + | AUCCUCGUCCAGCACCC | 17 | 4806 |
| HSV1-UL30-200 | + | UCCUCGUCCAGCACCCG | 17 | 3337 |
| HSV1-UL30-397 | + | CCAGCACCCGCGGGGCG | 17 | 4807 |
| HSV1-UL30-398 | + | ACCCGCGGGGCGAUGAA | 17 | 4808 |
| HSV1-UL30-399 | + | CUAUAGUACGUAUGGCG | 17 | 4809 |
| HSV1-UL30-400 | + | CUUCUGUUGCGUCCCGA | 17 | 4810 |
| HSV1-UL30-209 | + | UUCUGUUGCGUCCCGAC | 17 | 3222 |
| HSV1-UL30-402 | + | GUUGCGUCCCGACUGGG | 17 | 4811 |
| HSV1-UL30-403 | + | UCCCGACUGGGGCGAGG | 17 | 4812 |
| HSV1-UL30-213 | + | CCCGACUGGGGCGAGGU | 17 | 3341 |
| HSV1-UL30-405 | + | GUUUUGCCUCAAACAAG | 17 | 4813 |
| HSV1-UL30-217 | + | UUUUGCCUCAAACAAGG | 17 | 3344 |
| HSV1-UL30-218 | + | UUUGCCUCAAACAAGGC | 17 | 3345 |
| HSV1-UL30-408 | + | GGUCCCCGGCUGGCUCC | 17 | 4814 |
| HSV1-UL30-409 | + | UCCCCGGCUGGCUCCGC | 17 | 4815 |
| HSV1-UL30-410 | + | UGGCUCCGCGAGGGCCG | 17 | 4816 |
| HSV1-UL30-411 | + | CGGCGGGCGCAAAAAAC | 17 | 4817 |
| HSV1-UL30-412 | + | UGGCCGCCGACUUUCCU | 17 | 4818 |
| HSV1-UL30-230 | + | GGCCGCCGACUUUCCUC | 17 | 3228 |
| HSV1-UL30-231 | + | GCCGCCGACUUUCCUCC | 17 | 3229 |
| HSV1-UL30-232 | + | CCGCCGACUUUCCUCCG | 17 | 3230 |
| HSV1-UL30-416 | + | CUUUCCUCCGGGGGACA | 17 | 4819 |
| HSV1-UL30-417 | + | ACAGCGGGCCGCCGCCA | 17 | 4820 |
| HSV1-UL30-236 | + | CAGCGGGCCGCCGCCAC | 17 | 3358 |

[0719] Table 2E provides exemplary targeting domains for knocking out the UL30 gene selected according to the second tier parameters. The targeting domains are selected based on location within the coding sequence (but downstream of the first 500 bp) of the UL30 gene. It is contemplated herein that the targeting domain hybridizes to the target domain through complementary base pairing. Any of the targeting domains in the table can be used with a S. aureus Cas9 molecule that gives double stranded cleavage. Any of the targeting domains in the table can be used with a S. aureus Cas9 single-stranded break nucleases (nickases). In an embodiment, dual targeting is used to create two nicks on opposite DNA strands by using S. aureus Cas9 nickases with two targeting domains that are complementary to opposite DNA strands, e.g., a gRNA comprising any minus strand targeting domain may be paired any gRNA comprising a plus strand targeting domain provided that the two gRNAs are oriented on the DNA such that PAMs face outward and the distance between the 5′ ends of the gRNAs is 0-50 bp.

TABLE 2E

| 2nd Tier | DNA | | Target Site | |
|---|---|---|---|---|
| gRNA Name | Strand | Targeting Domain | Length | Seq ID |
| HSV1-UL30-1771 | − | UUAUGGACGCCAUCACACCG | 20 | 4821 |
| HSV1-UL30-1772 | − | UAUGGACGCCAUCACACCGA | 20 | 4822 |
| HSV1-UL30-1773 | − | AUGGACGCCAUCACACCGAC | 20 | 4823 |
| HSV1-UL30-1774 | − | CGGGGACCGUCAUCACGCUC | 20 | 4824 |
| HSV1-UL30-1775 | − | UCACGCUCCUGGGCCUGACU | 20 | 4825 |
| HSV1-UL30-1776 | − | CACGCUCCUGGGCCUGACUC | 20 | 4826 |
| HSV1-UL30-1777 | − | GGCCUGACUCCGGAAGGCCA | 20 | 4827 |
| HSV1-UL30-1778 | − | GCACGCGGCAGUACUUUUAC | 20 | 4828 |
| HSV1-UL30-1779 | − | GGCAGUACUUUUACAUGAAC | 20 | 4829 |
| HSV1-UL30-1780 | − | GCAGUACUUUUACAUGAACA | 20 | 4830 |
| HSV1-UL30-1781 | − | AGUACUUUUACAUGAACAAG | 20 | 4831 |
| HSV1-UL30-1782 | − | GUACUUUUACAUGAACAAGG | 20 | 4832 |
| HSV1-UL30-1783 | − | CACCUACAAUGCCGCGCCCC | 20 | 4833 |
| HSV1-UL30-1784 | − | CCGCGCCCCACGAGAUCUCU | 20 | 4834 |
| HSV1-UL30-1785 | − | GCGCAUGGCCGCGGCCCUGC | 20 | 4835 |
| HSV1-UL30-1786 | − | CCGCGGCCCUGCGCGAGUCC | 20 | 4836 |
| HSV1-UL30-1787 | − | CGUCGUUCCGCGGCAUCUCC | 20 | 4837 |
| HSV1-UL30-1788 | − | CGGCAUCUCCGCGGACCACU | 20 | 4838 |
| HSV1-UL30-1789 | − | UCUCCGCGGACCACUUCGAG | 20 | 4839 |
| HSV1-UL30-1790 | − | CUCCGCGGACCACUUCGAGG | 20 | 4840 |
| HSV1-UL30-1791 | − | ACCACUUCGAGGCGGAGGUG | 20 | 4841 |
| HSV1-UL30-1792 | − | CCACUUCGAGGCGGAGGUGG | 20 | 4842 |
| HSV1-UL30-1793 | − | GCGCACCGACGUGUACUACU | 20 | 4843 |
| HSV1-UL30-1794 | − | CUGUUUUACCGCGUCUACGU | 20 | 4844 |
| HSV1-UL30-1795 | − | UUACCGCGUCUACGUCCGAA | 20 | 4845 |
| HSV1-UL30-1796 | − | ACAACUUCUGCCCGGCCAUC | 20 | 4846 |
| HSV1-UL30-1797 | − | CUGCCCGGCCAUCAAGAAGU | 20 | 4847 |
| HSV1-UL30-1798 | − | GCCCGGCCAUCAAGAAGUAC | 20 | 4848 |
| HSV1-UL30-1799 | − | GGCCAUCAAGAAGUACGAGG | 20 | 4849 |
| HSV1-UL30-1800 | − | GCCAUCAAGAAGUACGAGGG | 20 | 4850 |
| HSV1-UL30-1801 | − | ACGCCACCACCCGGUUCAUC | 20 | 4851 |
| HSV1-UL30-1802 | − | CCGGUUCAUCCUGGACAACC | 20 | 4852 |
| HSV1-UL30-1803 | − | UCGGCUGGUACCGUCUCAAA | 20 | 4853 |
| HSV1-UL30-1804 | − | UGGUACCGUCUCAAACCGGG | 20 | 4854 |
| HSV1-UL30-1805 | − | GGUACCGUCUCAAACCGGGC | 20 | 4855 |
| HSV1-UL30-1806 | − | GCCGGCGGCCCCGAUGGCCU | 20 | 4856 |
| HSV1-UL30-1807 | − | CCGGCGGCCCCGAUGGCCUU | 20 | 4857 |
| HSV1-UL30-1808 | − | CUUCGGGACAUCCAGCGACG | 20 | 4858 |
| HSV1-UL30-1809 | − | ACGUCGAGUUUAACUGUACG | 20 | 4859 |
| HSV1-UL30-1810 | − | UACGGCGGACAACCUGGCCA | 20 | 4860 |
| HSV1-UL30-1811 | − | CGGCGGACAACCUGGCCAUC | 20 | 4861 |
| HSV1-UL30-1812 | − | GGCGGACAACCUGGCCAUCG | 20 | 4862 |
| HSV1-UL30-1813 | − | GCGGACAACCUGGCCAUCGA | 20 | 4863 |
| HSV1-UL30-1814 | − | CGGACAACCUGGCCAUCGAG | 20 | 4864 |
| HSV1-UL30-1815 | − | ACCUGGCCAUCGAGGGGGGC | 20 | 4865 |
| HSV1-UL30-1816 | − | CAAGCUCAUGUGCUUCGAUA | 20 | 4866 |
| HSV1-UL30-1817 | − | GCUUCGAUAUCGAAUGCAAG | 20 | 4867 |
| HSV1-UL30-1818 | − | CUUCGAUAUCGAAUGCAAGG | 20 | 4868 |
| HSV1-UL30-1819 | − | UUCGAUAUCGAAUGCAAGGC | 20 | 4869 |
| HSV1-UL30-1820 | − | UCGAUAUCGAAUGCAAGGCG | 20 | 4870 |
| HSV1-UL30-1821 | − | CGAUAUCGAAUGCAAGGCGG | 20 | 4871 |
| HSV1-UL30-1822 | − | GAUAUCGAAUGCAAGGCGGG | 20 | 4872 |
| HSV1-UL30-1823 | − | AUAUCGAAUGCAAGGCGGGG | 20 | 4873 |
| HSV1-UL30-1824 | − | UAUCGAAUGCAAGGCGGGGG | 20 | 4874 |
| HSV1-UL30-1825 | − | UCGAAUGCAAGGCGGGGGGG | 20 | 4875 |
| HSV1-UL30-1826 | − | AUGCAAGGCGGGGGGGGAGG | 20 | 4876 |
| HSV1-UL30-1827 | − | CGAGCUGGCCUUUCCGGUGG | 20 | 4877 |
| HSV1-UL30-1828 | − | CCUUUCCGGUGGCCGGGCAC | 20 | 4878 |
| HSV1-UL30-1829 | − | CUUUCCGGUGGCCGGGCACC | 20 | 4879 |
| HSV1-UL30-1830 | − | UUCCGGUGGCCGGGCACCCG | 20 | 4880 |
| HSV1-UL30-1831 | − | ACGACCUGUCCACCACCGCC | 20 | 4881 |
| HSV1-UL30-1832 | − | CGACCUGUCCACCACCGCCC | 20 | 4882 |
| HSV1-UL30-1833 | − | GCUCGGUUCCUGCGACCUCC | 20 | 4883 |
| HSV1-UL30-1834 | − | GCGACCUCCCCGAAUCCCAC | 20 | 4884 |
| HSV1-UL30-1835 | − | CCUCCCCGAAUCCCACCUGA | 20 | 4885 |
| HSV1-UL30-1836 | − | CACCUGAACGAGCUGGCGGC | 20 | 4886 |
| HSV1-UL30-1837 | − | ACCUGAACGAGCUGGCGGCC | 20 | 4887 |
| HSV1-UL30-1838 | − | GCCUGCCCACGCCCGUGGUU | 20 | 4888 |
| HSV1-UL30-1839 | − | CCUGCCCACGCCCGUGGUUC | 20 | 4889 |
| HSV1-UL30-1840 | − | CGUGGUUCUGGAAUUCGACA | 20 | 4890 |
| HSV1-UL30-1841 | − | UCUGGAAUUCGACAGCGAAU | 20 | 4891 |
| HSV1-UL30-1842 | − | UGUUGGCCUUCAUGACCCUU | 20 | 4892 |
| HSV1-UL30-1843 | − | CCUUGUGAAACAGUACGGCC | 20 | 4893 |
| HSV1-UL30-1844 | − | GUACGGCCCCGAGUUCGUGA | 20 | 4894 |
| HSV1-UL30-1845 | − | CCUUCUUGCUGGCCAAGCUG | 20 | 4895 |
| HSV1-UL30-1846 | − | CGGACAUUUACAAGGUCCCC | 20 | 4896 |
| HSV1-UL30-1847 | − | CAUUUACAAGGUCCCCCUGG | 20 | 4897 |
| HSV1-UL30-1848 | − | CCCUGGACGGGUACGGCCGC | 20 | 4898 |
| HSV1-UL30-1849 | − | GGGUACGGCCGCAUGAACGG | 20 | 4899 |
| HSV1-UL30-1850 | − | GGUACGGCCGCAUGAACGGC | 20 | 4900 |
| HSV1-UL30-1851 | − | GGCCGGGGCGUGUUUCGCGU | 20 | 4901 |
| HSV1-UL30-1852 | − | GCCGGGGCGUGUUUCGCGUG | 20 | 4902 |
| HSV1-UL30-1853 | − | UUCGCGUGUGGGACAUAGGC | 20 | 4903 |
| HSV1-UL30-1854 | − | ACAUAGGCCAGAGCCACUUC | 20 | 4904 |
| HSV1-UL30-1855 | − | AGAAGCGCAGCAAGAUAAAG | 20 | 4905 |
| HSV1-UL30-1856 | − | AGAUAAAGGUGAACGGCAUG | 20 | 4906 |
| HSV1-UL30-1857 | − | CAUGGUGAACAUCGACAUGU | 20 | 4907 |
| HSV1-UL30-1858 | − | AUGGUGAACAUCGACAUGUA | 20 | 4908 |
| HSV1-UL30-1859 | − | UAACCGACAAGAUCAAGCUC | 20 | 4909 |
| HSV1-UL30-1860 | − | CUACAAGCUCAACGCCGUGG | 20 | 4910 |
| HSV1-UL30-1861 | − | ACGCCGUGGCCGAAGCCGUC | 20 | 4911 |
| HSV1-UL30-1862 | − | CCGUGGCCGAAGCCGUCCUG | 20 | 4912 |
| HSV1-UL30-1863 | − | CCGAAGCCGUCCUGAAGGAC | 20 | 4913 |
| HSV1-UL30-1864 | − | AAGCCGUCCUGAAGGACAAG | 20 | 4914 |
| HSV1-UL30-1865 | − | CCGUCCUGAAGGACAAGAAG | 20 | 4915 |
| HSV1-UL30-1866 | − | UGAAGGACAAGAAGAAGGAC | 20 | 4916 |
| HSV1-UL30-1867 | − | CAUCCCCGCCUACUACGCCG | 20 | 4917 |
| HSV1-UL30-1868 | − | CGCCGCCGGGCCCGCGCAAC | 20 | 4918 |
| HSV1-UL30-534 | − | GCCGCCGGGCCCGCGCAACG | 20 | 3472 |
| HSV1-UL30-1870 | − | CGCGCAACGCGGGGUGAUCG | 20 | 4919 |
| HSV1-UL30-1871 | − | UGAUCGGCGAGUACUGCAUA | 20 | 4920 |
| HSV1-UL30-1872 | − | GCAUACAGGAUUCCCUGCUG | 20 | 4921 |
| HSV1-UL30-1873 | − | UUUUUAAGUUUUUGCCCCAU | 20 | 4922 |
| HSV1-UL30-1874 | − | UUUUAAGUUUUUGCCCCAUC | 20 | 4923 |
| HSV1-UL30-1875 | − | UCUCGGCCGUCGCGCGCUUG | 20 | 4924 |
| HSV1-UL30-1876 | − | GCCUGCUGCGCCUGGCCGAC | 20 | 4925 |
| HSV1-UL30-1877 | − | UGCUGCGCCUGGCCGACCAG | 20 | 4926 |
| HSV1-UL30-1878 | − | ACCAGAAGGGCUUUAUUCUG | 20 | 4927 |
| HSV1-UL30-1879 | − | GCUUUAUUCUGCCGGACACC | 20 | 4928 |
| HSV1-UL30-1880 | − | CUUUAUUCUGCCGGACACCC | 20 | 4929 |
| HSV1-UL30-1881 | − | CCGGACACCCAGGGGCGAUU | 20 | 4930 |
| HSV1-UL30-1882 | − | CGGACACCCAGGGGCGAUUU | 20 | 4931 |
| HSV1-UL30-1883 | − | CCAGGGGCGAUUUAGGGGCG | 20 | 4932 |
| HSV1-UL30-1884 | − | CAGGGGCGAUUUAGGGGCGC | 20 | 4933 |
| HSV1-UL30-1885 | − | AGGGGCGAUUUAGGGGCGCC | 20 | 4934 |
| HSV1-UL30-1886 | − | GGGGCGAUUUAGGGGCGCCG | 20 | 4935 |
| HSV1-UL30-1887 | − | GGGCGAUUUAGGGGCGCCGG | 20 | 4936 |
| HSV1-UL30-1888 | − | GGCGAUUUAGGGGCGCCGGG | 20 | 4937 |
| HSV1-UL30-1889 | − | GCGAUUUAGGGGCGCCGGGG | 20 | 4938 |
| HSV1-UL30-1890 | − | CCCAAGCGUCCGGCCGCAGC | 20 | 4939 |
| HSV1-UL30-1891 | − | CCAAGCGUCCGGCCGCAGCC | 20 | 4940 |
| HSV1-UL30-1892 | − | CAAGCGUCCGGCCGCAGCCC | 20 | 4941 |
| HSV1-UL30-1893 | − | AGCGUCCGGCCGCAGCCCGG | 20 | 4942 |
| HSV1-UL30-1894 | − | UCCGGCCGCAGCCCGGGAGG | 20 | 4943 |
| HSV1-UL30-1895 | − | CGGCCGCAGCCCGGGAGGAC | 20 | 4944 |
| HSV1-UL30-569 | − | GGCCGCAGCCCGGGAGGACG | 20 | 3507 |
| HSV1-UL30-1897 | − | CCGGGAGGACGAGGAGCGGC | 20 | 4945 |
| HSV1-UL30-1898 | − | GGGAGGACGAGGAGCGGCCA | 20 | 4946 |
| HSV1-UL30-571 | − | GGAGGACGAGGAGCGGCCAG | 20 | 3509 |
| HSV1-UL30-1900 | − | AGGACGAGGAGCGGCCAGAG | 20 | 4947 |
| HSV1-UL30-572 | − | GGACGAGGAGCGGCCAGAGG | 20 | 3510 |
| HSV1-UL30-1902 | − | ACGAGGAGCGGCCAGAGGAG | 20 | 4948 |
| HSV1-UL30-573 | − | CGAGGAGCGGCCAGAGGAGG | 20 | 3511 |
| HSV1-UL30-574 | − | GAGGAGCGGCCAGAGGAGGA | 20 | 3512 |
| HSV1-UL30-575 | − | AGGAGCGGCCAGAGGAGGAG | 20 | 3513 |
| HSV1-UL30-576 | − | GGAGCGGCCAGAGGAGGAGG | 20 | 3514 |
| HSV1-UL30-1907 | − | AGCGGCCAGAGGAGGAGGGG | 20 | 4949 |
| HSV1-UL30-1908 | − | GCCAGAGGAGGAGGGGGAGG | 20 | 4950 |
| HSV1-UL30-1909 | − | CAGAGGAGGAGGGGGAGGAC | 20 | 4951 |
| HSV1-UL30-1910 | − | GGAGGAGGGGGAGGACGAGG | 20 | 4952 |
| HSV1-UL30-1911 | − | GGGGGAGGACGAGGACGAAC | 20 | 4953 |
| HSV1-UL30-1912 | − | GGGAGGACGAGGACGAACGC | 20 | 4954 |
| HSV1-UL30-579 | − | GGAGGACGAGGACGAACGCG | 20 | 3517 |
| HSV1-UL30-1914 | − | AGGACGAGGACGAACGCGAG | 20 | 4955 |
| HSV1-UL30-1915 | − | CGAGGACGAACGCGAGGAGG | 20 | 4956 |
| HSV1-UL30-582 | − | GAGGACGAACGCGAGGAGGG | 20 | 3520 |
| HSV1-UL30-583 | − | AGGACGAACGCGAGGAGGGC | 20 | 3521 |
| HSV1-UL30-1918 | − | CGAACGCGAGGAGGGCGGGG | 20 | 4957 |
| HSV1-UL30-1919 | − | CGCGAGGAGGGCGGGGGCGA | 20 | 4958 |
| HSV1-UL30-586 | − | GCGAGGAGGGCGGGGGCGAG | 20 | 3524 |
| HSV1-UL30-587 | − | CGAGGAGGGCGGGGGCGAGC | 20 | 3525 |
| HSV1-UL30-1922 | − | AGGGCGGGGGCGAGCGGGAG | 20 | 4959 |
| HSV1-UL30-588 | − | GGGCGGGGGCGAGCGGGAGC | 20 | 3526 |
| HSV1-UL30-1924 | − | GCGGGGGCGAGCGGGAGCCG | 20 | 4960 |
| HSV1-UL30-1925 | − | GAGCGGGAGCCGGAGGGCGC | 20 | 4961 |
| HSV1-UL30-591 | − | AGCGGGAGCCGGAGGGCGCG | 20 | 3529 |
| HSV1-UL30-592 | − | GCGGGAGCCGGAGGGCGCGC | 20 | 3530 |
| HSV1-UL30-1928 | − | GGGAGACCGCCGGCAGGCAC | 20 | 4962 |
| HSV1-UL30-595 | − | GGAGACCGCCGGCAGGCACG | 20 | 3533 |
| HSV1-UL30-1930 | − | CCGGCAGGCACGUGGGGUAC | 20 | 4963 |
| HSV1-UL30-1931 | − | CGGCAGGCACGUGGGGUACC | 20 | 4964 |
| HSV1-UL30-1932 | − | GGCAGGCACGUGGGGUACCA | 20 | 4965 |
| HSV1-UL30-1933 | − | CACGUGGGGUACCAGGGGGC | 20 | 4966 |
| HSV1-UL30-1934 | − | CAGGGUCCUUGACCCCACUU | 20 | 4967 |
| HSV1-UL30-1935 | − | ACCCCACUUCCGGGUUUCAC | 20 | 4968 |
| HSV1-UL30-1936 | − | UGUGCUUCAGCACGCUCUCC | 20 | 4969 |
| HSV1-UL30-1937 | − | UGCUUCAGCACGCUCUCCCU | 20 | 4970 |
| HSV1-UL30-1938 | − | GGGCCGACGCAGUGGCGCAC | 20 | 4971 |
| HSV1-UL30-1939 | − | GGCCGACGCAGUGGCGCACC | 20 | 4972 |
| HSV1-UL30-1940 | − | ACGCAGUGGCGCACCUGGAG | 20 | 4973 |
| HSV1-UL30-1941 | − | UGGCGCACCUGGAGGCGGGC | 20 | 4974 |
| HSV1-UL30-1942 | − | UGGAGGCGGGCAAGGACUAC | 20 | 4975 |
| HSV1-UL30-1943 | − | GGAGGCGGGCAAGGACUACC | 20 | 4976 |
| HSV1-UL30-1944 | − | GGGCAAGGACUACCUGGAGA | 20 | 4977 |
| HSV1-UL30-1945 | − | AGGACUACCUGGAGAUCGAG | 20 | 4978 |
| HSV1-UL30-1946 | − | GGACUACCUGGAGAUCGAGG | 20 | 4979 |
| HSV1-UL30-1947 | − | GACUACCUGGAGAUCGAGGU | 20 | 4980 |
| HSV1-UL30-1948 | − | ACUACCUGGAGAUCGAGGUG | 20 | 4981 |
| HSV1-UL30-1949 | − | CUACCUGGAGAUCGAGGUGG | 20 | 4982 |
| HSV1-UL30-1950 | − | UUCUUCGUCAAGGCUCACGU | 20 | 4983 |
| HSV1-UL30-1951 | − | CUUCGUCAAGGCUCACGUGC | 20 | 4984 |
| HSV1-UL30-1952 | − | UCGUCAAGGCUCACGUGCGA | 20 | 4985 |
| HSV1-UL30-1953 | − | AGCCUCCUCAGCAUCCUCCU | 20 | 4986 |
| HSV1-UL30-1954 | − | GCCUCCUCAGCAUCCUCCUG | 20 | 4987 |
| HSV1-UL30-1955 | − | CUGCGGGACUGGCUCGCCAU | 20 | 4988 |
| HSV1-UL30-1956 | − | AUGCGAAAGCAGAUCCGCUC | 20 | 4989 |
| HSV1-UL30-1957 | − | AGAUCCGCUCGCGGAUUCCC | 20 | 4990 |
| HSV1-UL30-1958 | − | GCGGAUUCCCCAGAGCAGCC | 20 | 4991 |
| HSV1-UL30-1959 | − | GGAUUCCCCAGAGCAGCCCC | 20 | 4992 |
| HSV1-UL30-1960 | − | GAUUCCCCAGAGCAGCCCCG | 20 | 4993 |
| HSV1-UL30-1961 | − | GCCCCGAGGAGGCCGUGCUC | 20 | 4994 |
| HSV1-UL30-1962 | − | GGUCGUGUGUAACUCGGUGU | 20 | 4995 |
| HSV1-UL30-1963 | − | GUAACUCGGUGUACGGGUUC | 20 | 4996 |
| HSV1-UL30-1964 | − | UAACUCGGUGUACGGGUUCA | 20 | 4997 |
| HSV1-UL30-1965 | − | AACUCGGUGUACGGGUUCAC | 20 | 4998 |
| HSV1-UL30-1966 | − | CGGGUUCACGGGAGUGCAGC | 20 | 4999 |
| HSV1-UL30-1967 | − | GACGGUGACGACCAUCGGCC | 20 | 5000 |
| HSV1-UL30-1968 | − | CGAGAUGCUGCUCGCGACCC | 20 | 5001 |
| HSV1-UL30-1969 | − | CGCGAGUACGUCCACGCGCG | 20 | 5002 |
| HSV1-UL30-1970 | − | CCACGCGCGCUGGGCGGCCU | 20 | 5003 |
| HSV1-UL30-1971 | − | AACAGCUCCUGGCCGAUUUC | 20 | 5004 |
| HSV1-UL30-1972 | − | ACAGCUCCUGGCCGAUUUCC | 20 | 5005 |
| HSV1-UL30-1973 | − | GGCGGCCGACAUGCGCGCCC | 20 | 5006 |
| HSV1-UL30-1974 | − | CUAUUCCAUGCGCAUCAUCU | 20 | 5007 |
| HSV1-UL30-1975 | − | UAUUCCAUGCGCAUCAUCUA | 20 | 5008 |
| HSV1-UL30-1976 | − | AUUCCAUGCGCAUCAUCUAC | 20 | 5009 |
| HSV1-UL30-1977 | − | UGCGCAUCAUCUACGGGGAC | 20 | 5010 |
| HSV1-UL30-1978 | − | GUGCCGCGGCCUCACGGCCG | 20 | 5011 |
| HSV1-UL30-1979 | − | CGGCCGCCGGGCUGACGGCC | 20 | 5012 |
| HSV1-UL30-1980 | − | CGGCCGUGGGCGACAAGAUG | 20 | 5013 |
| HSV1-UL30-1981 | − | GUUUCUGCCCCCCAUCAAAC | 20 | 5014 |
| HSV1-UL30-1982 | − | GCCCCCCAUCAAACUCGAGU | 20 | 5015 |
| HSV1-UL30-1983 | − | CCAAGCUGCUGCUGAUCGCC | 20 | 5016 |
| HSV1-UL30-1984 | − | AAAGUACAUCGGCGUCAUCU | 20 | 5017 |
| HSV1-UL30-1985 | − | AAGUACAUCGGCGUCAUCUA | 20 | 5018 |
| HSV1-UL30-1986 | − | AGUACAUCGGCGUCAUCUAC | 20 | 5019 |
| HSV1-UL30-1987 | − | ACGGGGGUAAGAUGCUCAUC | 20 | 5020 |
| HSV1-UL30-1988 | − | GUAAGAUGCUCAUCAAGGGC | 20 | 5021 |
| HSV1-UL30-1989 | − | GCGUUUAUCAACCGCACCUC | 20 | 5022 |
| HSV1-UL30-1990 | − | GUUUUACGACGAUACCGUCU | 20 | 5023 |
| HSV1-UL30-1991 | − | UUUUACGACGAUACCGUCUC | 20 | 5024 |
| HSV1-UL30-1992 | − | CGGAGCGGCCGCCGCGUUAG | 20 | 5025 |
| HSV1-UL30-1993 | − | CCGCGUUAGCCGAGCGCCCC | 20 | 5026 |
| HSV1-UL30-1994 | − | CGCGUUAGCCGAGCGCCCCG | 20 | 5027 |
| HSV1-UL30-1995 | − | CGUUAGCCGAGCGCCCCGCG | 20 | 5028 |
| HSV1-UL30-1996 | − | GUUAGCCGAGCGCCCCGCGG | 20 | 5029 |
| HSV1-UL30-1997 | − | GUGGCUGGCGCGACCCCUGC | 20 | 5030 |
| HSV1-UL30-1998 | − | GGCUGGCGCGACCCCUGCCC | 20 | 5031 |
| HSV1-UL30-1999 | − | GCUGGCGCGACCCCUGCCCG | 20 | 5032 |
| HSV1-UL30-2000 | − | GCCCGAGGGACUGCAGGCGU | 20 | 5033 |
| HSV1-UL30-2001 | − | CCCGAGGGACUGCAGGCGUU | 20 | 5034 |
| HSV1-UL30-2002 | − | CCCAUCGGCGCAUCACCGAC | 20 | 5035 |
| HSV1-UL30-2003 | − | CCAUCGGCGCAUCACCGACC | 20 | 5036 |
| HSV1-UL30-2004 | − | AUCGGCGCAUCACCGACCCG | 20 | 5037 |
| HSV1-UL30-2005 | − | CGGCGCAUCACCGACCCGGA | 20 | 5038 |
| HSV1-UL30-2006 | − | GGCGCAUCACCGACCCGGAG | 20 | 5039 |
| HSV1-UL30-2007 | − | CCGACCCGGAGAGGGACAUC | 20 | 5040 |
| HSV1-UL30-2008 | − | CCAGGACUUUGUCCUCACCG | 20 | 5041 |
| HSV1-UL30-2009 | − | ACUUUGUCCUCACCGCCGAA | 20 | 5042 |
| HSV1-UL30-2010 | − | GCGCGCAGGUCCCGUCCAUC | 20 | 5043 |
| HSV1-UL30-2011 | − | CAGGUCCCGUCCAUCAAGGA | 20 | 5044 |
| HSV1-UL30-2012 | − | CGUGAUCGUGGCCCAGACCC | 20 | 5045 |
| HSV1-UL30-2013 | − | CGUGGCCCAGACCCGCGAGG | 20 | 5046 |
| HSV1-UL30-2014 | − | UGGCCCAGACCCGCGAGGUA | 20 | 5047 |
| HSV1-UL30-2015 | − | GGCCCAGACCCGCGAGGUAG | 20 | 5048 |
| HSV1-UL30-2016 | − | CGCGCGGCUGGCCGCCCUCC | 20 | 5049 |
| HSV1-UL30-2017 | − | CGAGCUAGACGCCGCCGCCC | 20 | 5050 |
| HSV1-UL30-2018 | − | GAGCUAGACGCCGCCGCCCC | 20 | 5051 |
| HSV1-UL30-2019 | − | AGCUAGACGCCGCCGCCCCA | 20 | 5052 |
| HSV1-UL30-2020 | − | AGACGCCGCCGCCCCAGGGG | 20 | 5053 |
| HSV1-UL30-2021 | − | CCCUCCCCGGCCAAGCGCCC | 20 | 5054 |
| HSV1-UL30-2022 | − | CCUCCCCGGCCAAGCGCCCC | 20 | 5055 |
| HSV1-UL30-2023 | − | CUCCCCGGCCAAGCGCCCCC | 20 | 5056 |
| HSV1-UL30-2024 | − | CGCCGUCGCCUGCCGACCCC | 20 | 5057 |
| HSV1-UL30-2025 | − | GCCGUCGCCUGCCGACCCCC | 20 | 5058 |
| HSV1-UL30-2026 | − | CCGUCGCCUGCCGACCCCCC | 20 | 5059 |
| HSV1-UL30-2027 | − | GCCCCGCAAGCUGCUGGUGU | 20 | 5060 |
| HSV1-UL30-2028 | − | GCUGCUGGUGUCCGAGCUGG | 20 | 5061 |
| HSV1-UL30-2029 | − | UGCUGGUGUCCGAGCUGGCC | 20 | 5062 |
| HSV1-UL30-2030 | − | CCAUUGCCCACGGCGUCGCC | 20 | 5063 |
| HSV1-UL30-2031 | − | CCCACGGCGUCGCCCUGAAC | 20 | 5064 |
| HSV1-UL30-2032 | − | ACUAUUACUUCUCCCACCUG | 20 | 5065 |
| HSV1-UL30-2033 | − | CUAUUACUUCUCCCACCUGU | 20 | 5066 |
| HSV1-UL30-2034 | − | UAUUACUUCUCCCACCUGUU | 20 | 5067 |
| HSV1-UL30-2035 | − | CGUGACAUUCAAGGCCCUGU | 20 | 5068 |
| HSV1-UL30-2036 | − | GUGACAUUCAAGGCCCUGUU | 20 | 5069 |
| HSV1-UL30-2037 | − | UGACAUUCAAGGCCCUGUUU | 20 | 5070 |
| HSV1-UL30-2038 | − | UGGGAAUAACGCCAAGAUCA | 20 | 5071 |
| HSV1-UL30-2039 | − | GGAAUAACGCCAAGAUCACC | 20 | 5072 |
| HSV1-UL30-2040 | − | UCUGUUAAAAAGGUUUAUUC | 20 | 5073 |
| HSV1-UL30-2041 | − | UUCCCGAAGUGUGGCACCCC | 20 | 5074 |
| HSV1-UL30-2042 | − | GACGACGUGGCCGCGCGGCU | 20 | 5075 |
| HSV1-UL30-2043 | − | GGCCGCGCGGCUCCGGACCG | 20 | 5076 |
| HSV1-UL30-2044 | − | GCGGCUCCGGACCGCAGGGU | 20 | 5077 |
| HSV1-UL30-2045 | − | CGGCUCCGGACCGCAGGGUU | 20 | 5078 |
| HSV1-UL30-2046 | − | GGACCGCAGGGUUCGGGGCG | 20 | 5079 |
| HSV1-UL30-2047 | − | CGGUGGGUGCCGGCGCUACG | 20 | 5080 |
| HSV1-UL30-2048 | − | GGUGGGUGCCGGCGCUACGG | 20 | 5081 |
| HSV1-UL30-2049 | − | UGGGUGCCGGCGCUACGGCG | 20 | 5082 |
| HSV1-UL30-2050 | − | GGGUGCCGGCGCUACGGCGG | 20 | 5083 |
| HSV1-UL30-2051 | − | GCUACGGCGGAGGAAACUCG | 20 | 5084 |
| HSV1-UL30-2052 | − | GAAACUCGUCGAAUGUUGCA | 20 | 5085 |
| HSV1-UL30-2053 | − | UGGACGCCAUCACACCG | 17 | 5086 |
| HSV1-UL30-2054 | − | GGACGCCAUCACACCGA | 17 | 5087 |
| HSV1-UL30-2055 | − | GACGCCAUCACACCGAC | 17 | 5088 |
| HSV1-UL30-2056 | − | GGACCGUCAUCACGCUC | 17 | 5089 |
| HSV1-UL30-2057 | − | CGCUCCUGGGCCUGACU | 17 | 5090 |
| HSV1-UL30-2058 | − | GCUCCUGGGCCUGACUC | 17 | 5091 |
| HSV1-UL30-2059 | − | CUGACUCCGGAAGGCCA | 17 | 5092 |
| HSV1-UL30-2060 | − | CGCGGCAGUACUUUUAC | 17 | 5093 |
| HSV1-UL30-2061 | − | AGUACUUUUACAUGAAC | 17 | 5094 |
| HSV1-UL30-2062 | − | GUACUUUUACAUGAACA | 17 | 5095 |
| HSV1-UL30-2063 | − | ACUUUUACAUGAACAAG | 17 | 5096 |
| HSV1-UL30-2064 | − | CUUUUACAUGAACAAGG | 17 | 5097 |
| HSV1-UL30-2065 | − | CUACAAUGCCGCGCCCC | 17 | 5098 |
| HSV1-UL30-2066 | − | CGCCCCACGAGAUCUCU | 17 | 5099 |
| HSV1-UL30-2067 | − | CAUGGCCGCGGCCCUGC | 17 | 5100 |
| HSV1-UL30-2068 | − | CGGCCCUGCGCGAGUCC | 17 | 5101 |
| HSV1-UL30-2069 | − | CGUUCCGCGGCAUCUCC | 17 | 5102 |
| HSV1-UL30-2070 | − | CAUCUCCGCGGACCACU | 17 | 5103 |
| HSV1-UL30-2071 | − | CCGCGGACCACUUCGAG | 17 | 5104 |
| HSV1-UL30-2072 | − | CGCGGACCACUUCGAGG | 17 | 5105 |
| HSV1-UL30-2073 | − | ACUUCGAGGCGGAGGUG | 17 | 5106 |
| HSV1-UL30-2074 | − | CUUCGAGGCGGAGGUGG | 17 | 5107 |
| HSV1-UL30-2075 | − | CACCGACGUGUACUACU | 17 | 5108 |
| HSV1-UL30-2076 | − | UUUUACCGCGUCUACGU | 17 | 5109 |
| HSV1-UL30-2077 | − | CCGCGUCUACGUCCGAA | 17 | 5110 |
| HSV1-UL30-2078 | − | ACUUCUGCCCGGCCAUC | 17 | 5111 |
| HSV1-UL30-2079 | − | CCCGGCCAUCAAGAAGU | 17 | 5112 |
| HSV1-UL30-2080 | − | CGGCCAUCAAGAAGUAC | 17 | 5113 |
| HSV1-UL30-2081 | − | CAUCAAGAAGUACGAGG | 17 | 5114 |
| HSV1-UL30-2082 | − | AUCAAGAAGUACGAGGG | 17 | 5115 |
| HSV1-UL30-2083 | − | CCACCACCCGGUUCAUC | 17 | 5116 |
| HSV1-UL30-2084 | − | GUUCAUCCUGGACAACC | 17 | 5117 |
| HSV1-UL30-2085 | − | GCUGGUACCGUCUCAAA | 17 | 5118 |
| HSV1-UL30-2086 | − | UACCGUCUCAAACCGGG | 17 | 5119 |
| HSV1-UL30-2087 | − | ACCGUCUCAAACCGGGC | 17 | 5120 |
| HSV1-UL30-2088 | − | GGCGGCCCCGAUGGCCU | 17 | 5121 |
| HSV1-UL30-2089 | − | GCGGCCCCGAUGGCCUU | 17 | 5122 |
| HSV1-UL30-2090 | − | CGGGACAUCCAGCGACG | 17 | 5123 |
| HSV1-UL30-2091 | − | UCGAGUUUAACUGUACG | 17 | 5124 |
| HSV1-UL30-2092 | − | GGCGGACAACCUGGCCA | 17 | 5125 |
| HSV1-UL30-2093 | − | CGGACAACCUGGCCAUC | 17 | 5126 |
| HSV1-UL30-2094 | − | GGACAACCUGGCCAUCG | 17 | 5127 |
| HSV1-UL30-2095 | − | GACAACCUGGCCAUCGA | 17 | 5128 |
| HSV1-UL30-2096 | − | ACAACCUGGCCAUCGAG | 17 | 5129 |
| HSV1-UL30-2097 | − | UGGCCAUCGAGGGGGGC | 17 | 5130 |
| HSV1-UL30-2098 | − | GCUCAUGUGCUUCGAUA | 17 | 5131 |
| HSV1-UL30-2099 | − | UCGAUAUCGAAUGCAAG | 17 | 5132 |
| HSV1-UL30-2100 | − | CGAUAUCGAAUGCAAGG | 17 | 5133 |
| HSV1-UL30-2101 | − | GAUAUCGAAUGCAAGGC | 17 | 5134 |
| HSV1-UL30-2102 | − | AUAUCGAAUGCAAGGCG | 17 | 5135 |
| HSV1-UL30-2103 | − | UAUCGAAUGCAAGGCGG | 17 | 5136 |
| HSV1-UL30-2104 | − | AUCGAAUGCAAGGCGGG | 17 | 5137 |
| HSV1-UL30-2105 | − | UCGAAUGCAAGGCGGGG | 17 | 5138 |
| HSV1-UL30-2106 | − | CGAAUGCAAGGCGGGGG | 17 | 5139 |
| HSV1-UL30-2107 | − | AAUGCAAGGCGGGGGGG | 17 | 5140 |
| HSV1-UL30-2108 | − | CAAGGCGGGGGGGGAGG | 17 | 5141 |
| HSV1-UL30-2109 | − | GCUGGCCUUUCCGGUGG | 17 | 5142 |
| HSV1-UL30-2110 | − | UUCCGGUGGCCGGGCAC | 17 | 5143 |
| HSV1-UL30-2111 | − | UCCGGUGGCCGGGCACC | 17 | 5144 |
| HSV1-UL30-2112 | − | CGGUGGCCGGGCACCCG | 17 | 5145 |
| HSV1-UL30-2113 | − | ACCUGUCCACCACCGCC | 17 | 5146 |
| HSV1-UL30-2114 | − | CCUGUCCACCACCGCCC | 17 | 5147 |
| HSV1-UL30-2115 | − | CGGUUCCUGCGACCUCC | 17 | 5148 |
| HSV1-UL30-2116 | − | ACCUCCCCGAAUCCCAC | 17 | 5149 |
| HSV1-UL30-2117 | − | CCCCGAAUCCCACCUGA | 17 | 5150 |
| HSV1-UL30-2118 | − | CUGAACGAGCUGGCGGC | 17 | 5151 |
| HSV1-UL30-2119 | − | UGAACGAGCUGGCGGCC | 17 | 5152 |
| HSV1-UL30-2120 | − | UGCCCACGCCCGUGGUU | 17 | 5153 |
| HSV1-UL30-2121 | − | GCCCACGCCCGUGGUUC | 17 | 5154 |
| HSV1-UL30-2122 | − | GGUUCUGGAAUUCGACA | 17 | 5155 |
| HSV1-UL30-2123 | − | GGAAUUCGACAGCGAAU | 17 | 5156 |
| HSV1-UL30-2124 | − | UGGCCUUCAUGACCCUU | 17 | 5157 |
| HSV1-UL30-2125 | − | UGUGAAACAGUACGGCC | 17 | 5158 |
| HSV1-UL30-2126 | − | CGGCCCCGAGUUCGUGA | 17 | 5159 |
| HSV1-UL30-2127 | − | UCUUGCUGGCCAAGCUG | 17 | 5160 |
| HSV1-UL30-2128 | − | ACAUUUACAAGGUCCCC | 17 | 5161 |
| HSV1-UL30-2129 | − | UUACAAGGUCCCCCUGG | 17 | 5162 |
| HSV1-UL30-2130 | − | UGGACGGGUACGGCCGC | 17 | 5163 |
| HSV1-UL30-2131 | − | UACGGCCGCAUGAACGG | 17 | 5164 |
| HSV1-UL30-2132 | − | ACGGCCGCAUGAACGGC | 17 | 5165 |
| HSV1-UL30-2133 | − | CGGGGCGUGUUUCGCGU | 17 | 5166 |
| HSV1-UL30-2134 | − | GGGGCGUGUUUCGCGUG | 17 | 5167 |
| HSV1-UL30-2135 | − | GCGUGUGGGACAUAGGC | 17 | 5168 |
| HSV1-UL30-2136 | − | UAGGCCAGAGCCACUUC | 17 | 5169 |
| HSV1-UL30-2137 | − | AGCGCAGCAAGAUAAAG | 17 | 5170 |
| HSV1-UL30-2138 | − | UAAAGGUGAACGGCAUG | 17 | 5171 |
| HSV1-UL30-2139 | − | GGUGAACAUCGACAUGU | 17 | 5172 |
| HSV1-UL30-2140 | − | GUGAACAUCGACAUGUA | 17 | 5173 |
| HSV1-UL30-2141 | − | CCGACAAGAUCAAGCUC | 17 | 5174 |
| HSV1-UL30-2142 | − | CAAGCUCAACGCCGUGG | 17 | 5175 |
| HSV1-UL30-2143 | − | CCGUGGCCGAAGCCGUC | 17 | 5176 |
| HSV1-UL30-2144 | − | UGGCCGAAGCCGUCCUG | 17 | 5177 |
| HSV1-UL30-2145 | − | AAGCCGUCCUGAAGGAC | 17 | 5178 |
| HSV1-UL30-2146 | − | CCGUCCUGAAGGACAAG | 17 | 5179 |
| HSV1-UL30-2147 | − | UCCUGAAGGACAAGAAG | 17 | 5180 |
| HSV1-UL30-2148 | − | AGGACAAGAAGAAGGAC | 17 | 5181 |
| HSV1-UL30-2149 | − | CCCCGCCUACUACGCCG | 17 | 5182 |
| HSV1-UL30-2150 | − | CGCCGGGCCCGCGCAAC | 17 | 5183 |
| HSV1-UL30-860 | − | GCCGGGCCCGCGCAACG | 17 | 3798 |
| HSV1-UL30-2152 | − | GCAACGCGGGGUGAUCG | 17 | 5184 |
| HSV1-UL30-2153 | − | UCGGCGAGUACUGCAUA | 17 | 5185 |
| HSV1-UL30-2154 | − | UACAGGAUUCCCUGCUG | 17 | 5186 |
| HSV1-UL30-2155 | − | UUAAGUUUUUGCCCCAU | 17 | 5187 |
| HSV1-UL30-2156 | − | UAAGUUUUUGCCCCAUC | 17 | 5188 |
| HSV1-UL30-2157 | − | CGGCCGUCGCGCGCUUG | 17 | 5189 |
| HSV1-UL30-2158 | − | UGCUGCGCCUGGCCGAC | 17 | 5190 |
| HSV1-UL30-2159 | − | UGCGCCUGGCCGACCAG | 17 | 5191 |
| HSV1-UL30-2160 | − | AGAAGGGCUUUAUUCUG | 17 | 5192 |
| HSV1-UL30-2161 | − | UUAUUCUGCCGGACACC | 17 | 5193 |
| HSV1-UL30-2162 | − | UAUUCUGCCGGACACCC | 17 | 5194 |
| HSV1-UL30-2163 | − | GACACCCAGGGGCGAUU | 17 | 5195 |
| HSV1-UL30-2164 | − | ACACCCAGGGGCGAUUU | 17 | 5196 |
| HSV1-UL30-2165 | − | GGGGCGAUUUAGGGGCG | 17 | 5197 |
| HSV1-UL30-2166 | − | GGGCGAUUUAGGGGCGC | 17 | 5198 |
| HSV1-UL30-2167 | − | GGCGAUUUAGGGGCGCC | 17 | 5199 |
| HSV1-UL30-2168 | − | GCGAUUUAGGGGCGCCG | 17 | 5200 |
| HSV1-UL30-2169 | − | CGAUUUAGGGGCGCCGG | 17 | 5201 |
| HSV1-UL30-2170 | − | GAUUUAGGGGCGCCGGG | 17 | 5202 |
| HSV1-UL30-2171 | − | AUUUAGGGGCGCCGGGG | 17 | 5203 |
| HSV1-UL30-2172 | − | AAGCGUCCGGCCGCAGC | 17 | 5204 |
| HSV1-UL30-2173 | − | AGCGUCCGGCCGCAGCC | 17 | 5205 |
| HSV1-UL30-2174 | − | GCGUCCGGCCGCAGCCC | 17 | 5206 |
| HSV1-UL30-2175 | − | GUCCGGCCGCAGCCCGG | 17 | 5207 |
| HSV1-UL30-2176 | − | GGCCGCAGCCCGGGAGG | 17 | 5208 |
| HSV1-UL30-2177 | − | CCGCAGCCCGGGAGGAC | 17 | 5209 |
| HSV1-UL30-895 | − | CGCAGCCCGGGAGGACG | 17 | 3833 |
| HSV1-UL30-2179 | − | GGAGGACGAGGAGCGGC | 17 | 5210 |
| HSV1-UL30-2180 | − | AGGACGAGGAGCGGCCA | 17 | 5211 |
| HSV1-UL30-897 | − | GGACGAGGAGCGGCCAG | 17 | 3835 |
| HSV1-UL30-2182 | − | ACGAGGAGCGGCCAGAG | 17 | 5212 |
| HSV1-UL30-898 | − | CGAGGAGCGGCCAGAGG | 17 | 3836 |
| HSV1-UL30-2184 | − | AGGAGCGGCCAGAGGAG | 17 | 5213 |
| HSV1-UL30-899 | − | GGAGCGGCCAGAGGAGG | 17 | 3837 |
| HSV1-UL30-900 | − | GAGCGGCCAGAGGAGGA | 17 | 3838 |
| HSV1-UL30-901 | − | AGCGGCCAGAGGAGGAG | 17 | 3839 |
| HSV1-UL30-902 | − | GCGGCCAGAGGAGGAGG | 17 | 3840 |
| HSV1-UL30-2189 | − | GGCCAGAGGAGGAGGGG | 17 | 5214 |
| HSV1-UL30-2190 | − | AGAGGAGGAGGGGGAGG | 17 | 5215 |
| HSV1-UL30-2191 | − | AGGAGGAGGGGGAGGAC | 17 | 5216 |
| HSV1-UL30-2192 | − | GGAGGGGGAGGACGAGG | 17 | 5217 |
| HSV1-UL30-2193 | − | GGAGGACGAGGACGAAC | 17 | 5218 |
| HSV1-UL30-2194 | − | AGGACGAGGACGAACGC | 17 | 5219 |
| HSV1-UL30-905 | − | GGACGAGGACGAACGCG | 17 | 3843 |
| HSV1-UL30-2196 | − | ACGAGGACGAACGCGAG | 17 | 5220 |
| HSV1-UL30-2197 | − | GGACGAACGCGAGGAGG | 17 | 5221 |
| HSV1-UL30-908 | − | GACGAACGCGAGGAGGG | 17 | 3846 |
| HSV1-UL30-909 | − | ACGAACGCGAGGAGGGC | 17 | 3847 |
| HSV1-UL30-2200 | − | ACGCGAGGAGGGCGGGG | 17 | 5222 |
| HSV1-UL30-2201 | − | GAGGAGGGCGGGGGCGA | 17 | 5223 |
| HSV1-UL30-912 | − | AGGAGGGCGGGGGCGAG | 17 | 3850 |
| HSV1-UL30-913 | − | GGAGGGCGGGGGCGAGC | 17 | 3851 |
| HSV1-UL30-2204 | − | GCGGGGGCGAGCGGGAG | 17 | 5224 |
| HSV1-UL30-914 | − | CGGGGGCGAGCGGGAGC | 17 | 3852 |
| HSV1-UL30-2206 | − | GGGGCGAGCGGGAGCCG | 17 | 5225 |
| HSV1-UL30-2207 | − | CGGGAGCCGGAGGGCGC | 17 | 5226 |
| HSV1-UL30-917 | − | GGGAGCCGGAGGGCGCG | 17 | 3855 |
| HSV1-UL30-918 | − | GGAGCCGGAGGGCGCGC | 17 | 3856 |
| HSV1-UL30-2210 | − | AGACCGCCGGCAGGCAC | 17 | 5227 |
| HSV1-UL30-921 | − | GACCGCCGGCAGGCACG | 17 | 3859 |
| HSV1-UL30-2212 | − | GCAGGCACGUGGGGUAC | 17 | 5228 |
| HSV1-UL30-2213 | − | CAGGCACGUGGGGUACC | 17 | 5229 |
| HSV1-UL30-2214 | − | AGGCACGUGGGGUACCA | 17 | 5230 |
| HSV1-UL30-2215 | − | GUGGGGUACCAGGGGGC | 17 | 5231 |
| HSV1-UL30-2216 | − | GGUCCUUGACCCCACUU | 17 | 5232 |
| HSV1-UL30-2217 | − | CCACUUCCGGGUUUCAC | 17 | 5233 |
| HSV1-UL30-2218 | − | GCUUCAGCACGCUCUCC | 17 | 5234 |
| HSV1-UL30-2219 | − | UUCAGCACGCUCUCCCU | 17 | 5235 |
| HSV1-UL30-2220 | − | CCGACGCAGUGGCGCAC | 17 | 5236 |
| HSV1-UL30-2221 | − | CGACGCAGUGGCGCACC | 17 | 5237 |
| HSV1-UL30-2222 | − | CAGUGGCGCACCUGGAG | 17 | 5238 |
| HSV1-UL30-2223 | − | CGCACCUGGAGGCGGGC | 17 | 5239 |
| HSV1-UL30-2224 | − | AGGCGGGCAAGGACUAC | 17 | 5240 |
| HSV1-UL30-2225 | − | GGCGGGCAAGGACUACC | 17 | 5241 |
| HSV1-UL30-2226 | − | CAAGGACUACCUGGAGA | 17 | 5242 |
| HSV1-UL30-2227 | − | ACUACCUGGAGAUCGAG | 17 | 5243 |
| HSV1-UL30-2228 | − | CUACCUGGAGAUCGAGG | 17 | 5244 |
| HSV1-UL30-2229 | − | UACCUGGAGAUCGAGGU | 17 | 5245 |
| HSV1-UL30-2230 | − | ACCUGGAGAUCGAGGUG | 17 | 5246 |
| HSV1-UL30-2231 | − | CCUGGAGAUCGAGGUGG | 17 | 5247 |
| HSV1-UL30-2232 | − | UUCGUCAAGGCUCACGU | 17 | 5248 |
| HSV1-UL30-2233 | − | CGUCAAGGCUCACGUGC | 17 | 5249 |
| HSV1-UL30-2234 | − | UCAAGGCUCACGUGCGA | 17 | 5250 |
| HSV1-UL30-2235 | − | CUCCUCAGCAUCCUCCU | 17 | 5251 |
| HSV1-UL30-2236 | − | UCCUCAGCAUCCUCCUG | 17 | 5252 |
| HSV1-UL30-2237 | − | CGGGACUGGCUCGCCAU | 17 | 5253 |
| HSV1-UL30-2238 | − | CGAAAGCAGAUCCGCUC | 17 | 5254 |
| HSV1-UL30-2239 | − | UCCGCUCGCGGAUUCCC | 17 | 5255 |
| HSV1-UL30-2240 | − | GAUUCCCCAGAGCAGCC | 17 | 5256 |
| HSV1-UL30-2241 | − | UUCCCCAGAGCAGCCCC | 17 | 5257 |
| HSV1-UL30-2242 | − | UCCCCAGAGCAGCCCCG | 17 | 5258 |
| HSV1-UL30-2243 | − | CCGAGGAGGCCGUGCUC | 17 | 5259 |
| HSV1-UL30-2244 | − | CGUGUGUAACUCGGUGU | 17 | 5260 |
| HSV1-UL30-2245 | − | ACUCGGUGUACGGGUUC | 17 | 5261 |
| HSV1-UL30-2246 | − | CUCGGUGUACGGGUUCA | 17 | 5262 |
| HSV1-UL30-2247 | − | UCGGUGUACGGGUUCAC | 17 | 5263 |
| HSV1-UL30-2248 | − | GUUCACGGGAGUGCAGC | 17 | 5264 |
| HSV1-UL30-2249 | − | GGUGACGACCAUCGGCC | 17 | 5265 |
| HSV1-UL30-2250 | − | GAUGCUGCUCGCGACCC | 17 | 5266 |
| HSV1-UL30-2251 | − | GAGUACGUCCACGCGCG | 17 | 5267 |
| HSV1-UL30-2252 | − | CGCGCGCUGGGCGGCCU | 17 | 5268 |
| HSV1-UL30-2253 | − | AGCUCCUGGCCGAUUUC | 17 | 5269 |
| HSV1-UL30-2254 | − | GCUCCUGGCCGAUUUCC | 17 | 5270 |
| HSV1-UL30-2255 | − | GGCCGACAUGCGCGCCC | 17 | 5271 |
| HSV1-UL30-2256 | − | UUCCAUGCGCAUCAUCU | 17 | 5272 |
| HSV1-UL30-2257 | − | UCCAUGCGCAUCAUCUA | 17 | 5273 |
| HSV1-UL30-2258 | − | CCAUGCGCAUCAUCUAC | 17 | 5274 |
| HSV1-UL30-2259 | − | GCAUCAUCUACGGGGAC | 17 | 5275 |
| HSV1-UL30-2260 | − | CCGCGGCCUCACGGCCG | 17 | 5276 |
| HSV1-UL30-2261 | − | CCGCCGGGCUGACGGCC | 17 | 5277 |
| HSV1-UL30-2262 | − | CCGUGGGCGACAAGAUG | 17 | 5278 |
| HSV1-UL30-2263 | − | UCUGCCCCCCAUCAAAC | 17 | 5279 |
| HSV1-UL30-2264 | − | CCCCAUCAAACUCGAGU | 17 | 5280 |
| HSV1-UL30-2265 | − | AGCUGCUGCUGAUCGCC | 17 | 5281 |
| HSV1-UL30-2266 | − | GUACAUCGGCGUCAUCU | 17 | 5282 |
| HSV1-UL30-2267 | − | UACAUCGGCGUCAUCUA | 17 | 5283 |
| HSV1-UL30-2268 | − | ACAUCGGCGUCAUCUAC | 17 | 5284 |
| HSV1-UL30-2269 | − | GGGGUAAGAUGCUCAUC | 17 | 5285 |
| HSV1-UL30-2270 | − | AGAUGCUCAUCAAGGGC | 17 | 5286 |
| HSV1-UL30-2271 | − | UUUAUCAACCGCACCUC | 17 | 5287 |
| HSV1-UL30-2272 | − | UUACGACGAUACCGUCU | 17 | 5288 |
| HSV1-UL30-2273 | − | UACGACGAUACCGUCUC | 17 | 5289 |
| HSV1-UL30-2274 | − | AGCGGCCGCCGCGUUAG | 17 | 5290 |
| HSV1-UL30-2275 | − | CGUUAGCCGAGCGCCCC | 17 | 5291 |
| HSV1-UL30-2276 | − | GUUAGCCGAGCGCCCCG | 17 | 5292 |
| HSV1-UL30-2277 | − | UAGCCGAGCGCCCCGCG | 17 | 5293 |
| HSV1-UL30-1006 | − | AGCCGAGCGCCCCGCGG | 17 | 3944 |
| HSV1-UL30-2279 | − | GCUGGCGCGACCCCUGC | 17 | 5294 |
| HSV1-UL30-2280 | − | UGGCGCGACCCCUGCCC | 17 | 5295 |
| HSV1-UL30-2281 | − | GGCGCGACCCCUGCCCG | 17 | 5296 |
| HSV1-UL30-2282 | − | CGAGGGACUGCAGGCGU | 17 | 5297 |
| HSV1-UL30-2283 | − | GAGGGACUGCAGGCGUU | 17 | 5298 |
| HSV1-UL30-2284 | − | AUCGGCGCAUCACCGAC | 17 | 5299 |
| HSV1-UL30-2285 | − | UCGGCGCAUCACCGACC | 17 | 5300 |
| HSV1-UL30-2286 | − | GGCGCAUCACCGACCCG | 17 | 5301 |
| HSV1-UL30-2287 | − | CGCAUCACCGACCCGGA | 17 | 5302 |
| HSV1-UL30-2288 | − | GCAUCACCGACCCGGAG | 17 | 5303 |
| HSV1-UL30-2289 | − | ACCCGGAGAGGGACAUC | 17 | 5304 |
| HSV1-UL30-2290 | − | GGACUUUGUCCUCACCG | 17 | 5305 |
| HSV1-UL30-2291 | − | UUGUCCUCACCGCCGAA | 17 | 5306 |
| HSV1-UL30-2292 | − | CGCAGGUCCCGUCCAUC | 17 | 5307 |
| HSV1-UL30-2293 | − | GUCCCGUCCAUCAAGGA | 17 | 5308 |
| HSV1-UL30-2294 | − | GAUCGUGGCCCAGACCC | 17 | 5309 |
| HSV1-UL30-2295 | − | GGCCCAGACCCGCGAGG | 17 | 5310 |
| HSV1-UL30-2296 | − | CCCAGACCCGCGAGGUA | 17 | 5311 |
| HSV1-UL30-2297 | − | CCAGACCCGCGAGGUAG | 17 | 5312 |
| HSV1-UL30-2298 | − | GCGGCUGGCCGCCCUCC | 17 | 5313 |
| HSV1-UL30-2299 | − | GCUAGACGCCGCCGCCC | 17 | 5314 |
| HSV1-UL30-2300 | − | CUAGACGCCGCCGCCCC | 17 | 5315 |
| HSV1-UL30-2301 | − | UAGACGCCGCCGCCCCA | 17 | 5316 |
| HSV1-UL30-2302 | − | CGCCGCCGCCCCAGGGG | 17 | 5317 |
| HSV1-UL30-2303 | − | UCCCCGGCCAAGCGCCC | 17 | 5318 |
| HSV1-UL30-1037 | − | CCCCGGCCAAGCGCCCC | 17 | 3975 |
| HSV1-UL30-1038 | − | CCCGGCCAAGCGCCCCC | 17 | 3976 |
| HSV1-UL30-2306 | − | CGUCGCCUGCCGACCCC | 17 | 5319 |
| HSV1-UL30-2307 | − | GUCGCCUGCCGACCCCC | 17 | 5320 |
| HSV1-UL30-2308 | − | UCGCCUGCCGACCCCCC | 17 | 5321 |
| HSV1-UL30-2309 | − | CCGCAAGCUGCUGGUGU | 17 | 5322 |
| HSV1-UL30-2310 | − | GCUGGUGUCCGAGCUGG | 17 | 5323 |
| HSV1-UL30-2311 | − | UGGUGUCCGAGCUGGCC | 17 | 5324 |
| HSV1-UL30-2312 | − | UUGCCCACGGCGUCGCC | 17 | 5325 |
| HSV1-UL30-2313 | − | ACGGCGUCGCCCUGAAC | 17 | 5326 |
| HSV1-UL30-2314 | − | AUUACUUCUCCCACCUG | 17 | 5327 |
| HSV1-UL30-2315 | − | UUACUUCUCCCACCUGU | 17 | 5328 |
| HSV1-UL30-2316 | − | UACUUCUCCCACCUGUU | 17 | 5329 |
| HSV1-UL30-2317 | − | GACAUUCAAGGCCCUGU | 17 | 5330 |
| HSV1-UL30-2318 | − | ACAUUCAAGGCCCUGUU | 17 | 5331 |
| HSV1-UL30-2319 | − | CAUUCAAGGCCCUGUUU | 17 | 5332 |
| HSV1-UL30-2320 | − | GAAUAACGCCAAGAUCA | 17 | 5333 |
| HSV1-UL30-2321 | − | AUAACGCCAAGAUCACC | 17 | 5334 |
| HSV1-UL30-2322 | − | GUUAAAAAGGUUUAUUC | 17 | 5335 |
| HSV1-UL30-2323 | − | CCGAAGUGUGGCACCCC | 17 | 5336 |
| HSV1-UL30-2324 | − | GACGUGGCCGCGCGGCU | 17 | 5337 |
| HSV1-UL30-2325 | − | CGCGCGGCUCCGGACCG | 17 | 5338 |
| HSV1-UL30-2326 | − | GCUCCGGACCGCAGGGU | 17 | 5339 |
| HSV1-UL30-2327 | − | CUCCGGACCGCAGGGUU | 17 | 5340 |
| HSV1-UL30-2328 | − | CCGCAGGGUUCGGGGCG | 17 | 5341 |
| HSV1-UL30-2329 | − | UGGGUGCCGGCGCUACG | 17 | 5342 |
| HSV1-UL30-2330 | − | GGGUGCCGGCGCUACGG | 17 | 5343 |
| HSV1-UL30-2331 | − | GUGCCGGCGCUACGGCG | 17 | 5344 |
| HSV1-UL30-2332 | − | UGCCGGCGCUACGGCGG | 17 | 5345 |
| HSV1-UL30-2333 | − | ACGGCGGAGGAAACUCG | 17 | 5346 |
| HSV1-UL30-2334 | − | ACUCGUCGAAUGUUGCA | 17 | 5347 |
| HSV1-UL30-2335 | + | AAGGCUCUAUGCAACAUUCG | 20 | 5348 |
| HSV1-UL30-2336 | + | UAGCGCCGGCACCCACCGCC | 20 | 5349 |
| HSV1-UL30-2337 | + | ACCGCCCCGAACCCUGCGGU | 20 | 5350 |
| HSV1-UL30-2338 | + | CCGCCCCGAACCCUGCGGUC | 20 | 5351 |
| HSV1-UL30-2339 | + | GAGCCGCGCGGCCACGUCGU | 20 | 5352 |
| HSV1-UL30-2340 | + | AGCCGCGCGGCCACGUCGUC | 20 | 5353 |
| HSV1-UL30-2341 | + | GCCGCGCGGCCACGUCGUCC | 20 | 5354 |
| HSV1-UL30-2342 | + | CCGCGCGGCCACGUCGUCCG | 20 | 5355 |
| HSV1-UL30-2343 | + | CGUCCGGGGGGUGCCACACU | 20 | 5356 |
| HSV1-UL30-2344 | + | GUCCGGGGGGUGCCACACUU | 20 | 5357 |
| HSV1-UL30-2345 | + | UCCGGGGGGUGCCACACUUC | 20 | 5358 |
| HSV1-UL30-2346 | + | AUCUUGGCGUUAUUCCCAAA | 20 | 5359 |
| HSV1-UL30-2347 | + | CGUUAUUCCCAAACAGGGCC | 20 | 5360 |
| HSV1-UL30-2348 | + | ACGCACGCCGCCCCCAACAG | 20 | 5361 |
| HSV1-UL30-1089 | + | CGCACGCCGCCCCCAACAGG | 20 | 4027 |
| HSV1-UL30-2350 | + | GCACGCCGCCCCCAACAGGU | 20 | 5362 |
| HSV1-UL30-2351 | + | ACGCCGCCCCCAACAGGUGG | 20 | 5363 |
| HSV1-UL30-2352 | + | GAGAAGUAAUAGUCCGUGUU | 20 | 5364 |
| HSV1-UL30-2353 | + | UCCGUGUUCAGGGCGACGCC | 20 | 5365 |
| HSV1-UL30-2354 | + | CGCCGUGGGCAAUGGCGUAU | 20 | 5366 |
| HSV1-UL30-2355 | + | GCCGUGGGCAAUGGCGUAUG | 20 | 5367 |
| HSV1-UL30-2356 | + | AUGCGGGAUCCUCGGCCAGC | 20 | 5368 |
| HSV1-UL30-2357 | + | AGCUCGGACACCAGCAGCUU | 20 | 5369 |
| HSV1-UL30-2358 | + | GCUCGGACACCAGCAGCUUG | 20 | 5370 |
| HSV1-UL30-2359 | + | ACACCAGCAGCUUGCGGGGC | 20 | 5371 |
| HSV1-UL30-2360 | + | GCGGGGCUUGGACGCGCCUC | 20 | 5372 |
| HSV1-UL30-2361 | + | CGGGGCUUGGACGCGCCUCC | 20 | 5373 |
| HSV1-UL30-2362 | + | GGGGCUUGGACGCGCCUCCC | 20 | 5374 |
| HSV1-UL30-2363 | + | GGGCUUGGACGCGCCUCCCG | 20 | 5375 |
| HSV1-UL30-2364 | + | UCGGCAGGCGACGGCGUCUC | 20 | 5376 |
| HSV1-UL30-2365 | + | CGGCAGGCGACGGCGUCUCC | 20 | 5377 |
| HSV1-UL30-2366 | + | GGCAGGCGACGGCGUCUCCC | 20 | 5378 |
| HSV1-UL30-2367 | + | CGUCUCCCGGGGGCGCUUGG | 20 | 5379 |
| HSV1-UL30-2368 | + | GUCUCCCGGGGGCGCUUGGC | 20 | 5380 |
| HSV1-UL30-2369 | + | UCUCCCGGGGGCGCUUGGCC | 20 | 5381 |
| HSV1-UL30-2370 | + | CUCCCGGGGGCGCUUGGCCG | 20 | 5382 |
| HSV1-UL30-2371 | + | CCCGGGGGCGCUUGGCCGGG | 20 | 5383 |
| HSV1-UL30-2372 | + | GGGCGCUUGGCCGGGGAGGG | 20 | 5384 |
| HSV1-UL30-2373 | + | UGGCCGGGGAGGGCAGGGCC | 20 | 5385 |
| HSV1-UL30-1124 | + | GGCCGGGGAGGGCAGGGCCG | 20 | 4062 |
| HSV1-UL30-1125 | + | GCCGGGGAGGGCAGGGCCGC | 20 | 4063 |
| HSV1-UL30-1126 | + | CCGGGGAGGGCAGGGCCGCG | 20 | 4064 |
| HSV1-UL30-1127 | + | CGGGGAGGGCAGGGCCGCGG | 20 | 4065 |
| HSV1-UL30-1128 | + | GGGGAGGGCAGGGCCGCGGG | 20 | 4066 |
| HSV1-UL30-2379 | + | AGGGCAGGGCCGCGGGGGGG | 20 | 5386 |
| HSV1-UL30-2380 | + | GGGGGGGGCGGGCUCGUCCC | 20 | 5387 |
| HSV1-UL30-2381 | + | GGGGGGGCGGGCUCGUCCCC | 20 | 5388 |
| HSV1-UL30-2382 | + | GGGGCGGCGGCGUCUAGCUC | 20 | 5389 |
| HSV1-UL30-2383 | + | GGGCGGCGGCGUCUAGCUCG | 20 | 5390 |
| HSV1-UL30-2384 | + | GCGGCGGCGUCUAGCUCGCG | 20 | 5391 |
| HSV1-UL30-2385 | + | GCGACCGUCUCCUCUACCUC | 20 | 5392 |
| HSV1-UL30-2386 | + | GUCUCCUCUACCUCGCGGGU | 20 | 5393 |
| HSV1-UL30-2387 | + | GGUCUGGGCCACGAUCACGU | 20 | 5394 |
| HSV1-UL30-2388 | + | GUCUGGGCCACGAUCACGUA | 20 | 5395 |
| HSV1-UL30-2389 | + | CGUACGGGAUCCGGUCCUUG | 20 | 5396 |
| HSV1-UL30-2390 | + | CGGGAUCCGGUCCUUGAUGG | 20 | 5397 |
| HSV1-UL30-2391 | + | GGGAUCCGGUCCUUGAUGGA | 20 | 5398 |
| HSV1-UL30-2392 | + | AUGGACGGGACCUGCGCGCG | 20 | 5399 |
| HSV1-UL30-2393 | + | GGACCUGCGCGCGGCGGGCC | 20 | 5400 |
| HSV1-UL30-2394 | + | AGCUUGUAAUACACCGUCAG | 20 | 5401 |
| HSV1-UL30-2395 | + | GCGCUUGUUGGUGUACGCGC | 20 | 5402 |
| HSV1-UL30-2396 | + | GGUGUCUGCUCAGUUCGGCG | 20 | 5403 |
| HSV1-UL30-2397 | + | UGUCUGCUCAGUUCGGCGGU | 20 | 5404 |
| HSV1-UL30-2398 | + | UCGGCGGUGAGGACAAAGUC | 20 | 5405 |
| HSV1-UL30-2399 | + | AAAGUCCUGGAUGUCCCUCU | 20 | 5406 |
| HSV1-UL30-2400 | + | UCCGGGUCGGUGAUGCGCCG | 20 | 5407 |
| HSV1-UL30-2401 | + | UGAUGCGCCGAUGGGCGUCU | 20 | 5408 |
| HSV1-UL30-2402 | + | AUGCGCCGAUGGGCGUCUAC | 20 | 5409 |
| HSV1-UL30-2403 | + | GGGCGUCUACGAGGACGGCC | 20 | 5410 |
| HSV1-UL30-2404 | + | CCCCGAACGCCUGCAGUCCC | 20 | 5411 |
| HSV1-UL30-2405 | + | AACGCCUGCAGUCCCUCGGG | 20 | 5412 |
| HSV1-UL30-2406 | + | ACGCCUGCAGUCCCUCGGGC | 20 | 5413 |
| HSV1-UL30-2407 | + | GUCGCGCCAGCCACUCCUCC | 20 | 5414 |
| HSV1-UL30-2408 | + | UCGCGCCAGCCACUCCUCCG | 20 | 5415 |
| HSV1-UL30-2409 | + | CGGCUAACGCGGCGGCCGCU | 20 | 5416 |
| HSV1-UL30-2410 | + | GGCUAACGCGGCGGCCGCUC | 20 | 5417 |
| HSV1-UL30-2411 | + | UCGUAAAACAGCAGGUCGAC | 20 | 5418 |
| HSV1-UL30-2412 | + | ACAGCAGGUCGACCAGGGCC | 20 | 5419 |
| HSV1-UL30-2413 | + | CAGCAGGUCGACCAGGGCCC | 20 | 5420 |
| HSV1-UL30-2414 | + | GCACCAGAUCCACGCCCUUG | 20 | 5421 |
| HSV1-UL30-2415 | + | UGGCGAUCAGCAGCAGCUUG | 20 | 5422 |
| HSV1-UL30-2416 | + | UGGUGAACGUCUUUUCGCAC | 20 | 5423 |
| HSV1-UL30-2417 | + | UCUUUUCGCACUCGAGUUUG | 20 | 5424 |
| HSV1-UL30-2418 | + | CUUUUCGCACUCGAGUUUGA | 20 | 5425 |
| HSV1-UL30-2419 | + | UUUUCGCACUCGAGUUUGAU | 20 | 5426 |
| HSV1-UL30-2420 | + | UUUCGCACUCGAGUUUGAUG | 20 | 5427 |
| HSV1-UL30-2421 | + | CACUCGAGUUUGAUGGGGGG | 20 | 5428 |
| HSV1-UL30-2422 | + | GGGGGGCAGAAACAGCGCGC | 20 | 5429 |
| HSV1-UL30-2423 | + | CGGCCGUCAGCCCGGCGGCC | 20 | 5430 |
| HSV1-UL30-2424 | + | GGCCGCGGCACAGCACAAAG | 20 | 5431 |
| HSV1-UL30-1205 | + | GCCGCGGCACAGCACAAAGA | 20 | 4143 |
| HSV1-UL30-2426 | + | UGUCCCCGUAGAUGAUGCGC | 20 | 5432 |
| HSV1-UL30-2427 | + | GUCCCCGUAGAUGAUGCGCA | 20 | 5433 |
| HSV1-UL30-2428 | + | CGUAGAUGAUGCGCAUGGAA | 20 | 5434 |
| HSV1-UL30-2429 | + | UGAUGCGCAUGGAAUAGGGC | 20 | 5435 |
| HSV1-UL30-2430 | + | GAUGCGCAUGGAAUAGGGCC | 20 | 5436 |
| HSV1-UL30-2431 | + | AUGCGCAUGGAAUAGGGCCC | 20 | 5437 |
| HSV1-UL30-2432 | + | GGCGCGCAUGUCGGCCGCCU | 20 | 5438 |
| HSV1-UL30-2433 | + | GCGCGCAUGUCGGCCGCCUC | 20 | 5439 |
| HSV1-UL30-2434 | + | CGCGCAUGUCGGCCGCCUCC | 20 | 5440 |
| HSV1-UL30-2435 | + | GCCGCCUCCGGGAAAUCGGC | 20 | 5441 |
| HSV1-UL30-2436 | + | CCGCCUCCGGGAAAUCGGCC | 20 | 5442 |
| HSV1-UL30-2437 | + | GGAAAUCGGCCAGGAGCUGU | 20 | 5443 |
| HSV1-UL30-2438 | + | UCGAAGGCCGCCCAGCGCGC | 20 | 5444 |
| HSV1-UL30-2439 | + | CAGCGCGCGUGGACGUACUC | 20 | 5445 |
| HSV1-UL30-2440 | + | CGUGGACGUACUCGCGGGUC | 20 | 5446 |
| HSV1-UL30-2441 | + | GCGGCAACGUGCAGGCACGG | 20 | 5447 |
| HSV1-UL30-2442 | + | CGGCAACGUGCAGGCACGGC | 20 | 5448 |
| HSV1-UL30-2443 | + | GGAGUCCGUGCUGCACUCCC | 20 | 5449 |
| HSV1-UL30-2444 | + | CACUCCCGUGAACCCGUACA | 20 | 5450 |
| HSV1-UL30-2445 | + | AUGGCGGCCUGCUGCUUGUC | 20 | 5451 |
| HSV1-UL30-2446 | + | UGGCGGCCUGCUGCUUGUCC | 20 | 5452 |
| HSV1-UL30-2447 | + | UGUCCAGGAGCACGGCCUCC | 20 | 5453 |
| HSV1-UL30-2448 | + | GUCCAGGAGCACGGCCUCCU | 20 | 5454 |
| HSV1-UL30-2449 | + | ACGGCCUCCUCGGGGCUGCU | 20 | 5455 |
| HSV1-UL30-2450 | + | CGGCCUCCUCGGGGCUGCUC | 20 | 5456 |
| HSV1-UL30-2451 | + | GGCCUCCUCGGGGCUGCUCU | 20 | 5457 |
| HSV1-UL30-2452 | + | GCCUCCUCGGGGCUGCUCUG | 20 | 5458 |
| HSV1-UL30-2453 | + | GGGGCUGCUCUGGGGAAUCC | 20 | 5459 |
| HSV1-UL30-2454 | + | CUGCUCUGGGGAAUCCGCGA | 20 | 5460 |
| HSV1-UL30-2455 | + | AGCGGAUCUGCUUUCGCAUG | 20 | 5461 |
| HSV1-UL30-2456 | + | CGCAUGGCGAGCCAGUCCCG | 20 | 5462 |
| HSV1-UL30-2457 | + | GCAUGGCGAGCCAGUCCCGC | 20 | 5463 |
| HSV1-UL30-2458 | + | AUGGCGAGCCAGUCCCGCAG | 20 | 5464 |
| HSV1-UL30-2459 | + | GCCAGUCCCGCAGGAGGAUG | 20 | 5465 |
| HSV1-UL30-2460 | + | CAGUCCCGCAGGAGGAUGCU | 20 | 5466 |
| HSV1-UL30-2461 | + | AGUCCCGCAGGAGGAUGCUG | 20 | 5467 |
| HSV1-UL30-2462 | + | CUGAGGAGGCUCUCUCGCAC | 20 | 5468 |
| HSV1-UL30-2463 | + | UCUCUCGCACGUGAGCCUUG | 20 | 5469 |
| HSV1-UL30-2464 | + | CUCGCACGUGAGCCUUGACG | 20 | 5470 |
| HSV1-UL30-2465 | + | UGCGCCACUGCGUCGGCCCU | 20 | 5471 |
| HSV1-UL30-2466 | + | GCGCCACUGCGUCGGCCCUC | 20 | 5472 |
| HSV1-UL30-2467 | + | CGCCACUGCGUCGGCCCUCA | 20 | 5473 |
| HSV1-UL30-2468 | + | CCACUGCGUCGGCCCUCAGG | 20 | 5474 |
| HSV1-UL30-2469 | + | CGGCCCUCAGGGAGAGCGUG | 20 | 5475 |
| HSV1-UL30-2470 | + | AGCGUGCUGAAGCACAGGUU | 20 | 5476 |
| HSV1-UL30-2471 | + | CUGAAGCACAGGUUGUGGGC | 20 | 5477 |
| HSV1-UL30-2472 | + | GGUUGUGGGCCUGGAUGAUG | 20 | 5478 |
| HSV1-UL30-2473 | + | GUUGUGGGCCUGGAUGAUGC | 20 | 5479 |
| HSV1-UL30-2474 | + | UGGGGUACAGGCUGGCAAAG | 20 | 5480 |
| HSV1-UL30-2475 | + | UGGCAAAGUCGAACACCACC | 20 | 5481 |
| HSV1-UL30-2476 | + | GGCAAAGUCGAACACCACCA | 20 | 5482 |
| HSV1-UL30-2477 | + | AACACCACCACGGGGUUCAC | 20 | 5483 |
| HSV1-UL30-2478 | + | CCACGGGGUUCACGUGAAAC | 20 | 5484 |
| HSV1-UL30-2479 | + | CACGGGGUUCACGUGAAACC | 20 | 5485 |
| HSV1-UL30-2480 | + | GGUUCACGUGAAACCCGGAA | 20 | 5486 |
| HSV1-UL30-2481 | + | GUUCACGUGAAACCCGGAAG | 20 | 5487 |
| HSV1-UL30-2482 | + | UGAAACCCGGAAGUGGGGUC | 20 | 5488 |
| HSV1-UL30-2483 | + | UCUGGCCGCUCCUCGUCCUC | 20 | 5489 |
| HSV1-UL30-2484 | + | CUCGUCCUCCCGGGCUGCGG | 20 | 5490 |
| HSV1-UL30-2485 | + | CCCGGGCUGCGGCCGGACGC | 20 | 5491 |
| HSV1-UL30-2486 | + | CCGGCGCCCCUAAAUCGCCC | 20 | 5492 |
| HSV1-UL30-2487 | + | AAUCGCCCCUGGGUGUCCGG | 20 | 5493 |
| HSV1-UL30-2488 | + | CGCAGCAGGCACGUAAAGAC | 20 | 5494 |
| HSV1-UL30-2489 | + | UGCUGGCCGUCGUAGAUGGU | 20 | 5495 |
| HSV1-UL30-2490 | + | ACCCGCCAAGCGCGCGACGG | 20 | 5496 |
| HSV1-UL30-2491 | + | CCGCCAAGCGCGCGACGGCC | 20 | 5497 |
| HSV1-UL30-2492 | + | GCGACGGCCGAGAGCUCCAG | 20 | 5498 |
| HSV1-UL30-2493 | + | CGACGGCCGAGAGCUCCAGA | 20 | 5499 |
| HSV1-UL30-2494 | + | AAAAACAGCUGGCCCACCAG | 20 | 5500 |
| HSV1-UL30-2495 | + | AAAACAGCUGGCCCACCAGC | 20 | 5501 |
| HSV1-UL30-2496 | + | AAACAGCUGGCCCACCAGCA | 20 | 5502 |
| HSV1-UL30-2497 | + | CGCCGAUCACCCCGCGUUGC | 20 | 5503 |
| HSV1-UL30-2498 | + | CGGGCCCGGCGGCGUAGUAG | 20 | 5504 |
| HSV1-UL30-2499 | + | GGGCCCGGCGGCGUAGUAGG | 20 | 5505 |
| HSV1-UL30-2500 | + | GGCCCGGCGGCGUAGUAGGC | 20 | 5506 |
| HSV1-UL30-2501 | + | AGGUCCUUCUUCUUGUCCUU | 20 | 5507 |
| HSV1-UL30-2502 | + | GGACGGCUUCGGCCACGGCG | 20 | 5508 |
| HSV1-UL30-2503 | + | CACGGCGUUGAGCUUGUAGC | 20 | 5509 |
| HSV1-UL30-2504 | + | CGGCGUUGAGCUUGUAGCUC | 20 | 5510 |
| HSV1-UL30-2505 | + | ACCUUUAUCUUGCUGCGCUU | 20 | 5511 |
| HSV1-UL30-2506 | + | CCUUUAUCUUGCUGCGCUUC | 20 | 5512 |
| HSV1-UL30-2507 | + | CUCUGGCCUAUGUCCCACAC | 20 | 5513 |
| HSV1-UL30-2508 | + | UUCAUGCGGCCGUACCCGUC | 20 | 5514 |
| HSV1-UL30-2509 | + | UCAUGCGGCCGUACCCGUCC | 20 | 5515 |
| HSV1-UL30-2510 | + | CAUGCGGCCGUACCCGUCCA | 20 | 5516 |
| HSV1-UL30-2511 | + | AUGCGGCCGUACCCGUCCAG | 20 | 5517 |
| HSV1-UL30-2512 | + | UGUCCGUCAGCUUGGCCAGC | 20 | 5518 |
| HSV1-UL30-2513 | + | CCGUCAGCUUGGCCAGCAAG | 20 | 5519 |
| HSV1-UL30-2514 | + | UGGCCAGCAAGAAGGGCCAG | 20 | 5520 |
| HSV1-UL30-2515 | + | UGAUGAUGUUGUACCCGGUC | 20 | 5521 |
| HSV1-UL30-2516 | + | UGUUGUACCCGGUCACGAAC | 20 | 5522 |
| HSV1-UL30-2517 | + | GUUGUACCCGGUCACGAACU | 20 | 5523 |
| HSV1-UL30-2518 | + | UCGGGGCCGUACUGUUUCAC | 20 | 5524 |
| HSV1-UL30-2519 | + | CGUACUGUUUCACAAGGGUC | 20 | 5525 |
| HSV1-UL30-2520 | + | UCAUGAAGGCCAACAGCAUC | 20 | 5526 |
| HSV1-UL30-2521 | + | ACAGCAUCUCGAAUUCGCUG | 20 | 5527 |
| HSV1-UL30-2522 | + | UCGAAUUCGCUGUCGAAUUC | 20 | 5528 |
| HSV1-UL30-2523 | + | CGCUGUCGAAUUCCAGAACC | 20 | 5529 |
| HSV1-UL30-2524 | + | CGAAUUCCAGAACCACGGGC | 20 | 5530 |
| HSV1-UL30-2525 | + | CUGGCCGCCAGCUCGUUCAG | 20 | 5531 |
| HSV1-UL30-2526 | + | UGGCCGCCAGCUCGUUCAGG | 20 | 5532 |
| HSV1-UL30-2527 | + | CCAGCUCGUUCAGGUGGGAU | 20 | 5533 |
| HSV1-UL30-2528 | + | CAGCUCGUUCAGGUGGGAUU | 20 | 5534 |
| HSV1-UL30-2529 | + | AGCUCGUUCAGGUGGGAUUC | 20 | 5535 |
| HSV1-UL30-2530 | + | GCUCGUUCAGGUGGGAUUCG | 20 | 5536 |
| HSV1-UL30-2531 | + | GGUGGGAUUCGGGGAGGUCG | 20 | 5537 |
| HSV1-UL30-2532 | + | GUGGGAUUCGGGGAGGUCGC | 20 | 5538 |
| HSV1-UL30-2533 | + | AUUCGGGGAGGUCGCAGGAA | 20 | 5539 |
| HSV1-UL30-2534 | + | GGGGAGGUCGCAGGAACCGA | 20 | 5540 |
| HSV1-UL30-2535 | + | UCGCAGGAACCGAGCGAAAA | 20 | 5541 |
| HSV1-UL30-1345 | + | CGCAGGAACCGAGCGAAAAC | 20 | 4283 |
| HSV1-UL30-2537 | + | CAGGAACCGAGCGAAAACAG | 20 | 5542 |
| HSV1-UL30-2538 | + | GAAAACAGGAGGACGUGCUC | 20 | 5543 |
| HSV1-UL30-2539 | + | GGACGUGCUCCAGGGCGGUG | 20 | 5544 |
| HSV1-UL30-2540 | + | GGGCGGUGGUGGACAGGUCG | 20 | 5545 |
| HSV1-UL30-2541 | + | UGGACAGGUCGUAGAGCAGA | 20 | 5546 |
| HSV1-UL30-2542 | + | UCGUAGAGCAGACAGGAUAU | 20 | 5547 |
| HSV1-UL30-2543 | + | UAUCUGGAUGACCAGGUCCU | 20 | 5548 |
| HSV1-UL30-2544 | + | GUCCUCCGGGUGCCCGGCCA | 20 | 5549 |
| HSV1-UL30-2545 | + | UCCUCCGGGUGCCCGGCCAC | 20 | 5550 |
| HSV1-UL30-2546 | + | CCCCCGCCUUGCAUUCGAUA | 20 | 5551 |
| HSV1-UL30-2547 | + | UGCAUUCGAUAUCGAAGCAC | 20 | 5552 |
| HSV1-UL30-2548 | + | UACAGUUAAACUCGACGUCG | 20 | 5553 |
| HSV1-UL30-2549 | + | ACUCGACGUCGCUGGAUGUC | 20 | 5554 |
| HSV1-UL30-2550 | + | GCUGGAUGUCCCGAAGGCCA | 20 | 5555 |
| HSV1-UL30-2551 | + | CUGGAUGUCCCGAAGGCCAU | 20 | 5556 |
| HSV1-UL30-2552 | + | AAGGCCAUCGGGGCCGCCGG | 20 | 5557 |
| HSV1-UL30-2553 | + | GCGUGUUGUUCCGGCCCGGU | 20 | 5558 |
| HSV1-UL30-2554 | + | CCGGUUUGAGACGGUACCAG | 20 | 5559 |
| HSV1-UL30-2555 | + | GACGGUACCAGCCGAAGGUG | 20 | 5560 |
| HSV1-UL30-2556 | + | ACCAGCCGAAGGUGACGAAC | 20 | 5561 |
| HSV1-UL30-2557 | + | CCAGCCGAAGGUGACGAACC | 20 | 5562 |
| HSV1-UL30-2558 | + | GUGACGAACCCGGGGUUGUC | 20 | 5563 |
| HSV1-UL30-2559 | + | CGAACCCGGGGUUGUCCAGG | 20 | 5564 |
| HSV1-UL30-2560 | + | CCGGGGUUGUCCAGGAUGAA | 20 | 5565 |
| HSV1-UL30-2561 | + | ACCCUCGUACUUCUUGAUGG | 20 | 5566 |
| HSV1-UL30-2562 | + | CGUACUUCUUGAUGGCCGGG | 20 | 5567 |
| HSV1-UL30-2563 | + | UACGACAGCACACGCCCGCU | 20 | 5568 |
| HSV1-UL30-2564 | + | CGGACGUAGACGCGGUAAAA | 20 | 5569 |
| HSV1-UL30-2565 | + | CGUAGACGCGGUAAAACAGA | 20 | 5570 |
| HSV1-UL30-2566 | + | GUAGACGCGGUAAAACAGAG | 20 | 5571 |
| HSV1-UL30-2567 | + | UGCGCUCCACCACCUCCGCC | 20 | 5572 |
| HSV1-UL30-2568 | + | CCUCCGCCUCGAAGUGGUCC | 20 | 5573 |
| HSV1-UL30-2569 | + | CUCCGCCUCGAAGUGGUCCG | 20 | 5574 |
| HSV1-UL30-2570 | + | AAGUGGUCCGCGGAGAUGCC | 20 | 5575 |
| HSV1-UL30-2571 | + | AGUGGUCCGCGGAGAUGCCG | 20 | 5576 |
| HSV1-UL30-2572 | + | GAUGCCGCGGAACGACGCGC | 20 | 5577 |
| HSV1-UL30-2573 | + | AUGCCGCGGAACGACGCGCC | 20 | 5578 |
| HSV1-UL30-2574 | + | UGCCGCGGAACGACGCGCCC | 20 | 5579 |
| HSV1-UL30-2575 | + | GACGCGCCCGGGGACUCGCG | 20 | 5580 |
| HSV1-UL30-2576 | + | GGGCCGCGGCCAUGCGCUCG | 20 | 5581 |
| HSV1-UL30-2577 | + | CAUGCGCUCGCAGAGAUCUC | 20 | 5582 |
| HSV1-UL30-2578 | + | AUGCGCUCGCAGAGAUCUCG | 20 | 5583 |
| HSV1-UL30-2579 | + | UACUGCCGCGUGCCGUAAAC | 20 | 5584 |
| HSV1-UL30-2580 | + | AACGGCCACCCGGUGGCCUU | 20 | 5585 |
| HSV1-UL30-2581 | + | ACGGCCACCCGGUGGCCUUC | 20 | 5586 |
| HSV1-UL30-2582 | + | UGGCCUUCCGGAGUCAGGCC | 20 | 5587 |
| HSV1-UL30-2583 | + | GGCCUUCCGGAGUCAGGCCC | 20 | 5588 |
| HSV1-UL30-2584 | + | GCUCUAUGCAACAUUCG | 17 | 5589 |
| HSV1-UL30-2585 | + | CGCCGGCACCCACCGCC | 17 | 5590 |
| HSV1-UL30-2586 | + | GCCCCGAACCCUGCGGU | 17 | 5591 |
| HSV1-UL30-2587 | + | CCCCGAACCCUGCGGUC | 17 | 5592 |
| HSV1-UL30-2588 | + | CCGCGCGGCCACGUCGU | 17 | 5593 |
| HSV1-UL30-2589 | + | CGCGCGGCCACGUCGUC | 17 | 5594 |
| HSV1-UL30-2590 | + | GCGCGGCCACGUCGUCC | 17 | 5595 |
| HSV1-UL30-2591 | + | CGCGGCCACGUCGUCCG | 17 | 5596 |
| HSV1-UL30-2592 | + | CCGGGGGGUGCCACACU | 17 | 5597 |
| HSV1-UL30-2593 | + | CGGGGGGUGCCACACUU | 17 | 5598 |
| HSV1-UL30-2594 | + | GGGGGGUGCCACACUUC | 17 | 5599 |
| HSV1-UL30-2595 | + | UUGGCGUUAUUCCCAAA | 17 | 5600 |
| HSV1-UL30-2596 | + | UAUUCCCAAACAGGGCC | 17 | 5601 |
| HSV1-UL30-2597 | + | CACGCCGCCCCCAACAG | 17 | 5602 |
| HSV1-UL30-1438 | + | ACGCCGCCCCCAACAGG | 17 | 4376 |
| HSV1-UL30-2599 | + | CGCCGCCCCCAACAGGU | 17 | 5603 |
| HSV1-UL30-2600 | + | CCGCCCCCAACAGGUGG | 17 | 5604 |
| HSV1-UL30-2601 | + | AAGUAAUAGUCCGUGUU | 17 | 5605 |
| HSV1-UL30-2602 | + | GUGUUCAGGGCGACGCC | 17 | 5606 |
| HSV1-UL30-2603 | + | CGUGGGCAAUGGCGUAU | 17 | 5607 |
| HSV1-UL30-2604 | + | GUGGGCAAUGGCGUAUG | 17 | 5608 |
| HSV1-UL30-2605 | + | CGGGAUCCUCGGCCAGC | 17 | 5609 |
| HSV1-UL30-2606 | + | UCGGACACCAGCAGCUU | 17 | 5610 |
| HSV1-UL30-2607 | + | CGGACACCAGCAGCUUG | 17 | 5611 |
| HSV1-UL30-2608 | + | CCAGCAGCUUGCGGGGC | 17 | 5612 |
| HSV1-UL30-2609 | + | GGGCUUGGACGCGCCUC | 17 | 5613 |
| HSV1-UL30-2610 | + | GGCUUGGACGCGCCUCC | 17 | 5614 |
| HSV1-UL30-2611 | + | GCUUGGACGCGCCUCCC | 17 | 5615 |
| HSV1-UL30-2612 | + | CUUGGACGCGCCUCCCG | 17 | 5616 |
| HSV1-UL30-2613 | + | GCAGGCGACGGCGUCUC | 17 | 5617 |
| HSV1-UL30-2614 | + | CAGGCGACGGCGUCUCC | 17 | 5618 |
| HSV1-UL30-2615 | + | AGGCGACGGCGUCUCCC | 17 | 5619 |
| HSV1-UL30-2616 | + | CUCCCGGGGGCGCUUGG | 17 | 5620 |
| HSV1-UL30-2617 | + | UCCCGGGGGCGCUUGGC | 17 | 5621 |
| HSV1-UL30-2618 | + | CCCGGGGGCGCUUGGCC | 17 | 5622 |
| HSV1-UL30-2619 | + | CCGGGGGCGCUUGGCCG | 17 | 5623 |
| HSV1-UL30-2620 | + | GGGGGCGCUUGGCCGGG | 17 | 5624 |
| HSV1-UL30-2621 | + | CGCUUGGCCGGGGAGGG | 17 | 5625 |
| HSV1-UL30-2622 | + | CCGGGGAGGGCAGGGCC | 17 | 5626 |
| HSV1-UL30-1473 | + | CGGGGAGGGCAGGGCCG | 17 | 4411 |
| HSV1-UL30-1474 | + | GGGGAGGGCAGGGCCGC | 17 | 4412 |
| HSV1-UL30-1475 | + | GGGAGGGCAGGGCCGCG | 17 | 4413 |
| HSV1-UL30-1476 | + | GGAGGGCAGGGCCGCGG | 17 | 4414 |
| HSV1-UL30-1477 | + | GAGGGCAGGGCCGCGGG | 17 | 4415 |
| HSV1-UL30-2628 | + | GCAGGGCCGCGGGGGGG | 17 | 5627 |
| HSV1-UL30-2629 | + | GGGGGCGGGCUCGUCCC | 17 | 5628 |
| HSV1-UL30-2630 | + | GGGGCGGGCUCGUCCCC | 17 | 5629 |
| HSV1-UL30-2631 | + | GCGGCGGCGUCUAGCUC | 17 | 5630 |
| HSV1-UL30-2632 | + | CGGCGGCGUCUAGCUCG | 17 | 5631 |
| HSV1-UL30-2633 | + | GCGGCGUCUAGCUCGCG | 17 | 5632 |
| HSV1-UL30-2634 | + | ACCGUCUCCUCUACCUC | 17 | 5633 |
| HSV1-UL30-2635 | + | UCCUCUACCUCGCGGGU | 17 | 5634 |
| HSV1-UL30-2636 | + | CUGGGCCACGAUCACGU | 17 | 5635 |
| HSV1-UL30-2637 | + | UGGGCCACGAUCACGUA | 17 | 5636 |
| HSV1-UL30-2638 | + | ACGGGAUCCGGUCCUUG | 17 | 5637 |
| HSV1-UL30-2639 | + | GAUCCGGUCCUUGAUGG | 17 | 5638 |
| HSV1-UL30-2640 | + | AUCCGGUCCUUGAUGGA | 17 | 5639 |
| HSV1-UL30-2641 | + | GACGGGACCUGCGCGCG | 17 | 5640 |
| HSV1-UL30-2642 | + | CCUGCGCGCGGCGGGCC | 17 | 5641 |
| HSV1-UL30-2643 | + | UUGUAAUACACCGUCAG | 17 | 5642 |
| HSV1-UL30-2644 | + | CUUGUUGGUGUACGCGC | 17 | 5643 |
| HSV1-UL30-2645 | + | GUCUGCUCAGUUCGGCG | 17 | 5644 |
| HSV1-UL30-2646 | + | CUGCUCAGUUCGGCGGU | 17 | 5645 |
| HSV1-UL30-2647 | + | GCGGUGAGGACAAAGUC | 17 | 5646 |
| HSV1-UL30-2648 | + | GUCCUGGAUGUCCCUCU | 17 | 5647 |
| HSV1-UL30-2649 | + | GGGUCGGUGAUGCGCCG | 17 | 5648 |
| HSV1-UL30-2650 | + | UGCGCCGAUGGGCGUCU | 17 | 5649 |
| HSV1-UL30-2651 | + | CGCCGAUGGGCGUCUAC | 17 | 5650 |
| HSV1-UL30-2652 | + | CGUCUACGAGGACGGCC | 17 | 5651 |
| HSV1-UL30-2653 | + | CGAACGCCUGCAGUCCC | 17 | 5652 |
| HSV1-UL30-2654 | + | GCCUGCAGUCCCUCGGG | 17 | 5653 |
| HSV1-UL30-2655 | + | CCUGCAGUCCCUCGGGC | 17 | 5654 |
| HSV1-UL30-2656 | + | GCGCCAGCCACUCCUCC | 17 | 5655 |
| HSV1-UL30-2657 | + | CGCCAGCCACUCCUCCG | 17 | 5656 |
| HSV1-UL30-2658 | + | CUAACGCGGCGGCCGCU | 17 | 5657 |
| HSV1-UL30-2659 | + | UAACGCGGCGGCCGCUC | 17 | 5658 |
| HSV1-UL30-2660 | + | UAAAACAGCAGGUCGAC | 17 | 5659 |
| HSV1-UL30-2661 | + | GCAGGUCGACCAGGGCC | 17 | 5660 |
| HSV1-UL30-2662 | + | CAGGUCGACCAGGGCCC | 17 | 5661 |
| HSV1-UL30-2663 | + | CCAGAUCCACGCCCUUG | 17 | 5662 |
| HSV1-UL30-2664 | + | CGAUCAGCAGCAGCUUG | 17 | 5663 |
| HSV1-UL30-2665 | + | UGAACGUCUUUUCGCAC | 17 | 5664 |
| HSV1-UL30-2666 | + | UUUCGCACUCGAGUUUG | 17 | 5665 |
| HSV1-UL30-2667 | + | UUCGCACUCGAGUUUGA | 17 | 5666 |
| HSV1-UL30-2668 | + | UCGCACUCGAGUUUGAU | 17 | 5667 |
| HSV1-UL30-2669 | + | CGCACUCGAGUUUGAUG | 17 | 5668 |
| HSV1-UL30-2670 | + | UCGAGUUUGAUGGGGGG | 17 | 5669 |
| HSV1-UL30-2671 | + | GGGCAGAAACAGCGCGC | 17 | 5670 |
| HSV1-UL30-2672 | + | CCGUCAGCCCGGCGGCC | 17 | 5671 |
| HSV1-UL30-2673 | + | CGCGGCACAGCACAAAG | 17 | 5672 |
| HSV1-UL30-1554 | + | GCGGCACAGCACAAAGA | 17 | 4492 |
| HSV1-UL30-2675 | + | CCCCGUAGAUGAUGCGC | 17 | 5673 |
| HSV1-UL30-2676 | + | CCCGUAGAUGAUGCGCA | 17 | 5674 |
| HSV1-UL30-2677 | + | AGAUGAUGCGCAUGGAA | 17 | 5675 |
| HSV1-UL30-2678 | + | UGCGCAUGGAAUAGGGC | 17 | 5676 |
| HSV1-UL30-2679 | + | GCGCAUGGAAUAGGGCC | 17 | 5677 |
| HSV1-UL30-2680 | + | CGCAUGGAAUAGGGCCC | 17 | 5678 |
| HSV1-UL30-2681 | + | GCGCAUGUCGGCCGCCU | 17 | 5679 |
| HSV1-UL30-2682 | + | CGCAUGUCGGCCGCCUC | 17 | 5680 |
| HSV1-UL30-2683 | + | GCAUGUCGGCCGCCUCC | 17 | 5681 |
| HSV1-UL30-2684 | + | GCCUCCGGGAAAUCGGC | 17 | 5682 |
| HSV1-UL30-2685 | + | CCUCCGGGAAAUCGGCC | 17 | 5683 |
| HSV1-UL30-2686 | + | AAUCGGCCAGGAGCUGU | 17 | 5684 |
| HSV1-UL30-2687 | + | AAGGCCGCCCAGCGCGC | 17 | 5685 |
| HSV1-UL30-2688 | + | CGCGCGUGGACGUACUC | 17 | 5686 |
| HSV1-UL30-2689 | + | GGACGUACUCGCGGGUC | 17 | 5687 |
| HSV1-UL30-2690 | + | GCAACGUGCAGGCACGG | 17 | 5688 |
| HSV1-UL30-2691 | + | CAACGUGCAGGCACGGC | 17 | 5689 |
| HSV1-UL30-2692 | + | GUCCGUGCUGCACUCCC | 17 | 5690 |
| HSV1-UL30-2693 | + | UCCCGUGAACCCGUACA | 17 | 5691 |
| HSV1-UL30-2694 | + | GCGGCCUGCUGCUUGUC | 17 | 5692 |
| HSV1-UL30-2695 | + | CGGCCUGCUGCUUGUCC | 17 | 5693 |
| HSV1-UL30-2696 | + | CCAGGAGCACGGCCUCC | 17 | 5694 |
| HSV1-UL30-2697 | + | CAGGAGCACGGCCUCCU | 17 | 5695 |
| HSV1-UL30-2698 | + | GCCUCCUCGGGGCUGCU | 17 | 5696 |
| HSV1-UL30-2699 | + | CCUCCUCGGGGCUGCUC | 17 | 5697 |
| HSV1-UL30-2700 | + | CUCCUCGGGGCUGCUCU | 17 | 5698 |
| HSV1-UL30-2701 | + | UCCUCGGGGCUGCUCUG | 17 | 5699 |
| HSV1-UL30-2702 | + | GCUGCUCUGGGGAAUCC | 17 | 5700 |
| HSV1-UL30-2703 | + | CUCUGGGGAAUCCGCGA | 17 | 5701 |
| HSV1-UL30-2704 | + | GGAUCUGCUUUCGCAUG | 17 | 5702 |
| HSV1-UL30-2705 | + | AUGGCGAGCCAGUCCCG | 17 | 5703 |
| HSV1-UL30-2706 | + | UGGCGAGCCAGUCCCGC | 17 | 5704 |
| HSV1-UL30-2707 | + | GCGAGCCAGUCCCGCAG | 17 | 5705 |
| HSV1-UL30-2708 | + | AGUCCCGCAGGAGGAUG | 17 | 5706 |
| HSV1-UL30-2709 | + | UCCCGCAGGAGGAUGCU | 17 | 5707 |
| HSV1-UL30-2710 | + | CCCGCAGGAGGAUGCUG | 17 | 5708 |
| HSV1-UL30-2711 | + | AGGAGGCUCUCUCGCAC | 17 | 5709 |
| HSV1-UL30-2712 | + | CUCGCACGUGAGCCUUG | 17 | 5710 |
| HSV1-UL30-2713 | + | GCACGUGAGCCUUGACG | 17 | 5711 |
| HSV1-UL30-2714 | + | GCCACUGCGUCGGCCCU | 17 | 5712 |
| HSV1-UL30-2715 | + | CCACUGCGUCGGCCCUC | 17 | 5713 |
| HSV1-UL30-2716 | + | CACUGCGUCGGCCCUCA | 17 | 5714 |
| HSV1-UL30-2717 | + | CUGCGUCGGCCCUCAGG | 17 | 5715 |
| HSV1-UL30-2718 | + | CCCUCAGGGAGAGCGUG | 17 | 5716 |
| HSV1-UL30-2719 | + | GUGCUGAAGCACAGGUU | 17 | 5717 |
| HSV1-UL30-2720 | + | AAGCACAGGUUGUGGGC | 17 | 5718 |
| HSV1-UL30-2721 | + | UGUGGGCCUGGAUGAUG | 17 | 5719 |
| HSV1-UL30-2722 | + | GUGGGCCUGGAUGAUGC | 17 | 5720 |
| HSV1-UL30-2723 | + | GGUACAGGCUGGCAAAG | 17 | 5721 |
| HSV1-UL30-2724 | + | CAAAGUCGAACACCACC | 17 | 5722 |
| HSV1-UL30-2725 | + | AAAGUCGAACACCACCA | 17 | 5723 |
| HSV1-UL30-2726 | + | ACCACCACGGGGUUCAC | 17 | 5724 |
| HSV1-UL30-2727 | + | CGGGGUUCACGUGAAAC | 17 | 5725 |
| HSV1-UL30-2728 | + | GGGGUUCACGUGAAACC | 17 | 5726 |
| HSV1-UL30-2729 | + | UCACGUGAAACCCGGAA | 17 | 5727 |
| HSV1-UL30-2730 | + | CACGUGAAACCCGGAAG | 17 | 5728 |
| HSV1-UL30-2731 | + | AACCCGGAAGUGGGGUC | 17 | 5729 |
| HSV1-UL30-2732 | + | GGCCGCUCCUCGUCCUC | 17 | 5730 |
| HSV1-UL30-2733 | + | GUCCUCCCGGGCUGCGG | 17 | 5731 |
| HSV1-UL30-2734 | + | GGGCUGCGGCCGGACGC | 17 | 5732 |
| HSV1-UL30-2735 | + | GCGCCCCUAAAUCGCCC | 17 | 5733 |
| HSV1-UL30-2736 | + | CGCCCCUGGGUGUCCGG | 17 | 5734 |
| HSV1-UL30-2737 | + | AGCAGGCACGUAAAGAC | 17 | 5735 |
| HSV1-UL30-2738 | + | UGGCCGUCGUAGAUGGU | 17 | 5736 |
| HSV1-UL30-2739 | + | CGCCAAGCGCGCGACGG | 17 | 5737 |
| HSV1-UL30-2740 | + | CCAAGCGCGCGACGGCC | 17 | 5738 |
| HSV1-UL30-2741 | + | ACGGCCGAGAGCUCCAG | 17 | 5739 |
| HSV1-UL30-2742 | + | CGGCCGAGAGCUCCAGA | 17 | 5740 |
| HSV1-UL30-2743 | + | AACAGCUGGCCCACCAG | 17 | 5741 |
| HSV1-UL30-2744 | + | ACAGCUGGCCCACCAGC | 17 | 5742 |
| HSV1-UL30-2745 | + | CAGCUGGCCCACCAGCA | 17 | 5743 |
| HSV1-UL30-2746 | + | CGAUCACCCCGCGUUGC | 17 | 5744 |
| HSV1-UL30-2747 | + | GCCCGGCGGCGUAGUAG | 17 | 5745 |
| HSV1-UL30-2748 | + | CCCGGCGGCGUAGUAGG | 17 | 5746 |
| HSV1-UL30-2749 | + | CCGGCGGCGUAGUAGGC | 17 | 5747 |
| HSV1-UL30-2750 | + | UCCUUCUUCUUGUCCUU | 17 | 5748 |
| HSV1-UL30-2751 | + | CGGCUUCGGCCACGGCG | 17 | 5749 |
| HSV1-UL30-2752 | + | GGCGUUGAGCUUGUAGC | 17 | 5750 |
| HSV1-UL30-2753 | + | CGUUGAGCUUGUAGCUC | 17 | 5751 |
| HSV1-UL30-2754 | + | UUUAUCUUGCUGCGCUU | 17 | 5752 |
| HSV1-UL30-2755 | + | UUAUCUUGCUGCGCUUC | 17 | 5753 |
| HSV1-UL30-2756 | + | UGGCCUAUGUCCCACAC | 17 | 5754 |
| HSV1-UL30-2757 | + | AUGCGGCCGUACCCGUC | 17 | 5755 |
| HSV1-UL30-2758 | + | UGCGGCCGUACCCGUCC | 17 | 5756 |
| HSV1-UL30-2759 | + | GCGGCCGUACCCGUCCA | 17 | 5757 |
| HSV1-UL30-2760 | + | CGGCCGUACCCGUCCAG | 17 | 5758 |
| HSV1-UL30-2761 | + | CCGUCAGCUUGGCCAGC | 17 | 5759 |
| HSV1-UL30-2762 | + | UCAGCUUGGCCAGCAAG | 17 | 5760 |
| HSV1-UL30-2763 | + | CCAGCAAGAAGGGCCAG | 17 | 5761 |
| HSV1-UL30-2764 | + | UGAUGUUGUACCCGGUC | 17 | 5762 |
| HSV1-UL30-2765 | + | UGUACCCGGUCACGAAC | 17 | 5763 |
| HSV1-UL30-2766 | + | GUACCCGGUCACGAACU | 17 | 5764 |
| HSV1-UL30-2767 | + | GGGCCGUACUGUUUCAC | 17 | 5765 |
| HSV1-UL30-2768 | + | ACUGUUUCACAAGGGUC | 17 | 5766 |
| HSV1-UL30-2769 | + | UGAAGGCCAACAGCAUC | 17 | 5767 |
| HSV1-UL30-2770 | + | GCAUCUCGAAUUCGCUG | 17 | 5768 |
| HSV1-UL30-2771 | + | AAUUCGCUGUCGAAUUC | 17 | 5769 |
| HSV1-UL30-2772 | + | UGUCGAAUUCCAGAACC | 17 | 5770 |
| HSV1-UL30-2773 | + | AUUCCAGAACCACGGGC | 17 | 5771 |
| HSV1-UL30-2774 | + | GCCGCCAGCUCGUUCAG | 17 | 5772 |
| HSV1-UL30-2775 | + | CCGCCAGCUCGUUCAGG | 17 | 5773 |
| HSV1-UL30-2776 | + | GCUCGUUCAGGUGGGAU | 17 | 5774 |
| HSV1-UL30-2777 | + | CUCGUUCAGGUGGGAUU | 17 | 5775 |
| HSV1-UL30-2778 | + | UCGUUCAGGUGGGAUUC | 17 | 5776 |
| HSV1-UL30-2779 | + | CGUUCAGGUGGGAUUCG | 17 | 5777 |
| HSV1-UL30-2780 | + | GGGAUUCGGGGAGGUCG | 17 | 5778 |
| HSV1-UL30-2781 | + | GGAUUCGGGGAGGUCGC | 17 | 5779 |
| HSV1-UL30-2782 | + | CGGGGAGGUCGCAGGAA | 17 | 5780 |
| HSV1-UL30-2783 | + | GAGGUCGCAGGAACCGA | 17 | 5781 |
| HSV1-UL30-2784 | + | CAGGAACCGAGCGAAAA | 17 | 5782 |
| HSV1-UL30-1694 | + | AGGAACCGAGCGAAAAC | 17 | 4632 |
| HSV1-UL30-2786 | + | GAACCGAGCGAAAACAG | 17 | 5783 |
| HSV1-UL30-2787 | + | AACAGGAGGACGUGCUC | 17 | 5784 |
| HSV1-UL30-2788 | + | CGUGCUCCAGGGCGGUG | 17 | 5785 |
| HSV1-UL30-2789 | + | CGGUGGUGGACAGGUCG | 17 | 5786 |
| HSV1-UL30-2790 | + | ACAGGUCGUAGAGCAGA | 17 | 5787 |
| HSV1-UL30-2791 | + | UAGAGCAGACAGGAUAU | 17 | 5788 |
| HSV1-UL30-2792 | + | CUGGAUGACCAGGUCCU | 17 | 5789 |
| HSV1-UL30-2793 | + | CUCCGGGUGCCCGGCCA | 17 | 5790 |
| HSV1-UL30-2794 | + | UCCGGGUGCCCGGCCAC | 17 | 5791 |
| HSV1-UL30-2795 | + | CCGCCUUGCAUUCGAUA | 17 | 5792 |
| HSV1-UL30-2796 | + | AUUCGAUAUCGAAGCAC | 17 | 5793 |
| HSV1-UL30-2797 | + | AGUUAAACUCGACGUCG | 17 | 5794 |
| HSV1-UL30-2798 | + | CGACGUCGCUGGAUGUC | 17 | 5795 |
| HSV1-UL30-2799 | + | GGAUGUCCCGAAGGCCA | 17 | 5796 |
| HSV1-UL30-2800 | + | GAUGUCCCGAAGGCCAU | 17 | 5797 |
| HSV1-UL30-2801 | + | GCCAUCGGGGCCGCCGG | 17 | 5798 |
| HSV1-UL30-2802 | + | UGUUGUUCCGGCCCGGU | 17 | 5799 |
| HSV1-UL30-2803 | + | GUUUGAGACGGUACCAG | 17 | 5800 |
| HSV1-UL30-2804 | + | GGUACCAGCCGAAGGUG | 17 | 5801 |
| HSV1-UL30-2805 | + | AGCCGAAGGUGACGAAC | 17 | 5802 |
| HSV1-UL30-2806 | + | GCCGAAGGUGACGAACC | 17 | 5803 |
| HSV1-UL30-2807 | + | ACGAACCCGGGGUUGUC | 17 | 5804 |
| HSV1-UL30-2808 | + | ACCCGGGGUUGUCCAGG | 17 | 5805 |
| HSV1-UL30-2809 | + | GGGUUGUCCAGGAUGAA | 17 | 5806 |
| HSV1-UL30-2810 | + | CUCGUACUUCUUGAUGG | 17 | 5807 |
| HSV1-UL30-2811 | + | ACUUCUUGAUGGCCGGG | 17 | 5808 |
| HSV1-UL30-2812 | + | GACAGCACACGCCCGCU | 17 | 5809 |
| HSV1-UL30-2813 | + | ACGUAGACGCGGUAAAA | 17 | 5810 |
| HSV1-UL30-2814 | + | AGACGCGGUAAAACAGA | 17 | 5811 |
| HSV1-UL30-2815 | + | GACGCGGUAAAACAGAG | 17 | 5812 |
| HSV1-UL30-2816 | + | GCUCCACCACCUCCGCC | 17 | 5813 |
| HSV1-UL30-2817 | + | CCGCCUCGAAGUGGUCC | 17 | 5814 |
| HSV1-UL30-2818 | + | CGCCUCGAAGUGGUCCG | 17 | 5815 |
| HSV1-UL30-2819 | + | UGGUCCGCGGAGAUGCC | 17 | 5816 |
| HSV1-UL30-2820 | + | GGUCCGCGGAGAUGCCG | 17 | 5817 |
| HSV1-UL30-2821 | + | GCCGCGGAACGACGCGC | 17 | 5818 |
| HSV1-UL30-1747 | + | CCGCGGAACGACGCGCC | 17 | 4685 |
| HSV1-UL30-1748 | + | CGCGGAACGACGCGCCC | 17 | 4686 |
| HSV1-UL30-2824 | + | GCGCCCGGGGACUCGCG | 17 | 5819 |
| HSV1-UL30-2825 | + | CCGCGGCCAUGCGCUCG | 17 | 5820 |
| HSV1-UL30-2826 | + | GCGCUCGCAGAGAUCUC | 17 | 5821 |
| HSV1-UL30-2827 | + | CGCUCGCAGAGAUCUCG | 17 | 5822 |
| HSV1-UL30-2828 | + | UGCCGCGUGCCGUAAAC | 17 | 5823 |
| HSV1-UL30-2829 | + | GGCCACCCGGUGGCCUU | 17 | 5824 |
| HSV1-UL30-2830 | + | GCCACCCGGUGGCCUUC | 17 | 5825 |
| HSV1-UL30-2831 | + | CCUUCCGGAGUCAGGCC | 17 | 5826 |
| HSV1-UL30-2832 | + | CUUCCGGAGUCAGGCCC | 17 | 5827 |

[0720] Table 2F provides exemplary targeting domains for knocking out the UL30 gene selected according to the first tier parameters. The targeting domains are selected based on location within first 500 bp of the coding sequence of the UL30 gene. It is contemplated herein that the targeting domain hybridizes to the target domain through complementary base pairing. Any of the targeting domains in the table can be used with a N. meningitidis Cas9 molecule that gives double stranded cleavage. Any of the targeting domains in the table can be used with a N. meningitidis Cas9 single-stranded break nucleases (nickases). In an embodiment, dual targeting is used to create two nicks on opposite DNA strands by using N. meningitidis Cas9 nickases with two targeting domains that are complementary to opposite DNA strands, e.g., a gRNA comprising any minus strand targeting domain may be paired any gRNA comprising a plus strand targeting domain provided that the two gRNAs are oriented on the DNA such that PAMs face outward and the distance between the 5′ ends of the gRNAs is 0-50 bp.

TABLE 2F

| | | | Target | |
|---|---|---|---|---|
| 1st Tier | DNA | | Site | |
| gRNA Name | Strand | Targeting Domain | Length | Seq ID |
| HSV1- | − | ACUAUAGCGAAUGCGAUGAA | 20 | 5828 |
| UL30-419 | | | | |
| HSV1- | − | AUAGCGAAUGCGAUGAA | 17 | 5829 |
| UL30-420 | | | | |

[0721] Table 2G provides targeting domains for knocking out the UL30 gene selected according to the second tier parameters. The targeting domains are selected based on location within the coding sequence (but downstream of the first 500 bp) of the UL30 gene. It is contemplated herein that the targeting domain hybridizes to the target domain through complementary base pairing. Any of the targeting domains in the table can be used with a N. meningitidis Cas9 molecule that gives double stranded cleavage. Any of the targeting domains in the table can be used with a N. meningitidis Cas9 single-stranded break nucleases (nickases). In an embodiment, dual targeting is used to create two nicks on opposite DNA strands by using N. meningitidis Cas9 nickases with two targeting domains that are complementary to opposite DNA strands, e.g., a gRNA comprising any minus strand targeting domain may be paired any gRNA comprising a plus strand targeting domain provided that the two gRNAs are oriented on the DNA such that PAMs face outward and the distance between the 5′ ends of the RNAs is 0-50 bp.

TABLE 2G

| 2nd Tier | DNA | | Target Site | |
|---|---|---|---|---|
| gRNA Name | Strand | Targeting Domain | Length | Seq ID |
| HSV1-UL30-1857 | − | CAUGGUGAACAUCGACAUGU | 20 | 4907 |
| HSV1-UL30-2834 | − | GUGAUCGGCGAGUACUGCAU | 20 | 5830 |
| HSV1-UL30-2835 | − | UUAUUCUGCCGGACACCCAG | 20 | 5831 |
| HSV1-UL30-2836 | − | CAUGCGAAAGCAGAUCCGCU | 20 | 5832 |
| HSV1-UL30-2837 | − | GCGGCCUUCGAACAGCUCCU | 20 | 5833 |
| HSV1-UL30-2139 | − | GGUGAACAUCGACAUGU | 17 | 5172 |
| HSV1-UL30-2839 | − | AUCGGCGAGUACUGCAU | 17 | 5834 |
| HSV1-UL30-2840 | − | UUCUGCCGGACACCCAG | 17 | 5835 |
| HSV1-UL30-2841 | − | GCGAAAGCAGAUCCGCU | 17 | 5836 |
| HSV1-UL30-2842 | − | GCCUUCGAACAGCUCCU | 17 | 5837 |
| HSV1-UL30-2525 | + | CUGGCCGCCAGCUCGUUCAG | 20 | 5531 |
| HSV1-UL30-2774 | + | GCCGCCAGCUCGUUCAG | 17 | 5772 |

[0722] Table 3A provides exemplary targeting domains for knocking out the UL48 gene selected according to first tier parameters. The targeting domains are selected based on location within the first 500 bp of the coding sequence of the UL48 gene and orthogonality against the human genome. It is contemplated herein that the targeting domain hybridizes to the target domain through complementary base pairing. Any of the targeting domains in the table can be used with a S. pyogenes Cas9 molecule that gives double stranded cleavage. Any of the targeting domains in the table can be used with a S. pyogenes Cas9 single-stranded break nucleases (nickases). In an embodiment, dual targeting is used to create two nicks on opposite DNA strands by using S. pyogenes Cas9 nickases with two targeting domains that are complementary to opposite DNA strands, e.g., a gRNA comprising any minus strand targeting domain may be paired any gRNA comprising a plus strand targeting domain provided that the two gRNAs are oriented on the DNA such that PAMs face outward and the distance between the 5′ ends of the gRNAs is 0-50 bp

TABLE 3A

| 1st Tier | | | Target Site | Seq |
|---|---|---|---|---|
| gRNA Name | DNA Strand | Targeting Domain | Length | ID |
| HSV1-UL48-8 | − | CGGGGGUCCCAAAAACACCC | 20 | 5838 |
| HSV1-UL48-9 | − | GGGUCCCAAAAACACCCCGG | 20 | 5839 |
| HSV1-UL48-10 | − | GGCCCCCCCGCUGUACGCAA | 20 | 5840 |
| HSV1-UL48-11 | − | GCCCCCCCGCUGUACGCAAC | 20 | 5841 |
| HSV1-UL48-12 | − | CCCCCCCGCUGUACGCAACG | 20 | 5842 |
| HSV1-UL48-13 | − | CGCAACGGGGCGCCUGAGCC | 20 | 5843 |
| HSV1-UL48-14 | − | UAACCGUCUCCUCGACGACU | 20 | 5844 |
| HSV1-UL48-15 | − | AACCGUCUCCUCGACGACUU | 20 | 5845 |
| HSV1-UL48-16 | − | CGACGACUUGGGCUUUAGCG | 20 | 5846 |
| HSV1-UL48-17 | − | GACGACUUGGGCUUUAGCGC | 20 | 5847 |
| HSV1-UL48-126 | − | GGGUCCCAAAAACACCC | 17 | 5848 |
| HSV1-UL48-127 | − | UCCCAAAAACACCCCGG | 17 | 5849 |
| HSV1-UL48-128 | − | CCCCCCGCUGUACGCAA | 17 | 5850 |
| HSV1-UL48-129 | − | CCCCCGCUGUACGCAAC | 17 | 5851 |
| HSV1-UL48-130 | − | CCCCGCUGUACGCAACG | 17 | 5852 |
| HSV1-UL48-131 | − | AACGGGGCGCCUGAGCC | 17 | 5853 |
| HSV1-UL48-132 | − | CCGUCUCCUCGACGACU | 17 | 5854 |
| HSV1-UL48-133 | − | CGUCUCCUCGACGACUU | 17 | 5855 |
| HSV1-UL48-134 | − | CGACUUGGGCUUUAGCG | 17 | 5856 |
| HSV1-UL48-135 | − | GACUUGGGCUUUAGCGC | 17 | 5857 |
| HSV1-UL48-19 | − | CAUGCUCGAUACCUGGAACG | 20 | 5858 |
| HSV1-UL48-20 | − | CUGGAACGAGGAUCUGUUUU | 20 | 5859 |
| HSV1-UL48-21 | − | CGACCAACGCCGACCUGUAC | 20 | 5860 |
| HSV1-UL48-22 | − | GACCAACGCCGACCUGUACC | 20 | 5861 |
| HSV1-UL48-23 | − | AUCAACGCUGCCCAGCGAUG | 20 | 5862 |
| HSV1-UL48-24 | − | AACGCUGCCCAGCGAUGUGG | 20 | 5863 |
| HSV1-UL48-25 | − | UGCCCAGCGAUGUGGUGGAA | 20 | 5864 |
| HSV1-UL48-137 | − | GCUCGAUACCUGGAACG | 17 | 5865 |
| HSV1-UL48-138 | − | GAACGAGGAUCUGUUUU | 17 | 5866 |
| HSV1-UL48-139 | − | CCAACGCCGACCUGUAC | 17 | 5867 |
| HSV1-UL48-140 | − | CAACGCCGACCUGUACC | 17 | 5868 |
| HSV1-UL48-141 | − | AACGCUGCCCAGCGAUG | 17 | 5869 |
| HSV1-UL48-142 | − | GCUGCCCAGCGAUGUGG | 17 | 5870 |
| HSV1-UL48-143 | − | CCAGCGAUGUGGUGGAA | 17 | 5871 |
| HSV1-UL48-31 | − | CAUUCGCGCCCACGGCGACG | 20 | 5872 |
| HSV1-UL48-32 | − | CGUGGCCUUCCCUACGCUUC | 20 | 5873 |
| HSV1-UL48-33 | − | ACGCUUCCGGCCACCCGCGA | 20 | 5874 |
| HSV1-UL48-34 | − | CCGGCCACCCGCGACGGCCU | 20 | 5875 |
| HSV1-UL48-35 | − | CGGCCACCCGCGACGGCCUC | 20 | 5876 |
| HSV1-UL48-36 | − | GUUUCUUCCACGCCGAGCUA | 20 | 5877 |
| HSV1-UL48-37 | − | UUUCUUCCACGCCGAGCUAC | 20 | 5878 |
| HSV1-UL48-38 | − | UCCACGCCGAGCUACGGGCG | 20 | 5879 |
| HSV1-UL48-39 | − | CCACGCCGAGCUACGGGCGC | 20 | 5880 |
| HSV1-UL48-149 | − | UCGCGCCCACGGCGACG | 17 | 5881 |
| HSV1-UL48-150 | − | GGCCUUCCCUACGCUUC | 17 | 5882 |
| HSV1-UL48-151 | − | CUUCCGGCCACCCGCGA | 17 | 5883 |
| HSV1-UL48-152 | − | GCCACCCGCGACGGCCU | 17 | 5884 |
| HSV1-UL48-153 | − | CCACCCGCGACGGCCUC | 17 | 5885 |
| HSV1-UL48-154 | − | UCUUCCACGCCGAGCUA | 17 | 5886 |
| HSV1-UL48-155 | − | CUUCCACGCCGAGCUAC | 17 | 5887 |
| HSV1-UL48-156 | − | ACGCCGAGCUACGGGCG | 17 | 5888 |
| HSV1-UL48-157 | − | CGCCGAGCUACGGGCGC | 17 | 5889 |
| HSV1-UL48-41 | + | CUCCUCCCGCGCCCGUAGCU | 20 | 5890 |
| HSV1-UL48-43 | + | GCGCUUCGUAGUAGAGCCCG | 20 | 5891 |
| HSV1-UL48-45 | + | GUAGAGCCCGAGGCCGUCGC | 20 | 5892 |
| HSV1-UL48-159 | + | CUCCCGCGCCCGUAGCU | 17 | 5893 |
| HSV1-UL48-161 | + | CUUCGUAGUAGAGCCCG | 17 | 5894 |
| HSV1-UL48-163 | + | GAGCCCGAGGCCGUCGC | 17 | 5895 |
| HSV1-UL48-48 | + | UCGCGGGUGGCCGGAAGCGU | 20 | 5896 |
| HSV1-UL48-166 | + | CGGGUGGCCGGAAGCGU | 17 | 5897 |
| HSV1-UL48-51 | + | UAGGGAAGGCCACGUCGCCG | 20 | 5898 |
| HSV1-UL48-52 | + | AGGGAAGGCCACGUCGCCGU | 20 | 5899 |
| HSV1-UL48-53 | + | CGUGGGCGCGAAUGUCGAUU | 20 | 5900 |
| HSV1-UL48-54 | + | GUGGGCGCGAAUGUCGAUUU | 20 | 5901 |
| HSV1-UL48-169 | + | GGAAGGCCACGUCGCCG | 17 | 5902 |
| HSV1-UL48-170 | + | GAAGGCCACGUCGCCGU | 17 | 5903 |
| HSV1-UL48-171 | + | GGGCGCGAAUGUCGAUU | 17 | 5904 |
| HSV1-UL48-172 | + | GGCGCGAAUGUCGAUUU | 17 | 5905 |
| HSV1-UL48-58 | + | CCCCCAUUCCACCACAUCGC | 20 | 5906 |
| HSV1-UL48-176 | + | CCAUUCCACCACAUCGC | 17 | 5907 |
| HSV1-UL48-64 | + | CUCCCGGUACAGGUCGGCGU | 20 | 5908 |
| HSV1-UL48-65 | + | CGGUACAGGUCGGCGUUGGU | 20 | 5909 |
| HSV1-UL48-66 | + | CGAAAACAGAUCCUCGUUCC | 20 | 5910 |
| HSV1-UL48-67 | + | CUCGUUCCAGGUAUCGAGCA | 20 | 5911 |
| HSV1-UL48-68 | + | AUCGAGCAUGGUACAUAGCG | 20 | 5912 |
| HSV1-UL48-69 | + | UCGAGCAUGGUACAUAGCGC | 20 | 5913 |
| HSV1-UL48-70 | + | CGAGCAUGGUACAUAGCGCG | 20 | 5914 |
| HSV1-UL48-71 | + | CGCUAAAGCCCAAGUCGUCG | 20 | 5915 |
| HSV1-UL48-182 | + | CCGGUACAGGUCGGCGU | 17 | 5916 |
| HSV1-UL48-183 | + | UACAGGUCGGCGUUGGU | 17 | 5917 |
| HSV1-UL48-184 | + | AAACAGAUCCUCGUUCC | 17 | 5918 |
| HSV1-UL48-185 | + | GUUCCAGGUAUCGAGCA | 17 | 5919 |
| HSV1-UL48-186 | + | GAGCAUGGUACAUAGCG | 17 | 5920 |
| HSV1-UL48-187 | + | AGCAUGGUACAUAGCGC | 17 | 5921 |
| HSV1-UL48-188 | + | GCAUGGUACAUAGCGCG | 17 | 5922 |
| HSV1-UL48-189 | + | UAAAGCCCAAGUCGUCG | 17 | 5923 |
| HSV1-UL48-73 | + | CGUCGAGGAGACGGUUAAAG | 20 | 5924 |
| HSV1-UL48-74 | + | GUCGAGGAGACGGUUAAAGA | 20 | 5925 |
| HSV1-UL48-191 | + | CGAGGAGACGGUUAAAG | 17 | 5926 |
| HSV1-UL48-192 | + | GAGGAGACGGUUAAAGA | 17 | 5927 |
| HSV1-UL48-76 | + | GAGACGGUUAAAGAGGGCGG | 20 | 5928 |
| HSV1-UL48-77 | + | AGACGGUUAAAGAGGGCGGC | 20 | 5929 |
| HSV1-UL48-78 | + | GACGGUUAAAGAGGGCGGCG | 20 | 5930 |
| HSV1-UL48-79 | + | ACGGUUAAAGAGGGCGGCGG | 20 | 5931 |
| HSV1-UL48-80 | + | CGGUUAAAGAGGGCGGCGGG | 20 | 5932 |
| HSV1-UL48-194 | + | ACGGUUAAAGAGGGCGG | 17 | 5933 |
| HSV1-UL48-195 | + | CGGUUAAAGAGGGCGGC | 17 | 5934 |
| HSV1-UL48-196 | + | GGUUAAAGAGGGCGGCG | 17 | 5935 |
| HSV1-UL48-197 | + | GUUAAAGAGGGCGGCGG | 17 | 5936 |
| HSV1-UL48-198 | + | UUAAAGAGGGCGGCGGG | 17 | 5937 |
| HSV1-UL48-97 | + | GCGCCCCGUUGCGUACAGCG | 20 | 5938 |
| HSV1-UL48-98 | + | CGCCCCGUUGCGUACAGCGG | 20 | 5939 |
| HSV1-UL48-99 | + | GCCCCGUUGCGUACAGCGGG | 20 | 5940 |
| HSV1-UL48-100 | + | CCCCGUUGCGUACAGCGGGG | 20 | 5941 |
| HSV1-UL48-215 | + | CCCCGUUGCGUACAGCG | 17 | 5942 |
| HSV1-UL48-216 | + | CCCGUUGCGUACAGCGG | 17 | 5943 |
| HSV1-UL48-217 | + | CCGUUGCGUACAGCGGG | 17 | 5944 |
| HSV1-UL48-218 | + | CGUUGCGUACAGCGGGG | 17 | 5945 |
| HSV1-UL48-102 | + | CGUACAGCGGGGGGGCCGCC | 20 | 5946 |
| HSV1-UL48-103 | + | GUACAGCGGGGGGGCCGCCG | 20 | 5947 |
| HSV1-UL48-104 | + | GGGGGCCGCCGGGGUGUUUU | 20 | 5948 |
| HSV1-UL48-105 | + | GGGGCCGCCGGGGUGUUUUU | 20 | 5949 |
| HSV1-UL48-220 | + | ACAGCGGGGGGGCCGCC | 17 | 5950 |
| HSV1-UL48-221 | + | CAGCGGGGGGGCCGCCG | 17 | 5951 |
| HSV1-UL48-222 | + | GGCCGCCGGGGUGUUUU | 17 | 5952 |
| HSV1-UL48-223 | + | GCCGCCGGGGUGUUUUU | 17 | 5953 |
| HSV1-UL48-107 | + | GUGUUUUUGGGACCCCCGGC | 20 | 5954 |
| HSV1-UL48-225 | + | UUUUUGGGACCCCCGGC | 17 | 5955 |
| HSV1-UL48-108 | + | UGUUUUUGGGACCCCCGGCC | 20 | 5956 |
| HSV1-UL48-226 | + | UUUUGGGACCCCCGGCC | 17 | 5957 |
| HSV1-UL48-118 | + | CAAACAGCUCGUCGACCAAG | 20 | 5958 |
| HSV1-UL48-236 | + | ACAGCUCGUCGACCAAG | 17 | 5959 |

[0723] Table 3B provides exemplary targeting domains for knocking out the UL48 gene selected according to the second tier parameters. The targeting domains are selected based on location within the first 500 bp of the coding sequence of the UL48 gene. It is contemplated herein that the targeting domain hybridizes to the target domain through complementary base pairing. Any of the targeting domains in the table can be used with a S. pyogenes Cas9 molecule that gives double stranded cleavage. Any of the targeting domains in the table can be used with a S. pyogenes Cas9 single-stranded break nucleases (nickases). In an embodiment, dual targeting is used to create two nicks on opposite DNA strands by using S. pyogenes Cas9 nickases with two targeting domains that are complementary to opposite DNA strands, e.g., a gRNA comprising any minus strand targeting domain may be paired any gRNA comprising a plus strand targeting domain provided that the two gRNAs are oriented on the DNA such that PAMs face outward and the distance between the 5′ ends of the gRNAs is 0-50 bp.

TABLE 3B

| 2nd Tier | | | Target Site | Seq |
|---|---|---|---|---|
| gRNA Name | DNA Strand | Targeting Domain | Length | ID |
| HSV1-UL48-1 | − | GCUGUUUGCCGACAUGAACG | 20 | 5960 |
| HSV1-UL48-2 | − | UUUGCCGACAUGAACGCGGA | 20 | 5961 |
| HSV1-UL48-3 | − | UUCGCCACCGCCCCCCCGCC | 20 | 5962 |
| HSV1-UL48-4 | − | CCACCGCCCCCCCGCCCGGC | 20 | 5963 |
| HSV1-UL48-5 | − | CACCGCCCCCCCGCCCGGCC | 20 | 5964 |
| HSV1-UL48-6 | − | ACCGCCCCCCCGCCCGGCCG | 20 | 5965 |
| HSV1-UL48-7 | − | CCGCCCCCCCGCCCGGCCGG | 20 | 5966 |
| HSV1-UL48-18 | − | UAUGUACCAUGCUCGAUACC | 20 | 5967 |
| HSV1-UL48-26 | − | GCCCAGCGAUGUGGUGGAAU | 20 | 5968 |
| HSV1-UL48-27 | − | CCCAGCGAUGUGGUGGAAUG | 20 | 5969 |
| HSV1-UL48-28 | − | CCAGCGAUGUGGUGGAAUGG | 20 | 5970 |
| HSV1-UL48-29 | − | CAGCGAUGUGGUGGAAUGGG | 20 | 5971 |
| HSV1-UL48-30 | − | CAAAUCGACAUUCGCGCCCA | 20 | 5972 |
| HSV1-UL48-40 | − | CGCCGAGCUACGGGCGCGGG | 20 | 5973 |
| HSV1-UL48-119 | − | GUUUGCCGACAUGAACG | 17 | 5974 |
| HSV1-UL48-120 | − | GCCGACAUGAACGCGGA | 17 | 5975 |
| HSV1-UL48-121 | − | GCCACCGCCCCCCCGCC | 17 | 5976 |
| HSV1-UL48-122 | − | CCGCCCCCCCGCCCGGC | 17 | 5977 |
| HSV1-UL48-123 | − | CGCCCCCCCGCCCGGCC | 17 | 5978 |
| HSV1-UL48-124 | − | GCCCCCCCGCCCGGCCG | 17 | 5979 |
| HSV1-UL48-125 | − | CCCCCCCGCCCGGCCGG | 17 | 5980 |
| HSV1-UL48-136 | − | GUACCAUGCUCGAUACC | 17 | 5981 |
| HSV1-UL48-144 | − | CAGCGAUGUGGUGGAAU | 17 | 5982 |
| HSV1-UL48-145 | − | AGCGAUGUGGUGGAAUG | 17 | 5983 |
| HSV1-UL48-146 | − | GCGAUGUGGUGGAAUGG | 17 | 5984 |
| HSV1-UL48-147 | − | CGAUGUGGUGGAAUGGG | 17 | 5985 |
| HSV1-UL48-148 | − | AUCGACAUUCGCGCCCA | 17 | 5986 |
| HSV1-UL48-158 | − | CGAGCUACGGGCGCGGG | 17 | 5987 |
| HSV1-UL48-42 | + | CCCGCGCCCGUAGCUCGGCG | 20 | 5988 |
| HSV1-UL48-44 | + | AGUAGAGCCCGAGGCCGUCG | 20 | 5989 |
| HSV1-UL48-46 | + | GAGCCCGAGGCCGUCGCGGG | 20 | 5990 |
| HSV1-UL48-47 | + | CCGAGGCCGUCGCGGGUGGC | 20 | 5991 |
| HSV1-UL48-49 | + | CGCGGGUGGCCGGAAGCGUA | 20 | 5992 |
| HSV1-UL48-50 | + | GGUGGCCGGAAGCGUAGGGA | 20 | 5993 |
| HSV1-UL48-55 | + | AAUGUCGAUUUGGGUGCGUU | 20 | 5994 |
| HSV1-UL48-56 | + | AUGUCGAUUUGGGUGCGUUC | 20 | 5995 |
| HSV1-UL48-57 | + | UGUCGAUUUGGGUGCGUUCG | 20 | 5996 |
| HSV1-UL48-59 | + | CCCCAUUCCACCACAUCGCU | 20 | 5997 |
| HSV1-UL48-60 | + | CAUCGCUGGGCAGCGUUGAU | 20 | 5998 |
| HSV1-UL48-61 | + | UUGAUAGGAAUUUACACUCC | 20 | 5999 |
| HSV1-UL48-62 | + | GGAAUUUACACUCCCGGUAC | 20 | 6000 |
| HSV1-UL48-63 | + | UUUACACUCCCGGUACAGGU | 20 | 6001 |
| HSV1-UL48-72 | + | AGCCCAAGUCGUCGAGGAGA | 20 | 6002 |
| HSV1-UL48-75 | + | GAGGAGACGGUUAAAGAGGG | 20 | 6003 |
| HSV1-UL48-81 | + | GGUUAAAGAGGGCGGCGGGG | 20 | 6004 |
| HSV1-UL48-82 | + | AAAGAGGGCGGCGGGGGGGA | 20 | 6005 |
| HSV1-UL48-83 | + | AAGAGGGCGGCGGGGGGGAC | 20 | 6006 |
| HSV1-UL48-84 | + | GGCGGCGGGGGGGACGGGCA | 20 | 6007 |
| HSV1-UL48-85 | + | GCGGCGGGGGGGACGGGCAU | 20 | 6008 |
| HSV1-UL48-86 | + | GCGGGGGGGACGGGCAUGGG | 20 | 6009 |
| HSV1-UL48-87 | + | CGGGGGGGACGGGCAUGGGU | 20 | 6010 |
| HSV1-UL48-88 | + | GGGGGGGACGGGCAUGGGUG | 20 | 6011 |
| HSV1-UL48-89 | + | GGGGACGGGCAUGGGUGGGG | 20 | 6012 |
| HSV1-UL48-90 | + | GGGACGGGCAUGGGUGGGGA | 20 | 6013 |
| HSV1-UL48-91 | + | UGGGUGGGGAGGGCAUGAGC | 20 | 6014 |
| HSV1-UL48-92 | + | GGGUGGGGAGGGCAUGAGCU | 20 | 6015 |
| HSV1-UL48-93 | + | GGGAGGGCAUGAGCUGGGCC | 20 | 6016 |
| HSV1-UL48-94 | + | GCAUGAGCUGGGCCUGGCUC | 20 | 6017 |
| HSV1-UL48-95 | + | AGGCGCCCCGUUGCGUACAG | 20 | 6018 |
| HSV1-UL48-96 | + | GGCGCCCCGUUGCGUACAGC | 20 | 6019 |
| HSV1-UL48-101 | + | GCGUACAGCGGGGGGGCCGC | 20 | 6020 |
| HSV1-UL48-106 | + | CGGGGUGUUUUUGGGACCCC | 20 | 6021 |
| HSV1-UL48-109 | + | UUUUGGGACCCCCGGCCGGG | 20 | 6022 |
| HSV1-UL48-110 | + | UUUGGGACCCCCGGCCGGGC | 20 | 6023 |
| HSV1-UL48-111 | + | UUGGGACCCCCGGCCGGGCG | 20 | 6024 |
| HSV1-UL48-112 | + | UGGGACCCCCGGCCGGGCGG | 20 | 6025 |
| HSV1-UL48-113 | + | GGGACCCCCGGCCGGGCGGG | 20 | 6026 |
| HSV1-UL48-114 | + | GGACCCCCGGCCGGGCGGGG | 20 | 6027 |
| HSV1-UL48-115 | + | CCCCCGGCCGGGCGGGGGGG | 20 | 6028 |
| HSV1-UL48-116 | + | CCGGCCGGGCGGGGGGGCGG | 20 | 6029 |
| HSV1-UL48-117 | + | AGCGCCGUCCGCGUUCAUGU | 20 | 6030 |
| HSV1-UL48-160 | + | GCGCCCGUAGCUCGGCG | 17 | 6031 |
| HSV1-UL48-162 | + | AGAGCCCGAGGCCGUCG | 17 | 6032 |
| HSV1-UL48-164 | + | CCCGAGGCCGUCGCGGG | 17 | 6033 |
| HSV1-UL48-165 | + | AGGCCGUCGCGGGUGGC | 17 | 6034 |
| HSV1-UL48-167 | + | GGGUGGCCGGAAGCGUA | 17 | 6035 |
| HSV1-UL48-168 | + | GGCCGGAAGCGUAGGGA | 17 | 6036 |
| HSV1-UL48-173 | + | GUCGAUUUGGGUGCGUU | 17 | 6037 |
| HSV1-UL48-174 | + | UCGAUUUGGGUGCGUUC | 17 | 6038 |
| HSV1-UL48-175 | + | CGAUUUGGGUGCGUUCG | 17 | 6039 |
| HSV1-UL48-177 | + | CAUUCCACCACAUCGCU | 17 | 6040 |
| HSV1-UL48-178 | + | CGCUGGGCAGCGUUGAU | 17 | 6041 |
| HSV1-UL48-179 | + | AUAGGAAUUUACACUCC | 17 | 6042 |
| HSV1-UL48-180 | + | AUUUACACUCCCGGUAC | 17 | 6043 |
| HSV1-UL48-181 | + | ACACUCCCGGUACAGGU | 17 | 6044 |
| HSV1-UL48-190 | + | CCAAGUCGUCGAGGAGA | 17 | 6045 |
| HSV1-UL48-193 | + | GAGACGGUUAAAGAGGG | 17 | 6046 |
| HSV1-UL48-199 | + | UAAAGAGGGCGGCGGGG | 17 | 6047 |
| HSV1-UL48-200 | + | GAGGGCGGCGGGGGGGA | 17 | 6048 |
| HSV1-UL48-201 | + | AGGGCGGCGGGGGGGAC | 17 | 6049 |
| HSV1-UL48-202 | + | GGCGGGGGGGACGGGCA | 17 | 6050 |
| HSV1-UL48-203 | + | GCGGGGGGGACGGGCAU | 17 | 6051 |
| HSV1-UL48-204 | + | GGGGGGACGGGCAUGGG | 17 | 6052 |
| HSV1-UL48-205 | + | GGGGGACGGGCAUGGGU | 17 | 6053 |
| HSV1-UL48-206 | + | GGGGACGGGCAUGGGUG | 17 | 6054 |
| HSV1-UL48-207 | + | GACGGGCAUGGGUGGGG | 17 | 6055 |
| HSV1-UL48-208 | + | ACGGGCAUGGGUGGGGA | 17 | 6056 |
| HSV1-UL48-209 | + | GUGGGGAGGGCAUGAGC | 17 | 6057 |
| HSV1-UL48-210 | + | UGGGGAGGGCAUGAGCU | 17 | 6058 |
| HSV1-UL48-211 | + | AGGGCAUGAGCUGGGCC | 17 | 6059 |
| HSV1-UL48-212 | + | UGAGCUGGGCCUGGCUC | 17 | 6060 |
| HSV1-UL48-213 | + | CGCCCCGUUGCGUACAG | 17 | 6061 |
| HSV1-UL48-214 | + | GCCCCGUUGCGUACAGC | 17 | 6062 |
| HSV1-UL48-219 | + | UACAGCGGGGGGGCCGC | 17 | 6063 |
| HSV1-UL48-224 | + | GGUGUUUUUGGGACCCC | 17 | 6064 |
| HSV1-UL48-227 | + | UGGGACCCCCGGCCGGG | 17 | 6065 |
| HSV1-UL48-228 | + | GGGACCCCCGGCCGGGC | 17 | 6066 |
| HSV1-UL48-229 | + | GGACCCCCGGCCGGGCG | 17 | 6067 |
| HSV1-UL48-230 | + | GACCCCCGGCCGGGCGG | 17 | 6068 |
| HSV1-UL48-231 | + | ACCCCCGGCCGGGCGGG | 17 | 6069 |
| HSV1-UL48-232 | + | CCCCCGGCCGGGCGGGG | 17 | 6070 |
| HSV1-UL48-233 | + | CCGGCCGGGCGGGGGGG | 17 | 6071 |
| HSV1-UL48-234 | + | GCCGGGCGGGGGGGCGG | 17 | 6072 |
| HSV1-UL48-235 | + | GCCGUCCGCGUUCAUGU | 17 | 6073 |

[0724] Table 3C provides exemplary targeting domains for knocking out the UL48 gene selected according to the third tier parameters. The targeting domains are selected based on location within the coding sequence, but downstream of the first 500 bp of the UL48 gene. It is contemplated herein that the targeting domain hybridizes to the target domain through complementary base pairing. Any of the targeting domains in the table can be used with a S. pyogenes Cas9 molecule that gives double stranded cleavage. Any of the targeting domains in the table can be used with a S. pyogenes Cas9 single-stranded break nucleases (nickases). In an embodiment, dual targeting is used to create two nicks on opposite DNA strands by using S. pyogenes Cas9 nickases with two targeting domains that are complementary to opposite DNA strands, e.g., a gRNA comprising any minus strand targeting domain may be paired any gRNA comprising a plus strand targeting domain provided that the two gRNAs are oriented on the DNA such that PAMs face outward and the distance between the 5′ ends of the gRNAs is 0-50 bp.

TABLE 3C

| 3rd Tier | | | Target Site | Seq |
|---|---|---|---|---|
| gRNA Name | DNA Strand | Targeting Domain | Length | ID |
| HSV1-UL48- | − | CGUGUUGGCCAACUUCUGCU | 20 | 6074 |
| 1126 | | | | |
| HSV1-UL48-237 | − | ACUUCUGCUCGGCCCUGUAC | 20 | 6075 |
| HSV1-UL48-238 | − | GGUACCUGCGCGCCAGCGUC | 20 | 6076 |
| HSV1-UL48-239 | − | CGUCCGGCAGCUGCACCGCC | 20 | 6077 |
| HSV1-UL48-240 | − | CACCGCCAGGCGCACAUGCG | 20 | 6078 |
| HSV1-UL48-241 | − | GCGCGGACGCGAUCGCGACC | 20 | 6079 |
| HSV1-UL48-242 | − | CGCGGACGCGAUCGCGACCU | 20 | 6080 |
| HSV1-UL48-243 | − | AAUGCUGCGCGCCACGAUCG | 20 | 6081 |
| HSV1-UL48-244 | − | UGCGCGCCACGAUCGCGGAC | 20 | 6082 |
| HSV1-UL48-245 | − | CUACCGAGAGACCGCUCGUC | 20 | 6083 |
| HSV1-UL48-246 | − | UUUUGACCCGCGAGAUCCUA | 20 | 6084 |
| HSV1-UL48-247 | − | UUUGACCCGCGAGAUCCUAU | 20 | 6085 |
| HSV1-UL48-248 | − | CGUACGCCGAGCAGAUGAUG | 20 | 6086 |
| HSV1-UL48-249 | − | UGACUGCCUCUGUUGCGACC | 20 | 6087 |
| HSV1-UL48-250 | − | UCUGUUGCGACCUGGAGAGC | 20 | 6088 |
| HSV1-UL48-251 | − | CCUGGAGAGCUGGCGUCAGU | 20 | 6089 |
| HSV1-UL48-252 | − | GGAGAGCUGGCGUCAGUUGG | 20 | 6090 |
| HSV1-UL48-253 | − | GAGAGCUGGCGUCAGUUGGC | 20 | 6091 |
| HSV1-UL48-254 | − | CAGCCCUUCAUGUUCGUCAA | 20 | 6092 |
| HSV1-UL48-255 | − | UCAACGGAGCGCUCACCGUC | 20 | 6093 |
| HSV1-UL48-256 | − | CAACGGAGCGCUCACCGUCC | 20 | 6094 |
| HSV1-UL48-257 | − | AACGGAGCGCUCACCGUCCG | 20 | 6095 |
| HSV1-UL48-258 | − | CGUCCGGGGAGUGCCAAUCG | 20 | 6096 |
| HSV1-UL48-259 | − | GAGUGCCAAUCGAGGCCCGC | 20 | 6097 |
| HSV1-UL48-260 | − | CAAUCGAGGCCCGCCGGCUG | 20 | 6098 |
| HSV1-UL48-261 | − | AAUCGAGGCCCGCCGGCUGC | 20 | 6099 |
| HSV1-UL48-262 | − | CGAGCACCUUAACCUCCCGC | 20 | 6100 |
| HSV1-UL48-263 | − | CCUCCCGCUGGUGCGCAGCG | 20 | 6101 |
| HSV1-UL48-264 | − | GCUGGUGCGCAGCGCGGCUA | 20 | 6102 |
| HSV1-UL48-265 | − | GGUGCGCAGCGCGGCUACGG | 20 | 6103 |
| HSV1-UL48-266 | − | AGCGCGGCUACGGAGGAGCC | 20 | 6104 |
| HSV1-UL48-267 | − | GCGCGGCUACGGAGGAGCCA | 20 | 6105 |
| HSV1-UL48-268 | − | CGCGGCUACGGAGGAGCCAG | 20 | 6106 |
| HSV1-UL48-269 | − | ACGACCCCUCCCACCCUGCA | 20 | 6107 |
| HSV1-UL48-270 | − | UCCCACCCUGCAUGGCAACC | 20 | 6108 |
| HSV1-UL48-271 | − | GGCAACCAGGCCCGCGCCUC | 20 | 6109 |
| HSV1-UL48-272 | − | GCAACCAGGCCCGCGCCUCU | 20 | 6110 |
| HSV1-UL48-273 | − | CCGCGCCUCUGGGUACUUUA | 20 | 6111 |
| HSV1-UL48-274 | − | GGUACUUUAUGGUGUUGAUU | 20 | 6112 |
| HSV1-UL48-275 | − | GUACUUUAUGGUGUUGAUUC | 20 | 6113 |
| HSV1-UL48-276 | − | GGUGUUGAUUCGGGCGAAGU | 20 | 6114 |
| HSV1-UL48-277 | − | CUUCACGACCUCGCCCUCCG | 20 | 6115 |
| HSV1-UL48-278 | − | CACGACCUCGCCCUCCGAGG | 20 | 6116 |
| HSV1-UL48-279 | − | CGCCCUCCGAGGCGGUCAUG | 20 | 6117 |
| HSV1-UL48-280 | − | GCCCUCCGAGGCGGUCAUGC | 20 | 6118 |
| HSV1-UL48-281 | − | GCGCGUACGAAAAACAAUUA | 20 | 6119 |
| HSV1-UL48-282 | − | CGCGUACGAAAAACAAUUAC | 20 | 6120 |
| HSV1-UL48-283 | − | CAAUUACGGGUCUACCAUCG | 20 | 6121 |
| HSV1-UL48-284 | − | AAUUACGGGUCUACCAUCGA | 20 | 6122 |
| HSV1-UL48-285 | − | CGAGGGCCUGCUCGAUCUCC | 20 | 6123 |
| HSV1-UL48-286 | − | GGACGACGACGCCCCCGAAG | 20 | 6124 |
| HSV1-UL48-287 | − | CGACGACGCCCCCGAAGAGG | 20 | 6125 |
| HSV1-UL48-288 | − | GACGACGCCCCCGAAGAGGC | 20 | 6126 |
| HSV1-UL48-289 | − | ACGACGCCCCCGAAGAGGCG | 20 | 6127 |
| HSV1-UL48-290 | − | CGCCCCCGAAGAGGCGGGGC | 20 | 6128 |
| HSV1-UL48-291 | − | CCCCGAAGAGGCGGGGCUGG | 20 | 6129 |
| HSV1-UL48-292 | − | GCGCCUGUCCUUUCUCCCCG | 20 | 6130 |
| HSV1-UL48-293 | − | CGCCUGUCCUUUCUCCCCGC | 20 | 6131 |
| HSV1-UL48-294 | − | ACACACGCGCAGACUGUCGA | 20 | 6132 |
| HSV1-UL48-295 | − | CCCCCCGACCGAUGUCAGCC | 20 | 6133 |
| HSV1-UL48-296 | − | CCCCCGACCGAUGUCAGCCU | 20 | 6134 |
| HSV1-UL48-297 | − | CCCCGACCGAUGUCAGCCUG | 20 | 6135 |
| HSV1-UL48-298 | − | CCCGACCGAUGUCAGCCUGG | 20 | 6136 |
| HSV1-UL48-299 | − | GGGGACGAGCUCCACUUAGA | 20 | 6137 |
| HSV1-UL48-300 | − | CGAGCUCCACUUAGACGGCG | 20 | 6138 |
| HSV1-UL48-301 | − | CCACUUAGACGGCGAGGACG | 20 | 6139 |
| HSV1-UL48-302 | − | AGACGGCGAGGACGUGGCGA | 20 | 6140 |
| HSV1-UL48-303 | − | CGCGCUAGACGAUUUCGAUC | 20 | 6141 |
| HSV1-UL48-304 | − | CGAUUUCGAUCUGGACAUGU | 20 | 6142 |
| HSV1-UL48-305 | − | GAUUUCGAUCUGGACAUGUU | 20 | 6143 |
| HSV1-UL48-306 | − | AUUUCGAUCUGGACAUGUUG | 20 | 6144 |
| HSV1-UL48-307 | − | UUUCGAUCUGGACAUGUUGG | 20 | 6145 |
| HSV1-UL48-308 | − | GAUCUGGACAUGUUGGGGGA | 20 | 6146 |
| HSV1-UL48-309 | − | AUCUGGACAUGUUGGGGGAC | 20 | 6147 |
| HSV1-UL48-310 | − | UCUGGACAUGUUGGGGGACG | 20 | 6148 |
| HSV1-UL48-311 | − | GUUGGGGGACGGGGAUUCCC | 20 | 6149 |
| HSV1-UL48-312 | − | UUGGGGGACGGGGAUUCCCC | 20 | 6150 |
| HSV1-UL48-313 | − | UGGGGGACGGGGAUUCCCCG | 20 | 6151 |
| HSV1-UL48-314 | − | GGACGGGGAUUCCCCGGGGC | 20 | 6152 |
| HSV1-UL48-315 | − | GACGGGGAUUCCCCGGGGCC | 20 | 6153 |
| HSV1-UL48-316 | − | CCCCACGACUCCGCCCCCUA | 20 | 6154 |
| HSV1-UL48-317 | − | CUCCGCCCCCUACGGCGCUC | 20 | 6155 |
| HSV1-UL48-318 | − | CCCCUACGGCGCUCUGGAUA | 20 | 6156 |
| HSV1-UL48-319 | − | CAGAUGUUUACCGAUGCCCU | 20 | 6157 |
| HSV1-UL48-320 | − | GCCCUUGGAAUUGACGAGUA | 20 | 6158 |
| HSV1-UL48-321 | − | CUUGGAAUUGACGAGUACGG | 20 | 6159 |
| HSV1-UL48-322 | − | UUGGAAUUGACGAGUACGGU | 20 | 6160 |
| HSV1-UL48-323 | + | CACCGUACUCGUCAAUUCCA | 20 | 6161 |
| HSV1-UL48-324 | + | ACCGUACUCGUCAAUUCCAA | 20 | 6162 |
| HSV1-UL48-325 | + | CUCGUCAAUUCCAAGGGCAU | 20 | 6163 |
| HSV1-UL48-326 | + | CAUCUGCUCAAACUCGAAGU | 20 | 6164 |
| HSV1-UL48-327 | + | GGCCAUAUCCAGAGCGCCGU | 20 | 6165 |
| HSV1-UL48-328 | + | GCCAUAUCCAGAGCGCCGUA | 20 | 6166 |
| HSV1-UL48-329 | + | CCAUAUCCAGAGCGCCGUAG | 20 | 6167 |
| HSV1-UL48-330 | + | CAUAUCCAGAGCGCCGUAGG | 20 | 6168 |
| HSV1-UL48-331 | + | AUCCAGAGCGCCGUAGGGGG | 20 | 6169 |
| HSV1-UL48-332 | + | CGCCGUAGGGGGCGGAGUCG | 20 | 6170 |
| HSV1-UL48-333 | + | GCCGUAGGGGGCGGAGUCGU | 20 | 6171 |
| HSV1-UL48-334 | + | CCGUAGGGGGCGGAGUCGUG | 20 | 6172 |
| HSV1-UL48-335 | + | CGUAGGGGGCGGAGUCGUGG | 20 | 6173 |
| HSV1-UL48-336 | + | GUAGGGGGCGGAGUCGUGGG | 20 | 6174 |
| HSV1-UL48-337 | + | GAGUCGUGGGGGGUAAAUCC | 20 | 6175 |
| HSV1-UL48-338 | + | UGGGGGGUAAAUCCCGGCCC | 20 | 6176 |
| HSV1-UL48-339 | + | GGGGGGUAAAUCCCGGCCCC | 20 | 6177 |
| HSV1-UL48-340 | + | GGGGGUAAAUCCCGGCCCCG | 20 | 6178 |
| HSV1-UL48-341 | + | AUCGAAAUCGUCUAGCGCGU | 20 | 6179 |
| HSV1-UL48-342 | + | CCACGUCCUCGCCGUCUAAG | 20 | 6180 |
| HSV1-UL48-343 | + | CUAAGUGGAGCUCGUCCCCC | 20 | 6181 |
| HSV1-UL48-344 | + | CUCGUCCCCCAGGCUGACAU | 20 | 6182 |
| HSV1-UL48-345 | + | UCCCCCAGGCUGACAUCGGU | 20 | 6183 |
| HSV1-UL48-346 | + | CCCCCAGGCUGACAUCGGUC | 20 | 6184 |
| HSV1-UL48-347 | + | CCCCAGGCUGACAUCGGUCG | 20 | 6185 |
| HSV1-UL48-348 | + | CCCAGGCUGACAUCGGUCGG | 20 | 6186 |
| HSV1-UL48-349 | + | CCAGGCUGACAUCGGUCGGG | 20 | 6187 |
| HSV1-UL48-350 | + | CAGGCUGACAUCGGUCGGGG | 20 | 6188 |
| HSV1-UL48-351 | + | CAGUCUGCGCGUGUGUCCCG | 20 | 6189 |
| HSV1-UL48-352 | + | AGUCUGCGCGUGUGUCCCGC | 20 | 6190 |
| HSV1-UL48-353 | + | GUCUGCGCGUGUGUCCCGCG | 20 | 6191 |
| HSV1-UL48-354 | + | CGUGUGUCCCGCGGGGAGAA | 20 | 6192 |
| HSV1-UL48-355 | + | GUCCCGCGGGGAGAAAGGAC | 20 | 6193 |
| HSV1-UL48-356 | + | GCGGGGAGAAAGGACAGGCG | 20 | 6194 |
| HSV1-UL48-357 | + | AGCCGCCAGCCCCGCCUCUU | 20 | 6195 |
| HSV1-UL48-358 | + | GCCGCCAGCCCCGCCUCUUC | 20 | 6196 |
| HSV1-UL48-359 | + | CCGCCAGCCCCGCCUCUUCG | 20 | 6197 |
| HSV1-UL48-360 | + | CGCCAGCCCCGCCUCUUCGG | 20 | 6198 |
| HSV1-UL48-361 | + | UCUUCGGGGGCGUCGUCGUC | 20 | 6199 |
| HSV1-UL48-362 | + | CUUCGGGGGCGUCGUCGUCC | 20 | 6200 |
| HSV1-UL48-363 | + | CGUCGUCCGGGAGAUCGAGC | 20 | 6201 |
| HSV1-UL48-364 | + | GAGAUCGAGCAGGCCCUCGA | 20 | 6202 |
| HSV1-UL48-365 | + | AAUUGUUUUUCGUACGCGCG | 20 | 6203 |
| HSV1-UL48-366 | + | GUGUUCCCGCAUGACCGCCU | 20 | 6204 |
| HSV1-UL48-367 | + | UUCCCGCAUGACCGCCUCGG | 20 | 6205 |
| HSV1-UL48-368 | + | UCCCGCAUGACCGCCUCGGA | 20 | 6206 |
| HSV1-UL48-369 | + | CAUGACCGCCUCGGAGGGCG | 20 | 6207 |
| HSV1-UL48-370 | + | GGAGGGCGAGGUCGUGAAGC | 20 | 6208 |
| HSV1-UL48-371 | + | CAACACCAUAAAGUACCCAG | 20 | 6209 |
| HSV1-UL48-372 | + | CCAUAAAGUACCCAGAGGCG | 20 | 6210 |
| HSV1-UL48-373 | + | CAUAAAGUACCCAGAGGCGC | 20 | 6211 |
| HSV1-UL48-374 | + | AGUACCCAGAGGCGCGGGCC | 20 | 6212 |
| HSV1-UL48-375 | + | CGCGGGCCUGGUUGCCAUGC | 20 | 6213 |
| HSV1-UL48-376 | + | GCGGGCCUGGUUGCCAUGCA | 20 | 6214 |
| HSV1-UL48-377 | + | GGCCUGGUUGCCAUGCAGGG | 20 | 6215 |
| HSV1-UL48-378 | + | GCCUGGUUGCCAUGCAGGGU | 20 | 6216 |
| HSV1-UL48-379 | + | UGGUUGCCAUGCAGGGUGGG | 20 | 6217 |
| HSV1-UL48-380 | + | GGUUGCCAUGCAGGGUGGGA | 20 | 6218 |
| HSV1-UL48-381 | + | GUUGCCAUGCAGGGUGGGAG | 20 | 6219 |
| HSV1-UL48-382 | + | AGGGUGGGAGGGGUCGUCAA | 20 | 6220 |
| HSV1-UL48-383 | + | GGGGUCGUCAACGGCGCCCC | 20 | 6221 |
| HSV1-UL48-384 | + | GUAGCCGCGCUGCGCACCAG | 20 | 6222 |
| HSV1-UL48-385 | + | UAGCCGCGCUGCGCACCAGC | 20 | 6223 |
| HSV1-UL48-386 | + | CCGCGCUGCGCACCAGCGGG | 20 | 6224 |
| HSV1-UL48-387 | + | UGCGCACCAGCGGGAGGUUA | 20 | 6225 |
| HSV1-UL48-388 | + | GGUUAAGGUGCUCGCGAAUG | 20 | 6226 |
| HSV1-UL48-389 | + | UGUGGUUUAGCUCCCGCAGC | 20 | 6227 |
| HSV1-UL48-390 | + | GGUUUAGCUCCCGCAGCCGG | 20 | 6228 |
| HSV1-UL48-391 | + | GUUUAGCUCCCGCAGCCGGC | 20 | 6229 |
| HSV1-UL48-392 | + | CGCAGCCGGCGGGCCUCGAU | 20 | 6230 |
| HSV1-UL48-393 | + | GGGCCUCGAUUGGCACUCCC | 20 | 6231 |
| HSV1-UL48-394 | + | CUCGAUUGGCACUCCCCGGA | 20 | 6232 |
| HSV1-UL48-395 | + | CGCUCCGUUGACGAACAUGA | 20 | 6233 |
| HSV1-UL48-396 | + | GCUCCGUUGACGAACAUGAA | 20 | 6234 |
| HSV1-UL48-397 | + | CGUUGACGAACAUGAAGGGC | 20 | 6235 |
| HSV1-UL48-398 | + | CCAACUGACGCCAGCUCUCC | 20 | 6236 |
| HSV1-UL48-399 | + | AGCUCUCCAGGUCGCAACAG | 20 | 6237 |
| HSV1-UL48-400 | + | CGCAACAGAGGCAGUCAAAC | 20 | 6238 |
| HSV1-UL48-401 | + | ACAGAGGCAGUCAAACAGGU | 20 | 6239 |
| HSV1-UL48-402 | + | CAGAGGCAGUCAAACAGGUC | 20 | 6240 |
| HSV1-UL48-403 | + | GUCGGGCCGCAUCAUCUGCU | 20 | 6241 |
| HSV1-UL48-404 | + | CAUCAUCUGCUCGGCGUACG | 20 | 6242 |
| HSV1-UL48-405 | + | GCUCGGCGUACGCGGCCCAU | 20 | 6243 |
| HSV1-UL48-406 | + | ACGCGGCCCAUAGGAUCUCG | 20 | 6244 |
| HSV1-UL48-407 | + | CGCGGCCCAUAGGAUCUCGC | 20 | 6245 |
| HSV1-UL48-408 | + | CAAAACACGCGCCAGACGAG | 20 | 6246 |
| HSV1-UL48-409 | + | GCGCCAGACGAGCGGUCUCU | 20 | 6247 |
| HSV1-UL48-410 | + | GUAGUACCUGUCCGCGAUCG | 20 | 6248 |
| HSV1-UL48-411 | + | UGGCGCGCAGCAUUUCUCCC | 20 | 6249 |
| HSV1-UL48-412 | + | CGCGUCCGCGCAUGUGCGCC | 20 | 6250 |
| HSV1-UL48-413 | + | GUCCGCGCAUGUGCGCCUGG | 20 | 6251 |
| HSV1-UL48-414 | + | GCGCCUGGCGGUGCAGCUGC | 20 | 6252 |
| HSV1-UL48-415 | + | GCGGUGCAGCUGCCGGACGC | 20 | 6253 |
| HSV1-UL48-416 | + | GCUGCCGGACGCUGGCGCGC | 20 | 6254 |
| HSV1-UL48-417 | + | GGACGCUGGCGCGCAGGUAC | 20 | 6255 |
| HSV1-UL48-418 | + | UGGCGCGCAGGUACCGGUAC | 20 | 6256 |
| HSV1-UL48-419 | + | GGCGCGCAGGUACCGGUACA | 20 | 6257 |
| HSV1-UL48-420 | + | GUACAGGGCCGAGCAGAAGU | 20 | 6258 |
| HSV1-UL48-421 | + | CGAGCAGAAGUUGGCCAACA | 20 | 6259 |
| HSV1-UL48-422 | − | GUUGGCCAACUUCUGCU | 17 | 6260 |
| HSV1-UL48-423 | − | UCUGCUCGGCCCUGUAC | 17 | 6261 |
| HSV1-UL48-424 | − | ACCUGCGCGCCAGCGUC | 17 | 6262 |
| HSV1-UL48-425 | − | CCGGCAGCUGCACCGCC | 17 | 6263 |
| HSV1-UL48-426 | − | CGCCAGGCGCACAUGCG | 17 | 6264 |
| HSV1-UL48-427 | − | CGGACGCGAUCGCGACC | 17 | 6265 |
| HSV1-UL48-428 | − | GGACGCGAUCGCGACCU | 17 | 6266 |
| HSV1-UL48-429 | − | GCUGCGCGCCACGAUCG | 17 | 6267 |
| HSV1-UL48-430 | − | GCGCCACGAUCGCGGAC | 17 | 6268 |
| HSV1-UL48-431 | − | CCGAGAGACCGCUCGUC | 17 | 6269 |
| HSV1-UL48-432 | − | UGACCCGCGAGAUCCUA | 17 | 6270 |
| HSV1-UL48-433 | − | GACCCGCGAGAUCCUAU | 17 | 6271 |
| HSV1-UL48-434 | − | ACGCCGAGCAGAUGAUG | 17 | 6272 |
| HSV1-UL48-435 | − | CUGCCUCUGUUGCGACC | 17 | 6273 |
| HSV1-UL48-436 | − | GUUGCGACCUGGAGAGC | 17 | 6274 |
| HSV1-UL48-437 | − | GGAGAGCUGGCGUCAGU | 17 | 6275 |
| HSV1-UL48-438 | − | GAGCUGGCGUCAGUUGG | 17 | 6276 |
| HSV1-UL48-439 | − | AGCUGGCGUCAGUUGGC | 17 | 6277 |
| HSV1-UL48-440 | − | CCCUUCAUGUUCGUCAA | 17 | 6278 |
| HSV1-UL48-441 | − | ACGGAGCGCUCACCGUC | 17 | 6279 |
| HSV1-UL48-442 | − | CGGAGCGCUCACCGUCC | 17 | 6280 |
| HSV1-UL48-443 | − | GGAGCGCUCACCGUCCG | 17 | 6281 |
| HSV1-UL48-444 | − | CCGGGGAGUGCCAAUCG | 17 | 6282 |
| HSV1-UL48-445 | − | UGCCAAUCGAGGCCCGC | 17 | 6283 |
| HSV1-UL48-446 | − | UCGAGGCCCGCCGGCUG | 17 | 6284 |
| HSV1-UL48-447 | − | CGAGGCCCGCCGGCUGC | 17 | 6285 |
| HSV1-UL48-448 | − | GCACCUUAACCUCCCGC | 17 | 6286 |
| HSV1-UL48-449 | − | CCCGCUGGUGCGCAGCG | 17 | 6287 |
| HSV1-UL48-450 | − | GGUGCGCAGCGCGGCUA | 17 | 6288 |
| HSV1-UL48-451 | − | GCGCAGCGCGGCUACGG | 17 | 6289 |
| HSV1-UL48-452 | − | GCGGCUACGGAGGAGCC | 17 | 6290 |
| HSV1-UL48-453 | − | CGGCUACGGAGGAGCCA | 17 | 6291 |
| HSV1-UL48-454 | − | GGCUACGGAGGAGCCAG | 17 | 6292 |
| HSV1-UL48-455 | − | ACCCCUCCCACCCUGCA | 17 | 6293 |
| HSV1-UL48-456 | − | CACCCUGCAUGGCAACC | 17 | 6294 |
| HSV1-UL48-457 | − | AACCAGGCCCGCGCCUC | 17 | 6295 |
| HSV1-UL48-458 | − | ACCAGGCCCGCGCCUCU | 17 | 6296 |
| HSV1-UL48-459 | − | CGCCUCUGGGUACUUUA | 17 | 6297 |
| HSV1-UL48-460 | − | ACUUUAUGGUGUUGAUU | 17 | 6298 |
| HSV1-UL48-461 | − | CUUUAUGGUGUUGAUUC | 17 | 6299 |
| HSV1-UL48-462 | − | GUUGAUUCGGGCGAAGU | 17 | 6300 |
| HSV1-UL48-463 | − | CACGACCUCGCCCUCCG | 17 | 6301 |
| HSV1-UL48-464 | − | GACCUCGCCCUCCGAGG | 17 | 6302 |
| HSV1-UL48-465 | − | CCUCCGAGGCGGUCAUG | 17 | 6303 |
| HSV1-UL48-466 | − | CUCCGAGGCGGUCAUGC | 17 | 6304 |
| HSV1-UL48-467 | − | CGUACGAAAAACAAUUA | 17 | 6305 |
| HSV1-UL48-468 | − | GUACGAAAAACAAUUAC | 17 | 6306 |
| HSV1-UL48-469 | − | UUACGGGUCUACCAUCG | 17 | 6307 |
| HSV1-UL48-470 | − | UACGGGUCUACCAUCGA | 17 | 6308 |
| HSV1-UL48-471 | − | GGGCCUGCUCGAUCUCC | 17 | 6309 |
| HSV1-UL48-472 | − | CGACGACGCCCCCGAAG | 17 | 6310 |
| HSV1-UL48-473 | − | CGACGCCCCCGAAGAGG | 17 | 6311 |
| HSV1-UL48-474 | − | GACGCCCCCGAAGAGGC | 17 | 6312 |
| HSV1-UL48-475 | − | ACGCCCCCGAAGAGGCG | 17 | 6313 |
| HSV1-UL48-476 | − | CCCCGAAGAGGCGGGGC | 17 | 6314 |
| HSV1-UL48-477 | − | CGAAGAGGCGGGGCUGG | 17 | 6315 |
| HSV1-UL48-478 | − | CCUGUCCUUUCUCCCCG | 17 | 6316 |
| HSV1-UL48-479 | − | CUGUCCUUUCUCCCCGC | 17 | 6317 |
| HSV1-UL48-480 | − | CACGCGCAGACUGUCGA | 17 | 6318 |
| HSV1-UL48-481 | − | CCCGACCGAUGUCAGCC | 17 | 6319 |
| HSV1-UL48-482 | − | CCGACCGAUGUCAGCCU | 17 | 6320 |
| HSV1-UL48-483 | − | CGACCGAUGUCAGCCUG | 17 | 6321 |
| HSV1-UL48-484 | − | GACCGAUGUCAGCCUGG | 17 | 6322 |
| HSV1-UL48-485 | − | GACGAGCUCCACUUAGA | 17 | 6323 |
| HSV1-UL48-486 | − | GCUCCACUUAGACGGCG | 17 | 6324 |
| HSV1-UL48-487 | − | CUUAGACGGCGAGGACG | 17 | 6325 |
| HSV1-UL48-488 | − | CGGCGAGGACGUGGCGA | 17 | 6326 |
| HSV1-UL48-489 | − | GCUAGACGAUUUCGAUC | 17 | 6327 |
| HSV1-UL48-490 | − | UUUCGAUCUGGACAUGU | 17 | 6328 |
| HSV1-UL48-491 | − | UUCGAUCUGGACAUGUU | 17 | 6329 |
| HSV1-UL48-492 | − | UCGAUCUGGACAUGUUG | 17 | 6330 |
| HSV1-UL48-493 | − | CGAUCUGGACAUGUUGG | 17 | 6331 |
| HSV1-UL48-494 | − | CUGGACAUGUUGGGGGA | 17 | 6332 |
| HSV1-UL48-495 | − | UGGACAUGUUGGGGGAC | 17 | 6333 |
| HSV1-UL48-496 | − | GGACAUGUUGGGGGACG | 17 | 6334 |
| HSV1-UL48-497 | − | GGGGGACGGGGAUUCCC | 17 | 6335 |
| HSV1-UL48-498 | − | GGGGACGGGGAUUCCCC | 17 | 6336 |
| HSV1-UL48-499 | − | GGGACGGGGAUUCCCCG | 17 | 6337 |
| HSV1-UL48-500 | − | CGGGGAUUCCCCGGGGC | 17 | 6338 |
| HSV1-UL48-501 | − | GGGGAUUCCCCGGGGCC | 17 | 6339 |
| HSV1-UL48-502 | − | CACGACUCCGCCCCCUA | 17 | 6340 |
| HSV1-UL48-503 | − | CGCCCCCUACGGCGCUC | 17 | 6341 |
| HSV1-UL48-504 | − | CUACGGCGCUCUGGAUA | 17 | 6342 |
| HSV1-UL48-505 | − | AUGUUUACCGAUGCCCU | 17 | 6343 |
| HSV1-UL48-506 | − | CUUGGAAUUGACGAGUA | 17 | 6344 |
| HSV1-UL48-507 | − | GGAAUUGACGAGUACGG | 17 | 6345 |
| HSV1-UL48-508 | − | GAAUUGACGAGUACGGU | 17 | 6346 |
| HSV1-UL48-509 | + | CGUACUCGUCAAUUCCA | 17 | 6347 |
| HSV1-UL48-510 | + | GUACUCGUCAAUUCCAA | 17 | 6348 |
| HSV1-UL48-511 | + | GUCAAUUCCAAGGGCAU | 17 | 6349 |
| HSV1-UL48-512 | + | CUGCUCAAACUCGAAGU | 17 | 6350 |
| HSV1-UL48-513 | + | CAUAUCCAGAGCGCCGU | 17 | 6351 |
| HSV1-UL48-514 | + | AUAUCCAGAGCGCCGUA | 17 | 6352 |
| HSV1-UL48-515 | + | UAUCCAGAGCGCCGUAG | 17 | 6353 |
| HSV1-UL48-516 | + | AUCCAGAGCGCCGUAGG | 17 | 6354 |
| HSV1-UL48-517 | + | CAGAGCGCCGUAGGGGG | 17 | 6355 |
| HSV1-UL48-518 | + | CGUAGGGGGCGGAGUCG | 17 | 6356 |
| HSV1-UL48-519 | + | GUAGGGGGCGGAGUCGU | 17 | 6357 |
| HSV1-UL48-520 | + | UAGGGGGCGGAGUCGUG | 17 | 6358 |
| HSV1-UL48-521 | + | AGGGGGCGGAGUCGUGG | 17 | 6359 |
| HSV1-UL48-522 | + | GGGGGCGGAGUCGUGGG | 17 | 6360 |
| HSV1-UL48-523 | + | UCGUGGGGGGUAAAUCC | 17 | 6361 |
| HSV1-UL48-524 | + | GGGGUAAAUCCCGGCCC | 17 | 6362 |
| HSV1-UL48-525 | + | GGGUAAAUCCCGGCCCC | 17 | 6363 |
| HSV1-UL48-526 | + | GGUAAAUCCCGGCCCCG | 17 | 6364 |
| HSV1-UL48-527 | + | GAAAUCGUCUAGCGCGU | 17 | 6365 |
| HSV1-UL48-528 | + | CGUCCUCGCCGUCUAAG | 17 | 6366 |
| HSV1-UL48-529 | + | AGUGGAGCUCGUCCCCC | 17 | 6367 |
| HSV1-UL48-530 | + | GUCCCCCAGGCUGACAU | 17 | 6368 |
| HSV1-UL48-531 | + | CCCAGGCUGACAUCGGU | 17 | 6369 |
| HSV1-UL48-532 | + | CCAGGCUGACAUCGGUC | 17 | 6370 |
| HSV1-UL48-533 | + | CAGGCUGACAUCGGUCG | 17 | 6371 |
| HSV1-UL48-534 | + | AGGCUGACAUCGGUCGG | 17 | 6372 |
| HSV1-UL48-535 | + | GGCUGACAUCGGUCGGG | 17 | 6373 |
| HSV1-UL48-536 | + | GCUGACAUCGGUCGGGG | 17 | 6374 |
| HSV1-UL48-537 | + | UCUGCGCGUGUGUCCCG | 17 | 6375 |
| HSV1-UL48-538 | + | CUGCGCGUGUGUCCCGC | 17 | 6376 |
| HSV1-UL48-539 | + | UGCGCGUGUGUCCCGCG | 17 | 6377 |
| HSV1-UL48-540 | + | GUGUCCCGCGGGGAGAA | 17 | 6378 |
| HSV1-UL48-541 | + | CCGCGGGGAGAAAGGAC | 17 | 6379 |
| HSV1-UL48-542 | + | GGGAGAAAGGACAGGCG | 17 | 6380 |
| HSV1-UL48-543 | + | CGCCAGCCCCGCCUCUU | 17 | 6381 |
| HSV1-UL48-544 | + | GCCAGCCCCGCCUCUUC | 17 | 6382 |
| HSV1-UL48-545 | + | CCAGCCCCGCCUCUUCG | 17 | 6383 |
| HSV1-UL48-546 | + | CAGCCCCGCCUCUUCGG | 17 | 6384 |
| HSV1-UL48-547 | + | UCGGGGGCGUCGUCGUC | 17 | 6385 |
| HSV1-UL48-548 | + | CGGGGGCGUCGUCGUCC | 17 | 6386 |
| HSV1-UL48-549 | + | CGUCCGGGAGAUCGAGC | 17 | 6387 |
| HSV1-UL48-550 | + | AUCGAGCAGGCCCUCGA | 17 | 6388 |
| HSV1-UL48-551 | + | UGUUUUUCGUACGCGCG | 17 | 6389 |
| HSV1-UL48-552 | + | UUCCCGCAUGACCGCCU | 17 | 6390 |
| HSV1-UL48-553 | + | CCGCAUGACCGCCUCGG | 17 | 6391 |
| HSV1-UL48-554 | + | CGCAUGACCGCCUCGGA | 17 | 6392 |
| HSV1-UL48-555 | + | GACCGCCUCGGAGGGCG | 17 | 6393 |
| HSV1-UL48-556 | + | GGGCGAGGUCGUGAAGC | 17 | 6394 |
| HSV1-UL48-557 | + | CACCAUAAAGUACCCAG | 17 | 6395 |
| HSV1-UL48-558 | + | UAAAGUACCCAGAGGCG | 17 | 6396 |
| HSV1-UL48-559 | + | AAAGUACCCAGAGGCGC | 17 | 6397 |
| HSV1-UL48-560 | + | ACCCAGAGGCGCGGGCC | 17 | 6398 |
| HSV1-UL48-561 | + | GGGCCUGGUUGCCAUGC | 17 | 6399 |
| HSV1-UL48-562 | + | GGCCUGGUUGCCAUGCA | 17 | 6400 |
| HSV1-UL48-563 | + | CUGGUUGCCAUGCAGGG | 17 | 6401 |
| HSV1-UL48-564 | + | UGGUUGCCAUGCAGGGU | 17 | 6402 |
| HSV1-UL48-565 | + | UUGCCAUGCAGGGUGGG | 17 | 6403 |
| HSV1-UL48-566 | + | UGCCAUGCAGGGUGGGA | 17 | 6404 |
| HSV1-UL48-567 | + | GCCAUGCAGGGUGGGAG | 17 | 6405 |
| HSV1-UL48-568 | + | GUGGGAGGGGUCGUCAA | 17 | 6406 |
| HSV1-UL48-569 | + | GUCGUCAACGGCGCCCC | 17 | 6407 |
| HSV1-UL48-570 | + | GCCGCGCUGCGCACCAG | 17 | 6408 |
| HSV1-UL48-571 | + | CCGCGCUGCGCACCAGC | 17 | 6409 |
| HSV1-UL48-572 | + | CGCUGCGCACCAGCGGG | 17 | 6410 |
| HSV1-UL48-573 | + | GCACCAGCGGGAGGUUA | 17 | 6411 |
| HSV1-UL48-574 | + | UAAGGUGCUCGCGAAUG | 17 | 6412 |
| HSV1-UL48-575 | + | GGUUUAGCUCCCGCAGC | 17 | 6413 |
| HSV1-UL48-576 | + | UUAGCUCCCGCAGCCGG | 17 | 6414 |
| HSV1-UL48-577 | + | UAGCUCCCGCAGCCGGC | 17 | 6415 |
| HSV1-UL48-578 | + | AGCCGGCGGGCCUCGAU | 17 | 6416 |
| HSV1-UL48-579 | + | CCUCGAUUGGCACUCCC | 17 | 6417 |
| HSV1-UL48-580 | + | GAUUGGCACUCCCCGGA | 17 | 6418 |
| HSV1-UL48-581 | + | UCCGUUGACGAACAUGA | 17 | 6419 |
| HSV1-UL48-582 | + | CCGUUGACGAACAUGAA | 17 | 6420 |
| HSV1-UL48-583 | + | UGACGAACAUGAAGGGC | 17 | 6421 |
| HSV1-UL48-584 | + | ACUGACGCCAGCUCUCC | 17 | 6422 |
| HSV1-UL48-585 | + | UCUCCAGGUCGCAACAG | 17 | 6423 |
| HSV1-UL48-586 | + | AACAGAGGCAGUCAAAC | 17 | 6424 |
| HSV1-UL48-587 | + | GAGGCAGUCAAACAGGU | 17 | 6425 |
| HSV1-UL48-588 | + | AGGCAGUCAAACAGGUC | 17 | 6426 |
| HSV1-UL48-589 | + | GGGCCGCAUCAUCUGCU | 17 | 6427 |
| HSV1-UL48-590 | + | CAUCUGCUCGGCGUACG | 17 | 6428 |
| HSV1-UL48-591 | + | CGGCGUACGCGGCCCAU | 17 | 6429 |
| HSV1-UL48-592 | + | CGGCCCAUAGGAUCUCG | 17 | 6430 |
| HSV1-UL48-593 | + | GGCCCAUAGGAUCUCGC | 17 | 6431 |
| HSV1-UL48-594 | + | AACACGCGCCAGACGAG | 17 | 6432 |
| HSV1-UL48-595 | + | CCAGACGAGCGGUCUCU | 17 | 6433 |
| HSV1-UL48-596 | + | GUACCUGUCCGCGAUCG | 17 | 6434 |
| HSV1-UL48-597 | + | CGCGCAGCAUUUCUCCC | 17 | 6435 |
| HSV1-UL48-598 | + | GUCCGCGCAUGUGCGCC | 17 | 6436 |
| HSV1-UL48-599 | + | CGCGCAUGUGCGCCUGG | 17 | 6437 |
| HSV1-UL48-600 | + | CCUGGCGGUGCAGCUGC | 17 | 6438 |
| HSV1-UL48-601 | + | GUGCAGCUGCCGGACGC | 17 | 6439 |
| HSV1-UL48-602 | + | GCCGGACGCUGGCGCGC | 17 | 6440 |
| HSV1-UL48-603 | + | CGCUGGCGCGCAGGUAC | 17 | 6441 |
| HSV1-UL48-604 | + | CGCGCAGGUACCGGUAC | 17 | 6442 |
| HSV1-UL48-605 | + | GCGCAGGUACCGGUACA | 17 | 6443 |
| HSV1-UL48-606 | + | CAGGGCCGAGCAGAAGU | 17 | 6444 |
| HSV1-UL48-607 | + | GCAGAAGUUGGCCAACA | 17 | 6445 |

[0725] Table 3D provides exemplary targeting domains for knocking out the UL48 gene selected according to the first tier parameters. The targeting domains are selected based on location within first 500 bp of the coding sequence of the UL48 gene. It is contemplated herein that the targeting domain hybridizes to the target domain through complementary base pairing. Any of the targeting domains in the table can be used with a S. aureus Cas9 molecule that gives double stranded cleavage. Any of the targeting domains in the table can be used with a S. aureus Cas9 single-stranded break nucleases (nickases). In an embodiment, dual targeting is used to create two nicks on opposite DNA strands by using S. aureus Cas9 nickases with two targeting domains that are complementary to opposite DNA strands, e.g., a gRNA comprising any minus strand targeting domain may be paired any gRNA comprising a plus strand targeting domain provided that the two gRNAs are oriented on the DNA such that PAMs face outward and the distance between the 5′ ends of the gRNAs is 0-50 bp.

TABLE 3D

| 1st Tier | | | Target Site | Seq |
|---|---|---|---|---|
| gRNA Name | DNA Strand | Targeting Domain | Length | ID |
| HSV1-UL48-608 | − | UCGACGAGCUGUUUGCCGAC | 20 | 6446 |
| HSV1-UL48-609 | − | AGCUGUUUGCCGACAUGAAC | 20 | 6447 |
| HSV1-UL48-610 | − | GCCACCGCCCCCCCGCCCGG | 20 | 6448 |
| HSV1-UL48-4 | − | CCACCGCCCCCCCGCCCGGC | 20 | 5963 |
| HSV1-UL48-5 | − | CACCGCCCCCCCGCCCGGCC | 20 | 5964 |
| HSV1-UL48-613 | − | CGGCCCCCCCGCUGUACGCA | 20 | 6449 |
| HSV1-UL48-10 | − | GGCCCCCCCGCUGUACGCAA | 20 | 5840 |
| HSV1-UL48-615 | − | CGCUGUACGCAACGGGGCGC | 20 | 6450 |
| HSV1-UL48-616 | − | UUAACCGUCUCCUCGACGAC | 20 | 6451 |
| HSV1-UL48-617 | − | UCGACGACUUGGGCUUUAGC | 20 | 6452 |
| HSV1-UL48-618 | − | CUAUGUACCAUGCUCGAUAC | 20 | 6453 |
| HSV1-UL48-18 | − | UAUGUACCAUGCUCGAUACC | 20 | 5967 |
| HSV1-UL48-620 | − | UACCAUGCUCGAUACCUGGA | 20 | 6454 |
| HSV1-UL48-621 | − | CCAUGCUCGAUACCUGGAAC | 20 | 6455 |
| HSV1-UL48-622 | − | CCGACCAACGCCGACCUGUA | 20 | 6456 |
| HSV1-UL48-21 | − | CGACCAACGCCGACCUGUAC | 20 | 5860 |
| HSV1-UL48-22 | − | GACCAACGCCGACCUGUACC | 20 | 5861 |
| HSV1-UL48-625 | − | CAACGCUGCCCAGCGAUGUG | 20 | 6457 |
| HSV1-UL48-24 | − | AACGCUGCCCAGCGAUGUGG | 20 | 5863 |
| HSV1-UL48-627 | − | CUGCCCAGCGAUGUGGUGGA | 20 | 6458 |
| HSV1-UL48-25 | − | UGCCCAGCGAUGUGGUGGAA | 20 | 5864 |
| HSV1-UL48-26 | − | GCCCAGCGAUGUGGUGGAAU | 20 | 5968 |
| HSV1-UL48-27 | − | CCCAGCGAUGUGGUGGAAUG | 20 | 5969 |
| HSV1-UL48-28 | − | CCAGCGAUGUGGUGGAAUGG | 20 | 5970 |
| HSV1-UL48-632 | − | AUGGGGGGACGCGUACGUCC | 20 | 6459 |
| HSV1-UL48-633 | − | UCCGGCCACCCGCGACGGCC | 20 | 6460 |
| HSV1-UL48-634 | − | CGACGGCCUCGGGCUCUACU | 20 | 6461 |
| HSV1-UL48-635 | − | GCUCUCUCGUUUCUUCCACG | 20 | 6462 |
| HSV1-UL48-636 | − | CGUUUCUUCCACGCCGAGCU | 20 | 6463 |
| HSV1-UL48-637 | − | UUCCACGCCGAGCUACGGGC | 20 | 6464 |
| HSV1-UL48-38 | − | UCCACGCCGAGCUACGGGCG | 20 | 5879 |
| HSV1-UL48-39 | − | CCACGCCGAGCUACGGGCGC | 20 | 5880 |
| HSV1-UL48-640 | − | ACGCCGAGCUACGGGCGCGG | 20 | 6465 |
| HSV1-UL48-40 | − | CGCCGAGCUACGGGCGCGGG | 20 | 5973 |
| HSV1-UL48-642 | − | CCGAGCUACGGGCGCGGGAG | 20 | 6466 |
| HSV1-UL48-643 | − | ACGAGCUGUUUGCCGAC | 17 | 6467 |
| HSV1-UL48-644 | − | UGUUUGCCGACAUGAAC | 17 | 6468 |
| HSV1-UL48-645 | − | ACCGCCCCCCCGCCCGG | 17 | 6469 |
| HSV1-UL48-122 | − | CCGCCCCCCCGCCCGGC | 17 | 5977 |
| HSV1-UL48-123 | − | CGCCCCCCCGCCCGGCC | 17 | 5978 |
| HSV1-UL48-648 | − | CCCCCCCGCUGUACGCA | 17 | 6470 |
| HSV1-UL48-128 | − | CCCCCCGCUGUACGCAA | 17 | 5850 |
| HSV1-UL48-650 | − | UGUACGCAACGGGGCGC | 17 | 6471 |
| HSV1-UL48-651 | − | ACCGUCUCCUCGACGAC | 17 | 6472 |
| HSV1-UL48-652 | − | ACGACUUGGGCUUUAGC | 17 | 6473 |
| HSV1-UL48-653 | − | UGUACCAUGCUCGAUAC | 17 | 6474 |
| HSV1-UL48-136 | − | GUACCAUGCUCGAUACC | 17 | 5981 |
| HSV1-UL48-655 | − | CAUGCUCGAUACCUGGA | 17 | 6475 |
| HSV1-UL48-656 | − | UGCUCGAUACCUGGAAC | 17 | 6476 |
| HSV1-UL48-657 | − | ACCAACGCCGACCUGUA | 17 | 6477 |
| HSV1-UL48-139 | − | CCAACGCCGACCUGUAC | 17 | 5867 |
| HSV1-UL48-140 | − | CAACGCCGACCUGUACC | 17 | 5868 |
| HSV1-UL48-660 | − | CGCUGCCCAGCGAUGUG | 17 | 6478 |
| HSV1-UL48-142 | − | GCUGCCCAGCGAUGUGG | 17 | 5870 |
| HSV1-UL48-662 | − | CCCAGCGAUGUGGUGGA | 17 | 6479 |
| HSV1-UL48-143 | − | CCAGCGAUGUGGUGGAA | 17 | 5871 |
| HSV1-UL48-144 | − | CAGCGAUGUGGUGGAAU | 17 | 5982 |
| HSV1-UL48-145 | − | AGCGAUGUGGUGGAAUG | 17 | 5983 |
| HSV1-UL48-146 | − | GCGAUGUGGUGGAAUGG | 17 | 5984 |
| HSV1-UL48-667 | − | GGGGGACGCGUACGUCC | 17 | 6480 |
| HSV1-UL48-668 | − | GGCCACCCGCGACGGCC | 17 | 6481 |
| HSV1-UL48-669 | − | CGGCCUCGGGCUCUACU | 17 | 6482 |
| HSV1-UL48-670 | − | CUCUCGUUUCUUCCACG | 17 | 6483 |
| HSV1-UL48-671 | − | UUCUUCCACGCCGAGCU | 17 | 6484 |
| HSV1-UL48-672 | − | CACGCCGAGCUACGGGC | 17 | 6485 |
| HSV1-UL48-156 | − | ACGCCGAGCUACGGGCG | 17 | 5888 |
| HSV1-UL48-157 | − | CGCCGAGCUACGGGCGC | 17 | 5889 |
| HSV1-UL48-675 | − | CCGAGCUACGGGCGCGG | 17 | 6486 |
| HSV1-UL48-158 | − | CGAGCUACGGGCGCGGG | 17 | 5987 |
| HSV1-UL48-677 | − | AGCUACGGGCGCGGGAG | 17 | 6487 |
| HSV1-UL48-678 | + | CGGCAAACAGCUCGUCGACC | 20 | 6488 |
| HSV1-UL48-679 | + | GGCCGGGCGGGGGGGCGGUG | 20 | 6489 |
| HSV1-UL48-112 | + | UGGGACCCCCGGCCGGGCGG | 20 | 6025 |
| HSV1-UL48-111 | + | UUGGGACCCCCGGCCGGGCG | 20 | 6024 |
| HSV1-UL48-110 | + | UUUGGGACCCCCGGCCGGGC | 20 | 6023 |
| HSV1-UL48-109 | + | UUUUGGGACCCCCGGCCGGG | 20 | 6022 |
| HSV1-UL48-684 | + | UUUUUGGGACCCCCGGCCGG | 20 | 6490 |
| HSV1-UL48-685 | + | GGUGUUUUUGGGACCCCCGG | 20 | 6491 |
| HSV1-UL48-104 | + | GGGGGCCGCCGGGGUGUUUU | 20 | 5948 |
| HSV1-UL48-687 | + | GGGGGGCCGCCGGGGUGUUU | 20 | 6492 |
| HSV1-UL48-101 | + | GCGUACAGCGGGGGGGCCGC | 20 | 6020 |
| HSV1-UL48-689 | + | UGCGUACAGCGGGGGGGCCG | 20 | 6493 |
| HSV1-UL48-98 | + | CGCCCCGUUGCGUACAGCGG | 20 | 5939 |
| HSV1-UL48-97 | + | GCGCCCCGUUGCGUACAGCG | 20 | 5938 |
| HSV1-UL48-96 | + | GGCGCCCCGUUGCGUACAGC | 20 | 6019 |
| HSV1-UL48-95 | + | AGGCGCCCCGUUGCGUACAG | 20 | 6018 |
| HSV1-UL48-694 | + | CAGGCGCCCCGUUGCGUACA | 20 | 6494 |
| HSV1-UL48-695 | + | AUGGGUGGGGAGGGCAUGAG | 20 | 6495 |
| HSV1-UL48-696 | + | CGGGCAUGGGUGGGGAGGGC | 20 | 6496 |
| HSV1-UL48-697 | + | GGGGGACGGGCAUGGGUGGG | 20 | 6497 |
| HSV1-UL48-88 | + | GGGGGGGACGGGCAUGGGUG | 20 | 6011 |
| HSV1-UL48-87 | + | CGGGGGGGACGGGCAUGGGU | 20 | 6010 |
| HSV1-UL48-86 | + | GCGGGGGGGACGGGCAUGGG | 20 | 6009 |
| HSV1-UL48-701 | + | GGCGGGGGGGACGGGCAUGG | 20 | 6498 |
| HSV1-UL48-702 | + | GGGCGGCGGGGGGGACGGGC | 20 | 6499 |
| HSV1-UL48-703 | + | UAAAGAGGGCGGCGGGGGGG | 20 | 6500 |
| HSV1-UL48-80 | + | CGGUUAAAGAGGGCGGCGGG | 20 | 5932 |
| HSV1-UL48-79 | + | ACGGUUAAAGAGGGCGGCGG | 20 | 5931 |
| HSV1-UL48-78 | + | GACGGUUAAAGAGGGCGGCG | 20 | 5930 |
| HSV1-UL48-77 | + | AGACGGUUAAAGAGGGCGGC | 20 | 5929 |
| HSV1-UL48-76 | + | GAGACGGUUAAAGAGGGCGG | 20 | 5928 |
| HSV1-UL48-709 | + | GGAGACGGUUAAAGAGGGCG | 20 | 6501 |
| HSV1-UL48-710 | + | UCGUCGAGGAGACGGUUAAA | 20 | 6502 |
| HSV1-UL48-711 | + | AGUCGUCGAGGAGACGGUUA | 20 | 6503 |
| HSV1-UL48-71 | + | CGCUAAAGCCCAAGUCGUCG | 20 | 5915 |
| HSV1-UL48-713 | + | GCGCUAAAGCCCAAGUCGUC | 20 | 6504 |
| HSV1-UL48-714 | + | CCGCGCUAAAGCCCAAGUCG | 20 | 6505 |
| HSV1-UL48-68 | + | AUCGAGCAUGGUACAUAGCG | 20 | 5912 |
| HSV1-UL48-716 | + | UAUCGAGCAUGGUACAUAGC | 20 | 6506 |
| HSV1-UL48-717 | + | ACAGAUCCUCGUUCCAGGUA | 20 | 6507 |
| HSV1-UL48-718 | + | GUCGGCGUUGGUCGGUAGCG | 20 | 6508 |
| HSV1-UL48-60 | + | CAUCGCUGGGCAGCGUUGAU | 20 | 5998 |
| HSV1-UL48-720 | + | ACAUCGCUGGGCAGCGUUGA | 20 | 6509 |
| HSV1-UL48-721 | + | CCCCCCAUUCCACCACAUCG | 20 | 6510 |
| HSV1-UL48-56 | + | AUGUCGAUUUGGGUGCGUUC | 20 | 5995 |
| HSV1-UL48-55 | + | AAUGUCGAUUUGGGUGCGUU | 20 | 5994 |
| HSV1-UL48-724 | + | GAAUGUCGAUUUGGGUGCGU | 20 | 6511 |
| HSV1-UL48-725 | + | CCGUGGGCGCGAAUGUCGAU | 20 | 6512 |
| HSV1-UL48-726 | + | AAGGCCACGUCGCCGUGGGC | 20 | 6513 |
| HSV1-UL48-727 | + | GUAGGGAAGGCCACGUCGCC | 20 | 6514 |
| HSV1-UL48-49 | + | CGCGGGUGGCCGGAAGCGUA | 20 | 5992 |
| HSV1-UL48-48 | + | UCGCGGGUGGCCGGAAGCGU | 20 | 5896 |
| HSV1-UL48-730 | + | GUCGCGGGUGGCCGGAAGCG | 20 | 6515 |
| HSV1-UL48-47 | + | CCGAGGCCGUCGCGGGUGGC | 20 | 5991 |
| HSV1-UL48-732 | + | CCCGAGGCCGUCGCGGGUGG | 20 | 6516 |
| HSV1-UL48-733 | + | UAGUAGAGCCCGAGGCCGUC | 20 | 6517 |
| HSV1-UL48-734 | + | AGAGCGCUUCGUAGUAGAGC | 20 | 6518 |
| HSV1-UL48-735 | + | AACGAGAGAGCGCUUCGUAG | 20 | 6519 |
| HSV1-UL48-736 | + | GCUCGGCGUGGAAGAAACGA | 20 | 6520 |
| HSV1-UL48-737 | + | UAGCUCGGCGUGGAAGAAAC | 20 | 6521 |
| HSV1-UL48-738 | + | CGUAGCUCGGCGUGGAAGAA | 20 | 6522 |
| HSV1-UL48-739 | + | GCGCCCGUAGCUCGGCGUGG | 20 | 6523 |
| HSV1-UL48-42 | + | CCCGCGCCCGUAGCUCGGCG | 20 | 5988 |
| HSV1-UL48-741 | + | UCCCGCGCCCGUAGCUCGGC | 20 | 6524 |
| HSV1-UL48-742 | + | CAAACAGCUCGUCGACC | 17 | 6525 |
| HSV1-UL48-743 | + | CGGGCGGGGGGGCGGUG | 17 | 6526 |
| HSV1-UL48-230 | + | GACCCCCGGCCGGGCGG | 17 | 6068 |
| HSV1-UL48-229 | + | GGACCCCCGGCCGGGCG | 17 | 6067 |
| HSV1-UL48-228 | + | GGGACCCCCGGCCGGGC | 17 | 6066 |
| HSV1-UL48-227 | + | UGGGACCCCCGGCCGGG | 17 | 6065 |
| HSV1-UL48-748 | + | UUGGGACCCCCGGCCGG | 17 | 6527 |
| HSV1-UL48-749 | + | GUUUUUGGGACCCCCGG | 17 | 6528 |
| HSV1-UL48-222 | + | GGCCGCCGGGGUGUUUU | 17 | 5952 |
| HSV1-UL48-751 | + | GGGCCGCCGGGGUGUUU | 17 | 6529 |
| HSV1-UL48-219 | + | UACAGCGGGGGGGCCGC | 17 | 6063 |
| HSV1-UL48-753 | + | GUACAGCGGGGGGGCCG | 17 | 6530 |
| HSV1-UL48-216 | + | CCCGUUGCGUACAGCGG | 17 | 5943 |
| HSV1-UL48-215 | + | CCCCGUUGCGUACAGCG | 17 | 5942 |
| HSV1-UL48-214 | + | GCCCCGUUGCGUACAGC | 17 | 6062 |
| HSV1-UL48-213 | + | CGCCCCGUUGCGUACAG | 17 | 6061 |
| HSV1-UL48-758 | + | GCGCCCCGUUGCGUACA | 17 | 6531 |
| HSV1-UL48-759 | + | GGUGGGGAGGGCAUGAG | 17 | 6532 |
| HSV1-UL48-760 | + | GCAUGGGUGGGGAGGGC | 17 | 6533 |
| HSV1-UL48-761 | + | GGACGGGCAUGGGUGGG | 17 | 6534 |
| HSV1-UL48-206 | + | GGGGACGGGCAUGGGUG | 17 | 6054 |
| HSV1-UL48-205 | + | GGGGGACGGGCAUGGGU | 17 | 6053 |
| HSV1-UL48-204 | + | GGGGGGACGGGCAUGGG | 17 | 6052 |
| HSV1-UL48-765 | + | GGGGGGGACGGGCAUGG | 17 | 6535 |
| HSV1-UL48-766 | + | CGGCGGGGGGGACGGGC | 17 | 6536 |
| HSV1-UL48-767 | + | AGAGGGCGGCGGGGGGG | 17 | 6537 |
| HSV1-UL48-198 | + | UUAAAGAGGGCGGCGGG | 17 | 5937 |
| HSV1-UL48-197 | + | GUUAAAGAGGGCGGCGG | 17 | 5936 |
| HSV1-UL48-196 | + | GGUUAAAGAGGGCGGCG | 17 | 5935 |
| HSV1-UL48-195 | + | CGGUUAAAGAGGGCGGC | 17 | 5934 |
| HSV1-UL48-194 | + | ACGGUUAAAGAGGGCGG | 17 | 5933 |
| HSV1-UL48-773 | + | GACGGUUAAAGAGGGCG | 17 | 6538 |
| HSV1-UL48-774 | + | UCGAGGAGACGGUUAAA | 17 | 6539 |
| HSV1-UL48-775 | + | CGUCGAGGAGACGGUUA | 17 | 6540 |
| HSV1-UL48-189 | + | UAAAGCCCAAGUCGUCG | 17 | 5923 |
| HSV1-UL48-777 | + | CUAAAGCCCAAGUCGUC | 17 | 6541 |
| HSV1-UL48-778 | + | CGCUAAAGCCCAAGUCG | 17 | 6542 |
| HSV1-UL48-186 | + | GAGCAUGGUACAUAGCG | 17 | 5920 |
| HSV1-UL48-780 | + | CGAGCAUGGUACAUAGC | 17 | 6543 |
| HSV1-UL48-781 | + | GAUCCUCGUUCCAGGUA | 17 | 6544 |
| HSV1-UL48-782 | + | GGCGUUGGUCGGUAGCG | 17 | 6545 |
| HSV1-UL48-178 | + | CGCUGGGCAGCGUUGAU | 17 | 6041 |
| HSV1-UL48-784 | + | UCGCUGGGCAGCGUUGA | 17 | 6546 |
| HSV1-UL48-785 | + | CCCAUUCCACCACAUCG | 17 | 6547 |
| HSV1-UL48-174 | + | UCGAUUUGGGUGCGUUC | 17 | 6038 |
| HSV1-UL48-173 | + | GUCGAUUUGGGUGCGUU | 17 | 6037 |
| HSV1-UL48-788 | + | UGUCGAUUUGGGUGCGU | 17 | 6548 |
| HSV1-UL48-789 | + | UGGGCGCGAAUGUCGAU | 17 | 6549 |
| HSV1-UL48-790 | + | GCCACGUCGCCGUGGGC | 17 | 6550 |
| HSV1-UL48-791 | + | GGGAAGGCCACGUCGCC | 17 | 6551 |
| HSV1-UL48-167 | + | GGGUGGCCGGAAGCGUA | 17 | 6035 |
| HSV1-UL48-166 | + | CGGGUGGCCGGAAGCGU | 17 | 5897 |
| HSV1-UL48-794 | + | GCGGGUGGCCGGAAGCG | 17 | 6552 |
| HSV1-UL48-165 | + | AGGCCGUCGCGGGUGGC | 17 | 6034 |
| HSV1-UL48-796 | + | GAGGCCGUCGCGGGUGG | 17 | 6553 |
| HSV1-UL48-797 | + | UAGAGCCCGAGGCCGUC | 17 | 6554 |
| HSV1-UL48-798 | + | GCGCUUCGUAGUAGAGC | 17 | 6555 |
| HSV1-UL48-799 | + | GAGAGAGCGCUUCGUAG | 17 | 6556 |
| HSV1-UL48-800 | + | CGGCGUGGAAGAAACGA | 17 | 6557 |
| HSV1-UL48-801 | + | CUCGGCGUGGAAGAAAC | 17 | 6558 |
| HSV1-UL48-802 | + | AGCUCGGCGUGGAAGAA | 17 | 6559 |
| HSV1-UL48-803 | + | CCCGUAGCUCGGCGUGG | 17 | 6560 |
| HSV1-UL48-160 | + | GCGCCCGUAGCUCGGCG | 17 | 6031 |
| HSV1-UL48-805 | + | CGCGCCCGUAGCUCGGC | 17 | 6561 |

[0726] Table 3E provides exemplary targeting domains for knocking out the UL48 gene selected according to the second tier parameters. The targeting domains are selected based on location within the coding sequence, but downstream of the first 500 bp of the UL48 gene. It is contemplated herein that the targeting domain hybridizes to the target domain through complementary base pairing. Any of the targeting domains in the table can be used with a S. aureus Cas9 molecule that gives double stranded cleavage. Any of the targeting domains in the table can be used with a S. aureus Cas9 single-stranded break nucleases (nickases). In an embodiment, dual targeting is used to create two nicks on opposite DNA strands by using S. aureus Cas9 nickases with two targeting domains that are complementary to opposite DNA strands, e.g., a gRNA comprising any minus strand targeting domain may be paired any gRNA comprising a plus strand targeting domain provided that the two gRNAs are oriented on the DNA such that PAMs face outward and the distance between the 5′ ends of the gRNAs is 0-50 bp.

TABLE 3E

| 2nd Tier | DNA | | Target Site | |
|---|---|---|---|---|
| gRNA Name | Strand | Targeting Domain | Length | Seq ID |
| HSV1-UL48-806 | − | GCACCGCCAGGCGCACAUGC | 20 | 6562 |
| HSV1-UL48-807 | − | UGCGCGGACGCGAUCGCGAC | 20 | 6563 |
| HSV1-UL48-241 | − | GCGCGGACGCGAUCGCGACC | 20 | 6079 |
| HSV1-UL48-242 | − | CGCGGACGCGAUCGCGACCU | 20 | 6080 |
| HSV1-UL48-810 | − | CGGACGCGAUCGCGACCUGG | 20 | 6564 |
| HSV1-UL48-811 | − | AAAUGCUGCGCGCCACGAUC | 20 | 6565 |
| HSV1-UL48-812 | − | ACGAUCGCGGACAGGUACUA | 20 | 6566 |
| HSV1-UL48-813 | − | GAUCGCGGACAGGUACUACC | 20 | 6567 |
| HSV1-UL48-814 | − | UUUGUAUCUAUUUUUGACCC | 20 | 6568 |
| HSV1-UL48-815 | − | UUUUUGACCCGCGAGAUCCU | 20 | 6569 |
| HSV1-UL48-816 | − | GAUCCUAUGGGCCGCGUACG | 20 | 6570 |
| HSV1-UL48-817 | − | UUGACUGCCUCUGUUGCGAC | 20 | 6571 |
| HSV1-UL48-249 | − | UGACUGCCUCUGUUGCGACC | 20 | 6087 |
| HSV1-UL48-819 | − | ACUGCCUCUGUUGCGACCUG | 20 | 6572 |
| HSV1-UL48-820 | − | UGGAGAGCUGGCGUCAGUUG | 20 | 6573 |
| HSV1-UL48-821 | − | CCAGCCCUUCAUGUUCGUCA | 20 | 6574 |
| HSV1-UL48-254 | − | CAGCCCUUCAUGUUCGUCAA | 20 | 6092 |
| HSV1-UL48-823 | − | GUCAACGGAGCGCUCACCGU | 20 | 6575 |
| HSV1-UL48-255 | − | UCAACGGAGCGCUCACCGUC | 20 | 6093 |
| HSV1-UL48-256 | − | CAACGGAGCGCUCACCGUCC | 20 | 6094 |
| HSV1-UL48-257 | − | AACGGAGCGCUCACCGUCCG | 20 | 6095 |
| HSV1-UL48-827 | − | CACCGUCCGGGGAGUGCCAA | 20 | 6576 |
| HSV1-UL48-828 | − | CCAAUCGAGGCCCGCCGGCU | 20 | 6577 |
| HSV1-UL48-260 | − | CAAUCGAGGCCCGCCGGCUG | 20 | 6098 |
| HSV1-UL48-261 | − | AAUCGAGGCCCGCCGGCUGC | 20 | 6099 |
| HSV1-UL48-831 | − | GCGGGAGCUAAACCACAUUC | 20 | 6578 |
| HSV1-UL48-832 | − | CGCUGGUGCGCAGCGCGGCU | 20 | 6579 |
| HSV1-UL48-264 | − | GCUGGUGCGCAGCGCGGCUA | 20 | 6102 |
| HSV1-UL48-834 | − | UGGUGCGCAGCGCGGCUACG | 20 | 6580 |
| HSV1-UL48-265 | − | GGUGCGCAGCGCGGCUACGG | 20 | 6103 |
| HSV1-UL48-836 | − | CAGCGCGGCUACGGAGGAGC | 20 | 6581 |
| HSV1-UL48-266 | − | AGCGCGGCUACGGAGGAGCC | 20 | 6104 |
| HSV1-UL48-838 | − | UGGCAACCAGGCCCGCGCCU | 20 | 6582 |
| HSV1-UL48-839 | − | GGGUACUUUAUGGUGUUGAU | 20 | 6583 |
| HSV1-UL48-840 | − | ACUUUAUGGUGUUGAUUCGG | 20 | 6584 |
| HSV1-UL48-841 | − | UGGUGUUGAUUCGGGCGAAG | 20 | 6585 |
| HSV1-UL48-842 | − | CAGCUUCACGACCUCGCCCU | 20 | 6586 |
| HSV1-UL48-843 | − | UCGCCCUCCGAGGCGGUCAU | 20 | 6587 |
| HSV1-UL48-279 | − | CGCCCUCCGAGGCGGUCAUG | 20 | 6117 |
| HSV1-UL48-280 | − | GCCCUCCGAGGCGGUCAUGC | 20 | 6118 |
| HSV1-UL48-846 | − | ACGCGUACAGCCGCGCGCGU | 20 | 6588 |
| HSV1-UL48-847 | − | CGCGCGUACGAAAAACAAUU | 20 | 6589 |
| HSV1-UL48-848 | − | AAACAAUUACGGGUCUACCA | 20 | 6590 |
| HSV1-UL48-849 | − | ACAAUUACGGGUCUACCAUC | 20 | 6591 |
| HSV1-UL48-850 | − | UCGAGGGCCUGCUCGAUCUC | 20 | 6592 |
| HSV1-UL48-851 | − | UCUCCCGGACGACGACGCCC | 20 | 6593 |
| HSV1-UL48-852 | − | CCCGGACGACGACGCCCCCG | 20 | 6594 |
| HSV1-UL48-853 | − | ACGACGACGCCCCCGAAGAG | 20 | 6595 |
| HSV1-UL48-287 | − | CGACGACGCCCCCGAAGAGG | 20 | 6125 |
| HSV1-UL48-855 | − | CGCGCCUGUCCUUUCUCCCC | 20 | 6596 |
| HSV1-UL48-292 | − | GCGCCUGUCCUUUCUCCCCG | 20 | 6130 |
| HSV1-UL48-857 | − | CCCCCCCGACCGAUGUCAGC | 20 | 6597 |
| HSV1-UL48-295 | − | CCCCCCGACCGAUGUCAGCC | 20 | 6133 |
| HSV1-UL48-296 | − | CCCCCGACCGAUGUCAGCCU | 20 | 6134 |
| HSV1-UL48-297 | − | CCCCGACCGAUGUCAGCCUG | 20 | 6135 |
| HSV1-UL48-861 | − | GACCGAUGUCAGCCUGGGGG | 20 | 6598 |
| HSV1-UL48-862 | − | GGACGAGCUCCACUUAGACG | 20 | 6599 |
| HSV1-UL48-863 | − | ACGAGCUCCACUUAGACGGC | 20 | 6600 |
| HSV1-UL48-864 | − | ACGCGCUAGACGAUUUCGAU | 20 | 6601 |
| HSV1-UL48-865 | − | ACGAUUUCGAUCUGGACAUG | 20 | 6602 |
| HSV1-UL48-304 | − | CGAUUUCGAUCUGGACAUGU | 20 | 6142 |
| HSV1-UL48-305 | − | GAUUUCGAUCUGGACAUGUU | 20 | 6143 |
| HSV1-UL48-306 | − | AUUUCGAUCUGGACAUGUUG | 20 | 6144 |
| HSV1-UL48-869 | − | CGAUCUGGACAUGUUGGGGG | 20 | 6603 |
| HSV1-UL48-308 | − | GAUCUGGACAUGUUGGGGGA | 20 | 6146 |
| HSV1-UL48-309 | − | AUCUGGACAUGUUGGGGGAC | 20 | 6147 |
| HSV1-UL48-872 | − | UGUUGGGGGACGGGGAUUCC | 20 | 6604 |
| HSV1-UL48-311 | − | GUUGGGGGACGGGGAUUCCC | 20 | 6149 |
| HSV1-UL48-874 | − | GGGACGGGGAUUCCCCGGGG | 20 | 6605 |
| HSV1-UL48-314 | − | GGACGGGGAUUCCCCGGGGC | 20 | 6152 |
| HSV1-UL48-876 | − | ACUCCGCCCCCUACGGCGCU | 20 | 6606 |
| HSV1-UL48-877 | − | CGCUCUGGAUAUGGCCGACU | 20 | 6607 |
| HSV1-UL48-878 | − | GGAUAUGGCCGACUUCGAGU | 20 | 6608 |
| HSV1-UL48-879 | − | GCAGAUGUUUACCGAUGCCC | 20 | 6609 |
| HSV1-UL48-319 | − | CAGAUGUUUACCGAUGCCCU | 20 | 6157 |
| HSV1-UL48-881 | − | UACCGAUGCCCUUGGAAUUG | 20 | 6610 |
| HSV1-UL48-882 | − | CCUUGGAAUUGACGAGUACG | 20 | 6611 |
| HSV1-UL48-883 | − | CCGCCAGGCGCACAUGC | 17 | 6612 |
| HSV1-UL48-884 | − | GCGGACGCGAUCGCGAC | 17 | 6613 |
| HSV1-UL48-427 | − | CGGACGCGAUCGCGACC | 17 | 6265 |
| HSV1-UL48-428 | − | GGACGCGAUCGCGACCU | 17 | 6266 |
| HSV1-UL48-887 | − | ACGCGAUCGCGACCUGG | 17 | 6614 |
| HSV1-UL48-888 | − | UGCUGCGCGCCACGAUC | 17 | 6615 |
| HSV1-UL48-889 | − | AUCGCGGACAGGUACUA | 17 | 6616 |
| HSV1-UL48-890 | − | CGCGGACAGGUACUACC | 17 | 6617 |
| HSV1-UL48-891 | − | GUAUCUAUUUUUGACCC | 17 | 6618 |
| HSV1-UL48-892 | − | UUGACCCGCGAGAUCCU | 17 | 6619 |
| HSV1-UL48-893 | − | CCUAUGGGCCGCGUACG | 17 | 6620 |
| HSV1-UL48-894 | − | ACUGCCUCUGUUGCGAC | 17 | 6621 |
| HSV1-UL48-435 | − | CUGCCUCUGUUGCGACC | 17 | 6273 |
| HSV1-UL48-896 | − | GCCUCUGUUGCGACCUG | 17 | 6622 |
| HSV1-UL48-897 | − | AGAGCUGGCGUCAGUUG | 17 | 6623 |
| HSV1-UL48-898 | − | GCCCUUCAUGUUCGUCA | 17 | 6624 |
| HSV1-UL48-440 | − | CCCUUCAUGUUCGUCAA | 17 | 6278 |
| HSV1-UL48-900 | − | AACGGAGCGCUCACCGU | 17 | 6625 |
| HSV1-UL48-441 | − | ACGGAGCGCUCACCGUC | 17 | 6279 |
| HSV1-UL48-442 | − | CGGAGCGCUCACCGUCC | 17 | 6280 |
| HSV1-UL48-443 | − | GGAGCGCUCACCGUCCG | 17 | 6281 |
| HSV1-UL48-904 | − | CGUCCGGGGAGUGCCAA | 17 | 6626 |
| HSV1-UL48-905 | − | AUCGAGGCCCGCCGGCU | 17 | 6627 |
| HSV1-UL48-446 | − | UCGAGGCCCGCCGGCUG | 17 | 6284 |
| HSV1-UL48-447 | − | CGAGGCCCGCCGGCUGC | 17 | 6285 |
| HSV1-UL48-908 | − | GGAGCUAAACCACAUUC | 17 | 6628 |
| HSV1-UL48-909 | − | UGGUGCGCAGCGCGGCU | 17 | 6629 |
| HSV1-UL48-450 | − | GGUGCGCAGCGCGGCUA | 17 | 6288 |
| HSV1-UL48-911 | − | UGCGCAGCGCGGCUACG | 17 | 6630 |
| HSV1-UL48-451 | − | GCGCAGCGCGGCUACGG | 17 | 6289 |
| HSV1-UL48-913 | − | CGCGGCUACGGAGGAGC | 17 | 6631 |
| HSV1-UL48-452 | − | GCGGCUACGGAGGAGCC | 17 | 6290 |
| HSV1-UL48-915 | − | CAACCAGGCCCGCGCCU | 17 | 6632 |
| HSV1-UL48-916 | − | UACUUUAUGGUGUUGAU | 17 | 6633 |
| HSV1-UL48-917 | − | UUAUGGUGUUGAUUCGG | 17 | 6634 |
| HSV1-UL48-918 | − | UGUUGAUUCGGGCGAAG | 17 | 6635 |
| HSV1-UL48-919 | − | CUUCACGACCUCGCCCU | 17 | 6636 |
| HSV1-UL48-920 | − | CCCUCCGAGGCGGUCAU | 17 | 6637 |
| HSV1-UL48-465 | − | CCUCCGAGGCGGUCAUG | 17 | 6303 |
| HSV1-UL48-466 | − | CUCCGAGGCGGUCAUGC | 17 | 6304 |
| HSV1-UL48-923 | − | CGUACAGCCGCGCGCGU | 17 | 6638 |
| HSV1-UL48-924 | − | GCGUACGAAAAACAAUU | 17 | 6639 |
| HSV1-UL48-925 | − | CAAUUACGGGUCUACCA | 17 | 6640 |
| HSV1-UL48-926 | − | AUUACGGGUCUACCAUC | 17 | 6641 |
| HSV1-UL48-927 | − | AGGGCCUGCUCGAUCUC | 17 | 6642 |
| HSV1-UL48-928 | − | CCCGGACGACGACGCCC | 17 | 6643 |
| HSV1-UL48-929 | − | GGACGACGACGCCCCCG | 17 | 6644 |
| HSV1-UL48-930 | − | ACGACGCCCCCGAAGAG | 17 | 6645 |
| HSV1-UL48-473 | − | CGACGCCCCCGAAGAGG | 17 | 6311 |
| HSV1-UL48-932 | − | GCCUGUCCUUUCUCCCC | 17 | 6646 |
| HSV1-UL48-478 | − | CCUGUCCUUUCUCCCCG | 17 | 6316 |
| HSV1-UL48-934 | − | CCCCGACCGAUGUCAGC | 17 | 6647 |
| HSV1-UL48-481 | − | CCCGACCGAUGUCAGCC | 17 | 6319 |
| HSV1-UL48-482 | − | CCGACCGAUGUCAGCCU | 17 | 6320 |
| HSV1-UL48-483 | − | CGACCGAUGUCAGCCUG | 17 | 6321 |
| HSV1-UL48-938 | − | CGAUGUCAGCCUGGGGG | 17 | 6648 |
| HSV1-UL48-939 | − | CGAGCUCCACUUAGACG | 17 | 6649 |
| HSV1-UL48-940 | − | AGCUCCACUUAGACGGC | 17 | 6650 |
| HSV1-UL48-941 | − | CGCUAGACGAUUUCGAU | 17 | 6651 |
| HSV1-UL48-942 | − | AUUUCGAUCUGGACAUG | 17 | 6652 |
| HSV1-UL48-490 | − | UUUCGAUCUGGACAUGU | 17 | 6328 |
| HSV1-UL48-491 | − | UUCGAUCUGGACAUGUU | 17 | 6329 |
| HSV1-UL48-492 | − | UCGAUCUGGACAUGUUG | 17 | 6330 |
| HSV1-UL48-946 | − | UCUGGACAUGUUGGGGG | 17 | 6653 |
| HSV1-UL48-494 | − | CUGGACAUGUUGGGGGA | 17 | 6332 |
| HSV1-UL48-495 | − | UGGACAUGUUGGGGGAC | 17 | 6333 |
| HSV1-UL48-949 | − | UGGGGGACGGGGAUUCC | 17 | 6654 |
| HSV1-UL48-497 | − | GGGGGACGGGGAUUCCC | 17 | 6335 |
| HSV1-UL48-951 | − | ACGGGGAUUCCCCGGGG | 17 | 6655 |
| HSV1-UL48-500 | − | CGGGGAUUCCCCGGGGC | 17 | 6338 |
| HSV1-UL48-953 | − | CCGCCCCCUACGGCGCU | 17 | 6656 |
| HSV1-UL48-954 | − | UCUGGAUAUGGCCGACU | 17 | 6657 |
| HSV1-UL48-955 | − | UAUGGCCGACUUCGAGU | 17 | 6658 |
| HSV1-UL48-956 | − | GAUGUUUACCGAUGCCC | 17 | 6659 |
| HSV1-UL48-505 | − | AUGUUUACCGAUGCCCU | 17 | 6343 |
| HSV1-UL48-958 | − | CGAUGCCCUUGGAAUUG | 17 | 6660 |
| HSV1-UL48-959 | − | UGGAAUUGACGAGUACG | 17 | 6661 |
| HSV1-UL48-960 | + | GGUACCGGUACAGGGCCGAG | 20 | 6662 |
| HSV1-UL48-961 | + | GCGCAGGUACCGGUACAGGG | 20 | 6663 |
| HSV1-UL48-962 | + | CUGGCGCGCAGGUACCGGUA | 20 | 6664 |
| HSV1-UL48-963 | + | UGCGCCUGGCGGUGCAGCUG | 20 | 6665 |
| HSV1-UL48-964 | + | AAAAACAAAACACGCGCCAG | 20 | 6666 |
| HSV1-UL48-965 | + | UACGCGGCCCAUAGGAUCUC | 20 | 6667 |
| HSV1-UL48-966 | + | UGCUCGGCGUACGCGGCCCA | 20 | 6668 |
| HSV1-UL48-967 | + | AACAGAGGCAGUCAAACAGG | 20 | 6669 |
| HSV1-UL48-968 | + | GCCAGCUCUCCAGGUCGCAA | 20 | 6670 |
| HSV1-UL48-397 | + | CGUUGACGAACAUGAAGGGC | 20 | 6235 |
| HSV1-UL48-970 | + | CCGUUGACGAACAUGAAGGG | 20 | 6671 |
| HSV1-UL48-971 | + | GCGCUCCGUUGACGAACAUG | 20 | 6672 |
| HSV1-UL48-972 | + | UGAGCGCUCCGUUGACGAAC | 20 | 6673 |
| HSV1-UL48-973 | + | GGACGGUGAGCGCUCCGUUG | 20 | 6674 |
| HSV1-UL48-974 | + | CGAUUGGCACUCCCCGGACG | 20 | 6675 |
| HSV1-UL48-975 | + | CGGGCCUCGAUUGGCACUCC | 20 | 6676 |
| HSV1-UL48-976 | + | UGGUUUAGCUCCCGCAGCCG | 20 | 6677 |
| HSV1-UL48-977 | + | AGCGGGAGGUUAAGGUGCUC | 20 | 6678 |
| HSV1-UL48-385 | + | UAGCCGCGCUGCGCACCAGC | 20 | 6223 |
| HSV1-UL48-384 | + | GUAGCCGCGCUGCGCACCAG | 20 | 6222 |
| HSV1-UL48-980 | + | CGUAGCCGCGCUGCGCACCA | 20 | 6679 |
| HSV1-UL48-379 | + | UGGUUGCCAUGCAGGGUGGG | 20 | 6217 |
| HSV1-UL48-982 | + | CUGGUUGCCAUGCAGGGUGG | 20 | 6680 |
| HSV1-UL48-378 | + | GCCUGGUUGCCAUGCAGGGU | 20 | 6216 |
| HSV1-UL48-377 | + | GGCCUGGUUGCCAUGCAGGG | 20 | 6215 |
| HSV1-UL48-985 | + | GGGCCUGGUUGCCAUGCAGG | 20 | 6681 |
| HSV1-UL48-986 | + | GCGCGGGCCUGGUUGCCAUG | 20 | 6682 |
| HSV1-UL48-987 | + | ACCAUAAAGUACCCAGAGGC | 20 | 6683 |
| HSV1-UL48-988 | + | AAUCAACACCAUAAAGUACC | 20 | 6684 |
| HSV1-UL48-989 | + | GAAUACGAGUCCAACUUCGC | 20 | 6685 |
| HSV1-UL48-990 | + | CGAGGUCGUGAAGCUGGAAU | 20 | 6686 |
| HSV1-UL48-370 | + | GGAGGGCGAGGUCGUGAAGC | 20 | 6208 |
| HSV1-UL48-992 | + | CGGAGGGCGAGGUCGUGAAG | 20 | 6687 |
| HSV1-UL48-993 | + | CCGCCUCGGAGGGCGAGGUC | 20 | 6688 |
| HSV1-UL48-994 | + | CCGCAUGACCGCCUCGGAGG | 20 | 6689 |
| HSV1-UL48-995 | + | GUUCCCGCAUGACCGCCUCG | 20 | 6690 |
| HSV1-UL48-366 | + | GUGUUCCCGCAUGACCGCCU | 20 | 6204 |
| HSV1-UL48-997 | + | CGUGUUCCCGCAUGACCGCC | 20 | 6691 |
| HSV1-UL48-998 | + | GGGCGUCGUCGUCCGGGAGA | 20 | 6692 |
| HSV1-UL48-362 | + | CUUCGGGGGCGUCGUCGUCC | 20 | 6200 |
| HSV1-UL48-361 | + | UCUUCGGGGGCGUCGUCGUC | 20 | 6199 |
| HSV1-UL48-1001 | + | CUCUUCGGGGGCGUCGUCGU | 20 | 6693 |
| HSV1-UL48-358 | + | GCCGCCAGCCCCGCCUCUUC | 20 | 6196 |
| HSV1-UL48-357 | + | AGCCGCCAGCCCCGCCUCUU | 20 | 6195 |
| HSV1-UL48-1004 | + | GAGCCGCCAGCCCCGCCUCU | 20 | 6694 |
| HSV1-UL48-356 | + | GCGGGGAGAAAGGACAGGCG | 20 | 6194 |
| HSV1-UL48-1006 | + | CGCGGGGAGAAAGGACAGGC | 20 | 6695 |
| HSV1-UL48-1007 | + | GCGUGUGUCCCGCGGGGAGA | 20 | 6696 |
| HSV1-UL48-1008 | + | CUGCGCGUGUGUCCCGCGGG | 20 | 6697 |
| HSV1-UL48-353 | + | GUCUGCGCGUGUGUCCCGCG | 20 | 6191 |
| HSV1-UL48-352 | + | AGUCUGCGCGUGUGUCCCGC | 20 | 6190 |
| HSV1-UL48-351 | + | CAGUCUGCGCGUGUGUCCCG | 20 | 6189 |
| HSV1-UL48-1012 | + | ACAGUCUGCGCGUGUGUCCC | 20 | 6698 |
| HSV1-UL48-348 | + | CCCAGGCUGACAUCGGUCGG | 20 | 6186 |
| HSV1-UL48-347 | + | CCCCAGGCUGACAUCGGUCG | 20 | 6185 |
| HSV1-UL48-346 | + | CCCCCAGGCUGACAUCGGUC | 20 | 6184 |
| HSV1-UL48-345 | + | UCCCCCAGGCUGACAUCGGU | 20 | 6183 |
| HSV1-UL48-1017 | + | GUCCCCCAGGCUGACAUCGG | 20 | 6699 |
| HSV1-UL48-342 | + | CCACGUCCUCGCCGUCUAAG | 20 | 6180 |
| HSV1-UL48-1019 | + | GCCACGUCCUCGCCGUCUAA | 20 | 6700 |
| HSV1-UL48-1020 | + | CGUCCCCCAACAUGUCCAGA | 20 | 6701 |
| HSV1-UL48-340 | + | GGGGGUAAAUCCCGGCCCCG | 20 | 6178 |
| HSV1-UL48-339 | + | GGGGGGUAAAUCCCGGCCCC | 20 | 6177 |
| HSV1-UL48-338 | + | UGGGGGGUAAAUCCCGGCCC | 20 | 6176 |
| HSV1-UL48-1024 | + | GUGGGGGGUAAAUCCCGGCC | 20 | 6702 |
| HSV1-UL48-334 | + | CCGUAGGGGGCGGAGUCGUG | 20 | 6172 |
| HSV1-UL48-333 | + | GCCGUAGGGGGCGGAGUCGU | 20 | 6171 |
| HSV1-UL48-332 | + | CGCCGUAGGGGGCGGAGUCG | 20 | 6170 |
| HSV1-UL48-1028 | + | GCGCCGUAGGGGGCGGAGUC | 20 | 6703 |
| HSV1-UL48-331 | + | AUCCAGAGCGCCGUAGGGGG | 20 | 6169 |
| HSV1-UL48-1030 | + | UAUCCAGAGCGCCGUAGGGG | 20 | 6704 |
| HSV1-UL48-328 | + | GCCAUAUCCAGAGCGCCGUA | 20 | 6166 |
| HSV1-UL48-327 | + | GGCCAUAUCCAGAGCGCCGU | 20 | 6165 |
| HSV1-UL48-1033 | + | CGGCCAUAUCCAGAGCGCCG | 20 | 6705 |
| HSV1-UL48-1034 | + | AACUCGAAGUCGGCCAUAUC | 20 | 6706 |
| HSV1-UL48-1035 | + | CGGUAAACAUCUGCUCAAAC | 20 | 6707 |
| HSV1-UL48-1036 | + | CCACCGUACUCGUCAAUUCC | 20 | 6708 |
| HSV1-UL48-1037 | + | ACCGGUACAGGGCCGAG | 17 | 6709 |
| HSV1-UL48-1038 | + | CAGGUACCGGUACAGGG | 17 | 6710 |
| HSV1-UL48-1039 | + | GCGCGCAGGUACCGGUA | 17 | 6711 |
| HSV1-UL48-1040 | + | GCCUGGCGGUGCAGCUG | 17 | 6712 |
| HSV1-UL48-1041 | + | AACAAAACACGCGCCAG | 17 | 6713 |
| HSV1-UL48-1042 | + | GCGGCCCAUAGGAUCUC | 17 | 6714 |
| HSV1-UL48-1043 | + | UCGGCGUACGCGGCCCA | 17 | 6715 |
| HSV1-UL48-1044 | + | AGAGGCAGUCAAACAGG | 17 | 6716 |
| HSV1-UL48-1045 | + | AGCUCUCCAGGUCGCAA | 17 | 6717 |
| HSV1-UL48-583 | + | UGACGAACAUGAAGGGC | 17 | 6421 |
| HSV1-UL48-1047 | + | UUGACGAACAUGAAGGG | 17 | 6718 |
| HSV1-UL48-1048 | + | CUCCGUUGACGAACAUG | 17 | 6719 |
| HSV1-UL48-1049 | + | GCGCUCCGUUGACGAAC | 17 | 6720 |
| HSV1-UL48-1050 | + | CGGUGAGCGCUCCGUUG | 17 | 6721 |
| HSV1-UL48-1051 | + | UUGGCACUCCCCGGACG | 17 | 6722 |
| HSV1-UL48-1052 | + | GCCUCGAUUGGCACUCC | 17 | 6723 |
| HSV1-UL48-1053 | + | UUUAGCUCCCGCAGCCG | 17 | 6724 |
| HSV1-UL48-1054 | + | GGGAGGUUAAGGUGCUC | 17 | 6725 |
| HSV1-UL48-571 | + | CCGCGCUGCGCACCAGC | 17 | 6409 |
| HSV1-UL48-570 | + | GCCGCGCUGCGCACCAG | 17 | 6408 |
| HSV1-UL48-1057 | + | AGCCGCGCUGCGCACCA | 17 | 6726 |
| HSV1-UL48-565 | + | UUGCCAUGCAGGGUGGG | 17 | 6403 |
| HSV1-UL48-1059 | + | GUUGCCAUGCAGGGUGG | 17 | 6727 |
| HSV1-UL48-564 | + | UGGUUGCCAUGCAGGGU | 17 | 6402 |
| HSV1-UL48-563 | + | CUGGUUGCCAUGCAGGG | 17 | 6401 |
| HSV1-UL48-1062 | + | CCUGGUUGCCAUGCAGG | 17 | 6728 |
| HSV1-UL48-1063 | + | CGGGCCUGGUUGCCAUG | 17 | 6729 |
| HSV1-UL48-1064 | + | AUAAAGUACCCAGAGGC | 17 | 6730 |
| HSV1-UL48-1065 | + | CAACACCAUAAAGUACC | 17 | 6731 |
| HSV1-UL48-1066 | + | UACGAGUCCAACUUCGC | 17 | 6732 |
| HSV1-UL48-1067 | + | GGUCGUGAAGCUGGAAU | 17 | 6733 |
| HSV1-UL48-556 | + | GGGCGAGGUCGUGAAGC | 17 | 6394 |
| HSV1-UL48-1069 | + | AGGGCGAGGUCGUGAAG | 17 | 6734 |
| HSV1-UL48-1070 | + | CCUCGGAGGGCGAGGUC | 17 | 6735 |
| HSV1-UL48-1071 | + | CAUGACCGCCUCGGAGG | 17 | 6736 |
| HSV1-UL48-1072 | + | CCCGCAUGACCGCCUCG | 17 | 6737 |
| HSV1-UL48-552 | + | UUCCCGCAUGACCGCCU | 17 | 6390 |
| HSV1-UL48-1074 | + | GUUCCCGCAUGACCGCC | 17 | 6738 |
| HSV1-UL48-1075 | + | CGUCGUCGUCCGGGAGA | 17 | 6739 |
| HSV1-UL48-548 | + | CGGGGGCGUCGUCGUCC | 17 | 6386 |
| HSV1-UL48-547 | + | UCGGGGGCGUCGUCGUC | 17 | 6385 |
| HSV1-UL48-1078 | + | UUCGGGGGCGUCGUCGU | 17 | 6740 |
| HSV1-UL48-544 | + | GCCAGCCCCGCCUCUUC | 17 | 6382 |
| HSV1-UL48-543 | + | CGCCAGCCCCGCCUCUU | 17 | 6381 |
| HSV1-UL48-1081 | + | CCGCCAGCCCCGCCUCU | 17 | 6741 |
| HSV1-UL48-542 | + | GGGAGAAAGGACAGGCG | 17 | 6380 |
| HSV1-UL48-1083 | + | GGGGAGAAAGGACAGGC | 17 | 6742 |
| HSV1-UL48-1084 | + | UGUGUCCCGCGGGGAGA | 17 | 6743 |
| HSV1-UL48-1085 | + | CGCGUGUGUCCCGCGGG | 17 | 6744 |
| HSV1-UL48-539 | + | UGCGCGUGUGUCCCGCG | 17 | 6377 |
| HSV1-UL48-538 | + | CUGCGCGUGUGUCCCGC | 17 | 6376 |
| HSV1-UL48-537 | + | UCUGCGCGUGUGUCCCG | 17 | 6375 |
| HSV1-UL48-1089 | + | GUCUGCGCGUGUGUCCC | 17 | 6745 |
| HSV1-UL48-534 | + | AGGCUGACAUCGGUCGG | 17 | 6372 |
| HSV1-UL48-533 | + | CAGGCUGACAUCGGUCG | 17 | 6371 |
| HSV1-UL48-532 | + | CCAGGCUGACAUCGGUC | 17 | 6370 |
| HSV1-UL48-531 | + | CCCAGGCUGACAUCGGU | 17 | 6369 |
| HSV1-UL48-1094 | + | CCCCAGGCUGACAUCGG | 17 | 6746 |
| HSV1-UL48-528 | + | CGUCCUCGCCGUCUAAG | 17 | 6366 |
| HSV1-UL48-1096 | + | ACGUCCUCGCCGUCUAA | 17 | 6747 |
| HSV1-UL48-1097 | + | CCCCCAACAUGUCCAGA | 17 | 6748 |
| HSV1-UL48-526 | + | GGUAAAUCCCGGCCCCG | 17 | 6364 |
| HSV1-UL48-525 | + | GGGUAAAUCCCGGCCCC | 17 | 6363 |
| HSV1-UL48-524 | + | GGGGUAAAUCCCGGCCC | 17 | 6362 |
| HSV1-UL48-1101 | + | GGGGGUAAAUCCCGGCC | 17 | 6749 |
| HSV1-UL48-520 | + | UAGGGGGCGGAGUCGUG | 17 | 6358 |
| HSV1-UL48-519 | + | GUAGGGGGCGGAGUCGU | 17 | 6357 |
| HSV1-UL48-518 | + | CGUAGGGGGCGGAGUCG | 17 | 6356 |
| HSV1-UL48-1105 | + | CCGUAGGGGGCGGAGUC | 17 | 6750 |
| HSV1-UL48-517 | + | CAGAGCGCCGUAGGGGG | 17 | 6355 |
| HSV1-UL48-1107 | + | CCAGAGCGCCGUAGGGG | 17 | 6751 |
| HSV1-UL48-514 | + | AUAUCCAGAGCGCCGUA | 17 | 6352 |
| HSV1-UL48-513 | + | CAUAUCCAGAGCGCCGU | 17 | 6351 |
| HSV1-UL48-1110 | + | CCAUAUCCAGAGCGCCG | 17 | 6752 |
| HSV1-UL48-1111 | + | UCGAAGUCGGCCAUAUC | 17 | 6753 |
| HSV1-UL48-1112 | + | UAAACAUCUGCUCAAAC | 17 | 6754 |
| HSV1-UL48-1113 | + | CCGUACUCGUCAAUUCC | 17 | 6755 |

[0727] Table 3F provides exemplary targeting domains for knocking out the UL48 gene selected according to the first tier parameters. The targeting domains are selected based on location within first 500 bp of the coding sequence of the UL48 gene. It is contemplated herein that the targeting domain hybridizes to the target domain through complementary base pairing. Any of the targeting domains in the table can be used with a N. meningitidis Cas9 molecule that gives double stranded cleavage. Any of the targeting domains in the table can be used with a N. meningitidis Cas9 single-stranded break nucleases (nickases). In an embodiment, dual targeting is used to create two nicks on opposite DNA strands by using N. meningitidis Cas9 nickases with two targeting domains that are complementary to opposite DNA strands, e.g., a gRNA comprising any minus strand targeting domain may be paired any gRNA comprising a plus strand targeting domain provided that the two gRNAs are oriented on the DNA such that PAMs face outward and the distance between the 5′ ends of the gRNAs is 0-50 bp.

TABLE 3F

| | | | Target | |
|---|---|---|---|---|
| 1st Tier | DNA | | Site | Seq |
| gRNA Name | Strand | Targeting Domain | Length | ID |
| HSV1-UL48- | + | CACGUCGCCGUGGGCGCGAA | 20 | 6756 |
| 1114 | | | | |
| HSV1-UL48- | + | GUCGCCGUGGGCGCGAA | 20 | 6757 |
| 1115 | | | | |

[0728] Table 3G provides exemplary targeting domains for knocking out the UL48 gene selected according to the second tier parameters. The targeting domains are selected based on location within the coding sequence (but downstream of the first 500 bp) of the UL48 gene. It is contemplated herein that the targeting domain hybridizes to the target domain through complementary base pairing. Any of the targeting domains in the table can be used with a N. meningitidis Cas9 molecule that gives double stranded cleavage. Any of the targeting domains in the table can be used with a N. meningitidis Cas9 single-stranded break nucleases (nickases). In an embodiment, dual targeting is used to create two nicks on opposite DNA strands by using N. meningitidis Cas9 nickases with two targeting domains that are complementary to opposite DNA strands, e.g., a gRNA comprising any minus strand targeting domain may be paired any gRNA comprising a plus strand targeting domain provided that the two gRNAs are oriented on the DNA such that PAMs face outward and the distance between the 5′ ends of the gRNAs is 0-50 bp.

TABLE 3G

| 2nd Tier | DNA | | Target Site | |
|---|---|---|---|---|
| gRNA Name | Strand | Targeting Domain | Length | Seq ID |
| HSV1-UL48-1116 | − | CGCCUCUGGGUACUUUAUGG | 20 | 6758 |
| HSV1-UL48-1117 | − | AUGGCGCAUGCCGACGCGCU | 20 | 6759 |
| HSV1-UL48-308 | − | GAUCUGGACAUGUUGGGGGA | 20 | 6146 |
| HSV1-UL48-874 | − | GGGACGGGGAUUCCCCGGGG | 20 | 6605 |
| HSV1-UL48-1120 | − | CUCUGGGUACUUUAUGG | 17 | 6760 |
| HSV1-UL48-1121 | − | GCGCAUGCCGACGCGCU | 17 | 6761 |
| HSV1-UL48-494 | − | CUGGACAUGUUGGGGGA | 17 | 6332 |
| HSV1-UL48-951 | − | ACGGGGAUUCCCCGGGG | 17 | 6655 |
| HSV1-UL48-1124 | + | UAGCUCCCGCAGCCGGCGGG | 20 | 6762 |
| HSV1-UL48-1125 | + | CUCCCGCAGCCGGCGGG | 20 | 6763 |

[0729] Table 4A provides exemplary targeting domains for knocking out the UL54 gene selected according to first tier parameters. The targeting domains are selected based on location within the first 500 bp of the coding sequence of the UL54 gene and orthogonality against the human genome. It is contemplated herein that the targeting domain hybridizes to the target domain through complementary base pairing. Any of the targeting domains in the table can be used with a S. pyogenes Cas9 molecule that gives double stranded cleavage. Any of the targeting domains in the table can be used with a S. pyogenes Cas9 single-stranded break nucleases (nickases). In an embodiment, dual targeting is used to create two nicks on opposite DNA strands by using S. pyogenes Cas9 nickases with two targeting domains that are complementary to opposite DNA strands, e.g., a gRNA comprising any minus strand targeting domain may be paired any gRNA comprising a plus strand targeting domain provided that the two gRNAs are oriented on the DNA such that PAMs face outward and the distance between the 5′ ends of the gRNAs is 0-50 bp.

TABLE 4A

| 1st Tier | | | Target | |
|---|---|---|---|---|
| gRNA Name | DNA Strand | Targeting Domain | Site Length | Seq ID |
| HSV1-UL54-1 | − | GGACCUCUCCGACAGCGAUC | 20 | 6764 |
| HSV1-UL54-2 | − | CUCCGACAGCGAUCUGGACG | 20 | 6765 |
| HSV1-UL54-3 | − | CCGCCGCGACGACCUGGAAU | 20 | 6766 |
| HSV1-UL54-4 | − | CAGCGGGGAGUGUUCCUCGU | 20 | 6767 |
| HSV1-UL54-5 | − | UUCCUCGUCGGACGAGGACA | 20 | 6768 |
| HSV1-UL54-6 | − | GAUACUCGACGCCGCUCGCC | 20 | 6769 |
| HSV1-UL54-7 | − | ACUCGACGCCGCUCGCCCGG | 20 | 6770 |
| HSV1-UL54-8 | − | CACCCAGACGCCUCGUCCGA | 20 | 6771 |
| HSV1-UL54-9 | − | GCCUCGUCCGACGGAGCGGC | 20 | 6772 |
| HSV1-UL54-10 | − | ACAGUGUGUGGUCGCGCCUC | 20 | 6773 |
| HSV1-UL54-11 | − | CAGUGUGUGGUCGCGCCUCG | 20 | 6774 |
| HSV1-UL54-12 | − | UGUGGUCGCGCCUCGGGGCC | 20 | 6775 |
| HSV1-UL54-13 | − | UUGCUCCCCCGAGCAGCACG | 20 | 6776 |
| HSV1-UL54-14 | − | UCGGGGUCGCGGUGGUCCCG | 20 | 6777 |
| HSV1-UL54-15 | − | CGGGGCUGCCGAUGGUUUGU | 20 | 6778 |
| HSV1-UL54-16 | − | AUGGUUUGUCGGACCCCCGC | 20 | 6779 |
| HSV1-UL54-17 | + | GCGGGGGUCCGACAAACCAU | 20 | 6780 |
| HSV1-UL54-18 | + | CGACAAACCAUCGGCAGCCC | 20 | 6781 |
| HSV1-UL54-19 | + | GACGCCCACGGCGUCCGCCG | 20 | 6782 |
| HSV1-UL54-20 | + | CCUUGCCCCCGUGCUGCUCG | 20 | 6783 |
| HSV1-UL54-21 | + | CUUGCCCCCGUGCUGCUCGG | 20 | 6784 |
| HSV1-UL54-22 | + | CGGGGGAGCAAGACGGUCGC | 20 | 6785 |
| HSV1-UL54-23 | + | GGGGGAGCAAGACGGUCGCC | 20 | 6786 |
| HSV1-UL54-24 | + | CGAGGCGCGACCACACACUG | 20 | 6787 |
| HSV1-UL54-25 | + | GAGGCGCGACCACACACUGU | 20 | 6788 |
| HSV1-UL54-26 | + | UUGGGGCCCUGCCGCUCCGU | 20 | 6789 |
| HSV1-UL54-27 | + | CCCUGCCGCUCCGUCGGACG | 20 | 6790 |
| HSV1-UL54-28 | + | GCUCCGUCGGACGAGGCGUC | 20 | 6791 |
| HSV1-UL54-29 | + | CUCCGUCGGACGAGGCGUCU | 20 | 6792 |
| HSV1-UL54-30 | + | GGUCUUCUGGACGAGACGGG | 20 | 6793 |
| HSV1-UL54-31 | + | GGGCGAGCGGCGUCGAGUAU | 20 | 6794 |
| HSV1-UL54-32 | + | UCCGGUCCGUCCUCUCCGUG | 20 | 6795 |
| HSV1-UL54-33 | + | UUCCAUGUCCUCGUCCGACG | 20 | 6796 |
| HSV1-UL54-34 | + | UGUCCGAUUCCAGGUCGUCG | 20 | 6797 |
| HSV1-UL54-35 | + | CCGAUUCCAGGUCGUCGCGG | 20 | 6798 |
| HSV1-UL54-36 | + | CGGCUCUCCGCCGGCUCGGG | 20 | 6799 |
| HSV1-UL54-37 | + | GUCCUCGUCCAGAUCGCUGU | 20 | 6800 |
| HSV1-UL54-38 | + | CGUCCAGAUCGCUGUCGGAG | 20 | 6801 |
| HSV1-UL54-39 | + | GAUCGCUGUCGGAGAGGUCC | 20 | 6802 |
| HSV1-UL54-40 | + | UGUCGGAGAGGUCCAGGCCG | 20 | 6803 |
| HSV1-UL54-41 | − | CCUCUCCGACAGCGAUC | 17 | 6804 |
| HSV1-UL54-42 | − | CGACAGCGAUCUGGACG | 17 | 6805 |
| HSV1-UL54-43 | − | CCGCGACGACCUGGAAU | 17 | 6806 |
| HSV1-UL54-44 | − | CGGGGAGUGUUCCUCGU | 17 | 6807 |
| HSV1-UL54-45 | − | CUCGUCGGACGAGGACA | 17 | 6808 |
| HSV1-UL54-46 | − | ACUCGACGCCGCUCGCC | 17 | 6809 |
| HSV1-UL54-47 | − | CGACGCCGCUCGCCCGG | 17 | 6810 |
| HSV1-UL54-48 | − | CCAGACGCCUCGUCCGA | 17 | 6811 |
| HSV1-UL54-49 | − | UCGUCCGACGGAGCGGC | 17 | 6812 |
| HSV1-UL54-50 | − | GUGUGUGGUCGCGCCUC | 17 | 6813 |
| HSV1-UL54-51 | − | UGUGUGGUCGCGCCUCG | 17 | 6814 |
| HSV1-UL54-52 | − | GGUCGCGCCUCGGGGCC | 17 | 6815 |
| HSV1-UL54-53 | − | CUCCCCCGAGCAGCACG | 17 | 6816 |
| HSV1-UL54-54 | − | GGGUCGCGGUGGUCCCG | 17 | 6817 |
| HSV1-UL54-55 | − | GGCUGCCGAUGGUUUGU | 17 | 6818 |
| HSV1-UL54-56 | − | GUUUGUCGGACCCCCGC | 17 | 6819 |
| HSV1-UL54-57 | + | GGGGUCCGACAAACCAU | 17 | 6820 |
| HSV1-UL54-58 | + | CAAACCAUCGGCAGCCC | 17 | 6821 |
| HSV1-UL54-59 | + | GCCCACGGCGUCCGCCG | 17 | 6822 |
| HSV1-UL54-60 | + | UGCCCCCGUGCUGCUCG | 17 | 6823 |
| HSV1-UL54-61 | + | GCCCCCGUGCUGCUCGG | 17 | 6824 |
| HSV1-UL54-62 | + | GGGAGCAAGACGGUCGC | 17 | 6825 |
| HSV1-UL54-63 | + | GGAGCAAGACGGUCGCC | 17 | 6826 |
| HSV1-UL54-64 | + | GGCGCGACCACACACUG | 17 | 6827 |
| HSV1-UL54-65 | + | GCGCGACCACACACUGU | 17 | 6828 |
| HSV1-UL54-66 | + | GGGCCCUGCCGCUCCGU | 17 | 6829 |
| HSV1-UL54-67 | + | UGCCGCUCCGUCGGACG | 17 | 6830 |
| HSV1-UL54-68 | + | CCGUCGGACGAGGCGUC | 17 | 6831 |
| HSV1-UL54-69 | + | CGUCGGACGAGGCGUCU | 17 | 6832 |
| HSV1-UL54-70 | + | CUUCUGGACGAGACGGG | 17 | 6833 |
| HSV1-UL54-71 | + | CGAGCGGCGUCGAGUAU | 17 | 6834 |
| HSV1-UL54-72 | + | GGUCCGUCCUCUCCGUG | 17 | 6835 |
| HSV1-UL54-73 | + | CAUGUCCUCGUCCGACG | 17 | 6836 |
| HSV1-UL54-74 | + | CCGAUUCCAGGUCGUCG | 17 | 6837 |
| HSV1-UL54-75 | + | AUUCCAGGUCGUCGCGG | 17 | 6838 |
| HSV1-UL54-76 | + | CUCUCCGCCGGCUCGGG | 17 | 6839 |
| HSV1-UL54-77 | + | CUCGUCCAGAUCGCUGU | 17 | 6840 |
| HSV1-UL54-78 | + | CCAGAUCGCUGUCGGAG | 17 | 6841 |
| HSV1-UL54-79 | + | CGCUGUCGGAGAGGUCC | 17 | 6842 |
| HSV1-UL54-80 | + | CGGAGAGGUCCAGGCCG | 17 | 6843 |

[0730] Table 4B provides exemplary targeting domains for knocking out the UL54 gene selected according to the second tier parameters. The targeting domains are selected based on location within the first 500 bp of the coding sequence of the UL54 gene. It is contemplated herein that the targeting domain hybridizes to the target domain through complementary base pairing. Any of the targeting domains in the table can be used with a S. pyogenes Cas9 molecule that gives double stranded cleavage. Any of the targeting domains in the table can be used with a S. pyogenes Cas9 single-stranded break nucleases (nickases). In an embodiment, dual targeting is used to create two nicks on opposite DNA strands by using S. pyogenes Cas9 nickases with two targeting domains that are complementary to opposite DNA strands, e.g., a gRNA comprising any minus strand targeting domain may be paired any gRNA comprising a plus strand targeting domain provided that the two gRNAs are oriented on the DNA such that PAMs face outward and the distance between the 5′ ends of the gRNAs is 0-50 bp.

TABLE 4B

| 2nd Tier | | | Target Site | |
|---|---|---|---|---|
| gRNA Name | DNA Strand | Targeting Domain | Length | Seq ID |
| HSV1-UL54-81 | − | AUUGAUAUGCUAAUUGACCU | 20 | 6844 |
| HSV1-UL54-82 | − | UAUGCUAAUUGACCUCGGCC | 20 | 6845 |
| HSV1-UL54-83 | − | GGACGAGGACCCCCCCGAGC | 20 | 6846 |
| HSV1-UL54-84 | − | CGAGGACCCCCCCGAGCCGG | 20 | 6847 |
| HSV1-UL54-85 | − | GGAGAGCCGCCGCGACGACC | 20 | 6848 |
| HSV1-UL54-86 | − | GACCUGGAAUCGGACAGCAG | 20 | 6849 |
| HSV1-UL54-87 | − | ACCUGGAAUCGGACAGCAGC | 20 | 6850 |
| HSV1-UL54-88 | − | CCUGGAAUCGGACAGCAGCG | 20 | 6851 |
| HSV1-UL54-89 | − | GGAGUGUUCCUCGUCGGACG | 20 | 6852 |
| HSV1-UL54-90 | − | GAGGACAUGGAAGACCCCCA | 20 | 6853 |
| HSV1-UL54-91 | − | CAUGGAAGACCCCCACGGAG | 20 | 6854 |
| HSV1-UL54-92 | − | GAAGACCCCCACGGAGAGGA | 20 | 6855 |
| HSV1-UL54-93 | − | CCCCCACGGAGAGGACGGAC | 20 | 6856 |
| HSV1-UL54-94 | − | CCGUCUCGUCCAGAAGACCC | 20 | 6857 |
| HSV1-UL54-95 | − | AGACGCCUCGUCCGACGGAG | 20 | 6858 |
| HSV1-UL54-96 | − | CCUCGUCCGACGGAGCGGCA | 20 | 6859 |
| HSV1-UL54-97 | − | AACCAGCGCCCCACAGUGUG | 20 | 6860 |
| HSV1-UL54-98 | − | CACAGUGUGUGGUCGCGCCU | 20 | 6861 |
| HSV1-UL54-99 | − | UCUUGCUCCCCCGAGCAGCA | 20 | 6862 |
| HSV1-UL54-100 | − | CUUGCUCCCCCGAGCAGCAC | 20 | 6863 |
| HSV1-UL54-101 | − | UGCUCCCCCGAGCAGCACGG | 20 | 6864 |
| HSV1-UL54-102 | − | CCCCGAGCAGCACGGGGGCA | 20 | 6865 |
| HSV1-UL54-103 | − | CGAGCAGCACGGGGGCAAGG | 20 | 6866 |
| HSV1-UL54-104 | − | ACCAAAGCCCAGCCUGCCCG | 20 | 6867 |
| HSV1-UL54-105 | − | AAAGCCCAGCCUGCCCGCGG | 20 | 6868 |
| HSV1-UL54-106 | − | CCUGCCCGCGGCGGACGCCG | 20 | 6869 |
| HSV1-UL54-107 | − | CUGCCCGCGGCGGACGCCGU | 20 | 6870 |
| HSV1-UL54-108 | − | GCGGACGCCGUGGGCGUCGC | 20 | 6871 |
| HSV1-UL54-109 | − | CGGACGCCGUGGGCGUCGCA | 20 | 6872 |
| HSV1-UL54-110 | − | GGACGCCGUGGGCGUCGCAG | 20 | 6873 |
| HSV1-UL54-111 | − | GCCGUGGGCGUCGCAGGGGU | 20 | 6874 |
| HSV1-UL54-112 | − | CCGUGGGCGUCGCAGGGGUC | 20 | 6875 |
| HSV1-UL54-113 | − | CGUGGGCGUCGCAGGGGUCG | 20 | 6876 |
| HSV1-UL54-114 | − | CGUCGCAGGGGUCGGGGUCG | 20 | 6877 |
| HSV1-UL54-115 | − | CGCAGGGGUCGGGGUCGCGG | 20 | 6878 |
| HSV1-UL54-116 | − | GGUCGGGGUCGCGGUGGUCC | 20 | 6879 |
| HSV1-UL54-117 | − | GUCGGGGUCGCGGUGGUCCC | 20 | 6880 |
| HSV1-UL54-118 | − | GGUGGUCCCGGGGCUGCCGA | 20 | 6881 |
| HSV1-UL54-119 | + | GACAAACCAUCGGCAGCCCC | 20 | 6882 |
| HSV1-UL54-120 | + | CCCGACCCCUGCGACGCCCA | 20 | 6883 |
| HSV1-UL54-121 | + | ACGCCCACGGCGUCCGCCGC | 20 | 6884 |
| HSV1-UL54-122 | + | CCACGGCGUCCGCCGCGGGC | 20 | 6885 |
| HSV1-UL54-123 | + | GGCGUCCGCCGCGGGCAGGC | 20 | 6886 |
| HSV1-UL54-124 | + | GCGUCCGCCGCGGGCAGGCU | 20 | 6887 |
| HSV1-UL54-125 | + | GCCGCGGGCAGGCUGGGCUU | 20 | 6888 |
| HSV1-UL54-126 | + | CGGGCAGGCUGGGCUUUGGU | 20 | 6889 |
| HSV1-UL54-127 | + | GCAGGCUGGGCUUUGGUCGG | 20 | 6890 |
| HSV1-UL54-128 | + | CAGGCUGGGCUUUGGUCGGU | 20 | 6891 |
| HSV1-UL54-129 | + | AGGCUGGGCUUUGGUCGGUG | 20 | 6892 |
| HSV1-UL54-130 | + | GGCUGGGCUUUGGUCGGUGG | 20 | 6893 |
| HSV1-UL54-131 | + | GGGCUUUGGUCGGUGGGGGU | 20 | 6894 |
| HSV1-UL54-132 | + | CUUUGGUCGGUGGGGGUUGG | 20 | 6895 |
| HSV1-UL54-133 | + | UGGUCGGUGGGGGUUGGAGG | 20 | 6896 |
| HSV1-UL54-134 | + | GGUCGGUGGGGGUUGGAGGC | 20 | 6897 |
| HSV1-UL54-135 | + | CACCUUGCCCCCGUGCUGCU | 20 | 6898 |
| HSV1-UL54-136 | + | ACCUUGCCCCCGUGCUGCUC | 20 | 6899 |
| HSV1-UL54-137 | + | UGCUGCUCGGGGGAGCAAGA | 20 | 6900 |
| HSV1-UL54-138 | + | AAGACGGUCGCCGGGCCCCG | 20 | 6901 |
| HSV1-UL54-139 | + | AGGCGCGACCACACACUGUG | 20 | 6902 |
| HSV1-UL54-140 | + | GACCACACACUGUGGGGCGC | 20 | 6903 |
| HSV1-UL54-141 | + | ACACUGUGGGGCGCUGGUUG | 20 | 6904 |
| HSV1-UL54-142 | + | GGGCGCUGGUUGAGGAUCGU | 20 | 6905 |
| HSV1-UL54-143 | + | GGCGCUGGUUGAGGAUCGUU | 20 | 6906 |
| HSV1-UL54-144 | + | GCGCUGGUUGAGGAUCGUUG | 20 | 6907 |
| HSV1-UL54-145 | + | CGGACGAGGCGUCUGGGUGC | 20 | 6908 |
| HSV1-UL54-146 | + | GGACGAGGCGUCUGGGUGCU | 20 | 6909 |
| HSV1-UL54-147 | + | CGUCUGGGUGCUGGGUACGC | 20 | 6910 |
| HSV1-UL54-148 | + | GUCUGGGUGCUGGGUACGCC | 20 | 6911 |
| HSV1-UL54-149 | + | UCUGGGUGCUGGGUACGCCG | 20 | 6912 |
| HSV1-UL54-150 | + | CUGGGUACGCCGGGGUCUUC | 20 | 6913 |
| HSV1-UL54-151 | + | CCGGGGUCUUCUGGACGAGA | 20 | 6914 |
| HSV1-UL54-152 | + | CGGGGUCUUCUGGACGAGAC | 20 | 6915 |
| HSV1-UL54-153 | + | GGACGAGACGGGCGGACCGC | 20 | 6916 |
| HSV1-UL54-154 | + | GACGAGACGGGCGGACCGCC | 20 | 6917 |
| HSV1-UL54-155 | + | CGGGCGGACCGCCGGGCGAG | 20 | 6918 |
| HSV1-UL54-156 | + | GCGGCGUCGAGUAUCGGCUC | 20 | 6919 |
| HSV1-UL54-157 | + | GCUCCGGUCCGUCCUCUCCG | 20 | 6920 |
| HSV1-UL54-158 | + | CUCCGGUCCGUCCUCUCCGU | 20 | 6921 |
| HSV1-UL54-159 | + | CCGGUCCGUCCUCUCCGUGG | 20 | 6922 |
| HSV1-UL54-160 | + | CCCCGCUGCUGUCCGAUUCC | 20 | 6923 |
| HSV1-UL54-161 | + | UCGUCGCGGCGGCUCUCCGC | 20 | 6924 |
| HSV1-UL54-162 | + | GCGGCGGCUCUCCGCCGGCU | 20 | 6925 |
| HSV1-UL54-163 | + | CGGCGGCUCUCCGCCGGCUC | 20 | 6926 |
| HSV1-UL54-164 | + | GGCGGCUCUCCGCCGGCUCG | 20 | 6927 |
| HSV1-UL54-165 | + | GCGGCUCUCCGCCGGCUCGG | 20 | 6928 |
| HSV1-UL54-166 | + | GGCUCUCCGCCGGCUCGGGG | 20 | 6929 |
| HSV1-UL54-167 | − | GAUAUGCUAAUUGACCU | 17 | 6930 |
| HSV1-UL54-168 | − | GCUAAUUGACCUCGGCC | 17 | 6931 |
| HSV1-UL54-169 | − | CGAGGACCCCCCCGAGC | 17 | 6932 |
| HSV1-UL54-170 | − | GGACCCCCCCGAGCCGG | 17 | 6933 |
| HSV1-UL54-171 | − | GAGCCGCCGCGACGACC | 17 | 6934 |
| HSV1-UL54-172 | − | CUGGAAUCGGACAGCAG | 17 | 6935 |
| HSV1-UL54-173 | − | UGGAAUCGGACAGCAGC | 17 | 6936 |
| HSV1-UL54-174 | − | GGAAUCGGACAGCAGCG | 17 | 6937 |
| HSV1-UL54-175 | − | GUGUUCCUCGUCGGACG | 17 | 6938 |
| HSV1-UL54-176 | − | GACAUGGAAGACCCCCA | 17 | 6939 |
| HSV1-UL54-177 | − | GGAAGACCCCCACGGAG | 17 | 6940 |
| HSV1-UL54-178 | − | GACCCCCACGGAGAGGA | 17 | 6941 |
| HSV1-UL54-179 | − | CCACGGAGAGGACGGAC | 17 | 6942 |
| HSV1-UL54-180 | − | UCUCGUCCAGAAGACCC | 17 | 6943 |
| HSV1-UL54-181 | − | CGCCUCGUCCGACGGAG | 17 | 6944 |
| HSV1-UL54-182 | − | CGUCCGACGGAGCGGCA | 17 | 6945 |
| HSV1-UL54-183 | − | CAGCGCCCCACAGUGUG | 17 | 6946 |
| HSV1-UL54-184 | − | AGUGUGUGGUCGCGCCU | 17 | 6947 |
| HSV1-UL54-185 | − | UGCUCCCCCGAGCAGCA | 17 | 6948 |
| HSV1-UL54-186 | − | GCUCCCCCGAGCAGCAC | 17 | 6949 |
| HSV1-UL54-187 | − | UCCCCCGAGCAGCACGG | 17 | 6950 |
| HSV1-UL54-188 | − | CGAGCAGCACGGGGGCA | 17 | 6951 |
| HSV1-UL54-189 | − | GCAGCACGGGGGCAAGG | 17 | 6952 |
| HSV1-UL54-190 | − | AAAGCCCAGCCUGCCCG | 17 | 6953 |
| HSV1-UL54-191 | − | GCCCAGCCUGCCCGCGG | 17 | 6954 |
| HSV1-UL54-192 | − | GCCCGCGGCGGACGCCG | 17 | 6955 |
| HSV1-UL54-193 | − | CCCGCGGCGGACGCCGU | 17 | 6956 |
| HSV1-UL54-194 | − | GACGCCGUGGGCGUCGC | 17 | 6957 |
| HSV1-UL54-195 | − | ACGCCGUGGGCGUCGCA | 17 | 6958 |
| HSV1-UL54-196 | − | CGCCGUGGGCGUCGCAG | 17 | 6959 |
| HSV1-UL54-197 | − | GUGGGCGUCGCAGGGGU | 17 | 6960 |
| HSV1-UL54-198 | − | UGGGCGUCGCAGGGGUC | 17 | 6961 |
| HSV1-UL54-199 | − | GGGCGUCGCAGGGGUCG | 17 | 6962 |
| HSV1-UL54-200 | − | CGCAGGGGUCGGGGUCG | 17 | 6963 |
| HSV1-UL54-201 | − | AGGGGUCGGGGUCGCGG | 17 | 6964 |
| HSV1-UL54-202 | − | CGGGGUCGCGGUGGUCC | 17 | 6965 |
| HSV1-UL54-203 | − | GGGGUCGCGGUGGUCCC | 17 | 6966 |
| HSV1-UL54-204 | − | GGUCCCGGGGCUGCCGA | 17 | 6967 |
| HSV1-UL54-205 | + | AAACCAUCGGCAGCCCC | 17 | 6968 |
| HSV1-UL54-206 | + | GACCCCUGCGACGCCCA | 17 | 6969 |
| HSV1-UL54-207 | + | CCCACGGCGUCCGCCGC | 17 | 6970 |
| HSV1-UL54-208 | + | CGGCGUCCGCCGCGGGC | 17 | 6971 |
| HSV1-UL54-209 | + | GUCCGCCGCGGGCAGGC | 17 | 6972 |
| HSV1-UL54-210 | + | UCCGCCGCGGGCAGGCU | 17 | 6973 |
| HSV1-UL54-211 | + | GCGGGCAGGCUGGGCUU | 17 | 6974 |
| HSV1-UL54-212 | + | GCAGGCUGGGCUUUGGU | 17 | 6975 |
| HSV1-UL54-213 | + | GGCUGGGCUUUGGUCGG | 17 | 6976 |
| HSV1-UL54-214 | + | GCUGGGCUUUGGUCGGU | 17 | 6977 |
| HSV1-UL54-215 | + | CUGGGCUUUGGUCGGUG | 17 | 6978 |
| HSV1-UL54-216 | + | UGGGCUUUGGUCGGUGG | 17 | 6979 |
| HSV1-UL54-217 | + | CUUUGGUCGGUGGGGGU | 17 | 6980 |
| HSV1-UL54-218 | + | UGGUCGGUGGGGGUUGG | 17 | 6981 |
| HSV1-UL54-219 | + | UCGGUGGGGGUUGGAGG | 17 | 6982 |
| HSV1-UL54-220 | + | CGGUGGGGGUUGGAGGC | 17 | 6983 |
| HSV1-UL54-221 | + | CUUGCCCCCGUGCUGCU | 17 | 6984 |
| HSV1-UL54-222 | + | UUGCCCCCGUGCUGCUC | 17 | 6985 |
| HSV1-UL54-223 | + | UGCUCGGGGGAGCAAGA | 17 | 6986 |
| HSV1-UL54-224 | + | ACGGUCGCCGGGCCCCG | 17 | 6987 |
| HSV1-UL54-225 | + | CGCGACCACACACUGUG | 17 | 6988 |
| HSV1-UL54-226 | + | CACACACUGUGGGGCGC | 17 | 6989 |
| HSV1-UL54-227 | + | CUGUGGGGCGCUGGUUG | 17 | 6990 |
| HSV1-UL54-228 | + | CGCUGGUUGAGGAUCGU | 17 | 6991 |
| HSV1-UL54-229 | + | GCUGGUUGAGGAUCGUU | 17 | 6992 |
| HSV1-UL54-230 | + | CUGGUUGAGGAUCGUUG | 17 | 6993 |
| HSV1-UL54-231 | + | ACGAGGCGUCUGGGUGC | 17 | 6994 |
| HSV1-UL54-232 | + | CGAGGCGUCUGGGUGCU | 17 | 6995 |
| HSV1-UL54-233 | + | CUGGGUGCUGGGUACGC | 17 | 6996 |
| HSV1-UL54-234 | + | UGGGUGCUGGGUACGCC | 17 | 6997 |
| HSV1-UL54-235 | + | GGGUGCUGGGUACGCCG | 17 | 6998 |
| HSV1-UL54-236 | + | GGUACGCCGGGGUCUUC | 17 | 6999 |
| HSV1-UL54-237 | + | GGGUCUUCUGGACGAGA | 17 | 7000 |
| HSV1-UL54-238 | + | GGUCUUCUGGACGAGAC | 17 | 7001 |
| HSV1-UL54-239 | + | CGAGACGGGCGGACCGC | 17 | 7002 |
| HSV1-UL54-240 | + | GAGACGGGCGGACCGCC | 17 | 7003 |
| HSV1-UL54-241 | + | GCGGACCGCCGGGCGAG | 17 | 7004 |
| HSV1-UL54-242 | + | GCGUCGAGUAUCGGCUC | 17 | 7005 |
| HSV1-UL54-243 | + | CCGGUCCGUCCUCUCCG | 17 | 7006 |
| HSV1-UL54-244 | + | CGGUCCGUCCUCUCCGU | 17 | 7007 |
| HSV1-UL54-245 | + | GUCCGUCCUCUCCGUGG | 17 | 7008 |
| HSV1-UL54-246 | + | CGCUGCUGUCCGAUUCC | 17 | 7009 |
| HSV1-UL54-247 | + | UCGCGGCGGCUCUCCGC | 17 | 7010 |
| HSV1-UL54-248 | + | GCGGCUCUCCGCCGGCU | 17 | 7011 |
| HSV1-UL54-249 | + | CGGCUCUCCGCCGGCUC | 17 | 7012 |
| HSV1-UL54-250 | + | GGCUCUCCGCCGGCUCG | 17 | 7013 |
| HSV1-UL54-251 | + | GCUCUCCGCCGGCUCGG | 17 | 7014 |
| HSV1-UL54-252 | + | UCUCCGCCGGCUCGGGG | 17 | 7015 |

[0731] Table 4C provides exemplary targeting domains for knocking out the UL54 gene selected according to the third tier parameters. The targeting domains are selected based on location within the coding sequence, but downstream of the first 500 bp of the UL54 gene. It is contemplated herein that the targeting domain hybridizes to the target domain through complementary base pairing. Any of the targeting domains in the table can be used with a S. pyogenes Cas9 molecule that gives double stranded cleavage. Any of the targeting domains in the table can be used with a S. pyogenes Cas9 single-stranded break nucleases (nickases). In an embodiment, dual targeting is used to create two nicks on opposite DNA strands by using S. pyogenes Cas9 nickases with two targeting domains that are complementary to opposite DNA strands, e.g., a gRNA comprising any minus strand targeting domain may be paired any gRNA comprising a plus strand targeting domain provided that the two gRNAs are oriented on the DNA such that PAMs face outward and the distance between the 5′ ends of the gRNAs is 0-50 bp.

TABLE 4C

| 3rd Tier | | | Target Site | |
|---|---|---|---|---|
| gRNA Name | DNA Strand | Targeting Domain | Length | Seq ID |
| HSV1-UL54-253 | − | AGAACCAAUCGCAACCCUGG | 20 | 7016 |
| HSV1-UL54-254 | − | AACCCUGGGGGACCCCGCCC | 20 | 7017 |
| HSV1-UL54-255 | − | ACCCUGGGGGACCCCGCCCC | 20 | 7018 |
| HSV1-UL54-256 | − | CCCUGGGGGACCCCGCCCCG | 20 | 7019 |
| HSV1-UL54-257 | − | UGGGGGACCCCGCCCCGGGG | 20 | 7020 |
| HSV1-UL54-258 | − | GGGGGACCCCGCCCCGGGGC | 20 | 7021 |
| HSV1-UL54-259 | − | GGGGACCCCGCCCCGGGGCG | 20 | 7022 |
| HSV1-UL54-260 | − | GACCCCGCCCCGGGGCGGGG | 20 | 7023 |
| HSV1-UL54-261 | − | CCGCCCCGGGGCGGGGUGGA | 20 | 7024 |
| HSV1-UL54-262 | − | CCCGGGGCGGGGUGGACGGA | 20 | 7025 |
| HSV1-UL54-263 | − | GCGGGGUGGACGGACGGCCC | 20 | 7026 |
| HSV1-UL54-264 | − | GACGGCCCCGGCGCCCCCCA | 20 | 7027 |
| HSV1-UL54-265 | − | CCCCGGCGCCCCCCAUGGCG | 20 | 7028 |
| HSV1-UL54-266 | − | GCGCCCCCCAUGGCGAGGCG | 20 | 7029 |
| HSV1-UL54-267 | − | CCCCAUGGCGAGGCGUGGCG | 20 | 7030 |
| HSV1-UL54-268 | − | AGUGAGCAGCCCGACCCACC | 20 | 7031 |
| HSV1-UL54-269 | − | GAGCAGCCCGACCCACCCGG | 20 | 7032 |
| HSV1-UL54-270 | − | CCGACCCACCCGGAGGCCAG | 20 | 7033 |
| HSV1-UL54-271 | − | CACCCGGAGGCCAGCGGACA | 20 | 7034 |
| HSV1-UL54-272 | − | ACCCGGAGGCCAGCGGACAC | 20 | 7035 |
| HSV1-UL54-273 | − | CCCGGAGGCCAGCGGACACG | 20 | 7036 |
| HSV1-UL54-274 | − | ACCCCCCCCGCUAAUGACGC | 20 | 7037 |
| HSV1-UL54-275 | − | GGCGAUUGCCCCCCCGCCCG | 20 | 7038 |
| HSV1-UL54-276 | − | GCCCGCGGACCCCCGCGCCC | 20 | 7039 |
| HSV1-UL54-277 | − | GGACCCCCGCGCCCCGGCCC | 20 | 7040 |
| HSV1-UL54-278 | − | CGCCCCGGCCCCGGAGCGAA | 20 | 7041 |
| HSV1-UL54-279 | − | ACACCAUCGACGCCACCACG | 20 | 7042 |
| HSV1-UL54-280 | − | CAUCGACGCCACCACGCGGU | 20 | 7043 |
| HSV1-UL54-281 | − | GCGCUCCAUCUCCGAGCGCG | 20 | 7044 |
| HSV1-UL54-282 | − | CUCCAUCUCCGAGCGCGCGG | 20 | 7045 |
| HSV1-UL54-283 | − | GACCGCAUCAGCGAGAGCUU | 20 | 7046 |
| HSV1-UL54-284 | − | GAGCUUUGGCCGCAGCGCAC | 20 | 7047 |
| HSV1-UL54-285 | − | CAGGUCAUGCACGACCCCUU | 20 | 7048 |
| HSV1-UL54-286 | − | AGGUCAUGCACGACCCCUUU | 20 | 7049 |
| HSV1-UL54-287 | − | GGUCAUGCACGACCCCUUUG | 20 | 7050 |
| HSV1-UL54-288 | − | GUCAUGCACGACCCCUUUGG | 20 | 7051 |
| HSV1-UL54-289 | − | UCAUGCACGACCCCUUUGGG | 20 | 7052 |
| HSV1-UL54-290 | − | UUCCCGCCGCGAAUAGCCCC | 20 | 7053 |
| HSV1-UL54-291 | − | UCCCGCCGCGAAUAGCCCCU | 20 | 7054 |
| HSV1-UL54-292 | − | CGCGAAUAGCCCCUGGGCCC | 20 | 7055 |
| HSV1-UL54-293 | − | UAGCCCCUGGGCCCCGGUGC | 20 | 7056 |
| HSV1-UL54-294 | − | CCCCUGGGCCCCGGUGCUGG | 20 | 7057 |
| HSV1-UL54-295 | − | CCCUGGGCCCCGGUGCUGGC | 20 | 7058 |
| HSV1-UL54-296 | − | GCCCCGGUGCUGGCGGGCCA | 20 | 7059 |
| HSV1-UL54-297 | − | CCGGUGCUGGCGGGCCAAGG | 20 | 7060 |
| HSV1-UL54-298 | − | CGGUGCUGGCGGGCCAAGGA | 20 | 7061 |
| HSV1-UL54-299 | − | CCUUUGACGCCGAGACCAGA | 20 | 7062 |
| HSV1-UL54-300 | − | CUUUGACGCCGAGACCAGAC | 20 | 7063 |
| HSV1-UL54-301 | − | CCGAGACCAGACGGGUCUCC | 20 | 7064 |
| HSV1-UL54-302 | − | CGAGACCAGACGGGUCUCCU | 20 | 7065 |
| HSV1-UL54-303 | − | ACGGGUCUCCUGGGAAACCU | 20 | 7066 |
| HSV1-UL54-304 | − | UGGGAAACCUUGGUCGCCCA | 20 | 7067 |
| HSV1-UL54-305 | − | AGCCUCUAUCGCACUUUUGC | 20 | 7068 |
| HSV1-UL54-306 | − | GCACUUUUGCCGGCAAUCCU | 20 | 7069 |
| HSV1-UL54-307 | − | CACUUUUGCCGGCAAUCCUC | 20 | 7070 |
| HSV1-UL54-308 | − | UCGGGCCGCAUCGACCGCCA | 20 | 7071 |
| HSV1-UL54-309 | − | GCGCCAAGAAAAUUUCAUCG | 20 | 7072 |
| HSV1-UL54-310 | − | AGAAAAUUUCAUCGAGGCGC | 20 | 7073 |
| HSV1-UL54-311 | − | GGCCUCCGCCGACGAGACGC | 20 | 7074 |
| HSV1-UL54-312 | − | CCGCCGACGAGACGCUGGCG | 20 | 7075 |
| HSV1-UL54-313 | − | CAACCUGCCGCUGCGCCCCC | 20 | 7076 |
| HSV1-UL54-314 | − | CGCCCCCAGGACCCCAUUAU | 20 | 7077 |
| HSV1-UL54-315 | − | GCCCCCAGGACCCCAUUAUC | 20 | 7078 |
| HSV1-UL54-316 | − | CCCCAUUAUCGGGACGACCG | 20 | 7079 |
| HSV1-UL54-317 | − | CGGGACGACCGCGGCUGUGC | 20 | 7080 |
| HSV1-UL54-318 | − | AUAACCUCGCCACGCGCCUG | 20 | 7081 |
| HSV1-UL54-319 | − | CUUUCUCCAGUGCUACCUGA | 20 | 7082 |
| HSV1-UL54-320 | − | CAGUGCUACCUGAAGGCGCG | 20 | 7083 |
| HSV1-UL54-321 | − | CUGAAGGCGCGAGGCCUGUG | 20 | 7084 |
| HSV1-UL54-322 | − | GGCGCGAGGCCUGUGCGGCC | 20 | 7085 |
| HSV1-UL54-323 | − | GCCUGGACGAACUGUGUUCG | 20 | 7086 |
| HSV1-UL54-324 | − | UGGACGAACUGUGUUCGCGG | 20 | 7087 |
| HSV1-UL54-325 | − | ACUGUGUUCGCGGCGGCGUC | 20 | 7088 |
| HSV1-UL54-326 | − | GUGUUCGCGGCGGCGUCUGG | 20 | 7089 |
| HSV1-UL54-327 | − | GCGGCGUCUGGCGGACAUUA | 20 | 7090 |
| HSV1-UL54-328 | − | AUCCUUCGUGUUUGUCAUUC | 20 | 7091 |
| HSV1-UL54-329 | − | UCGUGUUUGUCAUUCUGGCC | 20 | 7092 |
| HSV1-UL54-330 | − | CUCGCCAACCGCGUCGAGCG | 20 | 7093 |
| HSV1-UL54-331 | − | CCGCGUCGAGCGUGGCGUCG | 20 | 7094 |
| HSV1-UL54-332 | − | GAGAUCGACUACGCGACCCU | 20 | 7095 |
| HSV1-UL54-333 | − | GACUACGCGACCCUUGGUGU | 20 | 7096 |
| HSV1-UL54-334 | − | ACUACGCGACCCUUGGUGUC | 20 | 7097 |
| HSV1-UL54-335 | − | CUACGCGACCCUUGGUGUCG | 20 | 7098 |
| HSV1-UL54-336 | − | GCGACCCUUGGUGUCGGGGU | 20 | 7099 |
| HSV1-UL54-337 | − | AAGAUGCAUUUCUACCUCCC | 20 | 7100 |
| HSV1-UL54-338 | − | AGAUGCAUUUCUACCUCCCC | 20 | 7101 |
| HSV1-UL54-339 | − | GAUGCAUUUCUACCUCCCCG | 20 | 7102 |
| HSV1-UL54-340 | − | CUACCUCCCCGGGGCCUGCA | 20 | 7103 |
| HSV1-UL54-341 | − | CCUCCCCGGGGCCUGCAUGG | 20 | 7104 |
| HSV1-UL54-342 | − | CUCCCCGGGGCCUGCAUGGC | 20 | 7105 |
| HSV1-UL54-343 | − | AAUCCUAGACACGCACCGCC | 20 | 7106 |
| HSV1-UL54-344 | − | GAGUCGUGUCUGCGAGUUGA | 20 | 7107 |
| HSV1-UL54-345 | − | GUCGCCCCCCCGUACGUGCA | 20 | 7108 |
| HSV1-UL54-346 | + | AAAUAUUUGCCGUGCACGUA | 20 | 7109 |
| HSV1-UL54-347 | + | AAUAUUUGCCGUGCACGUAC | 20 | 7110 |
| HSV1-UL54-348 | + | AUAUUUGCCGUGCACGUACG | 20 | 7111 |
| HSV1-UL54-349 | + | UAUUUGCCGUGCACGUACGG | 20 | 7112 |
| HSV1-UL54-350 | + | AUUUGCCGUGCACGUACGGG | 20 | 7113 |
| HSV1-UL54-351 | + | UUUGCCGUGCACGUACGGGG | 20 | 7114 |
| HSV1-UL54-352 | + | CGGGGGGGCGACGAUGUGAC | 20 | 7115 |
| HSV1-UL54-353 | + | AGACACGACUCGAACACUCC | 20 | 7116 |
| HSV1-UL54-354 | + | CACGACUCGAACACUCCUGG | 20 | 7117 |
| HSV1-UL54-355 | + | ACUCCUGGCGGUGCGUGUCU | 20 | 7118 |
| HSV1-UL54-356 | + | GCGUGUCUAGGAUUUCGAUC | 20 | 7119 |
| HSV1-UL54-357 | + | UUCGAUCAGGCCCGCCAUGC | 20 | 7120 |
| HSV1-UL54-358 | + | CAGGCCCGCCAUGCAGGCCC | 20 | 7121 |
| HSV1-UL54-359 | + | AGGCCCGCCAUGCAGGCCCC | 20 | 7122 |
| HSV1-UL54-360 | + | GGCCCGCCAUGCAGGCCCCG | 20 | 7123 |
| HSV1-UL54-361 | + | CCGCCAUGCAGGCCCCGGGG | 20 | 7124 |
| HSV1-UL54-362 | + | UCUCUCCGACCCCGACACCA | 20 | 7125 |
| HSV1-UL54-363 | + | CUCUCCGACCCCGACACCAA | 20 | 7126 |
| HSV1-UL54-364 | + | CCGCGACGCCACGCUCGACG | 20 | 7127 |
| HSV1-UL54-365 | + | GACGCCACGCUCGACGCGGU | 20 | 7128 |
| HSV1-UL54-366 | + | CUCGACGCGGUUGGCGAGCC | 20 | 7129 |
| HSV1-UL54-367 | + | GGCCAGAAUGACAAACACGA | 20 | 7130 |
| HSV1-UL54-368 | + | GCCGCGAACACAGUUCGUCC | 20 | 7131 |
| HSV1-UL54-369 | + | ACAGUUCGUCCAGGCCGCAC | 20 | 7132 |
| HSV1-UL54-370 | + | CGCACAGGCCUCGCGCCUUC | 20 | 7133 |
| HSV1-UL54-371 | + | CUCGCGCCUUCAGGUAGCAC | 20 | 7134 |
| HSV1-UL54-372 | + | CUUCAGGUAGCACUGGAGAA | 20 | 7135 |
| HSV1-UL54-373 | + | UUCAGGUAGCACUGGAGAAA | 20 | 7136 |
| HSV1-UL54-374 | + | AGCACUGGAGAAAGGGCCGC | 20 | 7137 |
| HSV1-UL54-375 | + | GAGAAAGGGCCGCAGGCGCG | 20 | 7138 |
| HSV1-UL54-376 | + | AGGGCCGCAGGCGCGUGGCG | 20 | 7139 |
| HSV1-UL54-377 | + | GAGGUUAUCCAGCACAGCCG | 20 | 7140 |
| HSV1-UL54-378 | + | AGCCGCGGUCGUCCCGAUAA | 20 | 7141 |
| HSV1-UL54-379 | + | GCCGCGGUCGUCCCGAUAAU | 20 | 7142 |
| HSV1-UL54-380 | + | CCGCGGUCGUCCCGAUAAUG | 20 | 7143 |
| HSV1-UL54-381 | + | UCGUCCCGAUAAUGGGGUCC | 20 | 7144 |
| HSV1-UL54-382 | + | CGUCCCGAUAAUGGGGUCCU | 20 | 7145 |
| HSV1-UL54-383 | + | GUCCCGAUAAUGGGGUCCUG | 20 | 7146 |
| HSV1-UL54-384 | + | UCCCGAUAAUGGGGUCCUGG | 20 | 7147 |
| HSV1-UL54-385 | + | AUGGGGUCCUGGGGGCGCAG | 20 | 7148 |
| HSV1-UL54-386 | + | GGUCCUGGGGGCGCAGCGGC | 20 | 7149 |
| HSV1-UL54-387 | + | GGGGGCGCAGCGGCAGGUUG | 20 | 7150 |
| HSV1-UL54-388 | + | GGCGCAGCGGCAGGUUGUGG | 20 | 7151 |
| HSV1-UL54-389 | + | GCACCACGCCAGCGUCUCGU | 20 | 7152 |
| HSV1-UL54-390 | + | CCACGCCAGCGUCUCGUCGG | 20 | 7153 |
| HSV1-UL54-391 | + | CGCCAGCGUCUCGUCGGCGG | 20 | 7154 |
| HSV1-UL54-392 | + | GCGCCUCGAUGAAAUUUUCU | 20 | 7155 |
| HSV1-UL54-393 | + | GCGCAGCACGCAGUCGCGCA | 20 | 7156 |
| HSV1-UL54-394 | + | CACGCAGUCGCGCAUGGCCU | 20 | 7157 |
| HSV1-UL54-395 | + | GCAGUCGCGCAUGGCCUUGG | 20 | 7158 |
| HSV1-UL54-396 | + | CAUGGCCUUGGCGGUCGAUG | 20 | 7159 |
| HSV1-UL54-397 | + | UUGGCGGUCGAUGCGGCCCG | 20 | 7160 |
| HSV1-UL54-398 | + | CGAUGCGGCCCGAGGAUUGC | 20 | 7161 |
| HSV1-UL54-399 | + | UGCCGGCAAAAGUGCGAUAG | 20 | 7162 |
| HSV1-UL54-400 | + | GCAAAAGUGCGAUAGAGGCU | 20 | 7163 |
| HSV1-UL54-401 | + | CAAAAGUGCGAUAGAGGCUC | 20 | 7164 |
| HSV1-UL54-402 | + | UGCGAUAGAGGCUCGGGCCG | 20 | 7165 |
| HSV1-UL54-403 | + | GCGAUAGAGGCUCGGGCCGU | 20 | 7166 |
| HSV1-UL54-404 | + | GCUCGGGCCGUGGGCGACCA | 20 | 7167 |
| HSV1-UL54-405 | + | GUGGGCGACCAAGGUUUCCC | 20 | 7168 |
| HSV1-UL54-406 | + | GGUUUCCCAGGAGACCCGUC | 20 | 7169 |
| HSV1-UL54-407 | + | CCAGGAGACCCGUCUGGUCU | 20 | 7170 |
| HSV1-UL54-408 | + | CCGUCUGGUCUCGGCGUCAA | 20 | 7171 |
| HSV1-UL54-409 | + | CGUCUGGUCUCGGCGUCAAA | 20 | 7172 |
| HSV1-UL54-410 | + | CGGCGUCAAAGGGCCCUCCU | 20 | 7173 |
| HSV1-UL54-411 | + | CCUCCUUGGCCCGCCAGCAC | 20 | 7174 |
| HSV1-UL54-412 | + | CUCCUUGGCCCGCCAGCACC | 20 | 7175 |
| HSV1-UL54-413 | + | UCCUUGGCCCGCCAGCACCG | 20 | 7176 |
| HSV1-UL54-414 | + | GCCCGCCAGCACCGGGGCCC | 20 | 7177 |
| HSV1-UL54-415 | + | CCCGCCAGCACCGGGGCCCA | 20 | 7178 |
| HSV1-UL54-416 | + | CCGCCAGCACCGGGGCCCAG | 20 | 7179 |
| HSV1-UL54-417 | + | CGGGGCCCAGGGGCUAUUCG | 20 | 7180 |
| HSV1-UL54-418 | + | GGCCCAGGGGCUAUUCGCGG | 20 | 7181 |
| HSV1-UL54-419 | + | GCCCAGGGGCUAUUCGCGGC | 20 | 7182 |
| HSV1-UL54-420 | + | GGGCUAUUCGCGGCGGGAAA | 20 | 7183 |
| HSV1-UL54-421 | + | GGGAAACGGCUGCCCCCCAA | 20 | 7184 |
| HSV1-UL54-422 | + | GGAAACGGCUGCCCCCCAAA | 20 | 7185 |
| HSV1-UL54-423 | + | GAAACGGCUGCCCCCCAAAG | 20 | 7186 |
| HSV1-UL54-424 | + | CGUGCAUGACCUGUGCGCUG | 20 | 7187 |
| HSV1-UL54-425 | + | GGCCAAAGCUCUCGCUGAUG | 20 | 7188 |
| HSV1-UL54-426 | + | GCGGUCGACCGCCGCGCGCU | 20 | 7189 |
| HSV1-UL54-427 | + | GACCGCCGCGCGCUCGGAGA | 20 | 7190 |
| HSV1-UL54-428 | + | CGCGCUCGGAGAUGGAGCGC | 20 | 7191 |
| HSV1-UL54-429 | + | GGAGCGCAGGACCAACCGCG | 20 | 7192 |
| HSV1-UL54-430 | + | GCGCAGGACCAACCGCGUGG | 20 | 7193 |
| HSV1-UL54-431 | + | CAACCGCGUGGUGGCGUCGA | 20 | 7194 |
| HSV1-UL54-432 | + | CGUGGUGGCGUCGAUGGUGU | 20 | 7195 |
| HSV1-UL54-433 | + | GGUGGCGUCGAUGGUGUCGG | 20 | 7196 |
| HSV1-UL54-434 | + | GGCGUCGAUGGUGUCGGCGG | 20 | 7197 |
| HSV1-UL54-435 | + | GCGUCGAUGGUGUCGGCGGC | 20 | 7198 |
| HSV1-UL54-436 | + | GCGGCGGGCGCCUUUCGCUC | 20 | 7199 |
| HSV1-UL54-437 | + | CGGCGGGCGCCUUUCGCUCC | 20 | 7200 |
| HSV1-UL54-438 | + | GGCGGGCGCCUUUCGCUCCG | 20 | 7201 |
| HSV1-UL54-439 | + | GGCGCCUUUCGCUCCGGGGC | 20 | 7202 |
| HSV1-UL54-440 | + | GCGCCUUUCGCUCCGGGGCC | 20 | 7203 |
| HSV1-UL54-441 | + | CGCCUUUCGCUCCGGGGCCG | 20 | 7204 |
| HSV1-UL54-442 | + | UUCGCUCCGGGGCCGGGGCG | 20 | 7205 |
| HSV1-UL54-443 | + | UCGCUCCGGGGCCGGGGCGC | 20 | 7206 |
| HSV1-UL54-444 | + | CGCUCCGGGGCCGGGGCGCG | 20 | 7207 |
| HSV1-UL54-445 | + | GCUCCGGGGCCGGGGCGCGG | 20 | 7208 |
| HSV1-UL54-446 | + | GGCCGGGGCGCGGGGGUCCG | 20 | 7209 |
| HSV1-UL54-447 | + | GCCGGGGCGCGGGGGUCCGC | 20 | 7210 |
| HSV1-UL54-448 | + | GGGGCGCGGGGGUCCGCGGG | 20 | 7211 |
| HSV1-UL54-449 | + | GGGCGCGGGGGUCCGCGGGC | 20 | 7212 |
| HSV1-UL54-450 | + | GGCGCGGGGGUCCGCGGGCG | 20 | 7213 |
| HSV1-UL54-451 | + | GCGCGGGGGUCCGCGGGCGG | 20 | 7214 |
| HSV1-UL54-452 | + | CGCGGGGGUCCGCGGGCGGG | 20 | 7215 |
| HSV1-UL54-453 | + | GCGGGGGUCCGCGGGCGGGG | 20 | 7216 |
| HSV1-UL54-454 | + | GCAAUCGCCAGCGUCAUUAG | 20 | 7217 |
| HSV1-UL54-455 | + | CAAUCGCCAGCGUCAUUAGC | 20 | 7218 |
| HSV1-UL54-456 | + | AAUCGCCAGCGUCAUUAGCG | 20 | 7219 |
| HSV1-UL54-457 | + | AUCGCCAGCGUCAUUAGCGG | 20 | 7220 |
| HSV1-UL54-458 | + | UCGCCAGCGUCAUUAGCGGG | 20 | 7221 |
| HSV1-UL54-459 | + | CGCCAGCGUCAUUAGCGGGG | 20 | 7222 |
| HSV1-UL54-460 | + | GCCAGCGUCAUUAGCGGGGG | 20 | 7223 |
| HSV1-UL54-461 | + | UCAUUAGCGGGGGGGGUGCU | 20 | 7224 |
| HSV1-UL54-462 | + | GGCGCACGCCCCGUGUCCGC | 20 | 7225 |
| HSV1-UL54-463 | + | GCCCCGUGUCCGCUGGCCUC | 20 | 7226 |
| HSV1-UL54-464 | + | CCCCGUGUCCGCUGGCCUCC | 20 | 7227 |
| HSV1-UL54-465 | + | CGUGUCCGCUGGCCUCCGGG | 20 | 7228 |
| HSV1-UL54-466 | + | GUGUCCGCUGGCCUCCGGGU | 20 | 7229 |
| HSV1-UL54-467 | + | CCGCUGGCCUCCGGGUGGGU | 20 | 7230 |
| HSV1-UL54-468 | + | CGCUGGCCUCCGGGUGGGUC | 20 | 7231 |
| HSV1-UL54-469 | + | UGCCGCGCCACGCCUCGCCA | 20 | 7232 |
| HSV1-UL54-470 | + | GCCGCGCCACGCCUCGCCAU | 20 | 7233 |
| HSV1-UL54-471 | + | CCGCGCCACGCCUCGCCAUG | 20 | 7234 |
| HSV1-UL54-472 | + | CGCGCCACGCCUCGCCAUGG | 20 | 7235 |
| HSV1-UL54-473 | + | GCGCCACGCCUCGCCAUGGG | 20 | 7236 |
| HSV1-UL54-474 | + | CGCCUCGCCAUGGGGGGCGC | 20 | 7237 |
| HSV1-UL54-475 | + | GCCUCGCCAUGGGGGGCGCC | 20 | 7238 |
| HSV1-UL54-476 | + | CCUCGCCAUGGGGGGCGCCG | 20 | 7239 |
| HSV1-UL54-477 | + | GCCGUCCGUCCACCCCGCCC | 20 | 7240 |
| HSV1-UL54-478 | + | CCGUCCGUCCACCCCGCCCC | 20 | 7241 |
| HSV1-UL54-479 | + | CGUCCGUCCACCCCGCCCCG | 20 | 7242 |
| HSV1-UL54-480 | + | CCGUCCACCCCGCCCCGGGG | 20 | 7243 |
| HSV1-UL54-481 | + | CGUCCACCCCGCCCCGGGGC | 20 | 7244 |
| HSV1-UL54-482 | + | GUCCACCCCGCCCCGGGGCG | 20 | 7245 |
| HSV1-UL54-483 | + | GCCCCGGGGCGGGGUCCCCC | 20 | 7246 |
| HSV1-UL54-484 | + | CCCCGGGGCGGGGUCCCCCA | 20 | 7247 |
| HSV1-UL54-485 | + | GGGUCCCCCAGGGUUGCGAU | 20 | 7248 |
| HSV1-UL54-486 | − | AGAACCAAUCGCAACCC | 17 | 7249 |
| HSV1-UL54-487 | − | GAACCAAUCGCAACCCU | 17 | 7250 |
| HSV1-UL54-488 | − | AACCAAUCGCAACCCUG | 17 | 7251 |
| HSV1-UL54-489 | − | ACCAAUCGCAACCCUGG | 17 | 7252 |
| HSV1-UL54-490 | − | CCUGGGGGACCCCGCCC | 17 | 7253 |
| HSV1-UL54-491 | − | CUGGGGGACCCCGCCCC | 17 | 7254 |
| HSV1-UL54-492 | − | UGGGGGACCCCGCCCCG | 17 | 7255 |
| HSV1-UL54-493 | − | GGGACCCCGCCCCGGGG | 17 | 7256 |
| HSV1-UL54-494 | − | GGACCCCGCCCCGGGGC | 17 | 7257 |
| HSV1-UL54-495 | − | GACCCCGCCCCGGGGCG | 17 | 7258 |
| HSV1-UL54-496 | − | CCCGCCCCGGGGCGGGG | 17 | 7259 |
| HSV1-UL54-497 | − | CCCCGGGGCGGGGUGGA | 17 | 7260 |
| HSV1-UL54-498 | − | GGGGCGGGGUGGACGGA | 17 | 7261 |
| HSV1-UL54-499 | − | GGGUGGACGGACGGCCC | 17 | 7262 |
| HSV1-UL54-500 | − | GGCCCCGGCGCCCCCCA | 17 | 7263 |
| HSV1-UL54-501 | − | CGGCGCCCCCCAUGGCG | 17 | 7264 |
| HSV1-UL54-502 | − | CCCCCCAUGGCGAGGCG | 17 | 7265 |
| HSV1-UL54-503 | − | CAUGGCGAGGCGUGGCG | 17 | 7266 |
| HSV1-UL54-504 | − | GAGCAGCCCGACCCACC | 17 | 7267 |
| HSV1-UL54-505 | − | CAGCCCGACCCACCCGG | 17 | 7268 |
| HSV1-UL54-506 | − | ACCCACCCGGAGGCCAG | 17 | 7269 |
| HSV1-UL54-507 | − | CCGGAGGCCAGCGGACA | 17 | 7270 |
| HSV1-UL54-508 | − | CGGAGGCCAGCGGACAC | 17 | 7271 |
| HSV1-UL54-509 | − | GGAGGCCAGCGGACACG | 17 | 7272 |
| HSV1-UL54-510 | − | CCCCCCGCUAAUGACGC | 17 | 7273 |
| HSV1-UL54-511 | − | GAUUGCCCCCCCGCCCG | 17 | 7274 |
| HSV1-UL54-512 | − | CGCGGACCCCCGCGCCC | 17 | 7275 |
| HSV1-UL54-513 | − | CCCCCGCGCCCCGGCCC | 17 | 7276 |
| HSV1-UL54-514 | − | CCCGGCCCCGGAGCGAA | 17 | 7277 |
| HSV1-UL54-515 | − | CCAUCGACGCCACCACG | 17 | 7278 |
| HSV1-UL54-516 | − | CGACGCCACCACGCGGU | 17 | 7279 |
| HSV1-UL54-517 | − | CUCCAUCUCCGAGCGCG | 17 | 7280 |
| HSV1-UL54-518 | − | CAUCUCCGAGCGCGCGG | 17 | 7281 |
| HSV1-UL54-519 | − | CGCAUCAGCGAGAGCUU | 17 | 7282 |
| HSV1-UL54-520 | − | CUUUGGCCGCAGCGCAC | 17 | 7283 |
| HSV1-UL54-521 | − | GUCAUGCACGACCCCUU | 17 | 7284 |
| HSV1-UL54-522 | − | UCAUGCACGACCCCUUU | 17 | 7285 |
| HSV1-UL54-523 | − | CAUGCACGACCCCUUUG | 17 | 7286 |
| HSV1-UL54-524 | − | AUGCACGACCCCUUUGG | 17 | 7287 |
| HSV1-UL54-525 | − | UGCACGACCCCUUUGGG | 17 | 7288 |
| HSV1-UL54-526 | − | CCGCCGCGAAUAGCCCC | 17 | 7289 |
| HSV1-UL54-527 | − | CGCCGCGAAUAGCCCCU | 17 | 7290 |
| HSV1-UL54-528 | − | GAAUAGCCCCUGGGCCC | 17 | 7291 |
| HSV1-UL54-529 | − | CCCCUGGGCCCCGGUGC | 17 | 7292 |
| HSV1-UL54-530 | − | CUGGGCCCCGGUGCUGG | 17 | 7293 |
| HSV1-UL54-531 | − | UGGGCCCCGGUGCUGGC | 17 | 7294 |
| HSV1-UL54-532 | − | CCGGUGCUGGCGGGCCA | 17 | 7295 |
| HSV1-UL54-533 | − | GUGCUGGCGGGCCAAGG | 17 | 7296 |
| HSV1-UL54-534 | − | UGCUGGCGGGCCAAGGA | 17 | 7297 |
| HSV1-UL54-535 | − | UUGACGCCGAGACCAGA | 17 | 7298 |
| HSV1-UL54-536 | − | UGACGCCGAGACCAGAC | 17 | 7299 |
| HSV1-UL54-537 | − | AGACCAGACGGGUCUCC | 17 | 7300 |
| HSV1-UL54-538 | − | GACCAGACGGGUCUCCU | 17 | 7301 |
| HSV1-UL54-539 | − | GGUCUCCUGGGAAACCU | 17 | 7302 |
| HSV1-UL54-540 | − | GAAACCUUGGUCGCCCA | 17 | 7303 |
| HSV1-UL54-541 | − | CUCUAUCGCACUUUUGC | 17 | 7304 |
| HSV1-UL54-542 | − | CUUUUGCCGGCAAUCCU | 17 | 7305 |
| HSV1-UL54-543 | − | UUUUGCCGGCAAUCCUC | 17 | 7306 |
| HSV1-UL54-544 | − | GGCCGCAUCGACCGCCA | 17 | 7307 |
| HSV1-UL54-545 | − | CCAAGAAAAUUUCAUCG | 17 | 7308 |
| HSV1-UL54-546 | − | AAAUUUCAUCGAGGCGC | 17 | 7309 |
| HSV1-UL54-547 | − | CUCCGCCGACGAGACGC | 17 | 7310 |
| HSV1-UL54-548 | − | CCGACGAGACGCUGGCG | 17 | 7311 |
| HSV1-UL54-549 | − | CCUGCCGCUGCGCCCCC | 17 | 7312 |
| HSV1-UL54-550 | − | CCCCAGGACCCCAUUAU | 17 | 7313 |
| HSV1-UL54-551 | − | CCCAGGACCCCAUUAUC | 17 | 7314 |
| HSV1-UL54-552 | − | CAUUAUCGGGACGACCG | 17 | 7315 |
| HSV1-UL54-553 | − | GACGACCGCGGCUGUGC | 17 | 7316 |
| HSV1-UL54-554 | − | ACCUCGCCACGCGCCUG | 17 | 7317 |
| HSV1-UL54-555 | − | UCUCCAGUGCUACCUGA | 17 | 7318 |
| HSV1-UL54-556 | − | UGCUACCUGAAGGCGCG | 17 | 7319 |
| HSV1-UL54-557 | − | AAGGCGCGAGGCCUGUG | 17 | 7320 |
| HSV1-UL54-558 | − | GCGAGGCCUGUGCGGCC | 17 | 7321 |
| HSV1-UL54-559 | − | UGGACGAACUGUGUUCG | 17 | 7322 |
| HSV1-UL54-560 | − | ACGAACUGUGUUCGCGG | 17 | 7323 |
| HSV1-UL54-561 | − | GUGUUCGCGGCGGCGUC | 17 | 7324 |
| HSV1-UL54-562 | − | UUCGCGGCGGCGUCUGG | 17 | 7325 |
| HSV1-UL54-563 | − | GCGUCUGGCGGACAUUA | 17 | 7326 |
| HSV1-UL54-564 | − | CUUCGUGUUUGUCAUUC | 17 | 7327 |
| HSV1-UL54-565 | − | UGUUUGUCAUUCUGGCC | 17 | 7328 |
| HSV1-UL54-566 | − | GCCAACCGCGUCGAGCG | 17 | 7329 |
| HSV1-UL54-567 | − | CGUCGAGCGUGGCGUCG | 17 | 7330 |
| HSV1-UL54-568 | − | AUCGACUACGCGACCCU | 17 | 7331 |
| HSV1-UL54-569 | − | UACGCGACCCUUGGUGU | 17 | 7332 |
| HSV1-UL54-570 | − | ACGCGACCCUUGGUGUC | 17 | 7333 |
| HSV1-UL54-571 | − | CGCGACCCUUGGUGUCG | 17 | 7334 |
| HSV1-UL54-572 | − | ACCCUUGGUGUCGGGGU | 17 | 7335 |
| HSV1-UL54-573 | − | AUGCAUUUCUACCUCCC | 17 | 7336 |
| HSV1-UL54-574 | − | UGCAUUUCUACCUCCCC | 17 | 7337 |
| HSV1-UL54-575 | − | GCAUUUCUACCUCCCCG | 17 | 7338 |
| HSV1-UL54-576 | − | CCUCCCCGGGGCCUGCA | 17 | 7339 |
| HSV1-UL54-577 | − | CCCCGGGGCCUGCAUGG | 17 | 7340 |
| HSV1-UL54-578 | − | CCCGGGGCCUGCAUGGC | 17 | 7341 |
| HSV1-UL54-579 | − | CCUAGACACGCACCGCC | 17 | 7342 |
| HSV1-UL54-580 | − | UCGUGUCUGCGAGUUGA | 17 | 7343 |
| HSV1-UL54-581 | − | GCCCCCCCGUACGUGCA | 17 | 7344 |
| HSV1-UL54-582 | + | UAUUUGCCGUGCACGUA | 17 | 7345 |
| HSV1-UL54-583 | + | AUUUGCCGUGCACGUAC | 17 | 7346 |
| HSV1-UL54-584 | + | UUUGCCGUGCACGUACG | 17 | 7347 |
| HSV1-UL54-585 | + | UUGCCGUGCACGUACGG | 17 | 7348 |
| HSV1-UL54-586 | + | UGCCGUGCACGUACGGG | 17 | 7349 |
| HSV1-UL54-587 | + | GCCGUGCACGUACGGGG | 17 | 7350 |
| HSV1-UL54-588 | + | GGGGGCGACGAUGUGAC | 17 | 7351 |
| HSV1-UL54-589 | + | CACGACUCGAACACUCC | 17 | 7352 |
| HSV1-UL54-590 | + | GACUCGAACACUCCUGG | 17 | 7353 |
| HSV1-UL54-591 | + | CCUGGCGGUGCGUGUCU | 17 | 7354 |
| HSV1-UL54-592 | + | UGUCUAGGAUUUCGAUC | 17 | 7355 |
| HSV1-UL54-593 | + | GAUCAGGCCCGCCAUGC | 17 | 7356 |
| HSV1-UL54-594 | + | GCCCGCCAUGCAGGCCC | 17 | 7357 |
| HSV1-UL54-595 | + | CCCGCCAUGCAGGCCCC | 17 | 7358 |
| HSV1-UL54-596 | + | CCGCCAUGCAGGCCCCG | 17 | 7359 |
| HSV1-UL54-597 | + | CCAUGCAGGCCCCGGGG | 17 | 7360 |
| HSV1-UL54-598 | + | CUCCGACCCCGACACCA | 17 | 7361 |
| HSV1-UL54-599 | + | UCCGACCCCGACACCAA | 17 | 7362 |
| HSV1-UL54-600 | + | CGACGCCACGCUCGACG | 17 | 7363 |
| HSV1-UL54-601 | + | GCCACGCUCGACGCGGU | 17 | 7364 |
| HSV1-UL54-602 | + | GACGCGGUUGGCGAGCC | 17 | 7365 |
| HSV1-UL54-603 | + | CAGAAUGACAAACACGA | 17 | 7366 |
| HSV1-UL54-604 | + | GCGAACACAGUUCGUCC | 17 | 7367 |
| HSV1-UL54-605 | + | GUUCGUCCAGGCCGCAC | 17 | 7368 |
| HSV1-UL54-606 | + | ACAGGCCUCGCGCCUUC | 17 | 7369 |
| HSV1-UL54-607 | + | GCGCCUUCAGGUAGCAC | 17 | 7370 |
| HSV1-UL54-608 | + | CAGGUAGCACUGGAGAA | 17 | 7371 |
| HSV1-UL54-609 | + | AGGUAGCACUGGAGAAA | 17 | 7372 |
| HSV1-UL54-610 | + | ACUGGAGAAAGGGCCGC | 17 | 7373 |
| HSV1-UL54-611 | + | AAAGGGCCGCAGGCGCG | 17 | 7374 |
| HSV1-UL54-612 | + | GCCGCAGGCGCGUGGCG | 17 | 7375 |
| HSV1-UL54-613 | + | GUUAUCCAGCACAGCCG | 17 | 7376 |
| HSV1-UL54-614 | + | CGCGGUCGUCCCGAUAA | 17 | 7377 |
| HSV1-UL54-615 | + | GCGGUCGUCCCGAUAAU | 17 | 7378 |
| HSV1-UL54-616 | + | CGGUCGUCCCGAUAAUG | 17 | 7379 |
| HSV1-UL54-617 | + | UCCCGAUAAUGGGGUCC | 17 | 7380 |
| HSV1-UL54-618 | + | CCCGAUAAUGGGGUCCU | 17 | 7381 |
| HSV1-UL54-619 | + | CCGAUAAUGGGGUCCUG | 17 | 7382 |
| HSV1-UL54-620 | + | CGAUAAUGGGGUCCUGG | 17 | 7383 |
| HSV1-UL54-621 | + | GGGUCCUGGGGGCGCAG | 17 | 7384 |
| HSV1-UL54-622 | + | CCUGGGGGCGCAGCGGC | 17 | 7385 |
| HSV1-UL54-623 | + | GGCGCAGCGGCAGGUUG | 17 | 7386 |
| HSV1-UL54-624 | + | GCAGCGGCAGGUUGUGG | 17 | 7387 |
| HSV1-UL54-625 | + | CCACGCCAGCGUCUCGU | 17 | 7388 |
| HSV1-UL54-626 | + | CGCCAGCGUCUCGUCGG | 17 | 7389 |
| HSV1-UL54-627 | + | CAGCGUCUCGUCGGCGG | 17 | 7390 |
| HSV1-UL54-628 | + | CCUCGAUGAAAUUUUCU | 17 | 7391 |
| HSV1-UL54-629 | + | CAGCACGCAGUCGCGCA | 17 | 7392 |
| HSV1-UL54-630 | + | GCAGUCGCGCAUGGCCU | 17 | 7393 |
| HSV1-UL54-631 | + | GUCGCGCAUGGCCUUGG | 17 | 7394 |
| HSV1-UL54-632 | + | GGCCUUGGCGGUCGAUG | 17 | 7395 |
| HSV1-UL54-633 | + | GCGGUCGAUGCGGCCCG | 17 | 7396 |
| HSV1-UL54-634 | + | UGCGGCCCGAGGAUUGC | 17 | 7397 |
| HSV1-UL54-635 | + | CGGCAAAAGUGCGAUAG | 17 | 7398 |
| HSV1-UL54-636 | + | AAAGUGCGAUAGAGGCU | 17 | 7399 |
| HSV1-UL54-637 | + | AAGUGCGAUAGAGGCUC | 17 | 7400 |
| HSV1-UL54-638 | + | GAUAGAGGCUCGGGCCG | 17 | 7401 |
| HSV1-UL54-639 | + | AUAGAGGCUCGGGCCGU | 17 | 7402 |
| HSV1-UL54-640 | + | CGGGCCGUGGGCGACCA | 17 | 7403 |
| HSV1-UL54-641 | + | GGCGACCAAGGUUUCCC | 17 | 7404 |
| HSV1-UL54-642 | + | UUCCCAGGAGACCCGUC | 17 | 7405 |
| HSV1-UL54-643 | + | GGAGACCCGUCUGGUCU | 17 | 7406 |
| HSV1-UL54-644 | + | UCUGGUCUCGGCGUCAA | 17 | 7407 |
| HSV1-UL54-645 | + | CUGGUCUCGGCGUCAAA | 17 | 7408 |
| HSV1-UL54-646 | + | CGUCAAAGGGCCCUCCU | 17 | 7409 |
| HSV1-UL54-647 | + | CCUUGGCCCGCCAGCAC | 17 | 7410 |
| HSV1-UL54-648 | + | CUUGGCCCGCCAGCACC | 17 | 7411 |
| HSV1-UL54-649 | + | UUGGCCCGCCAGCACCG | 17 | 7412 |
| HSV1-UL54-650 | + | CGCCAGCACCGGGGCCC | 17 | 7413 |
| HSV1-UL54-651 | + | GCCAGCACCGGGGCCCA | 17 | 7414 |
| HSV1-UL54-652 | + | CCAGCACCGGGGCCCAG | 17 | 7415 |
| HSV1-UL54-653 | + | GGCCCAGGGGCUAUUCG | 17 | 7416 |
| HSV1-UL54-654 | + | CCAGGGGCUAUUCGCGG | 17 | 7417 |
| HSV1-UL54-655 | + | CAGGGGCUAUUCGCGGC | 17 | 7418 |
| HSV1-UL54-656 | + | CUAUUCGCGGCGGGAAA | 17 | 7419 |
| HSV1-UL54-657 | + | AAACGGCUGCCCCCCAA | 17 | 7420 |
| HSV1-UL54-658 | + | AACGGCUGCCCCCCAAA | 17 | 7421 |
| HSV1-UL54-659 | + | ACGGCUGCCCCCCAAAG | 17 | 7422 |
| HSV1-UL54-660 | + | GCAUGACCUGUGCGCUG | 17 | 7423 |
| HSV1-UL54-661 | + | CAAAGCUCUCGCUGAUG | 17 | 7424 |
| HSV1-UL54-662 | + | GUCGACCGCCGCGCGCU | 17 | 7425 |
| HSV1-UL54-663 | + | CGCCGCGCGCUCGGAGA | 17 | 7426 |
| HSV1-UL54-664 | + | GCUCGGAGAUGGAGCGC | 17 | 7427 |
| HSV1-UL54-665 | + | GCGCAGGACCAACCGCG | 17 | 7428 |
| HSV1-UL54-666 | + | CAGGACCAACCGCGUGG | 17 | 7429 |
| HSV1-UL54-667 | + | CCGCGUGGUGGCGUCGA | 17 | 7430 |
| HSV1-UL54-668 | + | GGUGGCGUCGAUGGUGU | 17 | 7431 |
| HSV1-UL54-669 | + | GGCGUCGAUGGUGUCGG | 17 | 7432 |
| HSV1-UL54-670 | + | GUCGAUGGUGUCGGCGG | 17 | 7433 |
| HSV1-UL54-671 | + | UCGAUGGUGUCGGCGGC | 17 | 7434 |
| HSV1-UL54-672 | + | GCGGGCGCCUUUCGCUC | 17 | 7435 |
| HSV1-UL54-673 | + | CGGGCGCCUUUCGCUCC | 17 | 7436 |
| HSV1-UL54-674 | + | GGGCGCCUUUCGCUCCG | 17 | 7437 |
| HSV1-UL54-675 | + | GCCUUUCGCUCCGGGGC | 17 | 7438 |
| HSV1-UL54-676 | + | CCUUUCGCUCCGGGGCC | 17 | 7439 |
| HSV1-UL54-677 | + | CUUUCGCUCCGGGGCCG | 17 | 7440 |
| HSV1-UL54-678 | + | GCUCCGGGGCCGGGGCG | 17 | 7441 |
| HSV1-UL54-679 | + | CUCCGGGGCCGGGGCGC | 17 | 7442 |
| HSV1-UL54-680 | + | UCCGGGGCCGGGGCGCG | 17 | 7443 |
| HSV1-UL54-681 | + | CCGGGGCCGGGGCGCGG | 17 | 7444 |
| HSV1-UL54-682 | + | CGGGGCGCGGGGGUCCG | 17 | 7445 |
| HSV1-UL54-683 | + | GGGGCGCGGGGGUCCGC | 17 | 7446 |
| HSV1-UL54-684 | + | GCGCGGGGGUCCGCGGG | 17 | 7447 |
| HSV1-UL54-685 | + | CGCGGGGGUCCGCGGGC | 17 | 7448 |
| HSV1-UL54-686 | + | GCGGGGGUCCGCGGGCG | 17 | 7449 |
| HSV1-UL54-687 | + | CGGGGGUCCGCGGGCGG | 17 | 7450 |
| HSV1-UL54-688 | + | GGGGGUCCGCGGGCGGG | 17 | 7451 |
| HSV1-UL54-689 | + | GGGGUCCGCGGGCGGGG | 17 | 7452 |
| HSV1-UL54-690 | + | AUCGCCAGCGUCAUUAG | 17 | 7453 |
| HSV1-UL54-691 | + | UCGCCAGCGUCAUUAGC | 17 | 7454 |
| HSV1-UL54-692 | + | CGCCAGCGUCAUUAGCG | 17 | 7455 |
| HSV1-UL54-693 | + | GCCAGCGUCAUUAGCGG | 17 | 7456 |
| HSV1-UL54-694 | + | CCAGCGUCAUUAGCGGG | 17 | 7457 |
| HSV1-UL54-695 | + | CAGCGUCAUUAGCGGGG | 17 | 7458 |
| HSV1-UL54-696 | + | AGCGUCAUUAGCGGGGG | 17 | 7459 |
| HSV1-UL54-697 | + | UUAGCGGGGGGGGUGCU | 17 | 7460 |
| HSV1-UL54-698 | + | GCACGCCCCGUGUCCGC | 17 | 7461 |
| HSV1-UL54-699 | + | CCGUGUCCGCUGGCCUC | 17 | 7462 |
| HSV1-UL54-700 | + | CGUGUCCGCUGGCCUCC | 17 | 7463 |
| HSV1-UL54-701 | + | GUCCGCUGGCCUCCGGG | 17 | 7464 |
| HSV1-UL54-702 | + | UCCGCUGGCCUCCGGGU | 17 | 7465 |
| HSV1-UL54-703 | + | CUGGCCUCCGGGUGGGU | 17 | 7466 |
| HSV1-UL54-704 | + | UGGCCUCCGGGUGGGUC | 17 | 7467 |
| HSV1-UL54-705 | + | CGCGCCACGCCUCGCCA | 17 | 7468 |
| HSV1-UL54-706 | + | GCGCCACGCCUCGCCAU | 17 | 7469 |
| HSV1-UL54-707 | + | CGCCACGCCUCGCCAUG | 17 | 7470 |
| HSV1-UL54-708 | + | GCCACGCCUCGCCAUGG | 17 | 7471 |
| HSV1-UL54-709 | + | CCACGCCUCGCCAUGGG | 17 | 7472 |
| HSV1-UL54-710 | + | CUCGCCAUGGGGGGCGC | 17 | 7473 |
| HSV1-UL54-711 | + | UCGCCAUGGGGGGCGCC | 17 | 7474 |
| HSV1-UL54-712 | + | CGCCAUGGGGGGCGCCG | 17 | 7475 |
| HSV1-UL54-713 | + | GUCCGUCCACCCCGCCC | 17 | 7476 |
| HSV1-UL54-714 | + | UCCGUCCACCCCGCCCC | 17 | 7477 |
| HSV1-UL54-715 | + | CCGUCCACCCCGCCCCG | 17 | 7478 |
| HSV1-UL54-716 | + | UCCACCCCGCCCCGGGG | 17 | 7479 |
| HSV1-UL54-717 | + | CCACCCCGCCCCGGGGC | 17 | 7480 |
| HSV1-UL54-718 | + | CACCCCGCCCCGGGGCG | 17 | 7481 |
| HSV1-UL54-719 | + | CCGGGGCGGGGUCCCCC | 17 | 7482 |
| HSV1-UL54-720 | + | CGGGGCGGGGUCCCCCA | 17 | 7483 |
| HSV1-UL54-721 | + | UCCCCCAGGGUUGCGAU | 17 | 7484 |

[0732] Table 4D provides exemplary targeting domains for knocking out the UL54 gene selected according to the first tier parameters. The targeting domains are selected based on location within first 500 bp of the coding sequence of the UL54 gene. It is contemplated herein that the targeting domain hybridizes to the target domain through complementary base pairing. Any of the targeting domains in the table can be used with a S. aureus Cas9 molecule that gives double stranded cleavage. Any of the targeting domains in the table can be used with a S. aureus Cas9 single-stranded break nucleases (nickases). In an embodiment, dual targeting is used to create two nicks on opposite DNA strands by using S. aureus Cas9 nickases with two targeting domains that are complementary to opposite DNA strands, e.g., a gRNA comprising any minus strand targeting domain may be paired any gRNA comprising a plus strand targeting domain provided that the two gRNAs are oriented on the DNA such that PAMs face outward and the distance between the 5′ ends of the gRNAs is 0-50 bp.

TABLE 4D
1st Tier

| | | | Target | |
|---|---|---|---|---|
| gRNA Name | DNA Strand | Targeting Domain | Site Length | Seq ID |
| HSV1-UL54-726 | − | CCUCUCCGACAGCGAUCUGG | 20 | 7487 |
| HSV1-UL54-727 | − | GGACAUGGAAGACCCCCACG | 20 | 7488 |
| HSV1-UL54-728 | − | GGAAGACCCCCACGGAGAGG | 20 | 7489 |
| HSV1-UL54-729 | − | ACGAGGACCCCCCCGAGCCG | 20 | 7490 |
| HSV1-UL54-730 | − | AGGACCCCCCCGAGCCGGCG | 20 | 7491 |
| HSV1-UL54-731 | − | CGGGGAGUGUUCCUCGUCGG | 20 | 7492 |
| HSV1-UL54-5 | − | UUCCUCGUCGGACGAGGACA | 20 | 6768 |
| HSV1-UL54-733 | − | AUAUGCUAAUUGACCUCGGC | 20 | 7493 |
| HSV1-UL54-734 | − | UGGACCUCUCCGACAGCGAU | 20 | 7494 |
| HSV1-UL54-735 | − | UCUCCGACAGCGAUCUGGAC | 20 | 7495 |
| HSV1-UL54-736 | − | CGAUCUGGACGAGGACCCCC | 20 | 7496 |
| HSV1-UL54-84 | − | CGAGGACCCCCCCGAGCCGG | 20 | 6847 |
| HSV1-UL54-738 | − | CGGAGAGCCGCCGCGACGAC | 20 | 7497 |
| HSV1-UL54-85 | − | GGAGAGCCGCCGCGACGACC | 20 | 6848 |
| HSV1-UL54-740 | − | GCCGCCGCGACGACCUGGAA | 20 | 7498 |
| HSV1-UL54-741 | − | CGACCUGGAAUCGGACAGCA | 20 | 7499 |
| HSV1-UL54-86 | − | GACCUGGAAUCGGACAGCAG | 20 | 6849 |
| HSV1-UL54-87 | − | ACCUGGAAUCGGACAGCAGC | 20 | 6850 |
| HSV1-UL54-88 | − | CCUGGAAUCGGACAGCAGCG | 20 | 6851 |
| HSV1-UL54-745 | − | GCAGCGGGGAGUGUUCCUCG | 20 | 7500 |
| HSV1-UL54-746 | − | GGGAGUGUUCCUCGUCGGAC | 20 | 7501 |
| HSV1-UL54-747 | − | GUUCCUCGUCGGACGAGGAC | 20 | 7502 |
| HSV1-UL54-748 | − | CGAGGACAUGGAAGACCCCC | 20 | 7503 |
| HSV1-UL54-90 | − | GAGGACAUGGAAGACCCCCA | 20 | 6853 |
| HSV1-UL54-750 | − | ACAUGGAAGACCCCCACGGA | 20 | 7504 |
| HSV1-UL54-751 | − | ACCCCCACGGAGAGGACGGA | 20 | 7505 |
| HSV1-UL54-93 | − | CCCCCACGGAGAGGACGGAC | 20 | 6856 |
| HSV1-UL54-753 | − | GGCGGUCCGCCCGUCUCGUC | 20 | 7506 |
| HSV1-UL54-754 | − | GCACCCAGACGCCUCGUCCG | 20 | 7507 |
| HSV1-UL54-8 | − | CACCCAGACGCCUCGUCCGA | 20 | 6771 |
| HSV1-UL54-756 | − | CGCCUCGUCCGACGGAGCGG | 20 | 7508 |
| HSV1-UL54-757 | − | CCACAGUGUGUGGUCGCGCC | 20 | 7509 |
| HSV1-UL54-98 | − | CACAGUGUGUGGUCGCGCCU | 20 | 6861 |
| HSV1-UL54-759 | − | CCGGCGACCGUCUUGCUCCC | 20 | 7510 |
| HSV1-UL54-760 | − | GUCUUGCUCCCCCGAGCAGC | 20 | 7511 |
| HSV1-UL54-99 | − | UCUUGCUCCCCCGAGCAGCA | 20 | 6862 |
| HSV1-UL54-100 | − | CUUGCUCCCCCGAGCAGCAC | 20 | 6863 |
| HSV1-UL54-763 | − | CAAAGCCCAGCCUGCCCGCG | 20 | 7512 |
| HSV1-UL54-764 | − | GCCUGCCCGCGGCGGACGCC | 20 | 7513 |
| HSV1-UL54-765 | − | GGCGGACGCCGUGGGCGUCG | 20 | 7514 |
| HSV1-UL54-108 | − | GCGGACGCCGUGGGCGUCGC | 20 | 6871 |
| HSV1-UL54-767 | − | CGCCGUGGGCGUCGCAGGGG | 20 | 7515 |
| HSV1-UL54-111 | − | GCCGUGGGCGUCGCAGGGGU | 20 | 6874 |
| HSV1-UL54-769 | − | GGGUCGGGGUCGCGGUGGUC | 20 | 7516 |
| HSV1-UL54-116 | − | GGUCGGGGUCGCGGUGGUCC | 20 | 6879 |
| HSV1-UL54-771 | − | CCGGGGCUGCCGAUGGUUUG | 20 | 7517 |
| HSV1-UL54-772 | + | GACCACCGCGACCCCGACCC | 20 | 7518 |
| HSV1-UL54-773 | + | GCGACGCCCACGGCGUCCGC | 20 | 7519 |
| HSV1-UL54-137 | + | UGCUGCUCGGGGGAGCAAGA | 20 | 6900 |
| HSV1-UL54-775 | + | GGCGCGACCACACACUGUGG | 20 | 7520 |
| HSV1-UL54-776 | + | CAAACCAUCGGCAGCCCCGG | 20 | 7521 |
| HSV1-UL54-777 | + | GGACCACCGCGACCCCGACC | 20 | 7522 |
| HSV1-UL54-778 | + | ACCCCUGCGACGCCCACGGC | 20 | 7523 |
| HSV1-UL54-779 | + | CCCCUGCGACGCCCACGGCG | 20 | 7524 |
| HSV1-UL54-780 | + | CGACGCCCACGGCGUCCGCC | 20 | 7525 |
| HSV1-UL54-123 | + | GGCGUCCGCCGCGGGCAGGC | 20 | 6886 |
| HSV1-UL54-782 | + | CGCGGGCAGGCUGGGCUUUG | 20 | 7526 |
| HSV1-UL54-783 | + | GUGCUGCUCGGGGGAGCAAG | 20 | 7527 |
| HSV1-UL54-784 | + | GCUGCUCGGGGGAGCAAGAC | 20 | 7528 |
| HSV1-UL54-785 | + | GGGAGCAAGACGGUCGCCGG | 20 | 7529 |
| HSV1-UL54-139 | + | AGGCGCGACCACACACUGUG | 20 | 6902 |
| HSV1-UL54-787 | + | CCGCUCCGUCGGACGAGGCG | 20 | 7530 |
| HSV1-UL54-788 | + | UCGGACGAGGCGUCUGGGUG | 20 | 7531 |
| HSV1-UL54-145 | + | CGGACGAGGCGUCUGGGUGC | 20 | 6908 |
| HSV1-UL54-154 | + | GACGAGACGGGCGGACCGCC | 20 | 6917 |
| HSV1-UL54-791 | + | GUCCGUCCUCUCCGUGGGGG | 20 | 7532 |
| HSV1-UL54-792 | + | UCCGUCCUCUCCGUGGGGGU | 20 | 7533 |
| HSV1-UL54-793 | + | CCUCUCCGUGGGGGUCUUCC | 20 | 7534 |
| HSV1-UL54-794 | + | UCCGUGGGGGUCUUCCAUGU | 20 | 7535 |
| HSV1-UL54-795 | + | CGUGGGGGUCUUCCAUGUCC | 20 | 7536 |
| HSV1-UL54-796 | + | UGGGGGUCUUCCAUGUCCUC | 20 | 7537 |
| HSV1-UL54-797 | + | GGGGGUCUUCCAUGUCCUCG | 20 | 7538 |
| HSV1-UL54-798 | + | UGUCCUCGUCCGACGAGGAA | 20 | 7539 |
| HSV1-UL54-799 | + | GUCCUCGUCCGACGAGGAAC | 20 | 7540 |
| HSV1-UL54-800 | + | GUCCGACGAGGAACACUCCC | 20 | 7541 |
| HSV1-UL54-801 | + | CCGACGAGGAACACUCCCCG | 20 | 7542 |
| HSV1-UL54-802 | + | CGAGGAACACUCCCCGCUGC | 20 | 7543 |
| HSV1-UL54-803 | + | CGCUGCUGUCCGAUUCCAGG | 20 | 7544 |
| HSV1-UL54-804 | + | GCUGCUGUCCGAUUCCAGGU | 20 | 7545 |
| HSV1-UL54-805 | + | CUGCUGUCCGAUUCCAGGUC | 20 | 7546 |
| HSV1-UL54-806 | + | UGCUGUCCGAUUCCAGGUCG | 20 | 7547 |
| HSV1-UL54-807 | + | UUCCAGGUCGUCGCGGCGGC | 20 | 7548 |
| HSV1-UL54-808 | + | GGUCGUCGCGGCGGCUCUCC | 20 | 7549 |
| HSV1-UL54-809 | + | GUCGUCGCGGCGGCUCUCCG | 20 | 7550 |
| HSV1-UL54-810 | + | CGCCGGCUCGGGGGGGUCCU | 20 | 7551 |
| HSV1-UL54-811 | + | CCGGCUCGGGGGGGUCCUCG | 20 | 7552 |
| HSV1-UL54-812 | + | CGGCUCGGGGGGGUCCUCGU | 20 | 7553 |
| HSV1-UL54-813 | + | GGGGGUCCUCGUCCAGAUCG | 20 | 7554 |
| HSV1-UL54-814 | + | GUCCAGAUCGCUGUCGGAGA | 20 | 7555 |
| HSV1-UL54-815 | + | CCAGAUCGCUGUCGGAGAGG | 20 | 7556 |
| HSV1-UL54-816 | + | AUCGCUGUCGGAGAGGUCCA | 20 | 7557 |
| HSV1-UL54-817 | + | GCCGAGGUCAAUUAGCAUAU | 20 | 7558 |
| HSV1-UL54-818 | − | CUCCGUGGGGGUCUUCCAUG | 17 | 7559 |
| HSV1-UL54-796 | − | UGGGGGUCUUCCAUGUCCUC | 20 | 7537 |
| HSV1-UL54-798 | − | UGUCCUCGUCCGACGAGGAA | 20 | 7539 |
| HSV1-UL54-821 | − | CGUCCGACGAGGAACACUCC | 20 | 7560 |
| HSV1-UL54-822 | − | ACGAGGAACACUCCCCGCUG | 20 | 7561 |
| HSV1-UL54-803 | − | CGCUGCUGUCCGAUUCCAGG | 20 | 7544 |
| HSV1-UL54-804 | + | GCUGCUGUCCGAUUCCAGGU | 20 | 7545 |
| HSV1-UL54-805 | + | CUGCUGUCCGAUUCCAGGUC | 20 | 7546 |
| HSV1-UL54-826 | + | AUUCCAGGUCGUCGCGGCGG | 20 | 7562 |
| HSV1-UL54-808 | + | GGUCGUCGCGGCGGCUCUCC | 20 | 7549 |
| HSV1-UL54-811 | + | CCGGCUCGGGGGGGUCCUCG | 20 | 7552 |
| HSV1-UL54-829 | + | GCUCGGGGGGGUCCUCGUCC | 20 | 7563 |
| HSV1-UL54-38 | + | CGUCCAGAUCGCUGUCGGAG | 20 | 6801 |
| HSV1-UL54-39 | + | GAUCGCUGUCGGAGAGGUCC | 20 | 6802 |
| HSV1-UL54-832 | + | GGCCGAGGUCAAUUAGCAUA | 20 | 7564 |
| HSV1-UL54-833 | − | AGGUCAAUUAGCAUAUCAAU | 20 | 7565 |
| HSV1-UL54-167 | − | GAUAUGCUAAUUGACCU | 17 | 6930 |
| HSV1-UL54-168 | − | GCUAAUUGACCUCGGCC | 17 | 6931 |
| HSV1-UL54-41 | − | CCUCUCCGACAGCGAUC | 17 | 6804 |
| HSV1-UL54-42 | − | CGACAGCGAUCUGGACG | 17 | 6805 |
| HSV1-UL54-169 | − | CGAGGACCCCCCCGAGC | 17 | 6932 |
| HSV1-UL54-170 | − | GGACCCCCCCGAGCCGG | 17 | 6933 |
| HSV1-UL54-171 | − | GAGCCGCCGCGACGACC | 17 | 6934 |
| HSV1-UL54-43 | − | CCGCGACGACCUGGAAU | 17 | 6806 |
| HSV1-UL54-172 | − | CUGGAAUCGGACAGCAG | 17 | 6935 |
| HSV1-UL54-173 | − | UGGAAUCGGACAGCAGC | 17 | 6936 |
| HSV1-UL54-174 | − | GGAAUCGGACAGCAGCG | 17 | 6937 |
| HSV1-UL54-44 | − | CGGGGAGUGUUCCUCGU | 17 | 6807 |
| HSV1-UL54-175 | − | GUGUUCCUCGUCGGACG | 17 | 6938 |
| HSV1-UL54-45 | − | CUCGUCGGACGAGGACA | 17 | 6808 |
| HSV1-UL54-176 | − | GACAUGGAAGACCCCCA | 17 | 6939 |
| HSV1-UL54-177 | − | GGAAGACCCCCACGGAG | 17 | 6940 |
| HSV1-UL54-178 | − | GACCCCCACGGAGAGGA | 17 | 6941 |
| HSV1-UL54-179 | − | CCACGGAGAGGACGGAC | 17 | 6942 |
| HSV1-UL54-46 | − | ACUCGACGCCGCUCGCC | 17 | 6809 |
| HSV1-UL54-47 | − | CGACGCCGCUCGCCCGG | 17 | 6810 |
| HSV1-UL54-180 | − | UCUCGUCCAGAAGACCC | 17 | 6943 |
| HSV1-UL54-48 | − | CCAGACGCCUCGUCCGA | 17 | 6811 |
| HSV1-UL54-181 | − | CGCCUCGUCCGACGGAG | 17 | 6944 |
| HSV1-UL54-49 | − | UCGUCCGACGGAGCGGC | 17 | 6812 |
| HSV1-UL54-182 | − | CGUCCGACGGAGCGGCA | 17 | 6945 |
| HSV1-UL54-183 | − | CAGCGCCCCACAGUGUG | 17 | 6946 |
| HSV1-UL54-184 | − | AGUGUGUGGUCGCGCCU | 17 | 6947 |
| HSV1-UL54-50 | − | GUGUGUGGUCGCGCCUC | 17 | 6813 |
| HSV1-UL54-51 | − | UGUGUGGUCGCGCCUCG | 17 | 6814 |
| HSV1-UL54-52 | − | GGUCGCGCCUCGGGGCC | 17 | 6815 |
| HSV1-UL54-185 | + | UGCUCCCCCGAGCAGCA | 17 | 6948 |
| HSV1-UL54-186 | + | GCUCCCCCGAGCAGCAC | 17 | 6949 |
| HSV1-UL54-53 | + | CUCCCCCGAGCAGCACG | 17 | 6816 |
| HSV1-UL54-187 | + | UCCCCCGAGCAGCACGG | 17 | 6950 |
| HSV1-UL54-188 | + | CGAGCAGCACGGGGGCA | 17 | 6951 |
| HSV1-UL54-189 | + | GCAGCACGGGGGCAAGG | 17 | 6952 |
| HSV1-UL54-190 | + | AAAGCCCAGCCUGCCCG | 17 | 6953 |
| HSV1-UL54-191 | + | GCCCAGCCUGCCCGCGG | 17 | 6954 |
| HSV1-UL54-192 | + | GCCCGCGGCGGACGCCG | 17 | 6955 |
| HSV1-UL54-193 | − | CCCGCGGCGGACGCCGU | 17 | 6956 |
| HSV1-UL54-194 | − | GACGCCGUGGGCGUCGC | 17 | 6957 |
| HSV1-UL54-195 | − | ACGCCGUGGGCGUCGCA | 17 | 6958 |
| HSV1-UL54-196 | − | CGCCGUGGGCGUCGCAG | 17 | 6959 |
| HSV1-UL54-197 | − | GUGGGCGUCGCAGGGGU | 17 | 6960 |
| HSV1-UL54-198 | − | UGGGCGUCGCAGGGGUC | 17 | 6961 |
| HSV1-UL54-199 | − | GGGCGUCGCAGGGGUCG | 17 | 6962 |
| HSV1-UL54-200 | − | CGCAGGGGUCGGGGUCG | 17 | 6963 |
| HSV1-UL54-201 | − | AGGGGUCGGGGUCGCGG | 17 | 6964 |
| HSV1-UL54-202 | − | CGGGGUCGCGGUGGUCC | 17 | 6965 |
| HSV1-UL54-203 | − | GGGGUCGCGGUGGUCCC | 17 | 6966 |
| HSV1-UL54-54 | − | GGGUCGCGGUGGUCCCG | 17 | 6817 |
| HSV1-UL54-204 | − | GGUCCCGGGGCUGCCGA | 17 | 6967 |
| HSV1-UL54-55 | − | GGCUGCCGAUGGUUUGU | 17 | 6818 |
| HSV1-UL54-56 | − | GUUUGUCGGACCCCCGC | 17 | 6819 |
| HSV1-UL54-888 | + | GCGGGGGUCCGACAAAC | 17 | 7566 |
| HSV1-UL54-889 | + | ACAAACCAUCGGCAGCC | 17 | 7567 |
| HSV1-UL54-890 | + | UCGGCAGCCCCGGGACC | 17 | 7568 |
| HSV1-UL54-891 | + | CGGGACCACCGCGACCC | 17 | 7569 |
| HSV1-UL54-892 | + | GGGACCACCGCGACCCC | 17 | 7570 |
| HSV1-UL54-893 | + | GGACCACCGCGACCCCG | 17 | 7571 |
| HSV1-UL54-894 | + | CCGCGACCCCGACCCCU | 17 | 7572 |
| HSV1-UL54-895 | + | CGACCCCGACCCCUGCG | 17 | 7573 |
| HSV1-UL54-896 | + | CGACCCCUGCGACGCCC | 17 | 7574 |
| HSV1-UL54-206 | + | GACCCCUGCGACGCCCA | 17 | 6969 |
| HSV1-UL54-898 | + | ACCCCUGCGACGCCCAC | 17 | 7575 |
| HSV1-UL54-899 | + | CUGCGACGCCCACGGCG | 17 | 7576 |
| HSV1-UL54-900 | + | UGCGACGCCCACGGCGU | 17 | 7577 |
| HSV1-UL54-901 | + | GCGACGCCCACGGCGUC | 17 | 7578 |
| HSV1-UL54-902 | + | ACGGCGUCCGCCGCGGG | 17 | 7579 |
| HSV1-UL54-208 | + | CGGCGUCCGCCGCGGGC | 17 | 6971 |
| HSV1-UL54-904 | + | CCGCGGGCAGGCUGGGC | 17 | 7580 |
| HSV1-UL54-905 | + | CGGGCAGGCUGGGCUUU | 17 | 7581 |
| HSV1-UL54-906 | + | CCUUGCCCCCGUGCUGC | 17 | 7582 |
| HSV1-UL54-60 | + | UGCCCCCGUGCUGCUCG | 17 | 6823 |
| HSV1-UL54-908 | + | CCGUGCUGCUCGGGGGA | 17 | 7583 |
| HSV1-UL54-909 | + | CGUGCUGCUCGGGGGAG | 17 | 7584 |

[0733] Table 4E provides exemplary targeting domains for knocking out the UL54 gene selected according to the second tier parameters. The targeting domains are selected based on location within the coding sequence, but downstream of the first 500 bp of the UL54 gene. It is contemplated herein that the targeting domain hybridizes to the target domain through complementary base pairing. Any of the targeting domains in the table can be used with a S. aureus Cas9 molecule that gives double stranded cleavage. Any of the targeting domains in the table can be used with a S. aureus Cas9 single-stranded break nucleases (nickases). In an embodiment, dual targeting is used to create two nicks on opposite DNA strands by using S. aureus Cas9 nickases with two targeting domains that are complementary to opposite DNA strands, e.g., a gRNA comprising any minus strand targeting domain may be paired any gRNA comprising a plus strand targeting domain provided that the two gRNAs are oriented on the DNA such that PAMs face outward and the distance between the 5′ ends of the gRNAs is 0-50 bp.

TABLE 4E
2nd Tier

| | DNA | | Target | |
|---|---|---|---|---|
| gRNA Name | Strand | Targeting Domain | Site Length | Seq ID |
| HSV1-UL54-910 | − | CAGAACCAAUCGCAACCCUG | 20 | 7585 |
| HSV1-UL54-911 | − | CCACCCGGAGGCCAGCGGAC | 20 | 7586 |
| HSV1-UL54-912 | − | CAACCCUGGGGGACCCCGCC | 20 | 7587 |
| HSV1-UL54-254 | − | AACCCUGGGGGACCCCGCCC | 20 | 7017 |
| HSV1-UL54-914 | − | CUGGGGGACCCCGCCCCGGG | 20 | 7588 |
| HSV1-UL54-257 | − | UGGGGGACCCCGCCCCGGGG | 20 | 7020 |
| HSV1-UL54-916 | − | GGACCCCGCCCCGGGGCGGG | 20 | 7589 |
| HSV1-UL54-917 | − | CCCGCCCCGGGGCGGGGUGG | 20 | 7590 |
| HSV1-UL54-918 | − | CGGCCCCGGCGCCCCCCAUG | 20 | 7591 |
| HSV1-UL54-919 | − | UGGCGAGGCGUGGCGCGGCA | 20 | 7592 |
| HSV1-UL54-920 | − | CAGUGAGCAGCCCGACCCAC | 20 | 7593 |
| HSV1-UL54-268 | − | AGUGAGCAGCCCGACCCACC | 20 | 7031 |
| HSV1-UL54-922 | − | CCCGACCCACCCGGAGGCCA | 20 | 7594 |
| HSV1-UL54-271 | − | CACCCGGAGGCCAGCGGACA | 20 | 7034 |
| HSV1-UL54-924 | − | UGGCGAUUGCCCCCCCGCCC | 20 | 7595 |
| HSV1-UL54-925 | − | CGGACCCCCGCGCCCCGGCC | 20 | 7596 |
| HSV1-UL54-277 | − | GGACCCCCGCGCCCCGGCCC | 20 | 7040 |
| HSV1-UL54-927 | − | CCCCGCGCCCCGGCCCCGGA | 20 | 7597 |
| HSV1-UL54-928 | − | GUUGGUCCUGCGCUCCAUCU | 20 | 7598 |
| HSV1-UL54-929 | − | CGCGGCGGUCGACCGCAUCA | 20 | 7599 |
| HSV1-UL54-930 | − | CGGCGGUCGACCGCAUCAGC | 20 | 7600 |
| HSV1-UL54-931 | − | ACAGGUCAUGCACGACCCCU | 20 | 7601 |
| HSV1-UL54-285 | − | CAGGUCAUGCACGACCCCUU | 20 | 7048 |
| HSV1-UL54-286 | − | AGGUCAUGCACGACCCCUUU | 20 | 7049 |
| HSV1-UL54-287 | − | GGUCAUGCACGACCCCUUUG | 20 | 7050 |
| HSV1-UL54-935 | − | GGGGGCAGCCGUUUCCCGCC | 20 | 7602 |
| HSV1-UL54-936 | − | UUUCCCGCCGCGAAUAGCCC | 20 | 7603 |
| HSV1-UL54-937 | − | GCCCCUGGGCCCCGGUGCUG | 20 | 7604 |
| HSV1-UL54-938 | − | GGCCCCGGUGCUGGCGGGCC | 20 | 7605 |
| HSV1-UL54-296 | − | GCCCCGGUGCUGGCGGGCCA | 20 | 7059 |
| HSV1-UL54-940 | − | CCCGGUGCUGGCGGGCCAAG | 20 | 7606 |
| HSV1-UL54-941 | − | CCAAGGAGGGCCCUUUGACG | 20 | 7607 |
| HSV1-UL54-942 | − | CCCUUUGACGCCGAGACCAG | 20 | 7608 |
| HSV1-UL54-943 | − | GCCGAGACCAGACGGGUCUC | 20 | 7609 |
| HSV1-UL54-301 | − | CCGAGACCAGACGGGUCUCC | 20 | 7064 |
| HSV1-UL54-302 | − | CGAGACCAGACGGGUCUCCU | 20 | 7065 |
| HSV1-UL54-946 | − | AAACCUUGGUCGCCCACGGC | 20 | 7610 |
| HSV1-UL54-947 | − | CGCACUUUUGCCGGCAAUCC | 20 | 7611 |
| HSV1-UL54-948 | − | GCGCGACUGCGUGCUGCGCC | 20 | 7612 |
| HSV1-UL54-949 | − | GCUGCGCCAAGAAAAUUUCA | 20 | 7613 |
| HSV1-UL54-950 | − | CGAGGCGCUGGCCUCCGCCG | 20 | 7614 |
| HSV1-UL54-951 | − | ACAACCUGCCGCUGCGCCCC | 20 | 7615 |
| HSV1-UL54-952 | − | GCGCCCCCAGGACCCCAUUA | 20 | 7616 |
| HSV1-UL54-314 | − | CGCCCCCAGGACCCCAUUAU | 20 | 7077 |
| HSV1-UL54-954 | − | UCGGGACGACCGCGGCUGUG | 20 | 7617 |
| HSV1-UL54-955 | − | GGCCCUUUCUCCAGUGCUAC | 20 | 7618 |
| HSV1-UL54-956 | − | CUCCAGUGCUACCUGAAGGC | 20 | 7619 |
| HSV1-UL54-957 | − | AGGCGCGAGGCCUGUGCGGC | 20 | 7620 |
| HSV1-UL54-958 | − | GCGAGGCCUGUGCGGCCUGG | 20 | 7621 |
| HSV1-UL54-959 | − | UGUGUUCGCGGCGGCGUCUG | 20 | 7622 |
| HSV1-UL54-960 | − | GGCGGCGUCUGGCGGACAUU | 20 | 7623 |
| HSV1-UL54-961 | − | GGCCAGGCUCGCCAACCGCG | 20 | 7624 |
| HSV1-UL54-962 | − | ACCGCGUCGAGCGUGGCGUC | 20 | 7625 |
| HSV1-UL54-331 | − | CCGCGUCGAGCGUGGCGUCG | 20 | 7094 |
| HSV1-UL54-964 | − | CGACUACGCGACCCUUGGUG | 20 | 7626 |
| HSV1-UL54-333 | − | GACUACGCGACCCUUGGUGU | 20 | 7096 |
| HSV1-UL54-966 | − | CGCGACCCUUGGUGUCGGGG | 20 | 7627 |
| HSV1-UL54-336 | − | GCGACCCUUGGUGUCGGGGU | 20 | 7099 |
| HSV1-UL54-968 | − | GACCCUUGGUGUCGGGGUCG | 20 | 7628 |
| HSV1-UL54-969 | − | CCCUUGGUGUCGGGGUCGGA | 20 | 7629 |
| HSV1-UL54-970 | − | GAAGAUGCAUUUCUACCUCC | 20 | 7630 |
| HSV1-UL54-337 | − | AAGAUGCAUUUCUACCUCCC | 20 | 7100 |
| HSV1-UL54-972 | − | ACCUCCCCGGGGCCUGCAUG | 20 | 7631 |
| HSV1-UL54-973 | − | GGCCUGCAUGGCGGGCCUGA | 20 | 7632 |
| HSV1-UL54-974 | − | AAAUCCUAGACACGCACCGC | 20 | 7633 |
| HSV1-UL54-343 | − | AAUCCUAGACACGCACCGCC | 20 | 7106 |
| HSV1-UL54-976 | − | ACACGCACCGCCAGGAGUGU | 20 | 7634 |
| HSV1-UL54-977 | − | GGAGUGUUCGAGUCGUGUCU | 20 | 7635 |
| HSV1-UL54-978 | + | ACACUCCUGGCGGUGCGUGU | 20 | 7636 |
| HSV1-UL54-979 | + | GGGAGGUAGAAAUGCAUCUU | 20 | 7637 |
| HSV1-UL54-980 | + | ACACCAAGGGUCGCGUAGUC | 20 | 7638 |
| HSV1-UL54-353 | + | AGACACGACUCGAACACUCC | 20 | 7116 |
| HSV1-UL54-982 | + | GGCGGUGCGUGUCUAGGAUU | 20 | 7639 |
| HSV1-UL54-983 | + | GCGGUGCGUGUCUAGGAUUU | 20 | 7640 |
| HSV1-UL54-984 | + | UCAGGCCCGCCAUGCAGGCC | 20 | 7641 |
| HSV1-UL54-985 | + | CAUGCAGGCCCCGGGGAGGU | 20 | 7642 |
| HSV1-UL54-986 | + | GGAGGUAGAAAUGCAUCUUC | 20 | 7643 |
| HSV1-UL54-987 | + | UCCGACCCCGACACCAAGGG | 20 | 7644 |
| HSV1-UL54-988 | + | CGACCCCGACACCAAGGGUC | 20 | 7645 |
| HSV1-UL54-989 | + | ACCCCGACACCAAGGGUCGC | 20 | 7646 |
| HSV1-UL54-990 | + | CCCCGACACCAAGGGUCGCG | 20 | 7647 |
| HSV1-UL54-991 | + | CACCAAGGGUCGCGUAGUCG | 20 | 7648 |
| HSV1-UL54-992 | + | CGACGCCACGCUCGACGCGG | 20 | 7649 |
| HSV1-UL54-365 | + | GACGCCACGCUCGACGCGGU | 20 | 7128 |
| HSV1-UL54-994 | + | CGCGGUUGGCGAGCCUGGCC | 20 | 7650 |
| HSV1-UL54-995 | + | AAUGUCCGCCAGACGCCGCC | 20 | 7651 |
| HSV1-UL54-996 | + | CAGACGCCGCCGCGAACACA | 20 | 7652 |
| HSV1-UL54-997 | + | CCAGGCCGCACAGGCCUCGC | 20 | 7653 |
| HSV1-UL54-998 | + | GCCGCACAGGCCUCGCGCCU | 20 | 7654 |
| HSV1-UL54-999 | + | GCCUUCAGGUAGCACUGGAG | 20 | 7655 |
| HSV1-UL54-1000 | + | GUAGCACUGGAGAAAGGGCC | 20 | 7656 |
| HSV1-UL54-1001 | + | CACAGCCGCGGUCGUCCCGA | 20 | 7657 |
| HSV1-UL54-1002 | + | AUAAUGGGGUCCUGGGGGCG | 20 | 7658 |
| HSV1-UL54-1003 | + | UAAUGGGGUCCUGGGGGCGC | 20 | 7659 |
| HSV1-UL54-1004 | + | GGGGCGCAGCGGCAGGUUGU | 20 | 7660 |
| HSV1-UL54-1005 | + | CGGCGGAGGCCAGCGCCUCG | 20 | 7661 |
| HSV1-UL54-1006 | + | UGAAAUUUUCUUGGCGCAGC | 20 | 7662 |
| HSV1-UL54-1007 | + | GGCGCAGCACGCAGUCGCGC | 20 | 7663 |
| HSV1-UL54-1008 | + | GGAUUGCCGGCAAAAGUGCG | 20 | 7664 |
| HSV1-UL54-1009 | + | GCCGUGGGCGACCAAGGUUU | 20 | 7665 |
| HSV1-UL54-1010 | + | AGGAGACCCGUCUGGUCUCG | 20 | 7666 |
| HSV1-UL54-1011 | + | GGAGACCCGUCUGGUCUCGG | 20 | 7667 |
| HSV1-UL54-1012 | + | GAGACCCGUCUGGUCUCGGC | 20 | 7668 |
| HSV1-UL54-1013 | + | CUGGUCUCGGCGUCAAAGGG | 20 | 7669 |
| HSV1-UL54-1014 | + | CGUCAAAGGGCCCUCCUUGG | 20 | 7670 |
| HSV1-UL54-1015 | + | CUUGGCCCGCCAGCACCGGG | 20 | 7671 |
| HSV1-UL54-1016 | + | UGGCCCGCCAGCACCGGGGC | 20 | 7672 |
| HSV1-UL54-1017 | + | GGCCCGCCAGCACCGGGGCC | 20 | 7673 |
| HSV1-UL54-1018 | + | CAGCACCGGGGCCCAGGGGC | 20 | 7674 |
| HSV1-UL54-420 | + | GGGCUAUUCGCGGCGGGAAA | 20 | 7183 |
| HSV1-UL54-1020 | + | GGCGGGAAACGGCUGCCCCC | 20 | 7675 |
| HSV1-UL54-1021 | + | CAAAGGGGUCGUGCAUGACC | 20 | 7676 |
| HSV1-UL54-1022 | + | AAAGGGGUCGUGCAUGACCU | 20 | 7677 |
| HSV1-UL54-1023 | + | AAGGGGUCGUGCAUGACCUG | 20 | 7678 |
| HSV1-UL54-1024 | + | AGGGGUCGUGCAUGACCUGU | 20 | 7679 |
| HSV1-UL54-1025 | + | GCUGAUGCGGUCGACCGCCG | 20 | 7680 |
| HSV1-UL54-1026 | + | UGAUGCGGUCGACCGCCGCG | 20 | 7681 |
| HSV1-UL54-1027 | + | AGAUGGAGCGCAGGACCAAC | 20 | 7682 |
| HSV1-UL54-1028 | + | UCCGGGGCCGGGGCGCGGGG | 20 | 7683 |
| HSV1-UL54-1029 | + | GGGCCGGGGCGCGGGGGUCC | 20 | 7684 |
| HSV1-UL54-446 | + | GGCCGGGGCGCGGGGGUCCG | 20 | 7209 |
| HSV1-UL54-1031 | + | GGGCGGGGGGGCAAUCGCCA | 20 | 7685 |
| HSV1-UL54-1032 | + | UGUCCGCUGGCCUCCGGGUG | 20 | 7686 |
| HSV1-UL54-1033 | + | GUCCGCUGGCCUCCGGGUGG | 20 | 7687 |
| HSV1-UL54-1034 | + | UGGCCUCCGGGUGGGUCGGG | 20 | 7688 |
| HSV1-UL54-1035 | + | GGUGGGUCGGGCUGCUCACU | 20 | 7689 |
| HSV1-UL54-1036 | + | GUGGGUCGGGCUGCUCACUG | 20 | 7690 |
| HSV1-UL54-469 | + | UGCCGCGCCACGCCUCGCCA | 20 | 7232 |
| HSV1-UL54-1038 | + | CAUGGGGGGCGCCGGGGCCG | 20 | 7691 |
| HSV1-UL54-1039 | + | CCACCCCGCCCCGGGGCGGG | 20 | 7692 |
| HSV1-UL54-1040 | + | CCCGCCCCGGGGCGGGGUCC | 20 | 7693 |
| HSV1-UL54-484 | + | CCCCGGGGCGGGGUCCCCCA | 20 | 7247 |
| HSV1-UL54-1042 | + | CCCGGGGCGGGGUCCCCCAG | 20 | 7694 |
| HSV1-UL54-1043 | + | GGGCGGGGUCCCCCAGGGUU | 20 | 7695 |
| HSV1-UL54-1044 | + | GGCGGGGUCCCCCAGGGUUG | 20 | 7696 |
| HSV1-UL54-1045 | + | CAGGGUUGCGAUUGGUUCUG | 20 | 7697 |
| HSV1-UL54-1045 | + | CAGGGUUGCGAUUGGUUCUG | 20 | 7697 |
| HSV1-UL54-1045 | + | CAGGGUUGCGAUUGGUUCUG | 20 | 7697 |
| HSV1-UL54-1045 | + | CAGGGUUGCGAUUGGUUCUG | 20 | 7697 |
| HSV1-UL54-488 | − | AACCAAUCGCAACCCUG | 17 | 7251 |
| HSV1-UL54-1050 | − | CCCGGAGGCCAGCGGAC | 17 | 7698 |
| HSV1-UL54-1051 | − | CCCUGGGGGACCCCGCC | 17 | 7699 |
| HSV1-UL54-490 | − | CCUGGGGGACCCCGCCC | 17 | 7253 |
| HSV1-UL54-1053 | − | GGGGACCCCGCCCCGGG | 17 | 7700 |
| HSV1-UL54-493 | − | GGGACCCCGCCCCGGGG | 17 | 7256 |
| HSV1-UL54-1055 | − | CCCCGCCCCGGGGCGGG | 17 | 7701 |
| HSV1-UL54-1056 | − | GCCCCGGGGCGGGGUGG | 17 | 7702 |
| HSV1-UL54-1057 | − | CCCCGGCGCCCCCCAUG | 17 | 7703 |
| HSV1-UL54-1058 | − | CGAGGCGUGGCGCGGCA | 17 | 7704 |
| HSV1-UL54-1059 | − | UGAGCAGCCCGACCCAC | 17 | 7705 |
| HSV1-UL54-504 | − | GAGCAGCCCGACCCACC | 17 | 7267 |
| HSV1-UL54-1061 | − | GACCCACCCGGAGGCCA | 17 | 7706 |
| HSV1-UL54-507 | − | CCGGAGGCCAGCGGACA | 17 | 7270 |
| HSV1-UL54-1063 | − | CGAUUGCCCCCCCGCCC | 17 | 7707 |
| HSV1-UL54-1064 | − | ACCCCCGCGCCCCGGCC | 17 | 7708 |
| HSV1-UL54-513 | − | CCCCCGCGCCCCGGCCC | 17 | 7276 |
| HSV1-UL54-1066 | − | CGCGCCCCGGCCCCGGA | 17 | 7709 |
| HSV1-UL54-1067 | − | GGUCCUGCGCUCCAUCU | 17 | 7710 |
| HSV1-UL54-1068 | − | GGCGGUCGACCGCAUCA | 17 | 7711 |
| HSV1-UL54-1069 | − | CGGUCGACCGCAUCAGC | 17 | 7712 |
| HSV1-UL54-1070 | − | GGUCAUGCACGACCCCU | 17 | 7713 |
| HSV1-UL54-521 | − | GUCAUGCACGACCCCUU | 17 | 7284 |
| HSV1-UL54-522 | − | UCAUGCACGACCCCUUU | 17 | 7285 |
| HSV1-UL54-523 | − | CAUGCACGACCCCUUUG | 17 | 7286 |
| HSV1-UL54-1074 | − | GGCAGCCGUUUCCCGCC | 17 | 7714 |
| HSV1-UL54-1075 | − | CCCGCCGCGAAUAGCCC | 17 | 7715 |
| HSV1-UL54-1076 | − | CCUGGGCCCCGGUGCUG | 17 | 7716 |
| HSV1-UL54-1077 | − | CCCGGUGCUGGCGGGCC | 17 | 7717 |
| HSV1-UL54-532 | − | CCGGUGCUGGCGGGCCA | 17 | 7295 |
| HSV1-UL54-1079 | − | GGUGCUGGCGGGCCAAG | 17 | 7718 |
| HSV1-UL54-1080 | − | AGGAGGGCCCUUUGACG | 17 | 7719 |
| HSV1-UL54-1081 | − | UUUGACGCCGAGACCAG | 17 | 7720 |
| HSV1-UL54-1082 | − | GAGACCAGACGGGUCUC | 17 | 7721 |
| HSV1-UL54-537 | − | AGACCAGACGGGUCUCC | 17 | 7300 |
| HSV1-UL54-538 | − | GACCAGACGGGUCUCCU | 17 | 7301 |
| HSV1-UL54-1085 | − | CCUUGGUCGCCCACGGC | 17 | 7722 |
| HSV1-UL54-1086 | − | ACUUUUGCCGGCAAUCC | 17 | 7723 |
| HSV1-UL54-1087 | − | CGACUGCGUGCUGCGCC | 17 | 7724 |
| HSV1-UL54-1088 | − | GCGCCAAGAAAAUUUCA | 17 | 7725 |
| HSV1-UL54-1089 | − | GGCGCUGGCCUCCGCCG | 17 | 7726 |
| HSV1-UL54-1090 | − | ACCUGCCGCUGCGCCCC | 17 | 7727 |
| HSV1-UL54-1091 | − | CCCCCAGGACCCCAUUA | 17 | 7728 |
| HSV1-UL54-550 | − | CCCCAGGACCCCAUUAU | 17 | 7313 |
| HSV1-UL54-1093 | − | GGACGACCGCGGCUGUG | 17 | 7729 |
| HSV1-UL54-1094 | − | CCUUUCUCCAGUGCUAC | 17 | 7730 |
| HSV1-UL54-1095 | − | CAGUGCUACCUGAAGGC | 17 | 7731 |
| HSV1-UL54-1096 | − | CGCGAGGCCUGUGCGGC | 17 | 7732 |
| HSV1-UL54-1097 | − | AGGCCUGUGCGGCCUGG | 17 | 7733 |
| HSV1-UL54-1098 | − | GUUCGCGGCGGCGUCUG | 17 | 7734 |
| HSV1-UL54-1099 | − | GGCGUCUGGCGGACAUU | 17 | 7735 |
| HSV1-UL54-1100 | − | CAGGCUCGCCAACCGCG | 17 | 7736 |
| HSV1-UL54-1101 | − | GCGUCGAGCGUGGCGUC | 17 | 7737 |
| HSV1-UL54-567 | − | CGUCGAGCGUGGCGUCG | 17 | 7330 |
| HSV1-UL54-1103 | − | CUACGCGACCCUUGGUG | 17 | 7738 |
| HSV1-UL54-569 | − | UACGCGACCCUUGGUGU | 17 | 7332 |
| HSV1-UL54-1105 | − | GACCCUUGGUGUCGGGG | 17 | 7739 |
| HSV1-UL54-572 | − | ACCCUUGGUGUCGGGGU | 17 | 7335 |
| HSV1-UL54-1107 | − | CCUUGGUGUCGGGGUCG | 17 | 7740 |
| HSV1-UL54-1108 | − | UUGGUGUCGGGGUCGGA | 17 | 7741 |
| HSV1-UL54-1109 | − | GAUGCAUUUCUACCUCC | 17 | 7742 |
| HSV1-UL54-573 | − | AUGCAUUUCUACCUCCC | 17 | 7336 |
| HSV1-UL54-1111 | − | UCCCCGGGGCCUGCAUG | 17 | 7743 |
| HSV1-UL54-1112 | − | CUGCAUGGCGGGCCUGA | 17 | 7744 |
| HSV1-UL54-1113 | − | UCCUAGACACGCACCGC | 17 | 7745 |
| HSV1-UL54-579 | − | CCUAGACACGCACCGCC | 17 | 7342 |
| HSV1-UL54-1115 | − | CGCACCGCCAGGAGUGU | 17 | 7746 |
| HSV1-UL54-1116 | − | GUGUUCGAGUCGUGUCU | 17 | 7747 |
| HSV1-UL54-1117 | − | ACACUCCUGGCGGUGCG | 17 | 7748 |
| HSV1-UL54-1118 | − | GGGAGGUAGAAAUGCAU | 17 | 7749 |
| HSV1-UL54-1119 | − | ACACCAAGGGUCGCGUA | 17 | 7750 |
| HSV1-UL54-1120 | − | AGACACGACUCGAACAC | 17 | 7751 |
| HSV1-UL54-1121 | − | GGCGGUGCGUGUCUAGG | 17 | 7752 |
| HSV1-UL54-1122 | − | GCGGUGCGUGUCUAGGA | 17 | 7753 |
| HSV1-UL54-1123 | − | UCAGGCCCGCCAUGCAG | 17 | 7754 |
| HSV1-UL54-1124 | − | CAUGCAGGCCCCGGGGA | 17 | 7755 |
| HSV1-UL54-1125 | − | GGAGGUAGAAAUGCAUC | 17 | 7756 |
| HSV1-UL54-599 | − | UCCGACCCCGACACCAA | 17 | 7362 |
| HSV1-UL54-1127 | − | CGACCCCGACACCAAGG | 17 | 7757 |
| HSV1-UL54-1128 | − | ACCCCGACACCAAGGGU | 17 | 7758 |
| HSV1-UL54-1129 | − | CCCCGACACCAAGGGUC | 17 | 7759 |
| HSV1-UL54-1130 | − | CACCAAGGGUCGCGUAG | 17 | 7760 |
| HSV1-UL54-600 | − | CGACGCCACGCUCGACG | 17 | 7363 |
| HSV1-UL54-1132 | − | GACGCCACGCUCGACGC | 17 | 7761 |
| HSV1-UL54-1133 | − | CGCGGUUGGCGAGCCUG | 17 | 7762 |
| HSV1-UL54-1134 | − | AAUGUCCGCCAGACGCC | 17 | 7763 |
| HSV1-UL54-1135 | − | CAGACGCCGCCGCGAAC | 17 | 7764 |
| HSV1-UL54-1136 | − | CCAGGCCGCACAGGCCU | 17 | 7765 |
| HSV1-UL54-1137 | − | GCCGCACAGGCCUCGCG | 17 | 7766 |
| HSV1-UL54-1138 | − | GCCUUCAGGUAGCACUG | 17 | 7767 |
| HSV1-UL54-1139 | − | GUAGCACUGGAGAAAGG | 17 | 7768 |
| HSV1-UL54-1140 | − | CACAGCCGCGGUCGUCC | 17 | 7769 |
| HSV1-UL54-1141 | − | AUAAUGGGGUCCUGGGG | 17 | 7770 |
| HSV1-UL54-1142 | − | UAAUGGGGUCCUGGGGG | 17 | 7771 |
| HSV1-UL54-1143 | − | GGGGCGCAGCGGCAGGU | 17 | 7772 |
| HSV1-UL54-1144 | − | CGGCGGAGGCCAGCGCC | 17 | 7773 |
| HSV1-UL54-1145 | − | UGAAAUUUUCUUGGCGC | 17 | 7774 |
| HSV1-UL54-1146 | − | GGCGCAGCACGCAGUCG | 17 | 7775 |
| HSV1-UL54-1147 | − | GGAUUGCCGGCAAAAGU | 17 | 7776 |
| HSV1-UL54-1148 | − | GCCGUGGGCGACCAAGG | 17 | 7777 |
| HSV1-UL54-1149 | − | AGGAGACCCGUCUGGUC | 17 | 7778 |
| HSV1-UL54-643 | − | GGAGACCCGUCUGGUCU | 17 | 7406 |
| HSV1-UL54-1151 | − | GAGACCCGUCUGGUCUC | 17 | 7779 |
| HSV1-UL54-645 | − | CUGGUCUCGGCGUCAAA | 17 | 7408 |
| HSV1-UL54-646 | − | CGUCAAAGGGCCCUCCU | 17 | 7409 |
| HSV1-UL54-648 | − | CUUGGCCCGCCAGCACC | 17 | 7411 |
| HSV1-UL54-1155 | − | UGGCCCGCCAGCACCGG | 17 | 7780 |
| HSV1-UL54-1156 | − | GGCCCGCCAGCACCGGG | 17 | 7781 |
| HSV1-UL54-1157 | − | CAGCACCGGGGCCCAGG | 17 | 7782 |
| HSV1-UL54-1158 | − | GGGCUAUUCGCGGCGGG | 17 | 7783 |
| HSV1-UL54-1159 | − | GGCGGGAAACGGCUGCC | 17 | 7784 |
| HSV1-UL54-1160 | − | CAAAGGGGUCGUGCAUG | 17 | 7785 |
| HSV1-UL54-1161 | − | AAAGGGGUCGUGCAUGA | 17 | 7786 |
| HSV1-UL54-1162 | − | AAGGGGUCGUGCAUGAC | 17 | 7787 |
| HSV1-UL54-1163 | − | AGGGGUCGUGCAUGACC | 17 | 7788 |
| HSV1-UL54-1164 | − | GCUGAUGCGGUCGACCG | 17 | 7789 |
| HSV1-UL54-1165 | − | UGAUGCGGUCGACCGCC | 17 | 7790 |
| HSV1-UL54-1166 | − | AGAUGGAGCGCAGGACC | 17 | 7791 |
| HSV1-UL54-680 | − | UCCGGGGCCGGGGCGCG | 17 | 7443 |
| HSV1-UL54-1168 | − | GGGCCGGGGCGCGGGGG | 17 | 7792 |
| HSV1-UL54-1169 | − | GGCCGGGGCGCGGGGGU | 17 | 7793 |
| HSV1-UL54-1170 | − | GGGCGGGGGGGCAAUCG | 17 | 7794 |
| HSV1-UL54-1171 | − | UGUCCGCUGGCCUCCGG | 17 | 7795 |
| HSV1-UL54-701 | − | GUCCGCUGGCCUCCGGG | 17 | 7464 |
| HSV1-UL54-704 | − | UGGCCUCCGGGUGGGUC | 17 | 7467 |
| HSV1-UL54-1174 | − | GGUGGGUCGGGCUGCUC | 17 | 7796 |
| HSV1-UL54-1175 | − | GUGGGUCGGGCUGCUCA | 17 | 7797 |
| HSV1-UL54-1176 | − | UGCCGCGCCACGCCUCG | 17 | 7798 |
| HSV1-UL54-1177 | − | CAUGGGGGGCGCCGGGG | 17 | 7799 |
| HSV1-UL54-717 | − | CCACCCCGCCCCGGGGC | 17 | 7480 |
| HSV1-UL54-496 | − | CCCGCCCCGGGGCGGGG | 17 | 7259 |
| HSV1-UL54-1180 | − | CCCCGGGGCGGGGUCCC | 17 | 7800 |
| HSV1-UL54-1181 | − | CCCGGGGCGGGGUCCCC | 17 | 7801 |
| HSV1-UL54-1182 | − | GGGCGGGGUCCCCCAGG | 17 | 7802 |
| HSV1-UL54-1183 | − | GGCGGGGUCCCCCAGGG | 17 | 7803 |
| HSV1-UL54-1184 | − | CAGGGUUGCGAUUGGUU | 17 | 7804 |
| HSV1-UL54-1185 | − | AGGGUUGCGAUUGGUUC | 17 | 7805 |
| HSV1-UL54-1186 | − | GGGUUGCGAUUGGUUCU | 17 | 7806 |
| HSV1-UL54-1187 | − | GGUUGCGAUUGGUUCUG | 17 | 7807 |

[0734] Table 4F provides exemplary targeting domains for knocking out the UL54 gene selected according to the first tier parameters. The targeting domains are selected based on location within first 500 bp of the coding sequence of the UL54 gene. It is contemplated herein that the targeting domain hybridizes to the target domain through complementary base pairing. Any of the targeting domains in the table can be used with a N. meningitidis Cas9 molecule that gives double stranded cleavage. Any of the targeting domains in the table can be used with a N. meningitidis Cas9 single-stranded break nucleases (nickases). In an embodiment, dual targeting is used to create two nicks on opposite DNA strands by using N. meningitidis Cas9 nickases with two targeting domains that are complementary to opposite DNA strands, e.g., a gRNA comprising any minus strand targeting domain may be paired any gRNA comprising a plus strand targeting domain provided that the two gRNAs are oriented on the DNA such that PAMs face outward and the distance between the 5′ ends of the gRNAs is 0-50 bp.

TABLE 4F
1st Tier

| | | | Target | |
|---|---|---|---|---|
| | DNA | | Site | |
| gRNA Name | Strand | Targeting Domain | Length | Seq ID |
| HSV1-UL54-274 | − | ACCCCCCCCGCUAAUGA | 20 | 7037 |
| | | CGC | | |
| HSV1-UL54-723 | + | GCGUCAUUAGCGGGGGG | 20 | 7485 |
| | | GGU | | |
| HSV1-UL54-510 | − | CCCCCCGCUAAUGACGC | 17 | 7273 |
| HSV1-UL54-725 | + | GCGUCAUUAGCGGGGGG | 17 | 7486 |

[0735] Table 5A provides exemplary targeting domains for knocking out the ULS9 gene selected according to the first tier parameters. The targeting domains bind within the first 500 bp of the coding sequence (e.g., within 500 bp downstream from the start codon), have a high level of orthogonality, and start with a 5′G. It is contemplated herein that in an embodiment the targeting domain hybridizes to the target domain through complementary base pairing. Any of the targeting domains in the table can be used with a S. pyogenes Cas9 molecule that generates a double stranded break (Cas9 nuclease) or a single-stranded break (Cas9 nickase).

TABLE 5A
1st Tier

| | DNA | | Target | Seq ID |
|---|---|---|---|---|
| gRNA Name | Strand | Targeting Domain | Site Length | NO: |
| HSV1-UL19-179 | + | GGACCCGGUCGGCACCA | 17 | 569 |
| HSV1-UL19-136 | + | GAUACCCGUCCCGUCCA | 17 | 540 |
| HSV1-UL19-168 | + | GCAAUACGACCCCAGCA | 17 | 448 |
| HSV1-UL19-3209 | + | GCGAGCGAGCUGUUGGA | 17 | 7808 |
| HSV1-UL19-134 | + | GUUGGAUGGCGCGCAAC | 17 | 422 |
| HSV1-UL19-165 | + | GAAAGCGCACGAGCGAC | 17 | 445 |
| HSV1-UL19-97 | − | GCGACCCUCCGGGAUAC | 17 | 390 |
| HSV1-UL19-121 | − | GAACGCCGCCUUCAGCC | 17 | 529 |
| HSV1-UL19-182 | + | GCGGCAUACCGGUAUCC | 17 | 571 |
| HSV1-UL19-3210 | − | GCUCGCUCGCAACGUCC | 17 | 7809 |
| HSV1-UL19-156 | + | GUUGCUCGAUGGGGUGC | 17 | 558 |
| HSV1-UL19-107 | − | GUCGCUCGUGCGCUUUC | 17 | 400 |
| HSV1-UL19-98 | − | GGGAUACCGGUAUGCCG | 17 | 391 |
| HSV1-UL19-117 | − | GGGGCGCGUACAGUUCG | 17 | 413 |
| HSV1-UL19-105 | − | GAGUUCGACGCCCUGCU | 17 | 398 |
| HSV1-UL19-85 | + | GAGGGACCCGGUCGGCACCA | 20 | 512 |
| HSV1-UL19-3211 | + | GUCGCGGUUGGGAGCGGCCA | 20 | 7810 |
| HSV1-UL19-42 | + | GCCGAUACCCGUCCCGUCCA | 20 | 483 |
| HSV1-UL19-74 | + | GUUGCAAUACGACCCCAGCA | 20 | 440 |
| HSV1-UL19-3212 | + | GUUGCGAGCGAGCUGUUGGA | 20 | 7811 |
| HSV1-UL19-40 | + | GCUGUUGGAUGGCGCGCAAC | 20 | 421 |
| HSV1-UL19-87 | + | GCACCAUGGCCGCGGCAUAC | 20 | 453 |
| HSV1-UL19-26 | − | GACCAAGAUUAUCGACCGCC | 20 | 412 |
| HSV1-UL19-48 | + | GGGCGAUGGCCUCGGUGGCC | 20 | 489 |
| HSV1-UL19-88 | + | GCCGCGGCAUACCGGUAUCC | 20 | 514 |
| HSV1-UL19-78 | + | GUUUGCAUCGGAGCGCACGC | 20 | 506 |
| HSV1-UL19-190 | − | GCAACGUCCAGGCCGUCCUC | 20 | 576 |
| HSV1-UL19-18 | − | GUGCGUGUGUACCAAGUUUC | 20 | 404 |
| HSV1-UL19-65 | + | GGGCCGUCGCGGGCAAUCAG | 20 | 430 |
| HSV1-UL19-8 | − | GUCCCUCCUUAGCACGAUCG | 20 | 465 |
| HSV1-UL19-32 | − | GGCCAUCGCCCUGCUCACGG | 20 | 476 |
| HSV1-UL19-89 | + | GCGGCAUACCGGUAUCCCGG | 20 | 515 |
| HSV1-UL19-61 | + | GUGGGUUGCUCGAUGGGGUG | 20 | 500 |
| HSV1-UL19-76 | + | GUCGUACAGGCUGUUUGCAU | 20 | 442 |
| HSV1-UL19-39 | − | GCCCUGGACGGGACGGGUAU | 20 | 482 |
| HSV1-UL19-70 | + | GUAGGCCAGCUCCGGAAACU | 20 | 436 |
| HSV1-UL19-11 | − | GUCGAGUUCGACGCCCUGCU | 20 | 393 |
| HSV1-UL19-55 | + | GGCCCGGCGGUCGAUAAUCU | 20 | 496 |
| HSV1-UL19-3213 | + | GGACGUUGCGAGCGAGCUGU | 20 | 7812 |

[0736] Table 5B provides exemplary targeting domains for knocking out the UL19 gene selected according to the second tier parameters. The targeting domains bind within the first 500 bp of the coding sequence (e.g., within 500 bp downstream from the start codon) and have a high level of orthogonality. It is contemplated herein that in an embodiment the targeting domain hybridizes to the target domain through complementary base pairing. Any of the targeting domains in the table can be used with a S. pyogenes Cas9 molecule that generates a double stranded break (Cas9 nuclease) or a single-stranded break (Cas9 nickase).

TABLE 5B
2nd Tier

| | DNA | | Target | Seq ID |
|---|---|---|---|---|
| gRNA Name | Strand | Targeting Domain | Site Length | NO: |
| HSV1-UL19-166 | + | AAAGCGCACGAGCGACA | 17 | 446 |
| HSV1-UL19-3214 | − | AUCUCCACGCGACCCCA | 17 | 7813 |
| HSV1-UL19-99 | − | CCGGUAUGCCGCGGCCA | 17 | 392 |
| HSV1-UL19-115 | − | CUGGCCUACAUGAACGA | 17 | 527 |
| HSV1-UL19-118 | − | CCGCUGAUUGCCCGCGA | 17 | 414 |
| HSV1-UL19-176 | + | CUCGAUCGUGCUAAGGA | 17 | 452 |
| HSV1-UL19-184 | + | CAUACCGGUAUCCCGGA | 17 | 573 |
| HSV1-UL19-174 | + | CCACCUCGAUCGUGCUA | 17 | 565 |
| HSV1-UL19-181 | + | CCAUGGCCGCGGCAUAC | 17 | 454 |
| HSV1-UL19-169 | + | CGAACUCGACGUCGUAC | 17 | 449 |
| HSV1-UL19-1442 | + | ACGCCCCGAGGACGGCC | 17 | 1828 |
| HSV1-UL19-135 | + | CGAUACCCGUCCCGUCC | 17 | 424 |
| HSV1-UL19-172 | + | UGCAUCGGAGCGCACGC | 17 | 563 |
| HSV1-UL19-119 | − | CCAAGAUUAUCGACCGC | 17 | 415 |
| HSV1-UL19-160 | + | CGCGGGCAAUCAGCGGC | 17 | 560 |
| HSV1-UL19-104 | − | CGAGUUCGACGCCCUGC | 17 | 524 |
| HSV1-UL19-171 | + | UUGCAUCGGAGCGCACG | 17 | 562 |
| HSV1-UL19-125 | − | CCAUCGCCCUGCUCACG | 17 | 418 |
| HSV1-UL19-102 | − | CCUCCUUAGCACGAUCG | 17 | 522 |
| HSV1-UL19-175 | + | CCUCGAUCGUGCUAAGG | 17 | 566 |
| HSV1-UL19-103 | − | CCUUAGCACGAUCGAGG | 17 | 523 |
| HSV1-UL19-126 | − | CAUCGCCCUGCUCACGG | 17 | 533 |
| HSV1-UL19-106 | − | AGUUCGACGCCCUGCUG | 17 | 399 |
| HSV1-UL19-153 | + | UGUGUGGGUUGCUCGAU | 17 | 428 |
| HSV1-UL19-133 | − | CUGGACGGGACGGGUAU | 17 | 539 |
| HSV1-UL19-582 | − | AACGUCCAGGCCGUCCU | 17 | 968 |
| HSV1-UL19-149 | + | CCGGCGGUCGAUAAUCU | 17 | 553 |
| HSV1-UL19-3215 | + | CGUUGCGAGCGAGCUGU | 17 | 7814 |
| HSV1-UL19-187 | + | CCCGGAGGGUCGCGGUU | 17 | 460 |
| HSV1-UL19-72 | + | CAGAAAGCGCACGAGCGACA | 20 | 438 |
| HSV1-UL19-3216 | − | CCGAUCUCCACGCGACCCCA | 20 | 7815 |
| HSV1-UL19-5 | − | AUACCGGUAUGCCGCGGCCA | 20 | 389 |
| HSV1-UL19-29 | − | CGAGGCCAUCGCCCUGCUCA | 20 | 474 |
| HSV1-UL19-52 | + | CAGGCUGAAGGCGGCGUUCA | 20 | 493 |
| HSV1-UL19-24 | − | CAGCCGCUGAUUGCCCGCGA | 20 | 410 |
| HSV1-UL19-45 | + | CUCCCCCGUGAGCAGGGCGA | 20 | 486 |
| HSV1-UL19-82 | + | CACCUCGAUCGUGCUAAGGA | 20 | 451 |
| HSV1-UL19-90 | + | CGGCAUACCGGUAUCCCGGA | 20 | 516 |
| HSV1-UL19-80 | + | ACGCCACCUCGAUCGUGCUA | 20 | 508 |
| HSV1-UL19-71 | + | CCAGAAAGCGCACGAGCGAC | 20 | 437 |
| HSV1-UL19-3 | − | ACCGCGACCCUCCGGGAUAC | 20 | 387 |
| HSV1-UL19-75 | + | CGUCGAACUCGACGUCGUAC | 20 | 441 |
| HSV1-UL19-7 | − | CCGCGGCCAUGGUGCCGACC | 20 | 464 |
| HSV1-UL19-975 | + | CAAACGCCCCGAGGACGGCC | 20 | 1361 |
| HSV1-UL19-53 | + | UGAAGGCGGCGUUCAGGGCC | 20 | 494 |
| HSV1-UL19-3217 | − | ACAGCUCGCUCGCAACGUCC | 20 | 7816 |
| HSV1-UL19-41 | + | CGCCGAUACCCGUCCCGUCC | 20 | 423 |
| HSV1-UL19-73 | + | UGUUGCAAUACGACCCCAGC | 20 | 439 |
| HSV1-UL19-25 | − | UGACCAAGAUUAUCGACCGC | 20 | 411 |
| HSV1-UL19-66 | + | CGUCGCGGGCAAUCAGCGGC | 20 | 503 |
| HSV1-UL19-10 | − | CGUCGAGUUCGACGCCCUGC | 20 | 467 |
| HSV1-UL19-62 | + | UGGGUUGCUCGAUGGGGUGC | 20 | 501 |
| HSV1-UL19-1 | − | CGCUCCCAACCGCGACCCUC | 20 | 461 |
| HSV1-UL19-69 | + | UCGUUCAUGUAGGCCAGCUC | 20 | 435 |
| HSV1-UL19-15 | − | UCGUGCGCUUUCUGGAGCUC | 20 | 397 |
| HSV1-UL19-51 | + | CCAGGCUGAAGGCGGCGUUC | 20 | 492 |
| HSV1-UL19-13 | − | CCUGUCGCUCGUGCGCUUUC | 20 | 395 |
| HSV1-UL19-77 | + | UGUUUGCAUCGGAGCGCACG | 20 | 505 |
| HSV1-UL19-31 | − | AGGCCAUCGCCCUGCUCACG | 20 | 417 |
| HSV1-UL19-86 | + | CCCGGUCGGCACCAUGGCCG | 20 | 513 |
| HSV1-UL19-4 | − | UCCGGGAUACCGGUAUGCCG | 20 | 388 |
| HSV1-UL19-191 | − | CAACGUCCAGGCCGUCCUCG | 20 | 577 |
| HSV1-UL19-63 | + | CGAUGGGGUGCGGGCCGUCG | 20 | 502 |
| HSV1-UL19-91 | + | ACCGGUAUCCCGGAGGGUCG | 20 | 455 |
| HSV1-UL19-23 | − | CGAGGGGCGCGUACAGUUCG | 20 | 409 |
| HSV1-UL19-81 | + | CCACCUCGAUCGUGCUAAGG | 20 | 509 |
| HSV1-UL19-9 | − | CCUCCUUAGCACGAUCGAGG | 20 | 466 |
| HSV1-UL19-54 | + | AGGCGGCGUUCAGGGCCCGG | 20 | 495 |
| HSV1-UL19-17 | − | UCUGGAGCUCGGGUUGUCGG | 20 | 403 |
| HSV1-UL19-33 | − | CAUCGCCCUGCUCACGGGGG | 20 | 419 |
| HSV1-UL19-67 | + | CGCGGGCAAUCAGCGGCUGG | 20 | 433 |
| HSV1-UL19-3218 | + | CGCGGUUGGGAGCGGCCAUG | 20 | 7817 |
| HSV1-UL19-60 | + | UGUGUGUGGGUUGCUCGAUG | 20 | 499 |
| HSV1-UL19-12 | − | UCGAGUUCGACGCCCUGCUG | 20 | 394 |
| HSV1-UL19-3219 | + | UCGCGGUUGGGAGCGGCCAU | 20 | 7818 |
| HSV1-UL19-59 | + | UUGUGUGUGGGUUGCUCGAU | 20 | 426 |
| HSV1-UL19-189 | − | CGCAACGUCCAGGCCGUCCU | 20 | 575 |
| HSV1-UL19-14 | − | CUCGUGCGCUUUCUGGAGCU | 20 | 396 |
| HSV1-UL19-68 | + | UACGCGCCCCUCGUUCAUGU | 20 | 504 |
| HSV1-UL19-16 | − | CUUUCUGGAGCUCGGGUUGU | 20 | 468 |
| HSV1-UL19-93 | + | UAUCCCGGAGGGUCGCGGUU | 20 | 457 |

[0737] Table 5C provides exemplary targeting domains for knocking out the ULS9 gene selected according to the third tier parameters. The targeting domains bind within the first 500 bp of the coding sequence (e.g., within 500 bp downstream from the start codon) and start with a 5′G. It is contemplated herein that in an embodiment the targeting domain hybridizes to the target domain through complementary base pairing. Any of the targeting domains in the table can be used with a S. pyogenes Cas9 molecule that generates a double stranded break (Cas9 nuclease) or a single-stranded break (Cas9 nickase).

TABLE 5C
3rd Tier

| | DNA | | Target | Seq ID |
|---|---|---|---|---|
| gRNA Name | Strand | Targeting Domain | Site Length | NO: |
| HSV1-UL19-3220 | + | GCGGUUGGGAGCGGCCA | 17 | 7819 |
| HSV1-UL19-138 | + | GGCCUCCCCCGUGAGCA | 17 | 542 |
| HSV1-UL19-123 | − | GGCCAUCGCCCUGCUCA | 17 | 531 |
| HSV1-UL19-146 | + | GCUGAAGGCGGCGUUCA | 17 | 550 |
| HSV1-UL19-152 | + | GUGUGUGGGUUGCUCGA | 17 | 427 |
| HSV1-UL19-131 | − | GGAGGCCCUGGACGGGA | 17 | 537 |
| HSV1-UL19-173 | + | GGGAAAAAAAAUCAAAC | 17 | 564 |
| HSV1-UL19-124 | − | GCCAUCGCCCUGCUCAC | 17 | 532 |
| HSV1-UL19-100 | − | GCGGCCAUGGUGCCGAC | 17 | 520 |
| HSV1-UL19-132 | − | GAGGCCCUGGACGGGAC | 17 | 538 |
| HSV1-UL19-128 | − | GCUCACGGGGGAGGCCC | 17 | 534 |
| HSV1-UL19-137 | + | GGGCCUCCCCCGUGAGC | 17 | 541 |
| HSV1-UL19-158 | + | GGGGUGCGGGCCGUCGC | 17 | 431 |
| HSV1-UL19-145 | + | GGCUGAAGGCGGCGUUC | 17 | 549 |
| HSV1-UL19-114 | − | GCUGGCCUACAUGAACG | 17 | 526 |
| HSV1-UL19-180 | + | GGUCGGCACCAUGGCCG | 17 | 570 |
| HSV1-UL19-3221 | + | GCGGCCAUGGGGUCGCG | 17 | 7820 |
| HSV1-UL19-185 | + | GGUAUCCCGGAGGGUCG | 17 | 458 |
| HSV1-UL19-144 | + | GGUGGCCAGGCUGAAGG | 17 | 548 |
| HSV1-UL19-183 | + | GCAUACCGGUAUCCCGG | 17 | 572 |
| HSV1-UL19-111 | − | GGAGCUCGGGUUGUCGG | 17 | 406 |
| HSV1-UL19-161 | + | GGGCAAUCAGCGGCUGG | 17 | 434 |
| HSV1-UL19-3222 | + | GGUUGGGAGCGGCCAUG | 17 | 7821 |
| HSV1-UL19-154 | + | GUGUGGGUUGCUCGAUG | 17 | 556 |
| HSV1-UL19-155 | + | GGUUGCUCGAUGGGGUG | 17 | 557 |
| HSV1-UL19-150 | + | GGUCAUGUAAUUGUGUG | 17 | 554 |
| HSV1-UL19-170 | + | GUACAGGCUGUUUGCAU | 17 | 450 |
| HSV1-UL19-164 | + | GGCCAGCUCCGGAAACU | 17 | 444 |
| HSV1-UL19-140 | + | GAGCAGGGCGAUGGCCU | 17 | 544 |
| HSV1-UL19-108 | − | GUGCGCUUUCUGGAGCU | 17 | 401 |
| HSV1-UL19-162 | + | GCGCCCCUCGUUCAUGU | 17 | 561 |
| HSV1-UL19-151 | + | GUCAUGUAAUUGUGUGU | 17 | 555 |
| HSV1-UL19-21 | − | GAGCUGGCCUACAUGAACGA | 20 | 470 |
| HSV1-UL19-37 | − | GGGGGAGGCCCUGGACGGGA | 20 | 480 |
| HSV1-UL19-49 | + | GGCCUCGGUGGCCAGGCUGA | 20 | 490 |
| HSV1-UL19-30 | − | GAGGCCAUCGCCCUGCUCAC | 20 | 475 |
| HSV1-UL19-6 | − | GCCGCGGCCAUGGUGCCGAC | 20 | 463 |
| HSV1-UL19-38 | − | GGGGAGGCCCUGGACGGGAC | 20 | 481 |
| HSV1-UL19-83 | + | GAUCGUGCUAAGGAGGGACC | 20 | 510 |
| HSV1-UL19-2 | − | GCUCCCAACCGCGACCCUCC | 20 | 462 |
| HSV1-UL19-19 | − | GUGUACCAAGUUUCCGGAGC | 20 | 405 |
| HSV1-UL19-64 | + | GAUGGGGUGCGGGCCGUCGC | 20 | 429 |
| HSV1-UL19-20 | − | GGAGCUGGCCUACAUGAACG | 20 | 469 |
| HSV1-UL19-3223 | + | GGAGCGGCCAUGGGGUCGCG | 20 | 7822 |
| HSV1-UL19-47 | + | GAGCAGGGCGAUGGCCUCGG | 20 | 488 |
| HSV1-UL19-84 | + | GUGCUAAGGAGGGACCCGGU | 20 | 511 |
| HSV1-UL19-92 | + | GUAUCCCGGAGGGUCGCGGU | 20 | 456 |

[0738] Table 51D provides exemplary targeting domains for knocking out the UL19 gene selected according to the fourth tier parameters. The targeting domains bind within the first 500 bp of the coding sequence (e.g., within 500 bp downstream from the start codon). It is contemplated herein that in an embodiment the targeting domain hybridizes to the target domain through complementary base pairing. Any of the targeting domains in the table can be used with a S. pyogenes Cas9 molecule that generates a double stranded break (Cas9 nuclease) or a single-stranded break (Cas9 nickase).

TABLE 5D
4th Tier

| | DNA | | Target | Seq ID |
|---|---|---|---|---|
| gRNA Name | Strand | Targeting Domain | Site Length | NO: |
| HSV1-UL19-139 | + | CCCCGUGAGCAGGGCGA | 17 | 543 |
| HSV1-UL19-129 | − | ACGGGGGAGGCCCUGGA | 17 | 535 |
| HSV1-UL19-143 | + | CUCGGUGGCCAGGCUGA | 17 | 547 |
| HSV1-UL19-130 | − | CGGGGGAGGCCCUGGAC | 17 | 536 |
| HSV1-UL19-101 | − | CGGCCAUGGUGCCGACC | 17 | 521 |
| HSV1-UL19-177 | + | CGUGCUAAGGAGGGACC | 17 | 567 |
| HSV1-UL19-120 | − | CAAGAUUAUCGACCGCC | 17 | 416 |
| HSV1-UL19-147 | + | AGGCGGCGUUCAGGGCC | 17 | 551 |
| HSV1-UL19-142 | + | CGAUGGCCUCGGUGGCC | 17 | 546 |
| HSV1-UL19-96 | − | CCCAACCGCGACCCUCC | 17 | 519 |
| HSV1-UL19-167 | + | UGCAAUACGACCCCAGC | 17 | 447 |
| HSV1-UL19-113 | − | UACCAAGUUUCCGGAGC | 17 | 408 |
| HSV1-UL19-95 | − | UCCCAACCGCGACCCUC | 17 | 518 |
| HSV1-UL19-583 | − | ACGUCCAGGCCGUCCUC | 17 | 969 |
| HSV1-UL19-163 | + | UUCAUGUAGGCCAGCUC | 17 | 443 |
| HSV1-UL19-109 | − | UGCGCUUUCUGGAGCUC | 17 | 402 |
| HSV1-UL19-112 | − | CGUGUGUACCAAGUUUC | 17 | 407 |
| HSV1-UL19-159 | + | CCGUCGCGGGCAAUCAG | 17 | 432 |
| HSV1-UL19-116 | − | UGGCCUACAUGAACGAG | 17 | 528 |
| HSV1-UL19-188 | + | AGGGUCGCGGUUGGGAG | 17 | 574 |
| HSV1-UL19-122 | − | CUUCAGCCUGGCCACCG | 17 | 530 |
| HSV1-UL19-584 | − | CGUCCAGGCCGUCCUCG | 17 | 970 |
| HSV1-UL19-157 | + | UGGGGUGCGGGCCGUCG | 17 | 559 |
| HSV1-UL19-148 | + | CGGCGUUCAGGGCCCGG | 17 | 552 |
| HSV1-UL19-141 | + | CAGGGCGAUGGCCUCGG | 17 | 545 |
| HSV1-UL19-127 | − | CGCCCUGCUCACGGGGG | 17 | 420 |
| HSV1-UL19-3224 | + | CGGUUGGGAGCGGCCAU | 17 | 7823 |
| HSV1-UL19-3225 | + | UGGGGUCGCGUGGAGAU | 17 | 7824 |
| HSV1-UL19-178 | + | CUAAGGAGGGACCCGGU | 17 | 568 |
| HSV1-UL19-186 | + | UCCCGGAGGGUCGCGGU | 17 | 459 |
| HSV1-UL19-110 | − | UCUGGAGCUCGGGUUGU | 17 | 525 |
| HSV1-UL19-44 | + | CAGGGCCUCCCCCGUGAGCA | 20 | 485 |
| HSV1-UL19-58 | + | AUUGUGUGUGGGUUGCUCGA | 20 | 425 |
| HSV1-UL19-35 | − | CUCACGGGGGAGGCCCUGGA | 20 | 478 |
| HSV1-UL19-79 | + | CGCGGGAAAAAAAAUCAAAC | 20 | 507 |
| HSV1-UL19-36 | − | UCACGGGGGAGGCCCUGGAC | 20 | 479 |
| HSV1-UL19-34 | − | CCUGCUCACGGGGGAGGCCC | 20 | 477 |
| HSV1-UL19-27 | − | CCUGAACGCCGCCUUCAGCC | 20 | 472 |
| HSV1-UL19-43 | + | CCAGGGCCUCCCCCGUGAGC | 20 | 484 |
| HSV1-UL19-22 | − | AGCUGGCCUACAUGAACGAG | 20 | 471 |
| HSV1-UL19-94 | + | CGGAGGGUCGCGGUUGGGAG | 20 | 517 |
| HSV1-UL19-28 | − | CGCCUUCAGCCUGGCCACCG | 20 | 473 |
| HSV1-UL19-50 | + | CUCGGUGGCCAGGCUGAAGG | 20 | 491 |
| HSV1-UL19-56 | + | CUUGGUCAUGUAAUUGUGUG | 20 | 497 |
| HSV1-UL19-3226 | + | CCAUGGGGUCGCGUGGAGAU | 20 | 7825 |
| HSV1-UL19-46 | + | CGUGAGCAGGGCGAUGGCCU | 20 | 487 |
| HSV1-UL19-57 | + | UUGGUCAUGUAAUUGUGUGU | 20 | 498 |

[0739] Table 5E provides exemplary targeting domains for knocking out the UL19 gene selected according to the fifth tier parameters. The targeting domains fall in the coding sequence of the gene, downstream of the first 500 bp of coding sequence (e.g., anywhere from +500 (relative to the start codon) to the stop codon of the gene). It is contemplated herein that in an embodiment the targeting domain hybridizes to the target domain through complementary base pairing. Any of the targeting domains in the table can be used with a S. pyogenes Cas9 molecule that generates a double stranded break (Cas9 nuclease) or a single-stranded break (Cas9 nickase).

TABLE 5E
5th Tier

| | DNA | | Target Site | Seq ID |
|---|---|---|---|---|
| gRNA Name | Strand | Targeting Domain | Length | NO: |
| HSV1-UL19-838 | − | GACCAUACCAUCCAAAA | 17 | 1224 |
| HSV1-UL19-588 | − | GCACGUGCUGCUGGAAA | 17 | 974 |
| HSV1-UL19-827 | − | CAUGGCCGAACGCACAA | 17 | 1213 |
| HSV1-UL19-818 | − | AACGCCAUGUUUCACAA | 17 | 1204 |
| HSV1-UL19-591 | − | CAACGAUACCUGGACAA | 17 | 977 |
| HSV1-UL19-967 | − | CUCCGCAGUGCCCGCAA | 17 | 1353 |
| HSV1-UL19-947 | − | GGGGCCUACCACCUCAA | 17 | 1333 |
| HSV1-UL19-973 | − | GACGCAUCCCCGCUCAA | 17 | 1359 |
| HSV1-UL19-1554 | + | CAACGUUCAUCAGCGAA | 17 | 1940 |
| HSV1-UL19-1617 | + | GUCGAACGCCCCGCGAA | 17 | 2003 |
| HSV1-UL19-655 | − | UCAAUCCGGUCAUGGAA | 17 | 1041 |
| HSV1-UL19-624 | − | GGCGAGAUGGUCCUGAA | 17 | 1010 |
| HSV1-UL19-720 | − | ACCUGGCGCGUGGUGAA | 17 | 1106 |
| HSV1-UL19-944 | − | GGGGACCUGCUCUAUAA | 17 | 1330 |
| HSV1-UL19-1712 | + | GCGCCCGUUGUGAAACA | 17 | 2098 |
| HSV1-UL19-826 | − | GGUGCUGGCCCACAACA | 17 | 1212 |
| HSV1-UL19-817 | − | CAAUCUGGUGGCCAACA | 17 | 1203 |
| HSV1-UL19-808 | − | CGCCACCCUGCAGAACA | 17 | 1194 |
| HSV1-UL19-1823 | + | CUGGGCGCACCCGAACA | 17 | 2209 |
| HSV1-UL19-1829 | + | GGCGAUAAACUCACACA | 17 | 2215 |
| HSV1-UL19-1886 | + | UCCUGAAACAGGCCACA | 17 | 2272 |
| HSV1-UL19-1552 | + | CAGCGAAGGGUGGCACA | 17 | 1938 |
| HSV1-UL19-890 | − | CAACCCCGUCACCGACA | 17 | 1276 |
| HSV1-UL19-1834 | + | GUUGACGUCGGUCGACA | 17 | 2220 |
| HSV1-UL19-929 | − | CGUUUACGCGGGGGACA | 17 | 1315 |
| HSV1-UL19-743 | − | CUGCAGGCCGCCAUACA | 17 | 1129 |
| HSV1-UL19-1665 | + | ACAUGCCGCCGCGUACA | 17 | 2051 |
| HSV1-UL19-1812 | + | CGCGUUCCGCAGGUACA | 17 | 2198 |
| HSV1-UL19-1635 | + | CACCAGGUCCCGGUACA | 17 | 2021 |
| HSV1-UL19-1516 | + | GUCCAUGGCGCCCACCA | 17 | 1902 |
| HSV1-UL19-594 | − | CGGCCGCCUGGCCACCA | 17 | 980 |
| HSV1-UL19-610 | − | GCUCGUGGACCUCACCA | 17 | 996 |
| HSV1-UL19-934 | − | GCCCUCAUGUACGACCA | 17 | 1320 |
| HSV1-UL19-1459 | + | CUUUAGCUCGGCGACCA | 17 | 1845 |
| HSV1-UL19-1759 | + | CAGAGCCGGGGGGACCA | 17 | 2145 |
| HSV1-UL19-915 | − | CGCGCAGGGAUGGACCA | 17 | 1301 |
| HSV1-UL19-1859 | + | AAUCGCUGCGACGCCCA | 17 | 2245 |
| HSV1-UL19-1522 | + | CGGAUUGAACAGGCCCA | 17 | 1908 |
| HSV1-UL19-688 | − | GGGCAGCGCCUGGCCCA | 17 | 1074 |
| HSV1-UL19-1449 | + | CGGCAACAACAAAGCCA | 17 | 1835 |
| HSV1-UL19-736 | − | GGUGGGACGCCACGCCA | 17 | 1122 |
| HSV1-UL19-1601 | + | CGCCGGACAUAGCGCCA | 17 | 1987 |
| HSV1-UL19-650 | − | CCCCCUGGUGGGCGCCA | 17 | 1036 |
| HSV1-UL19-1774 | + | CUGAUGAUGCAAGGCCA | 17 | 2160 |
| HSV1-UL19-1473 | + | CAGACGGGGCACGGCCA | 17 | 1859 |
| HSV1-UL19-938 | − | CCGGGCCUUCGCGGCCA | 17 | 1324 |
| HSV1-UL19-1624 | + | GACCACGAGCCGGGCCA | 17 | 2010 |
| HSV1-UL19-1609 | + | GAUGGUGGCGGGGGCCA | 17 | 1995 |
| HSV1-UL19-1638 | + | AUCAACCAGCUGGGCCA | 17 | 2024 |
| HSV1-UL19-889 | − | CACCGCCGUCGUGGCCA | 17 | 1275 |
| HSV1-UL19-1507 | + | GUAGAUGCGCUUCUCCA | 17 | 1893 |
| HSV1-UL19-1518 | + | GACGAACGUCAGGUCCA | 17 | 1904 |
| HSV1-UL19-1657 | + | GUCGCGAUGGCGGUCCA | 17 | 2043 |
| HSV1-UL19-958 | − | GGGUUCGGCGGUGUCCA | 17 | 1344 |
| HSV1-UL19-1867 | + | GUAAAGAACUUAAAGCA | 17 | 2253 |
| HSV1-UL19-1715 | + | CACCUGCAGCGUGAGCA | 17 | 2101 |
| HSV1-UL19-913 | − | AGGUGCCGCGGCGCGCA | 17 | 1299 |
| HSV1-UL19-1754 | + | CCGCGACAGGUCGCGCA | 17 | 2140 |
| HSV1-UL19-1495 | + | GUCGUCCAGACUUCGCA | 17 | 1881 |
| HSV1-UL19-586 | − | GGCGUUUGAGCGCGGCA | 17 | 972 |
| HSV1-UL19-1474 | + | AUGCGUCAGACGGGGCA | 17 | 1860 |
| HSV1-UL19-631 | − | GGCGCUCGUGAUGGGCA | 17 | 1017 |
| HSV1-UL19-601 | − | GAGCUUUUUCCUGGGCA | 17 | 987 |
| HSV1-UL19-1775 | + | CUUGAGCUGAUGAUGCA | 17 | 2161 |
| HSV1-UL19-1687 | + | GACCACCAUGUUCUGCA | 17 | 2073 |
| HSV1-UL19-756 | − | CCUUCCCGAGGAGUGCA | 17 | 1142 |
| HSV1-UL19-1706 | + | CAGAUUGGCCGGGUGCA | 17 | 2092 |
| HSV1-UL19-1678 | + | GUAAAUCUUGUGGUGCA | 17 | 2064 |
| HSV1-UL19-1838 | + | CGUCCCCGGGGGUUGCA | 17 | 2224 |
| HSV1-UL19-1655 | + | GGCCGCGCGCCGCAUCA | 17 | 2041 |
| HSV1-UL19-972 | − | UGACGCAUCCCCGCUCA | 17 | 1358 |
| HSV1-UL19-856 | − | GCUGACCUACGCGCUCA | 17 | 1242 |
| HSV1-UL19-1700 | + | GUGCGCGGGGUCCGUCA | 17 | 2086 |
| HSV1-UL19-1642 | + | CAGCUCCGGGCCGGUCA | 17 | 2028 |
| HSV1-UL19-654 | − | CCUGUUCAAUCCGGUCA | 17 | 1040 |
| HSV1-UL19-628 | − | CGGGGCCAACCUGGUCA | 17 | 1014 |
| HSV1-UL19-861 | − | GCAUCAUCAGCUCAAGA | 17 | 1247 |
| HSV1-UL19-1477 | + | UGUCGGCAUGCGUCAGA | 17 | 1863 |
| HSV1-UL19-1682 | + | GCAGCGGCCCCGCGAGA | 17 | 2068 |
| HSV1-UL19-623 | − | GGUGACGUACGGCGAGA | 17 | 1009 |
| HSV1-UL19-1809 | + | CCGCGUUGUCCAGGAGA | 17 | 2195 |
| HSV1-UL19-954 | − | GCGCCUGAUCGUGGAGA | 17 | 1340 |
| HSV1-UL19-788 | − | GACUUCAACCGCAACGA | 17 | 1174 |
| HSV1-UL19-1653 | + | GUCACAGUCCCACACGA | 17 | 2039 |
| HSV1-UL19-1793 | + | GGUUGCCGUGGCCACGA | 17 | 2179 |
| HSV1-UL19-1769 | + | GCGGACGUGCUGCACGA | 17 | 2155 |
| HSV1-UL19-1780 | + | GCGGUCCUGUCGGACGA | 17 | 2166 |
| HSV1-UL19-1506 | + | GACCAGCUUCUCGCCGA | 17 | 1892 |
| HSV1-UL19-692 | − | CCCACGGGCGGGUCCGA | 17 | 1078 |
| HSV1-UL19-1555 | + | UCAACGUUCAUCAGCGA | 17 | 1941 |
| HSV1-UL19-1855 | + | GUUGGCCGUGGCCGCGA | 17 | 2241 |
| HSV1-UL19-1660 | + | UAACCCGGCAGUCGCGA | 17 | 2046 |
| HSV1-UL19-1615 | + | CCCGCGAACGGCGGCGA | 17 | 2001 |
| HSV1-UL19-1466 | + | CACGAGCCAGGCCUCGA | 17 | 1852 |
| HSV1-UL19-616 | − | CGCGGGCGGCCGGUCGA | 17 | 1002 |
| HSV1-UL19-832 | − | AACAUGCGCAUAUUCGA | 17 | 1218 |
| HSV1-UL19-1560 | + | CGGAUUGGCGGCUUCGA | 17 | 1946 |
| HSV1-UL19-931 | − | UACGCGGGGGACAAGGA | 17 | 1317 |
| HSV1-UL19-1487 | + | GUCCUCCACUUUCAGGA | 17 | 1873 |
| HSV1-UL19-1443 | + | CUCAAACGCCCCGAGGA | 17 | 1829 |
| HSV1-UL19-1896 | + | GCGGGCACUGCGGAGGA | 17 | 2282 |
| HSV1-UL19-1471 | + | CGGGGCACGGCCACGGA | 17 | 1857 |
| HSV1-UL19-695 | − | GUCCGAUGGGUCGCGGA | 17 | 1081 |
| HSV1-UL19-1795 | + | GGUGACGGGGUUGCGGA | 17 | 2181 |
| HSV1-UL19-914 | − | GCCGCGGCGCGCAGGGA | 17 | 1300 |
| HSV1-UL19-1777 | + | UGAACCCAAACCCGGGA | 17 | 2163 |
| HSV1-UL19-1852 | + | GCCGCGAAGGCCCGGGA | 17 | 2238 |
| HSV1-UL19-1542 | + | CAGCUGGCGGGGCGGGA | 17 | 1928 |
| HSV1-UL19-1632 | + | CCAUGCACUCCUCGGGA | 17 | 2018 |
| HSV1-UL19-1820 | + | GCACCCGAACACGGGGA | 17 | 2206 |
| HSV1-UL19-1738 | + | CAGCGCGUGGACGGGGA | 17 | 2124 |
| HSV1-UL19-665 | − | GCUGUUUUUUUGGGGGA | 17 | 1051 |
| HSV1-UL19-1801 | + | GGUAAAAGUUUUGGGGA | 17 | 2187 |
| HSV1-UL19-822 | − | GGGCGCGUGGUAGUGGA | 17 | 1208 |
| HSV1-UL19-1742 | + | GGCGAACAGCGCGUGGA | 17 | 2128 |
| HSV1-UL19-3209 | + | GCGAGCGAGCUGUUGGA | 17 | 7808 |
| HSV1-UL19-1734 | + | AUAGUCGCCAUUUUGGA | 17 | 2120 |
| HSV1-UL19-1847 | + | GCCGUGGUCGUACAUGA | 17 | 2233 |
| HSV1-UL19-836 | − | CGCCGGAAUCCUGCUGA | 17 | 1222 |
| HSV1-UL19-800 | − | GAUUUACUACUACGUGA | 17 | 1186 |
| HSV1-UL19-813 | − | CCCCAGCGACCCCGUGA | 17 | 1199 |
| HSV1-UL19-629 | − | GGUCACGGCGCUCGUGA | 17 | 1015 |
| HSV1-UL19-1799 | + | GUUGCCCAUGUCGGUGA | 17 | 2185 |
| HSV1-UL19-622 | − | GACGUGCCGGUGACGUA | 17 | 1008 |
| HSV1-UL19-1563 | + | GCCACGUACGCCCCGUA | 17 | 1949 |
| HSV1-UL19-676 | − | GAAGCCGCCAAUCCGUA | 17 | 1062 |
| HSV1-UL19-941 | − | UCGCAGCGAUUUUCGUA | 17 | 1327 |
| HSV1-UL19-1512 | + | GCGCCCACCAGGGGGUA | 17 | 1898 |
| HSV1-UL19-1733 | + | CGCCAUUUUGGAUGGUA | 17 | 2119 |
| HSV1-UL19-1623 | + | GUGCUCGCUGCCGUGUA | 17 | 2009 |
| HSV1-UL19-1556 | + | CGACGGGGUCGCGGUUA | 17 | 1942 |
| HSV1-UL19-876 | − | GUGGCCCGGCACGAAAC | 17 | 1262 |
| HSV1-UL19-1887 | + | GGUAGGCCUCCUGAAAC | 17 | 2273 |
| HSV1-UL19-819 | − | ACGCCAUGUUUCACAAC | 17 | 1205 |
| HSV1-UL19-968 | − | UCCGCAGUGCCCGCAAC | 17 | 1354 |
| HSV1-UL19-134 | + | GUUGGAUGGCGCGCAAC | 17 | 422 |
| HSV1-UL19-948 | − | GGGCCUACCACCUCAAC | 17 | 1334 |
| HSV1-UL19-638 | − | AGCAGCUCGACCUGAAC | 17 | 1024 |
| HSV1-UL19-625 | − | GCGAGAUGGUCCUGAAC | 17 | 1011 |
| HSV1-UL19-1524 | + | CCAUGACCGGAUUGAAC | 17 | 1910 |
| HSV1-UL19-945 | − | GGGACCUGCUCUAUAAC | 17 | 1331 |
| HSV1-UL19-1822 | + | UGGGCGCACCCGAACAC | 17 | 2208 |
| HSV1-UL19-1885 | + | CCUGAAACAGGCCACAC | 17 | 2271 |
| HSV1-UL19-1833 | + | UUGACGUCGGUCGACAC | 17 | 2219 |
| HSV1-UL19-1664 | + | CAUGCCGCCGCGUACAC | 17 | 2050 |
| HSV1-UL19-1858 | + | AUCGCUGCGACGCCCAC | 17 | 2244 |
| HSV1-UL19-689 | − | GGCAGCGCCUGGCCCAC | 17 | 1075 |
| HSV1-UL19-1773 | + | UGAUGAUGCAAGGCCAC | 17 | 2159 |
| HSV1-UL19-1865 | + | AAGCAGGGGCUGAGCAC | 17 | 2251 |
| HSV1-UL19-793 | − | CGGAUGACCGGCCGCAC | 17 | 1179 |
| HSV1-UL19-1628 | + | AGUAGCUGGUGAUGCAC | 17 | 2014 |
| HSV1-UL19-1491 | + | AUCUCGCCGUACGUCAC | 17 | 1877 |
| HSV1-UL19-1699 | + | UGCGCGGGGUCCGUCAC | 17 | 2085 |
| HSV1-UL19-862 | − | CAUCAUCAGCUCAAGAC | 17 | 1248 |
| HSV1-UL19-1476 | + | GUCGGCAUGCGUCAGAC | 17 | 1862 |
| HSV1-UL19-1551 | + | UCGCGUGUUCCAGAGAC | 17 | 1937 |
| HSV1-UL19-955 | − | CGCCUGAUCGUGGAGAC | 17 | 1341 |
| HSV1-UL19-1768 | + | CGGACGUGCUGCACGAC | 17 | 2154 |
| HSV1-UL19-867 | − | GUUCACCGUCGUCCGAC | 17 | 1253 |
| HSV1-UL19-1756 | + | GGGGGACCUGCCGCGAC | 17 | 2142 |
| HSV1-UL19-1479 | + | ACGAGCACCCCGUCGAC | 17 | 1865 |
| HSV1-UL19-617 | − | GCGGGCGGCCGGUCGAC | 17 | 1003 |
| HSV1-UL19-833 | − | ACAUGCGCAUAUUCGAC | 17 | 1219 |
| HSV1-UL19-1559 | + | GGAUUGGCGGCUUCGAC | 17 | 1945 |
| HSV1-UL19-799 | − | CGCACCGGGGGGCGGAC | 17 | 1185 |
| HSV1-UL19-974 | − | AUCCCCGCUCAAGGGAC | 17 | 1360 |
| HSV1-UL19-1851 | + | CCGCGAAGGCCCGGGAC | 17 | 2237 |
| HSV1-UL19-1819 | + | CACCCGAACACGGGGAC | 17 | 2205 |
| HSV1-UL19-823 | − | GGCGCGUGGUAGUGGAC | 17 | 1209 |
| HSV1-UL19-1741 | + | GCGAACAGCGCGUGGAC | 17 | 2127 |
| HSV1-UL19-1525 | + | GCAAACCGUUCCAUGAC | 17 | 1911 |
| HSV1-UL19-792 | − | CGGACGCCGCGGAUGAC | 17 | 1178 |
| HSV1-UL19-764 | − | GAUGACUUUACCCUGAC | 17 | 1150 |
| HSV1-UL19-1798 | + | UUGCCCAUGUCGGUGAC | 17 | 2184 |
| HSV1-UL19-747 | − | AGUGCAUCACCAGCUAC | 17 | 1133 |
| HSV1-UL19-677 | − | AAGCCGCCAAUCCGUAC | 17 | 1063 |
| HSV1-UL19-942 | − | CGCAGCGAUUUUCGUAC | 17 | 1328 |
| HSV1-UL19-757 | − | AGUGCAUGGCCGUGUAC | 17 | 1143 |
| HSV1-UL19-1779 | + | GACGGUGAACCCAAACC | 17 | 2165 |
| HSV1-UL19-697 | − | GCCCGACAACGCCAACC | 17 | 1083 |
| HSV1-UL19-627 | − | CCUGAACGGGGCCAACC | 17 | 1013 |
| HSV1-UL19-1661 | + | GGCCCCCCGCGCUAACC | 17 | 2047 |
| HSV1-UL19-1517 | + | GGUCCAUGGCGCCCACC | 17 | 1903 |
| HSV1-UL19-1637 | + | CCUCGACGUGCGCCACC | 17 | 2023 |
| HSV1-UL19-718 | − | GGGAGAUCCAGGCCACC | 17 | 1104 |
| HSV1-UL19-660 | − | CCCCGCCCCCGGCCACC | 17 | 1046 |
| HSV1-UL19-1785 | + | UUUCGUGCCGGGCCACC | 17 | 2171 |
| HSV1-UL19-593 | − | ACGGCCGCCUGGCCACC | 17 | 979 |
| HSV1-UL19-1550 | + | GAGACAGGCGCAGCACC | 17 | 1936 |
| HSV1-UL19-794 | − | GGAUGACCGGCCGCACC | 17 | 1180 |
| HSV1-UL19-1825 | + | CUGCGCGCCGCGGCACC | 17 | 2211 |
| HSV1-UL19-814 | − | CGCGCACCCCCUGCACC | 17 | 1200 |
| HSV1-UL19-771 | − | UCACCUAAUGCGAGACC | 17 | 1157 |
| HSV1-UL19-1460 | + | GCUUUAGCUCGGCGACC | 17 | 1846 |
| HSV1-UL19-759 | − | GGCCGUGUACCGGGACC | 17 | 1145 |
| HSV1-UL19-1760 | + | CCAGAGCCGGGGGGACC | 17 | 2146 |
| HSV1-UL19-884 | − | GCGCGCGAACGUGGACC | 17 | 1270 |
| HSV1-UL19-1494 | + | UCACGAGCGCCGUGACC | 17 | 1880 |
| HSV1-UL19-590 | − | GCCGAUGCAACGAUACC | 17 | 976 |
| HSV1-UL19-740 | − | CGACGACCGCAACUACC | 17 | 1126 |
| HSV1-UL19-758 | − | GUGCAUGGCCGUGUACC | 17 | 1144 |
| HSV1-UL19-892 | − | UCCCCAAAACUUUUACC | 17 | 1278 |
| HSV1-UL19-1778 | + | ACGGUGAACCCAAACCC | 17 | 2164 |
| HSV1-UL19-789 | − | GCUGCUGCACAACACCC | 17 | 1175 |
| HSV1-UL19-1456 | + | GGUCGCCCGGGCCACCC | 17 | 1842 |
| HSV1-UL19-1883 | + | ACGAGUUCGCGGCACCC | 17 | 2269 |
| HSV1-UL19-598 | − | GGUGGCCCGGGCGACCC | 17 | 984 |
| HSV1-UL19-696 | − | GGAAGGCCAGAUGACCC | 17 | 1082 |
| HSV1-UL19-918 | − | GCCGGCCCUGCAACCCC | 17 | 1304 |
| HSV1-UL19-1882 | + | CGAGUUCGCGGCACCCC | 17 | 2268 |
| HSV1-UL19-919 | − | CCGGCCCUGCAACCCCC | 17 | 1305 |
| HSV1-UL19-647 | − | CAACGUUCCCUACCCCC | 17 | 1033 |
| HSV1-UL19-1589 | + | GGGGGAACGUCCCCCCC | 17 | 1975 |
| HSV1-UL19-960 | − | CAGUUUAAGCGCCCCCC | 17 | 1346 |
| HSV1-UL19-1677 | + | CGGUCCAGUCCGCCCCC | 17 | 2063 |
| HSV1-UL19-959 | − | ACAGUUUAAGCGCCCCC | 17 | 1345 |
| HSV1-UL19-1572 | + | GGCCAGGCGCUGCCCCC | 17 | 1958 |
| HSV1-UL19-1595 | + | UGGCCUGGAUCUCCCCC | 17 | 1981 |
| HSV1-UL19-846 | − | GUCGCGGCAGGUCCCCC | 17 | 1232 |
| HSV1-UL19-847 | − | GGUCCCCCUGGUCCCCC | 17 | 1233 |
| HSV1-UL19-843 | − | CGCGCCCAAUUUCCCCC | 17 | 1229 |
| HSV1-UL19-1845 | + | CCCCGCGUAAACGCCCC | 17 | 2231 |
| HSV1-UL19-659 | − | GACCUAGUCCCCGCCCC | 17 | 1045 |
| HSV1-UL19-589 | − | GGAAAAGGCGCCGCCCC | 17 | 975 |
| HSV1-UL19-811 | − | GUCCCGGAGAUCGCCCC | 17 | 1197 |
| HSV1-UL19-1605 | + | CCCCAGCUCCAGGCCCC | 17 | 1991 |
| HSV1-UL19-1815 | + | CGGGCUGGGCCGGCCCC | 17 | 2201 |
| HSV1-UL19-651 | − | GACGUUCGUCCUGCCCC | 17 | 1037 |
| HSV1-UL19-721 | − | GAACGGCAACUUGCCCC | 17 | 1107 |
| HSV1-UL19-1596 | + | GUGGCCUGGAUCUCCCC | 17 | 1982 |
| HSV1-UL19-1842 | + | CCCGGCGGCGCGUCCCC | 17 | 2228 |
| HSV1-UL19-711 | − | GGGGGGGGACGUUCCCC | 17 | 1097 |
| HSV1-UL19-1791 | + | CGGUGUAGCCCACGCCC | 17 | 2177 |
| HSV1-UL19-727 | − | GGCGUUCCGGGACGCCC | 17 | 1113 |
| HSV1-UL19-744 | − | GCACGUCUUCUGCGCCC | 17 | 1130 |
| HSV1-UL19-910 | − | CGUGUUCGGGUGCGCCC | 17 | 1296 |
| HSV1-UL19-1457 | + | GGCGACCAGGGUCGCCC | 17 | 1843 |
| HSV1-UL19-1853 | + | CGUGGCCGCGAAGGCCC | 17 | 2239 |
| HSV1-UL19-1523 | + | CCGGAUUGAACAGGCCC | 17 | 1909 |
| HSV1-UL19-1606 | + | CCCCCAGCUCCAGGCCC | 17 | 1992 |
| HSV1-UL19-762 | − | GGCGCACGUCGAGGCCC | 17 | 1148 |
| HSV1-UL19-646 | − | GGUCUUUCUGGAGGCCC | 17 | 1032 |
| HSV1-UL19-714 | − | GUUCCCCCGGCCGGCCC | 17 | 1100 |
| HSV1-UL19-1805 | + | GGGGAGCCCCGCGGCCC | 17 | 2191 |
| HSV1-UL19-776 | − | GAUGCGGCGCGCGGCCC | 17 | 1162 |
| HSV1-UL19-681 | − | GGCGUACGUGGCGGCCC | 17 | 1067 |
| HSV1-UL19-1744 | + | CGCCACGUGGUCGGCCC | 17 | 2130 |
| HSV1-UL19-1783 | + | CCACCUGGAGCUGGCCC | 17 | 2169 |
| HSV1-UL19-597 | − | GGCCACCAGGGUGGCCC | 17 | 983 |
| HSV1-UL19-1462 | + | GGUGGCCCGCCUUGCCC | 17 | 1848 |
| HSV1-UL19-864 | − | AGACGGGCCUCCAUCCC | 17 | 1250 |
| HSV1-UL19-1771 | + | GGUCAGCGCGUUCUCCC | 17 | 2157 |
| HSV1-UL19-936 | − | CCAGAGCGACCCGUCCC | 17 | 1322 |
| HSV1-UL19-1843 | + | CCCCGGCGGCGCGUCCC | 17 | 2229 |
| HSV1-UL19-1527 | + | GGCGGGGACUAGGUCCC | 17 | 1913 |
| HSV1-UL19-1450 | + | UCGGCAACAACAAAGCC | 17 | 1836 |
| HSV1-UL19-1584 | + | GGUGCAGCUCAAGAGCC | 17 | 1970 |
| HSV1-UL19-1764 | + | AGUUGGCCCCCAGAGCC | 17 | 2150 |
| HSV1-UL19-1626 | + | GCACUGGACCACGAGCC | 17 | 2012 |
| HSV1-UL19-1467 | + | GGUGAGGUCCACGAGCC | 17 | 1853 |
| HSV1-UL19-683 | − | AGCUGUUUUUGAACGCC | 17 | 1069 |
| HSV1-UL19-657 | − | GGUUUGCCGCGCACGCC | 17 | 1043 |
| HSV1-UL19-726 | − | CGGCGUUCCGGGACGCC | 17 | 1112 |
| HSV1-UL19-904 | − | CGUGGCGGGAAACCGCC | 17 | 1290 |
| HSV1-UL19-1619 | + | GCAGGUAAAACACCGCC | 17 | 2005 |
| HSV1-UL19-605 | − | CAAGGCGGGCCACCGCC | 17 | 991 |
| HSV1-UL19-666 | − | UUGGGGGAAGGACCGCC | 17 | 1052 |
| HSV1-UL19-922 | − | CCCGGGGACGCGCCGCC | 17 | 1308 |
| HSV1-UL19-592 | − | CCUGGACAACGGCCGCC | 17 | 978 |
| HSV1-UL19-1649 | + | GGGGUGGCAGCAGCGCC | 17 | 2035 |
| HSV1-UL19-687 | − | CGCCUGGGGGCAGCGCC | 17 | 1073 |
| HSV1-UL19-1602 | + | CCGCCGGACAUAGCGCC | 17 | 1988 |
| HSV1-UL19-1599 | + | GCCGUUCACCACGCGCC | 17 | 1985 |
| HSV1-UL19-1693 | + | CUGGGGCACUCCUCGCC | 17 | 2079 |
| HSV1-UL19-1458 | + | CGGCGACCAGGGUCGCC | 17 | 1844 |
| HSV1-UL19-840 | − | UCCACGCGCUGUUCGCC | 17 | 1226 |
| HSV1-UL19-1854 | + | CCGUGGCCGCGAAGGCC | 17 | 2240 |
| HSV1-UL19-608 | − | GGGAGGCCGUCGAGGCC | 17 | 994 |
| HSV1-UL19-916 | − | AGGGAUGGACCACGGCC | 17 | 1302 |
| HSV1-UL19-1442 | + | ACGCCCCGAGGACGGCC | 17 | 1828 |
| HSV1-UL19-765 | − | CUUUACCCUGACCGGCC | 17 | 1151 |
| HSV1-UL19-713 | − | CGUUCCCCCGGCCGGCC | 17 | 1099 |
| HSV1-UL19-1592 | + | UCUCCCCCGGGCCGGCC | 17 | 1978 |
| HSV1-UL19-1565 | + | CUGCGGCGGGGCCGGCC | 17 | 1951 |
| HSV1-UL19-854 | − | UCCGCGAGAGCGCGGCC | 17 | 1240 |
| HSV1-UL19-1752 | + | ACAGGUCGCGCAGGGCC | 17 | 2138 |
| HSV1-UL19-1625 | + | GGACCACGAGCCGGGCC | 17 | 2011 |
| HSV1-UL19-1670 | + | CGUCCGCGGCUCGGGCC | 17 | 2056 |
| HSV1-UL19-729 | − | CCGGGACGCCCGGGGCC | 17 | 1115 |
| HSV1-UL19-1639 | + | CAUCAACCAGCUGGGCC | 17 | 2025 |
| HSV1-UL19-1573 | + | GGACCCGCCCGUGGGCC | 17 | 1959 |
| HSV1-UL19-745 | − | UCUUCUGCGCCCUGGCC | 17 | 1131 |
| HSV1-UL19-1597 | + | CCACGCGCCAGGUGGCC | 17 | 1983 |
| HSV1-UL19-875 | − | GCCAGCUCCAGGUGGCC | 17 | 1261 |
| HSV1-UL19-596 | − | UGGCCACCAGGGUGGCC | 17 | 982 |
| HSV1-UL19-1534 | + | CGGGGAUCCGGGUGGCC | 17 | 1920 |
| HSV1-UL19-1454 | + | GGGCCACCCUGGUGGCC | 17 | 1840 |
| HSV1-UL19-1708 | + | UGGCCACCAGAUUGGCC | 17 | 2094 |
| HSV1-UL19-778 | − | CCGCCAUCGCGACUGCC | 17 | 1164 |
| HSV1-UL19-705 | − | GCCGACGUGGAGCUGCC | 17 | 1091 |
| HSV1-UL19-952 | − | CGCCAAACAUCGCUGCC | 17 | 1338 |
| HSV1-UL19-1786 | + | CCCGCCAGUUUCGUGCC | 17 | 2172 |
| HSV1-UL19-863 | − | AAGACGGGCCUCCAUCC | 17 | 1249 |
| HSV1-UL19-717 | − | CGGCCCGGGGGAGAUCC | 17 | 1103 |
| HSV1-UL19-1537 | + | GGAAGGCGCGGGGAUCC | 17 | 1923 |
| HSV1-UL19-1465 | + | AGGCCUCGACGGCCUCC | 17 | 1851 |
| HSV1-UL19-1607 | + | GUCCCACCCCCAGCUCC | 17 | 1993 |
| HSV1-UL19-1645 | + | CCUGCCCGCCCAGCUCC | 17 | 2031 |
| HSV1-UL19-873 | − | CUUCCUGGGCCAGCUCC | 17 | 1259 |
| HSV1-UL19-1872 | + | CCACGAUCAGGCGCUCC | 17 | 2258 |
| HSV1-UL19-1579 | + | GCUGCAUAAACUGCUCC | 17 | 1965 |
| HSV1-UL19-1689 | + | CGCCGGGGGCGAUCUCC | 17 | 2075 |
| HSV1-UL19-897 | − | CGGGGCUCCCCCUCUCC | 17 | 1283 |
| HSV1-UL19-1508 | + | CGUAGAUGCGCUUCUCC | 17 | 1894 |
| HSV1-UL19-3210 | − | GCUCGCUCGCAACGUCC | 17 | 7809 |
| HSV1-UL19-935 | − | GCCAGAGCGACCCGUCC | 17 | 1321 |
| HSV1-UL19-1828 | + | ACUCACACACGGCGUCC | 17 | 2214 |
| HSV1-UL19-1604 | + | CCAGGCCCCGGGCGUCC | 17 | 1990 |
| HSV1-UL19-1636 | + | CGUGCGCCACCAGGUCC | 17 | 2022 |
| HSV1-UL19-1658 | + | AGUCGCGAUGGCGGUCC | 17 | 2044 |
| HSV1-UL19-810 | − | GCAGAACAUGGUGGUCC | 17 | 1196 |
| HSV1-UL19-1452 | + | CCAGGCGGCCGUUGUCC | 17 | 1838 |
| HSV1-UL19-1811 | + | CGGCUGCCGCGUUGUCC | 17 | 2197 |
| HSV1-UL19-871 | − | GUCGGAGGCGUACUUCC | 17 | 1257 |
| HSV1-UL19-725 | − | AUGUCCGGCGGCGUUCC | 17 | 1111 |
| HSV1-UL19-599 | − | CGAGACGAGCUUUUUCC | 17 | 985 |
| HSV1-UL19-1868 | + | CGUAAAGAACUUAAAGC | 17 | 2254 |
| HSV1-UL19-643 | − | GUCCAUCGGCGAGAAGC | 17 | 1029 |
| HSV1-UL19-1548 | + | UCCCCCAAAAAAACAGC | 17 | 1934 |
| HSV1-UL19-1641 | + | UAAAGUCAUCAACCAGC | 17 | 2027 |
| HSV1-UL19-763 | − | CGAGGCCCUGGCCCAGC | 17 | 1149 |
| HSV1-UL19-1498 | + | CCUCCUGCAUCUCCAGC | 17 | 1884 |
| HSV1-UL19-1668 | + | GGGUGUUGUGCAGCAGC | 17 | 2054 |
| HSV1-UL19-1621 | + | GUAUGGCGGCCUGCAGC | 17 | 2007 |
| HSV1-UL19-1727 | + | GCUGGGGGGCCAUCAGC | 17 | 2113 |
| HSV1-UL19-1765 | + | UAGUUGGCCCCCAGAGC | 17 | 2151 |
| HSV1-UL19-1860 | + | AGGCCCCGUUAUAGAGC | 17 | 2246 |
| HSV1-UL19-1627 | + | UGCACUGGACCACGAGC | 17 | 2013 |
| HSV1-UL19-766 | − | CCUGACCGGCCCGGAGC | 17 | 1152 |
| HSV1-UL19-1784 | + | GCCGGGCCACCUGGAGC | 17 | 2170 |
| HSV1-UL19-730 | − | CGCCCGGGGCCUGGAGC | 17 | 1116 |
| HSV1-UL19-1889 | + | CGCUGGCGCAGGUGAGC | 17 | 2275 |
| HSV1-UL19-1907 | + | GAGCCAGUCCCUUGAGC | 17 | 2293 |
| HSV1-UL19-1629 | + | CGUGUUGUUCCAGUAGC | 17 | 2015 |
| HSV1-UL19-1586 | + | ACAAAGAAGUCGAACGC | 17 | 1972 |
| HSV1-UL19-656 | − | CGGUUUGCCGCGCACGC | 17 | 1042 |
| HSV1-UL19-835 | − | GACGGGGCGUUGCACGC | 17 | 1221 |
| HSV1-UL19-639 | − | CCUGAACCGGCAGACGC | 17 | 1025 |
| HSV1-UL19-831 | − | UCGGCGGCGCCCGACGC | 17 | 1217 |
| HSV1-UL19-926 | − | GCCGGGGGCGUUUACGC | 17 | 1312 |
| HSV1-UL19-1620 | + | AGCAGGUAAAACACCGC | 17 | 2006 |
| HSV1-UL19-604 | − | GCAAGGCGGGCCACCGC | 17 | 990 |
| HSV1-UL19-805 | − | GGCCGCUGCUGCACCGC | 17 | 1191 |
| HSV1-UL19-1603 | + | GCGUCCCGGAACGCCGC | 17 | 1989 |
| HSV1-UL19-921 | − | CCCCGGGGACGCGCCGC | 17 | 1307 |
| HSV1-UL19-895 | − | ACUUUUACCUGGGCCGC | 17 | 1281 |
| HSV1-UL19-917 | − | ACGUCAACUACUUCCGC | 17 | 1303 |
| HSV1-UL19-1813 | + | CCACGACCGCGUUCCGC | 17 | 2199 |
| HSV1-UL19-1650 | + | AGGGGUGGCAGCAGCGC | 17 | 2036 |
| HSV1-UL19-780 | − | GACUGCCGGGUUAGCGC | 17 | 1166 |
| HSV1-UL19-613 | − | CGCAUGCCGACACGCGC | 17 | 999 |
| HSV1-UL19-971 | − | CGGGGAAGCCCACGCGC | 17 | 1357 |
| HSV1-UL19-912 | − | CAGGUGCCGCGGCGCGC | 17 | 1298 |
| HSV1-UL19-1755 | + | GCCGCGACAGGUCGCGC | 17 | 2141 |
| HSV1-UL19-1540 | + | GCGGGGCGGGAAGGCGC | 17 | 1926 |
| HSV1-UL19-1891 | + | GGCGGGGUCGCUGGCGC | 17 | 2277 |
| HSV1-UL19-1702 | + | GGGUGCAGGGGGUGCGC | 17 | 2088 |
| HSV1-UL19-750 | − | CGUGAACGACUACUCGC | 17 | 1136 |
| HSV1-UL19-950 | − | CCUCAACGGGGCCUCGC | 17 | 1336 |
| HSV1-UL19-1694 | + | GCUGGGGCACUCCUCGC | 17 | 2080 |
| HSV1-UL19-802 | − | GGUGCCCGCCUUCUCGC | 17 | 1188 |
| HSV1-UL19-1878 | + | CUUAAACUGUACGUCGC | 17 | 2264 |
| HSV1-UL19-1697 | + | GUCCGUCACGGGGUCGC | 17 | 2083 |
| HSV1-UL19-1892 | + | GAGGAGGGCGGGGUCGC | 17 | 2278 |
| HSV1-UL19-738 | − | CCAUCGCCGCCGUUCGC | 17 | 1124 |
| HSV1-UL19-839 | − | GUCCACGCGCUGUUCGC | 17 | 1225 |
| HSV1-UL19-603 | − | UUUUUCCUGGGCAAGGC | 17 | 989 |
| HSV1-UL19-1680 | + | CGGCCCCGCGAGAAGGC | 17 | 2066 |
| HSV1-UL19-712 | − | GGGGACGUUCCCCCGGC | 17 | 1098 |
| HSV1-UL19-682 | − | UACGUGGCGGCCCCGGC | 17 | 1068 |
| HSV1-UL19-1593 | + | AUCUCCCCCGGGCCGGC | 17 | 1979 |
| HSV1-UL19-1566 | + | UCUGCGGCGGGGCCGGC | 17 | 1952 |
| HSV1-UL19-853 | − | GUCCGCGAGAGCGCGGC | 17 | 1239 |
| HSV1-UL19-1789 | + | CCACGUUCGCGCGCGGC | 17 | 2175 |
| HSV1-UL19-845 | − | GCGCGACCUGUCGCGGC | 17 | 1231 |
| HSV1-UL19-615 | − | CGACACGCGCGGGCGGC | 17 | 1001 |
| HSV1-UL19-1569 | + | UGCUGCAUGUCUGCGGC | 17 | 1955 |
| HSV1-UL19-1675 | + | CCGCCCCCCGGUGCGGC | 17 | 2061 |
| HSV1-UL19-3227 | + | CUACCCCAAGGAAGGGC | 17 | 7826 |
| HSV1-UL19-1753 | + | GACAGGUCGCGCAGGGC | 17 | 2139 |
| HSV1-UL19-1837 | + | CCCGGGGGUUGCAGGGC | 17 | 2223 |
| HSV1-UL19-1894 | + | GCACUGCGGAGGAGGGC | 17 | 2280 |
| HSV1-UL19-691 | − | GCGCCUGGCCCACGGGC | 17 | 1077 |
| HSV1-UL19-1818 | + | CGAACACGGGGACGGGC | 17 | 2204 |
| HSV1-UL19-1594 | + | CUGGAUCUCCCCCGGGC | 17 | 1980 |
| HSV1-UL19-1644 | + | CCCGCCCAGCUCCGGGC | 17 | 2030 |
| HSV1-UL19-770 | − | CCCGGAGCUGGGCGGGC | 17 | 1156 |
| HSV1-UL19-1520 | + | UGAACAGGCCCAGGGGC | 17 | 1906 |
| HSV1-UL19-1567 | + | CAUGUCUGCGGCGGGGC | 17 | 1953 |
| HSV1-UL19-1543 | + | AAAACAGCUGGCGGGGC | 17 | 1929 |
| HSV1-UL19-1530 | + | UCCGGGUGGCCGGGGGC | 17 | 1916 |
| HSV1-UL19-907 | − | GGGAAACCGCCUGGGGC | 17 | 1293 |
| HSV1-UL19-769 | − | CCGGCCCGGAGCUGGGC | 17 | 1155 |
| HSV1-UL19-1816 | + | ACGGGGACGGGCUGGGC | 17 | 2202 |
| HSV1-UL19-1713 | + | UGCAGCGUGAGCAUGGC | 17 | 2099 |
| HSV1-UL19-858 | − | ACCUACGCGCUCAUGGC | 17 | 1244 |
| HSV1-UL19-878 | − | CCCGGCACGAAACUGGC | 17 | 1264 |
| HSV1-UL19-1546 | + | CCAAAAAAACAGCUGGC | 17 | 1932 |
| HSV1-UL19-903 | − | CGGAACGCGGUCGUGGC | 17 | 1289 |
| HSV1-UL19-1535 | + | GCGGGGAUCCGGGUGGC | 17 | 1921 |
| HSV1-UL19-1612 | + | ACGGCGGCGAUGGUGGC | 17 | 1998 |
| HSV1-UL19-1709 | + | UUGGCCACCAGAUUGGC | 17 | 2095 |
| HSV1-UL19-1732 | + | UGGUAUGGUCCAGAUGC | 17 | 2118 |
| HSV1-UL19-636 | − | CCACCUGCUGGAGAUGC | 17 | 1022 |
| HSV1-UL19-777 | − | ACCGCCAUCGCGACUGC | 17 | 1163 |
| HSV1-UL19-1486 | + | CUUUCAGGAAGGACUGC | 17 | 1872 |
| HSV1-UL19-635 | − | CGUGGGCCGCCACCUGC | 17 | 1021 |
| HSV1-UL19-704 | − | GGCCGACGUGGAGCUGC | 17 | 1090 |
| HSV1-UL19-824 | − | CGCCAUGCUCACGCUGC | 17 | 1210 |
| HSV1-UL19-742 | − | GGUGUUUUACCUGCUGC | 17 | 1128 |
| HSV1-UL19-587 | − | GAUGCUGCACGUGCUGC | 17 | 973 |
| HSV1-UL19-1500 | + | GCUCGUCCAGCGUCUGC | 17 | 1886 |
| HSV1-UL19-1688 | + | GGACCACCAUGUUCUGC | 17 | 2074 |
| HSV1-UL19-621 | − | CACCGAAGCCGACGUGC | 17 | 1007 |
| HSV1-UL19-1787 | + | CCCCGCCAGUUUCGUGC | 17 | 2173 |
| HSV1-UL19-825 | − | GCUCACGCUGCAGGUGC | 17 | 1211 |
| HSV1-UL19-1707 | + | CCAGAUUGGCCGGGUGC | 17 | 2093 |
| HSV1-UL19-1900 | + | GUGGGCUUCCCCGUUGC | 17 | 2286 |
| HSV1-UL19-1839 | + | GCGUCCCCGGGGGUUGC | 17 | 2225 |
| HSV1-UL19-815 | − | CCUGCACCCGGCCAAUC | 17 | 1201 |
| HSV1-UL19-653 | − | CCUGGGCCUGUUCAAUC | 17 | 1039 |
| HSV1-UL19-837 | − | GAUGGCCCCCCAGCAUC | 17 | 1223 |
| HSV1-UL19-1446 | + | GCAGCACGUGCAGCAUC | 17 | 1832 |
| HSV1-UL19-1656 | + | GGGCCGCGCGCCGCAUC | 17 | 2042 |
| HSV1-UL19-1577 | + | ACUGCUCCGGGGUCAUC | 17 | 1963 |
| HSV1-UL19-1873 | + | AACCCGUCUCCACGAUC | 17 | 2259 |
| HSV1-UL19-669 | − | CUCUGGAACACGCGAUC | 17 | 1055 |
| HSV1-UL19-641 | − | GCGCGUGCGCGCGGAUC | 17 | 1027 |
| HSV1-UL19-1538 | + | GGGAAGGCGCGGGGAUC | 17 | 1924 |
| HSV1-UL19-1483 | + | GGAGGCGCUGUUUGAUC | 17 | 1869 |
| HSV1-UL19-752 | − | ACGUCGUGACCUACCUC | 17 | 1138 |
| HSV1-UL19-1633 | + | ACGGCCAUGCACUCCUC | 17 | 2019 |
| HSV1-UL19-583 | − | ACGUCCAGGCCGUCCUC | 17 | 969 |
| HSV1-UL19-1646 | + | GCCUGCCCGCCCAGCUC | 17 | 2032 |
| HSV1-UL19-1850 | + | CCCGGGACGGGUCGCUC | 17 | 2236 |
| HSV1-UL19-848 | − | CCUGGUCCCCCCGGCUC | 17 | 1234 |
| HSV1-UL19-1671 | + | CGCGGCGUCCGCGGCUC | 17 | 2057 |
| HSV1-UL19-1580 | + | GGCUGCAUAAACUGCUC | 17 | 1966 |
| HSV1-UL19-1690 | + | UCGCCGGGGGCGAUCUC | 17 | 2076 |
| HSV1-UL19-667 | − | GGUGCUGCGCCUGUCUC | 17 | 1053 |
| HSV1-UL19-632 | − | CAAGGCCGUGCGAAGUC | 17 | 1018 |
| HSV1-UL19-1519 | + | GGGGCAGGACGAACGUC | 17 | 1905 |
| HSV1-UL19-1719 | + | GUGUUGGCGCCCGCGUC | 17 | 2105 |
| HSV1-UL19-1505 | + | CGCGCACGCGCGUCGUC | 17 | 1891 |
| HSV1-UL19-1643 | + | CCAGCUCCGGGCCGGUC | 17 | 2029 |
| HSV1-UL19-673 | − | ACGUUGACGCGGCGGUC | 17 | 1059 |
| HSV1-UL19-722 | − | GCCCCUGGCGCUAUGUC | 17 | 1108 |
| HSV1-UL19-1581 | + | GCCAGGUUGGCGUUGUC | 17 | 1967 |
| HSV1-UL19-1726 | + | GGCCAUCAGCAGGAUUC | 17 | 2112 |
| HSV1-UL19-1492 | + | CCAGGUUGGCCCCGUUC | 17 | 1878 |
| HSV1-UL19-724 | − | UAUGUCCGGCGGCGUUC | 17 | 1110 |
| HSV1-UL19-1499 | + | CCAGCGUCUGCCGGUUC | 17 | 1885 |
| HSV1-UL19-909 | − | AGCCCGUCCCCGUGUUC | 17 | 1295 |
| HSV1-UL19-1488 | + | CGGUGUCCUCCACUUUC | 17 | 1874 |
| HSV1-UL19-644 | − | CGAGAAGCUGGUCUUUC | 17 | 1030 |
| HSV1-UL19-965 | − | CCCGUGUGGCCUGUUUC | 17 | 1351 |
| HSV1-UL19-1782 | + | CGUUCUCAGUCACAAAG | 17 | 2168 |
| HSV1-UL19-619 | − | GCAGUCCUUCCUGAAAG | 17 | 1005 |
| HSV1-UL19-1905 | + | CGAGAUACUGCGCGAAG | 17 | 2291 |
| HSV1-UL19-1515 | + | UCCAUGGCGCCCACCAG | 17 | 1901 |
| HSV1-UL19-1758 | + | AGAGCCGGGGGGACCAG | 17 | 2144 |
| HSV1-UL19-1521 | + | GGAUUGAACAGGCCCAG | 17 | 1907 |
| HSV1-UL19-1448 | + | GGCAACAACAAAGCCAG | 17 | 1834 |
| HSV1-UL19-1600 | + | GCCGGACAUAGCGCCAG | 17 | 1986 |
| HSV1-UL19-1866 | + | UAAAGAACUUAAAGCAG | 17 | 2252 |
| HSV1-UL19-1683 | + | CCCCCGCGGUGCAGCAG | 17 | 2069 |
| HSV1-UL19-1705 | + | AGAUUGGCCGGGUGCAG | 17 | 2091 |
| HSV1-UL19-1808 | + | CGCGUUGUCCAGGAGAG | 17 | 2194 |
| HSV1-UL19-1652 | + | UCACAGUCCCACACGAG | 17 | 2038 |
| HSV1-UL19-932 | − | ACGCGGGGGACAAGGAG | 17 | 1318 |
| HSV1-UL19-1810 | + | GCCGCGUUGUCCAGGAG | 17 | 2196 |
| HSV1-UL19-1737 | + | AGCGCGUGGACGGGGAG | 17 | 2123 |
| HSV1-UL19-1890 | + | UCGCUGGCGCAGGUGAG | 17 | 2276 |
| HSV1-UL19-1908 | + | AGAGCCAGUCCCUUGAG | 17 | 2294 |
| HSV1-UL19-821 | − | CAACGGGCGCGUGGUAG | 17 | 1207 |
| HSV1-UL19-898 | − | CCCUCUCCUGGACAACG | 17 | 1284 |
| HSV1-UL19-969 | − | CCGCAGUGCCCGCAACG | 17 | 1355 |
| HSV1-UL19-949 | − | GGCCUACCACCUCAACG | 17 | 1335 |
| HSV1-UL19-883 | − | CCAGCCGCGCGCGAACG | 17 | 1269 |
| HSV1-UL19-1587 | + | CACAAAGAAGUCGAACG | 17 | 1973 |
| HSV1-UL19-900 | − | CGUGUACCUGCGGAACG | 17 | 1286 |
| HSV1-UL19-626 | − | CGAGAUGGUCCUGAACG | 17 | 1012 |
| HSV1-UL19-946 | − | GGACCUGCUCUAUAACG | 17 | 1332 |
| HSV1-UL19-786 | − | CGCGGCGGCAUGUAACG | 17 | 1172 |
| HSV1-UL19-748 | − | GCUACUGGAACAACACG | 17 | 1134 |
| HSV1-UL19-1821 | + | GGGCGCACCCGAACACG | 17 | 2207 |
| HSV1-UL19-1654 | + | CGUCACAGUCCCACACG | 17 | 2040 |
| HSV1-UL19-1832 | + | UGACGUCGGUCGACACG | 17 | 2218 |
| HSV1-UL19-1663 | + | AUGCCGCCGCGUACACG | 17 | 2049 |
| HSV1-UL19-842 | − | CGCCGGGGCCGACCACG | 17 | 1228 |
| HSV1-UL19-1746 | + | UGGGCGCGUUCGCCACG | 17 | 2132 |
| HSV1-UL19-1698 | + | GCGCGGGGUCCGUCACG | 17 | 2084 |
| HSV1-UL19-1475 | + | UCGGCAUGCGUCAGACG | 17 | 1861 |
| HSV1-UL19-633 | − | GCGAAGUCUGGACGACG | 17 | 1019 |
| HSV1-UL19-830 | − | CUCGGCGGCGCCCGACG | 17 | 1216 |
| HSV1-UL19-703 | − | UGUGGGGGUGGCCGACG | 17 | 1089 |
| HSV1-UL19-618 | − | CGGGCGGCCGGUCGACG | 17 | 1004 |
| HSV1-UL19-834 | − | CAUGCGCAUAUUCGACG | 17 | 1220 |
| HSV1-UL19-1558 | + | GAUUGGCGGCUUCGACG | 17 | 1944 |
| HSV1-UL19-1740 | + | CGAACAGCGCGUGGACG | 17 | 2126 |
| HSV1-UL19-1722 | + | CAUGUUGGUGGUGGACG | 17 | 2108 |
| HSV1-UL19-1797 | + | UGCCCAUGUCGGUGACG | 17 | 2183 |
| HSV1-UL19-670 | − | GCUGAUGAACGUUGACG | 17 | 1056 |
| HSV1-UL19-1685 | + | GCAGGGUGGCGUAUACG | 17 | 2071 |
| HSV1-UL19-678 | − | AGCCGCCAAUCCGUACG | 17 | 1064 |
| HSV1-UL19-679 | − | UCCGUACGGGGCGUACG | 17 | 1065 |
| HSV1-UL19-943 | − | GCAGCGAUUUUCGUACG | 17 | 1329 |
| HSV1-UL19-784 | − | CCACGACCCCGUGUACG | 17 | 1170 |
| HSV1-UL19-925 | − | CGCCGGGGGCGUUUACG | 17 | 1311 |
| HSV1-UL19-795 | − | GAUGACCGGCCGCACCG | 17 | 1181 |
| HSV1-UL19-804 | − | GGGCCGCUGCUGCACCG | 17 | 1190 |
| HSV1-UL19-787 | − | AUGUAACGUGGCGACCG | 17 | 1173 |
| HSV1-UL19-939 | − | CGGCCACGGCCAACCCG | 17 | 1325 |
| HSV1-UL19-1881 | + | GAGUUCGCGGCACCCCG | 17 | 2267 |
| HSV1-UL19-920 | − | CGGCCCUGCAACCCCCG | 17 | 1306 |
| HSV1-UL19-1684 | + | GUCGAAGCGAACCCCCG | 17 | 2070 |
| HSV1-UL19-961 | − | AGUUUAAGCGCCCCCCG | 17 | 1347 |
| HSV1-UL19-1631 | + | CGGGAAGGUCUCCCCCG | 17 | 2017 |
| HSV1-UL19-1806 | + | GGAGAGGGGGAGCCCCG | 17 | 2192 |
| HSV1-UL19-1444 | + | CGCGCUCAAACGCCCCG | 17 | 1830 |
| HSV1-UL19-1841 | + | CCGGCGGCGCGUCCCCG | 17 | 2227 |
| HSV1-UL19-728 | − | GCGUUCCGGGACGCCCG | 17 | 1114 |
| HSV1-UL19-1575 | + | CCCAUCGGACCCGCCCG | 17 | 1961 |
| HSV1-UL19-715 | − | UUCCCCCGGCCGGCCCG | 17 | 1101 |
| HSV1-UL19-860 | − | CUUCAAGAUCAGUCCCG | 17 | 1246 |
| HSV1-UL19-755 | − | CGGGGGAGACCUUCCCG | 17 | 1141 |
| HSV1-UL19-1763 | + | GUUGGCCCCCAGAGCCG | 17 | 2149 |
| HSV1-UL19-790 | − | CACCCAGGCCCGAGCCG | 17 | 1176 |
| HSV1-UL19-658 | − | GUUUGCCGCGCACGCCG | 17 | 1044 |
| HSV1-UL19-791 | − | CCGAGCCGCGGACGCCG | 17 | 1177 |
| HSV1-UL19-923 | − | CCGGGGACGCGCCGCCG | 17 | 1309 |
| HSV1-UL19-1826 | + | UCCAUCCCUGCGCGCCG | 17 | 2212 |
| HSV1-UL19-1692 | + | UGGGGCACUCCUCGCCG | 17 | 2078 |
| HSV1-UL19-841 | − | CCACGCGCUGUUCGCCG | 17 | 1227 |
| HSV1-UL19-1591 | + | CUCCCCCGGGCCGGCCG | 17 | 1977 |
| HSV1-UL19-1564 | + | UGCGGCGGGGCCGGCCG | 17 | 1950 |
| HSV1-UL19-855 | − | CCGCGAGAGCGCGGCCG | 17 | 1241 |
| HSV1-UL19-1751 | + | CAGGUCGCGCAGGGCCG | 17 | 2137 |
| HSV1-UL19-894 | − | AACUUUUACCUGGGCCG | 17 | 1280 |
| HSV1-UL19-1827 | + | ACACGGCGUCCUGGCCG | 17 | 2213 |
| HSV1-UL19-1849 | + | ACGGGUCGCUCUGGCCG | 17 | 2235 |
| HSV1-UL19-1469 | + | GGAGGGCUGCGUGGCCG | 17 | 1855 |
| HSV1-UL19-1874 | + | GCUGGCGGCGGUGGCCG | 17 | 2260 |
| HSV1-UL19-1533 | + | GGGGAUCCGGGUGGCCG | 17 | 1919 |
| HSV1-UL19-1856 | + | CGCCCACGGGUUGGCCG | 17 | 2242 |
| HSV1-UL19-706 | − | CCGACGUGGAGCUGCCG | 17 | 1092 |
| HSV1-UL19-911 | − | GGUGCGCCCAGGUGCCG | 17 | 1297 |
| HSV1-UL19-1794 | + | GUUGCGGACGGUUGCCG | 17 | 2180 |
| HSV1-UL19-1674 | + | GUGCGGCCGGUCAUCCG | 17 | 2060 |
| HSV1-UL19-611 | − | GGCCACGCAGCCCUCCG | 17 | 997 |
| HSV1-UL19-1578 | + | CUGCAUAAACUGCUCCG | 17 | 1964 |
| HSV1-UL19-1666 | + | GUUGCGGUUGAAGUCCG | 17 | 2052 |
| HSV1-UL19-1673 | + | GUCAUCCGCGGCGUCCG | 17 | 2059 |
| HSV1-UL19-852 | − | GCACGUCCGCGAGAGCG | 17 | 1238 |
| HSV1-UL19-1906 | + | AGCCAGUCCCUUGAGCG | 17 | 2292 |
| HSV1-UL19-585 | − | CUCGGGGCGUUUGAGCG | 17 | 971 |
| HSV1-UL19-779 | − | CGACUGCCGGGUUAGCG | 17 | 1165 |
| HSV1-UL19-1585 | + | CAAAGAAGUCGAACGCG | 17 | 1971 |
| HSV1-UL19-612 | − | ACGCAUGCCGACACGCG | 17 | 998 |
| HSV1-UL19-970 | − | ACGGGGAAGCCCACGCG | 17 | 1356 |
| HSV1-UL19-927 | − | CCGGGGGCGUUUACGCG | 17 | 1313 |
| HSV1-UL19-806 | − | GCCGCUGCUGCACCGCG | 17 | 1192 |
| HSV1-UL19-896 | − | CUUUUACCUGGGCCGCG | 17 | 1282 |
| HSV1-UL19-1743 | + | CCCCGGCGAACAGCGCG | 17 | 2129 |
| HSV1-UL19-781 | − | ACUGCCGGGUUAGCGCG | 17 | 1167 |
| HSV1-UL19-1903 | + | AGUGGGUCUCCCGCGCG | 17 | 2289 |
| HSV1-UL19-1790 | + | AGGUCCACGUUCGCGCG | 17 | 2176 |
| HSV1-UL19-1539 | + | CGGGGCGGGAAGGCGCG | 17 | 1925 |
| HSV1-UL19-775 | − | CGCCCUGAUGCGGCGCG | 17 | 1161 |
| HSV1-UL19-820 | − | GUUUCACAACGGGCGCG | 17 | 1206 |
| HSV1-UL19-719 | − | CCAGGCCACCUGGCGCG | 17 | 1105 |
| HSV1-UL19-640 | − | GACGACGCGCGUGCGCG | 17 | 1026 |
| HSV1-UL19-1701 | + | GGUGCAGGGGGUGCGCG | 17 | 2087 |
| HSV1-UL19-803 | − | GUGCCCGCCUUCUCGCG | 17 | 1189 |
| HSV1-UL19-739 | − | CAUCGCCGCCGUUCGCG | 17 | 1125 |
| HSV1-UL19-1541 | + | GGCGGGGCGGGAAGGCG | 17 | 1927 |
| HSV1-UL19-1864 | + | GGGGCUGAGCACCGGCG | 17 | 2250 |
| HSV1-UL19-812 | − | GGAGAUCGCCCCCGGCG | 17 | 1198 |
| HSV1-UL19-1568 | + | GCUGCAUGUCUGCGGCG | 17 | 1954 |
| HSV1-UL19-3228 | + | UACCCCAAGGAAGGGCG | 17 | 7827 |
| HSV1-UL19-1893 | + | CACUGCGGAGGAGGGCG | 17 | 2279 |
| HSV1-UL19-1529 | + | CCGGGUGGCCGGGGGCG | 17 | 1915 |
| HSV1-UL19-886 | − | GAACGUGGACCUGGGCG | 17 | 1272 |
| HSV1-UL19-1608 | + | UGGCGGGGGCCAUGGCG | 17 | 1994 |
| HSV1-UL19-859 | − | CCUACGCGCUCAUGGCG | 17 | 1245 |
| HSV1-UL19-879 | − | CCGGCACGAAACUGGCG | 17 | 1265 |
| HSV1-UL19-1545 | + | CAAAAAAACAGCUGGCG | 17 | 1931 |
| HSV1-UL19-1611 | + | CGGCGGCGAUGGUGGCG | 17 | 1997 |
| HSV1-UL19-1470 | + | GGCCACGGAGGGCUGCG | 17 | 1856 |
| HSV1-UL19-1526 | + | UAGGUCCCCGGCGUGCG | 17 | 1912 |
| HSV1-UL19-749 | − | GAACAACACGCGGUGCG | 17 | 1135 |
| HSV1-UL19-1703 | + | CGGGUGCAGGGGGUGCG | 17 | 2089 |
| HSV1-UL19-953 | − | CCUGGAGCGCCUGAUCG | 17 | 1339 |
| HSV1-UL19-1482 | + | GAGGCGCUGUUUGAUCG | 17 | 1868 |
| HSV1-UL19-962 | − | GGGGUGCCGCGAACUCG | 17 | 1348 |
| HSV1-UL19-753 | − | CGUCGUGACCUACCUCG | 17 | 1139 |
| HSV1-UL19-584 | − | CGUCCAGGCCGUCCUCG | 17 | 970 |
| HSV1-UL19-746 | − | CGCCCUGGCCCGGCUCG | 17 | 1132 |
| HSV1-UL19-609 | − | CGUCGAGGCCUGGCUCG | 17 | 995 |
| HSV1-UL19-1770 | + | CCCCGGCCGCGCUCUCG | 17 | 2156 |
| HSV1-UL19-801 | − | UGGUGCCCGCCUUCUCG | 17 | 1187 |
| HSV1-UL19-761 | − | CCUGGUGGCGCACGUCG | 17 | 1147 |
| HSV1-UL19-888 | − | GGGCUACACCGCCGUCG | 17 | 1274 |
| HSV1-UL19-607 | − | CCGCCGGGAGGCCGUCG | 17 | 993 |
| HSV1-UL19-901 | − | CCUGCGGAACGCGGUCG | 17 | 1287 |
| HSV1-UL19-674 | − | CGUUGACGCGGCGGUCG | 17 | 1060 |
| HSV1-UL19-1662 | + | CCGCGUACACGGGGUCG | 17 | 2048 |
| HSV1-UL19-1557 | + | CGGCUUCGACGGGGUCG | 17 | 1943 |
| HSV1-UL19-694 | − | GCGGGUCCGAUGGGUCG | 17 | 1080 |
| HSV1-UL19-844 | − | CCCUGCGCGACCUGUCG | 17 | 1230 |
| HSV1-UL19-937 | − | CCCGUCCCGGGCCUUCG | 17 | 1323 |
| HSV1-UL19-1884 | + | GGUCCUCCACGAGUUCG | 17 | 2270 |
| HSV1-UL19-737 | − | ACCAUCGCCGCCGUUCG | 17 | 1123 |
| HSV1-UL19-930 | − | UUACGCGGGGGACAAGG | 17 | 1316 |
| HSV1-UL19-602 | − | CUUUUUCCUGGGCAAGG | 17 | 988 |
| HSV1-UL19-1681 | + | GCGGCCCCGCGAGAAGG | 17 | 2067 |
| HSV1-UL19-1514 | + | CCAUGGCGCCCACCAGG | 17 | 1900 |
| HSV1-UL19-1757 | + | GAGCCGGGGGGACCAGG | 17 | 2143 |
| HSV1-UL19-1814 | + | GCUGGGCCGGCCCCAGG | 17 | 2200 |
| HSV1-UL19-1598 | + | GUUCACCACGCGCCAGG | 17 | 1984 |
| HSV1-UL19-1453 | + | CCACCCUGGUGGCCAGG | 17 | 1839 |
| HSV1-UL19-874 | − | CCUGGGCCAGCUCCAGG | 17 | 1260 |
| HSV1-UL19-1497 | + | CCUGCAUCUCCAGCAGG | 17 | 1883 |
| HSV1-UL19-637 | − | CCUGCUGGAGAUGCAGG | 17 | 1023 |
| HSV1-UL19-1485 | + | UCAGGAAGGACUGCAGG | 17 | 1871 |
| HSV1-UL19-1704 | + | GAUUGGCCGGGUGCAGG | 17 | 2090 |
| HSV1-UL19-966 | − | GUGUGGCCUGUUUCAGG | 17 | 1352 |
| HSV1-UL19-1807 | + | GCGUUGUCCAGGAGAGG | 17 | 2193 |
| HSV1-UL19-933 | − | CGCGGGGGACAAGGAGG | 17 | 1319 |
| HSV1-UL19-1897 | + | UGCGGGCACUGCGGAGG | 17 | 2283 |
| HSV1-UL19-1736 | + | GCGCGUGGACGGGGAGG | 17 | 2122 |
| HSV1-UL19-1862 | + | GCGAGGCCCCGUUGAGG | 17 | 2248 |
| HSV1-UL19-1616 | + | GAACGCCCCGCGAACGG | 17 | 2002 |
| HSV1-UL19-1831 | + | GACGUCGGUCGACACGG | 17 | 2217 |
| HSV1-UL19-1472 | + | ACGGGGCACGGCCACGG | 17 | 1858 |
| HSV1-UL19-1792 | + | UGCCGUGGCCACGACGG | 17 | 2178 |
| HSV1-UL19-796 | − | AUGACCGGCCGCACCGG | 17 | 1182 |
| HSV1-UL19-741 | − | CGACCGCAACUACCCGG | 17 | 1127 |
| HSV1-UL19-1880 | + | AGUUCGCGGCACCCCGG | 17 | 2266 |
| HSV1-UL19-1844 | + | CGCGUAAACGCCCCCGG | 17 | 2230 |
| HSV1-UL19-1840 | + | CGGCGGCGCGUCCCCGG | 17 | 2226 |
| HSV1-UL19-716 | − | UCCCCCGGCCGGCCCGG | 17 | 1102 |
| HSV1-UL19-1464 | + | CCUCGACGGCCUCCCGG | 17 | 1850 |
| HSV1-UL19-1762 | + | UUGGCCCCCAGAGCCGG | 17 | 2148 |
| HSV1-UL19-924 | − | CGGGGACGCGCCGCCGG | 17 | 1310 |
| HSV1-UL19-1691 | + | GGGGCACUCCUCGCCGG | 17 | 2077 |
| HSV1-UL19-1590 | + | UCCCCCGGGCCGGCCGG | 17 | 1976 |
| HSV1-UL19-1750 | + | AGGUCGCGCAGGGCCGG | 17 | 2136 |
| HSV1-UL19-1836 | + | GGGGGUUGCAGGGCCGG | 17 | 2222 |
| HSV1-UL19-1532 | + | GGGAUCCGGGUGGCCGG | 17 | 1918 |
| HSV1-UL19-707 | − | CGACGUGGAGCUGCCGG | 17 | 1093 |
| HSV1-UL19-723 | − | CCUGGCGCUAUGUCCGG | 17 | 1109 |
| HSV1-UL19-671 | − | GAUGAACGUUGACGCGG | 17 | 1057 |
| HSV1-UL19-785 | − | CGACCCCGUGUACGCGG | 17 | 1171 |
| HSV1-UL19-928 | − | CGGGGGCGUUUACGCGG | 17 | 1314 |
| HSV1-UL19-807 | − | CCGCUGCUGCACCGCGG | 17 | 1193 |
| HSV1-UL19-782 | − | CUGCCGGGUUAGCGCGG | 17 | 1168 |
| HSV1-UL19-1463 | + | CGACGGCCUCCCGGCGG | 17 | 1849 |
| HSV1-UL19-1875 | + | UACGUCGCUGGCGGCGG | 17 | 2261 |
| HSV1-UL19-1480 | + | CUGUUUGAUCGGGGCGG | 17 | 1866 |
| HSV1-UL19-880 | − | CGGCACGAAACUGGCGG | 17 | 1266 |
| HSV1-UL19-1876 | + | CUGUACGUCGCUGGCGG | 17 | 2262 |
| HSV1-UL19-1610 | + | GGCGGCGAUGGUGGCGG | 17 | 1996 |
| HSV1-UL19-1898 | + | CGUUGCGGGCACUGCGG | 17 | 2284 |
| HSV1-UL19-1570 | + | CUGCUGCAUGUCUGCGG | 17 | 1956 |
| HSV1-UL19-754 | − | GUCGUGACCUACCUCGG | 17 | 1140 |
| HSV1-UL19-829 | − | GGCGCUGCUCUGCUCGG | 17 | 1215 |
| HSV1-UL19-870 | − | CUCGGAGCGCGCGUCGG | 17 | 1256 |
| HSV1-UL19-675 | − | GUUGACGCGGCGGUCGG | 17 | 1061 |
| HSV1-UL19-957 | − | CGUGGAGACGGGUUCGG | 17 | 1343 |
| HSV1-UL19-1553 | + | CGUUCAUCAGCGAAGGG | 17 | 1939 |
| HSV1-UL19-3229 | + | ACUACCCCAAGGAAGGG | 17 | 7828 |
| HSV1-UL19-595 | − | CCGCCUGGCCACCAGGG | 17 | 981 |
| HSV1-UL19-1686 | + | CACCAUGUUCUGCAGGG | 17 | 2072 |
| HSV1-UL19-1895 | + | GGCACUGCGGAGGAGGG | 17 | 2281 |
| HSV1-UL19-1846 | + | GUGGUCGUACAUGAGGG | 17 | 2232 |
| HSV1-UL19-690 | − | AGCGCCUGGCCCACGGG | 17 | 1076 |
| HSV1-UL19-797 | − | UGACCGGCCGCACCGGG | 17 | 1183 |
| HSV1-UL19-1879 | + | GUUCGCGGCACCCCGGG | 17 | 2265 |
| HSV1-UL19-1761 | + | UGGCCCCCAGAGCCGGG | 17 | 2147 |
| HSV1-UL19-606 | − | GGCGGGCCACCGCCGGG | 17 | 992 |
| HSV1-UL19-1749 | + | GGUCGCGCAGGGCCGGG | 17 | 2135 |
| HSV1-UL19-708 | − | GACGUGGAGCUGCCGGG | 17 | 1094 |
| HSV1-UL19-1536 | + | AGGCGCGGGGAUCCGGG | 17 | 1922 |
| HSV1-UL19-783 | − | UGCCGGGUUAGCGCGGG | 17 | 1169 |
| HSV1-UL19-614 | − | AUGCCGACACGCGCGGG | 17 | 1000 |
| HSV1-UL19-881 | − | GGCACGAAACUGGCGGG | 17 | 1267 |
| HSV1-UL19-1447 | + | AACAACAAAGCCAGGGG | 17 | 1833 |
| HSV1-UL19-1651 | + | CAGUCCCACACGAGGGG | 17 | 2037 |
| HSV1-UL19-1739 | + | ACAGCGCGUGGACGGGG | 17 | 2125 |
| HSV1-UL19-709 | − | ACGUGGAGCUGCCGGGG | 17 | 1095 |
| HSV1-UL19-3230 | + | CCCAAGGAAGGGCGGGG | 17 | 7829 |
| HSV1-UL19-882 | − | GCACGAAACUGGCGGGG | 17 | 1268 |
| HSV1-UL19-1544 | + | AAAAACAGCUGGCGGGG | 17 | 1930 |
| HSV1-UL19-1481 | + | GCGCUGUUUGAUCGGGG | 17 | 1867 |
| HSV1-UL19-1830 | + | GUCGGUCGACACGGGGG | 17 | 2216 |
| HSV1-UL19-1531 | + | AUCCGGGUGGCCGGGGG | 17 | 1917 |
| HSV1-UL19-710 | − | CGUGGAGCUGCCGGGGG | 17 | 1096 |
| HSV1-UL19-798 | − | CCGGCCGCACCGGGGGG | 17 | 1184 |
| HSV1-UL19-734 | − | GGGCCUGGAGCUGGGGG | 17 | 1120 |
| HSV1-UL19-702 | − | CGACUUCUUUGUGGGGG | 17 | 1088 |
| HSV1-UL19-768 | − | ACCGGCCCGGAGCUGGG | 17 | 1154 |
| HSV1-UL19-1728 | + | AUGGUCCAGAUGCUGGG | 17 | 2114 |
| HSV1-UL19-1501 | + | CACGCGCGUCGUCUGGG | 17 | 1887 |
| HSV1-UL19-809 | − | CACCCUGCAGAACAUGG | 17 | 1195 |
| HSV1-UL19-1714 | + | CUGCAGCGUGAGCAUGG | 17 | 2100 |
| HSV1-UL19-857 | − | GACCUACGCGCUCAUGG | 17 | 1243 |
| HSV1-UL19-1659 | + | CCCGGCAGUCGCGAUGG | 17 | 2045 |
| HSV1-UL19-1614 | + | GCGAACGGCGGCGAUGG | 17 | 2000 |
| HSV1-UL19-1776 | + | ACCCAAACCCGGGAUGG | 17 | 2162 |
| HSV1-UL19-1622 | + | CUCGCUGCCGUGUAUGG | 17 | 2008 |
| HSV1-UL19-877 | − | GCCCGGCACGAAACUGG | 17 | 1263 |
| HSV1-UL19-1549 | + | ACAGGCGCAGCACCUGG | 17 | 1935 |
| HSV1-UL19-760 | − | CGUGUACCGGGACCUGG | 17 | 1146 |
| HSV1-UL19-1455 | + | CGCCCGGGCCACCCUGG | 17 | 1841 |
| HSV1-UL19-648 | − | CGUUCCCUACCCCCUGG | 17 | 1034 |
| HSV1-UL19-686 | − | UGUUUUUGAACGCCUGG | 17 | 1072 |
| HSV1-UL19-1547 | + | CCCAAAAAAACAGCUGG | 17 | 1933 |
| HSV1-UL19-733 | − | CCGGGGCCUGGAGCUGG | 17 | 1119 |
| HSV1-UL19-1877 | + | AAACUGUACGUCGCUGG | 17 | 2263 |
| HSV1-UL19-1729 | + | UAUGGUCCAGAUGCUGG | 17 | 2115 |
| HSV1-UL19-816 | − | GCACCCGGCCAAUCUGG | 17 | 1202 |
| HSV1-UL19-851 | − | GGUCCCCCCGGCUCUGG | 17 | 1237 |
| HSV1-UL19-1502 | + | GCACGCGCGUCGUCUGG | 17 | 1888 |
| HSV1-UL19-645 | − | GAAGCUGGUCUUUCUGG | 17 | 1031 |
| HSV1-UL19-620 | − | GUCCUUCCUGAAAGUGG | 17 | 1006 |
| HSV1-UL19-680 | − | GUACGGGGCGUACGUGG | 17 | 1066 |
| HSV1-UL19-963 | − | GUGCCGCGAACUCGUGG | 17 | 1349 |
| HSV1-UL19-902 | − | GCGGAACGCGGUCGUGG | 17 | 1288 |
| HSV1-UL19-1496 | + | GCAUCUCCAGCAGGUGG | 17 | 1882 |
| HSV1-UL19-1613 | + | AACGGCGGCGAUGGUGG | 17 | 1999 |
| HSV1-UL19-1509 | + | GUAGGGAACGUUGGUGG | 17 | 1895 |
| HSV1-UL19-1723 | + | UAUGCGCAUGUUGGUGG | 17 | 2109 |
| HSV1-UL19-701 | − | GUUCGACUUCUUUGUGG | 17 | 1087 |
| HSV1-UL19-1561 | + | CGCCCCGUACGGAUUGG | 17 | 1947 |
| HSV1-UL19-1510 | + | GGGGUAGGGAACGUUGG | 17 | 1896 |
| HSV1-UL19-1724 | + | GAAUAUGCGCAUGUUGG | 17 | 2110 |
| HSV1-UL19-1870 | + | CAGGCAGCGAUGUUUGG | 17 | 2256 |
| HSV1-UL19-664 | − | GCCAGCUGUUUUUUUGG | 17 | 1050 |
| HSV1-UL19-1848 | + | GGCCGUGGUCGUACAUG | 17 | 2234 |
| HSV1-UL19-774 | − | ACUGUGACGCCCUGAUG | 17 | 1160 |
| HSV1-UL19-1899 | + | CCCCGUUGCGGGCACUG | 17 | 2285 |
| HSV1-UL19-899 | − | CGGCAGCCGUGUACCUG | 17 | 1285 |
| HSV1-UL19-685 | − | CUGUUUUUGAACGCCUG | 17 | 1071 |
| HSV1-UL19-906 | − | UGGCGGGAAACCGCCUG | 17 | 1292 |
| HSV1-UL19-732 | − | CCCGGGGCCUGGAGCUG | 17 | 1118 |
| HSV1-UL19-1695 | + | CCGUCACGGGGUCGCUG | 17 | 2081 |
| HSV1-UL19-1730 | + | GUAUGGUCCAGAUGCUG | 17 | 2116 |
| HSV1-UL19-850 | − | UGGUCCCCCCGGCUCUG | 17 | 1236 |
| HSV1-UL19-1503 | + | CGCACGCGCGUCGUCUG | 17 | 1889 |
| HSV1-UL19-1571 | + | CAGCUGCUGCAUGUCUG | 17 | 1957 |
| HSV1-UL19-964 | − | CUCGUGGAGGACCCGUG | 17 | 1350 |
| HSV1-UL19-772 | − | UGCUGCCACCCCUCGUG | 17 | 1158 |
| HSV1-UL19-1676 | + | CAGUCCGCCCCCCGGUG | 17 | 2062 |
| HSV1-UL19-1468 | + | GCUGCGUGGCCGUGGUG | 17 | 1854 |
| HSV1-UL19-700 | − | CGUUCGACUUCUUUGUG | 17 | 1086 |
| HSV1-UL19-3231 | − | CGCCCCGCCCUUCCUUG | 17 | 7830 |
| HSV1-UL19-1679 | + | CGUAGUAGUAAAUCUUG | 17 | 2065 |
| HSV1-UL19-1618 | + | ACACCGCCGGGUAGUUG | 17 | 2004 |
| HSV1-UL19-1863 | + | CCGGCGAGGCCCCGUUG | 17 | 2249 |
| HSV1-UL19-1901 | + | CGUGGGCUUCCCCGUUG | 17 | 2287 |
| HSV1-UL19-1667 | + | GCAGCUGGCCGUCGUUG | 17 | 2053 |
| HSV1-UL19-1796 | + | UGUCGGUGACGGGGUUG | 17 | 2182 |
| HSV1-UL19-1717 | + | UGCGUUCGGCCAUGUUG | 17 | 2103 |
| HSV1-UL19-698 | − | CGCGUUCGACUUCUUUG | 17 | 1084 |
| HSV1-UL19-1802 | + | CCCAGGUAAAAGUUUUG | 17 | 2188 |
| HSV1-UL19-663 | − | CGCCAGCUGUUUUUUUG | 17 | 1049 |
| HSV1-UL19-1748 | + | CAGGGCCGGGGGGAAAU | 17 | 2134 |
| HSV1-UL19-891 | − | AACCCCGUCACCGACAU | 17 | 1277 |
| HSV1-UL19-1576 | + | GGCCUUCCGCGACCCAU | 17 | 1962 |
| HSV1-UL19-642 | − | GCGGAUCUGGUGUCCAU | 17 | 1028 |
| HSV1-UL19-1451 | + | UCCAGGUAUCGUUGCAU | 17 | 1837 |
| HSV1-UL19-1710 | + | CGUGUUGGCCACCAGAU | 17 | 2096 |
| HSV1-UL19-693 | − | CCACGGGCGGGUCCGAU | 17 | 1079 |
| HSV1-UL19-668 | − | UCUCUGGAACACGCGAU | 17 | 1054 |
| HSV1-UL19-1562 | + | GUACGCCCCGUACGGAU | 17 | 1948 |
| HSV1-UL19-630 | − | GUCACGGCGCUCGUGAU | 17 | 1016 |
| HSV1-UL19-1484 | + | AGGAGGCGCUGUUUGAU | 17 | 1870 |
| HSV1-UL19-1528 | + | GGCCGGGGGCGGGGACU | 17 | 1914 |
| HSV1-UL19-1824 | + | UGCGCGCCGCGGCACCU | 17 | 2210 |
| HSV1-UL19-885 | − | CGCGCGAACGUGGACCU | 17 | 1271 |
| HSV1-UL19-751 | − | UACGUCGUGACCUACCU | 17 | 1137 |
| HSV1-UL19-893 | − | CCCCAAAACUUUUACCU | 17 | 1279 |
| HSV1-UL19-652 | − | ACGUUCGUCCUGCCCCU | 17 | 1038 |
| HSV1-UL19-684 | − | GCUGUUUUUGAACGCCU | 17 | 1070 |
| HSV1-UL19-905 | − | GUGGCGGGAAACCGCCU | 17 | 1291 |
| HSV1-UL19-1669 | + | GUCCGCGGCUCGGGCCU | 17 | 2055 |
| HSV1-UL19-1634 | + | CACGGCCAUGCACUCCU | 17 | 2020 |
| HSV1-UL19-582 | − | AACGUCCAGGCCGUCCU | 17 | 968 |
| HSV1-UL19-872 | − | UCGGAGGCGUACUUCCU | 17 | 1258 |
| HSV1-UL19-3232 | − | ACCGCCCCGCCCUUCCU | 17 | 7831 |
| HSV1-UL19-600 | − | GAGACGAGCUUUUUCCU | 17 | 986 |
| HSV1-UL19-1640 | + | AAAGUCAUCAACCAGCU | 17 | 2026 |
| HSV1-UL19-1647 | + | CAUUAGGUGAUUCAGCU | 17 | 2033 |
| HSV1-UL19-767 | − | CUGACCGGCCCGGAGCU | 17 | 1153 |
| HSV1-UL19-731 | − | GCCCGGGGCCUGGAGCU | 17 | 1117 |
| HSV1-UL19-1461 | + | GAAGCUUCGCUUUAGCU | 17 | 1847 |
| HSV1-UL19-1696 | + | UCCGUCACGGGGUCGCU | 17 | 2082 |
| HSV1-UL19-1672 | + | CCGCGGCGUCCGCGGCU | 17 | 2058 |
| HSV1-UL19-1788 | + | CACGUUCGCGCGCGGCU | 17 | 2174 |
| HSV1-UL19-1817 | + | GAACACGGGGACGGGCU | 17 | 2203 |
| HSV1-UL19-1731 | + | GGUAUGGUCCAGAUGCU | 17 | 2117 |
| HSV1-UL19-828 | − | AACGGCGCUGCUCUGCU | 17 | 1214 |
| HSV1-UL19-849 | − | CUGGUCCCCCCGGCUCU | 17 | 1235 |
| HSV1-UL19-1504 | + | GCGCACGCGCGUCGUCU | 17 | 1890 |
| HSV1-UL19-868 | − | UGAGAACGUGCUGUUCU | 17 | 1254 |
| HSV1-UL19-1904 | + | GAGAUACUGCGCGAAGU | 17 | 2290 |
| HSV1-UL19-1766 | + | GAUCGACGAAAAGUAGU | 17 | 2152 |
| HSV1-UL19-1511 | + | CAGGGGGUAGGGAACGU | 17 | 1897 |
| HSV1-UL19-1588 | + | CCCCGGCAGCUCCACGU | 17 | 1974 |
| HSV1-UL19-1490 | + | GUACGUCACCGGCACGU | 17 | 1876 |
| HSV1-UL19-634 | − | CGAAGUCUGGACGACGU | 17 | 1020 |
| HSV1-UL19-1835 | + | GCGGAAGUAGUUGACGU | 17 | 2221 |
| HSV1-UL19-951 | − | CUUUAAGUUCUUUACGU | 17 | 1337 |
| HSV1-UL19-940 | − | GGCCACGGCCAACCCGU | 17 | 1326 |
| HSV1-UL19-1574 | + | CCAUCGGACCCGCCCGU | 17 | 1960 |
| HSV1-UL19-1720 | + | GGUGUUGGCGCCCGCGU | 17 | 2106 |
| HSV1-UL19-1772 | + | CCCCGCCAUGAGCGCGU | 17 | 2158 |
| HSV1-UL19-1902 | + | GUGGGUCUCCCGCGCGU | 17 | 2288 |
| HSV1-UL19-869 | − | GUUCUCGGAGCGCGCGU | 17 | 1255 |
| HSV1-UL19-887 | − | AACGUGGACCUGGGCGU | 17 | 1273 |
| HSV1-UL19-1493 | + | GAGCGCCGUGACCAGGU | 17 | 1879 |
| HSV1-UL19-1583 | + | CAGCUCAAGAGCCAGGU | 17 | 1969 |
| HSV1-UL19-1630 | + | AAGGUCUCCCCCGAGGU | 17 | 2016 |
| HSV1-UL19-672 | − | AACGUUGACGCGGCGGU | 17 | 1058 |
| HSV1-UL19-1857 | + | CUGCGACGCCCACGGGU | 17 | 2243 |
| HSV1-UL19-1888 | + | GGCGCAGGUGAGCGGGU | 17 | 2274 |
| HSV1-UL19-1513 | + | GGCGCCCACCAGGGGGU | 17 | 1899 |
| HSV1-UL19-735 | − | GGCCUGGAGCUGGGGGU | 17 | 1121 |
| HSV1-UL19-649 | − | GUUCCCUACCCCCUGGU | 17 | 1035 |
| HSV1-UL19-1445 | + | CACGUGCAGCAUCUGGU | 17 | 1831 |
| HSV1-UL19-1745 | + | CGCGUUCGCCACGUGGU | 17 | 2131 |
| HSV1-UL19-1861 | + | GGCCCCGUUGAGGUGGU | 17 | 2247 |
| HSV1-UL19-1800 | + | GGGAAGGUUGCCCAUGU | 17 | 2186 |
| HSV1-UL19-1725 | + | GUCGAAUAUGCGCAUGU | 17 | 2111 |
| HSV1-UL19-1869 | + | AUGUUUGGCGGCGAUGU | 17 | 2255 |
| HSV1-UL19-1781 | + | UCACAAAGCGGUCCUGU | 17 | 2167 |
| HSV1-UL19-3215 | + | CGUUGCGAGCGAGCUGU | 17 | 7814 |
| HSV1-UL19-1767 | + | GCUGCACGACGGGCUGU | 17 | 2153 |
| HSV1-UL19-1711 | + | CAUGGCGUUGACCGUGU | 17 | 2097 |
| HSV1-UL19-1478 | + | CGGCCGCCCGCGCGUGU | 17 | 1864 |
| HSV1-UL19-773 | − | GCUGCCACCCCUCGUGU | 17 | 1159 |
| HSV1-UL19-1721 | + | GGUGGUGGACGCGGUGU | 17 | 2107 |
| HSV1-UL19-1582 | + | AGCCAGGUUGGCGUUGU | 17 | 1968 |
| HSV1-UL19-1716 | + | GCGUUCGGCCAUGUUGU | 17 | 2102 |
| HSV1-UL19-699 | − | GCGUUCGACUUCUUUGU | 17 | 1085 |
| HSV1-UL19-1747 | + | AGGGCCGGGGGGAAAUU | 17 | 2133 |
| HSV1-UL19-1648 | + | GCGCCGGGUCUCGCAUU | 17 | 2034 |
| HSV1-UL19-3233 | − | CCGCCCCGCCCUUCCUU | 17 | 7832 |
| HSV1-UL19-1489 | + | CACCGGCACGUCGGCUU | 17 | 1875 |
| HSV1-UL19-1718 | + | CAGCGCCGUUGUGCGUU | 17 | 2104 |
| HSV1-UL19-956 | − | GAUCGUGGAGACGGGUU | 17 | 1342 |
| HSV1-UL19-865 | − | GGCCUCCAUCCCGGGUU | 17 | 1251 |
| HSV1-UL19-1871 | + | CUCCAGGCAGCGAUGUU | 17 | 2257 |
| HSV1-UL19-908 | − | CAGCCCGUCCCCGUGUU | 17 | 1294 |
| HSV1-UL19-1735 | + | AAAAAUAGUCGCCAUUU | 17 | 2121 |
| HSV1-UL19-1804 | + | GGCCCAGGUAAAAGUUU | 17 | 2190 |
| HSV1-UL19-866 | − | GCCUCCAUCCCGGGUUU | 17 | 1252 |
| HSV1-UL19-1803 | + | GCCCAGGUAAAAGUUUU | 17 | 2189 |
| HSV1-UL19-661 | − | CCCGCCAGCUGUUUUUU | 17 | 1047 |
| HSV1-UL19-662 | − | CCGCCAGCUGUUUUUUU | 17 | 1048 |
| HSV1-UL19-445 | − | CUGGACCAUACCAUCCAAAA | 20 | 831 |
| HSV1-UL19-195 | − | GCUGCACGUGCUGCUGGAAA | 20 | 581 |
| HSV1-UL19-434 | − | CAACAUGGCCGAACGCACAA | 20 | 820 |
| HSV1-UL19-425 | − | GUCAACGCCAUGUUUCACAA | 20 | 811 |
| HSV1-UL19-198 | − | AUGCAACGAUACCUGGACAA | 20 | 584 |
| HSV1-UL19-574 | − | CUCCUCCGCAGUGCCCGCAA | 20 | 960 |
| HSV1-UL19-554 | − | AACGGGGCCUACCACCUCAA | 20 | 940 |
| HSV1-UL19-580 | − | UAUGACGCAUCCCCGCUCAA | 20 | 966 |
| HSV1-UL19-1087 | + | CGUCAACGUUCAUCAGCGAA | 20 | 1473 |
| HSV1-UL19-1150 | + | GUCGUCGAACGCCCCGCGAA | 20 | 1536 |
| HSV1-UL19-262 | − | UGUUCAAUCCGGUCAUGGAA | 20 | 648 |
| HSV1-UL19-231 | − | UACGGCGAGAUGGUCCUGAA | 20 | 617 |
| HSV1-UL19-327 | − | GCCACCUGGCGCGUGGUGAA | 20 | 713 |
| HSV1-UL19-551 | − | UACGGGGACCUGCUCUAUAA | 20 | 937 |
| HSV1-UL19-1245 | + | CACGCGCCCGUUGUGAAACA | 20 | 1631 |
| HSV1-UL19-433 | − | GCAGGUGCUGGCCCACAACA | 20 | 819 |
| HSV1-UL19-424 | − | GGCCAAUCUGGUGGCCAACA | 20 | 810 |
| HSV1-UL19-415 | − | AUACGCCACCCUGCAGAACA | 20 | 801 |
| HSV1-UL19-1356 | + | CACCUGGGCGCACCCGAACA | 20 | 1742 |
| HSV1-UL19-1362 | + | GGUGGCGAUAAACUCACACA | 20 | 1748 |
| HSV1-UL19-1419 | + | GCCUCCUGAAACAGGCCACA | 20 | 1805 |
| HSV1-UL19-1085 | + | CAUCAGCGAAGGGUGGCACA | 20 | 1471 |
| HSV1-UL19-497 | − | CCGCAACCCCGUCACCGACA | 20 | 883 |
| HSV1-UL19-1367 | + | GUAGUUGACGUCGGUCGACA | 20 | 1753 |
| HSV1-UL19-536 | − | GGGCGUUUACGCGGGGGACA | 20 | 922 |
| HSV1-UL19-350 | − | CUGCUGCAGGCCGCCAUACA | 20 | 736 |
| HSV1-UL19-1198 | + | GUUACAUGCCGCCGCGUACA | 20 | 1584 |
| HSV1-UL19-1345 | + | GACCGCGUUCCGCAGGUACA | 20 | 1731 |
| HSV1-UL19-1168 | + | CGCCACCAGGUCCCGGUACA | 20 | 1554 |
| HSV1-UL19-1049 | + | CAGGUCCAUGGCGCCCACCA | 20 | 1435 |
| HSV1-UL19-201 | − | CAACGGCCGCCUGGCCACCA | 20 | 587 |
| HSV1-UL19-217 | − | CUGGCUCGUGGACCUCACCA | 20 | 603 |
| HSV1-UL19-541 | − | ACCGCCCUCAUGUACGACCA | 20 | 927 |
| HSV1-UL19-992 | + | UCGCUUUAGCUCGGCGACCA | 20 | 1378 |
| HSV1-UL19-1292 | + | CCCCAGAGCCGGGGGGACCA | 20 | 1678 |
| HSV1-UL19-522 | − | CGGCGCGCAGGGAUGGACCA | 20 | 908 |
| HSV1-UL19-1392 | + | GAAAAUCGCUGCGACGCCCA | 20 | 1778 |
| HSV1-UL19-1055 | + | GACCGGAUUGAACAGGCCCA | 20 | 1441 |
| HSV1-UL19-295 | − | UGGGGGCAGCGCCUGGCCCA | 20 | 681 |
| HSV1-UL19-982 | + | CAUCGGCAACAACAAAGCCA | 20 | 1368 |
| HSV1-UL19-343 | − | GGGGGUGGGACGCCACGCCA | 20 | 729 |
| HSV1-UL19-1134 | + | CGCCGCCGGACAUAGCGCCA | 20 | 1520 |
| HSV1-UL19-257 | − | CUACCCCCUGGUGGGCGCCA | 20 | 643 |
| HSV1-UL19-1307 | + | GAGCUGAUGAUGCAAGGCCA | 20 | 1693 |
| HSV1-UL19-1006 | + | CGUCAGACGGGGCACGGCCA | 20 | 1392 |
| HSV1-UL19-545 | − | GUCCCGGGCCUUCGCGGCCA | 20 | 931 |
| HSV1-UL19-1157 | + | CUGGACCACGAGCCGGGCCA | 20 | 1543 |
| HSV1-UL19-1142 | + | GGCGAUGGUGGCGGGGGCCA | 20 | 1528 |
| HSV1-UL19-1171 | + | GUCAUCAACCAGCUGGGCCA | 20 | 1557 |
| HSV1-UL19-496 | − | CUACACCGCCGUCGUGGCCA | 20 | 882 |
| HSV1-UL19-1040 | + | GGCGUAGAUGCGCUUCUCCA | 20 | 1426 |
| HSV1-UL19-1051 | + | CAGGACGAACGUCAGGUCCA | 20 | 1437 |
| HSV1-UL19-1190 | + | GCAGUCGCGAUGGCGGUCCA | 20 | 1576 |
| HSV1-UL19-565 | − | GACGGGUUCGGCGGUGUCCA | 20 | 951 |
| HSV1-UL19-1400 | + | GACGUAAAGAACUUAAAGCA | 20 | 1786 |
| HSV1-UL19-1248 | + | CAGCACCUGCAGCGUGAGCA | 20 | 1634 |
| HSV1-UL19-520 | − | CCCAGGUGCCGCGGCGCGCA | 20 | 906 |
| HSV1-UL19-1287 | + | CUGCCGCGACAGGUCGCGCA | 20 | 1673 |
| HSV1-UL19-1028 | + | CACGUCGUCCAGACUUCGCA | 20 | 1414 |
| HSV1-UL19-193 | − | CGGGGCGUUUGAGCGCGGCA | 20 | 579 |
| HSV1-UL19-1007 | + | GGCAUGCGUCAGACGGGGCA | 20 | 1393 |
| HSV1-UL19-238 | − | CACGGCGCUCGUGAUGGGCA | 20 | 624 |
| HSV1-UL19-208 | − | GACGAGCUUUUUCCUGGGCA | 20 | 594 |
| HSV1-UL19-1308 | + | CGUCUUGAGCUGAUGAUGCA | 20 | 1694 |
| HSV1-UL19-1220 | + | CGGGACCACCAUGUUCUGCA | 20 | 1606 |
| HSV1-UL19-363 | − | AGACCUUCCCGAGGAGUGCA | 20 | 749 |
| HSV1-UL19-1239 | + | CACCAGAUUGGCCGGGUGCA | 20 | 1625 |
| HSV1-UL19-1211 | + | GUAGUAAAUCUUGUGGUGCA | 20 | 1597 |
| HSV1-UL19-1371 | + | GCGCGUCCCCGGGGGUUGCA | 20 | 1757 |
| HSV1-UL19-1188 | + | CAGGGCCGCGCGCCGCAUCA | 20 | 1574 |
| HSV1-UL19-579 | − | CUAUGACGCAUCCCCGCUCA | 20 | 965 |
| HSV1-UL19-463 | − | CGCGCUGACCUACGCGCUCA | 20 | 849 |
| HSV1-UL19-1233 | + | GGGGUGCGCGGGGUCCGUCA | 20 | 1619 |
| HSV1-UL19-1175 | + | GCCCAGCUCCGGGCCGGUCA | 20 | 1561 |
| HSV1-UL19-261 | − | GGGCCUGUUCAAUCCGGUCA | 20 | 647 |
| HSV1-UL19-235 | − | GAACGGGGCCAACCUGGUCA | 20 | 621 |
| HSV1-UL19-468 | − | CUUGCAUCAUCAGCUCAAGA | 20 | 854 |
| HSV1-UL19-1010 | + | GCGUGUCGGCAUGCGUCAGA | 20 | 1396 |
| HSV1-UL19-1215 | + | GCAGCAGCGGCCCCGCGAGA | 20 | 1601 |
| HSV1-UL19-230 | − | GCCGGUGACGUACGGCGAGA | 20 | 616 |
| HSV1-UL19-1342 | + | CUGCCGCGUUGUCCAGGAGA | 20 | 1728 |
| HSV1-UL19-561 | − | GGAGCGCCUGAUCGUGGAGA | 20 | 947 |
| HSV1-UL19-395 | − | GCGGACUUCAACCGCAACGA | 20 | 781 |
| HSV1-UL19-1186 | + | GGCGUCACAGUCCCACACGA | 20 | 1572 |
| HSV1-UL19-1326 | + | GACGGUUGCCGUGGCCACGA | 20 | 1712 |
| HSV1-UL19-1302 | + | CUCGCGGACGUGCUGCACGA | 20 | 1688 |
| HSV1-UL19-1313 | + | AAAGCGGUCCUGUCGGACGA | 20 | 1699 |
| HSV1-UL19-1039 | + | AAAGACCAGCUUCUCGCCGA | 20 | 1425 |
| HSV1-UL19-299 | − | UGGCCCACGGGCGGGUCCGA | 20 | 685 |
| HSV1-UL19-1088 | + | GCGUCAACGUUCAUCAGCGA | 20 | 1474 |
| HSV1-UL19-1388 | + | CGGGUUGGCCGUGGCCGCGA | 20 | 1774 |
| HSV1-UL19-1193 | + | CGCUAACCCGGCAGUCGCGA | 20 | 1579 |
| HSV1-UL19-1148 | + | CGCCCCGCGAACGGCGGCGA | 20 | 1534 |
| HSV1-UL19-999 | + | GUCCACGAGCCAGGCCUCGA | 20 | 1385 |
| HSV1-UL19-223 | − | ACGCGCGGGCGGCCGGUCGA | 20 | 609 |
| HSV1-UL19-439 | − | ACCAACAUGCGCAUAUUCGA | 20 | 825 |
| HSV1-UL19-1093 | + | GUACGGAUUGGCGGCUUCGA | 20 | 1479 |
| HSV1-UL19-538 | − | GUUUACGCGGGGGACAAGGA | 20 | 924 |
| HSV1-UL19-1020 | + | GGUGUCCUCCACUUUCAGGA | 20 | 1406 |
| HSV1-UL19-976 | + | GCGCUCAAACGCCCCGAGGA | 20 | 1362 |
| HSV1-UL19-1429 | + | GUUGCGGGCACUGCGGAGGA | 20 | 1815 |
| HSV1-UL19-1004 | + | AGACGGGGCACGGCCACGGA | 20 | 1390 |
| HSV1-UL19-302 | − | CGGGUCCGAUGGGUCGCGGA | 20 | 688 |
| HSV1-UL19-1328 | + | GUCGGUGACGGGGUUGCGGA | 20 | 1714 |
| HSV1-UL19-521 | − | GGUGCCGCGGCGCGCAGGGA | 20 | 907 |
| HSV1-UL19-1310 | + | CGGUGAACCCAAACCCGGGA | 20 | 1696 |
| HSV1-UL19-1385 | + | GUGGCCGCGAAGGCCCGGGA | 20 | 1771 |
| HSV1-UL19-1075 | + | AAACAGCUGGCGGGGCGGGA | 20 | 1461 |
| HSV1-UL19-1165 | + | CGGCCAUGCACUCCUCGGGA | 20 | 1551 |
| HSV1-UL19-1353 | + | GGCGCACCCGAACACGGGGA | 20 | 1739 |
| HSV1-UL19-1271 | + | GAACAGCGCGUGGACGGGGA | 20 | 1657 |
| HSV1-UL19-272 | − | CCAGCUGUUUUUUUGGGGGA | 20 | 658 |
| HSV1-UL19-1334 | + | CCAGGUAAAAGUUUUGGGGA | 20 | 1720 |
| HSV1-UL19-429 | − | AACGGGCGCGUGGUAGUGGA | 20 | 815 |
| HSV1-UL19-1275 | + | CCCGGCGAACAGCGCGUGGA | 20 | 1661 |
| HSV1-UL19-3212 | + | GUUGCGAGCGAGCUGUUGGA | 20 | 7811 |
| HSV1-UL19-1267 | + | AAAAUAGUCGCCAUUUUGGA | 20 | 1653 |
| HSV1-UL19-1380 | + | CUGGCCGUGGUCGUACAUGA | 20 | 1766 |
| HSV1-UL19-443 | − | GCACGCCGGAAUCCUGCUGA | 20 | 829 |
| HSV1-UL19-407 | − | CAAGAUUUACUACUACGUGA | 20 | 793 |
| HSV1-UL19-420 | − | GUGCCCCAGCGACCCCGUGA | 20 | 806 |
| HSV1-UL19-236 | − | CCUGGUCACGGCGCUCGUGA | 20 | 622 |
| HSV1-UL19-1332 | + | AAGGUUGCCCAUGUCGGUGA | 20 | 1718 |
| HSV1-UL19-229 | − | GCCGACGUGCCGGUGACGUA | 20 | 615 |
| HSV1-UL19-1096 | + | GCCGCCACGUACGCCCCGUA | 20 | 1482 |
| HSV1-UL19-283 | − | GUCGAAGCCGCCAAUCCGUA | 20 | 669 |
| HSV1-UL19-548 | − | GCGUCGCAGCGAUUUUCGUA | 20 | 934 |
| HSV1-UL19-1045 | + | AUGGCGCCCACCAGGGGGUA | 20 | 1431 |
| HSV1-UL19-1266 | + | AGUCGCCAUUUUGGAUGGUA | 20 | 1652 |
| HSV1-UL19-1156 | + | GACGUGCUCGCUGCCGUGUA | 20 | 1542 |
| HSV1-UL19-1089 | + | CUUCGACGGGGUCGCGGUUA | 20 | 1475 |
| HSV1-UL19-483 | − | CAGGUGGCCCGGCACGAAAC | 20 | 869 |
| HSV1-UL19-1420 | + | GCGGGUAGGCCUCCUGAAAC | 20 | 1806 |
| HSV1-UL19-426 | − | UCAACGCCAUGUUUCACAAC | 20 | 812 |
| HSV1-UL19-575 | − | UCCUCCGCAGUGCCCGCAAC | 20 | 961 |
| HSV1-UL19-40 | + | GCUGUUGGAUGGCGCGCAAC | 20 | 421 |
| HSV1-UL19-555 | − | ACGGGGCCUACCACCUCAAC | 20 | 941 |
| HSV1-UL19-245 | − | AGGAGCAGCUCGACCUGAAC | 20 | 631 |
| HSV1-UL19-232 | − | ACGGCGAGAUGGUCCUGAAC | 20 | 618 |
| HSV1-UL19-1057 | + | GUUCCAUGACCGGAUUGAAC | 20 | 1443 |
| HSV1-UL19-552 | − | ACGGGGACCUGCUCUAUAAC | 20 | 938 |
| HSV1-UL19-1355 | + | ACCUGGGCGCACCCGAACAC | 20 | 1741 |
| HSV1-UL19-1418 | + | CCUCCUGAAACAGGCCACAC | 20 | 1804 |
| HSV1-UL19-1366 | + | UAGUUGACGUCGGUCGACAC | 20 | 1752 |
| HSV1-UL19-1197 | + | UUACAUGCCGCCGCGUACAC | 20 | 1583 |
| HSV1-UL19-1391 | + | AAAAUCGCUGCGACGCCCAC | 20 | 1777 |
| HSV1-UL19-296 | − | GGGGGCAGCGCCUGGCCCAC | 20 | 682 |
| HSV1-UL19-1306 | + | AGCUGAUGAUGCAAGGCCAC | 20 | 1692 |
| HSV1-UL19-1398 | + | UUAAAGCAGGGGCUGAGCAC | 20 | 1784 |
| HSV1-UL19-400 | − | CCGCGGAUGACCGGCCGCAC | 20 | 786 |
| HSV1-UL19-1161 | + | UCCAGUAGCUGGUGAUGCAC | 20 | 1547 |
| HSV1-UL19-1024 | + | ACCAUCUCGCCGUACGUCAC | 20 | 1410 |
| HSV1-UL19-1232 | + | GGGUGCGCGGGGUCCGUCAC | 20 | 1618 |
| HSV1-UL19-469 | − | UUGCAUCAUCAGCUCAAGAC | 20 | 855 |
| HSV1-UL19-1009 | + | CGUGUCGGCAUGCGUCAGAC | 20 | 1395 |
| HSV1-UL19-1084 | + | CGAUCGCGUGUUCCAGAGAC | 20 | 1470 |
| HSV1-UL19-562 | − | GAGCGCCUGAUCGUGGAGAC | 20 | 948 |
| HSV1-UL19-1301 | + | UCGCGGACGUGCUGCACGAC | 20 | 1687 |
| HSV1-UL19-474 | − | UGGGUUCACCGUCGUCCGAC | 20 | 860 |
| HSV1-UL19-1289 | + | CCAGGGGGACCUGCCGCGAC | 20 | 1675 |
| HSV1-UL19-1012 | + | GUGACGAGCACCCCGUCGAC | 20 | 1398 |
| HSV1-UL19-224 | − | CGCGCGGGCGGCCGGUCGAC | 20 | 610 |
| HSV1-UL19-440 | − | CCAACAUGCGCAUAUUCGAC | 20 | 826 |
| HSV1-UL19-1092 | + | UACGGAUUGGCGGCUUCGAC | 20 | 1478 |
| HSV1-UL19-406 | − | GGCCGCACCGGGGGGCGGAC | 20 | 792 |
| HSV1-UL19-581 | − | CGCAUCCCCGCUCAAGGGAC | 20 | 967 |
| HSV1-UL19-1384 | + | UGGCCGCGAAGGCCCGGGAC | 20 | 1770 |
| HSV1-UL19-1352 | + | GCGCACCCGAACACGGGGAC | 20 | 1738 |
| HSV1-UL19-430 | − | ACGGGCGCGUGGUAGUGGAC | 20 | 816 |
| HSV1-UL19-1274 | + | CCGGCGAACAGCGCGUGGAC | 20 | 1660 |
| HSV1-UL19-1058 | + | GCGGCAAACCGUUCCAUGAC | 20 | 1444 |
| HSV1-UL19-399 | − | CCGCGGACGCCGCGGAUGAC | 20 | 785 |
| HSV1-UL19-371 | − | GUUGAUGACUUUACCCUGAC | 20 | 757 |
| HSV1-UL19-1331 | + | AGGUUGCCCAUGUCGGUGAC | 20 | 1717 |
| HSV1-UL19-354 | − | UCCAGUGCAUCACCAGCUAC | 20 | 740 |
| HSV1-UL19-284 | − | UCGAAGCCGCCAAUCCGUAC | 20 | 670 |
| HSV1-UL19-549 | − | CGUCGCAGCGAUUUUCGUAC | 20 | 935 |
| HSV1-UL19-364 | − | AGGAGUGCAUGGCCGUGUAC | 20 | 750 |
| HSV1-UL19-1312 | + | GACGACGGUGAACCCAAACC | 20 | 1698 |
| HSV1-UL19-304 | − | GCAGCCCGACAACGCCAACC | 20 | 690 |
| HSV1-UL19-234 | − | GGUCCUGAACGGGGCCAACC | 20 | 620 |
| HSV1-UL19-1194 | + | CGUGGCCCCCCGCGCUAACC | 20 | 1580 |
| HSV1-UL19-1050 | + | UCAGGUCCAUGGCGCCCACC | 20 | 1436 |
| HSV1-UL19-1170 | + | GGGCCUCGACGUGCGCCACC | 20 | 1556 |
| HSV1-UL19-325 | − | CGGGGGAGAUCCAGGCCACC | 20 | 711 |
| HSV1-UL19-267 | − | AGUCCCCGCCCCCGGCCACC | 20 | 653 |
| HSV1-UL19-1318 | + | CAGUUUCGUGCCGGGCCACC | 20 | 1704 |
| HSV1-UL19-200 | − | ACAACGGCCGCCUGGCCACC | 20 | 586 |
| HSV1-UL19-1083 | + | CCAGAGACAGGCGCAGCACC | 20 | 1469 |
| HSV1-UL19-401 | − | CGCGGAUGACCGGCCGCACC | 20 | 787 |
| HSV1-UL19-1358 | + | UCCCUGCGCGCCGCGGCACC | 20 | 1744 |
| HSV1-UL19-421 | − | CCCCGCGCACCCCCUGCACC | 20 | 807 |
| HSV1-UL19-378 | − | GAAUCACCUAAUGCGAGACC | 20 | 764 |
| HSV1-UL19-993 | + | UUCGCUUUAGCUCGGCGACC | 20 | 1379 |
| HSV1-UL19-366 | − | CAUGGCCGUGUACCGGGACC | 20 | 752 |
| HSV1-UL19-1293 | + | CCCCCAGAGCCGGGGGGACC | 20 | 1679 |
| HSV1-UL19-491 | − | GCCGCGCGCGAACGUGGACC | 20 | 877 |
| HSV1-UL19-1027 | + | CCAUCACGAGCGCCGUGACC | 20 | 1413 |
| HSV1-UL19-197 | − | GUUGCCGAUGCAACGAUACC | 20 | 583 |
| HSV1-UL19-347 | − | GUUCGACGACCGCAACUACC | 20 | 733 |
| HSV1-UL19-365 | − | GGAGUGCAUGGCCGUGUACC | 20 | 751 |
| HSV1-UL19-499 | − | CCUUCCCCAAAACUUUUACC | 20 | 885 |
| HSV1-UL19-1311 | + | ACGACGGUGAACCCAAACCC | 20 | 1697 |
| HSV1-UL19-396 | − | CCAGCUGCUGCACAACACCC | 20 | 782 |
| HSV1-UL19-989 | + | CAGGGUCGCCCGGGCCACCC | 20 | 1375 |
| HSV1-UL19-1416 | + | UCCACGAGUUCGCGGCACCC | 20 | 1802 |
| HSV1-UL19-205 | − | CAGGGUGGCCCGGGCGACCC | 20 | 591 |
| HSV1-UL19-303 | − | CGCGGAAGGCCAGAUGACCC | 20 | 689 |
| HSV1-UL19-525 | − | UCCGCCGGCCCUGCAACCCC | 20 | 911 |
| HSV1-UL19-1415 | + | CCACGAGUUCGCGGCACCCC | 20 | 1801 |
| HSV1-UL19-526 | − | CCGCCGGCCCUGCAACCCCC | 20 | 912 |
| HSV1-UL19-254 | − | CACCAACGUUCCCUACCCCC | 20 | 640 |
| HSV1-UL19-1122 | + | GCCGGGGGAACGUCCCCCCC | 20 | 1508 |
| HSV1-UL19-567 | − | GUACAGUUUAAGCGCCCCCC | 20 | 953 |
| HSV1-UL19-1210 | + | GCACGGUCCAGUCCGCCCCC | 20 | 1596 |
| HSV1-UL19-566 | − | CGUACAGUUUAAGCGCCCCC | 20 | 952 |
| HSV1-UL19-1105 | + | GUGGGCCAGGCGCUGCCCCC | 20 | 1491 |
| HSV1-UL19-1128 | + | AGGUGGCCUGGAUCUCCCCC | 20 | 1514 |
| HSV1-UL19-453 | − | CCUGUCGCGGCAGGUCCCCC | 20 | 839 |
| HSV1-UL19-454 | − | GCAGGUCCCCCUGGUCCCCC | 20 | 840 |
| HSV1-UL19-450 | − | GAACGCGCCCAAUUUCCCCC | 20 | 836 |
| HSV1-UL19-1378 | + | GUCCCCCGCGUAAACGCCCC | 20 | 1764 |
| HSV1-UL19-266 | − | GGGGACCUAGUCCCCGCCCC | 20 | 652 |
| HSV1-UL19-196 | − | GCUGGAAAAGGCGCCGCCCC | 20 | 582 |
| HSV1-UL19-418 | − | GUGGUCCCGGAGAUCGCCCC | 20 | 804 |
| HSV1-UL19-1138 | + | CACCCCCAGCUCCAGGCCCC | 20 | 1524 |
| HSV1-UL19-1348 | + | GGACGGGCUGGGCCGGCCCC | 20 | 1734 |
| HSV1-UL19-258 | − | CCUGACGUUCGUCCUGCCCC | 20 | 644 |
| HSV1-UL19-328 | − | GGUGAACGGCAACUUGCCCC | 20 | 714 |
| HSV1-UL19-1129 | + | CAGGUGGCCUGGAUCUCCCC | 20 | 1515 |
| HSV1-UL19-1375 | + | GCCCCCGGCGGCGCGUCCCC | 20 | 1761 |
| HSV1-UL19-318 | − | GCCGGGGGGGGACGUUCCCC | 20 | 704 |
| HSV1-UL19-1324 | + | CGGCGGUGUAGCCCACGCCC | 20 | 1710 |
| HSV1-UL19-334 | − | GGCGGCGUUCCGGGACGCCC | 20 | 720 |
| HSV1-UL19-351 | − | CGAGCACGUCUUCUGCGCCC | 20 | 737 |
| HSV1-UL19-517 | − | CCCCGUGUUCGGGUGCGCCC | 20 | 903 |
| HSV1-UL19-990 | + | CUCGGCGACCAGGGUCGCCC | 20 | 1376 |
| HSV1-UL19-1386 | + | GGCCGUGGCCGCGAAGGCCC | 20 | 1772 |
| HSV1-UL19-1056 | + | UGACCGGAUUGAACAGGCCC | 20 | 1442 |
| HSV1-UL19-1139 | + | CCACCCCCAGCUCCAGGCCC | 20 | 1525 |
| HSV1-UL19-369 | − | GGUGGCGCACGUCGAGGCCC | 20 | 755 |
| HSV1-UL19-253 | − | GCUGGUCUUUCUGGAGGCCC | 20 | 639 |
| HSV1-UL19-321 | − | GACGUUCCCCCGGCCGGCCC | 20 | 707 |
| HSV1-UL19-1338 | + | GAGGGGGAGCCCCGCGGCCC | 20 | 1724 |
| HSV1-UL19-383 | − | CCUGAUGCGGCGCGCGGCCC | 20 | 769 |
| HSV1-UL19-288 | − | CGGGGCGUACGUGGCGGCCC | 20 | 674 |
| HSV1-UL19-1277 | + | GUUCGCCACGUGGUCGGCCC | 20 | 1663 |
| HSV1-UL19-1316 | + | GGGCCACCUGGAGCUGGCCC | 20 | 1702 |
| HSV1-UL19-204 | − | CCUGGCCACCAGGGUGGCCC | 20 | 590 |
| HSV1-UL19-995 | + | GGCGGUGGCCCGCCUUGCCC | 20 | 1381 |
| HSV1-UL19-471 | − | UCAAGACGGGCCUCCAUCCC | 20 | 857 |
| HSV1-UL19-1304 | + | GUAGGUCAGCGCGUUCUCCC | 20 | 1690 |
| HSV1-UL19-543 | − | CGGCCAGAGCGACCCGUCCC | 20 | 929 |
| HSV1-UL19-1376 | + | CGCCCCCGGCGGCGCGUCCC | 20 | 1762 |
| HSV1-UL19-1060 | + | GGGGGCGGGGACUAGGUCCC | 20 | 1446 |
| HSV1-UL19-983 | + | GCAUCGGCAACAACAAAGCC | 20 | 1369 |
| HSV1-UL19-1117 | + | CGGGGUGCAGCUCAAGAGCC | 20 | 1503 |
| HSV1-UL19-1297 | + | AGUAGUUGGCCCCCAGAGCC | 20 | 1683 |
| HSV1-UL19-1159 | + | GAUGCACUGGACCACGAGCC | 20 | 1545 |
| HSV1-UL19-1000 | + | CGUGGUGAGGUCCACGAGCC | 20 | 1386 |
| HSV1-UL19-290 | − | AGCAGCUGUUUUUGAACGCC | 20 | 676 |
| HSV1-UL19-264 | − | AACGGUUUGCCGCGCACGCC | 20 | 650 |
| HSV1-UL19-333 | − | CGGCGGCGUUCCGGGACGCC | 20 | 719 |
| HSV1-UL19-511 | − | GGUCGUGGCGGGAAACCGCC | 20 | 897 |
| HSV1-UL19-1152 | + | GCAGCAGGUAAAACACCGCC | 20 | 1538 |
| HSV1-UL19-212 | − | GGGCAAGGCGGGCCACCGCC | 20 | 598 |
| HSV1-UL19-273 | − | UUUUUGGGGGAAGGACCGCC | 20 | 659 |
| HSV1-UL19-529 | − | ACCCCCGGGGACGCGCCGCC | 20 | 915 |
| HSV1-UL19-199 | − | AUACCUGGACAACGGCCGCC | 20 | 585 |
| HSV1-UL19-1182 | + | CGAGGGGUGGCAGCAGCGCC | 20 | 1568 |
| HSV1-UL19-294 | − | GAACGCCUGGGGGCAGCGCC | 20 | 680 |
| HSV1-UL19-1135 | + | ACGCCGCCGGACAUAGCGCC | 20 | 1521 |
| HSV1-UL19-1132 | + | GUUGCCGUUCACCACGCGCC | 20 | 1518 |
| HSV1-UL19-1226 | + | UCGCUGGGGCACUCCUCGCC | 20 | 1612 |
| HSV1-UL19-991 | + | GCUCGGCGACCAGGGUCGCC | 20 | 1377 |
| HSV1-UL19-447 | − | CCGUCCACGCGCUGUUCGCC | 20 | 833 |
| HSV1-UL19-1387 | + | UGGCCGUGGCCGCGAAGGCC | 20 | 1773 |
| HSV1-UL19-215 | − | GCCGGGAGGCCGUCGAGGCC | 20 | 601 |
| HSV1-UL19-523 | − | CGCAGGGAUGGACCACGGCC | 20 | 909 |
| HSV1-UL19-975 | + | CAAACGCCCCGAGGACGGCC | 20 | 1361 |
| HSV1-UL19-372 | − | UGACUUUACCCUGACCGGCC | 20 | 758 |
| HSV1-UL19-320 | − | GGACGUUCCCCCGGCCGGCC | 20 | 706 |
| HSV1-UL19-1125 | + | GGAUCUCCCCCGGGCCGGCC | 20 | 1511 |
| HSV1-UL19-1098 | + | UGUCUGCGGCGGGGCCGGCC | 20 | 1484 |
| HSV1-UL19-461 | − | ACGUCCGCGAGAGCGCGGCC | 20 | 847 |
| HSV1-UL19-1285 | + | GCGACAGGUCGCGCAGGGCC | 20 | 1671 |
| HSV1-UL19-1158 | + | ACUGGACCACGAGCCGGGCC | 20 | 1544 |
| HSV1-UL19-1203 | + | CGGCGUCCGCGGCUCGGGCC | 20 | 1589 |
| HSV1-UL19-336 | − | GUUCCGGGACGCCCGGGGCC | 20 | 722 |
| HSV1-UL19-1172 | + | AGUCAUCAACCAGCUGGGCC | 20 | 1558 |
| HSV1-UL19-1106 | + | AUCGGACCCGCCCGUGGGCC | 20 | 1492 |
| HSV1-UL19-352 | − | ACGUCUUCUGCGCCCUGGCC | 20 | 738 |
| HSV1-UL19-1130 | + | UCACCACGCGCCAGGUGGCC | 20 | 1516 |
| HSV1-UL19-482 | − | UGGGCCAGCUCCAGGUGGCC | 20 | 868 |
| HSV1-UL19-203 | − | GCCUGGCCACCAGGGUGGCC | 20 | 589 |
| HSV1-UL19-1067 | + | GCGCGGGGAUCCGGGUGGCC | 20 | 1453 |
| HSV1-UL19-987 | + | CCCGGGCCACCCUGGUGGCC | 20 | 1373 |
| HSV1-UL19-1241 | + | UGUUGGCCACCAGAUUGGCC | 20 | 1627 |
| HSV1-UL19-385 | − | GGACCGCCAUCGCGACUGCC | 20 | 771 |
| HSV1-UL19-312 | − | GUGGCCGACGUGGAGCUGCC | 20 | 698 |
| HSV1-UL19-559 | − | CGCCGCCAAACAUCGCUGCC | 20 | 945 |
| HSV1-UL19-1319 | + | CCCCCCGCCAGUUUCGUGCC | 20 | 1705 |
| HSV1-UL19-470 | − | CUCAAGACGGGCCUCCAUCC | 20 | 856 |
| HSV1-UL19-324 | − | GGCCGGCCCGGGGGAGAUCC | 20 | 710 |
| HSV1-UL19-1070 | + | GCGGGAAGGCGCGGGGAUCC | 20 | 1456 |
| HSV1-UL19-998 | + | GCCAGGCCUCGACGGCCUCC | 20 | 1384 |
| HSV1-UL19-1140 | + | GGCGUCCCACCCCCAGCUCC | 20 | 1526 |
| HSV1-UL19-1178 | + | GCGCCUGCCCGCCCAGCUCC | 20 | 1564 |
| HSV1-UL19-480 | − | GUACUUCCUGGGCCAGCUCC | 20 | 866 |
| HSV1-UL19-1405 | + | UCUCCACGAUCAGGCGCUCC | 20 | 1791 |
| HSV1-UL19-1112 | + | CGGGCUGCAUAAACUGCUCC | 20 | 1498 |
| HSV1-UL19-1222 | + | CCUCGCCGGGGGCGAUCUCC | 20 | 1608 |
| HSV1-UL19-504 | − | CCGCGGGGCUCCCCCUCUCC | 20 | 890 |
| HSV1-UL19-1041 | + | CGGCGUAGAUGCGCUUCUCC | 20 | 1427 |
| HSV1-UL19-3217 | − | ACAGCUCGCUCGCAACGUCC | 20 | 7816 |
| HSV1-UL19-542 | − | ACGGCCAGAGCGACCCGUCC | 20 | 928 |
| HSV1-UL19-1361 | + | UAAACUCACACACGGCGUCC | 20 | 1747 |
| HSV1-UL19-1137 | + | GCUCCAGGCCCCGGGCGUCC | 20 | 1523 |
| HSV1-UL19-1169 | + | CGACGUGCGCCACCAGGUCC | 20 | 1555 |
| HSV1-UL19-1191 | + | GGCAGUCGCGAUGGCGGUCC | 20 | 1577 |
| HSV1-UL19-417 | − | CCUGCAGAACAUGGUGGUCC | 20 | 803 |
| HSV1-UL19-985 | + | UGGCCAGGCGGCCGUUGUCC | 20 | 1371 |
| HSV1-UL19-1344 | + | ACACGGCUGCCGCGUUGUCC | 20 | 1730 |
| HSV1-UL19-478 | − | CGCGUCGGAGGCGUACUUCC | 20 | 864 |
| HSV1-UL19-332 | − | GCUAUGUCCGGCGGCGUUCC | 20 | 718 |
| HSV1-UL19-206 | − | CUGCGAGACGAGCUUUUUCC | 20 | 592 |
| HSV1-UL19-1401 | + | CGACGUAAAGAACUUAAAGC | 20 | 1787 |
| HSV1-UL19-250 | − | GGUGUCCAUCGGCGAGAAGC | 20 | 636 |
| HSV1-UL19-1081 | + | CCUUCCCCCAAAAAAACAGC | 20 | 1467 |
| HSV1-UL19-1174 | + | GGGUAAAGUCAUCAACCAGC | 20 | 1560 |
| HSV1-UL19-370 | − | CGUCGAGGCCCUGGCCCAGC | 20 | 756 |
| HSV1-UL19-1031 | + | GCUCCUCCUGCAUCUCCAGC | 20 | 1417 |
| HSV1-UL19-1201 | + | CCUGGGUGUUGUGCAGCAGC | 20 | 1587 |
| HSV1-UL19-1154 | + | CGUGUAUGGCGGCCUGCAGC | 20 | 1540 |
| HSV1-UL19-1260 | + | GAUGCUGGGGGGCCAUCAGC | 20 | 1646 |
| HSV1-UL19-1298 | + | AAGUAGUUGGCCCCCAGAGC | 20 | 1684 |
| HSV1-UL19-1393 | + | GGUAGGCCCCGUUAUAGAGC | 20 | 1779 |
| HSV1-UL19-1160 | + | UGAUGCACUGGACCACGAGC | 20 | 1546 |
| HSV1-UL19-373 | − | UACCCUGACCGGCCCGGAGC | 20 | 759 |
| HSV1-UL19-1317 | + | CGUGCCGGGCCACCUGGAGC | 20 | 1703 |
| HSV1-UL19-337 | − | GGACGCCCGGGGCCUGGAGC | 20 | 723 |
| HSV1-UL19-1422 | + | GGUCGCUGGCGCAGGUGAGC | 20 | 1808 |
| HSV1-UL19-1440 | + | ACAGAGCCAGUCCCUUGAGC | 20 | 1826 |
| HSV1-UL19-1162 | + | CCGCGUGUUGUUCCAGUAGC | 20 | 1548 |
| HSV1-UL19-1119 | + | CCCACAAAGAAGUCGAACGC | 20 | 1505 |
| HSV1-UL19-263 | − | GAACGGUUUGCCGCGCACGC | 20 | 649 |
| HSV1-UL19-442 | − | UUCGACGGGGCGUUGCACGC | 20 | 828 |
| HSV1-UL19-246 | − | CGACCUGAACCGGCAGACGC | 20 | 632 |
| HSV1-UL19-438 | − | UGCUCGGCGGCGCCCGACGC | 20 | 824 |
| HSV1-UL19-533 | − | GCCGCCGGGGGCGUUUACGC | 20 | 919 |
| HSV1-UL19-1153 | + | UGCAGCAGGUAAAACACCGC | 20 | 1539 |
| HSV1-UL19-211 | − | UGGGCAAGGCGGGCCACCGC | 20 | 597 |
| HSV1-UL19-412 | − | CGGGGCCGCUGCUGCACCGC | 20 | 798 |
| HSV1-UL19-1136 | + | CGGGCGUCCCGGAACGCCGC | 20 | 1522 |
| HSV1-UL19-528 | − | AACCCCCGGGGACGCGCCGC | 20 | 914 |
| HSV1-UL19-502 | − | AAAACUUUUACCUGGGCCGC | 20 | 888 |
| HSV1-UL19-524 | − | CCGACGUCAACUACUUCCGC | 20 | 910 |
| HSV1-UL19-1346 | + | CCGCCACGACCGCGUUCCGC | 20 | 1732 |
| HSV1-UL19-1183 | + | ACGAGGGGUGGCAGCAGCGC | 20 | 1569 |
| HSV1-UL19-387 | − | CGCGACUGCCGGGUUAGCGC | 20 | 773 |
| HSV1-UL19-220 | − | UGACGCAUGCCGACACGCGC | 20 | 606 |
| HSV1-UL19-578 | − | CAACGGGGAAGCCCACGCGC | 20 | 964 |
| HSV1-UL19-519 | − | GCCCAGGUGCCGCGGCGCGC | 20 | 905 |
| HSV1-UL19-1288 | + | CCUGCCGCGACAGGUCGCGC | 20 | 1674 |
| HSV1-UL19-1073 | + | CUGGCGGGGCGGGAAGGCGC | 20 | 1459 |
| HSV1-UL19-1424 | + | GAGGGCGGGGUCGCUGGCGC | 20 | 1810 |
| HSV1-UL19-1235 | + | GCCGGGUGCAGGGGGUGCGC | 20 | 1621 |
| HSV1-UL19-357 | − | GUUCGUGAACGACUACUCGC | 20 | 743 |
| HSV1-UL19-557 | − | CCACCUCAACGGGGCCUCGC | 20 | 943 |
| HSV1-UL19-1227 | + | GUCGCUGGGGCACUCCUCGC | 20 | 1613 |
| HSV1-UL19-409 | − | GAUGGUGCCCGCCUUCUCGC | 20 | 795 |
| HSV1-UL19-1411 | + | GCGCUUAAACUGUACGUCGC | 20 | 1797 |
| HSV1-UL19-1230 | + | GGGGUCCGUCACGGGGUCGC | 20 | 1616 |
| HSV1-UL19-1425 | + | GCGGAGGAGGGCGGGGUCGC | 20 | 1811 |
| HSV1-UL19-345 | − | CCACCAUCGCCGCCGUUCGC | 20 | 731 |
| HSV1-UL19-446 | − | CCCGUCCACGCGCUGUUCGC | 20 | 832 |
| HSV1-UL19-210 | − | AGCUUUUUCCUGGGCAAGGC | 20 | 596 |
| HSV1-UL19-1213 | + | CAGCGGCCCCGCGAGAAGGC | 20 | 1599 |
| HSV1-UL19-319 | − | GGGGGGGACGUUCCCCCGGC | 20 | 705 |
| HSV1-UL19-289 | − | GCGUACGUGGCGGCCCCGGC | 20 | 675 |
| HSV1-UL19-1126 | + | UGGAUCUCCCCCGGGCCGGC | 20 | 1512 |
| HSV1-UL19-1099 | + | AUGUCUGCGGCGGGGCCGGC | 20 | 1485 |
| HSV1-UL19-460 | − | CACGUCCGCGAGAGCGCGGC | 20 | 846 |
| HSV1-UL19-1322 | + | GGUCCACGUUCGCGCGCGGC | 20 | 1708 |
| HSV1-UL19-452 | − | CCUGCGCGACCUGUCGCGGC | 20 | 838 |
| HSV1-UL19-222 | − | UGCCGACACGCGCGGGCGGC | 20 | 608 |
| HSV1-UL19-1102 | + | AGCUGCUGCAUGUCUGCGGC | 20 | 1488 |
| HSV1-UL19-1208 | + | AGUCCGCCCCCCGGUGCGGC | 20 | 1594 |
| HSV1-UL19-1286 | + | CGCGACAGGUCGCGCAGGGC | 20 | 1672 |
| HSV1-UL19-1370 | + | GUCCCCGGGGGUUGCAGGGC | 20 | 1756 |
| HSV1-UL19-1427 | + | CGGGCACUGCGGAGGAGGGC | 20 | 1813 |
| HSV1-UL19-298 | − | GCAGCGCCUGGCCCACGGGC | 20 | 684 |
| HSV1-UL19-1351 | + | ACCCGAACACGGGGACGGGC | 20 | 1737 |
| HSV1-UL19-1127 | + | GGCCUGGAUCUCCCCCGGGC | 20 | 1513 |
| HSV1-UL19-1177 | + | CUGCCCGCCCAGCUCCGGGC | 20 | 1563 |
| HSV1-UL19-377 | − | CGGCCCGGAGCUGGGCGGGC | 20 | 763 |
| HSV1-UL19-1053 | + | GAUUGAACAGGCCCAGGGGC | 20 | 1439 |
| HSV1-UL19-1100 | + | CUGCAUGUCUGCGGCGGGGC | 20 | 1486 |
| HSV1-UL19-1076 | + | AAAAAAACAGCUGGCGGGGC | 20 | 1462 |
| HSV1-UL19-1063 | + | GGAUCCGGGUGGCCGGGGGC | 20 | 1449 |
| HSV1-UL19-514 | − | GGCGGGAAACCGCCUGGGGC | 20 | 900 |
| HSV1-UL19-376 | − | UGACCGGCCCGGAGCUGGGC | 20 | 762 |
| HSV1-UL19-1349 | + | AACACGGGGACGGGCUGGGC | 20 | 1735 |
| HSV1-UL19-1246 | + | ACCUGCAGCGUGAGCAUGGC | 20 | 1632 |
| HSV1-UL19-465 | − | CUGACCUACGCGCUCAUGGC | 20 | 851 |
| HSV1-UL19-485 | − | UGGCCCGGCACGAAACUGGC | 20 | 871 |
| HSV1-UL19-1079 | + | CCCCCAAAAAAACAGCUGGC | 20 | 1465 |
| HSV1-UL19-510 | − | CUGCGGAACGCGGUCGUGGC | 20 | 896 |
| HSV1-UL19-1068 | + | GGCGCGGGGAUCCGGGUGGC | 20 | 1454 |
| HSV1-UL19-1145 | + | CGAACGGCGGCGAUGGUGGC | 20 | 1531 |
| HSV1-UL19-1242 | + | GUGUUGGCCACCAGAUUGGC | 20 | 1628 |
| HSV1-UL19-1265 | + | GGAUGGUAUGGUCCAGAUGC | 20 | 1651 |
| HSV1-UL19-243 | − | CCGCCACCUGCUGGAGAUGC | 20 | 629 |
| HSV1-UL19-384 | − | UGGACCGCCAUCGCGACUGC | 20 | 770 |
| HSV1-UL19-1019 | + | CCACUUUCAGGAAGGACUGC | 20 | 1405 |
| HSV1-UL19-242 | − | CGACGUGGGCCGCCACCUGC | 20 | 628 |
| HSV1-UL19-311 | − | GGUGGCCGACGUGGAGCUGC | 20 | 697 |
| HSV1-UL19-431 | − | GCCCGCCAUGCUCACGCUGC | 20 | 817 |
| HSV1-UL19-349 | − | GGCGGUGUUUUACCUGCUGC | 20 | 735 |
| HSV1-UL19-194 | − | CCAGAUGCUGCACGUGCUGC | 20 | 580 |
| HSV1-UL19-1033 | + | CGAGCUCGUCCAGCGUCUGC | 20 | 1419 |
| HSV1-UL19-1221 | + | CCGGGACCACCAUGUUCUGC | 20 | 1607 |
| HSV1-UL19-228 | − | GGACACCGAAGCCGACGUGC | 20 | 614 |
| HSV1-UL19-1320 | + | CCCCCCCGCCAGUUUCGUGC | 20 | 1706 |
| HSV1-UL19-432 | − | CAUGCUCACGCUGCAGGUGC | 20 | 818 |
| HSV1-UL19-1240 | + | CCACCAGAUUGGCCGGGUGC | 20 | 1626 |
| HSV1-UL19-1433 | + | CGCGUGGGCUUCCCCGUUGC | 20 | 1819 |
| HSV1-UL19-1372 | + | GGCGCGUCCCCGGGGGUUGC | 20 | 1758 |
| HSV1-UL19-422 | − | CCCCCUGCACCCGGCCAAUC | 20 | 808 |
| HSV1-UL19-260 | − | GCCCCUGGGCCUGUUCAAUC | 20 | 646 |
| HSV1-UL19-444 | − | GCUGAUGGCCCCCCAGCAUC | 20 | 830 |
| HSV1-UL19-979 | + | CCAGCAGCACGUGCAGCAUC | 20 | 1365 |
| HSV1-UL19-1189 | + | CCAGGGCCGCGCGCCGCAUC | 20 | 1575 |
| HSV1-UL19-1110 | + | UAAACUGCUCCGGGGUCAUC | 20 | 1496 |
| HSV1-UL19-1406 | + | CCGAACCCGUCUCCACGAUC | 20 | 1792 |
| HSV1-UL19-276 | − | UGUCUCUGGAACACGCGAUC | 20 | 662 |
| HSV1-UL19-248 | − | GACGCGCGUGCGCGCGGAUC | 20 | 634 |
| HSV1-UL19-1071 | + | GGCGGGAAGGCGCGGGGAUC | 20 | 1457 |
| HSV1-UL19-1016 | + | GCAGGAGGCGCUGUUUGAUC | 20 | 1402 |
| HSV1-UL19-359 | − | CGUACGUCGUGACCUACCUC | 20 | 745 |
| HSV1-UL19-1166 | + | UACACGGCCAUGCACUCCUC | 20 | 1552 |
| HSV1-UL19-190 | − | GCAACGUCCAGGCCGUCCUC | 20 | 576 |
| HSV1-UL19-1179 | + | UGCGCCUGCCCGCCCAGCUC | 20 | 1565 |
| HSV1-UL19-1383 | + | AGGCCCGGGACGGGUCGCUC | 20 | 1769 |
| HSV1-UL19-455 | − | CCCCCUGGUCCCCCCGGCUC | 20 | 841 |
| HSV1-UL19-1204 | + | AUCCGCGGCGUCCGCGGCUC | 20 | 1590 |
| HSV1-UL19-1113 | + | UCGGGCUGCAUAAACUGCUC | 20 | 1499 |
| HSV1-UL19-1223 | + | UCCUCGCCGGGGGCGAUCUC | 20 | 1609 |
| HSV1-UL19-274 | − | CCAGGUGCUGCGCCUGUCUC | 20 | 660 |
| HSV1-UL19-239 | − | GGGCAAGGCCGUGCGAAGUC | 20 | 625 |
| HSV1-UL19-1052 | + | CCAGGGGCAGGACGAACGUC | 20 | 1438 |
| HSV1-UL19-1252 | + | GCGGUGUUGGCGCCCGCGUC | 20 | 1638 |
| HSV1-UL19-1038 | + | CCGCGCGCACGCGCGUCGUC | 20 | 1424 |
| HSV1-UL19-1176 | + | CGCCCAGCUCCGGGCCGGUC | 20 | 1562 |
| HSV1-UL19-280 | − | UGAACGUUGACGCGGCGGUC | 20 | 666 |
| HSV1-UL19-329 | − | CUUGCCCCUGGCGCUAUGUC | 20 | 715 |
| HSV1-UL19-1114 | + | AGAGCCAGGUUGGCGUUGUC | 20 | 1500 |
| HSV1-UL19-1259 | + | GGGGGCCAUCAGCAGGAUUC | 20 | 1645 |
| HSV1-UL19-1025 | + | UGACCAGGUUGGCCCCGUUC | 20 | 1411 |
| HSV1-UL19-331 | − | CGCUAUGUCCGGCGGCGUUC | 20 | 717 |
| HSV1-UL19-1032 | + | CGUCCAGCGUCUGCCGGUUC | 20 | 1418 |
| HSV1-UL19-516 | − | CCCAGCCCGUCCCCGUGUUC | 20 | 902 |
| HSV1-UL19-1021 | + | CUUCGGUGUCCUCCACUUUC | 20 | 1407 |
| HSV1-UL19-251 | − | CGGCGAGAAGCUGGUCUUUC | 20 | 637 |
| HSV1-UL19-572 | − | GGACCCGUGUGGCCUGUUUC | 20 | 958 |
| HSV1-UL19-1315 | + | GCACGUUCUCAGUCACAAAG | 20 | 1701 |
| HSV1-UL19-226 | − | CCUGCAGUCCUUCCUGAAAG | 20 | 612 |
| HSV1-UL19-1438 | + | AGACGAGAUACUGCGCGAAG | 20 | 1824 |
| HSV1-UL19-1048 | + | AGGUCCAUGGCGCCCACCAG | 20 | 1434 |
| HSV1-UL19-1291 | + | CCCAGAGCCGGGGGGACCAG | 20 | 1677 |
| HSV1-UL19-1054 | + | ACCGGAUUGAACAGGCCCAG | 20 | 1440 |
| HSV1-UL19-981 | + | AUCGGCAACAACAAAGCCAG | 20 | 1367 |
| HSV1-UL19-1133 | + | GCCGCCGGACAUAGCGCCAG | 20 | 1519 |
| HSV1-UL19-1399 | + | ACGUAAAGAACUUAAAGCAG | 20 | 1785 |
| HSV1-UL19-1216 | + | GAACCCCCGCGGUGCAGCAG | 20 | 1602 |
| HSV1-UL19-1238 | + | ACCAGAUUGGCCGGGUGCAG | 20 | 1624 |
| HSV1-UL19-1341 | + | UGCCGCGUUGUCCAGGAGAG | 20 | 1727 |
| HSV1-UL19-1185 | + | GCGUCACAGUCCCACACGAG | 20 | 1571 |
| HSV1-UL19-539 | − | UUUACGCGGGGGACAAGGAG | 20 | 925 |
| HSV1-UL19-1343 | + | GCUGCCGCGUUGUCCAGGAG | 20 | 1729 |
| HSV1-UL19-1270 | + | AACAGCGCGUGGACGGGGAG | 20 | 1656 |
| HSV1-UL19-1423 | + | GGGUCGCUGGCGCAGGUGAG | 20 | 1809 |
| HSV1-UL19-1441 | + | UACAGAGCCAGUCCCUUGAG | 20 | 1827 |
| HSV1-UL19-428 | − | UCACAACGGGCGCGUGGUAG | 20 | 814 |
| HSV1-UL19-505 | − | UCCCCCUCUCCUGGACAACG | 20 | 891 |
| HSV1-UL19-576 | − | CCUCCGCAGUGCCCGCAACG | 20 | 962 |
| HSV1-UL19-556 | − | CGGGGCCUACCACCUCAACG | 20 | 942 |
| HSV1-UL19-490 | − | CACCCAGCCGCGCGCGAACG | 20 | 876 |
| HSV1-UL19-1120 | + | CCCCACAAAGAAGUCGAACG | 20 | 1506 |
| HSV1-UL19-507 | − | AGCCGUGUACCUGCGGAACG | 20 | 893 |
| HSV1-UL19-233 | − | CGGCGAGAUGGUCCUGAACG | 20 | 619 |
| HSV1-UL19-553 | − | CGGGGACCUGCUCUAUAACG | 20 | 939 |
| HSV1-UL19-393 | − | GUACGCGGCGGCAUGUAACG | 20 | 779 |
| HSV1-UL19-355 | − | CCAGCUACUGGAACAACACG | 20 | 741 |
| HSV1-UL19-1354 | + | CCUGGGCGCACCCGAACACG | 20 | 1740 |
| HSV1-UL19-1187 | + | GGGCGUCACAGUCCCACACG | 20 | 1573 |
| HSV1-UL19-1365 | + | AGUUGACGUCGGUCGACACG | 20 | 1751 |
| HSV1-UL19-1196 | + | UACAUGCCGCCGCGUACACG | 20 | 1582 |
| HSV1-UL19-449 | − | GUUCGCCGGGGCCGACCACG | 20 | 835 |
| HSV1-UL19-1279 | + | AAUUGGGCGCGUUCGCCACG | 20 | 1665 |
| HSV1-UL19-1231 | + | GGUGCGCGGGGUCCGUCACG | 20 | 1617 |
| HSV1-UL19-1008 | + | GUGUCGGCAUGCGUCAGACG | 20 | 1394 |
| HSV1-UL19-240 | − | CGUGCGAAGUCUGGACGACG | 20 | 626 |
| HSV1-UL19-437 | − | CUGCUCGGCGGCGCCCGACG | 20 | 823 |
| HSV1-UL19-310 | − | CUUUGUGGGGGUGGCCGACG | 20 | 696 |
| HSV1-UL19-225 | − | GCGCGGGCGGCCGGUCGACG | 20 | 611 |
| HSV1-UL19-441 | − | CAACAUGCGCAUAUUCGACG | 20 | 827 |
| HSV1-UL19-1091 | + | ACGGAUUGGCGGCUUCGACG | 20 | 1477 |
| HSV1-UL19-1273 | + | CGGCGAACAGCGCGUGGACG | 20 | 1659 |
| HSV1-UL19-1255 | + | GCGCAUGUUGGUGGUGGACG | 20 | 1641 |
| HSV1-UL19-1330 | + | GGUUGCCCAUGUCGGUGACG | 20 | 1716 |
| HSV1-UL19-277 | − | UUCGCUGAUGAACGUUGACG | 20 | 663 |
| HSV1-UL19-1218 | + | UCUGCAGGGUGGCGUAUACG | 20 | 1604 |
| HSV1-UL19-285 | − | CGAAGCCGCCAAUCCGUACG | 20 | 671 |
| HSV1-UL19-550 | − | GUCGCAGCGAUUUUCGUACG | 20 | 936 |
| HSV1-UL19-391 | − | GGGCCACGACCCCGUGUACG | 20 | 777 |
| HSV1-UL19-532 | − | CGCCGCCGGGGGCGUUUACG | 20 | 918 |
| HSV1-UL19-402 | − | GCGGAUGACCGGCCGCACCG | 20 | 788 |
| HSV1-UL19-411 | − | GCGGGGCCGCUGCUGCACCG | 20 | 797 |
| HSV1-UL19-394 | − | GGCAUGUAACGUGGCGACCG | 20 | 780 |
| HSV1-UL19-546 | − | UCGCGGCCACGGCCAACCCG | 20 | 932 |
| HSV1-UL19-1414 | + | CACGAGUUCGCGGCACCCCG | 20 | 1800 |
| HSV1-UL19-527 | − | CGCCGGCCCUGCAACCCCCG | 20 | 913 |
| HSV1-UL19-1217 | + | GCGGUCGAAGCGAACCCCCG | 20 | 1603 |
| HSV1-UL19-568 | − | UACAGUUUAAGCGCCCCCCG | 20 | 954 |
| HSV1-UL19-1164 | + | CCUCGGGAAGGUCUCCCCCG | 20 | 1550 |
| HSV1-UL19-1339 | + | CCAGGAGAGGGGGAGCCCCG | 20 | 1725 |
| HSV1-UL19-977 | + | UGCCGCGCUCAAACGCCCCG | 20 | 1363 |
| HSV1-UL19-1374 | + | CCCCCGGCGGCGCGUCCCCG | 20 | 1760 |
| HSV1-UL19-335 | − | GCGGCGUUCCGGGACGCCCG | 20 | 721 |
| HSV1-UL19-1108 | + | CGACCCAUCGGACCCGCCCG | 20 | 1494 |
| HSV1-UL19-322 | − | ACGUUCCCCCGGCCGGCCCG | 20 | 708 |
| HSV1-UL19-467 | − | GUACUUCAAGAUCAGUCCCG | 20 | 853 |
| HSV1-UL19-362 | − | CCUCGGGGGAGACCUUCCCG | 20 | 748 |
| HSV1-UL19-1296 | + | GUAGUUGGCCCCCAGAGCCG | 20 | 1682 |
| HSV1-UL19-397 | − | CAACACCCAGGCCCGAGCCG | 20 | 783 |
| HSV1-UL19-265 | − | ACGGUUUGCCGCGCACGCCG | 20 | 651 |
| HSV1-UL19-398 | − | GGCCCGAGCCGCGGACGCCG | 20 | 784 |
| HSV1-UL19-530 | − | CCCCCGGGGACGCGCCGCCG | 20 | 916 |
| HSV1-UL19-1359 | + | UGGUCCAUCCCUGCGCGCCG | 20 | 1745 |
| HSV1-UL19-1225 | + | CGCUGGGGCACUCCUCGCCG | 20 | 1611 |
| HSV1-UL19-448 | − | CGUCCACGCGCUGUUCGCCG | 20 | 834 |
| HSV1-UL19-1124 | + | GAUCUCCCCCGGGCCGGCCG | 20 | 1510 |
| HSV1-UL19-1097 | + | GUCUGCGGCGGGGCCGGCCG | 20 | 1483 |
| HSV1-UL19-462 | − | CGUCCGCGAGAGCGCGGCCG | 20 | 848 |
| HSV1-UL19-1284 | + | CGACAGGUCGCGCAGGGCCG | 20 | 1670 |
| HSV1-UL19-501 | − | CAAAACUUUUACCUGGGCCG | 20 | 887 |
| HSV1-UL19-1360 | + | CACACACGGCGUCCUGGCCG | 20 | 1746 |
| HSV1-UL19-1382 | + | GGGACGGGUCGCUCUGGCCG | 20 | 1768 |
| HSV1-UL19-1002 | + | CACGGAGGGCUGCGUGGCCG | 20 | 1388 |
| HSV1-UL19-1407 | + | GUCGCUGGCGGCGGUGGCCG | 20 | 1793 |
| HSV1-UL19-1066 | + | CGCGGGGAUCCGGGUGGCCG | 20 | 1452 |
| HSV1-UL19-1389 | + | CGACGCCCACGGGUUGGCCG | 20 | 1775 |
| HSV1-UL19-313 | − | UGGCCGACGUGGAGCUGCCG | 20 | 699 |
| HSV1-UL19-518 | − | UCGGGUGCGCCCAGGUGCCG | 20 | 904 |
| HSV1-UL19-1327 | + | GGGGUUGCGGACGGUUGCCG | 20 | 1713 |
| HSV1-UL19-1207 | + | CCGGUGCGGCCGGUCAUCCG | 20 | 1593 |
| HSV1-UL19-218 | − | CACGGCCACGCAGCCCUCCG | 20 | 604 |
| HSV1-UL19-1111 | + | GGGCUGCAUAAACUGCUCCG | 20 | 1497 |
| HSV1-UL19-1199 | + | GUCGUUGCGGUUGAAGUCCG | 20 | 1585 |
| HSV1-UL19-1206 | + | CCGGUCAUCCGCGGCGUCCG | 20 | 1592 |
| HSV1-UL19-459 | − | GCAGCACGUCCGCGAGAGCG | 20 | 845 |
| HSV1-UL19-1439 | + | CAGAGCCAGUCCCUUGAGCG | 20 | 1825 |
| HSV1-UL19-192 | − | GUCCUCGGGGCGUUUGAGCG | 20 | 578 |
| HSV1-UL19-386 | − | UCGCGACUGCCGGGUUAGCG | 20 | 772 |
| HSV1-UL19-1118 | + | CCACAAAGAAGUCGAACGCG | 20 | 1504 |
| HSV1-UL19-219 | − | CUGACGCAUGCCGACACGCG | 20 | 605 |
| HSV1-UL19-577 | − | GCAACGGGGAAGCCCACGCG | 20 | 963 |
| HSV1-UL19-534 | − | CCGCCGGGGGCGUUUACGCG | 20 | 920 |
| HSV1-UL19-413 | − | GGGGCCGCUGCUGCACCGCG | 20 | 799 |
| HSV1-UL19-503 | − | AAACUUUUACCUGGGCCGCG | 20 | 889 |
| HSV1-UL19-1276 | + | CGGCCCCGGCGAACAGCGCG | 20 | 1662 |
| HSV1-UL19-388 | − | GCGACUGCCGGGUUAGCGCG | 20 | 774 |
| HSV1-UL19-1436 | + | CGAAGUGGGUCUCCCGCGCG | 20 | 1822 |
| HSV1-UL19-1323 | + | CCCAGGUCCACGUUCGCGCG | 20 | 1709 |
| HSV1-UL19-1072 | + | UGGCGGGGCGGGAAGGCGCG | 20 | 1458 |
| HSV1-UL19-382 | − | UGACGCCCUGAUGCGGCGCG | 20 | 768 |
| HSV1-UL19-427 | − | CAUGUUUCACAACGGGCGCG | 20 | 813 |
| HSV1-UL19-326 | − | GAUCCAGGCCACCUGGCGCG | 20 | 712 |
| HSV1-UL19-247 | − | CCAGACGACGCGCGUGCGCG | 20 | 633 |
| HSV1-UL19-1234 | + | CCGGGUGCAGGGGGUGCGCG | 20 | 1620 |
| HSV1-UL19-410 | − | AUGGUGCCCGCCUUCUCGCG | 20 | 796 |
| HSV1-UL19-346 | − | CACCAUCGCCGCCGUUCGCG | 20 | 732 |
| HSV1-UL19-1074 | + | GCUGGCGGGGCGGGAAGGCG | 20 | 1460 |
| HSV1-UL19-1397 | + | GCAGGGGCUGAGCACCGGCG | 20 | 1783 |
| HSV1-UL19-419 | − | CCCGGAGAUCGCCCCCGGCG | 20 | 805 |
| HSV1-UL19-1101 | + | GCUGCUGCAUGUCUGCGGCG | 20 | 1487 |
| HSV1-UL19-3234 | + | CACUACCCCAAGGAAGGGCG | 20 | 7833 |
| HSV1-UL19-1426 | + | GGGCACUGCGGAGGAGGGCG | 20 | 1812 |
| HSV1-UL19-1062 | + | GAUCCGGGUGGCCGGGGGCG | 20 | 1448 |
| HSV1-UL19-493 | − | CGCGAACGUGGACCUGGGCG | 20 | 879 |
| HSV1-UL19-1141 | + | UGGUGGCGGGGGCCAUGGCG | 20 | 1527 |
| HSV1-UL19-466 | − | UGACCUACGCGCUCAUGGCG | 20 | 852 |
| HSV1-UL19-486 | − | GGCCCGGCACGAAACUGGCG | 20 | 872 |
| HSV1-UL19-1078 | + | CCCCAAAAAAACAGCUGGCG | 20 | 1464 |
| HSV1-UL19-1144 | + | GAACGGCGGCGAUGGUGGCG | 20 | 1530 |
| HSV1-UL19-1003 | + | CACGGCCACGGAGGGCUGCG | 20 | 1389 |
| HSV1-UL19-1059 | + | GACUAGGUCCCCGGCGUGCG | 20 | 1445 |
| HSV1-UL19-356 | − | CUGGAACAACACGCGGUGCG | 20 | 742 |
| HSV1-UL19-1236 | + | GGCCGGGUGCAGGGGGUGCG | 20 | 1622 |
| HSV1-UL19-560 | − | CUGCCUGGAGCGCCUGAUCG | 20 | 946 |
| HSV1-UL19-1015 | + | CAGGAGGCGCUGUUUGAUCG | 20 | 1401 |
| HSV1-UL19-569 | − | CCCGGGGUGCCGCGAACUCG | 20 | 955 |
| HSV1-UL19-360 | − | GUACGUCGUGACCUACCUCG | 20 | 746 |
| HSV1-UL19-191 | − | CAACGUCCAGGCCGUCCUCG | 20 | 577 |
| HSV1-UL19-353 | − | CUGCGCCCUGGCCCGGCUCG | 20 | 739 |
| HSV1-UL19-216 | − | GGCCGUCGAGGCCUGGCUCG | 20 | 602 |
| HSV1-UL19-1303 | + | UCUCCCCGGCCGCGCUCUCG | 20 | 1689 |
| HSV1-UL19-408 | − | UGAUGGUGCCCGCCUUCUCG | 20 | 794 |
| HSV1-UL19-368 | − | GGACCUGGUGGCGCACGUCG | 20 | 754 |
| HSV1-UL19-495 | − | CGUGGGCUACACCGCCGUCG | 20 | 881 |
| HSV1-UL19-214 | − | CCACCGCCGGGAGGCCGUCG | 20 | 600 |
| HSV1-UL19-508 | − | GUACCUGCGGAACGCGGUCG | 20 | 894 |
| HSV1-UL19-281 | − | GAACGUUGACGCGGCGGUCG | 20 | 667 |
| HSV1-UL19-1195 | + | CCGCCGCGUACACGGGGUCG | 20 | 1581 |
| HSV1-UL19-1090 | + | UGGCGGCUUCGACGGGGUCG | 20 | 1476 |
| HSV1-UL19-301 | − | CGGGCGGGUCCGAUGGGUCG | 20 | 687 |
| HSV1-UL19-451 | − | CGGCCCUGCGCGACCUGUCG | 20 | 837 |
| HSV1-UL19-544 | − | CGACCCGUCCCGGGCCUUCG | 20 | 930 |
| HSV1-UL19-1417 | + | ACGGGUCCUCCACGAGUUCG | 20 | 1803 |
| HSV1-UL19-344 | − | GCCACCAUCGCCGCCGUUCG | 20 | 730 |
| HSV1-UL19-537 | − | CGUUUACGCGGGGGACAAGG | 20 | 923 |
| HSV1-UL19-209 | − | GAGCUUUUUCCUGGGCAAGG | 20 | 595 |
| HSV1-UL19-1214 | + | GCAGCGGCCCCGCGAGAAGG | 20 | 1600 |
| HSV1-UL19-1047 | + | GGUCCAUGGCGCCCACCAGG | 20 | 1433 |
| HSV1-UL19-1290 | + | CCAGAGCCGGGGGGACCAGG | 20 | 1676 |
| HSV1-UL19-1347 | + | CGGGCUGGGCCGGCCCCAGG | 20 | 1733 |
| HSV1-UL19-1131 | + | GCCGUUCACCACGCGCCAGG | 20 | 1517 |
| HSV1-UL19-986 | + | GGGCCACCCUGGUGGCCAGG | 20 | 1372 |
| HSV1-UL19-481 | − | CUUCCUGGGCCAGCUCCAGG | 20 | 867 |
| HSV1-UL19-1030 | + | CCUCCUGCAUCUCCAGCAGG | 20 | 1416 |
| HSV1-UL19-244 | − | CCACCUGCUGGAGAUGCAGG | 20 | 630 |
| HSV1-UL19-1018 | + | CUUUCAGGAAGGACUGCAGG | 20 | 1404 |
| HSV1-UL19-1237 | + | CCAGAUUGGCCGGGUGCAGG | 20 | 1623 |
| HSV1-UL19-573 | − | CCCGUGUGGCCUGUUUCAGG | 20 | 959 |
| HSV1-UL19-1340 | + | GCCGCGUUGUCCAGGAGAGG | 20 | 1726 |
| HSV1-UL19-540 | − | UUACGCGGGGGACAAGGAGG | 20 | 926 |
| HSV1-UL19-1430 | + | CGUUGCGGGCACUGCGGAGG | 20 | 1816 |
| HSV1-UL19-1269 | + | ACAGCGCGUGGACGGGGAGG | 20 | 1655 |
| HSV1-UL19-1395 | + | CCGGCGAGGCCCCGUUGAGG | 20 | 1781 |
| HSV1-UL19-1149 | + | GUCGAACGCCCCGCGAACGG | 20 | 1535 |
| HSV1-UL19-1364 | + | GUUGACGUCGGUCGACACGG | 20 | 1750 |
| HSV1-UL19-1005 | + | CAGACGGGGCACGGCCACGG | 20 | 1391 |
| HSV1-UL19-1325 | + | GGUUGCCGUGGCCACGACGG | 20 | 1711 |
| HSV1-UL19-403 | − | CGGAUGACCGGCCGCACCGG | 20 | 789 |
| HSV1-UL19-348 | − | CGACGACCGCAACUACCCGG | 20 | 734 |
| HSV1-UL19-1413 | + | ACGAGUUCGCGGCACCCCGG | 20 | 1799 |
| HSV1-UL19-1377 | + | CCCCGCGUAAACGCCCCCGG | 20 | 1763 |
| HSV1-UL19-1373 | + | CCCCGGCGGCGCGUCCCCGG | 20 | 1759 |
| HSV1-UL19-323 | − | CGUUCCCCCGGCCGGCCCGG | 20 | 709 |
| HSV1-UL19-997 | + | AGGCCUCGACGGCCUCCCGG | 20 | 1383 |
| HSV1-UL19-1295 | + | UAGUUGGCCCCCAGAGCCGG | 20 | 1681 |
| HSV1-UL19-531 | − | CCCCGGGGACGCGCCGCCGG | 20 | 917 |
| HSV1-UL19-1224 | + | GCUGGGGCACUCCUCGCCGG | 20 | 1610 |
| HSV1-UL19-1123 | + | AUCUCCCCCGGGCCGGCCGG | 20 | 1509 |
| HSV1-UL19-1283 | + | GACAGGUCGCGCAGGGCCGG | 20 | 1669 |
| HSV1-UL19-1369 | + | CCCGGGGGUUGCAGGGCCGG | 20 | 1755 |
| HSV1-UL19-1065 | + | GCGGGGAUCCGGGUGGCCGG | 20 | 1451 |
| HSV1-UL19-314 | − | GGCCGACGUGGAGCUGCCGG | 20 | 700 |
| HSV1-UL19-330 | − | GCCCCUGGCGCUAUGUCCGG | 20 | 716 |
| HSV1-UL19-278 | − | GCUGAUGAACGUUGACGCGG | 20 | 664 |
| HSV1-UL19-392 | − | CCACGACCCCGUGUACGCGG | 20 | 778 |
| HSV1-UL19-535 | − | CGCCGGGGGCGUUUACGCGG | 20 | 921 |
| HSV1-UL19-414 | − | GGGCCGCUGCUGCACCGCGG | 20 | 800 |
| HSV1-UL19-389 | − | CGACUGCCGGGUUAGCGCGG | 20 | 775 |
| HSV1-UL19-996 | + | CCUCGACGGCCUCCCGGCGG | 20 | 1382 |
| HSV1-UL19-1408 | + | CUGUACGUCGCUGGCGGCGG | 20 | 1794 |
| HSV1-UL19-1013 | + | GCGCUGUUUGAUCGGGGCGG | 20 | 1399 |
| HSV1-UL19-487 | − | GCCCGGCACGAAACUGGCGG | 20 | 873 |
| HSV1-UL19-1409 | + | AAACUGUACGUCGCUGGCGG | 20 | 1795 |
| HSV1-UL19-1143 | + | AACGGCGGCGAUGGUGGCGG | 20 | 1529 |
| HSV1-UL19-1431 | + | CCCCGUUGCGGGCACUGCGG | 20 | 1817 |
| HSV1-UL19-1103 | + | CAGCUGCUGCAUGUCUGCGG | 20 | 1489 |
| HSV1-UL19-361 | − | UACGUCGUGACCUACCUCGG | 20 | 747 |
| HSV1-UL19-436 | − | AACGGCGCUGCUCUGCUCGG | 20 | 822 |
| HSV1-UL19-477 | − | GUUCUCGGAGCGCGCGUCGG | 20 | 863 |
| HSV1-UL19-282 | − | AACGUUGACGCGGCGGUCGG | 20 | 668 |
| HSV1-UL19-564 | − | GAUCGUGGAGACGGGUUCGG | 20 | 950 |
| HSV1-UL19-1086 | + | CAACGUUCAUCAGCGAAGGG | 20 | 1472 |
| HSV1-UL19-202 | − | CGGCCGCCUGGCCACCAGGG | 20 | 588 |
| HSV1-UL19-1219 | + | GACCACCAUGUUCUGCAGGG | 20 | 1605 |
| HSV1-UL19-1428 | + | GCGGGCACUGCGGAGGAGGG | 20 | 1814 |
| HSV1-UL19-1379 | + | GCCGUGGUCGUACAUGAGGG | 20 | 1765 |
| HSV1-UL19-297 | − | GGCAGCGCCUGGCCCACGGG | 20 | 683 |
| HSV1-UL19-404 | − | GGAUGACCGGCCGCACCGGG | 20 | 790 |
| HSV1-UL19-1412 | + | CGAGUUCGCGGCACCCCGGG | 20 | 1798 |
| HSV1-UL19-1294 | + | AGUUGGCCCCCAGAGCCGGG | 20 | 1680 |
| HSV1-UL19-213 | − | CAAGGCGGGCCACCGCCGGG | 20 | 599 |
| HSV1-UL19-1282 | + | ACAGGUCGCGCAGGGCCGGG | 20 | 1668 |
| HSV1-UL19-315 | − | GCCGACGUGGAGCUGCCGGG | 20 | 701 |
| HSV1-UL19-1069 | + | GGAAGGCGCGGGGAUCCGGG | 20 | 1455 |
| HSV1-UL19-390 | − | GACUGCCGGGUUAGCGCGGG | 20 | 776 |
| HSV1-UL19-221 | − | CGCAUGCCGACACGCGCGGG | 20 | 607 |
| HSV1-UL19-488 | − | CCCGGCACGAAACUGGCGGG | 20 | 874 |
| HSV1-UL19-980 | + | GGCAACAACAAAGCCAGGGG | 20 | 1366 |
| HSV1-UL19-1184 | + | UCACAGUCCCACACGAGGGG | 20 | 1570 |
| HSV1-UL19-1272 | + | CGAACAGCGCGUGGACGGGG | 20 | 1658 |
| HSV1-UL19-316 | − | CCGACGUGGAGCUGCCGGGG | 20 | 702 |
| HSV1-UL19-3235 | + | UACCCCAAGGAAGGGCGGGG | 20 | 7834 |
| HSV1-UL19-489 | − | CCGGCACGAAACUGGCGGGG | 20 | 875 |
| HSV1-UL19-1077 | + | CAAAAAAACAGCUGGCGGGG | 20 | 1463 |
| HSV1-UL19-1014 | + | GAGGCGCUGUUUGAUCGGGG | 20 | 1400 |
| HSV1-UL19-1363 | + | GACGUCGGUCGACACGGGGG | 20 | 1749 |
| HSV1-UL19-1064 | + | GGGAUCCGGGUGGCCGGGGG | 20 | 1450 |
| HSV1-UL19-317 | − | CGACGUGGAGCUGCCGGGGG | 20 | 703 |
| HSV1-UL19-405 | − | UGACCGGCCGCACCGGGGGG | 20 | 791 |
| HSV1-UL19-341 | − | CCGGGGCCUGGAGCUGGGGG | 20 | 727 |
| HSV1-UL19-309 | − | GUUCGACUUCUUUGUGGGGG | 20 | 695 |
| HSV1-UL19-375 | − | CUGACCGGCCCGGAGCUGGG | 20 | 761 |
| HSV1-UL19-1261 | + | GGUAUGGUCCAGAUGCUGGG | 20 | 1647 |
| HSV1-UL19-1034 | + | GCGCACGCGCGUCGUCUGGG | 20 | 1420 |
| HSV1-UL19-416 | − | CGCCACCCUGCAGAACAUGG | 20 | 802 |
| HSV1-UL19-1247 | + | CACCUGCAGCGUGAGCAUGG | 20 | 1633 |
| HSV1-UL19-464 | − | GCUGACCUACGCGCUCAUGG | 20 | 850 |
| HSV1-UL19-1192 | + | UAACCCGGCAGUCGCGAUGG | 20 | 1578 |
| HSV1-UL19-1147 | + | CCCGCGAACGGCGGCGAUGG | 20 | 1533 |
| HSV1-UL19-1309 | + | UGAACCCAAACCCGGGAUGG | 20 | 1695 |
| HSV1-UL19-1155 | + | GUGCUCGCUGCCGUGUAUGG | 20 | 1541 |
| HSV1-UL19-484 | − | GUGGCCCGGCACGAAACUGG | 20 | 870 |
| HSV1-UL19-1082 | + | GAGACAGGCGCAGCACCUGG | 20 | 1468 |
| HSV1-UL19-367 | − | GGCCGUGUACCGGGACCUGG | 20 | 753 |
| HSV1-UL19-988 | + | GGUCGCCCGGGCCACCCUGG | 20 | 1374 |
| HSV1-UL19-255 | − | CAACGUUCCCUACCCCCUGG | 20 | 641 |
| HSV1-UL19-293 | − | AGCUGUUUUUGAACGCCUGG | 20 | 679 |
| HSV1-UL19-1080 | + | UCCCCCAAAAAAACAGCUGG | 20 | 1466 |
| HSV1-UL19-340 | − | CGCCCGGGGCCUGGAGCUGG | 20 | 726 |
| HSV1-UL19-1410 | + | CUUAAACUGUACGUCGCUGG | 20 | 1796 |
| HSV1-UL19-1262 | + | UGGUAUGGUCCAGAUGCUGG | 20 | 1648 |
| HSV1-UL19-423 | − | CCUGCACCCGGCCAAUCUGG | 20 | 809 |
| HSV1-UL19-458 | − | CCUGGUCCCCCCGGCUCUGG | 20 | 844 |
| HSV1-UL19-1035 | + | CGCGCACGCGCGUCGUCUGG | 20 | 1421 |
| HSV1-UL19-252 | − | CGAGAAGCUGGUCUUUCUGG | 20 | 638 |
| HSV1-UL19-227 | − | GCAGUCCUUCCUGAAAGUGG | 20 | 613 |
| HSV1-UL19-287 | − | UCCGUACGGGGCGUACGUGG | 20 | 673 |
| HSV1-UL19-570 | − | GGGGUGCCGCGAACUCGUGG | 20 | 956 |
| HSV1-UL19-509 | − | CCUGCGGAACGCGGUCGUGG | 20 | 895 |
| HSV1-UL19-1029 | + | CCUGCAUCUCCAGCAGGUGG | 20 | 1415 |
| HSV1-UL19-1146 | + | GCGAACGGCGGCGAUGGUGG | 20 | 1532 |
| HSV1-UL19-1042 | + | GGGGUAGGGAACGUUGGUGG | 20 | 1428 |
| HSV1-UL19-1256 | + | GAAUAUGCGCAUGUUGGUGG | 20 | 1642 |
| HSV1-UL19-308 | − | CGCGUUCGACUUCUUUGUGG | 20 | 694 |
| HSV1-UL19-1094 | + | GUACGCCCCGUACGGAUUGG | 20 | 1480 |
| HSV1-UL19-1043 | + | CAGGGGGUAGGGAACGUUGG | 20 | 1429 |
| HSV1-UL19-1257 | + | GUCGAAUAUGCGCAUGUUGG | 20 | 1643 |
| HSV1-UL19-1403 | + | CUCCAGGCAGCGAUGUUUGG | 20 | 1789 |
| HSV1-UL19-271 | − | CCCGCCAGCUGUUUUUUUGG | 20 | 657 |
| HSV1-UL19-1381 | + | UCUGGCCGUGGUCGUACAUG | 20 | 1767 |
| HSV1-UL19-381 | − | GGGACUGUGACGCCCUGAUG | 20 | 767 |
| HSV1-UL19-1432 | + | CUUCCCCGUUGCGGGCACUG | 20 | 1818 |
| HSV1-UL19-506 | − | ACGCGGCAGCCGUGUACCUG | 20 | 892 |
| HSV1-UL19-292 | − | CAGCUGUUUUUGAACGCCUG | 20 | 678 |
| HSV1-UL19-513 | − | UCGUGGCGGGAAACCGCCUG | 20 | 899 |
| HSV1-UL19-339 | − | ACGCCCGGGGCCUGGAGCUG | 20 | 725 |
| HSV1-UL19-1228 | + | GGUCCGUCACGGGGUCGCUG | 20 | 1614 |
| HSV1-UL19-1263 | + | AUGGUAUGGUCCAGAUGCUG | 20 | 1649 |
| HSV1-UL19-457 | − | CCCUGGUCCCCCCGGCUCUG | 20 | 843 |
| HSV1-UL19-1036 | + | GCGCGCACGCGCGUCGUCUG | 20 | 1422 |
| HSV1-UL19-1104 | + | AAACAGCUGCUGCAUGUCUG | 20 | 1490 |
| HSV1-UL19-571 | − | GAACUCGUGGAGGACCCGUG | 20 | 957 |
| HSV1-UL19-379 | − | CGCUGCUGCCACCCCUCGUG | 20 | 765 |
| HSV1-UL19-1209 | + | GUCCAGUCCGCCCCCCGGUG | 20 | 1595 |
| HSV1-UL19-1001 | + | AGGGCUGCGUGGCCGUGGUG | 20 | 1387 |
| HSV1-UL19-307 | − | CCGCGUUCGACUUCUUUGUG | 20 | 693 |
| HSV1-UL19-3236 | − | AACCGCCCCGCCCUUCCUUG | 20 | 7835 |
| HSV1-UL19-1212 | + | UCACGUAGUAGUAAAUCUUG | 20 | 1598 |
| HSV1-UL19-1151 | + | AAAACACCGCCGGGUAGUUG | 20 | 1537 |
| HSV1-UL19-1396 | + | GCACCGGCGAGGCCCCGUUG | 20 | 1782 |
| HSV1-UL19-1434 | + | GCGCGUGGGCUUCCCCGUUG | 20 | 1820 |
| HSV1-UL19-1200 | + | GCAGCAGCUGGCCGUCGUUG | 20 | 1586 |
| HSV1-UL19-1329 | + | CCAUGUCGGUGACGGGGUUG | 20 | 1715 |
| HSV1-UL19-1250 | + | UUGUGCGUUCGGCCAUGUUG | 20 | 1636 |
| HSV1-UL19-305 | − | CCCCGCGUUCGACUUCUUUG | 20 | 691 |
| HSV1-UL19-1335 | + | CGGCCCAGGUAAAAGUUUUG | 20 | 1721 |
| HSV1-UL19-270 | − | CCCCGCCAGCUGUUUUUUUG | 20 | 656 |
| HSV1-UL19-1281 | + | GCGCAGGGCCGGGGGGAAAU | 20 | 1667 |
| HSV1-UL19-498 | − | CGCAACCCCGUCACCGACAU | 20 | 884 |
| HSV1-UL19-1109 | + | UCUGGCCUUCCGCGACCCAU | 20 | 1495 |
| HSV1-UL19-249 | − | CGCGCGGAUCUGGUGUCCAU | 20 | 635 |
| HSV1-UL19-984 | + | UUGUCCAGGUAUCGUUGCAU | 20 | 1370 |
| HSV1-UL19-1243 | + | GACCGUGUUGGCCACCAGAU | 20 | 1629 |
| HSV1-UL19-300 | − | GGCCCACGGGCGGGUCCGAU | 20 | 686 |
| HSV1-UL19-275 | − | CUGUCUCUGGAACACGCGAU | 20 | 661 |
| HSV1-UL19-1095 | + | CACGUACGCCCCGUACGGAU | 20 | 1481 |
| HSV1-UL19-237 | − | CUGGUCACGGCGCUCGUGAU | 20 | 623 |
| HSV1-UL19-1017 | + | UGCAGGAGGCGCUGUUUGAU | 20 | 1403 |
| HSV1-UL19-1061 | + | GGUGGCCGGGGGCGGGGACU | 20 | 1447 |
| HSV1-UL19-1357 | + | CCCUGCGCGCCGCGGCACCU | 20 | 1743 |
| HSV1-UL19-492 | − | CCGCGCGCGAACGUGGACCU | 20 | 878 |
| HSV1-UL19-358 | − | UCGUACGUCGUGACCUACCU | 20 | 744 |
| HSV1-UL19-500 | − | CUUCCCCAAAACUUUUACCU | 20 | 886 |
| HSV1-UL19-259 | − | CUGACGUUCGUCCUGCCCCU | 20 | 645 |
| HSV1-UL19-291 | − | GCAGCUGUUUUUGAACGCCU | 20 | 677 |
| HSV1-UL19-512 | − | GUCGUGGCGGGAAACCGCCU | 20 | 898 |
| HSV1-UL19-1202 | + | GGCGUCCGCGGCUCGGGCCU | 20 | 1588 |
| HSV1-UL19-1167 | + | GUACACGGCCAUGCACUCCU | 20 | 1553 |
| HSV1-UL19-189 | − | CGCAACGUCCAGGCCGUCCU | 20 | 575 |
| HSV1-UL19-479 | − | GCGUCGGAGGCGUACUUCCU | 20 | 865 |
| HSV1-UL19-3237 | − | UAAACCGCCCCGCCCUUCCU | 20 | 7836 |
| HSV1-UL19-207 | − | UGCGAGACGAGCUUUUUCCU | 20 | 593 |
| HSV1-UL19-1173 | + | GGUAAAGUCAUCAACCAGCU | 20 | 1559 |
| HSV1-UL19-1180 | + | UCGCAUUAGGUGAUUCAGCU | 20 | 1566 |
| HSV1-UL19-374 | − | ACCCUGACCGGCCCGGAGCU | 20 | 760 |
| HSV1-UL19-338 | − | GACGCCCGGGGCCUGGAGCU | 20 | 724 |
| HSV1-UL19-994 | + | GCAGAAGCUUCGCUUUAGCU | 20 | 1380 |
| HSV1-UL19-1229 | + | GGGUCCGUCACGGGGUCGCU | 20 | 1615 |
| HSV1-UL19-1205 | + | CAUCCGCGGCGUCCGCGGCU | 20 | 1591 |
| HSV1-UL19-1321 | + | GUCCACGUUCGCGCGCGGCU | 20 | 1707 |
| HSV1-UL19-1350 | + | CCCGAACACGGGGACGGGCU | 20 | 1736 |
| HSV1-UL19-1264 | + | GAUGGUAUGGUCCAGAUGCU | 20 | 1650 |
| HSV1-UL19-435 | − | CACAACGGCGCUGCUCUGCU | 20 | 821 |
| HSV1-UL19-456 | − | CCCCUGGUCCCCCCGGCUCU | 20 | 842 |
| HSV1-UL19-1037 | + | CGCGCGCACGCGCGUCGUCU | 20 | 1423 |
| HSV1-UL19-475 | − | GACUGAGAACGUGCUGUUCU | 20 | 861 |
| HSV1-UL19-1437 | + | GACGAGAUACUGCGCGAAGU | 20 | 1823 |
| HSV1-UL19-1299 | + | UCGGAUCGACGAAAAGUAGU | 20 | 1685 |
| HSV1-UL19-1044 | + | CACCAGGGGGUAGGGAACGU | 20 | 1430 |
| HSV1-UL19-1121 | + | CCCCCCCGGCAGCUCCACGU | 20 | 1507 |
| HSV1-UL19-1023 | + | GCCGUACGUCACCGGCACGU | 20 | 1409 |
| HSV1-UL19-241 | − | GUGCGAAGUCUGGACGACGU | 20 | 627 |
| HSV1-UL19-1368 | + | CCGGCGGAAGUAGUUGACGU | 20 | 1754 |
| HSV1-UL19-558 | − | CUGCUUUAAGUUCUUUACGU | 20 | 944 |
| HSV1-UL19-547 | − | CGCGGCCACGGCCAACCCGU | 20 | 933 |
| HSV1-UL19-1107 | + | GACCCAUCGGACCCGCCCGU | 20 | 1493 |
| HSV1-UL19-1253 | + | CGCGGUGUUGGCGCCCGCGU | 20 | 1639 |
| HSV1-UL19-1305 | + | GUACCCCGCCAUGAGCGCGU | 20 | 1691 |
| HSV1-UL19-1435 | + | GAAGUGGGUCUCCCGCGCGU | 20 | 1821 |
| HSV1-UL19-476 | − | GCUGUUCUCGGAGCGCGCGU | 20 | 862 |
| HSV1-UL19-494 | − | GCGAACGUGGACCUGGGCGU | 20 | 880 |
| HSV1-UL19-1026 | + | CACGAGCGCCGUGACCAGGU | 20 | 1412 |
| HSV1-UL19-1116 | + | GUGCAGCUCAAGAGCCAGGU | 20 | 1502 |
| HSV1-UL19-1163 | + | GGGAAGGUCUCCCCCGAGGU | 20 | 1549 |
| HSV1-UL19-279 | − | AUGAACGUUGACGCGGCGGU | 20 | 665 |
| HSV1-UL19-1390 | + | UCGCUGCGACGCCCACGGGU | 20 | 1776 |
| HSV1-UL19-1421 | + | GCUGGCGCAGGUGAGCGGGU | 20 | 1807 |
| HSV1-UL19-1046 | + | CAUGGCGCCCACCAGGGGGU | 20 | 1432 |
| HSV1-UL19-342 | − | CGGGGCCUGGAGCUGGGGGU | 20 | 728 |
| HSV1-UL19-256 | − | AACGUUCCCUACCCCCUGGU | 20 | 642 |
| HSV1-UL19-978 | + | CAGCACGUGCAGCAUCUGGU | 20 | 1364 |
| HSV1-UL19-1278 | + | GGGCGCGUUCGCCACGUGGU | 20 | 1664 |
| HSV1-UL19-1394 | + | CGAGGCCCCGUUGAGGUGGU | 20 | 1780 |
| HSV1-UL19-1333 | + | UUGGGGAAGGUUGCCCAUGU | 20 | 1719 |
| HSV1-UL19-1258 | + | CCCGUCGAAUAUGCGCAUGU | 20 | 1644 |
| HSV1-UL19-1402 | + | GCGAUGUUUGGCGGCGAUGU | 20 | 1788 |
| HSV1-UL19-1314 | + | CAGUCACAAAGCGGUCCUGU | 20 | 1700 |
| HSV1-UL19-3213 | + | GGACGUUGCGAGCGAGCUGU | 20 | 7812 |
| HSV1-UL19-1300 | + | CGUGCUGCACGACGGGCUGU | 20 | 1686 |
| HSV1-UL19-1244 | + | AAACAUGGCGUUGACCGUGU | 20 | 1630 |
| HSV1-UL19-1011 | + | GACCGGCCGCCCGCGCGUGU | 20 | 1397 |
| HSV1-UL19-380 | − | GCUGCUGCCACCCCUCGUGU | 20 | 766 |
| HSV1-UL19-1254 | + | GUUGGUGGUGGACGCGGUGU | 20 | 1640 |
| HSV1-UL19-1115 | + | AAGAGCCAGGUUGGCGUUGU | 20 | 1501 |
| HSV1-UL19-1249 | + | UGUGCGUUCGGCCAUGUUGU | 20 | 1635 |
| HSV1-UL19-306 | − | CCCGCGUUCGACUUCUUUGU | 20 | 692 |
| HSV1-UL19-1280 | + | CGCAGGGCCGGGGGGAAAUU | 20 | 1666 |
| HSV1-UL19-1181 | + | GCAGCGCCGGGUCUCGCAUU | 20 | 1567 |
| HSV1-UL19-3238 | − | AAACCGCCCCGCCCUUCCUU | 20 | 7837 |
| HSV1-UL19-1022 | + | CGUCACCGGCACGUCGGCUU | 20 | 1408 |
| HSV1-UL19-1251 | + | GAGCAGCGCCGUUGUGCGUU | 20 | 1637 |
| HSV1-UL19-563 | − | CCUGAUCGUGGAGACGGGUU | 20 | 949 |
| HSV1-UL19-472 | − | ACGGGCCUCCAUCCCGGGUU | 20 | 858 |
| HSV1-UL19-1404 | + | GCGCUCCAGGCAGCGAUGUU | 20 | 1790 |
| HSV1-UL19-515 | − | GCCCAGCCCGUCCCCGUGUU | 20 | 901 |
| HSV1-UL19-1268 | + | GGUAAAAAUAGUCGCCAUUU | 20 | 1654 |
| HSV1-UL19-1337 | + | CGCGGCCCAGGUAAAAGUUU | 20 | 1723 |
| HSV1-UL19-473 | − | CGGGCCUCCAUCCCGGGUUU | 20 | 859 |
| HSV1-UL19-1336 | + | GCGGCCCAGGUAAAAGUUUU | 20 | 1722 |
| HSV1-UL19-268 | − | CGCCCCGCCAGCUGUUUUUU | 20 | 654 |
| HSV1-UL19-269 | − | GCCCCGCCAGCUGUUUUUUU | 20 | 655 |

The application's sequence listing, which the Patent Office published only in electronic form, follows.

SEQUENCE LISTING (19918 sequences)

SEQ ID NO: 1 - protein, 1344 aa, Streptococcus mutans
KKPYSIGLDIGTNSVGWAVVTDDYKVPAKKMKVLGNTDKSHIEKNLLGALLFDSGNTAEDRRLKRTARRRYTRRRNRILYLQEIFSEEMGKVDDSFFHRLEDSFLVTEDKRGERHPIFGNLEEEVKYHENFPTIYHLRQYLADNPEKVDLRLVYLALAHIIKFRGHFLIEGKFDTRNNDVQRLFQEFLAVYDNTFENSSLQEQNVQVEEILTDKISKSAKKDRVLKLFPNEKSNGRFAEFLKLIVGNQADFKKHFELEEKAPLQFSKDTYEEELEVLLAQIGDNYAELFLSAKKLYDSILLSGILTVTDVGTKAPLSASMIQRYNEHQMDLAQLKQFIRQKLSDKYNEVFSDVSKDGYAGYIDGKTNQEAFYKYLKGLLNKIEGSGYFLDKIEREDFLRKQRTFDNGSIPHQIHLQEMRAIIRRQAEFYPFLADNQDRIEKLLTFRIPYYVGPLARGKSDFAWLSRKSADKITPWNFDEIVDKESSAEAFINRMTNYDLYLPNQKVLPKHSLLYEKFTVYNELTKVKYKTEQGKTAFFDANMKQEIFDGVFKVYRKVTKDKLMDFLEKEFDEFRIVDLTGLDKENKVFNASYGTYHDLCKILDKDFLDNSKNEKILEDIVLTLTLFEDREMIRKRLENYSDLLTKEQVKKLERRHYTGWGRLSAELIHGIRNKESRKTILDYLIDDGNSNRNFMQLINDDALSFKEEIAKAQVIGETDNLNQVVSDIAGSPAIKKGILQSLKIVDELVKIMGHQPENIVVEMARENQFTNQGRRNSQQRLKGLTDSIKEFGSQILKEHPVENSQLQNDRLFLYYLQNGRDMYTGEELDIDYLSQYDIDHIIPQAFIKDNSIDNRVLTSSKENRGKSDDVPSKDVVRKMKSYWSKLLSAKLITQRKFDNLTKAERGGLTDDDKAGFIKRQLVETRQITKHVARILDERFNTETDENNKKIRQVKIVTLKSNLVSNFRKEFELYKVREINDYHHAHDAYLNAVIGKALLGVYPQLEPEFVYGDYPHFHGHKENKATAKKFFYSNIMNFFKKDDVRTDKNGEIIWKKDEHISNIKKVLSYPQVNIVKKVEEQTGGFSKESILPKGNSDKLIPRKTKKFYWDTKKYGGFDSPIVAYSILVIADIEKGKSKKLKTVKALVGVTIMEKMTFERDPVAFLERKGYRNVQEENIIKLPKYSLFKLENGRKRLLASARELQKGNEIVLPNHLGTLLYHAKNIHKVDEPKHLDYVDKHKDEFKELLDVVSNFSKKYTLAEGNLEKIKELYAQNNGEDLKELASSFINLLTFTAIGAPATFKFFDKNIDRKRYTSTTEILNATLIHQSITGLYETRIDLNKLGGD

SEQ ID NO: 2 - protein, 1367 aa, Streptococcus pyogenes
DKKYSIGLDIGTNSVGWAVITDEYKVPSKKFKVLGNTDRHSIKKNLIGALLFDSGETAEATRLKRTARRRYTRRKNRICYLQEIFSNEMAKVDDSFFHRLEESFLVEEDKKHERHPIFGNIVDEVAYHEKYPTIYHLRKKLVDSTDKADLRLIYLALAHMIKFRGHFLIEGDLNPDNSDVDKLFIQLVQTYNQLFEENPINASGVDAKAILSARLSKSRRLENLIAQLPGEKKNGLFGNLIALSLGLTPNFKSNFDLAEDAKLQLSKDTYDDDLDNLLAQIGDQYADLFLAAKNLSDAILLSDILRVNTEITKAPLSASMIKRYDEHHQDLTLLKALVRQQLPEKYKEIFFDQSKNGYAGYIDGGASQEEFYKFIKPILEKMDGTEELLVKLNREDLLRKQRTFDNGSIPHQIHLGELHAILRRQEDFYPFLKDNREKIEKILTFRIPYYVGPLARGNSRFAWMTRKSEETITPWNFEEVVDKGASAQSFIERMTNFDKNLPNEKVLPKHSLLYEYFTVYNELTKVKYVTEGMRKPAFLSGEQKKAIVDLLFKTNRKVTVKQLKEDYFKKIECFDSVEISGVEDRFNASLGTYHDLLKIIKDKDFLDNEENEDILEDIVLTLTLFEDREMIEERLKTYAHLFDDKVMKQLKRRRYTGWGRLSRKLINGIRDKQSGKTILDFLKSDGFANRNFMQLIHDDSLTFKEDIQKAQVSGQGDSLHEHIANLAGSPAIKKGILQTVKVVDELVKVMGRHKPENIVIEMARENQTTQKGQKNSRERMKRIEEGIKELGSQILKEHPVENTQLQNEKLYLYYLQNGRDMYVDQELDINRLSDYDVDHIVPQSFLKDDSIDNKVLTRSDKNRGKSDNVPSEEVVKKMKNYWRQLLNAKLITQRKFDNLTKAERGGLSELDKAGFIKRQLVETRQITKHVAQILDSRMNTKYDENDKLIREVKVITLKSKLVSDFRKDFQFYKVREINNYHHAHDAYLNAVVGTALIKKYPKLESEFVYGDYKVYDVRKMIAKSEQEIGKATAKYFFYSNIMNFFKTEITLANGEIRKRPLIETNGETGEIVWDKGRDFATVRKVLSMPQVNIVKKTEVQTGGFSKESILPKRNSDKLIARKKDWDPKKYGGFDSPTVAYSVLVVAKVEKGKSKKLKSVKELLGITIMERSSFEKNPIDFLEAKGYKEVKKDLIIKLPKYSLFELENGRKRMLASAGELQKGNELALPSKYVNFLYLASHYEKLKGSPEDNEQKQLFVEQHKHYLDEIIEQISEFSKRVILADANLDKVLSAYNKHRDKPIREQAENIIHLFTLTNLGAPAAFKYFDTTIDRKRYTSTKEVLDATLIHQSITGLYETRIDLSQLGGD

SEQ ID NO: 3 - protein, 1387 aa, Streptococcus thermophilus
TKPYSIGLDIGTNSVGWAVTTDNYKVPSKKMKVLGNTSKKYIKKNLLGVLLFDSGITAEGRRLKRTARRRYTRRRNRILYLQEIFSTEMATLDDAFFQRLDDSFLVPDDKRDSKYPIFGNLVEEKAYHDEFPTIYHLRKYLADSTKKADLRLVYLALAHMIKYRGHFLIEGEFNSKNNDIQKNFQDFLDTYNAIFESDLSLENSKQLEEIVKDKISKLEKKDRILKLFPGEKNSGIFSEFLKLIVGNQADFRKCFNLDEKASLHFSKESYDEDLETLLGYIGDDYSDVFLKAKKLYDAILLSGFLTVTDNETEAPLSSAMIKRYNEHKEDLALLKEYIRNISLKTYNEVFKDDTKNGYAGYIDGKTNQEDFYVYLKKLLAEFEGADYFLEKIDREDFLRKQRTFDNGSIPYQIHLQEMRAILDKQAKFYPFLAKNKERIEKILTFRIPYYVGPLARGNSDFAWSIRKRNEKITPWNFEDVIDKESSAEAFINRMTSFDLYLPEEKVLPKHSLLYETFNVYNELTKVRFIAESMRDYQFLDSKQKKDIVRLYFKDKRKVTDKDIIEYLHAIYGYDGIELKGIEKQFNSSLSTYHDLLNIINDKEFLDDSSNEAIIEEIIHTLTIFEDREMIKQRLSKFENIFDKSVLKKLSRRHYTGWGKLSAKLINGIRDEKSGNTILDYLIDDGISNRNFMQLIHDDALSFKKKIQKAQIIGDEDKGNIKEVVKSLPGSPAIKKGILQSIKIVDELVKVMGGRKPESIVVEMARENQYTNQGKSNSQQRLKRLEKSLKELGSKILKENIPAKLSKIDNNALQNDRLYLYYLQNGKDMYTGDDLDIDRLSNYDIDHIIPQAFLKDNSIDNKVLVSSASNRGKSDDVPSLEVVKKRKTFWYQLLKSKLISQRKFDNLTKAERGGLSPEDKAGFIQRQLVETRQITKHVARLLDEKFNNKKDENNRAVRTVKIITLKSTLVSQFRKDFELYKVREINDFHHAHDAYLNAVVASALLKKYPKLEPEFVYGDYPKYNSFRERKSATEKVYFYSNIMNIFKKSISLADGRVIERPLIEVNEETGESVWNKESDLATVRRVLSYPQVNVVKKVEEQNHGLDRGKPKGLFNANLSSKPKPNSNENLVGAKEYLDPKKYGGYAGISNSFTVLVKGTIEKGAKKKITNVLEFQGISILDRINYRKDKLNFLLEKGYKDIELIIELPKYSLFELSDGSRRMLASILSTNNKRGEIHKGNQIFLSQKFVKLLYHAKRISNTINENHRKYVENHKKEFEELFYYILEFNENYVGAKKNGKLLNSAFQSWQNHSIDELCSSFIGPTGSERKGLFELTSRGSAADFEFLGVKIPRYRDYTPSSLLKDATLIHQSVTGLYETRIDLAKLGEG

SEQ ID NO: 4 - protein, 1333 aa, Listeria innocua
KKPYTIGLDIGTNSVGWAVLTDQYDLVKRKMKIAGDSEKKQIKKNFWGVRLFDEGQTAADRRMARTARRRIERRRNRISYLQGIFAEEMSKTDANFFCRLSDSFYVDNEKRNSRHPFFATIEEEVEYHKNYPTIYHLREELVNSSEKADLRLVYLALAHIIKYRGNFLIEGALDTQNTSVDGIYKQFIQTYNQVFASGIEDGSLKKLEDNKDVAKILVEKVTRKEKLERILKLYPGEKSAGMFAQFISLIVGSKGNFQKPFDLIEKSDIECAKDSYEEDLESLLALIGDEYAELFVAAKNAYSAVVLSSIITVAETETNAKLSASMIERFDTHEEDLGELKAFIKLHLPKHYEEIFSNTEKHGYAGYIDGKTKQADFYKYMKMTLENIEGADYFIAKIEKENFLRKQRTFDNGAIPHQLHLEELEAILHQQAKYYPFLKENYDKIKSLVTFRIPYFVGPLANGQSEFAWLTRKADGEIRPWNIEEKVDFGKSAVDFIEKMTNKDTYLPKENVLPKHSLCYQKYLVYNELTKVRYINDQGKTSYFSGQEKEQIFNDLFKQKRKVKKKDLELFLRNMSHVESPTIEGLEDSFNSSYSTYHDLLKVGIKQEILDNPVNTEMLENIVKILTVFEDKRMIKEQLQQFSDVLDGVVLKKLERRHYTGWGRLSAKLLMGIRDKQSHLTILDYLMNDDGLNRNLMQLINDSNLSFKSIIEKEQVTTADKDIQSIVADLAGSPAIKKGILQSLKIVDELVSVMGYPPQTIVVEMARENQTTGKGKNNSRPRYKSLEKAIKEFGSQILKEHPTDNQELRNNRLYLYYLQNGKDMYTGQDLDIHNLSNYDIDHIVPQSFITDNSIDNLVLTSSAGNREKGDDVPPLEIVRKRKVFWEKLYQGNLMSKRKFDYLTKAERGGLTEADKARFIHRQLVETRQITKNVANILHQRFNYEKDDHGNTMKQVRIVTLKSALVSQFRKQFQLYKVRDVNDYHHAHDAYLNGVVANTLLKVYPQLEPEFVYGDYHQFDWFKANKATAKKQFYTNIMLFFAQKDRIIDENGEILWDKKYLDTVKKVMSYRQMNIVKKTEIQKGEFSKATIKPKGNSSKLIPRKTNWDPMKYGGLDSPNMAYAVVIEYAKGKNKLVFEKKIIRVTIMERKAFEKDEKAFLEEQGYRQPKVLAKLPKYTLYECEEGRRRMLASANEAQKGNQQVLPNHLVTLLHHAANCEVSDGKSLDYIESNREMFAELLAHVSEFAKRYTLAEANLNKINQLFEQNKEGDIKAIAQSFVDLMAFNAMGAPASFKFFETTIERKRYNNLKELLNSTIIYQSITGLYESRKRLDD

SEQ ID NO: 5 - RNA, 96 nt, synthetic construct
  misc_feature 1..96: note = Synthetic oligonucleotide
  variation 1..20: note = a, c, u, g, unknown or other
  source 1..96: mol_type = other RNA
nnnnnnnnnnnnnnnnnnnngttttagagctagaaatagcaagttaaaataaggctagtccgttatcaacttgaaaaagtggcaccgagtcggtgc

SEQ ID NO: 6 - protein, 1082 aa, Neisseria meningitidis
MAAFKPNSINYILGLDIGIASVGWAMVEIDEEENPIRLIDLGVRVFERAEVPKTGDSLAMARRLARSVRRLTRRRAHRLLRTRRLLKREGVLQAANFDENGLIKSLPNTPWQLRAAALDRKLTPLEWSAVLLHLIKHRGYLSQRKNEGETADKELGALLKGVAGNAHALQTGDFRTPAELALNKFEKESGHIRNQRSDYSHTFSRKDLQAELILLFEKQKEFGNPHVSGGLKEGIETLLMTQRPALSGDAVQKMLGHCTFEPAEPKAAKNTYTAERFIWLTKLNNLRILEQGSERPLTDTERATLMDEPYRKSKLTYAQARKLLGLEDTAFFKGLRYGKDNAEASTLMEMKAYHAISRALEKEGLKDKKSPLNLSPELQDEIGTAFSLFKTDEDITGRLKDRIQPEILEALLKHISFDKFVQISLKALRRIVPLMEQGKRYDEACAEIYGDHYGKKNTEEKIYLPPIPADEIRNPVVLRALSQARKVINGVVRRYGSPARIHIETAREVGKSFKDRKEIEKRQEENRKDREKAAAKFREYFPNFVGEPKSKDILKLRLYEQQHGKCLYSGKEINLGRLNEKGYVEIDHALPFSRTWDDSFNNKVLVLGSENQNKGNQTPYEYFNGKDNSREWQEFKARVETSRFPRSKKQRILLQKFDEDGFKERNLNDTRYVNRFLCQFVADRMRLTGKGKKRVFASNGQITNLLRGFWGLRKVRAENDRHHALDAVVVACSTVAMQQKITRFVRYKEMNAFDGKTIDKETGEVLHQKTHFPQPWEFFAQEVMIRVFGKPDGKPEFEEADTLEKLRTLLAEKLSSRPEAVHEYVTPLFVSRAPNRKMSGQGHMETVKSAKRLDEGVSVLRVPLTQLKLKDLEKMVNREREPKLYEALKARLEAHKDDPAKAFAEPFYKYDKAGNRTQQVKAVRVEQVQKTGVWVRNHNGIADNATMVRVDVFEKGDKYYLVPIYSWQVAKGILPDRAVVQGKDEEDWQLIDDSFNFKFSLHPNDLVEVITKKARMFGYFASCHRGTGNINIRIHDLDHKIGKNGILEGIGVKTALSFQKYQIDELGKEIRPCRLKKRPPVR

SEQ ID NO: 7 - protein, 1368 aa, Streptococcus pyogenes [sequence omitted]

SEQ ID NO: 8 - skipped

SEQ ID NO: 9 - protein, 12 aa, synthetic construct
  REGION 1..12: note = Synthetic peptide
  VARIANT 2: note = Xaa is Ile or Val or Met or Leu or Thr
  VARIANT 4: note = Xaa is Thr or Ile or Val or Ser or Asn or Tyr or Glu or Leu
  VARIANT 5: note = Xaa is Asn or Ser or Gly or Ala or Asp or Thr or Arg or Met or Phe
  VARIANT 7: note = Xaa is Val or Ile or Leu or Cys or Thr or Phe
  VARIANT 9: note = Xaa is Trp or Phe or Val or Tyr or Ser or Leu
  VARIANT 10: note = Xaa is Ala or Ser or Cys or Val or Gly
  VARIANT 11: note = Xaa is Val or Ile or Leu or Ala or Met or His
  VARIANT 12: note = Any amino acid or absent
DXGXXSXGXXXX

SEQ ID NO: 10 - protein, 12 aa, synthetic construct
  REGION 1..12: note = Synthetic peptide
  VARIANT 4: note = Xaa is Thr or Ile or Val or Ser or Asn or Tyr or Glu or Leu
  VARIANT 5: note = Xaa is Asn or Ser or Gly or Ala or Asp or Thr or Arg or Met or Phe
  VARIANT 11: note = Xaa is Val or Ile or Leu or Ala or Met or His
  VARIANT 12: note = Any amino acid or absent
DIGXXSVGWAXX

SEQ ID NO: 11 - protein, 12 aa, synthetic construct
  REGION 1..12: note = Synthetic peptide
  MOD_RES 12: note = Any non-polar alkyl amino acid or a hydroxyl amino acid
DIGTNSVGWAVX

SEQ ID NO: 12 - protein, 8 aa, synthetic construct
  REGION 1..8: note = Synthetic peptide
  VARIANT 2: note = Xaa is Val or His
  VARIANT 3: note = Xaa is Ile or Leu or Val
  VARIANT 5: note = Xaa is Met or Thr
IXXEXARE

SEQ ID NO: 13 - protein, 8 aa, synthetic construct
  REGION 1..8: note = Synthetic peptide
  VARIANT 3: note = Xaa is Ile or Leu or Val
IVXEMARE

SEQ ID NO: 14 - protein, 8 aa, synthetic construct
  REGION 1..8: note = Synthetic peptide
  VARIANT 4: note = Xaa is His or Leu
  VARIANT 7: note = Xaa is Arg or Val
  VARIANT 8: note = Xaa is Glu or Val
HHAXDAXX

SEQ ID NO: 15 - protein, 8 aa, synthetic construct
  REGION 1..8: note = Synthetic peptide
HHAHDAYL

SEQ ID NO: 16 - protein, 30 aa, synthetic construct
  REGION 1..30: note = Synthetic polypeptide
  VARIANT 2: note = Xaa is Lys or Pro
  VARIANT 4: note = Xaa is Val or Leu or Ile or Phe
  VARIANT 5: note = Xaa is Gly or Ala or Ser
  VARIANT 6: note = Xaa is Leu or Ile or Val or Phe
  MOD_RES 7..26: note = Any amino acid and this region may encompass 5-20 residues wherein some positions may be absent
  VARIANT 29: note = Xaa is Asp or Glu or Asn or Gln
KXYXXXXXXXXXXXXXXXXXXXXXXXTDXY

SEQ ID NO: 17 - protein, 27 aa, synthetic construct
  REGION 1..27: note = Synthetic peptide
  VARIANT 1: note = Xaa is Asp or Glu or Gln or Asn
  VARIANT 2: note = Xaa is Leu or Ile or Arg or Gln or Val or Met or Lys
  VARIANT 3: note = Xaa is Asp or Glu
  VARIANT 5: note = Xaa is Ile or Val or Thr or Ala or Leu
  VARIANT 6: note = Xaa is Val or Tyr or Ile or Leu or Phe or Trp
  VARIANT 8: note = Xaa is Gln or His or Arg or Lys or Tyr or Ile or Leu or Phe or Trp
  VARIANT 9: note = Xaa is Ser or Ala or Asp or Thr or Lys
  VARIANT 10: note = Xaa is Phe or Leu or Val or Lys or Tyr or Met or Ile or Arg or Ala or Glu or Asp or Gln
  VARIANT 11: note = Xaa is Leu or Arg or Thr or Ile or Val or Ser or Cys or Tyr or Lys or Phe or Gly
  VARIANT 12: note = Xaa is Lys or Gln or Tyr or Thr or Phe or Leu or Trp or Met or Ala or Glu or Gly or Ser
  VARIANT 13: note = Xaa is Asp or Ser or Asn or Arg or Leu or Thr
  VARIANT 14: note = Xaa is Asp or Asn or Ser
  VARIANT 15: note = Xaa is Ser or Ala or Thr or Gly or Arg
  VARIANT 16: note = Xaa is Ile or Leu or Phe or Ser or Arg or Tyr or Gln or Trp or Asp or Lys or His
  VARIANT 17: note = Xaa is Asp or Ser or Ile or Asn or Glu or Ala or His or Phe or Leu or Gln or Met or Gly or Tyr or Val
  VARIANT 19: note = Xaa is Lys or Leu or Arg or Met or Thr or Phe
  VARIANT 20: note = Xaa is Val or Leu or Ile or Ala or Thr
  VARIANT 21: note = Xaa is Leu or Ile or Val or Ala
  VARIANT 22: note = Xaa is Thr or Val or Cys or Glu or Ser or Ala
  VARIANT 23: note = Xaa is Arg or Phe or Thr or Trp or Glu or Leu or Asn or Cys or Lys or Val or Ser or Gln or Ile or Tyr or His or Ala
  VARIANT 24: note = Xaa is Ser or Pro or Arg or Lys or Asn or Ala or His or Gln or Gly or Leu
  VARIANT 25: note = Xaa is Asp or Gly or Thr or Asn or Ser or Lys or Ala or Ile or Glu or Leu or Gln or Arg or Tyr
  VARIANT 26: note = Xaa is Lys or Val or Ala or Glu or Tyr or Ile or Cys or Leu or Ser or Thr or Gly or Lys or Met or Asp or Phe
XXXHXXPXXXXXXXXXXNXXXXXXXXN

SEQ ID NO: 18 - protein, 27 aa, synthetic construct
  REGION 1..27: note = Synthetic peptide
  VARIANT 1: note = Xaa is Asp or Glu
  VARIANT 2: note = Xaa is Leu or Ile or Arg or Gln or Val or Met or Lys
  VARIANT 3: note = Xaa is Asp or Glu
  VARIANT 5: note = Xaa is Ile or Val or Thr or Ala or Leu
  VARIANT 6: note = Xaa is Val or Tyr or Ile or Leu or Phe or Trp
  VARIANT 8: note = Xaa is Gln or His or Arg or Lys or Tyr or Ile or Leu or Phe or Trp
  VARIANT 10: note = Xaa is Phe or Leu or Val or Lys or Tyr or Met or Ile or Arg or Ala or Glu or Asp or Gln
  VARIANT 11: note = Xaa is Leu or Arg or Thr or Ile or Val or Ser or Cys or Tyr or Lys or Phe or Gly
  VARIANT 12: note = Xaa is Lys or Gln or Tyr or Thr or Phe or Leu or Trp or Met or Ala or Glu or Gly or Ser
  VARIANT 16: note = Xaa is Ile or Leu or Phe or Ser or Arg or Tyr or Gln or Trp or Asp or Lys or His
  VARIANT 17: note = Xaa is Asp or Ser or Ile or Asn or Glu or Ala or His or Phe or Leu or Gln or Met or Gly or Tyr or Val
  VARIANT 22: note = Xaa is Thr or Val or Cys or Glu or Ser or Ala
  VARIANT 23: note = Xaa is Arg or Phe or Thr or Trp or Glu or Leu or Asn or Cys or Lys or Val or Ser or Gln or Ile or Tyr or His or Ala
  VARIANT 24: note = Xaa is Ser or Pro or Arg or Lys or Asn or Ala or His or Gln or Gly or Leu
  VARIANT 25: note = Xaa is Asp or Gly or Thr or Asn or Ser or Lys or Ala or Ile or Glu or Leu or Gln or Arg or Tyr
  VARIANT 26: note = Xaa is Lys or Val or Ala or Glu or Tyr or Ile or Cys or Leu or Ser or Thr or Gly or Lys Met or Asp or Phe
XXXHXXPXSXXXDDSXXNKVLXXXXXN

SEQ ID NO: 19 - protein, 27 aa, synthetic construct
  REGION 1..27: note = Synthetic peptide
  VARIANT 1: note = Xaa is Asp or Glu
  VARIANT 3: note = Xaa is Asp or Glu
  VARIANT 8: note = Xaa is Gln or His or Arg or Lys or Tyr or Ile or Leu or Trp
  VARIANT 10: note = Xaa is Phe or Leu or Val or Lys or Tyr or Met or Ile or Arg or Ala or Glu or Asp or Gln
  VARIANT 11: note = Xaa is Leu or Arg or Thr or Ile or Val or Ser or Cys or Tyr or Lys or Phe or Gly
  VARIANT 12: note = Xaa is Lys or Gln or Tyr or Thr or Phe or Leu or Trp or Met or Ala or Glu or Gly or Ser
  VARIANT 16: note = Xaa is Ile or Leu or Phe or Ser or Arg or Tyr or Gln or Trp or Asp or Lys or His
  VARIANT 17: note = Xaa is Asp or Ser or Ile or Asn or Glu or Ala or His or Phe or Leu or Gln or Met or Gly or Tyr or Val
  VARIANT 23: note = Xaa is Arg or Phe or Thr or Trp or Glu or Leu or Asn or Cys or Lys or Val or Ser or Gln or Ile or Tyr or His or Ala
  VARIANT 24: note = Xaa is Ser or Pro or Arg or Lys or Asn or Ala or His or Gln or Gly or Leu
  VARIANT 25: note = Xaa is Asp or Gly or Thr or Asn or Ser or Lys or Ala or Ile or Glu or Leu or Gln or Arg or Tyr
  VARIANT 26: note = Xaa is Lys or Val or Ala or Glu or Tyr or Ile or Cys or Leu or Ser or Thr or Gly or Lys or Met or Asp or Phe
XVXHIVPXSXXXDDSXXNKVLTXXXXN

SEQ ID NO: 20 - protein, 27 aa, synthetic construct
  REGION 1..27: note = Synthetic peptide
  VARIANT 2: note = Xaa is Ile or Val
  VARIANT 6: note = Xaa is Ile or Val
  VARIANT 9: note = Xaa is Ala or Ser
  VARIANT 11: note = Xaa is Ile or Leu
  VARIANT 12: note = Xaa is Lys or Thr
  VARIANT 14: note = Xaa is Asp or Asn
  VARIANT 19: note = Xaa is Arg or Lys or Leu
  VARIANT 22: note = Xaa is Thr or Val
  VARIANT 23: note = Xaa is Ser or Arg
  VARIANT 25: note = Xaa is Lys or Asp or Ala
  VARIANT 26: note = Xaa is Glu or Lys or Gly or Asn
DXDHIXPQXFXXDXSIDNXVLXXSXXN

SEQ ID NO: 21 - protein, 73 aa, synthetic construct
  REGION 1..73: note = Synthetic polypeptide
  VARIANT 8: note = Xaa is Lys or Arg
  VARIANT 12: note = Xaa is Val or Thr
  VARIANT 13: note = Xaa is Gly or Asp
  VARIANT 14: note = Xaa is Glu or Gln or Asp
  VARIANT 15: note = Xaa is Glu or Asp
  VARIANT 19: note = Xaa is Asp or Asn or His
  VARIANT 20: note = Xaa is Tyr or Arg or Asn
  VARIANT 23: note = Xaa is Gln or Asp or Asn
  MOD_RES 25..64: note = Any amino acid and this region may encompass 15-40 residues wherein some positions may be absent
  VARIANT 67: note = Xaa is Gly or Glu
  VARIANT 69: note = Xaa is Ser or Gly
  VARIANT 71: note = Xaa is Asp or Asn
LYYLQNGXDMYXXXXLDIXXLSXYXXXXXXXXXXXXXXXXXXXXXXXXXXXXXXXXXXXXXXXXNRXKXDXVP

SEQ ID NO: 22 - DNA, 4107 bp, synthetic construct
  misc_feature 1..4107: note = Synthetic polynucleotide
  source 1..4107: mol_type = other DNA
atggataaaaagtacagcatcgggctggacatcggtacaaactcagtggggtgggccgtgattacggacgagtacaaggtaccctccaaaaaatttaaagtgctgggtaacacggacagacactctataaagaaaaatcttattggagccttgctgttcgactcaggcgagacagccgaagccacaaggttgaagcggaccgccaggaggcggtataccaggagaaagaaccgcatatgctacctgcaagaaatcttcagtaacgagatggcaaaggttgacgatagctttttccatcgcctggaagaatcctttcttgttgaggaagacaagaagcacgaacggcaccccatctttggcaatattgtcgacgaagtggcatatcacgaaaagtacccgactatctaccacctcaggaagaagctggtggactctaccgataaggcggacctcagacttatttatttggcactcgcccacatgattaaatttagaggacatttcttgatcgagggcgacctgaacccggacaacagtgacgtcgataagctgttcatccaacttgtgcagacctacaatcaactgttcgaagaaaaccctataaatgcttcaggagtcgacgctaaagcaatcctgtccgcgcgcctctcaaaatctagaagacttgagaatctgattgctcagttgcccggggaaaagaaaaatggattgtttggcaacctgatcgccctcagtctcggactgaccccaaatttcaaaagtaacttcgacctggccgaagacgctaagctccagctgtccaaggacacatacgatgacgacctcgacaatctgctggcccagattggggatcagtacgccgatctctttttggcagcaaagaacctgtccgacgccatcctgttgagcgatatcttgagagtgaacaccgaaattactaaagcaccccttagcgcatctatgatcaagcggtacgacgagcatcatcaggatctgaccctgctgaaggctcttgtgaggcaacagctccccgaaaaatacaaggaaatcttctttgaccagagcaaaaacggctacgctggctatatagatggtggggccagtcaggaggaattctataaattcatcaagcccattctcgagaaaatggacggcacagaggagttgctggtcaaacttaacagggaggacctgctgcggaagcagcggacctttgacaacgggtctatcccccaccagattcatctgggcgaactgcacgcaatcctgaggaggcaggaggatttttatccttttcttaaagataaccgcgagaaaatagaaaagattcttacattcaggatcccgtactacgtgggacctctcgcccggggcaattcacggtttgcctggatgacaaggaagtcagaggagactattacaccttggaacttcgaagaagtggtggacaagggtgcatctgcccagtctttcatcgagcggatgacaaattttgacaagaacctccctaatgagaaggtgctgcccaaacattctctgctctacgagtactttaccgtctacaatgaactgactaaagtcaagtacgtcaccgagggaatgaggaagccggcattccttagtggagaacagaagaaggcgattgtagacctgttgttcaagaccaacaggaaggtgactgtgaagcaacttaaagaagactactttaagaagatcgaatgttttgacagtgtggaaatttcaggggttgaagaccgcttcaatgcgtcattggggacttaccatgatcttctcaagatcataaaggacaaagacttcctggacaacgaagaaaatgaggatattctcgaagacatcgtcctcaccctgaccctgttcgaagacagggaaatgatagaagagcgcttgaaaacctatgcccacctcttcgacgataaagttatgaagcagctgaagcgcaggagatacacaggatggggaagattgtcaaggaagctgatcaatggaattagggataaacagagtggcaagaccatactggatttcctcaaatctgatggcttcgccaataggaacttcatgcaactgattcacgatgactctcttaccttcaaggaggacattcaaaaggctcaggtgagcgggcagggagactcccttcatgaacacatcgcgaatttggcaggttcccccgctattaaaaagggcatccttcaaactgtcaaggtggtggatgaattggtcaaggtaatgggcagacataagccagaaaatattgtgatcgagatggcccgcgaaaaccagaccacacagaagggccagaaaaatagtagagagcggatgaagaggatcgaggagggcatcaaagagctgggatctcagattctcaaagaacaccccgtagaaaacacacagctgcagaacgaaaaattgtacttgtactatctgcagaacggcagagacatgtacgtcgaccaagaacttgatattaatagactgtccgactatgacgtagaccatatcgtgccccagtccttcctgaaggacgactccattgataacaaagtcttgacaagaagcgacaagaacaggggtaaaagtgataatgtgcctagcgaggaggtggtgaaaaaaatgaagaactactggcgacagctgcttaatgcaaagctcattacacaacggaagttcgataatctgacgaaagcagagagaggtggcttgtctgagttggacaaggcagggtttattaagcggcagctggtggaaactaggcagatcacaaagcacgtggcgcagattttggacagccggatgaacacaaaatacgacgaaaatgataaactgatacgagaggtcaaagttatcacgctgaaaagcaagctggtgtccgattttcggaaagacttccagttctacaaagttcgcgagattaataactaccatcatgctcacgatgcgtacctgaacgctgttgtcgggaccgccttgataaagaagtacccaaagctggaatccgagttcgtatacggggattacaaagtgtacgatgtgaggaaaatgatagccaagtccgagcaggagattggaaaggccacagctaagtacttcttttattctaacatcatgaatttttttaagacggaaattaccctggccaacggagagatcagaaagcggccccttatagagacaaatggtgaaacaggtgaaatcgtctgggataagggcagggatttcgctactgtgaggaaggtgctgagtatgccacaggtaaatatcgtgaaaaaaaccgaagtacagaccggaggattttccaaggaaagcattttgcctaaaagaaactcagacaagctcatcgcccgcaagaaagattgggaccctaagaaatacgggggatttgactcacccaccgtagcctattctgtgctggtggtagctaaggtggaaaaaggaaagtctaagaagctgaagtccgtgaaggaactcttgggaatcactatcatggaaagatcatcctttgaaaagaaccctatcgatttcctggaggctaagggttacaaggaggtcaagaaagacctcatcattaaactgccaaaatactctctcttcgagctggaaaatggcaggaagagaatgttggccagcgccggagagctgcaaaagggaaacgagcttgctctgccctccaaatatgttaattttctctatctcgcttcccactatgaaaagctgaaagggtctcccgaagataacgagcagaagcagctgttcgtcgaacagcacaagcactatctggatgaaataatcgaacaaataagcgagttcagcaaaagggttatcctggcggatgctaatttggacaaagtactgtctgcttataacaagcaccgggataagcctattagggaacaagccgagaatataattcacctctttacactcacgaatctcggagcccccgccgccttcaaatactttgatacgactatcgaccggaaacggtataccagtaccaaagaggtcctcgatgccaccctcatccaccagtcaattactggcctgtacgaaacacggatcgacctctctcaactgggcggcgactag

SEQ ID NO: 23 - protein, 1368 aa, Streptococcus pyogenes [sequence omitted]

SEQ ID NO: 24 - DNA, 3249 bp, synthetic construct
  misc_feature 1..3249: note = Synthetic polynucleotide
  source 1..3249: mol_type = other DNA
atggccgccttcaagcccaaccccatcaactacatcctgggcctggacatcggcatcgccagcgtgggctgggccatggtggagatcgacgaggacgagaaccccatctgcctgatcgacctgggtgtgcgcgtgttcgagcgcgctgaggtgcccaagactggtgacagtctggctatggctcgccggcttgctcgctctgttcggcgccttactcgccggcgcgctcaccgccttctgcgcgctcgccgcctgctgaagcgcgagggtgtgctgcaggctgccgacttcgacgagaacggcctgatcaagagcctgcccaacactccttggcagctgcgcgctgccgctctggaccgcaagctgactcctctggagtggagcgccgtgctgctgcacctgatcaagcaccgcggctacctgagccagcgcaagaacgagggcgagaccgccgacaaggagctgggtgctctgctgaagggcgtggccgacaacgcccacgccctgcagactggtgacttccgcactcctgctgagctggccctgaacaagttcgagaaggagagcggccacatccgcaaccagcgcggcgactacagccacaccttcagccgcaaggacctgcaggccgagctgatcctgctgttcgagaagcagaaggagttcggcaacccccacgtgagcggcggcctgaaggagggcatcgagaccctgctgatgacccagcgccccgccctgagcggcgacgccgtgcagaagatgctgggccactgcaccttcgagccagccgagcccaaggccgccaagaacacctacaccgccgagcgcttcatctggctgaccaagctgaacaacctgcgcatcctggagcagggcagcgagcgccccctgaccgacaccgagcgcgccaccctgatggacgagccctaccgcaagagcaagctgacctacgcccaggcccgcaagctgctgggtctggaggacaccgccttcttcaagggcctgcgctacggcaaggacaacgccgaggccagcaccctgatggagatgaaggcctaccacgccatcagccgcgccctggagaaggagggcctgaaggacaagaagagtcctctgaacctgagccccgagctgcaggacgagatcggcaccgccttcagcctgttcaagaccgacgaggacatcaccggccgcctgaaggaccgcatccagcccgagatcctggaggccctgctgaagcacatcagcttcgacaagttcgtgcagatcagcctgaaggccctgcgccgcatcgtgcccctgatggagcagggcaagcgctacgacgaggcctgcgccgagatctacggcgaccactacggcaagaagaacaccgaggagaagatctacctgcctcctatccccgccgacgagatccgcaaccccgtggtgctgcgcgccctgagccaggcccgcaaggtgatcaacggcgtggtgcgccgctacggcagccccgcccgcatccacatcgagaccgcccgcgaggtgggcaagagcttcaaggaccgcaaggagatcgagaagcgccaggaggagaaccgcaaggaccgcgagaaggccgccgccaagttccgcgagtacttccccaacttcgtgggcgagcccaagagcaaggacatcctgaagctgcgcctgtacgagcagcagcacggcaagtgcctgtacagcggcaaggagatcaacctgggccgcctgaacgagaagggctacgtggagatcgaccacgccctgcccttcagccgcacctgggacgacagcttcaacaacaaggtgctggtgctgggcagcgagaaccagaacaagggcaaccagaccccctacgagtacttcaacggcaaggacaacagccgcgagtggcaggagttcaaggcccgcgtggagaccagccgcttcccccgcagcaagaagcagcgcatcctgctgcagaagttcgacgaggacggcttcaaggagcgcaacctgaacgacacccgctacgtgaaccgcttcctgtgccagttcgtggccgaccgcatgcgcctgaccggcaagggcaagaagcgcgtgttcgccagcaacggccagatcaccaacctgctgcgcggcttctggggcctgcgcaaggtgcgcgccgagaacgaccgccaccacgccctggacgccgtggtggtggcctgcagcaccgtggccatgcagcagaagatcacccgcttcgtgcgctacaaggagatgaacgccttcgacggtaaaaccatcgacaaggagaccggcgaggtgctgcaccagaagacccacttcccccagccctgggagttcttcgcccaggaggtgatgatccgcgtgttcggcaagcccgacggcaagcccgagttcgaggaggccgacacccccgagaagctgcgcaccctgctggccgagaagctgagcagccgccctgaggccgtgcacgagtacgtgactcctctgttcgtgagccgcgcccccaaccgcaagatgagcggtcagggtcacatggagaccgtgaagagcgccaagcgcctggacgagggcgtgagcgtgctgcgcgtgcccctgacccagctgaagctgaaggacctggagaagatggtgaaccgcgagcgcgagcccaagctgtacgaggccctgaaggcccgcctggaggcccacaaggacgaccccgccaaggccttcgccgagcccttctacaagtacgacaaggccggcaaccgcacccagcaggtgaaggccgtgcgcgtggagcaggtgcagaagaccggcgtgtgggtgcgcaaccacaacggcatcgccgacaacgccaccatggtgcgcgtggacgtgttcgagaagggcgacaagtactacctggtgcccatctacagctggcaggtggccaagggcatcctgcccgaccgcgccgtggtgcagggcaaggacgaggaggactggcagctgatcgacgacagcttcaacttcaagttcagcctgcaccccaacgacctggtggaggtgatcaccaagaaggcccgcatgttcggctacttcgccagctgccaccgcggcaccggcaacatcaacatccgcatccacgacctggaccacaagatcggcaagaacggcatcctggagggcatcggcgtgaagaccgccctgagcttccagaagtaccagatcgacgagctgggcaaggagatccgcccctgccgcctgaagaagcgccctcctgtgcgctaa

SEQ ID NO: 25 - protein, 1082 aa, Neisseria meningitidis
MAAFKPNPINYILGLDIGIASVGWAMVEIDEDENPICLIDLGVRVFERAEVPKTGDSLAMARRLARSVRRLTRRRAHRLLRARRLLKREGVLQAADFDENGLIKSLPNTPWQLRAAALDRKLTPLEWSAVLLHLIKHRGYLSQRKNEGETADKELGALLKGVADNAHALQTGDFRTPAELALNKFEKESGHIRNQRGDYSHTFSRKDLQAELILLFEKQKEFGNPHVSGGLKEGIETLLMTQRPALSGDAVQKMLGHCTFEPAEPKAAKNTYTAERFIWLTKLNNLRILEQGSERPLTDTERATLMDEPYRKSKLTYAQARKLLGLEDTAFFKGLRYGKDNAEASTLMEMKAYHAISRALEKEGLKDKKSPLNLSPELQDEIGTAFSLFKTDEDITGRLKDRIQPEILEALLKHISFDKFVQISLKALRRIVPLMEQGKRYDEACAEIYGDHYGKKNTEEKIYLPPIPADEIRNPVVLRALSQARKVINGVVRRYGSPARIHIETAREVGKSFKDRKEIEKRQEENRKDREKAAAKFREYFPNFVGEPKSKDILKLRLYEQQHGKCLYSGKEINLGRLNEKGYVEIDHALPFSRTWDDSFNNKVLVLGSENQNKGNQTPYEYFNGKDNSREWQEFKARVETSRFPRSKKQRILLQKFDEDGFKERNLNDTRYVNRFLCQFVADRMRLTGKGKKRVFASNGQITNLLRGFWGLRKVRAENDRHHALDAVVVACSTVAMQQKITRFVRYKEMNAFDGKTIDKETGEVLHQKTHFPQPWEFFAQEVMIRVFGKPDGKPEFEEADTPEKLRTLLAEKLSSRPEAVHEYVTPLFVSRAPNRKMSGQGHMETVKSAKRLDEGVSVLRVPLTQLKLKDLEKMVNREREPKLYEALKARLEAHKDDPAKAFAEPFYKYDKAGNRTQQVKAVRVEQVQKTGVWVRNHNGIADNATMVRVDVFEKGDKYYLVPIYSWQVAKGILPDRAVVQGKDEEDWQLIDDSFNFKFSLHPNDLVEVITKKARMFGYFASCHRGTGNINIRIHDLDHKIGKNGILEGIGVKTALSFQKYQIDELGKEIRPCRLKKRPPVR

SEQ ID NO: 26 - protein, 1053 aa, Staphylococcus aureus
MKRNYILGLDIGITSVGYGIIDYETRDVIDAGVRLFKEANVENNEGRRSKRGARRLKRRRRHRIQRVKKLLFDYNLLTDHSELSGINPYEARVKGLSQKLSEEEFSAALLHLAKRRGVHNVNEVEEDTGNELSTKEQISRNSKALEEKYVAELQLERLKKDGEVRGSINRFKTSDYVKEAKQLLKVQKAYHQLDQSFIDTYIDLLETRRTYYEGPGEGSPFGWKDIKEWYEMLMGHCTYFPEELRSVKYAYNADLYNALNDLNNLVITRDENEKLEYYEKFQIIENVFKQKKKPTLKQIAKEILVNEEDIKGYRVTSTGKPEFTNLKVYHDIKDITARKEIIENAELLDQIAKILTIYQSSEDIQEELTNLNSELTQEEIEQISNLKGYTGTHNLSLKAINLILDELWHTNDNQIAIFNRLKLVPKKVDLSQQKEIPTTLVDDFILSPVVKRSFIQSIKVINAIIKKYGLPNDIIIELAREKNSKDAQKMINEMQKRNRQTNERIEEIIRTTGKENAKYLIEKIKLHDMQEGKCLYSLEAIPLEDLLNNPFNYEVDHIIPRSVSFDNSFNNKVLVKQEENSKKGNRTPFQYLSSSDSKISYETFKKHILNLAKGKGRISKTKKEYLLEERDINRFSVQKDFINRNLVDTRYATRGLMNLLRSYFRVNNLDVKVKSINGGFTSFLRRKWKFKKERNKGYKHHAEDALIIANADFIFKEWKKLDKAKKVMENQMFEEKQAESMPEIETEQEYKEIFITPHQIKHIKDFKDYKYSHRVDKKPNRELINDTLYSTRKDDKGNTLIVNNLNGLYDKDNDKLKKLINKSPEKLLMYHHDPQTYQKLKLIMEQYGDEKNPLYKYYEETGNYLTKYSKKDNGPVIKKIKYYGNKLNAHLDITDDYPNSRNKVVKLSLKPYRFDVYLDNGVYKFVTVKNLDVIKKENYYEVNSKCYEEAKKLKKISNQAEFIASFYNNDLIKINGELYRVIGVNNDLLNRIEVNMIDITYREYLENMNDKRPPRIIKTIASKTQSIKKYSTDILGNLYEVKSKKHPQIIKKG

SEQ ID NO: 27 - RNA, 104 nt, synthetic construct
  misc_feature 1..104: note = Synthetic polynucleotide
  variation 1..20: note = a, c, u, g, unknown or other
  source 1..104: mol_type = other RNA
nnnnnnnnnnnnnnnnnnnngttttagagctatgctgaaaagcatagcaagttaaaataaggctagtccgttatcaacttgaaaaagtggcaccgagtcggtgc

SEQ ID NO: 28 - RNA, 106 nt, synthetic construct
  misc_feature 1..106: note = Synthetic polynucleotide
  variation 1..20: note = a, c, u, g, unknown or other
  source 1..106: mol_type = other RNA
nnnnnnnnnnnnnnnnnnnngttttagagctatgctggaaacagcatagcaagttaaaataaggctagtccgttatcaacttgaaaaagtggcaccgagtcggtgc

SEQ ID NO: 29 - RNA, 116 nt, synthetic construct
  misc_feature 1..116: note = Synthetic polynucleotide
  variation 1..20: note = a, c, u, g, unknown or other
  source 1..116: mol_type = other RNA
nnnnnnnnnnnnnnnnnnnngttttagagctatgctgttttggaaacaaaacagcatagcaagttaaaataaggctagtccgttatcaacttgaaaaagtggcaccgagtcggtgc

SEQ ID NO: 30 - RNA, 96 nt, synthetic construct
  misc_feature 1..96: note = Synthetic oligonucleotide
  variation 1..20: note = a, c, u, g, unknown or other
  source 1..96: mol_type = other RNA
nnnnnnnnnnnnnnnnnnnngtattagagctagaaatagcaagttaatataaggctagtccgttatcaacttgaaaaagtggcaccgagtcggtgc

SEQ ID NO: 31 - RNA, 96 nt, synthetic construct
  misc_feature 1..96: note = Synthetic oligonucleotide
  variation 1..20: note = a, c, u, g, unknown or other
  source 1..96: mol_type = other RNA
nnnnnnnnnnnnnnnnnnnngtttaagagctagaaatagcaagtttaaataaggctagtccgttatcaacttgaaaaagtggcaccgagtcggtgc

SEQ ID NO: 32 - RNA, 116 nt, synthetic construct
  misc_feature 1..116: note = Synthetic polynucleotide
  variation 1..20: note = a, c, u, g, unknown or other
  source 1..116: mol_type = other RNA
nnnnnnnnnnnnnnnnnnnngtattagagctatgctgtattggaaacaatacagcatagcaagttaatataaggctagtccgttatcaacttgaaaaagtggcaccgagtcggtgc

SEQ ID NO: 33 - RNA, 47 nt, synthetic construct
  misc_feature 1..47: note = Synthetic oligonucleotide
  source 1..47: mol_type = other RNA
aaggctagtccgttatcaacttgaaaaagtggcaccgagtcggtgct

SEQ ID NO: 34 - RNA, 49 nt, synthetic construct
  misc_feature 1..49: note = Synthetic oligonucleotide
  source 1..49: mol_type = other RNA
aaggctagtccgttatcaacttgaaaaagtggcaccgagtcggtggtgc

SEQ ID NO: 35 - RNA, 51 nt, synthetic construct
  misc_feature 1..51: note = Synthetic oligonucleotide
  source 1..51: mol_type = other RNA
aaggctagtccgttatcaacttgaaaaagtggcaccgagtcggtgcggatc

SEQ ID NO: 36 - RNA, 31 nt, synthetic construct
  misc_feature 1..31: note = Synthetic oligonucleotide
  source 1..31: mol_type = other RNA
aaggctagtccgttatcaacttgaaaaagtg

SEQ ID NO: 37 - RNA, 18 nt, synthetic construct
  misc_feature 1..18: note = Synthetic oligonucleotide
  source 1..18: mol_type = other RNA
aaggctagtccgttatca

SEQ ID NO: 38 - RNA, 12 nt, synthetic construct
  misc_feature 1..12: note = Synthetic oligonucleotide
  source 1..12: mol_type = other RNA
aaggctagtccg

SEQ ID NO: 39 - DNA, 3159 bp, synthetic construct
  misc_feature 1..3159: note = Synthetic polynucleotide
  source 1..3159: mol_type = other DNA
atgaaaaggaactacattctggggctggacatcgggattacaagcgtggggtatgggattattgactatgaaacaagggacgtgatcgacgcaggcgtcagactgttcaaggaggccaacgtggaaaacaatgagggacggagaagcaagaggggagccaggcgcctgaaacgacggagaaggcacagaatccagagggtgaagaaactgctgttcgattacaacctgctgaccgaccattctgagctgagtggaattaatccttatgaagccagggtgaaaggcctgagtcagaagctgtcagaggaagagttttccgcagctctgctgcacctggctaagcgccgaggagtgcataacgtcaatgaggtggaagaggacaccggcaacgagctgtctacaaaggaacagatctcacgcaatagcaaagctctggaagagaagtatgtcgcagagctgcagctggaacggctgaagaaagatggcgaggtgagagggtcaattaataggttcaagacaagcgactacgtcaaagaagccaagcagctgctgaaagtgcagaaggcttaccaccagctggatcagagcttcatcgatacttatatcgacctgctggagactcggagaacctactatgagggaccaggagaagggagccccttcggatggaaagacatcaaggaatggtacgagatgctgatgggacattgcacctattttccagaagagctgagaagcgtcaagtacgcttataacgcagatctgtacaacgccctgaatgacctgaacaacctggtcatcaccagggatgaaaacgagaaactggaatactatgagaagttccagatcatcgaaaacgtgtttaagcagaagaaaaagcctacactgaaacagattgctaaggagatcctggtcaacgaagaggacatcaagggctaccgggtgacaagcactggaaaaccagagttcaccaatctgaaagtgtatcacgatattaaggacatcacagcacggaaagaaatcattgagaacgccgaactgctggatcagattgctaagatcctgactatctaccagagctccgaggacatccaggaagagctgactaacctgaacagcgagctgacccaggaagagatcgaacagattagtaatctgaaggggtacaccggaacacacaacctgtccctgaaagctatcaatctgattctggatgagctgtggcatacaaacgacaatcagattgcaatctttaaccggctgaagctggtcccaaaaaaggtggacctgagtcagcagaaagagatcccaaccacactggtggacgatttcattctgtcacccgtggtcaagcggagcttcatccagagcatcaaagtgatcaacgccatcatcaagaagtacggcctgcccaatgatatcattatcgagctggctagggagaagaacagcaaggacgcacagaagatgatcaatgagatgcagaaacgaaaccggcagaccaatgaacgcattgaagagattatccgaactaccgggaaagagaacgcaaagtacctgattgaaaaaatcaagctgcacgatatgcaggagggaaagtgtctgtattctctggaggccatccccctggaggacctgctgaacaatccattcaactacgaggtcgatcatattatccccagaagcgtgtccttcgacaattcctttaacaacaaggtgctggtcaagcaggaagagaactctaaaaagggcaataggactcctttccagtacctgtctagttcagattccaagatctcttacgaaacctttaaaaagcacattctgaatctggccaaaggaaagggccgcatcagcaagaccaaaaaggagtacctgctggaagagcgggacatcaacagattctccgtccagaaggattttattaaccggaatctggtggacacaagatacgctactcgcggcctgatgaatctgctgcgatcctatttccgggtgaacaatctggatgtgaaagtcaagtccatcaacggcgggttcacatcttttctgaggcgcaaatggaagtttaaaaaggagcgcaacaaagggtacaagcaccatgccgaagatgctctgattatcgcaaatgccgacttcatctttaaggagtggaaaaagctggacaaagccaagaaagtgatggagaaccagatgttcgaagagaagcaggccgaatctatgcccgaaatcgagacagaacaggagtacaaggagattttcatcactcctcaccagatcaagcatatcaaggatttcaaggactacaagtactctcaccgggtggataaaaagcccaacagagagctgatcaatgacaccctgtatagtacaagaaaagacgataaggggaataccctgattgtgaacaatctgaacggactgtacgacaaagataatgacaagctgaaaaagctgatcaacaaaagtcccgagaagctgctgatgtaccaccatgatcctcagacatatcagaaactgaagctgattatggagcagtacggcgacgagaagaacccactgtataagtactatgaagagactgggaactacctgaccaagtatagcaaaaaggataatggccccgtgatcaagaagatcaagtactatgggaacaagctgaatgcccatctggacatcacagacgattaccctaacagtcgcaacaaggtggtcaagctgtcactgaagccatacagattcgatgtctatctggacaacggcgtgtataaatttgtgactgtcaagaatctggatgtcatcaaaaaggagaactactatgaagtgaatagcaagtgctacgaagaggctaaaaagctgaaaaagattagcaaccaggcagagttcatcgcctccttttacaacaacgacctgattaagatcaatggcgaactgtatagggtcatcggggtgaacaatgatctgctgaaccgcattgaagtgaatatgattgacatcacttaccgagagtatctggaaaacatgaatgataagcgcccccctcgaattatcaaaacaattgcctctaagactcagagtatcaaaaagtactcaaccgacattctgggaaacctgtatgaggtgaagagcaaaaagcaccctcagattatcaaaaagggc

SEQ ID NO: 40 - RNA, 102 nt, synthetic construct
  misc_feature 1..102: note = Synthetic oligonucleotide
  variation 1..20: note = n is a, c, g, or u
  source 1..102: mol_type = other RNA
nnnnnnnnnnnnnnnnnnnngttttagtactctggaaacagaatctactaaaacaaggcaaaatgccgtgtttatctcgtcaacttgttggcgagatttttt

SEQ ID NO: 41 - skipped

SEQ ID NO: 42 - RNA, 42 nt, Streptococcus pyogenes
  variation 1..20: note = a, c, u, g, unknown or other
  source 1..42: mol_type = other RNA
nnnnnnnnnnnnnnnnnnnngttttagagctatgctgttttg

SEQ ID NO: 43 - RNA, 85 nt, Streptococcus pyogenes
  source 1..85: mol_type = other RNA
ggaaccattcaaaacagcatagcaagttaaaataaggctagtccgttatcaacttgaaaaagtggcaccgagtcggtgctttttt

SEQ ID NO: 44 - RNA, 62 nt, Streptococcus pyogenes
  variation 1..20: note = a, c, u, g, unknown or other
  source 1..62: mol_type = other RNA
nnnnnnnnnnnnnnnnnnnngttttagagctagaaatagcaagttaaaataaggctagtccg

SEQ ID NO: 45 - RNA, 102 nt, Streptococcus pyogenes
  variation 1..20: note = a, c, u, g, unknown or other
  source 1..102: mol_type = other RNA
nnnnnnnnnnnnnnnnnnnngttttagagctagaaatagcaagttaaaataaggctagtccgttatcaacttgaaaaagtggcaccgagtcggtgctttttt

SEQ ID NO: 46 - RNA, 75 nt, Streptococcus pyogenes
  variation 1..20: note = a, c, u, g, unknown or other
  source 1..75: mol_type = other RNA
nnnnnnnnnnnnnnnnnnnngttttagagctatgctgaaaagcatagcaagttaaaataaggctagtccgttatc

SEQ ID NO: 47 - RNA, 87 nt, Streptococcus pyogenes
  variation 1..20: note = a, c, u, g, unknown or other
  source 1..87: mol_type = other RNA
nnnnnnnnnnnnnnnnnnnngttttagagctatgctgttttggaaacaaaacagcatagcaagttaaaataaggctagtccgttatc

SEQ ID NO: 48 - RNA, 42 nt, Streptococcus thermophilus
  variation 1..20: note = a, c, u, g, unknown or other
  source 1..42: mol_type = other RNA
nnnnnnnnnnnnnnnnnnnngttttagagctgtgttgtttcg

SEQ ID NO: 49 - RNA, 78 nt, Streptococcus thermophilus
  source 1..78: mol_type = other RNA
gggcgaaacaacacagcgagttaaaataaggcttagtccgtactcaacttgaaaaggtggcaccgattcggtgttttt

SEQ ID NO: 50 - RNA, 42 nt, Streptococcus pyogenes; identical to SEQ ID NO: 42
  variation 1..20: note = a, c, u, g, unknown or other
  source 1..42: mol_type = other RNA

SEQ ID NO: 51 - RNA, 42 nt, Streptococcus thermophilus; identical to SEQ ID NO: 48
  variation 1..20: note = a, c, u, g, unknown or other
  source 1..42: mol_type = other RNA

SEQ ID NO: 52 - RNA, 85 nt, Streptococcus pyogenes
  source 1..85: mol_type = other RNA
gaaccattcaaaacagcatagcaagttaaaataaggctagtccgttatcaacttgaaaaagtggcaccgagtcggtgcttttttt

SEQ ID NO: 53 - RNA, 78 nt, Streptococcus thermophilus; identical to SEQ ID NO: 49
  source 1..78: mol_type = other RNA

SEQ ID NO: 54 - protein, 12 aa, synthetic construct
  REGION 1..12: note = Synthetic peptide
DIGTNSVGWAVT

SEQ ID NO: 55 - protein, 12 aa, synthetic construct
  REGION 1..12: note = Synthetic peptide
DIGTNSVGWAVT

SEQ ID NO: 56 - protein, 12 aa, synthetic construct
  REGION 1..12: note = Synthetic peptide
DVGTNSVGWAVT

SEQ ID NO: 57 - protein, 12 aa, synthetic construct
  REGION 1..12: note = Synthetic peptide
DVGTNSVGWAVT

SEQ ID NO: 58 - protein, 12 aa, synthetic construct
  REGION 1..12: note = Synthetic peptide
DMGTNSVGWAVT

SEQ ID NO: 59 - protein, 12 aa, synthetic construct
  REGION 1..12: note = Synthetic peptide
DVGTSSVGWAVT

SEQ ID NO: 60 - protein, 12 aa, synthetic construct
  REGION 1..12: note = Synthetic peptide
DIGTASVGWAVT

SEQ ID NO: 61 - protein, 12 aa, synthetic construct
  REGION 1..12: note = Synthetic peptide
DVGTGSVGWAVT

SEQ ID NO: 62 - protein, 12 aa, synthetic construct
  REGION 1..12: note = Synthetic peptide
DIGTNSVGWAVV

SEQ ID NO: 63 - protein, 12 aa, synthetic construct
  REGION 1..12: note = Synthetic peptide
DIGTNSVGWAVI

SEQ ID NO: 64 - protein, 12 aa, synthetic construct
  REGION 1..12: note = Synthetic peptide
DIGTNSVGWAVL

SEQ ID NO: 65 - protein, 12 aa, synthetic construct
  REGION 1..12: note = Synthetic peptide
DLGTNSIGWAVV

SEQ ID NO: 66 - protein, 11 aa, synthetic construct
  REGION 1..11: note = Synthetic peptide
DLGTNSIGWAI

SEQ ID NO: 67 - protein, 12 aa, synthetic construct
  REGION 1..12: note = Synthetic peptide
DLGTNSIGWALV

SEQ ID NO: 68 - protein, 12 aa, synthetic construct
  REGION 1..12: note = Synthetic peptide
DIGTNSVGWCVT

SEQ ID NO: 69 - protein, 12 aa, synthetic construct
  REGION 1..12: note = Synthetic peptide
DIGTNSVGYAVT

SEQ ID NO: 70 - protein, 12 aa, synthetic construct
  REGION 1..12: note = Synthetic peptide
DMGTGSLGWAVT

SEQ ID NO: 71 - protein, 12 aa, synthetic construct
  REGION 1..12: note = Synthetic peptide
DIGTSSVGWAAI

SEQ ID NO: 72 - protein, 12 aa, synthetic construct
  REGION 1..12: note = Synthetic peptide
DLGTGSVGWAVV

SEQ ID NO: 73 - protein, 12 aa, synthetic construct
  REGION 1..12: note = Synthetic peptide
DLGVGSVGWAIV

SEQ ID NO: 74 - protein, 12 aa, synthetic construct
  REGION 1..12: note = Synthetic peptide
DLGIASIGWAII

SEQ ID NO: 75 - protein, 12 aa, synthetic construct
  REGION 1..12: note = Synthetic peptide
DLGIASVGWAIV

SEQ ID NO: 76 - protein, 12 aa, synthetic construct
  REGION 1..12: note = Synthetic peptide
DLGVASVGWSIV

SEQ ID NO: 77 - protein, 12 aa, synthetic construct
  REGION 1..12: note = Synthetic peptide
DIGIASVGWAIL

SEQ ID NO: 78 - protein, 12 aa, synthetic construct
  REGION 1..12: note = Synthetic peptide
DLGISSVGWSVI

SEQ ID NO: 79 - protein, 12 aa, synthetic construct
  REGION 1..12: note = Synthetic peptide
DIGIASVGWSVI

SEQ ID NO: 80 - protein, 12 aa, synthetic construct
  REGION 1..12: note = Synthetic peptide
DVGIGSIGWAVI

SEQ ID NO: 81 - protein, 12 aa, synthetic construct
  REGION 1..12: note = Synthetic peptide
DLGVGSIGFAIV

SEQ ID NO: 82 - protein, 12 aa, synthetic construct
  REGION 1..12: note = Synthetic peptide
DIGYASIGWAVI

SEQ ID NO: 83 - protein, 12 aa, synthetic construct
  REGION 1..12: note = Synthetic peptide
DTGTNSLGWAIV

SEQ ID NO: 84 - protein, 12 aa, synthetic construct
  REGION 1..12: note = Synthetic peptide
DLGTNSIGWCLL

SEQ ID NO: 85 - protein, 12 aa, synthetic construct
  REGION 1..12: note = Synthetic peptide
DIGTDSLGWAVF

SEQ ID NO: 86 - protein, 12 aa, synthetic construct
  REGION 1..12: note = Synthetic peptide
DIGSNSIGFAVV

SEQ ID NO: 87 - protein, 12 aa, synthetic construct
  REGION 1..12: note = Synthetic peptide
DLGVGSIGVAVA

SEQ ID NO: 88 - protein, 12 aa, synthetic construct
  REGION 1..12: note = Synthetic peptide
DLGIASCGWGVV

SEQ ID NO: 89 - protein, 12 aa, synthetic construct
  REGION 1..12: note = Synthetic peptide
DLGIASVGWCLT

SEQ ID NO: 90 - protein, 12 aa, synthetic construct
  REGION 1..12: note = Synthetic peptide
DIGIGSVGVGIL

SEQ ID NO: 91 - protein, 12 aa, synthetic construct
  REGION 1..12: note = Synthetic peptide
DIGITSVGYGLI

SEQ ID NO: 92 - protein, 12 aa, synthetic construct
  REGION 1..12: note = Synthetic peptide
DIGITSVGFGII

SEQ ID NO: 93 - protein, 12 aa, synthetic construct
  REGION 1..12: note = Synthetic peptide
DVGITSTGYAVL

SEQ ID NO: 94 - protein, 12 aa, synthetic construct
  REGION 1..12: note = Synthetic peptide
DLGITSFGYAIL

SEQ ID NO: 95 - protein, 12 aa, synthetic construct
  REGION 1..12: note = Synthetic peptide
DIGNASVGWSAF

SEQ ID NO: 96 - protein, 12 aa, synthetic construct
  REGION 1..12: note = Synthetic peptide
DVGTNSCGWVAM

SEQ ID NO: 97 - protein, 12 aa, synthetic construct
  REGION 1..12: note = Synthetic peptide
DVGERSIGLAAV

SEQ ID NO: 98 - protein, 12 aa, synthetic construct
  REGION 1..12: note = Synthetic peptide
DVGLNSVGLAAV

SEQ ID NO: 99 - protein, 12 aa, synthetic construct
  REGION 1..12: note = Synthetic peptide
DVGLMSVGLAAI

SEQ ID NO: 100 - protein, 12 aa, synthetic construct
  REGION 1..12: note = Synthetic peptide
DVGTFSVGLAAI

SEQ ID NO: 101 - protein, 12 aa, synthetic construct
  REGION 1..12: note = Synthetic peptide
DIGTGSVGYACM

SEQ ID NO: 102 - protein, 12 aa, synthetic construct
  REGION 1..12: note = Synthetic peptide
DLGTTSIGFAHI

SEQ ID NO: 103 - protein, 12 aa, synthetic construct
  REGION 1..12: note = Synthetic peptide
DLGTNSIGSSVR

SEQ ID NO: 104 - protein, 12 aa, synthetic construct
  REGION 1..12: note = Synthetic peptide
DIGTNSVGWAVT

SEQ ID NO: 105 - protein, 12 aa, synthetic construct
  REGION 1..12: note = Synthetic peptide
DIGTNSVGWAVT

SEQ ID NO: 106 - protein, 12 aa, synthetic construct
  REGION 1..12: note = Synthetic peptide
DVGTNSVGWAVT

SEQ ID NO: 107 - protein, 12 aa, synthetic construct
  REGION 1..12: note = Synthetic peptide
DVGTNSVGWAVT

SEQ ID NO: 108 - protein, 12 aa, synthetic construct
  REGION 1..12: note = Synthetic peptide
DMGTNSVGWAVT

SEQ ID NO: 109 - protein, 12 aa, synthetic construct
  REGION 1..12: note = Synthetic peptide
DVGTSSVGWAVT

SEQ ID NO: 110 - protein, 12 aa, synthetic construct
  REGION 1..12: note = Synthetic peptide
DIGTASVGWAVT

SEQ ID NO: 111 - protein, 12 aa, synthetic construct
  REGION 1..12: note = Synthetic peptide
DVGTGSVGWAVT

SEQ ID NO: 112 - protein, 12 aa, synthetic construct
  REGION 1..12: note = Synthetic peptide
DIGTNSVGWAVV

SEQ ID NO: 113 - protein, 12 aa, synthetic construct
  REGION 1..12: note = Synthetic peptide
DIGTNSVGWAVI

SEQ ID NO: 114 - protein, 12 aa, synthetic construct
  REGION 1..12: note = Synthetic peptide
DIGTNSIGWAVI

SEQ ID NO: 115 - protein, 12 aa, synthetic construct
  REGION 1..12: note = Synthetic peptide
DIGTNSVGWAVL

SEQ ID NO: 116 - protein, 12 aa, synthetic construct
  REGION 1..12: note = Synthetic peptide
DLGTNSIGWAVV

SEQ ID NO: 117 - protein, 11 aa, synthetic construct
  REGION 1..11: note = Synthetic peptide
DLGTNSIGWAI

SEQ ID NO: 118 - protein, 12 aa, synthetic construct
  REGION 1..12: note = Synthetic peptide
DLGTNSIGWALV

SEQ ID NO: 119 - protein, 12 aa, synthetic construct
  REGION 1..12: note = Synthetic peptide
DIGTNSVGWCVT

SEQ ID NO: 120 - protein, 12 aa, synthetic construct
  REGION 1..12: note = Synthetic peptide
DIGTNSVGYAVT

SEQ ID NO: 121 - protein, 12 aa, synthetic construct
  REGION 1..12: note = Synthetic peptide
DMGTGSLGWAVT

SEQ ID NO: 122 - protein, 12 aa, synthetic construct
  REGION 1..12: note = Synthetic peptide
DIGTSSVGWAAI

SEQ ID NO: 123 - protein, 12 aa, synthetic construct
  REGION 1..12: note = Synthetic peptide
DLGTGSVGWAVV

SEQ ID NO: 124 - protein, 12 aa, synthetic construct
  REGION 1..12: note = Synthetic peptide
DLGVGSVGWAIV

SEQ ID NO: 125 - protein, 12 aa, synthetic construct
  REGION 1..12: note = Synthetic peptide
DLGIASIGWAII

SEQ ID NO: 126 - protein, 12 aa, synthetic construct
  REGION 1..12: note = Synthetic peptide
DLGIASVGWAIV

SEQ ID NO: 127 - protein, 12 aa, synthetic construct
  REGION 1..12: note = Synthetic peptide
DLGIASVGWAVV

SEQ ID NO: 128 - protein, 12 aa, synthetic construct
  REGION 1..12: note = Synthetic peptide
DLGVASVGWSIV

SEQ ID NO: 129 - protein, 12 aa, synthetic construct
  REGION 1..12: note = Synthetic peptide
DIGIASVGWAIL

SEQ ID NO: 130 - protein, 12 aa, synthetic construct
  REGION 1..12: note = Synthetic peptide
DIGIASVGWAVL

SEQ ID NO: 131 - protein, 12 aa, synthetic construct
  REGION 1..12: note = Synthetic peptide
DIGIASIGWAVI

SEQ ID NO: 132 - protein, 12 aa, synthetic construct
  REGION 1..12: note = Synthetic peptide
DIGIASVGWAII

SEQ ID NO: 133 - protein, 12 aa, synthetic construct
  REGION 1..12: note = Synthetic peptide
DVGIASVGWAVI

SEQ ID NO: 134 - protein, 11 aa, synthetic construct
  REGION 1..11: note = Synthetic peptide
DIGIASVGWAL

SEQ ID NO: 135 - protein, 12 aa, synthetic construct
  REGION 1..12: note = Synthetic peptide
DIGIASVGWAMV

SEQ ID NO: 136 - protein, 12 aa, synthetic construct
  REGION 1..12: note = Synthetic peptide
DIGIASVGWSVI

SEQ ID NO: 137 - protein, 12 aa, synthetic construct
  REGION 1..12: note = Synthetic peptide
DLGISSVGWSVI

SEQ ID NO: 138 - protein, 12 aa, synthetic construct
  REGION 1..12: note = Synthetic peptide
DIGITSVGWAVI

SEQ ID NO: 139 - protein, 12 aa, synthetic construct
  REGION 1..12: note = Synthetic peptide
DVGIGSIGWAVI

SEQ ID NO: 140 - protein, 12 aa, synthetic construct
  REGION 1..12: note = Synthetic peptide
DLGISSLGWAIV

SEQ ID NO: 141 - protein, 12 aa, synthetic construct
  REGION 1..12: note = Synthetic peptide
DLGVGSIGFAIV

SEQ ID NO: 142 - protein, 12 aa, synthetic construct
  REGION 1..12: note = Synthetic peptide
DIGYASIGWAVI

SEQ ID NO: 143 - protein, 12 aa, synthetic construct
  REGION 1..12: note = Synthetic peptide
DLGTNSIGWCLL

SEQ ID NO: 144 - protein, 12 aa, synthetic construct
  REGION 1..12: note = Synthetic peptide
DLGTNSIGWGLL

SEQ ID NO: 145 - protein, 12 aa, synthetic construct
  REGION 1..12: note = Synthetic peptide
DTGTNSLGWAIV

SEQ ID NO: 146 - protein, 12 aa, synthetic construct
  REGION 1..12: note = Synthetic peptide
DIGTDSLGWAVF

SEQ ID NO: 147 - protein, 12 aa, synthetic construct
  REGION 1..12: note = Synthetic peptide
DLGSTSLGWAIF

SEQ ID NO: 148 - protein, 12 aa, synthetic construct
  REGION 1..12: note = Synthetic peptide
DIGISSIGWAFS

SEQ ID NO: 149 - protein, 12 aa, synthetic construct
  REGION 1..12: note = Synthetic peptide
DLGIASVGWCLT

SEQ ID NO: 150 - protein, 12 aa, synthetic construct
  REGION 1..12: note = Synthetic peptide
DLGIASCGWGVV

SEQ ID NO: 151 - protein, 12 aa, synthetic construct
  REGION 1..12: note = Synthetic peptide
DIGSNSIGFAVV

SEQ ID NO: 152 - protein, 12 aa, synthetic construct
  REGION 1..12: note = Synthetic peptide
DIGTTSIGFSVI

SEQ ID NO: 153 - protein, 12 aa, synthetic construct
  REGION 1..12: note = Synthetic peptide
DIGITSVGYGLI

SEQ ID NO: 154 - protein, 12 aa, synthetic construct
  REGION 1..12: note = Synthetic peptide
DIGITSVGFGII

SEQ ID NO: 155 - protein, 12 aa, synthetic construct
  REGION 1..12: note = Synthetic peptide
DLGTTSIGFAHI

SEQ ID NO: 156 - protein, 12 aa, synthetic construct
  REGION 1..12: note = Synthetic peptide
DIGIGSVGVGIL

SEQ ID NO: 157 - protein, 12 aa, synthetic construct
  REGION 1..12: note = Synthetic peptide
DLGVGSIGVAVA

SEQ ID NO: 158 - protein, 12 aa, synthetic construct
  REGION 1..12: note = Synthetic peptide
DVGITSTGYAVL

SEQ ID NO: 159 - protein, 12 aa, synthetic construct
  REGION 1..12: note = Synthetic peptide
DLGITSFGYAIL

SEQ ID NO: 160 - protein, 12 aa, synthetic construct
  REGION 1..12: note = Synthetic peptide
DIGTSSIGWWLY

SEQ ID NO: 161 - protein, 12 aa, synthetic construct
  REGION 1..12: note = Synthetic peptide
DLGSNSLGWFVT

SEQ ID NO: 162 - protein, 12 aa, synthetic construct
  REGION 1..12: note = Synthetic peptide
DLGANSLGWFVV

SEQ ID NO: 163 - protein, 12 aa, synthetic construct
  REGION 1..12: note = Synthetic peptide
DIGNASVGWSAF

SEQ ID NO: 164 - protein, 12 aa, synthetic construct
  REGION 1..12: note = Synthetic peptide
DVGTNSCGWVAM

SEQ ID NO: 165 - protein, 12 aa, synthetic construct
  REGION 1..12: note = Synthetic peptide
DVGERSIGLAAV

SEQ ID NO: 166 - protein, 12 aa, synthetic construct
  REGION 1..12: note = Synthetic peptide
DVGLNSVGLAAV

SEQ ID NO: 167 - protein, 12 aa, synthetic construct
  REGION 1..12: note = Synthetic peptide
DVGLMSVGLAAI

SEQ ID NO: 168 - protein, 12 aa, synthetic construct
  REGION 1..12: note = Synthetic peptide
DVGTFSVGLAAI

SEQ ID NO: 169 - protein, 12 aa, synthetic construct
  REGION 1..12: note = Synthetic peptide
DIGTGSVGYACM

SEQ ID NO: 170 - protein, 12 aa, synthetic construct
  REGION 1..12: note = Synthetic peptide
DLGTNSIGSSVR

SEQ ID NO: 171 - protein, 15 aa, synthetic construct
  REGION 1..15: note = Synthetic peptide
DIGLRIGITSCGWSI

SEQ ID NO: 172 - protein, 12 aa, synthetic construct
  REGION 1..12: note = Synthetic peptide
DMGAKYTGVFYA

SEQ ID NO: 173 - protein, 12 aa, synthetic construct
  REGION 1..12: note = Synthetic peptide
DLGGKNTGFFSF

SEQ ID NO: 174 - protein, 12 aa, synthetic construct
  REGION 1..12: note = Synthetic peptide
DLGVKNTGVFSA

SEQ ID NO: 175 - protein, 12 aa, synthetic construct
  REGION 1..12: note = Synthetic peptide
DLGAKFTGVALY

SEQ ID NO: 176 - protein, 12 aa, synthetic construct
  REGION 1..12: note = Synthetic peptide
DLGGKFTGVCLS

SEQ ID NO: 177 - protein, 12 aa, synthetic construct
  REGION 1..12: note = Synthetic peptide
DLGGTYTGTFIT

SEQ ID NO: 178 - protein, 28 aa, synthetic construct
  REGION 1..28: note = Synthetic peptide
YDIDHIYPRSLTKDDSFDNLVLCERTAN

SEQ ID NO: 179 - protein, 28 aa, synthetic construct
  REGION 1..28: note = Synthetic peptide
DIDHIYPRSKVIKDDSFDNLVLVLKNEN

SEQ ID NO: 180 - protein, 27 aa, synthetic construct
  REGION 1..27: note = Synthetic peptide
DRDHIYPQSKIKDDSIDNLVLVNKTYN

SEQ ID NO: 181 - protein, 27 aa, synthetic construct
  REGION 1..27: note = Synthetic peptide
DIDHIYPRSKIKDDSITNRVLVEKDIN

SEQ ID NO: 182 - protein, 27 aa, synthetic construct
  REGION 1..27: note = Synthetic peptide
DIDHIYPQSKIKDDSISNRVLVCSSCN

SEQ ID NO: 183 - protein, 27 aa, synthetic construct
  REGION 1..27: note = Synthetic peptide
DIDHIYPQSKTMDDSLNNRVLVKKNYN

SEQ ID NO: 184 - protein, 27 aa, synthetic construct
  REGION 1..27: note = Synthetic peptide
DQDHIYPKSKIYDDSLENRVLVKKNLN

SEQ ID NO: 185 - protein, 27 aa, synthetic construct
  REGION 1..27: note = Synthetic peptide
QIDHIVPQSLVKDDSFDNRVLVVPSEN

SEQ ID NO: 186 - protein, 27 aa, synthetic construct
  REGION 1..27: note = Synthetic peptide
DIDHIIPQAFIKDNSIDNRVLTSSKEN

SEQ ID NO: 187 - protein, 27 aa, synthetic construct
  REGION 1..27: note = Synthetic peptide
DIDHIIPQAFLKDNSIDNKVLVSSASN

SEQ ID NO: 188 - protein, 27 aa, synthetic construct
  REGION 1..27: note = Synthetic peptide
DIDHIIPQAYTKDNSLDNRVLVSNITN

SEQ ID NO: 189 - protein, 27 aa, synthetic construct
  REGION 1..27: note = Synthetic peptide
DIDHIVPQSFITDNSIDNLVLTSSAGN

SEQ ID NO: 190 - protein, 27 aa, synthetic construct
  REGION 1..27: note = Synthetic peptide
DVDHIVPQSFLKDDSIDNKVLTRSDKN

SEQ ID NO: 191 - protein, 27 aa, synthetic construct
  REGION 1..27: note = Synthetic peptide
NIDHIYPQSMVKDDSLDNKVLVQSEIN

SEQ ID NO: 192 - protein, 27 aa, synthetic construct
  REGION 1..27: note = Synthetic peptide
DIDHILPQSLIKDDSLDNRVLVNATIN

SEQ ID NO: 193 - protein, 27 aa, synthetic construct
  REGION 1..27: note = Synthetic peptide
DIDHILPQSFIKDDSLENRVLVKKAVN

SEQ ID NO: 194 - protein, 27 aa, synthetic construct
  REGION 1..27: note = Synthetic peptide
EVDHIFPRSFIKDDSIDNKVLVIKKMN

SEQ ID NO: 195 - protein, 27 aa, synthetic construct
  REGION 1..27: note = Synthetic peptide
EVDHIIPRSYIKDDSFENKVLVYREEN

SEQ ID NO: 196 - protein, 27 aa, synthetic construct
  REGION 1..27: note = Synthetic peptide
DIDHIIPQAVTQNDSIDNRVLVARAEN

SEQ ID NO: 197 - protein, 27 aa, synthetic construct
  REGION 1..27: note = Synthetic peptide
EIDHIIPYSISFDDSSSNKLLVLAESN

SEQ ID NO: 198 - protein, 27 aa, synthetic construct
  REGION 1..27: note = Synthetic peptide
EIDHIIPYSLCFDDSSANKVLVHKQSN

SEQ ID NO: 199 - protein, 27 aa, synthetic construct
  REGION 1..27: note = Synthetic peptide
DIDHIIPYSRSMDDSYSNKVLVLSGEN

SEQ ID NO: 200 - protein, 27 aa, synthetic construct
  REGION 1..27: note = Synthetic peptide
DIDHIIPYSKSMDDSFNNKVLCLAEEN

SEQ ID NO: 201 - protein, 27 aa, synthetic construct
  REGION 1..27: note = Synthetic peptide
EIDHIYPYSRSFDDSYMNKVLVFTKQN

SEQ ID NO: 202 - protein, 27 aa, synthetic construct
  REGION 1..27: note = Synthetic peptide
QIDHIYPYSRSMDDSYMNKVLVLTDEN

SEQ ID NO: 203 - protein, 27 aa, synthetic construct
  REGION 1..27: note = Synthetic peptide
EIDHIIPFSRSFDDSLSNKILVLGSEN

SEQ ID NO: 204 - protein, 27 aa, synthetic construct
  REGION 1..27: note = Synthetic peptide
EIDHALPFSRTWDDSFNNKVLVLGSEN

SEQ ID NO: 205 - protein, 27 aa, synthetic construct
  REGION 1..27: note = Synthetic peptide
EIDHALPFSRTWDDSFNNKVLVLASEN

SEQ ID NO: 206 - protein, 27 aa, synthetic construct
  REGION 1..27: note = Synthetic peptide
EIDHIIPISISLDDSINNKVLVLSKAN

SEQ ID NO: 207 - protein, 27 aa, synthetic construct
  REGION 1..27: note = Synthetic peptide
EVDHIIPISISLDDSITNKVLVTHREN

SEQ ID NO: 208 - protein, 27 aa, synthetic construct
  REGION 1..27: note = Synthetic peptide
QVDHALPYSRSYDDSKNNKVLVLTHEN

SEQ ID NO: 209 - protein, 27 aa, synthetic construct
  REGION 1..27: note = Synthetic peptide
EVDHILPLSITFDDSLANKVLVYATAN

SEQ ID NO: 210 - protein, 27 aa, synthetic construct
  REGION 1..27: note = Synthetic peptide
EIDHIIPRSISFDDARSNKVLVYRSEN

SEQ ID NO: 211 - protein, 27 aa, synthetic construct
  REGION 1..27: note = Synthetic peptide
EVDHIIPRSVSFDNSYHNKVLVKQSEN

SEQ ID NO: 212 - protein, 27 aa, synthetic construct
  REGION 1..27: note = Synthetic peptide
DIDHILPYSITFDDSFRNKVLVTSQEN

SEQ ID NO: 213 - protein, 27 aa, synthetic construct
  REGION 1..27: note = Synthetic peptide
EIDHILPRSRSADDSFANKVLCLARAN

SEQ ID NO: 214 - protein, 27 aa, synthetic construct
  REGION 1..27: note = Synthetic peptide
EIEHLLPFSLTLDDSMANKTVCFRQAN

SEQ ID NO: 215 - protein, 27 aa, synthetic construct
  REGION 1..27: note = Synthetic peptide
DIDHILPFSVSLDDSAANKVVCLREAN

SEQ ID NO: 216 - protein, 27 aa, synthetic construct
  REGION 1..27: note = Synthetic peptide
DIDHLIPFSISWDDSAANKVVCMRYAN

SEQ ID NO: 217 - protein, 27 aa, synthetic construct
  REGION 1..27: note = Synthetic peptide
DIDHILPVAMTLDDSPANKIICMRYAN

SEQ ID NO: 218 - protein, 27 aa, synthetic construct
  REGION 1..27: note = Synthetic peptide
DVDHILPYSRTLDDSFPNRTLCLREAN

SEQ ID NO: 219 - protein, 27 aa, synthetic construct
  REGION 1..27: note = Synthetic peptide
EIEHILPFSRTLDDSLNNRTVAMRRAN

SEQ ID NO: 220 - protein, 27 aa, synthetic construct
  REGION 1..27: note = Synthetic peptide
EVDHIIPYSISWDDSYTNKVLTSAKCN

SEQ ID NO: 221 - protein, 27 aa, synthetic construct
  REGION 1..27: note = Synthetic peptide
QVDHILPWSRFGDDSYLNKTLCTARSN

SEQ ID NO: 222 - protein, 27 aa, synthetic construct
  REGION 1..27: note = Synthetic peptide
QVDHILPFSKTLDDSFANKVLAQHDAN

SEQ ID NO: 223 - protein, 27 aa, synthetic construct
  REGION 1..27: note = Synthetic peptide
QIDHAFPLSRSLDDSQSNKVLCLTSSN

SEQ ID NO: 224 - protein, 27 aa, synthetic construct
  REGION 1..27: note = Synthetic peptide
DIDHIVPRSISFDDSFSNLVIVNKLDN

SEQ ID NO: 225 - protein, 27 aa, synthetic construct
  REGION 1..27: note = Synthetic peptide
EIEHIIPYSMSYDNSQANKILTEKAEN

SEQ ID NO: 226 - protein, 27 aa, synthetic construct
  REGION 1..27: note = Synthetic peptide
EIDHVIPYSKSADDSWFNKLLVKKSTN

SEQ ID NO: 227 - protein, 27 aa, synthetic construct
  REGION 1..27: note = Synthetic peptide
EMDHILPYSRSLDNGWHNRVLVHGKDN

SEQ ID NO: 228 - protein, 27 aa, synthetic construct
  REGION 1..27: note = Synthetic peptide
EVDHIVPYSLILDNTINNKALVYAEEN

SEQ ID NO: 229 - protein, 27 aa, synthetic construct
  REGION 1..27: note = Synthetic peptide
EIEHVIPQSLYFDDSFSNKVICEAEVN

SEQ ID NO: 230 - protein, 27 aa, synthetic construct
  REGION 1..27: note = Synthetic peptide
DIEHIIPQARLFDDSFSNKTLEARSVN

SEQ ID NO: 231 - protein, 27 aa, synthetic construct
  REGION 1..27: note = Synthetic peptide
EIEHIVPKARVFDDSFSNKTLTFHRIN

SEQ ID NO: 232 - protein, 28 aa, synthetic construct
  REGION 1..28: note = Synthetic peptide
DKDHIIPQSMKKDDSIINNLVLVNKNAN

SEQ ID NO: 233 - protein, 27 aa, synthetic construct
  REGION 1..27: note = Synthetic peptide
EVEHIWPRSRSFDNSPRNKTLCRKDVN

SEQ ID NO: 234 - protein, 27 aa, synthetic construct
  REGION 1..27: note = Synthetic peptide
IVNHIIPYNRSFDDTYHNRVLTLTETK

SEQ ID NO: 235 - protein, 27 aa, synthetic construct
  REGION 1..27: note = Synthetic peptide
DMEHTIPKSISFDNSDQNLTLCESYYN

SEQ ID NO: 236 - protein, 27 aa, synthetic construct
  REGION 1..27: note = Synthetic peptide
DIEHTIPRSAGGDSTKMNLTLCSSRFN

SEQ ID NO: 237 - protein, 27 aa, synthetic construct
  REGION 1..27: note = Synthetic peptide
DIEHTIPRSISQDNSQMNKTLCSLKFN

SEQ ID NO: 238 - protein, 27 aa, synthetic construct
  REGION 1..27: note = Synthetic peptide
DIDHVIPLARGGRDSLDNMVLCQSDAN

SEQ ID NO: 239 - protein, 27 aa, synthetic construct
  REGION 1..27: note = Synthetic peptide
DIEHLFPIAESEDNGRNNLVISHSACN

SEQ ID NO: 240 - protein, 27 aa, synthetic construct
  REGION 1..27: note = Synthetic peptide
DVDHIFPRDDTADNSYGNKVVAHRQCN

SEQ ID NO: 241 - protein, 27 aa, synthetic construct
  REGION 1..27: note = Synthetic peptide
DIEHIVPQSLGGLSTDYNTIVTLKSVN

SEQ ID NO: 242 - protein, 27 aa, synthetic construct
  REGION 1..27: note = Synthetic peptide
ELDHIVPRTDGGSNRHENLAITCGACN

SEQ ID NO: 243 - protein, 28 aa, synthetic construct
  REGION 1..28: note = Synthetic peptide
EMDHIVPRKGVGSTNTRTNFAAVCAECN

SEQ ID NO: 244 - protein, 28 aa, synthetic construct
  REGION 1..28: note = Synthetic peptide
EMDHIVPRKGVGSTNTRVNLAAACAACN

SEQ ID NO: 245 - protein, 28 aa, synthetic construct
  REGION 1..28: note = Synthetic peptide
EMDHIVPRAGQGSTNTRENLVAVCHRCN

SEQ ID NO: 246 - protein, 33 aa, synthetic construct
  REGION 1..33: note = Synthetic polypeptide
EIDHILPRSLIKDARGIVFNAEPNLIYASSRGN

SEQ ID NO: 247 - protein, 33 aa, synthetic construct
  REGION 1..33: note = Synthetic polypeptide
EIDHIIPRSLTGRTKKTVFNSEANLIYCSSKGN

SEQ ID NO: 248 - protein, 33 aa, synthetic construct
  REGION 1..33: note = Synthetic polypeptide
EIDHIIPRSLTLKKSESIYNSEVNLIFVSAQGN

SEQ ID NO: 249 - protein, 33 aa, synthetic construct
  REGION 1..33: note = Synthetic polypeptide
EIDHIYPRSLSKKHFGVIFNSEVNLIYCSSQGN

SEQ ID NO: 250 - protein, 33 aa, synthetic construct
  REGION 1..33: note = Synthetic polypeptide
EIDHILPRSHTLKIYGTVFNPEGNLIYVHQKCN

SEQ ID NO: 251 - protein, 30 aa, synthetic construct
  REGION 1..30: note = Synthetic polypeptide
ELDHIIPRSHKKYGTLNDEANLICVTRGDN

SEQ ID NO: 252 - protein, 27 aa, synthetic construct
  REGION 1..27: note = Synthetic peptide
ELEHIVPHSFRQSNALSSLVLTWPGVN

SEQ ID NO: 253 - protein, 28 aa, synthetic construct
  REGION 1..28: note = Synthetic peptide
YDIDHIYPRSLTKDDSFDNLVLCERTAN

SEQ ID NO: 254 - protein, 28 aa, synthetic construct
  REGION 1..28: note = Synthetic peptide
DIDHIYPRSKVIKDDSFDNLVLVLKNEN

SEQ ID NO: 255 - protein, 27 aa, synthetic construct
  REGION 1..27: note = Synthetic peptide
DRDHIYPQSKIKDDSIDNLVLVNKTYN

SEQ ID NO: 256 - protein, 27 aa, synthetic construct
  REGION 1..27: note = Synthetic peptide
DIDHIYPRSKIKDDSITNRVLVEKDIN

SEQ ID NO: 257 - protein, 27 aa, synthetic construct
  REGION 1..27: note = Synthetic peptide
DIDHIYPQSKIKDDSISNRVLVCSSCN

SEQ ID NO: 258 - protein, 27 aa, synthetic construct
  REGION 1..27: note = Synthetic peptide
DIDHIYPQSKTMDDSLNNRVLVKKNYN

SEQ ID NO: 259 - protein, 27 aa, synthetic construct
  REGION 1..27: note = Synthetic peptide
DQDHIYPKSKIYDDSLENRVLVKKNLN

SEQ ID NO: 260 - protein, 27 aa, synthetic construct
  REGION 1..27: note = Synthetic peptide
QIDHIVPQSLVKDDSFDNRVLVVPSEN

SEQ ID NO: 261 - protein, 27 aa, synthetic construct
  REGION 1..27: note = Synthetic peptide
DIDHIIPQAFIKDNSIDNRVLTSSKEN

SEQ ID NO: 262 - protein, 27 aa, synthetic construct
  REGION 1..27: note = Synthetic peptide
DIDHIIPQAFLKDNSIDNKVLVSSASN

SEQ ID NO: 263 - protein, 27 aa, synthetic construct
  REGION 1..27: note = Synthetic peptide
DIDHIIPQAYTKDNSLDNRVLVSNITN

SEQ ID NO: 264 - protein, 27 aa, synthetic construct
  REGION 1..27: note = Synthetic peptide
DIDHIVPQSFITDNSIDNLVLTSSAGN

SEQ ID NO: 265 - protein, 27 aa, synthetic construct
  REGION 1..27: note = Synthetic peptide
DVDHIVPQSFLKDDSIDNKVLTRSDKN

SEQ ID NO: 266 - protein, 27 aa, synthetic construct
  REGION 1..27: note = Synthetic peptide
NIDHIYPQSMVKDDSLDNKVLVQSEIN

SEQ ID NO: 267 - protein, 27 aa, synthetic construct
  REGION 1..27: note = Synthetic peptide
DIDHILPQSLIKDDSLDNRVLVNATIN

SEQ ID NO: 268 - protein, 27 aa, synthetic construct
  REGION 1..27: note = Synthetic peptide
DIDHILPQSFIKDDSLENRVLVKKAVN

SEQ ID NO: 269 - protein, 27 aa, synthetic construct
  REGION 1..27: note = Synthetic peptide
EVDHIFPRSFIKDDSIDNKVLVIKKMN

SEQ ID NO: 270 - protein, 27 aa, synthetic construct
  REGION 1..27: note = Synthetic peptide
EVDHIIPRSYIKDDSFENKVLVYREEN

SEQ ID NO: 271 - protein, 27 aa, synthetic construct
  REGION 1..27: note = Synthetic peptide
DIDHIIPQAVTQNDSIDNRVLVARAEN

SEQ ID NO: 272 - protein, 27 aa, synthetic construct
  REGION 1..27: note = Synthetic peptide
DIDHIVPRSISFDDSFSNLVIVNKLDN

SEQ ID NO: 273 - protein, 27 aa, synthetic construct
  REGION 1..27: note = Synthetic peptide
EIDHIIPYSISFDDSSSNKLLVLAESN

SEQ ID NO: 274 - protein, 27 aa, synthetic construct
  REGION 1..27: note = Synthetic peptide
EIDHIIPYSLCFDDSSANKVLVHKQSN

SEQ ID NO: 275 - protein, 27 aa, synthetic construct
  REGION 1..27: note = Synthetic peptide
EIDHIIPISISLDDSINNKVLVLSKAN

SEQ ID NO: 276 - protein, 27 aa, synthetic construct
  REGION 1..27: note = Synthetic peptide
EVDHIIPISISLDDSITNKVLVTHREN

SEQ ID NO: 277 - protein, 27 aa, synthetic construct
  REGION 1..27: note = Synthetic peptide
EVDHILPLSITFDDSLANKVLVYATAN

SEQ ID NO: 278 - protein, 27 aa, synthetic construct
  REGION 1..27: note = Synthetic peptide
EIDHIIPRSISFDDARSNKVLVYRSEN

SEQ ID NO: 279 - protein, 27 aa, synthetic construct
  REGION 1..27: note = Synthetic peptide
EVDHIIPRSVSFDNSYHNKVLVKQSEN

SEQ ID NO: 280 - protein, 27 aa, synthetic construct
  REGION 1..27: note = Synthetic peptide
EVDHIIPYSISWDDSYTNKVLTSAKCN

SEQ ID NO: 281 - protein, 27 aa, synthetic construct
  REGION 1..27: note = Synthetic peptide
DIDHIIPYSRSMDDSYSNKVLVLSGEN

SEQ ID NO: 282 - protein, 27 aa, synthetic construct
  REGION 1..27: note = Synthetic peptide
EIEHIIPYSMSYDNSQANKILTEKAEN

SEQ ID NO: 283 - protein, 27 aa, synthetic construct
  REGION 1..27: note = Synthetic peptide
EVDHIVPYSLILDNTINNKALVYAEEN

SEQ ID NO: 284 - protein, 27 aa, synthetic construct
  REGION 1..27: note = Synthetic peptide
EIDHVIPYSKSADDSWFNKLLVKKSTN

SEQ ID NO: 285 - protein, 27 aa, synthetic construct
  REGION 1..27: note = Synthetic peptide
EMDHILPYSRSLDNGWHNRVLVHGKDN

SEQ ID NO: 286 - protein, 27 aa, synthetic construct
  REGION 1..27: note = Synthetic peptide
EIEHVIPQSLYFDDSFSNKVICEAEVN

SEQ ID NO: 287 - protein, 27 aa, synthetic construct
  REGION 1..27: note = Synthetic peptide
DIEHIIPQARLFDDSFSNKTLEARSVN

SEQ ID NO: 288 - protein, 27 aa, synthetic construct
  REGION 1..27: note = Synthetic peptide
EIEHIVPKARVFDDSFSNKTLTFHRIN

SEQ ID NO: 289 - protein, 28 aa, synthetic construct
  REGION 1..28: note = Synthetic peptide
DKDHIIPQSMKKDDSIINNLVLVNKNAN

SEQ ID NO: 290 - protein, 27 aa, synthetic construct
  REGION 1..27: note = Synthetic peptide
QVDHILPWSRFGDDSYLNKTLCTARSN

SEQ ID NO: 291 - protein, 27 aa, synthetic construct
  REGION 1..27: note = Synthetic peptide
DIDHVIPLARGGRDSLDNMVLCQSDAN

SEQ ID NO: 292 - protein, 27 aa, synthetic construct
  REGION 1..27: note = Synthetic peptide
DMEHTIPKSISFDNSDQNLTLCESYYN

SEQ ID NO: 293 - protein, 27 aa, synthetic construct
  REGION 1..27: note = Synthetic peptide
DIEHTIPRSAGGDSTKMNLTLCSSRFN

SEQ ID NO: 294 - protein, 27 aa, synthetic construct
  REGION 1..27: note = Synthetic peptide
DIEHTIPRSISQDNSQMNKTLCSLKFN

SEQ ID NO: 295 - protein, 27 aa, synthetic construct
  REGION 1..27: note = Synthetic peptide
DIEHLFPIAESEDNGRNNLVISHSACN

SEQ ID NO: 296 - protein, 27 aa, synthetic construct
  REGION 1..27: note = Synthetic peptide
DVDHIFPRDDTADNSYGNKVVAHRQCN

SEQ ID NO: 297 - protein, 27 aa, synthetic construct
  REGION 1..27: note = Synthetic peptide
DIEHIVPQSLGGLSTDYNTIVTLKSVN

SEQ ID NO: 298 - protein, 27 aa, synthetic construct
  REGION 1..27: note = Synthetic peptide
ELDHIVPRTDGGSNRHENLAITCGACN

SEQ ID NO: 299 - protein, 28 aa, synthetic construct
  REGION 1..28: note = Synthetic peptide
EMDHIVPRKGVGSTNTRTNFAAVCAECN

SEQ ID NO: 300 - protein, 28 aa, synthetic construct
  REGION 1..28: note = Synthetic peptide
EMDHIVPRKGVGSTNTRVNLAAACAACN

SEQ ID NO: 301 - protein, 28 aa, synthetic construct
  REGION 1..28: note = Synthetic peptide
EMDHIVPRAGQGSTNTRENLVAVCHRCN

SEQ ID NO: 302 - protein, 27 aa, synthetic construct
  REGION 1..27: note = Synthetic peptide
ELEHIVPHSFRQSNALSSLVLTWPGVN

SEQ ID NO: 303 - DNA, 3333 bp, synthetic construct
  misc_feature 1..3333: note = Synthetic polynucleotide
  source 1..3333: mol_type = other DNA
atggtgcctaagaagaagagaaaggtggctgccttcaaacctaattcaatcaactacatcctcggcctcgatatcggcatcgcatccgtcggctgggcgatggtagaaattgacgaagaagaaaaccccatccgcctgattgatttgggcgtgcgcgtatttgagcgtgccgaagtaccgaaaacaggcgactcccttgccatggcaaggcgtttggcgcgcagtgttcgccgcctgacccgccgtcgcgcccaccgcctgcttcggacccgccgcctattgaaacgcgaaggcgtattacaagccgccaattttgacgaaaacggcttgattaaatccttaccgaatacaccatggcaacttcgcgcagccgcattagaccgcaaactgacgcctttagagtggtcggcagtcttgttgcatttaatcaaacatcgcggctatttatcgcaacggaaaaacgagggcgaaactgccgataaggagcttggcgctttgcttaaaggcgtagccggcaatgcccatgccttacagacaggcgatttccgcacaccggccgaattggctttaaataaatttgagaaagaaagcggccatatccgcaatcagcgcagcgattattcgcatacgttcagccgcaaagatttacaggcggagctgattttgctgtttgaaaaacaaaaagaatttggcaatccgcatgtttcaggcggccttaaagaaggtattgaaaccctactgatgacgcaacgccctgccctgtccggcgatgccgttcaaaaaatgttggggcattgcaccttcgaaccggcagagccgaaagccgctaaaaacacctacacagccgaacgtttcatctggctgaccaagctgaacaacctgcgtattttagagcaaggcagcgagcggccattgaccgataccgaacgcgccacgcttatggacgagccatacagaaaatccaaactgacttacgcacaagcccgtaagctgctgggtttagaagataccgcctttttcaaaggcttgcgctatggtaaagacaatgccgaagcctcaacattgatggaaatgaaggcctaccatgccatcagccgtgcactggaaaaagaaggattgaaagacaaaaaatccccattaaacctttctcccgaattacaagacgaaatcggcacggcattctccctgttcaaaaccgatgaagacattacaggccgtctgaaagaccgtatacagcccgaaatcttagaagcgctgttgaaacacatcagcttcgataagttcgtccaaatttccttgaaagcattgcgccgaattgtgcctctaatggaacaaggcaaacgttacgatgaagcctgcgccgaaatctacggagaccattacggcaagaagaatacggaagaaaagatttatctgccgccgattcccgccgacgaaatccgcaaccccgtcgtcttgcgcgccttatctcaagcacgtaaggtcattaacggcgtggtacgccgttacggctccccagctcgtatccatattgaaactgcaagggaagtaggtaaatcgtttaaagaccgcaaagaaattgagaaacgccaagaagaaaaccgcaaagaccgggaaaaagccgccgccaaattccgagagtatttccccaattttgtcggagaacccaaatccaaagatattctgaaactgcgcctgtacgagcaacaacacggcaaatgcctgtattcgggcaaagaaatcaacttaggccgtctgaacgaaaaaggctatgtcgaaatcgaccatgccctgccgttctcgcgcacatgggacgacagtttcaacaataaagtactggtattgggcagcgaaaaccaaaacaaaggcaatcaaaccccttacgaatacttcaacggcaaagacaacagccgcgaatggcaggaatttaaagcgcgtgtcgaaaccagccgtttcccgcgcagtaaaaaacaacggattctgctgcaaaaattcgatgaagacggctttaaagaacgcaatctgaacgacacgcgctacgtcaaccgtttcctgtgtcaatttgttgccgaccgtatgcggctgacaggtaaaggcaagaaacgtgtctttgcatccaacggacaaattaccaatctgttgcgcggcttttggggattgcgcaaagtgcgtgcggaaaacgaccgccatcacgccttggacgccgtcgtcgttgcctgctcgaccgttgccatgcagcagaaaattacccgttttgtacgctataaagagatgaacgcgtttgacggtaaaaccatagacaaagaaacaggagaagtgctgcatcaaaaaacacacttcccacaaccttgggaatttttcgcacaagaagtcatgattcgcgtcttcggcaaaccggacggcaaacccgaattcgaagaagccgataccctagaaaaactgcgcacgttgcttgccgaaaaattatcatctcgccccgaagccgtacacgaatacgttacgccactgtttgtttcacgcgcgcccaatcggaagatgagcgggcaagggcatatggagaccgtcaaatccgccaaacgactggacgaaggcgtcagcgtgttgcgcgtaccgctgacacagttaaaactgaaagacttggaaaaaatggtcaatcgggagcgcgaacctaagctatacgaagcactgaaagcacggctggaagcacataaagacgatcctgccaaagcctttgccgagccgttttacaaatacgataaagcaggcaaccgcacccaacaggtaaaagccgtacgcgtagagcaagtacagaaaaccggcgtatgggtgcgcaaccataacggtattgccgacaacgcaaccatggtgcgcgtagatgtgtttgagaaaggcgacaagtattatctggtaccgatttacagttggcaggtagcgaaagggattttgccggatagggctgttgtacaaggaaaagatgaagaagattggcaacttattgatgatagtttcaactttaaattctcattacaccctaatgatttagtcgaggttataacaaaaaaagctagaatgtttggttactttgccagctgccatcgaggcacaggtaatatcaatatacgcattcatgatcttgatcataaaattggcaaaaatggaatactggaaggtatcggcgtcaaaaccgccctttcattccaaaaataccaaattgacgaactgggcaaagaaatcagaccatgccgtctgaaaaaacgcccgcctgtccgttacccatacgatgttccagattacgctgcagctccagcagcgaagaaaaagaagctggattaa

SEQ ID NO: 304 - protein, 1053 aa, Staphylococcus aureus; identical to SEQ ID NO: 26

SEQ ID NO: 305 - protein, 1368 aa, Streptococcus pyogenes [sequence omitted]

SEQ ID NO: 306 - protein, 984 aa, Campylobacter jejuni
MARILAFDIGISSIGWAFSENDELKDCGVRIFTKVENPKTGESLALPRRLARSARKRLARRKARLNHLKHLIANEFKLNYEDYQSFDESLAKAYKGSLISPYELRFRALNELLSKQDFARVILHIAKRRGYDDIKNSDDKEKGAILKAIKQNEEKLANYQSVGEYLYKEYFQKFKENSKEFTNVRNKKESYERCIAQSFLKDELKLIFKKQREFGFSFSKKFEEEVLSVAFYKRALKDFSHLVGNCSFFTDEKRAPKNSPLAFMFVALTRIINLLNNLKNTEGILYTKDDLNALLNEVLKNGTLTYKQTKKLLGLSDDYEFKGEKGTYFIEFKKYKEFIKALGEHNLSQDDLNEIAKDITLIKDEIKLKKALAKYDLNQNQIDSLSKLEFKDHLNISFKALKLVTPLMLEGKKYDEACNELNLKVAINEDKKDFLPAFNETYYKDEVTNPVVLRAIKEYRKVLNALLKKYGKVHKINIELAREVGKNHSQRAKIEKEQNENYKAKKDAELECEKLGLKINSKNILKLRLFKEQKEFCAYSGEKIKISDLQDEKMLEIDHIYPYSRSFDDSYMNKVLVFTKQNQEKLNQTPFEAFGNDSAKWQKIEVLAKNLPTKKQKRILDKNYKDKEQKNFKDRNLNDTRYIARLVLNYTKDYLDFLPLSDDENTKLNDTQKGSKVHVEAKSGMLTSALRHTWGFSAKDRNNHLHHAIDAVIIAYANNSIVKAFSDFKKEQESNSAELYAKKISELDYKNKRKFFEPFSGFRQKVLDKIDEIFVSKPERKKPSGALHEETFRKEEEFYQSYGGKEGVLKALELGKIRKVNGKIVKNGDMFRVDIFKHKKTNKFYAVPIYTMDFALKVLPNKAVARSKKGEIKDWILMDENYEFCFSLYKDSLILIQTKDMQEPEFVYYNAFTSSTVSLIVSKHDNKFETLSKNQKILFKNANEKEVIAKSIGIQNLKVFEKYIVSALGEVTKAEFRQREDFKK

SEQ ID NO: 307 - protein, 1436 aa, Bacteroides fragilis
MKRILGLDLGTNSIGWALVNEAENKDERSSIVKLGVRVNPLTVDELTNFEKGKSITTNADRTLKRGMRRNLQRYKLRRETLTEVLKEHKLITEDTILSENGNRTTFETYRLRAKAVTEEISLEEFARVLLMINKKRGYKSSRKAKGVEEGTLIDGMDIARELYNNNLTPGELCLQLLDAGKKFLPDFYRSDLQNELDRIWEKQKEYYPEILTDVLKEELRGKKRDAVWAICAKYFVWKENYTEWNKEKGKTEQQEREHKLEGIYSKRKRDEAKRENLQWRVNGLKEKLSLEQLVIVFQEMNTQINNSSGYLGAISDRSKELYFNKQTVGQYQMEMLDKNPNASLRNMVFYRQDYLDEFNMLWEKQAVYHKELTEELKKEIRDIIIFYQRRLKSQKGLIGFCEFESRQIEVDIDGKKKIKTVGNRVISRSSPLFQEFKIWQILNNIEVTVVGKKRKRRKLKENYSALFEELNDAEQLELNGSRRLCQEEKELLAQELFIRDKMTKSEVLKLLFDNPQELDLNFKTIDGNKTGYALFQAYSKMIEMSGHEPVDFKKPVEKVVEYIKAVFDLLNWNTDILGFNSNEELDNQPYYKLWHLLYSFEGDNTPTGNGRLIQKMTELYGFEKEYATILANVSFQDDYGSLSAKAIHKILPHLKEGNRYDVACVYAGYRHSESSLTREEIANKVLKDRLMLLPKNSLHNPVVEKILNQMVNVINVIIDIYGKPDEIRVELARELKKNAKEREELTKSIAQTTKAHEEYKTLLQTEFGLTNVSRTDILRYKLYKELESCGYKTLYSNTYISREKLFSKEFDIEHIIPQARLFDDSFSNKTLEARSVNIEKGNKTAYDFVKEKFGESGADNSLEHYLNNIEDLFKSGKISKTKYNKLKMAEQDIPDGFIERDLRNTQYIAKKALSMLNEISHRVVATSGSVTDKLREDWQLIDVMKELNWEKYKALGLVEYFEDRDGRQIGRIKDWTKRNDHRHHAMDALTVAFTKDVFIQYFNNKNASLDPNANEHAIKNKYFQNGRAIAPMPLREFRAEAKKHLENTLISIKAKNKVITGNINKTRKKGGVNKNMQQTPRGQLHLETIYGSGKQYLTKEEKVNASFDMRKIGTVSKSAYRDALLKRLYENDNDPKKAFAGKNSLDKQPIWLDKEQMRKVPEKVKIVTLEAIYTIRKEISPDLKVDKVIDVGVRKILIDRLNEYGNDAKKAFSNLDKNPIWLNKEKGISIKRVTISGISNAQSLHVKKDKDGKPILDENGRNIPVDFVNTGNNHHVAVYYRPVIDKRGQLVVDEAGNPKYELEEVVVSFFEAVTRANLGLPIIDKDYKTTEGWQFLFSMKQNEYFVFPNEKTGFNPKEIDLLDVENYGLISPNLFRVQKFSLKNYVFRHHLETTIKDTSSILRGITWIDFRSSKGLDTIVKVRVNHIGQIVSVGEY

SEQ ID NO: 308 - protein, 1420 aa, Bifidobacterium bifidum
MSRKNYVDDYAISLDIGNASVGWSAFTPNYRLVRAKGHELIGVRLFDPADTAESRRMARTTRRRYSRRRWRLRLLDALFDQALSEIDPSFLARRKYSWVHPDDENNADCWYGSVLFDSNEQDKRFYEKYPTIYHLRKALMEDDSQHDIREIYLAIHHMVKYRGNFLVEGTLESSNAFKEDELLKLLGRITRYEMSEGEQNSDIEQDDENKLVAPANGQLADALCATRGSRSMRVDNALEALSAVNDLSREQRAIVKAIFAGLEGNKLDLAKIFVSKEFSSENKKILGIYFNKSDYEEKCVQIVDSGLLDDEEREFLDRMQGQYNAIALKQLLGRSTSVSDSKCASYDAHRANWNLIKLQLRTKENEKDINENYGILVGWKIDSGQRKSVRGESAYENMRKKANVFFKKMIETSDLSETDKNRLIHDIEEDKLFPIQRDSDNGVIPHQLHQNELKQIIKKQGKYYPFLLDAFEKDGKQINKIEGLLTFRVPYFVGPLVVPEDLQKSDNSENHWMVRKKKGEITPWNFDEMVDKDASGRKFIERLVGTDSYLLGEPTLPKNSLLYQEYEVLNELNNVRLSVRTGNHWNDKRRMRLGREEKTLLCQRLFMKGQTVTKRTAENLLRKEYGRTYELSGLSDESKFTSSLSTYGKMCRIFGEKYVNEHRDLMEKIVELQTVFEDKETLLHQLRQLEGISEADCALLVNTHYTGWGRLSRKLLTTKAGECKISDDFAPRKHSIIEIMRAEDRNLMEIITDKQLGFSDWIEQENLGAENGSSLMEVVDDLRVSPKVKRGIIQSIRLIDDISKAVGKRPSRIFLELADDIQPSGRTISRKSRLQDLYRNANLGKEFKGIADELNACSDKDLQDDRLFLYYTQLGKDMYTGEELDLDRLSSAYDIDHIIPQAVTQNDSIDNRVLVARAENARKTDSFTYMPQIADRMRNFWQILLDNGLISRVKFERLTRQNEFSEREKERFVQRSLVETRQIMKNVATLMRQRYGNSAAVIGLNAELTKEMHRYLGFSHKNRDINDYHHAQDALCVGIAGQFAANRGFFADGEVSDGAQNSYNQYLRDYLRGYREKLSAEDRKQGRAFGFIVGSMRSQDEQKRVNPRTGEVVWSEEDKDYLRKVMNYRKMLVTQKVGDDFGALYDETRYAATDPKGIKGIPFDGAKQDTSLYGGFSSAKPAYAVLIESKGKTRLVNVTMQEYSLLGDRPSDDELRKVLAKKKSEYAKANILLRHVPKMQLIRYGGGLMVIKSAGELNNAQQLWLPYEEYCYFDDLSQGKGSLEKDDLKKLLDSILGSVQCLYPWHRFTEEELADLHVAFDKLPEDEKKNVITGIVSALHADAKTANLSIVGMTGSWRRMNNKSGYTFSDEDEFIFQSPSGLFEKRVTVGELKRKAKKEVNSKYRTNEKRLPTLSGASQP

SEQ ID NO: 309 - protein, 1397 aa, Veillonella atypica
METQTSNQLITSHLKDYPKQDYFVGLDIGTNSVGWAVTNTSYELLKFHSHKMWGSRLFEEGESAVTRRGFRSMRRRLERRKLRLKLLEELFADAMAQVDSTFFIRLHESKYHYEDKTTGHSSKHILFIDEDYTDQDYFTEYPTIYHLRKDLMENGTDDIRKLFLAVHHILKYRGNFLYEGATFNSNAFTFEDVLKQALVNITFNCFDTNSAISSISNILMESGKTKSDKAKAIERLVDTYTVFDEVNTPDKPQKEQVKEDKKTLKAFANLVLGLSANLIDLFGSVEDIDDDLKKLQIVGDTYDEKRDELAKVWGDEIHIIDDCKSVYDAIILMSIKEPGLTISQSKVKAFDKHKEDLVILKSLLKLDRNVYNEMFKSDKKGLHNYVHYIKQGRTEETSCSREDFYKYTKKIVEGLADSKDKEYILNEIELQTLLPLQRIKDNGVIPYQLHLEELKVILDKCGPKFPFLHTVSDGFSVTEKLIKMLEFRIPYYVGPLNTHHNIDNGGFSWAVRKQAGRVTPWNFEEKIDREKSAAAFIKNLTNKCTYLFGEDVLPKSSLLYSEFMLLNELNNVRIDGKALAQGVKQHLIDSIFKQDHKKMTKNRIELFLKDNNYITKKHKPEITGLDGEIKNDLTSYRDMVRILGNNFDVSMAEDIITDITIFGESKKMLRQTLRNKFGSQLNDETIKKLSKLRYRDWGRLSKKLLKGIDGCDKAGNGAPKTIIELMRNDSYNLMEILGDKFSFMECIEEENAKLAQGQVVNPHDIIDELALSPAVKRAVWQALRIVDEVAHIKKALPSRIFVEVARTNKSEKKKKDSRQKRLSDLYSAIKKDDVLQSGLQDKEFGALKSGLANYDDAALRSKKLYLYYTQMGRCAYTGNIIDLNQLNTDNYDIDHIYPRSLTKDDSFDNLVLCERTANAKKSDIYPIDNRIQTKQKPFWAFLKHQGLISERKYERLTRIAPLTADDLSGFIARQLVETNQSVKATTTLLRRLYPDIDVVFVKAENVSDFRHNNNFIKVRSLNHHHHAKDAYLNIVVGNVYHEKFTRNFRLFFKKNGANRTYNLAKMFNYDVICTNAQDGKAWDVKTSMNTVKKMMASNDVRVTRRLLEQSGALADATIYKASVAAKAKDGAYIGMKTKYSVFADVTKYGGMTKIKNAYSIIVQYTGKKGEEIKEIVPLPIYLINRNATDIELIDYVKSVIPKAKDISIKYRKLCINQLVKVNGFYYYLGGKTNDKIYIDNAIELVVPHDIATYIKLLDKYDLLRKENKTLKASSITTSIYNINTSTVVSLNKVGIDVFDYFMSKLRTPLYMKMKGNKVDELSSTGRSKFIKMTLEEQSIYLLEVLNLLTNSKTTFDVKPLGITGSRSTIGVKIHNLDEFKIINESITGLYSNEVTIV

SEQ ID NO: 310 - protein, 1363 aa, Lactobacillus rhamnosus
MTKLNQPYGIGLDIGSNSIGFAVVDANSHLLRLKGETAIGARLFREGQSAADRRGSRTTRRRLSRTRWRLSFLRDFFAPHITKIDPDFFLRQKYSEISPKDKDRFKYEKRLFNDRTDAEFYEDYPSMYHLRLHLMTHTHKADPREIFLAIHHILKSRGHFLTPGAAKDFNTDKVDLEDIFPALTEAYAQVYPDLELTFDLAKADDFKAKLLDEQATPSDTQKALVNLLLSSDGEKEIVKKRKQVLTEFAKAITGLKTKFNLALGTEVDEADASNWQFSMGQLDDKWSNIETSMTDQGTEIFEQIQELYRARLLNGIVPAGMSLSQAKVADYGQHKEDLELFKTYLKKLNDHELAKTIRGLYDRYINGDDAKPFLREDFVKALTKEVTAHPNEVSEQLLNRMGQANFMLKQRTKANGAIPIQLQQRELDQIIANQSKYYDWLAAPNPVEAHRWKMPYQLDELLNFHIPYYVGPLITPKQQAESGENVFAWMVRKDPSGNITPYNFDEKVDREASANTFIQRMKTTDTYLIGEDVLPKQSLLYQKYEVLNELNNVRINNECLGTDQKQRLIREVFERHSSVTIKQVADNLVAHGDFARRPEIRGLADEKRFLSSLSTYHQLKEILHEAIDDPTKLLDIENIITWSTVFEDHTIFETKLAEIEWLDPKKINELSGIRYRGWGQFSRKLLDGLKLGNGHTVIQELMLSNHNLMQILADETLKETMTELNQDKLKTDDIEDVINDAYTSPSNKKALRQVLRVVEDIKHAANGQDPSWLFIETADGTGTAGKRTQSRQKQIQTVYANAAQELIDSAVRGELEDKIADKASFTDRLVLYFMQGGRDIYTGAPLNIDQLSHYDIDHILPQSLIKDDSLDNRVLVNATINREKNNVFASTLFAGKMKATWRKWHEAGLISGRKLRNLMLRPDEIDKFAKGFVARQLVETRQIIKLTEQIAAAQYPNTKIIAVKAGLSHQLREELDFPKNRDVNHYHHAFDAFLAARIGTYLLKRYPKLAPFFTYGEFAKVDVKKFREFNFIGALTHAKKNIIAKDTGEIVWDKERDIRELDRIYNFKRMLITHEVYFETADLFKQTIYAAKDSKERGGSKQLIPKKQGYPTQVYGGYTQESGSYNALVRVAEADTTAYQVIKISAQNASKIASANLKSREKGKQLLNEIVVKQLAKRRKNWKPSANSFKIVIPRFGMGTLFQNAKYGLFMVNSDTYYRNYQELWLSRENQKLLKKLFSIKYEKTQMNHDALQVYKAIIDQVEKFFKLYDINQFRAKLSDAIERFEKLPINTDGNKIGKTETLRQILIGLQANGTRSNVKNLGIKTDLGLLQVGSGIKLDKDTQIVYQSPSGLFKRRIPLADL

SEQ ID NO: 311 - protein, 1365 aa, Filifactor alocis
MTKEYYLGLDVGTNSVGWAVTDSQYNLCKFKKKDMWGIRLFESANTAKDRRLQRGNRRRLERKKQRIDLLQEIFSPEICKIDPTFFIRLNESRLHLEDKSNDFKYPLFIEKDYSDIEYYKEFPTIFHLRKHLIESEEKQDIRLIYLALHNIIKTRGHFLIDGDLQSAKQLRPILDTFLLSLQEEQNLSVSLSENQKDEYEEILKNRSIAKSEKVKKLKNLFEISDELEKEEKKAQSAVIENFCKFIVGNKGDVCKFLRVSKEELEIDSFSFSEGKYEDDIVKNLEEKVPEKVYLFEQMKAMYDWNILVDILETEEYISFAKVKQYEKHKTNLRLLRDIILKYCTKDEYNRMFNDEKEAGSYTAYVGKLKKNNKKYWIEKKRNPEEFYKSLGKLLDKIEPLKEDLEVLTMMIEECKNHTLLPIQKNKDNGVIPHQVHEVELKKILENAKKYYSFLTETDKDGYSVVQKIESIFRFRIPYYVGPLSTRHQEKGSNVWMVRKPGREDRIYPWNMEEIIDFEKSNENFITRMTNKCTYLIGEDVLPKHSLLYSKYMVLNELNNVKVRGKKLPTSLKQKVFEDLFENKSKVTGKNLLEYLQIQDKDIQIDDLSGFDKDFKTSLKSYLDFKKQIFGEEIEKESIQNMIEDIIKWITIYGNDKEMLKRVIRANYSNQLTEEQMKKITGFQYSGWGNFSKMFLKGISGSDVSTGETFDIITAMWETDNNLMQILSKKFTFMDNVEDFNSGKVGKIDKITYDSTVKEMFLSPENKRAVWQTIQVAEEIKKVMGCEPKKIFIEMARGGEKVKKRTKSRKAQLLELYAACEEDCRELIKEIEDRDERDFNSMKLFLYYTQFGKCMYSGDDIDINELIRGNSKWDRDHIYPQSKIKDDSIDNLVLVNKTYNAKKSNELLSEDIQKKMHSFWLSLLNKKLITKSKYDRLTRKGDFTDEELSGFIARQLVETRQSTKAIADIFKQIYSSEVVYVKSSLVSDFRKKPLNYLKSRRVNDYHHAKDAYLNIVVGNVYNKKFTSNPIQWMKKNRDTNYSLNKVFEHDVVINGEVIWEKCTYHEDTNTYDGGTLDRIRKIVERDNILYTEYAYCEKGELFNATIQNKNGNSTVSLKKGLDVKKYGGYFSANTSYFSLIEFEDKKGDRARHIIGVPIYIANMLEHSPSAFLEYCEQKGYQNVRILVEKIKKNSLLIINGYPLRIRGENEVDTSFKRAIQLKLDQKNYELVRNIEKFLEKYVEKKGNYPIDENRDHITHEKMNQLYEVLLSKMKKFNKKGMADPSDRIEKSKPKFIKLEDLIDKINVINKMLNLLRCDNDTKADLSLIELPKNAGSFVVKKNTIGKSKIILVNQSVTGLYENRREL

SEQ ID NO: 312 - protein, 1389 aa, Oenococcus kitaharae
MARDYSVGLDIGTSSVGWAAIDNKYHLIRAKSKNLIGVRLFDSAVTAEKRRGYRTTRRRLSRRHWRLRLLNDIFAGPLTDFGDENFLARLKYSWVHPQDQSNQAHFAAGLLFDSKEQDKDFYRKYPTIYHLRLALMNDDQKHDLREVYLAIHHLVKYRGHFLIEGDVKADSAFDVHTFADAIQRYAESNNSDENLLGKIDEKKLSAALTDKHGSKSQRAETAETAFDILDLQSKKQIQAILKSVVGNQANLMAIFGLDSSAISKDEQKNYKFSFDDADIDEKIADSEALLSDTEFEFLCDLKAAFDGLTLKMLLGDDKTVSAAMVRRFNEHQKDWEYIKSHIRNAKNAGNGLYEKSKKFDGINAAYLALQSDNEDDRKKAKKIFQDEISSADIPDDVKADFLKKIDDDQFLPIQRTKNNGTIPHQLHRNELEQIIEKQGIYYPFLKDTYQENSHELNKITALINFRVPYYVGPLVEEEQKIADDGKNIPDPTNHWMVRKSNDTITPWNLSQVVDLDKSGRRFIERLTGTDTYLIGEPTLPKNSLLYQKFDVLQELNNIRVSGRRLDIRAKQDAFEHLFKVQKTVSATNLKDFLVQAGYISEDTQIEGLADVNGKNFNNALTTYNYLVSVLGREFVENPSNEELLEEITELQTVFEDKKVLRRQLDQLDGLSDHNREKLSRKHYTGWGRISKKLLTTKIVQNADKIDNQTFDVPRMNQSIIDTLYNTKMNLMEIINNAEDDFGVRAWIDKQNTTDGDEQDVYSLIDELAGPKEIKRGIVQSFRILDDITKAVGYAPKRVYLEFARKTQESHLTNSRKNQLSTLLKNAGLSELVTQVSQYDAAALQNDRLYLYFLQQGKDMYSGEKLNLDNLSNYDIDHIIPQAYTKDNSLDNRVLVSNITNRRKSDSSNYLPALIDKMRPFWSVLSKQGLLSKHKFANLTRTRDFDDMEKERFIARSLVETRQIIKNVASLIDSHFGGETKAVAIRSSLTADMRRYVDIPKNRDINDYHHAFDALLFSTVGQYTENSGLMKKGQLSDSAGNQYNRYIKEWIHAARLNAQSQRVNPFGFVVGSMRNAAPGKLNPETGEITPEENADWSIADLDYLHKVMNFRKITVTRRLKDQKGQLYDESRYPSVLHDAKSKASINFDKHKPVDLYGGFSSAKPAYAALIKFKNKFRLVNVLRQWTYSDKNSEDYILEQIRGKYPKAEMVLSHIPYGQLVKKDGALVTISSATELHNFEQLWLPLADYKLINTLLKTKEDNLVDILHNRLDLPEMTIESAFYKAFDSILSFAFNRYALHQNALVKLQAHRDDFNALNYEDKQQTLERILDALHASPASSDLKKINLSSGFGRLFSPSHFTLADTDEFIFQSVTGLFSTQKTVAQLYQETK

SEQ ID NO: 313 - protein, 1323 aa, Fructobacillus fructosus
MVYDVGLDIGTGSVGWVALDENGKLARAKGKNLVGVRLFDTAQTAADRRGFRTTRRRLSRRKWRLRLLDELFSAEINEIDSSFFQRLKYSYVHPKDEENKAHYYGGYLFPTEEETKKFHRSYPTIYHLRQELMAQPNKRFDIREIYLAIHHLVKYRGHFLSSQEKITIGSTYNPEDLANAIEVYADEKGLSWELNNPEQLTEIISGEAGYGLNKSMKADEALKLFEFDNNQDKVAIKTLLAGLTGNQIDFAKLFGKDISDKDEAKLWKLKLDDEALEEKSQTILSQLTDEEIELFHAVVQAYDGFVLIGLLNGADSVSAAMVQLYDQHREDRKLLKSLAQKAGLKHKRFSEIYEQLALATDEATIKNGISTARELVEESNLSKEVKEDTLRRLDENEFLPKQRTKANSVIPHQLHLAELQKILQNQGQYYPFLLDTFEKEDGQDNKIEELLRFRIPYYVGPLVTKKDVEHAGGDADNHWVERNEGFEKSRVTPWNFDKVFNRDKAARDFIERLTGNDTYLIGEKTLPQNSLRYQLFTVLNELNNVRVNGKKFDSKTKADLINDLFKARKTVSLSALKDYLKAQGKGDVTITGLADESKFNSSLSSYNDLKKTFDAEYLENEDNQETLEKIIEIQTVFEDSKIASRELSKLPLDDDQVKKLSQTHYTGWGRLSEKLLDSKIIDERGQKVSILDKLKSTSQNFMSIINNDKYGVQAWITEQNTGSSKLTFDEKVNELTTSPANKRGIKQSFAVLNDIKKAMKEEPRRVYLEFAREDQTSVRSVPRYNQLKEKYQSKSLSEEAKVLKKTLDGNKNKMSDDRYFLYFQQQGKDMYTGRPINFERLSQDYDIDHIIPQAFTKDDSLDNRVLVSRPENARKSDSFAYTDEVQKQDGSLWTSLLKSGFINRKKYERLTKAGKYLDGQKTGFIARQLVETRQIIKNVASLIEGEYENSKAVAIRSEITADMRLLVGIKKHREINSFHHAFDALLITAAGQYMQNRYPDRDSTNVYNEFDRYTNDYLKNLRQLSSRDEVRRLKSFGFVVGTMRKGNEDWSEENTSYLRKVMMFKNILTTKKTEKDRGPLNKETIFSPKSGKKLIPLNSKRSDTALYGGYSNVYSAYMTLVRANGKNLLIKIPISIANQIEVGNLKINDYIVNNPAIKKFEKILISKLPLGQLVNEDGNLIYLASNEYRHNAKQLWLSTTDADKIASISENSSDEELLEAYDILTSENVKNRFPFFKKDIDKLSQVRDEFLDSDKRIAVIQTILRGLQIDAAYQAPVKIISKKVSDWHKLQQSGGIKLSDNSEMIYQSATGIFETRVKISDLL

SEQ ID NO: 314 - protein, 1329 aa, Catenibacterium mitsuokai
IVDYCIGLDLGTGSVGWAVVDMNHRLMKRNGKHLWGSRLFSNAETAANRRASRSIRRRYNKRRERIRLLRAILQDMVLEKDPTFFIRLEHTSFLDEEDKAKYLGTDYKDNYNLFIDEDFNDYTYYHKYPTIYHLRKALCESTEKADPRLIYLALHHIVKYRGNFLYEGQKFNMDASNIEDKLSDIFTQFTSFNNIPYEDDEKKNLEILEILKKPLSKKAKVDEVMTLIAPEKDYKSAFKELVTGIAGNKMNVTKMILCEPIKQGDSEIKLKFSDSNYDDQFSEVEKDLGEYVEFVDALHNVYSWVELQTIMGATHTDNASISEAMVSRYNKHHDDLKLLKDCIKNNVPNKYFDMFRNDSEKSKGYYNYINRPSKAPVDEFYKYVKKCIEKVDTPEAKQILNDIELENFLLKQNSRTNGSVPYQMQLDEMIKIIDNQAEYYPILKEKREQLLSILTFRIPYYFGPLNETSEHAWIKRLEGKENQRILPWNYQDIVDVDATAEGFIKRMRSYCTYFPDEEVLPKNSLIVSKYEVYNELNKIRVDDKLLEVDVKNDIYNELFMKNKTVTEKKLKNWLVNNQCCSKDAEIKGFQKENQFSTSLTPWIDFTNIFGKIDQSNFDLIENIIYDLTVFEDKKIMKRRLKKKYALPDDKVKQILKLKYKDWSRLSKKLLDGIVADNRFGSSVTVLDVLEMSRLNLMEIINDKDLGYAQMIEEATSCPEDGKFTYEEVERLAGSPALKRGIWQSLQIVEEITKVMKCRPKYIYIEFERSEEAKERTESKIKKLENVYKDLDEQTKKEYKSVLEELKGFDNTKKISSDSLFLYFTQLGKCMYSGKKLDIDSLDKYQIDHIVPQSLVKDDSFDNRVLVVPSENQRKLDDLVVPFDIRDKMYRFWKLLFDHELISPKKFYSLIKTEYTERDEERFINRQLVETRQITKNVTQIIEDHYSTTKVAAIRANLSHEFRVKNHIYKNRDINDYHHAHDAYIVALIGGFMRDRYPNMHDSKAVYSEYMKMFRKNKNDQKRWKDGFVINSMNYPYEVDGKLIWNPDLINEIKKCFYYKDCYCTTKLDQKSGQLFNLTVLSNDAHADKGVTKAVVPVNKNRSDVHKYGGFSGLQYTIVAIEGQKKKGKKTELVKKISGVPLHLKAASINEKINYIEEKEGLSDVRIIKDNIPVNQMIEMDGGEYLLTSPTEYVNARQLVLNEKQCALIADIYNAIYKQDYDNLDDILMIQLYIELTNKMKVLYPAYRGIAEKFESMNENYVVISKEEKANIIKQMLIVMHRGPQNGNIVYDDFKISDRIGRLKTKNHNLNNIVFISQSPTGIYTKKYKL

SEQ ID NO: 315 - protein, 1348 aa, Finegoldia magna
MKSEKKYYIGLDVGTNSVGWAVTDEFYNILRAKGKDLWGVRLFEKADTAANTRIFRSGRRRNDRKGMRLQILREIFEDEIKKVDKDFYDRLDESKFWAEDKKVSGKYSLFNDKNFSDKQYFEKFPTIFHLRKYLMEEHGKVDIRYYFLAINQMMKRRGHFLIDGQISHVTDDKPLKEQLILLINDLLKIELEEELMDSIFEILADVNEKRTDKKNNLKELIKGQDFNKQEGNILNSIFESIVTGKAKIKNIISDEDILEKIKEDNKEDFVLTGDSYEENLQYFEEVLQENITLFNTLKSTYDFLILQSILKGKSTLSDAQVERYDEHKKDLEILKKVIKKYDEDGKLFKQVFKEDNGNGYVSYIGYYLNKNKKITAKKKISNIEFTKYVKGILEKQCDCEDEDVKYLLGKIEQENFLLKQISSINSVIPHQIHLFELDKILENLAKNYPSFNNKKEEFTKIEKIRKTFTFRIPYYVGPLNDYHKNNGGNAWIFRNKGEKIRPWNFEKIVDLHKSEEEFIKRMLNQCTYLPEETVLPKSSILYSEYMVLNELNNLRINGKPLDTDVKLKLIEELFKKKTKVTLKSIRDYMVRNNFADKEDFDNSEKNLEIASNMKSYIDFNNILEDKFDVEMVEDLIEKITIHTGNKKLLKKYIEETYPDLSSSQIQKIINLKYKDWGRLSRKLLDGIKGTKKETEKTDTVINFLRNSSDNLMQIIGSQNYSFNEYIDKLRKKYIPQEISYEVVENLYVSPSVKKMIWQVIRVTEEITKVMGYDPDKIFIEMAKSEEEKKTTISRKNKLLDLYKAIKKDERDSQYEKLLTGLNKLDDSDLRSRKLYLYYTQMGRDMYTGEKIDLDKLFDSTHYDKDHIIPQSMKKDDSIINNLVLVNKNANQTTKGNIYPVPSSIRNNPKIYNYWKYLMEKEFISKEKYNRLIRNTPLTNEELGGFINRQLVETRQSTKAIKELFEKFYQKSKIIPVKASLASDLRKDMNTLKSREVNDLHHAHDAFLNIVAGDVWNREFTSNPINYVKENREGDKVKYSLSKDFTRPRKSKGKVIWTPEKGRKLIVDTLNKPSVLISNESHVKKGELFNATIAGKKDYKKGKIYLPLKKDDRLQDVSKYGGYKAINGAFFFLVEHTKSKKRIRSIELFPLHLLSKFYEDKNTVLDYAINVLQLQDPKIIIDKINYRTEIIIDNFSYLISTKSNDGSITVKPNEQMYWRVDEISNLKKIENKYKKDAILTEEDRKIMESYIDKIYQQFKAGKYKNRRTTDTIIEKYEIIDLDTLDNKQLYQLLVAFISLSYKTSNNAVDFTVIGLGTECGKPRITNLPDNTYLVYKSITGIYEKRIRIK

SEQ ID NO: 316 - protein, 1384 aa, Coriobacterium glomerans
MKLRGIEDDYSIGLDMGTSSVGWAVTDERGTLAHFKRKPTWGSRLFREAQTAAVARMPRGQRRRYVRRRWRLDLLQKLFEQQMEQADPDFFIRLRQSRLLRDDRAEEHADYRWPLFNDCKFTERDYYQRFPTIYHVRSWLMETDEQADIRLIYLALHNIVKHRGNFLREGQSLSAKSARPDEALNHLRETLRVWSSERGFECSIADNGSILAMLTHPDLSPSDRRKKIAPLFDVKSDDAAADKKLGIALAGAVIGLKTEFKNIFGDFPCEDSSIYLSNDEAVDAVRSACPDDCAELFDRLCEVYSAYVLQGLLSYAPGQTISANMVEKYRRYGEDLALLKKLVKIYAPDQYRMFFSGATYPGTGIYDAAQARGYTKYNLGPKKSEYKPSESMQYDDFRKAVEKLFAKTDARADERYRMMMDRFDKQQFLRRLKTSDNGSIYHQLHLEELKAIVENQGRFYPFLKRDADKLVSLVSFRIPYYVGPLSTRNARTDQHGENRFAWSERKPGMQDEPIFPWNWESIIDRSKSAEKFILRMTGMCTYLQQEPVLPKSSLLYEEFCVLNELNGAHWSIDGDDEHRFDAADREGIIEELFRRKRTVSYGDVAGWMERERNQIGAHVCGGQGEKGFESKLGSYIFFCKDVFKVERLEQSDYPMIERIILWNTLFEDRKILSQRLKEEYGSRLSAEQIKTICKKRFTGWGRLSEKFLTGITVQVDEDSVSIMDVLREGCPVSGKRGRAMVMMEILRDEELGFQKKVDDFNRAFFAENAQALGVNELPGSPAVRRSLNQSIRIVDEIASIAGKAPANIFIEVTRDEDPKKKGRRTKRRYNDLKDALEAFKKEDPELWRELCETAPNDMDERLSLYFMQRGKCLYSGRAIDIHQLSNAGIYEVDHIIPRTYVKDDSLENKALVYREENQRKTDMLLIDPEIRRRMSGYWRMLHEAKLIGDKKFRNLLRSRIDDKALKGFIARQLVETGQMVKLVRSLLEARYPETNIISVKASISHDLRTAAELVKCREANDFHHAHDAFLACRVGLFIQKRHPCVYENPIGLSQVVRNYVRQQADIFKRCRTIPGSSGFIVNSFMTSGFDKETGEIFKDDWDAEAEVEGIRRSLNFRQCFISRMPFEDHGVFWDATIYSPRAKKTAALPLKQGLNPSRYGSFSREQFAYFFIYKARNPRKEQTLFEFAQVPVRLSAQIRQDENALERYARELAKDQGLEFIRIERSKILKNQLIEIDGDRLCITGKEEVRNACELAFAQDEMRVIRMLVSEKPVSRECVISLFNRILLHGDQASRRLSKQLKLALLSEAFSEASDNVQRNVVLGLIAIFNGSTNMVNLSDIGGSKFAGNVRIKYKKELASPKVNVHLIDQSVTGMFERRTKIGL

SEQ ID NO: 317 - protein, 1391 aa, Eubacterium yurii
MENKQYYIGLDVGTNSVGWAVTDTSYNLLRAKGKDMWGARLFEKANTAAERRTKRTSRRRSEREKARKAMLKELFADEINRVDPSFFIRLEESKFFLDDRSENNRQRYTLFNDATFTDKDYYEKYKTIFHLRSALINSDEKFDVRLVFLAILNLFSHRGHFLNASLKGDGDIQGMDVFYNDLVESCEYFEIELPRITNIDNFEKILSQKGKSRTKILEELSEELSISKKDKSKYNLIKLISGLEASVVELYNIEDIQDENKKIKIGFRESDYEESSLKVKEIIGDEYFDLVERAKSVHDMGLLSNIIGNSKYLCEARVEAYENHHKDLLKIKELLKKYDKKAYNDMFRKMTDKNYSAYVGSVNSNIAKERRSVDKRKIEDLYKYIEDTALKNIPDDNKDKIEILEKIKLGEFLKKQLTASNGVIPNQLQSRELRAILKKAENYLPFLKEKGEKNLTVSEMIIQLFEFQIPYYVGPLDKNPKKDNKANSWAKIKQGGRILPWNFEDKVDVKGSRKEFIEKMVRKCTYISDEHTLPKQSLLYEKFMVLNEINNIKIDGEKISVEAKQKIYNDLFVKGKKVSQKDIKKELISLNIMDKDSVLSGTDTVCNAYLSSIGKFTGVFKEEINKQSIVDMIEDIIFLKTVYGDEKRFVKEEIVEKYGDEIDKDKIKRILGFKFSNWGNLSKSFLELEGADVGTGEVRSIIQSLWETNFNLMELLSSRFTYMDELEKRVKKLEKPLSEWTIEDLDDMYLSSPVKRMIWQSMKIVDEIQTVIGYAPKRIFVEMTRSEGEKVRTKSRKDRLKELYNGIKEDSKQWVKELDSKDESYFRSKKMYLYYLQKGRCMYSGEVIELDKLMDDNLYDIDHIYPRSFVKDDSLDNLVLVKKEINNRKQNDPITPQIQASCQGFWKILHDQGFMSNEKYSRLTRKTQEFSDEEKLSFINRQIVETGQATKCMAQILQKSMGEDVDVVFSKARLVSEFRHKFELFKSRLINDFHHANDAYLNIVVGNSYFVKFTRNPANFIKDARKNPDNPVYKYHMDRFFERDVKSKSEVAWIGQSEGNSGTIVIVKKTMAKNSPLITKKVEEGHGSITKETIVGVKEIKFGRNKVEKADKTPKKPNLQAYRPIKTSDERLCNILRYGGRTSISISGYCLVEYVKKRKTIRSLEAIPVYLGRKDSLSEEKLLNYFRYNLNDGGKDSVSDIRLCLPFISTNSLVKIDGYLYYLGGKNDDRIQLYNAYQLKMKKEEVEYIRKIEKAVSMSKFDEIDREKNPVLTEEKNIELYNKIQDKFENTVFSKRMSLVKYNKKDLSFGDFLKNKKSKFEEIDLEKQCKVLYNIIFNLSNLKEVDLSDIGGSKSTGKCRCKKNITNYKEFKLIQQSITGLYSCEKDLMTI

SEQ ID NO: 318 - protein, 1364 aa, Peptoniphilus duerdenii
MKNLKEYYIGLDIGTASVGWAVTDESYNIPKFNGKKMWGVRLFDDAKTAEERRTQRGSRRRLNRRKERINLLQDLFATEISKVDPNFFLRLDNSDLYREDKDEKLKSKYTLFNDKDFKDRDYHKKYPTIHHLIMDLIEDEGKKDIRLLYLACHYLLKNRGHFIFEGQKFDTKNSFDKSINDLKIHLRDEYNIDLEFNNEDLIEIITDTTLNKTNKKKELKNIVGDTKFLKAISAIMIGSSQKLVDLFEDGEFEETTVKSVDFSTTAFDDKYSEYEEALGDTISLLNILKSIYDSSILENLLKDADKSKDGNKYISKAFVKKFNKHGKDLKTLKRIIKKYLPSEYANIFRNKSINDNYVAYTKSNITSNKRTKASKFTKQEDFYKFIKKHLDTIKETKLNSSENEDLKLIDEMLTDIEFKTFIPKLKSSDNGVIPYQLKLMELKKILDNQSKYYDFLNESDEYGTVKDKVESIMEFRIPYYVGPLNPDSKYAWIKRENTKITPWNFKDIVDLDSSREEFIDRLIGRCTYLKEEKVLPKASLIYNEFMVLNELNNLKLNEFLITEEMKKAIFEELFKTKKKVTLKAVSNLLKKEFNLTGDILLSGTDGDFKQGLNSYIDFKNIIGDKVDRDDYRIKIEEIIKLIVLYEDDKTYLKKKIKSAYKNDFTDDEIKKIAALNYKDWGRLSKRFLTGIEGVDKTTGEKGSIIYFMREYNLNLMELMSGHYTFTEEVEKLNPVENRELCYEMVDELYLSPSVKRMLWQSLRVVDEIKRIIGKDPKKIFIEMARAKEAKNSRKESRKNKLLEFYKFGKKAFINEIGEERYNYLLNEINSEEESKFRWDNLYLYYTQLGRCMYSLEPIDLADLKSNNIYDQDHIYPKSKIYDDSLENRVLVKKNLNHEKGNQYPIPEKVLNKNAYGFWKILFDKGLIGQKKYTRLTRRTPFEERELAEFIERQIVETRQATKETANLLKNICQDSEIVYSKAENASRFRQEFDIIKCRTVNDLHHMHDAYLNIVVGNVYNTKFTKNPLNFIKDKDNVRSYNLENMFKYDVVRGSYTAWIADDSEGNVKAATIKKVKRELEGKNYRFTRMSYIGTGGLYDQNLMRKGKGQIPQKENTNKSNIEKYGGYNKASSAYFALIESDGKAGRERTLETIPIMVYNQEKYGNTEAVDKYLKDNLELQDPKILKDKIKINSLIKLDGFLYNIKGKTGDSLSIAGSVQLIVNKEEQKLIKKMDKFLVKKKDNKDIKVTSFDNIKEEELIKLYKTLSDKLNNGIYSNKRNNQAKNISEALDKFKEISIEEKIDVLNQIILLFQSYNNGCNLKSIGLSAKTGVVFIPKKLNYKECKLINQSITGLFENEVDLLNL

SEQ ID NO: 319 - protein, 1358 aa, Acidaminococcus sp.
MGKMYYLGLDIGTNSVGYAVTDPSYHLLKFKGEPMWGAHVFAAGNQSAERRSFRTSRRRLDRRQQRVKLVQEIFAPVISPIDPRFFIRLHESALWRDDVAETDKHIFFNDPTYTDKEYYSDYPTIHHLIVDLMESSEKHDPRLVYLAVAWLVAHRGHFLNEVDKDNIGDVLSFDAFYPEFLAFLSDNGVSPWVCESKALQATLLSRNSVNDKYKALKSLIFGSQKPEDNFDANISEDGLIQLLAGKKVKVNKLFPQESNDASFTLNDKEDAIEEILGTLTPDECEWIAHIRRLFDWAIMKHALKDGRTISESKVKLYEQHHHDLTQLKYFVKTYLAKEYDDIFRNVDSETTKNYVAYSYHVKEVKGTLPKNKATQEEFCKYVLGKVKNIECSEADKVDFDEMIQRLTDNSFMPKQVSGENRVIPYQLYYYELKTILNKAASYLPFLTQCGKDAISNQDKLLSIMTFRIPYFVGPLRKDNSEHAWLERKAGKIYPWNFNDKVDLDKSEEAFIRRMTNTCTYYPGEDVLPLDSLIYEKFMILNEINNIRIDGYPISVDVKQQVFGLFEKKRRVTVKDIQNLLLSLGALDKHGKLTGIDTTIHSNYNTYHHFKSLMERGVLTRDDVERIVERMTYSDDTKRVRLWLNNNYGTLTADDVKHISRLRKHDFGRLSKMFLTGLKGVHKETGERASILDFMWNTNDNLMQLLSECYTFSDEITKLQEAYYAKAQLSLNDFLDSMYISNAVKRPIYRTLAVVNDIRKACGTAPKRIFIEMARDGESKKKRSVTRREQIKNLYRSIRKDFQQEVDFLEKILENKSDGQLQSDALYLYFAQLGRDMYTGDPIKLEHIKDQSFYNIDHIYPQSMVKDDSLDNKVLVQSEINGEKSSRYPLDAAIRNKMKPLWDAYYNHGLISLKKYQRLTRSTPFTDDEKWDFINRQLVETRQSTKALAILLKRKFPDTEIVYSKAGLSSDFRHEFGLVKSRNINDLHHAKDAFLAIVTGNVYHERFNRRWFMVNQPYSVKTKTLFTHSIKNGNFVAWNGEEDLGRIVKMLKQNKNTIHFTRFSFDRKEGLFDIQPLKASTGLVPRKAGLDVVKYGGYDKSTAAYYLLVRFTLEDKKTQHKLMMIPVEGLYKARIDHDKEFLTDYAQTTISEILQKDKQKVINIMFPMGTRHIKLNSMISIDGFYLSIGGKSSKGKSVLCHAMVPLIVPHKIECYIKAMESFARKFKENNKLRIVEKFDKITVEDNLNLYELFLQKLQHNPYNKFFSTQFDVLTNGRSTFTKLSPEEQVQTLLNILSIFKTCRSSGCDLKSINGSAQAARIMISADLTGLSKKYSDIRLVEQSASGLFVSKSQNLLEYL

SEQ ID NO: 320 - protein, 1356 aa, Lactobacillus farciminis
MTKKEQPYNIGLDIGTSSVGWAVTNDNYDLLNIKKKNLWGVRLFEEAQTAKETRLNRSTRRRYRRRKNRINWLNEIFSEELAKTDPSFLIRLQNSWVSKKDPDRKRDKYNLFIDGPYTDKEYYREFPTIFHLRKELILNKDKADIRLIYLALHNILKYRGNFTYEHQKFNISNLNNNLSKELIELNQQLIKYDISFPDDCDWNHISDILIGRGNATQKSSNILKDFTLDKETKKLLKEVINLILGNVAHLNTIFKTSLTKDEEKLNFSGKDIESKLDDLDSILDDDQFTVLDAANRIYSTITLNEILNGESYFSMAKVNQYENHAIDLCKLRDMWHTTKNEEAVEQSRQAYDDYINKPKYGTKELYTSLKKFLKVALPTNLAKEAEEKISKGTYLVKPRNSENGVVPYQLNKIEMEKIIDNQSQYYPFLKENKEKLLSILSFRIPYYVGPLQSAEKNPFAWMERKSNGHARPWNFDEIVDREKSSNKFIRRMTVTDSYLVGEPVLPKNSLIYQRYEVLNELNNIRITENLKTNPIGSRLTVETKQRIYNELFKKYKKVTVKKLTKWLIAQGYYKNPILIGLSQKDEFNSTLTTYLDMKKIFGSSFMEDNKNYDQIEELIEWLTIFEDKQILNEKLHSSKYSYTPDQIKKISNMRYKGWGRLSKKILMDITTETNTPQLLQLSNYSILDLMWATNNNFISIMSNDKYDFKNYIENHNLNKNEDQNISDLVNDIHVSPALKRGITQSIKIVQEIVKFMGHAPKHIFIEVTRETKKSEITTSREKRIKRLQSKLLNKANDFKPQLREYLVPNKKIQEELKKHKNDLSSERIMLYFLQNGKSLYSEESLNINKLSDYQVDHILPRTYIPDDSLENKALVLAKENQRKADDLLLNSNVIDRNLERWTYMLNNNMIGLKKFKNLTRRVITDKDKLGFIHRQLVQTSQMVKGVANILDNMYKNQGTTCIQARANLSTAFRKALSGQDDTYHFKHPELVKNRNVNDFHHAQDAYLASFLGTYRLRRFPTNEMLLMNGEYNKFYGQVKELYSKKKKLPDSRKNGFIISPLVNGTTQYDRNTGEIIWNVGFRDKILKIFNYHQCNVTRKTEIKTGQFYDQTIYSPKNPKYKKLIAQKKDMDPNIYGGFSGDNKSSITIVKIDNNKIKPVAIPIRLINDLKDKKTLQNWLEENVKHKKSIQIIKNNVPIGQIIYSKKVGLLSLNSDREVANRQQLILPPEHSALLRLLQIPDEDLDQILAFYDKNILVEILQELITKMKKFYPFYKGEREFLIANIENFNQATTSEKVNSLEELITLLHANSTSAHLIFNNIEKKAFGRKTHGLTLNNTDFIYQSVTGLYETRIHIE

SEQ ID NO: 321 - protein, 1421 aa, Streptococcus sanguinis
MTKFNKNYSIGLDIGVSSVGYAVVTEDYRVPAFKFKVLGNTEKEKIKKNLIGSTTFVSAQPAKGTRVFRVNRRRIDRRNHRITYLRDIFQKEIEKVDKNFYRRLDESFRVLGDKSEDLQIKQPFFGDKELETAYHKKYPTIYHLRKHLADADKNSPVADIREVYMAISHILKYRGHFLTLDKINPNNINMQNSWIDFIESCQEVFDLEISDESKNIADIFKSSENRQEKVKKILPYFQQELLKKDKSIFKQLLQLLFGLKTKFKDCFELEEEPDLNFSKENYDENLENFLGSLEEDFSDVFAKLKVLRDTILLSGMLTYTGATHARFSATMVERYEEHRKDLQRFKFFIKQNLSEQDYLDIFGRKTQNGFDVDKETKGYVGYITNKMVLTNPQKQKTIQQNFYDYISGKITGIEGAEYFLNKISDGTFLRKLRTSDNGAIPNQIHAYELEKIIERQGKDYPFLLENKDKLLSILTFKIPYYVGPLAKGSNSRFAWIKRATSSDILDDNDEDTRNGKIRPWNYQKLINMDETRDAFITNLIGNDIILLNEKVLPKRSLIYEEVMLQNELTRVKYKDKYGKAHFFDSELRQNIINGLFKNNSKRVNAKSLIKYLSDNHKDLNAIEIVSGVEKGKSFNSTLKTYNDLKTIFSEELLDSEIYQKELEEIIKVITVFDDKKSIKNYLTKFFGHLEILDEEKINQLSKLRYSGWGRYSAKLLLDIRDEDTGFNLLQFLRNDEENRNLTKLISDNTLSFEPKIKDIQSKSTIEDDIFDEIKKLAGSPAIKRGILNSIKIVDELVQIIGYPPHNIVIEMARENMTTEEGQKKAKTRKTKLESALKNIENSLLENGKVPHSDEQLQSEKLYLYYLQNGKDMYTLDKTGSPAPLYLDQLDQYEVDHIIPYSFLPIDSIDNKVLTHRENNQQKLNNIPDKETVANMKPFWEKLYNAKLISQTKYQRLTTSERTPDGVLTESMKAGFIERQLVETRQIIKHVARILDNRFSDTKIITLKSQLITNFRNTFHIAKIRELNDYHHAHDAYLAVVVGQTLLKVYPKLAPELIYGHHAHFNRHEENKATLRKHLYSNIMRFFNNPDSKVSKDIWDCNRDLPIIKDVIYNSQINFVKRTMIKKGAFYNQNPVGKFNKQLAANNRYPLKTKALCLDTSIYGGYGPMNSALSIIIIAERFNEKKGKIETVKEFHDIFIIDYEKFNNNPFQFLNDTSENGFLKKNNINRVLGFYRIPKYSLMQKIDGTRMLFESKSNLHKATQFKLTKTQNELFFHMKRLLTKSNLMDLKSKSAIKESQNFILKHKEEFDNISNQLSAFSQKMLGNTTSLKNLIKGYNERKIKEIDIRDETIKYFYDNFIKMFSFVKSGAPKDINDFFDNKCTVARMRPKPDKKLLNATLIHQSITGLYETRIDLSKLGED

SEQ ID NO: 322 - protein, 1338 aa, Coprococcus catus
MKQEYFLGLDMGTGSLGWAVTDSTYQVMRKHGKALWGTRLFESASTAEERRMFRTARRRLDRRNWRIQVLQEIFSEEISKVDPGFFLRMKESKYYPEDKRDAEGNCPELPYALFVDDNYTDKNYHKDYPTIYHLRKMLMETTEIPDIRLVYLVLHHMMKHRGHFLLSGDISQIKEFKSTFEQLIQNIQDEELEWHISLDDAAIQFVEHVLKDRNLTRSTKKSRLIKQLNAKSACEKAILNLLSGGTVKLSDIFNNKELDESERPKVSFADSGYDDYIGIVEAELAEQYYIIASAKAVYDWSVLVEILGNSVSISEAKIKVYQKHQADLKTLKKIVRQYMTKEDYKRVFVDTEEKLNNYSAYIGMTKKNGKKVDLKSKQCTQADFYDFLKKNVIKVIDHKEITQEIESEIEKENFLPKQVTKDNGVIPYQVHDYELKKILDNLGTRMPFIKENAEKIQQLFEFRIPYYVGPLNRVDDGKDGKFTWSVRKSDARIYPWNFTEVIDVEASAEKFIRRMTNKCTYLVGEDVLPKDSLVYSKFMVLNELNNLRLNGEKISVELKQRIYEELFCKYRKVTRKKLERYLVIEGIAKKGVEITGIDGDFKASLTAYHDFKERLTDVQLSQRAKEAIVLNVVLFGDDKKLLKQRLSKMYPNLTTGQLKGICSLSYQGWGRLSKTFLEEITVPAPGTGEVWNIMTALWQTNDNLMQLLSRNYGFTNEVEEFNTLKKETDLSYKTVDELYVSPAVKRQIWQTLKVVKEIQKVMGNAPKRVFVEMAREKQEGKRSDSRKKQLVELYRACKNEERDWITELNAQSDQQLRSDKLFLYYIQKGRCMYSGETIQLDELWDNTKYDIDHIYPQSKTMDDSLNNRVLVKKNYNAIKSDTYPLSLDIQKKMMSFWKMLQQQGFITKEKYVRLVRSDELSADELAGFIERQIVETRQSTKAVATILKEALPDTEIVYVKAGNVSNFRQTYELLKVREMNDLHHAKDAYLNIVVGNAYFVKFTKNAAWFIRNNPGRSYNLKRMFEFDIERSGEIAWKAGNKGSIVTVKKVMQKNNILVTRKAYEVKGGLFDQQIMKKGKGQVPIKGNDERLADIEKYGGYNKAAGTYFMLVKSLDKKGKEIRTIEFVPLYLKNQIEINHESAIQYLAQERGLNSPEILLSKIKIDTLFKVDGFKMWLSGRTGNQLIFKGANQLILSHQEAAILKGVVKYVNRKNENKDAKLSERDGMTEEKLLQLYDTFLDKLSNTVYSIRLSAQIKTLTEKRAKFIGLSNEDQCIVLNEILHMFQCQSGSANLKLIGGPGSAGILVMNNNITACKQISVINQSPTGIYEKEIDLIKL

SEQ ID NO: 323 - protein, 1345 aa, Streptococcus mutans
MKKPYSIGLDIGTNSVGWAVVTDDYKVPAKKMKVLGNTDKSHIEKNLLGALLFDSGNTAEDRRLKRTARRRYTRRRNRILYLQEIFSEEMGKVDDSFFHRLEDSFLVTEDKRGERHPIFGNLEEEVKYHENFPTIYHLRQYLADNPEKVDLRLVYLALAHIIKFRGHFLIEGKFDTRNNDVQRLFQEFLAVYDNTFENSSLQEQNVQVEEILTDKISKSAKKDRVLKLFPNEKSNGRFAEFLKLIVGNQADFKKHFELEEKAPLQFSKDTYEEELEVLLAQIGDNYAELFLSAKKLYDSILLSGILTVTDVGTKAPLSASMIQRYNEHQMDLAQLKQFIRQKLSDKYNEVFSDVSKDGYAGYIDGKTNQEAFYKYLKGLLNKIEGSGYFLDKIEREDFLRKQRTFDNGSIPHQIHLQEMRAIIRRQAEFYPFLADNQDRIEKLLTFRIPYYVGPLARGKSDFAWLSRKSADKITPWNFDEIVDKESSAEAFINRMTNYDLYLPNQKVLPKHSLLYEKFTVYNELTKVKYKTEQGKTAFFDANMKQEIFDGVFKVYRKVTKDKLMDFLEKEFDEFRIVDLTGLDKENKVFNASYGTYHDLCKILDKDFLDNSKNEKILEDIVLTLTLFEDREMIRKRLENYSDLLTKEQVKKLERRHYTGWGRLSAELIHGIRNKESRKTILDYLIDDGNSNRNFMQLINDDALSFKEEIAKAQVIGETDNLNQVVSDIAGSPAIKKGILQSLKIVDELVKIMGHQPENIVVEMARENQFTNQGRRNSQQRLKGLTDSIKEFGSQILKEHPVENSQLQNDRLFLYYLQNGRDMYTGEELDIDYLSQYDIDHIIPQAFIKDNSIDNRVLTSSKENRGKSDDVPSKDVVRKMKSYWSKLLSAKLITQRKFDNLTKAERGGLTDDDKAGFIKRQLVETRQITKHVARILDERFNTETDENNKKIRQVKIVTLKSNLVSNFRKEFELYKVREINDYHHAHDAYLNAVIGKALLGVYPQLEPEFVYGDYPHFHGHKENKATAKKFFYSNIMNFFKKDDVRTDKNGEIIWKKDEHISNIKKVLSYPQVNIVKKVEEQTGGFSKESILPKGNSDKLIPRKTKKFYWDTKKYGGFDSPIVAYSILVIADIEKGKSKKLKTVKALVGVTIMEKMTFERDPVAFLERKGYRNVQEENIIKLPKYSLFKLENGRKRLLASARELQKGNEIVLPNHLGTLLYHAKNIHKVDEPKHLDYVDKHKDEFKELLDVVSNFSKKYTLAEGNLEKIKELYAQNNGEDLKELASSFINLLTFTAIGAPATFKFFDKNIDRKRYTSTTEILNATLIHQSITGLYETRIDLNKLGGD

SEQ ID NO: 324 - protein, 1368 aa, Streptococcus pyogenes [sequence omitted]

SEQ ID NO: 325 - protein, 1388 aa, Streptococcus thermophilus
MTKPYSIGLDIGTNSVGWAVTTDNYKVPSKKMKVLGNTSKKYIKKNLLGVLLFDSGITAEGRRLKRTARRRYTRRRNRILYLQEIFSTEMATLDDAFFQRLDDSFLVPDDKRDSKYPIFGNLVEEKAYHDEFPTIYHLRKYLADSTKKADLRLVYLALAHMIKYRGHFLIEGEFNSKNNDIQKNFQDFLDTYNAIFESDLSLENSKQLEEIVKDKISKLEKKDRILKLFPGEKNSGIFSEFLKLIVGNQADFRKCFNLDEKASLHFSKESYDEDLETLLGYIGDDYSDVFLKAKKLYDAILLSGFLTVTDNETEAPLSSAMIKRYNEHKEDLALLKEYIRNISLKTYNEVFKDDTKNGYAGYIDGKTNQEDFYVYLKKLLAEFEGADYFLEKIDREDFLRKQRTFDNGSIPYQIHLQEMRAILDKQAKFYPFLAKNKERIEKILTFRIPYYVGPLARGNSDFAWSIRKRNEKITPWNFEDVIDKESSAEAFINRMTSFDLYLPEEKVLPKHSLLYETFNVYNELTKVRFIAESMRDYQFLDSKQKKDIVRLYFKDKRKVTDKDIIEYLHAIYGYDGIELKGIEKQFNSSLSTYHDLLNIINDKEFLDDSSNEAIIEEIIHTLTIFEDREMIKQRLSKFENIFDKSVLKKLSRRHYTGWGKLSAKLINGIRDEKSGNTILDYLIDDGISNRNFMQLIHDDALSFKKKIQKAQIIGDEDKGNIKEVVKSLPGSPAIKKGILQSIKIVDELVKVMGGRKPESIVVEMARENQYTNQGKSNSQQRLKRLEKSLKELGSKILKENIPAKLSKIDNNALQNDRLYLYYLQNGKDMYTGDDLDIDRLSNYDIDHIIPQAFLKDNSIDNKVLVSSASNRGKSDDVPSLEVVKKRKTFWYQLLKSKLISQRKFDNLTKAERGGLSPEDKAGFIQRQLVETRQITKHVARLLDEKFNNKKDENNRAVRTVKIITLKSTLVSQFRKDFELYKVREINDFHHAHDAYLNAVVASALLKKYPKLEPEFVYGDYPKYNSFRERKSATEKVYFYSNIMNIFKKSISLADGRVIERPLIEVNEETGESVWNKESDLATVRRVLSYPQVNVVKKVEEQNHGLDRGKPKGLFNANLSSKPKPNSNENLVGAKEYLDPKKYGGYAGISNSFTVLVKGTIEKGAKKKITNVLEFQGISILDRINYRKDKLNFLLEKGYKDIELIIELPKYSLFELSDGSRRMLASILSTNNKRGEIHKGNQIFLSQKFVKLLYHAKRISNTINENHRKYVENHKKEFEELFYYILEFNENYVGAKKNGKLLNSAFQSWQNHSIDELCSSFIGPTGSERKGLFELTSRGSAADFEFLGVKIPRYRDYTPSSLLKDATLIHQSVTGLYETRIDLAKLGEG

SEQ ID NO: 326 - protein, 1374 aa, Fusobacterium nucleatum
MKKQKFSDYYLGFDIGTNSVGWCVTDLDYNVLRFNKKDMWGSRLFDEAKTAAERRVQRNSRRRLKRRKWRLNLLEEIFSDEIMKIDSNFFRRLKESSLWLEDKNSKEKFTLFNDDNYKDYDFYKQYPTIFHLRDELIKNPEKKDIRLIYLALHSIFKSRGHFLFEGQNLKEIKNFETLYNNLISFLEDNGINKSIDKDNIEKLEKIICDSGKGLKDKEKEFKGIFNSDKQLVAIFKLSVGSSVSLNDLFDTDEYKKEEVEKEKISFREQIYEDDKPIYYSILGEKIELLDIAKSFYDFMVLNNILSDSNYISEAKVKLYEEHKKDLKNLKYIIRKYNKENYDKLFKDKNENNYPAYIGLNKEKDKKEVVEKSRLKIDDLIKVIKGYLPKPERIEEKDKTIFNEILNKIELKTILPKQRISDNGTLPYQIHEVELEKILENQSKYYDFLNYEENGVSTKDKLLKTFKFRIPYYVGPLNSYHKDKGGNSWIVRKEEGKILPWNFEQKVDIEKSAEEFIKRMTNKCTYLNGEDVIPKDSFLYSEYIILNELNKVQVNDEFLNEENKRKIIDELFKENKKVSEKKFKEYLLVNQIANRTVELKGIKDSFNSNYVSYIKFKDIFGEKLNLDIYKEISEKSILWKCLYGDDKKIFEKKIKNEYGDILNKDEIKKINSFKFNTWGRLSEKLLTGIEFINLETGECYSSVMEALRRTNYNLMELLSSKFTLQESIDNENKEMNEVSYRDLIEESYVSPSLKRAILQTLKIYEEIKKITGRVPKKVFIEMARGGDESMKNKKIPARQEQLKKLYDSCGNDIANFSIDIKEMKNSLSSYDNNSLRQKKLYLYYLQFGKCMYTGREIDLDRLLQNNDTYDIDHIYPRSKVIKDDSFDNLVLVLKNENAEKSNEYPVKKEIQEKMKSFWRFLKEKNFISDEKYKRLTGKDDFELRGFMARQLVNVRQTTKEVGKILQQIEPEIKIVYSKAEIASSFREMFDFIKVRELNDTHHAKDAYLNIVAGNVYNTKFTEKPYRYLQEIKENYDVKKIYNYDIKNAWDKENSLEIVKKNMEKNTVNITRFIKEEKGELFNLNPIKKGETSNEIISIKPKLYDGKDNKLNEKYGYYTSLKAAYFIYVEHEKKNKKVKTFERITRIDSTLIKNEKNLIKYLVSQKKLLNPKIIKKIYKEQTLIIDSYPYTFTGVDSNKKVELKNKKQLYLEKKYEQILKNALKFVEDNQGETEENYKFIYLKKRNNNEKNETIDAVKERYNIEFNEMYDKFLEKLSSKDYKNYINNKLYTNFLNSKEKFKKLKLWEKSLILREFLKIFNKNTYGKYEIKDSQTKEKLFSFPEDTGRIRLGQSSLGNNKELLEESVTGLFVKKIKL

SEQ ID NO: 327 - protein, 1333 aa, Planococcus antarcticus
MKNYTIGLDIGVASVGWVCIDENYKILNYNNRHAFGVHEFESAESAAGRRLKRGMRRRYNRRKKRLQLLQSLFDSYITDSGFFSKTDSQHFWKNNNEFENRSLTEVLSSLRISSRKYPTIYHLRSDLIESNKKMDLRLVYLALHNLVKYRGHFLQEGNWSEAASAEGMDDQLLELVTRYAELENLSPLDLSESQWKAAETLLLNRNLTKTDQSKELTAMFGKEYEPFCKLVAGLGVSLHQLFPSSEQALAYKETKTKVQLSNENVEEVMELLLEEESALLEAVQPFYQQVVLYELLKGETYVAKAKVSAFKQYQKDMASLKNLLDKTFGEKVYRSYFISDKNSQREYQKSHKVEVLCKLDQFNKEAKFAETFYKDLKKLLEDKSKTSIGTTEKDEMLRIIKAIDSNQFLQKQKGIQNAAIPHQNSLYEAEKILRNQQAHYPFITTEWIEKVKQILAFRIPYYIGPLVKDTTQSPFSWVERKGDAPITPWNFDEQIDKAASAEAFISRMRKTCTYLKGQEVLPKSSLTYERFEVLNELNGIQLRTTGAESDFRHRLSYEMKCWIIDNVFKQYKTVSTKRLLQELKKSPYADELYDEHTGEIKEVFGTQKENAFATSLSGYISMKSILGAVVDDNPAMTEELIYWIAVFEDREILHLKIQEKYPSITDVQRQKLALVKLPGWGRFSRLLIDGLPLDEQGQSVLDHMEQYSSVFMEVLKNKGFGLEKKIQKMNQHQVDGTKKIRYEDIEELAGSPALKRGIWRSVKIVEELVSIFGEPANIVLEVAREDGEKKRTKSRKDQWEELTKTTLKNDPDLKSFIGEIKSQGDQRFNEQRFWLYVTQQGKCLYTGKALDIQNLSMYEVDHILPQNFVKDDSLDNLALVMPEANQRKNQVGQNKMPLEIIEANQQYAMRTLWERLHELKLISSGKLGRLKKPSFDEVDKDKFIARQLVETRQIIKHVRDLLDERFSKSDIHLVKAGIVSKFRRFSEIPKIRDYNNKHHAMDALFAAALIQSILGKYGKNFLAFDLSKKDRQKQWRSVKGSNKEFFLFKNFGNLRLQSPVTGEEVSGVEYMKHVYFELPWQTTKMTQTGDGMFYKESIFSPKVKQAKYVSPKTEKFVHDEVKNHSICLVEFTFMKKEKEVQETKFIDLKVIEHHQFLKEPESQLAKFLAEKETNSPIIHARIIRTIPKYQKIWIEHFPYYFISTRELHNARQFEISYELMEKVKQLSERSSVEELKIVFGLLIDQMNDNYPIYTKSSIQDRVQKFVDTQLYDFKSFEIGFEELKKAVAANAQRSDTFGSRISKKPKPEEVAIGYESITGLKYRKPRSVVGTKR

SEQ ID NO: 328 - protein, 1395 aa, Treponema denticola
MKKEIKDYFLGLDVGTGSVGWAVTDTDYKLLKANRKDLWGMRCFETAETAEVRRLHRGARRRIERRKKRIKLLQELFSQEIAKTDEGFFQRMKESPFYAEDKTILQENTLFNDKDFADKTYHKAYPTINHLIKAWIENKVKPDPRLLYLACHNIIKKRGHFLFEGDFDSENQFDTSIQALFEYLREDMEVDIDADSQKVKEILKDSSLKNSEKQSRLNKILGLKPSDKQKKAITNLISGNKINFADLYDNPDLKDAEKNSISFSKDDFDALSDDLASILGDSFELLLKAKAVYNCSVLSKVIGDEQYLSFAKVKIYEKHKTDLTKLKNVIKKHFPKDYKKVFGYNKNEKNNNNYSGYVGVCKTKSKKLIINNSVNQEDFYKFLKTILSAKSEIKEVNDILTEIETGTFLPKQISKSNAEIPYQLRKMELEKILSNAEKHFSFLKQKDEKGLSHSEKIIMLLTFKIPYYIGPINDNHKKFFPDRCWVVKKEKSPSGKTTPWNFFDHIDKEKTAEAFITSRTNFCTYLVGESVLPKSSLLYSEYTVLNEINNLQIIIDGKNICDIKLKQKIYEDLFKKYKKITQKQISTFIKHEGICNKTDEVIILGIDKECTSSLKSYIELKNIFGKQVDEISTKNMLEEIIRWATIYDEGEGKTILKTKIKAEYGKYCSDEQIKKILNLKFSGWGRLSRKFLETVTSEMPGFSEPVNIITAMRETQNNLMELLSSEFTFTENIKKINSGFEDAEKQFSYDGLVKPLFLSPSVKKMLWQTLKLVKEISHITQAPPKKIFIEMAKGAELEPARTKTRLKILQDLYNNCKNDADAFSSEIKDLSGKIENEDNLRLRSDKLYLYYTQLGKCMYCGKPIEIGHVFDTSNYDIDHIYPQSKIKDDSISNRVLVCSSCNKNKEDKYPLKSEIQSKQRGFWNFLQRNNFISLEKLNRLTRATPISDDETAKFIARQLVETRQATKVAAKVLEKMFPETKIVYSKAETVSMFRNKFDIVKCREINDFHHAHDAYLNIVVGNVYNTKFTNNPWNFIKEKRDNPKIADTYNYYKVFDYDVKRNNITAWEKGKTIITVKDMLKRNTPIYTRQAACKKGELFNQTIMKKGLGQHPLKKEGPFSNISKYGGYNKVSAAYYTLIEYEEKGNKIRSLETIPLYLVKDIQKDQDVLKSYLTDLLGKKEFKILVPKIKINSLLKINGFPCHITGKTNDSFLLRPAVQFCCSNNEVLYFKKIIRFSEIRSQREKIGKTISPYEDLSFRSYIKENLWKKTKNDEIGEKEFYDLLQKKNLEIYDMLLTKHKDTIYKKRPNSATIDILVKGKEKFKSLIIENQFEVILEILKLFSATRNVSDLQHIGGSKYSGVAKIGNKISSLDNCILIYQSITGIFEKRIDLLKV

SEQ ID NO: 329 - protein, 1327 aa, Solobacterium moorei
MEGQMKNNGNNLQQGNYYLGLDVGTSSVGWAVTDTDYNVLKFRGKSMWGARLFDEASTAEERRTHRGNRRRLARRKYRLLLLEQLFEKEIRKIDDNFFVRLHESNLWADDKSKPSKFLLFNDTNFTDKDYLKKYPTIYHLRSDLIHNSTEHDIRLVFLALHHLIKYRGHFIYDNSANGDVKTLDEAVSDFEEYLNENDIEFNIENKKEFINVLSDKHLTKKEKKISLKKLYGDITDSENINISVLIEMLSGSSISLSNLFKDIEFDGKQNLSLDSDIEETLNDVVDILGDNIDLLIHAKEVYDIAVLTSSLGKHKYLCDAKVELFEKNKKDLMILKKYIKKNHPEDYKKIFSSPTEKKNYAAYSQTNSKNVCSQEEFCLFIKPYIRDMVKSENEDEVRIAKEVEDKSFLTKLKGTNNSVVPYQIHERELNQILKNIVAYLPFMNDEQEDISVVDKIKLIFKFKIPYYVGPLNTKSTRSWVYRSDEKIYPWNFSNVIDLDKTAHEFMNRLIGRCTYTNDPVLPMDSLLYSKYNVLNEINPIKVNGKAIPVEVKQAIYTDLFENSKKKVTRKSIYIYLLKNGYIEKEDIVSGIDIEIKSKLKSHHDFTQIVQENKCTPEEIERIIKGILVYSDDKSMLRRWLKNNIKGLSENDVKYLAKLNYKEWGRLSKTLLTDIYTINPEDGEACSILDIMWNTNATLMEILSNEKYQFKQNIENYKAENYDEKQNLHEELDDMYISPAARRSIWQALRIVDEIVDIKKSAPKKIFIEMAREKKSAMKKKRTESRKDTLLELYKSCKSQADGFYDEELFEKLSNESNSRLRRDQLYLYYTQMGRSMYTGKRIDFDKLINDKNTYDIDHIYPRSKIKDDSITNRVLVEKDINGEKTDIYPISEDIRQKMQPFWKILKEKGLINEEKYKRLTRNYELTDEELSSFVARQLVETQQSTKALATLLKKEYPSAKIVYSKAGNVSEFRNRKDKELPKFREINDLHHAKDAYLNIVVGNVYDTKFTEKFFNNIRNENYSLKRVFDFSVPGAWDAKGSTFNTIKKYMAKNNPIIAFAPYEVKGELFDQQIVPKGKGQFPIKQGKDIEKYGGYNKLSSAFLFAVEYKGKKARERSLETVYIKDVELYLQDPIKYCESVLGLKEPQIIKPKILMGSLFSINNKKLVVTGRSGKQYVCHHIYQLSINDEDSQYLKNIAKYLQEEPDGNIERQNILNITSVNNIKLFDVLCTKFNSNTYEIILNSLKNDVNEGREKFSELDILEQCNILLQLLKAFKCNRESSNLEKLNNKKQAGVIVIPHLFTKCSVFKVIHQSITGLFEKEMDLLK

SEQ ID NO: 330 - protein, 1334 aa, Staphylococcus pseudintermedius
MGRKPYILSLDIGTGSVGYACMDKGFNVLKYHDKDALGVYLFDGALTAQERRQFRTSRRRKNRRIKRLGLLQELLAPLVQNPNFYQFQRQFAWKNDNMDFKNKSLSEVLSFLGYESKKYPTIYHLQEALLLKDEKFDPELIYMALYHLVKYRGHFLFDHLKIENLTNNDNMHDFVELIETYENLNNIKLNLDYEKTKVIYEILKDNEMTKNDRAKRVKNMEKKLEQFSIMLLGLKFNEGKLFNHADNAEELKGANQSHTFADNYEENLTPFLTVEQSEFIERANKIYLSLTLQDILKGKKSMAMSKVAAYDKFRNELKQVKDIVYKADSTRTQFKKIFVSSKKSLKQYDATPNDQTFSSLCLFDQYLIRPKKQYSLLIKELKKIIPQDSELYFEAENDTLLKVLNTTDNASIPMQINLYEAETILRNQQKYHAEITDEMIEKVLSLIQFRIPYYVGPLVNDHTASKFGWMERKSNESIKPWNFDEVVDRSKSATQFIRRMTNKCSYLINEDVLPKNSLLYQEMEVLNELNATQIRLQTDPKNRKYRMMPQIKLFAVEHIFKKYKTVSHSKFLEIMLNSNHRENFMNHGEKLSIFGTQDDKKFASKLSSYQDMTKIFGDIEGKRAQIEEIIQWITIFEDKKILVQKLKECYPELTSKQINQLKKLNYSGWGRLSEKLLTHAYQGHSIIELLRHSDENFMEILTNDVYGFQNFIKEENQVQSNKIQHQDIANLTTSPALKKGIWSTIKLVRELTSIFGEPEKIIMEFATEDQQKGKKQKSRKQLWDDNIKKNKLKSVDEYKYIIDVANKLNNEQLQQEKLWLYLSQNGKCMYSGQSIDLDALLSPNATKHYEVDHIFPRSFIKDDSIDNKVLVIKKMNQTKGDQVPLQFIQQPYERIAYWKSLNKAGLISDSKLHKLMKPEFTAMDKEGFIQRQLVETRQISVHVRDFLKEEYPNTKVIPMKAKMVSEFRKKFDIPKIRQMNDAHHAIDAYLNGVVYHGAQLAYPNVDLFDFNFKWEKVREKWKALGEFNTKQKSRELFFFKKLEKMEVSQGERLISKIKLDMNHFKINYSRKLANIPQQFYNQTAVSPKTAELKYESNKSNEVVYKGLTPYQTYVVAIKSVNKKGKEKMEYQMIDHYVFDFYKFQNGNEKELALYLAQRENKDEVLDAQIVYSLNKGDLLYINNHPCYFVSRKEVINAKQFELTVEQQLSLYNVMNNKETNVEKLLIEYDFIAEKVINEYHHYLNSKLKEKRVRTFFSESNQTHEDFIKALDELFKVVTASATRSDKIGSRKNSMTHRAFLGKGKDVKIAYTSISGLKTTKPKSLFKLAESRNEL

SEQ ID NO: 331 - protein, 1472 aa, Flavobacterium branchiophilum
MAKILGLDLGTNSIGWAVVERENIDFSLIDKGVRIFSEGVKSEKGIESSRAAERTGYRSARKIKYRRKLRKYETLKVLSLNRMCPLSIEEVEEWKKSGFKDYPLNPEFLKWLSTDEESNVNPYFFRDRASKHKVSLFELGRAFYHIAQRRGFLSNRLDQSAEGILEEHCPKIEAIVEDLISIDEISTNITDYFFETGILDSNEKNGYAKDLDEGDKKLVSLYKSLLAILKKNESDFENCKSEIIERLNKKDVLGKVKGKIKDISQAMLDGNYKTLGQYFYSLYSKEKIRNQYTSREEHYLSEFITICKVQGIDQINEEEKINEKKFDGLAKDLYKAIFFQRPLKSQKGLIGKCSFEKSKSRCAISHPDFEEYRMWTYLNTIKIGTQSDKKLRFLTQDEKLKLVPKFYRKNDFNFDVLAKELIEKGSSFGFYKSSKKNDFFYWFNYKPTDTVAACQVAASLKNAIGEDWKTKSFKYQTINSNKEQVSRTVDYKDLWHLLTVATSDVYLYEFAIDKLGLDEKNAKAFSKTKLKKDFASLSLSAINKILPYLKEGLLYSHAVFVANIENIVDENIWKDEKQRDYIKTQISEIIENYTLEKSRFEIINGLLKEYKSENEDGKRVYYSKEAEQSFENDLKKKLVLFYKSNEIENKEQQETIFNELLPIFIQQLKDYEFIKIQRLDQKVLIFLKGKNETGQIFCTEEKGTAEEKEKKIKNRLKKLYHPSDIEKFKKKIIKDEFGNEKIVLGSPLTPSIKNPMAMRALHQLRKVLNALILEGQIDEKTIIHIEMARELNDANKRKGIQDYQNDNKKFREDAIKEIKKLYFEDCKKEVEPTEDDILRYQLWMEQNRSEIYEEGKNISICDIIGSNPAYDIEHTIPRSRSQDNSQMNKTLCSQRFNREVKKQSMPIELNNHLEILPRIAHWKEEADNLTREIEIISRSIKAAATKEIKDKKIRRRHYLTLKRDYLQGKYDRFIWEEPKVGFKNSQIPDTGIITKYAQAYLKSYFKKVESVKGGMVAEFRKIWGIQESFIDENGMKHYKVKDRSKHTHHTIDAITIACMTKEKYDVLAHAWTLEDQQNKKEARSIIEASKPWKTFKEDLLKIEEEILVSHYTPDNVKKQAKKIVRVRGKKQFVAEVERDVNGKAVPKKAASGKTIYKLDGEGKKLPRLQQGDTIRGSLHQDSIYGAIKNPLNTDEIKYVIRKDLESIKGSDVESIVDEVVKEKIKEAIANKVLLLSSNAQQKNKLVGTVWMNEEKRIAINKVRIYANSVKNPLHIKEHSLLSKSKHVHKQKVYGQNDENYAMAIYELDGKRDFELINIFNLAKLIKQGQGFYPLHKKKEIKGKIVFVPIEKRNKRDVVLKRGQQVVFYDKEVENPKDISEIVDFKGRIYIIEGLSIQRIVRPSGKVDEYGVIMLRYFKEARKADDIKQDNFKPDGVFKLGENKPTRKMNHQFTAFVEGIDFKVLPSGKFEKI

SEQ ID NO: 332 - protein, 1688 aa, Ignavibacterium album
MEFKKVLGLDIGTNSIGCALLSLPKSIQDYGKGGRLEWLTSRVIPLDADYMKAFIDGKNGLPQVITPAGKRRQKRGSRRLKHRYKLRRSRLIRVFKTLNWLPEDFPLDNPKRIKETISTEGKFSFRISDYVPISDESYREFYREFGYPENEIEQVIEEINFRRKTKGKNKNPMIKLLPEDWVVYYLRKKALIKPTTKEELIRIIYLFNQRRGFKSSRKDLTETAILDYDEFAKRLAEKEKYSAENYETKFVSITKVKEVVELKTDGRKGKKRFKVILEDSRIEPYEIERKEKPDWEGKEYTFLVTQKLEKGKFKQNKPDLPKEEDWALCTTALDNRMGSKHPGEFFFDELLKAFKEKRGYKIRQYPVNRWRYKKELEFIWTKQCQLNPELNNLNINKEILRKLATVLYPSQSKFFGPKIKEFENSDVLHIISEDIIYYQRDLKSQKSLISECRYEKRKGIDGEIYGLKCIPKSSPLYQEFRIWQDIHNIKVIRKESEVNGKKKINIDETQLYINENIKEKLFELFNSKDSLSEKDILELISLNIINSGIKISKKEEETTHRINLFANRKELKGNETKSRYRKVFKKLGFDGEYILNHPSKLNRLWHSDYSNDYADKEKTEKSILSSLGWKNRNGKWEKSKNYDVFNLPLEVAKAIANLPPLKKEYGSYSALAIRKMLVVMRDGKYWQHPDQIAKDQENTSLMLFDKNLIQLTNNQRKVLNKYLLTLAEVQKRSTLIKQKLNEIEHNPYKLELVSDQDLEKQVLKSFLEKKNESDYLKGLKTYQAGYLIYGKHSEKDVPIVNSPDELGEYIRKKLPNNSLRNPIVEQVIRETIFIVRDVWKSFGIIDEIHIELGRELKNNSEERKKTSESQEKNFQEKERARKLLKELLNSSNFEHYDENGNKIFSSFTVNPNPDSPLDIEKFRIWKNQSGLTDEELNKKLKDEKIPTEIEVKKYILWLTQKCRSPYTGKIIPLSKLFDSNVYEIEHIIPRSKMKNDSTNNLVICELGVNKAKGDRLAANFISESNGKCKFGEVEYTLLKYGDYLQYCKDTFKYQKAKYKNLLATEPPEDFIERQINDTRYIGRKLAELLTPVVKDSKNIIFTIGSITSELKITWGLNGVWKDILRPRFKRLESIINKKLIFQDEDDPNKYHFDLSINPQLDKEGLKRLDHRHHALDATIIAATTREHVRYLNSLNAADNDEEKREYFLSLCNHKIRDFKLPWENFTSEVKSKLLSCVVSYKESKPILSDPFNKYLKWEYKNGKWQKVFAIQIKNDRWKAVRRSMFKEPIGTVWIKKIKEVSLKEAIKIQAIWEEVKNDPVRKKKEKYIYDDYAQKVIAKIVQELGLSSSMRKQDDEKLNKFINEAKVSAGVNKNLNTTNKTIYNLEGRFYEKIKVAEYVLYKAKRMPLNKKEYIEKLSLQKMFNDLPNFILEKSILDNYPEILKELESDNKYIIEPHKKNNPVNRLLLEHILEYHNNPKEAFSTEGLEKLNKKAINKIGKPIKYITRLDGDINEEEIFRGAVFETDKGSNVYFVMYENNQTKDREFLKPNPSISVLKAIEHKNKIDFFAPNRLGFSRIILSPGDLVYVPTNDQYVLIKDNSSNETIINWDDNEFISNRIYQVKKFTGNSCYFLKNDIASLILSYSASNGVGEFGSQNISEYSVDDPPIRIKDVCIKIRVDRLGNVRPL

SEQ ID NO: 333 - protein, 1415 aa, Bergeyella zoohelcum
MKHILGLDLGTNSIGWALIERNIEEKYGKIIGMGSRIVPMGAELSKFEQGQAQTKNADRRTNRGARRLNKRYKQRRNKLIYILQKLDMLPSQIKLKEDFSDPNKIDKITILPISKKQEQLTAFDLVSLRVKALTEKVGLEDLGKIIYKYNQLRGYAGGSLEPEKEDIFDEEQSKDKKNKSFIAFSKIVFLGEPQEEIFKNKKLNRRAIIVETEEGNFEGSTFLENIKVGDSLELLINISASKSGDTITIKLPNKTNWRKKMENIENQLKEKSKEMGREFYISEFLLELLKENRWAKIRNNTILRARYESEFEAIWNEQVKHYPFLENLDKKTLIEIVSFIFPGEKESQKKYRELGLEKGLKYIIKNQVVFYQRELKDQSHLISDCRYEPNEKAIAKSHPVFQEYKVWEQINKLIVNTKIEAGTNRKGEKKYKYIDRPIPTALKEWIFEELQNKKEITFSAIFKKLKAEFDLREGIDFLNGMSPKDKLKGNETKLQLQKSLGELWDVLGLDSINRQIELWNILYNEKGNEYDLTSDRTSKVLEFINKYGNNIVDDNAEETAIRISKIKFARAYSSLSLKAVERILPLVRAGKYFNNDFSQQLQSKILKLLNENVEDPFAKAAQTYLDNNQSVLSEGGVGNSIATILVYDKHTAKEYSHDELYKSYKEINLLKQGDLRNPLVEQIINEALVLIRDIWKNYGIKPNEIRVELARDLKNSAKERATIHKRNKDNQTINNKIKETLVKNKKELSLANIEKVKLWEAQRHLSPYTGQPIPLSDLFDKEKYDVDHIIPISRYFDDSFTNKVISEKSVNQEKANRTAMEYFEVGSLKYSIFTKEQFIAHVNEYFSGVKRKNLLATSIPEDPVQRQIKDTQYIAIRVKEELNKIVGNENVKTTTGSITDYLRNHWGLTDKFKLLLKERYEALLESEKFLEAEYDNYKKDFDSRKKEYEEKEVLFEEQELTREEFIKEYKENYIRYKKNKLIIKGWSKRIDHRHHAIDALIVACTEPAHIKRLNDLNKVLQDWLVEHKSEFMPNFEGSNSELLEEILSLPENERTEIFTQIEKFRAIEMPWKGFPEQVEQKLKEIIISHKPKDKLLLQYNKAGDRQIKLRGQLHEGTLYGISQGKEAYRIPLTKFGGSKFATEKNIQKIVSPFLSGFIANHLKEYNNKKEEAFSAEGIMDLNNKLAQYRNEKGELKPHTPISTVKIYYKDPSKNKKKKDEEDLSLQKLDREKAFNEKLYVKTGDNYLFAVLEGEIKTKKTSQIKRLYDIISFFDATNFLKEEFRNAPDKKTFDKDLLFRQYFEERNKAKLLFTLKQGDFVYLPNENEEVILDKESPLYNQYWGDLKERGKNIYVVQKFSKKQIYFIKHTIADIIKKDVEFGSQNCYETVEGRSIKENCFKLEIDRLGNIVKVIKR

SEQ ID NO: 334 - protein, 1166 aa, Nitrobacter hamburgensis
MHVEIDFPHFSRGDSHLAMNKNEILRGSSVLYRLGLDLGSNSLGWFVTHLEKRGDRHEPVALGPGGVRIFPDGRDPQSGTSNAVDRRMARGARKRRDRFVERRKELIAALIKYNLLPDDARERRALEVLDPYALRKTALTDTLPAHHVGRALFHLNQRRGFQSNRKTDSKQSEDGAIKQAASRLATDKGNETLGVFFADMHLRKSYEDRQTAIRAELVRLGKDHLTGNARKKIWAKVRKRLFGDEVLPRADAPHGVRARATITGTKASYDYYPTRDMLRDEFNAIWAGQSAHHATITDEARTEIEHIIFYQRPLKPAIVGKCTLDPATRPFKEDPEGYRAPWSHPLAQRFRILSEARNLEIRDTGKGSRRLTKEQSDLVVAALLANREVKFDKLRTLLKLPAEARFNLESDRRAALDGDQTAARLSDKKGFNKAWRGFPPERQIAIVARLEETEDENELIAWLEKECALDGAAAARVANTTLPDGHCRLGLRAIKKIVPIMQDGLDEDGVAGAGYHIAAKRAGYDHAKLPTGEQLGRLPYYGQWLQDAVVGSGDARDQKEKQYGQFPNPTVHIGLGQLRRVVNDLIDKYGPPTEISIEFTRALKLSEQQKAERQREQRRNQDKNKARAEELAKFGRPANPRNLLKMRLWEELAHDPLDRKCVYTGEQISIERLLSDEVDIDHILPVAMTLDDSPANKIICMRYANRHKRKQTPSEAFGSSPTLQGHRYNWDDIAARATGLPRNKRWRFDANAREEFDKRGGFLARQLNETGWLARLAKQYLGAVTDPNQIWVVPGRLTSMLRGKWGLNGLLPSDNYAGVQDKAEEFLASTDDMEFSGVKNRADHRHHAIDGLVTALTDRSLLWKMANAYDEEHEKFVIEPPWPTMRDDLKAALEKMVVSHKPDHGIEGKLHEDSAYGFVKPLDATGLKEEEAGNLVYRKAIESLNENEVDRIRDIQLRTIVRDHVNVEKTKGVALADALRQLQAPSDDYPQFKHGLRHVRILKKEKGDYLVPIANRASGVAYKAYSAGENFCVEVFETAGGKWDGEAVRRFDANKKNAGPKIAHAPQWRDANEGAKLVMRIHKGDLIRLDHEGRARIMVVHRLDAAAGRFKLADHNETGNLDKRHATNNDIDPFRWLMASYNTLKKLAAVPVRVDELGRVWRVMPN

SEQ ID NO: 335 - protein, 1498 aa, Odoribacter laneus
METTLGIDLGTNSIGLALVDQEEHQILYSGVRIFPEGINKDTIGLGEKEESRNATRRAKRQMRRQYFRKKLRKAKLLELLIAYDMCPLKPEDVRRWKNWDKQQKSTVRQFPDTPAFREWLKQNPYELRKQAVTEDVTRPELGRILYQMIQRRGFLSSRKGKEEGKIFTGKDRMVGIDETRKNLQKQTLGAYLYDIAPKNGEKYRFRTERVRARYTLRDMYIREFEIIWQRQAGHLGLAHEQATRKKNIFLEGSATNVRNSKLITHLQAKYGRGHVLIEDTRITVTFQLPLKEVLGGKIEIEEEQLKFKSNESVLFWQRPLRSQKSLLSKCVFEGRNFYDPVHQKWIIAGPTPAPLSHPEFEEFRAYQFINNIIYGKNEHLTAIQREAVFELMCTESKDFNFEKIPKHLKLFEKFNFDDTTKVPACTTISQLRKLFPHPVWEEKREEIWHCFYFYDDNTLLFEKLQKDYALQTNDLEKIKKIRLSESYGNVSLKAIRRINPYLKKGYAYSTAVLLGGIRNSFGKRFEYFKEYEPEIEKAVCRILKEKNAEGEVIRKIKDYLVHNRFGFAKNDRAFQKLYHHSQAITTQAQKERLPETGNLRNPIVQQGLNELRRTVNKLLATCREKYGPSFKFDHIHVEMGRELRSSKTEREKQSRQIRENEKKNEAAKVKLAEYGLKAYRDNIQKYLLYKEIEEKGGTVCCPYTGKTLNISHTLGSDNSVQIEHIIPYSISLDDSLANKTLCDATFNREKGELTPYDFYQKDPSPEKWGASSWEEIEDRAFRLLPYAKAQRFIRRKPQESNEFISRQLNDTRYISKKAVEYLSAICSDVKAFPGQLTAELRHLWGLNNILQSAPDITFPLPVSATENHREYYVITNEQNEVIRLFPKQGETPRTEKGELLLTGEVERKVFRCKGMQEFQTDVSDGKYWRRIKLSSSVTWSPLFAPKPISADGQIVLKGRIEKGVFVCNQLKQKLKTGLPDGSYWISLPVISQTFKEGESVNNSKLTSQQVQLFGRVREGIFRCHNYQCPASGADGNFWCTLDTDTAQPAFTPIKNAPPGVGGGQIILTGDVDDKGIFHADDDLHYELPASLPKGKYYGIFTVESCDPTLIPIELSAPKTSKGENLIEGNIWVDEHTGEVRFDPKKNREDQRHHAIDAIVIALSSQSLFQRLSTYNARRENKKRGLDSTEHFPSPWPGFAQDVRQSVVPLLVSYKQNPKTLCKISKTLYKDGKKIHSCGNAVRGQLHKETVYGQRTAPGATEKSYHIRKDIRELKTSKHIGKVVDITIRQMLLKHLQENYHIDITQEFNIPSNAFFKEGVYRIFLPNKHGEPVPIKKIRMKEELGNAERLKDNINQYVNPRNNHHVMIYQDADGNLKEEIVSFWSVIERQNQGQPIYQLPREGRNIVSILQINDTFLIGLKEEEPEVYRNDLSTLSKHLYRVQKLSGMYYTFRHHLASTLNNEREEFRIQSLEAWKRANPVKVQIDEIGRITFLNGPLC

SEQ ID NO: 336 - protein, 1372 aa, Legionella pneumophila
MESSQILSPIGIDLGGKFTGVCLSHLEAFAELPNHANTKYSVILIDHNNFQLSQAQRRATRHRVRNKKRNQFVKRVALQLFQHILSRDLNAKEETALCHYLNNRGYTYVDTDLDEYIKDETTINLLKELLPSESEHNFIDWFLQKMQSSEFRKILVSKVEEKKDDKELKNAVKNIKNFITGFEKNSVEGHRHRKVYFENIKSDITKDNQLDSIKKKIPSVCLSNLLGHLSNLQWKNLHRYLAKNPKQFDEQTFGNEFLRMLKNFRHLKGSQESLAVRNLIQQLEQSQDYISILEKTPPEITIPPYEARTNTGMEKDQSLLLNPEKLNNLYPNWRNLIPGIIDAHPFLEKDLEHTKLRDRKRIISPSKQDEKRDSYILQRYLDLNKKIDKFKIKKQLSFLGQGKQLPANLIETQKEMETHFNSSLVSVLIQIASAYNKEREDAAQGIWFDNAFSLCELSNINPPRKQKILPLLVGAILSEDFINNKDKWAKFKIFWNTHKIGRTSLKSKCKEIEEARKNSGNAFKIDYEEALNHPEHSNNKALIKIIQTIPDIIQAIQSHLGHNDSQALIYHNPFSLSQLYTILETKRDGFHKNCVAVTCENYWRSQKTEIDPEISYASRLPADSVRPFDGVLARMMQRLAYEIAMAKWEQIKHIPDNSSLLIPIYLEQNRFEFEESFKKIKGSSSDKTLEQAIEKQNIQWEEKFQRIINASMNICPYKGASIGGQGEIDHIYPRSLSKKHFGVIFNSEVNLIYCSSQGNREKKEEHYLLEHLSPLYLKHQFGTDNVSDIKNFISQNVANIKKYISFHLLTPEQQKAARHALFLDYDDEAFKTITKFLMSQQKARVNGTQKFLGKQIMEFLSTLADSKQLQLEFSIKQITAEEVHDHRELLSKQEPKLVKSRQQSFPSHAIDATLTMSIGLKEFPQFSQELDNSWFINHLMPDEVHLNPVRSKEKYNKPNISSTPLFKDSLYAERFIPVWVKGETFAIGFSEKDLFEIKPSNKEKLFTLLKTYSTKNPGESLQELQAKSKAKWLYFPINKTLALEFLHHYFHKEIVTPDDTTVCHFINSLRYYTKKESITVKILKEPMPVLSVKFESSKKNVLGSFKHTIALPATKDWERLFNHPNFLALKANPAPNPKEFNEFIRKYFLSDNNPNSDIPNNGHNIKPQKHKAVRKVFSLPVIPGNAGTMMRIRRKDNKGQPLYQLQTIDDTPSMGIQINEDRLVKQEVLMDAYKTRNLSTIDGINNSEGQAYATFDNWLTLPVSTFKPEIIKLEMKPHSKTRRYIRITQSLADFIKTIDEALMIKPSDSIDDPLNMPNEIVCKNKLFGNELKPRDGKMKIVSTGKIVTYEFESDSTPQWIQTLYVTQLKKQP

SEQ ID NO: 337 - protein, 1517 aa, Bacteroides sp.
MKKIVGLDLGTNSIGWALINAYINKEHLYGIEACGSRIIPMDAAILGNFDKGNSISQTADRTSYRGIRRLRERHLLRRERLHRILDLLGFLPKHYSDSLNRYGKFLNDIECKLPWVKDETGSYKFIFQESFKEMLANFTEHHPILIANNKKVPYDWTIYYLRKKALTQKISKEELAWILLNFNQKRGYYQLRGEEEETPNKLVEYYSLKVEKVEDSGERKGKDTWYNVHLENGMIYRRTSNIPLDWEGKTKEFIVTTDLEADGSPKKDKEGNIKRSFRAPKDDDWTLIKKKTEADIDKIKMTVGAYIYDTLLQKPDQKIRGKLVRTIERKYYKNELYQILKTQSEFHEELRDKQLYIACLNELYPNNEPRRNSISTRDFCHLFIEDIIFYQRPLKSKKSLIDNCPYEENRYIDKESGEIKHASIKCIAKSHPLYQEFRLWQFIVNLRIYRKETDVDVTQELLPTEADYVTLFEWLNEKKEIDQKAFFKYPPFGFKKTTSNYRWNYVEDKPYPCNETHAQIIARLGKAHIPKAFLSKEKEETLWHILYSIEDKQEIEKALHSFANKNNLSEEFIEQFKNFPPFKKEYGSYSAKAIKKLLPLMRMGKYWSIENIDNGTRIRINKIIDGEYDENIRERVRQKAINLTDITHFRALPLWLACYLVYDRHSEVKDIVKWKTPKDIDLYLKSFKQHSLRNPIVEQVITETLRTVRDIWQQVGHIDEIHIELGREMKNPADKRARMSQQMIKNENTNLRIKALLTEFLNPEFGIENVRPYSPSQQDLLRIYEEGVLNSILELPEDIGIILGKFNQTDTLKRPTRSEILRYKLWLEQKYRSPYTGEMIPLSKLFTPAYEIEHIIPQSRYFDDSLSNKVICESEINKLKDRSLGYEFIKNHHGEKVELAFDKPVEVLSVEAYEKLVHESYSHNRSKMKKLLMEDIPDQFIERQLNDSRYISKVVKSLLSNIVREENEQEAISKNVIPCTGGITDRLKKDWGINDVWNKIVLPRFIRLNELTESTRFTSINTNNTMIPSMPLELQKGFNKKRIDHRHHAMDAIIIACANRNIVNYLNNVSASKNTKITRRDLQTLLCHKDKTDNNGNYKWVIDKPWETFTQDTLTALQKITVSFKQNLRVINKTTNHYQHYENGKKIVSNQSKGDSWAIRKSMHKETVHGEVNLRMIKTVSFNEALKKPQAIVEMDLKKKILAMLELGYDTKRIKNYFEENKDTWQDINPSKIKVYYFTKETKDRYFAVRKPIDTSFDKKKIKESITDTGIQQIMLRHLETKDNDPTLAFSPDGIDEMNRNILILNKGKKHQPIYKVRVYEKAEKFTVGQKGNKRTKFVEAAKGTNLFFAIYETEEIDKDTKKVIRKRSYSTIPLNVVIERQKQGLSSAPEDENGNLPKYILSPNDLVYVPTQEEINKGEVVMPIDRDRIYKMVDSSGITANFIPASTANLIFALPKATAEIYCNGENCIQNEYGIGSPQSKNQKAITGEMVKEICFPIKVDRLGNIIQVGSCILTN

SEQ ID NO: 338 - protein, 1101 aa, Akkermansia muciniphila
MSRSLTFSFDIGYASIGWAVIASASHDDADPSVCGCGTVLFPKDDCQAFKRREYRRLRRNIRSRRVRIERIGRLLVQAQIITPEMKETSGHPAPFYLASEALKGHRTLAPIELWHVLRWYAHNRGYDNNASWSNSLSEDGGNGEDTERVKHAQDLMDKHGTATMAETICRELKLEEGKADAPMEVSTPAYKNLNTAFPRLIVEKEVRRILELSAPLIPGLTAEIIELIAQHHPLTTEQRGVLLQHGIKLARRYRGSLLFGQLIPRFDNRIISRCPVTWAQVYEAELKKGNSEQSARERAEKLSKVPTANCPEFYEYRMARILCNIRADGEPLSAEIRRELMNQARQEGKLTKASLEKAISSRLGKETETNVSNYFTLHPDSEEALYLNPAVEVLQRSGIGQILSPSVYRIAANRLRRGKSVTPNYLLNLLKSRGESGEALEKKIEKESKKKEADYADTPLKPKYATGRAPYARTVLKKVVEEILDGEDPTRPARGEAHPDGELKAHDGCLYCLLDTDSSVNQHQKERRLDTMTNNHLVRHRMLILDRLLKDLIQDFADGQKDRISRVCVEVGKELTTFSAMDSKKIQRELTLRQKSHTDAVNRLKRKLPGKALSANLIRKCRIAMDMNWTCPFTGATYGDHELENLELEHIVPHSFRQSNALSSLVLTWPGVNRMKGQRTGYDFVEQEQENPVPDKPNLHICSLNNYRELVEKLDDKKGHEDDRRRKKKRKALLMVRGLSHKHQSQNHEAMKEIGMTEGMMTQSSHLMKLACKSIKTSLPDAHIDMIPGAVTAEVRKAWDVFGVFKELCPEAADPDSGKILKENLRSLTHLHHALDACVLGLIPYIIPAHHNGLLRRVLAMRRIPEKLIPQVRPVANQRHYVLNDDGRMMLRDLSASLKENIREQLMEQRVIQHVPADMGGALLKETMQRVLSVDGSGEDAMVSLSKKKDGKKEKNQVKASKLVGVFPEGPSKLKALKAAIEIDGNYGVALDPKPVVIRHIKVFKRIMALKEQNGGKPVRILKKGMLIHLTSSKDPKHAGVWRIESIQDSKGGVKLDLQRAHCAVPKNKTHECNWREVDLISLLKKYQMKRYPTSYTGTPR

SEQ ID NO: 339 - protein, 1424 aa, Prevotella sp.
MTQKVLGLDLGTNSIGSAVRNLDLSDDLQWQLEFFSSDIFRSSVNKESNGREYSLAAQRSAHRRSRGLNEVRRRRLWATLNLLIKHGFCPMSSESLMRWCTYDKRKGLFREYPIDDKDFNAWILLDFNGDGRPDYSSPYQLRRELVTRQFDFEQPIERYKLGRALYHIAQHRGFKSSKGETLSQQETNSKPSSTDEIPDVAGAMKASEEKLSKGLSTYMKEHNLLTVGAAFAQLEDEGVRVRNNNDYRAIRSQFQHEIETIFKFQQGLSVESELYERLISEKKNVGTIFYKRPLRSQRGNVGKCTLERSKPRCAIGHPLFEKFRAWTLINNIKVRMSVDTLDEQLPMKLRLDLYNECFLAFVRTEFKFEDIRKYLEKRLGIHFSYNDKTINYKDSTSVAGCPITARFRKMLGEEWESFRVEGQKERQAHSKNNISFHRVSYSIEDIWHFCYDAEEPEAVLAFAQETLRLERKKAEELVRIWSAMPQGYAMLSQKAIRNINKILMLGLKYSDAVILAKVPELVDVSDEELLSIAKDYYLVEAQVNYDKRINSIVNGLIAKYKSVSEEYRFADHNYEYLLDESDEKDIIRQIENSLGARRWSLMDANEQTDILQKVRDRYQDFFRSHERKFVESPKLGESFENYLTKKFPMVEREQWKKLYHPSQITIYRPVSVGKDRSVLRLGNPDIGAIKNPTVLRVLNTLRRRVNQLLDDGVISPDETRVVVETARELNDANRKWALDTYNRIRHDENEKIKKILEEFYPKRDGISTDDIDKARYVIDQREVDYFTGSKTYNKDIKKYKFWLEQGGQCMYTGRTINLSNLFDPNAFDIEHTIPESLSFDSSDMNLTLCDAHYNRFIKKNHIPTDMPNYDKAITIDGKEYPAITSQLQRWVERVERLNRNVEYWKGQARRAQNKDRKDQCMREMHLWKMELEYWKKKLERFTVTEVTDGFKNSQLVDTRVITRHAVLYLKSIFPHVDVQRGDVTAKFRKILGIQSVDEKKDRSLHSHHAIDATTLTIIPVSAKRDRMLELFAKIEEINKMLSFSGSEDRTGLIQELEGLKNKLQMEVKVCRIGHNVSEIGTFINDNIIVNHHIKNQALTPVRRRLRKKGYIVGGVDNPRWQTGDALRGEIHKASYYGAITQFAKDDEGKVLMKEGRPQVNPTIKFVIRRELKYKKSAADSGFASWDDLGKAIVDKELFALMKGQFPAETSFKDACEQGIYMIKKGKNGMPDIKLHHIRHVRCEAPQSGLKIKEQTYKSEKEYKRYFYAAVGDLYAMCCYTNGKIREFRIYSLYDVSCHRKSDIEDIPEFITDKKGNRLMLDYKLRTGDMILLYKDNPAELYDLDNVNLSRRLYKINRFESQSNLVLMTHHLSTSKERGRSLGKTVDYQNLPESIRSSVKSLNFLIMGENRDFVIKNGKIIFNHR

SEQ ID NO: 340 - protein, 1409 aa, Wolinella succinogenes
MLVSPISVDLGGKNTGFFSFTDSLDNSQSGTVIYDESFVLSQVGRRSKRHSKRNNLRNKLVKRLFLLILQEHHGLSIDVLPDEIRGLFNKRGYTYAGFELDEKKKDALESDTLKEFLSEKLQSIDRDSDVEDFLNQIASNAESFKDYKKGFEAVFASATHSPNKKLELKDELKSEYGENAKELLAGLRVTKEILDEFDKQENQGNLPRAKYFEELGEYIATNEKVKSFFDSNSLKLTDMTKLIGNISNYQLKELRRYFNDKEMEKGDIWIPNKLHKITERFVRSWHPKNDADRQRRAELMKDLKSKEIMELLTTTEPVMTIPPYDDMNNRGAVKCQTLRLNEEYLDKHLPNWRDIAKRLNHGKFNDDLADSTVKGYSEDSTLLHRLLDTSKEIDIYELRGKKPNELLVKTLGQSDANRLYGFAQNYYELIRQKVRAGIWVPVKNKDDSLNLEDNSNMLKRCNHNPPHKKNQIHNLVAGILGVKLDEAKFAEFEKELWSAKVGNKKLSAYCKNIEELRKTHGNTFKIDIEELRKKDPAELSKEEKAKLRLTDDVILNEWSQKIANFFDIDDKHRQRFNNLFSMAQLHTVIDTPRSGFSSTCKRCTAENRFRSETAFYNDETGEFHKKATATCQRLPADTQRPFSGKIERYIDKLGYELAKIKAKELEGMEAKEIKVPIILEQNAFEYEESLRKSKTGSNDRVINSKKDRDGKKLAKAKENAEDRLKDKDKRIKAFSSGICPYCGDTIGDDGEIDHILPRSHTLKIYGTVFNPEGNLIYVHQKCNQAKADSIYKLSDIKAGVSAQWIEEQVANIKGYKTFSVLSAEQQKAFRYALFLQNDNEAYKKVVDWLRTDQSARVNGTQKYLAKKIQEKLTKMLPNKHLSFEFILADATEVSELRRQYARQNPLLAKAEKQAPSSHAIDAVMAFVARYQKVFKDGTPPNADEVAKLAMLDSWNPASNEPLTKGLSTNQKIEKMIKSGDYGQKNMREVFGKSIFGENAIGERYKPIVVQEGGYYIGYPATVKKGYELKNCKVVTSKNDIAKLEKIIKNQDLISLKENQYIKIFSINKQTISELSNRYFNMNYKNLVERDKEIVGLLEFIVENCRYYTKKVDVKFAPKYIHETKYPFYDDWRRFDEAWRYLQENQNKTSSKDRFVIDKSSLNEYYQPDKNEYKLDVDTQPIWDDFCRWYFLDRYKTANDKKSIRIKARKTFSLLAESGVQGKVFRAKRKIPTGYAYQALPMDNNVIAGDYANILLEANSKTLSLVPKSGISIEKQLDKKLDVIKKTDVRGLAIDNNSFFNADFDTHGIRLIVENTSVKVGNFPISAIDKSAKRMIFRALFEKEKGKRKKKTTISFKESGPVQDYLKVFLKKIVKIQLRTDGSISNIVVRKNAADFTLSFRSEHIQKLLK

SEQ ID NO: 341 - protein, 1146 aa, Alicyclobacillus hesperidum
MAYRLGLDIGITSVGWAVVALEKDESGLKPVRIQDLGVRIFDKAEDSKTGASLALPRREARSARRRTRRRRHRLWRVKRLLEQHGILSMEQIEALYAQRTSSPDVYALRVAGLDRCLIAEEIARVLIHIAHRRGFQSNRKSEIKDSDAGKLLKAVQENENLMQSKGYRTVAEMLVSEATKTDAEGKLVHGKKHGYVSNVRNKAGEYRHTVSRQAIVDEVRKIFAAQRALGNDVMSEELEDSYLKILCSQRNFDDGPGGDSPYGHGSVSPDGVRQSIYERMVGSCTFETGEKRAPRSSYSFERFQLLTKVVNLRIYRQQEDGGRYPCELTQTERARVIDCAYEQTKITYGKLRKLLDMKDTESFAGLTYGLNRSRNKTEDTVFVEMKFYHEVRKALQRAGVFIQDLSIETLDQIGWILSVWKSDDNRRKKLSTLGLSDNVIEELLPLNGSKFGHLSLKAIRKILPFLEDGYSYDVACELAGYQFQGKTEYVKQRLLPPLGEGEVTNPVVRRALSQAIKVVNAVIRKHGSPESIHIELARELSKNLDERRKIEKAQKENQKNNEQIKDEIREILGSAHVTGRDIVKYKLFKQQQEFCMYSGEKLDVTRLFEPGYAEVDHIIPYGISFDDSYDNKVLVKTEQNRQKGNRTPLEYLRDKPEQKAKFIALVESIPLSQKKKNHLLMDKRAIDLEQEGFRERNLSDTRYITRALMNHIQAWLLFDETASTRSKRVVCVNGAVTAYMRARWGLTKDRDAGDKHHAADAVVVACIGDSLIQRVTKYDKFKRNALADRNRYVQQVSKSEGITQYVDKETGEVFTWESFDERKFLPNEPLEPWPFFRDELLARLSDDPSKNIRAIGLLTYSETEQIDPIFVSRMPTRKVTGAAHKETIRSPRIVKVDDNKGTEIQVVVSKVALTELKLTKDGEIKDYFRPEDDPRLYNTLRERLVQFGGDAKAAFKEPVYKISKDGSVRTPVRKVKIQEKLTLGVPVHGGRGIAENGGMVRIDVFAKGGKYYFVPIYVADVLKRELPNRLATAHKPYSEWRVVDDSYQFKFSLYPNDAVMIKPSREVDITYKDRKEPVGCRIMYFVSANIASASISLRTHDNSGELEGLGIQGLEVFEKYVVGPLGDTHPVYKERRMPFRVERKMN

SEQ ID NO: 342 - protein, 1442 aa, Caenispirillum salinarum
MPVLSPLSPNAAQGRRRWSLALDIGEGSIGWAVAEVDAEGRVLQLTGTGVTLFPSAWSNENGTYVAHGAADRAVRGQQQRHDSRRRRLAGLARLCAPVLERSPEDLKDLTRTPPKADPRAIFFLRADAARRPLDGPELFRVLHHMAAHRGIRLAELQEVDPPPESDADDAAPAATEDEDGTRRAAADERAFRRLMAEHMHRHGTQPTCGEIMAGRLRETPAGAQPVTRARDGLRVGGGVAVPTRALIEQEFDAIRAIQAPRHPDLPWDSLRRLVLDQAPIAVPPATPCLFLEELRRRGETFQGRTITREAIDRGLTVDPLIQALRIRETVGNLRLHERITEPDGRQRYVPRAMPELGLSHGELTAPERDTLVRALMHDPDGLAAKDGRIPYTRLRKLIGYDNSPVCFAQERDTSGGGITVNPTDPLMARWIDGWVDLPLKARSLYVRDVVARGADSAALARLLAEGAHGVPPVAAAAVPAATAAILESDIMQPGRYSVCPWAAEAILDAWANAPTEGFYDVTRGLFGFAPGEIVLEDLRRARGALLAHLPRTMAAARTPNRAAQQRGPLPAYESVIPSQLITSLRRAHKGRAADWSAADPEERNPFLRTWTGNAATDHILNQVRKTANEVITKYGNRRGWDPLPSRITVELAREAKHGVIRRNEIAKENRENEGRRKKESAALDTFCQDNTVSWQAGGLPKERAALRLRLAQRQEFFCPYCAERPKLRATDLFSPAETEIDHVIERRMGGDGPDNLVLAHKDCNNAKGKKTPHEHAGDLLDSPALAALWQGWRKENADRLKGKGHKARTPREDKDFMDRVGWRFEEDARAKAEENQERRGRRMLHDTARATRLARLYLAAAVMPEDPAEIGAPPVETPPSPEDPTGYTAIYRTISRVQPVNGSVTHMLRQRLLQRDKNRDYQTHHAEDACLLLLAGPAVVQAFNTEAAQHGADAPDDRPVDLMPTSDAYHQQRRARALGRVPLATVDAALADIVMPESDRQDPETGRVHWRLTRAGRGLKRRIDDLTRNCVILSRPRRPSETGTPGALHNATHYGRREITVDGRTDTVVTQRMNARDLVALLDNAKIVPAARLDAAAPGDTILKEICTEIADRHDRVVDPEGTHARRWISARLAALVPAHAEAVARDIAELADLDALADADRTPEQEARRSALRQSPYLGRAISAKKADGRARAREQEILTRALLDPHWGPRGLRHLIMREARAPSLVRIRANKTDAFGRPVPDAAVWVKTDGNAVSQLWRLTSVVTDDGRRIPLPKPIEKRIEISNLEYARLNGLDEGAGVTGNNAPPRPLRQDIDRLTPLWRDHGTAPGGYLGTAVGELEDKARSALRGKAMRQTLTDAGITAEAGWRLDSEGAVCDLEVAKGDTVKKDGKTYKVGVITQGIFGMPVDAAGSAPRTPEDCEKFEEQYGIKPWKAKGIPLA

SEQ ID NO: 343 - protein, 1114 aa, Eubacterium rectale
MNYTEKEKLFMKYILALDIGIASVGWAILDKESETVIEAGSNIFPEASAADNQLRRDMRGAKRNNRRLKTRINDFIKLWENNNLSIPQFKSTEIVGLKVRAITEEITLDELYLILYSYLKHRGISYLEDALDDTVSGSSAYANGLKLNAKELETHYPCEIQQERLNTIGKYRGQSQIINENGEVLDLSNVFTIGAYRKEIQRVFEIQKKYHPELTDEFCDGYMLIFNRKRKYYEGPGNEKSRTDYGRFTTKLDANGNYITEDNIFEKLIGKCSVYPDELRAAAASYTAQEYNVLNDLNNLTINGRKLEENEKHEIVERIKSSNTINMRKIISDCMGENIDDFAGARIDKSGKEIFHKFEVYNKMRKALLEIGIDISNYSREELDEIGYIMTINTDKEAMMEAFQKSWIDLSDDVKQCLINMRKTNGALFNKWQSFSLKIMNELIPEMYAQPKEQMTLLTEMGVTKGTQEEFAGLKYIPVDVVSEDIFNPVVRRSVRISFKILNAVLKKYKALDTIVIEMPRDRNSEEQKKRINDSQKLNEKEMEYIEKKLAVTYGIKLSPSDFSSQKQLSLKLKLWNEQDGICLYSGKTIDPNDIINNPQLFEIDHIIPRSISFDDARSNKVLVYRSENQKKGNQTPYYYLTHSHSEWSFEQYKATVMNLSKKKEYAISRKKIQNLLYSEDITKMDVLKGFINRNINDTSYASRLVLNTIQNFFMANEADTKVKVIKGSYTHQMRCNLKLDKNRDESYSHHAVDAMLIGYSELGYEAYHKLQGEFIDFETGEILRKDMWDENMSDEVYADYLYGKKWANIRNEVVKAEKNVKYWHYVMRKSNRGLCNQTIRGTREYDGKQYKINKLDIRTKEGIKVFAKLAFSKKDSDRERLLVYLNDRRTFDDLCKIYEDYSDAANPFVQYEKETGDIIRKYSKKHNGPRIDKLKYKDGEVGACIDISHKYGFEKGSKKVILESLVPYRMDVYYKEENHSYYLVGVKQSDIKFEKGRNVIDEEAYARILVNEKMIQPGQSRADLENLGFKFKLSFYKNDIIEYEKDGKIYTERLVSRTMPKQRNYIETKPIDKAKFEKQNLVGLGKTKFIKKYRYDILGNKYSCSEEKFTSFC

SEQ ID NO: 344 - protein, 1314 aa, Mycoplasma synoviae
MLRLYCANNLVLNNVQNLWKYLLLLIFDKKIIFLFKIKVILIRRYMENNNKEKIVIGFDLGVASVGWSIVNAETKEVIDLGVRLFSEPEKADYRRAKRTTRRLLRRKKFKREKFHKLILKNAEIFGLQSRNEILNVYKDQSSKYRNILKLKINALKEEIKPSELVWILRDYLQNRGYFYKNEKLTDEFVSNSFPSKKLHEHYEKYGFFRGSVKLDNKLDNKKDKAKEKDEEEESDAKKESEELIFSNKQWINEIVKVFENQSYLTESFKEEYLKLFNYVRPFNKGPGSKNSRTAYGVFSTDIDPETNKFKDYSNIWDKTIGKCSLFEEEIRAPKNLPSALIFNLQNEICTIKNEFTEFKNWWLNAEQKSEILKFVFTELFNWKDKKYSDKKFNKNLQDKIKKYLLNFALENFNLNEEILKNRDLENDTVLGLKGVKYYEKSNATADAALEFSSLKPLYVFIKFLKEKKLDLNYLLGLENTEILYFLDSIYLAISYSSDLKERNEWFKKLLKELYPKIKNNNLEIIENVEDIFEITDQEKFESFSKTHSLSREAFNHIIPLLLSNNEGKNYESLKHSNEELKKRTEKAELKAQQNQKYLKDNFLKEALVPLSVKTSVLQAIKIFNQIIKNFGKKYEISQVVIEMARELTKPNLEKLLNNATNSNIKILKEKLDQTEKFDDFTKKKFIDKIENSVVFRNKLFLWFEQDRKDPYTQLDIKINEIEDETEIDHVIPYSKSADDSWFNKLLVKKSTNQLKKNKTVWEYYQNESDPEAKWNKFVAWAKRIYLVQKSDKESKDNSEKNSIFKNKKPNLKFKNITKKLFDPYKDLGFLARNLNDTRYATKVFRDQLNNYSKHHSKDDENKLFKVVCMNGSITSFLRKSMWRKNEEQVYRFNFWKKDRDQFFHHAVDASIIAIFSLLTKTLYNKLRVYESYDVQRREDGVYLINKETGEVKKADKDYWKDQHNFLKIRENAIEIKNVLNNVDFQNQVRYSRKANTKLNTQLFNETLYGVKEFENNFYKLEKVNLFSRKDLRKFILEDLNEESEKNKKNENGSRKRILTEKYIVDEILQILENEEFKDSKSDINALNKYMDSLPSKFSEFFSQDFINKCKKENSLILTFDAIKHNDPKKVIKIKNLKFFREDATLKNKQAVHKDSKNQIKSFYESYKCVGFIWLKNKNDLEESIFVPINSRVIHFGDKDKDIFDFDSYNKEKLLNEINLKRPENKKFNSINEIEFVKFVKPGALLLNFENQQIYYISTLESSSLRAKIKLLNKMDKGKAVSMKKITNPDEYKIIEHVNPLGINLNWTKKLENNN

SEQ ID NO: 345 - protein, 1197 aa, Porphyromonas sp.
MLMSKHVLGLDLGVGSIGWCLIALDAQGDPAEILGMGSRVVPLNNATKAIEAFNAGAAFTASQERTARRTMRRGFARYQLRRYRLRRELEKVGMLPDAALIQLPLLELWELRERAATAGRRLTLPELGRVLCHINQKRGYRHVKSDAAAIVGDEGEKKKDSNSAYLAGIRANDEKLQAEHKTVGQYFAEQLRQNQSESPTGGISYRIKDQIFSRQCYIDEYDQIMAVQRVHYPDILTDEFIRMLRDEVIFMQRPLKSCKHLVSLCEFEKQERVMRVQQDDGKGGWQLVERRVKFGPKVAPKSSPLFQLCCIYEAVNNIRLTRPNGSPCDITPEERAKIVAHLQSSASLSFAALKKLLKEKALIADQLTSKSGLKGNSTRVALASALQPYPQYHHLLDMELETRMMTVQLTDEETGEVTEREVAVVTDSYVRKPLYRLWHILYSIEEREAMRRALITQLGMKEEDLDGGLLDQLYRLDFVKPGYGNKSAKFICKLLPQLQQGLGYSEACAAVGYRHSNSPTSEEITERTLLEKIPLLQRNELRQPLVEKILNQMINLVNALKAEYGIDEVRVELARELKMSREERERMARNNKDREERNKGVAAKIRECGLYPTKPRIQKYMLWKEAGRQCLYCGRSIEEEQCLREGGMEVEHIIPKSVLYDDSYGNKTCACRRCNKEKGNRTALEYIRAKGREAEYMKRINDLLKEKKISYSKHQRLRWLKEDIPSDFLERQLRLTQYISRQAMAILQQGIRRVSASEGGVTARLRSLWGYGKILHTLNLDRYDSMGETERVSREGEATEELHITNWSKRMDHRHHAIDALVVACTRQSYIQRLNRLSSEFGREDKKKEDQEAQEQQATETGRLSNLERWLTQRPHFSVRTVSDKVAEILISYRPGQRVVTRGRNIYRKKMADGREVSCVQRGVLVPRGELMEASFYGKILSQGRVRIVKRYPLHDLKGEVVDPHLRELITTYNQELKSREKGAPIPPLCLDKDKKQEVRSVRCYAKTLSLDKAIPMCFDEKGEPTAFVKSASNHHLALYRTPKGKLVESIVTFWDAVDRARYGIPLVITHPREVMEQVLQRGDIPEQVLSLLPPSDWVFVDSLQQDEMVVIGLSDEELQRALEAQNYRKISEHLYRVQKMSSSYYVFRYHLETSVADDKNTSGRIPKFHRVQSLKAYEERNIRKVRVDLLGRISLL

SEQ ID NO: 346 - protein, 1121 aa, Streptococcus thermophilus
MSDLVLGLDIGIGSVGVGILNKVTGEIIHKNSRIFPAAQAENNLVRRTNRQGRRLARRKKHRRVRLNRLFEESGLITDFTKISINLNPYQLRVKGLTDELSNEELFIALKNMVKHRGISYLDDASDDGNSSVGDYAQIVKENSKQLETKTPGQIQLERYQTYGQLRGDFTVEKDGKKHRLINVFPTSAYRSEALRILQTQQEFNPQITDEFINRYLEILTGKRKYYHGPGNEKSRTDYGRYRTSGETLDNIFGILIGKCTFYPDEFRAAKASYTAQEFNLLNDLNNLTVPTETKKLSKEQKNQIINYVKNEKAMGPAKLFKYIAKLLSCDVADIKGYRIDKSGKAEIHTFEAYRKMKTLETLDIEQMDRETLDKLAYVLTLNTEREGIQEALEHEFADGSFSQKQVDELVQFRKANSSIFGKGWHNFSVKLMMELIPELYETSEEQMTILTRLGKQKTTSSSNKTKYIDEKLLTEEIYNPVVAKSVRQAIKIVNAAIKEYGDFDNIVIEMARETNEDDEKKAIQKIQKANKDEKDAAMLKAANQYNGKAELPHSVFHGHKQLATKIRLWHQQGERCLYTGKTISIHDLINNSNQFEVDHILPLSITFDDSLANKVLVYATANQEKGQRTPYQALDSMDDAWSFRELKAFVRESKTLSNKKKEYLLTEEDISKFDVRKKFIERNLVDTRYASRVVLNALQEHFRAHKIDTKVSVVRGQFTSQLRRHWGIEKTRDTYHHHAVDALIIAASSQLNLWKKQKNTLVSYSEDQLLDIETGELISDDEYKESVFKAPYQHFVDTLKSKEFEDSILFSYQVDSKFNRKISDATIYATRQAKVGKDKADETYVLGKIKDIYTQDGYDAFMKIYKKDKSKFLMYRHDPQTFEKVIEPILENYPNKQINEKGKEVPCNPFLKYKEEHGYIRKYSKKGNGPEIKSLKYYDSKLGNHIDITPKDSNNKVVLQSVSPWRADVYFNKTTGKYEILGLKYADLQFEKGTGTYKISQEKYNDIKKKEGVDSDSEFKFTLYKNDLLLVKDTETKEQQLFRFLSRTMPKQKHYVELKPYDKQKFEGGEALIKVLGNVANSGQCKKGLGKSNISIYKVRTDVLGNQHIIKNEGDKPKLDF

SEQ ID NO: 347 - protein, 1152 aa, Roseburia inulinivorans
MNAEHGKEGLLIMEENFQYRIGLDIGITSVGWAVLQNNSQDEPVRITDLGVRIFDVAENPKNGDALAAPRRDARTTRRRLRRRRHRLERIKFLLQENGLIEMDSFMERYYKGNLPDVYQLRYEGLDRKLKDEELAQVLIHIAKHRGFRSTRKAETKEKEGGAVLKATTENQKIMQEKGYRTVGEMLYLDEAFHTECLWNEKGYVLTPRNRPDDYKHTILRSMLVEEVHAIFAAQRAHGNQKATEGLEEAYVEIMTSQRSFDMGPGLQPDGKPSPYAMEGFGDRVGKCTFEKDEYRAPKATYTAELFVALQKINHTKLIDEFGTGRFFSEEERKTIIGLLLSSKELKYGTIRKKLNIDPSLKFNSLNYSAKKEGETEEERVLDTEKAKFASMFWTYEYSKCLKDRTEEMPVGEKADLFDRIGEILTAYKNDDSRSSRLKELGLSGEEIDGLLDLSPAKYQRVSLKAMRKMQPYLEDGLIYDKACEAAGYDFRALNDGNKKHLLKGEEINAIVNDITNPVVKRSVSQTIKVINAIIQKYGSPQAVNIELAREMSKNFQDRTNLEKEMKKRQQENERAKQQIIELGKQNPTGQDILKYRLWNDQGGYCLYSGKKIPLEELFDGGYDIDHILPYSITFDDSYRNKVLVTAQENRQKGNRTPYEYFGADEKRWEDYEASVRLLVRDYKKQQKLLKKNFTEEERKEFKERNLNDTKYITRVVYNMIRQNLELEPFNHPEKKKQVWAVNGAVTSYLRKRWGLMQKDRSTDRHHAMDAVVIACCTDGMIHKISRYMQGRELAYSRNFKFPDEETGEILNRDNFTREQWDEKFGVKVPLPWNSFRDELDIRLLNEDPKNFLLTHADVQRELDYPGWMYGEEESPIEEGRYINYIRPLFVSRMPNHKVTGSAHDATIRSARDYETRGVVITKVPLTDLKLNKDNEIEGYYDKDSDRLLYQALVRQLLLHGNDGKKAFAEDFHKPKADGTEGPVVRKVKIEKKQTSGVMVRGGTGIAANGEMVRIDVFRENGKYYFVPVYTADVVRKVLPNRAATHTKPYSEWRVMDDANFVFSLYSRDLIHVKSKKDIKTNLVNGGLLLQKEIFAYYTGADIATASIAGFANDSNFKFRGLGIQSLEIFEKCQVDILGNISVVRHENRQEFH

SEQ ID NO: 348 - protein, 1082 aa, Methylosinus trichosporium
MRVLGLDAGIASLGWALIEIEESNRGELSQGTIIGAGTWMFDAPEEKTQAGAKLKSEQRRTFRGQRRVVRRRRQRMNEVRRILHSHGLLPSSDRDALKQPGLDPWRIRAEALDRLLGPVELAVALGHIARHRGFKSNSKGAKTNDPADDTSKMKRAVNETREKLARFGSAAKMLVEDESFVLRQTPTKNGASEIVRRFRNREGDYSRSLLRDDLAAEMRALFTAQARFQSAIATADLQTAFTKAAFFQRPLQDSEKLVGPCPFEVDEKRAPKRGYSFELFRFLSRLNHVTLRDGKQERTLTRDELALAAADFGAAAKVSFTALRKKLKLPETTVFVGVKADEESKLDVVARSGKAAEGTARLRSVIVDALGELAWGALLCSPEKLDKIAEVISFRSDIGRISEGLAQAGCNAPLVDALTAAASDGRFDPFTGAGHISSKAARNILSGLRQGMTYDKACCAADYDHTASRERGAFDVGGHGREALKRILQEERISRELVGSPTARKALIESIKQVKAIVERYGVPDRIHVELARDVGKSIEEREEITRGIEKRNRQKDKLRGLFEKEVGRPPQDGARGKEELLRFELWSEQMGRCLYTDDYISPSQLVATDDAVQVDHILPWSRFADDSYANKTLCMAKANQDKKGRTPYEWFKAEKTDTEWDAFIVRVEALADMKGFKKRNYKLRNAEEAAAKFRNRNLNDTRWACRLLAEALKQLYPKGEKDKDGKERRRVFSRPGALTDRLRRAWGLQWMKKSTKGDRIPDDRHHALDAIVIAATTESLLQRATREVQEIEDKGLHYDLVKNVTPPWPGFREQAVEAVEKVFVARAERRRARGKAHDATIRHIAVREGEQRVYERRKVAELKLADLDRVKDAERNARLIEKLRNWIEAGSPKDDPPLSPKGDPIFKVRLVTKSKVNIALDTGNPKRPGTVDRGEMARVDVFRKASKKGKYEYYLVPIYPHDIATMKTPPIRAVQAYKPEDEWPEMDSSYEFCWSLVPMTYLQVISSKGEIFEGYYRGMNRSVGAIQLSAHSNSSDVVQGIGARTLTEFKKFNVDRFGRKHEVERELRTWRGETWRGKAYI

SEQ ID NO: 349 - protein, 1156 aa, Ruminococcus albus
MGNYYLGLDVGIGSIGWAVINIEKKRIEDFNVRIFKSGEIQEKNRNSRASQQCRRSRGLRRLYRRKSHRKLRLKNYLSIIGLTTSEKIDYYYETADNNVIQLRNKGLSEKLTPEEIAACLIHICNNRGYKDFYEVNVEDIEDPDERNEYKEEHDSIVLISNLMNEGGYCTPAEMICNCREFDEPNSVYRKFHNSAASKNHYLITRHMLVKEVDLILENQSKYYGILDDKTIAKIKDIIFAQRDFEIGPGKNERFRRFTGYLDSIGKCQFFKDQERGSRFTVIADIYAFVNVLSQYTYTNNRGESVFDTSFANDLINSALKNGSMDKRELKAIAKSYHIDISDKNSDTSLTKCFKYIKVVKPLFEKYGYDWDKLIENYTDTDNNVLNRIGIVLSQAQTPKRRREKLKALNIGLDDGLINELTKLKLSGTANVSYKYMQGSIEAFCEGDLYGKYQAKFNKEIPDIDENAKPQKLPPFKNEDDCEFFKNPVVFRSINETRKLINAIIDKYGYPAAVNIETADELNKTFEDRAIDTKRNNDNQKENDRIVKEIIECIKCDEVHARHLIEKYKLWEAQEGKCLYSGETITKEDMLRDKDKLFEVDHIVPYSLILDNTINNKALVYAEENQKKGQRTPLMYMNEAQAADYRVRVNTMFKSKKCSKKKYQYLMLPDLNDQELLGGWRSRNLNDTRYICKYLVNYLRKNLRFDRSYESSDEDDLKIRDHYRVFPVKSRFTSMFRRWWLNEKTWGRYDKAELKKLTYLDHAADAIIIANCRPEYVVLAGEKLKLNKMYHQAGKRITPEYEQSKKACIDNLYKLFRMDRRTAEKLLSGHGRLTPIIPNLSEEVDKRLWDKNIYEQFWKDDKDKKSCEELYRENVASLYKGDPKFASSLSMPVISLKPDHKYRGTITGEEAIRVKEIDGKLIKLKRKSISEITAESINSIYTDDKILIDSLKTIFEQADYKDVGDYLKKTNQHFFTTSSGKRVNKVTVIEKVPSRWLRKEIDDNNFSLLNDSSYYCIELYKDSKGDNNLQGIAMSDIVHDRKTKKLYLKPDFNYPDDYYTHVMYIFPGDYLRIKSTSKKSGEQLKFEGYFISVKNVNENSFRFISDNKPCAKDKRVSITKKDIVIKLAVDLMGKVQGENNGKGISCGEPLSLLKEKN

SEQ ID NO: 350 - protein, 1187 aa, Bifidobacterium longum
MLSRQLLGASHLARPVSYSYNVQDNDVHCSYGERCFMRGKRYRIGIDVGLNSVGLAAVEVSDENSPVRLLNAQSVIHDGGVDPQKNKEAITRKNMSGVARRTRRMRRRKRERLHKLDMLLGKFGYPVIEPESLDKPFEEWHVRAELATRYIEDDELRRESISIALRHMARHRGWRNPYRQVDSLISDNPYSKQYGELKEKAKAYNDDATAAEEESTPAQLVVAMLDAGYAEAPRLRWRTGSKKPDAEGYLPVRLMQEDNANELKQIFRVQRVPADEWKPLFRSVFYAVSPKGSAEQRVGQDPLAPEQARALKASLAFQEYRIANVITNLRIKDASAELRKLTVDEKQSIYDQLVSPSSEDITWSDLCDFLGFKRSQLKGVGSLTEDGEERISSRPPRLTSVQRIYESDNKIRKPLVAWWKSASDNEHEAMIRLLSNTVDIDKVREDVAYASAIEFIDGLDDDALTKLDSVDLPSGRAAYSVETLQKLTRQMLTTDDDLHEARKTLFNVTDSWRPPADPIGEPLGNPSVDRVLKNVNRYLMNCQQRWGNPVSVNIEHVRSSFSSVAFARKDKREYEKNNEKRSIFRSSLSEQLRADEQMEKVRESDLRRLEAIQRQNGQCLYCGRTITFRTCEMDHIVPRKGVGSTNTRTNFAAVCAECNRMKSNTPFAIWARSEDAQTRGVSLAEAKKRVTMFTFNPKSYAPREVKAFKQAVIARLQQTEDDAAIDNRSIESVAWMADELHRRIDWYFNAKQYVNSASIDDAEAETMKTTVSVFQGRVTASARRAAGIEGKIHFIGQQSKTRLDRRHHAVDASVIAMMNTAAAQTLMERESLRESQRLIGLMPGERSWKEYPYEGTSRYESFHLWLDNMDVLLELLNDALDNDRIAVMQSQRYVLGNSIAHDATIHPLEKVPLGSAMSADLIRRASTPALWCALTRLPDYDEKEGLPEDSHREIRVHDTRYSADDEMGFFASQAAQIAVQEGSADIGSAIHHARVYRCWKTNAKGVRKYFYGMIRVFQTDLLRACHDDLFTVPLPPQSISMRYGEPRVVQALQSGNAQYLGSLVVGDEIEMDFSSLDVDGQIGEYLQFFSQFSGGNLAWKHWVVDGFFNQTQLRIRPRYLAAEGLAKAFSDDVVPDGVQKIVTKQGWLPPVNTASKTAVRIVRRNAFGEPRLSSAHHMPCSWQWRHE

SEQ ID NO: 351 - protein, 1150 aa, Enterococcus faecalis
MYSIGLDLGISSVGWSVIDERTGNVIDLGVRLFSAKNSEKNLERRTNRGGRRLIRRKTNRLKDAKKILAAVGFYEDKSLKNSCPYQLRVKGLTEPLSRGEIYKVTLHILKKRGISYLDEVDTEAAKESQDYKEQVRKNAQLLTKYTPGQIQLQRLKENNRVKTGINAQGNYQLNVFKVSAYANELATILKTQQAFYPNELTDDWIALFVQPGIAEEAGLIYRKRPYYHGPGNEANNSPYGRWSDFQKTGEPATNIFDKLIGKDFQGELRASGLSLSAQQYNLLNDLTNLKIDGEVPLSSEQKEYILTELMTKEFTRFGVNDVVKLLGVKKERLSGWRLDKKGKPEIHTLKGYRNWRKIFAEAGIDLATLPTETIDCLAKVLTLNTEREGIENTLAFELPELSESVKLLVLDRYKELSQSISTQSWHRFSLKTLHLLIPELMNATSEQNTLLEQFQLKSDVRKRYSEYKKLPTKDVLAEIYNPTVNKTVSQAFKVIDALLVKYGKEQIRYITIEMPRDDNEEDEKKRIKELHAKNSQRKNDSQSYFMQKSGWSQEKFQTTIQKNRRFLAKLLYYYEQDGICAYTGLPISPELLVSDSTEIDHIIPISISLDDSINNKVLVLSKANQVKGQQTPYDAWMDGSFKKINGKFSNWDDYQKWVESRHFSHKKENNLLETRNIFDSEQVEKFLARNLNDTRYASRLVLNTLQSFFTNQETKVRVVNGSFTHTLRKKWGADLDKTRETHHHHAVDATLCAVTSFVKVSRYHYAVKEETGEKVMREIDFETGEIVNEMSYWEFKKSKKYERKTYQVKWPNFREQLKPVNLHPRIKFSHQVDRKANRKLSDATIYSVREKTEVKTLKSGKQKITTDEYTIGKIKDIYTLDGWEAFKKKQDKLLMKDLDEKTYERLLSIAETTPDFQEVEEKNGKVKRVKRSPFAVYCEENDIPAIQKYAKKNNGPLIRSLKYYDGKLNKHINITKDSQGRPVEKTKNGRKVTLQSLKPYRYDIYQDLETKAYYTVQLYYSDLRFVEGKYGITEKEYMKKVAEQTKGQVVRFCFSLQKNDGLEIEWKDSQRYDVRFYNFQSANSINFKGLEQEMMPAENQFKQKPYNNGAINLNIAKYGKEGKKLRKFNTDILGKKHYLFYEKEPKNIIK

SEQ ID NO: 352 - protein, 1236 aa, Mycoplasma mobile
MYFYKNKENKLNKKVVLGLDLGIASVGWCLTDISQKEDNKFPIILHGVRLFETVDDSDDKLLNETRRKKRGQRRRNRRLFTRKRDFIKYLIDNNIIELEFDKNPKILVRNFIEKYINPFSKNLELKYKSVTNLPIGFHNLRKAAINEKYKLDKSELIVLLYFYLSLRGAFFDNPEDTKSKEMNKNEIEIFDKNESIKNAEFPIDKIIEFYKISGKIRSTINLKFGHQDYLKEIKQVFEKQNIDFMNYEKFAMEEKSFFSRIRNYSEGPGNEKSFSKYGLYANENGNPELIINEKGQKIYTKIFKTLWESKIGKCSYDKKLYRAPKNSFSAKVFDITNKLTDWKHKNEYISERLKRKILLSRFLNKDSKSAVEKILKEENIKFENLSEIAYNKDDNKINLPIINAYHSLTTIFKKHLINFENYLISNENDLSKLMSFYKQQSEKLFVPNEKGSYEINQNNNVLHIFDAISNILNKFSTIQDRIRILEGYFEFSNLKKDVKSSEIYSEIAKLREFSGTSSLSFGAYYKFIPNLISEGSKNYSTISYEEKALQNQKNNFSHSNLFEKTWVEDLIASPTVKRSLRQTMNLLKEIFKYSEKNNLEIEKIVVEVTRSSNNKHERKKIEGINKYRKEKYEELKKVYDLPNENTTLLKKLWLLRQQQGYDAYSLRKIEANDVINKPWNYDIDHIVPRSISFDDSFSNLVIVNKLDNAKKSNDLSAKQFIEKIYGIEKLKEAKENWGNWYLRNANGKAFNDKGKFIKLYTIDNLDEFDNSDFINRNLSDTSYITNALVNHLTFSNSKYKYSVVSVNGKQTSNLRNQIAFVGIKNNKETEREWKRPEGFKSINSNDFLIREEGKNDVKDDVLIKDRSFNGHHAEDAYFITIISQYFRSFKRIERLNVNYRKETRELDDLEKNNIKFKEKASFDNFLLINALDELNEKLNQMRFSRMVITKKNTQLFNETLYSGKYDKGKNTIKKVEKLNLLDNRTDKIKKIEEFFDEDKLKENELTKLHIFNHDKNLYETLKIIWNEVKIEIKNKNLNEKNYFKYFVNKKLQEGKISFNEWVPILDNDFKIIRKIRYIKFSSEEKETDEIIFSQSNFLKIDQRQNFSFHNTLYWVQIWVYKNQKDQYCFISIDARNSKFEKDEIKINYEKLKTQKEKLQIINEEPILKINKGDLFENEEKELFYIVGRDEKPQKLEIKYILGKKIKDQKQIQKPVKKYFPNWKKVNLTYMGEIFKK

SEQ ID NO: 353 - protein, 1105 aa, Actinomyces coleocanis
MDNKNYRIGIDVGLNSIGFCAVEVDQHDTPLGFLNLSVYRHDAGIDPNGKKTNTTRLAMSGVARRTRRLFRKRKRRLAALDRFIEAQGWTLPDHADYKDPYTPWLVRAELAQTPIRDENDLHEKLAIAVRHIARHRGWRSPWVPVRSLHVEQPPSDQYLALKERVEAKTLLQMPEGATPAEMVVALDLSVDVNLRPKNREKTDTRPENKKPGFLGGKLMQSDNANELRKIAKIQGLDDALLRELIELVFAADSPKGASGELVGYDVLPGQHGKRRAEKAHPAFQRYRIASIVSNLRIRHLGSGADERLDVETQKRVFEYLLNAKPTADITWSDVAEEIGVERNLLMGTATQTADGERASAKPPVDVTNVAFATCKIKPLKEWWLNADYEARCVMVSALSHAEKLTEGTAAEVEVAEFLQNLSDEDNEKLDSFSLPIGRAAYSVDSLERLTKRMIENGEDLFEARVNEFGVSEDWRPPAEPIGARVGNPAVDRVLKAVNRYLMAAEAEWGAPLSVNIEHVREGFISKRQAVEIDRENQKRYQRNQAVRSQIADHINATSGVRGSDVTRYLAIQRQNGECLYCGTAITFVNSEMDHIVPRAGLGSTNTRDNLVATCERCNKSKSNKPFAVWAAECGIPGVSVAEALKRVDFWIADGFASSKEHRELQKGVKDRLKRKVSDPEIDNRSMESVAWMARELAHRVQYYFDEKHTGTKVRVFRGSLTSAARKASGFESRVNFIGGNGKTRLDRRHHAMDAATVAMLRNSVAKTLVLRGNIRASERAIGAAETWKSFRGENVADRQIFESWSENMRVLVEKFNLALYNDEVSIFSSLRLQLGNGKAHDDTITKLQMHKVGDAWSLTEIDRASTPALWCALTRQPDFTWKDGLPANEDRTIIVNGTHYGPLDKVGIFGKAAASLLVRGGSVDIGSAIHHARIYRIAGKKPTYGMVRVFAPDLLRYRNEDLFNVELPPQSVSMRYAEPKVREAIREGKAEYLGWLVVGDELLLDLSSETSGQIAELQQDFPGTTHWTVAGFFSPSRLRLRPVYLAQEGLGEDVSEGSKSIIAGQGWRPAVNKVFGSAMPEVIRRDGLGRKRRFSYSGLPVSWQG

SEQ ID NO: 354 - protein, 1079 aa, Dinoroseobacter shibae
MRLGLDIGTSSIGWWLYETDGAGSDARITGVVDGGVRIFSDGRDPKSGASLAVDRRAARAMRRRRDRYLRRRATLMKVLAETGLMPADPAEAKALEALDPFALRAAGLDEPLPLPHLGRALFHLNQRRGFKSNRKTDRGDNESGKIKDATARLDMEMMANGARTYGEFLHKRRQKATDPRHVPSVRTRLSIANRGGPDGKEEAGYDFYPDRRHLEEEFHKLWAAQGAHHPELTETLRDLLFEKIFFQRPLKEPEVGLCLFSGHHGVPPKDPRLPKAHPLTQRRVLYETVNQLRVTADGREARPLTREERDQVIHALDNKKPTKSLSSMVLKLPALAKVLKLRDGERFTLETGVRDAIACDPLRASPAHPDRFGPRWSILDADAQWEVISRIRRVQSDAEHAALVDWLTEAHGLDRAHAEATAHAPLPDGYGRLGLTATTRILYQLTADVVTYADAVKACGWHHSDGRTGECFDRLPYYGEVLERHVIPGSYHPDDDDITRFGRITNPTVHIGLNQLRRLVNRIIETHGKPHQIVVELARDLKKSEEQKRADIKRIRDTTEAAKKRSEKLEELEIEDNGRNRMLLRLWEDLNPDDAMRRFCPYTGTRISAAMIFDGSCDVDHILPYSRTLDDSFPNRTLCLREANRQKRNQTPWQAWGDTPHWHAIAANLKNLPENKRWRFAPDAMTRFEGENGFLDRALKDTQYLARISRSYLDTLFTKGGHVWVVPGRFTEMLRRHWGLNSLLSDAGRGAVKAKNRTDHRHHAIDAAVIAATDPGLLNRISRAAGQGEAAGQSAELIARDTPPPWEGFRDDLRVRLDRIIVSHRADHGRIDHAARKQGRDSTAGQLHQETAYSIVDDIHVASRTDLLSLKPAQLLDEPGRSGQVRDPQLRKALRVATGGKTGKDFENALRYFASKPGPYQAIRRVRIIKPLQAQARVPVPAQDPIKAYQGGSNHLFEIWRLPDGEIEAQVITSFEAHTLEGEKRPHPAAKRLLRVHKGDMVALERDGRRVVGHVQKMDIANGLFIVPHNEANADTRNNDKSDPFKWIQIGARPAIASGIRRVSVDEIGRLRDGGTRPI

SEQ ID NO: 355 - protein, 1181 aa, Actinomyces sp.
MLHCIAVIRVPPSEEPGFFETHADSCALCHHGCMTYAANDKAIRYRVGIDVGLRSIGFCAVEVDDEDHPIRILNSVVHVHDAGTGGPGETESLRKRSGVAARARRRGRAEKQRLKKLDVLLEELGWGVSSNELLDSHAPWHIRKRLVSEYIEDETERRQCLSVAMAHIARHRGWRNSFSKVDTLLLEQAPSDRMQGLKERVEDRTGLQFSEEVTQGELVATLLEHDGDVTIRGFVRKGGKATKVHGVLEGKYMQSDLVAELRQICRTQRVSETTFEKLVLSIFHSKEPAPSAARQRERVGLDELQLALDPAAKQPRAERAHPAFQKFKVVATLANMRIREQSAGERSLTSEELNRVARYLLNHTESESPTWDDVARKLEVPRHRLRGSSRASLETGGGLTYPPVDDTTVRVMSAEVDWLADWWDCANDESRGHMIDAISNGCGSEPDDVEDEEVNELISSATAEDMLKLELLAKKLPSGRVAYSLKTLREVTAAILETGDDLSQAITRLYGVDPGWVPTPAPIEAPVGNPSVDRVLKQVARWLKFASKRWGVPQTVNIEHTREGLKSASLLEEERERWERFEARREIRQKEMYKRLGISGPFRRSDQVRYEILDLQDCACLYCGNEINFQTFEVDHIIPRVDASSDSRRTNLAAVCHSCNSAKGGLAFGQWVKRGDCPSGVSLENAIKRVRSWSKDRLGLTEKAMGKRKSEVISRLKTEMPYEEFDGRSMESVAWMAIELKKRIEGYFNSDRPEGCAAVQVNAYSGRLTACARRAAHVDKRVRLIRLKGDDGHHKNRFDRRNHAMDALVIALMTPAIARTIAVREDRREAQQLTRAFESWKNFLGSEERMQDRWESWIGDVEYACDRLNELIDADKIPVTENLRLRNSGKLHADQPESLKKARRGSKRPRPQRYVLGDALPADVINRVTDPGLWTALVRAPGFDSQLGLPADLNRGLKLRGKRISADFPIDYFPTDSPALAVQGGYVGLEFHHARLYRIIGPKEKVKYALLRVCAIDLCGIDCDDLFEVELKPSSISMRTADAKLKEAMGNGSAKQIGWLVLGDEIQIDPTKFPKQSIGKFLKECGPVSSWRVSALDTPSKITLKPRLLSNEPLLKTSRVGGHESDLVVAECVEKIMKKTGWVVEINALCQSGLIRVIRRNALGEVRTSPKSGLPISLNLR

SEQ ID NO: 356 - protein, 1113 aa, Alcanivorax sp.
MRYRVGLDLGTASVGAAVFSMDEQGNPMELIWHYERLFSEPLVPDMGQLKPKKAARRLARQQRRQIDRRASRLRRIAIVSRRLGIAPGRNDSGVHGNDVPTLRAMAVNERIELGQLRAVLLRMGKKRGYGGTFKAVRKVGEAGEVASGASRLEEEMVALASVQNKDSVTVGEYLAARVEHGLPSKLKVAANNEYYAPEYALFRQYLGLPAIKGRPDCLPNMYALRHQIEHEFERIWATQSQFHDVMKDHGVKEEIRNAIFFQRPLKSPADKVGRCSLQTNLPRAPRAQIAAQNFRIEKQMADLRWGMGRRAEMLNDHQKAVIRELLNQQKELSFRKIYKELERAGCPGPEGKGLNMDRAALGGRDDLSGNTTLAAWRKLGLEDRWQELDEVTQIQVINFLADLGSPEQLDTDDWSCRFMGKNGRPRNFSDEFVAFMNELRMTDGFDRLSKMGFEGGRSSYSIKALKALTEWMIAPHWRETPETHRVDEEAAIRECYPESLATPAQGGRQSKLEPPPLTGNEVVDVALRQVRHTINMMIDDLGSVPAQIVVEMAREMKGGVTRRNDIEKQNKRFASERKKAAQSIEENGKTPTPARILRYQLWIEQGHQCPYCESNISLEQALSGAYTNFEHILPRTLTQIGRKRSELVLAHRECNDEKGNRTPYQAFGHDDRRWRIVEQRANALPKKSSRKTRLLLLKDFEGEALTDESIDEFADRQLHESSWLAKVTTQWLSSLGSDVYVSRGSLTAELRRRWGLDTVIPQVRFESGMPVVDEEGAEITPEEFEKFRLQWEGHRVTREMRTDRRPDKRIDHRHHLVDAIVTALTSRSLYQQYAKAWKVADEKQRHGRVDVKVELPMPILTIRDIALEAVRSVRISHKPDRYPDGRFFEATAYGIAQRLDERSGEKVDWLVSRKSLTDLAPEKKSIDVDKVRANISRIVGEAIRLHISNIFEKRVSKGMTPQQALREPIEFQGNILRKVRCFYSKADDCVRIEHSSRRGHHYKMLLNDGFAYMEVPCKEGILYGVPNLVRPSEAVGIKRAPESGDFIRFYKGDTVKNIKTGRVYTIKQILGDGGGKLILTPVTETKPADLLSAKWGRLKVGGRNIHLLRLCAE

SEQ ID NO: 357 - protein, 1052 aa, Aminomonas paucivorans
MIGEHVRGGCLFDDHWTPNWGAFRLPNTVRTFTKAENPKDGSSLAEPRRQARGLRRRLRRKTQRLEDLRRLLAKEGVLSLSDLETLFRETPAKDPYQLRAEGLDRPLSFPEWVRVLYHITKHRGFQSNRRNPVEDGQERSRQEEEGKLLSGVGENERLLREGGYRTAGEMLARDPKFQDHRRNRAGDYSHTLSRSLLLEEARRLFQSQRTLGNPHASSNLEEAFLHLVAFQNPFASGEDIRNKAGHCSLEPDQIRAPRRSASAETFMLLQKTGNLRLIHRRTGEERPLTDKEREQIHLLAWKQEKVTHKTLRRHLEIPEEWLFTGLPYHRSGDKAEEKLFVHLAGIHEIRKALDKGPDPAVWDTLRSRRDLLDSIADTLTFYKNEDEILPRLESLGLSPENARALAPLSFSGTAHLSLSALGKLLPHLEEGKSYTQARADAGYAAPPPDRHPKLPPLEEADWRNPVVFRALTQTRKVVNALVRRYGPPWCIHLETARELSQPAKVRRRIETEQQANEKKKQQAEREFLDIVGTAPGPGDLLKMRLWREQGGFCPYCEEYLNPTRLAEPGYAEMDHILPYSRSLDNGWHNRVLVHGKDNRDKGNRTPFEAFGGDTARWDRLVAWVQASHLSAPKKRNLLREDFGEEAERELKDRNLTDTRFITKTAATLLRDRLTFHPEAPKDPVMTLNGRLTAFLRKQWGLHKNRKNGDLHHALDAAVLAVASRSFVYRLSSHNAAWGELPRGREAENGFSLPYPAFRSEVLARLCPTREEILLRLDQGGVGYDEAFRNGLRPVFVSRAPSRRLRGKAHMETLRSPKWKDHPEGPRTASRIPLKDLNLEKLERMVGKDRDRKLYEALRERLAAFGGNGKKAFVAPFRKPCRSGEGPLVRSLRIFDSGYSGVELRDGGEVYAVADHESMVRVDVYAKKNRFYLVPVYVADVARGIVKNRAIVAHKSEEEWDLVDGSFDFRFSLFPGDLVEIEKKDGAYLGYYKSCHRGDGRLLLDRHDRMPRESDCGTFYVSTRKDVLSMSKYQVDPLGEIRLVGSEKPPFVL

SEQ ID NO: 358 - protein, 1233 aa, Mycoplasma canis
MEKKRKVTLGFDLGIASVGWAIVDSETNQVYKLGSRLFDAPDTNLERRTQRGTRRLLRRRKYRNQKFYNLVKRTEVFGLSSREAIENRFRELSIKYPNIIELKTKALSQEVCPDEIAWILHDYLKNRGYFYDEKETKEDFDQQTVESMPSYKLNEFYKKYGYFKGALSQPTESEMKDNKDLKEAFFFDFSNKEWLKEINYFFNVQKNILSETFIEEFKKIFSFTRDISKGPGSDNMPSPYGIFGEFGDNGQGGRYEHIWDKNIGKCSIFTNEQRAPKYLPSALIFNFLNELANIRLYSTDKKNIQPLWKLSSVDKLNILLNLFNLPISEKKKKLTSTNINDIVKKESIKSIMISVEDIDMIKDEWAGKEPNVYGVGLSGLNIEESAKENKFKFQDLKILNVLINLLDNVGIKFEFKDRNDIIKNLELLDNLYLFLIYQKESNNKDSSIDLFIAKNESLNIENLKLKLKEFLLGAGNEFENHNSKTHSLSKKAIDEILPKLLDNNEGWNLEAIKNYDEEIKSQIEDNSSLMAKQDKKYLNDNFLKDAILPPNVKVTFQQAILIFNKIIQKFSKDFEIDKVVIELAREMTQDQENDALKGIAKAQKSKKSLVEERLEANNIDKSVFNDKYEKLIYKIFLWISQDFKDPYTGAQISVNEIVNNKVEIDHIIPYSLCFDDSSANKVLVHKQSNQEKSNSLPYEYIKQGHSGWNWDEFTKYVKRVFVNNVDSILSKKERLKKSENLLTASYDGYDKLGFLARNLNDTRYATILFRDQLNNYAEHHLIDNKKMFKVIAMNGAVTSFIRKNMSYDNKLRLKDRSDFSHHAYDAAIIALFSNKTKTLYNLIDPSLNGIISKRSEGYWVIEDRYTGEIKELKKEDWTSIKNNVQARKIAKEIEEYLIDLDDEVFFSRKTKRKTNRQLYNETIYGIATKTDEDGITNYYKKEKFSILDDKDIYLRLLREREKFVINQSNPEVIDQIIEIIESYGKENNIPSRDEAINIKYTKNKINYNLYLKQYMRSLTKSLDQFSEEFINQMIANKTFVLYNPTKNTTRKIKFLRLVNDVKINDIRKNQVINKFNGKNNEPKAFYENINSLGAIVFKNSANNFKTLSINTQIAIFGDKNWDIEDFKTYNMEKIEKYKEIYGIDKTYNFHSFIFPGTILLDKQNKEFYYISSIQTVRDIIEIKFLNKIEFKDENKNQDTSKTPKRLMFGIKSIMNNYEQVDISPFGINKKIFE

SEQ ID NO: 359 - protein, 1119 aa, Lactobacillus coryniformis
MGYRIGLDVGITSTGYAVLKTDKNGLPYKILTLDSVIYPRAENPQTGASLAEPRRIKRGLRRRTRRTKFRKQRTQQLFIHSGLLSKPEIEQILATPQAKYSVYELRVAGLDRRLTNSELFRVLYFFIGHRGFKSNRKAELNPENEADKKQMGQLLNSIEEIRKAIAEKGYRTVGELYLKDPKYNDHKRNKGYIDGYLSTPNRQMLVDEIKQILDKQRELGNEKLTDEFYATYLLGDENRAGIFQAQRDFDEGPGAGPYAGDQIKKMVGKDIFEPTEDRAAKATYTFQYFNLLQKMTSLNYQNTTGDTWHTLNGLDRQAIIDAVFAKAEKPTKTYKPTDFGELRKLLKLPDDARFNLVNYGSLQTQKEIETVEKKTRFVDFKAYHDLVKVLPEEMWQSRQLLDHIGTALTLYSSDKRRRRYFAEELNLPAELIEKLLPLNFSKFGHLSIKSMQNIIPYLEMGQVYSEATTNTGYDFRKKQISKDTIREEITNPVVRRAVTKTIKIVEQIIRRYGKPDGINIELARELGRNFKERGDIQKRQDKNRQTNDKIAAELTELGIPVNGQNIIRYKLHKEQNGVDPYTGDQIPFERAFSEGYEVDHIIPYSISWDDSYTNKVLTSAKCNREKGNRIPMVYLANNEQRLNALTNIADNIIRNSRKRQKLLKQKLSDEELKDWKQRNINDTRFITRVLYNYFRQAIEFNPELEKKQRVLPLNGEVTSKIRSRWGFLKVREDGDLHHAIDATVIAAITPKFIQQVTKYSQHQEVKNNQALWHDAEIKDAEYAAEAQRMDADLFNKIFNGFPLPWPEFLDELLARISDNPVEMMKSRSWNTYTPIEIAKLKPVFVVRLANHKISGPAHLDTIRSAKLFDEKGIVLSRVSITKLKINKKGQVATGDGIYDPENSNNGDKVVYSAIRQALEAHNGSGELAFPDGYLEYVDHGTKKLVRKVRVAKKVSLPVRLKNKAAADNGSMVRIDVFNTGKKFVFVPIYIKDTVEQVLPNKAIARGKSLWYQITESDQFCFSLYPGDMVHIESKTGIKPKYSNKENNTSVVPIKNFYGYFDGADIATASILVRAHDSSYTARSIGIAGLLKFEKYQVDYFGRYHKVHEKKRQLFVKRDE

SEQ ID NO: 360 - protein, 1195 aa, Elusimicrobium minutum
MQKNINTKQNHIYIKQAQKIKEKLGDKPYRIGLDLGVGSIGFAIVSMEENDGNVLLPKEIIMVGSRIFKASAGAADRKLSRGQRNNHRHTRERMRYLWKVLAEQKLALPVPADLDRKENSSEGETSAKRFLGDVLQKDIYELRVKSLDERLSLQELGYVLYHIAGHRGSSAIRTFENDSEEAQKENTENKKIAGNIKRLMAKKNYRTYGEYLYKEFFENKEKHKREKISNAANNHKFSPTRDLVIKEAEAILKKQAGKDGFHKELTEEYIEKLTKAIGYESEKLIPESGFCPYLKDEKRLPASHKLNEERRLWETLNNARYSDPIVDIVTGEITGYYEKQFTKEQKQKLFDYLLTGSELTPAQTKKLLGLKNTNFEDIILQGRDKKAQKIKGYKLIKLESMPFWARLSEAQQDSFLYDWNSCPDEKLLTEKLSNEYHLTEEEIDNAFNEIVLSSSYAPLGKSAMLIILEKIKNDLSYTEAVEEALKEGKLTKEKQAIKDRLPYYGAVLQESTQKIIAKGFSPQFKDKGYKTPHTNKYELEYGRIANPVVHQTLNELRKLVNEIIDILGKKPCEIGLETARELKKSAEDRSKLSREQNDNESNRNRIYEIYIRPQQQVIITRRENPRNYILKFELLEEQKSQCPFCGGQISPNDIINNQADIEHLFPIAESEDNGRNNLVISHSACNADKAKRSPWAAFASAAKDSKYDYNRILSNVKENIPHKAWRFNQGAFEKFIENKPMAARFKTDNSYISKVAHKYLACLFEKPNIICVKGSLTAQLRMAWGLQGLMIPFAKQLITEKESESFNKDVNSNKKIRLDNRHHALDAIVIAYASRGYGNLLNKMAGKDYKINYSERNWLSKILLPPNNIVWENIDADLESFESSVKTALKNAFISVKHDHSDNGELVKGTMYKIFYSERGYTLTTYKKLSALKLTDPQKKKTPKDFLETALLKFKGRESEMKNEKIKSAIENNKRLFDVIQDNLEKAKKLLEEENEKSKAEGKKEKNINDASIYQKAISLSGDKYVQLSKKEPGKFFAISKPTPTTTGYGYDTGDSLCVDLYYDNKGKLCGEIIRKIDAQQKNPLKYKEQGFTLFERIYGGDILEVDFDIHSDKNSFRNNTGSAPENRVFIKVGTFTEITNNNIQIWFGNIIKSTGGQDDSFTINSMQQYNPRKLILSSCGFIKYRSPILKNKEG

SEQ ID NO: 361 - protein, 1082 aa, Neisseria meningitidis; identical to SEQ ID NO: 25

SEQ ID NO: 362 - protein, 1056 aa, Pasteurella multocida
MQTTNLSYILGLDLGIASVGWAVVEINENEDPIGLIDVGVRIFERAEVPKTGESLALSRRLARSTRRLIRRRAHRLLLAKRFLKREGILSTIDLEKGLPNQAWELRVAGLERRLSAIEWGAVLLHLIKHRGYLSKRKNESQTNNKELGALLSGVAQNHQLLQSDDYRTPAELALKKFAKEEGHIRNQRGAYTHTFNRLDLLAELNLLFAQQHQFGNPHCKEHIQQYMTELLMWQKPALSGEAILKMLGKCTHEKNEFKAAKHTYSAERFVWLTKLNNLRILEDGAERALNEEERQLLINHPYEKSKLTYAQVRKLLGLSEQAIFKHLRYSKENAESATFMELKAWHAIRKALENQGLKDTWQDLAKKPDLLDEIGTAFSLYKTDEDIQQYLTNKVPNSVINALLVSLNFDKFIELSLKSLRKILPLMEQGKRYDQACREIYGHHYGEANQKTSQLLPAIPAQEIRNPVVLRTLSQARKVINAIIRQYGSPARVHIETGRELGKSFKERREIQKQQEDNRTKRESAVQKFKELFSDFSSEPKSKDILKFRLYEQQHGKCLYSGKEINIHRLNEKGYVEIDHALPFSRTWDDSFNNKVLVLASENQNKGNQTPYEWLQGKINSERWKNFVALVLGSQCSAAKKQRLLTQVIDDNKFIDRNLNDTRYIARFLSNYIQENLLLVGKNKKNVFTPNGQITALLRSRWGLIKARENNNRHHALDAIVVACATPSMQQKITRFIRFKEVHPYKIENRYEMVDQESGEIISPHFPEPWAYFRQEVNIRVFDNHPDTVLKEMLPDRPQANHQFVQPLFVSRAPTRKMSGQGHMETIKSAKRLAEGISVLRIPLTQLKPNLLENMVNKEREPALYAGLKARLAEFNQDPAKAFATPFYKQGGQQVKAIRVEQVQKSGVLVRENNGVADNASIVRTDVFIKNNKFFLVPIYTWQVAKGILPNKAIVAHKNEDEWEEMDEGAKFKFSLFPNDLVELKTKKEYFFGYYIGLDRATGNISLKEHDGEISKGKDGVYRVGVKLALSFEKYQVDELGKNRQICRPQQRQPVR

SEQ ID NO: 363 - protein, 1059 aa, Rhodovulum sp.
MGIRFAFDLGTNSIGWAVWRTGPGVFGEDTAASLDGSGVLIFKDGRNPKDGQSLATMRRVPRQSRKRRDRFVLRRRDLLAALRKAGLFPVDVEEGRRLAATDPYHLRAKALDESLTPHEMGRVIFHLNQRRGFRSNRKADRQDREKGKIAEGSKRLAETLAATNCRTLGEFLWSRHRGTPRTRSPTRIRMEGEGAKALYAFYPTREMVRAEFERLWTAQSRFAPDLLTPERHEEIAGILFRQRDLAPPKIGCCTFEPSERRLPRALPSVEARGIYERLAHLRITTGPVSDRGLTRPERDVLASALLAGKSLTFKAVRKTLKILPHALVNFEEAGEKGLDGALTAKLLSKPDHYGAAWHGLSFAEKDTFVGKLLDEADEERLIRRLVTENRLSEDAARRCASIPLADGYGRLGRTANTEILAALVEETDETGTVVTYAEAVRRAGERTGRNWHHSDERDGVILDRLPYYGEILQRHVVPGSGEPEEKNEAARWGRLANPTVHIGLNQLRKVVNRLIAAHGRPDQIVVELARELKLNREQKERLDRENRKNREENERRTAILAEHGQRDTAENKIRLRLFEEQARANAGIALCPYTGRAIGIAELFTSEVEIDHILPVSLTLDDSLANRVLCRREANREKRRQTPFQAFGATPAWNDIVARAAKLPPNKRWRFDPAALERFEREGGFLGRQLNETKYLSRLAKIYLGKICDPDRVYVTPGTLTGLLRARWGLNSILSDSNFKNRSDHRHHAVDAVVIGVLTRGMIQRIAHDAARAEDQDLDRVFRDVPVPFEDFRDHVRERVSTITVAVKPEHGKGGALHEDTSYGLVPDTDPNAALGNLVVRKPIRSLTAGEVDRVRDRALRARLGALAAPFRDESGRVRDAKGLAQALEAFGAENGIRRVRILKPDASVVTIADRRTGVPYRAVAPGENHHVDIVQMRDGSWRGFAASVFEVNRPGWRPEWEVKKLGGKLVMRLHKGDMVELSDKDGQRRVKVVQQIEISANRVRLSPHNDGGKLQDRHADADDPFRWDLATIPLLKDRGCVAVRVDPIGVVTLRRSNV

SEQ ID NO: 364 - protein, 1096 aa, Eubacterium dolichum
MMEVFMGRLVLGLDIGITSVGFGIIDLDESEIVDYGVRLFKEGTAAENETRRTKRGGRRLKRRRVTRREDMLHLLKQAGIISTSFHPLNNPYDVRVKGLNERLNGEELATALLHLCKHRGSSVETIEDDEAKAKEAGETKKVLSMNDQLLKSGKYVCEIQKERLRTNGHIRGHENNFKTRAYVDEAFQILSHQDLSNELKSAIITIISRKRMYYDGPGGPLSPTPYGRYTYFGQKEPIDLIEKMRGKCSLFPNEPRAPKLAYSAELFNLLNDLNNLSIEGEKLTSEQKAMILKIVHEKGKITPKQLAKEVGVSLEQIRGFRIDTKGSPLLSELTGYKMIREVLEKSNDEHLEDHVFYDEIAEILTKTKDIEGRKKQISELSSDLNEESVHQLAGLTKFTAYHSLSFKALRLINEEMLKTELNQMQSITLFGLKQNNELSVKGMKNIQADDTAILSPVAKRAQRETFKVVNRLREIYGEFDSIVVEMAREKNSEEQRKAIRERQKFFEMRNKQVADIIGDDRKINAKLREKLVLYQEQDGKTAYSLEPIDLKLLIDDPNAYEVDHIIPISISLDDSITNKVLVTHRENQEKGNLTPISAFVKGRFTKGSLAQYKAYCLKLKEKNIKTNKGYRKKVEQYLLNENDIYKYDIQKEFINRNLVDTSYASRVVLNTLTTYFKQNEIPTKVFTVKGSLTNAFRRKINLKKDRDEDYGHHAIDALIIASMPKMRLLSTIFSRYKIEDIYDESTGEVFSSGDDSMYYDDRYFAFIASLKAIKVRKFSHKIDTKPNRSVADETIYSTRVIDGKEKVVKKYKDIYDPKFTALAEDILNNAYQEKYLMALHDPQTFDQIVKVVNYYFEEMSKSEKYFTKDKKGRIKISGMNPLSLYRDEHGMLKKYSKKGDGPAITQMKYFDGVLGNHIDISAHYQVRDKKVVLQQISPYRTDFYYSKENGYKFVTIRYKDVRWSEKKKKYVIDQQDYAMKKAEKKIDDTYEFQFSMHRDELIGITKAEGEALIYPDETWHNFNFFFHAGETPEILKFTATNNDKSNKIEVKPIHCYCKMRLMPTISKKIVRIDKYATDVVGNLYKVKKNTLKFEFD

SEQ ID NO: 365 - protein, 1132 aa, Nitratifractor salsuginis
MKKILGVDLGITSFGYAILQETGKDLYRCLDNSVVMRNNPYDEKSGESSQSIRSTQKSMRRLIEKRKKRIRCVAQTMERYGILDYSETMKINDPKNNPIKNRWQLRAVDAWKRPLSPQELFAIFAHMAKHRGYKSIATEDLIYELELELGLNDPEKESEKKADERRQVYNALRHLEELRKKYGGETIAQTIHRAVEAGDLRSYRNHDDYEKMIRREDIEEEIEKVLLRQAELGALGLPEEQVSELIDELKACITDQEMPTIDESLFGKCTFYKDELAAPAYSYLYDLYRLYKKLADLNIDGYEVTQEDREKVIEWVEKKIAQGKNLKKITHKDLRKILGLAPEQKIFGVEDERIVKGKKEPRTFVPFFFLADIAKFKELFASIQKHPDALQIFRELAEILQRSKTPQEALDRLRALMAGKGIDTDDRELLELFKNKRSGTRELSHRYILEALPLFLEGYDEKEVQRILGFDDREDYSRYPKSLRHLHLREGNLFEKEENPINNHAVKSLASWALGLIADLSWRYGPFDEIILETTRDALPEKIRKEIDKAMREREKALDKIIGKYKKEFPSIDKRLARKIQLWERQKGLDLYSGKVINLSQLLDGSADIEHIVPQSLGGLSTDYNTIVTLKSVNAAKGNRLPGDWLAGNPDYRERIGMLSEKGLIDWKKRKNLLAQSLDEIYTENTHSKGIRATSYLEALVAQVLKRYYPFPDPELRKNGIGVRMIPGKVTSKTRSLLGIKSKSRETNFHHAEDALILSTLTRGWQNRLHRMLRDNYGKSEAELKELWKKYMPHIEGLTLADYIDEAFRRFMSKGEESLFYRDMFDTIRSISYWVDKKPLSASSHKETVYSSRHEVPTLRKNILEAFDSLNVIKDRHKLTTEEFMKRYDKEIRQKLWLHRIGNTNDESYRAVEERATQIAQILTRYQLMDAQNDKEIDEKFQQALKELITSPIEVTGKLLRKMRFVYDKLNAMQIDRGLVETDKNMLGIHISKGPNEKLIFRRMDVNNAHELQKERSGILCYLNEMLFIFNKKGLIHYGCLRSYLEKGQGSKYIALFNPRFPANPKAQPSKFTSDSKIKQVGIGSATGIIKAHLDLDGHVRSYEVFGTLPEGSIEWFKEESGYGRVEDDPHH

SEQ ID NO: 366 - protein, 1173 aa, Rhodospirillum rubrum
MRPIEPWILGLDIGTDSLGWAVFSCEEKGPPTAKELLGGGVRLFDSGRDAKDHTSRQAERGAFRRARRQTRTWPWRRDRLIALFQAAGLTPPAAETRQIALALRREAVSRPLAPDALWAALLHLAHHRGFRSNRIDKRERAAAKALAKAKPAKATAKATAPAKEADDEAGFWEGAEAALRQRMAASGAPTVGALLADDLDRGQPVRMRYNQSDRDGVVAPTRALIAEELAEIVARQSSAYPGLDWPAVTRLVLDQRPLRSKGAGPCAFLPGEDRALRALPTVQDFIIRQTLANLRLPSTSADEPRPLTDEEHAKALALLSTARFVEWPALRRALGLKRGVKFTAETERNGAKQAARGTAGNLTEAILAPLIPGWSGWDLDRKDRVFSDLWAARQDRSALLALIGDPRGPTRVTEDETAEAVADAIQIVLPTGRASLSAKAARAIAQAMAPGIGYDEAVTLALGLHHSHRPRQERLARLPYYAAALPDVGLDGDPVGPPPAEDDGAAAEAYYGRIGNISVHIALNETRKIVNALLHRHGPILRLVMVETTRELKAGADERKRMIAEQAERERENAEIDVELRKSDRWMANARERRQRVRLARRQNNLCPYTSTPIGHADLLGDAYDIDHVIPLARGGRDSLDNMVLCQSDANKTKGDKTPWEAFHDKPGWIAQRDDFLARLDPQTAKALAWRFADDAGERVARKSAEDEDQGFLPRQLTDTGYIARVALRYLSLVTNEPNAVVATNGRLTGLLRLAWDITPGPAPRDLLPTPRDALRDDTAARRFLDGLTPPPLAKAVEGAVQARLAALGRSRVADAGLADALGLTLASLGGGGKNRADHRHHFIDAAMIAVTTRGLINQINQASGAGRILDLRKWPRTNFEPPYPTFRAEVMKQWDHIHPSIRPAHRDGGSLHAATVFGVRNRPDARVLVQRKPVEKLFLDANAKPLPADKIAEIIDGFASPRMAKRFKALLARYQAAHPEVPPALAALAVARDPAFGPRGMTANTVIAGRSDGDGEDAGLITPFRANPKAAVRTMGNAVYEVWEIQVKGRPRWTHRVLTRFDRTQPAPPPPPENARLVMRLRRGDLVYWPLESGDRLFLVKKMAVDGRLALWPARLATGKATALYAQLSCPNINLNGDQGYCVQSAEGIRKEKIRTTSCTALGRLRLSKKAT

SEQ ID NO: 367 - protein, 1021 aa, Clostridium cellulolyticum
MKYTLGLDVGIASVGWAVIDKDNNKIIDLGVRCFDKAEESKTGESLATARRIARGMRRRISRRSQRLRLVKKLFVQYEIIKDSSEFNRIFDTSRDGWKDPWELRYNALSRILKPYELVQVLTHITKRRGFKSNRKEDLSTTKEGVVITSIKNNSEMLRTKNYRTIGEMIFMETPENSNKRNKVDEYIHTIAREDLLNEIKYIFSIQRKLGSPFVTEKLEHDFLNIWEFQRPFASGDSILSKVGKCTLLKEELRAPTSCYTSEYFGLLQSINNLVLVEDNNTLTLNNDQRAKIIEYAHFKNEIKYSEIRKLLDIEPEILFKAHNLTHKNPSGNNESKKFYEMKSYHKLKSTLPTDIWGKLHSNKESLDNLFYCLTVYKNDNEIKDYLQANNLDYLIEYIAKLPTFNKFKHLSLVAMKRIIPFMEKGYKYSDACNMAELDFTGSSKLEKCNKLTVEPIIENVTNPVVIRALTQARKVINAIIQKYGLPYMVNIELAREAGMTRQDRDNLKKEHENNRKAREKISDLIRQNGRVASGLDILKWRLWEDQGGRCAYSGKPIPVCDLLNDSLTQIDHIYPYSRSMDDSYMNKVLVLTDENQNKRSYTPYEVWGSTEKWEDFEARIYSMHLPQSKEKRLLNRNFITKDLDSFISRNLNDTRYISRFLKNYIESYLQFSNDSPKSCVVCVNGQCTAQLRSRWGLNKNREESDLHHALDAAVIACADRKIIKEITNYYNERENHNYKVKYPLPWHSFRQDLMETLAGVFISRAPRRKITGPAHDETIRSPKHFNKGLTSVKIPLTTVTLEKLETMVKNTKGGISDKAVYNVLKNRLIEHNNKPLKAFAEKIYKPLKNGTNGAIIRSIRVETPSYTGVFRNEGKGISDNSLMVRVDVFKKKDKYYLVPIYVAHMIKKELPSKAIVPLKPESQWELIDSTHEFLFSLYQNDYLVIKTKKGITEGYYRSCHRGTGSLSLMPHFANNKNVKIDIGVRTAISIEKYNVDILGNKSIVKGEPRRGMEKYNSFKSN

SEQ ID NO: 368 - protein, 1024 aa, Helicobacter mustelae
MIRTLGIDIGIASIGWAVIEGEYTDKGLENKEIVASGVRVFTKAENPKNKESLALPRTLARSARRRNARKKGRIQQVKHYLSKALGLDLECFVQGEKLATLFQTSKDFLSPWELRERALYRVLDKEELARVILHIAKRRGYDDITYGVEDNDSGKIKKAIAENSKRIKEEQCKTIGEMMYKLYFQKSLNVRNKKESYNRCVGRSELREELKTIFQIQQELKSPWVNEELIYKLLGNPDAQSKQEREGLIFYQRPLKGFGDKIGKCSHIKKGENSPYRACKHAPSAEEFVALTKSINFLKNLTNRHGLCFSQEDMCVYLGKILQEAQKNEKGLTYSKLKLLLDLPSDFEFLGLDYSGKNPEKAVFLSLPSTFKLNKITQDRKTQDKIANILGANKDWEAILKELESLQLSKEQIQTIKDAKLNFSKHINLSLEALYHLLPLMREGKRYDEGVEILQERGIFSKPQPKNRQLLPPLSELAKEESYFDIPNPVLRRALSEFRKVVNALLEKYGGFHYFHIELTRDVCKAKSARMQLEKINKKNKSENDAASQLLEVLGLPNTYNNRLKCKLWKQQEEYCLYSGEKITIDHLKDQRALQIDHAFPLSRSLDDSQSNKVLCLTSSNQEKSNKTPYEWLGSDEKKWDMYVGRVYSSNFSPSKKRKLTQKNFKERNEEDFLARNLVDTGYIGRVTKEYIKHSLSFLPLPDGKKEHIRIISGSMTSTMRSFWGVQEKNRDHHLHHAQDAIIIACIEPSMIQKYTTYLKDKETHRLKSHQKAQILREGDHKLSLRWPMSNFKDKIQESIQNIIPSHHVSHKVTGELHQETVRTKEFYYQAFGGEEGVKKALKFGKIREINQGIVDNGAMVRVDIFKSKDKGKFYAVPIYTYDFAIGKLPNKAIVQGKKNGIIKDWLEMDENYEFCFSLFKNDCIKIQTKEMQEAVLAIYKSTNSAKATIELEHLSKYALKNEDEEKMFTDTDKEKNKTMTRESCGIQGLKVFQKVKLSVLGEVLEHKPRNRQNIALKTTPKHV

SEQ ID NO: 369 - protein, 1092 aa, Ilyobacter polytropus
MKYSIGLDIGIASVGWSVINKDKERIEDMGVRIFQKAENPKDGSSLASSRREKRGSRRRNRRKKHRLDRIKNILCESGLVKKNEIEKIYKNAYLKSPWELRAKSLEAKISNKEIAQILLHIAKRRGFKSFRKTDRNADDTGKLLSGIQENKKIMEEKGYLTIGDMVAKDPKFNTHVRNKAGSYLFSFSRKLLEDEVRKIQAKQKELGNTHFTDDVLEKYIEVFNSQRNFDEGPSKPSPYYSEIGQIAKMIGNCTFESSEKRTAKNTWSGERFVFLQKLNNFRIVGLSGKRPLTEEERDIVEKEVYLKKEVRYEKLRKILYLKEEERFGDLNYSKDEKQDKKTEKTKFISLIGNYTIKKLNLSEKLKSEIEEDKSKLDKIIEILTFNKSDKTIESNLKKLELSREDIEILLSEEFSGTLNLSLKAIKKILPYLEKGLSYNEACEKADYDYKNNGIKFKRGELLPVVDKDLIANPVVLRAISQTRKVVNAIIRKYGTPHTIHVEVARDLAKSYDDRQTIIKENKKRELENEKTKKFISEEFGIKNVKGKLLLKYRLYQEQEGRCAYSRKELSLSEVILDESMTDIDHIIPYSRSMDDSYSNKVLVLSGENRKKSNLLPKEYFDRQGRDWDTFVLNVKAMKIHPRKKSNLLKEKFTREDNKDWKSRALNDTRYISRFVANYLENALEYRDDSPKKRVFMIPGQLTAQLRARWRLNKVRENGDLHHALDAAVVAVTDQKAINNISNISRYKELKNCKDVIPSIEYHADEETGEVYFEEVKDTRFPMPWSGFDLELQKRLESENPREEFYNLLSDKRYLGWFNYEEGFIEKLRPVFVSRMPNRGVKGQAHQETIRSSKKISNQIAVSKKPLNSIKLKDLEKMQGRDTDRKLYEALKNRLEEYDDKPEKAFAEPFYKPTNSGKRGPLVRGIKVEEKQNVGVYVNGGQASNGSMVRIDVFRKNGKFYTVPIYVHQTLLKELPNRAINGKPYKDWDLIDGSFEFLYSFYPNDLIEIEFGKSKSIKNDNKLTKTEIPEVNLSEVLGYYRGMDTSTGAATIDTQDGKIQMRIGIKTVKNIKKYQVDVLGNVYKVKREKRQTF

SEQ ID NO: 370 - protein, 1179 aa, Sphaerochaeta globus
MSKKVSRRYEEQAQEICQRLGSRPYSIGLDLGVGSIGVAVAAYDPIKKQPSDLVFVSSRIFIPSTGAAERRQKRGQRNSLRHRANRLKFLWKLLAERNLMLSYSEQDVPDPARLRFEDAVVRANPYELRLKGLNEQLTLSELGYALYHIANHRGSSSVRTFLDEEKSSDDKKLEEQQAMTEQLAKEKGISTFIEVLTAFNTNGLIGYRNSESVKSKGVPVPTRDIISNEIDVLLQTQKQFYQEILSDEYCDRIVSAILFENEKIVPEAGCCPYFPDEKKLPRCHFLNEERRLWEAINNARIKMPMQEGAAKRYQSASFSDEQRHILFHIARSGTDITPKLVQKEFPALKTSIIVLQGKEKAIQKIAGFRFRRLEEKSFWKRLSEEQKDDFFSAWTNTPDDKRLSKYLMKHLLLTENEVVDALKTVSLIGDYGPIGKTATQLLMKHLEDGLTYTEALERGMETGEFQELSVWEQQSLLPYYGQILTGSTQALMGKYWHSAFKEKRDSEGFFKPNTNSDEEKYGRIANPVVHQTLNELRKLMNELITILGAKPQEITVELARELKVGAEKREDIIKQQTKQEKEAVLAYSKYCEPNNLDKRYIERFRLLEDQAFVCPYCLEHISVADIAAGRADVDHIFPRDDTADNSYGNKVVAHRQCNDIKGKRTPYAAFSNTSAWGPIMHYLDETPGMWRKRRKFETNEEEYAKYLQSKGFVSRFESDNSYIAKAAKEYLRCLFNPNNVTAVGSLKGMETSILRKAWNLQGIDDLLGSRHWSKDADTSPTMRKNRDDNRHHGLDAIVALYCSRSLVQMINTMSEQGKRAVEIEAMIPIPGYASEPNLSFEAQRELFRKKILEFMDLHAFVSMKTDNDANGALLKDTVYSILGADTQGEDLVFVVKKKIKDIGVKIGDYEEVASAIRGRITDKQPKWYPMEMKDKIEQLQSKNEAALQKYKESLVQAAAVLEESNRKLIESGKKPIQLSEKTISKKALELVGGYYYLISNNKRTKTFVVKEPSNEVKGFAFDTGSNLCLDFYHDAQGKLCGEIIRKIQAMNPSYKPAYMKQGYSLYVRLYQGDVCELRASDLTEAESNLAKTTHVRLPNAKPGRTFVIIITFTEMGSGYQIYFSNLAKSKKGQDTSFTLTTIKNYDVRKVQLSSAGLVRYVSPLLVDKIEKDEVALCGE

SEQ ID NO: 371 - protein, 1054 aa, Staphylococcus lugdunensis
MNQKFILGLDIGITSVGYGLIDYETKNIIDAGVRLFPEANVENNEGRRSKRGSRRLKRRRIHRLERVKKLLEDYNLLDQSQIPQSTNPYAIRVKGLSEALSKDELVIALLHIAKRRGIHKIDVIDSNDDVGNELSTKEQLNKNSKLLKDKFVCQIQLERMNEGQVRGEKNRFKTADIIKEIIQLLNVQKNFHQLDENFINKYIELVEMRREYFEGPGKGSPYGWEGDPKAWYETLMGHCTYFPDELRSVKYAYSADLFNALNDLNNLVIQRDGLSKLEYHEKYHIIENVFKQKKKPTLKQIANEINVNPEDIKGYRITKSGKPQFTEFKLYHDLKSVLFDQSILENEDVLDQIAEILTIYQDKDSIKSKLTELDILLNEEDKENIAQLTGYTGTHRLSLKCIRLVLEEQWYSSRNQMEIFTHLNIKPKKINLTAANKIPKAMIDEFILSPVVKRTFGQAINLINKIIEKYGVPEDIIIELARENNSKDKQKFINEMQKKNENTRKRINEIIGKYGNQNAKRLVEKIRLHDEQEGKCLYSLESIPLEDLLNNPNHYEVDHIIPRSVSFDNSYHNKVLVKQSENSKKSNLTPYQYFNSGKSKLSYNQFKQHILNLSKSQDRISKKKKEYLLEERDINKFEVQKEFINRNLVDTRYATRELTNYLKAYFSANNMNVKVKTINGSFTDYLRKVWKFKKERNHGYKHHAEDALIIANADFLFKENKKLKAVNSVLEKPEIESKQLDIQVDSEDNYSEMFIIPKQVQDIKDFRNFKYSHRVDKKPNRQLINDTLYSTRKKDNSTYIVQTIKDIYAKDNTTLKKQFDKSPEKFLMYQHDPRTFEKLEVIMKQYANEKNPLAKYHEETGEYLTKYSKKNNGPIVKSLKYIGNKLGSHLDVTHQFKSSTKKLVKLSIKPYRFDVYLTDKGYKFITISYLDVLKKDNYYYIPEQKYDKLKLGKAIDKNAKFIASFYKNDLIKLDGEIYKIIGVNSDTRNMIELDLPDIRYKEYCELNNIKGEPRIKKTIGKKVNSIEKLTTDVLGNVFTNTQYTKPQLLFKRGN

SEQ ID NO: 372 - protein, 1061 aa, Treponema sp.
MIMKLEKWRLGLDLGTNSIGWSVFSLDKDNSVQDLIDMGVRIFSDGRDPKTKEPLAVARRTARSQRKLIYRRKLRRKQVFKFLQEQGLFPKTKEECMTLKSLNPYELRIKALDEKLEPYELGRALFNLAVRRGFKSNRKDGSREEVSEKKSPDEIKTQADMQTHLEKAIKENGCRTITEFLYKNQGENGGIRFAPGRMTYYPTRKMYEEEFNLIRSKQEKYYPQVDWDDIYKAIFYQRPLKPQQRGYCIYENDKERTFKAMPCSQKLRILQDIGNLAYYEGGSKKRVELNDNQDKVLYELLNSKDKVTFDQMRKALCLADSNSFNLEENRDFLIGNPTAVKMRSKNRFGKLWDEIPLEEQDLIIETIITADEDDAVYEVIKKYDLTQEQRDFIVKNTILQSGTSMLCKEVSEKLVKRLEEIADLKYHEAVESLGYKFADQTVEKYDLLPYYGKVLPGSTMEIDLSAPETNPEKHYGKISNPTVHVALNQTRVVVNALIKEYGKPSQIAIELSRDLKNNVEKKAEIARKQNQRAKENIAINDTISALYHTAFPGKSFYPNRNDRMKYRLWSELGLGNKCIYCGKGISGAELFTKEIEIEHILPFSRTLLDAESNLTVAHSSCNAFKAERSPFEAFGTNPSGYSWQEIIQRANQLKNTSKKNKFSPNAMDSFEKDSSFIARQLSDNQYIAKAALRYLKCLVENPSDVWTTNGSMTKLLRDKWEMDSILCRKFTEKEVALLGLKPEQIGNYKKNRFDHRHHAIDAVVIGLTDRSMVQKLATKNSHKGNRIEIPEFPILRSDLIEKVKNIVVSFKPDHGAEGKLSKETLLGKIKLHGKETFVCRENIVSLSEKNLDDIVDEIKSKVKDYVAKHKGQKIEAVLSDFSKENGIKKVRCVNRVQTPIEITSGKISRYLSPEDYFAAVIWEIPGEKKTFKAQYIRRNEVEKNSKGLNVVKPAVLENGKPHPAAKQVCLLHKDDYLEFSDKGKMYFCRIAGYAATNNKLDIRPVYAVSYCADWINSTNETMLTGYWKPTPTQNWVSVNVLFDKQKARLVTVSPIGRVFRK

SEQ ID NO: 373 - protein, 1011 aa, unidentified
  REGION 1..1011: note = Uncultured delta polypeptide
MSSKAIDSLEQLDLFKPQEYTLGLDLGIKSIGWAILSGERIANAGVYLFETAEELNSTGNKLISKAAERGRKRRIRRMLDRKARRGRHIRYLLEREGLPTDELEEVVVHQSNRTLWDVRAEAVERKLTKQELAAVLFHLVRHRGYFPNTKKLPPDDESDSADEEQGKINRATSRLREELKASDCKTIGQFLAQNRDRQRNREGDYSNLMARKLVFEEALQILAFQRKQGHELSKDFEKTYLDVLMGQRSGRSPKLGNCSLIPSELRAPSSAPSTEWFKFLQNLGNLQISNAYREEWSIDAPRRAQIIDACSQRSTSSYWQIRRDFQIPDEYRFNLVNYERRDPDVDLQEYLQQQERKTLANFRNWKQLEKIIGTGHPIQTLDEAARLITLIKDDEKLSDQLADLLPEASDKAITQLCELDFTTAAKISLEAMYRILPHMNQGMGFFDACQQESLPEIGVPPAGDRVPPFDEMYNPVVNRVLSQSRKLINAVIDEYGMPAKIRVELARDLGKGRELRERIKLDQLDKSKQNDQRAEDFRAEFQQAPRGDQSLRYRLWKEQNCTCPYSGRMIPVNSVLSEDTQIDHILPISQSFDNSLSNKVLCFTEENAQKSNRTPFEYLDAADFQRLEAISGNWPEAKRNKLLHKSFGKVAEEWKSRALNDTRYLTSALADHLRHHLPDSKIQTVNGRITGYLRKQWGLEKDRDKHTHHAVDAIVVACTTPAIVQQVTLYHQDIRRYKKLGEKRPTPWPETFRQDVLDVEEEIFITRQPKKVSGGIQTKDTLRKHRSKPDRQRVALTKVKLADLERLVEKDASNRNLYEHLKQCLEESGDQPTKAFKAPFYMPSGPEAKQRPILSKVTLLREKPEPPKQLTELSGGRRYDSMAQGRLDIYRYKPGGKRKDEYRVVLQRMIDLMRGEENVHVFQKGVPYDQGPEIEQNYTFLFSLYFDDLVEFQRSADSEVIRGYYRTFNIANGQLKISTYLEGRQDFDFFGANRLAHFAKVQVNLLGKVIK

SEQ ID NO: 374 - protein, 1029 aa, Alicycliphilus denitrificans
MRSLRYRLALDLGSTSLGWALFRLDACNRPTAVIKAGVRIFSDGRNPKDGSSLAVTRRAARAMRRRRDRLLKRKTRMQAKLVEHGFFPADAGKRKALEQLNPYALRAKGLQEALLPGEFARALFHINQRRGFKSNRKTDKKDNDSGVLKKAIGQLRQQMAEQGSRTVGEYLWTRLQQGQGVRARYREKPYTTEEGKKRIDKSYDLYIDRAMIEQEFDALWAAQAAFNPTLFHEAARADLKDTLLHQRPLRPVKPGRCTLLPEEERAPLALPSTQRFRIHQEVNHLRLLDENLREVALTLAQRDAVVTALETKAKLSFEQIRKLLKLSGSVQFNLEDAKRTELKGNATSAALARKELFGAAWSGFDEALQDEIVWQLVTEEGEGALIAWLQTHTGVDEARAQAIVDVSLPEGYGNLSRKALARIVPALRAAVITYDKAVQAAGFDHHSQLGFEYDASEVEDLVHPETGEIRSVFKQLPYYGKALQRHVAFGSGKPEDPDEKRYGKIANPTVHIGLNQVRMVVNALIRRYGRPTEVVIELARDLKQSREQKVEAQRRQADNQRRNARIRRSIAEVLGIGEERVRGSDIQKWICWEELSFDAADRRCPYSGVQISAAMLLSDEVEVEHILPFSKTLDDSLNNRTVAMRQANRIKRNRTPWDARAEFEAQGWSYEDILQRAERMPLRKRYRFAPDGYERWLGDDKDFLARALNDTRYLSRVAAEYLRLVCPGTRVIPGQLTALLRGKFGLNDVLGLDGEKNRNDHRHHAVDACVIGVTDQGLMQRFATASAQARGDGLTRLVDGMPMPWPTYRDHVERAVRHIWVSHRPDHGFEGAMMEETSYGIRKDGSIKQRRKADGSAGREISNLIRIHEATQPLRHGVSADGQPLAYKGYVGGSNYCIEITVNDKGKWEGEVISTFRAYGVVRAGGMGRLRNPHEGQNGRKLIMRLVIGDSVRLEVDGAERTMRIVKISGSNGQIFMAPIHEANVDARNTDKQDAFTYTSKYAGSLQKAKTRRVTISPIGEVRDPGFKG

SEQ ID NO: 375 - protein, 1168 aa, Azospirillum sp.
MARPAFRAPRREHVNGWTPDPHRISKPFFILVSWHLLSRVVIDSSSGCFPGTSRDHTDKFAEWECAVQPYRLSFDLGTNSIGWGLLNLDRQGKPREIRALGSRIFSDGRDPQDKASLAVARRLARQMRRRRDRYLTRRTRLMGALVRFGLMPADPAARKRLEVAVDPYLARERATRERLEPFEIGRALFHLNQRRGYKPVRTATKPDEEAGKVKEAVERLEAAIAAAGAPTLGAWFAWRKTRGETLRARLAGKGKEAAYPFYPARRMLEAEFDTLWAEQARHHPDLLTAEAREILRHRIFHQRPLKPPPVGRCTLYPDDGRAPRALPSAQRLRLFQELASLRVIHLDLSERPLTPAERDRIVAFVQGRPPKAGRKPGKVQKSVPFEKLRGLLELPPGTGFSLESDKRPELLGDETGARIAPAFGPGWTALPLEEQDALVELLLTEAEPERAIAALTARWALDEATAAKLAGATLPDFHGRYGRRAVAELLPVLERETRGDPDGRVRPIRLDEAVKLLRGGKDHSDFSREGALLDALPYYGAVLERHVAFGTGNPADPEEKRVGRVANPTVHIALNQLRHLVNAILARHGRPEEIVIELARDLKRSAEDRRREDKRQADNQKRNEERKRLILSLGERPTPRNLLKLRLWEEQGPVENRRCPYSGETISMRMLLSEQVDIDHILPFSVSLDDSAANKVVCLREANRIKRNRSPWEAFGHDSERWAGILARAEALPKNKRWRFAPDALEKLEGEGGLRARHLNDTRHLSRLAVEYLRCVCPKVRVSPGRLTALLRRRWGIDAILAEADGPPPEVPAETLDPSPAEKNRADHRHHALDAVVIGCIDRSMVQRVQLAAASAEREAAAREDNIRRVLEGFKEEPWDGFRAELERRARTIVVSHRPEHGIGGALHKETAYGPVDPPEEGFNLVVRKPIDGLSKDEINSVRDPRLRRALIDRLAIRRRDANDPATALAKAAEDLAAQPASRGIRRVRVLKKESNPIRVEHGGNPSGPRSGGPFHKLLLAGEVHHVDVALRADGRRWVGHWVTLFEAHGGRGADGAAAPPRLGDGERFLMRLHKGDCLKLEHKGRVRVMQVVKLEPSSNSVVVVEPHQVKTDRSKHVKISCDQLRARGARRVTVDPLGRVRVHAPGARVGIGGDAGRTAMEPAEDIS

SEQ ID NO: 376 - protein, 1064 aa, Bradyrhizobium sp.
MKRTSLRAYRLGVDLGANSLGWFVVWLDDHGQPEGLGPGGVRIFPDGRNPQSKQSNAAGRRLARSARRRRDRYLQRRGKLMGLLVKHGLMPADEPARKRLECLDPYGLRAKALDEVLPLHHVGRALFHLNQRRGLFANRAIEQGDKDASAIKAAAGRLQTSMQACGARTLGEFLNRRHQLRATVRARSPVGGDVQARYEFYPTRAMVDAEFEAIWAAQAPHHPTMTAEAHDTIREAIFSQRAMKRPSIGKCSLDPATSQDDVDGFRCAWSHPLAQRFRIWQDVRNLAVVETGPTSSRLGKEDQDKVARALLQTDQLSFDEIRGLLGLPSDARFNLESDRRDHLKGDATGAILSARRHFGPAWHDRSLDRQIDIVALLESALDEAAIIASLGTTHSLDEAAAQRALSALLPDGYCRLGLRAIKRVLPLMEAGRTYAEAASAAGYDHALLPGGKLSPTGYLPYYGQWLQNDVVGSDDERDTNERRWGRLPNPTVHIGIGQLRRVVNELIRWHGPPAEITVELTRDLKLSPRRLAELEREQAENQRKNDKRTSLLRKLGLPASTHNLLKLRLWDEQGDVASECPYTGEAIGLERLVSDDVDIDHLIPFSISWDDSAANKVVCMRYANREKGNRTPFEAFGHRQGRPYDWADIAERAARLPRGKRWRFGPGARAQFEELGDFQARLLNETSWLARVAKQYLAAVTHPHRIHVLPGRLTALLRATWELNDLLPGSDDRAAKSRKDHRHHAIDALVAALTDQALLRRMANAHDDTRRKIEVLLPWPTFRIDLETRLKAMLVSHKPDHGLQARLHEDTAYGTVEHPETEDGANLVYRKTFVDISEKEIDRIRDRRLRDLVRAHVAGERQQGKTLKAAVLSFAQRRDIAGHPNGIRHVRLTKSIKPDYLVPIRDKAGRIYKSYNAGENAFVDILQAESGRWIARATTVFQANQANESHDAPAAQPIMRVFKGDMLRIDHAGAEKFVKIVRLSPSNNLLYLVEHHQAGVFQTRHDDPEDSFRWLFASFDKLREWNAELVRIDTLGQPWRRKRGLETGSEDATRIGWTRPKKWP

SEQ ID NO: 377 - protein, 1037 aa, Parvibaculum lavamentivorans
MERIFGFDIGTTSIGFSVIDYSSTQSAGNIQRLGVRIFPEARDPDGTPLNQQRRQKRMMRRQLRRRRIRRKALNETLHEAGFLPAYGSADWPVVMADEPYELRRRGLEEGLSAYEFGRAIYHLAQHRHFKGRELEESDTPDPDVDDEKEAANERAATLKALKNEQTTLGAWLARRPPSDRKRGIHAHRNVVAEEFERLWEVQSKFHPALKSEEMRARISDTIFAQRPVFWRKNTLGECRFMPGEPLCPKGSWLSQQRRMLEKLNNLAIAGGNARPLDAEERDAILSKLQQQASMSWPGVRSALKALYKQRGEPGAEKSLKFNLELGGESKLLGNALEAKLADMFGPDWPAHPRKQEIRHAVHERLWAADYGETPDKKRVIILSEKDRKAHREAAANSFVADFGITGEQAAQLQALKLPTGWEPYSIPALNLFLAELEKGERFGALVNGPDWEGWRRTNFPHRNQPTGEILDKLPSPASKEERERISQLRNPTVVRTQNELRKVVNNLIGLYGKPDRIRIEVGRDVGKSKREREEIQSGIRRNEKQRKKATEDLIKNGIANPSRDDVEKWILWKEGQERCPYTGDQIGFNALFREGRYEVEHIWPRSRSFDNSPRNKTLCRKDVNIEKGNRMPFEAFGHDEDRWSAIQIRLQGMVSAKGGTGMSPGKVKRFLAKTMPEDFAARQLNDTRYAAKQILAQLKRLWPDMGPEAPVKVEAVTGQVTAQLRKLWTLNNILADDGEKTRADHRHHAIDALTVACTHPGMTNKLSRYWQLRDDPRAEKPALTPPWDTIRADAEKAVSEIVVSHRVRKKVSGPLHKETTYGDTGTDIKTKSGTYRQFVTRKKIESLSKGELDEIRDPRIKEIVAAHVAGRGGDPKKAFPPYPCVSPGGPEIRKVRLTSKQQLNLMAQTGNGYADLGSNHHIAIYRLPDGKADFEIVSLFDASRRLAQRNPIVQRTRADGASFVMSLAAGEAIMIPEGSKKGIWIVQGVWASGQVVLERDTDADHSTTTRPMPNPILKDDAKKVSIDPIGRVRPSND

SEQ ID NO: 378 - protein, 1218 aa, Prevotella timonensis
MNKRILGLDTGTNSLGWAVVDWDEHAQSYELIKYGDVIFQEGVKIEKGIESSKAAERSGYKAIRKQYFRRRLRKIQVLKVLVKYHLCPYLSDDDLRQWHLQKQYPKSDELMLWQRTSDEEGKNPYYDRHRCLHEKLDLTVEADRYTLGRALYHLTQRRGFLSNRLDTSADNKEDGVVKSGISQLSTEMEEAGCEYLGDYFYKLYDAQGNKVRIRQRYTDRNKHYQHEFDAICEKQELSSELIEDLQRAIFFQLPLKSQRHGVGRCTFERGKPRCADSHPDYEEFRMLCFVNNIQVKGPHDLELRPLTYEEREKIEPLFFRKSKPNFDFEDIAKALAGKKNYAWIHDKEERAYKFNYRMTQGVPGCPTIAQLKSIFGDDWKTGIAETYTLIQKKNGSKSLQEMVDDVWNVLYSFSSVEKLKEFAHHKLQLDEESAEKFAKIKLSHSFAALSLKAIRKFLPFLRKGMYYTHASFFANIPTIVGKEIWNKEQNRKYIMENVGELVFNYQPKHREVQGTIEMLIKDFLANNFELPAGATDKLYHPSMIETYPNAQRNEFGILQLGSPRTNAIRNPMAMRSLHILRRVVNQLLKESIIDENTEVHVEYARELNDANKRRAIADRQKEQDKQHKKYGDEIRKLYKEETGKDIEPTQTDVLKFQLWEEQNHHCLYTGEQIGITDFIGSNPKFDIEHTIPQSVGGDSTQMNLTLCDNRFNREVKKAKLPTELANHEEILTRIEPWKNKYEQLVKERDKQRTFAGMDKAVKDIRIQKRHKLQMEIDYWRGKYERFTMTEVPEGFSRRQGTGIGLISRYAGLYLKSLFHQADSRNKSNVYVVKGVATAEFRKMWGLQSEYEKKCRDNHSHHCMDAITIACIGKREYDLMAEYYRMEETFKQGRGSKPKFSKPWATFTEDVLNIYKNLLVVHDTPNNMPKHTKKYVQTSIGKVLAQGDTARGSLHLDTYYGAIERDGEIRYVVRRPLSSFTKPEELENIVDETVKRTIKEAIADKNFKQAIAEPIYMNEEKGILIKKVRCFAKSVKQPINIRQHRDLSKKEYKQQYHVMNENNYLLAIYEGLVKNKVVREFEIVSYIEAAKYYKRSQDRNIFSSIVPTHSTKYGLPLKTKLLMGQLVLMFEENPDEIQVDNTKDLVKRLYKVVGIEKDGRIKFKYHQEARKEGLPIFSTPYKNNDDYAPIFRQSINNINILVDGIDFTIDILGKVTLKE

SEQ ID NO: 379 - protein, 1088 aa, Bacillus smithii
MNYKMGLDIGIASVGWAVINLDLKRIEDLGVRIFDKAEHPQNGESLALPRRIARSARRRLRRRKHRLERIRRLLVSENVLTKEEMNLLFKQKKQIDVWQLRVDALERKLNNDELARVLLHLAKRRGFKSNRKSERNSKESSEFLKNIEENQSILAQYRSVGEMIVKDSKFAYHKRNKLDSYSNMIARDDLEREIKLIFEKQREFNNPVCTERLEEKYLNIWSSQRPFASKEDIEKKVGFCTFEPKEKRAPKATYTFQSFIVWEHINKLRLVSPDETRALTEIERNLLYKQAFSKNKMTYYDIRKLLNLSDDIHFKGLLYDPKSSLKQIENIRFLELDSYHKIRKCIENVYGKDGIRMFNETDIDTFGYALTIFKDDEDIVAYLQNEYITKNGKRVSNLANKVYDKSLIDELLNLSFSKFAHLSMKAIRNILPYMEQGEIYSKACELAGYNFTGPKKKEKALLLPVIPNIANPVVMRALTQSRKVVNAIIKKYGSPVSIHIELARDLSHSFDERKKIQKDQTENRKKNETAIKQLIEYELTKNPTGLDIVKFKLWSEQQGRCMYSLKPIELERLLEPGYVEVDHILPYSRSLDDSYANKVLVLTKENREKGNHTPVEYLGLGSERWKKFEKFVLANKQFSKKKKQNLLRLRYEETEEKEFKERNLNDTRYISKFFANFIKEHLKFADGDGGQKVYTINGKITAHLRSRWDFNKNREESDLHHAVDAVIVACATQGMIKKITEFYKAREQNKESAKKKEPIFPQPWPHFADELKARLSKFPQESIEAFALGNYDRKKLESLRPVFVSRMPKRSVTGAAHQETLRRCVGIDEQSGKIQTAVKTKLSDIKLDKDGHFPMYQKESDPRTYEAIRQRLLEHNNDPKKAFQEPLYKPKKNGEPGPVIRTVKIIDTKNKVVHLDGSKTVAYNSNIVRTDVFEKDGKYYCVPVYTMDIMKGTLPNKAIEANKPYSEWKEMTEEYTFQFSLFPNDLVRIVLPREKTIKTSTNEEIIIKDIFAYYKTIDSATGGLELISHDRNFSLRGVGSKTLKRFEKYQVDVLGNIHKVKGEKRVGLAAPTNQKKGKTVDSLQSVSD

SEQ ID NO: 380 - protein, 1035 aa, Puniceispirillum marinum
MRRLGLDLGTNSIGWCLLDLGDDGEPVSIFRTGARIFSDGRDPKSLGSLKATRREARLTRRRRDRFIQRQKNLINALVKYGLMPADEIQRQALAYKDPYPIRKKALDEAIDPYEMGRAIFHINQRRGFKSNRKSADNEAGVVKQSIADLEMKLGEAGARTIGEFLADRQATNDTVRARRLSGTNALYEFYPDRYMLEQEFDTLWAKQAAFNPSLYIEAARERLKEIVFFQRKLKPQEVGRCIFLSDEDRISKALPSFQRFRIYQELSNLAWIDHDGVAHRITASLALRDHLFDELEHKKKLTFKAMRAILRKQGVVDYPVGFNLESDNRDHLIGNLTSCIMRDAKKMIGSAWDRLDEEEQDSFILMLQDDQKGDDEVRSILTQQYGLSDDVAEDCLDVRLPDGHGSLSKKAIDRILPVLRDQGLIYYDAVKEAGLGEANLYDPYAALSDKLDYYGKALAGHVMGASGKFEDSDEKRYGTISNPTVHIALNQVRAVVNELIRLHGKPDEVVIEIGRDLPMGADGKRELERFQKEGRAKNERARDELKKLGHIDSRESRQKFQLWEQLAKEPVDRCCPFTGKMMSISDLFSDKVEIEHLLPFSLTLDDSMANKTVCFRQANRDKGNRAPFDAFGNSPAGYDWQEILGRSQNLPYAKRWRFLPDAMKRFEADGGFLERQLNDTRYISRYTTEYISTIIPKNKIWVVTGRLTSLLRGFWGLNSILRGHNTDDGTPAKKSRDDHRHHAIDAIVVGMTSRGLLQKVSKAARRSEDLDLTRLFEGRIDPWDGFRDEVKKHIDAIIVSHRPRKKSQGALHNDTAYGIVEHAENGASTVVHRVPITSLGKQSDIEKVRDPLIKSALLNETAGLSGKSFENAVQKWCADNSIKSLRIVETVSIIPITDKEGVAYKGYKGDGNAYMDIYQDPTSSKWKGEIVSRFDANQKGFIPSWQSQFPTARLIMRLRINDLLKLQDGEIEEIYRVQRLSGSKILMAPHTEANVDARDRDKNDTFKLTSKSPGKLQSASARKVHISPTGLIREG

SEQ ID NO: 381 - protein, 1153 aa, Barnesiella intestinihominis
MKNILGLDLGLSSIGWSVIRENSEEQELVAMGSRVVSLTAAELSSFTQGNGVSINSQRTQKRTQRKGYDRYQLRRTLLRNKLDTLGMLPDDSLSYLPKLQLWGLRAKAVTQRIELNELGRVLLHLNQKRGYKSIKSDFSGDKKITDYVKTVKTRYDELKEMRLTIGELFFRRLTENAFFRCKEQVYPRQAYVEEFDCIMNCQRKFYPDILTDETIRCIRDEIIYYQRPLKSCKYLVSRCEFEKRFYLNAAGKKTEAGPKVSPRTSPLFQVCRLWESINNIVVKDRRNEIVFISAEQRAALFDFLNTHEKLKGSDLLKLLGLSKTYGYRLGEQFKTGIQGNKTRVEIERALGNYPDKKRLLQFNLQEESSSMVNTETGEIIPMISLSFEQEPLYRLWHVLYSIDDREQLQSVLRQKFGIDDDEVLERLSAIDLVKAGFGNKSSKAIRRILPFLQLGMNYAEACEAAGYNHSNNYTKAENEARALLDRLPAIKKNELRQPVVEKILNQMVNVVNALMEKYGRFDEIRVELARELKQSKEERSNTYKSINKNQRENEQIAKRIVEYGVPTRSRIQKYKMWEESKHCCIYCGQPVDVGDFLRGFDVEVEHIIPKSLYFDDSFANKVCSCRSCNKEKNNRTAYDYMKSKGEKALSDYVERVNTMYTNNQISKTKWQNLLTPVDKISIDFIDRQLRESQYIARKAKEILTSICYNVTATSGSVTSFLRHVWGWDTVLHDLNFDRYKKVGLTEVIEVNHRGSVIRREQIKDWSKRFDHRHHAIDALTIACTKQAYIQRLNNLRAEEGPDFNKMSLERYIQSQPHFSVAQVREAVDRILVSFRAGKRAVTPGKRYIRKNRKRISVQSVLIPRGALSEESVYGVIHVWEKDEQGHVIQKQRAVMKYPITSINREMLDKEKVVDKRIHRILSGRLAQYNDNPKEAFAKPVYIDKECRIPIRTVRCFAKPAINTLVPLKKDDKGNPVAWVNPGNNHHVAIYRDEDGKYKERTVTFWEAVDRCRVGIPAIVTQPDTIWDNILQRNDISENVLESLPDVKWQFVLSLQQNEMFILGMNEEDYRYAMDQQDYALLNKYLYRVQKLSKSDYSFRYHTETSVEDKYDGKPNLKLSMQMGKLKRVSIKSLLGLNPHKVHISVLGEIKEIS

SEQ ID NO: 382 - protein, 1062 aa, Ralstonia syzygii
MAEKQHRWGLDIGTNSIGWAVIALIEGRPAGLVATGSRIFSDGRNPKDGSSLAVERRGPRQMRRRRDRYLRRRDRFMQALINVGLMPGDAAARKALVTENPYVLRQRGLDQALTLPEFGRALFHLNQRRGFQSNRKTDRATAKESGKVKNAIAAFRAGMGNARTVGEALARRLEDGRPVRARMVGQGKDEHYELYIAREWIAQEFDALWASQQRFHAEVLADAARDRLRAILLFQRKLLPVPVGKCFLEPNQPRVAAALPSAQRFRLMQELNHLRVMTLADKRERPLSFQERNDLLAQLVARPKCGFDMLRKIVFGANKEAYRFTIESERRKELKGCDTAAKLAKVNALGTRWQALSLDEQDRLVCLLLDGENDAVLADALREHYGLTDAQIDTLLGLSFEDGHMRLGRSALLRVLDALESGRDEQGLPLSYDKAVVAAGYPAHTADLENGERDALPYYGELLWRYTQDAPTAKNDAERKFGKIANPTVHIGLNQLRKLVNALIQRYGKPAQIVVELARNLKAGLEEKERIKKQQTANLERNERIRQKLQDAGVPDNRENRLRMRLFEELGQGNGLGTPCIYSGRQISLQRLFSNDVQVDHILPFSKTLDDSFANKVLAQHDANRYKGNRGPFEAFGANRDGYAWDDIRARAAVLPRNKRNRFAETAMQDWLHNETDFLARQLTDTAYLSRVARQYLTAICSKDDVYVSPGRLTAMLRAKWGLNRVLDGVMEEQGRPAVKNRDDHRHHAIDAVVIGATDRAMLQQVATLAARAREQDAERLIGDMPTPWPNFLEDVRAAVARCVVSHKPDHGPEGGLHNDTAYGIVAGPFEDGRYRVRHRVSLFDLKPGDLSNVRCDAPLQAELEPIFEQDDARAREVALTALAERYRQRKVWLEELMSVLPIRPRGEDGKTLPDSAPYKAYKGDSNYCYELFINERGRWDGELISTFRANQAAYRRFRNDPARFRRYTAGGRPLLMRLCINDYIAVGTAAERTIFRVVKMSENKITLAEHFEGGTLKQRDADKDDPFKYLTKSPGALRDLGARRIFVDLIGRVLDPGIKGD

SEQ ID NO: 383 - protein, 1059 aa, Wolinella succinogenes
MIERILGVDLGISSLGWAIVEYDKDDEAANRIIDCGVRLFTAAETPKKKESPNKARREARGIRRVLNRRRVRMNMIKKLFLRAGLIQDVDLDGEGGMFYSKANRADVWELRHDGLYRLLKGDELARVLIHIAKHRGYKFIGDDEADEESGKVKKAGVVLRQNFEAAGCRTVGEWLWRERGANGKKRNKHGDYEISIHRDLLVEEVEAIFVAQQEMRSTIATDALKAAYREIAFFVRPMQRIEKMVGHCTYFPEERRAPKSAPTAEKFIAISKFFSTVIIDNEGWEQKIIERKTLEELLDFAVSREKVEFRHLRKFLDLSDNEIFKGLHYKGKPKTAKKREATLFDPNEPTELEFDKVEAEKKAWISLRGAAKLREALGNEFYGRFVALGKHADEATKILTYYKDEGQKRRELTKLPLEAEMVERLVKIGFSDFLKLSLKAIRDILPAMESGARYDEAVLMLGVPHKEKSAILPPLNKTDIDILNPTVIRAFAQFRKVANALVRKYGAFDRVHFELAREINTKGEIEDIKESQRKNEKERKEAADWIAETSFQVPLTRKNILKKRLYIQQDGRCAYTGDVIELERLFDEGYCEIDHILPRSRSADDSFANKVLCLARANQQKTDRTPYEWFGHDAARWNAFETRTSAPSNRVRTGKGKIDRLLKKNFDENSEMAFKDRNLNDTRYMARAIKTYCEQYWVFKNSHTKAPVQVRSGKLTSVLRYQWGLESKDRESHTHHAVDAIIIAFSTQGMVQKLSEYYRFKETHREKERPKLAVPLANFRDAVEEATRIENTETVKEGVEVKRLLISRPPRARVTGQAHEQTAKPYPRIKQVKNKKKWRLAPIDEEKFESFKADRVASANQKNFYETSTIPRVDVYHKKGKFHLVPIYLHEMVLNELPNLSLGTNPEAMDENFFKFSIFKDDLISIQTQGTPKKPAKIIMGYFKNMHGANMVLSSINNSPCEGFTCTPVSMDKKHKDKCKLCPEENRIAGRCLQGFLDYWSQEGLRPPRKEFECDQGVKFALDVKKYQIDPLGYYYEVKQEKRLGTIPQMRSAKKLVKK

SEQ ID NO: 384 - protein, 1269 aa, Mycoplasma gallisepticum
MNNSIKSKPEVTIGLDLGVGSVGWAIVDNETNIIHHLGSRLFSQAKTAEDRRSFRGVRRLIRRRKYKLKRFVNLIWKYNSYFGFKNKEDILNNYQEQQKLHNTVLNLKSEALNAKIDPKALSWILHDYLKNRGHFYEDNRDFNVYPTKELAKYFDKYGYYKGIIDSKEDNDNKLEEELTKYKFSNKHWLEEVKKVLSNQTGLPEKFKEEYESLFSYVRNYSEGPGSINSVSPYGIYHLDEKEGKVVQKYNNIWDKTIGKCNIFPDEYRAPKNSPIAMIFNEINELSTIRSYSIYLTGWFINQEFKKAYLNKLLDLLIKTNGEKPIDARQFKKLREETIAESIGKETLKDVENEEKLEKEDHKWKLKGLKLNTNGKIQYNDLSSLAKFVHKLKQHLKLDFLLEDQYATLDKINFLQSLFVYLGKHLRYSNRVDSANLKEFSDSNKLFERILQKQKDGLFKLFEQTDKDDEKILAQTHSLSTKAMLLAITRMTNLDNDEDNQKNNDKGWNFEAIKNFDQKFIDITKKNNNLSLKQNKRYLDDRFINDAILSPGVKRILREATKVFNAILKQFSEEYDVTKVVIELARELSEEKELENTKNYKKLIKKNGDKISEGLKALGISEDEIKDILKSPTKSYKFLLWLQQDHIDPYSLKEIAFDDIFTKTEKFEIDHIIPYSISFDDSSSNKLLVLAESNQAKSNQTPYEFISSGNAGIKWEDYEAYCRKFKDGDSSLLDSTQRSKKFAKMMKTDTSSKYDIGFLARNLNDTRYATIVFRDALEDYANNHLVEDKPMFKVVCINGSVTSFLRKNFDDSSYAKKDRDKNIHHAVDASIISIFSNETKTLFNQLTQFADYKLFKNTDGSWKKIDPKTGVVTEVTDENWKQIRVRNQVSEIAKVIEKYIQDSNIERKARYSRKIENKTNISLFNDTVYSAKKVGYEDQIKRKNLKTLDIHESAKENKNSKVKRQFVYRKLVNVSLLNNDKLADLFAEKEDILMYRANPWVINLAEQIFNEYTENKKIKSQNVFEKYMLDLTKEFPEKFSEFLVKSMLRNKTAIIYDDKKNIVHRIKRLKMLSSELKENKLSNVIIRSKNQSGTKLSYQDTINSLALMIMRSIDPTAKKQYIRVPLNTLNLHLGDHDFDLHNMDAYLKKPKFVKYLKANEIGDEYKPWRVLTSGTLLIHKKDKKLMYISSFQNLNDVIEIKNLIETEYKENDDSDSKKKKKANRFLMTLSTILNDYILLDAKDNFDILGLSKNRIDEILNSKLGLDKIVK

SEQ ID NO: 385 - protein, 1138 aa, Acidothermus cellulolyticus
MGGSEVGTVPVTWRLGVDVGERSIGLAAVSYEEDKPKEILAAVSWIHDGGVGDERSGASRLALRGMARRARRLRRFRRARLRDLDMLLSELGWTPLPDKNVSPVDAWLARKRLAEEYVVDETERRRLLGYAVSHMARHRGWRNPWTTIKDLKNLPQPSDSWERTRESLEARYSVSLEPGTVGQWAGYLLQRAPGIRLNPTQQSAGRRAELSNATAFETRLRQEDVLWELRCIADVQGLPEDVVSNVIDAVFCQKRPSVPAERIGRDPLDPSQLRASRACLEFQEYRIVAAVANLRIRDGSGSRPLSLEERNAVIEALLAQTERSLTWSDIALEILKLPNESDLTSVPEEDGPSSLAYSQFAPFDETSARIAEFIAKNRRKIPTFAQWWQEQDRTSRSDLVAALADNSIAGEEEQELLVHLPDAELEALEGLALPSGRVAYSRLTLSGLTRVMRDDGVDVHNARKTCFGVDDNWRPPLPALHEATGHPVVDRNLAILRKFLSSATMRWGPPQSIVVELARGASESRERQAEEEAARRAHRKANDRIRAELRASGLSDPSPADLVRARLLELYDCHCMYCGAPISWENSELDHIVPRTDGGSNRHENLAITCGACNKEKGRRPFASWAETSNRVQLRDVIDRVQKLKYSGNMYWTRDEFSRYKKSVVARLKRRTSDPEVIQSIESTGYAAVALRDRLLSYGEKNGVAQVAVFRGGVTAEARRWLDISIERLFSRVAIFAQSTSTKRLDRRHHAVDAVVLTTLTPGVAKTLADARSRRVSAEFWRRPSDVNRHSTEEPQSPAYRQWKESCSGLGDLLISTAARDSIAVAAPLRLRPTGALHEETLRAFSEHTVGAAWKGAELRRIVEPEVYAAFLALTDPGGRFLKVSPSEDVLPADENRHIVLSDRVLGPRDRVKLFPDDRGSIRVRGGAAYIASFHHARVFRWGSSHSPSFALLRVSLADLAVAGLLRDGVDVFTAELPPWTPAWRYASIALVKAVESGDAKQVGWLVPGDELDFGPEGVTTAAGDLSMFLKYFPERHWVVTGFEDDKRINLKPAFLSAEQAEVLRTERSDRPDTLTEAGEILAQFFPRCWRATVAKVLCHPGLTVIRRTALGQPRWRRGHLPYSWRPWSADPWSGGTP

SEQ ID NO: 386 - protein, 1265 aa, Mycoplasma ovipneumoniae
MHNKKNITIGFDLGIASIGWAIIDSTTSKILDWGTRTFEERKTANERRAFRSTRRNIRRKAYRNQRFINLILKYKDLFELKNISDIQRANKKDTENYEKIISFFTEIYKKCAAKHSNILEVKVKALDSKIEKLDLIWILHDYLENRGFFYDLEEENVADKYEGIEHPSILLYDFFKKNGFFKSNSSIPKDLGGYSFSNLQWVNEIKKLFEVQEINPEFSEKFLNLFTSVRDYAKGPGSEHSASEYGIFQKDEKGKVFKKYDNIWDKTIGKCSFFVEENRSPVNYPSYEIFNLLNQLINLSTDLKTTNKKIWQLSSNDRNELLDELLKVKEKAKIISISLKKNEIKKIILKDFGFEKSDIDDQDTIEGRKIIKEEPTTKLEVTKHLLATIYSHSSDSNWININNILEFLPYLDAICIILDREKSRGQDEVLKKLTEKNIFEVLKIDREKQLDFVKSIFSNTKFNFKKIGNFSLKAIREFLPKMFEQNKNSEYLKWKDEEIRRKWEEQKSKLGKTDKKTKYLNPRIFQDEIISPGTKNTFEQAVLVLNQIIKKYSKENIIDAIIIESPREKNDKKTIEEIKKRNKKGKGKTLEKLFQILNLENKGYKLSDLETKPAKLLDRLRFYHQQDGIDLYTLDKINIDQLINGSQKYEIEHIIPYSMSYDNSQANKILTEKAENLKKGKLIASEYIKRNGDEFYNKYYEKAKELFINKYKKNKKLDSYVDLDEDSAKNRFRFLTLQDYDEFQVEFLARNLNDTRYSTKLFYHALVEHFENNEFFTYIDENSSKHKVKISTIKGHVTKYFRAKPVQKNNGPNENLNNNKPEKIEKNRENNEHHAVDAAIVAIIGNKNPQIANLLTLADNKTDKKFLLHDENYKENIETGELVKIPKFEVDKLAKVEDLKKIIQEKYEEAKKHTAIKFSRKTRTILNGGLSDETLYGFKYDEKEDKYFKIIKKKLVTSKNEELKKYFENPFGKKADGKSEYTVLMAQSHLSEFNKLKEIFEKYNGFSNKTGNAFVEYMNDLALKEPTLKAEIESAKSVEKLLYYNFKPSDQFTYHDNINNKSFKRFYKNIRIIEYKSIPIKFKILSKHDGGKSFKDTLFSLYSLVYKVYENGKESYKSIPVTSQMRNFGIDEFDFLDENLYNKEKLDIYKSDFAKPIPVNCKPVFVLKKGSILKKKSLDIDDFKETKETEEGNYYFISTISKRFNRDTAYGLKPLKLSVVKPVAEPSTNPIFKEYIPIHLDELGNEYPVKIKEHTDDEKLMCTIK

SEQ ID NO: 387 - RNA, 20 nt, synthetic construct
  misc_feature 1..20: note = Synthetic
  source 1..20: mol_type = other RNA
accgcgaccctccgggatac

SEQ ID NO: 388 - RNA, 20 nt, synthetic construct
  misc_feature 1..20: note = Synthetic
  source 1..20: mol_type = other RNA
tccgggataccggtatgccg

SEQ ID NO: 389 - RNA, 20 nt, synthetic construct
  misc_feature 1..20: note = Synthetic
  source 1..20: mol_type = other RNA
ataccggtatgccgcggcca

SEQ ID NO: 390 - RNA, 17 nt, synthetic construct
  misc_feature 1..17: note = Synthetic
  source 1..17: mol_type = other RNA
gcgaccctccgggatac

SEQ ID NO: 391 - RNA, 17 nt, synthetic construct
  misc_feature 1..17: note = Synthetic
  source 1..17: mol_type = other RNA
gggataccggtatgccg

SEQ ID NO: 392 - RNA, 17 nt, synthetic construct
  misc_feature 1..17: note = Synthetic
  source 1..17: mol_type = other RNA
ccggtatgccgcggcca

SEQ ID NO: 393 - RNA, 20 nt, synthetic construct
  misc_feature 1..20: note = Synthetic
  source 1..20: mol_type = other RNA
gtcgagttcgacgccctgct

SEQ ID NO: 394 - RNA, 20 nt, synthetic construct
  misc_feature 1..20: note = Synthetic
  source 1..20: mol_type = other RNA
tcgagttcgacgccctgctg

SEQ ID NO: 395 - RNA, 20 nt, synthetic construct
  misc_feature 1..20: note = Synthetic
  source 1..20: mol_type = other RNA
cctgtcgctcgtgcgctttc

SEQ ID NO: 396 - RNA, 20 nt, synthetic construct
  misc_feature 1..20: note = Synthetic
  source 1..20: mol_type = other RNA
ctcgtgcgctttctggagct

SEQ ID NO: 397 - RNA, 20 nt, synthetic construct
  misc_feature 1..20: note = Synthetic
  source 1..20: mol_type = other RNA
tcgtgcgctttctggagctc

SEQ ID NO: 398 - RNA, 17 nt, synthetic construct
  misc_feature 1..17: note = Synthetic
  source 1..17: mol_type = other RNA
gagttcgacgccctgct

SEQ ID NO: 399 - RNA, 17 nt, synthetic construct
  misc_feature 1..17: note = Synthetic
  source 1..17: mol_type = other RNA
agttcgacgccctgctg

SEQ ID NO: 400 - RNA, 17 nt, synthetic construct
  misc_feature 1..17: note = Synthetic
  source 1..17: mol_type = other RNA
gtcgctcgtgcgctttc

SEQ ID NO: 401 - RNA, 17 nt, synthetic construct
  misc_feature 1..17: note = Synthetic
  source 1..17: mol_type = other RNA
gtgcgctttctggagct

SEQ ID NO: 402 - RNA, 17 nt, synthetic construct
  misc_feature 1..17: note = Synthetic
  source 1..17: mol_type = other RNA
tgcgctttctggagctc

SEQ ID NO: 403 - RNA, 20 nt, synthetic construct
  misc_feature 1..20: note = Synthetic
  source 1..20: mol_type = other RNA
tctggagctcgggttgtcgg

SEQ ID NO: 404 - RNA, 20 nt, synthetic construct
  misc_feature 1..20: note = Synthetic
  source 1..20: mol_type = other RNA
gtgcgtgtgtaccaagtttc

SEQ ID NO: 405 - RNA, 20 nt, synthetic construct
  misc_feature 1..20: note = Synthetic
  source 1..20: mol_type = other RNA
gtgtaccaagtttccggagc

SEQ ID NO: 406 - RNA, 17 nt, synthetic construct
  misc_feature 1..17: note = Synthetic
  source 1..17: mol_type = other RNA
ggagctcgggttgtcgg

SEQ ID NO: 407 - RNA, 17 nt, synthetic construct
  misc_feature 1..17: note = Synthetic
  source 1..17: mol_type = other RNA
cgtgtgtaccaagtttc

SEQ ID NO: 408 - RNA, 17 nt, synthetic construct
  misc_feature 1..17: note = Synthetic
  source 1..17: mol_type = other RNA
taccaagtttccggagc

SEQ ID NO: 409 - RNA, 20 nt, synthetic construct
  misc_feature 1..20: note = Synthetic
  source 1..20: mol_type = other RNA
cgaggggcgcgtacagttcg

SEQ ID NO: 410 - RNA, 20 nt, synthetic construct
  misc_feature 1..20: note = Synthetic
  source 1..20: mol_type = other RNA
cagccgctgattgcccgcga

SEQ ID NO: 411 - RNA, 20 nt, synthetic construct
  misc_feature 1..20: note = Synthetic
  source 1..20: mol_type = other RNA
tgaccaagattatcgaccgc

SEQ ID NO: 412 - RNA, 20 nt, synthetic construct
  misc_feature 1..20: note = Synthetic
  source 1..20: mol_type = other RNA
gaccaagattatcgaccgcc

SEQ ID NO: 413 - RNA, 17 nt, synthetic construct
  misc_feature 1..17: note = Synthetic
  source 1..17: mol_type = other RNA
ggggcgcgtacagttcg

SEQ ID NO: 414 - RNA, 17 nt, synthetic construct
  misc_feature 1..17: note = Synthetic
  source 1..17: mol_type = other RNA
ccgctgattgcccgcga

SEQ ID NO: 415 - RNA, 17 nt, synthetic construct
  misc_feature 1..17: note = Synthetic
  source 1..17: mol_type = other RNA
ccaagattatcgaccgc

SEQ ID NO: 416 - RNA, 17 nt, synthetic construct
  misc_feature 1..17: note = Synthetic
  source 1..17: mol_type = other RNA
caagattatcgaccgcc

SEQ ID NO: 417 - RNA, 20 nt, synthetic construct
  misc_feature 1..20: note = Synthetic
  source 1..20: mol_type = other RNA
aggccatcgccctgctcacg

SEQ ID NO: 418 - RNA, 17 nt, synthetic construct
  misc_feature 1..17: note = Synthetic
  source 1..17: mol_type = other RNA
ccatcgccctgctcacg

SEQ ID NO: 419 - RNA, 20 nt, synthetic construct
  misc_feature 1..20: note = Synthetic
  source 1..20: mol_type = other RNA
catcgccctgctcacggggg

SEQ ID NO: 420 - RNA, 17 nt, synthetic construct
  misc_feature 1..17: note = Synthetic
  source 1..17: mol_type = other RNA
cgccctgctcacggggg

SEQ ID NO: 421 - RNA, 20 nt, synthetic construct
  misc_feature 1..20: note = Synthetic
  source 1..20: mol_type = other RNA
gctgttggatggcgcgcaac

SEQ ID NO: 422 - RNA, 17 nt, synthetic construct
  misc_feature 1..17: note = Synthetic
  source 1..17: mol_type = other RNA
gttggatggcgcgcaac

SEQ ID NO: 423 - RNA, 20 nt, synthetic construct
  misc_feature 1..20: note = Synthetic
  source 1..20: mol_type = other RNA
cgccgatacccgtcccgtcc

SEQ ID NO: 424 - RNA, 17 nt, synthetic construct
  misc_feature 1..17: note = Synthetic
  source 1..17: mol_type = other RNA
cgatacccgtcccgtcc

SEQ ID NO: 425 - RNA, 20 nt, synthetic construct
  misc_feature 1..20: note = Synthetic
  source 1..20: mol_type = other RNA
attgtgtgtgggttgctcga

SEQ ID NO: 426 - RNA, 20 nt, synthetic construct
  misc_feature 1..20: note = Synthetic
  source 1..20: mol_type = other RNA
ttgtgtgtgggttgctcgat

SEQ ID NO: 427 - RNA, 17 nt, synthetic construct
  misc_feature 1..17: note = Synthetic
  source 1..17: mol_type = other RNA
gtgtgtgggttgctcga

SEQ ID NO: 428 - RNA, 17 nt, synthetic construct
  misc_feature 1..17: note = Synthetic
  source 1..17: mol_type = other RNA
tgtgtgggttgctcgat

SEQ ID NO: 429 - RNA, 20 nt, synthetic construct
  misc_feature 1..20: note = Synthetic
  source 1..20: mol_type = other RNA
gatggggtgcgggccgtcgc

SEQ ID NO: 430 - RNA, 20 nt, synthetic construct
  misc_feature 1..20: note = Synthetic
  source 1..20: mol_type = other RNA
gggccgtcgcgggcaatcag

SEQ ID NO: 431 - RNA, 17 nt, synthetic construct
  misc_feature 1..17: note = Synthetic
  source 1..17: mol_type = other RNA
ggggtgcgggccgtcgc

SEQ ID NO: 432 - RNA, 17 nt, synthetic construct
  misc_feature 1..17: note = Synthetic
  source 1..17: mol_type = other RNA
ccgtcgcgggcaatcag

SEQ ID NO: 433 - RNA, 20 nt, synthetic construct
  misc_feature 1..20: note = Synthetic
  source 1..20: mol_type = other RNA
cgcgggcaatcagcggctgg

SEQ ID NO: 434 - RNA, 17 nt, synthetic construct
  misc_feature 1..17: note = Synthetic
  source 1..17: mol_type = other RNA
gggcaatcagcggctgg

SEQ ID NO: 435 - RNA, 20 nt, synthetic construct
  misc_feature 1..20: note = Synthetic
  source 1..20: mol_type = other RNA
tcgttcatgtaggccagctc

SEQ ID NO: 436 - RNA, 20 nt, synthetic construct
  misc_feature 1..20: note = Synthetic
  source 1..20: mol_type = other RNA
gtaggccagctccggaaact

SEQ ID NO: 437 - RNA, 20 nt, synthetic construct
  misc_feature 1..20: note = Synthetic
  source 1..20: mol_type = other RNA
ccagaaagcgcacgagcgac

SEQ ID NO: 438 - RNA, 20 nt, synthetic construct
  misc_feature 1..20: note = Synthetic
  source 1..20: mol_type = other RNA
cagaaagcgcacgagcgaca

SEQ ID NO: 439 - RNA, 20 nt, synthetic construct
  misc_feature 1..20: note = Synthetic
  source 1..20: mol_type = other RNA
tgttgcaatacgaccccagc

SEQ ID NO: 440 - RNA, 20 nt, synthetic construct
  misc_feature 1..20: note = Synthetic
  source 1..20: mol_type = other RNA
gttgcaatacgaccccagca

SEQ ID NO: 441 - RNA, 20 nt, synthetic construct
  misc_feature 1..20: note = Synthetic
  source 1..20: mol_type = other RNA
cgtcgaactcgacgtcgtac

SEQ ID NO: 442 - RNA, 20 nt, synthetic construct
  misc_feature 1..20: note = Synthetic
  source 1..20: mol_type = other RNA
gtcgtacaggctgtttgcat

SEQ ID NO: 443 - RNA, 17 nt, synthetic construct
  misc_feature 1..17: note = Synthetic
  source 1..17: mol_type = other RNA
ttcatgtaggccagctc

SEQ ID NO: 444 - RNA, 17 nt, synthetic construct
  misc_feature 1..17: note = Synthetic
  source 1..17: mol_type = other RNA
ggccagctccggaaact

SEQ ID NO: 445 - RNA, 17 nt, synthetic construct
  misc_feature 1..17: note = Synthetic
  source 1..17: mol_type = other RNA
gaaagcgcacgagcgac

SEQ ID NO: 446 - RNA, 17 nt, synthetic construct
  misc_feature 1..17: note = Synthetic
  source 1..17: mol_type = other RNA
aaagcgcacgagcgaca

SEQ ID NO: 447 - RNA, 17 nt, synthetic construct
  misc_feature 1..17: note = Synthetic
  source 1..17: mol_type = other RNA
tgcaatacgaccccagc

SEQ ID NO: 448 - RNA, 17 nt, synthetic construct
  misc_feature 1..17: note = Synthetic
  source 1..17: mol_type = other RNA
gcaatacgaccccagca

SEQ ID NO: 449 - RNA, 17 nt, synthetic construct
  misc_feature 1..17: note = Synthetic
  source 1..17: mol_type = other RNA
cgaactcgacgtcgtac

SEQ ID NO: 450 - RNA, 17 nt, synthetic construct
  misc_feature 1..17: note = Synthetic
  source 1..17: mol_type = other RNA
gtacaggctgtttgcat

SEQ ID NO: 451 - RNA, 20 nt, synthetic construct
  misc_feature 1..20: note = Synthetic
  source 1..20: mol_type = other RNA
cacctcgatcgtgctaagga

SEQ ID NO: 452 - RNA, 17 nt, synthetic construct
  misc_feature 1..17: note = Synthetic
  source 1..17: mol_type = other RNA
ctcgatcgtgctaagga

SEQ ID NO: 453 - RNA, 20 nt, synthetic construct
  misc_feature 1..20: note = Synthetic
  source 1..20: mol_type = other RNA
gcaccatggccgcggcatac

SEQ ID NO: 454 - RNA, 17 nt, synthetic construct
  misc_feature 1..17: note = Synthetic
  source 1..17: mol_type = other RNA
ccatggccgcggcatac

SEQ ID NO: 455 - RNA, 20 nt, synthetic construct
  misc_feature 1..20: note = Synthetic
  source 1..20: mol_type = other RNA
accggtatcccggagggtcg

SEQ ID NO: 456 - RNA, 20 nt, synthetic construct
  misc_feature 1..20: note = Synthetic
  source 1..20: mol_type = other RNA
gtatcccggagggtcgcggt

SEQ ID NO: 457 - RNA, 20 nt, synthetic construct
  misc_feature 1..20: note = Synthetic
  source 1..20: mol_type = other RNA
tatcccggagggtcgcggtt

SEQ ID NO: 458 - RNA, 17 nt, synthetic construct
  misc_feature 1..17: note = Synthetic
  source 1..17: mol_type = other RNA
ggtatcccggagggtcg

SEQ ID NO: 459 - RNA, 17 nt, synthetic construct
  misc_feature 1..17: note = Synthetic
  source 1..17: mol_type = other RNA
tcccggagggtcgcggt

SEQ ID NO: 460 - RNA, 17 nt, synthetic construct
  misc_feature 1..17: note = Synthetic
  source 1..17: mol_type = other RNA
cccggagggtcgcggtt

SEQ ID NO: 461 - RNA, 20 nt, synthetic construct
  misc_feature 1..20: note = Synthetic
  source 1..20: mol_type = other RNA
cgctcccaaccgcgaccctc

SEQ ID NO: 462 - RNA, 20 nt, synthetic construct
  misc_feature 1..20: note = Synthetic
  source 1..20: mol_type = other RNA
gctcccaaccgcgaccctcc

SEQ ID NO: 463 - RNA, 20 nt, synthetic construct
  misc_feature 1..20: note = Synthetic
  source 1..20: mol_type = other RNA
gccgcggccatggtgccgac

SEQ ID NO: 464 - RNA, 20 nt, synthetic construct
  misc_feature 1..20: note = Synthetic
  source 1..20: mol_type = other RNA
ccgcggccatggtgccgacc

SEQ ID NO: 465 - RNA, 20 nt, synthetic construct
  misc_feature 1..20: note = Synthetic
  source 1..20: mol_type = other RNA
gtccctccttagcacgatcg

SEQ ID NO: 466 - RNA, 20 nt, synthetic construct
  misc_feature 1..20: note = Synthetic
  source 1..20: mol_type = other RNA
cctccttagcacgatcgagg

SEQ ID NO: 467 - RNA, 20 nt, synthetic construct
  misc_feature 1..20: note = Synthetic
  source 1..20: mol_type = other RNA
cgtcgagttcgacgccctgc

SEQ ID NO: 468 - RNA, 20 nt, synthetic construct
  misc_feature 1..20: note = Synthetic
  source 1..20: mol_type = other RNA
ctttctggagctcgggttgt

SEQ ID NO: 469 - RNA, 20 nt, synthetic construct
  misc_feature 1..20: note = Synthetic
  source 1..20: mol_type = other RNA
ggagctggcctacatgaacg

SEQ ID NO: 470 - RNA, 20 nt, synthetic construct
  misc_feature 1..20: note = Synthetic
  source 1..20: mol_type = other RNA
gagctggcctacatgaacga

SEQ ID NO: 471 - RNA, 20 nt, synthetic construct
  misc_feature 1..20: note = Synthetic
  source 1..20: mol_type = other RNA
agctggcctacatgaacgag

SEQ ID NO: 472 - RNA, 20 nt, synthetic construct
  misc_feature 1..20: note = Synthetic
  source 1..20: mol_type = other RNA
cctgaacgccgccttcagcc

SEQ ID NO: 473 - RNA, 20 nt, synthetic construct
  misc_feature 1..20: note = Synthetic
  source 1..20: mol_type = other RNA
cgccttcagcctggccaccg

SEQ ID NO: 474 - RNA, 20 nt, synthetic construct
  misc_feature 1..20: note = Synthetic
  source 1..20: mol_type = other RNA
cgaggccatcgccctgctca

SEQ ID NO: 475 - RNA, 20 nt, synthetic construct
  misc_feature 1..20: note = Synthetic
  source 1..20: mol_type = other RNA
gaggccatcgccctgctcac

SEQ ID NO: 476 - RNA, 20 nt, synthetic construct
  misc_feature 1..20: note = Synthetic
  source 1..20: mol_type = other RNA
ggccatcgccctgctcacgg

SEQ ID NO: 477 - RNA, 20 nt, synthetic construct
  misc_feature 1..20: note = Synthetic
  source 1..20: mol_type = other RNA
cctgctcacgggggaggccc

SEQ ID NO: 478 - RNA, 20 nt, synthetic construct
  misc_feature 1..20: note = Synthetic
  source 1..20: mol_type = other RNA
ctcacgggggaggccctgga

SEQ ID NO: 479 - RNA, 20 nt, synthetic construct
  misc_feature 1..20: note = Synthetic
  source 1..20: mol_type = other RNA
tcacgggggaggccctggac

SEQ ID NO: 480 - RNA, 20 nt, synthetic construct
  misc_feature 1..20: note = Synthetic
  source 1..20: mol_type = other RNA
gggggaggccctggacggga

SEQ ID NO: 481 - RNA, 20 nt, synthetic construct
  misc_feature 1..20: note = Synthetic
  source 1..20: mol_type = other RNA
ggggaggccctggacgggac

SEQ ID NO: 482 - RNA, 20 nt, synthetic construct
  misc_feature 1..20: note = Synthetic
  source 1..20: mol_type = other RNA
gccctggacgggacgggtat

SEQ ID NO: 483 - RNA, 20 nt, synthetic construct
  misc_feature 1..20: note = Synthetic
  source 1..20: mol_type = other RNA
gccgatacccgtcccgtcca

SEQ ID NO: 484 - RNA, 20 nt, synthetic construct
  misc_feature 1..20: note = Synthetic
  source 1..20: mol_type = other RNA
ccagggcctcccccgtgagc

SEQ ID NO: 485 - RNA, 20 nt, synthetic construct
  misc_feature 1..20: note = Synthetic
  source 1..20: mol_type = other RNA
cagggcctcccccgtgagca

SEQ ID NO: 486 - RNA, 20 nt, synthetic construct
  misc_feature 1..20: note = Synthetic
  source 1..20: mol_type = other RNA
ctcccccgtgagcagggcga

SEQ ID NO: 487 - RNA, 20 nt, synthetic construct
  misc_feature 1..20: note = Synthetic
  source 1..20: mol_type = other RNA
cgtgagcagggcgatggcct

SEQ ID NO: 488 - RNA, 20 nt, synthetic construct
  misc_feature 1..20: note = Synthetic
  source 1..20: mol_type = other RNA
gagcagggcgatggcctcgg

SEQ ID NO: 489 - RNA, 20 nt, synthetic construct
  misc_feature 1..20: note = Synthetic
  source 1..20: mol_type = other RNA
gggcgatggcctcggtggcc

SEQ ID NO: 490 - RNA, 20 nt, synthetic construct
  misc_feature 1..20: note = Synthetic
  source 1..20: mol_type = other RNA
ggcctcggtggccaggctga

SEQ ID NO: 491 - RNA, 20 nt, synthetic construct
  misc_feature 1..20: note = Synthetic
  source 1..20: mol_type = other RNA
ctcggtggccaggctgaagg

SEQ ID NO: 492 - RNA, 20 nt, synthetic construct
  misc_feature 1..20: note = Synthetic
  source 1..20: mol_type = other RNA
ccaggctgaaggcggcgttc

SEQ ID NO: 493 - RNA, 20 nt, synthetic construct
  misc_feature 1..20: note = Synthetic
  source 1..20: mol_type = other RNA
caggctgaaggcggcgttca

SEQ ID NO: 494 - RNA, 20 nt, synthetic construct
  misc_feature 1..20: note = Synthetic
  source 1..20: mol_type = other RNA
tgaaggcggcgttcagggcc

SEQ ID NO: 495 - RNA, 20 nt, synthetic construct
  misc_feature 1..20: note = Synthetic
  source 1..20: mol_type = other RNA
aggcggcgttcagggcccgg

SEQ ID NO: 496 - RNA, 20 nt, synthetic construct
  misc_feature 1..20: note = Synthetic
  source 1..20: mol_type = other RNA
ggcccggcggtcgataatct

SEQ ID NO: 497 - RNA, 20 nt, synthetic construct
  misc_feature 1..20: note = Synthetic
  source 1..20: mol_type = other RNA
cttggtcatgtaattgtgtg

SEQ ID NO: 498 - RNA, 20 nt, synthetic construct
  misc_feature 1..20: note = Synthetic
  source 1..20: mol_type = other RNA
ttggtcatgtaattgtgtgt

SEQ ID NO: 499 - RNA, 20 nt, synthetic construct
  misc_feature 1..20: note = Synthetic
  source 1..20: mol_type = other RNA
tgtgtgtgggttgctcgatg

SEQ ID NO: 500 - RNA, 20 nt, synthetic construct
  misc_feature 1..20: note = Synthetic
  source 1..20: mol_type = other RNA
gtgggttgctcgatggggtg

SEQ ID NO: 501 - RNA, 20 nt, synthetic construct
  misc_feature 1..20: note = Synthetic
  source 1..20: mol_type = other RNA
tgggttgctcgatggggtgc

SEQ ID NO: 502 - RNA, 20 nt, synthetic construct
  misc_feature 1..20: note = Synthetic
  source 1..20: mol_type = other RNA
cgatggggtgcgggccgtcg

SEQ ID NO: 503 - RNA, 20 nt, synthetic construct
  misc_feature 1..20: note = Synthetic
  source 1..20: mol_type = other RNA
cgtcgcgggcaatcagcggc

SEQ ID NO: 504 - RNA, 20 nt, synthetic construct
  misc_feature 1..20: note = Synthetic
  source 1..20: mol_type = other RNA
tacgcgcccctcgttcatgt

SEQ ID NO: 505 - RNA, 20 nt, synthetic construct
  misc_feature 1..20: note = Synthetic
  source 1..20: mol_type = other RNA
tgtttgcatcggagcgcacg

SEQ ID NO: 506 - RNA, 20 nt, synthetic construct
  misc_feature 1..20: note = Synthetic
  source 1..20: mol_type = other RNA
gtttgcatcggagcgcacgc

SEQ ID NO: 507 - RNA, 20 nt, synthetic construct
  misc_feature 1..20: note = Synthetic
  source 1..20: mol_type = other RNA
cgcgggaaaaaaaatcaaac

SEQ ID NO: 508 - RNA, 20 nt, synthetic construct
  misc_feature 1..20: note = Synthetic
  source 1..20: mol_type = other RNA
acgccacctcgatcgtgcta

SEQ ID NO: 509 - RNA, 20 nt, synthetic construct
  misc_feature 1..20: note = Synthetic
  source 1..20: mol_type = other RNA
ccacctcgatcgtgctaagg

SEQ ID NO: 510 - RNA, 20 nt, synthetic construct
  misc_feature 1..20: note = Synthetic
  source 1..20: mol_type = other RNA
gatcgtgctaaggagggacc

SEQ ID NO: 511 - RNA, 20 nt, synthetic construct
  misc_feature 1..20: note = Synthetic
  source 1..20: mol_type = other RNA
gtgctaaggagggacccggt

SEQ ID NO: 512 - RNA, 20 nt, synthetic construct
  misc_feature 1..20: note = Synthetic
  source 1..20: mol_type = other RNA
gagggacccggtcggcacca

SEQ ID NO: 513 - RNA, 20 nt, synthetic construct
  misc_feature 1..20: note = Synthetic
  source 1..20: mol_type = other RNA
cccggtcggcaccatggccg

SEQ ID NO: 514 - RNA, 20 nt, synthetic construct
  misc_feature 1..20: note = Synthetic
  source 1..20: mol_type = other RNA
gccgcggcataccggtatcc

SEQ ID NO: 515 - RNA, 20 nt, synthetic construct
  misc_feature 1..20: note = Synthetic
  source 1..20: mol_type = other RNA
gcggcataccggtatcccgg

SEQ ID NO: 516 - RNA, 20 nt, synthetic construct
  misc_feature 1..20: note = Synthetic
  source 1..20: mol_type = other RNA
cggcataccggtatcccgga

SEQ ID NO: 517 - RNA, 20 nt, synthetic construct
  misc_feature 1..20: note = Synthetic
  source 1..20: mol_type = other RNA
cggagggtcgcggttgggag

SEQ ID NO: 518 - RNA, 17 nt, synthetic construct
  misc_feature 1..17: note = Synthetic
  source 1..17: mol_type = other RNA
tcccaaccgcgaccctc

SEQ ID NO: 519 - RNA, 17 nt, synthetic construct
  misc_feature 1..17: note = Synthetic
  source 1..17: mol_type = other RNA
cccaaccgcgaccctcc

SEQ ID NO: 520 - RNA, 17 nt, synthetic construct
  misc_feature 1..17: note = Synthetic
  source 1..17: mol_type = other RNA
gcggccatggtgccgac

SEQ ID NO: 521 - RNA, 17 nt, synthetic construct
  misc_feature 1..17: note = Synthetic
  source 1..17: mol_type = other RNA
cggccatggtgccgacc

SEQ ID NO: 522 - RNA, 17 nt, synthetic construct
  misc_feature 1..17: note = Synthetic
  source 1..17: mol_type = other RNA
cctccttagcacgatcg

SEQ ID NO: 523 - RNA, 17 nt, synthetic construct
  misc_feature 1..17: note = Synthetic
  source 1..17: mol_type = other RNA
ccttagcacgatcgagg

SEQ ID NO: 524 - RNA, 17 nt, synthetic construct
  misc_feature 1..17: note = Synthetic
  source 1..17: mol_type = other RNA
cgagttcgacgccctgc

SEQ ID NO: 525 - RNA, 17 nt, synthetic construct
  misc_feature 1..17: note = Synthetic
  source 1..17: mol_type = other RNA
tctggagctcgggttgt

SEQ ID NO: 526 - RNA, 17 nt, synthetic construct
  misc_feature 1..17: note = Synthetic
  source 1..17: mol_type = other RNA
gctggcctacatgaacg

SEQ ID NO: 527 - RNA, 17 nt, synthetic construct
  misc_feature 1..17: note = Synthetic
  source 1..17: mol_type = other RNA
ctggcctacatgaacga

SEQ ID NO: 528 - RNA, 17 nt, synthetic construct
  misc_feature 1..17: note = Synthetic
  source 1..17: mol_type = other RNA
tggcctacatgaacgag

SEQ ID NO: 529 - RNA, 17 nt, synthetic construct
  misc_feature 1..17: note = Synthetic
  source 1..17: mol_type = other RNA
gaacgccgccttcagcc

SEQ ID NO: 530 - RNA, 17 nt, synthetic construct
  misc_feature 1..17: note = Synthetic
  source 1..17: mol_type = other RNA
cttcagcctggccaccg

SEQ ID NO: 531 - RNA, 17 nt, synthetic construct
  misc_feature 1..17: note = Synthetic
  source 1..17: mol_type = other RNA
ggccatcgccctgctca

SEQ ID NO: 532 - RNA, 17 nt, synthetic construct
  misc_feature 1..17: note = Synthetic
  source 1..17: mol_type = other RNA
gccatcgccctgctcac

SEQ ID NO: 533 - RNA, 17 nt, synthetic construct
  misc_feature 1..17: note = Synthetic
  source 1..17: mol_type = other RNA
catcgccctgctcacgg

SEQ ID NO: 534 - RNA, 17 nt, synthetic construct
  misc_feature 1..17: note = Synthetic
  source 1..17: mol_type = other RNA
gctcacgggggaggccc

SEQ ID NO: 535 - RNA, 17 nt, synthetic construct
  misc_feature 1..17: note = Synthetic
  source 1..17: mol_type = other RNA
acgggggaggccctgga

SEQ ID NO: 536 - RNA, 17 nt, synthetic construct
  misc_feature 1..17: note = Synthetic
  source 1..17: mol_type = other RNA
cgggggaggccctggac

SEQ ID NO: 537 - RNA, 17 nt, synthetic construct
  misc_feature 1..17: note = Synthetic
  source 1..17: mol_type = other RNA
ggaggccctggacggga

SEQ ID NO: 538 - RNA, 17 nt, synthetic construct
  misc_feature 1..17: note = Synthetic
  source 1..17: mol_type = other RNA
gaggccctggacgggac

SEQ ID NO: 539 - RNA, 17 nt, synthetic construct
  misc_feature 1..17: note = Synthetic
  source 1..17: mol_type = other RNA
ctggacgggacgggtat

SEQ ID NO: 540 - RNA, 17 nt, synthetic construct
  misc_feature 1..17: note = Synthetic
  source 1..17: mol_type = other RNA
gatacccgtcccgtcca

SEQ ID NO: 541 - RNA, 17 nt, synthetic construct
  misc_feature 1..17: note = Synthetic
  source 1..17: mol_type = other RNA
gggcctcccccgtgagc

SEQ ID NO: 542 - RNA, 17 nt, synthetic construct
  misc_feature 1..17: note = Synthetic
  source 1..17: mol_type = other RNA
ggcctcccccgtgagca

SEQ ID NO: 543 - RNA, 17 nt, synthetic construct
  misc_feature 1..17: note = Synthetic
  source 1..17: mol_type = other RNA
ccccgtgagcagggcga

SEQ ID NO: 544 - RNA, 17 nt, synthetic construct
  misc_feature 1..17: note = Synthetic
  source 1..17: mol_type = other RNA
gagcagggcgatggcct

SEQ ID NO: 545 - RNA, 17 nt, synthetic construct
  misc_feature 1..17: note = Synthetic
  source 1..17: mol_type = other RNA
cagggcgatggcctcgg

SEQ ID NO: 546 - RNA, 17 nt, synthetic construct
  misc_feature 1..17: note = Synthetic
  source 1..17: mol_type = other RNA
cgatggcctcggtggcc

SEQ ID NO: 547 - RNA, 17 nt, synthetic construct
  misc_feature 1..17: note = Synthetic
  source 1..17: mol_type = other RNA
ctcggtggccaggctga

SEQ ID NO: 548 - RNA, 17 nt, synthetic construct
  misc_feature 1..17: note = Synthetic
  source 1..17: mol_type = other RNA
ggtggccaggctgaagg

SEQ ID NO: 549 - RNA, 17 nt, synthetic construct
  misc_feature 1..17: note = Synthetic
  source 1..17: mol_type = other RNA
ggctgaaggcggcgttc

SEQ ID NO: 550 - RNA, 17 nt, synthetic construct
  misc_feature 1..17: note = Synthetic
  source 1..17: mol_type = other RNA
gctgaaggcggcgttca

SEQ ID NO: 551 - RNA, 17 nt, synthetic construct
  misc_feature 1..17: note = Synthetic
  source 1..17: mol_type = other RNA
aggcggcgttcagggcc

SEQ ID NO: 552 - RNA, 17 nt, synthetic construct
  misc_feature 1..17: note = Synthetic
  source 1..17: mol_type = other RNA
cggcgttcagggcccgg

SEQ ID NO: 553 - RNA, 17 nt, synthetic construct
  misc_feature 1..17: note = Synthetic
  source 1..17: mol_type = other RNA
ccggcggtcgataatct

SEQ ID NO: 554 - RNA, 17 nt, synthetic construct
  misc_feature 1..17: note = Synthetic
  source 1..17: mol_type = other RNA
ggtcatgtaattgtgtg

SEQ ID NO: 555 - RNA, 17 nt, synthetic construct
  misc_feature 1..17: note = Synthetic
  source 1..17: mol_type = other RNA
gtcatgtaattgtgtgt

SEQ ID NO: 556 - RNA, 17 nt, synthetic construct
  misc_feature 1..17: note = Synthetic
  source 1..17: mol_type = other RNA
gtgtgggttgctcgatg

SEQ ID NO: 557 - RNA, 17 nt, synthetic construct
  misc_feature 1..17: note = Synthetic
  source 1..17: mol_type = other RNA
ggttgctcgatggggtg

SEQ ID NO: 558 - RNA, 17 nt, synthetic construct
  misc_feature 1..17: note = Synthetic
  source 1..17: mol_type = other RNA
gttgctcgatggggtgc

SEQ ID NO: 559 - RNA, 17 nt, synthetic construct
  misc_feature 1..17: note = Synthetic
  source 1..17: mol_type = other RNA
tggggtgcgggccgtcg

SEQ ID NO: 560 - RNA, 17 nt, synthetic construct
  misc_feature 1..17: note = Synthetic
  source 1..17: mol_type = other RNA
cgcgggcaatcagcggc

SEQ ID NO: 561 - RNA, 17 nt, synthetic construct
  misc_feature 1..17: note = Synthetic
  source 1..17: mol_type = other RNA
gcgcccctcgttcatgt

SEQ ID NO: 562 - RNA, 17 nt, synthetic construct
  misc_feature 1..17: note = Synthetic
  source 1..17: mol_type = other RNA
ttgcatcggagcgcacg

SEQ ID NO: 563 - RNA, 17 nt, synthetic construct
  misc_feature 1..17: note = Synthetic
  source 1..17: mol_type = other RNA
tgcatcggagcgcacgc

SEQ ID NO: 564 - RNA, 17 nt, synthetic construct
  misc_feature 1..17: note = Synthetic
  source 1..17: mol_type = other RNA
gggaaaaaaaatcaaac

SEQ ID NO: 565 - RNA, 17 nt, synthetic construct
  misc_feature 1..17: note = Synthetic
  source 1..17: mol_type = other RNA
ccacctcgatcgtgcta

SEQ ID NO: 566 - RNA, 17 nt, synthetic construct
  misc_feature 1..17: note = Synthetic
  source 1..17: mol_type = other RNA
cctcgatcgtgctaagg

SEQ ID NO: 567 - RNA, 17 nt, synthetic construct
  misc_feature 1..17: note = Synthetic
  source 1..17: mol_type = other RNA
cgtgctaaggagggacc

SEQ ID NO: 568 - RNA, 17 nt, synthetic construct
  misc_feature 1..17: note = Synthetic
  source 1..17: mol_type = other RNA
ctaaggagggacccggt

SEQ ID NO: 569 - RNA, 17 nt, synthetic construct
  misc_feature 1..17: note = Synthetic
  source 1..17: mol_type = other RNA
ggacccggtcggcacca

SEQ ID NO: 570 - RNA, 17 nt, synthetic construct
  misc_feature 1..17: note = Synthetic
  source 1..17: mol_type = other RNA
ggtcggcaccatggccg

SEQ ID NO: 571 - RNA, 17 nt, synthetic construct
  misc_feature 1..17: note = Synthetic
  source 1..17: mol_type = other RNA
gcggcataccggtatcc

SEQ ID NO: 572 - RNA, 17 nt, synthetic construct
  misc_feature 1..17: note = Synthetic
  source 1..17: mol_type = other RNA
gcataccggtatcccgg

SEQ ID NO: 573 - RNA, 17 nt, synthetic construct
  misc_feature 1..17: note = Synthetic
  source 1..17: mol_type = other RNA
cataccggtatcccgga

SEQ ID NO: 574 - RNA, 17 nt, synthetic construct
  misc_feature 1..17: note = Synthetic
  source 1..17: mol_type = other RNA
agggtcgcggttgggag

SEQ ID NO: 575 - RNA, 20 nt, synthetic construct
  misc_feature 1..20: note = Synthetic
  source 1..20: mol_type = other RNA
cgcaacgtccaggccgtcct

SEQ ID NO: 576 - RNA, 20 nt, synthetic construct
  misc_feature 1..20: note = Synthetic
  source 1..20: mol_type = other RNA
gcaacgtccaggccgtcctc

SEQ ID NO: 577 - RNA, 20 nt, synthetic construct
  misc_feature 1..20: note = Synthetic
  source 1..20: mol_type = other RNA
caacgtccaggccgtcctcg

SEQ ID NO: 578 - RNA, 20 nt, synthetic construct
  misc_feature 1..20: note = Synthetic
  source 1..20: mol_type = other RNA
gtcctcggggcgtttgagcg

SEQ ID NO: 579 - RNA, 20 nt, synthetic construct
  misc_feature 1..20: note = Synthetic
  source 1..20: mol_type = other RNA
cggggcgtttgagcgcggca

SEQ ID NO: 580 - RNA, 20 nt, synthetic construct
  misc_feature 1..20: note = Synthetic
  source 1..20: mol_type = other RNA
ccagatgctgcacgtgctgc

SEQ ID NO: 581 - RNA, 20 nt, synthetic construct
  misc_feature 1..20: note = Synthetic
  source 1..20: mol_type = other RNA
gctgcacgtgctgctggaaa

SEQ ID NO: 582 - RNA, 20 nt, synthetic construct
  misc_feature 1..20: note = Synthetic
  source 1..20: mol_type = other RNA
gctggaaaaggcgccgcccc

SEQ ID NO: 583 - RNA, 20 nt, synthetic construct
  misc_feature 1..20: note = Synthetic
  source 1..20: mol_type = other RNA
gttgccgatgcaacgatacc

SEQ ID NO: 584 - RNA, 20 nt, synthetic construct
  misc_feature 1..20: note = Synthetic
  source 1..20: mol_type = other RNA
atgcaacgatacctggacaa

SEQ ID NO: 585 - RNA, 20 nt, synthetic construct
  misc_feature 1..20: note = Synthetic
  source 1..20: mol_type = other RNA
atacctggacaacggccgcc

SEQ ID NO: 586 - RNA, 20 nt, synthetic construct
  misc_feature 1..20: note = Synthetic
  source 1..20: mol_type = other RNA
acaacggccgcctggccacc

SEQ ID NO: 587 - RNA, 20 nt, synthetic construct
  misc_feature 1..20: note = Synthetic
  source 1..20: mol_type = other RNA
caacggccgcctggccacca

SEQ ID NO: 588 - RNA, 20 nt, synthetic construct
  misc_feature 1..20: note = Synthetic
  source 1..20: mol_type = other RNA
cggccgcctggccaccaggg

SEQ ID NO: 589 - RNA, 20 nt, synthetic construct
  misc_feature 1..20: note = Synthetic
  source 1..20: mol_type = other RNA
gcctggccaccagggtggcc

SEQ ID NO: 590 - RNA, 20 nt, synthetic construct
  misc_feature 1..20: note = Synthetic
  source 1..20: mol_type = other RNA
cctggccaccagggtggccc

SEQ ID NO: 591 - RNA, 20 nt, synthetic construct
  misc_feature 1..20: note = Synthetic
  source 1..20: mol_type = other RNA
cagggtggcccgggcgaccc

SEQ ID NO: 592 - RNA, 20 nt, synthetic construct
  misc_feature 1..20: note = Synthetic
  source 1..20: mol_type = other RNA
ctgcgagacgagctttttcc

SEQ ID NO: 593 - RNA, 20 nt, synthetic construct
  misc_feature 1..20: note = Synthetic
  source 1..20: mol_type = other RNA
tgcgagacgagctttttcct

SEQ ID NO: 594 - RNA, 20 nt, synthetic construct
  misc_feature 1..20: note = Synthetic
  source 1..20: mol_type = other RNA
gacgagctttttcctgggca

SEQ ID NO: 595 - RNA, 20 nt, synthetic construct
  misc_feature 1..20: note = Synthetic
  source 1..20: mol_type = other RNA
gagctttttcctgggcaagg

SEQ ID NO: 596 - RNA, 20 nt, synthetic construct
  misc_feature 1..20: note = Synthetic
  source 1..20: mol_type = other RNA
agctttttcctgggcaaggc

SEQ ID NO: 597 - RNA, 20 nt, synthetic construct
  misc_feature 1..20: note = Synthetic
  source 1..20: mol_type = other RNA
tgggcaaggcgggccaccgc

SEQ ID NO: 598 - RNA, 20 nt, synthetic construct
  misc_feature 1..20: note = Synthetic
  source 1..20: mol_type = other RNA
gggcaaggcgggccaccgcc

SEQ ID NO: 599 - RNA, 20 nt, synthetic construct
  misc_feature 1..20: note = Synthetic
  source 1..20: mol_type = other RNA
caaggcgggccaccgccggg

SEQ ID NO: 600 - RNA, 20 nt, synthetic construct
  misc_feature 1..20: note = Synthetic
  source 1..20: mol_type = other RNA
ccaccgccgggaggccgtcg

SEQ ID NO: 601 - RNA, 20 nt, synthetic construct
  misc_feature 1..20: note = Synthetic
  source 1..20: mol_type = other RNA
gccgggaggccgtcgaggcc

SEQ ID NO: 602 - RNA, 20 nt, synthetic construct
  misc_feature 1..20: note = Synthetic
  source 1..20: mol_type = other RNA
ggccgtcgaggcctggctcg

SEQ ID NO: 603 - RNA, 20 nt, synthetic construct
  misc_feature 1..20: note = Synthetic
  source 1..20: mol_type = other RNA
ctggctcgtggacctcacca

SEQ ID NO: 604 - RNA, 20 nt, synthetic construct
  misc_feature 1..20: note = Synthetic
  source 1..20: mol_type = other RNA
cacggccacgcagccctccg

SEQ ID NO: 605 - RNA, 20 nt, synthetic construct
  misc_feature 1..20: note = Synthetic
  source 1..20: mol_type = other RNA
ctgacgcatgccgacacgcg

SEQ ID NO: 606 - RNA, 20 nt, synthetic construct
  misc_feature 1..20: note = Synthetic
  source 1..20: mol_type = other RNA
tgacgcatgccgacacgcgc

SEQ ID NO: 607 - RNA, 20 nt, synthetic construct
  misc_feature 1..20: note = Synthetic
  source 1..20: mol_type = other RNA
cgcatgccgacacgcgcggg

SEQ ID NO: 608 - RNA, 20 nt, synthetic construct
  misc_feature 1..20: note = Synthetic
  source 1..20: mol_type = other RNA
tgccgacacgcgcgggcggc

SEQ ID NO: 609 - RNA, 20 nt, synthetic construct
  misc_feature 1..20: note = Synthetic
  source 1..20: mol_type = other RNA
acgcgcgggcggccggtcga

SEQ ID NO: 610 - RNA, 20 nt, synthetic construct
  misc_feature 1..20: note = Synthetic
  source 1..20: mol_type = other RNA
cgcgcgggcggccggtcgac

SEQ ID NO: 611 - RNA, 20 nt, synthetic construct
  misc_feature 1..20: note = Synthetic
  source 1..20: mol_type = other RNA
gcgcgggcggccggtcgacg

SEQ ID NO: 612 - RNA, 20 nt, synthetic construct
  misc_feature 1..20: note = Synthetic
  source 1..20: mol_type = other RNA
cctgcagtccttcctgaaag

SEQ ID NO: 613 - RNA, 20 nt, synthetic construct
  misc_feature 1..20: note = Synthetic
  source 1..20: mol_type = other RNA
gcagtccttcctgaaagtgg

SEQ ID NO: 614 - RNA, 20 nt, synthetic construct
  misc_feature 1..20: note = Synthetic
  source 1..20: mol_type = other RNA
ggacaccgaagccgacgtgc

SEQ ID NO: 615 - RNA, 20 nt, synthetic construct
  misc_feature 1..20: note = Synthetic
  source 1..20: mol_type = other RNA
gccgacgtgccggtgacgta

SEQ ID NO: 616 - RNA, 20 nt, synthetic construct
  misc_feature 1..20: note = Synthetic
  source 1..20: mol_type = other RNA
gccggtgacgtacggcgaga

SEQ ID NO: 617 - RNA, 20 nt, synthetic construct
  misc_feature 1..20: note = Synthetic
  source 1..20: mol_type = other RNA
tacggcgagatggtcctgaa

SEQ ID NO: 618 - RNA, 20 nt, synthetic construct
  misc_feature 1..20: note = Synthetic
  source 1..20: mol_type = other RNA
acggcgagatggtcctgaac

SEQ ID NO: 619 - RNA, 20 nt, synthetic construct
  misc_feature 1..20: note = Synthetic
  source 1..20: mol_type = other RNA
cggcgagatggtcctgaacg

SEQ ID NO: 620 - RNA, 20 nt, synthetic construct
  misc_feature 1..20: note = Synthetic
  source 1..20: mol_type = other RNA
ggtcctgaacggggccaacc

SEQ ID NO: 621 - RNA, 20 nt, synthetic construct
  misc_feature 1..20: note = Synthetic
  source 1..20: mol_type = other RNA
gaacggggccaacctggtca

SEQ ID NO: 622 - RNA, 20 nt, synthetic construct
  misc_feature 1..20: note = Synthetic
  source 1..20: mol_type = other RNA
cctggtcacggcgctcgtga

SEQ ID NO: 623 - RNA, 20 nt, synthetic construct
  misc_feature 1..20: note = Synthetic
  source 1..20: mol_type = other RNA
ctggtcacggcgctcgtgat

SEQ ID NO: 624 - RNA, 20 nt, synthetic construct
  misc_feature 1..20: note = Synthetic
  source 1..20: mol_type = other RNA
cacggcgctcgtgatgggca

SEQ ID NO: 625 - RNA, 20 nt, synthetic construct
  misc_feature 1..20: note = Synthetic
  source 1..20: mol_type = other RNA
gggcaaggccgtgcgaagtc

SEQ ID NO: 626 - RNA, 20 nt, synthetic construct
  misc_feature 1..20: note = Synthetic
  source 1..20: mol_type = other RNA
cgtgcgaagtctggacgacg

SEQ ID NO: 627 - RNA, 20 nt, synthetic construct
  misc_feature 1..20: note = Synthetic
  source 1..20: mol_type = other RNA
gtgcgaagtctggacgacgt

SEQ ID NO: 628 - RNA, 20 nt, synthetic construct
  misc_feature 1..20: note = Synthetic
  source 1..20: mol_type = other RNA
cgacgtgggccgccacctgc

SEQ ID NO: 629 - RNA, 20 nt, synthetic construct
  misc_feature 1..20: note = Synthetic
  source 1..20: mol_type = other RNA
ccgccacctgctggagatgc

SEQ ID NO: 630 - RNA, 20 nt, synthetic construct
  misc_feature 1..20: note = Synthetic
  source 1..20: mol_type = other RNA
ccacctgctggagatgcagg

SEQ ID NO: 631 - RNA, 20 nt, synthetic construct
  misc_feature 1..20: note = Synthetic
  source 1..20: mol_type = other RNA
aggagcagctcgacctgaac

SEQ ID NO: 632 - RNA, 20 nt, synthetic construct
  misc_feature 1..20: note = Synthetic
  source 1..20: mol_type = other RNA
cgacctgaaccggcagacgc

SEQ ID NO: 633 - RNA, 20 nt, synthetic construct
  misc_feature 1..20: note = Synthetic
  source 1..20: mol_type = other RNA
ccagacgacgcgcgtgcgcg

SEQ ID NO: 634 - RNA, 20 nt, synthetic construct
  misc_feature 1..20: note = Synthetic
  source 1..20: mol_type = other RNA
gacgcgcgtgcgcgcggatc

SEQ ID NO: 635 - RNA, 20 nt, synthetic construct
  misc_feature 1..20: note = Synthetic
  source 1..20: mol_type = other RNA
cgcgcggatctggtgtccat

SEQ ID NO: 636 - RNA, 20 nt, synthetic construct
  misc_feature 1..20: note = Synthetic
  source 1..20: mol_type = other RNA
ggtgtccatcggcgagaagc

SEQ ID NO: 637 - RNA, 20 nt, synthetic construct
  misc_feature 1..20: note = Synthetic
  source 1..20: mol_type = other RNA
cggcgagaagctggtctttc

SEQ ID NO: 638 - RNA, 20 nt, synthetic construct
  misc_feature 1..20: note = Synthetic
  source 1..20: mol_type = other RNA
cgagaagctggtctttctgg

SEQ ID NO: 639 - RNA, 20 nt, synthetic construct
  misc_feature 1..20: note = Synthetic
  source 1..20: mol_type = other RNA
gctggtctttctggaggccc

SEQ ID NO: 640 - RNA, 20 nt, synthetic construct
  misc_feature 1..20: note = Synthetic
  source 1..20: mol_type = other RNA
caccaacgttccctaccccc

SEQ ID NO: 641 - RNA, 20 nt, synthetic construct
  misc_feature 1..20: note = Synthetic
  source 1..20: mol_type = other RNA
caacgttccctaccccctgg

SEQ ID NO: 642 - RNA, 20 nt, synthetic construct
  misc_feature 1..20: note = Synthetic
  source 1..20: mol_type = other RNA
aacgttccctaccccctggt

SEQ ID NO: 643 - RNA, 20 nt, synthetic construct
  misc_feature 1..20: note = Synthetic
  source 1..20: mol_type = other RNA
ctaccccctggtgggcgcca

SEQ ID NO: 644 - RNA, 20 nt, synthetic construct
  misc_feature 1..20: note = Synthetic
  source 1..20: mol_type = other RNA
cctgacgttcgtcctgcccc

SEQ ID NO: 645 - RNA, 20 nt, synthetic construct
  misc_feature 1..20: note = Synthetic
  source 1..20: mol_type = other RNA
ctgacgttcgtcctgcccct

SEQ ID NO: 646 - RNA, 20 nt, synthetic construct
  misc_feature 1..20: note = Synthetic
  source 1..20: mol_type = other RNA
gcccctgggcctgttcaatc

SEQ ID NO: 647 - RNA, 20 nt, synthetic construct
  misc_feature 1..20: note = Synthetic
  source 1..20: mol_type = other RNA
gggcctgttcaatccggtca

SEQ ID NO: 648 - RNA, 20 nt, synthetic construct
  misc_feature 1..20: note = Synthetic
  source 1..20: mol_type = other RNA
tgttcaatccggtcatggaa

SEQ ID NO: 649 - RNA, 20 nt, synthetic construct
  misc_feature 1..20: note = Synthetic
  source 1..20: mol_type = other RNA
gaacggtttgccgcgcacgc

SEQ ID NO: 650 - RNA, 20 nt, synthetic construct
  misc_feature 1..20: note = Synthetic
  source 1..20: mol_type = other RNA
aacggtttgccgcgcacgcc

SEQ ID NO: 651 - RNA, 20 nt, synthetic construct
  misc_feature 1..20: note = Synthetic
  source 1..20: mol_type = other RNA
acggtttgccgcgcacgccg

SEQ ID NO: 652 - RNA, 20 nt, synthetic construct
  misc_feature 1..20: note = Synthetic
  source 1..20: mol_type = other RNA
ggggacctagtccccgcccc

SEQ ID NO: 653 - RNA, 20 nt, synthetic construct
  misc_feature 1..20: note = Synthetic
  source 1..20: mol_type = other RNA
agtccccgcccccggccacc

SEQ ID NO: 654 - RNA, 20 nt, synthetic construct
  misc_feature 1..20: note = Synthetic
  source 1..20: mol_type = other RNA
cgccccgccagctgtttttt

SEQ ID NO: 655 - RNA, 20 nt, synthetic construct
  misc_feature 1..20: note = Synthetic
  source 1..20: mol_type = other RNA
gccccgccagctgttttttt

SEQ ID NO: 656 - RNA, 20 nt, synthetic construct
  misc_feature 1..20: note = Synthetic
  source 1..20: mol_type = other RNA
ccccgccagctgtttttttg

SEQ ID NO: 657 - RNA, 20 nt, synthetic construct
  misc_feature 1..20: note = Synthetic
  source 1..20: mol_type = other RNA
cccgccagctgtttttttgg

SEQ ID NO: 658 - RNA, 20 nt, synthetic construct
  misc_feature 1..20: note = Synthetic
  source 1..20: mol_type = other RNA
ccagctgtttttttggggga

SEQ ID NO: 659 - RNA, 20 nt, synthetic construct
  misc_feature 1..20: note = Synthetic
  source 1..20: mol_type = other RNA
tttttgggggaaggaccgcc

SEQ ID NO: 660 - RNA, 20 nt, synthetic construct
  misc_feature 1..20: note = Synthetic
  source 1..20: mol_type = other RNA
ccaggtgctgcgcctgtctc

SEQ ID NO: 661 - RNA, 20 nt, synthetic construct
  misc_feature 1..20: note = Synthetic
  source 1..20: mol_type = other RNA
ctgtctctggaacacgcgat

SEQ ID NO: 662 - RNA, 20 nt, synthetic construct
  misc_feature 1..20: note = Synthetic
  source 1..20: mol_type = other RNA
tgtctctggaacacgcgatc

SEQ ID NO: 663 - RNA, 20 nt, synthetic construct
  misc_feature 1..20: note = Synthetic
  source 1..20: mol_type = other RNA
ttcgctgatgaacgttgacg

SEQ ID NO: 664 - RNA, 20 nt, synthetic construct
  misc_feature 1..20: note = Synthetic
  source 1..20: mol_type = other RNA
gctgatgaacgttgacgcgg

SEQ ID NO: 665 - RNA, 20 nt, synthetic construct
  misc_feature 1..20: note = Synthetic
  source 1..20: mol_type = other RNA
atgaacgttgacgcggcggt

SEQ ID NO: 666 - RNA, 20 nt, synthetic construct
  misc_feature 1..20: note = Synthetic
  source 1..20: mol_type = other RNA
tgaacgttgacgcggcggtc

SEQ ID NO: 667 - RNA, 20 nt, synthetic construct
  misc_feature 1..20: note = Synthetic
  source 1..20: mol_type = other RNA
gaacgttgacgcggcggtcg

SEQ ID NO: 668 - RNA, 20 nt, synthetic construct
  misc_feature 1..20: note = Synthetic
  source 1..20: mol_type = other RNA
aacgttgacgcggcggtcgg

SEQ ID NO: 669 - RNA, 20 nt, synthetic construct
  misc_feature 1..20: note = Synthetic
  source 1..20: mol_type = other RNA
gtcgaagccgccaatccgta

SEQ ID NO: 670 - RNA, 20 nt, synthetic construct
  misc_feature 1..20: note = Synthetic
  source 1..20: mol_type = other RNA
tcgaagccgccaatccgtac

SEQ ID NO: 671 - RNA, 20 nt, synthetic construct
  misc_feature 1..20: note = Synthetic
  source 1..20: mol_type = other RNA
cgaagccgccaatccgtacg

SEQ ID NO: 672 - RNA, 20 nt, synthetic construct
  misc_feature 1..20: note = Synthetic
  source 1..20: mol_type = other RNA
caatccgtacggggcgtacg

SEQ ID NO: 673 - RNA, 20 nt, synthetic construct
  misc_feature 1..20: note = Synthetic
  source 1..20: mol_type = other RNA
tccgtacggggcgtacgtgg

SEQ ID NO: 674 - RNA, 20 nt, synthetic construct
  misc_feature 1..20: note = Synthetic
  source 1..20: mol_type = other RNA
cggggcgtacgtggcggccc

SEQ ID NO: 675 - RNA, 20 nt, synthetic construct
  misc_feature 1..20: note = Synthetic
  source 1..20: mol_type = other RNA
gcgtacgtggcggccccggc

SEQ ID NO: 676 - RNA, 20 nt, synthetic construct
  misc_feature 1..20: note = Synthetic
  source 1..20: mol_type = other RNA
agcagctgtttttgaacgcc

SEQ ID NO: 677 - RNA, 20 nt, synthetic construct
  misc_feature 1..20: note = Synthetic
  source 1..20: mol_type = other RNA
gcagctgtttttgaacgcct

SEQ ID NO: 678 - RNA, 20 nt, synthetic construct
  misc_feature 1..20: note = Synthetic
  source 1..20: mol_type = other RNA
cagctgtttttgaacgcctg

SEQ ID NO: 679 - RNA, 20 nt, synthetic construct
  misc_feature 1..20: note = Synthetic
  source 1..20: mol_type = other RNA
agctgtttttgaacgcctgg

SEQ ID NO: 680 - RNA, 20 nt, synthetic construct
  misc_feature 1..20: note = Synthetic
  source 1..20: mol_type = other RNA
gaacgcctgggggcagcgcc

SEQ ID NO: 681 - RNA, 20 nt, synthetic construct
  misc_feature 1..20: note = Synthetic
  source 1..20: mol_type = other RNA
tgggggcagcgcctggccca

SEQ ID NO: 682 - RNA, 20 nt, synthetic construct
  misc_feature 1..20: note = Synthetic
  source 1..20: mol_type = other RNA
gggggcagcgcctggcccac

SEQ ID NO: 683 - RNA, 20 nt, synthetic construct
  misc_feature 1..20: note = Synthetic
  source 1..20: mol_type = other RNA
ggcagcgcctggcccacggg

SEQ ID NO: 684 - RNA, 20 nt, synthetic construct
  misc_feature 1..20: note = Synthetic
  source 1..20: mol_type = other RNA
gcagcgcctggcccacgggc

SEQ ID NO: 685 - RNA, 20 nt, synthetic construct
  misc_feature 1..20: note = Synthetic
  source 1..20: mol_type = other RNA
tggcccacgggcgggtccga

SEQ ID NO: 686 - RNA, 20 nt, synthetic construct
  misc_feature 1..20: note = Synthetic
  source 1..20: mol_type = other RNA
ggcccacgggcgggtccgat

SEQ ID NO: 687 - RNA, 20 nt, synthetic construct
  misc_feature 1..20: note = Synthetic
  source 1..20: mol_type = other RNA
cgggcgggtccgatgggtcg

SEQ ID NO: 688 - RNA, 20 nt, synthetic construct
  misc_feature 1..20: note = Synthetic
  source 1..20: mol_type = other RNA
cgggtccgatgggtcgcgga

SEQ ID NO: 689 - RNA, 20 nt, synthetic construct
  misc_feature 1..20: note = Synthetic
  source 1..20: mol_type = other RNA
cgcggaaggccagatgaccc

SEQ ID NO: 690 - RNA, 20 nt, synthetic construct
  misc_feature 1..20: note = Synthetic
  source 1..20: mol_type = other RNA
gcagcccgacaacgccaacc

SEQ ID NO: 691 - RNA, 20 nt, synthetic construct
  misc_feature 1..20: note = Synthetic
  source 1..20: mol_type = other RNA
ccccgcgttcgacttctttg

SEQ ID NO: 692 - RNA, 20 nt, synthetic construct
  misc_feature 1..20: note = Synthetic
  source 1..20: mol_type = other RNA
cccgcgttcgacttctttgt

SEQ ID NO: 693 - RNA, 20 nt, synthetic construct
  misc_feature 1..20: note = Synthetic
  source 1..20: mol_type = other RNA
ccgcgttcgacttctttgtg

SEQ ID NO: 694 - RNA, 20 nt, synthetic construct
  misc_feature 1..20: note = Synthetic
  source 1..20: mol_type = other RNA
cgcgttcgacttctttgtgg

SEQ ID NO: 695 - RNA, 20 nt, synthetic construct
  misc_feature 1..20: note = Synthetic
  source 1..20: mol_type = other RNA
gttcgacttctttgtggggg

SEQ ID NO: 696 - RNA, 20 nt, synthetic construct
  misc_feature 1..20: note = Synthetic
  source 1..20: mol_type = other RNA
ctttgtgggggtggccgacg

SEQ ID NO: 697 - RNA, 20 nt, synthetic construct
  misc_feature 1..20: note = Synthetic
  source 1..20: mol_type = other RNA
ggtggccgacgtggagctgc

SEQ ID NO: 698 - RNA, 20 nt, synthetic construct
  misc_feature 1..20: note = Synthetic
  source 1..20: mol_type = other RNA
gtggccgacgtggagctgcc

SEQ ID NO: 699 - RNA, 20 nt, synthetic construct
  misc_feature 1..20: note = Synthetic
  source 1..20: mol_type = other RNA
tggccgacgtggagctgccg

SEQ ID NO: 700 - RNA, 20 nt, synthetic construct
  misc_feature 1..20: note = Synthetic
  source 1..20: mol_type = other RNA
ggccgacgtggagctgccgg

SEQ ID NO: 701 - RNA, 20 nt, synthetic construct
  misc_feature 1..20: note = Synthetic
  source 1..20: mol_type = other RNA
gccgacgtggagctgccggg

SEQ ID NO: 702 - RNA, 20 nt, synthetic construct
  misc_feature 1..20: note = Synthetic
  source 1..20: mol_type = other RNA
ccgacgtggagctgccgggg

SEQ ID NO: 703 - RNA, 20 nt, synthetic construct
  misc_feature 1..20: note = Synthetic
  source 1..20: mol_type = other RNA
cgacgtggagctgccggggg

SEQ ID NO: 704 - RNA, 20 nt, synthetic construct
  misc_feature 1..20: note = Synthetic
  source 1..20: mol_type = other RNA
gccggggggggacgttcccc

SEQ ID NO: 705 - RNA, 20 nt, synthetic construct
  misc_feature 1..20: note = Synthetic
  source 1..20: mol_type = other RNA
gggggggacgttcccccggc

SEQ ID NO: 706 - RNA, 20 nt, synthetic construct
  misc_feature 1..20: note = Synthetic
  source 1..20: mol_type = other RNA
ggacgttcccccggccggcc

SEQ ID NO: 707 - RNA, 20 nt, synthetic construct
  misc_feature 1..20: note = Synthetic
  source 1..20: mol_type = other RNA
gacgttcccccggccggccc

SEQ ID NO: 708 - RNA, 20 nt, synthetic construct
  misc_feature 1..20: note = Synthetic
  source 1..20: mol_type = other RNA
acgttcccccggccggcccg

SEQ ID NO: 709 - RNA, 20 nt, synthetic construct
  misc_feature 1..20: note = Synthetic
  source 1..20: mol_type = other RNA
cgttcccccggccggcccgg

SEQ ID NO: 710 - RNA, 20 nt, synthetic construct
  misc_feature 1..20: note = Synthetic
  source 1..20: mol_type = other RNA
ggccggcccgggggagatcc

SEQ ID NO: 711 - RNA, 20 nt, synthetic construct
  misc_feature 1..20: note = Synthetic
  source 1..20: mol_type = other RNA
cgggggagatccaggccacc

SEQ ID NO: 712 - RNA, 20 nt, synthetic construct
  misc_feature 1..20: note = Synthetic
  source 1..20: mol_type = other RNA
gatccaggccacctggcgcg

SEQ ID NO: 713 - RNA, 20 nt, synthetic construct
  misc_feature 1..20: note = Synthetic
  source 1..20: mol_type = other RNA
gccacctggcgcgtggtgaa

SEQ ID NO: 714 - RNA, 20 nt, synthetic construct
  misc_feature 1..20: note = Synthetic
  source 1..20: mol_type = other RNA
ggtgaacggcaacttgcccc

SEQ ID NO: 715 - RNA, 20 nt, synthetic construct
  misc_feature 1..20: note = Synthetic
  source 1..20: mol_type = other RNA
cttgcccctggcgctatgtc

SEQ ID NO: 716 - RNA, 20 nt, synthetic construct
  misc_feature 1..20: note = Synthetic
  source 1..20: mol_type = other RNA
gcccctggcgctatgtccgg

SEQ ID NO: 717 - RNA, 20 nt, synthetic construct
  misc_feature 1..20: note = Synthetic
  source 1..20: mol_type = other RNA
cgctatgtccggcggcgttc

SEQ ID NO: 718 - RNA, 20 nt, synthetic construct
  misc_feature 1..20: note = Synthetic
  source 1..20: mol_type = other RNA
gctatgtccggcggcgttcc

SEQ ID NO: 719 - RNA, 20 nt, synthetic construct
  misc_feature 1..20: note = Synthetic
  source 1..20: mol_type = other RNA
cggcggcgttccgggacgcc

SEQ ID NO: 720 - RNA, 20 nt, synthetic construct
  misc_feature 1..20: note = Synthetic
  source 1..20: mol_type = other RNA
ggcggcgttccgggacgccc

SEQ ID NO: 721 - RNA, 20 nt, synthetic construct
  misc_feature 1..20: note = Synthetic
  source 1..20: mol_type = other RNA
gcggcgttccgggacgcccg

SEQ ID NO: 722 - RNA, 20 nt, synthetic construct
  misc_feature 1..20: note = Synthetic
  source 1..20: mol_type = other RNA
gttccgggacgcccggggcc

SEQ ID NO: 723 - RNA, 20 nt, synthetic construct
  misc_feature 1..20: note = Synthetic
  source 1..20: mol_type = other RNA
ggacgcccggggcctggagc

SEQ ID NO: 724 - RNA, 20 nt, synthetic construct
  misc_feature 1..20: note = Synthetic
  source 1..20: mol_type = other RNA
gacgcccggggcctggagct

SEQ ID NO: 725 - RNA, 20 nt, synthetic construct
  misc_feature 1..20: note = Synthetic
  source 1..20: mol_type = other RNA
acgcccggggcctggagctg

SEQ ID NO: 726 - RNA, 20 nt, synthetic construct
  misc_feature 1..20: note = Synthetic
  source 1..20: mol_type = other RNA
cgcccggggcctggagctgg

SEQ ID NO: 727 - RNA, 20 nt, synthetic construct
  misc_feature 1..20: note = Synthetic
  source 1..20: mol_type = other RNA
ccggggcctggagctggggg

SEQ ID NO: 728 - RNA, 20 nt, synthetic construct
  misc_feature 1..20: note = Synthetic
  source 1..20: mol_type = other RNA
cggggcctggagctgggggt

SEQ ID NO: 729 - RNA, 20 nt, synthetic construct
  misc_feature 1..20: note = Synthetic
  source 1..20: mol_type = other RNA
gggggtgggacgccacgcca

SEQ ID NO: 730 - RNA, 20 nt, synthetic construct
  misc_feature 1..20: note = Synthetic
  source 1..20: mol_type = other RNA
gccaccatcgccgccgttcg

SEQ ID NO: 731 - RNA, 20 nt, synthetic construct
  misc_feature 1..20: note = Synthetic
  source 1..20: mol_type = other RNA
ccaccatcgccgccgttcgc

SEQ ID NO: 732 - RNA, 20 nt, synthetic construct
  misc_feature 1..20: note = Synthetic
  source 1..20: mol_type = other RNA
caccatcgccgccgttcgcg

SEQ ID NO: 733 - RNA, 20 nt, synthetic construct
  misc_feature 1..20: note = Synthetic
  source 1..20: mol_type = other RNA
gttcgacgaccgcaactacc

SEQ ID NO: 734 - RNA, 20 nt, synthetic construct
  misc_feature 1..20: note = Synthetic
  source 1..20: mol_type = other RNA
cgacgaccgcaactacccgg

SEQ ID NO: 735 - RNA, 20 nt, synthetic construct
  misc_feature 1..20: note = Synthetic
  source 1..20: mol_type = other RNA
ggcggtgttttacctgctgc

SEQ ID NO: 736 - RNA, 20 nt, synthetic construct
  misc_feature 1..20: note = Synthetic
  source 1..20: mol_type = other RNA
ctgctgcaggccgccataca

SEQ ID NO: 737 - RNA, 20 nt, synthetic construct
  misc_feature 1..20: note = Synthetic
  source 1..20: mol_type = other RNA
cgagcacgtcttctgcgccc

SEQ ID NO: 738 - RNA, 20 nt, synthetic construct
  misc_feature 1..20: note = Synthetic
  source 1..20: mol_type = other RNA
acgtcttctgcgccctggcc

SEQ ID NO: 739 - RNA, 20 nt, synthetic construct
  misc_feature 1..20: note = Synthetic
  source 1..20: mol_type = other RNA
ctgcgccctggcccggctcg

SEQ ID NO: 740 - RNA, 20 nt, synthetic construct
  misc_feature 1..20: note = Synthetic
  source 1..20: mol_type = other RNA
tccagtgcatcaccagctac

SEQ ID NO: 741 - RNA, 20 nt, synthetic construct
  misc_feature 1..20: note = Synthetic
  source 1..20: mol_type = other RNA
ccagctactggaacaacacg

SEQ ID NO: 742 - RNA, 20 nt, synthetic construct
  misc_feature 1..20: note = Synthetic
  source 1..20: mol_type = other RNA
ctggaacaacacgcggtgcg

SEQ ID NO: 743 - RNA, 20 nt, synthetic construct
  misc_feature 1..20: note = Synthetic
  source 1..20: mol_type = other RNA
gttcgtgaacgactactcgc

SEQ ID NO: 744 - RNA, 20 nt, synthetic construct
  misc_feature 1..20: note = Synthetic
  source 1..20: mol_type = other RNA
tcgtacgtcgtgacctacct

SEQ ID NO: 745 - RNA, 20 nt, synthetic construct
  misc_feature 1..20: note = Synthetic
  source 1..20: mol_type = other RNA
cgtacgtcgtgacctacctc

SEQ ID NO: 746 - RNA, 20 nt, synthetic construct
  misc_feature 1..20: note = Synthetic
  source 1..20: mol_type = other RNA
gtacgtcgtgacctacctcg

SEQ ID NO: 747 - RNA, 20 nt, synthetic construct
  misc_feature 1..20: note = Synthetic
  source 1..20: mol_type = other RNA
tacgtcgtgacctacctcgg

SEQ ID NO: 748 - RNA, 20 nt, synthetic construct
  misc_feature 1..20: note = Synthetic
  source 1..20: mol_type = other RNA
cctcgggggagaccttcccg

SEQ ID NO: 749 - RNA, 20 nt, synthetic construct
  misc_feature 1..20: note = Synthetic
  source 1..20: mol_type = other RNA
agaccttcccgaggagtgca

SEQ ID NO: 750 - RNA, 20 nt, synthetic construct
  misc_feature 1..20: note = Synthetic
  source 1..20: mol_type = other RNA
aggagtgcatggccgtgtac

SEQ ID NO: 751 - RNA, 20 nt, synthetic construct
  misc_feature 1..20: note = Synthetic
  source 1..20: mol_type = other RNA
ggagtgcatggccgtgtacc

SEQ ID NO: 752 - RNA, 20 nt, synthetic construct
  misc_feature 1..20: note = Synthetic
  source 1..20: mol_type = other RNA
catggccgtgtaccgggacc

SEQ ID NO: 753 - RNA, 20 nt, synthetic construct
  misc_feature 1..20: note = Synthetic
  source 1..20: mol_type = other RNA
ggccgtgtaccgggacctgg

SEQ ID NO: 754 - RNA, 20 nt, synthetic construct
  misc_feature 1..20: note = Synthetic
  source 1..20: mol_type = other RNA
ggacctggtggcgcacgtcg

SEQ ID NO: 755 - RNA, 20 nt, synthetic construct
  misc_feature 1..20: note = Synthetic
  source 1..20: mol_type = other RNA
ggtggcgcacgtcgaggccc

SEQ ID NO: 756 - RNA, 20 nt, synthetic construct
  misc_feature 1..20: note = Synthetic
  source 1..20: mol_type = other RNA
cgtcgaggccctggcccagc

SEQ ID NO: 757 - RNA, 20 nt, synthetic construct
  misc_feature 1..20: note = Synthetic
  source 1..20: mol_type = other RNA
gttgatgactttaccctgac

SEQ ID NO: 758 - RNA, 20 nt, synthetic construct
  misc_feature 1..20: note = Synthetic
  source 1..20: mol_type = other RNA
tgactttaccctgaccggcc

SEQ ID NO: 759 - RNA, 20 nt, synthetic construct
  misc_feature 1..20: note = Synthetic
  source 1..20: mol_type = other RNA
taccctgaccggcccggagc

SEQ ID NO: 760 - RNA, 20 nt, synthetic construct
  misc_feature 1..20: note = Synthetic
  source 1..20: mol_type = other RNA
accctgaccggcccggagct

SEQ ID NO: 761 - RNA, 20 nt, synthetic construct
  misc_feature 1..20: note = Synthetic
  source 1..20: mol_type = other RNA
ctgaccggcccggagctggg

SEQ ID NO: 762 - RNA, 20 nt, synthetic construct
  misc_feature 1..20: note = Synthetic
  source 1..20: mol_type = other RNA
tgaccggcccggagctgggc

SEQ ID NO: 763 - RNA, 20 nt, synthetic construct
  misc_feature 1..20: note = Synthetic
  source 1..20: mol_type = other RNA
cggcccggagctgggcgggc

SEQ ID NO: 764 - RNA, 20 nt, synthetic construct
  misc_feature 1..20: note = Synthetic
  source 1..20: mol_type = other RNA
gaatcacctaatgcgagacc

SEQ ID NO: 765 - RNA, 20 nt, synthetic construct
  misc_feature 1..20: note = Synthetic
  source 1..20: mol_type = other RNA
cgctgctgccacccctcgtg

SEQ ID NO: 766 - RNA, 20 nt, synthetic construct
  misc_feature 1..20: note = Synthetic
  source 1..20: mol_type = other RNA
gctgctgccacccctcgtgt

SEQ ID NO: 767 - RNA, 20 nt, synthetic construct
  misc_feature 1..20: note = Synthetic
  source 1..20: mol_type = other RNA
gggactgtgacgccctgatg

SEQ ID NO: 768 - RNA, 20 nt, synthetic construct
  misc_feature 1..20: note = Synthetic
  source 1..20: mol_type = other RNA
tgacgccctgatgcggcgcg

SEQ ID NO: 769 - RNA, 20 nt, synthetic construct
  misc_feature 1..20: note = Synthetic
  source 1..20: mol_type = other RNA
cctgatgcggcgcgcggccc

SEQ ID NO: 770 - RNA, 20 nt, synthetic construct
  misc_feature 1..20: note = Synthetic
  source 1..20: mol_type = other RNA
tggaccgccatcgcgactgc

SEQ ID NO: 771 - RNA, 20 nt, synthetic construct
  misc_feature 1..20: note = Synthetic
  source 1..20: mol_type = other RNA
ggaccgccatcgcgactgcc

SEQ ID NO: 772 - RNA, 20 nt, synthetic construct
  misc_feature 1..20: note = Synthetic
  source 1..20: mol_type = other RNA
tcgcgactgccgggttagcg

SEQ ID NO: 773 - RNA, 20 nt, synthetic construct
  misc_feature 1..20: note = Synthetic
  source 1..20: mol_type = other RNA
cgcgactgccgggttagcgc

SEQ ID NO: 774 - RNA, 20 nt, synthetic construct
  misc_feature 1..20: note = Synthetic
  source 1..20: mol_type = other RNA
gcgactgccgggttagcgcg

SEQ ID NO: 775 - RNA, 20 nt, synthetic construct
  misc_feature 1..20: note = Synthetic
  source 1..20: mol_type = other RNA
cgactgccgggttagcgcgg

SEQ ID NO: 776 - RNA, 20 nt, synthetic construct
  misc_feature 1..20: note = Synthetic
  source 1..20: mol_type = other RNA
gactgccgggttagcgcggg

SEQ ID NO: 777 - RNA, 20 nt, synthetic construct
  misc_feature 1..20: note = Synthetic
  source 1..20: mol_type = other RNA
gggccacgaccccgtgtacg

SEQ ID NO: 778 - RNA, 20 nt, synthetic construct
  misc_feature 1..20: note = Synthetic
  source 1..20: mol_type = other RNA
ccacgaccccgtgtacgcgg

SEQ ID NO: 779 - RNA, 20 nt, synthetic construct
  misc_feature 1..20: note = Synthetic
  source 1..20: mol_type = other RNA
gtacgcggcggcatgtaacg

SEQ ID NO: 780 - RNA, 20 nt, synthetic construct
  misc_feature 1..20: note = Synthetic
  source 1..20: mol_type = other RNA
ggcatgtaacgtggcgaccg

SEQ ID NO: 781 - RNA, 20 nt, synthetic construct
  misc_feature 1..20: note = Synthetic
  source 1..20: mol_type = other RNA
gcggacttcaaccgcaacga

SEQ ID NO: 782 - RNA, 20 nt, synthetic construct
  misc_feature 1..20: note = Synthetic
  source 1..20: mol_type = other RNA
ccagctgctgcacaacaccc

SEQ ID NO: 783 - RNA, 20 nt, synthetic construct
  misc_feature 1..20: note = Synthetic
  source 1..20: mol_type = other RNA
caacacccaggcccgagccg

SEQ ID NO: 784 - RNA, 20 nt, synthetic construct
  misc_feature 1..20: note = Synthetic
  source 1..20: mol_type = other RNA
ggcccgagccgcggacgccg

SEQ ID NO: 785 - RNA, 20 nt, synthetic construct
  misc_feature 1..20: note = Synthetic
  source 1..20: mol_type = other RNA
ccgcggacgccgcggatgac

SEQ ID NO: 786 - RNA, 20 nt, synthetic construct
  misc_feature 1..20: note = Synthetic
  source 1..20: mol_type = other RNA
ccgcggatgaccggccgcac

SEQ ID NO: 787 - RNA, 20 nt, synthetic construct
  misc_feature 1..20: note = Synthetic
  source 1..20: mol_type = other RNA
cgcggatgaccggccgcacc

SEQ ID NO: 788 - RNA, 20 nt, synthetic construct
  misc_feature 1..20: note = Synthetic
  source 1..20: mol_type = other RNA
gcggatgaccggccgcaccg

SEQ ID NO: 789 - RNA, 20 nt, synthetic construct
  misc_feature 1..20: note = Synthetic
  source 1..20: mol_type = other RNA
cggatgaccggccgcaccgg

SEQ ID NO: 790 - RNA, 20 nt, synthetic construct
  misc_feature 1..20: note = Synthetic
  source 1..20: mol_type = other RNA
ggatgaccggccgcaccggg

SEQ ID NO: 791 - RNA, 20 nt, synthetic construct
  misc_feature 1..20: note = Synthetic
  source 1..20: mol_type = other RNA
tgaccggccgcaccgggggg

SEQ ID NO: 792 - RNA, 20 nt, synthetic construct
  misc_feature 1..20: note = Synthetic
  source 1..20: mol_type = other RNA
ggccgcaccggggggcggac

SEQ ID NO: 793 - RNA, 20 nt, synthetic construct
  misc_feature 1..20: note = Synthetic
  source 1..20: mol_type = other RNA
caagatttactactacgtga

SEQ ID NO: 794 - RNA, 20 nt, synthetic construct
  misc_feature 1..20: note = Synthetic
  source 1..20: mol_type = other RNA
tgatggtgcccgccttctcg

SEQ ID NO: 795 - RNA, 20 nt, synthetic construct
  misc_feature 1..20: note = Synthetic
  source 1..20: mol_type = other RNA
gatggtgcccgccttctcgc

SEQ ID NO: 796 - RNA, 20 nt, synthetic construct
  misc_feature 1..20: note = Synthetic
  source 1..20: mol_type = other RNA
atggtgcccgccttctcgcg

SEQ ID NO: 797 - RNA, 20 nt, synthetic construct
  misc_feature 1..20: note = Synthetic
  source 1..20: mol_type = other RNA
gcggggccgctgctgcaccg

SEQ ID NO: 798 - RNA, 20 nt, synthetic construct
  misc_feature 1..20: note = Synthetic
  source 1..20: mol_type = other RNA
cggggccgctgctgcaccgc

SEQ ID NO: 799 - RNA, 20 nt, synthetic construct
  misc_feature 1..20: note = Synthetic
  source 1..20: mol_type = other RNA
ggggccgctgctgcaccgcg

SEQ ID NO: 800 - RNA, 20 nt, synthetic construct
  misc_feature 1..20: note = Synthetic
  source 1..20: mol_type = other RNA
gggccgctgctgcaccgcgg

SEQ ID NO: 801 - RNA, 20 nt, synthetic construct
  misc_feature 1..20: note = Synthetic
  source 1..20: mol_type = other RNA
atacgccaccctgcagaaca

SEQ ID NO: 802 - RNA, 20 nt, synthetic construct
  misc_feature 1..20: note = Synthetic
  source 1..20: mol_type = other RNA
cgccaccctgcagaacatgg

SEQ ID NO: 803 - RNA, 20 nt, synthetic construct
  misc_feature 1..20: note = Synthetic
  source 1..20: mol_type = other RNA
cctgcagaacatggtggtcc

SEQ ID NO: 804 - RNA, 20 nt, synthetic construct
  misc_feature 1..20: note = Synthetic
  source 1..20: mol_type = other RNA
gtggtcccggagatcgcccc

SEQ ID NO: 805 - RNA, 20 nt, synthetic construct
  misc_feature 1..20: note = Synthetic
  source 1..20: mol_type = other RNA
cccggagatcgcccccggcg

SEQ ID NO: 806 - RNA, 20 nt, synthetic construct
  misc_feature 1..20: note = Synthetic
  source 1..20: mol_type = other RNA
gtgccccagcgaccccgtga

SEQ ID NO: 807 - RNA, 20 nt, synthetic construct
  misc_feature 1..20: note = Synthetic
  source 1..20: mol_type = other RNA
ccccgcgcaccccctgcacc

SEQ ID NO: 808 - RNA, 20 nt, synthetic construct
  misc_feature 1..20: note = Synthetic
  source 1..20: mol_type = other RNA
ccccctgcacccggccaatc

SEQ ID NO: 809 - RNA, 20 nt, synthetic construct
  misc_feature 1..20: note = Synthetic
  source 1..20: mol_type = other RNA
cctgcacccggccaatctgg

SEQ ID NO: 810 - RNA, 20 nt, synthetic construct
  misc_feature 1..20: note = Synthetic
  source 1..20: mol_type = other RNA
ggccaatctggtggccaaca

SEQ ID NO: 811 - RNA, 20 nt, synthetic construct
  misc_feature 1..20: note = Synthetic
  source 1..20: mol_type = other RNA
gtcaacgccatgtttcacaa

SEQ ID NO: 812 - RNA, 20 nt, synthetic construct
  misc_feature 1..20: note = Synthetic
  source 1..20: mol_type = other RNA
tcaacgccatgtttcacaac

SEQ ID NO: 813 - RNA, 20 nt, synthetic construct
  misc_feature 1..20: note = Synthetic
  source 1..20: mol_type = other RNA
catgtttcacaacgggcgcg

SEQ ID NO: 814 - RNA, 20 nt, synthetic construct
  misc_feature 1..20: note = Synthetic
  source 1..20: mol_type = other RNA
tcacaacgggcgcgtggtag

SEQ ID NO: 815 - RNA, 20 nt, synthetic construct
  misc_feature 1..20: note = Synthetic
  source 1..20: mol_type = other RNA
aacgggcgcgtggtagtgga

SEQ ID NO: 816 - RNA, 20 nt, synthetic construct
  misc_feature 1..20: note = Synthetic
  source 1..20: mol_type = other RNA
acgggcgcgtggtagtggac

SEQ ID NO: 817 - RNA, 20 nt, synthetic construct
  misc_feature 1..20: note = Synthetic
  source 1..20: mol_type = other RNA
gcccgccatgctcacgctgc

SEQ ID NO: 818 - RNA, 20 nt, synthetic construct
  misc_feature 1..20: note = Synthetic
  source 1..20: mol_type = other RNA
catgctcacgctgcaggtgc

SEQ ID NO: 819 - RNA, 20 nt, synthetic construct
  misc_feature 1..20: note = Synthetic
  source 1..20: mol_type = other RNA
gcaggtgctggcccacaaca

SEQ ID NO: 820 - RNA, 20 nt, synthetic construct
  misc_feature 1..20: note = Synthetic
  source 1..20: mol_type = other RNA
caacatggccgaacgcacaa

SEQ ID NO: 821 - RNA, 20 nt, synthetic construct
  misc_feature 1..20: note = Synthetic
  source 1..20: mol_type = other RNA
cacaacggcgctgctctgct

SEQ ID NO: 822 - RNA, 20 nt, synthetic construct
  misc_feature 1..20: note = Synthetic
  source 1..20: mol_type = other RNA
aacggcgctgctctgctcgg

SEQ ID NO: 823 - RNA, 20 nt, synthetic construct
  misc_feature 1..20: note = Synthetic
  source 1..20: mol_type = other RNA
ctgctcggcggcgcccgacg

SEQ ID NO: 824 - RNA, 20 nt, synthetic construct
  misc_feature 1..20: note = Synthetic
  source 1..20: mol_type = other RNA
tgctcggcggcgcccgacgc

SEQ ID NO: 825 - RNA, 20 nt, synthetic construct
  misc_feature 1..20: note = Synthetic
  source 1..20: mol_type = other RNA
accaacatgcgcatattcga

SEQ ID NO: 826 - RNA, 20 nt, synthetic construct
  misc_feature 1..20: note = Synthetic
  source 1..20: mol_type = other RNA
ccaacatgcgcatattcgac

SEQ ID NO: 827 - RNA, 20 nt, synthetic construct
  misc_feature 1..20: note = Synthetic
  source 1..20: mol_type = other RNA
caacatgcgcatattcgacg

SEQ ID NO: 828 - RNA, 20 nt, synthetic construct
  misc_feature 1..20: note = Synthetic
  source 1..20: mol_type = other RNA
ttcgacggggcgttgcacgc

SEQ ID NO: 829 - RNA, 20 nt, synthetic construct
  misc_feature 1..20: note = Synthetic
  source 1..20: mol_type = other RNA
gcacgccggaatcctgctga

SEQ ID NO: 830 - RNA, 20 nt, synthetic construct
  misc_feature 1..20: note = Synthetic
  source 1..20: mol_type = other RNA
gctgatggccccccagcatc

SEQ ID NO: 831 - RNA, 20 nt, synthetic construct
  misc_feature 1..20: note = Synthetic
  source 1..20: mol_type = other RNA
ctggaccataccatccaaaa

SEQ ID NO: 832 - RNA, 20 nt, synthetic construct
  misc_feature 1..20: note = Synthetic
  source 1..20: mol_type = other RNA
cccgtccacgcgctgttcgc

SEQ ID NO: 833 - RNA, 20 nt, synthetic construct
  misc_feature 1..20: note = Synthetic
  source 1..20: mol_type = other RNA
ccgtccacgcgctgttcgcc

SEQ ID NO: 834 - RNA, 20 nt, synthetic construct
  misc_feature 1..20: note = Synthetic
  source 1..20: mol_type = other RNA
cgtccacgcgctgttcgccg

SEQ ID NO: 835 - RNA, 20 nt, synthetic construct
  misc_feature 1..20: note = Synthetic
  source 1..20: mol_type = other RNA
gttcgccggggccgaccacg

SEQ ID NO: 836 - RNA, 20 nt, synthetic construct
  misc_feature 1..20: note = Synthetic
  source 1..20: mol_type = other RNA
gaacgcgcccaatttccccc

SEQ ID NO: 837 - RNA, 20 nt, synthetic construct
  misc_feature 1..20: note = Synthetic
  source 1..20: mol_type = other RNA
cggccctgcgcgacctgtcg

SEQ ID NO: 838 - RNA, 20 nt, synthetic construct
  misc_feature 1..20: note = Synthetic
  source 1..20: mol_type = other RNA
cctgcgcgacctgtcgcggc

SEQ ID NO: 839 - RNA, 20 nt, synthetic construct
  misc_feature 1..20: note = Synthetic
  source 1..20: mol_type = other RNA
cctgtcgcggcaggtccccc

SEQ ID NO: 840 - RNA, 20 nt, synthetic construct
  misc_feature 1..20: note = Synthetic
  source 1..20: mol_type = other RNA
gcaggtccccctggtccccc

SEQ ID NO: 841 - RNA, 20 nt, synthetic construct
  misc_feature 1..20: note = Synthetic
  source 1..20: mol_type = other RNA
ccccctggtccccccggctc

SEQ ID NO: 842 - RNA, 20 nt, synthetic construct
  misc_feature 1..20: note = Synthetic
  source 1..20: mol_type = other RNA
cccctggtccccccggctct

SEQ ID NO: 843 - RNA, 20 nt, synthetic construct
  misc_feature 1..20: note = Synthetic
  source 1..20: mol_type = other RNA
ccctggtccccccggctctg

SEQ ID NO: 844 - RNA, 20 nt, synthetic construct
  misc_feature 1..20: note = Synthetic
  source 1..20: mol_type = other RNA
cctggtccccccggctctgg

SEQ ID NO: 845 - RNA, 20 nt, synthetic construct
  misc_feature 1..20: note = Synthetic
  source 1..20: mol_type = other RNA
gcagcacgtccgcgagagcg

SEQ ID NO: 846 - RNA, 20 nt, synthetic construct
  misc_feature 1..20: note = Synthetic
  source 1..20: mol_type = other RNA
cacgtccgcgagagcgcggc

SEQ ID NO: 847 - RNA, 20 nt, synthetic construct
  misc_feature 1..20: note = Synthetic
  source 1..20: mol_type = other RNA
acgtccgcgagagcgcggcc

SEQ ID NO: 848 - RNA, 20 nt, synthetic construct
  misc_feature 1..20: note = Synthetic
  source 1..20: mol_type = other RNA
cgtccgcgagagcgcggccg

SEQ ID NO: 849 - RNA, 20 nt, synthetic construct
  misc_feature 1..20: note = Synthetic
  source 1..20: mol_type = other RNA
cgcgctgacctacgcgctca

SEQ ID NO: 850 - RNA, 20 nt, synthetic construct
  misc_feature 1..20: note = Synthetic
  source 1..20: mol_type = other RNA
gctgacctacgcgctcatgg

SEQ ID NO: 851 - RNA, 20 nt, synthetic construct
  misc_feature 1..20: note = Synthetic
  source 1..20: mol_type = other RNA
ctgacctacgcgctcatggc

SEQ ID NO: 852 - RNA, 20 nt, synthetic construct
  misc_feature 1..20: note = Synthetic
  source 1..20: mol_type = other RNA
tgacctacgcgctcatggcg

SEQ ID NO: 853 - RNA, 20 nt, synthetic construct
  misc_feature 1..20: note = Synthetic
  source 1..20: mol_type = other RNA
gtacttcaagatcagtcccg

SEQ ID NO: 854 - RNA, 20 nt, synthetic construct
  misc_feature 1..20: note = Synthetic
  source 1..20: mol_type = other RNA
cttgcatcatcagctcaaga

SEQ ID NO: 855 - RNA, 20 nt, synthetic construct
  misc_feature 1..20: note = Synthetic
  source 1..20: mol_type = other RNA
ttgcatcatcagctcaagac

SEQ ID NO: 856 - RNA, 20 nt, synthetic construct
  misc_feature 1..20: note = Synthetic
  source 1..20: mol_type = other RNA
ctcaagacgggcctccatcc

SEQ ID NO: 857 - RNA, 20 nt, synthetic construct
  misc_feature 1..20: note = Synthetic
  source 1..20: mol_type = other RNA
tcaagacgggcctccatccc

SEQ ID NO: 858 - RNA, 20 nt, synthetic construct
  misc_feature 1..20: note = Synthetic
  source 1..20: mol_type = other RNA
acgggcctccatcccgggtt

SEQ ID NO: 859 - RNA, 20 nt, synthetic construct
  misc_feature 1..20: note = Synthetic
  source 1..20: mol_type = other RNA
cgggcctccatcccgggttt

SEQ ID NO: 860 - RNA, 20 nt, synthetic construct
  misc_feature 1..20: note = Synthetic
  source 1..20: mol_type = other RNA
tgggttcaccgtcgtccgac

SEQ ID NO: 861 - RNA, 20 nt, synthetic construct
  misc_feature 1..20: note = Synthetic
  source 1..20: mol_type = other RNA
gactgagaacgtgctgttct

SEQ ID NO: 862 - RNA, 20 nt, synthetic construct
  misc_feature 1..20: note = Synthetic
  source 1..20: mol_type = other RNA
gctgttctcggagcgcgcgt

SEQ ID NO: 863 - RNA, 20 nt, synthetic construct
  misc_feature 1..20: note = Synthetic
  source 1..20: mol_type = other RNA
gttctcggagcgcgcgtcgg

SEQ ID NO: 864 - RNA, 20 nt, synthetic construct
  misc_feature 1..20: note = Synthetic
  source 1..20: mol_type = other RNA
cgcgtcggaggcgtacttcc

SEQ ID NO: 865 - RNA, 20 nt, synthetic construct
  misc_feature 1..20: note = Synthetic
  source 1..20: mol_type = other RNA
gcgtcggaggcgtacttcct

SEQ ID NO: 866 - RNA, 20 nt, synthetic construct
  misc_feature 1..20: note = Synthetic
  source 1..20: mol_type = other RNA
gtacttcctgggccagctcc

SEQ ID NO: 867 - RNA, 20 nt, synthetic construct
  misc_feature 1..20: note = Synthetic
  source 1..20: mol_type = other RNA
cttcctgggccagctccagg

SEQ ID NO: 868 - RNA, 20 nt, synthetic construct
  misc_feature 1..20: note = Synthetic
  source 1..20: mol_type = other RNA
tgggccagctccaggtggcc

SEQ ID NO: 869 - RNA, 20 nt, synthetic construct
  misc_feature 1..20: note = Synthetic
  source 1..20: mol_type = other RNA
caggtggcccggcacgaaac

SEQ ID NO: 870 - RNA, 20 nt, synthetic construct
  misc_feature 1..20: note = Synthetic
  source 1..20: mol_type = other RNA
gtggcccggcacgaaactgg

SEQ ID NO: 871 - RNA, 20 nt, synthetic construct
  misc_feature 1..20: note = Synthetic
  source 1..20: mol_type = other RNA
tggcccggcacgaaactggc

SEQ ID NO: 872 - RNA, 20 nt, synthetic construct
  misc_feature 1..20: note = Synthetic
  source 1..20: mol_type = other RNA
ggcccggcacgaaactggcg

SEQ ID NO: 873 - RNA, 20 nt, synthetic construct
  misc_feature 1..20: note = Synthetic
  source 1..20: mol_type = other RNA
gcccggcacgaaactggcgg

SEQ ID NO: 874 - RNA, 20 nt, synthetic construct
  misc_feature 1..20: note = Synthetic
  source 1..20: mol_type = other RNA
cccggcacgaaactggcggg

SEQ ID NO: 875 - RNA, 20 nt, synthetic construct
  misc_feature 1..20: note = Synthetic
  source 1..20: mol_type = other RNA
ccggcacgaaactggcgggg

SEQ ID NO: 876 - RNA, 20 nt, synthetic construct
  misc_feature 1..20: note = Synthetic
  source 1..20: mol_type = other RNA
cacccagccgcgcgcgaacg

SEQ ID NO: 877 - RNA, 20 nt, synthetic construct
  misc_feature 1..20: note = Synthetic
  source 1..20: mol_type = other RNA
gccgcgcgcgaacgtggacc

SEQ ID NO: 878 - RNA, 20 nt, synthetic construct
  misc_feature 1..20: note = Synthetic
  source 1..20: mol_type = other RNA
ccgcgcgcgaacgtggacct

SEQ ID NO: 879 - RNA, 20 nt, synthetic construct
  misc_feature 1..20: note = Synthetic
  source 1..20: mol_type = other RNA
cgcgaacgtggacctgggcg

SEQ ID NO: 880 - RNA, 20 nt, synthetic construct
  misc_feature 1..20: note = Synthetic
  source 1..20: mol_type = other RNA
gcgaacgtggacctgggcgt

SEQ ID NO: 881 - RNA, 20 nt, synthetic construct
  misc_feature 1..20: note = Synthetic
  source 1..20: mol_type = other RNA
cgtgggctacaccgccgtcg

SEQ ID NO: 882 - RNA, 20 nt, synthetic construct
  misc_feature 1..20: note = Synthetic
  source 1..20: mol_type = other RNA
ctacaccgccgtcgtggcca

SEQ ID NO: 883 - RNA, 20 nt, synthetic construct
  misc_feature 1..20: note = Synthetic
  source 1..20: mol_type = other RNA
ccgcaaccccgtcaccgaca

SEQ ID NO: 884 - RNA, 20 nt, synthetic construct
  misc_feature 1..20: note = Synthetic
  source 1..20: mol_type = other RNA
cgcaaccccgtcaccgacat

SEQ ID NO: 885 - RNA, 20 nt, synthetic construct
  misc_feature 1..20: note = Synthetic
  source 1..20: mol_type = other RNA
ccttccccaaaacttttacc

SEQ ID NO: 886 - RNA, 20 nt, synthetic construct
  misc_feature 1..20: note = Synthetic
  source 1..20: mol_type = other RNA
cttccccaaaacttttacct

SEQ ID NO: 887 - RNA, 20 nt, synthetic construct
  misc_feature 1..20: note = Synthetic
  source 1..20: mol_type = other RNA
caaaacttttacctgggccg

SEQ ID NO: 888 - RNA, 20 nt, synthetic construct
  misc_feature 1..20: note = Synthetic
  source 1..20: mol_type = other RNA
aaaacttttacctgggccgc

SEQ ID NO: 889 - RNA, 20 nt, synthetic construct
  misc_feature 1..20: note = Synthetic
  source 1..20: mol_type = other RNA
aaacttttacctgggccgcg

SEQ ID NO: 890 - RNA, 20 nt, synthetic construct
  misc_feature 1..20: note = Synthetic
  source 1..20: mol_type = other RNA
ccgcggggctccccctctcc

SEQ ID NO: 891 - RNA, 20 nt, synthetic construct
  misc_feature 1..20: note = Synthetic
  source 1..20: mol_type = other RNA
tccccctctcctggacaacg

SEQ ID NO: 892 - RNA, 20 nt, synthetic construct
  misc_feature 1..20: note = Synthetic
  source 1..20: mol_type = other RNA
acgcggcagccgtgtacctg

SEQ ID NO: 893 - RNA, 20 nt, synthetic construct
  misc_feature 1..20: note = Synthetic
  source 1..20: mol_type = other RNA
agccgtgtacctgcggaacg

SEQ ID NO: 894 - RNA, 20 nt, synthetic construct
  misc_feature 1..20: note = Synthetic
  source 1..20: mol_type = other RNA
gtacctgcggaacgcggtcg

SEQ ID NO: 895 - RNA, 20 nt, synthetic construct
  misc_feature 1..20: note = Synthetic
  source 1..20: mol_type = other RNA
cctgcggaacgcggtcgtgg

SEQ ID NO: 896 - RNA, 20 nt, synthetic construct
  misc_feature 1..20: note = Synthetic
  source 1..20: mol_type = other RNA
ctgcggaacgcggtcgtggc

SEQ ID NO: 897 - RNA, 20 nt, synthetic construct
  misc_feature 1..20: note = Synthetic
  source 1..20: mol_type = other RNA
ggtcgtggcgggaaaccgcc

SEQ ID NO: 898 - RNA, 20 nt, synthetic construct
  misc_feature 1..20: note = Synthetic
  source 1..20: mol_type = other RNA
gtcgtggcgggaaaccgcct

SEQ ID NO: 899 - RNA, 20 nt, synthetic construct
  misc_feature 1..20: note = Synthetic
  source 1..20: mol_type = other RNA
tcgtggcgggaaaccgcctg

SEQ ID NO: 900 - RNA, 20 nt, synthetic construct
  misc_feature 1..20: note = Synthetic
  source 1..20: mol_type = other RNA
ggcgggaaaccgcctggggc

SEQ ID NO: 901 - RNA, 20 nt, synthetic construct
  misc_feature 1..20: note = Synthetic
  source 1..20: mol_type = other RNA
gcccagcccgtccccgtgtt

SEQ ID NO: 902 - RNA, 20 nt, synthetic construct
  misc_feature 1..20: note = Synthetic
  source 1..20: mol_type = other RNA
cccagcccgtccccgtgttc

SEQ ID NO: 903 - RNA, 20 nt, synthetic construct
  misc_feature 1..20: note = Synthetic
  source 1..20: mol_type = other RNA
ccccgtgttcgggtgcgccc

SEQ ID NO: 904 - RNA, 20 nt, synthetic construct
  misc_feature 1..20: note = Synthetic
  source 1..20: mol_type = other RNA
tcgggtgcgcccaggtgccg

SEQ ID NO: 905 - RNA, 20 nt, synthetic construct
  misc_feature 1..20: note = Synthetic
  source 1..20: mol_type = other RNA
gcccaggtgccgcggcgcgc

SEQ ID NO: 906 - RNA, 20 nt, synthetic construct
  misc_feature 1..20: note = Synthetic
  source 1..20: mol_type = other RNA
cccaggtgccgcggcgcgca

SEQ ID NO: 907 - RNA, 20 nt, synthetic construct
  misc_feature 1..20: note = Synthetic
  source 1..20: mol_type = other RNA
ggtgccgcggcgcgcaggga

SEQ ID NO: 908 - RNA, 20 nt, synthetic construct
  misc_feature 1..20: note = Synthetic
  source 1..20: mol_type = other RNA
cggcgcgcagggatggacca

SEQ ID NO: 909 - RNA, 20 nt, synthetic construct
  misc_feature 1..20: note = Synthetic
  source 1..20: mol_type = other RNA
cgcagggatggaccacggcc

SEQ ID NO: 910 - RNA, 20 nt, synthetic construct
  misc_feature 1..20: note = Synthetic
  source 1..20: mol_type = other RNA
ccgacgtcaactacttccgc

SEQ ID NO: 911 - RNA, 20 nt, synthetic construct
  misc_feature 1..20: note = Synthetic
  source 1..20: mol_type = other RNA
tccgccggccctgcaacccc

SEQ ID NO: 912 - RNA, 20 nt, synthetic construct
  misc_feature 1..20: note = Synthetic
  source 1..20: mol_type = other RNA
ccgccggccctgcaaccccc

SEQ ID NO: 913 - RNA, 20 nt, synthetic construct
  misc_feature 1..20: note = Synthetic
  source 1..20: mol_type = other RNA
cgccggccctgcaacccccg

SEQ ID NO: 914 - RNA, 20 nt, synthetic construct
  misc_feature 1..20: note = Synthetic
  source 1..20: mol_type = other RNA
aacccccggggacgcgccgc

SEQ ID NO: 915 - RNA, 20 nt, synthetic construct
  misc_feature 1..20: note = Synthetic
  source 1..20: mol_type = other RNA
acccccggggacgcgccgcc

SEQ ID NO: 916 - RNA, 20 nt, synthetic construct
  misc_feature 1..20: note = Synthetic
  source 1..20: mol_type = other RNA
cccccggggacgcgccgccg

SEQ ID NO: 917 - RNA, 20 nt, synthetic construct
  misc_feature 1..20: note = Synthetic
  source 1..20: mol_type = other RNA
ccccggggacgcgccgccgg

SEQ ID NO: 918 - RNA, 20 nt, synthetic construct
  misc_feature 1..20: note = Synthetic
  source 1..20: mol_type = other RNA
cgccgccgggggcgtttacg

SEQ ID NO: 919 - RNA, 20 nt, synthetic construct
  misc_feature 1..20: note = Synthetic
  source 1..20: mol_type = other RNA
gccgccgggggcgtttacgc

SEQ ID NO: 920 - RNA, 20 nt, synthetic construct
  misc_feature 1..20: note = Synthetic
  source 1..20: mol_type = other RNA
ccgccgggggcgtttacgcg

SEQ ID NO: 921 - RNA, 20 nt, synthetic construct
  misc_feature 1..20: note = Synthetic
  source 1..20: mol_type = other RNA
cgccgggggcgtttacgcgg

SEQ ID NO: 922 - RNA, 20 nt, synthetic construct
  misc_feature 1..20: note = Synthetic
  source 1..20: mol_type = other RNA
gggcgtttacgcgggggaca

SEQ ID NO: 923 - RNA, 20 nt, synthetic construct
  misc_feature 1..20: note = Synthetic
  source 1..20: mol_type = other RNA
cgtttacgcgggggacaagg

SEQ ID NO: 924 - RNA, 20 nt, synthetic construct
  misc_feature 1..20: note = Synthetic
  source 1..20: mol_type = other RNA
gtttacgcgggggacaagga

SEQ ID NO: 925 - RNA, 20 nt, synthetic construct
  misc_feature 1..20: note = Synthetic
  source 1..20: mol_type = other RNA
tttacgcgggggacaaggag

SEQ ID NO: 926 - RNA, 20 nt, synthetic construct
  misc_feature 1..20: note = Synthetic
  source 1..20: mol_type = other RNA
ttacgcgggggacaaggagg

SEQ ID NO: 927 - RNA, 20 nt, synthetic construct
  misc_feature 1..20: note = Synthetic
  source 1..20: mol_type = other RNA
accgccctcatgtacgacca

SEQ ID NO: 928 - RNA, 20 nt, synthetic construct
  misc_feature 1..20: note = Synthetic
  source 1..20: mol_type = other RNA
acggccagagcgacccgtcc

SEQ ID NO: 929 - RNA, 20 nt, synthetic construct
  misc_feature 1..20: note = Synthetic
  source 1..20: mol_type = other RNA
cggccagagcgacccgtccc

SEQ ID NO: 930 - RNA, 20 nt, synthetic construct
  misc_feature 1..20: note = Synthetic
  source 1..20: mol_type = other RNA
cgacccgtcccgggccttcg

SEQ ID NO: 931 - RNA, 20 nt, synthetic construct
  misc_feature 1..20: note = Synthetic
  source 1..20: mol_type = other RNA
gtcccgggccttcgcggcca

SEQ ID NO: 932 - RNA, 20 nt, synthetic construct
  misc_feature 1..20: note = Synthetic
  source 1..20: mol_type = other RNA
tcgcggccacggccaacccg

SEQ ID NO: 933 - RNA, 20 nt, synthetic construct
  misc_feature 1..20: note = Synthetic
  source 1..20: mol_type = other RNA
cgcggccacggccaacccgt

SEQ ID NO: 934 - RNA, 20 nt, synthetic construct
  misc_feature 1..20: note = Synthetic
  source 1..20: mol_type = other RNA
gcgtcgcagcgattttcgta

SEQ ID NO: 935 - RNA, 20 nt, synthetic construct
  misc_feature 1..20: note = Synthetic
  source 1..20: mol_type = other RNA
cgtcgcagcgattttcgtac

SEQ ID NO: 936 - RNA, 20 nt, synthetic construct
  misc_feature 1..20: note = Synthetic
  source 1..20: mol_type = other RNA
gtcgcagcgattttcgtacg

SEQ ID NO: 937 - RNA, 20 nt, synthetic construct
  misc_feature 1..20: note = Synthetic
  source 1..20: mol_type = other RNA
tacggggacctgctctataa

SEQ ID NO: 938 - RNA, 20 nt, synthetic construct
  misc_feature 1..20: note = Synthetic
  source 1..20: mol_type = other RNA
acggggacctgctctataac

SEQ ID NO: 939 - RNA, 20 nt, synthetic construct
  misc_feature 1..20: note = Synthetic
  source 1..20: mol_type = other RNA
cggggacctgctctataacg

SEQ ID NO: 940 - RNA, 20 nt, synthetic construct
  misc_feature 1..20: note = Synthetic
  source 1..20: mol_type = other RNA
aacggggcctaccacctcaa

SEQ ID NO: 941 - RNA, 20 nt, synthetic construct
  misc_feature 1..20: note = Synthetic
  source 1..20: mol_type = other RNA
acggggcctaccacctcaac

SEQ ID NO: 942 - RNA, 20 nt, synthetic construct
  misc_feature 1..20: note = Synthetic
  source 1..20: mol_type = other RNA
cggggcctaccacctcaacg

SEQ ID NO: 943 - RNA, 20 nt, synthetic construct
  misc_feature 1..20: note = Synthetic
  source 1..20: mol_type = other RNA
ccacctcaacggggcctcgc

SEQ ID NO: 944 - RNA, 20 nt, synthetic construct
  misc_feature 1..20: note = Synthetic
  source 1..20: mol_type = other RNA
ctgctttaagttctttacgt

SEQ ID NO: 945 - RNA, 20 nt, synthetic construct
  misc_feature 1..20: note = Synthetic
  source 1..20: mol_type = other RNA
cgccgccaaacatcgctgcc

SEQ ID NO: 946 - RNA, 20 nt, synthetic construct
  misc_feature 1..20: note = Synthetic
  source 1..20: mol_type = other RNA
ctgcctggagcgcctgatcg

SEQ ID NO: 947 - RNA, 20 nt, synthetic construct
  misc_feature 1..20: note = Synthetic
  source 1..20: mol_type = other RNA
ggagcgcctgatcgtggaga

SEQ ID NO: 948 - RNA, 20 nt, synthetic construct
  misc_feature 1..20: note = Synthetic
  source 1..20: mol_type = other RNA
gagcgcctgatcgtggagac

SEQ ID NO: 949 - RNA, 20 nt, synthetic construct
  misc_feature 1..20: note = Synthetic
  source 1..20: mol_type = other RNA
cctgatcgtggagacgggtt

SEQ ID NO: 950 - RNA, 20 nt, synthetic construct
  misc_feature 1..20: note = Synthetic
  source 1..20: mol_type = other RNA
gatcgtggagacgggttcgg

SEQ ID NO: 951 - RNA, 20 nt, synthetic construct
  misc_feature 1..20: note = Synthetic
  source 1..20: mol_type = other RNA
gacgggttcggcggtgtcca

SEQ ID NO: 952 - RNA, 20 nt, synthetic construct
  misc_feature 1..20: note = Synthetic
  source 1..20: mol_type = other RNA
cgtacagtttaagcgccccc

SEQ ID NO: 953 - RNA, 20 nt, synthetic construct
  misc_feature 1..20: note = Synthetic
  source 1..20: mol_type = other RNA
gtacagtttaagcgcccccc

SEQ ID NO: 954 - RNA, 20 nt, synthetic construct
  misc_feature 1..20: note = Synthetic
  source 1..20: mol_type = other RNA
tacagtttaagcgccccccg

SEQ ID NO: 955 - RNA, 20 nt, synthetic construct
  misc_feature 1..20: note = Synthetic
  source 1..20: mol_type = other RNA
cccggggtgccgcgaactcg

SEQ ID NO: 956 - RNA, 20 nt, synthetic construct
  misc_feature 1..20: note = Synthetic
  source 1..20: mol_type = other RNA
ggggtgccgcgaactcgtgg

SEQ ID NO: 957 - RNA, 20 nt, synthetic construct
  misc_feature 1..20: note = Synthetic
  source 1..20: mol_type = other RNA
gaactcgtggaggacccgtg

SEQ ID NO: 958 - RNA, 20 nt, synthetic construct
  misc_feature 1..20: note = Synthetic
  source 1..20: mol_type = other RNA
ggacccgtgtggcctgtttc

SEQ ID NO: 959 - RNA, 20 nt, synthetic construct
  misc_feature 1..20: note = Synthetic
  source 1..20: mol_type = other RNA
cccgtgtggcctgtttcagg

SEQ ID NO: 960 - RNA, 20 nt, synthetic construct
  misc_feature 1..20: note = Synthetic
  source 1..20: mol_type = other RNA
ctcctccgcagtgcccgcaa

SEQ ID NO: 961 - RNA, 20 nt, synthetic construct
  misc_feature 1..20: note = Synthetic
  source 1..20: mol_type = other RNA
tcctccgcagtgcccgcaac

SEQ ID NO: 962 - RNA, 20 nt, synthetic construct
  misc_feature 1..20: note = Synthetic
  source 1..20: mol_type = other RNA
cctccgcagtgcccgcaacg

SEQ ID NO: 963 - RNA, 20 nt, synthetic construct
  misc_feature 1..20: note = Synthetic
  source 1..20: mol_type = other RNA
gcaacggggaagcccacgcg

SEQ ID NO: 964 - RNA, 20 nt, synthetic construct
  misc_feature 1..20: note = Synthetic
  source 1..20: mol_type = other RNA
caacggggaagcccacgcgc

SEQ ID NO: 965 - RNA, 20 nt, synthetic construct
  misc_feature 1..20: note = Synthetic
  source 1..20: mol_type = other RNA
ctatgacgcatccccgctca

SEQ ID NO: 966 - RNA, 20 nt, synthetic construct
  misc_feature 1..20: note = Synthetic
  source 1..20: mol_type = other RNA
tatgacgcatccccgctcaa

SEQ ID NO: 967 - RNA, 20 nt, synthetic construct
  misc_feature 1..20: note = Synthetic
  source 1..20: mol_type = other RNA
cgcatccccgctcaagggac

SEQ ID NO: 968 - RNA, 17 nt, synthetic construct
  misc_feature 1..17: note = Synthetic
  source 1..17: mol_type = other RNA
aacgtccaggccgtcct

SEQ ID NO: 969 - RNA, 17 nt, synthetic construct
  misc_feature 1..17: note = Synthetic
  source 1..17: mol_type = other RNA
acgtccaggccgtcctc

SEQ ID NO: 970 - RNA, 17 nt, synthetic construct
  misc_feature 1..17: note = Synthetic
  source 1..17: mol_type = other RNA
cgtccaggccgtcctcg

SEQ ID NO: 971 - RNA, 17 nt, synthetic construct
  misc_feature 1..17: note = Synthetic
  source 1..17: mol_type = other RNA
ctcggggcgtttgagcg

SEQ ID NO: 972 - RNA, 17 nt, synthetic construct
  misc_feature 1..17: note = Synthetic
  source 1..17: mol_type = other RNA
ggcgtttgagcgcggca

SEQ ID NO: 973 - RNA, 17 nt, synthetic construct
  misc_feature 1..17: note = Synthetic
  source 1..17: mol_type = other RNA
gatgctgcacgtgctgc

SEQ ID NO: 974 - RNA, 17 nt, synthetic construct
  misc_feature 1..17: note = Synthetic
  source 1..17: mol_type = other RNA
gcacgtgctgctggaaa

SEQ ID NO: 975 - RNA, 17 nt, synthetic construct
  misc_feature 1..17: note = Synthetic
  source 1..17: mol_type = other RNA
ggaaaaggcgccgcccc

SEQ ID NO: 976 - RNA, 17 nt, synthetic construct
  misc_feature 1..17: note = Synthetic
  source 1..17: mol_type = other RNA
gccgatgcaacgatacc

SEQ ID NO: 977 - RNA, 17 nt, synthetic construct
  misc_feature 1..17: note = Synthetic
  source 1..17: mol_type = other RNA
caacgatacctggacaa

SEQ ID NO: 978 - RNA, 17 nt, synthetic construct
  misc_feature 1..17: note = Synthetic
  source 1..17: mol_type = other RNA
cctggacaacggccgcc

SEQ ID NO: 979 - RNA, 17 nt, synthetic construct
  misc_feature 1..17: note = Synthetic
  source 1..17: mol_type = other RNA
acggccgcctggccacc

SEQ ID NO: 980 - RNA, 17 nt, synthetic construct
  misc_feature 1..17: note = Synthetic
  source 1..17: mol_type = other RNA
cggccgcctggccacca

SEQ ID NO: 981 - RNA, 17 nt, synthetic construct
  misc_feature 1..17: note = Synthetic
  source 1..17: mol_type = other RNA
ccgcctggccaccaggg

SEQ ID NO: 982 - RNA, 17 nt, synthetic construct
  misc_feature 1..17: note = Synthetic
  source 1..17: mol_type = other RNA
tggccaccagggtggcc

SEQ ID NO: 983 - RNA, 17 nt, synthetic construct
  misc_feature 1..17: note = Synthetic
  source 1..17: mol_type = other RNA
ggccaccagggtggccc

SEQ ID NO: 984 - RNA, 17 nt, synthetic construct
  misc_feature 1..17: note = Synthetic
  source 1..17: mol_type = other RNA
ggtggcccgggcgaccc

SEQ ID NO: 985 - RNA, 17 nt, synthetic construct
  misc_feature 1..17: note = Synthetic
  source 1..17: mol_type = other RNA
cgagacgagctttttcc

SEQ ID NO: 986 - RNA, 17 nt, synthetic construct
  misc_feature 1..17: note = Synthetic
  source 1..17: mol_type = other RNA
gagacgagctttttcct

SEQ ID NO: 987 - RNA, 17 nt, synthetic construct
  misc_feature 1..17: note = Synthetic
  source 1..17: mol_type = other RNA
gagctttttcctgggca

SEQ ID NO: 988 - RNA, 17 nt, synthetic construct
  misc_feature 1..17: note = Synthetic
  source 1..17: mol_type = other RNA
ctttttcctgggcaagg

SEQ ID NO: 989 - RNA, 17 nt, synthetic construct
  misc_feature 1..17: note = Synthetic
  source 1..17: mol_type = other RNA
tttttcctgggcaaggc

SEQ ID NO: 990 - RNA, 17 nt, synthetic construct
  misc_feature 1..17: note = Synthetic
  source 1..17: mol_type = other RNA
gcaaggcgggccaccgc

SEQ ID NO: 991 - RNA, 17 nt, synthetic construct
  misc_feature 1..17: note = Synthetic
  source 1..17: mol_type = other RNA
caaggcgggccaccgcc

SEQ ID NO: 992 - RNA, 17 nt, synthetic construct
  misc_feature 1..17: note = Synthetic
  source 1..17: mol_type = other RNA
ggcgggccaccgccggg

SEQ ID NO: 993 - RNA, 17 nt, synthetic construct
  misc_feature 1..17: note = Synthetic
  source 1..17: mol_type = other RNA
ccgccgggaggccgtcg

SEQ ID NO: 994 - RNA, 17 nt, synthetic construct
  misc_feature 1..17: note = Synthetic
  source 1..17: mol_type = other RNA
gggaggccgtcgaggcc

SEQ ID NO: 995 - RNA, 17 nt, synthetic construct
  misc_feature 1..17: note = Synthetic
  source 1..17: mol_type = other RNA
cgtcgaggcctggctcg

SEQ ID NO: 996 - RNA, 17 nt, synthetic construct
  misc_feature 1..17: note = Synthetic
  source 1..17: mol_type = other RNA
gctcgtggacctcacca

SEQ ID NO: 997 - RNA, 17 nt, synthetic construct
  misc_feature 1..17: note = Synthetic
  source 1..17: mol_type = other RNA
ggccacgcagccctccg

SEQ ID NO: 998 - RNA, 17 nt, synthetic construct
  misc_feature 1..17: note = Synthetic
  source 1..17: mol_type = other RNA
acgcatgccgacacgcg

SEQ ID NO: 999 - RNA, 17 nt, synthetic construct
  misc_feature 1..17: note = Synthetic
  source 1..17: mol_type = other RNA
cgcatgccgacacgcgc

SEQ ID NO: 1000 - RNA, 17 nt, synthetic construct
  misc_feature 1..17: note = Synthetic
  source 1..17: mol_type = other RNA
atgccgacacgcgcggg

SEQ ID NO: 1001 - RNA, 17 nt, synthetic construct
  misc_feature 1..17: note = Synthetic
  source 1..17: mol_type = other RNA
cgacacgcgcgggcggc

SEQ ID NO: 1002 - RNA, 17 nt, synthetic construct
  misc_feature 1..17: note = Synthetic
  source 1..17: mol_type = other RNA
cgcgggcggccggtcga

SEQ ID NO: 1003 - RNA, 17 nt, synthetic construct
  misc_feature 1..17: note = Synthetic
  source 1..17: mol_type = other RNA
gcgggcggccggtcgac

SEQ ID NO: 1004 - RNA, 17 nt, synthetic construct
  misc_feature 1..17: note = Synthetic
  source 1..17: mol_type = other RNA
cgggcggccggtcgacg

SEQ ID NO: 1005 - RNA, 17 nt, synthetic construct
  misc_feature 1..17: note = Synthetic
  source 1..17: mol_type = other RNA
gcagtccttcctgaaag

SEQ ID NO: 1006 - RNA, 17 nt, synthetic construct
  misc_feature 1..17: note = Synthetic
  source 1..17: mol_type = other RNA
gtccttcctgaaagtgg

SEQ ID NO: 1007 - RNA, 17 nt, synthetic construct
  misc_feature 1..17: note = Synthetic
  source 1..17: mol_type = other RNA
caccgaagccgacgtgc

SEQ ID NO: 1008 - RNA, 17 nt, synthetic construct
  misc_feature 1..17: note = Synthetic
  source 1..17: mol_type = other RNA
gacgtgccggtgacgta

SEQ ID NO: 1009 - RNA, 17 nt, synthetic construct
  misc_feature 1..17: note = Synthetic
  source 1..17: mol_type = other RNA
ggtgacgtacggcgaga

SEQ ID NO: 1010 - RNA, 17 nt, synthetic construct
  misc_feature 1..17: note = Synthetic
  source 1..17: mol_type = other RNA
ggcgagatggtcctgaa

SEQ ID NO: 1011 - RNA, 17 nt, synthetic construct
  misc_feature 1..17: note = Synthetic
  source 1..17: mol_type = other RNA
gcgagatggtcctgaac

SEQ ID NO: 1012 - RNA, 17 nt, synthetic construct
  misc_feature 1..17: note = Synthetic
  source 1..17: mol_type = other RNA
cgagatggtcctgaacg

SEQ ID NO: 1013 - RNA, 17 nt, synthetic construct
  misc_feature 1..17: note = Synthetic
  source 1..17: mol_type = other RNA
cctgaacggggccaacc

SEQ ID NO: 1014 - RNA, 17 nt, synthetic construct
  misc_feature 1..17: note = Synthetic
  source 1..17: mol_type = other RNA
cggggccaacctggtca

SEQ ID NO: 1015 - RNA, 17 nt, synthetic construct
  misc_feature 1..17: note = Synthetic
  source 1..17: mol_type = other RNA
ggtcacggcgctcgtga

SEQ ID NO: 1016 - RNA, 17 nt, synthetic construct
  misc_feature 1..17: note = Synthetic
  source 1..17: mol_type = other RNA
gtcacggcgctcgtgat

SEQ ID NO: 1017 - RNA, 17 nt, synthetic construct
  misc_feature 1..17: note = Synthetic
  source 1..17: mol_type = other RNA
ggcgctcgtgatgggca

SEQ ID NO: 1018 - RNA, 17 nt, synthetic construct
  misc_feature 1..17: note = Synthetic
  source 1..17: mol_type = other RNA
caaggccgtgcgaagtc

SEQ ID NO: 1019 - RNA, 17 nt, synthetic construct
  misc_feature 1..17: note = Synthetic
  source 1..17: mol_type = other RNA
gcgaagtctggacgacg

SEQ ID NO: 1020 - RNA, 17 nt, synthetic construct
  misc_feature 1..17: note = Synthetic
  source 1..17: mol_type = other RNA
cgaagtctggacgacgt

SEQ ID NO: 1021 - RNA, 17 nt, synthetic construct
  misc_feature 1..17: note = Synthetic
  source 1..17: mol_type = other RNA
cgtgggccgccacctgc

SEQ ID NO: 1022 - RNA, 17 nt, synthetic construct
  misc_feature 1..17: note = Synthetic
  source 1..17: mol_type = other RNA
ccacctgctggagatgc

SEQ ID NO: 1023 - RNA, 17 nt, synthetic construct
  misc_feature 1..17: note = Synthetic
  source 1..17: mol_type = other RNA
cctgctggagatgcagg

SEQ ID NO: 1024 - RNA, 17 nt, synthetic construct
  misc_feature 1..17: note = Synthetic
  source 1..17: mol_type = other RNA
agcagctcgacctgaac

SEQ ID NO: 1025 - RNA, 17 nt, synthetic construct
  misc_feature 1..17: note = Synthetic
  source 1..17: mol_type = other RNA
cctgaaccggcagacgc

SEQ ID NO: 1026 - RNA, 17 nt, synthetic construct
  misc_feature 1..17: note = Synthetic
  source 1..17: mol_type = other RNA
gacgacgcgcgtgcgcg

SEQ ID NO: 1027 - RNA, 17 nt, synthetic construct
  misc_feature 1..17: note = Synthetic
  source 1..17: mol_type = other RNA
gcgcgtgcgcgcggatc

SEQ ID NO: 1028 - RNA, 17 nt, synthetic construct
  misc_feature 1..17: note = Synthetic
  source 1..17: mol_type = other RNA
gcggatctggtgtccat

SEQ ID NO: 1029 - RNA, 17 nt, synthetic construct
  misc_feature 1..17: note = Synthetic
  source 1..17: mol_type = other RNA
gtccatcggcgagaagc

SEQ ID NO: 1030 - RNA, 17 nt, synthetic construct
  misc_feature 1..17: note = Synthetic
  source 1..17: mol_type = other RNA
cgagaagctggtctttc

SEQ ID NO: 1031 - RNA, 17 nt, synthetic construct
  misc_feature 1..17: note = Synthetic
  source 1..17: mol_type = other RNA
gaagctggtctttctgg

SEQ ID NO: 1032 - RNA, 17 nt, synthetic construct
  misc_feature 1..17: note = Synthetic
  source 1..17: mol_type = other RNA
ggtctttctggaggccc

SEQ ID NO: 1033 - RNA, 17 nt, synthetic construct
  misc_feature 1..17: note = Synthetic
  source 1..17: mol_type = other RNA
caacgttccctaccccc

SEQ ID NO: 1034 - RNA, 17 nt, synthetic construct
  misc_feature 1..17: note = Synthetic
  source 1..17: mol_type = other RNA
cgttccctaccccctgg

SEQ ID NO: 1035 - RNA, 17 nt, synthetic construct
  misc_feature 1..17: note = Synthetic
  source 1..17: mol_type = other RNA
gttccctaccccctggt

SEQ ID NO: 1036 - RNA, 17 nt, synthetic construct
  misc_feature 1..17: note = Synthetic
  source 1..17: mol_type = other RNA
ccccctggtgggcgcca

SEQ ID NO: 1037 - RNA, 17 nt, synthetic construct
  misc_feature 1..17: note = Synthetic
  source 1..17: mol_type = other RNA
gacgttcgtcctgcccc

SEQ ID NO: 1038 - RNA, 17 nt, synthetic construct
  misc_feature 1..17: note = Synthetic
  source 1..17: mol_type = other RNA
acgttcgtcctgcccct

SEQ ID NO: 1039 - RNA, 17 nt, synthetic construct
  misc_feature 1..17: note = Synthetic
  source 1..17: mol_type = other RNA
cctgggcctgttcaatc

SEQ ID NO: 1040 - RNA, 17 nt, synthetic construct
  misc_feature 1..17: note = Synthetic
  source 1..17: mol_type = other RNA
cctgttcaatccggtca

SEQ ID NO: 1041 - RNA, 17 nt, synthetic construct
  misc_feature 1..17: note = Synthetic
  source 1..17: mol_type = other RNA
tcaatccggtcatggaa

SEQ ID NO: 1042 - RNA, 17 nt, synthetic construct
  misc_feature 1..17: note = Synthetic
  source 1..17: mol_type = other RNA
cggtttgccgcgcacgc

SEQ ID NO: 1043 - RNA, 17 nt, synthetic construct
  misc_feature 1..17: note = Synthetic
  source 1..17: mol_type = other RNA
ggtttgccgcgcacgcc

SEQ ID NO: 1044 - RNA, 17 nt, synthetic construct
  misc_feature 1..17: note = Synthetic
  source 1..17: mol_type = other RNA
gtttgccgcgcacgccg

SEQ ID NO: 1045 - RNA, 17 nt, synthetic construct
  misc_feature 1..17: note = Synthetic
  source 1..17: mol_type = other RNA
gacctagtccccgcccc

SEQ ID NO: 1046 - RNA, 17 nt, synthetic construct
  misc_feature 1..17: note = Synthetic
  source 1..17: mol_type = other RNA
ccccgcccccggccacc

SEQ ID NO: 1047 - RNA, 17 nt, synthetic construct
  misc_feature 1..17: note = Synthetic
  source 1..17: mol_type = other RNA
cccgccagctgtttttt

SEQ ID NO: 1048 - RNA, 17 nt, synthetic construct
  misc_feature 1..17: note = Synthetic
  source 1..17: mol_type = other RNA
ccgccagctgttttttt

SEQ ID NO: 1049 - RNA, 17 nt, synthetic construct
  misc_feature 1..17: note = Synthetic
  source 1..17: mol_type = other RNA
cgccagctgtttttttg

SEQ ID NO: 1050 - RNA, 17 nt, synthetic construct
  misc_feature 1..17: note = Synthetic
  source 1..17: mol_type = other RNA
gccagctgtttttttgg

SEQ ID NO: 1051 - RNA, 17 nt, synthetic construct
  misc_feature 1..17: note = Synthetic
  source 1..17: mol_type = other RNA
gctgtttttttggggga

SEQ ID NO: 1052 - RNA, 17 nt, synthetic construct
  misc_feature 1..17: note = Synthetic
  source 1..17: mol_type = other RNA
ttgggggaaggaccgcc

SEQ ID NO: 1053 - RNA, 17 nt, synthetic construct
  misc_feature 1..17: note = Synthetic
  source 1..17: mol_type = other RNA
ggtgctgcgcctgtctc

SEQ ID NO: 1054 - RNA, 17 nt, synthetic construct
  misc_feature 1..17: note = Synthetic
  source 1..17: mol_type = other RNA
tctctggaacacgcgat

SEQ ID NO: 1055 - RNA, 17 nt, synthetic construct
  misc_feature 1..17: note = Synthetic
  source 1..17: mol_type = other RNA
ctctggaacacgcgatc

SEQ ID NO: 1056 - RNA, 17 nt, synthetic construct
  misc_feature 1..17: note = Synthetic
  source 1..17: mol_type = other RNA
gctgatgaacgttgacg

SEQ ID NO: 1057 - RNA, 17 nt, synthetic construct
  misc_feature 1..17: note = Synthetic
  source 1..17: mol_type = other RNA
gatgaacgttgacgcgg

SEQ ID NO: 1058 - RNA, 17 nt, synthetic construct
  misc_feature 1..17: note = Synthetic
  source 1..17: mol_type = other RNA
aacgttgacgcggcggt

SEQ ID NO: 1059 - RNA, 17 nt, synthetic construct
  misc_feature 1..17: note = Synthetic
  source 1..17: mol_type = other RNA
acgttgacgcggcggtc

SEQ ID NO: 1060 - RNA, 17 nt, synthetic construct
  misc_feature 1..17: note = Synthetic
  source 1..17: mol_type = other RNA
cgttgacgcggcggtcg

SEQ ID NO: 1061 - RNA, 17 nt, synthetic construct
  misc_feature 1..17: note = Synthetic
  source 1..17: mol_type = other RNA
gttgacgcggcggtcgg

SEQ ID NO: 1062 - RNA, 17 nt, synthetic construct
  misc_feature 1..17: note = Synthetic
  source 1..17: mol_type = other RNA
gaagccgccaatccgta

SEQ ID NO: 1063 - RNA, 17 nt, synthetic construct
  misc_feature 1..17: note = Synthetic
  source 1..17: mol_type = other RNA
aagccgccaatccgtac

SEQ ID NO: 1064 - RNA, 17 nt, synthetic construct
  misc_feature 1..17: note = Synthetic
  source 1..17: mol_type = other RNA
agccgccaatccgtacg

SEQ ID NO: 1065 - RNA, 17 nt, synthetic construct
  misc_feature 1..17: note = Synthetic
  source 1..17: mol_type = other RNA
tccgtacggggcgtacg

SEQ ID NO: 1066 - RNA, 17 nt, synthetic construct
  misc_feature 1..17: note = Synthetic
  source 1..17: mol_type = other RNA
gtacggggcgtacgtgg

SEQ ID NO: 1067 - RNA, 17 nt, synthetic construct
  misc_feature 1..17: note = Synthetic
  source 1..17: mol_type = other RNA
ggcgtacgtggcggccc

SEQ ID NO: 1068 - RNA, 17 nt, synthetic construct
  misc_feature 1..17: note = Synthetic
  source 1..17: mol_type = other RNA
tacgtggcggccccggc

SEQ ID NO: 1069 - RNA, 17 nt, synthetic construct
  misc_feature 1..17: note = Synthetic
  source 1..17: mol_type = other RNA
agctgtttttgaacgcc

SEQ ID NO: 1070 - RNA, 17 nt, synthetic construct
  misc_feature 1..17: note = Synthetic
  source 1..17: mol_type = other RNA
gctgtttttgaacgcct

SEQ ID NO: 1071 - RNA, 17 nt, synthetic construct
  misc_feature 1..17: note = Synthetic
  source 1..17: mol_type = other RNA
ctgtttttgaacgcctg

SEQ ID NO: 1072 - RNA, 17 nt, synthetic construct
  misc_feature 1..17: note = Synthetic
  source 1..17: mol_type = other RNA
tgtttttgaacgcctgg

SEQ ID NO: 1073 - RNA, 17 nt, synthetic construct
  misc_feature 1..17: note = Synthetic
  source 1..17: mol_type = other RNA
cgcctgggggcagcgcc

SEQ ID NO: 1074 - RNA, 17 nt, synthetic construct
  misc_feature 1..17: note = Synthetic
  source 1..17: mol_type = other RNA
gggcagcgcctggccca

SEQ ID NO: 1075 - RNA, 17 nt, synthetic construct
  misc_feature 1..17: note = Synthetic
  source 1..17: mol_type = other RNA
ggcagcgcctggcccac

SEQ ID NO: 1076 - RNA, 17 nt, synthetic construct
  misc_feature 1..17: note = Synthetic
  source 1..17: mol_type = other RNA
agcgcctggcccacggg

SEQ ID NO: 1077 - RNA, 17 nt, synthetic construct
  misc_feature 1..17: note = Synthetic
  source 1..17: mol_type = other RNA
gcgcctggcccacgggc

SEQ ID NO: 1078 - RNA, 17 nt, synthetic construct
  misc_feature 1..17: note = Synthetic
  source 1..17: mol_type = other RNA
cccacgggcgggtccga

SEQ ID NO: 1079 - RNA, 17 nt, synthetic construct
  misc_feature 1..17: note = Synthetic
  source 1..17: mol_type = other RNA
ccacgggcgggtccgat

SEQ ID NO: 1080 - RNA, 17 nt, synthetic construct
  misc_feature 1..17: note = Synthetic
  source 1..17: mol_type = other RNA
gcgggtccgatgggtcg

SEQ ID NO: 1081 - RNA, 17 nt, synthetic construct
  misc_feature 1..17: note = Synthetic
  source 1..17: mol_type = other RNA
gtccgatgggtcgcgga

SEQ ID NO: 1082 - RNA, 17 nt, synthetic construct
  misc_feature 1..17: note = Synthetic
  source 1..17: mol_type = other RNA
ggaaggccagatgaccc

SEQ ID NO: 1083 - RNA, 17 nt, synthetic construct
  misc_feature 1..17: note = Synthetic
  source 1..17: mol_type = other RNA
gcccgacaacgccaacc

SEQ ID NO: 1084 - RNA, 17 nt, synthetic construct
  misc_feature 1..17: note = Synthetic
  source 1..17: mol_type = other RNA
cgcgttcgacttctttg

SEQ ID NO: 1085 - RNA, 17 nt, synthetic construct
  misc_feature 1..17: note = Synthetic
  source 1..17: mol_type = other RNA
gcgttcgacttctttgt

SEQ ID NO: 1086 - RNA, 17 nt, synthetic construct
  misc_feature 1..17: note = Synthetic
  source 1..17: mol_type = other RNA
cgttcgacttctttgtg

SEQ ID NO: 1087 - RNA, 17 nt, synthetic construct
  misc_feature 1..17: note = Synthetic
  source 1..17: mol_type = other RNA
gttcgacttctttgtgg

SEQ ID NO: 1088 - RNA, 17 nt, synthetic construct
  misc_feature 1..17: note = Synthetic
  source 1..17: mol_type = other RNA
cgacttctttgtggggg

SEQ ID NO: 1089 - RNA, 17 nt, synthetic construct
  misc_feature 1..17: note = Synthetic
  source 1..17: mol_type = other RNA
tgtgggggtggccgacg

SEQ ID NO: 1090 - RNA, 17 nt, synthetic construct
  misc_feature 1..17: note = Synthetic
  source 1..17: mol_type = other RNA
ggccgacgtggagctgc

SEQ ID NO: 1091 - RNA, 17 nt, synthetic construct
  misc_feature 1..17: note = Synthetic
  source 1..17: mol_type = other RNA
gccgacgtggagctgcc

SEQ ID NO: 1092 - RNA, 17 nt, synthetic construct
  misc_feature 1..17: note = Synthetic
  source 1..17: mol_type = other RNA
ccgacgtggagctgccg

SEQ ID NO: 1093 - RNA, 17 nt, synthetic construct
  misc_feature 1..17: note = Synthetic
  source 1..17: mol_type = other RNA
cgacgtggagctgccgg

SEQ ID NO: 1094 - RNA, 17 nt, synthetic construct
  misc_feature 1..17: note = Synthetic
  source 1..17: mol_type = other RNA
gacgtggagctgccggg

SEQ ID NO: 1095 - RNA, 17 nt, synthetic construct
  misc_feature 1..17: note = Synthetic
  source 1..17: mol_type = other RNA
acgtggagctgccgggg

SEQ ID NO: 1096 - RNA, 17 nt, synthetic construct
  misc_feature 1..17: note = Synthetic
  source 1..17: mol_type = other RNA
cgtggagctgccggggg

SEQ ID NO: 1097 - RNA, 17 nt, synthetic construct
  misc_feature 1..17: note = Synthetic
  source 1..17: mol_type = other RNA
ggggggggacgttcccc

SEQ ID NO: 1098 - RNA, 17 nt, synthetic construct
  misc_feature 1..17: note = Synthetic
  source 1..17: mol_type = other RNA
ggggacgttcccccggc

SEQ ID NO: 1099 - RNA, 17 nt, synthetic construct
  misc_feature 1..17: note = Synthetic
  source 1..17: mol_type = other RNA
cgttcccccggccggcc

SEQ ID NO: 1100 - RNA, 17 nt, synthetic construct
  misc_feature 1..17: note = Synthetic
  source 1..17: mol_type = other RNA
gttcccccggccggccc

SEQ ID NO: 1101 - RNA, 17 nt, synthetic construct
  misc_feature 1..17: note = Synthetic
  source 1..17: mol_type = other RNA
ttcccccggccggcccg

SEQ ID NO: 1102 - RNA, 17 nt, synthetic construct
  misc_feature 1..17: note = Synthetic
  source 1..17: mol_type = other RNA
tcccccggccggcccgg

SEQ ID NO: 1103 - RNA, 17 nt, synthetic construct
  misc_feature 1..17: note = Synthetic
  source 1..17: mol_type = other RNA
cggcccgggggagatcc

SEQ ID NO: 1104 - RNA, 17 nt, synthetic construct
  misc_feature 1..17: note = Synthetic
  source 1..17: mol_type = other RNA
gggagatccaggccacc

SEQ ID NO: 1105 - RNA, 17 nt, synthetic construct
  misc_feature 1..17: note = Synthetic
  source 1..17: mol_type = other RNA
ccaggccacctggcgcg

SEQ ID NO: 1106 - RNA, 17 nt, synthetic construct
  misc_feature 1..17: note = Synthetic
  source 1..17: mol_type = other RNA
acctggcgcgtggtgaa

SEQ ID NO: 1107 - RNA, 17 nt, synthetic construct
  misc_feature 1..17: note = Synthetic
  source 1..17: mol_type = other RNA
gaacggcaacttgcccc

SEQ ID NO: 1108 - RNA, 17 nt, synthetic construct
  misc_feature 1..17: note = Synthetic
  source 1..17: mol_type = other RNA
gcccctggcgctatgtc

SEQ ID NO: 1109 - RNA, 17 nt, synthetic construct
  misc_feature 1..17: note = Synthetic
  source 1..17: mol_type = other RNA
cctggcgctatgtccgg

SEQ ID NO: 1110 - RNA, 17 nt, synthetic construct
  misc_feature 1..17: note = Synthetic
  source 1..17: mol_type = other RNA
tatgtccggcggcgttc

SEQ ID NO: 1111 - RNA, 17 nt, synthetic construct
  misc_feature 1..17: note = Synthetic
  source 1..17: mol_type = other RNA
atgtccggcggcgttcc

SEQ ID NO: 1112 - RNA, 17 nt, synthetic construct
  misc_feature 1..17: note = Synthetic
  source 1..17: mol_type = other RNA
cggcgttccgggacgcc

SEQ ID NO: 1113 - RNA, 17 nt, synthetic construct
  misc_feature 1..17: note = Synthetic
  source 1..17: mol_type = other RNA
ggcgttccgggacgccc

SEQ ID NO: 1114 - RNA, 17 nt, synthetic construct
  misc_feature 1..17: note = Synthetic
  source 1..17: mol_type = other RNA
gcgttccgggacgcccg

SEQ ID NO: 1115 - RNA, 17 nt, synthetic construct
  misc_feature 1..17: note = Synthetic
  source 1..17: mol_type = other RNA
ccgggacgcccggggcc

SEQ ID NO: 1116 - RNA, 17 nt, synthetic construct
  misc_feature 1..17: note = Synthetic
  source 1..17: mol_type = other RNA
cgcccggggcctggagc

SEQ ID NO: 1117 - RNA, 17 nt, synthetic construct
  misc_feature 1..17: note = Synthetic
  source 1..17: mol_type = other RNA
gcccggggcctggagct

SEQ ID NO: 1118 - RNA, 17 nt, synthetic construct
  misc_feature 1..17: note = Synthetic
  source 1..17: mol_type = other RNA
cccggggcctggagctg

SEQ ID NO: 1119 - RNA, 17 nt, synthetic construct
  misc_feature 1..17: note = Synthetic
  source 1..17: mol_type = other RNA
ccggggcctggagctgg

SEQ ID NO: 1120 - RNA, 17 nt, synthetic construct
  misc_feature 1..17: note = Synthetic
  source 1..17: mol_type = other RNA
gggcctggagctggggg

SEQ ID NO: 1121 - RNA, 17 nt, synthetic construct
  misc_feature 1..17: note = Synthetic
  source 1..17: mol_type = other RNA
ggcctggagctgggggt

SEQ ID NO: 1122 - RNA, 17 nt, synthetic construct
  misc_feature 1..17: note = Synthetic
  source 1..17: mol_type = other RNA
ggtgggacgccacgcca

SEQ ID NO: 1123 - RNA, 17 nt, synthetic construct
  misc_feature 1..17: note = Synthetic
  source 1..17: mol_type = other RNA
accatcgccgccgttcg

SEQ ID NO: 1124 - RNA, 17 nt, synthetic construct
  misc_feature 1..17: note = Synthetic
  source 1..17: mol_type = other RNA
ccatcgccgccgttcgc

SEQ ID NO: 1125 - RNA, 17 nt, synthetic construct
  misc_feature 1..17: note = Synthetic
  source 1..17: mol_type = other RNA
catcgccgccgttcgcg

SEQ ID NO: 1126 - RNA, 17 nt, synthetic construct
  misc_feature 1..17: note = Synthetic
  source 1..17: mol_type = other RNA
cgacgaccgcaactacc

SEQ ID NO: 1127 - RNA, 17 nt, synthetic construct
  misc_feature 1..17: note = Synthetic
  source 1..17: mol_type = other RNA
cgaccgcaactacccgg

SEQ ID NO: 1128 - RNA, 17 nt, synthetic construct
  misc_feature 1..17: note = Synthetic
  source 1..17: mol_type = other RNA
ggtgttttacctgctgc

SEQ ID NO: 1129 - RNA, 17 nt, synthetic construct
  misc_feature 1..17: note = Synthetic
  source 1..17: mol_type = other RNA
ctgcaggccgccataca

SEQ ID NO: 1130 - RNA, 17 nt, synthetic construct
  misc_feature 1..17: note = Synthetic
  source 1..17: mol_type = other RNA
gcacgtcttctgcgccc

SEQ ID NO: 1131 - RNA, 17 nt, synthetic construct
  misc_feature 1..17: note = Synthetic
  source 1..17: mol_type = other RNA
tcttctgcgccctggcc

SEQ ID NO: 1132 - RNA, 17 nt, synthetic construct
  misc_feature 1..17: note = Synthetic
  source 1..17: mol_type = other RNA
cgccctggcccggctcg

SEQ ID NO: 1133 - RNA, 17 nt, synthetic construct
  misc_feature 1..17: note = Synthetic
  source 1..17: mol_type = other RNA
agtgcatcaccagctac

SEQ ID NO: 1134 - RNA, 17 nt, synthetic construct
  misc_feature 1..17: note = Synthetic
  source 1..17: mol_type = other RNA
gctactggaacaacacg

SEQ ID NO: 1135 - RNA, 17 nt, synthetic construct
  misc_feature 1..17: note = Synthetic
  source 1..17: mol_type = other RNA
gaacaacacgcggtgcg

SEQ ID NO: 1136 - RNA, 17 nt, synthetic construct
  misc_feature 1..17: note = Synthetic
  source 1..17: mol_type = other RNA
cgtgaacgactactcgc

SEQ ID NO: 1137 - RNA, 17 nt, synthetic construct
  misc_feature 1..17: note = Synthetic
  source 1..17: mol_type = other RNA
tacgtcgtgacctacct

SEQ ID NO: 1138 - RNA, 17 nt, synthetic construct
  misc_feature 1..17: note = Synthetic
  source 1..17: mol_type = other RNA
acgtcgtgacctacctc

SEQ ID NO: 1139 - RNA, 17 nt, synthetic construct
  misc_feature 1..17: note = Synthetic
  source 1..17: mol_type = other RNA
cgtcgtgacctacctcg

SEQ ID NO: 1140 - RNA, 17 nt, synthetic construct
  misc_feature 1..17: note = Synthetic
  source 1..17: mol_type = other RNA
gtcgtgacctacctcgg

SEQ ID NO: 1141 - RNA, 17 nt, synthetic construct
  misc_feature 1..17: note = Synthetic
  source 1..17: mol_type = other RNA
cgggggagaccttcccg

SEQ ID NO: 1142 - RNA, 17 nt, synthetic construct
  misc_feature 1..17: note = Synthetic
  source 1..17: mol_type = other RNA
ccttcccgaggagtgca

SEQ ID NO: 1143 - RNA, 17 nt, synthetic construct
  misc_feature 1..17: note = Synthetic
  source 1..17: mol_type = other RNA
agtgcatggccgtgtac

SEQ ID NO: 1144 - RNA, 17 nt, synthetic construct
  misc_feature 1..17: note = Synthetic
  source 1..17: mol_type = other RNA
gtgcatggccgtgtacc

SEQ ID NO: 1145 - RNA, 17 nt, synthetic construct
  misc_feature 1..17: note = Synthetic
  source 1..17: mol_type = other RNA
ggccgtgtaccgggacc

SEQ ID NO: 1146 - RNA, 17 nt, synthetic construct
  misc_feature 1..17: note = Synthetic
  source 1..17: mol_type = other RNA
cgtgtaccgggacctgg

SEQ ID NO: 1147 - RNA, 17 nt, synthetic construct
  misc_feature 1..17: note = Synthetic
  source 1..17: mol_type = other RNA
cctggtggcgcacgtcg

SEQ ID NO: 1148 - RNA, 17 nt, synthetic construct
  misc_feature 1..17: note = Synthetic
  source 1..17: mol_type = other RNA
ggcgcacgtcgaggccc

SEQ ID NO: 1149 - RNA, 17 nt, synthetic construct
  misc_feature 1..17: note = Synthetic
  source 1..17: mol_type = other RNA
cgaggccctggcccagc

SEQ ID NO: 1150 - RNA, 17 nt, synthetic construct
  misc_feature 1..17: note = Synthetic
  source 1..17: mol_type = other RNA
gatgactttaccctgac

SEQ ID NO: 1151 - RNA, 17 nt, synthetic construct
  misc_feature 1..17: note = Synthetic
  source 1..17: mol_type = other RNA
ctttaccctgaccggcc

SEQ ID NO: 1152 - RNA, 17 nt, synthetic construct
  misc_feature 1..17: note = Synthetic
  source 1..17: mol_type = other RNA
cctgaccggcccggagc

SEQ ID NO: 1153 - RNA, 17 nt, synthetic construct
  misc_feature 1..17: note = Synthetic
  source 1..17: mol_type = other RNA
ctgaccggcccggagct

SEQ ID NO: 1154 - RNA, 17 nt, synthetic construct
  misc_feature 1..17: note = Synthetic
  source 1..17: mol_type = other RNA
accggcccggagctggg

SEQ ID NO: 1155 - RNA, 17 nt, synthetic construct
  misc_feature 1..17: note = Synthetic
  source 1..17: mol_type = other RNA
ccggcccggagctgggc

SEQ ID NO: 1156 - RNA, 17 nt, synthetic construct
  misc_feature 1..17: note = Synthetic
  source 1..17: mol_type = other RNA
cccggagctgggcgggc

SEQ ID NO: 1157 - RNA, 17 nt, synthetic construct
  misc_feature 1..17: note = Synthetic
  source 1..17: mol_type = other RNA
tcacctaatgcgagacc

SEQ ID NO: 1158 - RNA, 17 nt, synthetic construct
  misc_feature 1..17: note = Synthetic
  source 1..17: mol_type = other RNA
tgctgccacccctcgtg

SEQ ID NO: 1159 - RNA, 17 nt, synthetic construct
  misc_feature 1..17: note = Synthetic
  source 1..17: mol_type = other RNA
gctgccacccctcgtgt

SEQ ID NO: 1160 - RNA, 17 nt, synthetic construct
  misc_feature 1..17: note = Synthetic
  source 1..17: mol_type = other RNA
actgtgacgccctgatg

SEQ ID NO: 1161 - RNA, 17 nt, synthetic construct
  misc_feature 1..17: note = Synthetic
  source 1..17: mol_type = other RNA
cgccctgatgcggcgcg

SEQ ID NO: 1162 - RNA, 17 nt, synthetic construct
  misc_feature 1..17: note = Synthetic
  source 1..17: mol_type = other RNA
gatgcggcgcgcggccc

SEQ ID NO: 1163 - RNA, 17 nt, synthetic construct
  misc_feature 1..17: note = Synthetic
  source 1..17: mol_type = other RNA
accgccatcgcgactgc

SEQ ID NO: 1164 - RNA, 17 nt, synthetic construct
  misc_feature 1..17: note = Synthetic
  source 1..17: mol_type = other RNA
ccgccatcgcgactgcc

SEQ ID NO: 1165 - RNA, 17 nt, synthetic construct
  misc_feature 1..17: note = Synthetic
  source 1..17: mol_type = other RNA
cgactgccgggttagcg

SEQ ID NO: 1166 - RNA, 17 nt, synthetic construct
  misc_feature 1..17: note = Synthetic
  source 1..17: mol_type = other RNA
gactgccgggttagcgc

SEQ ID NO: 1167 - RNA, 17 nt, synthetic construct
  misc_feature 1..17: note = Synthetic
  source 1..17: mol_type = other RNA
actgccgggttagcgcg

SEQ ID NO: 1168 - RNA, 17 nt, synthetic construct
  misc_feature 1..17: note = Synthetic
  source 1..17: mol_type = other RNA
ctgccgggttagcgcgg

SEQ ID NO: 1169 - RNA, 17 nt, synthetic construct
  misc_feature 1..17: note = Synthetic
  source 1..17: mol_type = other RNA
tgccgggttagcgcggg

SEQ ID NO: 1170 - RNA, 17 nt, synthetic construct
  misc_feature 1..17: note = Synthetic
  source 1..17: mol_type = other RNA
ccacgaccccgtgtacg

SEQ ID NO: 1171 - RNA, 17 nt, synthetic construct
  misc_feature 1..17: note = Synthetic
  source 1..17: mol_type = other RNA
cgaccccgtgtacgcgg

SEQ ID NO: 1172 - RNA, 17 nt, synthetic construct
  misc_feature 1..17: note = Synthetic
  source 1..17: mol_type = other RNA
cgcggcggcatgtaacg

SEQ ID NO: 1173 - RNA, 17 nt, synthetic construct
  misc_feature 1..17: note = Synthetic
  source 1..17: mol_type = other RNA
atgtaacgtggcgaccg

SEQ ID NO: 1174 - RNA, 17 nt, synthetic construct
  misc_feature 1..17: note = Synthetic
  source 1..17: mol_type = other RNA
gacttcaaccgcaacga

SEQ ID NO: 1175 - RNA, 17 nt, synthetic construct
  misc_feature 1..17: note = Synthetic
  source 1..17: mol_type = other RNA
gctgctgcacaacaccc

SEQ ID NO: 1176 - RNA, 17 nt, synthetic construct
  misc_feature 1..17: note = Synthetic
  source 1..17: mol_type = other RNA
cacccaggcccgagccg

SEQ ID NO: 1177 - RNA, 17 nt, synthetic construct
  misc_feature 1..17: note = Synthetic
  source 1..17: mol_type = other RNA
ccgagccgcggacgccg

SEQ ID NO: 1178 - RNA, 17 nt, synthetic construct
  misc_feature 1..17: note = Synthetic
  source 1..17: mol_type = other RNA
cggacgccgcggatgac

SEQ ID NO: 1179 - RNA, 17 nt, synthetic construct
  misc_feature 1..17: note = Synthetic
  source 1..17: mol_type = other RNA
cggatgaccggccgcac

SEQ ID NO: 1180 - RNA, 17 nt, synthetic construct
  misc_feature 1..17: note = Synthetic
  source 1..17: mol_type = other RNA
ggatgaccggccgcacc

SEQ ID NO: 1181 - RNA, 17 nt, synthetic construct
  misc_feature 1..17: note = Synthetic
  source 1..17: mol_type = other RNA
gatgaccggccgcaccg

SEQ ID NO: 1182 - RNA, 17 nt, synthetic construct
  misc_feature 1..17: note = Synthetic
  source 1..17: mol_type = other RNA
atgaccggccgcaccgg

SEQ ID NO: 1183 - RNA, 17 nt, synthetic construct
  misc_feature 1..17: note = Synthetic
  source 1..17: mol_type = other RNA
tgaccggccgcaccggg

SEQ ID NO: 1184 - RNA, 17 nt, synthetic construct
  misc_feature 1..17: note = Synthetic
  source 1..17: mol_type = other RNA
ccggccgcaccgggggg

SEQ ID NO: 1185 - RNA, 17 nt, synthetic construct
  misc_feature 1..17: note = Synthetic
  source 1..17: mol_type = other RNA
cgcaccggggggcggac

SEQ ID NO: 1186 - RNA, 17 nt, synthetic construct
  misc_feature 1..17: note = Synthetic
  source 1..17: mol_type = other RNA
gatttactactacgtga

SEQ ID NO: 1187 - RNA, 17 nt, synthetic construct
  misc_feature 1..17: note = Synthetic
  source 1..17: mol_type = other RNA
tggtgcccgccttctcg

SEQ ID NO: 1188 - RNA, 17 nt, synthetic construct
  misc_feature 1..17: note = Synthetic
  source 1..17: mol_type = other RNA
ggtgcccgccttctcgc

SEQ ID NO: 1189 - RNA, 17 nt, synthetic construct
  misc_feature 1..17: note = Synthetic
  source 1..17: mol_type = other RNA
gtgcccgccttctcgcg

SEQ ID NO: 1190 - RNA, 17 nt, synthetic construct
  misc_feature 1..17: note = Synthetic
  source 1..17: mol_type = other RNA
gggccgctgctgcaccg

SEQ ID NO: 1191 - RNA, 17 nt, synthetic construct
  misc_feature 1..17: note = Synthetic
  source 1..17: mol_type = other RNA
ggccgctgctgcaccgc

SEQ ID NO: 1192 - RNA, 17 nt, synthetic construct
  misc_feature 1..17: note = Synthetic
  source 1..17: mol_type = other RNA
gccgctgctgcaccgcg

SEQ ID NO: 1193 - RNA, 17 nt, synthetic construct
  misc_feature 1..17: note = Synthetic
  source 1..17: mol_type = other RNA
ccgctgctgcaccgcgg

SEQ ID NO: 1194 - RNA, 17 nt, synthetic construct
  misc_feature 1..17: note = Synthetic
  source 1..17: mol_type = other RNA
cgccaccctgcagaaca

SEQ ID NO: 1195 - RNA, 17 nt, synthetic construct
  misc_feature 1..17: note = Synthetic
  source 1..17: mol_type = other RNA
caccctgcagaacatgg

SEQ ID NO: 1196 - RNA, 17 nt, synthetic construct
  misc_feature 1..17: note = Synthetic
  source 1..17: mol_type = other RNA
gcagaacatggtggtcc

SEQ ID NO: 1197 - RNA, 17 nt, synthetic construct
  misc_feature 1..17: note = Synthetic
  source 1..17: mol_type = other RNA
gtcccggagatcgcccc

SEQ ID NO: 1198 - RNA, 17 nt, synthetic construct
  misc_feature 1..17: note = Synthetic
  source 1..17: mol_type = other RNA
ggagatcgcccccggcg

SEQ ID NO: 1199 - RNA, 17 nt, synthetic construct
  misc_feature 1..17: note = Synthetic
  source 1..17: mol_type = other RNA
ccccagcgaccccgtga

SEQ ID NO: 1200 - RNA, 17 nt, synthetic construct
  misc_feature 1..17: note = Synthetic
  source 1..17: mol_type = other RNA
cgcgcaccccctgcacc

SEQ ID NO: 1201 - RNA, 17 nt, synthetic construct
  misc_feature 1..17: note = Synthetic
  source 1..17: mol_type = other RNA
cctgcacccggccaatc

SEQ ID NO: 1202 - RNA, 17 nt, synthetic construct
  misc_feature 1..17: note = Synthetic
  source 1..17: mol_type = other RNA
gcacccggccaatctgg

SEQ ID NO: 1203 - RNA, 17 nt, synthetic construct
  misc_feature 1..17: note = Synthetic
  source 1..17: mol_type = other RNA
caatctggtggccaaca

SEQ ID NO: 1204 - RNA, 17 nt, synthetic construct
  misc_feature 1..17: note = Synthetic
  source 1..17: mol_type = other RNA
aacgccatgtttcacaa

SEQ ID NO: 1205 - RNA, 17 nt, synthetic construct
  misc_feature 1..17: note = Synthetic
  source 1..17: mol_type = other RNA
acgccatgtttcacaac

SEQ ID NO: 1206 - RNA, 17 nt, synthetic construct
  misc_feature 1..17: note = Synthetic
  source 1..17: mol_type = other RNA
gtttcacaacgggcgcg

SEQ ID NO: 1207 - RNA, 17 nt, synthetic construct
  misc_feature 1..17: note = Synthetic
  source 1..17: mol_type = other RNA
caacgggcgcgtggtag

SEQ ID NO: 1208 - RNA, 17 nt, synthetic construct
  misc_feature 1..17: note = Synthetic
  source 1..17: mol_type = other RNA
gggcgcgtggtagtgga

SEQ ID NO: 1209 - RNA, 17 nt, synthetic construct
  misc_feature 1..17: note = Synthetic
  source 1..17: mol_type = other RNA
ggcgcgtggtagtggac

SEQ ID NO: 1210 - RNA, 17 nt, synthetic construct
  misc_feature 1..17: note = Synthetic
  source 1..17: mol_type = other RNA
cgccatgctcacgctgc

SEQ ID NO: 1211 - RNA, 17 nt, synthetic construct
  misc_feature 1..17: note = Synthetic
  source 1..17: mol_type = other RNA
gctcacgctgcaggtgc

SEQ ID NO: 1212 - RNA, 17 nt, synthetic construct
  misc_feature 1..17: note = Synthetic
  source 1..17: mol_type = other RNA
ggtgctggcccacaaca

SEQ ID NO: 1213 - RNA, 17 nt, synthetic construct
  misc_feature 1..17: note = Synthetic
  source 1..17: mol_type = other RNA
catggccgaacgcacaa

SEQ ID NO: 1214 - RNA, 17 nt, synthetic construct
  misc_feature 1..17: note = Synthetic
  source 1..17: mol_type = other RNA
aacggcgctgctctgct

SEQ ID NO: 1215 - RNA, 17 nt, synthetic construct
  misc_feature 1..17: note = Synthetic
  source 1..17: mol_type = other RNA
ggcgctgctctgctcgg

SEQ ID NO: 1216 - RNA, 17 nt, synthetic construct
  misc_feature 1..17: note = Synthetic
  source 1..17: mol_type = other RNA
ctcggcggcgcccgacg

SEQ ID NO: 1217 - RNA, 17 nt, synthetic construct
  misc_feature 1..17: note = Synthetic
  source 1..17: mol_type = other RNA
tcggcggcgcccgacgc

SEQ ID NO: 1218 - RNA, 17 nt, synthetic construct
  misc_feature 1..17: note = Synthetic
  source 1..17: mol_type = other RNA
aacatgcgcatattcga

SEQ ID NO: 1219 - RNA, 17 nt, synthetic construct
  misc_feature 1..17: note = Synthetic
  source 1..17: mol_type = other RNA
acatgcgcatattcgac

SEQ ID NO: 1220 - RNA, 17 nt, synthetic construct
  misc_feature 1..17: note = Synthetic
  source 1..17: mol_type = other RNA
catgcgcatattcgacg

SEQ ID NO: 1221 - RNA, 17 nt, synthetic construct
  misc_feature 1..17: note = Synthetic
  source 1..17: mol_type = other RNA
gacggggcgttgcacgc

SEQ ID NO: 1222 - RNA, 17 nt, synthetic construct
  misc_feature 1..17: note = Synthetic
  source 1..17: mol_type = other RNA
cgccggaatcctgctga

SEQ ID NO: 1223 - RNA, 17 nt, synthetic construct
  misc_feature 1..17: note = Synthetic
  source 1..17: mol_type = other RNA
gatggccccccagcatc

SEQ ID NO: 1224 - RNA, 17 nt, synthetic construct
  misc_feature 1..17: note = Synthetic
  source 1..17: mol_type = other RNA
gaccataccatccaaaa

SEQ ID NO: 1225 - RNA, 17 nt, synthetic construct
  misc_feature 1..17: note = Synthetic
  source 1..17: mol_type = other RNA
gtccacgcgctgttcgc

SEQ ID NO: 1226 - RNA, 17 nt, synthetic construct
  misc_feature 1..17: note = Synthetic
  source 1..17: mol_type = other RNA
tccacgcgctgttcgcc

SEQ ID NO: 1227 - RNA, 17 nt, synthetic construct
  misc_feature 1..17: note = Synthetic
  source 1..17: mol_type = other RNA
ccacgcgctgttcgccg

SEQ ID NO: 1228 - RNA, 17 nt, synthetic construct
  misc_feature 1..17: note = Synthetic
  source 1..17: mol_type = other RNA
cgccggggccgaccacg

SEQ ID NO: 1229 - RNA, 17 nt, synthetic construct
  misc_feature 1..17: note = Synthetic
  source 1..17: mol_type = other RNA
cgcgcccaatttccccc

SEQ ID NO: 1230 - RNA, 17 nt, synthetic construct
  misc_feature 1..17: note = Synthetic
  source 1..17: mol_type = other RNA
ccctgcgcgacctgtcg

SEQ ID NO: 1231 - RNA, 17 nt, synthetic construct
  misc_feature 1..17: note = Synthetic
  source 1..17: mol_type = other RNA
gcgcgacctgtcgcggc

SEQ ID NO: 1232 - RNA, 17 nt, synthetic construct
  misc_feature 1..17: note = Synthetic
  source 1..17: mol_type = other RNA
gtcgcggcaggtccccc

SEQ ID NO: 1233 - RNA, 17 nt, synthetic construct
  misc_feature 1..17: note = Synthetic
  source 1..17: mol_type = other RNA
ggtccccctggtccccc

SEQ ID NO: 1234 - RNA, 17 nt, synthetic construct
  misc_feature 1..17: note = Synthetic
  source 1..17: mol_type = other RNA
cctggtccccccggctc

SEQ ID NO: 1235 - RNA, 17 nt, synthetic construct
  misc_feature 1..17: note = Synthetic
  source 1..17: mol_type = other RNA
ctggtccccccggctct

SEQ ID NO: 1236 - RNA, 17 nt, synthetic construct
  misc_feature 1..17: note = Synthetic
  source 1..17: mol_type = other RNA
tggtccccccggctctg

SEQ ID NO: 1237 - RNA, 17 nt, synthetic construct
  misc_feature 1..17: note = Synthetic
  source 1..17: mol_type = other RNA
ggtccccccggctctgg

SEQ ID NO: 1238 - RNA, 17 nt, synthetic construct
  misc_feature 1..17: note = Synthetic
  source 1..17: mol_type = other RNA
gcacgtccgcgagagcg

SEQ ID NO: 1239 - RNA, 17 nt, synthetic construct
  misc_feature 1..17: note = Synthetic
  source 1..17: mol_type = other RNA
gtccgcgagagcgcggc

SEQ ID NO: 1240 - RNA, 17 nt, synthetic construct
  misc_feature 1..17: note = Synthetic
  source 1..17: mol_type = other RNA
tccgcgagagcgcggcc

SEQ ID NO: 1241 - RNA, 17 nt, synthetic construct
  misc_feature 1..17: note = Synthetic
  source 1..17: mol_type = other RNA
ccgcgagagcgcggccg

SEQ ID NO: 1242 - RNA, 17 nt, synthetic construct
  misc_feature 1..17: note = Synthetic
  source 1..17: mol_type = other RNA
gctgacctacgcgctca

SEQ ID NO: 1243 - RNA, 17 nt, synthetic construct
  misc_feature 1..17: note = Synthetic
  source 1..17: mol_type = other RNA
gacctacgcgctcatgg

SEQ ID NO: 1244 - RNA, 17 nt, synthetic construct
  misc_feature 1..17: note = Synthetic
  source 1..17: mol_type = other RNA
acctacgcgctcatggc

SEQ ID NO: 1245 - RNA, 17 nt, synthetic construct
  misc_feature 1..17: note = Synthetic
  source 1..17: mol_type = other RNA
cctacgcgctcatggcg

SEQ ID NO: 1246 - RNA, 17 nt, synthetic construct
  misc_feature 1..17: note = Synthetic
  source 1..17: mol_type = other RNA
cttcaagatcagtcccg

SEQ ID NO: 1247 - RNA, 17 nt, synthetic construct
  misc_feature 1..17: note = Synthetic
  source 1..17: mol_type = other RNA
gcatcatcagctcaaga

SEQ ID NO: 1248 - RNA, 17 nt, synthetic construct
  misc_feature 1..17: note = Synthetic
  source 1..17: mol_type = other RNA
catcatcagctcaagac

SEQ ID NO: 1249 - RNA, 17 nt, synthetic construct
  misc_feature 1..17: note = Synthetic
  source 1..17: mol_type = other RNA
aagacgggcctccatcc

SEQ ID NO: 1250 - RNA, 17 nt, synthetic construct
  misc_feature 1..17: note = Synthetic
  source 1..17: mol_type = other RNA
agacgggcctccatccc

SEQ ID NO: 1251 - RNA, 17 nt, synthetic construct
  misc_feature 1..17: note = Synthetic
  source 1..17: mol_type = other RNA
ggcctccatcccgggtt

SEQ ID NO: 1252 - RNA, 17 nt, synthetic construct
  misc_feature 1..17: note = Synthetic
  source 1..17: mol_type = other RNA
gcctccatcccgggttt

SEQ ID NO: 1253 - RNA, 17 nt, synthetic construct
  misc_feature 1..17: note = Synthetic
  source 1..17: mol_type = other RNA
gttcaccgtcgtccgac

SEQ ID NO: 1254 - RNA, 17 nt, synthetic construct
  misc_feature 1..17: note = Synthetic
  source 1..17: mol_type = other RNA
tgagaacgtgctgttct

SEQ ID NO: 1255 - RNA, 17 nt, synthetic construct
  misc_feature 1..17: note = Synthetic
  source 1..17: mol_type = other RNA
gttctcggagcgcgcgt

SEQ ID NO: 1256 - RNA, 17 nt, synthetic construct
  misc_feature 1..17: note = Synthetic
  source 1..17: mol_type = other RNA
ctcggagcgcgcgtcgg

SEQ ID NO: 1257 - RNA, 17 nt, synthetic construct
  misc_feature 1..17: note = Synthetic
  source 1..17: mol_type = other RNA
gtcggaggcgtacttcc

SEQ ID NO: 1258 - RNA, 17 nt, synthetic construct
  misc_feature 1..17: note = Synthetic
  source 1..17: mol_type = other RNA
tcggaggcgtacttcct

SEQ ID NO: 1259 - RNA, 17 nt, synthetic construct
  misc_feature 1..17: note = Synthetic
  source 1..17: mol_type = other RNA
cttcctgggccagctcc

SEQ ID NO: 1260 - RNA, 17 nt, synthetic construct
  misc_feature 1..17: note = Synthetic
  source 1..17: mol_type = other RNA
cctgggccagctccagg

SEQ ID NO: 1261 - RNA, 17 nt, synthetic construct
  misc_feature 1..17: note = Synthetic
  source 1..17: mol_type = other RNA
gccagctccaggtggcc

SEQ ID NO: 1262 - RNA, 17 nt, synthetic construct
  misc_feature 1..17: note = Synthetic
  source 1..17: mol_type = other RNA
gtggcccggcacgaaac

SEQ ID NO: 1263 - RNA, 17 nt, synthetic construct
  misc_feature 1..17: note = Synthetic
  source 1..17: mol_type = other RNA
gcccggcacgaaactgg

SEQ ID NO: 1264 - RNA, 17 nt, synthetic construct
  misc_feature 1..17: note = Synthetic
  source 1..17: mol_type = other RNA
cccggcacgaaactggc

SEQ ID NO: 1265 - RNA, 17 nt, synthetic construct
  misc_feature 1..17: note = Synthetic
  source 1..17: mol_type = other RNA
ccggcacgaaactggcg

SEQ ID NO: 1266 - RNA, 17 nt, synthetic construct
  misc_feature 1..17: note = Synthetic
  source 1..17: mol_type = other RNA
cggcacgaaactggcgg

SEQ ID NO: 1267 - RNA, 17 nt, synthetic construct
  misc_feature 1..17: note = Synthetic
  source 1..17: mol_type = other RNA
ggcacgaaactggcggg

SEQ ID NO: 1268 - RNA, 17 nt, synthetic construct
  misc_feature 1..17: note = Synthetic
  source 1..17: mol_type = other RNA
gcacgaaactggcgggg

SEQ ID NO: 1269 - RNA, 17 nt, synthetic construct
  misc_feature 1..17: note = Synthetic
  source 1..17: mol_type = other RNA
ccagccgcgcgcgaacg

SEQ ID NO: 1270 - RNA, 17 nt, synthetic construct
  misc_feature 1..17: note = Synthetic
  source 1..17: mol_type = other RNA
gcgcgcgaacgtggacc

SEQ ID NO: 1271 - RNA, 17 nt, synthetic construct
  misc_feature 1..17: note = Synthetic
  source 1..17: mol_type = other RNA
cgcgcgaacgtggacct

SEQ ID NO: 1272 - RNA, 17 nt, synthetic construct
  misc_feature 1..17: note = Synthetic
  source 1..17: mol_type = other RNA
gaacgtggacctgggcg

SEQ ID NO: 1273 - RNA, 17 nt, synthetic construct
  misc_feature 1..17: note = Synthetic
  source 1..17: mol_type = other RNA
aacgtggacctgggcgt

SEQ ID NO: 1274 - RNA, 17 nt, synthetic construct
  misc_feature 1..17: note = Synthetic
  source 1..17: mol_type = other RNA
gggctacaccgccgtcg

SEQ ID NO: 1275 - RNA, 17 nt, synthetic construct
  misc_feature 1..17: note = Synthetic
  source 1..17: mol_type = other RNA
caccgccgtcgtggcca

SEQ ID NO: 1276 - RNA, 17 nt, synthetic construct
  misc_feature 1..17: note = Synthetic
  source 1..17: mol_type = other RNA
caaccccgtcaccgaca

SEQ ID NO: 1277 - RNA, 17 nt, synthetic construct
  misc_feature 1..17: note = Synthetic
  source 1..17: mol_type = other RNA
aaccccgtcaccgacat

SEQ ID NO: 1278 - RNA, 17 nt, synthetic construct
  misc_feature 1..17: note = Synthetic
  source 1..17: mol_type = other RNA
tccccaaaacttttacc

SEQ ID NO: 1279 - RNA, 17 nt, synthetic construct
  misc_feature 1..17: note = Synthetic
  source 1..17: mol_type = other RNA
ccccaaaacttttacct

SEQ ID NO: 1280 - RNA, 17 nt, synthetic construct
  misc_feature 1..17: note = Synthetic
  source 1..17: mol_type = other RNA
aacttttacctgggccg

SEQ ID NO: 1281 - RNA, 17 nt, synthetic construct
  misc_feature 1..17: note = Synthetic
  source 1..17: mol_type = other RNA
acttttacctgggccgc

SEQ ID NO: 1282 - RNA, 17 nt, synthetic construct
  misc_feature 1..17: note = Synthetic
  source 1..17: mol_type = other RNA
cttttacctgggccgcg

SEQ ID NO: 1283 - RNA, 17 nt, synthetic construct
  misc_feature 1..17: note = Synthetic
  source 1..17: mol_type = other RNA
cggggctccccctctcc

SEQ ID NO: 1284 - RNA, 17 nt, synthetic construct
  misc_feature 1..17: note = Synthetic
  source 1..17: mol_type = other RNA
ccctctcctggacaacg

SEQ ID NO: 1285 - RNA, 17 nt, synthetic construct
  misc_feature 1..17: note = Synthetic
  source 1..17: mol_type = other RNA
cggcagccgtgtacctg

SEQ ID NO: 1286 - RNA, 17 nt, synthetic construct
  misc_feature 1..17: note = Synthetic
  source 1..17: mol_type = other RNA
cgtgtacctgcggaacg

SEQ ID NO: 1287 - RNA, 17 nt, synthetic construct
  misc_feature 1..17: note = Synthetic
  source 1..17: mol_type = other RNA
cctgcggaacgcggtcg

SEQ ID NO: 1288 - RNA, 17 nt, synthetic construct
  misc_feature 1..17: note = Synthetic
  source 1..17: mol_type = other RNA
gcggaacgcggtcgtgg

SEQ ID NO: 1289 - RNA, 17 nt, synthetic construct
  misc_feature 1..17: note = Synthetic
  source 1..17: mol_type = other RNA
cggaacgcggtcgtggc

SEQ ID NO: 1290 - RNA, 17 nt, synthetic construct
  misc_feature 1..17: note = Synthetic
  source 1..17: mol_type = other RNA
cgtggcgggaaaccgcc

SEQ ID NO: 1291 - RNA, 17 nt, synthetic construct
  misc_feature 1..17: note = Synthetic
  source 1..17: mol_type = other RNA
gtggcgggaaaccgcct

SEQ ID NO: 1292 - RNA, 17 nt, synthetic construct
  misc_feature 1..17: note = Synthetic
  source 1..17: mol_type = other RNA
tggcgggaaaccgcctg

SEQ ID NO: 1293 - RNA, 17 nt, synthetic construct
  misc_feature 1..17: note = Synthetic
  source 1..17: mol_type = other RNA
gggaaaccgcctggggc

SEQ ID NO: 1294 - RNA, 17 nt, synthetic construct
  misc_feature 1..17: note = Synthetic
  source 1..17: mol_type = other RNA
cagcccgtccccgtgtt

SEQ ID NO: 1295 - RNA, 17 nt, synthetic construct
  misc_feature 1..17: note = Synthetic
  source 1..17: mol_type = other RNA
agcccgtccccgtgttc

SEQ ID NO: 1296 - RNA, 17 nt, synthetic construct
  misc_feature 1..17: note = Synthetic
  source 1..17: mol_type = other RNA
cgtgttcgggtgcgccc

SEQ ID NO: 1297 - RNA, 17 nt, synthetic construct
  misc_feature 1..17: note = Synthetic
  source 1..17: mol_type = other RNA
ggtgcgcccaggtgccg

SEQ ID NO: 1298 - RNA, 17 nt, synthetic construct
  misc_feature 1..17: note = Synthetic
  source 1..17: mol_type = other RNA
caggtgccgcggcgcgc

SEQ ID NO: 1299 - RNA, 17 nt, synthetic construct
  misc_feature 1..17: note = Synthetic
  source 1..17: mol_type = other RNA
aggtgccgcggcgcgca

SEQ ID NO: 1300 - RNA, 17 nt, synthetic construct
  misc_feature 1..17: note = Synthetic
  source 1..17: mol_type = other RNA
gccgcggcgcgcaggga

SEQ ID NO: 1301 - RNA, 17 nt, synthetic construct
  misc_feature 1..17: note = Synthetic
  source 1..17: mol_type = other RNA
cgcgcagggatggacca

SEQ ID NO: 1302 - RNA, 17 nt, synthetic construct
  misc_feature 1..17: note = Synthetic
  source 1..17: mol_type = other RNA
agggatggaccacggcc

SEQ ID NO: 1303 - RNA, 17 nt, synthetic construct
  misc_feature 1..17: note = Synthetic
  source 1..17: mol_type = other RNA
acgtcaactacttccgc

SEQ ID NO: 1304 - RNA, 17 nt, synthetic construct
  misc_feature 1..17: note = Synthetic
  source 1..17: mol_type = other RNA
gccggccctgcaacccc

SEQ ID NO: 1305 - RNA, 17 nt, synthetic construct
  misc_feature 1..17: note = Synthetic
  source 1..17: mol_type = other RNA
ccggccctgcaaccccc

SEQ ID NO: 1306 - RNA, 17 nt, synthetic construct
  misc_feature 1..17: note = Synthetic
  source 1..17: mol_type = other RNA
cggccctgcaacccccg

SEQ ID NO: 1307 - RNA, 17 nt, synthetic construct
  misc_feature 1..17: note = Synthetic
  source 1..17: mol_type = other RNA
ccccggggacgcgccgc

SEQ ID NO: 1308 - RNA, 17 nt, synthetic construct
  misc_feature 1..17: note = Synthetic
  source 1..17: mol_type = other RNA
cccggggacgcgccgcc

SEQ ID NO: 1309 - RNA, 17 nt, synthetic construct
  misc_feature 1..17: note = Synthetic
  source 1..17: mol_type = other RNA
ccggggacgcgccgccg

SEQ ID NO: 1310 - RNA, 17 nt, synthetic construct
  misc_feature 1..17: note = Synthetic
  source 1..17: mol_type = other RNA
cggggacgcgccgccgg

SEQ ID NO: 1311 - RNA, 17 nt, synthetic construct
  misc_feature 1..17: note = Synthetic
  source 1..17: mol_type = other RNA
cgccgggggcgtttacg

SEQ ID NO: 1312 - RNA, 17 nt, synthetic construct
  misc_feature 1..17: note = Synthetic
  source 1..17: mol_type = other RNA
gccgggggcgtttacgc

SEQ ID NO: 1313 - RNA, 17 nt, synthetic construct
  misc_feature 1..17: note = Synthetic
  source 1..17: mol_type = other RNA
ccgggggcgtttacgcg

SEQ ID NO: 1314 - RNA, 17 nt, synthetic construct
  misc_feature 1..17: note = Synthetic
  source 1..17: mol_type = other RNA
cgggggcgtttacgcgg

SEQ ID NO: 1315 - RNA, 17 nt, synthetic construct
  misc_feature 1..17: note = Synthetic
  source 1..17: mol_type = other RNA
cgtttacgcgggggaca

SEQ ID NO: 1316 - RNA, 17 nt, synthetic construct
  misc_feature 1..17: note = Synthetic
  source 1..17: mol_type = other RNA
ttacgcgggggacaagg

SEQ ID NO: 1317 - RNA, 17 nt, synthetic construct
  misc_feature 1..17: note = Synthetic
  source 1..17: mol_type = other RNA
tacgcgggggacaagga

SEQ ID NO: 1318 - RNA, 17 nt, synthetic construct
  misc_feature 1..17: note = Synthetic
  source 1..17: mol_type = other RNA
acgcgggggacaaggag

SEQ ID NO: 1319 - RNA, 17 nt, synthetic construct
  misc_feature 1..17: note = Synthetic
  source 1..17: mol_type = other RNA
cgcgggggacaaggagg

SEQ ID NO: 1320 - RNA, 17 nt, synthetic construct
  misc_feature 1..17: note = Synthetic
  source 1..17: mol_type = other RNA
gccctcatgtacgacca

SEQ ID NO: 1321 - RNA, 17 nt, synthetic construct
  misc_feature 1..17: note = Synthetic
  source 1..17: mol_type = other RNA
gccagagcgacccgtcc

SEQ ID NO: 1322 - RNA, 17 nt, synthetic construct
  misc_feature 1..17: note = Synthetic
  source 1..17: mol_type = other RNA
ccagagcgacccgtccc

SEQ ID NO: 1323 - RNA, 17 nt, synthetic construct
  misc_feature 1..17: note = Synthetic
  source 1..17: mol_type = other RNA
cccgtcccgggccttcg

SEQ ID NO: 1324 - RNA, 17 nt, synthetic construct
  misc_feature 1..17: note = Synthetic
  source 1..17: mol_type = other RNA
ccgggccttcgcggcca

SEQ ID NO: 1325 - RNA, 17 nt, synthetic construct
  misc_feature 1..17: note = Synthetic
  source 1..17: mol_type = other RNA
cggccacggccaacccg

SEQ ID NO: 1326 - RNA, 17 nt, synthetic construct
  misc_feature 1..17: note = Synthetic
  source 1..17: mol_type = other RNA
ggccacggccaacccgt

SEQ ID NO: 1327 - RNA, 17 nt, synthetic construct
  misc_feature 1..17: note = Synthetic
  source 1..17: mol_type = other RNA
tcgcagcgattttcgta

SEQ ID NO: 1328 - RNA, 17 nt, synthetic construct
  misc_feature 1..17: note = Synthetic
  source 1..17: mol_type = other RNA
cgcagcgattttcgtac

SEQ ID NO: 1329 - RNA, 17 nt, synthetic construct
  misc_feature 1..17: note = Synthetic
  source 1..17: mol_type = other RNA
gcagcgattttcgtacg

SEQ ID NO: 1330 - RNA, 17 nt, synthetic construct
  misc_feature 1..17: note = Synthetic
  source 1..17: mol_type = other RNA
ggggacctgctctataa

SEQ ID NO: 1331 - RNA, 17 nt, synthetic construct
  misc_feature 1..17: note = Synthetic
  source 1..17: mol_type = other RNA
gggacctgctctataac

SEQ ID NO: 1332 - RNA, 17 nt, synthetic construct
  misc_feature 1..17: note = Synthetic
  source 1..17: mol_type = other RNA
ggacctgctctataacg

SEQ ID NO: 1333 - RNA, 17 nt, synthetic construct
  misc_feature 1..17: note = Synthetic
  source 1..17: mol_type = other RNA
ggggcctaccacctcaa

SEQ ID NO: 1334 - RNA, 17 nt, synthetic construct
  misc_feature 1..17: note = Synthetic
  source 1..17: mol_type = other RNA
gggcctaccacctcaac

SEQ ID NO: 1335 - RNA, 17 nt, synthetic construct
  misc_feature 1..17: note = Synthetic
  source 1..17: mol_type = other RNA
ggcctaccacctcaacg

SEQ ID NO: 1336 - RNA, 17 nt, synthetic construct
  misc_feature 1..17: note = Synthetic
  source 1..17: mol_type = other RNA
cctcaacggggcctcgc

SEQ ID NO: 1337 - RNA, 17 nt, synthetic construct
  misc_feature 1..17: note = Synthetic
  source 1..17: mol_type = other RNA
ctttaagttctttacgt

SEQ ID NO: 1338 - RNA, 17 nt, synthetic construct
  misc_feature 1..17: note = Synthetic
  source 1..17: mol_type = other RNA
cgccaaacatcgctgcc

SEQ ID NO: 1339 - RNA, 17 nt, synthetic construct
  misc_feature 1..17: note = Synthetic
  source 1..17: mol_type = other RNA
cctggagcgcctgatcg

SEQ ID NO: 1340 - RNA, 17 nt, synthetic construct
  misc_feature 1..17: note = Synthetic
  source 1..17: mol_type = other RNA
gcgcctgatcgtggaga

SEQ ID NO: 1341 - RNA, 17 nt, synthetic construct
  misc_feature 1..17: note = Synthetic
  source 1..17: mol_type = other RNA
cgcctgatcgtggagac

SEQ ID NO: 1342 - RNA, 17 nt, synthetic construct
  misc_feature 1..17: note = Synthetic
  source 1..17: mol_type = other RNA
gatcgtggagacgggtt

SEQ ID NO: 1343 - RNA, 17 nt, synthetic construct
  misc_feature 1..17: note = Synthetic
  source 1..17: mol_type = other RNA
cgtggagacgggttcgg

SEQ ID NO: 1344 - RNA, 17 nt, synthetic construct
  misc_feature 1..17: note = Synthetic
  source 1..17: mol_type = other RNA
gggttcggcggtgtcca

SEQ ID NO: 1345 - RNA, 17 nt, synthetic construct
  misc_feature 1..17: note = Synthetic
  source 1..17: mol_type = other RNA
acagtttaagcgccccc

SEQ ID NO: 1346 - RNA, 17 nt, synthetic construct
  misc_feature 1..17: note = Synthetic
  source 1..17: mol_type = other RNA
cagtttaagcgcccccc

SEQ ID NO: 1347 - RNA, 17 nt, synthetic construct
  misc_feature 1..17: note = Synthetic
  source 1..17: mol_type = other RNA
agtttaagcgccccccg

SEQ ID NO: 1348 - RNA, 17 nt, synthetic construct
  misc_feature 1..17: note = Synthetic
  source 1..17: mol_type = other RNA
ggggtgccgcgaactcg

SEQ ID NO: 1349 - RNA, 17 nt, synthetic construct
  misc_feature 1..17: note = Synthetic
  source 1..17: mol_type = other RNA
gtgccgcgaactcgtgg

SEQ ID NO: 1350 - RNA, 17 nt, synthetic construct
  misc_feature 1..17: note = Synthetic
  source 1..17: mol_type = other RNA
ctcgtggaggacccgtg

SEQ ID NO: 1351 - RNA, 17 nt, synthetic construct
  misc_feature 1..17: note = Synthetic
  source 1..17: mol_type = other RNA
cccgtgtggcctgtttc

SEQ ID NO: 1352 - RNA, 17 nt, synthetic construct
  misc_feature 1..17: note = Synthetic
  source 1..17: mol_type = other RNA
gtgtggcctgtttcagg

SEQ ID NO: 1353 - RNA, 17 nt, synthetic construct
  misc_feature 1..17: note = Synthetic
  source 1..17: mol_type = other RNA
ctccgcagtgcccgcaa

SEQ ID NO: 1354 - RNA, 17 nt, synthetic construct
  misc_feature 1..17: note = Synthetic
  source 1..17: mol_type = other RNA
tccgcagtgcccgcaac

SEQ ID NO: 1355 - RNA, 17 nt, synthetic construct
  misc_feature 1..17: note = Synthetic
  source 1..17: mol_type = other RNA
ccgcagtgcccgcaacg

SEQ ID NO: 1356 - RNA, 17 nt, synthetic construct
  misc_feature 1..17: note = Synthetic
  source 1..17: mol_type = other RNA
acggggaagcccacgcg

SEQ ID NO: 1357 - RNA, 17 nt, synthetic construct
  misc_feature 1..17: note = Synthetic
  source 1..17: mol_type = other RNA
cggggaagcccacgcgc

SEQ ID NO: 1358 - RNA, 17 nt, synthetic construct
  misc_feature 1..17: note = Synthetic
  source 1..17: mol_type = other RNA
tgacgcatccccgctca

SEQ ID NO: 1359 - RNA, 17 nt, synthetic construct
  misc_feature 1..17: note = Synthetic
  source 1..17: mol_type = other RNA
gacgcatccccgctcaa

SEQ ID NO: 1360 - RNA, 17 nt, synthetic construct
  misc_feature 1..17: note = Synthetic
  source 1..17: mol_type = other RNA
atccccgctcaagggac

SEQ ID NO: 1361 - RNA, 20 nt, synthetic construct
  misc_feature 1..20: note = Synthetic
  source 1..20: mol_type = other RNA
caaacgccccgaggacggcc

SEQ ID NO: 1362 - RNA, 20 nt, synthetic construct
  misc_feature 1..20: note = Synthetic
  source 1..20: mol_type = other RNA
gcgctcaaacgccccgagga

SEQ ID NO: 1363 - RNA, 20 nt, synthetic construct
  misc_feature 1..20: note = Synthetic
  source 1..20: mol_type = other RNA
tgccgcgctcaaacgccccg

SEQ ID NO: 1364 - RNA, 20 nt, synthetic construct
  misc_feature 1..20: note = Synthetic
  source 1..20: mol_type = other RNA
cagcacgtgcagcatctggt

SEQ ID NO: 1365 - RNA, 20 nt, synthetic construct
  misc_feature 1..20: note = Synthetic
  source 1..20: mol_type = other RNA
ccagcagcacgtgcagcatc

SEQ ID NO: 1366 - RNA, 20 nt, synthetic construct
  misc_feature 1..20: note = Synthetic
  source 1..20: mol_type = other RNA
ggcaacaacaaagccagggg

SEQ ID NO: 1367 - RNA, 20 nt, synthetic construct
  misc_feature 1..20: note = Synthetic
  source 1..20: mol_type = other RNA
atcggcaacaacaaagccag

SEQ ID NO: 1368 - RNA, 20 nt, synthetic construct
  misc_feature 1..20: note = Synthetic
  source 1..20: mol_type = other RNA
catcggcaacaacaaagcca

SEQ ID NO: 1369 - RNA, 20 nt, synthetic construct
  misc_feature 1..20: note = Synthetic
  source 1..20: mol_type = other RNA
gcatcggcaacaacaaagcc

SEQ ID NO: 1370 - RNA, 20 nt, synthetic construct
  misc_feature 1..20: note = Synthetic
  source 1..20: mol_type = other RNA
ttgtccaggtatcgttgcat

SEQ ID NO: 1371 - RNA, 20 nt, synthetic construct
  misc_feature 1..20: note = Synthetic
  source 1..20: mol_type = other RNA
tggccaggcggccgttgtcc

SEQ ID NO: 1372 - RNA, 20 nt, synthetic construct
  misc_feature 1..20: note = Synthetic
  source 1..20: mol_type = other RNA
gggccaccctggtggccagg

SEQ ID NO: 1373 - RNA, 20 nt, synthetic construct
  misc_feature 1..20: note = Synthetic
  source 1..20: mol_type = other RNA
cccgggccaccctggtggcc

SEQ ID NO: 1374 - RNA, 20 nt, synthetic construct
  misc_feature 1..20: note = Synthetic
  source 1..20: mol_type = other RNA
ggtcgcccgggccaccctgg

SEQ ID NO: 1375 - RNA, 20 nt, synthetic construct
  misc_feature 1..20: note = Synthetic
  source 1..20: mol_type = other RNA
cagggtcgcccgggccaccc

SEQ ID NO: 1376 - RNA, 20 nt, synthetic construct
  misc_feature 1..20: note = Synthetic
  source 1..20: mol_type = other RNA
ctcggcgaccagggtcgccc

SEQ ID NO: 1377 - RNA, 20 nt, synthetic construct
  misc_feature 1..20: note = Synthetic
  source 1..20: mol_type = other RNA
gctcggcgaccagggtcgcc

SEQ ID NO: 1378 - RNA, 20 nt, synthetic construct
  misc_feature 1..20: note = Synthetic
  source 1..20: mol_type = other RNA
tcgctttagctcggcgacca

SEQ ID NO: 1379 - RNA, 20 nt, synthetic construct
  misc_feature 1..20: note = Synthetic
  source 1..20: mol_type = other RNA
ttcgctttagctcggcgacc

SEQ ID NO: 1380 - RNA, 20 nt, synthetic construct
  misc_feature 1..20: note = Synthetic
  source 1..20: mol_type = other RNA
gcagaagcttcgctttagct

SEQ ID NO: 1381 - RNA, 20 nt, synthetic construct
  misc_feature 1..20: note = Synthetic
  source 1..20: mol_type = other RNA
ggcggtggcccgccttgccc

SEQ ID NO: 1382 - RNA, 20 nt, synthetic construct
  misc_feature 1..20: note = Synthetic
  source 1..20: mol_type = other RNA
cctcgacggcctcccggcgg

SEQ ID NO: 1383 - RNA, 20 nt, synthetic construct
  misc_feature 1..20: note = Synthetic
  source 1..20: mol_type = other RNA
aggcctcgacggcctcccgg

SEQ ID NO: 1384 - RNA, 20 nt, synthetic construct
  misc_feature 1..20: note = Synthetic
  source 1..20: mol_type = other RNA
gccaggcctcgacggcctcc

SEQ ID NO: 1385 - RNA, 20 nt, synthetic construct
  misc_feature 1..20: note = Synthetic
  source 1..20: mol_type = other RNA
gtccacgagccaggcctcga

SEQ ID NO: 1386 - RNA, 20 nt, synthetic construct
  misc_feature 1..20: note = Synthetic
  source 1..20: mol_type = other RNA
cgtggtgaggtccacgagcc

SEQ ID NO: 1387 - RNA, 20 nt, synthetic construct
  misc_feature 1..20: note = Synthetic
  source 1..20: mol_type = other RNA
agggctgcgtggccgtggtg

SEQ ID NO: 1388 - RNA, 20 nt, synthetic construct
  misc_feature 1..20: note = Synthetic
  source 1..20: mol_type = other RNA
cacggagggctgcgtggccg

SEQ ID NO: 1389 - RNA, 20 nt, synthetic construct
  misc_feature 1..20: note = Synthetic
  source 1..20: mol_type = other RNA
cacggccacggagggctgcg

SEQ ID NO: 1390 - RNA, 20 nt, synthetic construct
  misc_feature 1..20: note = Synthetic
  source 1..20: mol_type = other RNA
agacggggcacggccacgga

SEQ ID NO: 1391 - RNA, 20 nt, synthetic construct
  misc_feature 1..20: note = Synthetic
  source 1..20: mol_type = other RNA
cagacggggcacggccacgg

SEQ ID NO: 1392 - RNA, 20 nt, synthetic construct
  misc_feature 1..20: note = Synthetic
  source 1..20: mol_type = other RNA
cgtcagacggggcacggcca

SEQ ID NO: 1393 - RNA, 20 nt, synthetic construct
  misc_feature 1..20: note = Synthetic
  source 1..20: mol_type = other RNA
ggcatgcgtcagacggggca

SEQ ID NO: 1394 - RNA, 20 nt, synthetic construct
  misc_feature 1..20: note = Synthetic
  source 1..20: mol_type = other RNA
gtgtcggcatgcgtcagacg

SEQ ID NO: 1395 - RNA, 20 nt, synthetic construct
  misc_feature 1..20: note = Synthetic
  source 1..20: mol_type = other RNA
cgtgtcggcatgcgtcagac

SEQ ID NO: 1396 - RNA, 20 nt, synthetic construct
  misc_feature 1..20: note = Synthetic
  source 1..20: mol_type = other RNA
gcgtgtcggcatgcgtcaga

SEQ ID NO: 1397 - RNA, 20 nt, synthetic construct
  misc_feature 1..20: note = Synthetic
  source 1..20: mol_type = other RNA
gaccggccgcccgcgcgtgt

SEQ ID NO: 1398 - RNA, 20 nt, synthetic construct
  misc_feature 1..20: note = Synthetic
  source 1..20: mol_type = other RNA
gtgacgagcaccccgtcgac

SEQ ID NO: 1399 - RNA, 20 nt, synthetic construct
  misc_feature 1..20: note = Synthetic
  source 1..20: mol_type = other RNA
gcgctgtttgatcggggcgg

SEQ ID NO: 1400 - RNA, 20 nt, synthetic construct
  misc_feature 1..20: note = Synthetic
  source 1..20: mol_type = other RNA
gaggcgctgtttgatcgggg

SEQ ID NO: 1401 - RNA, 20 nt, synthetic construct
  misc_feature 1..20: note = Synthetic
  source 1..20: mol_type = other RNA
caggaggcgctgtttgatcg

SEQ ID NO: 1402 - RNA, 20 nt, synthetic construct
  misc_feature 1..20: note = Synthetic
  source 1..20: mol_type = other RNA
gcaggaggcgctgtttgatc

SEQ ID NO: 1403 - RNA, 20 nt, synthetic construct
  misc_feature 1..20: note = Synthetic
  source 1..20: mol_type = other RNA
tgcaggaggcgctgtttgat

SEQ ID NO: 1404 - RNA, 20 nt, synthetic construct
  misc_feature 1..20: note = Synthetic
  source 1..20: mol_type = other RNA
ctttcaggaaggactgcagg

SEQ ID NO: 1405 - RNA, 20 nt, synthetic construct
  misc_feature 1..20: note = Synthetic
  source 1..20: mol_type = other RNA
ccactttcaggaaggactgc

SEQ ID NO: 1406 - RNA, 20 nt, synthetic construct
  misc_feature 1..20: note = Synthetic
  source 1..20: mol_type = other RNA
ggtgtcctccactttcagga

SEQ ID NO: 1407 - RNA, 20 nt, synthetic construct
  misc_feature 1..20: note = Synthetic
  source 1..20: mol_type = other RNA
cttcggtgtcctccactttc

SEQ ID NO: 1408 - RNA, 20 nt, synthetic construct
  misc_feature 1..20: note = Synthetic
  source 1..20: mol_type = other RNA
cgtcaccggcacgtcggctt

SEQ ID NO: 1409 - RNA, 20 nt, synthetic construct
  misc_feature 1..20: note = Synthetic
  source 1..20: mol_type = other RNA
gccgtacgtcaccggcacgt

SEQ ID NO: 1410 - RNA, 20 nt, synthetic construct
  misc_feature 1..20: note = Synthetic
  source 1..20: mol_type = other RNA
accatctcgccgtacgtcac

SEQ ID NO: 1411 - RNA, 20 nt, synthetic construct
  misc_feature 1..20: note = Synthetic
  source 1..20: mol_type = other RNA
tgaccaggttggccccgttc

SEQ ID NO: 1412 - RNA, 20 nt, synthetic construct
  misc_feature 1..20: note = Synthetic
  source 1..20: mol_type = other RNA
cacgagcgccgtgaccaggt

SEQ ID NO: 1413 - RNA, 20 nt, synthetic construct
  misc_feature 1..20: note = Synthetic
  source 1..20: mol_type = other RNA
ccatcacgagcgccgtgacc

SEQ ID NO: 1414 - RNA, 20 nt, synthetic construct
  misc_feature 1..20: note = Synthetic
  source 1..20: mol_type = other RNA
cacgtcgtccagacttcgca

SEQ ID NO: 1415 - RNA, 20 nt, synthetic construct
  misc_feature 1..20: note = Synthetic
  source 1..20: mol_type = other RNA
cctgcatctccagcaggtgg

SEQ ID NO: 1416 - RNA, 20 nt, synthetic construct
  misc_feature 1..20: note = Synthetic
  source 1..20: mol_type = other RNA
cctcctgcatctccagcagg

SEQ ID NO: 1417 - RNA, 20 nt, synthetic construct
  misc_feature 1..20: note = Synthetic
  source 1..20: mol_type = other RNA
gctcctcctgcatctccagc

SEQ ID NO: 1418 - RNA, 20 nt, synthetic construct
  misc_feature 1..20: note = Synthetic
  source 1..20: mol_type = other RNA
cgtccagcgtctgccggttc

SEQ ID NO: 1419 - RNA, 20 nt, synthetic construct
  misc_feature 1..20: note = Synthetic
  source 1..20: mol_type = other RNA
cgagctcgtccagcgtctgc

SEQ ID NO: 1420 - RNA, 20 nt, synthetic construct
  misc_feature 1..20: note = Synthetic
  source 1..20: mol_type = other RNA
gcgcacgcgcgtcgtctggg

SEQ ID NO: 1421 - RNA, 20 nt, synthetic construct
  misc_feature 1..20: note = Synthetic
  source 1..20: mol_type = other RNA
cgcgcacgcgcgtcgtctgg

SEQ ID NO: 1422 - RNA, 20 nt, synthetic construct
  misc_feature 1..20: note = Synthetic
  source 1..20: mol_type = other RNA
gcgcgcacgcgcgtcgtctg

SEQ ID NO: 1423 - RNA, 20 nt, synthetic construct
  misc_feature 1..20: note = Synthetic
  source 1..20: mol_type = other RNA
cgcgcgcacgcgcgtcgtct

SEQ ID NO: 1424 - RNA, 20 nt, synthetic construct
  misc_feature 1..20: note = Synthetic
  source 1..20: mol_type = other RNA
ccgcgcgcacgcgcgtcgtc

SEQ ID NO: 1425 - RNA, 20 nt, synthetic construct
  misc_feature 1..20: note = Synthetic
  source 1..20: mol_type = other RNA
aaagaccagcttctcgccga

SEQ ID NO: 1426 - RNA, 20 nt, synthetic construct
  misc_feature 1..20: note = Synthetic
  source 1..20: mol_type = other RNA
ggcgtagatgcgcttctcca

SEQ ID NO: 1427 - RNA, 20 nt, synthetic construct
  misc_feature 1..20: note = Synthetic
  source 1..20: mol_type = other RNA
cggcgtagatgcgcttctcc

SEQ ID NO: 1428 - RNA, 20 nt, synthetic construct
  misc_feature 1..20: note = Synthetic
  source 1..20: mol_type = other RNA
ggggtagggaacgttggtgg

SEQ ID NO: 1429 - RNA, 20 nt, synthetic construct
  misc_feature 1..20: note = Synthetic
  source 1..20: mol_type = other RNA
cagggggtagggaacgttgg

SEQ ID NO: 1430 - RNA, 20 nt, synthetic construct
  misc_feature 1..20: note = Synthetic
  source 1..20: mol_type = other RNA
caccagggggtagggaacgt

SEQ ID NO: 1431 - RNA, 20 nt, synthetic construct
  misc_feature 1..20: note = Synthetic
  source 1..20: mol_type = other RNA
atggcgcccaccagggggta

SEQ ID NO: 1432 - RNA, 20 nt, synthetic construct
  misc_feature 1..20: note = Synthetic
  source 1..20: mol_type = other RNA
catggcgcccaccagggggt

SEQ ID NO: 1433 - RNA, 20 nt, synthetic construct
  misc_feature 1..20: note = Synthetic
  source 1..20: mol_type = other RNA
ggtccatggcgcccaccagg

SEQ ID NO: 1434 - RNA, 20 nt, synthetic construct
  misc_feature 1..20: note = Synthetic
  source 1..20: mol_type = other RNA
aggtccatggcgcccaccag

SEQ ID NO: 1435 - RNA, 20 nt, synthetic construct
  misc_feature 1..20: note = Synthetic
  source 1..20: mol_type = other RNA
caggtccatggcgcccacca

SEQ ID NO: 1436 - RNA, 20 nt, synthetic construct
  misc_feature 1..20: note = Synthetic
  source 1..20: mol_type = other RNA
tcaggtccatggcgcccacc

SEQ ID NO: 1437 - RNA, 20 nt, synthetic construct
  misc_feature 1..20: note = Synthetic
  source 1..20: mol_type = other RNA
caggacgaacgtcaggtcca

SEQ ID NO: 1438 - RNA, 20 nt, synthetic construct
  misc_feature 1..20: note = Synthetic
  source 1..20: mol_type = other RNA
ccaggggcaggacgaacgtc

SEQ ID NO: 1439 - RNA, 20 nt, synthetic construct
  misc_feature 1..20: note = Synthetic
  source 1..20: mol_type = other RNA
gattgaacaggcccaggggc

SEQ ID NO: 1440 - RNA, 20 nt, synthetic construct
  misc_feature 1..20: note = Synthetic
  source 1..20: mol_type = other RNA
accggattgaacaggcccag

SEQ ID NO: 1441 - RNA, 20 nt, synthetic construct
  misc_feature 1..20: note = Synthetic
  source 1..20: mol_type = other RNA
gaccggattgaacaggccca

SEQ ID NO: 1442 - RNA, 20 nt, synthetic construct
  misc_feature 1..20: note = Synthetic
  source 1..20: mol_type = other RNA
tgaccggattgaacaggccc

SEQ ID NO: 1443 - RNA, 20 nt, synthetic construct
  misc_feature 1..20: note = Synthetic
  source 1..20: mol_type = other RNA
gttccatgaccggattgaac

SEQ ID NO: 1444 - RNA, 20 nt, synthetic construct
  misc_feature 1..20: note = Synthetic
  source 1..20: mol_type = other RNA
gcggcaaaccgttccatgac

SEQ ID NO: 1445 - RNA, 20 nt, synthetic construct
  misc_feature 1..20: note = Synthetic
  source 1..20: mol_type = other RNA
gactaggtccccggcgtgcg

SEQ ID NO: 1446 - RNA, 20 nt, synthetic construct
  misc_feature 1..20: note = Synthetic
  source 1..20: mol_type = other RNA
gggggcggggactaggtccc

SEQ ID NO: 1447 - RNA, 20 nt, synthetic construct
  misc_feature 1..20: note = Synthetic
  source 1..20: mol_type = other RNA
ggtggccgggggcggggact

SEQ ID NO: 1448 - RNA, 20 nt, synthetic construct
  misc_feature 1..20: note = Synthetic
  source 1..20: mol_type = other RNA
gatccgggtggccgggggcg

SEQ ID NO: 1449 - RNA, 20 nt, synthetic construct
  misc_feature 1..20: note = Synthetic
  source 1..20: mol_type = other RNA
ggatccgggtggccgggggc

SEQ ID NO: 1450 - RNA, 20 nt, synthetic construct
  misc_feature 1..20: note = Synthetic
  source 1..20: mol_type = other RNA
gggatccgggtggccggggg

SEQ ID NO: 1451 - RNA, 20 nt, synthetic construct
  misc_feature 1..20: note = Synthetic
  source 1..20: mol_type = other RNA
gcggggatccgggtggccgg

SEQ ID NO: 1452 - RNA, 20 nt, synthetic construct
  misc_feature 1..20: note = Synthetic
  source 1..20: mol_type = other RNA
cgcggggatccgggtggccg

SEQ ID NO: 1453 - RNA, 20 nt, synthetic construct
  misc_feature 1..20: note = Synthetic
  source 1..20: mol_type = other RNA
gcgcggggatccgggtggcc

SEQ ID NO: 1454 - RNA, 20 nt, synthetic construct
  misc_feature 1..20: note = Synthetic
  source 1..20: mol_type = other RNA
ggcgcggggatccgggtggc

SEQ ID NO: 1455 - RNA, 20 nt, synthetic construct
  misc_feature 1..20: note = Synthetic
  source 1..20: mol_type = other RNA
ggaaggcgcggggatccggg

SEQ ID NO: 1456 - RNA, 20 nt, synthetic construct
  misc_feature 1..20: note = Synthetic
  source 1..20: mol_type = other RNA
gcgggaaggcgcggggatcc

SEQ ID NO: 1457 - RNA, 20 nt, synthetic construct
  misc_feature 1..20: note = Synthetic
  source 1..20: mol_type = other RNA
ggcgggaaggcgcggggatc

SEQ ID NO: 1458 - RNA, 20 nt, synthetic construct
  misc_feature 1..20: note = Synthetic
  source 1..20: mol_type = other RNA
tggcggggcgggaaggcgcg

SEQ ID NO: 1459 - RNA, 20 nt, synthetic construct
  misc_feature 1..20: note = Synthetic
  source 1..20: mol_type = other RNA
ctggcggggcgggaaggcgc

SEQ ID NO: 1460 - RNA, 20 nt, synthetic construct
  misc_feature 1..20: note = Synthetic
  source 1..20: mol_type = other RNA
gctggcggggcgggaaggcg

SEQ ID NO: 1461 - RNA, 20 nt, synthetic construct
  misc_feature 1..20: note = Synthetic
  source 1..20: mol_type = other RNA
aaacagctggcggggcggga

SEQ ID NO: 1462 - RNA, 20 nt, synthetic construct
  misc_feature 1..20: note = Synthetic
  source 1..20: mol_type = other RNA
aaaaaaacagctggcggggc

SEQ ID NO: 1463 - RNA, 20 nt, synthetic construct
  misc_feature 1..20: note = Synthetic
  source 1..20: mol_type = other RNA
caaaaaaacagctggcgggg

SEQ ID NO: 1464 - RNA, 20 nt, synthetic construct
  misc_feature 1..20: note = Synthetic
  source 1..20: mol_type = other RNA
ccccaaaaaaacagctggcg

SEQ ID NO: 1465 - RNA, 20 nt, synthetic construct
  misc_feature 1..20: note = Synthetic
  source 1..20: mol_type = other RNA
cccccaaaaaaacagctggc

SEQ ID NO: 1466 - RNA, 20 nt, synthetic construct
  misc_feature 1..20: note = Synthetic
  source 1..20: mol_type = other RNA
tcccccaaaaaaacagctgg

SEQ ID NO: 1467 - RNA, 20 nt, synthetic construct
  misc_feature 1..20: note = Synthetic
  source 1..20: mol_type = other RNA
ccttcccccaaaaaaacagc

SEQ ID NO: 1468 - RNA, 20 nt, synthetic construct
  misc_feature 1..20: note = Synthetic
  source 1..20: mol_type = other RNA
gagacaggcgcagcacctgg

SEQ ID NO: 1469 - RNA, 20 nt, synthetic construct
  misc_feature 1..20: note = Synthetic
  source 1..20: mol_type = other RNA
ccagagacaggcgcagcacc

SEQ ID NO: 1470 - RNA, 20 nt, synthetic construct
  misc_feature 1..20: note = Synthetic
  source 1..20: mol_type = other RNA
cgatcgcgtgttccagagac

SEQ ID NO: 1471 - RNA, 20 nt, synthetic construct
  misc_feature 1..20: note = Synthetic
  source 1..20: mol_type = other RNA
catcagcgaagggtggcaca

SEQ ID NO: 1472 - RNA, 20 nt, synthetic construct
  misc_feature 1..20: note = Synthetic
  source 1..20: mol_type = other RNA
caacgttcatcagcgaaggg

SEQ ID NO: 1473 - RNA, 20 nt, synthetic construct
  misc_feature 1..20: note = Synthetic
  source 1..20: mol_type = other RNA
cgtcaacgttcatcagcgaa

SEQ ID NO: 1474 - RNA, 20 nt, synthetic construct
  misc_feature 1..20: note = Synthetic
  source 1..20: mol_type = other RNA
gcgtcaacgttcatcagcga

SEQ ID NO: 1475 - RNA, 20 nt, synthetic construct
  misc_feature 1..20: note = Synthetic
  source 1..20: mol_type = other RNA
cttcgacggggtcgcggtta

SEQ ID NO: 1476 - RNA, 20 nt, synthetic construct
  misc_feature 1..20: note = Synthetic
  source 1..20: mol_type = other RNA
tggcggcttcgacggggtcg

SEQ ID NO: 1477 - RNA, 20 nt, synthetic construct
  misc_feature 1..20: note = Synthetic
  source 1..20: mol_type = other RNA
acggattggcggcttcgacg

SEQ ID NO: 1478 - RNA, 20 nt, synthetic construct
  misc_feature 1..20: note = Synthetic
  source 1..20: mol_type = other RNA
tacggattggcggcttcgac

SEQ ID NO: 1479 - RNA, 20 nt, synthetic construct
  misc_feature 1..20: note = Synthetic
  source 1..20: mol_type = other RNA
gtacggattggcggcttcga

SEQ ID NO: 1480 - RNA, 20 nt, synthetic construct
  misc_feature 1..20: note = Synthetic
  source 1..20: mol_type = other RNA
gtacgccccgtacggattgg

SEQ ID NO: 1481 - RNA, 20 nt, synthetic construct
  misc_feature 1..20: note = Synthetic
  source 1..20: mol_type = other RNA
cacgtacgccccgtacggat

SEQ ID NO: 1482 - RNA, 20 nt, synthetic construct
  misc_feature 1..20: note = Synthetic
  source 1..20: mol_type = other RNA
gccgccacgtacgccccgta

SEQ ID NO: 1483 - RNA, 20 nt, synthetic construct
  misc_feature 1..20: note = Synthetic
  source 1..20: mol_type = other RNA
gtctgcggcggggccggccg

SEQ ID NO: 1484 - RNA, 20 nt, synthetic construct
  misc_feature 1..20: note = Synthetic
  source 1..20: mol_type = other RNA
tgtctgcggcggggccggcc

SEQ ID NO: 1485 - RNA, 20 nt, synthetic construct
  misc_feature 1..20: note = Synthetic
  source 1..20: mol_type = other RNA
atgtctgcggcggggccggc

SEQ ID NO: 1486 - RNA, 20 nt, synthetic construct
  misc_feature 1..20: note = Synthetic
  source 1..20: mol_type = other RNA
ctgcatgtctgcggcggggc

SEQ ID NO: 1487 - RNA, 20 nt, synthetic construct
  misc_feature 1..20: note = Synthetic
  source 1..20: mol_type = other RNA
gctgctgcatgtctgcggcg

SEQ ID NO: 1488 - RNA, 20 nt, synthetic construct
  misc_feature 1..20: note = Synthetic
  source 1..20: mol_type = other RNA
agctgctgcatgtctgcggc

SEQ ID NO: 1489 - RNA, 20 nt, synthetic construct
  misc_feature 1..20: note = Synthetic
  source 1..20: mol_type = other RNA
cagctgctgcatgtctgcgg

SEQ ID NO: 1490 - RNA, 20 nt, synthetic construct
  misc_feature 1..20: note = Synthetic
  source 1..20: mol_type = other RNA
aaacagctgctgcatgtctg

SEQ ID NO: 1491 - RNA, 20 nt, synthetic construct
  misc_feature 1..20: note = Synthetic
  source 1..20: mol_type = other RNA
gtgggccaggcgctgccccc

SEQ ID NO: 1492 - RNA, 20 nt, synthetic construct
  misc_feature 1..20: note = Synthetic
  source 1..20: mol_type = other RNA
atcggacccgcccgtgggcc

SEQ ID NO: 1493 - RNA, 20 nt, synthetic construct
  misc_feature 1..20: note = Synthetic
  source 1..20: mol_type = other RNA
gacccatcggacccgcccgt

SEQ ID NO: 1494 - RNA, 20 nt, synthetic construct
  misc_feature 1..20: note = Synthetic
  source 1..20: mol_type = other RNA
cgacccatcggacccgcccg

SEQ ID NO: 1495 - RNA, 20 nt, synthetic construct
  misc_feature 1..20: note = Synthetic
  source 1..20: mol_type = other RNA
tctggccttccgcgacccat

SEQ ID NO: 1496 - RNA, 20 nt, synthetic construct
  misc_feature 1..20: note = Synthetic
  source 1..20: mol_type = other RNA
taaactgctccggggtcatc

SEQ ID NO: 1497 - RNA, 20 nt, synthetic construct
  misc_feature 1..20: note = Synthetic
  source 1..20: mol_type = other RNA
gggctgcataaactgctccg

SEQ ID NO: 1498 - RNA, 20 nt, synthetic construct
  misc_feature 1..20: note = Synthetic
  source 1..20: mol_type = other RNA
cgggctgcataaactgctcc

SEQ ID NO: 1499 - RNA, 20 nt, synthetic construct
  misc_feature 1..20: note = Synthetic
  source 1..20: mol_type = other RNA
tcgggctgcataaactgctc

SEQ ID NO: 1500 - RNA, 20 nt, synthetic construct
  misc_feature 1..20: note = Synthetic
  source 1..20: mol_type = other RNA
agagccaggttggcgttgtc

SEQ ID NO: 1501 - RNA, 20 nt, synthetic construct
  misc_feature 1..20: note = Synthetic
  source 1..20: mol_type = other RNA
aagagccaggttggcgttgt

SEQ ID NO: 1502 - RNA, 20 nt, synthetic construct
  misc_feature 1..20: note = Synthetic
  source 1..20: mol_type = other RNA
gtgcagctcaagagccaggt

SEQ ID NO: 1503 - RNA, 20 nt, synthetic construct
  misc_feature 1..20: note = Synthetic
  source 1..20: mol_type = other RNA
cggggtgcagctcaagagcc

SEQ ID NO: 1504 - RNA, 20 nt, synthetic construct
  misc_feature 1..20: note = Synthetic
  source 1..20: mol_type = other RNA
ccacaaagaagtcgaacgcg

SEQ ID NO: 1505 - RNA, 20 nt, synthetic construct
  misc_feature 1..20: note = Synthetic
  source 1..20: mol_type = other RNA
cccacaaagaagtcgaacgc

SEQ ID NO: 1506 - RNA, 20 nt, synthetic construct
  misc_feature 1..20: note = Synthetic
  source 1..20: mol_type = other RNA
ccccacaaagaagtcgaacg

SEQ ID NO: 1507 - RNA, 20 nt, synthetic construct
  misc_feature 1..20: note = Synthetic
  source 1..20: mol_type = other RNA
cccccccggcagctccacgt

SEQ ID NO: 1508 - RNA, 20 nt, synthetic construct
  misc_feature 1..20: note = Synthetic
  source 1..20: mol_type = other RNA
gccgggggaacgtccccccc

SEQ ID NO: 1509 - RNA, 20 nt, synthetic construct
  misc_feature 1..20: note = Synthetic
  source 1..20: mol_type = other RNA
atctcccccgggccggccgg

SEQ ID NO: 1510 - RNA, 20 nt, synthetic construct
  misc_feature 1..20: note = Synthetic
  source 1..20: mol_type = other RNA
gatctcccccgggccggccg

SEQ ID NO: 1511 - RNA, 20 nt, synthetic construct
  misc_feature 1..20: note = Synthetic
  source 1..20: mol_type = other RNA
ggatctcccccgggccggcc

SEQ ID NO: 1512 - RNA, 20 nt, synthetic construct
  misc_feature 1..20: note = Synthetic
  source 1..20: mol_type = other RNA
tggatctcccccgggccggc

SEQ ID NO: 1513 - RNA, 20 nt, synthetic construct
  misc_feature 1..20: note = Synthetic
  source 1..20: mol_type = other RNA
ggcctggatctcccccgggc

SEQ ID NO: 1514 - RNA, 20 nt, synthetic construct
  misc_feature 1..20: note = Synthetic
  source 1..20: mol_type = other RNA
aggtggcctggatctccccc

SEQ ID NO: 1515 - RNA, 20 nt, synthetic construct
  misc_feature 1..20: note = Synthetic
  source 1..20: mol_type = other RNA
caggtggcctggatctcccc

SEQ ID NO: 1516 - RNA, 20 nt, synthetic construct
  misc_feature 1..20: note = Synthetic
  source 1..20: mol_type = other RNA
tcaccacgcgccaggtggcc

SEQ ID NO: 1517 - RNA, 20 nt, synthetic construct
  misc_feature 1..20: note = Synthetic
  source 1..20: mol_type = other RNA
gccgttcaccacgcgccagg

SEQ ID NO: 1518 - RNA, 20 nt, synthetic construct
  misc_feature 1..20: note = Synthetic
  source 1..20: mol_type = other RNA
gttgccgttcaccacgcgcc

SEQ ID NO: 1519 - RNA, 20 nt, synthetic construct
  misc_feature 1..20: note = Synthetic
  source 1..20: mol_type = other RNA
gccgccggacatagcgccag

SEQ ID NO: 1520 - RNA, 20 nt, synthetic construct
  misc_feature 1..20: note = Synthetic
  source 1..20: mol_type = other RNA
cgccgccggacatagcgcca

SEQ ID NO: 1521 - RNA, 20 nt, synthetic construct
  misc_feature 1..20: note = Synthetic
  source 1..20: mol_type = other RNA
acgccgccggacatagcgcc

SEQ ID NO: 1522 - RNA, 20 nt, synthetic construct
  misc_feature 1..20: note = Synthetic
  source 1..20: mol_type = other RNA
cgggcgtcccggaacgccgc

SEQ ID NO: 1523 - RNA, 20 nt, synthetic construct
  misc_feature 1..20: note = Synthetic
  source 1..20: mol_type = other RNA
gctccaggccccgggcgtcc

SEQ ID NO: 1524 - RNA, 20 nt, synthetic construct
  misc_feature 1..20: note = Synthetic
  source 1..20: mol_type = other RNA
cacccccagctccaggcccc

SEQ ID NO: 1525 - RNA, 20 nt, synthetic construct
  misc_feature 1..20: note = Synthetic
  source 1..20: mol_type = other RNA
ccacccccagctccaggccc

SEQ ID NO: 1526 - RNA, 20 nt, synthetic construct
  misc_feature 1..20: note = Synthetic
  source 1..20: mol_type = other RNA
ggcgtcccacccccagctcc

SEQ ID NO: 1527 - RNA, 20 nt, synthetic construct
  misc_feature 1..20: note = Synthetic
  source 1..20: mol_type = other RNA
tggtggcgggggccatggcg

SEQ ID NO: 1528 - RNA, 20 nt, synthetic construct
  misc_feature 1..20: note = Synthetic
  source 1..20: mol_type = other RNA
ggcgatggtggcgggggcca

SEQ ID NO: 1529 - RNA, 20 nt, synthetic construct
  misc_feature 1..20: note = Synthetic
  source 1..20: mol_type = other RNA
aacggcggcgatggtggcgg

SEQ ID NO: 1530 - RNA, 20 nt, synthetic construct
  misc_feature 1..20: note = Synthetic
  source 1..20: mol_type = other RNA
gaacggcggcgatggtggcg

SEQ ID NO: 1531 - RNA, 20 nt, synthetic construct
  misc_feature 1..20: note = Synthetic
  source 1..20: mol_type = other RNA
cgaacggcggcgatggtggc

SEQ ID NO: 1532 - RNA, 20 nt, synthetic construct
  misc_feature 1..20: note = Synthetic
  source 1..20: mol_type = other RNA
gcgaacggcggcgatggtgg

SEQ ID NO: 1533 - RNA, 20 nt, synthetic construct
  misc_feature 1..20: note = Synthetic
  source 1..20: mol_type = other RNA
cccgcgaacggcggcgatgg

SEQ ID NO: 1534 - RNA, 20 nt, synthetic construct
  misc_feature 1..20: note = Synthetic
  source 1..20: mol_type = other RNA
cgccccgcgaacggcggcga

SEQ ID NO: 1535 - RNA, 20 nt, synthetic construct
  misc_feature 1..20: note = Synthetic
  source 1..20: mol_type = other RNA
gtcgaacgccccgcgaacgg

SEQ ID NO: 1536 - RNA, 20 nt, synthetic construct
  misc_feature 1..20: note = Synthetic
  source 1..20: mol_type = other RNA
gtcgtcgaacgccccgcgaa

SEQ ID NO: 1537 - RNA, 20 nt, synthetic construct
  misc_feature 1..20: note = Synthetic
  source 1..20: mol_type = other RNA
aaaacaccgccgggtagttg

SEQ ID NO: 1538 - RNA, 20 nt, synthetic construct
  misc_feature 1..20: note = Synthetic
  source 1..20: mol_type = other RNA
gcagcaggtaaaacaccgcc

SEQ ID NO: 1539 - RNA, 20 nt, synthetic construct
  misc_feature 1..20: note = Synthetic
  source 1..20: mol_type = other RNA
tgcagcaggtaaaacaccgc

SEQ ID NO: 1540 - RNA, 20 nt, synthetic construct
  misc_feature 1..20: note = Synthetic
  source 1..20: mol_type = other RNA
cgtgtatggcggcctgcagc

SEQ ID NO: 1541 - RNA, 20 nt, synthetic construct
  misc_feature 1..20: note = Synthetic
  source 1..20: mol_type = other RNA
gtgctcgctgccgtgtatgg

SEQ ID NO: 1542 - RNA, 20 nt, synthetic construct
  misc_feature 1..20: note = Synthetic
  source 1..20: mol_type = other RNA
gacgtgctcgctgccgtgta

SEQ ID NO: 1543 - RNA, 20 nt, synthetic construct
  misc_feature 1..20: note = Synthetic
  source 1..20: mol_type = other RNA
ctggaccacgagccgggcca

SEQ ID NO: 1544 - RNA, 20 nt, synthetic construct
  misc_feature 1..20: note = Synthetic
  source 1..20: mol_type = other RNA
actggaccacgagccgggcc

SEQ ID NO: 1545 - RNA, 20 nt, synthetic construct
  misc_feature 1..20: note = Synthetic
  source 1..20: mol_type = other RNA
gatgcactggaccacgagcc

SEQ ID NO: 1546 - RNA, 20 nt, synthetic construct
  misc_feature 1..20: note = Synthetic
  source 1..20: mol_type = other RNA
tgatgcactggaccacgagc

SEQ ID NO: 1547 - RNA, 20 nt, synthetic construct
  misc_feature 1..20: note = Synthetic
  source 1..20: mol_type = other RNA
tccagtagctggtgatgcac

SEQ ID NO: 1548 - RNA, 20 nt, synthetic construct
  misc_feature 1..20: note = Synthetic
  source 1..20: mol_type = other RNA
ccgcgtgttgttccagtagc

SEQ ID NO: 1549 - RNA, 20 nt, synthetic construct
  misc_feature 1..20: note = Synthetic
  source 1..20: mol_type = other RNA
gggaaggtctcccccgaggt

SEQ ID NO: 1550 - RNA, 20 nt, synthetic construct
  misc_feature 1..20: note = Synthetic
  source 1..20: mol_type = other RNA
cctcgggaaggtctcccccg

SEQ ID NO: 1551 - RNA, 20 nt, synthetic construct
  misc_feature 1..20: note = Synthetic
  source 1..20: mol_type = other RNA
cggccatgcactcctcggga

SEQ ID NO: 1552 - RNA, 20 nt, synthetic construct
  misc_feature 1..20: note = Synthetic
  source 1..20: mol_type = other RNA
tacacggccatgcactcctc

SEQ ID NO: 1553 - RNA, 20 nt, synthetic construct
  misc_feature 1..20: note = Synthetic
  source 1..20: mol_type = other RNA
gtacacggccatgcactcct

SEQ ID NO: 1554 - RNA, 20 nt, synthetic construct
  misc_feature 1..20: note = Synthetic
  source 1..20: mol_type = other RNA
cgccaccaggtcccggtaca

SEQ ID NO: 1555 - RNA, 20 nt, synthetic construct
  misc_feature 1..20: note = Synthetic
  source 1..20: mol_type = other RNA
cgacgtgcgccaccaggtcc

SEQ ID NO: 1556 - RNA, 20 nt, synthetic construct
  misc_feature 1..20: note = Synthetic
  source 1..20: mol_type = other RNA
gggcctcgacgtgcgccacc

SEQ ID NO: 1557 - RNA, 20 nt, synthetic construct
  misc_feature 1..20: note = Synthetic
  source 1..20: mol_type = other RNA
gtcatcaaccagctgggcca

SEQ ID NO: 1558 - RNA, 20 nt, synthetic construct
  misc_feature 1..20: note = Synthetic
  source 1..20: mol_type = other RNA
agtcatcaaccagctgggcc

SEQ ID NO: 1559 - RNA, 20 nt, synthetic construct
  misc_feature 1..20: note = Synthetic
  source 1..20: mol_type = other RNA
ggtaaagtcatcaaccagct

SEQ ID NO: 1560 - RNA, 20 nt, synthetic construct
  misc_feature 1..20: note = Synthetic
  source 1..20: mol_type = other RNA
gggtaaagtcatcaaccagc

SEQ ID NO: 1561 - RNA, 20 nt, synthetic construct
  misc_feature 1..20: note = Synthetic
  source 1..20: mol_type = other RNA
gcccagctccgggccggtca

SEQ ID NO: 1562 - RNA, 20 nt, synthetic construct
  misc_feature 1..20: note = Synthetic
  source 1..20: mol_type = other RNA
cgcccagctccgggccggtc

SEQ ID NO: 1563 - RNA, 20 nt, synthetic construct
  misc_feature 1..20: note = Synthetic
  source 1..20: mol_type = other RNA
ctgcccgcccagctccgggc

SEQ ID NO: 1564 - RNA, 20 nt, synthetic construct
  misc_feature 1..20: note = Synthetic
  source 1..20: mol_type = other RNA
gcgcctgcccgcccagctcc

SEQ ID NO: 1565 - RNA, 20 nt, synthetic construct
  misc_feature 1..20: note = Synthetic
  source 1..20: mol_type = other RNA
tgcgcctgcccgcccagctc

SEQ ID NO: 1566 - RNA, 20 nt, synthetic construct
  misc_feature 1..20: note = Synthetic
  source 1..20: mol_type = other RNA
tcgcattaggtgattcagct

SEQ ID NO: 1567 - RNA, 20 nt, synthetic construct
  misc_feature 1..20: note = Synthetic
  source 1..20: mol_type = other RNA
gcagcgccgggtctcgcatt

SEQ ID NO: 1568 - RNA, 20 nt, synthetic construct
  misc_feature 1..20: note = Synthetic
  source 1..20: mol_type = other RNA
cgaggggtggcagcagcgcc

SEQ ID NO: 1569 - RNA, 20 nt, synthetic construct
  misc_feature 1..20: note = Synthetic
  source 1..20: mol_type = other RNA
acgaggggtggcagcagcgc

SEQ ID NO: 1570 - RNA, 20 nt, synthetic construct
  misc_feature 1..20: note = Synthetic
  source 1..20: mol_type = other RNA
tcacagtcccacacgagggg

SEQ ID NO: 1571 - RNA, 20 nt, synthetic construct
  misc_feature 1..20: note = Synthetic
  source 1..20: mol_type = other RNA
gcgtcacagtcccacacgag

SEQ ID NO: 1572 - RNA, 20 nt, synthetic construct
  misc_feature 1..20: note = Synthetic
  source 1..20: mol_type = other RNA
ggcgtcacagtcccacacga

SEQ ID NO: 1573 - RNA, 20 nt, synthetic construct
  misc_feature 1..20: note = Synthetic
  source 1..20: mol_type = other RNA
gggcgtcacagtcccacacg

SEQ ID NO: 1574 - RNA, 20 nt, synthetic construct
  misc_feature 1..20: note = Synthetic
  source 1..20: mol_type = other RNA
cagggccgcgcgccgcatca

SEQ ID NO: 1575 - RNA, 20 nt, synthetic construct
  misc_feature 1..20: note = Synthetic
  source 1..20: mol_type = other RNA
ccagggccgcgcgccgcatc

SEQ ID NO: 1576 - RNA, 20 nt, synthetic construct
  misc_feature 1..20: note = Synthetic
  source 1..20: mol_type = other RNA
gcagtcgcgatggcggtcca

SEQ ID NO: 1577 - RNA, 20 nt, synthetic construct
  misc_feature 1..20: note = Synthetic
  source 1..20: mol_type = other RNA
ggcagtcgcgatggcggtcc

SEQ ID NO: 1578 - RNA, 20 nt, synthetic construct
  misc_feature 1..20: note = Synthetic
  source 1..20: mol_type = other RNA
taacccggcagtcgcgatgg

SEQ ID NO: 1579 - RNA, 20 nt, synthetic construct
  misc_feature 1..20: note = Synthetic
  source 1..20: mol_type = other RNA
cgctaacccggcagtcgcga

SEQ ID NO: 1580 - RNA, 20 nt, synthetic construct
  misc_feature 1..20: note = Synthetic
  source 1..20: mol_type = other RNA
cgtggccccccgcgctaacc

SEQ ID NO: 1581 - RNA, 20 nt, synthetic construct
  misc_feature 1..20: note = Synthetic
  source 1..20: mol_type = other RNA
ccgccgcgtacacggggtcg

SEQ ID NO: 1582 - RNA, 20 nt, synthetic construct
  misc_feature 1..20: note = Synthetic
  source 1..20: mol_type = other RNA
tacatgccgccgcgtacacg

SEQ ID NO: 1583 - RNA, 20 nt, synthetic construct
  misc_feature 1..20: note = Synthetic
  source 1..20: mol_type = other RNA
ttacatgccgccgcgtacac

SEQ ID NO: 1584 - RNA, 20 nt, synthetic construct
  misc_feature 1..20: note = Synthetic
  source 1..20: mol_type = other RNA
gttacatgccgccgcgtaca

SEQ ID NO: 1585 - RNA, 20 nt, synthetic construct
  misc_feature 1..20: note = Synthetic
  source 1..20: mol_type = other RNA
gtcgttgcggttgaagtccg

SEQ ID NO: 1586 - RNA, 20 nt, synthetic construct
  misc_feature 1..20: note = Synthetic
  source 1..20: mol_type = other RNA
gcagcagctggccgtcgttg

SEQ ID NO: 1587 - RNA, 20 nt, synthetic construct
  misc_feature 1..20: note = Synthetic
  source 1..20: mol_type = other RNA
cctgggtgttgtgcagcagc

SEQ ID NO: 1588 - RNA, 20 nt, synthetic construct
  misc_feature 1..20: note = Synthetic
  source 1..20: mol_type = other RNA
ggcgtccgcggctcgggcct

SEQ ID NO: 1589 - RNA, 20 nt, synthetic construct
  misc_feature 1..20: note = Synthetic
  source 1..20: mol_type = other RNA
cggcgtccgcggctcgggcc

SEQ ID NO: 1590 - RNA, 20 nt, synthetic construct
  misc_feature 1..20: note = Synthetic
  source 1..20: mol_type = other RNA
atccgcggcgtccgcggctc

SEQ ID NO: 1591 - RNA, 20 nt, synthetic construct
  misc_feature 1..20: note = Synthetic
  source 1..20: mol_type = other RNA
catccgcggcgtccgcggct

SEQ ID NO: 1592 - RNA, 20 nt, synthetic construct
  misc_feature 1..20: note = Synthetic
  source 1..20: mol_type = other RNA
ccggtcatccgcggcgtccg

SEQ ID NO: 1593 - RNA, 20 nt, synthetic construct
  misc_feature 1..20: note = Synthetic
  source 1..20: mol_type = other RNA
ccggtgcggccggtcatccg

SEQ ID NO: 1594 - RNA, 20 nt, synthetic construct
  misc_feature 1..20: note = Synthetic
  source 1..20: mol_type = other RNA
agtccgccccccggtgcggc

SEQ ID NO: 1595 - RNA, 20 nt, synthetic construct
  misc_feature 1..20: note = Synthetic
  source 1..20: mol_type = other RNA
gtccagtccgccccccggtg

SEQ ID NO: 1596 - RNA, 20 nt, synthetic construct
  misc_feature 1..20: note = Synthetic
  source 1..20: mol_type = other RNA
gcacggtccagtccgccccc

SEQ ID NO: 1597 - RNA, 20 nt, synthetic construct
  misc_feature 1..20: note = Synthetic
  source 1..20: mol_type = other RNA
gtagtaaatcttgtggtgca

SEQ ID NO: 1598 - RNA, 20 nt, synthetic construct
  misc_feature 1..20: note = Synthetic
  source 1..20: mol_type = other RNA
tcacgtagtagtaaatcttg

SEQ ID NO: 1599 - RNA, 20 nt, synthetic construct
  misc_feature 1..20: note = Synthetic
  source 1..20: mol_type = other RNA
cagcggccccgcgagaaggc

SEQ ID NO: 1600 - RNA, 20 nt, synthetic construct
  misc_feature 1..20: note = Synthetic
  source 1..20: mol_type = other RNA
gcagcggccccgcgagaagg

SEQ ID NO: 1601 - RNA, 20 nt, synthetic construct
  misc_feature 1..20: note = Synthetic
  source 1..20: mol_type = other RNA
gcagcagcggccccgcgaga

SEQ ID NO: 1602 - RNA, 20 nt, synthetic construct
  misc_feature 1..20: note = Synthetic
  source 1..20: mol_type = other RNA
gaacccccgcggtgcagcag

SEQ ID NO: 1603 - RNA, 20 nt, synthetic construct
  misc_feature 1..20: note = Synthetic
  source 1..20: mol_type = other RNA
gcggtcgaagcgaacccccg

SEQ ID NO: 1604 - RNA, 20 nt, synthetic construct
  misc_feature 1..20: note = Synthetic
  source 1..20: mol_type = other RNA
tctgcagggtggcgtatacg

SEQ ID NO: 1605 - RNA, 20 nt, synthetic construct
  misc_feature 1..20: note = Synthetic
  source 1..20: mol_type = other RNA
gaccaccatgttctgcaggg

SEQ ID NO: 1606 - RNA, 20 nt, synthetic construct
  misc_feature 1..20: note = Synthetic
  source 1..20: mol_type = other RNA
cgggaccaccatgttctgca

SEQ ID NO: 1607 - RNA, 20 nt, synthetic construct
  misc_feature 1..20: note = Synthetic
  source 1..20: mol_type = other RNA
ccgggaccaccatgttctgc

SEQ ID NO: 1608 - RNA, 20 nt, synthetic construct
  misc_feature 1..20: note = Synthetic
  source 1..20: mol_type = other RNA
cctcgccgggggcgatctcc

SEQ ID NO: 1609 - RNA, 20 nt, synthetic construct
  misc_feature 1..20: note = Synthetic
  source 1..20: mol_type = other RNA
tcctcgccgggggcgatctc

SEQ ID NO: 1610 - RNA, 20 nt, synthetic construct
  misc_feature 1..20: note = Synthetic
  source 1..20: mol_type = other RNA
gctggggcactcctcgccgg

SEQ ID NO: 1611 - RNA, 20 nt, synthetic construct
  misc_feature 1..20: note = Synthetic
  source 1..20: mol_type = other RNA
cgctggggcactcctcgccg

SEQ ID NO: 1612 - RNA, 20 nt, synthetic construct
  misc_feature 1..20: note = Synthetic
  source 1..20: mol_type = other RNA
tcgctggggcactcctcgcc

SEQ ID NO: 1613 - RNA, 20 nt, synthetic construct
  misc_feature 1..20: note = Synthetic
  source 1..20: mol_type = other RNA
gtcgctggggcactcctcgc

SEQ ID NO: 1614 - RNA, 20 nt, synthetic construct
  misc_feature 1..20: note = Synthetic
  source 1..20: mol_type = other RNA
ggtccgtcacggggtcgctg

SEQ ID NO: 1615 - RNA, 20 nt, synthetic construct
  misc_feature 1..20: note = Synthetic
  source 1..20: mol_type = other RNA
gggtccgtcacggggtcgct

SEQ ID NO: 1616 - RNA, 20 nt, synthetic construct
  misc_feature 1..20: note = Synthetic
  source 1..20: mol_type = other RNA
ggggtccgtcacggggtcgc

SEQ ID NO: 1617 - RNA, 20 nt, synthetic construct
  misc_feature 1..20: note = Synthetic
  source 1..20: mol_type = other RNA
ggtgcgcggggtccgtcacg

SEQ ID NO: 1618 - RNA, 20 nt, synthetic construct
  misc_feature 1..20: note = Synthetic
  source 1..20: mol_type = other RNA
gggtgcgcggggtccgtcac

SEQ ID NO: 1619 - RNA, 20 nt, synthetic construct
  misc_feature 1..20: note = Synthetic
  source 1..20: mol_type = other RNA
ggggtgcgcggggtccgtca

SEQ ID NO: 1620 - RNA, 20 nt, synthetic construct
  misc_feature 1..20: note = Synthetic
  source 1..20: mol_type = other RNA
ccgggtgcagggggtgcgcg

SEQ ID NO: 1621 - RNA, 20 nt, synthetic construct
  misc_feature 1..20: note = Synthetic
  source 1..20: mol_type = other RNA
gccgggtgcagggggtgcgc

SEQ ID NO: 1622 - RNA, 20 nt, synthetic construct
  misc_feature 1..20: note = Synthetic
  source 1..20: mol_type = other RNA
ggccgggtgcagggggtgcg

SEQ ID NO: 1623 - RNA, 20 nt, synthetic construct
  misc_feature 1..20: note = Synthetic
  source 1..20: mol_type = other RNA
ccagattggccgggtgcagg

SEQ ID NO: 1624 - RNA, 20 nt, synthetic construct
  misc_feature 1..20: note = Synthetic
  source 1..20: mol_type = other RNA
accagattggccgggtgcag

SEQ ID NO: 1625 - RNA, 20 nt, synthetic construct
  misc_feature 1..20: note = Synthetic
  source 1..20: mol_type = other RNA
caccagattggccgggtgca

SEQ ID NO: 1626 - RNA, 20 nt, synthetic construct
  misc_feature 1..20: note = Synthetic
  source 1..20: mol_type = other RNA
ccaccagattggccgggtgc

SEQ ID NO: 1627 - RNA, 20 nt, synthetic construct
  misc_feature 1..20: note = Synthetic
  source 1..20: mol_type = other RNA
tgttggccaccagattggcc

SEQ ID NO: 1628 - RNA, 20 nt, synthetic construct
  misc_feature 1..20: note = Synthetic
  source 1..20: mol_type = other RNA
gtgttggccaccagattggc

SEQ ID NO: 1629 - RNA, 20 nt, synthetic construct
  misc_feature 1..20: note = Synthetic
  source 1..20: mol_type = other RNA
gaccgtgttggccaccagat

SEQ ID NO: 1630 - RNA, 20 nt, synthetic construct
  misc_feature 1..20: note = Synthetic
  source 1..20: mol_type = other RNA
aaacatggcgttgaccgtgt

SEQ ID NO: 1631 - RNA, 20 nt, synthetic construct
  misc_feature 1..20: note = Synthetic
  source 1..20: mol_type = other RNA
cacgcgcccgttgtgaaaca

SEQ ID NO: 1632 - RNA, 20 nt, synthetic construct
  misc_feature 1..20: note = Synthetic
  source 1..20: mol_type = other RNA
acctgcagcgtgagcatggc

SEQ ID NO: 1633 - RNA, 20 nt, synthetic construct
  misc_feature 1..20: note = Synthetic
  source 1..20: mol_type = other RNA
cacctgcagcgtgagcatgg

SEQ ID NO: 1634 - RNA, 20 nt, synthetic construct
  misc_feature 1..20: note = Synthetic
  source 1..20: mol_type = other RNA
cagcacctgcagcgtgagca

SEQ ID NO: 1635 - RNA, 20 nt, synthetic construct
  misc_feature 1..20: note = Synthetic
  source 1..20: mol_type = other RNA
tgtgcgttcggccatgttgt

SEQ ID NO: 1636 - RNA, 20 nt, synthetic construct
  misc_feature 1..20: note = Synthetic
  source 1..20: mol_type = other RNA
ttgtgcgttcggccatgttg

SEQ ID NO: 1637 - RNA, 20 nt, synthetic construct
  misc_feature 1..20: note = Synthetic
  source 1..20: mol_type = other RNA
gagcagcgccgttgtgcgtt

SEQ ID NO: 1638 - RNA, 20 nt, synthetic construct
  misc_feature 1..20: note = Synthetic
  source 1..20: mol_type = other RNA
gcggtgttggcgcccgcgtc

SEQ ID NO: 1639 - RNA, 20 nt, synthetic construct
  misc_feature 1..20: note = Synthetic
  source 1..20: mol_type = other RNA
cgcggtgttggcgcccgcgt

SEQ ID NO: 1640 - RNA, 20 nt, synthetic construct
  misc_feature 1..20: note = Synthetic
  source 1..20: mol_type = other RNA
gttggtggtggacgcggtgt

SEQ ID NO: 1641 - RNA, 20 nt, synthetic construct
  misc_feature 1..20: note = Synthetic
  source 1..20: mol_type = other RNA
gcgcatgttggtggtggacg

SEQ ID NO: 1642 - RNA, 20 nt, synthetic construct
  misc_feature 1..20: note = Synthetic
  source 1..20: mol_type = other RNA
gaatatgcgcatgttggtgg

SEQ ID NO: 1643 - RNA, 20 nt, synthetic construct
  misc_feature 1..20: note = Synthetic
  source 1..20: mol_type = other RNA
gtcgaatatgcgcatgttgg

SEQ ID NO: 1644 - RNA, 20 nt, synthetic construct
  misc_feature 1..20: note = Synthetic
  source 1..20: mol_type = other RNA
cccgtcgaatatgcgcatgt

SEQ ID NO: 1645 - RNA, 20 nt, synthetic construct
  misc_feature 1..20: note = Synthetic
  source 1..20: mol_type = other RNA
gggggccatcagcaggattc

SEQ ID NO: 1646 - RNA, 20 nt, synthetic construct
  misc_feature 1..20: note = Synthetic
  source 1..20: mol_type = other RNA
gatgctggggggccatcagc

SEQ ID NO: 1647 - RNA, 20 nt, synthetic construct
  misc_feature 1..20: note = Synthetic
  source 1..20: mol_type = other RNA
ggtatggtccagatgctggg

SEQ ID NO: 1648 - RNA, 20 nt, synthetic construct
  misc_feature 1..20: note = Synthetic
  source 1..20: mol_type = other RNA
tggtatggtccagatgctgg

SEQ ID NO: 1649 - RNA, 20 nt, synthetic construct
  misc_feature 1..20: note = Synthetic
  source 1..20: mol_type = other RNA
atggtatggtccagatgctg

SEQ ID NO: 1650 - RNA, 20 nt, synthetic construct
  misc_feature 1..20: note = Synthetic
  source 1..20: mol_type = other RNA
gatggtatggtccagatgct

SEQ ID NO: 1651 - RNA, 20 nt, synthetic construct
  misc_feature 1..20: note = Synthetic
  source 1..20: mol_type = other RNA
ggatggtatggtccagatgc

SEQ ID NO: 1652 - RNA, 20 nt, synthetic construct
  misc_feature 1..20: note = Synthetic
  source 1..20: mol_type = other RNA
agtcgccattttggatggta

SEQ ID NO: 1653 - RNA, 20 nt, synthetic construct
  misc_feature 1..20: note = Synthetic
  source 1..20: mol_type = other RNA
aaaatagtcgccattttgga

SEQ ID NO: 1654 - RNA, 20 nt, synthetic construct
  misc_feature 1..20: note = Synthetic
  source 1..20: mol_type = other RNA
ggtaaaaatagtcgccattt

SEQ ID NO: 1655 - RNA, 20 nt, synthetic construct
  misc_feature 1..20: note = Synthetic
  source 1..20: mol_type = other RNA
acagcgcgtggacggggagg

SEQ ID NO: 1656 - RNA, 20 nt, synthetic construct
  misc_feature 1..20: note = Synthetic
  source 1..20: mol_type = other RNA
aacagcgcgtggacggggag

SEQ ID NO: 1657 - RNA, 20 nt, synthetic construct
  misc_feature 1..20: note = Synthetic
  source 1..20: mol_type = other RNA
gaacagcgcgtggacgggga

SEQ ID NO: 1658 - RNA, 20 nt, synthetic construct
  misc_feature 1..20: note = Synthetic
  source 1..20: mol_type = other RNA
cgaacagcgcgtggacgggg

SEQ ID NO: 1659 - RNA, 20 nt, synthetic construct
  misc_feature 1..20: note = Synthetic
  source 1..20: mol_type = other RNA
cggcgaacagcgcgtggacg

SEQ ID NO: 1660 - RNA, 20 nt, synthetic construct
  misc_feature 1..20: note = Synthetic
  source 1..20: mol_type = other RNA
ccggcgaacagcgcgtggac

SEQ ID NO: 1661 - RNA, 20 nt, synthetic construct
  misc_feature 1..20: note = Synthetic
  source 1..20: mol_type = other RNA
cccggcgaacagcgcgtgga

SEQ ID NO: 1662 - RNA, 20 nt, synthetic construct
  misc_feature 1..20: note = Synthetic
  source 1..20: mol_type = other RNA
cggccccggcgaacagcgcg

SEQ ID NO: 1663 - RNA, 20 nt, synthetic construct
  misc_feature 1..20: note = Synthetic
  source 1..20: mol_type = other RNA
gttcgccacgtggtcggccc

SEQ ID NO: 1664 - RNA, 20 nt, synthetic construct
  misc_feature 1..20: note = Synthetic
  source 1..20: mol_type = other RNA
gggcgcgttcgccacgtggt

SEQ ID NO: 1665 - RNA, 20 nt, synthetic construct
  misc_feature 1..20: note = Synthetic
  source 1..20: mol_type = other RNA
aattgggcgcgttcgccacg

SEQ ID NO: 1666 - RNA, 20 nt, synthetic construct
  misc_feature 1..20: note = Synthetic
  source 1..20: mol_type = other RNA
cgcagggccggggggaaatt

SEQ ID NO: 1667 - RNA, 20 nt, synthetic construct
  misc_feature 1..20: note = Synthetic
  source 1..20: mol_type = other RNA
gcgcagggccggggggaaat

SEQ ID NO: 1668 - RNA, 20 nt, synthetic construct
  misc_feature 1..20: note = Synthetic
  source 1..20: mol_type = other RNA
acaggtcgcgcagggccggg

SEQ ID NO: 1669 - RNA, 20 nt, synthetic construct
  misc_feature 1..20: note = Synthetic
  source 1..20: mol_type = other RNA
gacaggtcgcgcagggccgg

SEQ ID NO: 1670 - RNA, 20 nt, synthetic construct
  misc_feature 1..20: note = Synthetic
  source 1..20: mol_type = other RNA
cgacaggtcgcgcagggccg

SEQ ID NO: 1671 - RNA, 20 nt, synthetic construct
  misc_feature 1..20: note = Synthetic
  source 1..20: mol_type = other RNA
gcgacaggtcgcgcagggcc

SEQ ID NO: 1672 - RNA, 20 nt, synthetic construct
  misc_feature 1..20: note = Synthetic
  source 1..20: mol_type = other RNA
cgcgacaggtcgcgcagggc

SEQ ID NO: 1673 - RNA, 20 nt, synthetic construct
  misc_feature 1..20: note = Synthetic
  source 1..20: mol_type = other RNA
ctgccgcgacaggtcgcgca

SEQ ID NO: 1674 - RNA, 20 nt, synthetic construct
  misc_feature 1..20: note = Synthetic
  source 1..20: mol_type = other RNA
cctgccgcgacaggtcgcgc

SEQ ID NO: 1675 - RNA, 20 nt, synthetic construct
  misc_feature 1..20: note = Synthetic
  source 1..20: mol_type = other RNA
ccagggggacctgccgcgac

SEQ ID NO: 1676 - RNA, 20 nt, synthetic construct
  misc_feature 1..20: note = Synthetic
  source 1..20: mol_type = other RNA
ccagagccggggggaccagg

SEQ ID NO: 1677 - RNA, 20 nt, synthetic construct
  misc_feature 1..20: note = Synthetic
  source 1..20: mol_type = other RNA
cccagagccggggggaccag

SEQ ID NO: 1678 - RNA, 20 nt, synthetic construct
  misc_feature 1..20: note = Synthetic
  source 1..20: mol_type = other RNA
ccccagagccggggggacca

SEQ ID NO: 1679 - RNA, 20 nt, synthetic construct
  misc_feature 1..20: note = Synthetic
  source 1..20: mol_type = other RNA
cccccagagccggggggacc

SEQ ID NO: 1680 - RNA, 20 nt, synthetic construct
  misc_feature 1..20: note = Synthetic
  source 1..20: mol_type = other RNA
agttggcccccagagccggg

SEQ ID NO: 1681 - RNA, 20 nt, synthetic construct
  misc_feature 1..20: note = Synthetic
  source 1..20: mol_type = other RNA
tagttggcccccagagccgg

SEQ ID NO: 1682 - RNA, 20 nt, synthetic construct
  misc_feature 1..20: note = Synthetic
  source 1..20: mol_type = other RNA
gtagttggcccccagagccg

SEQ ID NO: 1683 - RNA, 20 nt, synthetic construct
  misc_feature 1..20: note = Synthetic
  source 1..20: mol_type = other RNA
agtagttggcccccagagcc

SEQ ID NO: 1684 - RNA, 20 nt, synthetic construct
  misc_feature 1..20: note = Synthetic
  source 1..20: mol_type = other RNA
aagtagttggcccccagagc

SEQ ID NO: 1685 - RNA, 20 nt, synthetic construct
  misc_feature 1..20: note = Synthetic
  source 1..20: mol_type = other RNA
tcggatcgacgaaaagtagt

SEQ ID NO: 1686 - RNA, 20 nt, synthetic construct
  misc_feature 1..20: note = Synthetic
  source 1..20: mol_type = other RNA
cgtgctgcacgacgggctgt

SEQ ID NO: 1687 - RNA, 20 nt, synthetic construct
  misc_feature 1..20: note = Synthetic
  source 1..20: mol_type = other RNA
tcgcggacgtgctgcacgac

SEQ ID NO: 1688 - RNA, 20 nt, synthetic construct
  misc_feature 1..20: note = Synthetic
  source 1..20: mol_type = other RNA
ctcgcggacgtgctgcacga

SEQ ID NO: 1689 - RNA, 20 nt, synthetic construct
  misc_feature 1..20: note = Synthetic
  source 1..20: mol_type = other RNA
tctccccggccgcgctctcg

SEQ ID NO: 1690 - RNA, 20 nt, synthetic construct
  misc_feature 1..20: note = Synthetic
  source 1..20: mol_type = other RNA
gtaggtcagcgcgttctccc

SEQ ID NO: 1691 - RNA, 20 nt, synthetic construct
  misc_feature 1..20: note = Synthetic
  source 1..20: mol_type = other RNA
gtaccccgccatgagcgcgt

SEQ ID NO: 1692 - RNA, 20 nt, synthetic construct
  misc_feature 1..20: note = Synthetic
  source 1..20: mol_type = other RNA
agctgatgatgcaaggccac

SEQ ID NO: 1693 - RNA, 20 nt, synthetic construct
  misc_feature 1..20: note = Synthetic
  source 1..20: mol_type = other RNA
gagctgatgatgcaaggcca

SEQ ID NO: 1694 - RNA, 20 nt, synthetic construct
  misc_feature 1..20: note = Synthetic
  source 1..20: mol_type = other RNA
cgtcttgagctgatgatgca

SEQ ID NO: 1695 - RNA, 20 nt, synthetic construct
  misc_feature 1..20: note = Synthetic
  source 1..20: mol_type = other RNA
tgaacccaaacccgggatgg

SEQ ID NO: 1696 - RNA, 20 nt, synthetic construct
  misc_feature 1..20: note = Synthetic
  source 1..20: mol_type = other RNA
cggtgaacccaaacccggga

SEQ ID NO: 1697 - RNA, 20 nt, synthetic construct
  misc_feature 1..20: note = Synthetic
  source 1..20: mol_type = other RNA
acgacggtgaacccaaaccc

SEQ ID NO: 1698 - RNA, 20 nt, synthetic construct
  misc_feature 1..20: note = Synthetic
  source 1..20: mol_type = other RNA
gacgacggtgaacccaaacc

SEQ ID NO: 1699 - RNA, 20 nt, synthetic construct
  misc_feature 1..20: note = Synthetic
  source 1..20: mol_type = other RNA
aaagcggtcctgtcggacga

SEQ ID NO: 1700 - RNA, 20 nt, synthetic construct
  misc_feature 1..20: note = Synthetic
  source 1..20: mol_type = other RNA
cagtcacaaagcggtcctgt

SEQ ID NO: 1701 - RNA, 20 nt, synthetic construct
  misc_feature 1..20: note = Synthetic
  source 1..20: mol_type = other RNA
gcacgttctcagtcacaaag

SEQ ID NO: 1702 - RNA, 20 nt, synthetic construct
  misc_feature 1..20: note = Synthetic
  source 1..20: mol_type = other RNA
gggccacctggagctggccc

SEQ ID NO: 1703 - RNA, 20 nt, synthetic construct
  misc_feature 1..20: note = Synthetic
  source 1..20: mol_type = other RNA
cgtgccgggccacctggagc

SEQ ID NO: 1704 - RNA, 20 nt, synthetic construct
  misc_feature 1..20: note = Synthetic
  source 1..20: mol_type = other RNA
cagtttcgtgccgggccacc

SEQ ID NO: 1705 - RNA, 20 nt, synthetic construct
  misc_feature 1..20: note = Synthetic
  source 1..20: mol_type = other RNA
ccccccgccagtttcgtgcc

SEQ ID NO: 1706 - RNA, 20 nt, synthetic construct
  misc_feature 1..20: note = Synthetic
  source 1..20: mol_type = other RNA
cccccccgccagtttcgtgc

SEQ ID NO: 1707 - RNA, 20 nt, synthetic construct
  misc_feature 1..20: note = Synthetic
  source 1..20: mol_type = other RNA
gtccacgttcgcgcgcggct

SEQ ID NO: 1708 - RNA, 20 nt, synthetic construct
  misc_feature 1..20: note = Synthetic
  source 1..20: mol_type = other RNA
ggtccacgttcgcgcgcggc

SEQ ID NO: 1709 - RNA, 20 nt, synthetic construct
  misc_feature 1..20: note = Synthetic
  source 1..20: mol_type = other RNA
cccaggtccacgttcgcgcg

SEQ ID NO: 1710 - RNA, 20 nt, synthetic construct
  misc_feature 1..20: note = Synthetic
  source 1..20: mol_type = other RNA
cggcggtgtagcccacgccc

SEQ ID NO: 1711 - RNA, 20 nt, synthetic construct
  misc_feature 1..20: note = Synthetic
  source 1..20: mol_type = other RNA
ggttgccgtggccacgacgg

SEQ ID NO: 1712 - RNA, 20 nt, synthetic construct
  misc_feature 1..20: note = Synthetic
  source 1..20: mol_type = other RNA
gacggttgccgtggccacga

SEQ ID NO: 1713 - RNA, 20 nt, synthetic construct
  misc_feature 1..20: note = Synthetic
  source 1..20: mol_type = other RNA
ggggttgcggacggttgccg

SEQ ID NO: 1714 - RNA, 20 nt, synthetic construct
  misc_feature 1..20: note = Synthetic
  source 1..20: mol_type = other RNA
gtcggtgacggggttgcgga

SEQ ID NO: 1715 - RNA, 20 nt, synthetic construct
  misc_feature 1..20: note = Synthetic
  source 1..20: mol_type = other RNA
ccatgtcggtgacggggttg

SEQ ID NO: 1716 - RNA, 20 nt, synthetic construct
  misc_feature 1..20: note = Synthetic
  source 1..20: mol_type = other RNA
ggttgcccatgtcggtgacg

SEQ ID NO: 1717 - RNA, 20 nt, synthetic construct
  misc_feature 1..20: note = Synthetic
  source 1..20: mol_type = other RNA
aggttgcccatgtcggtgac

SEQ ID NO: 1718 - RNA, 20 nt, synthetic construct
  misc_feature 1..20: note = Synthetic
  source 1..20: mol_type = other RNA
aaggttgcccatgtcggtga

SEQ ID NO: 1719 - RNA, 20 nt, synthetic construct
  misc_feature 1..20: note = Synthetic
  source 1..20: mol_type = other RNA
ttggggaaggttgcccatgt

SEQ ID NO: 1720 - RNA, 20 nt, synthetic construct
  misc_feature 1..20: note = Synthetic
  source 1..20: mol_type = other RNA
ccaggtaaaagttttgggga

SEQ ID NO: 1721 - RNA, 20 nt, synthetic construct
  misc_feature 1..20: note = Synthetic
  source 1..20: mol_type = other RNA
cggcccaggtaaaagttttg

SEQ ID NO: 1722 - RNA, 20 nt, synthetic construct
  misc_feature 1..20: note = Synthetic
  source 1..20: mol_type = other RNA
gcggcccaggtaaaagtttt

SEQ ID NO: 1723 - RNA, 20 nt, synthetic construct
  misc_feature 1..20: note = Synthetic
  source 1..20: mol_type = other RNA
cgcggcccaggtaaaagttt

SEQ ID NO: 1724 - RNA, 20 nt, synthetic construct
  misc_feature 1..20: note = Synthetic
  source 1..20: mol_type = other RNA
gagggggagccccgcggccc

SEQ ID NO: 1725 - RNA, 20 nt, synthetic construct
  misc_feature 1..20: note = Synthetic
  source 1..20: mol_type = other RNA
ccaggagagggggagccccg

SEQ ID NO: 1726 - RNA, 20 nt, synthetic construct
  misc_feature 1..20: note = Synthetic
  source 1..20: mol_type = other RNA
gccgcgttgtccaggagagg

SEQ ID NO: 1727 - RNA, 20 nt, synthetic construct
  misc_feature 1..20: note = Synthetic
  source 1..20: mol_type = other RNA
tgccgcgttgtccaggagag

SEQ ID NO: 1728 - RNA, 20 nt, synthetic construct
  misc_feature 1..20: note = Synthetic
  source 1..20: mol_type = other RNA
ctgccgcgttgtccaggaga

SEQ ID NO: 1729 - RNA, 20 nt, synthetic construct
  misc_feature 1..20: note = Synthetic
  source 1..20: mol_type = other RNA
gctgccgcgttgtccaggag

SEQ ID NO: 1730 - RNA, 20 nt, synthetic construct
  misc_feature 1..20: note = Synthetic
  source 1..20: mol_type = other RNA
acacggctgccgcgttgtcc

SEQ ID NO: 1731 - RNA, 20 nt, synthetic construct
  misc_feature 1..20: note = Synthetic
  source 1..20: mol_type = other RNA
gaccgcgttccgcaggtaca

SEQ ID NO: 1732 - RNA, 20 nt, synthetic construct
  misc_feature 1..20: note = Synthetic
  source 1..20: mol_type = other RNA
ccgccacgaccgcgttccgc

SEQ ID NO: 1733 - RNA, 20 nt, synthetic construct
  misc_feature 1..20: note = Synthetic
  source 1..20: mol_type = other RNA
cgggctgggccggccccagg

SEQ ID NO: 1734 - RNA, 20 nt, synthetic construct
  misc_feature 1..20: note = Synthetic
  source 1..20: mol_type = other RNA
ggacgggctgggccggcccc

SEQ ID NO: 1735 - RNA, 20 nt, synthetic construct
  misc_feature 1..20: note = Synthetic
  source 1..20: mol_type = other RNA
aacacggggacgggctgggc

SEQ ID NO: 1736 - RNA, 20 nt, synthetic construct
  misc_feature 1..20: note = Synthetic
  source 1..20: mol_type = other RNA
cccgaacacggggacgggct

SEQ ID NO: 1737 - RNA, 20 nt, synthetic construct
  misc_feature 1..20: note = Synthetic
  source 1..20: mol_type = other RNA
acccgaacacggggacgggc

SEQ ID NO: 1738 - RNA, 20 nt, synthetic construct
  misc_feature 1..20: note = Synthetic
  source 1..20: mol_type = other RNA
gcgcacccgaacacggggac

SEQ ID NO: 1739 - RNA, 20 nt, synthetic construct
  misc_feature 1..20: note = Synthetic
  source 1..20: mol_type = other RNA
ggcgcacccgaacacgggga

SEQ ID NO: 1740 - RNA, 20 nt, synthetic construct
  misc_feature 1..20: note = Synthetic
  source 1..20: mol_type = other RNA
cctgggcgcacccgaacacg

SEQ ID NO: 1741 - RNA, 20 nt, synthetic construct
  misc_feature 1..20: note = Synthetic
  source 1..20: mol_type = other RNA
acctgggcgcacccgaacac

SEQ ID NO: 1742 - RNA, 20 nt, synthetic construct
  misc_feature 1..20: note = Synthetic
  source 1..20: mol_type = other RNA
cacctgggcgcacccgaaca

SEQ ID NO: 1743 - RNA, 20 nt, synthetic construct
  misc_feature 1..20: note = Synthetic
  source 1..20: mol_type = other RNA
ccctgcgcgccgcggcacct

SEQ ID NO: 1744 - RNA, 20 nt, synthetic construct
  misc_feature 1..20: note = Synthetic
  source 1..20: mol_type = other RNA
tccctgcgcgccgcggcacc

SEQ ID NO: 1745 - RNA, 20 nt, synthetic construct
  misc_feature 1..20: note = Synthetic
  source 1..20: mol_type = other RNA
tggtccatccctgcgcgccg

SEQ ID NO: 1746 - RNA, 20 nt, synthetic construct
  misc_feature 1..20: note = Synthetic
  source 1..20: mol_type = other RNA
cacacacggcgtcctggccg

SEQ ID NO: 1747 - RNA, 20 nt, synthetic construct
  misc_feature 1..20: note = Synthetic
  source 1..20: mol_type = other RNA
taaactcacacacggcgtcc

SEQ ID NO: 1748 - RNA, 20 nt, synthetic construct
  misc_feature 1..20: note = Synthetic
  source 1..20: mol_type = other RNA
ggtggcgataaactcacaca

SEQ ID NO: 1749 - RNA, 20 nt, synthetic construct
  misc_feature 1..20: note = Synthetic
  source 1..20: mol_type = other RNA
gacgtcggtcgacacggggg

SEQ ID NO: 1750 - RNA, 20 nt, synthetic construct
  misc_feature 1..20: note = Synthetic
  source 1..20: mol_type = other RNA
gttgacgtcggtcgacacgg

SEQ ID NO: 1751 - RNA, 20 nt, synthetic construct
  misc_feature 1..20: note = Synthetic
  source 1..20: mol_type = other RNA
agttgacgtcggtcgacacg

SEQ ID NO: 1752 - RNA, 20 nt, synthetic construct
  misc_feature 1..20: note = Synthetic
  source 1..20: mol_type = other RNA
tagttgacgtcggtcgacac

SEQ ID NO: 1753 - RNA, 20 nt, synthetic construct
  misc_feature 1..20: note = Synthetic
  source 1..20: mol_type = other RNA
gtagttgacgtcggtcgaca

SEQ ID NO: 1754 - RNA, 20 nt, synthetic construct
  misc_feature 1..20: note = Synthetic
  source 1..20: mol_type = other RNA
ccggcggaagtagttgacgt

SEQ ID NO: 1755 - RNA, 20 nt, synthetic construct
  misc_feature 1..20: note = Synthetic
  source 1..20: mol_type = other RNA
cccgggggttgcagggccgg

SEQ ID NO: 1756 - RNA, 20 nt, synthetic construct
  misc_feature 1..20: note = Synthetic
  source 1..20: mol_type = other RNA
gtccccgggggttgcagggc

SEQ ID NO: 1757 - RNA, 20 nt, synthetic construct
  misc_feature 1..20: note = Synthetic
  source 1..20: mol_type = other RNA
gcgcgtccccgggggttgca

SEQ ID NO: 1758 - RNA, 20 nt, synthetic construct
  misc_feature 1..20: note = Synthetic
  source 1..20: mol_type = other RNA
ggcgcgtccccgggggttgc

SEQ ID NO: 1759 - RNA, 20 nt, synthetic construct
  misc_feature 1..20: note = Synthetic
  source 1..20: mol_type = other RNA
ccccggcggcgcgtccccgg

SEQ ID NO: 1760 - RNA, 20 nt, synthetic construct
  misc_feature 1..20: note = Synthetic
  source 1..20: mol_type = other RNA
cccccggcggcgcgtccccg

SEQ ID NO: 1761 - RNA, 20 nt, synthetic construct
  misc_feature 1..20: note = Synthetic
  source 1..20: mol_type = other RNA
gcccccggcggcgcgtcccc

SEQ ID NO: 1762 - RNA, 20 nt, synthetic construct
  misc_feature 1..20: note = Synthetic
  source 1..20: mol_type = other RNA
cgcccccggcggcgcgtccc

SEQ ID NO: 1763 - RNA, 20 nt, synthetic construct
  misc_feature 1..20: note = Synthetic
  source 1..20: mol_type = other RNA
ccccgcgtaaacgcccccgg

SEQ ID NO: 1764 - RNA, 20 nt, synthetic construct
  misc_feature 1..20: note = Synthetic
  source 1..20: mol_type = other RNA
gtcccccgcgtaaacgcccc

SEQ ID NO: 1765 - RNA, 20 nt, synthetic construct
  misc_feature 1..20: note = Synthetic
  source 1..20: mol_type = other RNA
gccgtggtcgtacatgaggg

SEQ ID NO: 1766 - RNA, 20 nt, synthetic construct
  misc_feature 1..20: note = Synthetic
  source 1..20: mol_type = other RNA
ctggccgtggtcgtacatga

SEQ ID NO: 1767 - RNA, 20 nt, synthetic construct
  misc_feature 1..20: note = Synthetic
  source 1..20: mol_type = other RNA
tctggccgtggtcgtacatg

SEQ ID NO: 1768 - RNA, 20 nt, synthetic construct
  misc_feature 1..20: note = Synthetic
  source 1..20: mol_type = other RNA
gggacgggtcgctctggccg

SEQ ID NO: 1769 - RNA, 20 nt, synthetic construct
  misc_feature 1..20: note = Synthetic
  source 1..20: mol_type = other RNA
aggcccgggacgggtcgctc

SEQ ID NO: 1770 - RNA, 20 nt, synthetic construct
  misc_feature 1..20: note = Synthetic
  source 1..20: mol_type = other RNA
tggccgcgaaggcccgggac

SEQ ID NO: 1771 - RNA, 20 nt, synthetic construct
  misc_feature 1..20: note = Synthetic
  source 1..20: mol_type = other RNA
gtggccgcgaaggcccggga

SEQ ID NO: 1772 - RNA, 20 nt, synthetic construct
  misc_feature 1..20: note = Synthetic
  source 1..20: mol_type = other RNA
ggccgtggccgcgaaggccc

SEQ ID NO: 1773 - RNA, 20 nt, synthetic construct
  misc_feature 1..20: note = Synthetic
  source 1..20: mol_type = other RNA
tggccgtggccgcgaaggcc

SEQ ID NO: 1774 - RNA, 20 nt, synthetic construct
  misc_feature 1..20: note = Synthetic
  source 1..20: mol_type = other RNA
cgggttggccgtggccgcga

SEQ ID NO: 1775 - RNA, 20 nt, synthetic construct
  misc_feature 1..20: note = Synthetic
  source 1..20: mol_type = other RNA
cgacgcccacgggttggccg

SEQ ID NO: 1776 - RNA, 20 nt, synthetic construct
  misc_feature 1..20: note = Synthetic
  source 1..20: mol_type = other RNA
tcgctgcgacgcccacgggt

SEQ ID NO: 1777 - RNA, 20 nt, synthetic construct
  misc_feature 1..20: note = Synthetic
  source 1..20: mol_type = other RNA
aaaatcgctgcgacgcccac

SEQ ID NO: 1778 - RNA, 20 nt, synthetic construct
  misc_feature 1..20: note = Synthetic
  source 1..20: mol_type = other RNA
gaaaatcgctgcgacgccca

SEQ ID NO: 1779 - RNA, 20 nt, synthetic construct
  misc_feature 1..20: note = Synthetic
  source 1..20: mol_type = other RNA
ggtaggccccgttatagagc

SEQ ID NO: 1780 - RNA, 20 nt, synthetic construct
  misc_feature 1..20: note = Synthetic
  source 1..20: mol_type = other RNA
cgaggccccgttgaggtggt

SEQ ID NO: 1781 - RNA, 20 nt, synthetic construct
  misc_feature 1..20: note = Synthetic
  source 1..20: mol_type = other RNA
ccggcgaggccccgttgagg

SEQ ID NO: 1782 - RNA, 20 nt, synthetic construct
  misc_feature 1..20: note = Synthetic
  source 1..20: mol_type = other RNA
gcaccggcgaggccccgttg

SEQ ID NO: 1783 - RNA, 20 nt, synthetic construct
  misc_feature 1..20: note = Synthetic
  source 1..20: mol_type = other RNA
gcaggggctgagcaccggcg

SEQ ID NO: 1784 - RNA, 20 nt, synthetic construct
  misc_feature 1..20: note = Synthetic
  source 1..20: mol_type = other RNA
ttaaagcaggggctgagcac

SEQ ID NO: 1785 - RNA, 20 nt, synthetic construct
  misc_feature 1..20: note = Synthetic
  source 1..20: mol_type = other RNA
acgtaaagaacttaaagcag

SEQ ID NO: 1786 - RNA, 20 nt, synthetic construct
  misc_feature 1..20: note = Synthetic
  source 1..20: mol_type = other RNA
gacgtaaagaacttaaagca

SEQ ID NO: 1787 - RNA, 20 nt, synthetic construct
  misc_feature 1..20: note = Synthetic
  source 1..20: mol_type = other RNA
cgacgtaaagaacttaaagc

SEQ ID NO: 1788 - RNA, 20 nt, synthetic construct
  misc_feature 1..20: note = Synthetic
  source 1..20: mol_type = other RNA
gcgatgtttggcggcgatgt

SEQ ID NO: 1789 - RNA, 20 nt, synthetic construct
  misc_feature 1..20: note = Synthetic
  source 1..20: mol_type = other RNA
ctccaggcagcgatgtttgg

SEQ ID NO: 1790 - RNA, 20 nt, synthetic construct
  misc_feature 1..20: note = Synthetic
  source 1..20: mol_type = other RNA
gcgctccaggcagcgatgtt

SEQ ID NO: 1791 - RNA, 20 nt, synthetic construct
  misc_feature 1..20: note = Synthetic
  source 1..20: mol_type = other RNA
tctccacgatcaggcgctcc

SEQ ID NO: 1792 - RNA, 20 nt, synthetic construct
  misc_feature 1..20: note = Synthetic
  source 1..20: mol_type = other RNA
ccgaacccgtctccacgatc

SEQ ID NO: 1793 - RNA, 20 nt, synthetic construct
  misc_feature 1..20: note = Synthetic
  source 1..20: mol_type = other RNA
gtcgctggcggcggtggccg

SEQ ID NO: 1794 - RNA, 20 nt, synthetic construct
  misc_feature 1..20: note = Synthetic
  source 1..20: mol_type = other RNA
ctgtacgtcgctggcggcgg

SEQ ID NO: 1795 - RNA, 20 nt, synthetic construct
  misc_feature 1..20: note = Synthetic
  source 1..20: mol_type = other RNA
aaactgtacgtcgctggcgg

SEQ ID NO: 1796 - RNA, 20 nt, synthetic construct
  misc_feature 1..20: note = Synthetic
  source 1..20: mol_type = other RNA
cttaaactgtacgtcgctgg

SEQ ID NO: 1797 - RNA, 20 nt, synthetic construct
  misc_feature 1..20: note = Synthetic
  source 1..20: mol_type = other RNA
gcgcttaaactgtacgtcgc

SEQ ID NO: 1798 - RNA, 20 nt, synthetic construct
  misc_feature 1..20: note = Synthetic
  source 1..20: mol_type = other RNA
cgagttcgcggcaccccggg

SEQ ID NO: 1799 - RNA, 20 nt, synthetic construct
  misc_feature 1..20: note = Synthetic
  source 1..20: mol_type = other RNA
acgagttcgcggcaccccgg

SEQ ID NO: 1800 - RNA, 20 nt, synthetic construct
  misc_feature 1..20: note = Synthetic
  source 1..20: mol_type = other RNA
cacgagttcgcggcaccccg

SEQ ID NO: 1801 - RNA, 20 nt, synthetic construct
  misc_feature 1..20: note = Synthetic
  source 1..20: mol_type = other RNA
ccacgagttcgcggcacccc

SEQ ID NO: 1802 - RNA, 20 nt, synthetic construct
  misc_feature 1..20: note = Synthetic
  source 1..20: mol_type = other RNA
tccacgagttcgcggcaccc

SEQ ID NO: 1803 - RNA, 20 nt, synthetic construct
  misc_feature 1..20: note = Synthetic
  source 1..20: mol_type = other RNA
acgggtcctccacgagttcg

SEQ ID NO: 1804 - RNA, 20 nt, synthetic construct
  misc_feature 1..20: note = Synthetic
  source 1..20: mol_type = other RNA
cctcctgaaacaggccacac

SEQ ID NO: 1805 - RNA, 20 nt, synthetic construct
  misc_feature 1..20: note = Synthetic
  source 1..20: mol_type = other RNA
gcctcctgaaacaggccaca

SEQ ID NO: 1806 - RNA, 20 nt, synthetic construct
  misc_feature 1..20: note = Synthetic
  source 1..20: mol_type = other RNA
gcgggtaggcctcctgaaac

SEQ ID NO: 1807 - RNA, 20 nt, synthetic construct
  misc_feature 1..20: note = Synthetic
  source 1..20: mol_type = other RNA
gctggcgcaggtgagcgggt

SEQ ID NO: 1808 - RNA, 20 nt, synthetic construct
  misc_feature 1..20: note = Synthetic
  source 1..20: mol_type = other RNA
ggtcgctggcgcaggtgagc

SEQ ID NO: 1809 - RNA, 20 nt, synthetic construct
  misc_feature 1..20: note = Synthetic
  source 1..20: mol_type = other RNA
gggtcgctggcgcaggtgag

SEQ ID NO: 1810 - RNA, 20 nt, synthetic construct
  misc_feature 1..20: note = Synthetic
  source 1..20: mol_type = other RNA
gagggcggggtcgctggcgc

SEQ ID NO: 1811 - RNA, 20 nt, synthetic construct
  misc_feature 1..20: note = Synthetic
  source 1..20: mol_type = other RNA
gcggaggagggcggggtcgc

SEQ ID NO: 1812 - RNA, 20 nt, synthetic construct
  misc_feature 1..20: note = Synthetic
  source 1..20: mol_type = other RNA
gggcactgcggaggagggcg

SEQ ID NO: 1813 - RNA, 20 nt, synthetic construct
  misc_feature 1..20: note = Synthetic
  source 1..20: mol_type = other RNA
cgggcactgcggaggagggc

SEQ ID NO: 1814 - RNA, 20 nt, synthetic construct
  misc_feature 1..20: note = Synthetic
  source 1..20: mol_type = other RNA
gcgggcactgcggaggaggg

SEQ ID NO: 1815 - RNA, 20 nt, synthetic construct
  misc_feature 1..20: note = Synthetic
  source 1..20: mol_type = other RNA
gttgcgggcactgcggagga

SEQ ID NO: 1816 - RNA, 20 nt, synthetic construct
  misc_feature 1..20: note = Synthetic
  source 1..20: mol_type = other RNA
cgttgcgggcactgcggagg

SEQ ID NO: 1817 - RNA, 20 nt, synthetic construct
  misc_feature 1..20: note = Synthetic
  source 1..20: mol_type = other RNA
ccccgttgcgggcactgcgg

SEQ ID NO: 1818 - RNA, 20 nt, synthetic construct
  misc_feature 1..20: note = Synthetic
  source 1..20: mol_type = other RNA
cttccccgttgcgggcactg

SEQ ID NO: 1819 - RNA, 20 nt, synthetic construct
  misc_feature 1..20: note = Synthetic
  source 1..20: mol_type = other RNA
cgcgtgggcttccccgttgc

SEQ ID NO: 1820 - RNA, 20 nt, synthetic construct
  misc_feature 1..20: note = Synthetic
  source 1..20: mol_type = other RNA
gcgcgtgggcttccccgttg

SEQ ID NO: 1821 - RNA, 20 nt, synthetic construct
  misc_feature 1..20: note = Synthetic
  source 1..20: mol_type = other RNA
gaagtgggtctcccgcgcgt

SEQ ID NO: 1822 - RNA, 20 nt, synthetic construct
  misc_feature 1..20: note = Synthetic
  source 1..20: mol_type = other RNA
cgaagtgggtctcccgcgcg

SEQ ID NO: 1823 - RNA, 20 nt, synthetic construct
  misc_feature 1..20: note = Synthetic
  source 1..20: mol_type = other RNA
gacgagatactgcgcgaagt

SEQ ID NO: 1824 - RNA, 20 nt, synthetic construct
  misc_feature 1..20: note = Synthetic
  source 1..20: mol_type = other RNA
agacgagatactgcgcgaag

SEQ ID NO: 1825 - RNA, 20 nt, synthetic construct
  misc_feature 1..20: note = Synthetic
  source 1..20: mol_type = other RNA
cagagccagtcccttgagcg

SEQ ID NO: 1826 - RNA, 20 nt, synthetic construct
  misc_feature 1..20: note = Synthetic
  source 1..20: mol_type = other RNA
acagagccagtcccttgagc

SEQ ID NO: 1827 - RNA, 20 nt, synthetic construct
  misc_feature 1..20: note = Synthetic
  source 1..20: mol_type = other RNA
tacagagccagtcccttgag

SEQ ID NO: 1828 - RNA, 17 nt, synthetic construct
  misc_feature 1..17: note = Synthetic
  source 1..17: mol_type = other RNA
acgccccgaggacggcc

SEQ ID NO: 1829 - RNA, 17 nt, synthetic construct
  misc_feature 1..17: note = Synthetic
  source 1..17: mol_type = other RNA
ctcaaacgccccgagga

SEQ ID NO: 1830 - RNA, 17 nt, synthetic construct
  misc_feature 1..17: note = Synthetic
  source 1..17: mol_type = other RNA
cgcgctcaaacgccccg

SEQ ID NO: 1831 - RNA, 17 nt, synthetic construct
  misc_feature 1..17: note = Synthetic
  source 1..17: mol_type = other RNA
cacgtgcagcatctggt

SEQ ID NO: 1832 - RNA, 17 nt, synthetic construct
  misc_feature 1..17: note = Synthetic
  source 1..17: mol_type = other RNA
gcagcacgtgcagcatc

SEQ ID NO: 1833 - RNA, 17 nt, synthetic construct
  misc_feature 1..17: note = Synthetic
  source 1..17: mol_type = other RNA
aacaacaaagccagggg

SEQ ID NO: 1834 - RNA, 17 nt, synthetic construct
  misc_feature 1..17: note = Synthetic
  source 1..17: mol_type = other RNA
ggcaacaacaaagccag

SEQ ID NO: 1835 - RNA, 17 nt, synthetic construct
  misc_feature 1..17: note = Synthetic
  source 1..17: mol_type = other RNA
cggcaacaacaaagcca

SEQ ID NO: 1836 - RNA, 17 nt, synthetic construct
  misc_feature 1..17: note = Synthetic
  source 1..17: mol_type = other RNA
tcggcaacaacaaagcc

SEQ ID NO: 1837 - RNA, 17 nt, synthetic construct
  misc_feature 1..17: note = Synthetic
  source 1..17: mol_type = other RNA
tccaggtatcgttgcat

SEQ ID NO: 1838 - RNA, 17 nt, synthetic construct
  misc_feature 1..17: note = Synthetic
  source 1..17: mol_type = other RNA
ccaggcggccgttgtcc

SEQ ID NO: 1839 - RNA, 17 nt, synthetic construct
  misc_feature 1..17: note = Synthetic
  source 1..17: mol_type = other RNA
ccaccctggtggccagg

SEQ ID NO: 1840 - RNA, 17 nt, synthetic construct
  misc_feature 1..17: note = Synthetic
  source 1..17: mol_type = other RNA
gggccaccctggtggcc

SEQ ID NO: 1841 - RNA, 17 nt, synthetic construct
  misc_feature 1..17: note = Synthetic
  source 1..17: mol_type = other RNA
cgcccgggccaccctgg

SEQ ID NO: 1842 - RNA, 17 nt, synthetic construct
  misc_feature 1..17: note = Synthetic
  source 1..17: mol_type = other RNA
ggtcgcccgggccaccc

SEQ ID NO: 1843 - RNA, 17 nt, synthetic construct
  misc_feature 1..17: note = Synthetic
  source 1..17: mol_type = other RNA
ggcgaccagggtcgccc

SEQ ID NO: 1844 - RNA, 17 nt, synthetic construct
  misc_feature 1..17: note = Synthetic
  source 1..17: mol_type = other RNA
cggcgaccagggtcgcc

SEQ ID NO: 1845 - RNA, 17 nt, synthetic construct
  misc_feature 1..17: note = Synthetic
  source 1..17: mol_type = other RNA
ctttagctcggcgacca

SEQ ID NO: 1846 - RNA, 17 nt, synthetic construct
  misc_feature 1..17: note = Synthetic
  source 1..17: mol_type = other RNA
gctttagctcggcgacc

SEQ ID NO: 1847 - RNA, 17 nt, synthetic construct
  misc_feature 1..17: note = Synthetic
  source 1..17: mol_type = other RNA
gaagcttcgctttagct

SEQ ID NO: 1848 - RNA, 17 nt, synthetic construct
  misc_feature 1..17: note = Synthetic
  source 1..17: mol_type = other RNA
ggtggcccgccttgccc

SEQ ID NO: 1849 - RNA, 17 nt, synthetic construct
  misc_feature 1..17: note = Synthetic
  source 1..17: mol_type = other RNA
cgacggcctcccggcgg

SEQ ID NO: 1850 - RNA, 17 nt, synthetic construct
  misc_feature 1..17: note = Synthetic
  source 1..17: mol_type = other RNA
cctcgacggcctcccgg

SEQ ID NO: 1851 - RNA, 17 nt, synthetic construct
  misc_feature 1..17: note = Synthetic
  source 1..17: mol_type = other RNA
aggcctcgacggcctcc

SEQ ID NO: 1852 - RNA, 17 nt, synthetic construct
  misc_feature 1..17: note = Synthetic
  source 1..17: mol_type = other RNA
cacgagccaggcctcga

SEQ ID NO: 1853 - RNA, 17 nt, synthetic construct
  misc_feature 1..17: note = Synthetic
  source 1..17: mol_type = other RNA
ggtgaggtccacgagcc

SEQ ID NO: 1854 - RNA, 17 nt, synthetic construct
  misc_feature 1..17: note = Synthetic
  source 1..17: mol_type = other RNA
gctgcgtggccgtggtg

SEQ ID NO: 1855 - RNA, 17 nt, synthetic construct
  misc_feature 1..17: note = Synthetic
  source 1..17: mol_type = other RNA
ggagggctgcgtggccg

SEQ ID NO: 1856 - RNA, 17 nt, synthetic construct
  misc_feature 1..17: note = Synthetic
  source 1..17: mol_type = other RNA
ggccacggagggctgcg

SEQ ID NO: 1857 - RNA, 17 nt, synthetic construct
  misc_feature 1..17: note = Synthetic
  source 1..17: mol_type = other RNA
cggggcacggccacgga

SEQ ID NO: 1858 - RNA, 17 nt, synthetic construct
  misc_feature 1..17: note = Synthetic
  source 1..17: mol_type = other RNA
acggggcacggccacgg

SEQ ID NO: 1859 - RNA, 17 nt, synthetic construct
  misc_feature 1..17: note = Synthetic
  source 1..17: mol_type = other RNA
cagacggggcacggcca

SEQ ID NO: 1860 - RNA, 17 nt, synthetic construct
  misc_feature 1..17: note = Synthetic
  source 1..17: mol_type = other RNA
atgcgtcagacggggca

SEQ ID NO: 1861 - RNA, 17 nt, synthetic construct
  misc_feature 1..17: note = Synthetic
  source 1..17: mol_type = other RNA
tcggcatgcgtcagacg

SEQ ID NO: 1862 - RNA, 17 nt, synthetic construct
  misc_feature 1..17: note = Synthetic
  source 1..17: mol_type = other RNA
gtcggcatgcgtcagac

SEQ ID NO: 1863 - RNA, 17 nt, synthetic construct
  misc_feature 1..17: note = Synthetic
  source 1..17: mol_type = other RNA
tgtcggcatgcgtcaga

SEQ ID NO: 1864 - RNA, 17 nt, synthetic construct
  misc_feature 1..17: note = Synthetic
  source 1..17: mol_type = other RNA
cggccgcccgcgcgtgt

SEQ ID NO: 1865 - RNA, 17 nt, synthetic construct
  misc_feature 1..17: note = Synthetic
  source 1..17: mol_type = other RNA
acgagcaccccgtcgac

SEQ ID NO: 1866 - RNA, 17 nt, synthetic construct
  misc_feature 1..17: note = Synthetic
  source 1..17: mol_type = other RNA
ctgtttgatcggggcgg

SEQ ID NO: 1867 - RNA, 17 nt, synthetic construct
  misc_feature 1..17: note = Synthetic
  source 1..17: mol_type = other RNA
gcgctgtttgatcgggg

SEQ ID NO: 1868 - RNA, 17 nt, synthetic construct
  misc_feature 1..17: note = Synthetic
  source 1..17: mol_type = other RNA
gaggcgctgtttgatcg

SEQ ID NO: 1869 - RNA, 17 nt, synthetic construct
  misc_feature 1..17: note = Synthetic
  source 1..17: mol_type = other RNA
ggaggcgctgtttgatc

SEQ ID NO: 1870 - RNA, 17 nt, synthetic construct
  misc_feature 1..17: note = Synthetic
  source 1..17: mol_type = other RNA
aggaggcgctgtttgat

SEQ ID NO: 1871 - RNA, 17 nt, synthetic construct
  misc_feature 1..17: note = Synthetic
  source 1..17: mol_type = other RNA
tcaggaaggactgcagg

SEQ ID NO: 1872 - RNA, 17 nt, synthetic construct
  misc_feature 1..17: note = Synthetic
  source 1..17: mol_type = other RNA
ctttcaggaaggactgc

SEQ ID NO: 1873 - RNA, 17 nt, synthetic construct
  misc_feature 1..17: note = Synthetic
  source 1..17: mol_type = other RNA
gtcctccactttcagga

SEQ ID NO: 1874 - RNA, 17 nt, synthetic construct
  misc_feature 1..17: note = Synthetic
  source 1..17: mol_type = other RNA
cggtgtcctccactttc

SEQ ID NO: 1875 - RNA, 17 nt, synthetic construct
  misc_feature 1..17: note = Synthetic
  source 1..17: mol_type = other RNA
caccggcacgtcggctt

SEQ ID NO: 1876 - RNA, 17 nt, synthetic construct
  misc_feature 1..17: note = Synthetic
  source 1..17: mol_type = other RNA
gtacgtcaccggcacgt

SEQ ID NO: 1877 - RNA, 17 nt, synthetic construct
  misc_feature 1..17: note = Synthetic
  source 1..17: mol_type = other RNA
atctcgccgtacgtcac

SEQ ID NO: 1878 - RNA, 17 nt, synthetic construct
  misc_feature 1..17: note = Synthetic
  source 1..17: mol_type = other RNA
ccaggttggccccgttc

SEQ ID NO: 1879 - RNA, 17 nt, synthetic construct
  misc_feature 1..17: note = Synthetic
  source 1..17: mol_type = other RNA
gagcgccgtgaccaggt

SEQ ID NO: 1880 - RNA, 17 nt, synthetic construct
  misc_feature 1..17: note = Synthetic
  source 1..17: mol_type = other RNA
tcacgagcgccgtgacc

SEQ ID NO: 1881 - RNA, 17 nt, synthetic construct
  misc_feature 1..17: note = Synthetic
  source 1..17: mol_type = other RNA
gtcgtccagacttcgca

SEQ ID NO: 1882 - RNA, 17 nt, synthetic construct
  misc_feature 1..17: note = Synthetic
  source 1..17: mol_type = other RNA
gcatctccagcaggtgg

SEQ ID NO: 1883 - RNA, 17 nt, synthetic construct
  misc_feature 1..17: note = Synthetic
  source 1..17: mol_type = other RNA
cctgcatctccagcagg

SEQ ID NO: 1884 - RNA, 17 nt, synthetic construct
  misc_feature 1..17: note = Synthetic
  source 1..17: mol_type = other RNA
cctcctgcatctccagc

SEQ ID NO: 1885 - RNA, 17 nt, synthetic construct
  misc_feature 1..17: note = Synthetic
  source 1..17: mol_type = other RNA
ccagcgtctgccggttc

SEQ ID NO: 1886 - RNA, 17 nt, synthetic construct
  misc_feature 1..17: note = Synthetic
  source 1..17: mol_type = other RNA
gctcgtccagcgtctgc

SEQ ID NO: 1887 - RNA, 17 nt, synthetic construct
  misc_feature 1..17: note = Synthetic
  source 1..17: mol_type = other RNA
cacgcgcgtcgtctggg

SEQ ID NO: 1888 - RNA, 17 nt, synthetic construct
  misc_feature 1..17: note = Synthetic
  source 1..17: mol_type = other RNA
gcacgcgcgtcgtctgg

SEQ ID NO: 1889 - RNA, 17 nt, synthetic construct
  misc_feature 1..17: note = Synthetic
  source 1..17: mol_type = other RNA
cgcacgcgcgtcgtctg

SEQ ID NO: 1890 - RNA, 17 nt, synthetic construct
  misc_feature 1..17: note = Synthetic
  source 1..17: mol_type = other RNA
gcgcacgcgcgtcgtct

SEQ ID NO: 1891 - RNA, 17 nt, synthetic construct
  misc_feature 1..17: note = Synthetic
  source 1..17: mol_type = other RNA
cgcgcacgcgcgtcgtc

SEQ ID NO: 1892 - RNA, 17 nt, synthetic construct
  misc_feature 1..17: note = Synthetic
  source 1..17: mol_type = other RNA
gaccagcttctcgccga

SEQ ID NO: 1893 - RNA, 17 nt, synthetic construct
  misc_feature 1..17: note = Synthetic
  source 1..17: mol_type = other RNA
gtagatgcgcttctcca

SEQ ID NO: 1894 - RNA, 17 nt, synthetic construct
  misc_feature 1..17: note = Synthetic
  source 1..17: mol_type = other RNA
cgtagatgcgcttctcc

SEQ ID NO: 1895 - RNA, 17 nt, synthetic construct
  misc_feature 1..17: note = Synthetic
  source 1..17: mol_type = other RNA
gtagggaacgttggtgg

SEQ ID NO: 1896 - RNA, 17 nt, synthetic construct
  misc_feature 1..17: note = Synthetic
  source 1..17: mol_type = other RNA
ggggtagggaacgttgg

SEQ ID NO: 1897 - RNA, 17 nt, synthetic construct
  misc_feature 1..17: note = Synthetic
  source 1..17: mol_type = other RNA
cagggggtagggaacgt

SEQ ID NO: 1898 - RNA, 17 nt, synthetic construct
  misc_feature 1..17: note = Synthetic
  source 1..17: mol_type = other RNA
gcgcccaccagggggta

SEQ ID NO: 1899 - RNA, 17 nt, synthetic construct
  misc_feature 1..17: note = Synthetic
  source 1..17: mol_type = other RNA
ggcgcccaccagggggt

SEQ ID NO: 1900 - RNA, 17 nt, synthetic construct
  misc_feature 1..17: note = Synthetic
  source 1..17: mol_type = other RNA
ccatggcgcccaccagg

SEQ ID NO: 1901 - RNA, 17 nt, synthetic construct
  misc_feature 1..17: note = Synthetic
  source 1..17: mol_type = other RNA
tccatggcgcccaccag

SEQ ID NO: 1902 - RNA, 17 nt, synthetic construct
  misc_feature 1..17: note = Synthetic
  source 1..17: mol_type = other RNA
gtccatggcgcccacca

SEQ ID NO: 1903 - RNA, 17 nt, synthetic construct
  misc_feature 1..17: note = Synthetic
  source 1..17: mol_type = other RNA
ggtccatggcgcccacc

SEQ ID NO: 1904 - RNA, 17 nt, synthetic construct
  misc_feature 1..17: note = Synthetic
  source 1..17: mol_type = other RNA
gacgaacgtcaggtcca

SEQ ID NO: 1905 - RNA, 17 nt, synthetic construct
  misc_feature 1..17: note = Synthetic
  source 1..17: mol_type = other RNA
ggggcaggacgaacgtc

SEQ ID NO: 1906 - RNA, 17 nt, synthetic construct
  misc_feature 1..17: note = Synthetic
  source 1..17: mol_type = other RNA
tgaacaggcccaggggc

SEQ ID NO: 1907 - RNA, 17 nt, synthetic construct
  misc_feature 1..17: note = Synthetic
  source 1..17: mol_type = other RNA
ggattgaacaggcccag

SEQ ID NO: 1908 - RNA, 17 nt, synthetic construct
  misc_feature 1..17: note = Synthetic
  source 1..17: mol_type = other RNA
cggattgaacaggccca

SEQ ID NO: 1909 - RNA, 17 nt, synthetic construct
  misc_feature 1..17: note = Synthetic
  source 1..17: mol_type = other RNA
ccggattgaacaggccc

SEQ ID NO: 1910 - RNA, 17 nt, synthetic construct
  misc_feature 1..17: note = Synthetic
  source 1..17: mol_type = other RNA
ccatgaccggattgaac

SEQ ID NO: 1911 - RNA, 17 nt, synthetic construct
  misc_feature 1..17: note = Synthetic
  source 1..17: mol_type = other RNA
gcaaaccgttccatgac

SEQ ID NO: 1912 - RNA, 17 nt, synthetic construct
  misc_feature 1..17: note = Synthetic
  source 1..17: mol_type = other RNA
taggtccccggcgtgcg

SEQ ID NO: 1913 - RNA, 17 nt, synthetic construct
  misc_feature 1..17: note = Synthetic
  source 1..17: mol_type = other RNA
ggcggggactaggtccc

SEQ ID NO: 1914 - RNA, 17 nt, synthetic construct
  misc_feature 1..17: note = Synthetic
  source 1..17: mol_type = other RNA
ggccgggggcggggact

SEQ ID NO: 1915 - RNA, 17 nt, synthetic construct
  misc_feature 1..17: note = Synthetic
  source 1..17: mol_type = other RNA
ccgggtggccgggggcg

SEQ ID NO: 1916 - RNA, 17 nt, synthetic construct
  misc_feature 1..17: note = Synthetic
  source 1..17: mol_type = other RNA
tccgggtggccgggggc

SEQ ID NO: 1917 - RNA, 17 nt, synthetic construct
  misc_feature 1..17: note = Synthetic
  source 1..17: mol_type = other RNA
atccgggtggccggggg

SEQ ID NO: 1918 - RNA, 17 nt, synthetic construct
  misc_feature 1..17: note = Synthetic
  source 1..17: mol_type = other RNA
gggatccgggtggccgg

SEQ ID NO: 1919 - RNA, 17 nt, synthetic construct
  misc_feature 1..17: note = Synthetic
  source 1..17: mol_type = other RNA
ggggatccgggtggccg

SEQ ID NO: 1920 - RNA, 17 nt, synthetic construct
  misc_feature 1..17: note = Synthetic
  source 1..17: mol_type = other RNA
cggggatccgggtggcc

SEQ ID NO: 1921 - RNA, 17 nt, synthetic construct
  misc_feature 1..17: note = Synthetic
  source 1..17: mol_type = other RNA
gcggggatccgggtggc

SEQ ID NO: 1922 - RNA, 17 nt, synthetic construct
  misc_feature 1..17: note = Synthetic
  source 1..17: mol_type = other RNA
aggcgcggggatccggg

SEQ ID NO: 1923 - RNA, 17 nt, synthetic construct
  misc_feature 1..17: note = Synthetic
  source 1..17: mol_type = other RNA
ggaaggcgcggggatcc

SEQ ID NO: 1924 - RNA, 17 nt, synthetic construct
  misc_feature 1..17: note = Synthetic
  source 1..17: mol_type = other RNA
gggaaggcgcggggatc

SEQ ID NO: 1925 - RNA, 17 nt, synthetic construct
  misc_feature 1..17: note = Synthetic
  source 1..17: mol_type = other RNA
cggggcgggaaggcgcg

SEQ ID NO: 1926 - RNA, 17 nt, synthetic construct
  misc_feature 1..17: note = Synthetic
  source 1..17: mol_type = other RNA
gcggggcgggaaggcgc

SEQ ID NO: 1927 - RNA, 17 nt, synthetic construct
  misc_feature 1..17: note = Synthetic
  source 1..17: mol_type = other RNA
ggcggggcgggaaggcg

SEQ ID NO: 1928 - RNA, 17 nt, synthetic construct
  misc_feature 1..17: note = Synthetic
  source 1..17: mol_type = other RNA
cagctggcggggcggga

SEQ ID NO: 1929 - RNA, 17 nt, synthetic construct
  misc_feature 1..17: note = Synthetic
  source 1..17: mol_type = other RNA
aaaacagctggcggggc

SEQ ID NO: 1930 - RNA, 17 nt, synthetic construct
  misc_feature 1..17: note = Synthetic
  source 1..17: mol_type = other RNA
aaaaacagctggcgggg

SEQ ID NO: 1931 - RNA, 17 nt, synthetic construct
  misc_feature 1..17: note = Synthetic
  source 1..17: mol_type = other RNA
caaaaaaacagctggcg

SEQ ID NO: 1932 - RNA, 17 nt, synthetic construct
  misc_feature 1..17: note = Synthetic
  source 1..17: mol_type = other RNA
ccaaaaaaacagctggc

SEQ ID NO: 1933 - RNA, 17 nt, synthetic construct
  misc_feature 1..17: note = Synthetic
  source 1..17: mol_type = other RNA
cccaaaaaaacagctgg

SEQ ID NO: 1934 - RNA, 17 nt, synthetic construct
  misc_feature 1..17: note = Synthetic
  source 1..17: mol_type = other RNA
tcccccaaaaaaacagc

SEQ ID NO: 1935 - RNA, 17 nt, synthetic construct
  misc_feature 1..17: note = Synthetic
  source 1..17: mol_type = other RNA
acaggcgcagcacctgg

SEQ ID NO: 1936 - RNA, 17 nt, synthetic construct
  misc_feature 1..17: note = Synthetic
  source 1..17: mol_type = other RNA
gagacaggcgcagcacc

SEQ ID NO: 1937 - RNA, 17 nt, synthetic construct
  misc_feature 1..17: note = Synthetic
  source 1..17: mol_type = other RNA
tcgcgtgttccagagac

SEQ ID NO: 1938 - RNA, 17 nt, synthetic construct
  misc_feature 1..17: note = Synthetic
  source 1..17: mol_type = other RNA
cagcgaagggtggcaca

SEQ ID NO: 1939 - RNA, 17 nt, synthetic construct
  misc_feature 1..17: note = Synthetic
  source 1..17: mol_type = other RNA
cgttcatcagcgaaggg

SEQ ID NO: 1940 - RNA, 17 nt, synthetic construct
  misc_feature 1..17: note = Synthetic
  source 1..17: mol_type = other RNA
caacgttcatcagcgaa

SEQ ID NO: 1941 - RNA, 17 nt, synthetic construct
  misc_feature 1..17: note = Synthetic
  source 1..17: mol_type = other RNA
tcaacgttcatcagcga

SEQ ID NO: 1942 - RNA, 17 nt, synthetic construct
  misc_feature 1..17: note = Synthetic
  source 1..17: mol_type = other RNA
cgacggggtcgcggtta

SEQ ID NO: 1943 - RNA, 17 nt, synthetic construct
  misc_feature 1..17: note = Synthetic
  source 1..17: mol_type = other RNA
cggcttcgacggggtcg

SEQ ID NO: 1944 - RNA, 17 nt, synthetic construct
  misc_feature 1..17: note = Synthetic
  source 1..17: mol_type = other RNA
gattggcggcttcgacg

SEQ ID NO: 1945 - RNA, 17 nt, synthetic construct
  misc_feature 1..17: note = Synthetic
  source 1..17: mol_type = other RNA
ggattggcggcttcgac

SEQ ID NO: 1946 - RNA, 17 nt, synthetic construct
  misc_feature 1..17: note = Synthetic
  source 1..17: mol_type = other RNA
cggattggcggcttcga

SEQ ID NO: 1947 - RNA, 17 nt, synthetic construct
  misc_feature 1..17: note = Synthetic
  source 1..17: mol_type = other RNA
cgccccgtacggattgg

SEQ ID NO: 1948 - RNA, 17 nt, synthetic construct
  misc_feature 1..17: note = Synthetic
  source 1..17: mol_type = other RNA
gtacgccccgtacggat

SEQ ID NO: 1949 - RNA, 17 nt, synthetic construct
  misc_feature 1..17: note = Synthetic
  source 1..17: mol_type = other RNA
gccacgtacgccccgta

SEQ ID NO: 1950 - RNA, 17 nt, synthetic construct
  misc_feature 1..17: note = Synthetic
  source 1..17: mol_type = other RNA
tgcggcggggccggccg

SEQ ID NO: 1951 - RNA, 17 nt, synthetic construct
  misc_feature 1..17: note = Synthetic
  source 1..17: mol_type = other RNA
ctgcggcggggccggcc

SEQ ID NO: 1952 - RNA, 17 nt, synthetic construct
  misc_feature 1..17: note = Synthetic
  source 1..17: mol_type = other RNA
tctgcggcggggccggc

SEQ ID NO: 1953 - RNA, 17 nt, synthetic construct
  misc_feature 1..17: note = Synthetic
  source 1..17: mol_type = other RNA
catgtctgcggcggggc

SEQ ID NO: 1954 - RNA, 17 nt, synthetic construct
  misc_feature 1..17: note = Synthetic
  source 1..17: mol_type = other RNA
gctgcatgtctgcggcg

SEQ ID NO: 1955 - RNA, 17 nt, synthetic construct
  misc_feature 1..17: note = Synthetic
  source 1..17: mol_type = other RNA
tgctgcatgtctgcggc

SEQ ID NO: 1956 - RNA, 17 nt, synthetic construct
  misc_feature 1..17: note = Synthetic
  source 1..17: mol_type = other RNA
ctgctgcatgtctgcgg

SEQ ID NO: 1957 - RNA, 17 nt, synthetic construct
  misc_feature 1..17: note = Synthetic
  source 1..17: mol_type = other RNA
cagctgctgcatgtctg

SEQ ID NO: 1958 - RNA, 17 nt, synthetic construct
  misc_feature 1..17: note = Synthetic
  source 1..17: mol_type = other RNA
ggccaggcgctgccccc

SEQ ID NO: 1959 - RNA, 17 nt, synthetic construct
  misc_feature 1..17: note = Synthetic
  source 1..17: mol_type = other RNA
ggacccgcccgtgggcc

SEQ ID NO: 1960 - RNA, 17 nt, synthetic construct
  misc_feature 1..17: note = Synthetic
  source 1..17: mol_type = other RNA
ccatcggacccgcccgt

SEQ ID NO: 1961 - RNA, 17 nt, synthetic construct
  misc_feature 1..17: note = Synthetic
  source 1..17: mol_type = other RNA
cccatcggacccgcccg

SEQ ID NO: 1962 - RNA, 17 nt, synthetic construct
  misc_feature 1..17: note = Synthetic
  source 1..17: mol_type = other RNA
ggccttccgcgacccat

SEQ ID NO: 1963 - RNA, 17 nt, synthetic construct
  misc_feature 1..17: note = Synthetic
  source 1..17: mol_type = other RNA
actgctccggggtcatc

SEQ ID NO: 1964 - RNA, 17 nt, synthetic construct
  misc_feature 1..17: note = Synthetic
  source 1..17: mol_type = other RNA
ctgcataaactgctccg

SEQ ID NO: 1965 - RNA, 17 nt, synthetic construct
  misc_feature 1..17: note = Synthetic
  source 1..17: mol_type = other RNA
gctgcataaactgctcc

SEQ ID NO: 1966 - RNA, 17 nt, synthetic construct
  misc_feature 1..17: note = Synthetic
  source 1..17: mol_type = other RNA
ggctgcataaactgctc

SEQ ID NO: 1967 - RNA, 17 nt, synthetic construct
  misc_feature 1..17: note = Synthetic
  source 1..17: mol_type = other RNA
gccaggttggcgttgtc

SEQ ID NO: 1968 - RNA, 17 nt, synthetic construct
  misc_feature 1..17: note = Synthetic
  source 1..17: mol_type = other RNA
agccaggttggcgttgt

SEQ ID NO: 1969 - RNA, 17 nt, synthetic construct
  misc_feature 1..17: note = Synthetic
  source 1..17: mol_type = other RNA
cagctcaagagccaggt

SEQ ID NO: 1970 - RNA, 17 nt, synthetic construct
  misc_feature 1..17: note = Synthetic
  source 1..17: mol_type = other RNA
ggtgcagctcaagagcc

SEQ ID NO: 1971 - RNA, 17 nt, synthetic construct
  misc_feature 1..17: note = Synthetic
  source 1..17: mol_type = other RNA
caaagaagtcgaacgcg

SEQ ID NO: 1972 - RNA, 17 nt, synthetic construct
  misc_feature 1..17: note = Synthetic
  source 1..17: mol_type = other RNA
acaaagaagtcgaacgc

SEQ ID NO: 1973 - RNA, 17 nt, synthetic construct
  misc_feature 1..17: note = Synthetic
  source 1..17: mol_type = other RNA
cacaaagaagtcgaacg

SEQ ID NO: 1974 - RNA, 17 nt, synthetic construct
  misc_feature 1..17: note = Synthetic
  source 1..17: mol_type = other RNA
ccccggcagctccacgt

SEQ ID NO: 1975 - RNA, 17 nt, synthetic construct
  misc_feature 1..17: note = Synthetic
  source 1..17: mol_type = other RNA
gggggaacgtccccccc

SEQ ID NO: 1976 - RNA, 17 nt, synthetic construct
  misc_feature 1..17: note = Synthetic
  source 1..17: mol_type = other RNA
tcccccgggccggccgg

SEQ ID NO: 1977 - RNA, 17 nt, synthetic construct
  misc_feature 1..17: note = Synthetic
  source 1..17: mol_type = other RNA
ctcccccgggccggccg

SEQ ID NO: 1978 - RNA, 17 nt, synthetic construct
  misc_feature 1..17: note = Synthetic
  source 1..17: mol_type = other RNA
tctcccccgggccggcc

SEQ ID NO: 1979 - RNA, 17 nt, synthetic construct
  misc_feature 1..17: note = Synthetic
  source 1..17: mol_type = other RNA
atctcccccgggccggc

SEQ ID NO: 1980 - RNA, 17 nt, synthetic construct
  misc_feature 1..17: note = Synthetic
  source 1..17: mol_type = other RNA
ctggatctcccccgggc

SEQ ID NO: 1981 - RNA, 17 nt, synthetic construct
  misc_feature 1..17: note = Synthetic
  source 1..17: mol_type = other RNA
tggcctggatctccccc

SEQ ID NO: 1982 - RNA, 17 nt, synthetic construct
  misc_feature 1..17: note = Synthetic
  source 1..17: mol_type = other RNA
gtggcctggatctcccc

SEQ ID NO: 1983 - RNA, 17 nt, synthetic construct
  misc_feature 1..17: note = Synthetic
  source 1..17: mol_type = other RNA
ccacgcgccaggtggcc

SEQ ID NO: 1984 - RNA, 17 nt, synthetic construct
  misc_feature 1..17: note = Synthetic
  source 1..17: mol_type = other RNA
gttcaccacgcgccagg

SEQ ID NO: 1985 - RNA, 17 nt, synthetic construct
  misc_feature 1..17: note = Synthetic
  source 1..17: mol_type = other RNA
gccgttcaccacgcgcc

SEQ ID NO: 1986 - RNA, 17 nt, synthetic construct
  misc_feature 1..17: note = Synthetic
  source 1..17: mol_type = other RNA
gccggacatagcgccag

SEQ ID NO: 1987 - RNA, 17 nt, synthetic construct
  misc_feature 1..17: note = Synthetic
  source 1..17: mol_type = other RNA
cgccggacatagcgcca

SEQ ID NO: 1988 - RNA, 17 nt, synthetic construct
  misc_feature 1..17: note = Synthetic
  source 1..17: mol_type = other RNA
ccgccggacatagcgcc

SEQ ID NO: 1989 - RNA, 17 nt, synthetic construct
  misc_feature 1..17: note = Synthetic
  source 1..17: mol_type = other RNA
gcgtcccggaacgccgc

SEQ ID NO: 1990 - RNA, 17 nt, synthetic construct
  misc_feature 1..17: note = Synthetic
  source 1..17: mol_type = other RNA
ccaggccccgggcgtcc

SEQ ID NO: 1991 - RNA, 17 nt, synthetic construct
  misc_feature 1..17: note = Synthetic
  source 1..17: mol_type = other RNA
ccccagctccaggcccc

SEQ ID NO: 1992 - RNA, 17 nt, synthetic construct
  misc_feature 1..17: note = Synthetic
  source 1..17: mol_type = other RNA
cccccagctccaggccc

SEQ ID NO: 1993 - RNA, 17 nt, synthetic construct
  misc_feature 1..17: note = Synthetic
  source 1..17: mol_type = other RNA
gtcccacccccagctcc

SEQ ID NO: 1994 - RNA, 17 nt, synthetic construct
  misc_feature 1..17: note = Synthetic
  source 1..17: mol_type = other RNA
tggcgggggccatggcg

SEQ ID NO: 1995 - RNA, 17 nt, synthetic construct
  misc_feature 1..17: note = Synthetic
  source 1..17: mol_type = other RNA
gatggtggcgggggcca

SEQ ID NO: 1996 - RNA, 17 nt, synthetic construct
  misc_feature 1..17: note = Synthetic
  source 1..17: mol_type = other RNA
ggcggcgatggtggcgg

SEQ ID NO: 1997 - RNA, 17 nt, synthetic construct
  misc_feature 1..17: note = Synthetic
  source 1..17: mol_type = other RNA
cggcggcgatggtggcg

SEQ ID NO: 1998 - RNA, 17 nt, synthetic construct
  misc_feature 1..17: note = Synthetic
  source 1..17: mol_type = other RNA
acggcggcgatggtggc

SEQ ID NO: 1999 - RNA, 17 nt, synthetic construct
  misc_feature 1..17: note = Synthetic
  source 1..17: mol_type = other RNA
aacggcggcgatggtgg

SEQ ID NO: 2000 - RNA, 17 nt, synthetic construct
  misc_feature 1..17: note = Synthetic
  source 1..17: mol_type = other RNA
gcgaacggcggcgatgg

SEQ ID NO: 2001 - RNA, 17 nt, synthetic construct
  misc_feature 1..17: note = Synthetic
  source 1..17: mol_type = other RNA
cccgcgaacggcggcga

SEQ ID NO: 2002 - RNA, 17 nt, synthetic construct
  misc_feature 1..17: note = Synthetic
  source 1..17: mol_type = other RNA
gaacgccccgcgaacgg

SEQ ID NO: 2003 - RNA, 17 nt, synthetic construct
  misc_feature 1..17: note = Synthetic
  source 1..17: mol_type = other RNA
gtcgaacgccccgcgaa

SEQ ID NO: 2004 - RNA, 17 nt, synthetic construct
  misc_feature 1..17: note = Synthetic
  source 1..17: mol_type = other RNA
acaccgccgggtagttg

SEQ ID NO: 2005 - RNA, 17 nt, synthetic construct
  misc_feature 1..17: note = Synthetic
  source 1..17: mol_type = other RNA
gcaggtaaaacaccgcc

SEQ ID NO: 2006 - RNA, 17 nt, synthetic construct
  misc_feature 1..17: note = Synthetic
  source 1..17: mol_type = other RNA
agcaggtaaaacaccgc

SEQ ID NO: 2007 - RNA, 17 nt, synthetic construct
  misc_feature 1..17: note = Synthetic
  source 1..17: mol_type = other RNA
gtatggcggcctgcagc

SEQ ID NO: 2008 - RNA, 17 nt, synthetic construct
  misc_feature 1..17: note = Synthetic
  source 1..17: mol_type = other RNA
ctcgctgccgtgtatgg

SEQ ID NO: 2009 - RNA, 17 nt, synthetic construct
  misc_feature 1..17: note = Synthetic
  source 1..17: mol_type = other RNA
gtgctcgctgccgtgta

SEQ ID NO: 2010 - RNA, 17 nt, synthetic construct
  misc_feature 1..17: note = Synthetic
  source 1..17: mol_type = other RNA
gaccacgagccgggcca

SEQ ID NO: 2011 - RNA, 17 nt, synthetic construct
  misc_feature 1..17: note = Synthetic
  source 1..17: mol_type = other RNA
ggaccacgagccgggcc

SEQ ID NO: 2012 - RNA, 17 nt, synthetic construct
  misc_feature 1..17: note = Synthetic
  source 1..17: mol_type = other RNA
gcactggaccacgagcc

SEQ ID NO: 2013 - RNA, 17 nt, synthetic construct
  misc_feature 1..17: note = Synthetic
  source 1..17: mol_type = other RNA
tgcactggaccacgagc

SEQ ID NO: 2014 - RNA, 17 nt, synthetic construct
  misc_feature 1..17: note = Synthetic
  source 1..17: mol_type = other RNA
agtagctggtgatgcac

SEQ ID NO: 2015 - RNA, 17 nt, synthetic construct
  misc_feature 1..17: note = Synthetic
  source 1..17: mol_type = other RNA
cgtgttgttccagtagc

SEQ ID NO: 2016 - RNA, 17 nt, synthetic construct
  misc_feature 1..17: note = Synthetic
  source 1..17: mol_type = other RNA
aaggtctcccccgaggt

SEQ ID NO: 2017 - RNA, 17 nt, synthetic construct
  misc_feature 1..17: note = Synthetic
  source 1..17: mol_type = other RNA
cgggaaggtctcccccg

SEQ ID NO: 2018 - RNA, 17 nt, synthetic construct
  misc_feature 1..17: note = Synthetic
  source 1..17: mol_type = other RNA
ccatgcactcctcggga

SEQ ID NO: 2019 - RNA, 17 nt, synthetic construct
  misc_feature 1..17: note = Synthetic
  source 1..17: mol_type = other RNA
acggccatgcactcctc

SEQ ID NO: 2020 - RNA, 17 nt, synthetic construct
  misc_feature 1..17: note = Synthetic
  source 1..17: mol_type = other RNA
cacggccatgcactcct

SEQ ID NO: 2021 - RNA, 17 nt, synthetic construct
  misc_feature 1..17: note = Synthetic
  source 1..17: mol_type = other RNA
caccaggtcccggtaca

SEQ ID NO: 2022 - RNA, 17 nt, synthetic construct
  misc_feature 1..17: note = Synthetic
  source 1..17: mol_type = other RNA
cgtgcgccaccaggtcc

SEQ ID NO: 2023 - RNA, 17 nt, synthetic construct
  misc_feature 1..17: note = Synthetic
  source 1..17: mol_type = other RNA
cctcgacgtgcgccacc

SEQ ID NO: 2024 - RNA, 17 nt, synthetic construct
  misc_feature 1..17: note = Synthetic
  source 1..17: mol_type = other RNA
atcaaccagctgggcca

SEQ ID NO: 2025 - RNA, 17 nt, synthetic construct
  misc_feature 1..17: note = Synthetic
  source 1..17: mol_type = other RNA
catcaaccagctgggcc

SEQ ID NO: 2026 - RNA, 17 nt, synthetic construct
  misc_feature 1..17: note = Synthetic
  source 1..17: mol_type = other RNA
aaagtcatcaaccagct

SEQ ID NO: 2027 - RNA, 17 nt, synthetic construct
  misc_feature 1..17: note = Synthetic
  source 1..17: mol_type = other RNA
taaagtcatcaaccagc

SEQ ID NO: 2028 - RNA, 17 nt, synthetic construct
  misc_feature 1..17: note = Synthetic
  source 1..17: mol_type = other RNA
cagctccgggccggtca

SEQ ID NO: 2029 - RNA, 17 nt, synthetic construct
  misc_feature 1..17: note = Synthetic
  source 1..17: mol_type = other RNA
ccagctccgggccggtc

SEQ ID NO: 2030 - RNA, 17 nt, synthetic construct
  misc_feature 1..17: note = Synthetic
  source 1..17: mol_type = other RNA
cccgcccagctccgggc

SEQ ID NO: 2031 - RNA, 17 nt, synthetic construct
  misc_feature 1..17: note = Synthetic
  source 1..17: mol_type = other RNA
cctgcccgcccagctcc

SEQ ID NO: 2032 - RNA, 17 nt, synthetic construct
  misc_feature 1..17: note = Synthetic
  source 1..17: mol_type = other RNA
gcctgcccgcccagctc

SEQ ID NO: 2033 - RNA, 17 nt, synthetic construct
  misc_feature 1..17: note = Synthetic
  source 1..17: mol_type = other RNA
cattaggtgattcagct

SEQ ID NO: 2034 - RNA, 17 nt, synthetic construct
  misc_feature 1..17: note = Synthetic
  source 1..17: mol_type = other RNA
gcgccgggtctcgcatt

SEQ ID NO: 2035 - RNA, 17 nt, synthetic construct
  misc_feature 1..17: note = Synthetic
  source 1..17: mol_type = other RNA
ggggtggcagcagcgcc

SEQ ID NO: 2036 - RNA, 17 nt, synthetic construct
  misc_feature 1..17: note = Synthetic
  source 1..17: mol_type = other RNA
aggggtggcagcagcgc

SEQ ID NO: 2037 - RNA, 17 nt, synthetic construct
  misc_feature 1..17: note = Synthetic
  source 1..17: mol_type = other RNA
cagtcccacacgagggg

SEQ ID NO: 2038 - RNA, 17 nt, synthetic construct
  misc_feature 1..17: note = Synthetic
  source 1..17: mol_type = other RNA
tcacagtcccacacgag

SEQ ID NO: 2039 - RNA, 17 nt, synthetic construct
  misc_feature 1..17: note = Synthetic
  source 1..17: mol_type = other RNA
gtcacagtcccacacga

SEQ ID NO: 2040 - RNA, 17 nt, synthetic construct
  misc_feature 1..17: note = Synthetic
  source 1..17: mol_type = other RNA
cgtcacagtcccacacg

SEQ ID NO: 2041 - RNA, 17 nt, synthetic construct
  misc_feature 1..17: note = Synthetic
  source 1..17: mol_type = other RNA
ggccgcgcgccgcatca

SEQ ID NO: 2042 - RNA, 17 nt, synthetic construct
  misc_feature 1..17: note = Synthetic
  source 1..17: mol_type = other RNA
gggccgcgcgccgcatc

SEQ ID NO: 2043 - RNA, 17 nt, synthetic construct
  misc_feature 1..17: note = Synthetic
  source 1..17: mol_type = other RNA
gtcgcgatggcggtcca

SEQ ID NO: 2044 - RNA, 17 nt, synthetic construct
  misc_feature 1..17: note = Synthetic
  source 1..17: mol_type = other RNA
agtcgcgatggcggtcc

SEQ ID NO: 2045 - RNA, 17 nt, synthetic construct
  misc_feature 1..17: note = Synthetic
  source 1..17: mol_type = other RNA
cccggcagtcgcgatgg

SEQ ID NO: 2046 - RNA, 17 nt, synthetic construct
  misc_feature 1..17: note = Synthetic
  source 1..17: mol_type = other RNA
taacccggcagtcgcga

SEQ ID NO: 2047 - RNA, 17 nt, synthetic construct
  misc_feature 1..17: note = Synthetic
  source 1..17: mol_type = other RNA
ggccccccgcgctaacc

SEQ ID NO: 2048 - RNA, 17 nt, synthetic construct
  misc_feature 1..17: note = Synthetic
  source 1..17: mol_type = other RNA
ccgcgtacacggggtcg

SEQ ID NO: 2049 - RNA, 17 nt, synthetic construct
  misc_feature 1..17: note = Synthetic
  source 1..17: mol_type = other RNA
atgccgccgcgtacacg

SEQ ID NO: 2050 - RNA, 17 nt, synthetic construct
  misc_feature 1..17: note = Synthetic
  source 1..17: mol_type = other RNA
catgccgccgcgtacac

SEQ ID NO: 2051 - RNA, 17 nt, synthetic construct
  misc_feature 1..17: note = Synthetic
  source 1..17: mol_type = other RNA
acatgccgccgcgtaca

SEQ ID NO: 2052 - RNA, 17 nt, synthetic construct
  misc_feature 1..17: note = Synthetic
  source 1..17: mol_type = other RNA
gttgcggttgaagtccg

SEQ ID NO: 2053 - RNA, 17 nt, synthetic construct
  misc_feature 1..17: note = Synthetic
  source 1..17: mol_type = other RNA
gcagctggccgtcgttg

SEQ ID NO: 2054 - RNA, 17 nt, synthetic construct
  misc_feature 1..17: note = Synthetic
  source 1..17: mol_type = other RNA
gggtgttgtgcagcagc

SEQ ID NO: 2055 - RNA, 17 nt, synthetic construct
  misc_feature 1..17: note = Synthetic
  source 1..17: mol_type = other RNA
gtccgcggctcgggcct

SEQ ID NO: 2056 - RNA, 17 nt, synthetic construct
  misc_feature 1..17: note = Synthetic
  source 1..17: mol_type = other RNA
cgtccgcggctcgggcc

SEQ ID NO: 2057 - RNA, 17 nt, synthetic construct
  misc_feature 1..17: note = Synthetic
  source 1..17: mol_type = other RNA
cgcggcgtccgcggctc

SEQ ID NO: 2058 - RNA, 17 nt, synthetic construct
  misc_feature 1..17: note = Synthetic
  source 1..17: mol_type = other RNA
ccgcggcgtccgcggct

SEQ ID NO: 2059 - RNA, 17 nt, synthetic construct
  misc_feature 1..17: note = Synthetic
  source 1..17: mol_type = other RNA
gtcatccgcggcgtccg

SEQ ID NO: 2060 - RNA, 17 nt, synthetic construct
  misc_feature 1..17: note = Synthetic
  source 1..17: mol_type = other RNA
gtgcggccggtcatccg

SEQ ID NO: 2061 - RNA, 17 nt, synthetic construct
  misc_feature 1..17: note = Synthetic
  source 1..17: mol_type = other RNA
ccgccccccggtgcggc

SEQ ID NO: 2062 - RNA, 17 nt, synthetic construct
  misc_feature 1..17: note = Synthetic
  source 1..17: mol_type = other RNA
cagtccgccccccggtg

SEQ ID NO: 2063 - RNA, 17 nt, synthetic construct
  misc_feature 1..17: note = Synthetic
  source 1..17: mol_type = other RNA
cggtccagtccgccccc

SEQ ID NO: 2064 - RNA, 17 nt, synthetic construct
  misc_feature 1..17: note = Synthetic
  source 1..17: mol_type = other RNA
gtaaatcttgtggtgca

SEQ ID NO: 2065 - RNA, 17 nt, synthetic construct
  misc_feature 1..17: note = Synthetic
  source 1..17: mol_type = other RNA
cgtagtagtaaatcttg

SEQ ID NO: 2066 - RNA, 17 nt, synthetic construct
  misc_feature 1..17: note = Synthetic
  source 1..17: mol_type = other RNA
cggccccgcgagaaggc

SEQ ID NO: 2067 - RNA, 17 nt, synthetic construct
  misc_feature 1..17: note = Synthetic
  source 1..17: mol_type = other RNA
gcggccccgcgagaagg

SEQ ID NO: 2068 - RNA, 17 nt, synthetic construct
  misc_feature 1..17: note = Synthetic
  source 1..17: mol_type = other RNA
gcagcggccccgcgaga

SEQ ID NO: 2069 - RNA, 17 nt, synthetic construct
  misc_feature 1..17: note = Synthetic
  source 1..17: mol_type = other RNA
cccccgcggtgcagcag

SEQ ID NO: 2070 - RNA, 17 nt, synthetic construct
  misc_feature 1..17: note = Synthetic
  source 1..17: mol_type = other RNA
gtcgaagcgaacccccg

SEQ ID NO: 2071 - RNA, 17 nt, synthetic construct
  misc_feature 1..17: note = Synthetic
  source 1..17: mol_type = other RNA
gcagggtggcgtatacg

SEQ ID NO: 2072 - RNA, 17 nt, synthetic construct
  misc_feature 1..17: note = Synthetic
  source 1..17: mol_type = other RNA
caccatgttctgcaggg

SEQ ID NO: 2073 - RNA, 17 nt, synthetic construct
  misc_feature 1..17: note = Synthetic
  source 1..17: mol_type = other RNA
gaccaccatgttctgca

SEQ ID NO: 2074 - RNA, 17 nt, synthetic construct
  misc_feature 1..17: note = Synthetic
  source 1..17: mol_type = other RNA
ggaccaccatgttctgc

SEQ ID NO: 2075 - RNA, 17 nt, synthetic construct
  misc_feature 1..17: note = Synthetic
  source 1..17: mol_type = other RNA
cgccgggggcgatctcc

SEQ ID NO: 2076 - RNA, 17 nt, synthetic construct
  misc_feature 1..17: note = Synthetic
  source 1..17: mol_type = other RNA
tcgccgggggcgatctc

SEQ ID NO: 2077 - RNA, 17 nt, synthetic construct
  misc_feature 1..17: note = Synthetic
  source 1..17: mol_type = other RNA
ggggcactcctcgccgg

SEQ ID NO: 2078 - RNA, 17 nt, synthetic construct
  misc_feature 1..17: note = Synthetic
  source 1..17: mol_type = other RNA
tggggcactcctcgccg

SEQ ID NO: 2079 - RNA, 17 nt, synthetic construct
  misc_feature 1..17: note = Synthetic
  source 1..17: mol_type = other RNA
ctggggcactcctcgcc

SEQ ID NO: 2080 - RNA, 17 nt, synthetic construct
  misc_feature 1..17: note = Synthetic
  source 1..17: mol_type = other RNA
gctggggcactcctcgc

SEQ ID NO: 2081 - RNA, 17 nt, synthetic construct
  misc_feature 1..17: note = Synthetic
  source 1..17: mol_type = other RNA
ccgtcacggggtcgctg

SEQ ID NO: 2082 - RNA, 17 nt, synthetic construct
  misc_feature 1..17: note = Synthetic
  source 1..17: mol_type = other RNA
tccgtcacggggtcgct

SEQ ID NO: 2083 - RNA, 17 nt, synthetic construct
  misc_feature 1..17: note = Synthetic
  source 1..17: mol_type = other RNA
gtccgtcacggggtcgc

SEQ ID NO: 2084 - RNA, 17 nt, synthetic construct
  misc_feature 1..17: note = Synthetic
  source 1..17: mol_type = other RNA
gcgcggggtccgtcacg

SEQ ID NO: 2085 - RNA, 17 nt, synthetic construct
  misc_feature 1..17: note = Synthetic
  source 1..17: mol_type = other RNA
tgcgcggggtccgtcac

SEQ ID NO: 2086 - RNA, 17 nt, synthetic construct
  misc_feature 1..17: note = Synthetic
  source 1..17: mol_type = other RNA
gtgcgcggggtccgtca

SEQ ID NO: 2087 - RNA, 17 nt, synthetic construct
  misc_feature 1..17: note = Synthetic
  source 1..17: mol_type = other RNA
ggtgcagggggtgcgcg

SEQ ID NO: 2088 - RNA, 17 nt, synthetic construct
  misc_feature 1..17: note = Synthetic
  source 1..17: mol_type = other RNA
gggtgcagggggtgcgc

SEQ ID NO: 2089 - RNA, 17 nt, synthetic construct
  misc_feature 1..17: note = Synthetic
  source 1..17: mol_type = other RNA
cgggtgcagggggtgcg

SEQ ID NO: 2090 - RNA, 17 nt, synthetic construct
  misc_feature 1..17: note = Synthetic
  source 1..17: mol_type = other RNA
gattggccgggtgcagg

SEQ ID NO: 2091 - RNA, 17 nt, synthetic construct
  misc_feature 1..17: note = Synthetic
  source 1..17: mol_type = other RNA
agattggccgggtgcag

SEQ ID NO: 2092 - RNA, 17 nt, synthetic construct
  misc_feature 1..17: note = Synthetic
  source 1..17: mol_type = other RNA
cagattggccgggtgca

SEQ ID NO: 2093 - RNA, 17 nt, synthetic construct
  misc_feature 1..17: note = Synthetic
  source 1..17: mol_type = other RNA
ccagattggccgggtgc

SEQ ID NO: 2094 - RNA, 17 nt, synthetic construct
  misc_feature 1..17: note = Synthetic
  source 1..17: mol_type = other RNA
tggccaccagattggcc

SEQ ID NO: 2095 - RNA, 17 nt, synthetic construct
  misc_feature 1..17: note = Synthetic
  source 1..17: mol_type = other RNA
ttggccaccagattggc

SEQ ID NO: 2096 - RNA, 17 nt, synthetic construct
  misc_feature 1..17: note = Synthetic
  source 1..17: mol_type = other RNA
cgtgttggccaccagat

SEQ ID NO: 2097 - RNA, 17 nt, synthetic construct
  misc_feature 1..17: note = Synthetic
  source 1..17: mol_type = other RNA
catggcgttgaccgtgt

SEQ ID NO: 2098 - RNA, 17 nt, synthetic construct
  misc_feature 1..17: note = Synthetic
  source 1..17: mol_type = other RNA
gcgcccgttgtgaaaca

SEQ ID NO: 2099 - RNA, 17 nt, synthetic construct
  misc_feature 1..17: note = Synthetic
  source 1..17: mol_type = other RNA
tgcagcgtgagcatggc

SEQ ID NO: 2100 - RNA, 17 nt, synthetic construct
  misc_feature 1..17: note = Synthetic
  source 1..17: mol_type = other RNA
ctgcagcgtgagcatgg

SEQ ID NO: 2101 - RNA, 17 nt, synthetic construct
  misc_feature 1..17: note = Synthetic
  source 1..17: mol_type = other RNA
cacctgcagcgtgagca

SEQ ID NO: 2102 - RNA, 17 nt, synthetic construct
  misc_feature 1..17: note = Synthetic
  source 1..17: mol_type = other RNA
gcgttcggccatgttgt

SEQ ID NO: 2103 - RNA, 17 nt, synthetic construct
  misc_feature 1..17: note = Synthetic
  source 1..17: mol_type = other RNA
tgcgttcggccatgttg

SEQ ID NO: 2104 - RNA, 17 nt, synthetic construct
  misc_feature 1..17: note = Synthetic
  source 1..17: mol_type = other RNA
cagcgccgttgtgcgtt

SEQ ID NO: 2105 - RNA, 17 nt, synthetic construct
  misc_feature 1..17: note = Synthetic
  source 1..17: mol_type = other RNA
gtgttggcgcccgcgtc

SEQ ID NO: 2106 - RNA, 17 nt, synthetic construct
  misc_feature 1..17: note = Synthetic
  source 1..17: mol_type = other RNA
ggtgttggcgcccgcgt

SEQ ID NO: 2107 - RNA, 17 nt, synthetic construct
  misc_feature 1..17: note = Synthetic
  source 1..17: mol_type = other RNA
ggtggtggacgcggtgt

SEQ ID NO: 2108 - RNA, 17 nt, synthetic construct
  misc_feature 1..17: note = Synthetic
  source 1..17: mol_type = other RNA
catgttggtggtggacg

SEQ ID NO: 2109 - RNA, 17 nt, synthetic construct
  misc_feature 1..17: note = Synthetic
  source 1..17: mol_type = other RNA
tatgcgcatgttggtgg

SEQ ID NO: 2110 - RNA, 17 nt, synthetic construct
  misc_feature 1..17: note = Synthetic
  source 1..17: mol_type = other RNA
gaatatgcgcatgttgg

SEQ ID NO: 2111 - RNA, 17 nt, synthetic construct
  misc_feature 1..17: note = Synthetic
  source 1..17: mol_type = other RNA
gtcgaatatgcgcatgt

SEQ ID NO: 2112 - RNA, 17 nt, synthetic construct
  misc_feature 1..17: note = Synthetic
  source 1..17: mol_type = other RNA
ggccatcagcaggattc

SEQ ID NO: 2113 - RNA, 17 nt, synthetic construct
  misc_feature 1..17: note = Synthetic
  source 1..17: mol_type = other RNA
gctggggggccatcagc

SEQ ID NO: 2114 - RNA, 17 nt, synthetic construct
  misc_feature 1..17: note = Synthetic
  source 1..17: mol_type = other RNA
atggtccagatgctggg

SEQ ID NO: 2115 - RNA, 17 nt, synthetic construct
  misc_feature 1..17: note = Synthetic
  source 1..17: mol_type = other RNA
tatggtccagatgctgg

SEQ ID NO: 2116 - RNA, 17 nt, synthetic construct
  misc_feature 1..17: note = Synthetic
  source 1..17: mol_type = other RNA
gtatggtccagatgctg

SEQ ID NO: 2117 - RNA, 17 nt, synthetic construct
  misc_feature 1..17: note = Synthetic
  source 1..17: mol_type = other RNA
ggtatggtccagatgct

SEQ ID NO: 2118 - RNA, 17 nt, synthetic construct
  misc_feature 1..17: note = Synthetic
  source 1..17: mol_type = other RNA
tggtatggtccagatgc

SEQ ID NO: 2119 - RNA, 17 nt, synthetic construct
  misc_feature 1..17: note = Synthetic
  source 1..17: mol_type = other RNA
cgccattttggatggta

SEQ ID NO: 2120 - RNA, 17 nt, synthetic construct
  misc_feature 1..17: note = Synthetic
  source 1..17: mol_type = other RNA
atagtcgccattttgga

SEQ ID NO: 2121 - RNA, 17 nt, synthetic construct
  misc_feature 1..17: note = Synthetic
  source 1..17: mol_type = other RNA
aaaaatagtcgccattt

SEQ ID NO: 2122 - RNA, 17 nt, synthetic construct
  misc_feature 1..17: note = Synthetic
  source 1..17: mol_type = other RNA
gcgcgtggacggggagg

SEQ ID NO: 2123 - RNA, 17 nt, synthetic construct
  misc_feature 1..17: note = Synthetic
  source 1..17: mol_type = other RNA
agcgcgtggacggggag

SEQ ID NO: 2124 - RNA, 17 nt, synthetic construct
  misc_feature 1..17: note = Synthetic
  source 1..17: mol_type = other RNA
cagcgcgtggacgggga

SEQ ID NO: 2125 - RNA, 17 nt, synthetic construct
  misc_feature 1..17: note = Synthetic
  source 1..17: mol_type = other RNA
acagcgcgtggacgggg

SEQ ID NO: 2126 - RNA, 17 nt, synthetic construct
  misc_feature 1..17: note = Synthetic
  source 1..17: mol_type = other RNA
cgaacagcgcgtggacg

SEQ ID NO: 2127 - RNA, 17 nt, synthetic construct
  misc_feature 1..17: note = Synthetic
  source 1..17: mol_type = other RNA
gcgaacagcgcgtggac

SEQ ID NO: 2128 - RNA, 17 nt, synthetic construct
  misc_feature 1..17: note = Synthetic
  source 1..17: mol_type = other RNA
ggcgaacagcgcgtgga

SEQ ID NO: 2129 - RNA, 17 nt, synthetic construct
  misc_feature 1..17: note = Synthetic
  source 1..17: mol_type = other RNA
ccccggcgaacagcgcg

SEQ ID NO: 2130 - RNA, 17 nt, synthetic construct
  misc_feature 1..17: note = Synthetic
  source 1..17: mol_type = other RNA
cgccacgtggtcggccc

SEQ ID NO: 2131 - RNA, 17 nt, synthetic construct
  misc_feature 1..17: note = Synthetic
  source 1..17: mol_type = other RNA
cgcgttcgccacgtggt

SEQ ID NO: 2132 - RNA, 17 nt, synthetic construct
  misc_feature 1..17: note = Synthetic
  source 1..17: mol_type = other RNA
tgggcgcgttcgccacg

SEQ ID NO: 2133 - RNA, 17 nt, synthetic construct
  misc_feature 1..17: note = Synthetic
  source 1..17: mol_type = other RNA
agggccggggggaaatt

SEQ ID NO: 2134 - RNA, 17 nt, synthetic construct
  misc_feature 1..17: note = Synthetic
  source 1..17: mol_type = other RNA
cagggccggggggaaat

SEQ ID NO: 2135 - RNA, 17 nt, synthetic construct
  misc_feature 1..17: note = Synthetic
  source 1..17: mol_type = other RNA
ggtcgcgcagggccggg

SEQ ID NO: 2136 - RNA, 17 nt, synthetic construct
  misc_feature 1..17: note = Synthetic
  source 1..17: mol_type = other RNA
aggtcgcgcagggccgg

SEQ ID NO: 2137 - RNA, 17 nt, synthetic construct
  misc_feature 1..17: note = Synthetic
  source 1..17: mol_type = other RNA
caggtcgcgcagggccg

SEQ ID NO: 2138 - RNA, 17 nt, synthetic construct
  misc_feature 1..17: note = Synthetic
  source 1..17: mol_type = other RNA
acaggtcgcgcagggcc

SEQ ID NO: 2139 - RNA, 17 nt, synthetic construct
  misc_feature 1..17: note = Synthetic
  source 1..17: mol_type = other RNA
gacaggtcgcgcagggc

SEQ ID NO: 2140 - RNA, 17 nt, synthetic construct
  misc_feature 1..17: note = Synthetic
  source 1..17: mol_type = other RNA
ccgcgacaggtcgcgca

SEQ ID NO: 2141 - RNA, 17 nt, synthetic construct
  misc_feature 1..17: note = Synthetic
  source 1..17: mol_type = other RNA
gccgcgacaggtcgcgc

SEQ ID NO: 2142 - RNA, 17 nt, synthetic construct
  misc_feature 1..17: note = Synthetic
  source 1..17: mol_type = other RNA
gggggacctgccgcgac

SEQ ID NO: 2143 - RNA, 17 nt, synthetic construct
  misc_feature 1..17: note = Synthetic
  source 1..17: mol_type = other RNA
gagccggggggaccagg

SEQ ID NO: 2144 - RNA, 17 nt, synthetic construct
  misc_feature 1..17: note = Synthetic
  source 1..17: mol_type = other RNA
agagccggggggaccag

SEQ ID NO: 2145 - RNA, 17 nt, synthetic construct
  misc_feature 1..17: note = Synthetic
  source 1..17: mol_type = other RNA
cagagccggggggacca

SEQ ID NO: 2146 - RNA, 17 nt, synthetic construct
  misc_feature 1..17: note = Synthetic
  source 1..17: mol_type = other RNA
ccagagccggggggacc

SEQ ID NO: 2147 - RNA, 17 nt, synthetic construct
  misc_feature 1..17: note = Synthetic
  source 1..17: mol_type = other RNA
tggcccccagagccggg

SEQ ID NO: 2148 - RNA, 17 nt, synthetic construct
  misc_feature 1..17: note = Synthetic
  source 1..17: mol_type = other RNA
ttggcccccagagccgg

SEQ ID NO: 2149 - RNA, 17 nt, synthetic construct
  misc_feature 1..17: note = Synthetic
  source 1..17: mol_type = other RNA
gttggcccccagagccg

SEQ ID NO: 2150 - RNA, 17 nt, synthetic construct
  misc_feature 1..17: note = Synthetic
  source 1..17: mol_type = other RNA
agttggcccccagagcc

SEQ ID NO: 2151 - RNA, 17 nt, synthetic construct
  misc_feature 1..17: note = Synthetic
  source 1..17: mol_type = other RNA
tagttggcccccagagc

SEQ ID NO: 2152 - RNA, 17 nt, synthetic construct
  misc_feature 1..17: note = Synthetic
  source 1..17: mol_type = other RNA
gatcgacgaaaagtagt

SEQ ID NO: 2153 - RNA, 17 nt, synthetic construct
  misc_feature 1..17: note = Synthetic
  source 1..17: mol_type = other RNA
gctgcacgacgggctgt

SEQ ID NO: 2154 - RNA, 17 nt, synthetic construct
  misc_feature 1..17: note = Synthetic
  source 1..17: mol_type = other RNA
cggacgtgctgcacgac

SEQ ID NO: 2155 - RNA, 17 nt, synthetic construct
  misc_feature 1..17: note = Synthetic
  source 1..17: mol_type = other RNA
gcggacgtgctgcacga

SEQ ID NO: 2156 - RNA, 17 nt, synthetic construct
  misc_feature 1..17: note = Synthetic
  source 1..17: mol_type = other RNA
ccccggccgcgctctcg

SEQ ID NO: 2157 - RNA, 17 nt, synthetic construct
  misc_feature 1..17: note = Synthetic
  source 1..17: mol_type = other RNA
ggtcagcgcgttctccc

SEQ ID NO: 2158 - RNA, 17 nt, synthetic construct
  misc_feature 1..17: note = Synthetic
  source 1..17: mol_type = other RNA
ccccgccatgagcgcgt

SEQ ID NO: 2159 - RNA, 17 nt, synthetic construct
  misc_feature 1..17: note = Synthetic
  source 1..17: mol_type = other RNA
tgatgatgcaaggccac

SEQ ID NO: 2160 - RNA, 17 nt, synthetic construct
  misc_feature 1..17: note = Synthetic
  source 1..17: mol_type = other RNA
ctgatgatgcaaggcca

SEQ ID NO: 2161 - RNA, 17 nt, synthetic construct
  misc_feature 1..17: note = Synthetic
  source 1..17: mol_type = other RNA
cttgagctgatgatgca

SEQ ID NO: 2162 - RNA, 17 nt, synthetic construct
  misc_feature 1..17: note = Synthetic
  source 1..17: mol_type = other RNA
acccaaacccgggatgg

SEQ ID NO: 2163 - RNA, 17 nt, synthetic construct
  misc_feature 1..17: note = Synthetic
  source 1..17: mol_type = other RNA
tgaacccaaacccggga

SEQ ID NO: 2164 - RNA, 17 nt, synthetic construct
  misc_feature 1..17: note = Synthetic
  source 1..17: mol_type = other RNA
acggtgaacccaaaccc

SEQ ID NO: 2165 - RNA, 17 nt, synthetic construct
  misc_feature 1..17: note = Synthetic
  source 1..17: mol_type = other RNA
gacggtgaacccaaacc

SEQ ID NO: 2166 - RNA, 17 nt, synthetic construct
  misc_feature 1..17: note = Synthetic
  source 1..17: mol_type = other RNA
gcggtcctgtcggacga

SEQ ID NO: 2167 - RNA, 17 nt, synthetic construct
  misc_feature 1..17: note = Synthetic
  source 1..17: mol_type = other RNA
tcacaaagcggtcctgt

SEQ ID NO: 2168 - RNA, 17 nt, synthetic construct
  misc_feature 1..17: note = Synthetic
  source 1..17: mol_type = other RNA
cgttctcagtcacaaag

SEQ ID NO: 2169 - RNA, 17 nt, synthetic construct
  misc_feature 1..17: note = Synthetic
  source 1..17: mol_type = other RNA
ccacctggagctggccc

SEQ ID NO: 2170 - RNA, 17 nt, synthetic construct
  misc_feature 1..17: note = Synthetic
  source 1..17: mol_type = other RNA
gccgggccacctggagc

SEQ ID NO: 2171 - RNA, 17 nt, synthetic construct
  misc_feature 1..17: note = Synthetic
  source 1..17: mol_type = other RNA
tttcgtgccgggccacc

SEQ ID NO: 2172 - RNA, 17 nt, synthetic construct
  misc_feature 1..17: note = Synthetic
  source 1..17: mol_type = other RNA
cccgccagtttcgtgcc

SEQ ID NO: 2173 - RNA, 17 nt, synthetic construct
  misc_feature 1..17: note = Synthetic
  source 1..17: mol_type = other RNA
ccccgccagtttcgtgc

SEQ ID NO: 2174 - RNA, 17 nt, synthetic construct
  misc_feature 1..17: note = Synthetic
  source 1..17: mol_type = other RNA
cacgttcgcgcgcggct

SEQ ID NO: 2175 - RNA, 17 nt, synthetic construct
  misc_feature 1..17: note = Synthetic
  source 1..17: mol_type = other RNA
ccacgttcgcgcgcggc

SEQ ID NO: 2176 - RNA, 17 nt, synthetic construct
  misc_feature 1..17: note = Synthetic
  source 1..17: mol_type = other RNA
aggtccacgttcgcgcg

SEQ ID NO: 2177 - RNA, 17 nt, synthetic construct
  misc_feature 1..17: note = Synthetic
  source 1..17: mol_type = other RNA
cggtgtagcccacgccc

SEQ ID NO: 2178 - RNA, 17 nt, synthetic construct
  misc_feature 1..17: note = Synthetic
  source 1..17: mol_type = other RNA
tgccgtggccacgacgg

SEQ ID NO: 2179 - RNA, 17 nt, synthetic construct
  misc_feature 1..17: note = Synthetic
  source 1..17: mol_type = other RNA
ggttgccgtggccacga

SEQ ID NO: 2180 - RNA, 17 nt, synthetic construct
  misc_feature 1..17: note = Synthetic
  source 1..17: mol_type = other RNA
gttgcggacggttgccg

SEQ ID NO: 2181 - RNA, 17 nt, synthetic construct
  misc_feature 1..17: note = Synthetic
  source 1..17: mol_type = other RNA
ggtgacggggttgcgga

SEQ ID NO: 2182 - RNA, 17 nt, synthetic construct
  misc_feature 1..17: note = Synthetic
  source 1..17: mol_type = other RNA
tgtcggtgacggggttg

SEQ ID NO: 2183 - RNA, 17 nt, synthetic construct
  misc_feature 1..17: note = Synthetic
  source 1..17: mol_type = other RNA
tgcccatgtcggtgacg

SEQ ID NO: 2184 - RNA, 17 nt, synthetic construct
  misc_feature 1..17: note = Synthetic
  source 1..17: mol_type = other RNA
ttgcccatgtcggtgac

SEQ ID NO: 2185 - RNA, 17 nt, synthetic construct
  misc_feature 1..17: note = Synthetic
  source 1..17: mol_type = other RNA
gttgcccatgtcggtga

SEQ ID NO: 2186 - RNA, 17 nt, synthetic construct
  misc_feature 1..17: note = Synthetic
  source 1..17: mol_type = other RNA
gggaaggttgcccatgt

SEQ ID NO: 2187 - RNA, 17 nt, synthetic construct
  misc_feature 1..17: note = Synthetic
  source 1..17: mol_type = other RNA
ggtaaaagttttgggga

SEQ ID NO: 2188 - RNA, 17 nt, synthetic construct
  misc_feature 1..17: note = Synthetic
  source 1..17: mol_type = other RNA
cccaggtaaaagttttg

SEQ ID NO: 2189 - RNA, 17 nt, synthetic construct
  misc_feature 1..17: note = Synthetic
  source 1..17: mol_type = other RNA
gcccaggtaaaagtttt

SEQ ID NO: 2190 - RNA, 17 nt, synthetic construct
  misc_feature 1..17: note = Synthetic
  source 1..17: mol_type = other RNA
ggcccaggtaaaagttt

SEQ ID NO: 2191 - RNA, 17 nt, synthetic construct
  misc_feature 1..17: note = Synthetic
  source 1..17: mol_type = other RNA
ggggagccccgcggccc

SEQ ID NO: 2192 - RNA, 17 nt, synthetic construct
  misc_feature 1..17: note = Synthetic
  source 1..17: mol_type = other RNA
ggagagggggagccccg

SEQ ID NO: 2193 - RNA, 17 nt, synthetic construct
  misc_feature 1..17: note = Synthetic
  source 1..17: mol_type = other RNA
gcgttgtccaggagagg

SEQ ID NO: 2194 - RNA, 17 nt, synthetic construct
  misc_feature 1..17: note = Synthetic
  source 1..17: mol_type = other RNA
cgcgttgtccaggagag

SEQ ID NO: 2195 - RNA, 17 nt, synthetic construct
  misc_feature 1..17: note = Synthetic
  source 1..17: mol_type = other RNA
ccgcgttgtccaggaga

SEQ ID NO: 2196 - RNA, 17 nt, synthetic construct
  misc_feature 1..17: note = Synthetic
  source 1..17: mol_type = other RNA
gccgcgttgtccaggag

SEQ ID NO: 2197 - RNA, 17 nt, synthetic construct
  misc_feature 1..17: note = Synthetic
  source 1..17: mol_type = other RNA
cggctgccgcgttgtcc

SEQ ID NO: 2198 - RNA, 17 nt, synthetic construct
  misc_feature 1..17: note = Synthetic
  source 1..17: mol_type = other RNA
cgcgttccgcaggtaca

SEQ ID NO: 2199 - RNA, 17 nt, synthetic construct
  misc_feature 1..17: note = Synthetic
  source 1..17: mol_type = other RNA
ccacgaccgcgttccgc

SEQ ID NO: 2200 - RNA, 17 nt, synthetic construct
  misc_feature 1..17: note = Synthetic
  source 1..17: mol_type = other RNA
gctgggccggccccagg

SEQ ID NO: 2201 - RNA, 17 nt, synthetic construct
  misc_feature 1..17: note = Synthetic
  source 1..17: mol_type = other RNA
cgggctgggccggcccc

SEQ ID NO: 2202 - RNA, 17 nt, synthetic construct
  misc_feature 1..17: note = Synthetic
  source 1..17: mol_type = other RNA
acggggacgggctgggc

SEQ ID NO: 2203 - RNA, 17 nt, synthetic construct
  misc_feature 1..17: note = Synthetic
  source 1..17: mol_type = other RNA
gaacacggggacgggct

SEQ ID NO: 2204 - RNA, 17 nt, synthetic construct
  misc_feature 1..17: note = Synthetic
  source 1..17: mol_type = other RNA
cgaacacggggacgggc

SEQ ID NO: 2205 - RNA, 17 nt, synthetic construct
  misc_feature 1..17: note = Synthetic
  source 1..17: mol_type = other RNA
cacccgaacacggggac

SEQ ID NO: 2206 - RNA, 17 nt, synthetic construct
  misc_feature 1..17: note = Synthetic
  source 1..17: mol_type = other RNA
gcacccgaacacgggga

SEQ ID NO: 2207 - RNA, 17 nt, synthetic construct
  misc_feature 1..17: note = Synthetic
  source 1..17: mol_type = other RNA
gggcgcacccgaacacg

SEQ ID NO: 2208 - RNA, 17 nt, synthetic construct
  misc_feature 1..17: note = Synthetic
  source 1..17: mol_type = other RNA
tgggcgcacccgaacac

SEQ ID NO: 2209 - RNA, 17 nt, synthetic construct
  misc_feature 1..17: note = Synthetic
  source 1..17: mol_type = other RNA
ctgggcgcacccgaaca

SEQ ID NO: 2210 - RNA, 17 nt, synthetic construct
  misc_feature 1..17: note = Synthetic
  source 1..17: mol_type = other RNA
tgcgcgccgcggcacct

SEQ ID NO: 2211 - RNA, 17 nt, synthetic construct
  misc_feature 1..17: note = Synthetic
  source 1..17: mol_type = other RNA
ctgcgcgccgcggcacc

SEQ ID NO: 2212 - RNA, 17 nt, synthetic construct
  misc_feature 1..17: note = Synthetic
  source 1..17: mol_type = other RNA
tccatccctgcgcgccg

SEQ ID NO: 2213 - RNA, 17 nt, synthetic construct
  misc_feature 1..17: note = Synthetic
  source 1..17: mol_type = other RNA
acacggcgtcctggccg

SEQ ID NO: 2214 - RNA, 17 nt, synthetic construct
  misc_feature 1..17: note = Synthetic
  source 1..17: mol_type = other RNA
actcacacacggcgtcc

SEQ ID NO: 2215 - RNA, 17 nt, synthetic construct
  misc_feature 1..17: note = Synthetic
  source 1..17: mol_type = other RNA
ggcgataaactcacaca

SEQ ID NO: 2216 - RNA, 17 nt, synthetic construct
  misc_feature 1..17: note = Synthetic
  source 1..17: mol_type = other RNA
gtcggtcgacacggggg

SEQ ID NO: 2217 - RNA, 17 nt, synthetic construct
  misc_feature 1..17: note = Synthetic
  source 1..17: mol_type = other RNA
gacgtcggtcgacacgg

SEQ ID NO: 2218 - RNA, 17 nt, synthetic construct
  misc_feature 1..17: note = Synthetic
  source 1..17: mol_type = other RNA
tgacgtcggtcgacacg

SEQ ID NO: 2219 - RNA, 17 nt, synthetic construct
  misc_feature 1..17: note = Synthetic
  source 1..17: mol_type = other RNA
ttgacgtcggtcgacac

SEQ ID NO: 2220 - RNA, 17 nt, synthetic construct
  misc_feature 1..17: note = Synthetic
  source 1..17: mol_type = other RNA
gttgacgtcggtcgaca

SEQ ID NO: 2221 - RNA, 17 nt, synthetic construct
  misc_feature 1..17: note = Synthetic
  source 1..17: mol_type = other RNA
gcggaagtagttgacgt

SEQ ID NO: 2222 - RNA, 17 nt, synthetic construct
  misc_feature 1..17: note = Synthetic
  source 1..17: mol_type = other RNA
gggggttgcagggccgg

SEQ ID NO: 2223 - RNA, 17 nt, synthetic construct
  misc_feature 1..17: note = Synthetic
  source 1..17: mol_type = other RNA
cccgggggttgcagggc

SEQ ID NO: 2224 - RNA, 17 nt, synthetic construct
  misc_feature 1..17: note = Synthetic
  source 1..17: mol_type = other RNA
cgtccccgggggttgca

SEQ ID NO: 2225 - RNA, 17 nt, synthetic construct
  misc_feature 1..17: note = Synthetic
  source 1..17: mol_type = other RNA
gcgtccccgggggttgc

SEQ ID NO: 2226 - RNA, 17 nt, synthetic construct
  misc_feature 1..17: note = Synthetic
  source 1..17: mol_type = other RNA
cggcggcgcgtccccgg

SEQ ID NO: 2227 - RNA, 17 nt, synthetic construct
  misc_feature 1..17: note = Synthetic
  source 1..17: mol_type = other RNA
ccggcggcgcgtccccg

SEQ ID NO: 2228 - RNA, 17 nt, synthetic construct
  misc_feature 1..17: note = Synthetic
  source 1..17: mol_type = other RNA
cccggcggcgcgtcccc

SEQ ID NO: 2229 - RNA, 17 nt, synthetic construct
  misc_feature 1..17: note = Synthetic
  source 1..17: mol_type = other RNA
ccccggcggcgcgtccc

SEQ ID NO: 2230 - RNA, 17 nt, synthetic construct
  misc_feature 1..17: note = Synthetic
  source 1..17: mol_type = other RNA
cgcgtaaacgcccccgg

SEQ ID NO: 2231 - RNA, 17 nt, synthetic construct
  misc_feature 1..17: note = Synthetic
  source 1..17: mol_type = other RNA
ccccgcgtaaacgcccc

SEQ ID NO: 2232 - RNA, 17 nt, synthetic construct
  misc_feature 1..17: note = Synthetic
  source 1..17: mol_type = other RNA
gtggtcgtacatgaggg

SEQ ID NO: 2233 - RNA, 17 nt, synthetic construct
  misc_feature 1..17: note = Synthetic
  source 1..17: mol_type = other RNA
gccgtggtcgtacatga

SEQ ID NO: 2234 - RNA, 17 nt, synthetic construct
  misc_feature 1..17: note = Synthetic
  source 1..17: mol_type = other RNA
ggccgtggtcgtacatg

SEQ ID NO: 2235 - RNA, 17 nt, synthetic construct
  misc_feature 1..17: note = Synthetic
  source 1..17: mol_type = other RNA
acgggtcgctctggccg

SEQ ID NO: 2236 - RNA, 17 nt, synthetic construct
  misc_feature 1..17: note = Synthetic
  source 1..17: mol_type = other RNA
cccgggacgggtcgctc

SEQ ID NO: 2237 - RNA, 17 nt, synthetic construct
  misc_feature 1..17: note = Synthetic
  source 1..17: mol_type = other RNA
ccgcgaaggcccgggac

SEQ ID NO: 2238 - RNA, 17 nt, synthetic construct
  misc_feature 1..17: note = Synthetic
  source 1..17: mol_type = other RNA
gccgcgaaggcccggga

SEQ ID NO: 2239 - RNA, 17 nt, synthetic construct
  misc_feature 1..17: note = Synthetic
  source 1..17: mol_type = other RNA
cgtggccgcgaaggccc

SEQ ID NO: 2240 - RNA, 17 nt, synthetic construct
  misc_feature 1..17: note = Synthetic
  source 1..17: mol_type = other RNA
ccgtggccgcgaaggcc

SEQ ID NO: 2241 - RNA, 17 nt, synthetic construct
  misc_feature 1..17: note = Synthetic
  source 1..17: mol_type = other RNA
gttggccgtggccgcga

SEQ ID NO: 2242 - RNA, 17 nt, synthetic construct
  misc_feature 1..17: note = Synthetic
  source 1..17: mol_type = other RNA
cgcccacgggttggccg

SEQ ID NO: 2243 - RNA, 17 nt, synthetic construct
  misc_feature 1..17: note = Synthetic
  source 1..17: mol_type = other RNA
ctgcgacgcccacgggt

SEQ ID NO: 2244 - RNA, 17 nt, synthetic construct
  misc_feature 1..17: note = Synthetic
  source 1..17: mol_type = other RNA
atcgctgcgacgcccac

SEQ ID NO: 2245 - RNA, 17 nt, synthetic construct
  misc_feature 1..17: note = Synthetic
  source 1..17: mol_type = other RNA
aatcgctgcgacgccca

SEQ ID NO: 2246 - RNA, 17 nt, synthetic construct
  misc_feature 1..17: note = Synthetic
  source 1..17: mol_type = other RNA
aggccccgttatagagc

SEQ ID NO: 2247 - RNA, 17 nt, synthetic construct
  misc_feature 1..17: note = Synthetic
  source 1..17: mol_type = other RNA
ggccccgttgaggtggt

SEQ ID NO: 2248 - RNA, 17 nt, synthetic construct
  misc_feature 1..17: note = Synthetic
  source 1..17: mol_type = other RNA
gcgaggccccgttgagg

SEQ ID NO: 2249 - RNA, 17 nt, synthetic construct
  misc_feature 1..17: note = Synthetic
  source 1..17: mol_type = other RNA
ccggcgaggccccgttg

SEQ ID NO: 2250 - RNA, 17 nt, synthetic construct
  misc_feature 1..17: note = Synthetic
  source 1..17: mol_type = other RNA
ggggctgagcaccggcg

SEQ ID NO: 2251 - RNA, 17 nt, synthetic construct
  misc_feature 1..17: note = Synthetic
  source 1..17: mol_type = other RNA
aagcaggggctgagcac

SEQ ID NO: 2252 - RNA, 17 nt, synthetic construct
  misc_feature 1..17: note = Synthetic
  source 1..17: mol_type = other RNA
taaagaacttaaagcag

SEQ ID NO: 2253 - RNA, 17 nt, synthetic construct
  misc_feature 1..17: note = Synthetic
  source 1..17: mol_type = other RNA
gtaaagaacttaaagca

SEQ ID NO: 2254 - RNA, 17 nt, synthetic construct
  misc_feature 1..17: note = Synthetic
  source 1..17: mol_type = other RNA
cgtaaagaacttaaagc

SEQ ID NO: 2255 - RNA, 17 nt, synthetic construct
  misc_feature 1..17: note = Synthetic
  source 1..17: mol_type = other RNA
atgtttggcggcgatgt

SEQ ID NO: 2256 - RNA, 17 nt, synthetic construct
  misc_feature 1..17: note = Synthetic
  source 1..17: mol_type = other RNA
caggcagcgatgtttgg

SEQ ID NO: 2257 - RNA, 17 nt, synthetic construct
  misc_feature 1..17: note = Synthetic
  source 1..17: mol_type = other RNA
ctccaggcagcgatgtt

SEQ ID NO: 2258 - RNA, 17 nt, synthetic construct
  misc_feature 1..17: note = Synthetic
  source 1..17: mol_type = other RNA
ccacgatcaggcgctcc

SEQ ID NO: 2259 - RNA, 17 nt, synthetic construct
  misc_feature 1..17: note = Synthetic
  source 1..17: mol_type = other RNA
aacccgtctccacgatc

SEQ ID NO: 2260 - RNA, 17 nt, synthetic construct
  misc_feature 1..17: note = Synthetic
  source 1..17: mol_type = other RNA
gctggcggcggtggccg

SEQ ID NO: 2261 - RNA, 17 nt, synthetic construct
  misc_feature 1..17: note = Synthetic
  source 1..17: mol_type = other RNA
tacgtcgctggcggcgg

SEQ ID NO: 2262 - RNA, 17 nt, synthetic construct
  misc_feature 1..17: note = Synthetic
  source 1..17: mol_type = other RNA
ctgtacgtcgctggcgg

SEQ ID NO: 2263 - RNA, 17 nt, synthetic construct
  misc_feature 1..17: note = Synthetic
  source 1..17: mol_type = other RNA
aaactgtacgtcgctgg

SEQ ID NO: 2264 - RNA, 17 nt, synthetic construct
  misc_feature 1..17: note = Synthetic
  source 1..17: mol_type = other RNA
cttaaactgtacgtcgc

SEQ ID NO: 2265 - RNA, 17 nt, synthetic construct
  misc_feature 1..17: note = Synthetic
  source 1..17: mol_type = other RNA
gttcgcggcaccccggg

SEQ ID NO: 2266 - RNA, 17 nt, synthetic construct
  misc_feature 1..17: note = Synthetic
  source 1..17: mol_type = other RNA
agttcgcggcaccccgg

SEQ ID NO: 2267 - RNA, 17 nt, synthetic construct
  misc_feature 1..17: note = Synthetic
  source 1..17: mol_type = other RNA
gagttcgcggcaccccg

SEQ ID NO: 2268 - RNA, 17 nt, synthetic construct
  misc_feature 1..17: note = Synthetic
  source 1..17: mol_type = other RNA
cgagttcgcggcacccc

SEQ ID NO: 2269 - RNA, 17 nt, synthetic construct
  misc_feature 1..17: note = Synthetic
  source 1..17: mol_type = other RNA
acgagttcgcggcaccc

SEQ ID NO: 2270 - RNA, 17 nt, synthetic construct
  misc_feature 1..17: note = Synthetic
  source 1..17: mol_type = other RNA
ggtcctccacgagttcg

SEQ ID NO: 2271 - RNA, 17 nt, synthetic construct
  misc_feature 1..17: note = Synthetic
  source 1..17: mol_type = other RNA
cctgaaacaggccacac

SEQ ID NO: 2272 - RNA, 17 nt, synthetic construct
  misc_feature 1..17: note = Synthetic
  source 1..17: mol_type = other RNA
tcctgaaacaggccaca

SEQ ID NO: 2273 - RNA, 17 nt, synthetic construct
  misc_feature 1..17: note = Synthetic
  source 1..17: mol_type = other RNA
ggtaggcctcctgaaac

SEQ ID NO: 2274 - RNA, 17 nt, synthetic construct
  misc_feature 1..17: note = Synthetic
  source 1..17: mol_type = other RNA
ggcgcaggtgagcgggt

SEQ ID NO: 2275 - RNA, 17 nt, synthetic construct
  misc_feature 1..17: note = Synthetic
  source 1..17: mol_type = other RNA
cgctggcgcaggtgagc

SEQ ID NO: 2276 - RNA, 17 nt, synthetic construct
  misc_feature 1..17: note = Synthetic
  source 1..17: mol_type = other RNA
tcgctggcgcaggtgag

SEQ ID NO: 2277 - RNA, 17 nt, synthetic construct
  misc_feature 1..17: note = Synthetic
  source 1..17: mol_type = other RNA
ggcggggtcgctggcgc

SEQ ID NO: 2278 - RNA, 17 nt, synthetic construct
  misc_feature 1..17: note = Synthetic
  source 1..17: mol_type = other RNA
gaggagggcggggtcgc

SEQ ID NO: 2279 - RNA, 17 nt, synthetic construct
  misc_feature 1..17: note = Synthetic
  source 1..17: mol_type = other RNA
cactgcggaggagggcg

SEQ ID NO: 2280 - RNA, 17 nt, synthetic construct
  misc_feature 1..17: note = Synthetic
  source 1..17: mol_type = other RNA
gcactgcggaggagggc

SEQ ID NO: 2281 - RNA, 17 nt, synthetic construct
  misc_feature 1..17: note = Synthetic
  source 1..17: mol_type = other RNA
ggcactgcggaggaggg

SEQ ID NO: 2282 - RNA, 17 nt, synthetic construct
  misc_feature 1..17: note = Synthetic
  source 1..17: mol_type = other RNA
gcgggcactgcggagga

SEQ ID NO: 2283 - RNA, 17 nt, synthetic construct
  misc_feature 1..17: note = Synthetic
  source 1..17: mol_type = other RNA
tgcgggcactgcggagg

SEQ ID NO: 2284 - RNA, 17 nt, synthetic construct
  misc_feature 1..17: note = Synthetic
  source 1..17: mol_type = other RNA
cgttgcgggcactgcgg

SEQ ID NO: 2285 - RNA, 17 nt, synthetic construct
  misc_feature 1..17: note = Synthetic
  source 1..17: mol_type = other RNA
ccccgttgcgggcactg

SEQ ID NO: 2286 - RNA, 17 nt, synthetic construct
  misc_feature 1..17: note = Synthetic
  source 1..17: mol_type = other RNA
gtgggcttccccgttgc

SEQ ID NO: 2287 - RNA, 17 nt, synthetic construct
  misc_feature 1..17: note = Synthetic
  source 1..17: mol_type = other RNA
cgtgggcttccccgttg

SEQ ID NO: 2288 - RNA, 17 nt, synthetic construct
  misc_feature 1..17: note = Synthetic
  source 1..17: mol_type = other RNA
gtgggtctcccgcgcgt

SEQ ID NO: 2289 - RNA, 17 nt, synthetic construct
  misc_feature 1..17: note = Synthetic
  source 1..17: mol_type = other RNA
agtgggtctcccgcgcg

SEQ ID NO: 2290 - RNA, 17 nt, synthetic construct
  misc_feature 1..17: note = Synthetic
  source 1..17: mol_type = other RNA
gagatactgcgcgaagt

SEQ ID NO: 2291 - RNA, 17 nt, synthetic construct
  misc_feature 1..17: note = Synthetic
  source 1..17: mol_type = other RNA
cgagatactgcgcgaag

SEQ ID NO: 2292 - RNA, 17 nt, synthetic construct
  misc_feature 1..17: note = Synthetic
  source 1..17: mol_type = other RNA
agccagtcccttgagcg

SEQ ID NO: 2293 - RNA, 17 nt, synthetic construct
  misc_feature 1..17: note = Synthetic
  source 1..17: mol_type = other RNA
gagccagtcccttgagc

SEQ ID NO: 2294 - RNA, 17 nt, synthetic construct
  misc_feature 1..17: note = Synthetic
  source 1..17: mol_type = other RNA
agagccagtcccttgag

SEQ ID NO: 2295 - RNA, 20 nt, synthetic construct
  misc_feature 1..20: note = Synthetic
  source 1..20: mol_type = other RNA
ccgctcccaaccgcgaccct

SEQ ID NO: 2296 - RNA, 20 nt, synthetic construct
  misc_feature 1..20: note = Synthetic
  source 1..20: mol_type = other RNA
tgccgcggccatggtgccga

SEQ ID NO: 2297 - RNA, 20 nt, synthetic construct
  misc_feature 1..20: note = Synthetic
  source 1..20: mol_type = other RNA
cgggtccctccttagcacga

SEQ ID NO: 2298 - RNA, 20 nt, synthetic construct
  misc_feature 1..20: note = Synthetic
  source 1..20: mol_type = other RNA
tgcaaacagcctgtacgacg

SEQ ID NO: 2299 - RNA, 20 nt, synthetic construct
  misc_feature 1..20: note = Synthetic
  source 1..20: mol_type = other RNA
acgtcgagttcgacgccctg

SEQ ID NO: 2300 - RNA, 20 nt, synthetic construct
  misc_feature 1..20: note = Synthetic
  source 1..20: mol_type = other RNA
ccctgtcgctcgtgcgcttt

SEQ ID NO: 2301 - RNA, 20 nt, synthetic construct
  misc_feature 1..20: note = Synthetic
  source 1..20: mol_type = other RNA
gctcgtgcgctttctggagc

SEQ ID NO: 2302 - RNA, 20 nt, synthetic construct
  misc_feature 1..20: note = Synthetic
  source 1..20: mol_type = other RNA
cgtgcgtgtgtaccaagttt

SEQ ID NO: 2303 - RNA, 20 nt, synthetic construct
  misc_feature 1..20: note = Synthetic
  source 1..20: mol_type = other RNA
agtttccggagctggcctac

SEQ ID NO: 2304 - RNA, 20 nt, synthetic construct
  misc_feature 1..20: note = Synthetic
  source 1..20: mol_type = other RNA
tccggagctggcctacatga

SEQ ID NO: 2305 - RNA, 20 nt, synthetic construct
  misc_feature 1..20: note = Synthetic
  source 1..20: mol_type = other RNA
cggagctggcctacatgaac

SEQ ID NO: 2306 - RNA, 20 nt, synthetic construct
  misc_feature 1..20: note = Synthetic
  source 1..20: mol_type = other RNA
gaacgaggggcgcgtacagt

SEQ ID NO: 2307 - RNA, 20 nt, synthetic construct
  misc_feature 1..20: note = Synthetic
  source 1..20: mol_type = other RNA
ccgcgacggcccgcacccca

SEQ ID NO: 2308 - RNA, 20 nt, synthetic construct
  misc_feature 1..20: note = Synthetic
  source 1..20: mol_type = other RNA
atgaccaagattatcgaccg

SEQ ID NO: 2309 - RNA, 20 nt, synthetic construct
  misc_feature 1..20: note = Synthetic
  source 1..20: mol_type = other RNA
agattatcgaccgccgggcc

SEQ ID NO: 2310 - RNA, 20 nt, synthetic construct
  misc_feature 1..20: note = Synthetic
  source 1..20: mol_type = other RNA
cgccgccttcagcctggcca

SEQ ID NO: 2311 - RNA, 20 nt, synthetic construct
  misc_feature 1..20: note = Synthetic
  source 1..20: mol_type = other RNA
ccgaggccatcgccctgctc

SEQ ID NO: 2312 - RNA, 20 nt, synthetic construct
  misc_feature 1..20: note = Synthetic
  source 1..20: mol_type = other RNA
ccctgctcacgggggaggcc

SEQ ID NO: 2313 - RNA, 20 nt, synthetic construct
  misc_feature 1..20: note = Synthetic
  source 1..20: mol_type = other RNA
gctcacgggggaggccctgg

SEQ ID NO: 2314 - RNA, 20 nt, synthetic construct
  misc_feature 1..20: note = Synthetic
  source 1..20: mol_type = other RNA
cgggggaggccctggacggg

SEQ ID NO: 2315 - RNA, 17 nt, synthetic construct
  misc_feature 1..17: note = Synthetic
  source 1..17: mol_type = other RNA
ctcccaaccgcgaccct

SEQ ID NO: 2316 - RNA, 17 nt, synthetic construct
  misc_feature 1..17: note = Synthetic
  source 1..17: mol_type = other RNA
cgcggccatggtgccga

SEQ ID NO: 2317 - RNA, 17 nt, synthetic construct
  misc_feature 1..17: note = Synthetic
  source 1..17: mol_type = other RNA
gtccctccttagcacga

SEQ ID NO: 2318 - RNA, 17 nt, synthetic construct
  misc_feature 1..17: note = Synthetic
  source 1..17: mol_type = other RNA
aaacagcctgtacgacg

SEQ ID NO: 2319 - RNA, 17 nt, synthetic construct
  misc_feature 1..17: note = Synthetic
  source 1..17: mol_type = other RNA
tcgagttcgacgccctg

SEQ ID NO: 2320 - RNA, 17 nt, synthetic construct
  misc_feature 1..17: note = Synthetic
  source 1..17: mol_type = other RNA
tgtcgctcgtgcgcttt

SEQ ID NO: 2321 - RNA, 17 nt, synthetic construct
  misc_feature 1..17: note = Synthetic
  source 1..17: mol_type = other RNA
cgtgcgctttctggagc

SEQ ID NO: 2322 - RNA, 17 nt, synthetic construct
  misc_feature 1..17: note = Synthetic
  source 1..17: mol_type = other RNA
gcgtgtgtaccaagttt

SEQ ID NO: 2323 - RNA, 17 nt, synthetic construct
  misc_feature 1..17: note = Synthetic
  source 1..17: mol_type = other RNA
ttccggagctggcctac

SEQ ID NO: 2324 - RNA, 17 nt, synthetic construct
  misc_feature 1..17: note = Synthetic
  source 1..17: mol_type = other RNA
ggagctggcctacatga

SEQ ID NO: 2325 - RNA, 17 nt, synthetic construct
  misc_feature 1..17: note = Synthetic
  source 1..17: mol_type = other RNA
agctggcctacatgaac

SEQ ID NO: 2326 - RNA, 17 nt, synthetic construct
  misc_feature 1..17: note = Synthetic
  source 1..17: mol_type = other RNA
cgaggggcgcgtacagt

SEQ ID NO: 2327 - RNA, 17 nt, synthetic construct
  misc_feature 1..17: note = Synthetic
  source 1..17: mol_type = other RNA
cgacggcccgcacccca

SEQ ID NO: 2328 - RNA, 17 nt, synthetic construct
  misc_feature 1..17: note = Synthetic
  source 1..17: mol_type = other RNA
accaagattatcgaccg

SEQ ID NO: 2329 - RNA, 17 nt, synthetic construct
  misc_feature 1..17: note = Synthetic
  source 1..17: mol_type = other RNA
ttatcgaccgccgggcc

SEQ ID NO: 2330 - RNA, 17 nt, synthetic construct
  misc_feature 1..17: note = Synthetic
  source 1..17: mol_type = other RNA
cgccttcagcctggcca

SEQ ID NO: 2331 - RNA, 17 nt, synthetic construct
  misc_feature 1..17: note = Synthetic
  source 1..17: mol_type = other RNA
aggccatcgccctgctc

SEQ ID NO: 2332 - RNA, 17 nt, synthetic construct
  misc_feature 1..17: note = Synthetic
  source 1..17: mol_type = other RNA
tgctcacgggggaggcc

SEQ ID NO: 2333 - RNA, 17 nt, synthetic construct
  misc_feature 1..17: note = Synthetic
  source 1..17: mol_type = other RNA
cacgggggaggccctgg

SEQ ID NO: 2334 - RNA, 17 nt, synthetic construct
  misc_feature 1..17: note = Synthetic
  source 1..17: mol_type = other RNA
gggaggccctggacggg

SEQ ID NO: 2335 - RNA, 20 nt, synthetic construct
  misc_feature 1..20: note = Synthetic
  source 1..20: mol_type = other RNA
ggtatcccggagggtcgcgg

SEQ ID NO: 2336 - RNA, 20 nt, synthetic construct
  misc_feature 1..20: note = Synthetic
  source 1..20: mol_type = other RNA
cgcggcataccggtatcccg

SEQ ID NO: 2337 - RNA, 20 nt, synthetic construct
  misc_feature 1..20: note = Synthetic
  source 1..20: mol_type = other RNA
ggccgcggcataccggtatc

SEQ ID NO: 2338 - RNA, 20 nt, synthetic construct
  misc_feature 1..20: note = Synthetic
  source 1..20: mol_type = other RNA
gccacctcgatcgtgctaag

SEQ ID NO: 2339 - RNA, 20 nt, synthetic construct
  misc_feature 1..20: note = Synthetic
  source 1..20: mol_type = other RNA
gacgccacctcgatcgtgct

SEQ ID NO: 2340 - RNA, 20 nt, synthetic construct
  misc_feature 1..20: note = Synthetic
  source 1..20: mol_type = other RNA
ctgtttgcatcggagcgcac

SEQ ID NO: 2341 - RNA, 20 nt, synthetic construct
  misc_feature 1..20: note = Synthetic
  source 1..20: mol_type = other RNA
cgtcgtacaggctgtttgca

SEQ ID NO: 2342 - RNA, 20 nt, synthetic construct
  misc_feature 1..20: note = Synthetic
  source 1..20: mol_type = other RNA
aatacgaccccagcagggcg

SEQ ID NO: 2343 - RNA, 20 nt, synthetic construct
  misc_feature 1..20: note = Synthetic
  source 1..20: mol_type = other RNA
gtgttgcaatacgaccccag

SEQ ID NO: 2344 - RNA, 20 nt, synthetic construct
  misc_feature 1..20: note = Synthetic
  source 1..20: mol_type = other RNA
tccagaaagcgcacgagcga

SEQ ID NO: 2345 - RNA, 20 nt, synthetic construct
  misc_feature 1..20: note = Synthetic
  source 1..20: mol_type = other RNA
acccgagctccagaaagcgc

SEQ ID NO: 2346 - RNA, 20 nt, synthetic construct
  misc_feature 1..20: note = Synthetic
  source 1..20: mol_type = other RNA
gccaccgacaacccgagctc

SEQ ID NO: 2347 - RNA, 20 nt, synthetic construct
  misc_feature 1..20: note = Synthetic
  source 1..20: mol_type = other RNA
acacgcacgccaccgacaac

SEQ ID NO: 2348 - RNA, 20 nt, synthetic construct
  misc_feature 1..20: note = Synthetic
  source 1..20: mol_type = other RNA
ctcgttcatgtaggccagct

SEQ ID NO: 2349 - RNA, 20 nt, synthetic construct
  misc_feature 1..20: note = Synthetic
  source 1..20: mol_type = other RNA
caatcagcggctggtggacc

SEQ ID NO: 2350 - RNA, 20 nt, synthetic construct
  misc_feature 1..20: note = Synthetic
  source 1..20: mol_type = other RNA
tcgcgggcaatcagcggctg

SEQ ID NO: 2351 - RNA, 20 nt, synthetic construct
  misc_feature 1..20: note = Synthetic
  source 1..20: mol_type = other RNA
tcgatggggtgcgggccgtc

SEQ ID NO: 2352 - RNA, 20 nt, synthetic construct
  misc_feature 1..20: note = Synthetic
  source 1..20: mol_type = other RNA
tgtgggttgctcgatggggt

SEQ ID NO: 2353 - RNA, 20 nt, synthetic construct
  misc_feature 1..20: note = Synthetic
  source 1..20: mol_type = other RNA
aattgtgtgtgggttgctcg

SEQ ID NO: 2354 - RNA, 20 nt, synthetic construct
  misc_feature 1..20: note = Synthetic
  source 1..20: mol_type = other RNA
tcttggtcatgtaattgtgt

SEQ ID NO: 2355 - RNA, 20 nt, synthetic construct
  misc_feature 1..20: note = Synthetic
  source 1..20: mol_type = other RNA
gccaggctgaaggcggcgtt

SEQ ID NO: 2356 - RNA, 20 nt, synthetic construct
  misc_feature 1..20: note = Synthetic
  source 1..20: mol_type = other RNA
cgatggcctcggtggccagg

SEQ ID NO: 2357 - RNA, 20 nt, synthetic construct
  misc_feature 1..20: note = Synthetic
  source 1..20: mol_type = other RNA
tccagggcctcccccgtgag

SEQ ID NO: 2358 - RNA, 20 nt, synthetic construct
  misc_feature 1..20: note = Synthetic
  source 1..20: mol_type = other RNA
tcccgtccagggcctccccc

SEQ ID NO: 2359 - RNA, 20 nt, synthetic construct
  misc_feature 1..20: note = Synthetic
  source 1..20: mol_type = other RNA
gcgccgatacccgtcccgtc

SEQ ID NO: 2360 - RNA, 17 nt, synthetic construct
  misc_feature 1..17: note = Synthetic
  source 1..17: mol_type = other RNA
atcccggagggtcgcgg

SEQ ID NO: 2361 - RNA, 17 nt, synthetic construct
  misc_feature 1..17: note = Synthetic
  source 1..17: mol_type = other RNA
ggcataccggtatcccg

SEQ ID NO: 2362 - RNA, 17 nt, synthetic construct
  misc_feature 1..17: note = Synthetic
  source 1..17: mol_type = other RNA
cgcggcataccggtatc

SEQ ID NO: 2363 - RNA, 17 nt, synthetic construct
  misc_feature 1..17: note = Synthetic
  source 1..17: mol_type = other RNA
acctcgatcgtgctaag

SEQ ID NO: 2364 - RNA, 17 nt, synthetic construct
  misc_feature 1..17: note = Synthetic
  source 1..17: mol_type = other RNA
gccacctcgatcgtgct

SEQ ID NO: 2365 - RNA, 17 nt, synthetic construct
  misc_feature 1..17: note = Synthetic
  source 1..17: mol_type = other RNA
tttgcatcggagcgcac

SEQ ID NO: 2366 - RNA, 17 nt, synthetic construct
  misc_feature 1..17: note = Synthetic
  source 1..17: mol_type = other RNA
cgtacaggctgtttgca

SEQ ID NO: 2367 - RNA, 17 nt, synthetic construct
  misc_feature 1..17: note = Synthetic
  source 1..17: mol_type = other RNA
acgaccccagcagggcg

SEQ ID NO: 2368 - RNA, 17 nt, synthetic construct
  misc_feature 1..17: note = Synthetic
  source 1..17: mol_type = other RNA
ttgcaatacgaccccag

SEQ ID NO: 2369 - RNA, 17 nt, synthetic construct
  misc_feature 1..17: note = Synthetic
  source 1..17: mol_type = other RNA
agaaagcgcacgagcga

SEQ ID NO: 2370 - RNA, 17 nt, synthetic construct
  misc_feature 1..17: note = Synthetic
  source 1..17: mol_type = other RNA
cgagctccagaaagcgc

SEQ ID NO: 2371 - RNA, 17 nt, synthetic construct
  misc_feature 1..17: note = Synthetic
  source 1..17: mol_type = other RNA
accgacaacccgagctc

SEQ ID NO: 2372 - RNA, 17 nt, synthetic construct
  misc_feature 1..17: note = Synthetic
  source 1..17: mol_type = other RNA
cgcacgccaccgacaac

SEQ ID NO: 2373 - RNA, 17 nt, synthetic construct
  misc_feature 1..17: note = Synthetic
  source 1..17: mol_type = other RNA
gttcatgtaggccagct

SEQ ID NO: 2374 - RNA, 17 nt, synthetic construct
  misc_feature 1..17: note = Synthetic
  source 1..17: mol_type = other RNA
tcagcggctggtggacc

SEQ ID NO: 2375 - RNA, 17 nt, synthetic construct
  misc_feature 1..17: note = Synthetic
  source 1..17: mol_type = other RNA
cgggcaatcagcggctg

SEQ ID NO: 2376 - RNA, 17 nt, synthetic construct
  misc_feature 1..17: note = Synthetic
  source 1..17: mol_type = other RNA
atggggtgcgggccgtc

SEQ ID NO: 2377 - RNA, 17 nt, synthetic construct
  misc_feature 1..17: note = Synthetic
  source 1..17: mol_type = other RNA
gggttgctcgatggggt

SEQ ID NO: 2378 - RNA, 17 nt, synthetic construct
  misc_feature 1..17: note = Synthetic
  source 1..17: mol_type = other RNA
tgtgtgtgggttgctcg

SEQ ID NO: 2379 - RNA, 17 nt, synthetic construct
  misc_feature 1..17: note = Synthetic
  source 1..17: mol_type = other RNA
tggtcatgtaattgtgt

SEQ ID NO: 2380 - RNA, 17 nt, synthetic construct
  misc_feature 1..17: note = Synthetic
  source 1..17: mol_type = other RNA
aggctgaaggcggcgtt

SEQ ID NO: 2381 - RNA, 17 nt, synthetic construct
  misc_feature 1..17: note = Synthetic
  source 1..17: mol_type = other RNA
tggcctcggtggccagg

SEQ ID NO: 2382 - RNA, 17 nt, synthetic construct
  misc_feature 1..17: note = Synthetic
  source 1..17: mol_type = other RNA
agggcctcccccgtgag

SEQ ID NO: 2383 - RNA, 17 nt, synthetic construct
  misc_feature 1..17: note = Synthetic
  source 1..17: mol_type = other RNA
cgtccagggcctccccc

SEQ ID NO: 2384 - RNA, 17 nt, synthetic construct
  misc_feature 1..17: note = Synthetic
  source 1..17: mol_type = other RNA
ccgatacccgtcccgtc

SEQ ID NO: 2385 - RNA, 20 nt, synthetic construct
  misc_feature 1..20: note = Synthetic
  source 1..20: mol_type = other RNA
ccaggccgtcctcggggcgt

SEQ ID NO: 2386 - RNA, 20 nt, synthetic construct
  misc_feature 1..20: note = Synthetic
  source 1..20: mol_type = other RNA
accagatgctgcacgtgctg

SEQ ID NO: 2387 - RNA, 20 nt, synthetic construct
  misc_feature 1..20: note = Synthetic
  source 1..20: mol_type = other RNA
tgttgccgatgcaacgatac

SEQ ID NO: 2388 - RNA, 20 nt, synthetic construct
  misc_feature 1..20: note = Synthetic
  source 1..20: mol_type = other RNA
gacaacggccgcctggccac

SEQ ID NO: 2389 - RNA, 20 nt, synthetic construct
  misc_feature 1..20: note = Synthetic
  source 1..20: mol_type = other RNA
cgcctggccaccagggtggc

SEQ ID NO: 2390 - RNA, 20 nt, synthetic construct
  misc_feature 1..20: note = Synthetic
  source 1..20: mol_type = other RNA
ggcccgggcgaccctggtcg

SEQ ID NO: 2391 - RNA, 20 nt, synthetic construct
  misc_feature 1..20: note = Synthetic
  source 1..20: mol_type = other RNA
accctggtcgccgagctaaa

SEQ ID NO: 2392 - RNA, 20 nt, synthetic construct
  misc_feature 1..20: note = Synthetic
  source 1..20: mol_type = other RNA
cgagctaaagcgaagcttct

SEQ ID NO: 2393 - RNA, 20 nt, synthetic construct
  misc_feature 1..20: note = Synthetic
  source 1..20: mol_type = other RNA
taaagcgaagcttctgcgag

SEQ ID NO: 2394 - RNA, 20 nt, synthetic construct
  misc_feature 1..20: note = Synthetic
  source 1..20: mol_type = other RNA
tctgcgagacgagctttttc

SEQ ID NO: 2395 - RNA, 20 nt, synthetic construct
  misc_feature 1..20: note = Synthetic
  source 1..20: mol_type = other RNA
cgagctttttcctgggcaag

SEQ ID NO: 2396 - RNA, 20 nt, synthetic construct
  misc_feature 1..20: note = Synthetic
  source 1..20: mol_type = other RNA
ctgggcaaggcgggccaccg

SEQ ID NO: 2397 - RNA, 20 nt, synthetic construct
  misc_feature 1..20: note = Synthetic
  source 1..20: mol_type = other RNA
gggccaccgccgggaggccg

SEQ ID NO: 2398 - RNA, 20 nt, synthetic construct
  misc_feature 1..20: note = Synthetic
  source 1..20: mol_type = other RNA
aggccgtcgaggcctggctc

SEQ ID NO: 2399 - RNA, 20 nt, synthetic construct
  misc_feature 1..20: note = Synthetic
  source 1..20: mol_type = other RNA
tctgacgcatgccgacacgc

SEQ ID NO: 2400 - RNA, 20 nt, synthetic construct
  misc_feature 1..20: note = Synthetic
  source 1..20: mol_type = other RNA
cacgcgcgggcggccggtcg

SEQ ID NO: 2401 - RNA, 20 nt, synthetic construct
  misc_feature 1..20: note = Synthetic
  source 1..20: mol_type = other RNA
agcgcctcctgcagtccttc

SEQ ID NO: 2402 - RNA, 20 nt, synthetic construct
  misc_feature 1..20: note = Synthetic
  source 1..20: mol_type = other RNA
tcctgcagtccttcctgaaa

SEQ ID NO: 2403 - RNA, 20 nt, synthetic construct
  misc_feature 1..20: note = Synthetic
  source 1..20: mol_type = other RNA
tgcagtccttcctgaaagtg

SEQ ID NO: 2404 - RNA, 20 nt, synthetic construct
  misc_feature 1..20: note = Synthetic
  source 1..20: mol_type = other RNA
cttcctgaaagtggaggaca

SEQ ID NO: 2405 - RNA, 20 nt, synthetic construct
  misc_feature 1..20: note = Synthetic
  source 1..20: mol_type = other RNA
cgacgtgccggtgacgtacg

SEQ ID NO: 2406 - RNA, 20 nt, synthetic construct
  misc_feature 1..20: note = Synthetic
  source 1..20: mol_type = other RNA
tgacgtacggcgagatggtc

SEQ ID NO: 2407 - RNA, 20 nt, synthetic construct
  misc_feature 1..20: note = Synthetic
  source 1..20: mol_type = other RNA
gtacggcgagatggtcctga

SEQ ID NO: 2408 - RNA, 20 nt, synthetic construct
  misc_feature 1..20: note = Synthetic
  source 1..20: mol_type = other RNA
acctggtcacggcgctcgtg

SEQ ID NO: 2409 - RNA, 20 nt, synthetic construct
  misc_feature 1..20: note = Synthetic
  source 1..20: mol_type = other RNA
ctcgtgatgggcaaggccgt

SEQ ID NO: 2410 - RNA, 20 nt, synthetic construct
  misc_feature 1..20: note = Synthetic
  source 1..20: mol_type = other RNA
tgggcaaggccgtgcgaagt

SEQ ID NO: 2411 - RNA, 20 nt, synthetic construct
  misc_feature 1..20: note = Synthetic
  source 1..20: mol_type = other RNA
ccgtgcgaagtctggacgac

SEQ ID NO: 2412 - RNA, 20 nt, synthetic construct
  misc_feature 1..20: note = Synthetic
  source 1..20: mol_type = other RNA
acgacgtgggccgccacctg

SEQ ID NO: 2413 - RNA, 20 nt, synthetic construct
  misc_feature 1..20: note = Synthetic
  source 1..20: mol_type = other RNA
gccgccacctgctggagatg

SEQ ID NO: 2414 - RNA, 20 nt, synthetic construct
  misc_feature 1..20: note = Synthetic
  source 1..20: mol_type = other RNA
gccacctgctggagatgcag

SEQ ID NO: 2415 - RNA, 20 nt, synthetic construct
  misc_feature 1..20: note = Synthetic
  source 1..20: mol_type = other RNA
tgcaggaggagcagctcgac

SEQ ID NO: 2416 - RNA, 20 nt, synthetic construct
  misc_feature 1..20: note = Synthetic
  source 1..20: mol_type = other RNA
tcgacctgaaccggcagacg

SEQ ID NO: 2417 - RNA, 20 nt, synthetic construct
  misc_feature 1..20: note = Synthetic
  source 1..20: mol_type = other RNA
cctgaaccggcagacgctgg

SEQ ID NO: 2418 - RNA, 20 nt, synthetic construct
  misc_feature 1..20: note = Synthetic
  source 1..20: mol_type = other RNA
ccggcagacgctggacgagc

SEQ ID NO: 2419 - RNA, 20 nt, synthetic construct
  misc_feature 1..20: note = Synthetic
  source 1..20: mol_type = other RNA
ggcagacgctggacgagctc

SEQ ID NO: 2420 - RNA, 20 nt, synthetic construct
  misc_feature 1..20: note = Synthetic
  source 1..20: mol_type = other RNA
cccagacgacgcgcgtgcgc

SEQ ID NO: 2421 - RNA, 20 nt, synthetic construct
  misc_feature 1..20: note = Synthetic
  source 1..20: mol_type = other RNA
cgcggatctggtgtccatcg

SEQ ID NO: 2422 - RNA, 20 nt, synthetic construct
  misc_feature 1..20: note = Synthetic
  source 1..20: mol_type = other RNA
cggatctggtgtccatcggc

SEQ ID NO: 2423 - RNA, 20 nt, synthetic construct
  misc_feature 1..20: note = Synthetic
  source 1..20: mol_type = other RNA
tcggcgagaagctggtcttt

SEQ ID NO: 2424 - RNA, 20 nt, synthetic construct
  misc_feature 1..20: note = Synthetic
  source 1..20: mol_type = other RNA
agctggtctttctggaggcc

SEQ ID NO: 2425 - RNA, 20 nt, synthetic construct
  misc_feature 1..20: note = Synthetic
  source 1..20: mol_type = other RNA
tggtctttctggaggccctg

SEQ ID NO: 2426 - RNA, 20 nt, synthetic construct
  misc_feature 1..20: note = Synthetic
  source 1..20: mol_type = other RNA
ccaacgttccctaccccctg

SEQ ID NO: 2427 - RNA, 20 nt, synthetic construct
  misc_feature 1..20: note = Synthetic
  source 1..20: mol_type = other RNA
cctaccccctggtgggcgcc

SEQ ID NO: 2428 - RNA, 20 nt, synthetic construct
  misc_feature 1..20: note = Synthetic
  source 1..20: mol_type = other RNA
acctgacgttcgtcctgccc

SEQ ID NO: 2429 - RNA, 20 nt, synthetic construct
  misc_feature 1..20: note = Synthetic
  source 1..20: mol_type = other RNA
tgggcctgttcaatccggtc

SEQ ID NO: 2430 - RNA, 20 nt, synthetic construct
  misc_feature 1..20: note = Synthetic
  source 1..20: mol_type = other RNA
ggaacggtttgccgcgcacg

SEQ ID NO: 2431 - RNA, 20 nt, synthetic construct
  misc_feature 1..20: note = Synthetic
  source 1..20: mol_type = other RNA
tagtccccgcccccggccac

SEQ ID NO: 2432 - RNA, 20 nt, synthetic construct
  misc_feature 1..20: note = Synthetic
  source 1..20: mol_type = other RNA
ccgccccgccagctgttttt

SEQ ID NO: 2433 - RNA, 20 nt, synthetic construct
  misc_feature 1..20: note = Synthetic
  source 1..20: mol_type = other RNA
gccagctgtttttttggggg

SEQ ID NO: 2434 - RNA, 20 nt, synthetic construct
  misc_feature 1..20: note = Synthetic
  source 1..20: mol_type = other RNA
gccaggtgctgcgcctgtct

SEQ ID NO: 2435 - RNA, 20 nt, synthetic construct
  misc_feature 1..20: note = Synthetic
  source 1..20: mol_type = other RNA
cctgtctctggaacacgcga

SEQ ID NO: 2436 - RNA, 20 nt, synthetic construct
  misc_feature 1..20: note = Synthetic
  source 1..20: mol_type = other RNA
ccgtgtgccacccttcgctg

SEQ ID NO: 2437 - RNA, 20 nt, synthetic construct
  misc_feature 1..20: note = Synthetic
  source 1..20: mol_type = other RNA
gatgaacgttgacgcggcgg

SEQ ID NO: 2438 - RNA, 20 nt, synthetic construct
  misc_feature 1..20: note = Synthetic
  source 1..20: mol_type = other RNA
gggccttaaccgcgaccccg

SEQ ID NO: 2439 - RNA, 20 nt, synthetic construct
  misc_feature 1..20: note = Synthetic
  source 1..20: mol_type = other RNA
cgtcgaagccgccaatccgt

SEQ ID NO: 2440 - RNA, 20 nt, synthetic construct
  misc_feature 1..20: note = Synthetic
  source 1..20: mol_type = other RNA
cagacatgcagcagctgttt

SEQ ID NO: 2441 - RNA, 20 nt, synthetic construct
  misc_feature 1..20: note = Synthetic
  source 1..20: mol_type = other RNA
cagcagctgtttttgaacgc

SEQ ID NO: 2442 - RNA, 20 nt, synthetic construct
  misc_feature 1..20: note = Synthetic
  source 1..20: mol_type = other RNA
ctgggggcagcgcctggccc

SEQ ID NO: 2443 - RNA, 20 nt, synthetic construct
  misc_feature 1..20: note = Synthetic
  source 1..20: mol_type = other RNA
gggcagcgcctggcccacgg

SEQ ID NO: 2444 - RNA, 20 nt, synthetic construct
  misc_feature 1..20: note = Synthetic
  source 1..20: mol_type = other RNA
ctggcccacgggcgggtccg

SEQ ID NO: 2445 - RNA, 20 nt, synthetic construct
  misc_feature 1..20: note = Synthetic
  source 1..20: mol_type = other RNA
acgggcgggtccgatgggtc

SEQ ID NO: 2446 - RNA, 20 nt, synthetic construct
  misc_feature 1..20: note = Synthetic
  source 1..20: mol_type = other RNA
tcgcggaaggccagatgacc

SEQ ID NO: 2447 - RNA, 20 nt, synthetic construct
  misc_feature 1..20: note = Synthetic
  source 1..20: mol_type = other RNA
cgacaacgccaacctggctc

SEQ ID NO: 2448 - RNA, 20 nt, synthetic construct
  misc_feature 1..20: note = Synthetic
  source 1..20: mol_type = other RNA
accccgcgttcgacttcttt

SEQ ID NO: 2449 - RNA, 20 nt, synthetic construct
  misc_feature 1..20: note = Synthetic
  source 1..20: mol_type = other RNA
tctttgtgggggtggccgac

SEQ ID NO: 2450 - RNA, 20 nt, synthetic construct
  misc_feature 1..20: note = Synthetic
  source 1..20: mol_type = other RNA
gggtggccgacgtggagctg

SEQ ID NO: 2451 - RNA, 20 nt, synthetic construct
  misc_feature 1..20: note = Synthetic
  source 1..20: mol_type = other RNA
gggacgttcccccggccggc

SEQ ID NO: 2452 - RNA, 20 nt, synthetic construct
  misc_feature 1..20: note = Synthetic
  source 1..20: mol_type = other RNA
tccaggccacctggcgcgtg

SEQ ID NO: 2453 - RNA, 20 nt, synthetic construct
  misc_feature 1..20: note = Synthetic
  source 1..20: mol_type = other RNA
gcgctatgtccggcggcgtt

SEQ ID NO: 2454 - RNA, 20 nt, synthetic construct
  misc_feature 1..20: note = Synthetic
  source 1..20: mol_type = other RNA
ccggcggcgttccgggacgc

SEQ ID NO: 2455 - RNA, 20 nt, synthetic construct
  misc_feature 1..20: note = Synthetic
  source 1..20: mol_type = other RNA
cgttccgggacgcccggggc

SEQ ID NO: 2456 - RNA, 20 nt, synthetic construct
  misc_feature 1..20: note = Synthetic
  source 1..20: mol_type = other RNA
gggacgcccggggcctggag

SEQ ID NO: 2457 - RNA, 20 nt, synthetic construct
  misc_feature 1..20: note = Synthetic
  source 1..20: mol_type = other RNA
cccggggcctggagctgggg

SEQ ID NO: 2458 - RNA, 20 nt, synthetic construct
  misc_feature 1..20: note = Synthetic
  source 1..20: mol_type = other RNA
cgccaccatcgccgccgttc

SEQ ID NO: 2459 - RNA, 20 nt, synthetic construct
  misc_feature 1..20: note = Synthetic
  source 1..20: mol_type = other RNA
gcaggccgccatacacggca

SEQ ID NO: 2460 - RNA, 20 nt, synthetic construct
  misc_feature 1..20: note = Synthetic
  source 1..20: mol_type = other RNA
gtccagtgcatcaccagcta

SEQ ID NO: 2461 - RNA, 20 nt, synthetic construct
  misc_feature 1..20: note = Synthetic
  source 1..20: mol_type = other RNA
acacgcggtgcgcggcgttc

SEQ ID NO: 2462 - RNA, 20 nt, synthetic construct
  misc_feature 1..20: note = Synthetic
  source 1..20: mol_type = other RNA
ctcgtacgtcgtgacctacc

SEQ ID NO: 2463 - RNA, 20 nt, synthetic construct
  misc_feature 1..20: note = Synthetic
  source 1..20: mol_type = other RNA
ctacctcgggggagaccttc

SEQ ID NO: 2464 - RNA, 20 nt, synthetic construct
  misc_feature 1..20: note = Synthetic
  source 1..20: mol_type = other RNA
acctcgggggagaccttccc

SEQ ID NO: 2465 - RNA, 20 nt, synthetic construct
  misc_feature 1..20: note = Synthetic
  source 1..20: mol_type = other RNA
gaggagtgcatggccgtgta

SEQ ID NO: 2466 - RNA, 20 nt, synthetic construct
  misc_feature 1..20: note = Synthetic
  source 1..20: mol_type = other RNA
ccgggacctggtggcgcacg

SEQ ID NO: 2467 - RNA, 20 nt, synthetic construct
  misc_feature 1..20: note = Synthetic
  source 1..20: mol_type = other RNA
atgactttaccctgaccggc

SEQ ID NO: 2468 - RNA, 20 nt, synthetic construct
  misc_feature 1..20: note = Synthetic
  source 1..20: mol_type = other RNA
ttaccctgaccggcccggag

SEQ ID NO: 2469 - RNA, 20 nt, synthetic construct
  misc_feature 1..20: note = Synthetic
  source 1..20: mol_type = other RNA
cctgaccggcccggagctgg

SEQ ID NO: 2470 - RNA, 20 nt, synthetic construct
  misc_feature 1..20: note = Synthetic
  source 1..20: mol_type = other RNA
gctgggcgggcaggcgcaag

SEQ ID NO: 2471 - RNA, 20 nt, synthetic construct
  misc_feature 1..20: note = Synthetic
  source 1..20: mol_type = other RNA
gcgggcaggcgcaagccgag

SEQ ID NO: 2472 - RNA, 20 nt, synthetic construct
  misc_feature 1..20: note = Synthetic
  source 1..20: mol_type = other RNA
gccgagctgaatcacctaat

SEQ ID NO: 2473 - RNA, 20 nt, synthetic construct
  misc_feature 1..20: note = Synthetic
  source 1..20: mol_type = other RNA
gcgctgctgccacccctcgt

SEQ ID NO: 2474 - RNA, 20 nt, synthetic construct
  misc_feature 1..20: note = Synthetic
  source 1..20: mol_type = other RNA
ccctgatgcggcgcgcggcc

SEQ ID NO: 2475 - RNA, 20 nt, synthetic construct
  misc_feature 1..20: note = Synthetic
  source 1..20: mol_type = other RNA
ctggaccgccatcgcgactg

SEQ ID NO: 2476 - RNA, 20 nt, synthetic construct
  misc_feature 1..20: note = Synthetic
  source 1..20: mol_type = other RNA
atcgcgactgccgggttagc

SEQ ID NO: 2477 - RNA, 20 nt, synthetic construct
  misc_feature 1..20: note = Synthetic
  source 1..20: mol_type = other RNA
cggcatgtaacgtggcgacc

SEQ ID NO: 2478 - RNA, 20 nt, synthetic construct
  misc_feature 1..20: note = Synthetic
  source 1..20: mol_type = other RNA
ctgctgcacaacacccaggc

SEQ ID NO: 2479 - RNA, 20 nt, synthetic construct
  misc_feature 1..20: note = Synthetic
  source 1..20: mol_type = other RNA
acaacacccaggcccgagcc

SEQ ID NO: 2480 - RNA, 20 nt, synthetic construct
  misc_feature 1..20: note = Synthetic
  source 1..20: mol_type = other RNA
aggcccgagccgcggacgcc

SEQ ID NO: 2481 - RNA, 20 nt, synthetic construct
  misc_feature 1..20: note = Synthetic
  source 1..20: mol_type = other RNA
gccgcggatgaccggccgca

SEQ ID NO: 2482 - RNA, 20 nt, synthetic construct
  misc_feature 1..20: note = Synthetic
  source 1..20: mol_type = other RNA
atgaccggccgcaccggggg

SEQ ID NO: 2483 - RNA, 20 nt, synthetic construct
  misc_feature 1..20: note = Synthetic
  source 1..20: mol_type = other RNA
cggccgcaccggggggcgga

SEQ ID NO: 2484 - RNA, 20 nt, synthetic construct
  misc_feature 1..20: note = Synthetic
  source 1..20: mol_type = other RNA
gtgatggtgcccgccttctc

SEQ ID NO: 2485 - RNA, 20 nt, synthetic construct
  misc_feature 1..20: note = Synthetic
  source 1..20: mol_type = other RNA
cgcggggccgctgctgcacc

SEQ ID NO: 2486 - RNA, 20 nt, synthetic construct
  misc_feature 1..20: note = Synthetic
  source 1..20: mol_type = other RNA
accgcgtatacgccaccctg

SEQ ID NO: 2487 - RNA, 20 nt, synthetic construct
  misc_feature 1..20: note = Synthetic
  source 1..20: mol_type = other RNA
ccctgcagaacatggtggtc

SEQ ID NO: 2488 - RNA, 20 nt, synthetic construct
  misc_feature 1..20: note = Synthetic
  source 1..20: mol_type = other RNA
ggtcccggagatcgcccccg

SEQ ID NO: 2489 - RNA, 20 nt, synthetic construct
  misc_feature 1..20: note = Synthetic
  source 1..20: mol_type = other RNA
tcccggagatcgcccccggc

SEQ ID NO: 2490 - RNA, 20 nt, synthetic construct
  misc_feature 1..20: note = Synthetic
  source 1..20: mol_type = other RNA
agtgccccagcgaccccgtg

SEQ ID NO: 2491 - RNA, 20 nt, synthetic construct
  misc_feature 1..20: note = Synthetic
  source 1..20: mol_type = other RNA
ggtcaacgccatgtttcaca

SEQ ID NO: 2492 - RNA, 20 nt, synthetic construct
  misc_feature 1..20: note = Synthetic
  source 1..20: mol_type = other RNA
ttcacaacgggcgcgtggta

SEQ ID NO: 2493 - RNA, 20 nt, synthetic construct
  misc_feature 1..20: note = Synthetic
  source 1..20: mol_type = other RNA
caacgggcgcgtggtagtgg

SEQ ID NO: 2494 - RNA, 20 nt, synthetic construct
  misc_feature 1..20: note = Synthetic
  source 1..20: mol_type = other RNA
ggtgctggcccacaacatgg

SEQ ID NO: 2495 - RNA, 20 nt, synthetic construct
  misc_feature 1..20: note = Synthetic
  source 1..20: mol_type = other RNA
tctgctcggcggcgcccgac

SEQ ID NO: 2496 - RNA, 20 nt, synthetic construct
  misc_feature 1..20: note = Synthetic
  source 1..20: mol_type = other RNA
caccaacatgcgcatattcg

SEQ ID NO: 2497 - RNA, 20 nt, synthetic construct
  misc_feature 1..20: note = Synthetic
  source 1..20: mol_type = other RNA
attcgacggggcgttgcacg

SEQ ID NO: 2498 - RNA, 20 nt, synthetic construct
  misc_feature 1..20: note = Synthetic
  source 1..20: mol_type = other RNA
tgctgatggccccccagcat

SEQ ID NO: 2499 - RNA, 20 nt, synthetic construct
  misc_feature 1..20: note = Synthetic
  source 1..20: mol_type = other RNA
ccccgtccacgcgctgttcg

SEQ ID NO: 2500 - RNA, 20 nt, synthetic construct
  misc_feature 1..20: note = Synthetic
  source 1..20: mol_type = other RNA
tcgccggggccgaccacgtg

SEQ ID NO: 2501 - RNA, 20 nt, synthetic construct
  misc_feature 1..20: note = Synthetic
  source 1..20: mol_type = other RNA
tccccctggtccccccggct

SEQ ID NO: 2502 - RNA, 20 nt, synthetic construct
  misc_feature 1..20: note = Synthetic
  source 1..20: mol_type = other RNA
gcccgtcgtgcagcacgtcc

SEQ ID NO: 2503 - RNA, 20 nt, synthetic construct
  misc_feature 1..20: note = Synthetic
  source 1..20: mol_type = other RNA
ccgtcgtgcagcacgtccgc

SEQ ID NO: 2504 - RNA, 20 nt, synthetic construct
  misc_feature 1..20: note = Synthetic
  source 1..20: mol_type = other RNA
gcacgtccgcgagagcgcgg

SEQ ID NO: 2505 - RNA, 20 nt, synthetic construct
  misc_feature 1..20: note = Synthetic
  source 1..20: mol_type = other RNA
tccgcgagagcgcggccggg

SEQ ID NO: 2506 - RNA, 20 nt, synthetic construct
  misc_feature 1..20: note = Synthetic
  source 1..20: mol_type = other RNA
cgctgacctacgcgctcatg

SEQ ID NO: 2507 - RNA, 20 nt, synthetic construct
  misc_feature 1..20: note = Synthetic
  source 1..20: mol_type = other RNA
ccttgcatcatcagctcaag

SEQ ID NO: 2508 - RNA, 20 nt, synthetic construct
  misc_feature 1..20: note = Synthetic
  source 1..20: mol_type = other RNA
gctcaagacgggcctccatc

SEQ ID NO: 2509 - RNA, 20 nt, synthetic construct
  misc_feature 1..20: note = Synthetic
  source 1..20: mol_type = other RNA
gacgggcctccatcccgggt

SEQ ID NO: 2510 - RNA, 20 nt, synthetic construct
  misc_feature 1..20: note = Synthetic
  source 1..20: mol_type = other RNA
ttgggttcaccgtcgtccga

SEQ ID NO: 2511 - RNA, 20 nt, synthetic construct
  misc_feature 1..20: note = Synthetic
  source 1..20: mol_type = other RNA
ccgacaggaccgctttgtga

SEQ ID NO: 2512 - RNA, 20 nt, synthetic construct
  misc_feature 1..20: note = Synthetic
  source 1..20: mol_type = other RNA
gacaggaccgctttgtgact

SEQ ID NO: 2513 - RNA, 20 nt, synthetic construct
  misc_feature 1..20: note = Synthetic
  source 1..20: mol_type = other RNA
tgactgagaacgtgctgttc

SEQ ID NO: 2514 - RNA, 20 nt, synthetic construct
  misc_feature 1..20: note = Synthetic
  source 1..20: mol_type = other RNA
tgctgttctcggagcgcgcg

SEQ ID NO: 2515 - RNA, 20 nt, synthetic construct
  misc_feature 1..20: note = Synthetic
  source 1..20: mol_type = other RNA
gcgcgtcggaggcgtacttc

SEQ ID NO: 2516 - RNA, 20 nt, synthetic construct
  misc_feature 1..20: note = Synthetic
  source 1..20: mol_type = other RNA
ccagctccaggtggcccggc

SEQ ID NO: 2517 - RNA, 20 nt, synthetic construct
  misc_feature 1..20: note = Synthetic
  source 1..20: mol_type = other RNA
ggtggcccggcacgaaactg

SEQ ID NO: 2518 - RNA, 20 nt, synthetic construct
  misc_feature 1..20: note = Synthetic
  source 1..20: mol_type = other RNA
tcacgctcacccagccgcgc

SEQ ID NO: 2519 - RNA, 20 nt, synthetic construct
  misc_feature 1..20: note = Synthetic
  source 1..20: mol_type = other RNA
tcacccagccgcgcgcgaac

SEQ ID NO: 2520 - RNA, 20 nt, synthetic construct
  misc_feature 1..20: note = Synthetic
  source 1..20: mol_type = other RNA
agccgcgcgcgaacgtggac

SEQ ID NO: 2521 - RNA, 20 nt, synthetic construct
  misc_feature 1..20: note = Synthetic
  source 1..20: mol_type = other RNA
gcgcgaacgtggacctgggc

SEQ ID NO: 2522 - RNA, 20 nt, synthetic construct
  misc_feature 1..20: note = Synthetic
  source 1..20: mol_type = other RNA
tccgcaaccccgtcaccgac

SEQ ID NO: 2523 - RNA, 20 nt, synthetic construct
  misc_feature 1..20: note = Synthetic
  source 1..20: mol_type = other RNA
accttccccaaaacttttac

SEQ ID NO: 2524 - RNA, 20 nt, synthetic construct
  misc_feature 1..20: note = Synthetic
  source 1..20: mol_type = other RNA
ccaaaacttttacctgggcc

SEQ ID NO: 2525 - RNA, 20 nt, synthetic construct
  misc_feature 1..20: note = Synthetic
  source 1..20: mol_type = other RNA
gccgcggggctccccctctc

SEQ ID NO: 2526 - RNA, 20 nt, synthetic construct
  misc_feature 1..20: note = Synthetic
  source 1..20: mol_type = other RNA
aacgcggcagccgtgtacct

SEQ ID NO: 2527 - RNA, 20 nt, synthetic construct
  misc_feature 1..20: note = Synthetic
  source 1..20: mol_type = other RNA
acctgcggaacgcggtcgtg

SEQ ID NO: 2528 - RNA, 20 nt, synthetic construct
  misc_feature 1..20: note = Synthetic
  source 1..20: mol_type = other RNA
cggtcgtggcgggaaaccgc

SEQ ID NO: 2529 - RNA, 20 nt, synthetic construct
  misc_feature 1..20: note = Synthetic
  source 1..20: mol_type = other RNA
ggcccagcccgtccccgtgt

SEQ ID NO: 2530 - RNA, 20 nt, synthetic construct
  misc_feature 1..20: note = Synthetic
  source 1..20: mol_type = other RNA
cgcccaggtgccgcggcgcg

SEQ ID NO: 2531 - RNA, 20 nt, synthetic construct
  misc_feature 1..20: note = Synthetic
  source 1..20: mol_type = other RNA
aggtgccgcggcgcgcaggg

SEQ ID NO: 2532 - RNA, 20 nt, synthetic construct
  misc_feature 1..20: note = Synthetic
  source 1..20: mol_type = other RNA
gcgcagggatggaccacggc

SEQ ID NO: 2533 - RNA, 20 nt, synthetic construct
  misc_feature 1..20: note = Synthetic
  source 1..20: mol_type = other RNA
ccacggccaggacgccgtgt

SEQ ID NO: 2534 - RNA, 20 nt, synthetic construct
  misc_feature 1..20: note = Synthetic
  source 1..20: mol_type = other RNA
ttccgccggccctgcaaccc

SEQ ID NO: 2535 - RNA, 20 nt, synthetic construct
  misc_feature 1..20: note = Synthetic
  source 1..20: mol_type = other RNA
caacccccggggacgcgccg

SEQ ID NO: 2536 - RNA, 20 nt, synthetic construct
  misc_feature 1..20: note = Synthetic
  source 1..20: mol_type = other RNA
gcgccgccgggggcgtttac

SEQ ID NO: 2537 - RNA, 20 nt, synthetic construct
  misc_feature 1..20: note = Synthetic
  source 1..20: mol_type = other RNA
ggggcgtttacgcgggggac

SEQ ID NO: 2538 - RNA, 20 nt, synthetic construct
  misc_feature 1..20: note = Synthetic
  source 1..20: mol_type = other RNA
gcgtttacgcgggggacaag

SEQ ID NO: 2539 - RNA, 20 nt, synthetic construct
  misc_feature 1..20: note = Synthetic
  source 1..20: mol_type = other RNA
ccctcatgtacgaccacggc

SEQ ID NO: 2540 - RNA, 20 nt, synthetic construct
  misc_feature 1..20: note = Synthetic
  source 1..20: mol_type = other RNA
cacggccagagcgacccgtc

SEQ ID NO: 2541 - RNA, 20 nt, synthetic construct
  misc_feature 1..20: note = Synthetic
  source 1..20: mol_type = other RNA
ttcgcggccacggccaaccc

SEQ ID NO: 2542 - RNA, 20 nt, synthetic construct
  misc_feature 1..20: note = Synthetic
  source 1..20: mol_type = other RNA
ggcgtcgcagcgattttcgt

SEQ ID NO: 2543 - RNA, 20 nt, synthetic construct
  misc_feature 1..20: note = Synthetic
  source 1..20: mol_type = other RNA
gtacggggacctgctctata

SEQ ID NO: 2544 - RNA, 20 nt, synthetic construct
  misc_feature 1..20: note = Synthetic
  source 1..20: mol_type = other RNA
taacggggcctaccacctca

SEQ ID NO: 2545 - RNA, 20 nt, synthetic construct
  misc_feature 1..20: note = Synthetic
  source 1..20: mol_type = other RNA
tcgccgccaaacatcgctgc

SEQ ID NO: 2546 - RNA, 20 nt, synthetic construct
  misc_feature 1..20: note = Synthetic
  source 1..20: mol_type = other RNA
gctgcctggagcgcctgatc

SEQ ID NO: 2547 - RNA, 20 nt, synthetic construct
  misc_feature 1..20: note = Synthetic
  source 1..20: mol_type = other RNA
tggagcgcctgatcgtggag

SEQ ID NO: 2548 - RNA, 20 nt, synthetic construct
  misc_feature 1..20: note = Synthetic
  source 1..20: mol_type = other RNA
acgtacagtttaagcgcccc

SEQ ID NO: 2549 - RNA, 20 nt, synthetic construct
  misc_feature 1..20: note = Synthetic
  source 1..20: mol_type = other RNA
taagcgccccccggggtgcc

SEQ ID NO: 2550 - RNA, 20 nt, synthetic construct
  misc_feature 1..20: note = Synthetic
  source 1..20: mol_type = other RNA
ccccggggtgccgcgaactc

SEQ ID NO: 2551 - RNA, 20 nt, synthetic construct
  misc_feature 1..20: note = Synthetic
  source 1..20: mol_type = other RNA
cggggtgccgcgaactcgtg

SEQ ID NO: 2552 - RNA, 20 nt, synthetic construct
  misc_feature 1..20: note = Synthetic
  source 1..20: mol_type = other RNA
aggacccgtgtggcctgttt

SEQ ID NO: 2553 - RNA, 20 nt, synthetic construct
  misc_feature 1..20: note = Synthetic
  source 1..20: mol_type = other RNA
cctcctccgcagtgcccgca

SEQ ID NO: 2554 - RNA, 20 nt, synthetic construct
  misc_feature 1..20: note = Synthetic
  source 1..20: mol_type = other RNA
cgcaacggggaagcccacgc

SEQ ID NO: 2555 - RNA, 20 nt, synthetic construct
  misc_feature 1..20: note = Synthetic
  source 1..20: mol_type = other RNA
tctatgacgcatccccgctc

SEQ ID NO: 2556 - RNA, 17 nt, synthetic construct
  misc_feature 1..17: note = Synthetic
  source 1..17: mol_type = other RNA
ggccgtcctcggggcgt

SEQ ID NO: 2557 - RNA, 17 nt, synthetic construct
  misc_feature 1..17: note = Synthetic
  source 1..17: mol_type = other RNA
agatgctgcacgtgctg

SEQ ID NO: 2558 - RNA, 17 nt, synthetic construct
  misc_feature 1..17: note = Synthetic
  source 1..17: mol_type = other RNA
tgccgatgcaacgatac

SEQ ID NO: 2559 - RNA, 17 nt, synthetic construct
  misc_feature 1..17: note = Synthetic
  source 1..17: mol_type = other RNA
aacggccgcctggccac

SEQ ID NO: 2560 - RNA, 17 nt, synthetic construct
  misc_feature 1..17: note = Synthetic
  source 1..17: mol_type = other RNA
ctggccaccagggtggc

SEQ ID NO: 2561 - RNA, 17 nt, synthetic construct
  misc_feature 1..17: note = Synthetic
  source 1..17: mol_type = other RNA
ccgggcgaccctggtcg

SEQ ID NO: 2562 - RNA, 17 nt, synthetic construct
  misc_feature 1..17: note = Synthetic
  source 1..17: mol_type = other RNA
ctggtcgccgagctaaa

SEQ ID NO: 2563 - RNA, 17 nt, synthetic construct
  misc_feature 1..17: note = Synthetic
  source 1..17: mol_type = other RNA
gctaaagcgaagcttct

SEQ ID NO: 2564 - RNA, 17 nt, synthetic construct
  misc_feature 1..17: note = Synthetic
  source 1..17: mol_type = other RNA
agcgaagcttctgcgag

SEQ ID NO: 2565 - RNA, 17 nt, synthetic construct
  misc_feature 1..17: note = Synthetic
  source 1..17: mol_type = other RNA
gcgagacgagctttttc

SEQ ID NO: 2566 - RNA, 17 nt, synthetic construct
  misc_feature 1..17: note = Synthetic
  source 1..17: mol_type = other RNA
gctttttcctgggcaag

SEQ ID NO: 2567 - RNA, 17 nt, synthetic construct
  misc_feature 1..17: note = Synthetic
  source 1..17: mol_type = other RNA
ggcaaggcgggccaccg

SEQ ID NO: 2568 - RNA, 17 nt, synthetic construct
  misc_feature 1..17: note = Synthetic
  source 1..17: mol_type = other RNA
ccaccgccgggaggccg

SEQ ID NO: 2569 - RNA, 17 nt, synthetic construct
  misc_feature 1..17: note = Synthetic
  source 1..17: mol_type = other RNA
ccgtcgaggcctggctc

SEQ ID NO: 2570 - RNA, 17 nt, synthetic construct
  misc_feature 1..17: note = Synthetic
  source 1..17: mol_type = other RNA
gacgcatgccgacacgc

SEQ ID NO: 2571 - RNA, 17 nt, synthetic construct
  misc_feature 1..17: note = Synthetic
  source 1..17: mol_type = other RNA
gcgcgggcggccggtcg

SEQ ID NO: 2572 - RNA, 17 nt, synthetic construct
  misc_feature 1..17: note = Synthetic
  source 1..17: mol_type = other RNA
gcctcctgcagtccttc

SEQ ID NO: 2573 - RNA, 17 nt, synthetic construct
  misc_feature 1..17: note = Synthetic
  source 1..17: mol_type = other RNA
tgcagtccttcctgaaa

SEQ ID NO: 2574 - RNA, 17 nt, synthetic construct
  misc_feature 1..17: note = Synthetic
  source 1..17: mol_type = other RNA
agtccttcctgaaagtg

SEQ ID NO: 2575 - RNA, 17 nt, synthetic construct
  misc_feature 1..17: note = Synthetic
  source 1..17: mol_type = other RNA
cctgaaagtggaggaca

SEQ ID NO: 2576 - RNA, 17 nt, synthetic construct
  misc_feature 1..17: note = Synthetic
  source 1..17: mol_type = other RNA
cgtgccggtgacgtacg

SEQ ID NO: 2577 - RNA, 17 nt, synthetic construct
  misc_feature 1..17: note = Synthetic
  source 1..17: mol_type = other RNA
cgtacggcgagatggtc

SEQ ID NO: 2578 - RNA, 17 nt, synthetic construct
  misc_feature 1..17: note = Synthetic
  source 1..17: mol_type = other RNA
cggcgagatggtcctga

SEQ ID NO: 2579 - RNA, 17 nt, synthetic construct
  misc_feature 1..17: note = Synthetic
  source 1..17: mol_type = other RNA
tggtcacggcgctcgtg

SEQ ID NO: 2580 - RNA, 17 nt, synthetic construct
  misc_feature 1..17: note = Synthetic
  source 1..17: mol_type = other RNA
gtgatgggcaaggccgt

SEQ ID NO: 2581 - RNA, 17 nt, synthetic construct
  misc_feature 1..17: note = Synthetic
  source 1..17: mol_type = other RNA
gcaaggccgtgcgaagt

SEQ ID NO: 2582 - RNA, 17 nt, synthetic construct
  misc_feature 1..17: note = Synthetic
  source 1..17: mol_type = other RNA
tgcgaagtctggacgac

SEQ ID NO: 2583 - RNA, 17 nt, synthetic construct
  misc_feature 1..17: note = Synthetic
  source 1..17: mol_type = other RNA
acgtgggccgccacctg

SEQ ID NO: 2584 - RNA, 17 nt, synthetic construct
  misc_feature 1..17: note = Synthetic
  source 1..17: mol_type = other RNA
gccacctgctggagatg

SEQ ID NO: 2585 - RNA, 17 nt, synthetic construct
  misc_feature 1..17: note = Synthetic
  source 1..17: mol_type = other RNA
acctgctggagatgcag

SEQ ID NO: 2586 - RNA, 17 nt, synthetic construct
  misc_feature 1..17: note = Synthetic
  source 1..17: mol_type = other RNA
aggaggagcagctcgac

SEQ ID NO: 2587 - RNA, 17 nt, synthetic construct
  misc_feature 1..17: note = Synthetic
  source 1..17: mol_type = other RNA
acctgaaccggcagacg

SEQ ID NO: 2588 - RNA, 17 nt, synthetic construct
  misc_feature 1..17: note = Synthetic
  source 1..17: mol_type = other RNA
gaaccggcagacgctgg

SEQ ID NO: 2589 - RNA, 17 nt, synthetic construct
  misc_feature 1..17: note = Synthetic
  source 1..17: mol_type = other RNA
gcagacgctggacgagc

SEQ ID NO: 2590 - RNA, 17 nt, synthetic construct
  misc_feature 1..17: note = Synthetic
  source 1..17: mol_type = other RNA
agacgctggacgagctc

SEQ ID NO: 2591 - RNA, 17 nt, synthetic construct
  misc_feature 1..17: note = Synthetic
  source 1..17: mol_type = other RNA
agacgacgcgcgtgcgc

SEQ ID NO: 2592 - RNA, 17 nt, synthetic construct
  misc_feature 1..17: note = Synthetic
  source 1..17: mol_type = other RNA
ggatctggtgtccatcg

SEQ ID NO: 2593 - RNA, 17 nt, synthetic construct
  misc_feature 1..17: note = Synthetic
  source 1..17: mol_type = other RNA
atctggtgtccatcggc

SEQ ID NO: 2594 - RNA, 17 nt, synthetic construct
  misc_feature 1..17: note = Synthetic
  source 1..17: mol_type = other RNA
gcgagaagctggtcttt

SEQ ID NO: 2595 - RNA, 17 nt, synthetic construct
  misc_feature 1..17: note = Synthetic
  source 1..17: mol_type = other RNA
tggtctttctggaggcc

SEQ ID NO: 2596 - RNA, 17 nt, synthetic construct
  misc_feature 1..17: note = Synthetic
  source 1..17: mol_type = other RNA
tctttctggaggccctg

SEQ ID NO: 2597 - RNA, 17 nt, synthetic construct
  misc_feature 1..17: note = Synthetic
  source 1..17: mol_type = other RNA
acgttccctaccccctg

SEQ ID NO: 2598 - RNA, 17 nt, synthetic construct
  misc_feature 1..17: note = Synthetic
  source 1..17: mol_type = other RNA
accccctggtgggcgcc

SEQ ID NO: 2599 - RNA, 17 nt, synthetic construct
  misc_feature 1..17: note = Synthetic
  source 1..17: mol_type = other RNA
tgacgttcgtcctgccc

SEQ ID NO: 2600 - RNA, 17 nt, synthetic construct
  misc_feature 1..17: note = Synthetic
  source 1..17: mol_type = other RNA
gcctgttcaatccggtc

SEQ ID NO: 2601 - RNA, 17 nt, synthetic construct
  misc_feature 1..17: note = Synthetic
  source 1..17: mol_type = other RNA
acggtttgccgcgcacg

SEQ ID NO: 2602 - RNA, 17 nt, synthetic construct
  misc_feature 1..17: note = Synthetic
  source 1..17: mol_type = other RNA
tccccgcccccggccac

SEQ ID NO: 2603 - RNA, 17 nt, synthetic construct
  misc_feature 1..17: note = Synthetic
  source 1..17: mol_type = other RNA
ccccgccagctgttttt

SEQ ID NO: 2604 - RNA, 17 nt, synthetic construct
  misc_feature 1..17: note = Synthetic
  source 1..17: mol_type = other RNA
agctgtttttttggggg

SEQ ID NO: 2605 - RNA, 17 nt, synthetic construct
  misc_feature 1..17: note = Synthetic
  source 1..17: mol_type = other RNA
aggtgctgcgcctgtct

SEQ ID NO: 2606 - RNA, 17 nt, synthetic construct
  misc_feature 1..17: note = Synthetic
  source 1..17: mol_type = other RNA
gtctctggaacacgcga

SEQ ID NO: 2607 - RNA, 17 nt, synthetic construct
  misc_feature 1..17: note = Synthetic
  source 1..17: mol_type = other RNA
tgtgccacccttcgctg

SEQ ID NO: 2608 - RNA, 17 nt, synthetic construct
  misc_feature 1..17: note = Synthetic
  source 1..17: mol_type = other RNA
gaacgttgacgcggcgg

SEQ ID NO: 2609 - RNA, 17 nt, synthetic construct
  misc_feature 1..17: note = Synthetic
  source 1..17: mol_type = other RNA
ccttaaccgcgaccccg

SEQ ID NO: 2610 - RNA, 17 nt, synthetic construct
  misc_feature 1..17: note = Synthetic
  source 1..17: mol_type = other RNA
cgaagccgccaatccgt

SEQ ID NO: 2611 - RNA, 17 nt, synthetic construct
  misc_feature 1..17: note = Synthetic
  source 1..17: mol_type = other RNA
acatgcagcagctgttt

SEQ ID NO: 2612 - RNA, 17 nt, synthetic construct
  misc_feature 1..17: note = Synthetic
  source 1..17: mol_type = other RNA
cagctgtttttgaacgc

SEQ ID NO: 2613 - RNA, 17 nt, synthetic construct
  misc_feature 1..17: note = Synthetic
  source 1..17: mol_type = other RNA
ggggcagcgcctggccc

SEQ ID NO: 2614 - RNA, 17 nt, synthetic construct
  misc_feature 1..17: note = Synthetic
  source 1..17: mol_type = other RNA
cagcgcctggcccacgg

SEQ ID NO: 2615 - RNA, 17 nt, synthetic construct
  misc_feature 1..17: note = Synthetic
  source 1..17: mol_type = other RNA
gcccacgggcgggtccg

SEQ ID NO: 2616 - RNA, 17 nt, synthetic construct
  misc_feature 1..17: note = Synthetic
  source 1..17: mol_type = other RNA
ggcgggtccgatgggtc

SEQ ID NO: 2617 - RNA, 17 nt, synthetic construct
  misc_feature 1..17: note = Synthetic
  source 1..17: mol_type = other RNA
cggaaggccagatgacc

SEQ ID NO: 2618 - RNA, 17 nt, synthetic construct
  misc_feature 1..17: note = Synthetic
  source 1..17: mol_type = other RNA
caacgccaacctggctc

SEQ ID NO: 2619 - RNA, 17 nt, synthetic construct
  misc_feature 1..17: note = Synthetic
  source 1..17: mol_type = other RNA
ccgcgttcgacttcttt

SEQ ID NO: 2620 - RNA, 17 nt, synthetic construct
  misc_feature 1..17: note = Synthetic
  source 1..17: mol_type = other RNA
ttgtgggggtggccgac

SEQ ID NO: 2621 - RNA, 17 nt, synthetic construct
  misc_feature 1..17: note = Synthetic
  source 1..17: mol_type = other RNA
tggccgacgtggagctg

SEQ ID NO: 2622 - RNA, 17 nt, synthetic construct
  misc_feature 1..17: note = Synthetic
  source 1..17: mol_type = other RNA
acgttcccccggccggc

SEQ ID NO: 2623 - RNA, 17 nt, synthetic construct
  misc_feature 1..17: note = Synthetic
  source 1..17: mol_type = other RNA
aggccacctggcgcgtg

SEQ ID NO: 2624 - RNA, 17 nt, synthetic construct
  misc_feature 1..17: note = Synthetic
  source 1..17: mol_type = other RNA
ctatgtccggcggcgtt

SEQ ID NO: 2625 - RNA, 17 nt, synthetic construct
  misc_feature 1..17: note = Synthetic
  source 1..17: mol_type = other RNA
gcggcgttccgggacgc

SEQ ID NO: 2626 - RNA, 17 nt, synthetic construct
  misc_feature 1..17: note = Synthetic
  source 1..17: mol_type = other RNA
tccgggacgcccggggc

SEQ ID NO: 2627 - RNA, 17 nt, synthetic construct
  misc_feature 1..17: note = Synthetic
  source 1..17: mol_type = other RNA
acgcccggggcctggag

SEQ ID NO: 2628 - RNA, 17 nt, synthetic construct
  misc_feature 1..17: note = Synthetic
  source 1..17: mol_type = other RNA
ggggcctggagctgggg

SEQ ID NO: 2629 - RNA, 17 nt, synthetic construct
  misc_feature 1..17: note = Synthetic
  source 1..17: mol_type = other RNA
caccatcgccgccgttc

SEQ ID NO: 2630 - RNA, 17 nt, synthetic construct
  misc_feature 1..17: note = Synthetic
  source 1..17: mol_type = other RNA
ggccgccatacacggca

SEQ ID NO: 2631 - RNA, 17 nt, synthetic construct
  misc_feature 1..17: note = Synthetic
  source 1..17: mol_type = other RNA
cagtgcatcaccagcta

SEQ ID NO: 2632 - RNA, 17 nt, synthetic construct
  misc_feature 1..17: note = Synthetic
  source 1..17: mol_type = other RNA
cgcggtgcgcggcgttc

SEQ ID NO: 2633 - RNA, 17 nt, synthetic construct
  misc_feature 1..17: note = Synthetic
  source 1..17: mol_type = other RNA
gtacgtcgtgacctacc

SEQ ID NO: 2634 - RNA, 17 nt, synthetic construct
  misc_feature 1..17: note = Synthetic
  source 1..17: mol_type = other RNA
cctcgggggagaccttc

SEQ ID NO: 2635 - RNA, 17 nt, synthetic construct
  misc_feature 1..17: note = Synthetic
  source 1..17: mol_type = other RNA
tcgggggagaccttccc

SEQ ID NO: 2636 - RNA, 17 nt, synthetic construct
  misc_feature 1..17: note = Synthetic
  source 1..17: mol_type = other RNA
gagtgcatggccgtgta

SEQ ID NO: 2637 - RNA, 17 nt, synthetic construct
  misc_feature 1..17: note = Synthetic
  source 1..17: mol_type = other RNA
ggacctggtggcgcacg

SEQ ID NO: 2638 - RNA, 17 nt, synthetic construct
  misc_feature 1..17: note = Synthetic
  source 1..17: mol_type = other RNA
actttaccctgaccggc

SEQ ID NO: 2639 - RNA, 17 nt, synthetic construct
  misc_feature 1..17: note = Synthetic
  source 1..17: mol_type = other RNA
ccctgaccggcccggag

SEQ ID NO: 2640 - RNA, 17 nt, synthetic construct
  misc_feature 1..17: note = Synthetic
  source 1..17: mol_type = other RNA
gaccggcccggagctgg

SEQ ID NO: 2641 - RNA, 17 nt, synthetic construct
  misc_feature 1..17: note = Synthetic
  source 1..17: mol_type = other RNA
gggcgggcaggcgcaag

SEQ ID NO: 2642 - RNA, 17 nt, synthetic construct
  misc_feature 1..17: note = Synthetic
  source 1..17: mol_type = other RNA
ggcaggcgcaagccgag

SEQ ID NO: 2643 - RNA, 17 nt, synthetic construct
  misc_feature 1..17: note = Synthetic
  source 1..17: mol_type = other RNA
gagctgaatcacctaat

SEQ ID NO: 2644 - RNA, 17 nt, synthetic construct
  misc_feature 1..17: note = Synthetic
  source 1..17: mol_type = other RNA
ctgctgccacccctcgt

SEQ ID NO: 2645 - RNA, 17 nt, synthetic construct
  misc_feature 1..17: note = Synthetic
  source 1..17: mol_type = other RNA
tgatgcggcgcgcggcc

SEQ ID NO: 2646 - RNA, 17 nt, synthetic construct
  misc_feature 1..17: note = Synthetic
  source 1..17: mol_type = other RNA
gaccgccatcgcgactg

SEQ ID NO: 2647 - RNA, 17 nt, synthetic construct
  misc_feature 1..17: note = Synthetic
  source 1..17: mol_type = other RNA
gcgactgccgggttagc

SEQ ID NO: 2648 - RNA, 17 nt, synthetic construct
  misc_feature 1..17: note = Synthetic
  source 1..17: mol_type = other RNA
catgtaacgtggcgacc

SEQ ID NO: 2649 - RNA, 17 nt, synthetic construct
  misc_feature 1..17: note = Synthetic
  source 1..17: mol_type = other RNA
ctgcacaacacccaggc

SEQ ID NO: 2650 - RNA, 17 nt, synthetic construct
  misc_feature 1..17: note = Synthetic
  source 1..17: mol_type = other RNA
acacccaggcccgagcc

SEQ ID NO: 2651 - RNA, 17 nt, synthetic construct
  misc_feature 1..17: note = Synthetic
  source 1..17: mol_type = other RNA
cccgagccgcggacgcc

SEQ ID NO: 2652 - RNA, 17 nt, synthetic construct
  misc_feature 1..17: note = Synthetic
  source 1..17: mol_type = other RNA
gcggatgaccggccgca

SEQ ID NO: 2653 - RNA, 17 nt, synthetic construct
  misc_feature 1..17: note = Synthetic
  source 1..17: mol_type = other RNA
accggccgcaccggggg

SEQ ID NO: 2654 - RNA, 17 nt, synthetic construct
  misc_feature 1..17: note = Synthetic
  source 1..17: mol_type = other RNA
ccgcaccggggggcgga

SEQ ID NO: 2655 - RNA, 17 nt, synthetic construct
  misc_feature 1..17: note = Synthetic
  source 1..17: mol_type = other RNA
atggtgcccgccttctc

SEQ ID NO: 2656 - RNA, 17 nt, synthetic construct
  misc_feature 1..17: note = Synthetic
  source 1..17: mol_type = other RNA
ggggccgctgctgcacc

SEQ ID NO: 2657 - RNA, 17 nt, synthetic construct
  misc_feature 1..17: note = Synthetic
  source 1..17: mol_type = other RNA
gcgtatacgccaccctg

SEQ ID NO: 2658 - RNA, 17 nt, synthetic construct
  misc_feature 1..17: note = Synthetic
  source 1..17: mol_type = other RNA
tgcagaacatggtggtc

SEQ ID NO: 2659 - RNA, 17 nt, synthetic construct
  misc_feature 1..17: note = Synthetic
  source 1..17: mol_type = other RNA
cccggagatcgcccccg

SEQ ID NO: 2660 - RNA, 17 nt, synthetic construct
  misc_feature 1..17: note = Synthetic
  source 1..17: mol_type = other RNA
cggagatcgcccccggc

SEQ ID NO: 2661 - RNA, 17 nt, synthetic construct
  misc_feature 1..17: note = Synthetic
  source 1..17: mol_type = other RNA
gccccagcgaccccgtg

SEQ ID NO: 2662 - RNA, 17 nt, synthetic construct
  misc_feature 1..17: note = Synthetic
  source 1..17: mol_type = other RNA
caacgccatgtttcaca

SEQ ID NO: 2663 - RNA, 17 nt, synthetic construct
  misc_feature 1..17: note = Synthetic
  source 1..17: mol_type = other RNA
acaacgggcgcgtggta

SEQ ID NO: 2664 - RNA, 17 nt, synthetic construct
  misc_feature 1..17: note = Synthetic
  source 1..17: mol_type = other RNA
cgggcgcgtggtagtgg

SEQ ID NO: 2665 - RNA, 17 nt, synthetic construct
  misc_feature 1..17: note = Synthetic
  source 1..17: mol_type = other RNA
gctggcccacaacatgg

SEQ ID NO: 2666 - RNA, 17 nt, synthetic construct
  misc_feature 1..17: note = Synthetic
  source 1..17: mol_type = other RNA
gctcggcggcgcccgac

SEQ ID NO: 2667 - RNA, 17 nt, synthetic construct
  misc_feature 1..17: note = Synthetic
  source 1..17: mol_type = other RNA
caacatgcgcatattcg

SEQ ID NO: 2668 - RNA, 17 nt, synthetic construct
  misc_feature 1..17: note = Synthetic
  source 1..17: mol_type = other RNA
cgacggggcgttgcacg

SEQ ID NO: 2669 - RNA, 17 nt, synthetic construct
  misc_feature 1..17: note = Synthetic
  source 1..17: mol_type = other RNA
tgatggccccccagcat

SEQ ID NO: 2670 - RNA, 17 nt, synthetic construct
  misc_feature 1..17: note = Synthetic
  source 1..17: mol_type = other RNA
cgtccacgcgctgttcg

SEQ ID NO: 2671 - RNA, 17 nt, synthetic construct
  misc_feature 1..17: note = Synthetic
  source 1..17: mol_type = other RNA
ccggggccgaccacgtg

SEQ ID NO: 2672 - RNA, 17 nt, synthetic construct
  misc_feature 1..17: note = Synthetic
  source 1..17: mol_type = other RNA
ccctggtccccccggct

SEQ ID NO: 2673 - RNA, 17 nt, synthetic construct
  misc_feature 1..17: note = Synthetic
  source 1..17: mol_type = other RNA
cgtcgtgcagcacgtcc

SEQ ID NO: 2674 - RNA, 17 nt, synthetic construct
  misc_feature 1..17: note = Synthetic
  source 1..17: mol_type = other RNA
tcgtgcagcacgtccgc

SEQ ID NO: 2675 - RNA, 17 nt, synthetic construct
  misc_feature 1..17: note = Synthetic
  source 1..17: mol_type = other RNA
cgtccgcgagagcgcgg

SEQ ID NO: 2676 - RNA, 17 nt, synthetic construct
  misc_feature 1..17: note = Synthetic
  source 1..17: mol_type = other RNA
gcgagagcgcggccggg

SEQ ID NO: 2677 - RNA, 17 nt, synthetic construct
  misc_feature 1..17: note = Synthetic
  source 1..17: mol_type = other RNA
tgacctacgcgctcatg

SEQ ID NO: 2678 - RNA, 17 nt, synthetic construct
  misc_feature 1..17: note = Synthetic
  source 1..17: mol_type = other RNA
tgcatcatcagctcaag

SEQ ID NO: 2679 - RNA, 17 nt, synthetic construct
  misc_feature 1..17: note = Synthetic
  source 1..17: mol_type = other RNA
caagacgggcctccatc

SEQ ID NO: 2680 - RNA, 17 nt, synthetic construct
  misc_feature 1..17: note = Synthetic
  source 1..17: mol_type = other RNA
gggcctccatcccgggt

SEQ ID NO: 2681 - RNA, 17 nt, synthetic construct
  misc_feature 1..17: note = Synthetic
  source 1..17: mol_type = other RNA
ggttcaccgtcgtccga

SEQ ID NO: 2682 - RNA, 17 nt, synthetic construct
  misc_feature 1..17: note = Synthetic
  source 1..17: mol_type = other RNA
acaggaccgctttgtga

SEQ ID NO: 2683 - RNA, 17 nt, synthetic construct
  misc_feature 1..17: note = Synthetic
  source 1..17: mol_type = other RNA
aggaccgctttgtgact

SEQ ID NO: 2684 - RNA, 17 nt, synthetic construct
  misc_feature 1..17: note = Synthetic
  source 1..17: mol_type = other RNA
ctgagaacgtgctgttc

SEQ ID NO: 2685 - RNA, 17 nt, synthetic construct
  misc_feature 1..17: note = Synthetic
  source 1..17: mol_type = other RNA
tgttctcggagcgcgcg

SEQ ID NO: 2686 - RNA, 17 nt, synthetic construct
  misc_feature 1..17: note = Synthetic
  source 1..17: mol_type = other RNA
cgtcggaggcgtacttc

SEQ ID NO: 2687 - RNA, 17 nt, synthetic construct
  misc_feature 1..17: note = Synthetic
  source 1..17: mol_type = other RNA
gctccaggtggcccggc

SEQ ID NO: 2688 - RNA, 17 nt, synthetic construct
  misc_feature 1..17: note = Synthetic
  source 1..17: mol_type = other RNA
ggcccggcacgaaactg

SEQ ID NO: 2689 - RNA, 17 nt, synthetic construct
  misc_feature 1..17: note = Synthetic
  source 1..17: mol_type = other RNA
cgctcacccagccgcgc

SEQ ID NO: 2690 - RNA, 17 nt, synthetic construct
  misc_feature 1..17: note = Synthetic
  source 1..17: mol_type = other RNA
cccagccgcgcgcgaac

SEQ ID NO: 2691 - RNA, 17 nt, synthetic construct
  misc_feature 1..17: note = Synthetic
  source 1..17: mol_type = other RNA
cgcgcgcgaacgtggac

SEQ ID NO: 2692 - RNA, 17 nt, synthetic construct
  misc_feature 1..17: note = Synthetic
  source 1..17: mol_type = other RNA
cgaacgtggacctgggc

SEQ ID NO: 2693 - RNA, 17 nt, synthetic construct
  misc_feature 1..17: note = Synthetic
  source 1..17: mol_type = other RNA
gcaaccccgtcaccgac

SEQ ID NO: 2694 - RNA, 17 nt, synthetic construct
  misc_feature 1..17: note = Synthetic
  source 1..17: mol_type = other RNA
ttccccaaaacttttac

SEQ ID NO: 2695 - RNA, 17 nt, synthetic construct
  misc_feature 1..17: note = Synthetic
  source 1..17: mol_type = other RNA
aaacttttacctgggcc

SEQ ID NO: 2696 - RNA, 17 nt, synthetic construct
  misc_feature 1..17: note = Synthetic
  source 1..17: mol_type = other RNA
gcggggctccccctctc

SEQ ID NO: 2697 - RNA, 17 nt, synthetic construct
  misc_feature 1..17: note = Synthetic
  source 1..17: mol_type = other RNA
gcggcagccgtgtacct

SEQ ID NO: 2698 - RNA, 17 nt, synthetic construct
  misc_feature 1..17: note = Synthetic
  source 1..17: mol_type = other RNA
tgcggaacgcggtcgtg

SEQ ID NO: 2699 - RNA, 17 nt, synthetic construct
  misc_feature 1..17: note = Synthetic
  source 1..17: mol_type = other RNA
tcgtggcgggaaaccgc

SEQ ID NO: 2700 - RNA, 17 nt, synthetic construct
  misc_feature 1..17: note = Synthetic
  source 1..17: mol_type = other RNA
ccagcccgtccccgtgt

SEQ ID NO: 2701 - RNA, 17 nt, synthetic construct
  misc_feature 1..17: note = Synthetic
  source 1..17: mol_type = other RNA
ccaggtgccgcggcgcg

SEQ ID NO: 2702 - RNA, 17 nt, synthetic construct
  misc_feature 1..17: note = Synthetic
  source 1..17: mol_type = other RNA
tgccgcggcgcgcaggg

SEQ ID NO: 2703 - RNA, 17 nt, synthetic construct
  misc_feature 1..17: note = Synthetic
  source 1..17: mol_type = other RNA
cagggatggaccacggc

SEQ ID NO: 2704 - RNA, 17 nt, synthetic construct
  misc_feature 1..17: note = Synthetic
  source 1..17: mol_type = other RNA
cggccaggacgccgtgt

SEQ ID NO: 2705 - RNA, 17 nt, synthetic construct
  misc_feature 1..17: note = Synthetic
  source 1..17: mol_type = other RNA
cgccggccctgcaaccc

SEQ ID NO: 2706 - RNA, 17 nt, synthetic construct
  misc_feature 1..17: note = Synthetic
  source 1..17: mol_type = other RNA
cccccggggacgcgccg

SEQ ID NO: 2707 - RNA, 17 nt, synthetic construct
  misc_feature 1..17: note = Synthetic
  source 1..17: mol_type = other RNA
ccgccgggggcgtttac

SEQ ID NO: 2708 - RNA, 17 nt, synthetic construct
  misc_feature 1..17: note = Synthetic
  source 1..17: mol_type = other RNA
gcgtttacgcgggggac

SEQ ID NO: 2709 - RNA, 17 nt, synthetic construct
  misc_feature 1..17: note = Synthetic
  source 1..17: mol_type = other RNA
tttacgcgggggacaag

SEQ ID NO: 2710 - RNA, 17 nt, synthetic construct
  misc_feature 1..17: note = Synthetic
  source 1..17: mol_type = other RNA
tcatgtacgaccacggc

SEQ ID NO: 2711 - RNA, 17 nt, synthetic construct
  misc_feature 1..17: note = Synthetic
  source 1..17: mol_type = other RNA
ggccagagcgacccgtc

SEQ ID NO: 2712 - RNA, 17 nt, synthetic construct
  misc_feature 1..17: note = Synthetic
  source 1..17: mol_type = other RNA
gcggccacggccaaccc

SEQ ID NO: 2713 - RNA, 17 nt, synthetic construct
  misc_feature 1..17: note = Synthetic
  source 1..17: mol_type = other RNA
gtcgcagcgattttcgt

SEQ ID NO: 2714 - RNA, 17 nt, synthetic construct
  misc_feature 1..17: note = Synthetic
  source 1..17: mol_type = other RNA
cggggacctgctctata

SEQ ID NO: 2715 - RNA, 17 nt, synthetic construct
  misc_feature 1..17: note = Synthetic
  source 1..17: mol_type = other RNA
cggggcctaccacctca

SEQ ID NO: 2716 - RNA, 17 nt, synthetic construct
  misc_feature 1..17: note = Synthetic
  source 1..17: mol_type = other RNA
ccgccaaacatcgctgc

SEQ ID NO: 2717 - RNA, 17 nt, synthetic construct
  misc_feature 1..17: note = Synthetic
  source 1..17: mol_type = other RNA
gcctggagcgcctgatc

SEQ ID NO: 2718 - RNA, 17 nt, synthetic construct
  misc_feature 1..17: note = Synthetic
  source 1..17: mol_type = other RNA
agcgcctgatcgtggag

SEQ ID NO: 2719 - RNA, 17 nt, synthetic construct
  misc_feature 1..17: note = Synthetic
  source 1..17: mol_type = other RNA
tacagtttaagcgcccc

SEQ ID NO: 2720 - RNA, 17 nt, synthetic construct
  misc_feature 1..17: note = Synthetic
  source 1..17: mol_type = other RNA
gcgccccccggggtgcc

SEQ ID NO: 2721 - RNA, 17 nt, synthetic construct
  misc_feature 1..17: note = Synthetic
  source 1..17: mol_type = other RNA
cggggtgccgcgaactc

SEQ ID NO: 2722 - RNA, 17 nt, synthetic construct
  misc_feature 1..17: note = Synthetic
  source 1..17: mol_type = other RNA
ggtgccgcgaactcgtg

SEQ ID NO: 2723 - RNA, 17 nt, synthetic construct
  misc_feature 1..17: note = Synthetic
  source 1..17: mol_type = other RNA
acccgtgtggcctgttt

SEQ ID NO: 2724 - RNA, 17 nt, synthetic construct
  misc_feature 1..17: note = Synthetic
  source 1..17: mol_type = other RNA
cctccgcagtgcccgca

SEQ ID NO: 2725 - RNA, 17 nt, synthetic construct
  misc_feature 1..17: note = Synthetic
  source 1..17: mol_type = other RNA
aacggggaagcccacgc

SEQ ID NO: 2726 - RNA, 17 nt, synthetic construct
  misc_feature 1..17: note = Synthetic
  source 1..17: mol_type = other RNA
atgacgcatccccgctc

SEQ ID NO: 2727 - RNA, 20 nt, synthetic construct
  misc_feature 1..20: note = Synthetic
  source 1..20: mol_type = other RNA
tcaaacgccccgaggacggc

SEQ ID NO: 2728 - RNA, 20 nt, synthetic construct
  misc_feature 1..20: note = Synthetic
  source 1..20: mol_type = other RNA
gtgccgcgctcaaacgcccc

SEQ ID NO: 2729 - RNA, 20 nt, synthetic construct
  misc_feature 1..20: note = Synthetic
  source 1..20: mol_type = other RNA
ccgtgccgcgctcaaacgcc

SEQ ID NO: 2730 - RNA, 20 nt, synthetic construct
  misc_feature 1..20: note = Synthetic
  source 1..20: mol_type = other RNA
tgcatcggcaacaacaaagc

SEQ ID NO: 2731 - RNA, 20 nt, synthetic construct
  misc_feature 1..20: note = Synthetic
  source 1..20: mol_type = other RNA
agctcggcgaccagggtcgc

SEQ ID NO: 2732 - RNA, 20 nt, synthetic construct
  misc_feature 1..20: note = Synthetic
  source 1..20: mol_type = other RNA
cttcgctttagctcggcgac

SEQ ID NO: 2733 - RNA, 20 nt, synthetic construct
  misc_feature 1..20: note = Synthetic
  source 1..20: mol_type = other RNA
ccaggaaaaagctcgtctcg

SEQ ID NO: 2734 - RNA, 20 nt, synthetic construct
  misc_feature 1..20: note = Synthetic
  source 1..20: mol_type = other RNA
cggcggtggcccgccttgcc

SEQ ID NO: 2735 - RNA, 20 nt, synthetic construct
  misc_feature 1..20: note = Synthetic
  source 1..20: mol_type = other RNA
gcgtggccgtggtgaggtcc

SEQ ID NO: 2736 - RNA, 20 nt, synthetic construct
  misc_feature 1..20: note = Synthetic
  source 1..20: mol_type = other RNA
cggagggctgcgtggccgtg

SEQ ID NO: 2737 - RNA, 20 nt, synthetic construct
  misc_feature 1..20: note = Synthetic
  source 1..20: mol_type = other RNA
tcagacggggcacggccacg

SEQ ID NO: 2738 - RNA, 20 nt, synthetic construct
  misc_feature 1..20: note = Synthetic
  source 1..20: mol_type = other RNA
gcgtcagacggggcacggcc

SEQ ID NO: 2739 - RNA, 20 nt, synthetic construct
  misc_feature 1..20: note = Synthetic
  source 1..20: mol_type = other RNA
cgcgtgtcggcatgcgtcag

SEQ ID NO: 2740 - RNA, 20 nt, synthetic construct
  misc_feature 1..20: note = Synthetic
  source 1..20: mol_type = other RNA
gtttgatcggggcggtggtg

SEQ ID NO: 2741 - RNA, 20 nt, synthetic construct
  misc_feature 1..20: note = Synthetic
  source 1..20: mol_type = other RNA
ctgcaggaggcgctgtttga

SEQ ID NO: 2742 - RNA, 20 nt, synthetic construct
  misc_feature 1..20: note = Synthetic
  source 1..20: mol_type = other RNA
tccactttcaggaaggactg

SEQ ID NO: 2743 - RNA, 20 nt, synthetic construct
  misc_feature 1..20: note = Synthetic
  source 1..20: mol_type = other RNA
cggtgtcctccactttcagg

SEQ ID NO: 2744 - RNA, 20 nt, synthetic construct
  misc_feature 1..20: note = Synthetic
  source 1..20: mol_type = other RNA
gcttcggtgtcctccacttt

SEQ ID NO: 2745 - RNA, 20 nt, synthetic construct
  misc_feature 1..20: note = Synthetic
  source 1..20: mol_type = other RNA
gtgaccaggttggccccgtt

SEQ ID NO: 2746 - RNA, 20 nt, synthetic construct
  misc_feature 1..20: note = Synthetic
  source 1..20: mol_type = other RNA
ttcgcacggccttgcccatc

SEQ ID NO: 2747 - RNA, 20 nt, synthetic construct
  misc_feature 1..20: note = Synthetic
  source 1..20: mol_type = other RNA
ccagcgtctgccggttcagg

SEQ ID NO: 2748 - RNA, 20 nt, synthetic construct
  misc_feature 1..20: note = Synthetic
  source 1..20: mol_type = other RNA
gcgtcgtctggggggcgctc

SEQ ID NO: 2749 - RNA, 20 nt, synthetic construct
  misc_feature 1..20: note = Synthetic
  source 1..20: mol_type = other RNA
tccgcgcgcacgcgcgtcgt

SEQ ID NO: 2750 - RNA, 20 nt, synthetic construct
  misc_feature 1..20: note = Synthetic
  source 1..20: mol_type = other RNA
gaaagaccagcttctcgccg

SEQ ID NO: 2751 - RNA, 20 nt, synthetic construct
  misc_feature 1..20: note = Synthetic
  source 1..20: mol_type = other RNA
atgcgcttctccagggcctc

SEQ ID NO: 2752 - RNA, 20 nt, synthetic construct
  misc_feature 1..20: note = Synthetic
  source 1..20: mol_type = other RNA
gcggcgtagatgcgcttctc

SEQ ID NO: 2753 - RNA, 20 nt, synthetic construct
  misc_feature 1..20: note = Synthetic
  source 1..20: mol_type = other RNA
ccatggcgcccaccaggggg

SEQ ID NO: 2754 - RNA, 20 nt, synthetic construct
  misc_feature 1..20: note = Synthetic
  source 1..20: mol_type = other RNA
gtcaggtccatggcgcccac

SEQ ID NO: 2755 - RNA, 20 nt, synthetic construct
  misc_feature 1..20: note = Synthetic
  source 1..20: mol_type = other RNA
tgaacaggcccaggggcagg

SEQ ID NO: 2756 - RNA, 20 nt, synthetic construct
  misc_feature 1..20: note = Synthetic
  source 1..20: mol_type = other RNA
ggattgaacaggcccagggg

SEQ ID NO: 2757 - RNA, 20 nt, synthetic construct
  misc_feature 1..20: note = Synthetic
  source 1..20: mol_type = other RNA
atgaccggattgaacaggcc

SEQ ID NO: 2758 - RNA, 20 nt, synthetic construct
  misc_feature 1..20: note = Synthetic
  source 1..20: mol_type = other RNA
caaaccgttccatgaccgga

SEQ ID NO: 2759 - RNA, 20 nt, synthetic construct
  misc_feature 1..20: note = Synthetic
  source 1..20: mol_type = other RNA
cgcggcaaaccgttccatga

SEQ ID NO: 2760 - RNA, 20 nt, synthetic construct
  misc_feature 1..20: note = Synthetic
  source 1..20: mol_type = other RNA
ggggatccgggtggccgggg

SEQ ID NO: 2761 - RNA, 20 nt, synthetic construct
  misc_feature 1..20: note = Synthetic
  source 1..20: mol_type = other RNA
aggcgcggggatccgggtgg

SEQ ID NO: 2762 - RNA, 20 nt, synthetic construct
  misc_feature 1..20: note = Synthetic
  source 1..20: mol_type = other RNA
gggcgggaaggcgcggggat

SEQ ID NO: 2763 - RNA, 20 nt, synthetic construct
  misc_feature 1..20: note = Synthetic
  source 1..20: mol_type = other RNA
agctggcggggcgggaaggc

SEQ ID NO: 2764 - RNA, 20 nt, synthetic construct
  misc_feature 1..20: note = Synthetic
  source 1..20: mol_type = other RNA
ccaaaaaaacagctggcggg

SEQ ID NO: 2765 - RNA, 20 nt, synthetic construct
  misc_feature 1..20: note = Synthetic
  source 1..20: mol_type = other RNA
ttcccccaaaaaaacagctg

SEQ ID NO: 2766 - RNA, 20 nt, synthetic construct
  misc_feature 1..20: note = Synthetic
  source 1..20: mol_type = other RNA
acggtcccgatcgcgtgttc

SEQ ID NO: 2767 - RNA, 20 nt, synthetic construct
  misc_feature 1..20: note = Synthetic
  source 1..20: mol_type = other RNA
cgcgtcaacgttcatcagcg

SEQ ID NO: 2768 - RNA, 20 nt, synthetic construct
  misc_feature 1..20: note = Synthetic
  source 1..20: mol_type = other RNA
cgccgcgtcaacgttcatca

SEQ ID NO: 2769 - RNA, 20 nt, synthetic construct
  misc_feature 1..20: note = Synthetic
  source 1..20: mol_type = other RNA
cgtacggattggcggcttcg

SEQ ID NO: 2770 - RNA, 20 nt, synthetic construct
  misc_feature 1..20: note = Synthetic
  source 1..20: mol_type = other RNA
ggccgccacgtacgccccgt

SEQ ID NO: 2771 - RNA, 20 nt, synthetic construct
  misc_feature 1..20: note = Synthetic
  source 1..20: mol_type = other RNA
catgtctgcggcggggccgg

SEQ ID NO: 2772 - RNA, 20 nt, synthetic construct
  misc_feature 1..20: note = Synthetic
  source 1..20: mol_type = other RNA
acagctgctgcatgtctgcg

SEQ ID NO: 2773 - RNA, 20 nt, synthetic construct
  misc_feature 1..20: note = Synthetic
  source 1..20: mol_type = other RNA
gcgacccatcggacccgccc

SEQ ID NO: 2774 - RNA, 20 nt, synthetic construct
  misc_feature 1..20: note = Synthetic
  source 1..20: mol_type = other RNA
atctggccttccgcgaccca

SEQ ID NO: 2775 - RNA, 20 nt, synthetic construct
  misc_feature 1..20: note = Synthetic
  source 1..20: mol_type = other RNA
gtcgggctgcataaactgct

SEQ ID NO: 2776 - RNA, 20 nt, synthetic construct
  misc_feature 1..20: note = Synthetic
  source 1..20: mol_type = other RNA
caagagccaggttggcgttg

SEQ ID NO: 2777 - RNA, 20 nt, synthetic construct
  misc_feature 1..20: note = Synthetic
  source 1..20: mol_type = other RNA
tcgaacgcggggtgcagctc

SEQ ID NO: 2778 - RNA, 20 nt, synthetic construct
  misc_feature 1..20: note = Synthetic
  source 1..20: mol_type = other RNA
cccccacaaagaagtcgaac

SEQ ID NO: 2779 - RNA, 20 nt, synthetic construct
  misc_feature 1..20: note = Synthetic
  source 1..20: mol_type = other RNA
cggccacccccacaaagaag

SEQ ID NO: 2780 - RNA, 20 nt, synthetic construct
  misc_feature 1..20: note = Synthetic
  source 1..20: mol_type = other RNA
ccacgtcggccacccccaca

SEQ ID NO: 2781 - RNA, 20 nt, synthetic construct
  misc_feature 1..20: note = Synthetic
  source 1..20: mol_type = other RNA
ctggatctcccccgggccgg

SEQ ID NO: 2782 - RNA, 20 nt, synthetic construct
  misc_feature 1..20: note = Synthetic
  source 1..20: mol_type = other RNA
ccaggtggcctggatctccc

SEQ ID NO: 2783 - RNA, 20 nt, synthetic construct
  misc_feature 1..20: note = Synthetic
  source 1..20: mol_type = other RNA
ttcaccacgcgccaggtggc

SEQ ID NO: 2784 - RNA, 20 nt, synthetic construct
  misc_feature 1..20: note = Synthetic
  source 1..20: mol_type = other RNA
aacgccgccggacatagcgc

SEQ ID NO: 2785 - RNA, 20 nt, synthetic construct
  misc_feature 1..20: note = Synthetic
  source 1..20: mol_type = other RNA
ccgggcgtcccggaacgccg

SEQ ID NO: 2786 - RNA, 20 nt, synthetic construct
  misc_feature 1..20: note = Synthetic
  source 1..20: mol_type = other RNA
agctccaggccccgggcgtc

SEQ ID NO: 2787 - RNA, 20 nt, synthetic construct
  misc_feature 1..20: note = Synthetic
  source 1..20: mol_type = other RNA
cccacccccagctccaggcc

SEQ ID NO: 2788 - RNA, 20 nt, synthetic construct
  misc_feature 1..20: note = Synthetic
  source 1..20: mol_type = other RNA
cgcgaacggcggcgatggtg

SEQ ID NO: 2789 - RNA, 20 nt, synthetic construct
  misc_feature 1..20: note = Synthetic
  source 1..20: mol_type = other RNA
ttgcggtcgtcgaacgcccc

SEQ ID NO: 2790 - RNA, 20 nt, synthetic construct
  misc_feature 1..20: note = Synthetic
  source 1..20: mol_type = other RNA
ccgccgggtagttgcggtcg

SEQ ID NO: 2791 - RNA, 20 nt, synthetic construct
  misc_feature 1..20: note = Synthetic
  source 1..20: mol_type = other RNA
ctgcagcaggtaaaacaccg

SEQ ID NO: 2792 - RNA, 20 nt, synthetic construct
  misc_feature 1..20: note = Synthetic
  source 1..20: mol_type = other RNA
ccacgagccgggccagggcg

SEQ ID NO: 2793 - RNA, 20 nt, synthetic construct
  misc_feature 1..20: note = Synthetic
  source 1..20: mol_type = other RNA
cactggaccacgagccgggc

SEQ ID NO: 2794 - RNA, 20 nt, synthetic construct
  misc_feature 1..20: note = Synthetic
  source 1..20: mol_type = other RNA
gtgatgcactggaccacgag

SEQ ID NO: 2795 - RNA, 20 nt, synthetic construct
  misc_feature 1..20: note = Synthetic
  source 1..20: mol_type = other RNA
agctggtgatgcactggacc

SEQ ID NO: 2796 - RNA, 20 nt, synthetic construct
  misc_feature 1..20: note = Synthetic
  source 1..20: mol_type = other RNA
ttccagtagctggtgatgca

SEQ ID NO: 2797 - RNA, 20 nt, synthetic construct
  misc_feature 1..20: note = Synthetic
  source 1..20: mol_type = other RNA
agaccagcgagtagtcgttc

SEQ ID NO: 2798 - RNA, 20 nt, synthetic construct
  misc_feature 1..20: note = Synthetic
  source 1..20: mol_type = other RNA
ggtcacgacgtacgagacca

SEQ ID NO: 2799 - RNA, 20 nt, synthetic construct
  misc_feature 1..20: note = Synthetic
  source 1..20: mol_type = other RNA
cccgaggtaggtcacgacgt

SEQ ID NO: 2800 - RNA, 20 nt, synthetic construct
  misc_feature 1..20: note = Synthetic
  source 1..20: mol_type = other RNA
actcctcgggaaggtctccc

SEQ ID NO: 2801 - RNA, 20 nt, synthetic construct
  misc_feature 1..20: note = Synthetic
  source 1..20: mol_type = other RNA
ggtacacggccatgcactcc

SEQ ID NO: 2802 - RNA, 20 nt, synthetic construct
  misc_feature 1..20: note = Synthetic
  source 1..20: mol_type = other RNA
aagtcatcaaccagctgggc

SEQ ID NO: 2803 - RNA, 20 nt, synthetic construct
  misc_feature 1..20: note = Synthetic
  source 1..20: mol_type = other RNA
agggtaaagtcatcaaccag

SEQ ID NO: 2804 - RNA, 20 nt, synthetic construct
  misc_feature 1..20: note = Synthetic
  source 1..20: mol_type = other RNA
ccgcccagctccgggccggt

SEQ ID NO: 2805 - RNA, 20 nt, synthetic construct
  misc_feature 1..20: note = Synthetic
  source 1..20: mol_type = other RNA
ttgcgcctgcccgcccagct

SEQ ID NO: 2806 - RNA, 20 nt, synthetic construct
  misc_feature 1..20: note = Synthetic
  source 1..20: mol_type = other RNA
cacgaggggtggcagcagcg

SEQ ID NO: 2807 - RNA, 20 nt, synthetic construct
  misc_feature 1..20: note = Synthetic
  source 1..20: mol_type = other RNA
agggcgtcacagtcccacac

SEQ ID NO: 2808 - RNA, 20 nt, synthetic construct
  misc_feature 1..20: note = Synthetic
  source 1..20: mol_type = other RNA
tcagggcgtcacagtcccac

SEQ ID NO: 2809 - RNA, 20 nt, synthetic construct
  misc_feature 1..20: note = Synthetic
  source 1..20: mol_type = other RNA
tccagggccgcgcgccgcat

SEQ ID NO: 2810 - RNA, 20 nt, synthetic construct
  misc_feature 1..20: note = Synthetic
  source 1..20: mol_type = other RNA
cggcagtcgcgatggcggtc

SEQ ID NO: 2811 - RNA, 20 nt, synthetic construct
  misc_feature 1..20: note = Synthetic
  source 1..20: mol_type = other RNA
cgttacatgccgccgcgtac

SEQ ID NO: 2812 - RNA, 20 nt, synthetic construct
  misc_feature 1..20: note = Synthetic
  source 1..20: mol_type = other RNA
gcagctggccgtcgttgcgg

SEQ ID NO: 2813 - RNA, 20 nt, synthetic construct
  misc_feature 1..20: note = Synthetic
  source 1..20: mol_type = other RNA
gcggcgtccgcggctcgggc

SEQ ID NO: 2814 - RNA, 20 nt, synthetic construct
  misc_feature 1..20: note = Synthetic
  source 1..20: mol_type = other RNA
tcatccgcggcgtccgcggc

SEQ ID NO: 2815 - RNA, 20 nt, synthetic construct
  misc_feature 1..20: note = Synthetic
  source 1..20: mol_type = other RNA
agcagcggccccgcgagaag

SEQ ID NO: 2816 - RNA, 20 nt, synthetic construct
  misc_feature 1..20: note = Synthetic
  source 1..20: mol_type = other RNA
cggtgcagcagcggccccgc

SEQ ID NO: 2817 - RNA, 20 nt, synthetic construct
  misc_feature 1..20: note = Synthetic
  source 1..20: mol_type = other RNA
cgcggtgcagcagcggcccc

SEQ ID NO: 2818 - RNA, 20 nt, synthetic construct
  misc_feature 1..20: note = Synthetic
  source 1..20: mol_type = other RNA
gtggcgtatacgcggtcgaa

SEQ ID NO: 2819 - RNA, 20 nt, synthetic construct
  misc_feature 1..20: note = Synthetic
  source 1..20: mol_type = other RNA
gcagggtggcgtatacgcgg

SEQ ID NO: 2820 - RNA, 20 nt, synthetic construct
  misc_feature 1..20: note = Synthetic
  source 1..20: mol_type = other RNA
tccgggaccaccatgttctg

SEQ ID NO: 2821 - RNA, 20 nt, synthetic construct
  misc_feature 1..20: note = Synthetic
  source 1..20: mol_type = other RNA
ctcctcgccgggggcgatct

SEQ ID NO: 2822 - RNA, 20 nt, synthetic construct
  misc_feature 1..20: note = Synthetic
  source 1..20: mol_type = other RNA
ggtcgctggggcactcctcg

SEQ ID NO: 2823 - RNA, 20 nt, synthetic construct
  misc_feature 1..20: note = Synthetic
  source 1..20: mol_type = other RNA
cggggtccgtcacggggtcg

SEQ ID NO: 2824 - RNA, 20 nt, synthetic construct
  misc_feature 1..20: note = Synthetic
  source 1..20: mol_type = other RNA
gggggtgcgcggggtccgtc

SEQ ID NO: 2825 - RNA, 20 nt, synthetic construct
  misc_feature 1..20: note = Synthetic
  source 1..20: mol_type = other RNA
tggccgggtgcagggggtgc

SEQ ID NO: 2826 - RNA, 20 nt, synthetic construct
  misc_feature 1..20: note = Synthetic
  source 1..20: mol_type = other RNA
gccaccagattggccgggtg

SEQ ID NO: 2827 - RNA, 20 nt, synthetic construct
  misc_feature 1..20: note = Synthetic
  source 1..20: mol_type = other RNA
cgtgttggccaccagattgg

SEQ ID NO: 2828 - RNA, 20 nt, synthetic construct
  misc_feature 1..20: note = Synthetic
  source 1..20: mol_type = other RNA
tccactaccacgcgcccgtt

SEQ ID NO: 2829 - RNA, 20 nt, synthetic construct
  misc_feature 1..20: note = Synthetic
  source 1..20: mol_type = other RNA
gcacctgcagcgtgagcatg

SEQ ID NO: 2830 - RNA, 20 nt, synthetic construct
  misc_feature 1..20: note = Synthetic
  source 1..20: mol_type = other RNA
tgtgggccagcacctgcagc

SEQ ID NO: 2831 - RNA, 20 nt, synthetic construct
  misc_feature 1..20: note = Synthetic
  source 1..20: mol_type = other RNA
gttgtgcgttcggccatgtt

SEQ ID NO: 2832 - RNA, 20 nt, synthetic construct
  misc_feature 1..20: note = Synthetic
  source 1..20: mol_type = other RNA
ccgcgtcgggcgccgccgag

SEQ ID NO: 2833 - RNA, 20 nt, synthetic construct
  misc_feature 1..20: note = Synthetic
  source 1..20: mol_type = other RNA
ggcgcccgcgtcgggcgccg

SEQ ID NO: 2834 - RNA, 20 nt, synthetic construct
  misc_feature 1..20: note = Synthetic
  source 1..20: mol_type = other RNA
acgcggtgttggcgcccgcg

SEQ ID NO: 2835 - RNA, 20 nt, synthetic construct
  misc_feature 1..20: note = Synthetic
  source 1..20: mol_type = other RNA
cgaatatgcgcatgttggtg

SEQ ID NO: 2836 - RNA, 20 nt, synthetic construct
  misc_feature 1..20: note = Synthetic
  source 1..20: mol_type = other RNA
ttccggcgtgcaacgccccg

SEQ ID NO: 2837 - RNA, 20 nt, synthetic construct
  misc_feature 1..20: note = Synthetic
  source 1..20: mol_type = other RNA
agatgctggggggccatcag

SEQ ID NO: 2838 - RNA, 20 nt, synthetic construct
  misc_feature 1..20: note = Synthetic
  source 1..20: mol_type = other RNA
tggatggtatggtccagatg

SEQ ID NO: 2839 - RNA, 20 nt, synthetic construct
  misc_feature 1..20: note = Synthetic
  source 1..20: mol_type = other RNA
gggtaaaaatagtcgccatt

SEQ ID NO: 2840 - RNA, 20 nt, synthetic construct
  misc_feature 1..20: note = Synthetic
  source 1..20: mol_type = other RNA
gcgaacagcgcgtggacggg

SEQ ID NO: 2841 - RNA, 20 nt, synthetic construct
  misc_feature 1..20: note = Synthetic
  source 1..20: mol_type = other RNA
ccccggcgaacagcgcgtgg

SEQ ID NO: 2842 - RNA, 20 nt, synthetic construct
  misc_feature 1..20: note = Synthetic
  source 1..20: mol_type = other RNA
tcggccccggcgaacagcgc

SEQ ID NO: 2843 - RNA, 20 nt, synthetic construct
  misc_feature 1..20: note = Synthetic
  source 1..20: mol_type = other RNA
tcgccacgtggtcggccccg

SEQ ID NO: 2844 - RNA, 20 nt, synthetic construct
  misc_feature 1..20: note = Synthetic
  source 1..20: mol_type = other RNA
cgcgcagggccggggggaaa

SEQ ID NO: 2845 - RNA, 20 nt, synthetic construct
  misc_feature 1..20: note = Synthetic
  source 1..20: mol_type = other RNA
ccgcgacaggtcgcgcaggg

SEQ ID NO: 2846 - RNA, 20 nt, synthetic construct
  misc_feature 1..20: note = Synthetic
  source 1..20: mol_type = other RNA
acctgccgcgacaggtcgcg

SEQ ID NO: 2847 - RNA, 20 nt, synthetic construct
  misc_feature 1..20: note = Synthetic
  source 1..20: mol_type = other RNA
gcccccagagccggggggac

SEQ ID NO: 2848 - RNA, 20 nt, synthetic construct
  misc_feature 1..20: note = Synthetic
  source 1..20: mol_type = other RNA
aaagtagttggcccccagag

SEQ ID NO: 2849 - RNA, 20 nt, synthetic construct
  misc_feature 1..20: note = Synthetic
  source 1..20: mol_type = other RNA
gacgaaaagtagttggcccc

SEQ ID NO: 2850 - RNA, 20 nt, synthetic construct
  misc_feature 1..20: note = Synthetic
  source 1..20: mol_type = other RNA
cacgacgggctgtcggatcg

SEQ ID NO: 2851 - RNA, 20 nt, synthetic construct
  misc_feature 1..20: note = Synthetic
  source 1..20: mol_type = other RNA
acgtgctgcacgacgggctg

SEQ ID NO: 2852 - RNA, 20 nt, synthetic construct
  misc_feature 1..20: note = Synthetic
  source 1..20: mol_type = other RNA
tctcgcggacgtgctgcacg

SEQ ID NO: 2853 - RNA, 20 nt, synthetic construct
  misc_feature 1..20: note = Synthetic
  source 1..20: mol_type = other RNA
ttctccccggccgcgctctc

SEQ ID NO: 2854 - RNA, 20 nt, synthetic construct
  misc_feature 1..20: note = Synthetic
  source 1..20: mol_type = other RNA
tgatcttgaagtaccccgcc

SEQ ID NO: 2855 - RNA, 20 nt, synthetic construct
  misc_feature 1..20: note = Synthetic
  source 1..20: mol_type = other RNA
gcaaggccacgggactgatc

SEQ ID NO: 2856 - RNA, 20 nt, synthetic construct
  misc_feature 1..20: note = Synthetic
  source 1..20: mol_type = other RNA
tgagctgatgatgcaaggcc

SEQ ID NO: 2857 - RNA, 20 nt, synthetic construct
  misc_feature 1..20: note = Synthetic
  source 1..20: mol_type = other RNA
acccgggatggaggcccgtc

SEQ ID NO: 2858 - RNA, 20 nt, synthetic construct
  misc_feature 1..20: note = Synthetic
  source 1..20: mol_type = other RNA
acggtgaacccaaacccggg

SEQ ID NO: 2859 - RNA, 20 nt, synthetic construct
  misc_feature 1..20: note = Synthetic
  source 1..20: mol_type = other RNA
ggacgacggtgaacccaaac

SEQ ID NO: 2860 - RNA, 20 nt, synthetic construct
  misc_feature 1..20: note = Synthetic
  source 1..20: mol_type = other RNA
agcggtcctgtcggacgacg

SEQ ID NO: 2861 - RNA, 20 nt, synthetic construct
  misc_feature 1..20: note = Synthetic
  source 1..20: mol_type = other RNA
tcagtcacaaagcggtcctg

SEQ ID NO: 2862 - RNA, 20 nt, synthetic construct
  misc_feature 1..20: note = Synthetic
  source 1..20: mol_type = other RNA
acgcctccgacgcgcgctcc

SEQ ID NO: 2863 - RNA, 20 nt, synthetic construct
  misc_feature 1..20: note = Synthetic
  source 1..20: mol_type = other RNA
gtacgcctccgacgcgcgct

SEQ ID NO: 2864 - RNA, 20 nt, synthetic construct
  misc_feature 1..20: note = Synthetic
  source 1..20: mol_type = other RNA
cgggccacctggagctggcc

SEQ ID NO: 2865 - RNA, 20 nt, synthetic construct
  misc_feature 1..20: note = Synthetic
  source 1..20: mol_type = other RNA
ccagtttcgtgccgggccac

SEQ ID NO: 2866 - RNA, 20 nt, synthetic construct
  misc_feature 1..20: note = Synthetic
  source 1..20: mol_type = other RNA
acccccccgccagtttcgtg

SEQ ID NO: 2867 - RNA, 20 nt, synthetic construct
  misc_feature 1..20: note = Synthetic
  source 1..20: mol_type = other RNA
tcgcgcgcggctgggtgagc

SEQ ID NO: 2868 - RNA, 20 nt, synthetic construct
  misc_feature 1..20: note = Synthetic
  source 1..20: mol_type = other RNA
ccacgttcgcgcgcggctgg

SEQ ID NO: 2869 - RNA, 20 nt, synthetic construct
  misc_feature 1..20: note = Synthetic
  source 1..20: mol_type = other RNA
aggtccacgttcgcgcgcgg

SEQ ID NO: 2870 - RNA, 20 nt, synthetic construct
  misc_feature 1..20: note = Synthetic
  source 1..20: mol_type = other RNA
cccatgtcggtgacggggtt

SEQ ID NO: 2871 - RNA, 20 nt, synthetic construct
  misc_feature 1..20: note = Synthetic
  source 1..20: mol_type = other RNA
gaaggttgcccatgtcggtg

SEQ ID NO: 2872 - RNA, 20 nt, synthetic construct
  misc_feature 1..20: note = Synthetic
  source 1..20: mol_type = other RNA
ccgcggcccaggtaaaagtt

SEQ ID NO: 2873 - RNA, 20 nt, synthetic construct
  misc_feature 1..20: note = Synthetic
  source 1..20: mol_type = other RNA
ggctgccgcgttgtccagga

SEQ ID NO: 2874 - RNA, 20 nt, synthetic construct
  misc_feature 1..20: note = Synthetic
  source 1..20: mol_type = other RNA
acggctgccgcgttgtccag

SEQ ID NO: 2875 - RNA, 20 nt, synthetic construct
  misc_feature 1..20: note = Synthetic
  source 1..20: mol_type = other RNA
tacacggctgccgcgttgtc

SEQ ID NO: 2876 - RNA, 20 nt, synthetic construct
  misc_feature 1..20: note = Synthetic
  source 1..20: mol_type = other RNA
cacccgaacacggggacggg

SEQ ID NO: 2877 - RNA, 20 nt, synthetic construct
  misc_feature 1..20: note = Synthetic
  source 1..20: mol_type = other RNA
gggcgcacccgaacacgggg

SEQ ID NO: 2878 - RNA, 20 nt, synthetic construct
  misc_feature 1..20: note = Synthetic
  source 1..20: mol_type = other RNA
gcacctgggcgcacccgaac

SEQ ID NO: 2879 - RNA, 20 nt, synthetic construct
  misc_feature 1..20: note = Synthetic
  source 1..20: mol_type = other RNA
gccgcggcacctgggcgcac

SEQ ID NO: 2880 - RNA, 20 nt, synthetic construct
  misc_feature 1..20: note = Synthetic
  source 1..20: mol_type = other RNA
atccctgcgcgccgcggcac

SEQ ID NO: 2881 - RNA, 20 nt, synthetic construct
  misc_feature 1..20: note = Synthetic
  source 1..20: mol_type = other RNA
agtagttgacgtcggtcgac

SEQ ID NO: 2882 - RNA, 20 nt, synthetic construct
  misc_feature 1..20: note = Synthetic
  source 1..20: mol_type = other RNA
ccccgggggttgcagggccg

SEQ ID NO: 2883 - RNA, 20 nt, synthetic construct
  misc_feature 1..20: note = Synthetic
  source 1..20: mol_type = other RNA
cggcgcgtccccgggggttg

SEQ ID NO: 2884 - RNA, 20 nt, synthetic construct
  misc_feature 1..20: note = Synthetic
  source 1..20: mol_type = other RNA
acgcccccggcggcgcgtcc

SEQ ID NO: 2885 - RNA, 20 nt, synthetic construct
  misc_feature 1..20: note = Synthetic
  source 1..20: mol_type = other RNA
ctctggccgtggtcgtacat

SEQ ID NO: 2886 - RNA, 20 nt, synthetic construct
  misc_feature 1..20: note = Synthetic
  source 1..20: mol_type = other RNA
cgctctggccgtggtcgtac

SEQ ID NO: 2887 - RNA, 20 nt, synthetic construct
  misc_feature 1..20: note = Synthetic
  source 1..20: mol_type = other RNA
cgtggccgcgaaggcccggg

SEQ ID NO: 2888 - RNA, 20 nt, synthetic construct
  misc_feature 1..20: note = Synthetic
  source 1..20: mol_type = other RNA
ttggccgtggccgcgaaggc

SEQ ID NO: 2889 - RNA, 20 nt, synthetic construct
  misc_feature 1..20: note = Synthetic
  source 1..20: mol_type = other RNA
cccacgggttggccgtggcc

SEQ ID NO: 2890 - RNA, 20 nt, synthetic construct
  misc_feature 1..20: note = Synthetic
  source 1..20: mol_type = other RNA
cgaaaatcgctgcgacgccc

SEQ ID NO: 2891 - RNA, 20 nt, synthetic construct
  misc_feature 1..20: note = Synthetic
  source 1..20: mol_type = other RNA
gttatagagcaggtccccgt

SEQ ID NO: 2892 - RNA, 20 nt, synthetic construct
  misc_feature 1..20: note = Synthetic
  source 1..20: mol_type = other RNA
tgaggtggtaggccccgtta

SEQ ID NO: 2893 - RNA, 20 nt, synthetic construct
  misc_feature 1..20: note = Synthetic
  source 1..20: mol_type = other RNA
tgagcaccggcgaggccccg

SEQ ID NO: 2894 - RNA, 20 nt, synthetic construct
  misc_feature 1..20: note = Synthetic
  source 1..20: mol_type = other RNA
aaagcaggggctgagcaccg

SEQ ID NO: 2895 - RNA, 20 nt, synthetic construct
  misc_feature 1..20: note = Synthetic
  source 1..20: mol_type = other RNA
taaagaacttaaagcagggg

SEQ ID NO: 2896 - RNA, 20 nt, synthetic construct
  misc_feature 1..20: note = Synthetic
  source 1..20: mol_type = other RNA
ccgacgtaaagaacttaaag

SEQ ID NO: 2897 - RNA, 20 nt, synthetic construct
  misc_feature 1..20: note = Synthetic
  source 1..20: mol_type = other RNA
cggcgatgtcggccgacgta

SEQ ID NO: 2898 - RNA, 20 nt, synthetic construct
  misc_feature 1..20: note = Synthetic
  source 1..20: mol_type = other RNA
ggcggtggccgtggacaccg

SEQ ID NO: 2899 - RNA, 20 nt, synthetic construct
  misc_feature 1..20: note = Synthetic
  source 1..20: mol_type = other RNA
cgtcgctggcggcggtggcc

SEQ ID NO: 2900 - RNA, 20 nt, synthetic construct
  misc_feature 1..20: note = Synthetic
  source 1..20: mol_type = other RNA
ctccacgagttcgcggcacc

SEQ ID NO: 2901 - RNA, 20 nt, synthetic construct
  misc_feature 1..20: note = Synthetic
  source 1..20: mol_type = other RNA
acaggccacacgggtcctcc

SEQ ID NO: 2902 - RNA, 20 nt, synthetic construct
  misc_feature 1..20: note = Synthetic
  source 1..20: mol_type = other RNA
ggcctcctgaaacaggccac

SEQ ID NO: 2903 - RNA, 20 nt, synthetic construct
  misc_feature 1..20: note = Synthetic
  source 1..20: mol_type = other RNA
caggtgagcgggtaggcctc

SEQ ID NO: 2904 - RNA, 20 nt, synthetic construct
  misc_feature 1..20: note = Synthetic
  source 1..20: mol_type = other RNA
ggggtcgctggcgcaggtga

SEQ ID NO: 2905 - RNA, 20 nt, synthetic construct
  misc_feature 1..20: note = Synthetic
  source 1..20: mol_type = other RNA
gggcggggtcgctggcgcag

SEQ ID NO: 2906 - RNA, 20 nt, synthetic construct
  misc_feature 1..20: note = Synthetic
  source 1..20: mol_type = other RNA
tgcgggcactgcggaggagg

SEQ ID NO: 2907 - RNA, 20 nt, synthetic construct
  misc_feature 1..20: note = Synthetic
  source 1..20: mol_type = other RNA
ccgttgcgggcactgcggag

SEQ ID NO: 2908 - RNA, 20 nt, synthetic construct
  misc_feature 1..20: note = Synthetic
  source 1..20: mol_type = other RNA
tccccgttgcgggcactgcg

SEQ ID NO: 2909 - RNA, 20 nt, synthetic construct
  misc_feature 1..20: note = Synthetic
  source 1..20: mol_type = other RNA
gcttccccgttgcgggcact

SEQ ID NO: 2910 - RNA, 20 nt, synthetic construct
  misc_feature 1..20: note = Synthetic
  source 1..20: mol_type = other RNA
cgcgcgtgggcttccccgtt

SEQ ID NO: 2911 - RNA, 20 nt, synthetic construct
  misc_feature 1..20: note = Synthetic
  source 1..20: mol_type = other RNA
gcgaagtgggtctcccgcgc

SEQ ID NO: 2912 - RNA, 20 nt, synthetic construct
  misc_feature 1..20: note = Synthetic
  source 1..20: mol_type = other RNA
tagacgagatactgcgcgaa

SEQ ID NO: 2913 - RNA, 20 nt, synthetic construct
  misc_feature 1..20: note = Synthetic
  source 1..20: mol_type = other RNA
cgtcatagacgagatactgc

SEQ ID NO: 2914 - RNA, 20 nt, synthetic construct
  misc_feature 1..20: note = Synthetic
  source 1..20: mol_type = other RNA
tgagcggggatgcgtcatag

SEQ ID NO: 2915 - RNA, 20 nt, synthetic construct
  misc_feature 1..20: note = Synthetic
  source 1..20: mol_type = other RNA
ttacagagccagtcccttga

SEQ ID NO: 2916 - RNA, 17 nt, synthetic construct
  misc_feature 1..17: note = Synthetic
  source 1..17: mol_type = other RNA
aacgccccgaggacggc

SEQ ID NO: 2917 - RNA, 17 nt, synthetic construct
  misc_feature 1..17: note = Synthetic
  source 1..17: mol_type = other RNA
ccgcgctcaaacgcccc

SEQ ID NO: 2918 - RNA, 17 nt, synthetic construct
  misc_feature 1..17: note = Synthetic
  source 1..17: mol_type = other RNA
tgccgcgctcaaacgcc

SEQ ID NO: 2919 - RNA, 17 nt, synthetic construct
  misc_feature 1..17: note = Synthetic
  source 1..17: mol_type = other RNA
atcggcaacaacaaagc

SEQ ID NO: 2920 - RNA, 17 nt, synthetic construct
  misc_feature 1..17: note = Synthetic
  source 1..17: mol_type = other RNA
tcggcgaccagggtcgc

SEQ ID NO: 2921 - RNA, 17 nt, synthetic construct
  misc_feature 1..17: note = Synthetic
  source 1..17: mol_type = other RNA
cgctttagctcggcgac

SEQ ID NO: 2922 - RNA, 17 nt, synthetic construct
  misc_feature 1..17: note = Synthetic
  source 1..17: mol_type = other RNA
ggaaaaagctcgtctcg

SEQ ID NO: 2923 - RNA, 17 nt, synthetic construct
  misc_feature 1..17: note = Synthetic
  source 1..17: mol_type = other RNA
cggtggcccgccttgcc

SEQ ID NO: 2924 - RNA, 17 nt, synthetic construct
  misc_feature 1..17: note = Synthetic
  source 1..17: mol_type = other RNA
tggccgtggtgaggtcc

SEQ ID NO: 2925 - RNA, 17 nt, synthetic construct
  misc_feature 1..17: note = Synthetic
  source 1..17: mol_type = other RNA
agggctgcgtggccgtg

SEQ ID NO: 2926 - RNA, 17 nt, synthetic construct
  misc_feature 1..17: note = Synthetic
  source 1..17: mol_type = other RNA
gacggggcacggccacg

SEQ ID NO: 2927 - RNA, 17 nt, synthetic construct
  misc_feature 1..17: note = Synthetic
  source 1..17: mol_type = other RNA
tcagacggggcacggcc

SEQ ID NO: 2928 - RNA, 17 nt, synthetic construct
  misc_feature 1..17: note = Synthetic
  source 1..17: mol_type = other RNA
gtgtcggcatgcgtcag

SEQ ID NO: 2929 - RNA, 17 nt, synthetic construct
  misc_feature 1..17: note = Synthetic
  source 1..17: mol_type = other RNA
tgatcggggcggtggtg

SEQ ID NO: 2930 - RNA, 17 nt, synthetic construct
  misc_feature 1..17: note = Synthetic
  source 1..17: mol_type = other RNA
caggaggcgctgtttga

SEQ ID NO: 2931 - RNA, 17 nt, synthetic construct
  misc_feature 1..17: note = Synthetic
  source 1..17: mol_type = other RNA
actttcaggaaggactg

SEQ ID NO: 2932 - RNA, 17 nt, synthetic construct
  misc_feature 1..17: note = Synthetic
  source 1..17: mol_type = other RNA
tgtcctccactttcagg

SEQ ID NO: 2933 - RNA, 17 nt, synthetic construct
  misc_feature 1..17: note = Synthetic
  source 1..17: mol_type = other RNA
tcggtgtcctccacttt

SEQ ID NO: 2934 - RNA, 17 nt, synthetic construct
  misc_feature 1..17: note = Synthetic
  source 1..17: mol_type = other RNA
accaggttggccccgtt

SEQ ID NO: 2935 - RNA, 17 nt, synthetic construct
  misc_feature 1..17: note = Synthetic
  source 1..17: mol_type = other RNA
gcacggccttgcccatc

SEQ ID NO: 2936 - RNA, 17 nt, synthetic construct
  misc_feature 1..17: note = Synthetic
  source 1..17: mol_type = other RNA
gcgtctgccggttcagg

SEQ ID NO: 2937 - RNA, 17 nt, synthetic construct
  misc_feature 1..17: note = Synthetic
  source 1..17: mol_type = other RNA
tcgtctggggggcgctc

SEQ ID NO: 2938 - RNA, 17 nt, synthetic construct
  misc_feature 1..17: note = Synthetic
  source 1..17: mol_type = other RNA
gcgcgcacgcgcgtcgt

SEQ ID NO: 2939 - RNA, 17 nt, synthetic construct
  misc_feature 1..17: note = Synthetic
  source 1..17: mol_type = other RNA
agaccagcttctcgccg

SEQ ID NO: 2940 - RNA, 17 nt, synthetic construct
  misc_feature 1..17: note = Synthetic
  source 1..17: mol_type = other RNA
cgcttctccagggcctc

SEQ ID NO: 2941 - RNA, 17 nt, synthetic construct
  misc_feature 1..17: note = Synthetic
  source 1..17: mol_type = other RNA
gcgtagatgcgcttctc

SEQ ID NO: 2942 - RNA, 17 nt, synthetic construct
  misc_feature 1..17: note = Synthetic
  source 1..17: mol_type = other RNA
tggcgcccaccaggggg

SEQ ID NO: 2943 - RNA, 17 nt, synthetic construct
  misc_feature 1..17: note = Synthetic
  source 1..17: mol_type = other RNA
aggtccatggcgcccac

SEQ ID NO: 2944 - RNA, 17 nt, synthetic construct
  misc_feature 1..17: note = Synthetic
  source 1..17: mol_type = other RNA
acaggcccaggggcagg

SEQ ID NO: 2945 - RNA, 17 nt, synthetic construct
  misc_feature 1..17: note = Synthetic
  source 1..17: mol_type = other RNA
ttgaacaggcccagggg

SEQ ID NO: 2946 - RNA, 17 nt, synthetic construct
  misc_feature 1..17: note = Synthetic
  source 1..17: mol_type = other RNA
accggattgaacaggcc

SEQ ID NO: 2947 - RNA, 17 nt, synthetic construct
  misc_feature 1..17: note = Synthetic
  source 1..17: mol_type = other RNA
accgttccatgaccgga

SEQ ID NO: 2948 - RNA, 17 nt, synthetic construct
  misc_feature 1..17: note = Synthetic
  source 1..17: mol_type = other RNA
ggcaaaccgttccatga

SEQ ID NO: 2949 - RNA, 17 nt, synthetic construct
  misc_feature 1..17: note = Synthetic
  source 1..17: mol_type = other RNA
gatccgggtggccgggg

SEQ ID NO: 2950 - RNA, 17 nt, synthetic construct
  misc_feature 1..17: note = Synthetic
  source 1..17: mol_type = other RNA
cgcggggatccgggtgg

SEQ ID NO: 2951 - RNA, 17 nt, synthetic construct
  misc_feature 1..17: note = Synthetic
  source 1..17: mol_type = other RNA
cgggaaggcgcggggat

SEQ ID NO: 2952 - RNA, 17 nt, synthetic construct
  misc_feature 1..17: note = Synthetic
  source 1..17: mol_type = other RNA
tggcggggcgggaaggc

SEQ ID NO: 2953 - RNA, 17 nt, synthetic construct
  misc_feature 1..17: note = Synthetic
  source 1..17: mol_type = other RNA
aaaaaacagctggcggg

SEQ ID NO: 2954 - RNA, 17 nt, synthetic construct
  misc_feature 1..17: note = Synthetic
  source 1..17: mol_type = other RNA
ccccaaaaaaacagctg

SEQ ID NO: 2955 - RNA, 17 nt, synthetic construct
  misc_feature 1..17: note = Synthetic
  source 1..17: mol_type = other RNA
gtcccgatcgcgtgttc

SEQ ID NO: 2956 - RNA, 17 nt, synthetic construct
  misc_feature 1..17: note = Synthetic
  source 1..17: mol_type = other RNA
gtcaacgttcatcagcg

SEQ ID NO: 2957 - RNA, 17 nt, synthetic construct
  misc_feature 1..17: note = Synthetic
  source 1..17: mol_type = other RNA
cgcgtcaacgttcatca

SEQ ID NO: 2958 - RNA, 17 nt, synthetic construct
  misc_feature 1..17: note = Synthetic
  source 1..17: mol_type = other RNA
acggattggcggcttcg

SEQ ID NO: 2959 - RNA, 17 nt, synthetic construct
  misc_feature 1..17: note = Synthetic
  source 1..17: mol_type = other RNA
cgccacgtacgccccgt

SEQ ID NO: 2960 - RNA, 17 nt, synthetic construct
  misc_feature 1..17: note = Synthetic
  source 1..17: mol_type = other RNA
gtctgcggcggggccgg

SEQ ID NO: 2961 - RNA, 17 nt, synthetic construct
  misc_feature 1..17: note = Synthetic
  source 1..17: mol_type = other RNA
gctgctgcatgtctgcg

SEQ ID NO: 2962 - RNA, 17 nt, synthetic construct
  misc_feature 1..17: note = Synthetic
  source 1..17: mol_type = other RNA
acccatcggacccgccc

SEQ ID NO: 2963 - RNA, 17 nt, synthetic construct
  misc_feature 1..17: note = Synthetic
  source 1..17: mol_type = other RNA
tggccttccgcgaccca

SEQ ID NO: 2964 - RNA, 17 nt, synthetic construct
  misc_feature 1..17: note = Synthetic
  source 1..17: mol_type = other RNA
gggctgcataaactgct

SEQ ID NO: 2965 - RNA, 17 nt, synthetic construct
  misc_feature 1..17: note = Synthetic
  source 1..17: mol_type = other RNA
gagccaggttggcgttg

SEQ ID NO: 2966 - RNA, 17 nt, synthetic construct
  misc_feature 1..17: note = Synthetic
  source 1..17: mol_type = other RNA
aacgcggggtgcagctc

SEQ ID NO: 2967 - RNA, 17 nt, synthetic construct
  misc_feature 1..17: note = Synthetic
  source 1..17: mol_type = other RNA
ccacaaagaagtcgaac

SEQ ID NO: 2968 - RNA, 17 nt, synthetic construct
  misc_feature 1..17: note = Synthetic
  source 1..17: mol_type = other RNA
ccacccccacaaagaag

SEQ ID NO: 2969 - RNA, 17 nt, synthetic construct
  misc_feature 1..17: note = Synthetic
  source 1..17: mol_type = other RNA
cgtcggccacccccaca

SEQ ID NO: 2970 - RNA, 17 nt, synthetic construct
  misc_feature 1..17: note = Synthetic
  source 1..17: mol_type = other RNA
gatctcccccgggccgg

SEQ ID NO: 2971 - RNA, 17 nt, synthetic construct
  misc_feature 1..17: note = Synthetic
  source 1..17: mol_type = other RNA
ggtggcctggatctccc

SEQ ID NO: 2972 - RNA, 17 nt, synthetic construct
  misc_feature 1..17: note = Synthetic
  source 1..17: mol_type = other RNA
accacgcgccaggtggc

SEQ ID NO: 2973 - RNA, 17 nt, synthetic construct
  misc_feature 1..17: note = Synthetic
  source 1..17: mol_type = other RNA
gccgccggacatagcgc

SEQ ID NO: 2974 - RNA, 17 nt, synthetic construct
  misc_feature 1..17: note = Synthetic
  source 1..17: mol_type = other RNA
ggcgtcccggaacgccg

SEQ ID NO: 2975 - RNA, 17 nt, synthetic construct
  misc_feature 1..17: note = Synthetic
  source 1..17: mol_type = other RNA
tccaggccccgggcgtc

SEQ ID NO: 2976 - RNA, 17 nt, synthetic construct
  misc_feature 1..17: note = Synthetic
  source 1..17: mol_type = other RNA
acccccagctccaggcc

SEQ ID NO: 2977 - RNA, 17 nt, synthetic construct
  misc_feature 1..17: note = Synthetic
  source 1..17: mol_type = other RNA
gaacggcggcgatggtg

SEQ ID NO: 2978 - RNA, 17 nt, synthetic construct
  misc_feature 1..17: note = Synthetic
  source 1..17: mol_type = other RNA
cggtcgtcgaacgcccc

SEQ ID NO: 2979 - RNA, 17 nt, synthetic construct
  misc_feature 1..17: note = Synthetic
  source 1..17: mol_type = other RNA
ccgggtagttgcggtcg

SEQ ID NO: 2980 - RNA, 17 nt, synthetic construct
  misc_feature 1..17: note = Synthetic
  source 1..17: mol_type = other RNA
cagcaggtaaaacaccg

SEQ ID NO: 2981 - RNA, 17 nt, synthetic construct
  misc_feature 1..17: note = Synthetic
  source 1..17: mol_type = other RNA
cgagccgggccagggcg

SEQ ID NO: 2982 - RNA, 17 nt, synthetic construct
  misc_feature 1..17: note = Synthetic
  source 1..17: mol_type = other RNA
tggaccacgagccgggc

SEQ ID NO: 2983 - RNA, 17 nt, synthetic construct
  misc_feature 1..17: note = Synthetic
  source 1..17: mol_type = other RNA
atgcactggaccacgag

SEQ ID NO: 2984 - RNA, 17 nt, synthetic construct
  misc_feature 1..17: note = Synthetic
  source 1..17: mol_type = other RNA
tggtgatgcactggacc

SEQ ID NO: 2985 - RNA, 17 nt, synthetic construct
  misc_feature 1..17: note = Synthetic
  source 1..17: mol_type = other RNA
cagtagctggtgatgca

SEQ ID NO: 2986 - RNA, 17 nt, synthetic construct
  misc_feature 1..17: note = Synthetic
  source 1..17: mol_type = other RNA
ccagcgagtagtcgttc

SEQ ID NO: 2987 - RNA, 17 nt, synthetic construct
  misc_feature 1..17: note = Synthetic
  source 1..17: mol_type = other RNA
cacgacgtacgagacca

SEQ ID NO: 2988 - RNA, 17 nt, synthetic construct
  misc_feature 1..17: note = Synthetic
  source 1..17: mol_type = other RNA
gaggtaggtcacgacgt

SEQ ID NO: 2989 - RNA, 17 nt, synthetic construct
  misc_feature 1..17: note = Synthetic
  source 1..17: mol_type = other RNA
cctcgggaaggtctccc

SEQ ID NO: 2990 - RNA, 17 nt, synthetic construct
  misc_feature 1..17: note = Synthetic
  source 1..17: mol_type = other RNA
acacggccatgcactcc

SEQ ID NO: 2991 - RNA, 17 nt, synthetic construct
  misc_feature 1..17: note = Synthetic
  source 1..17: mol_type = other RNA
tcatcaaccagctgggc

SEQ ID NO: 2992 - RNA, 17 nt, synthetic construct
  misc_feature 1..17: note = Synthetic
  source 1..17: mol_type = other RNA
gtaaagtcatcaaccag

SEQ ID NO: 2993 - RNA, 17 nt, synthetic construct
  misc_feature 1..17: note = Synthetic
  source 1..17: mol_type = other RNA
cccagctccgggccggt

SEQ ID NO: 2994 - RNA, 17 nt, synthetic construct
  misc_feature 1..17: note = Synthetic
  source 1..17: mol_type = other RNA
cgcctgcccgcccagct

SEQ ID NO: 2995 - RNA, 17 nt, synthetic construct
  misc_feature 1..17: note = Synthetic
  source 1..17: mol_type = other RNA
gaggggtggcagcagcg

SEQ ID NO: 2996 - RNA, 17 nt, synthetic construct
  misc_feature 1..17: note = Synthetic
  source 1..17: mol_type = other RNA
gcgtcacagtcccacac

SEQ ID NO: 2997 - RNA, 17 nt, synthetic construct
  misc_feature 1..17: note = Synthetic
  source 1..17: mol_type = other RNA
gggcgtcacagtcccac

SEQ ID NO: 2998 - RNA, 17 nt, synthetic construct
  misc_feature 1..17: note = Synthetic
  source 1..17: mol_type = other RNA
agggccgcgcgccgcat

SEQ ID NO: 2999 - RNA, 17 nt, synthetic construct
  misc_feature 1..17: note = Synthetic
  source 1..17: mol_type = other RNA
cagtcgcgatggcggtc

SEQ ID NO: 3000 - RNA, 17 nt, synthetic construct
  misc_feature 1..17: note = Synthetic
  source 1..17: mol_type = other RNA
tacatgccgccgcgtac

SEQ ID NO: 3001 - RNA, 17 nt, synthetic construct
  misc_feature 1..17: note = Synthetic
  source 1..17: mol_type = other RNA
gctggccgtcgttgcgg

SEQ ID NO: 3002 - RNA, 17 nt, synthetic construct
  misc_feature 1..17: note = Synthetic
  source 1..17: mol_type = other RNA
gcgtccgcggctcgggc

SEQ ID NO: 3003 - RNA, 17 nt, synthetic construct
  misc_feature 1..17: note = Synthetic
  source 1..17: mol_type = other RNA
tccgcggcgtccgcggc

SEQ ID NO: 3004 - RNA, 17 nt, synthetic construct
  misc_feature 1..17: note = Synthetic
  source 1..17: mol_type = other RNA
agcggccccgcgagaag

SEQ ID NO: 3005 - RNA, 17 nt, synthetic construct
  misc_feature 1..17: note = Synthetic
  source 1..17: mol_type = other RNA
tgcagcagcggccccgc

SEQ ID NO: 3006 - RNA, 17 nt, synthetic construct
  misc_feature 1..17: note = Synthetic
  source 1..17: mol_type = other RNA
ggtgcagcagcggcccc

SEQ ID NO: 3007 - RNA, 17 nt, synthetic construct
  misc_feature 1..17: note = Synthetic
  source 1..17: mol_type = other RNA
gcgtatacgcggtcgaa

SEQ ID NO: 3008 - RNA, 17 nt, synthetic construct
  misc_feature 1..17: note = Synthetic
  source 1..17: mol_type = other RNA
gggtggcgtatacgcgg

SEQ ID NO: 3009 - RNA, 17 nt, synthetic construct
  misc_feature 1..17: note = Synthetic
  source 1..17: mol_type = other RNA
gggaccaccatgttctg

SEQ ID NO: 3010 - RNA, 17 nt, synthetic construct
  misc_feature 1..17: note = Synthetic
  source 1..17: mol_type = other RNA
ctcgccgggggcgatct

SEQ ID NO: 3011 - RNA, 17 nt, synthetic construct
  misc_feature 1..17: note = Synthetic
  source 1..17: mol_type = other RNA
cgctggggcactcctcg

SEQ ID NO: 3012 - RNA, 17 nt, synthetic construct
  misc_feature 1..17: note = Synthetic
  source 1..17: mol_type = other RNA
ggtccgtcacggggtcg

SEQ ID NO: 3013 - RNA, 17 nt, synthetic construct
  misc_feature 1..17: note = Synthetic
  source 1..17: mol_type = other RNA
ggtgcgcggggtccgtc

SEQ ID NO: 3014 - RNA, 17 nt, synthetic construct
  misc_feature 1..17: note = Synthetic
  source 1..17: mol_type = other RNA
ccgggtgcagggggtgc

SEQ ID NO: 3015 - RNA, 17 nt, synthetic construct
  misc_feature 1..17: note = Synthetic
  source 1..17: mol_type = other RNA
accagattggccgggtg

SEQ ID NO: 3016 - RNA, 17 nt, synthetic construct
  misc_feature 1..17: note = Synthetic
  source 1..17: mol_type = other RNA
gttggccaccagattgg

SEQ ID NO: 3017 - RNA, 17 nt, synthetic construct
  misc_feature 1..17: note = Synthetic
  source 1..17: mol_type = other RNA
actaccacgcgcccgtt

SEQ ID NO: 3018 - RNA, 17 nt, synthetic construct
  misc_feature 1..17: note = Synthetic
  source 1..17: mol_type = other RNA
cctgcagcgtgagcatg

SEQ ID NO: 3019 - RNA, 17 nt, synthetic construct
  misc_feature 1..17: note = Synthetic
  source 1..17: mol_type = other RNA
gggccagcacctgcagc

SEQ ID NO: 3020 - RNA, 17 nt, synthetic construct
  misc_feature 1..17: note = Synthetic
  source 1..17: mol_type = other RNA
gtgcgttcggccatgtt

SEQ ID NO: 3021 - RNA, 17 nt, synthetic construct
  misc_feature 1..17: note = Synthetic
  source 1..17: mol_type = other RNA
cgtcgggcgccgccgag

SEQ ID NO: 3022 - RNA, 17 nt, synthetic construct
  misc_feature 1..17: note = Synthetic
  source 1..17: mol_type = other RNA
gcccgcgtcgggcgccg

SEQ ID NO: 3023 - RNA, 17 nt, synthetic construct
  misc_feature 1..17: note = Synthetic
  source 1..17: mol_type = other RNA
cggtgttggcgcccgcg

SEQ ID NO: 3024 - RNA, 17 nt, synthetic construct
  misc_feature 1..17: note = Synthetic
  source 1..17: mol_type = other RNA
atatgcgcatgttggtg

SEQ ID NO: 3025 - RNA, 17 nt, synthetic construct
  misc_feature 1..17: note = Synthetic
  source 1..17: mol_type = other RNA
cggcgtgcaacgccccg

SEQ ID NO: 3026 - RNA, 17 nt, synthetic construct
  misc_feature 1..17: note = Synthetic
  source 1..17: mol_type = other RNA
tgctggggggccatcag

SEQ ID NO: 3027 - RNA, 17 nt, synthetic construct
  misc_feature 1..17: note = Synthetic
  source 1..17: mol_type = other RNA
atggtatggtccagatg

SEQ ID NO: 3028 - RNA, 17 nt, synthetic construct
  misc_feature 1..17: note = Synthetic
  source 1..17: mol_type = other RNA
taaaaatagtcgccatt

SEQ ID NO: 3029 - RNA, 17 nt, synthetic construct
  misc_feature 1..17: note = Synthetic
  source 1..17: mol_type = other RNA
aacagcgcgtggacggg

SEQ ID NO: 3030 - RNA, 17 nt, synthetic construct
  misc_feature 1..17: note = Synthetic
  source 1..17: mol_type = other RNA
cggcgaacagcgcgtgg

SEQ ID NO: 3031 - RNA, 17 nt, synthetic construct
  misc_feature 1..17: note = Synthetic
  source 1..17: mol_type = other RNA
gccccggcgaacagcgc

SEQ ID NO: 3032 - RNA, 17 nt, synthetic construct
  misc_feature 1..17: note = Synthetic
  source 1..17: mol_type = other RNA
ccacgtggtcggccccg

SEQ ID NO: 3033 - RNA, 17 nt, synthetic construct
  misc_feature 1..17: note = Synthetic
  source 1..17: mol_type = other RNA
gcagggccggggggaaa

SEQ ID NO: 3034 - RNA, 17 nt, synthetic construct
  misc_feature 1..17: note = Synthetic
  source 1..17: mol_type = other RNA
cgacaggtcgcgcaggg

SEQ ID NO: 3035 - RNA, 17 nt, synthetic construct
  misc_feature 1..17: note = Synthetic
  source 1..17: mol_type = other RNA
tgccgcgacaggtcgcg

SEQ ID NO: 3036 - RNA, 17 nt, synthetic construct
  misc_feature 1..17: note = Synthetic
  source 1..17: mol_type = other RNA
cccagagccggggggac

SEQ ID NO: 3037 - RNA, 17 nt, synthetic construct
  misc_feature 1..17: note = Synthetic
  source 1..17: mol_type = other RNA
gtagttggcccccagag

SEQ ID NO: 3038 - RNA, 17 nt, synthetic construct
  misc_feature 1..17: note = Synthetic
  source 1..17: mol_type = other RNA
gaaaagtagttggcccc

SEQ ID NO: 3039 - RNA, 17 nt, synthetic construct
  misc_feature 1..17: note = Synthetic
  source 1..17: mol_type = other RNA
gacgggctgtcggatcg

SEQ ID NO: 3040 - RNA, 17 nt, synthetic construct
  misc_feature 1..17: note = Synthetic
  source 1..17: mol_type = other RNA
tgctgcacgacgggctg

SEQ ID NO: 3041 - RNA, 17 nt, synthetic construct
  misc_feature 1..17: note = Synthetic
  source 1..17: mol_type = other RNA
cgcggacgtgctgcacg

SEQ ID NO: 3042 - RNA, 17 nt, synthetic construct
  misc_feature 1..17: note = Synthetic
  source 1..17: mol_type = other RNA
tccccggccgcgctctc

SEQ ID NO: 3043 - RNA, 17 nt, synthetic construct
  misc_feature 1..17: note = Synthetic
  source 1..17: mol_type = other RNA
tcttgaagtaccccgcc

SEQ ID NO: 3044 - RNA, 17 nt, synthetic construct
  misc_feature 1..17: note = Synthetic
  source 1..17: mol_type = other RNA
aggccacgggactgatc

SEQ ID NO: 3045 - RNA, 17 nt, synthetic construct
  misc_feature 1..17: note = Synthetic
  source 1..17: mol_type = other RNA
gctgatgatgcaaggcc

SEQ ID NO: 3046 - RNA, 17 nt, synthetic construct
  misc_feature 1..17: note = Synthetic
  source 1..17: mol_type = other RNA
cgggatggaggcccgtc

SEQ ID NO: 3047 - RNA, 17 nt, synthetic construct
  misc_feature 1..17: note = Synthetic
  source 1..17: mol_type = other RNA
gtgaacccaaacccggg

SEQ ID NO: 3048 - RNA, 17 nt, synthetic construct
  misc_feature 1..17: note = Synthetic
  source 1..17: mol_type = other RNA
cgacggtgaacccaaac

SEQ ID NO: 3049 - RNA, 17 nt, synthetic construct
  misc_feature 1..17: note = Synthetic
  source 1..17: mol_type = other RNA
ggtcctgtcggacgacg

SEQ ID NO: 3050 - RNA, 17 nt, synthetic construct
  misc_feature 1..17: note = Synthetic
  source 1..17: mol_type = other RNA
gtcacaaagcggtcctg

SEQ ID NO: 3051 - RNA, 17 nt, synthetic construct
  misc_feature 1..17: note = Synthetic
  source 1..17: mol_type = other RNA
cctccgacgcgcgctcc

SEQ ID NO: 3052 - RNA, 17 nt, synthetic construct
  misc_feature 1..17: note = Synthetic
  source 1..17: mol_type = other RNA
cgcctccgacgcgcgct

SEQ ID NO: 3053 - RNA, 17 nt, synthetic construct
  misc_feature 1..17: note = Synthetic
  source 1..17: mol_type = other RNA
gccacctggagctggcc

SEQ ID NO: 3054 - RNA, 17 nt, synthetic construct
  misc_feature 1..17: note = Synthetic
  source 1..17: mol_type = other RNA
gtttcgtgccgggccac

SEQ ID NO: 3055 - RNA, 17 nt, synthetic construct
  misc_feature 1..17: note = Synthetic
  source 1..17: mol_type = other RNA
cccccgccagtttcgtg

SEQ ID NO: 3056 - RNA, 17 nt, synthetic construct
  misc_feature 1..17: note = Synthetic
  source 1..17: mol_type = other RNA
cgcgcggctgggtgagc

SEQ ID NO: 3057 - RNA, 17 nt, synthetic construct
  misc_feature 1..17: note = Synthetic
  source 1..17: mol_type = other RNA
cgttcgcgcgcggctgg

SEQ ID NO: 3058 - RNA, 17 nt, synthetic construct
  misc_feature 1..17: note = Synthetic
  source 1..17: mol_type = other RNA
tccacgttcgcgcgcgg

SEQ ID NO: 3059 - RNA, 17 nt, synthetic construct
  misc_feature 1..17: note = Synthetic
  source 1..17: mol_type = other RNA
atgtcggtgacggggtt

SEQ ID NO: 3060 - RNA, 17 nt, synthetic construct
  misc_feature 1..17: note = Synthetic
  source 1..17: mol_type = other RNA
ggttgcccatgtcggtg

SEQ ID NO: 3061 - RNA, 17 nt, synthetic construct
  misc_feature 1..17: note = Synthetic
  source 1..17: mol_type = other RNA
cggcccaggtaaaagtt

SEQ ID NO: 3062 - RNA, 17 nt, synthetic construct
  misc_feature 1..17: note = Synthetic
  source 1..17: mol_type = other RNA
tgccgcgttgtccagga

SEQ ID NO: 3063 - RNA, 17 nt, synthetic construct
  misc_feature 1..17: note = Synthetic
  source 1..17: mol_type = other RNA
gctgccgcgttgtccag

SEQ ID NO: 3064 - RNA, 17 nt, synthetic construct
  misc_feature 1..17: note = Synthetic
  source 1..17: mol_type = other RNA
acggctgccgcgttgtc

SEQ ID NO: 3065 - RNA, 17 nt, synthetic construct
  misc_feature 1..17: note = Synthetic
  source 1..17: mol_type = other RNA
ccgaacacggggacggg

SEQ ID NO: 3066 - RNA, 17 nt, synthetic construct
  misc_feature 1..17: note = Synthetic
  source 1..17: mol_type = other RNA
cgcacccgaacacgggg

SEQ ID NO: 3067 - RNA, 17 nt, synthetic construct
  misc_feature 1..17: note = Synthetic
  source 1..17: mol_type = other RNA
cctgggcgcacccgaac

SEQ ID NO: 3068 - RNA, 17 nt, synthetic construct
  misc_feature 1..17: note = Synthetic
  source 1..17: mol_type = other RNA
gcggcacctgggcgcac

SEQ ID NO: 3069 - RNA, 17 nt, synthetic construct
  misc_feature 1..17: note = Synthetic
  source 1..17: mol_type = other RNA
cctgcgcgccgcggcac

SEQ ID NO: 3070 - RNA, 17 nt, synthetic construct
  misc_feature 1..17: note = Synthetic
  source 1..17: mol_type = other RNA
agttgacgtcggtcgac

SEQ ID NO: 3071 - RNA, 17 nt, synthetic construct
  misc_feature 1..17: note = Synthetic
  source 1..17: mol_type = other RNA
cgggggttgcagggccg

SEQ ID NO: 3072 - RNA, 17 nt, synthetic construct
  misc_feature 1..17: note = Synthetic
  source 1..17: mol_type = other RNA
cgcgtccccgggggttg

SEQ ID NO: 3073 - RNA, 17 nt, synthetic construct
  misc_feature 1..17: note = Synthetic
  source 1..17: mol_type = other RNA
cccccggcggcgcgtcc

SEQ ID NO: 3074 - RNA, 17 nt, synthetic construct
  misc_feature 1..17: note = Synthetic
  source 1..17: mol_type = other RNA
tggccgtggtcgtacat

SEQ ID NO: 3075 - RNA, 17 nt, synthetic construct
  misc_feature 1..17: note = Synthetic
  source 1..17: mol_type = other RNA
tctggccgtggtcgtac

SEQ ID NO: 3076 - RNA, 17 nt, synthetic construct
  misc_feature 1..17: note = Synthetic
  source 1..17: mol_type = other RNA
ggccgcgaaggcccggg

SEQ ID NO: 3077 - RNA, 17 nt, synthetic construct
  misc_feature 1..17: note = Synthetic
  source 1..17: mol_type = other RNA
gccgtggccgcgaaggc

SEQ ID NO: 3078 - RNA, 17 nt, synthetic construct
  misc_feature 1..17: note = Synthetic
  source 1..17: mol_type = other RNA
acgggttggccgtggcc

SEQ ID NO: 3079 - RNA, 17 nt, synthetic construct
  misc_feature 1..17: note = Synthetic
  source 1..17: mol_type = other RNA
aaatcgctgcgacgccc

SEQ ID NO: 3080 - RNA, 17 nt, synthetic construct
  misc_feature 1..17: note = Synthetic
  source 1..17: mol_type = other RNA
atagagcaggtccccgt

SEQ ID NO: 3081 - RNA, 17 nt, synthetic construct
  misc_feature 1..17: note = Synthetic
  source 1..17: mol_type = other RNA
ggtggtaggccccgtta

SEQ ID NO: 3082 - RNA, 17 nt, synthetic construct
  misc_feature 1..17: note = Synthetic
  source 1..17: mol_type = other RNA
gcaccggcgaggccccg

SEQ ID NO: 3083 - RNA, 17 nt, synthetic construct
  misc_feature 1..17: note = Synthetic
  source 1..17: mol_type = other RNA
gcaggggctgagcaccg

SEQ ID NO: 3084 - RNA, 17 nt, synthetic construct
  misc_feature 1..17: note = Synthetic
  source 1..17: mol_type = other RNA
agaacttaaagcagggg

SEQ ID NO: 3085 - RNA, 17 nt, synthetic construct
  misc_feature 1..17: note = Synthetic
  source 1..17: mol_type = other RNA
acgtaaagaacttaaag

SEQ ID NO: 3086 - RNA, 17 nt, synthetic construct
  misc_feature 1..17: note = Synthetic
  source 1..17: mol_type = other RNA
cgatgtcggccgacgta

SEQ ID NO: 3087 - RNA, 17 nt, synthetic construct
  misc_feature 1..17: note = Synthetic
  source 1..17: mol_type = other RNA
ggtggccgtggacaccg

SEQ ID NO: 3088 - RNA, 17 nt, synthetic construct
  misc_feature 1..17: note = Synthetic
  source 1..17: mol_type = other RNA
cgctggcggcggtggcc

SEQ ID NO: 3089 - RNA, 17 nt, synthetic construct
  misc_feature 1..17: note = Synthetic
  source 1..17: mol_type = other RNA
cacgagttcgcggcacc

SEQ ID NO: 3090 - RNA, 17 nt, synthetic construct
  misc_feature 1..17: note = Synthetic
  source 1..17: mol_type = other RNA
ggccacacgggtcctcc

SEQ ID NO: 3091 - RNA, 17 nt, synthetic construct
  misc_feature 1..17: note = Synthetic
  source 1..17: mol_type = other RNA
ctcctgaaacaggccac

SEQ ID NO: 3092 - RNA, 17 nt, synthetic construct
  misc_feature 1..17: note = Synthetic
  source 1..17: mol_type = other RNA
gtgagcgggtaggcctc

SEQ ID NO: 3093 - RNA, 17 nt, synthetic construct
  misc_feature 1..17: note = Synthetic
  source 1..17: mol_type = other RNA
gtcgctggcgcaggtga

SEQ ID NO: 3094 - RNA, 17 nt, synthetic construct
  misc_feature 1..17: note = Synthetic
  source 1..17: mol_type = other RNA
cggggtcgctggcgcag

SEQ ID NO: 3095 - RNA, 17 nt, synthetic construct
  misc_feature 1..17: note = Synthetic
  source 1..17: mol_type = other RNA
gggcactgcggaggagg

SEQ ID NO: 3096 - RNA, 17 nt, synthetic construct
  misc_feature 1..17: note = Synthetic
  source 1..17: mol_type = other RNA
ttgcgggcactgcggag

SEQ ID NO: 3097 - RNA, 17 nt, synthetic construct
  misc_feature 1..17: note = Synthetic
  source 1..17: mol_type = other RNA
ccgttgcgggcactgcg

SEQ ID NO: 3098 - RNA, 17 nt, synthetic construct
  misc_feature 1..17: note = Synthetic
  source 1..17: mol_type = other RNA
tccccgttgcgggcact

SEQ ID NO: 3099 - RNA, 17 nt, synthetic construct
  misc_feature 1..17: note = Synthetic
  source 1..17: mol_type = other RNA
gcgtgggcttccccgtt

SEQ ID NO: 3100 - RNA, 17 nt, synthetic construct
  misc_feature 1..17: note = Synthetic
  source 1..17: mol_type = other RNA
aagtgggtctcccgcgc

SEQ ID NO: 3101 - RNA, 17 nt, synthetic construct
  misc_feature 1..17: note = Synthetic
  source 1..17: mol_type = other RNA
acgagatactgcgcgaa

SEQ ID NO: 3102 - RNA, 17 nt, synthetic construct
  misc_feature 1..17: note = Synthetic
  source 1..17: mol_type = other RNA
catagacgagatactgc

SEQ ID NO: 3103 - RNA, 17 nt, synthetic construct
  misc_feature 1..17: note = Synthetic
  source 1..17: mol_type = other RNA
gcggggatgcgtcatag

SEQ ID NO: 3104 - RNA, 17 nt, synthetic construct
  misc_feature 1..17: note = Synthetic
  source 1..17: mol_type = other RNA
cagagccagtcccttga

SEQ ID NO: 3105 - RNA, 20 nt, synthetic construct
  misc_feature 1..20: note = Synthetic
  source 1..20: mol_type = other RNA
gtggcgtcgcatcgacgcct

SEQ ID NO: 3106 - RNA, 20 nt, synthetic construct
  misc_feature 1..20: note = Synthetic
  source 1..20: mol_type = other RNA
acagttcgaggtccaccagc

SEQ ID NO: 3107 - RNA, 20 nt, synthetic construct
  misc_feature 1..20: note = Synthetic
  source 1..20: mol_type = other RNA
acccacacacaattacatga

SEQ ID NO: 3108 - RNA, 17 nt, synthetic construct
  misc_feature 1..17: note = Synthetic
  source 1..17: mol_type = other RNA
gcgtcgcatcgacgcct

SEQ ID NO: 3109 - RNA, 17 nt, synthetic construct
  misc_feature 1..17: note = Synthetic
  source 1..17: mol_type = other RNA
gttcgaggtccaccagc

SEQ ID NO: 3110 - RNA, 17 nt, synthetic construct
  misc_feature 1..17: note = Synthetic
  source 1..17: mol_type = other RNA
cacacacaattacatga

SEQ ID NO: 3111 - RNA, 20 nt, synthetic construct
  misc_feature 1..20: note = Synthetic
  source 1..20: mol_type = other RNA
cggccaacccgtgggcgtcg

SEQ ID NO: 3112 - RNA, 20 nt, synthetic construct
  misc_feature 1..20: note = Synthetic
  source 1..20: mol_type = other RNA
ggcggactggaccgtgcacc

SEQ ID NO: 3113 - RNA, 17 nt, synthetic construct
  misc_feature 1..17: note = Synthetic
  source 1..17: mol_type = other RNA
ccaacccgtgggcgtcg

SEQ ID NO: 3114 - RNA, 17 nt, synthetic construct
  misc_feature 1..17: note = Synthetic
  source 1..17: mol_type = other RNA
ggactggaccgtgcacc

SEQ ID NO: 3115 - RNA, 20 nt, synthetic construct
  misc_feature 1..20: note = Synthetic
  source 1..20: mol_type = other RNA
gcgcggcaaaccgttccatg

SEQ ID NO: 3116 - RNA, 20 nt, synthetic construct
  misc_feature 1..20: note = Synthetic
  source 1..20: mol_type = other RNA
gggccgccacgtacgccccg

SEQ ID NO: 3117 - RNA, 20 nt, synthetic construct
  misc_feature 1..20: note = Synthetic
  source 1..20: mol_type = other RNA
tggcgttgaccgtgttggcc

SEQ ID NO: 3118 - RNA, 20 nt, synthetic construct
  misc_feature 1..20: note = Synthetic
  source 1..20: mol_type = other RNA
cagatgctggggggccatca

SEQ ID NO: 3119 - RNA, 17 nt, synthetic construct
  misc_feature 1..17: note = Synthetic
  source 1..17: mol_type = other RNA
cggcaaaccgttccatg

SEQ ID NO: 3120 - RNA, 17 nt, synthetic construct
  misc_feature 1..17: note = Synthetic
  source 1..17: mol_type = other RNA
ccgccacgtacgccccg

SEQ ID NO: 3121 - RNA, 17 nt, synthetic construct
  misc_feature 1..17: note = Synthetic
  source 1..17: mol_type = other RNA
cgttgaccgtgttggcc

SEQ ID NO: 3122 - RNA, 17 nt, synthetic construct
  misc_feature 1..17: note = Synthetic
  source 1..17: mol_type = other RNA
atgctggggggccatca

SEQ ID NO: 3123 - RNA, 20 nt, synthetic construct
  misc_feature 1..20: note = Synthetic
  source 1..20: mol_type = other RNA
gtcccccggaggaaagtcgg

SEQ ID NO: 3124 - RNA, 20 nt, synthetic construct
  misc_feature 1..20: note = Synthetic
  source 1..20: mol_type = other RNA
ccggaggaaagtcggcggcc

SEQ ID NO: 3125 - RNA, 20 nt, synthetic construct
  misc_feature 1..20: note = Synthetic
  source 1..20: mol_type = other RNA
tttgcgcccgccggccctcg

SEQ ID NO: 3126 - RNA, 20 nt, synthetic construct
  misc_feature 1..20: note = Synthetic
  source 1..20: mol_type = other RNA
gggacgcaacagaagccgac

SEQ ID NO: 3127 - RNA, 20 nt, synthetic construct
  misc_feature 1..20: note = Synthetic
  source 1..20: mol_type = other RNA
ggacgcaacagaagccgacc

SEQ ID NO: 3128 - RNA, 20 nt, synthetic construct
  misc_feature 1..20: note = Synthetic
  source 1..20: mol_type = other RNA
aatttcgattcatcgccccg

SEQ ID NO: 3129 - RNA, 20 nt, synthetic construct
  misc_feature 1..20: note = Synthetic
  source 1..20: mol_type = other RNA
atttcgattcatcgccccgc

SEQ ID NO: 3130 - RNA, 20 nt, synthetic construct
  misc_feature 1..20: note = Synthetic
  source 1..20: mol_type = other RNA
attcatcgccccgcgggtgc

SEQ ID NO: 3131 - RNA, 20 nt, synthetic construct
  misc_feature 1..20: note = Synthetic
  source 1..20: mol_type = other RNA
gcccccccggagaagcgcgc

SEQ ID NO: 3132 - RNA, 20 nt, synthetic construct
  misc_feature 1..20: note = Synthetic
  source 1..20: mol_type = other RNA
ccccccggagaagcgcgccg

SEQ ID NO: 3133 - RNA, 20 nt, synthetic construct
  misc_feature 1..20: note = Synthetic
  source 1..20: mol_type = other RNA
aagcgcgccggggtgcacga

SEQ ID NO: 3134 - RNA, 20 nt, synthetic construct
  misc_feature 1..20: note = Synthetic
  source 1..20: mol_type = other RNA
tcacctcaagcgcgccccca

SEQ ID NO: 3135 - RNA, 20 nt, synthetic construct
  misc_feature 1..20: note = Synthetic
  source 1..20: mol_type = other RNA
cgcgcccccaaggtgtactg

SEQ ID NO: 3136 - RNA, 20 nt, synthetic construct
  misc_feature 1..20: note = Synthetic
  source 1..20: mol_type = other RNA
gcgcccccaaggtgtactgc

SEQ ID NO: 3137 - RNA, 20 nt, synthetic construct
  misc_feature 1..20: note = Synthetic
  source 1..20: mol_type = other RNA
cgcccccaaggtgtactgcg

SEQ ID NO: 3138 - RNA, 20 nt, synthetic construct
  misc_feature 1..20: note = Synthetic
  source 1..20: mol_type = other RNA
gcccccaaggtgtactgcgg

SEQ ID NO: 3139 - RNA, 20 nt, synthetic construct
  misc_feature 1..20: note = Synthetic
  source 1..20: mol_type = other RNA
gagcgcgacgtcctccgcgt

SEQ ID NO: 3140 - RNA, 20 nt, synthetic construct
  misc_feature 1..20: note = Synthetic
  source 1..20: mol_type = other RNA
agcgcgacgtcctccgcgtc

SEQ ID NO: 3141 - RNA, 20 nt, synthetic construct
  misc_feature 1..20: note = Synthetic
  source 1..20: mol_type = other RNA
cgacgtcctccgcgtcgggt

SEQ ID NO: 3142 - RNA, 20 nt, synthetic construct
  misc_feature 1..20: note = Synthetic
  source 1..20: mol_type = other RNA
gacgtcctccgcgtcgggtc

SEQ ID NO: 3143 - RNA, 20 nt, synthetic construct
  misc_feature 1..20: note = Synthetic
  source 1..20: mol_type = other RNA
gtcctccgcgtcgggtcggg

SEQ ID NO: 3144 - RNA, 20 nt, synthetic construct
  misc_feature 1..20: note = Synthetic
  source 1..20: mol_type = other RNA
ggcgtggaccacgccccggc

SEQ ID NO: 3145 - RNA, 20 nt, synthetic construct
  misc_feature 1..20: note = Synthetic
  source 1..20: mol_type = other RNA
gcgtggaccacgccccggcg

SEQ ID NO: 3146 - RNA, 20 nt, synthetic construct
  misc_feature 1..20: note = Synthetic
  source 1..20: mol_type = other RNA
ctttcacgtgtacgacatcc

SEQ ID NO: 3147 - RNA, 20 nt, synthetic construct
  misc_feature 1..20: note = Synthetic
  source 1..20: mol_type = other RNA
gtacgacatcctggagaacg

SEQ ID NO: 3148 - RNA, 20 nt, synthetic construct
  misc_feature 1..20: note = Synthetic
  source 1..20: mol_type = other RNA
gagaacgtggagcacgcgta

SEQ ID NO: 3149 - RNA, 20 nt, synthetic construct
  misc_feature 1..20: note = Synthetic
  source 1..20: mol_type = other RNA
acgcgtgctccacgttctcc

SEQ ID NO: 3150 - RNA, 20 nt, synthetic construct
  misc_feature 1..20: note = Synthetic
  source 1..20: mol_type = other RNA
gatgtcgtacacgtgaaaga

SEQ ID NO: 3151 - RNA, 20 nt, synthetic construct
  misc_feature 1..20: note = Synthetic
  source 1..20: mol_type = other RNA
cgtgaaagacggtgacggtg

SEQ ID NO: 3152 - RNA, 20 nt, synthetic construct
  misc_feature 1..20: note = Synthetic
  source 1..20: mol_type = other RNA
acggtggggttgaaccccgc

SEQ ID NO: 3153 - RNA, 20 nt, synthetic construct
  misc_feature 1..20: note = Synthetic
  source 1..20: mol_type = other RNA
ggtggggttgaaccccgccg

SEQ ID NO: 3154 - RNA, 20 nt, synthetic construct
  misc_feature 1..20: note = Synthetic
  source 1..20: mol_type = other RNA
ggttgaaccccgccggggcg

SEQ ID NO: 3155 - RNA, 20 nt, synthetic construct
  misc_feature 1..20: note = Synthetic
  source 1..20: mol_type = other RNA
agaagccgcccgacccgacg

SEQ ID NO: 3156 - RNA, 20 nt, synthetic construct
  misc_feature 1..20: note = Synthetic
  source 1..20: mol_type = other RNA
agccgcccgacccgacgcgg

SEQ ID NO: 3157 - RNA, 20 nt, synthetic construct
  misc_feature 1..20: note = Synthetic
  source 1..20: mol_type = other RNA
gtcccccccgcagtacacct

SEQ ID NO: 3158 - RNA, 20 nt, synthetic construct
  misc_feature 1..20: note = Synthetic
  source 1..20: mol_type = other RNA
acaccttgggggcgcgcttg

SEQ ID NO: 3159 - RNA, 20 nt, synthetic construct
  misc_feature 1..20: note = Synthetic
  source 1..20: mol_type = other RNA
gaggtgaccgtcgtgcaccc

SEQ ID NO: 3160 - RNA, 20 nt, synthetic construct
  misc_feature 1..20: note = Synthetic
  source 1..20: mol_type = other RNA
ccccggcgcgcttctccggg

SEQ ID NO: 3161 - RNA, 20 nt, synthetic construct
  misc_feature 1..20: note = Synthetic
  source 1..20: mol_type = other RNA
gcatcctcgtccagcacccg

SEQ ID NO: 3162 - RNA, 20 nt, synthetic construct
  misc_feature 1..20: note = Synthetic
  source 1..20: mol_type = other RNA
atcctcgtccagcacccgcg

SEQ ID NO: 3163 - RNA, 20 nt, synthetic construct
  misc_feature 1..20: note = Synthetic
  source 1..20: mol_type = other RNA
gctatagtacgtatggcgct

SEQ ID NO: 3164 - RNA, 20 nt, synthetic construct
  misc_feature 1..20: note = Synthetic
  source 1..20: mol_type = other RNA
tagtacgtatggcgctgggt

SEQ ID NO: 3165 - RNA, 20 nt, synthetic construct
  misc_feature 1..20: note = Synthetic
  source 1..20: mol_type = other RNA
cgtatggcgctgggttggcc

SEQ ID NO: 3166 - RNA, 20 nt, synthetic construct
  misc_feature 1..20: note = Synthetic
  source 1..20: mol_type = other RNA
ggcttctgttgcgtcccgac

SEQ ID NO: 3167 - RNA, 20 nt, synthetic construct
  misc_feature 1..20: note = Synthetic
  source 1..20: mol_type = other RNA
gcttctgttgcgtcccgact

SEQ ID NO: 3168 - RNA, 20 nt, synthetic construct
  misc_feature 1..20: note = Synthetic
  source 1..20: mol_type = other RNA
cttctgttgcgtcccgactg

SEQ ID NO: 3169 - RNA, 20 nt, synthetic construct
  misc_feature 1..20: note = Synthetic
  source 1..20: mol_type = other RNA
gttgcgtcccgactggggcg

SEQ ID NO: 3170 - RNA, 20 nt, synthetic construct
  misc_feature 1..20: note = Synthetic
  source 1..20: mol_type = other RNA
cgtcccgactggggcgaggt

SEQ ID NO: 3171 - RNA, 20 nt, synthetic construct
  misc_feature 1..20: note = Synthetic
  source 1..20: mol_type = other RNA
gttttgcctcaaacaaggcg

SEQ ID NO: 3172 - RNA, 20 nt, synthetic construct
  misc_feature 1..20: note = Synthetic
  source 1..20: mol_type = other RNA
ttttgcctcaaacaaggcgg

SEQ ID NO: 3173 - RNA, 20 nt, synthetic construct
  misc_feature 1..20: note = Synthetic
  source 1..20: mol_type = other RNA
tcaaacaaggcgggggtccc

SEQ ID NO: 3174 - RNA, 20 nt, synthetic construct
  misc_feature 1..20: note = Synthetic
  source 1..20: mol_type = other RNA
gccggcgggcgcaaaaaacc

SEQ ID NO: 3175 - RNA, 20 nt, synthetic construct
  misc_feature 1..20: note = Synthetic
  source 1..20: mol_type = other RNA
aaaaaacccggacgccgccc

SEQ ID NO: 3176 - RNA, 20 nt, synthetic construct
  misc_feature 1..20: note = Synthetic
  source 1..20: mol_type = other RNA
tggccgccgactttcctccg

SEQ ID NO: 3177 - RNA, 20 nt, synthetic construct
  misc_feature 1..20: note = Synthetic
  source 1..20: mol_type = other RNA
ggccgccgactttcctccgg

SEQ ID NO: 3178 - RNA, 17 nt, synthetic construct
  misc_feature 1..17: note = Synthetic
  source 1..17: mol_type = other RNA
gtcccccggaggaaagt

SEQ ID NO: 3179 - RNA, 17 nt, synthetic construct
  misc_feature 1..17: note = Synthetic
  source 1..17: mol_type = other RNA
aaagtcggcggccaggg

SEQ ID NO: 3180 - RNA, 17 nt, synthetic construct
  misc_feature 1..17: note = Synthetic
  source 1..17: mol_type = other RNA
gggttttttgcgcccgc

SEQ ID NO: 3181 - RNA, 17 nt, synthetic construct
  misc_feature 1..17: note = Synthetic
  source 1..17: mol_type = other RNA
acgcaacagaagccgac

SEQ ID NO: 3182 - RNA, 17 nt, synthetic construct
  misc_feature 1..17: note = Synthetic
  source 1..17: mol_type = other RNA
cgcaacagaagccgacc

SEQ ID NO: 3183 - RNA, 17 nt, synthetic construct
  misc_feature 1..17: note = Synthetic
  source 1..17: mol_type = other RNA
ttcgattcatcgccccg

SEQ ID NO: 3184 - RNA, 17 nt, synthetic construct
  misc_feature 1..17: note = Synthetic
  source 1..17: mol_type = other RNA
tcgattcatcgccccgc

SEQ ID NO: 3185 - RNA, 17 nt, synthetic construct
  misc_feature 1..17: note = Synthetic
  source 1..17: mol_type = other RNA
catcgccccgcgggtgc

SEQ ID NO: 3186 - RNA, 17 nt, synthetic construct
  misc_feature 1..17: note = Synthetic
  source 1..17: mol_type = other RNA
ccccggagaagcgcgcc

SEQ ID NO: 3187 - RNA, 17 nt, synthetic construct
  misc_feature 1..17: note = Synthetic
  source 1..17: mol_type = other RNA
cgcgccggggtgcacga

SEQ ID NO: 3188 - RNA, 17 nt, synthetic construct
  misc_feature 1..17: note = Synthetic
  source 1..17: mol_type = other RNA
cctcaagcgcgccccca

SEQ ID NO: 3189 - RNA, 17 nt, synthetic construct
  misc_feature 1..17: note = Synthetic
  source 1..17: mol_type = other RNA
gcccccaaggtgtactg

SEQ ID NO: 3190 - RNA, 17 nt, synthetic construct
  misc_feature 1..17: note = Synthetic
  source 1..17: mol_type = other RNA
ccccaaggtgtactgcg

SEQ ID NO: 3191 - RNA, 17 nt, synthetic construct
  misc_feature 1..17: note = Synthetic
  source 1..17: mol_type = other RNA
gcgacgtcctccgcgtc

SEQ ID NO: 3192 - RNA, 17 nt, synthetic construct
  misc_feature 1..17: note = Synthetic
  source 1..17: mol_type = other RNA
cgtcctccgcgtcgggt

SEQ ID NO: 3193 - RNA, 17 nt, synthetic construct
  misc_feature 1..17: note = Synthetic
  source 1..17: mol_type = other RNA
gtcctccgcgtcgggtc

SEQ ID NO: 3194 - RNA, 17 nt, synthetic construct
  misc_feature 1..17: note = Synthetic
  source 1..17: mol_type = other RNA
ctccgcgtcgggtcggg

SEQ ID NO: 3195 - RNA, 17 nt, synthetic construct
  misc_feature 1..17: note = Synthetic
  source 1..17: mol_type = other RNA
cggcgctcgcgcctgtg

SEQ ID NO: 3196 - RNA, 17 nt, synthetic construct
  misc_feature 1..17: note = Synthetic
  source 1..17: mol_type = other RNA
cgctcgcgcctgtgggg

SEQ ID NO: 3197 - RNA, 17 nt, synthetic construct
  misc_feature 1..17: note = Synthetic
  source 1..17: mol_type = other RNA
cgtggaccacgccccgg

SEQ ID NO: 3198 - RNA, 17 nt, synthetic construct
  misc_feature 1..17: note = Synthetic
  source 1..17: mol_type = other RNA
gtggaccacgccccggc

SEQ ID NO: 3199 - RNA, 17 nt, synthetic construct
  misc_feature 1..17: note = Synthetic
  source 1..17: mol_type = other RNA
tggaccacgccccggcg

SEQ ID NO: 3200 - RNA, 17 nt, synthetic construct
  misc_feature 1..17: note = Synthetic
  source 1..17: mol_type = other RNA
tcacgtgtacgacatcc

SEQ ID NO: 3201 - RNA, 17 nt, synthetic construct
  misc_feature 1..17: note = Synthetic
  source 1..17: mol_type = other RNA
cgacatcctggagaacg

SEQ ID NO: 3202 - RNA, 17 nt, synthetic construct
  misc_feature 1..17: note = Synthetic
  source 1..17: mol_type = other RNA
aacgtggagcacgcgta

SEQ ID NO: 3203 - RNA, 17 nt, synthetic construct
  misc_feature 1..17: note = Synthetic
  source 1..17: mol_type = other RNA
gtcgtacacgtgaaaga

SEQ ID NO: 3204 - RNA, 17 nt, synthetic construct
  misc_feature 1..17: note = Synthetic
  source 1..17: mol_type = other RNA
tgaaagacggtgacggt

SEQ ID NO: 3205 - RNA, 17 nt, synthetic construct
  misc_feature 1..17: note = Synthetic
  source 1..17: mol_type = other RNA
ggggttgaaccccgccg

SEQ ID NO: 3206 - RNA, 17 nt, synthetic construct
  misc_feature 1..17: note = Synthetic
  source 1..17: mol_type = other RNA
cacaggcgcgagcgccg

SEQ ID NO: 3207 - RNA, 17 nt, synthetic construct
  misc_feature 1..17: note = Synthetic
  source 1..17: mol_type = other RNA
agccgcccgacccgacg

SEQ ID NO: 3208 - RNA, 17 nt, synthetic construct
  misc_feature 1..17: note = Synthetic
  source 1..17: mol_type = other RNA
cgcccgacccgacgcgg

SEQ ID NO: 3209 - RNA, 17 nt, synthetic construct
  misc_feature 1..17: note = Synthetic
  source 1..17: mol_type = other RNA
ccccccgcagtacacct

SEQ ID NO: 3210 - RNA, 17 nt, synthetic construct
  misc_feature 1..17: note = Synthetic
  source 1..17: mol_type = other RNA
cccccgcagtacacctt

SEQ ID NO: 3211 - RNA, 17 nt, synthetic construct
  misc_feature 1..17: note = Synthetic
  source 1..17: mol_type = other RNA
ccccgcagtacaccttg

SEQ ID NO: 3212 - RNA, 17 nt, synthetic construct
  misc_feature 1..17: note = Synthetic
  source 1..17: mol_type = other RNA
gtgaccgtcgtgcaccc

SEQ ID NO: 3213 - RNA, 17 nt, synthetic construct
  misc_feature 1..17: note = Synthetic
  source 1..17: mol_type = other RNA
cccggcgcgcttctccg

SEQ ID NO: 3214 - RNA, 17 nt, synthetic construct
  misc_feature 1..17: note = Synthetic
  source 1..17: mol_type = other RNA
ccggcgcgcttctccgg

SEQ ID NO: 3215 - RNA, 17 nt, synthetic construct
  misc_feature 1..17: note = Synthetic
  source 1..17: mol_type = other RNA
cggcgcgcttctccggg

SEQ ID NO: 3216 - RNA, 17 nt, synthetic construct
  misc_feature 1..17: note = Synthetic
  source 1..17: mol_type = other RNA
ggcgcgcttctccgggg

SEQ ID NO: 3217 - RNA, 17 nt, synthetic construct
  misc_feature 1..17: note = Synthetic
  source 1..17: mol_type = other RNA
ctcgtccagcacccgcg

SEQ ID NO: 3218 - RNA, 17 nt, synthetic construct
  misc_feature 1..17: note = Synthetic
  source 1..17: mol_type = other RNA
attcgctatagtacgta

SEQ ID NO: 3219 - RNA, 17 nt, synthetic construct
  misc_feature 1..17: note = Synthetic
  source 1..17: mol_type = other RNA
tatagtacgtatggcgc

SEQ ID NO: 3220 - RNA, 17 nt, synthetic construct
  misc_feature 1..17: note = Synthetic
  source 1..17: mol_type = other RNA
atagtacgtatggcgct

SEQ ID NO: 3221 - RNA, 17 nt, synthetic construct
  misc_feature 1..17: note = Synthetic
  source 1..17: mol_type = other RNA
tacgtatggcgctgggt

SEQ ID NO: 3222 - RNA, 17 nt, synthetic construct
  misc_feature 1..17: note = Synthetic
  source 1..17: mol_type = other RNA
ttctgttgcgtcccgac

SEQ ID NO: 3223 - RNA, 17 nt, synthetic construct
  misc_feature 1..17: note = Synthetic
  source 1..17: mol_type = other RNA
tctgttgcgtcccgact

SEQ ID NO: 3224 - RNA, 17 nt, synthetic construct
  misc_feature 1..17: note = Synthetic
  source 1..17: mol_type = other RNA
ctgttgcgtcccgactg

SEQ ID NO: 3225 - RNA, 17 nt, synthetic construct
  misc_feature 1..17: note = Synthetic
  source 1..17: mol_type = other RNA
gcgtcccgactggggcg

SEQ ID NO: 3226 - RNA, 17 nt, synthetic construct
  misc_feature 1..17: note = Synthetic
  source 1..17: mol_type = other RNA
cgactggggcgaggtag

SEQ ID NO: 3227 - RNA, 17 nt, synthetic construct
  misc_feature 1..17: note = Synthetic
  source 1..17: mol_type = other RNA
ggcgggcgcaaaaaacc

SEQ ID NO: 3228 - RNA, 17 nt, synthetic construct
  misc_feature 1..17: note = Synthetic
  source 1..17: mol_type = other RNA
ggccgccgactttcctc

SEQ ID NO: 3229 - RNA, 17 nt, synthetic construct
  misc_feature 1..17: note = Synthetic
  source 1..17: mol_type = other RNA
gccgccgactttcctcc

SEQ ID NO: 3230 - RNA, 17 nt, synthetic construct
  misc_feature 1..17: note = Synthetic
  source 1..17: mol_type = other RNA
ccgccgactttcctccg

SEQ ID NO: 3231 - RNA, 17 nt, synthetic construct
  misc_feature 1..17: note = Synthetic
  source 1..17: mol_type = other RNA
cgccgactttcctccgg

SEQ ID NO: 3232 - RNA, 20 nt, synthetic construct
  misc_feature 1..20: note = Synthetic
  source 1..20: mol_type = other RNA
ggcggcggcccgctgtcccc

SEQ ID NO: 3233 - RNA, 20 nt, synthetic construct
  misc_feature 1..20: note = Synthetic
  source 1..20: mol_type = other RNA
ggcggcccgctgtcccccgg

SEQ ID NO: 3234 - RNA, 20 nt, synthetic construct
  misc_feature 1..20: note = Synthetic
  source 1..20: mol_type = other RNA
gctgtcccccggaggaaagt

SEQ ID NO: 3235 - RNA, 20 nt, synthetic construct
  misc_feature 1..20: note = Synthetic
  source 1..20: mol_type = other RNA
cggaggaaagtcggcggcca

SEQ ID NO: 3236 - RNA, 20 nt, synthetic construct
  misc_feature 1..20: note = Synthetic
  source 1..20: mol_type = other RNA
aggaaagtcggcggccaggg

SEQ ID NO: 3237 - RNA, 20 nt, synthetic construct
  misc_feature 1..20: note = Synthetic
  source 1..20: mol_type = other RNA
tcggcggccagggcggcgtc

SEQ ID NO: 3238 - RNA, 20 nt, synthetic construct
  misc_feature 1..20: note = Synthetic
  source 1..20: mol_type = other RNA
cggcggccagggcggcgtcc

SEQ ID NO: 3239 - RNA, 20 nt, synthetic construct
  misc_feature 1..20: note = Synthetic
  source 1..20: mol_type = other RNA
tccgggttttttgcgcccgc

SEQ ID NO: 3240 - RNA, 20 nt, synthetic construct
  misc_feature 1..20: note = Synthetic
  source 1..20: mol_type = other RNA
ccggccctcgcggagccagc

SEQ ID NO: 3241 - RNA, 20 nt, synthetic construct
  misc_feature 1..20: note = Synthetic
  source 1..20: mol_type = other RNA
cggccctcgcggagccagcc

SEQ ID NO: 3242 - RNA, 20 nt, synthetic construct
  misc_feature 1..20: note = Synthetic
  source 1..20: mol_type = other RNA
ggccctcgcggagccagccg

SEQ ID NO: 3243 - RNA, 20 nt, synthetic construct
  misc_feature 1..20: note = Synthetic
  source 1..20: mol_type = other RNA
ggggacccccgccttgtttg

SEQ ID NO: 3244 - RNA, 20 nt, synthetic construct
  misc_feature 1..20: note = Synthetic
  source 1..20: mol_type = other RNA
aacccctacctcgccccagt

SEQ ID NO: 3245 - RNA, 20 nt, synthetic construct
  misc_feature 1..20: note = Synthetic
  source 1..20: mol_type = other RNA
acccctacctcgccccagtc

SEQ ID NO: 3246 - RNA, 20 nt, synthetic construct
  misc_feature 1..20: note = Synthetic
  source 1..20: mol_type = other RNA
cgccccgcgggtgctggacg

SEQ ID NO: 3247 - RNA, 20 nt, synthetic construct
  misc_feature 1..20: note = Synthetic
  source 1..20: mol_type = other RNA
gctggacgaggatgcccccc

SEQ ID NO: 3248 - RNA, 20 nt, synthetic construct
  misc_feature 1..20: note = Synthetic
  source 1..20: mol_type = other RNA
cccccccggagaagcgcgcc

SEQ ID NO: 3249 - RNA, 20 nt, synthetic construct
  misc_feature 1..20: note = Synthetic
  source 1..20: mol_type = other RNA
cccccaaggtgtactgcggg

SEQ ID NO: 3250 - RNA, 20 nt, synthetic construct
  misc_feature 1..20: note = Synthetic
  source 1..20: mol_type = other RNA
ccccaaggtgtactgcgggg

SEQ ID NO: 3251 - RNA, 20 nt, synthetic construct
  misc_feature 1..20: note = Synthetic
  source 1..20: mol_type = other RNA
gcgtcgggtcgggcggcttc

SEQ ID NO: 3252 - RNA, 20 nt, synthetic construct
  misc_feature 1..20: note = Synthetic
  source 1..20: mol_type = other RNA
ggtcgggcggcttctggccg

SEQ ID NO: 3253 - RNA, 20 nt, synthetic construct
  misc_feature 1..20: note = Synthetic
  source 1..20: mol_type = other RNA
ggccgcggcgctcgcgcctg

SEQ ID NO: 3254 - RNA, 20 nt, synthetic construct
  misc_feature 1..20: note = Synthetic
  source 1..20: mol_type = other RNA
gccgcggcgctcgcgcctgt

SEQ ID NO: 3255 - RNA, 20 nt, synthetic construct
  misc_feature 1..20: note = Synthetic
  source 1..20: mol_type = other RNA
ccgcggcgctcgcgcctgtg

SEQ ID NO: 3256 - RNA, 20 nt, synthetic construct
  misc_feature 1..20: note = Synthetic
  source 1..20: mol_type = other RNA
cggcgctcgcgcctgtgggg

SEQ ID NO: 3257 - RNA, 20 nt, synthetic construct
  misc_feature 1..20: note = Synthetic
  source 1..20: mol_type = other RNA
ctcgcgcctgtggggcggcg

SEQ ID NO: 3258 - RNA, 20 nt, synthetic construct
  misc_feature 1..20: note = Synthetic
  source 1..20: mol_type = other RNA
gggcggcgtggaccacgccc

SEQ ID NO: 3259 - RNA, 20 nt, synthetic construct
  misc_feature 1..20: note = Synthetic
  source 1..20: mol_type = other RNA
cggcgtggaccacgccccgg

SEQ ID NO: 3260 - RNA, 20 nt, synthetic construct
  misc_feature 1..20: note = Synthetic
  source 1..20: mol_type = other RNA
gcacgcgtacggcatgcgcg

SEQ ID NO: 3261 - RNA, 20 nt, synthetic construct
  misc_feature 1..20: note = Synthetic
  source 1..20: mol_type = other RNA
gtacacgtgaaagacggtga

SEQ ID NO: 3262 - RNA, 20 nt, synthetic construct
  misc_feature 1..20: note = Synthetic
  source 1..20: mol_type = other RNA
cacgtgaaagacggtgacgg

SEQ ID NO: 3263 - RNA, 20 nt, synthetic construct
  misc_feature 1..20: note = Synthetic
  source 1..20: mol_type = other RNA
acgtgaaagacggtgacggt

SEQ ID NO: 3264 - RNA, 20 nt, synthetic construct
  misc_feature 1..20: note = Synthetic
  source 1..20: mol_type = other RNA
cggtggggttgaaccccgcc

SEQ ID NO: 3265 - RNA, 20 nt, synthetic construct
  misc_feature 1..20: note = Synthetic
  source 1..20: mol_type = other RNA
cgtggtccacgccgccccac

SEQ ID NO: 3266 - RNA, 20 nt, synthetic construct
  misc_feature 1..20: note = Synthetic
  source 1..20: mol_type = other RNA
ccccacaggcgcgagcgccg

SEQ ID NO: 3267 - RNA, 20 nt, synthetic construct
  misc_feature 1..20: note = Synthetic
  source 1..20: mol_type = other RNA
tcccccccgcagtacacctt

SEQ ID NO: 3268 - RNA, 20 nt, synthetic construct
  misc_feature 1..20: note = Synthetic
  source 1..20: mol_type = other RNA
cccccccgcagtacaccttg

SEQ ID NO: 3269 - RNA, 20 nt, synthetic construct
  misc_feature 1..20: note = Synthetic
  source 1..20: mol_type = other RNA
ccccccgcagtacaccttgg

SEQ ID NO: 3270 - RNA, 20 nt, synthetic construct
  misc_feature 1..20: note = Synthetic
  source 1..20: mol_type = other RNA
tgcaccccggcgcgcttctc

SEQ ID NO: 3271 - RNA, 20 nt, synthetic construct
  misc_feature 1..20: note = Synthetic
  source 1..20: mol_type = other RNA
gcaccccggcgcgcttctcc

SEQ ID NO: 3272 - RNA, 20 nt, synthetic construct
  misc_feature 1..20: note = Synthetic
  source 1..20: mol_type = other RNA
caccccggcgcgcttctccg

SEQ ID NO: 3273 - RNA, 20 nt, synthetic construct
  misc_feature 1..20: note = Synthetic
  source 1..20: mol_type = other RNA
accccggcgcgcttctccgg

SEQ ID NO: 3274 - RNA, 20 nt, synthetic construct
  misc_feature 1..20: note = Synthetic
  source 1..20: mol_type = other RNA
cccggcgcgcttctccgggg

SEQ ID NO: 3275 - RNA, 20 nt, synthetic construct
  misc_feature 1..20: note = Synthetic
  source 1..20: mol_type = other RNA
catcctcgtccagcacccgc

SEQ ID NO: 3276 - RNA, 20 nt, synthetic construct
  misc_feature 1..20: note = Synthetic
  source 1..20: mol_type = other RNA
cgcattcgctatagtacgta

SEQ ID NO: 3277 - RNA, 20 nt, synthetic construct
  misc_feature 1..20: note = Synthetic
  source 1..20: mol_type = other RNA
cgctatagtacgtatggcgc

SEQ ID NO: 3278 - RNA, 20 nt, synthetic construct
  misc_feature 1..20: note = Synthetic
  source 1..20: mol_type = other RNA
tggcgctgggttggcccggt

SEQ ID NO: 3279 - RNA, 20 nt, synthetic construct
  misc_feature 1..20: note = Synthetic
  source 1..20: mol_type = other RNA
gtcccgactggggcgaggta

SEQ ID NO: 3280 - RNA, 20 nt, synthetic construct
  misc_feature 1..20: note = Synthetic
  source 1..20: mol_type = other RNA
tcccgactggggcgaggtag

SEQ ID NO: 3281 - RNA, 20 nt, synthetic construct
  misc_feature 1..20: note = Synthetic
  source 1..20: mol_type = other RNA
taaaagttttgcctcaaaca

SEQ ID NO: 3282 - RNA, 20 nt, synthetic construct
  misc_feature 1..20: note = Synthetic
  source 1..20: mol_type = other RNA
aagttttgcctcaaacaagg

SEQ ID NO: 3283 - RNA, 20 nt, synthetic construct
  misc_feature 1..20: note = Synthetic
  source 1..20: mol_type = other RNA
agttttgcctcaaacaaggc

SEQ ID NO: 3284 - RNA, 20 nt, synthetic construct
  misc_feature 1..20: note = Synthetic
  source 1..20: mol_type = other RNA
acaaggcgggggtccccggc

SEQ ID NO: 3285 - RNA, 20 nt, synthetic construct
  misc_feature 1..20: note = Synthetic
  source 1..20: mol_type = other RNA
ggtccccggctggctccgcg

SEQ ID NO: 3286 - RNA, 20 nt, synthetic construct
  misc_feature 1..20: note = Synthetic
  source 1..20: mol_type = other RNA
gtccccggctggctccgcga

SEQ ID NO: 3287 - RNA, 20 nt, synthetic construct
  misc_feature 1..20: note = Synthetic
  source 1..20: mol_type = other RNA
ccggctggctccgcgagggc

SEQ ID NO: 3288 - RNA, 20 nt, synthetic construct
  misc_feature 1..20: note = Synthetic
  source 1..20: mol_type = other RNA
gctggctccgcgagggccgg

SEQ ID NO: 3289 - RNA, 20 nt, synthetic construct
  misc_feature 1..20: note = Synthetic
  source 1..20: mol_type = other RNA
ctggctccgcgagggccggc

SEQ ID NO: 3290 - RNA, 20 nt, synthetic construct
  misc_feature 1..20: note = Synthetic
  source 1..20: mol_type = other RNA
cctggccgccgactttcctc

SEQ ID NO: 3291 - RNA, 20 nt, synthetic construct
  misc_feature 1..20: note = Synthetic
  source 1..20: mol_type = other RNA
ctggccgccgactttcctcc

SEQ ID NO: 3292 - RNA, 20 nt, synthetic construct
  misc_feature 1..20: note = Synthetic
  source 1..20: mol_type = other RNA
gactttcctccgggggacag

SEQ ID NO: 3293 - RNA, 20 nt, synthetic construct
  misc_feature 1..20: note = Synthetic
  source 1..20: mol_type = other RNA
actttcctccgggggacagc

SEQ ID NO: 3294 - RNA, 20 nt, synthetic construct
  misc_feature 1..20: note = Synthetic
  source 1..20: mol_type = other RNA
ggacagcgggccgccgccac

SEQ ID NO: 3295 - RNA, 17 nt, synthetic construct
  misc_feature 1..17: note = Synthetic
  source 1..17: mol_type = other RNA
ggcggcccgctgtcccc

SEQ ID NO: 3296 - RNA, 17 nt, synthetic construct
  misc_feature 1..17: note = Synthetic
  source 1..17: mol_type = other RNA
ggcccgctgtcccccgg

SEQ ID NO: 3297 - RNA, 17 nt, synthetic construct
  misc_feature 1..17: note = Synthetic
  source 1..17: mol_type = other RNA
ccccggaggaaagtcgg

SEQ ID NO: 3298 - RNA, 17 nt, synthetic construct
  misc_feature 1..17: note = Synthetic
  source 1..17: mol_type = other RNA
gaggaaagtcggcggcc

SEQ ID NO: 3299 - RNA, 17 nt, synthetic construct
  misc_feature 1..17: note = Synthetic
  source 1..17: mol_type = other RNA
aggaaagtcggcggcca

SEQ ID NO: 3300 - RNA, 17 nt, synthetic construct
  misc_feature 1..17: note = Synthetic
  source 1..17: mol_type = other RNA
gcggccagggcggcgtc

SEQ ID NO: 3301 - RNA, 17 nt, synthetic construct
  misc_feature 1..17: note = Synthetic
  source 1..17: mol_type = other RNA
cggccagggcggcgtcc

SEQ ID NO: 3302 - RNA, 17 nt, synthetic construct
  misc_feature 1..17: note = Synthetic
  source 1..17: mol_type = other RNA
gcgcccgccggccctcg

SEQ ID NO: 3303 - RNA, 17 nt, synthetic construct
  misc_feature 1..17: note = Synthetic
  source 1..17: mol_type = other RNA
gccctcgcggagccagc

SEQ ID NO: 3304 - RNA, 17 nt, synthetic construct
  misc_feature 1..17: note = Synthetic
  source 1..17: mol_type = other RNA
ccctcgcggagccagcc

SEQ ID NO: 3305 - RNA, 17 nt, synthetic construct
  misc_feature 1..17: note = Synthetic
  source 1..17: mol_type = other RNA
cctcgcggagccagccg

SEQ ID NO: 3306 - RNA, 17 nt, synthetic construct
  misc_feature 1..17: note = Synthetic
  source 1..17: mol_type = other RNA
gacccccgccttgtttg

SEQ ID NO: 3307 - RNA, 17 nt, synthetic construct
  misc_feature 1..17: note = Synthetic
  source 1..17: mol_type = other RNA
ccctacctcgccccagt

SEQ ID NO: 3308 - RNA, 17 nt, synthetic construct
  misc_feature 1..17: note = Synthetic
  source 1..17: mol_type = other RNA
cctacctcgccccagtc

SEQ ID NO: 3309 - RNA, 17 nt, synthetic construct
  misc_feature 1..17: note = Synthetic
  source 1..17: mol_type = other RNA
cccgcgggtgctggacg

SEQ ID NO: 3310 - RNA, 17 nt, synthetic construct
  misc_feature 1..17: note = Synthetic
  source 1..17: mol_type = other RNA
ggacgaggatgcccccc

SEQ ID NO: 3311 - RNA, 17 nt, synthetic construct
  misc_feature 1..17: note = Synthetic
  source 1..17: mol_type = other RNA
cccccggagaagcgcgc

SEQ ID NO: 3312 - RNA, 17 nt, synthetic construct
  misc_feature 1..17: note = Synthetic
  source 1..17: mol_type = other RNA
cccggagaagcgcgccg

SEQ ID NO: 3313 - RNA, 17 nt, synthetic construct
  misc_feature 1..17: note = Synthetic
  source 1..17: mol_type = other RNA
cccccaaggtgtactgc

SEQ ID NO: 3314 - RNA, 17 nt, synthetic construct
  misc_feature 1..17: note = Synthetic
  source 1..17: mol_type = other RNA
cccaaggtgtactgcgg

SEQ ID NO: 3315 - RNA, 17 nt, synthetic construct
  misc_feature 1..17: note = Synthetic
  source 1..17: mol_type = other RNA
ccaaggtgtactgcggg

SEQ ID NO: 3316 - RNA, 17 nt, synthetic construct
  misc_feature 1..17: note = Synthetic
  source 1..17: mol_type = other RNA
caaggtgtactgcgggg

SEQ ID NO: 3317 - RNA, 17 nt, synthetic construct
  misc_feature 1..17: note = Synthetic
  source 1..17: mol_type = other RNA
cgcgacgtcctccgcgt

SEQ ID NO: 3318 - RNA, 17 nt, synthetic construct
  misc_feature 1..17: note = Synthetic
  source 1..17: mol_type = other RNA
tcgggtcgggcggcttc

SEQ ID NO: 3319 - RNA, 17 nt, synthetic construct
  misc_feature 1..17: note = Synthetic
  source 1..17: mol_type = other RNA
cgggcggcttctggccg

SEQ ID NO: 3320 - RNA, 17 nt, synthetic construct
  misc_feature 1..17: note = Synthetic
  source 1..17: mol_type = other RNA
cgcggcgctcgcgcctg

SEQ ID NO: 3321 - RNA, 17 nt, synthetic construct
  misc_feature 1..17: note = Synthetic
  source 1..17: mol_type = other RNA
gcggcgctcgcgcctgt

SEQ ID NO: 3322 - RNA, 17 nt, synthetic construct
  misc_feature 1..17: note = Synthetic
  source 1..17: mol_type = other RNA
gcgcctgtggggcggcg

SEQ ID NO: 3323 - RNA, 17 nt, synthetic construct
  misc_feature 1..17: note = Synthetic
  source 1..17: mol_type = other RNA
cggcgtggaccacgccc

SEQ ID NO: 3324 - RNA, 17 nt, synthetic construct
  misc_feature 1..17: note = Synthetic
  source 1..17: mol_type = other RNA
cgcgtacggcatgcgcg

SEQ ID NO: 3325 - RNA, 17 nt, synthetic construct
  misc_feature 1..17: note = Synthetic
  source 1..17: mol_type = other RNA
cgtgctccacgttctcc

SEQ ID NO: 3326 - RNA, 17 nt, synthetic construct
  misc_feature 1..17: note = Synthetic
  source 1..17: mol_type = other RNA
cacgtgaaagacggtga

SEQ ID NO: 3327 - RNA, 17 nt, synthetic construct
  misc_feature 1..17: note = Synthetic
  source 1..17: mol_type = other RNA
gtgaaagacggtgacgg

SEQ ID NO: 3328 - RNA, 17 nt, synthetic construct
  misc_feature 1..17: note = Synthetic
  source 1..17: mol_type = other RNA
gaaagacggtgacggtg

SEQ ID NO: 3329 - RNA, 17 nt, synthetic construct
  misc_feature 1..17: note = Synthetic
  source 1..17: mol_type = other RNA
gtggggttgaaccccgc

SEQ ID NO: 3330 - RNA, 17 nt, synthetic construct
  misc_feature 1..17: note = Synthetic
  source 1..17: mol_type = other RNA
tggggttgaaccccgcc

SEQ ID NO: 3331 - RNA, 17 nt, synthetic construct
  misc_feature 1..17: note = Synthetic
  source 1..17: mol_type = other RNA
tgaaccccgccggggcg

SEQ ID NO: 3332 - RNA, 17 nt, synthetic construct
  misc_feature 1..17: note = Synthetic
  source 1..17: mol_type = other RNA
ggtccacgccgccccac

SEQ ID NO: 3333 - RNA, 17 nt, synthetic construct
  misc_feature 1..17: note = Synthetic
  source 1..17: mol_type = other RNA
cccgcagtacaccttgg

SEQ ID NO: 3334 - RNA, 17 nt, synthetic construct
  misc_feature 1..17: note = Synthetic
  source 1..17: mol_type = other RNA
ccttgggggcgcgcttg

SEQ ID NO: 3335 - RNA, 17 nt, synthetic construct
  misc_feature 1..17: note = Synthetic
  source 1..17: mol_type = other RNA
accccggcgcgcttctc

SEQ ID NO: 3336 - RNA, 17 nt, synthetic construct
  misc_feature 1..17: note = Synthetic
  source 1..17: mol_type = other RNA
ccccggcgcgcttctcc

SEQ ID NO: 3337 - RNA, 17 nt, synthetic construct
  misc_feature 1..17: note = Synthetic
  source 1..17: mol_type = other RNA
tcctcgtccagcacccg

SEQ ID NO: 3338 - RNA, 17 nt, synthetic construct
  misc_feature 1..17: note = Synthetic
  source 1..17: mol_type = other RNA
cctcgtccagcacccgc

SEQ ID NO: 3339 - RNA, 17 nt, synthetic construct
  misc_feature 1..17: note = Synthetic
  source 1..17: mol_type = other RNA
atggcgctgggttggcc

SEQ ID NO: 3340 - RNA, 17 nt, synthetic construct
  misc_feature 1..17: note = Synthetic
  source 1..17: mol_type = other RNA
cgctgggttggcccggt

SEQ ID NO: 3341 - RNA, 17 nt, synthetic construct
  misc_feature 1..17: note = Synthetic
  source 1..17: mol_type = other RNA
cccgactggggcgaggt

SEQ ID NO: 3342 - RNA, 17 nt, synthetic construct
  misc_feature 1..17: note = Synthetic
  source 1..17: mol_type = other RNA
ccgactggggcgaggta

SEQ ID NO: 3343 - RNA, 17 nt, synthetic construct
  misc_feature 1..17: note = Synthetic
  source 1..17: mol_type = other RNA
aagttttgcctcaaaca

SEQ ID NO: 3344 - RNA, 17 nt, synthetic construct
  misc_feature 1..17: note = Synthetic
  source 1..17: mol_type = other RNA
ttttgcctcaaacaagg

SEQ ID NO: 3345 - RNA, 17 nt, synthetic construct
  misc_feature 1..17: note = Synthetic
  source 1..17: mol_type = other RNA
tttgcctcaaacaaggc

SEQ ID NO: 3346 - RNA, 17 nt, synthetic construct
  misc_feature 1..17: note = Synthetic
  source 1..17: mol_type = other RNA
ttgcctcaaacaaggcg

SEQ ID NO: 3347 - RNA, 17 nt, synthetic construct
  misc_feature 1..17: note = Synthetic
  source 1..17: mol_type = other RNA
tgcctcaaacaaggcgg

SEQ ID NO: 3348 - RNA, 17 nt, synthetic construct
  misc_feature 1..17: note = Synthetic
  source 1..17: mol_type = other RNA
aacaaggcgggggtccc

SEQ ID NO: 3349 - RNA, 17 nt, synthetic construct
  misc_feature 1..17: note = Synthetic
  source 1..17: mol_type = other RNA
aggcgggggtccccggc

SEQ ID NO: 3350 - RNA, 17 nt, synthetic construct
  misc_feature 1..17: note = Synthetic
  source 1..17: mol_type = other RNA
ccccggctggctccgcg

SEQ ID NO: 3351 - RNA, 17 nt, synthetic construct
  misc_feature 1..17: note = Synthetic
  source 1..17: mol_type = other RNA
cccggctggctccgcga

SEQ ID NO: 3352 - RNA, 17 nt, synthetic construct
  misc_feature 1..17: note = Synthetic
  source 1..17: mol_type = other RNA
gctggctccgcgagggc

SEQ ID NO: 3353 - RNA, 17 nt, synthetic construct
  misc_feature 1..17: note = Synthetic
  source 1..17: mol_type = other RNA
ggctccgcgagggccgg

SEQ ID NO: 3354 - RNA, 17 nt, synthetic construct
  misc_feature 1..17: note = Synthetic
  source 1..17: mol_type = other RNA
gctccgcgagggccggc

SEQ ID NO: 3355 - RNA, 17 nt, synthetic construct
  misc_feature 1..17: note = Synthetic
  source 1..17: mol_type = other RNA
aaacccggacgccgccc

SEQ ID NO: 3356 - RNA, 17 nt, synthetic construct
  misc_feature 1..17: note = Synthetic
  source 1..17: mol_type = other RNA
tttcctccgggggacag

SEQ ID NO: 3357 - RNA, 17 nt, synthetic construct
  misc_feature 1..17: note = Synthetic
  source 1..17: mol_type = other RNA
ttcctccgggggacagc

SEQ ID NO: 3358 - RNA, 17 nt, synthetic construct
  misc_feature 1..17: note = Synthetic
  source 1..17: mol_type = other RNA
cagcgggccgccgccac

SEQ ID NO: 3359 - DNA, 20 bp, synthetic construct
  misc_feature 1..20: note = Synthetic
  source 1..20: mol_type = other DNA
tatggacgccatcacaccga

SEQ ID NO: 3360 - DNA, 20 bp, synthetic construct
  misc_feature 1..20: note = Synthetic
  source 1..20: mol_type = other DNA
atggacgccatcacaccgac

SEQ ID NO: 3361 - DNA, 20 bp, synthetic construct
  misc_feature 1..20: note = Synthetic
  source 1..20: mol_type = other DNA
tggacgccatcacaccgacg

SEQ ID NO: 3362 - DNA, 20 bp, synthetic construct
  misc_feature 1..20: note = Synthetic
  source 1..20: mol_type = other DNA
ggggaccgtcatcacgctcc

SEQ ID NO: 3363 - DNA, 20 bp, synthetic construct
  misc_feature 1..20: note = Synthetic
  source 1..20: mol_type = other DNA
gggaccgtcatcacgctcct

SEQ ID NO: 3364 - DNA, 20 bp, synthetic construct
  misc_feature 1..20: note = Synthetic
  source 1..20: mol_type = other DNA
cacgctcctgggcctgactc

SEQ ID NO: 3365 - DNA, 20 bp, synthetic construct
  misc_feature 1..20: note = Synthetic
  source 1..20: mol_type = other DNA
ctcctgggcctgactccgga

SEQ ID NO: 3366 - DNA, 20 bp, synthetic construct
  misc_feature 1..20: note = Synthetic
  source 1..20: mol_type = other DNA
gcctgactccggaaggccac

SEQ ID NO: 3367 - DNA, 20 bp, synthetic construct
  misc_feature 1..20: note = Synthetic
  source 1..20: mol_type = other DNA
cctgactccggaaggccacc

SEQ ID NO: 3368 - DNA, 20 bp, synthetic construct
  misc_feature 1..20: note = Synthetic
  source 1..20: mol_type = other DNA
gactccggaaggccaccggg

SEQ ID NO: 3369 - DNA, 20 bp, synthetic construct
  misc_feature 1..20: note = Synthetic
  source 1..20: mol_type = other DNA
cgggtggccgttcacgttta

SEQ ID NO: 3370 - DNA, 20 bp, synthetic construct
  misc_feature 1..20: note = Synthetic
  source 1..20: mol_type = other DNA
ccgttcacgtttacggcacg

SEQ ID NO: 3371 - DNA, 20 bp, synthetic construct
  misc_feature 1..20: note = Synthetic
  source 1..20: mol_type = other DNA
gcagtacttttacatgaaca

SEQ ID NO: 3372 - DNA, 20 bp, synthetic construct
  misc_feature 1..20: note = Synthetic
  source 1..20: mol_type = other DNA
gtacttttacatgaacaagg

SEQ ID NO: 3373 - DNA, 20 bp, synthetic construct
  misc_feature 1..20: note = Synthetic
  source 1..20: mol_type = other DNA
cttttacatgaacaaggagg

SEQ ID NO: 3374 - DNA, 20 bp, synthetic construct
  misc_feature 1..20: note = Synthetic
  source 1..20: mol_type = other DNA
tgaacaaggaggaggtcgac

SEQ ID NO: 3375 - DNA, 20 bp, synthetic construct
  misc_feature 1..20: note = Synthetic
  source 1..20: mol_type = other DNA
acgagatctctgcgagcgca

SEQ ID NO: 3376 - DNA, 20 bp, synthetic construct
  misc_feature 1..20: note = Synthetic
  source 1..20: mol_type = other DNA
tctctgcgagcgcatggccg

SEQ ID NO: 3377 - DNA, 20 bp, synthetic construct
  misc_feature 1..20: note = Synthetic
  source 1..20: mol_type = other DNA
cgcggccctgcgcgagtccc

SEQ ID NO: 3378 - DNA, 20 bp, synthetic construct
  misc_feature 1..20: note = Synthetic
  source 1..20: mol_type = other DNA
gcggccctgcgcgagtcccc

SEQ ID NO: 3379 - DNA, 20 bp, synthetic construct
  misc_feature 1..20: note = Synthetic
  source 1..20: mol_type = other DNA
tccccgggcgcgtcgttccg

SEQ ID NO: 3380 - DNA, 20 bp, synthetic construct
  misc_feature 1..20: note = Synthetic
  source 1..20: mol_type = other DNA
gtcgttccgcggcatctccg

SEQ ID NO: 3381 - DNA, 20 bp, synthetic construct
  misc_feature 1..20: note = Synthetic
  source 1..20: mol_type = other DNA
catctccgcggaccacttcg

SEQ ID NO: 3382 - DNA, 20 bp, synthetic construct
  misc_feature 1..20: note = Synthetic
  source 1..20: mol_type = other DNA
ctccgcggaccacttcgagg

SEQ ID NO: 3383 - DNA, 20 bp, synthetic construct
  misc_feature 1..20: note = Synthetic
  source 1..20: mol_type = other DNA
cgcggaccacttcgaggcgg

SEQ ID NO: 3384 - DNA, 20 bp, synthetic construct
  misc_feature 1..20: note = Synthetic
  source 1..20: mol_type = other DNA
ggaccacttcgaggcggagg

SEQ ID NO: 3385 - DNA, 20 bp, synthetic construct
  misc_feature 1..20: note = Synthetic
  source 1..20: mol_type = other DNA
ccacttcgaggcggaggtgg

SEQ ID NO: 3386 - DNA, 20 bp, synthetic construct
  misc_feature 1..20: note = Synthetic
  source 1..20: mol_type = other DNA
taccgcgtctacgtccgaag

SEQ ID NO: 3387 - DNA, 20 bp, synthetic construct
  misc_feature 1..20: note = Synthetic
  source 1..20: mol_type = other DNA
accgcgtctacgtccgaagc

SEQ ID NO: 3388 - DNA, 20 bp, synthetic construct
  misc_feature 1..20: note = Synthetic
  source 1..20: mol_type = other DNA
cctgtgcgacaacttctgcc

SEQ ID NO: 3389 - DNA, 20 bp, synthetic construct
  misc_feature 1..20: note = Synthetic
  source 1..20: mol_type = other DNA
cccggccatcaagaagtacg

SEQ ID NO: 3390 - DNA, 20 bp, synthetic construct
  misc_feature 1..20: note = Synthetic
  source 1..20: mol_type = other DNA
ccggccatcaagaagtacga

SEQ ID NO: 3391 - DNA, 20 bp, synthetic construct
  misc_feature 1..20: note = Synthetic
  source 1..20: mol_type = other DNA
gccatcaagaagtacgaggg

SEQ ID NO: 3392 - DNA, 20 bp, synthetic construct
  misc_feature 1..20: note = Synthetic
  source 1..20: mol_type = other DNA
ccatcaagaagtacgagggt

SEQ ID NO: 3393 - DNA, 20 bp, synthetic construct
  misc_feature 1..20: note = Synthetic
  source 1..20: mol_type = other DNA
catcaagaagtacgagggtg

SEQ ID NO: 3394 - DNA, 20 bp, synthetic construct
  misc_feature 1..20: note = Synthetic
  source 1..20: mol_type = other DNA
gtggggtcgacgccaccacc

SEQ ID NO: 3395 - DNA, 20 bp, synthetic construct
  misc_feature 1..20: note = Synthetic
  source 1..20: mol_type = other DNA
cgccaccacccggttcatcc

SEQ ID NO: 3396 - DNA, 20 bp, synthetic construct
  misc_feature 1..20: note = Synthetic
  source 1..20: mol_type = other DNA
cggttcatcctggacaaccc

SEQ ID NO: 3397 - DNA, 20 bp, synthetic construct
  misc_feature 1..20: note = Synthetic
  source 1..20: mol_type = other DNA
ggttcatcctggacaacccc

SEQ ID NO: 3398 - DNA, 20 bp, synthetic construct
  misc_feature 1..20: note = Synthetic
  source 1..20: mol_type = other DNA
aaccccgggttcgtcacctt

SEQ ID NO: 3399 - DNA, 20 bp, synthetic construct
  misc_feature 1..20: note = Synthetic
  source 1..20: mol_type = other DNA
ccgggttcgtcaccttcggc

SEQ ID NO: 3400 - DNA, 20 bp, synthetic construct
  misc_feature 1..20: note = Synthetic
  source 1..20: mol_type = other DNA
cggctggtaccgtctcaaac

SEQ ID NO: 3401 - DNA, 20 bp, synthetic construct
  misc_feature 1..20: note = Synthetic
  source 1..20: mol_type = other DNA
ggctggtaccgtctcaaacc

SEQ ID NO: 3402 - DNA, 20 bp, synthetic construct
  misc_feature 1..20: note = Synthetic
  source 1..20: mol_type = other DNA
ggtaccgtctcaaaccgggc

SEQ ID NO: 3403 - DNA, 20 bp, synthetic construct
  misc_feature 1..20: note = Synthetic
  source 1..20: mol_type = other DNA
gaacaacacgctagcccagc

SEQ ID NO: 3404 - DNA, 20 bp, synthetic construct
  misc_feature 1..20: note = Synthetic
  source 1..20: mol_type = other DNA
caacacgctagcccagccgg

SEQ ID NO: 3405 - RNA, 20 nt, synthetic construct
  misc_feature 1..20: note = Synthetic
  source 1..20: mol_type = other RNA
agcccagccggcggccccga

SEQ ID NO: 3406 - DNA, 20 bp, synthetic construct
  misc_feature 1..20: note = Synthetic
  source 1..20: mol_type = other DNA
ccggcggccccgatggcctt

SEQ ID NO: 3407 - DNA, 20 bp, synthetic construct
  misc_feature 1..20: note = Synthetic
  source 1..20: mol_type = other DNA
cggcggccccgatggccttc

SEQ ID NO: 3408 - DNA, 20 bp, synthetic construct
  misc_feature 1..20: note = Synthetic
  source 1..20: mol_type = other DNA
cgacgtcgagtttaactgta

SEQ ID NO: 3409 - DNA, 20 bp, synthetic construct
  misc_feature 1..20: note = Synthetic
  source 1..20: mol_type = other DNA
cgtcgagtttaactgtacgg

SEQ ID NO: 3410 - DNA, 20 bp, synthetic construct
  misc_feature 1..20: note = Synthetic
  source 1..20: mol_type = other DNA
taactgtacggcggacaacc

SEQ ID NO: 3411 - DNA, 20 bp, synthetic construct
  misc_feature 1..20: note = Synthetic
  source 1..20: mol_type = other DNA
ggcggacaacctggccatcg

SEQ ID NO: 3412 - DNA, 20 bp, synthetic construct
  misc_feature 1..20: note = Synthetic
  source 1..20: mol_type = other DNA
gcggacaacctggccatcga

SEQ ID NO: 3413 - DNA, 20 bp, synthetic construct
  misc_feature 1..20: note = Synthetic
  source 1..20: mol_type = other DNA
cggacaacctggccatcgag

SEQ ID NO: 3414 - DNA, 20 bp, synthetic construct
  misc_feature 1..20: note = Synthetic
  source 1..20: mol_type = other DNA
ggacaacctggccatcgagg

SEQ ID NO: 3415 - DNA, 20 bp, synthetic construct
  misc_feature 1..20: note = Synthetic
  source 1..20: mol_type = other DNA
gacaacctggccatcgaggg

SEQ ID NO: 3416 - DNA, 20 bp, synthetic construct
  misc_feature 1..20: note = Synthetic
  source 1..20: mol_type = other DNA
ggggggcatgagcgacctac

SEQ ID NO: 3417 - DNA, 20 bp, synthetic construct
  misc_feature 1..20: note = Synthetic
  source 1..20: mol_type = other DNA
gtgcttcgatatcgaatgca

SEQ ID NO: 3418 - DNA, 20 bp, synthetic construct
  misc_feature 1..20: note = Synthetic
  source 1..20: mol_type = other DNA
cttcgatatcgaatgcaagg

SEQ ID NO: 3419 - DNA, 20 bp, synthetic construct
  misc_feature 1..20: note = Synthetic
  source 1..20: mol_type = other DNA
ttcgatatcgaatgcaaggc

SEQ ID NO: 3420 - DNA, 20 bp, synthetic construct
  misc_feature 1..20: note = Synthetic
  source 1..20: mol_type = other DNA
tcgatatcgaatgcaaggcg

SEQ ID NO: 3421 - DNA, 20 bp, synthetic construct
  misc_feature 1..20: note = Synthetic
  source 1..20: mol_type = other DNA
cgatatcgaatgcaaggcgg

SEQ ID NO: 3422 - DNA, 20 bp, synthetic construct
  misc_feature 1..20: note = Synthetic
  source 1..20: mol_type = other DNA
gatatcgaatgcaaggcggg

SEQ ID NO: 3423 - DNA, 20 bp, synthetic construct
  misc_feature 1..20: note = Synthetic
  source 1..20: mol_type = other DNA
atatcgaatgcaaggcgggg

SEQ ID NO: 3424 - DNA, 20 bp, synthetic construct
  misc_feature 1..20: note = Synthetic
  source 1..20: mol_type = other DNA
tatcgaatgcaaggcggggg

SEQ ID NO: 3425 - DNA, 20 bp, synthetic construct
  misc_feature 1..20: note = Synthetic
  source 1..20: mol_type = other DNA
cgaatgcaaggcgggggggg

SEQ ID NO: 3426 - RNA, 20 nt, synthetic construct
  misc_feature 1..20: note = Synthetic
  source 1..20: mol_type = other RNA
ggcggggggggaggacgagc

SEQ ID NO: 3427 - DNA, 20 bp, synthetic construct
  misc_feature 1..20: note = Synthetic
  source 1..20: mol_type = other DNA
ggaggacgagctggcctttc

SEQ ID NO: 3428 - DNA, 20 bp, synthetic construct
  misc_feature 1..20: note = Synthetic
  source 1..20: mol_type = other DNA
ggacgagctggcctttccgg

SEQ ID NO: 3429 - DNA, 20 bp, synthetic construct
  misc_feature 1..20: note = Synthetic
  source 1..20: mol_type = other DNA
gagctggcctttccggtggc

SEQ ID NO: 3430 - DNA, 20 bp, synthetic construct
  misc_feature 1..20: note = Synthetic
  source 1..20: mol_type = other DNA
agctggcctttccggtggcc

SEQ ID NO: 3431 - DNA, 20 bp, synthetic construct
  misc_feature 1..20: note = Synthetic
  source 1..20: mol_type = other DNA
ctttccggtggccgggcacc

SEQ ID NO: 3432 - DNA, 20 bp, synthetic construct
  misc_feature 1..20: note = Synthetic
  source 1..20: mol_type = other DNA
tccggtggccgggcacccgg

SEQ ID NO: 3433 - RNA, 20 nt, synthetic construct
  misc_feature 1..20: note = Synthetic
  source 1..20: mol_type = other RNA
ggccgggcacccggaggacc

SEQ ID NO: 3434 - DNA, 20 bp, synthetic construct
  misc_feature 1..20: note = Synthetic
  source 1..20: mol_type = other DNA
cgacctgtccaccaccgccc

SEQ ID NO: 3435 - DNA, 20 bp, synthetic construct
  misc_feature 1..20: note = Synthetic
  source 1..20: mol_type = other DNA
cacgtcctcctgttttcgct

SEQ ID NO: 3436 - DNA, 20 bp, synthetic construct
  misc_feature 1..20: note = Synthetic
  source 1..20: mol_type = other DNA
cgaatcccacctgaacgagc

SEQ ID NO: 3437 - DNA, 20 bp, synthetic construct
  misc_feature 1..20: note = Synthetic
  source 1..20: mol_type = other DNA
atcccacctgaacgagctgg

SEQ ID NO: 3438 - DNA, 20 bp, synthetic construct
  misc_feature 1..20: note = Synthetic
  source 1..20: mol_type = other DNA
acctgaacgagctggcggcc

SEQ ID NO: 3439 - DNA, 20 bp, synthetic construct
  misc_feature 1..20: note = Synthetic
  source 1..20: mol_type = other DNA
cctgaacgagctggcggcca

SEQ ID NO: 3440 - DNA, 20 bp, synthetic construct
  misc_feature 1..20: note = Synthetic
  source 1..20: mol_type = other DNA
ctgaacgagctggcggccag

SEQ ID NO: 3441 - DNA, 20 bp, synthetic construct
  misc_feature 1..20: note = Synthetic
  source 1..20: mol_type = other DNA
caggggcctgcccacgcccg

SEQ ID NO: 3442 - DNA, 20 bp, synthetic construct
  misc_feature 1..20: note = Synthetic
  source 1..20: mol_type = other DNA
cctgcccacgcccgtggttc

SEQ ID NO: 3443 - DNA, 20 bp, synthetic construct
  misc_feature 1..20: note = Synthetic
  source 1..20: mol_type = other DNA
cagcgaattcgagatgctgt

SEQ ID NO: 3444 - DNA, 20 bp, synthetic construct
  misc_feature 1..20: note = Synthetic
  source 1..20: mol_type = other DNA
atgacccttgtgaaacagta

SEQ ID NO: 3445 - DNA, 20 bp, synthetic construct
  misc_feature 1..20: note = Synthetic
  source 1..20: mol_type = other DNA
tacggccccgagttcgtgac

SEQ ID NO: 3446 - DNA, 20 bp, synthetic construct
  misc_feature 1..20: note = Synthetic
  source 1..20: mol_type = other DNA
acggccccgagttcgtgacc

SEQ ID NO: 3447 - DNA, 20 bp, synthetic construct
  misc_feature 1..20: note = Synthetic
  source 1..20: mol_type = other DNA
acaacatcatcaacttcgac

SEQ ID NO: 3448 - DNA, 20 bp, synthetic construct
  misc_feature 1..20: note = Synthetic
  source 1..20: mol_type = other DNA
cttcgactggcccttcttgc

SEQ ID NO: 3449 - DNA, 20 bp, synthetic construct
  misc_feature 1..20: note = Synthetic
  source 1..20: mol_type = other DNA
cttcttgctggccaagctga

SEQ ID NO: 3450 - DNA, 20 bp, synthetic construct
  misc_feature 1..20: note = Synthetic
  source 1..20: mol_type = other DNA
caagctgacggacatttaca

SEQ ID NO: 3451 - DNA, 20 bp, synthetic construct
  misc_feature 1..20: note = Synthetic
  source 1..20: mol_type = other DNA
ggacatttacaaggtccccc

SEQ ID NO: 3452 - DNA, 20 bp, synthetic construct
  misc_feature 1..20: note = Synthetic
  source 1..20: mol_type = other DNA
atttacaaggtccccctgga

SEQ ID NO: 3453 - DNA, 20 bp, synthetic construct
  misc_feature 1..20: note = Synthetic
  source 1..20: mol_type = other DNA
tttacaaggtccccctggac

SEQ ID NO: 3454 - DNA, 20 bp, synthetic construct
  misc_feature 1..20: note = Synthetic
  source 1..20: mol_type = other DNA
aaggtccccctggacgggta

SEQ ID NO: 3455 - DNA, 20 bp, synthetic construct
  misc_feature 1..20: note = Synthetic
  source 1..20: mol_type = other DNA
gacgggtacggccgcatgaa

SEQ ID NO: 3456 - DNA, 20 bp, synthetic construct
  misc_feature 1..20: note = Synthetic
  source 1..20: mol_type = other DNA
ggtacggccgcatgaacggc

SEQ ID NO: 3457 - DNA, 20 bp, synthetic construct
  misc_feature 1..20: note = Synthetic
  source 1..20: mol_type = other DNA
gtacggccgcatgaacggcc

SEQ ID NO: 3458 - DNA, 20 bp, synthetic construct
  misc_feature 1..20: note = Synthetic
  source 1..20: mol_type = other DNA
tacggccgcatgaacggccg

SEQ ID NO: 3459 - DNA, 20 bp, synthetic construct
  misc_feature 1..20: note = Synthetic
  source 1..20: mol_type = other DNA
gccggggcgtgtttcgcgtg

SEQ ID NO: 3460 - DNA, 20 bp, synthetic construct
  misc_feature 1..20: note = Synthetic
  source 1..20: mol_type = other DNA
ccggggcgtgtttcgcgtgt

SEQ ID NO: 3461 - DNA, 20 bp, synthetic construct
  misc_feature 1..20: note = Synthetic
  source 1..20: mol_type = other DNA
gtgtttcgcgtgtgggacat

SEQ ID NO: 3462 - DNA, 20 bp, synthetic construct
  misc_feature 1..20: note = Synthetic
  source 1..20: mol_type = other DNA
ccagaagcgcagcaagataa

SEQ ID NO: 3463 - DNA, 20 bp, synthetic construct
  misc_feature 1..20: note = Synthetic
  source 1..20: mol_type = other DNA
cgcagcaagataaaggtgaa

SEQ ID NO: 3464 - DNA, 20 bp, synthetic construct
  misc_feature 1..20: note = Synthetic
  source 1..20: mol_type = other DNA
caagataaaggtgaacggca

SEQ ID NO: 3465 - DNA, 20 bp, synthetic construct
  misc_feature 1..20: note = Synthetic
  source 1..20: mol_type = other DNA
atggtgaacatcgacatgta

SEQ ID NO: 3466 - DNA, 20 bp, synthetic construct
  misc_feature 1..20: note = Synthetic
  source 1..20: mol_type = other DNA
tggtgaacatcgacatgtac

SEQ ID NO: 3467 - DNA, 20 bp, synthetic construct
  misc_feature 1..20: note = Synthetic
  source 1..20: mol_type = other DNA
gagctacaagctcaacgccg

SEQ ID NO: 3468 - DNA, 20 bp, synthetic construct
  misc_feature 1..20: note = Synthetic
  source 1..20: mol_type = other DNA
cgtggccgaagccgtcctga

SEQ ID NO: 3469 - DNA, 20 bp, synthetic construct
  misc_feature 1..20: note = Synthetic
  source 1..20: mol_type = other DNA
cgtcctgaaggacaagaaga

SEQ ID NO: 3470 - DNA, 20 bp, synthetic construct
  misc_feature 1..20: note = Synthetic
  source 1..20: mol_type = other DNA
atccccgcctactacgccgc

SEQ ID NO: 3471 - DNA, 20 bp, synthetic construct
  misc_feature 1..20: note = Synthetic
  source 1..20: mol_type = other DNA
tccccgcctactacgccgcc

SEQ ID NO: 3472 - RNA, 20 nt, synthetic construct
  misc_feature 1..20: note = Synthetic
  source 1..20: mol_type = other RNA
gccgccgggcccgcgcaacg

SEQ ID NO: 3473 - RNA, 20 nt, synthetic construct
  misc_feature 1..20: note = Synthetic
  source 1..20: mol_type = other RNA
ccgccgggcccgcgcaacgc

SEQ ID NO: 3474 - RNA, 20 nt, synthetic construct
  misc_feature 1..20: note = Synthetic
  source 1..20: mol_type = other RNA
cgccgggcccgcgcaacgcg

SEQ ID NO: 3475 - DNA, 20 bp, synthetic construct
  misc_feature 1..20: note = Synthetic
  source 1..20: mol_type = other DNA
cccgcgcaacgcggggtgat

SEQ ID NO: 3476 - DNA, 20 bp, synthetic construct
  misc_feature 1..20: note = Synthetic
  source 1..20: mol_type = other DNA
gatcggcgagtactgcatac

SEQ ID NO: 3477 - DNA, 20 bp, synthetic construct
  misc_feature 1..20: note = Synthetic
  source 1..20: mol_type = other DNA
ctgcatacaggattccctgc

SEQ ID NO: 3478 - DNA, 20 bp, synthetic construct
  misc_feature 1..20: note = Synthetic
  source 1..20: mol_type = other DNA
catacaggattccctgctgg

SEQ ID NO: 3479 - DNA, 20 bp, synthetic construct
  misc_feature 1..20: note = Synthetic
  source 1..20: mol_type = other DNA
atacaggattccctgctggt

SEQ ID NO: 3480 - DNA, 20 bp, synthetic construct
  misc_feature 1..20: note = Synthetic
  source 1..20: mol_type = other DNA
ttttaagtttttgccccatc

SEQ ID NO: 3481 - DNA, 20 bp, synthetic construct
  misc_feature 1..20: note = Synthetic
  source 1..20: mol_type = other DNA
tttgccccatctggagctct

SEQ ID NO: 3482 - DNA, 20 bp, synthetic construct
  misc_feature 1..20: note = Synthetic
  source 1..20: mol_type = other DNA
gctctcggccgtcgcgcgct

SEQ ID NO: 3483 - DNA, 20 bp, synthetic construct
  misc_feature 1..20: note = Synthetic
  source 1..20: mol_type = other DNA
ctcggccgtcgcgcgcttgg

SEQ ID NO: 3484 - DNA, 20 bp, synthetic construct
  misc_feature 1..20: note = Synthetic
  source 1..20: mol_type = other DNA
tcggccgtcgcgcgcttggc

SEQ ID NO: 3485 - DNA, 20 bp, synthetic construct
  misc_feature 1..20: note = Synthetic
  source 1..20: mol_type = other DNA
atcacccgcaccatctacga

SEQ ID NO: 3486 - DNA, 20 bp, synthetic construct
  misc_feature 1..20: note = Synthetic
  source 1..20: mol_type = other DNA
ctttacgtgcctgctgcgcc

SEQ ID NO: 3487 - DNA, 20 bp, synthetic construct
  misc_feature 1..20: note = Synthetic
  source 1..20: mol_type = other DNA
gctgcgcctggccgaccaga

SEQ ID NO: 3488 - DNA, 20 bp, synthetic construct
  misc_feature 1..20: note = Synthetic
  source 1..20: mol_type = other DNA
ctgcgcctggccgaccagaa

SEQ ID NO: 3489 - DNA, 20 bp, synthetic construct
  misc_feature 1..20: note = Synthetic
  source 1..20: mol_type = other DNA
ccagaagggctttattctgc

SEQ ID NO: 3490 - DNA, 20 bp, synthetic construct
  misc_feature 1..20: note = Synthetic
  source 1..20: mol_type = other DNA
ctttattctgccggacaccc

SEQ ID NO: 3491 - DNA, 20 bp, synthetic construct
  misc_feature 1..20: note = Synthetic
  source 1..20: mol_type = other DNA
tttattctgccggacaccca

SEQ ID NO: 3492 - DNA, 20 bp, synthetic construct
  misc_feature 1..20: note = Synthetic
  source 1..20: mol_type = other DNA
ttattctgccggacacccag

SEQ ID NO: 3493 - DNA, 20 bp, synthetic construct
  misc_feature 1..20: note = Synthetic
  source 1..20: mol_type = other DNA
cggacacccaggggcgattt

SEQ ID NO: 3494 - DNA, 20 bp, synthetic construct
  misc_feature 1..20: note = Synthetic
  source 1..20: mol_type = other DNA
ggacacccaggggcgattta

SEQ ID NO: 3495 - DNA, 20 bp, synthetic construct
  misc_feature 1..20: note = Synthetic
  source 1..20: mol_type = other DNA
gacacccaggggcgatttag

SEQ ID NO: 3496 - DNA, 20 bp, synthetic construct
  misc_feature 1..20: note = Synthetic
  source 1..20: mol_type = other DNA
caggggcgatttaggggcgc

SEQ ID NO: 3497 - DNA, 20 bp, synthetic construct
  misc_feature 1..20: note = Synthetic
  source 1..20: mol_type = other DNA
aggggcgatttaggggcgcc

SEQ ID NO: 3498 - DNA, 20 bp, synthetic construct
  misc_feature 1..20: note = Synthetic
  source 1..20: mol_type = other DNA
ggggcgatttaggggcgccg

SEQ ID NO: 3499 - DNA, 20 bp, synthetic construct
  misc_feature 1..20: note = Synthetic
  source 1..20: mol_type = other DNA
gggcgatttaggggcgccgg

SEQ ID NO: 3500 - DNA, 20 bp, synthetic construct
  misc_feature 1..20: note = Synthetic
  source 1..20: mol_type = other DNA
ggcgatttaggggcgccggg

SEQ ID NO: 3501 - DNA, 20 bp, synthetic construct
  misc_feature 1..20: note = Synthetic
  source 1..20: mol_type = other DNA
gcgatttaggggcgccgggg

SEQ ID NO: 3502 - DNA, 20 bp, synthetic construct
  misc_feature 1..20: note = Synthetic
  source 1..20: mol_type = other DNA
atttaggggcgccggggggg

SEQ ID NO: 3503 - DNA, 20 bp, synthetic construct
  misc_feature 1..20: note = Synthetic
  source 1..20: mol_type = other DNA
gggggaggcgcccaagcgtc

SEQ ID NO: 3504 - DNA, 20 bp, synthetic construct
  misc_feature 1..20: note = Synthetic
  source 1..20: mol_type = other DNA
ccaagcgtccggccgcagcc

SEQ ID NO: 3505 - DNA, 20 bp, synthetic construct
  misc_feature 1..20: note = Synthetic
  source 1..20: mol_type = other DNA
caagcgtccggccgcagccc

SEQ ID NO: 3506 - DNA, 20 bp, synthetic construct
  misc_feature 1..20: note = Synthetic
  source 1..20: mol_type = other DNA
gcgtccggccgcagcccggg

SEQ ID NO: 3507 - RNA, 20 nt, synthetic construct
  misc_feature 1..20: note = Synthetic
  source 1..20: mol_type = other RNA
ggccgcagcccgggaggacg

SEQ ID NO: 3508 - RNA, 20 nt, synthetic construct
  misc_feature 1..20: note = Synthetic
  source 1..20: mol_type = other RNA
cagcccgggaggacgaggag

SEQ ID NO: 3509 - RNA, 20 nt, synthetic construct
  misc_feature 1..20: note = Synthetic
  source 1..20: mol_type = other RNA
ggaggacgaggagcggccag

SEQ ID NO: 3510 - RNA, 20 nt, synthetic construct
  misc_feature 1..20: note = Synthetic
  source 1..20: mol_type = other RNA
ggacgaggagcggccagagg

SEQ ID NO: 3511 - RNA, 20 nt, synthetic construct
  misc_feature 1..20: note = Synthetic
  source 1..20: mol_type = other RNA
cgaggagcggccagaggagg

SEQ ID NO: 3512 - RNA, 20 nt, synthetic construct
  misc_feature 1..20: note = Synthetic
  source 1..20: mol_type = other RNA
gaggagcggccagaggagga

SEQ ID NO: 3513 - RNA, 20 nt, synthetic construct
  misc_feature 1..20: note = Synthetic
  source 1..20: mol_type = other RNA
aggagcggccagaggaggag

SEQ ID NO: 3514 - RNA, 20 nt, synthetic construct
  misc_feature 1..20: note = Synthetic
  source 1..20: mol_type = other RNA
ggagcggccagaggaggagg

SEQ ID NO: 3515 - RNA, 20 nt, synthetic construct
  misc_feature 1..20: note = Synthetic
  source 1..20: mol_type = other RNA
gcggccagaggaggaggggg

SEQ ID NO: 3516 - RNA, 20 nt, synthetic construct
  misc_feature 1..20: note = Synthetic
  source 1..20: mol_type = other RNA
agaggaggagggggaggacg

SEQ ID NO: 3517 - RNA, 20 nt, synthetic construct
  misc_feature 1..20: note = Synthetic
  source 1..20: mol_type = other RNA
ggaggacgaggacgaacgcg

SEQ ID NO: 3518 - RNA, 20 nt, synthetic construct
  misc_feature 1..20: note = Synthetic
  source 1..20: mol_type = other RNA
ggacgaggacgaacgcgagg

SEQ ID NO: 3519 - RNA, 20 nt, synthetic construct
  misc_feature 1..20: note = Synthetic
  source 1..20: mol_type = other RNA
gacgaggacgaacgcgagga

SEQ ID NO: 3520 - RNA, 20 nt, synthetic construct
  misc_feature 1..20: note = Synthetic
  source 1..20: mol_type = other RNA
gaggacgaacgcgaggaggg

SEQ ID NO: 3521 - RNA, 20 nt, synthetic construct
  misc_feature 1..20: note = Synthetic
  source 1..20: mol_type = other RNA
aggacgaacgcgaggagggc

SEQ ID NO: 3522 - RNA, 20 nt, synthetic construct
  misc_feature 1..20: note = Synthetic
  source 1..20: mol_type = other RNA
ggacgaacgcgaggagggcg

SEQ ID NO: 3523 - RNA, 20 nt, synthetic construct
  misc_feature 1..20: note = Synthetic
  source 1..20: mol_type = other RNA
gacgaacgcgaggagggcgg

SEQ ID NO: 3524 - RNA, 20 nt, synthetic construct
  misc_feature 1..20: note = Synthetic
  source 1..20: mol_type = other RNA
gcgaggagggcgggggcgag

SEQ ID NO: 3525 - RNA, 20 nt, synthetic construct
  misc_feature 1..20: note = Synthetic
  source 1..20: mol_type = other RNA
cgaggagggcgggggcgagc

SEQ ID NO: 3526 - RNA, 20 nt, synthetic construct
  misc_feature 1..20: note = Synthetic
  source 1..20: mol_type = other RNA
gggcgggggcgagcgggagc

SEQ ID NO: 3527 - RNA, 20 nt, synthetic construct
  misc_feature 1..20: note = Synthetic
  source 1..20: mol_type = other RNA
cgggggcgagcgggagccgg

SEQ ID NO: 3528 - RNA, 20 nt, synthetic construct
  misc_feature 1..20: note = Synthetic
  source 1..20: mol_type = other RNA
gggggcgagcgggagccgga

SEQ ID NO: 3529 - RNA, 20 nt, synthetic construct
  misc_feature 1..20: note = Synthetic
  source 1..20: mol_type = other RNA
agcgggagccggagggcgcg

SEQ ID NO: 3530 - RNA, 20 nt, synthetic construct
  misc_feature 1..20: note = Synthetic
  source 1..20: mol_type = other RNA
gcgggagccggagggcgcgc

SEQ ID NO: 3531 - RNA, 20 nt, synthetic construct
  misc_feature 1..20: note = Synthetic
  source 1..20: mol_type = other RNA
gagggcgcgcgggagaccgc

SEQ ID NO: 3532 - RNA, 20 nt, synthetic construct
  misc_feature 1..20: note = Synthetic
  source 1..20: mol_type = other RNA
gcgcgcgggagaccgccggc

SEQ ID NO: 3533 - RNA, 20 nt, synthetic construct
  misc_feature 1..20: note = Synthetic
  source 1..20: mol_type = other RNA
ggagaccgccggcaggcacg

SEQ ID NO: 3534 - DNA, 20 bp, synthetic construct
  misc_feature 1..20: note = Synthetic
  source 1..20: mol_type = other DNA
gagaccgccggcaggcacgt

SEQ ID NO: 3535 - DNA, 20 bp, synthetic construct
  misc_feature 1..20: note = Synthetic
  source 1..20: mol_type = other DNA
agaccgccggcaggcacgtg

SEQ ID NO: 3536 - DNA, 20 bp, synthetic construct
  misc_feature 1..20: note = Synthetic
  source 1..20: mol_type = other DNA
cggcaggcacgtggggtacc

SEQ ID NO: 3537 - DNA, 20 bp, synthetic construct
  misc_feature 1..20: note = Synthetic
  source 1..20: mol_type = other DNA
ggcaggcacgtggggtacca

SEQ ID NO: 3538 - DNA, 20 bp, synthetic construct
  misc_feature 1..20: note = Synthetic
  source 1..20: mol_type = other DNA
gcaggcacgtggggtaccag

SEQ ID NO: 3539 - DNA, 20 bp, synthetic construct
  misc_feature 1..20: note = Synthetic
  source 1..20: mol_type = other DNA
caggcacgtggggtaccagg

SEQ ID NO: 3540 - DNA, 20 bp, synthetic construct
  misc_feature 1..20: note = Synthetic
  source 1..20: mol_type = other DNA
acgtggggtaccagggggcc

SEQ ID NO: 3541 - DNA, 20 bp, synthetic construct
  misc_feature 1..20: note = Synthetic
  source 1..20: mol_type = other DNA
cgtggggtaccagggggcca

SEQ ID NO: 3542 - DNA, 20 bp, synthetic construct
  misc_feature 1..20: note = Synthetic
  source 1..20: mol_type = other DNA
agggtccttgaccccacttc

SEQ ID NO: 3543 - DNA, 20 bp, synthetic construct
  misc_feature 1..20: note = Synthetic
  source 1..20: mol_type = other DNA
gggtccttgaccccacttcc

SEQ ID NO: 3544 - DNA, 20 bp, synthetic construct
  misc_feature 1..20: note = Synthetic
  source 1..20: mol_type = other DNA
cgggtttcacgtgaaccccg

SEQ ID NO: 3545 - DNA, 20 bp, synthetic construct
  misc_feature 1..20: note = Synthetic
  source 1..20: mol_type = other DNA
gtttcacgtgaaccccgtgg

SEQ ID NO: 3546 - DNA, 20 bp, synthetic construct
  misc_feature 1..20: note = Synthetic
  source 1..20: mol_type = other DNA
cctgtaccccagcatcatcc

SEQ ID NO: 3547 - DNA, 20 bp, synthetic construct
  misc_feature 1..20: note = Synthetic
  source 1..20: mol_type = other DNA
gcttcagcacgctctccctg

SEQ ID NO: 3548 - DNA, 20 bp, synthetic construct
  misc_feature 1..20: note = Synthetic
  source 1..20: mol_type = other DNA
cttcagcacgctctccctga

SEQ ID NO: 3549 - DNA, 20 bp, synthetic construct
  misc_feature 1..20: note = Synthetic
  source 1..20: mol_type = other DNA
ctccctgagggccgacgcag

SEQ ID NO: 3550 - DNA, 20 bp, synthetic construct
  misc_feature 1..20: note = Synthetic
  source 1..20: mol_type = other DNA
ggccgacgcagtggcgcacc

SEQ ID NO: 3551 - DNA, 20 bp, synthetic construct
  misc_feature 1..20: note = Synthetic
  source 1..20: mol_type = other DNA
cgacgcagtggcgcacctgg

SEQ ID NO: 3552 - DNA, 20 bp, synthetic construct
  misc_feature 1..20: note = Synthetic
  source 1..20: mol_type = other DNA
cgcagtggcgcacctggagg

SEQ ID NO: 3553 - DNA, 20 bp, synthetic construct
  misc_feature 1..20: note = Synthetic
  source 1..20: mol_type = other DNA
gcagtggcgcacctggaggc

SEQ ID NO: 3554 - DNA, 20 bp, synthetic construct
  misc_feature 1..20: note = Synthetic
  source 1..20: mol_type = other DNA
ggcgcacctggaggcgggca

SEQ ID NO: 3555 - DNA, 20 bp, synthetic construct
  misc_feature 1..20: note = Synthetic
  source 1..20: mol_type = other DNA
ggaggcgggcaaggactacc

SEQ ID NO: 3556 - DNA, 20 bp, synthetic construct
  misc_feature 1..20: note = Synthetic
  source 1..20: mol_type = other DNA
caaggactacctggagatcg

SEQ ID NO: 3557 - DNA, 20 bp, synthetic construct
  misc_feature 1..20: note = Synthetic
  source 1..20: mol_type = other DNA
ggactacctggagatcgagg

SEQ ID NO: 3558 - DNA, 20 bp, synthetic construct
  misc_feature 1..20: note = Synthetic
  source 1..20: mol_type = other DNA
gactacctggagatcgaggt

SEQ ID NO: 3559 - DNA, 20 bp, synthetic construct
  misc_feature 1..20: note = Synthetic
  source 1..20: mol_type = other DNA
actacctggagatcgaggtg

SEQ ID NO: 3560 - DNA, 20 bp, synthetic construct
  misc_feature 1..20: note = Synthetic
  source 1..20: mol_type = other DNA
ctacctggagatcgaggtgg

SEQ ID NO: 3561 - DNA, 20 bp, synthetic construct
  misc_feature 1..20: note = Synthetic
  source 1..20: mol_type = other DNA
tacctggagatcgaggtggg

SEQ ID NO: 3562 - DNA, 20 bp, synthetic construct
  misc_feature 1..20: note = Synthetic
  source 1..20: mol_type = other DNA
acctggagatcgaggtgggg

SEQ ID NO: 3563 - DNA, 20 bp, synthetic construct
  misc_feature 1..20: note = Synthetic
  source 1..20: mol_type = other DNA
agatcgaggtgggggggcga

SEQ ID NO: 3564 - DNA, 20 bp, synthetic construct
  misc_feature 1..20: note = Synthetic
  source 1..20: mol_type = other DNA
gcgacggctgttcttcgtca

SEQ ID NO: 3565 - DNA, 20 bp, synthetic construct
  misc_feature 1..20: note = Synthetic
  source 1..20: mol_type = other DNA
gcctcctcagcatcctcctg

SEQ ID NO: 3566 - DNA, 20 bp, synthetic construct
  misc_feature 1..20: note = Synthetic
  source 1..20: mol_type = other DNA
cctcctcagcatcctcctgc

SEQ ID NO: 3567 - DNA, 20 bp, synthetic construct
  misc_feature 1..20: note = Synthetic
  source 1..20: mol_type = other DNA
tcagcatcctcctgcgggac

SEQ ID NO: 3568 - DNA, 20 bp, synthetic construct
  misc_feature 1..20: note = Synthetic
  source 1..20: mol_type = other DNA
tgcgaaagcagatccgctcg

SEQ ID NO: 3569 - DNA, 20 bp, synthetic construct
  misc_feature 1..20: note = Synthetic
  source 1..20: mol_type = other DNA
gattccccagagcagccccg

SEQ ID NO: 3570 - DNA, 20 bp, synthetic construct
  misc_feature 1..20: note = Synthetic
  source 1..20: mol_type = other DNA
tccccagagcagccccgagg

SEQ ID NO: 3571 - DNA, 20 bp, synthetic construct
  misc_feature 1..20: note = Synthetic
  source 1..20: mol_type = other DNA
ccccgaggaggccgtgctcc

SEQ ID NO: 3572 - DNA, 20 bp, synthetic construct
  misc_feature 1..20: note = Synthetic
  source 1..20: mol_type = other DNA
cgtgctcctggacaagcagc

SEQ ID NO: 3573 - DNA, 20 bp, synthetic construct
  misc_feature 1..20: note = Synthetic
  source 1..20: mol_type = other DNA
caagcagcaggccgccatca

SEQ ID NO: 3574 - DNA, 20 bp, synthetic construct
  misc_feature 1..20: note = Synthetic
  source 1..20: mol_type = other DNA
catcaaggtcgtgtgtaact

SEQ ID NO: 3575 - DNA, 20 bp, synthetic construct
  misc_feature 1..20: note = Synthetic
  source 1..20: mol_type = other DNA
gtcgtgtgtaactcggtgta

SEQ ID NO: 3576 - DNA, 20 bp, synthetic construct
  misc_feature 1..20: note = Synthetic
  source 1..20: mol_type = other DNA
tcgtgtgtaactcggtgtac

SEQ ID NO: 3577 - DNA, 20 bp, synthetic construct
  misc_feature 1..20: note = Synthetic
  source 1..20: mol_type = other DNA
taactcggtgtacgggttca

SEQ ID NO: 3578 - DNA, 20 bp, synthetic construct
  misc_feature 1..20: note = Synthetic
  source 1..20: mol_type = other DNA
aactcggtgtacgggttcac

SEQ ID NO: 3579 - DNA, 20 bp, synthetic construct
  misc_feature 1..20: note = Synthetic
  source 1..20: mol_type = other DNA
gggttcacgggagtgcagca

SEQ ID NO: 3580 - DNA, 20 bp, synthetic construct
  misc_feature 1..20: note = Synthetic
  source 1..20: mol_type = other DNA
gtgcctgcacgttgccgcga

SEQ ID NO: 3581 - DNA, 20 bp, synthetic construct
  misc_feature 1..20: note = Synthetic
  source 1..20: mol_type = other DNA
gccgcgacggtgacgaccat

SEQ ID NO: 3582 - DNA, 20 bp, synthetic construct
  misc_feature 1..20: note = Synthetic
  source 1..20: mol_type = other DNA
gcgagtacgtccacgcgcgc

SEQ ID NO: 3583 - DNA, 20 bp, synthetic construct
  misc_feature 1..20: note = Synthetic
  source 1..20: mol_type = other DNA
cgagtacgtccacgcgcgct

SEQ ID NO: 3584 - DNA, 20 bp, synthetic construct
  misc_feature 1..20: note = Synthetic
  source 1..20: mol_type = other DNA
gtacgtccacgcgcgctggg

SEQ ID NO: 3585 - DNA, 20 bp, synthetic construct
  misc_feature 1..20: note = Synthetic
  source 1..20: mol_type = other DNA
ggcggccttcgaacagctcc

SEQ ID NO: 3586 - DNA, 20 bp, synthetic construct
  misc_feature 1..20: note = Synthetic
  source 1..20: mol_type = other DNA
acagctcctggccgatttcc

SEQ ID NO: 3587 - DNA, 20 bp, synthetic construct
  misc_feature 1..20: note = Synthetic
  source 1..20: mol_type = other DNA
gctcctggccgatttcccgg

SEQ ID NO: 3588 - DNA, 20 bp, synthetic construct
  misc_feature 1..20: note = Synthetic
  source 1..20: mol_type = other DNA
cctggccgatttcccggagg

SEQ ID NO: 3589 - DNA, 20 bp, synthetic construct
  misc_feature 1..20: note = Synthetic
  source 1..20: mol_type = other DNA
gcggccgacatgcgcgcccc

SEQ ID NO: 3590 - DNA, 20 bp, synthetic construct
  misc_feature 1..20: note = Synthetic
  source 1..20: mol_type = other DNA
cggccgacatgcgcgccccc

SEQ ID NO: 3591 - DNA, 20 bp, synthetic construct
  misc_feature 1..20: note = Synthetic
  source 1..20: mol_type = other DNA
tattccatgcgcatcatcta

SEQ ID NO: 3592 - DNA, 20 bp, synthetic construct
  misc_feature 1..20: note = Synthetic
  source 1..20: mol_type = other DNA
attccatgcgcatcatctac

SEQ ID NO: 3593 - DNA, 20 bp, synthetic construct
  misc_feature 1..20: note = Synthetic
  source 1..20: mol_type = other DNA
ttccatgcgcatcatctacg

SEQ ID NO: 3594 - DNA, 20 bp, synthetic construct
  misc_feature 1..20: note = Synthetic
  source 1..20: mol_type = other DNA
gcgcatcatctacggggaca

SEQ ID NO: 3595 - DNA, 20 bp, synthetic construct
  misc_feature 1..20: note = Synthetic
  source 1..20: mol_type = other DNA
tccatctttgtgctgtgccg

SEQ ID NO: 3596 - DNA, 20 bp, synthetic construct
  misc_feature 1..20: note = Synthetic
  source 1..20: mol_type = other DNA
tgtgctgtgccgcggcctca

SEQ ID NO: 3597 - DNA, 20 bp, synthetic construct
  misc_feature 1..20: note = Synthetic
  source 1..20: mol_type = other DNA
tgccgcggcctcacggccgc

SEQ ID NO: 3598 - DNA, 20 bp, synthetic construct
  misc_feature 1..20: note = Synthetic
  source 1..20: mol_type = other DNA
gccgcggcctcacggccgcc

SEQ ID NO: 3599 - DNA, 20 bp, synthetic construct
  misc_feature 1..20: note = Synthetic
  source 1..20: mol_type = other DNA
cctcacggccgccgggctga

SEQ ID NO: 3600 - DNA, 20 bp, synthetic construct
  misc_feature 1..20: note = Synthetic
  source 1..20: mol_type = other DNA
ggccgccgggctgacggccg

SEQ ID NO: 3601 - DNA, 20 bp, synthetic construct
  misc_feature 1..20: note = Synthetic
  source 1..20: mol_type = other DNA
gccgccgggctgacggccgt

SEQ ID NO: 3602 - DNA, 20 bp, synthetic construct
  misc_feature 1..20: note = Synthetic
  source 1..20: mol_type = other DNA
gacggccgtgggcgacaaga

SEQ ID NO: 3603 - DNA, 20 bp, synthetic construct
  misc_feature 1..20: note = Synthetic
  source 1..20: mol_type = other DNA
atcgccaagaaaaagtacat

SEQ ID NO: 3604 - DNA, 20 bp, synthetic construct
  misc_feature 1..20: note = Synthetic
  source 1..20: mol_type = other DNA
aagtacatcggcgtcatcta

SEQ ID NO: 3605 - DNA, 20 bp, synthetic construct
  misc_feature 1..20: note = Synthetic
  source 1..20: mol_type = other DNA
agtacatcggcgtcatctac

SEQ ID NO: 3606 - DNA, 20 bp, synthetic construct
  misc_feature 1..20: note = Synthetic
  source 1..20: mol_type = other DNA
gtacatcggcgtcatctacg

SEQ ID NO: 3607 - DNA, 20 bp, synthetic construct
  misc_feature 1..20: note = Synthetic
  source 1..20: mol_type = other DNA
tacatcggcgtcatctacgg

SEQ ID NO: 3608 - DNA, 20 bp, synthetic construct
  misc_feature 1..20: note = Synthetic
  source 1..20: mol_type = other DNA
cgggggtaagatgctcatca

SEQ ID NO: 3609 - DNA, 20 bp, synthetic construct
  misc_feature 1..20: note = Synthetic
  source 1..20: mol_type = other DNA
gggggtaagatgctcatcaa

SEQ ID NO: 3610 - DNA, 20 bp, synthetic construct
  misc_feature 1..20: note = Synthetic
  source 1..20: mol_type = other DNA
taagatgctcatcaagggcg

SEQ ID NO: 3611 - DNA, 20 bp, synthetic construct
  misc_feature 1..20: note = Synthetic
  source 1..20: mol_type = other DNA
gctcatcaagggcgtggatc

SEQ ID NO: 3612 - DNA, 20 bp, synthetic construct
  misc_feature 1..20: note = Synthetic
  source 1..20: mol_type = other DNA
cgtttatcaaccgcacctcc

SEQ ID NO: 3613 - DNA, 20 bp, synthetic construct
  misc_feature 1..20: note = Synthetic
  source 1..20: mol_type = other DNA
gtttatcaaccgcacctcca

SEQ ID NO: 3614 - DNA, 20 bp, synthetic construct
  misc_feature 1..20: note = Synthetic
  source 1..20: mol_type = other DNA
caaccgcacctccagggccc

SEQ ID NO: 3615 - DNA, 20 bp, synthetic construct
  misc_feature 1..20: note = Synthetic
  source 1..20: mol_type = other DNA
ttttacgacgataccgtctc

SEQ ID NO: 3616 - DNA, 20 bp, synthetic construct
  misc_feature 1..20: note = Synthetic
  source 1..20: mol_type = other DNA
cgacgataccgtctccggag

SEQ ID NO: 3617 - DNA, 20 bp, synthetic construct
  misc_feature 1..20: note = Synthetic
  source 1..20: mol_type = other DNA
cgcgttagccgagcgccccg

SEQ ID NO: 3618 - DNA, 20 bp, synthetic construct
  misc_feature 1..20: note = Synthetic
  source 1..20: mol_type = other DNA
gttagccgagcgccccgcgg

SEQ ID NO: 3619 - RNA, 20 nt, synthetic construct
  misc_feature 1..20: note = Synthetic
  source 1..20: mol_type = other RNA
ccgagcgccccgcggaggag

SEQ ID NO: 3620 - DNA, 20 bp, synthetic construct
  misc_feature 1..20: note = Synthetic
  source 1..20: mol_type = other DNA
gcgccccgcggaggagtggc

SEQ ID NO: 3621 - DNA, 20 bp, synthetic construct
  misc_feature 1..20: note = Synthetic
  source 1..20: mol_type = other DNA
gctggcgcgacccctgcccg

SEQ ID NO: 3622 - DNA, 20 bp, synthetic construct
  misc_feature 1..20: note = Synthetic
  source 1..20: mol_type = other DNA
ctggcgcgacccctgcccga

SEQ ID NO: 3623 - DNA, 20 bp, synthetic construct
  misc_feature 1..20: note = Synthetic
  source 1..20: mol_type = other DNA
acccctgcccgagggactgc

SEQ ID NO: 3624 - DNA, 20 bp, synthetic construct
  misc_feature 1..20: note = Synthetic
  source 1..20: mol_type = other DNA
cccgagggactgcaggcgtt

SEQ ID NO: 3625 - DNA, 20 bp, synthetic construct
  misc_feature 1..20: note = Synthetic
  source 1..20: mol_type = other DNA
ccgagggactgcaggcgttc

SEQ ID NO: 3626 - DNA, 20 bp, synthetic construct
  misc_feature 1..20: note = Synthetic
  source 1..20: mol_type = other DNA
cgagggactgcaggcgttcg

SEQ ID NO: 3627 - DNA, 20 bp, synthetic construct
  misc_feature 1..20: note = Synthetic
  source 1..20: mol_type = other DNA
ccgtcctcgtagacgcccat

SEQ ID NO: 3628 - DNA, 20 bp, synthetic construct
  misc_feature 1..20: note = Synthetic
  source 1..20: mol_type = other DNA
ccatcggcgcatcaccgacc

SEQ ID NO: 3629 - DNA, 20 bp, synthetic construct
  misc_feature 1..20: note = Synthetic
  source 1..20: mol_type = other DNA
ggcgcatcaccgacccggag

SEQ ID NO: 3630 - DNA, 20 bp, synthetic construct
  misc_feature 1..20: note = Synthetic
  source 1..20: mol_type = other DNA
gcgcatcaccgacccggaga

SEQ ID NO: 3631 - DNA, 20 bp, synthetic construct
  misc_feature 1..20: note = Synthetic
  source 1..20: mol_type = other DNA
cgacccggagagggacatcc

SEQ ID NO: 3632 - DNA, 20 bp, synthetic construct
  misc_feature 1..20: note = Synthetic
  source 1..20: mol_type = other DNA
cgcgtacaccaacaagcgcc

SEQ ID NO: 3633 - DNA, 20 bp, synthetic construct
  misc_feature 1..20: note = Synthetic
  source 1..20: mol_type = other DNA
caagcgcctggcccacctga

SEQ ID NO: 3634 - DNA, 20 bp, synthetic construct
  misc_feature 1..20: note = Synthetic
  source 1..20: mol_type = other DNA
gacggtgtattacaagctca

SEQ ID NO: 3635 - DNA, 20 bp, synthetic construct
  misc_feature 1..20: note = Synthetic
  source 1..20: mol_type = other DNA
gctcatggcccgccgcgcgc

SEQ ID NO: 3636 - DNA, 20 bp, synthetic construct
  misc_feature 1..20: note = Synthetic
  source 1..20: mol_type = other DNA
cgcgcaggtcccgtccatca

SEQ ID NO: 3637 - DNA, 20 bp, synthetic construct
  misc_feature 1..20: note = Synthetic
  source 1..20: mol_type = other DNA
aggtcccgtccatcaaggac

SEQ ID NO: 3638 - DNA, 20 bp, synthetic construct
  misc_feature 1..20: note = Synthetic
  source 1..20: mol_type = other DNA
ccggatcccgtacgtgatcg

SEQ ID NO: 3639 - DNA, 20 bp, synthetic construct
  misc_feature 1..20: note = Synthetic
  source 1..20: mol_type = other DNA
gatcgtggcccagacccgcg

SEQ ID NO: 3640 - DNA, 20 bp, synthetic construct
  misc_feature 1..20: note = Synthetic
  source 1..20: mol_type = other DNA
ggcccagacccgcgaggtag

SEQ ID NO: 3641 - DNA, 20 bp, synthetic construct
  misc_feature 1..20: note = Synthetic
  source 1..20: mol_type = other DNA
gacccgcgaggtagaggaga

SEQ ID NO: 3642 - DNA, 20 bp, synthetic construct
  misc_feature 1..20: note = Synthetic
  source 1..20: mol_type = other DNA
aggtagaggagacggtcgcg

SEQ ID NO: 3643 - DNA, 20 bp, synthetic construct
  misc_feature 1..20: note = Synthetic
  source 1..20: mol_type = other DNA
agaggagacggtcgcgcggc

SEQ ID NO: 3644 - DNA, 20 bp, synthetic construct
  misc_feature 1..20: note = Synthetic
  source 1..20: mol_type = other DNA
gagctagacgccgccgcccc

SEQ ID NO: 3645 - DNA, 20 bp, synthetic construct
  misc_feature 1..20: note = Synthetic
  source 1..20: mol_type = other DNA
agctagacgccgccgcccca

SEQ ID NO: 3646 - DNA, 20 bp, synthetic construct
  misc_feature 1..20: note = Synthetic
  source 1..20: mol_type = other DNA
gctagacgccgccgccccag

SEQ ID NO: 3647 - RNA, 20 nt, synthetic construct
  misc_feature 1..20: note = Synthetic
  source 1..20: mol_type = other RNA
ggacgagcccgccccccccg

SEQ ID NO: 3648 - DNA, 20 bp, synthetic construct
  misc_feature 1..20: note = Synthetic
  source 1..20: mol_type = other DNA
ccccgcggccctgccctccc

SEQ ID NO: 3649 - DNA, 20 bp, synthetic construct
  misc_feature 1..20: note = Synthetic
  source 1..20: mol_type = other DNA
cctccccggccaagcgcccc

SEQ ID NO: 3650 - DNA, 20 bp, synthetic construct
  misc_feature 1..20: note = Synthetic
  source 1..20: mol_type = other DNA
ctccccggccaagcgccccc

SEQ ID NO: 3651 - DNA, 20 bp, synthetic construct
  misc_feature 1..20: note = Synthetic
  source 1..20: mol_type = other DNA
gccgtcgcctgccgaccccc

SEQ ID NO: 3652 - DNA, 20 bp, synthetic construct
  misc_feature 1..20: note = Synthetic
  source 1..20: mol_type = other DNA
ccgtcgcctgccgacccccc

SEQ ID NO: 3653 - DNA, 20 bp, synthetic construct
  misc_feature 1..20: note = Synthetic
  source 1..20: mol_type = other DNA
tcgcctgccgaccccccggg

SEQ ID NO: 3654 - DNA, 20 bp, synthetic construct
  misc_feature 1..20: note = Synthetic
  source 1..20: mol_type = other DNA
gtccaagccccgcaagctgc

SEQ ID NO: 3655 - DNA, 20 bp, synthetic construct
  misc_feature 1..20: note = Synthetic
  source 1..20: mol_type = other DNA
caagctgctggtgtccgagc

SEQ ID NO: 3656 - DNA, 20 bp, synthetic construct
  misc_feature 1..20: note = Synthetic
  source 1..20: mol_type = other DNA
gctggtgtccgagctggccg

SEQ ID NO: 3657 - DNA, 20 bp, synthetic construct
  misc_feature 1..20: note = Synthetic
  source 1..20: mol_type = other DNA
cccgcatacgccattgccca

SEQ ID NO: 3658 - DNA, 20 bp, synthetic construct
  misc_feature 1..20: note = Synthetic
  source 1..20: mol_type = other DNA
ccacggcgtcgccctgaaca

SEQ ID NO: 3659 - DNA, 20 bp, synthetic construct
  misc_feature 1..20: note = Synthetic
  source 1..20: mol_type = other DNA
ctattacttctcccacctgt

SEQ ID NO: 3660 - DNA, 20 bp, synthetic construct
  misc_feature 1..20: note = Synthetic
  source 1..20: mol_type = other DNA
tattacttctcccacctgtt

SEQ ID NO: 3661 - DNA, 20 bp, synthetic construct
  misc_feature 1..20: note = Synthetic
  source 1..20: mol_type = other DNA
attacttctcccacctgttg

SEQ ID NO: 3662 - DNA, 20 bp, synthetic construct
  misc_feature 1..20: note = Synthetic
  source 1..20: mol_type = other DNA
ttacttctcccacctgttgg

SEQ ID NO: 3663 - DNA, 20 bp, synthetic construct
  misc_feature 1..20: note = Synthetic
  source 1..20: mol_type = other DNA
cttctcccacctgttggggg

SEQ ID NO: 3664 - DNA, 20 bp, synthetic construct
  misc_feature 1..20: note = Synthetic
  source 1..20: mol_type = other DNA
ggcggcgtgcgtgacattca

SEQ ID NO: 3665 - DNA, 20 bp, synthetic construct
  misc_feature 1..20: note = Synthetic
  source 1..20: mol_type = other DNA
gtgacattcaaggccctgtt

SEQ ID NO: 3666 - DNA, 20 bp, synthetic construct
  misc_feature 1..20: note = Synthetic
  source 1..20: mol_type = other DNA
tgacattcaaggccctgttt

SEQ ID NO: 3667 - DNA, 20 bp, synthetic construct
  misc_feature 1..20: note = Synthetic
  source 1..20: mol_type = other DNA
tcaccgagagtctgttaaaa

SEQ ID NO: 3668 - DNA, 20 bp, synthetic construct
  misc_feature 1..20: note = Synthetic
  source 1..20: mol_type = other DNA
aaaggtttattcccgaagtg

SEQ ID NO: 3669 - DNA, 20 bp, synthetic construct
  misc_feature 1..20: note = Synthetic
  source 1..20: mol_type = other DNA
tcccgaagtgtggcaccccc

SEQ ID NO: 3670 - DNA, 20 bp, synthetic construct
  misc_feature 1..20: note = Synthetic
  source 1..20: mol_type = other DNA
gtggcaccccccggacgacg

SEQ ID NO: 3671 - DNA, 20 bp, synthetic construct
  misc_feature 1..20: note = Synthetic
  source 1..20: mol_type = other DNA
ccccggacgacgtggccgcg

SEQ ID NO: 3672 - DNA, 20 bp, synthetic construct
  misc_feature 1..20: note = Synthetic
  source 1..20: mol_type = other DNA
acgacgtggccgcgcggctc

SEQ ID NO: 3673 - DNA, 20 bp, synthetic construct
  misc_feature 1..20: note = Synthetic
  source 1..20: mol_type = other DNA
gccgcgcggctccggaccgc

SEQ ID NO: 3674 - DNA, 20 bp, synthetic construct
  misc_feature 1..20: note = Synthetic
  source 1..20: mol_type = other DNA
ccgcgcggctccggaccgca

SEQ ID NO: 3675 - DNA, 20 bp, synthetic construct
  misc_feature 1..20: note = Synthetic
  source 1..20: mol_type = other DNA
cggctccggaccgcagggtt

SEQ ID NO: 3676 - DNA, 20 bp, synthetic construct
  misc_feature 1..20: note = Synthetic
  source 1..20: mol_type = other DNA
ggctccggaccgcagggttc

SEQ ID NO: 3677 - DNA, 20 bp, synthetic construct
  misc_feature 1..20: note = Synthetic
  source 1..20: mol_type = other DNA
gctccggaccgcagggttcg

SEQ ID NO: 3678 - DNA, 20 bp, synthetic construct
  misc_feature 1..20: note = Synthetic
  source 1..20: mol_type = other DNA
ccggaccgcagggttcgggg

SEQ ID NO: 3679 - DNA, 20 bp, synthetic construct
  misc_feature 1..20: note = Synthetic
  source 1..20: mol_type = other DNA
gaccgcagggttcggggcgg

SEQ ID NO: 3680 - DNA, 20 bp, synthetic construct
  misc_feature 1..20: note = Synthetic
  source 1..20: mol_type = other DNA
accgcagggttcggggcggt

SEQ ID NO: 3681 - DNA, 20 bp, synthetic construct
  misc_feature 1..20: note = Synthetic
  source 1..20: mol_type = other DNA
gggttcggggcggtgggtgc

SEQ ID NO: 3682 - DNA, 20 bp, synthetic construct
  misc_feature 1..20: note = Synthetic
  source 1..20: mol_type = other DNA
ggcggtgggtgccggcgcta

SEQ ID NO: 3683 - DNA, 20 bp, synthetic construct
  misc_feature 1..20: note = Synthetic
  source 1..20: mol_type = other DNA
ggtgggtgccggcgctacgg

SEQ ID NO: 3684 - DNA, 20 bp, synthetic construct
  misc_feature 1..20: note = Synthetic
  source 1..20: mol_type = other DNA
gggtgccggcgctacggcgg

SEQ ID NO: 3685 - DNA, 17 bp, synthetic construct
  misc_feature 1..17: note = Synthetic
  source 1..17: mol_type = other DNA
ggacgccatcacaccga

SEQ ID NO: 3686 - DNA, 17 bp, synthetic construct
  misc_feature 1..17: note = Synthetic
  source 1..17: mol_type = other DNA
gacgccatcacaccgac

SEQ ID NO: 3687 - DNA, 17 bp, synthetic construct
  misc_feature 1..17: note = Synthetic
  source 1..17: mol_type = other DNA
acgccatcacaccgacg

SEQ ID NO: 3688 - DNA, 17 bp, synthetic construct
  misc_feature 1..17: note = Synthetic
  source 1..17: mol_type = other DNA
gaccgtcatcacgctcc

SEQ ID NO: 3689 - DNA, 17 bp, synthetic construct
  misc_feature 1..17: note = Synthetic
  source 1..17: mol_type = other DNA
accgtcatcacgctcct

SEQ ID NO: 3690 - DNA, 17 bp, synthetic construct
  misc_feature 1..17: note = Synthetic
  source 1..17: mol_type = other DNA
gctcctgggcctgactc

SEQ ID NO: 3691 - DNA, 17 bp, synthetic construct
  misc_feature 1..17: note = Synthetic
  source 1..17: mol_type = other DNA
ctgggcctgactccgga

SEQ ID NO: 3692 - DNA, 17 bp, synthetic construct
  misc_feature 1..17: note = Synthetic
  source 1..17: mol_type = other DNA
tgactccggaaggccac

SEQ ID NO: 3693 - DNA, 17 bp, synthetic construct
  misc_feature 1..17: note = Synthetic
  source 1..17: mol_type = other DNA
gactccggaaggccacc

SEQ ID NO: 3694 - DNA, 17 bp, synthetic construct
  misc_feature 1..17: note = Synthetic
  source 1..17: mol_type = other DNA
tccggaaggccaccggg

SEQ ID NO: 3695 - DNA, 17 bp, synthetic construct
  misc_feature 1..17: note = Synthetic
  source 1..17: mol_type = other DNA
gtggccgttcacgttta

SEQ ID NO: 3696 - DNA, 17 bp, synthetic construct
  misc_feature 1..17: note = Synthetic
  source 1..17: mol_type = other DNA
ttcacgtttacggcacg

SEQ ID NO: 3697 - DNA, 17 bp, synthetic construct
  misc_feature 1..17: note = Synthetic
  source 1..17: mol_type = other DNA
gtacttttacatgaaca

SEQ ID NO: 3698 - DNA, 17 bp, synthetic construct
  misc_feature 1..17: note = Synthetic
  source 1..17: mol_type = other DNA
cttttacatgaacaagg

SEQ ID NO: 3699 - DNA, 17 bp, synthetic construct
  misc_feature 1..17: note = Synthetic
  source 1..17: mol_type = other DNA
ttacatgaacaaggagg

SEQ ID NO: 3700 - DNA, 17 bp, synthetic construct
  misc_feature 1..17: note = Synthetic
  source 1..17: mol_type = other DNA
acaaggaggaggtcgac

SEQ ID NO: 3701 - DNA, 17 bp, synthetic construct
  misc_feature 1..17: note = Synthetic
  source 1..17: mol_type = other DNA
agatctctgcgagcgca

SEQ ID NO: 3702 - DNA, 17 bp, synthetic construct
  misc_feature 1..17: note = Synthetic
  source 1..17: mol_type = other DNA
ctgcgagcgcatggccg

SEQ ID NO: 3703 - DNA, 17 bp, synthetic construct
  misc_feature 1..17: note = Synthetic
  source 1..17: mol_type = other DNA
ggccctgcgcgagtccc

SEQ ID NO: 3704 - DNA, 17 bp, synthetic construct
  misc_feature 1..17: note = Synthetic
  source 1..17: mol_type = other DNA
gccctgcgcgagtcccc

SEQ ID NO: 3705 - DNA, 17 bp, synthetic construct
  misc_feature 1..17: note = Synthetic
  source 1..17: mol_type = other DNA
ccgggcgcgtcgttccg

SEQ ID NO: 3706 - DNA, 17 bp, synthetic construct
  misc_feature 1..17: note = Synthetic
  source 1..17: mol_type = other DNA
gttccgcggcatctccg

SEQ ID NO: 3707 - DNA, 17 bp, synthetic construct
  misc_feature 1..17: note = Synthetic
  source 1..17: mol_type = other DNA
ctccgcggaccacttcg

SEQ ID NO: 3708 - DNA, 17 bp, synthetic construct
  misc_feature 1..17: note = Synthetic
  source 1..17: mol_type = other DNA
cgcggaccacttcgagg

SEQ ID NO: 3709 - DNA, 17 bp, synthetic construct
  misc_feature 1..17: note = Synthetic
  source 1..17: mol_type = other DNA
ggaccacttcgaggcgg

SEQ ID NO: 3710 - DNA, 17 bp, synthetic construct
  misc_feature 1..17: note = Synthetic
  source 1..17: mol_type = other DNA
ccacttcgaggcggagg

SEQ ID NO: 3711 - DNA, 17 bp, synthetic construct
  misc_feature 1..17: note = Synthetic
  source 1..17: mol_type = other DNA
cttcgaggcggaggtgg

SEQ ID NO: 3712 - DNA, 17 bp, synthetic construct
  misc_feature 1..17: note = Synthetic
  source 1..17: mol_type = other DNA
cgcgtctacgtccgaag

SEQ ID NO: 3713 - DNA, 17 bp, synthetic construct
  misc_feature 1..17: note = Synthetic
  source 1..17: mol_type = other DNA
gcgtctacgtccgaagc

SEQ ID NO: 3714 - DNA, 17 bp, synthetic construct
  misc_feature 1..17: note = Synthetic
  source 1..17: mol_type = other DNA
gtgcgacaacttctgcc

SEQ ID NO: 3715 - DNA, 17 bp, synthetic construct
  misc_feature 1..17: note = Synthetic
  source 1..17: mol_type = other DNA
ggccatcaagaagtacg

SEQ ID NO: 3716 - DNA, 17 bp, synthetic construct
  misc_feature 1..17: note = Synthetic
  source 1..17: mol_type = other DNA
gccatcaagaagtacga

SEQ ID NO: 3717 - DNA, 17 bp, synthetic construct
  misc_feature 1..17: note = Synthetic
  source 1..17: mol_type = other DNA
atcaagaagtacgaggg

SEQ ID NO: 3718 - DNA, 17 bp, synthetic construct
  misc_feature 1..17: note = Synthetic
  source 1..17: mol_type = other DNA
tcaagaagtacgagggt

SEQ ID NO: 3719 - DNA, 17 bp, synthetic construct
  misc_feature 1..17: note = Synthetic
  source 1..17: mol_type = other DNA
caagaagtacgagggtg

SEQ ID NO: 3720 - DNA, 17 bp, synthetic construct
  misc_feature 1..17: note = Synthetic
  source 1..17: mol_type = other DNA
gggtcgacgccaccacc

SEQ ID NO: 3721 - DNA, 17 bp, synthetic construct
  misc_feature 1..17: note = Synthetic
  source 1..17: mol_type = other DNA
caccacccggttcatcc

SEQ ID NO: 3722 - DNA, 17 bp, synthetic construct
  misc_feature 1..17: note = Synthetic
  source 1..17: mol_type = other DNA
ttcatcctggacaaccc

SEQ ID NO: 3723 - DNA, 17 bp, synthetic construct
  misc_feature 1..17: note = Synthetic
  source 1..17: mol_type = other DNA
tcatcctggacaacccc

SEQ ID NO: 3724 - DNA, 17 bp, synthetic construct
  misc_feature 1..17: note = Synthetic
  source 1..17: mol_type = other DNA
cccgggttcgtcacctt

SEQ ID NO: 3725 - DNA, 17 bp, synthetic construct
  misc_feature 1..17: note = Synthetic
  source 1..17: mol_type = other DNA
ggttcgtcaccttcggc

SEQ ID NO: 3726 - DNA, 17 bp, synthetic construct
  misc_feature 1..17: note = Synthetic
  source 1..17: mol_type = other DNA
ctggtaccgtctcaaac

SEQ ID NO: 3727 - DNA, 17 bp, synthetic construct
  misc_feature 1..17: note = Synthetic
  source 1..17: mol_type = other DNA
tggtaccgtctcaaacc

SEQ ID NO: 3728 - DNA, 17 bp, synthetic construct
  misc_feature 1..17: note = Synthetic
  source 1..17: mol_type = other DNA
accgtctcaaaccgggc

SEQ ID NO: 3729 - DNA, 17 bp, synthetic construct
  misc_feature 1..17: note = Synthetic
  source 1..17: mol_type = other DNA
caacacgctagcccagc

SEQ ID NO: 3730 - DNA, 17 bp, synthetic construct
  misc_feature 1..17: note = Synthetic
  source 1..17: mol_type = other DNA
cacgctagcccagccgg

SEQ ID NO: 3731 - RNA, 17 nt, synthetic construct
  misc_feature 1..17: note = Synthetic
  source 1..17: mol_type = other RNA
ccagccggcggccccga

SEQ ID NO: 3732 - DNA, 17 bp, synthetic construct
  misc_feature 1..17: note = Synthetic
  source 1..17: mol_type = other DNA
gcggccccgatggcctt

SEQ ID NO: 3733 - DNA, 17 bp, synthetic construct
  misc_feature 1..17: note = Synthetic
  source 1..17: mol_type = other DNA
cggccccgatggccttc

SEQ ID NO: 3734 - DNA, 17 bp, synthetic construct
  misc_feature 1..17: note = Synthetic
  source 1..17: mol_type = other DNA
cgtcgagtttaactgta

SEQ ID NO: 3735 - DNA, 17 bp, synthetic construct
  misc_feature 1..17: note = Synthetic
  source 1..17: mol_type = other DNA
cgagtttaactgtacgg

SEQ ID NO: 3736 - DNA, 17 bp, synthetic construct
  misc_feature 1..17: note = Synthetic
  source 1..17: mol_type = other DNA
ctgtacggcggacaacc

SEQ ID NO: 3737 - DNA, 17 bp, synthetic construct
  misc_feature 1..17: note = Synthetic
  source 1..17: mol_type = other DNA
ggacaacctggccatcg

SEQ ID NO: 3738 - DNA, 17 bp, synthetic construct
  misc_feature 1..17: note = Synthetic
  source 1..17: mol_type = other DNA
gacaacctggccatcga

SEQ ID NO: 3739 - DNA, 17 bp, synthetic construct
  misc_feature 1..17: note = Synthetic
  source 1..17: mol_type = other DNA
acaacctggccatcgag

SEQ ID NO: 3740 - DNA, 17 bp, synthetic construct
  misc_feature 1..17: note = Synthetic
  source 1..17: mol_type = other DNA
caacctggccatcgagg

SEQ ID NO: 3741 - DNA, 17 bp, synthetic construct
  misc_feature 1..17: note = Synthetic
  source 1..17: mol_type = other DNA
aacctggccatcgaggg

SEQ ID NO: 3742 - DNA, 17 bp, synthetic construct
  misc_feature 1..17: note = Synthetic
  source 1..17: mol_type = other DNA
gggcatgagcgacctac

SEQ ID NO: 3743 - DNA, 17 bp, synthetic construct
  misc_feature 1..17: note = Synthetic
  source 1..17: mol_type = other DNA
cttcgatatcgaatgca

SEQ ID NO: 3744 - DNA, 17 bp, synthetic construct
  misc_feature 1..17: note = Synthetic
  source 1..17: mol_type = other DNA
cgatatcgaatgcaagg

SEQ ID NO: 3745 - DNA, 17 bp, synthetic construct
  misc_feature 1..17: note = Synthetic
  source 1..17: mol_type = other DNA
gatatcgaatgcaaggc

SEQ ID NO: 3746 - DNA, 17 bp, synthetic construct
  misc_feature 1..17: note = Synthetic
  source 1..17: mol_type = other DNA
atatcgaatgcaaggcg

SEQ ID NO: 3747 - DNA, 17 bp, synthetic construct
  misc_feature 1..17: note = Synthetic
  source 1..17: mol_type = other DNA
tatcgaatgcaaggcgg

SEQ ID NO: 3748 - DNA, 17 bp, synthetic construct
  misc_feature 1..17: note = Synthetic
  source 1..17: mol_type = other DNA
atcgaatgcaaggcggg

SEQ ID NO: 3749 - DNA, 17 bp, synthetic construct
  misc_feature 1..17: note = Synthetic
  source 1..17: mol_type = other DNA
tcgaatgcaaggcgggg

SEQ ID NO: 3750 - DNA, 17 bp, synthetic construct
  misc_feature 1..17: note = Synthetic
  source 1..17: mol_type = other DNA
cgaatgcaaggcggggg

SEQ ID NO: 3751 - DNA, 17 bp, synthetic construct
  misc_feature 1..17: note = Synthetic
  source 1..17: mol_type = other DNA
atgcaaggcgggggggg

SEQ ID NO: 3752 - RNA, 17 nt, synthetic construct
  misc_feature 1..17: note = Synthetic
  source 1..17: mol_type = other RNA
ggggggggaggacgagc

SEQ ID NO: 3753 - DNA, 17 bp, synthetic construct
  misc_feature 1..17: note = Synthetic
  source 1..17: mol_type = other DNA
ggacgagctggcctttc

SEQ ID NO: 3754 - DNA, 17 bp, synthetic construct
  misc_feature 1..17: note = Synthetic
  source 1..17: mol_type = other DNA
cgagctggcctttccgg

SEQ ID NO: 3755 - DNA, 17 bp, synthetic construct
  misc_feature 1..17: note = Synthetic
  source 1..17: mol_type = other DNA
ctggcctttccggtggc

SEQ ID NO: 3756 - DNA, 17 bp, synthetic construct
  misc_feature 1..17: note = Synthetic
  source 1..17: mol_type = other DNA
tggcctttccggtggcc

SEQ ID NO: 3757 - DNA, 17 bp, synthetic construct
  misc_feature 1..17: note = Synthetic
  source 1..17: mol_type = other DNA
tccggtggccgggcacc

SEQ ID NO: 3758 - DNA, 17 bp, synthetic construct
  misc_feature 1..17: note = Synthetic
  source 1..17: mol_type = other DNA
ggtggccgggcacccgg

SEQ ID NO: 3759 - RNA, 17 nt, synthetic construct
  misc_feature 1..17: note = Synthetic
  source 1..17: mol_type = other RNA
cgggcacccggaggacc

SEQ ID NO: 3760 - DNA, 17 bp, synthetic construct
  misc_feature 1..17: note = Synthetic
  source 1..17: mol_type = other DNA
cctgtccaccaccgccc

SEQ ID NO: 3761 - DNA, 17 bp, synthetic construct
  misc_feature 1..17: note = Synthetic
  source 1..17: mol_type = other DNA
gtcctcctgttttcgct

SEQ ID NO: 3762 - DNA, 17 bp, synthetic construct
  misc_feature 1..17: note = Synthetic
  source 1..17: mol_type = other DNA
atcccacctgaacgagc

SEQ ID NO: 3763 - DNA, 17 bp, synthetic construct
  misc_feature 1..17: note = Synthetic
  source 1..17: mol_type = other DNA
ccacctgaacgagctgg

SEQ ID NO: 3764 - DNA, 17 bp, synthetic construct
  misc_feature 1..17: note = Synthetic
  source 1..17: mol_type = other DNA
tgaacgagctggcggcc

SEQ ID NO: 3765 - DNA, 17 bp, synthetic construct
  misc_feature 1..17: note = Synthetic
  source 1..17: mol_type = other DNA
gaacgagctggcggcca

SEQ ID NO: 3766 - DNA, 17 bp, synthetic construct
  misc_feature 1..17: note = Synthetic
  source 1..17: mol_type = other DNA
aacgagctggcggccag

SEQ ID NO: 3767 - DNA, 17 bp, synthetic construct
  misc_feature 1..17: note = Synthetic
  source 1..17: mol_type = other DNA
gggcctgcccacgcccg

SEQ ID NO: 3768 - DNA, 17 bp, synthetic construct
  misc_feature 1..17: note = Synthetic
  source 1..17: mol_type = other DNA
gcccacgcccgtggttc

SEQ ID NO: 3769 - DNA, 17 bp, synthetic construct
  misc_feature 1..17: note = Synthetic
  source 1..17: mol_type = other DNA
cgaattcgagatgctgt

SEQ ID NO: 3770 - DNA, 17 bp, synthetic construct
  misc_feature 1..17: note = Synthetic
  source 1..17: mol_type = other DNA
acccttgtgaaacagta

SEQ ID NO: 3771 - DNA, 17 bp, synthetic construct
  misc_feature 1..17: note = Synthetic
  source 1..17: mol_type = other DNA
ggccccgagttcgtgac

SEQ ID NO: 3772 - DNA, 17 bp, synthetic construct
  misc_feature 1..17: note = Synthetic
  source 1..17: mol_type = other DNA
gccccgagttcgtgacc

SEQ ID NO: 3773 - DNA, 17 bp, synthetic construct
  misc_feature 1..17: note = Synthetic
  source 1..17: mol_type = other DNA
acatcatcaacttcgac

SEQ ID NO: 3774 - DNA, 17 bp, synthetic construct
  misc_feature 1..17: note = Synthetic
  source 1..17: mol_type = other DNA
cgactggcccttcttgc

SEQ ID NO: 3775 - DNA, 17 bp, synthetic construct
  misc_feature 1..17: note = Synthetic
  source 1..17: mol_type = other DNA
cttgctggccaagctga

SEQ ID NO: 3776 - DNA, 17 bp, synthetic construct
  misc_feature 1..17: note = Synthetic
  source 1..17: mol_type = other DNA
gctgacggacatttaca

SEQ ID NO: 3777 - DNA, 17 bp, synthetic construct
  misc_feature 1..17: note = Synthetic
  source 1..17: mol_type = other DNA
catttacaaggtccccc

SEQ ID NO: 3778 - DNA, 17 bp, synthetic construct
  misc_feature 1..17: note = Synthetic
  source 1..17: mol_type = other DNA
tacaaggtccccctgga

SEQ ID NO: 3779 - DNA, 17 bp, synthetic construct
  misc_feature 1..17: note = Synthetic
  source 1..17: mol_type = other DNA
acaaggtccccctggac

SEQ ID NO: 3780 - DNA, 17 bp, synthetic construct
  misc_feature 1..17: note = Synthetic
  source 1..17: mol_type = other DNA
gtccccctggacgggta

SEQ ID NO: 3781 - DNA, 17 bp, synthetic construct
  misc_feature 1..17: note = Synthetic
  source 1..17: mol_type = other DNA
gggtacggccgcatgaa

SEQ ID NO: 3782 - DNA, 17 bp, synthetic construct
  misc_feature 1..17: note = Synthetic
  source 1..17: mol_type = other DNA
acggccgcatgaacggc

SEQ ID NO: 3783 - DNA, 17 bp, synthetic construct
  misc_feature 1..17: note = Synthetic
  source 1..17: mol_type = other DNA
cggccgcatgaacggcc

SEQ ID NO: 3784 - DNA, 17 bp, synthetic construct
  misc_feature 1..17: note = Synthetic
  source 1..17: mol_type = other DNA
ggccgcatgaacggccg

SEQ ID NO: 3785 - DNA, 17 bp, synthetic construct
  misc_feature 1..17: note = Synthetic
  source 1..17: mol_type = other DNA
ggggcgtgtttcgcgtg

SEQ ID NO: 3786 - DNA, 17 bp, synthetic construct
  misc_feature 1..17: note = Synthetic
  source 1..17: mol_type = other DNA
gggcgtgtttcgcgtgt

SEQ ID NO: 3787 - DNA, 17 bp, synthetic construct
  misc_feature 1..17: note = Synthetic
  source 1..17: mol_type = other DNA
tttcgcgtgtgggacat

SEQ ID NO: 3788 - DNA, 17 bp, synthetic construct
  misc_feature 1..17: note = Synthetic
  source 1..17: mol_type = other DNA
gaagcgcagcaagataa

SEQ ID NO: 3789 - DNA, 17 bp, synthetic construct
  misc_feature 1..17: note = Synthetic
  source 1..17: mol_type = other DNA
agcaagataaaggtgaa

SEQ ID NO: 3790 - DNA, 17 bp, synthetic construct
  misc_feature 1..17: note = Synthetic
  source 1..17: mol_type = other DNA
gataaaggtgaacggca

SEQ ID NO: 3791 - DNA, 17 bp, synthetic construct
  misc_feature 1..17: note = Synthetic
  source 1..17: mol_type = other DNA
gtgaacatcgacatgta

SEQ ID NO: 3792 - DNA, 17 bp, synthetic construct
  misc_feature 1..17: note = Synthetic
  source 1..17: mol_type = other DNA
tgaacatcgacatgtac

SEQ ID NO: 3793 - DNA, 17 bp, synthetic construct
  misc_feature 1..17: note = Synthetic
  source 1..17: mol_type = other DNA
ctacaagctcaacgccg

SEQ ID NO: 3794 - DNA, 17 bp, synthetic construct
  misc_feature 1..17: note = Synthetic
  source 1..17: mol_type = other DNA
ggccgaagccgtcctga

SEQ ID NO: 3795 - DNA, 17 bp, synthetic construct
  misc_feature 1..17: note = Synthetic
  source 1..17: mol_type = other DNA
cctgaaggacaagaaga

SEQ ID NO: 3796 - DNA, 17 bp, synthetic construct
  misc_feature 1..17: note = Synthetic
  source 1..17: mol_type = other DNA
cccgcctactacgccgc

SEQ ID NO: 3797 - DNA, 17 bp, synthetic construct
  misc_feature 1..17: note = Synthetic
  source 1..17: mol_type = other DNA
ccgcctactacgccgcc

SEQ ID NO: 3798 - RNA, 17 nt, synthetic construct
  misc_feature 1..17: note = Synthetic
  source 1..17: mol_type = other RNA
gccgggcccgcgcaacg

SEQ ID NO: 3799 - RNA, 17 nt, synthetic construct
  misc_feature 1..17: note = Synthetic
  source 1..17: mol_type = other RNA
ccgggcccgcgcaacgc

SEQ ID NO: 3800 - RNA, 17 nt, synthetic construct
  misc_feature 1..17: note = Synthetic
  source 1..17: mol_type = other RNA
cgggcccgcgcaacgcg

SEQ ID NO: 3801 - DNA, 17 bp, synthetic construct
  misc_feature 1..17: note = Synthetic
  source 1..17: mol_type = other DNA
gcgcaacgcggggtgat

SEQ ID NO: 3802 - DNA, 17 bp, synthetic construct
  misc_feature 1..17: note = Synthetic
  source 1..17: mol_type = other DNA
cggcgagtactgcatac

SEQ ID NO: 3803 - DNA, 17 bp, synthetic construct
  misc_feature 1..17: note = Synthetic
  source 1..17: mol_type = other DNA
catacaggattccctgc

SEQ ID NO: 3804 - DNA, 17 bp, synthetic construct
  misc_feature 1..17: note = Synthetic
  source 1..17: mol_type = other DNA
acaggattccctgctgg

SEQ ID NO: 3805 - DNA, 17 bp, synthetic construct
  misc_feature 1..17: note = Synthetic
  source 1..17: mol_type = other DNA
caggattccctgctggt

SEQ ID NO: 3806 - DNA, 17 bp, synthetic construct
  misc_feature 1..17: note = Synthetic
  source 1..17: mol_type = other DNA
taagtttttgccccatc

SEQ ID NO: 3807 - DNA, 17 bp, synthetic construct
  misc_feature 1..17: note = Synthetic
  source 1..17: mol_type = other DNA
gccccatctggagctct

SEQ ID NO: 3808 - DNA, 17 bp, synthetic construct
  misc_feature 1..17: note = Synthetic
  source 1..17: mol_type = other DNA
ctcggccgtcgcgcgct

SEQ ID NO: 3809 - DNA, 17 bp, synthetic construct
  misc_feature 1..17: note = Synthetic
  source 1..17: mol_type = other DNA
ggccgtcgcgcgcttgg

SEQ ID NO: 3810 - DNA, 17 bp, synthetic construct
  misc_feature 1..17: note = Synthetic
  source 1..17: mol_type = other DNA
gccgtcgcgcgcttggc

SEQ ID NO: 3811 - DNA, 17 bp, synthetic construct
  misc_feature 1..17: note = Synthetic
  source 1..17: mol_type = other DNA
acccgcaccatctacga

SEQ ID NO: 3812 - DNA, 17 bp, synthetic construct
  misc_feature 1..17: note = Synthetic
  source 1..17: mol_type = other DNA
tacgtgcctgctgcgcc

SEQ ID NO: 3813 - DNA, 17 bp, synthetic construct
  misc_feature 1..17: note = Synthetic
  source 1..17: mol_type = other DNA
gcgcctggccgaccaga

SEQ ID NO: 3814 - DNA, 17 bp, synthetic construct
  misc_feature 1..17: note = Synthetic
  source 1..17: mol_type = other DNA
cgcctggccgaccagaa

SEQ ID NO: 3815 - DNA, 17 bp, synthetic construct
  misc_feature 1..17: note = Synthetic
  source 1..17: mol_type = other DNA
gaagggctttattctgc

SEQ ID NO: 3816 - DNA, 17 bp, synthetic construct
  misc_feature 1..17: note = Synthetic
  source 1..17: mol_type = other DNA
tattctgccggacaccc

SEQ ID NO: 3817 - DNA, 17 bp, synthetic construct
  misc_feature 1..17: note = Synthetic
  source 1..17: mol_type = other DNA
attctgccggacaccca

SEQ ID NO: 3818 - DNA, 17 bp, synthetic construct
  misc_feature 1..17: note = Synthetic
  source 1..17: mol_type = other DNA
ttctgccggacacccag

SEQ ID NO: 3819 - DNA, 17 bp, synthetic construct
  misc_feature 1..17: note = Synthetic
  source 1..17: mol_type = other DNA
acacccaggggcgattt

SEQ ID NO: 3820 - DNA, 17 bp, synthetic construct
  misc_feature 1..17: note = Synthetic
  source 1..17: mol_type = other DNA
cacccaggggcgattta

SEQ ID NO: 3821 - DNA, 17 bp, synthetic construct
  misc_feature 1..17: note = Synthetic
  source 1..17: mol_type = other DNA
acccaggggcgatttag

SEQ ID NO: 3822 - DNA, 17 bp, synthetic construct
  misc_feature 1..17: note = Synthetic
  source 1..17: mol_type = other DNA
gggcgatttaggggcgc

SEQ ID NO: 3823 - DNA, 17 bp, synthetic construct
  misc_feature 1..17: note = Synthetic
  source 1..17: mol_type = other DNA
ggcgatttaggggcgcc

SEQ ID NO: 3824 - DNA, 17 bp, synthetic construct
  misc_feature 1..17: note = Synthetic
  source 1..17: mol_type = other DNA
gcgatttaggggcgccg

SEQ ID NO: 3825 - DNA, 17 bp, synthetic construct
  misc_feature 1..17: note = Synthetic
  source 1..17: mol_type = other DNA
cgatttaggggcgccgg

SEQ ID NO: 3826 - DNA, 17 bp, synthetic construct
  misc_feature 1..17: note = Synthetic
  source 1..17: mol_type = other DNA
gatttaggggcgccggg

SEQ ID NO: 3827 - DNA, 17 bp, synthetic construct
  misc_feature 1..17: note = Synthetic
  source 1..17: mol_type = other DNA
atttaggggcgccgggg

SEQ ID NO: 3828 - DNA, 17 bp, synthetic construct
  misc_feature 1..17: note = Synthetic
  source 1..17: mol_type = other DNA
taggggcgccggggggg

SEQ ID NO: 3829 - DNA, 17 bp, synthetic construct
  misc_feature 1..17: note = Synthetic
  source 1..17: mol_type = other DNA
ggaggcgcccaagcgtc

SEQ ID NO: 3830 - DNA, 17 bp, synthetic construct
  misc_feature 1..17: note = Synthetic
  source 1..17: mol_type = other DNA
agcgtccggccgcagcc

SEQ ID NO: 3831 - DNA, 17 bp, synthetic construct
  misc_feature 1..17: note = Synthetic
  source 1..17: mol_type = other DNA
gcgtccggccgcagccc

SEQ ID NO: 3832 - DNA, 17 bp, synthetic construct
  misc_feature 1..17: note = Synthetic
  source 1..17: mol_type = other DNA
tccggccgcagcccggg

SEQ ID NO: 3833 - RNA, 17 nt, synthetic construct
  misc_feature 1..17: note = Synthetic
  source 1..17: mol_type = other RNA
cgcagcccgggaggacg

SEQ ID NO: 3834 - RNA, 17 nt, synthetic construct
  misc_feature 1..17: note = Synthetic
  source 1..17: mol_type = other RNA
cccgggaggacgaggag

SEQ ID NO: 3835 - RNA, 17 nt, synthetic construct
  misc_feature 1..17: note = Synthetic
  source 1..17: mol_type = other RNA
ggacgaggagcggccag

SEQ ID NO: 3836 - RNA, 17 nt, synthetic construct
  misc_feature 1..17: note = Synthetic
  source 1..17: mol_type = other RNA
cgaggagcggccagagg

SEQ ID NO: 3837 - RNA, 17 nt, synthetic construct
  misc_feature 1..17: note = Synthetic
  source 1..17: mol_type = other RNA
ggagcggccagaggagg

SEQ ID NO: 3838 - RNA, 17 nt, synthetic construct
  misc_feature 1..17: note = Synthetic
  source 1..17: mol_type = other RNA
gagcggccagaggagga

SEQ ID NO: 3839 - RNA, 17 nt, synthetic construct
  misc_feature 1..17: note = Synthetic
  source 1..17: mol_type = other RNA
agcggccagaggaggag

SEQ ID NO: 3840 - RNA, 17 nt, synthetic construct
  misc_feature 1..17: note = Synthetic
  source 1..17: mol_type = other RNA
gcggccagaggaggagg

SEQ ID NO: 3841 - RNA, 17 nt, synthetic construct
  misc_feature 1..17: note = Synthetic
  source 1..17: mol_type = other RNA
gccagaggaggaggggg

SEQ ID NO: 3842 - RNA, 17 nt, synthetic construct
  misc_feature 1..17: note = Synthetic
  source 1..17: mol_type = other RNA
ggaggagggggaggacg

SEQ ID NO: 3843 - RNA, 17 nt, synthetic construct
  misc_feature 1..17: note = Synthetic
  source 1..17: mol_type = other RNA
ggacgaggacgaacgcg

SEQ ID NO: 3844 - RNA, 17 nt, synthetic construct
  misc_feature 1..17: note = Synthetic
  source 1..17: mol_type = other RNA
cgaggacgaacgcgagg

SEQ ID NO: 3845 - RNA, 17 nt, synthetic construct
  misc_feature 1..17: note = Synthetic
  source 1..17: mol_type = other RNA
gaggacgaacgcgagga

SEQ ID NO: 3846 - RNA, 17 nt, synthetic construct
  misc_feature 1..17: note = Synthetic
  source 1..17: mol_type = other RNA
gacgaacgcgaggaggg

SEQ ID NO: 3847 - RNA, 17 nt, synthetic construct
  misc_feature 1..17: note = Synthetic
  source 1..17: mol_type = other RNA
acgaacgcgaggagggc

SEQ ID NO: 3848 - RNA, 17 nt, synthetic construct
  misc_feature 1..17: note = Synthetic
  source 1..17: mol_type = other RNA
cgaacgcgaggagggcg

SEQ ID NO: 3849 - RNA, 17 nt, synthetic construct
  misc_feature 1..17: note = Synthetic
  source 1..17: mol_type = other RNA
gaacgcgaggagggcgg

SEQ ID NO: 3850 - RNA, 17 nt, synthetic construct
  misc_feature 1..17: note = Synthetic
  source 1..17: mol_type = other RNA
aggagggcgggggcgag

SEQ ID NO: 3851 - RNA, 17 nt, synthetic construct
  misc_feature 1..17: note = Synthetic
  source 1..17: mol_type = other RNA
ggagggcgggggcgagc

SEQ ID NO: 3852 - RNA, 17 nt, synthetic construct
  misc_feature 1..17: note = Synthetic
  source 1..17: mol_type = other RNA
cgggggcgagcgggagc

SEQ ID NO: 3853 - RNA, 17 nt, synthetic construct
  misc_feature 1..17: note = Synthetic
  source 1..17: mol_type = other RNA
gggcgagcgggagccgg

SEQ ID NO: 3854 - RNA, 17 nt, synthetic construct
  misc_feature 1..17: note = Synthetic
  source 1..17: mol_type = other RNA
ggcgagcgggagccgga

SEQ ID NO: 3855 - RNA, 17 nt, synthetic construct
  misc_feature 1..17: note = Synthetic
  source 1..17: mol_type = other RNA
gggagccggagggcgcg

SEQ ID NO: 3856 - RNA, 17 nt, synthetic construct
  misc_feature 1..17: note = Synthetic
  source 1..17: mol_type = other RNA
ggagccggagggcgcgc

SEQ ID NO: 3857 - RNA, 17 nt, synthetic construct
  misc_feature 1..17: note = Synthetic
  source 1..17: mol_type = other RNA
ggcgcgcgggagaccgc

SEQ ID NO: 3858 - RNA, 17 nt, synthetic construct
  misc_feature 1..17: note = Synthetic
  source 1..17: mol_type = other RNA
cgcgggagaccgccggc

SEQ ID NO: 3859 - RNA, 17 nt, synthetic construct
  misc_feature 1..17: note = Synthetic
  source 1..17: mol_type = other RNA
gaccgccggcaggcacg

SEQ ID NO: 3860 - DNA, 17 bp, synthetic construct
  misc_feature 1..17: note = Synthetic
  source 1..17: mol_type = other DNA
accgccggcaggcacgt

SEQ ID NO: 3861 - DNA, 17 bp, synthetic construct
  misc_feature 1..17: note = Synthetic
  source 1..17: mol_type = other DNA
ccgccggcaggcacgtg

SEQ ID NO: 3862 - DNA, 17 bp, synthetic construct
  misc_feature 1..17: note = Synthetic
  source 1..17: mol_type = other DNA
caggcacgtggggtacc

SEQ ID NO: 3863 - DNA, 17 bp, synthetic construct
  misc_feature 1..17: note = Synthetic
  source 1..17: mol_type = other DNA
aggcacgtggggtacca

SEQ ID NO: 3864 - DNA, 17 bp, synthetic construct
  misc_feature 1..17: note = Synthetic
  source 1..17: mol_type = other DNA
ggcacgtggggtaccag

SEQ ID NO: 3865 - DNA, 17 bp, synthetic construct
  misc_feature 1..17: note = Synthetic
  source 1..17: mol_type = other DNA
gcacgtggggtaccagg

SEQ ID NO: 3866 - DNA, 17 bp, synthetic construct
  misc_feature 1..17: note = Synthetic
  source 1..17: mol_type = other DNA
tggggtaccagggggcc

SEQ ID NO: 3867 - DNA, 17 bp, synthetic construct
  misc_feature 1..17: note = Synthetic
  source 1..17: mol_type = other DNA
ggggtaccagggggcca

SEQ ID NO: 3868 - DNA, 17 bp, synthetic construct
  misc_feature 1..17: note = Synthetic
  source 1..17: mol_type = other DNA
gtccttgaccccacttc

SEQ ID NO: 3869 - DNA, 17 bp, synthetic construct
  misc_feature 1..17: note = Synthetic
  source 1..17: mol_type = other DNA
tccttgaccccacttcc

SEQ ID NO: 3870 - DNA, 17 bp, synthetic construct
  misc_feature 1..17: note = Synthetic
  source 1..17: mol_type = other DNA
gtttcacgtgaaccccg

SEQ ID NO: 3871 - DNA, 17 bp, synthetic construct
  misc_feature 1..17: note = Synthetic
  source 1..17: mol_type = other DNA
tcacgtgaaccccgtgg

SEQ ID NO: 3872 - DNA, 17 bp, synthetic construct
  misc_feature 1..17: note = Synthetic
  source 1..17: mol_type = other DNA
gtaccccagcatcatcc

SEQ ID NO: 3873 - DNA, 17 bp, synthetic construct
  misc_feature 1..17: note = Synthetic
  source 1..17: mol_type = other DNA
tcagcacgctctccctg

SEQ ID NO: 3874 - DNA, 17 bp, synthetic construct
  misc_feature 1..17: note = Synthetic
  source 1..17: mol_type = other DNA
cagcacgctctccctga

SEQ ID NO: 3875 - DNA, 17 bp, synthetic construct
  misc_feature 1..17: note = Synthetic
  source 1..17: mol_type = other DNA
cctgagggccgacgcag

SEQ ID NO: 3876 - DNA, 17 bp, synthetic construct
  misc_feature 1..17: note = Synthetic
  source 1..17: mol_type = other DNA
cgacgcagtggcgcacc

SEQ ID NO: 3877 - DNA, 17 bp, synthetic construct
  misc_feature 1..17: note = Synthetic
  source 1..17: mol_type = other DNA
cgcagtggcgcacctgg

SEQ ID NO: 3878 - DNA, 17 bp, synthetic construct
  misc_feature 1..17: note = Synthetic
  source 1..17: mol_type = other DNA
agtggcgcacctggagg

SEQ ID NO: 3879 - DNA, 17 bp, synthetic construct
  misc_feature 1..17: note = Synthetic
  source 1..17: mol_type = other DNA
gtggcgcacctggaggc

SEQ ID NO: 3880 - DNA, 17 bp, synthetic construct
  misc_feature 1..17: note = Synthetic
  source 1..17: mol_type = other DNA
gcacctggaggcgggca

SEQ ID NO: 3881 - DNA, 17 bp, synthetic construct
  misc_feature 1..17: note = Synthetic
  source 1..17: mol_type = other DNA
ggcgggcaaggactacc

SEQ ID NO: 3882 - DNA, 17 bp, synthetic construct
  misc_feature 1..17: note = Synthetic
  source 1..17: mol_type = other DNA
ggactacctggagatcg

SEQ ID NO: 3883 - DNA, 17 bp, synthetic construct
  misc_feature 1..17: note = Synthetic
  source 1..17: mol_type = other DNA
ctacctggagatcgagg

SEQ ID NO: 3884 - DNA, 17 bp, synthetic construct
  misc_feature 1..17: note = Synthetic
  source 1..17: mol_type = other DNA
tacctggagatcgaggt

SEQ ID NO: 3885 - DNA, 17 bp, synthetic construct
  misc_feature 1..17: note = Synthetic
  source 1..17: mol_type = other DNA
acctggagatcgaggtg

SEQ ID NO: 3886 - DNA, 17 bp, synthetic construct
  misc_feature 1..17: note = Synthetic
  source 1..17: mol_type = other DNA
cctggagatcgaggtgg

SEQ ID NO: 3887 - DNA, 17 bp, synthetic construct
  misc_feature 1..17: note = Synthetic
  source 1..17: mol_type = other DNA
ctggagatcgaggtggg

SEQ ID NO: 3888 - DNA, 17 bp, synthetic construct
  misc_feature 1..17: note = Synthetic
  source 1..17: mol_type = other DNA
tggagatcgaggtgggg

SEQ ID NO: 3889 - DNA, 17 bp, synthetic construct
  misc_feature 1..17: note = Synthetic
  source 1..17: mol_type = other DNA
tcgaggtgggggggcga

SEQ ID NO: 3890 - DNA, 17 bp, synthetic construct
  misc_feature 1..17: note = Synthetic
  source 1..17: mol_type = other DNA
acggctgttcttcgtca

SEQ ID NO: 3891 - DNA, 17 bp, synthetic construct
  misc_feature 1..17: note = Synthetic
  source 1..17: mol_type = other DNA
tcctcagcatcctcctg

SEQ ID NO: 3892 - DNA, 17 bp, synthetic construct
  misc_feature 1..17: note = Synthetic
  source 1..17: mol_type = other DNA
cctcagcatcctcctgc

SEQ ID NO: 3893 - DNA, 17 bp, synthetic construct
  misc_feature 1..17: note = Synthetic
  source 1..17: mol_type = other DNA
gcatcctcctgcgggac

SEQ ID NO: 3894 - DNA, 17 bp, synthetic construct
  misc_feature 1..17: note = Synthetic
  source 1..17: mol_type = other DNA
gaaagcagatccgctcg

SEQ ID NO: 3895 - DNA, 17 bp, synthetic construct
  misc_feature 1..17: note = Synthetic
  source 1..17: mol_type = other DNA
tccccagagcagccccg

SEQ ID NO: 3896 - RNA, 17 nt, synthetic construct
  misc_feature 1..17: note = Synthetic
  source 1..17: mol_type = other RNA
ccagagcagccccgagg

SEQ ID NO: 3897 - DNA, 17 bp, synthetic construct
  misc_feature 1..17: note = Synthetic
  source 1..17: mol_type = other DNA
cgaggaggccgtgctcc

SEQ ID NO: 3898 - DNA, 17 bp, synthetic construct
  misc_feature 1..17: note = Synthetic
  source 1..17: mol_type = other DNA
gctcctggacaagcagc

SEQ ID NO: 3899 - DNA, 17 bp, synthetic construct
  misc_feature 1..17: note = Synthetic
  source 1..17: mol_type = other DNA
gcagcaggccgccatca

SEQ ID NO: 3900 - DNA, 17 bp, synthetic construct
  misc_feature 1..17: note = Synthetic
  source 1..17: mol_type = other DNA
caaggtcgtgtgtaact

SEQ ID NO: 3901 - DNA, 17 bp, synthetic construct
  misc_feature 1..17: note = Synthetic
  source 1..17: mol_type = other DNA
gtgtgtaactcggtgta

SEQ ID NO: 3902 - DNA, 17 bp, synthetic construct
  misc_feature 1..17: note = Synthetic
  source 1..17: mol_type = other DNA
tgtgtaactcggtgtac

SEQ ID NO: 3903 - DNA, 17 bp, synthetic construct
  misc_feature 1..17: note = Synthetic
  source 1..17: mol_type = other DNA
ctcggtgtacgggttca

SEQ ID NO: 3904 - DNA, 17 bp, synthetic construct
  misc_feature 1..17: note = Synthetic
  source 1..17: mol_type = other DNA
tcggtgtacgggttcac

SEQ ID NO: 3905 - DNA, 17 bp, synthetic construct
  misc_feature 1..17: note = Synthetic
  source 1..17: mol_type = other DNA
ttcacgggagtgcagca

SEQ ID NO: 3906 - DNA, 17 bp, synthetic construct
  misc_feature 1..17: note = Synthetic
  source 1..17: mol_type = other DNA
cctgcacgttgccgcga

SEQ ID NO: 3907 - DNA, 17 bp, synthetic construct
  misc_feature 1..17: note = Synthetic
  source 1..17: mol_type = other DNA
gcgacggtgacgaccat

SEQ ID NO: 3908 - DNA, 17 bp, synthetic construct
  misc_feature 1..17: note = Synthetic
  source 1..17: mol_type = other DNA
agtacgtccacgcgcgc

SEQ ID NO: 3909 - DNA, 17 bp, synthetic construct
  misc_feature 1..17: note = Synthetic
  source 1..17: mol_type = other DNA
gtacgtccacgcgcgct

SEQ ID NO: 3910 - DNA, 17 bp, synthetic construct
  misc_feature 1..17: note = Synthetic
  source 1..17: mol_type = other DNA
cgtccacgcgcgctggg

SEQ ID NO: 3911 - DNA, 17 bp, synthetic construct
  misc_feature 1..17: note = Synthetic
  source 1..17: mol_type = other DNA
ggccttcgaacagctcc

SEQ ID NO: 3912 - DNA, 17 bp, synthetic construct
  misc_feature 1..17: note = Synthetic
  source 1..17: mol_type = other DNA
gctcctggccgatttcc

SEQ ID NO: 3913 - DNA, 17 bp, synthetic construct
  misc_feature 1..17: note = Synthetic
  source 1..17: mol_type = other DNA
cctggccgatttcccgg

SEQ ID NO: 3914 - DNA, 17 bp, synthetic construct
  misc_feature 1..17: note = Synthetic
  source 1..17: mol_type = other DNA
ggccgatttcccggagg

SEQ ID NO: 3915 - DNA, 17 bp, synthetic construct
  misc_feature 1..17: note = Synthetic
  source 1..17: mol_type = other DNA
gccgacatgcgcgcccc

SEQ ID NO: 3916 - DNA, 17 bp, synthetic construct
  misc_feature 1..17: note = Synthetic
  source 1..17: mol_type = other DNA
ccgacatgcgcgccccc

SEQ ID NO: 3917 - DNA, 17 bp, synthetic construct
  misc_feature 1..17: note = Synthetic
  source 1..17: mol_type = other DNA
tccatgcgcatcatcta

SEQ ID NO: 3918 - DNA, 17 bp, synthetic construct
  misc_feature 1..17: note = Synthetic
  source 1..17: mol_type = other DNA
ccatgcgcatcatctac

SEQ ID NO: 3919 - DNA, 17 bp, synthetic construct
  misc_feature 1..17: note = Synthetic
  source 1..17: mol_type = other DNA
catgcgcatcatctacg

SEQ ID NO: 3920 - DNA, 17 bp, synthetic construct
  misc_feature 1..17: note = Synthetic
  source 1..17: mol_type = other DNA
catcatctacggggaca

SEQ ID NO: 3921 - DNA, 17 bp, synthetic construct
  misc_feature 1..17: note = Synthetic
  source 1..17: mol_type = other DNA
atctttgtgctgtgccg

SEQ ID NO: 3922 - DNA, 17 bp, synthetic construct
  misc_feature 1..17: note = Synthetic
  source 1..17: mol_type = other DNA
gctgtgccgcggcctca

SEQ ID NO: 3923 - DNA, 17 bp, synthetic construct
  misc_feature 1..17: note = Synthetic
  source 1..17: mol_type = other DNA
cgcggcctcacggccgc

SEQ ID NO: 3924 - DNA, 17 bp, synthetic construct
  misc_feature 1..17: note = Synthetic
  source 1..17: mol_type = other DNA
gcggcctcacggccgcc

SEQ ID NO: 3925 - DNA, 17 bp, synthetic construct
  misc_feature 1..17: note = Synthetic
  source 1..17: mol_type = other DNA
cacggccgccgggctga

SEQ ID NO: 3926 - DNA, 17 bp, synthetic construct
  misc_feature 1..17: note = Synthetic
  source 1..17: mol_type = other DNA
cgccgggctgacggccg

SEQ ID NO: 3927 - DNA, 17 bp, synthetic construct
  misc_feature 1..17: note = Synthetic
  source 1..17: mol_type = other DNA
gccgggctgacggccgt

SEQ ID NO: 3928 - DNA, 17 bp, synthetic construct
  misc_feature 1..17: note = Synthetic
  source 1..17: mol_type = other DNA
ggccgtgggcgacaaga

SEQ ID NO: 3929 - DNA, 17 bp, synthetic construct
  misc_feature 1..17: note = Synthetic
  source 1..17: mol_type = other DNA
gccaagaaaaagtacat

SEQ ID NO: 3930 - DNA, 17 bp, synthetic construct
  misc_feature 1..17: note = Synthetic
  source 1..17: mol_type = other DNA
tacatcggcgtcatcta

SEQ ID NO: 3931 - DNA, 17 bp, synthetic construct
  misc_feature 1..17: note = Synthetic
  source 1..17: mol_type = other DNA
acatcggcgtcatctac

SEQ ID NO: 3932 - DNA, 17 bp, synthetic construct
  misc_feature 1..17: note = Synthetic
  source 1..17: mol_type = other DNA
catcggcgtcatctacg

SEQ ID NO: 3933 - DNA, 17 bp, synthetic construct
  misc_feature 1..17: note = Synthetic
  source 1..17: mol_type = other DNA
atcggcgtcatctacgg

SEQ ID NO: 3934 - DNA, 17 bp, synthetic construct
  misc_feature 1..17: note = Synthetic
  source 1..17: mol_type = other DNA
gggtaagatgctcatca

SEQ ID NO: 3935 - DNA, 17 bp, synthetic construct
  misc_feature 1..17: note = Synthetic
  source 1..17: mol_type = other DNA
ggtaagatgctcatcaa

SEQ ID NO: 3936 - DNA, 17 bp, synthetic construct
  misc_feature 1..17: note = Synthetic
  source 1..17: mol_type = other DNA
gatgctcatcaagggcg

SEQ ID NO: 3937 - DNA, 17 bp, synthetic construct
  misc_feature 1..17: note = Synthetic
  source 1..17: mol_type = other DNA
catcaagggcgtggatc

SEQ ID NO: 3938 - DNA, 17 bp, synthetic construct
  misc_feature 1..17: note = Synthetic
  source 1..17: mol_type = other DNA
ttatcaaccgcacctcc

SEQ ID NO: 3939 - DNA, 17 bp, synthetic construct
  misc_feature 1..17: note = Synthetic
  source 1..17: mol_type = other DNA
tatcaaccgcacctcca

SEQ ID NO: 3940 - DNA, 17 bp, synthetic construct
  misc_feature 1..17: note = Synthetic
  source 1..17: mol_type = other DNA
ccgcacctccagggccc

SEQ ID NO: 3941 - DNA, 17 bp, synthetic construct
  misc_feature 1..17: note = Synthetic
  source 1..17: mol_type = other DNA
tacgacgataccgtctc

SEQ ID NO: 3942 - DNA, 17 bp, synthetic construct
  misc_feature 1..17: note = Synthetic
  source 1..17: mol_type = other DNA
cgataccgtctccggag

SEQ ID NO: 3943 - DNA, 17 bp, synthetic construct
  misc_feature 1..17: note = Synthetic
  source 1..17: mol_type = other DNA
gttagccgagcgccccg

SEQ ID NO: 3944 - RNA, 17 nt, synthetic construct
  misc_feature 1..17: note = Synthetic
  source 1..17: mol_type = other RNA
agccgagcgccccgcgg

SEQ ID NO: 3945 - RNA, 17 nt, synthetic construct
  misc_feature 1..17: note = Synthetic
  source 1..17: mol_type = other RNA
agcgccccgcggaggag

SEQ ID NO: 3946 - DNA, 17 bp, synthetic construct
  misc_feature 1..17: note = Synthetic
  source 1..17: mol_type = other DNA
ccccgcggaggagtggc

SEQ ID NO: 3947 - DNA, 17 bp, synthetic construct
  misc_feature 1..17: note = Synthetic
  source 1..17: mol_type = other DNA
ggcgcgacccctgcccg

SEQ ID NO: 3948 - DNA, 17 bp, synthetic construct
  misc_feature 1..17: note = Synthetic
  source 1..17: mol_type = other DNA
gcgcgacccctgcccga

SEQ ID NO: 3949 - DNA, 17 bp, synthetic construct
  misc_feature 1..17: note = Synthetic
  source 1..17: mol_type = other DNA
cctgcccgagggactgc

SEQ ID NO: 3950 - DNA, 17 bp, synthetic construct
  misc_feature 1..17: note = Synthetic
  source 1..17: mol_type = other DNA
gagggactgcaggcgtt

SEQ ID NO: 3951 - DNA, 17 bp, synthetic construct
  misc_feature 1..17: note = Synthetic
  source 1..17: mol_type = other DNA
agggactgcaggcgttc

SEQ ID NO: 3952 - DNA, 17 bp, synthetic construct
  misc_feature 1..17: note = Synthetic
  source 1..17: mol_type = other DNA
gggactgcaggcgttcg

SEQ ID NO: 3953 - DNA, 17 bp, synthetic construct
  misc_feature 1..17: note = Synthetic
  source 1..17: mol_type = other DNA
tcctcgtagacgcccat

SEQ ID NO: 3954 - DNA, 17 bp, synthetic construct
  misc_feature 1..17: note = Synthetic
  source 1..17: mol_type = other DNA
tcggcgcatcaccgacc

SEQ ID NO: 3955 - DNA, 17 bp, synthetic construct
  misc_feature 1..17: note = Synthetic
  source 1..17: mol_type = other DNA
gcatcaccgacccggag

SEQ ID NO: 3956 - DNA, 17 bp, synthetic construct
  misc_feature 1..17: note = Synthetic
  source 1..17: mol_type = other DNA
catcaccgacccggaga

SEQ ID NO: 3957 - DNA, 17 bp, synthetic construct
  misc_feature 1..17: note = Synthetic
  source 1..17: mol_type = other DNA
cccggagagggacatcc

SEQ ID NO: 3958 - DNA, 17 bp, synthetic construct
  misc_feature 1..17: note = Synthetic
  source 1..17: mol_type = other DNA
gtacaccaacaagcgcc

SEQ ID NO: 3959 - DNA, 17 bp, synthetic construct
  misc_feature 1..17: note = Synthetic
  source 1..17: mol_type = other DNA
gcgcctggcccacctga

SEQ ID NO: 3960 - DNA, 17 bp, synthetic construct
  misc_feature 1..17: note = Synthetic
  source 1..17: mol_type = other DNA
ggtgtattacaagctca

SEQ ID NO: 3961 - DNA, 17 bp, synthetic construct
  misc_feature 1..17: note = Synthetic
  source 1..17: mol_type = other DNA
catggcccgccgcgcgc

SEQ ID NO: 3962 - DNA, 17 bp, synthetic construct
  misc_feature 1..17: note = Synthetic
  source 1..17: mol_type = other DNA
gcaggtcccgtccatca

SEQ ID NO: 3963 - DNA, 17 bp, synthetic construct
  misc_feature 1..17: note = Synthetic
  source 1..17: mol_type = other DNA
tcccgtccatcaaggac

SEQ ID NO: 3964 - DNA, 17 bp, synthetic construct
  misc_feature 1..17: note = Synthetic
  source 1..17: mol_type = other DNA
gatcccgtacgtgatcg

SEQ ID NO: 3965 - DNA, 17 bp, synthetic construct
  misc_feature 1..17: note = Synthetic
  source 1..17: mol_type = other DNA
cgtggcccagacccgcg

SEQ ID NO: 3966 - DNA, 17 bp, synthetic construct
  misc_feature 1..17: note = Synthetic
  source 1..17: mol_type = other DNA
ccagacccgcgaggtag

SEQ ID NO: 3967 - DNA, 17 bp, synthetic construct
  misc_feature 1..17: note = Synthetic
  source 1..17: mol_type = other DNA
ccgcgaggtagaggaga

SEQ ID NO: 3968 - DNA, 17 bp, synthetic construct
  misc_feature 1..17: note = Synthetic
  source 1..17: mol_type = other DNA
tagaggagacggtcgcg

SEQ ID NO: 3969 - DNA, 17 bp, synthetic construct
  misc_feature 1..17: note = Synthetic
  source 1..17: mol_type = other DNA
ggagacggtcgcgcggc

SEQ ID NO: 3970 - DNA, 17 bp, synthetic construct
  misc_feature 1..17: note = Synthetic
  source 1..17: mol_type = other DNA
ctagacgccgccgcccc

SEQ ID NO: 3971 - DNA, 17 bp, synthetic construct
  misc_feature 1..17: note = Synthetic
  source 1..17: mol_type = other DNA
tagacgccgccgcccca

SEQ ID NO: 3972 - RNA, 17 nt, synthetic construct
  misc_feature 1..17: note = Synthetic
  source 1..17: mol_type = other RNA
agacgccgccgccccag

SEQ ID NO: 3973 - RNA, 17 nt, synthetic construct
  misc_feature 1..17: note = Synthetic
  source 1..17: mol_type = other RNA
cgagcccgccccccccg

SEQ ID NO: 3974 - DNA, 17 bp, synthetic construct
  misc_feature 1..17: note = Synthetic
  source 1..17: mol_type = other DNA
cgcggccctgccctccc

SEQ ID NO: 3975 - RNA, 17 nt, synthetic construct
  misc_feature 1..17: note = Synthetic
  source 1..17: mol_type = other RNA
ccccggccaagcgcccc

SEQ ID NO: 3976 - RNA, 17 nt, synthetic construct
  misc_feature 1..17: note = Synthetic
  source 1..17: mol_type = other RNA
cccggccaagcgccccc

SEQ ID NO: 3977 - DNA, 17 bp, synthetic construct
  misc_feature 1..17: note = Synthetic
  source 1..17: mol_type = other DNA
gtcgcctgccgaccccc

SEQ ID NO: 3978 - DNA, 17 bp, synthetic construct
  misc_feature 1..17: note = Synthetic
  source 1..17: mol_type = other DNA
tcgcctgccgacccccc

SEQ ID NO: 3979 - DNA, 17 bp, synthetic construct
  misc_feature 1..17: note = Synthetic
  source 1..17: mol_type = other DNA
cctgccgaccccccggg

SEQ ID NO: 3980 - DNA, 17 bp, synthetic construct
  misc_feature 1..17: note = Synthetic
  source 1..17: mol_type = other DNA
caagccccgcaagctgc

SEQ ID NO: 3981 - DNA, 17 bp, synthetic construct
  misc_feature 1..17: note = Synthetic
  source 1..17: mol_type = other DNA
gctgctggtgtccgagc

SEQ ID NO: 3982 - DNA, 17 bp, synthetic construct
  misc_feature 1..17: note = Synthetic
  source 1..17: mol_type = other DNA
ggtgtccgagctggccg

SEQ ID NO: 3983 - DNA, 17 bp, synthetic construct
  misc_feature 1..17: note = Synthetic
  source 1..17: mol_type = other DNA
gcatacgccattgccca

SEQ ID NO: 3984 - DNA, 17 bp, synthetic construct
  misc_feature 1..17: note = Synthetic
  source 1..17: mol_type = other DNA
cggcgtcgccctgaaca

SEQ ID NO: 3985 - DNA, 17 bp, synthetic construct
  misc_feature 1..17: note = Synthetic
  source 1..17: mol_type = other DNA
ttacttctcccacctgt

SEQ ID NO: 3986 - DNA, 17 bp, synthetic construct
  misc_feature 1..17: note = Synthetic
  source 1..17: mol_type = other DNA
tacttctcccacctgtt

SEQ ID NO: 3987 - DNA, 17 bp, synthetic construct
  misc_feature 1..17: note = Synthetic
  source 1..17: mol_type = other DNA
acttctcccacctgttg

SEQ ID NO: 3988 - DNA, 17 bp, synthetic construct
  misc_feature 1..17: note = Synthetic
  source 1..17: mol_type = other DNA
cttctcccacctgttgg

SEQ ID NO: 3989 - DNA, 17 bp, synthetic construct
  misc_feature 1..17: note = Synthetic
  source 1..17: mol_type = other DNA
ctcccacctgttggggg

SEQ ID NO: 3990 - DNA, 17 bp, synthetic construct
  misc_feature 1..17: note = Synthetic
  source 1..17: mol_type = other DNA
ggcgtgcgtgacattca

SEQ ID NO: 3991 - DNA, 17 bp, synthetic construct
  misc_feature 1..17: note = Synthetic
  source 1..17: mol_type = other DNA
acattcaaggccctgtt

SEQ ID NO: 3992 - DNA, 17 bp, synthetic construct
  misc_feature 1..17: note = Synthetic
  source 1..17: mol_type = other DNA
cattcaaggccctgttt

SEQ ID NO: 3993 - DNA, 17 bp, synthetic construct
  misc_feature 1..17: note = Synthetic
  source 1..17: mol_type = other DNA
ccgagagtctgttaaaa

SEQ ID NO: 3994 - DNA, 17 bp, synthetic construct
  misc_feature 1..17: note = Synthetic
  source 1..17: mol_type = other DNA
ggtttattcccgaagtg

SEQ ID NO: 3995 - DNA, 17 bp, synthetic construct
  misc_feature 1..17: note = Synthetic
  source 1..17: mol_type = other DNA
cgaagtgtggcaccccc

SEQ ID NO: 3996 - RNA, 17 nt, synthetic construct
  misc_feature 1..17: note = Synthetic
  source 1..17: mol_type = other RNA
gcaccccccggacgacg

SEQ ID NO: 3997 - DNA, 17 bp, synthetic construct
  misc_feature 1..17: note = Synthetic
  source 1..17: mol_type = other DNA
cggacgacgtggccgcg

SEQ ID NO: 3998 - DNA, 17 bp, synthetic construct
  misc_feature 1..17: note = Synthetic
  source 1..17: mol_type = other DNA
acgtggccgcgcggctc

SEQ ID NO: 3999 - DNA, 17 bp, synthetic construct
  misc_feature 1..17: note = Synthetic
  source 1..17: mol_type = other DNA
gcgcggctccggaccgc

SEQ ID NO: 4000 - DNA, 17 bp, synthetic construct
  misc_feature 1..17: note = Synthetic
  source 1..17: mol_type = other DNA
cgcggctccggaccgca

SEQ ID NO: 4001 - DNA, 17 bp, synthetic construct
  misc_feature 1..17: note = Synthetic
  source 1..17: mol_type = other DNA
ctccggaccgcagggtt

SEQ ID NO: 4002 - DNA, 17 bp, synthetic construct
  misc_feature 1..17: note = Synthetic
  source 1..17: mol_type = other DNA
tccggaccgcagggttc

SEQ ID NO: 4003 - DNA, 17 bp, synthetic construct
  misc_feature 1..17: note = Synthetic
  source 1..17: mol_type = other DNA
ccggaccgcagggttcg

SEQ ID NO: 4004 - DNA, 17 bp, synthetic construct
  misc_feature 1..17: note = Synthetic
  source 1..17: mol_type = other DNA
gaccgcagggttcgggg

SEQ ID NO: 4005 - DNA, 17 bp, synthetic construct
  misc_feature 1..17: note = Synthetic
  source 1..17: mol_type = other DNA
cgcagggttcggggcgg

SEQ ID NO: 4006 - DNA, 17 bp, synthetic construct
  misc_feature 1..17: note = Synthetic
  source 1..17: mol_type = other DNA
gcagggttcggggcggt

SEQ ID NO: 4007 - DNA, 17 bp, synthetic construct
  misc_feature 1..17: note = Synthetic
  source 1..17: mol_type = other DNA
ttcggggcggtgggtgc

SEQ ID NO: 4008 - DNA, 17 bp, synthetic construct
  misc_feature 1..17: note = Synthetic
  source 1..17: mol_type = other DNA
ggtgggtgccggcgcta

SEQ ID NO: 4009 - DNA, 17 bp, synthetic construct
  misc_feature 1..17: note = Synthetic
  source 1..17: mol_type = other DNA
gggtgccggcgctacgg

SEQ ID NO: 4010 - DNA, 17 bp, synthetic construct
  misc_feature 1..17: note = Synthetic
  source 1..17: mol_type = other DNA
tgccggcgctacggcgg

SEQ ID NO: 4011 - DNA, 20 bp, synthetic construct
  misc_feature 1..20: note = Synthetic
  source 1..20: mol_type = other DNA
agtttcctccgccgtagcgc

SEQ ID NO: 4012 - DNA, 20 bp, synthetic construct
  misc_feature 1..20: note = Synthetic
  source 1..20: mol_type = other DNA
acccaccgccccgaaccctg

SEQ ID NO: 4013 - DNA, 20 bp, synthetic construct
  misc_feature 1..20: note = Synthetic
  source 1..20: mol_type = other DNA
ccgccccgaaccctgcggtc

SEQ ID NO: 4014 - DNA, 20 bp, synthetic construct
  misc_feature 1..20: note = Synthetic
  source 1..20: mol_type = other DNA
ccctgcggtccggagccgcg

SEQ ID NO: 4015 - DNA, 20 bp, synthetic construct
  misc_feature 1..20: note = Synthetic
  source 1..20: mol_type = other DNA
agccgcgcggccacgtcgtc

SEQ ID NO: 4016 - DNA, 20 bp, synthetic construct
  misc_feature 1..20: note = Synthetic
  source 1..20: mol_type = other DNA
gccgcgcggccacgtcgtcc

SEQ ID NO: 4017 - DNA, 20 bp, synthetic construct
  misc_feature 1..20: note = Synthetic
  source 1..20: mol_type = other DNA
ccgcgcggccacgtcgtccg

SEQ ID NO: 4018 - DNA, 20 bp, synthetic construct
  misc_feature 1..20: note = Synthetic
  source 1..20: mol_type = other DNA
cgcgcggccacgtcgtccgg

SEQ ID NO: 4019 - DNA, 20 bp, synthetic construct
  misc_feature 1..20: note = Synthetic
  source 1..20: mol_type = other DNA
gcgcggccacgtcgtccggg

SEQ ID NO: 4020 - DNA, 20 bp, synthetic construct
  misc_feature 1..20: note = Synthetic
  source 1..20: mol_type = other DNA
gtccggggggtgccacactt

SEQ ID NO: 4021 - DNA, 20 bp, synthetic construct
  misc_feature 1..20: note = Synthetic
  source 1..20: mol_type = other DNA
tccggggggtgccacacttc

SEQ ID NO: 4022 - DNA, 20 bp, synthetic construct
  misc_feature 1..20: note = Synthetic
  source 1..20: mol_type = other DNA
aaacctttttaacagactct

SEQ ID NO: 4023 - DNA, 20 bp, synthetic construct
  misc_feature 1..20: note = Synthetic
  source 1..20: mol_type = other DNA
taacagactctcggtgatct

SEQ ID NO: 4024 - DNA, 20 bp, synthetic construct
  misc_feature 1..20: note = Synthetic
  source 1..20: mol_type = other DNA
tcttggcgttattcccaaac

SEQ ID NO: 4025 - DNA, 20 bp, synthetic construct
  misc_feature 1..20: note = Synthetic
  source 1..20: mol_type = other DNA
cttggcgttattcccaaaca

SEQ ID NO: 4026 - DNA, 20 bp, synthetic construct
  misc_feature 1..20: note = Synthetic
  source 1..20: mol_type = other DNA
tcacgcacgccgcccccaac

SEQ ID NO: 4027 - RNA, 20 nt, synthetic construct
  misc_feature 1..20: note = Synthetic
  source 1..20: mol_type = other RNA
cgcacgccgcccccaacagg

SEQ ID NO: 4028 - DNA, 20 bp, synthetic construct
  misc_feature 1..20: note = Synthetic
  source 1..20: mol_type = other DNA
gcacgccgcccccaacaggt

SEQ ID NO: 4029 - DNA, 20 bp, synthetic construct
  misc_feature 1..20: note = Synthetic
  source 1..20: mol_type = other DNA
agaagtaatagtccgtgttc

SEQ ID NO: 4030 - DNA, 20 bp, synthetic construct
  misc_feature 1..20: note = Synthetic
  source 1..20: mol_type = other DNA
gaagtaatagtccgtgttca

SEQ ID NO: 4031 - DNA, 20 bp, synthetic construct
  misc_feature 1..20: note = Synthetic
  source 1..20: mol_type = other DNA
ccgtgttcagggcgacgccg

SEQ ID NO: 4032 - DNA, 20 bp, synthetic construct
  misc_feature 1..20: note = Synthetic
  source 1..20: mol_type = other DNA
cgtgttcagggcgacgccgt

SEQ ID NO: 4033 - DNA, 20 bp, synthetic construct
  misc_feature 1..20: note = Synthetic
  source 1..20: mol_type = other DNA
cagggcgacgccgtgggcaa

SEQ ID NO: 4034 - DNA, 20 bp, synthetic construct
  misc_feature 1..20: note = Synthetic
  source 1..20: mol_type = other DNA
gccgtgggcaatggcgtatg

SEQ ID NO: 4035 - DNA, 20 bp, synthetic construct
  misc_feature 1..20: note = Synthetic
  source 1..20: mol_type = other DNA
ccgtgggcaatggcgtatgc

SEQ ID NO: 4036 - DNA, 20 bp, synthetic construct
  misc_feature 1..20: note = Synthetic
  source 1..20: mol_type = other DNA
aatggcgtatgcgggatcct

SEQ ID NO: 4037 - DNA, 20 bp, synthetic construct
  misc_feature 1..20: note = Synthetic
  source 1..20: mol_type = other DNA
tgcgggatcctcggccagct

SEQ ID NO: 4038 - DNA, 20 bp, synthetic construct
  misc_feature 1..20: note = Synthetic
  source 1..20: mol_type = other DNA
gctcggacaccagcagcttg

SEQ ID NO: 4039 - DNA, 20 bp, synthetic construct
  misc_feature 1..20: note = Synthetic
  source 1..20: mol_type = other DNA
ctcggacaccagcagcttgc

SEQ ID NO: 4040 - DNA, 20 bp, synthetic construct
  misc_feature 1..20: note = Synthetic
  source 1..20: mol_type = other DNA
tcggacaccagcagcttgcg

SEQ ID NO: 4041 - DNA, 20 bp, synthetic construct
  misc_feature 1..20: note = Synthetic
  source 1..20: mol_type = other DNA
caccagcagcttgcggggct

SEQ ID NO: 4042 - DNA, 20 bp, synthetic construct
  misc_feature 1..20: note = Synthetic
  source 1..20: mol_type = other DNA
cggggcttggacgcgcctcc

SEQ ID NO: 4043 - DNA, 20 bp, synthetic construct
  misc_feature 1..20: note = Synthetic
  source 1..20: mol_type = other DNA
ggggcttggacgcgcctccc

SEQ ID NO: 4044 - DNA, 20 bp, synthetic construct
  misc_feature 1..20: note = Synthetic
  source 1..20: mol_type = other DNA
gggcttggacgcgcctcccg

SEQ ID NO: 4045 - DNA, 20 bp, synthetic construct
  misc_feature 1..20: note = Synthetic
  source 1..20: mol_type = other DNA
ggcttggacgcgcctcccgg

SEQ ID NO: 4046 - DNA, 20 bp, synthetic construct
  misc_feature 1..20: note = Synthetic
  source 1..20: mol_type = other DNA
gcttggacgcgcctcccggg

SEQ ID NO: 4047 - DNA, 20 bp, synthetic construct
  misc_feature 1..20: note = Synthetic
  source 1..20: mol_type = other DNA
ggacgcgcctcccggggggt

SEQ ID NO: 4048 - DNA, 20 bp, synthetic construct
  misc_feature 1..20: note = Synthetic
  source 1..20: mol_type = other DNA
gcgcctcccggggggtcggc

SEQ ID NO: 4049 - DNA, 20 bp, synthetic construct
  misc_feature 1..20: note = Synthetic
  source 1..20: mol_type = other DNA
cccggggggtcggcaggcga

SEQ ID NO: 4050 - DNA, 20 bp, synthetic construct
  misc_feature 1..20: note = Synthetic
  source 1..20: mol_type = other DNA
cggcaggcgacggcgtctcc

SEQ ID NO: 4051 - DNA, 20 bp, synthetic construct
  misc_feature 1..20: note = Synthetic
  source 1..20: mol_type = other DNA
ggcaggcgacggcgtctccc

SEQ ID NO: 4052 - DNA, 20 bp, synthetic construct
  misc_feature 1..20: note = Synthetic
  source 1..20: mol_type = other DNA
gcaggcgacggcgtctcccg

SEQ ID NO: 4053 - DNA, 20 bp, synthetic construct
  misc_feature 1..20: note = Synthetic
  source 1..20: mol_type = other DNA
caggcgacggcgtctcccgg

SEQ ID NO: 4054 - DNA, 20 bp, synthetic construct
  misc_feature 1..20: note = Synthetic
  source 1..20: mol_type = other DNA
cggcgtctcccgggggcgct

SEQ ID NO: 4055 - DNA, 20 bp, synthetic construct
  misc_feature 1..20: note = Synthetic
  source 1..20: mol_type = other DNA
gtctcccgggggcgcttggc

SEQ ID NO: 4056 - DNA, 20 bp, synthetic construct
  misc_feature 1..20: note = Synthetic
  source 1..20: mol_type = other DNA
tctcccgggggcgcttggcc

SEQ ID NO: 4057 - DNA, 20 bp, synthetic construct
  misc_feature 1..20: note = Synthetic
  source 1..20: mol_type = other DNA
ctcccgggggcgcttggccg

SEQ ID NO: 4058 - DNA, 20 bp, synthetic construct
  misc_feature 1..20: note = Synthetic
  source 1..20: mol_type = other DNA
ccgggggcgcttggccgggg

SEQ ID NO: 4059 - DNA, 20 bp, synthetic construct
  misc_feature 1..20: note = Synthetic
  source 1..20: mol_type = other DNA
cgggggcgcttggccgggga

SEQ ID NO: 4060 - DNA, 20 bp, synthetic construct
  misc_feature 1..20: note = Synthetic
  source 1..20: mol_type = other DNA
ggcgcttggccggggagggc

SEQ ID NO: 4061 - DNA, 20 bp, synthetic construct
  misc_feature 1..20: note = Synthetic
  source 1..20: mol_type = other DNA
gcgcttggccggggagggca

SEQ ID NO: 4062 - RNA, 20 nt, synthetic construct
  misc_feature 1..20: note = Synthetic
  source 1..20: mol_type = other RNA
ggccggggagggcagggccg

SEQ ID NO: 4063 - RNA, 20 nt, synthetic construct
  misc_feature 1..20: note = Synthetic
  source 1..20: mol_type = other RNA
gccggggagggcagggccgc

SEQ ID NO: 4064 - RNA, 20 nt, synthetic construct
  misc_feature 1..20: note = Synthetic
  source 1..20: mol_type = other RNA
ccggggagggcagggccgcg

SEQ ID NO: 4065 - RNA, 20 nt, synthetic construct
  misc_feature 1..20: note = Synthetic
  source 1..20: mol_type = other RNA
cggggagggcagggccgcgg

SEQ ID NO: 4066 - RNA, 20 nt, synthetic construct
  misc_feature 1..20: note = Synthetic
  source 1..20: mol_type = other RNA
ggggagggcagggccgcggg

SEQ ID NO: 4067 - RNA, 20 nt, synthetic construct
  misc_feature 1..20: note = Synthetic
  source 1..20: mol_type = other RNA
gggagggcagggccgcgggg

SEQ ID NO: 4068 - RNA, 20 nt, synthetic construct
  misc_feature 1..20: note = Synthetic
  source 1..20: mol_type = other RNA
ggagggcagggccgcggggg

SEQ ID NO: 4069 - RNA, 20 nt, synthetic construct
  misc_feature 1..20: note = Synthetic
  source 1..20: mol_type = other RNA
gggcagggccgcgggggggg

SEQ ID NO: 4070 - RNA, 20 nt, synthetic construct
  misc_feature 1..20: note = Synthetic
  source 1..20: mol_type = other RNA
ggcagggccgcggggggggc

SEQ ID NO: 4071 - DNA, 20 bp, synthetic construct
  misc_feature 1..20: note = Synthetic
  source 1..20: mol_type = other DNA
gggggggcgggctcgtcccc

SEQ ID NO: 4072 - DNA, 20 bp, synthetic construct
  misc_feature 1..20: note = Synthetic
  source 1..20: mol_type = other DNA
ggggggcgggctcgtcccct

SEQ ID NO: 4073 - DNA, 20 bp, synthetic construct
  misc_feature 1..20: note = Synthetic
  source 1..20: mol_type = other DNA
gggggcgggctcgtcccctg

SEQ ID NO: 4074 - DNA, 20 bp, synthetic construct
  misc_feature 1..20: note = Synthetic
  source 1..20: mol_type = other DNA
ggcgggctcgtcccctgggg

SEQ ID NO: 4075 - DNA, 20 bp, synthetic construct
  misc_feature 1..20: note = Synthetic
  source 1..20: mol_type = other DNA
gggctcgtcccctggggcgg

SEQ ID NO: 4076 - DNA, 20 bp, synthetic construct
  misc_feature 1..20: note = Synthetic
  source 1..20: mol_type = other DNA
gggcggcggcgtctagctcg

SEQ ID NO: 4077 - DNA, 20 bp, synthetic construct
  misc_feature 1..20: note = Synthetic
  source 1..20: mol_type = other DNA
cggcggcgtctagctcgcgg

SEQ ID NO: 4078 - DNA, 20 bp, synthetic construct
  misc_feature 1..20: note = Synthetic
  source 1..20: mol_type = other DNA
ggcggcgtctagctcgcgga

SEQ ID NO: 4079 - DNA, 20 bp, synthetic construct
  misc_feature 1..20: note = Synthetic
  source 1..20: mol_type = other DNA
ggcgtctagctcgcggaggg

SEQ ID NO: 4080 - DNA, 20 bp, synthetic construct
  misc_feature 1..20: note = Synthetic
  source 1..20: mol_type = other DNA
cgaccgtctcctctacctcg

SEQ ID NO: 4081 - DNA, 20 bp, synthetic construct
  misc_feature 1..20: note = Synthetic
  source 1..20: mol_type = other DNA
gaccgtctcctctacctcgc

SEQ ID NO: 4082 - DNA, 20 bp, synthetic construct
  misc_feature 1..20: note = Synthetic
  source 1..20: mol_type = other DNA
tctcctctacctcgcgggtc

SEQ ID NO: 4083 - DNA, 20 bp, synthetic construct
  misc_feature 1..20: note = Synthetic
  source 1..20: mol_type = other DNA
ctcctctacctcgcgggtct

SEQ ID NO: 4084 - DNA, 20 bp, synthetic construct
  misc_feature 1..20: note = Synthetic
  source 1..20: mol_type = other DNA
gtctgggccacgatcacgta

SEQ ID NO: 4085 - DNA, 20 bp, synthetic construct
  misc_feature 1..20: note = Synthetic
  source 1..20: mol_type = other DNA
tctgggccacgatcacgtac

SEQ ID NO: 4086 - DNA, 20 bp, synthetic construct
  misc_feature 1..20: note = Synthetic
  source 1..20: mol_type = other DNA
ccacgatcacgtacgggatc

SEQ ID NO: 4087 - DNA, 20 bp, synthetic construct
  misc_feature 1..20: note = Synthetic
  source 1..20: mol_type = other DNA
gtacgggatccggtccttga

SEQ ID NO: 4088 - DNA, 20 bp, synthetic construct
  misc_feature 1..20: note = Synthetic
  source 1..20: mol_type = other DNA
gggatccggtccttgatgga

SEQ ID NO: 4089 - DNA, 20 bp, synthetic construct
  misc_feature 1..20: note = Synthetic
  source 1..20: mol_type = other DNA
ggatccggtccttgatggac

SEQ ID NO: 4090 - DNA, 20 bp, synthetic construct
  misc_feature 1..20: note = Synthetic
  source 1..20: mol_type = other DNA
tgatggacgggacctgcgcg

SEQ ID NO: 4091 - DNA, 20 bp, synthetic construct
  misc_feature 1..20: note = Synthetic
  source 1..20: mol_type = other DNA
tggacgggacctgcgcgcgg

SEQ ID NO: 4092 - DNA, 20 bp, synthetic construct
  misc_feature 1..20: note = Synthetic
  source 1..20: mol_type = other DNA
ggacgggacctgcgcgcggc

SEQ ID NO: 4093 - DNA, 20 bp, synthetic construct
  misc_feature 1..20: note = Synthetic
  source 1..20: mol_type = other DNA
tgagcttgtaatacaccgtc

SEQ ID NO: 4094 - DNA, 20 bp, synthetic construct
  misc_feature 1..20: note = Synthetic
  source 1..20: mol_type = other DNA
gcttgtaatacaccgtcagg

SEQ ID NO: 4095 - DNA, 20 bp, synthetic construct
  misc_feature 1..20: note = Synthetic
  source 1..20: mol_type = other DNA
cttgtaatacaccgtcaggt

SEQ ID NO: 4096 - DNA, 20 bp, synthetic construct
  misc_feature 1..20: note = Synthetic
  source 1..20: mol_type = other DNA
aatacaccgtcaggtgggcc

SEQ ID NO: 4097 - DNA, 20 bp, synthetic construct
  misc_feature 1..20: note = Synthetic
  source 1..20: mol_type = other DNA
caggtgggccaggcgcttgt

SEQ ID NO: 4098 - DNA, 20 bp, synthetic construct
  misc_feature 1..20: note = Synthetic
  source 1..20: mol_type = other DNA
cgcttgttggtgtacgcgcg

SEQ ID NO: 4099 - DNA, 20 bp, synthetic construct
  misc_feature 1..20: note = Synthetic
  source 1..20: mol_type = other DNA
gcttgttggtgtacgcgcgc

SEQ ID NO: 4100 - DNA, 20 bp, synthetic construct
  misc_feature 1..20: note = Synthetic
  source 1..20: mol_type = other DNA
gcgcgggtgtctgctcagtt

SEQ ID NO: 4101 - DNA, 20 bp, synthetic construct
  misc_feature 1..20: note = Synthetic
  source 1..20: mol_type = other DNA
cgggtgtctgctcagttcgg

SEQ ID NO: 4102 - DNA, 20 bp, synthetic construct
  misc_feature 1..20: note = Synthetic
  source 1..20: mol_type = other DNA
gtctgctcagttcggcggtg

SEQ ID NO: 4103 - DNA, 20 bp, synthetic construct
  misc_feature 1..20: note = Synthetic
  source 1..20: mol_type = other DNA
cggcggtgaggacaaagtcc

SEQ ID NO: 4104 - DNA, 20 bp, synthetic construct
  misc_feature 1..20: note = Synthetic
  source 1..20: mol_type = other DNA
aagtcctggatgtccctctc

SEQ ID NO: 4105 - DNA, 20 bp, synthetic construct
  misc_feature 1..20: note = Synthetic
  source 1..20: mol_type = other DNA
agtcctggatgtccctctcc

SEQ ID NO: 4106 - DNA, 20 bp, synthetic construct
  misc_feature 1..20: note = Synthetic
  source 1..20: mol_type = other DNA
ctggatgtccctctccgggt

SEQ ID NO: 4107 - DNA, 20 bp, synthetic construct
  misc_feature 1..20: note = Synthetic
  source 1..20: mol_type = other DNA
ccgggtcggtgatgcgccga

SEQ ID NO: 4108 - DNA, 20 bp, synthetic construct
  misc_feature 1..20: note = Synthetic
  source 1..20: mol_type = other DNA
cgggtcggtgatgcgccgat

SEQ ID NO: 4109 - DNA, 20 bp, synthetic construct
  misc_feature 1..20: note = Synthetic
  source 1..20: mol_type = other DNA
tgcgccgatgggcgtctacg

SEQ ID NO: 4110 - DNA, 20 bp, synthetic construct
  misc_feature 1..20: note = Synthetic
  source 1..20: mol_type = other DNA
ccgatgggcgtctacgagga

SEQ ID NO: 4111 - DNA, 20 bp, synthetic construct
  misc_feature 1..20: note = Synthetic
  source 1..20: mol_type = other DNA
cccgaacgcctgcagtccct

SEQ ID NO: 4112 - DNA, 20 bp, synthetic construct
  misc_feature 1..20: note = Synthetic
  source 1..20: mol_type = other DNA
ccgaacgcctgcagtccctc

SEQ ID NO: 4113 - DNA, 20 bp, synthetic construct
  misc_feature 1..20: note = Synthetic
  source 1..20: mol_type = other DNA
acgcctgcagtccctcgggc

SEQ ID NO: 4114 - DNA, 20 bp, synthetic construct
  misc_feature 1..20: note = Synthetic
  source 1..20: mol_type = other DNA
cgcctgcagtccctcgggca

SEQ ID NO: 4115 - DNA, 20 bp, synthetic construct
  misc_feature 1..20: note = Synthetic
  source 1..20: mol_type = other DNA
gcctgcagtccctcgggcag

SEQ ID NO: 4116 - DNA, 20 bp, synthetic construct
  misc_feature 1..20: note = Synthetic
  source 1..20: mol_type = other DNA
tcgcgccagccactcctccg

SEQ ID NO: 4117 - DNA, 20 bp, synthetic construct
  misc_feature 1..20: note = Synthetic
  source 1..20: mol_type = other DNA
cgcgccagccactcctccgc

SEQ ID NO: 4118 - DNA, 20 bp, synthetic construct
  misc_feature 1..20: note = Synthetic
  source 1..20: mol_type = other DNA
gcgccagccactcctccgcg

SEQ ID NO: 4119 - DNA, 20 bp, synthetic construct
  misc_feature 1..20: note = Synthetic
  source 1..20: mol_type = other DNA
ccactcctccgcggggcgct

SEQ ID NO: 4120 - DNA, 20 bp, synthetic construct
  misc_feature 1..20: note = Synthetic
  source 1..20: mol_type = other DNA
cgcggggcgctcggctaacg

SEQ ID NO: 4121 - DNA, 20 bp, synthetic construct
  misc_feature 1..20: note = Synthetic
  source 1..20: mol_type = other DNA
ggggcgctcggctaacgcgg

SEQ ID NO: 4122 - DNA, 20 bp, synthetic construct
  misc_feature 1..20: note = Synthetic
  source 1..20: mol_type = other DNA
ggctaacgcggcggccgctc

SEQ ID NO: 4123 - DNA, 20 bp, synthetic construct
  misc_feature 1..20: note = Synthetic
  source 1..20: mol_type = other DNA
cgcggcggccgctccggaga

SEQ ID NO: 4124 - DNA, 20 bp, synthetic construct
  misc_feature 1..20: note = Synthetic
  source 1..20: mol_type = other DNA
cggtatcgtcgtaaaacagc

SEQ ID NO: 4125 - DNA, 20 bp, synthetic construct
  misc_feature 1..20: note = Synthetic
  source 1..20: mol_type = other DNA
cgtaaaacagcaggtcgacc

SEQ ID NO: 4126 - DNA, 20 bp, synthetic construct
  misc_feature 1..20: note = Synthetic
  source 1..20: mol_type = other DNA
gtaaaacagcaggtcgacca

SEQ ID NO: 4127 - DNA, 20 bp, synthetic construct
  misc_feature 1..20: note = Synthetic
  source 1..20: mol_type = other DNA
cagcaggtcgaccagggccc

SEQ ID NO: 4128 - DNA, 20 bp, synthetic construct
  misc_feature 1..20: note = Synthetic
  source 1..20: mol_type = other DNA
caggtcgaccagggccctgg

SEQ ID NO: 4129 - DNA, 20 bp, synthetic construct
  misc_feature 1..20: note = Synthetic
  source 1..20: mol_type = other DNA
cgaccagggccctggaggtg

SEQ ID NO: 4130 - DNA, 20 bp, synthetic construct
  misc_feature 1..20: note = Synthetic
  source 1..20: mol_type = other DNA
gacgccgatgtactttttct

SEQ ID NO: 4131 - DNA, 20 bp, synthetic construct
  misc_feature 1..20: note = Synthetic
  source 1..20: mol_type = other DNA
cttggcgatcagcagcagct

SEQ ID NO: 4132 - DNA, 20 bp, synthetic construct
  misc_feature 1..20: note = Synthetic
  source 1..20: mol_type = other DNA
cttttcgcactcgagtttga

SEQ ID NO: 4133 - DNA, 20 bp, synthetic construct
  misc_feature 1..20: note = Synthetic
  source 1..20: mol_type = other DNA
ttttcgcactcgagtttgat

SEQ ID NO: 4134 - DNA, 20 bp, synthetic construct
  misc_feature 1..20: note = Synthetic
  source 1..20: mol_type = other DNA
tttcgcactcgagtttgatg

SEQ ID NO: 4135 - DNA, 20 bp, synthetic construct
  misc_feature 1..20: note = Synthetic
  source 1..20: mol_type = other DNA
ttcgcactcgagtttgatgg

SEQ ID NO: 4136 - DNA, 20 bp, synthetic construct
  misc_feature 1..20: note = Synthetic
  source 1..20: mol_type = other DNA
tcgcactcgagtttgatggg

SEQ ID NO: 4137 - DNA, 20 bp, synthetic construct
  misc_feature 1..20: note = Synthetic
  source 1..20: mol_type = other DNA
gaaacagcgcgcgcgagatg

SEQ ID NO: 4138 - DNA, 20 bp, synthetic construct
  misc_feature 1..20: note = Synthetic
  source 1..20: mol_type = other DNA
gctcgccatcttgtcgccca

SEQ ID NO: 4139 - DNA, 20 bp, synthetic construct
  misc_feature 1..20: note = Synthetic
  source 1..20: mol_type = other DNA
gtcgcccacggccgtcagcc

SEQ ID NO: 4140 - DNA, 20 bp, synthetic construct
  misc_feature 1..20: note = Synthetic
  source 1..20: mol_type = other DNA
gcccacggccgtcagcccgg

SEQ ID NO: 4141 - DNA, 20 bp, synthetic construct
  misc_feature 1..20: note = Synthetic
  source 1..20: mol_type = other DNA
ccgtcagcccggcggccgtg

SEQ ID NO: 4142 - DNA, 20 bp, synthetic construct
  misc_feature 1..20: note = Synthetic
  source 1..20: mol_type = other DNA
gcccggcggccgtgaggccg

SEQ ID NO: 4143 - RNA, 20 nt, synthetic construct
  misc_feature 1..20: note = Synthetic
  source 1..20: mol_type = other RNA
gccgcggcacagcacaaaga

SEQ ID NO: 4144 - DNA, 20 bp, synthetic construct
  misc_feature 1..20: note = Synthetic
  source 1..20: mol_type = other DNA
gtccccgtagatgatgcgca

SEQ ID NO: 4145 - DNA, 20 bp, synthetic construct
  misc_feature 1..20: note = Synthetic
  source 1..20: mol_type = other DNA
gtagatgatgcgcatggaat

SEQ ID NO: 4146 - DNA, 20 bp, synthetic construct
  misc_feature 1..20: note = Synthetic
  source 1..20: mol_type = other DNA
tagatgatgcgcatggaata

SEQ ID NO: 4147 - DNA, 20 bp, synthetic construct
  misc_feature 1..20: note = Synthetic
  source 1..20: mol_type = other DNA
gatgcgcatggaatagggcc

SEQ ID NO: 4148 - DNA, 20 bp, synthetic construct
  misc_feature 1..20: note = Synthetic
  source 1..20: mol_type = other DNA
atgcgcatggaatagggccc

SEQ ID NO: 4149 - DNA, 20 bp, synthetic construct
  misc_feature 1..20: note = Synthetic
  source 1..20: mol_type = other DNA
tgcgcatggaatagggcccg

SEQ ID NO: 4150 - DNA, 20 bp, synthetic construct
  misc_feature 1..20: note = Synthetic
  source 1..20: mol_type = other DNA
gcgcatggaatagggcccgg

SEQ ID NO: 4151 - DNA, 20 bp, synthetic construct
  misc_feature 1..20: note = Synthetic
  source 1..20: mol_type = other DNA
gggcccgggggcgcgcatgt

SEQ ID NO: 4152 - DNA, 20 bp, synthetic construct
  misc_feature 1..20: note = Synthetic
  source 1..20: mol_type = other DNA
gcgcgcatgtcggccgcctc

SEQ ID NO: 4153 - DNA, 20 bp, synthetic construct
  misc_feature 1..20: note = Synthetic
  source 1..20: mol_type = other DNA
cgcgcatgtcggccgcctcc

SEQ ID NO: 4154 - DNA, 20 bp, synthetic construct
  misc_feature 1..20: note = Synthetic
  source 1..20: mol_type = other DNA
gtcggccgcctccgggaaat

SEQ ID NO: 4155 - DNA, 20 bp, synthetic construct
  misc_feature 1..20: note = Synthetic
  source 1..20: mol_type = other DNA
ccgcctccgggaaatcggcc

SEQ ID NO: 4156 - DNA, 20 bp, synthetic construct
  misc_feature 1..20: note = Synthetic
  source 1..20: mol_type = other DNA
atcggccaggagctgttcga

SEQ ID NO: 4157 - RNA, 20 nt, synthetic construct
  misc_feature 1..20: note = Synthetic
  source 1..20: mol_type = other RNA
cgaaggccgcccagcgcgcg

SEQ ID NO: 4158 - DNA, 20 bp, synthetic construct
  misc_feature 1..20: note = Synthetic
  source 1..20: mol_type = other DNA
agcgcgcgtggacgtactcg

SEQ ID NO: 4159 - DNA, 20 bp, synthetic construct
  misc_feature 1..20: note = Synthetic
  source 1..20: mol_type = other DNA
gcgcgcgtggacgtactcgc

SEQ ID NO: 4160 - DNA, 20 bp, synthetic construct
  misc_feature 1..20: note = Synthetic
  source 1..20: mol_type = other DNA
gggtcgcgagcagcatctcg

SEQ ID NO: 4161 - DNA, 20 bp, synthetic construct
  misc_feature 1..20: note = Synthetic
  source 1..20: mol_type = other DNA
gagcagcatctcgcggccga

SEQ ID NO: 4162 - DNA, 20 bp, synthetic construct
  misc_feature 1..20: note = Synthetic
  source 1..20: mol_type = other DNA
gccgatggtcgtcaccgtcg

SEQ ID NO: 4163 - DNA, 20 bp, synthetic construct
  misc_feature 1..20: note = Synthetic
  source 1..20: mol_type = other DNA
tcaccgtcgcggcaacgtgc

SEQ ID NO: 4164 - DNA, 20 bp, synthetic construct
  misc_feature 1..20: note = Synthetic
  source 1..20: mol_type = other DNA
gtcgcggcaacgtgcaggca

SEQ ID NO: 4165 - DNA, 20 bp, synthetic construct
  misc_feature 1..20: note = Synthetic
  source 1..20: mol_type = other DNA
cggcaacgtgcaggcacggc

SEQ ID NO: 4166 - DNA, 20 bp, synthetic construct
  misc_feature 1..20: note = Synthetic
  source 1..20: mol_type = other DNA
cgagttacacacgaccttga

SEQ ID NO: 4167 - DNA, 20 bp, synthetic construct
  misc_feature 1..20: note = Synthetic
  source 1..20: mol_type = other DNA
gttacacacgaccttgatgg

SEQ ID NO: 4168 - DNA, 20 bp, synthetic construct
  misc_feature 1..20: note = Synthetic
  source 1..20: mol_type = other DNA
tggcggcctgctgcttgtcc

SEQ ID NO: 4169 - DNA, 20 bp, synthetic construct
  misc_feature 1..20: note = Synthetic
  source 1..20: mol_type = other DNA
ctgctgcttgtccaggagca

SEQ ID NO: 4170 - DNA, 20 bp, synthetic construct
  misc_feature 1..20: note = Synthetic
  source 1..20: mol_type = other DNA
gtccaggagcacggcctcct

SEQ ID NO: 4171 - DNA, 20 bp, synthetic construct
  misc_feature 1..20: note = Synthetic
  source 1..20: mol_type = other DNA
tccaggagcacggcctcctc

SEQ ID NO: 4172 - DNA, 20 bp, synthetic construct
  misc_feature 1..20: note = Synthetic
  source 1..20: mol_type = other DNA
ccaggagcacggcctcctcg

SEQ ID NO: 4173 - DNA, 20 bp, synthetic construct
  misc_feature 1..20: note = Synthetic
  source 1..20: mol_type = other DNA
cggcctcctcggggctgctc

SEQ ID NO: 4174 - DNA, 20 bp, synthetic construct
  misc_feature 1..20: note = Synthetic
  source 1..20: mol_type = other DNA
ggcctcctcggggctgctct

SEQ ID NO: 4175 - DNA, 20 bp, synthetic construct
  misc_feature 1..20: note = Synthetic
  source 1..20: mol_type = other DNA
gcctcctcggggctgctctg

SEQ ID NO: 4176 - DNA, 20 bp, synthetic construct
  misc_feature 1..20: note = Synthetic
  source 1..20: mol_type = other DNA
tgctctggggaatccgcgag

SEQ ID NO: 4177 - DNA, 20 bp, synthetic construct
  misc_feature 1..20: note = Synthetic
  source 1..20: mol_type = other DNA
cgagcggatctgctttcgca

SEQ ID NO: 4178 - DNA, 20 bp, synthetic construct
  misc_feature 1..20: note = Synthetic
  source 1..20: mol_type = other DNA
gcatggcgagccagtcccgc

SEQ ID NO: 4179 - DNA, 20 bp, synthetic construct
  misc_feature 1..20: note = Synthetic
  source 1..20: mol_type = other DNA
tggcgagccagtcccgcagg

SEQ ID NO: 4180 - DNA, 20 bp, synthetic construct
  misc_feature 1..20: note = Synthetic
  source 1..20: mol_type = other DNA
agtcccgcaggaggatgctg

SEQ ID NO: 4181 - DNA, 20 bp, synthetic construct
  misc_feature 1..20: note = Synthetic
  source 1..20: mol_type = other DNA
cccgcaggaggatgctgagg

SEQ ID NO: 4182 - DNA, 20 bp, synthetic construct
  misc_feature 1..20: note = Synthetic
  source 1..20: mol_type = other DNA
gcccccccacctcgatctcc

SEQ ID NO: 4183 - DNA, 20 bp, synthetic construct
  misc_feature 1..20: note = Synthetic
  source 1..20: mol_type = other DNA
ggtagtccttgcccgcctcc

SEQ ID NO: 4184 - DNA, 20 bp, synthetic construct
  misc_feature 1..20: note = Synthetic
  source 1..20: mol_type = other DNA
ctccaggtgcgccactgcgt

SEQ ID NO: 4185 - DNA, 20 bp, synthetic construct
  misc_feature 1..20: note = Synthetic
  source 1..20: mol_type = other DNA
gcgccactgcgtcggccctc

SEQ ID NO: 4186 - DNA, 20 bp, synthetic construct
  misc_feature 1..20: note = Synthetic
  source 1..20: mol_type = other DNA
cgccactgcgtcggccctca

SEQ ID NO: 4187 - DNA, 20 bp, synthetic construct
  misc_feature 1..20: note = Synthetic
  source 1..20: mol_type = other DNA
gggagagcgtgctgaagcac

SEQ ID NO: 4188 - DNA, 20 bp, synthetic construct
  misc_feature 1..20: note = Synthetic
  source 1..20: mol_type = other DNA
gcgtgctgaagcacaggttg

SEQ ID NO: 4189 - DNA, 20 bp, synthetic construct
  misc_feature 1..20: note = Synthetic
  source 1..20: mol_type = other DNA
cgtgctgaagcacaggttgt

SEQ ID NO: 4190 - DNA, 20 bp, synthetic construct
  misc_feature 1..20: note = Synthetic
  source 1..20: mol_type = other DNA
tgaagcacaggttgtgggcc

SEQ ID NO: 4191 - DNA, 20 bp, synthetic construct
  misc_feature 1..20: note = Synthetic
  source 1..20: mol_type = other DNA
gttgtgggcctggatgatgc

SEQ ID NO: 4192 - DNA, 20 bp, synthetic construct
  misc_feature 1..20: note = Synthetic
  source 1..20: mol_type = other DNA
ttgtgggcctggatgatgct

SEQ ID NO: 4193 - DNA, 20 bp, synthetic construct
  misc_feature 1..20: note = Synthetic
  source 1..20: mol_type = other DNA
tgtgggcctggatgatgctg

SEQ ID NO: 4194 - DNA, 20 bp, synthetic construct
  misc_feature 1..20: note = Synthetic
  source 1..20: mol_type = other DNA
cctggatgatgctggggtac

SEQ ID NO: 4195 - DNA, 20 bp, synthetic construct
  misc_feature 1..20: note = Synthetic
  source 1..20: mol_type = other DNA
gatgatgctggggtacaggc

SEQ ID NO: 4196 - DNA, 20 bp, synthetic construct
  misc_feature 1..20: note = Synthetic
  source 1..20: mol_type = other DNA
ggcaaagtcgaacaccacca

SEQ ID NO: 4197 - DNA, 20 bp, synthetic construct
  misc_feature 1..20: note = Synthetic
  source 1..20: mol_type = other DNA
gcaaagtcgaacaccaccac

SEQ ID NO: 4198 - DNA, 20 bp, synthetic construct
  misc_feature 1..20: note = Synthetic
  source 1..20: mol_type = other DNA
caaagtcgaacaccaccacg

SEQ ID NO: 4199 - DNA, 20 bp, synthetic construct
  misc_feature 1..20: note = Synthetic
  source 1..20: mol_type = other DNA
cacggggttcacgtgaaacc

SEQ ID NO: 4200 - DNA, 20 bp, synthetic construct
  misc_feature 1..20: note = Synthetic
  source 1..20: mol_type = other DNA
gttcacgtgaaacccggaag

SEQ ID NO: 4201 - DNA, 20 bp, synthetic construct
  misc_feature 1..20: note = Synthetic
  source 1..20: mol_type = other DNA
ttcacgtgaaacccggaagt

SEQ ID NO: 4202 - DNA, 20 bp, synthetic construct
  misc_feature 1..20: note = Synthetic
  source 1..20: mol_type = other DNA
tcacgtgaaacccggaagtg

SEQ ID NO: 4203 - DNA, 20 bp, synthetic construct
  misc_feature 1..20: note = Synthetic
  source 1..20: mol_type = other DNA
gaaacccggaagtggggtca

SEQ ID NO: 4204 - DNA, 20 bp, synthetic construct
  misc_feature 1..20: note = Synthetic
  source 1..20: mol_type = other DNA
ggaagtggggtcaaggaccc

SEQ ID NO: 4205 - DNA, 20 bp, synthetic construct
  misc_feature 1..20: note = Synthetic
  source 1..20: mol_type = other DNA
ggtcaaggaccctggccccc

SEQ ID NO: 4206 - DNA, 20 bp, synthetic construct
  misc_feature 1..20: note = Synthetic
  source 1..20: mol_type = other DNA
ctggtaccccacgtgcctgc

SEQ ID NO: 4207 - DNA, 20 bp, synthetic construct
  misc_feature 1..20: note = Synthetic
  source 1..20: mol_type = other DNA
gtaccccacgtgcctgccgg

SEQ ID NO: 4208 - DNA, 20 bp, synthetic construct
  misc_feature 1..20: note = Synthetic
  source 1..20: mol_type = other DNA
gcggtctcccgcgcgccctc

SEQ ID NO: 4209 - DNA, 20 bp, synthetic construct
  misc_feature 1..20: note = Synthetic
  source 1..20: mol_type = other DNA
tcgtcctccccctcctcctc

SEQ ID NO: 4210 - DNA, 20 bp, synthetic construct
  misc_feature 1..20: note = Synthetic
  source 1..20: mol_type = other DNA
ctggccgctcctcgtcctcc

SEQ ID NO: 4211 - DNA, 20 bp, synthetic construct
  misc_feature 1..20: note = Synthetic
  source 1..20: mol_type = other DNA
tggccgctcctcgtcctccc

SEQ ID NO: 4212 - DNA, 20 bp, synthetic construct
  misc_feature 1..20: note = Synthetic
  source 1..20: mol_type = other DNA
ctcctcgtcctcccgggctg

SEQ ID NO: 4213 - DNA, 20 bp, synthetic construct
  misc_feature 1..20: note = Synthetic
  source 1..20: mol_type = other DNA
tcgtcctcccgggctgcggc

SEQ ID NO: 4214 - DNA, 20 bp, synthetic construct
  misc_feature 1..20: note = Synthetic
  source 1..20: mol_type = other DNA
ccgggctgcggccggacgct

SEQ ID NO: 4215 - DNA, 20 bp, synthetic construct
  misc_feature 1..20: note = Synthetic
  source 1..20: mol_type = other DNA
cgggctgcggccggacgctt

SEQ ID NO: 4216 - DNA, 20 bp, synthetic construct
  misc_feature 1..20: note = Synthetic
  source 1..20: mol_type = other DNA
acgcttgggcgcctcccccc

SEQ ID NO: 4217 - DNA, 20 bp, synthetic construct
  misc_feature 1..20: note = Synthetic
  source 1..20: mol_type = other DNA
cggcgcccctaaatcgcccc

SEQ ID NO: 4218 - DNA, 20 bp, synthetic construct
  misc_feature 1..20: note = Synthetic
  source 1..20: mol_type = other DNA
ggcgcccctaaatcgcccct

SEQ ID NO: 4219 - DNA, 20 bp, synthetic construct
  misc_feature 1..20: note = Synthetic
  source 1..20: mol_type = other DNA
ctaaatcgcccctgggtgtc

SEQ ID NO: 4220 - DNA, 20 bp, synthetic construct
  misc_feature 1..20: note = Synthetic
  source 1..20: mol_type = other DNA
ccggcagaataaagcccttc

SEQ ID NO: 4221 - DNA, 20 bp, synthetic construct
  misc_feature 1..20: note = Synthetic
  source 1..20: mol_type = other DNA
cagaataaagcccttctggt

SEQ ID NO: 4222 - DNA, 20 bp, synthetic construct
  misc_feature 1..20: note = Synthetic
  source 1..20: mol_type = other DNA
taaagcccttctggtcggcc

SEQ ID NO: 4223 - DNA, 20 bp, synthetic construct
  misc_feature 1..20: note = Synthetic
  source 1..20: mol_type = other DNA
tctggtcggccaggcgcagc

SEQ ID NO: 4224 - DNA, 20 bp, synthetic construct
  misc_feature 1..20: note = Synthetic
  source 1..20: mol_type = other DNA
gcagcaggcacgtaaagacg

SEQ ID NO: 4225 - DNA, 20 bp, synthetic construct
  misc_feature 1..20: note = Synthetic
  source 1..20: mol_type = other DNA
acgtaaagacgcggatctgc

SEQ ID NO: 4226 - DNA, 20 bp, synthetic construct
  misc_feature 1..20: note = Synthetic
  source 1..20: mol_type = other DNA
gatctgctggccgtcgtaga

SEQ ID NO: 4227 - DNA, 20 bp, synthetic construct
  misc_feature 1..20: note = Synthetic
  source 1..20: mol_type = other DNA
gctggccgtcgtagatggtg

SEQ ID NO: 4228 - DNA, 20 bp, synthetic construct
  misc_feature 1..20: note = Synthetic
  source 1..20: mol_type = other DNA
ctggccgtcgtagatggtgc

SEQ ID NO: 4229 - DNA, 20 bp, synthetic construct
  misc_feature 1..20: note = Synthetic
  source 1..20: mol_type = other DNA
aatacccgccaagcgcgcga

SEQ ID NO: 4230 - DNA, 20 bp, synthetic construct
  misc_feature 1..20: note = Synthetic
  source 1..20: mol_type = other DNA
cgacggccgagagctccaga

SEQ ID NO: 4231 - DNA, 20 bp, synthetic construct
  misc_feature 1..20: note = Synthetic
  source 1..20: mol_type = other DNA
gacggccgagagctccagat

SEQ ID NO: 4232 - DNA, 20 bp, synthetic construct
  misc_feature 1..20: note = Synthetic
  source 1..20: mol_type = other DNA
acggccgagagctccagatg

SEQ ID NO: 4233 - DNA, 20 bp, synthetic construct
  misc_feature 1..20: note = Synthetic
  source 1..20: mol_type = other DNA
gcaaaaacttaaaaaacagc

SEQ ID NO: 4234 - DNA, 20 bp, synthetic construct
  misc_feature 1..20: note = Synthetic
  source 1..20: mol_type = other DNA
aaaacagctggcccaccagc

SEQ ID NO: 4235 - DNA, 20 bp, synthetic construct
  misc_feature 1..20: note = Synthetic
  source 1..20: mol_type = other DNA
aaacagctggcccaccagca

SEQ ID NO: 4236 - DNA, 20 bp, synthetic construct
  misc_feature 1..20: note = Synthetic
  source 1..20: mol_type = other DNA
gccgatcaccccgcgttgcg

SEQ ID NO: 4237 - DNA, 20 bp, synthetic construct
  misc_feature 1..20: note = Synthetic
  source 1..20: mol_type = other DNA
ccgatcaccccgcgttgcgc

SEQ ID NO: 4238 - DNA, 20 bp, synthetic construct
  misc_feature 1..20: note = Synthetic
  source 1..20: mol_type = other DNA
caccccgcgttgcgcgggcc

SEQ ID NO: 4239 - DNA, 20 bp, synthetic construct
  misc_feature 1..20: note = Synthetic
  source 1..20: mol_type = other DNA
cccgcgttgcgcgggcccgg

SEQ ID NO: 4240 - DNA, 20 bp, synthetic construct
  misc_feature 1..20: note = Synthetic
  source 1..20: mol_type = other DNA
cgcgggcccggcggcgtagt

SEQ ID NO: 4241 - DNA, 20 bp, synthetic construct
  misc_feature 1..20: note = Synthetic
  source 1..20: mol_type = other DNA
gggcccggcggcgtagtagg

SEQ ID NO: 4242 - DNA, 20 bp, synthetic construct
  misc_feature 1..20: note = Synthetic
  source 1..20: mol_type = other DNA
ggcccggcggcgtagtaggc

SEQ ID NO: 4243 - DNA, 20 bp, synthetic construct
  misc_feature 1..20: note = Synthetic
  source 1..20: mol_type = other DNA
gcccggcggcgtagtaggcg

SEQ ID NO: 4244 - DNA, 20 bp, synthetic construct
  misc_feature 1..20: note = Synthetic
  source 1..20: mol_type = other DNA
cggggatgtcgcgatagctc

SEQ ID NO: 4245 - DNA, 20 bp, synthetic construct
  misc_feature 1..20: note = Synthetic
  source 1..20: mol_type = other DNA
ggtccttcttcttgtccttc

SEQ ID NO: 4246 - DNA, 20 bp, synthetic construct
  misc_feature 1..20: note = Synthetic
  source 1..20: mol_type = other DNA
cttcttcttgtccttcagga

SEQ ID NO: 4247 - DNA, 20 bp, synthetic construct
  misc_feature 1..20: note = Synthetic
  source 1..20: mol_type = other DNA
cttgtccttcaggacggctt

SEQ ID NO: 4248 - DNA, 20 bp, synthetic construct
  misc_feature 1..20: note = Synthetic
  source 1..20: mol_type = other DNA
cttcaggacggcttcggcca

SEQ ID NO: 4249 - DNA, 20 bp, synthetic construct
  misc_feature 1..20: note = Synthetic
  source 1..20: mol_type = other DNA
gctcgagagcttgatcttgt

SEQ ID NO: 4250 - DNA, 20 bp, synthetic construct
  misc_feature 1..20: note = Synthetic
  source 1..20: mol_type = other DNA
cctttatcttgctgcgcttc

SEQ ID NO: 4251 - DNA, 20 bp, synthetic construct
  misc_feature 1..20: note = Synthetic
  source 1..20: mol_type = other DNA
tcttgctgcgcttctggaag

SEQ ID NO: 4252 - DNA, 20 bp, synthetic construct
  misc_feature 1..20: note = Synthetic
  source 1..20: mol_type = other DNA
tgcgcttctggaagtggctc

SEQ ID NO: 4253 - RNA, 20 nt, synthetic construct
  misc_feature 1..20: note = Synthetic
  source 1..20: mol_type = other RNA
cccacacgcgaaacacgccc

SEQ ID NO: 4254 - DNA, 20 bp, synthetic construct
  misc_feature 1..20: note = Synthetic
  source 1..20: mol_type = other DNA
acacgccccggccgttcatg

SEQ ID NO: 4255 - DNA, 20 bp, synthetic construct
  misc_feature 1..20: note = Synthetic
  source 1..20: mol_type = other DNA
tcatgcggccgtacccgtcc

SEQ ID NO: 4256 - DNA, 20 bp, synthetic construct
  misc_feature 1..20: note = Synthetic
  source 1..20: mol_type = other DNA
catgcggccgtacccgtcca

SEQ ID NO: 4257 - DNA, 20 bp, synthetic construct
  misc_feature 1..20: note = Synthetic
  source 1..20: mol_type = other DNA
atgcggccgtacccgtccag

SEQ ID NO: 4258 - DNA, 20 bp, synthetic construct
  misc_feature 1..20: note = Synthetic
  source 1..20: mol_type = other DNA
tgcggccgtacccgtccagg

SEQ ID NO: 4259 - DNA, 20 bp, synthetic construct
  misc_feature 1..20: note = Synthetic
  source 1..20: mol_type = other DNA
cttgtaaatgtccgtcagct

SEQ ID NO: 4260 - DNA, 20 bp, synthetic construct
  misc_feature 1..20: note = Synthetic
  source 1..20: mol_type = other DNA
cgtcagcttggccagcaaga

SEQ ID NO: 4261 - DNA, 20 bp, synthetic construct
  misc_feature 1..20: note = Synthetic
  source 1..20: mol_type = other DNA
gtcagcttggccagcaagaa

SEQ ID NO: 4262 - DNA, 20 bp, synthetic construct
  misc_feature 1..20: note = Synthetic
  source 1..20: mol_type = other DNA
gaagttgatgatgttgtacc

SEQ ID NO: 4263 - DNA, 20 bp, synthetic construct
  misc_feature 1..20: note = Synthetic
  source 1..20: mol_type = other DNA
gttgtacccggtcacgaact

SEQ ID NO: 4264 - DNA, 20 bp, synthetic construct
  misc_feature 1..20: note = Synthetic
  source 1..20: mol_type = other DNA
ttgtacccggtcacgaactc

SEQ ID NO: 4265 - DNA, 20 bp, synthetic construct
  misc_feature 1..20: note = Synthetic
  source 1..20: mol_type = other DNA
tgtacccggtcacgaactcg

SEQ ID NO: 4266 - DNA, 20 bp, synthetic construct
  misc_feature 1..20: note = Synthetic
  source 1..20: mol_type = other DNA
cggggccgtactgtttcaca

SEQ ID NO: 4267 - DNA, 20 bp, synthetic construct
  misc_feature 1..20: note = Synthetic
  source 1..20: mol_type = other DNA
ggggccgtactgtttcacaa

SEQ ID NO: 4268 - DNA, 20 bp, synthetic construct
  misc_feature 1..20: note = Synthetic
  source 1..20: mol_type = other DNA
ctgtttcacaagggtcatga

SEQ ID NO: 4269 - DNA, 20 bp, synthetic construct
  misc_feature 1..20: note = Synthetic
  source 1..20: mol_type = other DNA
gctgtcgaattccagaacca

SEQ ID NO: 4270 - DNA, 20 bp, synthetic construct
  misc_feature 1..20: note = Synthetic
  source 1..20: mol_type = other DNA
ctgtcgaattccagaaccac

SEQ ID NO: 4271 - DNA, 20 bp, synthetic construct
  misc_feature 1..20: note = Synthetic
  source 1..20: mol_type = other DNA
gaattccagaaccacgggcg

SEQ ID NO: 4272 - DNA, 20 bp, synthetic construct
  misc_feature 1..20: note = Synthetic
  source 1..20: mol_type = other DNA
aattccagaaccacgggcgt

SEQ ID NO: 4273 - DNA, 20 bp, synthetic construct
  misc_feature 1..20: note = Synthetic
  source 1..20: mol_type = other DNA
ccagaaccacgggcgtgggc

SEQ ID NO: 4274 - DNA, 20 bp, synthetic construct
  misc_feature 1..20: note = Synthetic
  source 1..20: mol_type = other DNA
cacgggcgtgggcaggcccc

SEQ ID NO: 4275 - DNA, 20 bp, synthetic construct
  misc_feature 1..20: note = Synthetic
  source 1..20: mol_type = other DNA
ccctggccgccagctcgttc

SEQ ID NO: 4276 - DNA, 20 bp, synthetic construct
  misc_feature 1..20: note = Synthetic
  source 1..20: mol_type = other DNA
tggccgccagctcgttcagg

SEQ ID NO: 4277 - DNA, 20 bp, synthetic construct
  misc_feature 1..20: note = Synthetic
  source 1..20: mol_type = other DNA
ggccgccagctcgttcaggt

SEQ ID NO: 4278 - DNA, 20 bp, synthetic construct
  misc_feature 1..20: note = Synthetic
  source 1..20: mol_type = other DNA
cagctcgttcaggtgggatt

SEQ ID NO: 4279 - DNA, 20 bp, synthetic construct
  misc_feature 1..20: note = Synthetic
  source 1..20: mol_type = other DNA
agctcgttcaggtgggattc

SEQ ID NO: 4280 - DNA, 20 bp, synthetic construct
  misc_feature 1..20: note = Synthetic
  source 1..20: mol_type = other DNA
gctcgttcaggtgggattcg

SEQ ID NO: 4281 - DNA, 20 bp, synthetic construct
  misc_feature 1..20: note = Synthetic
  source 1..20: mol_type = other DNA
cgttcaggtgggattcgggg

SEQ ID NO: 4282 - DNA, 20 bp, synthetic construct
  misc_feature 1..20: note = Synthetic
  source 1..20: mol_type = other DNA
gtgggattcggggaggtcgc

SEQ ID NO: 4283 - RNA, 20 nt, synthetic construct
  misc_feature 1..20: note = Synthetic
  source 1..20: mol_type = other RNA
cgcaggaaccgagcgaaaac

SEQ ID NO: 4284 - RNA, 20 nt, synthetic construct
  misc_feature 1..20: note = Synthetic
  source 1..20: mol_type = other RNA
aggaaccgagcgaaaacagg

SEQ ID NO: 4285 - DNA, 20 bp, synthetic construct
  misc_feature 1..20: note = Synthetic
  source 1..20: mol_type = other DNA
aaaacaggaggacgtgctcc

SEQ ID NO: 4286 - DNA, 20 bp, synthetic construct
  misc_feature 1..20: note = Synthetic
  source 1..20: mol_type = other DNA
aaacaggaggacgtgctcca

SEQ ID NO: 4287 - DNA, 20 bp, synthetic construct
  misc_feature 1..20: note = Synthetic
  source 1..20: mol_type = other DNA
caggaggacgtgctccaggg

SEQ ID NO: 4288 - DNA, 20 bp, synthetic construct
  misc_feature 1..20: note = Synthetic
  source 1..20: mol_type = other DNA
gaggacgtgctccagggcgg

SEQ ID NO: 4289 - DNA, 20 bp, synthetic construct
  misc_feature 1..20: note = Synthetic
  source 1..20: mol_type = other DNA
gacgtgctccagggcggtgg

SEQ ID NO: 4290 - DNA, 20 bp, synthetic construct
  misc_feature 1..20: note = Synthetic
  source 1..20: mol_type = other DNA
gctccagggcggtggtggac

SEQ ID NO: 4291 - DNA, 20 bp, synthetic construct
  misc_feature 1..20: note = Synthetic
  source 1..20: mol_type = other DNA
ggacaggtcgtagagcagac

SEQ ID NO: 4292 - DNA, 20 bp, synthetic construct
  misc_feature 1..20: note = Synthetic
  source 1..20: mol_type = other DNA
cgtagagcagacaggatatc

SEQ ID NO: 4293 - DNA, 20 bp, synthetic construct
  misc_feature 1..20: note = Synthetic
  source 1..20: mol_type = other DNA
gacaggatatctggatgacc

SEQ ID NO: 4294 - DNA, 20 bp, synthetic construct
  misc_feature 1..20: note = Synthetic
  source 1..20: mol_type = other DNA
atctggatgaccaggtcctc

SEQ ID NO: 4295 - DNA, 20 bp, synthetic construct
  misc_feature 1..20: note = Synthetic
  source 1..20: mol_type = other DNA
tctggatgaccaggtcctcc

SEQ ID NO: 4296 - DNA, 20 bp, synthetic construct
  misc_feature 1..20: note = Synthetic
  source 1..20: mol_type = other DNA
gaccaggtcctccgggtgcc

SEQ ID NO: 4297 - DNA, 20 bp, synthetic construct
  misc_feature 1..20: note = Synthetic
  source 1..20: mol_type = other DNA
tcctccgggtgcccggccac

SEQ ID NO: 4298 - DNA, 20 bp, synthetic construct
  misc_feature 1..20: note = Synthetic
  source 1..20: mol_type = other DNA
cgggtgcccggccaccggaa

SEQ ID NO: 4299 - DNA, 20 bp, synthetic construct
  misc_feature 1..20: note = Synthetic
  source 1..20: mol_type = other DNA
aagcacatgagcttgtatgc

SEQ ID NO: 4300 - DNA, 20 bp, synthetic construct
  misc_feature 1..20: note = Synthetic
  source 1..20: mol_type = other DNA
acatgagcttgtatgccggt

SEQ ID NO: 4301 - DNA, 20 bp, synthetic construct
  misc_feature 1..20: note = Synthetic
  source 1..20: mol_type = other DNA
gtcgctcatgcccccctcga

SEQ ID NO: 4302 - DNA, 20 bp, synthetic construct
  misc_feature 1..20: note = Synthetic
  source 1..20: mol_type = other DNA
tcatgcccccctcgatggcc

SEQ ID NO: 4303 - DNA, 20 bp, synthetic construct
  misc_feature 1..20: note = Synthetic
  source 1..20: mol_type = other DNA
acagttaaactcgacgtcgc

SEQ ID NO: 4304 - DNA, 20 bp, synthetic construct
  misc_feature 1..20: note = Synthetic
  source 1..20: mol_type = other DNA
gacgtcgctggatgtcccga

SEQ ID NO: 4305 - DNA, 20 bp, synthetic construct
  misc_feature 1..20: note = Synthetic
  source 1..20: mol_type = other DNA
ctggatgtcccgaaggccat

SEQ ID NO: 4306 - DNA, 20 bp, synthetic construct
  misc_feature 1..20: note = Synthetic
  source 1..20: mol_type = other DNA
tggatgtcccgaaggccatc

SEQ ID NO: 4307 - DNA, 20 bp, synthetic construct
  misc_feature 1..20: note = Synthetic
  source 1..20: mol_type = other DNA
ggatgtcccgaaggccatcg

SEQ ID NO: 4308 - DNA, 20 bp, synthetic construct
  misc_feature 1..20: note = Synthetic
  source 1..20: mol_type = other DNA
ccgaaggccatcggggccgc

SEQ ID NO: 4309 - DNA, 20 bp, synthetic construct
  misc_feature 1..20: note = Synthetic
  source 1..20: mol_type = other DNA
aggccatcggggccgccggc

SEQ ID NO: 4310 - DNA, 20 bp, synthetic construct
  misc_feature 1..20: note = Synthetic
  source 1..20: mol_type = other DNA
ggccatcggggccgccggct

SEQ ID NO: 4311 - DNA, 20 bp, synthetic construct
  misc_feature 1..20: note = Synthetic
  source 1..20: mol_type = other DNA
gctgggctagcgtgttgttc

SEQ ID NO: 4312 - DNA, 20 bp, synthetic construct
  misc_feature 1..20: note = Synthetic
  source 1..20: mol_type = other DNA
gctagcgtgttgttccggcc

SEQ ID NO: 4313 - DNA, 20 bp, synthetic construct
  misc_feature 1..20: note = Synthetic
  source 1..20: mol_type = other DNA
tgttccggcccggtttgaga

SEQ ID NO: 4314 - DNA, 20 bp, synthetic construct
  misc_feature 1..20: note = Synthetic
  source 1..20: mol_type = other DNA
tttgagacggtaccagccga

SEQ ID NO: 4315 - DNA, 20 bp, synthetic construct
  misc_feature 1..20: note = Synthetic
  source 1..20: mol_type = other DNA
ccagccgaaggtgacgaacc

SEQ ID NO: 4316 - DNA, 20 bp, synthetic construct
  misc_feature 1..20: note = Synthetic
  source 1..20: mol_type = other DNA
cagccgaaggtgacgaaccc

SEQ ID NO: 4317 - DNA, 20 bp, synthetic construct
  misc_feature 1..20: note = Synthetic
  source 1..20: mol_type = other DNA
agccgaaggtgacgaacccg

SEQ ID NO: 4318 - DNA, 20 bp, synthetic construct
  misc_feature 1..20: note = Synthetic
  source 1..20: mol_type = other DNA
tgacgaacccggggttgtcc

SEQ ID NO: 4319 - DNA, 20 bp, synthetic construct
  misc_feature 1..20: note = Synthetic
  source 1..20: mol_type = other DNA
cggggttgtccaggatgaac

SEQ ID NO: 4320 - DNA, 20 bp, synthetic construct
  misc_feature 1..20: note = Synthetic
  source 1..20: mol_type = other DNA
ggggttgtccaggatgaacc

SEQ ID NO: 4321 - DNA, 20 bp, synthetic construct
  misc_feature 1..20: note = Synthetic
  source 1..20: mol_type = other DNA
gttgtccaggatgaaccggg

SEQ ID NO: 4322 - DNA, 20 bp, synthetic construct
  misc_feature 1..20: note = Synthetic
  source 1..20: mol_type = other DNA
gtccaggatgaaccgggtgg

SEQ ID NO: 4323 - DNA, 20 bp, synthetic construct
  misc_feature 1..20: note = Synthetic
  source 1..20: mol_type = other DNA
cccaccctcgtacttcttga

SEQ ID NO: 4324 - DNA, 20 bp, synthetic construct
  misc_feature 1..20: note = Synthetic
  source 1..20: mol_type = other DNA
ccctcgtacttcttgatggc

SEQ ID NO: 4325 - DNA, 20 bp, synthetic construct
  misc_feature 1..20: note = Synthetic
  source 1..20: mol_type = other DNA
cctcgtacttcttgatggcc

SEQ ID NO: 4326 - DNA, 20 bp, synthetic construct
  misc_feature 1..20: note = Synthetic
  source 1..20: mol_type = other DNA
ccgggcagaagttgtcgcac

SEQ ID NO: 4327 - DNA, 20 bp, synthetic construct
  misc_feature 1..20: note = Synthetic
  source 1..20: mol_type = other DNA
acgacagcacacgcccgctt

SEQ ID NO: 4328 - DNA, 20 bp, synthetic construct
  misc_feature 1..20: note = Synthetic
  source 1..20: mol_type = other DNA
gcccgcttcggacgtagacg

SEQ ID NO: 4329 - DNA, 20 bp, synthetic construct
  misc_feature 1..20: note = Synthetic
  source 1..20: mol_type = other DNA
gtagacgcggtaaaacagag

SEQ ID NO: 4330 - DNA, 20 bp, synthetic construct
  misc_feature 1..20: note = Synthetic
  source 1..20: mol_type = other DNA
tagacgcggtaaaacagagc

SEQ ID NO: 4331 - DNA, 20 bp, synthetic construct
  misc_feature 1..20: note = Synthetic
  source 1..20: mol_type = other DNA
agacgcggtaaaacagagcg

SEQ ID NO: 4332 - DNA, 20 bp, synthetic construct
  misc_feature 1..20: note = Synthetic
  source 1..20: mol_type = other DNA
cgtctcgtagtagtacacgt

SEQ ID NO: 4333 - DNA, 20 bp, synthetic construct
  misc_feature 1..20: note = Synthetic
  source 1..20: mol_type = other DNA
ccaccacctccgcctcgaag

SEQ ID NO: 4334 - DNA, 20 bp, synthetic construct
  misc_feature 1..20: note = Synthetic
  source 1..20: mol_type = other DNA
ctccgcctcgaagtggtccg

SEQ ID NO: 4335 - DNA, 20 bp, synthetic construct
  misc_feature 1..20: note = Synthetic
  source 1..20: mol_type = other DNA
agtggtccgcggagatgccg

SEQ ID NO: 4336 - DNA, 20 bp, synthetic construct
  misc_feature 1..20: note = Synthetic
  source 1..20: mol_type = other DNA
atgccgcggaacgacgcgcc

SEQ ID NO: 4337 - DNA, 20 bp, synthetic construct
  misc_feature 1..20: note = Synthetic
  source 1..20: mol_type = other DNA
tgccgcggaacgacgcgccc

SEQ ID NO: 4338 - RNA, 20 nt, synthetic construct
  misc_feature 1..20: note = Synthetic
  source 1..20: mol_type = other RNA
gccgcggaacgacgcgcccg

SEQ ID NO: 4339 - DNA, 20 bp, synthetic construct
  misc_feature 1..20: note = Synthetic
  source 1..20: mol_type = other DNA
acgcgcccggggactcgcgc

SEQ ID NO: 4340 - DNA, 20 bp, synthetic construct
  misc_feature 1..20: note = Synthetic
  source 1..20: mol_type = other DNA
cgcgcccggggactcgcgca

SEQ ID NO: 4341 - DNA, 20 bp, synthetic construct
  misc_feature 1..20: note = Synthetic
  source 1..20: mol_type = other DNA
cggggactcgcgcagggccg

SEQ ID NO: 4342 - DNA, 20 bp, synthetic construct
  misc_feature 1..20: note = Synthetic
  source 1..20: mol_type = other DNA
atgcgctcgcagagatctcg

SEQ ID NO: 4343 - DNA, 20 bp, synthetic construct
  misc_feature 1..20: note = Synthetic
  source 1..20: mol_type = other DNA
tgcgctcgcagagatctcgt

SEQ ID NO: 4344 - DNA, 20 bp, synthetic construct
  misc_feature 1..20: note = Synthetic
  source 1..20: mol_type = other DNA
gcgctcgcagagatctcgtg

SEQ ID NO: 4345 - DNA, 20 bp, synthetic construct
  misc_feature 1..20: note = Synthetic
  source 1..20: mol_type = other DNA
cgcagagatctcgtggggcg

SEQ ID NO: 4346 - DNA, 20 bp, synthetic construct
  misc_feature 1..20: note = Synthetic
  source 1..20: mol_type = other DNA
ctcgtggggcgcggcattgt

SEQ ID NO: 4347 - DNA, 20 bp, synthetic construct
  misc_feature 1..20: note = Synthetic
  source 1..20: mol_type = other DNA
ccgcgtgccgtaaacgtgaa

SEQ ID NO: 4348 - DNA, 20 bp, synthetic construct
  misc_feature 1..20: note = Synthetic
  source 1..20: mol_type = other DNA
cgtaaacgtgaacggccacc

SEQ ID NO: 4349 - DNA, 20 bp, synthetic construct
  misc_feature 1..20: note = Synthetic
  source 1..20: mol_type = other DNA
aaacgtgaacggccacccgg

SEQ ID NO: 4350 - DNA, 20 bp, synthetic construct
  misc_feature 1..20: note = Synthetic
  source 1..20: mol_type = other DNA
acggccacccggtggccttc

SEQ ID NO: 4351 - DNA, 20 bp, synthetic construct
  misc_feature 1..20: note = Synthetic
  source 1..20: mol_type = other DNA
cccggtggccttccggagtc

SEQ ID NO: 4352 - DNA, 20 bp, synthetic construct
  misc_feature 1..20: note = Synthetic
  source 1..20: mol_type = other DNA
ggccttccggagtcaggccc

SEQ ID NO: 4353 - DNA, 20 bp, synthetic construct
  misc_feature 1..20: note = Synthetic
  source 1..20: mol_type = other DNA
caggcccaggagcgtgatga

SEQ ID NO: 4354 - DNA, 20 bp, synthetic construct
  misc_feature 1..20: note = Synthetic
  source 1..20: mol_type = other DNA
agcgtgatgacggtccccgt

SEQ ID NO: 4355 - DNA, 20 bp, synthetic construct
  misc_feature 1..20: note = Synthetic
  source 1..20: mol_type = other DNA
gacggtccccgtcggtgtga

SEQ ID NO: 4356 - DNA, 20 bp, synthetic construct
  misc_feature 1..20: note = Synthetic
  source 1..20: mol_type = other DNA
tggcgtccataaaccgcgcg

SEQ ID NO: 4357 - DNA, 20 bp, synthetic construct
  misc_feature 1..20: note = Synthetic
  source 1..20: mol_type = other DNA
ggcgtccataaaccgcgcgt

SEQ ID NO: 4358 - DNA, 20 bp, synthetic construct
  misc_feature 1..20: note = Synthetic
  source 1..20: mol_type = other DNA
gcgtccataaaccgcgcgtg

SEQ ID NO: 4359 - DNA, 20 bp, synthetic construct
  misc_feature 1..20: note = Synthetic
  source 1..20: mol_type = other DNA
cgtccataaaccgcgcgtgg

SEQ ID NO: 4360 - DNA, 17 bp, synthetic construct
  misc_feature 1..17: note = Synthetic
  source 1..17: mol_type = other DNA
ttcctccgccgtagcgc

SEQ ID NO: 4361 - DNA, 17 bp, synthetic construct
  misc_feature 1..17: note = Synthetic
  source 1..17: mol_type = other DNA
caccgccccgaaccctg

SEQ ID NO: 4362 - DNA, 17 bp, synthetic construct
  misc_feature 1..17: note = Synthetic
  source 1..17: mol_type = other DNA
ccccgaaccctgcggtc

SEQ ID NO: 4363 - DNA, 17 bp, synthetic construct
  misc_feature 1..17: note = Synthetic
  source 1..17: mol_type = other DNA
tgcggtccggagccgcg

SEQ ID NO: 4364 - DNA, 17 bp, synthetic construct
  misc_feature 1..17: note = Synthetic
  source 1..17: mol_type = other DNA
cgcgcggccacgtcgtc

SEQ ID NO: 4365 - DNA, 17 bp, synthetic construct
  misc_feature 1..17: note = Synthetic
  source 1..17: mol_type = other DNA
gcgcggccacgtcgtcc

SEQ ID NO: 4366 - DNA, 17 bp, synthetic construct
  misc_feature 1..17: note = Synthetic
  source 1..17: mol_type = other DNA
cgcggccacgtcgtccg

SEQ ID NO: 4367 - DNA, 17 bp, synthetic construct
  misc_feature 1..17: note = Synthetic
  source 1..17: mol_type = other DNA
gcggccacgtcgtccgg

SEQ ID NO: 4368 - DNA, 17 bp, synthetic construct
  misc_feature 1..17: note = Synthetic
  source 1..17: mol_type = other DNA
cggccacgtcgtccggg

SEQ ID NO: 4369 - DNA, 17 bp, synthetic construct
  misc_feature 1..17: note = Synthetic
  source 1..17: mol_type = other DNA
cggggggtgccacactt

SEQ ID NO: 4370 - DNA, 17 bp, synthetic construct
  misc_feature 1..17: note = Synthetic
  source 1..17: mol_type = other DNA
ggggggtgccacacttc

SEQ ID NO: 4371 - DNA, 17 bp, synthetic construct
  misc_feature 1..17: note = Synthetic
  source 1..17: mol_type = other DNA
cctttttaacagactct

SEQ ID NO: 4372 - DNA, 17 bp, synthetic construct
  misc_feature 1..17: note = Synthetic
  source 1..17: mol_type = other DNA
cagactctcggtgatct

SEQ ID NO: 4373 - DNA, 17 bp, synthetic construct
  misc_feature 1..17: note = Synthetic
  source 1..17: mol_type = other DNA
tggcgttattcccaaac

SEQ ID NO: 4374 - DNA, 17 bp, synthetic construct
  misc_feature 1..17: note = Synthetic
  source 1..17: mol_type = other DNA
ggcgttattcccaaaca

SEQ ID NO: 4375 - RNA, 17 nt, synthetic construct
  misc_feature 1..17: note = Synthetic
  source 1..17: mol_type = other RNA
cgcacgccgcccccaac

SEQ ID NO: 4376 - RNA, 17 nt, synthetic construct
  misc_feature 1..17: note = Synthetic
  source 1..17: mol_type = other RNA
acgccgcccccaacagg

SEQ ID NO: 4377 - DNA, 17 bp, synthetic construct
  misc_feature 1..17: note = Synthetic
  source 1..17: mol_type = other DNA
cgccgcccccaacaggt

SEQ ID NO: 4378 - DNA, 17 bp, synthetic construct
  misc_feature 1..17: note = Synthetic
  source 1..17: mol_type = other DNA
agtaatagtccgtgttc

SEQ ID NO: 4379 - DNA, 17 bp, synthetic construct
  misc_feature 1..17: note = Synthetic
  source 1..17: mol_type = other DNA
gtaatagtccgtgttca

SEQ ID NO: 4380 - DNA, 17 bp, synthetic construct
  misc_feature 1..17: note = Synthetic
  source 1..17: mol_type = other DNA
tgttcagggcgacgccg

SEQ ID NO: 4381 - DNA, 17 bp, synthetic construct
  misc_feature 1..17: note = Synthetic
  source 1..17: mol_type = other DNA
gttcagggcgacgccgt

SEQ ID NO: 4382 - DNA, 17 bp, synthetic construct
  misc_feature 1..17: note = Synthetic
  source 1..17: mol_type = other DNA
ggcgacgccgtgggcaa

SEQ ID NO: 4383 - DNA, 17 bp, synthetic construct
  misc_feature 1..17: note = Synthetic
  source 1..17: mol_type = other DNA
gtgggcaatggcgtatg

SEQ ID NO: 4384 - DNA, 17 bp, synthetic construct
  misc_feature 1..17: note = Synthetic
  source 1..17: mol_type = other DNA
tgggcaatggcgtatgc

SEQ ID NO: 4385 - DNA, 17 bp, synthetic construct
  misc_feature 1..17: note = Synthetic
  source 1..17: mol_type = other DNA
ggcgtatgcgggatcct

SEQ ID NO: 4386 - DNA, 17 bp, synthetic construct
  misc_feature 1..17: note = Synthetic
  source 1..17: mol_type = other DNA
gggatcctcggccagct

SEQ ID NO: 4387 - DNA, 17 bp, synthetic construct
  misc_feature 1..17: note = Synthetic
  source 1..17: mol_type = other DNA
cggacaccagcagcttg

SEQ ID NO: 4388 - DNA, 17 bp, synthetic construct
  misc_feature 1..17: note = Synthetic
  source 1..17: mol_type = other DNA
ggacaccagcagcttgc

SEQ ID NO: 4389 - DNA, 17 bp, synthetic construct
  misc_feature 1..17: note = Synthetic
  source 1..17: mol_type = other DNA
gacaccagcagcttgcg

SEQ ID NO: 4390 - DNA, 17 bp, synthetic construct
  misc_feature 1..17: note = Synthetic
  source 1..17: mol_type = other DNA
cagcagcttgcggggct

SEQ ID NO: 4391 - DNA, 17 bp, synthetic construct
  misc_feature 1..17: note = Synthetic
  source 1..17: mol_type = other DNA
ggcttggacgcgcctcc

SEQ ID NO: 4392 - DNA, 17 bp, synthetic construct
  misc_feature 1..17: note = Synthetic
  source 1..17: mol_type = other DNA
gcttggacgcgcctccc

SEQ ID NO: 4393 - DNA, 17 bp, synthetic construct
  misc_feature 1..17: note = Synthetic
  source 1..17: mol_type = other DNA
cttggacgcgcctcccg

SEQ ID NO: 4394 - DNA, 17 bp, synthetic construct
  misc_feature 1..17: note = Synthetic
  source 1..17: mol_type = other DNA
ttggacgcgcctcccgg

SEQ ID NO: 4395 - DNA, 17 bp, synthetic construct
  misc_feature 1..17: note = Synthetic
  source 1..17: mol_type = other DNA
tggacgcgcctcccggg

SEQ ID NO: 4396 - DNA, 17 bp, synthetic construct
  misc_feature 1..17: note = Synthetic
  source 1..17: mol_type = other DNA
cgcgcctcccggggggt

SEQ ID NO: 4397 - DNA, 17 bp, synthetic construct
  misc_feature 1..17: note = Synthetic
  source 1..17: mol_type = other DNA
cctcccggggggtcggc

SEQ ID NO: 4398 - DNA, 17 bp, synthetic construct
  misc_feature 1..17: note = Synthetic
  source 1..17: mol_type = other DNA
ggggggtcggcaggcga

SEQ ID NO: 4399 - DNA, 17 bp, synthetic construct
  misc_feature 1..17: note = Synthetic
  source 1..17: mol_type = other DNA
caggcgacggcgtctcc

SEQ ID NO: 4400 - DNA, 17 bp, synthetic construct
  misc_feature 1..17: note = Synthetic
  source 1..17: mol_type = other DNA
aggcgacggcgtctccc

SEQ ID NO: 4401 - DNA, 17 bp, synthetic construct
  misc_feature 1..17: note = Synthetic
  source 1..17: mol_type = other DNA
ggcgacggcgtctcccg

SEQ ID NO: 4402 - DNA, 17 bp, synthetic construct
  misc_feature 1..17: note = Synthetic
  source 1..17: mol_type = other DNA
gcgacggcgtctcccgg

SEQ ID NO: 4403 - DNA, 17 bp, synthetic construct
  misc_feature 1..17: note = Synthetic
  source 1..17: mol_type = other DNA
cgtctcccgggggcgct

SEQ ID NO: 4404 - DNA, 17 bp, synthetic construct
  misc_feature 1..17: note = Synthetic
  source 1..17: mol_type = other DNA
tcccgggggcgcttggc

SEQ ID NO: 4405 - DNA, 17 bp, synthetic construct
  misc_feature 1..17: note = Synthetic
  source 1..17: mol_type = other DNA
cccgggggcgcttggcc

SEQ ID NO: 4406 - DNA, 17 bp, synthetic construct
  misc_feature 1..17: note = Synthetic
  source 1..17: mol_type = other DNA
ccgggggcgcttggccg

SEQ ID NO: 4407 - DNA, 17 bp, synthetic construct
  misc_feature 1..17: note = Synthetic
  source 1..17: mol_type = other DNA
ggggcgcttggccgggg

SEQ ID NO: 4408 - DNA, 17 bp, synthetic construct
  misc_feature 1..17: note = Synthetic
  source 1..17: mol_type = other DNA
gggcgcttggccgggga

SEQ ID NO: 4409 - DNA, 17 bp, synthetic construct
  misc_feature 1..17: note = Synthetic
  source 1..17: mol_type = other DNA
gcttggccggggagggc

SEQ ID NO: 4410 - DNA, 17 bp, synthetic construct
  misc_feature 1..17: note = Synthetic
  source 1..17: mol_type = other DNA
cttggccggggagggca

SEQ ID NO: 4411 - RNA, 17 nt, synthetic construct
  misc_feature 1..17: note = Synthetic
  source 1..17: mol_type = other RNA
cggggagggcagggccg

SEQ ID NO: 4412 - RNA, 17 nt, synthetic construct
  misc_feature 1..17: note = Synthetic
  source 1..17: mol_type = other RNA
ggggagggcagggccgc

SEQ ID NO: 4413 - RNA, 17 nt, synthetic construct
  misc_feature 1..17: note = Synthetic
  source 1..17: mol_type = other RNA
gggagggcagggccgcg

SEQ ID NO: 4414 - RNA, 17 nt, synthetic construct
  misc_feature 1..17: note = Synthetic
  source 1..17: mol_type = other RNA
ggagggcagggccgcgg

SEQ ID NO: 4415 - RNA, 17 nt, synthetic construct
  misc_feature 1..17: note = Synthetic
  source 1..17: mol_type = other RNA
gagggcagggccgcggg

SEQ ID NO: 4416 - RNA, 17 nt, synthetic construct
  misc_feature 1..17: note = Synthetic
  source 1..17: mol_type = other RNA
agggcagggccgcgggg

SEQ ID NO: 4417 - RNA, 17 nt, synthetic construct
  misc_feature 1..17: note = Synthetic
  source 1..17: mol_type = other RNA
gggcagggccgcggggg

SEQ ID NO: 4418 - RNA, 17 nt, synthetic construct
  misc_feature 1..17: note = Synthetic
  source 1..17: mol_type = other RNA
cagggccgcgggggggg

SEQ ID NO: 4419 - RNA, 17 nt, synthetic construct
  misc_feature 1..17: note = Synthetic
  source 1..17: mol_type = other RNA
agggccgcggggggggc

SEQ ID NO: 4420 - DNA, 17 bp, synthetic construct
  misc_feature 1..17: note = Synthetic
  source 1..17: mol_type = other DNA
ggggcgggctcgtcccc

SEQ ID NO: 4421 - DNA, 17 bp, synthetic construct
  misc_feature 1..17: note = Synthetic
  source 1..17: mol_type = other DNA
gggcgggctcgtcccct

SEQ ID NO: 4422 - DNA, 17 bp, synthetic construct
  misc_feature 1..17: note = Synthetic
  source 1..17: mol_type = other DNA
ggcgggctcgtcccctg

SEQ ID NO: 4423 - DNA, 17 bp, synthetic construct
  misc_feature 1..17: note = Synthetic
  source 1..17: mol_type = other DNA
gggctcgtcccctgggg

SEQ ID NO: 4424 - DNA, 17 bp, synthetic construct
  misc_feature 1..17: note = Synthetic
  source 1..17: mol_type = other DNA
ctcgtcccctggggcgg

SEQ ID NO: 4425 - DNA, 17 bp, synthetic construct
  misc_feature 1..17: note = Synthetic
  source 1..17: mol_type = other DNA
cggcggcgtctagctcg

SEQ ID NO: 4426 - DNA, 17 bp, synthetic construct
  misc_feature 1..17: note = Synthetic
  source 1..17: mol_type = other DNA
cggcgtctagctcgcgg

SEQ ID NO: 4427 - DNA, 17 bp, synthetic construct
  misc_feature 1..17: note = Synthetic
  source 1..17: mol_type = other DNA
ggcgtctagctcgcgga

SEQ ID NO: 4428 - DNA, 17 bp, synthetic construct
  misc_feature 1..17: note = Synthetic
  source 1..17: mol_type = other DNA
gtctagctcgcggaggg

SEQ ID NO: 4429 - DNA, 17 bp, synthetic construct
  misc_feature 1..17: note = Synthetic
  source 1..17: mol_type = other DNA
ccgtctcctctacctcg

SEQ ID NO: 4430 - DNA, 17 bp, synthetic construct
  misc_feature 1..17: note = Synthetic
  source 1..17: mol_type = other DNA
cgtctcctctacctcgc

SEQ ID NO: 4431 - DNA, 17 bp, synthetic construct
  misc_feature 1..17: note = Synthetic
  source 1..17: mol_type = other DNA
cctctacctcgcgggtc

SEQ ID NO: 4432 - DNA, 17 bp, synthetic construct
  misc_feature 1..17: note = Synthetic
  source 1..17: mol_type = other DNA
ctctacctcgcgggtct

SEQ ID NO: 4433 - DNA, 17 bp, synthetic construct
  misc_feature 1..17: note = Synthetic
  source 1..17: mol_type = other DNA
tgggccacgatcacgta

SEQ ID NO: 4434 - DNA, 17 bp, synthetic construct
  misc_feature 1..17: note = Synthetic
  source 1..17: mol_type = other DNA
gggccacgatcacgtac

SEQ ID NO: 4435 - DNA, 17 bp, synthetic construct
  misc_feature 1..17: note = Synthetic
  source 1..17: mol_type = other DNA
cgatcacgtacgggatc

SEQ ID NO: 4436 - DNA, 17 bp, synthetic construct
  misc_feature 1..17: note = Synthetic
  source 1..17: mol_type = other DNA
cgggatccggtccttga

SEQ ID NO: 4437 - DNA, 17 bp, synthetic construct
  misc_feature 1..17: note = Synthetic
  source 1..17: mol_type = other DNA
atccggtccttgatgga

SEQ ID NO: 4438 - DNA, 17 bp, synthetic construct
  misc_feature 1..17: note = Synthetic
  source 1..17: mol_type = other DNA
tccggtccttgatggac

SEQ ID NO: 4439 - DNA, 17 bp, synthetic construct
  misc_feature 1..17: note = Synthetic
  source 1..17: mol_type = other DNA
tggacgggacctgcgcg

SEQ ID NO: 4440 - DNA, 17 bp, synthetic construct
  misc_feature 1..17: note = Synthetic
  source 1..17: mol_type = other DNA
acgggacctgcgcgcgg

SEQ ID NO: 4441 - DNA, 17 bp, synthetic construct
  misc_feature 1..17: note = Synthetic
  source 1..17: mol_type = other DNA
cgggacctgcgcgcggc

SEQ ID NO: 4442 - DNA, 17 bp, synthetic construct
  misc_feature 1..17: note = Synthetic
  source 1..17: mol_type = other DNA
gcttgtaatacaccgtc

SEQ ID NO: 4443 - DNA, 17 bp, synthetic construct
  misc_feature 1..17: note = Synthetic
  source 1..17: mol_type = other DNA
tgtaatacaccgtcagg

SEQ ID NO: 4444 - DNA, 17 bp, synthetic construct
  misc_feature 1..17: note = Synthetic
  source 1..17: mol_type = other DNA
gtaatacaccgtcaggt

SEQ ID NO: 4445 - DNA, 17 bp, synthetic construct
  misc_feature 1..17: note = Synthetic
  source 1..17: mol_type = other DNA
acaccgtcaggtgggcc

SEQ ID NO: 4446 - DNA, 17 bp, synthetic construct
  misc_feature 1..17: note = Synthetic
  source 1..17: mol_type = other DNA
gtgggccaggcgcttgt

SEQ ID NO: 4447 - DNA, 17 bp, synthetic construct
  misc_feature 1..17: note = Synthetic
  source 1..17: mol_type = other DNA
ttgttggtgtacgcgcg

SEQ ID NO: 4448 - DNA, 17 bp, synthetic construct
  misc_feature 1..17: note = Synthetic
  source 1..17: mol_type = other DNA
tgttggtgtacgcgcgc

SEQ ID NO: 4449 - DNA, 17 bp, synthetic construct
  misc_feature 1..17: note = Synthetic
  source 1..17: mol_type = other DNA
cgggtgtctgctcagtt

SEQ ID NO: 4450 - DNA, 17 bp, synthetic construct
  misc_feature 1..17: note = Synthetic
  source 1..17: mol_type = other DNA
gtgtctgctcagttcgg

SEQ ID NO: 4451 - DNA, 17 bp, synthetic construct
  misc_feature 1..17: note = Synthetic
  source 1..17: mol_type = other DNA
tgctcagttcggcggtg

SEQ ID NO: 4452 - DNA, 17 bp, synthetic construct
  misc_feature 1..17: note = Synthetic
  source 1..17: mol_type = other DNA
cggtgaggacaaagtcc

SEQ ID NO: 4453 - DNA, 17 bp, synthetic construct
  misc_feature 1..17: note = Synthetic
  source 1..17: mol_type = other DNA
tcctggatgtccctctc

SEQ ID NO: 4454 - DNA, 17 bp, synthetic construct
  misc_feature 1..17: note = Synthetic
  source 1..17: mol_type = other DNA
cctggatgtccctctcc

SEQ ID NO: 4455 - DNA, 17 bp, synthetic construct
  misc_feature 1..17: note = Synthetic
  source 1..17: mol_type = other DNA
gatgtccctctccgggt

SEQ ID NO: 4456 - DNA, 17 bp, synthetic construct
  misc_feature 1..17: note = Synthetic
  source 1..17: mol_type = other DNA
ggtcggtgatgcgccga

SEQ ID NO: 4457 - DNA, 17 bp, synthetic construct
  misc_feature 1..17: note = Synthetic
  source 1..17: mol_type = other DNA
gtcggtgatgcgccgat

SEQ ID NO: 4458 - DNA, 17 bp, synthetic construct
  misc_feature 1..17: note = Synthetic
  source 1..17: mol_type = other DNA
gccgatgggcgtctacg

SEQ ID NO: 4459 - DNA, 17 bp, synthetic construct
  misc_feature 1..17: note = Synthetic
  source 1..17: mol_type = other DNA
atgggcgtctacgagga

SEQ ID NO: 4460 - DNA, 17 bp, synthetic construct
  misc_feature 1..17: note = Synthetic
  source 1..17: mol_type = other DNA
gaacgcctgcagtccct

SEQ ID NO: 4461 - DNA, 17 bp, synthetic construct
  misc_feature 1..17: note = Synthetic
  source 1..17: mol_type = other DNA
aacgcctgcagtccctc

SEQ ID NO: 4462 - DNA, 17 bp, synthetic construct
  misc_feature 1..17: note = Synthetic
  source 1..17: mol_type = other DNA
cctgcagtccctcgggc

SEQ ID NO: 4463 - DNA, 17 bp, synthetic construct
  misc_feature 1..17: note = Synthetic
  source 1..17: mol_type = other DNA
ctgcagtccctcgggca

SEQ ID NO: 4464 - DNA, 17 bp, synthetic construct
  misc_feature 1..17: note = Synthetic
  source 1..17: mol_type = other DNA
tgcagtccctcgggcag

SEQ ID NO: 4465 - DNA, 17 bp, synthetic construct
  misc_feature 1..17: note = Synthetic
  source 1..17: mol_type = other DNA
cgccagccactcctccg

SEQ ID NO: 4466 - DNA, 17 bp, synthetic construct
  misc_feature 1..17: note = Synthetic
  source 1..17: mol_type = other DNA
gccagccactcctccgc

SEQ ID NO: 4467 - DNA, 17 bp, synthetic construct
  misc_feature 1..17: note = Synthetic
  source 1..17: mol_type = other DNA
ccagccactcctccgcg

SEQ ID NO: 4468 - DNA, 17 bp, synthetic construct
  misc_feature 1..17: note = Synthetic
  source 1..17: mol_type = other DNA
ctcctccgcggggcgct

SEQ ID NO: 4469 - DNA, 17 bp, synthetic construct
  misc_feature 1..17: note = Synthetic
  source 1..17: mol_type = other DNA
ggggcgctcggctaacg

SEQ ID NO: 4470 - DNA, 17 bp, synthetic construct
  misc_feature 1..17: note = Synthetic
  source 1..17: mol_type = other DNA
gcgctcggctaacgcgg

SEQ ID NO: 4471 - DNA, 17 bp, synthetic construct
  misc_feature 1..17: note = Synthetic
  source 1..17: mol_type = other DNA
taacgcggcggccgctc

SEQ ID NO: 4472 - DNA, 17 bp, synthetic construct
  misc_feature 1..17: note = Synthetic
  source 1..17: mol_type = other DNA
ggcggccgctccggaga

SEQ ID NO: 4473 - DNA, 17 bp, synthetic construct
  misc_feature 1..17: note = Synthetic
  source 1..17: mol_type = other DNA
tatcgtcgtaaaacagc

SEQ ID NO: 4474 - DNA, 17 bp, synthetic construct
  misc_feature 1..17: note = Synthetic
  source 1..17: mol_type = other DNA
aaaacagcaggtcgacc

SEQ ID NO: 4475 - DNA, 17 bp, synthetic construct
  misc_feature 1..17: note = Synthetic
  source 1..17: mol_type = other DNA
aaacagcaggtcgacca

SEQ ID NO: 4476 - DNA, 17 bp, synthetic construct
  misc_feature 1..17: note = Synthetic
  source 1..17: mol_type = other DNA
caggtcgaccagggccc

SEQ ID NO: 4477 - DNA, 17 bp, synthetic construct
  misc_feature 1..17: note = Synthetic
  source 1..17: mol_type = other DNA
gtcgaccagggccctgg

SEQ ID NO: 4478 - DNA, 17 bp, synthetic construct
  misc_feature 1..17: note = Synthetic
  source 1..17: mol_type = other DNA
ccagggccctggaggtg

SEQ ID NO: 4479 - DNA, 17 bp, synthetic construct
  misc_feature 1..17: note = Synthetic
  source 1..17: mol_type = other DNA
gccgatgtactttttct

SEQ ID NO: 4480 - DNA, 17 bp, synthetic construct
  misc_feature 1..17: note = Synthetic
  source 1..17: mol_type = other DNA
ggcgatcagcagcagct

SEQ ID NO: 4481 - DNA, 17 bp, synthetic construct
  misc_feature 1..17: note = Synthetic
  source 1..17: mol_type = other DNA
ttcgcactcgagtttga

SEQ ID NO: 4482 - DNA, 17 bp, synthetic construct
  misc_feature 1..17: note = Synthetic
  source 1..17: mol_type = other DNA
tcgcactcgagtttgat

SEQ ID NO: 4483 - DNA, 17 bp, synthetic construct
  misc_feature 1..17: note = Synthetic
  source 1..17: mol_type = other DNA
cgcactcgagtttgatg

SEQ ID NO: 4484 - DNA, 17 bp, synthetic construct
  misc_feature 1..17: note = Synthetic
  source 1..17: mol_type = other DNA
gcactcgagtttgatgg

SEQ ID NO: 4485 - DNA, 17 bp, synthetic construct
  misc_feature 1..17: note = Synthetic
  source 1..17: mol_type = other DNA
cactcgagtttgatggg

SEQ ID NO: 4486 - DNA, 17 bp, synthetic construct
  misc_feature 1..17: note = Synthetic
  source 1..17: mol_type = other DNA
acagcgcgcgcgagatg

SEQ ID NO: 4487 - DNA, 17 bp, synthetic construct
  misc_feature 1..17: note = Synthetic
  source 1..17: mol_type = other DNA
cgccatcttgtcgccca

SEQ ID NO: 4488 - DNA, 17 bp, synthetic construct
  misc_feature 1..17: note = Synthetic
  source 1..17: mol_type = other DNA
gcccacggccgtcagcc

SEQ ID NO: 4489 - DNA, 17 bp, synthetic construct
  misc_feature 1..17: note = Synthetic
  source 1..17: mol_type = other DNA
cacggccgtcagcccgg

SEQ ID NO: 4490 - DNA, 17 bp, synthetic construct
  misc_feature 1..17: note = Synthetic
  source 1..17: mol_type = other DNA
tcagcccggcggccgtg

SEQ ID NO: 4491 - DNA, 17 bp, synthetic construct
  misc_feature 1..17: note = Synthetic
  source 1..17: mol_type = other DNA
cggcggccgtgaggccg

SEQ ID NO: 4492 - RNA, 17 nt, synthetic construct
  misc_feature 1..17: note = Synthetic
  source 1..17: mol_type = other RNA
gcggcacagcacaaaga

SEQ ID NO: 4493 - DNA, 17 bp, synthetic construct
  misc_feature 1..17: note = Synthetic
  source 1..17: mol_type = other DNA
cccgtagatgatgcgca

SEQ ID NO: 4494 - DNA, 17 bp, synthetic construct
  misc_feature 1..17: note = Synthetic
  source 1..17: mol_type = other DNA
gatgatgcgcatggaat

SEQ ID NO: 4495 - DNA, 17 bp, synthetic construct
  misc_feature 1..17: note = Synthetic
  source 1..17: mol_type = other DNA
atgatgcgcatggaata

SEQ ID NO: 4496 - DNA, 17 bp, synthetic construct
  misc_feature 1..17: note = Synthetic
  source 1..17: mol_type = other DNA
gcgcatggaatagggcc

SEQ ID NO: 4497 - DNA, 17 bp, synthetic construct
  misc_feature 1..17: note = Synthetic
  source 1..17: mol_type = other DNA
cgcatggaatagggccc

SEQ ID NO: 4498 - DNA, 17 bp, synthetic construct
  misc_feature 1..17: note = Synthetic
  source 1..17: mol_type = other DNA
gcatggaatagggcccg

SEQ ID NO: 4499 - DNA, 17 bp, synthetic construct
  misc_feature 1..17: note = Synthetic
  source 1..17: mol_type = other DNA
catggaatagggcccgg

SEQ ID NO: 4500 - DNA, 17 bp, synthetic construct
  misc_feature 1..17: note = Synthetic
  source 1..17: mol_type = other DNA
cccgggggcgcgcatgt

SEQ ID NO: 4501 - DNA, 17 bp, synthetic construct
  misc_feature 1..17: note = Synthetic
  source 1..17: mol_type = other DNA
cgcatgtcggccgcctc

SEQ ID NO: 4502 - DNA, 17 bp, synthetic construct
  misc_feature 1..17: note = Synthetic
  source 1..17: mol_type = other DNA
gcatgtcggccgcctcc

SEQ ID NO: 4503 - DNA, 17 bp, synthetic construct
  misc_feature 1..17: note = Synthetic
  source 1..17: mol_type = other DNA
ggccgcctccgggaaat

SEQ ID NO: 4504 - DNA, 17 bp, synthetic construct
  misc_feature 1..17: note = Synthetic
  source 1..17: mol_type = other DNA
cctccgggaaatcggcc

SEQ ID NO: 4505 - DNA, 17 bp, synthetic construct
  misc_feature 1..17: note = Synthetic
  source 1..17: mol_type = other DNA
ggccaggagctgttcga

SEQ ID NO: 4506 - RNA, 17 nt, synthetic construct
  misc_feature 1..17: note = Synthetic
  source 1..17: mol_type = other RNA
aggccgcccagcgcgcg

SEQ ID NO: 4507 - DNA, 17 bp, synthetic construct
  misc_feature 1..17: note = Synthetic
  source 1..17: mol_type = other DNA
gcgcgtggacgtactcg

SEQ ID NO: 4508 - DNA, 17 bp, synthetic construct
  misc_feature 1..17: note = Synthetic
  source 1..17: mol_type = other DNA
cgcgtggacgtactcgc

SEQ ID NO: 4509 - DNA, 17 bp, synthetic construct
  misc_feature 1..17: note = Synthetic
  source 1..17: mol_type = other DNA
tcgcgagcagcatctcg

SEQ ID NO: 4510 - DNA, 17 bp, synthetic construct
  misc_feature 1..17: note = Synthetic
  source 1..17: mol_type = other DNA
cagcatctcgcggccga

SEQ ID NO: 4511 - DNA, 17 bp, synthetic construct
  misc_feature 1..17: note = Synthetic
  source 1..17: mol_type = other DNA
gatggtcgtcaccgtcg

SEQ ID NO: 4512 - DNA, 17 bp, synthetic construct
  misc_feature 1..17: note = Synthetic
  source 1..17: mol_type = other DNA
ccgtcgcggcaacgtgc

SEQ ID NO: 4513 - DNA, 17 bp, synthetic construct
  misc_feature 1..17: note = Synthetic
  source 1..17: mol_type = other DNA
gcggcaacgtgcaggca

SEQ ID NO: 4514 - DNA, 17 bp, synthetic construct
  misc_feature 1..17: note = Synthetic
  source 1..17: mol_type = other DNA
caacgtgcaggcacggc

SEQ ID NO: 4515 - DNA, 17 bp, synthetic construct
  misc_feature 1..17: note = Synthetic
  source 1..17: mol_type = other DNA
gttacacacgaccttga

SEQ ID NO: 4516 - DNA, 17 bp, synthetic construct
  misc_feature 1..17: note = Synthetic
  source 1..17: mol_type = other DNA
acacacgaccttgatgg

SEQ ID NO: 4517 - DNA, 17 bp, synthetic construct
  misc_feature 1..17: note = Synthetic
  source 1..17: mol_type = other DNA
cggcctgctgcttgtcc

SEQ ID NO: 4518 - DNA, 17 bp, synthetic construct
  misc_feature 1..17: note = Synthetic
  source 1..17: mol_type = other DNA
ctgcttgtccaggagca

SEQ ID NO: 4519 - DNA, 17 bp, synthetic construct
  misc_feature 1..17: note = Synthetic
  source 1..17: mol_type = other DNA
caggagcacggcctcct

SEQ ID NO: 4520 - DNA, 17 bp, synthetic construct
  misc_feature 1..17: note = Synthetic
  source 1..17: mol_type = other DNA
aggagcacggcctcctc

SEQ ID NO: 4521 - DNA, 17 bp, synthetic construct
  misc_feature 1..17: note = Synthetic
  source 1..17: mol_type = other DNA
ggagcacggcctcctcg

SEQ ID NO: 4522 - DNA, 17 bp, synthetic construct
  misc_feature 1..17: note = Synthetic
  source 1..17: mol_type = other DNA
cctcctcggggctgctc

SEQ ID NO: 4523 - DNA, 17 bp, synthetic construct
  misc_feature 1..17: note = Synthetic
  source 1..17: mol_type = other DNA
ctcctcggggctgctct

SEQ ID NO: 4524 - DNA, 17 bp, synthetic construct
  misc_feature 1..17: note = Synthetic
  source 1..17: mol_type = other DNA
tcctcggggctgctctg

SEQ ID NO: 4525 - DNA, 17 bp, synthetic construct
  misc_feature 1..17: note = Synthetic
  source 1..17: mol_type = other DNA
tctggggaatccgcgag

SEQ ID NO: 4526 - DNA, 17 bp, synthetic construct
  misc_feature 1..17: note = Synthetic
  source 1..17: mol_type = other DNA
gcggatctgctttcgca

SEQ ID NO: 4527 - DNA, 17 bp, synthetic construct
  misc_feature 1..17: note = Synthetic
  source 1..17: mol_type = other DNA
tggcgagccagtcccgc

SEQ ID NO: 4528 - DNA, 17 bp, synthetic construct
  misc_feature 1..17: note = Synthetic
  source 1..17: mol_type = other DNA
cgagccagtcccgcagg

SEQ ID NO: 4529 - DNA, 17 bp, synthetic construct
  misc_feature 1..17: note = Synthetic
  source 1..17: mol_type = other DNA
cccgcaggaggatgctg

SEQ ID NO: 4530 - DNA, 17 bp, synthetic construct
  misc_feature 1..17: note = Synthetic
  source 1..17: mol_type = other DNA
gcaggaggatgctgagg

SEQ ID NO: 4531 - DNA, 17 bp, synthetic construct
  misc_feature 1..17: note = Synthetic
  source 1..17: mol_type = other DNA
cccccacctcgatctcc

SEQ ID NO: 4532 - DNA, 17 bp, synthetic construct
  misc_feature 1..17: note = Synthetic
  source 1..17: mol_type = other DNA
agtccttgcccgcctcc

SEQ ID NO: 4533 - DNA, 17 bp, synthetic construct
  misc_feature 1..17: note = Synthetic
  source 1..17: mol_type = other DNA
caggtgcgccactgcgt

SEQ ID NO: 4534 - DNA, 17 bp, synthetic construct
  misc_feature 1..17: note = Synthetic
  source 1..17: mol_type = other DNA
ccactgcgtcggccctc

SEQ ID NO: 4535 - DNA, 17 bp, synthetic construct
  misc_feature 1..17: note = Synthetic
  source 1..17: mol_type = other DNA
cactgcgtcggccctca

SEQ ID NO: 4536 - DNA, 17 bp, synthetic construct
  misc_feature 1..17: note = Synthetic
  source 1..17: mol_type = other DNA
agagcgtgctgaagcac

SEQ ID NO: 4537 - DNA, 17 bp, synthetic construct
  misc_feature 1..17: note = Synthetic
  source 1..17: mol_type = other DNA
tgctgaagcacaggttg

SEQ ID NO: 4538 - DNA, 17 bp, synthetic construct
  misc_feature 1..17: note = Synthetic
  source 1..17: mol_type = other DNA
gctgaagcacaggttgt

SEQ ID NO: 4539 - DNA, 17 bp, synthetic construct
  misc_feature 1..17: note = Synthetic
  source 1..17: mol_type = other DNA
agcacaggttgtgggcc

SEQ ID NO: 4540 - DNA, 17 bp, synthetic construct
  misc_feature 1..17: note = Synthetic
  source 1..17: mol_type = other DNA
gtgggcctggatgatgc

SEQ ID NO: 4541 - DNA, 17 bp, synthetic construct
  misc_feature 1..17: note = Synthetic
  source 1..17: mol_type = other DNA
tgggcctggatgatgct

SEQ ID NO: 4542 - DNA, 17 bp, synthetic construct
  misc_feature 1..17: note = Synthetic
  source 1..17: mol_type = other DNA
gggcctggatgatgctg

SEQ ID NO: 4543 - DNA, 17 bp, synthetic construct
  misc_feature 1..17: note = Synthetic
  source 1..17: mol_type = other DNA
ggatgatgctggggtac

SEQ ID NO: 4544 - DNA, 17 bp, synthetic construct
  misc_feature 1..17: note = Synthetic
  source 1..17: mol_type = other DNA
gatgctggggtacaggc

SEQ ID NO: 4545 - DNA, 17 bp, synthetic construct
  misc_feature 1..17: note = Synthetic
  source 1..17: mol_type = other DNA
aaagtcgaacaccacca

SEQ ID NO: 4546 - DNA, 17 bp, synthetic construct
  misc_feature 1..17: note = Synthetic
  source 1..17: mol_type = other DNA
aagtcgaacaccaccac

SEQ ID NO: 4547 - DNA, 17 bp, synthetic construct
  misc_feature 1..17: note = Synthetic
  source 1..17: mol_type = other DNA
agtcgaacaccaccacg

SEQ ID NO: 4548 - DNA, 17 bp, synthetic construct
  misc_feature 1..17: note = Synthetic
  source 1..17: mol_type = other DNA
ggggttcacgtgaaacc

SEQ ID NO: 4549 - DNA, 17 bp, synthetic construct
  misc_feature 1..17: note = Synthetic
  source 1..17: mol_type = other DNA
cacgtgaaacccggaag

SEQ ID NO: 4550 - DNA, 17 bp, synthetic construct
  misc_feature 1..17: note = Synthetic
  source 1..17: mol_type = other DNA
acgtgaaacccggaagt

SEQ ID NO: 4551 - DNA, 17 bp, synthetic construct
  misc_feature 1..17: note = Synthetic
  source 1..17: mol_type = other DNA
cgtgaaacccggaagtg

SEQ ID NO: 4552 - DNA, 17 bp, synthetic construct
  misc_feature 1..17: note = Synthetic
  source 1..17: mol_type = other DNA
acccggaagtggggtca

SEQ ID NO: 4553 - DNA, 17 bp, synthetic construct
  misc_feature 1..17: note = Synthetic
  source 1..17: mol_type = other DNA
agtggggtcaaggaccc

SEQ ID NO: 4554 - DNA, 17 bp, synthetic construct
  misc_feature 1..17: note = Synthetic
  source 1..17: mol_type = other DNA
caaggaccctggccccc

SEQ ID NO: 4555 - DNA, 17 bp, synthetic construct
  misc_feature 1..17: note = Synthetic
  source 1..17: mol_type = other DNA
gtaccccacgtgcctgc

SEQ ID NO: 4556 - DNA, 17 bp, synthetic construct
  misc_feature 1..17: note = Synthetic
  source 1..17: mol_type = other DNA
ccccacgtgcctgccgg

SEQ ID NO: 4557 - DNA, 17 bp, synthetic construct
  misc_feature 1..17: note = Synthetic
  source 1..17: mol_type = other DNA
gtctcccgcgcgccctc

SEQ ID NO: 4558 - DNA, 17 bp, synthetic construct
  misc_feature 1..17: note = Synthetic
  source 1..17: mol_type = other DNA
tcctccccctcctcctc

SEQ ID NO: 4559 - DNA, 17 bp, synthetic construct
  misc_feature 1..17: note = Synthetic
  source 1..17: mol_type = other DNA
gccgctcctcgtcctcc

SEQ ID NO: 4560 - DNA, 17 bp, synthetic construct
  misc_feature 1..17: note = Synthetic
  source 1..17: mol_type = other DNA
ccgctcctcgtcctccc

SEQ ID NO: 4561 - DNA, 17 bp, synthetic construct
  misc_feature 1..17: note = Synthetic
  source 1..17: mol_type = other DNA
ctcgtcctcccgggctg

SEQ ID NO: 4562 - DNA, 17 bp, synthetic construct
  misc_feature 1..17: note = Synthetic
  source 1..17: mol_type = other DNA
tcctcccgggctgcggc

SEQ ID NO: 4563 - DNA, 17 bp, synthetic construct
  misc_feature 1..17: note = Synthetic
  source 1..17: mol_type = other DNA
ggctgcggccggacgct

SEQ ID NO: 4564 - DNA, 17 bp, synthetic construct
  misc_feature 1..17: note = Synthetic
  source 1..17: mol_type = other DNA
gctgcggccggacgctt

SEQ ID NO: 4565 - DNA, 17 bp, synthetic construct
  misc_feature 1..17: note = Synthetic
  source 1..17: mol_type = other DNA
cttgggcgcctcccccc

SEQ ID NO: 4566 - DNA, 17 bp, synthetic construct
  misc_feature 1..17: note = Synthetic
  source 1..17: mol_type = other DNA
cgcccctaaatcgcccc

SEQ ID NO: 4567 - DNA, 17 bp, synthetic construct
  misc_feature 1..17: note = Synthetic
  source 1..17: mol_type = other DNA
gcccctaaatcgcccct

SEQ ID NO: 4568 - DNA, 17 bp, synthetic construct
  misc_feature 1..17: note = Synthetic
  source 1..17: mol_type = other DNA
aatcgcccctgggtgtc

SEQ ID NO: 4569 - DNA, 17 bp, synthetic construct
  misc_feature 1..17: note = Synthetic
  source 1..17: mol_type = other DNA
gcagaataaagcccttc

SEQ ID NO: 4570 - DNA, 17 bp, synthetic construct
  misc_feature 1..17: note = Synthetic
  source 1..17: mol_type = other DNA
aataaagcccttctggt

SEQ ID NO: 4571 - DNA, 17 bp, synthetic construct
  misc_feature 1..17: note = Synthetic
  source 1..17: mol_type = other DNA
agcccttctggtcggcc

SEQ ID NO: 4572 - DNA, 17 bp, synthetic construct
  misc_feature 1..17: note = Synthetic
  source 1..17: mol_type = other DNA
ggtcggccaggcgcagc

SEQ ID NO: 4573 - DNA, 17 bp, synthetic construct
  misc_feature 1..17: note = Synthetic
  source 1..17: mol_type = other DNA
gcaggcacgtaaagacg

SEQ ID NO: 4574 - DNA, 17 bp, synthetic construct
  misc_feature 1..17: note = Synthetic
  source 1..17: mol_type = other DNA
taaagacgcggatctgc

SEQ ID NO: 4575 - DNA, 17 bp, synthetic construct
  misc_feature 1..17: note = Synthetic
  source 1..17: mol_type = other DNA
ctgctggccgtcgtaga

SEQ ID NO: 4576 - DNA, 17 bp, synthetic construct
  misc_feature 1..17: note = Synthetic
  source 1..17: mol_type = other DNA
ggccgtcgtagatggtg

SEQ ID NO: 4577 - DNA, 17 bp, synthetic construct
  misc_feature 1..17: note = Synthetic
  source 1..17: mol_type = other DNA
gccgtcgtagatggtgc

SEQ ID NO: 4578 - RNA, 17 nt, synthetic construct
  misc_feature 1..17: note = Synthetic
  source 1..17: mol_type = other RNA
acccgccaagcgcgcga

SEQ ID NO: 4579 - DNA, 17 bp, synthetic construct
  misc_feature 1..17: note = Synthetic
  source 1..17: mol_type = other DNA
cggccgagagctccaga

SEQ ID NO: 4580 - DNA, 17 bp, synthetic construct
  misc_feature 1..17: note = Synthetic
  source 1..17: mol_type = other DNA
ggccgagagctccagat

SEQ ID NO: 4581 - DNA, 17 bp, synthetic construct
  misc_feature 1..17: note = Synthetic
  source 1..17: mol_type = other DNA
gccgagagctccagatg

SEQ ID NO: 4582 - DNA, 17 bp, synthetic construct
  misc_feature 1..17: note = Synthetic
  source 1..17: mol_type = other DNA
aaaacttaaaaaacagc

SEQ ID NO: 4583 - DNA, 17 bp, synthetic construct
  misc_feature 1..17: note = Synthetic
  source 1..17: mol_type = other DNA
acagctggcccaccagc

SEQ ID NO: 4584 - DNA, 17 bp, synthetic construct
  misc_feature 1..17: note = Synthetic
  source 1..17: mol_type = other DNA
cagctggcccaccagca

SEQ ID NO: 4585 - DNA, 17 bp, synthetic construct
  misc_feature 1..17: note = Synthetic
  source 1..17: mol_type = other DNA
gatcaccccgcgttgcg

SEQ ID NO: 4586 - DNA, 17 bp, synthetic construct
  misc_feature 1..17: note = Synthetic
  source 1..17: mol_type = other DNA
atcaccccgcgttgcgc

SEQ ID NO: 4587 - DNA, 17 bp, synthetic construct
  misc_feature 1..17: note = Synthetic
  source 1..17: mol_type = other DNA
cccgcgttgcgcgggcc

SEQ ID NO: 4588 - DNA, 17 bp, synthetic construct
  misc_feature 1..17: note = Synthetic
  source 1..17: mol_type = other DNA
gcgttgcgcgggcccgg

SEQ ID NO: 4589 - DNA, 17 bp, synthetic construct
  misc_feature 1..17: note = Synthetic
  source 1..17: mol_type = other DNA
gggcccggcggcgtagt

SEQ ID NO: 4590 - DNA, 17 bp, synthetic construct
  misc_feature 1..17: note = Synthetic
  source 1..17: mol_type = other DNA
cccggcggcgtagtagg

SEQ ID NO: 4591 - DNA, 17 bp, synthetic construct
  misc_feature 1..17: note = Synthetic
  source 1..17: mol_type = other DNA
ccggcggcgtagtaggc

SEQ ID NO: 4592 - DNA, 17 bp, synthetic construct
  misc_feature 1..17: note = Synthetic
  source 1..17: mol_type = other DNA
cggcggcgtagtaggcg

SEQ ID NO: 4593 - DNA, 17 bp, synthetic construct
  misc_feature 1..17: note = Synthetic
  source 1..17: mol_type = other DNA
ggatgtcgcgatagctc

SEQ ID NO: 4594 - DNA, 17 bp, synthetic construct
  misc_feature 1..17: note = Synthetic
  source 1..17: mol_type = other DNA
ccttcttcttgtccttc

SEQ ID NO: 4595 - DNA, 17 bp, synthetic construct
  misc_feature 1..17: note = Synthetic
  source 1..17: mol_type = other DNA
cttcttgtccttcagga

SEQ ID NO: 4596 - DNA, 17 bp, synthetic construct
  misc_feature 1..17: note = Synthetic
  source 1..17: mol_type = other DNA
gtccttcaggacggctt

SEQ ID NO: 4597 - DNA, 17 bp, synthetic construct
  misc_feature 1..17: note = Synthetic
  source 1..17: mol_type = other DNA
caggacggcttcggcca

SEQ ID NO: 4598 - DNA, 17 bp, synthetic construct
  misc_feature 1..17: note = Synthetic
  source 1..17: mol_type = other DNA
cgagagcttgatcttgt

SEQ ID NO: 4599 - DNA, 17 bp, synthetic construct
  misc_feature 1..17: note = Synthetic
  source 1..17: mol_type = other DNA
ttatcttgctgcgcttc

SEQ ID NO: 4600 - DNA, 17 bp, synthetic construct
  misc_feature 1..17: note = Synthetic
  source 1..17: mol_type = other DNA
tgctgcgcttctggaag

SEQ ID NO: 4601 - DNA, 17 bp, synthetic construct
  misc_feature 1..17: note = Synthetic
  source 1..17: mol_type = other DNA
gcttctggaagtggctc

SEQ ID NO: 4602 - RNA, 17 nt, synthetic construct
  misc_feature 1..17: note = Synthetic
  source 1..17: mol_type = other RNA
acacgcgaaacacgccc

SEQ ID NO: 4603 - DNA, 17 bp, synthetic construct
  misc_feature 1..17: note = Synthetic
  source 1..17: mol_type = other DNA
cgccccggccgttcatg

SEQ ID NO: 4604 - DNA, 17 bp, synthetic construct
  misc_feature 1..17: note = Synthetic
  source 1..17: mol_type = other DNA
tgcggccgtacccgtcc

SEQ ID NO: 4605 - DNA, 17 bp, synthetic construct
  misc_feature 1..17: note = Synthetic
  source 1..17: mol_type = other DNA
gcggccgtacccgtcca

SEQ ID NO: 4606 - DNA, 17 bp, synthetic construct
  misc_feature 1..17: note = Synthetic
  source 1..17: mol_type = other DNA
cggccgtacccgtccag

SEQ ID NO: 4607 - DNA, 17 bp, synthetic construct
  misc_feature 1..17: note = Synthetic
  source 1..17: mol_type = other DNA
ggccgtacccgtccagg

SEQ ID NO: 4608 - DNA, 17 bp, synthetic construct
  misc_feature 1..17: note = Synthetic
  source 1..17: mol_type = other DNA
gtaaatgtccgtcagct

SEQ ID NO: 4609 - DNA, 17 bp, synthetic construct
  misc_feature 1..17: note = Synthetic
  source 1..17: mol_type = other DNA
cagcttggccagcaaga

SEQ ID NO: 4610 - DNA, 17 bp, synthetic construct
  misc_feature 1..17: note = Synthetic
  source 1..17: mol_type = other DNA
agcttggccagcaagaa

SEQ ID NO: 4611 - DNA, 17 bp, synthetic construct
  misc_feature 1..17: note = Synthetic
  source 1..17: mol_type = other DNA
gttgatgatgttgtacc

SEQ ID NO: 4612 - DNA, 17 bp, synthetic construct
  misc_feature 1..17: note = Synthetic
  source 1..17: mol_type = other DNA
gtacccggtcacgaact

SEQ ID NO: 4613 - DNA, 17 bp, synthetic construct
  misc_feature 1..17: note = Synthetic
  source 1..17: mol_type = other DNA
tacccggtcacgaactc

SEQ ID NO: 4614 - DNA, 17 bp, synthetic construct
  misc_feature 1..17: note = Synthetic
  source 1..17: mol_type = other DNA
acccggtcacgaactcg

SEQ ID NO: 4615 - DNA, 17 bp, synthetic construct
  misc_feature 1..17: note = Synthetic
  source 1..17: mol_type = other DNA
ggccgtactgtttcaca

SEQ ID NO: 4616 - DNA, 17 bp, synthetic construct
  misc_feature 1..17: note = Synthetic
  source 1..17: mol_type = other DNA
gccgtactgtttcacaa

SEQ ID NO: 4617 - DNA, 17 bp, synthetic construct
  misc_feature 1..17: note = Synthetic
  source 1..17: mol_type = other DNA
tttcacaagggtcatga

SEQ ID NO: 4618 - DNA, 17 bp, synthetic construct
  misc_feature 1..17: note = Synthetic
  source 1..17: mol_type = other DNA
gtcgaattccagaacca

SEQ ID NO: 4619 - DNA, 17 bp, synthetic construct
  misc_feature 1..17: note = Synthetic
  source 1..17: mol_type = other DNA
tcgaattccagaaccac

SEQ ID NO: 4620 - DNA, 17 bp, synthetic construct
  misc_feature 1..17: note = Synthetic
  source 1..17: mol_type = other DNA
ttccagaaccacgggcg

SEQ ID NO: 4621 - DNA, 17 bp, synthetic construct
  misc_feature 1..17: note = Synthetic
  source 1..17: mol_type = other DNA
tccagaaccacgggcgt

SEQ ID NO: 4622 - DNA, 17 bp, synthetic construct
  misc_feature 1..17: note = Synthetic
  source 1..17: mol_type = other DNA
gaaccacgggcgtgggc

SEQ ID NO: 4623 - DNA, 17 bp, synthetic construct
  misc_feature 1..17: note = Synthetic
  source 1..17: mol_type = other DNA
gggcgtgggcaggcccc

SEQ ID NO: 4624 - DNA, 17 bp, synthetic construct
  misc_feature 1..17: note = Synthetic
  source 1..17: mol_type = other DNA
tggccgccagctcgttc

SEQ ID NO: 4625 - DNA, 17 bp, synthetic construct
  misc_feature 1..17: note = Synthetic
  source 1..17: mol_type = other DNA
ccgccagctcgttcagg

SEQ ID NO: 4626 - DNA, 17 bp, synthetic construct
  misc_feature 1..17: note = Synthetic
  source 1..17: mol_type = other DNA
cgccagctcgttcaggt

SEQ ID NO: 4627 - DNA, 17 bp, synthetic construct
  misc_feature 1..17: note = Synthetic
  source 1..17: mol_type = other DNA
ctcgttcaggtgggatt

SEQ ID NO: 4628 - DNA, 17 bp, synthetic construct
  misc_feature 1..17: note = Synthetic
  source 1..17: mol_type = other DNA
tcgttcaggtgggattc

SEQ ID NO: 4629 - DNA, 17 bp, synthetic construct
  misc_feature 1..17: note = Synthetic
  source 1..17: mol_type = other DNA
cgttcaggtgggattcg

SEQ ID NO: 4630 - DNA, 17 bp, synthetic construct
  misc_feature 1..17: note = Synthetic
  source 1..17: mol_type = other DNA
tcaggtgggattcgggg

SEQ ID NO: 4631 - DNA, 17 bp, synthetic construct
  misc_feature 1..17: note = Synthetic
  source 1..17: mol_type = other DNA
ggattcggggaggtcgc

SEQ ID NO: 4632 - RNA, 17 nt, synthetic construct
  misc_feature 1..17: note = Synthetic
  source 1..17: mol_type = other RNA
aggaaccgagcgaaaac

SEQ ID NO: 4633 - RNA, 17 nt, synthetic construct
  misc_feature 1..17: note = Synthetic
  source 1..17: mol_type = other RNA
aaccgagcgaaaacagg

SEQ ID NO: 4634 - DNA, 17 bp, synthetic construct
  misc_feature 1..17: note = Synthetic
  source 1..17: mol_type = other DNA
acaggaggacgtgctcc

SEQ ID NO: 4635 - DNA, 17 bp, synthetic construct
  misc_feature 1..17: note = Synthetic
  source 1..17: mol_type = other DNA
caggaggacgtgctcca

SEQ ID NO: 4636 - DNA, 17 bp, synthetic construct
  misc_feature 1..17: note = Synthetic
  source 1..17: mol_type = other DNA
gaggacgtgctccaggg

SEQ ID NO: 4637 - DNA, 17 bp, synthetic construct
  misc_feature 1..17: note = Synthetic
  source 1..17: mol_type = other DNA
gacgtgctccagggcgg

SEQ ID NO: 4638 - DNA, 17 bp, synthetic construct
  misc_feature 1..17: note = Synthetic
  source 1..17: mol_type = other DNA
gtgctccagggcggtgg

SEQ ID NO: 4639 - DNA, 17 bp, synthetic construct
  misc_feature 1..17: note = Synthetic
  source 1..17: mol_type = other DNA
ccagggcggtggtggac

SEQ ID NO: 4640 - DNA, 17 bp, synthetic construct
  misc_feature 1..17: note = Synthetic
  source 1..17: mol_type = other DNA
caggtcgtagagcagac

SEQ ID NO: 4641 - DNA, 17 bp, synthetic construct
  misc_feature 1..17: note = Synthetic
  source 1..17: mol_type = other DNA
agagcagacaggatatc

SEQ ID NO: 4642 - DNA, 17 bp, synthetic construct
  misc_feature 1..17: note = Synthetic
  source 1..17: mol_type = other DNA
aggatatctggatgacc

SEQ ID NO: 4643 - DNA, 17 bp, synthetic construct
  misc_feature 1..17: note = Synthetic
  source 1..17: mol_type = other DNA
tggatgaccaggtcctc

SEQ ID NO: 4644 - DNA, 17 bp, synthetic construct
  misc_feature 1..17: note = Synthetic
  source 1..17: mol_type = other DNA
ggatgaccaggtcctcc

SEQ ID NO: 4645 - DNA, 17 bp, synthetic construct
  misc_feature 1..17: note = Synthetic
  source 1..17: mol_type = other DNA
caggtcctccgggtgcc

SEQ ID NO: 4646 - DNA, 17 bp, synthetic construct
  misc_feature 1..17: note = Synthetic
  source 1..17: mol_type = other DNA
tccgggtgcccggccac

SEQ ID NO: 4647 - DNA, 17 bp, synthetic construct
  misc_feature 1..17: note = Synthetic
  source 1..17: mol_type = other DNA
gtgcccggccaccggaa

SEQ ID NO: 4648 - DNA, 17 bp, synthetic construct
  misc_feature 1..17: note = Synthetic
  source 1..17: mol_type = other DNA
cacatgagcttgtatgc

SEQ ID NO: 4649 - DNA, 17 bp, synthetic construct
  misc_feature 1..17: note = Synthetic
  source 1..17: mol_type = other DNA
tgagcttgtatgccggt

SEQ ID NO: 4650 - DNA, 17 bp, synthetic construct
  misc_feature 1..17: note = Synthetic
  source 1..17: mol_type = other DNA
gctcatgcccccctcga

SEQ ID NO: 4651 - DNA, 17 bp, synthetic construct
  misc_feature 1..17: note = Synthetic
  source 1..17: mol_type = other DNA
tgcccccctcgatggcc

SEQ ID NO: 4652 - DNA, 17 bp, synthetic construct
  misc_feature 1..17: note = Synthetic
  source 1..17: mol_type = other DNA
gttaaactcgacgtcgc

SEQ ID NO: 4653 - DNA, 17 bp, synthetic construct
  misc_feature 1..17: note = Synthetic
  source 1..17: mol_type = other DNA
gtcgctggatgtcccga

SEQ ID NO: 4654 - DNA, 17 bp, synthetic construct
  misc_feature 1..17: note = Synthetic
  source 1..17: mol_type = other DNA
gatgtcccgaaggccat

SEQ ID NO: 4655 - DNA, 17 bp, synthetic construct
  misc_feature 1..17: note = Synthetic
  source 1..17: mol_type = other DNA
atgtcccgaaggccatc

SEQ ID NO: 4656 - DNA, 17 bp, synthetic construct
  misc_feature 1..17: note = Synthetic
  source 1..17: mol_type = other DNA
tgtcccgaaggccatcg

SEQ ID NO: 4657 - DNA, 17 bp, synthetic construct
  misc_feature 1..17: note = Synthetic
  source 1..17: mol_type = other DNA
aaggccatcggggccgc

SEQ ID NO: 4658 - DNA, 17 bp, synthetic construct
  misc_feature 1..17: note = Synthetic
  source 1..17: mol_type = other DNA
ccatcggggccgccggc

SEQ ID NO: 4659 - DNA, 17 bp, synthetic construct
  misc_feature 1..17: note = Synthetic
  source 1..17: mol_type = other DNA
catcggggccgccggct

SEQ ID NO: 4660 - DNA, 17 bp, synthetic construct
  misc_feature 1..17: note = Synthetic
  source 1..17: mol_type = other DNA
gggctagcgtgttgttc

SEQ ID NO: 4661 - DNA, 17 bp, synthetic construct
  misc_feature 1..17: note = Synthetic
  source 1..17: mol_type = other DNA
agcgtgttgttccggcc

SEQ ID NO: 4662 - DNA, 17 bp, synthetic construct
  misc_feature 1..17: note = Synthetic
  source 1..17: mol_type = other DNA
tccggcccggtttgaga

SEQ ID NO: 4663 - DNA, 17 bp, synthetic construct
  misc_feature 1..17: note = Synthetic
  source 1..17: mol_type = other DNA
gagacggtaccagccga

SEQ ID NO: 4664 - DNA, 17 bp, synthetic construct
  misc_feature 1..17: note = Synthetic
  source 1..17: mol_type = other DNA
gccgaaggtgacgaacc

SEQ ID NO: 4665 - DNA, 17 bp, synthetic construct
  misc_feature 1..17: note = Synthetic
  source 1..17: mol_type = other DNA
ccgaaggtgacgaaccc

SEQ ID NO: 4666 - DNA, 17 bp, synthetic construct
  misc_feature 1..17: note = Synthetic
  source 1..17: mol_type = other DNA
cgaaggtgacgaacccg

SEQ ID NO: 4667 - DNA, 17 bp, synthetic construct
  misc_feature 1..17: note = Synthetic
  source 1..17: mol_type = other DNA
cgaacccggggttgtcc

SEQ ID NO: 4668 - DNA, 17 bp, synthetic construct
  misc_feature 1..17: note = Synthetic
  source 1..17: mol_type = other DNA
ggttgtccaggatgaac

SEQ ID NO: 4669 - DNA, 17 bp, synthetic construct
  misc_feature 1..17: note = Synthetic
  source 1..17: mol_type = other DNA
gttgtccaggatgaacc

SEQ ID NO: 4670 - DNA, 17 bp, synthetic construct
  misc_feature 1..17: note = Synthetic
  source 1..17: mol_type = other DNA
gtccaggatgaaccggg

SEQ ID NO: 4671 - DNA, 17 bp, synthetic construct
  misc_feature 1..17: note = Synthetic
  source 1..17: mol_type = other DNA
caggatgaaccgggtgg

SEQ ID NO: 4672 - DNA, 17 bp, synthetic construct
  misc_feature 1..17: note = Synthetic
  source 1..17: mol_type = other DNA
accctcgtacttcttga

SEQ ID NO: 4673 - DNA, 17 bp, synthetic construct
  misc_feature 1..17: note = Synthetic
  source 1..17: mol_type = other DNA
tcgtacttcttgatggc

SEQ ID NO: 4674 - DNA, 17 bp, synthetic construct
  misc_feature 1..17: note = Synthetic
  source 1..17: mol_type = other DNA
cgtacttcttgatggcc

SEQ ID NO: 4675 - DNA, 17 bp, synthetic construct
  misc_feature 1..17: note = Synthetic
  source 1..17: mol_type = other DNA
ggcagaagttgtcgcac

SEQ ID NO: 4676 - DNA, 17 bp, synthetic construct
  misc_feature 1..17: note = Synthetic
  source 1..17: mol_type = other DNA
acagcacacgcccgctt

SEQ ID NO: 4677 - DNA, 17 bp, synthetic construct
  misc_feature 1..17: note = Synthetic
  source 1..17: mol_type = other DNA
cgcttcggacgtagacg

SEQ ID NO: 4678 - DNA, 17 bp, synthetic construct
  misc_feature 1..17: note = Synthetic
  source 1..17: mol_type = other DNA
gacgcggtaaaacagag

SEQ ID NO: 4679 - DNA, 17 bp, synthetic construct
  misc_feature 1..17: note = Synthetic
  source 1..17: mol_type = other DNA
acgcggtaaaacagagc

SEQ ID NO: 4680 - DNA, 17 bp, synthetic construct
  misc_feature 1..17: note = Synthetic
  source 1..17: mol_type = other DNA
cgcggtaaaacagagcg

SEQ ID NO: 4681 - DNA, 17 bp, synthetic construct
  misc_feature 1..17: note = Synthetic
  source 1..17: mol_type = other DNA
ctcgtagtagtacacgt

SEQ ID NO: 4682 - DNA, 17 bp, synthetic construct
  misc_feature 1..17: note = Synthetic
  source 1..17: mol_type = other DNA
ccacctccgcctcgaag

SEQ ID NO: 4683 - DNA, 17 bp, synthetic construct
  misc_feature 1..17: note = Synthetic
  source 1..17: mol_type = other DNA
cgcctcgaagtggtccg

SEQ ID NO: 4684 - DNA, 17 bp, synthetic construct
  misc_feature 1..17: note = Synthetic
  source 1..17: mol_type = other DNA
ggtccgcggagatgccg

SEQ ID NO: 4685 - RNA, 17 nt, synthetic construct
  misc_feature 1..17: note = Synthetic
  source 1..17: mol_type = other RNA
ccgcggaacgacgcgcc

SEQ ID NO: 4686 - RNA, 17 nt, synthetic construct
  misc_feature 1..17: note = Synthetic
  source 1..17: mol_type = other RNA
cgcggaacgacgcgccc

SEQ ID NO: 4687 - RNA, 17 nt, synthetic construct
  misc_feature 1..17: note = Synthetic
  source 1..17: mol_type = other RNA
gcggaacgacgcgcccg

SEQ ID NO: 4688 - DNA, 17 bp, synthetic construct
  misc_feature 1..17: note = Synthetic
  source 1..17: mol_type = other DNA
cgcccggggactcgcgc

SEQ ID NO: 4689 - DNA, 17 bp, synthetic construct
  misc_feature 1..17: note = Synthetic
  source 1..17: mol_type = other DNA
gcccggggactcgcgca

SEQ ID NO: 4690 - DNA, 17 bp, synthetic construct
  misc_feature 1..17: note = Synthetic
  source 1..17: mol_type = other DNA
ggactcgcgcagggccg

SEQ ID NO: 4691 - DNA, 17 bp, synthetic construct
  misc_feature 1..17: note = Synthetic
  source 1..17: mol_type = other DNA
cgctcgcagagatctcg

SEQ ID NO: 4692 - DNA, 17 bp, synthetic construct
  misc_feature 1..17: note = Synthetic
  source 1..17: mol_type = other DNA
gctcgcagagatctcgt

SEQ ID NO: 4693 - DNA, 17 bp, synthetic construct
  misc_feature 1..17: note = Synthetic
  source 1..17: mol_type = other DNA
ctcgcagagatctcgtg

SEQ ID NO: 4694 - DNA, 17 bp, synthetic construct
  misc_feature 1..17: note = Synthetic
  source 1..17: mol_type = other DNA
agagatctcgtggggcg

SEQ ID NO: 4695 - DNA, 17 bp, synthetic construct
  misc_feature 1..17: note = Synthetic
  source 1..17: mol_type = other DNA
gtggggcgcggcattgt

SEQ ID NO: 4696 - DNA, 17 bp, synthetic construct
  misc_feature 1..17: note = Synthetic
  source 1..17: mol_type = other DNA
cgtgccgtaaacgtgaa

SEQ ID NO: 4697 - DNA, 17 bp, synthetic construct
  misc_feature 1..17: note = Synthetic
  source 1..17: mol_type = other DNA
aaacgtgaacggccacc

SEQ ID NO: 4698 - DNA, 17 bp, synthetic construct
  misc_feature 1..17: note = Synthetic
  source 1..17: mol_type = other DNA
cgtgaacggccacccgg

SEQ ID NO: 4699 - DNA, 17 bp, synthetic construct
  misc_feature 1..17: note = Synthetic
  source 1..17: mol_type = other DNA
gccacccggtggccttc

SEQ ID NO: 4700 - DNA, 17 bp, synthetic construct
  misc_feature 1..17: note = Synthetic
  source 1..17: mol_type = other DNA
ggtggccttccggagtc

SEQ ID NO: 4701 - DNA, 17 bp, synthetic construct
  misc_feature 1..17: note = Synthetic
  source 1..17: mol_type = other DNA
cttccggagtcaggccc

SEQ ID NO: 4702 - DNA, 17 bp, synthetic construct
  misc_feature 1..17: note = Synthetic
  source 1..17: mol_type = other DNA
gcccaggagcgtgatga

SEQ ID NO: 4703 - DNA, 17 bp, synthetic construct
  misc_feature 1..17: note = Synthetic
  source 1..17: mol_type = other DNA
gtgatgacggtccccgt

SEQ ID NO: 4704 - DNA, 17 bp, synthetic construct
  misc_feature 1..17: note = Synthetic
  source 1..17: mol_type = other DNA
ggtccccgtcggtgtga

SEQ ID NO: 4705 - DNA, 17 bp, synthetic construct
  misc_feature 1..17: note = Synthetic
  source 1..17: mol_type = other DNA
cgtccataaaccgcgcg

SEQ ID NO: 4706 - DNA, 17 bp, synthetic construct
  misc_feature 1..17: note = Synthetic
  source 1..17: mol_type = other DNA
gtccataaaccgcgcgt

SEQ ID NO: 4707 - DNA, 17 bp, synthetic construct
  misc_feature 1..17: note = Synthetic
  source 1..17: mol_type = other DNA
tccataaaccgcgcgtg

SEQ ID NO: 4708 - DNA, 17 bp, synthetic construct
  misc_feature 1..17: note = Synthetic
  source 1..17: mol_type = other DNA
ccataaaccgcgcgtgg

SEQ ID NO: 4709 - RNA, 20 nt, synthetic construct
  misc_feature 1..20: note = Synthetic
  source 1..20: mol_type = other RNA
tggcggcggcccgctgtccc

SEQ ID NO: 4710 - RNA, 20 nt, synthetic construct
  misc_feature 1..20: note = Synthetic
  source 1..20: mol_type = other RNA
cggcggcccgctgtcccccg

SEQ ID NO: 4711 - RNA, 20 nt, synthetic construct
  misc_feature 1..20: note = Synthetic
  source 1..20: mol_type = other RNA
cccggaggaaagtcggcggc

SEQ ID NO: 4712 - RNA, 20 nt, synthetic construct
  misc_feature 1..20: note = Synthetic
  source 1..20: mol_type = other RNA
gtcggcggccagggcggcgt

SEQ ID NO: 4713 - RNA, 20 nt, synthetic construct
  misc_feature 1..20: note = Synthetic
  source 1..20: mol_type = other RNA
ttttgcgcccgccggccctc

SEQ ID NO: 4714 - RNA, 20 nt, synthetic construct
  misc_feature 1..20: note = Synthetic
  source 1..20: mol_type = other RNA
gccggccctcgcggagccag

SEQ ID NO: 4715 - RNA, 20 nt, synthetic construct
  misc_feature 1..20: note = Synthetic
  source 1..20: mol_type = other RNA
gccggggacccccgccttgt

SEQ ID NO: 4716 - RNA, 20 nt, synthetic construct
  misc_feature 1..20: note = Synthetic
  source 1..20: mol_type = other RNA
caacccctacctcgccccag

SEQ ID NO: 4717 - RNA, 20 nt, synthetic construct
  misc_feature 1..20: note = Synthetic
  source 1..20: mol_type = other RNA
tcgccccagtcgggacgcaa

SEQ ID NO: 4718 - RNA, 20 nt, synthetic construct
  misc_feature 1..20: note = Synthetic
  source 1..20: mol_type = other RNA
cgggacgcaacagaagccga

SEQ ID NO: 4719 - RNA, 20 nt, synthetic construct
  misc_feature 1..20: note = Synthetic
  source 1..20: mol_type = other RNA
ccagcgccatacgtactata

SEQ ID NO: 4720 - RNA, 20 nt, synthetic construct
  misc_feature 1..20: note = Synthetic
  source 1..20: mol_type = other RNA
tacgtactatagcgaatgcg

SEQ ID NO: 4721 - RNA, 20 nt, synthetic construct
  misc_feature 1..20: note = Synthetic
  source 1..20: mol_type = other RNA
gaatttcgattcatcgcccc

SEQ ID NO: 4722 - RNA, 20 nt, synthetic construct
  misc_feature 1..20: note = Synthetic
  source 1..20: mol_type = other RNA
gattcatcgccccgcgggtg

SEQ ID NO: 4723 - RNA, 20 nt, synthetic construct
  misc_feature 1..20: note = Synthetic
  source 1..20: mol_type = other RNA
catcgccccgcgggtgctgg

SEQ ID NO: 4724 - RNA, 20 nt, synthetic construct
  misc_feature 1..20: note = Synthetic
  source 1..20: mol_type = other RNA
tcgccccgcgggtgctggac

SEQ ID NO: 4725 - RNA, 20 nt, synthetic construct
  misc_feature 1..20: note = Synthetic
  source 1..20: mol_type = other RNA
tgctggacgaggatgccccc

SEQ ID NO: 4726 - RNA, 20 nt, synthetic construct
  misc_feature 1..20: note = Synthetic
  source 1..20: mol_type = other RNA
tggacgaggatgcccccccg

SEQ ID NO: 4727 - RNA, 20 nt, synthetic construct
  misc_feature 1..20: note = Synthetic
  source 1..20: mol_type = other RNA
tgcccccccggagaagcgcg

SEQ ID NO: 4728 - RNA, 20 nt, synthetic construct
  misc_feature 1..20: note = Synthetic
  source 1..20: mol_type = other RNA
gcgcgcccccaaggtgtact

SEQ ID NO: 4729 - RNA, 20 nt, synthetic construct
  misc_feature 1..20: note = Synthetic
  source 1..20: mol_type = other RNA
caaggtgtactgcggggggg

SEQ ID NO: 4730 - RNA, 20 nt, synthetic construct
  misc_feature 1..20: note = Synthetic
  source 1..20: mol_type = other RNA
cgagcgcgacgtcctccgcg

SEQ ID NO: 4731 - RNA, 20 nt, synthetic construct
  misc_feature 1..20: note = Synthetic
  source 1..20: mol_type = other RNA
gcgacgtcctccgcgtcggg

SEQ ID NO: 4732 - RNA, 20 nt, synthetic construct
  misc_feature 1..20: note = Synthetic
  source 1..20: mol_type = other RNA
tggccgcggcgctcgcgcct

SEQ ID NO: 4733 - RNA, 20 nt, synthetic construct
  misc_feature 1..20: note = Synthetic
  source 1..20: mol_type = other RNA
gctcgcgcctgtggggcggc

SEQ ID NO: 4734 - RNA, 20 nt, synthetic construct
  misc_feature 1..20: note = Synthetic
  source 1..20: mol_type = other RNA
gcggcgtggaccacgccccg

SEQ ID NO: 4735 - RNA, 20 nt, synthetic construct
  misc_feature 1..20: note = Synthetic
  source 1..20: mol_type = other RNA
tctttcacgtgtacgacatc

SEQ ID NO: 4736 - RNA, 20 nt, synthetic construct
  misc_feature 1..20: note = Synthetic
  source 1..20: mol_type = other RNA
ttcacgtgtacgacatcctg

SEQ ID NO: 4737 - RNA, 20 nt, synthetic construct
  misc_feature 1..20: note = Synthetic
  source 1..20: mol_type = other RNA
tgtacgacatcctggagaac

SEQ ID NO: 4738 - RNA, 17 nt, synthetic construct
  misc_feature 1..17: note = Synthetic
  source 1..17: mol_type = other RNA
cggcggcccgctgtccc

SEQ ID NO: 4739 - RNA, 17 nt, synthetic construct
  misc_feature 1..17: note = Synthetic
  source 1..17: mol_type = other RNA
cggcccgctgtcccccg

SEQ ID NO: 4740 - RNA, 17 nt, synthetic construct
  misc_feature 1..17: note = Synthetic
  source 1..17: mol_type = other RNA
ggaggaaagtcggcggc

SEQ ID NO: 4741 - RNA, 17 nt, synthetic construct
  misc_feature 1..17: note = Synthetic
  source 1..17: mol_type = other RNA
ggcggccagggcggcgt

SEQ ID NO: 4742 - RNA, 17 nt, synthetic construct
  misc_feature 1..17: note = Synthetic
  source 1..17: mol_type = other RNA
tgcgcccgccggccctc

SEQ ID NO: 4743 - RNA, 17 nt, synthetic construct
  misc_feature 1..17: note = Synthetic
  source 1..17: mol_type = other RNA
ggccctcgcggagccag

SEQ ID NO: 4744 - RNA, 17 nt, synthetic construct
  misc_feature 1..17: note = Synthetic
  source 1..17: mol_type = other RNA
ggggacccccgccttgt

SEQ ID NO: 4745 - RNA, 17 nt, synthetic construct
  misc_feature 1..17: note = Synthetic
  source 1..17: mol_type = other RNA
cccctacctcgccccag

SEQ ID NO: 4746 - RNA, 17 nt, synthetic construct
  misc_feature 1..17: note = Synthetic
  source 1..17: mol_type = other RNA
ccccagtcgggacgcaa

SEQ ID NO: 4747 - RNA, 17 nt, synthetic construct
  misc_feature 1..17: note = Synthetic
  source 1..17: mol_type = other RNA
gacgcaacagaagccga

SEQ ID NO: 4748 - RNA, 17 nt, synthetic construct
  misc_feature 1..17: note = Synthetic
  source 1..17: mol_type = other RNA
gcgccatacgtactata

SEQ ID NO: 4749 - RNA, 17 nt, synthetic construct
  misc_feature 1..17: note = Synthetic
  source 1..17: mol_type = other RNA
gtactatagcgaatgcg

SEQ ID NO: 4750 - RNA, 17 nt, synthetic construct
  misc_feature 1..17: note = Synthetic
  source 1..17: mol_type = other RNA
tttcgattcatcgcccc

SEQ ID NO: 4751 - RNA, 17 nt, synthetic construct
  misc_feature 1..17: note = Synthetic
  source 1..17: mol_type = other RNA
tcatcgccccgcgggtg

SEQ ID NO: 4752 - RNA, 17 nt, synthetic construct
  misc_feature 1..17: note = Synthetic
  source 1..17: mol_type = other RNA
cgccccgcgggtgctgg

SEQ ID NO: 4753 - RNA, 17 nt, synthetic construct
  misc_feature 1..17: note = Synthetic
  source 1..17: mol_type = other RNA
ccccgcgggtgctggac

SEQ ID NO: 4754 - RNA, 17 nt, synthetic construct
  misc_feature 1..17: note = Synthetic
  source 1..17: mol_type = other RNA
tggacgaggatgccccc

SEQ ID NO: 4755 - RNA, 17 nt, synthetic construct
  misc_feature 1..17: note = Synthetic
  source 1..17: mol_type = other RNA
acgaggatgcccccccg

SEQ ID NO: 4756 - RNA, 17 nt, synthetic construct
  misc_feature 1..17: note = Synthetic
  source 1..17: mol_type = other RNA
ccccccggagaagcgcg

SEQ ID NO: 4757 - RNA, 17 nt, synthetic construct
  misc_feature 1..17: note = Synthetic
  source 1..17: mol_type = other RNA
cgcccccaaggtgtact

SEQ ID NO: 4758 - RNA, 17 nt, synthetic construct
  misc_feature 1..17: note = Synthetic
  source 1..17: mol_type = other RNA
ggtgtactgcggggggg

SEQ ID NO: 4759 - RNA, 17 nt, synthetic construct
  misc_feature 1..17: note = Synthetic
  source 1..17: mol_type = other RNA
gcgcgacgtcctccgcg

SEQ ID NO: 4760 - RNA, 17 nt, synthetic construct
  misc_feature 1..17: note = Synthetic
  source 1..17: mol_type = other RNA
acgtcctccgcgtcggg

SEQ ID NO: 4761 - RNA, 17 nt, synthetic construct
  misc_feature 1..17: note = Synthetic
  source 1..17: mol_type = other RNA
ccgcggcgctcgcgcct

SEQ ID NO: 4762 - RNA, 17 nt, synthetic construct
  misc_feature 1..17: note = Synthetic
  source 1..17: mol_type = other RNA
cgcgcctgtggggcggc

SEQ ID NO: 4763 - RNA, 17 nt, synthetic construct
  misc_feature 1..17: note = Synthetic
  source 1..17: mol_type = other RNA
gcgtggaccacgccccg

SEQ ID NO: 4764 - RNA, 17 nt, synthetic construct
  misc_feature 1..17: note = Synthetic
  source 1..17: mol_type = other RNA
ttcacgtgtacgacatc

SEQ ID NO: 4765 - RNA, 17 nt, synthetic construct
  misc_feature 1..17: note = Synthetic
  source 1..17: mol_type = other RNA
acgtgtacgacatcctg

SEQ ID NO: 4766 - RNA, 17 nt, synthetic construct
  misc_feature 1..17: note = Synthetic
  source 1..17: mol_type = other RNA
acgacatcctggagaac

SEQ ID NO: 4767 - RNA, 20 nt, synthetic construct
  misc_feature 1..20: note = Synthetic
  source 1..20: mol_type = other RNA
tacgcgtgctccacgttctc

SEQ ID NO: 4768 - RNA, 20 nt, synthetic construct
  misc_feature 1..20: note = Synthetic
  source 1..20: mol_type = other RNA
ttctccaggatgtcgtacac

SEQ ID NO: 4769 - RNA, 20 nt, synthetic construct
  misc_feature 1..20: note = Synthetic
  source 1..20: mol_type = other RNA
acacgtgaaagacggtgacg

SEQ ID NO: 4770 - RNA, 20 nt, synthetic construct
  misc_feature 1..20: note = Synthetic
  source 1..20: mol_type = other RNA
gaaagacggtgacggtgggg

SEQ ID NO: 4771 - RNA, 20 nt, synthetic construct
  misc_feature 1..20: note = Synthetic
  source 1..20: mol_type = other RNA
gacggtggggttgaaccccg

SEQ ID NO: 4772 - RNA, 20 nt, synthetic construct
  misc_feature 1..20: note = Synthetic
  source 1..20: mol_type = other RNA
gtccacgccgccccacaggc

SEQ ID NO: 4773 - RNA, 20 nt, synthetic construct
  misc_feature 1..20: note = Synthetic
  source 1..20: mol_type = other RNA
acaggcgcgagcgccgcggc

SEQ ID NO: 4774 - RNA, 20 nt, synthetic construct
  misc_feature 1..20: note = Synthetic
  source 1..20: mol_type = other RNA
cagaagccgcccgacccgac

SEQ ID NO: 4775 - RNA, 20 nt, synthetic construct
  misc_feature 1..20: note = Synthetic
  source 1..20: mol_type = other RNA
aagccgcccgacccgacgcg

SEQ ID NO: 4776 - RNA, 20 nt, synthetic construct
  misc_feature 1..20: note = Synthetic
  source 1..20: mol_type = other RNA
cgtcccccccgcagtacacc

SEQ ID NO: 4777 - RNA, 20 nt, synthetic construct
  misc_feature 1..20: note = Synthetic
  source 1..20: mol_type = other RNA
agtacaccttgggggcgcgc

SEQ ID NO: 4778 - RNA, 20 nt, synthetic construct
  misc_feature 1..20: note = Synthetic
  source 1..20: mol_type = other RNA
gtgcaccccggcgcgcttct

SEQ ID NO: 4779 - RNA, 20 nt, synthetic construct
  misc_feature 1..20: note = Synthetic
  source 1..20: mol_type = other RNA
ggcatcctcgtccagcaccc

SEQ ID NO: 4780 - RNA, 20 nt, synthetic construct
  misc_feature 1..20: note = Synthetic
  source 1..20: mol_type = other RNA
cgtccagcacccgcggggcg

SEQ ID NO: 4781 - RNA, 20 nt, synthetic construct
  misc_feature 1..20: note = Synthetic
  source 1..20: mol_type = other RNA
agcacccgcggggcgatgaa

SEQ ID NO: 4782 - RNA, 20 nt, synthetic construct
  misc_feature 1..20: note = Synthetic
  source 1..20: mol_type = other RNA
tcgctatagtacgtatggcg

SEQ ID NO: 4783 - RNA, 20 nt, synthetic construct
  misc_feature 1..20: note = Synthetic
  source 1..20: mol_type = other RNA
cggcttctgttgcgtcccga

SEQ ID NO: 4784 - RNA, 20 nt, synthetic construct
  misc_feature 1..20: note = Synthetic
  source 1..20: mol_type = other RNA
tctgttgcgtcccgactggg

SEQ ID NO: 4785 - RNA, 20 nt, synthetic construct
  misc_feature 1..20: note = Synthetic
  source 1..20: mol_type = other RNA
gcgtcccgactggggcgagg

SEQ ID NO: 4786 - RNA, 20 nt, synthetic construct
  misc_feature 1..20: note = Synthetic
  source 1..20: mol_type = other RNA
aaagttttgcctcaaacaag

SEQ ID NO: 4787 - RNA, 20 nt, synthetic construct
  misc_feature 1..20: note = Synthetic
  source 1..20: mol_type = other RNA
gggggtccccggctggctcc

SEQ ID NO: 4788 - RNA, 20 nt, synthetic construct
  misc_feature 1..20: note = Synthetic
  source 1..20: mol_type = other RNA
gggtccccggctggctccgc

SEQ ID NO: 4789 - RNA, 20 nt, synthetic construct
  misc_feature 1..20: note = Synthetic
  source 1..20: mol_type = other RNA
ggctggctccgcgagggccg

SEQ ID NO: 4790 - RNA, 20 nt, synthetic construct
  misc_feature 1..20: note = Synthetic
  source 1..20: mol_type = other RNA
ggccggcgggcgcaaaaaac

SEQ ID NO: 4791 - RNA, 20 nt, synthetic construct
  misc_feature 1..20: note = Synthetic
  source 1..20: mol_type = other RNA
ccctggccgccgactttcct

SEQ ID NO: 4792 - RNA, 20 nt, synthetic construct
  misc_feature 1..20: note = Synthetic
  source 1..20: mol_type = other RNA
cgactttcctccgggggaca

SEQ ID NO: 4793 - RNA, 20 nt, synthetic construct
  misc_feature 1..20: note = Synthetic
  source 1..20: mol_type = other RNA
gggacagcgggccgccgcca

SEQ ID NO: 4794 - RNA, 17 nt, synthetic construct
  misc_feature 1..17: note = Synthetic
  source 1..17: mol_type = other RNA
gcgtgctccacgttctc

SEQ ID NO: 4795 - RNA, 17 nt, synthetic construct
  misc_feature 1..17: note = Synthetic
  source 1..17: mol_type = other RNA
tccaggatgtcgtacac

SEQ ID NO: 4796 - RNA, 17 nt, synthetic construct
  misc_feature 1..17: note = Synthetic
  source 1..17: mol_type = other RNA
cgtgaaagacggtgacg

SEQ ID NO: 4797 - RNA, 17 nt, synthetic construct
  misc_feature 1..17: note = Synthetic
  source 1..17: mol_type = other RNA
agacggtgacggtgggg

SEQ ID NO: 4798 - RNA, 17 nt, synthetic construct
  misc_feature 1..17: note = Synthetic
  source 1..17: mol_type = other RNA
ggtggggttgaaccccg

SEQ ID NO: 4799 - RNA, 17 nt, synthetic construct
  misc_feature 1..17: note = Synthetic
  source 1..17: mol_type = other RNA
cacgccgccccacaggc

SEQ ID NO: 4800 - RNA, 17 nt, synthetic construct
  misc_feature 1..17: note = Synthetic
  source 1..17: mol_type = other RNA
ggcgcgagcgccgcggc

SEQ ID NO: 4801 - RNA, 17 nt, synthetic construct
  misc_feature 1..17: note = Synthetic
  source 1..17: mol_type = other RNA
aagccgcccgacccgac

SEQ ID NO: 4802 - RNA, 17 nt, synthetic construct
  misc_feature 1..17: note = Synthetic
  source 1..17: mol_type = other RNA
ccgcccgacccgacgcg

SEQ ID NO: 4803 - RNA, 17 nt, synthetic construct
  misc_feature 1..17: note = Synthetic
  source 1..17: mol_type = other RNA
cccccccgcagtacacc

SEQ ID NO: 4804 - RNA, 17 nt, synthetic construct
  misc_feature 1..17: note = Synthetic
  source 1..17: mol_type = other RNA
acaccttgggggcgcgc

SEQ ID NO: 4805 - RNA, 17 nt, synthetic construct
  misc_feature 1..17: note = Synthetic
  source 1..17: mol_type = other RNA
caccccggcgcgcttct

SEQ ID NO: 4806 - RNA, 17 nt, synthetic construct
  misc_feature 1..17: note = Synthetic
  source 1..17: mol_type = other RNA
atcctcgtccagcaccc

SEQ ID NO: 4807 - RNA, 17 nt, synthetic construct
  misc_feature 1..17: note = Synthetic
  source 1..17: mol_type = other RNA
ccagcacccgcggggcg

SEQ ID NO: 4808 - RNA, 17 nt, synthetic construct
  misc_feature 1..17: note = Synthetic
  source 1..17: mol_type = other RNA
acccgcggggcgatgaa

SEQ ID NO: 4809 - RNA, 17 nt, synthetic construct
  misc_feature 1..17: note = Synthetic
  source 1..17: mol_type = other RNA
ctatagtacgtatggcg

SEQ ID NO: 4810 - RNA, 17 nt, synthetic construct
  misc_feature 1..17: note = Synthetic
  source 1..17: mol_type = other RNA
cttctgttgcgtcccga

SEQ ID NO: 4811 - RNA, 17 nt, synthetic construct
  misc_feature 1..17: note = Synthetic
  source 1..17: mol_type = other RNA
gttgcgtcccgactggg

SEQ ID NO: 4812 - RNA, 17 nt, synthetic construct
  misc_feature 1..17: note = Synthetic
  source 1..17: mol_type = other RNA
tcccgactggggcgagg

SEQ ID NO: 4813 - RNA, 17 nt, synthetic construct
  misc_feature 1..17: note = Synthetic
  source 1..17: mol_type = other RNA
gttttgcctcaaacaag

SEQ ID NO: 4814 - RNA, 17 nt, synthetic construct
  misc_feature 1..17: note = Synthetic
  source 1..17: mol_type = other RNA
ggtccccggctggctcc

SEQ ID NO: 4815 - RNA, 17 nt, synthetic construct
  misc_feature 1..17: note = Synthetic
  source 1..17: mol_type = other RNA
tccccggctggctccgc

SEQ ID NO: 4816 - RNA, 17 nt, synthetic construct
  misc_feature 1..17: note = Synthetic
  source 1..17: mol_type = other RNA
tggctccgcgagggccg

SEQ ID NO: 4817 - RNA, 17 nt, synthetic construct
  misc_feature 1..17: note = Synthetic
  source 1..17: mol_type = other RNA
cggcgggcgcaaaaaac

SEQ ID NO: 4818 - RNA, 17 nt, synthetic construct
  misc_feature 1..17: note = Synthetic
  source 1..17: mol_type = other RNA
tggccgccgactttcct

SEQ ID NO: 4819 - RNA, 17 nt, synthetic construct
  misc_feature 1..17: note = Synthetic
  source 1..17: mol_type = other RNA
ctttcctccgggggaca

SEQ ID NO: 4820 - RNA, 17 nt, synthetic construct
  misc_feature 1..17: note = Synthetic
  source 1..17: mol_type = other RNA
acagcgggccgccgcca

SEQ ID NO: 4821 - RNA, 20 nt, synthetic construct
  misc_feature 1..20: note = Synthetic
  source 1..20: mol_type = other RNA
ttatggacgccatcacaccg

SEQ ID NO: 4822 - RNA, 20 nt, synthetic construct
  misc_feature 1..20: note = Synthetic
  source 1..20: mol_type = other RNA
tatggacgccatcacaccga

SEQ ID NO: 4823 - RNA, 20 nt, synthetic construct
  misc_feature 1..20: note = Synthetic
  source 1..20: mol_type = other RNA
atggacgccatcacaccgac

SEQ ID NO: 4824 - RNA, 20 nt, synthetic construct
  misc_feature 1..20: note = Synthetic
  source 1..20: mol_type = other RNA
cggggaccgtcatcacgctc

SEQ ID NO: 4825 - RNA, 20 nt, synthetic construct
  misc_feature 1..20: note = Synthetic
  source 1..20: mol_type = other RNA
tcacgctcctgggcctgact

SEQ ID NO: 4826 - RNA, 20 nt, synthetic construct
  misc_feature 1..20: note = Synthetic
  source 1..20: mol_type = other RNA
cacgctcctgggcctgactc

SEQ ID NO: 4827 - RNA, 20 nt, synthetic construct
  misc_feature 1..20: note = Synthetic
  source 1..20: mol_type = other RNA
ggcctgactccggaaggcca

SEQ ID NO: 4828 - RNA, 20 nt, synthetic construct
  misc_feature 1..20: note = Synthetic
  source 1..20: mol_type = other RNA
gcacgcggcagtacttttac

SEQ ID NO: 4829 - RNA, 20 nt, synthetic construct
  misc_feature 1..20: note = Synthetic
  source 1..20: mol_type = other RNA
ggcagtacttttacatgaac

SEQ ID NO: 4830 - RNA, 20 nt, synthetic construct
  misc_feature 1..20: note = Synthetic
  source 1..20: mol_type = other RNA
gcagtacttttacatgaaca

SEQ ID NO: 4831 - RNA, 20 nt, synthetic construct
  misc_feature 1..20: note = Synthetic
  source 1..20: mol_type = other RNA
agtacttttacatgaacaag

SEQ ID NO: 4832 - RNA, 20 nt, synthetic construct
  misc_feature 1..20: note = Synthetic
  source 1..20: mol_type = other RNA
gtacttttacatgaacaagg

SEQ ID NO: 4833 - RNA, 20 nt, synthetic construct
  misc_feature 1..20: note = Synthetic
  source 1..20: mol_type = other RNA
cacctacaatgccgcgcccc

SEQ ID NO: 4834 - RNA, 20 nt, synthetic construct
  misc_feature 1..20: note = Synthetic
  source 1..20: mol_type = other RNA
ccgcgccccacgagatctct

SEQ ID NO: 4835 - RNA, 20 nt, synthetic construct
  misc_feature 1..20: note = Synthetic
  source 1..20: mol_type = other RNA
gcgcatggccgcggccctgc

SEQ ID NO: 4836 - RNA, 20 nt, synthetic construct
  misc_feature 1..20: note = Synthetic
  source 1..20: mol_type = other RNA
ccgcggccctgcgcgagtcc

SEQ ID NO: 4837 - RNA, 20 nt, synthetic construct
  misc_feature 1..20: note = Synthetic
  source 1..20: mol_type = other RNA
cgtcgttccgcggcatctcc

SEQ ID NO: 4838 - RNA, 20 nt, synthetic construct
  misc_feature 1..20: note = Synthetic
  source 1..20: mol_type = other RNA
cggcatctccgcggaccact

SEQ ID NO: 4839 - RNA, 20 nt, synthetic construct
  misc_feature 1..20: note = Synthetic
  source 1..20: mol_type = other RNA
tctccgcggaccacttcgag

SEQ ID NO: 4840 - RNA, 20 nt, synthetic construct
  misc_feature 1..20: note = Synthetic
  source 1..20: mol_type = other RNA
ctccgcggaccacttcgagg

SEQ ID NO: 4841 - RNA, 20 nt, synthetic construct
  misc_feature 1..20: note = Synthetic
  source 1..20: mol_type = other RNA
accacttcgaggcggaggtg

SEQ ID NO: 4842 - RNA, 20 nt, synthetic construct
  misc_feature 1..20: note = Synthetic
  source 1..20: mol_type = other RNA
ccacttcgaggcggaggtgg

SEQ ID NO: 4843 - RNA, 20 nt, synthetic construct
  misc_feature 1..20: note = Synthetic
  source 1..20: mol_type = other RNA
gcgcaccgacgtgtactact

SEQ ID NO: 4844 - RNA, 20 nt, synthetic construct
  misc_feature 1..20: note = Synthetic
  source 1..20: mol_type = other RNA
ctgttttaccgcgtctacgt

SEQ ID NO: 4845 - RNA, 20 nt, synthetic construct
  misc_feature 1..20: note = Synthetic
  source 1..20: mol_type = other RNA
ttaccgcgtctacgtccgaa

SEQ ID NO: 4846 - RNA, 20 nt, synthetic construct
  misc_feature 1..20: note = Synthetic
  source 1..20: mol_type = other RNA
acaacttctgcccggccatc

SEQ ID NO: 4847 - RNA, 20 nt, synthetic construct
  misc_feature 1..20: note = Synthetic
  source 1..20: mol_type = other RNA
ctgcccggccatcaagaagt

SEQ ID NO: 4848 - RNA, 20 nt, synthetic construct
  misc_feature 1..20: note = Synthetic
  source 1..20: mol_type = other RNA
gcccggccatcaagaagtac

SEQ ID NO: 4849 - RNA, 20 nt, synthetic construct
  misc_feature 1..20: note = Synthetic
  source 1..20: mol_type = other RNA
ggccatcaagaagtacgagg

SEQ ID NO: 4850 - RNA, 20 nt, synthetic construct
  misc_feature 1..20: note = Synthetic
  source 1..20: mol_type = other RNA
gccatcaagaagtacgaggg

SEQ ID NO: 4851 - RNA, 20 nt, synthetic construct
  misc_feature 1..20: note = Synthetic
  source 1..20: mol_type = other RNA
acgccaccacccggttcatc

SEQ ID NO: 4852 - RNA, 20 nt, synthetic construct
  misc_feature 1..20: note = Synthetic
  source 1..20: mol_type = other RNA
ccggttcatcctggacaacc

SEQ ID NO: 4853 - RNA, 20 nt, synthetic construct
  misc_feature 1..20: note = Synthetic
  source 1..20: mol_type = other RNA
tcggctggtaccgtctcaaa

SEQ ID NO: 4854 - RNA, 20 nt, synthetic construct
  misc_feature 1..20: note = Synthetic
  source 1..20: mol_type = other RNA
tggtaccgtctcaaaccggg

SEQ ID NO: 4855 - RNA, 20 nt, synthetic construct
  misc_feature 1..20: note = Synthetic
  source 1..20: mol_type = other RNA
ggtaccgtctcaaaccgggc

SEQ ID NO: 4856 - RNA, 20 nt, synthetic construct
  misc_feature 1..20: note = Synthetic
  source 1..20: mol_type = other RNA
gccggcggccccgatggcct

SEQ ID NO: 4857 - RNA, 20 nt, synthetic construct
  misc_feature 1..20: note = Synthetic
  source 1..20: mol_type = other RNA
ccggcggccccgatggcctt

SEQ ID NO: 4858 - RNA, 20 nt, synthetic construct
  misc_feature 1..20: note = Synthetic
  source 1..20: mol_type = other RNA
cttcgggacatccagcgacg

SEQ ID NO: 4859 - RNA, 20 nt, synthetic construct
  misc_feature 1..20: note = Synthetic
  source 1..20: mol_type = other RNA
acgtcgagtttaactgtacg

SEQ ID NO: 4860 - RNA, 20 nt, synthetic construct
  misc_feature 1..20: note = Synthetic
  source 1..20: mol_type = other RNA
tacggcggacaacctggcca

SEQ ID NO: 4861 - RNA, 20 nt, synthetic construct
  misc_feature 1..20: note = Synthetic
  source 1..20: mol_type = other RNA
cggcggacaacctggccatc

SEQ ID NO: 4862 - RNA, 20 nt, synthetic construct
  misc_feature 1..20: note = Synthetic
  source 1..20: mol_type = other RNA
ggcggacaacctggccatcg

SEQ ID NO: 4863 - RNA, 20 nt, synthetic construct
  misc_feature 1..20: note = Synthetic
  source 1..20: mol_type = other RNA
gcggacaacctggccatcga

SEQ ID NO: 4864 - RNA, 20 nt, synthetic construct
  misc_feature 1..20: note = Synthetic
  source 1..20: mol_type = other RNA
cggacaacctggccatcgag

SEQ ID NO: 4865 - RNA, 20 nt, synthetic construct
  misc_feature 1..20: note = Synthetic
  source 1..20: mol_type = other RNA
acctggccatcgaggggggc

SEQ ID NO: 4866 - RNA, 20 nt, synthetic construct
  misc_feature 1..20: note = Synthetic
  source 1..20: mol_type = other RNA
caagctcatgtgcttcgata

SEQ ID NO: 4867 - RNA, 20 nt, synthetic construct
  misc_feature 1..20: note = Synthetic
  source 1..20: mol_type = other RNA
gcttcgatatcgaatgcaag

SEQ ID NO: 4868 - RNA, 20 nt, synthetic construct
  misc_feature 1..20: note = Synthetic
  source 1..20: mol_type = other RNA
cttcgatatcgaatgcaagg

SEQ ID NO: 4869 - RNA, 20 nt, synthetic construct
  misc_feature 1..20: note = Synthetic
  source 1..20: mol_type = other RNA
ttcgatatcgaatgcaaggc

SEQ ID NO: 4870 - RNA, 20 nt, synthetic construct
  misc_feature 1..20: note = Synthetic
  source 1..20: mol_type = other RNA
tcgatatcgaatgcaaggcg

SEQ ID NO: 4871 - RNA, 20 nt, synthetic construct
  misc_feature 1..20: note = Synthetic
  source 1..20: mol_type = other RNA
cgatatcgaatgcaaggcgg

SEQ ID NO: 4872 - RNA, 20 nt, synthetic construct
  misc_feature 1..20: note = Synthetic
  source 1..20: mol_type = other RNA
gatatcgaatgcaaggcggg

SEQ ID NO: 4873 - RNA, 20 nt, synthetic construct
  misc_feature 1..20: note = Synthetic
  source 1..20: mol_type = other RNA
atatcgaatgcaaggcgggg

SEQ ID NO: 4874 - RNA, 20 nt, synthetic construct
  misc_feature 1..20: note = Synthetic
  source 1..20: mol_type = other RNA
tatcgaatgcaaggcggggg

SEQ ID NO: 4875 - RNA, 20 nt, synthetic construct
  misc_feature 1..20: note = Synthetic
  source 1..20: mol_type = other RNA
tcgaatgcaaggcggggggg

SEQ ID NO: 4876 - RNA, 20 nt, synthetic construct
  misc_feature 1..20: note = Synthetic
  source 1..20: mol_type = other RNA
atgcaaggcggggggggagg

SEQ ID NO: 4877 - RNA, 20 nt, synthetic construct
  misc_feature 1..20: note = Synthetic
  source 1..20: mol_type = other RNA
cgagctggcctttccggtgg

SEQ ID NO: 4878 - RNA, 20 nt, synthetic construct
  misc_feature 1..20: note = Synthetic
  source 1..20: mol_type = other RNA
cctttccggtggccgggcac

SEQ ID NO: 4879 - RNA, 20 nt, synthetic construct
  misc_feature 1..20: note = Synthetic
  source 1..20: mol_type = other RNA
ctttccggtggccgggcacc

SEQ ID NO: 4880 - RNA, 20 nt, synthetic construct
  misc_feature 1..20: note = Synthetic
  source 1..20: mol_type = other RNA
ttccggtggccgggcacccg

SEQ ID NO: 4881 - RNA, 20 nt, synthetic construct
  misc_feature 1..20: note = Synthetic
  source 1..20: mol_type = other RNA
acgacctgtccaccaccgcc

SEQ ID NO: 4882 - RNA, 20 nt, synthetic construct
  misc_feature 1..20: note = Synthetic
  source 1..20: mol_type = other RNA
cgacctgtccaccaccgccc

SEQ ID NO: 4883 - RNA, 20 nt, synthetic construct
  misc_feature 1..20: note = Synthetic
  source 1..20: mol_type = other RNA
gctcggttcctgcgacctcc

SEQ ID NO: 4884 - RNA, 20 nt, synthetic construct
  misc_feature 1..20: note = Synthetic
  source 1..20: mol_type = other RNA
gcgacctccccgaatcccac

SEQ ID NO: 4885 - RNA, 20 nt, synthetic construct
  misc_feature 1..20: note = Synthetic
  source 1..20: mol_type = other RNA
cctccccgaatcccacctga

SEQ ID NO: 4886 - RNA, 20 nt, synthetic construct
  misc_feature 1..20: note = Synthetic
  source 1..20: mol_type = other RNA
cacctgaacgagctggcggc

SEQ ID NO: 4887 - RNA, 20 nt, synthetic construct
  misc_feature 1..20: note = Synthetic
  source 1..20: mol_type = other RNA
acctgaacgagctggcggcc

SEQ ID NO: 4888 - RNA, 20 nt, synthetic construct
  misc_feature 1..20: note = Synthetic
  source 1..20: mol_type = other RNA
gcctgcccacgcccgtggtt

SEQ ID NO: 4889 - RNA, 20 nt, synthetic construct
  misc_feature 1..20: note = Synthetic
  source 1..20: mol_type = other RNA
cctgcccacgcccgtggttc

SEQ ID NO: 4890 - RNA, 20 nt, synthetic construct
  misc_feature 1..20: note = Synthetic
  source 1..20: mol_type = other RNA
cgtggttctggaattcgaca

SEQ ID NO: 4891 - RNA, 20 nt, synthetic construct
  misc_feature 1..20: note = Synthetic
  source 1..20: mol_type = other RNA
tctggaattcgacagcgaat

SEQ ID NO: 4892 - RNA, 20 nt, synthetic construct
  misc_feature 1..20: note = Synthetic
  source 1..20: mol_type = other RNA
tgttggccttcatgaccctt

SEQ ID NO: 4893 - RNA, 20 nt, synthetic construct
  misc_feature 1..20: note = Synthetic
  source 1..20: mol_type = other RNA
ccttgtgaaacagtacggcc

SEQ ID NO: 4894 - RNA, 20 nt, synthetic construct
  misc_feature 1..20: note = Synthetic
  source 1..20: mol_type = other RNA
gtacggccccgagttcgtga

SEQ ID NO: 4895 - RNA, 20 nt, synthetic construct
  misc_feature 1..20: note = Synthetic
  source 1..20: mol_type = other RNA
ccttcttgctggccaagctg

SEQ ID NO: 4896 - RNA, 20 nt, synthetic construct
  misc_feature 1..20: note = Synthetic
  source 1..20: mol_type = other RNA
cggacatttacaaggtcccc

SEQ ID NO: 4897 - RNA, 20 nt, synthetic construct
  misc_feature 1..20: note = Synthetic
  source 1..20: mol_type = other RNA
catttacaaggtccccctgg

SEQ ID NO: 4898 - RNA, 20 nt, synthetic construct
  misc_feature 1..20: note = Synthetic
  source 1..20: mol_type = other RNA
ccctggacgggtacggccgc

SEQ ID NO: 4899 - RNA, 20 nt, synthetic construct
  misc_feature 1..20: note = Synthetic
  source 1..20: mol_type = other RNA
gggtacggccgcatgaacgg

SEQ ID NO: 4900 - RNA, 20 nt, synthetic construct
  misc_feature 1..20: note = Synthetic
  source 1..20: mol_type = other RNA
ggtacggccgcatgaacggc

SEQ ID NO: 4901 - RNA, 20 nt, synthetic construct
  misc_feature 1..20: note = Synthetic
  source 1..20: mol_type = other RNA
ggccggggcgtgtttcgcgt

SEQ ID NO: 4902 - RNA, 20 nt, synthetic construct
  misc_feature 1..20: note = Synthetic
  source 1..20: mol_type = other RNA
gccggggcgtgtttcgcgtg

SEQ ID NO: 4903 - RNA, 20 nt, synthetic construct
  misc_feature 1..20: note = Synthetic
  source 1..20: mol_type = other RNA
ttcgcgtgtgggacataggc

SEQ ID NO: 4904 - RNA, 20 nt, synthetic construct
  misc_feature 1..20: note = Synthetic
  source 1..20: mol_type = other RNA
acataggccagagccacttc

SEQ ID NO: 4905 - RNA, 20 nt, synthetic construct
  misc_feature 1..20: note = Synthetic
  source 1..20: mol_type = other RNA
agaagcgcagcaagataaag

SEQ ID NO: 4906 - RNA, 20 nt, synthetic construct
  misc_feature 1..20: note = Synthetic
  source 1..20: mol_type = other RNA
agataaaggtgaacggcatg

SEQ ID NO: 4907 - RNA, 20 nt, synthetic construct
  misc_feature 1..20: note = Synthetic
  source 1..20: mol_type = other RNA
catggtgaacatcgacatgt

SEQ ID NO: 4908 - RNA, 20 nt, synthetic construct
  misc_feature 1..20: note = Synthetic
  source 1..20: mol_type = other RNA
atggtgaacatcgacatgta

SEQ ID NO: 4909 - RNA, 20 nt, synthetic construct
  misc_feature 1..20: note = Synthetic
  source 1..20: mol_type = other RNA
taaccgacaagatcaagctc

SEQ ID NO: 4910 - RNA, 20 nt, synthetic construct
  misc_feature 1..20: note = Synthetic
  source 1..20: mol_type = other RNA
ctacaagctcaacgccgtgg

SEQ ID NO: 4911 - RNA, 20 nt, synthetic construct
  misc_feature 1..20: note = Synthetic
  source 1..20: mol_type = other RNA
acgccgtggccgaagccgtc

SEQ ID NO: 4912 - RNA, 20 nt, synthetic construct
  misc_feature 1..20: note = Synthetic
  source 1..20: mol_type = other RNA
ccgtggccgaagccgtcctg

SEQ ID NO: 4913 - RNA, 20 nt, synthetic construct
  misc_feature 1..20: note = Synthetic
  source 1..20: mol_type = other RNA
ccgaagccgtcctgaaggac

SEQ ID NO: 4914 - RNA, 20 nt, synthetic construct
  misc_feature 1..20: note = Synthetic
  source 1..20: mol_type = other RNA
aagccgtcctgaaggacaag

SEQ ID NO: 4915 - RNA, 20 nt, synthetic construct
  misc_feature 1..20: note = Synthetic
  source 1..20: mol_type = other RNA
ccgtcctgaaggacaagaag

SEQ ID NO: 4916 - RNA, 20 nt, synthetic construct
  misc_feature 1..20: note = Synthetic
  source 1..20: mol_type = other RNA
tgaaggacaagaagaaggac

SEQ ID NO: 4917 - RNA, 20 nt, synthetic construct
  misc_feature 1..20: note = Synthetic
  source 1..20: mol_type = other RNA
catccccgcctactacgccg

SEQ ID NO: 4918 - RNA, 20 nt, synthetic construct
  misc_feature 1..20: note = Synthetic
  source 1..20: mol_type = other RNA
cgccgccgggcccgcgcaac

SEQ ID NO: 4919 - RNA, 20 nt, synthetic construct
  misc_feature 1..20: note = Synthetic
  source 1..20: mol_type = other RNA
cgcgcaacgcggggtgatcg

SEQ ID NO: 4920 - RNA, 20 nt, synthetic construct
  misc_feature 1..20: note = Synthetic
  source 1..20: mol_type = other RNA
tgatcggcgagtactgcata

SEQ ID NO: 4921 - RNA, 20 nt, synthetic construct
  misc_feature 1..20: note = Synthetic
  source 1..20: mol_type = other RNA
gcatacaggattccctgctg

SEQ ID NO: 4922 - RNA, 20 nt, synthetic construct
  misc_feature 1..20: note = Synthetic
  source 1..20: mol_type = other RNA
tttttaagtttttgccccat

SEQ ID NO: 4923 - RNA, 20 nt, synthetic construct
  misc_feature 1..20: note = Synthetic
  source 1..20: mol_type = other RNA
ttttaagtttttgccccatc

SEQ ID NO: 4924 - RNA, 20 nt, synthetic construct
  misc_feature 1..20: note = Synthetic
  source 1..20: mol_type = other RNA
tctcggccgtcgcgcgcttg

SEQ ID NO: 4925 - RNA, 20 nt, synthetic construct
  misc_feature 1..20: note = Synthetic
  source 1..20: mol_type = other RNA
gcctgctgcgcctggccgac

SEQ ID NO: 4926 - RNA, 20 nt, synthetic construct
  misc_feature 1..20: note = Synthetic
  source 1..20: mol_type = other RNA
tgctgcgcctggccgaccag

SEQ ID NO: 4927 - RNA, 20 nt, synthetic construct
  misc_feature 1..20: note = Synthetic
  source 1..20: mol_type = other RNA
accagaagggctttattctg

SEQ ID NO: 4928 - RNA, 20 nt, synthetic construct
  misc_feature 1..20: note = Synthetic
  source 1..20: mol_type = other RNA
gctttattctgccggacacc

SEQ ID NO: 4929 - RNA, 20 nt, synthetic construct
  misc_feature 1..20: note = Synthetic
  source 1..20: mol_type = other RNA
ctttattctgccggacaccc

SEQ ID NO: 4930 - RNA, 20 nt, synthetic construct
  misc_feature 1..20: note = Synthetic
  source 1..20: mol_type = other RNA
ccggacacccaggggcgatt

SEQ ID NO: 4931 - RNA, 20 nt, synthetic construct
  misc_feature 1..20: note = Synthetic
  source 1..20: mol_type = other RNA
cggacacccaggggcgattt

SEQ ID NO: 4932 - RNA, 20 nt, synthetic construct
  misc_feature 1..20: note = Synthetic
  source 1..20: mol_type = other RNA
ccaggggcgatttaggggcg

SEQ ID NO: 4933 - RNA, 20 nt, synthetic construct
  misc_feature 1..20: note = Synthetic
  source 1..20: mol_type = other RNA
caggggcgatttaggggcgc

SEQ ID NO: 4934 - RNA, 20 nt, synthetic construct
  misc_feature 1..20: note = Synthetic
  source 1..20: mol_type = other RNA
aggggcgatttaggggcgcc

SEQ ID NO: 4935 - RNA, 20 nt, synthetic construct
  misc_feature 1..20: note = Synthetic
  source 1..20: mol_type = other RNA
ggggcgatttaggggcgccg

SEQ ID NO: 4936 - RNA, 20 nt, synthetic construct
  misc_feature 1..20: note = Synthetic
  source 1..20: mol_type = other RNA
gggcgatttaggggcgccgg

SEQ ID NO: 4937 - RNA, 20 nt, synthetic construct
  misc_feature 1..20: note = Synthetic
  source 1..20: mol_type = other RNA
ggcgatttaggggcgccggg

SEQ ID NO: 4938 - RNA, 20 nt, synthetic construct
  misc_feature 1..20: note = Synthetic
  source 1..20: mol_type = other RNA
gcgatttaggggcgccgggg

SEQ ID NO: 4939 - RNA, 20 nt, synthetic construct
  misc_feature 1..20: note = Synthetic
  source 1..20: mol_type = other RNA
cccaagcgtccggccgcagc

SEQ ID NO: 4940 - RNA, 20 nt, synthetic construct
  misc_feature 1..20: note = Synthetic
  source 1..20: mol_type = other RNA
ccaagcgtccggccgcagcc

SEQ ID NO: 4941 - RNA, 20 nt, synthetic construct
  misc_feature 1..20: note = Synthetic
  source 1..20: mol_type = other RNA
caagcgtccggccgcagccc

SEQ ID NO: 4942 - RNA, 20 nt, synthetic construct
  misc_feature 1..20: note = Synthetic
  source 1..20: mol_type = other RNA
agcgtccggccgcagcccgg

SEQ ID NO: 4943 - RNA, 20 nt, synthetic construct
  misc_feature 1..20: note = Synthetic
  source 1..20: mol_type = other RNA
tccggccgcagcccgggagg

SEQ ID NO: 4944 - RNA, 20 nt, synthetic construct
  misc_feature 1..20: note = Synthetic
  source 1..20: mol_type = other RNA
cggccgcagcccgggaggac

SEQ ID NO: 4945 - RNA, 20 nt, synthetic construct
  misc_feature 1..20: note = Synthetic
  source 1..20: mol_type = other RNA
ccgggaggacgaggagcggc

SEQ ID NO: 4946 - RNA, 20 nt, synthetic construct
  misc_feature 1..20: note = Synthetic
  source 1..20: mol_type = other RNA
gggaggacgaggagcggcca

SEQ ID NO: 4947 - RNA, 20 nt, synthetic construct
  misc_feature 1..20: note = Synthetic
  source 1..20: mol_type = other RNA
aggacgaggagcggccagag

SEQ ID NO: 4948 - RNA, 20 nt, synthetic construct
  misc_feature 1..20: note = Synthetic
  source 1..20: mol_type = other RNA
acgaggagcggccagaggag

SEQ ID NO: 4949 - RNA, 20 nt, synthetic construct
  misc_feature 1..20: note = Synthetic
  source 1..20: mol_type = other RNA
agcggccagaggaggagggg

SEQ ID NO: 4950 - RNA, 20 nt, synthetic construct
  misc_feature 1..20: note = Synthetic
  source 1..20: mol_type = other RNA
gccagaggaggagggggagg

SEQ ID NO: 4951 - RNA, 20 nt, synthetic construct
  misc_feature 1..20: note = Synthetic
  source 1..20: mol_type = other RNA
cagaggaggagggggaggac

SEQ ID NO: 4952 - RNA, 20 nt, synthetic construct
  misc_feature 1..20: note = Synthetic
  source 1..20: mol_type = other RNA
ggaggagggggaggacgagg

SEQ ID NO: 4953 - RNA, 20 nt, synthetic construct
  misc_feature 1..20: note = Synthetic
  source 1..20: mol_type = other RNA
gggggaggacgaggacgaac

SEQ ID NO: 4954 - RNA, 20 nt, synthetic construct
  misc_feature 1..20: note = Synthetic
  source 1..20: mol_type = other RNA
gggaggacgaggacgaacgc

SEQ ID NO: 4955 - RNA, 20 nt, synthetic construct
  misc_feature 1..20: note = Synthetic
  source 1..20: mol_type = other RNA
aggacgaggacgaacgcgag

SEQ ID NO: 4956 - RNA, 20 nt, synthetic construct
  misc_feature 1..20: note = Synthetic
  source 1..20: mol_type = other RNA
cgaggacgaacgcgaggagg

SEQ ID NO: 4957 - RNA, 20 nt, synthetic construct
  misc_feature 1..20: note = Synthetic
  source 1..20: mol_type = other RNA
cgaacgcgaggagggcgggg

SEQ ID NO: 4958 - RNA, 20 nt, synthetic construct
  misc_feature 1..20: note = Synthetic
  source 1..20: mol_type = other RNA
cgcgaggagggcgggggcga

SEQ ID NO: 4959 - RNA, 20 nt, synthetic construct
  misc_feature 1..20: note = Synthetic
  source 1..20: mol_type = other RNA
agggcgggggcgagcgggag

SEQ ID NO: 4960 - RNA, 20 nt, synthetic construct
  misc_feature 1..20: note = Synthetic
  source 1..20: mol_type = other RNA
gcgggggcgagcgggagccg

SEQ ID NO: 4961 - RNA, 20 nt, synthetic construct
  misc_feature 1..20: note = Synthetic
  source 1..20: mol_type = other RNA
gagcgggagccggagggcgc

SEQ ID NO: 4962 - RNA, 20 nt, synthetic construct
  misc_feature 1..20: note = Synthetic
  source 1..20: mol_type = other RNA
gggagaccgccggcaggcac

SEQ ID NO: 4963 - RNA, 20 nt, synthetic construct
  misc_feature 1..20: note = Synthetic
  source 1..20: mol_type = other RNA
ccggcaggcacgtggggtac

SEQ ID NO: 4964 - RNA, 20 nt, synthetic construct
  misc_feature 1..20: note = Synthetic
  source 1..20: mol_type = other RNA
cggcaggcacgtggggtacc

SEQ ID NO: 4965 - RNA, 20 nt, synthetic construct
  misc_feature 1..20: note = Synthetic
  source 1..20: mol_type = other RNA
ggcaggcacgtggggtacca

SEQ ID NO: 4966 - RNA, 20 nt, synthetic construct
  misc_feature 1..20: note = Synthetic
  source 1..20: mol_type = other RNA
cacgtggggtaccagggggc

SEQ ID NO: 4967 - RNA, 20 nt, synthetic construct
  misc_feature 1..20: note = Synthetic
  source 1..20: mol_type = other RNA
cagggtccttgaccccactt

SEQ ID NO: 4968 - RNA, 20 nt, synthetic construct
  misc_feature 1..20: note = Synthetic
  source 1..20: mol_type = other RNA
accccacttccgggtttcac

SEQ ID NO: 4969 - RNA, 20 nt, synthetic construct
  misc_feature 1..20: note = Synthetic
  source 1..20: mol_type = other RNA
tgtgcttcagcacgctctcc

SEQ ID NO: 4970 - RNA, 20 nt, synthetic construct
  misc_feature 1..20: note = Synthetic
  source 1..20: mol_type = other RNA
tgcttcagcacgctctccct

SEQ ID NO: 4971 - RNA, 20 nt, synthetic construct
  misc_feature 1..20: note = Synthetic
  source 1..20: mol_type = other RNA
gggccgacgcagtggcgcac

SEQ ID NO: 4972 - RNA, 20 nt, synthetic construct
  misc_feature 1..20: note = Synthetic
  source 1..20: mol_type = other RNA
ggccgacgcagtggcgcacc

SEQ ID NO: 4973 - RNA, 20 nt, synthetic construct
  misc_feature 1..20: note = Synthetic
  source 1..20: mol_type = other RNA
acgcagtggcgcacctggag

SEQ ID NO: 4974 - RNA, 20 nt, synthetic construct
  misc_feature 1..20: note = Synthetic
  source 1..20: mol_type = other RNA
tggcgcacctggaggcgggc

SEQ ID NO: 4975 - RNA, 20 nt, synthetic construct
  misc_feature 1..20: note = Synthetic
  source 1..20: mol_type = other RNA
tggaggcgggcaaggactac

SEQ ID NO: 4976 - RNA, 20 nt, synthetic construct
  misc_feature 1..20: note = Synthetic
  source 1..20: mol_type = other RNA
ggaggcgggcaaggactacc

SEQ ID NO: 4977 - RNA, 20 nt, synthetic construct
  misc_feature 1..20: note = Synthetic
  source 1..20: mol_type = other RNA
gggcaaggactacctggaga

SEQ ID NO: 4978 - RNA, 20 nt, synthetic construct
  misc_feature 1..20: note = Synthetic
  source 1..20: mol_type = other RNA
aggactacctggagatcgag

SEQ ID NO: 4979 - RNA, 20 nt, synthetic construct
  misc_feature 1..20: note = Synthetic
  source 1..20: mol_type = other RNA
ggactacctggagatcgagg

SEQ ID NO: 4980 - RNA, 20 nt, synthetic construct
  misc_feature 1..20: note = Synthetic
  source 1..20: mol_type = other RNA
gactacctggagatcgaggt

SEQ ID NO: 4981 - RNA, 20 nt, synthetic construct
  misc_feature 1..20: note = Synthetic
  source 1..20: mol_type = other RNA
actacctggagatcgaggtg

SEQ ID NO: 4982 - RNA, 20 nt, synthetic construct
  misc_feature 1..20: note = Synthetic
  source 1..20: mol_type = other RNA
ctacctggagatcgaggtgg

SEQ ID NO: 4983 - RNA, 20 nt, synthetic construct
  misc_feature 1..20: note = Synthetic
  source 1..20: mol_type = other RNA
ttcttcgtcaaggctcacgt

SEQ ID NO: 4984 - RNA, 20 nt, synthetic construct
  misc_feature 1..20: note = Synthetic
  source 1..20: mol_type = other RNA
cttcgtcaaggctcacgtgc

SEQ ID NO: 4985 - RNA, 20 nt, synthetic construct
  misc_feature 1..20: note = Synthetic
  source 1..20: mol_type = other RNA
tcgtcaaggctcacgtgcga

SEQ ID NO: 4986 - RNA, 20 nt, synthetic construct
  misc_feature 1..20: note = Synthetic
  source 1..20: mol_type = other RNA
agcctcctcagcatcctcct

SEQ ID NO: 4987 - RNA, 20 nt, synthetic construct
  misc_feature 1..20: note = Synthetic
  source 1..20: mol_type = other RNA
gcctcctcagcatcctcctg

SEQ ID NO: 4988 - RNA, 20 nt, synthetic construct
  misc_feature 1..20: note = Synthetic
  source 1..20: mol_type = other RNA
ctgcgggactggctcgccat

SEQ ID NO: 4989 - RNA, 20 nt, synthetic construct
  misc_feature 1..20: note = Synthetic
  source 1..20: mol_type = other RNA
atgcgaaagcagatccgctc

SEQ ID NO: 4990 - RNA, 20 nt, synthetic construct
  misc_feature 1..20: note = Synthetic
  source 1..20: mol_type = other RNA
agatccgctcgcggattccc

SEQ ID NO: 4991 - RNA, 20 nt, synthetic construct
  misc_feature 1..20: note = Synthetic
  source 1..20: mol_type = other RNA
gcggattccccagagcagcc

SEQ ID NO: 4992 - RNA, 20 nt, synthetic construct
  misc_feature 1..20: note = Synthetic
  source 1..20: mol_type = other RNA
ggattccccagagcagcccc

SEQ ID NO: 4993 - RNA, 20 nt, synthetic construct
  misc_feature 1..20: note = Synthetic
  source 1..20: mol_type = other RNA
gattccccagagcagccccg

SEQ ID NO: 4994 - RNA, 20 nt, synthetic construct
  misc_feature 1..20: note = Synthetic
  source 1..20: mol_type = other RNA
gccccgaggaggccgtgctc

SEQ ID NO: 4995 - RNA, 20 nt, synthetic construct
  misc_feature 1..20: note = Synthetic
  source 1..20: mol_type = other RNA
ggtcgtgtgtaactcggtgt

SEQ ID NO: 4996 - RNA, 20 nt, synthetic construct
  misc_feature 1..20: note = Synthetic
  source 1..20: mol_type = other RNA
gtaactcggtgtacgggttc

SEQ ID NO: 4997 - RNA, 20 nt, synthetic construct
  misc_feature 1..20: note = Synthetic
  source 1..20: mol_type = other RNA
taactcggtgtacgggttca

SEQ ID NO: 4998 - RNA, 20 nt, synthetic construct
  misc_feature 1..20: note = Synthetic
  source 1..20: mol_type = other RNA
aactcggtgtacgggttcac

SEQ ID NO: 4999 - RNA, 20 nt, synthetic construct
  misc_feature 1..20: note = Synthetic
  source 1..20: mol_type = other RNA
cgggttcacgggagtgcagc

SEQ ID NO: 5000 - RNA, 20 nt, synthetic construct
  misc_feature 1..20: note = Synthetic
  source 1..20: mol_type = other RNA
gacggtgacgaccatcggcc

SEQ ID NO: 5001 - RNA, 20 nt, synthetic construct
  misc_feature 1..20: note = Synthetic
  source 1..20: mol_type = other RNA
cgagatgctgctcgcgaccc

SEQ ID NO: 5002 - RNA, 20 nt, synthetic construct
  misc_feature 1..20: note = Synthetic
  source 1..20: mol_type = other RNA
cgcgagtacgtccacgcgcg

SEQ ID NO: 5003 - RNA, 20 nt, synthetic construct
  misc_feature 1..20: note = Synthetic
  source 1..20: mol_type = other RNA
ccacgcgcgctgggcggcct

SEQ ID NO: 5004 - RNA, 20 nt, synthetic construct
  misc_feature 1..20: note = Synthetic
  source 1..20: mol_type = other RNA
aacagctcctggccgatttc

SEQ ID NO: 5005 - RNA, 20 nt, synthetic construct
  misc_feature 1..20: note = Synthetic
  source 1..20: mol_type = other RNA
acagctcctggccgatttcc

SEQ ID NO: 5006 - RNA, 20 nt, synthetic construct
  misc_feature 1..20: note = Synthetic
  source 1..20: mol_type = other RNA
ggcggccgacatgcgcgccc

SEQ ID NO: 5007 - RNA, 20 nt, synthetic construct
  misc_feature 1..20: note = Synthetic
  source 1..20: mol_type = other RNA
ctattccatgcgcatcatct

SEQ ID NO: 5008 - RNA, 20 nt, synthetic construct
  misc_feature 1..20: note = Synthetic
  source 1..20: mol_type = other RNA
tattccatgcgcatcatcta

SEQ ID NO: 5009 - RNA, 20 nt, synthetic construct
  misc_feature 1..20: note = Synthetic
  source 1..20: mol_type = other RNA
attccatgcgcatcatctac

SEQ ID NO: 5010 - RNA, 20 nt, synthetic construct
  misc_feature 1..20: note = Synthetic
  source 1..20: mol_type = other RNA
tgcgcatcatctacggggac

SEQ ID NO: 5011 - RNA, 20 nt, synthetic construct
  misc_feature 1..20: note = Synthetic
  source 1..20: mol_type = other RNA
gtgccgcggcctcacggccg

SEQ ID NO: 5012 - RNA, 20 nt, synthetic construct
  misc_feature 1..20: note = Synthetic
  source 1..20: mol_type = other RNA
cggccgccgggctgacggcc

SEQ ID NO: 5013 - RNA, 20 nt, synthetic construct
  misc_feature 1..20: note = Synthetic
  source 1..20: mol_type = other RNA
cggccgtgggcgacaagatg

SEQ ID NO: 5014 - RNA, 20 nt, synthetic construct
  misc_feature 1..20: note = Synthetic
  source 1..20: mol_type = other RNA
gtttctgccccccatcaaac

SEQ ID NO: 5015 - RNA, 20 nt, synthetic construct
  misc_feature 1..20: note = Synthetic
  source 1..20: mol_type = other RNA
gccccccatcaaactcgagt

SEQ ID NO: 5016 - RNA, 20 nt, synthetic construct
  misc_feature 1..20: note = Synthetic
  source 1..20: mol_type = other RNA
ccaagctgctgctgatcgcc

SEQ ID NO: 5017 - RNA, 20 nt, synthetic construct
  misc_feature 1..20: note = Synthetic
  source 1..20: mol_type = other RNA
aaagtacatcggcgtcatct

SEQ ID NO: 5018 - RNA, 20 nt, synthetic construct
  misc_feature 1..20: note = Synthetic
  source 1..20: mol_type = other RNA
aagtacatcggcgtcatcta

SEQ ID NO: 5019 - RNA, 20 nt, synthetic construct
  misc_feature 1..20: note = Synthetic
  source 1..20: mol_type = other RNA
agtacatcggcgtcatctac

SEQ ID NO: 5020 - RNA, 20 nt, synthetic construct
  misc_feature 1..20: note = Synthetic
  source 1..20: mol_type = other RNA
acgggggtaagatgctcatc

SEQ ID NO: 5021 - RNA, 20 nt, synthetic construct
  misc_feature 1..20: note = Synthetic
  source 1..20: mol_type = other RNA
gtaagatgctcatcaagggc

SEQ ID NO: 5022 - RNA, 20 nt, synthetic construct
  misc_feature 1..20: note = Synthetic
  source 1..20: mol_type = other RNA
gcgtttatcaaccgcacctc

SEQ ID NO: 5023 - RNA, 20 nt, synthetic construct
  misc_feature 1..20: note = Synthetic
  source 1..20: mol_type = other RNA
gttttacgacgataccgtct

SEQ ID NO: 5024 - RNA, 20 nt, synthetic construct
  misc_feature 1..20: note = Synthetic
  source 1..20: mol_type = other RNA
ttttacgacgataccgtctc

SEQ ID NO: 5025 - RNA, 20 nt, synthetic construct
  misc_feature 1..20: note = Synthetic
  source 1..20: mol_type = other RNA
cggagcggccgccgcgttag

SEQ ID NO: 5026 - RNA, 20 nt, synthetic construct
  misc_feature 1..20: note = Synthetic
  source 1..20: mol_type = other RNA
ccgcgttagccgagcgcccc

SEQ ID NO: 5027 - RNA, 20 nt, synthetic construct
  misc_feature 1..20: note = Synthetic
  source 1..20: mol_type = other RNA
cgcgttagccgagcgccccg

SEQ ID NO: 5028 - RNA, 20 nt, synthetic construct
  misc_feature 1..20: note = Synthetic
  source 1..20: mol_type = other RNA
cgttagccgagcgccccgcg

SEQ ID NO: 5029 - RNA, 20 nt, synthetic construct
  misc_feature 1..20: note = Synthetic
  source 1..20: mol_type = other RNA
gttagccgagcgccccgcgg

SEQ ID NO: 5030 - RNA, 20 nt, synthetic construct
  misc_feature 1..20: note = Synthetic
  source 1..20: mol_type = other RNA
gtggctggcgcgacccctgc

SEQ ID NO: 5031 - RNA, 20 nt, synthetic construct
  misc_feature 1..20: note = Synthetic
  source 1..20: mol_type = other RNA
ggctggcgcgacccctgccc

SEQ ID NO: 5032 - RNA, 20 nt, synthetic construct
  misc_feature 1..20: note = Synthetic
  source 1..20: mol_type = other RNA
gctggcgcgacccctgcccg

SEQ ID NO: 5033 - RNA, 20 nt, synthetic construct
  misc_feature 1..20: note = Synthetic
  source 1..20: mol_type = other RNA
gcccgagggactgcaggcgt

SEQ ID NO: 5034 - RNA, 20 nt, synthetic construct
  misc_feature 1..20: note = Synthetic
  source 1..20: mol_type = other RNA
cccgagggactgcaggcgtt

SEQ ID NO: 5035 - RNA, 20 nt, synthetic construct
  misc_feature 1..20: note = Synthetic
  source 1..20: mol_type = other RNA
cccatcggcgcatcaccgac

SEQ ID NO: 5036 - RNA, 20 nt, synthetic construct
  misc_feature 1..20: note = Synthetic
  source 1..20: mol_type = other RNA
ccatcggcgcatcaccgacc

SEQ ID NO: 5037 - RNA, 20 nt, synthetic construct
  misc_feature 1..20: note = Synthetic
  source 1..20: mol_type = other RNA
atcggcgcatcaccgacccg

SEQ ID NO: 5038 - RNA, 20 nt, synthetic construct
  misc_feature 1..20: note = Synthetic
  source 1..20: mol_type = other RNA
cggcgcatcaccgacccgga

SEQ ID NO: 5039 - RNA, 20 nt, synthetic construct
  misc_feature 1..20: note = Synthetic
  source 1..20: mol_type = other RNA
ggcgcatcaccgacccggag

SEQ ID NO: 5040 - RNA, 20 nt, synthetic construct
  misc_feature 1..20: note = Synthetic
  source 1..20: mol_type = other RNA
ccgacccggagagggacatc

SEQ ID NO: 5041 - RNA, 20 nt, synthetic construct
  misc_feature 1..20: note = Synthetic
  source 1..20: mol_type = other RNA
ccaggactttgtcctcaccg

SEQ ID NO: 5042 - RNA, 20 nt, synthetic construct
  misc_feature 1..20: note = Synthetic
  source 1..20: mol_type = other RNA
actttgtcctcaccgccgaa

SEQ ID NO: 5043 - RNA, 20 nt, synthetic construct
  misc_feature 1..20: note = Synthetic
  source 1..20: mol_type = other RNA
gcgcgcaggtcccgtccatc

SEQ ID NO: 5044 - RNA, 20 nt, synthetic construct
  misc_feature 1..20: note = Synthetic
  source 1..20: mol_type = other RNA
caggtcccgtccatcaagga

SEQ ID NO: 5045 - RNA, 20 nt, synthetic construct
  misc_feature 1..20: note = Synthetic
  source 1..20: mol_type = other RNA
cgtgatcgtggcccagaccc

SEQ ID NO: 5046 - RNA, 20 nt, synthetic construct
  misc_feature 1..20: note = Synthetic
  source 1..20: mol_type = other RNA
cgtggcccagacccgcgagg

SEQ ID NO: 5047 - RNA, 20 nt, synthetic construct
  misc_feature 1..20: note = Synthetic
  source 1..20: mol_type = other RNA
tggcccagacccgcgaggta

SEQ ID NO: 5048 - RNA, 20 nt, synthetic construct
  misc_feature 1..20: note = Synthetic
  source 1..20: mol_type = other RNA
ggcccagacccgcgaggtag

SEQ ID NO: 5049 - RNA, 20 nt, synthetic construct
  misc_feature 1..20: note = Synthetic
  source 1..20: mol_type = other RNA
cgcgcggctggccgccctcc

SEQ ID NO: 5050 - RNA, 20 nt, synthetic construct
  misc_feature 1..20: note = Synthetic
  source 1..20: mol_type = other RNA
cgagctagacgccgccgccc

SEQ ID NO: 5051 - RNA, 20 nt, synthetic construct
  misc_feature 1..20: note = Synthetic
  source 1..20: mol_type = other RNA
gagctagacgccgccgcccc

SEQ ID NO: 5052 - RNA, 20 nt, synthetic construct
  misc_feature 1..20: note = Synthetic
  source 1..20: mol_type = other RNA
agctagacgccgccgcccca

SEQ ID NO: 5053 - RNA, 20 nt, synthetic construct
  misc_feature 1..20: note = Synthetic
  source 1..20: mol_type = other RNA
agacgccgccgccccagggg

SEQ ID NO: 5054 - RNA, 20 nt, synthetic construct
  misc_feature 1..20: note = Synthetic
  source 1..20: mol_type = other RNA
ccctccccggccaagcgccc

SEQ ID NO: 5055 - RNA, 20 nt, synthetic construct
  misc_feature 1..20: note = Synthetic
  source 1..20: mol_type = other RNA
cctccccggccaagcgcccc

SEQ ID NO: 5056 - RNA, 20 nt, synthetic construct
  misc_feature 1..20: note = Synthetic
  source 1..20: mol_type = other RNA
ctccccggccaagcgccccc

SEQ ID NO: 5057 - RNA, 20 nt, synthetic construct
  misc_feature 1..20: note = Synthetic
  source 1..20: mol_type = other RNA
cgccgtcgcctgccgacccc

SEQ ID NO: 5058 - RNA, 20 nt, synthetic construct
  misc_feature 1..20: note = Synthetic
  source 1..20: mol_type = other RNA
gccgtcgcctgccgaccccc

SEQ ID NO: 5059 - RNA, 20 nt, synthetic construct
  misc_feature 1..20: note = Synthetic
  source 1..20: mol_type = other RNA
ccgtcgcctgccgacccccc

SEQ ID NO: 5060 - RNA, 20 nt, synthetic construct
  misc_feature 1..20: note = Synthetic
  source 1..20: mol_type = other RNA
gccccgcaagctgctggtgt

SEQ ID NO: 5061 - RNA, 20 nt, synthetic construct
  misc_feature 1..20: note = Synthetic
  source 1..20: mol_type = other RNA
gctgctggtgtccgagctgg

SEQ ID NO: 5062 - RNA, 20 nt, synthetic construct
  misc_feature 1..20: note = Synthetic
  source 1..20: mol_type = other RNA
tgctggtgtccgagctggcc

SEQ ID NO: 5063 - RNA, 20 nt, synthetic construct
  misc_feature 1..20: note = Synthetic
  source 1..20: mol_type = other RNA
ccattgcccacggcgtcgcc

SEQ ID NO: 5064 - RNA, 20 nt, synthetic construct
  misc_feature 1..20: note = Synthetic
  source 1..20: mol_type = other RNA
cccacggcgtcgccctgaac

SEQ ID NO: 5065 - RNA, 20 nt, synthetic construct
  misc_feature 1..20: note = Synthetic
  source 1..20: mol_type = other RNA
actattacttctcccacctg

SEQ ID NO: 5066 - RNA, 20 nt, synthetic construct
  misc_feature 1..20: note = Synthetic
  source 1..20: mol_type = other RNA
ctattacttctcccacctgt

SEQ ID NO: 5067 - RNA, 20 nt, synthetic construct
  misc_feature 1..20: note = Synthetic
  source 1..20: mol_type = other RNA
tattacttctcccacctgtt

SEQ ID NO: 5068 - RNA, 20 nt, synthetic construct
  misc_feature 1..20: note = Synthetic
  source 1..20: mol_type = other RNA
cgtgacattcaaggccctgt

SEQ ID NO: 5069 - RNA, 20 nt, synthetic construct
  misc_feature 1..20: note = Synthetic
  source 1..20: mol_type = other RNA
gtgacattcaaggccctgtt

SEQ ID NO: 5070 - RNA, 20 nt, synthetic construct
  misc_feature 1..20: note = Synthetic
  source 1..20: mol_type = other RNA
tgacattcaaggccctgttt

SEQ ID NO: 5071 - RNA, 20 nt, synthetic construct
  misc_feature 1..20: note = Synthetic
  source 1..20: mol_type = other RNA
tgggaataacgccaagatca

SEQ ID NO: 5072 - RNA, 20 nt, synthetic construct
  misc_feature 1..20: note = Synthetic
  source 1..20: mol_type = other RNA
ggaataacgccaagatcacc

SEQ ID NO: 5073 - RNA, 20 nt, synthetic construct
  misc_feature 1..20: note = Synthetic
  source 1..20: mol_type = other RNA
tctgttaaaaaggtttattc

SEQ ID NO: 5074 - RNA, 20 nt, synthetic construct
  misc_feature 1..20: note = Synthetic
  source 1..20: mol_type = other RNA
ttcccgaagtgtggcacccc

SEQ ID NO: 5075 - RNA, 20 nt, synthetic construct
  misc_feature 1..20: note = Synthetic
  source 1..20: mol_type = other RNA
gacgacgtggccgcgcggct

SEQ ID NO: 5076 - RNA, 20 nt, synthetic construct
  misc_feature 1..20: note = Synthetic
  source 1..20: mol_type = other RNA
ggccgcgcggctccggaccg

SEQ ID NO: 5077 - RNA, 20 nt, synthetic construct
  misc_feature 1..20: note = Synthetic
  source 1..20: mol_type = other RNA
gcggctccggaccgcagggt

SEQ ID NO: 5078 - RNA, 20 nt, synthetic construct
  misc_feature 1..20: note = Synthetic
  source 1..20: mol_type = other RNA
cggctccggaccgcagggtt

SEQ ID NO: 5079 - RNA, 20 nt, synthetic construct
  misc_feature 1..20: note = Synthetic
  source 1..20: mol_type = other RNA
ggaccgcagggttcggggcg

SEQ ID NO: 5080 - RNA, 20 nt, synthetic construct
  misc_feature 1..20: note = Synthetic
  source 1..20: mol_type = other RNA
cggtgggtgccggcgctacg

SEQ ID NO: 5081 - RNA, 20 nt, synthetic construct
  misc_feature 1..20: note = Synthetic
  source 1..20: mol_type = other RNA
ggtgggtgccggcgctacgg

SEQ ID NO: 5082 - RNA, 20 nt, synthetic construct
  misc_feature 1..20: note = Synthetic
  source 1..20: mol_type = other RNA
tgggtgccggcgctacggcg

SEQ ID NO: 5083 - RNA, 20 nt, synthetic construct
  misc_feature 1..20: note = Synthetic
  source 1..20: mol_type = other RNA
gggtgccggcgctacggcgg

SEQ ID NO: 5084 - RNA, 20 nt, synthetic construct
  misc_feature 1..20: note = Synthetic
  source 1..20: mol_type = other RNA
gctacggcggaggaaactcg

SEQ ID NO: 5085 - RNA, 20 nt, synthetic construct
  misc_feature 1..20: note = Synthetic
  source 1..20: mol_type = other RNA
gaaactcgtcgaatgttgca

SEQ ID NO: 5086 - RNA, 17 nt, synthetic construct
  misc_feature 1..17: note = Synthetic
  source 1..17: mol_type = other RNA
tggacgccatcacaccg

SEQ ID NO: 5087 - RNA, 17 nt, synthetic construct
  misc_feature 1..17: note = Synthetic
  source 1..17: mol_type = other RNA
ggacgccatcacaccga

SEQ ID NO: 5088 - RNA, 17 nt, synthetic construct
  misc_feature 1..17: note = Synthetic
  source 1..17: mol_type = other RNA
gacgccatcacaccgac

SEQ ID NO: 5089 - RNA, 17 nt, synthetic construct
  misc_feature 1..17: note = Synthetic
  source 1..17: mol_type = other RNA
ggaccgtcatcacgctc

SEQ ID NO: 5090 - RNA, 17 nt, synthetic construct
  misc_feature 1..17: note = Synthetic
  source 1..17: mol_type = other RNA
cgctcctgggcctgact

SEQ ID NO: 5091 - RNA, 17 nt, synthetic construct
  misc_feature 1..17: note = Synthetic
  source 1..17: mol_type = other RNA
gctcctgggcctgactc

SEQ ID NO: 5092 - RNA, 17 nt, synthetic construct
  misc_feature 1..17: note = Synthetic
  source 1..17: mol_type = other RNA
ctgactccggaaggcca

SEQ ID NO: 5093 - RNA, 17 nt, synthetic construct
  misc_feature 1..17: note = Synthetic
  source 1..17: mol_type = other RNA
cgcggcagtacttttac

SEQ ID NO: 5094 - RNA, 17 nt, synthetic construct
  misc_feature 1..17: note = Synthetic
  source 1..17: mol_type = other RNA
agtacttttacatgaac

SEQ ID NO: 5095 - RNA, 17 nt, synthetic construct
  misc_feature 1..17: note = Synthetic
  source 1..17: mol_type = other RNA
gtacttttacatgaaca

SEQ ID NO: 5096 - RNA, 17 nt, synthetic construct
  misc_feature 1..17: note = Synthetic
  source 1..17: mol_type = other RNA
acttttacatgaacaag

SEQ ID NO: 5097 - RNA, 17 nt, synthetic construct
  misc_feature 1..17: note = Synthetic
  source 1..17: mol_type = other RNA
cttttacatgaacaagg

SEQ ID NO: 5098 - RNA, 17 nt, synthetic construct
  misc_feature 1..17: note = Synthetic
  source 1..17: mol_type = other RNA
ctacaatgccgcgcccc

SEQ ID NO: 5099 - RNA, 17 nt, synthetic construct
  misc_feature 1..17: note = Synthetic
  source 1..17: mol_type = other RNA
cgccccacgagatctct

SEQ ID NO: 5100 - RNA, 17 nt, synthetic construct
  misc_feature 1..17: note = Synthetic
  source 1..17: mol_type = other RNA
catggccgcggccctgc

SEQ ID NO: 5101 - RNA, 17 nt, synthetic construct
  misc_feature 1..17: note = Synthetic
  source 1..17: mol_type = other RNA
cggccctgcgcgagtcc

SEQ ID NO: 5102 - RNA, 17 nt, synthetic construct
  misc_feature 1..17: note = Synthetic
  source 1..17: mol_type = other RNA
cgttccgcggcatctcc

SEQ ID NO: 5103 - RNA, 17 nt, synthetic construct
  misc_feature 1..17: note = Synthetic
  source 1..17: mol_type = other RNA
catctccgcggaccact

SEQ ID NO: 5104 - RNA, 17 nt, synthetic construct
  misc_feature 1..17: note = Synthetic
  source 1..17: mol_type = other RNA
ccgcggaccacttcgag

SEQ ID NO: 5105 - RNA, 17 nt, synthetic construct
  misc_feature 1..17: note = Synthetic
  source 1..17: mol_type = other RNA
cgcggaccacttcgagg

SEQ ID NO: 5106 - RNA, 17 nt, synthetic construct
  misc_feature 1..17: note = Synthetic
  source 1..17: mol_type = other RNA
acttcgaggcggaggtg

SEQ ID NO: 5107 - RNA, 17 nt, synthetic construct
  misc_feature 1..17: note = Synthetic
  source 1..17: mol_type = other RNA
cttcgaggcggaggtgg

SEQ ID NO: 5108 - RNA, 17 nt, synthetic construct
  misc_feature 1..17: note = Synthetic
  source 1..17: mol_type = other RNA
caccgacgtgtactact

SEQ ID NO: 5109 - RNA, 17 nt, synthetic construct
  misc_feature 1..17: note = Synthetic
  source 1..17: mol_type = other RNA
ttttaccgcgtctacgt

SEQ ID NO: 5110 - RNA, 17 nt, synthetic construct
  misc_feature 1..17: note = Synthetic
  source 1..17: mol_type = other RNA
ccgcgtctacgtccgaa

SEQ ID NO: 5111 - RNA, 17 nt, synthetic construct
  misc_feature 1..17: note = Synthetic
  source 1..17: mol_type = other RNA
acttctgcccggccatc

SEQ ID NO: 5112 - RNA, 17 nt, synthetic construct
  misc_feature 1..17: note = Synthetic
  source 1..17: mol_type = other RNA
cccggccatcaagaagt

SEQ ID NO: 5113 - RNA, 17 nt, synthetic construct
  misc_feature 1..17: note = Synthetic
  source 1..17: mol_type = other RNA
cggccatcaagaagtac

SEQ ID NO: 5114 - RNA, 17 nt, synthetic construct
  misc_feature 1..17: note = Synthetic
  source 1..17: mol_type = other RNA
catcaagaagtacgagg

SEQ ID NO: 5115 - RNA, 17 nt, synthetic construct
  misc_feature 1..17: note = Synthetic
  source 1..17: mol_type = other RNA
atcaagaagtacgaggg

SEQ ID NO: 5116 - RNA, 17 nt, synthetic construct
  misc_feature 1..17: note = Synthetic
  source 1..17: mol_type = other RNA
ccaccacccggttcatc

SEQ ID NO: 5117 - RNA, 17 nt, synthetic construct
  misc_feature 1..17: note = Synthetic
  source 1..17: mol_type = other RNA
gttcatcctggacaacc

SEQ ID NO: 5118 - RNA, 17 nt, synthetic construct
  misc_feature 1..17: note = Synthetic
  source 1..17: mol_type = other RNA
gctggtaccgtctcaaa

SEQ ID NO: 5119 - RNA, 17 nt, synthetic construct
  misc_feature 1..17: note = Synthetic
  source 1..17: mol_type = other RNA
taccgtctcaaaccggg

SEQ ID NO: 5120 - RNA, 17 nt, synthetic construct
  misc_feature 1..17: note = Synthetic
  source 1..17: mol_type = other RNA
accgtctcaaaccgggc

SEQ ID NO: 5121 - RNA, 17 nt, synthetic construct
  misc_feature 1..17: note = Synthetic
  source 1..17: mol_type = other RNA
ggcggccccgatggcct

SEQ ID NO: 5122 - RNA, 17 nt, synthetic construct
  misc_feature 1..17: note = Synthetic
  source 1..17: mol_type = other RNA
gcggccccgatggcctt

SEQ ID NO: 5123 - RNA, 17 nt, synthetic construct
  misc_feature 1..17: note = Synthetic
  source 1..17: mol_type = other RNA
cgggacatccagcgacg

SEQ ID NO: 5124 - RNA, 17 nt, synthetic construct
  misc_feature 1..17: note = Synthetic
  source 1..17: mol_type = other RNA
tcgagtttaactgtacg

SEQ ID NO: 5125 - RNA, 17 nt, synthetic construct
  misc_feature 1..17: note = Synthetic
  source 1..17: mol_type = other RNA
ggcggacaacctggcca

SEQ ID NO: 5126 - RNA, 17 nt, synthetic construct
  misc_feature 1..17: note = Synthetic
  source 1..17: mol_type = other RNA
cggacaacctggccatc

SEQ ID NO: 5127 - RNA, 17 nt, synthetic construct
  misc_feature 1..17: note = Synthetic
  source 1..17: mol_type = other RNA
ggacaacctggccatcg

SEQ ID NO: 5128 - RNA, 17 nt, synthetic construct
  misc_feature 1..17: note = Synthetic
  source 1..17: mol_type = other RNA
gacaacctggccatcga

SEQ ID NO: 5129 - RNA, 17 nt, synthetic construct
  misc_feature 1..17: note = Synthetic
  source 1..17: mol_type = other RNA
acaacctggccatcgag

SEQ ID NO: 5130 - RNA, 17 nt, synthetic construct
  misc_feature 1..17: note = Synthetic
  source 1..17: mol_type = other RNA
tggccatcgaggggggc

SEQ ID NO: 5131 - RNA, 17 nt, synthetic construct
  misc_feature 1..17: note = Synthetic
  source 1..17: mol_type = other RNA
gctcatgtgcttcgata

SEQ ID NO: 5132 - RNA, 17 nt, synthetic construct
  misc_feature 1..17: note = Synthetic
  source 1..17: mol_type = other RNA
tcgatatcgaatgcaag

SEQ ID NO: 5133 - RNA, 17 nt, synthetic construct
  misc_feature 1..17: note = Synthetic
  source 1..17: mol_type = other RNA
cgatatcgaatgcaagg

SEQ ID NO: 5134 - RNA, 17 nt, synthetic construct
  misc_feature 1..17: note = Synthetic
  source 1..17: mol_type = other RNA
gatatcgaatgcaaggc

SEQ ID NO: 5135 - RNA, 17 nt, synthetic construct
  misc_feature 1..17: note = Synthetic
  source 1..17: mol_type = other RNA
atatcgaatgcaaggcg

SEQ ID NO: 5136 - RNA, 17 nt, synthetic construct
  misc_feature 1..17: note = Synthetic
  source 1..17: mol_type = other RNA
tatcgaatgcaaggcgg

SEQ ID NO: 5137 - RNA, 17 nt, synthetic construct
  misc_feature 1..17: note = Synthetic
  source 1..17: mol_type = other RNA
atcgaatgcaaggcggg

SEQ ID NO: 5138 - RNA, 17 nt, synthetic construct
  misc_feature 1..17: note = Synthetic
  source 1..17: mol_type = other RNA
tcgaatgcaaggcgggg

SEQ ID NO: 5139 - RNA, 17 nt, synthetic construct
  misc_feature 1..17: note = Synthetic
  source 1..17: mol_type = other RNA
cgaatgcaaggcggggg

SEQ ID NO: 5140 - RNA, 17 nt, synthetic construct
  misc_feature 1..17: note = Synthetic
  source 1..17: mol_type = other RNA
aatgcaaggcggggggg

SEQ ID NO: 5141 - RNA, 17 nt, synthetic construct
  misc_feature 1..17: note = Synthetic
  source 1..17: mol_type = other RNA
caaggcggggggggagg

SEQ ID NO: 5142 - RNA, 17 nt, synthetic construct
  misc_feature 1..17: note = Synthetic
  source 1..17: mol_type = other RNA
gctggcctttccggtgg

SEQ ID NO: 5143 - RNA, 17 nt, synthetic construct
  misc_feature 1..17: note = Synthetic
  source 1..17: mol_type = other RNA
ttccggtggccgggcac

SEQ ID NO: 5144 - RNA, 17 nt, synthetic construct
  misc_feature 1..17: note = Synthetic
  source 1..17: mol_type = other RNA
tccggtggccgggcacc

SEQ ID NO: 5145 - RNA, 17 nt, synthetic construct
  misc_feature 1..17: note = Synthetic
  source 1..17: mol_type = other RNA
cggtggccgggcacccg

SEQ ID NO: 5146 - RNA, 17 nt, synthetic construct
  misc_feature 1..17: note = Synthetic
  source 1..17: mol_type = other RNA
acctgtccaccaccgcc

SEQ ID NO: 5147 - RNA, 17 nt, synthetic construct
  misc_feature 1..17: note = Synthetic
  source 1..17: mol_type = other RNA
cctgtccaccaccgccc

SEQ ID NO: 5148 - RNA, 17 nt, synthetic construct
  misc_feature 1..17: note = Synthetic
  source 1..17: mol_type = other RNA
cggttcctgcgacctcc

SEQ ID NO: 5149 - RNA, 17 nt, synthetic construct
  misc_feature 1..17: note = Synthetic
  source 1..17: mol_type = other RNA
acctccccgaatcccac

SEQ ID NO: 5150 - RNA, 17 nt, synthetic construct
  misc_feature 1..17: note = Synthetic
  source 1..17: mol_type = other RNA
ccccgaatcccacctga

SEQ ID NO: 5151 - RNA, 17 nt, synthetic construct
  misc_feature 1..17: note = Synthetic
  source 1..17: mol_type = other RNA
ctgaacgagctggcggc

SEQ ID NO: 5152 - RNA, 17 nt, synthetic construct
  misc_feature 1..17: note = Synthetic
  source 1..17: mol_type = other RNA
tgaacgagctggcggcc

SEQ ID NO: 5153 - RNA, 17 nt, synthetic construct
  misc_feature 1..17: note = Synthetic
  source 1..17: mol_type = other RNA
tgcccacgcccgtggtt

SEQ ID NO: 5154 - RNA, 17 nt, synthetic construct
  misc_feature 1..17: note = Synthetic
  source 1..17: mol_type = other RNA
gcccacgcccgtggttc

SEQ ID NO: 5155 - RNA, 17 nt, synthetic construct
  misc_feature 1..17: note = Synthetic
  source 1..17: mol_type = other RNA
ggttctggaattcgaca

SEQ ID NO: 5156 - RNA, 17 nt, synthetic construct
  misc_feature 1..17: note = Synthetic
  source 1..17: mol_type = other RNA
ggaattcgacagcgaat

SEQ ID NO: 5157 - RNA, 17 nt, synthetic construct
  misc_feature 1..17: note = Synthetic
  source 1..17: mol_type = other RNA
tggccttcatgaccctt

SEQ ID NO: 5158 - RNA, 17 nt, synthetic construct
  misc_feature 1..17: note = Synthetic
  source 1..17: mol_type = other RNA
tgtgaaacagtacggcc

SEQ ID NO: 5159 - RNA, 17 nt, synthetic construct
  misc_feature 1..17: note = Synthetic
  source 1..17: mol_type = other RNA
cggccccgagttcgtga

SEQ ID NO: 5160 - RNA, 17 nt, synthetic construct
  misc_feature 1..17: note = Synthetic
  source 1..17: mol_type = other RNA
tcttgctggccaagctg

SEQ ID NO: 5161 - RNA, 17 nt, synthetic construct
  misc_feature 1..17: note = Synthetic
  source 1..17: mol_type = other RNA
acatttacaaggtcccc

SEQ ID NO: 5162 - RNA, 17 nt, synthetic construct
  misc_feature 1..17: note = Synthetic
  source 1..17: mol_type = other RNA
ttacaaggtccccctgg

SEQ ID NO: 5163 - RNA, 17 nt, synthetic construct
  misc_feature 1..17: note = Synthetic
  source 1..17: mol_type = other RNA
tggacgggtacggccgc

SEQ ID NO: 5164 - RNA, 17 nt, synthetic construct
  misc_feature 1..17: note = Synthetic
  source 1..17: mol_type = other RNA
tacggccgcatgaacgg

SEQ ID NO: 5165 - RNA, 17 nt, synthetic construct
  misc_feature 1..17: note = Synthetic
  source 1..17: mol_type = other RNA
acggccgcatgaacggc

SEQ ID NO: 5166 - RNA, 17 nt, synthetic construct
  misc_feature 1..17: note = Synthetic
  source 1..17: mol_type = other RNA
cggggcgtgtttcgcgt

SEQ ID NO: 5167 - RNA, 17 nt, synthetic construct
  misc_feature 1..17: note = Synthetic
  source 1..17: mol_type = other RNA
ggggcgtgtttcgcgtg

SEQ ID NO: 5168 - RNA, 17 nt, synthetic construct
  misc_feature 1..17: note = Synthetic
  source 1..17: mol_type = other RNA
gcgtgtgggacataggc

SEQ ID NO: 5169 - RNA, 17 nt, synthetic construct
  misc_feature 1..17: note = Synthetic
  source 1..17: mol_type = other RNA
taggccagagccacttc

SEQ ID NO: 5170 - RNA, 17 nt, synthetic construct
  misc_feature 1..17: note = Synthetic
  source 1..17: mol_type = other RNA
agcgcagcaagataaag

SEQ ID NO: 5171 - RNA, 17 nt, synthetic construct
  misc_feature 1..17: note = Synthetic
  source 1..17: mol_type = other RNA
taaaggtgaacggcatg

SEQ ID NO: 5172 - RNA, 17 nt, synthetic construct
  misc_feature 1..17: note = Synthetic
  source 1..17: mol_type = other RNA
ggtgaacatcgacatgt

SEQ ID NO: 5173 - RNA, 17 nt, synthetic construct
  misc_feature 1..17: note = Synthetic
  source 1..17: mol_type = other RNA
gtgaacatcgacatgta

SEQ ID NO: 5174 - RNA, 17 nt, synthetic construct
  misc_feature 1..17: note = Synthetic
  source 1..17: mol_type = other RNA
ccgacaagatcaagctc

SEQ ID NO: 5175 - RNA, 17 nt, synthetic construct
  misc_feature 1..17: note = Synthetic
  source 1..17: mol_type = other RNA
caagctcaacgccgtgg

SEQ ID NO: 5176 - RNA, 17 nt, synthetic construct
  misc_feature 1..17: note = Synthetic
  source 1..17: mol_type = other RNA
ccgtggccgaagccgtc

SEQ ID NO: 5177 - RNA, 17 nt, synthetic construct
  misc_feature 1..17: note = Synthetic
  source 1..17: mol_type = other RNA
tggccgaagccgtcctg

SEQ ID NO: 5178 - RNA, 17 nt, synthetic construct
  misc_feature 1..17: note = Synthetic
  source 1..17: mol_type = other RNA
aagccgtcctgaaggac

SEQ ID NO: 5179 - RNA, 17 nt, synthetic construct
  misc_feature 1..17: note = Synthetic
  source 1..17: mol_type = other RNA
ccgtcctgaaggacaag

SEQ ID NO: 5180 - RNA, 17 nt, synthetic construct
  misc_feature 1..17: note = Synthetic
  source 1..17: mol_type = other RNA
tcctgaaggacaagaag

SEQ ID NO: 5181 - RNA, 17 nt, synthetic construct
  misc_feature 1..17: note = Synthetic
  source 1..17: mol_type = other RNA
aggacaagaagaaggac

SEQ ID NO: 5182 - RNA, 17 nt, synthetic construct
  misc_feature 1..17: note = Synthetic
  source 1..17: mol_type = other RNA
ccccgcctactacgccg

SEQ ID NO: 5183 - RNA, 17 nt, synthetic construct
  misc_feature 1..17: note = Synthetic
  source 1..17: mol_type = other RNA
cgccgggcccgcgcaac

SEQ ID NO: 5184 - RNA, 17 nt, synthetic construct
  misc_feature 1..17: note = Synthetic
  source 1..17: mol_type = other RNA
gcaacgcggggtgatcg

SEQ ID NO: 5185 - RNA, 17 nt, synthetic construct
  misc_feature 1..17: note = Synthetic
  source 1..17: mol_type = other RNA
tcggcgagtactgcata

SEQ ID NO: 5186 - RNA, 17 nt, synthetic construct
  misc_feature 1..17: note = Synthetic
  source 1..17: mol_type = other RNA
tacaggattccctgctg

SEQ ID NO: 5187 - RNA, 17 nt, synthetic construct
  misc_feature 1..17: note = Synthetic
  source 1..17: mol_type = other RNA
ttaagtttttgccccat

SEQ ID NO: 5188 - RNA, 17 nt, synthetic construct
  misc_feature 1..17: note = Synthetic
  source 1..17: mol_type = other RNA
taagtttttgccccatc

SEQ ID NO: 5189 - RNA, 17 nt, synthetic construct
  misc_feature 1..17: note = Synthetic
  source 1..17: mol_type = other RNA
cggccgtcgcgcgcttg

SEQ ID NO: 5190 - RNA, 17 nt, synthetic construct
  misc_feature 1..17: note = Synthetic
  source 1..17: mol_type = other RNA
tgctgcgcctggccgac

SEQ ID NO: 5191 - RNA, 17 nt, synthetic construct
  misc_feature 1..17: note = Synthetic
  source 1..17: mol_type = other RNA
tgcgcctggccgaccag

SEQ ID NO: 5192 - RNA, 17 nt, synthetic construct
  misc_feature 1..17: note = Synthetic
  source 1..17: mol_type = other RNA
agaagggctttattctg

SEQ ID NO: 5193 - RNA, 17 nt, synthetic construct
  misc_feature 1..17: note = Synthetic
  source 1..17: mol_type = other RNA
ttattctgccggacacc

SEQ ID NO: 5194 - RNA, 17 nt, synthetic construct
  misc_feature 1..17: note = Synthetic
  source 1..17: mol_type = other RNA
tattctgccggacaccc

SEQ ID NO: 5195 - RNA, 17 nt, synthetic construct
  misc_feature 1..17: note = Synthetic
  source 1..17: mol_type = other RNA
gacacccaggggcgatt

SEQ ID NO: 5196 - RNA, 17 nt, synthetic construct
  misc_feature 1..17: note = Synthetic
  source 1..17: mol_type = other RNA
acacccaggggcgattt

SEQ ID NO: 5197 - RNA, 17 nt, synthetic construct
  misc_feature 1..17: note = Synthetic
  source 1..17: mol_type = other RNA
ggggcgatttaggggcg

SEQ ID NO: 5198 - RNA, 17 nt, synthetic construct
  misc_feature 1..17: note = Synthetic
  source 1..17: mol_type = other RNA
gggcgatttaggggcgc

SEQ ID NO: 5199 - RNA, 17 nt, synthetic construct
  misc_feature 1..17: note = Synthetic
  source 1..17: mol_type = other RNA
ggcgatttaggggcgcc

SEQ ID NO: 5200 - RNA, 17 nt, synthetic construct
  misc_feature 1..17: note = Synthetic
  source 1..17: mol_type = other RNA
gcgatttaggggcgccg

SEQ ID NO: 5201 - RNA, 17 nt, synthetic construct
  misc_feature 1..17: note = Synthetic
  source 1..17: mol_type = other RNA
cgatttaggggcgccgg

SEQ ID NO: 5202 - RNA, 17 nt, synthetic construct
  misc_feature 1..17: note = Synthetic
  source 1..17: mol_type = other RNA
gatttaggggcgccggg

SEQ ID NO: 5203 - RNA, 17 nt, synthetic construct
  misc_feature 1..17: note = Synthetic
  source 1..17: mol_type = other RNA
atttaggggcgccgggg

SEQ ID NO: 5204 - RNA, 17 nt, synthetic construct
  misc_feature 1..17: note = Synthetic
  source 1..17: mol_type = other RNA
aagcgtccggccgcagc

SEQ ID NO: 5205 - RNA, 17 nt, synthetic construct
  misc_feature 1..17: note = Synthetic
  source 1..17: mol_type = other RNA
agcgtccggccgcagcc

SEQ ID NO: 5206 - RNA, 17 nt, synthetic construct
  misc_feature 1..17: note = Synthetic
  source 1..17: mol_type = other RNA
gcgtccggccgcagccc

SEQ ID NO: 5207 - RNA, 17 nt, synthetic construct
  misc_feature 1..17: note = Synthetic
  source 1..17: mol_type = other RNA
gtccggccgcagcccgg

SEQ ID NO: 5208 - RNA, 17 nt, synthetic construct
  misc_feature 1..17: note = Synthetic
  source 1..17: mol_type = other RNA
ggccgcagcccgggagg

SEQ ID NO: 5209 - RNA, 17 nt, synthetic construct
  misc_feature 1..17: note = Synthetic
  source 1..17: mol_type = other RNA
ccgcagcccgggaggac

SEQ ID NO: 5210 - RNA, 17 nt, synthetic construct
  misc_feature 1..17: note = Synthetic
  source 1..17: mol_type = other RNA
ggaggacgaggagcggc

SEQ ID NO: 5211 - RNA, 17 nt, synthetic construct
  misc_feature 1..17: note = Synthetic
  source 1..17: mol_type = other RNA
aggacgaggagcggcca

SEQ ID NO: 5212 - RNA, 17 nt, synthetic construct
  misc_feature 1..17: note = Synthetic
  source 1..17: mol_type = other RNA
acgaggagcggccagag

SEQ ID NO: 5213 - RNA, 17 nt, synthetic construct
  misc_feature 1..17: note = Synthetic
  source 1..17: mol_type = other RNA
aggagcggccagaggag

SEQ ID NO: 5214 - RNA, 17 nt, synthetic construct
  misc_feature 1..17: note = Synthetic
  source 1..17: mol_type = other RNA
ggccagaggaggagggg

SEQ ID NO: 5215 - RNA, 17 nt, synthetic construct
  misc_feature 1..17: note = Synthetic
  source 1..17: mol_type = other RNA
agaggaggagggggagg

SEQ ID NO: 5216 - RNA, 17 nt, synthetic construct
  misc_feature 1..17: note = Synthetic
  source 1..17: mol_type = other RNA
aggaggagggggaggac

SEQ ID NO: 5217 - RNA, 17 nt, synthetic construct
  misc_feature 1..17: note = Synthetic
  source 1..17: mol_type = other RNA
ggagggggaggacgagg

SEQ ID NO: 5218 - RNA, 17 nt, synthetic construct
  misc_feature 1..17: note = Synthetic
  source 1..17: mol_type = other RNA
ggaggacgaggacgaac

SEQ ID NO: 5219 - RNA, 17 nt, synthetic construct
  misc_feature 1..17: note = Synthetic
  source 1..17: mol_type = other RNA
aggacgaggacgaacgc

SEQ ID NO: 5220 - RNA, 17 nt, synthetic construct
  misc_feature 1..17: note = Synthetic
  source 1..17: mol_type = other RNA
acgaggacgaacgcgag

SEQ ID NO: 5221 - RNA, 17 nt, synthetic construct
  misc_feature 1..17: note = Synthetic
  source 1..17: mol_type = other RNA
ggacgaacgcgaggagg

SEQ ID NO: 5222 - RNA, 17 nt, synthetic construct
  misc_feature 1..17: note = Synthetic
  source 1..17: mol_type = other RNA
acgcgaggagggcgggg

SEQ ID NO: 5223 - RNA, 17 nt, synthetic construct
  misc_feature 1..17: note = Synthetic
  source 1..17: mol_type = other RNA
gaggagggcgggggcga

SEQ ID NO: 5224 - RNA, 17 nt, synthetic construct
  misc_feature 1..17: note = Synthetic
  source 1..17: mol_type = other RNA
gcgggggcgagcgggag

SEQ ID NO: 5225 - RNA, 17 nt, synthetic construct
  misc_feature 1..17: note = Synthetic
  source 1..17: mol_type = other RNA
ggggcgagcgggagccg

SEQ ID NO: 5226 - RNA, 17 nt, synthetic construct
  misc_feature 1..17: note = Synthetic
  source 1..17: mol_type = other RNA
cgggagccggagggcgc

SEQ ID NO: 5227 - RNA, 17 nt, synthetic construct
  misc_feature 1..17: note = Synthetic
  source 1..17: mol_type = other RNA
agaccgccggcaggcac

SEQ ID NO: 5228 - RNA, 17 nt, synthetic construct
  misc_feature 1..17: note = Synthetic
  source 1..17: mol_type = other RNA
gcaggcacgtggggtac

SEQ ID NO: 5229 - RNA, 17 nt, synthetic construct
  misc_feature 1..17: note = Synthetic
  source 1..17: mol_type = other RNA
caggcacgtggggtacc

SEQ ID NO: 5230 - RNA, 17 nt, synthetic construct
  misc_feature 1..17: note = Synthetic
  source 1..17: mol_type = other RNA
aggcacgtggggtacca

SEQ ID NO: 5231 - RNA, 17 nt, synthetic construct
  misc_feature 1..17: note = Synthetic
  source 1..17: mol_type = other RNA
gtggggtaccagggggc

SEQ ID NO: 5232 - RNA, 17 nt, synthetic construct
  misc_feature 1..17: note = Synthetic
  source 1..17: mol_type = other RNA
ggtccttgaccccactt

SEQ ID NO: 5233 - RNA, 17 nt, synthetic construct
  misc_feature 1..17: note = Synthetic
  source 1..17: mol_type = other RNA
ccacttccgggtttcac

SEQ ID NO: 5234 - RNA, 17 nt, synthetic construct
  misc_feature 1..17: note = Synthetic
  source 1..17: mol_type = other RNA
gcttcagcacgctctcc

SEQ ID NO: 5235 - RNA, 17 nt, synthetic construct
  misc_feature 1..17: note = Synthetic
  source 1..17: mol_type = other RNA
ttcagcacgctctccct

SEQ ID NO: 5236 - RNA, 17 nt, synthetic construct
  misc_feature 1..17: note = Synthetic
  source 1..17: mol_type = other RNA
ccgacgcagtggcgcac

SEQ ID NO: 5237 - RNA, 17 nt, synthetic construct
  misc_feature 1..17: note = Synthetic
  source 1..17: mol_type = other RNA
cgacgcagtggcgcacc

SEQ ID NO: 5238 - RNA, 17 nt, synthetic construct
  misc_feature 1..17: note = Synthetic
  source 1..17: mol_type = other RNA
cagtggcgcacctggag

SEQ ID NO: 5239 - RNA, 17 nt, synthetic construct
  misc_feature 1..17: note = Synthetic
  source 1..17: mol_type = other RNA
cgcacctggaggcgggc

SEQ ID NO: 5240 - RNA, 17 nt, synthetic construct
  misc_feature 1..17: note = Synthetic
  source 1..17: mol_type = other RNA
aggcgggcaaggactac

SEQ ID NO: 5241 - RNA, 17 nt, synthetic construct
  misc_feature 1..17: note = Synthetic
  source 1..17: mol_type = other RNA
ggcgggcaaggactacc

SEQ ID NO: 5242 - RNA, 17 nt, synthetic construct
  misc_feature 1..17: note = Synthetic
  source 1..17: mol_type = other RNA
caaggactacctggaga

SEQ ID NO: 5243 - RNA, 17 nt, synthetic construct
  misc_feature 1..17: note = Synthetic
  source 1..17: mol_type = other RNA
actacctggagatcgag

SEQ ID NO: 5244 - RNA, 17 nt, synthetic construct
  misc_feature 1..17: note = Synthetic
  source 1..17: mol_type = other RNA
ctacctggagatcgagg

SEQ ID NO: 5245 - RNA, 17 nt, synthetic construct
  misc_feature 1..17: note = Synthetic
  source 1..17: mol_type = other RNA
tacctggagatcgaggt

SEQ ID NO: 5246 - RNA, 17 nt, synthetic construct
  misc_feature 1..17: note = Synthetic
  source 1..17: mol_type = other RNA
acctggagatcgaggtg

SEQ ID NO: 5247 - RNA, 17 nt, synthetic construct
  misc_feature 1..17: note = Synthetic
  source 1..17: mol_type = other RNA
cctggagatcgaggtgg

SEQ ID NO: 5248 - RNA, 17 nt, synthetic construct
  misc_feature 1..17: note = Synthetic
  source 1..17: mol_type = other RNA
ttcgtcaaggctcacgt

SEQ ID NO: 5249 - RNA, 17 nt, synthetic construct
  misc_feature 1..17: note = Synthetic
  source 1..17: mol_type = other RNA
cgtcaaggctcacgtgc

SEQ ID NO: 5250 - RNA, 17 nt, synthetic construct
  misc_feature 1..17: note = Synthetic
  source 1..17: mol_type = other RNA
tcaaggctcacgtgcga

SEQ ID NO: 5251 - RNA, 17 nt, synthetic construct
  misc_feature 1..17: note = Synthetic
  source 1..17: mol_type = other RNA
ctcctcagcatcctcct

SEQ ID NO: 5252 - RNA, 17 nt, synthetic construct
  misc_feature 1..17: note = Synthetic
  source 1..17: mol_type = other RNA
tcctcagcatcctcctg

SEQ ID NO: 5253 - RNA, 17 nt, synthetic construct
  misc_feature 1..17: note = Synthetic
  source 1..17: mol_type = other RNA
cgggactggctcgccat

SEQ ID NO: 5254 - RNA, 17 nt, synthetic construct
  misc_feature 1..17: note = Synthetic
  source 1..17: mol_type = other RNA
cgaaagcagatccgctc

SEQ ID NO: 5255 - RNA, 17 nt, synthetic construct
  misc_feature 1..17: note = Synthetic
  source 1..17: mol_type = other RNA
tccgctcgcggattccc

SEQ ID NO: 5256 - RNA, 17 nt, synthetic construct
  misc_feature 1..17: note = Synthetic
  source 1..17: mol_type = other RNA
gattccccagagcagcc

SEQ ID NO: 5257 - RNA, 17 nt, synthetic construct
  misc_feature 1..17: note = Synthetic
  source 1..17: mol_type = other RNA
ttccccagagcagcccc

SEQ ID NO: 5258 - RNA, 17 nt, synthetic construct
  misc_feature 1..17: note = Synthetic
  source 1..17: mol_type = other RNA
tccccagagcagccccg

SEQ ID NO: 5259 - RNA, 17 nt, synthetic construct
  misc_feature 1..17: note = Synthetic
  source 1..17: mol_type = other RNA
ccgaggaggccgtgctc

SEQ ID NO: 5260 - RNA, 17 nt, synthetic construct
  misc_feature 1..17: note = Synthetic
  source 1..17: mol_type = other RNA
cgtgtgtaactcggtgt

SEQ ID NO: 5261 - RNA, 17 nt, synthetic construct
  misc_feature 1..17: note = Synthetic
  source 1..17: mol_type = other RNA
actcggtgtacgggttc

SEQ ID NO: 5262 - RNA, 17 nt, synthetic construct
  misc_feature 1..17: note = Synthetic
  source 1..17: mol_type = other RNA
ctcggtgtacgggttca

SEQ ID NO: 5263 - RNA, 17 nt, synthetic construct
  misc_feature 1..17: note = Synthetic
  source 1..17: mol_type = other RNA
tcggtgtacgggttcac

SEQ ID NO: 5264 - RNA, 17 nt, synthetic construct
  misc_feature 1..17: note = Synthetic
  source 1..17: mol_type = other RNA
gttcacgggagtgcagc

SEQ ID NO: 5265 - RNA, 17 nt, synthetic construct
  misc_feature 1..17: note = Synthetic
  source 1..17: mol_type = other RNA
ggtgacgaccatcggcc

SEQ ID NO: 5266 - RNA, 17 nt, synthetic construct
  misc_feature 1..17: note = Synthetic
  source 1..17: mol_type = other RNA
gatgctgctcgcgaccc

SEQ ID NO: 5267 - RNA, 17 nt, synthetic construct
  misc_feature 1..17: note = Synthetic
  source 1..17: mol_type = other RNA
gagtacgtccacgcgcg

SEQ ID NO: 5268 - RNA, 17 nt, synthetic construct
  misc_feature 1..17: note = Synthetic
  source 1..17: mol_type = other RNA
cgcgcgctgggcggcct

SEQ ID NO: 5269 - RNA, 17 nt, synthetic construct
  misc_feature 1..17: note = Synthetic
  source 1..17: mol_type = other RNA
agctcctggccgatttc

SEQ ID NO: 5270 - RNA, 17 nt, synthetic construct
  misc_feature 1..17: note = Synthetic
  source 1..17: mol_type = other RNA
gctcctggccgatttcc

SEQ ID NO: 5271 - RNA, 17 nt, synthetic construct
  misc_feature 1..17: note = Synthetic
  source 1..17: mol_type = other RNA
ggccgacatgcgcgccc

SEQ ID NO: 5272 - RNA, 17 nt, synthetic construct
  misc_feature 1..17: note = Synthetic
  source 1..17: mol_type = other RNA
ttccatgcgcatcatct

SEQ ID NO: 5273 - RNA, 17 nt, synthetic construct
  misc_feature 1..17: note = Synthetic
  source 1..17: mol_type = other RNA
tccatgcgcatcatcta

SEQ ID NO: 5274 - RNA, 17 nt, synthetic construct
  misc_feature 1..17: note = Synthetic
  source 1..17: mol_type = other RNA
ccatgcgcatcatctac

SEQ ID NO: 5275 - RNA, 17 nt, synthetic construct
  misc_feature 1..17: note = Synthetic
  source 1..17: mol_type = other RNA
gcatcatctacggggac

SEQ ID NO: 5276 - RNA, 17 nt, synthetic construct
  misc_feature 1..17: note = Synthetic
  source 1..17: mol_type = other RNA
ccgcggcctcacggccg

SEQ ID NO: 5277 - RNA, 17 nt, synthetic construct
  misc_feature 1..17: note = Synthetic
  source 1..17: mol_type = other RNA
ccgccgggctgacggcc

SEQ ID NO: 5278 - RNA, 17 nt, synthetic construct
  misc_feature 1..17: note = Synthetic
  source 1..17: mol_type = other RNA
ccgtgggcgacaagatg

SEQ ID NO: 5279 - RNA, 17 nt, synthetic construct
  misc_feature 1..17: note = Synthetic
  source 1..17: mol_type = other RNA
tctgccccccatcaaac

SEQ ID NO: 5280 - RNA, 17 nt, synthetic construct
  misc_feature 1..17: note = Synthetic
  source 1..17: mol_type = other RNA
ccccatcaaactcgagt

SEQ ID NO: 5281 - RNA, 17 nt, synthetic construct
  misc_feature 1..17: note = Synthetic
  source 1..17: mol_type = other RNA
agctgctgctgatcgcc

SEQ ID NO: 5282 - RNA, 17 nt, synthetic construct
  misc_feature 1..17: note = Synthetic
  source 1..17: mol_type = other RNA
gtacatcggcgtcatct

SEQ ID NO: 5283 - RNA, 17 nt, synthetic construct
  misc_feature 1..17: note = Synthetic
  source 1..17: mol_type = other RNA
tacatcggcgtcatcta

SEQ ID NO: 5284 - RNA, 17 nt, synthetic construct
  misc_feature 1..17: note = Synthetic
  source 1..17: mol_type = other RNA
acatcggcgtcatctac

SEQ ID NO: 5285 - RNA, 17 nt, synthetic construct
  misc_feature 1..17: note = Synthetic
  source 1..17: mol_type = other RNA
ggggtaagatgctcatc

SEQ ID NO: 5286 - RNA, 17 nt, synthetic construct
  misc_feature 1..17: note = Synthetic
  source 1..17: mol_type = other RNA
agatgctcatcaagggc

SEQ ID NO: 5287 - RNA, 17 nt, synthetic construct
  misc_feature 1..17: note = Synthetic
  source 1..17: mol_type = other RNA
tttatcaaccgcacctc

SEQ ID NO: 5288 - RNA, 17 nt, synthetic construct
  misc_feature 1..17: note = Synthetic
  source 1..17: mol_type = other RNA
ttacgacgataccgtct

SEQ ID NO: 5289 - RNA, 17 nt, synthetic construct
  misc_feature 1..17: note = Synthetic
  source 1..17: mol_type = other RNA
tacgacgataccgtctc

SEQ ID NO: 5290 - RNA, 17 nt, synthetic construct
  misc_feature 1..17: note = Synthetic
  source 1..17: mol_type = other RNA
agcggccgccgcgttag

SEQ ID NO: 5291 - RNA, 17 nt, synthetic construct
  misc_feature 1..17: note = Synthetic
  source 1..17: mol_type = other RNA
cgttagccgagcgcccc

SEQ ID NO: 5292 - RNA, 17 nt, synthetic construct
  misc_feature 1..17: note = Synthetic
  source 1..17: mol_type = other RNA
gttagccgagcgccccg

SEQ ID NO: 5293 - RNA, 17 nt, synthetic construct
  misc_feature 1..17: note = Synthetic
  source 1..17: mol_type = other RNA
tagccgagcgccccgcg

SEQ ID NO: 5294 - RNA, 17 nt, synthetic construct
  misc_feature 1..17: note = Synthetic
  source 1..17: mol_type = other RNA
gctggcgcgacccctgc

SEQ ID NO: 5295 - RNA, 17 nt, synthetic construct
  misc_feature 1..17: note = Synthetic
  source 1..17: mol_type = other RNA
tggcgcgacccctgccc

SEQ ID NO: 5296 - RNA, 17 nt, synthetic construct
  misc_feature 1..17: note = Synthetic
  source 1..17: mol_type = other RNA
ggcgcgacccctgcccg

SEQ ID NO: 5297 - RNA, 17 nt, synthetic construct
  misc_feature 1..17: note = Synthetic
  source 1..17: mol_type = other RNA
cgagggactgcaggcgt

SEQ ID NO: 5298 - RNA, 17 nt, synthetic construct
  misc_feature 1..17: note = Synthetic
  source 1..17: mol_type = other RNA
gagggactgcaggcgtt

SEQ ID NO: 5299 - RNA, 17 nt, synthetic construct
  misc_feature 1..17: note = Synthetic
  source 1..17: mol_type = other RNA
atcggcgcatcaccgac

SEQ ID NO: 5300 - RNA, 17 nt, synthetic construct
  misc_feature 1..17: note = Synthetic
  source 1..17: mol_type = other RNA
tcggcgcatcaccgacc

SEQ ID NO: 5301 - RNA, 17 nt, synthetic construct
  misc_feature 1..17: note = Synthetic
  source 1..17: mol_type = other RNA
ggcgcatcaccgacccg

SEQ ID NO: 5302 - RNA, 17 nt, synthetic construct
  misc_feature 1..17: note = Synthetic
  source 1..17: mol_type = other RNA
cgcatcaccgacccgga

SEQ ID NO: 5303 - RNA, 17 nt, synthetic construct
  misc_feature 1..17: note = Synthetic
  source 1..17: mol_type = other RNA
gcatcaccgacccggag

SEQ ID NO: 5304 - RNA, 17 nt, synthetic construct
  misc_feature 1..17: note = Synthetic
  source 1..17: mol_type = other RNA
acccggagagggacatc

SEQ ID NO: 5305 - RNA, 17 nt, synthetic construct
  misc_feature 1..17: note = Synthetic
  source 1..17: mol_type = other RNA
ggactttgtcctcaccg

SEQ ID NO: 5306 - RNA, 17 nt, synthetic construct
  misc_feature 1..17: note = Synthetic
  source 1..17: mol_type = other RNA
ttgtcctcaccgccgaa

SEQ ID NO: 5307 - RNA, 17 nt, synthetic construct
  misc_feature 1..17: note = Synthetic
  source 1..17: mol_type = other RNA
cgcaggtcccgtccatc

SEQ ID NO: 5308 - RNA, 17 nt, synthetic construct
  misc_feature 1..17: note = Synthetic
  source 1..17: mol_type = other RNA
gtcccgtccatcaagga

SEQ ID NO: 5309 - RNA, 17 nt, synthetic construct
  misc_feature 1..17: note = Synthetic
  source 1..17: mol_type = other RNA
gatcgtggcccagaccc

SEQ ID NO: 5310 - RNA, 17 nt, synthetic construct
  misc_feature 1..17: note = Synthetic
  source 1..17: mol_type = other RNA
ggcccagacccgcgagg

SEQ ID NO: 5311 - RNA, 17 nt, synthetic construct
  misc_feature 1..17: note = Synthetic
  source 1..17: mol_type = other RNA
cccagacccgcgaggta

SEQ ID NO: 5312 - RNA, 17 nt, synthetic construct
  misc_feature 1..17: note = Synthetic
  source 1..17: mol_type = other RNA
ccagacccgcgaggtag

SEQ ID NO: 5313 - RNA, 17 nt, synthetic construct
  misc_feature 1..17: note = Synthetic
  source 1..17: mol_type = other RNA
gcggctggccgccctcc

SEQ ID NO: 5314 - RNA, 17 nt, synthetic construct
  misc_feature 1..17: note = Synthetic
  source 1..17: mol_type = other RNA
gctagacgccgccgccc

SEQ ID NO: 5315 - RNA, 17 nt, synthetic construct
  misc_feature 1..17: note = Synthetic
  source 1..17: mol_type = other RNA
ctagacgccgccgcccc

SEQ ID NO: 5316 - RNA, 17 nt, synthetic construct
  misc_feature 1..17: note = Synthetic
  source 1..17: mol_type = other RNA
tagacgccgccgcccca

SEQ ID NO: 5317 - RNA, 17 nt, synthetic construct
  misc_feature 1..17: note = Synthetic
  source 1..17: mol_type = other RNA
cgccgccgccccagggg

SEQ ID NO: 5318 - RNA, 17 nt, synthetic construct
  misc_feature 1..17: note = Synthetic
  source 1..17: mol_type = other RNA
tccccggccaagcgccc

SEQ ID NO: 5319 - RNA, 17 nt, synthetic construct
  misc_feature 1..17: note = Synthetic
  source 1..17: mol_type = other RNA
cgtcgcctgccgacccc

SEQ ID NO: 5320 - RNA, 17 nt, synthetic construct
  misc_feature 1..17: note = Synthetic
  source 1..17: mol_type = other RNA
gtcgcctgccgaccccc

SEQ ID NO: 5321 - RNA, 17 nt, synthetic construct
  misc_feature 1..17: note = Synthetic
  source 1..17: mol_type = other RNA
tcgcctgccgacccccc

SEQ ID NO: 5322 - RNA, 17 nt, synthetic construct
  misc_feature 1..17: note = Synthetic
  source 1..17: mol_type = other RNA
ccgcaagctgctggtgt

SEQ ID NO: 5323 - RNA, 17 nt, synthetic construct
  misc_feature 1..17: note = Synthetic
  source 1..17: mol_type = other RNA
gctggtgtccgagctgg

SEQ ID NO: 5324 - RNA, 17 nt, synthetic construct
  misc_feature 1..17: note = Synthetic
  source 1..17: mol_type = other RNA
tggtgtccgagctggcc

SEQ ID NO: 5325 - RNA, 17 nt, synthetic construct
  misc_feature 1..17: note = Synthetic
  source 1..17: mol_type = other RNA
ttgcccacggcgtcgcc

SEQ ID NO: 5326 - RNA, 17 nt, synthetic construct
  misc_feature 1..17: note = Synthetic
  source 1..17: mol_type = other RNA
acggcgtcgccctgaac

SEQ ID NO: 5327 - RNA, 17 nt, synthetic construct
  misc_feature 1..17: note = Synthetic
  source 1..17: mol_type = other RNA
attacttctcccacctg

SEQ ID NO: 5328 - RNA, 17 nt, synthetic construct
  misc_feature 1..17: note = Synthetic
  source 1..17: mol_type = other RNA
ttacttctcccacctgt

SEQ ID NO: 5329 - RNA, 17 nt, synthetic construct
  misc_feature 1..17: note = Synthetic
  source 1..17: mol_type = other RNA
tacttctcccacctgtt

SEQ ID NO: 5330 - RNA, 17 nt, synthetic construct
  misc_feature 1..17: note = Synthetic
  source 1..17: mol_type = other RNA
gacattcaaggccctgt

SEQ ID NO: 5331 - RNA, 17 nt, synthetic construct
  misc_feature 1..17: note = Synthetic
  source 1..17: mol_type = other RNA
acattcaaggccctgtt

SEQ ID NO: 5332 - RNA, 17 nt, synthetic construct
  misc_feature 1..17: note = Synthetic
  source 1..17: mol_type = other RNA
cattcaaggccctgttt

SEQ ID NO: 5333 - RNA, 17 nt, synthetic construct
  misc_feature 1..17: note = Synthetic
  source 1..17: mol_type = other RNA
gaataacgccaagatca

SEQ ID NO: 5334 - RNA, 17 nt, synthetic construct
  misc_feature 1..17: note = Synthetic
  source 1..17: mol_type = other RNA
ataacgccaagatcacc

SEQ ID NO: 5335 - RNA, 17 nt, synthetic construct
  misc_feature 1..17: note = Synthetic
  source 1..17: mol_type = other RNA
gttaaaaaggtttattc

SEQ ID NO: 5336 - RNA, 17 nt, synthetic construct
  misc_feature 1..17: note = Synthetic
  source 1..17: mol_type = other RNA
ccgaagtgtggcacccc

SEQ ID NO: 5337 - RNA, 17 nt, synthetic construct
  misc_feature 1..17: note = Synthetic
  source 1..17: mol_type = other RNA
gacgtggccgcgcggct

SEQ ID NO: 5338 - RNA, 17 nt, synthetic construct
  misc_feature 1..17: note = Synthetic
  source 1..17: mol_type = other RNA
cgcgcggctccggaccg

SEQ ID NO: 5339 - RNA, 17 nt, synthetic construct
  misc_feature 1..17: note = Synthetic
  source 1..17: mol_type = other RNA
gctccggaccgcagggt

SEQ ID NO: 5340 - RNA, 17 nt, synthetic construct
  misc_feature 1..17: note = Synthetic
  source 1..17: mol_type = other RNA
ctccggaccgcagggtt

SEQ ID NO: 5341 - RNA, 17 nt, synthetic construct
  misc_feature 1..17: note = Synthetic
  source 1..17: mol_type = other RNA
ccgcagggttcggggcg

SEQ ID NO: 5342 - RNA, 17 nt, synthetic construct
  misc_feature 1..17: note = Synthetic
  source 1..17: mol_type = other RNA
tgggtgccggcgctacg

SEQ ID NO: 5343 - RNA, 17 nt, synthetic construct
  misc_feature 1..17: note = Synthetic
  source 1..17: mol_type = other RNA
gggtgccggcgctacgg

SEQ ID NO: 5344 - RNA, 17 nt, synthetic construct
  misc_feature 1..17: note = Synthetic
  source 1..17: mol_type = other RNA
gtgccggcgctacggcg

SEQ ID NO: 5345 - RNA, 17 nt, synthetic construct
  misc_feature 1..17: note = Synthetic
  source 1..17: mol_type = other RNA
tgccggcgctacggcgg

SEQ ID NO: 5346 - RNA, 17 nt, synthetic construct
  misc_feature 1..17: note = Synthetic
  source 1..17: mol_type = other RNA
acggcggaggaaactcg

SEQ ID NO: 5347 - RNA, 17 nt, synthetic construct
  misc_feature 1..17: note = Synthetic
  source 1..17: mol_type = other RNA
actcgtcgaatgttgca

SEQ ID NO: 5348 - RNA, 20 nt, synthetic construct
  misc_feature 1..20: note = Synthetic
  source 1..20: mol_type = other RNA
aaggctctatgcaacattcg

SEQ ID NO: 5349 - RNA, 20 nt, synthetic construct
  misc_feature 1..20: note = Synthetic
  source 1..20: mol_type = other RNA
tagcgccggcacccaccgcc

SEQ ID NO: 5350 - RNA, 20 nt, synthetic construct
  misc_feature 1..20: note = Synthetic
  source 1..20: mol_type = other RNA
accgccccgaaccctgcggt

SEQ ID NO: 5351 - RNA, 20 nt, synthetic construct
  misc_feature 1..20: note = Synthetic
  source 1..20: mol_type = other RNA
ccgccccgaaccctgcggtc

SEQ ID NO: 5352 - RNA, 20 nt, synthetic construct
  misc_feature 1..20: note = Synthetic
  source 1..20: mol_type = other RNA
gagccgcgcggccacgtcgt

SEQ ID NO: 5353 - RNA, 20 nt, synthetic construct
  misc_feature 1..20: note = Synthetic
  source 1..20: mol_type = other RNA
agccgcgcggccacgtcgtc

SEQ ID NO: 5354 - RNA, 20 nt, synthetic construct
  misc_feature 1..20: note = Synthetic
  source 1..20: mol_type = other RNA
gccgcgcggccacgtcgtcc

SEQ ID NO: 5355 - RNA, 20 nt, synthetic construct
  misc_feature 1..20: note = Synthetic
  source 1..20: mol_type = other RNA
ccgcgcggccacgtcgtccg

SEQ ID NO: 5356 - RNA, 20 nt, synthetic construct
  misc_feature 1..20: note = Synthetic
  source 1..20: mol_type = other RNA
cgtccggggggtgccacact

SEQ ID NO: 5357 - RNA, 20 nt, synthetic construct
  misc_feature 1..20: note = Synthetic
  source 1..20: mol_type = other RNA
gtccggggggtgccacactt

SEQ ID NO: 5358 - RNA, 20 nt, synthetic construct
  misc_feature 1..20: note = Synthetic
  source 1..20: mol_type = other RNA
tccggggggtgccacacttc

SEQ ID NO: 5359 - RNA, 20 nt, synthetic construct
  misc_feature 1..20: note = Synthetic
  source 1..20: mol_type = other RNA
atcttggcgttattcccaaa

SEQ ID NO: 5360 - RNA, 20 nt, synthetic construct
  misc_feature 1..20: note = Synthetic
  source 1..20: mol_type = other RNA
cgttattcccaaacagggcc

SEQ ID NO: 5361 - RNA, 20 nt, synthetic construct
  misc_feature 1..20: note = Synthetic
  source 1..20: mol_type = other RNA
acgcacgccgcccccaacag

SEQ ID NO: 5362 - RNA, 20 nt, synthetic construct
  misc_feature 1..20: note = Synthetic
  source 1..20: mol_type = other RNA
gcacgccgcccccaacaggt

SEQ ID NO: 5363 - RNA, 20 nt, synthetic construct
  misc_feature 1..20: note = Synthetic
  source 1..20: mol_type = other RNA
acgccgcccccaacaggtgg

SEQ ID NO: 5364 - RNA, 20 nt, synthetic construct
  misc_feature 1..20: note = Synthetic
  source 1..20: mol_type = other RNA
gagaagtaatagtccgtgtt

SEQ ID NO: 5365 - RNA, 20 nt, synthetic construct
  misc_feature 1..20: note = Synthetic
  source 1..20: mol_type = other RNA
tccgtgttcagggcgacgcc

SEQ ID NO: 5366 - RNA, 20 nt, synthetic construct
  misc_feature 1..20: note = Synthetic
  source 1..20: mol_type = other RNA
cgccgtgggcaatggcgtat

SEQ ID NO: 5367 - RNA, 20 nt, synthetic construct
  misc_feature 1..20: note = Synthetic
  source 1..20: mol_type = other RNA
gccgtgggcaatggcgtatg

SEQ ID NO: 5368 - RNA, 20 nt, synthetic construct
  misc_feature 1..20: note = Synthetic
  source 1..20: mol_type = other RNA
atgcgggatcctcggccagc

SEQ ID NO: 5369 - RNA, 20 nt, synthetic construct
  misc_feature 1..20: note = Synthetic
  source 1..20: mol_type = other RNA
agctcggacaccagcagctt

SEQ ID NO: 5370 - RNA, 20 nt, synthetic construct
  misc_feature 1..20: note = Synthetic
  source 1..20: mol_type = other RNA
gctcggacaccagcagcttg

SEQ ID NO: 5371 - RNA, 20 nt, synthetic construct
  misc_feature 1..20: note = Synthetic
  source 1..20: mol_type = other RNA
acaccagcagcttgcggggc

SEQ ID NO: 5372 - RNA, 20 nt, synthetic construct
  misc_feature 1..20: note = Synthetic
  source 1..20: mol_type = other RNA
gcggggcttggacgcgcctc

SEQ ID NO: 5373 - RNA, 20 nt, synthetic construct
  misc_feature 1..20: note = Synthetic
  source 1..20: mol_type = other RNA
cggggcttggacgcgcctcc

SEQ ID NO: 5374 - RNA, 20 nt, synthetic construct
  misc_feature 1..20: note = Synthetic
  source 1..20: mol_type = other RNA
ggggcttggacgcgcctccc

SEQ ID NO: 5375 - RNA, 20 nt, synthetic construct
  misc_feature 1..20: note = Synthetic
  source 1..20: mol_type = other RNA
gggcttggacgcgcctcccg

SEQ ID NO: 5376 - RNA, 20 nt, synthetic construct
  misc_feature 1..20: note = Synthetic
  source 1..20: mol_type = other RNA
tcggcaggcgacggcgtctc

SEQ ID NO: 5377 - RNA, 20 nt, synthetic construct
  misc_feature 1..20: note = Synthetic
  source 1..20: mol_type = other RNA
cggcaggcgacggcgtctcc

SEQ ID NO: 5378 - RNA, 20 nt, synthetic construct
  misc_feature 1..20: note = Synthetic
  source 1..20: mol_type = other RNA
ggcaggcgacggcgtctccc

SEQ ID NO: 5379 - RNA, 20 nt, synthetic construct
  misc_feature 1..20: note = Synthetic
  source 1..20: mol_type = other RNA
cgtctcccgggggcgcttgg

SEQ ID NO: 5380 - RNA, 20 nt, synthetic construct
  misc_feature 1..20: note = Synthetic
  source 1..20: mol_type = other RNA
gtctcccgggggcgcttggc

SEQ ID NO: 5381 - RNA, 20 nt, synthetic construct
  misc_feature 1..20: note = Synthetic
  source 1..20: mol_type = other RNA
tctcccgggggcgcttggcc

SEQ ID NO: 5382 - RNA, 20 nt, synthetic construct
  misc_feature 1..20: note = Synthetic
  source 1..20: mol_type = other RNA
ctcccgggggcgcttggccg

SEQ ID NO: 5383 - RNA, 20 nt, synthetic construct
  misc_feature 1..20: note = Synthetic
  source 1..20: mol_type = other RNA
cccgggggcgcttggccggg

SEQ ID NO: 5384 - RNA, 20 nt, synthetic construct
  misc_feature 1..20: note = Synthetic
  source 1..20: mol_type = other RNA
gggcgcttggccggggaggg

SEQ ID NO: 5385 - RNA, 20 nt, synthetic construct
  misc_feature 1..20: note = Synthetic
  source 1..20: mol_type = other RNA
tggccggggagggcagggcc

SEQ ID NO: 5386 - RNA, 20 nt, synthetic construct
  misc_feature 1..20: note = Synthetic
  source 1..20: mol_type = other RNA
agggcagggccgcggggggg

SEQ ID NO: 5387 - RNA, 20 nt, synthetic construct
  misc_feature 1..20: note = Synthetic
  source 1..20: mol_type = other RNA
ggggggggcgggctcgtccc

SEQ ID NO: 5388 - RNA, 20 nt, synthetic construct
  misc_feature 1..20: note = Synthetic
  source 1..20: mol_type = other RNA
gggggggcgggctcgtcccc

SEQ ID NO: 5389 - RNA, 20 nt, synthetic construct
  misc_feature 1..20: note = Synthetic
  source 1..20: mol_type = other RNA
ggggcggcggcgtctagctc

SEQ ID NO: 5390 - RNA, 20 nt, synthetic construct
  misc_feature 1..20: note = Synthetic
  source 1..20: mol_type = other RNA
gggcggcggcgtctagctcg

SEQ ID NO: 5391 - RNA, 20 nt, synthetic construct
  misc_feature 1..20: note = Synthetic
  source 1..20: mol_type = other RNA
gcggcggcgtctagctcgcg

SEQ ID NO: 5392 - RNA, 20 nt, synthetic construct
  misc_feature 1..20: note = Synthetic
  source 1..20: mol_type = other RNA
gcgaccgtctcctctacctc

SEQ ID NO: 5393 - RNA, 20 nt, synthetic construct
  misc_feature 1..20: note = Synthetic
  source 1..20: mol_type = other RNA
gtctcctctacctcgcgggt

SEQ ID NO: 5394 - RNA, 20 nt, synthetic construct
  misc_feature 1..20: note = Synthetic
  source 1..20: mol_type = other RNA
ggtctgggccacgatcacgt

SEQ ID NO: 5395 - RNA, 20 nt, synthetic construct
  misc_feature 1..20: note = Synthetic
  source 1..20: mol_type = other RNA
gtctgggccacgatcacgta

SEQ ID NO: 5396 - RNA, 20 nt, synthetic construct
  misc_feature 1..20: note = Synthetic
  source 1..20: mol_type = other RNA
cgtacgggatccggtccttg

SEQ ID NO: 5397 - RNA, 20 nt, synthetic construct
  misc_feature 1..20: note = Synthetic
  source 1..20: mol_type = other RNA
cgggatccggtccttgatgg

SEQ ID NO: 5398 - RNA, 20 nt, synthetic construct
  misc_feature 1..20: note = Synthetic
  source 1..20: mol_type = other RNA
gggatccggtccttgatgga

SEQ ID NO: 5399 - RNA, 20 nt, synthetic construct
  misc_feature 1..20: note = Synthetic
  source 1..20: mol_type = other RNA
atggacgggacctgcgcgcg

SEQ ID NO: 5400 - RNA, 20 nt, synthetic construct
  misc_feature 1..20: note = Synthetic
  source 1..20: mol_type = other RNA
ggacctgcgcgcggcgggcc

SEQ ID NO: 5401 - RNA, 20 nt, synthetic construct
  misc_feature 1..20: note = Synthetic
  source 1..20: mol_type = other RNA
agcttgtaatacaccgtcag

SEQ ID NO: 5402 - RNA, 20 nt, synthetic construct
  misc_feature 1..20: note = Synthetic
  source 1..20: mol_type = other RNA
gcgcttgttggtgtacgcgc

SEQ ID NO: 5403 - RNA, 20 nt, synthetic construct
  misc_feature 1..20: note = Synthetic
  source 1..20: mol_type = other RNA
ggtgtctgctcagttcggcg

SEQ ID NO: 5404 - RNA, 20 nt, synthetic construct
  misc_feature 1..20: note = Synthetic
  source 1..20: mol_type = other RNA
tgtctgctcagttcggcggt

SEQ ID NO: 5405 - RNA, 20 nt, synthetic construct
  misc_feature 1..20: note = Synthetic
  source 1..20: mol_type = other RNA
tcggcggtgaggacaaagtc

SEQ ID NO: 5406 - RNA, 20 nt, synthetic construct
  misc_feature 1..20: note = Synthetic
  source 1..20: mol_type = other RNA
aaagtcctggatgtccctct

SEQ ID NO: 5407 - RNA, 20 nt, synthetic construct
  misc_feature 1..20: note = Synthetic
  source 1..20: mol_type = other RNA
tccgggtcggtgatgcgccg

SEQ ID NO: 5408 - RNA, 20 nt, synthetic construct
  misc_feature 1..20: note = Synthetic
  source 1..20: mol_type = other RNA
tgatgcgccgatgggcgtct

SEQ ID NO: 5409 - RNA, 20 nt, synthetic construct
  misc_feature 1..20: note = Synthetic
  source 1..20: mol_type = other RNA
atgcgccgatgggcgtctac

SEQ ID NO: 5410 - RNA, 20 nt, synthetic construct
  misc_feature 1..20: note = Synthetic
  source 1..20: mol_type = other RNA
gggcgtctacgaggacggcc

SEQ ID NO: 5411 - RNA, 20 nt, synthetic construct
  misc_feature 1..20: note = Synthetic
  source 1..20: mol_type = other RNA
ccccgaacgcctgcagtccc

SEQ ID NO: 5412 - RNA, 20 nt, synthetic construct
  misc_feature 1..20: note = Synthetic
  source 1..20: mol_type = other RNA
aacgcctgcagtccctcggg

SEQ ID NO: 5413 - RNA, 20 nt, synthetic construct
  misc_feature 1..20: note = Synthetic
  source 1..20: mol_type = other RNA
acgcctgcagtccctcgggc

SEQ ID NO: 5414 - RNA, 20 nt, synthetic construct
  misc_feature 1..20: note = Synthetic
  source 1..20: mol_type = other RNA
gtcgcgccagccactcctcc

SEQ ID NO: 5415 - RNA, 20 nt, synthetic construct
  misc_feature 1..20: note = Synthetic
  source 1..20: mol_type = other RNA
tcgcgccagccactcctccg

SEQ ID NO: 5416 - RNA, 20 nt, synthetic construct
  misc_feature 1..20: note = Synthetic
  source 1..20: mol_type = other RNA
cggctaacgcggcggccgct

SEQ ID NO: 5417 - RNA, 20 nt, synthetic construct
  misc_feature 1..20: note = Synthetic
  source 1..20: mol_type = other RNA
ggctaacgcggcggccgctc

SEQ ID NO: 5418 - RNA, 20 nt, synthetic construct
  misc_feature 1..20: note = Synthetic
  source 1..20: mol_type = other RNA
tcgtaaaacagcaggtcgac

SEQ ID NO: 5419 - RNA, 20 nt, synthetic construct
  misc_feature 1..20: note = Synthetic
  source 1..20: mol_type = other RNA
acagcaggtcgaccagggcc

SEQ ID NO: 5420 - RNA, 20 nt, synthetic construct
  misc_feature 1..20: note = Synthetic
  source 1..20: mol_type = other RNA
cagcaggtcgaccagggccc

SEQ ID NO: 5421 - RNA, 20 nt, synthetic construct
  misc_feature 1..20: note = Synthetic
  source 1..20: mol_type = other RNA
gcaccagatccacgcccttg

SEQ ID NO: 5422 - RNA, 20 nt, synthetic construct
  misc_feature 1..20: note = Synthetic
  source 1..20: mol_type = other RNA
tggcgatcagcagcagcttg

SEQ ID NO: 5423 - RNA, 20 nt, synthetic construct
  misc_feature 1..20: note = Synthetic
  source 1..20: mol_type = other RNA
tggtgaacgtcttttcgcac

SEQ ID NO: 5424 - RNA, 20 nt, synthetic construct
  misc_feature 1..20: note = Synthetic
  source 1..20: mol_type = other RNA
tcttttcgcactcgagtttg

SEQ ID NO: 5425 - RNA, 20 nt, synthetic construct
  misc_feature 1..20: note = Synthetic
  source 1..20: mol_type = other RNA
cttttcgcactcgagtttga

SEQ ID NO: 5426 - RNA, 20 nt, synthetic construct
  misc_feature 1..20: note = Synthetic
  source 1..20: mol_type = other RNA
ttttcgcactcgagtttgat

SEQ ID NO: 5427 - RNA, 20 nt, synthetic construct
  misc_feature 1..20: note = Synthetic
  source 1..20: mol_type = other RNA
tttcgcactcgagtttgatg

SEQ ID NO: 5428 - RNA, 20 nt, synthetic construct
  misc_feature 1..20: note = Synthetic
  source 1..20: mol_type = other RNA
cactcgagtttgatgggggg

SEQ ID NO: 5429 - RNA, 20 nt, synthetic construct
  misc_feature 1..20: note = Synthetic
  source 1..20: mol_type = other RNA
ggggggcagaaacagcgcgc

SEQ ID NO: 5430 - RNA, 20 nt, synthetic construct
  misc_feature 1..20: note = Synthetic
  source 1..20: mol_type = other RNA
cggccgtcagcccggcggcc

SEQ ID NO: 5431 - RNA, 20 nt, synthetic construct
  misc_feature 1..20: note = Synthetic
  source 1..20: mol_type = other RNA
ggccgcggcacagcacaaag

SEQ ID NO: 5432 - RNA, 20 nt, synthetic construct
  misc_feature 1..20: note = Synthetic
  source 1..20: mol_type = other RNA
tgtccccgtagatgatgcgc

SEQ ID NO: 5433 - RNA, 20 nt, synthetic construct
  misc_feature 1..20: note = Synthetic
  source 1..20: mol_type = other RNA
gtccccgtagatgatgcgca

SEQ ID NO: 5434 - RNA, 20 nt, synthetic construct
  misc_feature 1..20: note = Synthetic
  source 1..20: mol_type = other RNA
cgtagatgatgcgcatggaa

SEQ ID NO: 5435 - RNA, 20 nt, synthetic construct
  misc_feature 1..20: note = Synthetic
  source 1..20: mol_type = other RNA
tgatgcgcatggaatagggc

SEQ ID NO: 5436 - RNA, 20 nt, synthetic construct
  misc_feature 1..20: note = Synthetic
  source 1..20: mol_type = other RNA
gatgcgcatggaatagggcc

SEQ ID NO: 5437 - RNA, 20 nt, synthetic construct
  misc_feature 1..20: note = Synthetic
  source 1..20: mol_type = other RNA
atgcgcatggaatagggccc

SEQ ID NO: 5438 - RNA, 20 nt, synthetic construct
  misc_feature 1..20: note = Synthetic
  source 1..20: mol_type = other RNA
ggcgcgcatgtcggccgcct

SEQ ID NO: 5439 - RNA, 20 nt, synthetic construct
  misc_feature 1..20: note = Synthetic
  source 1..20: mol_type = other RNA
gcgcgcatgtcggccgcctc

SEQ ID NO: 5440 - RNA, 20 nt, synthetic construct
  misc_feature 1..20: note = Synthetic
  source 1..20: mol_type = other RNA
cgcgcatgtcggccgcctcc

SEQ ID NO: 5441 - RNA, 20 nt, synthetic construct
  misc_feature 1..20: note = Synthetic
  source 1..20: mol_type = other RNA
gccgcctccgggaaatcggc

SEQ ID NO: 5442 - RNA, 20 nt, synthetic construct
  misc_feature 1..20: note = Synthetic
  source 1..20: mol_type = other RNA
ccgcctccgggaaatcggcc

SEQ ID NO: 5443 - RNA, 20 nt, synthetic construct
  misc_feature 1..20: note = Synthetic
  source 1..20: mol_type = other RNA
ggaaatcggccaggagctgt

SEQ ID NO: 5444 - RNA, 20 nt, synthetic construct
  misc_feature 1..20: note = Synthetic
  source 1..20: mol_type = other RNA
tcgaaggccgcccagcgcgc

SEQ ID NO: 5445 - RNA, 20 nt, synthetic construct
  misc_feature 1..20: note = Synthetic
  source 1..20: mol_type = other RNA
cagcgcgcgtggacgtactc

SEQ ID NO: 5446 - RNA, 20 nt, synthetic construct
  misc_feature 1..20: note = Synthetic
  source 1..20: mol_type = other RNA
cgtggacgtactcgcgggtc

SEQ ID NO: 5447 - RNA, 20 nt, synthetic construct
  misc_feature 1..20: note = Synthetic
  source 1..20: mol_type = other RNA
gcggcaacgtgcaggcacgg

SEQ ID NO: 5448 - RNA, 20 nt, synthetic construct
  misc_feature 1..20: note = Synthetic
  source 1..20: mol_type = other RNA
cggcaacgtgcaggcacggc

SEQ ID NO: 5449 - RNA, 20 nt, synthetic construct
  misc_feature 1..20: note = Synthetic
  source 1..20: mol_type = other RNA
ggagtccgtgctgcactccc

SEQ ID NO: 5450 - RNA, 20 nt, synthetic construct
  misc_feature 1..20: note = Synthetic
  source 1..20: mol_type = other RNA
cactcccgtgaacccgtaca

SEQ ID NO: 5451 - RNA, 20 nt, synthetic construct
  misc_feature 1..20: note = Synthetic
  source 1..20: mol_type = other RNA
atggcggcctgctgcttgtc

SEQ ID NO: 5452 - RNA, 20 nt, synthetic construct
  misc_feature 1..20: note = Synthetic
  source 1..20: mol_type = other RNA
tggcggcctgctgcttgtcc

SEQ ID NO: 5453 - RNA, 20 nt, synthetic construct
  misc_feature 1..20: note = Synthetic
  source 1..20: mol_type = other RNA
tgtccaggagcacggcctcc

SEQ ID NO: 5454 - RNA, 20 nt, synthetic construct
  misc_feature 1..20: note = Synthetic
  source 1..20: mol_type = other RNA
gtccaggagcacggcctcct

SEQ ID NO: 5455 - RNA, 20 nt, synthetic construct
  misc_feature 1..20: note = Synthetic
  source 1..20: mol_type = other RNA
acggcctcctcggggctgct

SEQ ID NO: 5456 - RNA, 20 nt, synthetic construct
  misc_feature 1..20: note = Synthetic
  source 1..20: mol_type = other RNA
cggcctcctcggggctgctc

SEQ ID NO: 5457 - RNA, 20 nt, synthetic construct
  misc_feature 1..20: note = Synthetic
  source 1..20: mol_type = other RNA
ggcctcctcggggctgctct

SEQ ID NO: 5458 - RNA, 20 nt, synthetic construct
  misc_feature 1..20: note = Synthetic
  source 1..20: mol_type = other RNA
gcctcctcggggctgctctg

SEQ ID NO: 5459 - RNA, 20 nt, synthetic construct
  misc_feature 1..20: note = Synthetic
  source 1..20: mol_type = other RNA
ggggctgctctggggaatcc

SEQ ID NO: 5460 - RNA, 20 nt, synthetic construct
  misc_feature 1..20: note = Synthetic
  source 1..20: mol_type = other RNA
ctgctctggggaatccgcga

SEQ ID NO: 5461 - RNA, 20 nt, synthetic construct
  misc_feature 1..20: note = Synthetic
  source 1..20: mol_type = other RNA
agcggatctgctttcgcatg

SEQ ID NO: 5462 - RNA, 20 nt, synthetic construct
  misc_feature 1..20: note = Synthetic
  source 1..20: mol_type = other RNA
cgcatggcgagccagtcccg

SEQ ID NO: 5463 - RNA, 20 nt, synthetic construct
  misc_feature 1..20: note = Synthetic
  source 1..20: mol_type = other RNA
gcatggcgagccagtcccgc

SEQ ID NO: 5464 - RNA, 20 nt, synthetic construct
  misc_feature 1..20: note = Synthetic
  source 1..20: mol_type = other RNA
atggcgagccagtcccgcag

SEQ ID NO: 5465 - RNA, 20 nt, synthetic construct
  misc_feature 1..20: note = Synthetic
  source 1..20: mol_type = other RNA
gccagtcccgcaggaggatg

SEQ ID NO: 5466 - RNA, 20 nt, synthetic construct
  misc_feature 1..20: note = Synthetic
  source 1..20: mol_type = other RNA
cagtcccgcaggaggatgct

SEQ ID NO: 5467 - RNA, 20 nt, synthetic construct
  misc_feature 1..20: note = Synthetic
  source 1..20: mol_type = other RNA
agtcccgcaggaggatgctg

SEQ ID NO: 5468 - RNA, 20 nt, synthetic construct
  misc_feature 1..20: note = Synthetic
  source 1..20: mol_type = other RNA
ctgaggaggctctctcgcac

SEQ ID NO: 5469 - RNA, 20 nt, synthetic construct
  misc_feature 1..20: note = Synthetic
  source 1..20: mol_type = other RNA
tctctcgcacgtgagccttg

SEQ ID NO: 5470 - RNA, 20 nt, synthetic construct
  misc_feature 1..20: note = Synthetic
  source 1..20: mol_type = other RNA
ctcgcacgtgagccttgacg

SEQ ID NO: 5471 - RNA, 20 nt, synthetic construct
  misc_feature 1..20: note = Synthetic
  source 1..20: mol_type = other RNA
tgcgccactgcgtcggccct

SEQ ID NO: 5472 - RNA, 20 nt, synthetic construct
  misc_feature 1..20: note = Synthetic
  source 1..20: mol_type = other RNA
gcgccactgcgtcggccctc

SEQ ID NO: 5473 - RNA, 20 nt, synthetic construct
  misc_feature 1..20: note = Synthetic
  source 1..20: mol_type = other RNA
cgccactgcgtcggccctca

SEQ ID NO: 5474 - RNA, 20 nt, synthetic construct
  misc_feature 1..20: note = Synthetic
  source 1..20: mol_type = other RNA
ccactgcgtcggccctcagg

SEQ ID NO: 5475 - RNA, 20 nt, synthetic construct
  misc_feature 1..20: note = Synthetic
  source 1..20: mol_type = other RNA
cggccctcagggagagcgtg

SEQ ID NO: 5476 - RNA, 20 nt, synthetic construct
  misc_feature 1..20: note = Synthetic
  source 1..20: mol_type = other RNA
agcgtgctgaagcacaggtt

SEQ ID NO: 5477 - RNA, 20 nt, synthetic construct
  misc_feature 1..20: note = Synthetic
  source 1..20: mol_type = other RNA
ctgaagcacaggttgtgggc

SEQ ID NO: 5478 - RNA, 20 nt, synthetic construct
  misc_feature 1..20: note = Synthetic
  source 1..20: mol_type = other RNA
ggttgtgggcctggatgatg

SEQ ID NO: 5479 - RNA, 20 nt, synthetic construct
  misc_feature 1..20: note = Synthetic
  source 1..20: mol_type = other RNA
gttgtgggcctggatgatgc

SEQ ID NO: 5480 - RNA, 20 nt, synthetic construct
  misc_feature 1..20: note = Synthetic
  source 1..20: mol_type = other RNA
tggggtacaggctggcaaag

SEQ ID NO: 5481 - RNA, 20 nt, synthetic construct
  misc_feature 1..20: note = Synthetic
  source 1..20: mol_type = other RNA
tggcaaagtcgaacaccacc

SEQ ID NO: 5482 - RNA, 20 nt, synthetic construct
  misc_feature 1..20: note = Synthetic
  source 1..20: mol_type = other RNA
ggcaaagtcgaacaccacca

SEQ ID NO: 5483 - RNA, 20 nt, synthetic construct
  misc_feature 1..20: note = Synthetic
  source 1..20: mol_type = other RNA
aacaccaccacggggttcac

SEQ ID NO: 5484 - RNA, 20 nt, synthetic construct
  misc_feature 1..20: note = Synthetic
  source 1..20: mol_type = other RNA
ccacggggttcacgtgaaac

SEQ ID NO: 5485 - RNA, 20 nt, synthetic construct
  misc_feature 1..20: note = Synthetic
  source 1..20: mol_type = other RNA
cacggggttcacgtgaaacc

SEQ ID NO: 5486 - RNA, 20 nt, synthetic construct
  misc_feature 1..20: note = Synthetic
  source 1..20: mol_type = other RNA
ggttcacgtgaaacccggaa

SEQ ID NO: 5487 - RNA, 20 nt, synthetic construct
  misc_feature 1..20: note = Synthetic
  source 1..20: mol_type = other RNA
gttcacgtgaaacccggaag

SEQ ID NO: 5488 - RNA, 20 nt, synthetic construct
  misc_feature 1..20: note = Synthetic
  source 1..20: mol_type = other RNA
tgaaacccggaagtggggtc

SEQ ID NO: 5489 - RNA, 20 nt, synthetic construct
  misc_feature 1..20: note = Synthetic
  source 1..20: mol_type = other RNA
tctggccgctcctcgtcctc

SEQ ID NO: 5490 - RNA, 20 nt, synthetic construct
  misc_feature 1..20: note = Synthetic
  source 1..20: mol_type = other RNA
ctcgtcctcccgggctgcgg

SEQ ID NO: 5491 - RNA, 20 nt, synthetic construct
  misc_feature 1..20: note = Synthetic
  source 1..20: mol_type = other RNA
cccgggctgcggccggacgc

SEQ ID NO: 5492 - RNA, 20 nt, synthetic construct
  misc_feature 1..20: note = Synthetic
  source 1..20: mol_type = other RNA
ccggcgcccctaaatcgccc

SEQ ID NO: 5493 - RNA, 20 nt, synthetic construct
  misc_feature 1..20: note = Synthetic
  source 1..20: mol_type = other RNA
aatcgcccctgggtgtccgg

SEQ ID NO: 5494 - RNA, 20 nt, synthetic construct
  misc_feature 1..20: note = Synthetic
  source 1..20: mol_type = other RNA
cgcagcaggcacgtaaagac

SEQ ID NO: 5495 - RNA, 20 nt, synthetic construct
  misc_feature 1..20: note = Synthetic
  source 1..20: mol_type = other RNA
tgctggccgtcgtagatggt

SEQ ID NO: 5496 - RNA, 20 nt, synthetic construct
  misc_feature 1..20: note = Synthetic
  source 1..20: mol_type = other RNA
acccgccaagcgcgcgacgg

SEQ ID NO: 5497 - RNA, 20 nt, synthetic construct
  misc_feature 1..20: note = Synthetic
  source 1..20: mol_type = other RNA
ccgccaagcgcgcgacggcc

SEQ ID NO: 5498 - RNA, 20 nt, synthetic construct
  misc_feature 1..20: note = Synthetic
  source 1..20: mol_type = other RNA
gcgacggccgagagctccag

SEQ ID NO: 5499 - RNA, 20 nt, synthetic construct
  misc_feature 1..20: note = Synthetic
  source 1..20: mol_type = other RNA
cgacggccgagagctccaga

SEQ ID NO: 5500 - RNA, 20 nt, synthetic construct
  misc_feature 1..20: note = Synthetic
  source 1..20: mol_type = other RNA
aaaaacagctggcccaccag

SEQ ID NO: 5501 - RNA, 20 nt, synthetic construct
  misc_feature 1..20: note = Synthetic
  source 1..20: mol_type = other RNA
aaaacagctggcccaccagc

SEQ ID NO: 5502 - RNA, 20 nt, synthetic construct
  misc_feature 1..20: note = Synthetic
  source 1..20: mol_type = other RNA
aaacagctggcccaccagca

SEQ ID NO: 5503 - RNA, 20 nt, synthetic construct
  misc_feature 1..20: note = Synthetic
  source 1..20: mol_type = other RNA
cgccgatcaccccgcgttgc

SEQ ID NO: 5504 - RNA, 20 nt, synthetic construct
  misc_feature 1..20: note = Synthetic
  source 1..20: mol_type = other RNA
cgggcccggcggcgtagtag

SEQ ID NO: 5505 - RNA, 20 nt, synthetic construct
  misc_feature 1..20: note = Synthetic
  source 1..20: mol_type = other RNA
gggcccggcggcgtagtagg

SEQ ID NO: 5506 - RNA, 20 nt, synthetic construct
  misc_feature 1..20: note = Synthetic
  source 1..20: mol_type = other RNA
ggcccggcggcgtagtaggc

SEQ ID NO: 5507 - RNA, 20 nt, synthetic construct
  misc_feature 1..20: note = Synthetic
  source 1..20: mol_type = other RNA
aggtccttcttcttgtcctt

SEQ ID NO: 5508 - RNA, 20 nt, synthetic construct
  misc_feature 1..20: note = Synthetic
  source 1..20: mol_type = other RNA
ggacggcttcggccacggcg

SEQ ID NO: 5509 - RNA, 20 nt, synthetic construct
  misc_feature 1..20: note = Synthetic
  source 1..20: mol_type = other RNA
cacggcgttgagcttgtagc

SEQ ID NO: 5510 - RNA, 20 nt, synthetic construct
  misc_feature 1..20: note = Synthetic
  source 1..20: mol_type = other RNA
cggcgttgagcttgtagctc

SEQ ID NO: 5511 - RNA, 20 nt, synthetic construct
  misc_feature 1..20: note = Synthetic
  source 1..20: mol_type = other RNA
acctttatcttgctgcgctt

SEQ ID NO: 5512 - RNA, 20 nt, synthetic construct
  misc_feature 1..20: note = Synthetic
  source 1..20: mol_type = other RNA
cctttatcttgctgcgcttc

SEQ ID NO: 5513 - RNA, 20 nt, synthetic construct
  misc_feature 1..20: note = Synthetic
  source 1..20: mol_type = other RNA
ctctggcctatgtcccacac

SEQ ID NO: 5514 - RNA, 20 nt, synthetic construct
  misc_feature 1..20: note = Synthetic
  source 1..20: mol_type = other RNA
ttcatgcggccgtacccgtc

SEQ ID NO: 5515 - RNA, 20 nt, synthetic construct
  misc_feature 1..20: note = Synthetic
  source 1..20: mol_type = other RNA
tcatgcggccgtacccgtcc

SEQ ID NO: 5516 - RNA, 20 nt, synthetic construct
  misc_feature 1..20: note = Synthetic
  source 1..20: mol_type = other RNA
catgcggccgtacccgtcca

SEQ ID NO: 5517 - RNA, 20 nt, synthetic construct
  misc_feature 1..20: note = Synthetic
  source 1..20: mol_type = other RNA
atgcggccgtacccgtccag

SEQ ID NO: 5518 - RNA, 20 nt, synthetic construct
  misc_feature 1..20: note = Synthetic
  source 1..20: mol_type = other RNA
tgtccgtcagcttggccagc

SEQ ID NO: 5519 - RNA, 20 nt, synthetic construct
  misc_feature 1..20: note = Synthetic
  source 1..20: mol_type = other RNA
ccgtcagcttggccagcaag

SEQ ID NO: 5520 - RNA, 20 nt, synthetic construct
  misc_feature 1..20: note = Synthetic
  source 1..20: mol_type = other RNA
tggccagcaagaagggccag

SEQ ID NO: 5521 - RNA, 20 nt, synthetic construct
  misc_feature 1..20: note = Synthetic
  source 1..20: mol_type = other RNA
tgatgatgttgtacccggtc

SEQ ID NO: 5522 - RNA, 20 nt, synthetic construct
  misc_feature 1..20: note = Synthetic
  source 1..20: mol_type = other RNA
tgttgtacccggtcacgaac

SEQ ID NO: 5523 - RNA, 20 nt, synthetic construct
  misc_feature 1..20: note = Synthetic
  source 1..20: mol_type = other RNA
gttgtacccggtcacgaact

SEQ ID NO: 5524 - RNA, 20 nt, synthetic construct
  misc_feature 1..20: note = Synthetic
  source 1..20: mol_type = other RNA
tcggggccgtactgtttcac

SEQ ID NO: 5525 - RNA, 20 nt, synthetic construct
  misc_feature 1..20: note = Synthetic
  source 1..20: mol_type = other RNA
cgtactgtttcacaagggtc

SEQ ID NO: 5526 - RNA, 20 nt, synthetic construct
  misc_feature 1..20: note = Synthetic
  source 1..20: mol_type = other RNA
tcatgaaggccaacagcatc

SEQ ID NO: 5527 - RNA, 20 nt, synthetic construct
  misc_feature 1..20: note = Synthetic
  source 1..20: mol_type = other RNA
acagcatctcgaattcgctg

SEQ ID NO: 5528 - RNA, 20 nt, synthetic construct
  misc_feature 1..20: note = Synthetic
  source 1..20: mol_type = other RNA
tcgaattcgctgtcgaattc

SEQ ID NO: 5529 - RNA, 20 nt, synthetic construct
  misc_feature 1..20: note = Synthetic
  source 1..20: mol_type = other RNA
cgctgtcgaattccagaacc

SEQ ID NO: 5530 - RNA, 20 nt, synthetic construct
  misc_feature 1..20: note = Synthetic
  source 1..20: mol_type = other RNA
cgaattccagaaccacgggc

SEQ ID NO: 5531 - RNA, 20 nt, synthetic construct
  misc_feature 1..20: note = Synthetic
  source 1..20: mol_type = other RNA
ctggccgccagctcgttcag

SEQ ID NO: 5532 - RNA, 20 nt, synthetic construct
  misc_feature 1..20: note = Synthetic
  source 1..20: mol_type = other RNA
tggccgccagctcgttcagg

SEQ ID NO: 5533 - RNA, 20 nt, synthetic construct
  misc_feature 1..20: note = Synthetic
  source 1..20: mol_type = other RNA
ccagctcgttcaggtgggat

SEQ ID NO: 5534 - RNA, 20 nt, synthetic construct
  misc_feature 1..20: note = Synthetic
  source 1..20: mol_type = other RNA
cagctcgttcaggtgggatt

SEQ ID NO: 5535 - RNA, 20 nt, synthetic construct
  misc_feature 1..20: note = Synthetic
  source 1..20: mol_type = other RNA
agctcgttcaggtgggattc

SEQ ID NO: 5536 - RNA, 20 nt, synthetic construct
  misc_feature 1..20: note = Synthetic
  source 1..20: mol_type = other RNA
gctcgttcaggtgggattcg

SEQ ID NO: 5537 - RNA, 20 nt, synthetic construct
  misc_feature 1..20: note = Synthetic
  source 1..20: mol_type = other RNA
ggtgggattcggggaggtcg

SEQ ID NO: 5538 - RNA, 20 nt, synthetic construct
  misc_feature 1..20: note = Synthetic
  source 1..20: mol_type = other RNA
gtgggattcggggaggtcgc

SEQ ID NO: 5539 - RNA, 20 nt, synthetic construct
  misc_feature 1..20: note = Synthetic
  source 1..20: mol_type = other RNA
attcggggaggtcgcaggaa

SEQ ID NO: 5540 - RNA, 20 nt, synthetic construct
  misc_feature 1..20: note = Synthetic
  source 1..20: mol_type = other RNA
ggggaggtcgcaggaaccga

SEQ ID NO: 5541 - RNA, 20 nt, synthetic construct
  misc_feature 1..20: note = Synthetic
  source 1..20: mol_type = other RNA
tcgcaggaaccgagcgaaaa

SEQ ID NO: 5542 - RNA, 20 nt, synthetic construct
  misc_feature 1..20: note = Synthetic
  source 1..20: mol_type = other RNA
caggaaccgagcgaaaacag

SEQ ID NO: 5543 - RNA, 20 nt, synthetic construct
  misc_feature 1..20: note = Synthetic
  source 1..20: mol_type = other RNA
gaaaacaggaggacgtgctc

SEQ ID NO: 5544 - RNA, 20 nt, synthetic construct
  misc_feature 1..20: note = Synthetic
  source 1..20: mol_type = other RNA
ggacgtgctccagggcggtg

SEQ ID NO: 5545 - RNA, 20 nt, synthetic construct
  misc_feature 1..20: note = Synthetic
  source 1..20: mol_type = other RNA
gggcggtggtggacaggtcg

SEQ ID NO: 5546 - RNA, 20 nt, synthetic construct
  misc_feature 1..20: note = Synthetic
  source 1..20: mol_type = other RNA
tggacaggtcgtagagcaga

SEQ ID NO: 5547 - RNA, 20 nt, synthetic construct
  misc_feature 1..20: note = Synthetic
  source 1..20: mol_type = other RNA
tcgtagagcagacaggatat

SEQ ID NO: 5548 - RNA, 20 nt, synthetic construct
  misc_feature 1..20: note = Synthetic
  source 1..20: mol_type = other RNA
tatctggatgaccaggtcct

SEQ ID NO: 5549 - RNA, 20 nt, synthetic construct
  misc_feature 1..20: note = Synthetic
  source 1..20: mol_type = other RNA
gtcctccgggtgcccggcca

SEQ ID NO: 5550 - RNA, 20 nt, synthetic construct
  misc_feature 1..20: note = Synthetic
  source 1..20: mol_type = other RNA
tcctccgggtgcccggccac

SEQ ID NO: 5551 - RNA, 20 nt, synthetic construct
  misc_feature 1..20: note = Synthetic
  source 1..20: mol_type = other RNA
cccccgccttgcattcgata

SEQ ID NO: 5552 - RNA, 20 nt, synthetic construct
  misc_feature 1..20: note = Synthetic
  source 1..20: mol_type = other RNA
tgcattcgatatcgaagcac

SEQ ID NO: 5553 - RNA, 20 nt, synthetic construct
  misc_feature 1..20: note = Synthetic
  source 1..20: mol_type = other RNA
tacagttaaactcgacgtcg

SEQ ID NO: 5554 - RNA, 20 nt, synthetic construct
  misc_feature 1..20: note = Synthetic
  source 1..20: mol_type = other RNA
actcgacgtcgctggatgtc

SEQ ID NO: 5555 - RNA, 20 nt, synthetic construct
  misc_feature 1..20: note = Synthetic
  source 1..20: mol_type = other RNA
gctggatgtcccgaaggcca

SEQ ID NO: 5556 - RNA, 20 nt, synthetic construct
  misc_feature 1..20: note = Synthetic
  source 1..20: mol_type = other RNA
ctggatgtcccgaaggccat

SEQ ID NO: 5557 - RNA, 20 nt, synthetic construct
  misc_feature 1..20: note = Synthetic
  source 1..20: mol_type = other RNA
aaggccatcggggccgccgg

SEQ ID NO: 5558 - RNA, 20 nt, synthetic construct
  misc_feature 1..20: note = Synthetic
  source 1..20: mol_type = other RNA
gcgtgttgttccggcccggt

SEQ ID NO: 5559 - RNA, 20 nt, synthetic construct
  misc_feature 1..20: note = Synthetic
  source 1..20: mol_type = other RNA
ccggtttgagacggtaccag

SEQ ID NO: 5560 - RNA, 20 nt, synthetic construct
  misc_feature 1..20: note = Synthetic
  source 1..20: mol_type = other RNA
gacggtaccagccgaaggtg

SEQ ID NO: 5561 - RNA, 20 nt, synthetic construct
  misc_feature 1..20: note = Synthetic
  source 1..20: mol_type = other RNA
accagccgaaggtgacgaac

SEQ ID NO: 5562 - RNA, 20 nt, synthetic construct
  misc_feature 1..20: note = Synthetic
  source 1..20: mol_type = other RNA
ccagccgaaggtgacgaacc

SEQ ID NO: 5563 - RNA, 20 nt, synthetic construct
  misc_feature 1..20: note = Synthetic
  source 1..20: mol_type = other RNA
gtgacgaacccggggttgtc

SEQ ID NO: 5564 - RNA, 20 nt, synthetic construct
  misc_feature 1..20: note = Synthetic
  source 1..20: mol_type = other RNA
cgaacccggggttgtccagg

SEQ ID NO: 5565 - RNA, 20 nt, synthetic construct
  misc_feature 1..20: note = Synthetic
  source 1..20: mol_type = other RNA
ccggggttgtccaggatgaa

SEQ ID NO: 5566 - RNA, 20 nt, synthetic construct
  misc_feature 1..20: note = Synthetic
  source 1..20: mol_type = other RNA
accctcgtacttcttgatgg

SEQ ID NO: 5567 - RNA, 20 nt, synthetic construct
  misc_feature 1..20: note = Synthetic
  source 1..20: mol_type = other RNA
cgtacttcttgatggccggg

SEQ ID NO: 5568 - RNA, 20 nt, synthetic construct
  misc_feature 1..20: note = Synthetic
  source 1..20: mol_type = other RNA
tacgacagcacacgcccgct

SEQ ID NO: 5569 - RNA, 20 nt, synthetic construct
  misc_feature 1..20: note = Synthetic
  source 1..20: mol_type = other RNA
cggacgtagacgcggtaaaa

SEQ ID NO: 5570 - RNA, 20 nt, synthetic construct
  misc_feature 1..20: note = Synthetic
  source 1..20: mol_type = other RNA
cgtagacgcggtaaaacaga

SEQ ID NO: 5571 - RNA, 20 nt, synthetic construct
  misc_feature 1..20: note = Synthetic
  source 1..20: mol_type = other RNA
gtagacgcggtaaaacagag

SEQ ID NO: 5572 - RNA, 20 nt, synthetic construct
  misc_feature 1..20: note = Synthetic
  source 1..20: mol_type = other RNA
tgcgctccaccacctccgcc

SEQ ID NO: 5573 - RNA, 20 nt, synthetic construct
  misc_feature 1..20: note = Synthetic
  source 1..20: mol_type = other RNA
cctccgcctcgaagtggtcc

SEQ ID NO: 5574 - RNA, 20 nt, synthetic construct
  misc_feature 1..20: note = Synthetic
  source 1..20: mol_type = other RNA
ctccgcctcgaagtggtccg

SEQ ID NO: 5575 - RNA, 20 nt, synthetic construct
  misc_feature 1..20: note = Synthetic
  source 1..20: mol_type = other RNA
aagtggtccgcggagatgcc

SEQ ID NO: 5576 - RNA, 20 nt, synthetic construct
  misc_feature 1..20: note = Synthetic
  source 1..20: mol_type = other RNA
agtggtccgcggagatgccg

SEQ ID NO: 5577 - RNA, 20 nt, synthetic construct
  misc_feature 1..20: note = Synthetic
  source 1..20: mol_type = other RNA
gatgccgcggaacgacgcgc

SEQ ID NO: 5578 - RNA, 20 nt, synthetic construct
  misc_feature 1..20: note = Synthetic
  source 1..20: mol_type = other RNA
atgccgcggaacgacgcgcc

SEQ ID NO: 5579 - RNA, 20 nt, synthetic construct
  misc_feature 1..20: note = Synthetic
  source 1..20: mol_type = other RNA
tgccgcggaacgacgcgccc

SEQ ID NO: 5580 - RNA, 20 nt, synthetic construct
  misc_feature 1..20: note = Synthetic
  source 1..20: mol_type = other RNA
gacgcgcccggggactcgcg

SEQ ID NO: 5581 - RNA, 20 nt, synthetic construct
  misc_feature 1..20: note = Synthetic
  source 1..20: mol_type = other RNA
gggccgcggccatgcgctcg

SEQ ID NO: 5582 - RNA, 20 nt, synthetic construct
  misc_feature 1..20: note = Synthetic
  source 1..20: mol_type = other RNA
catgcgctcgcagagatctc

SEQ ID NO: 5583 - RNA, 20 nt, synthetic construct
  misc_feature 1..20: note = Synthetic
  source 1..20: mol_type = other RNA
atgcgctcgcagagatctcg

SEQ ID NO: 5584 - RNA, 20 nt, synthetic construct
  misc_feature 1..20: note = Synthetic
  source 1..20: mol_type = other RNA
tactgccgcgtgccgtaaac

SEQ ID NO: 5585 - RNA, 20 nt, synthetic construct
  misc_feature 1..20: note = Synthetic
  source 1..20: mol_type = other RNA
aacggccacccggtggcctt

SEQ ID NO: 5586 - RNA, 20 nt, synthetic construct
  misc_feature 1..20: note = Synthetic
  source 1..20: mol_type = other RNA
acggccacccggtggccttc

SEQ ID NO: 5587 - RNA, 20 nt, synthetic construct
  misc_feature 1..20: note = Synthetic
  source 1..20: mol_type = other RNA
tggccttccggagtcaggcc

SEQ ID NO: 5588 - RNA, 20 nt, synthetic construct
  misc_feature 1..20: note = Synthetic
  source 1..20: mol_type = other RNA
ggccttccggagtcaggccc

SEQ ID NO: 5589 - RNA, 17 nt, synthetic construct
  misc_feature 1..17: note = Synthetic
  source 1..17: mol_type = other RNA
gctctatgcaacattcg

SEQ ID NO: 5590 - RNA, 17 nt, synthetic construct
  misc_feature 1..17: note = Synthetic
  source 1..17: mol_type = other RNA
cgccggcacccaccgcc

SEQ ID NO: 5591 - RNA, 17 nt, synthetic construct
  misc_feature 1..17: note = Synthetic
  source 1..17: mol_type = other RNA
gccccgaaccctgcggt

SEQ ID NO: 5592 - RNA, 17 nt, synthetic construct
  misc_feature 1..17: note = Synthetic
  source 1..17: mol_type = other RNA
ccccgaaccctgcggtc

SEQ ID NO: 5593 - RNA, 17 nt, synthetic construct
  misc_feature 1..17: note = Synthetic
  source 1..17: mol_type = other RNA
ccgcgcggccacgtcgt

SEQ ID NO: 5594 - RNA, 17 nt, synthetic construct
  misc_feature 1..17: note = Synthetic
  source 1..17: mol_type = other RNA
cgcgcggccacgtcgtc

SEQ ID NO: 5595 - RNA, 17 nt, synthetic construct
  misc_feature 1..17: note = Synthetic
  source 1..17: mol_type = other RNA
gcgcggccacgtcgtcc

SEQ ID NO: 5596 - RNA, 17 nt, synthetic construct
  misc_feature 1..17: note = Synthetic
  source 1..17: mol_type = other RNA
cgcggccacgtcgtccg

SEQ ID NO: 5597 - RNA, 17 nt, synthetic construct
  misc_feature 1..17: note = Synthetic
  source 1..17: mol_type = other RNA
ccggggggtgccacact

SEQ ID NO: 5598 - RNA, 17 nt, synthetic construct
  misc_feature 1..17: note = Synthetic
  source 1..17: mol_type = other RNA
cggggggtgccacactt

SEQ ID NO: 5599 - RNA, 17 nt, synthetic construct
  misc_feature 1..17: note = Synthetic
  source 1..17: mol_type = other RNA
ggggggtgccacacttc

SEQ ID NO: 5600 - RNA, 17 nt, synthetic construct
  misc_feature 1..17: note = Synthetic
  source 1..17: mol_type = other RNA
ttggcgttattcccaaa

SEQ ID NO: 5601 - RNA, 17 nt, synthetic construct
  misc_feature 1..17: note = Synthetic
  source 1..17: mol_type = other RNA
tattcccaaacagggcc

SEQ ID NO: 5602 - RNA, 17 nt, synthetic construct
  misc_feature 1..17: note = Synthetic
  source 1..17: mol_type = other RNA
cacgccgcccccaacag

SEQ ID NO: 5603 - RNA, 17 nt, synthetic construct
  misc_feature 1..17: note = Synthetic
  source 1..17: mol_type = other RNA
cgccgcccccaacaggt

SEQ ID NO: 5604 - RNA, 17 nt, synthetic construct
  misc_feature 1..17: note = Synthetic
  source 1..17: mol_type = other RNA
ccgcccccaacaggtgg

SEQ ID NO: 5605 - RNA, 17 nt, synthetic construct
  misc_feature 1..17: note = Synthetic
  source 1..17: mol_type = other RNA
aagtaatagtccgtgtt

SEQ ID NO: 5606 - RNA, 17 nt, synthetic construct
  misc_feature 1..17: note = Synthetic
  source 1..17: mol_type = other RNA
gtgttcagggcgacgcc

SEQ ID NO: 5607 - RNA, 17 nt, synthetic construct
  misc_feature 1..17: note = Synthetic
  source 1..17: mol_type = other RNA
cgtgggcaatggcgtat

SEQ ID NO: 5608 - RNA, 17 nt, synthetic construct
  misc_feature 1..17: note = Synthetic
  source 1..17: mol_type = other RNA
gtgggcaatggcgtatg

SEQ ID NO: 5609 - RNA, 17 nt, synthetic construct
  misc_feature 1..17: note = Synthetic
  source 1..17: mol_type = other RNA
cgggatcctcggccagc

SEQ ID NO: 5610 - RNA, 17 nt, synthetic construct
  misc_feature 1..17: note = Synthetic
  source 1..17: mol_type = other RNA
tcggacaccagcagctt

SEQ ID NO: 5611 - RNA, 17 nt, synthetic construct
  misc_feature 1..17: note = Synthetic
  source 1..17: mol_type = other RNA
cggacaccagcagcttg

SEQ ID NO: 5612 - RNA, 17 nt, synthetic construct
  misc_feature 1..17: note = Synthetic
  source 1..17: mol_type = other RNA
ccagcagcttgcggggc

SEQ ID NO: 5613 - RNA, 17 nt, synthetic construct
  misc_feature 1..17: note = Synthetic
  source 1..17: mol_type = other RNA
gggcttggacgcgcctc

SEQ ID NO: 5614 - RNA, 17 nt, synthetic construct
  misc_feature 1..17: note = Synthetic
  source 1..17: mol_type = other RNA
ggcttggacgcgcctcc

SEQ ID NO: 5615 - RNA, 17 nt, synthetic construct
  misc_feature 1..17: note = Synthetic
  source 1..17: mol_type = other RNA
gcttggacgcgcctccc

SEQ ID NO: 5616 - RNA, 17 nt, synthetic construct
  misc_feature 1..17: note = Synthetic
  source 1..17: mol_type = other RNA
cttggacgcgcctcccg

SEQ ID NO: 5617 - RNA, 17 nt, synthetic construct
  misc_feature 1..17: note = Synthetic
  source 1..17: mol_type = other RNA
gcaggcgacggcgtctc

SEQ ID NO: 5618 - RNA, 17 nt, synthetic construct
  misc_feature 1..17: note = Synthetic
  source 1..17: mol_type = other RNA
caggcgacggcgtctcc

SEQ ID NO: 5619 - RNA, 17 nt, synthetic construct
  misc_feature 1..17: note = Synthetic
  source 1..17: mol_type = other RNA
aggcgacggcgtctccc

SEQ ID NO: 5620 - RNA, 17 nt, synthetic construct
  misc_feature 1..17: note = Synthetic
  source 1..17: mol_type = other RNA
ctcccgggggcgcttgg

SEQ ID NO: 5621 - RNA, 17 nt, synthetic construct
  misc_feature 1..17: note = Synthetic
  source 1..17: mol_type = other RNA
tcccgggggcgcttggc

SEQ ID NO: 5622 - RNA, 17 nt, synthetic construct
  misc_feature 1..17: note = Synthetic
  source 1..17: mol_type = other RNA
cccgggggcgcttggcc

SEQ ID NO: 5623 - RNA, 17 nt, synthetic construct
  misc_feature 1..17: note = Synthetic
  source 1..17: mol_type = other RNA
ccgggggcgcttggccg

SEQ ID NO: 5624 - RNA, 17 nt, synthetic construct
  misc_feature 1..17: note = Synthetic
  source 1..17: mol_type = other RNA
gggggcgcttggccggg

SEQ ID NO: 5625 - RNA, 17 nt, synthetic construct
  misc_feature 1..17: note = Synthetic
  source 1..17: mol_type = other RNA
cgcttggccggggaggg

SEQ ID NO: 5626 - RNA, 17 nt, synthetic construct
  misc_feature 1..17: note = Synthetic
  source 1..17: mol_type = other RNA
ccggggagggcagggcc

SEQ ID NO: 5627 - RNA, 17 nt, synthetic construct
  misc_feature 1..17: note = Synthetic
  source 1..17: mol_type = other RNA
gcagggccgcggggggg

SEQ ID NO: 5628 - RNA, 17 nt, synthetic construct
  misc_feature 1..17: note = Synthetic
  source 1..17: mol_type = other RNA
gggggcgggctcgtccc

SEQ ID NO: 5629 - RNA, 17 nt, synthetic construct
  misc_feature 1..17: note = Synthetic
  source 1..17: mol_type = other RNA
ggggcgggctcgtcccc

SEQ ID NO: 5630 - RNA, 17 nt, synthetic construct
  misc_feature 1..17: note = Synthetic
  source 1..17: mol_type = other RNA
gcggcggcgtctagctc

SEQ ID NO: 5631 - RNA, 17 nt, synthetic construct
  misc_feature 1..17: note = Synthetic
  source 1..17: mol_type = other RNA
cggcggcgtctagctcg

SEQ ID NO: 5632 - RNA, 17 nt, synthetic construct
  misc_feature 1..17: note = Synthetic
  source 1..17: mol_type = other RNA
gcggcgtctagctcgcg

SEQ ID NO: 5633 - RNA, 17 nt, synthetic construct
  misc_feature 1..17: note = Synthetic
  source 1..17: mol_type = other RNA
accgtctcctctacctc

SEQ ID NO: 5634 - RNA, 17 nt, synthetic construct
  misc_feature 1..17: note = Synthetic
  source 1..17: mol_type = other RNA
tcctctacctcgcgggt

SEQ ID NO: 5635 - RNA, 17 nt, synthetic construct
  misc_feature 1..17: note = Synthetic
  source 1..17: mol_type = other RNA
ctgggccacgatcacgt

SEQ ID NO: 5636 - RNA, 17 nt, synthetic construct
  misc_feature 1..17: note = Synthetic
  source 1..17: mol_type = other RNA
tgggccacgatcacgta

SEQ ID NO: 5637 - RNA, 17 nt, synthetic construct
  misc_feature 1..17: note = Synthetic
  source 1..17: mol_type = other RNA
acgggatccggtccttg

SEQ ID NO: 5638 - RNA, 17 nt, synthetic construct
  misc_feature 1..17: note = Synthetic
  source 1..17: mol_type = other RNA
gatccggtccttgatgg

SEQ ID NO: 5639 - RNA, 17 nt, synthetic construct
  misc_feature 1..17: note = Synthetic
  source 1..17: mol_type = other RNA
atccggtccttgatgga

SEQ ID NO: 5640 - RNA, 17 nt, synthetic construct
  misc_feature 1..17: note = Synthetic
  source 1..17: mol_type = other RNA
gacgggacctgcgcgcg

SEQ ID NO: 5641 - RNA, 17 nt, synthetic construct
  misc_feature 1..17: note = Synthetic
  source 1..17: mol_type = other RNA
cctgcgcgcggcgggcc

SEQ ID NO: 5642 - RNA, 17 nt, synthetic construct
  misc_feature 1..17: note = Synthetic
  source 1..17: mol_type = other RNA
ttgtaatacaccgtcag

SEQ ID NO: 5643 - RNA, 17 nt, synthetic construct
  misc_feature 1..17: note = Synthetic
  source 1..17: mol_type = other RNA
cttgttggtgtacgcgc

SEQ ID NO: 5644 - RNA, 17 nt, synthetic construct
  misc_feature 1..17: note = Synthetic
  source 1..17: mol_type = other RNA
gtctgctcagttcggcg

SEQ ID NO: 5645 - RNA, 17 nt, synthetic construct
  misc_feature 1..17: note = Synthetic
  source 1..17: mol_type = other RNA
ctgctcagttcggcggt

SEQ ID NO: 5646 - RNA, 17 nt, synthetic construct
  misc_feature 1..17: note = Synthetic
  source 1..17: mol_type = other RNA
gcggtgaggacaaagtc

SEQ ID NO: 5647 - RNA, 17 nt, synthetic construct
  misc_feature 1..17: note = Synthetic
  source 1..17: mol_type = other RNA
gtcctggatgtccctct

SEQ ID NO: 5648 - RNA, 17 nt, synthetic construct
  misc_feature 1..17: note = Synthetic
  source 1..17: mol_type = other RNA
gggtcggtgatgcgccg

SEQ ID NO: 5649 - RNA, 17 nt, synthetic construct
  misc_feature 1..17: note = Synthetic
  source 1..17: mol_type = other RNA
tgcgccgatgggcgtct

SEQ ID NO: 5650 - RNA, 17 nt, synthetic construct
  misc_feature 1..17: note = Synthetic
  source 1..17: mol_type = other RNA
cgccgatgggcgtctac

SEQ ID NO: 5651 - RNA, 17 nt, synthetic construct
  misc_feature 1..17: note = Synthetic
  source 1..17: mol_type = other RNA
cgtctacgaggacggcc

SEQ ID NO: 5652 - RNA, 17 nt, synthetic construct
  misc_feature 1..17: note = Synthetic
  source 1..17: mol_type = other RNA
cgaacgcctgcagtccc

SEQ ID NO: 5653 - RNA, 17 nt, synthetic construct
  misc_feature 1..17: note = Synthetic
  source 1..17: mol_type = other RNA
gcctgcagtccctcggg

SEQ ID NO: 5654 - RNA, 17 nt, synthetic construct
  misc_feature 1..17: note = Synthetic
  source 1..17: mol_type = other RNA
cctgcagtccctcgggc

SEQ ID NO: 5655 - RNA, 17 nt, synthetic construct
  misc_feature 1..17: note = Synthetic
  source 1..17: mol_type = other RNA
gcgccagccactcctcc

SEQ ID NO: 5656 - RNA, 17 nt, synthetic construct
  misc_feature 1..17: note = Synthetic
  source 1..17: mol_type = other RNA
cgccagccactcctccg

SEQ ID NO: 5657 - RNA, 17 nt, synthetic construct
  misc_feature 1..17: note = Synthetic
  source 1..17: mol_type = other RNA
ctaacgcggcggccgct

SEQ ID NO: 5658 - RNA, 17 nt, synthetic construct
  misc_feature 1..17: note = Synthetic
  source 1..17: mol_type = other RNA
taacgcggcggccgctc

SEQ ID NO: 5659 - RNA, 17 nt, synthetic construct
  misc_feature 1..17: note = Synthetic
  source 1..17: mol_type = other RNA
taaaacagcaggtcgac

SEQ ID NO: 5660 - RNA, 17 nt, synthetic construct
  misc_feature 1..17: note = Synthetic
  source 1..17: mol_type = other RNA
gcaggtcgaccagggcc

SEQ ID NO: 5661 - RNA, 17 nt, synthetic construct
  misc_feature 1..17: note = Synthetic
  source 1..17: mol_type = other RNA
caggtcgaccagggccc

SEQ ID NO: 5662 - RNA, 17 nt, synthetic construct
  misc_feature 1..17: note = Synthetic
  source 1..17: mol_type = other RNA
ccagatccacgcccttg

SEQ ID NO: 5663 - RNA, 17 nt, synthetic construct
  misc_feature 1..17: note = Synthetic
  source 1..17: mol_type = other RNA
cgatcagcagcagcttg

SEQ ID NO: 5664 - RNA, 17 nt, synthetic construct
  misc_feature 1..17: note = Synthetic
  source 1..17: mol_type = other RNA
tgaacgtcttttcgcac

SEQ ID NO: 5665 - RNA, 17 nt, synthetic construct
  misc_feature 1..17: note = Synthetic
  source 1..17: mol_type = other RNA
tttcgcactcgagtttg

SEQ ID NO: 5666 - RNA, 17 nt, synthetic construct
  misc_feature 1..17: note = Synthetic
  source 1..17: mol_type = other RNA
ttcgcactcgagtttga

SEQ ID NO: 5667 - RNA, 17 nt, synthetic construct
  misc_feature 1..17: note = Synthetic
  source 1..17: mol_type = other RNA
tcgcactcgagtttgat

SEQ ID NO: 5668 - RNA, 17 nt, synthetic construct
  misc_feature 1..17: note = Synthetic
  source 1..17: mol_type = other RNA
cgcactcgagtttgatg

SEQ ID NO: 5669 - RNA, 17 nt, synthetic construct
  misc_feature 1..17: note = Synthetic
  source 1..17: mol_type = other RNA
tcgagtttgatgggggg

SEQ ID NO: 5670 - RNA, 17 nt, synthetic construct
  misc_feature 1..17: note = Synthetic
  source 1..17: mol_type = other RNA
gggcagaaacagcgcgc

SEQ ID NO: 5671 - RNA, 17 nt, synthetic construct
  misc_feature 1..17: note = Synthetic
  source 1..17: mol_type = other RNA
ccgtcagcccggcggcc

SEQ ID NO: 5672 - RNA, 17 nt, synthetic construct
  misc_feature 1..17: note = Synthetic
  source 1..17: mol_type = other RNA
cgcggcacagcacaaag

SEQ ID NO: 5673 - RNA, 17 nt, synthetic construct
  misc_feature 1..17: note = Synthetic
  source 1..17: mol_type = other RNA
ccccgtagatgatgcgc

SEQ ID NO: 5674 - RNA, 17 nt, synthetic construct
  misc_feature 1..17: note = Synthetic
  source 1..17: mol_type = other RNA
cccgtagatgatgcgca

SEQ ID NO: 5675 - RNA, 17 nt, synthetic construct
  misc_feature 1..17: note = Synthetic
  source 1..17: mol_type = other RNA
agatgatgcgcatggaa

SEQ ID NO: 5676 - RNA, 17 nt, synthetic construct
  misc_feature 1..17: note = Synthetic
  source 1..17: mol_type = other RNA
tgcgcatggaatagggc

SEQ ID NO: 5677 - RNA, 17 nt, synthetic construct
  misc_feature 1..17: note = Synthetic
  source 1..17: mol_type = other RNA
gcgcatggaatagggcc

SEQ ID NO: 5678 - RNA, 17 nt, synthetic construct
  misc_feature 1..17: note = Synthetic
  source 1..17: mol_type = other RNA
cgcatggaatagggccc

SEQ ID NO: 5679 - RNA, 17 nt, synthetic construct
  misc_feature 1..17: note = Synthetic
  source 1..17: mol_type = other RNA
gcgcatgtcggccgcct

SEQ ID NO: 5680 - RNA, 17 nt, synthetic construct
  misc_feature 1..17: note = Synthetic
  source 1..17: mol_type = other RNA
cgcatgtcggccgcctc

SEQ ID NO: 5681 - RNA, 17 nt, synthetic construct
  misc_feature 1..17: note = Synthetic
  source 1..17: mol_type = other RNA
gcatgtcggccgcctcc

SEQ ID NO: 5682 - RNA, 17 nt, synthetic construct
  misc_feature 1..17: note = Synthetic
  source 1..17: mol_type = other RNA
gcctccgggaaatcggc

SEQ ID NO: 5683 - RNA, 17 nt, synthetic construct
  misc_feature 1..17: note = Synthetic
  source 1..17: mol_type = other RNA
cctccgggaaatcggcc

SEQ ID NO: 5684 - RNA, 17 nt, synthetic construct
  misc_feature 1..17: note = Synthetic
  source 1..17: mol_type = other RNA
aatcggccaggagctgt

SEQ ID NO: 5685 - RNA, 17 nt, synthetic construct
  misc_feature 1..17: note = Synthetic
  source 1..17: mol_type = other RNA
aaggccgcccagcgcgc

SEQ ID NO: 5686 - RNA, 17 nt, synthetic construct
  misc_feature 1..17: note = Synthetic
  source 1..17: mol_type = other RNA
cgcgcgtggacgtactc

SEQ ID NO: 5687 - RNA, 17 nt, synthetic construct
  misc_feature 1..17: note = Synthetic
  source 1..17: mol_type = other RNA
ggacgtactcgcgggtc

SEQ ID NO: 5688 - RNA, 17 nt, synthetic construct
  misc_feature 1..17: note = Synthetic
  source 1..17: mol_type = other RNA
gcaacgtgcaggcacgg

SEQ ID NO: 5689 - RNA, 17 nt, synthetic construct
  misc_feature 1..17: note = Synthetic
  source 1..17: mol_type = other RNA
caacgtgcaggcacggc

SEQ ID NO: 5690 - RNA, 17 nt, synthetic construct
  misc_feature 1..17: note = Synthetic
  source 1..17: mol_type = other RNA
gtccgtgctgcactccc

SEQ ID NO: 5691 - RNA, 17 nt, synthetic construct
  misc_feature 1..17: note = Synthetic
  source 1..17: mol_type = other RNA
tcccgtgaacccgtaca

SEQ ID NO: 5692 - RNA, 17 nt, synthetic construct
  misc_feature 1..17: note = Synthetic
  source 1..17: mol_type = other RNA
gcggcctgctgcttgtc

SEQ ID NO: 5693 - RNA, 17 nt, synthetic construct
  misc_feature 1..17: note = Synthetic
  source 1..17: mol_type = other RNA
cggcctgctgcttgtcc

SEQ ID NO: 5694 - RNA, 17 nt, synthetic construct
  misc_feature 1..17: note = Synthetic
  source 1..17: mol_type = other RNA
ccaggagcacggcctcc

SEQ ID NO: 5695 - RNA, 17 nt, synthetic construct
  misc_feature 1..17: note = Synthetic
  source 1..17: mol_type = other RNA
caggagcacggcctcct

SEQ ID NO: 5696 - RNA, 17 nt, synthetic construct
  misc_feature 1..17: note = Synthetic
  source 1..17: mol_type = other RNA
gcctcctcggggctgct

SEQ ID NO: 5697 - RNA, 17 nt, synthetic construct
  misc_feature 1..17: note = Synthetic
  source 1..17: mol_type = other RNA
cctcctcggggctgctc

SEQ ID NO: 5698 - RNA, 17 nt, synthetic construct
  misc_feature 1..17: note = Synthetic
  source 1..17: mol_type = other RNA
ctcctcggggctgctct

SEQ ID NO: 5699 - RNA, 17 nt, synthetic construct
  misc_feature 1..17: note = Synthetic
  source 1..17: mol_type = other RNA
tcctcggggctgctctg

SEQ ID NO: 5700 - RNA, 17 nt, synthetic construct
  misc_feature 1..17: note = Synthetic
  source 1..17: mol_type = other RNA
gctgctctggggaatcc

SEQ ID NO: 5701 - RNA, 17 nt, synthetic construct
  misc_feature 1..17: note = Synthetic
  source 1..17: mol_type = other RNA
ctctggggaatccgcga

SEQ ID NO: 5702 - RNA, 17 nt, synthetic construct
  misc_feature 1..17: note = Synthetic
  source 1..17: mol_type = other RNA
ggatctgctttcgcatg

SEQ ID NO: 5703 - RNA, 17 nt, synthetic construct
  misc_feature 1..17: note = Synthetic
  source 1..17: mol_type = other RNA
atggcgagccagtcccg

SEQ ID NO: 5704 - RNA, 17 nt, synthetic construct
  misc_feature 1..17: note = Synthetic
  source 1..17: mol_type = other RNA
tggcgagccagtcccgc

SEQ ID NO: 5705 - RNA, 17 nt, synthetic construct
  misc_feature 1..17: note = Synthetic
  source 1..17: mol_type = other RNA
gcgagccagtcccgcag

SEQ ID NO: 5706 - RNA, 17 nt, synthetic construct
  misc_feature 1..17: note = Synthetic
  source 1..17: mol_type = other RNA
agtcccgcaggaggatg

SEQ ID NO: 5707 - RNA, 17 nt, synthetic construct
  misc_feature 1..17: note = Synthetic
  source 1..17: mol_type = other RNA
tcccgcaggaggatgct

SEQ ID NO: 5708 - RNA, 17 nt, synthetic construct
  misc_feature 1..17: note = Synthetic
  source 1..17: mol_type = other RNA
cccgcaggaggatgctg

SEQ ID NO: 5709 - RNA, 17 nt, synthetic construct
  misc_feature 1..17: note = Synthetic
  source 1..17: mol_type = other RNA
aggaggctctctcgcac

SEQ ID NO: 5710 - RNA, 17 nt, synthetic construct
  misc_feature 1..17: note = Synthetic
  source 1..17: mol_type = other RNA
ctcgcacgtgagccttg

SEQ ID NO: 5711 - RNA, 17 nt, synthetic construct
  misc_feature 1..17: note = Synthetic
  source 1..17: mol_type = other RNA
gcacgtgagccttgacg

SEQ ID NO: 5712 - RNA, 17 nt, synthetic construct
  misc_feature 1..17: note = Synthetic
  source 1..17: mol_type = other RNA
gccactgcgtcggccct

SEQ ID NO: 5713 - RNA, 17 nt, synthetic construct
  misc_feature 1..17: note = Synthetic
  source 1..17: mol_type = other RNA
ccactgcgtcggccctc

SEQ ID NO: 5714 - RNA, 17 nt, synthetic construct
  misc_feature 1..17: note = Synthetic
  source 1..17: mol_type = other RNA
cactgcgtcggccctca

SEQ ID NO: 5715 - RNA, 17 nt, synthetic construct
  misc_feature 1..17: note = Synthetic
  source 1..17: mol_type = other RNA
ctgcgtcggccctcagg

SEQ ID NO: 5716 - RNA, 17 nt, synthetic construct
  misc_feature 1..17: note = Synthetic
  source 1..17: mol_type = other RNA
ccctcagggagagcgtg

SEQ ID NO: 5717 - RNA, 17 nt, synthetic construct
  misc_feature 1..17: note = Synthetic
  source 1..17: mol_type = other RNA
gtgctgaagcacaggtt

SEQ ID NO: 5718 - RNA, 17 nt, synthetic construct
  misc_feature 1..17: note = Synthetic
  source 1..17: mol_type = other RNA
aagcacaggttgtgggc

SEQ ID NO: 5719 - RNA, 17 nt, synthetic construct
  misc_feature 1..17: note = Synthetic
  source 1..17: mol_type = other RNA
tgtgggcctggatgatg

SEQ ID NO: 5720 - RNA, 17 nt, synthetic construct
  misc_feature 1..17: note = Synthetic
  source 1..17: mol_type = other RNA
gtgggcctggatgatgc

SEQ ID NO: 5721 - RNA, 17 nt, synthetic construct
  misc_feature 1..17: note = Synthetic
  source 1..17: mol_type = other RNA
ggtacaggctggcaaag

SEQ ID NO: 5722 - RNA, 17 nt, synthetic construct
  misc_feature 1..17: note = Synthetic
  source 1..17: mol_type = other RNA
caaagtcgaacaccacc

SEQ ID NO: 5723 - RNA, 17 nt, synthetic construct
  misc_feature 1..17: note = Synthetic
  source 1..17: mol_type = other RNA
aaagtcgaacaccacca

SEQ ID NO: 5724 - RNA, 17 nt, synthetic construct
  misc_feature 1..17: note = Synthetic
  source 1..17: mol_type = other RNA
accaccacggggttcac

SEQ ID NO: 5725 - RNA, 17 nt, synthetic construct
  misc_feature 1..17: note = Synthetic
  source 1..17: mol_type = other RNA
cggggttcacgtgaaac

SEQ ID NO: 5726 - RNA, 17 nt, synthetic construct
  misc_feature 1..17: note = Synthetic
  source 1..17: mol_type = other RNA
ggggttcacgtgaaacc

SEQ ID NO: 5727 - RNA, 17 nt, synthetic construct
  misc_feature 1..17: note = Synthetic
  source 1..17: mol_type = other RNA
tcacgtgaaacccggaa

SEQ ID NO: 5728 - RNA, 17 nt, synthetic construct
  misc_feature 1..17: note = Synthetic
  source 1..17: mol_type = other RNA
cacgtgaaacccggaag

SEQ ID NO: 5729 - RNA, 17 nt, synthetic construct
  misc_feature 1..17: note = Synthetic
  source 1..17: mol_type = other RNA
aacccggaagtggggtc

SEQ ID NO: 5730 - RNA, 17 nt, synthetic construct
  misc_feature 1..17: note = Synthetic
  source 1..17: mol_type = other RNA
ggccgctcctcgtcctc

SEQ ID NO: 5731 - RNA, 17 nt, synthetic construct
  misc_feature 1..17: note = Synthetic
  source 1..17: mol_type = other RNA
gtcctcccgggctgcgg

SEQ ID NO: 5732 - RNA, 17 nt, synthetic construct
  misc_feature 1..17: note = Synthetic
  source 1..17: mol_type = other RNA
gggctgcggccggacgc

SEQ ID NO: 5733 - RNA, 17 nt, synthetic construct
  misc_feature 1..17: note = Synthetic
  source 1..17: mol_type = other RNA
gcgcccctaaatcgccc

SEQ ID NO: 5734 - RNA, 17 nt, synthetic construct
  misc_feature 1..17: note = Synthetic
  source 1..17: mol_type = other RNA
cgcccctgggtgtccgg

SEQ ID NO: 5735 - RNA, 17 nt, synthetic construct
  misc_feature 1..17: note = Synthetic
  source 1..17: mol_type = other RNA
agcaggcacgtaaagac

SEQ ID NO: 5736 - RNA, 17 nt, synthetic construct
  misc_feature 1..17: note = Synthetic
  source 1..17: mol_type = other RNA
tggccgtcgtagatggt

SEQ ID NO: 5737 - RNA, 17 nt, synthetic construct
  misc_feature 1..17: note = Synthetic
  source 1..17: mol_type = other RNA
cgccaagcgcgcgacgg

SEQ ID NO: 5738 - RNA, 17 nt, synthetic construct
  misc_feature 1..17: note = Synthetic
  source 1..17: mol_type = other RNA
ccaagcgcgcgacggcc

SEQ ID NO: 5739 - RNA, 17 nt, synthetic construct
  misc_feature 1..17: note = Synthetic
  source 1..17: mol_type = other RNA
acggccgagagctccag

SEQ ID NO: 5740 - RNA, 17 nt, synthetic construct
  misc_feature 1..17: note = Synthetic
  source 1..17: mol_type = other RNA
cggccgagagctccaga

SEQ ID NO: 5741 - RNA, 17 nt, synthetic construct
  misc_feature 1..17: note = Synthetic
  source 1..17: mol_type = other RNA
aacagctggcccaccag

SEQ ID NO: 5742 - RNA, 17 nt, synthetic construct
  misc_feature 1..17: note = Synthetic
  source 1..17: mol_type = other RNA
acagctggcccaccagc

SEQ ID NO: 5743 - RNA, 17 nt, synthetic construct
  misc_feature 1..17: note = Synthetic
  source 1..17: mol_type = other RNA
cagctggcccaccagca

SEQ ID NO: 5744 - RNA, 17 nt, synthetic construct
  misc_feature 1..17: note = Synthetic
  source 1..17: mol_type = other RNA
cgatcaccccgcgttgc

SEQ ID NO: 5745 - RNA, 17 nt, synthetic construct
  misc_feature 1..17: note = Synthetic
  source 1..17: mol_type = other RNA
gcccggcggcgtagtag

SEQ ID NO: 5746 - RNA, 17 nt, synthetic construct
  misc_feature 1..17: note = Synthetic
  source 1..17: mol_type = other RNA
cccggcggcgtagtagg

SEQ ID NO: 5747 - RNA, 17 nt, synthetic construct
  misc_feature 1..17: note = Synthetic
  source 1..17: mol_type = other RNA
ccggcggcgtagtaggc

SEQ ID NO: 5748 - RNA, 17 nt, synthetic construct
  misc_feature 1..17: note = Synthetic
  source 1..17: mol_type = other RNA
tccttcttcttgtcctt

SEQ ID NO: 5749 - RNA, 17 nt, synthetic construct
  misc_feature 1..17: note = Synthetic
  source 1..17: mol_type = other RNA
cggcttcggccacggcg

SEQ ID NO: 5750 - RNA, 17 nt, synthetic construct
  misc_feature 1..17: note = Synthetic
  source 1..17: mol_type = other RNA
ggcgttgagcttgtagc

SEQ ID NO: 5751 - RNA, 17 nt, synthetic construct
  misc_feature 1..17: note = Synthetic
  source 1..17: mol_type = other RNA
cgttgagcttgtagctc

SEQ ID NO: 5752 - RNA, 17 nt, synthetic construct
  misc_feature 1..17: note = Synthetic
  source 1..17: mol_type = other RNA
tttatcttgctgcgctt

SEQ ID NO: 5753 - RNA, 17 nt, synthetic construct
  misc_feature 1..17: note = Synthetic
  source 1..17: mol_type = other RNA
ttatcttgctgcgcttc

SEQ ID NO: 5754 - RNA, 17 nt, synthetic construct
  misc_feature 1..17: note = Synthetic
  source 1..17: mol_type = other RNA
tggcctatgtcccacac

SEQ ID NO: 5755 - RNA, 17 nt, synthetic construct
  misc_feature 1..17: note = Synthetic
  source 1..17: mol_type = other RNA
atgcggccgtacccgtc

SEQ ID NO: 5756 - RNA, 17 nt, synthetic construct
  misc_feature 1..17: note = Synthetic
  source 1..17: mol_type = other RNA
tgcggccgtacccgtcc

SEQ ID NO: 5757 - RNA, 17 nt, synthetic construct
  misc_feature 1..17: note = Synthetic
  source 1..17: mol_type = other RNA
gcggccgtacccgtcca

SEQ ID NO: 5758 - RNA, 17 nt, synthetic construct
  misc_feature 1..17: note = Synthetic
  source 1..17: mol_type = other RNA
cggccgtacccgtccag

SEQ ID NO: 5759 - RNA, 17 nt, synthetic construct
  misc_feature 1..17: note = Synthetic
  source 1..17: mol_type = other RNA
ccgtcagcttggccagc

SEQ ID NO: 5760 - RNA, 17 nt, synthetic construct
  misc_feature 1..17: note = Synthetic
  source 1..17: mol_type = other RNA
tcagcttggccagcaag

SEQ ID NO: 5761 - RNA, 17 nt, synthetic construct
  misc_feature 1..17: note = Synthetic
  source 1..17: mol_type = other RNA
ccagcaagaagggccag

SEQ ID NO: 5762 - RNA, 17 nt, synthetic construct
  misc_feature 1..17: note = Synthetic
  source 1..17: mol_type = other RNA
tgatgttgtacccggtc

SEQ ID NO: 5763 - RNA, 17 nt, synthetic construct
  misc_feature 1..17: note = Synthetic
  source 1..17: mol_type = other RNA
tgtacccggtcacgaac

SEQ ID NO: 5764 - RNA, 17 nt, synthetic construct
  misc_feature 1..17: note = Synthetic
  source 1..17: mol_type = other RNA
gtacccggtcacgaact

SEQ ID NO: 5765 - RNA, 17 nt, synthetic construct
  misc_feature 1..17: note = Synthetic
  source 1..17: mol_type = other RNA
gggccgtactgtttcac

SEQ ID NO: 5766 - RNA, 17 nt, synthetic construct
  misc_feature 1..17: note = Synthetic
  source 1..17: mol_type = other RNA
actgtttcacaagggtc

SEQ ID NO: 5767 - RNA, 17 nt, synthetic construct
  misc_feature 1..17: note = Synthetic
  source 1..17: mol_type = other RNA
tgaaggccaacagcatc

SEQ ID NO: 5768 - RNA, 17 nt, synthetic construct
  misc_feature 1..17: note = Synthetic
  source 1..17: mol_type = other RNA
gcatctcgaattcgctg

SEQ ID NO: 5769 - RNA, 17 nt, synthetic construct
  misc_feature 1..17: note = Synthetic
  source 1..17: mol_type = other RNA
aattcgctgtcgaattc

SEQ ID NO: 5770 - RNA, 17 nt, synthetic construct
  misc_feature 1..17: note = Synthetic
  source 1..17: mol_type = other RNA
tgtcgaattccagaacc

SEQ ID NO: 5771 - RNA, 17 nt, synthetic construct
  misc_feature 1..17: note = Synthetic
  source 1..17: mol_type = other RNA
attccagaaccacgggc

SEQ ID NO: 5772 - RNA, 17 nt, synthetic construct
  misc_feature 1..17: note = Synthetic
  source 1..17: mol_type = other RNA
gccgccagctcgttcag

SEQ ID NO: 5773 - RNA, 17 nt, synthetic construct
  misc_feature 1..17: note = Synthetic
  source 1..17: mol_type = other RNA
ccgccagctcgttcagg

SEQ ID NO: 5774 - RNA, 17 nt, synthetic construct
  misc_feature 1..17: note = Synthetic
  source 1..17: mol_type = other RNA
gctcgttcaggtgggat

SEQ ID NO: 5775 - RNA, 17 nt, synthetic construct
  misc_feature 1..17: note = Synthetic
  source 1..17: mol_type = other RNA
ctcgttcaggtgggatt

SEQ ID NO: 5776 - RNA, 17 nt, synthetic construct
  misc_feature 1..17: note = Synthetic
  source 1..17: mol_type = other RNA
tcgttcaggtgggattc

SEQ ID NO: 5777 - RNA, 17 nt, synthetic construct
  misc_feature 1..17: note = Synthetic
  source 1..17: mol_type = other RNA
cgttcaggtgggattcg

SEQ ID NO: 5778 - RNA, 17 nt, synthetic construct
  misc_feature 1..17: note = Synthetic
  source 1..17: mol_type = other RNA
gggattcggggaggtcg

SEQ ID NO: 5779 - RNA, 17 nt, synthetic construct
  misc_feature 1..17: note = Synthetic
  source 1..17: mol_type = other RNA
ggattcggggaggtcgc

SEQ ID NO: 5780 - RNA, 17 nt, synthetic construct
  misc_feature 1..17: note = Synthetic
  source 1..17: mol_type = other RNA
cggggaggtcgcaggaa

SEQ ID NO: 5781 - RNA, 17 nt, synthetic construct
  misc_feature 1..17: note = Synthetic
  source 1..17: mol_type = other RNA
gaggtcgcaggaaccga

SEQ ID NO: 5782 - RNA, 17 nt, synthetic construct
  misc_feature 1..17: note = Synthetic
  source 1..17: mol_type = other RNA
caggaaccgagcgaaaa

SEQ ID NO: 5783 - RNA, 17 nt, synthetic construct
  misc_feature 1..17: note = Synthetic
  source 1..17: mol_type = other RNA
gaaccgagcgaaaacag

SEQ ID NO: 5784 - RNA, 17 nt, synthetic construct
  misc_feature 1..17: note = Synthetic
  source 1..17: mol_type = other RNA
aacaggaggacgtgctc

SEQ ID NO: 5785 - RNA, 17 nt, synthetic construct
  misc_feature 1..17: note = Synthetic
  source 1..17: mol_type = other RNA
cgtgctccagggcggtg

SEQ ID NO: 5786 - RNA, 17 nt, synthetic construct
  misc_feature 1..17: note = Synthetic
  source 1..17: mol_type = other RNA
cggtggtggacaggtcg

SEQ ID NO: 5787 - RNA, 17 nt, synthetic construct
  misc_feature 1..17: note = Synthetic
  source 1..17: mol_type = other RNA
acaggtcgtagagcaga

SEQ ID NO: 5788 - RNA, 17 nt, synthetic construct
  misc_feature 1..17: note = Synthetic
  source 1..17: mol_type = other RNA
tagagcagacaggatat

SEQ ID NO: 5789 - RNA, 17 nt, synthetic construct
  misc_feature 1..17: note = Synthetic
  source 1..17: mol_type = other RNA
ctggatgaccaggtcct

SEQ ID NO: 5790 - RNA, 17 nt, synthetic construct
  misc_feature 1..17: note = Synthetic
  source 1..17: mol_type = other RNA
ctccgggtgcccggcca

SEQ ID NO: 5791 - RNA, 17 nt, synthetic construct
  misc_feature 1..17: note = Synthetic
  source 1..17: mol_type = other RNA
tccgggtgcccggccac

SEQ ID NO: 5792 - RNA, 17 nt, synthetic construct
  misc_feature 1..17: note = Synthetic
  source 1..17: mol_type = other RNA
ccgccttgcattcgata

SEQ ID NO: 5793 - RNA, 17 nt, synthetic construct
  misc_feature 1..17: note = Synthetic
  source 1..17: mol_type = other RNA
attcgatatcgaagcac

SEQ ID NO: 5794 - RNA, 17 nt, synthetic construct
  misc_feature 1..17: note = Synthetic
  source 1..17: mol_type = other RNA
agttaaactcgacgtcg

SEQ ID NO: 5795 - RNA, 17 nt, synthetic construct
  misc_feature 1..17: note = Synthetic
  source 1..17: mol_type = other RNA
cgacgtcgctggatgtc

SEQ ID NO: 5796 - RNA, 17 nt, synthetic construct
  misc_feature 1..17: note = Synthetic
  source 1..17: mol_type = other RNA
ggatgtcccgaaggcca

SEQ ID NO: 5797 - RNA, 17 nt, synthetic construct
  misc_feature 1..17: note = Synthetic
  source 1..17: mol_type = other RNA
gatgtcccgaaggccat

SEQ ID NO: 5798 - RNA, 17 nt, synthetic construct
  misc_feature 1..17: note = Synthetic
  source 1..17: mol_type = other RNA
gccatcggggccgccgg

SEQ ID NO: 5799 - RNA, 17 nt, synthetic construct
  misc_feature 1..17: note = Synthetic
  source 1..17: mol_type = other RNA
tgttgttccggcccggt

SEQ ID NO: 5800 - RNA, 17 nt, synthetic construct
  misc_feature 1..17: note = Synthetic
  source 1..17: mol_type = other RNA
gtttgagacggtaccag

SEQ ID NO: 5801 - RNA, 17 nt, synthetic construct
  misc_feature 1..17: note = Synthetic
  source 1..17: mol_type = other RNA
ggtaccagccgaaggtg

SEQ ID NO: 5802 - RNA, 17 nt, synthetic construct
  misc_feature 1..17: note = Synthetic
  source 1..17: mol_type = other RNA
agccgaaggtgacgaac

SEQ ID NO: 5803 - RNA, 17 nt, synthetic construct
  misc_feature 1..17: note = Synthetic
  source 1..17: mol_type = other RNA
gccgaaggtgacgaacc

SEQ ID NO: 5804 - RNA, 17 nt, synthetic construct
  misc_feature 1..17: note = Synthetic
  source 1..17: mol_type = other RNA
acgaacccggggttgtc

SEQ ID NO: 5805 - RNA, 17 nt, synthetic construct
  misc_feature 1..17: note = Synthetic
  source 1..17: mol_type = other RNA
acccggggttgtccagg

SEQ ID NO: 5806 - RNA, 17 nt, synthetic construct
  misc_feature 1..17: note = Synthetic
  source 1..17: mol_type = other RNA
gggttgtccaggatgaa

SEQ ID NO: 5807 - RNA, 17 nt, synthetic construct
  misc_feature 1..17: note = Synthetic
  source 1..17: mol_type = other RNA
ctcgtacttcttgatgg

SEQ ID NO: 5808 - RNA, 17 nt, synthetic construct
  misc_feature 1..17: note = Synthetic
  source 1..17: mol_type = other RNA
acttcttgatggccggg

SEQ ID NO: 5809 - RNA, 17 nt, synthetic construct
  misc_feature 1..17: note = Synthetic
  source 1..17: mol_type = other RNA
gacagcacacgcccgct

SEQ ID NO: 5810 - RNA, 17 nt, synthetic construct
  misc_feature 1..17: note = Synthetic
  source 1..17: mol_type = other RNA
acgtagacgcggtaaaa

SEQ ID NO: 5811 - RNA, 17 nt, synthetic construct
  misc_feature 1..17: note = Synthetic
  source 1..17: mol_type = other RNA
agacgcggtaaaacaga

SEQ ID NO: 5812 - RNA, 17 nt, synthetic construct
  misc_feature 1..17: note = Synthetic
  source 1..17: mol_type = other RNA
gacgcggtaaaacagag

SEQ ID NO: 5813 - RNA, 17 nt, synthetic construct
  misc_feature 1..17: note = Synthetic
  source 1..17: mol_type = other RNA
gctccaccacctccgcc

SEQ ID NO: 5814 - RNA, 17 nt, synthetic construct
  misc_feature 1..17: note = Synthetic
  source 1..17: mol_type = other RNA
ccgcctcgaagtggtcc

SEQ ID NO: 5815 - RNA, 17 nt, synthetic construct
  misc_feature 1..17: note = Synthetic
  source 1..17: mol_type = other RNA
cgcctcgaagtggtccg

SEQ ID NO: 5816 - RNA, 17 nt, synthetic construct
  misc_feature 1..17: note = Synthetic
  source 1..17: mol_type = other RNA
tggtccgcggagatgcc

SEQ ID NO: 5817 - RNA, 17 nt, synthetic construct
  misc_feature 1..17: note = Synthetic
  source 1..17: mol_type = other RNA
ggtccgcggagatgccg

SEQ ID NO: 5818 - RNA, 17 nt, synthetic construct
  misc_feature 1..17: note = Synthetic
  source 1..17: mol_type = other RNA
gccgcggaacgacgcgc

SEQ ID NO: 5819 - RNA, 17 nt, synthetic construct
  misc_feature 1..17: note = Synthetic
  source 1..17: mol_type = other RNA
gcgcccggggactcgcg

SEQ ID NO: 5820 - RNA, 17 nt, synthetic construct
  misc_feature 1..17: note = Synthetic
  source 1..17: mol_type = other RNA
ccgcggccatgcgctcg

SEQ ID NO: 5821 - RNA, 17 nt, synthetic construct
  misc_feature 1..17: note = Synthetic
  source 1..17: mol_type = other RNA
gcgctcgcagagatctc

SEQ ID NO: 5822 - RNA, 17 nt, synthetic construct
  misc_feature 1..17: note = Synthetic
  source 1..17: mol_type = other RNA
cgctcgcagagatctcg

SEQ ID NO: 5823 - RNA, 17 nt, synthetic construct
  misc_feature 1..17: note = Synthetic
  source 1..17: mol_type = other RNA
tgccgcgtgccgtaaac

SEQ ID NO: 5824 - RNA, 17 nt, synthetic construct
  misc_feature 1..17: note = Synthetic
  source 1..17: mol_type = other RNA
ggccacccggtggcctt

SEQ ID NO: 5825 - RNA, 17 nt, synthetic construct
  misc_feature 1..17: note = Synthetic
  source 1..17: mol_type = other RNA
gccacccggtggccttc

SEQ ID NO: 5826 - RNA, 17 nt, synthetic construct
  misc_feature 1..17: note = Synthetic
  source 1..17: mol_type = other RNA
ccttccggagtcaggcc

SEQ ID NO: 5827 - RNA, 17 nt, synthetic construct
  misc_feature 1..17: note = Synthetic
  source 1..17: mol_type = other RNA
cttccggagtcaggccc

SEQ ID NO: 5828 - RNA, 20 nt, synthetic construct
  misc_feature 1..20: note = Synthetic
  source 1..20: mol_type = other RNA
actatagcgaatgcgatgaa

SEQ ID NO: 5829 - RNA, 17 nt, synthetic construct
  misc_feature 1..17: note = Synthetic
  source 1..17: mol_type = other RNA
atagcgaatgcgatgaa

SEQ ID NO: 5830 - RNA, 20 nt, synthetic construct
  misc_feature 1..20: note = Synthetic
  source 1..20: mol_type = other RNA
gtgatcggcgagtactgcat

SEQ ID NO: 5831 - RNA, 20 nt, synthetic construct
  misc_feature 1..20: note = Synthetic
  source 1..20: mol_type = other RNA
ttattctgccggacacccag

SEQ ID NO: 5832 - RNA, 20 nt, synthetic construct
  misc_feature 1..20: note = Synthetic
  source 1..20: mol_type = other RNA
catgcgaaagcagatccgct

SEQ ID NO: 5833 - RNA, 20 nt, synthetic construct
  misc_feature 1..20: note = Synthetic
  source 1..20: mol_type = other RNA
gcggccttcgaacagctcct

SEQ ID NO: 5834 - RNA, 17 nt, synthetic construct
  misc_feature 1..17: note = Synthetic
  source 1..17: mol_type = other RNA
atcggcgagtactgcat

SEQ ID NO: 5835 - RNA, 17 nt, synthetic construct
  misc_feature 1..17: note = Synthetic
  source 1..17: mol_type = other RNA
ttctgccggacacccag

SEQ ID NO: 5836 - RNA, 17 nt, synthetic construct
  misc_feature 1..17: note = Synthetic
  source 1..17: mol_type = other RNA
gcgaaagcagatccgct

SEQ ID NO: 5837 - RNA, 17 nt, synthetic construct
  misc_feature 1..17: note = Synthetic
  source 1..17: mol_type = other RNA
gccttcgaacagctcct

SEQ ID NO: 5838 - RNA, 20 nt, synthetic construct
  misc_feature 1..20: note = Synthetic
  source 1..20: mol_type = other RNA
cgggggtcccaaaaacaccc

SEQ ID NO: 5839 - RNA, 20 nt, synthetic construct
  misc_feature 1..20: note = Synthetic
  source 1..20: mol_type = other RNA
gggtcccaaaaacaccccgg

SEQ ID NO: 5840 - RNA, 20 nt, synthetic construct
  misc_feature 1..20: note = Synthetic
  source 1..20: mol_type = other RNA
ggcccccccgctgtacgcaa

SEQ ID NO: 5841 - RNA, 20 nt, synthetic construct
  misc_feature 1..20: note = Synthetic
  source 1..20: mol_type = other RNA
gcccccccgctgtacgcaac

SEQ ID NO: 5842 - RNA, 20 nt, synthetic construct
  misc_feature 1..20: note = Synthetic
  source 1..20: mol_type = other RNA
cccccccgctgtacgcaacg

SEQ ID NO: 5843 - RNA, 20 nt, synthetic construct
  misc_feature 1..20: note = Synthetic
  source 1..20: mol_type = other RNA
cgcaacggggcgcctgagcc

SEQ ID NO: 5844 - RNA, 20 nt, synthetic construct
  misc_feature 1..20: note = Synthetic
  source 1..20: mol_type = other RNA
taaccgtctcctcgacgact

SEQ ID NO: 5845 - RNA, 20 nt, synthetic construct
  misc_feature 1..20: note = Synthetic
  source 1..20: mol_type = other RNA
aaccgtctcctcgacgactt

SEQ ID NO: 5846 - RNA, 20 nt, synthetic construct
  misc_feature 1..20: note = Synthetic
  source 1..20: mol_type = other RNA
cgacgacttgggctttagcg

SEQ ID NO: 5847 - RNA, 20 nt, synthetic construct
  misc_feature 1..20: note = Synthetic
  source 1..20: mol_type = other RNA
gacgacttgggctttagcgc

SEQ ID NO: 5848 - RNA, 17 nt, synthetic construct
  misc_feature 1..17: note = Synthetic
  source 1..17: mol_type = other RNA
gggtcccaaaaacaccc

SEQ ID NO: 5849 - RNA, 17 nt, synthetic construct
  misc_feature 1..17: note = Synthetic
  source 1..17: mol_type = other RNA
tcccaaaaacaccccgg

SEQ ID NO: 5850 - RNA, 17 nt, synthetic construct
  misc_feature 1..17: note = Synthetic
  source 1..17: mol_type = other RNA
ccccccgctgtacgcaa

SEQ ID NO: 5851 - RNA, 17 nt, synthetic construct
  misc_feature 1..17: note = Synthetic
  source 1..17: mol_type = other RNA
cccccgctgtacgcaac

SEQ ID NO: 5852 - RNA, 17 nt, synthetic construct
  misc_feature 1..17: note = Synthetic
  source 1..17: mol_type = other RNA
ccccgctgtacgcaacg

SEQ ID NO: 5853 - RNA, 17 nt, synthetic construct
  misc_feature 1..17: note = Synthetic
  source 1..17: mol_type = other RNA
aacggggcgcctgagcc

SEQ ID NO: 5854 - RNA, 17 nt, synthetic construct
  misc_feature 1..17: note = Synthetic
  source 1..17: mol_type = other RNA
ccgtctcctcgacgact

SEQ ID NO: 5855 - RNA, 17 nt, synthetic construct
  misc_feature 1..17: note = Synthetic
  source 1..17: mol_type = other RNA
cgtctcctcgacgactt

SEQ ID NO: 5856 - RNA, 17 nt, synthetic construct
  misc_feature 1..17: note = Synthetic
  source 1..17: mol_type = other RNA
cgacttgggctttagcg

SEQ ID NO: 5857 - RNA, 17 nt, synthetic construct
  misc_feature 1..17: note = Synthetic
  source 1..17: mol_type = other RNA
gacttgggctttagcgc

SEQ ID NO: 5858 - RNA, 20 nt, synthetic construct
  misc_feature 1..20: note = Synthetic
  source 1..20: mol_type = other RNA
catgctcgatacctggaacg

SEQ ID NO: 5859 - RNA, 20 nt, synthetic construct
  misc_feature 1..20: note = Synthetic
  source 1..20: mol_type = other RNA
ctggaacgaggatctgtttt

SEQ ID NO: 5860 - RNA, 20 nt, synthetic construct
  misc_feature 1..20: note = Synthetic
  source 1..20: mol_type = other RNA
cgaccaacgccgacctgtac

SEQ ID NO: 5861 - RNA, 20 nt, synthetic construct
  misc_feature 1..20: note = Synthetic
  source 1..20: mol_type = other RNA
gaccaacgccgacctgtacc

SEQ ID NO: 5862 - RNA, 20 nt, synthetic construct
  misc_feature 1..20: note = Synthetic
  source 1..20: mol_type = other RNA
atcaacgctgcccagcgatg

SEQ ID NO: 5863 - RNA, 20 nt, synthetic construct
  misc_feature 1..20: note = Synthetic
  source 1..20: mol_type = other RNA
aacgctgcccagcgatgtgg

SEQ ID NO: 5864 - RNA, 20 nt, synthetic construct
  misc_feature 1..20: note = Synthetic
  source 1..20: mol_type = other RNA
tgcccagcgatgtggtggaa

SEQ ID NO: 5865 - RNA, 17 nt, synthetic construct
  misc_feature 1..17: note = Synthetic
  source 1..17: mol_type = other RNA
gctcgatacctggaacg

SEQ ID NO: 5866 - RNA, 17 nt, synthetic construct
  misc_feature 1..17: note = Synthetic
  source 1..17: mol_type = other RNA
gaacgaggatctgtttt

SEQ ID NO: 5867 - RNA, 17 nt, synthetic construct
  misc_feature 1..17: note = Synthetic
  source 1..17: mol_type = other RNA
ccaacgccgacctgtac

SEQ ID NO: 5868 - RNA, 17 nt, synthetic construct
  misc_feature 1..17: note = Synthetic
  source 1..17: mol_type = other RNA
caacgccgacctgtacc

SEQ ID NO: 5869 - RNA, 17 nt, synthetic construct
  misc_feature 1..17: note = Synthetic
  source 1..17: mol_type = other RNA
aacgctgcccagcgatg

SEQ ID NO: 5870 - RNA, 17 nt, synthetic construct
  misc_feature 1..17: note = Synthetic
  source 1..17: mol_type = other RNA
gctgcccagcgatgtgg

SEQ ID NO: 5871 - RNA, 17 nt, synthetic construct
  misc_feature 1..17: note = Synthetic
  source 1..17: mol_type = other RNA
ccagcgatgtggtggaa

SEQ ID NO: 5872 - RNA, 20 nt, synthetic construct
  misc_feature 1..20: note = Synthetic
  source 1..20: mol_type = other RNA
cattcgcgcccacggcgacg

SEQ ID NO: 5873 - RNA, 20 nt, synthetic construct
  misc_feature 1..20: note = Synthetic
  source 1..20: mol_type = other RNA
cgtggccttccctacgcttc

SEQ ID NO: 5874 - RNA, 20 nt, synthetic construct
  misc_feature 1..20: note = Synthetic
  source 1..20: mol_type = other RNA
acgcttccggccacccgcga

SEQ ID NO: 5875 - RNA, 20 nt, synthetic construct
  misc_feature 1..20: note = Synthetic
  source 1..20: mol_type = other RNA
ccggccacccgcgacggcct

SEQ ID NO: 5876 - RNA, 20 nt, synthetic construct
  misc_feature 1..20: note = Synthetic
  source 1..20: mol_type = other RNA
cggccacccgcgacggcctc

SEQ ID NO: 5877 - RNA, 20 nt, synthetic construct
  misc_feature 1..20: note = Synthetic
  source 1..20: mol_type = other RNA
gtttcttccacgccgagcta

SEQ ID NO: 5878 - RNA, 20 nt, synthetic construct
  misc_feature 1..20: note = Synthetic
  source 1..20: mol_type = other RNA
tttcttccacgccgagctac

SEQ ID NO: 5879 - RNA, 20 nt, synthetic construct
  misc_feature 1..20: note = Synthetic
  source 1..20: mol_type = other RNA
tccacgccgagctacgggcg

SEQ ID NO: 5880 - RNA, 20 nt, synthetic construct
  misc_feature 1..20: note = Synthetic
  source 1..20: mol_type = other RNA
ccacgccgagctacgggcgc

SEQ ID NO: 5881 - RNA, 17 nt, synthetic construct
  misc_feature 1..17: note = Synthetic
  source 1..17: mol_type = other RNA
tcgcgcccacggcgacg

SEQ ID NO: 5882 - RNA, 17 nt, synthetic construct
  misc_feature 1..17: note = Synthetic
  source 1..17: mol_type = other RNA
ggccttccctacgcttc

SEQ ID NO: 5883 - RNA, 17 nt, synthetic construct
  misc_feature 1..17: note = Synthetic
  source 1..17: mol_type = other RNA
cttccggccacccgcga

SEQ ID NO: 5884 - RNA, 17 nt, synthetic construct
  misc_feature 1..17: note = Synthetic
  source 1..17: mol_type = other RNA
gccacccgcgacggcct

SEQ ID NO: 5885 - RNA, 17 nt, synthetic construct
  misc_feature 1..17: note = Synthetic
  source 1..17: mol_type = other RNA
ccacccgcgacggcctc

SEQ ID NO: 5886 - RNA, 17 nt, synthetic construct
  misc_feature 1..17: note = Synthetic
  source 1..17: mol_type = other RNA
tcttccacgccgagcta

SEQ ID NO: 5887 - RNA, 17 nt, synthetic construct
  misc_feature 1..17: note = Synthetic
  source 1..17: mol_type = other RNA
cttccacgccgagctac

SEQ ID NO: 5888 - RNA, 17 nt, synthetic construct
  misc_feature 1..17: note = Synthetic
  source 1..17: mol_type = other RNA
acgccgagctacgggcg

SEQ ID NO: 5889 - RNA, 17 nt, synthetic construct
  misc_feature 1..17: note = Synthetic
  source 1..17: mol_type = other RNA
cgccgagctacgggcgc

SEQ ID NO: 5890 - RNA, 20 nt, synthetic construct
  misc_feature 1..20: note = Synthetic
  source 1..20: mol_type = other RNA
ctcctcccgcgcccgtagct

SEQ ID NO: 5891 - RNA, 20 nt, synthetic construct
  misc_feature 1..20: note = Synthetic
  source 1..20: mol_type = other RNA
gcgcttcgtagtagagcccg

SEQ ID NO: 5892 - RNA, 20 nt, synthetic construct
  misc_feature 1..20: note = Synthetic
  source 1..20: mol_type = other RNA
gtagagcccgaggccgtcgc

SEQ ID NO: 5893 - RNA, 17 nt, synthetic construct
  misc_feature 1..17: note = Synthetic
  source 1..17: mol_type = other RNA
ctcccgcgcccgtagct

SEQ ID NO: 5894 - RNA, 17 nt, synthetic construct
  misc_feature 1..17: note = Synthetic
  source 1..17: mol_type = other RNA
cttcgtagtagagcccg

SEQ ID NO: 5895 - RNA, 17 nt, synthetic construct
  misc_feature 1..17: note = Synthetic
  source 1..17: mol_type = other RNA
gagcccgaggccgtcgc

SEQ ID NO: 5896 - RNA, 20 nt, synthetic construct
  misc_feature 1..20: note = Synthetic
  source 1..20: mol_type = other RNA
tcgcgggtggccggaagcgt

SEQ ID NO: 5897 - RNA, 17 nt, synthetic construct
  misc_feature 1..17: note = Synthetic
  source 1..17: mol_type = other RNA
cgggtggccggaagcgt

SEQ ID NO: 5898 - RNA, 20 nt, synthetic construct
  misc_feature 1..20: note = Synthetic
  source 1..20: mol_type = other RNA
tagggaaggccacgtcgccg

SEQ ID NO: 5899 - RNA, 20 nt, synthetic construct
  misc_feature 1..20: note = Synthetic
  source 1..20: mol_type = other RNA
agggaaggccacgtcgccgt

SEQ ID NO: 5900 - RNA, 20 nt, synthetic construct
  misc_feature 1..20: note = Synthetic
  source 1..20: mol_type = other RNA
cgtgggcgcgaatgtcgatt

SEQ ID NO: 5901 - RNA, 20 nt, synthetic construct
  misc_feature 1..20: note = Synthetic
  source 1..20: mol_type = other RNA
gtgggcgcgaatgtcgattt

SEQ ID NO: 5902 - RNA, 17 nt, synthetic construct
  misc_feature 1..17: note = Synthetic
  source 1..17: mol_type = other RNA
ggaaggccacgtcgccg

SEQ ID NO: 5903 - RNA, 17 nt, synthetic construct
  misc_feature 1..17: note = Synthetic
  source 1..17: mol_type = other RNA
gaaggccacgtcgccgt

SEQ ID NO: 5904 - RNA, 17 nt, synthetic construct
  misc_feature 1..17: note = Synthetic
  source 1..17: mol_type = other RNA
gggcgcgaatgtcgatt

SEQ ID NO: 5905 - RNA, 17 nt, synthetic construct
  misc_feature 1..17: note = Synthetic
  source 1..17: mol_type = other RNA
ggcgcgaatgtcgattt

SEQ ID NO: 5906 - RNA, 20 nt, synthetic construct
  misc_feature 1..20: note = Synthetic
  source 1..20: mol_type = other RNA
cccccattccaccacatcgc

SEQ ID NO: 5907 - RNA, 17 nt, synthetic construct
  misc_feature 1..17: note = Synthetic
  source 1..17: mol_type = other RNA
ccattccaccacatcgc

SEQ ID NO: 5908 - RNA, 20 nt, synthetic construct
  misc_feature 1..20: note = Synthetic
  source 1..20: mol_type = other RNA
ctcccggtacaggtcggcgt

SEQ ID NO: 5909 - RNA, 20 nt, synthetic construct
  misc_feature 1..20: note = Synthetic
  source 1..20: mol_type = other RNA
cggtacaggtcggcgttggt

SEQ ID NO: 5910 - RNA, 20 nt, synthetic construct
  misc_feature 1..20: note = Synthetic
  source 1..20: mol_type = other RNA
cgaaaacagatcctcgttcc

SEQ ID NO: 5911 - RNA, 20 nt, synthetic construct
  misc_feature 1..20: note = Synthetic
  source 1..20: mol_type = other RNA
ctcgttccaggtatcgagca

SEQ ID NO: 5912 - RNA, 20 nt, synthetic construct
  misc_feature 1..20: note = Synthetic
  source 1..20: mol_type = other RNA
atcgagcatggtacatagcg

SEQ ID NO: 5913 - RNA, 20 nt, synthetic construct
  misc_feature 1..20: note = Synthetic
  source 1..20: mol_type = other RNA
tcgagcatggtacatagcgc

SEQ ID NO: 5914 - RNA, 20 nt, synthetic construct
  misc_feature 1..20: note = Synthetic
  source 1..20: mol_type = other RNA
cgagcatggtacatagcgcg

SEQ ID NO: 5915 - RNA, 20 nt, synthetic construct
  misc_feature 1..20: note = Synthetic
  source 1..20: mol_type = other RNA
cgctaaagcccaagtcgtcg

SEQ ID NO: 5916 - RNA, 17 nt, synthetic construct
  misc_feature 1..17: note = Synthetic
  source 1..17: mol_type = other RNA
ccggtacaggtcggcgt

SEQ ID NO: 5917 - RNA, 17 nt, synthetic construct
  misc_feature 1..17: note = Synthetic
  source 1..17: mol_type = other RNA
tacaggtcggcgttggt

SEQ ID NO: 5918 - RNA, 17 nt, synthetic construct
  misc_feature 1..17: note = Synthetic
  source 1..17: mol_type = other RNA
aaacagatcctcgttcc

SEQ ID NO: 5919 - RNA, 17 nt, synthetic construct
  misc_feature 1..17: note = Synthetic
  source 1..17: mol_type = other RNA
gttccaggtatcgagca

SEQ ID NO: 5920 - RNA, 17 nt, synthetic construct
  misc_feature 1..17: note = Synthetic
  source 1..17: mol_type = other RNA
gagcatggtacatagcg

SEQ ID NO: 5921 - RNA, 17 nt, synthetic construct
  misc_feature 1..17: note = Synthetic
  source 1..17: mol_type = other RNA
agcatggtacatagcgc

SEQ ID NO: 5922 - RNA, 17 nt, synthetic construct
  misc_feature 1..17: note = Synthetic
  source 1..17: mol_type = other RNA
gcatggtacatagcgcg

SEQ ID NO: 5923 - RNA, 17 nt, synthetic construct
  misc_feature 1..17: note = Synthetic
  source 1..17: mol_type = other RNA
taaagcccaagtcgtcg

SEQ ID NO: 5924 - RNA, 20 nt, synthetic construct
  misc_feature 1..20: note = Synthetic
  source 1..20: mol_type = other RNA
cgtcgaggagacggttaaag

SEQ ID NO: 5925 - RNA, 20 nt, synthetic construct
  misc_feature 1..20: note = Synthetic
  source 1..20: mol_type = other RNA
gtcgaggagacggttaaaga

SEQ ID NO: 5926 - RNA, 17 nt, synthetic construct
  misc_feature 1..17: note = Synthetic
  source 1..17: mol_type = other RNA
cgaggagacggttaaag

SEQ ID NO: 5927 - RNA, 17 nt, synthetic construct
  misc_feature 1..17: note = Synthetic
  source 1..17: mol_type = other RNA
gaggagacggttaaaga

SEQ ID NO: 5928 - RNA, 20 nt, synthetic construct
  misc_feature 1..20: note = Synthetic
  source 1..20: mol_type = other RNA
gagacggttaaagagggcgg

SEQ ID NO: 5929 - RNA, 20 nt, synthetic construct
  misc_feature 1..20: note = Synthetic
  source 1..20: mol_type = other RNA
agacggttaaagagggcggc

SEQ ID NO: 5930 - RNA, 20 nt, synthetic construct
  misc_feature 1..20: note = Synthetic
  source 1..20: mol_type = other RNA
gacggttaaagagggcggcg

SEQ ID NO: 5931 - RNA, 20 nt, synthetic construct
  misc_feature 1..20: note = Synthetic
  source 1..20: mol_type = other RNA
acggttaaagagggcggcgg

SEQ ID NO: 5932 - RNA, 20 nt, synthetic construct
  misc_feature 1..20: note = Synthetic
  source 1..20: mol_type = other RNA
cggttaaagagggcggcggg

SEQ ID NO: 5933 - RNA, 17 nt, synthetic construct
  misc_feature 1..17: note = Synthetic
  source 1..17: mol_type = other RNA
acggttaaagagggcgg

SEQ ID NO: 5934 - RNA, 17 nt, synthetic construct
  misc_feature 1..17: note = Synthetic
  source 1..17: mol_type = other RNA
cggttaaagagggcggc

SEQ ID NO: 5935 - RNA, 17 nt, synthetic construct
  misc_feature 1..17: note = Synthetic
  source 1..17: mol_type = other RNA
ggttaaagagggcggcg

SEQ ID NO: 5936 - RNA, 17 nt, synthetic construct
  misc_feature 1..17: note = Synthetic
  source 1..17: mol_type = other RNA
gttaaagagggcggcgg

SEQ ID NO: 5937 - RNA, 17 nt, synthetic construct
  misc_feature 1..17: note = Synthetic
  source 1..17: mol_type = other RNA
ttaaagagggcggcggg

SEQ ID NO: 5938 - RNA, 20 nt, synthetic construct
  misc_feature 1..20: note = Synthetic
  source 1..20: mol_type = other RNA
gcgccccgttgcgtacagcg

SEQ ID NO: 5939 - RNA, 20 nt, synthetic construct
  misc_feature 1..20: note = Synthetic
  source 1..20: mol_type = other RNA
cgccccgttgcgtacagcgg

SEQ ID NO: 5940 - RNA, 20 nt, synthetic construct
  misc_feature 1..20: note = Synthetic
  source 1..20: mol_type = other RNA
gccccgttgcgtacagcggg

SEQ ID NO: 5941 - RNA, 20 nt, synthetic construct
  misc_feature 1..20: note = Synthetic
  source 1..20: mol_type = other RNA
ccccgttgcgtacagcgggg

SEQ ID NO: 5942 - RNA, 17 nt, synthetic construct
  misc_feature 1..17: note = Synthetic
  source 1..17: mol_type = other RNA
ccccgttgcgtacagcg

SEQ ID NO: 5943 - RNA, 17 nt, synthetic construct
  misc_feature 1..17: note = Synthetic
  source 1..17: mol_type = other RNA
cccgttgcgtacagcgg

SEQ ID NO: 5944 - RNA, 17 nt, synthetic construct
  misc_feature 1..17: note = Synthetic
  source 1..17: mol_type = other RNA
ccgttgcgtacagcggg

SEQ ID NO: 5945 - RNA, 17 nt, synthetic construct
  misc_feature 1..17: note = Synthetic
  source 1..17: mol_type = other RNA
cgttgcgtacagcgggg

SEQ ID NO: 5946 - RNA, 20 nt, synthetic construct
  misc_feature 1..20: note = Synthetic
  source 1..20: mol_type = other RNA
cgtacagcgggggggccgcc

SEQ ID NO: 5947 - RNA, 20 nt, synthetic construct
  misc_feature 1..20: note = Synthetic
  source 1..20: mol_type = other RNA
gtacagcgggggggccgccg

SEQ ID NO: 5948 - RNA, 20 nt, synthetic construct
  misc_feature 1..20: note = Synthetic
  source 1..20: mol_type = other RNA
gggggccgccggggtgtttt

SEQ ID NO: 5949 - RNA, 20 nt, synthetic construct
  misc_feature 1..20: note = Synthetic
  source 1..20: mol_type = other RNA
ggggccgccggggtgttttt

SEQ ID NO: 5950 - RNA, 17 nt, synthetic construct
  misc_feature 1..17: note = Synthetic
  source 1..17: mol_type = other RNA
acagcgggggggccgcc

SEQ ID NO: 5951 - RNA, 17 nt, synthetic construct
  misc_feature 1..17: note = Synthetic
  source 1..17: mol_type = other RNA
cagcgggggggccgccg

SEQ ID NO: 5952 - RNA, 17 nt, synthetic construct
  misc_feature 1..17: note = Synthetic
  source 1..17: mol_type = other RNA
ggccgccggggtgtttt

SEQ ID NO: 5953 - RNA, 17 nt, synthetic construct
  misc_feature 1..17: note = Synthetic
  source 1..17: mol_type = other RNA
gccgccggggtgttttt

SEQ ID NO: 5954 - RNA, 20 nt, synthetic construct
  misc_feature 1..20: note = Synthetic
  source 1..20: mol_type = other RNA
gtgtttttgggacccccggc

SEQ ID NO: 5955 - RNA, 17 nt, synthetic construct
  misc_feature 1..17: note = Synthetic
  source 1..17: mol_type = other RNA
tttttgggacccccggc

SEQ ID NO: 5956 - RNA, 20 nt, synthetic construct
  misc_feature 1..20: note = Synthetic
  source 1..20: mol_type = other RNA
tgtttttgggacccccggcc

SEQ ID NO: 5957 - RNA, 17 nt, synthetic construct
  misc_feature 1..17: note = Synthetic
  source 1..17: mol_type = other RNA
ttttgggacccccggcc

SEQ ID NO: 5958 - RNA, 20 nt, synthetic construct
  misc_feature 1..20: note = Synthetic
  source 1..20: mol_type = other RNA
caaacagctcgtcgaccaag

SEQ ID NO: 5959 - RNA, 17 nt, synthetic construct
  misc_feature 1..17: note = Synthetic
  source 1..17: mol_type = other RNA
acagctcgtcgaccaag

SEQ ID NO: 5960 - RNA, 20 nt, synthetic construct
  misc_feature 1..20: note = Synthetic
  source 1..20: mol_type = other RNA
gctgtttgccgacatgaacg

SEQ ID NO: 5961 - RNA, 20 nt, synthetic construct
  misc_feature 1..20: note = Synthetic
  source 1..20: mol_type = other RNA
tttgccgacatgaacgcgga

SEQ ID NO: 5962 - RNA, 20 nt, synthetic construct
  misc_feature 1..20: note = Synthetic
  source 1..20: mol_type = other RNA
ttcgccaccgcccccccgcc

SEQ ID NO: 5963 - RNA, 20 nt, synthetic construct
  misc_feature 1..20: note = Synthetic
  source 1..20: mol_type = other RNA
ccaccgcccccccgcccggc

SEQ ID NO: 5964 - RNA, 20 nt, synthetic construct
  misc_feature 1..20: note = Synthetic
  source 1..20: mol_type = other RNA
caccgcccccccgcccggcc

SEQ ID NO: 5965 - RNA, 20 nt, synthetic construct
  misc_feature 1..20: note = Synthetic
  source 1..20: mol_type = other RNA
accgcccccccgcccggccg

SEQ ID NO: 5966 - RNA, 20 nt, synthetic construct
  misc_feature 1..20: note = Synthetic
  source 1..20: mol_type = other RNA
ccgcccccccgcccggccgg

SEQ ID NO: 5967 - RNA, 20 nt, synthetic construct
  misc_feature 1..20: note = Synthetic
  source 1..20: mol_type = other RNA
tatgtaccatgctcgatacc

SEQ ID NO: 5968 - RNA, 20 nt, synthetic construct
  misc_feature 1..20: note = Synthetic
  source 1..20: mol_type = other RNA
gcccagcgatgtggtggaat

SEQ ID NO: 5969 - RNA, 20 nt, synthetic construct
  misc_feature 1..20: note = Synthetic
  source 1..20: mol_type = other RNA
cccagcgatgtggtggaatg

SEQ ID NO: 5970 - RNA, 20 nt, synthetic construct
  misc_feature 1..20: note = Synthetic
  source 1..20: mol_type = other RNA
ccagcgatgtggtggaatgg

SEQ ID NO: 5971 - RNA, 20 nt, synthetic construct
  misc_feature 1..20: note = Synthetic
  source 1..20: mol_type = other RNA
cagcgatgtggtggaatggg

SEQ ID NO: 5972 - RNA, 20 nt, synthetic construct
  misc_feature 1..20: note = Synthetic
  source 1..20: mol_type = other RNA
caaatcgacattcgcgccca

SEQ ID NO: 5973 - RNA, 20 nt, synthetic construct
  misc_feature 1..20: note = Synthetic
  source 1..20: mol_type = other RNA
cgccgagctacgggcgcggg

SEQ ID NO: 5974 - RNA, 17 nt, synthetic construct
  misc_feature 1..17: note = Synthetic
  source 1..17: mol_type = other RNA
gtttgccgacatgaacg

SEQ ID NO: 5975 - RNA, 17 nt, synthetic construct
  misc_feature 1..17: note = Synthetic
  source 1..17: mol_type = other RNA
gccgacatgaacgcgga

SEQ ID NO: 5976 - RNA, 17 nt, synthetic construct
  misc_feature 1..17: note = Synthetic
  source 1..17: mol_type = other RNA
gccaccgcccccccgcc

SEQ ID NO: 5977 - RNA, 17 nt, synthetic construct
  misc_feature 1..17: note = Synthetic
  source 1..17: mol_type = other RNA
ccgcccccccgcccggc

SEQ ID NO: 5978 - RNA, 17 nt, synthetic construct
  misc_feature 1..17: note = Synthetic
  source 1..17: mol_type = other RNA
cgcccccccgcccggcc

SEQ ID NO: 5979 - RNA, 17 nt, synthetic construct
  misc_feature 1..17: note = Synthetic
  source 1..17: mol_type = other RNA
gcccccccgcccggccg

SEQ ID NO: 5980 - RNA, 17 nt, synthetic construct
  misc_feature 1..17: note = Synthetic
  source 1..17: mol_type = other RNA
cccccccgcccggccgg

SEQ ID NO: 5981 - RNA, 17 nt, synthetic construct
  misc_feature 1..17: note = Synthetic
  source 1..17: mol_type = other RNA
gtaccatgctcgatacc

SEQ ID NO: 5982 - RNA, 17 nt, synthetic construct
  misc_feature 1..17: note = Synthetic
  source 1..17: mol_type = other RNA
cagcgatgtggtggaat

SEQ ID NO: 5983 - RNA, 17 nt, synthetic construct
  misc_feature 1..17: note = Synthetic
  source 1..17: mol_type = other RNA
agcgatgtggtggaatg

SEQ ID NO: 5984 - RNA, 17 nt, synthetic construct
  misc_feature 1..17: note = Synthetic
  source 1..17: mol_type = other RNA
gcgatgtggtggaatgg

SEQ ID NO: 5985 - RNA, 17 nt, synthetic construct
  misc_feature 1..17: note = Synthetic
  source 1..17: mol_type = other RNA
cgatgtggtggaatggg

SEQ ID NO: 5986 - RNA, 17 nt, synthetic construct
  misc_feature 1..17: note = Synthetic
  source 1..17: mol_type = other RNA
atcgacattcgcgccca

SEQ ID NO: 5987 - RNA, 17 nt, synthetic construct
  misc_feature 1..17: note = Synthetic
  source 1..17: mol_type = other RNA
cgagctacgggcgcggg

SEQ ID NO: 5988 - RNA, 20 nt, synthetic construct
  misc_feature 1..20: note = Synthetic
  source 1..20: mol_type = other RNA
cccgcgcccgtagctcggcg

SEQ ID NO: 5989 - RNA, 20 nt, synthetic construct
  misc_feature 1..20: note = Synthetic
  source 1..20: mol_type = other RNA
agtagagcccgaggccgtcg

SEQ ID NO: 5990 - RNA, 20 nt, synthetic construct
  misc_feature 1..20: note = Synthetic
  source 1..20: mol_type = other RNA
gagcccgaggccgtcgcggg

SEQ ID NO: 5991 - RNA, 20 nt, synthetic construct
  misc_feature 1..20: note = Synthetic
  source 1..20: mol_type = other RNA
ccgaggccgtcgcgggtggc

SEQ ID NO: 5992 - RNA, 20 nt, synthetic construct
  misc_feature 1..20: note = Synthetic
  source 1..20: mol_type = other RNA
cgcgggtggccggaagcgta

SEQ ID NO: 5993 - RNA, 20 nt, synthetic construct
  misc_feature 1..20: note = Synthetic
  source 1..20: mol_type = other RNA
ggtggccggaagcgtaggga

SEQ ID NO: 5994 - RNA, 20 nt, synthetic construct
  misc_feature 1..20: note = Synthetic
  source 1..20: mol_type = other RNA
aatgtcgatttgggtgcgtt

SEQ ID NO: 5995 - RNA, 20 nt, synthetic construct
  misc_feature 1..20: note = Synthetic
  source 1..20: mol_type = other RNA
atgtcgatttgggtgcgttc

SEQ ID NO: 5996 - RNA, 20 nt, synthetic construct
  misc_feature 1..20: note = Synthetic
  source 1..20: mol_type = other RNA
tgtcgatttgggtgcgttcg

SEQ ID NO: 5997 - RNA, 20 nt, synthetic construct
  misc_feature 1..20: note = Synthetic
  source 1..20: mol_type = other RNA
ccccattccaccacatcgct

SEQ ID NO: 5998 - RNA, 20 nt, synthetic construct
  misc_feature 1..20: note = Synthetic
  source 1..20: mol_type = other RNA
catcgctgggcagcgttgat

SEQ ID NO: 5999 - RNA, 20 nt, synthetic construct
  misc_feature 1..20: note = Synthetic
  source 1..20: mol_type = other RNA
ttgataggaatttacactcc

SEQ ID NO: 6000 - RNA, 20 nt, synthetic construct
  misc_feature 1..20: note = Synthetic
  source 1..20: mol_type = other RNA
ggaatttacactcccggtac

SEQ ID NO: 6001 - RNA, 20 nt, synthetic construct
  misc_feature 1..20: note = Synthetic
  source 1..20: mol_type = other RNA
tttacactcccggtacaggt

SEQ ID NO: 6002 - RNA, 20 nt, synthetic construct
  misc_feature 1..20: note = Synthetic
  source 1..20: mol_type = other RNA
agcccaagtcgtcgaggaga

SEQ ID NO: 6003 - RNA, 20 nt, synthetic construct
  misc_feature 1..20: note = Synthetic
  source 1..20: mol_type = other RNA
gaggagacggttaaagaggg

SEQ ID NO: 6004 - RNA, 20 nt, synthetic construct
  misc_feature 1..20: note = Synthetic
  source 1..20: mol_type = other RNA
ggttaaagagggcggcgggg

SEQ ID NO: 6005 - RNA, 20 nt, synthetic construct
  misc_feature 1..20: note = Synthetic
  source 1..20: mol_type = other RNA
aaagagggcggcggggggga

SEQ ID NO: 6006 - RNA, 20 nt, synthetic construct
  misc_feature 1..20: note = Synthetic
  source 1..20: mol_type = other RNA
aagagggcggcgggggggac

SEQ ID NO: 6007 - RNA, 20 nt, synthetic construct
  misc_feature 1..20: note = Synthetic
  source 1..20: mol_type = other RNA
ggcggcgggggggacgggca

SEQ ID NO: 6008 - RNA, 20 nt, synthetic construct
  misc_feature 1..20: note = Synthetic
  source 1..20: mol_type = other RNA
gcggcgggggggacgggcat

SEQ ID NO: 6009 - RNA, 20 nt, synthetic construct
  misc_feature 1..20: note = Synthetic
  source 1..20: mol_type = other RNA
gcgggggggacgggcatggg

SEQ ID NO: 6010 - RNA, 20 nt, synthetic construct
  misc_feature 1..20: note = Synthetic
  source 1..20: mol_type = other RNA
cgggggggacgggcatgggt

SEQ ID NO: 6011 - RNA, 20 nt, synthetic construct
  misc_feature 1..20: note = Synthetic
  source 1..20: mol_type = other RNA
gggggggacgggcatgggtg

SEQ ID NO: 6012 - RNA, 20 nt, synthetic construct
  misc_feature 1..20: note = Synthetic
  source 1..20: mol_type = other RNA
ggggacgggcatgggtgggg

SEQ ID NO: 6013 - RNA, 20 nt, synthetic construct
  misc_feature 1..20: note = Synthetic
  source 1..20: mol_type = other RNA
gggacgggcatgggtgggga

SEQ ID NO: 6014 - RNA, 20 nt, synthetic construct
  misc_feature 1..20: note = Synthetic
  source 1..20: mol_type = other RNA
tgggtggggagggcatgagc

SEQ ID NO: 6015 - RNA, 20 nt, synthetic construct
  misc_feature 1..20: note = Synthetic
  source 1..20: mol_type = other RNA
gggtggggagggcatgagct

SEQ ID NO: 6016 - RNA, 20 nt, synthetic construct
  misc_feature 1..20: note = Synthetic
  source 1..20: mol_type = other RNA
gggagggcatgagctgggcc

SEQ ID NO: 6017 - RNA, 20 nt, synthetic construct
  misc_feature 1..20: note = Synthetic
  source 1..20: mol_type = other RNA
gcatgagctgggcctggctc

SEQ ID NO: 6018 - RNA, 20 nt, synthetic construct
  misc_feature 1..20: note = Synthetic
  source 1..20: mol_type = other RNA
aggcgccccgttgcgtacag

SEQ ID NO: 6019 - RNA, 20 nt, synthetic construct
  misc_feature 1..20: note = Synthetic
  source 1..20: mol_type = other RNA
ggcgccccgttgcgtacagc

SEQ ID NO: 6020 - RNA, 20 nt, synthetic construct
  misc_feature 1..20: note = Synthetic
  source 1..20: mol_type = other RNA
gcgtacagcgggggggccgc

SEQ ID NO: 6021 - RNA, 20 nt, synthetic construct
  misc_feature 1..20: note = Synthetic
  source 1..20: mol_type = other RNA
cggggtgtttttgggacccc

SEQ ID NO: 6022 - RNA, 20 nt, synthetic construct
  misc_feature 1..20: note = Synthetic
  source 1..20: mol_type = other RNA
ttttgggacccccggccggg

SEQ ID NO: 6023 - RNA, 20 nt, synthetic construct
  misc_feature 1..20: note = Synthetic
  source 1..20: mol_type = other RNA
tttgggacccccggccgggc

SEQ ID NO: 6024 - RNA, 20 nt, synthetic construct
  misc_feature 1..20: note = Synthetic
  source 1..20: mol_type = other RNA
ttgggacccccggccgggcg

SEQ ID NO: 6025 - RNA, 20 nt, synthetic construct
  misc_feature 1..20: note = Synthetic
  source 1..20: mol_type = other RNA
tgggacccccggccgggcgg

SEQ ID NO: 6026 - RNA, 20 nt, synthetic construct
  misc_feature 1..20: note = Synthetic
  source 1..20: mol_type = other RNA
gggacccccggccgggcggg

SEQ ID NO: 6027 - RNA, 20 nt, synthetic construct
  misc_feature 1..20: note = Synthetic
  source 1..20: mol_type = other RNA
ggacccccggccgggcgggg

SEQ ID NO: 6028 - RNA, 20 nt, synthetic construct
  misc_feature 1..20: note = Synthetic
  source 1..20: mol_type = other RNA
cccccggccgggcggggggg

SEQ ID NO: 6029 - RNA, 20 nt, synthetic construct
  misc_feature 1..20: note = Synthetic
  source 1..20: mol_type = other RNA
ccggccgggcgggggggcgg

SEQ ID NO: 6030 - RNA, 20 nt, synthetic construct
  misc_feature 1..20: note = Synthetic
  source 1..20: mol_type = other RNA
agcgccgtccgcgttcatgt

SEQ ID NO: 6031 - RNA, 17 nt, synthetic construct
  misc_feature 1..17: note = Synthetic
  source 1..17: mol_type = other RNA
gcgcccgtagctcggcg

SEQ ID NO: 6032 - RNA, 17 nt, synthetic construct
  misc_feature 1..17: note = Synthetic
  source 1..17: mol_type = other RNA
agagcccgaggccgtcg

SEQ ID NO: 6033 - RNA, 17 nt, synthetic construct
  misc_feature 1..17: note = Synthetic
  source 1..17: mol_type = other RNA
cccgaggccgtcgcggg

SEQ ID NO: 6034 - RNA, 17 nt, synthetic construct
  misc_feature 1..17: note = Synthetic
  source 1..17: mol_type = other RNA
aggccgtcgcgggtggc

SEQ ID NO: 6035 - RNA, 17 nt, synthetic construct
  misc_feature 1..17: note = Synthetic
  source 1..17: mol_type = other RNA
gggtggccggaagcgta

SEQ ID NO: 6036 - RNA, 17 nt, synthetic construct
  misc_feature 1..17: note = Synthetic
  source 1..17: mol_type = other RNA
ggccggaagcgtaggga

SEQ ID NO: 6037 - RNA, 17 nt, synthetic construct
  misc_feature 1..17: note = Synthetic
  source 1..17: mol_type = other RNA
gtcgatttgggtgcgtt

SEQ ID NO: 6038 - RNA, 17 nt, synthetic construct
  misc_feature 1..17: note = Synthetic
  source 1..17: mol_type = other RNA
tcgatttgggtgcgttc

SEQ ID NO: 6039 - RNA, 17 nt, synthetic construct
  misc_feature 1..17: note = Synthetic
  source 1..17: mol_type = other RNA
cgatttgggtgcgttcg

SEQ ID NO: 6040 - RNA, 17 nt, synthetic construct
  misc_feature 1..17: note = Synthetic
  source 1..17: mol_type = other RNA
cattccaccacatcgct

SEQ ID NO: 6041 - RNA, 17 nt, synthetic construct
  misc_feature 1..17: note = Synthetic
  source 1..17: mol_type = other RNA
cgctgggcagcgttgat

SEQ ID NO: 6042 - RNA, 17 nt, synthetic construct
  misc_feature 1..17: note = Synthetic
  source 1..17: mol_type = other RNA
ataggaatttacactcc

SEQ ID NO: 6043 - RNA, 17 nt, synthetic construct
  misc_feature 1..17: note = Synthetic
  source 1..17: mol_type = other RNA
atttacactcccggtac

SEQ ID NO: 6044 - RNA, 17 nt, synthetic construct
  misc_feature 1..17: note = Synthetic
  source 1..17: mol_type = other RNA
acactcccggtacaggt

SEQ ID NO: 6045 - RNA, 17 nt, synthetic construct
  misc_feature 1..17: note = Synthetic
  source 1..17: mol_type = other RNA
ccaagtcgtcgaggaga

SEQ ID NO: 6046 - RNA, 17 nt, synthetic construct
  misc_feature 1..17: note = Synthetic
  source 1..17: mol_type = other RNA
gagacggttaaagaggg

SEQ ID NO: 6047 - RNA, 17 nt, synthetic construct
  misc_feature 1..17: note = Synthetic
  source 1..17: mol_type = other RNA
taaagagggcggcgggg

SEQ ID NO: 6048 - RNA, 17 nt, synthetic construct
  misc_feature 1..17: note = Synthetic
  source 1..17: mol_type = other RNA
gagggcggcggggggga

SEQ ID NO: 6049 - RNA, 17 nt, synthetic construct
  misc_feature 1..17: note = Synthetic
  source 1..17: mol_type = other RNA
agggcggcgggggggac

SEQ ID NO: 6050 - RNA, 17 nt, synthetic construct
  misc_feature 1..17: note = Synthetic
  source 1..17: mol_type = other RNA
ggcgggggggacgggca

SEQ ID NO: 6051 - RNA, 17 nt, synthetic construct
  misc_feature 1..17: note = Synthetic
  source 1..17: mol_type = other RNA
gcgggggggacgggcat

SEQ ID NO: 6052 - RNA, 17 nt, synthetic construct
  misc_feature 1..17: note = Synthetic
  source 1..17: mol_type = other RNA
ggggggacgggcatggg

SEQ ID NO: 6053 - RNA, 17 nt, synthetic construct
  misc_feature 1..17: note = Synthetic
  source 1..17: mol_type = other RNA
gggggacgggcatgggt

SEQ ID NO: 6054 - RNA, 17 nt, synthetic construct
  misc_feature 1..17: note = Synthetic
  source 1..17: mol_type = other RNA
ggggacgggcatgggtg

SEQ ID NO: 6055 - RNA, 17 nt, synthetic construct
  misc_feature 1..17: note = Synthetic
  source 1..17: mol_type = other RNA
gacgggcatgggtgggg

SEQ ID NO: 6056 - RNA, 17 nt, synthetic construct
  misc_feature 1..17: note = Synthetic
  source 1..17: mol_type = other RNA
acgggcatgggtgggga

SEQ ID NO: 6057 - RNA, 17 nt, synthetic construct
  misc_feature 1..17: note = Synthetic
  source 1..17: mol_type = other RNA
gtggggagggcatgagc

SEQ ID NO: 6058 - RNA, 17 nt, synthetic construct
  misc_feature 1..17: note = Synthetic
  source 1..17: mol_type = other RNA
tggggagggcatgagct

SEQ ID NO: 6059 - RNA, 17 nt, synthetic construct
  misc_feature 1..17: note = Synthetic
  source 1..17: mol_type = other RNA
agggcatgagctgggcc

SEQ ID NO: 6060 - RNA, 17 nt, synthetic construct
  misc_feature 1..17: note = Synthetic
  source 1..17: mol_type = other RNA
tgagctgggcctggctc

SEQ ID NO: 6061 - RNA, 17 nt, synthetic construct
  misc_feature 1..17: note = Synthetic
  source 1..17: mol_type = other RNA
cgccccgttgcgtacag

SEQ ID NO: 6062 - RNA, 17 nt, synthetic construct
  misc_feature 1..17: note = Synthetic
  source 1..17: mol_type = other RNA
gccccgttgcgtacagc

SEQ ID NO: 6063 - RNA, 17 nt, synthetic construct
  misc_feature 1..17: note = Synthetic
  source 1..17: mol_type = other RNA
tacagcgggggggccgc

SEQ ID NO: 6064 - RNA, 17 nt, synthetic construct
  misc_feature 1..17: note = Synthetic
  source 1..17: mol_type = other RNA
ggtgtttttgggacccc

SEQ ID NO: 6065 - RNA, 17 nt, synthetic construct
  misc_feature 1..17: note = Synthetic
  source 1..17: mol_type = other RNA
tgggacccccggccggg

SEQ ID NO: 6066 - RNA, 17 nt, synthetic construct
  misc_feature 1..17: note = Synthetic
  source 1..17: mol_type = other RNA
gggacccccggccgggc

SEQ ID NO: 6067 - RNA, 17 nt, synthetic construct
  misc_feature 1..17: note = Synthetic
  source 1..17: mol_type = other RNA
ggacccccggccgggcg

SEQ ID NO: 6068 - RNA, 17 nt, synthetic construct
  misc_feature 1..17: note = Synthetic
  source 1..17: mol_type = other RNA
gacccccggccgggcgg

SEQ ID NO: 6069 - RNA, 17 nt, synthetic construct
  misc_feature 1..17: note = Synthetic
  source 1..17: mol_type = other RNA
acccccggccgggcggg

SEQ ID NO: 6070 - RNA, 17 nt, synthetic construct
  misc_feature 1..17: note = Synthetic
  source 1..17: mol_type = other RNA
cccccggccgggcgggg

SEQ ID NO: 6071 - RNA, 17 nt, synthetic construct
  misc_feature 1..17: note = Synthetic
  source 1..17: mol_type = other RNA
ccggccgggcggggggg

SEQ ID NO: 6072 - RNA, 17 nt, synthetic construct
  misc_feature 1..17: note = Synthetic
  source 1..17: mol_type = other RNA
gccgggcgggggggcgg

SEQ ID NO: 6073 - RNA, 17 nt, synthetic construct
  misc_feature 1..17: note = Synthetic
  source 1..17: mol_type = other RNA
gccgtccgcgttcatgt

SEQ ID NO: 6074 - RNA, 20 nt, synthetic construct
  misc_feature 1..20: note = Synthetic
  source 1..20: mol_type = other RNA
cgtgttggccaacttctgct

SEQ ID NO: 6075 - RNA, 20 nt, synthetic construct
  misc_feature 1..20: note = Synthetic
  source 1..20: mol_type = other RNA
acttctgctcggccctgtac

SEQ ID NO: 6076 - RNA, 20 nt, synthetic construct
  misc_feature 1..20: note = Synthetic
  source 1..20: mol_type = other RNA
ggtacctgcgcgccagcgtc

SEQ ID NO: 6077 - RNA, 20 nt, synthetic construct
  misc_feature 1..20: note = Synthetic
  source 1..20: mol_type = other RNA
cgtccggcagctgcaccgcc

SEQ ID NO: 6078 - RNA, 20 nt, synthetic construct
  misc_feature 1..20: note = Synthetic
  source 1..20: mol_type = other RNA
caccgccaggcgcacatgcg

SEQ ID NO: 6079 - RNA, 20 nt, synthetic construct
  misc_feature 1..20: note = Synthetic
  source 1..20: mol_type = other RNA
gcgcggacgcgatcgcgacc

SEQ ID NO: 6080 - RNA, 20 nt, synthetic construct
  misc_feature 1..20: note = Synthetic
  source 1..20: mol_type = other RNA
cgcggacgcgatcgcgacct

SEQ ID NO: 6081 - RNA, 20 nt, synthetic construct
  misc_feature 1..20: note = Synthetic
  source 1..20: mol_type = other RNA
aatgctgcgcgccacgatcg

SEQ ID NO: 6082 - RNA, 20 nt, synthetic construct
  misc_feature 1..20: note = Synthetic
  source 1..20: mol_type = other RNA
tgcgcgccacgatcgcggac

SEQ ID NO: 6083 - RNA, 20 nt, synthetic construct
  misc_feature 1..20: note = Synthetic
  source 1..20: mol_type = other RNA
ctaccgagagaccgctcgtc

SEQ ID NO: 6084 - RNA, 20 nt, synthetic construct
  misc_feature 1..20: note = Synthetic
  source 1..20: mol_type = other RNA
ttttgacccgcgagatccta

SEQ ID NO: 6085 - RNA, 20 nt, synthetic construct
  misc_feature 1..20: note = Synthetic
  source 1..20: mol_type = other RNA
tttgacccgcgagatcctat

SEQ ID NO: 6086 - RNA, 20 nt, synthetic construct
  misc_feature 1..20: note = Synthetic
  source 1..20: mol_type = other RNA
cgtacgccgagcagatgatg

SEQ ID NO: 6087 - RNA, 20 nt, synthetic construct
  misc_feature 1..20: note = Synthetic
  source 1..20: mol_type = other RNA
tgactgcctctgttgcgacc

SEQ ID NO: 6088 - RNA, 20 nt, synthetic construct
  misc_feature 1..20: note = Synthetic
  source 1..20: mol_type = other RNA
tctgttgcgacctggagagc

SEQ ID NO: 6089 - RNA, 20 nt, synthetic construct
  misc_feature 1..20: note = Synthetic
  source 1..20: mol_type = other RNA
cctggagagctggcgtcagt

SEQ ID NO: 6090 - RNA, 20 nt, synthetic construct
  misc_feature 1..20: note = Synthetic
  source 1..20: mol_type = other RNA
ggagagctggcgtcagttgg

SEQ ID NO: 6091 - RNA, 20 nt, synthetic construct
  misc_feature 1..20: note = Synthetic
  source 1..20: mol_type = other RNA
gagagctggcgtcagttggc

SEQ ID NO: 6092 - RNA, 20 nt, synthetic construct
  misc_feature 1..20: note = Synthetic
  source 1..20: mol_type = other RNA
cagcccttcatgttcgtcaa

SEQ ID NO: 6093 - RNA, 20 nt, synthetic construct
  misc_feature 1..20: note = Synthetic
  source 1..20: mol_type = other RNA
tcaacggagcgctcaccgtc

SEQ ID NO: 6094 - RNA, 20 nt, synthetic construct
  misc_feature 1..20: note = Synthetic
  source 1..20: mol_type = other RNA
caacggagcgctcaccgtcc

SEQ ID NO: 6095 - RNA, 20 nt, synthetic construct
  misc_feature 1..20: note = Synthetic
  source 1..20: mol_type = other RNA
aacggagcgctcaccgtccg

SEQ ID NO: 6096 - RNA, 20 nt, synthetic construct
  misc_feature 1..20: note = Synthetic
  source 1..20: mol_type = other RNA
cgtccggggagtgccaatcg

SEQ ID NO: 6097 - RNA, 20 nt, synthetic construct
  misc_feature 1..20: note = Synthetic
  source 1..20: mol_type = other RNA
gagtgccaatcgaggcccgc

SEQ ID NO: 6098 - RNA, 20 nt, synthetic construct
  misc_feature 1..20: note = Synthetic
  source 1..20: mol_type = other RNA
caatcgaggcccgccggctg

SEQ ID NO: 6099 - RNA, 20 nt, synthetic construct
  misc_feature 1..20: note = Synthetic
  source 1..20: mol_type = other RNA
aatcgaggcccgccggctgc

SEQ ID NO: 6100 - RNA, 20 nt, synthetic construct
  misc_feature 1..20: note = Synthetic
  source 1..20: mol_type = other RNA
cgagcaccttaacctcccgc

SEQ ID NO: 6101 - RNA, 20 nt, synthetic construct
  misc_feature 1..20: note = Synthetic
  source 1..20: mol_type = other RNA
cctcccgctggtgcgcagcg

SEQ ID NO: 6102 - RNA, 20 nt, synthetic construct
  misc_feature 1..20: note = Synthetic
  source 1..20: mol_type = other RNA
gctggtgcgcagcgcggcta

SEQ ID NO: 6103 - RNA, 20 nt, synthetic construct
  misc_feature 1..20: note = Synthetic
  source 1..20: mol_type = other RNA
ggtgcgcagcgcggctacgg

SEQ ID NO: 6104 - RNA, 20 nt, synthetic construct
  misc_feature 1..20: note = Synthetic
  source 1..20: mol_type = other RNA
agcgcggctacggaggagcc

SEQ ID NO: 6105 - RNA, 20 nt, synthetic construct
  misc_feature 1..20: note = Synthetic
  source 1..20: mol_type = other RNA
gcgcggctacggaggagcca

SEQ ID NO: 6106 - RNA, 20 nt, synthetic construct
  misc_feature 1..20: note = Synthetic
  source 1..20: mol_type = other RNA
cgcggctacggaggagccag

SEQ ID NO: 6107 - RNA, 20 nt, synthetic construct
  misc_feature 1..20: note = Synthetic
  source 1..20: mol_type = other RNA
acgacccctcccaccctgca

SEQ ID NO: 6108 - RNA, 20 nt, synthetic construct
  misc_feature 1..20: note = Synthetic
  source 1..20: mol_type = other RNA
tcccaccctgcatggcaacc

SEQ ID NO: 6109 - RNA, 20 nt, synthetic construct
  misc_feature 1..20: note = Synthetic
  source 1..20: mol_type = other RNA
ggcaaccaggcccgcgcctc

SEQ ID NO: 6110 - RNA, 20 nt, synthetic construct
  misc_feature 1..20: note = Synthetic
  source 1..20: mol_type = other RNA
gcaaccaggcccgcgcctct

SEQ ID NO: 6111 - RNA, 20 nt, synthetic construct
  misc_feature 1..20: note = Synthetic
  source 1..20: mol_type = other RNA
ccgcgcctctgggtacttta

SEQ ID NO: 6112 - RNA, 20 nt, synthetic construct
  misc_feature 1..20: note = Synthetic
  source 1..20: mol_type = other RNA
ggtactttatggtgttgatt

SEQ ID NO: 6113 - RNA, 20 nt, synthetic construct
  misc_feature 1..20: note = Synthetic
  source 1..20: mol_type = other RNA
gtactttatggtgttgattc

SEQ ID NO: 6114 - RNA, 20 nt, synthetic construct
  misc_feature 1..20: note = Synthetic
  source 1..20: mol_type = other RNA
ggtgttgattcgggcgaagt

SEQ ID NO: 6115 - RNA, 20 nt, synthetic construct
  misc_feature 1..20: note = Synthetic
  source 1..20: mol_type = other RNA
cttcacgacctcgccctccg

SEQ ID NO: 6116 - RNA, 20 nt, synthetic construct
  misc_feature 1..20: note = Synthetic
  source 1..20: mol_type = other RNA
cacgacctcgccctccgagg

SEQ ID NO: 6117 - RNA, 20 nt, synthetic construct
  misc_feature 1..20: note = Synthetic
  source 1..20: mol_type = other RNA
cgccctccgaggcggtcatg

SEQ ID NO: 6118 - RNA, 20 nt, synthetic construct
  misc_feature 1..20: note = Synthetic
  source 1..20: mol_type = other RNA
gccctccgaggcggtcatgc

SEQ ID NO: 6119 - RNA, 20 nt, synthetic construct
  misc_feature 1..20: note = Synthetic
  source 1..20: mol_type = other RNA
gcgcgtacgaaaaacaatta

SEQ ID NO: 6120 - RNA, 20 nt, synthetic construct
  misc_feature 1..20: note = Synthetic
  source 1..20: mol_type = other RNA
cgcgtacgaaaaacaattac

SEQ ID NO: 6121 - RNA, 20 nt, synthetic construct
  misc_feature 1..20: note = Synthetic
  source 1..20: mol_type = other RNA
caattacgggtctaccatcg

SEQ ID NO: 6122 - RNA, 20 nt, synthetic construct
  misc_feature 1..20: note = Synthetic
  source 1..20: mol_type = other RNA
aattacgggtctaccatcga

SEQ ID NO: 6123 - RNA, 20 nt, synthetic construct
  misc_feature 1..20: note = Synthetic
  source 1..20: mol_type = other RNA
cgagggcctgctcgatctcc

SEQ ID NO: 6124 - RNA, 20 nt, synthetic construct
  misc_feature 1..20: note = Synthetic
  source 1..20: mol_type = other RNA
ggacgacgacgcccccgaag

SEQ ID NO: 6125 - RNA, 20 nt, synthetic construct
  misc_feature 1..20: note = Synthetic
  source 1..20: mol_type = other RNA
cgacgacgcccccgaagagg

SEQ ID NO: 6126 - RNA, 20 nt, synthetic construct
  misc_feature 1..20: note = Synthetic
  source 1..20: mol_type = other RNA
gacgacgcccccgaagaggc

SEQ ID NO: 6127 - RNA, 20 nt, synthetic construct
  misc_feature 1..20: note = Synthetic
  source 1..20: mol_type = other RNA
acgacgcccccgaagaggcg

SEQ ID NO: 6128 - RNA, 20 nt, synthetic construct
  misc_feature 1..20: note = Synthetic
  source 1..20: mol_type = other RNA
cgcccccgaagaggcggggc

SEQ ID NO: 6129 - RNA, 20 nt, synthetic construct
  misc_feature 1..20: note = Synthetic
  source 1..20: mol_type = other RNA
ccccgaagaggcggggctgg

SEQ ID NO: 6130 - RNA, 20 nt, synthetic construct
  misc_feature 1..20: note = Synthetic
  source 1..20: mol_type = other RNA
gcgcctgtcctttctccccg

SEQ ID NO: 6131 - RNA, 20 nt, synthetic construct
  misc_feature 1..20: note = Synthetic
  source 1..20: mol_type = other RNA
cgcctgtcctttctccccgc

SEQ ID NO: 6132 - RNA, 20 nt, synthetic construct
  misc_feature 1..20: note = Synthetic
  source 1..20: mol_type = other RNA
acacacgcgcagactgtcga

SEQ ID NO: 6133 - RNA, 20 nt, synthetic construct
  misc_feature 1..20: note = Synthetic
  source 1..20: mol_type = other RNA
ccccccgaccgatgtcagcc

SEQ ID NO: 6134 - RNA, 20 nt, synthetic construct
  misc_feature 1..20: note = Synthetic
  source 1..20: mol_type = other RNA
cccccgaccgatgtcagcct

SEQ ID NO: 6135 - RNA, 20 nt, synthetic construct
  misc_feature 1..20: note = Synthetic
  source 1..20: mol_type = other RNA
ccccgaccgatgtcagcctg

SEQ ID NO: 6136 - RNA, 20 nt, synthetic construct
  misc_feature 1..20: note = Synthetic
  source 1..20: mol_type = other RNA
cccgaccgatgtcagcctgg

SEQ ID NO: 6137 - RNA, 20 nt, synthetic construct
  misc_feature 1..20: note = Synthetic
  source 1..20: mol_type = other RNA
ggggacgagctccacttaga

SEQ ID NO: 6138 - RNA, 20 nt, synthetic construct
  misc_feature 1..20: note = Synthetic
  source 1..20: mol_type = other RNA
cgagctccacttagacggcg

SEQ ID NO: 6139 - RNA, 20 nt, synthetic construct
  misc_feature 1..20: note = Synthetic
  source 1..20: mol_type = other RNA
ccacttagacggcgaggacg

SEQ ID NO: 6140 - RNA, 20 nt, synthetic construct
  misc_feature 1..20: note = Synthetic
  source 1..20: mol_type = other RNA
agacggcgaggacgtggcga

SEQ ID NO: 6141 - RNA, 20 nt, synthetic construct
  misc_feature 1..20: note = Synthetic
  source 1..20: mol_type = other RNA
cgcgctagacgatttcgatc

SEQ ID NO: 6142 - RNA, 20 nt, synthetic construct
  misc_feature 1..20: note = Synthetic
  source 1..20: mol_type = other RNA
cgatttcgatctggacatgt

SEQ ID NO: 6143 - RNA, 20 nt, synthetic construct
  misc_feature 1..20: note = Synthetic
  source 1..20: mol_type = other RNA
gatttcgatctggacatgtt

SEQ ID NO: 6144 - RNA, 20 nt, synthetic construct
  misc_feature 1..20: note = Synthetic
  source 1..20: mol_type = other RNA
atttcgatctggacatgttg

SEQ ID NO: 6145 - RNA, 20 nt, synthetic construct
  misc_feature 1..20: note = Synthetic
  source 1..20: mol_type = other RNA
tttcgatctggacatgttgg

SEQ ID NO: 6146 - RNA, 20 nt, synthetic construct
  misc_feature 1..20: note = Synthetic
  source 1..20: mol_type = other RNA
gatctggacatgttggggga

SEQ ID NO: 6147 - RNA, 20 nt, synthetic construct
  misc_feature 1..20: note = Synthetic
  source 1..20: mol_type = other RNA
atctggacatgttgggggac

SEQ ID NO: 6148 - RNA, 20 nt, synthetic construct
  misc_feature 1..20: note = Synthetic
  source 1..20: mol_type = other RNA
tctggacatgttgggggacg

SEQ ID NO: 6149 - RNA, 20 nt, synthetic construct
  misc_feature 1..20: note = Synthetic
  source 1..20: mol_type = other RNA
gttgggggacggggattccc

SEQ ID NO: 6150 - RNA, 20 nt, synthetic construct
  misc_feature 1..20: note = Synthetic
  source 1..20: mol_type = other RNA
ttgggggacggggattcccc

SEQ ID NO: 6151 - RNA, 20 nt, synthetic construct
  misc_feature 1..20: note = Synthetic
  source 1..20: mol_type = other RNA
tgggggacggggattccccg

SEQ ID NO: 6152 - RNA, 20 nt, synthetic construct
  misc_feature 1..20: note = Synthetic
  source 1..20: mol_type = other RNA
ggacggggattccccggggc

SEQ ID NO: 6153 - RNA, 20 nt, synthetic construct
  misc_feature 1..20: note = Synthetic
  source 1..20: mol_type = other RNA
gacggggattccccggggcc

SEQ ID NO: 6154 - RNA, 20 nt, synthetic construct
  misc_feature 1..20: note = Synthetic
  source 1..20: mol_type = other RNA
ccccacgactccgcccccta

SEQ ID NO: 6155 - RNA, 20 nt, synthetic construct
  misc_feature 1..20: note = Synthetic
  source 1..20: mol_type = other RNA
ctccgccccctacggcgctc

SEQ ID NO: 6156 - RNA, 20 nt, synthetic construct
  misc_feature 1..20: note = Synthetic
  source 1..20: mol_type = other RNA
cccctacggcgctctggata

SEQ ID NO: 6157 - RNA, 20 nt, synthetic construct
  misc_feature 1..20: note = Synthetic
  source 1..20: mol_type = other RNA
cagatgtttaccgatgccct

SEQ ID NO: 6158 - RNA, 20 nt, synthetic construct
  misc_feature 1..20: note = Synthetic
  source 1..20: mol_type = other RNA
gcccttggaattgacgagta

SEQ ID NO: 6159 - RNA, 20 nt, synthetic construct
  misc_feature 1..20: note = Synthetic
  source 1..20: mol_type = other RNA
cttggaattgacgagtacgg

SEQ ID NO: 6160 - RNA, 20 nt, synthetic construct
  misc_feature 1..20: note = Synthetic
  source 1..20: mol_type = other RNA
ttggaattgacgagtacggt

SEQ ID NO: 6161 - RNA, 20 nt, synthetic construct
  misc_feature 1..20: note = Synthetic
  source 1..20: mol_type = other RNA
caccgtactcgtcaattcca

SEQ ID NO: 6162 - RNA, 20 nt, synthetic construct
  misc_feature 1..20: note = Synthetic
  source 1..20: mol_type = other RNA
accgtactcgtcaattccaa

SEQ ID NO: 6163 - RNA, 20 nt, synthetic construct
  misc_feature 1..20: note = Synthetic
  source 1..20: mol_type = other RNA
ctcgtcaattccaagggcat

SEQ ID NO: 6164 - RNA, 20 nt, synthetic construct
  misc_feature 1..20: note = Synthetic
  source 1..20: mol_type = other RNA
catctgctcaaactcgaagt

SEQ ID NO: 6165 - RNA, 20 nt, synthetic construct
  misc_feature 1..20: note = Synthetic
  source 1..20: mol_type = other RNA
ggccatatccagagcgccgt

SEQ ID NO: 6166 - RNA, 20 nt, synthetic construct
  misc_feature 1..20: note = Synthetic
  source 1..20: mol_type = other RNA
gccatatccagagcgccgta

SEQ ID NO: 6167 - RNA, 20 nt, synthetic construct
  misc_feature 1..20: note = Synthetic
  source 1..20: mol_type = other RNA
ccatatccagagcgccgtag

SEQ ID NO: 6168 - RNA, 20 nt, synthetic construct
  misc_feature 1..20: note = Synthetic
  source 1..20: mol_type = other RNA
catatccagagcgccgtagg

SEQ ID NO: 6169 - RNA, 20 nt, synthetic construct
  misc_feature 1..20: note = Synthetic
  source 1..20: mol_type = other RNA
atccagagcgccgtaggggg

SEQ ID NO: 6170 - RNA, 20 nt, synthetic construct
  misc_feature 1..20: note = Synthetic
  source 1..20: mol_type = other RNA
cgccgtagggggcggagtcg

SEQ ID NO: 6171 - RNA, 20 nt, synthetic construct
  misc_feature 1..20: note = Synthetic
  source 1..20: mol_type = other RNA
gccgtagggggcggagtcgt

SEQ ID NO: 6172 - RNA, 20 nt, synthetic construct
  misc_feature 1..20: note = Synthetic
  source 1..20: mol_type = other RNA
ccgtagggggcggagtcgtg

SEQ ID NO: 6173 - RNA, 20 nt, synthetic construct
  misc_feature 1..20: note = Synthetic
  source 1..20: mol_type = other RNA
cgtagggggcggagtcgtgg

SEQ ID NO: 6174 - RNA, 20 nt, synthetic construct
  misc_feature 1..20: note = Synthetic
  source 1..20: mol_type = other RNA
gtagggggcggagtcgtggg

SEQ ID NO: 6175 - RNA, 20 nt, synthetic construct
  misc_feature 1..20: note = Synthetic
  source 1..20: mol_type = other RNA
gagtcgtggggggtaaatcc

SEQ ID NO: 6176 - RNA, 20 nt, synthetic construct
  misc_feature 1..20: note = Synthetic
  source 1..20: mol_type = other RNA
tggggggtaaatcccggccc

SEQ ID NO: 6177 - RNA, 20 nt, synthetic construct
  misc_feature 1..20: note = Synthetic
  source 1..20: mol_type = other RNA
ggggggtaaatcccggcccc

SEQ ID NO: 6178 - RNA, 20 nt, synthetic construct
  misc_feature 1..20: note = Synthetic
  source 1..20: mol_type = other RNA
gggggtaaatcccggccccg

SEQ ID NO: 6179 - RNA, 20 nt, synthetic construct
  misc_feature 1..20: note = Synthetic
  source 1..20: mol_type = other RNA
atcgaaatcgtctagcgcgt

SEQ ID NO: 6180 - RNA, 20 nt, synthetic construct
  misc_feature 1..20: note = Synthetic
  source 1..20: mol_type = other RNA
ccacgtcctcgccgtctaag

SEQ ID NO: 6181 - RNA, 20 nt, synthetic construct
  misc_feature 1..20: note = Synthetic
  source 1..20: mol_type = other RNA
ctaagtggagctcgtccccc

SEQ ID NO: 6182 - RNA, 20 nt, synthetic construct
  misc_feature 1..20: note = Synthetic
  source 1..20: mol_type = other RNA
ctcgtcccccaggctgacat

SEQ ID NO: 6183 - RNA, 20 nt, synthetic construct
  misc_feature 1..20: note = Synthetic
  source 1..20: mol_type = other RNA
tcccccaggctgacatcggt

SEQ ID NO: 6184 - RNA, 20 nt, synthetic construct
  misc_feature 1..20: note = Synthetic
  source 1..20: mol_type = other RNA
cccccaggctgacatcggtc

SEQ ID NO: 6185 - RNA, 20 nt, synthetic construct
  misc_feature 1..20: note = Synthetic
  source 1..20: mol_type = other RNA
ccccaggctgacatcggtcg

SEQ ID NO: 6186 - RNA, 20 nt, synthetic construct
  misc_feature 1..20: note = Synthetic
  source 1..20: mol_type = other RNA
cccaggctgacatcggtcgg

SEQ ID NO: 6187 - RNA, 20 nt, synthetic construct
  misc_feature 1..20: note = Synthetic
  source 1..20: mol_type = other RNA
ccaggctgacatcggtcggg

SEQ ID NO: 6188 - RNA, 20 nt, synthetic construct
  misc_feature 1..20: note = Synthetic
  source 1..20: mol_type = other RNA
caggctgacatcggtcgggg

SEQ ID NO: 6189 - RNA, 20 nt, synthetic construct
  misc_feature 1..20: note = Synthetic
  source 1..20: mol_type = other RNA
cagtctgcgcgtgtgtcccg

SEQ ID NO: 6190 - RNA, 20 nt, synthetic construct
  misc_feature 1..20: note = Synthetic
  source 1..20: mol_type = other RNA
agtctgcgcgtgtgtcccgc

SEQ ID NO: 6191 - RNA, 20 nt, synthetic construct
  misc_feature 1..20: note = Synthetic
  source 1..20: mol_type = other RNA
gtctgcgcgtgtgtcccgcg

SEQ ID NO: 6192 - RNA, 20 nt, synthetic construct
  misc_feature 1..20: note = Synthetic
  source 1..20: mol_type = other RNA
cgtgtgtcccgcggggagaa

SEQ ID NO: 6193 - RNA, 20 nt, synthetic construct
  misc_feature 1..20: note = Synthetic
  source 1..20: mol_type = other RNA
gtcccgcggggagaaaggac

SEQ ID NO: 6194 - RNA, 20 nt, synthetic construct
  misc_feature 1..20: note = Synthetic
  source 1..20: mol_type = other RNA
gcggggagaaaggacaggcg

SEQ ID NO: 6195 - RNA, 20 nt, synthetic construct
  misc_feature 1..20: note = Synthetic
  source 1..20: mol_type = other RNA
agccgccagccccgcctctt

SEQ ID NO: 6196 - RNA, 20 nt, synthetic construct
  misc_feature 1..20: note = Synthetic
  source 1..20: mol_type = other RNA
gccgccagccccgcctcttc

SEQ ID NO: 6197 - RNA, 20 nt, synthetic construct
  misc_feature 1..20: note = Synthetic
  source 1..20: mol_type = other RNA
ccgccagccccgcctcttcg

SEQ ID NO: 6198 - RNA, 20 nt, synthetic construct
  misc_feature 1..20: note = Synthetic
  source 1..20: mol_type = other RNA
cgccagccccgcctcttcgg

SEQ ID NO: 6199 - RNA, 20 nt, synthetic construct
  misc_feature 1..20: note = Synthetic
  source 1..20: mol_type = other RNA
tcttcgggggcgtcgtcgtc

SEQ ID NO: 6200 - RNA, 20 nt, synthetic construct
  misc_feature 1..20: note = Synthetic
  source 1..20: mol_type = other RNA
cttcgggggcgtcgtcgtcc

SEQ ID NO: 6201 - RNA, 20 nt, synthetic construct
  misc_feature 1..20: note = Synthetic
  source 1..20: mol_type = other RNA
cgtcgtccgggagatcgagc

SEQ ID NO: 6202 - RNA, 20 nt, synthetic construct
  misc_feature 1..20: note = Synthetic
  source 1..20: mol_type = other RNA
gagatcgagcaggccctcga

SEQ ID NO: 6203 - RNA, 20 nt, synthetic construct
  misc_feature 1..20: note = Synthetic
  source 1..20: mol_type = other RNA
aattgtttttcgtacgcgcg

SEQ ID NO: 6204 - RNA, 20 nt, synthetic construct
  misc_feature 1..20: note = Synthetic
  source 1..20: mol_type = other RNA
gtgttcccgcatgaccgcct

SEQ ID NO: 6205 - RNA, 20 nt, synthetic construct
  misc_feature 1..20: note = Synthetic
  source 1..20: mol_type = other RNA
ttcccgcatgaccgcctcgg

SEQ ID NO: 6206 - RNA, 20 nt, synthetic construct
  misc_feature 1..20: note = Synthetic
  source 1..20: mol_type = other RNA
tcccgcatgaccgcctcgga

SEQ ID NO: 6207 - RNA, 20 nt, synthetic construct
  misc_feature 1..20: note = Synthetic
  source 1..20: mol_type = other RNA
catgaccgcctcggagggcg

SEQ ID NO: 6208 - RNA, 20 nt, synthetic construct
  misc_feature 1..20: note = Synthetic
  source 1..20: mol_type = other RNA
ggagggcgaggtcgtgaagc

SEQ ID NO: 6209 - RNA, 20 nt, synthetic construct
  misc_feature 1..20: note = Synthetic
  source 1..20: mol_type = other RNA
caacaccataaagtacccag

SEQ ID NO: 6210 - RNA, 20 nt, synthetic construct
  misc_feature 1..20: note = Synthetic
  source 1..20: mol_type = other RNA
ccataaagtacccagaggcg

SEQ ID NO: 6211 - RNA, 20 nt, synthetic construct
  misc_feature 1..20: note = Synthetic
  source 1..20: mol_type = other RNA
cataaagtacccagaggcgc

SEQ ID NO: 6212 - RNA, 20 nt, synthetic construct
  misc_feature 1..20: note = Synthetic
  source 1..20: mol_type = other RNA
agtacccagaggcgcgggcc

SEQ ID NO: 6213 - RNA, 20 nt, synthetic construct
  misc_feature 1..20: note = Synthetic
  source 1..20: mol_type = other RNA
cgcgggcctggttgccatgc

SEQ ID NO: 6214 - RNA, 20 nt, synthetic construct
  misc_feature 1..20: note = Synthetic
  source 1..20: mol_type = other RNA
gcgggcctggttgccatgca

SEQ ID NO: 6215 - RNA, 20 nt, synthetic construct
  misc_feature 1..20: note = Synthetic
  source 1..20: mol_type = other RNA
ggcctggttgccatgcaggg

SEQ ID NO: 6216 - RNA, 20 nt, synthetic construct
  misc_feature 1..20: note = Synthetic
  source 1..20: mol_type = other RNA
gcctggttgccatgcagggt

SEQ ID NO: 6217 - RNA, 20 nt, synthetic construct
  misc_feature 1..20: note = Synthetic
  source 1..20: mol_type = other RNA
tggttgccatgcagggtggg

SEQ ID NO: 6218 - RNA, 20 nt, synthetic construct
  misc_feature 1..20: note = Synthetic
  source 1..20: mol_type = other RNA
ggttgccatgcagggtggga

SEQ ID NO: 6219 - RNA, 20 nt, synthetic construct
  misc_feature 1..20: note = Synthetic
  source 1..20: mol_type = other RNA
gttgccatgcagggtgggag

SEQ ID NO: 6220 - RNA, 20 nt, synthetic construct
  misc_feature 1..20: note = Synthetic
  source 1..20: mol_type = other RNA
agggtgggaggggtcgtcaa

SEQ ID NO: 6221 - RNA, 20 nt, synthetic construct
  misc_feature 1..20: note = Synthetic
  source 1..20: mol_type = other RNA
ggggtcgtcaacggcgcccc

SEQ ID NO: 6222 - RNA, 20 nt, synthetic construct
  misc_feature 1..20: note = Synthetic
  source 1..20: mol_type = other RNA
gtagccgcgctgcgcaccag

SEQ ID NO: 6223 - RNA, 20 nt, synthetic construct
  misc_feature 1..20: note = Synthetic
  source 1..20: mol_type = other RNA
tagccgcgctgcgcaccagc

SEQ ID NO: 6224 - RNA, 20 nt, synthetic construct
  misc_feature 1..20: note = Synthetic
  source 1..20: mol_type = other RNA
ccgcgctgcgcaccagcggg

SEQ ID NO: 6225 - RNA, 20 nt, synthetic construct
  misc_feature 1..20: note = Synthetic
  source 1..20: mol_type = other RNA
tgcgcaccagcgggaggtta

SEQ ID NO: 6226 - RNA, 20 nt, synthetic construct
  misc_feature 1..20: note = Synthetic
  source 1..20: mol_type = other RNA
ggttaaggtgctcgcgaatg

SEQ ID NO: 6227 - RNA, 20 nt, synthetic construct
  misc_feature 1..20: note = Synthetic
  source 1..20: mol_type = other RNA
tgtggtttagctcccgcagc

SEQ ID NO: 6228 - RNA, 20 nt, synthetic construct
  misc_feature 1..20: note = Synthetic
  source 1..20: mol_type = other RNA
ggtttagctcccgcagccgg

SEQ ID NO: 6229 - RNA, 20 nt, synthetic construct
  misc_feature 1..20: note = Synthetic
  source 1..20: mol_type = other RNA
gtttagctcccgcagccggc

SEQ ID NO: 6230 - RNA, 20 nt, synthetic construct
  misc_feature 1..20: note = Synthetic
  source 1..20: mol_type = other RNA
cgcagccggcgggcctcgat

SEQ ID NO: 6231 - RNA, 20 nt, synthetic construct
  misc_feature 1..20: note = Synthetic
  source 1..20: mol_type = other RNA
gggcctcgattggcactccc

SEQ ID NO: 6232 - RNA, 20 nt, synthetic construct
  misc_feature 1..20: note = Synthetic
  source 1..20: mol_type = other RNA
ctcgattggcactccccgga

SEQ ID NO: 6233 - RNA, 20 nt, synthetic construct
  misc_feature 1..20: note = Synthetic
  source 1..20: mol_type = other RNA
cgctccgttgacgaacatga

SEQ ID NO: 6234 - RNA, 20 nt, synthetic construct
  misc_feature 1..20: note = Synthetic
  source 1..20: mol_type = other RNA
gctccgttgacgaacatgaa

SEQ ID NO: 6235 - RNA, 20 nt, synthetic construct
  misc_feature 1..20: note = Synthetic
  source 1..20: mol_type = other RNA
cgttgacgaacatgaagggc

SEQ ID NO: 6236 - RNA, 20 nt, synthetic construct
  misc_feature 1..20: note = Synthetic
  source 1..20: mol_type = other RNA
ccaactgacgccagctctcc

SEQ ID NO: 6237 - RNA, 20 nt, synthetic construct
  misc_feature 1..20: note = Synthetic
  source 1..20: mol_type = other RNA
agctctccaggtcgcaacag

SEQ ID NO: 6238 - RNA, 20 nt, synthetic construct
  misc_feature 1..20: note = Synthetic
  source 1..20: mol_type = other RNA
cgcaacagaggcagtcaaac

SEQ ID NO: 6239 - RNA, 20 nt, synthetic construct
  misc_feature 1..20: note = Synthetic
  source 1..20: mol_type = other RNA
acagaggcagtcaaacaggt

SEQ ID NO: 6240 - RNA, 20 nt, synthetic construct
  misc_feature 1..20: note = Synthetic
  source 1..20: mol_type = other RNA
cagaggcagtcaaacaggtc

SEQ ID NO: 6241 - RNA, 20 nt, synthetic construct
  misc_feature 1..20: note = Synthetic
  source 1..20: mol_type = other RNA
gtcgggccgcatcatctgct

SEQ ID NO: 6242 - RNA, 20 nt, synthetic construct
  misc_feature 1..20: note = Synthetic
  source 1..20: mol_type = other RNA
catcatctgctcggcgtacg

SEQ ID NO: 6243 - RNA, 20 nt, synthetic construct
  misc_feature 1..20: note = Synthetic
  source 1..20: mol_type = other RNA
gctcggcgtacgcggcccat

SEQ ID NO: 6244 - RNA, 20 nt, synthetic construct
  misc_feature 1..20: note = Synthetic
  source 1..20: mol_type = other RNA
acgcggcccataggatctcg

SEQ ID NO: 6245 - RNA, 20 nt, synthetic construct
  misc_feature 1..20: note = Synthetic
  source 1..20: mol_type = other RNA
cgcggcccataggatctcgc

SEQ ID NO: 6246 - RNA, 20 nt, synthetic construct
  misc_feature 1..20: note = Synthetic
  source 1..20: mol_type = other RNA
caaaacacgcgccagacgag

SEQ ID NO: 6247 - RNA, 20 nt, synthetic construct
  misc_feature 1..20: note = Synthetic
  source 1..20: mol_type = other RNA
gcgccagacgagcggtctct

SEQ ID NO: 6248 - RNA, 20 nt, synthetic construct
  misc_feature 1..20: note = Synthetic
  source 1..20: mol_type = other RNA
gtagtacctgtccgcgatcg

SEQ ID NO: 6249 - RNA, 20 nt, synthetic construct
  misc_feature 1..20: note = Synthetic
  source 1..20: mol_type = other RNA
tggcgcgcagcatttctccc

SEQ ID NO: 6250 - RNA, 20 nt, synthetic construct
  misc_feature 1..20: note = Synthetic
  source 1..20: mol_type = other RNA
cgcgtccgcgcatgtgcgcc

SEQ ID NO: 6251 - RNA, 20 nt, synthetic construct
  misc_feature 1..20: note = Synthetic
  source 1..20: mol_type = other RNA
gtccgcgcatgtgcgcctgg

SEQ ID NO: 6252 - RNA, 20 nt, synthetic construct
  misc_feature 1..20: note = Synthetic
  source 1..20: mol_type = other RNA
gcgcctggcggtgcagctgc

SEQ ID NO: 6253 - RNA, 20 nt, synthetic construct
  misc_feature 1..20: note = Synthetic
  source 1..20: mol_type = other RNA
gcggtgcagctgccggacgc

SEQ ID NO: 6254 - RNA, 20 nt, synthetic construct
  misc_feature 1..20: note = Synthetic
  source 1..20: mol_type = other RNA
gctgccggacgctggcgcgc

SEQ ID NO: 6255 - RNA, 20 nt, synthetic construct
  misc_feature 1..20: note = Synthetic
  source 1..20: mol_type = other RNA
ggacgctggcgcgcaggtac

SEQ ID NO: 6256 - RNA, 20 nt, synthetic construct
  misc_feature 1..20: note = Synthetic
  source 1..20: mol_type = other RNA
tggcgcgcaggtaccggtac

SEQ ID NO: 6257 - RNA, 20 nt, synthetic construct
  misc_feature 1..20: note = Synthetic
  source 1..20: mol_type = other RNA
ggcgcgcaggtaccggtaca

SEQ ID NO: 6258 - RNA, 20 nt, synthetic construct
  misc_feature 1..20: note = Synthetic
  source 1..20: mol_type = other RNA
gtacagggccgagcagaagt

SEQ ID NO: 6259 - RNA, 20 nt, synthetic construct
  misc_feature 1..20: note = Synthetic
  source 1..20: mol_type = other RNA
cgagcagaagttggccaaca

SEQ ID NO: 6260 - RNA, 17 nt, synthetic construct
  misc_feature 1..17: note = Synthetic
  source 1..17: mol_type = other RNA
gttggccaacttctgct

SEQ ID NO: 6261 - RNA, 17 nt, synthetic construct
  misc_feature 1..17: note = Synthetic
  source 1..17: mol_type = other RNA
tctgctcggccctgtac

SEQ ID NO: 6262 - RNA, 17 nt, synthetic construct
  misc_feature 1..17: note = Synthetic
  source 1..17: mol_type = other RNA
acctgcgcgccagcgtc

SEQ ID NO: 6263 - RNA, 17 nt, synthetic construct
  misc_feature 1..17: note = Synthetic
  source 1..17: mol_type = other RNA
ccggcagctgcaccgcc

SEQ ID NO: 6264 - RNA, 17 nt, synthetic construct
  misc_feature 1..17: note = Synthetic
  source 1..17: mol_type = other RNA
cgccaggcgcacatgcg

SEQ ID NO: 6265 - RNA, 17 nt, synthetic construct
  misc_feature 1..17: note = Synthetic
  source 1..17: mol_type = other RNA
cggacgcgatcgcgacc

SEQ ID NO: 6266 - RNA, 17 nt, synthetic construct
  misc_feature 1..17: note = Synthetic
  source 1..17: mol_type = other RNA
ggacgcgatcgcgacct

SEQ ID NO: 6267 - RNA, 17 nt, synthetic construct
  misc_feature 1..17: note = Synthetic
  source 1..17: mol_type = other RNA
gctgcgcgccacgatcg

SEQ ID NO: 6268 - RNA, 17 nt, synthetic construct
  misc_feature 1..17: note = Synthetic
  source 1..17: mol_type = other RNA
gcgccacgatcgcggac

SEQ ID NO: 6269 - RNA, 17 nt, synthetic construct
  misc_feature 1..17: note = Synthetic
  source 1..17: mol_type = other RNA
ccgagagaccgctcgtc

SEQ ID NO: 6270 - RNA, 17 nt, synthetic construct
  misc_feature 1..17: note = Synthetic
  source 1..17: mol_type = other RNA
tgacccgcgagatccta

SEQ ID NO: 6271 - RNA, 17 nt, synthetic construct
  misc_feature 1..17: note = Synthetic
  source 1..17: mol_type = other RNA
gacccgcgagatcctat

SEQ ID NO: 6272 - RNA, 17 nt, synthetic construct
  misc_feature 1..17: note = Synthetic
  source 1..17: mol_type = other RNA
acgccgagcagatgatg

SEQ ID NO: 6273 - RNA, 17 nt, synthetic construct
  misc_feature 1..17: note = Synthetic
  source 1..17: mol_type = other RNA
ctgcctctgttgcgacc

SEQ ID NO: 6274 - RNA, 17 nt, synthetic construct
  misc_feature 1..17: note = Synthetic
  source 1..17: mol_type = other RNA
gttgcgacctggagagc

SEQ ID NO: 6275 - RNA, 17 nt, synthetic construct
  misc_feature 1..17: note = Synthetic
  source 1..17: mol_type = other RNA
ggagagctggcgtcagt

SEQ ID NO: 6276 - RNA, 17 nt, synthetic construct
  misc_feature 1..17: note = Synthetic
  source 1..17: mol_type = other RNA
gagctggcgtcagttgg

SEQ ID NO: 6277 - RNA, 17 nt, synthetic construct
  misc_feature 1..17: note = Synthetic
  source 1..17: mol_type = other RNA
agctggcgtcagttggc

SEQ ID NO: 6278 - RNA, 17 nt, synthetic construct
  misc_feature 1..17: note = Synthetic
  source 1..17: mol_type = other RNA
cccttcatgttcgtcaa

SEQ ID NO: 6279 - RNA, 17 nt, synthetic construct
  misc_feature 1..17: note = Synthetic
  source 1..17: mol_type = other RNA
acggagcgctcaccgtc

SEQ ID NO: 6280 - RNA, 17 nt, synthetic construct
  misc_feature 1..17: note = Synthetic
  source 1..17: mol_type = other RNA
cggagcgctcaccgtcc

SEQ ID NO: 6281 - RNA, 17 nt, synthetic construct
  misc_feature 1..17: note = Synthetic
  source 1..17: mol_type = other RNA
ggagcgctcaccgtccg

SEQ ID NO: 6282 - RNA, 17 nt, synthetic construct
  misc_feature 1..17: note = Synthetic
  source 1..17: mol_type = other RNA
ccggggagtgccaatcg

SEQ ID NO: 6283 - RNA, 17 nt, synthetic construct
  misc_feature 1..17: note = Synthetic
  source 1..17: mol_type = other RNA
tgccaatcgaggcccgc

SEQ ID NO: 6284 - RNA, 17 nt, synthetic construct
  misc_feature 1..17: note = Synthetic
  source 1..17: mol_type = other RNA
tcgaggcccgccggctg

SEQ ID NO: 6285 - RNA, 17 nt, synthetic construct
  misc_feature 1..17: note = Synthetic
  source 1..17: mol_type = other RNA
cgaggcccgccggctgc

SEQ ID NO: 6286 - RNA, 17 nt, synthetic construct
  misc_feature 1..17: note = Synthetic
  source 1..17: mol_type = other RNA
gcaccttaacctcccgc

SEQ ID NO: 6287 - RNA, 17 nt, synthetic construct
  misc_feature 1..17: note = Synthetic
  source 1..17: mol_type = other RNA
cccgctggtgcgcagcg

SEQ ID NO: 6288 - RNA, 17 nt, synthetic construct
  misc_feature 1..17: note = Synthetic
  source 1..17: mol_type = other RNA
ggtgcgcagcgcggcta

SEQ ID NO: 6289 - RNA, 17 nt, synthetic construct
  misc_feature 1..17: note = Synthetic
  source 1..17: mol_type = other RNA
gcgcagcgcggctacgg

SEQ ID NO: 6290 - RNA, 17 nt, synthetic construct
  misc_feature 1..17: note = Synthetic
  source 1..17: mol_type = other RNA
gcggctacggaggagcc

SEQ ID NO: 6291 - RNA, 17 nt, synthetic construct
  misc_feature 1..17: note = Synthetic
  source 1..17: mol_type = other RNA
cggctacggaggagcca

SEQ ID NO: 6292 - RNA, 17 nt, synthetic construct
  misc_feature 1..17: note = Synthetic
  source 1..17: mol_type = other RNA
ggctacggaggagccag

SEQ ID NO: 6293 - RNA, 17 nt, synthetic construct
  misc_feature 1..17: note = Synthetic
  source 1..17: mol_type = other RNA
acccctcccaccctgca

SEQ ID NO: 6294 - RNA, 17 nt, synthetic construct
  misc_feature 1..17: note = Synthetic
  source 1..17: mol_type = other RNA
caccctgcatggcaacc

SEQ ID NO: 6295 - RNA, 17 nt, synthetic construct
  misc_feature 1..17: note = Synthetic
  source 1..17: mol_type = other RNA
aaccaggcccgcgcctc

SEQ ID NO: 6296 - RNA, 17 nt, synthetic construct
  misc_feature 1..17: note = Synthetic
  source 1..17: mol_type = other RNA
accaggcccgcgcctct

SEQ ID NO: 6297 - RNA, 17 nt, synthetic construct
  misc_feature 1..17: note = Synthetic
  source 1..17: mol_type = other RNA
cgcctctgggtacttta

SEQ ID NO: 6298 - RNA, 17 nt, synthetic construct
  misc_feature 1..17: note = Synthetic
  source 1..17: mol_type = other RNA
actttatggtgttgatt

SEQ ID NO: 6299 - RNA, 17 nt, synthetic construct
  misc_feature 1..17: note = Synthetic
  source 1..17: mol_type = other RNA
ctttatggtgttgattc

SEQ ID NO: 6300 - RNA, 17 nt, synthetic construct
  misc_feature 1..17: note = Synthetic
  source 1..17: mol_type = other RNA
gttgattcgggcgaagt

SEQ ID NO: 6301 - RNA, 17 nt, synthetic construct
  misc_feature 1..17: note = Synthetic
  source 1..17: mol_type = other RNA
cacgacctcgccctccg

SEQ ID NO: 6302 - RNA, 17 nt, synthetic construct
  misc_feature 1..17: note = Synthetic
  source 1..17: mol_type = other RNA
gacctcgccctccgagg

SEQ ID NO: 6303 - RNA, 17 nt, synthetic construct
  misc_feature 1..17: note = Synthetic
  source 1..17: mol_type = other RNA
cctccgaggcggtcatg

SEQ ID NO: 6304 - RNA, 17 nt, synthetic construct
  misc_feature 1..17: note = Synthetic
  source 1..17: mol_type = other RNA
ctccgaggcggtcatgc

SEQ ID NO: 6305 - RNA, 17 nt, synthetic construct
  misc_feature 1..17: note = Synthetic
  source 1..17: mol_type = other RNA
cgtacgaaaaacaatta

SEQ ID NO: 6306 - RNA, 17 nt, synthetic construct
  misc_feature 1..17: note = Synthetic
  source 1..17: mol_type = other RNA
gtacgaaaaacaattac

SEQ ID NO: 6307 - RNA, 17 nt, synthetic construct
  misc_feature 1..17: note = Synthetic
  source 1..17: mol_type = other RNA
ttacgggtctaccatcg

SEQ ID NO: 6308 - RNA, 17 nt, synthetic construct
  misc_feature 1..17: note = Synthetic
  source 1..17: mol_type = other RNA
tacgggtctaccatcga

SEQ ID NO: 6309 - RNA, 17 nt, synthetic construct
  misc_feature 1..17: note = Synthetic
  source 1..17: mol_type = other RNA
gggcctgctcgatctcc

SEQ ID NO: 6310 - RNA, 17 nt, synthetic construct
  misc_feature 1..17: note = Synthetic
  source 1..17: mol_type = other RNA
cgacgacgcccccgaag

SEQ ID NO: 6311 - RNA, 17 nt, synthetic construct
  misc_feature 1..17: note = Synthetic
  source 1..17: mol_type = other RNA
cgacgcccccgaagagg

SEQ ID NO: 6312 - RNA, 17 nt, synthetic construct
  misc_feature 1..17: note = Synthetic
  source 1..17: mol_type = other RNA
gacgcccccgaagaggc

SEQ ID NO: 6313 - RNA, 17 nt, synthetic construct
  misc_feature 1..17: note = Synthetic
  source 1..17: mol_type = other RNA
acgcccccgaagaggcg

SEQ ID NO: 6314 - RNA, 17 nt, synthetic construct
  misc_feature 1..17: note = Synthetic
  source 1..17: mol_type = other RNA
ccccgaagaggcggggc

SEQ ID NO: 6315 - RNA, 17 nt, synthetic construct
  misc_feature 1..17: note = Synthetic
  source 1..17: mol_type = other RNA
cgaagaggcggggctgg

SEQ ID NO: 6316 - RNA, 17 nt, synthetic construct
  misc_feature 1..17: note = Synthetic
  source 1..17: mol_type = other RNA
cctgtcctttctccccg

SEQ ID NO: 6317 - RNA, 17 nt, synthetic construct
  misc_feature 1..17: note = Synthetic
  source 1..17: mol_type = other RNA
ctgtcctttctccccgc

SEQ ID NO: 6318 - RNA, 17 nt, synthetic construct
  misc_feature 1..17: note = Synthetic
  source 1..17: mol_type = other RNA
cacgcgcagactgtcga

SEQ ID NO: 6319 - RNA, 17 nt, synthetic construct
  misc_feature 1..17: note = Synthetic
  source 1..17: mol_type = other RNA
cccgaccgatgtcagcc

SEQ ID NO: 6320 - RNA, 17 nt, synthetic construct
  misc_feature 1..17: note = Synthetic
  source 1..17: mol_type = other RNA
ccgaccgatgtcagcct

SEQ ID NO: 6321 - RNA, 17 nt, synthetic construct
  misc_feature 1..17: note = Synthetic
  source 1..17: mol_type = other RNA
cgaccgatgtcagcctg

SEQ ID NO: 6322 - RNA, 17 nt, synthetic construct
  misc_feature 1..17: note = Synthetic
  source 1..17: mol_type = other RNA
gaccgatgtcagcctgg

SEQ ID NO: 6323 - RNA, 17 nt, synthetic construct
  misc_feature 1..17: note = Synthetic
  source 1..17: mol_type = other RNA
gacgagctccacttaga

SEQ ID NO: 6324 - RNA, 17 nt, synthetic construct
  misc_feature 1..17: note = Synthetic
  source 1..17: mol_type = other RNA
gctccacttagacggcg

SEQ ID NO: 6325 - RNA, 17 nt, synthetic construct
  misc_feature 1..17: note = Synthetic
  source 1..17: mol_type = other RNA
cttagacggcgaggacg

SEQ ID NO: 6326 - RNA, 17 nt, synthetic construct
  misc_feature 1..17: note = Synthetic
  source 1..17: mol_type = other RNA
cggcgaggacgtggcga

SEQ ID NO: 6327 - RNA, 17 nt, synthetic construct
  misc_feature 1..17: note = Synthetic
  source 1..17: mol_type = other RNA
gctagacgatttcgatc

SEQ ID NO: 6328 - RNA, 17 nt, synthetic construct
  misc_feature 1..17: note = Synthetic
  source 1..17: mol_type = other RNA
tttcgatctggacatgt

SEQ ID NO: 6329 - RNA, 17 nt, synthetic construct
  misc_feature 1..17: note = Synthetic
  source 1..17: mol_type = other RNA
ttcgatctggacatgtt

SEQ ID NO: 6330 - RNA, 17 nt, synthetic construct
  misc_feature 1..17: note = Synthetic
  source 1..17: mol_type = other RNA
tcgatctggacatgttg

SEQ ID NO: 6331 - RNA, 17 nt, synthetic construct
  misc_feature 1..17: note = Synthetic
  source 1..17: mol_type = other RNA
cgatctggacatgttgg

SEQ ID NO: 6332 - RNA, 17 nt, synthetic construct
  misc_feature 1..17: note = Synthetic
  source 1..17: mol_type = other RNA
ctggacatgttggggga

SEQ ID NO: 6333 - RNA, 17 nt, synthetic construct
  misc_feature 1..17: note = Synthetic
  source 1..17: mol_type = other RNA
tggacatgttgggggac

SEQ ID NO: 6334 - RNA, 17 nt, synthetic construct
  misc_feature 1..17: note = Synthetic
  source 1..17: mol_type = other RNA
ggacatgttgggggacg

SEQ ID NO: 6335 - RNA, 17 nt, synthetic construct
  misc_feature 1..17: note = Synthetic
  source 1..17: mol_type = other RNA
gggggacggggattccc

SEQ ID NO: 6336 - RNA, 17 nt, synthetic construct
  misc_feature 1..17: note = Synthetic
  source 1..17: mol_type = other RNA
ggggacggggattcccc

SEQ ID NO: 6337 - RNA, 17 nt, synthetic construct
  misc_feature 1..17: note = Synthetic
  source 1..17: mol_type = other RNA
gggacggggattccccg

SEQ ID NO: 6338 - RNA, 17 nt, synthetic construct
  misc_feature 1..17: note = Synthetic
  source 1..17: mol_type = other RNA
cggggattccccggggc

SEQ ID NO: 6339 - RNA, 17 nt, synthetic construct
  misc_feature 1..17: note = Synthetic
  source 1..17: mol_type = other RNA
ggggattccccggggcc

SEQ ID NO: 6340 - RNA, 17 nt, synthetic construct
  misc_feature 1..17: note = Synthetic
  source 1..17: mol_type = other RNA
cacgactccgcccccta

SEQ ID NO: 6341 - RNA, 17 nt, synthetic construct
  misc_feature 1..17: note = Synthetic
  source 1..17: mol_type = other RNA
cgccccctacggcgctc

SEQ ID NO: 6342 - RNA, 17 nt, synthetic construct
  misc_feature 1..17: note = Synthetic
  source 1..17: mol_type = other RNA
ctacggcgctctggata

SEQ ID NO: 6343 - RNA, 17 nt, synthetic construct
  misc_feature 1..17: note = Synthetic
  source 1..17: mol_type = other RNA
atgtttaccgatgccct

SEQ ID NO: 6344 - RNA, 17 nt, synthetic construct
  misc_feature 1..17: note = Synthetic
  source 1..17: mol_type = other RNA
cttggaattgacgagta

SEQ ID NO: 6345 - RNA, 17 nt, synthetic construct
  misc_feature 1..17: note = Synthetic
  source 1..17: mol_type = other RNA
ggaattgacgagtacgg

SEQ ID NO: 6346 - RNA, 17 nt, synthetic construct
  misc_feature 1..17: note = Synthetic
  source 1..17: mol_type = other RNA
gaattgacgagtacggt

SEQ ID NO: 6347 - RNA, 17 nt, synthetic construct
  misc_feature 1..17: note = Synthetic
  source 1..17: mol_type = other RNA
cgtactcgtcaattcca

SEQ ID NO: 6348 - RNA, 17 nt, synthetic construct
  misc_feature 1..17: note = Synthetic
  source 1..17: mol_type = other RNA
gtactcgtcaattccaa

SEQ ID NO: 6349 - RNA, 17 nt, synthetic construct
  misc_feature 1..17: note = Synthetic
  source 1..17: mol_type = other RNA
gtcaattccaagggcat

SEQ ID NO: 6350 - RNA, 17 nt, synthetic construct
  misc_feature 1..17: note = Synthetic
  source 1..17: mol_type = other RNA
ctgctcaaactcgaagt

SEQ ID NO: 6351 - RNA, 17 nt, synthetic construct
  misc_feature 1..17: note = Synthetic
  source 1..17: mol_type = other RNA
catatccagagcgccgt

SEQ ID NO: 6352 - RNA, 17 nt, synthetic construct
  misc_feature 1..17: note = Synthetic
  source 1..17: mol_type = other RNA
atatccagagcgccgta

SEQ ID NO: 6353 - RNA, 17 nt, synthetic construct
  misc_feature 1..17: note = Synthetic
  source 1..17: mol_type = other RNA
tatccagagcgccgtag

SEQ ID NO: 6354 - RNA, 17 nt, synthetic construct
  misc_feature 1..17: note = Synthetic
  source 1..17: mol_type = other RNA
atccagagcgccgtagg

SEQ ID NO: 6355 - RNA, 17 nt, synthetic construct
  misc_feature 1..17: note = Synthetic
  source 1..17: mol_type = other RNA
cagagcgccgtaggggg

SEQ ID NO: 6356 - RNA, 17 nt, synthetic construct
  misc_feature 1..17: note = Synthetic
  source 1..17: mol_type = other RNA
cgtagggggcggagtcg

SEQ ID NO: 6357 - RNA, 17 nt, synthetic construct
  misc_feature 1..17: note = Synthetic
  source 1..17: mol_type = other RNA
gtagggggcggagtcgt

SEQ ID NO: 6358 - RNA, 17 nt, synthetic construct
  misc_feature 1..17: note = Synthetic
  source 1..17: mol_type = other RNA
tagggggcggagtcgtg

SEQ ID NO: 6359 - RNA, 17 nt, synthetic construct
  misc_feature 1..17: note = Synthetic
  source 1..17: mol_type = other RNA
agggggcggagtcgtgg

SEQ ID NO: 6360 - RNA, 17 nt, synthetic construct
  misc_feature 1..17: note = Synthetic
  source 1..17: mol_type = other RNA
gggggcggagtcgtggg

SEQ ID NO: 6361 - RNA, 17 nt, synthetic construct
  misc_feature 1..17: note = Synthetic
  source 1..17: mol_type = other RNA
tcgtggggggtaaatcc

SEQ ID NO: 6362 - RNA, 17 nt, synthetic construct
  misc_feature 1..17: note = Synthetic
  source 1..17: mol_type = other RNA
ggggtaaatcccggccc

SEQ ID NO: 6363 - RNA, 17 nt, synthetic construct
  misc_feature 1..17: note = Synthetic
  source 1..17: mol_type = other RNA
gggtaaatcccggcccc

SEQ ID NO: 6364 - RNA, 17 nt, synthetic construct
  misc_feature 1..17: note = Synthetic
  source 1..17: mol_type = other RNA
ggtaaatcccggccccg

SEQ ID NO: 6365 - RNA, 17 nt, synthetic construct
  misc_feature 1..17: note = Synthetic
  source 1..17: mol_type = other RNA
gaaatcgtctagcgcgt

SEQ ID NO: 6366 - RNA, 17 nt, synthetic construct
  misc_feature 1..17: note = Synthetic
  source 1..17: mol_type = other RNA
cgtcctcgccgtctaag

SEQ ID NO: 6367 - RNA, 17 nt, synthetic construct
  misc_feature 1..17: note = Synthetic
  source 1..17: mol_type = other RNA
agtggagctcgtccccc

SEQ ID NO: 6368 - RNA, 17 nt, synthetic construct
  misc_feature 1..17: note = Synthetic
  source 1..17: mol_type = other RNA
gtcccccaggctgacat

SEQ ID NO: 6369 - RNA, 17 nt, synthetic construct
  misc_feature 1..17: note = Synthetic
  source 1..17: mol_type = other RNA
cccaggctgacatcggt

SEQ ID NO: 6370 - RNA, 17 nt, synthetic construct
  misc_feature 1..17: note = Synthetic
  source 1..17: mol_type = other RNA
ccaggctgacatcggtc

SEQ ID NO: 6371 - RNA, 17 nt, synthetic construct
  misc_feature 1..17: note = Synthetic
  source 1..17: mol_type = other RNA
caggctgacatcggtcg

SEQ ID NO: 6372 - RNA, 17 nt, synthetic construct
  misc_feature 1..17: note = Synthetic
  source 1..17: mol_type = other RNA
aggctgacatcggtcgg

SEQ ID NO: 6373 - RNA, 17 nt, synthetic construct
  misc_feature 1..17: note = Synthetic
  source 1..17: mol_type = other RNA
ggctgacatcggtcggg

SEQ ID NO: 6374 - RNA, 17 nt, synthetic construct
  misc_feature 1..17: note = Synthetic
  source 1..17: mol_type = other RNA
gctgacatcggtcgggg

SEQ ID NO: 6375 - RNA, 17 nt, synthetic construct
  misc_feature 1..17: note = Synthetic
  source 1..17: mol_type = other RNA
tctgcgcgtgtgtcccg

SEQ ID NO: 6376 - RNA, 17 nt, synthetic construct
  misc_feature 1..17: note = Synthetic
  source 1..17: mol_type = other RNA
ctgcgcgtgtgtcccgc

SEQ ID NO: 6377 - RNA, 17 nt, synthetic construct
  misc_feature 1..17: note = Synthetic
  source 1..17: mol_type = other RNA
tgcgcgtgtgtcccgcg

SEQ ID NO: 6378 - RNA, 17 nt, synthetic construct
  misc_feature 1..17: note = Synthetic
  source 1..17: mol_type = other RNA
gtgtcccgcggggagaa

SEQ ID NO: 6379 - RNA, 17 nt, synthetic construct
  misc_feature 1..17: note = Synthetic
  source 1..17: mol_type = other RNA
ccgcggggagaaaggac

SEQ ID NO: 6380 - RNA, 17 nt, synthetic construct
  misc_feature 1..17: note = Synthetic
  source 1..17: mol_type = other RNA
gggagaaaggacaggcg

SEQ ID NO: 6381 - RNA, 17 nt, synthetic construct
  misc_feature 1..17: note = Synthetic
  source 1..17: mol_type = other RNA
cgccagccccgcctctt

SEQ ID NO: 6382 - RNA, 17 nt, synthetic construct
  misc_feature 1..17: note = Synthetic
  source 1..17: mol_type = other RNA
gccagccccgcctcttc

SEQ ID NO: 6383 - RNA, 17 nt, synthetic construct
  misc_feature 1..17: note = Synthetic
  source 1..17: mol_type = other RNA
ccagccccgcctcttcg

SEQ ID NO: 6384 - RNA, 17 nt, synthetic construct
  misc_feature 1..17: note = Synthetic
  source 1..17: mol_type = other RNA
cagccccgcctcttcgg

SEQ ID NO: 6385 - RNA, 17 nt, synthetic construct
  misc_feature 1..17: note = Synthetic
  source 1..17: mol_type = other RNA
tcgggggcgtcgtcgtc

SEQ ID NO: 6386 - RNA, 17 nt, synthetic construct
  misc_feature 1..17: note = Synthetic
  source 1..17: mol_type = other RNA
cgggggcgtcgtcgtcc

SEQ ID NO: 6387 - RNA, 17 nt, synthetic construct
  misc_feature 1..17: note = Synthetic
  source 1..17: mol_type = other RNA
cgtccgggagatcgagc

SEQ ID NO: 6388 - RNA, 17 nt, synthetic construct
  misc_feature 1..17: note = Synthetic
  source 1..17: mol_type = other RNA
atcgagcaggccctcga

SEQ ID NO: 6389 - RNA, 17 nt, synthetic construct
  misc_feature 1..17: note = Synthetic
  source 1..17: mol_type = other RNA
tgtttttcgtacgcgcg

SEQ ID NO: 6390 - RNA, 17 nt, synthetic construct
  misc_feature 1..17: note = Synthetic
  source 1..17: mol_type = other RNA
ttcccgcatgaccgcct

SEQ ID NO: 6391 - RNA, 17 nt, synthetic construct
  misc_feature 1..17: note = Synthetic
  source 1..17: mol_type = other RNA
ccgcatgaccgcctcgg

SEQ ID NO: 6392 - RNA, 17 nt, synthetic construct
  misc_feature 1..17: note = Synthetic
  source 1..17: mol_type = other RNA
cgcatgaccgcctcgga

SEQ ID NO: 6393 - RNA, 17 nt, synthetic construct
  misc_feature 1..17: note = Synthetic
  source 1..17: mol_type = other RNA
gaccgcctcggagggcg

SEQ ID NO: 6394 - RNA, 17 nt, synthetic construct
  misc_feature 1..17: note = Synthetic
  source 1..17: mol_type = other RNA
gggcgaggtcgtgaagc

SEQ ID NO: 6395 - RNA, 17 nt, synthetic construct
  misc_feature 1..17: note = Synthetic
  source 1..17: mol_type = other RNA
caccataaagtacccag

SEQ ID NO: 6396 - RNA, 17 nt, synthetic construct
  misc_feature 1..17: note = Synthetic
  source 1..17: mol_type = other RNA
taaagtacccagaggcg

SEQ ID NO: 6397 - RNA, 17 nt, synthetic construct
  misc_feature 1..17: note = Synthetic
  source 1..17: mol_type = other RNA
aaagtacccagaggcgc

SEQ ID NO: 6398 - RNA, 17 nt, synthetic construct
  misc_feature 1..17: note = Synthetic
  source 1..17: mol_type = other RNA
acccagaggcgcgggcc

SEQ ID NO: 6399 - RNA, 17 nt, synthetic construct
  misc_feature 1..17: note = Synthetic
  source 1..17: mol_type = other RNA
gggcctggttgccatgc

SEQ ID NO: 6400 - RNA, 17 nt, synthetic construct
  misc_feature 1..17: note = Synthetic
  source 1..17: mol_type = other RNA
ggcctggttgccatgca

SEQ ID NO: 6401 - RNA, 17 nt, synthetic construct
  misc_feature 1..17: note = Synthetic
  source 1..17: mol_type = other RNA
ctggttgccatgcaggg

SEQ ID NO: 6402 - RNA, 17 nt, synthetic construct
  misc_feature 1..17: note = Synthetic
  source 1..17: mol_type = other RNA
tggttgccatgcagggt

SEQ ID NO: 6403 - RNA, 17 nt, synthetic construct
  misc_feature 1..17: note = Synthetic
  source 1..17: mol_type = other RNA
ttgccatgcagggtggg

SEQ ID NO: 6404 - RNA, 17 nt, synthetic construct
  misc_feature 1..17: note = Synthetic
  source 1..17: mol_type = other RNA
tgccatgcagggtggga

SEQ ID NO: 6405 - RNA, 17 nt, synthetic construct
  misc_feature 1..17: note = Synthetic
  source 1..17: mol_type = other RNA
gccatgcagggtgggag

SEQ ID NO: 6406 - RNA, 17 nt, synthetic construct
  misc_feature 1..17: note = Synthetic
  source 1..17: mol_type = other RNA
gtgggaggggtcgtcaa

SEQ ID NO: 6407 - RNA, 17 nt, synthetic construct
  misc_feature 1..17: note = Synthetic
  source 1..17: mol_type = other RNA
gtcgtcaacggcgcccc

SEQ ID NO: 6408 - RNA, 17 nt, synthetic construct
  misc_feature 1..17: note = Synthetic
  source 1..17: mol_type = other RNA
gccgcgctgcgcaccag

SEQ ID NO: 6409 - RNA, 17 nt, synthetic construct
  misc_feature 1..17: note = Synthetic
  source 1..17: mol_type = other RNA
ccgcgctgcgcaccagc

SEQ ID NO: 6410 - RNA, 17 nt, synthetic construct
  misc_feature 1..17: note = Synthetic
  source 1..17: mol_type = other RNA
cgctgcgcaccagcggg

SEQ ID NO: 6411 - RNA, 17 nt, synthetic construct
  misc_feature 1..17: note = Synthetic
  source 1..17: mol_type = other RNA
gcaccagcgggaggtta

SEQ ID NO: 6412 - RNA, 17 nt, synthetic construct
  misc_feature 1..17: note = Synthetic
  source 1..17: mol_type = other RNA
taaggtgctcgcgaatg

SEQ ID NO: 6413 - RNA, 17 nt, synthetic construct
  misc_feature 1..17: note = Synthetic
  source 1..17: mol_type = other RNA
ggtttagctcccgcagc

SEQ ID NO: 6414 - RNA, 17 nt, synthetic construct
  misc_feature 1..17: note = Synthetic
  source 1..17: mol_type = other RNA
ttagctcccgcagccgg

SEQ ID NO: 6415 - RNA, 17 nt, synthetic construct
  misc_feature 1..17: note = Synthetic
  source 1..17: mol_type = other RNA
tagctcccgcagccggc

SEQ ID NO: 6416 - RNA, 17 nt, synthetic construct
  misc_feature 1..17: note = Synthetic
  source 1..17: mol_type = other RNA
agccggcgggcctcgat

SEQ ID NO: 6417 - RNA, 17 nt, synthetic construct
  misc_feature 1..17: note = Synthetic
  source 1..17: mol_type = other RNA
cctcgattggcactccc

SEQ ID NO: 6418 - RNA, 17 nt, synthetic construct
  misc_feature 1..17: note = Synthetic
  source 1..17: mol_type = other RNA
gattggcactccccgga

SEQ ID NO: 6419 - RNA, 17 nt, synthetic construct
  misc_feature 1..17: note = Synthetic
  source 1..17: mol_type = other RNA
tccgttgacgaacatga

SEQ ID NO: 6420 - RNA, 17 nt, synthetic construct
  misc_feature 1..17: note = Synthetic
  source 1..17: mol_type = other RNA
ccgttgacgaacatgaa

SEQ ID NO: 6421 - RNA, 17 nt, synthetic construct
  misc_feature 1..17: note = Synthetic
  source 1..17: mol_type = other RNA
tgacgaacatgaagggc

SEQ ID NO: 6422 - RNA, 17 nt, synthetic construct
  misc_feature 1..17: note = Synthetic
  source 1..17: mol_type = other RNA
actgacgccagctctcc

SEQ ID NO: 6423 - RNA, 17 nt, synthetic construct
  misc_feature 1..17: note = Synthetic
  source 1..17: mol_type = other RNA
tctccaggtcgcaacag

SEQ ID NO: 6424 - RNA, 17 nt, synthetic construct
  misc_feature 1..17: note = Synthetic
  source 1..17: mol_type = other RNA
aacagaggcagtcaaac

SEQ ID NO: 6425 - RNA, 17 nt, synthetic construct
  misc_feature 1..17: note = Synthetic
  source 1..17: mol_type = other RNA
gaggcagtcaaacaggt

SEQ ID NO: 6426 - RNA, 17 nt, synthetic construct
  misc_feature 1..17: note = Synthetic
  source 1..17: mol_type = other RNA
aggcagtcaaacaggtc

SEQ ID NO: 6427 - RNA, 17 nt, synthetic construct
  misc_feature 1..17: note = Synthetic
  source 1..17: mol_type = other RNA
gggccgcatcatctgct

SEQ ID NO: 6428 - RNA, 17 nt, synthetic construct
  misc_feature 1..17: note = Synthetic
  source 1..17: mol_type = other RNA
catctgctcggcgtacg

SEQ ID NO: 6429 - RNA, 17 nt, synthetic construct
  misc_feature 1..17: note = Synthetic
  source 1..17: mol_type = other RNA
cggcgtacgcggcccat

SEQ ID NO: 6430 - RNA, 17 nt, synthetic construct
  misc_feature 1..17: note = Synthetic
  source 1..17: mol_type = other RNA
cggcccataggatctcg

SEQ ID NO: 6431 - RNA, 17 nt, synthetic construct
  misc_feature 1..17: note = Synthetic
  source 1..17: mol_type = other RNA
ggcccataggatctcgc

SEQ ID NO: 6432 - RNA, 17 nt, synthetic construct
  misc_feature 1..17: note = Synthetic
  source 1..17: mol_type = other RNA
aacacgcgccagacgag

SEQ ID NO: 6433 - RNA, 17 nt, synthetic construct
  misc_feature 1..17: note = Synthetic
  source 1..17: mol_type = other RNA
ccagacgagcggtctct

SEQ ID NO: 6434 - RNA, 17 nt, synthetic construct
  misc_feature 1..17: note = Synthetic
  source 1..17: mol_type = other RNA
gtacctgtccgcgatcg

SEQ ID NO: 6435 - RNA, 17 nt, synthetic construct
  misc_feature 1..17: note = Synthetic
  source 1..17: mol_type = other RNA
cgcgcagcatttctccc

SEQ ID NO: 6436 - RNA, 17 nt, synthetic construct
  misc_feature 1..17: note = Synthetic
  source 1..17: mol_type = other RNA
gtccgcgcatgtgcgcc

SEQ ID NO: 6437 - RNA, 17 nt, synthetic construct
  misc_feature 1..17: note = Synthetic
  source 1..17: mol_type = other RNA
cgcgcatgtgcgcctgg

SEQ ID NO: 6438 - RNA, 17 nt, synthetic construct
  misc_feature 1..17: note = Synthetic
  source 1..17: mol_type = other RNA
cctggcggtgcagctgc

SEQ ID NO: 6439 - RNA, 17 nt, synthetic construct
  misc_feature 1..17: note = Synthetic
  source 1..17: mol_type = other RNA
gtgcagctgccggacgc

SEQ ID NO: 6440 - RNA, 17 nt, synthetic construct
  misc_feature 1..17: note = Synthetic
  source 1..17: mol_type = other RNA
gccggacgctggcgcgc

SEQ ID NO: 6441 - RNA, 17 nt, synthetic construct
  misc_feature 1..17: note = Synthetic
  source 1..17: mol_type = other RNA
cgctggcgcgcaggtac

SEQ ID NO: 6442 - RNA, 17 nt, synthetic construct
  misc_feature 1..17: note = Synthetic
  source 1..17: mol_type = other RNA
cgcgcaggtaccggtac

SEQ ID NO: 6443 - RNA, 17 nt, synthetic construct
  misc_feature 1..17: note = Synthetic
  source 1..17: mol_type = other RNA
gcgcaggtaccggtaca

SEQ ID NO: 6444 - RNA, 17 nt, synthetic construct
  misc_feature 1..17: note = Synthetic
  source 1..17: mol_type = other RNA
cagggccgagcagaagt

SEQ ID NO: 6445 - RNA, 17 nt, synthetic construct
  misc_feature 1..17: note = Synthetic
  source 1..17: mol_type = other RNA
gcagaagttggccaaca

SEQ ID NO: 6446 - RNA, 20 nt, synthetic construct
  misc_feature 1..20: note = Synthetic
  source 1..20: mol_type = other RNA
tcgacgagctgtttgccgac

SEQ ID NO: 6447 - RNA, 20 nt, synthetic construct
  misc_feature 1..20: note = Synthetic
  source 1..20: mol_type = other RNA
agctgtttgccgacatgaac

SEQ ID NO: 6448 - RNA, 20 nt, synthetic construct
  misc_feature 1..20: note = Synthetic
  source 1..20: mol_type = other RNA
gccaccgcccccccgcccgg

SEQ ID NO: 6449 - RNA, 20 nt, synthetic construct
  misc_feature 1..20: note = Synthetic
  source 1..20: mol_type = other RNA
cggcccccccgctgtacgca

SEQ ID NO: 6450 - RNA, 20 nt, synthetic construct
  misc_feature 1..20: note = Synthetic
  source 1..20: mol_type = other RNA
cgctgtacgcaacggggcgc

SEQ ID NO: 6451 - RNA, 20 nt, synthetic construct
  misc_feature 1..20: note = Synthetic
  source 1..20: mol_type = other RNA
ttaaccgtctcctcgacgac

SEQ ID NO: 6452 - RNA, 20 nt, synthetic construct
  misc_feature 1..20: note = Synthetic
  source 1..20: mol_type = other RNA
tcgacgacttgggctttagc

SEQ ID NO: 6453 - RNA, 20 nt, synthetic construct
  misc_feature 1..20: note = Synthetic
  source 1..20: mol_type = other RNA
ctatgtaccatgctcgatac

SEQ ID NO: 6454 - RNA, 20 nt, synthetic construct
  misc_feature 1..20: note = Synthetic
  source 1..20: mol_type = other RNA
taccatgctcgatacctgga

SEQ ID NO: 6455 - RNA, 20 nt, synthetic construct
  misc_feature 1..20: note = Synthetic
  source 1..20: mol_type = other RNA
ccatgctcgatacctggaac

SEQ ID NO: 6456 - RNA, 20 nt, synthetic construct
  misc_feature 1..20: note = Synthetic
  source 1..20: mol_type = other RNA
ccgaccaacgccgacctgta

SEQ ID NO: 6457 - RNA, 20 nt, synthetic construct
  misc_feature 1..20: note = Synthetic
  source 1..20: mol_type = other RNA
caacgctgcccagcgatgtg

SEQ ID NO: 6458 - RNA, 20 nt, synthetic construct
  misc_feature 1..20: note = Synthetic
  source 1..20: mol_type = other RNA
ctgcccagcgatgtggtgga

SEQ ID NO: 6459 - RNA, 20 nt, synthetic construct
  misc_feature 1..20: note = Synthetic
  source 1..20: mol_type = other RNA
atggggggacgcgtacgtcc

SEQ ID NO: 6460 - RNA, 20 nt, synthetic construct
  misc_feature 1..20: note = Synthetic
  source 1..20: mol_type = other RNA
tccggccacccgcgacggcc

SEQ ID NO: 6461 - RNA, 20 nt, synthetic construct
  misc_feature 1..20: note = Synthetic
  source 1..20: mol_type = other RNA
cgacggcctcgggctctact

SEQ ID NO: 6462 - RNA, 20 nt, synthetic construct
  misc_feature 1..20: note = Synthetic
  source 1..20: mol_type = other RNA
gctctctcgtttcttccacg

SEQ ID NO: 6463 - RNA, 20 nt, synthetic construct
  misc_feature 1..20: note = Synthetic
  source 1..20: mol_type = other RNA
cgtttcttccacgccgagct

SEQ ID NO: 6464 - RNA, 20 nt, synthetic construct
  misc_feature 1..20: note = Synthetic
  source 1..20: mol_type = other RNA
ttccacgccgagctacgggc

SEQ ID NO: 6465 - RNA, 20 nt, synthetic construct
  misc_feature 1..20: note = Synthetic
  source 1..20: mol_type = other RNA
acgccgagctacgggcgcgg

SEQ ID NO: 6466 - RNA, 20 nt, synthetic construct
  misc_feature 1..20: note = Synthetic
  source 1..20: mol_type = other RNA
ccgagctacgggcgcgggag

SEQ ID NO: 6467 - RNA, 17 nt, synthetic construct
  misc_feature 1..17: note = Synthetic
  source 1..17: mol_type = other RNA
acgagctgtttgccgac

SEQ ID NO: 6468 - RNA, 17 nt, synthetic construct
  misc_feature 1..17: note = Synthetic
  source 1..17: mol_type = other RNA
tgtttgccgacatgaac

SEQ ID NO: 6469 - RNA, 17 nt, synthetic construct
  misc_feature 1..17: note = Synthetic
  source 1..17: mol_type = other RNA
accgcccccccgcccgg

SEQ ID NO: 6470 - RNA, 17 nt, synthetic construct
  misc_feature 1..17: note = Synthetic
  source 1..17: mol_type = other RNA
cccccccgctgtacgca

SEQ ID NO: 6471 - RNA, 17 nt, synthetic construct
  misc_feature 1..17: note = Synthetic
  source 1..17: mol_type = other RNA
tgtacgcaacggggcgc

SEQ ID NO: 6472 - RNA, 17 nt, synthetic construct
  misc_feature 1..17: note = Synthetic
  source 1..17: mol_type = other RNA
accgtctcctcgacgac

SEQ ID NO: 6473 - RNA, 17 nt, synthetic construct
  misc_feature 1..17: note = Synthetic
  source 1..17: mol_type = other RNA
acgacttgggctttagc

SEQ ID NO: 6474 - RNA, 17 nt, synthetic construct
  misc_feature 1..17: note = Synthetic
  source 1..17: mol_type = other RNA
tgtaccatgctcgatac

SEQ ID NO: 6475 - RNA, 17 nt, synthetic construct
  misc_feature 1..17: note = Synthetic
  source 1..17: mol_type = other RNA
catgctcgatacctgga

SEQ ID NO: 6476 - RNA, 17 nt, synthetic construct
  misc_feature 1..17: note = Synthetic
  source 1..17: mol_type = other RNA
tgctcgatacctggaac

SEQ ID NO: 6477 - RNA, 17 nt, synthetic construct
  misc_feature 1..17: note = Synthetic
  source 1..17: mol_type = other RNA
accaacgccgacctgta

SEQ ID NO: 6478 - RNA, 17 nt, synthetic construct
  misc_feature 1..17: note = Synthetic
  source 1..17: mol_type = other RNA
cgctgcccagcgatgtg

SEQ ID NO: 6479 - RNA, 17 nt, synthetic construct
  misc_feature 1..17: note = Synthetic
  source 1..17: mol_type = other RNA
cccagcgatgtggtgga

SEQ ID NO: 6480 - RNA, 17 nt, synthetic construct
  misc_feature 1..17: note = Synthetic
  source 1..17: mol_type = other RNA
gggggacgcgtacgtcc

SEQ ID NO: 6481 - RNA, 17 nt, synthetic construct
  misc_feature 1..17: note = Synthetic
  source 1..17: mol_type = other RNA
ggccacccgcgacggcc

SEQ ID NO: 6482 - RNA, 17 nt, synthetic construct
  misc_feature 1..17: note = Synthetic
  source 1..17: mol_type = other RNA
cggcctcgggctctact

SEQ ID NO: 6483 - RNA, 17 nt, synthetic construct
  misc_feature 1..17: note = Synthetic
  source 1..17: mol_type = other RNA
ctctcgtttcttccacg

SEQ ID NO: 6484 - RNA, 17 nt, synthetic construct
  misc_feature 1..17: note = Synthetic
  source 1..17: mol_type = other RNA
ttcttccacgccgagct

SEQ ID NO: 6485 - RNA, 17 nt, synthetic construct
  misc_feature 1..17: note = Synthetic
  source 1..17: mol_type = other RNA
cacgccgagctacgggc

SEQ ID NO: 6486 - RNA, 17 nt, synthetic construct
  misc_feature 1..17: note = Synthetic
  source 1..17: mol_type = other RNA
ccgagctacgggcgcgg

SEQ ID NO: 6487 - RNA, 17 nt, synthetic construct
  misc_feature 1..17: note = Synthetic
  source 1..17: mol_type = other RNA
agctacgggcgcgggag

SEQ ID NO: 6488 - RNA, 20 nt, synthetic construct
  misc_feature 1..20: note = Synthetic
  source 1..20: mol_type = other RNA
cggcaaacagctcgtcgacc

SEQ ID NO: 6489 - RNA, 20 nt, synthetic construct
  misc_feature 1..20: note = Synthetic
  source 1..20: mol_type = other RNA
ggccgggcgggggggcggtg

SEQ ID NO: 6490 - RNA, 20 nt, synthetic construct
  misc_feature 1..20: note = Synthetic
  source 1..20: mol_type = other RNA
tttttgggacccccggccgg

SEQ ID NO: 6491 - RNA, 20 nt, synthetic construct
  misc_feature 1..20: note = Synthetic
  source 1..20: mol_type = other RNA
ggtgtttttgggacccccgg

SEQ ID NO: 6492 - RNA, 20 nt, synthetic construct
  misc_feature 1..20: note = Synthetic
  source 1..20: mol_type = other RNA
ggggggccgccggggtgttt

SEQ ID NO: 6493 - RNA, 20 nt, synthetic construct
  misc_feature 1..20: note = Synthetic
  source 1..20: mol_type = other RNA
tgcgtacagcgggggggccg

SEQ ID NO: 6494 - RNA, 20 nt, synthetic construct
  misc_feature 1..20: note = Synthetic
  source 1..20: mol_type = other RNA
caggcgccccgttgcgtaca

SEQ ID NO: 6495 - RNA, 20 nt, synthetic construct
  misc_feature 1..20: note = Synthetic
  source 1..20: mol_type = other RNA
atgggtggggagggcatgag

SEQ ID NO: 6496 - RNA, 20 nt, synthetic construct
  misc_feature 1..20: note = Synthetic
  source 1..20: mol_type = other RNA
cgggcatgggtggggagggc

SEQ ID NO: 6497 - RNA, 20 nt, synthetic construct
  misc_feature 1..20: note = Synthetic
  source 1..20: mol_type = other RNA
gggggacgggcatgggtggg

SEQ ID NO: 6498 - RNA, 20 nt, synthetic construct
  misc_feature 1..20: note = Synthetic
  source 1..20: mol_type = other RNA
ggcgggggggacgggcatgg

SEQ ID NO: 6499 - RNA, 20 nt, synthetic construct
  misc_feature 1..20: note = Synthetic
  source 1..20: mol_type = other RNA
gggcggcgggggggacgggc

SEQ ID NO: 6500 - RNA, 20 nt, synthetic construct
  misc_feature 1..20: note = Synthetic
  source 1..20: mol_type = other RNA
taaagagggcggcggggggg

SEQ ID NO: 6501 - RNA, 20 nt, synthetic construct
  misc_feature 1..20: note = Synthetic
  source 1..20: mol_type = other RNA
ggagacggttaaagagggcg

SEQ ID NO: 6502 - RNA, 20 nt, synthetic construct
  misc_feature 1..20: note = Synthetic
  source 1..20: mol_type = other RNA
tcgtcgaggagacggttaaa

SEQ ID NO: 6503 - RNA, 20 nt, synthetic construct
  misc_feature 1..20: note = Synthetic
  source 1..20: mol_type = other RNA
agtcgtcgaggagacggtta

SEQ ID NO: 6504 - RNA, 20 nt, synthetic construct
  misc_feature 1..20: note = Synthetic
  source 1..20: mol_type = other RNA
gcgctaaagcccaagtcgtc

SEQ ID NO: 6505 - RNA, 20 nt, synthetic construct
  misc_feature 1..20: note = Synthetic
  source 1..20: mol_type = other RNA
ccgcgctaaagcccaagtcg

SEQ ID NO: 6506 - RNA, 20 nt, synthetic construct
  misc_feature 1..20: note = Synthetic
  source 1..20: mol_type = other RNA
tatcgagcatggtacatagc

SEQ ID NO: 6507 - RNA, 20 nt, synthetic construct
  misc_feature 1..20: note = Synthetic
  source 1..20: mol_type = other RNA
acagatcctcgttccaggta

SEQ ID NO: 6508 - RNA, 20 nt, synthetic construct
  misc_feature 1..20: note = Synthetic
  source 1..20: mol_type = other RNA
gtcggcgttggtcggtagcg

SEQ ID NO: 6509 - RNA, 20 nt, synthetic construct
  misc_feature 1..20: note = Synthetic
  source 1..20: mol_type = other RNA
acatcgctgggcagcgttga

SEQ ID NO: 6510 - RNA, 20 nt, synthetic construct
  misc_feature 1..20: note = Synthetic
  source 1..20: mol_type = other RNA
ccccccattccaccacatcg

SEQ ID NO: 6511 - RNA, 20 nt, synthetic construct
  misc_feature 1..20: note = Synthetic
  source 1..20: mol_type = other RNA
gaatgtcgatttgggtgcgt

SEQ ID NO: 6512 - RNA, 20 nt, synthetic construct
  misc_feature 1..20: note = Synthetic
  source 1..20: mol_type = other RNA
ccgtgggcgcgaatgtcgat

SEQ ID NO: 6513 - RNA, 20 nt, synthetic construct
  misc_feature 1..20: note = Synthetic
  source 1..20: mol_type = other RNA
aaggccacgtcgccgtgggc

SEQ ID NO: 6514 - RNA, 20 nt, synthetic construct
  misc_feature 1..20: note = Synthetic
  source 1..20: mol_type = other RNA
gtagggaaggccacgtcgcc

SEQ ID NO: 6515 - RNA, 20 nt, synthetic construct
  misc_feature 1..20: note = Synthetic
  source 1..20: mol_type = other RNA
gtcgcgggtggccggaagcg

SEQ ID NO: 6516 - RNA, 20 nt, synthetic construct
  misc_feature 1..20: note = Synthetic
  source 1..20: mol_type = other RNA
cccgaggccgtcgcgggtgg

SEQ ID NO: 6517 - RNA, 20 nt, synthetic construct
  misc_feature 1..20: note = Synthetic
  source 1..20: mol_type = other RNA
tagtagagcccgaggccgtc

SEQ ID NO: 6518 - RNA, 20 nt, synthetic construct
  misc_feature 1..20: note = Synthetic
  source 1..20: mol_type = other RNA
agagcgcttcgtagtagagc

SEQ ID NO: 6519 - RNA, 20 nt, synthetic construct
  misc_feature 1..20: note = Synthetic
  source 1..20: mol_type = other RNA
aacgagagagcgcttcgtag

SEQ ID NO: 6520 - RNA, 20 nt, synthetic construct
  misc_feature 1..20: note = Synthetic
  source 1..20: mol_type = other RNA
gctcggcgtggaagaaacga

SEQ ID NO: 6521 - RNA, 20 nt, synthetic construct
  misc_feature 1..20: note = Synthetic
  source 1..20: mol_type = other RNA
tagctcggcgtggaagaaac

SEQ ID NO: 6522 - RNA, 20 nt, synthetic construct
  misc_feature 1..20: note = Synthetic
  source 1..20: mol_type = other RNA
cgtagctcggcgtggaagaa

SEQ ID NO: 6523 - RNA, 20 nt, synthetic construct
  misc_feature 1..20: note = Synthetic
  source 1..20: mol_type = other RNA
gcgcccgtagctcggcgtgg

SEQ ID NO: 6524 - RNA, 20 nt, synthetic construct
  misc_feature 1..20: note = Synthetic
  source 1..20: mol_type = other RNA
tcccgcgcccgtagctcggc

SEQ ID NO: 6525 - RNA, 17 nt, synthetic construct
  misc_feature 1..17: note = Synthetic
  source 1..17: mol_type = other RNA
caaacagctcgtcgacc

SEQ ID NO: 6526 - RNA, 17 nt, synthetic construct
  misc_feature 1..17: note = Synthetic
  source 1..17: mol_type = other RNA
cgggcgggggggcggtg

SEQ ID NO: 6527 - RNA, 17 nt, synthetic construct
  misc_feature 1..17: note = Synthetic
  source 1..17: mol_type = other RNA
ttgggacccccggccgg

SEQ ID NO: 6528 - RNA, 17 nt, synthetic construct
  misc_feature 1..17: note = Synthetic
  source 1..17: mol_type = other RNA
gtttttgggacccccgg

SEQ ID NO: 6529 - RNA, 17 nt, synthetic construct
  misc_feature 1..17: note = Synthetic
  source 1..17: mol_type = other RNA
gggccgccggggtgttt

SEQ ID NO: 6530 - RNA, 17 nt, synthetic construct
  misc_feature 1..17: note = Synthetic
  source 1..17: mol_type = other RNA
gtacagcgggggggccg

SEQ ID NO: 6531 - RNA, 17 nt, synthetic construct
  misc_feature 1..17: note = Synthetic
  source 1..17: mol_type = other RNA
gcgccccgttgcgtaca

SEQ ID NO: 6532 - RNA, 17 nt, synthetic construct
  misc_feature 1..17: note = Synthetic
  source 1..17: mol_type = other RNA
ggtggggagggcatgag

SEQ ID NO: 6533 - RNA, 17 nt, synthetic construct
  misc_feature 1..17: note = Synthetic
  source 1..17: mol_type = other RNA
gcatgggtggggagggc

SEQ ID NO: 6534 - RNA, 17 nt, synthetic construct
  misc_feature 1..17: note = Synthetic
  source 1..17: mol_type = other RNA
ggacgggcatgggtggg

SEQ ID NO: 6535 - RNA, 17 nt, synthetic construct
  misc_feature 1..17: note = Synthetic
  source 1..17: mol_type = other RNA
gggggggacgggcatgg

SEQ ID NO: 6536 - RNA, 17 nt, synthetic construct
  misc_feature 1..17: note = Synthetic
  source 1..17: mol_type = other RNA
cggcgggggggacgggc

SEQ ID NO: 6537 - RNA, 17 nt, synthetic construct
  misc_feature 1..17: note = Synthetic
  source 1..17: mol_type = other RNA
agagggcggcggggggg

SEQ ID NO: 6538 - RNA, 17 nt, synthetic construct
  misc_feature 1..17: note = Synthetic
  source 1..17: mol_type = other RNA
gacggttaaagagggcg

SEQ ID NO: 6539 - RNA, 17 nt, synthetic construct
  misc_feature 1..17: note = Synthetic
  source 1..17: mol_type = other RNA
tcgaggagacggttaaa

SEQ ID NO: 6540 - RNA, 17 nt, synthetic construct
  misc_feature 1..17: note = Synthetic
  source 1..17: mol_type = other RNA
cgtcgaggagacggtta

SEQ ID NO: 6541 - RNA, 17 nt, synthetic construct
  misc_feature 1..17: note = Synthetic
  source 1..17: mol_type = other RNA
ctaaagcccaagtcgtc

SEQ ID NO: 6542 - RNA, 17 nt, synthetic construct
  misc_feature 1..17: note = Synthetic
  source 1..17: mol_type = other RNA
cgctaaagcccaagtcg

SEQ ID NO: 6543 - RNA, 17 nt, synthetic construct
  misc_feature 1..17: note = Synthetic
  source 1..17: mol_type = other RNA
cgagcatggtacatagc

SEQ ID NO: 6544 - RNA, 17 nt, synthetic construct
  misc_feature 1..17: note = Synthetic
  source 1..17: mol_type = other RNA
gatcctcgttccaggta

SEQ ID NO: 6545 - RNA, 17 nt, synthetic construct
  misc_feature 1..17: note = Synthetic
  source 1..17: mol_type = other RNA
ggcgttggtcggtagcg

SEQ ID NO: 6546 - RNA, 17 nt, synthetic construct
  misc_feature 1..17: note = Synthetic
  source 1..17: mol_type = other RNA
tcgctgggcagcgttga

SEQ ID NO: 6547 - RNA, 17 nt, synthetic construct
  misc_feature 1..17: note = Synthetic
  source 1..17: mol_type = other RNA
cccattccaccacatcg

SEQ ID NO: 6548 - RNA, 17 nt, synthetic construct
  misc_feature 1..17: note = Synthetic
  source 1..17: mol_type = other RNA
tgtcgatttgggtgcgt

SEQ ID NO: 6549 - RNA, 17 nt, synthetic construct
  misc_feature 1..17: note = Synthetic
  source 1..17: mol_type = other RNA
tgggcgcgaatgtcgat

SEQ ID NO: 6550 - RNA, 17 nt, synthetic construct
  misc_feature 1..17: note = Synthetic
  source 1..17: mol_type = other RNA
gccacgtcgccgtgggc

SEQ ID NO: 6551 - RNA, 17 nt, synthetic construct
  misc_feature 1..17: note = Synthetic
  source 1..17: mol_type = other RNA
gggaaggccacgtcgcc

SEQ ID NO: 6552 - RNA, 17 nt, synthetic construct
  misc_feature 1..17: note = Synthetic
  source 1..17: mol_type = other RNA
gcgggtggccggaagcg

SEQ ID NO: 6553 - RNA, 17 nt, synthetic construct
  misc_feature 1..17: note = Synthetic
  source 1..17: mol_type = other RNA
gaggccgtcgcgggtgg

SEQ ID NO: 6554 - RNA, 17 nt, synthetic construct
  misc_feature 1..17: note = Synthetic
  source 1..17: mol_type = other RNA
tagagcccgaggccgtc

SEQ ID NO: 6555 - RNA, 17 nt, synthetic construct
  misc_feature 1..17: note = Synthetic
  source 1..17: mol_type = other RNA
gcgcttcgtagtagagc

SEQ ID NO: 6556 - RNA, 17 nt, synthetic construct
  misc_feature 1..17: note = Synthetic
  source 1..17: mol_type = other RNA
gagagagcgcttcgtag

SEQ ID NO: 6557 - RNA, 17 nt, synthetic construct
  misc_feature 1..17: note = Synthetic
  source 1..17: mol_type = other RNA
cggcgtggaagaaacga

SEQ ID NO: 6558 - RNA, 17 nt, synthetic construct
  misc_feature 1..17: note = Synthetic
  source 1..17: mol_type = other RNA
ctcggcgtggaagaaac

SEQ ID NO: 6559 - RNA, 17 nt, synthetic construct
  misc_feature 1..17: note = Synthetic
  source 1..17: mol_type = other RNA
agctcggcgtggaagaa

SEQ ID NO: 6560 - RNA, 17 nt, synthetic construct
  misc_feature 1..17: note = Synthetic
  source 1..17: mol_type = other RNA
cccgtagctcggcgtgg

SEQ ID NO: 6561 - RNA, 17 nt, synthetic construct
  misc_feature 1..17: note = Synthetic
  source 1..17: mol_type = other RNA
cgcgcccgtagctcggc

SEQ ID NO: 6562 - RNA, 20 nt, synthetic construct
  misc_feature 1..20: note = Synthetic
  source 1..20: mol_type = other RNA
gcaccgccaggcgcacatgc

SEQ ID NO: 6563 - RNA, 20 nt, synthetic construct
  misc_feature 1..20: note = Synthetic
  source 1..20: mol_type = other RNA
tgcgcggacgcgatcgcgac

SEQ ID NO: 6564 - RNA, 20 nt, synthetic construct
  misc_feature 1..20: note = Synthetic
  source 1..20: mol_type = other RNA
cggacgcgatcgcgacctgg

SEQ ID NO: 6565 - RNA, 20 nt, synthetic construct
  misc_feature 1..20: note = Synthetic
  source 1..20: mol_type = other RNA
aaatgctgcgcgccacgatc

SEQ ID NO: 6566 - RNA, 20 nt, synthetic construct
  misc_feature 1..20: note = Synthetic
  source 1..20: mol_type = other RNA
acgatcgcggacaggtacta

SEQ ID NO: 6567 - RNA, 20 nt, synthetic construct
  misc_feature 1..20: note = Synthetic
  source 1..20: mol_type = other RNA
gatcgcggacaggtactacc

SEQ ID NO: 6568 - RNA, 20 nt, synthetic construct
  misc_feature 1..20: note = Synthetic
  source 1..20: mol_type = other RNA
tttgtatctatttttgaccc

SEQ ID NO: 6569 - RNA, 20 nt, synthetic construct
  misc_feature 1..20: note = Synthetic
  source 1..20: mol_type = other RNA
tttttgacccgcgagatcct

SEQ ID NO: 6570 - RNA, 20 nt, synthetic construct
  misc_feature 1..20: note = Synthetic
  source 1..20: mol_type = other RNA
gatcctatgggccgcgtacg

SEQ ID NO: 6571 - RNA, 20 nt, synthetic construct
  misc_feature 1..20: note = Synthetic
  source 1..20: mol_type = other RNA
ttgactgcctctgttgcgac

SEQ ID NO: 6572 - RNA, 20 nt, synthetic construct
  misc_feature 1..20: note = Synthetic
  source 1..20: mol_type = other RNA
actgcctctgttgcgacctg

SEQ ID NO: 6573 - RNA, 20 nt, synthetic construct
  misc_feature 1..20: note = Synthetic
  source 1..20: mol_type = other RNA
tggagagctggcgtcagttg

SEQ ID NO: 6574 - RNA, 20 nt, synthetic construct
  misc_feature 1..20: note = Synthetic
  source 1..20: mol_type = other RNA
ccagcccttcatgttcgtca

SEQ ID NO: 6575 - RNA, 20 nt, synthetic construct
  misc_feature 1..20: note = Synthetic
  source 1..20: mol_type = other RNA
gtcaacggagcgctcaccgt

SEQ ID NO: 6576 - RNA, 20 nt, synthetic construct
  misc_feature 1..20: note = Synthetic
  source 1..20: mol_type = other RNA
caccgtccggggagtgccaa

SEQ ID NO: 6577 - RNA, 20 nt, synthetic construct
  misc_feature 1..20: note = Synthetic
  source 1..20: mol_type = other RNA
ccaatcgaggcccgccggct

SEQ ID NO: 6578 - RNA, 20 nt, synthetic construct
  misc_feature 1..20: note = Synthetic
  source 1..20: mol_type = other RNA
gcgggagctaaaccacattc

SEQ ID NO: 6579 - RNA, 20 nt, synthetic construct
  misc_feature 1..20: note = Synthetic
  source 1..20: mol_type = other RNA
cgctggtgcgcagcgcggct

SEQ ID NO: 6580 - RNA, 20 nt, synthetic construct
  misc_feature 1..20: note = Synthetic
  source 1..20: mol_type = other RNA
tggtgcgcagcgcggctacg

SEQ ID NO: 6581 - RNA, 20 nt, synthetic construct
  misc_feature 1..20: note = Synthetic
  source 1..20: mol_type = other RNA
cagcgcggctacggaggagc

SEQ ID NO: 6582 - RNA, 20 nt, synthetic construct
  misc_feature 1..20: note = Synthetic
  source 1..20: mol_type = other RNA
tggcaaccaggcccgcgcct

SEQ ID NO: 6583 - RNA, 20 nt, synthetic construct
  misc_feature 1..20: note = Synthetic
  source 1..20: mol_type = other RNA
gggtactttatggtgttgat

SEQ ID NO: 6584 - RNA, 20 nt, synthetic construct
  misc_feature 1..20: note = Synthetic
  source 1..20: mol_type = other RNA
actttatggtgttgattcgg

SEQ ID NO: 6585 - RNA, 20 nt, synthetic construct
  misc_feature 1..20: note = Synthetic
  source 1..20: mol_type = other RNA
tggtgttgattcgggcgaag

SEQ ID NO: 6586 - RNA, 20 nt, synthetic construct
  misc_feature 1..20: note = Synthetic
  source 1..20: mol_type = other RNA
cagcttcacgacctcgccct

SEQ ID NO: 6587 - RNA, 20 nt, synthetic construct
  misc_feature 1..20: note = Synthetic
  source 1..20: mol_type = other RNA
tcgccctccgaggcggtcat

SEQ ID NO: 6588 - RNA, 20 nt, synthetic construct
  misc_feature 1..20: note = Synthetic
  source 1..20: mol_type = other RNA
acgcgtacagccgcgcgcgt

SEQ ID NO: 6589 - RNA, 20 nt, synthetic construct
  misc_feature 1..20: note = Synthetic
  source 1..20: mol_type = other RNA
cgcgcgtacgaaaaacaatt

SEQ ID NO: 6590 - RNA, 20 nt, synthetic construct
  misc_feature 1..20: note = Synthetic
  source 1..20: mol_type = other RNA
aaacaattacgggtctacca

SEQ ID NO: 6591 - RNA, 20 nt, synthetic construct
  misc_feature 1..20: note = Synthetic
  source 1..20: mol_type = other RNA
acaattacgggtctaccatc

SEQ ID NO: 6592 - RNA, 20 nt, synthetic construct
  misc_feature 1..20: note = Synthetic
  source 1..20: mol_type = other RNA
tcgagggcctgctcgatctc

SEQ ID NO: 6593 - RNA, 20 nt, synthetic construct
  misc_feature 1..20: note = Synthetic
  source 1..20: mol_type = other RNA
tctcccggacgacgacgccc

SEQ ID NO: 6594 - RNA, 20 nt, synthetic construct
  misc_feature 1..20: note = Synthetic
  source 1..20: mol_type = other RNA
cccggacgacgacgcccccg

SEQ ID NO: 6595 - RNA, 20 nt, synthetic construct
  misc_feature 1..20: note = Synthetic
  source 1..20: mol_type = other RNA
acgacgacgcccccgaagag

SEQ ID NO: 6596 - RNA, 20 nt, synthetic construct
  misc_feature 1..20: note = Synthetic
  source 1..20: mol_type = other RNA
cgcgcctgtcctttctcccc

SEQ ID NO: 6597 - RNA, 20 nt, synthetic construct
  misc_feature 1..20: note = Synthetic
  source 1..20: mol_type = other RNA
cccccccgaccgatgtcagc

SEQ ID NO: 6598 - RNA, 20 nt, synthetic construct
  misc_feature 1..20: note = Synthetic
  source 1..20: mol_type = other RNA
gaccgatgtcagcctggggg

SEQ ID NO: 6599 - RNA, 20 nt, synthetic construct
  misc_feature 1..20: note = Synthetic
  source 1..20: mol_type = other RNA
ggacgagctccacttagacg

SEQ ID NO: 6600 - RNA, 20 nt, synthetic construct
  misc_feature 1..20: note = Synthetic
  source 1..20: mol_type = other RNA
acgagctccacttagacggc

SEQ ID NO: 6601 - RNA, 20 nt, synthetic construct
  misc_feature 1..20: note = Synthetic
  source 1..20: mol_type = other RNA
acgcgctagacgatttcgat

SEQ ID NO: 6602 - RNA, 20 nt, synthetic construct
  misc_feature 1..20: note = Synthetic
  source 1..20: mol_type = other RNA
acgatttcgatctggacatg

SEQ ID NO: 6603 - RNA, 20 nt, synthetic construct
  misc_feature 1..20: note = Synthetic
  source 1..20: mol_type = other RNA
cgatctggacatgttggggg

SEQ ID NO: 6604 - RNA, 20 nt, synthetic construct
  misc_feature 1..20: note = Synthetic
  source 1..20: mol_type = other RNA
tgttgggggacggggattcc

SEQ ID NO: 6605 - RNA, 20 nt, synthetic construct
  misc_feature 1..20: note = Synthetic
  source 1..20: mol_type = other RNA
gggacggggattccccgggg

SEQ ID NO: 6606 - RNA, 20 nt, synthetic construct
  misc_feature 1..20: note = Synthetic
  source 1..20: mol_type = other RNA
actccgccccctacggcgct

SEQ ID NO: 6607 - RNA, 20 nt, synthetic construct
  misc_feature 1..20: note = Synthetic
  source 1..20: mol_type = other RNA
cgctctggatatggccgact

SEQ ID NO: 6608 - RNA, 20 nt, synthetic construct
  misc_feature 1..20: note = Synthetic
  source 1..20: mol_type = other RNA
ggatatggccgacttcgagt

SEQ ID NO: 6609 - RNA, 20 nt, synthetic construct
  misc_feature 1..20: note = Synthetic
  source 1..20: mol_type = other RNA
gcagatgtttaccgatgccc

SEQ ID NO: 6610 - RNA, 20 nt, synthetic construct
  misc_feature 1..20: note = Synthetic
  source 1..20: mol_type = other RNA
taccgatgcccttggaattg

SEQ ID NO: 6611 - RNA, 20 nt, synthetic construct
  misc_feature 1..20: note = Synthetic
  source 1..20: mol_type = other RNA
ccttggaattgacgagtacg

SEQ ID NO: 6612 - RNA, 17 nt, synthetic construct
  misc_feature 1..17: note = Synthetic
  source 1..17: mol_type = other RNA
ccgccaggcgcacatgc

SEQ ID NO: 6613 - RNA, 17 nt, synthetic construct
  misc_feature 1..17: note = Synthetic
  source 1..17: mol_type = other RNA
gcggacgcgatcgcgac

SEQ ID NO: 6614 - RNA, 17 nt, synthetic construct
  misc_feature 1..17: note = Synthetic
  source 1..17: mol_type = other RNA
acgcgatcgcgacctgg

SEQ ID NO: 6615 - RNA, 17 nt, synthetic construct
  misc_feature 1..17: note = Synthetic
  source 1..17: mol_type = other RNA
tgctgcgcgccacgatc

SEQ ID NO: 6616 - RNA, 17 nt, synthetic construct
  misc_feature 1..17: note = Synthetic
  source 1..17: mol_type = other RNA
atcgcggacaggtacta

SEQ ID NO: 6617 - RNA, 17 nt, synthetic construct
  misc_feature 1..17: note = Synthetic
  source 1..17: mol_type = other RNA
cgcggacaggtactacc

SEQ ID NO: 6618 - RNA, 17 nt, synthetic construct
  misc_feature 1..17: note = Synthetic
  source 1..17: mol_type = other RNA
gtatctatttttgaccc

SEQ ID NO: 6619 - RNA, 17 nt, synthetic construct
  misc_feature 1..17: note = Synthetic
  source 1..17: mol_type = other RNA
ttgacccgcgagatcct

SEQ ID NO: 6620 - RNA, 17 nt, synthetic construct
  misc_feature 1..17: note = Synthetic
  source 1..17: mol_type = other RNA
cctatgggccgcgtacg

SEQ ID NO: 6621 - RNA, 17 nt, synthetic construct
  misc_feature 1..17: note = Synthetic
  source 1..17: mol_type = other RNA
actgcctctgttgcgac

SEQ ID NO: 6622 - RNA, 17 nt, synthetic construct
  misc_feature 1..17: note = Synthetic
  source 1..17: mol_type = other RNA
gcctctgttgcgacctg

SEQ ID NO: 6623 - RNA, 17 nt, synthetic construct
  misc_feature 1..17: note = Synthetic
  source 1..17: mol_type = other RNA
agagctggcgtcagttg

SEQ ID NO: 6624 - RNA, 17 nt, synthetic construct
  misc_feature 1..17: note = Synthetic
  source 1..17: mol_type = other RNA
gcccttcatgttcgtca

SEQ ID NO: 6625 - RNA, 17 nt, synthetic construct
  misc_feature 1..17: note = Synthetic
  source 1..17: mol_type = other RNA
aacggagcgctcaccgt

SEQ ID NO: 6626 - RNA, 17 nt, synthetic construct
  misc_feature 1..17: note = Synthetic
  source 1..17: mol_type = other RNA
cgtccggggagtgccaa

SEQ ID NO: 6627 - RNA, 17 nt, synthetic construct
  misc_feature 1..17: note = Synthetic
  source 1..17: mol_type = other RNA
atcgaggcccgccggct

SEQ ID NO: 6628 - RNA, 17 nt, synthetic construct
  misc_feature 1..17: note = Synthetic
  source 1..17: mol_type = other RNA
ggagctaaaccacattc

SEQ ID NO: 6629 - RNA, 17 nt, synthetic construct
  misc_feature 1..17: note = Synthetic
  source 1..17: mol_type = other RNA
tggtgcgcagcgcggct

SEQ ID NO: 6630 - RNA, 17 nt, synthetic construct
  misc_feature 1..17: note = Synthetic
  source 1..17: mol_type = other RNA
tgcgcagcgcggctacg

SEQ ID NO: 6631 - RNA, 17 nt, synthetic construct
  misc_feature 1..17: note = Synthetic
  source 1..17: mol_type = other RNA
cgcggctacggaggagc

SEQ ID NO: 6632 - RNA, 17 nt, synthetic construct
  misc_feature 1..17: note = Synthetic
  source 1..17: mol_type = other RNA
caaccaggcccgcgcct

SEQ ID NO: 6633 - RNA, 17 nt, synthetic construct
  misc_feature 1..17: note = Synthetic
  source 1..17: mol_type = other RNA
tactttatggtgttgat

SEQ ID NO: 6634 - RNA, 17 nt, synthetic construct
  misc_feature 1..17: note = Synthetic
  source 1..17: mol_type = other RNA
ttatggtgttgattcgg

SEQ ID NO: 6635 - RNA, 17 nt, synthetic construct
  misc_feature 1..17: note = Synthetic
  source 1..17: mol_type = other RNA
tgttgattcgggcgaag

SEQ ID NO: 6636 - RNA, 17 nt, synthetic construct
  misc_feature 1..17: note = Synthetic
  source 1..17: mol_type = other RNA
cttcacgacctcgccct

SEQ ID NO: 6637 - RNA, 17 nt, synthetic construct
  misc_feature 1..17: note = Synthetic
  source 1..17: mol_type = other RNA
ccctccgaggcggtcat

SEQ ID NO: 6638 - RNA, 17 nt, synthetic construct
  misc_feature 1..17: note = Synthetic
  source 1..17: mol_type = other RNA
cgtacagccgcgcgcgt

SEQ ID NO: 6639 - RNA, 17 nt, synthetic construct
  misc_feature 1..17: note = Synthetic
  source 1..17: mol_type = other RNA
gcgtacgaaaaacaatt

SEQ ID NO: 6640 - RNA, 17 nt, synthetic construct
  misc_feature 1..17: note = Synthetic
  source 1..17: mol_type = other RNA
caattacgggtctacca

SEQ ID NO: 6641 - RNA, 17 nt, synthetic construct
  misc_feature 1..17: note = Synthetic
  source 1..17: mol_type = other RNA
attacgggtctaccatc

SEQ ID NO: 6642 - RNA, 17 nt, synthetic construct
  misc_feature 1..17: note = Synthetic
  source 1..17: mol_type = other RNA
agggcctgctcgatctc

SEQ ID NO: 6643 - RNA, 17 nt, synthetic construct
  misc_feature 1..17: note = Synthetic
  source 1..17: mol_type = other RNA
cccggacgacgacgccc

SEQ ID NO: 6644 - RNA, 17 nt, synthetic construct
  misc_feature 1..17: note = Synthetic
  source 1..17: mol_type = other RNA
ggacgacgacgcccccg

SEQ ID NO: 6645 - RNA, 17 nt, synthetic construct
  misc_feature 1..17: note = Synthetic
  source 1..17: mol_type = other RNA
acgacgcccccgaagag

SEQ ID NO: 6646 - RNA, 17 nt, synthetic construct
  misc_feature 1..17: note = Synthetic
  source 1..17: mol_type = other RNA
gcctgtcctttctcccc

SEQ ID NO: 6647 - RNA, 17 nt, synthetic construct
  misc_feature 1..17: note = Synthetic
  source 1..17: mol_type = other RNA
ccccgaccgatgtcagc

SEQ ID NO: 6648 - RNA, 17 nt, synthetic construct
  misc_feature 1..17: note = Synthetic
  source 1..17: mol_type = other RNA
cgatgtcagcctggggg

SEQ ID NO: 6649 - RNA, 17 nt, synthetic construct
  misc_feature 1..17: note = Synthetic
  source 1..17: mol_type = other RNA
cgagctccacttagacg

SEQ ID NO: 6650 - RNA, 17 nt, synthetic construct
  misc_feature 1..17: note = Synthetic
  source 1..17: mol_type = other RNA
agctccacttagacggc

SEQ ID NO: 6651 - RNA, 17 nt, synthetic construct
  misc_feature 1..17: note = Synthetic
  source 1..17: mol_type = other RNA
cgctagacgatttcgat

SEQ ID NO: 6652 - RNA, 17 nt, synthetic construct
  misc_feature 1..17: note = Synthetic
  source 1..17: mol_type = other RNA
atttcgatctggacatg

SEQ ID NO: 6653 - RNA, 17 nt, synthetic construct
  misc_feature 1..17: note = Synthetic
  source 1..17: mol_type = other RNA
tctggacatgttggggg

SEQ ID NO: 6654 - RNA, 17 nt, synthetic construct
  misc_feature 1..17: note = Synthetic
  source 1..17: mol_type = other RNA
tgggggacggggattcc

SEQ ID NO: 6655 - RNA, 17 nt, synthetic construct
  misc_feature 1..17: note = Synthetic
  source 1..17: mol_type = other RNA
acggggattccccgggg

SEQ ID NO: 6656 - RNA, 17 nt, synthetic construct
  misc_feature 1..17: note = Synthetic
  source 1..17: mol_type = other RNA
ccgccccctacggcgct

SEQ ID NO: 6657 - RNA, 17 nt, synthetic construct
  misc_feature 1..17: note = Synthetic
  source 1..17: mol_type = other RNA
tctggatatggccgact

SEQ ID NO: 6658 - RNA, 17 nt, synthetic construct
  misc_feature 1..17: note = Synthetic
  source 1..17: mol_type = other RNA
tatggccgacttcgagt

SEQ ID NO: 6659 - RNA, 17 nt, synthetic construct
  misc_feature 1..17: note = Synthetic
  source 1..17: mol_type = other RNA
gatgtttaccgatgccc

SEQ ID NO: 6660 - RNA, 17 nt, synthetic construct
  misc_feature 1..17: note = Synthetic
  source 1..17: mol_type = other RNA
cgatgcccttggaattg

SEQ ID NO: 6661 - RNA, 17 nt, synthetic construct
  misc_feature 1..17: note = Synthetic
  source 1..17: mol_type = other RNA
tggaattgacgagtacg

SEQ ID NO: 6662 - RNA, 20 nt, synthetic construct
  misc_feature 1..20: note = Synthetic
  source 1..20: mol_type = other RNA
ggtaccggtacagggccgag

SEQ ID NO: 6663 - RNA, 20 nt, synthetic construct
  misc_feature 1..20: note = Synthetic
  source 1..20: mol_type = other RNA
gcgcaggtaccggtacaggg

SEQ ID NO: 6664 - RNA, 20 nt, synthetic construct
  misc_feature 1..20: note = Synthetic
  source 1..20: mol_type = other RNA
ctggcgcgcaggtaccggta

SEQ ID NO: 6665 - RNA, 20 nt, synthetic construct
  misc_feature 1..20: note = Synthetic
  source 1..20: mol_type = other RNA
tgcgcctggcggtgcagctg

SEQ ID NO: 6666 - RNA, 20 nt, synthetic construct
  misc_feature 1..20: note = Synthetic
  source 1..20: mol_type = other RNA
aaaaacaaaacacgcgccag

SEQ ID NO: 6667 - RNA, 20 nt, synthetic construct
  misc_feature 1..20: note = Synthetic
  source 1..20: mol_type = other RNA
tacgcggcccataggatctc

SEQ ID NO: 6668 - RNA, 20 nt, synthetic construct
  misc_feature 1..20: note = Synthetic
  source 1..20: mol_type = other RNA
tgctcggcgtacgcggccca

SEQ ID NO: 6669 - RNA, 20 nt, synthetic construct
  misc_feature 1..20: note = Synthetic
  source 1..20: mol_type = other RNA
aacagaggcagtcaaacagg

SEQ ID NO: 6670 - RNA, 20 nt, synthetic construct
  misc_feature 1..20: note = Synthetic
  source 1..20: mol_type = other RNA
gccagctctccaggtcgcaa

SEQ ID NO: 6671 - RNA, 20 nt, synthetic construct
  misc_feature 1..20: note = Synthetic
  source 1..20: mol_type = other RNA
ccgttgacgaacatgaaggg

SEQ ID NO: 6672 - RNA, 20 nt, synthetic construct
  misc_feature 1..20: note = Synthetic
  source 1..20: mol_type = other RNA
gcgctccgttgacgaacatg

SEQ ID NO: 6673 - RNA, 20 nt, synthetic construct
  misc_feature 1..20: note = Synthetic
  source 1..20: mol_type = other RNA
tgagcgctccgttgacgaac

SEQ ID NO: 6674 - RNA, 20 nt, synthetic construct
  misc_feature 1..20: note = Synthetic
  source 1..20: mol_type = other RNA
ggacggtgagcgctccgttg

SEQ ID NO: 6675 - RNA, 20 nt, synthetic construct
  misc_feature 1..20: note = Synthetic
  source 1..20: mol_type = other RNA
cgattggcactccccggacg

SEQ ID NO: 6676 - RNA, 20 nt, synthetic construct
  misc_feature 1..20: note = Synthetic
  source 1..20: mol_type = other RNA
cgggcctcgattggcactcc

SEQ ID NO: 6677 - RNA, 20 nt, synthetic construct
  misc_feature 1..20: note = Synthetic
  source 1..20: mol_type = other RNA
tggtttagctcccgcagccg

SEQ ID NO: 6678 - RNA, 20 nt, synthetic construct
  misc_feature 1..20: note = Synthetic
  source 1..20: mol_type = other RNA
agcgggaggttaaggtgctc

SEQ ID NO: 6679 - RNA, 20 nt, synthetic construct
  misc_feature 1..20: note = Synthetic
  source 1..20: mol_type = other RNA
cgtagccgcgctgcgcacca

SEQ ID NO: 6680 - RNA, 20 nt, synthetic construct
  misc_feature 1..20: note = Synthetic
  source 1..20: mol_type = other RNA
ctggttgccatgcagggtgg

SEQ ID NO: 6681 - RNA, 20 nt, synthetic construct
  misc_feature 1..20: note = Synthetic
  source 1..20: mol_type = other RNA
gggcctggttgccatgcagg

SEQ ID NO: 6682 - RNA, 20 nt, synthetic construct
  misc_feature 1..20: note = Synthetic
  source 1..20: mol_type = other RNA
gcgcgggcctggttgccatg

SEQ ID NO: 6683 - RNA, 20 nt, synthetic construct
  misc_feature 1..20: note = Synthetic
  source 1..20: mol_type = other RNA
accataaagtacccagaggc

SEQ ID NO: 6684 - RNA, 20 nt, synthetic construct
  misc_feature 1..20: note = Synthetic
  source 1..20: mol_type = other RNA
aatcaacaccataaagtacc

SEQ ID NO: 6685 - RNA, 20 nt, synthetic construct
  misc_feature 1..20: note = Synthetic
  source 1..20: mol_type = other RNA
gaatacgagtccaacttcgc

SEQ ID NO: 6686 - RNA, 20 nt, synthetic construct
  misc_feature 1..20: note = Synthetic
  source 1..20: mol_type = other RNA
cgaggtcgtgaagctggaat

SEQ ID NO: 6687 - RNA, 20 nt, synthetic construct
  misc_feature 1..20: note = Synthetic
  source 1..20: mol_type = other RNA
cggagggcgaggtcgtgaag

SEQ ID NO: 6688 - RNA, 20 nt, synthetic construct
  misc_feature 1..20: note = Synthetic
  source 1..20: mol_type = other RNA
ccgcctcggagggcgaggtc

SEQ ID NO: 6689 - RNA, 20 nt, synthetic construct
  misc_feature 1..20: note = Synthetic
  source 1..20: mol_type = other RNA
ccgcatgaccgcctcggagg

SEQ ID NO: 6690 - RNA, 20 nt, synthetic construct
  misc_feature 1..20: note = Synthetic
  source 1..20: mol_type = other RNA
gttcccgcatgaccgcctcg

SEQ ID NO: 6691 - RNA, 20 nt, synthetic construct
  misc_feature 1..20: note = Synthetic
  source 1..20: mol_type = other RNA
cgtgttcccgcatgaccgcc

SEQ ID NO: 6692 - RNA, 20 nt, synthetic construct
  misc_feature 1..20: note = Synthetic
  source 1..20: mol_type = other RNA
gggcgtcgtcgtccgggaga

SEQ ID NO: 6693 - RNA, 20 nt, synthetic construct
  misc_feature 1..20: note = Synthetic
  source 1..20: mol_type = other RNA
ctcttcgggggcgtcgtcgt

SEQ ID NO: 6694 - RNA, 20 nt, synthetic construct
  misc_feature 1..20: note = Synthetic
  source 1..20: mol_type = other RNA
gagccgccagccccgcctct

SEQ ID NO: 6695 - RNA, 20 nt, synthetic construct
  misc_feature 1..20: note = Synthetic
  source 1..20: mol_type = other RNA
cgcggggagaaaggacaggc

SEQ ID NO: 6696 - RNA, 20 nt, synthetic construct
  misc_feature 1..20: note = Synthetic
  source 1..20: mol_type = other RNA
gcgtgtgtcccgcggggaga

SEQ ID NO: 6697 - RNA, 20 nt, synthetic construct
  misc_feature 1..20: note = Synthetic
  source 1..20: mol_type = other RNA
ctgcgcgtgtgtcccgcggg

SEQ ID NO: 6698 - RNA, 20 nt, synthetic construct
  misc_feature 1..20: note = Synthetic
  source 1..20: mol_type = other RNA
acagtctgcgcgtgtgtccc

SEQ ID NO: 6699 - RNA, 20 nt, synthetic construct
  misc_feature 1..20: note = Synthetic
  source 1..20: mol_type = other RNA
gtcccccaggctgacatcgg

SEQ ID NO: 6700 - RNA, 20 nt, synthetic construct
  misc_feature 1..20: note = Synthetic
  source 1..20: mol_type = other RNA
gccacgtcctcgccgtctaa

SEQ ID NO: 6701 - RNA, 20 nt, synthetic construct
  misc_feature 1..20: note = Synthetic
  source 1..20: mol_type = other RNA
cgtcccccaacatgtccaga

SEQ ID NO: 6702 - RNA, 20 nt, synthetic construct
  misc_feature 1..20: note = Synthetic
  source 1..20: mol_type = other RNA
gtggggggtaaatcccggcc

SEQ ID NO: 6703 - RNA, 20 nt, synthetic construct
  misc_feature 1..20: note = Synthetic
  source 1..20: mol_type = other RNA
gcgccgtagggggcggagtc

SEQ ID NO: 6704 - RNA, 20 nt, synthetic construct
  misc_feature 1..20: note = Synthetic
  source 1..20: mol_type = other RNA
tatccagagcgccgtagggg

SEQ ID NO: 6705 - RNA, 20 nt, synthetic construct
  misc_feature 1..20: note = Synthetic
  source 1..20: mol_type = other RNA
cggccatatccagagcgccg

SEQ ID NO: 6706 - RNA, 20 nt, synthetic construct
  misc_feature 1..20: note = Synthetic
  source 1..20: mol_type = other RNA
aactcgaagtcggccatatc

SEQ ID NO: 6707 - RNA, 20 nt, synthetic construct
  misc_feature 1..20: note = Synthetic
  source 1..20: mol_type = other RNA
cggtaaacatctgctcaaac

SEQ ID NO: 6708 - RNA, 20 nt, synthetic construct
  misc_feature 1..20: note = Synthetic
  source 1..20: mol_type = other RNA
ccaccgtactcgtcaattcc

SEQ ID NO: 6709 - RNA, 17 nt, synthetic construct
  misc_feature 1..17: note = Synthetic
  source 1..17: mol_type = other RNA
accggtacagggccgag

SEQ ID NO: 6710 - RNA, 17 nt, synthetic construct
  misc_feature 1..17: note = Synthetic
  source 1..17: mol_type = other RNA
caggtaccggtacaggg

SEQ ID NO: 6711 - RNA, 17 nt, synthetic construct
  misc_feature 1..17: note = Synthetic
  source 1..17: mol_type = other RNA
gcgcgcaggtaccggta

SEQ ID NO: 6712 - RNA, 17 nt, synthetic construct
  misc_feature 1..17: note = Synthetic
  source 1..17: mol_type = other RNA
gcctggcggtgcagctg

SEQ ID NO: 6713 - RNA, 17 nt, synthetic construct
  misc_feature 1..17: note = Synthetic
  source 1..17: mol_type = other RNA
aacaaaacacgcgccag

SEQ ID NO: 6714 - RNA, 17 nt, synthetic construct
  misc_feature 1..17: note = Synthetic
  source 1..17: mol_type = other RNA
gcggcccataggatctc

SEQ ID NO: 6715 - RNA, 17 nt, synthetic construct
  misc_feature 1..17: note = Synthetic
  source 1..17: mol_type = other RNA
tcggcgtacgcggccca

SEQ ID NO: 6716 - RNA, 17 nt, synthetic construct
  misc_feature 1..17: note = Synthetic
  source 1..17: mol_type = other RNA
agaggcagtcaaacagg

SEQ ID NO: 6717 - RNA, 17 nt, synthetic construct
  misc_feature 1..17: note = Synthetic
  source 1..17: mol_type = other RNA
agctctccaggtcgcaa

SEQ ID NO: 6718 - RNA, 17 nt, synthetic construct
  misc_feature 1..17: note = Synthetic
  source 1..17: mol_type = other RNA
ttgacgaacatgaaggg

SEQ ID NO: 6719 - RNA, 17 nt, synthetic construct
  misc_feature 1..17: note = Synthetic
  source 1..17: mol_type = other RNA
ctccgttgacgaacatg

SEQ ID NO: 6720 - RNA, 17 nt, synthetic construct
  misc_feature 1..17: note = Synthetic
  source 1..17: mol_type = other RNA
gcgctccgttgacgaac

SEQ ID NO: 6721 - RNA, 17 nt, synthetic construct
  misc_feature 1..17: note = Synthetic
  source 1..17: mol_type = other RNA
cggtgagcgctccgttg

SEQ ID NO: 6722 - RNA, 17 nt, synthetic construct
  misc_feature 1..17: note = Synthetic
  source 1..17: mol_type = other RNA
ttggcactccccggacg

SEQ ID NO: 6723 - RNA, 17 nt, synthetic construct
  misc_feature 1..17: note = Synthetic
  source 1..17: mol_type = other RNA
gcctcgattggcactcc

SEQ ID NO: 6724 - RNA, 17 nt, synthetic construct
  misc_feature 1..17: note = Synthetic
  source 1..17: mol_type = other RNA
tttagctcccgcagccg

SEQ ID NO: 6725 - RNA, 17 nt, synthetic construct
  misc_feature 1..17: note = Synthetic
  source 1..17: mol_type = other RNA
gggaggttaaggtgctc

SEQ ID NO: 6726 - RNA, 17 nt, synthetic construct
  misc_feature 1..17: note = Synthetic
  source 1..17: mol_type = other RNA
agccgcgctgcgcacca

SEQ ID NO: 6727 - RNA, 17 nt, synthetic construct
  misc_feature 1..17: note = Synthetic
  source 1..17: mol_type = other RNA
gttgccatgcagggtgg

SEQ ID NO: 6728 - RNA, 17 nt, synthetic construct
  misc_feature 1..17: note = Synthetic
  source 1..17: mol_type = other RNA
cctggttgccatgcagg

SEQ ID NO: 6729 - RNA, 17 nt, synthetic construct
  misc_feature 1..17: note = Synthetic
  source 1..17: mol_type = other RNA
cgggcctggttgccatg

SEQ ID NO: 6730 - RNA, 17 nt, synthetic construct
  misc_feature 1..17: note = Synthetic
  source 1..17: mol_type = other RNA
ataaagtacccagaggc

SEQ ID NO: 6731 - RNA, 17 nt, synthetic construct
  misc_feature 1..17: note = Synthetic
  source 1..17: mol_type = other RNA
caacaccataaagtacc

SEQ ID NO: 6732 - RNA, 17 nt, synthetic construct
  misc_feature 1..17: note = Synthetic
  source 1..17: mol_type = other RNA
tacgagtccaacttcgc

SEQ ID NO: 6733 - RNA, 17 nt, synthetic construct
  misc_feature 1..17: note = Synthetic
  source 1..17: mol_type = other RNA
ggtcgtgaagctggaat

SEQ ID NO: 6734 - RNA, 17 nt, synthetic construct
  misc_feature 1..17: note = Synthetic
  source 1..17: mol_type = other RNA
agggcgaggtcgtgaag

SEQ ID NO: 6735 - RNA, 17 nt, synthetic construct
  misc_feature 1..17: note = Synthetic
  source 1..17: mol_type = other RNA
cctcggagggcgaggtc

SEQ ID NO: 6736 - RNA, 17 nt, synthetic construct
  misc_feature 1..17: note = Synthetic
  source 1..17: mol_type = other RNA
catgaccgcctcggagg

SEQ ID NO: 6737 - RNA, 17 nt, synthetic construct
  misc_feature 1..17: note = Synthetic
  source 1..17: mol_type = other RNA
cccgcatgaccgcctcg

SEQ ID NO: 6738 - RNA, 17 nt, synthetic construct
  misc_feature 1..17: note = Synthetic
  source 1..17: mol_type = other RNA
gttcccgcatgaccgcc

SEQ ID NO: 6739 - RNA, 17 nt, synthetic construct
  misc_feature 1..17: note = Synthetic
  source 1..17: mol_type = other RNA
cgtcgtcgtccgggaga

SEQ ID NO: 6740 - RNA, 17 nt, synthetic construct
  misc_feature 1..17: note = Synthetic
  source 1..17: mol_type = other RNA
ttcgggggcgtcgtcgt

SEQ ID NO: 6741 - RNA, 17 nt, synthetic construct
  misc_feature 1..17: note = Synthetic
  source 1..17: mol_type = other RNA
ccgccagccccgcctct

SEQ ID NO: 6742 - RNA, 17 nt, synthetic construct
  misc_feature 1..17: note = Synthetic
  source 1..17: mol_type = other RNA
ggggagaaaggacaggc

SEQ ID NO: 6743 - RNA, 17 nt, synthetic construct
  misc_feature 1..17: note = Synthetic
  source 1..17: mol_type = other RNA
tgtgtcccgcggggaga

SEQ ID NO: 6744 - RNA, 17 nt, synthetic construct
  misc_feature 1..17: note = Synthetic
  source 1..17: mol_type = other RNA
cgcgtgtgtcccgcggg

SEQ ID NO: 6745 - RNA, 17 nt, synthetic construct
  misc_feature 1..17: note = Synthetic
  source 1..17: mol_type = other RNA
gtctgcgcgtgtgtccc

SEQ ID NO: 6746 - RNA, 17 nt, synthetic construct
  misc_feature 1..17: note = Synthetic
  source 1..17: mol_type = other RNA
ccccaggctgacatcgg

SEQ ID NO: 6747 - RNA, 17 nt, synthetic construct
  misc_feature 1..17: note = Synthetic
  source 1..17: mol_type = other RNA
acgtcctcgccgtctaa

SEQ ID NO: 6748 - RNA, 17 nt, synthetic construct
  misc_feature 1..17: note = Synthetic
  source 1..17: mol_type = other RNA
cccccaacatgtccaga

SEQ ID NO: 6749 - RNA, 17 nt, synthetic construct
  misc_feature 1..17: note = Synthetic
  source 1..17: mol_type = other RNA
gggggtaaatcccggcc

SEQ ID NO: 6750 - RNA, 17 nt, synthetic construct
  misc_feature 1..17: note = Synthetic
  source 1..17: mol_type = other RNA
ccgtagggggcggagtc

SEQ ID NO: 6751 - RNA, 17 nt, synthetic construct
  misc_feature 1..17: note = Synthetic
  source 1..17: mol_type = other RNA
ccagagcgccgtagggg

SEQ ID NO: 6752 - RNA, 17 nt, synthetic construct
  misc_feature 1..17: note = Synthetic
  source 1..17: mol_type = other RNA
ccatatccagagcgccg

SEQ ID NO: 6753 - RNA, 17 nt, synthetic construct
  misc_feature 1..17: note = Synthetic
  source 1..17: mol_type = other RNA
tcgaagtcggccatatc

SEQ ID NO: 6754 - RNA, 17 nt, synthetic construct
  misc_feature 1..17: note = Synthetic
  source 1..17: mol_type = other RNA
taaacatctgctcaaac

SEQ ID NO: 6755 - RNA, 17 nt, synthetic construct
  misc_feature 1..17: note = Synthetic
  source 1..17: mol_type = other RNA
ccgtactcgtcaattcc

SEQ ID NO: 6756 - RNA, 20 nt, synthetic construct
  misc_feature 1..20: note = Synthetic
  source 1..20: mol_type = other RNA
cacgtcgccgtgggcgcgaa

SEQ ID NO: 6757 - RNA, 17 nt, synthetic construct
  misc_feature 1..17: note = Synthetic
  source 1..17: mol_type = other RNA
gtcgccgtgggcgcgaa

SEQ ID NO: 6758 - RNA, 20 nt, synthetic construct
  misc_feature 1..20: note = Synthetic
  source 1..20: mol_type = other RNA
cgcctctgggtactttatgg

SEQ ID NO: 6759 - RNA, 20 nt, synthetic construct
  misc_feature 1..20: note = Synthetic
  source 1..20: mol_type = other RNA
atggcgcatgccgacgcgct

SEQ ID NO: 6760 - RNA, 17 nt, synthetic construct
  misc_feature 1..17: note = Synthetic
  source 1..17: mol_type = other RNA
ctctgggtactttatgg

SEQ ID NO: 6761 - RNA, 17 nt, synthetic construct
  misc_feature 1..17: note = Synthetic
  source 1..17: mol_type = other RNA
gcgcatgccgacgcgct

SEQ ID NO: 6762 - RNA, 20 nt, synthetic construct
  misc_feature 1..20: note = Synthetic
  source 1..20: mol_type = other RNA
tagctcccgcagccggcggg

SEQ ID NO: 6763 - RNA, 17 nt, synthetic construct
  misc_feature 1..17: note = Synthetic
  source 1..17: mol_type = other RNA
ctcccgcagccggcggg

SEQ ID NO: 6764 - RNA, 20 nt, synthetic construct
  misc_feature 1..20: note = Synthetic
  source 1..20: mol_type = other RNA
ggacctctccgacagcgatc

SEQ ID NO: 6765 - RNA, 20 nt, synthetic construct
  misc_feature 1..20: note = Synthetic
  source 1..20: mol_type = other RNA
ctccgacagcgatctggacg

SEQ ID NO: 6766 - RNA, 20 nt, synthetic construct
  misc_feature 1..20: note = Synthetic
  source 1..20: mol_type = other RNA
ccgccgcgacgacctggaat

SEQ ID NO: 6767 - RNA, 20 nt, synthetic construct
  misc_feature 1..20: note = Synthetic
  source 1..20: mol_type = other RNA
cagcggggagtgttcctcgt

SEQ ID NO: 6768 - RNA, 20 nt, synthetic construct
  misc_feature 1..20: note = Synthetic
  source 1..20: mol_type = other RNA
ttcctcgtcggacgaggaca

SEQ ID NO: 6769 - RNA, 20 nt, synthetic construct
  misc_feature 1..20: note = Synthetic
  source 1..20: mol_type = other RNA
gatactcgacgccgctcgcc

SEQ ID NO: 6770 - RNA, 20 nt, synthetic construct
  misc_feature 1..20: note = Synthetic
  source 1..20: mol_type = other RNA
actcgacgccgctcgcccgg

SEQ ID NO: 6771 - RNA, 20 nt, synthetic construct
  misc_feature 1..20: note = Synthetic
  source 1..20: mol_type = other RNA
cacccagacgcctcgtccga

SEQ ID NO: 6772 - RNA, 20 nt, synthetic construct
  misc_feature 1..20: note = Synthetic
  source 1..20: mol_type = other RNA
gcctcgtccgacggagcggc

SEQ ID NO: 6773 - RNA, 20 nt, synthetic construct
  misc_feature 1..20: note = Synthetic
  source 1..20: mol_type = other RNA
acagtgtgtggtcgcgcctc

SEQ ID NO: 6774 - RNA, 20 nt, synthetic construct
  misc_feature 1..20: note = Synthetic
  source 1..20: mol_type = other RNA
cagtgtgtggtcgcgcctcg

SEQ ID NO: 6775 - RNA, 20 nt, synthetic construct
  misc_feature 1..20: note = Synthetic
  source 1..20: mol_type = other RNA
tgtggtcgcgcctcggggcc

SEQ ID NO: 6776 - RNA, 20 nt, synthetic construct
  misc_feature 1..20: note = Synthetic
  source 1..20: mol_type = other RNA
ttgctcccccgagcagcacg

SEQ ID NO: 6777 - RNA, 20 nt, synthetic construct
  misc_feature 1..20: note = Synthetic
  source 1..20: mol_type = other RNA
tcggggtcgcggtggtcccg

SEQ ID NO: 6778 - RNA, 20 nt, synthetic construct
  misc_feature 1..20: note = Synthetic
  source 1..20: mol_type = other RNA
cggggctgccgatggtttgt

SEQ ID NO: 6779 - RNA, 20 nt, synthetic construct
  misc_feature 1..20: note = Synthetic
  source 1..20: mol_type = other RNA
atggtttgtcggacccccgc

SEQ ID NO: 6780 - RNA, 20 nt, synthetic construct
  misc_feature 1..20: note = Synthetic
  source 1..20: mol_type = other RNA
gcgggggtccgacaaaccat

SEQ ID NO: 6781 - RNA, 20 nt, synthetic construct
  misc_feature 1..20: note = Synthetic
  source 1..20: mol_type = other RNA
cgacaaaccatcggcagccc

SEQ ID NO: 6782 - RNA, 20 nt, synthetic construct
  misc_feature 1..20: note = Synthetic
  source 1..20: mol_type = other RNA
gacgcccacggcgtccgccg

SEQ ID NO: 6783 - RNA, 20 nt, synthetic construct
  misc_feature 1..20: note = Synthetic
  source 1..20: mol_type = other RNA
ccttgcccccgtgctgctcg

SEQ ID NO: 6784 - RNA, 20 nt, synthetic construct
  misc_feature 1..20: note = Synthetic
  source 1..20: mol_type = other RNA
cttgcccccgtgctgctcgg

SEQ ID NO: 6785 - RNA, 20 nt, synthetic construct
  misc_feature 1..20: note = Synthetic
  source 1..20: mol_type = other RNA
cgggggagcaagacggtcgc

SEQ ID NO: 6786 - RNA, 20 nt, synthetic construct
  misc_feature 1..20: note = Synthetic
  source 1..20: mol_type = other RNA
gggggagcaagacggtcgcc

SEQ ID NO: 6787 - RNA, 20 nt, synthetic construct
  misc_feature 1..20: note = Synthetic
  source 1..20: mol_type = other RNA
cgaggcgcgaccacacactg

SEQ ID NO: 6788 - RNA, 20 nt, synthetic construct
  misc_feature 1..20: note = Synthetic
  source 1..20: mol_type = other RNA
gaggcgcgaccacacactgt

SEQ ID NO: 6789 - RNA, 20 nt, synthetic construct
  misc_feature 1..20: note = Synthetic
  source 1..20: mol_type = other RNA
ttggggccctgccgctccgt

SEQ ID NO: 6790 - RNA, 20 nt, synthetic construct
  misc_feature 1..20: note = Synthetic
  source 1..20: mol_type = other RNA
ccctgccgctccgtcggacg

SEQ ID NO: 6791 - RNA, 20 nt, synthetic construct
  misc_feature 1..20: note = Synthetic
  source 1..20: mol_type = other RNA
gctccgtcggacgaggcgtc

SEQ ID NO: 6792 - RNA, 20 nt, synthetic construct
  misc_feature 1..20: note = Synthetic
  source 1..20: mol_type = other RNA
ctccgtcggacgaggcgtct

SEQ ID NO: 6793 - RNA, 20 nt, synthetic construct
  misc_feature 1..20: note = Synthetic
  source 1..20: mol_type = other RNA
ggtcttctggacgagacggg

SEQ ID NO: 6794 - RNA, 20 nt, synthetic construct
  misc_feature 1..20: note = Synthetic
  source 1..20: mol_type = other RNA
gggcgagcggcgtcgagtat

SEQ ID NO: 6795 - RNA, 20 nt, synthetic construct
  misc_feature 1..20: note = Synthetic
  source 1..20: mol_type = other RNA
tccggtccgtcctctccgtg

SEQ ID NO: 6796 - RNA, 20 nt, synthetic construct
  misc_feature 1..20: note = Synthetic
  source 1..20: mol_type = other RNA
ttccatgtcctcgtccgacg

SEQ ID NO: 6797 - RNA, 20 nt, synthetic construct
  misc_feature 1..20: note = Synthetic
  source 1..20: mol_type = other RNA
tgtccgattccaggtcgtcg

SEQ ID NO: 6798 - RNA, 20 nt, synthetic construct
  misc_feature 1..20: note = Synthetic
  source 1..20: mol_type = other RNA
ccgattccaggtcgtcgcgg

SEQ ID NO: 6799 - RNA, 20 nt, synthetic construct
  misc_feature 1..20: note = Synthetic
  source 1..20: mol_type = other RNA
cggctctccgccggctcggg

SEQ ID NO: 6800 - RNA, 20 nt, synthetic construct
  misc_feature 1..20: note = Synthetic
  source 1..20: mol_type = other RNA
gtcctcgtccagatcgctgt

SEQ ID NO: 6801 - RNA, 20 nt, synthetic construct
  misc_feature 1..20: note = Synthetic
  source 1..20: mol_type = other RNA
cgtccagatcgctgtcggag

SEQ ID NO: 6802 - RNA, 20 nt, synthetic construct
  misc_feature 1..20: note = Synthetic
  source 1..20: mol_type = other RNA
gatcgctgtcggagaggtcc

SEQ ID NO: 6803 - RNA, 20 nt, synthetic construct
  misc_feature 1..20: note = Synthetic
  source 1..20: mol_type = other RNA
tgtcggagaggtccaggccg

SEQ ID NO: 6804 - RNA, 17 nt, synthetic construct
  misc_feature 1..17: note = Synthetic
  source 1..17: mol_type = other RNA
cctctccgacagcgatc

SEQ ID NO: 6805 - RNA, 17 nt, synthetic construct
  misc_feature 1..17: note = Synthetic
  source 1..17: mol_type = other RNA
cgacagcgatctggacg

SEQ ID NO: 6806 - RNA, 17 nt, synthetic construct
  misc_feature 1..17: note = Synthetic
  source 1..17: mol_type = other RNA
ccgcgacgacctggaat

SEQ ID NO: 6807 - RNA, 17 nt, synthetic construct
  misc_feature 1..17: note = Synthetic
  source 1..17: mol_type = other RNA
cggggagtgttcctcgt

SEQ ID NO: 6808 - RNA, 17 nt, synthetic construct
  misc_feature 1..17: note = Synthetic
  source 1..17: mol_type = other RNA
ctcgtcggacgaggaca

SEQ ID NO: 6809 - RNA, 17 nt, synthetic construct
  misc_feature 1..17: note = Synthetic
  source 1..17: mol_type = other RNA
actcgacgccgctcgcc

SEQ ID NO: 6810 - RNA, 17 nt, synthetic construct
  misc_feature 1..17: note = Synthetic
  source 1..17: mol_type = other RNA
cgacgccgctcgcccgg

SEQ ID NO: 6811 - RNA, 17 nt, synthetic construct
  misc_feature 1..17: note = Synthetic
  source 1..17: mol_type = other RNA
ccagacgcctcgtccga

SEQ ID NO: 6812 - RNA, 17 nt, synthetic construct
  misc_feature 1..17: note = Synthetic
  source 1..17: mol_type = other RNA
tcgtccgacggagcggc

SEQ ID NO: 6813 - RNA, 17 nt, synthetic construct
  misc_feature 1..17: note = Synthetic
  source 1..17: mol_type = other RNA
gtgtgtggtcgcgcctc

SEQ ID NO: 6814 - RNA, 17 nt, synthetic construct
  misc_feature 1..17: note = Synthetic
  source 1..17: mol_type = other RNA
tgtgtggtcgcgcctcg

SEQ ID NO: 6815 - RNA, 17 nt, synthetic construct
  misc_feature 1..17: note = Synthetic
  source 1..17: mol_type = other RNA
ggtcgcgcctcggggcc

SEQ ID NO: 6816 - RNA, 17 nt, synthetic construct
  misc_feature 1..17: note = Synthetic
  source 1..17: mol_type = other RNA
ctcccccgagcagcacg

SEQ ID NO: 6817 - RNA, 17 nt, synthetic construct
  misc_feature 1..17: note = Synthetic
  source 1..17: mol_type = other RNA
gggtcgcggtggtcccg

SEQ ID NO: 6818 - RNA, 17 nt, synthetic construct
  misc_feature 1..17: note = Synthetic
  source 1..17: mol_type = other RNA
ggctgccgatggtttgt

SEQ ID NO: 6819 - RNA, 17 nt, synthetic construct
  misc_feature 1..17: note = Synthetic
  source 1..17: mol_type = other RNA
gtttgtcggacccccgc

SEQ ID NO: 6820 - RNA, 17 nt, synthetic construct
  misc_feature 1..17: note = Synthetic
  source 1..17: mol_type = other RNA
ggggtccgacaaaccat

SEQ ID NO: 6821 - RNA, 17 nt, synthetic construct
  misc_feature 1..17: note = Synthetic
  source 1..17: mol_type = other RNA
caaaccatcggcagccc

SEQ ID NO: 6822 - RNA, 17 nt, synthetic construct
  misc_feature 1..17: note = Synthetic
  source 1..17: mol_type = other RNA
gcccacggcgtccgccg

SEQ ID NO: 6823 - RNA, 17 nt, synthetic construct
  misc_feature 1..17: note = Synthetic
  source 1..17: mol_type = other RNA
tgcccccgtgctgctcg

SEQ ID NO: 6824 - RNA, 17 nt, synthetic construct
  misc_feature 1..17: note = Synthetic
  source 1..17: mol_type = other RNA
gcccccgtgctgctcgg

SEQ ID NO: 6825 - RNA, 17 nt, synthetic construct
  misc_feature 1..17: note = Synthetic
  source 1..17: mol_type = other RNA
gggagcaagacggtcgc

SEQ ID NO: 6826 - RNA, 17 nt, synthetic construct
  misc_feature 1..17: note = Synthetic
  source 1..17: mol_type = other RNA
ggagcaagacggtcgcc

SEQ ID NO: 6827 - RNA, 17 nt, synthetic construct
  misc_feature 1..17: note = Synthetic
  source 1..17: mol_type = other RNA
ggcgcgaccacacactg

SEQ ID NO: 6828 - RNA, 17 nt, synthetic construct
  misc_feature 1..17: note = Synthetic
  source 1..17: mol_type = other RNA
gcgcgaccacacactgt

SEQ ID NO: 6829 - RNA, 17 nt, synthetic construct
  misc_feature 1..17: note = Synthetic
  source 1..17: mol_type = other RNA
gggccctgccgctccgt

SEQ ID NO: 6830 - RNA, 17 nt, synthetic construct
  misc_feature 1..17: note = Synthetic
  source 1..17: mol_type = other RNA
tgccgctccgtcggacg

SEQ ID NO: 6831 - RNA, 17 nt, synthetic construct
  misc_feature 1..17: note = Synthetic
  source 1..17: mol_type = other RNA
ccgtcggacgaggcgtc

SEQ ID NO: 6832 - RNA, 17 nt, synthetic construct
  misc_feature 1..17: note = Synthetic
  source 1..17: mol_type = other RNA
cgtcggacgaggcgtct

SEQ ID NO: 6833 - RNA, 17 nt, synthetic construct
  misc_feature 1..17: note = Synthetic
  source 1..17: mol_type = other RNA
cttctggacgagacggg

SEQ ID NO: 6834 - RNA, 17 nt, synthetic construct
  misc_feature 1..17: note = Synthetic
  source 1..17: mol_type = other RNA
cgagcggcgtcgagtat

SEQ ID NO: 6835 - RNA, 17 nt, synthetic construct
  misc_feature 1..17: note = Synthetic
  source 1..17: mol_type = other RNA
ggtccgtcctctccgtg

SEQ ID NO: 6836 - RNA, 17 nt, synthetic construct
  misc_feature 1..17: note = Synthetic
  source 1..17: mol_type = other RNA
catgtcctcgtccgacg

SEQ ID NO: 6837 - RNA, 17 nt, synthetic construct
  misc_feature 1..17: note = Synthetic
  source 1..17: mol_type = other RNA
ccgattccaggtcgtcg

SEQ ID NO: 6838 - RNA, 17 nt, synthetic construct
  misc_feature 1..17: note = Synthetic
  source 1..17: mol_type = other RNA
attccaggtcgtcgcgg

SEQ ID NO: 6839 - RNA, 17 nt, synthetic construct
  misc_feature 1..17: note = Synthetic
  source 1..17: mol_type = other RNA
ctctccgccggctcggg

SEQ ID NO: 6840 - RNA, 17 nt, synthetic construct
  misc_feature 1..17: note = Synthetic
  source 1..17: mol_type = other RNA
ctcgtccagatcgctgt

SEQ ID NO: 6841 - RNA, 17 nt, synthetic construct
  misc_feature 1..17: note = Synthetic
  source 1..17: mol_type = other RNA
ccagatcgctgtcggag

SEQ ID NO: 6842 - RNA, 17 nt, synthetic construct
  misc_feature 1..17: note = Synthetic
  source 1..17: mol_type = other RNA
cgctgtcggagaggtcc

SEQ ID NO: 6843 - RNA, 17 nt, synthetic construct
  misc_feature 1..17: note = Synthetic
  source 1..17: mol_type = other RNA
cggagaggtccaggccg

SEQ ID NO: 6844 - RNA, 20 nt, synthetic construct
  misc_feature 1..20: note = Synthetic
  source 1..20: mol_type = other RNA
attgatatgctaattgacct

SEQ ID NO: 6845 - RNA, 20 nt, synthetic construct
  misc_feature 1..20: note = Synthetic
  source 1..20: mol_type = other RNA
tatgctaattgacctcggcc

SEQ ID NO: 6846 - RNA, 20 nt, synthetic construct
  misc_feature 1..20: note = Synthetic
  source 1..20: mol_type = other RNA
ggacgaggacccccccgagc

SEQ ID NO: 6847 - RNA, 20 nt, synthetic construct
  misc_feature 1..20: note = Synthetic
  source 1..20: mol_type = other RNA
cgaggacccccccgagccgg

SEQ ID NO: 6848 - RNA, 20 nt, synthetic construct
  misc_feature 1..20: note = Synthetic
  source 1..20: mol_type = other RNA
ggagagccgccgcgacgacc

SEQ ID NO: 6849 - RNA, 20 nt, synthetic construct
  misc_feature 1..20: note = Synthetic
  source 1..20: mol_type = other RNA
gacctggaatcggacagcag

SEQ ID NO: 6850 - RNA, 20 nt, synthetic construct
  misc_feature 1..20: note = Synthetic
  source 1..20: mol_type = other RNA
acctggaatcggacagcagc

SEQ ID NO: 6851 - RNA, 20 nt, synthetic construct
  misc_feature 1..20: note = Synthetic
  source 1..20: mol_type = other RNA
cctggaatcggacagcagcg

SEQ ID NO: 6852 - RNA, 20 nt, synthetic construct
  misc_feature 1..20: note = Synthetic
  source 1..20: mol_type = other RNA
ggagtgttcctcgtcggacg

SEQ ID NO: 6853 - RNA, 20 nt, synthetic construct
  misc_feature 1..20: note = Synthetic
  source 1..20: mol_type = other RNA
gaggacatggaagaccccca

SEQ ID NO: 6854 - RNA, 20 nt, synthetic construct
  misc_feature 1..20: note = Synthetic
  source 1..20: mol_type = other RNA
catggaagacccccacggag

SEQ ID NO: 6855 - RNA, 20 nt, synthetic construct
  misc_feature 1..20: note = Synthetic
  source 1..20: mol_type = other RNA
gaagacccccacggagagga

SEQ ID NO: 6856 - RNA, 20 nt, synthetic construct
  misc_feature 1..20: note = Synthetic
  source 1..20: mol_type = other RNA
cccccacggagaggacggac

SEQ ID NO: 6857 - RNA, 20 nt, synthetic construct
  misc_feature 1..20: note = Synthetic
  source 1..20: mol_type = other RNA
ccgtctcgtccagaagaccc

SEQ ID NO: 6858 - RNA, 20 nt, synthetic construct
  misc_feature 1..20: note = Synthetic
  source 1..20: mol_type = other RNA
agacgcctcgtccgacggag

SEQ ID NO: 6859 - RNA, 20 nt, synthetic construct
  misc_feature 1..20: note = Synthetic
  source 1..20: mol_type = other RNA
cctcgtccgacggagcggca

SEQ ID NO: 6860 - RNA, 20 nt, synthetic construct
  misc_feature 1..20: note = Synthetic
  source 1..20: mol_type = other RNA
aaccagcgccccacagtgtg

SEQ ID NO: 6861 - RNA, 20 nt, synthetic construct
  misc_feature 1..20: note = Synthetic
  source 1..20: mol_type = other RNA
cacagtgtgtggtcgcgcct

SEQ ID NO: 6862 - RNA, 20 nt, synthetic construct
  misc_feature 1..20: note = Synthetic
  source 1..20: mol_type = other RNA
tcttgctcccccgagcagca

SEQ ID NO: 6863 - RNA, 20 nt, synthetic construct
  misc_feature 1..20: note = Synthetic
  source 1..20: mol_type = other RNA
cttgctcccccgagcagcac

SEQ ID NO: 6864 - RNA, 20 nt, synthetic construct
  misc_feature 1..20: note = Synthetic
  source 1..20: mol_type = other RNA
tgctcccccgagcagcacgg

SEQ ID NO: 6865 - RNA, 20 nt, synthetic construct
  misc_feature 1..20: note = Synthetic
  source 1..20: mol_type = other RNA
ccccgagcagcacgggggca

SEQ ID NO: 6866 - RNA, 20 nt, synthetic construct
  misc_feature 1..20: note = Synthetic
  source 1..20: mol_type = other RNA
cgagcagcacgggggcaagg

SEQ ID NO: 6867 - RNA, 20 nt, synthetic construct
  misc_feature 1..20: note = Synthetic
  source 1..20: mol_type = other RNA
accaaagcccagcctgcccg

SEQ ID NO: 6868 - RNA, 20 nt, synthetic construct
  misc_feature 1..20: note = Synthetic
  source 1..20: mol_type = other RNA
aaagcccagcctgcccgcgg

SEQ ID NO: 6869 - RNA, 20 nt, synthetic construct
  misc_feature 1..20: note = Synthetic
  source 1..20: mol_type = other RNA
cctgcccgcggcggacgccg

SEQ ID NO: 6870 - RNA, 20 nt, synthetic construct
  misc_feature 1..20: note = Synthetic
  source 1..20: mol_type = other RNA
ctgcccgcggcggacgccgt

SEQ ID NO: 6871 - RNA, 20 nt, synthetic construct
  misc_feature 1..20: note = Synthetic
  source 1..20: mol_type = other RNA
gcggacgccgtgggcgtcgc

SEQ ID NO: 6872 - RNA, 20 nt, synthetic construct
  misc_feature 1..20: note = Synthetic
  source 1..20: mol_type = other RNA
cggacgccgtgggcgtcgca

SEQ ID NO: 6873 - RNA, 20 nt, synthetic construct
  misc_feature 1..20: note = Synthetic
  source 1..20: mol_type = other RNA
ggacgccgtgggcgtcgcag

SEQ ID NO: 6874 - RNA, 20 nt, synthetic construct
  misc_feature 1..20: note = Synthetic
  source 1..20: mol_type = other RNA
gccgtgggcgtcgcaggggt

SEQ ID NO: 6875 - RNA, 20 nt, synthetic construct
  misc_feature 1..20: note = Synthetic
  source 1..20: mol_type = other RNA
ccgtgggcgtcgcaggggtc

SEQ ID NO: 6876 - RNA, 20 nt, synthetic construct
  misc_feature 1..20: note = Synthetic
  source 1..20: mol_type = other RNA
cgtgggcgtcgcaggggtcg

SEQ ID NO: 6877 - RNA, 20 nt, synthetic construct
  misc_feature 1..20: note = Synthetic
  source 1..20: mol_type = other RNA
cgtcgcaggggtcggggtcg

SEQ ID NO: 6878 - RNA, 20 nt, synthetic construct
  misc_feature 1..20: note = Synthetic
  source 1..20: mol_type = other RNA
cgcaggggtcggggtcgcgg

SEQ ID NO: 6879 - RNA, 20 nt, synthetic construct
  misc_feature 1..20: note = Synthetic
  source 1..20: mol_type = other RNA
ggtcggggtcgcggtggtcc

SEQ ID NO: 6880 - RNA, 20 nt, synthetic construct
  misc_feature 1..20: note = Synthetic
  source 1..20: mol_type = other RNA
gtcggggtcgcggtggtccc

SEQ ID NO: 6881 - RNA, 20 nt, synthetic construct
  misc_feature 1..20: note = Synthetic
  source 1..20: mol_type = other RNA
ggtggtcccggggctgccga

SEQ ID NO: 6882 - RNA, 20 nt, synthetic construct
  misc_feature 1..20: note = Synthetic
  source 1..20: mol_type = other RNA
gacaaaccatcggcagcccc

SEQ ID NO: 6883 - RNA, 20 nt, synthetic construct
  misc_feature 1..20: note = Synthetic
  source 1..20: mol_type = other RNA
cccgacccctgcgacgccca

SEQ ID NO: 6884 - RNA, 20 nt, synthetic construct
  misc_feature 1..20: note = Synthetic
  source 1..20: mol_type = other RNA
acgcccacggcgtccgccgc

SEQ ID NO: 6885 - RNA, 20 nt, synthetic construct
  misc_feature 1..20: note = Synthetic
  source 1..20: mol_type = other RNA
ccacggcgtccgccgcgggc

SEQ ID NO: 6886 - RNA, 20 nt, synthetic construct
  misc_feature 1..20: note = Synthetic
  source 1..20: mol_type = other RNA
ggcgtccgccgcgggcaggc

SEQ ID NO: 6887 - RNA, 20 nt, synthetic construct
  misc_feature 1..20: note = Synthetic
  source 1..20: mol_type = other RNA
gcgtccgccgcgggcaggct

SEQ ID NO: 6888 - RNA, 20 nt, synthetic construct
  misc_feature 1..20: note = Synthetic
  source 1..20: mol_type = other RNA
gccgcgggcaggctgggctt

SEQ ID NO: 6889 - RNA, 20 nt, synthetic construct
  misc_feature 1..20: note = Synthetic
  source 1..20: mol_type = other RNA
cgggcaggctgggctttggt

SEQ ID NO: 6890 - RNA, 20 nt, synthetic construct
  misc_feature 1..20: note = Synthetic
  source 1..20: mol_type = other RNA
gcaggctgggctttggtcgg

SEQ ID NO: 6891 - RNA, 20 nt, synthetic construct
  misc_feature 1..20: note = Synthetic
  source 1..20: mol_type = other RNA
caggctgggctttggtcggt

SEQ ID NO: 6892 - RNA, 20 nt, synthetic construct
  misc_feature 1..20: note = Synthetic
  source 1..20: mol_type = other RNA
aggctgggctttggtcggtg

SEQ ID NO: 6893 - RNA, 20 nt, synthetic construct
  misc_feature 1..20: note = Synthetic
  source 1..20: mol_type = other RNA
ggctgggctttggtcggtgg

SEQ ID NO: 6894 - RNA, 20 nt, synthetic construct
  misc_feature 1..20: note = Synthetic
  source 1..20: mol_type = other RNA
gggctttggtcggtgggggt

SEQ ID NO: 6895 - RNA, 20 nt, synthetic construct
  misc_feature 1..20: note = Synthetic
  source 1..20: mol_type = other RNA
ctttggtcggtgggggttgg

SEQ ID NO: 6896 - RNA, 20 nt, synthetic construct
  misc_feature 1..20: note = Synthetic
  source 1..20: mol_type = other RNA
tggtcggtgggggttggagg

SEQ ID NO: 6897 - RNA, 20 nt, synthetic construct
  misc_feature 1..20: note = Synthetic
  source 1..20: mol_type = other RNA
ggtcggtgggggttggaggc

SEQ ID NO: 6898 - RNA, 20 nt, synthetic construct
  misc_feature 1..20: note = Synthetic
  source 1..20: mol_type = other RNA
caccttgcccccgtgctgct

SEQ ID NO: 6899 - RNA, 20 nt, synthetic construct
  misc_feature 1..20: note = Synthetic
  source 1..20: mol_type = other RNA
accttgcccccgtgctgctc

SEQ ID NO: 6900 - RNA, 20 nt, synthetic construct
  misc_feature 1..20: note = Synthetic
  source 1..20: mol_type = other RNA
tgctgctcgggggagcaaga

SEQ ID NO: 6901 - RNA, 20 nt, synthetic construct
  misc_feature 1..20: note = Synthetic
  source 1..20: mol_type = other RNA
aagacggtcgccgggccccg

SEQ ID NO: 6902 - RNA, 20 nt, synthetic construct
  misc_feature 1..20: note = Synthetic
  source 1..20: mol_type = other RNA
aggcgcgaccacacactgtg

SEQ ID NO: 6903 - RNA, 20 nt, synthetic construct
  misc_feature 1..20: note = Synthetic
  source 1..20: mol_type = other RNA
gaccacacactgtggggcgc

SEQ ID NO: 6904 - RNA, 20 nt, synthetic construct
  misc_feature 1..20: note = Synthetic
  source 1..20: mol_type = other RNA
acactgtggggcgctggttg

SEQ ID NO: 6905 - RNA, 20 nt, synthetic construct
  misc_feature 1..20: note = Synthetic
  source 1..20: mol_type = other RNA
gggcgctggttgaggatcgt

SEQ ID NO: 6906 - RNA, 20 nt, synthetic construct
  misc_feature 1..20: note = Synthetic
  source 1..20: mol_type = other RNA
ggcgctggttgaggatcgtt

SEQ ID NO: 6907 - RNA, 20 nt, synthetic construct
  misc_feature 1..20: note = Synthetic
  source 1..20: mol_type = other RNA
gcgctggttgaggatcgttg

SEQ ID NO: 6908 - RNA, 20 nt, synthetic construct
  misc_feature 1..20: note = Synthetic
  source 1..20: mol_type = other RNA
cggacgaggcgtctgggtgc

SEQ ID NO: 6909 - RNA, 20 nt, synthetic construct
  misc_feature 1..20: note = Synthetic
  source 1..20: mol_type = other RNA
ggacgaggcgtctgggtgct

SEQ ID NO: 6910 - RNA, 20 nt, synthetic construct
  misc_feature 1..20: note = Synthetic
  source 1..20: mol_type = other RNA
cgtctgggtgctgggtacgc

SEQ ID NO: 6911 - RNA, 20 nt, synthetic construct
  misc_feature 1..20: note = Synthetic
  source 1..20: mol_type = other RNA
gtctgggtgctgggtacgcc

SEQ ID NO: 6912 - RNA, 20 nt, synthetic construct
  misc_feature 1..20: note = Synthetic
  source 1..20: mol_type = other RNA
tctgggtgctgggtacgccg

SEQ ID NO: 6913 - RNA, 20 nt, synthetic construct
  misc_feature 1..20: note = Synthetic
  source 1..20: mol_type = other RNA
ctgggtacgccggggtcttc

SEQ ID NO: 6914 - RNA, 20 nt, synthetic construct
  misc_feature 1..20: note = Synthetic
  source 1..20: mol_type = other RNA
ccggggtcttctggacgaga

SEQ ID NO: 6915 - RNA, 20 nt, synthetic construct
  misc_feature 1..20: note = Synthetic
  source 1..20: mol_type = other RNA
cggggtcttctggacgagac

SEQ ID NO: 6916 - RNA, 20 nt, synthetic construct
  misc_feature 1..20: note = Synthetic
  source 1..20: mol_type = other RNA
ggacgagacgggcggaccgc

SEQ ID NO: 6917 - RNA, 20 nt, synthetic construct
  misc_feature 1..20: note = Synthetic
  source 1..20: mol_type = other RNA
gacgagacgggcggaccgcc

SEQ ID NO: 6918 - RNA, 20 nt, synthetic construct
  misc_feature 1..20: note = Synthetic
  source 1..20: mol_type = other RNA
cgggcggaccgccgggcgag

SEQ ID NO: 6919 - RNA, 20 nt, synthetic construct
  misc_feature 1..20: note = Synthetic
  source 1..20: mol_type = other RNA
gcggcgtcgagtatcggctc

SEQ ID NO: 6920 - RNA, 20 nt, synthetic construct
  misc_feature 1..20: note = Synthetic
  source 1..20: mol_type = other RNA
gctccggtccgtcctctccg

SEQ ID NO: 6921 - RNA, 20 nt, synthetic construct
  misc_feature 1..20: note = Synthetic
  source 1..20: mol_type = other RNA
ctccggtccgtcctctccgt

SEQ ID NO: 6922 - RNA, 20 nt, synthetic construct
  misc_feature 1..20: note = Synthetic
  source 1..20: mol_type = other RNA
ccggtccgtcctctccgtgg

SEQ ID NO: 6923 - RNA, 20 nt, synthetic construct
  misc_feature 1..20: note = Synthetic
  source 1..20: mol_type = other RNA
ccccgctgctgtccgattcc

SEQ ID NO: 6924 - RNA, 20 nt, synthetic construct
  misc_feature 1..20: note = Synthetic
  source 1..20: mol_type = other RNA
tcgtcgcggcggctctccgc

SEQ ID NO: 6925 - RNA, 20 nt, synthetic construct
  misc_feature 1..20: note = Synthetic
  source 1..20: mol_type = other RNA
gcggcggctctccgccggct

SEQ ID NO: 6926 - RNA, 20 nt, synthetic construct
  misc_feature 1..20: note = Synthetic
  source 1..20: mol_type = other RNA
cggcggctctccgccggctc

SEQ ID NO: 6927 - RNA, 20 nt, synthetic construct
  misc_feature 1..20: note = Synthetic
  source 1..20: mol_type = other RNA
ggcggctctccgccggctcg

SEQ ID NO: 6928 - RNA, 20 nt, synthetic construct
  misc_feature 1..20: note = Synthetic
  source 1..20: mol_type = other RNA
gcggctctccgccggctcgg

SEQ ID NO: 6929 - RNA, 20 nt, synthetic construct
  misc_feature 1..20: note = Synthetic
  source 1..20: mol_type = other RNA
ggctctccgccggctcgggg

SEQ ID NO: 6930 - RNA, 17 nt, synthetic construct
  misc_feature 1..17: note = Synthetic
  source 1..17: mol_type = other RNA
gatatgctaattgacct

SEQ ID NO: 6931 - RNA, 17 nt, synthetic construct
  misc_feature 1..17: note = Synthetic
  source 1..17: mol_type = other RNA
gctaattgacctcggcc

SEQ ID NO: 6932 - RNA, 17 nt, synthetic construct
  misc_feature 1..17: note = Synthetic
  source 1..17: mol_type = other RNA
cgaggacccccccgagc

SEQ ID NO: 6933 - RNA, 17 nt, synthetic construct
  misc_feature 1..17: note = Synthetic
  source 1..17: mol_type = other RNA
ggacccccccgagccgg

SEQ ID NO: 6934 - RNA, 17 nt, synthetic construct
  misc_feature 1..17: note = Synthetic
  source 1..17: mol_type = other RNA
gagccgccgcgacgacc

SEQ ID NO: 6935 - RNA, 17 nt, synthetic construct
  misc_feature 1..17: note = Synthetic
  source 1..17: mol_type = other RNA
ctggaatcggacagcag

SEQ ID NO: 6936 - RNA, 17 nt, synthetic construct
  misc_feature 1..17: note = Synthetic
  source 1..17: mol_type = other RNA
tggaatcggacagcagc

SEQ ID NO: 6937 - RNA, 17 nt, synthetic construct
  misc_feature 1..17: note = Synthetic
  source 1..17: mol_type = other RNA
ggaatcggacagcagcg

SEQ ID NO: 6938 - RNA, 17 nt, synthetic construct
  misc_feature 1..17: note = Synthetic
  source 1..17: mol_type = other RNA
gtgttcctcgtcggacg

SEQ ID NO: 6939 - RNA, 17 nt, synthetic construct
  misc_feature 1..17: note = Synthetic
  source 1..17: mol_type = other RNA
gacatggaagaccccca

SEQ ID NO: 6940 - RNA, 17 nt, synthetic construct
  misc_feature 1..17: note = Synthetic
  source 1..17: mol_type = other RNA
ggaagacccccacggag

SEQ ID NO: 6941 - RNA, 17 nt, synthetic construct
  misc_feature 1..17: note = Synthetic
  source 1..17: mol_type = other RNA
gacccccacggagagga

SEQ ID NO: 6942 - RNA, 17 nt, synthetic construct
  misc_feature 1..17: note = Synthetic
  source 1..17: mol_type = other RNA
ccacggagaggacggac

SEQ ID NO: 6943 - RNA, 17 nt, synthetic construct
  misc_feature 1..17: note = Synthetic
  source 1..17: mol_type = other RNA
tctcgtccagaagaccc

SEQ ID NO: 6944 - RNA, 17 nt, synthetic construct
  misc_feature 1..17: note = Synthetic
  source 1..17: mol_type = other RNA
cgcctcgtccgacggag

SEQ ID NO: 6945 - RNA, 17 nt, synthetic construct
  misc_feature 1..17: note = Synthetic
  source 1..17: mol_type = other RNA
cgtccgacggagcggca

SEQ ID NO: 6946 - RNA, 17 nt, synthetic construct
  misc_feature 1..17: note = Synthetic
  source 1..17: mol_type = other RNA
cagcgccccacagtgtg

SEQ ID NO: 6947 - RNA, 17 nt, synthetic construct
  misc_feature 1..17: note = Synthetic
  source 1..17: mol_type = other RNA
agtgtgtggtcgcgcct

SEQ ID NO: 6948 - RNA, 17 nt, synthetic construct
  misc_feature 1..17: note = Synthetic
  source 1..17: mol_type = other RNA
tgctcccccgagcagca

SEQ ID NO: 6949 - RNA, 17 nt, synthetic construct
  misc_feature 1..17: note = Synthetic
  source 1..17: mol_type = other RNA
gctcccccgagcagcac

SEQ ID NO: 6950 - RNA, 17 nt, synthetic construct
  misc_feature 1..17: note = Synthetic
  source 1..17: mol_type = other RNA
tcccccgagcagcacgg

SEQ ID NO: 6951 - RNA, 17 nt, synthetic construct
  misc_feature 1..17: note = Synthetic
  source 1..17: mol_type = other RNA
cgagcagcacgggggca

SEQ ID NO: 6952 - RNA, 17 nt, synthetic construct
  misc_feature 1..17: note = Synthetic
  source 1..17: mol_type = other RNA
gcagcacgggggcaagg

SEQ ID NO: 6953 - RNA, 17 nt, synthetic construct
  misc_feature 1..17: note = Synthetic
  source 1..17: mol_type = other RNA
aaagcccagcctgcccg

SEQ ID NO: 6954 - RNA, 17 nt, synthetic construct
  misc_feature 1..17: note = Synthetic
  source 1..17: mol_type = other RNA
gcccagcctgcccgcgg

SEQ ID NO: 6955 - RNA, 17 nt, synthetic construct
  misc_feature 1..17: note = Synthetic
  source 1..17: mol_type = other RNA
gcccgcggcggacgccg

SEQ ID NO: 6956 - RNA, 17 nt, synthetic construct
  misc_feature 1..17: note = Synthetic
  source 1..17: mol_type = other RNA
cccgcggcggacgccgt

SEQ ID NO: 6957 - RNA, 17 nt, synthetic construct
  misc_feature 1..17: note = Synthetic
  source 1..17: mol_type = other RNA
gacgccgtgggcgtcgc

SEQ ID NO: 6958 - RNA, 17 nt, synthetic construct
  misc_feature 1..17: note = Synthetic
  source 1..17: mol_type = other RNA
acgccgtgggcgtcgca

SEQ ID NO: 6959 - RNA, 17 nt, synthetic construct
  misc_feature 1..17: note = Synthetic
  source 1..17: mol_type = other RNA
cgccgtgggcgtcgcag

SEQ ID NO: 6960 - RNA, 17 nt, synthetic construct
  misc_feature 1..17: note = Synthetic
  source 1..17: mol_type = other RNA
gtgggcgtcgcaggggt

SEQ ID NO: 6961 - RNA, 17 nt, synthetic construct
  misc_feature 1..17: note = Synthetic
  source 1..17: mol_type = other RNA
tgggcgtcgcaggggtc

SEQ ID NO: 6962 - RNA, 17 nt, synthetic construct
  misc_feature 1..17: note = Synthetic
  source 1..17: mol_type = other RNA
gggcgtcgcaggggtcg

SEQ ID NO: 6963 - RNA, 17 nt, synthetic construct
  misc_feature 1..17: note = Synthetic
  source 1..17: mol_type = other RNA
cgcaggggtcggggtcg

SEQ ID NO: 6964 - RNA, 17 nt, synthetic construct
  misc_feature 1..17: note = Synthetic
  source 1..17: mol_type = other RNA
aggggtcggggtcgcgg

SEQ ID NO: 6965 - RNA, 17 nt, synthetic construct
  misc_feature 1..17: note = Synthetic
  source 1..17: mol_type = other RNA
cggggtcgcggtggtcc

SEQ ID NO: 6966 - RNA, 17 nt, synthetic construct
  misc_feature 1..17: note = Synthetic
  source 1..17: mol_type = other RNA
ggggtcgcggtggtccc

SEQ ID NO: 6967 - RNA, 17 nt, synthetic construct
  misc_feature 1..17: note = Synthetic
  source 1..17: mol_type = other RNA
ggtcccggggctgccga

SEQ ID NO: 6968 - RNA, 17 nt, synthetic construct
  misc_feature 1..17: note = Synthetic
  source 1..17: mol_type = other RNA
aaaccatcggcagcccc

SEQ ID NO: 6969 - RNA, 17 nt, synthetic construct
  misc_feature 1..17: note = Synthetic
  source 1..17: mol_type = other RNA
gacccctgcgacgccca

SEQ ID NO: 6970 - RNA, 17 nt, synthetic construct
  misc_feature 1..17: note = Synthetic
  source 1..17: mol_type = other RNA
cccacggcgtccgccgc

SEQ ID NO: 6971 - RNA, 17 nt, synthetic construct
  misc_feature 1..17: note = Synthetic
  source 1..17: mol_type = other RNA
cggcgtccgccgcgggc

SEQ ID NO: 6972 - RNA, 17 nt, synthetic construct
  misc_feature 1..17: note = Synthetic
  source 1..17: mol_type = other RNA
gtccgccgcgggcaggc

SEQ ID NO: 6973 - RNA, 17 nt, synthetic construct
  misc_feature 1..17: note = Synthetic
  source 1..17: mol_type = other RNA
tccgccgcgggcaggct

SEQ ID NO: 6974 - RNA, 17 nt, synthetic construct
  misc_feature 1..17: note = Synthetic
  source 1..17: mol_type = other RNA
gcgggcaggctgggctt

SEQ ID NO: 6975 - RNA, 17 nt, synthetic construct
  misc_feature 1..17: note = Synthetic
  source 1..17: mol_type = other RNA
gcaggctgggctttggt

SEQ ID NO: 6976 - RNA, 17 nt, synthetic construct
  misc_feature 1..17: note = Synthetic
  source 1..17: mol_type = other RNA
ggctgggctttggtcgg

SEQ ID NO: 6977 - RNA, 17 nt, synthetic construct
  misc_feature 1..17: note = Synthetic
  source 1..17: mol_type = other RNA
gctgggctttggtcggt

SEQ ID NO: 6978 - RNA, 17 nt, synthetic construct
  misc_feature 1..17: note = Synthetic
  source 1..17: mol_type = other RNA
ctgggctttggtcggtg

SEQ ID NO: 6979 - RNA, 17 nt, synthetic construct
  misc_feature 1..17: note = Synthetic
  source 1..17: mol_type = other RNA
tgggctttggtcggtgg

SEQ ID NO: 6980 - RNA, 17 nt, synthetic construct
  misc_feature 1..17: note = Synthetic
  source 1..17: mol_type = other RNA
ctttggtcggtgggggt

SEQ ID NO: 6981 - RNA, 17 nt, synthetic construct
  misc_feature 1..17: note = Synthetic
  source 1..17: mol_type = other RNA
tggtcggtgggggttgg

SEQ ID NO: 6982 - RNA, 17 nt, synthetic construct
  misc_feature 1..17: note = Synthetic
  source 1..17: mol_type = other RNA
tcggtgggggttggagg

SEQ ID NO: 6983 - RNA, 17 nt, synthetic construct
  misc_feature 1..17: note = Synthetic
  source 1..17: mol_type = other RNA
cggtgggggttggaggc

SEQ ID NO: 6984 - RNA, 17 nt, synthetic construct
  misc_feature 1..17: note = Synthetic
  source 1..17: mol_type = other RNA
cttgcccccgtgctgct

SEQ ID NO: 6985 - RNA, 17 nt, synthetic construct
  misc_feature 1..17: note = Synthetic
  source 1..17: mol_type = other RNA
ttgcccccgtgctgctc

SEQ ID NO: 6986 - RNA, 17 nt, synthetic construct
  misc_feature 1..17: note = Synthetic
  source 1..17: mol_type = other RNA
tgctcgggggagcaaga

SEQ ID NO: 6987 - RNA, 17 nt, synthetic construct
  misc_feature 1..17: note = Synthetic
  source 1..17: mol_type = other RNA
acggtcgccgggccccg

SEQ ID NO: 6988 - RNA, 17 nt, synthetic construct
  misc_feature 1..17: note = Synthetic
  source 1..17: mol_type = other RNA
cgcgaccacacactgtg

SEQ ID NO: 6989 - RNA, 17 nt, synthetic construct
  misc_feature 1..17: note = Synthetic
  source 1..17: mol_type = other RNA
cacacactgtggggcgc

SEQ ID NO: 6990 - RNA, 17 nt, synthetic construct
  misc_feature 1..17: note = Synthetic
  source 1..17: mol_type = other RNA
ctgtggggcgctggttg

SEQ ID NO: 6991 - RNA, 17 nt, synthetic construct
  misc_feature 1..17: note = Synthetic
  source 1..17: mol_type = other RNA
cgctggttgaggatcgt

SEQ ID NO: 6992 - RNA, 17 nt, synthetic construct
  misc_feature 1..17: note = Synthetic
  source 1..17: mol_type = other RNA
gctggttgaggatcgtt

SEQ ID NO: 6993 - RNA, 17 nt, synthetic construct
  misc_feature 1..17: note = Synthetic
  source 1..17: mol_type = other RNA
ctggttgaggatcgttg

SEQ ID NO: 6994 - RNA, 17 nt, synthetic construct
  misc_feature 1..17: note = Synthetic
  source 1..17: mol_type = other RNA
acgaggcgtctgggtgc

SEQ ID NO: 6995 - RNA, 17 nt, synthetic construct
  misc_feature 1..17: note = Synthetic
  source 1..17: mol_type = other RNA
cgaggcgtctgggtgct

SEQ ID NO: 6996 - RNA, 17 nt, synthetic construct
  misc_feature 1..17: note = Synthetic
  source 1..17: mol_type = other RNA
ctgggtgctgggtacgc

SEQ ID NO: 6997 - RNA, 17 nt, synthetic construct
  misc_feature 1..17: note = Synthetic
  source 1..17: mol_type = other RNA
tgggtgctgggtacgcc

SEQ ID NO: 6998 - RNA, 17 nt, synthetic construct
  misc_feature 1..17: note = Synthetic
  source 1..17: mol_type = other RNA
gggtgctgggtacgccg

SEQ ID NO: 6999 - RNA, 17 nt, synthetic construct
  misc_feature 1..17: note = Synthetic
  source 1..17: mol_type = other RNA
ggtacgccggggtcttc

SEQ ID NO: 7000 - RNA, 17 nt, synthetic construct
  misc_feature 1..17: note = Synthetic
  source 1..17: mol_type = other RNA
gggtcttctggacgaga

SEQ ID NO: 7001 - RNA, 17 nt, synthetic construct
  misc_feature 1..17: note = Synthetic
  source 1..17: mol_type = other RNA
ggtcttctggacgagac

SEQ ID NO: 7002 - RNA, 17 nt, synthetic construct
  misc_feature 1..17: note = Synthetic
  source 1..17: mol_type = other RNA
cgagacgggcggaccgc

SEQ ID NO: 7003 - RNA, 17 nt, synthetic construct
  misc_feature 1..17: note = Synthetic
  source 1..17: mol_type = other RNA
gagacgggcggaccgcc

SEQ ID NO: 7004 - RNA, 17 nt, synthetic construct
  misc_feature 1..17: note = Synthetic
  source 1..17: mol_type = other RNA
gcggaccgccgggcgag

SEQ ID NO: 7005 - RNA, 17 nt, synthetic construct
  misc_feature 1..17: note = Synthetic
  source 1..17: mol_type = other RNA
gcgtcgagtatcggctc

SEQ ID NO: 7006 - RNA, 17 nt, synthetic construct
  misc_feature 1..17: note = Synthetic
  source 1..17: mol_type = other RNA
ccggtccgtcctctccg

SEQ ID NO: 7007 - RNA, 17 nt, synthetic construct
  misc_feature 1..17: note = Synthetic
  source 1..17: mol_type = other RNA
cggtccgtcctctccgt

SEQ ID NO: 7008 - RNA, 17 nt, synthetic construct
  misc_feature 1..17: note = Synthetic
  source 1..17: mol_type = other RNA
gtccgtcctctccgtgg

SEQ ID NO: 7009 - RNA, 17 nt, synthetic construct
  misc_feature 1..17: note = Synthetic
  source 1..17: mol_type = other RNA
cgctgctgtccgattcc

SEQ ID NO: 7010 - RNA, 17 nt, synthetic construct
  misc_feature 1..17: note = Synthetic
  source 1..17: mol_type = other RNA
tcgcggcggctctccgc

SEQ ID NO: 7011 - RNA, 17 nt, synthetic construct
  misc_feature 1..17: note = Synthetic
  source 1..17: mol_type = other RNA
gcggctctccgccggct

SEQ ID NO: 7012 - RNA, 17 nt, synthetic construct
  misc_feature 1..17: note = Synthetic
  source 1..17: mol_type = other RNA
cggctctccgccggctc

SEQ ID NO: 7013 - RNA, 17 nt, synthetic construct
  misc_feature 1..17: note = Synthetic
  source 1..17: mol_type = other RNA
ggctctccgccggctcg

SEQ ID NO: 7014 - RNA, 17 nt, synthetic construct
  misc_feature 1..17: note = Synthetic
  source 1..17: mol_type = other RNA
gctctccgccggctcgg

SEQ ID NO: 7015 - RNA, 17 nt, synthetic construct
  misc_feature 1..17: note = Synthetic
  source 1..17: mol_type = other RNA
tctccgccggctcgggg

SEQ ID NO: 7016 - RNA, 20 nt, synthetic construct
  misc_feature 1..20: note = Synthetic
  source 1..20: mol_type = other RNA
agaaccaatcgcaaccctgg

SEQ ID NO: 7017 - RNA, 20 nt, synthetic construct
  misc_feature 1..20: note = Synthetic
  source 1..20: mol_type = other RNA
aaccctgggggaccccgccc

SEQ ID NO: 7018 - RNA, 20 nt, synthetic construct
  misc_feature 1..20: note = Synthetic
  source 1..20: mol_type = other RNA
accctgggggaccccgcccc

SEQ ID NO: 7019 - RNA, 20 nt, synthetic construct
  misc_feature 1..20: note = Synthetic
  source 1..20: mol_type = other RNA
ccctgggggaccccgccccg

SEQ ID NO: 7020 - RNA, 20 nt, synthetic construct
  misc_feature 1..20: note = Synthetic
  source 1..20: mol_type = other RNA
tgggggaccccgccccgggg

SEQ ID NO: 7021 - RNA, 20 nt, synthetic construct
  misc_feature 1..20: note = Synthetic
  source 1..20: mol_type = other RNA
gggggaccccgccccggggc

SEQ ID NO: 7022 - RNA, 20 nt, synthetic construct
  misc_feature 1..20: note = Synthetic
  source 1..20: mol_type = other RNA
ggggaccccgccccggggcg

SEQ ID NO: 7023 - RNA, 20 nt, synthetic construct
  misc_feature 1..20: note = Synthetic
  source 1..20: mol_type = other RNA
gaccccgccccggggcgggg

SEQ ID NO: 7024 - RNA, 20 nt, synthetic construct
  misc_feature 1..20: note = Synthetic
  source 1..20: mol_type = other RNA
ccgccccggggcggggtgga

SEQ ID NO: 7025 - RNA, 20 nt, synthetic construct
  misc_feature 1..20: note = Synthetic
  source 1..20: mol_type = other RNA
cccggggcggggtggacgga

SEQ ID NO: 7026 - RNA, 20 nt, synthetic construct
  misc_feature 1..20: note = Synthetic
  source 1..20: mol_type = other RNA
gcggggtggacggacggccc

SEQ ID NO: 7027 - RNA, 20 nt, synthetic construct
  misc_feature 1..20: note = Synthetic
  source 1..20: mol_type = other RNA
gacggccccggcgcccccca

SEQ ID NO: 7028 - RNA, 20 nt, synthetic construct
  misc_feature 1..20: note = Synthetic
  source 1..20: mol_type = other RNA
ccccggcgccccccatggcg

SEQ ID NO: 7029 - RNA, 20 nt, synthetic construct
  misc_feature 1..20: note = Synthetic
  source 1..20: mol_type = other RNA
gcgccccccatggcgaggcg

SEQ ID NO: 7030 - RNA, 20 nt, synthetic construct
  misc_feature 1..20: note = Synthetic
  source 1..20: mol_type = other RNA
ccccatggcgaggcgtggcg

SEQ ID NO: 7031 - RNA, 20 nt, synthetic construct
  misc_feature 1..20: note = Synthetic
  source 1..20: mol_type = other RNA
agtgagcagcccgacccacc

SEQ ID NO: 7032 - RNA, 20 nt, synthetic construct
  misc_feature 1..20: note = Synthetic
  source 1..20: mol_type = other RNA
gagcagcccgacccacccgg

SEQ ID NO: 7033 - RNA, 20 nt, synthetic construct
  misc_feature 1..20: note = Synthetic
  source 1..20: mol_type = other RNA
ccgacccacccggaggccag

SEQ ID NO: 7034 - RNA, 20 nt, synthetic construct
  misc_feature 1..20: note = Synthetic
  source 1..20: mol_type = other RNA
cacccggaggccagcggaca

SEQ ID NO: 7035 - RNA, 20 nt, synthetic construct
  misc_feature 1..20: note = Synthetic
  source 1..20: mol_type = other RNA
acccggaggccagcggacac

SEQ ID NO: 7036 - RNA, 20 nt, synthetic construct
  misc_feature 1..20: note = Synthetic
  source 1..20: mol_type = other RNA
cccggaggccagcggacacg

SEQ ID NO: 7037 - RNA, 20 nt, synthetic construct
  misc_feature 1..20: note = Synthetic
  source 1..20: mol_type = other RNA
accccccccgctaatgacgc

SEQ ID NO: 7038 - RNA, 20 nt, synthetic construct
  misc_feature 1..20: note = Synthetic
  source 1..20: mol_type = other RNA
ggcgattgcccccccgcccg

SEQ ID NO: 7039 - RNA, 20 nt, synthetic construct
  misc_feature 1..20: note = Synthetic
  source 1..20: mol_type = other RNA
gcccgcggacccccgcgccc

SEQ ID NO: 7040 - RNA, 20 nt, synthetic construct
  misc_feature 1..20: note = Synthetic
  source 1..20: mol_type = other RNA
ggacccccgcgccccggccc

SEQ ID NO: 7041 - RNA, 20 nt, synthetic construct
  misc_feature 1..20: note = Synthetic
  source 1..20: mol_type = other RNA
cgccccggccccggagcgaa

SEQ ID NO: 7042 - RNA, 20 nt, synthetic construct
  misc_feature 1..20: note = Synthetic
  source 1..20: mol_type = other RNA
acaccatcgacgccaccacg

SEQ ID NO: 7043 - RNA, 20 nt, synthetic construct
  misc_feature 1..20: note = Synthetic
  source 1..20: mol_type = other RNA
catcgacgccaccacgcggt

SEQ ID NO: 7044 - RNA, 20 nt, synthetic construct
  misc_feature 1..20: note = Synthetic
  source 1..20: mol_type = other RNA
gcgctccatctccgagcgcg

SEQ ID NO: 7045 - RNA, 20 nt, synthetic construct
  misc_feature 1..20: note = Synthetic
  source 1..20: mol_type = other RNA
ctccatctccgagcgcgcgg

SEQ ID NO: 7046 - RNA, 20 nt, synthetic construct
  misc_feature 1..20: note = Synthetic
  source 1..20: mol_type = other RNA
gaccgcatcagcgagagctt

SEQ ID NO: 7047 - RNA, 20 nt, synthetic construct
  misc_feature 1..20: note = Synthetic
  source 1..20: mol_type = other RNA
gagctttggccgcagcgcac

SEQ ID NO: 7048 - RNA, 20 nt, synthetic construct
  misc_feature 1..20: note = Synthetic
  source 1..20: mol_type = other RNA
caggtcatgcacgacccctt

SEQ ID NO: 7049 - RNA, 20 nt, synthetic construct
  misc_feature 1..20: note = Synthetic
  source 1..20: mol_type = other RNA
aggtcatgcacgaccccttt

SEQ ID NO: 7050 - RNA, 20 nt, synthetic construct
  misc_feature 1..20: note = Synthetic
  source 1..20: mol_type = other RNA
ggtcatgcacgacccctttg

SEQ ID NO: 7051 - RNA, 20 nt, synthetic construct
  misc_feature 1..20: note = Synthetic
  source 1..20: mol_type = other RNA
gtcatgcacgacccctttgg

SEQ ID NO: 7052 - RNA, 20 nt, synthetic construct
  misc_feature 1..20: note = Synthetic
  source 1..20: mol_type = other RNA
tcatgcacgacccctttggg

SEQ ID NO: 7053 - RNA, 20 nt, synthetic construct
  misc_feature 1..20: note = Synthetic
  source 1..20: mol_type = other RNA
ttcccgccgcgaatagcccc

SEQ ID NO: 7054 - RNA, 20 nt, synthetic construct
  misc_feature 1..20: note = Synthetic
  source 1..20: mol_type = other RNA
tcccgccgcgaatagcccct

SEQ ID NO: 7055 - RNA, 20 nt, synthetic construct
  misc_feature 1..20: note = Synthetic
  source 1..20: mol_type = other RNA
cgcgaatagcccctgggccc

SEQ ID NO: 7056 - RNA, 20 nt, synthetic construct
  misc_feature 1..20: note = Synthetic
  source 1..20: mol_type = other RNA
tagcccctgggccccggtgc

SEQ ID NO: 7057 - RNA, 20 nt, synthetic construct
  misc_feature 1..20: note = Synthetic
  source 1..20: mol_type = other RNA
cccctgggccccggtgctgg

SEQ ID NO: 7058 - RNA, 20 nt, synthetic construct
  misc_feature 1..20: note = Synthetic
  source 1..20: mol_type = other RNA
ccctgggccccggtgctggc

SEQ ID NO: 7059 - RNA, 20 nt, synthetic construct
  misc_feature 1..20: note = Synthetic
  source 1..20: mol_type = other RNA
gccccggtgctggcgggcca

SEQ ID NO: 7060 - RNA, 20 nt, synthetic construct
  misc_feature 1..20: note = Synthetic
  source 1..20: mol_type = other RNA
ccggtgctggcgggccaagg

SEQ ID NO: 7061 - RNA, 20 nt, synthetic construct
  misc_feature 1..20: note = Synthetic
  source 1..20: mol_type = other RNA
cggtgctggcgggccaagga

SEQ ID NO: 7062 - RNA, 20 nt, synthetic construct
  misc_feature 1..20: note = Synthetic
  source 1..20: mol_type = other RNA
cctttgacgccgagaccaga

SEQ ID NO: 7063 - RNA, 20 nt, synthetic construct
  misc_feature 1..20: note = Synthetic
  source 1..20: mol_type = other RNA
ctttgacgccgagaccagac

SEQ ID NO: 7064 - RNA, 20 nt, synthetic construct
  misc_feature 1..20: note = Synthetic
  source 1..20: mol_type = other RNA
ccgagaccagacgggtctcc

SEQ ID NO: 7065 - RNA, 20 nt, synthetic construct
  misc_feature 1..20: note = Synthetic
  source 1..20: mol_type = other RNA
cgagaccagacgggtctcct

SEQ ID NO: 7066 - RNA, 20 nt, synthetic construct
  misc_feature 1..20: note = Synthetic
  source 1..20: mol_type = other RNA
acgggtctcctgggaaacct

SEQ ID NO: 7067 - RNA, 20 nt, synthetic construct
  misc_feature 1..20: note = Synthetic
  source 1..20: mol_type = other RNA
tgggaaaccttggtcgccca

SEQ ID NO: 7068 - RNA, 20 nt, synthetic construct
  misc_feature 1..20: note = Synthetic
  source 1..20: mol_type = other RNA
agcctctatcgcacttttgc

SEQ ID NO: 7069 - RNA, 20 nt, synthetic construct
  misc_feature 1..20: note = Synthetic
  source 1..20: mol_type = other RNA
gcacttttgccggcaatcct

SEQ ID NO: 7070 - RNA, 20 nt, synthetic construct
  misc_feature 1..20: note = Synthetic
  source 1..20: mol_type = other RNA
cacttttgccggcaatcctc

SEQ ID NO: 7071 - RNA, 20 nt, synthetic construct
  misc_feature 1..20: note = Synthetic
  source 1..20: mol_type = other RNA
tcgggccgcatcgaccgcca

SEQ ID NO: 7072 - RNA, 20 nt, synthetic construct
  misc_feature 1..20: note = Synthetic
  source 1..20: mol_type = other RNA
gcgccaagaaaatttcatcg

SEQ ID NO: 7073 - RNA, 20 nt, synthetic construct
  misc_feature 1..20: note = Synthetic
  source 1..20: mol_type = other RNA
agaaaatttcatcgaggcgc

SEQ ID NO: 7074 - RNA, 20 nt, synthetic construct
  misc_feature 1..20: note = Synthetic
  source 1..20: mol_type = other RNA
ggcctccgccgacgagacgc

SEQ ID NO: 7075 - RNA, 20 nt, synthetic construct
  misc_feature 1..20: note = Synthetic
  source 1..20: mol_type = other RNA
ccgccgacgagacgctggcg

SEQ ID NO: 7076 - RNA, 20 nt, synthetic construct
  misc_feature 1..20: note = Synthetic
  source 1..20: mol_type = other RNA
caacctgccgctgcgccccc

SEQ ID NO: 7077 - RNA, 20 nt, synthetic construct
  misc_feature 1..20: note = Synthetic
  source 1..20: mol_type = other RNA
cgcccccaggaccccattat

SEQ ID NO: 7078 - RNA, 20 nt, synthetic construct
  misc_feature 1..20: note = Synthetic
  source 1..20: mol_type = other RNA
gcccccaggaccccattatc

SEQ ID NO: 7079 - RNA, 20 nt, synthetic construct
  misc_feature 1..20: note = Synthetic
  source 1..20: mol_type = other RNA
ccccattatcgggacgaccg

SEQ ID NO: 7080 - RNA, 20 nt, synthetic construct
  misc_feature 1..20: note = Synthetic
  source 1..20: mol_type = other RNA
cgggacgaccgcggctgtgc

SEQ ID NO: 7081 - RNA, 20 nt, synthetic construct
  misc_feature 1..20: note = Synthetic
  source 1..20: mol_type = other RNA
ataacctcgccacgcgcctg

SEQ ID NO: 7082 - RNA, 20 nt, synthetic construct
  misc_feature 1..20: note = Synthetic
  source 1..20: mol_type = other RNA
ctttctccagtgctacctga

SEQ ID NO: 7083 - RNA, 20 nt, synthetic construct
  misc_feature 1..20: note = Synthetic
  source 1..20: mol_type = other RNA
cagtgctacctgaaggcgcg

SEQ ID NO: 7084 - RNA, 20 nt, synthetic construct
  misc_feature 1..20: note = Synthetic
  source 1..20: mol_type = other RNA
ctgaaggcgcgaggcctgtg

SEQ ID NO: 7085 - RNA, 20 nt, synthetic construct
  misc_feature 1..20: note = Synthetic
  source 1..20: mol_type = other RNA
ggcgcgaggcctgtgcggcc

SEQ ID NO: 7086 - RNA, 20 nt, synthetic construct
  misc_feature 1..20: note = Synthetic
  source 1..20: mol_type = other RNA
gcctggacgaactgtgttcg

SEQ ID NO: 7087 - RNA, 20 nt, synthetic construct
  misc_feature 1..20: note = Synthetic
  source 1..20: mol_type = other RNA
tggacgaactgtgttcgcgg

SEQ ID NO: 7088 - RNA, 20 nt, synthetic construct
  misc_feature 1..20: note = Synthetic
  source 1..20: mol_type = other RNA
actgtgttcgcggcggcgtc

SEQ ID NO: 7089 - RNA, 20 nt, synthetic construct
  misc_feature 1..20: note = Synthetic
  source 1..20: mol_type = other RNA
gtgttcgcggcggcgtctgg

SEQ ID NO: 7090 - RNA, 20 nt, synthetic construct
  misc_feature 1..20: note = Synthetic
  source 1..20: mol_type = other RNA
gcggcgtctggcggacatta

SEQ ID NO: 7091 - RNA, 20 nt, synthetic construct
  misc_feature 1..20: note = Synthetic
  source 1..20: mol_type = other RNA
atccttcgtgtttgtcattc

SEQ ID NO: 7092 - RNA, 20 nt, synthetic construct
  misc_feature 1..20: note = Synthetic
  source 1..20: mol_type = other RNA
tcgtgtttgtcattctggcc

SEQ ID NO: 7093 - RNA, 20 nt, synthetic construct
  misc_feature 1..20: note = Synthetic
  source 1..20: mol_type = other RNA
ctcgccaaccgcgtcgagcg

SEQ ID NO: 7094 - RNA, 20 nt, synthetic construct
  misc_feature 1..20: note = Synthetic
  source 1..20: mol_type = other RNA
ccgcgtcgagcgtggcgtcg

SEQ ID NO: 7095 - RNA, 20 nt, synthetic construct
  misc_feature 1..20: note = Synthetic
  source 1..20: mol_type = other RNA
gagatcgactacgcgaccct

SEQ ID NO: 7096 - RNA, 20 nt, synthetic construct
  misc_feature 1..20: note = Synthetic
  source 1..20: mol_type = other RNA
gactacgcgacccttggtgt

SEQ ID NO: 7097 - RNA, 20 nt, synthetic construct
  misc_feature 1..20: note = Synthetic
  source 1..20: mol_type = other RNA
actacgcgacccttggtgtc

SEQ ID NO: 7098 - RNA, 20 nt, synthetic construct
  misc_feature 1..20: note = Synthetic
  source 1..20: mol_type = other RNA
ctacgcgacccttggtgtcg

SEQ ID NO: 7099 - RNA, 20 nt, synthetic construct
  misc_feature 1..20: note = Synthetic
  source 1..20: mol_type = other RNA
gcgacccttggtgtcggggt

SEQ ID NO: 7100 - RNA, 20 nt, synthetic construct
  misc_feature 1..20: note = Synthetic
  source 1..20: mol_type = other RNA
aagatgcatttctacctccc

SEQ ID NO: 7101 - RNA, 20 nt, synthetic construct
  misc_feature 1..20: note = Synthetic
  source 1..20: mol_type = other RNA
agatgcatttctacctcccc

SEQ ID NO: 7102 - RNA, 20 nt, synthetic construct
  misc_feature 1..20: note = Synthetic
  source 1..20: mol_type = other RNA
gatgcatttctacctccccg

SEQ ID NO: 7103 - RNA, 20 nt, synthetic construct
  misc_feature 1..20: note = Synthetic
  source 1..20: mol_type = other RNA
ctacctccccggggcctgca

SEQ ID NO: 7104 - RNA, 20 nt, synthetic construct
  misc_feature 1..20: note = Synthetic
  source 1..20: mol_type = other RNA
cctccccggggcctgcatgg

SEQ ID NO: 7105 - RNA, 20 nt, synthetic construct
  misc_feature 1..20: note = Synthetic
  source 1..20: mol_type = other RNA
ctccccggggcctgcatggc

SEQ ID NO: 7106 - RNA, 20 nt, synthetic construct
  misc_feature 1..20: note = Synthetic
  source 1..20: mol_type = other RNA
aatcctagacacgcaccgcc

SEQ ID NO: 7107 - RNA, 20 nt, synthetic construct
  misc_feature 1..20: note = Synthetic
  source 1..20: mol_type = other RNA
gagtcgtgtctgcgagttga

SEQ ID NO: 7108 - RNA, 20 nt, synthetic construct
  misc_feature 1..20: note = Synthetic
  source 1..20: mol_type = other RNA
gtcgcccccccgtacgtgca

SEQ ID NO: 7109 - RNA, 20 nt, synthetic construct
  misc_feature 1..20: note = Synthetic
  source 1..20: mol_type = other RNA
aaatatttgccgtgcacgta

SEQ ID NO: 7110 - RNA, 20 nt, synthetic construct
  misc_feature 1..20: note = Synthetic
  source 1..20: mol_type = other RNA
aatatttgccgtgcacgtac

SEQ ID NO: 7111 - RNA, 20 nt, synthetic construct
  misc_feature 1..20: note = Synthetic
  source 1..20: mol_type = other RNA
atatttgccgtgcacgtacg

SEQ ID NO: 7112 - RNA, 20 nt, synthetic construct
  misc_feature 1..20: note = Synthetic
  source 1..20: mol_type = other RNA
tatttgccgtgcacgtacgg

SEQ ID NO: 7113 - RNA, 20 nt, synthetic construct
  misc_feature 1..20: note = Synthetic
  source 1..20: mol_type = other RNA
atttgccgtgcacgtacggg

SEQ ID NO: 7114 - RNA, 20 nt, synthetic construct
  misc_feature 1..20: note = Synthetic
  source 1..20: mol_type = other RNA
tttgccgtgcacgtacgggg

SEQ ID NO: 7115 - RNA, 20 nt, synthetic construct
  misc_feature 1..20: note = Synthetic
  source 1..20: mol_type = other RNA
cgggggggcgacgatgtgac

SEQ ID NO: 7116 - RNA, 20 nt, synthetic construct
  misc_feature 1..20: note = Synthetic
  source 1..20: mol_type = other RNA
agacacgactcgaacactcc

SEQ ID NO: 7117 - RNA, 20 nt, synthetic construct
  misc_feature 1..20: note = Synthetic
  source 1..20: mol_type = other RNA
cacgactcgaacactcctgg

SEQ ID NO: 7118 - RNA, 20 nt, synthetic construct
  misc_feature 1..20: note = Synthetic
  source 1..20: mol_type = other RNA
actcctggcggtgcgtgtct

SEQ ID NO: 7119 - RNA, 20 nt, synthetic construct
  misc_feature 1..20: note = Synthetic
  source 1..20: mol_type = other RNA
gcgtgtctaggatttcgatc

SEQ ID NO: 7120 - RNA, 20 nt, synthetic construct
  misc_feature 1..20: note = Synthetic
  source 1..20: mol_type = other RNA
ttcgatcaggcccgccatgc

SEQ ID NO: 7121 - RNA, 20 nt, synthetic construct
  misc_feature 1..20: note = Synthetic
  source 1..20: mol_type = other RNA
caggcccgccatgcaggccc

SEQ ID NO: 7122 - RNA, 20 nt, synthetic construct
  misc_feature 1..20: note = Synthetic
  source 1..20: mol_type = other RNA
aggcccgccatgcaggcccc

SEQ ID NO: 7123 - RNA, 20 nt, synthetic construct
  misc_feature 1..20: note = Synthetic
  source 1..20: mol_type = other RNA
ggcccgccatgcaggccccg

SEQ ID NO: 7124 - RNA, 20 nt, synthetic construct
  misc_feature 1..20: note = Synthetic
  source 1..20: mol_type = other RNA
ccgccatgcaggccccgggg

SEQ ID NO: 7125 - RNA, 20 nt, synthetic construct
  misc_feature 1..20: note = Synthetic
  source 1..20: mol_type = other RNA
tctctccgaccccgacacca

SEQ ID NO: 7126 - RNA, 20 nt, synthetic construct
  misc_feature 1..20: note = Synthetic
  source 1..20: mol_type = other RNA
ctctccgaccccgacaccaa

SEQ ID NO: 7127 - RNA, 20 nt, synthetic construct
  misc_feature 1..20: note = Synthetic
  source 1..20: mol_type = other RNA
ccgcgacgccacgctcgacg

SEQ ID NO: 7128 - RNA, 20 nt, synthetic construct
  misc_feature 1..20: note = Synthetic
  source 1..20: mol_type = other RNA
gacgccacgctcgacgcggt

SEQ ID NO: 7129 - RNA, 20 nt, synthetic construct
  misc_feature 1..20: note = Synthetic
  source 1..20: mol_type = other RNA
ctcgacgcggttggcgagcc

SEQ ID NO: 7130 - RNA, 20 nt, synthetic construct
  misc_feature 1..20: note = Synthetic
  source 1..20: mol_type = other RNA
ggccagaatgacaaacacga

SEQ ID NO: 7131 - RNA, 20 nt, synthetic construct
  misc_feature 1..20: note = Synthetic
  source 1..20: mol_type = other RNA
gccgcgaacacagttcgtcc

SEQ ID NO: 7132 - RNA, 20 nt, synthetic construct
  misc_feature 1..20: note = Synthetic
  source 1..20: mol_type = other RNA
acagttcgtccaggccgcac

SEQ ID NO: 7133 - RNA, 20 nt, synthetic construct
  misc_feature 1..20: note = Synthetic
  source 1..20: mol_type = other RNA
cgcacaggcctcgcgccttc

SEQ ID NO: 7134 - RNA, 20 nt, synthetic construct
  misc_feature 1..20: note = Synthetic
  source 1..20: mol_type = other RNA
ctcgcgccttcaggtagcac

SEQ ID NO: 7135 - RNA, 20 nt, synthetic construct
  misc_feature 1..20: note = Synthetic
  source 1..20: mol_type = other RNA
cttcaggtagcactggagaa

SEQ ID NO: 7136 - RNA, 20 nt, synthetic construct
  misc_feature 1..20: note = Synthetic
  source 1..20: mol_type = other RNA
ttcaggtagcactggagaaa

SEQ ID NO: 7137 - RNA, 20 nt, synthetic construct
  misc_feature 1..20: note = Synthetic
  source 1..20: mol_type = other RNA
agcactggagaaagggccgc

SEQ ID NO: 7138 - RNA, 20 nt, synthetic construct
  misc_feature 1..20: note = Synthetic
  source 1..20: mol_type = other RNA
gagaaagggccgcaggcgcg

SEQ ID NO: 7139 - RNA, 20 nt, synthetic construct
  misc_feature 1..20: note = Synthetic
  source 1..20: mol_type = other RNA
agggccgcaggcgcgtggcg

SEQ ID NO: 7140 - RNA, 20 nt, synthetic construct
  misc_feature 1..20: note = Synthetic
  source 1..20: mol_type = other RNA
gaggttatccagcacagccg

SEQ ID NO: 7141 - RNA, 20 nt, synthetic construct
  misc_feature 1..20: note = Synthetic
  source 1..20: mol_type = other RNA
agccgcggtcgtcccgataa

SEQ ID NO: 7142 - RNA, 20 nt, synthetic construct
  misc_feature 1..20: note = Synthetic
  source 1..20: mol_type = other RNA
gccgcggtcgtcccgataat

SEQ ID NO: 7143 - RNA, 20 nt, synthetic construct
  misc_feature 1..20: note = Synthetic
  source 1..20: mol_type = other RNA
ccgcggtcgtcccgataatg

SEQ ID NO: 7144 - RNA, 20 nt, synthetic construct
  misc_feature 1..20: note = Synthetic
  source 1..20: mol_type = other RNA
tcgtcccgataatggggtcc

SEQ ID NO: 7145 - RNA, 20 nt, synthetic construct
  misc_feature 1..20: note = Synthetic
  source 1..20: mol_type = other RNA
cgtcccgataatggggtcct

SEQ ID NO: 7146 - RNA, 20 nt, synthetic construct
  misc_feature 1..20: note = Synthetic
  source 1..20: mol_type = other RNA
gtcccgataatggggtcctg

SEQ ID NO: 7147 - RNA, 20 nt, synthetic construct
  misc_feature 1..20: note = Synthetic
  source 1..20: mol_type = other RNA
tcccgataatggggtcctgg

SEQ ID NO: 7148 - RNA, 20 nt, synthetic construct
  misc_feature 1..20: note = Synthetic
  source 1..20: mol_type = other RNA
atggggtcctgggggcgcag

SEQ ID NO: 7149 - RNA, 20 nt, synthetic construct
  misc_feature 1..20: note = Synthetic
  source 1..20: mol_type = other RNA
ggtcctgggggcgcagcggc

SEQ ID NO: 7150 - RNA, 20 nt, synthetic construct
  misc_feature 1..20: note = Synthetic
  source 1..20: mol_type = other RNA
gggggcgcagcggcaggttg

SEQ ID NO: 7151 - RNA, 20 nt, synthetic construct
  misc_feature 1..20: note = Synthetic
  source 1..20: mol_type = other RNA
ggcgcagcggcaggttgtgg

SEQ ID NO: 7152 - RNA, 20 nt, synthetic construct
  misc_feature 1..20: note = Synthetic
  source 1..20: mol_type = other RNA
gcaccacgccagcgtctcgt

SEQ ID NO: 7153 - RNA, 20 nt, synthetic construct
  misc_feature 1..20: note = Synthetic
  source 1..20: mol_type = other RNA
ccacgccagcgtctcgtcgg

SEQ ID NO: 7154 - RNA, 20 nt, synthetic construct
  misc_feature 1..20: note = Synthetic
  source 1..20: mol_type = other RNA
cgccagcgtctcgtcggcgg

SEQ ID NO: 7155 - RNA, 20 nt, synthetic construct
  misc_feature 1..20: note = Synthetic
  source 1..20: mol_type = other RNA
gcgcctcgatgaaattttct

SEQ ID NO: 7156 - RNA, 20 nt, synthetic construct
  misc_feature 1..20: note = Synthetic
  source 1..20: mol_type = other RNA
gcgcagcacgcagtcgcgca

SEQ ID NO: 7157 - RNA, 20 nt, synthetic construct
  misc_feature 1..20: note = Synthetic
  source 1..20: mol_type = other RNA
cacgcagtcgcgcatggcct

SEQ ID NO: 7158 - RNA, 20 nt, synthetic construct
  misc_feature 1..20: note = Synthetic
  source 1..20: mol_type = other RNA
gcagtcgcgcatggccttgg

SEQ ID NO: 7159 - RNA, 20 nt, synthetic construct
  misc_feature 1..20: note = Synthetic
  source 1..20: mol_type = other RNA
catggccttggcggtcgatg

SEQ ID NO: 7160 - RNA, 20 nt, synthetic construct
  misc_feature 1..20: note = Synthetic
  source 1..20: mol_type = other RNA
ttggcggtcgatgcggcccg

SEQ ID NO: 7161 - RNA, 20 nt, synthetic construct
  misc_feature 1..20: note = Synthetic
  source 1..20: mol_type = other RNA
cgatgcggcccgaggattgc

SEQ ID NO: 7162 - RNA, 20 nt, synthetic construct
  misc_feature 1..20: note = Synthetic
  source 1..20: mol_type = other RNA
tgccggcaaaagtgcgatag

SEQ ID NO: 7163 - RNA, 20 nt, synthetic construct
  misc_feature 1..20: note = Synthetic
  source 1..20: mol_type = other RNA
gcaaaagtgcgatagaggct

SEQ ID NO: 7164 - RNA, 20 nt, synthetic construct
  misc_feature 1..20: note = Synthetic
  source 1..20: mol_type = other RNA
caaaagtgcgatagaggctc

SEQ ID NO: 7165 - RNA, 20 nt, synthetic construct
  misc_feature 1..20: note = Synthetic
  source 1..20: mol_type = other RNA
tgcgatagaggctcgggccg

SEQ ID NO: 7166 - RNA, 20 nt, synthetic construct
  misc_feature 1..20: note = Synthetic
  source 1..20: mol_type = other RNA
gcgatagaggctcgggccgt

SEQ ID NO: 7167 - RNA, 20 nt, synthetic construct
  misc_feature 1..20: note = Synthetic
  source 1..20: mol_type = other RNA
gctcgggccgtgggcgacca

SEQ ID NO: 7168 - RNA, 20 nt, synthetic construct
  misc_feature 1..20: note = Synthetic
  source 1..20: mol_type = other RNA
gtgggcgaccaaggtttccc

SEQ ID NO: 7169 - RNA, 20 nt, synthetic construct
  misc_feature 1..20: note = Synthetic
  source 1..20: mol_type = other RNA
ggtttcccaggagacccgtc

SEQ ID NO: 7170 - RNA, 20 nt, synthetic construct
  misc_feature 1..20: note = Synthetic
  source 1..20: mol_type = other RNA
ccaggagacccgtctggtct

SEQ ID NO: 7171 - RNA, 20 nt, synthetic construct
  misc_feature 1..20: note = Synthetic
  source 1..20: mol_type = other RNA
ccgtctggtctcggcgtcaa

SEQ ID NO: 7172 - RNA, 20 nt, synthetic construct
  misc_feature 1..20: note = Synthetic
  source 1..20: mol_type = other RNA
cgtctggtctcggcgtcaaa

SEQ ID NO: 7173 - RNA, 20 nt, synthetic construct
  misc_feature 1..20: note = Synthetic
  source 1..20: mol_type = other RNA
cggcgtcaaagggccctcct

SEQ ID NO: 7174 - RNA, 20 nt, synthetic construct
  misc_feature 1..20: note = Synthetic
  source 1..20: mol_type = other RNA
cctccttggcccgccagcac

SEQ ID NO: 7175 - RNA, 20 nt, synthetic construct
  misc_feature 1..20: note = Synthetic
  source 1..20: mol_type = other RNA
ctccttggcccgccagcacc

SEQ ID NO: 7176 - RNA, 20 nt, synthetic construct
  misc_feature 1..20: note = Synthetic
  source 1..20: mol_type = other RNA
tccttggcccgccagcaccg

SEQ ID NO: 7177 - RNA, 20 nt, synthetic construct
  misc_feature 1..20: note = Synthetic
  source 1..20: mol_type = other RNA
gcccgccagcaccggggccc

SEQ ID NO: 7178 - RNA, 20 nt, synthetic construct
  misc_feature 1..20: note = Synthetic
  source 1..20: mol_type = other RNA
cccgccagcaccggggccca

SEQ ID NO: 7179 - RNA, 20 nt, synthetic construct
  misc_feature 1..20: note = Synthetic
  source 1..20: mol_type = other RNA
ccgccagcaccggggcccag

SEQ ID NO: 7180 - RNA, 20 nt, synthetic construct
  misc_feature 1..20: note = Synthetic
  source 1..20: mol_type = other RNA
cggggcccaggggctattcg

SEQ ID NO: 7181 - RNA, 20 nt, synthetic construct
  misc_feature 1..20: note = Synthetic
  source 1..20: mol_type = other RNA
ggcccaggggctattcgcgg

SEQ ID NO: 7182 - RNA, 20 nt, synthetic construct
  misc_feature 1..20: note = Synthetic
  source 1..20: mol_type = other RNA
gcccaggggctattcgcggc

SEQ ID NO: 7183 - RNA, 20 nt, synthetic construct
  misc_feature 1..20: note = Synthetic
  source 1..20: mol_type = other RNA
gggctattcgcggcgggaaa

SEQ ID NO: 7184 - RNA, 20 nt, synthetic construct
  misc_feature 1..20: note = Synthetic
  source 1..20: mol_type = other RNA
gggaaacggctgccccccaa

SEQ ID NO: 7185 - RNA, 20 nt, synthetic construct
  misc_feature 1..20: note = Synthetic
  source 1..20: mol_type = other RNA
ggaaacggctgccccccaaa

SEQ ID NO: 7186 - RNA, 20 nt, synthetic construct
  misc_feature 1..20: note = Synthetic
  source 1..20: mol_type = other RNA
gaaacggctgccccccaaag

SEQ ID NO: 7187 - RNA, 20 nt, synthetic construct
  misc_feature 1..20: note = Synthetic
  source 1..20: mol_type = other RNA
cgtgcatgacctgtgcgctg

SEQ ID NO: 7188 - RNA, 20 nt, synthetic construct
  misc_feature 1..20: note = Synthetic
  source 1..20: mol_type = other RNA
ggccaaagctctcgctgatg

SEQ ID NO: 7189 - RNA, 20 nt, synthetic construct
  misc_feature 1..20: note = Synthetic
  source 1..20: mol_type = other RNA
gcggtcgaccgccgcgcgct

SEQ ID NO: 7190 - RNA, 20 nt, synthetic construct
  misc_feature 1..20: note = Synthetic
  source 1..20: mol_type = other RNA
gaccgccgcgcgctcggaga

SEQ ID NO: 7191 - RNA, 20 nt, synthetic construct
  misc_feature 1..20: note = Synthetic
  source 1..20: mol_type = other RNA
cgcgctcggagatggagcgc

SEQ ID NO: 7192 - RNA, 20 nt, synthetic construct
  misc_feature 1..20: note = Synthetic
  source 1..20: mol_type = other RNA
ggagcgcaggaccaaccgcg

SEQ ID NO: 7193 - RNA, 20 nt, synthetic construct
  misc_feature 1..20: note = Synthetic
  source 1..20: mol_type = other RNA
gcgcaggaccaaccgcgtgg

SEQ ID NO: 7194 - RNA, 20 nt, synthetic construct
  misc_feature 1..20: note = Synthetic
  source 1..20: mol_type = other RNA
caaccgcgtggtggcgtcga

SEQ ID NO: 7195 - RNA, 20 nt, synthetic construct
  misc_feature 1..20: note = Synthetic
  source 1..20: mol_type = other RNA
cgtggtggcgtcgatggtgt

SEQ ID NO: 7196 - RNA, 20 nt, synthetic construct
  misc_feature 1..20: note = Synthetic
  source 1..20: mol_type = other RNA
ggtggcgtcgatggtgtcgg

SEQ ID NO: 7197 - RNA, 20 nt, synthetic construct
  misc_feature 1..20: note = Synthetic
  source 1..20: mol_type = other RNA
ggcgtcgatggtgtcggcgg

SEQ ID NO: 7198 - RNA, 20 nt, synthetic construct
  misc_feature 1..20: note = Synthetic
  source 1..20: mol_type = other RNA
gcgtcgatggtgtcggcggc

SEQ ID NO: 7199 - RNA, 20 nt, synthetic construct
  misc_feature 1..20: note = Synthetic
  source 1..20: mol_type = other RNA
gcggcgggcgcctttcgctc

SEQ ID NO: 7200 - RNA, 20 nt, synthetic construct
  misc_feature 1..20: note = Synthetic
  source 1..20: mol_type = other RNA
cggcgggcgcctttcgctcc

SEQ ID NO: 7201 - RNA, 20 nt, synthetic construct
  misc_feature 1..20: note = Synthetic
  source 1..20: mol_type = other RNA
ggcgggcgcctttcgctccg

SEQ ID NO: 7202 - RNA, 20 nt, synthetic construct
  misc_feature 1..20: note = Synthetic
  source 1..20: mol_type = other RNA
ggcgcctttcgctccggggc

SEQ ID NO: 7203 - RNA, 20 nt, synthetic construct
  misc_feature 1..20: note = Synthetic
  source 1..20: mol_type = other RNA
gcgcctttcgctccggggcc

SEQ ID NO: 7204 - RNA, 20 nt, synthetic construct
  misc_feature 1..20: note = Synthetic
  source 1..20: mol_type = other RNA
cgcctttcgctccggggccg

SEQ ID NO: 7205 - RNA, 20 nt, synthetic construct
  misc_feature 1..20: note = Synthetic
  source 1..20: mol_type = other RNA
ttcgctccggggccggggcg

SEQ ID NO: 7206 - RNA, 20 nt, synthetic construct
  misc_feature 1..20: note = Synthetic
  source 1..20: mol_type = other RNA
tcgctccggggccggggcgc

SEQ ID NO: 7207 - RNA, 20 nt, synthetic construct
  misc_feature 1..20: note = Synthetic
  source 1..20: mol_type = other RNA
cgctccggggccggggcgcg

SEQ ID NO: 7208 - RNA, 20 nt, synthetic construct
  misc_feature 1..20: note = Synthetic
  source 1..20: mol_type = other RNA
gctccggggccggggcgcgg

SEQ ID NO: 7209 - RNA, 20 nt, synthetic construct
  misc_feature 1..20: note = Synthetic
  source 1..20: mol_type = other RNA
ggccggggcgcgggggtccg

SEQ ID NO: 7210 - RNA, 20 nt, synthetic construct
  misc_feature 1..20: note = Synthetic
  source 1..20: mol_type = other RNA
gccggggcgcgggggtccgc

SEQ ID NO: 7211 - RNA, 20 nt, synthetic construct
  misc_feature 1..20: note = Synthetic
  source 1..20: mol_type = other RNA
ggggcgcgggggtccgcggg

SEQ ID NO: 7212 - RNA, 20 nt, synthetic construct
  misc_feature 1..20: note = Synthetic
  source 1..20: mol_type = other RNA
gggcgcgggggtccgcgggc

SEQ ID NO: 7213 - RNA, 20 nt, synthetic construct
  misc_feature 1..20: note = Synthetic
  source 1..20: mol_type = other RNA
ggcgcgggggtccgcgggcg

SEQ ID NO: 7214 - RNA, 20 nt, synthetic construct
  misc_feature 1..20: note = Synthetic
  source 1..20: mol_type = other RNA
gcgcgggggtccgcgggcgg

SEQ ID NO: 7215 - RNA, 20 nt, synthetic construct
  misc_feature 1..20: note = Synthetic
  source 1..20: mol_type = other RNA
cgcgggggtccgcgggcggg

SEQ ID NO: 7216 - RNA, 20 nt, synthetic construct
  misc_feature 1..20: note = Synthetic
  source 1..20: mol_type = other RNA
gcgggggtccgcgggcgggg

SEQ ID NO: 7217 - RNA, 20 nt, synthetic construct
  misc_feature 1..20: note = Synthetic
  source 1..20: mol_type = other RNA
gcaatcgccagcgtcattag

SEQ ID NO: 7218 - RNA, 20 nt, synthetic construct
  misc_feature 1..20: note = Synthetic
  source 1..20: mol_type = other RNA
caatcgccagcgtcattagc

SEQ ID NO: 7219 - RNA, 20 nt, synthetic construct
  misc_feature 1..20: note = Synthetic
  source 1..20: mol_type = other RNA
aatcgccagcgtcattagcg

SEQ ID NO: 7220 - RNA, 20 nt, synthetic construct
  misc_feature 1..20: note = Synthetic
  source 1..20: mol_type = other RNA
atcgccagcgtcattagcgg

SEQ ID NO: 7221 - RNA, 20 nt, synthetic construct
  misc_feature 1..20: note = Synthetic
  source 1..20: mol_type = other RNA
tcgccagcgtcattagcggg

SEQ ID NO: 7222 - RNA, 20 nt, synthetic construct
  misc_feature 1..20: note = Synthetic
  source 1..20: mol_type = other RNA
cgccagcgtcattagcgggg

SEQ ID NO: 7223 - RNA, 20 nt, synthetic construct
  misc_feature 1..20: note = Synthetic
  source 1..20: mol_type = other RNA
gccagcgtcattagcggggg

SEQ ID NO: 7224 - RNA, 20 nt, synthetic construct
  misc_feature 1..20: note = Synthetic
  source 1..20: mol_type = other RNA
tcattagcggggggggtgct

SEQ ID NO: 7225 - RNA, 20 nt, synthetic construct
  misc_feature 1..20: note = Synthetic
  source 1..20: mol_type = other RNA
ggcgcacgccccgtgtccgc

SEQ ID NO: 7226 - RNA, 20 nt, synthetic construct
  misc_feature 1..20: note = Synthetic
  source 1..20: mol_type = other RNA
gccccgtgtccgctggcctc

SEQ ID NO: 7227 - RNA, 20 nt, synthetic construct
  misc_feature 1..20: note = Synthetic
  source 1..20: mol_type = other RNA
ccccgtgtccgctggcctcc

SEQ ID NO: 7228 - RNA, 20 nt, synthetic construct
  misc_feature 1..20: note = Synthetic
  source 1..20: mol_type = other RNA
cgtgtccgctggcctccggg

SEQ ID NO: 7229 - RNA, 20 nt, synthetic construct
  misc_feature 1..20: note = Synthetic
  source 1..20: mol_type = other RNA
gtgtccgctggcctccgggt

SEQ ID NO: 7230 - RNA, 20 nt, synthetic construct
  misc_feature 1..20: note = Synthetic
  source 1..20: mol_type = other RNA
ccgctggcctccgggtgggt

SEQ ID NO: 7231 - RNA, 20 nt, synthetic construct
  misc_feature 1..20: note = Synthetic
  source 1..20: mol_type = other RNA
cgctggcctccgggtgggtc

SEQ ID NO: 7232 - RNA, 20 nt, synthetic construct
  misc_feature 1..20: note = Synthetic
  source 1..20: mol_type = other RNA
tgccgcgccacgcctcgcca

SEQ ID NO: 7233 - RNA, 20 nt, synthetic construct
  misc_feature 1..20: note = Synthetic
  source 1..20: mol_type = other RNA
gccgcgccacgcctcgccat

SEQ ID NO: 7234 - RNA, 20 nt, synthetic construct
  misc_feature 1..20: note = Synthetic
  source 1..20: mol_type = other RNA
ccgcgccacgcctcgccatg

SEQ ID NO: 7235 - RNA, 20 nt, synthetic construct
  misc_feature 1..20: note = Synthetic
  source 1..20: mol_type = other RNA
cgcgccacgcctcgccatgg

SEQ ID NO: 7236 - RNA, 20 nt, synthetic construct
  misc_feature 1..20: note = Synthetic
  source 1..20: mol_type = other RNA
gcgccacgcctcgccatggg

SEQ ID NO: 7237 - RNA, 20 nt, synthetic construct
  misc_feature 1..20: note = Synthetic
  source 1..20: mol_type = other RNA
cgcctcgccatggggggcgc

SEQ ID NO: 7238 - RNA, 20 nt, synthetic construct
  misc_feature 1..20: note = Synthetic
  source 1..20: mol_type = other RNA
gcctcgccatggggggcgcc

SEQ ID NO: 7239 - RNA, 20 nt, synthetic construct
  misc_feature 1..20: note = Synthetic
  source 1..20: mol_type = other RNA
cctcgccatggggggcgccg

SEQ ID NO: 7240 - RNA, 20 nt, synthetic construct
  misc_feature 1..20: note = Synthetic
  source 1..20: mol_type = other RNA
gccgtccgtccaccccgccc

SEQ ID NO: 7241 - RNA, 20 nt, synthetic construct
  misc_feature 1..20: note = Synthetic
  source 1..20: mol_type = other RNA
ccgtccgtccaccccgcccc

SEQ ID NO: 7242 - RNA, 20 nt, synthetic construct
  misc_feature 1..20: note = Synthetic
  source 1..20: mol_type = other RNA
cgtccgtccaccccgccccg

SEQ ID NO: 7243 - RNA, 20 nt, synthetic construct
  misc_feature 1..20: note = Synthetic
  source 1..20: mol_type = other RNA
ccgtccaccccgccccgggg

SEQ ID NO: 7244 - RNA, 20 nt, synthetic construct
  misc_feature 1..20: note = Synthetic
  source 1..20: mol_type = other RNA
cgtccaccccgccccggggc

SEQ ID NO: 7245 - RNA, 20 nt, synthetic construct
  misc_feature 1..20: note = Synthetic
  source 1..20: mol_type = other RNA
gtccaccccgccccggggcg

SEQ ID NO: 7246 - RNA, 20 nt, synthetic construct
  misc_feature 1..20: note = Synthetic
  source 1..20: mol_type = other RNA
gccccggggcggggtccccc

SEQ ID NO: 7247 - RNA, 20 nt, synthetic construct
  misc_feature 1..20: note = Synthetic
  source 1..20: mol_type = other RNA
ccccggggcggggtccccca

SEQ ID NO: 7248 - RNA, 20 nt, synthetic construct
  misc_feature 1..20: note = Synthetic
  source 1..20: mol_type = other RNA
gggtcccccagggttgcgat

SEQ ID NO: 7249 - RNA, 17 nt, synthetic construct
  misc_feature 1..17: note = Synthetic
  source 1..17: mol_type = other RNA
agaaccaatcgcaaccc

SEQ ID NO: 7250 - RNA, 17 nt, synthetic construct
  misc_feature 1..17: note = Synthetic
  source 1..17: mol_type = other RNA
gaaccaatcgcaaccct

SEQ ID NO: 7251 - RNA, 17 nt, synthetic construct
  misc_feature 1..17: note = Synthetic
  source 1..17: mol_type = other RNA
aaccaatcgcaaccctg

SEQ ID NO: 7252 - RNA, 17 nt, synthetic construct
  misc_feature 1..17: note = Synthetic
  source 1..17: mol_type = other RNA
accaatcgcaaccctgg

SEQ ID NO: 7253 - RNA, 17 nt, synthetic construct
  misc_feature 1..17: note = Synthetic
  source 1..17: mol_type = other RNA
cctgggggaccccgccc

SEQ ID NO: 7254 - RNA, 17 nt, synthetic construct
  misc_feature 1..17: note = Synthetic
  source 1..17: mol_type = other RNA
ctgggggaccccgcccc

SEQ ID NO: 7255 - RNA, 17 nt, synthetic construct
  misc_feature 1..17: note = Synthetic
  source 1..17: mol_type = other RNA
tgggggaccccgccccg

SEQ ID NO: 7256 - RNA, 17 nt, synthetic construct
  misc_feature 1..17: note = Synthetic
  source 1..17: mol_type = other RNA
gggaccccgccccgggg

SEQ ID NO: 7257 - RNA, 17 nt, synthetic construct
  misc_feature 1..17: note = Synthetic
  source 1..17: mol_type = other RNA
ggaccccgccccggggc

SEQ ID NO: 7258 - RNA, 17 nt, synthetic construct
  misc_feature 1..17: note = Synthetic
  source 1..17: mol_type = other RNA
gaccccgccccggggcg

SEQ ID NO: 7259 - RNA, 17 nt, synthetic construct
  misc_feature 1..17: note = Synthetic
  source 1..17: mol_type = other RNA
cccgccccggggcgggg

SEQ ID NO: 7260 - RNA, 17 nt, synthetic construct
  misc_feature 1..17: note = Synthetic
  source 1..17: mol_type = other RNA
ccccggggcggggtgga

SEQ ID NO: 7261 - RNA, 17 nt, synthetic construct
  misc_feature 1..17: note = Synthetic
  source 1..17: mol_type = other RNA
ggggcggggtggacgga

SEQ ID NO: 7262 - RNA, 17 nt, synthetic construct
  misc_feature 1..17: note = Synthetic
  source 1..17: mol_type = other RNA
gggtggacggacggccc

SEQ ID NO: 7263 - RNA, 17 nt, synthetic construct
  misc_feature 1..17: note = Synthetic
  source 1..17: mol_type = other RNA
ggccccggcgcccccca

SEQ ID NO: 7264 - RNA, 17 nt, synthetic construct
  misc_feature 1..17: note = Synthetic
  source 1..17: mol_type = other RNA
cggcgccccccatggcg

SEQ ID NO: 7265 - RNA, 17 nt, synthetic construct
  misc_feature 1..17: note = Synthetic
  source 1..17: mol_type = other RNA
ccccccatggcgaggcg

SEQ ID NO: 7266 - RNA, 17 nt, synthetic construct
  misc_feature 1..17: note = Synthetic
  source 1..17: mol_type = other RNA
catggcgaggcgtggcg

SEQ ID NO: 7267 - RNA, 17 nt, synthetic construct
  misc_feature 1..17: note = Synthetic
  source 1..17: mol_type = other RNA
gagcagcccgacccacc

SEQ ID NO: 7268 - RNA, 17 nt, synthetic construct
  misc_feature 1..17: note = Synthetic
  source 1..17: mol_type = other RNA
cagcccgacccacccgg

SEQ ID NO: 7269 - RNA, 17 nt, synthetic construct
  misc_feature 1..17: note = Synthetic
  source 1..17: mol_type = other RNA
acccacccggaggccag

SEQ ID NO: 7270 - RNA, 17 nt, synthetic construct
  misc_feature 1..17: note = Synthetic
  source 1..17: mol_type = other RNA
ccggaggccagcggaca

SEQ ID NO: 7271 - RNA, 17 nt, synthetic construct
  misc_feature 1..17: note = Synthetic
  source 1..17: mol_type = other RNA
cggaggccagcggacac

SEQ ID NO: 7272 - RNA, 17 nt, synthetic construct
  misc_feature 1..17: note = Synthetic
  source 1..17: mol_type = other RNA
ggaggccagcggacacg

SEQ ID NO: 7273 - RNA, 17 nt, synthetic construct
  misc_feature 1..17: note = Synthetic
  source 1..17: mol_type = other RNA
ccccccgctaatgacgc

SEQ ID NO: 7274 - RNA, 17 nt, synthetic construct
  misc_feature 1..17: note = Synthetic
  source 1..17: mol_type = other RNA
gattgcccccccgcccg

SEQ ID NO: 7275 - RNA, 17 nt, synthetic construct
  misc_feature 1..17: note = Synthetic
  source 1..17: mol_type = other RNA
cgcggacccccgcgccc

SEQ ID NO: 7276 - RNA, 17 nt, synthetic construct
  misc_feature 1..17: note = Synthetic
  source 1..17: mol_type = other RNA
cccccgcgccccggccc

SEQ ID NO: 7277 - RNA, 17 nt, synthetic construct
  misc_feature 1..17: note = Synthetic
  source 1..17: mol_type = other RNA
cccggccccggagcgaa

SEQ ID NO: 7278 - RNA, 17 nt, synthetic construct
  misc_feature 1..17: note = Synthetic
  source 1..17: mol_type = other RNA
ccatcgacgccaccacg

SEQ ID NO: 7279 - RNA, 17 nt, synthetic construct
  misc_feature 1..17: note = Synthetic
  source 1..17: mol_type = other RNA
cgacgccaccacgcggt

SEQ ID NO: 7280 - RNA, 17 nt, synthetic construct
  misc_feature 1..17: note = Synthetic
  source 1..17: mol_type = other RNA
ctccatctccgagcgcg

SEQ ID NO: 7281 - RNA, 17 nt, synthetic construct
  misc_feature 1..17: note = Synthetic
  source 1..17: mol_type = other RNA
catctccgagcgcgcgg

SEQ ID NO: 7282 - RNA, 17 nt, synthetic construct
  misc_feature 1..17: note = Synthetic
  source 1..17: mol_type = other RNA
cgcatcagcgagagctt

SEQ ID NO: 7283 - RNA, 17 nt, synthetic construct
  misc_feature 1..17: note = Synthetic
  source 1..17: mol_type = other RNA
ctttggccgcagcgcac

SEQ ID NO: 7284 - RNA, 17 nt, synthetic construct
  misc_feature 1..17: note = Synthetic
  source 1..17: mol_type = other RNA
gtcatgcacgacccctt

SEQ ID NO: 7285 - RNA, 17 nt, synthetic construct
  misc_feature 1..17: note = Synthetic
  source 1..17: mol_type = other RNA
tcatgcacgaccccttt

SEQ ID NO: 7286 - RNA, 17 nt, synthetic construct
  misc_feature 1..17: note = Synthetic
  source 1..17: mol_type = other RNA
catgcacgacccctttg

SEQ ID NO: 7287 - RNA, 17 nt, synthetic construct
  misc_feature 1..17: note = Synthetic
  source 1..17: mol_type = other RNA
atgcacgacccctttgg

SEQ ID NO: 7288 - RNA, 17 nt, synthetic construct
  misc_feature 1..17: note = Synthetic
  source 1..17: mol_type = other RNA
tgcacgacccctttggg

SEQ ID NO: 7289 - RNA, 17 nt, synthetic construct
  misc_feature 1..17: note = Synthetic
  source 1..17: mol_type = other RNA
ccgccgcgaatagcccc

SEQ ID NO: 7290 - RNA, 17 nt, synthetic construct
  misc_feature 1..17: note = Synthetic
  source 1..17: mol_type = other RNA
cgccgcgaatagcccct

SEQ ID NO: 7291 - RNA, 17 nt, synthetic construct
  misc_feature 1..17: note = Synthetic
  source 1..17: mol_type = other RNA
gaatagcccctgggccc

SEQ ID NO: 7292 - RNA, 17 nt, synthetic construct
  misc_feature 1..17: note = Synthetic
  source 1..17: mol_type = other RNA
cccctgggccccggtgc

SEQ ID NO: 7293 - RNA, 17 nt, synthetic construct
  misc_feature 1..17: note = Synthetic
  source 1..17: mol_type = other RNA
ctgggccccggtgctgg

SEQ ID NO: 7294 - RNA, 17 nt, synthetic construct
  misc_feature 1..17: note = Synthetic
  source 1..17: mol_type = other RNA
tgggccccggtgctggc

SEQ ID NO: 7295 - RNA, 17 nt, synthetic construct
  misc_feature 1..17: note = Synthetic
  source 1..17: mol_type = other RNA
ccggtgctggcgggcca

SEQ ID NO: 7296 - RNA, 17 nt, synthetic construct
  misc_feature 1..17: note = Synthetic
  source 1..17: mol_type = other RNA
gtgctggcgggccaagg

SEQ ID NO: 7297 - RNA, 17 nt, synthetic construct
  misc_feature 1..17: note = Synthetic
  source 1..17: mol_type = other RNA
tgctggcgggccaagga

SEQ ID NO: 7298 - RNA, 17 nt, synthetic construct
  misc_feature 1..17: note = Synthetic
  source 1..17: mol_type = other RNA
ttgacgccgagaccaga

SEQ ID NO: 7299 - RNA, 17 nt, synthetic construct
  misc_feature 1..17: note = Synthetic
  source 1..17: mol_type = other RNA
tgacgccgagaccagac

SEQ ID NO: 7300 - RNA, 17 nt, synthetic construct
  misc_feature 1..17: note = Synthetic
  source 1..17: mol_type = other RNA
agaccagacgggtctcc

SEQ ID NO: 7301 - RNA, 17 nt, synthetic construct
  misc_feature 1..17: note = Synthetic
  source 1..17: mol_type = other RNA
gaccagacgggtctcct

SEQ ID NO: 7302 - RNA, 17 nt, synthetic construct
  misc_feature 1..17: note = Synthetic
  source 1..17: mol_type = other RNA
ggtctcctgggaaacct

SEQ ID NO: 7303 - RNA, 17 nt, synthetic construct
  misc_feature 1..17: note = Synthetic
  source 1..17: mol_type = other RNA
gaaaccttggtcgccca

SEQ ID NO: 7304 - RNA, 17 nt, synthetic construct
  misc_feature 1..17: note = Synthetic
  source 1..17: mol_type = other RNA
ctctatcgcacttttgc

SEQ ID NO: 7305 - RNA, 17 nt, synthetic construct
  misc_feature 1..17: note = Synthetic
  source 1..17: mol_type = other RNA
cttttgccggcaatcct

SEQ ID NO: 7306 - RNA, 17 nt, synthetic construct
  misc_feature 1..17: note = Synthetic
  source 1..17: mol_type = other RNA
ttttgccggcaatcctc

SEQ ID NO: 7307 - RNA, 17 nt, synthetic construct
  misc_feature 1..17: note = Synthetic
  source 1..17: mol_type = other RNA
ggccgcatcgaccgcca

SEQ ID NO: 7308 - RNA, 17 nt, synthetic construct
  misc_feature 1..17: note = Synthetic
  source 1..17: mol_type = other RNA
ccaagaaaatttcatcg

SEQ ID NO: 7309 - RNA, 17 nt, synthetic construct
  misc_feature 1..17: note = Synthetic
  source 1..17: mol_type = other RNA
aaatttcatcgaggcgc

SEQ ID NO: 7310 - RNA, 17 nt, synthetic construct
  misc_feature 1..17: note = Synthetic
  source 1..17: mol_type = other RNA
ctccgccgacgagacgc

SEQ ID NO: 7311 - RNA, 17 nt, synthetic construct
  misc_feature 1..17: note = Synthetic
  source 1..17: mol_type = other RNA
ccgacgagacgctggcg

SEQ ID NO: 7312 - RNA, 17 nt, synthetic construct
  misc_feature 1..17: note = Synthetic
  source 1..17: mol_type = other RNA
cctgccgctgcgccccc

SEQ ID NO: 7313 - RNA, 17 nt, synthetic construct
  misc_feature 1..17: note = Synthetic
  source 1..17: mol_type = other RNA
ccccaggaccccattat

SEQ ID NO: 7314 - RNA, 17 nt, synthetic construct
  misc_feature 1..17: note = Synthetic
  source 1..17: mol_type = other RNA
cccaggaccccattatc

SEQ ID NO: 7315 - RNA, 17 nt, synthetic construct
  misc_feature 1..17: note = Synthetic
  source 1..17: mol_type = other RNA
cattatcgggacgaccg

SEQ ID NO: 7316 - RNA, 17 nt, synthetic construct
  misc_feature 1..17: note = Synthetic
  source 1..17: mol_type = other RNA
gacgaccgcggctgtgc

SEQ ID NO: 7317 - RNA, 17 nt, synthetic construct
  misc_feature 1..17: note = Synthetic
  source 1..17: mol_type = other RNA
acctcgccacgcgcctg

SEQ ID NO: 7318 - RNA, 17 nt, synthetic construct
  misc_feature 1..17: note = Synthetic
  source 1..17: mol_type = other RNA
tctccagtgctacctga

SEQ ID NO: 7319 - RNA, 17 nt, synthetic construct
  misc_feature 1..17: note = Synthetic
  source 1..17: mol_type = other RNA
tgctacctgaaggcgcg

SEQ ID NO: 7320 - RNA, 17 nt, synthetic construct
  misc_feature 1..17: note = Synthetic
  source 1..17: mol_type = other RNA
aaggcgcgaggcctgtg

SEQ ID NO: 7321 - RNA, 17 nt, synthetic construct
  misc_feature 1..17: note = Synthetic
  source 1..17: mol_type = other RNA
gcgaggcctgtgcggcc

SEQ ID NO: 7322 - RNA, 17 nt, synthetic construct
  misc_feature 1..17: note = Synthetic
  source 1..17: mol_type = other RNA
tggacgaactgtgttcg

SEQ ID NO: 7323 - RNA, 17 nt, synthetic construct
  misc_feature 1..17: note = Synthetic
  source 1..17: mol_type = other RNA
acgaactgtgttcgcgg

SEQ ID NO: 7324 - RNA, 17 nt, synthetic construct
  misc_feature 1..17: note = Synthetic
  source 1..17: mol_type = other RNA
gtgttcgcggcggcgtc

SEQ ID NO: 7325 - RNA, 17 nt, synthetic construct
  misc_feature 1..17: note = Synthetic
  source 1..17: mol_type = other RNA
ttcgcggcggcgtctgg

SEQ ID NO: 7326 - RNA, 17 nt, synthetic construct
  misc_feature 1..17: note = Synthetic
  source 1..17: mol_type = other RNA
gcgtctggcggacatta

SEQ ID NO: 7327 - RNA, 17 nt, synthetic construct
  misc_feature 1..17: note = Synthetic
  source 1..17: mol_type = other RNA
cttcgtgtttgtcattc

SEQ ID NO: 7328 - RNA, 17 nt, synthetic construct
  misc_feature 1..17: note = Synthetic
  source 1..17: mol_type = other RNA
tgtttgtcattctggcc

SEQ ID NO: 7329 - RNA, 17 nt, synthetic construct
  misc_feature 1..17: note = Synthetic
  source 1..17: mol_type = other RNA
gccaaccgcgtcgagcg

SEQ ID NO: 7330 - RNA, 17 nt, synthetic construct
  misc_feature 1..17: note = Synthetic
  source 1..17: mol_type = other RNA
cgtcgagcgtggcgtcg

SEQ ID NO: 7331 - RNA, 17 nt, synthetic construct
  misc_feature 1..17: note = Synthetic
  source 1..17: mol_type = other RNA
atcgactacgcgaccct

SEQ ID NO: 7332 - RNA, 17 nt, synthetic construct
  misc_feature 1..17: note = Synthetic
  source 1..17: mol_type = other RNA
tacgcgacccttggtgt

SEQ ID NO: 7333 - RNA, 17 nt, synthetic construct
  misc_feature 1..17: note = Synthetic
  source 1..17: mol_type = other RNA
acgcgacccttggtgtc

SEQ ID NO: 7334 - RNA, 17 nt, synthetic construct
  misc_feature 1..17: note = Synthetic
  source 1..17: mol_type = other RNA
cgcgacccttggtgtcg

SEQ ID NO: 7335 - RNA, 17 nt, synthetic construct
  misc_feature 1..17: note = Synthetic
  source 1..17: mol_type = other RNA
acccttggtgtcggggt

SEQ ID NO: 7336 - RNA, 17 nt, synthetic construct
  misc_feature 1..17: note = Synthetic
  source 1..17: mol_type = other RNA
atgcatttctacctccc

SEQ ID NO: 7337 - RNA, 17 nt, synthetic construct
  misc_feature 1..17: note = Synthetic
  source 1..17: mol_type = other RNA
tgcatttctacctcccc

SEQ ID NO: 7338 - RNA, 17 nt, synthetic construct
  misc_feature 1..17: note = Synthetic
  source 1..17: mol_type = other RNA
gcatttctacctccccg

SEQ ID NO: 7339 - RNA, 17 nt, synthetic construct
  misc_feature 1..17: note = Synthetic
  source 1..17: mol_type = other RNA
cctccccggggcctgca

SEQ ID NO: 7340 - RNA, 17 nt, synthetic construct
  misc_feature 1..17: note = Synthetic
  source 1..17: mol_type = other RNA
ccccggggcctgcatgg

SEQ ID NO: 7341 - RNA, 17 nt, synthetic construct
  misc_feature 1..17: note = Synthetic
  source 1..17: mol_type = other RNA
cccggggcctgcatggc

SEQ ID NO: 7342 - RNA, 17 nt, synthetic construct
  misc_feature 1..17: note = Synthetic
  source 1..17: mol_type = other RNA
cctagacacgcaccgcc

SEQ ID NO: 7343 - RNA, 17 nt, synthetic construct
  misc_feature 1..17: note = Synthetic
  source 1..17: mol_type = other RNA
tcgtgtctgcgagttga

SEQ ID NO: 7344 - RNA, 17 nt, synthetic construct
  misc_feature 1..17: note = Synthetic
  source 1..17: mol_type = other RNA
gcccccccgtacgtgca

SEQ ID NO: 7345 - RNA, 17 nt, synthetic construct
  misc_feature 1..17: note = Synthetic
  source 1..17: mol_type = other RNA
tatttgccgtgcacgta

SEQ ID NO: 7346 - RNA, 17 nt, synthetic construct
  misc_feature 1..17: note = Synthetic
  source 1..17: mol_type = other RNA
atttgccgtgcacgtac

SEQ ID NO: 7347 - RNA, 17 nt, synthetic construct
  misc_feature 1..17: note = Synthetic
  source 1..17: mol_type = other RNA
tttgccgtgcacgtacg

SEQ ID NO: 7348 - RNA, 17 nt, synthetic construct
  misc_feature 1..17: note = Synthetic
  source 1..17: mol_type = other RNA
ttgccgtgcacgtacgg

SEQ ID NO: 7349 - RNA, 17 nt, synthetic construct
  misc_feature 1..17: note = Synthetic
  source 1..17: mol_type = other RNA
tgccgtgcacgtacggg

SEQ ID NO: 7350 - RNA, 17 nt, synthetic construct
  misc_feature 1..17: note = Synthetic
  source 1..17: mol_type = other RNA
gccgtgcacgtacgggg

SEQ ID NO: 7351 - RNA, 17 nt, synthetic construct
  misc_feature 1..17: note = Synthetic
  source 1..17: mol_type = other RNA
gggggcgacgatgtgac

SEQ ID NO: 7352 - RNA, 17 nt, synthetic construct
  misc_feature 1..17: note = Synthetic
  source 1..17: mol_type = other RNA
cacgactcgaacactcc

SEQ ID NO: 7353 - RNA, 17 nt, synthetic construct
  misc_feature 1..17: note = Synthetic
  source 1..17: mol_type = other RNA
gactcgaacactcctgg

SEQ ID NO: 7354 - RNA, 17 nt, synthetic construct
  misc_feature 1..17: note = Synthetic
  source 1..17: mol_type = other RNA
cctggcggtgcgtgtct

SEQ ID NO: 7355 - RNA, 17 nt, synthetic construct
  misc_feature 1..17: note = Synthetic
  source 1..17: mol_type = other RNA
tgtctaggatttcgatc

SEQ ID NO: 7356 - RNA, 17 nt, synthetic construct
  misc_feature 1..17: note = Synthetic
  source 1..17: mol_type = other RNA
gatcaggcccgccatgc

SEQ ID NO: 7357 - RNA, 17 nt, synthetic construct
  misc_feature 1..17: note = Synthetic
  source 1..17: mol_type = other RNA
gcccgccatgcaggccc

SEQ ID NO: 7358 - RNA, 17 nt, synthetic construct
  misc_feature 1..17: note = Synthetic
  source 1..17: mol_type = other RNA
cccgccatgcaggcccc

SEQ ID NO: 7359 - RNA, 17 nt, synthetic construct
  misc_feature 1..17: note = Synthetic
  source 1..17: mol_type = other RNA
ccgccatgcaggccccg

SEQ ID NO: 7360 - RNA, 17 nt, synthetic construct
  misc_feature 1..17: note = Synthetic
  source 1..17: mol_type = other RNA
ccatgcaggccccgggg

SEQ ID NO: 7361 - RNA, 17 nt, synthetic construct
  misc_feature 1..17: note = Synthetic
  source 1..17: mol_type = other RNA
ctccgaccccgacacca

SEQ ID NO: 7362 - RNA, 17 nt, synthetic construct
  misc_feature 1..17: note = Synthetic
  source 1..17: mol_type = other RNA
tccgaccccgacaccaa

SEQ ID NO: 7363 - RNA, 17 nt, synthetic construct
  misc_feature 1..17: note = Synthetic
  source 1..17: mol_type = other RNA
cgacgccacgctcgacg

SEQ ID NO: 7364 - RNA, 17 nt, synthetic construct
  misc_feature 1..17: note = Synthetic
  source 1..17: mol_type = other RNA
gccacgctcgacgcggt

SEQ ID NO: 7365 - RNA, 17 nt, synthetic construct
  misc_feature 1..17: note = Synthetic
  source 1..17: mol_type = other RNA
gacgcggttggcgagcc

SEQ ID NO: 7366 - RNA, 17 nt, synthetic construct
  misc_feature 1..17: note = Synthetic
  source 1..17: mol_type = other RNA
cagaatgacaaacacga

SEQ ID NO: 7367 - RNA, 17 nt, synthetic construct
  misc_feature 1..17: note = Synthetic
  source 1..17: mol_type = other RNA
gcgaacacagttcgtcc

SEQ ID NO: 7368 - RNA, 17 nt, synthetic construct
  misc_feature 1..17: note = Synthetic
  source 1..17: mol_type = other RNA
gttcgtccaggccgcac

SEQ ID NO: 7369 - RNA, 17 nt, synthetic construct
  misc_feature 1..17: note = Synthetic
  source 1..17: mol_type = other RNA
acaggcctcgcgccttc

SEQ ID NO: 7370 - RNA, 17 nt, synthetic construct
  misc_feature 1..17: note = Synthetic
  source 1..17: mol_type = other RNA
gcgccttcaggtagcac

SEQ ID NO: 7371 - RNA, 17 nt, synthetic construct
  misc_feature 1..17: note = Synthetic
  source 1..17: mol_type = other RNA
caggtagcactggagaa

SEQ ID NO: 7372 - RNA, 17 nt, synthetic construct
  misc_feature 1..17: note = Synthetic
  source 1..17: mol_type = other RNA
aggtagcactggagaaa

SEQ ID NO: 7373 - RNA, 17 nt, synthetic construct
  misc_feature 1..17: note = Synthetic
  source 1..17: mol_type = other RNA
actggagaaagggccgc

SEQ ID NO: 7374 - RNA, 17 nt, synthetic construct
  misc_feature 1..17: note = Synthetic
  source 1..17: mol_type = other RNA
aaagggccgcaggcgcg

SEQ ID NO: 7375 - RNA, 17 nt, synthetic construct
  misc_feature 1..17: note = Synthetic
  source 1..17: mol_type = other RNA
gccgcaggcgcgtggcg

SEQ ID NO: 7376 - RNA, 17 nt, synthetic construct
  misc_feature 1..17: note = Synthetic
  source 1..17: mol_type = other RNA
gttatccagcacagccg

SEQ ID NO: 7377 - RNA, 17 nt, synthetic construct
  misc_feature 1..17: note = Synthetic
  source 1..17: mol_type = other RNA
cgcggtcgtcccgataa

SEQ ID NO: 7378 - RNA, 17 nt, synthetic construct
  misc_feature 1..17: note = Synthetic
  source 1..17: mol_type = other RNA
gcggtcgtcccgataat

SEQ ID NO: 7379 - RNA, 17 nt, synthetic construct
  misc_feature 1..17: note = Synthetic
  source 1..17: mol_type = other RNA
cggtcgtcccgataatg

SEQ ID NO: 7380 - RNA, 17 nt, synthetic construct
  misc_feature 1..17: note = Synthetic
  source 1..17: mol_type = other RNA
tcccgataatggggtcc

SEQ ID NO: 7381 - RNA, 17 nt, synthetic construct
  misc_feature 1..17: note = Synthetic
  source 1..17: mol_type = other RNA
cccgataatggggtcct

SEQ ID NO: 7382 - RNA, 17 nt, synthetic construct
  misc_feature 1..17: note = Synthetic
  source 1..17: mol_type = other RNA
ccgataatggggtcctg

SEQ ID NO: 7383 - RNA, 17 nt, synthetic construct
  misc_feature 1..17: note = Synthetic
  source 1..17: mol_type = other RNA
cgataatggggtcctgg

SEQ ID NO: 7384 - RNA, 17 nt, synthetic construct
  misc_feature 1..17: note = Synthetic
  source 1..17: mol_type = other RNA
gggtcctgggggcgcag

SEQ ID NO: 7385 - RNA, 17 nt, synthetic construct
  misc_feature 1..17: note = Synthetic
  source 1..17: mol_type = other RNA
cctgggggcgcagcggc

SEQ ID NO: 7386 - RNA, 17 nt, synthetic construct
  misc_feature 1..17: note = Synthetic
  source 1..17: mol_type = other RNA
ggcgcagcggcaggttg

SEQ ID NO: 7387 - RNA, 17 nt, synthetic construct
  misc_feature 1..17: note = Synthetic
  source 1..17: mol_type = other RNA
gcagcggcaggttgtgg

SEQ ID NO: 7388 - RNA, 17 nt, synthetic construct
  misc_feature 1..17: note = Synthetic
  source 1..17: mol_type = other RNA
ccacgccagcgtctcgt

SEQ ID NO: 7389 - RNA, 17 nt, synthetic construct
  misc_feature 1..17: note = Synthetic
  source 1..17: mol_type = other RNA
cgccagcgtctcgtcgg

SEQ ID NO: 7390 - RNA, 17 nt, synthetic construct
  misc_feature 1..17: note = Synthetic
  source 1..17: mol_type = other RNA
cagcgtctcgtcggcgg

SEQ ID NO: 7391 - RNA, 17 nt, synthetic construct
  misc_feature 1..17: note = Synthetic
  source 1..17: mol_type = other RNA
cctcgatgaaattttct

SEQ ID NO: 7392 - RNA, 17 nt, synthetic construct
  misc_feature 1..17: note = Synthetic
  source 1..17: mol_type = other RNA
cagcacgcagtcgcgca

SEQ ID NO: 7393 - RNA, 17 nt, synthetic construct
  misc_feature 1..17: note = Synthetic
  source 1..17: mol_type = other RNA
gcagtcgcgcatggcct

SEQ ID NO: 7394 - RNA, 17 nt, synthetic construct
  misc_feature 1..17: note = Synthetic
  source 1..17: mol_type = other RNA
gtcgcgcatggccttgg

SEQ ID NO: 7395 - RNA, 17 nt, synthetic construct
  misc_feature 1..17: note = Synthetic
  source 1..17: mol_type = other RNA
ggccttggcggtcgatg

SEQ ID NO: 7396 - RNA, 17 nt, synthetic construct
  misc_feature 1..17: note = Synthetic
  source 1..17: mol_type = other RNA
gcggtcgatgcggcccg

SEQ ID NO: 7397 - RNA, 17 nt, synthetic construct
  misc_feature 1..17: note = Synthetic
  source 1..17: mol_type = other RNA
tgcggcccgaggattgc

SEQ ID NO: 7398 - RNA, 17 nt, synthetic construct
  misc_feature 1..17: note = Synthetic
  source 1..17: mol_type = other RNA
cggcaaaagtgcgatag

SEQ ID NO: 7399 - RNA, 17 nt, synthetic construct
  misc_feature 1..17: note = Synthetic
  source 1..17: mol_type = other RNA
aaagtgcgatagaggct

SEQ ID NO: 7400 - RNA, 17 nt, synthetic construct
  misc_feature 1..17: note = Synthetic
  source 1..17: mol_type = other RNA
aagtgcgatagaggctc

SEQ ID NO: 7401 - RNA, 17 nt, synthetic construct
  misc_feature 1..17: note = Synthetic
  source 1..17: mol_type = other RNA
gatagaggctcgggccg

SEQ ID NO: 7402 - RNA, 17 nt, synthetic construct
  misc_feature 1..17: note = Synthetic
  source 1..17: mol_type = other RNA
atagaggctcgggccgt

SEQ ID NO: 7403 - RNA, 17 nt, synthetic construct
  misc_feature 1..17: note = Synthetic
  source 1..17: mol_type = other RNA
cgggccgtgggcgacca

SEQ ID NO: 7404 - RNA, 17 nt, synthetic construct
  misc_feature 1..17: note = Synthetic
  source 1..17: mol_type = other RNA
ggcgaccaaggtttccc

SEQ ID NO: 7405 - RNA, 17 nt, synthetic construct
  misc_feature 1..17: note = Synthetic
  source 1..17: mol_type = other RNA
ttcccaggagacccgtc

SEQ ID NO: 7406 - RNA, 17 nt, synthetic construct
  misc_feature 1..17: note = Synthetic
  source 1..17: mol_type = other RNA
ggagacccgtctggtct

SEQ ID NO: 7407 - RNA, 17 nt, synthetic construct
  misc_feature 1..17: note = Synthetic
  source 1..17: mol_type = other RNA
tctggtctcggcgtcaa

SEQ ID NO: 7408 - RNA, 17 nt, synthetic construct
  misc_feature 1..17: note = Synthetic
  source 1..17: mol_type = other RNA
ctggtctcggcgtcaaa

SEQ ID NO: 7409 - RNA, 17 nt, synthetic construct
  misc_feature 1..17: note = Synthetic
  source 1..17: mol_type = other RNA
cgtcaaagggccctcct

SEQ ID NO: 7410 - RNA, 17 nt, synthetic construct
  misc_feature 1..17: note = Synthetic
  source 1..17: mol_type = other RNA
ccttggcccgccagcac

SEQ ID NO: 7411 - RNA, 17 nt, synthetic construct
  misc_feature 1..17: note = Synthetic
  source 1..17: mol_type = other RNA
cttggcccgccagcacc

SEQ ID NO: 7412 - RNA, 17 nt, synthetic construct
  misc_feature 1..17: note = Synthetic
  source 1..17: mol_type = other RNA
ttggcccgccagcaccg

SEQ ID NO: 7413 - RNA, 17 nt, synthetic construct
  misc_feature 1..17: note = Synthetic
  source 1..17: mol_type = other RNA
cgccagcaccggggccc

SEQ ID NO: 7414 - RNA, 17 nt, synthetic construct
  misc_feature 1..17: note = Synthetic
  source 1..17: mol_type = other RNA
gccagcaccggggccca

SEQ ID NO: 7415 - RNA, 17 nt, synthetic construct
  misc_feature 1..17: note = Synthetic
  source 1..17: mol_type = other RNA
ccagcaccggggcccag

SEQ ID NO: 7416 - RNA, 17 nt, synthetic construct
  misc_feature 1..17: note = Synthetic
  source 1..17: mol_type = other RNA
ggcccaggggctattcg

SEQ ID NO: 7417 - RNA, 17 nt, synthetic construct
  misc_feature 1..17: note = Synthetic
  source 1..17: mol_type = other RNA
ccaggggctattcgcgg

SEQ ID NO: 7418 - RNA, 17 nt, synthetic construct
  misc_feature 1..17: note = Synthetic
  source 1..17: mol_type = other RNA
caggggctattcgcggc

SEQ ID NO: 7419 - RNA, 17 nt, synthetic construct
  misc_feature 1..17: note = Synthetic
  source 1..17: mol_type = other RNA
ctattcgcggcgggaaa

SEQ ID NO: 7420 - RNA, 17 nt, synthetic construct
  misc_feature 1..17: note = Synthetic
  source 1..17: mol_type = other RNA
aaacggctgccccccaa

SEQ ID NO: 7421 - RNA, 17 nt, synthetic construct
  misc_feature 1..17: note = Synthetic
  source 1..17: mol_type = other RNA
aacggctgccccccaaa

SEQ ID NO: 7422 - RNA, 17 nt, synthetic construct
  misc_feature 1..17: note = Synthetic
  source 1..17: mol_type = other RNA
acggctgccccccaaag

SEQ ID NO: 7423 - RNA, 17 nt, synthetic construct
  misc_feature 1..17: note = Synthetic
  source 1..17: mol_type = other RNA
gcatgacctgtgcgctg

SEQ ID NO: 7424 - RNA, 17 nt, synthetic construct
  misc_feature 1..17: note = Synthetic
  source 1..17: mol_type = other RNA
caaagctctcgctgatg

SEQ ID NO: 7425 - RNA, 17 nt, synthetic construct
  misc_feature 1..17: note = Synthetic
  source 1..17: mol_type = other RNA
gtcgaccgccgcgcgct

SEQ ID NO: 7426 - RNA, 17 nt, synthetic construct
  misc_feature 1..17: note = Synthetic
  source 1..17: mol_type = other RNA
cgccgcgcgctcggaga

SEQ ID NO: 7427 - RNA, 17 nt, synthetic construct
  misc_feature 1..17: note = Synthetic
  source 1..17: mol_type = other RNA
gctcggagatggagcgc

SEQ ID NO: 7428 - RNA, 17 nt, synthetic construct
  misc_feature 1..17: note = Synthetic
  source 1..17: mol_type = other RNA
gcgcaggaccaaccgcg

SEQ ID NO: 7429 - RNA, 17 nt, synthetic construct
  misc_feature 1..17: note = Synthetic
  source 1..17: mol_type = other RNA
caggaccaaccgcgtgg

SEQ ID NO: 7430 - RNA, 17 nt, synthetic construct
  misc_feature 1..17: note = Synthetic
  source 1..17: mol_type = other RNA
ccgcgtggtggcgtcga

SEQ ID NO: 7431 - RNA, 17 nt, synthetic construct
  misc_feature 1..17: note = Synthetic
  source 1..17: mol_type = other RNA
ggtggcgtcgatggtgt

SEQ ID NO: 7432 - RNA, 17 nt, synthetic construct
  misc_feature 1..17: note = Synthetic
  source 1..17: mol_type = other RNA
ggcgtcgatggtgtcgg

SEQ ID NO: 7433 - RNA, 17 nt, synthetic construct
  misc_feature 1..17: note = Synthetic
  source 1..17: mol_type = other RNA
gtcgatggtgtcggcgg

SEQ ID NO: 7434 - RNA, 17 nt, synthetic construct
  misc_feature 1..17: note = Synthetic
  source 1..17: mol_type = other RNA
tcgatggtgtcggcggc

SEQ ID NO: 7435 - RNA, 17 nt, synthetic construct
  misc_feature 1..17: note = Synthetic
  source 1..17: mol_type = other RNA
gcgggcgcctttcgctc

SEQ ID NO: 7436 - RNA, 17 nt, synthetic construct
  misc_feature 1..17: note = Synthetic
  source 1..17: mol_type = other RNA
cgggcgcctttcgctcc

SEQ ID NO: 7437 - RNA, 17 nt, synthetic construct
  misc_feature 1..17: note = Synthetic
  source 1..17: mol_type = other RNA
gggcgcctttcgctccg

SEQ ID NO: 7438 - RNA, 17 nt, synthetic construct
  misc_feature 1..17: note = Synthetic
  source 1..17: mol_type = other RNA
gcctttcgctccggggc

SEQ ID NO: 7439 - RNA, 17 nt, synthetic construct
  misc_feature 1..17: note = Synthetic
  source 1..17: mol_type = other RNA
cctttcgctccggggcc

SEQ ID NO: 7440 - RNA, 17 nt, synthetic construct
  misc_feature 1..17: note = Synthetic
  source 1..17: mol_type = other RNA
ctttcgctccggggccg

SEQ ID NO: 7441 - RNA, 17 nt, synthetic construct
  misc_feature 1..17: note = Synthetic
  source 1..17: mol_type = other RNA
gctccggggccggggcg

SEQ ID NO: 7442 - RNA, 17 nt, synthetic construct
  misc_feature 1..17: note = Synthetic
  source 1..17: mol_type = other RNA
ctccggggccggggcgc

SEQ ID NO: 7443 - RNA, 17 nt, synthetic construct
  misc_feature 1..17: note = Synthetic
  source 1..17: mol_type = other RNA
tccggggccggggcgcg

SEQ ID NO: 7444 - RNA, 17 nt, synthetic construct
  misc_feature 1..17: note = Synthetic
  source 1..17: mol_type = other RNA
ccggggccggggcgcgg

SEQ ID NO: 7445 - RNA, 17 nt, synthetic construct
  misc_feature 1..17: note = Synthetic
  source 1..17: mol_type = other RNA
cggggcgcgggggtccg

SEQ ID NO: 7446 - RNA, 17 nt, synthetic construct
  misc_feature 1..17: note = Synthetic
  source 1..17: mol_type = other RNA
ggggcgcgggggtccgc

SEQ ID NO: 7447 - RNA, 17 nt, synthetic construct
  misc_feature 1..17: note = Synthetic
  source 1..17: mol_type = other RNA
gcgcgggggtccgcggg

SEQ ID NO: 7448 - RNA, 17 nt, synthetic construct
  misc_feature 1..17: note = Synthetic
  source 1..17: mol_type = other RNA
cgcgggggtccgcgggc

SEQ ID NO: 7449 - RNA, 17 nt, synthetic construct
  misc_feature 1..17: note = Synthetic
  source 1..17: mol_type = other RNA
gcgggggtccgcgggcg

SEQ ID NO: 7450 - RNA, 17 nt, synthetic construct
  misc_feature 1..17: note = Synthetic
  source 1..17: mol_type = other RNA
cgggggtccgcgggcgg

SEQ ID NO: 7451 - RNA, 17 nt, synthetic construct
  misc_feature 1..17: note = Synthetic
  source 1..17: mol_type = other RNA
gggggtccgcgggcggg

SEQ ID NO: 7452 - RNA, 17 nt, synthetic construct
  misc_feature 1..17: note = Synthetic
  source 1..17: mol_type = other RNA
ggggtccgcgggcgggg

SEQ ID NO: 7453 - RNA, 17 nt, synthetic construct
  misc_feature 1..17: note = Synthetic
  source 1..17: mol_type = other RNA
atcgccagcgtcattag

SEQ ID NO: 7454 - RNA, 17 nt, synthetic construct
  misc_feature 1..17: note = Synthetic
  source 1..17: mol_type = other RNA
tcgccagcgtcattagc

SEQ ID NO: 7455 - RNA, 17 nt, synthetic construct
  misc_feature 1..17: note = Synthetic
  source 1..17: mol_type = other RNA
cgccagcgtcattagcg

SEQ ID NO: 7456 - RNA, 17 nt, synthetic construct
  misc_feature 1..17: note = Synthetic
  source 1..17: mol_type = other RNA
gccagcgtcattagcgg

SEQ ID NO: 7457 - RNA, 17 nt, synthetic construct
  misc_feature 1..17: note = Synthetic
  source 1..17: mol_type = other RNA
ccagcgtcattagcggg

SEQ ID NO: 7458 - RNA, 17 nt, synthetic construct
  misc_feature 1..17: note = Synthetic
  source 1..17: mol_type = other RNA
cagcgtcattagcgggg

SEQ ID NO: 7459 - RNA, 17 nt, synthetic construct
  misc_feature 1..17: note = Synthetic
  source 1..17: mol_type = other RNA
agcgtcattagcggggg

SEQ ID NO: 7460 - RNA, 17 nt, synthetic construct
  misc_feature 1..17: note = Synthetic
  source 1..17: mol_type = other RNA
ttagcggggggggtgct

SEQ ID NO: 7461 - RNA, 17 nt, synthetic construct
  misc_feature 1..17: note = Synthetic
  source 1..17: mol_type = other RNA
gcacgccccgtgtccgc

SEQ ID NO: 7462 - RNA, 17 nt, synthetic construct
  misc_feature 1..17: note = Synthetic
  source 1..17: mol_type = other RNA
ccgtgtccgctggcctc

SEQ ID NO: 7463 - RNA, 17 nt, synthetic construct
  misc_feature 1..17: note = Synthetic
  source 1..17: mol_type = other RNA
cgtgtccgctggcctcc

SEQ ID NO: 7464 - RNA, 17 nt, synthetic construct
  misc_feature 1..17: note = Synthetic
  source 1..17: mol_type = other RNA
gtccgctggcctccggg

SEQ ID NO: 7465 - RNA, 17 nt, synthetic construct
  misc_feature 1..17: note = Synthetic
  source 1..17: mol_type = other RNA
tccgctggcctccgggt

SEQ ID NO: 7466 - RNA, 17 nt, synthetic construct
  misc_feature 1..17: note = Synthetic
  source 1..17: mol_type = other RNA
ctggcctccgggtgggt

SEQ ID NO: 7467 - RNA, 17 nt, synthetic construct
  misc_feature 1..17: note = Synthetic
  source 1..17: mol_type = other RNA
tggcctccgggtgggtc

SEQ ID NO: 7468 - RNA, 17 nt, synthetic construct
  misc_feature 1..17: note = Synthetic
  source 1..17: mol_type = other RNA
cgcgccacgcctcgcca

SEQ ID NO: 7469 - RNA, 17 nt, synthetic construct
  misc_feature 1..17: note = Synthetic
  source 1..17: mol_type = other RNA
gcgccacgcctcgccat

SEQ ID NO: 7470 - RNA, 17 nt, synthetic construct
  misc_feature 1..17: note = Synthetic
  source 1..17: mol_type = other RNA
cgccacgcctcgccatg

SEQ ID NO: 7471 - RNA, 17 nt, synthetic construct
  misc_feature 1..17: note = Synthetic
  source 1..17: mol_type = other RNA
gccacgcctcgccatgg

SEQ ID NO: 7472 - RNA, 17 nt, synthetic construct
  misc_feature 1..17: note = Synthetic
  source 1..17: mol_type = other RNA
ccacgcctcgccatggg

SEQ ID NO: 7473 - RNA, 17 nt, synthetic construct
  misc_feature 1..17: note = Synthetic
  source 1..17: mol_type = other RNA
ctcgccatggggggcgc

SEQ ID NO: 7474 - RNA, 17 nt, synthetic construct
  misc_feature 1..17: note = Synthetic
  source 1..17: mol_type = other RNA
tcgccatggggggcgcc

SEQ ID NO: 7475 - RNA, 17 nt, synthetic construct
  misc_feature 1..17: note = Synthetic
  source 1..17: mol_type = other RNA
cgccatggggggcgccg

SEQ ID NO: 7476 - RNA, 17 nt, synthetic construct
  misc_feature 1..17: note = Synthetic
  source 1..17: mol_type = other RNA
gtccgtccaccccgccc

SEQ ID NO: 7477 - RNA, 17 nt, synthetic construct
  misc_feature 1..17: note = Synthetic
  source 1..17: mol_type = other RNA
tccgtccaccccgcccc

SEQ ID NO: 7478 - RNA, 17 nt, synthetic construct
  misc_feature 1..17: note = Synthetic
  source 1..17: mol_type = other RNA
ccgtccaccccgccccg

SEQ ID NO: 7479 - RNA, 17 nt, synthetic construct
  misc_feature 1..17: note = Synthetic
  source 1..17: mol_type = other RNA
tccaccccgccccgggg

SEQ ID NO: 7480 - RNA, 17 nt, synthetic construct
  misc_feature 1..17: note = Synthetic
  source 1..17: mol_type = other RNA
ccaccccgccccggggc

SEQ ID NO: 7481 - RNA, 17 nt, synthetic construct
  misc_feature 1..17: note = Synthetic
  source 1..17: mol_type = other RNA
caccccgccccggggcg

SEQ ID NO: 7482 - RNA, 17 nt, synthetic construct
  misc_feature 1..17: note = Synthetic
  source 1..17: mol_type = other RNA
ccggggcggggtccccc

SEQ ID NO: 7483 - RNA, 17 nt, synthetic construct
  misc_feature 1..17: note = Synthetic
  source 1..17: mol_type = other RNA
cggggcggggtccccca

SEQ ID NO: 7484 - RNA, 17 nt, synthetic construct
  misc_feature 1..17: note = Synthetic
  source 1..17: mol_type = other RNA
tcccccagggttgcgat

SEQ ID NO: 7485 - RNA, 20 nt, synthetic construct
  misc_feature 1..20: note = Synthetic
  source 1..20: mol_type = other RNA
gcgtcattagcggggggggt

SEQ ID NO: 7486 - RNA, 17 nt, synthetic construct
  misc_feature 1..17: note = Synthetic
  source 1..17: mol_type = other RNA
gcgtcattagcgggggg

SEQ ID NO: 7487 - RNA, 20 nt, synthetic construct
  misc_feature 1..20: note = Synthetic
  source 1..20: mol_type = other RNA
cctctccgacagcgatctgg

SEQ ID NO: 7488 - RNA, 20 nt, synthetic construct
  misc_feature 1..20: note = Synthetic
  source 1..20: mol_type = other RNA
ggacatggaagacccccacg

SEQ ID NO: 7489 - RNA, 20 nt, synthetic construct
  misc_feature 1..20: note = Synthetic
  source 1..20: mol_type = other RNA
ggaagacccccacggagagg

SEQ ID NO: 7490 - RNA, 20 nt, synthetic construct
  misc_feature 1..20: note = Synthetic
  source 1..20: mol_type = other RNA
acgaggacccccccgagccg

SEQ ID NO: 7491 - RNA, 20 nt, synthetic construct
  misc_feature 1..20: note = Synthetic
  source 1..20: mol_type = other RNA
aggacccccccgagccggcg

SEQ ID NO: 7492 - RNA, 20 nt, synthetic construct
  misc_feature 1..20: note = Synthetic
  source 1..20: mol_type = other RNA
cggggagtgttcctcgtcgg

SEQ ID NO: 7493 - RNA, 20 nt, synthetic construct
  misc_feature 1..20: note = Synthetic
  source 1..20: mol_type = other RNA
atatgctaattgacctcggc

SEQ ID NO: 7494 - RNA, 20 nt, synthetic construct
  misc_feature 1..20: note = Synthetic
  source 1..20: mol_type = other RNA
tggacctctccgacagcgat

SEQ ID NO: 7495 - RNA, 20 nt, synthetic construct
  misc_feature 1..20: note = Synthetic
  source 1..20: mol_type = other RNA
tctccgacagcgatctggac

SEQ ID NO: 7496 - RNA, 20 nt, synthetic construct
  misc_feature 1..20: note = Synthetic
  source 1..20: mol_type = other RNA
cgatctggacgaggaccccc

SEQ ID NO: 7497 - RNA, 20 nt, synthetic construct
  misc_feature 1..20: note = Synthetic
  source 1..20: mol_type = other RNA
cggagagccgccgcgacgac

SEQ ID NO: 7498 - RNA, 20 nt, synthetic construct
  misc_feature 1..20: note = Synthetic
  source 1..20: mol_type = other RNA
gccgccgcgacgacctggaa

SEQ ID NO: 7499 - RNA, 20 nt, synthetic construct
  misc_feature 1..20: note = Synthetic
  source 1..20: mol_type = other RNA
cgacctggaatcggacagca

SEQ ID NO: 7500 - RNA, 20 nt, synthetic construct
  misc_feature 1..20: note = Synthetic
  source 1..20: mol_type = other RNA
gcagcggggagtgttcctcg

SEQ ID NO: 7501 - RNA, 20 nt, synthetic construct
  misc_feature 1..20: note = Synthetic
  source 1..20: mol_type = other RNA
gggagtgttcctcgtcggac

SEQ ID NO: 7502 - RNA, 20 nt, synthetic construct
  misc_feature 1..20: note = Synthetic
  source 1..20: mol_type = other RNA
gttcctcgtcggacgaggac

SEQ ID NO: 7503 - RNA, 20 nt, synthetic construct
  misc_feature 1..20: note = Synthetic
  source 1..20: mol_type = other RNA
cgaggacatggaagaccccc

SEQ ID NO: 7504 - RNA, 20 nt, synthetic construct
  misc_feature 1..20: note = Synthetic
  source 1..20: mol_type = other RNA
acatggaagacccccacgga

SEQ ID NO: 7505 - RNA, 20 nt, synthetic construct
  misc_feature 1..20: note = Synthetic
  source 1..20: mol_type = other RNA
acccccacggagaggacgga

SEQ ID NO: 7506 - RNA, 20 nt, synthetic construct
  misc_feature 1..20: note = Synthetic
  source 1..20: mol_type = other RNA
ggcggtccgcccgtctcgtc

SEQ ID NO: 7507 - RNA, 20 nt, synthetic construct
  misc_feature 1..20: note = Synthetic
  source 1..20: mol_type = other RNA
gcacccagacgcctcgtccg

SEQ ID NO: 7508 - RNA, 20 nt, synthetic construct
  misc_feature 1..20: note = Synthetic
  source 1..20: mol_type = other RNA
cgcctcgtccgacggagcgg

SEQ ID NO: 7509 - RNA, 20 nt, synthetic construct
  misc_feature 1..20: note = Synthetic
  source 1..20: mol_type = other RNA
ccacagtgtgtggtcgcgcc

SEQ ID NO: 7510 - RNA, 20 nt, synthetic construct
  misc_feature 1..20: note = Synthetic
  source 1..20: mol_type = other RNA
ccggcgaccgtcttgctccc

SEQ ID NO: 7511 - RNA, 20 nt, synthetic construct
  misc_feature 1..20: note = Synthetic
  source 1..20: mol_type = other RNA
gtcttgctcccccgagcagc

SEQ ID NO: 7512 - RNA, 20 nt, synthetic construct
  misc_feature 1..20: note = Synthetic
  source 1..20: mol_type = other RNA
caaagcccagcctgcccgcg

SEQ ID NO: 7513 - RNA, 20 nt, synthetic construct
  misc_feature 1..20: note = Synthetic
  source 1..20: mol_type = other RNA
gcctgcccgcggcggacgcc

SEQ ID NO: 7514 - RNA, 20 nt, synthetic construct
  misc_feature 1..20: note = Synthetic
  source 1..20: mol_type = other RNA
ggcggacgccgtgggcgtcg

SEQ ID NO: 7515 - RNA, 20 nt, synthetic construct
  misc_feature 1..20: note = Synthetic
  source 1..20: mol_type = other RNA
cgccgtgggcgtcgcagggg

SEQ ID NO: 7516 - RNA, 20 nt, synthetic construct
  misc_feature 1..20: note = Synthetic
  source 1..20: mol_type = other RNA
gggtcggggtcgcggtggtc

SEQ ID NO: 7517 - RNA, 20 nt, synthetic construct
  misc_feature 1..20: note = Synthetic
  source 1..20: mol_type = other RNA
ccggggctgccgatggtttg

SEQ ID NO: 7518 - RNA, 20 nt, synthetic construct
  misc_feature 1..20: note = Synthetic
  source 1..20: mol_type = other RNA
gaccaccgcgaccccgaccc

SEQ ID NO: 7519 - RNA, 20 nt, synthetic construct
  misc_feature 1..20: note = Synthetic
  source 1..20: mol_type = other RNA
gcgacgcccacggcgtccgc

SEQ ID NO: 7520 - RNA, 20 nt, synthetic construct
  misc_feature 1..20: note = Synthetic
  source 1..20: mol_type = other RNA
ggcgcgaccacacactgtgg

SEQ ID NO: 7521 - RNA, 20 nt, synthetic construct
  misc_feature 1..20: note = Synthetic
  source 1..20: mol_type = other RNA
caaaccatcggcagccccgg

SEQ ID NO: 7522 - RNA, 20 nt, synthetic construct
  misc_feature 1..20: note = Synthetic
  source 1..20: mol_type = other RNA
ggaccaccgcgaccccgacc

SEQ ID NO: 7523 - RNA, 20 nt, synthetic construct
  misc_feature 1..20: note = Synthetic
  source 1..20: mol_type = other RNA
acccctgcgacgcccacggc

SEQ ID NO: 7524 - RNA, 20 nt, synthetic construct
  misc_feature 1..20: note = Synthetic
  source 1..20: mol_type = other RNA
cccctgcgacgcccacggcg

SEQ ID NO: 7525 - RNA, 20 nt, synthetic construct
  misc_feature 1..20: note = Synthetic
  source 1..20: mol_type = other RNA
cgacgcccacggcgtccgcc

SEQ ID NO: 7526 - RNA, 20 nt, synthetic construct
  misc_feature 1..20: note = Synthetic
  source 1..20: mol_type = other RNA
cgcgggcaggctgggctttg

SEQ ID NO: 7527 - RNA, 20 nt, synthetic construct
  misc_feature 1..20: note = Synthetic
  source 1..20: mol_type = other RNA
gtgctgctcgggggagcaag

SEQ ID NO: 7528 - RNA, 20 nt, synthetic construct
  misc_feature 1..20: note = Synthetic
  source 1..20: mol_type = other RNA
gctgctcgggggagcaagac

SEQ ID NO: 7529 - RNA, 20 nt, synthetic construct
  misc_feature 1..20: note = Synthetic
  source 1..20: mol_type = other RNA
gggagcaagacggtcgccgg

SEQ ID NO: 7530 - RNA, 20 nt, synthetic construct
  misc_feature 1..20: note = Synthetic
  source 1..20: mol_type = other RNA
ccgctccgtcggacgaggcg

SEQ ID NO: 7531 - RNA, 20 nt, synthetic construct
  misc_feature 1..20: note = Synthetic
  source 1..20: mol_type = other RNA
tcggacgaggcgtctgggtg

SEQ ID NO: 7532 - RNA, 20 nt, synthetic construct
  misc_feature 1..20: note = Synthetic
  source 1..20: mol_type = other RNA
gtccgtcctctccgtggggg

SEQ ID NO: 7533 - RNA, 20 nt, synthetic construct
  misc_feature 1..20: note = Synthetic
  source 1..20: mol_type = other RNA
tccgtcctctccgtgggggt

SEQ ID NO: 7534 - RNA, 20 nt, synthetic construct
  misc_feature 1..20: note = Synthetic
  source 1..20: mol_type = other RNA
cctctccgtgggggtcttcc

SEQ ID NO: 7535 - RNA, 20 nt, synthetic construct
  misc_feature 1..20: note = Synthetic
  source 1..20: mol_type = other RNA
tccgtgggggtcttccatgt

SEQ ID NO: 7536 - RNA, 20 nt, synthetic construct
  misc_feature 1..20: note = Synthetic
  source 1..20: mol_type = other RNA
cgtgggggtcttccatgtcc

SEQ ID NO: 7537 - RNA, 20 nt, synthetic construct
  misc_feature 1..20: note = Synthetic
  source 1..20: mol_type = other RNA
tgggggtcttccatgtcctc

SEQ ID NO: 7538 - RNA, 20 nt, synthetic construct
  misc_feature 1..20: note = Synthetic
  source 1..20: mol_type = other RNA
gggggtcttccatgtcctcg

SEQ ID NO: 7539 - RNA, 20 nt, synthetic construct
  misc_feature 1..20: note = Synthetic
  source 1..20: mol_type = other RNA
tgtcctcgtccgacgaggaa

SEQ ID NO: 7540 - RNA, 20 nt, synthetic construct
  misc_feature 1..20: note = Synthetic
  source 1..20: mol_type = other RNA
gtcctcgtccgacgaggaac

SEQ ID NO: 7541 - RNA, 20 nt, synthetic construct
  misc_feature 1..20: note = Synthetic
  source 1..20: mol_type = other RNA
gtccgacgaggaacactccc

SEQ ID NO: 7542 - RNA, 20 nt, synthetic construct
  misc_feature 1..20: note = Synthetic
  source 1..20: mol_type = other RNA
ccgacgaggaacactccccg

SEQ ID NO: 7543 - RNA, 20 nt, synthetic construct
  misc_feature 1..20: note = Synthetic
  source 1..20: mol_type = other RNA
cgaggaacactccccgctgc

SEQ ID NO: 7544 - RNA, 20 nt, synthetic construct
  misc_feature 1..20: note = Synthetic
  source 1..20: mol_type = other RNA
cgctgctgtccgattccagg

SEQ ID NO: 7545 - RNA, 20 nt, synthetic construct
  misc_feature 1..20: note = Synthetic
  source 1..20: mol_type = other RNA
gctgctgtccgattccaggt

SEQ ID NO: 7546 - RNA, 20 nt, synthetic construct
  misc_feature 1..20: note = Synthetic
  source 1..20: mol_type = other RNA
ctgctgtccgattccaggtc

SEQ ID NO: 7547 - RNA, 20 nt, synthetic construct
  misc_feature 1..20: note = Synthetic
  source 1..20: mol_type = other RNA
tgctgtccgattccaggtcg

SEQ ID NO: 7548 - RNA, 20 nt, synthetic construct
  misc_feature 1..20: note = Synthetic
  source 1..20: mol_type = other RNA
ttccaggtcgtcgcggcggc

SEQ ID NO: 7549 - RNA, 20 nt, synthetic construct
  misc_feature 1..20: note = Synthetic
  source 1..20: mol_type = other RNA
ggtcgtcgcggcggctctcc

SEQ ID NO: 7550 - RNA, 20 nt, synthetic construct
  misc_feature 1..20: note = Synthetic
  source 1..20: mol_type = other RNA
gtcgtcgcggcggctctccg

SEQ ID NO: 7551 - RNA, 20 nt, synthetic construct
  misc_feature 1..20: note = Synthetic
  source 1..20: mol_type = other RNA
cgccggctcgggggggtcct

SEQ ID NO: 7552 - RNA, 20 nt, synthetic construct
  misc_feature 1..20: note = Synthetic
  source 1..20: mol_type = other RNA
ccggctcgggggggtcctcg

SEQ ID NO: 7553 - RNA, 20 nt, synthetic construct
  misc_feature 1..20: note = Synthetic
  source 1..20: mol_type = other RNA
cggctcgggggggtcctcgt

SEQ ID NO: 7554 - RNA, 20 nt, synthetic construct
  misc_feature 1..20: note = Synthetic
  source 1..20: mol_type = other RNA
gggggtcctcgtccagatcg

SEQ ID NO: 7555 - RNA, 20 nt, synthetic construct
  misc_feature 1..20: note = Synthetic
  source 1..20: mol_type = other RNA
gtccagatcgctgtcggaga

SEQ ID NO: 7556 - RNA, 20 nt, synthetic construct
  misc_feature 1..20: note = Synthetic
  source 1..20: mol_type = other RNA
ccagatcgctgtcggagagg

SEQ ID NO: 7557 - RNA, 20 nt, synthetic construct
  misc_feature 1..20: note = Synthetic
  source 1..20: mol_type = other RNA
atcgctgtcggagaggtcca

SEQ ID NO: 7558 - RNA, 20 nt, synthetic construct
  misc_feature 1..20: note = Synthetic
  source 1..20: mol_type = other RNA
gccgaggtcaattagcatat

SEQ ID NO: 7559 - RNA, 20 nt, synthetic construct
  misc_feature 1..20: note = Synthetic
  source 1..20: mol_type = other RNA
ctccgtgggggtcttccatg

SEQ ID NO: 7560 - RNA, 20 nt, synthetic construct
  misc_feature 1..20: note = Synthetic
  source 1..20: mol_type = other RNA
cgtccgacgaggaacactcc

SEQ ID NO: 7561 - RNA, 20 nt, synthetic construct
  misc_feature 1..20: note = Synthetic
  source 1..20: mol_type = other RNA
acgaggaacactccccgctg

SEQ ID NO: 7562 - RNA, 20 nt, synthetic construct
  misc_feature 1..20: note = Synthetic
  source 1..20: mol_type = other RNA
attccaggtcgtcgcggcgg

SEQ ID NO: 7563 - RNA, 20 nt, synthetic construct
  misc_feature 1..20: note = Synthetic
  source 1..20: mol_type = other RNA
gctcgggggggtcctcgtcc

SEQ ID NO: 7564 - RNA, 20 nt, synthetic construct
  misc_feature 1..20: note = Synthetic
  source 1..20: mol_type = other RNA
ggccgaggtcaattagcata

SEQ ID NO: 7565 - RNA, 20 nt, synthetic construct
  misc_feature 1..20: note = Synthetic
  source 1..20: mol_type = other RNA
aggtcaattagcatatcaat

SEQ ID NO: 7566 - RNA, 17 nt, synthetic construct
  misc_feature 1..17: note = Synthetic
  source 1..17: mol_type = other RNA
gcgggggtccgacaaac

SEQ ID NO: 7567 - RNA, 17 nt, synthetic construct
  misc_feature 1..17: note = Synthetic
  source 1..17: mol_type = other RNA
acaaaccatcggcagcc

SEQ ID NO: 7568 - RNA, 17 nt, synthetic construct
  misc_feature 1..17: note = Synthetic
  source 1..17: mol_type = other RNA
tcggcagccccgggacc

SEQ ID NO: 7569 - RNA, 17 nt, synthetic construct
  misc_feature 1..17: note = Synthetic
  source 1..17: mol_type = other RNA
cgggaccaccgcgaccc

SEQ ID NO: 7570 - RNA, 17 nt, synthetic construct
  misc_feature 1..17: note = Synthetic
  source 1..17: mol_type = other RNA
gggaccaccgcgacccc

SEQ ID NO: 7571 - RNA, 17 nt, synthetic construct
  misc_feature 1..17: note = Synthetic
  source 1..17: mol_type = other RNA
ggaccaccgcgaccccg

SEQ ID NO: 7572 - RNA, 17 nt, synthetic construct
  misc_feature 1..17: note = Synthetic
  source 1..17: mol_type = other RNA
ccgcgaccccgacccct

SEQ ID NO: 7573 - RNA, 17 nt, synthetic construct
  misc_feature 1..17: note = Synthetic
  source 1..17: mol_type = other RNA
cgaccccgacccctgcg

SEQ ID NO: 7574 - RNA, 17 nt, synthetic construct
  misc_feature 1..17: note = Synthetic
  source 1..17: mol_type = other RNA
cgacccctgcgacgccc

SEQ ID NO: 7575 - RNA, 17 nt, synthetic construct
  misc_feature 1..17: note = Synthetic
  source 1..17: mol_type = other RNA
acccctgcgacgcccac

SEQ ID NO: 7576 - RNA, 17 nt, synthetic construct
  misc_feature 1..17: note = Synthetic
  source 1..17: mol_type = other RNA
ctgcgacgcccacggcg

SEQ ID NO: 7577 - RNA, 17 nt, synthetic construct
  misc_feature 1..17: note = Synthetic
  source 1..17: mol_type = other RNA
tgcgacgcccacggcgt

SEQ ID NO: 7578 - RNA, 17 nt, synthetic construct
  misc_feature 1..17: note = Synthetic
  source 1..17: mol_type = other RNA
gcgacgcccacggcgtc

SEQ ID NO: 7579 - RNA, 17 nt, synthetic construct
  misc_feature 1..17: note = Synthetic
  source 1..17: mol_type = other RNA
acggcgtccgccgcggg

SEQ ID NO: 7580 - RNA, 17 nt, synthetic construct
  misc_feature 1..17: note = Synthetic
  source 1..17: mol_type = other RNA
ccgcgggcaggctgggc

SEQ ID NO: 7581 - RNA, 17 nt, synthetic construct
  misc_feature 1..17: note = Synthetic
  source 1..17: mol_type = other RNA
cgggcaggctgggcttt

SEQ ID NO: 7582 - RNA, 17 nt, synthetic construct
  misc_feature 1..17: note = Synthetic
  source 1..17: mol_type = other RNA
ccttgcccccgtgctgc

SEQ ID NO: 7583 - RNA, 17 nt, synthetic construct
  misc_feature 1..17: note = Synthetic
  source 1..17: mol_type = other RNA
ccgtgctgctcggggga

SEQ ID NO: 7584 - RNA, 17 nt, synthetic construct
  misc_feature 1..17: note = Synthetic
  source 1..17: mol_type = other RNA
cgtgctgctcgggggag

SEQ ID NO: 7585 - RNA, 20 nt, synthetic construct
  misc_feature 1..20: note = Synthetic
  source 1..20: mol_type = other RNA
cagaaccaatcgcaaccctg

SEQ ID NO: 7586 - RNA, 20 nt, synthetic construct
  misc_feature 1..20: note = Synthetic
  source 1..20: mol_type = other RNA
ccacccggaggccagcggac

SEQ ID NO: 7587 - RNA, 20 nt, synthetic construct
  misc_feature 1..20: note = Synthetic
  source 1..20: mol_type = other RNA
caaccctgggggaccccgcc

SEQ ID NO: 7588 - RNA, 20 nt, synthetic construct
  misc_feature 1..20: note = Synthetic
  source 1..20: mol_type = other RNA
ctgggggaccccgccccggg

SEQ ID NO: 7589 - RNA, 20 nt, synthetic construct
  misc_feature 1..20: note = Synthetic
  source 1..20: mol_type = other RNA
ggaccccgccccggggcggg

SEQ ID NO: 7590 - RNA, 20 nt, synthetic construct
  misc_feature 1..20: note = Synthetic
  source 1..20: mol_type = other RNA
cccgccccggggcggggtgg

SEQ ID NO: 7591 - RNA, 20 nt, synthetic construct
  misc_feature 1..20: note = Synthetic
  source 1..20: mol_type = other RNA
cggccccggcgccccccatg

SEQ ID NO: 7592 - RNA, 20 nt, synthetic construct
  misc_feature 1..20: note = Synthetic
  source 1..20: mol_type = other RNA
tggcgaggcgtggcgcggca

SEQ ID NO: 7593 - RNA, 20 nt, synthetic construct
  misc_feature 1..20: note = Synthetic
  source 1..20: mol_type = other RNA
cagtgagcagcccgacccac

SEQ ID NO: 7594 - RNA, 20 nt, synthetic construct
  misc_feature 1..20: note = Synthetic
  source 1..20: mol_type = other RNA
cccgacccacccggaggcca

SEQ ID NO: 7595 - RNA, 20 nt, synthetic construct
  misc_feature 1..20: note = Synthetic
  source 1..20: mol_type = other RNA
tggcgattgcccccccgccc

SEQ ID NO: 7596 - RNA, 20 nt, synthetic construct
  misc_feature 1..20: note = Synthetic
  source 1..20: mol_type = other RNA
cggacccccgcgccccggcc

SEQ ID NO: 7597 - RNA, 20 nt, synthetic construct
  misc_feature 1..20: note = Synthetic
  source 1..20: mol_type = other RNA
ccccgcgccccggccccgga

SEQ ID NO: 7598 - RNA, 20 nt, synthetic construct
  misc_feature 1..20: note = Synthetic
  source 1..20: mol_type = other RNA
gttggtcctgcgctccatct

SEQ ID NO: 7599 - RNA, 20 nt, synthetic construct
  misc_feature 1..20: note = Synthetic
  source 1..20: mol_type = other RNA
cgcggcggtcgaccgcatca

SEQ ID NO: 7600 - RNA, 20 nt, synthetic construct
  misc_feature 1..20: note = Synthetic
  source 1..20: mol_type = other RNA
cggcggtcgaccgcatcagc

SEQ ID NO: 7601 - RNA, 20 nt, synthetic construct
  misc_feature 1..20: note = Synthetic
  source 1..20: mol_type = other RNA
acaggtcatgcacgacccct

SEQ ID NO: 7602 - RNA, 20 nt, synthetic construct
  misc_feature 1..20: note = Synthetic
  source 1..20: mol_type = other RNA
gggggcagccgtttcccgcc

SEQ ID NO: 7603 - RNA, 20 nt, synthetic construct
  misc_feature 1..20: note = Synthetic
  source 1..20: mol_type = other RNA
tttcccgccgcgaatagccc

SEQ ID NO: 7604 - RNA, 20 nt, synthetic construct
  misc_feature 1..20: note = Synthetic
  source 1..20: mol_type = other RNA
gcccctgggccccggtgctg

SEQ ID NO: 7605 - RNA, 20 nt, synthetic construct
  misc_feature 1..20: note = Synthetic
  source 1..20: mol_type = other RNA
ggccccggtgctggcgggcc

SEQ ID NO: 7606 - RNA, 20 nt, synthetic construct
  misc_feature 1..20: note = Synthetic
  source 1..20: mol_type = other RNA
cccggtgctggcgggccaag

SEQ ID NO: 7607 - RNA, 20 nt, synthetic construct
  misc_feature 1..20: note = Synthetic
  source 1..20: mol_type = other RNA
ccaaggagggccctttgacg

SEQ ID NO: 7608 - RNA, 20 nt, synthetic construct
  misc_feature 1..20: note = Synthetic
  source 1..20: mol_type = other RNA
ccctttgacgccgagaccag

SEQ ID NO: 7609 - RNA, 20 nt, synthetic construct
  misc_feature 1..20: note = Synthetic
  source 1..20: mol_type = other RNA
gccgagaccagacgggtctc

SEQ ID NO: 7610 - RNA, 20 nt, synthetic construct
  misc_feature 1..20: note = Synthetic
  source 1..20: mol_type = other RNA
aaaccttggtcgcccacggc

SEQ ID NO: 7611 - RNA, 20 nt, synthetic construct
  misc_feature 1..20: note = Synthetic
  source 1..20: mol_type = other RNA
cgcacttttgccggcaatcc

SEQ ID NO: 7612 - RNA, 20 nt, synthetic construct
  misc_feature 1..20: note = Synthetic
  source 1..20: mol_type = other RNA
gcgcgactgcgtgctgcgcc

SEQ ID NO: 7613 - RNA, 20 nt, synthetic construct
  misc_feature 1..20: note = Synthetic
  source 1..20: mol_type = other RNA
gctgcgccaagaaaatttca

SEQ ID NO: 7614 - RNA, 20 nt, synthetic construct
  misc_feature 1..20: note = Synthetic
  source 1..20: mol_type = other RNA
cgaggcgctggcctccgccg

SEQ ID NO: 7615 - RNA, 20 nt, synthetic construct
  misc_feature 1..20: note = Synthetic
  source 1..20: mol_type = other RNA
acaacctgccgctgcgcccc

SEQ ID NO: 7616 - RNA, 20 nt, synthetic construct
  misc_feature 1..20: note = Synthetic
  source 1..20: mol_type = other RNA
gcgcccccaggaccccatta

SEQ ID NO: 7617 - RNA, 20 nt, synthetic construct
  misc_feature 1..20: note = Synthetic
  source 1..20: mol_type = other RNA
tcgggacgaccgcggctgtg

SEQ ID NO: 7618 - RNA, 20 nt, synthetic construct
  misc_feature 1..20: note = Synthetic
  source 1..20: mol_type = other RNA
ggccctttctccagtgctac

SEQ ID NO: 7619 - RNA, 20 nt, synthetic construct
  misc_feature 1..20: note = Synthetic
  source 1..20: mol_type = other RNA
ctccagtgctacctgaaggc

SEQ ID NO: 7620 - RNA, 20 nt, synthetic construct
  misc_feature 1..20: note = Synthetic
  source 1..20: mol_type = other RNA
aggcgcgaggcctgtgcggc

SEQ ID NO: 7621 - RNA, 20 nt, synthetic construct
  misc_feature 1..20: note = Synthetic
  source 1..20: mol_type = other RNA
gcgaggcctgtgcggcctgg

SEQ ID NO: 7622 - RNA, 20 nt, synthetic construct
  misc_feature 1..20: note = Synthetic
  source 1..20: mol_type = other RNA
tgtgttcgcggcggcgtctg

SEQ ID NO: 7623 - RNA, 20 nt, synthetic construct
  misc_feature 1..20: note = Synthetic
  source 1..20: mol_type = other RNA
ggcggcgtctggcggacatt

SEQ ID NO: 7624 - RNA, 20 nt, synthetic construct
  misc_feature 1..20: note = Synthetic
  source 1..20: mol_type = other RNA
ggccaggctcgccaaccgcg

SEQ ID NO: 7625 - RNA, 20 nt, synthetic construct
  misc_feature 1..20: note = Synthetic
  source 1..20: mol_type = other RNA
accgcgtcgagcgtggcgtc

SEQ ID NO: 7626 - RNA, 20 nt, synthetic construct
  misc_feature 1..20: note = Synthetic
  source 1..20: mol_type = other RNA
cgactacgcgacccttggtg

SEQ ID NO: 7627 - RNA, 20 nt, synthetic construct
  misc_feature 1..20: note = Synthetic
  source 1..20: mol_type = other RNA
cgcgacccttggtgtcgggg

SEQ ID NO: 7628 - RNA, 20 nt, synthetic construct
  misc_feature 1..20: note = Synthetic
  source 1..20: mol_type = other RNA
gacccttggtgtcggggtcg

SEQ ID NO: 7629 - RNA, 20 nt, synthetic construct
  misc_feature 1..20: note = Synthetic
  source 1..20: mol_type = other RNA
cccttggtgtcggggtcgga

SEQ ID NO: 7630 - RNA, 20 nt, synthetic construct
  misc_feature 1..20: note = Synthetic
  source 1..20: mol_type = other RNA
gaagatgcatttctacctcc

SEQ ID NO: 7631 - RNA, 20 nt, synthetic construct
  misc_feature 1..20: note = Synthetic
  source 1..20: mol_type = other RNA
acctccccggggcctgcatg

SEQ ID NO: 7632 - RNA, 20 nt, synthetic construct
  misc_feature 1..20: note = Synthetic
  source 1..20: mol_type = other RNA
ggcctgcatggcgggcctga

SEQ ID NO: 7633 - RNA, 20 nt, synthetic construct
  misc_feature 1..20: note = Synthetic
  source 1..20: mol_type = other RNA
aaatcctagacacgcaccgc

SEQ ID NO: 7634 - RNA, 20 nt, synthetic construct
  misc_feature 1..20: note = Synthetic
  source 1..20: mol_type = other RNA
acacgcaccgccaggagtgt

SEQ ID NO: 7635 - RNA, 20 nt, synthetic construct
  misc_feature 1..20: note = Synthetic
  source 1..20: mol_type = other RNA
ggagtgttcgagtcgtgtct

SEQ ID NO: 7636 - RNA, 20 nt, synthetic construct
  misc_feature 1..20: note = Synthetic
  source 1..20: mol_type = other RNA
acactcctggcggtgcgtgt

SEQ ID NO: 7637 - RNA, 20 nt, synthetic construct
  misc_feature 1..20: note = Synthetic
  source 1..20: mol_type = other RNA
gggaggtagaaatgcatctt

SEQ ID NO: 7638 - RNA, 20 nt, synthetic construct
  misc_feature 1..20: note = Synthetic
  source 1..20: mol_type = other RNA
acaccaagggtcgcgtagtc

SEQ ID NO: 7639 - RNA, 20 nt, synthetic construct
  misc_feature 1..20: note = Synthetic
  source 1..20: mol_type = other RNA
ggcggtgcgtgtctaggatt

SEQ ID NO: 7640 - RNA, 20 nt, synthetic construct
  misc_feature 1..20: note = Synthetic
  source 1..20: mol_type = other RNA
gcggtgcgtgtctaggattt

SEQ ID NO: 7641 - RNA, 20 nt, synthetic construct
  misc_feature 1..20: note = Synthetic
  source 1..20: mol_type = other RNA
tcaggcccgccatgcaggcc

SEQ ID NO: 7642 - RNA, 20 nt, synthetic construct
  misc_feature 1..20: note = Synthetic
  source 1..20: mol_type = other RNA
catgcaggccccggggaggt

SEQ ID NO: 7643 - RNA, 20 nt, synthetic construct
  misc_feature 1..20: note = Synthetic
  source 1..20: mol_type = other RNA
ggaggtagaaatgcatcttc

SEQ ID NO: 7644 - RNA, 20 nt, synthetic construct
  misc_feature 1..20: note = Synthetic
  source 1..20: mol_type = other RNA
tccgaccccgacaccaaggg

SEQ ID NO: 7645 - RNA, 20 nt, synthetic construct
  misc_feature 1..20: note = Synthetic
  source 1..20: mol_type = other RNA
cgaccccgacaccaagggtc

SEQ ID NO: 7646 - RNA, 20 nt, synthetic construct
  misc_feature 1..20: note = Synthetic
  source 1..20: mol_type = other RNA
accccgacaccaagggtcgc

SEQ ID NO: 7647 - RNA, 20 nt, synthetic construct
  misc_feature 1..20: note = Synthetic
  source 1..20: mol_type = other RNA
ccccgacaccaagggtcgcg

SEQ ID NO: 7648 - RNA, 20 nt, synthetic construct
  misc_feature 1..20: note = Synthetic
  source 1..20: mol_type = other RNA
caccaagggtcgcgtagtcg

SEQ ID NO: 7649 - RNA, 20 nt, synthetic construct
  misc_feature 1..20: note = Synthetic
  source 1..20: mol_type = other RNA
cgacgccacgctcgacgcgg

SEQ ID NO: 7650 - RNA, 20 nt, synthetic construct
  misc_feature 1..20: note = Synthetic
  source 1..20: mol_type = other RNA
cgcggttggcgagcctggcc

SEQ ID NO: 7651 - RNA, 20 nt, synthetic construct
  misc_feature 1..20: note = Synthetic
  source 1..20: mol_type = other RNA
aatgtccgccagacgccgcc

SEQ ID NO: 7652 - RNA, 20 nt, synthetic construct
  misc_feature 1..20: note = Synthetic
  source 1..20: mol_type = other RNA
cagacgccgccgcgaacaca

SEQ ID NO: 7653 - RNA, 20 nt, synthetic construct
  misc_feature 1..20: note = Synthetic
  source 1..20: mol_type = other RNA
ccaggccgcacaggcctcgc

SEQ ID NO: 7654 - RNA, 20 nt, synthetic construct
  misc_feature 1..20: note = Synthetic
  source 1..20: mol_type = other RNA
gccgcacaggcctcgcgcct

SEQ ID NO: 7655 - RNA, 20 nt, synthetic construct
  misc_feature 1..20: note = Synthetic
  source 1..20: mol_type = other RNA
gccttcaggtagcactggag

SEQ ID NO: 7656 - RNA, 20 nt, synthetic construct
  misc_feature 1..20: note = Synthetic
  source 1..20: mol_type = other RNA
gtagcactggagaaagggcc

SEQ ID NO: 7657 - RNA, 20 nt, synthetic construct
  misc_feature 1..20: note = Synthetic
  source 1..20: mol_type = other RNA
cacagccgcggtcgtcccga

SEQ ID NO: 7658 - RNA, 20 nt, synthetic construct
  misc_feature 1..20: note = Synthetic
  source 1..20: mol_type = other RNA
ataatggggtcctgggggcg

SEQ ID NO: 7659 - RNA, 20 nt, synthetic construct
  misc_feature 1..20: note = Synthetic
  source 1..20: mol_type = other RNA
taatggggtcctgggggcgc

SEQ ID NO: 7660 - RNA, 20 nt, synthetic construct
  misc_feature 1..20: note = Synthetic
  source 1..20: mol_type = other RNA
ggggcgcagcggcaggttgt

SEQ ID NO: 7661 - RNA, 20 nt, synthetic construct
  misc_feature 1..20: note = Synthetic
  source 1..20: mol_type = other RNA
cggcggaggccagcgcctcg

SEQ ID NO: 7662 - RNA, 20 nt, synthetic construct
  misc_feature 1..20: note = Synthetic
  source 1..20: mol_type = other RNA
tgaaattttcttggcgcagc

SEQ ID NO: 7663 - RNA, 20 nt, synthetic construct
  misc_feature 1..20: note = Synthetic
  source 1..20: mol_type = other RNA
ggcgcagcacgcagtcgcgc

SEQ ID NO: 7664 - RNA, 20 nt, synthetic construct
  misc_feature 1..20: note = Synthetic
  source 1..20: mol_type = other RNA
ggattgccggcaaaagtgcg

SEQ ID NO: 7665 - RNA, 20 nt, synthetic construct
  misc_feature 1..20: note = Synthetic
  source 1..20: mol_type = other RNA
gccgtgggcgaccaaggttt

SEQ ID NO: 7666 - RNA, 20 nt, synthetic construct
  misc_feature 1..20: note = Synthetic
  source 1..20: mol_type = other RNA
aggagacccgtctggtctcg

SEQ ID NO: 7667 - RNA, 20 nt, synthetic construct
  misc_feature 1..20: note = Synthetic
  source 1..20: mol_type = other RNA
ggagacccgtctggtctcgg

SEQ ID NO: 7668 - RNA, 20 nt, synthetic construct
  misc_feature 1..20: note = Synthetic
  source 1..20: mol_type = other RNA
gagacccgtctggtctcggc

SEQ ID NO: 7669 - RNA, 20 nt, synthetic construct
  misc_feature 1..20: note = Synthetic
  source 1..20: mol_type = other RNA
ctggtctcggcgtcaaaggg

SEQ ID NO: 7670 - RNA, 20 nt, synthetic construct
  misc_feature 1..20: note = Synthetic
  source 1..20: mol_type = other RNA
cgtcaaagggccctccttgg

SEQ ID NO: 7671 - RNA, 20 nt, synthetic construct
  misc_feature 1..20: note = Synthetic
  source 1..20: mol_type = other RNA
cttggcccgccagcaccggg

SEQ ID NO: 7672 - RNA, 20 nt, synthetic construct
  misc_feature 1..20: note = Synthetic
  source 1..20: mol_type = other RNA
tggcccgccagcaccggggc

SEQ ID NO: 7673 - RNA, 20 nt, synthetic construct
  misc_feature 1..20: note = Synthetic
  source 1..20: mol_type = other RNA
ggcccgccagcaccggggcc

SEQ ID NO: 7674 - RNA, 20 nt, synthetic construct
  misc_feature 1..20: note = Synthetic
  source 1..20: mol_type = other RNA
cagcaccggggcccaggggc

SEQ ID NO: 7675 - RNA, 20 nt, synthetic construct
  misc_feature 1..20: note = Synthetic
  source 1..20: mol_type = other RNA
ggcgggaaacggctgccccc

SEQ ID NO: 7676 - RNA, 20 nt, synthetic construct
  misc_feature 1..20: note = Synthetic
  source 1..20: mol_type = other RNA
caaaggggtcgtgcatgacc

SEQ ID NO: 7677 - RNA, 20 nt, synthetic construct
  misc_feature 1..20: note = Synthetic
  source 1..20: mol_type = other RNA
aaaggggtcgtgcatgacct

SEQ ID NO: 7678 - RNA, 20 nt, synthetic construct
  misc_feature 1..20: note = Synthetic
  source 1..20: mol_type = other RNA
aaggggtcgtgcatgacctg

SEQ ID NO: 7679 - RNA, 20 nt, synthetic construct
  misc_feature 1..20: note = Synthetic
  source 1..20: mol_type = other RNA
aggggtcgtgcatgacctgt

SEQ ID NO: 7680 - RNA, 20 nt, synthetic construct
  misc_feature 1..20: note = Synthetic
  source 1..20: mol_type = other RNA
gctgatgcggtcgaccgccg

SEQ ID NO: 7681 - RNA, 20 nt, synthetic construct
  misc_feature 1..20: note = Synthetic
  source 1..20: mol_type = other RNA
tgatgcggtcgaccgccgcg

SEQ ID NO: 7682 - RNA, 20 nt, synthetic construct
  misc_feature 1..20: note = Synthetic
  source 1..20: mol_type = other RNA
agatggagcgcaggaccaac

SEQ ID NO: 7683 - RNA, 20 nt, synthetic construct
  misc_feature 1..20: note = Synthetic
  source 1..20: mol_type = other RNA
tccggggccggggcgcgggg

SEQ ID NO: 7684 - RNA, 20 nt, synthetic construct
  misc_feature 1..20: note = Synthetic
  source 1..20: mol_type = other RNA
gggccggggcgcgggggtcc

SEQ ID NO: 7685 - RNA, 20 nt, synthetic construct
  misc_feature 1..20: note = Synthetic
  source 1..20: mol_type = other RNA
gggcgggggggcaatcgcca

SEQ ID NO: 7686 - RNA, 20 nt, synthetic construct
  misc_feature 1..20: note = Synthetic
  source 1..20: mol_type = other RNA
tgtccgctggcctccgggtg

SEQ ID NO: 7687 - RNA, 20 nt, synthetic construct
  misc_feature 1..20: note = Synthetic
  source 1..20: mol_type = other RNA
gtccgctggcctccgggtgg

SEQ ID NO: 7688 - RNA, 20 nt, synthetic construct
  misc_feature 1..20: note = Synthetic
  source 1..20: mol_type = other RNA
tggcctccgggtgggtcggg

SEQ ID NO: 7689 - RNA, 20 nt, synthetic construct
  misc_feature 1..20: note = Synthetic
  source 1..20: mol_type = other RNA
ggtgggtcgggctgctcact

SEQ ID NO: 7690 - RNA, 20 nt, synthetic construct
  misc_feature 1..20: note = Synthetic
  source 1..20: mol_type = other RNA
gtgggtcgggctgctcactg

SEQ ID NO: 7691 - RNA, 20 nt, synthetic construct
  misc_feature 1..20: note = Synthetic
  source 1..20: mol_type = other RNA
catggggggcgccggggccg

SEQ ID NO: 7692 - RNA, 20 nt, synthetic construct
  misc_feature 1..20: note = Synthetic
  source 1..20: mol_type = other RNA
ccaccccgccccggggcggg

SEQ ID NO: 7693 - RNA, 20 nt, synthetic construct
  misc_feature 1..20: note = Synthetic
  source 1..20: mol_type = other RNA
cccgccccggggcggggtcc

SEQ ID NO: 7694 - RNA, 20 nt, synthetic construct
  misc_feature 1..20: note = Synthetic
  source 1..20: mol_type = other RNA
cccggggcggggtcccccag

SEQ ID NO: 7695 - RNA, 20 nt, synthetic construct
  misc_feature 1..20: note = Synthetic
  source 1..20: mol_type = other RNA
gggcggggtcccccagggtt

SEQ ID NO: 7696 - RNA, 20 nt, synthetic construct
  misc_feature 1..20: note = Synthetic
  source 1..20: mol_type = other RNA
ggcggggtcccccagggttg

SEQ ID NO: 7697 - RNA, 20 nt, synthetic construct
  misc_feature 1..20: note = Synthetic
  source 1..20: mol_type = other RNA
cagggttgcgattggttctg

SEQ ID NO: 7698 - RNA, 17 nt, synthetic construct
  misc_feature 1..17: note = Synthetic
  source 1..17: mol_type = other RNA
cccggaggccagcggac

SEQ ID NO: 7699 - RNA, 17 nt, synthetic construct
  misc_feature 1..17: note = Synthetic
  source 1..17: mol_type = other RNA
ccctgggggaccccgcc

SEQ ID NO: 7700 - RNA, 17 nt, synthetic construct
  misc_feature 1..17: note = Synthetic
  source 1..17: mol_type = other RNA
ggggaccccgccccggg

SEQ ID NO: 7701 - RNA, 17 nt, synthetic construct
  misc_feature 1..17: note = Synthetic
  source 1..17: mol_type = other RNA
ccccgccccggggcggg

SEQ ID NO: 7702 - RNA, 17 nt, synthetic construct
  misc_feature 1..17: note = Synthetic
  source 1..17: mol_type = other RNA
gccccggggcggggtgg

SEQ ID NO: 7703 - RNA, 17 nt, synthetic construct
  misc_feature 1..17: note = Synthetic
  source 1..17: mol_type = other RNA
ccccggcgccccccatg

SEQ ID NO: 7704 - RNA, 17 nt, synthetic construct
  misc_feature 1..17: note = Synthetic
  source 1..17: mol_type = other RNA
cgaggcgtggcgcggca

SEQ ID NO: 7705 - RNA, 17 nt, synthetic construct
  misc_feature 1..17: note = Synthetic
  source 1..17: mol_type = other RNA
tgagcagcccgacccac

SEQ ID NO: 7706 - RNA, 17 nt, synthetic construct
  misc_feature 1..17: note = Synthetic
  source 1..17: mol_type = other RNA
gacccacccggaggcca

SEQ ID NO: 7707 - RNA, 17 nt, synthetic construct
  misc_feature 1..17: note = Synthetic
  source 1..17: mol_type = other RNA
cgattgcccccccgccc

SEQ ID NO: 7708 - RNA, 17 nt, synthetic construct
  misc_feature 1..17: note = Synthetic
  source 1..17: mol_type = other RNA
acccccgcgccccggcc

SEQ ID NO: 7709 - RNA, 17 nt, synthetic construct
  misc_feature 1..17: note = Synthetic
  source 1..17: mol_type = other RNA
cgcgccccggccccgga

SEQ ID NO: 7710 - RNA, 17 nt, synthetic construct
  misc_feature 1..17: note = Synthetic
  source 1..17: mol_type = other RNA
ggtcctgcgctccatct

SEQ ID NO: 7711 - RNA, 17 nt, synthetic construct
  misc_feature 1..17: note = Synthetic
  source 1..17: mol_type = other RNA
ggcggtcgaccgcatca

SEQ ID NO: 7712 - RNA, 17 nt, synthetic construct
  misc_feature 1..17: note = Synthetic
  source 1..17: mol_type = other RNA
cggtcgaccgcatcagc

SEQ ID NO: 7713 - RNA, 17 nt, synthetic construct
  misc_feature 1..17: note = Synthetic
  source 1..17: mol_type = other RNA
ggtcatgcacgacccct

SEQ ID NO: 7714 - RNA, 17 nt, synthetic construct
  misc_feature 1..17: note = Synthetic
  source 1..17: mol_type = other RNA
ggcagccgtttcccgcc

SEQ ID NO: 7715 - RNA, 17 nt, synthetic construct
  misc_feature 1..17: note = Synthetic
  source 1..17: mol_type = other RNA
cccgccgcgaatagccc

SEQ ID NO: 7716 - RNA, 17 nt, synthetic construct
  misc_feature 1..17: note = Synthetic
  source 1..17: mol_type = other RNA
cctgggccccggtgctg

SEQ ID NO: 7717 - RNA, 17 nt, synthetic construct
  misc_feature 1..17: note = Synthetic
  source 1..17: mol_type = other RNA
cccggtgctggcgggcc

SEQ ID NO: 7718 - RNA, 17 nt, synthetic construct
  misc_feature 1..17: note = Synthetic
  source 1..17: mol_type = other RNA
ggtgctggcgggccaag

SEQ ID NO: 7719 - RNA, 17 nt, synthetic construct
  misc_feature 1..17: note = Synthetic
  source 1..17: mol_type = other RNA
aggagggccctttgacg

SEQ ID NO: 7720 - RNA, 17 nt, synthetic construct
  misc_feature 1..17: note = Synthetic
  source 1..17: mol_type = other RNA
tttgacgccgagaccag

SEQ ID NO: 7721 - RNA, 17 nt, synthetic construct
  misc_feature 1..17: note = Synthetic
  source 1..17: mol_type = other RNA
gagaccagacgggtctc

SEQ ID NO: 7722 - RNA, 17 nt, synthetic construct
  misc_feature 1..17: note = Synthetic
  source 1..17: mol_type = other RNA
ccttggtcgcccacggc

SEQ ID NO: 7723 - RNA, 17 nt, synthetic construct
  misc_feature 1..17: note = Synthetic
  source 1..17: mol_type = other RNA
acttttgccggcaatcc

SEQ ID NO: 7724 - RNA, 17 nt, synthetic construct
  misc_feature 1..17: note = Synthetic
  source 1..17: mol_type = other RNA
cgactgcgtgctgcgcc

SEQ ID NO: 7725 - RNA, 17 nt, synthetic construct
  misc_feature 1..17: note = Synthetic
  source 1..17: mol_type = other RNA
gcgccaagaaaatttca

SEQ ID NO: 7726 - RNA, 17 nt, synthetic construct
  misc_feature 1..17: note = Synthetic
  source 1..17: mol_type = other RNA
ggcgctggcctccgccg

SEQ ID NO: 7727 - RNA, 17 nt, synthetic construct
  misc_feature 1..17: note = Synthetic
  source 1..17: mol_type = other RNA
acctgccgctgcgcccc

SEQ ID NO: 7728 - RNA, 17 nt, synthetic construct
  misc_feature 1..17: note = Synthetic
  source 1..17: mol_type = other RNA
cccccaggaccccatta

SEQ ID NO: 7729 - RNA, 17 nt, synthetic construct
  misc_feature 1..17: note = Synthetic
  source 1..17: mol_type = other RNA
ggacgaccgcggctgtg

SEQ ID NO: 7730 - RNA, 17 nt, synthetic construct
  misc_feature 1..17: note = Synthetic
  source 1..17: mol_type = other RNA
cctttctccagtgctac

SEQ ID NO: 7731 - RNA, 17 nt, synthetic construct
  misc_feature 1..17: note = Synthetic
  source 1..17: mol_type = other RNA
cagtgctacctgaaggc

SEQ ID NO: 7732 - RNA, 17 nt, synthetic construct
  misc_feature 1..17: note = Synthetic
  source 1..17: mol_type = other RNA
cgcgaggcctgtgcggc

SEQ ID NO: 7733 - RNA, 17 nt, synthetic construct
  misc_feature 1..17: note = Synthetic
  source 1..17: mol_type = other RNA
aggcctgtgcggcctgg

SEQ ID NO: 7734 - RNA, 17 nt, synthetic construct
  misc_feature 1..17: note = Synthetic
  source 1..17: mol_type = other RNA
gttcgcggcggcgtctg

SEQ ID NO: 7735 - RNA, 17 nt, synthetic construct
  misc_feature 1..17: note = Synthetic
  source 1..17: mol_type = other RNA
ggcgtctggcggacatt

SEQ ID NO: 7736 - RNA, 17 nt, synthetic construct
  misc_feature 1..17: note = Synthetic
  source 1..17: mol_type = other RNA
caggctcgccaaccgcg

SEQ ID NO: 7737 - RNA, 17 nt, synthetic construct
  misc_feature 1..17: note = Synthetic
  source 1..17: mol_type = other RNA
gcgtcgagcgtggcgtc

SEQ ID NO: 7738 - RNA, 17 nt, synthetic construct
  misc_feature 1..17: note = Synthetic
  source 1..17: mol_type = other RNA
ctacgcgacccttggtg

SEQ ID NO: 7739 - RNA, 17 nt, synthetic construct
  misc_feature 1..17: note = Synthetic
  source 1..17: mol_type = other RNA
gacccttggtgtcgggg

SEQ ID NO: 7740 - RNA, 17 nt, synthetic construct
  misc_feature 1..17: note = Synthetic
  source 1..17: mol_type = other RNA
ccttggtgtcggggtcg

SEQ ID NO: 7741 - RNA, 17 nt, synthetic construct
  misc_feature 1..17: note = Synthetic
  source 1..17: mol_type = other RNA
ttggtgtcggggtcgga

SEQ ID NO: 7742 - RNA, 17 nt, synthetic construct
  misc_feature 1..17: note = Synthetic
  source 1..17: mol_type = other RNA
gatgcatttctacctcc

SEQ ID NO: 7743 - RNA, 17 nt, synthetic construct
  misc_feature 1..17: note = Synthetic
  source 1..17: mol_type = other RNA
tccccggggcctgcatg

SEQ ID NO: 7744 - RNA, 17 nt, synthetic construct
  misc_feature 1..17: note = Synthetic
  source 1..17: mol_type = other RNA
ctgcatggcgggcctga

SEQ ID NO: 7745 - RNA, 17 nt, synthetic construct
  misc_feature 1..17: note = Synthetic
  source 1..17: mol_type = other RNA
tcctagacacgcaccgc

SEQ ID NO: 7746 - RNA, 17 nt, synthetic construct
  misc_feature 1..17: note = Synthetic
  source 1..17: mol_type = other RNA
cgcaccgccaggagtgt

SEQ ID NO: 7747 - RNA, 17 nt, synthetic construct
  misc_feature 1..17: note = Synthetic
  source 1..17: mol_type = other RNA
gtgttcgagtcgtgtct

SEQ ID NO: 7748 - RNA, 17 nt, synthetic construct
  misc_feature 1..17: note = Synthetic
  source 1..17: mol_type = other RNA
acactcctggcggtgcg

SEQ ID NO: 7749 - RNA, 17 nt, synthetic construct
  misc_feature 1..17: note = Synthetic
  source 1..17: mol_type = other RNA
gggaggtagaaatgcat

SEQ ID NO: 7750 - RNA, 17 nt, synthetic construct
  misc_feature 1..17: note = Synthetic
  source 1..17: mol_type = other RNA
acaccaagggtcgcgta

SEQ ID NO: 7751 - RNA, 17 nt, synthetic construct
  misc_feature 1..17: note = Synthetic
  source 1..17: mol_type = other RNA
agacacgactcgaacac

SEQ ID NO: 7752 - RNA, 17 nt, synthetic construct
  misc_feature 1..17: note = Synthetic
  source 1..17: mol_type = other RNA
ggcggtgcgtgtctagg

SEQ ID NO: 7753 - RNA, 17 nt, synthetic construct
  misc_feature 1..17: note = Synthetic
  source 1..17: mol_type = other RNA
gcggtgcgtgtctagga

SEQ ID NO: 7754 - RNA, 17 nt, synthetic construct
  misc_feature 1..17: note = Synthetic
  source 1..17: mol_type = other RNA
tcaggcccgccatgcag

SEQ ID NO: 7755 - RNA, 17 nt, synthetic construct
  misc_feature 1..17: note = Synthetic
  source 1..17: mol_type = other RNA
catgcaggccccgggga

SEQ ID NO: 7756 - RNA, 17 nt, synthetic construct
  misc_feature 1..17: note = Synthetic
  source 1..17: mol_type = other RNA
ggaggtagaaatgcatc

SEQ ID NO: 7757 - RNA, 17 nt, synthetic construct
  misc_feature 1..17: note = Synthetic
  source 1..17: mol_type = other RNA
cgaccccgacaccaagg

SEQ ID NO: 7758 - RNA, 17 nt, synthetic construct
  misc_feature 1..17: note = Synthetic
  source 1..17: mol_type = other RNA
accccgacaccaagggt

SEQ ID NO: 7759 - RNA, 17 nt, synthetic construct
  misc_feature 1..17: note = Synthetic
  source 1..17: mol_type = other RNA
ccccgacaccaagggtc

SEQ ID NO: 7760 - RNA, 17 nt, synthetic construct
  misc_feature 1..17: note = Synthetic
  source 1..17: mol_type = other RNA
caccaagggtcgcgtag

SEQ ID NO: 7761 - RNA, 17 nt, synthetic construct
  misc_feature 1..17: note = Synthetic
  source 1..17: mol_type = other RNA
gacgccacgctcgacgc

SEQ ID NO: 7762 - RNA, 17 nt, synthetic construct
  misc_feature 1..17: note = Synthetic
  source 1..17: mol_type = other RNA
cgcggttggcgagcctg

SEQ ID NO: 7763 - RNA, 17 nt, synthetic construct
  misc_feature 1..17: note = Synthetic
  source 1..17: mol_type = other RNA
aatgtccgccagacgcc

SEQ ID NO: 7764 - RNA, 17 nt, synthetic construct
  misc_feature 1..17: note = Synthetic
  source 1..17: mol_type = other RNA
cagacgccgccgcgaac

SEQ ID NO: 7765 - RNA, 17 nt, synthetic construct
  misc_feature 1..17: note = Synthetic
  source 1..17: mol_type = other RNA
ccaggccgcacaggcct

SEQ ID NO: 7766 - RNA, 17 nt, synthetic construct
  misc_feature 1..17: note = Synthetic
  source 1..17: mol_type = other RNA
gccgcacaggcctcgcg

SEQ ID NO: 7767 - RNA, 17 nt, synthetic construct
  misc_feature 1..17: note = Synthetic
  source 1..17: mol_type = other RNA
gccttcaggtagcactg

SEQ ID NO: 7768 - RNA, 17 nt, synthetic construct
  misc_feature 1..17: note = Synthetic
  source 1..17: mol_type = other RNA
gtagcactggagaaagg

SEQ ID NO: 7769 - RNA, 17 nt, synthetic construct
  misc_feature 1..17: note = Synthetic
  source 1..17: mol_type = other RNA
cacagccgcggtcgtcc

SEQ ID NO: 7770 - RNA, 17 nt, synthetic construct
  misc_feature 1..17: note = Synthetic
  source 1..17: mol_type = other RNA
ataatggggtcctgggg

SEQ ID NO: 7771 - RNA, 17 nt, synthetic construct
  misc_feature 1..17: note = Synthetic
  source 1..17: mol_type = other RNA
taatggggtcctggggg

SEQ ID NO: 7772 - RNA, 17 nt, synthetic construct
  misc_feature 1..17: note = Synthetic
  source 1..17: mol_type = other RNA
ggggcgcagcggcaggt

SEQ ID NO: 7773 - RNA, 17 nt, synthetic construct
  misc_feature 1..17: note = Synthetic
  source 1..17: mol_type = other RNA
cggcggaggccagcgcc

SEQ ID NO: 7774 - RNA, 17 nt, synthetic construct
  misc_feature 1..17: note = Synthetic
  source 1..17: mol_type = other RNA
tgaaattttcttggcgc

SEQ ID NO: 7775 - RNA, 17 nt, synthetic construct
  misc_feature 1..17: note = Synthetic
  source 1..17: mol_type = other RNA
ggcgcagcacgcagtcg

SEQ ID NO: 7776 - RNA, 17 nt, synthetic construct
  misc_feature 1..17: note = Synthetic
  source 1..17: mol_type = other RNA
ggattgccggcaaaagt

SEQ ID NO: 7777 - RNA, 17 nt, synthetic construct
  misc_feature 1..17: note = Synthetic
  source 1..17: mol_type = other RNA
gccgtgggcgaccaagg

SEQ ID NO: 7778 - RNA, 17 nt, synthetic construct
  misc_feature 1..17: note = Synthetic
  source 1..17: mol_type = other RNA
aggagacccgtctggtc

SEQ ID NO: 7779 - RNA, 17 nt, synthetic construct
  misc_feature 1..17: note = Synthetic
  source 1..17: mol_type = other RNA
gagacccgtctggtctc

SEQ ID NO: 7780 - RNA, 17 nt, synthetic construct
  misc_feature 1..17: note = Synthetic
  source 1..17: mol_type = other RNA
tggcccgccagcaccgg

SEQ ID NO: 7781 - RNA, 17 nt, synthetic construct
  misc_feature 1..17: note = Synthetic
  source 1..17: mol_type = other RNA
ggcccgccagcaccggg

SEQ ID NO: 7782 - RNA, 17 nt, synthetic construct
  misc_feature 1..17: note = Synthetic
  source 1..17: mol_type = other RNA
cagcaccggggcccagg

SEQ ID NO: 7783 - RNA, 17 nt, synthetic construct
  misc_feature 1..17: note = Synthetic
  source 1..17: mol_type = other RNA
gggctattcgcggcggg

SEQ ID NO: 7784 - RNA, 17 nt, synthetic construct
  misc_feature 1..17: note = Synthetic
  source 1..17: mol_type = other RNA
ggcgggaaacggctgcc

SEQ ID NO: 7785 - RNA, 17 nt, synthetic construct
  misc_feature 1..17: note = Synthetic
  source 1..17: mol_type = other RNA
caaaggggtcgtgcatg

SEQ ID NO: 7786 - RNA, 17 nt, synthetic construct
  misc_feature 1..17: note = Synthetic
  source 1..17: mol_type = other RNA
aaaggggtcgtgcatga

SEQ ID NO: 7787 - RNA, 17 nt, synthetic construct
  misc_feature 1..17: note = Synthetic
  source 1..17: mol_type = other RNA
aaggggtcgtgcatgac

SEQ ID NO: 7788 - RNA, 17 nt, synthetic construct
  misc_feature 1..17: note = Synthetic
  source 1..17: mol_type = other RNA
aggggtcgtgcatgacc

SEQ ID NO: 7789 - RNA, 17 nt, synthetic construct
  misc_feature 1..17: note = Synthetic
  source 1..17: mol_type = other RNA
gctgatgcggtcgaccg

SEQ ID NO: 7790 - RNA, 17 nt, synthetic construct
  misc_feature 1..17: note = Synthetic
  source 1..17: mol_type = other RNA
tgatgcggtcgaccgcc

SEQ ID NO: 7791 - RNA, 17 nt, synthetic construct
  misc_feature 1..17: note = Synthetic
  source 1..17: mol_type = other RNA
agatggagcgcaggacc

SEQ ID NO: 7792 - RNA, 17 nt, synthetic construct
  misc_feature 1..17: note = Synthetic
  source 1..17: mol_type = other RNA
gggccggggcgcggggg

SEQ ID NO: 7793 - RNA, 17 nt, synthetic construct
  misc_feature 1..17: note = Synthetic
  source 1..17: mol_type = other RNA
ggccggggcgcgggggt

SEQ ID NO: 7794 - RNA, 17 nt, synthetic construct
  misc_feature 1..17: note = Synthetic
  source 1..17: mol_type = other RNA
gggcgggggggcaatcg

SEQ ID NO: 7795 - RNA, 17 nt, synthetic construct
  misc_feature 1..17: note = Synthetic
  source 1..17: mol_type = other RNA
tgtccgctggcctccgg

SEQ ID NO: 7796 - RNA, 17 nt, synthetic construct
  misc_feature 1..17: note = Synthetic
  source 1..17: mol_type = other RNA
ggtgggtcgggctgctc

SEQ ID NO: 7797 - RNA, 17 nt, synthetic construct
  misc_feature 1..17: note = Synthetic
  source 1..17: mol_type = other RNA
gtgggtcgggctgctca

SEQ ID NO: 7798 - RNA, 17 nt, synthetic construct
  misc_feature 1..17: note = Synthetic
  source 1..17: mol_type = other RNA
tgccgcgccacgcctcg

SEQ ID NO: 7799 - RNA, 17 nt, synthetic construct
  misc_feature 1..17: note = Synthetic
  source 1..17: mol_type = other RNA
catggggggcgccgggg

SEQ ID NO: 7800 - RNA, 17 nt, synthetic construct
  misc_feature 1..17: note = Synthetic
  source 1..17: mol_type = other RNA
ccccggggcggggtccc

SEQ ID NO: 7801 - RNA, 17 nt, synthetic construct
  misc_feature 1..17: note = Synthetic
  source 1..17: mol_type = other RNA
cccggggcggggtcccc

SEQ ID NO: 7802 - RNA, 17 nt, synthetic construct
  misc_feature 1..17: note = Synthetic
  source 1..17: mol_type = other RNA
gggcggggtcccccagg

SEQ ID NO: 7803 - RNA, 17 nt, synthetic construct
  misc_feature 1..17: note = Synthetic
  source 1..17: mol_type = other RNA
ggcggggtcccccaggg

SEQ ID NO: 7804 - RNA, 17 nt, synthetic construct
  misc_feature 1..17: note = Synthetic
  source 1..17: mol_type = other RNA
cagggttgcgattggtt

SEQ ID NO: 7805 - RNA, 17 nt, synthetic construct
  misc_feature 1..17: note = Synthetic
  source 1..17: mol_type = other RNA
agggttgcgattggttc

SEQ ID NO: 7806 - RNA, 17 nt, synthetic construct
  misc_feature 1..17: note = Synthetic
  source 1..17: mol_type = other RNA
gggttgcgattggttct

SEQ ID NO: 7807 - RNA, 17 nt, synthetic construct
  misc_feature 1..17: note = Synthetic
  source 1..17: mol_type = other RNA
ggttgcgattggttctg

SEQ ID NO: 7808 - RNA, 17 nt, synthetic construct
  misc_feature 1..17: note = Synthetic
  source 1..17: mol_type = other RNA
gcgagcgagctgttgga

SEQ ID NO: 7809 - RNA, 17 nt, synthetic construct
  misc_feature 1..17: note = Synthetic
  source 1..17: mol_type = other RNA
gctcgctcgcaacgtcc

SEQ ID NO: 7810 - RNA, 20 nt, synthetic construct
  misc_feature 1..20: note = Synthetic
  source 1..20: mol_type = other RNA
gtcgcggttgggagcggcca

SEQ ID NO: 7811 - RNA, 20 nt, synthetic construct
  misc_feature 1..20: note = Synthetic
  source 1..20: mol_type = other RNA
gttgcgagcgagctgttgga

SEQ ID NO: 7812 - RNA, 20 nt, synthetic construct
  misc_feature 1..20: note = Synthetic
  source 1..20: mol_type = other RNA
ggacgttgcgagcgagctgt

SEQ ID NO: 7813 - RNA, 17 nt, synthetic construct
  misc_feature 1..17: note = Synthetic
  source 1..17: mol_type = other RNA
atctccacgcgacccca

SEQ ID NO: 7814 - RNA, 17 nt, synthetic construct
  misc_feature 1..17: note = Synthetic
  source 1..17: mol_type = other RNA
cgttgcgagcgagctgt

SEQ ID NO: 7815 - RNA, 20 nt, synthetic construct
  misc_feature 1..20: note = Synthetic
  source 1..20: mol_type = other RNA
ccgatctccacgcgacccca

SEQ ID NO: 7816 - RNA, 20 nt, synthetic construct
  misc_feature 1..20: note = Synthetic
  source 1..20: mol_type = other RNA
acagctcgctcgcaacgtcc

SEQ ID NO: 7817 - RNA, 20 nt, synthetic construct
  misc_feature 1..20: note = Synthetic
  source 1..20: mol_type = other RNA
cgcggttgggagcggccatg

SEQ ID NO: 7818 - RNA, 20 nt, synthetic construct
  misc_feature 1..20: note = Synthetic
  source 1..20: mol_type = other RNA
tcgcggttgggagcggccat

SEQ ID NO: 7819 - RNA, 17 nt, synthetic construct
  misc_feature 1..17: note = Synthetic
  source 1..17: mol_type = other RNA
gcggttgggagcggcca

SEQ ID NO: 7820 - RNA, 17 nt, synthetic construct
  misc_feature 1..17: note = Synthetic
  source 1..17: mol_type = other RNA
gcggccatggggtcgcg

SEQ ID NO: 7821 - RNA, 17 nt, synthetic construct
  misc_feature 1..17: note = Synthetic
  source 1..17: mol_type = other RNA
ggttgggagcggccatg

SEQ ID NO: 7822 - RNA, 20 nt, synthetic construct
  misc_feature 1..20: note = Synthetic
  source 1..20: mol_type = other RNA
ggagcggccatggggtcgcg

SEQ ID NO: 7823 - RNA, 17 nt, synthetic construct
  misc_feature 1..17: note = Synthetic
  source 1..17: mol_type = other RNA
cggttgggagcggccat

SEQ ID NO: 7824 - RNA, 17 nt, synthetic construct
  misc_feature 1..17: note = Synthetic
  source 1..17: mol_type = other RNA
tggggtcgcgtggagat

SEQ ID NO: 7825 - RNA, 20 nt, synthetic construct
  misc_feature 1..20: note = Synthetic
  source 1..20: mol_type = other RNA
ccatggggtcgcgtggagat

SEQ ID NO: 7826 - RNA, 17 nt, synthetic construct
  misc_feature 1..17: note = Synthetic
  source 1..17: mol_type = other RNA
ctaccccaaggaagggc

SEQ ID NO: 7827 - RNA, 17 nt, synthetic construct
  misc_feature 1..17: note = Synthetic
  source 1..17: mol_type = other RNA
taccccaaggaagggcg

SEQ ID NO: 7828 - RNA, 17 nt, synthetic construct
  misc_feature 1..17: note = Synthetic
  source 1..17: mol_type = other RNA
actaccccaaggaaggg

SEQ ID NO: 7829 - RNA, 17 nt, synthetic construct
  misc_feature 1..17: note = Synthetic
  source 1..17: mol_type = other RNA
cccaaggaagggcgggg

SEQ ID NO: 7830 - RNA, 17 nt, synthetic construct
  misc_feature 1..17: note = Synthetic
  source 1..17: mol_type = other RNA
cgccccgcccttccttg

SEQ ID NO: 7831 - RNA, 17 nt, synthetic construct
  misc_feature 1..17: note = Synthetic
  source 1..17: mol_type = other RNA
accgccccgcccttcct

SEQ ID NO: 7832 - RNA, 17 nt, synthetic construct
  misc_feature 1..17: note = Synthetic
  source 1..17: mol_type = other RNA
ccgccccgcccttcctt

SEQ ID NO: 7833 - RNA, 20 nt, synthetic construct
  misc_feature 1..20: note = Synthetic
  source 1..20: mol_type = other RNA
cactaccccaaggaagggcg

SEQ ID NO: 7834 - RNA, 20 nt, synthetic construct
  misc_feature 1..20: note = Synthetic
  source 1..20: mol_type = other RNA
taccccaaggaagggcgggg

SEQ ID NO: 7835 - RNA, 20 nt, synthetic construct
  misc_feature 1..20: note = Synthetic
  source 1..20: mol_type = other RNA
aaccgccccgcccttccttg

SEQ ID NO: 7836 - RNA, 20 nt, synthetic construct
  misc_feature 1..20: note = Synthetic
  source 1..20: mol_type = other RNA
taaaccgccccgcccttcct

SEQ ID NO: 7837 - RNA, 20 nt, synthetic construct
  misc_feature 1..20: note = Synthetic
  source 1..20: mol_type = other RNA
aaaccgccccgcccttcctt

SEQ ID NO: 7838 - RNA, 22 nt, synthetic construct
  misc_feature 1..22: note = Synthetic
  source 1..22: mol_type = other RNA
gctccagaaagcgcacgagcga

SEQ ID NO: 7839 - RNA, 24 nt, synthetic construct
  misc_feature 1..24: note = Synthetic
  source 1..24: mol_type = other RNA
gagctccagaaagcgcacgagcga

SEQ ID NO: 7840 - RNA, 23 nt, synthetic construct
  misc_feature 1..23: note = Synthetic
  source 1..23: mol_type = other RNA
gtaattgtgtgtgggttgctcga

SEQ ID NO: 7841 - RNA, 19 nt, synthetic construct
  misc_feature 1..19: note = Synthetic
  source 1..19: mol_type = other RNA
gcggcataccggtatcccg

SEQ ID NO: 7842 - RNA, 22 nt, synthetic construct
  misc_feature 1..22: note = Synthetic
  source 1..22: mol_type = other RNA
gccgcggcataccggtatcccg

SEQ ID NO: 7843 - RNA, 23 nt, synthetic construct
  misc_feature 1..23: note = Synthetic
  source 1..23: mol_type = other RNA
ggccgcggcataccggtatcccg

SEQ ID NO: 7844 - RNA, 18 nt, synthetic construct
  misc_feature 1..18: note = Synthetic
  source 1..18: mol_type = other RNA
gacgttgcgagcgagctg

SEQ ID NO: 7845 - RNA, 19 nt, synthetic construct
  misc_feature 1..19: note = Synthetic
  source 1..19: mol_type = other RNA
ggacgttgcgagcgagctg

SEQ ID NO: 7846 - RNA, 23 nt, synthetic construct
  misc_feature 1..23: note = Synthetic
  source 1..23: mol_type = other RNA
gcctggacgttgcgagcgagctg

SEQ ID NO: 7847 - RNA, 24 nt, synthetic construct
  misc_feature 1..24: note = Synthetic
  source 1..24: mol_type = other RNA
ggcctggacgttgcgagcgagctg

SEQ ID NO: 7848 - RNA, 19 nt, synthetic construct
  misc_feature 1..19: note = Synthetic
  source 1..19: mol_type = other RNA
gccgcggccatggtgccga

SEQ ID NO: 7849 - RNA, 23 nt, synthetic construct
  misc_feature 1..23: note = Synthetic
  source 1..23: mol_type = other RNA
gtatgccgcggccatggtgccga

SEQ ID NO: 7850 - RNA, 24 nt, synthetic construct
  misc_feature 1..24: note = Synthetic
  source 1..24: mol_type = other RNA
ggtatgccgcggccatggtgccga

SEQ ID NO: 7851 - RNA, 23 nt, synthetic construct
  misc_feature 1..23: note = Synthetic
  source 1..23: mol_type = other RNA
gtcgctcgtgcgctttctggagc

SEQ ID NO: 7852 - RNA, 19 nt, synthetic construct
  misc_feature 1..19: note = Synthetic
  source 1..19: mol_type = other RNA
gtcgagttcgacgccctgc

SEQ ID NO: 7853 - RNA, 22 nt, synthetic construct
  misc_feature 1..22: note = Synthetic
  source 1..22: mol_type = other RNA
gacgtcgagttcgacgccctgc

SEQ ID NO: 7854 - RNA, 19 nt, synthetic construct
  misc_feature 1..19: note = Synthetic
  source 1..19: mol_type = other RNA
gctcccaaccgcgaccctc

SEQ ID NO: 7855 - RNA, 22 nt, synthetic construct
  misc_feature 1..22: note = Synthetic
  source 1..22: mol_type = other RNA
gccgctcccaaccgcgaccctc

SEQ ID NO: 7856 - RNA, 23 nt, synthetic construct
  misc_feature 1..23: note = Synthetic
  source 1..23: mol_type = other RNA
ggccgctcccaaccgcgaccctc

SEQ ID NO: 7857 - RNA, 19 nt, synthetic construct
  misc_feature 1..19: note = Synthetic
  source 1..19: mol_type = other RNA
gcaaacagcctgtacgacg

SEQ ID NO: 7858 - RNA, 22 nt, synthetic construct
  misc_feature 1..22: note = Synthetic
  source 1..22: mol_type = other RNA
gatgcaaacagcctgtacgacg

SEQ ID NO: 7859 - RNA, 18 nt, synthetic construct
  misc_feature 1..18: note = Synthetic
  source 1..18: mol_type = other RNA
cagaaagcgcacgagcga

SEQ ID NO: 7860 - RNA, 19 nt, synthetic construct
  misc_feature 1..19: note = Synthetic
  source 1..19: mol_type = other RNA
ccagaaagcgcacgagcga

SEQ ID NO: 7861 - RNA, 21 nt, synthetic construct
  misc_feature 1..21: note = Synthetic
  source 1..21: mol_type = other RNA
ctccagaaagcgcacgagcga

SEQ ID NO: 7862 - RNA, 23 nt, synthetic construct
  misc_feature 1..23: note = Synthetic
  source 1..23: mol_type = other RNA
agctccagaaagcgcacgagcga

SEQ ID NO: 7863 - RNA, 18 nt, synthetic construct
  misc_feature 1..18: note = Synthetic
  source 1..18: mol_type = other RNA
tgtgtgtgggttgctcga

SEQ ID NO: 7864 - RNA, 19 nt, synthetic construct
  misc_feature 1..19: note = Synthetic
  source 1..19: mol_type = other RNA
ttgtgtgtgggttgctcga

SEQ ID NO: 7865 - RNA, 21 nt, synthetic construct
  misc_feature 1..21: note = Synthetic
  source 1..21: mol_type = other RNA
aattgtgtgtgggttgctcga

SEQ ID NO: 7866 - RNA, 22 nt, synthetic construct
  misc_feature 1..22: note = Synthetic
  source 1..22: mol_type = other RNA
taattgtgtgtgggttgctcga

SEQ ID NO: 7867 - RNA, 24 nt, synthetic construct
  misc_feature 1..24: note = Synthetic
  source 1..24: mol_type = other RNA
tgtaattgtgtgtgggttgctcga

SEQ ID NO: 7868 - RNA, 18 nt, synthetic construct
  misc_feature 1..18: note = Synthetic
  source 1..18: mol_type = other RNA
cggcataccggtatcccg

SEQ ID NO: 7869 - RNA, 21 nt, synthetic construct
  misc_feature 1..21: note = Synthetic
  source 1..21: mol_type = other RNA
ccgcggcataccggtatcccg

SEQ ID NO: 7870 - RNA, 24 nt, synthetic construct
  misc_feature 1..24: note = Synthetic
  source 1..24: mol_type = other RNA
tggccgcggcataccggtatcccg

SEQ ID NO: 7871 - RNA, 20 nt, synthetic construct
  misc_feature 1..20: note = Synthetic
  source 1..20: mol_type = other RNA
tggacgttgcgagcgagctg

SEQ ID NO: 7872 - RNA, 21 nt, synthetic construct
  misc_feature 1..21: note = Synthetic
  source 1..21: mol_type = other RNA
ctggacgttgcgagcgagctg

SEQ ID NO: 7873 - RNA, 22 nt, synthetic construct
  misc_feature 1..22: note = Synthetic
  source 1..22: mol_type = other RNA
cctggacgttgcgagcgagctg

SEQ ID NO: 7874 - RNA, 18 nt, synthetic construct
  misc_feature 1..18: note = Synthetic
  source 1..18: mol_type = other RNA
ttggtcatgtaattgtgt

SEQ ID NO: 7875 - RNA, 19 nt, synthetic construct
  misc_feature 1..19: note = Synthetic
  source 1..19: mol_type = other RNA
cttggtcatgtaattgtgt

SEQ ID NO: 7876 - RNA, 21 nt, synthetic construct
  misc_feature 1..21: note = Synthetic
  source 1..21: mol_type = other RNA
atcttggtcatgtaattgtgt

SEQ ID NO: 7877 - RNA, 22 nt, synthetic construct
  misc_feature 1..22: note = Synthetic
  source 1..22: mol_type = other RNA
aatcttggtcatgtaattgtgt

SEQ ID NO: 7878 - RNA, 23 nt, synthetic construct
  misc_feature 1..23: note = Synthetic
  source 1..23: mol_type = other RNA
taatcttggtcatgtaattgtgt

SEQ ID NO: 7879 - RNA, 24 nt, synthetic construct
  misc_feature 1..24: note = Synthetic
  source 1..24: mol_type = other RNA
ataatcttggtcatgtaattgtgt

SEQ ID NO: 7880 - RNA, 18 nt, synthetic construct
  misc_feature 1..18: note = Synthetic
  source 1..18: mol_type = other RNA
ccgcggccatggtgccga

SEQ ID NO: 7881 - RNA, 21 nt, synthetic construct
  misc_feature 1..21: note = Synthetic
  source 1..21: mol_type = other RNA
atgccgcggccatggtgccga

SEQ ID NO: 7882 - RNA, 22 nt, synthetic construct
  misc_feature 1..22: note = Synthetic
  source 1..22: mol_type = other RNA
tatgccgcggccatggtgccga

SEQ ID NO: 7883 - RNA, 18 nt, synthetic construct
  misc_feature 1..18: note = Synthetic
  source 1..18: mol_type = other RNA
tcgtgcgctttctggagc

SEQ ID NO: 7884 - RNA, 19 nt, synthetic construct
  misc_feature 1..19: note = Synthetic
  source 1..19: mol_type = other RNA
ctcgtgcgctttctggagc

SEQ ID NO: 7885 - RNA, 21 nt, synthetic construct
  misc_feature 1..21: note = Synthetic
  source 1..21: mol_type = other RNA
cgctcgtgcgctttctggagc

SEQ ID NO: 7886 - RNA, 22 nt, synthetic construct
  misc_feature 1..22: note = Synthetic
  source 1..22: mol_type = other RNA
tcgctcgtgcgctttctggagc

SEQ ID NO: 7887 - RNA, 24 nt, synthetic construct
  misc_feature 1..24: note = Synthetic
  source 1..24: mol_type = other RNA
tgtcgctcgtgcgctttctggagc

SEQ ID NO: 7888 - RNA, 18 nt, synthetic construct
  misc_feature 1..18: note = Synthetic
  source 1..18: mol_type = other RNA
tcgagttcgacgccctgc

SEQ ID NO: 7889 - RNA, 21 nt, synthetic construct
  misc_feature 1..21: note = Synthetic
  source 1..21: mol_type = other RNA
acgtcgagttcgacgccctgc

SEQ ID NO: 7890 - RNA, 23 nt, synthetic construct
  misc_feature 1..23: note = Synthetic
  source 1..23: mol_type = other RNA
cgacgtcgagttcgacgccctgc

SEQ ID NO: 7891 - RNA, 24 nt, synthetic construct
  misc_feature 1..24: note = Synthetic
  source 1..24: mol_type = other RNA
acgacgtcgagttcgacgccctgc

SEQ ID NO: 7892 - RNA, 18 nt, synthetic construct
  misc_feature 1..18: note = Synthetic
  source 1..18: mol_type = other RNA
ctcccaaccgcgaccctc

SEQ ID NO: 7893 - RNA, 21 nt, synthetic construct
  misc_feature 1..21: note = Synthetic
  source 1..21: mol_type = other RNA
ccgctcccaaccgcgaccctc

SEQ ID NO: 7894 - RNA, 24 nt, synthetic construct
  misc_feature 1..24: note = Synthetic
  source 1..24: mol_type = other RNA
tggccgctcccaaccgcgaccctc

SEQ ID NO: 7895 - RNA, 18 nt, synthetic construct
  misc_feature 1..18: note = Synthetic
  source 1..18: mol_type = other RNA
caaacagcctgtacgacg

SEQ ID NO: 7896 - RNA, 21 nt, synthetic construct
  misc_feature 1..21: note = Synthetic
  source 1..21: mol_type = other RNA
atgcaaacagcctgtacgacg

SEQ ID NO: 7897 - RNA, 23 nt, synthetic construct
  misc_feature 1..23: note = Synthetic
  source 1..23: mol_type = other RNA
cgatgcaaacagcctgtacgacg

SEQ ID NO: 7898 - RNA, 24 nt, synthetic construct
  misc_feature 1..24: note = Synthetic
  source 1..24: mol_type = other RNA
ccgatgcaaacagcctgtacgacg

SEQ ID NO: 7899 - RNA, 21 nt, synthetic construct
  misc_feature 1..21: note = Synthetic
  source 1..21: mol_type = other RNA
acgggggaggccctggacggg

SEQ ID NO: 7900 - RNA, 22 nt, synthetic construct
  misc_feature 1..22: note = Synthetic
  source 1..22: mol_type = other RNA
cacgggggaggccctggacggg

SEQ ID NO: 7901 - RNA, 23 nt, synthetic construct
  misc_feature 1..23: note = Synthetic
  source 1..23: mol_type = other RNA
tcacgggggaggccctggacggg

SEQ ID NO: 7902 - RNA, 24 nt, synthetic construct
  misc_feature 1..24: note = Synthetic
  source 1..24: mol_type = other RNA
ctcacgggggaggccctggacggg

SEQ ID NO: 7903 - RNA, 18 nt, synthetic construct
  misc_feature 1..18: note = Synthetic
  source 1..18: mol_type = other RNA
cgcggttgggagcggcca

SEQ ID NO: 7904 - RNA, 19 nt, synthetic construct
  misc_feature 1..19: note = Synthetic
  source 1..19: mol_type = other RNA
tcgcggttgggagcggcca

SEQ ID NO: 7905 - RNA, 21 nt, synthetic construct
  misc_feature 1..21: note = Synthetic
  source 1..21: mol_type = other RNA
ggtcgcggttgggagcggcca

SEQ ID NO: 7906 - RNA, 22 nt, synthetic construct
  misc_feature 1..22: note = Synthetic
  source 1..22: mol_type = other RNA
gggtcgcggttgggagcggcca

SEQ ID NO: 7907 - RNA, 23 nt, synthetic construct
  misc_feature 1..23: note = Synthetic
  source 1..23: mol_type = other RNA
agggtcgcggttgggagcggcca

SEQ ID NO: 7908 - RNA, 24 nt, synthetic construct
  misc_feature 1..24: note = Synthetic
  source 1..24: mol_type = other RNA
gagggtcgcggttgggagcggcca

SEQ ID NO: 7909 - RNA, 18 nt, synthetic construct
  misc_feature 1..18: note = Synthetic
  source 1..18: mol_type = other RNA
ggggaggccctggacggg

SEQ ID NO: 7910 - RNA, 19 nt, synthetic construct
  misc_feature 1..19: note = Synthetic
  source 1..19: mol_type = other RNA
gggggaggccctggacggg

SEQ ID NO: 7911 - RNA, 18 nt, synthetic construct
  misc_feature 1..18: note = Synthetic
  source 1..18: mol_type = other RNA
tcgtacaggctgtttgca

SEQ ID NO: 7912 - RNA, 19 nt, synthetic construct
  misc_feature 1..19: note = Synthetic
  source 1..19: mol_type = other RNA
gtcgtacaggctgtttgca

SEQ ID NO: 7913 - RNA, 21 nt, synthetic construct
  misc_feature 1..21: note = Synthetic
  source 1..21: mol_type = other RNA
acgtcgtacaggctgtttgca

SEQ ID NO: 7914 - RNA, 22 nt, synthetic construct
  misc_feature 1..22: note = Synthetic
  source 1..22: mol_type = other RNA
gacgtcgtacaggctgtttgca

SEQ ID NO: 7915 - RNA, 23 nt, synthetic construct
  misc_feature 1..23: note = Synthetic
  source 1..23: mol_type = other RNA
cgacgtcgtacaggctgtttgca

SEQ ID NO: 7916 - RNA, 24 nt, synthetic construct
  misc_feature 1..24: note = Synthetic
  source 1..24: mol_type = other RNA
tcgacgtcgtacaggctgtttgca

SEQ ID NO: 7917 - RNA, 18 nt, synthetic construct
  misc_feature 1..18: note = Synthetic
  source 1..18: mol_type = other RNA
acggcctggacgttgcga

SEQ ID NO: 7918 - RNA, 19 nt, synthetic construct
  misc_feature 1..19: note = Synthetic
  source 1..19: mol_type = other RNA
gacggcctggacgttgcga

SEQ ID NO: 7919 - RNA, 20 nt, synthetic construct
  misc_feature 1..20: note = Synthetic
  source 1..20: mol_type = other RNA
ggacggcctggacgttgcga

SEQ ID NO: 7920 - RNA, 21 nt, synthetic construct
  misc_feature 1..21: note = Synthetic
  source 1..21: mol_type = other RNA
aggacggcctggacgttgcga

SEQ ID NO: 7921 - RNA, 22 nt, synthetic construct
  misc_feature 1..22: note = Synthetic
  source 1..22: mol_type = other RNA
gaggacggcctggacgttgcga

SEQ ID NO: 7922 - RNA, 23 nt, synthetic construct
  misc_feature 1..23: note = Synthetic
  source 1..23: mol_type = other RNA
cgaggacggcctggacgttgcga

SEQ ID NO: 7923 - RNA, 24 nt, synthetic construct
  misc_feature 1..24: note = Synthetic
  source 1..24: mol_type = other RNA
ccgaggacggcctggacgttgcga

SEQ ID NO: 7924 - RNA, 18 nt, synthetic construct
  misc_feature 1..18: note = Synthetic
  source 1..18: mol_type = other RNA
gccacctcgatcgtgcta

SEQ ID NO: 7925 - RNA, 19 nt, synthetic construct
  misc_feature 1..19: note = Synthetic
  source 1..19: mol_type = other RNA
cgccacctcgatcgtgcta

SEQ ID NO: 7926 - RNA, 21 nt, synthetic construct
  misc_feature 1..21: note = Synthetic
  source 1..21: mol_type = other RNA
gacgccacctcgatcgtgcta

SEQ ID NO: 7927 - RNA, 22 nt, synthetic construct
  misc_feature 1..22: note = Synthetic
  source 1..22: mol_type = other RNA
cgacgccacctcgatcgtgcta

SEQ ID NO: 7928 - RNA, 23 nt, synthetic construct
  misc_feature 1..23: note = Synthetic
  source 1..23: mol_type = other RNA
gcgacgccacctcgatcgtgcta

SEQ ID NO: 7929 - RNA, 24 nt, synthetic construct
  misc_feature 1..24: note = Synthetic
  source 1..24: mol_type = other RNA
tgcgacgccacctcgatcgtgcta

SEQ ID NO: 7930 - RNA, 18 nt, synthetic construct
  misc_feature 1..18: note = Synthetic
  source 1..18: mol_type = other RNA
acgcacgccaccgacaac

SEQ ID NO: 7931 - RNA, 19 nt, synthetic construct
  misc_feature 1..19: note = Synthetic
  source 1..19: mol_type = other RNA
cacgcacgccaccgacaac

SEQ ID NO: 7932 - RNA, 21 nt, synthetic construct
  misc_feature 1..21: note = Synthetic
  source 1..21: mol_type = other RNA
cacacgcacgccaccgacaac

SEQ ID NO: 7933 - RNA, 22 nt, synthetic construct
  misc_feature 1..22: note = Synthetic
  source 1..22: mol_type = other RNA
acacacgcacgccaccgacaac

SEQ ID NO: 7934 - RNA, 23 nt, synthetic construct
  misc_feature 1..23: note = Synthetic
  source 1..23: mol_type = other RNA
tacacacgcacgccaccgacaac

SEQ ID NO: 7935 - RNA, 24 nt, synthetic construct
  misc_feature 1..24: note = Synthetic
  source 1..24: mol_type = other RNA
gtacacacgcacgccaccgacaac

SEQ ID NO: 7936 - RNA, 18 nt, synthetic construct
  misc_feature 1..18: note = Synthetic
  source 1..18: mol_type = other RNA
gtttgcatcggagcgcac

SEQ ID NO: 7937 - RNA, 19 nt, synthetic construct
  misc_feature 1..19: note = Synthetic
  source 1..19: mol_type = other RNA
tgtttgcatcggagcgcac

SEQ ID NO: 7938 - RNA, 21 nt, synthetic construct
  misc_feature 1..21: note = Synthetic
  source 1..21: mol_type = other RNA
gctgtttgcatcggagcgcac

SEQ ID NO: 7939 - RNA, 22 nt, synthetic construct
  misc_feature 1..22: note = Synthetic
  source 1..22: mol_type = other RNA
ggctgtttgcatcggagcgcac

SEQ ID NO: 7940 - RNA, 23 nt, synthetic construct
  misc_feature 1..23: note = Synthetic
  source 1..23: mol_type = other RNA
aggctgtttgcatcggagcgcac

SEQ ID NO: 7941 - RNA, 24 nt, synthetic construct
  misc_feature 1..24: note = Synthetic
  source 1..24: mol_type = other RNA
caggctgtttgcatcggagcgcac

SEQ ID NO: 7942 - RNA, 18 nt, synthetic construct
  misc_feature 1..18: note = Synthetic
  source 1..18: mol_type = other RNA
atcagcggctggtggacc

SEQ ID NO: 7943 - RNA, 19 nt, synthetic construct
  misc_feature 1..19: note = Synthetic
  source 1..19: mol_type = other RNA
aatcagcggctggtggacc

SEQ ID NO: 7944 - RNA, 21 nt, synthetic construct
  misc_feature 1..21: note = Synthetic
  source 1..21: mol_type = other RNA
gcaatcagcggctggtggacc

SEQ ID NO: 7945 - RNA, 22 nt, synthetic construct
  misc_feature 1..22: note = Synthetic
  source 1..22: mol_type = other RNA
ggcaatcagcggctggtggacc

SEQ ID NO: 7946 - RNA, 23 nt, synthetic construct
  misc_feature 1..23: note = Synthetic
  source 1..23: mol_type = other RNA
gggcaatcagcggctggtggacc

SEQ ID NO: 7947 - RNA, 24 nt, synthetic construct
  misc_feature 1..24: note = Synthetic
  source 1..24: mol_type = other RNA
cgggcaatcagcggctggtggacc

SEQ ID NO: 7948 - RNA, 18 nt, synthetic construct
  misc_feature 1..18: note = Synthetic
  source 1..18: mol_type = other RNA
ccgtccagggcctccccc

SEQ ID NO: 7949 - RNA, 19 nt, synthetic construct
  misc_feature 1..19: note = Synthetic
  source 1..19: mol_type = other RNA
cccgtccagggcctccccc

SEQ ID NO: 7950 - RNA, 21 nt, synthetic construct
  misc_feature 1..21: note = Synthetic
  source 1..21: mol_type = other RNA
gtcccgtccagggcctccccc

SEQ ID NO: 7951 - RNA, 22 nt, synthetic construct
  misc_feature 1..22: note = Synthetic
  source 1..22: mol_type = other RNA
cgtcccgtccagggcctccccc

SEQ ID NO: 7952 - RNA, 23 nt, synthetic construct
  misc_feature 1..23: note = Synthetic
  source 1..23: mol_type = other RNA
ccgtcccgtccagggcctccccc

SEQ ID NO: 7953 - RNA, 24 nt, synthetic construct
  misc_feature 1..24: note = Synthetic
  source 1..24: mol_type = other RNA
cccgtcccgtccagggcctccccc

SEQ ID NO: 7954 - RNA, 18 nt, synthetic construct
  misc_feature 1..18: note = Synthetic
  source 1..18: mol_type = other RNA
tcgcggttgggagcggcc

SEQ ID NO: 7955 - RNA, 19 nt, synthetic construct
  misc_feature 1..19: note = Synthetic
  source 1..19: mol_type = other RNA
gtcgcggttgggagcggcc

SEQ ID NO: 7956 - RNA, 20 nt, synthetic construct
  misc_feature 1..20: note = Synthetic
  source 1..20: mol_type = other RNA
ggtcgcggttgggagcggcc

SEQ ID NO: 7957 - RNA, 21 nt, synthetic construct
  misc_feature 1..21: note = Synthetic
  source 1..21: mol_type = other RNA
gggtcgcggttgggagcggcc

SEQ ID NO: 7958 - RNA, 22 nt, synthetic construct
  misc_feature 1..22: note = Synthetic
  source 1..22: mol_type = other RNA
agggtcgcggttgggagcggcc

SEQ ID NO: 7959 - RNA, 23 nt, synthetic construct
  misc_feature 1..23: note = Synthetic
  source 1..23: mol_type = other RNA
gagggtcgcggttgggagcggcc

SEQ ID NO: 7960 - RNA, 24 nt, synthetic construct
  misc_feature 1..24: note = Synthetic
  source 1..24: mol_type = other RNA
ggagggtcgcggttgggagcggcc

SEQ ID NO: 7961 - RNA, 18 nt, synthetic construct
  misc_feature 1..18: note = Synthetic
  source 1..18: mol_type = other RNA
cgcggcataccggtatcc

SEQ ID NO: 7962 - RNA, 19 nt, synthetic construct
  misc_feature 1..19: note = Synthetic
  source 1..19: mol_type = other RNA
ccgcggcataccggtatcc

SEQ ID NO: 7963 - RNA, 21 nt, synthetic construct
  misc_feature 1..21: note = Synthetic
  source 1..21: mol_type = other RNA
ggccgcggcataccggtatcc

SEQ ID NO: 7964 - RNA, 22 nt, synthetic construct
  misc_feature 1..22: note = Synthetic
  source 1..22: mol_type = other RNA
tggccgcggcataccggtatcc

SEQ ID NO: 7965 - RNA, 23 nt, synthetic construct
  misc_feature 1..23: note = Synthetic
  source 1..23: mol_type = other RNA
atggccgcggcataccggtatcc

SEQ ID NO: 7966 - RNA, 24 nt, synthetic construct
  misc_feature 1..24: note = Synthetic
  source 1..24: mol_type = other RNA
catggccgcggcataccggtatcc

SEQ ID NO: 7967 - RNA, 18 nt, synthetic construct
  misc_feature 1..18: note = Synthetic
  source 1..18: mol_type = other RNA
ttgcatcggagcgcacgc

SEQ ID NO: 7968 - RNA, 19 nt, synthetic construct
  misc_feature 1..19: note = Synthetic
  source 1..19: mol_type = other RNA
tttgcatcggagcgcacgc

SEQ ID NO: 7969 - RNA, 21 nt, synthetic construct
  misc_feature 1..21: note = Synthetic
  source 1..21: mol_type = other RNA
tgtttgcatcggagcgcacgc

SEQ ID NO: 7970 - RNA, 22 nt, synthetic construct
  misc_feature 1..22: note = Synthetic
  source 1..22: mol_type = other RNA
ctgtttgcatcggagcgcacgc

SEQ ID NO: 7971 - RNA, 23 nt, synthetic construct
  misc_feature 1..23: note = Synthetic
  source 1..23: mol_type = other RNA
gctgtttgcatcggagcgcacgc

SEQ ID NO: 7972 - RNA, 24 nt, synthetic construct
  misc_feature 1..24: note = Synthetic
  source 1..24: mol_type = other RNA
ggctgtttgcatcggagcgcacgc

SEQ ID NO: 7973 - RNA, 18 nt, synthetic construct
  misc_feature 1..18: note = Synthetic
  source 1..18: mol_type = other RNA
ccgagctccagaaagcgc

SEQ ID NO: 7974 - RNA, 19 nt, synthetic construct
  misc_feature 1..19: note = Synthetic
  source 1..19: mol_type = other RNA
cccgagctccagaaagcgc

SEQ ID NO: 7975 - RNA, 21 nt, synthetic construct
  misc_feature 1..21: note = Synthetic
  source 1..21: mol_type = other RNA
aacccgagctccagaaagcgc

SEQ ID NO: 7976 - RNA, 22 nt, synthetic construct
  misc_feature 1..22: note = Synthetic
  source 1..22: mol_type = other RNA
caacccgagctccagaaagcgc

SEQ ID NO: 7977 - RNA, 23 nt, synthetic construct
  misc_feature 1..23: note = Synthetic
  source 1..23: mol_type = other RNA
acaacccgagctccagaaagcgc

SEQ ID NO: 7978 - RNA, 24 nt, synthetic construct
  misc_feature 1..24: note = Synthetic
  source 1..24: mol_type = other RNA
gacaacccgagctccagaaagcgc

SEQ ID NO: 7979 - RNA, 18 nt, synthetic construct
  misc_feature 1..18: note = Synthetic
  source 1..18: mol_type = other RNA
gagcggccatggggtcgc

SEQ ID NO: 7980 - RNA, 19 nt, synthetic construct
  misc_feature 1..19: note = Synthetic
  source 1..19: mol_type = other RNA
ggagcggccatggggtcgc

SEQ ID NO: 7981 - RNA, 20 nt, synthetic construct
  misc_feature 1..20: note = Synthetic
  source 1..20: mol_type = other RNA
gggagcggccatggggtcgc

SEQ ID NO: 7982 - RNA, 21 nt, synthetic construct
  misc_feature 1..21: note = Synthetic
  source 1..21: mol_type = other RNA
tgggagcggccatggggtcgc

SEQ ID NO: 7983 - RNA, 22 nt, synthetic construct
  misc_feature 1..22: note = Synthetic
  source 1..22: mol_type = other RNA
ttgggagcggccatggggtcgc

SEQ ID NO: 7984 - RNA, 23 nt, synthetic construct
  misc_feature 1..23: note = Synthetic
  source 1..23: mol_type = other RNA
gttgggagcggccatggggtcgc

SEQ ID NO: 7985 - RNA, 24 nt, synthetic construct
  misc_feature 1..24: note = Synthetic
  source 1..24: mol_type = other RNA
ggttgggagcggccatggggtcgc

SEQ ID NO: 7986 - RNA, 18 nt, synthetic construct
  misc_feature 1..18: note = Synthetic
  source 1..18: mol_type = other RNA
aaacgccccgaggacggc

SEQ ID NO: 7987 - RNA, 19 nt, synthetic construct
  misc_feature 1..19: note = Synthetic
  source 1..19: mol_type = other RNA
caaacgccccgaggacggc

SEQ ID NO: 7988 - RNA, 18 nt, synthetic construct
  misc_feature 1..18: note = Synthetic
  source 1..18: mol_type = other RNA
ccgcggcataccggtatc

SEQ ID NO: 7989 - RNA, 19 nt, synthetic construct
  misc_feature 1..19: note = Synthetic
  source 1..19: mol_type = other RNA
gccgcggcataccggtatc

SEQ ID NO: 7990 - RNA, 21 nt, synthetic construct
  misc_feature 1..21: note = Synthetic
  source 1..21: mol_type = other RNA
tggccgcggcataccggtatc

SEQ ID NO: 7991 - RNA, 22 nt, synthetic construct
  misc_feature 1..22: note = Synthetic
  source 1..22: mol_type = other RNA
atggccgcggcataccggtatc

SEQ ID NO: 7992 - RNA, 23 nt, synthetic construct
  misc_feature 1..23: note = Synthetic
  source 1..23: mol_type = other RNA
catggccgcggcataccggtatc

SEQ ID NO: 7993 - RNA, 24 nt, synthetic construct
  misc_feature 1..24: note = Synthetic
  source 1..24: mol_type = other RNA
ccatggccgcggcataccggtatc

SEQ ID NO: 7994 - RNA, 18 nt, synthetic construct
  misc_feature 1..18: note = Synthetic
  source 1..18: mol_type = other RNA
gttcatgtaggccagctc

SEQ ID NO: 7995 - RNA, 19 nt, synthetic construct
  misc_feature 1..19: note = Synthetic
  source 1..19: mol_type = other RNA
cgttcatgtaggccagctc

SEQ ID NO: 7996 - RNA, 21 nt, synthetic construct
  misc_feature 1..21: note = Synthetic
  source 1..21: mol_type = other RNA
ctcgttcatgtaggccagctc

SEQ ID NO: 7997 - RNA, 22 nt, synthetic construct
  misc_feature 1..22: note = Synthetic
  source 1..22: mol_type = other RNA
cctcgttcatgtaggccagctc

SEQ ID NO: 7998 - RNA, 23 nt, synthetic construct
  misc_feature 1..23: note = Synthetic
  source 1..23: mol_type = other RNA
ccctcgttcatgtaggccagctc

SEQ ID NO: 7999 - RNA, 24 nt, synthetic construct
  misc_feature 1..24: note = Synthetic
  source 1..24: mol_type = other RNA
cccctcgttcatgtaggccagctc

SEQ ID NO: 8000 - RNA, 18 nt, synthetic construct
  misc_feature 1..18: note = Synthetic
  source 1..18: mol_type = other RNA
caccgacaacccgagctc

SEQ ID NO: 8001 - RNA, 19 nt, synthetic construct
  misc_feature 1..19: note = Synthetic
  source 1..19: mol_type = other RNA
ccaccgacaacccgagctc

SEQ ID NO: 8002 - RNA, 21 nt, synthetic construct
  misc_feature 1..21: note = Synthetic
  source 1..21: mol_type = other RNA
cgccaccgacaacccgagctc

SEQ ID NO: 8003 - RNA, 22 nt, synthetic construct
  misc_feature 1..22: note = Synthetic
  source 1..22: mol_type = other RNA
acgccaccgacaacccgagctc

SEQ ID NO: 8004 - RNA, 23 nt, synthetic construct
  misc_feature 1..23: note = Synthetic
  source 1..23: mol_type = other RNA
cacgccaccgacaacccgagctc

SEQ ID NO: 8005 - RNA, 24 nt, synthetic construct
  misc_feature 1..24: note = Synthetic
  source 1..24: mol_type = other RNA
gcacgccaccgacaacccgagctc

SEQ ID NO: 8006 - RNA, 18 nt, synthetic construct
  misc_feature 1..18: note = Synthetic
  source 1..18: mol_type = other RNA
gccgatacccgtcccgtc

SEQ ID NO: 8007 - RNA, 19 nt, synthetic construct
  misc_feature 1..19: note = Synthetic
  source 1..19: mol_type = other RNA
cgccgatacccgtcccgtc

SEQ ID NO: 8008 - RNA, 21 nt, synthetic construct
  misc_feature 1..21: note = Synthetic
  source 1..21: mol_type = other RNA
cgcgccgatacccgtcccgtc

SEQ ID NO: 8009 - RNA, 22 nt, synthetic construct
  misc_feature 1..22: note = Synthetic
  source 1..22: mol_type = other RNA
gcgcgccgatacccgtcccgtc

SEQ ID NO: 8010 - RNA, 23 nt, synthetic construct
  misc_feature 1..23: note = Synthetic
  source 1..23: mol_type = other RNA
tgcgcgccgatacccgtcccgtc

SEQ ID NO: 8011 - RNA, 24 nt, synthetic construct
  misc_feature 1..24: note = Synthetic
  source 1..24: mol_type = other RNA
atgcgcgccgatacccgtcccgtc

SEQ ID NO: 8012 - RNA, 18 nt, synthetic construct
  misc_feature 1..18: note = Synthetic
  source 1..18: mol_type = other RNA
gatggggtgcgggccgtc

SEQ ID NO: 8013 - RNA, 19 nt, synthetic construct
  misc_feature 1..19: note = Synthetic
  source 1..19: mol_type = other RNA
cgatggggtgcgggccgtc

SEQ ID NO: 8014 - RNA, 21 nt, synthetic construct
  misc_feature 1..21: note = Synthetic
  source 1..21: mol_type = other RNA
ctcgatggggtgcgggccgtc

SEQ ID NO: 8015 - RNA, 22 nt, synthetic construct
  misc_feature 1..22: note = Synthetic
  source 1..22: mol_type = other RNA
gctcgatggggtgcgggccgtc

SEQ ID NO: 8016 - RNA, 23 nt, synthetic construct
  misc_feature 1..23: note = Synthetic
  source 1..23: mol_type = other RNA
tgctcgatggggtgcgggccgtc

SEQ ID NO: 8017 - RNA, 24 nt, synthetic construct
  misc_feature 1..24: note = Synthetic
  source 1..24: mol_type = other RNA
ttgctcgatggggtgcgggccgtc

SEQ ID NO: 8018 - RNA, 18 nt, synthetic construct
  misc_feature 1..18: note = Synthetic
  source 1..18: mol_type = other RNA
cacctcgatcgtgctaag

SEQ ID NO: 8019 - RNA, 19 nt, synthetic construct
  misc_feature 1..19: note = Synthetic
  source 1..19: mol_type = other RNA
ccacctcgatcgtgctaag

SEQ ID NO: 8020 - RNA, 21 nt, synthetic construct
  misc_feature 1..21: note = Synthetic
  source 1..21: mol_type = other RNA
cgccacctcgatcgtgctaag

SEQ ID NO: 8021 - RNA, 22 nt, synthetic construct
  misc_feature 1..22: note = Synthetic
  source 1..22: mol_type = other RNA
acgccacctcgatcgtgctaag

SEQ ID NO: 8022 - RNA, 23 nt, synthetic construct
  misc_feature 1..23: note = Synthetic
  source 1..23: mol_type = other RNA
gacgccacctcgatcgtgctaag

SEQ ID NO: 8023 - RNA, 24 nt, synthetic construct
  misc_feature 1..24: note = Synthetic
  source 1..24: mol_type = other RNA
cgacgccacctcgatcgtgctaag

SEQ ID NO: 8024 - RNA, 18 nt, synthetic construct
  misc_feature 1..18: note = Synthetic
  source 1..18: mol_type = other RNA
gttgcaatacgaccccag

SEQ ID NO: 8025 - RNA, 19 nt, synthetic construct
  misc_feature 1..19: note = Synthetic
  source 1..19: mol_type = other RNA
tgttgcaatacgaccccag

SEQ ID NO: 8026 - RNA, 21 nt, synthetic construct
  misc_feature 1..21: note = Synthetic
  source 1..21: mol_type = other RNA
ggtgttgcaatacgaccccag

SEQ ID NO: 8027 - RNA, 22 nt, synthetic construct
  misc_feature 1..22: note = Synthetic
  source 1..22: mol_type = other RNA
gggtgttgcaatacgaccccag

SEQ ID NO: 8028 - RNA, 23 nt, synthetic construct
  misc_feature 1..23: note = Synthetic
  source 1..23: mol_type = other RNA
agggtgttgcaatacgaccccag

SEQ ID NO: 8029 - RNA, 24 nt, synthetic construct
  misc_feature 1..24: note = Synthetic
  source 1..24: mol_type = other RNA
cagggtgttgcaatacgaccccag

SEQ ID NO: 8030 - RNA, 18 nt, synthetic construct
  misc_feature 1..18: note = Synthetic
  source 1..18: mol_type = other RNA
cagggcctcccccgtgag

SEQ ID NO: 8031 - RNA, 19 nt, synthetic construct
  misc_feature 1..19: note = Synthetic
  source 1..19: mol_type = other RNA
ccagggcctcccccgtgag

SEQ ID NO: 8032 - RNA, 21 nt, synthetic construct
  misc_feature 1..21: note = Synthetic
  source 1..21: mol_type = other RNA
gtccagggcctcccccgtgag

SEQ ID NO: 8033 - RNA, 22 nt, synthetic construct
  misc_feature 1..22: note = Synthetic
  source 1..22: mol_type = other RNA
cgtccagggcctcccccgtgag

SEQ ID NO: 8034 - RNA, 23 nt, synthetic construct
  misc_feature 1..23: note = Synthetic
  source 1..23: mol_type = other RNA
ccgtccagggcctcccccgtgag

SEQ ID NO: 8035 - RNA, 24 nt, synthetic construct
  misc_feature 1..24: note = Synthetic
  source 1..24: mol_type = other RNA
cccgtccagggcctcccccgtgag

SEQ ID NO: 8036 - RNA, 18 nt, synthetic construct
  misc_feature 1..18: note = Synthetic
  source 1..18: mol_type = other RNA
tttgcatcggagcgcacg

SEQ ID NO: 8037 - RNA, 19 nt, synthetic construct
  misc_feature 1..19: note = Synthetic
  source 1..19: mol_type = other RNA
gtttgcatcggagcgcacg

SEQ ID NO: 8038 - RNA, 21 nt, synthetic construct
  misc_feature 1..21: note = Synthetic
  source 1..21: mol_type = other RNA
ctgtttgcatcggagcgcacg

SEQ ID NO: 8039 - RNA, 22 nt, synthetic construct
  misc_feature 1..22: note = Synthetic
  source 1..22: mol_type = other RNA
gctgtttgcatcggagcgcacg

SEQ ID NO: 8040 - RNA, 23 nt, synthetic construct
  misc_feature 1..23: note = Synthetic
  source 1..23: mol_type = other RNA
ggctgtttgcatcggagcgcacg

SEQ ID NO: 8041 - RNA, 24 nt, synthetic construct
  misc_feature 1..24: note = Synthetic
  source 1..24: mol_type = other RNA
aggctgtttgcatcggagcgcacg

SEQ ID NO: 8042 - RNA, 18 nt, synthetic construct
  misc_feature 1..18: note = Synthetic
  source 1..18: mol_type = other RNA
agcggccatggggtcgcg

SEQ ID NO: 8043 - RNA, 19 nt, synthetic construct
  misc_feature 1..19: note = Synthetic
  source 1..19: mol_type = other RNA
gagcggccatggggtcgcg

SEQ ID NO: 8044 - RNA, 21 nt, synthetic construct
  misc_feature 1..21: note = Synthetic
  source 1..21: mol_type = other RNA
gggagcggccatggggtcgcg

SEQ ID NO: 8045 - RNA, 22 nt, synthetic construct
  misc_feature 1..22: note = Synthetic
  source 1..22: mol_type = other RNA
tgggagcggccatggggtcgcg

SEQ ID NO: 8046 - RNA, 23 nt, synthetic construct
  misc_feature 1..23: note = Synthetic
  source 1..23: mol_type = other RNA
ttgggagcggccatggggtcgcg

SEQ ID NO: 8047 - RNA, 24 nt, synthetic construct
  misc_feature 1..24: note = Synthetic
  source 1..24: mol_type = other RNA
gttgggagcggccatggggtcgcg

SEQ ID NO: 8048 - RNA, 18 nt, synthetic construct
  misc_feature 1..18: note = Synthetic
  source 1..18: mol_type = other RNA
tacgaccccagcagggcg

SEQ ID NO: 8049 - RNA, 19 nt, synthetic construct
  misc_feature 1..19: note = Synthetic
  source 1..19: mol_type = other RNA
atacgaccccagcagggcg

SEQ ID NO: 8050 - RNA, 21 nt, synthetic construct
  misc_feature 1..21: note = Synthetic
  source 1..21: mol_type = other RNA
caatacgaccccagcagggcg

SEQ ID NO: 8051 - RNA, 22 nt, synthetic construct
  misc_feature 1..22: note = Synthetic
  source 1..22: mol_type = other RNA
gcaatacgaccccagcagggcg

SEQ ID NO: 8052 - RNA, 23 nt, synthetic construct
  misc_feature 1..23: note = Synthetic
  source 1..23: mol_type = other RNA
tgcaatacgaccccagcagggcg

SEQ ID NO: 8053 - RNA, 24 nt, synthetic construct
  misc_feature 1..24: note = Synthetic
  source 1..24: mol_type = other RNA
ttgcaatacgaccccagcagggcg

SEQ ID NO: 8054 - RNA, 18 nt, synthetic construct
  misc_feature 1..18: note = Synthetic
  source 1..18: mol_type = other RNA
ttgtgtgtgggttgctcg

SEQ ID NO: 8055 - RNA, 19 nt, synthetic construct
  misc_feature 1..19: note = Synthetic
  source 1..19: mol_type = other RNA
attgtgtgtgggttgctcg

SEQ ID NO: 8056 - RNA, 21 nt, synthetic construct
  misc_feature 1..21: note = Synthetic
  source 1..21: mol_type = other RNA
taattgtgtgtgggttgctcg

SEQ ID NO: 8057 - RNA, 22 nt, synthetic construct
  misc_feature 1..22: note = Synthetic
  source 1..22: mol_type = other RNA
gtaattgtgtgtgggttgctcg

SEQ ID NO: 8058 - RNA, 23 nt, synthetic construct
  misc_feature 1..23: note = Synthetic
  source 1..23: mol_type = other RNA
tgtaattgtgtgtgggttgctcg

SEQ ID NO: 8059 - RNA, 24 nt, synthetic construct
  misc_feature 1..24: note = Synthetic
  source 1..24: mol_type = other RNA
atgtaattgtgtgtgggttgctcg

SEQ ID NO: 8060 - RNA, 18 nt, synthetic construct
  misc_feature 1..18: note = Synthetic
  source 1..18: mol_type = other RNA
acctcgatcgtgctaagg

SEQ ID NO: 8061 - RNA, 19 nt, synthetic construct
  misc_feature 1..19: note = Synthetic
  source 1..19: mol_type = other RNA
cacctcgatcgtgctaagg

SEQ ID NO: 8062 - RNA, 21 nt, synthetic construct
  misc_feature 1..21: note = Synthetic
  source 1..21: mol_type = other RNA
gccacctcgatcgtgctaagg

SEQ ID NO: 8063 - RNA, 22 nt, synthetic construct
  misc_feature 1..22: note = Synthetic
  source 1..22: mol_type = other RNA
cgccacctcgatcgtgctaagg

SEQ ID NO: 8064 - RNA, 23 nt, synthetic construct
  misc_feature 1..23: note = Synthetic
  source 1..23: mol_type = other RNA
acgccacctcgatcgtgctaagg

SEQ ID NO: 8065 - RNA, 24 nt, synthetic construct
  misc_feature 1..24: note = Synthetic
  source 1..24: mol_type = other RNA
gacgccacctcgatcgtgctaagg

SEQ ID NO: 8066 - RNA, 18 nt, synthetic construct
  misc_feature 1..18: note = Synthetic
  source 1..18: mol_type = other RNA
atggcctcggtggccagg

SEQ ID NO: 8067 - RNA, 19 nt, synthetic construct
  misc_feature 1..19: note = Synthetic
  source 1..19: mol_type = other RNA
gatggcctcggtggccagg

SEQ ID NO: 8068 - RNA, 21 nt, synthetic construct
  misc_feature 1..21: note = Synthetic
  source 1..21: mol_type = other RNA
gcgatggcctcggtggccagg

SEQ ID NO: 8069 - RNA, 22 nt, synthetic construct
  misc_feature 1..22: note = Synthetic
  source 1..22: mol_type = other RNA
ggcgatggcctcggtggccagg

SEQ ID NO: 8070 - RNA, 23 nt, synthetic construct
  misc_feature 1..23: note = Synthetic
  source 1..23: mol_type = other RNA
gggcgatggcctcggtggccagg

SEQ ID NO: 8071 - RNA, 24 nt, synthetic construct
  misc_feature 1..24: note = Synthetic
  source 1..24: mol_type = other RNA
agggcgatggcctcggtggccagg

SEQ ID NO: 8072 - RNA, 18 nt, synthetic construct
  misc_feature 1..18: note = Synthetic
  source 1..18: mol_type = other RNA
tatcccggagggtcgcgg

SEQ ID NO: 8073 - RNA, 19 nt, synthetic construct
  misc_feature 1..19: note = Synthetic
  source 1..19: mol_type = other RNA
gtatcccggagggtcgcgg

SEQ ID NO: 8074 - RNA, 21 nt, synthetic construct
  misc_feature 1..21: note = Synthetic
  source 1..21: mol_type = other RNA
cggtatcccggagggtcgcgg

SEQ ID NO: 8075 - RNA, 22 nt, synthetic construct
  misc_feature 1..22: note = Synthetic
  source 1..22: mol_type = other RNA
ccggtatcccggagggtcgcgg

SEQ ID NO: 8076 - RNA, 23 nt, synthetic construct
  misc_feature 1..23: note = Synthetic
  source 1..23: mol_type = other RNA
accggtatcccggagggtcgcgg

SEQ ID NO: 8077 - RNA, 24 nt, synthetic construct
  misc_feature 1..24: note = Synthetic
  source 1..24: mol_type = other RNA
taccggtatcccggagggtcgcgg

SEQ ID NO: 8078 - RNA, 18 nt, synthetic construct
  misc_feature 1..18: note = Synthetic
  source 1..18: mol_type = other RNA
gcgggcaatcagcggctg

SEQ ID NO: 8079 - RNA, 19 nt, synthetic construct
  misc_feature 1..19: note = Synthetic
  source 1..19: mol_type = other RNA
cgcgggcaatcagcggctg

SEQ ID NO: 8080 - RNA, 21 nt, synthetic construct
  misc_feature 1..21: note = Synthetic
  source 1..21: mol_type = other RNA
gtcgcgggcaatcagcggctg

SEQ ID NO: 8081 - RNA, 22 nt, synthetic construct
  misc_feature 1..22: note = Synthetic
  source 1..22: mol_type = other RNA
cgtcgcgggcaatcagcggctg

SEQ ID NO: 8082 - RNA, 23 nt, synthetic construct
  misc_feature 1..23: note = Synthetic
  source 1..23: mol_type = other RNA
ccgtcgcgggcaatcagcggctg

SEQ ID NO: 8083 - RNA, 24 nt, synthetic construct
  misc_feature 1..24: note = Synthetic
  source 1..24: mol_type = other RNA
gccgtcgcgggcaatcagcggctg

SEQ ID NO: 8084 - RNA, 18 nt, synthetic construct
  misc_feature 1..18: note = Synthetic
  source 1..18: mol_type = other RNA
cgtacaggctgtttgcat

SEQ ID NO: 8085 - RNA, 19 nt, synthetic construct
  misc_feature 1..19: note = Synthetic
  source 1..19: mol_type = other RNA
tcgtacaggctgtttgcat

SEQ ID NO: 8086 - RNA, 21 nt, synthetic construct
  misc_feature 1..21: note = Synthetic
  source 1..21: mol_type = other RNA
cgtcgtacaggctgtttgcat

SEQ ID NO: 8087 - RNA, 22 nt, synthetic construct
  misc_feature 1..22: note = Synthetic
  source 1..22: mol_type = other RNA
acgtcgtacaggctgtttgcat

SEQ ID NO: 8088 - RNA, 23 nt, synthetic construct
  misc_feature 1..23: note = Synthetic
  source 1..23: mol_type = other RNA
gacgtcgtacaggctgtttgcat

SEQ ID NO: 8089 - RNA, 24 nt, synthetic construct
  misc_feature 1..24: note = Synthetic
  source 1..24: mol_type = other RNA
cgacgtcgtacaggctgtttgcat

SEQ ID NO: 8090 - RNA, 18 nt, synthetic construct
  misc_feature 1..18: note = Synthetic
  source 1..18: mol_type = other RNA
cgttcatgtaggccagct

SEQ ID NO: 8091 - RNA, 19 nt, synthetic construct
  misc_feature 1..19: note = Synthetic
  source 1..19: mol_type = other RNA
tcgttcatgtaggccagct

SEQ ID NO: 8092 - RNA, 21 nt, synthetic construct
  misc_feature 1..21: note = Synthetic
  source 1..21: mol_type = other RNA
cctcgttcatgtaggccagct

SEQ ID NO: 8093 - RNA, 22 nt, synthetic construct
  misc_feature 1..22: note = Synthetic
  source 1..22: mol_type = other RNA
ccctcgttcatgtaggccagct

SEQ ID NO: 8094 - RNA, 23 nt, synthetic construct
  misc_feature 1..23: note = Synthetic
  source 1..23: mol_type = other RNA
cccctcgttcatgtaggccagct

SEQ ID NO: 8095 - RNA, 24 nt, synthetic construct
  misc_feature 1..24: note = Synthetic
  source 1..24: mol_type = other RNA
gcccctcgttcatgtaggccagct

SEQ ID NO: 8096 - RNA, 18 nt, synthetic construct
  misc_feature 1..18: note = Synthetic
  source 1..18: mol_type = other RNA
cgccacctcgatcgtgct

SEQ ID NO: 8097 - RNA, 19 nt, synthetic construct
  misc_feature 1..19: note = Synthetic
  source 1..19: mol_type = other RNA
acgccacctcgatcgtgct

SEQ ID NO: 8098 - RNA, 21 nt, synthetic construct
  misc_feature 1..21: note = Synthetic
  source 1..21: mol_type = other RNA
cgacgccacctcgatcgtgct

SEQ ID NO: 8099 - RNA, 22 nt, synthetic construct
  misc_feature 1..22: note = Synthetic
  source 1..22: mol_type = other RNA
gcgacgccacctcgatcgtgct

SEQ ID NO: 8100 - RNA, 23 nt, synthetic construct
  misc_feature 1..23: note = Synthetic
  source 1..23: mol_type = other RNA
tgcgacgccacctcgatcgtgct

SEQ ID NO: 8101 - RNA, 24 nt, synthetic construct
  misc_feature 1..24: note = Synthetic
  source 1..24: mol_type = other RNA
atgcgacgccacctcgatcgtgct

SEQ ID NO: 8102 - RNA, 18 nt, synthetic construct
  misc_feature 1..18: note = Synthetic
  source 1..18: mol_type = other RNA
atcccggagggtcgcggt

SEQ ID NO: 8103 - RNA, 19 nt, synthetic construct
  misc_feature 1..19: note = Synthetic
  source 1..19: mol_type = other RNA
tatcccggagggtcgcggt

SEQ ID NO: 8104 - RNA, 21 nt, synthetic construct
  misc_feature 1..21: note = Synthetic
  source 1..21: mol_type = other RNA
ggtatcccggagggtcgcggt

SEQ ID NO: 8105 - RNA, 22 nt, synthetic construct
  misc_feature 1..22: note = Synthetic
  source 1..22: mol_type = other RNA
cggtatcccggagggtcgcggt

SEQ ID NO: 8106 - RNA, 23 nt, synthetic construct
  misc_feature 1..23: note = Synthetic
  source 1..23: mol_type = other RNA
ccggtatcccggagggtcgcggt

SEQ ID NO: 8107 - RNA, 24 nt, synthetic construct
  misc_feature 1..24: note = Synthetic
  source 1..24: mol_type = other RNA
accggtatcccggagggtcgcggt

SEQ ID NO: 8108 - RNA, 18 nt, synthetic construct
  misc_feature 1..18: note = Synthetic
  source 1..18: mol_type = other RNA
tgggttgctcgatggggt

SEQ ID NO: 8109 - RNA, 19 nt, synthetic construct
  misc_feature 1..19: note = Synthetic
  source 1..19: mol_type = other RNA
gtgggttgctcgatggggt

SEQ ID NO: 8110 - RNA, 21 nt, synthetic construct
  misc_feature 1..21: note = Synthetic
  source 1..21: mol_type = other RNA
gtgtgggttgctcgatggggt

SEQ ID NO: 8111 - RNA, 22 nt, synthetic construct
  misc_feature 1..22: note = Synthetic
  source 1..22: mol_type = other RNA
tgtgtgggttgctcgatggggt

SEQ ID NO: 8112 - RNA, 23 nt, synthetic construct
  misc_feature 1..23: note = Synthetic
  source 1..23: mol_type = other RNA
gtgtgtgggttgctcgatggggt

SEQ ID NO: 8113 - RNA, 24 nt, synthetic construct
  misc_feature 1..24: note = Synthetic
  source 1..24: mol_type = other RNA
tgtgtgtgggttgctcgatggggt

SEQ ID NO: 8114 - RNA, 18 nt, synthetic construct
  misc_feature 1..18: note = Synthetic
  source 1..18: mol_type = other RNA
gaggacggcctggacgtt

SEQ ID NO: 8115 - RNA, 19 nt, synthetic construct
  misc_feature 1..19: note = Synthetic
  source 1..19: mol_type = other RNA
cgaggacggcctggacgtt

SEQ ID NO: 8116 - RNA, 20 nt, synthetic construct
  misc_feature 1..20: note = Synthetic
  source 1..20: mol_type = other RNA
ccgaggacggcctggacgtt

SEQ ID NO: 8117 - RNA, 21 nt, synthetic construct
  misc_feature 1..21: note = Synthetic
  source 1..21: mol_type = other RNA
cccgaggacggcctggacgtt

SEQ ID NO: 8118 - RNA, 22 nt, synthetic construct
  misc_feature 1..22: note = Synthetic
  source 1..22: mol_type = other RNA
ccccgaggacggcctggacgtt

SEQ ID NO: 8119 - RNA, 23 nt, synthetic construct
  misc_feature 1..23: note = Synthetic
  source 1..23: mol_type = other RNA
gccccgaggacggcctggacgtt

SEQ ID NO: 8120 - RNA, 24 nt, synthetic construct
  misc_feature 1..24: note = Synthetic
  source 1..24: mol_type = other RNA
cgccccgaggacggcctggacgtt

SEQ ID NO: 8121 - RNA, 18 nt, synthetic construct
  misc_feature 1..18: note = Synthetic
  source 1..18: mol_type = other RNA
caggctgaaggcggcgtt

SEQ ID NO: 8122 - RNA, 19 nt, synthetic construct
  misc_feature 1..19: note = Synthetic
  source 1..19: mol_type = other RNA
ccaggctgaaggcggcgtt

SEQ ID NO: 8123 - RNA, 21 nt, synthetic construct
  misc_feature 1..21: note = Synthetic
  source 1..21: mol_type = other RNA
ggccaggctgaaggcggcgtt

SEQ ID NO: 8124 - RNA, 22 nt, synthetic construct
  misc_feature 1..22: note = Synthetic
  source 1..22: mol_type = other RNA
tggccaggctgaaggcggcgtt

SEQ ID NO: 8125 - RNA, 23 nt, synthetic construct
  misc_feature 1..23: note = Synthetic
  source 1..23: mol_type = other RNA
gtggccaggctgaaggcggcgtt

SEQ ID NO: 8126 - RNA, 24 nt, synthetic construct
  misc_feature 1..24: note = Synthetic
  source 1..24: mol_type = other RNA
ggtggccaggctgaaggcggcgtt

SEQ ID NO: 8127 - RNA, 18 nt, synthetic construct
  misc_feature 1..18: note = Synthetic
  source 1..18: mol_type = other RNA
tcccggagggtcgcggtt

SEQ ID NO: 8128 - RNA, 19 nt, synthetic construct
  misc_feature 1..19: note = Synthetic
  source 1..19: mol_type = other RNA
atcccggagggtcgcggtt

SEQ ID NO: 8129 - RNA, 21 nt, synthetic construct
  misc_feature 1..21: note = Synthetic
  source 1..21: mol_type = other RNA
gtatcccggagggtcgcggtt

SEQ ID NO: 8130 - RNA, 22 nt, synthetic construct
  misc_feature 1..22: note = Synthetic
  source 1..22: mol_type = other RNA
ggtatcccggagggtcgcggtt

SEQ ID NO: 8131 - RNA, 23 nt, synthetic construct
  misc_feature 1..23: note = Synthetic
  source 1..23: mol_type = other RNA
cggtatcccggagggtcgcggtt

SEQ ID NO: 8132 - RNA, 24 nt, synthetic construct
  misc_feature 1..24: note = Synthetic
  source 1..24: mol_type = other RNA
ccggtatcccggagggtcgcggtt

SEQ ID NO: 8133 - RNA, 18 nt, synthetic construct
  misc_feature 1..18: note = Synthetic
  source 1..18: mol_type = other RNA
gcgacggcccgcacccca

SEQ ID NO: 8134 - RNA, 19 nt, synthetic construct
  misc_feature 1..19: note = Synthetic
  source 1..19: mol_type = other RNA
cgcgacggcccgcacccca

SEQ ID NO: 8135 - RNA, 21 nt, synthetic construct
  misc_feature 1..21: note = Synthetic
  source 1..21: mol_type = other RNA
cccgcgacggcccgcacccca

SEQ ID NO: 8136 - RNA, 22 nt, synthetic construct
  misc_feature 1..22: note = Synthetic
  source 1..22: mol_type = other RNA
gcccgcgacggcccgcacccca

SEQ ID NO: 8137 - RNA, 23 nt, synthetic construct
  misc_feature 1..23: note = Synthetic
  source 1..23: mol_type = other RNA
tgcccgcgacggcccgcacccca

SEQ ID NO: 8138 - RNA, 24 nt, synthetic construct
  misc_feature 1..24: note = Synthetic
  source 1..24: mol_type = other RNA
ttgcccgcgacggcccgcacccca

SEQ ID NO: 8139 - RNA, 18 nt, synthetic construct
  misc_feature 1..18: note = Synthetic
  source 1..18: mol_type = other RNA
ccgccttcagcctggcca

SEQ ID NO: 8140 - RNA, 19 nt, synthetic construct
  misc_feature 1..19: note = Synthetic
  source 1..19: mol_type = other RNA
gccgccttcagcctggcca

SEQ ID NO: 8141 - RNA, 21 nt, synthetic construct
  misc_feature 1..21: note = Synthetic
  source 1..21: mol_type = other RNA
acgccgccttcagcctggcca

SEQ ID NO: 8142 - RNA, 22 nt, synthetic construct
  misc_feature 1..22: note = Synthetic
  source 1..22: mol_type = other RNA
aacgccgccttcagcctggcca

SEQ ID NO: 8143 - RNA, 23 nt, synthetic construct
  misc_feature 1..23: note = Synthetic
  source 1..23: mol_type = other RNA
gaacgccgccttcagcctggcca

SEQ ID NO: 8144 - RNA, 24 nt, synthetic construct
  misc_feature 1..24: note = Synthetic
  source 1..24: mol_type = other RNA
tgaacgccgccttcagcctggcca

SEQ ID NO: 8145 - RNA, 18 nt, synthetic construct
  misc_feature 1..18: note = Synthetic
  source 1..18: mol_type = other RNA
aggccatcgccctgctca

SEQ ID NO: 8146 - RNA, 19 nt, synthetic construct
  misc_feature 1..19: note = Synthetic
  source 1..19: mol_type = other RNA
gaggccatcgccctgctca

SEQ ID NO: 8147 - RNA, 21 nt, synthetic construct
  misc_feature 1..21: note = Synthetic
  source 1..21: mol_type = other RNA
ccgaggccatcgccctgctca

SEQ ID NO: 8148 - RNA, 22 nt, synthetic construct
  misc_feature 1..22: note = Synthetic
  source 1..22: mol_type = other RNA
accgaggccatcgccctgctca

SEQ ID NO: 8149 - RNA, 23 nt, synthetic construct
  misc_feature 1..23: note = Synthetic
  source 1..23: mol_type = other RNA
caccgaggccatcgccctgctca

SEQ ID NO: 8150 - RNA, 24 nt, synthetic construct
  misc_feature 1..24: note = Synthetic
  source 1..24: mol_type = other RNA
ccaccgaggccatcgccctgctca

SEQ ID NO: 8151 - RNA, 18 nt, synthetic construct
  misc_feature 1..18: note = Synthetic
  source 1..18: mol_type = other RNA
ggtccctccttagcacga

SEQ ID NO: 8152 - RNA, 19 nt, synthetic construct
  misc_feature 1..19: note = Synthetic
  source 1..19: mol_type = other RNA
gggtccctccttagcacga

SEQ ID NO: 8153 - RNA, 21 nt, synthetic construct
  misc_feature 1..21: note = Synthetic
  source 1..21: mol_type = other RNA
ccgggtccctccttagcacga

SEQ ID NO: 8154 - RNA, 22 nt, synthetic construct
  misc_feature 1..22: note = Synthetic
  source 1..22: mol_type = other RNA
accgggtccctccttagcacga

SEQ ID NO: 8155 - RNA, 23 nt, synthetic construct
  misc_feature 1..23: note = Synthetic
  source 1..23: mol_type = other RNA
gaccgggtccctccttagcacga

SEQ ID NO: 8156 - RNA, 24 nt, synthetic construct
  misc_feature 1..24: note = Synthetic
  source 1..24: mol_type = other RNA
cgaccgggtccctccttagcacga

SEQ ID NO: 8157 - RNA, 18 nt, synthetic construct
  misc_feature 1..18: note = Synthetic
  source 1..18: mol_type = other RNA
cacgggggaggccctgga

SEQ ID NO: 8158 - RNA, 19 nt, synthetic construct
  misc_feature 1..19: note = Synthetic
  source 1..19: mol_type = other RNA
tcacgggggaggccctgga

SEQ ID NO: 8159 - RNA, 21 nt, synthetic construct
  misc_feature 1..21: note = Synthetic
  source 1..21: mol_type = other RNA
gctcacgggggaggccctgga

SEQ ID NO: 8160 - RNA, 22 nt, synthetic construct
  misc_feature 1..22: note = Synthetic
  source 1..22: mol_type = other RNA
tgctcacgggggaggccctgga

SEQ ID NO: 8161 - RNA, 23 nt, synthetic construct
  misc_feature 1..23: note = Synthetic
  source 1..23: mol_type = other RNA
ctgctcacgggggaggccctgga

SEQ ID NO: 8162 - RNA, 24 nt, synthetic construct
  misc_feature 1..24: note = Synthetic
  source 1..24: mol_type = other RNA
cctgctcacgggggaggccctgga

SEQ ID NO: 8163 - RNA, 18 nt, synthetic construct
  misc_feature 1..18: note = Synthetic
  source 1..18: mol_type = other RNA
cggagctggcctacatga

SEQ ID NO: 8164 - RNA, 19 nt, synthetic construct
  misc_feature 1..19: note = Synthetic
  source 1..19: mol_type = other RNA
ccggagctggcctacatga

SEQ ID NO: 8165 - RNA, 21 nt, synthetic construct
  misc_feature 1..21: note = Synthetic
  source 1..21: mol_type = other RNA
ttccggagctggcctacatga

SEQ ID NO: 8166 - RNA, 22 nt, synthetic construct
  misc_feature 1..22: note = Synthetic
  source 1..22: mol_type = other RNA
tttccggagctggcctacatga

SEQ ID NO: 8167 - RNA, 23 nt, synthetic construct
  misc_feature 1..23: note = Synthetic
  source 1..23: mol_type = other RNA
gtttccggagctggcctacatga

SEQ ID NO: 8168 - RNA, 24 nt, synthetic construct
  misc_feature 1..24: note = Synthetic
  source 1..24: mol_type = other RNA
agtttccggagctggcctacatga

SEQ ID NO: 8169 - RNA, 18 nt, synthetic construct
  misc_feature 1..18: note = Synthetic
  source 1..18: mol_type = other RNA
gagctggcctacatgaac

SEQ ID NO: 8170 - RNA, 19 nt, synthetic construct
  misc_feature 1..19: note = Synthetic
  source 1..19: mol_type = other RNA
ggagctggcctacatgaac

SEQ ID NO: 8171 - RNA, 21 nt, synthetic construct
  misc_feature 1..21: note = Synthetic
  source 1..21: mol_type = other RNA
ccggagctggcctacatgaac

SEQ ID NO: 8172 - RNA, 22 nt, synthetic construct
  misc_feature 1..22: note = Synthetic
  source 1..22: mol_type = other RNA
tccggagctggcctacatgaac

SEQ ID NO: 8173 - RNA, 23 nt, synthetic construct
  misc_feature 1..23: note = Synthetic
  source 1..23: mol_type = other RNA
ttccggagctggcctacatgaac

SEQ ID NO: 8174 - RNA, 24 nt, synthetic construct
  misc_feature 1..24: note = Synthetic
  source 1..24: mol_type = other RNA
tttccggagctggcctacatgaac

SEQ ID NO: 8175 - RNA, 18 nt, synthetic construct
  misc_feature 1..18: note = Synthetic
  source 1..18: mol_type = other RNA
ggccatcgccctgctcac

SEQ ID NO: 8176 - RNA, 19 nt, synthetic construct
  misc_feature 1..19: note = Synthetic
  source 1..19: mol_type = other RNA
aggccatcgccctgctcac

SEQ ID NO: 8177 - RNA, 21 nt, synthetic construct
  misc_feature 1..21: note = Synthetic
  source 1..21: mol_type = other RNA
cgaggccatcgccctgctcac

SEQ ID NO: 8178 - RNA, 22 nt, synthetic construct
  misc_feature 1..22: note = Synthetic
  source 1..22: mol_type = other RNA
ccgaggccatcgccctgctcac

SEQ ID NO: 8179 - RNA, 23 nt, synthetic construct
  misc_feature 1..23: note = Synthetic
  source 1..23: mol_type = other RNA
accgaggccatcgccctgctcac

SEQ ID NO: 8180 - RNA, 24 nt, synthetic construct
  misc_feature 1..24: note = Synthetic
  source 1..24: mol_type = other RNA
caccgaggccatcgccctgctcac

SEQ ID NO: 8181 - RNA, 18 nt, synthetic construct
  misc_feature 1..18: note = Synthetic
  source 1..18: mol_type = other RNA
tttccggagctggcctac

SEQ ID NO: 8182 - RNA, 19 nt, synthetic construct
  misc_feature 1..19: note = Synthetic
  source 1..19: mol_type = other RNA
gtttccggagctggcctac

SEQ ID NO: 8183 - RNA, 21 nt, synthetic construct
  misc_feature 1..21: note = Synthetic
  source 1..21: mol_type = other RNA
aagtttccggagctggcctac

SEQ ID NO: 8184 - RNA, 22 nt, synthetic construct
  misc_feature 1..22: note = Synthetic
  source 1..22: mol_type = other RNA
caagtttccggagctggcctac

SEQ ID NO: 8185 - RNA, 23 nt, synthetic construct
  misc_feature 1..23: note = Synthetic
  source 1..23: mol_type = other RNA
ccaagtttccggagctggcctac

SEQ ID NO: 8186 - RNA, 24 nt, synthetic construct
  misc_feature 1..24: note = Synthetic
  source 1..24: mol_type = other RNA
accaagtttccggagctggcctac

SEQ ID NO: 8187 - RNA, 18 nt, synthetic construct
  misc_feature 1..18: note = Synthetic
  source 1..18: mol_type = other RNA
ctgctcacgggggaggcc

SEQ ID NO: 8188 - RNA, 19 nt, synthetic construct
  misc_feature 1..19: note = Synthetic
  source 1..19: mol_type = other RNA
cctgctcacgggggaggcc

SEQ ID NO: 8189 - RNA, 21 nt, synthetic construct
  misc_feature 1..21: note = Synthetic
  source 1..21: mol_type = other RNA
gccctgctcacgggggaggcc

SEQ ID NO: 8190 - RNA, 22 nt, synthetic construct
  misc_feature 1..22: note = Synthetic
  source 1..22: mol_type = other RNA
cgccctgctcacgggggaggcc

SEQ ID NO: 8191 - RNA, 23 nt, synthetic construct
  misc_feature 1..23: note = Synthetic
  source 1..23: mol_type = other RNA
tcgccctgctcacgggggaggcc

SEQ ID NO: 8192 - RNA, 24 nt, synthetic construct
  misc_feature 1..24: note = Synthetic
  source 1..24: mol_type = other RNA
atcgccctgctcacgggggaggcc

SEQ ID NO: 8193 - RNA, 18 nt, synthetic construct
  misc_feature 1..18: note = Synthetic
  source 1..18: mol_type = other RNA
attatcgaccgccgggcc

SEQ ID NO: 8194 - RNA, 19 nt, synthetic construct
  misc_feature 1..19: note = Synthetic
  source 1..19: mol_type = other RNA
gattatcgaccgccgggcc

SEQ ID NO: 8195 - RNA, 21 nt, synthetic construct
  misc_feature 1..21: note = Synthetic
  source 1..21: mol_type = other RNA
aagattatcgaccgccgggcc

SEQ ID NO: 8196 - RNA, 22 nt, synthetic construct
  misc_feature 1..22: note = Synthetic
  source 1..22: mol_type = other RNA
caagattatcgaccgccgggcc

SEQ ID NO: 8197 - RNA, 23 nt, synthetic construct
  misc_feature 1..23: note = Synthetic
  source 1..23: mol_type = other RNA
ccaagattatcgaccgccgggcc

SEQ ID NO: 8198 - RNA, 24 nt, synthetic construct
  misc_feature 1..24: note = Synthetic
  source 1..24: mol_type = other RNA
accaagattatcgaccgccgggcc

SEQ ID NO: 8199 - RNA, 18 nt, synthetic construct
  misc_feature 1..18: note = Synthetic
  source 1..18: mol_type = other RNA
gcaacgtccaggccgtcc

SEQ ID NO: 8200 - RNA, 19 nt, synthetic construct
  misc_feature 1..19: note = Synthetic
  source 1..19: mol_type = other RNA
cgcaacgtccaggccgtcc

SEQ ID NO: 8201 - RNA, 20 nt, synthetic construct
  misc_feature 1..20: note = Synthetic
  source 1..20: mol_type = other RNA
tcgcaacgtccaggccgtcc

SEQ ID NO: 8202 - RNA, 21 nt, synthetic construct
  misc_feature 1..21: note = Synthetic
  source 1..21: mol_type = other RNA
ctcgcaacgtccaggccgtcc

SEQ ID NO: 8203 - RNA, 22 nt, synthetic construct
  misc_feature 1..22: note = Synthetic
  source 1..22: mol_type = other RNA
gctcgcaacgtccaggccgtcc

SEQ ID NO: 8204 - RNA, 23 nt, synthetic construct
  misc_feature 1..23: note = Synthetic
  source 1..23: mol_type = other RNA
cgctcgcaacgtccaggccgtcc

SEQ ID NO: 8205 - RNA, 24 nt, synthetic construct
  misc_feature 1..24: note = Synthetic
  source 1..24: mol_type = other RNA
tcgctcgcaacgtccaggccgtcc

SEQ ID NO: 8206 - RNA, 18 nt, synthetic construct
  misc_feature 1..18: note = Synthetic
  source 1..18: mol_type = other RNA
gaggccatcgccctgctc

SEQ ID NO: 8207 - RNA, 19 nt, synthetic construct
  misc_feature 1..19: note = Synthetic
  source 1..19: mol_type = other RNA
cgaggccatcgccctgctc

SEQ ID NO: 8208 - RNA, 21 nt, synthetic construct
  misc_feature 1..21: note = Synthetic
  source 1..21: mol_type = other RNA
accgaggccatcgccctgctc

SEQ ID NO: 8209 - RNA, 22 nt, synthetic construct
  misc_feature 1..22: note = Synthetic
  source 1..22: mol_type = other RNA
caccgaggccatcgccctgctc

SEQ ID NO: 8210 - RNA, 23 nt, synthetic construct
  misc_feature 1..23: note = Synthetic
  source 1..23: mol_type = other RNA
ccaccgaggccatcgccctgctc

SEQ ID NO: 8211 - RNA, 24 nt, synthetic construct
  misc_feature 1..24: note = Synthetic
  source 1..24: mol_type = other RNA
gccaccgaggccatcgccctgctc

SEQ ID NO: 8212 - RNA, 18 nt, synthetic construct
  misc_feature 1..18: note = Synthetic
  source 1..18: mol_type = other RNA
tgtcgctcgtgcgctttc

SEQ ID NO: 8213 - RNA, 19 nt, synthetic construct
  misc_feature 1..19: note = Synthetic
  source 1..19: mol_type = other RNA
ctgtcgctcgtgcgctttc

SEQ ID NO: 8214 - RNA, 21 nt, synthetic construct
  misc_feature 1..21: note = Synthetic
  source 1..21: mol_type = other RNA
ccctgtcgctcgtgcgctttc

SEQ ID NO: 8215 - RNA, 22 nt, synthetic construct
  misc_feature 1..22: note = Synthetic
  source 1..22: mol_type = other RNA
accctgtcgctcgtgcgctttc

SEQ ID NO: 8216 - RNA, 23 nt, synthetic construct
  misc_feature 1..23: note = Synthetic
  source 1..23: mol_type = other RNA
caccctgtcgctcgtgcgctttc

SEQ ID NO: 8217 - RNA, 24 nt, synthetic construct
  misc_feature 1..24: note = Synthetic
  source 1..24: mol_type = other RNA
acaccctgtcgctcgtgcgctttc

SEQ ID NO: 8218 - RNA, 18 nt, synthetic construct
  misc_feature 1..18: note = Synthetic
  source 1..18: mol_type = other RNA
gcgtgtgtaccaagtttc

SEQ ID NO: 8219 - RNA, 19 nt, synthetic construct
  misc_feature 1..19: note = Synthetic
  source 1..19: mol_type = other RNA
tgcgtgtgtaccaagtttc

SEQ ID NO: 8220 - RNA, 21 nt, synthetic construct
  misc_feature 1..21: note = Synthetic
  source 1..21: mol_type = other RNA
cgtgcgtgtgtaccaagtttc

SEQ ID NO: 8221 - RNA, 22 nt, synthetic construct
  misc_feature 1..22: note = Synthetic
  source 1..22: mol_type = other RNA
gcgtgcgtgtgtaccaagtttc

SEQ ID NO: 8222 - RNA, 23 nt, synthetic construct
  misc_feature 1..23: note = Synthetic
  source 1..23: mol_type = other RNA
ggcgtgcgtgtgtaccaagtttc

SEQ ID NO: 8223 - RNA, 24 nt, synthetic construct
  misc_feature 1..24: note = Synthetic
  source 1..24: mol_type = other RNA
tggcgtgcgtgtgtaccaagtttc

SEQ ID NO: 8224 - RNA, 18 nt, synthetic construct
  misc_feature 1..18: note = Synthetic
  source 1..18: mol_type = other RNA
agctggcctacatgaacg

SEQ ID NO: 8225 - RNA, 19 nt, synthetic construct
  misc_feature 1..19: note = Synthetic
  source 1..19: mol_type = other RNA
gagctggcctacatgaacg

SEQ ID NO: 8226 - RNA, 21 nt, synthetic construct
  misc_feature 1..21: note = Synthetic
  source 1..21: mol_type = other RNA
cggagctggcctacatgaacg

SEQ ID NO: 8227 - RNA, 22 nt, synthetic construct
  misc_feature 1..22: note = Synthetic
  source 1..22: mol_type = other RNA
ccggagctggcctacatgaacg

SEQ ID NO: 8228 - RNA, 23 nt, synthetic construct
  misc_feature 1..23: note = Synthetic
  source 1..23: mol_type = other RNA
tccggagctggcctacatgaacg

SEQ ID NO: 8229 - RNA, 24 nt, synthetic construct
  misc_feature 1..24: note = Synthetic
  source 1..24: mol_type = other RNA
ttccggagctggcctacatgaacg

SEQ ID NO: 8230 - RNA, 18 nt, synthetic construct
  misc_feature 1..18: note = Synthetic
  source 1..18: mol_type = other RNA
gccatcgccctgctcacg

SEQ ID NO: 8231 - RNA, 19 nt, synthetic construct
  misc_feature 1..19: note = Synthetic
  source 1..19: mol_type = other RNA
ggccatcgccctgctcacg

SEQ ID NO: 8232 - RNA, 21 nt, synthetic construct
  misc_feature 1..21: note = Synthetic
  source 1..21: mol_type = other RNA
gaggccatcgccctgctcacg

SEQ ID NO: 8233 - RNA, 22 nt, synthetic construct
  misc_feature 1..22: note = Synthetic
  source 1..22: mol_type = other RNA
cgaggccatcgccctgctcacg

SEQ ID NO: 8234 - RNA, 23 nt, synthetic construct
  misc_feature 1..23: note = Synthetic
  source 1..23: mol_type = other RNA
ccgaggccatcgccctgctcacg

SEQ ID NO: 8235 - RNA, 24 nt, synthetic construct
  misc_feature 1..24: note = Synthetic
  source 1..24: mol_type = other RNA
accgaggccatcgccctgctcacg

SEQ ID NO: 8236 - RNA, 18 nt, synthetic construct
  misc_feature 1..18: note = Synthetic
  source 1..18: mol_type = other RNA
gaccaagattatcgaccg

SEQ ID NO: 8237 - RNA, 19 nt, synthetic construct
  misc_feature 1..19: note = Synthetic
  source 1..19: mol_type = other RNA
tgaccaagattatcgaccg

SEQ ID NO: 8238 - RNA, 21 nt, synthetic construct
  misc_feature 1..21: note = Synthetic
  source 1..21: mol_type = other RNA
catgaccaagattatcgaccg

SEQ ID NO: 8239 - RNA, 22 nt, synthetic construct
  misc_feature 1..22: note = Synthetic
  source 1..22: mol_type = other RNA
acatgaccaagattatcgaccg

SEQ ID NO: 8240 - RNA, 23 nt, synthetic construct
  misc_feature 1..23: note = Synthetic
  source 1..23: mol_type = other RNA
tacatgaccaagattatcgaccg

SEQ ID NO: 8241 - RNA, 24 nt, synthetic construct
  misc_feature 1..24: note = Synthetic
  source 1..24: mol_type = other RNA
ttacatgaccaagattatcgaccg

SEQ ID NO: 8242 - RNA, 18 nt, synthetic construct
  misc_feature 1..18: note = Synthetic
  source 1..18: mol_type = other RNA
ccatcgccctgctcacgg

SEQ ID NO: 8243 - RNA, 19 nt, synthetic construct
  misc_feature 1..19: note = Synthetic
  source 1..19: mol_type = other RNA
gccatcgccctgctcacgg

SEQ ID NO: 8244 - RNA, 21 nt, synthetic construct
  misc_feature 1..21: note = Synthetic
  source 1..21: mol_type = other RNA
aggccatcgccctgctcacgg

SEQ ID NO: 8245 - RNA, 22 nt, synthetic construct
  misc_feature 1..22: note = Synthetic
  source 1..22: mol_type = other RNA
gaggccatcgccctgctcacgg

SEQ ID NO: 8246 - RNA, 23 nt, synthetic construct
  misc_feature 1..23: note = Synthetic
  source 1..23: mol_type = other RNA
cgaggccatcgccctgctcacgg

SEQ ID NO: 8247 - RNA, 24 nt, synthetic construct
  misc_feature 1..24: note = Synthetic
  source 1..24: mol_type = other RNA
ccgaggccatcgccctgctcacgg

SEQ ID NO: 8248 - RNA, 18 nt, synthetic construct
  misc_feature 1..18: note = Synthetic
  source 1..18: mol_type = other RNA
tcacgggggaggccctgg

SEQ ID NO: 8249 - RNA, 19 nt, synthetic construct
  misc_feature 1..19: note = Synthetic
  source 1..19: mol_type = other RNA
ctcacgggggaggccctgg

SEQ ID NO: 8250 - RNA, 21 nt, synthetic construct
  misc_feature 1..21: note = Synthetic
  source 1..21: mol_type = other RNA
tgctcacgggggaggccctgg

SEQ ID NO: 8251 - RNA, 22 nt, synthetic construct
  misc_feature 1..22: note = Synthetic
  source 1..22: mol_type = other RNA
ctgctcacgggggaggccctgg

SEQ ID NO: 8252 - RNA, 23 nt, synthetic construct
  misc_feature 1..23: note = Synthetic
  source 1..23: mol_type = other RNA
cctgctcacgggggaggccctgg

SEQ ID NO: 8253 - RNA, 24 nt, synthetic construct
  misc_feature 1..24: note = Synthetic
  source 1..24: mol_type = other RNA
ccctgctcacgggggaggccctgg

SEQ ID NO: 8254 - RNA, 18 nt, synthetic construct
  misc_feature 1..18: note = Synthetic
  source 1..18: mol_type = other RNA
gtcgagttcgacgccctg

SEQ ID NO: 8255 - RNA, 19 nt, synthetic construct
  misc_feature 1..19: note = Synthetic
  source 1..19: mol_type = other RNA
cgtcgagttcgacgccctg

SEQ ID NO: 8256 - RNA, 21 nt, synthetic construct
  misc_feature 1..21: note = Synthetic
  source 1..21: mol_type = other RNA
gacgtcgagttcgacgccctg

SEQ ID NO: 8257 - RNA, 22 nt, synthetic construct
  misc_feature 1..22: note = Synthetic
  source 1..22: mol_type = other RNA
cgacgtcgagttcgacgccctg

SEQ ID NO: 8258 - RNA, 23 nt, synthetic construct
  misc_feature 1..23: note = Synthetic
  source 1..23: mol_type = other RNA
acgacgtcgagttcgacgccctg

SEQ ID NO: 8259 - RNA, 24 nt, synthetic construct
  misc_feature 1..24: note = Synthetic
  source 1..24: mol_type = other RNA
tacgacgtcgagttcgacgccctg

SEQ ID NO: 8260 - RNA, 18 nt, synthetic construct
  misc_feature 1..18: note = Synthetic
  source 1..18: mol_type = other RNA
gctcccaaccgcgaccct

SEQ ID NO: 8261 - RNA, 19 nt, synthetic construct
  misc_feature 1..19: note = Synthetic
  source 1..19: mol_type = other RNA
cgctcccaaccgcgaccct

SEQ ID NO: 8262 - RNA, 21 nt, synthetic construct
  misc_feature 1..21: note = Synthetic
  source 1..21: mol_type = other RNA
gccgctcccaaccgcgaccct

SEQ ID NO: 8263 - RNA, 22 nt, synthetic construct
  misc_feature 1..22: note = Synthetic
  source 1..22: mol_type = other RNA
ggccgctcccaaccgcgaccct

SEQ ID NO: 8264 - RNA, 23 nt, synthetic construct
  misc_feature 1..23: note = Synthetic
  source 1..23: mol_type = other RNA
tggccgctcccaaccgcgaccct

SEQ ID NO: 8265 - RNA, 24 nt, synthetic construct
  misc_feature 1..24: note = Synthetic
  source 1..24: mol_type = other RNA
atggccgctcccaaccgcgaccct

SEQ ID NO: 8266 - RNA, 18 nt, synthetic construct
  misc_feature 1..18: note = Synthetic
  source 1..18: mol_type = other RNA
caacgtccaggccgtcct

SEQ ID NO: 8267 - RNA, 19 nt, synthetic construct
  misc_feature 1..19: note = Synthetic
  source 1..19: mol_type = other RNA
gcaacgtccaggccgtcct

SEQ ID NO: 8268 - RNA, 21 nt, synthetic construct
  misc_feature 1..21: note = Synthetic
  source 1..21: mol_type = other RNA
tcgcaacgtccaggccgtcct

SEQ ID NO: 8269 - RNA, 22 nt, synthetic construct
  misc_feature 1..22: note = Synthetic
  source 1..22: mol_type = other RNA
ctcgcaacgtccaggccgtcct

SEQ ID NO: 8270 - RNA, 23 nt, synthetic construct
  misc_feature 1..23: note = Synthetic
  source 1..23: mol_type = other RNA
gctcgcaacgtccaggccgtcct

SEQ ID NO: 8271 - RNA, 24 nt, synthetic construct
  misc_feature 1..24: note = Synthetic
  source 1..24: mol_type = other RNA
cgctcgcaacgtccaggccgtcct

SEQ ID NO: 8272 - RNA, 18 nt, synthetic construct
  misc_feature 1..18: note = Synthetic
  source 1..18: mol_type = other RNA
acgaggggcgcgtacagt

SEQ ID NO: 8273 - RNA, 19 nt, synthetic construct
  misc_feature 1..19: note = Synthetic
  source 1..19: mol_type = other RNA
aacgaggggcgcgtacagt

SEQ ID NO: 8274 - RNA, 21 nt, synthetic construct
  misc_feature 1..21: note = Synthetic
  source 1..21: mol_type = other RNA
tgaacgaggggcgcgtacagt

SEQ ID NO: 8275 - RNA, 22 nt, synthetic construct
  misc_feature 1..22: note = Synthetic
  source 1..22: mol_type = other RNA
atgaacgaggggcgcgtacagt

SEQ ID NO: 8276 - RNA, 23 nt, synthetic construct
  misc_feature 1..23: note = Synthetic
  source 1..23: mol_type = other RNA
catgaacgaggggcgcgtacagt

SEQ ID NO: 8277 - RNA, 24 nt, synthetic construct
  misc_feature 1..24: note = Synthetic
  source 1..24: mol_type = other RNA
acatgaacgaggggcgcgtacagt

SEQ ID NO: 8278 - RNA, 18 nt, synthetic construct
  misc_feature 1..18: note = Synthetic
  source 1..18: mol_type = other RNA
ctgtcgctcgtgcgcttt

SEQ ID NO: 8279 - RNA, 19 nt, synthetic construct
  misc_feature 1..19: note = Synthetic
  source 1..19: mol_type = other RNA
cctgtcgctcgtgcgcttt

SEQ ID NO: 8280 - RNA, 21 nt, synthetic construct
  misc_feature 1..21: note = Synthetic
  source 1..21: mol_type = other RNA
accctgtcgctcgtgcgcttt

SEQ ID NO: 8281 - RNA, 22 nt, synthetic construct
  misc_feature 1..22: note = Synthetic
  source 1..22: mol_type = other RNA
caccctgtcgctcgtgcgcttt

SEQ ID NO: 8282 - RNA, 23 nt, synthetic construct
  misc_feature 1..23: note = Synthetic
  source 1..23: mol_type = other RNA
acaccctgtcgctcgtgcgcttt

SEQ ID NO: 8283 - RNA, 24 nt, synthetic construct
  misc_feature 1..24: note = Synthetic
  source 1..24: mol_type = other RNA
aacaccctgtcgctcgtgcgcttt

SEQ ID NO: 8284 - RNA, 18 nt, synthetic construct
  misc_feature 1..18: note = Synthetic
  source 1..18: mol_type = other RNA
tgcgtgtgtaccaagttt

SEQ ID NO: 8285 - RNA, 19 nt, synthetic construct
  misc_feature 1..19: note = Synthetic
  source 1..19: mol_type = other RNA
gtgcgtgtgtaccaagttt

SEQ ID NO: 8286 - RNA, 21 nt, synthetic construct
  misc_feature 1..21: note = Synthetic
  source 1..21: mol_type = other RNA
gcgtgcgtgtgtaccaagttt

SEQ ID NO: 8287 - RNA, 22 nt, synthetic construct
  misc_feature 1..22: note = Synthetic
  source 1..22: mol_type = other RNA
ggcgtgcgtgtgtaccaagttt

SEQ ID NO: 8288 - RNA, 23 nt, synthetic construct
  misc_feature 1..23: note = Synthetic
  source 1..23: mol_type = other RNA
tggcgtgcgtgtgtaccaagttt

SEQ ID NO: 8289 - RNA, 24 nt, synthetic construct
  misc_feature 1..24: note = Synthetic
  source 1..24: mol_type = other RNA
gtggcgtgcgtgtgtaccaagttt

SEQ ID NO: 8290 - RNA, 18 nt, synthetic construct
  misc_feature 1..18: note = Synthetic
  source 1..18: mol_type = other RNA
gacgagatactgcgcgaa

SEQ ID NO: 8291 - RNA, 24 nt, synthetic construct
  misc_feature 1..24: note = Synthetic
  source 1..24: mol_type = other RNA
gtcatagacgagatactgcgcgaa

SEQ ID NO: 8292 - RNA, 18 nt, synthetic construct
  misc_feature 1..18: note = Synthetic
  source 1..18: mol_type = other RNA
ggtccatggcgcccacca

SEQ ID NO: 8293 - RNA, 22 nt, synthetic construct
  misc_feature 1..22: note = Synthetic
  source 1..22: mol_type = other RNA
gtcaggtccatggcgcccacca

SEQ ID NO: 8294 - RNA, 19 nt, synthetic construct
  misc_feature 1..19: note = Synthetic
  source 1..19: mol_type = other RNA
gtcacgacgtacgagacca

SEQ ID NO: 8295 - RNA, 23 nt, synthetic construct
  misc_feature 1..23: note = Synthetic
  source 1..23: mol_type = other RNA
gtaggtcacgacgtacgagacca

SEQ ID NO: 8296 - RNA, 24 nt, synthetic construct
  misc_feature 1..24: note = Synthetic
  source 1..24: mol_type = other RNA
ggtaggtcacgacgtacgagacca

SEQ ID NO: 8297 - RNA, 22 nt, synthetic construct
  misc_feature 1..22: note = Synthetic
  source 1..22: mol_type = other RNA
gccaccagattggccgggtgca

SEQ ID NO: 8298 - RNA, 23 nt, synthetic construct
  misc_feature 1..23: note = Synthetic
  source 1..23: mol_type = other RNA
ggccaccagattggccgggtgca

SEQ ID NO: 8299 - RNA, 18 nt, synthetic construct
  misc_feature 1..18: note = Synthetic
  source 1..18: mol_type = other RNA
ggtgcgcggggtccgtca

SEQ ID NO: 8300 - RNA, 19 nt, synthetic construct
  misc_feature 1..19: note = Synthetic
  source 1..19: mol_type = other RNA
gggtgcgcggggtccgtca

SEQ ID NO: 8301 - RNA, 21 nt, synthetic construct
  misc_feature 1..21: note = Synthetic
  source 1..21: mol_type = other RNA
gggggtgcgcggggtccgtca

SEQ ID NO: 8302 - RNA, 24 nt, synthetic construct
  misc_feature 1..24: note = Synthetic
  source 1..24: mol_type = other RNA
gcagggggtgcgcggggtccgtca

SEQ ID NO: 8303 - RNA, 22 nt, synthetic construct
  misc_feature 1..22: note = Synthetic
  source 1..22: mol_type = other RNA
gcgaacagcgcgtggacgggga

SEQ ID NO: 8304 - RNA, 23 nt, synthetic construct
  misc_feature 1..23: note = Synthetic
  source 1..23: mol_type = other RNA
ggcgaacagcgcgtggacgggga

SEQ ID NO: 8305 - RNA, 19 nt, synthetic construct
  misc_feature 1..19: note = Synthetic
  source 1..19: mol_type = other RNA
gcggcaaaccgttccatga

SEQ ID NO: 8306 - RNA, 21 nt, synthetic construct
  misc_feature 1..21: note = Synthetic
  source 1..21: mol_type = other RNA
gcgcggcaaaccgttccatga

SEQ ID NO: 8307 - RNA, 23 nt, synthetic construct
  misc_feature 1..23: note = Synthetic
  source 1..23: mol_type = other RNA
gtgcgcggcaaaccgttccatga

SEQ ID NO: 8308 - RNA, 18 nt, synthetic construct
  misc_feature 1..18: note = Synthetic
  source 1..18: mol_type = other RNA
ggtcgctggcgcaggtga

SEQ ID NO: 8309 - RNA, 19 nt, synthetic construct
  misc_feature 1..19: note = Synthetic
  source 1..19: mol_type = other RNA
gggtcgctggcgcaggtga

SEQ ID NO: 8310 - RNA, 22 nt, synthetic construct
  misc_feature 1..22: note = Synthetic
  source 1..22: mol_type = other RNA
gcggggtcgctggcgcaggtga

SEQ ID NO: 8311 - RNA, 23 nt, synthetic construct
  misc_feature 1..23: note = Synthetic
  source 1..23: mol_type = other RNA
ggcggggtcgctggcgcaggtga

SEQ ID NO: 8312 - RNA, 24 nt, synthetic construct
  misc_feature 1..24: note = Synthetic
  source 1..24: mol_type = other RNA
gggcggggtcgctggcgcaggtga

SEQ ID NO: 8313 - RNA, 18 nt, synthetic construct
  misc_feature 1..18: note = Synthetic
  source 1..18: mol_type = other RNA
ggttgcccatgtcggtga

SEQ ID NO: 8314 - RNA, 21 nt, synthetic construct
  misc_feature 1..21: note = Synthetic
  source 1..21: mol_type = other RNA
gaaggttgcccatgtcggtga

SEQ ID NO: 8315 - RNA, 22 nt, synthetic construct
  misc_feature 1..22: note = Synthetic
  source 1..22: mol_type = other RNA
ggaaggttgcccatgtcggtga

SEQ ID NO: 8316 - RNA, 23 nt, synthetic construct
  misc_feature 1..23: note = Synthetic
  source 1..23: mol_type = other RNA
gggaaggttgcccatgtcggtga

SEQ ID NO: 8317 - RNA, 24 nt, synthetic construct
  misc_feature 1..24: note = Synthetic
  source 1..24: mol_type = other RNA
ggggaaggttgcccatgtcggtga

SEQ ID NO: 8318 - RNA, 18 nt, synthetic construct
  misc_feature 1..18: note = Synthetic
  source 1..18: mol_type = other RNA
gttgacgtcggtcgacac

SEQ ID NO: 8319 - RNA, 21 nt, synthetic construct
  misc_feature 1..21: note = Synthetic
  source 1..21: mol_type = other RNA
gtagttgacgtcggtcgacac

SEQ ID NO: 8320 - RNA, 24 nt, synthetic construct
  misc_feature 1..24: note = Synthetic
  source 1..24: mol_type = other RNA
gaagtagttgacgtcggtcgacac

SEQ ID NO: 8321 - RNA, 19 nt, synthetic construct
  misc_feature 1..19: note = Synthetic
  source 1..19: mol_type = other RNA
gcctcctgaaacaggccac

SEQ ID NO: 8322 - RNA, 23 nt, synthetic construct
  misc_feature 1..23: note = Synthetic
  source 1..23: mol_type = other RNA
gtaggcctcctgaaacaggccac

SEQ ID NO: 8323 - RNA, 24 nt, synthetic construct
  misc_feature 1..24: note = Synthetic
  source 1..24: mol_type = other RNA
ggtaggcctcctgaaacaggccac

SEQ ID NO: 8324 - RNA, 21 nt, synthetic construct
  misc_feature 1..21: note = Synthetic
  source 1..21: mol_type = other RNA
gcttcgctttagctcggcgac

SEQ ID NO: 8325 - RNA, 24 nt, synthetic construct
  misc_feature 1..24: note = Synthetic
  source 1..24: mol_type = other RNA
gaagcttcgctttagctcggcgac

SEQ ID NO: 8326 - RNA, 21 nt, synthetic construct
  misc_feature 1..21: note = Synthetic
  source 1..21: mol_type = other RNA
ggacgacggtgaacccaaacc

SEQ ID NO: 8327 - RNA, 24 nt, synthetic construct
  misc_feature 1..24: note = Synthetic
  source 1..24: mol_type = other RNA
gtcggacgacggtgaacccaaacc

SEQ ID NO: 8328 - RNA, 19 nt, synthetic construct
  misc_feature 1..19: note = Synthetic
  source 1..19: mol_type = other RNA
gaaaatcgctgcgacgccc

SEQ ID NO: 8329 - RNA, 23 nt, synthetic construct
  misc_feature 1..23: note = Synthetic
  source 1..23: mol_type = other RNA
gtacgaaaatcgctgcgacgccc

SEQ ID NO: 8330 - RNA, 23 nt, synthetic construct
  misc_feature 1..23: note = Synthetic
  source 1..23: mol_type = other RNA
gaaacaggccacacgggtcctcc

SEQ ID NO: 8331 - RNA, 18 nt, synthetic construct
  misc_feature 1..18: note = Synthetic
  source 1..18: mol_type = other RNA
ggcggggcgggaaggcgc

SEQ ID NO: 8332 - RNA, 21 nt, synthetic construct
  misc_feature 1..21: note = Synthetic
  source 1..21: mol_type = other RNA
gctggcggggcgggaaggcgc

SEQ ID NO: 8333 - RNA, 18 nt, synthetic construct
  misc_feature 1..18: note = Synthetic
  source 1..18: mol_type = other RNA
ggcgtccgcggctcgggc

SEQ ID NO: 8334 - RNA, 21 nt, synthetic construct
  misc_feature 1..21: note = Synthetic
  source 1..21: mol_type = other RNA
gttcaccacgcgccaggtggc

SEQ ID NO: 8335 - RNA, 24 nt, synthetic construct
  misc_feature 1..24: note = Synthetic
  source 1..24: mol_type = other RNA
gccgttcaccacgcgccaggtggc

SEQ ID NO: 8336 - RNA, 18 nt, synthetic construct
  misc_feature 1..18: note = Synthetic
  source 1..18: mol_type = other RNA
gggctgcataaactgctc

SEQ ID NO: 8337 - RNA, 21 nt, synthetic construct
  misc_feature 1..21: note = Synthetic
  source 1..21: mol_type = other RNA
gtcgggctgcataaactgctc

SEQ ID NO: 8338 - RNA, 24 nt, synthetic construct
  misc_feature 1..24: note = Synthetic
  source 1..24: mol_type = other RNA
gttgtcgggctgcataaactgctc

SEQ ID NO: 8339 - RNA, 19 nt, synthetic construct
  misc_feature 1..19: note = Synthetic
  source 1..19: mol_type = other RNA
gatgctggggggccatcag

SEQ ID NO: 8340 - RNA, 24 nt, synthetic construct
  misc_feature 1..24: note = Synthetic
  source 1..24: mol_type = other RNA
gtccagatgctggggggccatcag

SEQ ID NO: 8341 - RNA, 18 nt, synthetic construct
  misc_feature 1..18: note = Synthetic
  source 1..18: mol_type = other RNA
gcgtcacagtcccacacg

SEQ ID NO: 8342 - RNA, 19 nt, synthetic construct
  misc_feature 1..19: note = Synthetic
  source 1..19: mol_type = other RNA
ggcgtcacagtcccacacg

SEQ ID NO: 8343 - RNA, 18 nt, synthetic construct
  misc_feature 1..18: note = Synthetic
  source 1..18: mol_type = other RNA
gcagcaggtaaaacaccg

SEQ ID NO: 8344 - RNA, 22 nt, synthetic construct
  misc_feature 1..22: note = Synthetic
  source 1..22: mol_type = other RNA
gcctgcagcaggtaaaacaccg

SEQ ID NO: 8345 - RNA, 23 nt, synthetic construct
  misc_feature 1..23: note = Synthetic
  source 1..23: mol_type = other RNA
ggcctgcagcaggtaaaacaccg

SEQ ID NO: 8346 - RNA, 22 nt, synthetic construct
  misc_feature 1..22: note = Synthetic
  source 1..22: mol_type = other RNA
gattccggcgtgcaacgccccg

SEQ ID NO: 8347 - RNA, 23 nt, synthetic construct
  misc_feature 1..23: note = Synthetic
  source 1..23: mol_type = other RNA
ggattccggcgtgcaacgccccg

SEQ ID NO: 8348 - RNA, 19 nt, synthetic construct
  misc_feature 1..19: note = Synthetic
  source 1..19: mol_type = other RNA
gcgtcaacgttcatcagcg

SEQ ID NO: 8349 - RNA, 22 nt, synthetic construct
  misc_feature 1..22: note = Synthetic
  source 1..22: mol_type = other RNA
gccgcgtcaacgttcatcagcg

SEQ ID NO: 8350 - RNA, 19 nt, synthetic construct
  misc_feature 1..19: note = Synthetic
  source 1..19: mol_type = other RNA
gccgggtgcagggggtgcg

SEQ ID NO: 8351 - RNA, 24 nt, synthetic construct
  misc_feature 1..24: note = Synthetic
  source 1..24: mol_type = other RNA
gattggccgggtgcagggggtgcg

SEQ ID NO: 8352 - RNA, 18 nt, synthetic construct
  misc_feature 1..18: note = Synthetic
  source 1..18: mol_type = other RNA
gtccacgttcgcgcgcgg

SEQ ID NO: 8353 - RNA, 19 nt, synthetic construct
  misc_feature 1..19: note = Synthetic
  source 1..19: mol_type = other RNA
ggtccacgttcgcgcgcgg

SEQ ID NO: 8354 - RNA, 24 nt, synthetic construct
  misc_feature 1..24: note = Synthetic
  source 1..24: mol_type = other RNA
gcccaggtccacgttcgcgcgcgg

SEQ ID NO: 8355 - RNA, 18 nt, synthetic construct
  misc_feature 1..18: note = Synthetic
  source 1..18: mol_type = other RNA
gggcactgcggaggaggg

SEQ ID NO: 8356 - RNA, 23 nt, synthetic construct
  misc_feature 1..23: note = Synthetic
  source 1..23: mol_type = other RNA
gttgcgggcactgcggaggaggg

SEQ ID NO: 8357 - RNA, 19 nt, synthetic construct
  misc_feature 1..19: note = Synthetic
  source 1..19: mol_type = other RNA
gtggccgcgaaggcccggg

SEQ ID NO: 8358 - RNA, 22 nt, synthetic construct
  misc_feature 1..22: note = Synthetic
  source 1..22: mol_type = other RNA
gccgtggccgcgaaggcccggg

SEQ ID NO: 8359 - RNA, 23 nt, synthetic construct
  misc_feature 1..23: note = Synthetic
  source 1..23: mol_type = other RNA
ggccgtggccgcgaaggcccggg

SEQ ID NO: 8360 - RNA, 19 nt, synthetic construct
  misc_feature 1..19: note = Synthetic
  source 1..19: mol_type = other RNA
gtgttggccaccagattgg

SEQ ID NO: 8361 - RNA, 23 nt, synthetic construct
  misc_feature 1..23: note = Synthetic
  source 1..23: mol_type = other RNA
gaccgtgttggccaccagattgg

SEQ ID NO: 8362 - RNA, 18 nt, synthetic construct
  misc_feature 1..18: note = Synthetic
  source 1..18: mol_type = other RNA
gtgctgcacgacgggctg

SEQ ID NO: 8363 - RNA, 21 nt, synthetic construct
  misc_feature 1..21: note = Synthetic
  source 1..21: mol_type = other RNA
gacgtgctgcacgacgggctg

SEQ ID NO: 8364 - RNA, 22 nt, synthetic construct
  misc_feature 1..22: note = Synthetic
  source 1..22: mol_type = other RNA
ggacgtgctgcacgacgggctg

SEQ ID NO: 8365 - RNA, 24 nt, synthetic construct
  misc_feature 1..24: note = Synthetic
  source 1..24: mol_type = other RNA
gcggacgtgctgcacgacgggctg

SEQ ID NO: 8366 - RNA, 24 nt, synthetic construct
  misc_feature 1..24: note = Synthetic
  source 1..24: mol_type = other RNA
gatctccgggaccaccatgttctg

SEQ ID NO: 8367 - RNA, 18 nt, synthetic construct
  misc_feature 1..18: note = Synthetic
  source 1..18: mol_type = other RNA
gcgggaaggcgcggggat

SEQ ID NO: 8368 - RNA, 19 nt, synthetic construct
  misc_feature 1..19: note = Synthetic
  source 1..19: mol_type = other RNA
ggcgggaaggcgcggggat

SEQ ID NO: 8369 - RNA, 21 nt, synthetic construct
  misc_feature 1..21: note = Synthetic
  source 1..21: mol_type = other RNA
ggggcgggaaggcgcggggat

SEQ ID NO: 8370 - RNA, 23 nt, synthetic construct
  misc_feature 1..23: note = Synthetic
  source 1..23: mol_type = other RNA
gcggggcgggaaggcgcggggat

SEQ ID NO: 8371 - RNA, 24 nt, synthetic construct
  misc_feature 1..24: note = Synthetic
  source 1..24: mol_type = other RNA
ggcggggcgggaaggcgcggggat

SEQ ID NO: 8372 - RNA, 19 nt, synthetic construct
  misc_feature 1..19: note = Synthetic
  source 1..19: mol_type = other RNA
gccgccacgtacgccccgt

SEQ ID NO: 8373 - RNA, 21 nt, synthetic construct
  misc_feature 1..21: note = Synthetic
  source 1..21: mol_type = other RNA
gggccgccacgtacgccccgt

SEQ ID NO: 8374 - RNA, 22 nt, synthetic construct
  misc_feature 1..22: note = Synthetic
  source 1..22: mol_type = other RNA
ggggccgccacgtacgccccgt

SEQ ID NO: 8375 - RNA, 18 nt, synthetic construct
  misc_feature 1..18: note = Synthetic
  source 1..18: mol_type = other RNA
gcccagctccgggccggt

SEQ ID NO: 8376 - RNA, 22 nt, synthetic construct
  misc_feature 1..22: note = Synthetic
  source 1..22: mol_type = other RNA
gcccgcccagctccgggccggt

SEQ ID NO: 8377 - RNA, 18 nt, synthetic construct
  misc_feature 1..18: note = Synthetic
  source 1..18: mol_type = other RNA
gtaaaaatagtcgccatt

SEQ ID NO: 8378 - RNA, 19 nt, synthetic construct
  misc_feature 1..19: note = Synthetic
  source 1..19: mol_type = other RNA
ggtaaaaatagtcgccatt

SEQ ID NO: 8379 - RNA, 21 nt, synthetic construct
  misc_feature 1..21: note = Synthetic
  source 1..21: mol_type = other RNA
ggggtaaaaatagtcgccatt

SEQ ID NO: 8380 - RNA, 22 nt, synthetic construct
  misc_feature 1..22: note = Synthetic
  source 1..22: mol_type = other RNA
gggggtaaaaatagtcgccatt

SEQ ID NO: 8381 - RNA, 24 nt, synthetic construct
  misc_feature 1..24: note = Synthetic
  source 1..24: mol_type = other RNA
gagggggtaaaaatagtcgccatt

SEQ ID NO: 8382 - RNA, 18 nt, synthetic construct
  misc_feature 1..18: note = Synthetic
  source 1..18: mol_type = other RNA
gcgcgggcggccggtcga

SEQ ID NO: 8383 - RNA, 23 nt, synthetic construct
  misc_feature 1..23: note = Synthetic
  source 1..23: mol_type = other RNA
gacacgcgcgggcggccggtcga

SEQ ID NO: 8384 - RNA, 18 nt, synthetic construct
  misc_feature 1..18: note = Synthetic
  source 1..18: mol_type = other RNA
gtccccgcccccggccac

SEQ ID NO: 8385 - RNA, 24 nt, synthetic construct
  misc_feature 1..24: note = Synthetic
  source 1..24: mol_type = other RNA
gacctagtccccgcccccggccac

SEQ ID NO: 8386 - RNA, 21 nt, synthetic construct
  misc_feature 1..21: note = Synthetic
  source 1..21: mol_type = other RNA
ggacaacggccgcctggccac

SEQ ID NO: 8387 - RNA, 19 nt, synthetic construct
  misc_feature 1..19: note = Synthetic
  source 1..19: mol_type = other RNA
gtacagtttaagcgccccc

SEQ ID NO: 8388 - RNA, 22 nt, synthetic construct
  misc_feature 1..22: note = Synthetic
  source 1..22: mol_type = other RNA
gacgtacagtttaagcgccccc

SEQ ID NO: 8389 - RNA, 24 nt, synthetic construct
  misc_feature 1..24: note = Synthetic
  source 1..24: mol_type = other RNA
gcgacgtacagtttaagcgccccc

SEQ ID NO: 8390 - RNA, 18 nt, synthetic construct
  misc_feature 1..18: note = Synthetic
  source 1..18: mol_type = other RNA
gcccgagccgcggacgcc

SEQ ID NO: 8391 - RNA, 19 nt, synthetic construct
  misc_feature 1..19: note = Synthetic
  source 1..19: mol_type = other RNA
ggcccgagccgcggacgcc

SEQ ID NO: 8392 - RNA, 18 nt, synthetic construct
  misc_feature 1..18: note = Synthetic
  source 1..18: mol_type = other RNA
gggccgctgctgcaccgc

SEQ ID NO: 8393 - RNA, 19 nt, synthetic construct
  misc_feature 1..19: note = Synthetic
  source 1..19: mol_type = other RNA
ggggccgctgctgcaccgc

SEQ ID NO: 8394 - RNA, 21 nt, synthetic construct
  misc_feature 1..21: note = Synthetic
  source 1..21: mol_type = other RNA
gcggggccgctgctgcaccgc

SEQ ID NO: 8395 - RNA, 22 nt, synthetic construct
  misc_feature 1..22: note = Synthetic
  source 1..22: mol_type = other RNA
gcgcccaggtgccgcggcgcgc

SEQ ID NO: 8396 - RNA, 24 nt, synthetic construct
  misc_feature 1..24: note = Synthetic
  source 1..24: mol_type = other RNA
gtgcgcccaggtgccgcggcgcgc

SEQ ID NO: 8397 - RNA, 24 nt, synthetic construct
  misc_feature 1..24: note = Synthetic
  source 1..24: mol_type = other RNA
gccccccagacgacgcgcgtgcgc

SEQ ID NO: 8398 - RNA, 18 nt, synthetic construct
  misc_feature 1..18: note = Synthetic
  source 1..18: mol_type = other RNA
gggcaggcgcaagccgag

SEQ ID NO: 8399 - RNA, 21 nt, synthetic construct
  misc_feature 1..21: note = Synthetic
  source 1..21: mol_type = other RNA
ggcgggcaggcgcaagccgag

SEQ ID NO: 8400 - RNA, 22 nt, synthetic construct
  misc_feature 1..22: note = Synthetic
  source 1..22: mol_type = other RNA
gggcgggcaggcgcaagccgag

SEQ ID NO: 8401 - RNA, 21 nt, synthetic construct
  misc_feature 1..21: note = Synthetic
  source 1..21: mol_type = other RNA
gtttacgcgggggacaaggag

SEQ ID NO: 8402 - RNA, 23 nt, synthetic construct
  misc_feature 1..23: note = Synthetic
  source 1..23: mol_type = other RNA
gcgtttacgcgggggacaaggag

SEQ ID NO: 8403 - RNA, 24 nt, synthetic construct
  misc_feature 1..24: note = Synthetic
  source 1..24: mol_type = other RNA
ggcgtttacgcgggggacaaggag

SEQ ID NO: 8404 - RNA, 18 nt, synthetic construct
  misc_feature 1..18: note = Synthetic
  source 1..18: mol_type = other RNA
gagcgcctgatcgtggag

SEQ ID NO: 8405 - RNA, 19 nt, synthetic construct
  misc_feature 1..19: note = Synthetic
  source 1..19: mol_type = other RNA
ggagcgcctgatcgtggag

SEQ ID NO: 8406 - RNA, 23 nt, synthetic construct
  misc_feature 1..23: note = Synthetic
  source 1..23: mol_type = other RNA
gcctggagcgcctgatcgtggag

SEQ ID NO: 8407 - RNA, 18 nt, synthetic construct
  misc_feature 1..18: note = Synthetic
  source 1..18: mol_type = other RNA
ggcccacgggcgggtccg

SEQ ID NO: 8408 - RNA, 22 nt, synthetic construct
  misc_feature 1..22: note = Synthetic
  source 1..22: mol_type = other RNA
gcctggcccacgggcgggtccg

SEQ ID NO: 8409 - RNA, 24 nt, synthetic construct
  misc_feature 1..24: note = Synthetic
  source 1..24: mol_type = other RNA
gcgcctggcccacgggcgggtccg

SEQ ID NO: 8410 - RNA, 22 nt, synthetic construct
  misc_feature 1..22: note = Synthetic
  source 1..22: mol_type = other RNA
gtcccggagatcgcccccggcg

SEQ ID NO: 8411 - RNA, 23 nt, synthetic construct
  misc_feature 1..23: note = Synthetic
  source 1..23: mol_type = other RNA
ggtcccggagatcgcccccggcg

SEQ ID NO: 8412 - RNA, 18 nt, synthetic construct
  misc_feature 1..18: note = Synthetic
  source 1..18: mol_type = other RNA
gcagcgcctggcccacgg

SEQ ID NO: 8413 - RNA, 19 nt, synthetic construct
  misc_feature 1..19: note = Synthetic
  source 1..19: mol_type = other RNA
ggcagcgcctggcccacgg

SEQ ID NO: 8414 - RNA, 21 nt, synthetic construct
  misc_feature 1..21: note = Synthetic
  source 1..21: mol_type = other RNA
ggggcagcgcctggcccacgg

SEQ ID NO: 8415 - RNA, 22 nt, synthetic construct
  misc_feature 1..22: note = Synthetic
  source 1..22: mol_type = other RNA
gggggcagcgcctggcccacgg

SEQ ID NO: 8416 - RNA, 21 nt, synthetic construct
  misc_feature 1..21: note = Synthetic
  source 1..21: mol_type = other RNA
ggcccggcacgaaactggcgg

SEQ ID NO: 8417 - RNA, 23 nt, synthetic construct
  misc_feature 1..23: note = Synthetic
  source 1..23: mol_type = other RNA
gtggcccggcacgaaactggcgg

SEQ ID NO: 8418 - RNA, 24 nt, synthetic construct
  misc_feature 1..24: note = Synthetic
  source 1..24: mol_type = other RNA
ggtggcccggcacgaaactggcgg

SEQ ID NO: 8419 - RNA, 22 nt, synthetic construct
  misc_feature 1..22: note = Synthetic
  source 1..22: mol_type = other RNA
gcgctgacctacgcgctcatgg

SEQ ID NO: 8420 - RNA, 18 nt, synthetic construct
  misc_feature 1..18: note = Synthetic
  source 1..18: mol_type = other RNA
ggaccgccatcgcgactg

SEQ ID NO: 8421 - RNA, 23 nt, synthetic construct
  misc_feature 1..23: note = Synthetic
  source 1..23: mol_type = other RNA
gccctggaccgccatcgcgactg

SEQ ID NO: 8422 - RNA, 24 nt, synthetic construct
  misc_feature 1..24: note = Synthetic
  source 1..24: mol_type = other RNA
ggccctggaccgccatcgcgactg

SEQ ID NO: 8423 - RNA, 24 nt, synthetic construct
  misc_feature 1..24: note = Synthetic
  source 1..24: mol_type = other RNA
gtaataaaccgccccgcccttcct

SEQ ID NO: 8424 - RNA, 21 nt, synthetic construct
  misc_feature 1..21: note = Synthetic
  source 1..21: mol_type = other RNA
ggacgcccggggcctggagct

SEQ ID NO: 8425 - RNA, 22 nt, synthetic construct
  misc_feature 1..22: note = Synthetic
  source 1..22: mol_type = other RNA
gggacgcccggggcctggagct

SEQ ID NO: 8426 - RNA, 19 nt, synthetic construct
  misc_feature 1..19: note = Synthetic
  source 1..19: mol_type = other RNA
gcccagcccgtccccgtgt

SEQ ID NO: 8427 - RNA, 23 nt, synthetic construct
  misc_feature 1..23: note = Synthetic
  source 1..23: mol_type = other RNA
gccggcccagcccgtccccgtgt

SEQ ID NO: 8428 - RNA, 24 nt, synthetic construct
  misc_feature 1..24: note = Synthetic
  source 1..24: mol_type = other RNA
ggccggcccagcccgtccccgtgt

SEQ ID NO: 8429 - RNA, 22 nt, synthetic construct
  misc_feature 1..22: note = Synthetic
  source 1..22: mol_type = other RNA
gaccacggccaggacgccgtgt

SEQ ID NO: 8430 - RNA, 23 nt, synthetic construct
  misc_feature 1..23: note = Synthetic
  source 1..23: mol_type = other RNA
ggaccacggccaggacgccgtgt

SEQ ID NO: 8431 - RNA, 24 nt, synthetic construct
  misc_feature 1..24: note = Synthetic
  source 1..24: mol_type = other RNA
gcaccccgcgttcgacttctttgt

SEQ ID NO: 8432 - RNA, 19 nt, synthetic construct
  misc_feature 1..19: note = Synthetic
  source 1..19: mol_type = other RNA
agacgagatactgcgcgaa

SEQ ID NO: 8433 - RNA, 21 nt, synthetic construct
  misc_feature 1..21: note = Synthetic
  source 1..21: mol_type = other RNA
atagacgagatactgcgcgaa

SEQ ID NO: 8434 - RNA, 22 nt, synthetic construct
  misc_feature 1..22: note = Synthetic
  source 1..22: mol_type = other RNA
catagacgagatactgcgcgaa

SEQ ID NO: 8435 - RNA, 23 nt, synthetic construct
  misc_feature 1..23: note = Synthetic
  source 1..23: mol_type = other RNA
tcatagacgagatactgcgcgaa

SEQ ID NO: 8436 - RNA, 18 nt, synthetic construct
  misc_feature 1..18: note = Synthetic
  source 1..18: mol_type = other RNA
tacatgccgccgcgtaca

SEQ ID NO: 8437 - RNA, 19 nt, synthetic construct
  misc_feature 1..19: note = Synthetic
  source 1..19: mol_type = other RNA
ttacatgccgccgcgtaca

SEQ ID NO: 8438 - RNA, 21 nt, synthetic construct
  misc_feature 1..21: note = Synthetic
  source 1..21: mol_type = other RNA
cgttacatgccgccgcgtaca

SEQ ID NO: 8439 - RNA, 22 nt, synthetic construct
  misc_feature 1..22: note = Synthetic
  source 1..22: mol_type = other RNA
acgttacatgccgccgcgtaca

SEQ ID NO: 8440 - RNA, 23 nt, synthetic construct
  misc_feature 1..23: note = Synthetic
  source 1..23: mol_type = other RNA
cacgttacatgccgccgcgtaca

SEQ ID NO: 8441 - RNA, 24 nt, synthetic construct
  misc_feature 1..24: note = Synthetic
  source 1..24: mol_type = other RNA
ccacgttacatgccgccgcgtaca

SEQ ID NO: 8442 - RNA, 19 nt, synthetic construct
  misc_feature 1..19: note = Synthetic
  source 1..19: mol_type = other RNA
aggtccatggcgcccacca

SEQ ID NO: 8443 - RNA, 21 nt, synthetic construct
  misc_feature 1..21: note = Synthetic
  source 1..21: mol_type = other RNA
tcaggtccatggcgcccacca

SEQ ID NO: 8444 - RNA, 23 nt, synthetic construct
  misc_feature 1..23: note = Synthetic
  source 1..23: mol_type = other RNA
cgtcaggtccatggcgcccacca

SEQ ID NO: 8445 - RNA, 24 nt, synthetic construct
  misc_feature 1..24: note = Synthetic
  source 1..24: mol_type = other RNA
acgtcaggtccatggcgcccacca

SEQ ID NO: 8446 - RNA, 18 nt, synthetic construct
  misc_feature 1..18: note = Synthetic
  source 1..18: mol_type = other RNA
tcacgacgtacgagacca

SEQ ID NO: 8447 - RNA, 21 nt, synthetic construct
  misc_feature 1..21: note = Synthetic
  source 1..21: mol_type = other RNA
aggtcacgacgtacgagacca

SEQ ID NO: 8448 - RNA, 22 nt, synthetic construct
  misc_feature 1..22: note = Synthetic
  source 1..22: mol_type = other RNA
taggtcacgacgtacgagacca

SEQ ID NO: 8449 - RNA, 18 nt, synthetic construct
  misc_feature 1..18: note = Synthetic
  source 1..18: mol_type = other RNA
ccagattggccgggtgca

SEQ ID NO: 8450 - RNA, 19 nt, synthetic construct
  misc_feature 1..19: note = Synthetic
  source 1..19: mol_type = other RNA
accagattggccgggtgca

SEQ ID NO: 8451 - RNA, 21 nt, synthetic construct
  misc_feature 1..21: note = Synthetic
  source 1..21: mol_type = other RNA
ccaccagattggccgggtgca

SEQ ID NO: 8452 - RNA, 24 nt, synthetic construct
  misc_feature 1..24: note = Synthetic
  source 1..24: mol_type = other RNA
tggccaccagattggccgggtgca

SEQ ID NO: 8453 - RNA, 22 nt, synthetic construct
  misc_feature 1..22: note = Synthetic
  source 1..22: mol_type = other RNA
agggggtgcgcggggtccgtca

SEQ ID NO: 8454 - RNA, 23 nt, synthetic construct
  misc_feature 1..23: note = Synthetic
  source 1..23: mol_type = other RNA
cagggggtgcgcggggtccgtca

SEQ ID NO: 8455 - RNA, 18 nt, synthetic construct
  misc_feature 1..18: note = Synthetic
  source 1..18: mol_type = other RNA
acggattggcggcttcga

SEQ ID NO: 8456 - RNA, 19 nt, synthetic construct
  misc_feature 1..19: note = Synthetic
  source 1..19: mol_type = other RNA
tacggattggcggcttcga

SEQ ID NO: 8457 - RNA, 21 nt, synthetic construct
  misc_feature 1..21: note = Synthetic
  source 1..21: mol_type = other RNA
cgtacggattggcggcttcga

SEQ ID NO: 8458 - RNA, 22 nt, synthetic construct
  misc_feature 1..22: note = Synthetic
  source 1..22: mol_type = other RNA
ccgtacggattggcggcttcga

SEQ ID NO: 8459 - RNA, 23 nt, synthetic construct
  misc_feature 1..23: note = Synthetic
  source 1..23: mol_type = other RNA
cccgtacggattggcggcttcga

SEQ ID NO: 8460 - RNA, 24 nt, synthetic construct
  misc_feature 1..24: note = Synthetic
  source 1..24: mol_type = other RNA
ccccgtacggattggcggcttcga

SEQ ID NO: 8461 - RNA, 18 nt, synthetic construct
  misc_feature 1..18: note = Synthetic
  source 1..18: mol_type = other RNA
acagcgcgtggacgggga

SEQ ID NO: 8462 - RNA, 19 nt, synthetic construct
  misc_feature 1..19: note = Synthetic
  source 1..19: mol_type = other RNA
aacagcgcgtggacgggga

SEQ ID NO: 8463 - RNA, 21 nt, synthetic construct
  misc_feature 1..21: note = Synthetic
  source 1..21: mol_type = other RNA
cgaacagcgcgtggacgggga

SEQ ID NO: 8464 - RNA, 24 nt, synthetic construct
  misc_feature 1..24: note = Synthetic
  source 1..24: mol_type = other RNA
cggcgaacagcgcgtggacgggga

SEQ ID NO: 8465 - RNA, 18 nt, synthetic construct
  misc_feature 1..18: note = Synthetic
  source 1..18: mol_type = other RNA
cggcaaaccgttccatga

SEQ ID NO: 8466 - RNA, 22 nt, synthetic construct
  misc_feature 1..22: note = Synthetic
  source 1..22: mol_type = other RNA
tgcgcggcaaaccgttccatga

SEQ ID NO: 8467 - RNA, 24 nt, synthetic construct
  misc_feature 1..24: note = Synthetic
  source 1..24: mol_type = other RNA
cgtgcgcggcaaaccgttccatga

SEQ ID NO: 8468 - RNA, 21 nt, synthetic construct
  misc_feature 1..21: note = Synthetic
  source 1..21: mol_type = other RNA
cggggtcgctggcgcaggtga

SEQ ID NO: 8469 - RNA, 19 nt, synthetic construct
  misc_feature 1..19: note = Synthetic
  source 1..19: mol_type = other RNA
aggttgcccatgtcggtga

SEQ ID NO: 8470 - RNA, 19 nt, synthetic construct
  misc_feature 1..19: note = Synthetic
  source 1..19: mol_type = other RNA
agttgacgtcggtcgacac

SEQ ID NO: 8471 - RNA, 22 nt, synthetic construct
  misc_feature 1..22: note = Synthetic
  source 1..22: mol_type = other RNA
agtagttgacgtcggtcgacac

SEQ ID NO: 8472 - RNA, 23 nt, synthetic construct
  misc_feature 1..23: note = Synthetic
  source 1..23: mol_type = other RNA
aagtagttgacgtcggtcgacac

SEQ ID NO: 8473 - RNA, 18 nt, synthetic construct
  misc_feature 1..18: note = Synthetic
  source 1..18: mol_type = other RNA
cctcctgaaacaggccac

SEQ ID NO: 8474 - RNA, 21 nt, synthetic construct
  misc_feature 1..21: note = Synthetic
  source 1..21: mol_type = other RNA
aggcctcctgaaacaggccac

SEQ ID NO: 8475 - RNA, 22 nt, synthetic construct
  misc_feature 1..22: note = Synthetic
  source 1..22: mol_type = other RNA
taggcctcctgaaacaggccac

SEQ ID NO: 8476 - RNA, 18 nt, synthetic construct
  misc_feature 1..18: note = Synthetic
  source 1..18: mol_type = other RNA
tcgctttagctcggcgac

SEQ ID NO: 8477 - RNA, 19 nt, synthetic construct
  misc_feature 1..19: note = Synthetic
  source 1..19: mol_type = other RNA
ttcgctttagctcggcgac

SEQ ID NO: 8478 - RNA, 22 nt, synthetic construct
  misc_feature 1..22: note = Synthetic
  source 1..22: mol_type = other RNA
agcttcgctttagctcggcgac

SEQ ID NO: 8479 - RNA, 23 nt, synthetic construct
  misc_feature 1..23: note = Synthetic
  source 1..23: mol_type = other RNA
aagcttcgctttagctcggcgac

SEQ ID NO: 8480 - RNA, 18 nt, synthetic construct
  misc_feature 1..18: note = Synthetic
  source 1..18: mol_type = other RNA
cgacggtgaacccaaacc

SEQ ID NO: 8481 - RNA, 19 nt, synthetic construct
  misc_feature 1..19: note = Synthetic
  source 1..19: mol_type = other RNA
acgacggtgaacccaaacc

SEQ ID NO: 8482 - RNA, 22 nt, synthetic construct
  misc_feature 1..22: note = Synthetic
  source 1..22: mol_type = other RNA
cggacgacggtgaacccaaacc

SEQ ID NO: 8483 - RNA, 23 nt, synthetic construct
  misc_feature 1..23: note = Synthetic
  source 1..23: mol_type = other RNA
tcggacgacggtgaacccaaacc

SEQ ID NO: 8484 - RNA, 18 nt, synthetic construct
  misc_feature 1..18: note = Synthetic
  source 1..18: mol_type = other RNA
ccccggcggcgcgtcccc

SEQ ID NO: 8485 - RNA, 19 nt, synthetic construct
  misc_feature 1..19: note = Synthetic
  source 1..19: mol_type = other RNA
cccccggcggcgcgtcccc

SEQ ID NO: 8486 - RNA, 21 nt, synthetic construct
  misc_feature 1..21: note = Synthetic
  source 1..21: mol_type = other RNA
cgcccccggcggcgcgtcccc

SEQ ID NO: 8487 - RNA, 22 nt, synthetic construct
  misc_feature 1..22: note = Synthetic
  source 1..22: mol_type = other RNA
acgcccccggcggcgcgtcccc

SEQ ID NO: 8488 - RNA, 23 nt, synthetic construct
  misc_feature 1..23: note = Synthetic
  source 1..23: mol_type = other RNA
aacgcccccggcggcgcgtcccc

SEQ ID NO: 8489 - RNA, 24 nt, synthetic construct
  misc_feature 1..24: note = Synthetic
  source 1..24: mol_type = other RNA
aaacgcccccggcggcgcgtcccc

SEQ ID NO: 8490 - RNA, 18 nt, synthetic construct
  misc_feature 1..18: note = Synthetic
  source 1..18: mol_type = other RNA
aaaatcgctgcgacgccc

SEQ ID NO: 8491 - RNA, 21 nt, synthetic construct
  misc_feature 1..21: note = Synthetic
  source 1..21: mol_type = other RNA
acgaaaatcgctgcgacgccc

SEQ ID NO: 8492 - RNA, 22 nt, synthetic construct
  misc_feature 1..22: note = Synthetic
  source 1..22: mol_type = other RNA
tacgaaaatcgctgcgacgccc

SEQ ID NO: 8493 - RNA, 24 nt, synthetic construct
  misc_feature 1..24: note = Synthetic
  source 1..24: mol_type = other RNA
cgtacgaaaatcgctgcgacgccc

SEQ ID NO: 8494 - RNA, 18 nt, synthetic construct
  misc_feature 1..18: note = Synthetic
  source 1..18: mol_type = other RNA
aggccacacgggtcctcc

SEQ ID NO: 8495 - RNA, 19 nt, synthetic construct
  misc_feature 1..19: note = Synthetic
  source 1..19: mol_type = other RNA
caggccacacgggtcctcc

SEQ ID NO: 8496 - RNA, 21 nt, synthetic construct
  misc_feature 1..21: note = Synthetic
  source 1..21: mol_type = other RNA
aacaggccacacgggtcctcc

SEQ ID NO: 8497 - RNA, 22 nt, synthetic construct
  misc_feature 1..22: note = Synthetic
  source 1..22: mol_type = other RNA
aaacaggccacacgggtcctcc

SEQ ID NO: 8498 - RNA, 24 nt, synthetic construct
  misc_feature 1..24: note = Synthetic
  source 1..24: mol_type = other RNA
tgaaacaggccacacgggtcctcc

SEQ ID NO: 8499 - RNA, 18 nt, synthetic construct
  misc_feature 1..18: note = Synthetic
  source 1..18: mol_type = other RNA
agagccagtcccttgagc

SEQ ID NO: 8500 - RNA, 19 nt, synthetic construct
  misc_feature 1..19: note = Synthetic
  source 1..19: mol_type = other RNA
cagagccagtcccttgagc

SEQ ID NO: 8501 - RNA, 21 nt, synthetic construct
  misc_feature 1..21: note = Synthetic
  source 1..21: mol_type = other RNA
tacagagccagtcccttgagc

SEQ ID NO: 8502 - RNA, 22 nt, synthetic construct
  misc_feature 1..22: note = Synthetic
  source 1..22: mol_type = other RNA
ttacagagccagtcccttgagc

SEQ ID NO: 8503 - RNA, 23 nt, synthetic construct
  misc_feature 1..23: note = Synthetic
  source 1..23: mol_type = other RNA
attacagagccagtcccttgagc

SEQ ID NO: 8504 - RNA, 24 nt, synthetic construct
  misc_feature 1..24: note = Synthetic
  source 1..24: mol_type = other RNA
tattacagagccagtcccttgagc

SEQ ID NO: 8505 - RNA, 19 nt, synthetic construct
  misc_feature 1..19: note = Synthetic
  source 1..19: mol_type = other RNA
tggcggggcgggaaggcgc

SEQ ID NO: 8506 - RNA, 22 nt, synthetic construct
  misc_feature 1..22: note = Synthetic
  source 1..22: mol_type = other RNA
agctggcggggcgggaaggcgc

SEQ ID NO: 8507 - RNA, 23 nt, synthetic construct
  misc_feature 1..23: note = Synthetic
  source 1..23: mol_type = other RNA
cagctggcggggcgggaaggcgc

SEQ ID NO: 8508 - RNA, 24 nt, synthetic construct
  misc_feature 1..24: note = Synthetic
  source 1..24: mol_type = other RNA
acagctggcggggcgggaaggcgc

SEQ ID NO: 8509 - RNA, 19 nt, synthetic construct
  misc_feature 1..19: note = Synthetic
  source 1..19: mol_type = other RNA
cggcgtccgcggctcgggc

SEQ ID NO: 8510 - RNA, 21 nt, synthetic construct
  misc_feature 1..21: note = Synthetic
  source 1..21: mol_type = other RNA
cgcggcgtccgcggctcgggc

SEQ ID NO: 8511 - RNA, 22 nt, synthetic construct
  misc_feature 1..22: note = Synthetic
  source 1..22: mol_type = other RNA
ccgcggcgtccgcggctcgggc

SEQ ID NO: 8512 - RNA, 23 nt, synthetic construct
  misc_feature 1..23: note = Synthetic
  source 1..23: mol_type = other RNA
tccgcggcgtccgcggctcgggc

SEQ ID NO: 8513 - RNA, 24 nt, synthetic construct
  misc_feature 1..24: note = Synthetic
  source 1..24: mol_type = other RNA
atccgcggcgtccgcggctcgggc

SEQ ID NO: 8514 - RNA, 18 nt, synthetic construct
  misc_feature 1..18: note = Synthetic
  source 1..18: mol_type = other RNA
caccacgcgccaggtggc

SEQ ID NO: 8515 - RNA, 19 nt, synthetic construct
  misc_feature 1..19: note = Synthetic
  source 1..19: mol_type = other RNA
tcaccacgcgccaggtggc

SEQ ID NO: 8516 - RNA, 22 nt, synthetic construct
  misc_feature 1..22: note = Synthetic
  source 1..22: mol_type = other RNA
cgttcaccacgcgccaggtggc

SEQ ID NO: 8517 - RNA, 23 nt, synthetic construct
  misc_feature 1..23: note = Synthetic
  source 1..23: mol_type = other RNA
ccgttcaccacgcgccaggtggc

SEQ ID NO: 8518 - RNA, 19 nt, synthetic construct
  misc_feature 1..19: note = Synthetic
  source 1..19: mol_type = other RNA
cgggctgcataaactgctc

SEQ ID NO: 8519 - RNA, 22 nt, synthetic construct
  misc_feature 1..22: note = Synthetic
  source 1..22: mol_type = other RNA
tgtcgggctgcataaactgctc

SEQ ID NO: 8520 - RNA, 23 nt, synthetic construct
  misc_feature 1..23: note = Synthetic
  source 1..23: mol_type = other RNA
ttgtcgggctgcataaactgctc

SEQ ID NO: 8521 - RNA, 18 nt, synthetic construct
  misc_feature 1..18: note = Synthetic
  source 1..18: mol_type = other RNA
atgctggggggccatcag

SEQ ID NO: 8522 - RNA, 21 nt, synthetic construct
  misc_feature 1..21: note = Synthetic
  source 1..21: mol_type = other RNA
cagatgctggggggccatcag

SEQ ID NO: 8523 - RNA, 22 nt, synthetic construct
  misc_feature 1..22: note = Synthetic
  source 1..22: mol_type = other RNA
ccagatgctggggggccatcag

SEQ ID NO: 8524 - RNA, 23 nt, synthetic construct
  misc_feature 1..23: note = Synthetic
  source 1..23: mol_type = other RNA
tccagatgctggggggccatcag

SEQ ID NO: 8525 - RNA, 18 nt, synthetic construct
  misc_feature 1..18: note = Synthetic
  source 1..18: mol_type = other RNA
ccacaaagaagtcgaacg

SEQ ID NO: 8526 - RNA, 19 nt, synthetic construct
  misc_feature 1..19: note = Synthetic
  source 1..19: mol_type = other RNA
cccacaaagaagtcgaacg

SEQ ID NO: 8527 - RNA, 21 nt, synthetic construct
  misc_feature 1..21: note = Synthetic
  source 1..21: mol_type = other RNA
cccccacaaagaagtcgaacg

SEQ ID NO: 8528 - RNA, 22 nt, synthetic construct
  misc_feature 1..22: note = Synthetic
  source 1..22: mol_type = other RNA
acccccacaaagaagtcgaacg

SEQ ID NO: 8529 - RNA, 23 nt, synthetic construct
  misc_feature 1..23: note = Synthetic
  source 1..23: mol_type = other RNA
cacccccacaaagaagtcgaacg

SEQ ID NO: 8530 - RNA, 24 nt, synthetic construct
  misc_feature 1..24: note = Synthetic
  source 1..24: mol_type = other RNA
ccacccccacaaagaagtcgaacg

SEQ ID NO: 8531 - RNA, 21 nt, synthetic construct
  misc_feature 1..21: note = Synthetic
  source 1..21: mol_type = other RNA
agggcgtcacagtcccacacg

SEQ ID NO: 8532 - RNA, 22 nt, synthetic construct
  misc_feature 1..22: note = Synthetic
  source 1..22: mol_type = other RNA
cagggcgtcacagtcccacacg

SEQ ID NO: 8533 - RNA, 23 nt, synthetic construct
  misc_feature 1..23: note = Synthetic
  source 1..23: mol_type = other RNA
tcagggcgtcacagtcccacacg

SEQ ID NO: 8534 - RNA, 24 nt, synthetic construct
  misc_feature 1..24: note = Synthetic
  source 1..24: mol_type = other RNA
atcagggcgtcacagtcccacacg

SEQ ID NO: 8535 - RNA, 19 nt, synthetic construct
  misc_feature 1..19: note = Synthetic
  source 1..19: mol_type = other RNA
tgcagcaggtaaaacaccg

SEQ ID NO: 8536 - RNA, 21 nt, synthetic construct
  misc_feature 1..21: note = Synthetic
  source 1..21: mol_type = other RNA
cctgcagcaggtaaaacaccg

SEQ ID NO: 8537 - RNA, 24 nt, synthetic construct
  misc_feature 1..24: note = Synthetic
  source 1..24: mol_type = other RNA
cggcctgcagcaggtaaaacaccg

SEQ ID NO: 8538 - RNA, 18 nt, synthetic construct
  misc_feature 1..18: note = Synthetic
  source 1..18: mol_type = other RNA
ccggcgtgcaacgccccg

SEQ ID NO: 8539 - RNA, 19 nt, synthetic construct
  misc_feature 1..19: note = Synthetic
  source 1..19: mol_type = other RNA
tccggcgtgcaacgccccg

SEQ ID NO: 8540 - RNA, 21 nt, synthetic construct
  misc_feature 1..21: note = Synthetic
  source 1..21: mol_type = other RNA
attccggcgtgcaacgccccg

SEQ ID NO: 8541 - RNA, 24 nt, synthetic construct
  misc_feature 1..24: note = Synthetic
  source 1..24: mol_type = other RNA
aggattccggcgtgcaacgccccg

SEQ ID NO: 8542 - RNA, 18 nt, synthetic construct
  misc_feature 1..18: note = Synthetic
  source 1..18: mol_type = other RNA
cgaggggtggcagcagcg

SEQ ID NO: 8543 - RNA, 19 nt, synthetic construct
  misc_feature 1..19: note = Synthetic
  source 1..19: mol_type = other RNA
acgaggggtggcagcagcg

SEQ ID NO: 8544 - RNA, 21 nt, synthetic construct
  misc_feature 1..21: note = Synthetic
  source 1..21: mol_type = other RNA
acacgaggggtggcagcagcg

SEQ ID NO: 8545 - RNA, 22 nt, synthetic construct
  misc_feature 1..22: note = Synthetic
  source 1..22: mol_type = other RNA
cacacgaggggtggcagcagcg

SEQ ID NO: 8546 - RNA, 23 nt, synthetic construct
  misc_feature 1..23: note = Synthetic
  source 1..23: mol_type = other RNA
ccacacgaggggtggcagcagcg

SEQ ID NO: 8547 - RNA, 24 nt, synthetic construct
  misc_feature 1..24: note = Synthetic
  source 1..24: mol_type = other RNA
cccacacgaggggtggcagcagcg

SEQ ID NO: 8548 - RNA, 18 nt, synthetic construct
  misc_feature 1..18: note = Synthetic
  source 1..18: mol_type = other RNA
cgtcaacgttcatcagcg

SEQ ID NO: 8549 - RNA, 21 nt, synthetic construct
  misc_feature 1..21: note = Synthetic
  source 1..21: mol_type = other RNA
ccgcgtcaacgttcatcagcg

SEQ ID NO: 8550 - RNA, 23 nt, synthetic construct
  misc_feature 1..23: note = Synthetic
  source 1..23: mol_type = other RNA
cgccgcgtcaacgttcatcagcg

SEQ ID NO: 8551 - RNA, 24 nt, synthetic construct
  misc_feature 1..24: note = Synthetic
  source 1..24: mol_type = other RNA
ccgccgcgtcaacgttcatcagcg

SEQ ID NO: 8552 - RNA, 18 nt, synthetic construct
  misc_feature 1..18: note = Synthetic
  source 1..18: mol_type = other RNA
ccgggtgcagggggtgcg

SEQ ID NO: 8553 - RNA, 21 nt, synthetic construct
  misc_feature 1..21: note = Synthetic
  source 1..21: mol_type = other RNA
tggccgggtgcagggggtgcg

SEQ ID NO: 8554 - RNA, 22 nt, synthetic construct
  misc_feature 1..22: note = Synthetic
  source 1..22: mol_type = other RNA
ttggccgggtgcagggggtgcg

SEQ ID NO: 8555 - RNA, 23 nt, synthetic construct
  misc_feature 1..23: note = Synthetic
  source 1..23: mol_type = other RNA
attggccgggtgcagggggtgcg

SEQ ID NO: 8556 - RNA, 21 nt, synthetic construct
  misc_feature 1..21: note = Synthetic
  source 1..21: mol_type = other RNA
caggtccacgttcgcgcgcgg

SEQ ID NO: 8557 - RNA, 22 nt, synthetic construct
  misc_feature 1..22: note = Synthetic
  source 1..22: mol_type = other RNA
ccaggtccacgttcgcgcgcgg

SEQ ID NO: 8558 - RNA, 23 nt, synthetic construct
  misc_feature 1..23: note = Synthetic
  source 1..23: mol_type = other RNA
cccaggtccacgttcgcgcgcgg

SEQ ID NO: 8559 - RNA, 19 nt, synthetic construct
  misc_feature 1..19: note = Synthetic
  source 1..19: mol_type = other RNA
cgggcactgcggaggaggg

SEQ ID NO: 8560 - RNA, 21 nt, synthetic construct
  misc_feature 1..21: note = Synthetic
  source 1..21: mol_type = other RNA
tgcgggcactgcggaggaggg

SEQ ID NO: 8561 - RNA, 22 nt, synthetic construct
  misc_feature 1..22: note = Synthetic
  source 1..22: mol_type = other RNA
ttgcgggcactgcggaggaggg

SEQ ID NO: 8562 - RNA, 24 nt, synthetic construct
  misc_feature 1..24: note = Synthetic
  source 1..24: mol_type = other RNA
cgttgcgggcactgcggaggaggg

SEQ ID NO: 8563 - RNA, 18 nt, synthetic construct
  misc_feature 1..18: note = Synthetic
  source 1..18: mol_type = other RNA
tggccgcgaaggcccggg

SEQ ID NO: 8564 - RNA, 21 nt, synthetic construct
  misc_feature 1..21: note = Synthetic
  source 1..21: mol_type = other RNA
ccgtggccgcgaaggcccggg

SEQ ID NO: 8565 - RNA, 24 nt, synthetic construct
  misc_feature 1..24: note = Synthetic
  source 1..24: mol_type = other RNA
tggccgtggccgcgaaggcccggg

SEQ ID NO: 8566 - RNA, 18 nt, synthetic construct
  misc_feature 1..18: note = Synthetic
  source 1..18: mol_type = other RNA
tgttggccaccagattgg

SEQ ID NO: 8567 - RNA, 21 nt, synthetic construct
  misc_feature 1..21: note = Synthetic
  source 1..21: mol_type = other RNA
ccgtgttggccaccagattgg

SEQ ID NO: 8568 - RNA, 22 nt, synthetic construct
  misc_feature 1..22: note = Synthetic
  source 1..22: mol_type = other RNA
accgtgttggccaccagattgg

SEQ ID NO: 8569 - RNA, 24 nt, synthetic construct
  misc_feature 1..24: note = Synthetic
  source 1..24: mol_type = other RNA
tgaccgtgttggccaccagattgg

SEQ ID NO: 8570 - RNA, 19 nt, synthetic construct
  misc_feature 1..19: note = Synthetic
  source 1..19: mol_type = other RNA
cgtgctgcacgacgggctg

SEQ ID NO: 8571 - RNA, 23 nt, synthetic construct
  misc_feature 1..23: note = Synthetic
  source 1..23: mol_type = other RNA
cggacgtgctgcacgacgggctg

SEQ ID NO: 8572 - RNA, 18 nt, synthetic construct
  misc_feature 1..18: note = Synthetic
  source 1..18: mol_type = other RNA
cgggaccaccatgttctg

SEQ ID NO: 8573 - RNA, 19 nt, synthetic construct
  misc_feature 1..19: note = Synthetic
  source 1..19: mol_type = other RNA
ccgggaccaccatgttctg

SEQ ID NO: 8574 - RNA, 21 nt, synthetic construct
  misc_feature 1..21: note = Synthetic
  source 1..21: mol_type = other RNA
ctccgggaccaccatgttctg

SEQ ID NO: 8575 - RNA, 22 nt, synthetic construct
  misc_feature 1..22: note = Synthetic
  source 1..22: mol_type = other RNA
tctccgggaccaccatgttctg

SEQ ID NO: 8576 - RNA, 23 nt, synthetic construct
  misc_feature 1..23: note = Synthetic
  source 1..23: mol_type = other RNA
atctccgggaccaccatgttctg

SEQ ID NO: 8577 - RNA, 22 nt, synthetic construct
  misc_feature 1..22: note = Synthetic
  source 1..22: mol_type = other RNA
cggggcgggaaggcgcggggat

SEQ ID NO: 8578 - RNA, 18 nt, synthetic construct
  misc_feature 1..18: note = Synthetic
  source 1..18: mol_type = other RNA
ccgccacgtacgccccgt

SEQ ID NO: 8579 - RNA, 23 nt, synthetic construct
  misc_feature 1..23: note = Synthetic
  source 1..23: mol_type = other RNA
cggggccgccacgtacgccccgt

SEQ ID NO: 8580 - RNA, 24 nt, synthetic construct
  misc_feature 1..24: note = Synthetic
  source 1..24: mol_type = other RNA
ccggggccgccacgtacgccccgt

SEQ ID NO: 8581 - RNA, 19 nt, synthetic construct
  misc_feature 1..19: note = Synthetic
  source 1..19: mol_type = other RNA
cgcccagctccgggccggt

SEQ ID NO: 8582 - RNA, 21 nt, synthetic construct
  misc_feature 1..21: note = Synthetic
  source 1..21: mol_type = other RNA
cccgcccagctccgggccggt

SEQ ID NO: 8583 - RNA, 23 nt, synthetic construct
  misc_feature 1..23: note = Synthetic
  source 1..23: mol_type = other RNA
tgcccgcccagctccgggccggt

SEQ ID NO: 8584 - RNA, 24 nt, synthetic construct
  misc_feature 1..24: note = Synthetic
  source 1..24: mol_type = other RNA
ctgcccgcccagctccgggccggt

SEQ ID NO: 8585 - RNA, 23 nt, synthetic construct
  misc_feature 1..23: note = Synthetic
  source 1..23: mol_type = other RNA
agggggtaaaaatagtcgccatt

SEQ ID NO: 8586 - RNA, 19 nt, synthetic construct
  misc_feature 1..19: note = Synthetic
  source 1..19: mol_type = other RNA
cgcgcgggcggccggtcga

SEQ ID NO: 8587 - RNA, 21 nt, synthetic construct
  misc_feature 1..21: note = Synthetic
  source 1..21: mol_type = other RNA
cacgcgcgggcggccggtcga

SEQ ID NO: 8588 - RNA, 22 nt, synthetic construct
  misc_feature 1..22: note = Synthetic
  source 1..22: mol_type = other RNA
acacgcgcgggcggccggtcga

SEQ ID NO: 8589 - RNA, 24 nt, synthetic construct
  misc_feature 1..24: note = Synthetic
  source 1..24: mol_type = other RNA
cgacacgcgcgggcggccggtcga

SEQ ID NO: 8590 - RNA, 19 nt, synthetic construct
  misc_feature 1..19: note = Synthetic
  source 1..19: mol_type = other RNA
agtccccgcccccggccac

SEQ ID NO: 8591 - RNA, 21 nt, synthetic construct
  misc_feature 1..21: note = Synthetic
  source 1..21: mol_type = other RNA
ctagtccccgcccccggccac

SEQ ID NO: 8592 - RNA, 22 nt, synthetic construct
  misc_feature 1..22: note = Synthetic
  source 1..22: mol_type = other RNA
cctagtccccgcccccggccac

SEQ ID NO: 8593 - RNA, 23 nt, synthetic construct
  misc_feature 1..23: note = Synthetic
  source 1..23: mol_type = other RNA
acctagtccccgcccccggccac

SEQ ID NO: 8594 - RNA, 18 nt, synthetic construct
  misc_feature 1..18: note = Synthetic
  source 1..18: mol_type = other RNA
caacggccgcctggccac

SEQ ID NO: 8595 - RNA, 19 nt, synthetic construct
  misc_feature 1..19: note = Synthetic
  source 1..19: mol_type = other RNA
acaacggccgcctggccac

SEQ ID NO: 8596 - RNA, 22 nt, synthetic construct
  misc_feature 1..22: note = Synthetic
  source 1..22: mol_type = other RNA
tggacaacggccgcctggccac

SEQ ID NO: 8597 - RNA, 23 nt, synthetic construct
  misc_feature 1..23: note = Synthetic
  source 1..23: mol_type = other RNA
ctggacaacggccgcctggccac

SEQ ID NO: 8598 - RNA, 24 nt, synthetic construct
  misc_feature 1..24: note = Synthetic
  source 1..24: mol_type = other RNA
cctggacaacggccgcctggccac

SEQ ID NO: 8599 - RNA, 18 nt, synthetic construct
  misc_feature 1..18: note = Synthetic
  source 1..18: mol_type = other RNA
tacagtttaagcgccccc

SEQ ID NO: 8600 - RNA, 21 nt, synthetic construct
  misc_feature 1..21: note = Synthetic
  source 1..21: mol_type = other RNA
acgtacagtttaagcgccccc

SEQ ID NO: 8601 - RNA, 23 nt, synthetic construct
  misc_feature 1..23: note = Synthetic
  source 1..23: mol_type = other RNA
cgacgtacagtttaagcgccccc

SEQ ID NO: 8602 - RNA, 21 nt, synthetic construct
  misc_feature 1..21: note = Synthetic
  source 1..21: mol_type = other RNA
caggcccgagccgcggacgcc

SEQ ID NO: 8603 - RNA, 22 nt, synthetic construct
  misc_feature 1..22: note = Synthetic
  source 1..22: mol_type = other RNA
ccaggcccgagccgcggacgcc

SEQ ID NO: 8604 - RNA, 23 nt, synthetic construct
  misc_feature 1..23: note = Synthetic
  source 1..23: mol_type = other RNA
cccaggcccgagccgcggacgcc

SEQ ID NO: 8605 - RNA, 24 nt, synthetic construct
  misc_feature 1..24: note = Synthetic
  source 1..24: mol_type = other RNA
acccaggcccgagccgcggacgcc

SEQ ID NO: 8606 - RNA, 18 nt, synthetic construct
  misc_feature 1..18: note = Synthetic
  source 1..18: mol_type = other RNA
cgacggggcgttgcacgc

SEQ ID NO: 8607 - RNA, 19 nt, synthetic construct
  misc_feature 1..19: note = Synthetic
  source 1..19: mol_type = other RNA
tcgacggggcgttgcacgc

SEQ ID NO: 8608 - RNA, 21 nt, synthetic construct
  misc_feature 1..21: note = Synthetic
  source 1..21: mol_type = other RNA
attcgacggggcgttgcacgc

SEQ ID NO: 8609 - RNA, 22 nt, synthetic construct
  misc_feature 1..22: note = Synthetic
  source 1..22: mol_type = other RNA
tattcgacggggcgttgcacgc

SEQ ID NO: 8610 - RNA, 23 nt, synthetic construct
  misc_feature 1..23: note = Synthetic
  source 1..23: mol_type = other RNA
atattcgacggggcgttgcacgc

SEQ ID NO: 8611 - RNA, 24 nt, synthetic construct
  misc_feature 1..24: note = Synthetic
  source 1..24: mol_type = other RNA
catattcgacggggcgttgcacgc

SEQ ID NO: 8612 - RNA, 22 nt, synthetic construct
  misc_feature 1..22: note = Synthetic
  source 1..22: mol_type = other RNA
cgcggggccgctgctgcaccgc

SEQ ID NO: 8613 - RNA, 23 nt, synthetic construct
  misc_feature 1..23: note = Synthetic
  source 1..23: mol_type = other RNA
tcgcggggccgctgctgcaccgc

SEQ ID NO: 8614 - RNA, 24 nt, synthetic construct
  misc_feature 1..24: note = Synthetic
  source 1..24: mol_type = other RNA
ctcgcggggccgctgctgcaccgc

SEQ ID NO: 8615 - RNA, 18 nt, synthetic construct
  misc_feature 1..18: note = Synthetic
  source 1..18: mol_type = other RNA
ccaggtgccgcggcgcgc

SEQ ID NO: 8616 - RNA, 19 nt, synthetic construct
  misc_feature 1..19: note = Synthetic
  source 1..19: mol_type = other RNA
cccaggtgccgcggcgcgc

SEQ ID NO: 8617 - RNA, 21 nt, synthetic construct
  misc_feature 1..21: note = Synthetic
  source 1..21: mol_type = other RNA
cgcccaggtgccgcggcgcgc

SEQ ID NO: 8618 - RNA, 23 nt, synthetic construct
  misc_feature 1..23: note = Synthetic
  source 1..23: mol_type = other RNA
tgcgcccaggtgccgcggcgcgc

SEQ ID NO: 8619 - RNA, 18 nt, synthetic construct
  misc_feature 1..18: note = Synthetic
  source 1..18: mol_type = other RNA
cagacgacgcgcgtgcgc

SEQ ID NO: 8620 - RNA, 19 nt, synthetic construct
  misc_feature 1..19: note = Synthetic
  source 1..19: mol_type = other RNA
ccagacgacgcgcgtgcgc

SEQ ID NO: 8621 - RNA, 21 nt, synthetic construct
  misc_feature 1..21: note = Synthetic
  source 1..21: mol_type = other RNA
ccccagacgacgcgcgtgcgc

SEQ ID NO: 8622 - RNA, 22 nt, synthetic construct
  misc_feature 1..22: note = Synthetic
  source 1..22: mol_type = other RNA
cccccagacgacgcgcgtgcgc

SEQ ID NO: 8623 - RNA, 23 nt, synthetic construct
  misc_feature 1..23: note = Synthetic
  source 1..23: mol_type = other RNA
ccccccagacgacgcgcgtgcgc

SEQ ID NO: 8624 - RNA, 18 nt, synthetic construct
  misc_feature 1..18: note = Synthetic
  source 1..18: mol_type = other RNA
tcaagacgggcctccatc

SEQ ID NO: 8625 - RNA, 19 nt, synthetic construct
  misc_feature 1..19: note = Synthetic
  source 1..19: mol_type = other RNA
ctcaagacgggcctccatc

SEQ ID NO: 8626 - RNA, 21 nt, synthetic construct
  misc_feature 1..21: note = Synthetic
  source 1..21: mol_type = other RNA
agctcaagacgggcctccatc

SEQ ID NO: 8627 - RNA, 22 nt, synthetic construct
  misc_feature 1..22: note = Synthetic
  source 1..22: mol_type = other RNA
cagctcaagacgggcctccatc

SEQ ID NO: 8628 - RNA, 23 nt, synthetic construct
  misc_feature 1..23: note = Synthetic
  source 1..23: mol_type = other RNA
tcagctcaagacgggcctccatc

SEQ ID NO: 8629 - RNA, 24 nt, synthetic construct
  misc_feature 1..24: note = Synthetic
  source 1..24: mol_type = other RNA
atcagctcaagacgggcctccatc

SEQ ID NO: 8630 - RNA, 19 nt, synthetic construct
  misc_feature 1..19: note = Synthetic
  source 1..19: mol_type = other RNA
cgggcaggcgcaagccgag

SEQ ID NO: 8631 - RNA, 23 nt, synthetic construct
  misc_feature 1..23: note = Synthetic
  source 1..23: mol_type = other RNA
tgggcgggcaggcgcaagccgag

SEQ ID NO: 8632 - RNA, 24 nt, synthetic construct
  misc_feature 1..24: note = Synthetic
  source 1..24: mol_type = other RNA
ctgggcgggcaggcgcaagccgag

SEQ ID NO: 8633 - RNA, 18 nt, synthetic construct
  misc_feature 1..18: note = Synthetic
  source 1..18: mol_type = other RNA
tacgcgggggacaaggag

SEQ ID NO: 8634 - RNA, 19 nt, synthetic construct
  misc_feature 1..19: note = Synthetic
  source 1..19: mol_type = other RNA
ttacgcgggggacaaggag

SEQ ID NO: 8635 - RNA, 22 nt, synthetic construct
  misc_feature 1..22: note = Synthetic
  source 1..22: mol_type = other RNA
cgtttacgcgggggacaaggag

SEQ ID NO: 8636 - RNA, 21 nt, synthetic construct
  misc_feature 1..21: note = Synthetic
  source 1..21: mol_type = other RNA
ctggagcgcctgatcgtggag

SEQ ID NO: 8637 - RNA, 22 nt, synthetic construct
  misc_feature 1..22: note = Synthetic
  source 1..22: mol_type = other RNA
cctggagcgcctgatcgtggag

SEQ ID NO: 8638 - RNA, 24 nt, synthetic construct
  misc_feature 1..24: note = Synthetic
  source 1..24: mol_type = other RNA
tgcctggagcgcctgatcgtggag

SEQ ID NO: 8639 - RNA, 18 nt, synthetic construct
  misc_feature 1..18: note = Synthetic
  source 1..18: mol_type = other RNA
tcgggggagaccttcccg

SEQ ID NO: 8640 - RNA, 19 nt, synthetic construct
  misc_feature 1..19: note = Synthetic
  source 1..19: mol_type = other RNA
ctcgggggagaccttcccg

SEQ ID NO: 8641 - RNA, 21 nt, synthetic construct
  misc_feature 1..21: note = Synthetic
  source 1..21: mol_type = other RNA
acctcgggggagaccttcccg

SEQ ID NO: 8642 - RNA, 22 nt, synthetic construct
  misc_feature 1..22: note = Synthetic
  source 1..22: mol_type = other RNA
tacctcgggggagaccttcccg

SEQ ID NO: 8643 - RNA, 23 nt, synthetic construct
  misc_feature 1..23: note = Synthetic
  source 1..23: mol_type = other RNA
ctacctcgggggagaccttcccg

SEQ ID NO: 8644 - RNA, 24 nt, synthetic construct
  misc_feature 1..24: note = Synthetic
  source 1..24: mol_type = other RNA
cctacctcgggggagaccttcccg

SEQ ID NO: 8645 - RNA, 19 nt, synthetic construct
  misc_feature 1..19: note = Synthetic
  source 1..19: mol_type = other RNA
tggcccacgggcgggtccg

SEQ ID NO: 8646 - RNA, 21 nt, synthetic construct
  misc_feature 1..21: note = Synthetic
  source 1..21: mol_type = other RNA
cctggcccacgggcgggtccg

SEQ ID NO: 8647 - RNA, 23 nt, synthetic construct
  misc_feature 1..23: note = Synthetic
  source 1..23: mol_type = other RNA
cgcctggcccacgggcgggtccg

SEQ ID NO: 8648 - RNA, 18 nt, synthetic construct
  misc_feature 1..18: note = Synthetic
  source 1..18: mol_type = other RNA
cggagatcgcccccggcg

SEQ ID NO: 8649 - RNA, 19 nt, synthetic construct
  misc_feature 1..19: note = Synthetic
  source 1..19: mol_type = other RNA
ccggagatcgcccccggcg

SEQ ID NO: 8650 - RNA, 21 nt, synthetic construct
  misc_feature 1..21: note = Synthetic
  source 1..21: mol_type = other RNA
tcccggagatcgcccccggcg

SEQ ID NO: 8651 - RNA, 24 nt, synthetic construct
  misc_feature 1..24: note = Synthetic
  source 1..24: mol_type = other RNA
tggtcccggagatcgcccccggcg

SEQ ID NO: 8652 - RNA, 23 nt, synthetic construct
  misc_feature 1..23: note = Synthetic
  source 1..23: mol_type = other RNA
tgggggcagcgcctggcccacgg

SEQ ID NO: 8653 - RNA, 24 nt, synthetic construct
  misc_feature 1..24: note = Synthetic
  source 1..24: mol_type = other RNA
ctgggggcagcgcctggcccacgg

SEQ ID NO: 8654 - RNA, 18 nt, synthetic construct
  misc_feature 1..18: note = Synthetic
  source 1..18: mol_type = other RNA
ccggcacgaaactggcgg

SEQ ID NO: 8655 - RNA, 19 nt, synthetic construct
  misc_feature 1..19: note = Synthetic
  source 1..19: mol_type = other RNA
cccggcacgaaactggcgg

SEQ ID NO: 8656 - RNA, 22 nt, synthetic construct
  misc_feature 1..22: note = Synthetic
  source 1..22: mol_type = other RNA
tggcccggcacgaaactggcgg

SEQ ID NO: 8657 - RNA, 18 nt, synthetic construct
  misc_feature 1..18: note = Synthetic
  source 1..18: mol_type = other RNA
tgacctacgcgctcatgg

SEQ ID NO: 8658 - RNA, 19 nt, synthetic construct
  misc_feature 1..19: note = Synthetic
  source 1..19: mol_type = other RNA
ctgacctacgcgctcatgg

SEQ ID NO: 8659 - RNA, 21 nt, synthetic construct
  misc_feature 1..21: note = Synthetic
  source 1..21: mol_type = other RNA
cgctgacctacgcgctcatgg

SEQ ID NO: 8660 - RNA, 23 nt, synthetic construct
  misc_feature 1..23: note = Synthetic
  source 1..23: mol_type = other RNA
cgcgctgacctacgcgctcatgg

SEQ ID NO: 8661 - RNA, 24 nt, synthetic construct
  misc_feature 1..24: note = Synthetic
  source 1..24: mol_type = other RNA
acgcgctgacctacgcgctcatgg

SEQ ID NO: 8662 - RNA, 19 nt, synthetic construct
  misc_feature 1..19: note = Synthetic
  source 1..19: mol_type = other RNA
tggaccgccatcgcgactg

SEQ ID NO: 8663 - RNA, 21 nt, synthetic construct
  misc_feature 1..21: note = Synthetic
  source 1..21: mol_type = other RNA
cctggaccgccatcgcgactg

SEQ ID NO: 8664 - RNA, 22 nt, synthetic construct
  misc_feature 1..22: note = Synthetic
  source 1..22: mol_type = other RNA
ccctggaccgccatcgcgactg

SEQ ID NO: 8665 - RNA, 18 nt, synthetic construct
  misc_feature 1..18: note = Synthetic
  source 1..18: mol_type = other RNA
aaccgccccgcccttcct

SEQ ID NO: 8666 - RNA, 19 nt, synthetic construct
  misc_feature 1..19: note = Synthetic
  source 1..19: mol_type = other RNA
aaaccgccccgcccttcct

SEQ ID NO: 8667 - RNA, 21 nt, synthetic construct
  misc_feature 1..21: note = Synthetic
  source 1..21: mol_type = other RNA
ataaaccgccccgcccttcct

SEQ ID NO: 8668 - RNA, 22 nt, synthetic construct
  misc_feature 1..22: note = Synthetic
  source 1..22: mol_type = other RNA
aataaaccgccccgcccttcct

SEQ ID NO: 8669 - RNA, 23 nt, synthetic construct
  misc_feature 1..23: note = Synthetic
  source 1..23: mol_type = other RNA
taataaaccgccccgcccttcct

SEQ ID NO: 8670 - RNA, 18 nt, synthetic construct
  misc_feature 1..18: note = Synthetic
  source 1..18: mol_type = other RNA
cgcccggggcctggagct

SEQ ID NO: 8671 - RNA, 19 nt, synthetic construct
  misc_feature 1..19: note = Synthetic
  source 1..19: mol_type = other RNA
acgcccggggcctggagct

SEQ ID NO: 8672 - RNA, 23 nt, synthetic construct
  misc_feature 1..23: note = Synthetic
  source 1..23: mol_type = other RNA
cgggacgcccggggcctggagct

SEQ ID NO: 8673 - RNA, 24 nt, synthetic construct
  misc_feature 1..24: note = Synthetic
  source 1..24: mol_type = other RNA
ccgggacgcccggggcctggagct

SEQ ID NO: 8674 - RNA, 18 nt, synthetic construct
  misc_feature 1..18: note = Synthetic
  source 1..18: mol_type = other RNA
cgggcctccatcccgggt

SEQ ID NO: 8675 - RNA, 19 nt, synthetic construct
  misc_feature 1..19: note = Synthetic
  source 1..19: mol_type = other RNA
acgggcctccatcccgggt

SEQ ID NO: 8676 - RNA, 21 nt, synthetic construct
  misc_feature 1..21: note = Synthetic
  source 1..21: mol_type = other RNA
agacgggcctccatcccgggt

SEQ ID NO: 8677 - RNA, 22 nt, synthetic construct
  misc_feature 1..22: note = Synthetic
  source 1..22: mol_type = other RNA
aagacgggcctccatcccgggt

SEQ ID NO: 8678 - RNA, 23 nt, synthetic construct
  misc_feature 1..23: note = Synthetic
  source 1..23: mol_type = other RNA
caagacgggcctccatcccgggt

SEQ ID NO: 8679 - RNA, 24 nt, synthetic construct
  misc_feature 1..24: note = Synthetic
  source 1..24: mol_type = other RNA
tcaagacgggcctccatcccgggt

SEQ ID NO: 8680 - RNA, 18 nt, synthetic construct
  misc_feature 1..18: note = Synthetic
  source 1..18: mol_type = other RNA
cccagcccgtccccgtgt

SEQ ID NO: 8681 - RNA, 21 nt, synthetic construct
  misc_feature 1..21: note = Synthetic
  source 1..21: mol_type = other RNA
cggcccagcccgtccccgtgt

SEQ ID NO: 8682 - RNA, 22 nt, synthetic construct
  misc_feature 1..22: note = Synthetic
  source 1..22: mol_type = other RNA
ccggcccagcccgtccccgtgt

SEQ ID NO: 8683 - RNA, 18 nt, synthetic construct
  misc_feature 1..18: note = Synthetic
  source 1..18: mol_type = other RNA
acggccaggacgccgtgt

SEQ ID NO: 8684 - RNA, 19 nt, synthetic construct
  misc_feature 1..19: note = Synthetic
  source 1..19: mol_type = other RNA
cacggccaggacgccgtgt

SEQ ID NO: 8685 - RNA, 21 nt, synthetic construct
  misc_feature 1..21: note = Synthetic
  source 1..21: mol_type = other RNA
accacggccaggacgccgtgt

SEQ ID NO: 8686 - RNA, 24 nt, synthetic construct
  misc_feature 1..24: note = Synthetic
  source 1..24: mol_type = other RNA
tggaccacggccaggacgccgtgt

SEQ ID NO: 8687 - RNA, 18 nt, synthetic construct
  misc_feature 1..18: note = Synthetic
  source 1..18: mol_type = other RNA
cgcgttcgacttctttgt

SEQ ID NO: 8688 - RNA, 19 nt, synthetic construct
  misc_feature 1..19: note = Synthetic
  source 1..19: mol_type = other RNA
ccgcgttcgacttctttgt

SEQ ID NO: 8689 - RNA, 21 nt, synthetic construct
  misc_feature 1..21: note = Synthetic
  source 1..21: mol_type = other RNA
ccccgcgttcgacttctttgt

SEQ ID NO: 8690 - RNA, 22 nt, synthetic construct
  misc_feature 1..22: note = Synthetic
  source 1..22: mol_type = other RNA
accccgcgttcgacttctttgt

SEQ ID NO: 8691 - RNA, 23 nt, synthetic construct
  misc_feature 1..23: note = Synthetic
  source 1..23: mol_type = other RNA
caccccgcgttcgacttctttgt

SEQ ID NO: 8692 - RNA, 18 nt, synthetic construct
  misc_feature 1..18: note = Synthetic
  source 1..18: mol_type = other RNA
cgcagggccggggggaaa

SEQ ID NO: 8693 - RNA, 19 nt, synthetic construct
  misc_feature 1..19: note = Synthetic
  source 1..19: mol_type = other RNA
gcgcagggccggggggaaa

SEQ ID NO: 8694 - RNA, 21 nt, synthetic construct
  misc_feature 1..21: note = Synthetic
  source 1..21: mol_type = other RNA
tcgcgcagggccggggggaaa

SEQ ID NO: 8695 - RNA, 22 nt, synthetic construct
  misc_feature 1..22: note = Synthetic
  source 1..22: mol_type = other RNA
gtcgcgcagggccggggggaaa

SEQ ID NO: 8696 - RNA, 23 nt, synthetic construct
  misc_feature 1..23: note = Synthetic
  source 1..23: mol_type = other RNA
ggtcgcgcagggccggggggaaa

SEQ ID NO: 8697 - RNA, 24 nt, synthetic construct
  misc_feature 1..24: note = Synthetic
  source 1..24: mol_type = other RNA
aggtcgcgcagggccggggggaaa

SEQ ID NO: 8698 - RNA, 18 nt, synthetic construct
  misc_feature 1..18: note = Synthetic
  source 1..18: mol_type = other RNA
ggcgtatacgcggtcgaa

SEQ ID NO: 8699 - RNA, 19 nt, synthetic construct
  misc_feature 1..19: note = Synthetic
  source 1..19: mol_type = other RNA
tggcgtatacgcggtcgaa

SEQ ID NO: 8700 - RNA, 21 nt, synthetic construct
  misc_feature 1..21: note = Synthetic
  source 1..21: mol_type = other RNA
ggtggcgtatacgcggtcgaa

SEQ ID NO: 8701 - RNA, 22 nt, synthetic construct
  misc_feature 1..22: note = Synthetic
  source 1..22: mol_type = other RNA
gggtggcgtatacgcggtcgaa

SEQ ID NO: 8702 - RNA, 23 nt, synthetic construct
  misc_feature 1..23: note = Synthetic
  source 1..23: mol_type = other RNA
agggtggcgtatacgcggtcgaa

SEQ ID NO: 8703 - RNA, 24 nt, synthetic construct
  misc_feature 1..24: note = Synthetic
  source 1..24: mol_type = other RNA
cagggtggcgtatacgcggtcgaa

SEQ ID NO: 8704 - RNA, 18 nt, synthetic construct
  misc_feature 1..18: note = Synthetic
  source 1..18: mol_type = other RNA
cctgggcgcacccgaaca

SEQ ID NO: 8705 - RNA, 19 nt, synthetic construct
  misc_feature 1..19: note = Synthetic
  source 1..19: mol_type = other RNA
acctgggcgcacccgaaca

SEQ ID NO: 8706 - RNA, 21 nt, synthetic construct
  misc_feature 1..21: note = Synthetic
  source 1..21: mol_type = other RNA
gcacctgggcgcacccgaaca

SEQ ID NO: 8707 - RNA, 22 nt, synthetic construct
  misc_feature 1..22: note = Synthetic
  source 1..22: mol_type = other RNA
ggcacctgggcgcacccgaaca

SEQ ID NO: 8708 - RNA, 23 nt, synthetic construct
  misc_feature 1..23: note = Synthetic
  source 1..23: mol_type = other RNA
cggcacctgggcgcacccgaaca

SEQ ID NO: 8709 - RNA, 24 nt, synthetic construct
  misc_feature 1..24: note = Synthetic
  source 1..24: mol_type = other RNA
gcggcacctgggcgcacccgaaca

SEQ ID NO: 8710 - RNA, 18 nt, synthetic construct
  misc_feature 1..18: note = Synthetic
  source 1..18: mol_type = other RNA
acgtcggccacccccaca

SEQ ID NO: 8711 - RNA, 19 nt, synthetic construct
  misc_feature 1..19: note = Synthetic
  source 1..19: mol_type = other RNA
cacgtcggccacccccaca

SEQ ID NO: 8712 - RNA, 21 nt, synthetic construct
  misc_feature 1..21: note = Synthetic
  source 1..21: mol_type = other RNA
tccacgtcggccacccccaca

SEQ ID NO: 8713 - RNA, 22 nt, synthetic construct
  misc_feature 1..22: note = Synthetic
  source 1..22: mol_type = other RNA
ctccacgtcggccacccccaca

SEQ ID NO: 8714 - RNA, 23 nt, synthetic construct
  misc_feature 1..23: note = Synthetic
  source 1..23: mol_type = other RNA
gctccacgtcggccacccccaca

SEQ ID NO: 8715 - RNA, 24 nt, synthetic construct
  misc_feature 1..24: note = Synthetic
  source 1..24: mol_type = other RNA
agctccacgtcggccacccccaca

SEQ ID NO: 8716 - RNA, 18 nt, synthetic construct
  misc_feature 1..18: note = Synthetic
  source 1..18: mol_type = other RNA
agttgacgtcggtcgaca

SEQ ID NO: 8717 - RNA, 19 nt, synthetic construct
  misc_feature 1..19: note = Synthetic
  source 1..19: mol_type = other RNA
tagttgacgtcggtcgaca

SEQ ID NO: 8718 - RNA, 21 nt, synthetic construct
  misc_feature 1..21: note = Synthetic
  source 1..21: mol_type = other RNA
agtagttgacgtcggtcgaca

SEQ ID NO: 8719 - RNA, 22 nt, synthetic construct
  misc_feature 1..22: note = Synthetic
  source 1..22: mol_type = other RNA
aagtagttgacgtcggtcgaca

SEQ ID NO: 8720 - RNA, 23 nt, synthetic construct
  misc_feature 1..23: note = Synthetic
  source 1..23: mol_type = other RNA
gaagtagttgacgtcggtcgaca

SEQ ID NO: 8721 - RNA, 24 nt, synthetic construct
  misc_feature 1..24: note = Synthetic
  source 1..24: mol_type = other RNA
ggaagtagttgacgtcggtcgaca

SEQ ID NO: 8722 - RNA, 18 nt, synthetic construct
  misc_feature 1..18: note = Synthetic
  source 1..18: mol_type = other RNA
ccagagccggggggacca

SEQ ID NO: 8723 - RNA, 19 nt, synthetic construct
  misc_feature 1..19: note = Synthetic
  source 1..19: mol_type = other RNA
cccagagccggggggacca

SEQ ID NO: 8724 - RNA, 21 nt, synthetic construct
  misc_feature 1..21: note = Synthetic
  source 1..21: mol_type = other RNA
cccccagagccggggggacca

SEQ ID NO: 8725 - RNA, 22 nt, synthetic construct
  misc_feature 1..22: note = Synthetic
  source 1..22: mol_type = other RNA
gcccccagagccggggggacca

SEQ ID NO: 8726 - RNA, 23 nt, synthetic construct
  misc_feature 1..23: note = Synthetic
  source 1..23: mol_type = other RNA
ggcccccagagccggggggacca

SEQ ID NO: 8727 - RNA, 24 nt, synthetic construct
  misc_feature 1..24: note = Synthetic
  source 1..24: mol_type = other RNA
tggcccccagagccggggggacca

SEQ ID NO: 8728 - RNA, 18 nt, synthetic construct
  misc_feature 1..18: note = Synthetic
  source 1..18: mol_type = other RNA
ctggccttccgcgaccca

SEQ ID NO: 8729 - RNA, 19 nt, synthetic construct
  misc_feature 1..19: note = Synthetic
  source 1..19: mol_type = other RNA
tctggccttccgcgaccca

SEQ ID NO: 8730 - RNA, 21 nt, synthetic construct
  misc_feature 1..21: note = Synthetic
  source 1..21: mol_type = other RNA
catctggccttccgcgaccca

SEQ ID NO: 8731 - RNA, 22 nt, synthetic construct
  misc_feature 1..22: note = Synthetic
  source 1..22: mol_type = other RNA
tcatctggccttccgcgaccca

SEQ ID NO: 8732 - RNA, 23 nt, synthetic construct
  misc_feature 1..23: note = Synthetic
  source 1..23: mol_type = other RNA
gtcatctggccttccgcgaccca

SEQ ID NO: 8733 - RNA, 24 nt, synthetic construct
  misc_feature 1..24: note = Synthetic
  source 1..24: mol_type = other RNA
ggtcatctggccttccgcgaccca

SEQ ID NO: 8734 - RNA, 18 nt, synthetic construct
  misc_feature 1..18: note = Synthetic
  source 1..18: mol_type = other RNA
gctgatgatgcaaggcca

SEQ ID NO: 8735 - RNA, 19 nt, synthetic construct
  misc_feature 1..19: note = Synthetic
  source 1..19: mol_type = other RNA
agctgatgatgcaaggcca

SEQ ID NO: 8736 - RNA, 21 nt, synthetic construct
  misc_feature 1..21: note = Synthetic
  source 1..21: mol_type = other RNA
tgagctgatgatgcaaggcca

SEQ ID NO: 8737 - RNA, 22 nt, synthetic construct
  misc_feature 1..22: note = Synthetic
  source 1..22: mol_type = other RNA
ttgagctgatgatgcaaggcca

SEQ ID NO: 8738 - RNA, 23 nt, synthetic construct
  misc_feature 1..23: note = Synthetic
  source 1..23: mol_type = other RNA
cttgagctgatgatgcaaggcca

SEQ ID NO: 8739 - RNA, 24 nt, synthetic construct
  misc_feature 1..24: note = Synthetic
  source 1..24: mol_type = other RNA
tcttgagctgatgatgcaaggcca

SEQ ID NO: 8740 - RNA, 18 nt, synthetic construct
  misc_feature 1..18: note = Synthetic
  source 1..18: mol_type = other RNA
tcagacggggcacggcca

SEQ ID NO: 8741 - RNA, 19 nt, synthetic construct
  misc_feature 1..19: note = Synthetic
  source 1..19: mol_type = other RNA
gtcagacggggcacggcca

SEQ ID NO: 8742 - RNA, 21 nt, synthetic construct
  misc_feature 1..21: note = Synthetic
  source 1..21: mol_type = other RNA
gcgtcagacggggcacggcca

SEQ ID NO: 8743 - RNA, 22 nt, synthetic construct
  misc_feature 1..22: note = Synthetic
  source 1..22: mol_type = other RNA
tgcgtcagacggggcacggcca

SEQ ID NO: 8744 - RNA, 23 nt, synthetic construct
  misc_feature 1..23: note = Synthetic
  source 1..23: mol_type = other RNA
atgcgtcagacggggcacggcca

SEQ ID NO: 8745 - RNA, 24 nt, synthetic construct
  misc_feature 1..24: note = Synthetic
  source 1..24: mol_type = other RNA
catgcgtcagacggggcacggcca

SEQ ID NO: 8746 - RNA, 18 nt, synthetic construct
  misc_feature 1..18: note = Synthetic
  source 1..18: mol_type = other RNA
ccagtagctggtgatgca

SEQ ID NO: 8747 - RNA, 19 nt, synthetic construct
  misc_feature 1..19: note = Synthetic
  source 1..19: mol_type = other RNA
tccagtagctggtgatgca

SEQ ID NO: 8748 - RNA, 21 nt, synthetic construct
  misc_feature 1..21: note = Synthetic
  source 1..21: mol_type = other RNA
gttccagtagctggtgatgca

SEQ ID NO: 8749 - RNA, 22 nt, synthetic construct
  misc_feature 1..22: note = Synthetic
  source 1..22: mol_type = other RNA
tgttccagtagctggtgatgca

SEQ ID NO: 8750 - RNA, 23 nt, synthetic construct
  misc_feature 1..23: note = Synthetic
  source 1..23: mol_type = other RNA
ttgttccagtagctggtgatgca

SEQ ID NO: 8751 - RNA, 24 nt, synthetic construct
  misc_feature 1..24: note = Synthetic
  source 1..24: mol_type = other RNA
gttgttccagtagctggtgatgca

SEQ ID NO: 8752 - RNA, 18 nt, synthetic construct
  misc_feature 1..18: note = Synthetic
  source 1..18: mol_type = other RNA
ccgcgtcaacgttcatca

SEQ ID NO: 8753 - RNA, 19 nt, synthetic construct
  misc_feature 1..19: note = Synthetic
  source 1..19: mol_type = other RNA
gccgcgtcaacgttcatca

SEQ ID NO: 8754 - RNA, 21 nt, synthetic construct
  misc_feature 1..21: note = Synthetic
  source 1..21: mol_type = other RNA
ccgccgcgtcaacgttcatca

SEQ ID NO: 8755 - RNA, 22 nt, synthetic construct
  misc_feature 1..22: note = Synthetic
  source 1..22: mol_type = other RNA
accgccgcgtcaacgttcatca

SEQ ID NO: 8756 - RNA, 23 nt, synthetic construct
  misc_feature 1..23: note = Synthetic
  source 1..23: mol_type = other RNA
gaccgccgcgtcaacgttcatca

SEQ ID NO: 8757 - RNA, 24 nt, synthetic construct
  misc_feature 1..24: note = Synthetic
  source 1..24: mol_type = other RNA
cgaccgccgcgtcaacgttcatca

SEQ ID NO: 8758 - RNA, 18 nt, synthetic construct
  misc_feature 1..18: note = Synthetic
  source 1..18: mol_type = other RNA
gtgtcggcatgcgtcaga

SEQ ID NO: 8759 - RNA, 19 nt, synthetic construct
  misc_feature 1..19: note = Synthetic
  source 1..19: mol_type = other RNA
cgtgtcggcatgcgtcaga

SEQ ID NO: 8760 - RNA, 21 nt, synthetic construct
  misc_feature 1..21: note = Synthetic
  source 1..21: mol_type = other RNA
cgcgtgtcggcatgcgtcaga

SEQ ID NO: 8761 - RNA, 22 nt, synthetic construct
  misc_feature 1..22: note = Synthetic
  source 1..22: mol_type = other RNA
gcgcgtgtcggcatgcgtcaga

SEQ ID NO: 8762 - RNA, 23 nt, synthetic construct
  misc_feature 1..23: note = Synthetic
  source 1..23: mol_type = other RNA
cgcgcgtgtcggcatgcgtcaga

SEQ ID NO: 8763 - RNA, 24 nt, synthetic construct
  misc_feature 1..24: note = Synthetic
  source 1..24: mol_type = other RNA
ccgcgcgtgtcggcatgcgtcaga

SEQ ID NO: 8764 - RNA, 18 nt, synthetic construct
  misc_feature 1..18: note = Synthetic
  source 1..18: mol_type = other RNA
gccgcgttgtccaggaga

SEQ ID NO: 8765 - RNA, 19 nt, synthetic construct
  misc_feature 1..19: note = Synthetic
  source 1..19: mol_type = other RNA
tgccgcgttgtccaggaga

SEQ ID NO: 8766 - RNA, 21 nt, synthetic construct
  misc_feature 1..21: note = Synthetic
  source 1..21: mol_type = other RNA
gctgccgcgttgtccaggaga

SEQ ID NO: 8767 - RNA, 22 nt, synthetic construct
  misc_feature 1..22: note = Synthetic
  source 1..22: mol_type = other RNA
ggctgccgcgttgtccaggaga

SEQ ID NO: 8768 - RNA, 23 nt, synthetic construct
  misc_feature 1..23: note = Synthetic
  source 1..23: mol_type = other RNA
cggctgccgcgttgtccaggaga

SEQ ID NO: 8769 - RNA, 24 nt, synthetic construct
  misc_feature 1..24: note = Synthetic
  source 1..24: mol_type = other RNA
acggctgccgcgttgtccaggaga

SEQ ID NO: 8770 - RNA, 18 nt, synthetic construct
  misc_feature 1..18: note = Synthetic
  source 1..18: mol_type = other RNA
ctgccgcgttgtccagga

SEQ ID NO: 8771 - RNA, 19 nt, synthetic construct
  misc_feature 1..19: note = Synthetic
  source 1..19: mol_type = other RNA
gctgccgcgttgtccagga

SEQ ID NO: 8772 - RNA, 21 nt, synthetic construct
  misc_feature 1..21: note = Synthetic
  source 1..21: mol_type = other RNA
cggctgccgcgttgtccagga

SEQ ID NO: 8773 - RNA, 22 nt, synthetic construct
  misc_feature 1..22: note = Synthetic
  source 1..22: mol_type = other RNA
acggctgccgcgttgtccagga

SEQ ID NO: 8774 - RNA, 23 nt, synthetic construct
  misc_feature 1..23: note = Synthetic
  source 1..23: mol_type = other RNA
cacggctgccgcgttgtccagga

SEQ ID NO: 8775 - RNA, 24 nt, synthetic construct
  misc_feature 1..24: note = Synthetic
  source 1..24: mol_type = other RNA
acacggctgccgcgttgtccagga

SEQ ID NO: 8776 - RNA, 18 nt, synthetic construct
  misc_feature 1..18: note = Synthetic
  source 1..18: mol_type = other RNA
aaccgttccatgaccgga

SEQ ID NO: 8777 - RNA, 19 nt, synthetic construct
  misc_feature 1..19: note = Synthetic
  source 1..19: mol_type = other RNA
aaaccgttccatgaccgga

SEQ ID NO: 8778 - RNA, 21 nt, synthetic construct
  misc_feature 1..21: note = Synthetic
  source 1..21: mol_type = other RNA
gcaaaccgttccatgaccgga

SEQ ID NO: 8779 - RNA, 22 nt, synthetic construct
  misc_feature 1..22: note = Synthetic
  source 1..22: mol_type = other RNA
ggcaaaccgttccatgaccgga

SEQ ID NO: 8780 - RNA, 23 nt, synthetic construct
  misc_feature 1..23: note = Synthetic
  source 1..23: mol_type = other RNA
cggcaaaccgttccatgaccgga

SEQ ID NO: 8781 - RNA, 24 nt, synthetic construct
  misc_feature 1..24: note = Synthetic
  source 1..24: mol_type = other RNA
gcggcaaaccgttccatgaccgga

SEQ ID NO: 8782 - RNA, 18 nt, synthetic construct
  misc_feature 1..18: note = Synthetic
  source 1..18: mol_type = other RNA
gtgaacccaaacccggga

SEQ ID NO: 8783 - RNA, 19 nt, synthetic construct
  misc_feature 1..19: note = Synthetic
  source 1..19: mol_type = other RNA
ggtgaacccaaacccggga

SEQ ID NO: 8784 - RNA, 21 nt, synthetic construct
  misc_feature 1..21: note = Synthetic
  source 1..21: mol_type = other RNA
acggtgaacccaaacccggga

SEQ ID NO: 8785 - RNA, 22 nt, synthetic construct
  misc_feature 1..22: note = Synthetic
  source 1..22: mol_type = other RNA
gacggtgaacccaaacccggga

SEQ ID NO: 8786 - RNA, 23 nt, synthetic construct
  misc_feature 1..23: note = Synthetic
  source 1..23: mol_type = other RNA
cgacggtgaacccaaacccggga

SEQ ID NO: 8787 - RNA, 24 nt, synthetic construct
  misc_feature 1..24: note = Synthetic
  source 1..24: mol_type = other RNA
acgacggtgaacccaaacccggga

SEQ ID NO: 8788 - RNA, 18 nt, synthetic construct
  misc_feature 1..18: note = Synthetic
  source 1..18: mol_type = other RNA
cggcgaacagcgcgtgga

SEQ ID NO: 8789 - RNA, 19 nt, synthetic construct
  misc_feature 1..19: note = Synthetic
  source 1..19: mol_type = other RNA
ccggcgaacagcgcgtgga

SEQ ID NO: 8790 - RNA, 21 nt, synthetic construct
  misc_feature 1..21: note = Synthetic
  source 1..21: mol_type = other RNA
ccccggcgaacagcgcgtgga

SEQ ID NO: 8791 - RNA, 22 nt, synthetic construct
  misc_feature 1..22: note = Synthetic
  source 1..22: mol_type = other RNA
gccccggcgaacagcgcgtgga

SEQ ID NO: 8792 - RNA, 23 nt, synthetic construct
  misc_feature 1..23: note = Synthetic
  source 1..23: mol_type = other RNA
ggccccggcgaacagcgcgtgga

SEQ ID NO: 8793 - RNA, 24 nt, synthetic construct
  misc_feature 1..24: note = Synthetic
  source 1..24: mol_type = other RNA
cggccccggcgaacagcgcgtgga

SEQ ID NO: 8794 - RNA, 18 nt, synthetic construct
  misc_feature 1..18: note = Synthetic
  source 1..18: mol_type = other RNA
acagagccagtcccttga

SEQ ID NO: 8795 - RNA, 19 nt, synthetic construct
  misc_feature 1..19: note = Synthetic
  source 1..19: mol_type = other RNA
tacagagccagtcccttga

SEQ ID NO: 8796 - RNA, 21 nt, synthetic construct
  misc_feature 1..21: note = Synthetic
  source 1..21: mol_type = other RNA
attacagagccagtcccttga

SEQ ID NO: 8797 - RNA, 22 nt, synthetic construct
  misc_feature 1..22: note = Synthetic
  source 1..22: mol_type = other RNA
tattacagagccagtcccttga

SEQ ID NO: 8798 - RNA, 23 nt, synthetic construct
  misc_feature 1..23: note = Synthetic
  source 1..23: mol_type = other RNA
ttattacagagccagtcccttga

SEQ ID NO: 8799 - RNA, 24 nt, synthetic construct
  misc_feature 1..24: note = Synthetic
  source 1..24: mol_type = other RNA
tttattacagagccagtcccttga

SEQ ID NO: 8800 - RNA, 18 nt, synthetic construct
  misc_feature 1..18: note = Synthetic
  source 1..18: mol_type = other RNA
gcaggaggcgctgtttga

SEQ ID NO: 8801 - RNA, 19 nt, synthetic construct
  misc_feature 1..19: note = Synthetic
  source 1..19: mol_type = other RNA
tgcaggaggcgctgtttga

SEQ ID NO: 8802 - RNA, 21 nt, synthetic construct
  misc_feature 1..21: note = Synthetic
  source 1..21: mol_type = other RNA
actgcaggaggcgctgtttga

SEQ ID NO: 8803 - RNA, 22 nt, synthetic construct
  misc_feature 1..22: note = Synthetic
  source 1..22: mol_type = other RNA
gactgcaggaggcgctgtttga

SEQ ID NO: 8804 - RNA, 23 nt, synthetic construct
  misc_feature 1..23: note = Synthetic
  source 1..23: mol_type = other RNA
ggactgcaggaggcgctgtttga

SEQ ID NO: 8805 - RNA, 24 nt, synthetic construct
  misc_feature 1..24: note = Synthetic
  source 1..24: mol_type = other RNA
aggactgcaggaggcgctgtttga

SEQ ID NO: 8806 - RNA, 18 nt, synthetic construct
  misc_feature 1..18: note = Synthetic
  source 1..18: mol_type = other RNA
gcgatgtcggccgacgta

SEQ ID NO: 8807 - RNA, 19 nt, synthetic construct
  misc_feature 1..19: note = Synthetic
  source 1..19: mol_type = other RNA
ggcgatgtcggccgacgta

SEQ ID NO: 8808 - RNA, 21 nt, synthetic construct
  misc_feature 1..21: note = Synthetic
  source 1..21: mol_type = other RNA
gcggcgatgtcggccgacgta

SEQ ID NO: 8809 - RNA, 22 nt, synthetic construct
  misc_feature 1..22: note = Synthetic
  source 1..22: mol_type = other RNA
ggcggcgatgtcggccgacgta

SEQ ID NO: 8810 - RNA, 23 nt, synthetic construct
  misc_feature 1..23: note = Synthetic
  source 1..23: mol_type = other RNA
tggcggcgatgtcggccgacgta

SEQ ID NO: 8811 - RNA, 24 nt, synthetic construct
  misc_feature 1..24: note = Synthetic
  source 1..24: mol_type = other RNA
ttggcggcgatgtcggccgacgta

SEQ ID NO: 8812 - RNA, 18 nt, synthetic construct
  misc_feature 1..18: note = Synthetic
  source 1..18: mol_type = other RNA
ggcgcccaccagggggta

SEQ ID NO: 8813 - RNA, 19 nt, synthetic construct
  misc_feature 1..19: note = Synthetic
  source 1..19: mol_type = other RNA
tggcgcccaccagggggta

SEQ ID NO: 8814 - RNA, 21 nt, synthetic construct
  misc_feature 1..21: note = Synthetic
  source 1..21: mol_type = other RNA
catggcgcccaccagggggta

SEQ ID NO: 8815 - RNA, 22 nt, synthetic construct
  misc_feature 1..22: note = Synthetic
  source 1..22: mol_type = other RNA
ccatggcgcccaccagggggta

SEQ ID NO: 8816 - RNA, 23 nt, synthetic construct
  misc_feature 1..23: note = Synthetic
  source 1..23: mol_type = other RNA
tccatggcgcccaccagggggta

SEQ ID NO: 8817 - RNA, 24 nt, synthetic construct
  misc_feature 1..24: note = Synthetic
  source 1..24: mol_type = other RNA
gtccatggcgcccaccagggggta

SEQ ID NO: 8818 - RNA, 18 nt, synthetic construct
  misc_feature 1..18: note = Synthetic
  source 1..18: mol_type = other RNA
gggcggggcggtttatta

SEQ ID NO: 8819 - RNA, 19 nt, synthetic construct
  misc_feature 1..19: note = Synthetic
  source 1..19: mol_type = other RNA
agggcggggcggtttatta

SEQ ID NO: 8820 - RNA, 20 nt, synthetic construct
  misc_feature 1..20: note = Synthetic
  source 1..20: mol_type = other RNA
aagggcggggcggtttatta

SEQ ID NO: 8821 - RNA, 21 nt, synthetic construct
  misc_feature 1..21: note = Synthetic
  source 1..21: mol_type = other RNA
gaagggcggggcggtttatta

SEQ ID NO: 8822 - RNA, 22 nt, synthetic construct
  misc_feature 1..22: note = Synthetic
  source 1..22: mol_type = other RNA
ggaagggcggggcggtttatta

SEQ ID NO: 8823 - RNA, 23 nt, synthetic construct
  misc_feature 1..23: note = Synthetic
  source 1..23: mol_type = other RNA
aggaagggcggggcggtttatta

SEQ ID NO: 8824 - RNA, 24 nt, synthetic construct
  misc_feature 1..24: note = Synthetic
  source 1..24: mol_type = other RNA
aaggaagggcggggcggtttatta

SEQ ID NO: 8825 - RNA, 18 nt, synthetic construct
  misc_feature 1..18: note = Synthetic
  source 1..18: mol_type = other RNA
aggtggtaggccccgtta

SEQ ID NO: 8826 - RNA, 19 nt, synthetic construct
  misc_feature 1..19: note = Synthetic
  source 1..19: mol_type = other RNA
gaggtggtaggccccgtta

SEQ ID NO: 8827 - RNA, 21 nt, synthetic construct
  misc_feature 1..21: note = Synthetic
  source 1..21: mol_type = other RNA
ttgaggtggtaggccccgtta

SEQ ID NO: 8828 - RNA, 22 nt, synthetic construct
  misc_feature 1..22: note = Synthetic
  source 1..22: mol_type = other RNA
gttgaggtggtaggccccgtta

SEQ ID NO: 8829 - RNA, 23 nt, synthetic construct
  misc_feature 1..23: note = Synthetic
  source 1..23: mol_type = other RNA
cgttgaggtggtaggccccgtta

SEQ ID NO: 8830 - RNA, 24 nt, synthetic construct
  misc_feature 1..24: note = Synthetic
  source 1..24: mol_type = other RNA
ccgttgaggtggtaggccccgtta

SEQ ID NO: 8831 - RNA, 18 nt, synthetic construct
  misc_feature 1..18: note = Synthetic
  source 1..18: mol_type = other RNA
acgacggtgaacccaaac

SEQ ID NO: 8832 - RNA, 19 nt, synthetic construct
  misc_feature 1..19: note = Synthetic
  source 1..19: mol_type = other RNA
gacgacggtgaacccaaac

SEQ ID NO: 8833 - RNA, 21 nt, synthetic construct
  misc_feature 1..21: note = Synthetic
  source 1..21: mol_type = other RNA
cggacgacggtgaacccaaac

SEQ ID NO: 8834 - RNA, 22 nt, synthetic construct
  misc_feature 1..22: note = Synthetic
  source 1..22: mol_type = other RNA
tcggacgacggtgaacccaaac

SEQ ID NO: 8835 - RNA, 23 nt, synthetic construct
  misc_feature 1..23: note = Synthetic
  source 1..23: mol_type = other RNA
gtcggacgacggtgaacccaaac

SEQ ID NO: 8836 - RNA, 24 nt, synthetic construct
  misc_feature 1..24: note = Synthetic
  source 1..24: mol_type = other RNA
tgtcggacgacggtgaacccaaac

SEQ ID NO: 8837 - RNA, 18 nt, synthetic construct
  misc_feature 1..18: note = Synthetic
  source 1..18: mol_type = other RNA
acctgggcgcacccgaac

SEQ ID NO: 8838 - RNA, 19 nt, synthetic construct
  misc_feature 1..19: note = Synthetic
  source 1..19: mol_type = other RNA
cacctgggcgcacccgaac

SEQ ID NO: 8839 - RNA, 21 nt, synthetic construct
  misc_feature 1..21: note = Synthetic
  source 1..21: mol_type = other RNA
ggcacctgggcgcacccgaac

SEQ ID NO: 8840 - RNA, 22 nt, synthetic construct
  misc_feature 1..22: note = Synthetic
  source 1..22: mol_type = other RNA
cggcacctgggcgcacccgaac

SEQ ID NO: 8841 - RNA, 23 nt, synthetic construct
  misc_feature 1..23: note = Synthetic
  source 1..23: mol_type = other RNA
gcggcacctgggcgcacccgaac

SEQ ID NO: 8842 - RNA, 24 nt, synthetic construct
  misc_feature 1..24: note = Synthetic
  source 1..24: mol_type = other RNA
cgcggcacctgggcgcacccgaac

SEQ ID NO: 8843 - RNA, 18 nt, synthetic construct
  misc_feature 1..18: note = Synthetic
  source 1..18: mol_type = other RNA
cccacaaagaagtcgaac

SEQ ID NO: 8844 - RNA, 19 nt, synthetic construct
  misc_feature 1..19: note = Synthetic
  source 1..19: mol_type = other RNA
ccccacaaagaagtcgaac

SEQ ID NO: 8845 - RNA, 21 nt, synthetic construct
  misc_feature 1..21: note = Synthetic
  source 1..21: mol_type = other RNA
acccccacaaagaagtcgaac

SEQ ID NO: 8846 - RNA, 22 nt, synthetic construct
  misc_feature 1..22: note = Synthetic
  source 1..22: mol_type = other RNA
cacccccacaaagaagtcgaac

SEQ ID NO: 8847 - RNA, 23 nt, synthetic construct
  misc_feature 1..23: note = Synthetic
  source 1..23: mol_type = other RNA
ccacccccacaaagaagtcgaac

SEQ ID NO: 8848 - RNA, 24 nt, synthetic construct
  misc_feature 1..24: note = Synthetic
  source 1..24: mol_type = other RNA
gccacccccacaaagaagtcgaac

SEQ ID NO: 8849 - RNA, 18 nt, synthetic construct
  misc_feature 1..18: note = Synthetic
  source 1..18: mol_type = other RNA
ctgggcgcacccgaacac

SEQ ID NO: 8850 - RNA, 19 nt, synthetic construct
  misc_feature 1..19: note = Synthetic
  source 1..19: mol_type = other RNA
cctgggcgcacccgaacac

SEQ ID NO: 8851 - RNA, 21 nt, synthetic construct
  misc_feature 1..21: note = Synthetic
  source 1..21: mol_type = other RNA
cacctgggcgcacccgaacac

SEQ ID NO: 8852 - RNA, 22 nt, synthetic construct
  misc_feature 1..22: note = Synthetic
  source 1..22: mol_type = other RNA
gcacctgggcgcacccgaacac

SEQ ID NO: 8853 - RNA, 23 nt, synthetic construct
  misc_feature 1..23: note = Synthetic
  source 1..23: mol_type = other RNA
ggcacctgggcgcacccgaacac

SEQ ID NO: 8854 - RNA, 24 nt, synthetic construct
  misc_feature 1..24: note = Synthetic
  source 1..24: mol_type = other RNA
cggcacctgggcgcacccgaacac

SEQ ID NO: 8855 - RNA, 18 nt, synthetic construct
  misc_feature 1..18: note = Synthetic
  source 1..18: mol_type = other RNA
ggcgtcacagtcccacac

SEQ ID NO: 8856 - RNA, 19 nt, synthetic construct
  misc_feature 1..19: note = Synthetic
  source 1..19: mol_type = other RNA
gggcgtcacagtcccacac

SEQ ID NO: 8857 - RNA, 21 nt, synthetic construct
  misc_feature 1..21: note = Synthetic
  source 1..21: mol_type = other RNA
cagggcgtcacagtcccacac

SEQ ID NO: 8858 - RNA, 22 nt, synthetic construct
  misc_feature 1..22: note = Synthetic
  source 1..22: mol_type = other RNA
tcagggcgtcacagtcccacac

SEQ ID NO: 8859 - RNA, 23 nt, synthetic construct
  misc_feature 1..23: note = Synthetic
  source 1..23: mol_type = other RNA
atcagggcgtcacagtcccacac

SEQ ID NO: 8860 - RNA, 24 nt, synthetic construct
  misc_feature 1..24: note = Synthetic
  source 1..24: mol_type = other RNA
catcagggcgtcacagtcccacac

SEQ ID NO: 8861 - RNA, 18 nt, synthetic construct
  misc_feature 1..18: note = Synthetic
  source 1..18: mol_type = other RNA
caggtccatggcgcccac

SEQ ID NO: 8862 - RNA, 19 nt, synthetic construct
  misc_feature 1..19: note = Synthetic
  source 1..19: mol_type = other RNA
tcaggtccatggcgcccac

SEQ ID NO: 8863 - RNA, 21 nt, synthetic construct
  misc_feature 1..21: note = Synthetic
  source 1..21: mol_type = other RNA
cgtcaggtccatggcgcccac

SEQ ID NO: 8864 - RNA, 22 nt, synthetic construct
  misc_feature 1..22: note = Synthetic
  source 1..22: mol_type = other RNA
acgtcaggtccatggcgcccac

SEQ ID NO: 8865 - RNA, 23 nt, synthetic construct
  misc_feature 1..23: note = Synthetic
  source 1..23: mol_type = other RNA
aacgtcaggtccatggcgcccac

SEQ ID NO: 8866 - RNA, 24 nt, synthetic construct
  misc_feature 1..24: note = Synthetic
  source 1..24: mol_type = other RNA
gaacgtcaggtccatggcgcccac

SEQ ID NO: 8867 - RNA, 18 nt, synthetic construct
  misc_feature 1..18: note = Synthetic
  source 1..18: mol_type = other RNA
agggcgtcacagtcccac

SEQ ID NO: 8868 - RNA, 19 nt, synthetic construct
  misc_feature 1..19: note = Synthetic
  source 1..19: mol_type = other RNA
cagggcgtcacagtcccac

SEQ ID NO: 8869 - RNA, 21 nt, synthetic construct
  misc_feature 1..21: note = Synthetic
  source 1..21: mol_type = other RNA
atcagggcgtcacagtcccac

SEQ ID NO: 8870 - RNA, 22 nt, synthetic construct
  misc_feature 1..22: note = Synthetic
  source 1..22: mol_type = other RNA
catcagggcgtcacagtcccac

SEQ ID NO: 8871 - RNA, 23 nt, synthetic construct
  misc_feature 1..23: note = Synthetic
  source 1..23: mol_type = other RNA
gcatcagggcgtcacagtcccac

SEQ ID NO: 8872 - RNA, 24 nt, synthetic construct
  misc_feature 1..24: note = Synthetic
  source 1..24: mol_type = other RNA
cgcatcagggcgtcacagtcccac

SEQ ID NO: 8873 - RNA, 18 nt, synthetic construct
  misc_feature 1..18: note = Synthetic
  source 1..18: mol_type = other RNA
agtttcgtgccgggccac

SEQ ID NO: 8874 - RNA, 19 nt, synthetic construct
  misc_feature 1..19: note = Synthetic
  source 1..19: mol_type = other RNA
cagtttcgtgccgggccac

SEQ ID NO: 8875 - RNA, 21 nt, synthetic construct
  misc_feature 1..21: note = Synthetic
  source 1..21: mol_type = other RNA
gccagtttcgtgccgggccac

SEQ ID NO: 8876 - RNA, 22 nt, synthetic construct
  misc_feature 1..22: note = Synthetic
  source 1..22: mol_type = other RNA
cgccagtttcgtgccgggccac

SEQ ID NO: 8877 - RNA, 23 nt, synthetic construct
  misc_feature 1..23: note = Synthetic
  source 1..23: mol_type = other RNA
ccgccagtttcgtgccgggccac

SEQ ID NO: 8878 - RNA, 24 nt, synthetic construct
  misc_feature 1..24: note = Synthetic
  source 1..24: mol_type = other RNA
cccgccagtttcgtgccgggccac

SEQ ID NO: 8879 - RNA, 18 nt, synthetic construct
  misc_feature 1..18: note = Synthetic
  source 1..18: mol_type = other RNA
cgcggcacctgggcgcac

SEQ ID NO: 8880 - RNA, 19 nt, synthetic construct
  misc_feature 1..19: note = Synthetic
  source 1..19: mol_type = other RNA
ccgcggcacctgggcgcac

SEQ ID NO: 8881 - RNA, 21 nt, synthetic construct
  misc_feature 1..21: note = Synthetic
  source 1..21: mol_type = other RNA
cgccgcggcacctgggcgcac

SEQ ID NO: 8882 - RNA, 22 nt, synthetic construct
  misc_feature 1..22: note = Synthetic
  source 1..22: mol_type = other RNA
gcgccgcggcacctgggcgcac

SEQ ID NO: 8883 - RNA, 23 nt, synthetic construct
  misc_feature 1..23: note = Synthetic
  source 1..23: mol_type = other RNA
cgcgccgcggcacctgggcgcac

SEQ ID NO: 8884 - RNA, 24 nt, synthetic construct
  misc_feature 1..24: note = Synthetic
  source 1..24: mol_type = other RNA
gcgcgccgcggcacctgggcgcac

SEQ ID NO: 8885 - RNA, 18 nt, synthetic construct
  misc_feature 1..18: note = Synthetic
  source 1..18: mol_type = other RNA
ccctgcgcgccgcggcac

SEQ ID NO: 8886 - RNA, 19 nt, synthetic construct
  misc_feature 1..19: note = Synthetic
  source 1..19: mol_type = other RNA
tccctgcgcgccgcggcac

SEQ ID NO: 8887 - RNA, 21 nt, synthetic construct
  misc_feature 1..21: note = Synthetic
  source 1..21: mol_type = other RNA
catccctgcgcgccgcggcac

SEQ ID NO: 8888 - RNA, 22 nt, synthetic construct
  misc_feature 1..22: note = Synthetic
  source 1..22: mol_type = other RNA
ccatccctgcgcgccgcggcac

SEQ ID NO: 8889 - RNA, 23 nt, synthetic construct
  misc_feature 1..23: note = Synthetic
  source 1..23: mol_type = other RNA
tccatccctgcgcgccgcggcac

SEQ ID NO: 8890 - RNA, 24 nt, synthetic construct
  misc_feature 1..24: note = Synthetic
  source 1..24: mol_type = other RNA
gtccatccctgcgcgccgcggcac

SEQ ID NO: 8891 - RNA, 18 nt, synthetic construct
  misc_feature 1..18: note = Synthetic
  source 1..18: mol_type = other RNA
tagttgacgtcggtcgac

SEQ ID NO: 8892 - RNA, 19 nt, synthetic construct
  misc_feature 1..19: note = Synthetic
  source 1..19: mol_type = other RNA
gtagttgacgtcggtcgac

SEQ ID NO: 8893 - RNA, 21 nt, synthetic construct
  misc_feature 1..21: note = Synthetic
  source 1..21: mol_type = other RNA
aagtagttgacgtcggtcgac

SEQ ID NO: 8894 - RNA, 22 nt, synthetic construct
  misc_feature 1..22: note = Synthetic
  source 1..22: mol_type = other RNA
gaagtagttgacgtcggtcgac

SEQ ID NO: 8895 - RNA, 23 nt, synthetic construct
  misc_feature 1..23: note = Synthetic
  source 1..23: mol_type = other RNA
ggaagtagttgacgtcggtcgac

SEQ ID NO: 8896 - RNA, 24 nt, synthetic construct
  misc_feature 1..24: note = Synthetic
  source 1..24: mol_type = other RNA
cggaagtagttgacgtcggtcgac

SEQ ID NO: 8897 - RNA, 18 nt, synthetic construct
  misc_feature 1..18: note = Synthetic
  source 1..18: mol_type = other RNA
ccccagagccggggggac

SEQ ID NO: 8898 - RNA, 19 nt, synthetic construct
  misc_feature 1..19: note = Synthetic
  source 1..19: mol_type = other RNA
cccccagagccggggggac

SEQ ID NO: 8899 - RNA, 21 nt, synthetic construct
  misc_feature 1..21: note = Synthetic
  source 1..21: mol_type = other RNA
ggcccccagagccggggggac

SEQ ID NO: 8900 - RNA, 22 nt, synthetic construct
  misc_feature 1..22: note = Synthetic
  source 1..22: mol_type = other RNA
tggcccccagagccggggggac

SEQ ID NO: 8901 - RNA, 23 nt, synthetic construct
  misc_feature 1..23: note = Synthetic
  source 1..23: mol_type = other RNA
ttggcccccagagccggggggac

SEQ ID NO: 8902 - RNA, 24 nt, synthetic construct
  misc_feature 1..24: note = Synthetic
  source 1..24: mol_type = other RNA
gttggcccccagagccggggggac

SEQ ID NO: 8903 - RNA, 18 nt, synthetic construct
  misc_feature 1..18: note = Synthetic
  source 1..18: mol_type = other RNA
ggcgaacagcgcgtggac

SEQ ID NO: 8904 - RNA, 19 nt, synthetic construct
  misc_feature 1..19: note = Synthetic
  source 1..19: mol_type = other RNA
cggcgaacagcgcgtggac

SEQ ID NO: 8905 - RNA, 21 nt, synthetic construct
  misc_feature 1..21: note = Synthetic
  source 1..21: mol_type = other RNA
cccggcgaacagcgcgtggac

SEQ ID NO: 8906 - RNA, 22 nt, synthetic construct
  misc_feature 1..22: note = Synthetic
  source 1..22: mol_type = other RNA
ccccggcgaacagcgcgtggac

SEQ ID NO: 8907 - RNA, 23 nt, synthetic construct
  misc_feature 1..23: note = Synthetic
  source 1..23: mol_type = other RNA
gccccggcgaacagcgcgtggac

SEQ ID NO: 8908 - RNA, 24 nt, synthetic construct
  misc_feature 1..24: note = Synthetic
  source 1..24: mol_type = other RNA
ggccccggcgaacagcgcgtggac

SEQ ID NO: 8909 - RNA, 18 nt, synthetic construct
  misc_feature 1..18: note = Synthetic
  source 1..18: mol_type = other RNA
ttacatgccgccgcgtac

SEQ ID NO: 8910 - RNA, 19 nt, synthetic construct
  misc_feature 1..19: note = Synthetic
  source 1..19: mol_type = other RNA
gttacatgccgccgcgtac

SEQ ID NO: 8911 - RNA, 21 nt, synthetic construct
  misc_feature 1..21: note = Synthetic
  source 1..21: mol_type = other RNA
acgttacatgccgccgcgtac

SEQ ID NO: 8912 - RNA, 22 nt, synthetic construct
  misc_feature 1..22: note = Synthetic
  source 1..22: mol_type = other RNA
cacgttacatgccgccgcgtac

SEQ ID NO: 8913 - RNA, 23 nt, synthetic construct
  misc_feature 1..23: note = Synthetic
  source 1..23: mol_type = other RNA
ccacgttacatgccgccgcgtac

SEQ ID NO: 8914 - RNA, 24 nt, synthetic construct
  misc_feature 1..24: note = Synthetic
  source 1..24: mol_type = other RNA
gccacgttacatgccgccgcgtac

SEQ ID NO: 8915 - RNA, 18 nt, synthetic construct
  misc_feature 1..18: note = Synthetic
  source 1..18: mol_type = other RNA
ctctggccgtggtcgtac

SEQ ID NO: 8916 - RNA, 19 nt, synthetic construct
  misc_feature 1..19: note = Synthetic
  source 1..19: mol_type = other RNA
gctctggccgtggtcgtac

SEQ ID NO: 8917 - RNA, 21 nt, synthetic construct
  misc_feature 1..21: note = Synthetic
  source 1..21: mol_type = other RNA
tcgctctggccgtggtcgtac

SEQ ID NO: 8918 - RNA, 22 nt, synthetic construct
  misc_feature 1..22: note = Synthetic
  source 1..22: mol_type = other RNA
gtcgctctggccgtggtcgtac

SEQ ID NO: 8919 - RNA, 23 nt, synthetic construct
  misc_feature 1..23: note = Synthetic
  source 1..23: mol_type = other RNA
ggtcgctctggccgtggtcgtac

SEQ ID NO: 8920 - RNA, 24 nt, synthetic construct
  misc_feature 1..24: note = Synthetic
  source 1..24: mol_type = other RNA
gggtcgctctggccgtggtcgtac

SEQ ID NO: 8921 - RNA, 18 nt, synthetic construct
  misc_feature 1..18: note = Synthetic
  source 1..18: mol_type = other RNA
aggtccatggcgcccacc

SEQ ID NO: 8922 - RNA, 19 nt, synthetic construct
  misc_feature 1..19: note = Synthetic
  source 1..19: mol_type = other RNA
caggtccatggcgcccacc

SEQ ID NO: 8923 - RNA, 21 nt, synthetic construct
  misc_feature 1..21: note = Synthetic
  source 1..21: mol_type = other RNA
gtcaggtccatggcgcccacc

SEQ ID NO: 8924 - RNA, 22 nt, synthetic construct
  misc_feature 1..22: note = Synthetic
  source 1..22: mol_type = other RNA
cgtcaggtccatggcgcccacc

SEQ ID NO: 8925 - RNA, 23 nt, synthetic construct
  misc_feature 1..23: note = Synthetic
  source 1..23: mol_type = other RNA
acgtcaggtccatggcgcccacc

SEQ ID NO: 8926 - RNA, 24 nt, synthetic construct
  misc_feature 1..24: note = Synthetic
  source 1..24: mol_type = other RNA
aacgtcaggtccatggcgcccacc

SEQ ID NO: 8927 - RNA, 18 nt, synthetic construct
  misc_feature 1..18: note = Synthetic
  source 1..18: mol_type = other RNA
gtttcgtgccgggccacc

SEQ ID NO: 8928 - RNA, 19 nt, synthetic construct
  misc_feature 1..19: note = Synthetic
  source 1..19: mol_type = other RNA
agtttcgtgccgggccacc

SEQ ID NO: 8929 - RNA, 21 nt, synthetic construct
  misc_feature 1..21: note = Synthetic
  source 1..21: mol_type = other RNA
ccagtttcgtgccgggccacc

SEQ ID NO: 8930 - RNA, 22 nt, synthetic construct
  misc_feature 1..22: note = Synthetic
  source 1..22: mol_type = other RNA
gccagtttcgtgccgggccacc

SEQ ID NO: 8931 - RNA, 23 nt, synthetic construct
  misc_feature 1..23: note = Synthetic
  source 1..23: mol_type = other RNA
cgccagtttcgtgccgggccacc

SEQ ID NO: 8932 - RNA, 24 nt, synthetic construct
  misc_feature 1..24: note = Synthetic
  source 1..24: mol_type = other RNA
ccgccagtttcgtgccgggccacc

SEQ ID NO: 8933 - RNA, 18 nt, synthetic construct
  misc_feature 1..18: note = Synthetic
  source 1..18: mol_type = other RNA
ccacgagttcgcggcacc

SEQ ID NO: 8934 - RNA, 19 nt, synthetic construct
  misc_feature 1..19: note = Synthetic
  source 1..19: mol_type = other RNA
tccacgagttcgcggcacc

SEQ ID NO: 8935 - RNA, 21 nt, synthetic construct
  misc_feature 1..21: note = Synthetic
  source 1..21: mol_type = other RNA
cctccacgagttcgcggcacc

SEQ ID NO: 8936 - RNA, 22 nt, synthetic construct
  misc_feature 1..22: note = Synthetic
  source 1..22: mol_type = other RNA
tcctccacgagttcgcggcacc

SEQ ID NO: 8937 - RNA, 23 nt, synthetic construct
  misc_feature 1..23: note = Synthetic
  source 1..23: mol_type = other RNA
gtcctccacgagttcgcggcacc

SEQ ID NO: 8938 - RNA, 24 nt, synthetic construct
  misc_feature 1..24: note = Synthetic
  source 1..24: mol_type = other RNA
ggtcctccacgagttcgcggcacc

SEQ ID NO: 8939 - RNA, 18 nt, synthetic construct
  misc_feature 1..18: note = Synthetic
  source 1..18: mol_type = other RNA
cccagagccggggggacc

SEQ ID NO: 8940 - RNA, 19 nt, synthetic construct
  misc_feature 1..19: note = Synthetic
  source 1..19: mol_type = other RNA
ccccagagccggggggacc

SEQ ID NO: 8941 - RNA, 21 nt, synthetic construct
  misc_feature 1..21: note = Synthetic
  source 1..21: mol_type = other RNA
gcccccagagccggggggacc

SEQ ID NO: 8942 - RNA, 22 nt, synthetic construct
  misc_feature 1..22: note = Synthetic
  source 1..22: mol_type = other RNA
ggcccccagagccggggggacc

SEQ ID NO: 8943 - RNA, 23 nt, synthetic construct
  misc_feature 1..23: note = Synthetic
  source 1..23: mol_type = other RNA
tggcccccagagccggggggacc

SEQ ID NO: 8944 - RNA, 24 nt, synthetic construct
  misc_feature 1..24: note = Synthetic
  source 1..24: mol_type = other RNA
ttggcccccagagccggggggacc

SEQ ID NO: 8945 - RNA, 18 nt, synthetic construct
  misc_feature 1..18: note = Synthetic
  source 1..18: mol_type = other RNA
ctggtgatgcactggacc

SEQ ID NO: 8946 - RNA, 19 nt, synthetic construct
  misc_feature 1..19: note = Synthetic
  source 1..19: mol_type = other RNA
gctggtgatgcactggacc

SEQ ID NO: 8947 - RNA, 21 nt, synthetic construct
  misc_feature 1..21: note = Synthetic
  source 1..21: mol_type = other RNA
tagctggtgatgcactggacc

SEQ ID NO: 8948 - RNA, 22 nt, synthetic construct
  misc_feature 1..22: note = Synthetic
  source 1..22: mol_type = other RNA
gtagctggtgatgcactggacc

SEQ ID NO: 8949 - RNA, 23 nt, synthetic construct
  misc_feature 1..23: note = Synthetic
  source 1..23: mol_type = other RNA
agtagctggtgatgcactggacc

SEQ ID NO: 8950 - RNA, 24 nt, synthetic construct
  misc_feature 1..24: note = Synthetic
  source 1..24: mol_type = other RNA
cagtagctggtgatgcactggacc

SEQ ID NO: 8951 - RNA, 18 nt, synthetic construct
  misc_feature 1..18: note = Synthetic
  source 1..18: mol_type = other RNA
cacgagttcgcggcaccc

SEQ ID NO: 8952 - RNA, 19 nt, synthetic construct
  misc_feature 1..19: note = Synthetic
  source 1..19: mol_type = other RNA
ccacgagttcgcggcaccc

SEQ ID NO: 8953 - RNA, 21 nt, synthetic construct
  misc_feature 1..21: note = Synthetic
  source 1..21: mol_type = other RNA
ctccacgagttcgcggcaccc

SEQ ID NO: 8954 - RNA, 22 nt, synthetic construct
  misc_feature 1..22: note = Synthetic
  source 1..22: mol_type = other RNA
cctccacgagttcgcggcaccc

SEQ ID NO: 8955 - RNA, 23 nt, synthetic construct
  misc_feature 1..23: note = Synthetic
  source 1..23: mol_type = other RNA
tcctccacgagttcgcggcaccc

SEQ ID NO: 8956 - RNA, 24 nt, synthetic construct
  misc_feature 1..24: note = Synthetic
  source 1..24: mol_type = other RNA
gtcctccacgagttcgcggcaccc

SEQ ID NO: 8957 - RNA, 18 nt, synthetic construct
  misc_feature 1..18: note = Synthetic
  source 1..18: mol_type = other RNA
acgagttcgcggcacccc

SEQ ID NO: 8958 - RNA, 19 nt, synthetic construct
  misc_feature 1..19: note = Synthetic
  source 1..19: mol_type = other RNA
cacgagttcgcggcacccc

SEQ ID NO: 8959 - RNA, 21 nt, synthetic construct
  misc_feature 1..21: note = Synthetic
  source 1..21: mol_type = other RNA
tccacgagttcgcggcacccc

SEQ ID NO: 8960 - RNA, 22 nt, synthetic construct
  misc_feature 1..22: note = Synthetic
  source 1..22: mol_type = other RNA
ctccacgagttcgcggcacccc

SEQ ID NO: 8961 - RNA, 23 nt, synthetic construct
  misc_feature 1..23: note = Synthetic
  source 1..23: mol_type = other RNA
cctccacgagttcgcggcacccc

SEQ ID NO: 8962 - RNA, 24 nt, synthetic construct
  misc_feature 1..24: note = Synthetic
  source 1..24: mol_type = other RNA
tcctccacgagttcgcggcacccc

SEQ ID NO: 8963 - RNA, 18 nt, synthetic construct
  misc_feature 1..18: note = Synthetic
  source 1..18: mol_type = other RNA
gccgcgctcaaacgcccc

SEQ ID NO: 8964 - RNA, 19 nt, synthetic construct
  misc_feature 1..19: note = Synthetic
  source 1..19: mol_type = other RNA
tgccgcgctcaaacgcccc

SEQ ID NO: 8965 - RNA, 21 nt, synthetic construct
  misc_feature 1..21: note = Synthetic
  source 1..21: mol_type = other RNA
cgtgccgcgctcaaacgcccc

SEQ ID NO: 8966 - RNA, 22 nt, synthetic construct
  misc_feature 1..22: note = Synthetic
  source 1..22: mol_type = other RNA
ccgtgccgcgctcaaacgcccc

SEQ ID NO: 8967 - RNA, 23 nt, synthetic construct
  misc_feature 1..23: note = Synthetic
  source 1..23: mol_type = other RNA
gccgtgccgcgctcaaacgcccc

SEQ ID NO: 8968 - RNA, 24 nt, synthetic construct
  misc_feature 1..24: note = Synthetic
  source 1..24: mol_type = other RNA
ggccgtgccgcgctcaaacgcccc

SEQ ID NO: 8969 - RNA, 18 nt, synthetic construct
  misc_feature 1..18: note = Synthetic
  source 1..18: mol_type = other RNA
gcggtcgtcgaacgcccc

SEQ ID NO: 8970 - RNA, 19 nt, synthetic construct
  misc_feature 1..19: note = Synthetic
  source 1..19: mol_type = other RNA
tgcggtcgtcgaacgcccc

SEQ ID NO: 8971 - RNA, 21 nt, synthetic construct
  misc_feature 1..21: note = Synthetic
  source 1..21: mol_type = other RNA
gttgcggtcgtcgaacgcccc

SEQ ID NO: 8972 - RNA, 22 nt, synthetic construct
  misc_feature 1..22: note = Synthetic
  source 1..22: mol_type = other RNA
agttgcggtcgtcgaacgcccc

SEQ ID NO: 8973 - RNA, 23 nt, synthetic construct
  misc_feature 1..23: note = Synthetic
  source 1..23: mol_type = other RNA
tagttgcggtcgtcgaacgcccc

SEQ ID NO: 8974 - RNA, 24 nt, synthetic construct
  misc_feature 1..24: note = Synthetic
  source 1..24: mol_type = other RNA
gtagttgcggtcgtcgaacgcccc

SEQ ID NO: 8975 - RNA, 18 nt, synthetic construct
  misc_feature 1..18: note = Synthetic
  source 1..18: mol_type = other RNA
cggtgcagcagcggcccc

SEQ ID NO: 8976 - RNA, 19 nt, synthetic construct
  misc_feature 1..19: note = Synthetic
  source 1..19: mol_type = other RNA
gcggtgcagcagcggcccc

SEQ ID NO: 8977 - RNA, 21 nt, synthetic construct
  misc_feature 1..21: note = Synthetic
  source 1..21: mol_type = other RNA
ccgcggtgcagcagcggcccc

SEQ ID NO: 8978 - RNA, 22 nt, synthetic construct
  misc_feature 1..22: note = Synthetic
  source 1..22: mol_type = other RNA
cccgcggtgcagcagcggcccc

SEQ ID NO: 8979 - RNA, 23 nt, synthetic construct
  misc_feature 1..23: note = Synthetic
  source 1..23: mol_type = other RNA
ccccgcggtgcagcagcggcccc

SEQ ID NO: 8980 - RNA, 24 nt, synthetic construct
  misc_feature 1..24: note = Synthetic
  source 1..24: mol_type = other RNA
cccccgcggtgcagcagcggcccc

SEQ ID NO: 8981 - RNA, 18 nt, synthetic construct
  misc_feature 1..18: note = Synthetic
  source 1..18: mol_type = other RNA
cgaaaagtagttggcccc

SEQ ID NO: 8982 - RNA, 19 nt, synthetic construct
  misc_feature 1..19: note = Synthetic
  source 1..19: mol_type = other RNA
acgaaaagtagttggcccc

SEQ ID NO: 8983 - RNA, 21 nt, synthetic construct
  misc_feature 1..21: note = Synthetic
  source 1..21: mol_type = other RNA
cgacgaaaagtagttggcccc

SEQ ID NO: 8984 - RNA, 22 nt, synthetic construct
  misc_feature 1..22: note = Synthetic
  source 1..22: mol_type = other RNA
tcgacgaaaagtagttggcccc

SEQ ID NO: 8985 - RNA, 23 nt, synthetic construct
  misc_feature 1..23: note = Synthetic
  source 1..23: mol_type = other RNA
atcgacgaaaagtagttggcccc

SEQ ID NO: 8986 - RNA, 24 nt, synthetic construct
  misc_feature 1..24: note = Synthetic
  source 1..24: mol_type = other RNA
gatcgacgaaaagtagttggcccc

SEQ ID NO: 8987 - RNA, 18 nt, synthetic construct
  misc_feature 1..18: note = Synthetic
  source 1..18: mol_type = other RNA
gacccatcggacccgccc

SEQ ID NO: 8988 - RNA, 19 nt, synthetic construct
  misc_feature 1..19: note = Synthetic
  source 1..19: mol_type = other RNA
cgacccatcggacccgccc

SEQ ID NO: 8989 - RNA, 21 nt, synthetic construct
  misc_feature 1..21: note = Synthetic
  source 1..21: mol_type = other RNA
cgcgacccatcggacccgccc

SEQ ID NO: 8990 - RNA, 22 nt, synthetic construct
  misc_feature 1..22: note = Synthetic
  source 1..22: mol_type = other RNA
ccgcgacccatcggacccgccc

SEQ ID NO: 8991 - RNA, 23 nt, synthetic construct
  misc_feature 1..23: note = Synthetic
  source 1..23: mol_type = other RNA
tccgcgacccatcggacccgccc

SEQ ID NO: 8992 - RNA, 24 nt, synthetic construct
  misc_feature 1..24: note = Synthetic
  source 1..24: mol_type = other RNA
ttccgcgacccatcggacccgccc

SEQ ID NO: 8993 - RNA, 18 nt, synthetic construct
  misc_feature 1..18: note = Synthetic
  source 1..18: mol_type = other RNA
accggattgaacaggccc

SEQ ID NO: 8994 - RNA, 19 nt, synthetic construct
  misc_feature 1..19: note = Synthetic
  source 1..19: mol_type = other RNA
gaccggattgaacaggccc

SEQ ID NO: 8995 - RNA, 21 nt, synthetic construct
  misc_feature 1..21: note = Synthetic
  source 1..21: mol_type = other RNA
atgaccggattgaacaggccc

SEQ ID NO: 8996 - RNA, 22 nt, synthetic construct
  misc_feature 1..22: note = Synthetic
  source 1..22: mol_type = other RNA
catgaccggattgaacaggccc

SEQ ID NO: 8997 - RNA, 23 nt, synthetic construct
  misc_feature 1..23: note = Synthetic
  source 1..23: mol_type = other RNA
ccatgaccggattgaacaggccc

SEQ ID NO: 8998 - RNA, 24 nt, synthetic construct
  misc_feature 1..24: note = Synthetic
  source 1..24: mol_type = other RNA
tccatgaccggattgaacaggccc

SEQ ID NO: 8999 - RNA, 18 nt, synthetic construct
  misc_feature 1..18: note = Synthetic
  source 1..18: mol_type = other RNA
gccacctggagctggccc

SEQ ID NO: 9000 - RNA, 19 nt, synthetic construct
  misc_feature 1..19: note = Synthetic
  source 1..19: mol_type = other RNA
ggccacctggagctggccc

SEQ ID NO: 9001 - RNA, 21 nt, synthetic construct
  misc_feature 1..21: note = Synthetic
  source 1..21: mol_type = other RNA
cgggccacctggagctggccc

SEQ ID NO: 9002 - RNA, 22 nt, synthetic construct
  misc_feature 1..22: note = Synthetic
  source 1..22: mol_type = other RNA
ccgggccacctggagctggccc

SEQ ID NO: 9003 - RNA, 23 nt, synthetic construct
  misc_feature 1..23: note = Synthetic
  source 1..23: mol_type = other RNA
gccgggccacctggagctggccc

SEQ ID NO: 9004 - RNA, 24 nt, synthetic construct
  misc_feature 1..24: note = Synthetic
  source 1..24: mol_type = other RNA
tgccgggccacctggagctggccc

SEQ ID NO: 9005 - RNA, 18 nt, synthetic construct
  misc_feature 1..18: note = Synthetic
  source 1..18: mol_type = other RNA
cggtggcccgccttgccc

SEQ ID NO: 9006 - RNA, 19 nt, synthetic construct
  misc_feature 1..19: note = Synthetic
  source 1..19: mol_type = other RNA
gcggtggcccgccttgccc

SEQ ID NO: 9007 - RNA, 21 nt, synthetic construct
  misc_feature 1..21: note = Synthetic
  source 1..21: mol_type = other RNA
cggcggtggcccgccttgccc

SEQ ID NO: 9008 - RNA, 22 nt, synthetic construct
  misc_feature 1..22: note = Synthetic
  source 1..22: mol_type = other RNA
ccggcggtggcccgccttgccc

SEQ ID NO: 9009 - RNA, 23 nt, synthetic construct
  misc_feature 1..23: note = Synthetic
  source 1..23: mol_type = other RNA
cccggcggtggcccgccttgccc

SEQ ID NO: 9010 - RNA, 24 nt, synthetic construct
  misc_feature 1..24: note = Synthetic
  source 1..24: mol_type = other RNA
tcccggcggtggcccgccttgccc

SEQ ID NO: 9011 - RNA, 18 nt, synthetic construct
  misc_feature 1..18: note = Synthetic
  source 1..18: mol_type = other RNA
aggtggcctggatctccc

SEQ ID NO: 9012 - RNA, 19 nt, synthetic construct
  misc_feature 1..19: note = Synthetic
  source 1..19: mol_type = other RNA
caggtggcctggatctccc

SEQ ID NO: 9013 - RNA, 21 nt, synthetic construct
  misc_feature 1..21: note = Synthetic
  source 1..21: mol_type = other RNA
gccaggtggcctggatctccc

SEQ ID NO: 9014 - RNA, 22 nt, synthetic construct
  misc_feature 1..22: note = Synthetic
  source 1..22: mol_type = other RNA
cgccaggtggcctggatctccc

SEQ ID NO: 9015 - RNA, 23 nt, synthetic construct
  misc_feature 1..23: note = Synthetic
  source 1..23: mol_type = other RNA
gcgccaggtggcctggatctccc

SEQ ID NO: 9016 - RNA, 24 nt, synthetic construct
  misc_feature 1..24: note = Synthetic
  source 1..24: mol_type = other RNA
cgcgccaggtggcctggatctccc

SEQ ID NO: 9017 - RNA, 18 nt, synthetic construct
  misc_feature 1..18: note = Synthetic
  source 1..18: mol_type = other RNA
tcctcgggaaggtctccc

SEQ ID NO: 9018 - RNA, 19 nt, synthetic construct
  misc_feature 1..19: note = Synthetic
  source 1..19: mol_type = other RNA
ctcctcgggaaggtctccc

SEQ ID NO: 9019 - RNA, 21 nt, synthetic construct
  misc_feature 1..21: note = Synthetic
  source 1..21: mol_type = other RNA
cactcctcgggaaggtctccc

SEQ ID NO: 9020 - RNA, 22 nt, synthetic construct
  misc_feature 1..22: note = Synthetic
  source 1..22: mol_type = other RNA
gcactcctcgggaaggtctccc

SEQ ID NO: 9021 - RNA, 23 nt, synthetic construct
  misc_feature 1..23: note = Synthetic
  source 1..23: mol_type = other RNA
tgcactcctcgggaaggtctccc

SEQ ID NO: 9022 - RNA, 24 nt, synthetic construct
  misc_feature 1..24: note = Synthetic
  source 1..24: mol_type = other RNA
atgcactcctcgggaaggtctccc

SEQ ID NO: 9023 - RNA, 18 nt, synthetic construct
  misc_feature 1..18: note = Synthetic
  source 1..18: mol_type = other RNA
tattacagagccagtccc

SEQ ID NO: 9024 - RNA, 19 nt, synthetic construct
  misc_feature 1..19: note = Synthetic
  source 1..19: mol_type = other RNA
ttattacagagccagtccc

SEQ ID NO: 9025 - RNA, 20 nt, synthetic construct
  misc_feature 1..20: note = Synthetic
  source 1..20: mol_type = other RNA
tttattacagagccagtccc

SEQ ID NO: 9026 - RNA, 21 nt, synthetic construct
  misc_feature 1..21: note = Synthetic
  source 1..21: mol_type = other RNA
gtttattacagagccagtccc

SEQ ID NO: 9027 - RNA, 22 nt, synthetic construct
  misc_feature 1..22: note = Synthetic
  source 1..22: mol_type = other RNA
ggtttattacagagccagtccc

SEQ ID NO: 9028 - RNA, 23 nt, synthetic construct
  misc_feature 1..23: note = Synthetic
  source 1..23: mol_type = other RNA
cggtttattacagagccagtccc

SEQ ID NO: 9029 - RNA, 24 nt, synthetic construct
  misc_feature 1..24: note = Synthetic
  source 1..24: mol_type = other RNA
gcggtttattacagagccagtccc

SEQ ID NO: 9030 - RNA, 18 nt, synthetic construct
  misc_feature 1..18: note = Synthetic
  source 1..18: mol_type = other RNA
cccccggcggcgcgtccc

SEQ ID NO: 9031 - RNA, 19 nt, synthetic construct
  misc_feature 1..19: note = Synthetic
  source 1..19: mol_type = other RNA
gcccccggcggcgcgtccc

SEQ ID NO: 9032 - RNA, 21 nt, synthetic construct
  misc_feature 1..21: note = Synthetic
  source 1..21: mol_type = other RNA
acgcccccggcggcgcgtccc

SEQ ID NO: 9033 - RNA, 22 nt, synthetic construct
  misc_feature 1..22: note = Synthetic
  source 1..22: mol_type = other RNA
aacgcccccggcggcgcgtccc

SEQ ID NO: 9034 - RNA, 23 nt, synthetic construct
  misc_feature 1..23: note = Synthetic
  source 1..23: mol_type = other RNA
aaacgcccccggcggcgcgtccc

SEQ ID NO: 9035 - RNA, 24 nt, synthetic construct
  misc_feature 1..24: note = Synthetic
  source 1..24: mol_type = other RNA
taaacgcccccggcggcgcgtccc

SEQ ID NO: 9036 - RNA, 18 nt, synthetic construct
  misc_feature 1..18: note = Synthetic
  source 1..18: mol_type = other RNA
atcggcaacaacaaagcc

SEQ ID NO: 9037 - RNA, 19 nt, synthetic construct
  misc_feature 1..19: note = Synthetic
  source 1..19: mol_type = other RNA
catcggcaacaacaaagcc

SEQ ID NO: 9038 - RNA, 21 nt, synthetic construct
  misc_feature 1..21: note = Synthetic
  source 1..21: mol_type = other RNA
tgcatcggcaacaacaaagcc

SEQ ID NO: 9039 - RNA, 22 nt, synthetic construct
  misc_feature 1..22: note = Synthetic
  source 1..22: mol_type = other RNA
ttgcatcggcaacaacaaagcc

SEQ ID NO: 9040 - RNA, 23 nt, synthetic construct
  misc_feature 1..23: note = Synthetic
  source 1..23: mol_type = other RNA
gttgcatcggcaacaacaaagcc

SEQ ID NO: 9041 - RNA, 24 nt, synthetic construct
  misc_feature 1..24: note = Synthetic
  source 1..24: mol_type = other RNA
cgttgcatcggcaacaacaaagcc

SEQ ID NO: 9042 - RNA, 18 nt, synthetic construct
  misc_feature 1..18: note = Synthetic
  source 1..18: mol_type = other RNA
tagttggcccccagagcc

SEQ ID NO: 9043 - RNA, 19 nt, synthetic construct
  misc_feature 1..19: note = Synthetic
  source 1..19: mol_type = other RNA
gtagttggcccccagagcc

SEQ ID NO: 9044 - RNA, 21 nt, synthetic construct
  misc_feature 1..21: note = Synthetic
  source 1..21: mol_type = other RNA
aagtagttggcccccagagcc

SEQ ID NO: 9045 - RNA, 22 nt, synthetic construct
  misc_feature 1..22: note = Synthetic
  source 1..22: mol_type = other RNA
aaagtagttggcccccagagcc

SEQ ID NO: 9046 - RNA, 23 nt, synthetic construct
  misc_feature 1..23: note = Synthetic
  source 1..23: mol_type = other RNA
aaaagtagttggcccccagagcc

SEQ ID NO: 9047 - RNA, 24 nt, synthetic construct
  misc_feature 1..24: note = Synthetic
  source 1..24: mol_type = other RNA
gaaaagtagttggcccccagagcc

SEQ ID NO: 9048 - RNA, 18 nt, synthetic construct
  misc_feature 1..18: note = Synthetic
  source 1..18: mol_type = other RNA
gtgccgcgctcaaacgcc

SEQ ID NO: 9049 - RNA, 19 nt, synthetic construct
  misc_feature 1..19: note = Synthetic
  source 1..19: mol_type = other RNA
cgtgccgcgctcaaacgcc

SEQ ID NO: 9050 - RNA, 21 nt, synthetic construct
  misc_feature 1..21: note = Synthetic
  source 1..21: mol_type = other RNA
gccgtgccgcgctcaaacgcc

SEQ ID NO: 9051 - RNA, 22 nt, synthetic construct
  misc_feature 1..22: note = Synthetic
  source 1..22: mol_type = other RNA
ggccgtgccgcgctcaaacgcc

SEQ ID NO: 9052 - RNA, 23 nt, synthetic construct
  misc_feature 1..23: note = Synthetic
  source 1..23: mol_type = other RNA
cggccgtgccgcgctcaaacgcc

SEQ ID NO: 9053 - RNA, 24 nt, synthetic construct
  misc_feature 1..24: note = Synthetic
  source 1..24: mol_type = other RNA
tcggccgtgccgcgctcaaacgcc

SEQ ID NO: 9054 - RNA, 18 nt, synthetic construct
  misc_feature 1..18: note = Synthetic
  source 1..18: mol_type = other RNA
atcttgaagtaccccgcc

SEQ ID NO: 9055 - RNA, 19 nt, synthetic construct
  misc_feature 1..19: note = Synthetic
  source 1..19: mol_type = other RNA
gatcttgaagtaccccgcc

SEQ ID NO: 9056 - RNA, 21 nt, synthetic construct
  misc_feature 1..21: note = Synthetic
  source 1..21: mol_type = other RNA
ctgatcttgaagtaccccgcc

SEQ ID NO: 9057 - RNA, 22 nt, synthetic construct
  misc_feature 1..22: note = Synthetic
  source 1..22: mol_type = other RNA
actgatcttgaagtaccccgcc

SEQ ID NO: 9058 - RNA, 23 nt, synthetic construct
  misc_feature 1..23: note = Synthetic
  source 1..23: mol_type = other RNA
gactgatcttgaagtaccccgcc

SEQ ID NO: 9059 - RNA, 24 nt, synthetic construct
  misc_feature 1..24: note = Synthetic
  source 1..24: mol_type = other RNA
ggactgatcttgaagtaccccgcc

SEQ ID NO: 9060 - RNA, 18 nt, synthetic construct
  misc_feature 1..18: note = Synthetic
  source 1..18: mol_type = other RNA
gccgccggacatagcgcc

SEQ ID NO: 9061 - RNA, 19 nt, synthetic construct
  misc_feature 1..19: note = Synthetic
  source 1..19: mol_type = other RNA
cgccgccggacatagcgcc

SEQ ID NO: 9062 - RNA, 21 nt, synthetic construct
  misc_feature 1..21: note = Synthetic
  source 1..21: mol_type = other RNA
aacgccgccggacatagcgcc

SEQ ID NO: 9063 - RNA, 22 nt, synthetic construct
  misc_feature 1..22: note = Synthetic
  source 1..22: mol_type = other RNA
gaacgccgccggacatagcgcc

SEQ ID NO: 9064 - RNA, 23 nt, synthetic construct
  misc_feature 1..23: note = Synthetic
  source 1..23: mol_type = other RNA
ggaacgccgccggacatagcgcc

SEQ ID NO: 9065 - RNA, 24 nt, synthetic construct
  misc_feature 1..24: note = Synthetic
  source 1..24: mol_type = other RNA
cggaacgccgccggacatagcgcc

SEQ ID NO: 9066 - RNA, 18 nt, synthetic construct
  misc_feature 1..18: note = Synthetic
  source 1..18: mol_type = other RNA
gctggggcactcctcgcc

SEQ ID NO: 9067 - RNA, 19 nt, synthetic construct
  misc_feature 1..19: note = Synthetic
  source 1..19: mol_type = other RNA
cgctggggcactcctcgcc

SEQ ID NO: 9068 - RNA, 21 nt, synthetic construct
  misc_feature 1..21: note = Synthetic
  source 1..21: mol_type = other RNA
gtcgctggggcactcctcgcc

SEQ ID NO: 9069 - RNA, 22 nt, synthetic construct
  misc_feature 1..22: note = Synthetic
  source 1..22: mol_type = other RNA
ggtcgctggggcactcctcgcc

SEQ ID NO: 9070 - RNA, 23 nt, synthetic construct
  misc_feature 1..23: note = Synthetic
  source 1..23: mol_type = other RNA
gggtcgctggggcactcctcgcc

SEQ ID NO: 9071 - RNA, 24 nt, synthetic construct
  misc_feature 1..24: note = Synthetic
  source 1..24: mol_type = other RNA
ggggtcgctggggcactcctcgcc

SEQ ID NO: 9072 - RNA, 18 nt, synthetic construct
  misc_feature 1..18: note = Synthetic
  source 1..18: mol_type = other RNA
agctgatgatgcaaggcc

SEQ ID NO: 9073 - RNA, 19 nt, synthetic construct
  misc_feature 1..19: note = Synthetic
  source 1..19: mol_type = other RNA
gagctgatgatgcaaggcc

SEQ ID NO: 9074 - RNA, 21 nt, synthetic construct
  misc_feature 1..21: note = Synthetic
  source 1..21: mol_type = other RNA
ttgagctgatgatgcaaggcc

SEQ ID NO: 9075 - RNA, 22 nt, synthetic construct
  misc_feature 1..22: note = Synthetic
  source 1..22: mol_type = other RNA
cttgagctgatgatgcaaggcc

SEQ ID NO: 9076 - RNA, 23 nt, synthetic construct
  misc_feature 1..23: note = Synthetic
  source 1..23: mol_type = other RNA
tcttgagctgatgatgcaaggcc

SEQ ID NO: 9077 - RNA, 24 nt, synthetic construct
  misc_feature 1..24: note = Synthetic
  source 1..24: mol_type = other RNA
gtcttgagctgatgatgcaaggcc

SEQ ID NO: 9078 - RNA, 18 nt, synthetic construct
  misc_feature 1..18: note = Synthetic
  source 1..18: mol_type = other RNA
gccgtggccgcgaaggcc

SEQ ID NO: 9079 - RNA, 19 nt, synthetic construct
  misc_feature 1..19: note = Synthetic
  source 1..19: mol_type = other RNA
ggccgtggccgcgaaggcc

SEQ ID NO: 9080 - RNA, 21 nt, synthetic construct
  misc_feature 1..21: note = Synthetic
  source 1..21: mol_type = other RNA
ttggccgtggccgcgaaggcc

SEQ ID NO: 9081 - RNA, 22 nt, synthetic construct
  misc_feature 1..22: note = Synthetic
  source 1..22: mol_type = other RNA
gttggccgtggccgcgaaggcc

SEQ ID NO: 9082 - RNA, 23 nt, synthetic construct
  misc_feature 1..23: note = Synthetic
  source 1..23: mol_type = other RNA
ggttggccgtggccgcgaaggcc

SEQ ID NO: 9083 - RNA, 24 nt, synthetic construct
  misc_feature 1..24: note = Synthetic
  source 1..24: mol_type = other RNA
gggttggccgtggccgcgaaggcc

SEQ ID NO: 9084 - RNA, 18 nt, synthetic construct
  misc_feature 1..18: note = Synthetic
  source 1..18: mol_type = other RNA
gaccggattgaacaggcc

SEQ ID NO: 9085 - RNA, 19 nt, synthetic construct
  misc_feature 1..19: note = Synthetic
  source 1..19: mol_type = other RNA
tgaccggattgaacaggcc

SEQ ID NO: 9086 - RNA, 21 nt, synthetic construct
  misc_feature 1..21: note = Synthetic
  source 1..21: mol_type = other RNA
catgaccggattgaacaggcc

SEQ ID NO: 9087 - RNA, 22 nt, synthetic construct
  misc_feature 1..22: note = Synthetic
  source 1..22: mol_type = other RNA
ccatgaccggattgaacaggcc

SEQ ID NO: 9088 - RNA, 23 nt, synthetic construct
  misc_feature 1..23: note = Synthetic
  source 1..23: mol_type = other RNA
tccatgaccggattgaacaggcc

SEQ ID NO: 9089 - RNA, 24 nt, synthetic construct
  misc_feature 1..24: note = Synthetic
  source 1..24: mol_type = other RNA
ttccatgaccggattgaacaggcc

SEQ ID NO: 9090 - RNA, 18 nt, synthetic construct
  misc_feature 1..18: note = Synthetic
  source 1..18: mol_type = other RNA
cacccccagctccaggcc

SEQ ID NO: 9091 - RNA, 19 nt, synthetic construct
  misc_feature 1..19: note = Synthetic
  source 1..19: mol_type = other RNA
ccacccccagctccaggcc

SEQ ID NO: 9092 - RNA, 21 nt, synthetic construct
  misc_feature 1..21: note = Synthetic
  source 1..21: mol_type = other RNA
tcccacccccagctccaggcc

SEQ ID NO: 9093 - RNA, 22 nt, synthetic construct
  misc_feature 1..22: note = Synthetic
  source 1..22: mol_type = other RNA
gtcccacccccagctccaggcc

SEQ ID NO: 9094 - RNA, 23 nt, synthetic construct
  misc_feature 1..23: note = Synthetic
  source 1..23: mol_type = other RNA
cgtcccacccccagctccaggcc

SEQ ID NO: 9095 - RNA, 24 nt, synthetic construct
  misc_feature 1..24: note = Synthetic
  source 1..24: mol_type = other RNA
gcgtcccacccccagctccaggcc

SEQ ID NO: 9096 - RNA, 18 nt, synthetic construct
  misc_feature 1..18: note = Synthetic
  source 1..18: mol_type = other RNA
gtcagacggggcacggcc

SEQ ID NO: 9097 - RNA, 19 nt, synthetic construct
  misc_feature 1..19: note = Synthetic
  source 1..19: mol_type = other RNA
cgtcagacggggcacggcc

SEQ ID NO: 9098 - RNA, 21 nt, synthetic construct
  misc_feature 1..21: note = Synthetic
  source 1..21: mol_type = other RNA
tgcgtcagacggggcacggcc

SEQ ID NO: 9099 - RNA, 22 nt, synthetic construct
  misc_feature 1..22: note = Synthetic
  source 1..22: mol_type = other RNA
atgcgtcagacggggcacggcc

SEQ ID NO: 9100 - RNA, 23 nt, synthetic construct
  misc_feature 1..23: note = Synthetic
  source 1..23: mol_type = other RNA
catgcgtcagacggggcacggcc

SEQ ID NO: 9101 - RNA, 24 nt, synthetic construct
  misc_feature 1..24: note = Synthetic
  source 1..24: mol_type = other RNA
gcatgcgtcagacggggcacggcc

SEQ ID NO: 9102 - RNA, 18 nt, synthetic construct
  misc_feature 1..18: note = Synthetic
  source 1..18: mol_type = other RNA
atctcccccgggccggcc

SEQ ID NO: 9103 - RNA, 19 nt, synthetic construct
  misc_feature 1..19: note = Synthetic
  source 1..19: mol_type = other RNA
gatctcccccgggccggcc

SEQ ID NO: 9104 - RNA, 21 nt, synthetic construct
  misc_feature 1..21: note = Synthetic
  source 1..21: mol_type = other RNA
tggatctcccccgggccggcc

SEQ ID NO: 9105 - RNA, 22 nt, synthetic construct
  misc_feature 1..22: note = Synthetic
  source 1..22: mol_type = other RNA
ctggatctcccccgggccggcc

SEQ ID NO: 9106 - RNA, 23 nt, synthetic construct
  misc_feature 1..23: note = Synthetic
  source 1..23: mol_type = other RNA
cctggatctcccccgggccggcc

SEQ ID NO: 9107 - RNA, 24 nt, synthetic construct
  misc_feature 1..24: note = Synthetic
  source 1..24: mol_type = other RNA
gcctggatctcccccgggccggcc

SEQ ID NO: 9108 - RNA, 18 nt, synthetic construct
  misc_feature 1..18: note = Synthetic
  source 1..18: mol_type = other RNA
gacaggtcgcgcagggcc

SEQ ID NO: 9109 - RNA, 19 nt, synthetic construct
  misc_feature 1..19: note = Synthetic
  source 1..19: mol_type = other RNA
cgacaggtcgcgcagggcc

SEQ ID NO: 9110 - RNA, 21 nt, synthetic construct
  misc_feature 1..21: note = Synthetic
  source 1..21: mol_type = other RNA
cgcgacaggtcgcgcagggcc

SEQ ID NO: 9111 - RNA, 22 nt, synthetic construct
  misc_feature 1..22: note = Synthetic
  source 1..22: mol_type = other RNA
ccgcgacaggtcgcgcagggcc

SEQ ID NO: 9112 - RNA, 23 nt, synthetic construct
  misc_feature 1..23: note = Synthetic
  source 1..23: mol_type = other RNA
gccgcgacaggtcgcgcagggcc

SEQ ID NO: 9113 - RNA, 24 nt, synthetic construct
  misc_feature 1..24: note = Synthetic
  source 1..24: mol_type = other RNA
tgccgcgacaggtcgcgcagggcc

SEQ ID NO: 9114 - RNA, 18 nt, synthetic construct
  misc_feature 1..18: note = Synthetic
  source 1..18: mol_type = other RNA
ggccacctggagctggcc

SEQ ID NO: 9115 - RNA, 19 nt, synthetic construct
  misc_feature 1..19: note = Synthetic
  source 1..19: mol_type = other RNA
gggccacctggagctggcc

SEQ ID NO: 9116 - RNA, 21 nt, synthetic construct
  misc_feature 1..21: note = Synthetic
  source 1..21: mol_type = other RNA
ccgggccacctggagctggcc

SEQ ID NO: 9117 - RNA, 22 nt, synthetic construct
  misc_feature 1..22: note = Synthetic
  source 1..22: mol_type = other RNA
gccgggccacctggagctggcc

SEQ ID NO: 9118 - RNA, 23 nt, synthetic construct
  misc_feature 1..23: note = Synthetic
  source 1..23: mol_type = other RNA
tgccgggccacctggagctggcc

SEQ ID NO: 9119 - RNA, 24 nt, synthetic construct
  misc_feature 1..24: note = Synthetic
  source 1..24: mol_type = other RNA
gtgccgggccacctggagctggcc

SEQ ID NO: 9120 - RNA, 18 nt, synthetic construct
  misc_feature 1..18: note = Synthetic
  source 1..18: mol_type = other RNA
cacgggttggccgtggcc

SEQ ID NO: 9121 - RNA, 19 nt, synthetic construct
  misc_feature 1..19: note = Synthetic
  source 1..19: mol_type = other RNA
ccacgggttggccgtggcc

SEQ ID NO: 9122 - RNA, 21 nt, synthetic construct
  misc_feature 1..21: note = Synthetic
  source 1..21: mol_type = other RNA
gcccacgggttggccgtggcc

SEQ ID NO: 9123 - RNA, 22 nt, synthetic construct
  misc_feature 1..22: note = Synthetic
  source 1..22: mol_type = other RNA
cgcccacgggttggccgtggcc

SEQ ID NO: 9124 - RNA, 23 nt, synthetic construct
  misc_feature 1..23: note = Synthetic
  source 1..23: mol_type = other RNA
acgcccacgggttggccgtggcc

SEQ ID NO: 9125 - RNA, 24 nt, synthetic construct
  misc_feature 1..24: note = Synthetic
  source 1..24: mol_type = other RNA
gacgcccacgggttggccgtggcc

SEQ ID NO: 9126 - RNA, 18 nt, synthetic construct
  misc_feature 1..18: note = Synthetic
  source 1..18: mol_type = other RNA
tcgctggcggcggtggcc

SEQ ID NO: 9127 - RNA, 19 nt, synthetic construct
  misc_feature 1..19: note = Synthetic
  source 1..19: mol_type = other RNA
gtcgctggcggcggtggcc

SEQ ID NO: 9128 - RNA, 21 nt, synthetic construct
  misc_feature 1..21: note = Synthetic
  source 1..21: mol_type = other RNA
acgtcgctggcggcggtggcc

SEQ ID NO: 9129 - RNA, 22 nt, synthetic construct
  misc_feature 1..22: note = Synthetic
  source 1..22: mol_type = other RNA
tacgtcgctggcggcggtggcc

SEQ ID NO: 9130 - RNA, 23 nt, synthetic construct
  misc_feature 1..23: note = Synthetic
  source 1..23: mol_type = other RNA
gtacgtcgctggcggcggtggcc

SEQ ID NO: 9131 - RNA, 24 nt, synthetic construct
  misc_feature 1..24: note = Synthetic
  source 1..24: mol_type = other RNA
tgtacgtcgctggcggcggtggcc

SEQ ID NO: 9132 - RNA, 18 nt, synthetic construct
  misc_feature 1..18: note = Synthetic
  source 1..18: mol_type = other RNA
gcggggatccgggtggcc

SEQ ID NO: 9133 - RNA, 19 nt, synthetic construct
  misc_feature 1..19: note = Synthetic
  source 1..19: mol_type = other RNA
cgcggggatccgggtggcc

SEQ ID NO: 9134 - RNA, 21 nt, synthetic construct
  misc_feature 1..21: note = Synthetic
  source 1..21: mol_type = other RNA
ggcgcggggatccgggtggcc

SEQ ID NO: 9135 - RNA, 22 nt, synthetic construct
  misc_feature 1..22: note = Synthetic
  source 1..22: mol_type = other RNA
aggcgcggggatccgggtggcc

SEQ ID NO: 9136 - RNA, 23 nt, synthetic construct
  misc_feature 1..23: note = Synthetic
  source 1..23: mol_type = other RNA
aaggcgcggggatccgggtggcc

SEQ ID NO: 9137 - RNA, 24 nt, synthetic construct
  misc_feature 1..24: note = Synthetic
  source 1..24: mol_type = other RNA
gaaggcgcggggatccgggtggcc

SEQ ID NO: 9138 - RNA, 18 nt, synthetic construct
  misc_feature 1..18: note = Synthetic
  source 1..18: mol_type = other RNA
gcggtggcccgccttgcc

SEQ ID NO: 9139 - RNA, 19 nt, synthetic construct
  misc_feature 1..19: note = Synthetic
  source 1..19: mol_type = other RNA
ggcggtggcccgccttgcc

SEQ ID NO: 9140 - RNA, 21 nt, synthetic construct
  misc_feature 1..21: note = Synthetic
  source 1..21: mol_type = other RNA
ccggcggtggcccgccttgcc

SEQ ID NO: 9141 - RNA, 22 nt, synthetic construct
  misc_feature 1..22: note = Synthetic
  source 1..22: mol_type = other RNA
cccggcggtggcccgccttgcc

SEQ ID NO: 9142 - RNA, 23 nt, synthetic construct
  misc_feature 1..23: note = Synthetic
  source 1..23: mol_type = other RNA
tcccggcggtggcccgccttgcc

SEQ ID NO: 9143 - RNA, 24 nt, synthetic construct
  misc_feature 1..24: note = Synthetic
  source 1..24: mol_type = other RNA
ctcccggcggtggcccgccttgcc

SEQ ID NO: 9144 - RNA, 18 nt, synthetic construct
  misc_feature 1..18: note = Synthetic
  source 1..18: mol_type = other RNA
tacacggccatgcactcc

SEQ ID NO: 9145 - RNA, 19 nt, synthetic construct
  misc_feature 1..19: note = Synthetic
  source 1..19: mol_type = other RNA
gtacacggccatgcactcc

SEQ ID NO: 9146 - RNA, 21 nt, synthetic construct
  misc_feature 1..21: note = Synthetic
  source 1..21: mol_type = other RNA
cggtacacggccatgcactcc

SEQ ID NO: 9147 - RNA, 22 nt, synthetic construct
  misc_feature 1..22: note = Synthetic
  source 1..22: mol_type = other RNA
ccggtacacggccatgcactcc

SEQ ID NO: 9148 - RNA, 23 nt, synthetic construct
  misc_feature 1..23: note = Synthetic
  source 1..23: mol_type = other RNA
cccggtacacggccatgcactcc

SEQ ID NO: 9149 - RNA, 24 nt, synthetic construct
  misc_feature 1..24: note = Synthetic
  source 1..24: mol_type = other RNA
tcccggtacacggccatgcactcc

SEQ ID NO: 9150 - RNA, 18 nt, synthetic construct
  misc_feature 1..18: note = Synthetic
  source 1..18: mol_type = other RNA
gcctccgacgcgcgctcc

SEQ ID NO: 9151 - RNA, 19 nt, synthetic construct
  misc_feature 1..19: note = Synthetic
  source 1..19: mol_type = other RNA
cgcctccgacgcgcgctcc

SEQ ID NO: 9152 - RNA, 21 nt, synthetic construct
  misc_feature 1..21: note = Synthetic
  source 1..21: mol_type = other RNA
tacgcctccgacgcgcgctcc

SEQ ID NO: 9153 - RNA, 22 nt, synthetic construct
  misc_feature 1..22: note = Synthetic
  source 1..22: mol_type = other RNA
gtacgcctccgacgcgcgctcc

SEQ ID NO: 9154 - RNA, 23 nt, synthetic construct
  misc_feature 1..23: note = Synthetic
  source 1..23: mol_type = other RNA
agtacgcctccgacgcgcgctcc

SEQ ID NO: 9155 - RNA, 24 nt, synthetic construct
  misc_feature 1..24: note = Synthetic
  source 1..24: mol_type = other RNA
aagtacgcctccgacgcgcgctcc

SEQ ID NO: 9156 - RNA, 18 nt, synthetic construct
  misc_feature 1..18: note = Synthetic
  source 1..18: mol_type = other RNA
gcccccggcggcgcgtcc

SEQ ID NO: 9157 - RNA, 19 nt, synthetic construct
  misc_feature 1..19: note = Synthetic
  source 1..19: mol_type = other RNA
cgcccccggcggcgcgtcc

SEQ ID NO: 9158 - RNA, 21 nt, synthetic construct
  misc_feature 1..21: note = Synthetic
  source 1..21: mol_type = other RNA
aacgcccccggcggcgcgtcc

SEQ ID NO: 9159 - RNA, 22 nt, synthetic construct
  misc_feature 1..22: note = Synthetic
  source 1..22: mol_type = other RNA
aaacgcccccggcggcgcgtcc

SEQ ID NO: 9160 - RNA, 23 nt, synthetic construct
  misc_feature 1..23: note = Synthetic
  source 1..23: mol_type = other RNA
taaacgcccccggcggcgcgtcc

SEQ ID NO: 9161 - RNA, 24 nt, synthetic construct
  misc_feature 1..24: note = Synthetic
  source 1..24: mol_type = other RNA
gtaaacgcccccggcggcgcgtcc

SEQ ID NO: 9162 - RNA, 18 nt, synthetic construct
  misc_feature 1..18: note = Synthetic
  source 1..18: mol_type = other RNA
tccaggccccgggcgtcc

SEQ ID NO: 9163 - RNA, 19 nt, synthetic construct
  misc_feature 1..19: note = Synthetic
  source 1..19: mol_type = other RNA
ctccaggccccgggcgtcc

SEQ ID NO: 9164 - RNA, 21 nt, synthetic construct
  misc_feature 1..21: note = Synthetic
  source 1..21: mol_type = other RNA
agctccaggccccgggcgtcc

SEQ ID NO: 9165 - RNA, 22 nt, synthetic construct
  misc_feature 1..22: note = Synthetic
  source 1..22: mol_type = other RNA
cagctccaggccccgggcgtcc

SEQ ID NO: 9166 - RNA, 23 nt, synthetic construct
  misc_feature 1..23: note = Synthetic
  source 1..23: mol_type = other RNA
ccagctccaggccccgggcgtcc

SEQ ID NO: 9167 - RNA, 24 nt, synthetic construct
  misc_feature 1..24: note = Synthetic
  source 1..24: mol_type = other RNA
cccagctccaggccccgggcgtcc

SEQ ID NO: 9168 - RNA, 18 nt, synthetic construct
  misc_feature 1..18: note = Synthetic
  source 1..18: mol_type = other RNA
gtggccgtggtgaggtcc

SEQ ID NO: 9169 - RNA, 19 nt, synthetic construct
  misc_feature 1..19: note = Synthetic
  source 1..19: mol_type = other RNA
cgtggccgtggtgaggtcc

SEQ ID NO: 9170 - RNA, 21 nt, synthetic construct
  misc_feature 1..21: note = Synthetic
  source 1..21: mol_type = other RNA
tgcgtggccgtggtgaggtcc

SEQ ID NO: 9171 - RNA, 22 nt, synthetic construct
  misc_feature 1..22: note = Synthetic
  source 1..22: mol_type = other RNA
ctgcgtggccgtggtgaggtcc

SEQ ID NO: 9172 - RNA, 23 nt, synthetic construct
  misc_feature 1..23: note = Synthetic
  source 1..23: mol_type = other RNA
gctgcgtggccgtggtgaggtcc

SEQ ID NO: 9173 - RNA, 24 nt, synthetic construct
  misc_feature 1..24: note = Synthetic
  source 1..24: mol_type = other RNA
ggctgcgtggccgtggtgaggtcc

SEQ ID NO: 9174 - RNA, 18 nt, synthetic construct
  misc_feature 1..18: note = Synthetic
  source 1..18: mol_type = other RNA
acggctgccgcgttgtcc

SEQ ID NO: 9175 - RNA, 19 nt, synthetic construct
  misc_feature 1..19: note = Synthetic
  source 1..19: mol_type = other RNA
cacggctgccgcgttgtcc

SEQ ID NO: 9176 - RNA, 21 nt, synthetic construct
  misc_feature 1..21: note = Synthetic
  source 1..21: mol_type = other RNA
tacacggctgccgcgttgtcc

SEQ ID NO: 9177 - RNA, 22 nt, synthetic construct
  misc_feature 1..22: note = Synthetic
  source 1..22: mol_type = other RNA
gtacacggctgccgcgttgtcc

SEQ ID NO: 9178 - RNA, 23 nt, synthetic construct
  misc_feature 1..23: note = Synthetic
  source 1..23: mol_type = other RNA
ggtacacggctgccgcgttgtcc

SEQ ID NO: 9179 - RNA, 24 nt, synthetic construct
  misc_feature 1..24: note = Synthetic
  source 1..24: mol_type = other RNA
aggtacacggctgccgcgttgtcc

SEQ ID NO: 9180 - RNA, 18 nt, synthetic construct
  misc_feature 1..18: note = Synthetic
  source 1..18: mol_type = other RNA
catcggcaacaacaaagc

SEQ ID NO: 9181 - RNA, 19 nt, synthetic construct
  misc_feature 1..19: note = Synthetic
  source 1..19: mol_type = other RNA
gcatcggcaacaacaaagc

SEQ ID NO: 9182 - RNA, 21 nt, synthetic construct
  misc_feature 1..21: note = Synthetic
  source 1..21: mol_type = other RNA
ttgcatcggcaacaacaaagc

SEQ ID NO: 9183 - RNA, 22 nt, synthetic construct
  misc_feature 1..22: note = Synthetic
  source 1..22: mol_type = other RNA
gttgcatcggcaacaacaaagc

SEQ ID NO: 9184 - RNA, 23 nt, synthetic construct
  misc_feature 1..23: note = Synthetic
  source 1..23: mol_type = other RNA
cgttgcatcggcaacaacaaagc

SEQ ID NO: 9185 - RNA, 24 nt, synthetic construct
  misc_feature 1..24: note = Synthetic
  source 1..24: mol_type = other RNA
tcgttgcatcggcaacaacaaagc

SEQ ID NO: 9186 - RNA, 18 nt, synthetic construct
  misc_feature 1..18: note = Synthetic
  source 1..18: mol_type = other RNA
acgtaaagaacttaaagc

SEQ ID NO: 9187 - RNA, 19 nt, synthetic construct
  misc_feature 1..19: note = Synthetic
  source 1..19: mol_type = other RNA
gacgtaaagaacttaaagc

SEQ ID NO: 9188 - RNA, 21 nt, synthetic construct
  misc_feature 1..21: note = Synthetic
  source 1..21: mol_type = other RNA
ccgacgtaaagaacttaaagc

SEQ ID NO: 9189 - RNA, 22 nt, synthetic construct
  misc_feature 1..22: note = Synthetic
  source 1..22: mol_type = other RNA
gccgacgtaaagaacttaaagc

SEQ ID NO: 9190 - RNA, 23 nt, synthetic construct
  misc_feature 1..23: note = Synthetic
  source 1..23: mol_type = other RNA
ggccgacgtaaagaacttaaagc

SEQ ID NO: 9191 - RNA, 24 nt, synthetic construct
  misc_feature 1..24: note = Synthetic
  source 1..24: mol_type = other RNA
cggccgacgtaaagaacttaaagc

SEQ ID NO: 9192 - RNA, 18 nt, synthetic construct
  misc_feature 1..18: note = Synthetic
  source 1..18: mol_type = other RNA
tgggccagcacctgcagc

SEQ ID NO: 9193 - RNA, 19 nt, synthetic construct
  misc_feature 1..19: note = Synthetic
  source 1..19: mol_type = other RNA
gtgggccagcacctgcagc

SEQ ID NO: 9194 - RNA, 21 nt, synthetic construct
  misc_feature 1..21: note = Synthetic
  source 1..21: mol_type = other RNA
ttgtgggccagcacctgcagc

SEQ ID NO: 9195 - RNA, 22 nt, synthetic construct
  misc_feature 1..22: note = Synthetic
  source 1..22: mol_type = other RNA
gttgtgggccagcacctgcagc

SEQ ID NO: 9196 - RNA, 23 nt, synthetic construct
  misc_feature 1..23: note = Synthetic
  source 1..23: mol_type = other RNA
tgttgtgggccagcacctgcagc

SEQ ID NO: 9197 - RNA, 24 nt, synthetic construct
  misc_feature 1..24: note = Synthetic
  source 1..24: mol_type = other RNA
atgttgtgggccagcacctgcagc

SEQ ID NO: 9198 - RNA, 18 nt, synthetic construct
  misc_feature 1..18: note = Synthetic
  source 1..18: mol_type = other RNA
gtagttggcccccagagc

SEQ ID NO: 9199 - RNA, 19 nt, synthetic construct
  misc_feature 1..19: note = Synthetic
  source 1..19: mol_type = other RNA
agtagttggcccccagagc

SEQ ID NO: 9200 - RNA, 21 nt, synthetic construct
  misc_feature 1..21: note = Synthetic
  source 1..21: mol_type = other RNA
aaagtagttggcccccagagc

SEQ ID NO: 9201 - RNA, 22 nt, synthetic construct
  misc_feature 1..22: note = Synthetic
  source 1..22: mol_type = other RNA
aaaagtagttggcccccagagc

SEQ ID NO: 9202 - RNA, 23 nt, synthetic construct
  misc_feature 1..23: note = Synthetic
  source 1..23: mol_type = other RNA
gaaaagtagttggcccccagagc

SEQ ID NO: 9203 - RNA, 24 nt, synthetic construct
  misc_feature 1..24: note = Synthetic
  source 1..24: mol_type = other RNA
cgaaaagtagttggcccccagagc

SEQ ID NO: 9204 - RNA, 18 nt, synthetic construct
  misc_feature 1..18: note = Synthetic
  source 1..18: mol_type = other RNA
gcgcgcggctgggtgagc

SEQ ID NO: 9205 - RNA, 19 nt, synthetic construct
  misc_feature 1..19: note = Synthetic
  source 1..19: mol_type = other RNA
cgcgcgcggctgggtgagc

SEQ ID NO: 9206 - RNA, 21 nt, synthetic construct
  misc_feature 1..21: note = Synthetic
  source 1..21: mol_type = other RNA
ttcgcgcgcggctgggtgagc

SEQ ID NO: 9207 - RNA, 22 nt, synthetic construct
  misc_feature 1..22: note = Synthetic
  source 1..22: mol_type = other RNA
gttcgcgcgcggctgggtgagc

SEQ ID NO: 9208 - RNA, 23 nt, synthetic construct
  misc_feature 1..23: note = Synthetic
  source 1..23: mol_type = other RNA
cgttcgcgcgcggctgggtgagc

SEQ ID NO: 9209 - RNA, 24 nt, synthetic construct
  misc_feature 1..24: note = Synthetic
  source 1..24: mol_type = other RNA
acgttcgcgcgcggctgggtgagc

SEQ ID NO: 9210 - RNA, 18 nt, synthetic construct
  misc_feature 1..18: note = Synthetic
  source 1..18: mol_type = other RNA
gtgcagcagcggccccgc

SEQ ID NO: 9211 - RNA, 19 nt, synthetic construct
  misc_feature 1..19: note = Synthetic
  source 1..19: mol_type = other RNA
ggtgcagcagcggccccgc

SEQ ID NO: 9212 - RNA, 21 nt, synthetic construct
  misc_feature 1..21: note = Synthetic
  source 1..21: mol_type = other RNA
gcggtgcagcagcggccccgc

SEQ ID NO: 9213 - RNA, 22 nt, synthetic construct
  misc_feature 1..22: note = Synthetic
  source 1..22: mol_type = other RNA
cgcggtgcagcagcggccccgc

SEQ ID NO: 9214 - RNA, 23 nt, synthetic construct
  misc_feature 1..23: note = Synthetic
  source 1..23: mol_type = other RNA
ccgcggtgcagcagcggccccgc

SEQ ID NO: 9215 - RNA, 24 nt, synthetic construct
  misc_feature 1..24: note = Synthetic
  source 1..24: mol_type = other RNA
cccgcggtgcagcagcggccccgc

SEQ ID NO: 9216 - RNA, 18 nt, synthetic construct
  misc_feature 1..18: note = Synthetic
  source 1..18: mol_type = other RNA
ggccccggcgaacagcgc

SEQ ID NO: 9217 - RNA, 19 nt, synthetic construct
  misc_feature 1..19: note = Synthetic
  source 1..19: mol_type = other RNA
cggccccggcgaacagcgc

SEQ ID NO: 9218 - RNA, 21 nt, synthetic construct
  misc_feature 1..21: note = Synthetic
  source 1..21: mol_type = other RNA
gtcggccccggcgaacagcgc

SEQ ID NO: 9219 - RNA, 22 nt, synthetic construct
  misc_feature 1..22: note = Synthetic
  source 1..22: mol_type = other RNA
ggtcggccccggcgaacagcgc

SEQ ID NO: 9220 - RNA, 23 nt, synthetic construct
  misc_feature 1..23: note = Synthetic
  source 1..23: mol_type = other RNA
tggtcggccccggcgaacagcgc

SEQ ID NO: 9221 - RNA, 24 nt, synthetic construct
  misc_feature 1..24: note = Synthetic
  source 1..24: mol_type = other RNA
gtggtcggccccggcgaacagcgc

SEQ ID NO: 9222 - RNA, 18 nt, synthetic construct
  misc_feature 1..18: note = Synthetic
  source 1..18: mol_type = other RNA
cgccgccggacatagcgc

SEQ ID NO: 9223 - RNA, 19 nt, synthetic construct
  misc_feature 1..19: note = Synthetic
  source 1..19: mol_type = other RNA
acgccgccggacatagcgc

SEQ ID NO: 9224 - RNA, 21 nt, synthetic construct
  misc_feature 1..21: note = Synthetic
  source 1..21: mol_type = other RNA
gaacgccgccggacatagcgc

SEQ ID NO: 9225 - RNA, 22 nt, synthetic construct
  misc_feature 1..22: note = Synthetic
  source 1..22: mol_type = other RNA
ggaacgccgccggacatagcgc

SEQ ID NO: 9226 - RNA, 23 nt, synthetic construct
  misc_feature 1..23: note = Synthetic
  source 1..23: mol_type = other RNA
cggaacgccgccggacatagcgc

SEQ ID NO: 9227 - RNA, 24 nt, synthetic construct
  misc_feature 1..24: note = Synthetic
  source 1..24: mol_type = other RNA
ccggaacgccgccggacatagcgc

SEQ ID NO: 9228 - RNA, 18 nt, synthetic construct
  misc_feature 1..18: note = Synthetic
  source 1..18: mol_type = other RNA
gaagtgggtctcccgcgc

SEQ ID NO: 9229 - RNA, 19 nt, synthetic construct
  misc_feature 1..19: note = Synthetic
  source 1..19: mol_type = other RNA
cgaagtgggtctcccgcgc

SEQ ID NO: 9230 - RNA, 21 nt, synthetic construct
  misc_feature 1..21: note = Synthetic
  source 1..21: mol_type = other RNA
cgcgaagtgggtctcccgcgc

SEQ ID NO: 9231 - RNA, 22 nt, synthetic construct
  misc_feature 1..22: note = Synthetic
  source 1..22: mol_type = other RNA
gcgcgaagtgggtctcccgcgc

SEQ ID NO: 9232 - RNA, 23 nt, synthetic construct
  misc_feature 1..23: note = Synthetic
  source 1..23: mol_type = other RNA
tgcgcgaagtgggtctcccgcgc

SEQ ID NO: 9233 - RNA, 24 nt, synthetic construct
  misc_feature 1..24: note = Synthetic
  source 1..24: mol_type = other RNA
ctgcgcgaagtgggtctcccgcgc

SEQ ID NO: 9234 - RNA, 18 nt, synthetic construct
  misc_feature 1..18: note = Synthetic
  source 1..18: mol_type = other RNA
cgctggggcactcctcgc

SEQ ID NO: 9235 - RNA, 19 nt, synthetic construct
  misc_feature 1..19: note = Synthetic
  source 1..19: mol_type = other RNA
tcgctggggcactcctcgc

SEQ ID NO: 9236 - RNA, 21 nt, synthetic construct
  misc_feature 1..21: note = Synthetic
  source 1..21: mol_type = other RNA
ggtcgctggggcactcctcgc

SEQ ID NO: 9237 - RNA, 22 nt, synthetic construct
  misc_feature 1..22: note = Synthetic
  source 1..22: mol_type = other RNA
gggtcgctggggcactcctcgc

SEQ ID NO: 9238 - RNA, 23 nt, synthetic construct
  misc_feature 1..23: note = Synthetic
  source 1..23: mol_type = other RNA
ggggtcgctggggcactcctcgc

SEQ ID NO: 9239 - RNA, 24 nt, synthetic construct
  misc_feature 1..24: note = Synthetic
  source 1..24: mol_type = other RNA
cggggtcgctggggcactcctcgc

SEQ ID NO: 9240 - RNA, 18 nt, synthetic construct
  misc_feature 1..18: note = Synthetic
  source 1..18: mol_type = other RNA
ctcggcgaccagggtcgc

SEQ ID NO: 9241 - RNA, 19 nt, synthetic construct
  misc_feature 1..19: note = Synthetic
  source 1..19: mol_type = other RNA
gctcggcgaccagggtcgc

SEQ ID NO: 9242 - RNA, 21 nt, synthetic construct
  misc_feature 1..21: note = Synthetic
  source 1..21: mol_type = other RNA
tagctcggcgaccagggtcgc

SEQ ID NO: 9243 - RNA, 22 nt, synthetic construct
  misc_feature 1..22: note = Synthetic
  source 1..22: mol_type = other RNA
ttagctcggcgaccagggtcgc

SEQ ID NO: 9244 - RNA, 23 nt, synthetic construct
  misc_feature 1..23: note = Synthetic
  source 1..23: mol_type = other RNA
tttagctcggcgaccagggtcgc

SEQ ID NO: 9245 - RNA, 24 nt, synthetic construct
  misc_feature 1..24: note = Synthetic
  source 1..24: mol_type = other RNA
ctttagctcggcgaccagggtcgc

SEQ ID NO: 9246 - RNA, 18 nt, synthetic construct
  misc_feature 1..18: note = Synthetic
  source 1..18: mol_type = other RNA
ggtccgtcacggggtcgc

SEQ ID NO: 9247 - RNA, 19 nt, synthetic construct
  misc_feature 1..19: note = Synthetic
  source 1..19: mol_type = other RNA
gggtccgtcacggggtcgc

SEQ ID NO: 9248 - RNA, 21 nt, synthetic construct
  misc_feature 1..21: note = Synthetic
  source 1..21: mol_type = other RNA
cggggtccgtcacggggtcgc

SEQ ID NO: 9249 - RNA, 22 nt, synthetic construct
  misc_feature 1..22: note = Synthetic
  source 1..22: mol_type = other RNA
gcggggtccgtcacggggtcgc

SEQ ID NO: 9250 - RNA, 23 nt, synthetic construct
  misc_feature 1..23: note = Synthetic
  source 1..23: mol_type = other RNA
cgcggggtccgtcacggggtcgc

SEQ ID NO: 9251 - RNA, 24 nt, synthetic construct
  misc_feature 1..24: note = Synthetic
  source 1..24: mol_type = other RNA
gcgcggggtccgtcacggggtcgc

SEQ ID NO: 9252 - RNA, 18 nt, synthetic construct
  misc_feature 1..18: note = Synthetic
  source 1..18: mol_type = other RNA
ggccgtggccgcgaaggc

SEQ ID NO: 9253 - RNA, 19 nt, synthetic construct
  misc_feature 1..19: note = Synthetic
  source 1..19: mol_type = other RNA
tggccgtggccgcgaaggc

SEQ ID NO: 9254 - RNA, 21 nt, synthetic construct
  misc_feature 1..21: note = Synthetic
  source 1..21: mol_type = other RNA
gttggccgtggccgcgaaggc

SEQ ID NO: 9255 - RNA, 22 nt, synthetic construct
  misc_feature 1..22: note = Synthetic
  source 1..22: mol_type = other RNA
ggttggccgtggccgcgaaggc

SEQ ID NO: 9256 - RNA, 23 nt, synthetic construct
  misc_feature 1..23: note = Synthetic
  source 1..23: mol_type = other RNA
gggttggccgtggccgcgaaggc

SEQ ID NO: 9257 - RNA, 24 nt, synthetic construct
  misc_feature 1..24: note = Synthetic
  source 1..24: mol_type = other RNA
cgggttggccgtggccgcgaaggc

SEQ ID NO: 9258 - RNA, 18 nt, synthetic construct
  misc_feature 1..18: note = Synthetic
  source 1..18: mol_type = other RNA
ctggcggggcgggaaggc

SEQ ID NO: 9259 - RNA, 19 nt, synthetic construct
  misc_feature 1..19: note = Synthetic
  source 1..19: mol_type = other RNA
gctggcggggcgggaaggc

SEQ ID NO: 9260 - RNA, 21 nt, synthetic construct
  misc_feature 1..21: note = Synthetic
  source 1..21: mol_type = other RNA
cagctggcggggcgggaaggc

SEQ ID NO: 9261 - RNA, 22 nt, synthetic construct
  misc_feature 1..22: note = Synthetic
  source 1..22: mol_type = other RNA
acagctggcggggcgggaaggc

SEQ ID NO: 9262 - RNA, 23 nt, synthetic construct
  misc_feature 1..23: note = Synthetic
  source 1..23: mol_type = other RNA
aacagctggcggggcgggaaggc

SEQ ID NO: 9263 - RNA, 24 nt, synthetic construct
  misc_feature 1..24: note = Synthetic
  source 1..24: mol_type = other RNA
aaacagctggcggggcgggaaggc

SEQ ID NO: 9264 - RNA, 21 nt, synthetic construct
  misc_feature 1..21: note = Synthetic
  source 1..21: mol_type = other RNA
ctcaaacgccccgaggacggc

SEQ ID NO: 9265 - RNA, 22 nt, synthetic construct
  misc_feature 1..22: note = Synthetic
  source 1..22: mol_type = other RNA
gctcaaacgccccgaggacggc

SEQ ID NO: 9266 - RNA, 23 nt, synthetic construct
  misc_feature 1..23: note = Synthetic
  source 1..23: mol_type = other RNA
cgctcaaacgccccgaggacggc

SEQ ID NO: 9267 - RNA, 24 nt, synthetic construct
  misc_feature 1..24: note = Synthetic
  source 1..24: mol_type = other RNA
gcgctcaaacgccccgaggacggc

SEQ ID NO: 9268 - RNA, 18 nt, synthetic construct
  misc_feature 1..18: note = Synthetic
  source 1..18: mol_type = other RNA
gatctcccccgggccggc

SEQ ID NO: 9269 - RNA, 19 nt, synthetic construct
  misc_feature 1..19: note = Synthetic
  source 1..19: mol_type = other RNA
ggatctcccccgggccggc

SEQ ID NO: 9270 - RNA, 21 nt, synthetic construct
  misc_feature 1..21: note = Synthetic
  source 1..21: mol_type = other RNA
ctggatctcccccgggccggc

SEQ ID NO: 9271 - RNA, 22 nt, synthetic construct
  misc_feature 1..22: note = Synthetic
  source 1..22: mol_type = other RNA
cctggatctcccccgggccggc

SEQ ID NO: 9272 - RNA, 23 nt, synthetic construct
  misc_feature 1..23: note = Synthetic
  source 1..23: mol_type = other RNA
gcctggatctcccccgggccggc

SEQ ID NO: 9273 - RNA, 24 nt, synthetic construct
  misc_feature 1..24: note = Synthetic
  source 1..24: mol_type = other RNA
ggcctggatctcccccgggccggc

SEQ ID NO: 9274 - RNA, 18 nt, synthetic construct
  misc_feature 1..18: note = Synthetic
  source 1..18: mol_type = other RNA
gtctgcggcggggccggc

SEQ ID NO: 9275 - RNA, 19 nt, synthetic construct
  misc_feature 1..19: note = Synthetic
  source 1..19: mol_type = other RNA
tgtctgcggcggggccggc

SEQ ID NO: 9276 - RNA, 21 nt, synthetic construct
  misc_feature 1..21: note = Synthetic
  source 1..21: mol_type = other RNA
catgtctgcggcggggccggc

SEQ ID NO: 9277 - RNA, 22 nt, synthetic construct
  misc_feature 1..22: note = Synthetic
  source 1..22: mol_type = other RNA
gcatgtctgcggcggggccggc

SEQ ID NO: 9278 - RNA, 23 nt, synthetic construct
  misc_feature 1..23: note = Synthetic
  source 1..23: mol_type = other RNA
tgcatgtctgcggcggggccggc

SEQ ID NO: 9279 - RNA, 24 nt, synthetic construct
  misc_feature 1..24: note = Synthetic
  source 1..24: mol_type = other RNA
ctgcatgtctgcggcggggccggc

SEQ ID NO: 9280 - RNA, 18 nt, synthetic construct
  misc_feature 1..18: note = Synthetic
  source 1..18: mol_type = other RNA
atccgcggcgtccgcggc

SEQ ID NO: 9281 - RNA, 19 nt, synthetic construct
  misc_feature 1..19: note = Synthetic
  source 1..19: mol_type = other RNA
catccgcggcgtccgcggc

SEQ ID NO: 9282 - RNA, 21 nt, synthetic construct
  misc_feature 1..21: note = Synthetic
  source 1..21: mol_type = other RNA
gtcatccgcggcgtccgcggc

SEQ ID NO: 9283 - RNA, 22 nt, synthetic construct
  misc_feature 1..22: note = Synthetic
  source 1..22: mol_type = other RNA
ggtcatccgcggcgtccgcggc

SEQ ID NO: 9284 - RNA, 23 nt, synthetic construct
  misc_feature 1..23: note = Synthetic
  source 1..23: mol_type = other RNA
cggtcatccgcggcgtccgcggc

SEQ ID NO: 9285 - RNA, 24 nt, synthetic construct
  misc_feature 1..24: note = Synthetic
  source 1..24: mol_type = other RNA
ccggtcatccgcggcgtccgcggc

SEQ ID NO: 9286 - RNA, 18 nt, synthetic construct
  misc_feature 1..18: note = Synthetic
  source 1..18: mol_type = other RNA
cgacaggtcgcgcagggc

SEQ ID NO: 9287 - RNA, 19 nt, synthetic construct
  misc_feature 1..19: note = Synthetic
  source 1..19: mol_type = other RNA
gcgacaggtcgcgcagggc

SEQ ID NO: 9288 - RNA, 21 nt, synthetic construct
  misc_feature 1..21: note = Synthetic
  source 1..21: mol_type = other RNA
ccgcgacaggtcgcgcagggc

SEQ ID NO: 9289 - RNA, 22 nt, synthetic construct
  misc_feature 1..22: note = Synthetic
  source 1..22: mol_type = other RNA
gccgcgacaggtcgcgcagggc

SEQ ID NO: 9290 - RNA, 23 nt, synthetic construct
  misc_feature 1..23: note = Synthetic
  source 1..23: mol_type = other RNA
tgccgcgacaggtcgcgcagggc

SEQ ID NO: 9291 - RNA, 24 nt, synthetic construct
  misc_feature 1..24: note = Synthetic
  source 1..24: mol_type = other RNA
ctgccgcgacaggtcgcgcagggc

SEQ ID NO: 9292 - RNA, 18 nt, synthetic construct
  misc_feature 1..18: note = Synthetic
  source 1..18: mol_type = other RNA
ctggaccacgagccgggc

SEQ ID NO: 9293 - RNA, 19 nt, synthetic construct
  misc_feature 1..19: note = Synthetic
  source 1..19: mol_type = other RNA
actggaccacgagccgggc

SEQ ID NO: 9294 - RNA, 21 nt, synthetic construct
  misc_feature 1..21: note = Synthetic
  source 1..21: mol_type = other RNA
gcactggaccacgagccgggc

SEQ ID NO: 9295 - RNA, 22 nt, synthetic construct
  misc_feature 1..22: note = Synthetic
  source 1..22: mol_type = other RNA
tgcactggaccacgagccgggc

SEQ ID NO: 9296 - RNA, 23 nt, synthetic construct
  misc_feature 1..23: note = Synthetic
  source 1..23: mol_type = other RNA
atgcactggaccacgagccgggc

SEQ ID NO: 9297 - RNA, 24 nt, synthetic construct
  misc_feature 1..24: note = Synthetic
  source 1..24: mol_type = other RNA
gatgcactggaccacgagccgggc

SEQ ID NO: 9298 - RNA, 18 nt, synthetic construct
  misc_feature 1..18: note = Synthetic
  source 1..18: mol_type = other RNA
aaaaacagctggcggggc

SEQ ID NO: 9299 - RNA, 19 nt, synthetic construct
  misc_feature 1..19: note = Synthetic
  source 1..19: mol_type = other RNA
aaaaaacagctggcggggc

SEQ ID NO: 9300 - RNA, 21 nt, synthetic construct
  misc_feature 1..21: note = Synthetic
  source 1..21: mol_type = other RNA
caaaaaaacagctggcggggc

SEQ ID NO: 9301 - RNA, 22 nt, synthetic construct
  misc_feature 1..22: note = Synthetic
  source 1..22: mol_type = other RNA
ccaaaaaaacagctggcggggc

SEQ ID NO: 9302 - RNA, 23 nt, synthetic construct
  misc_feature 1..23: note = Synthetic
  source 1..23: mol_type = other RNA
cccaaaaaaacagctggcggggc

SEQ ID NO: 9303 - RNA, 24 nt, synthetic construct
  misc_feature 1..24: note = Synthetic
  source 1..24: mol_type = other RNA
ccccaaaaaaacagctggcggggc

SEQ ID NO: 9304 - RNA, 18 nt, synthetic construct
  misc_feature 1..18: note = Synthetic
  source 1..18: mol_type = other RNA
atccgggtggccgggggc

SEQ ID NO: 9305 - RNA, 19 nt, synthetic construct
  misc_feature 1..19: note = Synthetic
  source 1..19: mol_type = other RNA
gatccgggtggccgggggc

SEQ ID NO: 9306 - RNA, 21 nt, synthetic construct
  misc_feature 1..21: note = Synthetic
  source 1..21: mol_type = other RNA
gggatccgggtggccgggggc

SEQ ID NO: 9307 - RNA, 22 nt, synthetic construct
  misc_feature 1..22: note = Synthetic
  source 1..22: mol_type = other RNA
ggggatccgggtggccgggggc

SEQ ID NO: 9308 - RNA, 23 nt, synthetic construct
  misc_feature 1..23: note = Synthetic
  source 1..23: mol_type = other RNA
cggggatccgggtggccgggggc

SEQ ID NO: 9309 - RNA, 24 nt, synthetic construct
  misc_feature 1..24: note = Synthetic
  source 1..24: mol_type = other RNA
gcggggatccgggtggccgggggc

SEQ ID NO: 9310 - RNA, 18 nt, synthetic construct
  misc_feature 1..18: note = Synthetic
  source 1..18: mol_type = other RNA
gtcatcaaccagctgggc

SEQ ID NO: 9311 - RNA, 19 nt, synthetic construct
  misc_feature 1..19: note = Synthetic
  source 1..19: mol_type = other RNA
agtcatcaaccagctgggc

SEQ ID NO: 9312 - RNA, 21 nt, synthetic construct
  misc_feature 1..21: note = Synthetic
  source 1..21: mol_type = other RNA
aaagtcatcaaccagctgggc

SEQ ID NO: 9313 - RNA, 22 nt, synthetic construct
  misc_feature 1..22: note = Synthetic
  source 1..22: mol_type = other RNA
taaagtcatcaaccagctgggc

SEQ ID NO: 9314 - RNA, 23 nt, synthetic construct
  misc_feature 1..23: note = Synthetic
  source 1..23: mol_type = other RNA
gtaaagtcatcaaccagctgggc

SEQ ID NO: 9315 - RNA, 24 nt, synthetic construct
  misc_feature 1..24: note = Synthetic
  source 1..24: mol_type = other RNA
ggtaaagtcatcaaccagctgggc

SEQ ID NO: 9316 - RNA, 18 nt, synthetic construct
  misc_feature 1..18: note = Synthetic
  source 1..18: mol_type = other RNA
cgcggggatccgggtggc

SEQ ID NO: 9317 - RNA, 19 nt, synthetic construct
  misc_feature 1..19: note = Synthetic
  source 1..19: mol_type = other RNA
gcgcggggatccgggtggc

SEQ ID NO: 9318 - RNA, 21 nt, synthetic construct
  misc_feature 1..21: note = Synthetic
  source 1..21: mol_type = other RNA
aggcgcggggatccgggtggc

SEQ ID NO: 9319 - RNA, 22 nt, synthetic construct
  misc_feature 1..22: note = Synthetic
  source 1..22: mol_type = other RNA
aaggcgcggggatccgggtggc

SEQ ID NO: 9320 - RNA, 23 nt, synthetic construct
  misc_feature 1..23: note = Synthetic
  source 1..23: mol_type = other RNA
gaaggcgcggggatccgggtggc

SEQ ID NO: 9321 - RNA, 24 nt, synthetic construct
  misc_feature 1..24: note = Synthetic
  source 1..24: mol_type = other RNA
ggaaggcgcggggatccgggtggc

SEQ ID NO: 9322 - RNA, 18 nt, synthetic construct
  misc_feature 1..18: note = Synthetic
  source 1..18: mol_type = other RNA
aacggcggcgatggtggc

SEQ ID NO: 9323 - RNA, 19 nt, synthetic construct
  misc_feature 1..19: note = Synthetic
  source 1..19: mol_type = other RNA
gaacggcggcgatggtggc

SEQ ID NO: 9324 - RNA, 21 nt, synthetic construct
  misc_feature 1..21: note = Synthetic
  source 1..21: mol_type = other RNA
gcgaacggcggcgatggtggc

SEQ ID NO: 9325 - RNA, 22 nt, synthetic construct
  misc_feature 1..22: note = Synthetic
  source 1..22: mol_type = other RNA
cgcgaacggcggcgatggtggc

SEQ ID NO: 9326 - RNA, 23 nt, synthetic construct
  misc_feature 1..23: note = Synthetic
  source 1..23: mol_type = other RNA
ccgcgaacggcggcgatggtggc

SEQ ID NO: 9327 - RNA, 24 nt, synthetic construct
  misc_feature 1..24: note = Synthetic
  source 1..24: mol_type = other RNA
cccgcgaacggcggcgatggtggc

SEQ ID NO: 9328 - RNA, 18 nt, synthetic construct
  misc_feature 1..18: note = Synthetic
  source 1..18: mol_type = other RNA
atggtatggtccagatgc

SEQ ID NO: 9329 - RNA, 19 nt, synthetic construct
  misc_feature 1..19: note = Synthetic
  source 1..19: mol_type = other RNA
gatggtatggtccagatgc

SEQ ID NO: 9330 - RNA, 21 nt, synthetic construct
  misc_feature 1..21: note = Synthetic
  source 1..21: mol_type = other RNA
tggatggtatggtccagatgc

SEQ ID NO: 9331 - RNA, 22 nt, synthetic construct
  misc_feature 1..22: note = Synthetic
  source 1..22: mol_type = other RNA
ttggatggtatggtccagatgc

SEQ ID NO: 9332 - RNA, 23 nt, synthetic construct
  misc_feature 1..23: note = Synthetic
  source 1..23: mol_type = other RNA
tttggatggtatggtccagatgc

SEQ ID NO: 9333 - RNA, 24 nt, synthetic construct
  misc_feature 1..24: note = Synthetic
  source 1..24: mol_type = other RNA
ttttggatggtatggtccagatgc

SEQ ID NO: 9334 - RNA, 18 nt, synthetic construct
  misc_feature 1..18: note = Synthetic
  source 1..18: mol_type = other RNA
actttcaggaaggactgc

SEQ ID NO: 9335 - RNA, 19 nt, synthetic construct
  misc_feature 1..19: note = Synthetic
  source 1..19: mol_type = other RNA
cactttcaggaaggactgc

SEQ ID NO: 9336 - RNA, 21 nt, synthetic construct
  misc_feature 1..21: note = Synthetic
  source 1..21: mol_type = other RNA
tccactttcaggaaggactgc

SEQ ID NO: 9337 - RNA, 22 nt, synthetic construct
  misc_feature 1..22: note = Synthetic
  source 1..22: mol_type = other RNA
ctccactttcaggaaggactgc

SEQ ID NO: 9338 - RNA, 23 nt, synthetic construct
  misc_feature 1..23: note = Synthetic
  source 1..23: mol_type = other RNA
cctccactttcaggaaggactgc

SEQ ID NO: 9339 - RNA, 24 nt, synthetic construct
  misc_feature 1..24: note = Synthetic
  source 1..24: mol_type = other RNA
tcctccactttcaggaaggactgc

SEQ ID NO: 9340 - RNA, 18 nt, synthetic construct
  misc_feature 1..18: note = Synthetic
  source 1..18: mol_type = other RNA
tcatagacgagatactgc

SEQ ID NO: 9341 - RNA, 19 nt, synthetic construct
  misc_feature 1..19: note = Synthetic
  source 1..19: mol_type = other RNA
gtcatagacgagatactgc

SEQ ID NO: 9342 - RNA, 21 nt, synthetic construct
  misc_feature 1..21: note = Synthetic
  source 1..21: mol_type = other RNA
gcgtcatagacgagatactgc

SEQ ID NO: 9343 - RNA, 22 nt, synthetic construct
  misc_feature 1..22: note = Synthetic
  source 1..22: mol_type = other RNA
tgcgtcatagacgagatactgc

SEQ ID NO: 9344 - RNA, 23 nt, synthetic construct
  misc_feature 1..23: note = Synthetic
  source 1..23: mol_type = other RNA
atgcgtcatagacgagatactgc

SEQ ID NO: 9345 - RNA, 24 nt, synthetic construct
  misc_feature 1..24: note = Synthetic
  source 1..24: mol_type = other RNA
gatgcgtcatagacgagatactgc

SEQ ID NO: 9346 - RNA, 18 nt, synthetic construct
  misc_feature 1..18: note = Synthetic
  source 1..18: mol_type = other RNA
accagattggccgggtgc

SEQ ID NO: 9347 - RNA, 19 nt, synthetic construct
  misc_feature 1..19: note = Synthetic
  source 1..19: mol_type = other RNA
caccagattggccgggtgc

SEQ ID NO: 9348 - RNA, 21 nt, synthetic construct
  misc_feature 1..21: note = Synthetic
  source 1..21: mol_type = other RNA
gccaccagattggccgggtgc

SEQ ID NO: 9349 - RNA, 22 nt, synthetic construct
  misc_feature 1..22: note = Synthetic
  source 1..22: mol_type = other RNA
ggccaccagattggccgggtgc

SEQ ID NO: 9350 - RNA, 23 nt, synthetic construct
  misc_feature 1..23: note = Synthetic
  source 1..23: mol_type = other RNA
tggccaccagattggccgggtgc

SEQ ID NO: 9351 - RNA, 24 nt, synthetic construct
  misc_feature 1..24: note = Synthetic
  source 1..24: mol_type = other RNA
ttggccaccagattggccgggtgc

SEQ ID NO: 9352 - RNA, 18 nt, synthetic construct
  misc_feature 1..18: note = Synthetic
  source 1..18: mol_type = other RNA
gccgggtgcagggggtgc

SEQ ID NO: 9353 - RNA, 19 nt, synthetic construct
  misc_feature 1..19: note = Synthetic
  source 1..19: mol_type = other RNA
ggccgggtgcagggggtgc

SEQ ID NO: 9354 - RNA, 21 nt, synthetic construct
  misc_feature 1..21: note = Synthetic
  source 1..21: mol_type = other RNA
ttggccgggtgcagggggtgc

SEQ ID NO: 9355 - RNA, 22 nt, synthetic construct
  misc_feature 1..22: note = Synthetic
  source 1..22: mol_type = other RNA
attggccgggtgcagggggtgc

SEQ ID NO: 9356 - RNA, 23 nt, synthetic construct
  misc_feature 1..23: note = Synthetic
  source 1..23: mol_type = other RNA
gattggccgggtgcagggggtgc

SEQ ID NO: 9357 - RNA, 24 nt, synthetic construct
  misc_feature 1..24: note = Synthetic
  source 1..24: mol_type = other RNA
agattggccgggtgcagggggtgc

SEQ ID NO: 9358 - RNA, 18 nt, synthetic construct
  misc_feature 1..18: note = Synthetic
  source 1..18: mol_type = other RNA
cgcacggccttgcccatc

SEQ ID NO: 9359 - RNA, 19 nt, synthetic construct
  misc_feature 1..19: note = Synthetic
  source 1..19: mol_type = other RNA
tcgcacggccttgcccatc

SEQ ID NO: 9360 - RNA, 21 nt, synthetic construct
  misc_feature 1..21: note = Synthetic
  source 1..21: mol_type = other RNA
cttcgcacggccttgcccatc

SEQ ID NO: 9361 - RNA, 22 nt, synthetic construct
  misc_feature 1..22: note = Synthetic
  source 1..22: mol_type = other RNA
acttcgcacggccttgcccatc

SEQ ID NO: 9362 - RNA, 23 nt, synthetic construct
  misc_feature 1..23: note = Synthetic
  source 1..23: mol_type = other RNA
gacttcgcacggccttgcccatc

SEQ ID NO: 9363 - RNA, 24 nt, synthetic construct
  misc_feature 1..24: note = Synthetic
  source 1..24: mol_type = other RNA
agacttcgcacggccttgcccatc

SEQ ID NO: 9364 - RNA, 18 nt, synthetic construct
  misc_feature 1..18: note = Synthetic
  source 1..18: mol_type = other RNA
aaggccacgggactgatc

SEQ ID NO: 9365 - RNA, 19 nt, synthetic construct
  misc_feature 1..19: note = Synthetic
  source 1..19: mol_type = other RNA
caaggccacgggactgatc

SEQ ID NO: 9366 - RNA, 21 nt, synthetic construct
  misc_feature 1..21: note = Synthetic
  source 1..21: mol_type = other RNA
tgcaaggccacgggactgatc

SEQ ID NO: 9367 - RNA, 22 nt, synthetic construct
  misc_feature 1..22: note = Synthetic
  source 1..22: mol_type = other RNA
atgcaaggccacgggactgatc

SEQ ID NO: 9368 - RNA, 23 nt, synthetic construct
  misc_feature 1..23: note = Synthetic
  source 1..23: mol_type = other RNA
gatgcaaggccacgggactgatc

SEQ ID NO: 9369 - RNA, 24 nt, synthetic construct
  misc_feature 1..24: note = Synthetic
  source 1..24: mol_type = other RNA
tgatgcaaggccacgggactgatc

SEQ ID NO: 9370 - RNA, 18 nt, synthetic construct
  misc_feature 1..18: note = Synthetic
  source 1..18: mol_type = other RNA
ggtgagcgggtaggcctc

SEQ ID NO: 9371 - RNA, 19 nt, synthetic construct
  misc_feature 1..19: note = Synthetic
  source 1..19: mol_type = other RNA
aggtgagcgggtaggcctc

SEQ ID NO: 9372 - RNA, 21 nt, synthetic construct
  misc_feature 1..21: note = Synthetic
  source 1..21: mol_type = other RNA
gcaggtgagcgggtaggcctc

SEQ ID NO: 9373 - RNA, 22 nt, synthetic construct
  misc_feature 1..22: note = Synthetic
  source 1..22: mol_type = other RNA
cgcaggtgagcgggtaggcctc

SEQ ID NO: 9374 - RNA, 23 nt, synthetic construct
  misc_feature 1..23: note = Synthetic
  source 1..23: mol_type = other RNA
gcgcaggtgagcgggtaggcctc

SEQ ID NO: 9375 - RNA, 24 nt, synthetic construct
  misc_feature 1..24: note = Synthetic
  source 1..24: mol_type = other RNA
ggcgcaggtgagcgggtaggcctc

SEQ ID NO: 9376 - RNA, 18 nt, synthetic construct
  misc_feature 1..18: note = Synthetic
  source 1..18: mol_type = other RNA
gcgcttctccagggcctc

SEQ ID NO: 9377 - RNA, 19 nt, synthetic construct
  misc_feature 1..19: note = Synthetic
  source 1..19: mol_type = other RNA
tgcgcttctccagggcctc

SEQ ID NO: 9378 - RNA, 21 nt, synthetic construct
  misc_feature 1..21: note = Synthetic
  source 1..21: mol_type = other RNA
gatgcgcttctccagggcctc

SEQ ID NO: 9379 - RNA, 22 nt, synthetic construct
  misc_feature 1..22: note = Synthetic
  source 1..22: mol_type = other RNA
agatgcgcttctccagggcctc

SEQ ID NO: 9380 - RNA, 23 nt, synthetic construct
  misc_feature 1..23: note = Synthetic
  source 1..23: mol_type = other RNA
tagatgcgcttctccagggcctc

SEQ ID NO: 9381 - RNA, 24 nt, synthetic construct
  misc_feature 1..24: note = Synthetic
  source 1..24: mol_type = other RNA
gtagatgcgcttctccagggcctc

SEQ ID NO: 9382 - RNA, 18 nt, synthetic construct
  misc_feature 1..18: note = Synthetic
  source 1..18: mol_type = other RNA
cacggccatgcactcctc

SEQ ID NO: 9383 - RNA, 19 nt, synthetic construct
  misc_feature 1..19: note = Synthetic
  source 1..19: mol_type = other RNA
acacggccatgcactcctc

SEQ ID NO: 9384 - RNA, 21 nt, synthetic construct
  misc_feature 1..21: note = Synthetic
  source 1..21: mol_type = other RNA
gtacacggccatgcactcctc

SEQ ID NO: 9385 - RNA, 22 nt, synthetic construct
  misc_feature 1..22: note = Synthetic
  source 1..22: mol_type = other RNA
ggtacacggccatgcactcctc

SEQ ID NO: 9386 - RNA, 23 nt, synthetic construct
  misc_feature 1..23: note = Synthetic
  source 1..23: mol_type = other RNA
cggtacacggccatgcactcctc

SEQ ID NO: 9387 - RNA, 24 nt, synthetic construct
  misc_feature 1..24: note = Synthetic
  source 1..24: mol_type = other RNA
ccggtacacggccatgcactcctc

SEQ ID NO: 9388 - RNA, 18 nt, synthetic construct
  misc_feature 1..18: note = Synthetic
  source 1..18: mol_type = other RNA
gaacgcggggtgcagctc

SEQ ID NO: 9389 - RNA, 19 nt, synthetic construct
  misc_feature 1..19: note = Synthetic
  source 1..19: mol_type = other RNA
cgaacgcggggtgcagctc

SEQ ID NO: 9390 - RNA, 21 nt, synthetic construct
  misc_feature 1..21: note = Synthetic
  source 1..21: mol_type = other RNA
gtcgaacgcggggtgcagctc

SEQ ID NO: 9391 - RNA, 22 nt, synthetic construct
  misc_feature 1..22: note = Synthetic
  source 1..22: mol_type = other RNA
agtcgaacgcggggtgcagctc

SEQ ID NO: 9392 - RNA, 23 nt, synthetic construct
  misc_feature 1..23: note = Synthetic
  source 1..23: mol_type = other RNA
aagtcgaacgcggggtgcagctc

SEQ ID NO: 9393 - RNA, 24 nt, synthetic construct
  misc_feature 1..24: note = Synthetic
  source 1..24: mol_type = other RNA
gaagtcgaacgcggggtgcagctc

SEQ ID NO: 9394 - RNA, 18 nt, synthetic construct
  misc_feature 1..18: note = Synthetic
  source 1..18: mol_type = other RNA
gtcgtctggggggcgctc

SEQ ID NO: 9395 - RNA, 19 nt, synthetic construct
  misc_feature 1..19: note = Synthetic
  source 1..19: mol_type = other RNA
cgtcgtctggggggcgctc

SEQ ID NO: 9396 - RNA, 21 nt, synthetic construct
  misc_feature 1..21: note = Synthetic
  source 1..21: mol_type = other RNA
cgcgtcgtctggggggcgctc

SEQ ID NO: 9397 - RNA, 22 nt, synthetic construct
  misc_feature 1..22: note = Synthetic
  source 1..22: mol_type = other RNA
gcgcgtcgtctggggggcgctc

SEQ ID NO: 9398 - RNA, 23 nt, synthetic construct
  misc_feature 1..23: note = Synthetic
  source 1..23: mol_type = other RNA
cgcgcgtcgtctggggggcgctc

SEQ ID NO: 9399 - RNA, 24 nt, synthetic construct
  misc_feature 1..24: note = Synthetic
  source 1..24: mol_type = other RNA
acgcgcgtcgtctggggggcgctc

SEQ ID NO: 9400 - RNA, 18 nt, synthetic construct
  misc_feature 1..18: note = Synthetic
  source 1..18: mol_type = other RNA
ctcgccgggggcgatctc

SEQ ID NO: 9401 - RNA, 19 nt, synthetic construct
  misc_feature 1..19: note = Synthetic
  source 1..19: mol_type = other RNA
cctcgccgggggcgatctc

SEQ ID NO: 9402 - RNA, 21 nt, synthetic construct
  misc_feature 1..21: note = Synthetic
  source 1..21: mol_type = other RNA
ctcctcgccgggggcgatctc

SEQ ID NO: 9403 - RNA, 22 nt, synthetic construct
  misc_feature 1..22: note = Synthetic
  source 1..22: mol_type = other RNA
actcctcgccgggggcgatctc

SEQ ID NO: 9404 - RNA, 23 nt, synthetic construct
  misc_feature 1..23: note = Synthetic
  source 1..23: mol_type = other RNA
cactcctcgccgggggcgatctc

SEQ ID NO: 9405 - RNA, 24 nt, synthetic construct
  misc_feature 1..24: note = Synthetic
  source 1..24: mol_type = other RNA
gcactcctcgccgggggcgatctc

SEQ ID NO: 9406 - RNA, 18 nt, synthetic construct
  misc_feature 1..18: note = Synthetic
  source 1..18: mol_type = other RNA
ctccccggccgcgctctc

SEQ ID NO: 9407 - RNA, 19 nt, synthetic construct
  misc_feature 1..19: note = Synthetic
  source 1..19: mol_type = other RNA
tctccccggccgcgctctc

SEQ ID NO: 9408 - RNA, 21 nt, synthetic construct
  misc_feature 1..21: note = Synthetic
  source 1..21: mol_type = other RNA
gttctccccggccgcgctctc

SEQ ID NO: 9409 - RNA, 22 nt, synthetic construct
  misc_feature 1..22: note = Synthetic
  source 1..22: mol_type = other RNA
cgttctccccggccgcgctctc

SEQ ID NO: 9410 - RNA, 23 nt, synthetic construct
  misc_feature 1..23: note = Synthetic
  source 1..23: mol_type = other RNA
gcgttctccccggccgcgctctc

SEQ ID NO: 9411 - RNA, 24 nt, synthetic construct
  misc_feature 1..24: note = Synthetic
  source 1..24: mol_type = other RNA
cgcgttctccccggccgcgctctc

SEQ ID NO: 9412 - RNA, 18 nt, synthetic construct
  misc_feature 1..18: note = Synthetic
  source 1..18: mol_type = other RNA
ggcgtagatgcgcttctc

SEQ ID NO: 9413 - RNA, 19 nt, synthetic construct
  misc_feature 1..19: note = Synthetic
  source 1..19: mol_type = other RNA
cggcgtagatgcgcttctc

SEQ ID NO: 9414 - RNA, 21 nt, synthetic construct
  misc_feature 1..21: note = Synthetic
  source 1..21: mol_type = other RNA
ggcggcgtagatgcgcttctc

SEQ ID NO: 9415 - RNA, 22 nt, synthetic construct
  misc_feature 1..22: note = Synthetic
  source 1..22: mol_type = other RNA
tggcggcgtagatgcgcttctc

SEQ ID NO: 9416 - RNA, 23 nt, synthetic construct
  misc_feature 1..23: note = Synthetic
  source 1..23: mol_type = other RNA
gtggcggcgtagatgcgcttctc

SEQ ID NO: 9417 - RNA, 24 nt, synthetic construct
  misc_feature 1..24: note = Synthetic
  source 1..24: mol_type = other RNA
ggtggcggcgtagatgcgcttctc

SEQ ID NO: 9418 - RNA, 18 nt, synthetic construct
  misc_feature 1..18: note = Synthetic
  source 1..18: mol_type = other RNA
ccgggatggaggcccgtc

SEQ ID NO: 9419 - RNA, 19 nt, synthetic construct
  misc_feature 1..19: note = Synthetic
  source 1..19: mol_type = other RNA
cccgggatggaggcccgtc

SEQ ID NO: 9420 - RNA, 21 nt, synthetic construct
  misc_feature 1..21: note = Synthetic
  source 1..21: mol_type = other RNA
aacccgggatggaggcccgtc

SEQ ID NO: 9421 - RNA, 22 nt, synthetic construct
  misc_feature 1..22: note = Synthetic
  source 1..22: mol_type = other RNA
aaacccgggatggaggcccgtc

SEQ ID NO: 9422 - RNA, 23 nt, synthetic construct
  misc_feature 1..23: note = Synthetic
  source 1..23: mol_type = other RNA
caaacccgggatggaggcccgtc

SEQ ID NO: 9423 - RNA, 24 nt, synthetic construct
  misc_feature 1..24: note = Synthetic
  source 1..24: mol_type = other RNA
ccaaacccgggatggaggcccgtc

SEQ ID NO: 9424 - RNA, 18 nt, synthetic construct
  misc_feature 1..18: note = Synthetic
  source 1..18: mol_type = other RNA
gggtgcgcggggtccgtc

SEQ ID NO: 9425 - RNA, 19 nt, synthetic construct
  misc_feature 1..19: note = Synthetic
  source 1..19: mol_type = other RNA
ggggtgcgcggggtccgtc

SEQ ID NO: 9426 - RNA, 21 nt, synthetic construct
  misc_feature 1..21: note = Synthetic
  source 1..21: mol_type = other RNA
agggggtgcgcggggtccgtc

SEQ ID NO: 9427 - RNA, 22 nt, synthetic construct
  misc_feature 1..22: note = Synthetic
  source 1..22: mol_type = other RNA
cagggggtgcgcggggtccgtc

SEQ ID NO: 9428 - RNA, 23 nt, synthetic construct
  misc_feature 1..23: note = Synthetic
  source 1..23: mol_type = other RNA
gcagggggtgcgcggggtccgtc

SEQ ID NO: 9429 - RNA, 24 nt, synthetic construct
  misc_feature 1..24: note = Synthetic
  source 1..24: mol_type = other RNA
tgcagggggtgcgcggggtccgtc

SEQ ID NO: 9430 - RNA, 18 nt, synthetic construct
  misc_feature 1..18: note = Synthetic
  source 1..18: mol_type = other RNA
ctccaggccccgggcgtc

SEQ ID NO: 9431 - RNA, 19 nt, synthetic construct
  misc_feature 1..19: note = Synthetic
  source 1..19: mol_type = other RNA
gctccaggccccgggcgtc

SEQ ID NO: 9432 - RNA, 21 nt, synthetic construct
  misc_feature 1..21: note = Synthetic
  source 1..21: mol_type = other RNA
cagctccaggccccgggcgtc

SEQ ID NO: 9433 - RNA, 22 nt, synthetic construct
  misc_feature 1..22: note = Synthetic
  source 1..22: mol_type = other RNA
ccagctccaggccccgggcgtc

SEQ ID NO: 9434 - RNA, 23 nt, synthetic construct
  misc_feature 1..23: note = Synthetic
  source 1..23: mol_type = other RNA
cccagctccaggccccgggcgtc

SEQ ID NO: 9435 - RNA, 24 nt, synthetic construct
  misc_feature 1..24: note = Synthetic
  source 1..24: mol_type = other RNA
ccccagctccaggccccgggcgtc

SEQ ID NO: 9436 - RNA, 18 nt, synthetic construct
  misc_feature 1..18: note = Synthetic
  source 1..18: mol_type = other RNA
gcgcgcacgcgcgtcgtc

SEQ ID NO: 9437 - RNA, 19 nt, synthetic construct
  misc_feature 1..19: note = Synthetic
  source 1..19: mol_type = other RNA
cgcgcgcacgcgcgtcgtc

SEQ ID NO: 9438 - RNA, 21 nt, synthetic construct
  misc_feature 1..21: note = Synthetic
  source 1..21: mol_type = other RNA
tccgcgcgcacgcgcgtcgtc

SEQ ID NO: 9439 - RNA, 22 nt, synthetic construct
  misc_feature 1..22: note = Synthetic
  source 1..22: mol_type = other RNA
atccgcgcgcacgcgcgtcgtc

SEQ ID NO: 9440 - RNA, 23 nt, synthetic construct
  misc_feature 1..23: note = Synthetic
  source 1..23: mol_type = other RNA
gatccgcgcgcacgcgcgtcgtc

SEQ ID NO: 9441 - RNA, 24 nt, synthetic construct
  misc_feature 1..24: note = Synthetic
  source 1..24: mol_type = other RNA
agatccgcgcgcacgcgcgtcgtc

SEQ ID NO: 9442 - RNA, 18 nt, synthetic construct
  misc_feature 1..18: note = Synthetic
  source 1..18: mol_type = other RNA
gcagtcgcgatggcggtc

SEQ ID NO: 9443 - RNA, 19 nt, synthetic construct
  misc_feature 1..19: note = Synthetic
  source 1..19: mol_type = other RNA
ggcagtcgcgatggcggtc

SEQ ID NO: 9444 - RNA, 21 nt, synthetic construct
  misc_feature 1..21: note = Synthetic
  source 1..21: mol_type = other RNA
ccggcagtcgcgatggcggtc

SEQ ID NO: 9445 - RNA, 22 nt, synthetic construct
  misc_feature 1..22: note = Synthetic
  source 1..22: mol_type = other RNA
cccggcagtcgcgatggcggtc

SEQ ID NO: 9446 - RNA, 23 nt, synthetic construct
  misc_feature 1..23: note = Synthetic
  source 1..23: mol_type = other RNA
acccggcagtcgcgatggcggtc

SEQ ID NO: 9447 - RNA, 24 nt, synthetic construct
  misc_feature 1..24: note = Synthetic
  source 1..24: mol_type = other RNA
aacccggcagtcgcgatggcggtc

SEQ ID NO: 9448 - RNA, 18 nt, synthetic construct
  misc_feature 1..18: note = Synthetic
  source 1..18: mol_type = other RNA
cacggctgccgcgttgtc

SEQ ID NO: 9449 - RNA, 19 nt, synthetic construct
  misc_feature 1..19: note = Synthetic
  source 1..19: mol_type = other RNA
acacggctgccgcgttgtc

SEQ ID NO: 9450 - RNA, 21 nt, synthetic construct
  misc_feature 1..21: note = Synthetic
  source 1..21: mol_type = other RNA
gtacacggctgccgcgttgtc

SEQ ID NO: 9451 - RNA, 22 nt, synthetic construct
  misc_feature 1..22: note = Synthetic
  source 1..22: mol_type = other RNA
ggtacacggctgccgcgttgtc

SEQ ID NO: 9452 - RNA, 23 nt, synthetic construct
  misc_feature 1..23: note = Synthetic
  source 1..23: mol_type = other RNA
aggtacacggctgccgcgttgtc

SEQ ID NO: 9453 - RNA, 24 nt, synthetic construct
  misc_feature 1..24: note = Synthetic
  source 1..24: mol_type = other RNA
caggtacacggctgccgcgttgtc

SEQ ID NO: 9454 - RNA, 18 nt, synthetic construct
  misc_feature 1..18: note = Synthetic
  source 1..18: mol_type = other RNA
accagcgagtagtcgttc

SEQ ID NO: 9455 - RNA, 19 nt, synthetic construct
  misc_feature 1..19: note = Synthetic
  source 1..19: mol_type = other RNA
gaccagcgagtagtcgttc

SEQ ID NO: 9456 - RNA, 21 nt, synthetic construct
  misc_feature 1..21: note = Synthetic
  source 1..21: mol_type = other RNA
gagaccagcgagtagtcgttc

SEQ ID NO: 9457 - RNA, 22 nt, synthetic construct
  misc_feature 1..22: note = Synthetic
  source 1..22: mol_type = other RNA
cgagaccagcgagtagtcgttc

SEQ ID NO: 9458 - RNA, 23 nt, synthetic construct
  misc_feature 1..23: note = Synthetic
  source 1..23: mol_type = other RNA
acgagaccagcgagtagtcgttc

SEQ ID NO: 9459 - RNA, 24 nt, synthetic construct
  misc_feature 1..24: note = Synthetic
  source 1..24: mol_type = other RNA
tacgagaccagcgagtagtcgttc

SEQ ID NO: 9460 - RNA, 18 nt, synthetic construct
  misc_feature 1..18: note = Synthetic
  source 1..18: mol_type = other RNA
ggtcccgatcgcgtgttc

SEQ ID NO: 9461 - RNA, 19 nt, synthetic construct
  misc_feature 1..19: note = Synthetic
  source 1..19: mol_type = other RNA
cggtcccgatcgcgtgttc

SEQ ID NO: 9462 - RNA, 21 nt, synthetic construct
  misc_feature 1..21: note = Synthetic
  source 1..21: mol_type = other RNA
cacggtcccgatcgcgtgttc

SEQ ID NO: 9463 - RNA, 22 nt, synthetic construct
  misc_feature 1..22: note = Synthetic
  source 1..22: mol_type = other RNA
acacggtcccgatcgcgtgttc

SEQ ID NO: 9464 - RNA, 23 nt, synthetic construct
  misc_feature 1..23: note = Synthetic
  source 1..23: mol_type = other RNA
cacacggtcccgatcgcgtgttc

SEQ ID NO: 9465 - RNA, 24 nt, synthetic construct
  misc_feature 1..24: note = Synthetic
  source 1..24: mol_type = other RNA
gcacacggtcccgatcgcgtgttc

SEQ ID NO: 9466 - RNA, 18 nt, synthetic construct
  misc_feature 1..18: note = Synthetic
  source 1..18: mol_type = other RNA
tcggtgtcctccactttc

SEQ ID NO: 9467 - RNA, 19 nt, synthetic construct
  misc_feature 1..19: note = Synthetic
  source 1..19: mol_type = other RNA
ttcggtgtcctccactttc

SEQ ID NO: 9468 - RNA, 21 nt, synthetic construct
  misc_feature 1..21: note = Synthetic
  source 1..21: mol_type = other RNA
gcttcggtgtcctccactttc

SEQ ID NO: 9469 - RNA, 22 nt, synthetic construct
  misc_feature 1..22: note = Synthetic
  source 1..22: mol_type = other RNA
ggcttcggtgtcctccactttc

SEQ ID NO: 9470 - RNA, 23 nt, synthetic construct
  misc_feature 1..23: note = Synthetic
  source 1..23: mol_type = other RNA
cggcttcggtgtcctccactttc

SEQ ID NO: 9471 - RNA, 24 nt, synthetic construct
  misc_feature 1..24: note = Synthetic
  source 1..24: mol_type = other RNA
tcggcttcggtgtcctccactttc

SEQ ID NO: 9472 - RNA, 18 nt, synthetic construct
  misc_feature 1..18: note = Synthetic
  source 1..18: mol_type = other RNA
gacgtaaagaacttaaag

SEQ ID NO: 9473 - RNA, 19 nt, synthetic construct
  misc_feature 1..19: note = Synthetic
  source 1..19: mol_type = other RNA
cgacgtaaagaacttaaag

SEQ ID NO: 9474 - RNA, 21 nt, synthetic construct
  misc_feature 1..21: note = Synthetic
  source 1..21: mol_type = other RNA
gccgacgtaaagaacttaaag

SEQ ID NO: 9475 - RNA, 22 nt, synthetic construct
  misc_feature 1..22: note = Synthetic
  source 1..22: mol_type = other RNA
ggccgacgtaaagaacttaaag

SEQ ID NO: 9476 - RNA, 23 nt, synthetic construct
  misc_feature 1..23: note = Synthetic
  source 1..23: mol_type = other RNA
cggccgacgtaaagaacttaaag

SEQ ID NO: 9477 - RNA, 24 nt, synthetic construct
  misc_feature 1..24: note = Synthetic
  source 1..24: mol_type = other RNA
tcggccgacgtaaagaacttaaag

SEQ ID NO: 9478 - RNA, 18 nt, synthetic construct
  misc_feature 1..18: note = Synthetic
  source 1..18: mol_type = other RNA
gccacccccacaaagaag

SEQ ID NO: 9479 - RNA, 19 nt, synthetic construct
  misc_feature 1..19: note = Synthetic
  source 1..19: mol_type = other RNA
ggccacccccacaaagaag

SEQ ID NO: 9480 - RNA, 21 nt, synthetic construct
  misc_feature 1..21: note = Synthetic
  source 1..21: mol_type = other RNA
tcggccacccccacaaagaag

SEQ ID NO: 9481 - RNA, 22 nt, synthetic construct
  misc_feature 1..22: note = Synthetic
  source 1..22: mol_type = other RNA
gtcggccacccccacaaagaag

SEQ ID NO: 9482 - RNA, 23 nt, synthetic construct
  misc_feature 1..23: note = Synthetic
  source 1..23: mol_type = other RNA
cgtcggccacccccacaaagaag

SEQ ID NO: 9483 - RNA, 24 nt, synthetic construct
  misc_feature 1..24: note = Synthetic
  source 1..24: mol_type = other RNA
acgtcggccacccccacaaagaag

SEQ ID NO: 9484 - RNA, 18 nt, synthetic construct
  misc_feature 1..18: note = Synthetic
  source 1..18: mol_type = other RNA
cagcggccccgcgagaag

SEQ ID NO: 9485 - RNA, 19 nt, synthetic construct
  misc_feature 1..19: note = Synthetic
  source 1..19: mol_type = other RNA
gcagcggccccgcgagaag

SEQ ID NO: 9486 - RNA, 21 nt, synthetic construct
  misc_feature 1..21: note = Synthetic
  source 1..21: mol_type = other RNA
cagcagcggccccgcgagaag

SEQ ID NO: 9487 - RNA, 22 nt, synthetic construct
  misc_feature 1..22: note = Synthetic
  source 1..22: mol_type = other RNA
gcagcagcggccccgcgagaag

SEQ ID NO: 9488 - RNA, 23 nt, synthetic construct
  misc_feature 1..23: note = Synthetic
  source 1..23: mol_type = other RNA
tgcagcagcggccccgcgagaag

SEQ ID NO: 9489 - RNA, 24 nt, synthetic construct
  misc_feature 1..24: note = Synthetic
  source 1..24: mol_type = other RNA
gtgcagcagcggccccgcgagaag

SEQ ID NO: 9490 - RNA, 18 nt, synthetic construct
  misc_feature 1..18: note = Synthetic
  source 1..18: mol_type = other RNA
ggtaaagtcatcaaccag

SEQ ID NO: 9491 - RNA, 19 nt, synthetic construct
  misc_feature 1..19: note = Synthetic
  source 1..19: mol_type = other RNA
gggtaaagtcatcaaccag

SEQ ID NO: 9492 - RNA, 21 nt, synthetic construct
  misc_feature 1..21: note = Synthetic
  source 1..21: mol_type = other RNA
cagggtaaagtcatcaaccag

SEQ ID NO: 9493 - RNA, 22 nt, synthetic construct
  misc_feature 1..22: note = Synthetic
  source 1..22: mol_type = other RNA
tcagggtaaagtcatcaaccag

SEQ ID NO: 9494 - RNA, 23 nt, synthetic construct
  misc_feature 1..23: note = Synthetic
  source 1..23: mol_type = other RNA
gtcagggtaaagtcatcaaccag

SEQ ID NO: 9495 - RNA, 24 nt, synthetic construct
  misc_feature 1..24: note = Synthetic
  source 1..24: mol_type = other RNA
ggtcagggtaaagtcatcaaccag

SEQ ID NO: 9496 - RNA, 18 nt, synthetic construct
  misc_feature 1..18: note = Synthetic
  source 1..18: mol_type = other RNA
cagagccggggggaccag

SEQ ID NO: 9497 - RNA, 19 nt, synthetic construct
  misc_feature 1..19: note = Synthetic
  source 1..19: mol_type = other RNA
ccagagccggggggaccag

SEQ ID NO: 9498 - RNA, 21 nt, synthetic construct
  misc_feature 1..21: note = Synthetic
  source 1..21: mol_type = other RNA
ccccagagccggggggaccag

SEQ ID NO: 9499 - RNA, 22 nt, synthetic construct
  misc_feature 1..22: note = Synthetic
  source 1..22: mol_type = other RNA
cccccagagccggggggaccag

SEQ ID NO: 9500 - RNA, 23 nt, synthetic construct
  misc_feature 1..23: note = Synthetic
  source 1..23: mol_type = other RNA
gcccccagagccggggggaccag

SEQ ID NO: 9501 - RNA, 24 nt, synthetic construct
  misc_feature 1..24: note = Synthetic
  source 1..24: mol_type = other RNA
ggcccccagagccggggggaccag

SEQ ID NO: 9502 - RNA, 18 nt, synthetic construct
  misc_feature 1..18: note = Synthetic
  source 1..18: mol_type = other RNA
ggctgccgcgttgtccag

SEQ ID NO: 9503 - RNA, 19 nt, synthetic construct
  misc_feature 1..19: note = Synthetic
  source 1..19: mol_type = other RNA
cggctgccgcgttgtccag

SEQ ID NO: 9504 - RNA, 21 nt, synthetic construct
  misc_feature 1..21: note = Synthetic
  source 1..21: mol_type = other RNA
cacggctgccgcgttgtccag

SEQ ID NO: 9505 - RNA, 22 nt, synthetic construct
  misc_feature 1..22: note = Synthetic
  source 1..22: mol_type = other RNA
acacggctgccgcgttgtccag

SEQ ID NO: 9506 - RNA, 23 nt, synthetic construct
  misc_feature 1..23: note = Synthetic
  source 1..23: mol_type = other RNA
tacacggctgccgcgttgtccag

SEQ ID NO: 9507 - RNA, 24 nt, synthetic construct
  misc_feature 1..24: note = Synthetic
  source 1..24: mol_type = other RNA
gtacacggctgccgcgttgtccag

SEQ ID NO: 9508 - RNA, 18 nt, synthetic construct
  misc_feature 1..18: note = Synthetic
  source 1..18: mol_type = other RNA
gcggggtcgctggcgcag

SEQ ID NO: 9509 - RNA, 19 nt, synthetic construct
  misc_feature 1..19: note = Synthetic
  source 1..19: mol_type = other RNA
ggcggggtcgctggcgcag

SEQ ID NO: 9510 - RNA, 21 nt, synthetic construct
  misc_feature 1..21: note = Synthetic
  source 1..21: mol_type = other RNA
agggcggggtcgctggcgcag

SEQ ID NO: 9511 - RNA, 22 nt, synthetic construct
  misc_feature 1..22: note = Synthetic
  source 1..22: mol_type = other RNA
gagggcggggtcgctggcgcag

SEQ ID NO: 9512 - RNA, 23 nt, synthetic construct
  misc_feature 1..23: note = Synthetic
  source 1..23: mol_type = other RNA
ggagggcggggtcgctggcgcag

SEQ ID NO: 9513 - RNA, 24 nt, synthetic construct
  misc_feature 1..24: note = Synthetic
  source 1..24: mol_type = other RNA
aggagggcggggtcgctggcgcag

SEQ ID NO: 9514 - RNA, 18 nt, synthetic construct
  misc_feature 1..18: note = Synthetic
  source 1..18: mol_type = other RNA
cgtgtcggcatgcgtcag

SEQ ID NO: 9515 - RNA, 19 nt, synthetic construct
  misc_feature 1..19: note = Synthetic
  source 1..19: mol_type = other RNA
gcgtgtcggcatgcgtcag

SEQ ID NO: 9516 - RNA, 21 nt, synthetic construct
  misc_feature 1..21: note = Synthetic
  source 1..21: mol_type = other RNA
gcgcgtgtcggcatgcgtcag

SEQ ID NO: 9517 - RNA, 22 nt, synthetic construct
  misc_feature 1..22: note = Synthetic
  source 1..22: mol_type = other RNA
cgcgcgtgtcggcatgcgtcag

SEQ ID NO: 9518 - RNA, 23 nt, synthetic construct
  misc_feature 1..23: note = Synthetic
  source 1..23: mol_type = other RNA
ccgcgcgtgtcggcatgcgtcag

SEQ ID NO: 9519 - RNA, 24 nt, synthetic construct
  misc_feature 1..24: note = Synthetic
  source 1..24: mol_type = other RNA
cccgcgcgtgtcggcatgcgtcag

SEQ ID NO: 9520 - RNA, 18 nt, synthetic construct
  misc_feature 1..18: note = Synthetic
  source 1..18: mol_type = other RNA
agtagttggcccccagag

SEQ ID NO: 9521 - RNA, 19 nt, synthetic construct
  misc_feature 1..19: note = Synthetic
  source 1..19: mol_type = other RNA
aagtagttggcccccagag

SEQ ID NO: 9522 - RNA, 21 nt, synthetic construct
  misc_feature 1..21: note = Synthetic
  source 1..21: mol_type = other RNA
aaaagtagttggcccccagag

SEQ ID NO: 9523 - RNA, 22 nt, synthetic construct
  misc_feature 1..22: note = Synthetic
  source 1..22: mol_type = other RNA
gaaaagtagttggcccccagag

SEQ ID NO: 9524 - RNA, 23 nt, synthetic construct
  misc_feature 1..23: note = Synthetic
  source 1..23: mol_type = other RNA
cgaaaagtagttggcccccagag

SEQ ID NO: 9525 - RNA, 24 nt, synthetic construct
  misc_feature 1..24: note = Synthetic
  source 1..24: mol_type = other RNA
acgaaaagtagttggcccccagag

SEQ ID NO: 9526 - RNA, 18 nt, synthetic construct
  misc_feature 1..18: note = Synthetic
  source 1..18: mol_type = other RNA
ccgcgttgtccaggagag

SEQ ID NO: 9527 - RNA, 19 nt, synthetic construct
  misc_feature 1..19: note = Synthetic
  source 1..19: mol_type = other RNA
gccgcgttgtccaggagag

SEQ ID NO: 9528 - RNA, 21 nt, synthetic construct
  misc_feature 1..21: note = Synthetic
  source 1..21: mol_type = other RNA
ctgccgcgttgtccaggagag

SEQ ID NO: 9529 - RNA, 22 nt, synthetic construct
  misc_feature 1..22: note = Synthetic
  source 1..22: mol_type = other RNA
gctgccgcgttgtccaggagag

SEQ ID NO: 9530 - RNA, 23 nt, synthetic construct
  misc_feature 1..23: note = Synthetic
  source 1..23: mol_type = other RNA
ggctgccgcgttgtccaggagag

SEQ ID NO: 9531 - RNA, 24 nt, synthetic construct
  misc_feature 1..24: note = Synthetic
  source 1..24: mol_type = other RNA
cggctgccgcgttgtccaggagag

SEQ ID NO: 9532 - RNA, 18 nt, synthetic construct
  misc_feature 1..18: note = Synthetic
  source 1..18: mol_type = other RNA
gatgcactggaccacgag

SEQ ID NO: 9533 - RNA, 19 nt, synthetic construct
  misc_feature 1..19: note = Synthetic
  source 1..19: mol_type = other RNA
tgatgcactggaccacgag

SEQ ID NO: 9534 - RNA, 21 nt, synthetic construct
  misc_feature 1..21: note = Synthetic
  source 1..21: mol_type = other RNA
ggtgatgcactggaccacgag

SEQ ID NO: 9535 - RNA, 22 nt, synthetic construct
  misc_feature 1..22: note = Synthetic
  source 1..22: mol_type = other RNA
tggtgatgcactggaccacgag

SEQ ID NO: 9536 - RNA, 23 nt, synthetic construct
  misc_feature 1..23: note = Synthetic
  source 1..23: mol_type = other RNA
ctggtgatgcactggaccacgag

SEQ ID NO: 9537 - RNA, 24 nt, synthetic construct
  misc_feature 1..24: note = Synthetic
  source 1..24: mol_type = other RNA
gctggtgatgcactggaccacgag

SEQ ID NO: 9538 - RNA, 18 nt, synthetic construct
  misc_feature 1..18: note = Synthetic
  source 1..18: mol_type = other RNA
gcgtcgggcgccgccgag

SEQ ID NO: 9539 - RNA, 19 nt, synthetic construct
  misc_feature 1..19: note = Synthetic
  source 1..19: mol_type = other RNA
cgcgtcgggcgccgccgag

SEQ ID NO: 9540 - RNA, 21 nt, synthetic construct
  misc_feature 1..21: note = Synthetic
  source 1..21: mol_type = other RNA
cccgcgtcgggcgccgccgag

SEQ ID NO: 9541 - RNA, 22 nt, synthetic construct
  misc_feature 1..22: note = Synthetic
  source 1..22: mol_type = other RNA
gcccgcgtcgggcgccgccgag

SEQ ID NO: 9542 - RNA, 23 nt, synthetic construct
  misc_feature 1..23: note = Synthetic
  source 1..23: mol_type = other RNA
cgcccgcgtcgggcgccgccgag

SEQ ID NO: 9543 - RNA, 24 nt, synthetic construct
  misc_feature 1..24: note = Synthetic
  source 1..24: mol_type = other RNA
gcgcccgcgtcgggcgccgccgag

SEQ ID NO: 9544 - RNA, 18 nt, synthetic construct
  misc_feature 1..18: note = Synthetic
  source 1..18: mol_type = other RNA
tgccgcgttgtccaggag

SEQ ID NO: 9545 - RNA, 19 nt, synthetic construct
  misc_feature 1..19: note = Synthetic
  source 1..19: mol_type = other RNA
ctgccgcgttgtccaggag

SEQ ID NO: 9546 - RNA, 21 nt, synthetic construct
  misc_feature 1..21: note = Synthetic
  source 1..21: mol_type = other RNA
ggctgccgcgttgtccaggag

SEQ ID NO: 9547 - RNA, 22 nt, synthetic construct
  misc_feature 1..22: note = Synthetic
  source 1..22: mol_type = other RNA
cggctgccgcgttgtccaggag

SEQ ID NO: 9548 - RNA, 23 nt, synthetic construct
  misc_feature 1..23: note = Synthetic
  source 1..23: mol_type = other RNA
acggctgccgcgttgtccaggag

SEQ ID NO: 9549 - RNA, 24 nt, synthetic construct
  misc_feature 1..24: note = Synthetic
  source 1..24: mol_type = other RNA
cacggctgccgcgttgtccaggag

SEQ ID NO: 9550 - RNA, 18 nt, synthetic construct
  misc_feature 1..18: note = Synthetic
  source 1..18: mol_type = other RNA
gttgcgggcactgcggag

SEQ ID NO: 9551 - RNA, 19 nt, synthetic construct
  misc_feature 1..19: note = Synthetic
  source 1..19: mol_type = other RNA
cgttgcgggcactgcggag

SEQ ID NO: 9552 - RNA, 21 nt, synthetic construct
  misc_feature 1..21: note = Synthetic
  source 1..21: mol_type = other RNA
cccgttgcgggcactgcggag

SEQ ID NO: 9553 - RNA, 22 nt, synthetic construct
  misc_feature 1..22: note = Synthetic
  source 1..22: mol_type = other RNA
ccccgttgcgggcactgcggag

SEQ ID NO: 9554 - RNA, 23 nt, synthetic construct
  misc_feature 1..23: note = Synthetic
  source 1..23: mol_type = other RNA
tccccgttgcgggcactgcggag

SEQ ID NO: 9555 - RNA, 24 nt, synthetic construct
  misc_feature 1..24: note = Synthetic
  source 1..24: mol_type = other RNA
ttccccgttgcgggcactgcggag

SEQ ID NO: 9556 - RNA, 18 nt, synthetic construct
  misc_feature 1..18: note = Synthetic
  source 1..18: mol_type = other RNA
cagagccagtcccttgag

SEQ ID NO: 9557 - RNA, 19 nt, synthetic construct
  misc_feature 1..19: note = Synthetic
  source 1..19: mol_type = other RNA
acagagccagtcccttgag

SEQ ID NO: 9558 - RNA, 21 nt, synthetic construct
  misc_feature 1..21: note = Synthetic
  source 1..21: mol_type = other RNA
ttacagagccagtcccttgag

SEQ ID NO: 9559 - RNA, 22 nt, synthetic construct
  misc_feature 1..22: note = Synthetic
  source 1..22: mol_type = other RNA
attacagagccagtcccttgag

SEQ ID NO: 9560 - RNA, 23 nt, synthetic construct
  misc_feature 1..23: note = Synthetic
  source 1..23: mol_type = other RNA
tattacagagccagtcccttgag

SEQ ID NO: 9561 - RNA, 24 nt, synthetic construct
  misc_feature 1..24: note = Synthetic
  source 1..24: mol_type = other RNA
ttattacagagccagtcccttgag

SEQ ID NO: 9562 - RNA, 18 nt, synthetic construct
  misc_feature 1..18: note = Synthetic
  source 1..18: mol_type = other RNA
agcggggatgcgtcatag

SEQ ID NO: 9563 - RNA, 19 nt, synthetic construct
  misc_feature 1..19: note = Synthetic
  source 1..19: mol_type = other RNA
gagcggggatgcgtcatag

SEQ ID NO: 9564 - RNA, 21 nt, synthetic construct
  misc_feature 1..21: note = Synthetic
  source 1..21: mol_type = other RNA
ttgagcggggatgcgtcatag

SEQ ID NO: 9565 - RNA, 22 nt, synthetic construct
  misc_feature 1..22: note = Synthetic
  source 1..22: mol_type = other RNA
cttgagcggggatgcgtcatag

SEQ ID NO: 9566 - RNA, 23 nt, synthetic construct
  misc_feature 1..23: note = Synthetic
  source 1..23: mol_type = other RNA
ccttgagcggggatgcgtcatag

SEQ ID NO: 9567 - RNA, 24 nt, synthetic construct
  misc_feature 1..24: note = Synthetic
  source 1..24: mol_type = other RNA
cccttgagcggggatgcgtcatag

SEQ ID NO: 9568 - RNA, 18 nt, synthetic construct
  misc_feature 1..18: note = Synthetic
  source 1..18: mol_type = other RNA
agacggggcacggccacg

SEQ ID NO: 9569 - RNA, 19 nt, synthetic construct
  misc_feature 1..19: note = Synthetic
  source 1..19: mol_type = other RNA
cagacggggcacggccacg

SEQ ID NO: 9570 - RNA, 21 nt, synthetic construct
  misc_feature 1..21: note = Synthetic
  source 1..21: mol_type = other RNA
gtcagacggggcacggccacg

SEQ ID NO: 9571 - RNA, 22 nt, synthetic construct
  misc_feature 1..22: note = Synthetic
  source 1..22: mol_type = other RNA
cgtcagacggggcacggccacg

SEQ ID NO: 9572 - RNA, 23 nt, synthetic construct
  misc_feature 1..23: note = Synthetic
  source 1..23: mol_type = other RNA
gcgtcagacggggcacggccacg

SEQ ID NO: 9573 - RNA, 24 nt, synthetic construct
  misc_feature 1..24: note = Synthetic
  source 1..24: mol_type = other RNA
tgcgtcagacggggcacggccacg

SEQ ID NO: 9574 - RNA, 18 nt, synthetic construct
  misc_feature 1..18: note = Synthetic
  source 1..18: mol_type = other RNA
tcgcggacgtgctgcacg

SEQ ID NO: 9575 - RNA, 19 nt, synthetic construct
  misc_feature 1..19: note = Synthetic
  source 1..19: mol_type = other RNA
ctcgcggacgtgctgcacg

SEQ ID NO: 9576 - RNA, 21 nt, synthetic construct
  misc_feature 1..21: note = Synthetic
  source 1..21: mol_type = other RNA
ctctcgcggacgtgctgcacg

SEQ ID NO: 9577 - RNA, 22 nt, synthetic construct
  misc_feature 1..22: note = Synthetic
  source 1..22: mol_type = other RNA
gctctcgcggacgtgctgcacg

SEQ ID NO: 9578 - RNA, 23 nt, synthetic construct
  misc_feature 1..23: note = Synthetic
  source 1..23: mol_type = other RNA
cgctctcgcggacgtgctgcacg

SEQ ID NO: 9579 - RNA, 24 nt, synthetic construct
  misc_feature 1..24: note = Synthetic
  source 1..24: mol_type = other RNA
gcgctctcgcggacgtgctgcacg

SEQ ID NO: 9580 - RNA, 18 nt, synthetic construct
  misc_feature 1..18: note = Synthetic
  source 1..18: mol_type = other RNA
cggtcctgtcggacgacg

SEQ ID NO: 9581 - RNA, 19 nt, synthetic construct
  misc_feature 1..19: note = Synthetic
  source 1..19: mol_type = other RNA
gcggtcctgtcggacgacg

SEQ ID NO: 9582 - RNA, 21 nt, synthetic construct
  misc_feature 1..21: note = Synthetic
  source 1..21: mol_type = other RNA
aagcggtcctgtcggacgacg

SEQ ID NO: 9583 - RNA, 22 nt, synthetic construct
  misc_feature 1..22: note = Synthetic
  source 1..22: mol_type = other RNA
aaagcggtcctgtcggacgacg

SEQ ID NO: 9584 - RNA, 23 nt, synthetic construct
  misc_feature 1..23: note = Synthetic
  source 1..23: mol_type = other RNA
caaagcggtcctgtcggacgacg

SEQ ID NO: 9585 - RNA, 24 nt, synthetic construct
  misc_feature 1..24: note = Synthetic
  source 1..24: mol_type = other RNA
acaaagcggtcctgtcggacgacg

SEQ ID NO: 9586 - RNA, 18 nt, synthetic construct
  misc_feature 1..18: note = Synthetic
  source 1..18: mol_type = other RNA
gcgaacagcgcgtggacg

SEQ ID NO: 9587 - RNA, 19 nt, synthetic construct
  misc_feature 1..19: note = Synthetic
  source 1..19: mol_type = other RNA
ggcgaacagcgcgtggacg

SEQ ID NO: 9588 - RNA, 21 nt, synthetic construct
  misc_feature 1..21: note = Synthetic
  source 1..21: mol_type = other RNA
ccggcgaacagcgcgtggacg

SEQ ID NO: 9589 - RNA, 22 nt, synthetic construct
  misc_feature 1..22: note = Synthetic
  source 1..22: mol_type = other RNA
cccggcgaacagcgcgtggacg

SEQ ID NO: 9590 - RNA, 23 nt, synthetic construct
  misc_feature 1..23: note = Synthetic
  source 1..23: mol_type = other RNA
ccccggcgaacagcgcgtggacg

SEQ ID NO: 9591 - RNA, 24 nt, synthetic construct
  misc_feature 1..24: note = Synthetic
  source 1..24: mol_type = other RNA
gccccggcgaacagcgcgtggacg

SEQ ID NO: 9592 - RNA, 18 nt, synthetic construct
  misc_feature 1..18: note = Synthetic
  source 1..18: mol_type = other RNA
cggtggccgtggacaccg

SEQ ID NO: 9593 - RNA, 19 nt, synthetic construct
  misc_feature 1..19: note = Synthetic
  source 1..19: mol_type = other RNA
gcggtggccgtggacaccg

SEQ ID NO: 9594 - RNA, 21 nt, synthetic construct
  misc_feature 1..21: note = Synthetic
  source 1..21: mol_type = other RNA
cggcggtggccgtggacaccg

SEQ ID NO: 9595 - RNA, 22 nt, synthetic construct
  misc_feature 1..22: note = Synthetic
  source 1..22: mol_type = other RNA
gcggcggtggccgtggacaccg

SEQ ID NO: 9596 - RNA, 23 nt, synthetic construct
  misc_feature 1..23: note = Synthetic
  source 1..23: mol_type = other RNA
ggcggcggtggccgtggacaccg

SEQ ID NO: 9597 - RNA, 24 nt, synthetic construct
  misc_feature 1..24: note = Synthetic
  source 1..24: mol_type = other RNA
tggcggcggtggccgtggacaccg

SEQ ID NO: 9598 - RNA, 18 nt, synthetic construct
  misc_feature 1..18: note = Synthetic
  source 1..18: mol_type = other RNA
agcaggggctgagcaccg

SEQ ID NO: 9599 - RNA, 19 nt, synthetic construct
  misc_feature 1..19: note = Synthetic
  source 1..19: mol_type = other RNA
aagcaggggctgagcaccg

SEQ ID NO: 9600 - RNA, 21 nt, synthetic construct
  misc_feature 1..21: note = Synthetic
  source 1..21: mol_type = other RNA
taaagcaggggctgagcaccg

SEQ ID NO: 9601 - RNA, 22 nt, synthetic construct
  misc_feature 1..22: note = Synthetic
  source 1..22: mol_type = other RNA
ttaaagcaggggctgagcaccg

SEQ ID NO: 9602 - RNA, 23 nt, synthetic construct
  misc_feature 1..23: note = Synthetic
  source 1..23: mol_type = other RNA
cttaaagcaggggctgagcaccg

SEQ ID NO: 9603 - RNA, 24 nt, synthetic construct
  misc_feature 1..24: note = Synthetic
  source 1..24: mol_type = other RNA
acttaaagcaggggctgagcaccg

SEQ ID NO: 9604 - RNA, 18 nt, synthetic construct
  misc_feature 1..18: note = Synthetic
  source 1..18: mol_type = other RNA
cgagttcgcggcaccccg

SEQ ID NO: 9605 - RNA, 19 nt, synthetic construct
  misc_feature 1..19: note = Synthetic
  source 1..19: mol_type = other RNA
acgagttcgcggcaccccg

SEQ ID NO: 9606 - RNA, 21 nt, synthetic construct
  misc_feature 1..21: note = Synthetic
  source 1..21: mol_type = other RNA
ccacgagttcgcggcaccccg

SEQ ID NO: 9607 - RNA, 22 nt, synthetic construct
  misc_feature 1..22: note = Synthetic
  source 1..22: mol_type = other RNA
tccacgagttcgcggcaccccg

SEQ ID NO: 9608 - RNA, 23 nt, synthetic construct
  misc_feature 1..23: note = Synthetic
  source 1..23: mol_type = other RNA
ctccacgagttcgcggcaccccg

SEQ ID NO: 9609 - RNA, 24 nt, synthetic construct
  misc_feature 1..24: note = Synthetic
  source 1..24: mol_type = other RNA
cctccacgagttcgcggcaccccg

SEQ ID NO: 9610 - RNA, 18 nt, synthetic construct
  misc_feature 1..18: note = Synthetic
  source 1..18: mol_type = other RNA
agcaccggcgaggccccg

SEQ ID NO: 9611 - RNA, 19 nt, synthetic construct
  misc_feature 1..19: note = Synthetic
  source 1..19: mol_type = other RNA
gagcaccggcgaggccccg

SEQ ID NO: 9612 - RNA, 21 nt, synthetic construct
  misc_feature 1..21: note = Synthetic
  source 1..21: mol_type = other RNA
ctgagcaccggcgaggccccg

SEQ ID NO: 9613 - RNA, 22 nt, synthetic construct
  misc_feature 1..22: note = Synthetic
  source 1..22: mol_type = other RNA
gctgagcaccggcgaggccccg

SEQ ID NO: 9614 - RNA, 23 nt, synthetic construct
  misc_feature 1..23: note = Synthetic
  source 1..23: mol_type = other RNA
ggctgagcaccggcgaggccccg

SEQ ID NO: 9615 - RNA, 24 nt, synthetic construct
  misc_feature 1..24: note = Synthetic
  source 1..24: mol_type = other RNA
gggctgagcaccggcgaggccccg

SEQ ID NO: 9616 - RNA, 18 nt, synthetic construct
  misc_feature 1..18: note = Synthetic
  source 1..18: mol_type = other RNA
gccacgtggtcggccccg

SEQ ID NO: 9617 - RNA, 19 nt, synthetic construct
  misc_feature 1..19: note = Synthetic
  source 1..19: mol_type = other RNA
cgccacgtggtcggccccg

SEQ ID NO: 9618 - RNA, 21 nt, synthetic construct
  misc_feature 1..21: note = Synthetic
  source 1..21: mol_type = other RNA
ttcgccacgtggtcggccccg

SEQ ID NO: 9619 - RNA, 22 nt, synthetic construct
  misc_feature 1..22: note = Synthetic
  source 1..22: mol_type = other RNA
gttcgccacgtggtcggccccg

SEQ ID NO: 9620 - RNA, 23 nt, synthetic construct
  misc_feature 1..23: note = Synthetic
  source 1..23: mol_type = other RNA
cgttcgccacgtggtcggccccg

SEQ ID NO: 9621 - RNA, 24 nt, synthetic construct
  misc_feature 1..24: note = Synthetic
  source 1..24: mol_type = other RNA
gcgttcgccacgtggtcggccccg

SEQ ID NO: 9622 - RNA, 18 nt, synthetic construct
  misc_feature 1..18: note = Synthetic
  source 1..18: mol_type = other RNA
agttggcccccagagccg

SEQ ID NO: 9623 - RNA, 19 nt, synthetic construct
  misc_feature 1..19: note = Synthetic
  source 1..19: mol_type = other RNA
tagttggcccccagagccg

SEQ ID NO: 9624 - RNA, 21 nt, synthetic construct
  misc_feature 1..21: note = Synthetic
  source 1..21: mol_type = other RNA
agtagttggcccccagagccg

SEQ ID NO: 9625 - RNA, 22 nt, synthetic construct
  misc_feature 1..22: note = Synthetic
  source 1..22: mol_type = other RNA
aagtagttggcccccagagccg

SEQ ID NO: 9626 - RNA, 23 nt, synthetic construct
  misc_feature 1..23: note = Synthetic
  source 1..23: mol_type = other RNA
aaagtagttggcccccagagccg

SEQ ID NO: 9627 - RNA, 24 nt, synthetic construct
  misc_feature 1..24: note = Synthetic
  source 1..24: mol_type = other RNA
aaaagtagttggcccccagagccg

SEQ ID NO: 9628 - RNA, 18 nt, synthetic construct
  misc_feature 1..18: note = Synthetic
  source 1..18: mol_type = other RNA
gggcgtcccggaacgccg

SEQ ID NO: 9629 - RNA, 19 nt, synthetic construct
  misc_feature 1..19: note = Synthetic
  source 1..19: mol_type = other RNA
cgggcgtcccggaacgccg

SEQ ID NO: 9630 - RNA, 21 nt, synthetic construct
  misc_feature 1..21: note = Synthetic
  source 1..21: mol_type = other RNA
cccgggcgtcccggaacgccg

SEQ ID NO: 9631 - RNA, 22 nt, synthetic construct
  misc_feature 1..22: note = Synthetic
  source 1..22: mol_type = other RNA
ccccgggcgtcccggaacgccg

SEQ ID NO: 9632 - RNA, 23 nt, synthetic construct
  misc_feature 1..23: note = Synthetic
  source 1..23: mol_type = other RNA
gccccgggcgtcccggaacgccg

SEQ ID NO: 9633 - RNA, 24 nt, synthetic construct
  misc_feature 1..24: note = Synthetic
  source 1..24: mol_type = other RNA
ggccccgggcgtcccggaacgccg

SEQ ID NO: 9634 - RNA, 18 nt, synthetic construct
  misc_feature 1..18: note = Synthetic
  source 1..18: mol_type = other RNA
cgcccgcgtcgggcgccg

SEQ ID NO: 9635 - RNA, 19 nt, synthetic construct
  misc_feature 1..19: note = Synthetic
  source 1..19: mol_type = other RNA
gcgcccgcgtcgggcgccg

SEQ ID NO: 9636 - RNA, 21 nt, synthetic construct
  misc_feature 1..21: note = Synthetic
  source 1..21: mol_type = other RNA
tggcgcccgcgtcgggcgccg

SEQ ID NO: 9637 - RNA, 22 nt, synthetic construct
  misc_feature 1..22: note = Synthetic
  source 1..22: mol_type = other RNA
ttggcgcccgcgtcgggcgccg

SEQ ID NO: 9638 - RNA, 23 nt, synthetic construct
  misc_feature 1..23: note = Synthetic
  source 1..23: mol_type = other RNA
gttggcgcccgcgtcgggcgccg

SEQ ID NO: 9639 - RNA, 24 nt, synthetic construct
  misc_feature 1..24: note = Synthetic
  source 1..24: mol_type = other RNA
tgttggcgcccgcgtcgggcgccg

SEQ ID NO: 9640 - RNA, 18 nt, synthetic construct
  misc_feature 1..18: note = Synthetic
  source 1..18: mol_type = other RNA
aagaccagcttctcgccg

SEQ ID NO: 9641 - RNA, 19 nt, synthetic construct
  misc_feature 1..19: note = Synthetic
  source 1..19: mol_type = other RNA
aaagaccagcttctcgccg

SEQ ID NO: 9642 - RNA, 21 nt, synthetic construct
  misc_feature 1..21: note = Synthetic
  source 1..21: mol_type = other RNA
agaaagaccagcttctcgccg

SEQ ID NO: 9643 - RNA, 22 nt, synthetic construct
  misc_feature 1..22: note = Synthetic
  source 1..22: mol_type = other RNA
cagaaagaccagcttctcgccg

SEQ ID NO: 9644 - RNA, 23 nt, synthetic construct
  misc_feature 1..23: note = Synthetic
  source 1..23: mol_type = other RNA
ccagaaagaccagcttctcgccg

SEQ ID NO: 9645 - RNA, 24 nt, synthetic construct
  misc_feature 1..24: note = Synthetic
  source 1..24: mol_type = other RNA
tccagaaagaccagcttctcgccg

SEQ ID NO: 9646 - RNA, 18 nt, synthetic construct
  misc_feature 1..18: note = Synthetic
  source 1..18: mol_type = other RNA
tctcccccgggccggccg

SEQ ID NO: 9647 - RNA, 19 nt, synthetic construct
  misc_feature 1..19: note = Synthetic
  source 1..19: mol_type = other RNA
atctcccccgggccggccg

SEQ ID NO: 9648 - RNA, 21 nt, synthetic construct
  misc_feature 1..21: note = Synthetic
  source 1..21: mol_type = other RNA
ggatctcccccgggccggccg

SEQ ID NO: 9649 - RNA, 22 nt, synthetic construct
  misc_feature 1..22: note = Synthetic
  source 1..22: mol_type = other RNA
tggatctcccccgggccggccg

SEQ ID NO: 9650 - RNA, 23 nt, synthetic construct
  misc_feature 1..23: note = Synthetic
  source 1..23: mol_type = other RNA
ctggatctcccccgggccggccg

SEQ ID NO: 9651 - RNA, 24 nt, synthetic construct
  misc_feature 1..24: note = Synthetic
  source 1..24: mol_type = other RNA
cctggatctcccccgggccggccg

SEQ ID NO: 9652 - RNA, 18 nt, synthetic construct
  misc_feature 1..18: note = Synthetic
  source 1..18: mol_type = other RNA
acaggtcgcgcagggccg

SEQ ID NO: 9653 - RNA, 19 nt, synthetic construct
  misc_feature 1..19: note = Synthetic
  source 1..19: mol_type = other RNA
gacaggtcgcgcagggccg

SEQ ID NO: 9654 - RNA, 21 nt, synthetic construct
  misc_feature 1..21: note = Synthetic
  source 1..21: mol_type = other RNA
gcgacaggtcgcgcagggccg

SEQ ID NO: 9655 - RNA, 22 nt, synthetic construct
  misc_feature 1..22: note = Synthetic
  source 1..22: mol_type = other RNA
cgcgacaggtcgcgcagggccg

SEQ ID NO: 9656 - RNA, 23 nt, synthetic construct
  misc_feature 1..23: note = Synthetic
  source 1..23: mol_type = other RNA
ccgcgacaggtcgcgcagggccg

SEQ ID NO: 9657 - RNA, 24 nt, synthetic construct
  misc_feature 1..24: note = Synthetic
  source 1..24: mol_type = other RNA
gccgcgacaggtcgcgcagggccg

SEQ ID NO: 9658 - RNA, 18 nt, synthetic construct
  misc_feature 1..18: note = Synthetic
  source 1..18: mol_type = other RNA
ccgggggttgcagggccg

SEQ ID NO: 9659 - RNA, 19 nt, synthetic construct
  misc_feature 1..19: note = Synthetic
  source 1..19: mol_type = other RNA
cccgggggttgcagggccg

SEQ ID NO: 9660 - RNA, 21 nt, synthetic construct
  misc_feature 1..21: note = Synthetic
  source 1..21: mol_type = other RNA
tccccgggggttgcagggccg

SEQ ID NO: 9661 - RNA, 22 nt, synthetic construct
  misc_feature 1..22: note = Synthetic
  source 1..22: mol_type = other RNA
gtccccgggggttgcagggccg

SEQ ID NO: 9662 - RNA, 23 nt, synthetic construct
  misc_feature 1..23: note = Synthetic
  source 1..23: mol_type = other RNA
cgtccccgggggttgcagggccg

SEQ ID NO: 9663 - RNA, 24 nt, synthetic construct
  misc_feature 1..24: note = Synthetic
  source 1..24: mol_type = other RNA
gcgtccccgggggttgcagggccg

SEQ ID NO: 9664 - RNA, 18 nt, synthetic construct
  misc_feature 1..18: note = Synthetic
  source 1..18: mol_type = other RNA
gcggtgttggcgcccgcg

SEQ ID NO: 9665 - RNA, 19 nt, synthetic construct
  misc_feature 1..19: note = Synthetic
  source 1..19: mol_type = other RNA
cgcggtgttggcgcccgcg

SEQ ID NO: 9666 - RNA, 21 nt, synthetic construct
  misc_feature 1..21: note = Synthetic
  source 1..21: mol_type = other RNA
gacgcggtgttggcgcccgcg

SEQ ID NO: 9667 - RNA, 22 nt, synthetic construct
  misc_feature 1..22: note = Synthetic
  source 1..22: mol_type = other RNA
ggacgcggtgttggcgcccgcg

SEQ ID NO: 9668 - RNA, 23 nt, synthetic construct
  misc_feature 1..23: note = Synthetic
  source 1..23: mol_type = other RNA
tggacgcggtgttggcgcccgcg

SEQ ID NO: 9669 - RNA, 24 nt, synthetic construct
  misc_feature 1..24: note = Synthetic
  source 1..24: mol_type = other RNA
gtggacgcggtgttggcgcccgcg

SEQ ID NO: 9670 - RNA, 18 nt, synthetic construct
  misc_feature 1..18: note = Synthetic
  source 1..18: mol_type = other RNA
ctgccgcgacaggtcgcg

SEQ ID NO: 9671 - RNA, 19 nt, synthetic construct
  misc_feature 1..19: note = Synthetic
  source 1..19: mol_type = other RNA
cctgccgcgacaggtcgcg

SEQ ID NO: 9672 - RNA, 21 nt, synthetic construct
  misc_feature 1..21: note = Synthetic
  source 1..21: mol_type = other RNA
gacctgccgcgacaggtcgcg

SEQ ID NO: 9673 - RNA, 22 nt, synthetic construct
  misc_feature 1..22: note = Synthetic
  source 1..22: mol_type = other RNA
ggacctgccgcgacaggtcgcg

SEQ ID NO: 9674 - RNA, 23 nt, synthetic construct
  misc_feature 1..23: note = Synthetic
  source 1..23: mol_type = other RNA
gggacctgccgcgacaggtcgcg

SEQ ID NO: 9675 - RNA, 24 nt, synthetic construct
  misc_feature 1..24: note = Synthetic
  source 1..24: mol_type = other RNA
ggggacctgccgcgacaggtcgcg

SEQ ID NO: 9676 - RNA, 18 nt, synthetic construct
  misc_feature 1..18: note = Synthetic
  source 1..18: mol_type = other RNA
tggcggggcgggaaggcg

SEQ ID NO: 9677 - RNA, 19 nt, synthetic construct
  misc_feature 1..19: note = Synthetic
  source 1..19: mol_type = other RNA
ctggcggggcgggaaggcg

SEQ ID NO: 9678 - RNA, 21 nt, synthetic construct
  misc_feature 1..21: note = Synthetic
  source 1..21: mol_type = other RNA
agctggcggggcgggaaggcg

SEQ ID NO: 9679 - RNA, 22 nt, synthetic construct
  misc_feature 1..22: note = Synthetic
  source 1..22: mol_type = other RNA
cagctggcggggcgggaaggcg

SEQ ID NO: 9680 - RNA, 23 nt, synthetic construct
  misc_feature 1..23: note = Synthetic
  source 1..23: mol_type = other RNA
acagctggcggggcgggaaggcg

SEQ ID NO: 9681 - RNA, 24 nt, synthetic construct
  misc_feature 1..24: note = Synthetic
  source 1..24: mol_type = other RNA
aacagctggcggggcgggaaggcg

SEQ ID NO: 9682 - RNA, 18 nt, synthetic construct
  misc_feature 1..18: note = Synthetic
  source 1..18: mol_type = other RNA
acgagccgggccagggcg

SEQ ID NO: 9683 - RNA, 19 nt, synthetic construct
  misc_feature 1..19: note = Synthetic
  source 1..19: mol_type = other RNA
cacgagccgggccagggcg

SEQ ID NO: 9684 - RNA, 21 nt, synthetic construct
  misc_feature 1..21: note = Synthetic
  source 1..21: mol_type = other RNA
accacgagccgggccagggcg

SEQ ID NO: 9685 - RNA, 22 nt, synthetic construct
  misc_feature 1..22: note = Synthetic
  source 1..22: mol_type = other RNA
gaccacgagccgggccagggcg

SEQ ID NO: 9686 - RNA, 23 nt, synthetic construct
  misc_feature 1..23: note = Synthetic
  source 1..23: mol_type = other RNA
ggaccacgagccgggccagggcg

SEQ ID NO: 9687 - RNA, 24 nt, synthetic construct
  misc_feature 1..24: note = Synthetic
  source 1..24: mol_type = other RNA
tggaccacgagccgggccagggcg

SEQ ID NO: 9688 - RNA, 18 nt, synthetic construct
  misc_feature 1..18: note = Synthetic
  source 1..18: mol_type = other RNA
cccgttgcgggcactgcg

SEQ ID NO: 9689 - RNA, 19 nt, synthetic construct
  misc_feature 1..19: note = Synthetic
  source 1..19: mol_type = other RNA
ccccgttgcgggcactgcg

SEQ ID NO: 9690 - RNA, 21 nt, synthetic construct
  misc_feature 1..21: note = Synthetic
  source 1..21: mol_type = other RNA
ttccccgttgcgggcactgcg

SEQ ID NO: 9691 - RNA, 22 nt, synthetic construct
  misc_feature 1..22: note = Synthetic
  source 1..22: mol_type = other RNA
cttccccgttgcgggcactgcg

SEQ ID NO: 9692 - RNA, 23 nt, synthetic construct
  misc_feature 1..23: note = Synthetic
  source 1..23: mol_type = other RNA
gcttccccgttgcgggcactgcg

SEQ ID NO: 9693 - RNA, 24 nt, synthetic construct
  misc_feature 1..24: note = Synthetic
  source 1..24: mol_type = other RNA
ggcttccccgttgcgggcactgcg

SEQ ID NO: 9694 - RNA, 18 nt, synthetic construct
  misc_feature 1..18: note = Synthetic
  source 1..18: mol_type = other RNA
agctgctgcatgtctgcg

SEQ ID NO: 9695 - RNA, 19 nt, synthetic construct
  misc_feature 1..19: note = Synthetic
  source 1..19: mol_type = other RNA
cagctgctgcatgtctgcg

SEQ ID NO: 9696 - RNA, 21 nt, synthetic construct
  misc_feature 1..21: note = Synthetic
  source 1..21: mol_type = other RNA
aacagctgctgcatgtctgcg

SEQ ID NO: 9697 - RNA, 22 nt, synthetic construct
  misc_feature 1..22: note = Synthetic
  source 1..22: mol_type = other RNA
aaacagctgctgcatgtctgcg

SEQ ID NO: 9698 - RNA, 23 nt, synthetic construct
  misc_feature 1..23: note = Synthetic
  source 1..23: mol_type = other RNA
aaaacagctgctgcatgtctgcg

SEQ ID NO: 9699 - RNA, 24 nt, synthetic construct
  misc_feature 1..24: note = Synthetic
  source 1..24: mol_type = other RNA
aaaaacagctgctgcatgtctgcg

SEQ ID NO: 9700 - RNA, 18 nt, synthetic construct
  misc_feature 1..18: note = Synthetic
  source 1..18: mol_type = other RNA
cgacgggctgtcggatcg

SEQ ID NO: 9701 - RNA, 19 nt, synthetic construct
  misc_feature 1..19: note = Synthetic
  source 1..19: mol_type = other RNA
acgacgggctgtcggatcg

SEQ ID NO: 9702 - RNA, 21 nt, synthetic construct
  misc_feature 1..21: note = Synthetic
  source 1..21: mol_type = other RNA
gcacgacgggctgtcggatcg

SEQ ID NO: 9703 - RNA, 22 nt, synthetic construct
  misc_feature 1..22: note = Synthetic
  source 1..22: mol_type = other RNA
tgcacgacgggctgtcggatcg

SEQ ID NO: 9704 - RNA, 23 nt, synthetic construct
  misc_feature 1..23: note = Synthetic
  source 1..23: mol_type = other RNA
ctgcacgacgggctgtcggatcg

SEQ ID NO: 9705 - RNA, 24 nt, synthetic construct
  misc_feature 1..24: note = Synthetic
  source 1..24: mol_type = other RNA
gctgcacgacgggctgtcggatcg

SEQ ID NO: 9706 - RNA, 18 nt, synthetic construct
  misc_feature 1..18: note = Synthetic
  source 1..18: mol_type = other RNA
tcgctggggcactcctcg

SEQ ID NO: 9707 - RNA, 19 nt, synthetic construct
  misc_feature 1..19: note = Synthetic
  source 1..19: mol_type = other RNA
gtcgctggggcactcctcg

SEQ ID NO: 9708 - RNA, 21 nt, synthetic construct
  misc_feature 1..21: note = Synthetic
  source 1..21: mol_type = other RNA
gggtcgctggggcactcctcg

SEQ ID NO: 9709 - RNA, 22 nt, synthetic construct
  misc_feature 1..22: note = Synthetic
  source 1..22: mol_type = other RNA
ggggtcgctggggcactcctcg

SEQ ID NO: 9710 - RNA, 23 nt, synthetic construct
  misc_feature 1..23: note = Synthetic
  source 1..23: mol_type = other RNA
cggggtcgctggggcactcctcg

SEQ ID NO: 9711 - RNA, 24 nt, synthetic construct
  misc_feature 1..24: note = Synthetic
  source 1..24: mol_type = other RNA
acggggtcgctggggcactcctcg

SEQ ID NO: 9712 - RNA, 18 nt, synthetic construct
  misc_feature 1..18: note = Synthetic
  source 1..18: mol_type = other RNA
aggaaaaagctcgtctcg

SEQ ID NO: 9713 - RNA, 19 nt, synthetic construct
  misc_feature 1..19: note = Synthetic
  source 1..19: mol_type = other RNA
caggaaaaagctcgtctcg

SEQ ID NO: 9714 - RNA, 21 nt, synthetic construct
  misc_feature 1..21: note = Synthetic
  source 1..21: mol_type = other RNA
cccaggaaaaagctcgtctcg

SEQ ID NO: 9715 - RNA, 22 nt, synthetic construct
  misc_feature 1..22: note = Synthetic
  source 1..22: mol_type = other RNA
gcccaggaaaaagctcgtctcg

SEQ ID NO: 9716 - RNA, 23 nt, synthetic construct
  misc_feature 1..23: note = Synthetic
  source 1..23: mol_type = other RNA
tgcccaggaaaaagctcgtctcg

SEQ ID NO: 9717 - RNA, 24 nt, synthetic construct
  misc_feature 1..24: note = Synthetic
  source 1..24: mol_type = other RNA
ttgcccaggaaaaagctcgtctcg

SEQ ID NO: 9718 - RNA, 18 nt, synthetic construct
  misc_feature 1..18: note = Synthetic
  source 1..18: mol_type = other RNA
gccgggtagttgcggtcg

SEQ ID NO: 9719 - RNA, 19 nt, synthetic construct
  misc_feature 1..19: note = Synthetic
  source 1..19: mol_type = other RNA
cgccgggtagttgcggtcg

SEQ ID NO: 9720 - RNA, 21 nt, synthetic construct
  misc_feature 1..21: note = Synthetic
  source 1..21: mol_type = other RNA
accgccgggtagttgcggtcg

SEQ ID NO: 9721 - RNA, 22 nt, synthetic construct
  misc_feature 1..22: note = Synthetic
  source 1..22: mol_type = other RNA
caccgccgggtagttgcggtcg

SEQ ID NO: 9722 - RNA, 23 nt, synthetic construct
  misc_feature 1..23: note = Synthetic
  source 1..23: mol_type = other RNA
acaccgccgggtagttgcggtcg

SEQ ID NO: 9723 - RNA, 24 nt, synthetic construct
  misc_feature 1..24: note = Synthetic
  source 1..24: mol_type = other RNA
aacaccgccgggtagttgcggtcg

SEQ ID NO: 9724 - RNA, 18 nt, synthetic construct
  misc_feature 1..18: note = Synthetic
  source 1..18: mol_type = other RNA
gggtccgtcacggggtcg

SEQ ID NO: 9725 - RNA, 19 nt, synthetic construct
  misc_feature 1..19: note = Synthetic
  source 1..19: mol_type = other RNA
ggggtccgtcacggggtcg

SEQ ID NO: 9726 - RNA, 21 nt, synthetic construct
  misc_feature 1..21: note = Synthetic
  source 1..21: mol_type = other RNA
gcggggtccgtcacggggtcg

SEQ ID NO: 9727 - RNA, 22 nt, synthetic construct
  misc_feature 1..22: note = Synthetic
  source 1..22: mol_type = other RNA
cgcggggtccgtcacggggtcg

SEQ ID NO: 9728 - RNA, 23 nt, synthetic construct
  misc_feature 1..23: note = Synthetic
  source 1..23: mol_type = other RNA
gcgcggggtccgtcacggggtcg

SEQ ID NO: 9729 - RNA, 24 nt, synthetic construct
  misc_feature 1..24: note = Synthetic
  source 1..24: mol_type = other RNA
tgcgcggggtccgtcacggggtcg

SEQ ID NO: 9730 - RNA, 18 nt, synthetic construct
  misc_feature 1..18: note = Synthetic
  source 1..18: mol_type = other RNA
tacggattggcggcttcg

SEQ ID NO: 9731 - RNA, 19 nt, synthetic construct
  misc_feature 1..19: note = Synthetic
  source 1..19: mol_type = other RNA
gtacggattggcggcttcg

SEQ ID NO: 9732 - RNA, 21 nt, synthetic construct
  misc_feature 1..21: note = Synthetic
  source 1..21: mol_type = other RNA
ccgtacggattggcggcttcg

SEQ ID NO: 9733 - RNA, 22 nt, synthetic construct
  misc_feature 1..22: note = Synthetic
  source 1..22: mol_type = other RNA
cccgtacggattggcggcttcg

SEQ ID NO: 9734 - RNA, 23 nt, synthetic construct
  misc_feature 1..23: note = Synthetic
  source 1..23: mol_type = other RNA
ccccgtacggattggcggcttcg

SEQ ID NO: 9735 - RNA, 24 nt, synthetic construct
  misc_feature 1..24: note = Synthetic
  source 1..24: mol_type = other RNA
gccccgtacggattggcggcttcg

SEQ ID NO: 9736 - RNA, 18 nt, synthetic construct
  misc_feature 1..18: note = Synthetic
  source 1..18: mol_type = other RNA
aacaggcccaggggcagg

SEQ ID NO: 9737 - RNA, 19 nt, synthetic construct
  misc_feature 1..19: note = Synthetic
  source 1..19: mol_type = other RNA
gaacaggcccaggggcagg

SEQ ID NO: 9738 - RNA, 21 nt, synthetic construct
  misc_feature 1..21: note = Synthetic
  source 1..21: mol_type = other RNA
ttgaacaggcccaggggcagg

SEQ ID NO: 9739 - RNA, 22 nt, synthetic construct
  misc_feature 1..22: note = Synthetic
  source 1..22: mol_type = other RNA
attgaacaggcccaggggcagg

SEQ ID NO: 9740 - RNA, 23 nt, synthetic construct
  misc_feature 1..23: note = Synthetic
  source 1..23: mol_type = other RNA
gattgaacaggcccaggggcagg

SEQ ID NO: 9741 - RNA, 24 nt, synthetic construct
  misc_feature 1..24: note = Synthetic
  source 1..24: mol_type = other RNA
ggattgaacaggcccaggggcagg

SEQ ID NO: 9742 - RNA, 18 nt, synthetic construct
  misc_feature 1..18: note = Synthetic
  source 1..18: mol_type = other RNA
agcgtctgccggttcagg

SEQ ID NO: 9743 - RNA, 19 nt, synthetic construct
  misc_feature 1..19: note = Synthetic
  source 1..19: mol_type = other RNA
cagcgtctgccggttcagg

SEQ ID NO: 9744 - RNA, 21 nt, synthetic construct
  misc_feature 1..21: note = Synthetic
  source 1..21: mol_type = other RNA
tccagcgtctgccggttcagg

SEQ ID NO: 9745 - RNA, 22 nt, synthetic construct
  misc_feature 1..22: note = Synthetic
  source 1..22: mol_type = other RNA
gtccagcgtctgccggttcagg

SEQ ID NO: 9746 - RNA, 23 nt, synthetic construct
  misc_feature 1..23: note = Synthetic
  source 1..23: mol_type = other RNA
cgtccagcgtctgccggttcagg

SEQ ID NO: 9747 - RNA, 24 nt, synthetic construct
  misc_feature 1..24: note = Synthetic
  source 1..24: mol_type = other RNA
tcgtccagcgtctgccggttcagg

SEQ ID NO: 9748 - RNA, 18 nt, synthetic construct
  misc_feature 1..18: note = Synthetic
  source 1..18: mol_type = other RNA
gtgtcctccactttcagg

SEQ ID NO: 9749 - RNA, 19 nt, synthetic construct
  misc_feature 1..19: note = Synthetic
  source 1..19: mol_type = other RNA
ggtgtcctccactttcagg

SEQ ID NO: 9750 - RNA, 21 nt, synthetic construct
  misc_feature 1..21: note = Synthetic
  source 1..21: mol_type = other RNA
tcggtgtcctccactttcagg

SEQ ID NO: 9751 - RNA, 22 nt, synthetic construct
  misc_feature 1..22: note = Synthetic
  source 1..22: mol_type = other RNA
ttcggtgtcctccactttcagg

SEQ ID NO: 9752 - RNA, 23 nt, synthetic construct
  misc_feature 1..23: note = Synthetic
  source 1..23: mol_type = other RNA
cttcggtgtcctccactttcagg

SEQ ID NO: 9753 - RNA, 24 nt, synthetic construct
  misc_feature 1..24: note = Synthetic
  source 1..24: mol_type = other RNA
gcttcggtgtcctccactttcagg

SEQ ID NO: 9754 - RNA, 18 nt, synthetic construct
  misc_feature 1..18: note = Synthetic
  source 1..18: mol_type = other RNA
cgcgttgtccaggagagg

SEQ ID NO: 9755 - RNA, 19 nt, synthetic construct
  misc_feature 1..19: note = Synthetic
  source 1..19: mol_type = other RNA
ccgcgttgtccaggagagg

SEQ ID NO: 9756 - RNA, 21 nt, synthetic construct
  misc_feature 1..21: note = Synthetic
  source 1..21: mol_type = other RNA
tgccgcgttgtccaggagagg

SEQ ID NO: 9757 - RNA, 22 nt, synthetic construct
  misc_feature 1..22: note = Synthetic
  source 1..22: mol_type = other RNA
ctgccgcgttgtccaggagagg

SEQ ID NO: 9758 - RNA, 23 nt, synthetic construct
  misc_feature 1..23: note = Synthetic
  source 1..23: mol_type = other RNA
gctgccgcgttgtccaggagagg

SEQ ID NO: 9759 - RNA, 24 nt, synthetic construct
  misc_feature 1..24: note = Synthetic
  source 1..24: mol_type = other RNA
ggctgccgcgttgtccaggagagg

SEQ ID NO: 9760 - RNA, 18 nt, synthetic construct
  misc_feature 1..18: note = Synthetic
  source 1..18: mol_type = other RNA
cgggcactgcggaggagg

SEQ ID NO: 9761 - RNA, 19 nt, synthetic construct
  misc_feature 1..19: note = Synthetic
  source 1..19: mol_type = other RNA
gcgggcactgcggaggagg

SEQ ID NO: 9762 - RNA, 21 nt, synthetic construct
  misc_feature 1..21: note = Synthetic
  source 1..21: mol_type = other RNA
ttgcgggcactgcggaggagg

SEQ ID NO: 9763 - RNA, 22 nt, synthetic construct
  misc_feature 1..22: note = Synthetic
  source 1..22: mol_type = other RNA
gttgcgggcactgcggaggagg

SEQ ID NO: 9764 - RNA, 23 nt, synthetic construct
  misc_feature 1..23: note = Synthetic
  source 1..23: mol_type = other RNA
cgttgcgggcactgcggaggagg

SEQ ID NO: 9765 - RNA, 24 nt, synthetic construct
  misc_feature 1..24: note = Synthetic
  source 1..24: mol_type = other RNA
ccgttgcgggcactgcggaggagg

SEQ ID NO: 9766 - RNA, 18 nt, synthetic construct
  misc_feature 1..18: note = Synthetic
  source 1..18: mol_type = other RNA
gttggcccccagagccgg

SEQ ID NO: 9767 - RNA, 19 nt, synthetic construct
  misc_feature 1..19: note = Synthetic
  source 1..19: mol_type = other RNA
agttggcccccagagccgg

SEQ ID NO: 9768 - RNA, 21 nt, synthetic construct
  misc_feature 1..21: note = Synthetic
  source 1..21: mol_type = other RNA
gtagttggcccccagagccgg

SEQ ID NO: 9769 - RNA, 22 nt, synthetic construct
  misc_feature 1..22: note = Synthetic
  source 1..22: mol_type = other RNA
agtagttggcccccagagccgg

SEQ ID NO: 9770 - RNA, 23 nt, synthetic construct
  misc_feature 1..23: note = Synthetic
  source 1..23: mol_type = other RNA
aagtagttggcccccagagccgg

SEQ ID NO: 9771 - RNA, 24 nt, synthetic construct
  misc_feature 1..24: note = Synthetic
  source 1..24: mol_type = other RNA
aaagtagttggcccccagagccgg

SEQ ID NO: 9772 - RNA, 18 nt, synthetic construct
  misc_feature 1..18: note = Synthetic
  source 1..18: mol_type = other RNA
ctcccccgggccggccgg

SEQ ID NO: 9773 - RNA, 19 nt, synthetic construct
  misc_feature 1..19: note = Synthetic
  source 1..19: mol_type = other RNA
tctcccccgggccggccgg

SEQ ID NO: 9774 - RNA, 21 nt, synthetic construct
  misc_feature 1..21: note = Synthetic
  source 1..21: mol_type = other RNA
gatctcccccgggccggccgg

SEQ ID NO: 9775 - RNA, 22 nt, synthetic construct
  misc_feature 1..22: note = Synthetic
  source 1..22: mol_type = other RNA
ggatctcccccgggccggccgg

SEQ ID NO: 9776 - RNA, 23 nt, synthetic construct
  misc_feature 1..23: note = Synthetic
  source 1..23: mol_type = other RNA
tggatctcccccgggccggccgg

SEQ ID NO: 9777 - RNA, 24 nt, synthetic construct
  misc_feature 1..24: note = Synthetic
  source 1..24: mol_type = other RNA
ctggatctcccccgggccggccgg

SEQ ID NO: 9778 - RNA, 18 nt, synthetic construct
  misc_feature 1..18: note = Synthetic
  source 1..18: mol_type = other RNA
caggtcgcgcagggccgg

SEQ ID NO: 9779 - RNA, 19 nt, synthetic construct
  misc_feature 1..19: note = Synthetic
  source 1..19: mol_type = other RNA
acaggtcgcgcagggccgg

SEQ ID NO: 9780 - RNA, 21 nt, synthetic construct
  misc_feature 1..21: note = Synthetic
  source 1..21: mol_type = other RNA
cgacaggtcgcgcagggccgg

SEQ ID NO: 9781 - RNA, 22 nt, synthetic construct
  misc_feature 1..22: note = Synthetic
  source 1..22: mol_type = other RNA
gcgacaggtcgcgcagggccgg

SEQ ID NO: 9782 - RNA, 23 nt, synthetic construct
  misc_feature 1..23: note = Synthetic
  source 1..23: mol_type = other RNA
cgcgacaggtcgcgcagggccgg

SEQ ID NO: 9783 - RNA, 24 nt, synthetic construct
  misc_feature 1..24: note = Synthetic
  source 1..24: mol_type = other RNA
ccgcgacaggtcgcgcagggccgg

SEQ ID NO: 9784 - RNA, 18 nt, synthetic construct
  misc_feature 1..18: note = Synthetic
  source 1..18: mol_type = other RNA
cgggggttgcagggccgg

SEQ ID NO: 9785 - RNA, 19 nt, synthetic construct
  misc_feature 1..19: note = Synthetic
  source 1..19: mol_type = other RNA
ccgggggttgcagggccgg

SEQ ID NO: 9786 - RNA, 21 nt, synthetic construct
  misc_feature 1..21: note = Synthetic
  source 1..21: mol_type = other RNA
ccccgggggttgcagggccgg

SEQ ID NO: 9787 - RNA, 22 nt, synthetic construct
  misc_feature 1..22: note = Synthetic
  source 1..22: mol_type = other RNA
tccccgggggttgcagggccgg

SEQ ID NO: 9788 - RNA, 23 nt, synthetic construct
  misc_feature 1..23: note = Synthetic
  source 1..23: mol_type = other RNA
gtccccgggggttgcagggccgg

SEQ ID NO: 9789 - RNA, 24 nt, synthetic construct
  misc_feature 1..24: note = Synthetic
  source 1..24: mol_type = other RNA
cgtccccgggggttgcagggccgg

SEQ ID NO: 9790 - RNA, 18 nt, synthetic construct
  misc_feature 1..18: note = Synthetic
  source 1..18: mol_type = other RNA
ggatctcccccgggccgg

SEQ ID NO: 9791 - RNA, 19 nt, synthetic construct
  misc_feature 1..19: note = Synthetic
  source 1..19: mol_type = other RNA
tggatctcccccgggccgg

SEQ ID NO: 9792 - RNA, 21 nt, synthetic construct
  misc_feature 1..21: note = Synthetic
  source 1..21: mol_type = other RNA
cctggatctcccccgggccgg

SEQ ID NO: 9793 - RNA, 22 nt, synthetic construct
  misc_feature 1..22: note = Synthetic
  source 1..22: mol_type = other RNA
gcctggatctcccccgggccgg

SEQ ID NO: 9794 - RNA, 23 nt, synthetic construct
  misc_feature 1..23: note = Synthetic
  source 1..23: mol_type = other RNA
ggcctggatctcccccgggccgg

SEQ ID NO: 9795 - RNA, 24 nt, synthetic construct
  misc_feature 1..24: note = Synthetic
  source 1..24: mol_type = other RNA
tggcctggatctcccccgggccgg

SEQ ID NO: 9796 - RNA, 18 nt, synthetic construct
  misc_feature 1..18: note = Synthetic
  source 1..18: mol_type = other RNA
tgtctgcggcggggccgg

SEQ ID NO: 9797 - RNA, 19 nt, synthetic construct
  misc_feature 1..19: note = Synthetic
  source 1..19: mol_type = other RNA
atgtctgcggcggggccgg

SEQ ID NO: 9798 - RNA, 21 nt, synthetic construct
  misc_feature 1..21: note = Synthetic
  source 1..21: mol_type = other RNA
gcatgtctgcggcggggccgg

SEQ ID NO: 9799 - RNA, 22 nt, synthetic construct
  misc_feature 1..22: note = Synthetic
  source 1..22: mol_type = other RNA
tgcatgtctgcggcggggccgg

SEQ ID NO: 9800 - RNA, 23 nt, synthetic construct
  misc_feature 1..23: note = Synthetic
  source 1..23: mol_type = other RNA
ctgcatgtctgcggcggggccgg

SEQ ID NO: 9801 - RNA, 24 nt, synthetic construct
  misc_feature 1..24: note = Synthetic
  source 1..24: mol_type = other RNA
gctgcatgtctgcggcggggccgg

SEQ ID NO: 9802 - RNA, 18 nt, synthetic construct
  misc_feature 1..18: note = Synthetic
  source 1..18: mol_type = other RNA
agggtggcgtatacgcgg

SEQ ID NO: 9803 - RNA, 19 nt, synthetic construct
  misc_feature 1..19: note = Synthetic
  source 1..19: mol_type = other RNA
cagggtggcgtatacgcgg

SEQ ID NO: 9804 - RNA, 21 nt, synthetic construct
  misc_feature 1..21: note = Synthetic
  source 1..21: mol_type = other RNA
tgcagggtggcgtatacgcgg

SEQ ID NO: 9805 - RNA, 22 nt, synthetic construct
  misc_feature 1..22: note = Synthetic
  source 1..22: mol_type = other RNA
ctgcagggtggcgtatacgcgg

SEQ ID NO: 9806 - RNA, 23 nt, synthetic construct
  misc_feature 1..23: note = Synthetic
  source 1..23: mol_type = other RNA
tctgcagggtggcgtatacgcgg

SEQ ID NO: 9807 - RNA, 24 nt, synthetic construct
  misc_feature 1..24: note = Synthetic
  source 1..24: mol_type = other RNA
ttctgcagggtggcgtatacgcgg

SEQ ID NO: 9808 - RNA, 18 nt, synthetic construct
  misc_feature 1..18: note = Synthetic
  source 1..18: mol_type = other RNA
ccgttgcgggcactgcgg

SEQ ID NO: 9809 - RNA, 19 nt, synthetic construct
  misc_feature 1..19: note = Synthetic
  source 1..19: mol_type = other RNA
cccgttgcgggcactgcgg

SEQ ID NO: 9810 - RNA, 21 nt, synthetic construct
  misc_feature 1..21: note = Synthetic
  source 1..21: mol_type = other RNA
tccccgttgcgggcactgcgg

SEQ ID NO: 9811 - RNA, 22 nt, synthetic construct
  misc_feature 1..22: note = Synthetic
  source 1..22: mol_type = other RNA
ttccccgttgcgggcactgcgg

SEQ ID NO: 9812 - RNA, 23 nt, synthetic construct
  misc_feature 1..23: note = Synthetic
  source 1..23: mol_type = other RNA
cttccccgttgcgggcactgcgg

SEQ ID NO: 9813 - RNA, 24 nt, synthetic construct
  misc_feature 1..24: note = Synthetic
  source 1..24: mol_type = other RNA
gcttccccgttgcgggcactgcgg

SEQ ID NO: 9814 - RNA, 18 nt, synthetic construct
  misc_feature 1..18: note = Synthetic
  source 1..18: mol_type = other RNA
gctgctgcatgtctgcgg

SEQ ID NO: 9815 - RNA, 19 nt, synthetic construct
  misc_feature 1..19: note = Synthetic
  source 1..19: mol_type = other RNA
agctgctgcatgtctgcgg

SEQ ID NO: 9816 - RNA, 21 nt, synthetic construct
  misc_feature 1..21: note = Synthetic
  source 1..21: mol_type = other RNA
acagctgctgcatgtctgcgg

SEQ ID NO: 9817 - RNA, 22 nt, synthetic construct
  misc_feature 1..22: note = Synthetic
  source 1..22: mol_type = other RNA
aacagctgctgcatgtctgcgg

SEQ ID NO: 9818 - RNA, 23 nt, synthetic construct
  misc_feature 1..23: note = Synthetic
  source 1..23: mol_type = other RNA
aaacagctgctgcatgtctgcgg

SEQ ID NO: 9819 - RNA, 24 nt, synthetic construct
  misc_feature 1..24: note = Synthetic
  source 1..24: mol_type = other RNA
aaaacagctgctgcatgtctgcgg

SEQ ID NO: 9820 - RNA, 18 nt, synthetic construct
  misc_feature 1..18: note = Synthetic
  source 1..18: mol_type = other RNA
agctggccgtcgttgcgg

SEQ ID NO: 9821 - RNA, 19 nt, synthetic construct
  misc_feature 1..19: note = Synthetic
  source 1..19: mol_type = other RNA
cagctggccgtcgttgcgg

SEQ ID NO: 9822 - RNA, 21 nt, synthetic construct
  misc_feature 1..21: note = Synthetic
  source 1..21: mol_type = other RNA
agcagctggccgtcgttgcgg

SEQ ID NO: 9823 - RNA, 22 nt, synthetic construct
  misc_feature 1..22: note = Synthetic
  source 1..22: mol_type = other RNA
cagcagctggccgtcgttgcgg

SEQ ID NO: 9824 - RNA, 23 nt, synthetic construct
  misc_feature 1..23: note = Synthetic
  source 1..23: mol_type = other RNA
gcagcagctggccgtcgttgcgg

SEQ ID NO: 9825 - RNA, 24 nt, synthetic construct
  misc_feature 1..24: note = Synthetic
  source 1..24: mol_type = other RNA
tgcagcagctggccgtcgttgcgg

SEQ ID NO: 9826 - RNA, 18 nt, synthetic construct
  misc_feature 1..18: note = Synthetic
  source 1..18: mol_type = other RNA
gcgacaggtcgcgcaggg

SEQ ID NO: 9827 - RNA, 19 nt, synthetic construct
  misc_feature 1..19: note = Synthetic
  source 1..19: mol_type = other RNA
cgcgacaggtcgcgcaggg

SEQ ID NO: 9828 - RNA, 21 nt, synthetic construct
  misc_feature 1..21: note = Synthetic
  source 1..21: mol_type = other RNA
gccgcgacaggtcgcgcaggg

SEQ ID NO: 9829 - RNA, 22 nt, synthetic construct
  misc_feature 1..22: note = Synthetic
  source 1..22: mol_type = other RNA
tgccgcgacaggtcgcgcaggg

SEQ ID NO: 9830 - RNA, 23 nt, synthetic construct
  misc_feature 1..23: note = Synthetic
  source 1..23: mol_type = other RNA
ctgccgcgacaggtcgcgcaggg

SEQ ID NO: 9831 - RNA, 24 nt, synthetic construct
  misc_feature 1..24: note = Synthetic
  source 1..24: mol_type = other RNA
cctgccgcgacaggtcgcgcaggg

SEQ ID NO: 9832 - RNA, 18 nt, synthetic construct
  misc_feature 1..18: note = Synthetic
  source 1..18: mol_type = other RNA
cccgaacacggggacggg

SEQ ID NO: 9833 - RNA, 19 nt, synthetic construct
  misc_feature 1..19: note = Synthetic
  source 1..19: mol_type = other RNA
acccgaacacggggacggg

SEQ ID NO: 9834 - RNA, 21 nt, synthetic construct
  misc_feature 1..21: note = Synthetic
  source 1..21: mol_type = other RNA
gcacccgaacacggggacggg

SEQ ID NO: 9835 - RNA, 22 nt, synthetic construct
  misc_feature 1..22: note = Synthetic
  source 1..22: mol_type = other RNA
cgcacccgaacacggggacggg

SEQ ID NO: 9836 - RNA, 23 nt, synthetic construct
  misc_feature 1..23: note = Synthetic
  source 1..23: mol_type = other RNA
gcgcacccgaacacggggacggg

SEQ ID NO: 9837 - RNA, 24 nt, synthetic construct
  misc_feature 1..24: note = Synthetic
  source 1..24: mol_type = other RNA
ggcgcacccgaacacggggacggg

SEQ ID NO: 9838 - RNA, 18 nt, synthetic construct
  misc_feature 1..18: note = Synthetic
  source 1..18: mol_type = other RNA
gaacagcgcgtggacggg

SEQ ID NO: 9839 - RNA, 19 nt, synthetic construct
  misc_feature 1..19: note = Synthetic
  source 1..19: mol_type = other RNA
cgaacagcgcgtggacggg

SEQ ID NO: 9840 - RNA, 21 nt, synthetic construct
  misc_feature 1..21: note = Synthetic
  source 1..21: mol_type = other RNA
ggcgaacagcgcgtggacggg

SEQ ID NO: 9841 - RNA, 22 nt, synthetic construct
  misc_feature 1..22: note = Synthetic
  source 1..22: mol_type = other RNA
cggcgaacagcgcgtggacggg

SEQ ID NO: 9842 - RNA, 23 nt, synthetic construct
  misc_feature 1..23: note = Synthetic
  source 1..23: mol_type = other RNA
ccggcgaacagcgcgtggacggg

SEQ ID NO: 9843 - RNA, 24 nt, synthetic construct
  misc_feature 1..24: note = Synthetic
  source 1..24: mol_type = other RNA
cccggcgaacagcgcgtggacggg

SEQ ID NO: 9844 - RNA, 18 nt, synthetic construct
  misc_feature 1..18: note = Synthetic
  source 1..18: mol_type = other RNA
ggtgaacccaaacccggg

SEQ ID NO: 9845 - RNA, 19 nt, synthetic construct
  misc_feature 1..19: note = Synthetic
  source 1..19: mol_type = other RNA
cggtgaacccaaacccggg

SEQ ID NO: 9846 - RNA, 21 nt, synthetic construct
  misc_feature 1..21: note = Synthetic
  source 1..21: mol_type = other RNA
gacggtgaacccaaacccggg

SEQ ID NO: 9847 - RNA, 22 nt, synthetic construct
  misc_feature 1..22: note = Synthetic
  source 1..22: mol_type = other RNA
cgacggtgaacccaaacccggg

SEQ ID NO: 9848 - RNA, 23 nt, synthetic construct
  misc_feature 1..23: note = Synthetic
  source 1..23: mol_type = other RNA
acgacggtgaacccaaacccggg

SEQ ID NO: 9849 - RNA, 24 nt, synthetic construct
  misc_feature 1..24: note = Synthetic
  source 1..24: mol_type = other RNA
gacgacggtgaacccaaacccggg

SEQ ID NO: 9850 - RNA, 18 nt, synthetic construct
  misc_feature 1..18: note = Synthetic
  source 1..18: mol_type = other RNA
aggtcgcgcagggccggg

SEQ ID NO: 9851 - RNA, 19 nt, synthetic construct
  misc_feature 1..19: note = Synthetic
  source 1..19: mol_type = other RNA
caggtcgcgcagggccggg

SEQ ID NO: 9852 - RNA, 21 nt, synthetic construct
  misc_feature 1..21: note = Synthetic
  source 1..21: mol_type = other RNA
gacaggtcgcgcagggccggg

SEQ ID NO: 9853 - RNA, 22 nt, synthetic construct
  misc_feature 1..22: note = Synthetic
  source 1..22: mol_type = other RNA
cgacaggtcgcgcagggccggg

SEQ ID NO: 9854 - RNA, 23 nt, synthetic construct
  misc_feature 1..23: note = Synthetic
  source 1..23: mol_type = other RNA
gcgacaggtcgcgcagggccggg

SEQ ID NO: 9855 - RNA, 24 nt, synthetic construct
  misc_feature 1..24: note = Synthetic
  source 1..24: mol_type = other RNA
cgcgacaggtcgcgcagggccggg

SEQ ID NO: 9856 - RNA, 18 nt, synthetic construct
  misc_feature 1..18: note = Synthetic
  source 1..18: mol_type = other RNA
aaaaaaacagctggcggg

SEQ ID NO: 9857 - RNA, 19 nt, synthetic construct
  misc_feature 1..19: note = Synthetic
  source 1..19: mol_type = other RNA
caaaaaaacagctggcggg

SEQ ID NO: 9858 - RNA, 21 nt, synthetic construct
  misc_feature 1..21: note = Synthetic
  source 1..21: mol_type = other RNA
cccaaaaaaacagctggcggg

SEQ ID NO: 9859 - RNA, 22 nt, synthetic construct
  misc_feature 1..22: note = Synthetic
  source 1..22: mol_type = other RNA
ccccaaaaaaacagctggcggg

SEQ ID NO: 9860 - RNA, 23 nt, synthetic construct
  misc_feature 1..23: note = Synthetic
  source 1..23: mol_type = other RNA
cccccaaaaaaacagctggcggg

SEQ ID NO: 9861 - RNA, 24 nt, synthetic construct
  misc_feature 1..24: note = Synthetic
  source 1..24: mol_type = other RNA
tcccccaaaaaaacagctggcggg

SEQ ID NO: 9862 - RNA, 18 nt, synthetic construct
  misc_feature 1..18: note = Synthetic
  source 1..18: mol_type = other RNA
attgaacaggcccagggg

SEQ ID NO: 9863 - RNA, 19 nt, synthetic construct
  misc_feature 1..19: note = Synthetic
  source 1..19: mol_type = other RNA
gattgaacaggcccagggg

SEQ ID NO: 9864 - RNA, 21 nt, synthetic construct
  misc_feature 1..21: note = Synthetic
  source 1..21: mol_type = other RNA
cggattgaacaggcccagggg

SEQ ID NO: 9865 - RNA, 22 nt, synthetic construct
  misc_feature 1..22: note = Synthetic
  source 1..22: mol_type = other RNA
ccggattgaacaggcccagggg

SEQ ID NO: 9866 - RNA, 23 nt, synthetic construct
  misc_feature 1..23: note = Synthetic
  source 1..23: mol_type = other RNA
accggattgaacaggcccagggg

SEQ ID NO: 9867 - RNA, 24 nt, synthetic construct
  misc_feature 1..24: note = Synthetic
  source 1..24: mol_type = other RNA
gaccggattgaacaggcccagggg

SEQ ID NO: 9868 - RNA, 18 nt, synthetic construct
  misc_feature 1..18: note = Synthetic
  source 1..18: mol_type = other RNA
aagaacttaaagcagggg

SEQ ID NO: 9869 - RNA, 19 nt, synthetic construct
  misc_feature 1..19: note = Synthetic
  source 1..19: mol_type = other RNA
aaagaacttaaagcagggg

SEQ ID NO: 9870 - RNA, 21 nt, synthetic construct
  misc_feature 1..21: note = Synthetic
  source 1..21: mol_type = other RNA
gtaaagaacttaaagcagggg

SEQ ID NO: 9871 - RNA, 22 nt, synthetic construct
  misc_feature 1..22: note = Synthetic
  source 1..22: mol_type = other RNA
cgtaaagaacttaaagcagggg

SEQ ID NO: 9872 - RNA, 23 nt, synthetic construct
  misc_feature 1..23: note = Synthetic
  source 1..23: mol_type = other RNA
acgtaaagaacttaaagcagggg

SEQ ID NO: 9873 - RNA, 24 nt, synthetic construct
  misc_feature 1..24: note = Synthetic
  source 1..24: mol_type = other RNA
gacgtaaagaacttaaagcagggg

SEQ ID NO: 9874 - RNA, 18 nt, synthetic construct
  misc_feature 1..18: note = Synthetic
  source 1..18: mol_type = other RNA
gcgcacccgaacacgggg

SEQ ID NO: 9875 - RNA, 19 nt, synthetic construct
  misc_feature 1..19: note = Synthetic
  source 1..19: mol_type = other RNA
ggcgcacccgaacacgggg

SEQ ID NO: 9876 - RNA, 21 nt, synthetic construct
  misc_feature 1..21: note = Synthetic
  source 1..21: mol_type = other RNA
tgggcgcacccgaacacgggg

SEQ ID NO: 9877 - RNA, 22 nt, synthetic construct
  misc_feature 1..22: note = Synthetic
  source 1..22: mol_type = other RNA
ctgggcgcacccgaacacgggg

SEQ ID NO: 9878 - RNA, 23 nt, synthetic construct
  misc_feature 1..23: note = Synthetic
  source 1..23: mol_type = other RNA
cctgggcgcacccgaacacgggg

SEQ ID NO: 9879 - RNA, 24 nt, synthetic construct
  misc_feature 1..24: note = Synthetic
  source 1..24: mol_type = other RNA
acctgggcgcacccgaacacgggg

SEQ ID NO: 9880 - RNA, 18 nt, synthetic construct
  misc_feature 1..18: note = Synthetic
  source 1..18: mol_type = other RNA
aacagcgcgtggacgggg

SEQ ID NO: 9881 - RNA, 19 nt, synthetic construct
  misc_feature 1..19: note = Synthetic
  source 1..19: mol_type = other RNA
gaacagcgcgtggacgggg

SEQ ID NO: 9882 - RNA, 21 nt, synthetic construct
  misc_feature 1..21: note = Synthetic
  source 1..21: mol_type = other RNA
gcgaacagcgcgtggacgggg

SEQ ID NO: 9883 - RNA, 22 nt, synthetic construct
  misc_feature 1..22: note = Synthetic
  source 1..22: mol_type = other RNA
ggcgaacagcgcgtggacgggg

SEQ ID NO: 9884 - RNA, 23 nt, synthetic construct
  misc_feature 1..23: note = Synthetic
  source 1..23: mol_type = other RNA
cggcgaacagcgcgtggacgggg

SEQ ID NO: 9885 - RNA, 24 nt, synthetic construct
  misc_feature 1..24: note = Synthetic
  source 1..24: mol_type = other RNA
ccggcgaacagcgcgtggacgggg

SEQ ID NO: 9886 - RNA, 18 nt, synthetic construct
  misc_feature 1..18: note = Synthetic
  source 1..18: mol_type = other RNA
ggatccgggtggccgggg

SEQ ID NO: 9887 - RNA, 19 nt, synthetic construct
  misc_feature 1..19: note = Synthetic
  source 1..19: mol_type = other RNA
gggatccgggtggccgggg

SEQ ID NO: 9888 - RNA, 21 nt, synthetic construct
  misc_feature 1..21: note = Synthetic
  source 1..21: mol_type = other RNA
cggggatccgggtggccgggg

SEQ ID NO: 9889 - RNA, 22 nt, synthetic construct
  misc_feature 1..22: note = Synthetic
  source 1..22: mol_type = other RNA
gcggggatccgggtggccgggg

SEQ ID NO: 9890 - RNA, 23 nt, synthetic construct
  misc_feature 1..23: note = Synthetic
  source 1..23: mol_type = other RNA
cgcggggatccgggtggccgggg

SEQ ID NO: 9891 - RNA, 24 nt, synthetic construct
  misc_feature 1..24: note = Synthetic
  source 1..24: mol_type = other RNA
gcgcggggatccgggtggccgggg

SEQ ID NO: 9892 - RNA, 18 nt, synthetic construct
  misc_feature 1..18: note = Synthetic
  source 1..18: mol_type = other RNA
aaaaaacagctggcgggg

SEQ ID NO: 9893 - RNA, 19 nt, synthetic construct
  misc_feature 1..19: note = Synthetic
  source 1..19: mol_type = other RNA
aaaaaaacagctggcgggg

SEQ ID NO: 9894 - RNA, 21 nt, synthetic construct
  misc_feature 1..21: note = Synthetic
  source 1..21: mol_type = other RNA
ccaaaaaaacagctggcgggg

SEQ ID NO: 9895 - RNA, 22 nt, synthetic construct
  misc_feature 1..22: note = Synthetic
  source 1..22: mol_type = other RNA
cccaaaaaaacagctggcgggg

SEQ ID NO: 9896 - RNA, 23 nt, synthetic construct
  misc_feature 1..23: note = Synthetic
  source 1..23: mol_type = other RNA
ccccaaaaaaacagctggcgggg

SEQ ID NO: 9897 - RNA, 24 nt, synthetic construct
  misc_feature 1..24: note = Synthetic
  source 1..24: mol_type = other RNA
cccccaaaaaaacagctggcgggg

SEQ ID NO: 9898 - RNA, 18 nt, synthetic construct
  misc_feature 1..18: note = Synthetic
  source 1..18: mol_type = other RNA
atggcgcccaccaggggg

SEQ ID NO: 9899 - RNA, 19 nt, synthetic construct
  misc_feature 1..19: note = Synthetic
  source 1..19: mol_type = other RNA
catggcgcccaccaggggg

SEQ ID NO: 9900 - RNA, 21 nt, synthetic construct
  misc_feature 1..21: note = Synthetic
  source 1..21: mol_type = other RNA
tccatggcgcccaccaggggg

SEQ ID NO: 9901 - RNA, 22 nt, synthetic construct
  misc_feature 1..22: note = Synthetic
  source 1..22: mol_type = other RNA
gtccatggcgcccaccaggggg

SEQ ID NO: 9902 - RNA, 23 nt, synthetic construct
  misc_feature 1..23: note = Synthetic
  source 1..23: mol_type = other RNA
ggtccatggcgcccaccaggggg

SEQ ID NO: 9903 - RNA, 24 nt, synthetic construct
  misc_feature 1..24: note = Synthetic
  source 1..24: mol_type = other RNA
aggtccatggcgcccaccaggggg

SEQ ID NO: 9904 - RNA, 18 nt, synthetic construct
  misc_feature 1..18: note = Synthetic
  source 1..18: mol_type = other RNA
gatccgggtggccggggg

SEQ ID NO: 9905 - RNA, 19 nt, synthetic construct
  misc_feature 1..19: note = Synthetic
  source 1..19: mol_type = other RNA
ggatccgggtggccggggg

SEQ ID NO: 9906 - RNA, 21 nt, synthetic construct
  misc_feature 1..21: note = Synthetic
  source 1..21: mol_type = other RNA
ggggatccgggtggccggggg

SEQ ID NO: 9907 - RNA, 22 nt, synthetic construct
  misc_feature 1..22: note = Synthetic
  source 1..22: mol_type = other RNA
cggggatccgggtggccggggg

SEQ ID NO: 9908 - RNA, 23 nt, synthetic construct
  misc_feature 1..23: note = Synthetic
  source 1..23: mol_type = other RNA
gcggggatccgggtggccggggg

SEQ ID NO: 9909 - RNA, 24 nt, synthetic construct
  misc_feature 1..24: note = Synthetic
  source 1..24: mol_type = other RNA
cgcggggatccgggtggccggggg

SEQ ID NO: 9910 - RNA, 18 nt, synthetic construct
  misc_feature 1..18: note = Synthetic
  source 1..18: mol_type = other RNA
ccccaaaaaaacagctgg

SEQ ID NO: 9911 - RNA, 19 nt, synthetic construct
  misc_feature 1..19: note = Synthetic
  source 1..19: mol_type = other RNA
cccccaaaaaaacagctgg

SEQ ID NO: 9912 - RNA, 21 nt, synthetic construct
  misc_feature 1..21: note = Synthetic
  source 1..21: mol_type = other RNA
ttcccccaaaaaaacagctgg

SEQ ID NO: 9913 - RNA, 22 nt, synthetic construct
  misc_feature 1..22: note = Synthetic
  source 1..22: mol_type = other RNA
cttcccccaaaaaaacagctgg

SEQ ID NO: 9914 - RNA, 23 nt, synthetic construct
  misc_feature 1..23: note = Synthetic
  source 1..23: mol_type = other RNA
ccttcccccaaaaaaacagctgg

SEQ ID NO: 9915 - RNA, 24 nt, synthetic construct
  misc_feature 1..24: note = Synthetic
  source 1..24: mol_type = other RNA
tccttcccccaaaaaaacagctgg

SEQ ID NO: 9916 - RNA, 18 nt, synthetic construct
  misc_feature 1..18: note = Synthetic
  source 1..18: mol_type = other RNA
acgttcgcgcgcggctgg

SEQ ID NO: 9917 - RNA, 19 nt, synthetic construct
  misc_feature 1..19: note = Synthetic
  source 1..19: mol_type = other RNA
cacgttcgcgcgcggctgg

SEQ ID NO: 9918 - RNA, 21 nt, synthetic construct
  misc_feature 1..21: note = Synthetic
  source 1..21: mol_type = other RNA
tccacgttcgcgcgcggctgg

SEQ ID NO: 9919 - RNA, 22 nt, synthetic construct
  misc_feature 1..22: note = Synthetic
  source 1..22: mol_type = other RNA
gtccacgttcgcgcgcggctgg

SEQ ID NO: 9920 - RNA, 23 nt, synthetic construct
  misc_feature 1..23: note = Synthetic
  source 1..23: mol_type = other RNA
ggtccacgttcgcgcgcggctgg

SEQ ID NO: 9921 - RNA, 24 nt, synthetic construct
  misc_feature 1..24: note = Synthetic
  source 1..24: mol_type = other RNA
aggtccacgttcgcgcgcggctgg

SEQ ID NO: 9922 - RNA, 18 nt, synthetic construct
  misc_feature 1..18: note = Synthetic
  source 1..18: mol_type = other RNA
ccggcgaacagcgcgtgg

SEQ ID NO: 9923 - RNA, 19 nt, synthetic construct
  misc_feature 1..19: note = Synthetic
  source 1..19: mol_type = other RNA
cccggcgaacagcgcgtgg

SEQ ID NO: 9924 - RNA, 21 nt, synthetic construct
  misc_feature 1..21: note = Synthetic
  source 1..21: mol_type = other RNA
gccccggcgaacagcgcgtgg

SEQ ID NO: 9925 - RNA, 22 nt, synthetic construct
  misc_feature 1..22: note = Synthetic
  source 1..22: mol_type = other RNA
ggccccggcgaacagcgcgtgg

SEQ ID NO: 9926 - RNA, 23 nt, synthetic construct
  misc_feature 1..23: note = Synthetic
  source 1..23: mol_type = other RNA
cggccccggcgaacagcgcgtgg

SEQ ID NO: 9927 - RNA, 24 nt, synthetic construct
  misc_feature 1..24: note = Synthetic
  source 1..24: mol_type = other RNA
tcggccccggcgaacagcgcgtgg

SEQ ID NO: 9928 - RNA, 18 nt, synthetic construct
  misc_feature 1..18: note = Synthetic
  source 1..18: mol_type = other RNA
gcgcggggatccgggtgg

SEQ ID NO: 9929 - RNA, 19 nt, synthetic construct
  misc_feature 1..19: note = Synthetic
  source 1..19: mol_type = other RNA
ggcgcggggatccgggtgg

SEQ ID NO: 9930 - RNA, 21 nt, synthetic construct
  misc_feature 1..21: note = Synthetic
  source 1..21: mol_type = other RNA
aaggcgcggggatccgggtgg

SEQ ID NO: 9931 - RNA, 22 nt, synthetic construct
  misc_feature 1..22: note = Synthetic
  source 1..22: mol_type = other RNA
gaaggcgcggggatccgggtgg

SEQ ID NO: 9932 - RNA, 23 nt, synthetic construct
  misc_feature 1..23: note = Synthetic
  source 1..23: mol_type = other RNA
ggaaggcgcggggatccgggtgg

SEQ ID NO: 9933 - RNA, 24 nt, synthetic construct
  misc_feature 1..24: note = Synthetic
  source 1..24: mol_type = other RNA
gggaaggcgcggggatccgggtgg

SEQ ID NO: 9934 - RNA, 18 nt, synthetic construct
  misc_feature 1..18: note = Synthetic
  source 1..18: mol_type = other RNA
gaacggcggcgatggtgg

SEQ ID NO: 9935 - RNA, 19 nt, synthetic construct
  misc_feature 1..19: note = Synthetic
  source 1..19: mol_type = other RNA
cgaacggcggcgatggtgg

SEQ ID NO: 9936 - RNA, 21 nt, synthetic construct
  misc_feature 1..21: note = Synthetic
  source 1..21: mol_type = other RNA
cgcgaacggcggcgatggtgg

SEQ ID NO: 9937 - RNA, 22 nt, synthetic construct
  misc_feature 1..22: note = Synthetic
  source 1..22: mol_type = other RNA
ccgcgaacggcggcgatggtgg

SEQ ID NO: 9938 - RNA, 23 nt, synthetic construct
  misc_feature 1..23: note = Synthetic
  source 1..23: mol_type = other RNA
cccgcgaacggcggcgatggtgg

SEQ ID NO: 9939 - RNA, 24 nt, synthetic construct
  misc_feature 1..24: note = Synthetic
  source 1..24: mol_type = other RNA
ccccgcgaacggcggcgatggtgg

SEQ ID NO: 9940 - RNA, 18 nt, synthetic construct
  misc_feature 1..18: note = Synthetic
  source 1..18: mol_type = other RNA
acctgcagcgtgagcatg

SEQ ID NO: 9941 - RNA, 19 nt, synthetic construct
  misc_feature 1..19: note = Synthetic
  source 1..19: mol_type = other RNA
cacctgcagcgtgagcatg

SEQ ID NO: 9942 - RNA, 21 nt, synthetic construct
  misc_feature 1..21: note = Synthetic
  source 1..21: mol_type = other RNA
agcacctgcagcgtgagcatg

SEQ ID NO: 9943 - RNA, 22 nt, synthetic construct
  misc_feature 1..22: note = Synthetic
  source 1..22: mol_type = other RNA
cagcacctgcagcgtgagcatg

SEQ ID NO: 9944 - RNA, 23 nt, synthetic construct
  misc_feature 1..23: note = Synthetic
  source 1..23: mol_type = other RNA
ccagcacctgcagcgtgagcatg

SEQ ID NO: 9945 - RNA, 24 nt, synthetic construct
  misc_feature 1..24: note = Synthetic
  source 1..24: mol_type = other RNA
gccagcacctgcagcgtgagcatg

SEQ ID NO: 9946 - RNA, 18 nt, synthetic construct
  misc_feature 1..18: note = Synthetic
  source 1..18: mol_type = other RNA
gatggtatggtccagatg

SEQ ID NO: 9947 - RNA, 19 nt, synthetic construct
  misc_feature 1..19: note = Synthetic
  source 1..19: mol_type = other RNA
ggatggtatggtccagatg

SEQ ID NO: 9948 - RNA, 21 nt, synthetic construct
  misc_feature 1..21: note = Synthetic
  source 1..21: mol_type = other RNA
ttggatggtatggtccagatg

SEQ ID NO: 9949 - RNA, 22 nt, synthetic construct
  misc_feature 1..22: note = Synthetic
  source 1..22: mol_type = other RNA
tttggatggtatggtccagatg

SEQ ID NO: 9950 - RNA, 23 nt, synthetic construct
  misc_feature 1..23: note = Synthetic
  source 1..23: mol_type = other RNA
ttttggatggtatggtccagatg

SEQ ID NO: 9951 - RNA, 24 nt, synthetic construct
  misc_feature 1..24: note = Synthetic
  source 1..24: mol_type = other RNA
attttggatggtatggtccagatg

SEQ ID NO: 9952 - RNA, 18 nt, synthetic construct
  misc_feature 1..18: note = Synthetic
  source 1..18: mol_type = other RNA
tccccgttgcgggcactg

SEQ ID NO: 9953 - RNA, 19 nt, synthetic construct
  misc_feature 1..19: note = Synthetic
  source 1..19: mol_type = other RNA
ttccccgttgcgggcactg

SEQ ID NO: 9954 - RNA, 21 nt, synthetic construct
  misc_feature 1..21: note = Synthetic
  source 1..21: mol_type = other RNA
gcttccccgttgcgggcactg

SEQ ID NO: 9955 - RNA, 22 nt, synthetic construct
  misc_feature 1..22: note = Synthetic
  source 1..22: mol_type = other RNA
ggcttccccgttgcgggcactg

SEQ ID NO: 9956 - RNA, 23 nt, synthetic construct
  misc_feature 1..23: note = Synthetic
  source 1..23: mol_type = other RNA
gggcttccccgttgcgggcactg

SEQ ID NO: 9957 - RNA, 24 nt, synthetic construct
  misc_feature 1..24: note = Synthetic
  source 1..24: mol_type = other RNA
tgggcttccccgttgcgggcactg

SEQ ID NO: 9958 - RNA, 18 nt, synthetic construct
  misc_feature 1..18: note = Synthetic
  source 1..18: mol_type = other RNA
cactttcaggaaggactg

SEQ ID NO: 9959 - RNA, 19 nt, synthetic construct
  misc_feature 1..19: note = Synthetic
  source 1..19: mol_type = other RNA
ccactttcaggaaggactg

SEQ ID NO: 9960 - RNA, 21 nt, synthetic construct
  misc_feature 1..21: note = Synthetic
  source 1..21: mol_type = other RNA
ctccactttcaggaaggactg

SEQ ID NO: 9961 - RNA, 22 nt, synthetic construct
  misc_feature 1..22: note = Synthetic
  source 1..22: mol_type = other RNA
cctccactttcaggaaggactg

SEQ ID NO: 9962 - RNA, 23 nt, synthetic construct
  misc_feature 1..23: note = Synthetic
  source 1..23: mol_type = other RNA
tcctccactttcaggaaggactg

SEQ ID NO: 9963 - RNA, 24 nt, synthetic construct
  misc_feature 1..24: note = Synthetic
  source 1..24: mol_type = other RNA
gtcctccactttcaggaaggactg

SEQ ID NO: 9964 - RNA, 18 nt, synthetic construct
  misc_feature 1..18: note = Synthetic
  source 1..18: mol_type = other RNA
agtcacaaagcggtcctg

SEQ ID NO: 9965 - RNA, 19 nt, synthetic construct
  misc_feature 1..19: note = Synthetic
  source 1..19: mol_type = other RNA
cagtcacaaagcggtcctg

SEQ ID NO: 9966 - RNA, 21 nt, synthetic construct
  misc_feature 1..21: note = Synthetic
  source 1..21: mol_type = other RNA
ctcagtcacaaagcggtcctg

SEQ ID NO: 9967 - RNA, 22 nt, synthetic construct
  misc_feature 1..22: note = Synthetic
  source 1..22: mol_type = other RNA
tctcagtcacaaagcggtcctg

SEQ ID NO: 9968 - RNA, 23 nt, synthetic construct
  misc_feature 1..23: note = Synthetic
  source 1..23: mol_type = other RNA
ttctcagtcacaaagcggtcctg

SEQ ID NO: 9969 - RNA, 24 nt, synthetic construct
  misc_feature 1..24: note = Synthetic
  source 1..24: mol_type = other RNA
gttctcagtcacaaagcggtcctg

SEQ ID NO: 9970 - RNA, 18 nt, synthetic construct
  misc_feature 1..18: note = Synthetic
  source 1..18: mol_type = other RNA
cccccaaaaaaacagctg

SEQ ID NO: 9971 - RNA, 19 nt, synthetic construct
  misc_feature 1..19: note = Synthetic
  source 1..19: mol_type = other RNA
tcccccaaaaaaacagctg

SEQ ID NO: 9972 - RNA, 21 nt, synthetic construct
  misc_feature 1..21: note = Synthetic
  source 1..21: mol_type = other RNA
cttcccccaaaaaaacagctg

SEQ ID NO: 9973 - RNA, 22 nt, synthetic construct
  misc_feature 1..22: note = Synthetic
  source 1..22: mol_type = other RNA
ccttcccccaaaaaaacagctg

SEQ ID NO: 9974 - RNA, 23 nt, synthetic construct
  misc_feature 1..23: note = Synthetic
  source 1..23: mol_type = other RNA
tccttcccccaaaaaaacagctg

SEQ ID NO: 9975 - RNA, 24 nt, synthetic construct
  misc_feature 1..24: note = Synthetic
  source 1..24: mol_type = other RNA
gtccttcccccaaaaaaacagctg

SEQ ID NO: 9976 - RNA, 18 nt, synthetic construct
  misc_feature 1..18: note = Synthetic
  source 1..18: mol_type = other RNA
ggtatggtccagatgctg

SEQ ID NO: 9977 - RNA, 19 nt, synthetic construct
  misc_feature 1..19: note = Synthetic
  source 1..19: mol_type = other RNA
tggtatggtccagatgctg

SEQ ID NO: 9978 - RNA, 21 nt, synthetic construct
  misc_feature 1..21: note = Synthetic
  source 1..21: mol_type = other RNA
gatggtatggtccagatgctg

SEQ ID NO: 9979 - RNA, 22 nt, synthetic construct
  misc_feature 1..22: note = Synthetic
  source 1..22: mol_type = other RNA
ggatggtatggtccagatgctg

SEQ ID NO: 9980 - RNA, 23 nt, synthetic construct
  misc_feature 1..23: note = Synthetic
  source 1..23: mol_type = other RNA
tggatggtatggtccagatgctg

SEQ ID NO: 9981 - RNA, 24 nt, synthetic construct
  misc_feature 1..24: note = Synthetic
  source 1..24: mol_type = other RNA
ttggatggtatggtccagatgctg

SEQ ID NO: 9982 - RNA, 18 nt, synthetic construct
  misc_feature 1..18: note = Synthetic
  source 1..18: mol_type = other RNA
gcgcacgcgcgtcgtctg

SEQ ID NO: 9983 - RNA, 19 nt, synthetic construct
  misc_feature 1..19: note = Synthetic
  source 1..19: mol_type = other RNA
cgcgcacgcgcgtcgtctg

SEQ ID NO: 9984 - RNA, 21 nt, synthetic construct
  misc_feature 1..21: note = Synthetic
  source 1..21: mol_type = other RNA
cgcgcgcacgcgcgtcgtctg

SEQ ID NO: 9985 - RNA, 22 nt, synthetic construct
  misc_feature 1..22: note = Synthetic
  source 1..22: mol_type = other RNA
ccgcgcgcacgcgcgtcgtctg

SEQ ID NO: 9986 - RNA, 23 nt, synthetic construct
  misc_feature 1..23: note = Synthetic
  source 1..23: mol_type = other RNA
tccgcgcgcacgcgcgtcgtctg

SEQ ID NO: 9987 - RNA, 24 nt, synthetic construct
  misc_feature 1..24: note = Synthetic
  source 1..24: mol_type = other RNA
atccgcgcgcacgcgcgtcgtctg

SEQ ID NO: 9988 - RNA, 18 nt, synthetic construct
  misc_feature 1..18: note = Synthetic
  source 1..18: mol_type = other RNA
gagggctgcgtggccgtg

SEQ ID NO: 9989 - RNA, 19 nt, synthetic construct
  misc_feature 1..19: note = Synthetic
  source 1..19: mol_type = other RNA
ggagggctgcgtggccgtg

SEQ ID NO: 9990 - RNA, 21 nt, synthetic construct
  misc_feature 1..21: note = Synthetic
  source 1..21: mol_type = other RNA
acggagggctgcgtggccgtg

SEQ ID NO: 9991 - RNA, 22 nt, synthetic construct
  misc_feature 1..22: note = Synthetic
  source 1..22: mol_type = other RNA
cacggagggctgcgtggccgtg

SEQ ID NO: 9992 - RNA, 23 nt, synthetic construct
  misc_feature 1..23: note = Synthetic
  source 1..23: mol_type = other RNA
ccacggagggctgcgtggccgtg

SEQ ID NO: 9993 - RNA, 24 nt, synthetic construct
  misc_feature 1..24: note = Synthetic
  source 1..24: mol_type = other RNA
gccacggagggctgcgtggccgtg

SEQ ID NO: 9994 - RNA, 18 nt, synthetic construct
  misc_feature 1..18: note = Synthetic
  source 1..18: mol_type = other RNA
ccccccgccagtttcgtg

SEQ ID NO: 9995 - RNA, 19 nt, synthetic construct
  misc_feature 1..19: note = Synthetic
  source 1..19: mol_type = other RNA
cccccccgccagtttcgtg

SEQ ID NO: 9996 - RNA, 21 nt, synthetic construct
  misc_feature 1..21: note = Synthetic
  source 1..21: mol_type = other RNA
tacccccccgccagtttcgtg

SEQ ID NO: 9997 - RNA, 22 nt, synthetic construct
  misc_feature 1..22: note = Synthetic
  source 1..22: mol_type = other RNA
ttacccccccgccagtttcgtg

SEQ ID NO: 9998 - RNA, 23 nt, synthetic construct
  misc_feature 1..23: note = Synthetic
  source 1..23: mol_type = other RNA
tttacccccccgccagtttcgtg

SEQ ID NO: 9999 - RNA, 24 nt, synthetic construct
  misc_feature 1..24: note = Synthetic
  source 1..24: mol_type = other RNA
gtttacccccccgccagtttcgtg

SEQ ID NO: 10000 - RNA, 18 nt, synthetic construct
  misc_feature 1..18: note = Synthetic
  source 1..18: mol_type = other RNA
aggttgcccatgtcggtg

SEQ ID NO: 10001 - RNA, 19 nt, synthetic construct
  misc_feature 1..19: note = Synthetic
  source 1..19: mol_type = other RNA
aaggttgcccatgtcggtg

SEQ ID NO: 10002 - RNA, 21 nt, synthetic construct
  misc_feature 1..21: note = Synthetic
  source 1..21: mol_type = other RNA
ggaaggttgcccatgtcggtg

SEQ ID NO: 10003 - RNA, 22 nt, synthetic construct
  misc_feature 1..22: note = Synthetic
  source 1..22: mol_type = other RNA
gggaaggttgcccatgtcggtg

SEQ ID NO: 10004 - RNA, 23 nt, synthetic construct
  misc_feature 1..23: note = Synthetic
  source 1..23: mol_type = other RNA
ggggaaggttgcccatgtcggtg

SEQ ID NO: 10005 - RNA, 24 nt, synthetic construct
  misc_feature 1..24: note = Synthetic
  source 1..24: mol_type = other RNA
tggggaaggttgcccatgtcggtg

SEQ ID NO: 10006 - RNA, 18 nt, synthetic construct
  misc_feature 1..18: note = Synthetic
  source 1..18: mol_type = other RNA
caccagattggccgggtg

SEQ ID NO: 10007 - RNA, 19 nt, synthetic construct
  misc_feature 1..19: note = Synthetic
  source 1..19: mol_type = other RNA
ccaccagattggccgggtg

SEQ ID NO: 10008 - RNA, 21 nt, synthetic construct
  misc_feature 1..21: note = Synthetic
  source 1..21: mol_type = other RNA
ggccaccagattggccgggtg

SEQ ID NO: 10009 - RNA, 22 nt, synthetic construct
  misc_feature 1..22: note = Synthetic
  source 1..22: mol_type = other RNA
tggccaccagattggccgggtg

SEQ ID NO: 10010 - RNA, 23 nt, synthetic construct
  misc_feature 1..23: note = Synthetic
  source 1..23: mol_type = other RNA
ttggccaccagattggccgggtg

SEQ ID NO: 10011 - RNA, 24 nt, synthetic construct
  misc_feature 1..24: note = Synthetic
  source 1..24: mol_type = other RNA
gttggccaccagattggccgggtg

SEQ ID NO: 10012 - RNA, 18 nt, synthetic construct
  misc_feature 1..18: note = Synthetic
  source 1..18: mol_type = other RNA
cgaacggcggcgatggtg

SEQ ID NO: 10013 - RNA, 19 nt, synthetic construct
  misc_feature 1..19: note = Synthetic
  source 1..19: mol_type = other RNA
gcgaacggcggcgatggtg

SEQ ID NO: 10014 - RNA, 21 nt, synthetic construct
  misc_feature 1..21: note = Synthetic
  source 1..21: mol_type = other RNA
ccgcgaacggcggcgatggtg

SEQ ID NO: 10015 - RNA, 22 nt, synthetic construct
  misc_feature 1..22: note = Synthetic
  source 1..22: mol_type = other RNA
cccgcgaacggcggcgatggtg

SEQ ID NO: 10016 - RNA, 23 nt, synthetic construct
  misc_feature 1..23: note = Synthetic
  source 1..23: mol_type = other RNA
ccccgcgaacggcggcgatggtg

SEQ ID NO: 10017 - RNA, 24 nt, synthetic construct
  misc_feature 1..24: note = Synthetic
  source 1..24: mol_type = other RNA
gccccgcgaacggcggcgatggtg

SEQ ID NO: 10018 - RNA, 18 nt, synthetic construct
  misc_feature 1..18: note = Synthetic
  source 1..18: mol_type = other RNA
ttgatcggggcggtggtg

SEQ ID NO: 10019 - RNA, 19 nt, synthetic construct
  misc_feature 1..19: note = Synthetic
  source 1..19: mol_type = other RNA
tttgatcggggcggtggtg

SEQ ID NO: 10020 - RNA, 21 nt, synthetic construct
  misc_feature 1..21: note = Synthetic
  source 1..21: mol_type = other RNA
tgtttgatcggggcggtggtg

SEQ ID NO: 10021 - RNA, 22 nt, synthetic construct
  misc_feature 1..22: note = Synthetic
  source 1..22: mol_type = other RNA
ctgtttgatcggggcggtggtg

SEQ ID NO: 10022 - RNA, 23 nt, synthetic construct
  misc_feature 1..23: note = Synthetic
  source 1..23: mol_type = other RNA
gctgtttgatcggggcggtggtg

SEQ ID NO: 10023 - RNA, 24 nt, synthetic construct
  misc_feature 1..24: note = Synthetic
  source 1..24: mol_type = other RNA
cgctgtttgatcggggcggtggtg

SEQ ID NO: 10024 - RNA, 18 nt, synthetic construct
  misc_feature 1..18: note = Synthetic
  source 1..18: mol_type = other RNA
aatatgcgcatgttggtg

SEQ ID NO: 10025 - RNA, 19 nt, synthetic construct
  misc_feature 1..19: note = Synthetic
  source 1..19: mol_type = other RNA
gaatatgcgcatgttggtg

SEQ ID NO: 10026 - RNA, 21 nt, synthetic construct
  misc_feature 1..21: note = Synthetic
  source 1..21: mol_type = other RNA
tcgaatatgcgcatgttggtg

SEQ ID NO: 10027 - RNA, 22 nt, synthetic construct
  misc_feature 1..22: note = Synthetic
  source 1..22: mol_type = other RNA
gtcgaatatgcgcatgttggtg

SEQ ID NO: 10028 - RNA, 23 nt, synthetic construct
  misc_feature 1..23: note = Synthetic
  source 1..23: mol_type = other RNA
cgtcgaatatgcgcatgttggtg

SEQ ID NO: 10029 - RNA, 24 nt, synthetic construct
  misc_feature 1..24: note = Synthetic
  source 1..24: mol_type = other RNA
ccgtcgaatatgcgcatgttggtg

SEQ ID NO: 10030 - RNA, 18 nt, synthetic construct
  misc_feature 1..18: note = Synthetic
  source 1..18: mol_type = other RNA
agagccaggttggcgttg

SEQ ID NO: 10031 - RNA, 19 nt, synthetic construct
  misc_feature 1..19: note = Synthetic
  source 1..19: mol_type = other RNA
aagagccaggttggcgttg

SEQ ID NO: 10032 - RNA, 21 nt, synthetic construct
  misc_feature 1..21: note = Synthetic
  source 1..21: mol_type = other RNA
tcaagagccaggttggcgttg

SEQ ID NO: 10033 - RNA, 22 nt, synthetic construct
  misc_feature 1..22: note = Synthetic
  source 1..22: mol_type = other RNA
ctcaagagccaggttggcgttg

SEQ ID NO: 10034 - RNA, 23 nt, synthetic construct
  misc_feature 1..23: note = Synthetic
  source 1..23: mol_type = other RNA
gctcaagagccaggttggcgttg

SEQ ID NO: 10035 - RNA, 24 nt, synthetic construct
  misc_feature 1..24: note = Synthetic
  source 1..24: mol_type = other RNA
agctcaagagccaggttggcgttg

SEQ ID NO: 10036 - RNA, 18 nt, synthetic construct
  misc_feature 1..18: note = Synthetic
  source 1..18: mol_type = other RNA
gcgcgtccccgggggttg

SEQ ID NO: 10037 - RNA, 19 nt, synthetic construct
  misc_feature 1..19: note = Synthetic
  source 1..19: mol_type = other RNA
ggcgcgtccccgggggttg

SEQ ID NO: 10038 - RNA, 21 nt, synthetic construct
  misc_feature 1..21: note = Synthetic
  source 1..21: mol_type = other RNA
gcggcgcgtccccgggggttg

SEQ ID NO: 10039 - RNA, 22 nt, synthetic construct
  misc_feature 1..22: note = Synthetic
  source 1..22: mol_type = other RNA
ggcggcgcgtccccgggggttg

SEQ ID NO: 10040 - RNA, 23 nt, synthetic construct
  misc_feature 1..23: note = Synthetic
  source 1..23: mol_type = other RNA
cggcggcgcgtccccgggggttg

SEQ ID NO: 10041 - RNA, 24 nt, synthetic construct
  misc_feature 1..24: note = Synthetic
  source 1..24: mol_type = other RNA
ccggcggcgcgtccccgggggttg

SEQ ID NO: 10042 - RNA, 18 nt, synthetic construct
  misc_feature 1..18: note = Synthetic
  source 1..18: mol_type = other RNA
gcccaggtaaaagttttg

SEQ ID NO: 10043 - RNA, 19 nt, synthetic construct
  misc_feature 1..19: note = Synthetic
  source 1..19: mol_type = other RNA
ggcccaggtaaaagttttg

SEQ ID NO: 10044 - RNA, 21 nt, synthetic construct
  misc_feature 1..21: note = Synthetic
  source 1..21: mol_type = other RNA
gcggcccaggtaaaagttttg

SEQ ID NO: 10045 - RNA, 22 nt, synthetic construct
  misc_feature 1..22: note = Synthetic
  source 1..22: mol_type = other RNA
cgcggcccaggtaaaagttttg

SEQ ID NO: 10046 - RNA, 23 nt, synthetic construct
  misc_feature 1..23: note = Synthetic
  source 1..23: mol_type = other RNA
ccgcggcccaggtaaaagttttg

SEQ ID NO: 10047 - RNA, 24 nt, synthetic construct
  misc_feature 1..24: note = Synthetic
  source 1..24: mol_type = other RNA
cccgcggcccaggtaaaagttttg

SEQ ID NO: 10048 - RNA, 18 nt, synthetic construct
  misc_feature 1..18: note = Synthetic
  source 1..18: mol_type = other RNA
ctggccgtggtcgtacat

SEQ ID NO: 10049 - RNA, 19 nt, synthetic construct
  misc_feature 1..19: note = Synthetic
  source 1..19: mol_type = other RNA
tctggccgtggtcgtacat

SEQ ID NO: 10050 - RNA, 21 nt, synthetic construct
  misc_feature 1..21: note = Synthetic
  source 1..21: mol_type = other RNA
gctctggccgtggtcgtacat

SEQ ID NO: 10051 - RNA, 22 nt, synthetic construct
  misc_feature 1..22: note = Synthetic
  source 1..22: mol_type = other RNA
cgctctggccgtggtcgtacat

SEQ ID NO: 10052 - RNA, 23 nt, synthetic construct
  misc_feature 1..23: note = Synthetic
  source 1..23: mol_type = other RNA
tcgctctggccgtggtcgtacat

SEQ ID NO: 10053 - RNA, 24 nt, synthetic construct
  misc_feature 1..24: note = Synthetic
  source 1..24: mol_type = other RNA
gtcgctctggccgtggtcgtacat

SEQ ID NO: 10054 - RNA, 18 nt, synthetic construct
  misc_feature 1..18: note = Synthetic
  source 1..18: mol_type = other RNA
cagggccgcgcgccgcat

SEQ ID NO: 10055 - RNA, 19 nt, synthetic construct
  misc_feature 1..19: note = Synthetic
  source 1..19: mol_type = other RNA
ccagggccgcgcgccgcat

SEQ ID NO: 10056 - RNA, 21 nt, synthetic construct
  misc_feature 1..21: note = Synthetic
  source 1..21: mol_type = other RNA
gtccagggccgcgcgccgcat

SEQ ID NO: 10057 - RNA, 22 nt, synthetic construct
  misc_feature 1..22: note = Synthetic
  source 1..22: mol_type = other RNA
ggtccagggccgcgcgccgcat

SEQ ID NO: 10058 - RNA, 23 nt, synthetic construct
  misc_feature 1..23: note = Synthetic
  source 1..23: mol_type = other RNA
cggtccagggccgcgcgccgcat

SEQ ID NO: 10059 - RNA, 24 nt, synthetic construct
  misc_feature 1..24: note = Synthetic
  source 1..24: mol_type = other RNA
gcggtccagggccgcgcgccgcat

SEQ ID NO: 10060 - RNA, 18 nt, synthetic construct
  misc_feature 1..18: note = Synthetic
  source 1..18: mol_type = other RNA
caggaggcgctgtttgat

SEQ ID NO: 10061 - RNA, 19 nt, synthetic construct
  misc_feature 1..19: note = Synthetic
  source 1..19: mol_type = other RNA
gcaggaggcgctgtttgat

SEQ ID NO: 10062 - RNA, 21 nt, synthetic construct
  misc_feature 1..21: note = Synthetic
  source 1..21: mol_type = other RNA
ctgcaggaggcgctgtttgat

SEQ ID NO: 10063 - RNA, 22 nt, synthetic construct
  misc_feature 1..22: note = Synthetic
  source 1..22: mol_type = other RNA
actgcaggaggcgctgtttgat

SEQ ID NO: 10064 - RNA, 23 nt, synthetic construct
  misc_feature 1..23: note = Synthetic
  source 1..23: mol_type = other RNA
gactgcaggaggcgctgtttgat

SEQ ID NO: 10065 - RNA, 24 nt, synthetic construct
  misc_feature 1..24: note = Synthetic
  source 1..24: mol_type = other RNA
ggactgcaggaggcgctgtttgat

SEQ ID NO: 10066 - RNA, 18 nt, synthetic construct
  misc_feature 1..18: note = Synthetic
  source 1..18: mol_type = other RNA
ttccccgttgcgggcact

SEQ ID NO: 10067 - RNA, 19 nt, synthetic construct
  misc_feature 1..19: note = Synthetic
  source 1..19: mol_type = other RNA
cttccccgttgcgggcact

SEQ ID NO: 10068 - RNA, 21 nt, synthetic construct
  misc_feature 1..21: note = Synthetic
  source 1..21: mol_type = other RNA
ggcttccccgttgcgggcact

SEQ ID NO: 10069 - RNA, 22 nt, synthetic construct
  misc_feature 1..22: note = Synthetic
  source 1..22: mol_type = other RNA
gggcttccccgttgcgggcact

SEQ ID NO: 10070 - RNA, 23 nt, synthetic construct
  misc_feature 1..23: note = Synthetic
  source 1..23: mol_type = other RNA
tgggcttccccgttgcgggcact

SEQ ID NO: 10071 - RNA, 24 nt, synthetic construct
  misc_feature 1..24: note = Synthetic
  source 1..24: mol_type = other RNA
gtgggcttccccgttgcgggcact

SEQ ID NO: 10072 - RNA, 18 nt, synthetic construct
  misc_feature 1..18: note = Synthetic
  source 1..18: mol_type = other RNA
acacggccatgcactcct

SEQ ID NO: 10073 - RNA, 19 nt, synthetic construct
  misc_feature 1..19: note = Synthetic
  source 1..19: mol_type = other RNA
tacacggccatgcactcct

SEQ ID NO: 10074 - RNA, 21 nt, synthetic construct
  misc_feature 1..21: note = Synthetic
  source 1..21: mol_type = other RNA
ggtacacggccatgcactcct

SEQ ID NO: 10075 - RNA, 22 nt, synthetic construct
  misc_feature 1..22: note = Synthetic
  source 1..22: mol_type = other RNA
cggtacacggccatgcactcct

SEQ ID NO: 10076 - RNA, 23 nt, synthetic construct
  misc_feature 1..23: note = Synthetic
  source 1..23: mol_type = other RNA
ccggtacacggccatgcactcct

SEQ ID NO: 10077 - RNA, 24 nt, synthetic construct
  misc_feature 1..24: note = Synthetic
  source 1..24: mol_type = other RNA
cccggtacacggccatgcactcct

SEQ ID NO: 10078 - RNA, 18 nt, synthetic construct
  misc_feature 1..18: note = Synthetic
  source 1..18: mol_type = other RNA
gcgcctgcccgcccagct

SEQ ID NO: 10079 - RNA, 19 nt, synthetic construct
  misc_feature 1..19: note = Synthetic
  source 1..19: mol_type = other RNA
tgcgcctgcccgcccagct

SEQ ID NO: 10080 - RNA, 21 nt, synthetic construct
  misc_feature 1..21: note = Synthetic
  source 1..21: mol_type = other RNA
cttgcgcctgcccgcccagct

SEQ ID NO: 10081 - RNA, 22 nt, synthetic construct
  misc_feature 1..22: note = Synthetic
  source 1..22: mol_type = other RNA
gcttgcgcctgcccgcccagct

SEQ ID NO: 10082 - RNA, 23 nt, synthetic construct
  misc_feature 1..23: note = Synthetic
  source 1..23: mol_type = other RNA
ggcttgcgcctgcccgcccagct

SEQ ID NO: 10083 - RNA, 24 nt, synthetic construct
  misc_feature 1..24: note = Synthetic
  source 1..24: mol_type = other RNA
cggcttgcgcctgcccgcccagct

SEQ ID NO: 10084 - RNA, 18 nt, synthetic construct
  misc_feature 1..18: note = Synthetic
  source 1..18: mol_type = other RNA
acgcctccgacgcgcgct

SEQ ID NO: 10085 - RNA, 19 nt, synthetic construct
  misc_feature 1..19: note = Synthetic
  source 1..19: mol_type = other RNA
tacgcctccgacgcgcgct

SEQ ID NO: 10086 - RNA, 21 nt, synthetic construct
  misc_feature 1..21: note = Synthetic
  source 1..21: mol_type = other RNA
agtacgcctccgacgcgcgct

SEQ ID NO: 10087 - RNA, 22 nt, synthetic construct
  misc_feature 1..22: note = Synthetic
  source 1..22: mol_type = other RNA
aagtacgcctccgacgcgcgct

SEQ ID NO: 10088 - RNA, 23 nt, synthetic construct
  misc_feature 1..23: note = Synthetic
  source 1..23: mol_type = other RNA
gaagtacgcctccgacgcgcgct

SEQ ID NO: 10089 - RNA, 24 nt, synthetic construct
  misc_feature 1..24: note = Synthetic
  source 1..24: mol_type = other RNA
ggaagtacgcctccgacgcgcgct

SEQ ID NO: 10090 - RNA, 18 nt, synthetic construct
  misc_feature 1..18: note = Synthetic
  source 1..18: mol_type = other RNA
tggtatggtccagatgct

SEQ ID NO: 10091 - RNA, 19 nt, synthetic construct
  misc_feature 1..19: note = Synthetic
  source 1..19: mol_type = other RNA
atggtatggtccagatgct

SEQ ID NO: 10092 - RNA, 21 nt, synthetic construct
  misc_feature 1..21: note = Synthetic
  source 1..21: mol_type = other RNA
ggatggtatggtccagatgct

SEQ ID NO: 10093 - RNA, 22 nt, synthetic construct
  misc_feature 1..22: note = Synthetic
  source 1..22: mol_type = other RNA
tggatggtatggtccagatgct

SEQ ID NO: 10094 - RNA, 23 nt, synthetic construct
  misc_feature 1..23: note = Synthetic
  source 1..23: mol_type = other RNA
ttggatggtatggtccagatgct

SEQ ID NO: 10095 - RNA, 24 nt, synthetic construct
  misc_feature 1..24: note = Synthetic
  source 1..24: mol_type = other RNA
tttggatggtatggtccagatgct

SEQ ID NO: 10096 - RNA, 18 nt, synthetic construct
  misc_feature 1..18: note = Synthetic
  source 1..18: mol_type = other RNA
cgggctgcataaactgct

SEQ ID NO: 10097 - RNA, 19 nt, synthetic construct
  misc_feature 1..19: note = Synthetic
  source 1..19: mol_type = other RNA
tcgggctgcataaactgct

SEQ ID NO: 10098 - RNA, 21 nt, synthetic construct
  misc_feature 1..21: note = Synthetic
  source 1..21: mol_type = other RNA
tgtcgggctgcataaactgct

SEQ ID NO: 10099 - RNA, 22 nt, synthetic construct
  misc_feature 1..22: note = Synthetic
  source 1..22: mol_type = other RNA
ttgtcgggctgcataaactgct

SEQ ID NO: 10100 - RNA, 23 nt, synthetic construct
  misc_feature 1..23: note = Synthetic
  source 1..23: mol_type = other RNA
gttgtcgggctgcataaactgct

SEQ ID NO: 10101 - RNA, 24 nt, synthetic construct
  misc_feature 1..24: note = Synthetic
  source 1..24: mol_type = other RNA
cgttgtcgggctgcataaactgct

SEQ ID NO: 10102 - RNA, 18 nt, synthetic construct
  misc_feature 1..18: note = Synthetic
  source 1..18: mol_type = other RNA
cctcgccgggggcgatct

SEQ ID NO: 10103 - RNA, 19 nt, synthetic construct
  misc_feature 1..19: note = Synthetic
  source 1..19: mol_type = other RNA
tcctcgccgggggcgatct

SEQ ID NO: 10104 - RNA, 21 nt, synthetic construct
  misc_feature 1..21: note = Synthetic
  source 1..21: mol_type = other RNA
actcctcgccgggggcgatct

SEQ ID NO: 10105 - RNA, 22 nt, synthetic construct
  misc_feature 1..22: note = Synthetic
  source 1..22: mol_type = other RNA
cactcctcgccgggggcgatct

SEQ ID NO: 10106 - RNA, 23 nt, synthetic construct
  misc_feature 1..23: note = Synthetic
  source 1..23: mol_type = other RNA
gcactcctcgccgggggcgatct

SEQ ID NO: 10107 - RNA, 24 nt, synthetic construct
  misc_feature 1..24: note = Synthetic
  source 1..24: mol_type = other RNA
ggcactcctcgccgggggcgatct

SEQ ID NO: 10108 - RNA, 18 nt, synthetic construct
  misc_feature 1..18: note = Synthetic
  source 1..18: mol_type = other RNA
cgcgcacgcgcgtcgtct

SEQ ID NO: 10109 - RNA, 19 nt, synthetic construct
  misc_feature 1..19: note = Synthetic
  source 1..19: mol_type = other RNA
gcgcgcacgcgcgtcgtct

SEQ ID NO: 10110 - RNA, 21 nt, synthetic construct
  misc_feature 1..21: note = Synthetic
  source 1..21: mol_type = other RNA
ccgcgcgcacgcgcgtcgtct

SEQ ID NO: 10111 - RNA, 22 nt, synthetic construct
  misc_feature 1..22: note = Synthetic
  source 1..22: mol_type = other RNA
tccgcgcgcacgcgcgtcgtct

SEQ ID NO: 10112 - RNA, 23 nt, synthetic construct
  misc_feature 1..23: note = Synthetic
  source 1..23: mol_type = other RNA
atccgcgcgcacgcgcgtcgtct

SEQ ID NO: 10113 - RNA, 24 nt, synthetic construct
  misc_feature 1..24: note = Synthetic
  source 1..24: mol_type = other RNA
gatccgcgcgcacgcgcgtcgtct

SEQ ID NO: 10114 - RNA, 18 nt, synthetic construct
  misc_feature 1..18: note = Synthetic
  source 1..18: mol_type = other RNA
cgaggtaggtcacgacgt

SEQ ID NO: 10115 - RNA, 19 nt, synthetic construct
  misc_feature 1..19: note = Synthetic
  source 1..19: mol_type = other RNA
ccgaggtaggtcacgacgt

SEQ ID NO: 10116 - RNA, 21 nt, synthetic construct
  misc_feature 1..21: note = Synthetic
  source 1..21: mol_type = other RNA
ccccgaggtaggtcacgacgt

SEQ ID NO: 10117 - RNA, 22 nt, synthetic construct
  misc_feature 1..22: note = Synthetic
  source 1..22: mol_type = other RNA
cccccgaggtaggtcacgacgt

SEQ ID NO: 10118 - RNA, 23 nt, synthetic construct
  misc_feature 1..23: note = Synthetic
  source 1..23: mol_type = other RNA
tcccccgaggtaggtcacgacgt

SEQ ID NO: 10119 - RNA, 24 nt, synthetic construct
  misc_feature 1..24: note = Synthetic
  source 1..24: mol_type = other RNA
ctcccccgaggtaggtcacgacgt

SEQ ID NO: 10120 - RNA, 18 nt, synthetic construct
  misc_feature 1..18: note = Synthetic
  source 1..18: mol_type = other RNA
tatagagcaggtccccgt

SEQ ID NO: 10121 - RNA, 19 nt, synthetic construct
  misc_feature 1..19: note = Synthetic
  source 1..19: mol_type = other RNA
ttatagagcaggtccccgt

SEQ ID NO: 10122 - RNA, 21 nt, synthetic construct
  misc_feature 1..21: note = Synthetic
  source 1..21: mol_type = other RNA
cgttatagagcaggtccccgt

SEQ ID NO: 10123 - RNA, 22 nt, synthetic construct
  misc_feature 1..22: note = Synthetic
  source 1..22: mol_type = other RNA
ccgttatagagcaggtccccgt

SEQ ID NO: 10124 - RNA, 23 nt, synthetic construct
  misc_feature 1..23: note = Synthetic
  source 1..23: mol_type = other RNA
cccgttatagagcaggtccccgt

SEQ ID NO: 10125 - RNA, 24 nt, synthetic construct
  misc_feature 1..24: note = Synthetic
  source 1..24: mol_type = other RNA
ccccgttatagagcaggtccccgt

SEQ ID NO: 10126 - RNA, 18 nt, synthetic construct
  misc_feature 1..18: note = Synthetic
  source 1..18: mol_type = other RNA
cgcgcgcacgcgcgtcgt

SEQ ID NO: 10127 - RNA, 19 nt, synthetic construct
  misc_feature 1..19: note = Synthetic
  source 1..19: mol_type = other RNA
ccgcgcgcacgcgcgtcgt

SEQ ID NO: 10128 - RNA, 21 nt, synthetic construct
  misc_feature 1..21: note = Synthetic
  source 1..21: mol_type = other RNA
atccgcgcgcacgcgcgtcgt

SEQ ID NO: 10129 - RNA, 22 nt, synthetic construct
  misc_feature 1..22: note = Synthetic
  source 1..22: mol_type = other RNA
gatccgcgcgcacgcgcgtcgt

SEQ ID NO: 10130 - RNA, 23 nt, synthetic construct
  misc_feature 1..23: note = Synthetic
  source 1..23: mol_type = other RNA
agatccgcgcgcacgcgcgtcgt

SEQ ID NO: 10131 - RNA, 24 nt, synthetic construct
  misc_feature 1..24: note = Synthetic
  source 1..24: mol_type = other RNA
cagatccgcgcgcacgcgcgtcgt

SEQ ID NO: 10132 - RNA, 18 nt, synthetic construct
  misc_feature 1..18: note = Synthetic
  source 1..18: mol_type = other RNA
tggcgcccaccagggggt

SEQ ID NO: 10133 - RNA, 19 nt, synthetic construct
  misc_feature 1..19: note = Synthetic
  source 1..19: mol_type = other RNA
atggcgcccaccagggggt

SEQ ID NO: 10134 - RNA, 21 nt, synthetic construct
  misc_feature 1..21: note = Synthetic
  source 1..21: mol_type = other RNA
ccatggcgcccaccagggggt

SEQ ID NO: 10135 - RNA, 22 nt, synthetic construct
  misc_feature 1..22: note = Synthetic
  source 1..22: mol_type = other RNA
tccatggcgcccaccagggggt

SEQ ID NO: 10136 - RNA, 23 nt, synthetic construct
  misc_feature 1..23: note = Synthetic
  source 1..23: mol_type = other RNA
gtccatggcgcccaccagggggt

SEQ ID NO: 10137 - RNA, 24 nt, synthetic construct
  misc_feature 1..24: note = Synthetic
  source 1..24: mol_type = other RNA
ggtccatggcgcccaccagggggt

SEQ ID NO: 10138 - RNA, 18 nt, synthetic construct
  misc_feature 1..18: note = Synthetic
  source 1..18: mol_type = other RNA
gcggcccaggtaaaagtt

SEQ ID NO: 10139 - RNA, 19 nt, synthetic construct
  misc_feature 1..19: note = Synthetic
  source 1..19: mol_type = other RNA
cgcggcccaggtaaaagtt

SEQ ID NO: 10140 - RNA, 21 nt, synthetic construct
  misc_feature 1..21: note = Synthetic
  source 1..21: mol_type = other RNA
cccgcggcccaggtaaaagtt

SEQ ID NO: 10141 - RNA, 22 nt, synthetic construct
  misc_feature 1..22: note = Synthetic
  source 1..22: mol_type = other RNA
ccccgcggcccaggtaaaagtt

SEQ ID NO: 10142 - RNA, 23 nt, synthetic construct
  misc_feature 1..23: note = Synthetic
  source 1..23: mol_type = other RNA
gccccgcggcccaggtaaaagtt

SEQ ID NO: 10143 - RNA, 24 nt, synthetic construct
  misc_feature 1..24: note = Synthetic
  source 1..24: mol_type = other RNA
agccccgcggcccaggtaaaagtt

SEQ ID NO: 10144 - RNA, 18 nt, synthetic construct
  misc_feature 1..18: note = Synthetic
  source 1..18: mol_type = other RNA
gaccaggttggccccgtt

SEQ ID NO: 10145 - RNA, 19 nt, synthetic construct
  misc_feature 1..19: note = Synthetic
  source 1..19: mol_type = other RNA
tgaccaggttggccccgtt

SEQ ID NO: 10146 - RNA, 21 nt, synthetic construct
  misc_feature 1..21: note = Synthetic
  source 1..21: mol_type = other RNA
cgtgaccaggttggccccgtt

SEQ ID NO: 10147 - RNA, 22 nt, synthetic construct
  misc_feature 1..22: note = Synthetic
  source 1..22: mol_type = other RNA
ccgtgaccaggttggccccgtt

SEQ ID NO: 10148 - RNA, 23 nt, synthetic construct
  misc_feature 1..23: note = Synthetic
  source 1..23: mol_type = other RNA
gccgtgaccaggttggccccgtt

SEQ ID NO: 10149 - RNA, 24 nt, synthetic construct
  misc_feature 1..24: note = Synthetic
  source 1..24: mol_type = other RNA
cgccgtgaccaggttggccccgtt

SEQ ID NO: 10150 - RNA, 18 nt, synthetic construct
  misc_feature 1..18: note = Synthetic
  source 1..18: mol_type = other RNA
cgcgtgggcttccccgtt

SEQ ID NO: 10151 - RNA, 19 nt, synthetic construct
  misc_feature 1..19: note = Synthetic
  source 1..19: mol_type = other RNA
gcgcgtgggcttccccgtt

SEQ ID NO: 10152 - RNA, 21 nt, synthetic construct
  misc_feature 1..21: note = Synthetic
  source 1..21: mol_type = other RNA
ccgcgcgtgggcttccccgtt

SEQ ID NO: 10153 - RNA, 22 nt, synthetic construct
  misc_feature 1..22: note = Synthetic
  source 1..22: mol_type = other RNA
cccgcgcgtgggcttccccgtt

SEQ ID NO: 10154 - RNA, 23 nt, synthetic construct
  misc_feature 1..23: note = Synthetic
  source 1..23: mol_type = other RNA
tcccgcgcgtgggcttccccgtt

SEQ ID NO: 10155 - RNA, 24 nt, synthetic construct
  misc_feature 1..24: note = Synthetic
  source 1..24: mol_type = other RNA
ctcccgcgcgtgggcttccccgtt

SEQ ID NO: 10156 - RNA, 18 nt, synthetic construct
  misc_feature 1..18: note = Synthetic
  source 1..18: mol_type = other RNA
cactaccacgcgcccgtt

SEQ ID NO: 10157 - RNA, 19 nt, synthetic construct
  misc_feature 1..19: note = Synthetic
  source 1..19: mol_type = other RNA
ccactaccacgcgcccgtt

SEQ ID NO: 10158 - RNA, 21 nt, synthetic construct
  misc_feature 1..21: note = Synthetic
  source 1..21: mol_type = other RNA
gtccactaccacgcgcccgtt

SEQ ID NO: 10159 - RNA, 22 nt, synthetic construct
  misc_feature 1..22: note = Synthetic
  source 1..22: mol_type = other RNA
cgtccactaccacgcgcccgtt

SEQ ID NO: 10160 - RNA, 23 nt, synthetic construct
  misc_feature 1..23: note = Synthetic
  source 1..23: mol_type = other RNA
ccgtccactaccacgcgcccgtt

SEQ ID NO: 10161 - RNA, 24 nt, synthetic construct
  misc_feature 1..24: note = Synthetic
  source 1..24: mol_type = other RNA
cccgtccactaccacgcgcccgtt

SEQ ID NO: 10162 - RNA, 18 nt, synthetic construct
  misc_feature 1..18: note = Synthetic
  source 1..18: mol_type = other RNA
catgtcggtgacggggtt

SEQ ID NO: 10163 - RNA, 19 nt, synthetic construct
  misc_feature 1..19: note = Synthetic
  source 1..19: mol_type = other RNA
ccatgtcggtgacggggtt

SEQ ID NO: 10164 - RNA, 21 nt, synthetic construct
  misc_feature 1..21: note = Synthetic
  source 1..21: mol_type = other RNA
gcccatgtcggtgacggggtt

SEQ ID NO: 10165 - RNA, 22 nt, synthetic construct
  misc_feature 1..22: note = Synthetic
  source 1..22: mol_type = other RNA
tgcccatgtcggtgacggggtt

SEQ ID NO: 10166 - RNA, 23 nt, synthetic construct
  misc_feature 1..23: note = Synthetic
  source 1..23: mol_type = other RNA
ttgcccatgtcggtgacggggtt

SEQ ID NO: 10167 - RNA, 24 nt, synthetic construct
  misc_feature 1..24: note = Synthetic
  source 1..24: mol_type = other RNA
gttgcccatgtcggtgacggggtt

SEQ ID NO: 10168 - RNA, 18 nt, synthetic construct
  misc_feature 1..18: note = Synthetic
  source 1..18: mol_type = other RNA
tgtgcgttcggccatgtt

SEQ ID NO: 10169 - RNA, 19 nt, synthetic construct
  misc_feature 1..19: note = Synthetic
  source 1..19: mol_type = other RNA
ttgtgcgttcggccatgtt

SEQ ID NO: 10170 - RNA, 21 nt, synthetic construct
  misc_feature 1..21: note = Synthetic
  source 1..21: mol_type = other RNA
cgttgtgcgttcggccatgtt

SEQ ID NO: 10171 - RNA, 22 nt, synthetic construct
  misc_feature 1..22: note = Synthetic
  source 1..22: mol_type = other RNA
ccgttgtgcgttcggccatgtt

SEQ ID NO: 10172 - RNA, 23 nt, synthetic construct
  misc_feature 1..23: note = Synthetic
  source 1..23: mol_type = other RNA
gccgttgtgcgttcggccatgtt

SEQ ID NO: 10173 - RNA, 24 nt, synthetic construct
  misc_feature 1..24: note = Synthetic
  source 1..24: mol_type = other RNA
cgccgttgtgcgttcggccatgtt

SEQ ID NO: 10174 - RNA, 18 nt, synthetic construct
  misc_feature 1..18: note = Synthetic
  source 1..18: mol_type = other RNA
ttcggtgtcctccacttt

SEQ ID NO: 10175 - RNA, 19 nt, synthetic construct
  misc_feature 1..19: note = Synthetic
  source 1..19: mol_type = other RNA
cttcggtgtcctccacttt

SEQ ID NO: 10176 - RNA, 21 nt, synthetic construct
  misc_feature 1..21: note = Synthetic
  source 1..21: mol_type = other RNA
ggcttcggtgtcctccacttt

SEQ ID NO: 10177 - RNA, 22 nt, synthetic construct
  misc_feature 1..22: note = Synthetic
  source 1..22: mol_type = other RNA
cggcttcggtgtcctccacttt

SEQ ID NO: 10178 - RNA, 23 nt, synthetic construct
  misc_feature 1..23: note = Synthetic
  source 1..23: mol_type = other RNA
tcggcttcggtgtcctccacttt

SEQ ID NO: 10179 - RNA, 24 nt, synthetic construct
  misc_feature 1..24: note = Synthetic
  source 1..24: mol_type = other RNA
gtcggcttcggtgtcctccacttt

SEQ ID NO: 10180 - RNA, 18 nt, synthetic construct
  misc_feature 1..18: note = Synthetic
  source 1..18: mol_type = other RNA
cggcccaggtaaaagttt

SEQ ID NO: 10181 - RNA, 19 nt, synthetic construct
  misc_feature 1..19: note = Synthetic
  source 1..19: mol_type = other RNA
gcggcccaggtaaaagttt

SEQ ID NO: 10182 - RNA, 21 nt, synthetic construct
  misc_feature 1..21: note = Synthetic
  source 1..21: mol_type = other RNA
ccgcggcccaggtaaaagttt

SEQ ID NO: 10183 - RNA, 22 nt, synthetic construct
  misc_feature 1..22: note = Synthetic
  source 1..22: mol_type = other RNA
cccgcggcccaggtaaaagttt

SEQ ID NO: 10184 - RNA, 23 nt, synthetic construct
  misc_feature 1..23: note = Synthetic
  source 1..23: mol_type = other RNA
ccccgcggcccaggtaaaagttt

SEQ ID NO: 10185 - RNA, 24 nt, synthetic construct
  misc_feature 1..24: note = Synthetic
  source 1..24: mol_type = other RNA
gccccgcggcccaggtaaaagttt

SEQ ID NO: 10186 - RNA, 18 nt, synthetic construct
  misc_feature 1..18: note = Synthetic
  source 1..18: mol_type = other RNA
ggcccaggtaaaagtttt

SEQ ID NO: 10187 - RNA, 19 nt, synthetic construct
  misc_feature 1..19: note = Synthetic
  source 1..19: mol_type = other RNA
cggcccaggtaaaagtttt

SEQ ID NO: 10188 - RNA, 21 nt, synthetic construct
  misc_feature 1..21: note = Synthetic
  source 1..21: mol_type = other RNA
cgcggcccaggtaaaagtttt

SEQ ID NO: 10189 - RNA, 22 nt, synthetic construct
  misc_feature 1..22: note = Synthetic
  source 1..22: mol_type = other RNA
ccgcggcccaggtaaaagtttt

SEQ ID NO: 10190 - RNA, 23 nt, synthetic construct
  misc_feature 1..23: note = Synthetic
  source 1..23: mol_type = other RNA
cccgcggcccaggtaaaagtttt

SEQ ID NO: 10191 - RNA, 24 nt, synthetic construct
  misc_feature 1..24: note = Synthetic
  source 1..24: mol_type = other RNA
ccccgcggcccaggtaaaagtttt

SEQ ID NO: 10192 - RNA, 18 nt, synthetic construct
  misc_feature 1..18: note = Synthetic
  source 1..18: mol_type = other RNA
ctgcagtccttcctgaaa

SEQ ID NO: 10193 - RNA, 19 nt, synthetic construct
  misc_feature 1..19: note = Synthetic
  source 1..19: mol_type = other RNA
cctgcagtccttcctgaaa

SEQ ID NO: 10194 - RNA, 21 nt, synthetic construct
  misc_feature 1..21: note = Synthetic
  source 1..21: mol_type = other RNA
ctcctgcagtccttcctgaaa

SEQ ID NO: 10195 - RNA, 22 nt, synthetic construct
  misc_feature 1..22: note = Synthetic
  source 1..22: mol_type = other RNA
cctcctgcagtccttcctgaaa

SEQ ID NO: 10196 - RNA, 23 nt, synthetic construct
  misc_feature 1..23: note = Synthetic
  source 1..23: mol_type = other RNA
gcctcctgcagtccttcctgaaa

SEQ ID NO: 10197 - RNA, 24 nt, synthetic construct
  misc_feature 1..24: note = Synthetic
  source 1..24: mol_type = other RNA
cgcctcctgcagtccttcctgaaa

SEQ ID NO: 10198 - RNA, 18 nt, synthetic construct
  misc_feature 1..18: note = Synthetic
  source 1..18: mol_type = other RNA
cctggtcgccgagctaaa

SEQ ID NO: 10199 - RNA, 19 nt, synthetic construct
  misc_feature 1..19: note = Synthetic
  source 1..19: mol_type = other RNA
ccctggtcgccgagctaaa

SEQ ID NO: 10200 - RNA, 21 nt, synthetic construct
  misc_feature 1..21: note = Synthetic
  source 1..21: mol_type = other RNA
gaccctggtcgccgagctaaa

SEQ ID NO: 10201 - RNA, 22 nt, synthetic construct
  misc_feature 1..22: note = Synthetic
  source 1..22: mol_type = other RNA
cgaccctggtcgccgagctaaa

SEQ ID NO: 10202 - RNA, 23 nt, synthetic construct
  misc_feature 1..23: note = Synthetic
  source 1..23: mol_type = other RNA
gcgaccctggtcgccgagctaaa

SEQ ID NO: 10203 - RNA, 24 nt, synthetic construct
  misc_feature 1..24: note = Synthetic
  source 1..24: mol_type = other RNA
ggcgaccctggtcgccgagctaaa

SEQ ID NO: 10204 - RNA, 18 nt, synthetic construct
  misc_feature 1..18: note = Synthetic
  source 1..18: mol_type = other RNA
cctccgcagtgcccgcaa

SEQ ID NO: 10205 - RNA, 19 nt, synthetic construct
  misc_feature 1..19: note = Synthetic
  source 1..19: mol_type = other RNA
tcctccgcagtgcccgcaa

SEQ ID NO: 10206 - RNA, 21 nt, synthetic construct
  misc_feature 1..21: note = Synthetic
  source 1..21: mol_type = other RNA
cctcctccgcagtgcccgcaa

SEQ ID NO: 10207 - RNA, 22 nt, synthetic construct
  misc_feature 1..22: note = Synthetic
  source 1..22: mol_type = other RNA
ccctcctccgcagtgcccgcaa

SEQ ID NO: 10208 - RNA, 23 nt, synthetic construct
  misc_feature 1..23: note = Synthetic
  source 1..23: mol_type = other RNA
gccctcctccgcagtgcccgcaa

SEQ ID NO: 10209 - RNA, 24 nt, synthetic construct
  misc_feature 1..24: note = Synthetic
  source 1..24: mol_type = other RNA
cgccctcctccgcagtgcccgcaa

SEQ ID NO: 10210 - RNA, 18 nt, synthetic construct
  misc_feature 1..18: note = Synthetic
  source 1..18: mol_type = other RNA
cggggcctaccacctcaa

SEQ ID NO: 10211 - RNA, 19 nt, synthetic construct
  misc_feature 1..19: note = Synthetic
  source 1..19: mol_type = other RNA
acggggcctaccacctcaa

SEQ ID NO: 10212 - RNA, 21 nt, synthetic construct
  misc_feature 1..21: note = Synthetic
  source 1..21: mol_type = other RNA
taacggggcctaccacctcaa

SEQ ID NO: 10213 - RNA, 22 nt, synthetic construct
  misc_feature 1..22: note = Synthetic
  source 1..22: mol_type = other RNA
ataacggggcctaccacctcaa

SEQ ID NO: 10214 - RNA, 23 nt, synthetic construct
  misc_feature 1..23: note = Synthetic
  source 1..23: mol_type = other RNA
tataacggggcctaccacctcaa

SEQ ID NO: 10215 - RNA, 24 nt, synthetic construct
  misc_feature 1..24: note = Synthetic
  source 1..24: mol_type = other RNA
ctataacggggcctaccacctcaa

SEQ ID NO: 10216 - RNA, 18 nt, synthetic construct
  misc_feature 1..18: note = Synthetic
  source 1..18: mol_type = other RNA
cggcgagatggtcctgaa

SEQ ID NO: 10217 - RNA, 19 nt, synthetic construct
  misc_feature 1..19: note = Synthetic
  source 1..19: mol_type = other RNA
acggcgagatggtcctgaa

SEQ ID NO: 10218 - RNA, 21 nt, synthetic construct
  misc_feature 1..21: note = Synthetic
  source 1..21: mol_type = other RNA
gtacggcgagatggtcctgaa

SEQ ID NO: 10219 - RNA, 22 nt, synthetic construct
  misc_feature 1..22: note = Synthetic
  source 1..22: mol_type = other RNA
cgtacggcgagatggtcctgaa

SEQ ID NO: 10220 - RNA, 23 nt, synthetic construct
  misc_feature 1..23: note = Synthetic
  source 1..23: mol_type = other RNA
acgtacggcgagatggtcctgaa

SEQ ID NO: 10221 - RNA, 24 nt, synthetic construct
  misc_feature 1..24: note = Synthetic
  source 1..24: mol_type = other RNA
gacgtacggcgagatggtcctgaa

SEQ ID NO: 10222 - RNA, 18 nt, synthetic construct
  misc_feature 1..18: note = Synthetic
  source 1..18: mol_type = other RNA
cggggacctgctctataa

SEQ ID NO: 10223 - RNA, 19 nt, synthetic construct
  misc_feature 1..19: note = Synthetic
  source 1..19: mol_type = other RNA
acggggacctgctctataa

SEQ ID NO: 10224 - RNA, 21 nt, synthetic construct
  misc_feature 1..21: note = Synthetic
  source 1..21: mol_type = other RNA
gtacggggacctgctctataa

SEQ ID NO: 10225 - RNA, 22 nt, synthetic construct
  misc_feature 1..22: note = Synthetic
  source 1..22: mol_type = other RNA
cgtacggggacctgctctataa

SEQ ID NO: 10226 - RNA, 23 nt, synthetic construct
  misc_feature 1..23: note = Synthetic
  source 1..23: mol_type = other RNA
tcgtacggggacctgctctataa

SEQ ID NO: 10227 - RNA, 24 nt, synthetic construct
  misc_feature 1..24: note = Synthetic
  source 1..24: mol_type = other RNA
ttcgtacggggacctgctctataa

SEQ ID NO: 10228 - RNA, 18 nt, synthetic construct
  misc_feature 1..18: note = Synthetic
  source 1..18: mol_type = other RNA
tcaacgccatgtttcaca

SEQ ID NO: 10229 - RNA, 19 nt, synthetic construct
  misc_feature 1..19: note = Synthetic
  source 1..19: mol_type = other RNA
gtcaacgccatgtttcaca

SEQ ID NO: 10230 - RNA, 21 nt, synthetic construct
  misc_feature 1..21: note = Synthetic
  source 1..21: mol_type = other RNA
cggtcaacgccatgtttcaca

SEQ ID NO: 10231 - RNA, 22 nt, synthetic construct
  misc_feature 1..22: note = Synthetic
  source 1..22: mol_type = other RNA
acggtcaacgccatgtttcaca

SEQ ID NO: 10232 - RNA, 23 nt, synthetic construct
  misc_feature 1..23: note = Synthetic
  source 1..23: mol_type = other RNA
cacggtcaacgccatgtttcaca

SEQ ID NO: 10233 - RNA, 24 nt, synthetic construct
  misc_feature 1..24: note = Synthetic
  source 1..24: mol_type = other RNA
acacggtcaacgccatgtttcaca

SEQ ID NO: 10234 - RNA, 18 nt, synthetic construct
  misc_feature 1..18: note = Synthetic
  source 1..18: mol_type = other RNA
tcctgaaagtggaggaca

SEQ ID NO: 10235 - RNA, 19 nt, synthetic construct
  misc_feature 1..19: note = Synthetic
  source 1..19: mol_type = other RNA
ttcctgaaagtggaggaca

SEQ ID NO: 10236 - RNA, 21 nt, synthetic construct
  misc_feature 1..21: note = Synthetic
  source 1..21: mol_type = other RNA
ccttcctgaaagtggaggaca

SEQ ID NO: 10237 - RNA, 22 nt, synthetic construct
  misc_feature 1..22: note = Synthetic
  source 1..22: mol_type = other RNA
tccttcctgaaagtggaggaca

SEQ ID NO: 10238 - RNA, 23 nt, synthetic construct
  misc_feature 1..23: note = Synthetic
  source 1..23: mol_type = other RNA
gtccttcctgaaagtggaggaca

SEQ ID NO: 10239 - RNA, 24 nt, synthetic construct
  misc_feature 1..24: note = Synthetic
  source 1..24: mol_type = other RNA
agtccttcctgaaagtggaggaca

SEQ ID NO: 10240 - RNA, 18 nt, synthetic construct
  misc_feature 1..18: note = Synthetic
  source 1..18: mol_type = other RNA
gcgtttacgcgggggaca

SEQ ID NO: 10241 - RNA, 19 nt, synthetic construct
  misc_feature 1..19: note = Synthetic
  source 1..19: mol_type = other RNA
ggcgtttacgcgggggaca

SEQ ID NO: 10242 - RNA, 21 nt, synthetic construct
  misc_feature 1..21: note = Synthetic
  source 1..21: mol_type = other RNA
ggggcgtttacgcgggggaca

SEQ ID NO: 10243 - RNA, 22 nt, synthetic construct
  misc_feature 1..22: note = Synthetic
  source 1..22: mol_type = other RNA
gggggcgtttacgcgggggaca

SEQ ID NO: 10244 - RNA, 23 nt, synthetic construct
  misc_feature 1..23: note = Synthetic
  source 1..23: mol_type = other RNA
cgggggcgtttacgcgggggaca

SEQ ID NO: 10245 - RNA, 24 nt, synthetic construct
  misc_feature 1..24: note = Synthetic
  source 1..24: mol_type = other RNA
ccgggggcgtttacgcgggggaca

SEQ ID NO: 10246 - RNA, 18 nt, synthetic construct
  misc_feature 1..18: note = Synthetic
  source 1..18: mol_type = other RNA
tcctccgcagtgcccgca

SEQ ID NO: 10247 - RNA, 19 nt, synthetic construct
  misc_feature 1..19: note = Synthetic
  source 1..19: mol_type = other RNA
ctcctccgcagtgcccgca

SEQ ID NO: 10248 - RNA, 21 nt, synthetic construct
  misc_feature 1..21: note = Synthetic
  source 1..21: mol_type = other RNA
ccctcctccgcagtgcccgca

SEQ ID NO: 10249 - RNA, 22 nt, synthetic construct
  misc_feature 1..22: note = Synthetic
  source 1..22: mol_type = other RNA
gccctcctccgcagtgcccgca

SEQ ID NO: 10250 - RNA, 23 nt, synthetic construct
  misc_feature 1..23: note = Synthetic
  source 1..23: mol_type = other RNA
cgccctcctccgcagtgcccgca

SEQ ID NO: 10251 - RNA, 24 nt, synthetic construct
  misc_feature 1..24: note = Synthetic
  source 1..24: mol_type = other RNA
ccgccctcctccgcagtgcccgca

SEQ ID NO: 10252 - RNA, 18 nt, synthetic construct
  misc_feature 1..18: note = Synthetic
  source 1..18: mol_type = other RNA
cgcggatgaccggccgca

SEQ ID NO: 10253 - RNA, 19 nt, synthetic construct
  misc_feature 1..19: note = Synthetic
  source 1..19: mol_type = other RNA
ccgcggatgaccggccgca

SEQ ID NO: 10254 - RNA, 21 nt, synthetic construct
  misc_feature 1..21: note = Synthetic
  source 1..21: mol_type = other RNA
cgccgcggatgaccggccgca

SEQ ID NO: 10255 - RNA, 22 nt, synthetic construct
  misc_feature 1..22: note = Synthetic
  source 1..22: mol_type = other RNA
acgccgcggatgaccggccgca

SEQ ID NO: 10256 - RNA, 23 nt, synthetic construct
  misc_feature 1..23: note = Synthetic
  source 1..23: mol_type = other RNA
gacgccgcggatgaccggccgca

SEQ ID NO: 10257 - RNA, 24 nt, synthetic construct
  misc_feature 1..24: note = Synthetic
  source 1..24: mol_type = other RNA
ggacgccgcggatgaccggccgca

SEQ ID NO: 10258 - RNA, 18 nt, synthetic construct
  misc_feature 1..18: note = Synthetic
  source 1..18: mol_type = other RNA
aggccgccatacacggca

SEQ ID NO: 10259 - RNA, 19 nt, synthetic construct
  misc_feature 1..19: note = Synthetic
  source 1..19: mol_type = other RNA
caggccgccatacacggca

SEQ ID NO: 10260 - RNA, 21 nt, synthetic construct
  misc_feature 1..21: note = Synthetic
  source 1..21: mol_type = other RNA
tgcaggccgccatacacggca

SEQ ID NO: 10261 - RNA, 22 nt, synthetic construct
  misc_feature 1..22: note = Synthetic
  source 1..22: mol_type = other RNA
ctgcaggccgccatacacggca

SEQ ID NO: 10262 - RNA, 23 nt, synthetic construct
  misc_feature 1..23: note = Synthetic
  source 1..23: mol_type = other RNA
gctgcaggccgccatacacggca

SEQ ID NO: 10263 - RNA, 24 nt, synthetic construct
  misc_feature 1..24: note = Synthetic
  source 1..24: mol_type = other RNA
tgctgcaggccgccatacacggca

SEQ ID NO: 10264 - RNA, 18 nt, synthetic construct
  misc_feature 1..18: note = Synthetic
  source 1..18: mol_type = other RNA
acggggcctaccacctca

SEQ ID NO: 10265 - RNA, 19 nt, synthetic construct
  misc_feature 1..19: note = Synthetic
  source 1..19: mol_type = other RNA
aacggggcctaccacctca

SEQ ID NO: 10266 - RNA, 21 nt, synthetic construct
  misc_feature 1..21: note = Synthetic
  source 1..21: mol_type = other RNA
ataacggggcctaccacctca

SEQ ID NO: 10267 - RNA, 22 nt, synthetic construct
  misc_feature 1..22: note = Synthetic
  source 1..22: mol_type = other RNA
tataacggggcctaccacctca

SEQ ID NO: 10268 - RNA, 23 nt, synthetic construct
  misc_feature 1..23: note = Synthetic
  source 1..23: mol_type = other RNA
ctataacggggcctaccacctca

SEQ ID NO: 10269 - RNA, 24 nt, synthetic construct
  misc_feature 1..24: note = Synthetic
  source 1..24: mol_type = other RNA
tctataacggggcctaccacctca

SEQ ID NO: 10270 - RNA, 18 nt, synthetic construct
  misc_feature 1..18: note = Synthetic
  source 1..18: mol_type = other RNA
atgacgcatccccgctca

SEQ ID NO: 10271 - RNA, 19 nt, synthetic construct
  misc_feature 1..19: note = Synthetic
  source 1..19: mol_type = other RNA
tatgacgcatccccgctca

SEQ ID NO: 10272 - RNA, 21 nt, synthetic construct
  misc_feature 1..21: note = Synthetic
  source 1..21: mol_type = other RNA
tctatgacgcatccccgctca

SEQ ID NO: 10273 - RNA, 22 nt, synthetic construct
  misc_feature 1..22: note = Synthetic
  source 1..22: mol_type = other RNA
gtctatgacgcatccccgctca

SEQ ID NO: 10274 - RNA, 23 nt, synthetic construct
  misc_feature 1..23: note = Synthetic
  source 1..23: mol_type = other RNA
cgtctatgacgcatccccgctca

SEQ ID NO: 10275 - RNA, 24 nt, synthetic construct
  misc_feature 1..24: note = Synthetic
  source 1..24: mol_type = other RNA
tcgtctatgacgcatccccgctca

SEQ ID NO: 10276 - RNA, 18 nt, synthetic construct
  misc_feature 1..18: note = Synthetic
  source 1..18: mol_type = other RNA
gcctgttcaatccggtca

SEQ ID NO: 10277 - RNA, 19 nt, synthetic construct
  misc_feature 1..19: note = Synthetic
  source 1..19: mol_type = other RNA
ggcctgttcaatccggtca

SEQ ID NO: 10278 - RNA, 21 nt, synthetic construct
  misc_feature 1..21: note = Synthetic
  source 1..21: mol_type = other RNA
tgggcctgttcaatccggtca

SEQ ID NO: 10279 - RNA, 22 nt, synthetic construct
  misc_feature 1..22: note = Synthetic
  source 1..22: mol_type = other RNA
ctgggcctgttcaatccggtca

SEQ ID NO: 10280 - RNA, 23 nt, synthetic construct
  misc_feature 1..23: note = Synthetic
  source 1..23: mol_type = other RNA
cctgggcctgttcaatccggtca

SEQ ID NO: 10281 - RNA, 24 nt, synthetic construct
  misc_feature 1..24: note = Synthetic
  source 1..24: mol_type = other RNA
ccctgggcctgttcaatccggtca

SEQ ID NO: 10282 - RNA, 18 nt, synthetic construct
  misc_feature 1..18: note = Synthetic
  source 1..18: mol_type = other RNA
gggttcaccgtcgtccga

SEQ ID NO: 10283 - RNA, 19 nt, synthetic construct
  misc_feature 1..19: note = Synthetic
  source 1..19: mol_type = other RNA
tgggttcaccgtcgtccga

SEQ ID NO: 10284 - RNA, 21 nt, synthetic construct
  misc_feature 1..21: note = Synthetic
  source 1..21: mol_type = other RNA
tttgggttcaccgtcgtccga

SEQ ID NO: 10285 - RNA, 22 nt, synthetic construct
  misc_feature 1..22: note = Synthetic
  source 1..22: mol_type = other RNA
gtttgggttcaccgtcgtccga

SEQ ID NO: 10286 - RNA, 23 nt, synthetic construct
  misc_feature 1..23: note = Synthetic
  source 1..23: mol_type = other RNA
ggtttgggttcaccgtcgtccga

SEQ ID NO: 10287 - RNA, 24 nt, synthetic construct
  misc_feature 1..24: note = Synthetic
  source 1..24: mol_type = other RNA
gggtttgggttcaccgtcgtccga

SEQ ID NO: 10288 - RNA, 18 nt, synthetic construct
  misc_feature 1..18: note = Synthetic
  source 1..18: mol_type = other RNA
tgtctctggaacacgcga

SEQ ID NO: 10289 - RNA, 19 nt, synthetic construct
  misc_feature 1..19: note = Synthetic
  source 1..19: mol_type = other RNA
ctgtctctggaacacgcga

SEQ ID NO: 10290 - RNA, 21 nt, synthetic construct
  misc_feature 1..21: note = Synthetic
  source 1..21: mol_type = other RNA
gcctgtctctggaacacgcga

SEQ ID NO: 10291 - RNA, 22 nt, synthetic construct
  misc_feature 1..22: note = Synthetic
  source 1..22: mol_type = other RNA
cgcctgtctctggaacacgcga

SEQ ID NO: 10292 - RNA, 23 nt, synthetic construct
  misc_feature 1..23: note = Synthetic
  source 1..23: mol_type = other RNA
gcgcctgtctctggaacacgcga

SEQ ID NO: 10293 - RNA, 24 nt, synthetic construct
  misc_feature 1..24: note = Synthetic
  source 1..24: mol_type = other RNA
tgcgcctgtctctggaacacgcga

SEQ ID NO: 10294 - RNA, 18 nt, synthetic construct
  misc_feature 1..18: note = Synthetic
  source 1..18: mol_type = other RNA
caacatgcgcatattcga

SEQ ID NO: 10295 - RNA, 19 nt, synthetic construct
  misc_feature 1..19: note = Synthetic
  source 1..19: mol_type = other RNA
ccaacatgcgcatattcga

SEQ ID NO: 10296 - RNA, 21 nt, synthetic construct
  misc_feature 1..21: note = Synthetic
  source 1..21: mol_type = other RNA
caccaacatgcgcatattcga

SEQ ID NO: 10297 - RNA, 22 nt, synthetic construct
  misc_feature 1..22: note = Synthetic
  source 1..22: mol_type = other RNA
ccaccaacatgcgcatattcga

SEQ ID NO: 10298 - RNA, 23 nt, synthetic construct
  misc_feature 1..23: note = Synthetic
  source 1..23: mol_type = other RNA
accaccaacatgcgcatattcga

SEQ ID NO: 10299 - RNA, 24 nt, synthetic construct
  misc_feature 1..24: note = Synthetic
  source 1..24: mol_type = other RNA
caccaccaacatgcgcatattcga

SEQ ID NO: 10300 - RNA, 18 nt, synthetic construct
  misc_feature 1..18: note = Synthetic
  source 1..18: mol_type = other RNA
ttacgcgggggacaagga

SEQ ID NO: 10301 - RNA, 19 nt, synthetic construct
  misc_feature 1..19: note = Synthetic
  source 1..19: mol_type = other RNA
tttacgcgggggacaagga

SEQ ID NO: 10302 - RNA, 21 nt, synthetic construct
  misc_feature 1..21: note = Synthetic
  source 1..21: mol_type = other RNA
cgtttacgcgggggacaagga

SEQ ID NO: 10303 - RNA, 22 nt, synthetic construct
  misc_feature 1..22: note = Synthetic
  source 1..22: mol_type = other RNA
gcgtttacgcgggggacaagga

SEQ ID NO: 10304 - RNA, 23 nt, synthetic construct
  misc_feature 1..23: note = Synthetic
  source 1..23: mol_type = other RNA
ggcgtttacgcgggggacaagga

SEQ ID NO: 10305 - RNA, 24 nt, synthetic construct
  misc_feature 1..24: note = Synthetic
  source 1..24: mol_type = other RNA
gggcgtttacgcgggggacaagga

SEQ ID NO: 10306 - RNA, 18 nt, synthetic construct
  misc_feature 1..18: note = Synthetic
  source 1..18: mol_type = other RNA
gccgcaccggggggcgga

SEQ ID NO: 10307 - RNA, 19 nt, synthetic construct
  misc_feature 1..19: note = Synthetic
  source 1..19: mol_type = other RNA
ggccgcaccggggggcgga

SEQ ID NO: 10308 - RNA, 21 nt, synthetic construct
  misc_feature 1..21: note = Synthetic
  source 1..21: mol_type = other RNA
ccggccgcaccggggggcgga

SEQ ID NO: 10309 - RNA, 22 nt, synthetic construct
  misc_feature 1..22: note = Synthetic
  source 1..22: mol_type = other RNA
accggccgcaccggggggcgga

SEQ ID NO: 10310 - RNA, 23 nt, synthetic construct
  misc_feature 1..23: note = Synthetic
  source 1..23: mol_type = other RNA
gaccggccgcaccggggggcgga

SEQ ID NO: 10311 - RNA, 24 nt, synthetic construct
  misc_feature 1..24: note = Synthetic
  source 1..24: mol_type = other RNA
tgaccggccgcaccggggggcgga

SEQ ID NO: 10312 - RNA, 18 nt, synthetic construct
  misc_feature 1..18: note = Synthetic
  source 1..18: mol_type = other RNA
acggcgagatggtcctga

SEQ ID NO: 10313 - RNA, 19 nt, synthetic construct
  misc_feature 1..19: note = Synthetic
  source 1..19: mol_type = other RNA
tacggcgagatggtcctga

SEQ ID NO: 10314 - RNA, 21 nt, synthetic construct
  misc_feature 1..21: note = Synthetic
  source 1..21: mol_type = other RNA
cgtacggcgagatggtcctga

SEQ ID NO: 10315 - RNA, 22 nt, synthetic construct
  misc_feature 1..22: note = Synthetic
  source 1..22: mol_type = other RNA
acgtacggcgagatggtcctga

SEQ ID NO: 10316 - RNA, 23 nt, synthetic construct
  misc_feature 1..23: note = Synthetic
  source 1..23: mol_type = other RNA
gacgtacggcgagatggtcctga

SEQ ID NO: 10317 - RNA, 24 nt, synthetic construct
  misc_feature 1..24: note = Synthetic
  source 1..24: mol_type = other RNA
tgacgtacggcgagatggtcctga

SEQ ID NO: 10318 - RNA, 18 nt, synthetic construct
  misc_feature 1..18: note = Synthetic
  source 1..18: mol_type = other RNA
gacaggaccgctttgtga

SEQ ID NO: 10319 - RNA, 19 nt, synthetic construct
  misc_feature 1..19: note = Synthetic
  source 1..19: mol_type = other RNA
cgacaggaccgctttgtga

SEQ ID NO: 10320 - RNA, 21 nt, synthetic construct
  misc_feature 1..21: note = Synthetic
  source 1..21: mol_type = other RNA
tccgacaggaccgctttgtga

SEQ ID NO: 10321 - RNA, 22 nt, synthetic construct
  misc_feature 1..22: note = Synthetic
  source 1..22: mol_type = other RNA
gtccgacaggaccgctttgtga

SEQ ID NO: 10322 - RNA, 23 nt, synthetic construct
  misc_feature 1..23: note = Synthetic
  source 1..23: mol_type = other RNA
cgtccgacaggaccgctttgtga

SEQ ID NO: 10323 - RNA, 24 nt, synthetic construct
  misc_feature 1..24: note = Synthetic
  source 1..24: mol_type = other RNA
tcgtccgacaggaccgctttgtga

SEQ ID NO: 10324 - RNA, 18 nt, synthetic construct
  misc_feature 1..18: note = Synthetic
  source 1..18: mol_type = other RNA
acggggacctgctctata

SEQ ID NO: 10325 - RNA, 19 nt, synthetic construct
  misc_feature 1..19: note = Synthetic
  source 1..19: mol_type = other RNA
tacggggacctgctctata

SEQ ID NO: 10326 - RNA, 21 nt, synthetic construct
  misc_feature 1..21: note = Synthetic
  source 1..21: mol_type = other RNA
cgtacggggacctgctctata

SEQ ID NO: 10327 - RNA, 22 nt, synthetic construct
  misc_feature 1..22: note = Synthetic
  source 1..22: mol_type = other RNA
tcgtacggggacctgctctata

SEQ ID NO: 10328 - RNA, 23 nt, synthetic construct
  misc_feature 1..23: note = Synthetic
  source 1..23: mol_type = other RNA
ttcgtacggggacctgctctata

SEQ ID NO: 10329 - RNA, 24 nt, synthetic construct
  misc_feature 1..24: note = Synthetic
  source 1..24: mol_type = other RNA
tttcgtacggggacctgctctata

SEQ ID NO: 10330 - RNA, 18 nt, synthetic construct
  misc_feature 1..18: note = Synthetic
  source 1..18: mol_type = other RNA
ccagtgcatcaccagcta

SEQ ID NO: 10331 - RNA, 19 nt, synthetic construct
  misc_feature 1..19: note = Synthetic
  source 1..19: mol_type = other RNA
tccagtgcatcaccagcta

SEQ ID NO: 10332 - RNA, 21 nt, synthetic construct
  misc_feature 1..21: note = Synthetic
  source 1..21: mol_type = other RNA
ggtccagtgcatcaccagcta

SEQ ID NO: 10333 - RNA, 22 nt, synthetic construct
  misc_feature 1..22: note = Synthetic
  source 1..22: mol_type = other RNA
tggtccagtgcatcaccagcta

SEQ ID NO: 10334 - RNA, 23 nt, synthetic construct
  misc_feature 1..23: note = Synthetic
  source 1..23: mol_type = other RNA
gtggtccagtgcatcaccagcta

SEQ ID NO: 10335 - RNA, 24 nt, synthetic construct
  misc_feature 1..24: note = Synthetic
  source 1..24: mol_type = other RNA
cgtggtccagtgcatcaccagcta

SEQ ID NO: 10336 - RNA, 18 nt, synthetic construct
  misc_feature 1..18: note = Synthetic
  source 1..18: mol_type = other RNA
cgaagccgccaatccgta

SEQ ID NO: 10337 - RNA, 19 nt, synthetic construct
  misc_feature 1..19: note = Synthetic
  source 1..19: mol_type = other RNA
tcgaagccgccaatccgta

SEQ ID NO: 10338 - RNA, 21 nt, synthetic construct
  misc_feature 1..21: note = Synthetic
  source 1..21: mol_type = other RNA
cgtcgaagccgccaatccgta

SEQ ID NO: 10339 - RNA, 22 nt, synthetic construct
  misc_feature 1..22: note = Synthetic
  source 1..22: mol_type = other RNA
ccgtcgaagccgccaatccgta

SEQ ID NO: 10340 - RNA, 23 nt, synthetic construct
  misc_feature 1..23: note = Synthetic
  source 1..23: mol_type = other RNA
cccgtcgaagccgccaatccgta

SEQ ID NO: 10341 - RNA, 24 nt, synthetic construct
  misc_feature 1..24: note = Synthetic
  source 1..24: mol_type = other RNA
ccccgtcgaagccgccaatccgta

SEQ ID NO: 10342 - RNA, 18 nt, synthetic construct
  misc_feature 1..18: note = Synthetic
  source 1..18: mol_type = other RNA
gtcgcagcgattttcgta

SEQ ID NO: 10343 - RNA, 19 nt, synthetic construct
  misc_feature 1..19: note = Synthetic
  source 1..19: mol_type = other RNA
cgtcgcagcgattttcgta

SEQ ID NO: 10344 - RNA, 21 nt, synthetic construct
  misc_feature 1..21: note = Synthetic
  source 1..21: mol_type = other RNA
ggcgtcgcagcgattttcgta

SEQ ID NO: 10345 - RNA, 22 nt, synthetic construct
  misc_feature 1..22: note = Synthetic
  source 1..22: mol_type = other RNA
gggcgtcgcagcgattttcgta

SEQ ID NO: 10346 - RNA, 23 nt, synthetic construct
  misc_feature 1..23: note = Synthetic
  source 1..23: mol_type = other RNA
tgggcgtcgcagcgattttcgta

SEQ ID NO: 10347 - RNA, 24 nt, synthetic construct
  misc_feature 1..24: note = Synthetic
  source 1..24: mol_type = other RNA
gtgggcgtcgcagcgattttcgta

SEQ ID NO: 10348 - RNA, 18 nt, synthetic construct
  misc_feature 1..18: note = Synthetic
  source 1..18: mol_type = other RNA
cacaacgggcgcgtggta

SEQ ID NO: 10349 - RNA, 19 nt, synthetic construct
  misc_feature 1..19: note = Synthetic
  source 1..19: mol_type = other RNA
tcacaacgggcgcgtggta

SEQ ID NO: 10350 - RNA, 21 nt, synthetic construct
  misc_feature 1..21: note = Synthetic
  source 1..21: mol_type = other RNA
tttcacaacgggcgcgtggta

SEQ ID NO: 10351 - RNA, 22 nt, synthetic construct
  misc_feature 1..22: note = Synthetic
  source 1..22: mol_type = other RNA
gtttcacaacgggcgcgtggta

SEQ ID NO: 10352 - RNA, 23 nt, synthetic construct
  misc_feature 1..23: note = Synthetic
  source 1..23: mol_type = other RNA
tgtttcacaacgggcgcgtggta

SEQ ID NO: 10353 - RNA, 24 nt, synthetic construct
  misc_feature 1..24: note = Synthetic
  source 1..24: mol_type = other RNA
atgtttcacaacgggcgcgtggta

SEQ ID NO: 10354 - RNA, 18 nt, synthetic construct
  misc_feature 1..18: note = Synthetic
  source 1..18: mol_type = other RNA
ggagtgcatggccgtgta

SEQ ID NO: 10355 - RNA, 19 nt, synthetic construct
  misc_feature 1..19: note = Synthetic
  source 1..19: mol_type = other RNA
aggagtgcatggccgtgta

SEQ ID NO: 10356 - RNA, 21 nt, synthetic construct
  misc_feature 1..21: note = Synthetic
  source 1..21: mol_type = other RNA
cgaggagtgcatggccgtgta

SEQ ID NO: 10357 - RNA, 22 nt, synthetic construct
  misc_feature 1..22: note = Synthetic
  source 1..22: mol_type = other RNA
ccgaggagtgcatggccgtgta

SEQ ID NO: 10358 - RNA, 23 nt, synthetic construct
  misc_feature 1..23: note = Synthetic
  source 1..23: mol_type = other RNA
cccgaggagtgcatggccgtgta

SEQ ID NO: 10359 - RNA, 24 nt, synthetic construct
  misc_feature 1..24: note = Synthetic
  source 1..24: mol_type = other RNA
tcccgaggagtgcatggccgtgta

SEQ ID NO: 10360 - RNA, 18 nt, synthetic construct
  misc_feature 1..18: note = Synthetic
  source 1..18: mol_type = other RNA
ctccgcagtgcccgcaac

SEQ ID NO: 10361 - RNA, 19 nt, synthetic construct
  misc_feature 1..19: note = Synthetic
  source 1..19: mol_type = other RNA
cctccgcagtgcccgcaac

SEQ ID NO: 10362 - RNA, 21 nt, synthetic construct
  misc_feature 1..21: note = Synthetic
  source 1..21: mol_type = other RNA
ctcctccgcagtgcccgcaac

SEQ ID NO: 10363 - RNA, 22 nt, synthetic construct
  misc_feature 1..22: note = Synthetic
  source 1..22: mol_type = other RNA
cctcctccgcagtgcccgcaac

SEQ ID NO: 10364 - RNA, 23 nt, synthetic construct
  misc_feature 1..23: note = Synthetic
  source 1..23: mol_type = other RNA
ccctcctccgcagtgcccgcaac

SEQ ID NO: 10365 - RNA, 24 nt, synthetic construct
  misc_feature 1..24: note = Synthetic
  source 1..24: mol_type = other RNA
gccctcctccgcagtgcccgcaac

SEQ ID NO: 10366 - RNA, 18 nt, synthetic construct
  misc_feature 1..18: note = Synthetic
  source 1..18: mol_type = other RNA
acccagccgcgcgcgaac

SEQ ID NO: 10367 - RNA, 19 nt, synthetic construct
  misc_feature 1..19: note = Synthetic
  source 1..19: mol_type = other RNA
cacccagccgcgcgcgaac

SEQ ID NO: 10368 - RNA, 21 nt, synthetic construct
  misc_feature 1..21: note = Synthetic
  source 1..21: mol_type = other RNA
ctcacccagccgcgcgcgaac

SEQ ID NO: 10369 - RNA, 22 nt, synthetic construct
  misc_feature 1..22: note = Synthetic
  source 1..22: mol_type = other RNA
gctcacccagccgcgcgcgaac

SEQ ID NO: 10370 - RNA, 23 nt, synthetic construct
  misc_feature 1..23: note = Synthetic
  source 1..23: mol_type = other RNA
cgctcacccagccgcgcgcgaac

SEQ ID NO: 10371 - RNA, 24 nt, synthetic construct
  misc_feature 1..24: note = Synthetic
  source 1..24: mol_type = other RNA
acgctcacccagccgcgcgcgaac

SEQ ID NO: 10372 - RNA, 18 nt, synthetic construct
  misc_feature 1..18: note = Synthetic
  source 1..18: mol_type = other RNA
gcggatgaccggccgcac

SEQ ID NO: 10373 - RNA, 19 nt, synthetic construct
  misc_feature 1..19: note = Synthetic
  source 1..19: mol_type = other RNA
cgcggatgaccggccgcac

SEQ ID NO: 10374 - RNA, 21 nt, synthetic construct
  misc_feature 1..21: note = Synthetic
  source 1..21: mol_type = other RNA
gccgcggatgaccggccgcac

SEQ ID NO: 10375 - RNA, 22 nt, synthetic construct
  misc_feature 1..22: note = Synthetic
  source 1..22: mol_type = other RNA
cgccgcggatgaccggccgcac

SEQ ID NO: 10376 - RNA, 23 nt, synthetic construct
  misc_feature 1..23: note = Synthetic
  source 1..23: mol_type = other RNA
acgccgcggatgaccggccgcac

SEQ ID NO: 10377 - RNA, 24 nt, synthetic construct
  misc_feature 1..24: note = Synthetic
  source 1..24: mol_type = other RNA
gacgccgcggatgaccggccgcac

SEQ ID NO: 10378 - RNA, 18 nt, synthetic construct
  misc_feature 1..18: note = Synthetic
  source 1..18: mol_type = other RNA
gtgcgaagtctggacgac

SEQ ID NO: 10379 - RNA, 19 nt, synthetic construct
  misc_feature 1..19: note = Synthetic
  source 1..19: mol_type = other RNA
cgtgcgaagtctggacgac

SEQ ID NO: 10380 - RNA, 21 nt, synthetic construct
  misc_feature 1..21: note = Synthetic
  source 1..21: mol_type = other RNA
gccgtgcgaagtctggacgac

SEQ ID NO: 10381 - RNA, 22 nt, synthetic construct
  misc_feature 1..22: note = Synthetic
  source 1..22: mol_type = other RNA
ggccgtgcgaagtctggacgac

SEQ ID NO: 10382 - RNA, 23 nt, synthetic construct
  misc_feature 1..23: note = Synthetic
  source 1..23: mol_type = other RNA
aggccgtgcgaagtctggacgac

SEQ ID NO: 10383 - RNA, 24 nt, synthetic construct
  misc_feature 1..24: note = Synthetic
  source 1..24: mol_type = other RNA
aaggccgtgcgaagtctggacgac

SEQ ID NO: 10384 - RNA, 18 nt, synthetic construct
  misc_feature 1..18: note = Synthetic
  source 1..18: mol_type = other RNA
cgcaaccccgtcaccgac

SEQ ID NO: 10385 - RNA, 19 nt, synthetic construct
  misc_feature 1..19: note = Synthetic
  source 1..19: mol_type = other RNA
ccgcaaccccgtcaccgac

SEQ ID NO: 10386 - RNA, 21 nt, synthetic construct
  misc_feature 1..21: note = Synthetic
  source 1..21: mol_type = other RNA
gtccgcaaccccgtcaccgac

SEQ ID NO: 10387 - RNA, 22 nt, synthetic construct
  misc_feature 1..22: note = Synthetic
  source 1..22: mol_type = other RNA
cgtccgcaaccccgtcaccgac

SEQ ID NO: 10388 - RNA, 23 nt, synthetic construct
  misc_feature 1..23: note = Synthetic
  source 1..23: mol_type = other RNA
ccgtccgcaaccccgtcaccgac

SEQ ID NO: 10389 - RNA, 24 nt, synthetic construct
  misc_feature 1..24: note = Synthetic
  source 1..24: mol_type = other RNA
accgtccgcaaccccgtcaccgac

SEQ ID NO: 10390 - RNA, 18 nt, synthetic construct
  misc_feature 1..18: note = Synthetic
  source 1..18: mol_type = other RNA
tgctcggcggcgcccgac

SEQ ID NO: 10391 - RNA, 19 nt, synthetic construct
  misc_feature 1..19: note = Synthetic
  source 1..19: mol_type = other RNA
ctgctcggcggcgcccgac

SEQ ID NO: 10392 - RNA, 21 nt, synthetic construct
  misc_feature 1..21: note = Synthetic
  source 1..21: mol_type = other RNA
ctctgctcggcggcgcccgac

SEQ ID NO: 10393 - RNA, 22 nt, synthetic construct
  misc_feature 1..22: note = Synthetic
  source 1..22: mol_type = other RNA
gctctgctcggcggcgcccgac

SEQ ID NO: 10394 - RNA, 23 nt, synthetic construct
  misc_feature 1..23: note = Synthetic
  source 1..23: mol_type = other RNA
tgctctgctcggcggcgcccgac

SEQ ID NO: 10395 - RNA, 24 nt, synthetic construct
  misc_feature 1..24: note = Synthetic
  source 1..24: mol_type = other RNA
ctgctctgctcggcggcgcccgac

SEQ ID NO: 10396 - RNA, 18 nt, synthetic construct
  misc_feature 1..18: note = Synthetic
  source 1..18: mol_type = other RNA
tttgtgggggtggccgac

SEQ ID NO: 10397 - RNA, 19 nt, synthetic construct
  misc_feature 1..19: note = Synthetic
  source 1..19: mol_type = other RNA
ctttgtgggggtggccgac

SEQ ID NO: 10398 - RNA, 21 nt, synthetic construct
  misc_feature 1..21: note = Synthetic
  source 1..21: mol_type = other RNA
ttctttgtgggggtggccgac

SEQ ID NO: 10399 - RNA, 22 nt, synthetic construct
  misc_feature 1..22: note = Synthetic
  source 1..22: mol_type = other RNA
cttctttgtgggggtggccgac

SEQ ID NO: 10400 - RNA, 23 nt, synthetic construct
  misc_feature 1..23: note = Synthetic
  source 1..23: mol_type = other RNA
acttctttgtgggggtggccgac

SEQ ID NO: 10401 - RNA, 24 nt, synthetic construct
  misc_feature 1..24: note = Synthetic
  source 1..24: mol_type = other RNA
gacttctttgtgggggtggccgac

SEQ ID NO: 10402 - RNA, 18 nt, synthetic construct
  misc_feature 1..18: note = Synthetic
  source 1..18: mol_type = other RNA
caggaggagcagctcgac

SEQ ID NO: 10403 - RNA, 19 nt, synthetic construct
  misc_feature 1..19: note = Synthetic
  source 1..19: mol_type = other RNA
gcaggaggagcagctcgac

SEQ ID NO: 10404 - RNA, 21 nt, synthetic construct
  misc_feature 1..21: note = Synthetic
  source 1..21: mol_type = other RNA
atgcaggaggagcagctcgac

SEQ ID NO: 10405 - RNA, 22 nt, synthetic construct
  misc_feature 1..22: note = Synthetic
  source 1..22: mol_type = other RNA
gatgcaggaggagcagctcgac

SEQ ID NO: 10406 - RNA, 23 nt, synthetic construct
  misc_feature 1..23: note = Synthetic
  source 1..23: mol_type = other RNA
agatgcaggaggagcagctcgac

SEQ ID NO: 10407 - RNA, 24 nt, synthetic construct
  misc_feature 1..24: note = Synthetic
  source 1..24: mol_type = other RNA
gagatgcaggaggagcagctcgac

SEQ ID NO: 10408 - RNA, 18 nt, synthetic construct
  misc_feature 1..18: note = Synthetic
  source 1..18: mol_type = other RNA
ggcgtttacgcgggggac

SEQ ID NO: 10409 - RNA, 19 nt, synthetic construct
  misc_feature 1..19: note = Synthetic
  source 1..19: mol_type = other RNA
gggcgtttacgcgggggac

SEQ ID NO: 10410 - RNA, 21 nt, synthetic construct
  misc_feature 1..21: note = Synthetic
  source 1..21: mol_type = other RNA
gggggcgtttacgcgggggac

SEQ ID NO: 10411 - RNA, 22 nt, synthetic construct
  misc_feature 1..22: note = Synthetic
  source 1..22: mol_type = other RNA
cgggggcgtttacgcgggggac

SEQ ID NO: 10412 - RNA, 23 nt, synthetic construct
  misc_feature 1..23: note = Synthetic
  source 1..23: mol_type = other RNA
ccgggggcgtttacgcgggggac

SEQ ID NO: 10413 - RNA, 24 nt, synthetic construct
  misc_feature 1..24: note = Synthetic
  source 1..24: mol_type = other RNA
gccgggggcgtttacgcgggggac

SEQ ID NO: 10414 - RNA, 18 nt, synthetic construct
  misc_feature 1..18: note = Synthetic
  source 1..18: mol_type = other RNA
ccgcgcgcgaacgtggac

SEQ ID NO: 10415 - RNA, 19 nt, synthetic construct
  misc_feature 1..19: note = Synthetic
  source 1..19: mol_type = other RNA
gccgcgcgcgaacgtggac

SEQ ID NO: 10416 - RNA, 21 nt, synthetic construct
  misc_feature 1..21: note = Synthetic
  source 1..21: mol_type = other RNA
cagccgcgcgcgaacgtggac

SEQ ID NO: 10417 - RNA, 22 nt, synthetic construct
  misc_feature 1..22: note = Synthetic
  source 1..22: mol_type = other RNA
ccagccgcgcgcgaacgtggac

SEQ ID NO: 10418 - RNA, 23 nt, synthetic construct
  misc_feature 1..23: note = Synthetic
  source 1..23: mol_type = other RNA
cccagccgcgcgcgaacgtggac

SEQ ID NO: 10419 - RNA, 24 nt, synthetic construct
  misc_feature 1..24: note = Synthetic
  source 1..24: mol_type = other RNA
acccagccgcgcgcgaacgtggac

SEQ ID NO: 10420 - RNA, 18 nt, synthetic construct
  misc_feature 1..18: note = Synthetic
  source 1..18: mol_type = other RNA
ttgccgatgcaacgatac

SEQ ID NO: 10421 - RNA, 19 nt, synthetic construct
  misc_feature 1..19: note = Synthetic
  source 1..19: mol_type = other RNA
gttgccgatgcaacgatac

SEQ ID NO: 10422 - RNA, 21 nt, synthetic construct
  misc_feature 1..21: note = Synthetic
  source 1..21: mol_type = other RNA
ttgttgccgatgcaacgatac

SEQ ID NO: 10423 - RNA, 22 nt, synthetic construct
  misc_feature 1..22: note = Synthetic
  source 1..22: mol_type = other RNA
gttgttgccgatgcaacgatac

SEQ ID NO: 10424 - RNA, 23 nt, synthetic construct
  misc_feature 1..23: note = Synthetic
  source 1..23: mol_type = other RNA
tgttgttgccgatgcaacgatac

SEQ ID NO: 10425 - RNA, 24 nt, synthetic construct
  misc_feature 1..24: note = Synthetic
  source 1..24: mol_type = other RNA
ttgttgttgccgatgcaacgatac

SEQ ID NO: 10426 - RNA, 18 nt, synthetic construct
  misc_feature 1..18: note = Synthetic
  source 1..18: mol_type = other RNA
cagtgcatcaccagctac

SEQ ID NO: 10427 - RNA, 19 nt, synthetic construct
  misc_feature 1..19: note = Synthetic
  source 1..19: mol_type = other RNA
ccagtgcatcaccagctac

SEQ ID NO: 10428 - RNA, 21 nt, synthetic construct
  misc_feature 1..21: note = Synthetic
  source 1..21: mol_type = other RNA
gtccagtgcatcaccagctac

SEQ ID NO: 10429 - RNA, 22 nt, synthetic construct
  misc_feature 1..22: note = Synthetic
  source 1..22: mol_type = other RNA
ggtccagtgcatcaccagctac

SEQ ID NO: 10430 - RNA, 23 nt, synthetic construct
  misc_feature 1..23: note = Synthetic
  source 1..23: mol_type = other RNA
tggtccagtgcatcaccagctac

SEQ ID NO: 10431 - RNA, 24 nt, synthetic construct
  misc_feature 1..24: note = Synthetic
  source 1..24: mol_type = other RNA
gtggtccagtgcatcaccagctac

SEQ ID NO: 10432 - RNA, 18 nt, synthetic construct
  misc_feature 1..18: note = Synthetic
  source 1..18: mol_type = other RNA
tcgcagcgattttcgtac

SEQ ID NO: 10433 - RNA, 19 nt, synthetic construct
  misc_feature 1..19: note = Synthetic
  source 1..19: mol_type = other RNA
gtcgcagcgattttcgtac

SEQ ID NO: 10434 - RNA, 21 nt, synthetic construct
  misc_feature 1..21: note = Synthetic
  source 1..21: mol_type = other RNA
gcgtcgcagcgattttcgtac

SEQ ID NO: 10435 - RNA, 22 nt, synthetic construct
  misc_feature 1..22: note = Synthetic
  source 1..22: mol_type = other RNA
ggcgtcgcagcgattttcgtac

SEQ ID NO: 10436 - RNA, 23 nt, synthetic construct
  misc_feature 1..23: note = Synthetic
  source 1..23: mol_type = other RNA
gggcgtcgcagcgattttcgtac

SEQ ID NO: 10437 - RNA, 24 nt, synthetic construct
  misc_feature 1..24: note = Synthetic
  source 1..24: mol_type = other RNA
tgggcgtcgcagcgattttcgtac

SEQ ID NO: 10438 - RNA, 18 nt, synthetic construct
  misc_feature 1..18: note = Synthetic
  source 1..18: mol_type = other RNA
gagtgcatggccgtgtac

SEQ ID NO: 10439 - RNA, 19 nt, synthetic construct
  misc_feature 1..19: note = Synthetic
  source 1..19: mol_type = other RNA
ggagtgcatggccgtgtac

SEQ ID NO: 10440 - RNA, 21 nt, synthetic construct
  misc_feature 1..21: note = Synthetic
  source 1..21: mol_type = other RNA
gaggagtgcatggccgtgtac

SEQ ID NO: 10441 - RNA, 22 nt, synthetic construct
  misc_feature 1..22: note = Synthetic
  source 1..22: mol_type = other RNA
cgaggagtgcatggccgtgtac

SEQ ID NO: 10442 - RNA, 23 nt, synthetic construct
  misc_feature 1..23: note = Synthetic
  source 1..23: mol_type = other RNA
ccgaggagtgcatggccgtgtac

SEQ ID NO: 10443 - RNA, 24 nt, synthetic construct
  misc_feature 1..24: note = Synthetic
  source 1..24: mol_type = other RNA
cccgaggagtgcatggccgtgtac

SEQ ID NO: 10444 - RNA, 18 nt, synthetic construct
  misc_feature 1..18: note = Synthetic
  source 1..18: mol_type = other RNA
gccgccgggggcgtttac

SEQ ID NO: 10445 - RNA, 19 nt, synthetic construct
  misc_feature 1..19: note = Synthetic
  source 1..19: mol_type = other RNA
cgccgccgggggcgtttac

SEQ ID NO: 10446 - RNA, 21 nt, synthetic construct
  misc_feature 1..21: note = Synthetic
  source 1..21: mol_type = other RNA
cgcgccgccgggggcgtttac

SEQ ID NO: 10447 - RNA, 22 nt, synthetic construct
  misc_feature 1..22: note = Synthetic
  source 1..22: mol_type = other RNA
acgcgccgccgggggcgtttac

SEQ ID NO: 10448 - RNA, 23 nt, synthetic construct
  misc_feature 1..23: note = Synthetic
  source 1..23: mol_type = other RNA
gacgcgccgccgggggcgtttac

SEQ ID NO: 10449 - RNA, 24 nt, synthetic construct
  misc_feature 1..24: note = Synthetic
  source 1..24: mol_type = other RNA
ggacgcgccgccgggggcgtttac

SEQ ID NO: 10450 - RNA, 18 nt, synthetic construct
  misc_feature 1..18: note = Synthetic
  source 1..18: mol_type = other RNA
cttccccaaaacttttac

SEQ ID NO: 10451 - RNA, 19 nt, synthetic construct
  misc_feature 1..19: note = Synthetic
  source 1..19: mol_type = other RNA
ccttccccaaaacttttac

SEQ ID NO: 10452 - RNA, 21 nt, synthetic construct
  misc_feature 1..21: note = Synthetic
  source 1..21: mol_type = other RNA
aaccttccccaaaacttttac

SEQ ID NO: 10453 - RNA, 22 nt, synthetic construct
  misc_feature 1..22: note = Synthetic
  source 1..22: mol_type = other RNA
caaccttccccaaaacttttac

SEQ ID NO: 10454 - RNA, 23 nt, synthetic construct
  misc_feature 1..23: note = Synthetic
  source 1..23: mol_type = other RNA
gcaaccttccccaaaacttttac

SEQ ID NO: 10455 - RNA, 24 nt, synthetic construct
  misc_feature 1..24: note = Synthetic
  source 1..24: mol_type = other RNA
ggcaaccttccccaaaacttttac

SEQ ID NO: 10456 - RNA, 18 nt, synthetic construct
  misc_feature 1..18: note = Synthetic
  source 1..18: mol_type = other RNA
cggatgaccggccgcacc

SEQ ID NO: 10457 - RNA, 19 nt, synthetic construct
  misc_feature 1..19: note = Synthetic
  source 1..19: mol_type = other RNA
gcggatgaccggccgcacc

SEQ ID NO: 10458 - RNA, 21 nt, synthetic construct
  misc_feature 1..21: note = Synthetic
  source 1..21: mol_type = other RNA
ccgcggatgaccggccgcacc

SEQ ID NO: 10459 - RNA, 22 nt, synthetic construct
  misc_feature 1..22: note = Synthetic
  source 1..22: mol_type = other RNA
gccgcggatgaccggccgcacc

SEQ ID NO: 10460 - RNA, 23 nt, synthetic construct
  misc_feature 1..23: note = Synthetic
  source 1..23: mol_type = other RNA
cgccgcggatgaccggccgcacc

SEQ ID NO: 10461 - RNA, 24 nt, synthetic construct
  misc_feature 1..24: note = Synthetic
  source 1..24: mol_type = other RNA
acgccgcggatgaccggccgcacc

SEQ ID NO: 10462 - RNA, 18 nt, synthetic construct
  misc_feature 1..18: note = Synthetic
  source 1..18: mol_type = other RNA
cggggccgctgctgcacc

SEQ ID NO: 10463 - RNA, 19 nt, synthetic construct
  misc_feature 1..19: note = Synthetic
  source 1..19: mol_type = other RNA
gcggggccgctgctgcacc

SEQ ID NO: 10464 - RNA, 21 nt, synthetic construct
  misc_feature 1..21: note = Synthetic
  source 1..21: mol_type = other RNA
tcgcggggccgctgctgcacc

SEQ ID NO: 10465 - RNA, 22 nt, synthetic construct
  misc_feature 1..22: note = Synthetic
  source 1..22: mol_type = other RNA
ctcgcggggccgctgctgcacc

SEQ ID NO: 10466 - RNA, 23 nt, synthetic construct
  misc_feature 1..23: note = Synthetic
  source 1..23: mol_type = other RNA
tctcgcggggccgctgctgcacc

SEQ ID NO: 10467 - RNA, 24 nt, synthetic construct
  misc_feature 1..24: note = Synthetic
  source 1..24: mol_type = other RNA
ttctcgcggggccgctgctgcacc

SEQ ID NO: 10468 - RNA, 18 nt, synthetic construct
  misc_feature 1..18: note = Synthetic
  source 1..18: mol_type = other RNA
gcatgtaacgtggcgacc

SEQ ID NO: 10469 - RNA, 19 nt, synthetic construct
  misc_feature 1..19: note = Synthetic
  source 1..19: mol_type = other RNA
ggcatgtaacgtggcgacc

SEQ ID NO: 10470 - RNA, 21 nt, synthetic construct
  misc_feature 1..21: note = Synthetic
  source 1..21: mol_type = other RNA
gcggcatgtaacgtggcgacc

SEQ ID NO: 10471 - RNA, 22 nt, synthetic construct
  misc_feature 1..22: note = Synthetic
  source 1..22: mol_type = other RNA
ggcggcatgtaacgtggcgacc

SEQ ID NO: 10472 - RNA, 23 nt, synthetic construct
  misc_feature 1..23: note = Synthetic
  source 1..23: mol_type = other RNA
cggcggcatgtaacgtggcgacc

SEQ ID NO: 10473 - RNA, 24 nt, synthetic construct
  misc_feature 1..24: note = Synthetic
  source 1..24: mol_type = other RNA
gcggcggcatgtaacgtggcgacc

SEQ ID NO: 10474 - RNA, 18 nt, synthetic construct
  misc_feature 1..18: note = Synthetic
  source 1..18: mol_type = other RNA
gcggaaggccagatgacc

SEQ ID NO: 10475 - RNA, 19 nt, synthetic construct
  misc_feature 1..19: note = Synthetic
  source 1..19: mol_type = other RNA
cgcggaaggccagatgacc

SEQ ID NO: 10476 - RNA, 21 nt, synthetic construct
  misc_feature 1..21: note = Synthetic
  source 1..21: mol_type = other RNA
gtcgcggaaggccagatgacc

SEQ ID NO: 10477 - RNA, 22 nt, synthetic construct
  misc_feature 1..22: note = Synthetic
  source 1..22: mol_type = other RNA
ggtcgcggaaggccagatgacc

SEQ ID NO: 10478 - RNA, 23 nt, synthetic construct
  misc_feature 1..23: note = Synthetic
  source 1..23: mol_type = other RNA
gggtcgcggaaggccagatgacc

SEQ ID NO: 10479 - RNA, 24 nt, synthetic construct
  misc_feature 1..24: note = Synthetic
  source 1..24: mol_type = other RNA
tgggtcgcggaaggccagatgacc

SEQ ID NO: 10480 - RNA, 18 nt, synthetic construct
  misc_feature 1..18: note = Synthetic
  source 1..18: mol_type = other RNA
cgtacgtcgtgacctacc

SEQ ID NO: 10481 - RNA, 19 nt, synthetic construct
  misc_feature 1..19: note = Synthetic
  source 1..19: mol_type = other RNA
tcgtacgtcgtgacctacc

SEQ ID NO: 10482 - RNA, 21 nt, synthetic construct
  misc_feature 1..21: note = Synthetic
  source 1..21: mol_type = other RNA
tctcgtacgtcgtgacctacc

SEQ ID NO: 10483 - RNA, 22 nt, synthetic construct
  misc_feature 1..22: note = Synthetic
  source 1..22: mol_type = other RNA
gtctcgtacgtcgtgacctacc

SEQ ID NO: 10484 - RNA, 23 nt, synthetic construct
  misc_feature 1..23: note = Synthetic
  source 1..23: mol_type = other RNA
ggtctcgtacgtcgtgacctacc

SEQ ID NO: 10485 - RNA, 24 nt, synthetic construct
  misc_feature 1..24: note = Synthetic
  source 1..24: mol_type = other RNA
tggtctcgtacgtcgtgacctacc

SEQ ID NO: 10486 - RNA, 18 nt, synthetic construct
  misc_feature 1..18: note = Synthetic
  source 1..18: mol_type = other RNA
cgcggccacggccaaccc

SEQ ID NO: 10487 - RNA, 19 nt, synthetic construct
  misc_feature 1..19: note = Synthetic
  source 1..19: mol_type = other RNA
tcgcggccacggccaaccc

SEQ ID NO: 10488 - RNA, 21 nt, synthetic construct
  misc_feature 1..21: note = Synthetic
  source 1..21: mol_type = other RNA
cttcgcggccacggccaaccc

SEQ ID NO: 10489 - RNA, 22 nt, synthetic construct
  misc_feature 1..22: note = Synthetic
  source 1..22: mol_type = other RNA
ccttcgcggccacggccaaccc

SEQ ID NO: 10490 - RNA, 23 nt, synthetic construct
  misc_feature 1..23: note = Synthetic
  source 1..23: mol_type = other RNA
gccttcgcggccacggccaaccc

SEQ ID NO: 10491 - RNA, 24 nt, synthetic construct
  misc_feature 1..24: note = Synthetic
  source 1..24: mol_type = other RNA
ggccttcgcggccacggccaaccc

SEQ ID NO: 10492 - RNA, 18 nt, synthetic construct
  misc_feature 1..18: note = Synthetic
  source 1..18: mol_type = other RNA
ccgccggccctgcaaccc

SEQ ID NO: 10493 - RNA, 19 nt, synthetic construct
  misc_feature 1..19: note = Synthetic
  source 1..19: mol_type = other RNA
tccgccggccctgcaaccc

SEQ ID NO: 10494 - RNA, 21 nt, synthetic construct
  misc_feature 1..21: note = Synthetic
  source 1..21: mol_type = other RNA
cttccgccggccctgcaaccc

SEQ ID NO: 10495 - RNA, 22 nt, synthetic construct
  misc_feature 1..22: note = Synthetic
  source 1..22: mol_type = other RNA
acttccgccggccctgcaaccc

SEQ ID NO: 10496 - RNA, 23 nt, synthetic construct
  misc_feature 1..23: note = Synthetic
  source 1..23: mol_type = other RNA
tacttccgccggccctgcaaccc

SEQ ID NO: 10497 - RNA, 24 nt, synthetic construct
  misc_feature 1..24: note = Synthetic
  source 1..24: mol_type = other RNA
ctacttccgccggccctgcaaccc

SEQ ID NO: 10498 - RNA, 18 nt, synthetic construct
  misc_feature 1..18: note = Synthetic
  source 1..18: mol_type = other RNA
cggaaggccagatgaccc

SEQ ID NO: 10499 - RNA, 19 nt, synthetic construct
  misc_feature 1..19: note = Synthetic
  source 1..19: mol_type = other RNA
gcggaaggccagatgaccc

SEQ ID NO: 10500 - RNA, 21 nt, synthetic construct
  misc_feature 1..21: note = Synthetic
  source 1..21: mol_type = other RNA
tcgcggaaggccagatgaccc

SEQ ID NO: 10501 - RNA, 22 nt, synthetic construct
  misc_feature 1..22: note = Synthetic
  source 1..22: mol_type = other RNA
gtcgcggaaggccagatgaccc

SEQ ID NO: 10502 - RNA, 23 nt, synthetic construct
  misc_feature 1..23: note = Synthetic
  source 1..23: mol_type = other RNA
ggtcgcggaaggccagatgaccc

SEQ ID NO: 10503 - RNA, 24 nt, synthetic construct
  misc_feature 1..24: note = Synthetic
  source 1..24: mol_type = other RNA
gggtcgcggaaggccagatgaccc

SEQ ID NO: 10504 - RNA, 18 nt, synthetic construct
  misc_feature 1..18: note = Synthetic
  source 1..18: mol_type = other RNA
cgccggccctgcaacccc

SEQ ID NO: 10505 - RNA, 19 nt, synthetic construct
  misc_feature 1..19: note = Synthetic
  source 1..19: mol_type = other RNA
ccgccggccctgcaacccc

SEQ ID NO: 10506 - RNA, 21 nt, synthetic construct
  misc_feature 1..21: note = Synthetic
  source 1..21: mol_type = other RNA
ttccgccggccctgcaacccc

SEQ ID NO: 10507 - RNA, 22 nt, synthetic construct
  misc_feature 1..22: note = Synthetic
  source 1..22: mol_type = other RNA
cttccgccggccctgcaacccc

SEQ ID NO: 10508 - RNA, 23 nt, synthetic construct
  misc_feature 1..23: note = Synthetic
  source 1..23: mol_type = other RNA
acttccgccggccctgcaacccc

SEQ ID NO: 10509 - RNA, 24 nt, synthetic construct
  misc_feature 1..24: note = Synthetic
  source 1..24: mol_type = other RNA
tacttccgccggccctgcaacccc

SEQ ID NO: 10510 - RNA, 18 nt, synthetic construct
  misc_feature 1..18: note = Synthetic
  source 1..18: mol_type = other RNA
gccggccctgcaaccccc

SEQ ID NO: 10511 - RNA, 19 nt, synthetic construct
  misc_feature 1..19: note = Synthetic
  source 1..19: mol_type = other RNA
cgccggccctgcaaccccc

SEQ ID NO: 10512 - RNA, 21 nt, synthetic construct
  misc_feature 1..21: note = Synthetic
  source 1..21: mol_type = other RNA
tccgccggccctgcaaccccc

SEQ ID NO: 10513 - RNA, 22 nt, synthetic construct
  misc_feature 1..22: note = Synthetic
  source 1..22: mol_type = other RNA
ttccgccggccctgcaaccccc

SEQ ID NO: 10514 - RNA, 23 nt, synthetic construct
  misc_feature 1..23: note = Synthetic
  source 1..23: mol_type = other RNA
cttccgccggccctgcaaccccc

SEQ ID NO: 10515 - RNA, 24 nt, synthetic construct
  misc_feature 1..24: note = Synthetic
  source 1..24: mol_type = other RNA
acttccgccggccctgcaaccccc

SEQ ID NO: 10516 - RNA, 18 nt, synthetic construct
  misc_feature 1..18: note = Synthetic
  source 1..18: mol_type = other RNA
gtacagtttaagcgcccc

SEQ ID NO: 10517 - RNA, 19 nt, synthetic construct
  misc_feature 1..19: note = Synthetic
  source 1..19: mol_type = other RNA
cgtacagtttaagcgcccc

SEQ ID NO: 10518 - RNA, 21 nt, synthetic construct
  misc_feature 1..21: note = Synthetic
  source 1..21: mol_type = other RNA
gacgtacagtttaagcgcccc

SEQ ID NO: 10519 - RNA, 22 nt, synthetic construct
  misc_feature 1..22: note = Synthetic
  source 1..22: mol_type = other RNA
cgacgtacagtttaagcgcccc

SEQ ID NO: 10520 - RNA, 23 nt, synthetic construct
  misc_feature 1..23: note = Synthetic
  source 1..23: mol_type = other RNA
gcgacgtacagtttaagcgcccc

SEQ ID NO: 10521 - RNA, 24 nt, synthetic construct
  misc_feature 1..24: note = Synthetic
  source 1..24: mol_type = other RNA
agcgacgtacagtttaagcgcccc

SEQ ID NO: 10522 - RNA, 18 nt, synthetic construct
  misc_feature 1..18: note = Synthetic
  source 1..18: mol_type = other RNA
tggtctttctggaggccc

SEQ ID NO: 10523 - RNA, 19 nt, synthetic construct
  misc_feature 1..19: note = Synthetic
  source 1..19: mol_type = other RNA
ctggtctttctggaggccc

SEQ ID NO: 10524 - RNA, 21 nt, synthetic construct
  misc_feature 1..21: note = Synthetic
  source 1..21: mol_type = other RNA
agctggtctttctggaggccc

SEQ ID NO: 10525 - RNA, 22 nt, synthetic construct
  misc_feature 1..22: note = Synthetic
  source 1..22: mol_type = other RNA
aagctggtctttctggaggccc

SEQ ID NO: 10526 - RNA, 23 nt, synthetic construct
  misc_feature 1..23: note = Synthetic
  source 1..23: mol_type = other RNA
gaagctggtctttctggaggccc

SEQ ID NO: 10527 - RNA, 24 nt, synthetic construct
  misc_feature 1..24: note = Synthetic
  source 1..24: mol_type = other RNA
agaagctggtctttctggaggccc

SEQ ID NO: 10528 - RNA, 18 nt, synthetic construct
  misc_feature 1..18: note = Synthetic
  source 1..18: mol_type = other RNA
cgttcccccggccggccc

SEQ ID NO: 10529 - RNA, 19 nt, synthetic construct
  misc_feature 1..19: note = Synthetic
  source 1..19: mol_type = other RNA
acgttcccccggccggccc

SEQ ID NO: 10530 - RNA, 21 nt, synthetic construct
  misc_feature 1..21: note = Synthetic
  source 1..21: mol_type = other RNA
ggacgttcccccggccggccc

SEQ ID NO: 10531 - RNA, 22 nt, synthetic construct
  misc_feature 1..22: note = Synthetic
  source 1..22: mol_type = other RNA
gggacgttcccccggccggccc

SEQ ID NO: 10532 - RNA, 23 nt, synthetic construct
  misc_feature 1..23: note = Synthetic
  source 1..23: mol_type = other RNA
ggggacgttcccccggccggccc

SEQ ID NO: 10533 - RNA, 24 nt, synthetic construct
  misc_feature 1..24: note = Synthetic
  source 1..24: mol_type = other RNA
gggggacgttcccccggccggccc

SEQ ID NO: 10534 - RNA, 18 nt, synthetic construct
  misc_feature 1..18: note = Synthetic
  source 1..18: mol_type = other RNA
gggggcagcgcctggccc

SEQ ID NO: 10535 - RNA, 19 nt, synthetic construct
  misc_feature 1..19: note = Synthetic
  source 1..19: mol_type = other RNA
tgggggcagcgcctggccc

SEQ ID NO: 10536 - RNA, 21 nt, synthetic construct
  misc_feature 1..21: note = Synthetic
  source 1..21: mol_type = other RNA
cctgggggcagcgcctggccc

SEQ ID NO: 10537 - RNA, 22 nt, synthetic construct
  misc_feature 1..22: note = Synthetic
  source 1..22: mol_type = other RNA
gcctgggggcagcgcctggccc

SEQ ID NO: 10538 - RNA, 23 nt, synthetic construct
  misc_feature 1..23: note = Synthetic
  source 1..23: mol_type = other RNA
cgcctgggggcagcgcctggccc

SEQ ID NO: 10539 - RNA, 24 nt, synthetic construct
  misc_feature 1..24: note = Synthetic
  source 1..24: mol_type = other RNA
acgcctgggggcagcgcctggccc

SEQ ID NO: 10540 - RNA, 18 nt, synthetic construct
  misc_feature 1..18: note = Synthetic
  source 1..18: mol_type = other RNA
ctgacgttcgtcctgccc

SEQ ID NO: 10541 - RNA, 19 nt, synthetic construct
  misc_feature 1..19: note = Synthetic
  source 1..19: mol_type = other RNA
cctgacgttcgtcctgccc

SEQ ID NO: 10542 - RNA, 21 nt, synthetic construct
  misc_feature 1..21: note = Synthetic
  source 1..21: mol_type = other RNA
gacctgacgttcgtcctgccc

SEQ ID NO: 10543 - RNA, 22 nt, synthetic construct
  misc_feature 1..22: note = Synthetic
  source 1..22: mol_type = other RNA
ggacctgacgttcgtcctgccc

SEQ ID NO: 10544 - RNA, 23 nt, synthetic construct
  misc_feature 1..23: note = Synthetic
  source 1..23: mol_type = other RNA
tggacctgacgttcgtcctgccc

SEQ ID NO: 10545 - RNA, 24 nt, synthetic construct
  misc_feature 1..24: note = Synthetic
  source 1..24: mol_type = other RNA
atggacctgacgttcgtcctgccc

SEQ ID NO: 10546 - RNA, 18 nt, synthetic construct
  misc_feature 1..18: note = Synthetic
  source 1..18: mol_type = other RNA
ctcgggggagaccttccc

SEQ ID NO: 10547 - RNA, 19 nt, synthetic construct
  misc_feature 1..19: note = Synthetic
  source 1..19: mol_type = other RNA
cctcgggggagaccttccc

SEQ ID NO: 10548 - RNA, 21 nt, synthetic construct
  misc_feature 1..21: note = Synthetic
  source 1..21: mol_type = other RNA
tacctcgggggagaccttccc

SEQ ID NO: 10549 - RNA, 22 nt, synthetic construct
  misc_feature 1..22: note = Synthetic
  source 1..22: mol_type = other RNA
ctacctcgggggagaccttccc

SEQ ID NO: 10550 - RNA, 23 nt, synthetic construct
  misc_feature 1..23: note = Synthetic
  source 1..23: mol_type = other RNA
cctacctcgggggagaccttccc

SEQ ID NO: 10551 - RNA, 24 nt, synthetic construct
  misc_feature 1..24: note = Synthetic
  source 1..24: mol_type = other RNA
acctacctcgggggagaccttccc

SEQ ID NO: 10552 - RNA, 18 nt, synthetic construct
  misc_feature 1..18: note = Synthetic
  source 1..18: mol_type = other RNA
aacacccaggcccgagcc

SEQ ID NO: 10553 - RNA, 19 nt, synthetic construct
  misc_feature 1..19: note = Synthetic
  source 1..19: mol_type = other RNA
caacacccaggcccgagcc

SEQ ID NO: 10554 - RNA, 21 nt, synthetic construct
  misc_feature 1..21: note = Synthetic
  source 1..21: mol_type = other RNA
cacaacacccaggcccgagcc

SEQ ID NO: 10555 - RNA, 22 nt, synthetic construct
  misc_feature 1..22: note = Synthetic
  source 1..22: mol_type = other RNA
gcacaacacccaggcccgagcc

SEQ ID NO: 10556 - RNA, 23 nt, synthetic construct
  misc_feature 1..23: note = Synthetic
  source 1..23: mol_type = other RNA
tgcacaacacccaggcccgagcc

SEQ ID NO: 10557 - RNA, 24 nt, synthetic construct
  misc_feature 1..24: note = Synthetic
  source 1..24: mol_type = other RNA
ctgcacaacacccaggcccgagcc

SEQ ID NO: 10558 - RNA, 18 nt, synthetic construct
  misc_feature 1..18: note = Synthetic
  source 1..18: mol_type = other RNA
cagctgtttttgaacgcc

SEQ ID NO: 10559 - RNA, 19 nt, synthetic construct
  misc_feature 1..19: note = Synthetic
  source 1..19: mol_type = other RNA
gcagctgtttttgaacgcc

SEQ ID NO: 10560 - RNA, 21 nt, synthetic construct
  misc_feature 1..21: note = Synthetic
  source 1..21: mol_type = other RNA
cagcagctgtttttgaacgcc

SEQ ID NO: 10561 - RNA, 22 nt, synthetic construct
  misc_feature 1..22: note = Synthetic
  source 1..22: mol_type = other RNA
gcagcagctgtttttgaacgcc

SEQ ID NO: 10562 - RNA, 23 nt, synthetic construct
  misc_feature 1..23: note = Synthetic
  source 1..23: mol_type = other RNA
tgcagcagctgtttttgaacgcc

SEQ ID NO: 10563 - RNA, 24 nt, synthetic construct
  misc_feature 1..24: note = Synthetic
  source 1..24: mol_type = other RNA
atgcagcagctgtttttgaacgcc

SEQ ID NO: 10564 - RNA, 18 nt, synthetic construct
  misc_feature 1..18: note = Synthetic
  source 1..18: mol_type = other RNA
cggtttgccgcgcacgcc

SEQ ID NO: 10565 - RNA, 19 nt, synthetic construct
  misc_feature 1..19: note = Synthetic
  source 1..19: mol_type = other RNA
acggtttgccgcgcacgcc

SEQ ID NO: 10566 - RNA, 21 nt, synthetic construct
  misc_feature 1..21: note = Synthetic
  source 1..21: mol_type = other RNA
gaacggtttgccgcgcacgcc

SEQ ID NO: 10567 - RNA, 22 nt, synthetic construct
  misc_feature 1..22: note = Synthetic
  source 1..22: mol_type = other RNA
ggaacggtttgccgcgcacgcc

SEQ ID NO: 10568 - RNA, 23 nt, synthetic construct
  misc_feature 1..23: note = Synthetic
  source 1..23: mol_type = other RNA
tggaacggtttgccgcgcacgcc

SEQ ID NO: 10569 - RNA, 24 nt, synthetic construct
  misc_feature 1..24: note = Synthetic
  source 1..24: mol_type = other RNA
atggaacggtttgccgcgcacgcc

SEQ ID NO: 10570 - RNA, 18 nt, synthetic construct
  misc_feature 1..18: note = Synthetic
  source 1..18: mol_type = other RNA
gcggcgttccgggacgcc

SEQ ID NO: 10571 - RNA, 19 nt, synthetic construct
  misc_feature 1..19: note = Synthetic
  source 1..19: mol_type = other RNA
ggcggcgttccgggacgcc

SEQ ID NO: 10572 - RNA, 21 nt, synthetic construct
  misc_feature 1..21: note = Synthetic
  source 1..21: mol_type = other RNA
ccggcggcgttccgggacgcc

SEQ ID NO: 10573 - RNA, 22 nt, synthetic construct
  misc_feature 1..22: note = Synthetic
  source 1..22: mol_type = other RNA
tccggcggcgttccgggacgcc

SEQ ID NO: 10574 - RNA, 23 nt, synthetic construct
  misc_feature 1..23: note = Synthetic
  source 1..23: mol_type = other RNA
gtccggcggcgttccgggacgcc

SEQ ID NO: 10575 - RNA, 24 nt, synthetic construct
  misc_feature 1..24: note = Synthetic
  source 1..24: mol_type = other RNA
tgtccggcggcgttccgggacgcc

SEQ ID NO: 10576 - RNA, 18 nt, synthetic construct
  misc_feature 1..18: note = Synthetic
  source 1..18: mol_type = other RNA
tcgtggcgggaaaccgcc

SEQ ID NO: 10577 - RNA, 19 nt, synthetic construct
  misc_feature 1..19: note = Synthetic
  source 1..19: mol_type = other RNA
gtcgtggcgggaaaccgcc

SEQ ID NO: 10578 - RNA, 21 nt, synthetic construct
  misc_feature 1..21: note = Synthetic
  source 1..21: mol_type = other RNA
cggtcgtggcgggaaaccgcc

SEQ ID NO: 10579 - RNA, 22 nt, synthetic construct
  misc_feature 1..22: note = Synthetic
  source 1..22: mol_type = other RNA
gcggtcgtggcgggaaaccgcc

SEQ ID NO: 10580 - RNA, 23 nt, synthetic construct
  misc_feature 1..23: note = Synthetic
  source 1..23: mol_type = other RNA
cgcggtcgtggcgggaaaccgcc

SEQ ID NO: 10581 - RNA, 24 nt, synthetic construct
  misc_feature 1..24: note = Synthetic
  source 1..24: mol_type = other RNA
acgcggtcgtggcgggaaaccgcc

SEQ ID NO: 10582 - RNA, 18 nt, synthetic construct
  misc_feature 1..18: note = Synthetic
  source 1..18: mol_type = other RNA
gcaaggcgggccaccgcc

SEQ ID NO: 10583 - RNA, 19 nt, synthetic construct
  misc_feature 1..19: note = Synthetic
  source 1..19: mol_type = other RNA
ggcaaggcgggccaccgcc

SEQ ID NO: 10584 - RNA, 21 nt, synthetic construct
  misc_feature 1..21: note = Synthetic
  source 1..21: mol_type = other RNA
tgggcaaggcgggccaccgcc

SEQ ID NO: 10585 - RNA, 22 nt, synthetic construct
  misc_feature 1..22: note = Synthetic
  source 1..22: mol_type = other RNA
ctgggcaaggcgggccaccgcc

SEQ ID NO: 10586 - RNA, 23 nt, synthetic construct
  misc_feature 1..23: note = Synthetic
  source 1..23: mol_type = other RNA
cctgggcaaggcgggccaccgcc

SEQ ID NO: 10587 - RNA, 24 nt, synthetic construct
  misc_feature 1..24: note = Synthetic
  source 1..24: mol_type = other RNA
tcctgggcaaggcgggccaccgcc

SEQ ID NO: 10588 - RNA, 18 nt, synthetic construct
  misc_feature 1..18: note = Synthetic
  source 1..18: mol_type = other RNA
ccccggggacgcgccgcc

SEQ ID NO: 10589 - RNA, 19 nt, synthetic construct
  misc_feature 1..19: note = Synthetic
  source 1..19: mol_type = other RNA
cccccggggacgcgccgcc

SEQ ID NO: 10590 - RNA, 21 nt, synthetic construct
  misc_feature 1..21: note = Synthetic
  source 1..21: mol_type = other RNA
aacccccggggacgcgccgcc

SEQ ID NO: 10591 - RNA, 22 nt, synthetic construct
  misc_feature 1..22: note = Synthetic
  source 1..22: mol_type = other RNA
caacccccggggacgcgccgcc

SEQ ID NO: 10592 - RNA, 23 nt, synthetic construct
  misc_feature 1..23: note = Synthetic
  source 1..23: mol_type = other RNA
gcaacccccggggacgcgccgcc

SEQ ID NO: 10593 - RNA, 24 nt, synthetic construct
  misc_feature 1..24: note = Synthetic
  source 1..24: mol_type = other RNA
tgcaacccccggggacgcgccgcc

SEQ ID NO: 10594 - RNA, 18 nt, synthetic construct
  misc_feature 1..18: note = Synthetic
  source 1..18: mol_type = other RNA
taccccctggtgggcgcc

SEQ ID NO: 10595 - RNA, 19 nt, synthetic construct
  misc_feature 1..19: note = Synthetic
  source 1..19: mol_type = other RNA
ctaccccctggtgggcgcc

SEQ ID NO: 10596 - RNA, 21 nt, synthetic construct
  misc_feature 1..21: note = Synthetic
  source 1..21: mol_type = other RNA
ccctaccccctggtgggcgcc

SEQ ID NO: 10597 - RNA, 22 nt, synthetic construct
  misc_feature 1..22: note = Synthetic
  source 1..22: mol_type = other RNA
tccctaccccctggtgggcgcc

SEQ ID NO: 10598 - RNA, 23 nt, synthetic construct
  misc_feature 1..23: note = Synthetic
  source 1..23: mol_type = other RNA
ttccctaccccctggtgggcgcc

SEQ ID NO: 10599 - RNA, 24 nt, synthetic construct
  misc_feature 1..24: note = Synthetic
  source 1..24: mol_type = other RNA
gttccctaccccctggtgggcgcc

SEQ ID NO: 10600 - RNA, 18 nt, synthetic construct
  misc_feature 1..18: note = Synthetic
  source 1..18: mol_type = other RNA
ctggtctttctggaggcc

SEQ ID NO: 10601 - RNA, 19 nt, synthetic construct
  misc_feature 1..19: note = Synthetic
  source 1..19: mol_type = other RNA
gctggtctttctggaggcc

SEQ ID NO: 10602 - RNA, 21 nt, synthetic construct
  misc_feature 1..21: note = Synthetic
  source 1..21: mol_type = other RNA
aagctggtctttctggaggcc

SEQ ID NO: 10603 - RNA, 22 nt, synthetic construct
  misc_feature 1..22: note = Synthetic
  source 1..22: mol_type = other RNA
gaagctggtctttctggaggcc

SEQ ID NO: 10604 - RNA, 23 nt, synthetic construct
  misc_feature 1..23: note = Synthetic
  source 1..23: mol_type = other RNA
agaagctggtctttctggaggcc

SEQ ID NO: 10605 - RNA, 24 nt, synthetic construct
  misc_feature 1..24: note = Synthetic
  source 1..24: mol_type = other RNA
gagaagctggtctttctggaggcc

SEQ ID NO: 10606 - RNA, 18 nt, synthetic construct
  misc_feature 1..18: note = Synthetic
  source 1..18: mol_type = other RNA
actttaccctgaccggcc

SEQ ID NO: 10607 - RNA, 19 nt, synthetic construct
  misc_feature 1..19: note = Synthetic
  source 1..19: mol_type = other RNA
gactttaccctgaccggcc

SEQ ID NO: 10608 - RNA, 21 nt, synthetic construct
  misc_feature 1..21: note = Synthetic
  source 1..21: mol_type = other RNA
atgactttaccctgaccggcc

SEQ ID NO: 10609 - RNA, 22 nt, synthetic construct
  misc_feature 1..22: note = Synthetic
  source 1..22: mol_type = other RNA
gatgactttaccctgaccggcc

SEQ ID NO: 10610 - RNA, 23 nt, synthetic construct
  misc_feature 1..23: note = Synthetic
  source 1..23: mol_type = other RNA
tgatgactttaccctgaccggcc

SEQ ID NO: 10611 - RNA, 24 nt, synthetic construct
  misc_feature 1..24: note = Synthetic
  source 1..24: mol_type = other RNA
ttgatgactttaccctgaccggcc

SEQ ID NO: 10612 - RNA, 18 nt, synthetic construct
  misc_feature 1..18: note = Synthetic
  source 1..18: mol_type = other RNA
acgttcccccggccggcc

SEQ ID NO: 10613 - RNA, 19 nt, synthetic construct
  misc_feature 1..19: note = Synthetic
  source 1..19: mol_type = other RNA
gacgttcccccggccggcc

SEQ ID NO: 10614 - RNA, 21 nt, synthetic construct
  misc_feature 1..21: note = Synthetic
  source 1..21: mol_type = other RNA
gggacgttcccccggccggcc

SEQ ID NO: 10615 - RNA, 22 nt, synthetic construct
  misc_feature 1..22: note = Synthetic
  source 1..22: mol_type = other RNA
ggggacgttcccccggccggcc

SEQ ID NO: 10616 - RNA, 23 nt, synthetic construct
  misc_feature 1..23: note = Synthetic
  source 1..23: mol_type = other RNA
gggggacgttcccccggccggcc

SEQ ID NO: 10617 - RNA, 24 nt, synthetic construct
  misc_feature 1..24: note = Synthetic
  source 1..24: mol_type = other RNA
ggggggacgttcccccggccggcc

SEQ ID NO: 10618 - RNA, 18 nt, synthetic construct
  misc_feature 1..18: note = Synthetic
  source 1..18: mol_type = other RNA
gtccgcgagagcgcggcc

SEQ ID NO: 10619 - RNA, 19 nt, synthetic construct
  misc_feature 1..19: note = Synthetic
  source 1..19: mol_type = other RNA
cgtccgcgagagcgcggcc

SEQ ID NO: 10620 - RNA, 21 nt, synthetic construct
  misc_feature 1..21: note = Synthetic
  source 1..21: mol_type = other RNA
cacgtccgcgagagcgcggcc

SEQ ID NO: 10621 - RNA, 22 nt, synthetic construct
  misc_feature 1..22: note = Synthetic
  source 1..22: mol_type = other RNA
gcacgtccgcgagagcgcggcc

SEQ ID NO: 10622 - RNA, 23 nt, synthetic construct
  misc_feature 1..23: note = Synthetic
  source 1..23: mol_type = other RNA
agcacgtccgcgagagcgcggcc

SEQ ID NO: 10623 - RNA, 24 nt, synthetic construct
  misc_feature 1..24: note = Synthetic
  source 1..24: mol_type = other RNA
cagcacgtccgcgagagcgcggcc

SEQ ID NO: 10624 - RNA, 18 nt, synthetic construct
  misc_feature 1..18: note = Synthetic
  source 1..18: mol_type = other RNA
ctgatgcggcgcgcggcc

SEQ ID NO: 10625 - RNA, 19 nt, synthetic construct
  misc_feature 1..19: note = Synthetic
  source 1..19: mol_type = other RNA
cctgatgcggcgcgcggcc

SEQ ID NO: 10626 - RNA, 21 nt, synthetic construct
  misc_feature 1..21: note = Synthetic
  source 1..21: mol_type = other RNA
gccctgatgcggcgcgcggcc

SEQ ID NO: 10627 - RNA, 22 nt, synthetic construct
  misc_feature 1..22: note = Synthetic
  source 1..22: mol_type = other RNA
cgccctgatgcggcgcgcggcc

SEQ ID NO: 10628 - RNA, 23 nt, synthetic construct
  misc_feature 1..23: note = Synthetic
  source 1..23: mol_type = other RNA
acgccctgatgcggcgcgcggcc

SEQ ID NO: 10629 - RNA, 24 nt, synthetic construct
  misc_feature 1..24: note = Synthetic
  source 1..24: mol_type = other RNA
gacgccctgatgcggcgcgcggcc

SEQ ID NO: 10630 - RNA, 18 nt, synthetic construct
  misc_feature 1..18: note = Synthetic
  source 1..18: mol_type = other RNA
tccgggacgcccggggcc

SEQ ID NO: 10631 - RNA, 19 nt, synthetic construct
  misc_feature 1..19: note = Synthetic
  source 1..19: mol_type = other RNA
ttccgggacgcccggggcc

SEQ ID NO: 10632 - RNA, 21 nt, synthetic construct
  misc_feature 1..21: note = Synthetic
  source 1..21: mol_type = other RNA
cgttccgggacgcccggggcc

SEQ ID NO: 10633 - RNA, 22 nt, synthetic construct
  misc_feature 1..22: note = Synthetic
  source 1..22: mol_type = other RNA
gcgttccgggacgcccggggcc

SEQ ID NO: 10634 - RNA, 23 nt, synthetic construct
  misc_feature 1..23: note = Synthetic
  source 1..23: mol_type = other RNA
ggcgttccgggacgcccggggcc

SEQ ID NO: 10635 - RNA, 24 nt, synthetic construct
  misc_feature 1..24: note = Synthetic
  source 1..24: mol_type = other RNA
cggcgttccgggacgcccggggcc

SEQ ID NO: 10636 - RNA, 18 nt, synthetic construct
  misc_feature 1..18: note = Synthetic
  source 1..18: mol_type = other RNA
aaaacttttacctgggcc

SEQ ID NO: 10637 - RNA, 19 nt, synthetic construct
  misc_feature 1..19: note = Synthetic
  source 1..19: mol_type = other RNA
caaaacttttacctgggcc

SEQ ID NO: 10638 - RNA, 21 nt, synthetic construct
  misc_feature 1..21: note = Synthetic
  source 1..21: mol_type = other RNA
cccaaaacttttacctgggcc

SEQ ID NO: 10639 - RNA, 22 nt, synthetic construct
  misc_feature 1..22: note = Synthetic
  source 1..22: mol_type = other RNA
ccccaaaacttttacctgggcc

SEQ ID NO: 10640 - RNA, 23 nt, synthetic construct
  misc_feature 1..23: note = Synthetic
  source 1..23: mol_type = other RNA
tccccaaaacttttacctgggcc

SEQ ID NO: 10641 - RNA, 24 nt, synthetic construct
  misc_feature 1..24: note = Synthetic
  source 1..24: mol_type = other RNA
ttccccaaaacttttacctgggcc

SEQ ID NO: 10642 - RNA, 18 nt, synthetic construct
  misc_feature 1..18: note = Synthetic
  source 1..18: mol_type = other RNA
ggccgacgtggagctgcc

SEQ ID NO: 10643 - RNA, 19 nt, synthetic construct
  misc_feature 1..19: note = Synthetic
  source 1..19: mol_type = other RNA
tggccgacgtggagctgcc

SEQ ID NO: 10644 - RNA, 21 nt, synthetic construct
  misc_feature 1..21: note = Synthetic
  source 1..21: mol_type = other RNA
ggtggccgacgtggagctgcc

SEQ ID NO: 10645 - RNA, 22 nt, synthetic construct
  misc_feature 1..22: note = Synthetic
  source 1..22: mol_type = other RNA
gggtggccgacgtggagctgcc

SEQ ID NO: 10646 - RNA, 23 nt, synthetic construct
  misc_feature 1..23: note = Synthetic
  source 1..23: mol_type = other RNA
ggggtggccgacgtggagctgcc

SEQ ID NO: 10647 - RNA, 24 nt, synthetic construct
  misc_feature 1..24: note = Synthetic
  source 1..24: mol_type = other RNA
gggggtggccgacgtggagctgcc

SEQ ID NO: 10648 - RNA, 18 nt, synthetic construct
  misc_feature 1..18: note = Synthetic
  source 1..18: mol_type = other RNA
ccgccaaacatcgctgcc

SEQ ID NO: 10649 - RNA, 19 nt, synthetic construct
  misc_feature 1..19: note = Synthetic
  source 1..19: mol_type = other RNA
gccgccaaacatcgctgcc

SEQ ID NO: 10650 - RNA, 21 nt, synthetic construct
  misc_feature 1..21: note = Synthetic
  source 1..21: mol_type = other RNA
tcgccgccaaacatcgctgcc

SEQ ID NO: 10651 - RNA, 22 nt, synthetic construct
  misc_feature 1..22: note = Synthetic
  source 1..22: mol_type = other RNA
atcgccgccaaacatcgctgcc

SEQ ID NO: 10652 - RNA, 23 nt, synthetic construct
  misc_feature 1..23: note = Synthetic
  source 1..23: mol_type = other RNA
catcgccgccaaacatcgctgcc

SEQ ID NO: 10653 - RNA, 24 nt, synthetic construct
  misc_feature 1..24: note = Synthetic
  source 1..24: mol_type = other RNA
acatcgccgccaaacatcgctgcc

SEQ ID NO: 10654 - RNA, 18 nt, synthetic construct
  misc_feature 1..18: note = Synthetic
  source 1..18: mol_type = other RNA
agcgccccccggggtgcc

SEQ ID NO: 10655 - RNA, 19 nt, synthetic construct
  misc_feature 1..19: note = Synthetic
  source 1..19: mol_type = other RNA
aagcgccccccggggtgcc

SEQ ID NO: 10656 - RNA, 21 nt, synthetic construct
  misc_feature 1..21: note = Synthetic
  source 1..21: mol_type = other RNA
ttaagcgccccccggggtgcc

SEQ ID NO: 10657 - RNA, 22 nt, synthetic construct
  misc_feature 1..22: note = Synthetic
  source 1..22: mol_type = other RNA
tttaagcgccccccggggtgcc

SEQ ID NO: 10658 - RNA, 23 nt, synthetic construct
  misc_feature 1..23: note = Synthetic
  source 1..23: mol_type = other RNA
gtttaagcgccccccggggtgcc

SEQ ID NO: 10659 - RNA, 24 nt, synthetic construct
  misc_feature 1..24: note = Synthetic
  source 1..24: mol_type = other RNA
agtttaagcgccccccggggtgcc

SEQ ID NO: 10660 - RNA, 18 nt, synthetic construct
  misc_feature 1..18: note = Synthetic
  source 1..18: mol_type = other RNA
ccgtcgtgcagcacgtcc

SEQ ID NO: 10661 - RNA, 19 nt, synthetic construct
  misc_feature 1..19: note = Synthetic
  source 1..19: mol_type = other RNA
cccgtcgtgcagcacgtcc

SEQ ID NO: 10662 - RNA, 21 nt, synthetic construct
  misc_feature 1..21: note = Synthetic
  source 1..21: mol_type = other RNA
agcccgtcgtgcagcacgtcc

SEQ ID NO: 10663 - RNA, 22 nt, synthetic construct
  misc_feature 1..22: note = Synthetic
  source 1..22: mol_type = other RNA
cagcccgtcgtgcagcacgtcc

SEQ ID NO: 10664 - RNA, 23 nt, synthetic construct
  misc_feature 1..23: note = Synthetic
  source 1..23: mol_type = other RNA
acagcccgtcgtgcagcacgtcc

SEQ ID NO: 10665 - RNA, 24 nt, synthetic construct
  misc_feature 1..24: note = Synthetic
  source 1..24: mol_type = other RNA
gacagcccgtcgtgcagcacgtcc

SEQ ID NO: 10666 - RNA, 18 nt, synthetic construct
  misc_feature 1..18: note = Synthetic
  source 1..18: mol_type = other RNA
tgcagaacatggtggtcc

SEQ ID NO: 10667 - RNA, 19 nt, synthetic construct
  misc_feature 1..19: note = Synthetic
  source 1..19: mol_type = other RNA
ctgcagaacatggtggtcc

SEQ ID NO: 10668 - RNA, 21 nt, synthetic construct
  misc_feature 1..21: note = Synthetic
  source 1..21: mol_type = other RNA
ccctgcagaacatggtggtcc

SEQ ID NO: 10669 - RNA, 22 nt, synthetic construct
  misc_feature 1..22: note = Synthetic
  source 1..22: mol_type = other RNA
accctgcagaacatggtggtcc

SEQ ID NO: 10670 - RNA, 23 nt, synthetic construct
  misc_feature 1..23: note = Synthetic
  source 1..23: mol_type = other RNA
caccctgcagaacatggtggtcc

SEQ ID NO: 10671 - RNA, 24 nt, synthetic construct
  misc_feature 1..24: note = Synthetic
  source 1..24: mol_type = other RNA
ccaccctgcagaacatggtggtcc

SEQ ID NO: 10672 - RNA, 18 nt, synthetic construct
  misc_feature 1..18: note = Synthetic
  source 1..18: mol_type = other RNA
aaaccgccccgcccttcc

SEQ ID NO: 10673 - RNA, 19 nt, synthetic construct
  misc_feature 1..19: note = Synthetic
  source 1..19: mol_type = other RNA
taaaccgccccgcccttcc

SEQ ID NO: 10674 - RNA, 20 nt, synthetic construct
  misc_feature 1..20: note = Synthetic
  source 1..20: mol_type = other RNA
ataaaccgccccgcccttcc

SEQ ID NO: 10675 - RNA, 21 nt, synthetic construct
  misc_feature 1..21: note = Synthetic
  source 1..21: mol_type = other RNA
aataaaccgccccgcccttcc

SEQ ID NO: 10676 - RNA, 22 nt, synthetic construct
  misc_feature 1..22: note = Synthetic
  source 1..22: mol_type = other RNA
taataaaccgccccgcccttcc

SEQ ID NO: 10677 - RNA, 23 nt, synthetic construct
  misc_feature 1..23: note = Synthetic
  source 1..23: mol_type = other RNA
gtaataaaccgccccgcccttcc

SEQ ID NO: 10678 - RNA, 24 nt, synthetic construct
  misc_feature 1..24: note = Synthetic
  source 1..24: mol_type = other RNA
tgtaataaaccgccccgcccttcc

SEQ ID NO: 10679 - RNA, 18 nt, synthetic construct
  misc_feature 1..18: note = Synthetic
  source 1..18: mol_type = other RNA
ggcagacgctggacgagc

SEQ ID NO: 10680 - RNA, 19 nt, synthetic construct
  misc_feature 1..19: note = Synthetic
  source 1..19: mol_type = other RNA
cggcagacgctggacgagc

SEQ ID NO: 10681 - RNA, 21 nt, synthetic construct
  misc_feature 1..21: note = Synthetic
  source 1..21: mol_type = other RNA
accggcagacgctggacgagc

SEQ ID NO: 10682 - RNA, 22 nt, synthetic construct
  misc_feature 1..22: note = Synthetic
  source 1..22: mol_type = other RNA
aaccggcagacgctggacgagc

SEQ ID NO: 10683 - RNA, 23 nt, synthetic construct
  misc_feature 1..23: note = Synthetic
  source 1..23: mol_type = other RNA
gaaccggcagacgctggacgagc

SEQ ID NO: 10684 - RNA, 24 nt, synthetic construct
  misc_feature 1..24: note = Synthetic
  source 1..24: mol_type = other RNA
tgaaccggcagacgctggacgagc

SEQ ID NO: 10685 - RNA, 18 nt, synthetic construct
  misc_feature 1..18: note = Synthetic
  source 1..18: mol_type = other RNA
acgcccggggcctggagc

SEQ ID NO: 10686 - RNA, 19 nt, synthetic construct
  misc_feature 1..19: note = Synthetic
  source 1..19: mol_type = other RNA
gacgcccggggcctggagc

SEQ ID NO: 10687 - RNA, 21 nt, synthetic construct
  misc_feature 1..21: note = Synthetic
  source 1..21: mol_type = other RNA
gggacgcccggggcctggagc

SEQ ID NO: 10688 - RNA, 22 nt, synthetic construct
  misc_feature 1..22: note = Synthetic
  source 1..22: mol_type = other RNA
cgggacgcccggggcctggagc

SEQ ID NO: 10689 - RNA, 23 nt, synthetic construct
  misc_feature 1..23: note = Synthetic
  source 1..23: mol_type = other RNA
ccgggacgcccggggcctggagc

SEQ ID NO: 10690 - RNA, 24 nt, synthetic construct
  misc_feature 1..24: note = Synthetic
  source 1..24: mol_type = other RNA
tccgggacgcccggggcctggagc

SEQ ID NO: 10691 - RNA, 18 nt, synthetic construct
  misc_feature 1..18: note = Synthetic
  source 1..18: mol_type = other RNA
cgcgactgccgggttagc

SEQ ID NO: 10692 - RNA, 19 nt, synthetic construct
  misc_feature 1..19: note = Synthetic
  source 1..19: mol_type = other RNA
tcgcgactgccgggttagc

SEQ ID NO: 10693 - RNA, 21 nt, synthetic construct
  misc_feature 1..21: note = Synthetic
  source 1..21: mol_type = other RNA
catcgcgactgccgggttagc

SEQ ID NO: 10694 - RNA, 22 nt, synthetic construct
  misc_feature 1..22: note = Synthetic
  source 1..22: mol_type = other RNA
ccatcgcgactgccgggttagc

SEQ ID NO: 10695 - RNA, 23 nt, synthetic construct
  misc_feature 1..23: note = Synthetic
  source 1..23: mol_type = other RNA
gccatcgcgactgccgggttagc

SEQ ID NO: 10696 - RNA, 24 nt, synthetic construct
  misc_feature 1..24: note = Synthetic
  source 1..24: mol_type = other RNA
cgccatcgcgactgccgggttagc

SEQ ID NO: 10697 - RNA, 18 nt, synthetic construct
  misc_feature 1..18: note = Synthetic
  source 1..18: mol_type = other RNA
gcagctgtttttgaacgc

SEQ ID NO: 10698 - RNA, 19 nt, synthetic construct
  misc_feature 1..19: note = Synthetic
  source 1..19: mol_type = other RNA
agcagctgtttttgaacgc

SEQ ID NO: 10699 - RNA, 21 nt, synthetic construct
  misc_feature 1..21: note = Synthetic
  source 1..21: mol_type = other RNA
gcagcagctgtttttgaacgc

SEQ ID NO: 10700 - RNA, 22 nt, synthetic construct
  misc_feature 1..22: note = Synthetic
  source 1..22: mol_type = other RNA
tgcagcagctgtttttgaacgc

SEQ ID NO: 10701 - RNA, 23 nt, synthetic construct
  misc_feature 1..23: note = Synthetic
  source 1..23: mol_type = other RNA
atgcagcagctgtttttgaacgc

SEQ ID NO: 10702 - RNA, 24 nt, synthetic construct
  misc_feature 1..24: note = Synthetic
  source 1..24: mol_type = other RNA
catgcagcagctgtttttgaacgc

SEQ ID NO: 10703 - RNA, 18 nt, synthetic construct
  misc_feature 1..18: note = Synthetic
  source 1..18: mol_type = other RNA
tgacgcatgccgacacgc

SEQ ID NO: 10704 - RNA, 19 nt, synthetic construct
  misc_feature 1..19: note = Synthetic
  source 1..19: mol_type = other RNA
ctgacgcatgccgacacgc

SEQ ID NO: 10705 - RNA, 21 nt, synthetic construct
  misc_feature 1..21: note = Synthetic
  source 1..21: mol_type = other RNA
gtctgacgcatgccgacacgc

SEQ ID NO: 10706 - RNA, 22 nt, synthetic construct
  misc_feature 1..22: note = Synthetic
  source 1..22: mol_type = other RNA
cgtctgacgcatgccgacacgc

SEQ ID NO: 10707 - RNA, 23 nt, synthetic construct
  misc_feature 1..23: note = Synthetic
  source 1..23: mol_type = other RNA
ccgtctgacgcatgccgacacgc

SEQ ID NO: 10708 - RNA, 24 nt, synthetic construct
  misc_feature 1..24: note = Synthetic
  source 1..24: mol_type = other RNA
cccgtctgacgcatgccgacacgc

SEQ ID NO: 10709 - RNA, 18 nt, synthetic construct
  misc_feature 1..18: note = Synthetic
  source 1..18: mol_type = other RNA
caacggggaagcccacgc

SEQ ID NO: 10710 - RNA, 19 nt, synthetic construct
  misc_feature 1..19: note = Synthetic
  source 1..19: mol_type = other RNA
gcaacggggaagcccacgc

SEQ ID NO: 10711 - RNA, 21 nt, synthetic construct
  misc_feature 1..21: note = Synthetic
  source 1..21: mol_type = other RNA
ccgcaacggggaagcccacgc

SEQ ID NO: 10712 - RNA, 22 nt, synthetic construct
  misc_feature 1..22: note = Synthetic
  source 1..22: mol_type = other RNA
cccgcaacggggaagcccacgc

SEQ ID NO: 10713 - RNA, 23 nt, synthetic construct
  misc_feature 1..23: note = Synthetic
  source 1..23: mol_type = other RNA
gcccgcaacggggaagcccacgc

SEQ ID NO: 10714 - RNA, 24 nt, synthetic construct
  misc_feature 1..24: note = Synthetic
  source 1..24: mol_type = other RNA
tgcccgcaacggggaagcccacgc

SEQ ID NO: 10715 - RNA, 18 nt, synthetic construct
  misc_feature 1..18: note = Synthetic
  source 1..18: mol_type = other RNA
acggtttgccgcgcacgc

SEQ ID NO: 10716 - RNA, 19 nt, synthetic construct
  misc_feature 1..19: note = Synthetic
  source 1..19: mol_type = other RNA
aacggtttgccgcgcacgc

SEQ ID NO: 10717 - RNA, 21 nt, synthetic construct
  misc_feature 1..21: note = Synthetic
  source 1..21: mol_type = other RNA
ggaacggtttgccgcgcacgc

SEQ ID NO: 10718 - RNA, 22 nt, synthetic construct
  misc_feature 1..22: note = Synthetic
  source 1..22: mol_type = other RNA
tggaacggtttgccgcgcacgc

SEQ ID NO: 10719 - RNA, 23 nt, synthetic construct
  misc_feature 1..23: note = Synthetic
  source 1..23: mol_type = other RNA
atggaacggtttgccgcgcacgc

SEQ ID NO: 10720 - RNA, 24 nt, synthetic construct
  misc_feature 1..24: note = Synthetic
  source 1..24: mol_type = other RNA
catggaacggtttgccgcgcacgc

SEQ ID NO: 10721 - RNA, 18 nt, synthetic construct
  misc_feature 1..18: note = Synthetic
  source 1..18: mol_type = other RNA
ggcggcgttccgggacgc

SEQ ID NO: 10722 - RNA, 19 nt, synthetic construct
  misc_feature 1..19: note = Synthetic
  source 1..19: mol_type = other RNA
cggcggcgttccgggacgc

SEQ ID NO: 10723 - RNA, 21 nt, synthetic construct
  misc_feature 1..21: note = Synthetic
  source 1..21: mol_type = other RNA
tccggcggcgttccgggacgc

SEQ ID NO: 10724 - RNA, 22 nt, synthetic construct
  misc_feature 1..22: note = Synthetic
  source 1..22: mol_type = other RNA
gtccggcggcgttccgggacgc

SEQ ID NO: 10725 - RNA, 23 nt, synthetic construct
  misc_feature 1..23: note = Synthetic
  source 1..23: mol_type = other RNA
tgtccggcggcgttccgggacgc

SEQ ID NO: 10726 - RNA, 24 nt, synthetic construct
  misc_feature 1..24: note = Synthetic
  source 1..24: mol_type = other RNA
atgtccggcggcgttccgggacgc

SEQ ID NO: 10727 - RNA, 18 nt, synthetic construct
  misc_feature 1..18: note = Synthetic
  source 1..18: mol_type = other RNA
cgccgggggcgtttacgc

SEQ ID NO: 10728 - RNA, 19 nt, synthetic construct
  misc_feature 1..19: note = Synthetic
  source 1..19: mol_type = other RNA
ccgccgggggcgtttacgc

SEQ ID NO: 10729 - RNA, 21 nt, synthetic construct
  misc_feature 1..21: note = Synthetic
  source 1..21: mol_type = other RNA
cgccgccgggggcgtttacgc

SEQ ID NO: 10730 - RNA, 22 nt, synthetic construct
  misc_feature 1..22: note = Synthetic
  source 1..22: mol_type = other RNA
gcgccgccgggggcgtttacgc

SEQ ID NO: 10731 - RNA, 23 nt, synthetic construct
  misc_feature 1..23: note = Synthetic
  source 1..23: mol_type = other RNA
cgcgccgccgggggcgtttacgc

SEQ ID NO: 10732 - RNA, 24 nt, synthetic construct
  misc_feature 1..24: note = Synthetic
  source 1..24: mol_type = other RNA
acgcgccgccgggggcgtttacgc

SEQ ID NO: 10733 - RNA, 18 nt, synthetic construct
  misc_feature 1..18: note = Synthetic
  source 1..18: mol_type = other RNA
gtcgtggcgggaaaccgc

SEQ ID NO: 10734 - RNA, 19 nt, synthetic construct
  misc_feature 1..19: note = Synthetic
  source 1..19: mol_type = other RNA
ggtcgtggcgggaaaccgc

SEQ ID NO: 10735 - RNA, 21 nt, synthetic construct
  misc_feature 1..21: note = Synthetic
  source 1..21: mol_type = other RNA
gcggtcgtggcgggaaaccgc

SEQ ID NO: 10736 - RNA, 22 nt, synthetic construct
  misc_feature 1..22: note = Synthetic
  source 1..22: mol_type = other RNA
cgcggtcgtggcgggaaaccgc

SEQ ID NO: 10737 - RNA, 23 nt, synthetic construct
  misc_feature 1..23: note = Synthetic
  source 1..23: mol_type = other RNA
acgcggtcgtggcgggaaaccgc

SEQ ID NO: 10738 - RNA, 24 nt, synthetic construct
  misc_feature 1..24: note = Synthetic
  source 1..24: mol_type = other RNA
aacgcggtcgtggcgggaaaccgc

SEQ ID NO: 10739 - RNA, 18 nt, synthetic construct
  misc_feature 1..18: note = Synthetic
  source 1..18: mol_type = other RNA
ggcaaggcgggccaccgc

SEQ ID NO: 10740 - RNA, 19 nt, synthetic construct
  misc_feature 1..19: note = Synthetic
  source 1..19: mol_type = other RNA
gggcaaggcgggccaccgc

SEQ ID NO: 10741 - RNA, 21 nt, synthetic construct
  misc_feature 1..21: note = Synthetic
  source 1..21: mol_type = other RNA
ctgggcaaggcgggccaccgc

SEQ ID NO: 10742 - RNA, 22 nt, synthetic construct
  misc_feature 1..22: note = Synthetic
  source 1..22: mol_type = other RNA
cctgggcaaggcgggccaccgc

SEQ ID NO: 10743 - RNA, 23 nt, synthetic construct
  misc_feature 1..23: note = Synthetic
  source 1..23: mol_type = other RNA
tcctgggcaaggcgggccaccgc

SEQ ID NO: 10744 - RNA, 24 nt, synthetic construct
  misc_feature 1..24: note = Synthetic
  source 1..24: mol_type = other RNA
ttcctgggcaaggcgggccaccgc

SEQ ID NO: 10745 - RNA, 18 nt, synthetic construct
  misc_feature 1..18: note = Synthetic
  source 1..18: mol_type = other RNA
cccccggggacgcgccgc

SEQ ID NO: 10746 - RNA, 19 nt, synthetic construct
  misc_feature 1..19: note = Synthetic
  source 1..19: mol_type = other RNA
acccccggggacgcgccgc

SEQ ID NO: 10747 - RNA, 21 nt, synthetic construct
  misc_feature 1..21: note = Synthetic
  source 1..21: mol_type = other RNA
caacccccggggacgcgccgc

SEQ ID NO: 10748 - RNA, 22 nt, synthetic construct
  misc_feature 1..22: note = Synthetic
  source 1..22: mol_type = other RNA
gcaacccccggggacgcgccgc

SEQ ID NO: 10749 - RNA, 23 nt, synthetic construct
  misc_feature 1..23: note = Synthetic
  source 1..23: mol_type = other RNA
tgcaacccccggggacgcgccgc

SEQ ID NO: 10750 - RNA, 24 nt, synthetic construct
  misc_feature 1..24: note = Synthetic
  source 1..24: mol_type = other RNA
ctgcaacccccggggacgcgccgc

SEQ ID NO: 10751 - RNA, 18 nt, synthetic construct
  misc_feature 1..18: note = Synthetic
  source 1..18: mol_type = other RNA
gtcgtgcagcacgtccgc

SEQ ID NO: 10752 - RNA, 19 nt, synthetic construct
  misc_feature 1..19: note = Synthetic
  source 1..19: mol_type = other RNA
cgtcgtgcagcacgtccgc

SEQ ID NO: 10753 - RNA, 21 nt, synthetic construct
  misc_feature 1..21: note = Synthetic
  source 1..21: mol_type = other RNA
cccgtcgtgcagcacgtccgc

SEQ ID NO: 10754 - RNA, 22 nt, synthetic construct
  misc_feature 1..22: note = Synthetic
  source 1..22: mol_type = other RNA
gcccgtcgtgcagcacgtccgc

SEQ ID NO: 10755 - RNA, 23 nt, synthetic construct
  misc_feature 1..23: note = Synthetic
  source 1..23: mol_type = other RNA
agcccgtcgtgcagcacgtccgc

SEQ ID NO: 10756 - RNA, 24 nt, synthetic construct
  misc_feature 1..24: note = Synthetic
  source 1..24: mol_type = other RNA
cagcccgtcgtgcagcacgtccgc

SEQ ID NO: 10757 - RNA, 18 nt, synthetic construct
  misc_feature 1..18: note = Synthetic
  source 1..18: mol_type = other RNA
cgactgccgggttagcgc

SEQ ID NO: 10758 - RNA, 19 nt, synthetic construct
  misc_feature 1..19: note = Synthetic
  source 1..19: mol_type = other RNA
gcgactgccgggttagcgc

SEQ ID NO: 10759 - RNA, 21 nt, synthetic construct
  misc_feature 1..21: note = Synthetic
  source 1..21: mol_type = other RNA
tcgcgactgccgggttagcgc

SEQ ID NO: 10760 - RNA, 22 nt, synthetic construct
  misc_feature 1..22: note = Synthetic
  source 1..22: mol_type = other RNA
atcgcgactgccgggttagcgc

SEQ ID NO: 10761 - RNA, 23 nt, synthetic construct
  misc_feature 1..23: note = Synthetic
  source 1..23: mol_type = other RNA
catcgcgactgccgggttagcgc

SEQ ID NO: 10762 - RNA, 24 nt, synthetic construct
  misc_feature 1..24: note = Synthetic
  source 1..24: mol_type = other RNA
ccatcgcgactgccgggttagcgc

SEQ ID NO: 10763 - RNA, 18 nt, synthetic construct
  misc_feature 1..18: note = Synthetic
  source 1..18: mol_type = other RNA
acggggaagcccacgcgc

SEQ ID NO: 10764 - RNA, 19 nt, synthetic construct
  misc_feature 1..19: note = Synthetic
  source 1..19: mol_type = other RNA
aacggggaagcccacgcgc

SEQ ID NO: 10765 - RNA, 21 nt, synthetic construct
  misc_feature 1..21: note = Synthetic
  source 1..21: mol_type = other RNA
gcaacggggaagcccacgcgc

SEQ ID NO: 10766 - RNA, 22 nt, synthetic construct
  misc_feature 1..22: note = Synthetic
  source 1..22: mol_type = other RNA
cgcaacggggaagcccacgcgc

SEQ ID NO: 10767 - RNA, 23 nt, synthetic construct
  misc_feature 1..23: note = Synthetic
  source 1..23: mol_type = other RNA
ccgcaacggggaagcccacgcgc

SEQ ID NO: 10768 - RNA, 24 nt, synthetic construct
  misc_feature 1..24: note = Synthetic
  source 1..24: mol_type = other RNA
cccgcaacggggaagcccacgcgc

SEQ ID NO: 10769 - RNA, 18 nt, synthetic construct
  misc_feature 1..18: note = Synthetic
  source 1..18: mol_type = other RNA
acgctcacccagccgcgc

SEQ ID NO: 10770 - RNA, 19 nt, synthetic construct
  misc_feature 1..19: note = Synthetic
  source 1..19: mol_type = other RNA
cacgctcacccagccgcgc

SEQ ID NO: 10771 - RNA, 21 nt, synthetic construct
  misc_feature 1..21: note = Synthetic
  source 1..21: mol_type = other RNA
ttcacgctcacccagccgcgc

SEQ ID NO: 10772 - RNA, 22 nt, synthetic construct
  misc_feature 1..22: note = Synthetic
  source 1..22: mol_type = other RNA
cttcacgctcacccagccgcgc

SEQ ID NO: 10773 - RNA, 23 nt, synthetic construct
  misc_feature 1..23: note = Synthetic
  source 1..23: mol_type = other RNA
acttcacgctcacccagccgcgc

SEQ ID NO: 10774 - RNA, 24 nt, synthetic construct
  misc_feature 1..24: note = Synthetic
  source 1..24: mol_type = other RNA
aacttcacgctcacccagccgcgc

SEQ ID NO: 10775 - RNA, 18 nt, synthetic construct
  misc_feature 1..18: note = Synthetic
  source 1..18: mol_type = other RNA
cgtccacgcgctgttcgc

SEQ ID NO: 10776 - RNA, 19 nt, synthetic construct
  misc_feature 1..19: note = Synthetic
  source 1..19: mol_type = other RNA
ccgtccacgcgctgttcgc

SEQ ID NO: 10777 - RNA, 21 nt, synthetic construct
  misc_feature 1..21: note = Synthetic
  source 1..21: mol_type = other RNA
ccccgtccacgcgctgttcgc

SEQ ID NO: 10778 - RNA, 22 nt, synthetic construct
  misc_feature 1..22: note = Synthetic
  source 1..22: mol_type = other RNA
tccccgtccacgcgctgttcgc

SEQ ID NO: 10779 - RNA, 23 nt, synthetic construct
  misc_feature 1..23: note = Synthetic
  source 1..23: mol_type = other RNA
ctccccgtccacgcgctgttcgc

SEQ ID NO: 10780 - RNA, 24 nt, synthetic construct
  misc_feature 1..24: note = Synthetic
  source 1..24: mol_type = other RNA
cctccccgtccacgcgctgttcgc

SEQ ID NO: 10781 - RNA, 18 nt, synthetic construct
  misc_feature 1..18: note = Synthetic
  source 1..18: mol_type = other RNA
gctgcacaacacccaggc

SEQ ID NO: 10782 - RNA, 19 nt, synthetic construct
  misc_feature 1..19: note = Synthetic
  source 1..19: mol_type = other RNA
tgctgcacaacacccaggc

SEQ ID NO: 10783 - RNA, 21 nt, synthetic construct
  misc_feature 1..21: note = Synthetic
  source 1..21: mol_type = other RNA
gctgctgcacaacacccaggc

SEQ ID NO: 10784 - RNA, 22 nt, synthetic construct
  misc_feature 1..22: note = Synthetic
  source 1..22: mol_type = other RNA
agctgctgcacaacacccaggc

SEQ ID NO: 10785 - RNA, 23 nt, synthetic construct
  misc_feature 1..23: note = Synthetic
  source 1..23: mol_type = other RNA
cagctgctgcacaacacccaggc

SEQ ID NO: 10786 - RNA, 24 nt, synthetic construct
  misc_feature 1..24: note = Synthetic
  source 1..24: mol_type = other RNA
ccagctgctgcacaacacccaggc

SEQ ID NO: 10787 - RNA, 18 nt, synthetic construct
  misc_feature 1..18: note = Synthetic
  source 1..18: mol_type = other RNA
ctcatgtacgaccacggc

SEQ ID NO: 10788 - RNA, 19 nt, synthetic construct
  misc_feature 1..19: note = Synthetic
  source 1..19: mol_type = other RNA
cctcatgtacgaccacggc

SEQ ID NO: 10789 - RNA, 21 nt, synthetic construct
  misc_feature 1..21: note = Synthetic
  source 1..21: mol_type = other RNA
gccctcatgtacgaccacggc

SEQ ID NO: 10790 - RNA, 22 nt, synthetic construct
  misc_feature 1..22: note = Synthetic
  source 1..22: mol_type = other RNA
cgccctcatgtacgaccacggc

SEQ ID NO: 10791 - RNA, 23 nt, synthetic construct
  misc_feature 1..23: note = Synthetic
  source 1..23: mol_type = other RNA
ccgccctcatgtacgaccacggc

SEQ ID NO: 10792 - RNA, 24 nt, synthetic construct
  misc_feature 1..24: note = Synthetic
  source 1..24: mol_type = other RNA
accgccctcatgtacgaccacggc

SEQ ID NO: 10793 - RNA, 18 nt, synthetic construct
  misc_feature 1..18: note = Synthetic
  source 1..18: mol_type = other RNA
gcagggatggaccacggc

SEQ ID NO: 10794 - RNA, 19 nt, synthetic construct
  misc_feature 1..19: note = Synthetic
  source 1..19: mol_type = other RNA
cgcagggatggaccacggc

SEQ ID NO: 10795 - RNA, 21 nt, synthetic construct
  misc_feature 1..21: note = Synthetic
  source 1..21: mol_type = other RNA
cgcgcagggatggaccacggc

SEQ ID NO: 10796 - RNA, 22 nt, synthetic construct
  misc_feature 1..22: note = Synthetic
  source 1..22: mol_type = other RNA
gcgcgcagggatggaccacggc

SEQ ID NO: 10797 - RNA, 23 nt, synthetic construct
  misc_feature 1..23: note = Synthetic
  source 1..23: mol_type = other RNA
ggcgcgcagggatggaccacggc

SEQ ID NO: 10798 - RNA, 24 nt, synthetic construct
  misc_feature 1..24: note = Synthetic
  source 1..24: mol_type = other RNA
cggcgcgcagggatggaccacggc

SEQ ID NO: 10799 - RNA, 18 nt, synthetic construct
  misc_feature 1..18: note = Synthetic
  source 1..18: mol_type = other RNA
gactttaccctgaccggc

SEQ ID NO: 10800 - RNA, 19 nt, synthetic construct
  misc_feature 1..19: note = Synthetic
  source 1..19: mol_type = other RNA
tgactttaccctgaccggc

SEQ ID NO: 10801 - RNA, 21 nt, synthetic construct
  misc_feature 1..21: note = Synthetic
  source 1..21: mol_type = other RNA
gatgactttaccctgaccggc

SEQ ID NO: 10802 - RNA, 22 nt, synthetic construct
  misc_feature 1..22: note = Synthetic
  source 1..22: mol_type = other RNA
tgatgactttaccctgaccggc

SEQ ID NO: 10803 - RNA, 23 nt, synthetic construct
  misc_feature 1..23: note = Synthetic
  source 1..23: mol_type = other RNA
ttgatgactttaccctgaccggc

SEQ ID NO: 10804 - RNA, 24 nt, synthetic construct
  misc_feature 1..24: note = Synthetic
  source 1..24: mol_type = other RNA
gttgatgactttaccctgaccggc

SEQ ID NO: 10805 - RNA, 18 nt, synthetic construct
  misc_feature 1..18: note = Synthetic
  source 1..18: mol_type = other RNA
ccggagatcgcccccggc

SEQ ID NO: 10806 - RNA, 19 nt, synthetic construct
  misc_feature 1..19: note = Synthetic
  source 1..19: mol_type = other RNA
cccggagatcgcccccggc

SEQ ID NO: 10807 - RNA, 21 nt, synthetic construct
  misc_feature 1..21: note = Synthetic
  source 1..21: mol_type = other RNA
gtcccggagatcgcccccggc

SEQ ID NO: 10808 - RNA, 22 nt, synthetic construct
  misc_feature 1..22: note = Synthetic
  source 1..22: mol_type = other RNA
ggtcccggagatcgcccccggc

SEQ ID NO: 10809 - RNA, 23 nt, synthetic construct
  misc_feature 1..23: note = Synthetic
  source 1..23: mol_type = other RNA
tggtcccggagatcgcccccggc

SEQ ID NO: 10810 - RNA, 24 nt, synthetic construct
  misc_feature 1..24: note = Synthetic
  source 1..24: mol_type = other RNA
gtggtcccggagatcgcccccggc

SEQ ID NO: 10811 - RNA, 18 nt, synthetic construct
  misc_feature 1..18: note = Synthetic
  source 1..18: mol_type = other RNA
agctccaggtggcccggc

SEQ ID NO: 10812 - RNA, 19 nt, synthetic construct
  misc_feature 1..19: note = Synthetic
  source 1..19: mol_type = other RNA
cagctccaggtggcccggc

SEQ ID NO: 10813 - RNA, 21 nt, synthetic construct
  misc_feature 1..21: note = Synthetic
  source 1..21: mol_type = other RNA
gccagctccaggtggcccggc

SEQ ID NO: 10814 - RNA, 22 nt, synthetic construct
  misc_feature 1..22: note = Synthetic
  source 1..22: mol_type = other RNA
ggccagctccaggtggcccggc

SEQ ID NO: 10815 - RNA, 23 nt, synthetic construct
  misc_feature 1..23: note = Synthetic
  source 1..23: mol_type = other RNA
gggccagctccaggtggcccggc

SEQ ID NO: 10816 - RNA, 24 nt, synthetic construct
  misc_feature 1..24: note = Synthetic
  source 1..24: mol_type = other RNA
tgggccagctccaggtggcccggc

SEQ ID NO: 10817 - RNA, 18 nt, synthetic construct
  misc_feature 1..18: note = Synthetic
  source 1..18: mol_type = other RNA
gacgttcccccggccggc

SEQ ID NO: 10818 - RNA, 19 nt, synthetic construct
  misc_feature 1..19: note = Synthetic
  source 1..19: mol_type = other RNA
ggacgttcccccggccggc

SEQ ID NO: 10819 - RNA, 21 nt, synthetic construct
  misc_feature 1..21: note = Synthetic
  source 1..21: mol_type = other RNA
ggggacgttcccccggccggc

SEQ ID NO: 10820 - RNA, 22 nt, synthetic construct
  misc_feature 1..22: note = Synthetic
  source 1..22: mol_type = other RNA
gggggacgttcccccggccggc

SEQ ID NO: 10821 - RNA, 23 nt, synthetic construct
  misc_feature 1..23: note = Synthetic
  source 1..23: mol_type = other RNA
ggggggacgttcccccggccggc

SEQ ID NO: 10822 - RNA, 24 nt, synthetic construct
  misc_feature 1..24: note = Synthetic
  source 1..24: mol_type = other RNA
gggggggacgttcccccggccggc

SEQ ID NO: 10823 - RNA, 18 nt, synthetic construct
  misc_feature 1..18: note = Synthetic
  source 1..18: mol_type = other RNA
cgtccgcgagagcgcggc

SEQ ID NO: 10824 - RNA, 19 nt, synthetic construct
  misc_feature 1..19: note = Synthetic
  source 1..19: mol_type = other RNA
acgtccgcgagagcgcggc

SEQ ID NO: 10825 - RNA, 21 nt, synthetic construct
  misc_feature 1..21: note = Synthetic
  source 1..21: mol_type = other RNA
gcacgtccgcgagagcgcggc

SEQ ID NO: 10826 - RNA, 22 nt, synthetic construct
  misc_feature 1..22: note = Synthetic
  source 1..22: mol_type = other RNA
agcacgtccgcgagagcgcggc

SEQ ID NO: 10827 - RNA, 23 nt, synthetic construct
  misc_feature 1..23: note = Synthetic
  source 1..23: mol_type = other RNA
cagcacgtccgcgagagcgcggc

SEQ ID NO: 10828 - RNA, 24 nt, synthetic construct
  misc_feature 1..24: note = Synthetic
  source 1..24: mol_type = other RNA
gcagcacgtccgcgagagcgcggc

SEQ ID NO: 10829 - RNA, 18 nt, synthetic construct
  misc_feature 1..18: note = Synthetic
  source 1..18: mol_type = other RNA
gatctggtgtccatcggc

SEQ ID NO: 10830 - RNA, 19 nt, synthetic construct
  misc_feature 1..19: note = Synthetic
  source 1..19: mol_type = other RNA
ggatctggtgtccatcggc

SEQ ID NO: 10831 - RNA, 21 nt, synthetic construct
  misc_feature 1..21: note = Synthetic
  source 1..21: mol_type = other RNA
gcggatctggtgtccatcggc

SEQ ID NO: 10832 - RNA, 22 nt, synthetic construct
  misc_feature 1..22: note = Synthetic
  source 1..22: mol_type = other RNA
cgcggatctggtgtccatcggc

SEQ ID NO: 10833 - RNA, 23 nt, synthetic construct
  misc_feature 1..23: note = Synthetic
  source 1..23: mol_type = other RNA
gcgcggatctggtgtccatcggc

SEQ ID NO: 10834 - RNA, 24 nt, synthetic construct
  misc_feature 1..24: note = Synthetic
  source 1..24: mol_type = other RNA
cgcgcggatctggtgtccatcggc

SEQ ID NO: 10835 - RNA, 18 nt, synthetic construct
  misc_feature 1..18: note = Synthetic
  source 1..18: mol_type = other RNA
ttccgggacgcccggggc

SEQ ID NO: 10836 - RNA, 19 nt, synthetic construct
  misc_feature 1..19: note = Synthetic
  source 1..19: mol_type = other RNA
gttccgggacgcccggggc

SEQ ID NO: 10837 - RNA, 21 nt, synthetic construct
  misc_feature 1..21: note = Synthetic
  source 1..21: mol_type = other RNA
gcgttccgggacgcccggggc

SEQ ID NO: 10838 - RNA, 22 nt, synthetic construct
  misc_feature 1..22: note = Synthetic
  source 1..22: mol_type = other RNA
ggcgttccgggacgcccggggc

SEQ ID NO: 10839 - RNA, 23 nt, synthetic construct
  misc_feature 1..23: note = Synthetic
  source 1..23: mol_type = other RNA
cggcgttccgggacgcccggggc

SEQ ID NO: 10840 - RNA, 24 nt, synthetic construct
  misc_feature 1..24: note = Synthetic
  source 1..24: mol_type = other RNA
gcggcgttccgggacgcccggggc

SEQ ID NO: 10841 - RNA, 18 nt, synthetic construct
  misc_feature 1..18: note = Synthetic
  source 1..18: mol_type = other RNA
gcgaacgtggacctgggc

SEQ ID NO: 10842 - RNA, 19 nt, synthetic construct
  misc_feature 1..19: note = Synthetic
  source 1..19: mol_type = other RNA
cgcgaacgtggacctgggc

SEQ ID NO: 10843 - RNA, 21 nt, synthetic construct
  misc_feature 1..21: note = Synthetic
  source 1..21: mol_type = other RNA
cgcgcgaacgtggacctgggc

SEQ ID NO: 10844 - RNA, 22 nt, synthetic construct
  misc_feature 1..22: note = Synthetic
  source 1..22: mol_type = other RNA
gcgcgcgaacgtggacctgggc

SEQ ID NO: 10845 - RNA, 23 nt, synthetic construct
  misc_feature 1..23: note = Synthetic
  source 1..23: mol_type = other RNA
cgcgcgcgaacgtggacctgggc

SEQ ID NO: 10846 - RNA, 24 nt, synthetic construct
  misc_feature 1..24: note = Synthetic
  source 1..24: mol_type = other RNA
ccgcgcgcgaacgtggacctgggc

SEQ ID NO: 10847 - RNA, 18 nt, synthetic construct
  misc_feature 1..18: note = Synthetic
  source 1..18: mol_type = other RNA
gcccggcacgaaactggc

SEQ ID NO: 10848 - RNA, 19 nt, synthetic construct
  misc_feature 1..19: note = Synthetic
  source 1..19: mol_type = other RNA
ggcccggcacgaaactggc

SEQ ID NO: 10849 - RNA, 21 nt, synthetic construct
  misc_feature 1..21: note = Synthetic
  source 1..21: mol_type = other RNA
gtggcccggcacgaaactggc

SEQ ID NO: 10850 - RNA, 22 nt, synthetic construct
  misc_feature 1..22: note = Synthetic
  source 1..22: mol_type = other RNA
ggtggcccggcacgaaactggc

SEQ ID NO: 10851 - RNA, 23 nt, synthetic construct
  misc_feature 1..23: note = Synthetic
  source 1..23: mol_type = other RNA
aggtggcccggcacgaaactggc

SEQ ID NO: 10852 - RNA, 24 nt, synthetic construct
  misc_feature 1..24: note = Synthetic
  source 1..24: mol_type = other RNA
caggtggcccggcacgaaactggc

SEQ ID NO: 10853 - RNA, 18 nt, synthetic construct
  misc_feature 1..18: note = Synthetic
  source 1..18: mol_type = other RNA
gcggaacgcggtcgtggc

SEQ ID NO: 10854 - RNA, 19 nt, synthetic construct
  misc_feature 1..19: note = Synthetic
  source 1..19: mol_type = other RNA
tgcggaacgcggtcgtggc

SEQ ID NO: 10855 - RNA, 21 nt, synthetic construct
  misc_feature 1..21: note = Synthetic
  source 1..21: mol_type = other RNA
cctgcggaacgcggtcgtggc

SEQ ID NO: 10856 - RNA, 22 nt, synthetic construct
  misc_feature 1..22: note = Synthetic
  source 1..22: mol_type = other RNA
acctgcggaacgcggtcgtggc

SEQ ID NO: 10857 - RNA, 23 nt, synthetic construct
  misc_feature 1..23: note = Synthetic
  source 1..23: mol_type = other RNA
tacctgcggaacgcggtcgtggc

SEQ ID NO: 10858 - RNA, 24 nt, synthetic construct
  misc_feature 1..24: note = Synthetic
  source 1..24: mol_type = other RNA
gtacctgcggaacgcggtcgtggc

SEQ ID NO: 10859 - RNA, 18 nt, synthetic construct
  misc_feature 1..18: note = Synthetic
  source 1..18: mol_type = other RNA
cctggccaccagggtggc

SEQ ID NO: 10860 - RNA, 19 nt, synthetic construct
  misc_feature 1..19: note = Synthetic
  source 1..19: mol_type = other RNA
gcctggccaccagggtggc

SEQ ID NO: 10861 - RNA, 21 nt, synthetic construct
  misc_feature 1..21: note = Synthetic
  source 1..21: mol_type = other RNA
ccgcctggccaccagggtggc

SEQ ID NO: 10862 - RNA, 22 nt, synthetic construct
  misc_feature 1..22: note = Synthetic
  source 1..22: mol_type = other RNA
gccgcctggccaccagggtggc

SEQ ID NO: 10863 - RNA, 23 nt, synthetic construct
  misc_feature 1..23: note = Synthetic
  source 1..23: mol_type = other RNA
ggccgcctggccaccagggtggc

SEQ ID NO: 10864 - RNA, 24 nt, synthetic construct
  misc_feature 1..24: note = Synthetic
  source 1..24: mol_type = other RNA
cggccgcctggccaccagggtggc

SEQ ID NO: 10865 - RNA, 18 nt, synthetic construct
  misc_feature 1..18: note = Synthetic
  source 1..18: mol_type = other RNA
gccacctgctggagatgc

SEQ ID NO: 10866 - RNA, 19 nt, synthetic construct
  misc_feature 1..19: note = Synthetic
  source 1..19: mol_type = other RNA
cgccacctgctggagatgc

SEQ ID NO: 10867 - RNA, 21 nt, synthetic construct
  misc_feature 1..21: note = Synthetic
  source 1..21: mol_type = other RNA
gccgccacctgctggagatgc

SEQ ID NO: 10868 - RNA, 22 nt, synthetic construct
  misc_feature 1..22: note = Synthetic
  source 1..22: mol_type = other RNA
ggccgccacctgctggagatgc

SEQ ID NO: 10869 - RNA, 23 nt, synthetic construct
  misc_feature 1..23: note = Synthetic
  source 1..23: mol_type = other RNA
gggccgccacctgctggagatgc

SEQ ID NO: 10870 - RNA, 24 nt, synthetic construct
  misc_feature 1..24: note = Synthetic
  source 1..24: mol_type = other RNA
tgggccgccacctgctggagatgc

SEQ ID NO: 10871 - RNA, 18 nt, synthetic construct
  misc_feature 1..18: note = Synthetic
  source 1..18: mol_type = other RNA
acgtgggccgccacctgc

SEQ ID NO: 10872 - RNA, 19 nt, synthetic construct
  misc_feature 1..19: note = Synthetic
  source 1..19: mol_type = other RNA
gacgtgggccgccacctgc

SEQ ID NO: 10873 - RNA, 21 nt, synthetic construct
  misc_feature 1..21: note = Synthetic
  source 1..21: mol_type = other RNA
acgacgtgggccgccacctgc

SEQ ID NO: 10874 - RNA, 22 nt, synthetic construct
  misc_feature 1..22: note = Synthetic
  source 1..22: mol_type = other RNA
gacgacgtgggccgccacctgc

SEQ ID NO: 10875 - RNA, 23 nt, synthetic construct
  misc_feature 1..23: note = Synthetic
  source 1..23: mol_type = other RNA
ggacgacgtgggccgccacctgc

SEQ ID NO: 10876 - RNA, 24 nt, synthetic construct
  misc_feature 1..24: note = Synthetic
  source 1..24: mol_type = other RNA
tggacgacgtgggccgccacctgc

SEQ ID NO: 10877 - RNA, 18 nt, synthetic construct
  misc_feature 1..18: note = Synthetic
  source 1..18: mol_type = other RNA
tggccgacgtggagctgc

SEQ ID NO: 10878 - RNA, 19 nt, synthetic construct
  misc_feature 1..19: note = Synthetic
  source 1..19: mol_type = other RNA
gtggccgacgtggagctgc

SEQ ID NO: 10879 - RNA, 21 nt, synthetic construct
  misc_feature 1..21: note = Synthetic
  source 1..21: mol_type = other RNA
gggtggccgacgtggagctgc

SEQ ID NO: 10880 - RNA, 22 nt, synthetic construct
  misc_feature 1..22: note = Synthetic
  source 1..22: mol_type = other RNA
ggggtggccgacgtggagctgc

SEQ ID NO: 10881 - RNA, 23 nt, synthetic construct
  misc_feature 1..23: note = Synthetic
  source 1..23: mol_type = other RNA
gggggtggccgacgtggagctgc

SEQ ID NO: 10882 - RNA, 24 nt, synthetic construct
  misc_feature 1..24: note = Synthetic
  source 1..24: mol_type = other RNA
tgggggtggccgacgtggagctgc

SEQ ID NO: 10883 - RNA, 18 nt, synthetic construct
  misc_feature 1..18: note = Synthetic
  source 1..18: mol_type = other RNA
gccgccaaacatcgctgc

SEQ ID NO: 10884 - RNA, 19 nt, synthetic construct
  misc_feature 1..19: note = Synthetic
  source 1..19: mol_type = other RNA
cgccgccaaacatcgctgc

SEQ ID NO: 10885 - RNA, 21 nt, synthetic construct
  misc_feature 1..21: note = Synthetic
  source 1..21: mol_type = other RNA
atcgccgccaaacatcgctgc

SEQ ID NO: 10886 - RNA, 22 nt, synthetic construct
  misc_feature 1..22: note = Synthetic
  source 1..22: mol_type = other RNA
catcgccgccaaacatcgctgc

SEQ ID NO: 10887 - RNA, 23 nt, synthetic construct
  misc_feature 1..23: note = Synthetic
  source 1..23: mol_type = other RNA
acatcgccgccaaacatcgctgc

SEQ ID NO: 10888 - RNA, 24 nt, synthetic construct
  misc_feature 1..24: note = Synthetic
  source 1..24: mol_type = other RNA
gacatcgccgccaaacatcgctgc

SEQ ID NO: 10889 - RNA, 18 nt, synthetic construct
  misc_feature 1..18: note = Synthetic
  source 1..18: mol_type = other RNA
agatgctgcacgtgctgc

SEQ ID NO: 10890 - RNA, 19 nt, synthetic construct
  misc_feature 1..19: note = Synthetic
  source 1..19: mol_type = other RNA
cagatgctgcacgtgctgc

SEQ ID NO: 10891 - RNA, 21 nt, synthetic construct
  misc_feature 1..21: note = Synthetic
  source 1..21: mol_type = other RNA
accagatgctgcacgtgctgc

SEQ ID NO: 10892 - RNA, 22 nt, synthetic construct
  misc_feature 1..22: note = Synthetic
  source 1..22: mol_type = other RNA
gaccagatgctgcacgtgctgc

SEQ ID NO: 10893 - RNA, 23 nt, synthetic construct
  misc_feature 1..23: note = Synthetic
  source 1..23: mol_type = other RNA
cgaccagatgctgcacgtgctgc

SEQ ID NO: 10894 - RNA, 24 nt, synthetic construct
  misc_feature 1..24: note = Synthetic
  source 1..24: mol_type = other RNA
ccgaccagatgctgcacgtgctgc

SEQ ID NO: 10895 - RNA, 18 nt, synthetic construct
  misc_feature 1..18: note = Synthetic
  source 1..18: mol_type = other RNA
tgcctggagcgcctgatc

SEQ ID NO: 10896 - RNA, 19 nt, synthetic construct
  misc_feature 1..19: note = Synthetic
  source 1..19: mol_type = other RNA
ctgcctggagcgcctgatc

SEQ ID NO: 10897 - RNA, 21 nt, synthetic construct
  misc_feature 1..21: note = Synthetic
  source 1..21: mol_type = other RNA
cgctgcctggagcgcctgatc

SEQ ID NO: 10898 - RNA, 22 nt, synthetic construct
  misc_feature 1..22: note = Synthetic
  source 1..22: mol_type = other RNA
tcgctgcctggagcgcctgatc

SEQ ID NO: 10899 - RNA, 23 nt, synthetic construct
  misc_feature 1..23: note = Synthetic
  source 1..23: mol_type = other RNA
atcgctgcctggagcgcctgatc

SEQ ID NO: 10900 - RNA, 24 nt, synthetic construct
  misc_feature 1..24: note = Synthetic
  source 1..24: mol_type = other RNA
catcgctgcctggagcgcctgatc

SEQ ID NO: 10901 - RNA, 18 nt, synthetic construct
  misc_feature 1..18: note = Synthetic
  source 1..18: mol_type = other RNA
ccggggtgccgcgaactc

SEQ ID NO: 10902 - RNA, 19 nt, synthetic construct
  misc_feature 1..19: note = Synthetic
  source 1..19: mol_type = other RNA
cccggggtgccgcgaactc

SEQ ID NO: 10903 - RNA, 21 nt, synthetic construct
  misc_feature 1..21: note = Synthetic
  source 1..21: mol_type = other RNA
cccccggggtgccgcgaactc

SEQ ID NO: 10904 - RNA, 22 nt, synthetic construct
  misc_feature 1..22: note = Synthetic
  source 1..22: mol_type = other RNA
ccccccggggtgccgcgaactc

SEQ ID NO: 10905 - RNA, 23 nt, synthetic construct
  misc_feature 1..23: note = Synthetic
  source 1..23: mol_type = other RNA
gccccccggggtgccgcgaactc

SEQ ID NO: 10906 - RNA, 24 nt, synthetic construct
  misc_feature 1..24: note = Synthetic
  source 1..24: mol_type = other RNA
cgccccccggggtgccgcgaactc

SEQ ID NO: 10907 - RNA, 18 nt, synthetic construct
  misc_feature 1..18: note = Synthetic
  source 1..18: mol_type = other RNA
tacgtcgtgacctacctc

SEQ ID NO: 10908 - RNA, 19 nt, synthetic construct
  misc_feature 1..19: note = Synthetic
  source 1..19: mol_type = other RNA
gtacgtcgtgacctacctc

SEQ ID NO: 10909 - RNA, 21 nt, synthetic construct
  misc_feature 1..21: note = Synthetic
  source 1..21: mol_type = other RNA
tcgtacgtcgtgacctacctc

SEQ ID NO: 10910 - RNA, 22 nt, synthetic construct
  misc_feature 1..22: note = Synthetic
  source 1..22: mol_type = other RNA
ctcgtacgtcgtgacctacctc

SEQ ID NO: 10911 - RNA, 23 nt, synthetic construct
  misc_feature 1..23: note = Synthetic
  source 1..23: mol_type = other RNA
tctcgtacgtcgtgacctacctc

SEQ ID NO: 10912 - RNA, 24 nt, synthetic construct
  misc_feature 1..24: note = Synthetic
  source 1..24: mol_type = other RNA
gtctcgtacgtcgtgacctacctc

SEQ ID NO: 10913 - RNA, 18 nt, synthetic construct
  misc_feature 1..18: note = Synthetic
  source 1..18: mol_type = other RNA
cagacgctggacgagctc

SEQ ID NO: 10914 - RNA, 19 nt, synthetic construct
  misc_feature 1..19: note = Synthetic
  source 1..19: mol_type = other RNA
gcagacgctggacgagctc

SEQ ID NO: 10915 - RNA, 21 nt, synthetic construct
  misc_feature 1..21: note = Synthetic
  source 1..21: mol_type = other RNA
cggcagacgctggacgagctc

SEQ ID NO: 10916 - RNA, 22 nt, synthetic construct
  misc_feature 1..22: note = Synthetic
  source 1..22: mol_type = other RNA
ccggcagacgctggacgagctc

SEQ ID NO: 10917 - RNA, 23 nt, synthetic construct
  misc_feature 1..23: note = Synthetic
  source 1..23: mol_type = other RNA
accggcagacgctggacgagctc

SEQ ID NO: 10918 - RNA, 24 nt, synthetic construct
  misc_feature 1..24: note = Synthetic
  source 1..24: mol_type = other RNA
aaccggcagacgctggacgagctc

SEQ ID NO: 10919 - RNA, 18 nt, synthetic construct
  misc_feature 1..18: note = Synthetic
  source 1..18: mol_type = other RNA
tatgacgcatccccgctc

SEQ ID NO: 10920 - RNA, 19 nt, synthetic construct
  misc_feature 1..19: note = Synthetic
  source 1..19: mol_type = other RNA
ctatgacgcatccccgctc

SEQ ID NO: 10921 - RNA, 21 nt, synthetic construct
  misc_feature 1..21: note = Synthetic
  source 1..21: mol_type = other RNA
gtctatgacgcatccccgctc

SEQ ID NO: 10922 - RNA, 22 nt, synthetic construct
  misc_feature 1..22: note = Synthetic
  source 1..22: mol_type = other RNA
cgtctatgacgcatccccgctc

SEQ ID NO: 10923 - RNA, 23 nt, synthetic construct
  misc_feature 1..23: note = Synthetic
  source 1..23: mol_type = other RNA
tcgtctatgacgcatccccgctc

SEQ ID NO: 10924 - RNA, 24 nt, synthetic construct
  misc_feature 1..24: note = Synthetic
  source 1..24: mol_type = other RNA
ctcgtctatgacgcatccccgctc

SEQ ID NO: 10925 - RNA, 18 nt, synthetic construct
  misc_feature 1..18: note = Synthetic
  source 1..18: mol_type = other RNA
ccctggtccccccggctc

SEQ ID NO: 10926 - RNA, 19 nt, synthetic construct
  misc_feature 1..19: note = Synthetic
  source 1..19: mol_type = other RNA
cccctggtccccccggctc

SEQ ID NO: 10927 - RNA, 21 nt, synthetic construct
  misc_feature 1..21: note = Synthetic
  source 1..21: mol_type = other RNA
tccccctggtccccccggctc

SEQ ID NO: 10928 - RNA, 22 nt, synthetic construct
  misc_feature 1..22: note = Synthetic
  source 1..22: mol_type = other RNA
gtccccctggtccccccggctc

SEQ ID NO: 10929 - RNA, 23 nt, synthetic construct
  misc_feature 1..23: note = Synthetic
  source 1..23: mol_type = other RNA
ggtccccctggtccccccggctc

SEQ ID NO: 10930 - RNA, 24 nt, synthetic construct
  misc_feature 1..24: note = Synthetic
  source 1..24: mol_type = other RNA
aggtccccctggtccccccggctc

SEQ ID NO: 10931 - RNA, 18 nt, synthetic construct
  misc_feature 1..18: note = Synthetic
  source 1..18: mol_type = other RNA
acaacgccaacctggctc

SEQ ID NO: 10932 - RNA, 19 nt, synthetic construct
  misc_feature 1..19: note = Synthetic
  source 1..19: mol_type = other RNA
gacaacgccaacctggctc

SEQ ID NO: 10933 - RNA, 21 nt, synthetic construct
  misc_feature 1..21: note = Synthetic
  source 1..21: mol_type = other RNA
ccgacaacgccaacctggctc

SEQ ID NO: 10934 - RNA, 22 nt, synthetic construct
  misc_feature 1..22: note = Synthetic
  source 1..22: mol_type = other RNA
cccgacaacgccaacctggctc

SEQ ID NO: 10935 - RNA, 23 nt, synthetic construct
  misc_feature 1..23: note = Synthetic
  source 1..23: mol_type = other RNA
gcccgacaacgccaacctggctc

SEQ ID NO: 10936 - RNA, 24 nt, synthetic construct
  misc_feature 1..24: note = Synthetic
  source 1..24: mol_type = other RNA
agcccgacaacgccaacctggctc

SEQ ID NO: 10937 - RNA, 18 nt, synthetic construct
  misc_feature 1..18: note = Synthetic
  source 1..18: mol_type = other RNA
gccgtcgaggcctggctc

SEQ ID NO: 10938 - RNA, 19 nt, synthetic construct
  misc_feature 1..19: note = Synthetic
  source 1..19: mol_type = other RNA
ggccgtcgaggcctggctc

SEQ ID NO: 10939 - RNA, 21 nt, synthetic construct
  misc_feature 1..21: note = Synthetic
  source 1..21: mol_type = other RNA
gaggccgtcgaggcctggctc

SEQ ID NO: 10940 - RNA, 22 nt, synthetic construct
  misc_feature 1..22: note = Synthetic
  source 1..22: mol_type = other RNA
ggaggccgtcgaggcctggctc

SEQ ID NO: 10941 - RNA, 23 nt, synthetic construct
  misc_feature 1..23: note = Synthetic
  source 1..23: mol_type = other RNA
gggaggccgtcgaggcctggctc

SEQ ID NO: 10942 - RNA, 24 nt, synthetic construct
  misc_feature 1..24: note = Synthetic
  source 1..24: mol_type = other RNA
cgggaggccgtcgaggcctggctc

SEQ ID NO: 10943 - RNA, 18 nt, synthetic construct
  misc_feature 1..18: note = Synthetic
  source 1..18: mol_type = other RNA
cgcggggctccccctctc

SEQ ID NO: 10944 - RNA, 19 nt, synthetic construct
  misc_feature 1..19: note = Synthetic
  source 1..19: mol_type = other RNA
ccgcggggctccccctctc

SEQ ID NO: 10945 - RNA, 21 nt, synthetic construct
  misc_feature 1..21: note = Synthetic
  source 1..21: mol_type = other RNA
ggccgcggggctccccctctc

SEQ ID NO: 10946 - RNA, 22 nt, synthetic construct
  misc_feature 1..22: note = Synthetic
  source 1..22: mol_type = other RNA
gggccgcggggctccccctctc

SEQ ID NO: 10947 - RNA, 23 nt, synthetic construct
  misc_feature 1..23: note = Synthetic
  source 1..23: mol_type = other RNA
tgggccgcggggctccccctctc

SEQ ID NO: 10948 - RNA, 24 nt, synthetic construct
  misc_feature 1..24: note = Synthetic
  source 1..24: mol_type = other RNA
ctgggccgcggggctccccctctc

SEQ ID NO: 10949 - RNA, 18 nt, synthetic construct
  misc_feature 1..18: note = Synthetic
  source 1..18: mol_type = other RNA
aggtgctgcgcctgtctc

SEQ ID NO: 10950 - RNA, 19 nt, synthetic construct
  misc_feature 1..19: note = Synthetic
  source 1..19: mol_type = other RNA
caggtgctgcgcctgtctc

SEQ ID NO: 10951 - RNA, 21 nt, synthetic construct
  misc_feature 1..21: note = Synthetic
  source 1..21: mol_type = other RNA
gccaggtgctgcgcctgtctc

SEQ ID NO: 10952 - RNA, 22 nt, synthetic construct
  misc_feature 1..22: note = Synthetic
  source 1..22: mol_type = other RNA
cgccaggtgctgcgcctgtctc

SEQ ID NO: 10953 - RNA, 23 nt, synthetic construct
  misc_feature 1..23: note = Synthetic
  source 1..23: mol_type = other RNA
ccgccaggtgctgcgcctgtctc

SEQ ID NO: 10954 - RNA, 24 nt, synthetic construct
  misc_feature 1..24: note = Synthetic
  source 1..24: mol_type = other RNA
accgccaggtgctgcgcctgtctc

SEQ ID NO: 10955 - RNA, 18 nt, synthetic construct
  misc_feature 1..18: note = Synthetic
  source 1..18: mol_type = other RNA
gatggtgcccgccttctc

SEQ ID NO: 10956 - RNA, 19 nt, synthetic construct
  misc_feature 1..19: note = Synthetic
  source 1..19: mol_type = other RNA
tgatggtgcccgccttctc

SEQ ID NO: 10957 - RNA, 21 nt, synthetic construct
  misc_feature 1..21: note = Synthetic
  source 1..21: mol_type = other RNA
cgtgatggtgcccgccttctc

SEQ ID NO: 10958 - RNA, 22 nt, synthetic construct
  misc_feature 1..22: note = Synthetic
  source 1..22: mol_type = other RNA
acgtgatggtgcccgccttctc

SEQ ID NO: 10959 - RNA, 23 nt, synthetic construct
  misc_feature 1..23: note = Synthetic
  source 1..23: mol_type = other RNA
tacgtgatggtgcccgccttctc

SEQ ID NO: 10960 - RNA, 24 nt, synthetic construct
  misc_feature 1..24: note = Synthetic
  source 1..24: mol_type = other RNA
ctacgtgatggtgcccgccttctc

SEQ ID NO: 10961 - RNA, 18 nt, synthetic construct
  misc_feature 1..18: note = Synthetic
  source 1..18: mol_type = other RNA
cggccagagcgacccgtc

SEQ ID NO: 10962 - RNA, 19 nt, synthetic construct
  misc_feature 1..19: note = Synthetic
  source 1..19: mol_type = other RNA
acggccagagcgacccgtc

SEQ ID NO: 10963 - RNA, 21 nt, synthetic construct
  misc_feature 1..21: note = Synthetic
  source 1..21: mol_type = other RNA
ccacggccagagcgacccgtc

SEQ ID NO: 10964 - RNA, 22 nt, synthetic construct
  misc_feature 1..22: note = Synthetic
  source 1..22: mol_type = other RNA
accacggccagagcgacccgtc

SEQ ID NO: 10965 - RNA, 23 nt, synthetic construct
  misc_feature 1..23: note = Synthetic
  source 1..23: mol_type = other RNA
gaccacggccagagcgacccgtc

SEQ ID NO: 10966 - RNA, 24 nt, synthetic construct
  misc_feature 1..24: note = Synthetic
  source 1..24: mol_type = other RNA
cgaccacggccagagcgacccgtc

SEQ ID NO: 10967 - RNA, 18 nt, synthetic construct
  misc_feature 1..18: note = Synthetic
  source 1..18: mol_type = other RNA
ggcctgttcaatccggtc

SEQ ID NO: 10968 - RNA, 19 nt, synthetic construct
  misc_feature 1..19: note = Synthetic
  source 1..19: mol_type = other RNA
gggcctgttcaatccggtc

SEQ ID NO: 10969 - RNA, 21 nt, synthetic construct
  misc_feature 1..21: note = Synthetic
  source 1..21: mol_type = other RNA
ctgggcctgttcaatccggtc

SEQ ID NO: 10970 - RNA, 22 nt, synthetic construct
  misc_feature 1..22: note = Synthetic
  source 1..22: mol_type = other RNA
cctgggcctgttcaatccggtc

SEQ ID NO: 10971 - RNA, 23 nt, synthetic construct
  misc_feature 1..23: note = Synthetic
  source 1..23: mol_type = other RNA
ccctgggcctgttcaatccggtc

SEQ ID NO: 10972 - RNA, 24 nt, synthetic construct
  misc_feature 1..24: note = Synthetic
  source 1..24: mol_type = other RNA
cccctgggcctgttcaatccggtc

SEQ ID NO: 10973 - RNA, 18 nt, synthetic construct
  misc_feature 1..18: note = Synthetic
  source 1..18: mol_type = other RNA
aacgttgacgcggcggtc

SEQ ID NO: 10974 - RNA, 19 nt, synthetic construct
  misc_feature 1..19: note = Synthetic
  source 1..19: mol_type = other RNA
gaacgttgacgcggcggtc

SEQ ID NO: 10975 - RNA, 21 nt, synthetic construct
  misc_feature 1..21: note = Synthetic
  source 1..21: mol_type = other RNA
atgaacgttgacgcggcggtc

SEQ ID NO: 10976 - RNA, 22 nt, synthetic construct
  misc_feature 1..22: note = Synthetic
  source 1..22: mol_type = other RNA
gatgaacgttgacgcggcggtc

SEQ ID NO: 10977 - RNA, 23 nt, synthetic construct
  misc_feature 1..23: note = Synthetic
  source 1..23: mol_type = other RNA
tgatgaacgttgacgcggcggtc

SEQ ID NO: 10978 - RNA, 24 nt, synthetic construct
  misc_feature 1..24: note = Synthetic
  source 1..24: mol_type = other RNA
ctgatgaacgttgacgcggcggtc

SEQ ID NO: 10979 - RNA, 18 nt, synthetic construct
  misc_feature 1..18: note = Synthetic
  source 1..18: mol_type = other RNA
gggcgggtccgatgggtc

SEQ ID NO: 10980 - RNA, 19 nt, synthetic construct
  misc_feature 1..19: note = Synthetic
  source 1..19: mol_type = other RNA
cgggcgggtccgatgggtc

SEQ ID NO: 10981 - RNA, 21 nt, synthetic construct
  misc_feature 1..21: note = Synthetic
  source 1..21: mol_type = other RNA
cacgggcgggtccgatgggtc

SEQ ID NO: 10982 - RNA, 22 nt, synthetic construct
  misc_feature 1..22: note = Synthetic
  source 1..22: mol_type = other RNA
ccacgggcgggtccgatgggtc

SEQ ID NO: 10983 - RNA, 23 nt, synthetic construct
  misc_feature 1..23: note = Synthetic
  source 1..23: mol_type = other RNA
cccacgggcgggtccgatgggtc

SEQ ID NO: 10984 - RNA, 24 nt, synthetic construct
  misc_feature 1..24: note = Synthetic
  source 1..24: mol_type = other RNA
gcccacgggcgggtccgatgggtc

SEQ ID NO: 10985 - RNA, 18 nt, synthetic construct
  misc_feature 1..18: note = Synthetic
  source 1..18: mol_type = other RNA
acgtacggcgagatggtc

SEQ ID NO: 10986 - RNA, 19 nt, synthetic construct
  misc_feature 1..19: note = Synthetic
  source 1..19: mol_type = other RNA
gacgtacggcgagatggtc

SEQ ID NO: 10987 - RNA, 21 nt, synthetic construct
  misc_feature 1..21: note = Synthetic
  source 1..21: mol_type = other RNA
gtgacgtacggcgagatggtc

SEQ ID NO: 10988 - RNA, 22 nt, synthetic construct
  misc_feature 1..22: note = Synthetic
  source 1..22: mol_type = other RNA
ggtgacgtacggcgagatggtc

SEQ ID NO: 10989 - RNA, 23 nt, synthetic construct
  misc_feature 1..23: note = Synthetic
  source 1..23: mol_type = other RNA
cggtgacgtacggcgagatggtc

SEQ ID NO: 10990 - RNA, 24 nt, synthetic construct
  misc_feature 1..24: note = Synthetic
  source 1..24: mol_type = other RNA
ccggtgacgtacggcgagatggtc

SEQ ID NO: 10991 - RNA, 18 nt, synthetic construct
  misc_feature 1..18: note = Synthetic
  source 1..18: mol_type = other RNA
ctgcagaacatggtggtc

SEQ ID NO: 10992 - RNA, 19 nt, synthetic construct
  misc_feature 1..19: note = Synthetic
  source 1..19: mol_type = other RNA
cctgcagaacatggtggtc

SEQ ID NO: 10993 - RNA, 21 nt, synthetic construct
  misc_feature 1..21: note = Synthetic
  source 1..21: mol_type = other RNA
accctgcagaacatggtggtc

SEQ ID NO: 10994 - RNA, 22 nt, synthetic construct
  misc_feature 1..22: note = Synthetic
  source 1..22: mol_type = other RNA
caccctgcagaacatggtggtc

SEQ ID NO: 10995 - RNA, 23 nt, synthetic construct
  misc_feature 1..23: note = Synthetic
  source 1..23: mol_type = other RNA
ccaccctgcagaacatggtggtc

SEQ ID NO: 10996 - RNA, 24 nt, synthetic construct
  misc_feature 1..24: note = Synthetic
  source 1..24: mol_type = other RNA
gccaccctgcagaacatggtggtc

SEQ ID NO: 10997 - RNA, 18 nt, synthetic construct
  misc_feature 1..18: note = Synthetic
  source 1..18: mol_type = other RNA
gcgtcggaggcgtacttc

SEQ ID NO: 10998 - RNA, 19 nt, synthetic construct
  misc_feature 1..19: note = Synthetic
  source 1..19: mol_type = other RNA
cgcgtcggaggcgtacttc

SEQ ID NO: 10999 - RNA, 21 nt, synthetic construct
  misc_feature 1..21: note = Synthetic
  source 1..21: mol_type = other RNA
cgcgcgtcggaggcgtacttc

SEQ ID NO: 11000 - RNA, 22 nt, synthetic construct
  misc_feature 1..22: note = Synthetic
  source 1..22: mol_type = other RNA
gcgcgcgtcggaggcgtacttc

SEQ ID NO: 11001 - RNA, 23 nt, synthetic construct
  misc_feature 1..23: note = Synthetic
  source 1..23: mol_type = other RNA
agcgcgcgtcggaggcgtacttc

SEQ ID NO: 11002 - RNA, 24 nt, synthetic construct
  misc_feature 1..24: note = Synthetic
  source 1..24: mol_type = other RNA
gagcgcgcgtcggaggcgtacttc

SEQ ID NO: 11003 - RNA, 18 nt, synthetic construct
  misc_feature 1..18: note = Synthetic
  source 1..18: mol_type = other RNA
acctcgggggagaccttc

SEQ ID NO: 11004 - RNA, 19 nt, synthetic construct
  misc_feature 1..19: note = Synthetic
  source 1..19: mol_type = other RNA
tacctcgggggagaccttc

SEQ ID NO: 11005 - RNA, 21 nt, synthetic construct
  misc_feature 1..21: note = Synthetic
  source 1..21: mol_type = other RNA
cctacctcgggggagaccttc

SEQ ID NO: 11006 - RNA, 22 nt, synthetic construct
  misc_feature 1..22: note = Synthetic
  source 1..22: mol_type = other RNA
acctacctcgggggagaccttc

SEQ ID NO: 11007 - RNA, 23 nt, synthetic construct
  misc_feature 1..23: note = Synthetic
  source 1..23: mol_type = other RNA
gacctacctcgggggagaccttc

SEQ ID NO: 11008 - RNA, 24 nt, synthetic construct
  misc_feature 1..24: note = Synthetic
  source 1..24: mol_type = other RNA
tgacctacctcgggggagaccttc

SEQ ID NO: 11009 - RNA, 18 nt, synthetic construct
  misc_feature 1..18: note = Synthetic
  source 1..18: mol_type = other RNA
cgcctcctgcagtccttc

SEQ ID NO: 11010 - RNA, 19 nt, synthetic construct
  misc_feature 1..19: note = Synthetic
  source 1..19: mol_type = other RNA
gcgcctcctgcagtccttc

SEQ ID NO: 11011 - RNA, 21 nt, synthetic construct
  misc_feature 1..21: note = Synthetic
  source 1..21: mol_type = other RNA
cagcgcctcctgcagtccttc

SEQ ID NO: 11012 - RNA, 22 nt, synthetic construct
  misc_feature 1..22: note = Synthetic
  source 1..22: mol_type = other RNA
acagcgcctcctgcagtccttc

SEQ ID NO: 11013 - RNA, 23 nt, synthetic construct
  misc_feature 1..23: note = Synthetic
  source 1..23: mol_type = other RNA
aacagcgcctcctgcagtccttc

SEQ ID NO: 11014 - RNA, 24 nt, synthetic construct
  misc_feature 1..24: note = Synthetic
  source 1..24: mol_type = other RNA
aaacagcgcctcctgcagtccttc

SEQ ID NO: 11015 - RNA, 18 nt, synthetic construct
  misc_feature 1..18: note = Synthetic
  source 1..18: mol_type = other RNA
ccaccatcgccgccgttc

SEQ ID NO: 11016 - RNA, 19 nt, synthetic construct
  misc_feature 1..19: note = Synthetic
  source 1..19: mol_type = other RNA
gccaccatcgccgccgttc

SEQ ID NO: 11017 - RNA, 21 nt, synthetic construct
  misc_feature 1..21: note = Synthetic
  source 1..21: mol_type = other RNA
ccgccaccatcgccgccgttc

SEQ ID NO: 11018 - RNA, 22 nt, synthetic construct
  misc_feature 1..22: note = Synthetic
  source 1..22: mol_type = other RNA
cccgccaccatcgccgccgttc

SEQ ID NO: 11019 - RNA, 23 nt, synthetic construct
  misc_feature 1..23: note = Synthetic
  source 1..23: mol_type = other RNA
ccccgccaccatcgccgccgttc

SEQ ID NO: 11020 - RNA, 24 nt, synthetic construct
  misc_feature 1..24: note = Synthetic
  source 1..24: mol_type = other RNA
cccccgccaccatcgccgccgttc

SEQ ID NO: 11021 - RNA, 18 nt, synthetic construct
  misc_feature 1..18: note = Synthetic
  source 1..18: mol_type = other RNA
acgcggtgcgcggcgttc

SEQ ID NO: 11022 - RNA, 19 nt, synthetic construct
  misc_feature 1..19: note = Synthetic
  source 1..19: mol_type = other RNA
cacgcggtgcgcggcgttc

SEQ ID NO: 11023 - RNA, 21 nt, synthetic construct
  misc_feature 1..21: note = Synthetic
  source 1..21: mol_type = other RNA
aacacgcggtgcgcggcgttc

SEQ ID NO: 11024 - RNA, 22 nt, synthetic construct
  misc_feature 1..22: note = Synthetic
  source 1..22: mol_type = other RNA
caacacgcggtgcgcggcgttc

SEQ ID NO: 11025 - RNA, 23 nt, synthetic construct
  misc_feature 1..23: note = Synthetic
  source 1..23: mol_type = other RNA
acaacacgcggtgcgcggcgttc

SEQ ID NO: 11026 - RNA, 24 nt, synthetic construct
  misc_feature 1..24: note = Synthetic
  source 1..24: mol_type = other RNA
aacaacacgcggtgcgcggcgttc

SEQ ID NO: 11027 - RNA, 18 nt, synthetic construct
  misc_feature 1..18: note = Synthetic
  source 1..18: mol_type = other RNA
ctatgtccggcggcgttc

SEQ ID NO: 11028 - RNA, 19 nt, synthetic construct
  misc_feature 1..19: note = Synthetic
  source 1..19: mol_type = other RNA
gctatgtccggcggcgttc

SEQ ID NO: 11029 - RNA, 21 nt, synthetic construct
  misc_feature 1..21: note = Synthetic
  source 1..21: mol_type = other RNA
gcgctatgtccggcggcgttc

SEQ ID NO: 11030 - RNA, 22 nt, synthetic construct
  misc_feature 1..22: note = Synthetic
  source 1..22: mol_type = other RNA
ggcgctatgtccggcggcgttc

SEQ ID NO: 11031 - RNA, 23 nt, synthetic construct
  misc_feature 1..23: note = Synthetic
  source 1..23: mol_type = other RNA
tggcgctatgtccggcggcgttc

SEQ ID NO: 11032 - RNA, 24 nt, synthetic construct
  misc_feature 1..24: note = Synthetic
  source 1..24: mol_type = other RNA
ctggcgctatgtccggcggcgttc

SEQ ID NO: 11033 - RNA, 18 nt, synthetic construct
  misc_feature 1..18: note = Synthetic
  source 1..18: mol_type = other RNA
actgagaacgtgctgttc

SEQ ID NO: 11034 - RNA, 19 nt, synthetic construct
  misc_feature 1..19: note = Synthetic
  source 1..19: mol_type = other RNA
gactgagaacgtgctgttc

SEQ ID NO: 11035 - RNA, 21 nt, synthetic construct
  misc_feature 1..21: note = Synthetic
  source 1..21: mol_type = other RNA
gtgactgagaacgtgctgttc

SEQ ID NO: 11036 - RNA, 22 nt, synthetic construct
  misc_feature 1..22: note = Synthetic
  source 1..22: mol_type = other RNA
tgtgactgagaacgtgctgttc

SEQ ID NO: 11037 - RNA, 23 nt, synthetic construct
  misc_feature 1..23: note = Synthetic
  source 1..23: mol_type = other RNA
ttgtgactgagaacgtgctgttc

SEQ ID NO: 11038 - RNA, 24 nt, synthetic construct
  misc_feature 1..24: note = Synthetic
  source 1..24: mol_type = other RNA
tttgtgactgagaacgtgctgttc

SEQ ID NO: 11039 - RNA, 18 nt, synthetic construct
  misc_feature 1..18: note = Synthetic
  source 1..18: mol_type = other RNA
gcgagaagctggtctttc

SEQ ID NO: 11040 - RNA, 19 nt, synthetic construct
  misc_feature 1..19: note = Synthetic
  source 1..19: mol_type = other RNA
ggcgagaagctggtctttc

SEQ ID NO: 11041 - RNA, 21 nt, synthetic construct
  misc_feature 1..21: note = Synthetic
  source 1..21: mol_type = other RNA
tcggcgagaagctggtctttc

SEQ ID NO: 11042 - RNA, 22 nt, synthetic construct
  misc_feature 1..22: note = Synthetic
  source 1..22: mol_type = other RNA
atcggcgagaagctggtctttc

SEQ ID NO: 11043 - RNA, 23 nt, synthetic construct
  misc_feature 1..23: note = Synthetic
  source 1..23: mol_type = other RNA
catcggcgagaagctggtctttc

SEQ ID NO: 11044 - RNA, 24 nt, synthetic construct
  misc_feature 1..24: note = Synthetic
  source 1..24: mol_type = other RNA
ccatcggcgagaagctggtctttc

SEQ ID NO: 11045 - RNA, 18 nt, synthetic construct
  misc_feature 1..18: note = Synthetic
  source 1..18: mol_type = other RNA
acccgtgtggcctgtttc

SEQ ID NO: 11046 - RNA, 19 nt, synthetic construct
  misc_feature 1..19: note = Synthetic
  source 1..19: mol_type = other RNA
gacccgtgtggcctgtttc

SEQ ID NO: 11047 - RNA, 21 nt, synthetic construct
  misc_feature 1..21: note = Synthetic
  source 1..21: mol_type = other RNA
aggacccgtgtggcctgtttc

SEQ ID NO: 11048 - RNA, 22 nt, synthetic construct
  misc_feature 1..22: note = Synthetic
  source 1..22: mol_type = other RNA
gaggacccgtgtggcctgtttc

SEQ ID NO: 11049 - RNA, 23 nt, synthetic construct
  misc_feature 1..23: note = Synthetic
  source 1..23: mol_type = other RNA
ggaggacccgtgtggcctgtttc

SEQ ID NO: 11050 - RNA, 24 nt, synthetic construct
  misc_feature 1..24: note = Synthetic
  source 1..24: mol_type = other RNA
tggaggacccgtgtggcctgtttc

SEQ ID NO: 11051 - RNA, 18 nt, synthetic construct
  misc_feature 1..18: note = Synthetic
  source 1..18: mol_type = other RNA
tgcgagacgagctttttc

SEQ ID NO: 11052 - RNA, 19 nt, synthetic construct
  misc_feature 1..19: note = Synthetic
  source 1..19: mol_type = other RNA
ctgcgagacgagctttttc

SEQ ID NO: 11053 - RNA, 21 nt, synthetic construct
  misc_feature 1..21: note = Synthetic
  source 1..21: mol_type = other RNA
ttctgcgagacgagctttttc

SEQ ID NO: 11054 - RNA, 22 nt, synthetic construct
  misc_feature 1..22: note = Synthetic
  source 1..22: mol_type = other RNA
cttctgcgagacgagctttttc

SEQ ID NO: 11055 - RNA, 23 nt, synthetic construct
  misc_feature 1..23: note = Synthetic
  source 1..23: mol_type = other RNA
gcttctgcgagacgagctttttc

SEQ ID NO: 11056 - RNA, 24 nt, synthetic construct
  misc_feature 1..24: note = Synthetic
  source 1..24: mol_type = other RNA
agcttctgcgagacgagctttttc

SEQ ID NO: 11057 - RNA, 18 nt, synthetic construct
  misc_feature 1..18: note = Synthetic
  source 1..18: mol_type = other RNA
tgcagtccttcctgaaag

SEQ ID NO: 11058 - RNA, 19 nt, synthetic construct
  misc_feature 1..19: note = Synthetic
  source 1..19: mol_type = other RNA
ctgcagtccttcctgaaag

SEQ ID NO: 11059 - RNA, 21 nt, synthetic construct
  misc_feature 1..21: note = Synthetic
  source 1..21: mol_type = other RNA
tcctgcagtccttcctgaaag

SEQ ID NO: 11060 - RNA, 22 nt, synthetic construct
  misc_feature 1..22: note = Synthetic
  source 1..22: mol_type = other RNA
ctcctgcagtccttcctgaaag

SEQ ID NO: 11061 - RNA, 23 nt, synthetic construct
  misc_feature 1..23: note = Synthetic
  source 1..23: mol_type = other RNA
cctcctgcagtccttcctgaaag

SEQ ID NO: 11062 - RNA, 24 nt, synthetic construct
  misc_feature 1..24: note = Synthetic
  source 1..24: mol_type = other RNA
gcctcctgcagtccttcctgaaag

SEQ ID NO: 11063 - RNA, 18 nt, synthetic construct
  misc_feature 1..18: note = Synthetic
  source 1..18: mol_type = other RNA
gtttacgcgggggacaag

SEQ ID NO: 11064 - RNA, 19 nt, synthetic construct
  misc_feature 1..19: note = Synthetic
  source 1..19: mol_type = other RNA
cgtttacgcgggggacaag

SEQ ID NO: 11065 - RNA, 21 nt, synthetic construct
  misc_feature 1..21: note = Synthetic
  source 1..21: mol_type = other RNA
ggcgtttacgcgggggacaag

SEQ ID NO: 11066 - RNA, 22 nt, synthetic construct
  misc_feature 1..22: note = Synthetic
  source 1..22: mol_type = other RNA
gggcgtttacgcgggggacaag

SEQ ID NO: 11067 - RNA, 23 nt, synthetic construct
  misc_feature 1..23: note = Synthetic
  source 1..23: mol_type = other RNA
ggggcgtttacgcgggggacaag

SEQ ID NO: 11068 - RNA, 24 nt, synthetic construct
  misc_feature 1..24: note = Synthetic
  source 1..24: mol_type = other RNA
gggggcgtttacgcgggggacaag

SEQ ID NO: 11069 - RNA, 18 nt, synthetic construct
  misc_feature 1..18: note = Synthetic
  source 1..18: mol_type = other RNA
tgggcgggcaggcgcaag

SEQ ID NO: 11070 - RNA, 19 nt, synthetic construct
  misc_feature 1..19: note = Synthetic
  source 1..19: mol_type = other RNA
ctgggcgggcaggcgcaag

SEQ ID NO: 11071 - RNA, 21 nt, synthetic construct
  misc_feature 1..21: note = Synthetic
  source 1..21: mol_type = other RNA
agctgggcgggcaggcgcaag

SEQ ID NO: 11072 - RNA, 22 nt, synthetic construct
  misc_feature 1..22: note = Synthetic
  source 1..22: mol_type = other RNA
gagctgggcgggcaggcgcaag

SEQ ID NO: 11073 - RNA, 23 nt, synthetic construct
  misc_feature 1..23: note = Synthetic
  source 1..23: mol_type = other RNA
ggagctgggcgggcaggcgcaag

SEQ ID NO: 11074 - RNA, 24 nt, synthetic construct
  misc_feature 1..24: note = Synthetic
  source 1..24: mol_type = other RNA
cggagctgggcgggcaggcgcaag

SEQ ID NO: 11075 - RNA, 18 nt, synthetic construct
  misc_feature 1..18: note = Synthetic
  source 1..18: mol_type = other RNA
agctttttcctgggcaag

SEQ ID NO: 11076 - RNA, 19 nt, synthetic construct
  misc_feature 1..19: note = Synthetic
  source 1..19: mol_type = other RNA
gagctttttcctgggcaag

SEQ ID NO: 11077 - RNA, 21 nt, synthetic construct
  misc_feature 1..21: note = Synthetic
  source 1..21: mol_type = other RNA
acgagctttttcctgggcaag

SEQ ID NO: 11078 - RNA, 22 nt, synthetic construct
  misc_feature 1..22: note = Synthetic
  source 1..22: mol_type = other RNA
gacgagctttttcctgggcaag

SEQ ID NO: 11079 - RNA, 23 nt, synthetic construct
  misc_feature 1..23: note = Synthetic
  source 1..23: mol_type = other RNA
agacgagctttttcctgggcaag

SEQ ID NO: 11080 - RNA, 24 nt, synthetic construct
  misc_feature 1..24: note = Synthetic
  source 1..24: mol_type = other RNA
gagacgagctttttcctgggcaag

SEQ ID NO: 11081 - RNA, 18 nt, synthetic construct
  misc_feature 1..18: note = Synthetic
  source 1..18: mol_type = other RNA
ttgcatcatcagctcaag

SEQ ID NO: 11082 - RNA, 19 nt, synthetic construct
  misc_feature 1..19: note = Synthetic
  source 1..19: mol_type = other RNA
cttgcatcatcagctcaag

SEQ ID NO: 11083 - RNA, 21 nt, synthetic construct
  misc_feature 1..21: note = Synthetic
  source 1..21: mol_type = other RNA
gccttgcatcatcagctcaag

SEQ ID NO: 11084 - RNA, 22 nt, synthetic construct
  misc_feature 1..22: note = Synthetic
  source 1..22: mol_type = other RNA
ggccttgcatcatcagctcaag

SEQ ID NO: 11085 - RNA, 23 nt, synthetic construct
  misc_feature 1..23: note = Synthetic
  source 1..23: mol_type = other RNA
tggccttgcatcatcagctcaag

SEQ ID NO: 11086 - RNA, 24 nt, synthetic construct
  misc_feature 1..24: note = Synthetic
  source 1..24: mol_type = other RNA
gtggccttgcatcatcagctcaag

SEQ ID NO: 11087 - RNA, 18 nt, synthetic construct
  misc_feature 1..18: note = Synthetic
  source 1..18: mol_type = other RNA
cacctgctggagatgcag

SEQ ID NO: 11088 - RNA, 19 nt, synthetic construct
  misc_feature 1..19: note = Synthetic
  source 1..19: mol_type = other RNA
ccacctgctggagatgcag

SEQ ID NO: 11089 - RNA, 21 nt, synthetic construct
  misc_feature 1..21: note = Synthetic
  source 1..21: mol_type = other RNA
cgccacctgctggagatgcag

SEQ ID NO: 11090 - RNA, 22 nt, synthetic construct
  misc_feature 1..22: note = Synthetic
  source 1..22: mol_type = other RNA
ccgccacctgctggagatgcag

SEQ ID NO: 11091 - RNA, 23 nt, synthetic construct
  misc_feature 1..23: note = Synthetic
  source 1..23: mol_type = other RNA
gccgccacctgctggagatgcag

SEQ ID NO: 11092 - RNA, 24 nt, synthetic construct
  misc_feature 1..24: note = Synthetic
  source 1..24: mol_type = other RNA
ggccgccacctgctggagatgcag

SEQ ID NO: 11093 - RNA, 18 nt, synthetic construct
  misc_feature 1..18: note = Synthetic
  source 1..18: mol_type = other RNA
aagcgaagcttctgcgag

SEQ ID NO: 11094 - RNA, 19 nt, synthetic construct
  misc_feature 1..19: note = Synthetic
  source 1..19: mol_type = other RNA
aaagcgaagcttctgcgag

SEQ ID NO: 11095 - RNA, 21 nt, synthetic construct
  misc_feature 1..21: note = Synthetic
  source 1..21: mol_type = other RNA
ctaaagcgaagcttctgcgag

SEQ ID NO: 11096 - RNA, 22 nt, synthetic construct
  misc_feature 1..22: note = Synthetic
  source 1..22: mol_type = other RNA
gctaaagcgaagcttctgcgag

SEQ ID NO: 11097 - RNA, 23 nt, synthetic construct
  misc_feature 1..23: note = Synthetic
  source 1..23: mol_type = other RNA
agctaaagcgaagcttctgcgag

SEQ ID NO: 11098 - RNA, 24 nt, synthetic construct
  misc_feature 1..24: note = Synthetic
  source 1..24: mol_type = other RNA
gagctaaagcgaagcttctgcgag

SEQ ID NO: 11099 - RNA, 18 nt, synthetic construct
  misc_feature 1..18: note = Synthetic
  source 1..18: mol_type = other RNA
accctgaccggcccggag

SEQ ID NO: 11100 - RNA, 19 nt, synthetic construct
  misc_feature 1..19: note = Synthetic
  source 1..19: mol_type = other RNA
taccctgaccggcccggag

SEQ ID NO: 11101 - RNA, 21 nt, synthetic construct
  misc_feature 1..21: note = Synthetic
  source 1..21: mol_type = other RNA
tttaccctgaccggcccggag

SEQ ID NO: 11102 - RNA, 22 nt, synthetic construct
  misc_feature 1..22: note = Synthetic
  source 1..22: mol_type = other RNA
ctttaccctgaccggcccggag

SEQ ID NO: 11103 - RNA, 23 nt, synthetic construct
  misc_feature 1..23: note = Synthetic
  source 1..23: mol_type = other RNA
actttaccctgaccggcccggag

SEQ ID NO: 11104 - RNA, 24 nt, synthetic construct
  misc_feature 1..24: note = Synthetic
  source 1..24: mol_type = other RNA
gactttaccctgaccggcccggag

SEQ ID NO: 11105 - RNA, 18 nt, synthetic construct
  misc_feature 1..18: note = Synthetic
  source 1..18: mol_type = other RNA
gacgcccggggcctggag

SEQ ID NO: 11106 - RNA, 19 nt, synthetic construct
  misc_feature 1..19: note = Synthetic
  source 1..19: mol_type = other RNA
ggacgcccggggcctggag

SEQ ID NO: 11107 - RNA, 21 nt, synthetic construct
  misc_feature 1..21: note = Synthetic
  source 1..21: mol_type = other RNA
cgggacgcccggggcctggag

SEQ ID NO: 11108 - RNA, 22 nt, synthetic construct
  misc_feature 1..22: note = Synthetic
  source 1..22: mol_type = other RNA
ccgggacgcccggggcctggag

SEQ ID NO: 11109 - RNA, 23 nt, synthetic construct
  misc_feature 1..23: note = Synthetic
  source 1..23: mol_type = other RNA
tccgggacgcccggggcctggag

SEQ ID NO: 11110 - RNA, 24 nt, synthetic construct
  misc_feature 1..24: note = Synthetic
  source 1..24: mol_type = other RNA
ttccgggacgcccggggcctggag

SEQ ID NO: 11111 - RNA, 18 nt, synthetic construct
  misc_feature 1..18: note = Synthetic
  source 1..18: mol_type = other RNA
tccgcagtgcccgcaacg

SEQ ID NO: 11112 - RNA, 19 nt, synthetic construct
  misc_feature 1..19: note = Synthetic
  source 1..19: mol_type = other RNA
ctccgcagtgcccgcaacg

SEQ ID NO: 11113 - RNA, 21 nt, synthetic construct
  misc_feature 1..21: note = Synthetic
  source 1..21: mol_type = other RNA
tcctccgcagtgcccgcaacg

SEQ ID NO: 11114 - RNA, 22 nt, synthetic construct
  misc_feature 1..22: note = Synthetic
  source 1..22: mol_type = other RNA
ctcctccgcagtgcccgcaacg

SEQ ID NO: 11115 - RNA, 23 nt, synthetic construct
  misc_feature 1..23: note = Synthetic
  source 1..23: mol_type = other RNA
cctcctccgcagtgcccgcaacg

SEQ ID NO: 11116 - RNA, 24 nt, synthetic construct
  misc_feature 1..24: note = Synthetic
  source 1..24: mol_type = other RNA
ccctcctccgcagtgcccgcaacg

SEQ ID NO: 11117 - RNA, 18 nt, synthetic construct
  misc_feature 1..18: note = Synthetic
  source 1..18: mol_type = other RNA
aacggtttgccgcgcacg

SEQ ID NO: 11118 - RNA, 19 nt, synthetic construct
  misc_feature 1..19: note = Synthetic
  source 1..19: mol_type = other RNA
gaacggtttgccgcgcacg

SEQ ID NO: 11119 - RNA, 21 nt, synthetic construct
  misc_feature 1..21: note = Synthetic
  source 1..21: mol_type = other RNA
tggaacggtttgccgcgcacg

SEQ ID NO: 11120 - RNA, 22 nt, synthetic construct
  misc_feature 1..22: note = Synthetic
  source 1..22: mol_type = other RNA
atggaacggtttgccgcgcacg

SEQ ID NO: 11121 - RNA, 23 nt, synthetic construct
  misc_feature 1..23: note = Synthetic
  source 1..23: mol_type = other RNA
catggaacggtttgccgcgcacg

SEQ ID NO: 11122 - RNA, 24 nt, synthetic construct
  misc_feature 1..24: note = Synthetic
  source 1..24: mol_type = other RNA
tcatggaacggtttgccgcgcacg

SEQ ID NO: 11123 - RNA, 18 nt, synthetic construct
  misc_feature 1..18: note = Synthetic
  source 1..18: mol_type = other RNA
gggacctggtggcgcacg

SEQ ID NO: 11124 - RNA, 19 nt, synthetic construct
  misc_feature 1..19: note = Synthetic
  source 1..19: mol_type = other RNA
cgggacctggtggcgcacg

SEQ ID NO: 11125 - RNA, 21 nt, synthetic construct
  misc_feature 1..21: note = Synthetic
  source 1..21: mol_type = other RNA
accgggacctggtggcgcacg

SEQ ID NO: 11126 - RNA, 22 nt, synthetic construct
  misc_feature 1..22: note = Synthetic
  source 1..22: mol_type = other RNA
taccgggacctggtggcgcacg

SEQ ID NO: 11127 - RNA, 23 nt, synthetic construct
  misc_feature 1..23: note = Synthetic
  source 1..23: mol_type = other RNA
gtaccgggacctggtggcgcacg

SEQ ID NO: 11128 - RNA, 24 nt, synthetic construct
  misc_feature 1..24: note = Synthetic
  source 1..24: mol_type = other RNA
tgtaccgggacctggtggcgcacg

SEQ ID NO: 11129 - RNA, 18 nt, synthetic construct
  misc_feature 1..18: note = Synthetic
  source 1..18: mol_type = other RNA
tcgacggggcgttgcacg

SEQ ID NO: 11130 - RNA, 19 nt, synthetic construct
  misc_feature 1..19: note = Synthetic
  source 1..19: mol_type = other RNA
ttcgacggggcgttgcacg

SEQ ID NO: 11131 - RNA, 21 nt, synthetic construct
  misc_feature 1..21: note = Synthetic
  source 1..21: mol_type = other RNA
tattcgacggggcgttgcacg

SEQ ID NO: 11132 - RNA, 22 nt, synthetic construct
  misc_feature 1..22: note = Synthetic
  source 1..22: mol_type = other RNA
atattcgacggggcgttgcacg

SEQ ID NO: 11133 - RNA, 23 nt, synthetic construct
  misc_feature 1..23: note = Synthetic
  source 1..23: mol_type = other RNA
catattcgacggggcgttgcacg

SEQ ID NO: 11134 - RNA, 24 nt, synthetic construct
  misc_feature 1..24: note = Synthetic
  source 1..24: mol_type = other RNA
gcatattcgacggggcgttgcacg

SEQ ID NO: 11135 - RNA, 18 nt, synthetic construct
  misc_feature 1..18: note = Synthetic
  source 1..18: mol_type = other RNA
gacctgaaccggcagacg

SEQ ID NO: 11136 - RNA, 19 nt, synthetic construct
  misc_feature 1..19: note = Synthetic
  source 1..19: mol_type = other RNA
cgacctgaaccggcagacg

SEQ ID NO: 11137 - RNA, 21 nt, synthetic construct
  misc_feature 1..21: note = Synthetic
  source 1..21: mol_type = other RNA
ctcgacctgaaccggcagacg

SEQ ID NO: 11138 - RNA, 22 nt, synthetic construct
  misc_feature 1..22: note = Synthetic
  source 1..22: mol_type = other RNA
gctcgacctgaaccggcagacg

SEQ ID NO: 11139 - RNA, 23 nt, synthetic construct
  misc_feature 1..23: note = Synthetic
  source 1..23: mol_type = other RNA
agctcgacctgaaccggcagacg

SEQ ID NO: 11140 - RNA, 24 nt, synthetic construct
  misc_feature 1..24: note = Synthetic
  source 1..24: mol_type = other RNA
cagctcgacctgaaccggcagacg

SEQ ID NO: 11141 - RNA, 18 nt, synthetic construct
  misc_feature 1..18: note = Synthetic
  source 1..18: mol_type = other RNA
ttgtgggggtggccgacg

SEQ ID NO: 11142 - RNA, 19 nt, synthetic construct
  misc_feature 1..19: note = Synthetic
  source 1..19: mol_type = other RNA
tttgtgggggtggccgacg

SEQ ID NO: 11143 - RNA, 21 nt, synthetic construct
  misc_feature 1..21: note = Synthetic
  source 1..21: mol_type = other RNA
tctttgtgggggtggccgacg

SEQ ID NO: 11144 - RNA, 22 nt, synthetic construct
  misc_feature 1..22: note = Synthetic
  source 1..22: mol_type = other RNA
ttctttgtgggggtggccgacg

SEQ ID NO: 11145 - RNA, 23 nt, synthetic construct
  misc_feature 1..23: note = Synthetic
  source 1..23: mol_type = other RNA
cttctttgtgggggtggccgacg

SEQ ID NO: 11146 - RNA, 24 nt, synthetic construct
  misc_feature 1..24: note = Synthetic
  source 1..24: mol_type = other RNA
acttctttgtgggggtggccgacg

SEQ ID NO: 11147 - RNA, 18 nt, synthetic construct
  misc_feature 1..18: note = Synthetic
  source 1..18: mol_type = other RNA
acgtgccggtgacgtacg

SEQ ID NO: 11148 - RNA, 19 nt, synthetic construct
  misc_feature 1..19: note = Synthetic
  source 1..19: mol_type = other RNA
gacgtgccggtgacgtacg

SEQ ID NO: 11149 - RNA, 21 nt, synthetic construct
  misc_feature 1..21: note = Synthetic
  source 1..21: mol_type = other RNA
ccgacgtgccggtgacgtacg

SEQ ID NO: 11150 - RNA, 22 nt, synthetic construct
  misc_feature 1..22: note = Synthetic
  source 1..22: mol_type = other RNA
gccgacgtgccggtgacgtacg

SEQ ID NO: 11151 - RNA, 23 nt, synthetic construct
  misc_feature 1..23: note = Synthetic
  source 1..23: mol_type = other RNA
agccgacgtgccggtgacgtacg

SEQ ID NO: 11152 - RNA, 24 nt, synthetic construct
  misc_feature 1..24: note = Synthetic
  source 1..24: mol_type = other RNA
aagccgacgtgccggtgacgtacg

SEQ ID NO: 11153 - RNA, 18 nt, synthetic construct
  misc_feature 1..18: note = Synthetic
  source 1..18: mol_type = other RNA
ccgccgggggcgtttacg

SEQ ID NO: 11154 - RNA, 19 nt, synthetic construct
  misc_feature 1..19: note = Synthetic
  source 1..19: mol_type = other RNA
gccgccgggggcgtttacg

SEQ ID NO: 11155 - RNA, 21 nt, synthetic construct
  misc_feature 1..21: note = Synthetic
  source 1..21: mol_type = other RNA
gcgccgccgggggcgtttacg

SEQ ID NO: 11156 - RNA, 22 nt, synthetic construct
  misc_feature 1..22: note = Synthetic
  source 1..22: mol_type = other RNA
cgcgccgccgggggcgtttacg

SEQ ID NO: 11157 - RNA, 23 nt, synthetic construct
  misc_feature 1..23: note = Synthetic
  source 1..23: mol_type = other RNA
acgcgccgccgggggcgtttacg

SEQ ID NO: 11158 - RNA, 24 nt, synthetic construct
  misc_feature 1..24: note = Synthetic
  source 1..24: mol_type = other RNA
gacgcgccgccgggggcgtttacg

SEQ ID NO: 11159 - RNA, 18 nt, synthetic construct
  misc_feature 1..18: note = Synthetic
  source 1..18: mol_type = other RNA
gggcaaggcgggccaccg

SEQ ID NO: 11160 - RNA, 19 nt, synthetic construct
  misc_feature 1..19: note = Synthetic
  source 1..19: mol_type = other RNA
tgggcaaggcgggccaccg

SEQ ID NO: 11161 - RNA, 21 nt, synthetic construct
  misc_feature 1..21: note = Synthetic
  source 1..21: mol_type = other RNA
cctgggcaaggcgggccaccg

SEQ ID NO: 11162 - RNA, 22 nt, synthetic construct
  misc_feature 1..22: note = Synthetic
  source 1..22: mol_type = other RNA
tcctgggcaaggcgggccaccg

SEQ ID NO: 11163 - RNA, 23 nt, synthetic construct
  misc_feature 1..23: note = Synthetic
  source 1..23: mol_type = other RNA
ttcctgggcaaggcgggccaccg

SEQ ID NO: 11164 - RNA, 24 nt, synthetic construct
  misc_feature 1..24: note = Synthetic
  source 1..24: mol_type = other RNA
tttcctgggcaaggcgggccaccg

SEQ ID NO: 11165 - RNA, 18 nt, synthetic construct
  misc_feature 1..18: note = Synthetic
  source 1..18: mol_type = other RNA
ggatgaccggccgcaccg

SEQ ID NO: 11166 - RNA, 19 nt, synthetic construct
  misc_feature 1..19: note = Synthetic
  source 1..19: mol_type = other RNA
cggatgaccggccgcaccg

SEQ ID NO: 11167 - RNA, 21 nt, synthetic construct
  misc_feature 1..21: note = Synthetic
  source 1..21: mol_type = other RNA
cgcggatgaccggccgcaccg

SEQ ID NO: 11168 - RNA, 22 nt, synthetic construct
  misc_feature 1..22: note = Synthetic
  source 1..22: mol_type = other RNA
ccgcggatgaccggccgcaccg

SEQ ID NO: 11169 - RNA, 23 nt, synthetic construct
  misc_feature 1..23: note = Synthetic
  source 1..23: mol_type = other RNA
gccgcggatgaccggccgcaccg

SEQ ID NO: 11170 - RNA, 24 nt, synthetic construct
  misc_feature 1..24: note = Synthetic
  source 1..24: mol_type = other RNA
cgccgcggatgaccggccgcaccg

SEQ ID NO: 11171 - RNA, 18 nt, synthetic construct
  misc_feature 1..18: note = Synthetic
  source 1..18: mol_type = other RNA
ggggccgctgctgcaccg

SEQ ID NO: 11172 - RNA, 19 nt, synthetic construct
  misc_feature 1..19: note = Synthetic
  source 1..19: mol_type = other RNA
cggggccgctgctgcaccg

SEQ ID NO: 11173 - RNA, 21 nt, synthetic construct
  misc_feature 1..21: note = Synthetic
  source 1..21: mol_type = other RNA
cgcggggccgctgctgcaccg

SEQ ID NO: 11174 - RNA, 22 nt, synthetic construct
  misc_feature 1..22: note = Synthetic
  source 1..22: mol_type = other RNA
tcgcggggccgctgctgcaccg

SEQ ID NO: 11175 - RNA, 23 nt, synthetic construct
  misc_feature 1..23: note = Synthetic
  source 1..23: mol_type = other RNA
ctcgcggggccgctgctgcaccg

SEQ ID NO: 11176 - RNA, 24 nt, synthetic construct
  misc_feature 1..24: note = Synthetic
  source 1..24: mol_type = other RNA
tctcgcggggccgctgctgcaccg

SEQ ID NO: 11177 - RNA, 18 nt, synthetic construct
  misc_feature 1..18: note = Synthetic
  source 1..18: mol_type = other RNA
gccttaaccgcgaccccg

SEQ ID NO: 11178 - RNA, 19 nt, synthetic construct
  misc_feature 1..19: note = Synthetic
  source 1..19: mol_type = other RNA
ggccttaaccgcgaccccg

SEQ ID NO: 11179 - RNA, 21 nt, synthetic construct
  misc_feature 1..21: note = Synthetic
  source 1..21: mol_type = other RNA
ggggccttaaccgcgaccccg

SEQ ID NO: 11180 - RNA, 22 nt, synthetic construct
  misc_feature 1..22: note = Synthetic
  source 1..22: mol_type = other RNA
gggggccttaaccgcgaccccg

SEQ ID NO: 11181 - RNA, 23 nt, synthetic construct
  misc_feature 1..23: note = Synthetic
  source 1..23: mol_type = other RNA
cgggggccttaaccgcgaccccg

SEQ ID NO: 11182 - RNA, 24 nt, synthetic construct
  misc_feature 1..24: note = Synthetic
  source 1..24: mol_type = other RNA
tcgggggccttaaccgcgaccccg

SEQ ID NO: 11183 - RNA, 18 nt, synthetic construct
  misc_feature 1..18: note = Synthetic
  source 1..18: mol_type = other RNA
tcccggagatcgcccccg

SEQ ID NO: 11184 - RNA, 19 nt, synthetic construct
  misc_feature 1..19: note = Synthetic
  source 1..19: mol_type = other RNA
gtcccggagatcgcccccg

SEQ ID NO: 11185 - RNA, 21 nt, synthetic construct
  misc_feature 1..21: note = Synthetic
  source 1..21: mol_type = other RNA
tggtcccggagatcgcccccg

SEQ ID NO: 11186 - RNA, 22 nt, synthetic construct
  misc_feature 1..22: note = Synthetic
  source 1..22: mol_type = other RNA
gtggtcccggagatcgcccccg

SEQ ID NO: 11187 - RNA, 23 nt, synthetic construct
  misc_feature 1..23: note = Synthetic
  source 1..23: mol_type = other RNA
ggtggtcccggagatcgcccccg

SEQ ID NO: 11188 - RNA, 24 nt, synthetic construct
  misc_feature 1..24: note = Synthetic
  source 1..24: mol_type = other RNA
tggtggtcccggagatcgcccccg

SEQ ID NO: 11189 - RNA, 18 nt, synthetic construct
  misc_feature 1..18: note = Synthetic
  source 1..18: mol_type = other RNA
gttcccccggccggcccg

SEQ ID NO: 11190 - RNA, 19 nt, synthetic construct
  misc_feature 1..19: note = Synthetic
  source 1..19: mol_type = other RNA
cgttcccccggccggcccg

SEQ ID NO: 11191 - RNA, 21 nt, synthetic construct
  misc_feature 1..21: note = Synthetic
  source 1..21: mol_type = other RNA
gacgttcccccggccggcccg

SEQ ID NO: 11192 - RNA, 22 nt, synthetic construct
  misc_feature 1..22: note = Synthetic
  source 1..22: mol_type = other RNA
ggacgttcccccggccggcccg

SEQ ID NO: 11193 - RNA, 23 nt, synthetic construct
  misc_feature 1..23: note = Synthetic
  source 1..23: mol_type = other RNA
gggacgttcccccggccggcccg

SEQ ID NO: 11194 - RNA, 24 nt, synthetic construct
  misc_feature 1..24: note = Synthetic
  source 1..24: mol_type = other RNA
ggggacgttcccccggccggcccg

SEQ ID NO: 11195 - RNA, 18 nt, synthetic construct
  misc_feature 1..18: note = Synthetic
  source 1..18: mol_type = other RNA
acccccggggacgcgccg

SEQ ID NO: 11196 - RNA, 19 nt, synthetic construct
  misc_feature 1..19: note = Synthetic
  source 1..19: mol_type = other RNA
aacccccggggacgcgccg

SEQ ID NO: 11197 - RNA, 21 nt, synthetic construct
  misc_feature 1..21: note = Synthetic
  source 1..21: mol_type = other RNA
gcaacccccggggacgcgccg

SEQ ID NO: 11198 - RNA, 22 nt, synthetic construct
  misc_feature 1..22: note = Synthetic
  source 1..22: mol_type = other RNA
tgcaacccccggggacgcgccg

SEQ ID NO: 11199 - RNA, 23 nt, synthetic construct
  misc_feature 1..23: note = Synthetic
  source 1..23: mol_type = other RNA
ctgcaacccccggggacgcgccg

SEQ ID NO: 11200 - RNA, 24 nt, synthetic construct
  misc_feature 1..24: note = Synthetic
  source 1..24: mol_type = other RNA
cctgcaacccccggggacgcgccg

SEQ ID NO: 11201 - RNA, 18 nt, synthetic construct
  misc_feature 1..18: note = Synthetic
  source 1..18: mol_type = other RNA
gccaccgccgggaggccg

SEQ ID NO: 11202 - RNA, 19 nt, synthetic construct
  misc_feature 1..19: note = Synthetic
  source 1..19: mol_type = other RNA
ggccaccgccgggaggccg

SEQ ID NO: 11203 - RNA, 21 nt, synthetic construct
  misc_feature 1..21: note = Synthetic
  source 1..21: mol_type = other RNA
cgggccaccgccgggaggccg

SEQ ID NO: 11204 - RNA, 22 nt, synthetic construct
  misc_feature 1..22: note = Synthetic
  source 1..22: mol_type = other RNA
gcgggccaccgccgggaggccg

SEQ ID NO: 11205 - RNA, 23 nt, synthetic construct
  misc_feature 1..23: note = Synthetic
  source 1..23: mol_type = other RNA
ggcgggccaccgccgggaggccg

SEQ ID NO: 11206 - RNA, 24 nt, synthetic construct
  misc_feature 1..24: note = Synthetic
  source 1..24: mol_type = other RNA
aggcgggccaccgccgggaggccg

SEQ ID NO: 11207 - RNA, 18 nt, synthetic construct
  misc_feature 1..18: note = Synthetic
  source 1..18: mol_type = other RNA
tccgcgagagcgcggccg

SEQ ID NO: 11208 - RNA, 19 nt, synthetic construct
  misc_feature 1..19: note = Synthetic
  source 1..19: mol_type = other RNA
gtccgcgagagcgcggccg

SEQ ID NO: 11209 - RNA, 21 nt, synthetic construct
  misc_feature 1..21: note = Synthetic
  source 1..21: mol_type = other RNA
acgtccgcgagagcgcggccg

SEQ ID NO: 11210 - RNA, 22 nt, synthetic construct
  misc_feature 1..22: note = Synthetic
  source 1..22: mol_type = other RNA
cacgtccgcgagagcgcggccg

SEQ ID NO: 11211 - RNA, 23 nt, synthetic construct
  misc_feature 1..23: note = Synthetic
  source 1..23: mol_type = other RNA
gcacgtccgcgagagcgcggccg

SEQ ID NO: 11212 - RNA, 24 nt, synthetic construct
  misc_feature 1..24: note = Synthetic
  source 1..24: mol_type = other RNA
agcacgtccgcgagagcgcggccg

SEQ ID NO: 11213 - RNA, 18 nt, synthetic construct
  misc_feature 1..18: note = Synthetic
  source 1..18: mol_type = other RNA
aaacttttacctgggccg

SEQ ID NO: 11214 - RNA, 19 nt, synthetic construct
  misc_feature 1..19: note = Synthetic
  source 1..19: mol_type = other RNA
aaaacttttacctgggccg

SEQ ID NO: 11215 - RNA, 21 nt, synthetic construct
  misc_feature 1..21: note = Synthetic
  source 1..21: mol_type = other RNA
ccaaaacttttacctgggccg

SEQ ID NO: 11216 - RNA, 22 nt, synthetic construct
  misc_feature 1..22: note = Synthetic
  source 1..22: mol_type = other RNA
cccaaaacttttacctgggccg

SEQ ID NO: 11217 - RNA, 23 nt, synthetic construct
  misc_feature 1..23: note = Synthetic
  source 1..23: mol_type = other RNA
ccccaaaacttttacctgggccg

SEQ ID NO: 11218 - RNA, 24 nt, synthetic construct
  misc_feature 1..24: note = Synthetic
  source 1..24: mol_type = other RNA
tccccaaaacttttacctgggccg

SEQ ID NO: 11219 - RNA, 18 nt, synthetic construct
  misc_feature 1..18: note = Synthetic
  source 1..18: mol_type = other RNA
gccgacgtggagctgccg

SEQ ID NO: 11220 - RNA, 19 nt, synthetic construct
  misc_feature 1..19: note = Synthetic
  source 1..19: mol_type = other RNA
ggccgacgtggagctgccg

SEQ ID NO: 11221 - RNA, 21 nt, synthetic construct
  misc_feature 1..21: note = Synthetic
  source 1..21: mol_type = other RNA
gtggccgacgtggagctgccg

SEQ ID NO: 11222 - RNA, 22 nt, synthetic construct
  misc_feature 1..22: note = Synthetic
  source 1..22: mol_type = other RNA
ggtggccgacgtggagctgccg

SEQ ID NO: 11223 - RNA, 23 nt, synthetic construct
  misc_feature 1..23: note = Synthetic
  source 1..23: mol_type = other RNA
gggtggccgacgtggagctgccg

SEQ ID NO: 11224 - RNA, 24 nt, synthetic construct
  misc_feature 1..24: note = Synthetic
  source 1..24: mol_type = other RNA
ggggtggccgacgtggagctgccg

SEQ ID NO: 11225 - RNA, 18 nt, synthetic construct
  misc_feature 1..18: note = Synthetic
  source 1..18: mol_type = other RNA
gcgactgccgggttagcg

SEQ ID NO: 11226 - RNA, 19 nt, synthetic construct
  misc_feature 1..19: note = Synthetic
  source 1..19: mol_type = other RNA
cgcgactgccgggttagcg

SEQ ID NO: 11227 - RNA, 21 nt, synthetic construct
  misc_feature 1..21: note = Synthetic
  source 1..21: mol_type = other RNA
atcgcgactgccgggttagcg

SEQ ID NO: 11228 - RNA, 22 nt, synthetic construct
  misc_feature 1..22: note = Synthetic
  source 1..22: mol_type = other RNA
catcgcgactgccgggttagcg

SEQ ID NO: 11229 - RNA, 23 nt, synthetic construct
  misc_feature 1..23: note = Synthetic
  source 1..23: mol_type = other RNA
ccatcgcgactgccgggttagcg

SEQ ID NO: 11230 - RNA, 24 nt, synthetic construct
  misc_feature 1..24: note = Synthetic
  source 1..24: mol_type = other RNA
gccatcgcgactgccgggttagcg

SEQ ID NO: 11231 - RNA, 18 nt, synthetic construct
  misc_feature 1..18: note = Synthetic
  source 1..18: mol_type = other RNA
aacggggaagcccacgcg

SEQ ID NO: 11232 - RNA, 19 nt, synthetic construct
  misc_feature 1..19: note = Synthetic
  source 1..19: mol_type = other RNA
caacggggaagcccacgcg

SEQ ID NO: 11233 - RNA, 21 nt, synthetic construct
  misc_feature 1..21: note = Synthetic
  source 1..21: mol_type = other RNA
cgcaacggggaagcccacgcg

SEQ ID NO: 11234 - RNA, 22 nt, synthetic construct
  misc_feature 1..22: note = Synthetic
  source 1..22: mol_type = other RNA
ccgcaacggggaagcccacgcg

SEQ ID NO: 11235 - RNA, 23 nt, synthetic construct
  misc_feature 1..23: note = Synthetic
  source 1..23: mol_type = other RNA
cccgcaacggggaagcccacgcg

SEQ ID NO: 11236 - RNA, 24 nt, synthetic construct
  misc_feature 1..24: note = Synthetic
  source 1..24: mol_type = other RNA
gcccgcaacggggaagcccacgcg

SEQ ID NO: 11237 - RNA, 18 nt, synthetic construct
  misc_feature 1..18: note = Synthetic
  source 1..18: mol_type = other RNA
gccgggggcgtttacgcg

SEQ ID NO: 11238 - RNA, 19 nt, synthetic construct
  misc_feature 1..19: note = Synthetic
  source 1..19: mol_type = other RNA
cgccgggggcgtttacgcg

SEQ ID NO: 11239 - RNA, 21 nt, synthetic construct
  misc_feature 1..21: note = Synthetic
  source 1..21: mol_type = other RNA
gccgccgggggcgtttacgcg

SEQ ID NO: 11240 - RNA, 22 nt, synthetic construct
  misc_feature 1..22: note = Synthetic
  source 1..22: mol_type = other RNA
cgccgccgggggcgtttacgcg

SEQ ID NO: 11241 - RNA, 23 nt, synthetic construct
  misc_feature 1..23: note = Synthetic
  source 1..23: mol_type = other RNA
gcgccgccgggggcgtttacgcg

SEQ ID NO: 11242 - RNA, 24 nt, synthetic construct
  misc_feature 1..24: note = Synthetic
  source 1..24: mol_type = other RNA
cgcgccgccgggggcgtttacgcg

SEQ ID NO: 11243 - RNA, 18 nt, synthetic construct
  misc_feature 1..18: note = Synthetic
  source 1..18: mol_type = other RNA
gactgccgggttagcgcg

SEQ ID NO: 11244 - RNA, 19 nt, synthetic construct
  misc_feature 1..19: note = Synthetic
  source 1..19: mol_type = other RNA
cgactgccgggttagcgcg

SEQ ID NO: 11245 - RNA, 21 nt, synthetic construct
  misc_feature 1..21: note = Synthetic
  source 1..21: mol_type = other RNA
cgcgactgccgggttagcgcg

SEQ ID NO: 11246 - RNA, 22 nt, synthetic construct
  misc_feature 1..22: note = Synthetic
  source 1..22: mol_type = other RNA
tcgcgactgccgggttagcgcg

SEQ ID NO: 11247 - RNA, 23 nt, synthetic construct
  misc_feature 1..23: note = Synthetic
  source 1..23: mol_type = other RNA
atcgcgactgccgggttagcgcg

SEQ ID NO: 11248 - RNA, 24 nt, synthetic construct
  misc_feature 1..24: note = Synthetic
  source 1..24: mol_type = other RNA
catcgcgactgccgggttagcgcg

SEQ ID NO: 11249 - RNA, 18 nt, synthetic construct
  misc_feature 1..18: note = Synthetic
  source 1..18: mol_type = other RNA
ctgttctcggagcgcgcg

SEQ ID NO: 11250 - RNA, 19 nt, synthetic construct
  misc_feature 1..19: note = Synthetic
  source 1..19: mol_type = other RNA
gctgttctcggagcgcgcg

SEQ ID NO: 11251 - RNA, 21 nt, synthetic construct
  misc_feature 1..21: note = Synthetic
  source 1..21: mol_type = other RNA
gtgctgttctcggagcgcgcg

SEQ ID NO: 11252 - RNA, 22 nt, synthetic construct
  misc_feature 1..22: note = Synthetic
  source 1..22: mol_type = other RNA
cgtgctgttctcggagcgcgcg

SEQ ID NO: 11253 - RNA, 23 nt, synthetic construct
  misc_feature 1..23: note = Synthetic
  source 1..23: mol_type = other RNA
acgtgctgttctcggagcgcgcg

SEQ ID NO: 11254 - RNA, 24 nt, synthetic construct
  misc_feature 1..24: note = Synthetic
  source 1..24: mol_type = other RNA
aacgtgctgttctcggagcgcgcg

SEQ ID NO: 11255 - RNA, 18 nt, synthetic construct
  misc_feature 1..18: note = Synthetic
  source 1..18: mol_type = other RNA
cccaggtgccgcggcgcg

SEQ ID NO: 11256 - RNA, 19 nt, synthetic construct
  misc_feature 1..19: note = Synthetic
  source 1..19: mol_type = other RNA
gcccaggtgccgcggcgcg

SEQ ID NO: 11257 - RNA, 21 nt, synthetic construct
  misc_feature 1..21: note = Synthetic
  source 1..21: mol_type = other RNA
gcgcccaggtgccgcggcgcg

SEQ ID NO: 11258 - RNA, 22 nt, synthetic construct
  misc_feature 1..22: note = Synthetic
  source 1..22: mol_type = other RNA
tgcgcccaggtgccgcggcgcg

SEQ ID NO: 11259 - RNA, 23 nt, synthetic construct
  misc_feature 1..23: note = Synthetic
  source 1..23: mol_type = other RNA
gtgcgcccaggtgccgcggcgcg

SEQ ID NO: 11260 - RNA, 24 nt, synthetic construct
  misc_feature 1..24: note = Synthetic
  source 1..24: mol_type = other RNA
ggtgcgcccaggtgccgcggcgcg

SEQ ID NO: 11261 - RNA, 18 nt, synthetic construct
  misc_feature 1..18: note = Synthetic
  source 1..18: mol_type = other RNA
cccggcacgaaactggcg

SEQ ID NO: 11262 - RNA, 19 nt, synthetic construct
  misc_feature 1..19: note = Synthetic
  source 1..19: mol_type = other RNA
gcccggcacgaaactggcg

SEQ ID NO: 11263 - RNA, 21 nt, synthetic construct
  misc_feature 1..21: note = Synthetic
  source 1..21: mol_type = other RNA
tggcccggcacgaaactggcg

SEQ ID NO: 11264 - RNA, 22 nt, synthetic construct
  misc_feature 1..22: note = Synthetic
  source 1..22: mol_type = other RNA
gtggcccggcacgaaactggcg

SEQ ID NO: 11265 - RNA, 23 nt, synthetic construct
  misc_feature 1..23: note = Synthetic
  source 1..23: mol_type = other RNA
ggtggcccggcacgaaactggcg

SEQ ID NO: 11266 - RNA, 24 nt, synthetic construct
  misc_feature 1..24: note = Synthetic
  source 1..24: mol_type = other RNA
aggtggcccggcacgaaactggcg

SEQ ID NO: 11267 - RNA, 18 nt, synthetic construct
  misc_feature 1..18: note = Synthetic
  source 1..18: mol_type = other RNA
cggatctggtgtccatcg

SEQ ID NO: 11268 - RNA, 19 nt, synthetic construct
  misc_feature 1..19: note = Synthetic
  source 1..19: mol_type = other RNA
gcggatctggtgtccatcg

SEQ ID NO: 11269 - RNA, 21 nt, synthetic construct
  misc_feature 1..21: note = Synthetic
  source 1..21: mol_type = other RNA
gcgcggatctggtgtccatcg

SEQ ID NO: 11270 - RNA, 22 nt, synthetic construct
  misc_feature 1..22: note = Synthetic
  source 1..22: mol_type = other RNA
cgcgcggatctggtgtccatcg

SEQ ID NO: 11271 - RNA, 23 nt, synthetic construct
  misc_feature 1..23: note = Synthetic
  source 1..23: mol_type = other RNA
gcgcgcggatctggtgtccatcg

SEQ ID NO: 11272 - RNA, 24 nt, synthetic construct
  misc_feature 1..24: note = Synthetic
  source 1..24: mol_type = other RNA
tgcgcgcggatctggtgtccatcg

SEQ ID NO: 11273 - RNA, 18 nt, synthetic construct
  misc_feature 1..18: note = Synthetic
  source 1..18: mol_type = other RNA
gcctggagcgcctgatcg

SEQ ID NO: 11274 - RNA, 19 nt, synthetic construct
  misc_feature 1..19: note = Synthetic
  source 1..19: mol_type = other RNA
tgcctggagcgcctgatcg

SEQ ID NO: 11275 - RNA, 21 nt, synthetic construct
  misc_feature 1..21: note = Synthetic
  source 1..21: mol_type = other RNA
gctgcctggagcgcctgatcg

SEQ ID NO: 11276 - RNA, 22 nt, synthetic construct
  misc_feature 1..22: note = Synthetic
  source 1..22: mol_type = other RNA
cgctgcctggagcgcctgatcg

SEQ ID NO: 11277 - RNA, 23 nt, synthetic construct
  misc_feature 1..23: note = Synthetic
  source 1..23: mol_type = other RNA
tcgctgcctggagcgcctgatcg

SEQ ID NO: 11278 - RNA, 24 nt, synthetic construct
  misc_feature 1..24: note = Synthetic
  source 1..24: mol_type = other RNA
atcgctgcctggagcgcctgatcg

SEQ ID NO: 11279 - RNA, 18 nt, synthetic construct
  misc_feature 1..18: note = Synthetic
  source 1..18: mol_type = other RNA
cggggtgccgcgaactcg

SEQ ID NO: 11280 - RNA, 19 nt, synthetic construct
  misc_feature 1..19: note = Synthetic
  source 1..19: mol_type = other RNA
ccggggtgccgcgaactcg

SEQ ID NO: 11281 - RNA, 21 nt, synthetic construct
  misc_feature 1..21: note = Synthetic
  source 1..21: mol_type = other RNA
ccccggggtgccgcgaactcg

SEQ ID NO: 11282 - RNA, 22 nt, synthetic construct
  misc_feature 1..22: note = Synthetic
  source 1..22: mol_type = other RNA
cccccggggtgccgcgaactcg

SEQ ID NO: 11283 - RNA, 23 nt, synthetic construct
  misc_feature 1..23: note = Synthetic
  source 1..23: mol_type = other RNA
ccccccggggtgccgcgaactcg

SEQ ID NO: 11284 - RNA, 24 nt, synthetic construct
  misc_feature 1..24: note = Synthetic
  source 1..24: mol_type = other RNA
gccccccggggtgccgcgaactcg

SEQ ID NO: 11285 - RNA, 18 nt, synthetic construct
  misc_feature 1..18: note = Synthetic
  source 1..18: mol_type = other RNA
acgtcgtgacctacctcg

SEQ ID NO: 11286 - RNA, 19 nt, synthetic construct
  misc_feature 1..19: note = Synthetic
  source 1..19: mol_type = other RNA
tacgtcgtgacctacctcg

SEQ ID NO: 11287 - RNA, 21 nt, synthetic construct
  misc_feature 1..21: note = Synthetic
  source 1..21: mol_type = other RNA
cgtacgtcgtgacctacctcg

SEQ ID NO: 11288 - RNA, 22 nt, synthetic construct
  misc_feature 1..22: note = Synthetic
  source 1..22: mol_type = other RNA
tcgtacgtcgtgacctacctcg

SEQ ID NO: 11289 - RNA, 23 nt, synthetic construct
  misc_feature 1..23: note = Synthetic
  source 1..23: mol_type = other RNA
ctcgtacgtcgtgacctacctcg

SEQ ID NO: 11290 - RNA, 24 nt, synthetic construct
  misc_feature 1..24: note = Synthetic
  source 1..24: mol_type = other RNA
tctcgtacgtcgtgacctacctcg

SEQ ID NO: 11291 - RNA, 18 nt, synthetic construct
  misc_feature 1..18: note = Synthetic
  source 1..18: mol_type = other RNA
atggtgcccgccttctcg

SEQ ID NO: 11292 - RNA, 19 nt, synthetic construct
  misc_feature 1..19: note = Synthetic
  source 1..19: mol_type = other RNA
gatggtgcccgccttctcg

SEQ ID NO: 11293 - RNA, 21 nt, synthetic construct
  misc_feature 1..21: note = Synthetic
  source 1..21: mol_type = other RNA
gtgatggtgcccgccttctcg

SEQ ID NO: 11294 - RNA, 22 nt, synthetic construct
  misc_feature 1..22: note = Synthetic
  source 1..22: mol_type = other RNA
cgtgatggtgcccgccttctcg

SEQ ID NO: 11295 - RNA, 23 nt, synthetic construct
  misc_feature 1..23: note = Synthetic
  source 1..23: mol_type = other RNA
acgtgatggtgcccgccttctcg

SEQ ID NO: 11296 - RNA, 24 nt, synthetic construct
  misc_feature 1..24: note = Synthetic
  source 1..24: mol_type = other RNA
tacgtgatggtgcccgccttctcg

SEQ ID NO: 11297 - RNA, 18 nt, synthetic construct
  misc_feature 1..18: note = Synthetic
  source 1..18: mol_type = other RNA
cgcgcgggcggccggtcg

SEQ ID NO: 11298 - RNA, 19 nt, synthetic construct
  misc_feature 1..19: note = Synthetic
  source 1..19: mol_type = other RNA
acgcgcgggcggccggtcg

SEQ ID NO: 11299 - RNA, 21 nt, synthetic construct
  misc_feature 1..21: note = Synthetic
  source 1..21: mol_type = other RNA
acacgcgcgggcggccggtcg

SEQ ID NO: 11300 - RNA, 22 nt, synthetic construct
  misc_feature 1..22: note = Synthetic
  source 1..22: mol_type = other RNA
gacacgcgcgggcggccggtcg

SEQ ID NO: 11301 - RNA, 23 nt, synthetic construct
  misc_feature 1..23: note = Synthetic
  source 1..23: mol_type = other RNA
cgacacgcgcgggcggccggtcg

SEQ ID NO: 11302 - RNA, 24 nt, synthetic construct
  misc_feature 1..24: note = Synthetic
  source 1..24: mol_type = other RNA
ccgacacgcgcgggcggccggtcg

SEQ ID NO: 11303 - RNA, 18 nt, synthetic construct
  misc_feature 1..18: note = Synthetic
  source 1..18: mol_type = other RNA
ggcgggtccgatgggtcg

SEQ ID NO: 11304 - RNA, 19 nt, synthetic construct
  misc_feature 1..19: note = Synthetic
  source 1..19: mol_type = other RNA
gggcgggtccgatgggtcg

SEQ ID NO: 11305 - RNA, 21 nt, synthetic construct
  misc_feature 1..21: note = Synthetic
  source 1..21: mol_type = other RNA
acgggcgggtccgatgggtcg

SEQ ID NO: 11306 - RNA, 22 nt, synthetic construct
  misc_feature 1..22: note = Synthetic
  source 1..22: mol_type = other RNA
cacgggcgggtccgatgggtcg

SEQ ID NO: 11307 - RNA, 23 nt, synthetic construct
  misc_feature 1..23: note = Synthetic
  source 1..23: mol_type = other RNA
ccacgggcgggtccgatgggtcg

SEQ ID NO: 11308 - RNA, 24 nt, synthetic construct
  misc_feature 1..24: note = Synthetic
  source 1..24: mol_type = other RNA
cccacgggcgggtccgatgggtcg

SEQ ID NO: 11309 - RNA, 18 nt, synthetic construct
  misc_feature 1..18: note = Synthetic
  source 1..18: mol_type = other RNA
cccgggcgaccctggtcg

SEQ ID NO: 11310 - RNA, 19 nt, synthetic construct
  misc_feature 1..19: note = Synthetic
  source 1..19: mol_type = other RNA
gcccgggcgaccctggtcg

SEQ ID NO: 11311 - RNA, 21 nt, synthetic construct
  misc_feature 1..21: note = Synthetic
  source 1..21: mol_type = other RNA
tggcccgggcgaccctggtcg

SEQ ID NO: 11312 - RNA, 22 nt, synthetic construct
  misc_feature 1..22: note = Synthetic
  source 1..22: mol_type = other RNA
gtggcccgggcgaccctggtcg

SEQ ID NO: 11313 - RNA, 23 nt, synthetic construct
  misc_feature 1..23: note = Synthetic
  source 1..23: mol_type = other RNA
ggtggcccgggcgaccctggtcg

SEQ ID NO: 11314 - RNA, 24 nt, synthetic construct
  misc_feature 1..24: note = Synthetic
  source 1..24: mol_type = other RNA
gggtggcccgggcgaccctggtcg

SEQ ID NO: 11315 - RNA, 18 nt, synthetic construct
  misc_feature 1..18: note = Synthetic
  source 1..18: mol_type = other RNA
ccaacatgcgcatattcg

SEQ ID NO: 11316 - RNA, 19 nt, synthetic construct
  misc_feature 1..19: note = Synthetic
  source 1..19: mol_type = other RNA
accaacatgcgcatattcg

SEQ ID NO: 11317 - RNA, 21 nt, synthetic construct
  misc_feature 1..21: note = Synthetic
  source 1..21: mol_type = other RNA
ccaccaacatgcgcatattcg

SEQ ID NO: 11318 - RNA, 22 nt, synthetic construct
  misc_feature 1..22: note = Synthetic
  source 1..22: mol_type = other RNA
accaccaacatgcgcatattcg

SEQ ID NO: 11319 - RNA, 23 nt, synthetic construct
  misc_feature 1..23: note = Synthetic
  source 1..23: mol_type = other RNA
caccaccaacatgcgcatattcg

SEQ ID NO: 11320 - RNA, 24 nt, synthetic construct
  misc_feature 1..24: note = Synthetic
  source 1..24: mol_type = other RNA
ccaccaccaacatgcgcatattcg

SEQ ID NO: 11321 - RNA, 18 nt, synthetic construct
  misc_feature 1..18: note = Synthetic
  source 1..18: mol_type = other RNA
caccatcgccgccgttcg

SEQ ID NO: 11322 - RNA, 19 nt, synthetic construct
  misc_feature 1..19: note = Synthetic
  source 1..19: mol_type = other RNA
ccaccatcgccgccgttcg

SEQ ID NO: 11323 - RNA, 21 nt, synthetic construct
  misc_feature 1..21: note = Synthetic
  source 1..21: mol_type = other RNA
cgccaccatcgccgccgttcg

SEQ ID NO: 11324 - RNA, 22 nt, synthetic construct
  misc_feature 1..22: note = Synthetic
  source 1..22: mol_type = other RNA
ccgccaccatcgccgccgttcg

SEQ ID NO: 11325 - RNA, 23 nt, synthetic construct
  misc_feature 1..23: note = Synthetic
  source 1..23: mol_type = other RNA
cccgccaccatcgccgccgttcg

SEQ ID NO: 11326 - RNA, 24 nt, synthetic construct
  misc_feature 1..24: note = Synthetic
  source 1..24: mol_type = other RNA
ccccgccaccatcgccgccgttcg

SEQ ID NO: 11327 - RNA, 18 nt, synthetic construct
  misc_feature 1..18: note = Synthetic
  source 1..18: mol_type = other RNA
ccgtccacgcgctgttcg

SEQ ID NO: 11328 - RNA, 19 nt, synthetic construct
  misc_feature 1..19: note = Synthetic
  source 1..19: mol_type = other RNA
cccgtccacgcgctgttcg

SEQ ID NO: 11329 - RNA, 21 nt, synthetic construct
  misc_feature 1..21: note = Synthetic
  source 1..21: mol_type = other RNA
tccccgtccacgcgctgttcg

SEQ ID NO: 11330 - RNA, 22 nt, synthetic construct
  misc_feature 1..22: note = Synthetic
  source 1..22: mol_type = other RNA
ctccccgtccacgcgctgttcg

SEQ ID NO: 11331 - RNA, 23 nt, synthetic construct
  misc_feature 1..23: note = Synthetic
  source 1..23: mol_type = other RNA
cctccccgtccacgcgctgttcg

SEQ ID NO: 11332 - RNA, 24 nt, synthetic construct
  misc_feature 1..24: note = Synthetic
  source 1..24: mol_type = other RNA
ccctccccgtccacgcgctgttcg

SEQ ID NO: 11333 - RNA, 18 nt, synthetic construct
  misc_feature 1..18: note = Synthetic
  source 1..18: mol_type = other RNA
tttacgcgggggacaagg

SEQ ID NO: 11334 - RNA, 19 nt, synthetic construct
  misc_feature 1..19: note = Synthetic
  source 1..19: mol_type = other RNA
gtttacgcgggggacaagg

SEQ ID NO: 11335 - RNA, 21 nt, synthetic construct
  misc_feature 1..21: note = Synthetic
  source 1..21: mol_type = other RNA
gcgtttacgcgggggacaagg

SEQ ID NO: 11336 - RNA, 22 nt, synthetic construct
  misc_feature 1..22: note = Synthetic
  source 1..22: mol_type = other RNA
ggcgtttacgcgggggacaagg

SEQ ID NO: 11337 - RNA, 23 nt, synthetic construct
  misc_feature 1..23: note = Synthetic
  source 1..23: mol_type = other RNA
gggcgtttacgcgggggacaagg

SEQ ID NO: 11338 - RNA, 24 nt, synthetic construct
  misc_feature 1..24: note = Synthetic
  source 1..24: mol_type = other RNA
ggggcgtttacgcgggggacaagg

SEQ ID NO: 11339 - RNA, 18 nt, synthetic construct
  misc_feature 1..18: note = Synthetic
  source 1..18: mol_type = other RNA
acctgctggagatgcagg

SEQ ID NO: 11340 - RNA, 19 nt, synthetic construct
  misc_feature 1..19: note = Synthetic
  source 1..19: mol_type = other RNA
cacctgctggagatgcagg

SEQ ID NO: 11341 - RNA, 21 nt, synthetic construct
  misc_feature 1..21: note = Synthetic
  source 1..21: mol_type = other RNA
gccacctgctggagatgcagg

SEQ ID NO: 11342 - RNA, 22 nt, synthetic construct
  misc_feature 1..22: note = Synthetic
  source 1..22: mol_type = other RNA
cgccacctgctggagatgcagg

SEQ ID NO: 11343 - RNA, 23 nt, synthetic construct
  misc_feature 1..23: note = Synthetic
  source 1..23: mol_type = other RNA
ccgccacctgctggagatgcagg

SEQ ID NO: 11344 - RNA, 24 nt, synthetic construct
  misc_feature 1..24: note = Synthetic
  source 1..24: mol_type = other RNA
gccgccacctgctggagatgcagg

SEQ ID NO: 11345 - RNA, 18 nt, synthetic construct
  misc_feature 1..18: note = Synthetic
  source 1..18: mol_type = other RNA
ttcccccggccggcccgg

SEQ ID NO: 11346 - RNA, 19 nt, synthetic construct
  misc_feature 1..19: note = Synthetic
  source 1..19: mol_type = other RNA
gttcccccggccggcccgg

SEQ ID NO: 11347 - RNA, 21 nt, synthetic construct
  misc_feature 1..21: note = Synthetic
  source 1..21: mol_type = other RNA
acgttcccccggccggcccgg

SEQ ID NO: 11348 - RNA, 22 nt, synthetic construct
  misc_feature 1..22: note = Synthetic
  source 1..22: mol_type = other RNA
gacgttcccccggccggcccgg

SEQ ID NO: 11349 - RNA, 23 nt, synthetic construct
  misc_feature 1..23: note = Synthetic
  source 1..23: mol_type = other RNA
ggacgttcccccggccggcccgg

SEQ ID NO: 11350 - RNA, 24 nt, synthetic construct
  misc_feature 1..24: note = Synthetic
  source 1..24: mol_type = other RNA
gggacgttcccccggccggcccgg

SEQ ID NO: 11351 - RNA, 18 nt, synthetic construct
  misc_feature 1..18: note = Synthetic
  source 1..18: mol_type = other RNA
ccgacgtggagctgccgg

SEQ ID NO: 11352 - RNA, 19 nt, synthetic construct
  misc_feature 1..19: note = Synthetic
  source 1..19: mol_type = other RNA
gccgacgtggagctgccgg

SEQ ID NO: 11353 - RNA, 21 nt, synthetic construct
  misc_feature 1..21: note = Synthetic
  source 1..21: mol_type = other RNA
tggccgacgtggagctgccgg

SEQ ID NO: 11354 - RNA, 22 nt, synthetic construct
  misc_feature 1..22: note = Synthetic
  source 1..22: mol_type = other RNA
gtggccgacgtggagctgccgg

SEQ ID NO: 11355 - RNA, 23 nt, synthetic construct
  misc_feature 1..23: note = Synthetic
  source 1..23: mol_type = other RNA
ggtggccgacgtggagctgccgg

SEQ ID NO: 11356 - RNA, 24 nt, synthetic construct
  misc_feature 1..24: note = Synthetic
  source 1..24: mol_type = other RNA
gggtggccgacgtggagctgccgg

SEQ ID NO: 11357 - RNA, 18 nt, synthetic construct
  misc_feature 1..18: note = Synthetic
  source 1..18: mol_type = other RNA
acgtccgcgagagcgcgg

SEQ ID NO: 11358 - RNA, 19 nt, synthetic construct
  misc_feature 1..19: note = Synthetic
  source 1..19: mol_type = other RNA
cacgtccgcgagagcgcgg

SEQ ID NO: 11359 - RNA, 21 nt, synthetic construct
  misc_feature 1..21: note = Synthetic
  source 1..21: mol_type = other RNA
agcacgtccgcgagagcgcgg

SEQ ID NO: 11360 - RNA, 22 nt, synthetic construct
  misc_feature 1..22: note = Synthetic
  source 1..22: mol_type = other RNA
cagcacgtccgcgagagcgcgg

SEQ ID NO: 11361 - RNA, 23 nt, synthetic construct
  misc_feature 1..23: note = Synthetic
  source 1..23: mol_type = other RNA
gcagcacgtccgcgagagcgcgg

SEQ ID NO: 11362 - RNA, 24 nt, synthetic construct
  misc_feature 1..24: note = Synthetic
  source 1..24: mol_type = other RNA
tgcagcacgtccgcgagagcgcgg

SEQ ID NO: 11363 - RNA, 18 nt, synthetic construct
  misc_feature 1..18: note = Synthetic
  source 1..18: mol_type = other RNA
tgaacgttgacgcggcgg

SEQ ID NO: 11364 - RNA, 19 nt, synthetic construct
  misc_feature 1..19: note = Synthetic
  source 1..19: mol_type = other RNA
atgaacgttgacgcggcgg

SEQ ID NO: 11365 - RNA, 21 nt, synthetic construct
  misc_feature 1..21: note = Synthetic
  source 1..21: mol_type = other RNA
tgatgaacgttgacgcggcgg

SEQ ID NO: 11366 - RNA, 22 nt, synthetic construct
  misc_feature 1..22: note = Synthetic
  source 1..22: mol_type = other RNA
ctgatgaacgttgacgcggcgg

SEQ ID NO: 11367 - RNA, 23 nt, synthetic construct
  misc_feature 1..23: note = Synthetic
  source 1..23: mol_type = other RNA
gctgatgaacgttgacgcggcgg

SEQ ID NO: 11368 - RNA, 24 nt, synthetic construct
  misc_feature 1..24: note = Synthetic
  source 1..24: mol_type = other RNA
cgctgatgaacgttgacgcggcgg

SEQ ID NO: 11369 - RNA, 18 nt, synthetic construct
  misc_feature 1..18: note = Synthetic
  source 1..18: mol_type = other RNA
cgtcgtgacctacctcgg

SEQ ID NO: 11370 - RNA, 19 nt, synthetic construct
  misc_feature 1..19: note = Synthetic
  source 1..19: mol_type = other RNA
acgtcgtgacctacctcgg

SEQ ID NO: 11371 - RNA, 21 nt, synthetic construct
  misc_feature 1..21: note = Synthetic
  source 1..21: mol_type = other RNA
gtacgtcgtgacctacctcgg

SEQ ID NO: 11372 - RNA, 22 nt, synthetic construct
  misc_feature 1..22: note = Synthetic
  source 1..22: mol_type = other RNA
cgtacgtcgtgacctacctcgg

SEQ ID NO: 11373 - RNA, 23 nt, synthetic construct
  misc_feature 1..23: note = Synthetic
  source 1..23: mol_type = other RNA
tcgtacgtcgtgacctacctcgg

SEQ ID NO: 11374 - RNA, 24 nt, synthetic construct
  misc_feature 1..24: note = Synthetic
  source 1..24: mol_type = other RNA
ctcgtacgtcgtgacctacctcgg

SEQ ID NO: 11375 - RNA, 18 nt, synthetic construct
  misc_feature 1..18: note = Synthetic
  source 1..18: mol_type = other RNA
gtgccgcggcgcgcaggg

SEQ ID NO: 11376 - RNA, 19 nt, synthetic construct
  misc_feature 1..19: note = Synthetic
  source 1..19: mol_type = other RNA
ggtgccgcggcgcgcaggg

SEQ ID NO: 11377 - RNA, 21 nt, synthetic construct
  misc_feature 1..21: note = Synthetic
  source 1..21: mol_type = other RNA
caggtgccgcggcgcgcaggg

SEQ ID NO: 11378 - RNA, 22 nt, synthetic construct
  misc_feature 1..22: note = Synthetic
  source 1..22: mol_type = other RNA
ccaggtgccgcggcgcgcaggg

SEQ ID NO: 11379 - RNA, 23 nt, synthetic construct
  misc_feature 1..23: note = Synthetic
  source 1..23: mol_type = other RNA
cccaggtgccgcggcgcgcaggg

SEQ ID NO: 11380 - RNA, 24 nt, synthetic construct
  misc_feature 1..24: note = Synthetic
  source 1..24: mol_type = other RNA
gcccaggtgccgcggcgcgcaggg

SEQ ID NO: 11381 - RNA, 18 nt, synthetic construct
  misc_feature 1..18: note = Synthetic
  source 1..18: mol_type = other RNA
cgcgagagcgcggccggg

SEQ ID NO: 11382 - RNA, 19 nt, synthetic construct
  misc_feature 1..19: note = Synthetic
  source 1..19: mol_type = other RNA
ccgcgagagcgcggccggg

SEQ ID NO: 11383 - RNA, 21 nt, synthetic construct
  misc_feature 1..21: note = Synthetic
  source 1..21: mol_type = other RNA
gtccgcgagagcgcggccggg

SEQ ID NO: 11384 - RNA, 22 nt, synthetic construct
  misc_feature 1..22: note = Synthetic
  source 1..22: mol_type = other RNA
cgtccgcgagagcgcggccggg

SEQ ID NO: 11385 - RNA, 23 nt, synthetic construct
  misc_feature 1..23: note = Synthetic
  source 1..23: mol_type = other RNA
acgtccgcgagagcgcggccggg

SEQ ID NO: 11386 - RNA, 24 nt, synthetic construct
  misc_feature 1..24: note = Synthetic
  source 1..24: mol_type = other RNA
cacgtccgcgagagcgcggccggg

SEQ ID NO: 11387 - RNA, 18 nt, synthetic construct
  misc_feature 1..18: note = Synthetic
  source 1..18: mol_type = other RNA
cgacgtggagctgccggg

SEQ ID NO: 11388 - RNA, 19 nt, synthetic construct
  misc_feature 1..19: note = Synthetic
  source 1..19: mol_type = other RNA
ccgacgtggagctgccggg

SEQ ID NO: 11389 - RNA, 21 nt, synthetic construct
  misc_feature 1..21: note = Synthetic
  source 1..21: mol_type = other RNA
ggccgacgtggagctgccggg

SEQ ID NO: 11390 - RNA, 22 nt, synthetic construct
  misc_feature 1..22: note = Synthetic
  source 1..22: mol_type = other RNA
tggccgacgtggagctgccggg

SEQ ID NO: 11391 - RNA, 23 nt, synthetic construct
  misc_feature 1..23: note = Synthetic
  source 1..23: mol_type = other RNA
gtggccgacgtggagctgccggg

SEQ ID NO: 11392 - RNA, 24 nt, synthetic construct
  misc_feature 1..24: note = Synthetic
  source 1..24: mol_type = other RNA
ggtggccgacgtggagctgccggg

SEQ ID NO: 11393 - RNA, 18 nt, synthetic construct
  misc_feature 1..18: note = Synthetic
  source 1..18: mol_type = other RNA
gacgtggagctgccgggg

SEQ ID NO: 11394 - RNA, 19 nt, synthetic construct
  misc_feature 1..19: note = Synthetic
  source 1..19: mol_type = other RNA
cgacgtggagctgccgggg

SEQ ID NO: 11395 - RNA, 21 nt, synthetic construct
  misc_feature 1..21: note = Synthetic
  source 1..21: mol_type = other RNA
gccgacgtggagctgccgggg

SEQ ID NO: 11396 - RNA, 22 nt, synthetic construct
  misc_feature 1..22: note = Synthetic
  source 1..22: mol_type = other RNA
ggccgacgtggagctgccgggg

SEQ ID NO: 11397 - RNA, 23 nt, synthetic construct
  misc_feature 1..23: note = Synthetic
  source 1..23: mol_type = other RNA
tggccgacgtggagctgccgggg

SEQ ID NO: 11398 - RNA, 24 nt, synthetic construct
  misc_feature 1..24: note = Synthetic
  source 1..24: mol_type = other RNA
gtggccgacgtggagctgccgggg

SEQ ID NO: 11399 - RNA, 18 nt, synthetic construct
  misc_feature 1..18: note = Synthetic
  source 1..18: mol_type = other RNA
gaccggccgcaccggggg

SEQ ID NO: 11400 - RNA, 19 nt, synthetic construct
  misc_feature 1..19: note = Synthetic
  source 1..19: mol_type = other RNA
tgaccggccgcaccggggg

SEQ ID NO: 11401 - RNA, 21 nt, synthetic construct
  misc_feature 1..21: note = Synthetic
  source 1..21: mol_type = other RNA
gatgaccggccgcaccggggg

SEQ ID NO: 11402 - RNA, 22 nt, synthetic construct
  misc_feature 1..22: note = Synthetic
  source 1..22: mol_type = other RNA
ggatgaccggccgcaccggggg

SEQ ID NO: 11403 - RNA, 23 nt, synthetic construct
  misc_feature 1..23: note = Synthetic
  source 1..23: mol_type = other RNA
cggatgaccggccgcaccggggg

SEQ ID NO: 11404 - RNA, 24 nt, synthetic construct
  misc_feature 1..24: note = Synthetic
  source 1..24: mol_type = other RNA
gcggatgaccggccgcaccggggg

SEQ ID NO: 11405 - RNA, 18 nt, synthetic construct
  misc_feature 1..18: note = Synthetic
  source 1..18: mol_type = other RNA
ggggcctggagctggggg

SEQ ID NO: 11406 - RNA, 19 nt, synthetic construct
  misc_feature 1..19: note = Synthetic
  source 1..19: mol_type = other RNA
cggggcctggagctggggg

SEQ ID NO: 11407 - RNA, 21 nt, synthetic construct
  misc_feature 1..21: note = Synthetic
  source 1..21: mol_type = other RNA
cccggggcctggagctggggg

SEQ ID NO: 11408 - RNA, 22 nt, synthetic construct
  misc_feature 1..22: note = Synthetic
  source 1..22: mol_type = other RNA
gcccggggcctggagctggggg

SEQ ID NO: 11409 - RNA, 23 nt, synthetic construct
  misc_feature 1..23: note = Synthetic
  source 1..23: mol_type = other RNA
cgcccggggcctggagctggggg

SEQ ID NO: 11410 - RNA, 24 nt, synthetic construct
  misc_feature 1..24: note = Synthetic
  source 1..24: mol_type = other RNA
acgcccggggcctggagctggggg

SEQ ID NO: 11411 - RNA, 18 nt, synthetic construct
  misc_feature 1..18: note = Synthetic
  source 1..18: mol_type = other RNA
cagctgtttttttggggg

SEQ ID NO: 11412 - RNA, 19 nt, synthetic construct
  misc_feature 1..19: note = Synthetic
  source 1..19: mol_type = other RNA
ccagctgtttttttggggg

SEQ ID NO: 11413 - RNA, 21 nt, synthetic construct
  misc_feature 1..21: note = Synthetic
  source 1..21: mol_type = other RNA
cgccagctgtttttttggggg

SEQ ID NO: 11414 - RNA, 22 nt, synthetic construct
  misc_feature 1..22: note = Synthetic
  source 1..22: mol_type = other RNA
ccgccagctgtttttttggggg

SEQ ID NO: 11415 - RNA, 23 nt, synthetic construct
  misc_feature 1..23: note = Synthetic
  source 1..23: mol_type = other RNA
cccgccagctgtttttttggggg

SEQ ID NO: 11416 - RNA, 24 nt, synthetic construct
  misc_feature 1..24: note = Synthetic
  source 1..24: mol_type = other RNA
ccccgccagctgtttttttggggg

SEQ ID NO: 11417 - RNA, 18 nt, synthetic construct
  misc_feature 1..18: note = Synthetic
  source 1..18: mol_type = other RNA
cggggcctggagctgggg

SEQ ID NO: 11418 - RNA, 19 nt, synthetic construct
  misc_feature 1..19: note = Synthetic
  source 1..19: mol_type = other RNA
ccggggcctggagctgggg

SEQ ID NO: 11419 - RNA, 21 nt, synthetic construct
  misc_feature 1..21: note = Synthetic
  source 1..21: mol_type = other RNA
gcccggggcctggagctgggg

SEQ ID NO: 11420 - RNA, 22 nt, synthetic construct
  misc_feature 1..22: note = Synthetic
  source 1..22: mol_type = other RNA
cgcccggggcctggagctgggg

SEQ ID NO: 11421 - RNA, 23 nt, synthetic construct
  misc_feature 1..23: note = Synthetic
  source 1..23: mol_type = other RNA
acgcccggggcctggagctgggg

SEQ ID NO: 11422 - RNA, 24 nt, synthetic construct
  misc_feature 1..24: note = Synthetic
  source 1..24: mol_type = other RNA
gacgcccggggcctggagctgggg

SEQ ID NO: 11423 - RNA, 18 nt, synthetic construct
  misc_feature 1..18: note = Synthetic
  source 1..18: mol_type = other RNA
tgctggcccacaacatgg

SEQ ID NO: 11424 - RNA, 19 nt, synthetic construct
  misc_feature 1..19: note = Synthetic
  source 1..19: mol_type = other RNA
gtgctggcccacaacatgg

SEQ ID NO: 11425 - RNA, 21 nt, synthetic construct
  misc_feature 1..21: note = Synthetic
  source 1..21: mol_type = other RNA
aggtgctggcccacaacatgg

SEQ ID NO: 11426 - RNA, 22 nt, synthetic construct
  misc_feature 1..22: note = Synthetic
  source 1..22: mol_type = other RNA
caggtgctggcccacaacatgg

SEQ ID NO: 11427 - RNA, 23 nt, synthetic construct
  misc_feature 1..23: note = Synthetic
  source 1..23: mol_type = other RNA
gcaggtgctggcccacaacatgg

SEQ ID NO: 11428 - RNA, 24 nt, synthetic construct
  misc_feature 1..24: note = Synthetic
  source 1..24: mol_type = other RNA
tgcaggtgctggcccacaacatgg

SEQ ID NO: 11429 - RNA, 18 nt, synthetic construct
  misc_feature 1..18: note = Synthetic
  source 1..18: mol_type = other RNA
ggcccggcacgaaactgg

SEQ ID NO: 11430 - RNA, 19 nt, synthetic construct
  misc_feature 1..19: note = Synthetic
  source 1..19: mol_type = other RNA
tggcccggcacgaaactgg

SEQ ID NO: 11431 - RNA, 21 nt, synthetic construct
  misc_feature 1..21: note = Synthetic
  source 1..21: mol_type = other RNA
ggtggcccggcacgaaactgg

SEQ ID NO: 11432 - RNA, 22 nt, synthetic construct
  misc_feature 1..22: note = Synthetic
  source 1..22: mol_type = other RNA
aggtggcccggcacgaaactgg

SEQ ID NO: 11433 - RNA, 23 nt, synthetic construct
  misc_feature 1..23: note = Synthetic
  source 1..23: mol_type = other RNA
caggtggcccggcacgaaactgg

SEQ ID NO: 11434 - RNA, 24 nt, synthetic construct
  misc_feature 1..24: note = Synthetic
  source 1..24: mol_type = other RNA
ccaggtggcccggcacgaaactgg

SEQ ID NO: 11435 - RNA, 18 nt, synthetic construct
  misc_feature 1..18: note = Synthetic
  source 1..18: mol_type = other RNA
tgaccggcccggagctgg

SEQ ID NO: 11436 - RNA, 19 nt, synthetic construct
  misc_feature 1..19: note = Synthetic
  source 1..19: mol_type = other RNA
ctgaccggcccggagctgg

SEQ ID NO: 11437 - RNA, 21 nt, synthetic construct
  misc_feature 1..21: note = Synthetic
  source 1..21: mol_type = other RNA
ccctgaccggcccggagctgg

SEQ ID NO: 11438 - RNA, 22 nt, synthetic construct
  misc_feature 1..22: note = Synthetic
  source 1..22: mol_type = other RNA
accctgaccggcccggagctgg

SEQ ID NO: 11439 - RNA, 23 nt, synthetic construct
  misc_feature 1..23: note = Synthetic
  source 1..23: mol_type = other RNA
taccctgaccggcccggagctgg

SEQ ID NO: 11440 - RNA, 24 nt, synthetic construct
  misc_feature 1..24: note = Synthetic
  source 1..24: mol_type = other RNA
ttaccctgaccggcccggagctgg

SEQ ID NO: 11441 - RNA, 18 nt, synthetic construct
  misc_feature 1..18: note = Synthetic
  source 1..18: mol_type = other RNA
tgaaccggcagacgctgg

SEQ ID NO: 11442 - RNA, 19 nt, synthetic construct
  misc_feature 1..19: note = Synthetic
  source 1..19: mol_type = other RNA
ctgaaccggcagacgctgg

SEQ ID NO: 11443 - RNA, 21 nt, synthetic construct
  misc_feature 1..21: note = Synthetic
  source 1..21: mol_type = other RNA
acctgaaccggcagacgctgg

SEQ ID NO: 11444 - RNA, 22 nt, synthetic construct
  misc_feature 1..22: note = Synthetic
  source 1..22: mol_type = other RNA
gacctgaaccggcagacgctgg

SEQ ID NO: 11445 - RNA, 23 nt, synthetic construct
  misc_feature 1..23: note = Synthetic
  source 1..23: mol_type = other RNA
cgacctgaaccggcagacgctgg

SEQ ID NO: 11446 - RNA, 24 nt, synthetic construct
  misc_feature 1..24: note = Synthetic
  source 1..24: mol_type = other RNA
tcgacctgaaccggcagacgctgg

SEQ ID NO: 11447 - RNA, 18 nt, synthetic construct
  misc_feature 1..18: note = Synthetic
  source 1..18: mol_type = other RNA
acgggcgcgtggtagtgg

SEQ ID NO: 11448 - RNA, 19 nt, synthetic construct
  misc_feature 1..19: note = Synthetic
  source 1..19: mol_type = other RNA
aacgggcgcgtggtagtgg

SEQ ID NO: 11449 - RNA, 21 nt, synthetic construct
  misc_feature 1..21: note = Synthetic
  source 1..21: mol_type = other RNA
acaacgggcgcgtggtagtgg

SEQ ID NO: 11450 - RNA, 22 nt, synthetic construct
  misc_feature 1..22: note = Synthetic
  source 1..22: mol_type = other RNA
cacaacgggcgcgtggtagtgg

SEQ ID NO: 11451 - RNA, 23 nt, synthetic construct
  misc_feature 1..23: note = Synthetic
  source 1..23: mol_type = other RNA
tcacaacgggcgcgtggtagtgg

SEQ ID NO: 11452 - RNA, 24 nt, synthetic construct
  misc_feature 1..24: note = Synthetic
  source 1..24: mol_type = other RNA
ttcacaacgggcgcgtggtagtgg

SEQ ID NO: 11453 - RNA, 18 nt, synthetic construct
  misc_feature 1..18: note = Synthetic
  source 1..18: mol_type = other RNA
tgcggaacgcggtcgtgg

SEQ ID NO: 11454 - RNA, 19 nt, synthetic construct
  misc_feature 1..19: note = Synthetic
  source 1..19: mol_type = other RNA
ctgcggaacgcggtcgtgg

SEQ ID NO: 11455 - RNA, 21 nt, synthetic construct
  misc_feature 1..21: note = Synthetic
  source 1..21: mol_type = other RNA
acctgcggaacgcggtcgtgg

SEQ ID NO: 11456 - RNA, 22 nt, synthetic construct
  misc_feature 1..22: note = Synthetic
  source 1..22: mol_type = other RNA
tacctgcggaacgcggtcgtgg

SEQ ID NO: 11457 - RNA, 23 nt, synthetic construct
  misc_feature 1..23: note = Synthetic
  source 1..23: mol_type = other RNA
gtacctgcggaacgcggtcgtgg

SEQ ID NO: 11458 - RNA, 24 nt, synthetic construct
  misc_feature 1..24: note = Synthetic
  source 1..24: mol_type = other RNA
tgtacctgcggaacgcggtcgtgg

SEQ ID NO: 11459 - RNA, 18 nt, synthetic construct
  misc_feature 1..18: note = Synthetic
  source 1..18: mol_type = other RNA
cgccagctgtttttttgg

SEQ ID NO: 11460 - RNA, 19 nt, synthetic construct
  misc_feature 1..19: note = Synthetic
  source 1..19: mol_type = other RNA
ccgccagctgtttttttgg

SEQ ID NO: 11461 - RNA, 21 nt, synthetic construct
  misc_feature 1..21: note = Synthetic
  source 1..21: mol_type = other RNA
ccccgccagctgtttttttgg

SEQ ID NO: 11462 - RNA, 22 nt, synthetic construct
  misc_feature 1..22: note = Synthetic
  source 1..22: mol_type = other RNA
gccccgccagctgtttttttgg

SEQ ID NO: 11463 - RNA, 23 nt, synthetic construct
  misc_feature 1..23: note = Synthetic
  source 1..23: mol_type = other RNA
cgccccgccagctgtttttttgg

SEQ ID NO: 11464 - RNA, 24 nt, synthetic construct
  misc_feature 1..24: note = Synthetic
  source 1..24: mol_type = other RNA
ccgccccgccagctgtttttttgg

SEQ ID NO: 11465 - RNA, 18 nt, synthetic construct
  misc_feature 1..18: note = Synthetic
  source 1..18: mol_type = other RNA
ctgacctacgcgctcatg

SEQ ID NO: 11466 - RNA, 19 nt, synthetic construct
  misc_feature 1..19: note = Synthetic
  source 1..19: mol_type = other RNA
gctgacctacgcgctcatg

SEQ ID NO: 11467 - RNA, 21 nt, synthetic construct
  misc_feature 1..21: note = Synthetic
  source 1..21: mol_type = other RNA
gcgctgacctacgcgctcatg

SEQ ID NO: 11468 - RNA, 22 nt, synthetic construct
  misc_feature 1..22: note = Synthetic
  source 1..22: mol_type = other RNA
cgcgctgacctacgcgctcatg

SEQ ID NO: 11469 - RNA, 23 nt, synthetic construct
  misc_feature 1..23: note = Synthetic
  source 1..23: mol_type = other RNA
acgcgctgacctacgcgctcatg

SEQ ID NO: 11470 - RNA, 24 nt, synthetic construct
  misc_feature 1..24: note = Synthetic
  source 1..24: mol_type = other RNA
aacgcgctgacctacgcgctcatg

SEQ ID NO: 11471 - RNA, 18 nt, synthetic construct
  misc_feature 1..18: note = Synthetic
  source 1..18: mol_type = other RNA
cgccacctgctggagatg

SEQ ID NO: 11472 - RNA, 19 nt, synthetic construct
  misc_feature 1..19: note = Synthetic
  source 1..19: mol_type = other RNA
ccgccacctgctggagatg

SEQ ID NO: 11473 - RNA, 21 nt, synthetic construct
  misc_feature 1..21: note = Synthetic
  source 1..21: mol_type = other RNA
ggccgccacctgctggagatg

SEQ ID NO: 11474 - RNA, 22 nt, synthetic construct
  misc_feature 1..22: note = Synthetic
  source 1..22: mol_type = other RNA
gggccgccacctgctggagatg

SEQ ID NO: 11475 - RNA, 23 nt, synthetic construct
  misc_feature 1..23: note = Synthetic
  source 1..23: mol_type = other RNA
tgggccgccacctgctggagatg

SEQ ID NO: 11476 - RNA, 24 nt, synthetic construct
  misc_feature 1..24: note = Synthetic
  source 1..24: mol_type = other RNA
gtgggccgccacctgctggagatg

SEQ ID NO: 11477 - RNA, 18 nt, synthetic construct
  misc_feature 1..18: note = Synthetic
  source 1..18: mol_type = other RNA
tggcccggcacgaaactg

SEQ ID NO: 11478 - RNA, 19 nt, synthetic construct
  misc_feature 1..19: note = Synthetic
  source 1..19: mol_type = other RNA
gtggcccggcacgaaactg

SEQ ID NO: 11479 - RNA, 21 nt, synthetic construct
  misc_feature 1..21: note = Synthetic
  source 1..21: mol_type = other RNA
aggtggcccggcacgaaactg

SEQ ID NO: 11480 - RNA, 22 nt, synthetic construct
  misc_feature 1..22: note = Synthetic
  source 1..22: mol_type = other RNA
caggtggcccggcacgaaactg

SEQ ID NO: 11481 - RNA, 23 nt, synthetic construct
  misc_feature 1..23: note = Synthetic
  source 1..23: mol_type = other RNA
ccaggtggcccggcacgaaactg

SEQ ID NO: 11482 - RNA, 24 nt, synthetic construct
  misc_feature 1..24: note = Synthetic
  source 1..24: mol_type = other RNA
tccaggtggcccggcacgaaactg

SEQ ID NO: 11483 - RNA, 18 nt, synthetic construct
  misc_feature 1..18: note = Synthetic
  source 1..18: mol_type = other RNA
gacgtgggccgccacctg

SEQ ID NO: 11484 - RNA, 19 nt, synthetic construct
  misc_feature 1..19: note = Synthetic
  source 1..19: mol_type = other RNA
cgacgtgggccgccacctg

SEQ ID NO: 11485 - RNA, 21 nt, synthetic construct
  misc_feature 1..21: note = Synthetic
  source 1..21: mol_type = other RNA
gacgacgtgggccgccacctg

SEQ ID NO: 11486 - RNA, 22 nt, synthetic construct
  misc_feature 1..22: note = Synthetic
  source 1..22: mol_type = other RNA
ggacgacgtgggccgccacctg

SEQ ID NO: 11487 - RNA, 23 nt, synthetic construct
  misc_feature 1..23: note = Synthetic
  source 1..23: mol_type = other RNA
tggacgacgtgggccgccacctg

SEQ ID NO: 11488 - RNA, 24 nt, synthetic construct
  misc_feature 1..24: note = Synthetic
  source 1..24: mol_type = other RNA
ctggacgacgtgggccgccacctg

SEQ ID NO: 11489 - RNA, 18 nt, synthetic construct
  misc_feature 1..18: note = Synthetic
  source 1..18: mol_type = other RNA
gcggcagccgtgtacctg

SEQ ID NO: 11490 - RNA, 19 nt, synthetic construct
  misc_feature 1..19: note = Synthetic
  source 1..19: mol_type = other RNA
cgcggcagccgtgtacctg

SEQ ID NO: 11491 - RNA, 21 nt, synthetic construct
  misc_feature 1..21: note = Synthetic
  source 1..21: mol_type = other RNA
aacgcggcagccgtgtacctg

SEQ ID NO: 11492 - RNA, 22 nt, synthetic construct
  misc_feature 1..22: note = Synthetic
  source 1..22: mol_type = other RNA
caacgcggcagccgtgtacctg

SEQ ID NO: 11493 - RNA, 23 nt, synthetic construct
  misc_feature 1..23: note = Synthetic
  source 1..23: mol_type = other RNA
acaacgcggcagccgtgtacctg

SEQ ID NO: 11494 - RNA, 24 nt, synthetic construct
  misc_feature 1..24: note = Synthetic
  source 1..24: mol_type = other RNA
gacaacgcggcagccgtgtacctg

SEQ ID NO: 11495 - RNA, 18 nt, synthetic construct
  misc_feature 1..18: note = Synthetic
  source 1..18: mol_type = other RNA
cgcgtatacgccaccctg

SEQ ID NO: 11496 - RNA, 19 nt, synthetic construct
  misc_feature 1..19: note = Synthetic
  source 1..19: mol_type = other RNA
ccgcgtatacgccaccctg

SEQ ID NO: 11497 - RNA, 21 nt, synthetic construct
  misc_feature 1..21: note = Synthetic
  source 1..21: mol_type = other RNA
gaccgcgtatacgccaccctg

SEQ ID NO: 11498 - RNA, 22 nt, synthetic construct
  misc_feature 1..22: note = Synthetic
  source 1..22: mol_type = other RNA
cgaccgcgtatacgccaccctg

SEQ ID NO: 11499 - RNA, 23 nt, synthetic construct
  misc_feature 1..23: note = Synthetic
  source 1..23: mol_type = other RNA
tcgaccgcgtatacgccaccctg

SEQ ID NO: 11500 - RNA, 24 nt, synthetic construct
  misc_feature 1..24: note = Synthetic
  source 1..24: mol_type = other RNA
ttcgaccgcgtatacgccaccctg

SEQ ID NO: 11501 - RNA, 18 nt, synthetic construct
  misc_feature 1..18: note = Synthetic
  source 1..18: mol_type = other RNA
aacgttccctaccccctg

SEQ ID NO: 11502 - RNA, 19 nt, synthetic construct
  misc_feature 1..19: note = Synthetic
  source 1..19: mol_type = other RNA
caacgttccctaccccctg

SEQ ID NO: 11503 - RNA, 21 nt, synthetic construct
  misc_feature 1..21: note = Synthetic
  source 1..21: mol_type = other RNA
accaacgttccctaccccctg

SEQ ID NO: 11504 - RNA, 22 nt, synthetic construct
  misc_feature 1..22: note = Synthetic
  source 1..22: mol_type = other RNA
caccaacgttccctaccccctg

SEQ ID NO: 11505 - RNA, 23 nt, synthetic construct
  misc_feature 1..23: note = Synthetic
  source 1..23: mol_type = other RNA
ccaccaacgttccctaccccctg

SEQ ID NO: 11506 - RNA, 24 nt, synthetic construct
  misc_feature 1..24: note = Synthetic
  source 1..24: mol_type = other RNA
gccaccaacgttccctaccccctg

SEQ ID NO: 11507 - RNA, 18 nt, synthetic construct
  misc_feature 1..18: note = Synthetic
  source 1..18: mol_type = other RNA
gtctttctggaggccctg

SEQ ID NO: 11508 - RNA, 19 nt, synthetic construct
  misc_feature 1..19: note = Synthetic
  source 1..19: mol_type = other RNA
ggtctttctggaggccctg

SEQ ID NO: 11509 - RNA, 21 nt, synthetic construct
  misc_feature 1..21: note = Synthetic
  source 1..21: mol_type = other RNA
ctggtctttctggaggccctg

SEQ ID NO: 11510 - RNA, 22 nt, synthetic construct
  misc_feature 1..22: note = Synthetic
  source 1..22: mol_type = other RNA
gctggtctttctggaggccctg

SEQ ID NO: 11511 - RNA, 23 nt, synthetic construct
  misc_feature 1..23: note = Synthetic
  source 1..23: mol_type = other RNA
agctggtctttctggaggccctg

SEQ ID NO: 11512 - RNA, 24 nt, synthetic construct
  misc_feature 1..24: note = Synthetic
  source 1..24: mol_type = other RNA
aagctggtctttctggaggccctg

SEQ ID NO: 11513 - RNA, 18 nt, synthetic construct
  misc_feature 1..18: note = Synthetic
  source 1..18: mol_type = other RNA
gtggccgacgtggagctg

SEQ ID NO: 11514 - RNA, 19 nt, synthetic construct
  misc_feature 1..19: note = Synthetic
  source 1..19: mol_type = other RNA
ggtggccgacgtggagctg

SEQ ID NO: 11515 - RNA, 21 nt, synthetic construct
  misc_feature 1..21: note = Synthetic
  source 1..21: mol_type = other RNA
ggggtggccgacgtggagctg

SEQ ID NO: 11516 - RNA, 22 nt, synthetic construct
  misc_feature 1..22: note = Synthetic
  source 1..22: mol_type = other RNA
gggggtggccgacgtggagctg

SEQ ID NO: 11517 - RNA, 23 nt, synthetic construct
  misc_feature 1..23: note = Synthetic
  source 1..23: mol_type = other RNA
tgggggtggccgacgtggagctg

SEQ ID NO: 11518 - RNA, 24 nt, synthetic construct
  misc_feature 1..24: note = Synthetic
  source 1..24: mol_type = other RNA
gtgggggtggccgacgtggagctg

SEQ ID NO: 11519 - RNA, 18 nt, synthetic construct
  misc_feature 1..18: note = Synthetic
  source 1..18: mol_type = other RNA
gtgtgccacccttcgctg

SEQ ID NO: 11520 - RNA, 19 nt, synthetic construct
  misc_feature 1..19: note = Synthetic
  source 1..19: mol_type = other RNA
cgtgtgccacccttcgctg

SEQ ID NO: 11521 - RNA, 21 nt, synthetic construct
  misc_feature 1..21: note = Synthetic
  source 1..21: mol_type = other RNA
accgtgtgccacccttcgctg

SEQ ID NO: 11522 - RNA, 22 nt, synthetic construct
  misc_feature 1..22: note = Synthetic
  source 1..22: mol_type = other RNA
gaccgtgtgccacccttcgctg

SEQ ID NO: 11523 - RNA, 23 nt, synthetic construct
  misc_feature 1..23: note = Synthetic
  source 1..23: mol_type = other RNA
ggaccgtgtgccacccttcgctg

SEQ ID NO: 11524 - RNA, 24 nt, synthetic construct
  misc_feature 1..24: note = Synthetic
  source 1..24: mol_type = other RNA
gggaccgtgtgccacccttcgctg

SEQ ID NO: 11525 - RNA, 18 nt, synthetic construct
  misc_feature 1..18: note = Synthetic
  source 1..18: mol_type = other RNA
cagatgctgcacgtgctg

SEQ ID NO: 11526 - RNA, 19 nt, synthetic construct
  misc_feature 1..19: note = Synthetic
  source 1..19: mol_type = other RNA
ccagatgctgcacgtgctg

SEQ ID NO: 11527 - RNA, 21 nt, synthetic construct
  misc_feature 1..21: note = Synthetic
  source 1..21: mol_type = other RNA
gaccagatgctgcacgtgctg

SEQ ID NO: 11528 - RNA, 22 nt, synthetic construct
  misc_feature 1..22: note = Synthetic
  source 1..22: mol_type = other RNA
cgaccagatgctgcacgtgctg

SEQ ID NO: 11529 - RNA, 23 nt, synthetic construct
  misc_feature 1..23: note = Synthetic
  source 1..23: mol_type = other RNA
ccgaccagatgctgcacgtgctg

SEQ ID NO: 11530 - RNA, 24 nt, synthetic construct
  misc_feature 1..24: note = Synthetic
  source 1..24: mol_type = other RNA
gccgaccagatgctgcacgtgctg

SEQ ID NO: 11531 - RNA, 18 nt, synthetic construct
  misc_feature 1..18: note = Synthetic
  source 1..18: mol_type = other RNA
cagtccttcctgaaagtg

SEQ ID NO: 11532 - RNA, 19 nt, synthetic construct
  misc_feature 1..19: note = Synthetic
  source 1..19: mol_type = other RNA
gcagtccttcctgaaagtg

SEQ ID NO: 11533 - RNA, 21 nt, synthetic construct
  misc_feature 1..21: note = Synthetic
  source 1..21: mol_type = other RNA
ctgcagtccttcctgaaagtg

SEQ ID NO: 11534 - RNA, 22 nt, synthetic construct
  misc_feature 1..22: note = Synthetic
  source 1..22: mol_type = other RNA
cctgcagtccttcctgaaagtg

SEQ ID NO: 11535 - RNA, 23 nt, synthetic construct
  misc_feature 1..23: note = Synthetic
  source 1..23: mol_type = other RNA
tcctgcagtccttcctgaaagtg

SEQ ID NO: 11536 - RNA, 24 nt, synthetic construct
  misc_feature 1..24: note = Synthetic
  source 1..24: mol_type = other RNA
ctcctgcagtccttcctgaaagtg

SEQ ID NO: 11537 - RNA, 18 nt, synthetic construct
  misc_feature 1..18: note = Synthetic
  source 1..18: mol_type = other RNA
gccggggccgaccacgtg

SEQ ID NO: 11538 - RNA, 19 nt, synthetic construct
  misc_feature 1..19: note = Synthetic
  source 1..19: mol_type = other RNA
cgccggggccgaccacgtg

SEQ ID NO: 11539 - RNA, 21 nt, synthetic construct
  misc_feature 1..21: note = Synthetic
  source 1..21: mol_type = other RNA
ttcgccggggccgaccacgtg

SEQ ID NO: 11540 - RNA, 22 nt, synthetic construct
  misc_feature 1..22: note = Synthetic
  source 1..22: mol_type = other RNA
gttcgccggggccgaccacgtg

SEQ ID NO: 11541 - RNA, 23 nt, synthetic construct
  misc_feature 1..23: note = Synthetic
  source 1..23: mol_type = other RNA
tgttcgccggggccgaccacgtg

SEQ ID NO: 11542 - RNA, 24 nt, synthetic construct
  misc_feature 1..24: note = Synthetic
  source 1..24: mol_type = other RNA
ctgttcgccggggccgaccacgtg

SEQ ID NO: 11543 - RNA, 18 nt, synthetic construct
  misc_feature 1..18: note = Synthetic
  source 1..18: mol_type = other RNA
tgccccagcgaccccgtg

SEQ ID NO: 11544 - RNA, 19 nt, synthetic construct
  misc_feature 1..19: note = Synthetic
  source 1..19: mol_type = other RNA
gtgccccagcgaccccgtg

SEQ ID NO: 11545 - RNA, 21 nt, synthetic construct
  misc_feature 1..21: note = Synthetic
  source 1..21: mol_type = other RNA
gagtgccccagcgaccccgtg

SEQ ID NO: 11546 - RNA, 22 nt, synthetic construct
  misc_feature 1..22: note = Synthetic
  source 1..22: mol_type = other RNA
ggagtgccccagcgaccccgtg

SEQ ID NO: 11547 - RNA, 23 nt, synthetic construct
  misc_feature 1..23: note = Synthetic
  source 1..23: mol_type = other RNA
aggagtgccccagcgaccccgtg

SEQ ID NO: 11548 - RNA, 24 nt, synthetic construct
  misc_feature 1..24: note = Synthetic
  source 1..24: mol_type = other RNA
gaggagtgccccagcgaccccgtg

SEQ ID NO: 11549 - RNA, 18 nt, synthetic construct
  misc_feature 1..18: note = Synthetic
  source 1..18: mol_type = other RNA
caggccacctggcgcgtg

SEQ ID NO: 11550 - RNA, 19 nt, synthetic construct
  misc_feature 1..19: note = Synthetic
  source 1..19: mol_type = other RNA
ccaggccacctggcgcgtg

SEQ ID NO: 11551 - RNA, 21 nt, synthetic construct
  misc_feature 1..21: note = Synthetic
  source 1..21: mol_type = other RNA
atccaggccacctggcgcgtg

SEQ ID NO: 11552 - RNA, 22 nt, synthetic construct
  misc_feature 1..22: note = Synthetic
  source 1..22: mol_type = other RNA
gatccaggccacctggcgcgtg

SEQ ID NO: 11553 - RNA, 23 nt, synthetic construct
  misc_feature 1..23: note = Synthetic
  source 1..23: mol_type = other RNA
agatccaggccacctggcgcgtg

SEQ ID NO: 11554 - RNA, 24 nt, synthetic construct
  misc_feature 1..24: note = Synthetic
  source 1..24: mol_type = other RNA
gagatccaggccacctggcgcgtg

SEQ ID NO: 11555 - RNA, 18 nt, synthetic construct
  misc_feature 1..18: note = Synthetic
  source 1..18: mol_type = other RNA
gggtgccgcgaactcgtg

SEQ ID NO: 11556 - RNA, 19 nt, synthetic construct
  misc_feature 1..19: note = Synthetic
  source 1..19: mol_type = other RNA
ggggtgccgcgaactcgtg

SEQ ID NO: 11557 - RNA, 21 nt, synthetic construct
  misc_feature 1..21: note = Synthetic
  source 1..21: mol_type = other RNA
ccggggtgccgcgaactcgtg

SEQ ID NO: 11558 - RNA, 22 nt, synthetic construct
  misc_feature 1..22: note = Synthetic
  source 1..22: mol_type = other RNA
cccggggtgccgcgaactcgtg

SEQ ID NO: 11559 - RNA, 23 nt, synthetic construct
  misc_feature 1..23: note = Synthetic
  source 1..23: mol_type = other RNA
ccccggggtgccgcgaactcgtg

SEQ ID NO: 11560 - RNA, 24 nt, synthetic construct
  misc_feature 1..24: note = Synthetic
  source 1..24: mol_type = other RNA
cccccggggtgccgcgaactcgtg

SEQ ID NO: 11561 - RNA, 18 nt, synthetic construct
  misc_feature 1..18: note = Synthetic
  source 1..18: mol_type = other RNA
ctgctgccacccctcgtg

SEQ ID NO: 11562 - RNA, 19 nt, synthetic construct
  misc_feature 1..19: note = Synthetic
  source 1..19: mol_type = other RNA
gctgctgccacccctcgtg

SEQ ID NO: 11563 - RNA, 21 nt, synthetic construct
  misc_feature 1..21: note = Synthetic
  source 1..21: mol_type = other RNA
gcgctgctgccacccctcgtg

SEQ ID NO: 11564 - RNA, 22 nt, synthetic construct
  misc_feature 1..22: note = Synthetic
  source 1..22: mol_type = other RNA
ggcgctgctgccacccctcgtg

SEQ ID NO: 11565 - RNA, 23 nt, synthetic construct
  misc_feature 1..23: note = Synthetic
  source 1..23: mol_type = other RNA
cggcgctgctgccacccctcgtg

SEQ ID NO: 11566 - RNA, 24 nt, synthetic construct
  misc_feature 1..24: note = Synthetic
  source 1..24: mol_type = other RNA
ccggcgctgctgccacccctcgtg

SEQ ID NO: 11567 - RNA, 18 nt, synthetic construct
  misc_feature 1..18: note = Synthetic
  source 1..18: mol_type = other RNA
ctggtcacggcgctcgtg

SEQ ID NO: 11568 - RNA, 19 nt, synthetic construct
  misc_feature 1..19: note = Synthetic
  source 1..19: mol_type = other RNA
cctggtcacggcgctcgtg

SEQ ID NO: 11569 - RNA, 21 nt, synthetic construct
  misc_feature 1..21: note = Synthetic
  source 1..21: mol_type = other RNA
aacctggtcacggcgctcgtg

SEQ ID NO: 11570 - RNA, 22 nt, synthetic construct
  misc_feature 1..22: note = Synthetic
  source 1..22: mol_type = other RNA
caacctggtcacggcgctcgtg

SEQ ID NO: 11571 - RNA, 23 nt, synthetic construct
  misc_feature 1..23: note = Synthetic
  source 1..23: mol_type = other RNA
ccaacctggtcacggcgctcgtg

SEQ ID NO: 11572 - RNA, 24 nt, synthetic construct
  misc_feature 1..24: note = Synthetic
  source 1..24: mol_type = other RNA
gccaacctggtcacggcgctcgtg

SEQ ID NO: 11573 - RNA, 18 nt, synthetic construct
  misc_feature 1..18: note = Synthetic
  source 1..18: mol_type = other RNA
ctgcggaacgcggtcgtg

SEQ ID NO: 11574 - RNA, 19 nt, synthetic construct
  misc_feature 1..19: note = Synthetic
  source 1..19: mol_type = other RNA
cctgcggaacgcggtcgtg

SEQ ID NO: 11575 - RNA, 21 nt, synthetic construct
  misc_feature 1..21: note = Synthetic
  source 1..21: mol_type = other RNA
tacctgcggaacgcggtcgtg

SEQ ID NO: 11576 - RNA, 22 nt, synthetic construct
  misc_feature 1..22: note = Synthetic
  source 1..22: mol_type = other RNA
gtacctgcggaacgcggtcgtg

SEQ ID NO: 11577 - RNA, 23 nt, synthetic construct
  misc_feature 1..23: note = Synthetic
  source 1..23: mol_type = other RNA
tgtacctgcggaacgcggtcgtg

SEQ ID NO: 11578 - RNA, 24 nt, synthetic construct
  misc_feature 1..24: note = Synthetic
  source 1..24: mol_type = other RNA
gtgtacctgcggaacgcggtcgtg

SEQ ID NO: 11579 - RNA, 18 nt, synthetic construct
  misc_feature 1..18: note = Synthetic
  source 1..18: mol_type = other RNA
ccgcgttcgacttctttg

SEQ ID NO: 11580 - RNA, 19 nt, synthetic construct
  misc_feature 1..19: note = Synthetic
  source 1..19: mol_type = other RNA
cccgcgttcgacttctttg

SEQ ID NO: 11581 - RNA, 21 nt, synthetic construct
  misc_feature 1..21: note = Synthetic
  source 1..21: mol_type = other RNA
accccgcgttcgacttctttg

SEQ ID NO: 11582 - RNA, 22 nt, synthetic construct
  misc_feature 1..22: note = Synthetic
  source 1..22: mol_type = other RNA
caccccgcgttcgacttctttg

SEQ ID NO: 11583 - RNA, 23 nt, synthetic construct
  misc_feature 1..23: note = Synthetic
  source 1..23: mol_type = other RNA
gcaccccgcgttcgacttctttg

SEQ ID NO: 11584 - RNA, 24 nt, synthetic construct
  misc_feature 1..24: note = Synthetic
  source 1..24: mol_type = other RNA
tgcaccccgcgttcgacttctttg

SEQ ID NO: 11585 - RNA, 18 nt, synthetic construct
  misc_feature 1..18: note = Synthetic
  source 1..18: mol_type = other RNA
ccgccagctgtttttttg

SEQ ID NO: 11586 - RNA, 19 nt, synthetic construct
  misc_feature 1..19: note = Synthetic
  source 1..19: mol_type = other RNA
cccgccagctgtttttttg

SEQ ID NO: 11587 - RNA, 21 nt, synthetic construct
  misc_feature 1..21: note = Synthetic
  source 1..21: mol_type = other RNA
gccccgccagctgtttttttg

SEQ ID NO: 11588 - RNA, 22 nt, synthetic construct
  misc_feature 1..22: note = Synthetic
  source 1..22: mol_type = other RNA
cgccccgccagctgtttttttg

SEQ ID NO: 11589 - RNA, 23 nt, synthetic construct
  misc_feature 1..23: note = Synthetic
  source 1..23: mol_type = other RNA
ccgccccgccagctgtttttttg

SEQ ID NO: 11590 - RNA, 24 nt, synthetic construct
  misc_feature 1..24: note = Synthetic
  source 1..24: mol_type = other RNA
cccgccccgccagctgtttttttg

SEQ ID NO: 11591 - RNA, 18 nt, synthetic construct
  misc_feature 1..18: note = Synthetic
  source 1..18: mol_type = other RNA
cgagctgaatcacctaat

SEQ ID NO: 11592 - RNA, 19 nt, synthetic construct
  misc_feature 1..19: note = Synthetic
  source 1..19: mol_type = other RNA
ccgagctgaatcacctaat

SEQ ID NO: 11593 - RNA, 21 nt, synthetic construct
  misc_feature 1..21: note = Synthetic
  source 1..21: mol_type = other RNA
agccgagctgaatcacctaat

SEQ ID NO: 11594 - RNA, 22 nt, synthetic construct
  misc_feature 1..22: note = Synthetic
  source 1..22: mol_type = other RNA
aagccgagctgaatcacctaat

SEQ ID NO: 11595 - RNA, 23 nt, synthetic construct
  misc_feature 1..23: note = Synthetic
  source 1..23: mol_type = other RNA
caagccgagctgaatcacctaat

SEQ ID NO: 11596 - RNA, 24 nt, synthetic construct
  misc_feature 1..24: note = Synthetic
  source 1..24: mol_type = other RNA
gcaagccgagctgaatcacctaat

SEQ ID NO: 11597 - RNA, 18 nt, synthetic construct
  misc_feature 1..18: note = Synthetic
  source 1..18: mol_type = other RNA
ctgatggccccccagcat

SEQ ID NO: 11598 - RNA, 19 nt, synthetic construct
  misc_feature 1..19: note = Synthetic
  source 1..19: mol_type = other RNA
gctgatggccccccagcat

SEQ ID NO: 11599 - RNA, 21 nt, synthetic construct
  misc_feature 1..21: note = Synthetic
  source 1..21: mol_type = other RNA
ctgctgatggccccccagcat

SEQ ID NO: 11600 - RNA, 22 nt, synthetic construct
  misc_feature 1..22: note = Synthetic
  source 1..22: mol_type = other RNA
cctgctgatggccccccagcat

SEQ ID NO: 11601 - RNA, 23 nt, synthetic construct
  misc_feature 1..23: note = Synthetic
  source 1..23: mol_type = other RNA
tcctgctgatggccccccagcat

SEQ ID NO: 11602 - RNA, 24 nt, synthetic construct
  misc_feature 1..24: note = Synthetic
  source 1..24: mol_type = other RNA
atcctgctgatggccccccagcat

SEQ ID NO: 11603 - RNA, 18 nt, synthetic construct
  misc_feature 1..18: note = Synthetic
  source 1..18: mol_type = other RNA
gtctctggaacacgcgat

SEQ ID NO: 11604 - RNA, 19 nt, synthetic construct
  misc_feature 1..19: note = Synthetic
  source 1..19: mol_type = other RNA
tgtctctggaacacgcgat

SEQ ID NO: 11605 - RNA, 21 nt, synthetic construct
  misc_feature 1..21: note = Synthetic
  source 1..21: mol_type = other RNA
cctgtctctggaacacgcgat

SEQ ID NO: 11606 - RNA, 22 nt, synthetic construct
  misc_feature 1..22: note = Synthetic
  source 1..22: mol_type = other RNA
gcctgtctctggaacacgcgat

SEQ ID NO: 11607 - RNA, 23 nt, synthetic construct
  misc_feature 1..23: note = Synthetic
  source 1..23: mol_type = other RNA
cgcctgtctctggaacacgcgat

SEQ ID NO: 11608 - RNA, 24 nt, synthetic construct
  misc_feature 1..24: note = Synthetic
  source 1..24: mol_type = other RNA
gcgcctgtctctggaacacgcgat

SEQ ID NO: 11609 - RNA, 18 nt, synthetic construct
  misc_feature 1..18: note = Synthetic
  source 1..18: mol_type = other RNA
caggaccgctttgtgact

SEQ ID NO: 11610 - RNA, 19 nt, synthetic construct
  misc_feature 1..19: note = Synthetic
  source 1..19: mol_type = other RNA
acaggaccgctttgtgact

SEQ ID NO: 11611 - RNA, 21 nt, synthetic construct
  misc_feature 1..21: note = Synthetic
  source 1..21: mol_type = other RNA
cgacaggaccgctttgtgact

SEQ ID NO: 11612 - RNA, 22 nt, synthetic construct
  misc_feature 1..22: note = Synthetic
  source 1..22: mol_type = other RNA
ccgacaggaccgctttgtgact

SEQ ID NO: 11613 - RNA, 23 nt, synthetic construct
  misc_feature 1..23: note = Synthetic
  source 1..23: mol_type = other RNA
tccgacaggaccgctttgtgact

SEQ ID NO: 11614 - RNA, 24 nt, synthetic construct
  misc_feature 1..24: note = Synthetic
  source 1..24: mol_type = other RNA
gtccgacaggaccgctttgtgact

SEQ ID NO: 11615 - RNA, 18 nt, synthetic construct
  misc_feature 1..18: note = Synthetic
  source 1..18: mol_type = other RNA
gtacgtcgtgacctacct

SEQ ID NO: 11616 - RNA, 19 nt, synthetic construct
  misc_feature 1..19: note = Synthetic
  source 1..19: mol_type = other RNA
cgtacgtcgtgacctacct

SEQ ID NO: 11617 - RNA, 21 nt, synthetic construct
  misc_feature 1..21: note = Synthetic
  source 1..21: mol_type = other RNA
ctcgtacgtcgtgacctacct

SEQ ID NO: 11618 - RNA, 22 nt, synthetic construct
  misc_feature 1..22: note = Synthetic
  source 1..22: mol_type = other RNA
tctcgtacgtcgtgacctacct

SEQ ID NO: 11619 - RNA, 23 nt, synthetic construct
  misc_feature 1..23: note = Synthetic
  source 1..23: mol_type = other RNA
gtctcgtacgtcgtgacctacct

SEQ ID NO: 11620 - RNA, 24 nt, synthetic construct
  misc_feature 1..24: note = Synthetic
  source 1..24: mol_type = other RNA
ggtctcgtacgtcgtgacctacct

SEQ ID NO: 11621 - RNA, 18 nt, synthetic construct
  misc_feature 1..18: note = Synthetic
  source 1..18: mol_type = other RNA
cgcggcagccgtgtacct

SEQ ID NO: 11622 - RNA, 19 nt, synthetic construct
  misc_feature 1..19: note = Synthetic
  source 1..19: mol_type = other RNA
acgcggcagccgtgtacct

SEQ ID NO: 11623 - RNA, 21 nt, synthetic construct
  misc_feature 1..21: note = Synthetic
  source 1..21: mol_type = other RNA
caacgcggcagccgtgtacct

SEQ ID NO: 11624 - RNA, 22 nt, synthetic construct
  misc_feature 1..22: note = Synthetic
  source 1..22: mol_type = other RNA
acaacgcggcagccgtgtacct

SEQ ID NO: 11625 - RNA, 23 nt, synthetic construct
  misc_feature 1..23: note = Synthetic
  source 1..23: mol_type = other RNA
gacaacgcggcagccgtgtacct

SEQ ID NO: 11626 - RNA, 24 nt, synthetic construct
  misc_feature 1..24: note = Synthetic
  source 1..24: mol_type = other RNA
ggacaacgcggcagccgtgtacct

SEQ ID NO: 11627 - RNA, 18 nt, synthetic construct
  misc_feature 1..18: note = Synthetic
  source 1..18: mol_type = other RNA
agctgtttttgaacgcct

SEQ ID NO: 11628 - RNA, 19 nt, synthetic construct
  misc_feature 1..19: note = Synthetic
  source 1..19: mol_type = other RNA
cagctgtttttgaacgcct

SEQ ID NO: 11629 - RNA, 21 nt, synthetic construct
  misc_feature 1..21: note = Synthetic
  source 1..21: mol_type = other RNA
agcagctgtttttgaacgcct

SEQ ID NO: 11630 - RNA, 22 nt, synthetic construct
  misc_feature 1..22: note = Synthetic
  source 1..22: mol_type = other RNA
cagcagctgtttttgaacgcct

SEQ ID NO: 11631 - RNA, 23 nt, synthetic construct
  misc_feature 1..23: note = Synthetic
  source 1..23: mol_type = other RNA
gcagcagctgtttttgaacgcct

SEQ ID NO: 11632 - RNA, 24 nt, synthetic construct
  misc_feature 1..24: note = Synthetic
  source 1..24: mol_type = other RNA
tgcagcagctgtttttgaacgcct

SEQ ID NO: 11633 - RNA, 18 nt, synthetic construct
  misc_feature 1..18: note = Synthetic
  source 1..18: mol_type = other RNA
cccctggtccccccggct

SEQ ID NO: 11634 - RNA, 19 nt, synthetic construct
  misc_feature 1..19: note = Synthetic
  source 1..19: mol_type = other RNA
ccccctggtccccccggct

SEQ ID NO: 11635 - RNA, 21 nt, synthetic construct
  misc_feature 1..21: note = Synthetic
  source 1..21: mol_type = other RNA
gtccccctggtccccccggct

SEQ ID NO: 11636 - RNA, 22 nt, synthetic construct
  misc_feature 1..22: note = Synthetic
  source 1..22: mol_type = other RNA
ggtccccctggtccccccggct

SEQ ID NO: 11637 - RNA, 23 nt, synthetic construct
  misc_feature 1..23: note = Synthetic
  source 1..23: mol_type = other RNA
aggtccccctggtccccccggct

SEQ ID NO: 11638 - RNA, 24 nt, synthetic construct
  misc_feature 1..24: note = Synthetic
  source 1..24: mol_type = other RNA
caggtccccctggtccccccggct

SEQ ID NO: 11639 - RNA, 18 nt, synthetic construct
  misc_feature 1..18: note = Synthetic
  source 1..18: mol_type = other RNA
cctggtccccccggctct

SEQ ID NO: 11640 - RNA, 19 nt, synthetic construct
  misc_feature 1..19: note = Synthetic
  source 1..19: mol_type = other RNA
ccctggtccccccggctct

SEQ ID NO: 11641 - RNA, 21 nt, synthetic construct
  misc_feature 1..21: note = Synthetic
  source 1..21: mol_type = other RNA
ccccctggtccccccggctct

SEQ ID NO: 11642 - RNA, 22 nt, synthetic construct
  misc_feature 1..22: note = Synthetic
  source 1..22: mol_type = other RNA
tccccctggtccccccggctct

SEQ ID NO: 11643 - RNA, 23 nt, synthetic construct
  misc_feature 1..23: note = Synthetic
  source 1..23: mol_type = other RNA
gtccccctggtccccccggctct

SEQ ID NO: 11644 - RNA, 24 nt, synthetic construct
  misc_feature 1..24: note = Synthetic
  source 1..24: mol_type = other RNA
ggtccccctggtccccccggctct

SEQ ID NO: 11645 - RNA, 18 nt, synthetic construct
  misc_feature 1..18: note = Synthetic
  source 1..18: mol_type = other RNA
caggtgctgcgcctgtct

SEQ ID NO: 11646 - RNA, 19 nt, synthetic construct
  misc_feature 1..19: note = Synthetic
  source 1..19: mol_type = other RNA
ccaggtgctgcgcctgtct

SEQ ID NO: 11647 - RNA, 21 nt, synthetic construct
  misc_feature 1..21: note = Synthetic
  source 1..21: mol_type = other RNA
cgccaggtgctgcgcctgtct

SEQ ID NO: 11648 - RNA, 22 nt, synthetic construct
  misc_feature 1..22: note = Synthetic
  source 1..22: mol_type = other RNA
ccgccaggtgctgcgcctgtct

SEQ ID NO: 11649 - RNA, 23 nt, synthetic construct
  misc_feature 1..23: note = Synthetic
  source 1..23: mol_type = other RNA
accgccaggtgctgcgcctgtct

SEQ ID NO: 11650 - RNA, 24 nt, synthetic construct
  misc_feature 1..24: note = Synthetic
  source 1..24: mol_type = other RNA
gaccgccaggtgctgcgcctgtct

SEQ ID NO: 11651 - RNA, 18 nt, synthetic construct
  misc_feature 1..18: note = Synthetic
  source 1..18: mol_type = other RNA
agctaaagcgaagcttct

SEQ ID NO: 11652 - RNA, 19 nt, synthetic construct
  misc_feature 1..19: note = Synthetic
  source 1..19: mol_type = other RNA
gagctaaagcgaagcttct

SEQ ID NO: 11653 - RNA, 21 nt, synthetic construct
  misc_feature 1..21: note = Synthetic
  source 1..21: mol_type = other RNA
ccgagctaaagcgaagcttct

SEQ ID NO: 11654 - RNA, 22 nt, synthetic construct
  misc_feature 1..22: note = Synthetic
  source 1..22: mol_type = other RNA
gccgagctaaagcgaagcttct

SEQ ID NO: 11655 - RNA, 23 nt, synthetic construct
  misc_feature 1..23: note = Synthetic
  source 1..23: mol_type = other RNA
cgccgagctaaagcgaagcttct

SEQ ID NO: 11656 - RNA, 24 nt, synthetic construct
  misc_feature 1..24: note = Synthetic
  source 1..24: mol_type = other RNA
tcgccgagctaaagcgaagcttct

SEQ ID NO: 11657 - RNA, 18 nt, synthetic construct
  misc_feature 1..18: note = Synthetic
  source 1..18: mol_type = other RNA
ctgagaacgtgctgttct

SEQ ID NO: 11658 - RNA, 19 nt, synthetic construct
  misc_feature 1..19: note = Synthetic
  source 1..19: mol_type = other RNA
actgagaacgtgctgttct

SEQ ID NO: 11659 - RNA, 21 nt, synthetic construct
  misc_feature 1..21: note = Synthetic
  source 1..21: mol_type = other RNA
tgactgagaacgtgctgttct

SEQ ID NO: 11660 - RNA, 22 nt, synthetic construct
  misc_feature 1..22: note = Synthetic
  source 1..22: mol_type = other RNA
gtgactgagaacgtgctgttct

SEQ ID NO: 11661 - RNA, 23 nt, synthetic construct
  misc_feature 1..23: note = Synthetic
  source 1..23: mol_type = other RNA
tgtgactgagaacgtgctgttct

SEQ ID NO: 11662 - RNA, 24 nt, synthetic construct
  misc_feature 1..24: note = Synthetic
  source 1..24: mol_type = other RNA
ttgtgactgagaacgtgctgttct

SEQ ID NO: 11663 - RNA, 18 nt, synthetic construct
  misc_feature 1..18: note = Synthetic
  source 1..18: mol_type = other RNA
ggcaaggccgtgcgaagt

SEQ ID NO: 11664 - RNA, 19 nt, synthetic construct
  misc_feature 1..19: note = Synthetic
  source 1..19: mol_type = other RNA
gggcaaggccgtgcgaagt

SEQ ID NO: 11665 - RNA, 21 nt, synthetic construct
  misc_feature 1..21: note = Synthetic
  source 1..21: mol_type = other RNA
atgggcaaggccgtgcgaagt

SEQ ID NO: 11666 - RNA, 22 nt, synthetic construct
  misc_feature 1..22: note = Synthetic
  source 1..22: mol_type = other RNA
gatgggcaaggccgtgcgaagt

SEQ ID NO: 11667 - RNA, 23 nt, synthetic construct
  misc_feature 1..23: note = Synthetic
  source 1..23: mol_type = other RNA
tgatgggcaaggccgtgcgaagt

SEQ ID NO: 11668 - RNA, 24 nt, synthetic construct
  misc_feature 1..24: note = Synthetic
  source 1..24: mol_type = other RNA
gtgatgggcaaggccgtgcgaagt

SEQ ID NO: 11669 - RNA, 18 nt, synthetic construct
  misc_feature 1..18: note = Synthetic
  source 1..18: mol_type = other RNA
cgtgatgggcaaggccgt

SEQ ID NO: 11670 - RNA, 19 nt, synthetic construct
  misc_feature 1..19: note = Synthetic
  source 1..19: mol_type = other RNA
tcgtgatgggcaaggccgt

SEQ ID NO: 11671 - RNA, 21 nt, synthetic construct
  misc_feature 1..21: note = Synthetic
  source 1..21: mol_type = other RNA
gctcgtgatgggcaaggccgt

SEQ ID NO: 11672 - RNA, 22 nt, synthetic construct
  misc_feature 1..22: note = Synthetic
  source 1..22: mol_type = other RNA
cgctcgtgatgggcaaggccgt

SEQ ID NO: 11673 - RNA, 23 nt, synthetic construct
  misc_feature 1..23: note = Synthetic
  source 1..23: mol_type = other RNA
gcgctcgtgatgggcaaggccgt

SEQ ID NO: 11674 - RNA, 24 nt, synthetic construct
  misc_feature 1..24: note = Synthetic
  source 1..24: mol_type = other RNA
ggcgctcgtgatgggcaaggccgt

SEQ ID NO: 11675 - RNA, 18 nt, synthetic construct
  misc_feature 1..18: note = Synthetic
  source 1..18: mol_type = other RNA
tcgaagccgccaatccgt

SEQ ID NO: 11676 - RNA, 19 nt, synthetic construct
  misc_feature 1..19: note = Synthetic
  source 1..19: mol_type = other RNA
gtcgaagccgccaatccgt

SEQ ID NO: 11677 - RNA, 21 nt, synthetic construct
  misc_feature 1..21: note = Synthetic
  source 1..21: mol_type = other RNA
ccgtcgaagccgccaatccgt

SEQ ID NO: 11678 - RNA, 22 nt, synthetic construct
  misc_feature 1..22: note = Synthetic
  source 1..22: mol_type = other RNA
cccgtcgaagccgccaatccgt

SEQ ID NO: 11679 - RNA, 23 nt, synthetic construct
  misc_feature 1..23: note = Synthetic
  source 1..23: mol_type = other RNA
ccccgtcgaagccgccaatccgt

SEQ ID NO: 11680 - RNA, 24 nt, synthetic construct
  misc_feature 1..24: note = Synthetic
  source 1..24: mol_type = other RNA
accccgtcgaagccgccaatccgt

SEQ ID NO: 11681 - RNA, 18 nt, synthetic construct
  misc_feature 1..18: note = Synthetic
  source 1..18: mol_type = other RNA
tgttctcggagcgcgcgt

SEQ ID NO: 11682 - RNA, 19 nt, synthetic construct
  misc_feature 1..19: note = Synthetic
  source 1..19: mol_type = other RNA
ctgttctcggagcgcgcgt

SEQ ID NO: 11683 - RNA, 21 nt, synthetic construct
  misc_feature 1..21: note = Synthetic
  source 1..21: mol_type = other RNA
tgctgttctcggagcgcgcgt

SEQ ID NO: 11684 - RNA, 22 nt, synthetic construct
  misc_feature 1..22: note = Synthetic
  source 1..22: mol_type = other RNA
gtgctgttctcggagcgcgcgt

SEQ ID NO: 11685 - RNA, 23 nt, synthetic construct
  misc_feature 1..23: note = Synthetic
  source 1..23: mol_type = other RNA
cgtgctgttctcggagcgcgcgt

SEQ ID NO: 11686 - RNA, 24 nt, synthetic construct
  misc_feature 1..24: note = Synthetic
  source 1..24: mol_type = other RNA
acgtgctgttctcggagcgcgcgt

SEQ ID NO: 11687 - RNA, 18 nt, synthetic construct
  misc_feature 1..18: note = Synthetic
  source 1..18: mol_type = other RNA
aggccgtcctcggggcgt

SEQ ID NO: 11688 - RNA, 19 nt, synthetic construct
  misc_feature 1..19: note = Synthetic
  source 1..19: mol_type = other RNA
caggccgtcctcggggcgt

SEQ ID NO: 11689 - RNA, 21 nt, synthetic construct
  misc_feature 1..21: note = Synthetic
  source 1..21: mol_type = other RNA
tccaggccgtcctcggggcgt

SEQ ID NO: 11690 - RNA, 22 nt, synthetic construct
  misc_feature 1..22: note = Synthetic
  source 1..22: mol_type = other RNA
gtccaggccgtcctcggggcgt

SEQ ID NO: 11691 - RNA, 23 nt, synthetic construct
  misc_feature 1..23: note = Synthetic
  source 1..23: mol_type = other RNA
cgtccaggccgtcctcggggcgt

SEQ ID NO: 11692 - RNA, 24 nt, synthetic construct
  misc_feature 1..24: note = Synthetic
  source 1..24: mol_type = other RNA
acgtccaggccgtcctcggggcgt

SEQ ID NO: 11693 - RNA, 18 nt, synthetic construct
  misc_feature 1..18: note = Synthetic
  source 1..18: mol_type = other RNA
gctgctgccacccctcgt

SEQ ID NO: 11694 - RNA, 19 nt, synthetic construct
  misc_feature 1..19: note = Synthetic
  source 1..19: mol_type = other RNA
cgctgctgccacccctcgt

SEQ ID NO: 11695 - RNA, 21 nt, synthetic construct
  misc_feature 1..21: note = Synthetic
  source 1..21: mol_type = other RNA
ggcgctgctgccacccctcgt

SEQ ID NO: 11696 - RNA, 22 nt, synthetic construct
  misc_feature 1..22: note = Synthetic
  source 1..22: mol_type = other RNA
cggcgctgctgccacccctcgt

SEQ ID NO: 11697 - RNA, 23 nt, synthetic construct
  misc_feature 1..23: note = Synthetic
  source 1..23: mol_type = other RNA
ccggcgctgctgccacccctcgt

SEQ ID NO: 11698 - RNA, 24 nt, synthetic construct
  misc_feature 1..24: note = Synthetic
  source 1..24: mol_type = other RNA
cccggcgctgctgccacccctcgt

SEQ ID NO: 11699 - RNA, 18 nt, synthetic construct
  misc_feature 1..18: note = Synthetic
  source 1..18: mol_type = other RNA
cgtcgcagcgattttcgt

SEQ ID NO: 11700 - RNA, 19 nt, synthetic construct
  misc_feature 1..19: note = Synthetic
  source 1..19: mol_type = other RNA
gcgtcgcagcgattttcgt

SEQ ID NO: 11701 - RNA, 21 nt, synthetic construct
  misc_feature 1..21: note = Synthetic
  source 1..21: mol_type = other RNA
gggcgtcgcagcgattttcgt

SEQ ID NO: 11702 - RNA, 22 nt, synthetic construct
  misc_feature 1..22: note = Synthetic
  source 1..22: mol_type = other RNA
tgggcgtcgcagcgattttcgt

SEQ ID NO: 11703 - RNA, 23 nt, synthetic construct
  misc_feature 1..23: note = Synthetic
  source 1..23: mol_type = other RNA
gtgggcgtcgcagcgattttcgt

SEQ ID NO: 11704 - RNA, 24 nt, synthetic construct
  misc_feature 1..24: note = Synthetic
  source 1..24: mol_type = other RNA
cgtgggcgtcgcagcgattttcgt

SEQ ID NO: 11705 - RNA, 18 nt, synthetic construct
  misc_feature 1..18: note = Synthetic
  source 1..18: mol_type = other RNA
gaacgttgacgcggcggt

SEQ ID NO: 11706 - RNA, 19 nt, synthetic construct
  misc_feature 1..19: note = Synthetic
  source 1..19: mol_type = other RNA
tgaacgttgacgcggcggt

SEQ ID NO: 11707 - RNA, 21 nt, synthetic construct
  misc_feature 1..21: note = Synthetic
  source 1..21: mol_type = other RNA
gatgaacgttgacgcggcggt

SEQ ID NO: 11708 - RNA, 22 nt, synthetic construct
  misc_feature 1..22: note = Synthetic
  source 1..22: mol_type = other RNA
tgatgaacgttgacgcggcggt

SEQ ID NO: 11709 - RNA, 23 nt, synthetic construct
  misc_feature 1..23: note = Synthetic
  source 1..23: mol_type = other RNA
ctgatgaacgttgacgcggcggt

SEQ ID NO: 11710 - RNA, 24 nt, synthetic construct
  misc_feature 1..24: note = Synthetic
  source 1..24: mol_type = other RNA
gctgatgaacgttgacgcggcggt

SEQ ID NO: 11711 - RNA, 18 nt, synthetic construct
  misc_feature 1..18: note = Synthetic
  source 1..18: mol_type = other RNA
gctatgtccggcggcgtt

SEQ ID NO: 11712 - RNA, 19 nt, synthetic construct
  misc_feature 1..19: note = Synthetic
  source 1..19: mol_type = other RNA
cgctatgtccggcggcgtt

SEQ ID NO: 11713 - RNA, 21 nt, synthetic construct
  misc_feature 1..21: note = Synthetic
  source 1..21: mol_type = other RNA
ggcgctatgtccggcggcgtt

SEQ ID NO: 11714 - RNA, 22 nt, synthetic construct
  misc_feature 1..22: note = Synthetic
  source 1..22: mol_type = other RNA
tggcgctatgtccggcggcgtt

SEQ ID NO: 11715 - RNA, 23 nt, synthetic construct
  misc_feature 1..23: note = Synthetic
  source 1..23: mol_type = other RNA
ctggcgctatgtccggcggcgtt

SEQ ID NO: 11716 - RNA, 24 nt, synthetic construct
  misc_feature 1..24: note = Synthetic
  source 1..24: mol_type = other RNA
cctggcgctatgtccggcggcgtt

SEQ ID NO: 11717 - RNA, 18 nt, synthetic construct
  misc_feature 1..18: note = Synthetic
  source 1..18: mol_type = other RNA
ggcgagaagctggtcttt

SEQ ID NO: 11718 - RNA, 19 nt, synthetic construct
  misc_feature 1..19: note = Synthetic
  source 1..19: mol_type = other RNA
cggcgagaagctggtcttt

SEQ ID NO: 11719 - RNA, 21 nt, synthetic construct
  misc_feature 1..21: note = Synthetic
  source 1..21: mol_type = other RNA
atcggcgagaagctggtcttt

SEQ ID NO: 11720 - RNA, 22 nt, synthetic construct
  misc_feature 1..22: note = Synthetic
  source 1..22: mol_type = other RNA
catcggcgagaagctggtcttt

SEQ ID NO: 11721 - RNA, 23 nt, synthetic construct
  misc_feature 1..23: note = Synthetic
  source 1..23: mol_type = other RNA
ccatcggcgagaagctggtcttt

SEQ ID NO: 11722 - RNA, 24 nt, synthetic construct
  misc_feature 1..24: note = Synthetic
  source 1..24: mol_type = other RNA
tccatcggcgagaagctggtcttt

SEQ ID NO: 11723 - RNA, 18 nt, synthetic construct
  misc_feature 1..18: note = Synthetic
  source 1..18: mol_type = other RNA
cccgcgttcgacttcttt

SEQ ID NO: 11724 - RNA, 19 nt, synthetic construct
  misc_feature 1..19: note = Synthetic
  source 1..19: mol_type = other RNA
ccccgcgttcgacttcttt

SEQ ID NO: 11725 - RNA, 21 nt, synthetic construct
  misc_feature 1..21: note = Synthetic
  source 1..21: mol_type = other RNA
caccccgcgttcgacttcttt

SEQ ID NO: 11726 - RNA, 22 nt, synthetic construct
  misc_feature 1..22: note = Synthetic
  source 1..22: mol_type = other RNA
gcaccccgcgttcgacttcttt

SEQ ID NO: 11727 - RNA, 23 nt, synthetic construct
  misc_feature 1..23: note = Synthetic
  source 1..23: mol_type = other RNA
tgcaccccgcgttcgacttcttt

SEQ ID NO: 11728 - RNA, 24 nt, synthetic construct
  misc_feature 1..24: note = Synthetic
  source 1..24: mol_type = other RNA
ctgcaccccgcgttcgacttcttt

SEQ ID NO: 11729 - RNA, 18 nt, synthetic construct
  misc_feature 1..18: note = Synthetic
  source 1..18: mol_type = other RNA
gacccgtgtggcctgttt

SEQ ID NO: 11730 - RNA, 19 nt, synthetic construct
  misc_feature 1..19: note = Synthetic
  source 1..19: mol_type = other RNA
ggacccgtgtggcctgttt

SEQ ID NO: 11731 - RNA, 21 nt, synthetic construct
  misc_feature 1..21: note = Synthetic
  source 1..21: mol_type = other RNA
gaggacccgtgtggcctgttt

SEQ ID NO: 11732 - RNA, 22 nt, synthetic construct
  misc_feature 1..22: note = Synthetic
  source 1..22: mol_type = other RNA
ggaggacccgtgtggcctgttt

SEQ ID NO: 11733 - RNA, 23 nt, synthetic construct
  misc_feature 1..23: note = Synthetic
  source 1..23: mol_type = other RNA
tggaggacccgtgtggcctgttt

SEQ ID NO: 11734 - RNA, 24 nt, synthetic construct
  misc_feature 1..24: note = Synthetic
  source 1..24: mol_type = other RNA
gtggaggacccgtgtggcctgttt

SEQ ID NO: 11735 - RNA, 18 nt, synthetic construct
  misc_feature 1..18: note = Synthetic
  source 1..18: mol_type = other RNA
gacatgcagcagctgttt

SEQ ID NO: 11736 - RNA, 19 nt, synthetic construct
  misc_feature 1..19: note = Synthetic
  source 1..19: mol_type = other RNA
agacatgcagcagctgttt

SEQ ID NO: 11737 - RNA, 21 nt, synthetic construct
  misc_feature 1..21: note = Synthetic
  source 1..21: mol_type = other RNA
gcagacatgcagcagctgttt

SEQ ID NO: 11738 - RNA, 22 nt, synthetic construct
  misc_feature 1..22: note = Synthetic
  source 1..22: mol_type = other RNA
cgcagacatgcagcagctgttt

SEQ ID NO: 11739 - RNA, 23 nt, synthetic construct
  misc_feature 1..23: note = Synthetic
  source 1..23: mol_type = other RNA
ccgcagacatgcagcagctgttt

SEQ ID NO: 11740 - RNA, 24 nt, synthetic construct
  misc_feature 1..24: note = Synthetic
  source 1..24: mol_type = other RNA
gccgcagacatgcagcagctgttt

SEQ ID NO: 11741 - RNA, 18 nt, synthetic construct
  misc_feature 1..18: note = Synthetic
  source 1..18: mol_type = other RNA
gccccgccagctgttttt

SEQ ID NO: 11742 - RNA, 19 nt, synthetic construct
  misc_feature 1..19: note = Synthetic
  source 1..19: mol_type = other RNA
cgccccgccagctgttttt

SEQ ID NO: 11743 - RNA, 21 nt, synthetic construct
  misc_feature 1..21: note = Synthetic
  source 1..21: mol_type = other RNA
cccgccccgccagctgttttt

SEQ ID NO: 11744 - RNA, 22 nt, synthetic construct
  misc_feature 1..22: note = Synthetic
  source 1..22: mol_type = other RNA
tcccgccccgccagctgttttt

SEQ ID NO: 11745 - RNA, 23 nt, synthetic construct
  misc_feature 1..23: note = Synthetic
  source 1..23: mol_type = other RNA
ttcccgccccgccagctgttttt

SEQ ID NO: 11746 - RNA, 24 nt, synthetic construct
  misc_feature 1..24: note = Synthetic
  source 1..24: mol_type = other RNA
cttcccgccccgccagctgttttt

SEQ ID NO: 11747 - RNA, 18 nt, synthetic construct
  misc_feature 1..18: note = Synthetic
  source 1..18: mol_type = other RNA
ccccgccagctgtttttt

SEQ ID NO: 11748 - RNA, 19 nt, synthetic construct
  misc_feature 1..19: note = Synthetic
  source 1..19: mol_type = other RNA
gccccgccagctgtttttt

SEQ ID NO: 11749 - RNA, 21 nt, synthetic construct
  misc_feature 1..21: note = Synthetic
  source 1..21: mol_type = other RNA
ccgccccgccagctgtttttt

SEQ ID NO: 11750 - RNA, 22 nt, synthetic construct
  misc_feature 1..22: note = Synthetic
  source 1..22: mol_type = other RNA
cccgccccgccagctgtttttt

SEQ ID NO: 11751 - RNA, 23 nt, synthetic construct
  misc_feature 1..23: note = Synthetic
  source 1..23: mol_type = other RNA
tcccgccccgccagctgtttttt

SEQ ID NO: 11752 - RNA, 24 nt, synthetic construct
  misc_feature 1..24: note = Synthetic
  source 1..24: mol_type = other RNA
ttcccgccccgccagctgtttttt

SEQ ID NO: 11753 - RNA, 18 nt, synthetic construct
  misc_feature 1..18: note = Synthetic
  source 1..18: mol_type = other RNA
cccgccagctgttttttt

SEQ ID NO: 11754 - RNA, 19 nt, synthetic construct
  misc_feature 1..19: note = Synthetic
  source 1..19: mol_type = other RNA
ccccgccagctgttttttt

SEQ ID NO: 11755 - RNA, 21 nt, synthetic construct
  misc_feature 1..21: note = Synthetic
  source 1..21: mol_type = other RNA
cgccccgccagctgttttttt

SEQ ID NO: 11756 - RNA, 22 nt, synthetic construct
  misc_feature 1..22: note = Synthetic
  source 1..22: mol_type = other RNA
ccgccccgccagctgttttttt

SEQ ID NO: 11757 - RNA, 23 nt, synthetic construct
  misc_feature 1..23: note = Synthetic
  source 1..23: mol_type = other RNA
cccgccccgccagctgttttttt

SEQ ID NO: 11758 - RNA, 24 nt, synthetic construct
  misc_feature 1..24: note = Synthetic
  source 1..24: mol_type = other RNA
tcccgccccgccagctgttttttt

SEQ ID NO: 11759 - RNA, 17 nt, synthetic construct
  misc_feature 1..17: note = Synthetic
  source 1..17: mol_type = other RNA
gcaacaccctgtcgctc

SEQ ID NO: 11760 - RNA, 20 nt, synthetic construct
  misc_feature 1..20: note = Synthetic
  source 1..20: mol_type = other RNA
attgcaacaccctgtcgctc

SEQ ID NO: 11761 - RNA, 17 nt, synthetic construct
  misc_feature 1..17: note = Synthetic
  source 1..17: mol_type = other RNA
ccgtacgtcaccggcac

SEQ ID NO: 11762 - RNA, 17 nt, synthetic construct
  misc_feature 1..17: note = Synthetic
  source 1..17: mol_type = other RNA
ctggaaaaggcgccgcc

SEQ ID NO: 11763 - RNA, 17 nt, synthetic construct
  misc_feature 1..17: note = Synthetic
  source 1..17: mol_type = other RNA
cctcgccggtgctcagc

SEQ ID NO: 11764 - RNA, 17 nt, synthetic construct
  misc_feature 1..17: note = Synthetic
  source 1..17: mol_type = other RNA
gaaaaagctcgtctcgc

SEQ ID NO: 11765 - RNA, 17 nt, synthetic construct
  misc_feature 1..17: note = Synthetic
  source 1..17: mol_type = other RNA
ccagggcctccagaaag

SEQ ID NO: 11766 - RNA, 17 nt, synthetic construct
  misc_feature 1..17: note = Synthetic
  source 1..17: mol_type = other RNA
tggtcgccgagctaaag

SEQ ID NO: 11767 - RNA, 17 nt, synthetic construct
  misc_feature 1..17: note = Synthetic
  source 1..17: mol_type = other RNA
agctcgtctcgcagaag

SEQ ID NO: 11768 - RNA, 17 nt, synthetic construct
  misc_feature 1..17: note = Synthetic
  source 1..17: mol_type = other RNA
cgcattaggtgattcag

SEQ ID NO: 11769 - RNA, 17 nt, synthetic construct
  misc_feature 1..17: note = Synthetic
  source 1..17: mol_type = other RNA
cgttggtggcggcgtag

SEQ ID NO: 11770 - RNA, 17 nt, synthetic construct
  misc_feature 1..17: note = Synthetic
  source 1..17: mol_type = other RNA
gctgctgcaccgcgggg

SEQ ID NO: 11771 - RNA, 17 nt, synthetic construct
  misc_feature 1..17: note = Synthetic
  source 1..17: mol_type = other RNA
tacgccccgtacggatt

SEQ ID NO: 11772 - RNA, 20 nt, synthetic construct
  misc_feature 1..20: note = Synthetic
  source 1..20: mol_type = other RNA
tcgccgtacgtcaccggcac

SEQ ID NO: 11773 - RNA, 20 nt, synthetic construct
  misc_feature 1..20: note = Synthetic
  source 1..20: mol_type = other RNA
ctgctggaaaaggcgccgcc

SEQ ID NO: 11774 - RNA, 20 nt, synthetic construct
  misc_feature 1..20: note = Synthetic
  source 1..20: mol_type = other RNA
gggcctcgccggtgctcagc

SEQ ID NO: 11775 - RNA, 20 nt, synthetic construct
  misc_feature 1..20: note = Synthetic
  source 1..20: mol_type = other RNA
caggaaaaagctcgtctcgc

SEQ ID NO: 11776 - RNA, 20 nt, synthetic construct
  misc_feature 1..20: note = Synthetic
  source 1..20: mol_type = other RNA
tctccagggcctccagaaag

SEQ ID NO: 11777 - RNA, 20 nt, synthetic construct
  misc_feature 1..20: note = Synthetic
  source 1..20: mol_type = other RNA
ccctggtcgccgagctaaag

SEQ ID NO: 11778 - RNA, 20 nt, synthetic construct
  misc_feature 1..20: note = Synthetic
  source 1..20: mol_type = other RNA
aaaagctcgtctcgcagaag

SEQ ID NO: 11779 - RNA, 20 nt, synthetic construct
  misc_feature 1..20: note = Synthetic
  source 1..20: mol_type = other RNA
ggttcaccgtcgtccgacag

SEQ ID NO: 11780 - RNA, 20 nt, synthetic construct
  misc_feature 1..20: note = Synthetic
  source 1..20: mol_type = other RNA
tctcgcattaggtgattcag

SEQ ID NO: 11781 - RNA, 20 nt, synthetic construct
  misc_feature 1..20: note = Synthetic
  source 1..20: mol_type = other RNA
gaacgttggtggcggcgtag

SEQ ID NO: 11782 - RNA, 20 nt, synthetic construct
  misc_feature 1..20: note = Synthetic
  source 1..20: mol_type = other RNA
gccgctgctgcaccgcgggg

SEQ ID NO: 11783 - RNA, 17 nt, synthetic construct
  misc_feature 1..17: note = Synthetic
  source 1..17: mol_type = other RNA
gttccacgcgcggttta

SEQ ID NO: 11784 - RNA, 17 nt, synthetic construct
  misc_feature 1..17: note = Synthetic
  source 1..17: mol_type = other RNA
gccaccggaaaacatcg

SEQ ID NO: 11785 - RNA, 17 nt, synthetic construct
  misc_feature 1..17: note = Synthetic
  source 1..17: mol_type = other RNA
gcgatgttttccggtgg

SEQ ID NO: 11786 - RNA, 20 nt, synthetic construct
  misc_feature 1..20: note = Synthetic
  source 1..20: mol_type = other RNA
ggaacaaccgcgatgttttc

SEQ ID NO: 11787 - RNA, 20 nt, synthetic construct
  misc_feature 1..20: note = Synthetic
  source 1..20: mol_type = other RNA
gcgcggcccagttccacgcg

SEQ ID NO: 11788 - RNA, 20 nt, synthetic construct
  misc_feature 1..20: note = Synthetic
  source 1..20: mol_type = other RNA
gccgccaccggaaaacatcg

SEQ ID NO: 11789 - RNA, 20 nt, synthetic construct
  misc_feature 1..20: note = Synthetic
  source 1..20: mol_type = other RNA
gcgatgttttccggtggcgg

SEQ ID NO: 11790 - RNA, 17 nt, synthetic construct
  misc_feature 1..17: note = Synthetic
  source 1..17: mol_type = other RNA
taaaccgcgcgtggaac

SEQ ID NO: 11791 - RNA, 17 nt, synthetic construct
  misc_feature 1..17: note = Synthetic
  source 1..17: mol_type = other RNA
acaaccgcgatgttttc

SEQ ID NO: 11792 - RNA, 17 nt, synthetic construct
  misc_feature 1..17: note = Synthetic
  source 1..17: mol_type = other RNA
cgtccataaaccgcgcg

SEQ ID NO: 11793 - RNA, 17 nt, synthetic construct
  misc_feature 1..17: note = Synthetic
  source 1..17: mol_type = other RNA
accgcgatgttttccgg

SEQ ID NO: 11794 - RNA, 17 nt, synthetic construct
  misc_feature 1..17: note = Synthetic
  source 1..17: mol_type = other RNA
aaaccgcgcgtggaact

SEQ ID NO: 11795 - RNA, 20 nt, synthetic construct
  misc_feature 1..20: note = Synthetic
  source 1..20: mol_type = other RNA
ccagttccacgcgcggttta

SEQ ID NO: 11796 - RNA, 20 nt, synthetic construct
  misc_feature 1..20: note = Synthetic
  source 1..20: mol_type = other RNA
ccataaaccgcgcgtggaac

SEQ ID NO: 11797 - RNA, 20 nt, synthetic construct
  misc_feature 1..20: note = Synthetic
  source 1..20: mol_type = other RNA
tggcgtccataaaccgcgcg

SEQ ID NO: 11798 - RNA, 20 nt, synthetic construct
  misc_feature 1..20: note = Synthetic
  source 1..20: mol_type = other RNA
acaaccgcgatgttttccgg

SEQ ID NO: 11799 - RNA, 20 nt, synthetic construct
  misc_feature 1..20: note = Synthetic
  source 1..20: mol_type = other RNA
accgcgatgttttccggtgg

SEQ ID NO: 11800 - RNA, 20 nt, synthetic construct
  misc_feature 1..20: note = Synthetic
  source 1..20: mol_type = other RNA
cataaaccgcgcgtggaact

SEQ ID NO: 11801 - RNA, 17 nt, synthetic construct
  misc_feature 1..17: note = Synthetic
  source 1..17: mol_type = other RNA
cggcccagttccacgcg

SEQ ID NO: 11802 - RNA, 17 nt, synthetic construct
  misc_feature 1..17: note = Synthetic
  source 1..17: mol_type = other RNA
atgttttccggtggcgg

SEQ ID NO: 11803 - RNA, 17 nt, synthetic construct
  misc_feature 1..17: note = Synthetic
  source 1..17: mol_type = other RNA
tctttaggggttcgggt

SEQ ID NO: 11804 - RNA, 17 nt, synthetic construct
  misc_feature 1..17: note = Synthetic
  source 1..17: mol_type = other RNA
ccgagagtctgttaaaa

SEQ ID NO: 11805 - RNA, 17 nt, synthetic construct
  misc_feature 1..17: note = Synthetic
  source 1..17: mol_type = other RNA
gccgtactgtttcacaa

SEQ ID NO: 11806 - RNA, 17 nt, synthetic construct
  misc_feature 1..17: note = Synthetic
  source 1..17: mol_type = other RNA
ggcgacgccgtgggcaa

SEQ ID NO: 11807 - RNA, 17 nt, synthetic construct
  misc_feature 1..17: note = Synthetic
  source 1..17: mol_type = other RNA
ggtaagatgctcatcaa

SEQ ID NO: 11808 - RNA, 17 nt, synthetic construct
  misc_feature 1..17: note = Synthetic
  source 1..17: mol_type = other RNA
tcatgctagagtatcaa

SEQ ID NO: 11809 - RNA, 17 nt, synthetic construct
  misc_feature 1..17: note = Synthetic
  source 1..17: mol_type = other RNA
agcttggccagcaagaa

SEQ ID NO: 11810 - RNA, 17 nt, synthetic construct
  misc_feature 1..17: note = Synthetic
  source 1..17: mol_type = other RNA
cgcctggccgaccagaa

SEQ ID NO: 11811 - RNA, 17 nt, synthetic construct
  misc_feature 1..17: note = Synthetic
  source 1..17: mol_type = other RNA
gtgcccggccaccggaa

SEQ ID NO: 11812 - RNA, 17 nt, synthetic construct
  misc_feature 1..17: note = Synthetic
  source 1..17: mol_type = other RNA
gggtacggccgcatgaa

SEQ ID NO: 11813 - RNA, 17 nt, synthetic construct
  misc_feature 1..17: note = Synthetic
  source 1..17: mol_type = other RNA
cgtgccgtaaacgtgaa

SEQ ID NO: 11814 - RNA, 17 nt, synthetic construct
  misc_feature 1..17: note = Synthetic
  source 1..17: mol_type = other RNA
agcaagataaaggtgaa

SEQ ID NO: 11815 - RNA, 17 nt, synthetic construct
  misc_feature 1..17: note = Synthetic
  source 1..17: mol_type = other RNA
gaagcgcagcaagataa

SEQ ID NO: 11816 - RNA, 17 nt, synthetic construct
  misc_feature 1..17: note = Synthetic
  source 1..17: mol_type = other RNA
ggcgttattcccaaaca

SEQ ID NO: 11817 - RNA, 17 nt, synthetic construct
  misc_feature 1..17: note = Synthetic
  source 1..17: mol_type = other RNA
cggcgtcgccctgaaca

SEQ ID NO: 11818 - RNA, 17 nt, synthetic construct
  misc_feature 1..17: note = Synthetic
  source 1..17: mol_type = other RNA
ggccgtactgtttcaca

SEQ ID NO: 11819 - RNA, 17 nt, synthetic construct
  misc_feature 1..17: note = Synthetic
  source 1..17: mol_type = other RNA
catcatctacggggaca

SEQ ID NO: 11820 - RNA, 17 nt, synthetic construct
  misc_feature 1..17: note = Synthetic
  source 1..17: mol_type = other RNA
gctgacggacatttaca

SEQ ID NO: 11821 - RNA, 17 nt, synthetic construct
  misc_feature 1..17: note = Synthetic
  source 1..17: mol_type = other RNA
gtcgaattccagaacca

SEQ ID NO: 11822 - RNA, 17 nt, synthetic construct
  misc_feature 1..17: note = Synthetic
  source 1..17: mol_type = other RNA
aaacagcaggtcgacca

SEQ ID NO: 11823 - RNA, 17 nt, synthetic construct
  misc_feature 1..17: note = Synthetic
  source 1..17: mol_type = other RNA
attctgccggacaccca

SEQ ID NO: 11824 - RNA, 17 nt, synthetic construct
  misc_feature 1..17: note = Synthetic
  source 1..17: mol_type = other RNA
cgccatcttgtcgccca

SEQ ID NO: 11825 - RNA, 17 nt, synthetic construct
  misc_feature 1..17: note = Synthetic
  source 1..17: mol_type = other RNA
gcatacgccattgccca

SEQ ID NO: 11826 - RNA, 17 nt, synthetic construct
  misc_feature 1..17: note = Synthetic
  source 1..17: mol_type = other RNA
gaacgagctggcggcca

SEQ ID NO: 11827 - RNA, 17 nt, synthetic construct
  misc_feature 1..17: note = Synthetic
  source 1..17: mol_type = other RNA
caggacggcttcggcca

SEQ ID NO: 11828 - RNA, 17 nt, synthetic construct
  misc_feature 1..17: note = Synthetic
  source 1..17: mol_type = other RNA
ggggtaccagggggcca

SEQ ID NO: 11829 - RNA, 17 nt, synthetic construct
  misc_feature 1..17: note = Synthetic
  source 1..17: mol_type = other RNA
tatcaaccgcacctcca

SEQ ID NO: 11830 - RNA, 17 nt, synthetic construct
  misc_feature 1..17: note = Synthetic
  source 1..17: mol_type = other RNA
caggaggacgtgctcca

SEQ ID NO: 11831 - RNA, 17 nt, synthetic construct
  misc_feature 1..17: note = Synthetic
  source 1..17: mol_type = other RNA
ttcacgggagtgcagca

SEQ ID NO: 11832 - RNA, 17 nt, synthetic construct
  misc_feature 1..17: note = Synthetic
  source 1..17: mol_type = other RNA
ctgcttgtccaggagca

SEQ ID NO: 11833 - RNA, 17 nt, synthetic construct
  misc_feature 1..17: note = Synthetic
  source 1..17: mol_type = other RNA
cgcggctccggaccgca

SEQ ID NO: 11834 - RNA, 17 nt, synthetic construct
  misc_feature 1..17: note = Synthetic
  source 1..17: mol_type = other RNA
agatctctgcgagcgca

SEQ ID NO: 11835 - RNA, 17 nt, synthetic construct
  misc_feature 1..17: note = Synthetic
  source 1..17: mol_type = other RNA
gcccggggactcgcgca

SEQ ID NO: 11836 - RNA, 17 nt, synthetic construct
  misc_feature 1..17: note = Synthetic
  source 1..17: mol_type = other RNA
gcggatctgctttcgca

SEQ ID NO: 11837 - RNA, 17 nt, synthetic construct
  misc_feature 1..17: note = Synthetic
  source 1..17: mol_type = other RNA
gcggcaacgtgcaggca

SEQ ID NO: 11838 - RNA, 17 nt, synthetic construct
  misc_feature 1..17: note = Synthetic
  source 1..17: mol_type = other RNA
gataaaggtgaacggca

SEQ ID NO: 11839 - RNA, 17 nt, synthetic construct
  misc_feature 1..17: note = Synthetic
  source 1..17: mol_type = other RNA
cttggccggggagggca

SEQ ID NO: 11840 - RNA, 17 nt, synthetic construct
  misc_feature 1..17: note = Synthetic
  source 1..17: mol_type = other RNA
gcacctggaggcgggca

SEQ ID NO: 11841 - RNA, 17 nt, synthetic construct
  misc_feature 1..17: note = Synthetic
  source 1..17: mol_type = other RNA
ctgcagtccctcgggca

SEQ ID NO: 11842 - RNA, 17 nt, synthetic construct
  misc_feature 1..17: note = Synthetic
  source 1..17: mol_type = other RNA
cttcgatatcgaatgca

SEQ ID NO: 11843 - RNA, 17 nt, synthetic construct
  misc_feature 1..17: note = Synthetic
  source 1..17: mol_type = other RNA
gcagcaggccgccatca

SEQ ID NO: 11844 - RNA, 17 nt, synthetic construct
  misc_feature 1..17: note = Synthetic
  source 1..17: mol_type = other RNA
gcaggtcccgtccatca

SEQ ID NO: 11845 - RNA, 17 nt, synthetic construct
  misc_feature 1..17: note = Synthetic
  source 1..17: mol_type = other RNA
gggtaagatgctcatca

SEQ ID NO: 11846 - RNA, 17 nt, synthetic construct
  misc_feature 1..17: note = Synthetic
  source 1..17: mol_type = other RNA
gctgtgccgcggcctca

SEQ ID NO: 11847 - RNA, 17 nt, synthetic construct
  misc_feature 1..17: note = Synthetic
  source 1..17: mol_type = other RNA
ggtgtattacaagctca

SEQ ID NO: 11848 - RNA, 17 nt, synthetic construct
  misc_feature 1..17: note = Synthetic
  source 1..17: mol_type = other RNA
acggctgttcttcgtca

SEQ ID NO: 11849 - RNA, 17 nt, synthetic construct
  misc_feature 1..17: note = Synthetic
  source 1..17: mol_type = other RNA
acccggaagtggggtca

SEQ ID NO: 11850 - RNA, 17 nt, synthetic construct
  misc_feature 1..17: note = Synthetic
  source 1..17: mol_type = other RNA
ggcgtgcgtgacattca

SEQ ID NO: 11851 - RNA, 17 nt, synthetic construct
  misc_feature 1..17: note = Synthetic
  source 1..17: mol_type = other RNA
gtaatagtccgtgttca

SEQ ID NO: 11852 - RNA, 17 nt, synthetic construct
  misc_feature 1..17: note = Synthetic
  source 1..17: mol_type = other RNA
ggccgtgggcgacaaga

SEQ ID NO: 11853 - RNA, 17 nt, synthetic construct
  misc_feature 1..17: note = Synthetic
  source 1..17: mol_type = other RNA
cagcttggccagcaaga

SEQ ID NO: 11854 - RNA, 17 nt, synthetic construct
  misc_feature 1..17: note = Synthetic
  source 1..17: mol_type = other RNA
cctgaaggacaagaaga

SEQ ID NO: 11855 - RNA, 17 nt, synthetic construct
  misc_feature 1..17: note = Synthetic
  source 1..17: mol_type = other RNA
gcgcctggccgaccaga

SEQ ID NO: 11856 - RNA, 17 nt, synthetic construct
  misc_feature 1..17: note = Synthetic
  source 1..17: mol_type = other RNA
ccgcgaggtagaggaga

SEQ ID NO: 11857 - RNA, 17 nt, synthetic construct
  misc_feature 1..17: note = Synthetic
  source 1..17: mol_type = other RNA
catcaccgacccggaga

SEQ ID NO: 11858 - RNA, 17 nt, synthetic construct
  misc_feature 1..17: note = Synthetic
  source 1..17: mol_type = other RNA
ggcggccgctccggaga

SEQ ID NO: 11859 - RNA, 17 nt, synthetic construct
  misc_feature 1..17: note = Synthetic
  source 1..17: mol_type = other RNA
tccggcccggtttgaga

SEQ ID NO: 11860 - RNA, 17 nt, synthetic construct
  misc_feature 1..17: note = Synthetic
  source 1..17: mol_type = other RNA
ctgctggccgtcgtaga

SEQ ID NO: 11861 - RNA, 17 nt, synthetic construct
  misc_feature 1..17: note = Synthetic
  source 1..17: mol_type = other RNA
acccgcaccatctacga

SEQ ID NO: 11862 - RNA, 17 nt, synthetic construct
  misc_feature 1..17: note = Synthetic
  source 1..17: mol_type = other RNA
gccatcaagaagtacga

SEQ ID NO: 11863 - RNA, 17 nt, synthetic construct
  misc_feature 1..17: note = Synthetic
  source 1..17: mol_type = other RNA
gcgcgacccctgcccga

SEQ ID NO: 11864 - RNA, 17 nt, synthetic construct
  misc_feature 1..17: note = Synthetic
  source 1..17: mol_type = other RNA
gtcgctggatgtcccga

SEQ ID NO: 11865 - RNA, 17 nt, synthetic construct
  misc_feature 1..17: note = Synthetic
  source 1..17: mol_type = other RNA
gagacggtaccagccga

SEQ ID NO: 11866 - RNA, 17 nt, synthetic construct
  misc_feature 1..17: note = Synthetic
  source 1..17: mol_type = other RNA
ggtcggtgatgcgccga

SEQ ID NO: 11867 - RNA, 17 nt, synthetic construct
  misc_feature 1..17: note = Synthetic
  source 1..17: mol_type = other RNA
cagcatctcgcggccga

SEQ ID NO: 11868 - RNA, 17 nt, synthetic construct
  misc_feature 1..17: note = Synthetic
  source 1..17: mol_type = other RNA
cctgcacgttgccgcga

SEQ ID NO: 11869 - RNA, 17 nt, synthetic construct
  misc_feature 1..17: note = Synthetic
  source 1..17: mol_type = other RNA
ggggggtcggcaggcga

SEQ ID NO: 11870 - RNA, 17 nt, synthetic construct
  misc_feature 1..17: note = Synthetic
  source 1..17: mol_type = other RNA
tcgaggtgggggggcga

SEQ ID NO: 11871 - RNA, 17 nt, synthetic construct
  misc_feature 1..17: note = Synthetic
  source 1..17: mol_type = other RNA
gctcatgcccccctcga

SEQ ID NO: 11872 - RNA, 17 nt, synthetic construct
  misc_feature 1..17: note = Synthetic
  source 1..17: mol_type = other RNA
ggccaggagctgttcga

SEQ ID NO: 11873 - RNA, 17 nt, synthetic construct
  misc_feature 1..17: note = Synthetic
  source 1..17: mol_type = other RNA
cttcttgtccttcagga

SEQ ID NO: 11874 - RNA, 17 nt, synthetic construct
  misc_feature 1..17: note = Synthetic
  source 1..17: mol_type = other RNA
atgggcgtctacgagga

SEQ ID NO: 11875 - RNA, 17 nt, synthetic construct
  misc_feature 1..17: note = Synthetic
  source 1..17: mol_type = other RNA
ctgggcctgactccgga

SEQ ID NO: 11876 - RNA, 17 nt, synthetic construct
  misc_feature 1..17: note = Synthetic
  source 1..17: mol_type = other RNA
ggcgtctagctcgcgga

SEQ ID NO: 11877 - RNA, 17 nt, synthetic construct
  misc_feature 1..17: note = Synthetic
  source 1..17: mol_type = other RNA
gggcgcttggccgggga

SEQ ID NO: 11878 - RNA, 17 nt, synthetic construct
  misc_feature 1..17: note = Synthetic
  source 1..17: mol_type = other RNA
tacaaggtccccctgga

SEQ ID NO: 11879 - RNA, 17 nt, synthetic construct
  misc_feature 1..17: note = Synthetic
  source 1..17: mol_type = other RNA
tttcacaagggtcatga

SEQ ID NO: 11880 - RNA, 17 nt, synthetic construct
  misc_feature 1..17: note = Synthetic
  source 1..17: mol_type = other RNA
gcccaggagcgtgatga

SEQ ID NO: 11881 - RNA, 17 nt, synthetic construct
  misc_feature 1..17: note = Synthetic
  source 1..17: mol_type = other RNA
gcgcctggcccacctga

SEQ ID NO: 11882 - RNA, 17 nt, synthetic construct
  misc_feature 1..17: note = Synthetic
  source 1..17: mol_type = other RNA
cagcacgctctccctga

SEQ ID NO: 11883 - RNA, 17 nt, synthetic construct
  misc_feature 1..17: note = Synthetic
  source 1..17: mol_type = other RNA
ggccgaagccgtcctga

SEQ ID NO: 11884 - RNA, 17 nt, synthetic construct
  misc_feature 1..17: note = Synthetic
  source 1..17: mol_type = other RNA
cttgctggccaagctga

SEQ ID NO: 11885 - RNA, 17 nt, synthetic construct
  misc_feature 1..17: note = Synthetic
  source 1..17: mol_type = other RNA
cacggccgccgggctga

SEQ ID NO: 11886 - RNA, 17 nt, synthetic construct
  misc_feature 1..17: note = Synthetic
  source 1..17: mol_type = other RNA
ggtccccgtcggtgtga

SEQ ID NO: 11887 - RNA, 17 nt, synthetic construct
  misc_feature 1..17: note = Synthetic
  source 1..17: mol_type = other RNA
gttacacacgaccttga

SEQ ID NO: 11888 - RNA, 17 nt, synthetic construct
  misc_feature 1..17: note = Synthetic
  source 1..17: mol_type = other RNA
cgggatccggtccttga

SEQ ID NO: 11889 - RNA, 17 nt, synthetic construct
  misc_feature 1..17: note = Synthetic
  source 1..17: mol_type = other RNA
accctcgtacttcttga

SEQ ID NO: 11890 - RNA, 17 nt, synthetic construct
  misc_feature 1..17: note = Synthetic
  source 1..17: mol_type = other RNA
atgatgcgcatggaata

SEQ ID NO: 11891 - RNA, 17 nt, synthetic construct
  misc_feature 1..17: note = Synthetic
  source 1..17: mol_type = other RNA
ggtgggtgccggcgcta

SEQ ID NO: 11892 - RNA, 17 nt, synthetic construct
  misc_feature 1..17: note = Synthetic
  source 1..17: mol_type = other RNA
acccttgtgaaacagta

SEQ ID NO: 11893 - RNA, 17 nt, synthetic construct
  misc_feature 1..17: note = Synthetic
  source 1..17: mol_type = other RNA
gtccccctggacgggta

SEQ ID NO: 11894 - RNA, 17 nt, synthetic construct
  misc_feature 1..17: note = Synthetic
  source 1..17: mol_type = other RNA
cgtcgagtttaactgta

SEQ ID NO: 11895 - RNA, 17 nt, synthetic construct
  misc_feature 1..17: note = Synthetic
  source 1..17: mol_type = other RNA
gtgtgtaactcggtgta

SEQ ID NO: 11896 - RNA, 17 nt, synthetic construct
  misc_feature 1..17: note = Synthetic
  source 1..17: mol_type = other RNA
cacccaggggcgattta

SEQ ID NO: 11897 - RNA, 17 nt, synthetic construct
  misc_feature 1..17: note = Synthetic
  source 1..17: mol_type = other RNA
gtggccgttcacgttta

SEQ ID NO: 11898 - RNA, 17 nt, synthetic construct
  misc_feature 1..17: note = Synthetic
  source 1..17: mol_type = other RNA
tggcgttattcccaaac

SEQ ID NO: 11899 - RNA, 17 nt, synthetic construct
  misc_feature 1..17: note = Synthetic
  source 1..17: mol_type = other RNA
ctggtaccgtctcaaac

SEQ ID NO: 11900 - RNA, 17 nt, synthetic construct
  misc_feature 1..17: note = Synthetic
  source 1..17: mol_type = other RNA
ggttgtccaggatgaac

SEQ ID NO: 11901 - RNA, 17 nt, synthetic construct
  misc_feature 1..17: note = Synthetic
  source 1..17: mol_type = other RNA
tcgaattccagaaccac

SEQ ID NO: 11902 - RNA, 17 nt, synthetic construct
  misc_feature 1..17: note = Synthetic
  source 1..17: mol_type = other RNA
aagtcgaacaccaccac

SEQ ID NO: 11903 - RNA, 17 nt, synthetic construct
  misc_feature 1..17: note = Synthetic
  source 1..17: mol_type = other RNA
tgactccggaaggccac

SEQ ID NO: 11904 - RNA, 17 nt, synthetic construct
  misc_feature 1..17: note = Synthetic
  source 1..17: mol_type = other RNA
agagcgtgctgaagcac

SEQ ID NO: 11905 - RNA, 17 nt, synthetic construct
  misc_feature 1..17: note = Synthetic
  source 1..17: mol_type = other RNA
ggcagaagttgtcgcac

SEQ ID NO: 11906 - RNA, 17 nt, synthetic construct
  misc_feature 1..17: note = Synthetic
  source 1..17: mol_type = other RNA
caggtcgtagagcagac

SEQ ID NO: 11907 - RNA, 17 nt, synthetic construct
  misc_feature 1..17: note = Synthetic
  source 1..17: mol_type = other RNA
acaaggaggaggtcgac

SEQ ID NO: 11908 - RNA, 17 nt, synthetic construct
  misc_feature 1..17: note = Synthetic
  source 1..17: mol_type = other RNA
acatcatcaacttcgac

SEQ ID NO: 11909 - RNA, 17 nt, synthetic construct
  misc_feature 1..17: note = Synthetic
  source 1..17: mol_type = other RNA
tcccgtccatcaaggac

SEQ ID NO: 11910 - RNA, 17 nt, synthetic construct
  misc_feature 1..17: note = Synthetic
  source 1..17: mol_type = other RNA
gcatcctcctgcgggac

SEQ ID NO: 11911 - RNA, 17 nt, synthetic construct
  misc_feature 1..17: note = Synthetic
  source 1..17: mol_type = other RNA
tccggtccttgatggac

SEQ ID NO: 11912 - RNA, 17 nt, synthetic construct
  misc_feature 1..17: note = Synthetic
  source 1..17: mol_type = other RNA
acaaggtccccctggac

SEQ ID NO: 11913 - RNA, 17 nt, synthetic construct
  misc_feature 1..17: note = Synthetic
  source 1..17: mol_type = other RNA
ccagggcggtggtggac

SEQ ID NO: 11914 - RNA, 17 nt, synthetic construct
  misc_feature 1..17: note = Synthetic
  source 1..17: mol_type = other RNA
ggccccgagttcgtgac

SEQ ID NO: 11915 - RNA, 17 nt, synthetic construct
  misc_feature 1..17: note = Synthetic
  source 1..17: mol_type = other RNA
cggcgagtactgcatac

SEQ ID NO: 11916 - RNA, 17 nt, synthetic construct
  misc_feature 1..17: note = Synthetic
  source 1..17: mol_type = other RNA
gggcatgagcgacctac

SEQ ID NO: 11917 - RNA, 17 nt, synthetic construct
  misc_feature 1..17: note = Synthetic
  source 1..17: mol_type = other RNA
gggccacgatcacgtac

SEQ ID NO: 11918 - RNA, 17 nt, synthetic construct
  misc_feature 1..17: note = Synthetic
  source 1..17: mol_type = other RNA
ggatgatgctggggtac

SEQ ID NO: 11919 - RNA, 17 nt, synthetic construct
  misc_feature 1..17: note = Synthetic
  source 1..17: mol_type = other RNA
tgaacatcgacatgtac

SEQ ID NO: 11920 - RNA, 17 nt, synthetic construct
  misc_feature 1..17: note = Synthetic
  source 1..17: mol_type = other RNA
tgtgtaactcggtgtac

SEQ ID NO: 11921 - RNA, 17 nt, synthetic construct
  misc_feature 1..17: note = Synthetic
  source 1..17: mol_type = other RNA
tggtaccgtctcaaacc

SEQ ID NO: 11922 - RNA, 17 nt, synthetic construct
  misc_feature 1..17: note = Synthetic
  source 1..17: mol_type = other RNA
ctgtacggcggacaacc

SEQ ID NO: 11923 - RNA, 17 nt, synthetic construct
  misc_feature 1..17: note = Synthetic
  source 1..17: mol_type = other RNA
gttgtccaggatgaacc

SEQ ID NO: 11924 - RNA, 17 nt, synthetic construct
  misc_feature 1..17: note = Synthetic
  source 1..17: mol_type = other RNA
gggtcgacgccaccacc

SEQ ID NO: 11925 - RNA, 17 nt, synthetic construct
  misc_feature 1..17: note = Synthetic
  source 1..17: mol_type = other RNA
gactccggaaggccacc

SEQ ID NO: 11926 - RNA, 17 nt, synthetic construct
  misc_feature 1..17: note = Synthetic
  source 1..17: mol_type = other RNA
aaacgtgaacggccacc

SEQ ID NO: 11927 - RNA, 17 nt, synthetic construct
  misc_feature 1..17: note = Synthetic
  source 1..17: mol_type = other RNA
aaaacagcaggtcgacc

SEQ ID NO: 11928 - RNA, 17 nt, synthetic construct
  misc_feature 1..17: note = Synthetic
  source 1..17: mol_type = other RNA
aggatatctggatgacc

SEQ ID NO: 11929 - RNA, 17 nt, synthetic construct
  misc_feature 1..17: note = Synthetic
  source 1..17: mol_type = other RNA
gccccgagttcgtgacc

SEQ ID NO: 11930 - RNA, 17 nt, synthetic construct
  misc_feature 1..17: note = Synthetic
  source 1..17: mol_type = other RNA
gttgatgatgttgtacc

SEQ ID NO: 11931 - RNA, 17 nt, synthetic construct
  misc_feature 1..17: note = Synthetic
  source 1..17: mol_type = other RNA
ttcatcctggacaaccc

SEQ ID NO: 11932 - RNA, 17 nt, synthetic construct
  misc_feature 1..17: note = Synthetic
  source 1..17: mol_type = other RNA
ccgaaggtgacgaaccc

SEQ ID NO: 11933 - RNA, 17 nt, synthetic construct
  misc_feature 1..17: note = Synthetic
  source 1..17: mol_type = other RNA
agtggggtcaaggaccc

SEQ ID NO: 11934 - RNA, 17 nt, synthetic construct
  misc_feature 1..17: note = Synthetic
  source 1..17: mol_type = other RNA
tcatcctggacaacccc

SEQ ID NO: 11935 - RNA, 17 nt, synthetic construct
  misc_feature 1..17: note = Synthetic
  source 1..17: mol_type = other RNA
cgaagtgtggcaccccc

SEQ ID NO: 11936 - RNA, 17 nt, synthetic construct
  misc_feature 1..17: note = Synthetic
  source 1..17: mol_type = other RNA
cttgggcgcctcccccc

SEQ ID NO: 11937 - RNA, 17 nt, synthetic construct
  misc_feature 1..17: note = Synthetic
  source 1..17: mol_type = other RNA
ccgacatgcgcgccccc

SEQ ID NO: 11938 - RNA, 17 nt, synthetic construct
  misc_feature 1..17: note = Synthetic
  source 1..17: mol_type = other RNA
caaggaccctggccccc

SEQ ID NO: 11939 - RNA, 17 nt, synthetic construct
  misc_feature 1..17: note = Synthetic
  source 1..17: mol_type = other RNA
catttacaaggtccccc

SEQ ID NO: 11940 - RNA, 17 nt, synthetic construct
  misc_feature 1..17: note = Synthetic
  source 1..17: mol_type = other RNA
gccgacatgcgcgcccc

SEQ ID NO: 11941 - RNA, 17 nt, synthetic construct
  misc_feature 1..17: note = Synthetic
  source 1..17: mol_type = other RNA
cgcccctaaatcgcccc

SEQ ID NO: 11942 - RNA, 17 nt, synthetic construct
  misc_feature 1..17: note = Synthetic
  source 1..17: mol_type = other RNA
gggcgtgggcaggcccc

SEQ ID NO: 11943 - RNA, 17 nt, synthetic construct
  misc_feature 1..17: note = Synthetic
  source 1..17: mol_type = other RNA
gccctgcgcgagtcccc

SEQ ID NO: 11944 - RNA, 17 nt, synthetic construct
  misc_feature 1..17: note = Synthetic
  source 1..17: mol_type = other RNA
ccgcacctccagggccc

SEQ ID NO: 11945 - RNA, 17 nt, synthetic construct
  misc_feature 1..17: note = Synthetic
  source 1..17: mol_type = other RNA
cgcggccctgccctccc

SEQ ID NO: 11946 - RNA, 17 nt, synthetic construct
  misc_feature 1..17: note = Synthetic
  source 1..17: mol_type = other RNA
ccgctcctcgtcctccc

SEQ ID NO: 11947 - RNA, 17 nt, synthetic construct
  misc_feature 1..17: note = Synthetic
  source 1..17: mol_type = other RNA
ggccctgcgcgagtccc

SEQ ID NO: 11948 - RNA, 17 nt, synthetic construct
  misc_feature 1..17: note = Synthetic
  source 1..17: mol_type = other RNA
gcccacggccgtcagcc

SEQ ID NO: 11949 - RNA, 17 nt, synthetic construct
  misc_feature 1..17: note = Synthetic
  source 1..17: mol_type = other RNA
ccgcctactacgccgcc

SEQ ID NO: 11950 - RNA, 17 nt, synthetic construct
  misc_feature 1..17: note = Synthetic
  source 1..17: mol_type = other RNA
gcggcctcacggccgcc

SEQ ID NO: 11951 - RNA, 17 nt, synthetic construct
  misc_feature 1..17: note = Synthetic
  source 1..17: mol_type = other RNA
gtacaccaacaagcgcc

SEQ ID NO: 11952 - RNA, 17 nt, synthetic construct
  misc_feature 1..17: note = Synthetic
  source 1..17: mol_type = other RNA
tacgtgcctgctgcgcc

SEQ ID NO: 11953 - RNA, 17 nt, synthetic construct
  misc_feature 1..17: note = Synthetic
  source 1..17: mol_type = other RNA
cggccgcatgaacggcc

SEQ ID NO: 11954 - RNA, 17 nt, synthetic construct
  misc_feature 1..17: note = Synthetic
  source 1..17: mol_type = other RNA
agcgtgttgttccggcc

SEQ ID NO: 11955 - RNA, 17 nt, synthetic construct
  misc_feature 1..17: note = Synthetic
  source 1..17: mol_type = other RNA
agcccttctggtcggcc

SEQ ID NO: 11956 - RNA, 17 nt, synthetic construct
  misc_feature 1..17: note = Synthetic
  source 1..17: mol_type = other RNA
cccgcgttgcgcgggcc

SEQ ID NO: 11957 - RNA, 17 nt, synthetic construct
  misc_feature 1..17: note = Synthetic
  source 1..17: mol_type = other RNA
tggggtaccagggggcc

SEQ ID NO: 11958 - RNA, 17 nt, synthetic construct
  misc_feature 1..17: note = Synthetic
  source 1..17: mol_type = other RNA
acaccgtcaggtgggcc

SEQ ID NO: 11959 - RNA, 17 nt, synthetic construct
  misc_feature 1..17: note = Synthetic
  source 1..17: mol_type = other RNA
agcacaggttgtgggcc

SEQ ID NO: 11960 - RNA, 17 nt, synthetic construct
  misc_feature 1..17: note = Synthetic
  source 1..17: mol_type = other RNA
tgcccccctcgatggcc

SEQ ID NO: 11961 - RNA, 17 nt, synthetic construct
  misc_feature 1..17: note = Synthetic
  source 1..17: mol_type = other RNA
cgtacttcttgatggcc

SEQ ID NO: 11962 - RNA, 17 nt, synthetic construct
  misc_feature 1..17: note = Synthetic
  source 1..17: mol_type = other RNA
tggcctttccggtggcc

SEQ ID NO: 11963 - RNA, 17 nt, synthetic construct
  misc_feature 1..17: note = Synthetic
  source 1..17: mol_type = other RNA
gtgcgacaacttctgcc

SEQ ID NO: 11964 - RNA, 17 nt, synthetic construct
  misc_feature 1..17: note = Synthetic
  source 1..17: mol_type = other RNA
caggtcctccgggtgcc

SEQ ID NO: 11965 - RNA, 17 nt, synthetic construct
  misc_feature 1..17: note = Synthetic
  source 1..17: mol_type = other RNA
cccggagagggacatcc

SEQ ID NO: 11966 - RNA, 17 nt, synthetic construct
  misc_feature 1..17: note = Synthetic
  source 1..17: mol_type = other RNA
gtaccccagcatcatcc

SEQ ID NO: 11967 - RNA, 17 nt, synthetic construct
  misc_feature 1..17: note = Synthetic
  source 1..17: mol_type = other RNA
caccacccggttcatcc

SEQ ID NO: 11968 - RNA, 17 nt, synthetic construct
  misc_feature 1..17: note = Synthetic
  source 1..17: mol_type = other RNA
ttatcaaccgcacctcc

SEQ ID NO: 11969 - RNA, 17 nt, synthetic construct
  misc_feature 1..17: note = Synthetic
  source 1..17: mol_type = other RNA
agtccttgcccgcctcc

SEQ ID NO: 11970 - RNA, 17 nt, synthetic construct
  misc_feature 1..17: note = Synthetic
  source 1..17: mol_type = other RNA
gccgctcctcgtcctcc

SEQ ID NO: 11971 - RNA, 17 nt, synthetic construct
  misc_feature 1..17: note = Synthetic
  source 1..17: mol_type = other RNA
ggatgaccaggtcctcc

SEQ ID NO: 11972 - RNA, 17 nt, synthetic construct
  misc_feature 1..17: note = Synthetic
  source 1..17: mol_type = other RNA
ggccttcgaacagctcc

SEQ ID NO: 11973 - RNA, 17 nt, synthetic construct
  misc_feature 1..17: note = Synthetic
  source 1..17: mol_type = other RNA
gaccgtcatcacgctcc

SEQ ID NO: 11974 - RNA, 17 nt, synthetic construct
  misc_feature 1..17: note = Synthetic
  source 1..17: mol_type = other RNA
acaggaggacgtgctcc

SEQ ID NO: 11975 - RNA, 17 nt, synthetic construct
  misc_feature 1..17: note = Synthetic
  source 1..17: mol_type = other RNA
cgaggaggccgtgctcc

SEQ ID NO: 11976 - RNA, 17 nt, synthetic construct
  misc_feature 1..17: note = Synthetic
  source 1..17: mol_type = other RNA
cccccacctcgatctcc

SEQ ID NO: 11977 - RNA, 17 nt, synthetic construct
  misc_feature 1..17: note = Synthetic
  source 1..17: mol_type = other RNA
cctggatgtccctctcc

SEQ ID NO: 11978 - RNA, 17 nt, synthetic construct
  misc_feature 1..17: note = Synthetic
  source 1..17: mol_type = other RNA
cggtgaggacaaagtcc

SEQ ID NO: 11979 - RNA, 17 nt, synthetic construct
  misc_feature 1..17: note = Synthetic
  source 1..17: mol_type = other RNA
cgaacccggggttgtcc

SEQ ID NO: 11980 - RNA, 17 nt, synthetic construct
  misc_feature 1..17: note = Synthetic
  source 1..17: mol_type = other RNA
tccttgaccccacttcc

SEQ ID NO: 11981 - RNA, 17 nt, synthetic construct
  misc_feature 1..17: note = Synthetic
  source 1..17: mol_type = other RNA
gcgtctacgtccgaagc

SEQ ID NO: 11982 - RNA, 17 nt, synthetic construct
  misc_feature 1..17: note = Synthetic
  source 1..17: mol_type = other RNA
aaaacttaaaaaacagc

SEQ ID NO: 11983 - RNA, 17 nt, synthetic construct
  misc_feature 1..17: note = Synthetic
  source 1..17: mol_type = other RNA
tatcgtcgtaaaacagc

SEQ ID NO: 11984 - RNA, 17 nt, synthetic construct
  misc_feature 1..17: note = Synthetic
  source 1..17: mol_type = other RNA
caacacgctagcccagc

SEQ ID NO: 11985 - RNA, 17 nt, synthetic construct
  misc_feature 1..17: note = Synthetic
  source 1..17: mol_type = other RNA
gctcctggacaagcagc

SEQ ID NO: 11986 - RNA, 17 nt, synthetic construct
  misc_feature 1..17: note = Synthetic
  source 1..17: mol_type = other RNA
ggtcggccaggcgcagc

SEQ ID NO: 11987 - RNA, 17 nt, synthetic construct
  misc_feature 1..17: note = Synthetic
  source 1..17: mol_type = other RNA
acgcggtaaaacagagc

SEQ ID NO: 11988 - RNA, 17 nt, synthetic construct
  misc_feature 1..17: note = Synthetic
  source 1..17: mol_type = other RNA
atcccacctgaacgagc

SEQ ID NO: 11989 - RNA, 17 nt, synthetic construct
  misc_feature 1..17: note = Synthetic
  source 1..17: mol_type = other RNA
gctgctggtgtccgagc

SEQ ID NO: 11990 - RNA, 17 nt, synthetic construct
  misc_feature 1..17: note = Synthetic
  source 1..17: mol_type = other RNA
gcgcggctccggaccgc

SEQ ID NO: 11991 - RNA, 17 nt, synthetic construct
  misc_feature 1..17: note = Synthetic
  source 1..17: mol_type = other RNA
cccgcctactacgccgc

SEQ ID NO: 11992 - RNA, 17 nt, synthetic construct
  misc_feature 1..17: note = Synthetic
  source 1..17: mol_type = other RNA
cgcggcctcacggccgc

SEQ ID NO: 11993 - RNA, 17 nt, synthetic construct
  misc_feature 1..17: note = Synthetic
  source 1..17: mol_type = other RNA
aaggccatcggggccgc

SEQ ID NO: 11994 - RNA, 17 nt, synthetic construct
  misc_feature 1..17: note = Synthetic
  source 1..17: mol_type = other RNA
gccagccactcctccgc

SEQ ID NO: 11995 - RNA, 17 nt, synthetic construct
  misc_feature 1..17: note = Synthetic
  source 1..17: mol_type = other RNA
ttcctccgccgtagcgc

SEQ ID NO: 11996 - RNA, 17 nt, synthetic construct
  misc_feature 1..17: note = Synthetic
  source 1..17: mol_type = other RNA
agtacgtccacgcgcgc

SEQ ID NO: 11997 - RNA, 17 nt, synthetic construct
  misc_feature 1..17: note = Synthetic
  source 1..17: mol_type = other RNA
tgttggtgtacgcgcgc

SEQ ID NO: 11998 - RNA, 17 nt, synthetic construct
  misc_feature 1..17: note = Synthetic
  source 1..17: mol_type = other RNA
catggcccgccgcgcgc

SEQ ID NO: 11999 - RNA, 17 nt, synthetic construct
  misc_feature 1..17: note = Synthetic
  source 1..17: mol_type = other RNA
cgcccggggactcgcgc

SEQ ID NO: 12000 - RNA, 17 nt, synthetic construct
  misc_feature 1..17: note = Synthetic
  source 1..17: mol_type = other RNA
atcaccccgcgttgcgc

SEQ ID NO: 12001 - RNA, 17 nt, synthetic construct
  misc_feature 1..17: note = Synthetic
  source 1..17: mol_type = other RNA
cgcgtggacgtactcgc

SEQ ID NO: 12002 - RNA, 17 nt, synthetic construct
  misc_feature 1..17: note = Synthetic
  source 1..17: mol_type = other RNA
cgtctcctctacctcgc

SEQ ID NO: 12003 - RNA, 17 nt, synthetic construct
  misc_feature 1..17: note = Synthetic
  source 1..17: mol_type = other RNA
gttaaactcgacgtcgc

SEQ ID NO: 12004 - RNA, 17 nt, synthetic construct
  misc_feature 1..17: note = Synthetic
  source 1..17: mol_type = other RNA
gatgctggggtacaggc

SEQ ID NO: 12005 - RNA, 17 nt, synthetic construct
  misc_feature 1..17: note = Synthetic
  source 1..17: mol_type = other RNA
gtggcgcacctggaggc

SEQ ID NO: 12006 - RNA, 17 nt, synthetic construct
  misc_feature 1..17: note = Synthetic
  source 1..17: mol_type = other RNA
ccatcggggccgccggc

SEQ ID NO: 12007 - RNA, 17 nt, synthetic construct
  misc_feature 1..17: note = Synthetic
  source 1..17: mol_type = other RNA
cgggacctgcgcgcggc

SEQ ID NO: 12008 - RNA, 17 nt, synthetic construct
  misc_feature 1..17: note = Synthetic
  source 1..17: mol_type = other RNA
ggagacggtcgcgcggc

SEQ ID NO: 12009 - RNA, 17 nt, synthetic construct
  misc_feature 1..17: note = Synthetic
  source 1..17: mol_type = other RNA
tcctcccgggctgcggc

SEQ ID NO: 12010 - RNA, 17 nt, synthetic construct
  misc_feature 1..17: note = Synthetic
  source 1..17: mol_type = other RNA
cctcccggggggtcggc

SEQ ID NO: 12011 - RNA, 17 nt, synthetic construct
  misc_feature 1..17: note = Synthetic
  source 1..17: mol_type = other RNA
ggttcgtcaccttcggc

SEQ ID NO: 12012 - RNA, 17 nt, synthetic construct
  misc_feature 1..17: note = Synthetic
  source 1..17: mol_type = other RNA
gcttggccggggagggc

SEQ ID NO: 12013 - RNA, 17 nt, synthetic construct
  misc_feature 1..17: note = Synthetic
  source 1..17: mol_type = other RNA
gaaccacgggcgtgggc

SEQ ID NO: 12014 - RNA, 17 nt, synthetic construct
  misc_feature 1..17: note = Synthetic
  source 1..17: mol_type = other RNA
tcgtacttcttgatggc

SEQ ID NO: 12015 - RNA, 17 nt, synthetic construct
  misc_feature 1..17: note = Synthetic
  source 1..17: mol_type = other RNA
ccccgcggaggagtggc

SEQ ID NO: 12016 - RNA, 17 nt, synthetic construct
  misc_feature 1..17: note = Synthetic
  source 1..17: mol_type = other RNA
ctggcctttccggtggc

SEQ ID NO: 12017 - RNA, 17 nt, synthetic construct
  misc_feature 1..17: note = Synthetic
  source 1..17: mol_type = other RNA
gccgtcgcgcgcttggc

SEQ ID NO: 12018 - RNA, 17 nt, synthetic construct
  misc_feature 1..17: note = Synthetic
  source 1..17: mol_type = other RNA
tgggcaatggcgtatgc

SEQ ID NO: 12019 - RNA, 17 nt, synthetic construct
  misc_feature 1..17: note = Synthetic
  source 1..17: mol_type = other RNA
cacatgagcttgtatgc

SEQ ID NO: 12020 - RNA, 17 nt, synthetic construct
  misc_feature 1..17: note = Synthetic
  source 1..17: mol_type = other RNA
cctgcccgagggactgc

SEQ ID NO: 12021 - RNA, 17 nt, synthetic construct
  misc_feature 1..17: note = Synthetic
  source 1..17: mol_type = other RNA
catacaggattccctgc

SEQ ID NO: 12022 - RNA, 17 nt, synthetic construct
  misc_feature 1..17: note = Synthetic
  source 1..17: mol_type = other RNA
gtaccccacgtgcctgc

SEQ ID NO: 12023 - RNA, 17 nt, synthetic construct
  misc_feature 1..17: note = Synthetic
  source 1..17: mol_type = other RNA
cctcagcatcctcctgc

SEQ ID NO: 12024 - RNA, 17 nt, synthetic construct
  misc_feature 1..17: note = Synthetic
  source 1..17: mol_type = other RNA
caagccccgcaagctgc

SEQ ID NO: 12025 - RNA, 17 nt, synthetic construct
  misc_feature 1..17: note = Synthetic
  source 1..17: mol_type = other RNA
taaagacgcggatctgc

SEQ ID NO: 12026 - RNA, 17 nt, synthetic construct
  misc_feature 1..17: note = Synthetic
  source 1..17: mol_type = other RNA
gaagggctttattctgc

SEQ ID NO: 12027 - RNA, 17 nt, synthetic construct
  misc_feature 1..17: note = Synthetic
  source 1..17: mol_type = other RNA
ccgtcgcggcaacgtgc

SEQ ID NO: 12028 - RNA, 17 nt, synthetic construct
  misc_feature 1..17: note = Synthetic
  source 1..17: mol_type = other RNA
ttcggggcggtgggtgc

SEQ ID NO: 12029 - RNA, 17 nt, synthetic construct
  misc_feature 1..17: note = Synthetic
  source 1..17: mol_type = other RNA
gccgtcgtagatggtgc

SEQ ID NO: 12030 - RNA, 17 nt, synthetic construct
  misc_feature 1..17: note = Synthetic
  source 1..17: mol_type = other RNA
ggacaccagcagcttgc

SEQ ID NO: 12031 - RNA, 17 nt, synthetic construct
  misc_feature 1..17: note = Synthetic
  source 1..17: mol_type = other RNA
cgactggcccttcttgc

SEQ ID NO: 12032 - RNA, 17 nt, synthetic construct
  misc_feature 1..17: note = Synthetic
  source 1..17: mol_type = other RNA
atgtcccgaaggccatc

SEQ ID NO: 12033 - RNA, 17 nt, synthetic construct
  misc_feature 1..17: note = Synthetic
  source 1..17: mol_type = other RNA
cgatcacgtacgggatc

SEQ ID NO: 12034 - RNA, 17 nt, synthetic construct
  misc_feature 1..17: note = Synthetic
  source 1..17: mol_type = other RNA
catcaagggcgtggatc

SEQ ID NO: 12035 - RNA, 17 nt, synthetic construct
  misc_feature 1..17: note = Synthetic
  source 1..17: mol_type = other RNA
agagcagacaggatatc

SEQ ID NO: 12036 - RNA, 17 nt, synthetic construct
  misc_feature 1..17: note = Synthetic
  source 1..17: mol_type = other RNA
tacccggtcacgaactc

SEQ ID NO: 12037 - RNA, 17 nt, synthetic construct
  misc_feature 1..17: note = Synthetic
  source 1..17: mol_type = other RNA
gtctcccgcgcgccctc

SEQ ID NO: 12038 - RNA, 17 nt, synthetic construct
  misc_feature 1..17: note = Synthetic
  source 1..17: mol_type = other RNA
aacgcctgcagtccctc

SEQ ID NO: 12039 - RNA, 17 nt, synthetic construct
  misc_feature 1..17: note = Synthetic
  source 1..17: mol_type = other RNA
aggagcacggcctcctc

SEQ ID NO: 12040 - RNA, 17 nt, synthetic construct
  misc_feature 1..17: note = Synthetic
  source 1..17: mol_type = other RNA
tcctccccctcctcctc

SEQ ID NO: 12041 - RNA, 17 nt, synthetic construct
  misc_feature 1..17: note = Synthetic
  source 1..17: mol_type = other RNA
tggatgaccaggtcctc

SEQ ID NO: 12042 - RNA, 17 nt, synthetic construct
  misc_feature 1..17: note = Synthetic
  source 1..17: mol_type = other RNA
ggatgtcgcgatagctc

SEQ ID NO: 12043 - RNA, 17 nt, synthetic construct
  misc_feature 1..17: note = Synthetic
  source 1..17: mol_type = other RNA
acgtggccgcgcggctc

SEQ ID NO: 12044 - RNA, 17 nt, synthetic construct
  misc_feature 1..17: note = Synthetic
  source 1..17: mol_type = other RNA
gcttctggaagtggctc

SEQ ID NO: 12045 - RNA, 17 nt, synthetic construct
  misc_feature 1..17: note = Synthetic
  source 1..17: mol_type = other RNA
tcctggatgtccctctc

SEQ ID NO: 12046 - RNA, 17 nt, synthetic construct
  misc_feature 1..17: note = Synthetic
  source 1..17: mol_type = other RNA
ggtggccttccggagtc

SEQ ID NO: 12047 - RNA, 17 nt, synthetic construct
  misc_feature 1..17: note = Synthetic
  source 1..17: mol_type = other RNA
gcttgtaatacaccgtc

SEQ ID NO: 12048 - RNA, 17 nt, synthetic construct
  misc_feature 1..17: note = Synthetic
  source 1..17: mol_type = other RNA
ggaggcgcccaagcgtc

SEQ ID NO: 12049 - RNA, 17 nt, synthetic construct
  misc_feature 1..17: note = Synthetic
  source 1..17: mol_type = other RNA
cctctacctcgcgggtc

SEQ ID NO: 12050 - RNA, 17 nt, synthetic construct
  misc_feature 1..17: note = Synthetic
  source 1..17: mol_type = other RNA
aatcgcccctgggtgtc

SEQ ID NO: 12051 - RNA, 17 nt, synthetic construct
  misc_feature 1..17: note = Synthetic
  source 1..17: mol_type = other RNA
gtccttgaccccacttc

SEQ ID NO: 12052 - RNA, 17 nt, synthetic construct
  misc_feature 1..17: note = Synthetic
  source 1..17: mol_type = other RNA
gcagaataaagcccttc

SEQ ID NO: 12053 - RNA, 17 nt, synthetic construct
  misc_feature 1..17: note = Synthetic
  source 1..17: mol_type = other RNA
cggccccgatggccttc

SEQ ID NO: 12054 - RNA, 17 nt, synthetic construct
  misc_feature 1..17: note = Synthetic
  source 1..17: mol_type = other RNA
ccttcttcttgtccttc

SEQ ID NO: 12055 - RNA, 17 nt, synthetic construct
  misc_feature 1..17: note = Synthetic
  source 1..17: mol_type = other RNA
agggactgcaggcgttc

SEQ ID NO: 12056 - RNA, 17 nt, synthetic construct
  misc_feature 1..17: note = Synthetic
  source 1..17: mol_type = other RNA
tggccgccagctcgttc

SEQ ID NO: 12057 - RNA, 17 nt, synthetic construct
  misc_feature 1..17: note = Synthetic
  source 1..17: mol_type = other RNA
tccggaccgcagggttc

SEQ ID NO: 12058 - RNA, 17 nt, synthetic construct
  misc_feature 1..17: note = Synthetic
  source 1..17: mol_type = other RNA
agtaatagtccgtgttc

SEQ ID NO: 12059 - RNA, 17 nt, synthetic construct
  misc_feature 1..17: note = Synthetic
  source 1..17: mol_type = other RNA
gggctagcgtgttgttc

SEQ ID NO: 12060 - RNA, 17 nt, synthetic construct
  misc_feature 1..17: note = Synthetic
  source 1..17: mol_type = other RNA
ggacgagctggcctttc

SEQ ID NO: 12061 - RNA, 17 nt, synthetic construct
  misc_feature 1..17: note = Synthetic
  source 1..17: mol_type = other RNA
cgcgtctacgtccgaag

SEQ ID NO: 12062 - RNA, 17 nt, synthetic construct
  misc_feature 1..17: note = Synthetic
  source 1..17: mol_type = other RNA
ccacctccgcctcgaag

SEQ ID NO: 12063 - RNA, 17 nt, synthetic construct
  misc_feature 1..17: note = Synthetic
  source 1..17: mol_type = other RNA
tgctgcgcttctggaag

SEQ ID NO: 12064 - RNA, 17 nt, synthetic construct
  misc_feature 1..17: note = Synthetic
  source 1..17: mol_type = other RNA
ggcacgtggggtaccag

SEQ ID NO: 12065 - RNA, 17 nt, synthetic construct
  misc_feature 1..17: note = Synthetic
  source 1..17: mol_type = other RNA
aacgagctggcggccag

SEQ ID NO: 12066 - RNA, 17 nt, synthetic construct
  misc_feature 1..17: note = Synthetic
  source 1..17: mol_type = other RNA
cctgagggccgacgcag

SEQ ID NO: 12067 - RNA, 17 nt, synthetic construct
  misc_feature 1..17: note = Synthetic
  source 1..17: mol_type = other RNA
tgcagtccctcgggcag

SEQ ID NO: 12068 - RNA, 17 nt, synthetic construct
  misc_feature 1..17: note = Synthetic
  source 1..17: mol_type = other RNA
tctggggaatccgcgag

SEQ ID NO: 12069 - RNA, 17 nt, synthetic construct
  misc_feature 1..17: note = Synthetic
  source 1..17: mol_type = other RNA
cgataccgtctccggag

SEQ ID NO: 12070 - RNA, 17 nt, synthetic construct
  misc_feature 1..17: note = Synthetic
  source 1..17: mol_type = other RNA
acccaggggcgatttag

SEQ ID NO: 12071 - RNA, 17 nt, synthetic construct
  misc_feature 1..17: note = Synthetic
  source 1..17: mol_type = other RNA
ggggcgctcggctaacg

SEQ ID NO: 12072 - RNA, 17 nt, synthetic construct
  misc_feature 1..17: note = Synthetic
  source 1..17: mol_type = other RNA
agtcgaacaccaccacg

SEQ ID NO: 12073 - RNA, 17 nt, synthetic construct
  misc_feature 1..17: note = Synthetic
  source 1..17: mol_type = other RNA
ttcacgtttacggcacg

SEQ ID NO: 12074 - RNA, 17 nt, synthetic construct
  misc_feature 1..17: note = Synthetic
  source 1..17: mol_type = other RNA
gcaggcacgtaaagacg

SEQ ID NO: 12075 - RNA, 17 nt, synthetic construct
  misc_feature 1..17: note = Synthetic
  source 1..17: mol_type = other RNA
cgcttcggacgtagacg

SEQ ID NO: 12076 - RNA, 17 nt, synthetic construct
  misc_feature 1..17: note = Synthetic
  source 1..17: mol_type = other RNA
acgccatcacaccgacg

SEQ ID NO: 12077 - RNA, 17 nt, synthetic construct
  misc_feature 1..17: note = Synthetic
  source 1..17: mol_type = other RNA
catgcgcatcatctacg

SEQ ID NO: 12078 - RNA, 17 nt, synthetic construct
  misc_feature 1..17: note = Synthetic
  source 1..17: mol_type = other RNA
catcggcgtcatctacg

SEQ ID NO: 12079 - RNA, 17 nt, synthetic construct
  misc_feature 1..17: note = Synthetic
  source 1..17: mol_type = other RNA
gccgatgggcgtctacg

SEQ ID NO: 12080 - RNA, 17 nt, synthetic construct
  misc_feature 1..17: note = Synthetic
  source 1..17: mol_type = other RNA
ggccatcaagaagtacg

SEQ ID NO: 12081 - RNA, 17 nt, synthetic construct
  misc_feature 1..17: note = Synthetic
  source 1..17: mol_type = other RNA
cgaaggtgacgaacccg

SEQ ID NO: 12082 - RNA, 17 nt, synthetic construct
  misc_feature 1..17: note = Synthetic
  source 1..17: mol_type = other RNA
gtttcacgtgaaccccg

SEQ ID NO: 12083 - RNA, 17 nt, synthetic construct
  misc_feature 1..17: note = Synthetic
  source 1..17: mol_type = other RNA
gggcctgcccacgcccg

SEQ ID NO: 12084 - RNA, 17 nt, synthetic construct
  misc_feature 1..17: note = Synthetic
  source 1..17: mol_type = other RNA
gcatggaatagggcccg

SEQ ID NO: 12085 - RNA, 17 nt, synthetic construct
  misc_feature 1..17: note = Synthetic
  source 1..17: mol_type = other RNA
ggcgacggcgtctcccg

SEQ ID NO: 12086 - RNA, 17 nt, synthetic construct
  misc_feature 1..17: note = Synthetic
  source 1..17: mol_type = other RNA
ctacaagctcaacgccg

SEQ ID NO: 12087 - RNA, 17 nt, synthetic construct
  misc_feature 1..17: note = Synthetic
  source 1..17: mol_type = other RNA
tgttcagggcgacgccg

SEQ ID NO: 12088 - RNA, 17 nt, synthetic construct
  misc_feature 1..17: note = Synthetic
  source 1..17: mol_type = other RNA
cggcggccgtgaggccg

SEQ ID NO: 12089 - RNA, 17 nt, synthetic construct
  misc_feature 1..17: note = Synthetic
  source 1..17: mol_type = other RNA
ggccgcatgaacggccg

SEQ ID NO: 12090 - RNA, 17 nt, synthetic construct
  misc_feature 1..17: note = Synthetic
  source 1..17: mol_type = other RNA
cgccgggctgacggccg

SEQ ID NO: 12091 - RNA, 17 nt, synthetic construct
  misc_feature 1..17: note = Synthetic
  source 1..17: mol_type = other RNA
ggactcgcgcagggccg

SEQ ID NO: 12092 - RNA, 17 nt, synthetic construct
  misc_feature 1..17: note = Synthetic
  source 1..17: mol_type = other RNA
ctgcgagcgcatggccg

SEQ ID NO: 12093 - RNA, 17 nt, synthetic construct
  misc_feature 1..17: note = Synthetic
  source 1..17: mol_type = other RNA
ggtgtccgagctggccg

SEQ ID NO: 12094 - RNA, 17 nt, synthetic construct
  misc_feature 1..17: note = Synthetic
  source 1..17: mol_type = other RNA
atctttgtgctgtgccg

SEQ ID NO: 12095 - RNA, 17 nt, synthetic construct
  misc_feature 1..17: note = Synthetic
  source 1..17: mol_type = other RNA
gttccgcggcatctccg

SEQ ID NO: 12096 - RNA, 17 nt, synthetic construct
  misc_feature 1..17: note = Synthetic
  source 1..17: mol_type = other RNA
ccgggcgcgtcgttccg

SEQ ID NO: 12097 - RNA, 17 nt, synthetic construct
  misc_feature 1..17: note = Synthetic
  source 1..17: mol_type = other RNA
cgcggtaaaacagagcg

SEQ ID NO: 12098 - RNA, 17 nt, synthetic construct
  misc_feature 1..17: note = Synthetic
  source 1..17: mol_type = other RNA
cgtggcccagacccgcg

SEQ ID NO: 12099 - RNA, 17 nt, synthetic construct
  misc_feature 1..17: note = Synthetic
  source 1..17: mol_type = other RNA
tgcggtccggagccgcg

SEQ ID NO: 12100 - RNA, 17 nt, synthetic construct
  misc_feature 1..17: note = Synthetic
  source 1..17: mol_type = other RNA
cggacgacgtggccgcg

SEQ ID NO: 12101 - RNA, 17 nt, synthetic construct
  misc_feature 1..17: note = Synthetic
  source 1..17: mol_type = other RNA
ccagccactcctccgcg

SEQ ID NO: 12102 - RNA, 17 nt, synthetic construct
  misc_feature 1..17: note = Synthetic
  source 1..17: mol_type = other RNA
ttgttggtgtacgcgcg

SEQ ID NO: 12103 - RNA, 17 nt, synthetic construct
  misc_feature 1..17: note = Synthetic
  source 1..17: mol_type = other RNA
tggacgggacctgcgcg

SEQ ID NO: 12104 - RNA, 17 nt, synthetic construct
  misc_feature 1..17: note = Synthetic
  source 1..17: mol_type = other RNA
tagaggagacggtcgcg

SEQ ID NO: 12105 - RNA, 17 nt, synthetic construct
  misc_feature 1..17: note = Synthetic
  source 1..17: mol_type = other RNA
cggcggcgtagtaggcg

SEQ ID NO: 12106 - RNA, 17 nt, synthetic construct
  misc_feature 1..17: note = Synthetic
  source 1..17: mol_type = other RNA
gatgctcatcaagggcg

SEQ ID NO: 12107 - RNA, 17 nt, synthetic construct
  misc_feature 1..17: note = Synthetic
  source 1..17: mol_type = other RNA
ttccagaaccacgggcg

SEQ ID NO: 12108 - RNA, 17 nt, synthetic construct
  misc_feature 1..17: note = Synthetic
  source 1..17: mol_type = other RNA
agagatctcgtggggcg

SEQ ID NO: 12109 - RNA, 17 nt, synthetic construct
  misc_feature 1..17: note = Synthetic
  source 1..17: mol_type = other RNA
gacaccagcagcttgcg

SEQ ID NO: 12110 - RNA, 17 nt, synthetic construct
  misc_feature 1..17: note = Synthetic
  source 1..17: mol_type = other RNA
gatcaccccgcgttgcg

SEQ ID NO: 12111 - RNA, 17 nt, synthetic construct
  misc_feature 1..17: note = Synthetic
  source 1..17: mol_type = other RNA
tgtcccgaaggccatcg

SEQ ID NO: 12112 - RNA, 17 nt, synthetic construct
  misc_feature 1..17: note = Synthetic
  source 1..17: mol_type = other RNA
ggactacctggagatcg

SEQ ID NO: 12113 - RNA, 17 nt, synthetic construct
  misc_feature 1..17: note = Synthetic
  source 1..17: mol_type = other RNA
gatcccgtacgtgatcg

SEQ ID NO: 12114 - RNA, 17 nt, synthetic construct
  misc_feature 1..17: note = Synthetic
  source 1..17: mol_type = other RNA
acccggtcacgaactcg

SEQ ID NO: 12115 - RNA, 17 nt, synthetic construct
  misc_feature 1..17: note = Synthetic
  source 1..17: mol_type = other RNA
gcgcgtggacgtactcg

SEQ ID NO: 12116 - RNA, 17 nt, synthetic construct
  misc_feature 1..17: note = Synthetic
  source 1..17: mol_type = other RNA
ccgtctcctctacctcg

SEQ ID NO: 12117 - RNA, 17 nt, synthetic construct
  misc_feature 1..17: note = Synthetic
  source 1..17: mol_type = other RNA
ggagcacggcctcctcg

SEQ ID NO: 12118 - RNA, 17 nt, synthetic construct
  misc_feature 1..17: note = Synthetic
  source 1..17: mol_type = other RNA
gaaagcagatccgctcg

SEQ ID NO: 12119 - RNA, 17 nt, synthetic construct
  misc_feature 1..17: note = Synthetic
  source 1..17: mol_type = other RNA
tcgcgagcagcatctcg

SEQ ID NO: 12120 - RNA, 17 nt, synthetic construct
  misc_feature 1..17: note = Synthetic
  source 1..17: mol_type = other RNA
gatggtcgtcaccgtcg

SEQ ID NO: 12121 - RNA, 17 nt, synthetic construct
  misc_feature 1..17: note = Synthetic
  source 1..17: mol_type = other RNA
ctccgcggaccacttcg

SEQ ID NO: 12122 - RNA, 17 nt, synthetic construct
  misc_feature 1..17: note = Synthetic
  source 1..17: mol_type = other RNA
gggactgcaggcgttcg

SEQ ID NO: 12123 - RNA, 17 nt, synthetic construct
  misc_feature 1..17: note = Synthetic
  source 1..17: mol_type = other RNA
ccggaccgcagggttcg

SEQ ID NO: 12124 - RNA, 17 nt, synthetic construct
  misc_feature 1..17: note = Synthetic
  source 1..17: mol_type = other RNA
gcacgtggggtaccagg

SEQ ID NO: 12125 - RNA, 17 nt, synthetic construct
  misc_feature 1..17: note = Synthetic
  source 1..17: mol_type = other RNA
ggccgtacccgtccagg

SEQ ID NO: 12126 - RNA, 17 nt, synthetic construct
  misc_feature 1..17: note = Synthetic
  source 1..17: mol_type = other RNA
cgagccagtcccgcagg

SEQ ID NO: 12127 - RNA, 17 nt, synthetic construct
  misc_feature 1..17: note = Synthetic
  source 1..17: mol_type = other RNA
tgtaatacaccgtcagg

SEQ ID NO: 12128 - RNA, 17 nt, synthetic construct
  misc_feature 1..17: note = Synthetic
  source 1..17: mol_type = other RNA
caacctggccatcgagg

SEQ ID NO: 12129 - RNA, 17 nt, synthetic construct
  misc_feature 1..17: note = Synthetic
  source 1..17: mol_type = other RNA
ttacatgaacaaggagg

SEQ ID NO: 12130 - RNA, 17 nt, synthetic construct
  misc_feature 1..17: note = Synthetic
  source 1..17: mol_type = other RNA
ggccgatttcccggagg

SEQ ID NO: 12131 - RNA, 17 nt, synthetic construct
  misc_feature 1..17: note = Synthetic
  source 1..17: mol_type = other RNA
ccacttcgaggcggagg

SEQ ID NO: 12132 - RNA, 17 nt, synthetic construct
  misc_feature 1..17: note = Synthetic
  source 1..17: mol_type = other RNA
agtggcgcacctggagg

SEQ ID NO: 12133 - RNA, 17 nt, synthetic construct
  misc_feature 1..17: note = Synthetic
  source 1..17: mol_type = other RNA
gcaggaggatgctgagg

SEQ ID NO: 12134 - RNA, 17 nt, synthetic construct
  misc_feature 1..17: note = Synthetic
  source 1..17: mol_type = other RNA
atcggcgtcatctacgg

SEQ ID NO: 12135 - RNA, 17 nt, synthetic construct
  misc_feature 1..17: note = Synthetic
  source 1..17: mol_type = other RNA
cgagtttaactgtacgg

SEQ ID NO: 12136 - RNA, 17 nt, synthetic construct
  misc_feature 1..17: note = Synthetic
  source 1..17: mol_type = other RNA
cgtgaacggccacccgg

SEQ ID NO: 12137 - RNA, 17 nt, synthetic construct
  misc_feature 1..17: note = Synthetic
  source 1..17: mol_type = other RNA
ggtggccgggcacccgg

SEQ ID NO: 12138 - RNA, 17 nt, synthetic construct
  misc_feature 1..17: note = Synthetic
  source 1..17: mol_type = other RNA
cacggccgtcagcccgg

SEQ ID NO: 12139 - RNA, 17 nt, synthetic construct
  misc_feature 1..17: note = Synthetic
  source 1..17: mol_type = other RNA
catggaatagggcccgg

SEQ ID NO: 12140 - RNA, 17 nt, synthetic construct
  misc_feature 1..17: note = Synthetic
  source 1..17: mol_type = other RNA
gcgttgcgcgggcccgg

SEQ ID NO: 12141 - RNA, 17 nt, synthetic construct
  misc_feature 1..17: note = Synthetic
  source 1..17: mol_type = other RNA
ttggacgcgcctcccgg

SEQ ID NO: 12142 - RNA, 17 nt, synthetic construct
  misc_feature 1..17: note = Synthetic
  source 1..17: mol_type = other RNA
gcgacggcgtctcccgg

SEQ ID NO: 12143 - RNA, 17 nt, synthetic construct
  misc_feature 1..17: note = Synthetic
  source 1..17: mol_type = other RNA
cctggccgatttcccgg

SEQ ID NO: 12144 - RNA, 17 nt, synthetic construct
  misc_feature 1..17: note = Synthetic
  source 1..17: mol_type = other RNA
cacgctagcccagccgg

SEQ ID NO: 12145 - RNA, 17 nt, synthetic construct
  misc_feature 1..17: note = Synthetic
  source 1..17: mol_type = other RNA
ccccacgtgcctgccgg

SEQ ID NO: 12146 - RNA, 17 nt, synthetic construct
  misc_feature 1..17: note = Synthetic
  source 1..17: mol_type = other RNA
gcggccacgtcgtccgg

SEQ ID NO: 12147 - RNA, 17 nt, synthetic construct
  misc_feature 1..17: note = Synthetic
  source 1..17: mol_type = other RNA
cgagctggcctttccgg

SEQ ID NO: 12148 - RNA, 17 nt, synthetic construct
  misc_feature 1..17: note = Synthetic
  source 1..17: mol_type = other RNA
gcgctcggctaacgcgg

SEQ ID NO: 12149 - RNA, 17 nt, synthetic construct
  misc_feature 1..17: note = Synthetic
  source 1..17: mol_type = other RNA
acgggacctgcgcgcgg

SEQ ID NO: 12150 - RNA, 17 nt, synthetic construct
  misc_feature 1..17: note = Synthetic
  source 1..17: mol_type = other RNA
cggcgtctagctcgcgg

SEQ ID NO: 12151 - RNA, 17 nt, synthetic construct
  misc_feature 1..17: note = Synthetic
  source 1..17: mol_type = other RNA
ggaccacttcgaggcgg

SEQ ID NO: 12152 - RNA, 17 nt, synthetic construct
  misc_feature 1..17: note = Synthetic
  source 1..17: mol_type = other RNA
gacgtgctccagggcgg

SEQ ID NO: 12153 - RNA, 17 nt, synthetic construct
  misc_feature 1..17: note = Synthetic
  source 1..17: mol_type = other RNA
cgcagggttcggggcgg

SEQ ID NO: 12154 - RNA, 17 nt, synthetic construct
  misc_feature 1..17: note = Synthetic
  source 1..17: mol_type = other RNA
ctcgtcccctggggcgg

SEQ ID NO: 12155 - RNA, 17 nt, synthetic construct
  misc_feature 1..17: note = Synthetic
  source 1..17: mol_type = other RNA
gtgtctgctcagttcgg

SEQ ID NO: 12156 - RNA, 17 nt, synthetic construct
  misc_feature 1..17: note = Synthetic
  source 1..17: mol_type = other RNA
gaggacgtgctccaggg

SEQ ID NO: 12157 - RNA, 17 nt, synthetic construct
  misc_feature 1..17: note = Synthetic
  source 1..17: mol_type = other RNA
aacctggccatcgaggg

SEQ ID NO: 12158 - RNA, 17 nt, synthetic construct
  misc_feature 1..17: note = Synthetic
  source 1..17: mol_type = other RNA
gtctagctcgcggaggg

SEQ ID NO: 12159 - RNA, 17 nt, synthetic construct
  misc_feature 1..17: note = Synthetic
  source 1..17: mol_type = other RNA
gtccaggatgaaccggg

SEQ ID NO: 12160 - RNA, 17 nt, synthetic construct
  misc_feature 1..17: note = Synthetic
  source 1..17: mol_type = other RNA
tccggaaggccaccggg

SEQ ID NO: 12161 - RNA, 17 nt, synthetic construct
  misc_feature 1..17: note = Synthetic
  source 1..17: mol_type = other RNA
cctgccgaccccccggg

SEQ ID NO: 12162 - RNA, 17 nt, synthetic construct
  misc_feature 1..17: note = Synthetic
  source 1..17: mol_type = other RNA
tccggccgcagcccggg

SEQ ID NO: 12163 - RNA, 17 nt, synthetic construct
  misc_feature 1..17: note = Synthetic
  source 1..17: mol_type = other RNA
tggacgcgcctcccggg

SEQ ID NO: 12164 - RNA, 17 nt, synthetic construct
  misc_feature 1..17: note = Synthetic
  source 1..17: mol_type = other RNA
cggccacgtcgtccggg

SEQ ID NO: 12165 - RNA, 17 nt, synthetic construct
  misc_feature 1..17: note = Synthetic
  source 1..17: mol_type = other RNA
ggggcgcttggccgggg

SEQ ID NO: 12166 - RNA, 17 nt, synthetic construct
  misc_feature 1..17: note = Synthetic
  source 1..17: mol_type = other RNA
tcaggtgggattcgggg

SEQ ID NO: 12167 - RNA, 17 nt, synthetic construct
  misc_feature 1..17: note = Synthetic
  source 1..17: mol_type = other RNA
gaccgcagggttcgggg

SEQ ID NO: 12168 - RNA, 17 nt, synthetic construct
  misc_feature 1..17: note = Synthetic
  source 1..17: mol_type = other RNA
taggggcgccggggggg

SEQ ID NO: 12169 - RNA, 17 nt, synthetic construct
  misc_feature 1..17: note = Synthetic
  source 1..17: mol_type = other RNA
atgcaaggcgggggggg

SEQ ID NO: 12170 - RNA, 17 nt, synthetic construct
  misc_feature 1..17: note = Synthetic
  source 1..17: mol_type = other RNA
ctcccacctgttggggg

SEQ ID NO: 12171 - RNA, 17 nt, synthetic construct
  misc_feature 1..17: note = Synthetic
  source 1..17: mol_type = other RNA
gggctcgtcccctgggg

SEQ ID NO: 12172 - RNA, 17 nt, synthetic construct
  misc_feature 1..17: note = Synthetic
  source 1..17: mol_type = other RNA
tggagatcgaggtgggg

SEQ ID NO: 12173 - RNA, 17 nt, synthetic construct
  misc_feature 1..17: note = Synthetic
  source 1..17: mol_type = other RNA
cactcgagtttgatggg

SEQ ID NO: 12174 - RNA, 17 nt, synthetic construct
  misc_feature 1..17: note = Synthetic
  source 1..17: mol_type = other RNA
cgtccacgcgcgctggg

SEQ ID NO: 12175 - RNA, 17 nt, synthetic construct
  misc_feature 1..17: note = Synthetic
  source 1..17: mol_type = other RNA
ctggagatcgaggtggg

SEQ ID NO: 12176 - RNA, 17 nt, synthetic construct
  misc_feature 1..17: note = Synthetic
  source 1..17: mol_type = other RNA
acacacgaccttgatgg

SEQ ID NO: 12177 - RNA, 17 nt, synthetic construct
  misc_feature 1..17: note = Synthetic
  source 1..17: mol_type = other RNA
gcactcgagtttgatgg

SEQ ID NO: 12178 - RNA, 17 nt, synthetic construct
  misc_feature 1..17: note = Synthetic
  source 1..17: mol_type = other RNA
cgcagtggcgcacctgg

SEQ ID NO: 12179 - RNA, 17 nt, synthetic construct
  misc_feature 1..17: note = Synthetic
  source 1..17: mol_type = other RNA
gtcgaccagggccctgg

SEQ ID NO: 12180 - RNA, 17 nt, synthetic construct
  misc_feature 1..17: note = Synthetic
  source 1..17: mol_type = other RNA
ccacctgaacgagctgg

SEQ ID NO: 12181 - RNA, 17 nt, synthetic construct
  misc_feature 1..17: note = Synthetic
  source 1..17: mol_type = other RNA
acaggattccctgctgg

SEQ ID NO: 12182 - RNA, 17 nt, synthetic construct
  misc_feature 1..17: note = Synthetic
  source 1..17: mol_type = other RNA
tcacgtgaaccccgtgg

SEQ ID NO: 12183 - RNA, 17 nt, synthetic construct
  misc_feature 1..17: note = Synthetic
  source 1..17: mol_type = other RNA
gtgctccagggcggtgg

SEQ ID NO: 12184 - RNA, 17 nt, synthetic construct
  misc_feature 1..17: note = Synthetic
  source 1..17: mol_type = other RNA
caggatgaaccgggtgg

SEQ ID NO: 12185 - RNA, 17 nt, synthetic construct
  misc_feature 1..17: note = Synthetic
  source 1..17: mol_type = other RNA
ggccgtcgcgcgcttgg

SEQ ID NO: 12186 - RNA, 17 nt, synthetic construct
  misc_feature 1..17: note = Synthetic
  source 1..17: mol_type = other RNA
cttctcccacctgttgg

SEQ ID NO: 12187 - RNA, 17 nt, synthetic construct
  misc_feature 1..17: note = Synthetic
  source 1..17: mol_type = other RNA
cgccccggccgttcatg

SEQ ID NO: 12188 - RNA, 17 nt, synthetic construct
  misc_feature 1..17: note = Synthetic
  source 1..17: mol_type = other RNA
gccgagagctccagatg

SEQ ID NO: 12189 - RNA, 17 nt, synthetic construct
  misc_feature 1..17: note = Synthetic
  source 1..17: mol_type = other RNA
acagcgcgcgcgagatg

SEQ ID NO: 12190 - RNA, 17 nt, synthetic construct
  misc_feature 1..17: note = Synthetic
  source 1..17: mol_type = other RNA
caccgccccgaaccctg

SEQ ID NO: 12191 - RNA, 17 nt, synthetic construct
  misc_feature 1..17: note = Synthetic
  source 1..17: mol_type = other RNA
ggcgggctcgtcccctg

SEQ ID NO: 12192 - RNA, 17 nt, synthetic construct
  misc_feature 1..17: note = Synthetic
  source 1..17: mol_type = other RNA
tcagcacgctctccctg

SEQ ID NO: 12193 - RNA, 17 nt, synthetic construct
  misc_feature 1..17: note = Synthetic
  source 1..17: mol_type = other RNA
ctcgtcctcccgggctg

SEQ ID NO: 12194 - RNA, 17 nt, synthetic construct
  misc_feature 1..17: note = Synthetic
  source 1..17: mol_type = other RNA
gggcctggatgatgctg

SEQ ID NO: 12195 - RNA, 17 nt, synthetic construct
  misc_feature 1..17: note = Synthetic
  source 1..17: mol_type = other RNA
ggtttattcccgaagtg

SEQ ID NO: 12196 - RNA, 17 nt, synthetic construct
  misc_feature 1..17: note = Synthetic
  source 1..17: mol_type = other RNA
cgtgaaacccggaagtg

SEQ ID NO: 12197 - RNA, 17 nt, synthetic construct
  misc_feature 1..17: note = Synthetic
  source 1..17: mol_type = other RNA
ccgccggcaggcacgtg

SEQ ID NO: 12198 - RNA, 17 nt, synthetic construct
  misc_feature 1..17: note = Synthetic
  source 1..17: mol_type = other RNA
tcagcccggcggccgtg

SEQ ID NO: 12199 - RNA, 17 nt, synthetic construct
  misc_feature 1..17: note = Synthetic
  source 1..17: mol_type = other RNA
ctcgcagagatctcgtg

SEQ ID NO: 12200 - RNA, 17 nt, synthetic construct
  misc_feature 1..17: note = Synthetic
  source 1..17: mol_type = other RNA
ccagggccctggaggtg

SEQ ID NO: 12201 - RNA, 17 nt, synthetic construct
  misc_feature 1..17: note = Synthetic
  source 1..17: mol_type = other RNA
tgctcagttcggcggtg

SEQ ID NO: 12202 - RNA, 17 nt, synthetic construct
  misc_feature 1..17: note = Synthetic
  source 1..17: mol_type = other RNA
caagaagtacgagggtg

SEQ ID NO: 12203 - RNA, 17 nt, synthetic construct
  misc_feature 1..17: note = Synthetic
  source 1..17: mol_type = other RNA
ggccgtcgtagatggtg

SEQ ID NO: 12204 - RNA, 17 nt, synthetic construct
  misc_feature 1..17: note = Synthetic
  source 1..17: mol_type = other RNA
tgctgaagcacaggttg

SEQ ID NO: 12205 - RNA, 17 nt, synthetic construct
  misc_feature 1..17: note = Synthetic
  source 1..17: mol_type = other RNA
acttctcccacctgttg

SEQ ID NO: 12206 - RNA, 17 nt, synthetic construct
  misc_feature 1..17: note = Synthetic
  source 1..17: mol_type = other RNA
ggccgcctccgggaaat

SEQ ID NO: 12207 - RNA, 17 nt, synthetic construct
  misc_feature 1..17: note = Synthetic
  source 1..17: mol_type = other RNA
gatgatgcgcatggaat

SEQ ID NO: 12208 - RNA, 17 nt, synthetic construct
  misc_feature 1..17: note = Synthetic
  source 1..17: mol_type = other RNA
tttcgcgtgtgggacat

SEQ ID NO: 12209 - RNA, 17 nt, synthetic construct
  misc_feature 1..17: note = Synthetic
  source 1..17: mol_type = other RNA
gccaagaaaaagtacat

SEQ ID NO: 12210 - RNA, 17 nt, synthetic construct
  misc_feature 1..17: note = Synthetic
  source 1..17: mol_type = other RNA
gcgacggtgacgaccat

SEQ ID NO: 12211 - RNA, 17 nt, synthetic construct
  misc_feature 1..17: note = Synthetic
  source 1..17: mol_type = other RNA
tcctcgtagacgcccat

SEQ ID NO: 12212 - RNA, 17 nt, synthetic construct
  misc_feature 1..17: note = Synthetic
  source 1..17: mol_type = other RNA
ggccgagagctccagat

SEQ ID NO: 12213 - RNA, 17 nt, synthetic construct
  misc_feature 1..17: note = Synthetic
  source 1..17: mol_type = other RNA
gtcggtgatgcgccgat

SEQ ID NO: 12214 - RNA, 17 nt, synthetic construct
  misc_feature 1..17: note = Synthetic
  source 1..17: mol_type = other RNA
gcgcaacgcggggtgat

SEQ ID NO: 12215 - RNA, 17 nt, synthetic construct
  misc_feature 1..17: note = Synthetic
  source 1..17: mol_type = other RNA
caaggtcgtgtgtaact

SEQ ID NO: 12216 - RNA, 17 nt, synthetic construct
  misc_feature 1..17: note = Synthetic
  source 1..17: mol_type = other RNA
gcccctaaatcgcccct

SEQ ID NO: 12217 - RNA, 17 nt, synthetic construct
  misc_feature 1..17: note = Synthetic
  source 1..17: mol_type = other RNA
gggcgggctcgtcccct

SEQ ID NO: 12218 - RNA, 17 nt, synthetic construct
  misc_feature 1..17: note = Synthetic
  source 1..17: mol_type = other RNA
gaacgcctgcagtccct

SEQ ID NO: 12219 - RNA, 17 nt, synthetic construct
  misc_feature 1..17: note = Synthetic
  source 1..17: mol_type = other RNA
ggcgtatgcgggatcct

SEQ ID NO: 12220 - RNA, 17 nt, synthetic construct
  misc_feature 1..17: note = Synthetic
  source 1..17: mol_type = other RNA
accgtcatcacgctcct

SEQ ID NO: 12221 - RNA, 17 nt, synthetic construct
  misc_feature 1..17: note = Synthetic
  source 1..17: mol_type = other RNA
gggatcctcggccagct

SEQ ID NO: 12222 - RNA, 17 nt, synthetic construct
  misc_feature 1..17: note = Synthetic
  source 1..17: mol_type = other RNA
ggcgatcagcagcagct

SEQ ID NO: 12223 - RNA, 17 nt, synthetic construct
  misc_feature 1..17: note = Synthetic
  source 1..17: mol_type = other RNA
gtaaatgtccgtcagct

SEQ ID NO: 12224 - RNA, 17 nt, synthetic construct
  misc_feature 1..17: note = Synthetic
  source 1..17: mol_type = other RNA
ggctgcggccggacgct

SEQ ID NO: 12225 - RNA, 17 nt, synthetic construct
  misc_feature 1..17: note = Synthetic
  source 1..17: mol_type = other RNA
gtacgtccacgcgcgct

SEQ ID NO: 12226 - RNA, 17 nt, synthetic construct
  misc_feature 1..17: note = Synthetic
  source 1..17: mol_type = other RNA
ctcggccgtcgcgcgct

SEQ ID NO: 12227 - RNA, 17 nt, synthetic construct
  misc_feature 1..17: note = Synthetic
  source 1..17: mol_type = other RNA
ctcctccgcggggcgct

SEQ ID NO: 12228 - RNA, 17 nt, synthetic construct
  misc_feature 1..17: note = Synthetic
  source 1..17: mol_type = other RNA
cgtctcccgggggcgct

SEQ ID NO: 12229 - RNA, 17 nt, synthetic construct
  misc_feature 1..17: note = Synthetic
  source 1..17: mol_type = other RNA
gtcctcctgttttcgct

SEQ ID NO: 12230 - RNA, 17 nt, synthetic construct
  misc_feature 1..17: note = Synthetic
  source 1..17: mol_type = other RNA
catcggggccgccggct

SEQ ID NO: 12231 - RNA, 17 nt, synthetic construct
  misc_feature 1..17: note = Synthetic
  source 1..17: mol_type = other RNA
cagcagcttgcggggct

SEQ ID NO: 12232 - RNA, 17 nt, synthetic construct
  misc_feature 1..17: note = Synthetic
  source 1..17: mol_type = other RNA
tgggcctggatgatgct

SEQ ID NO: 12233 - RNA, 17 nt, synthetic construct
  misc_feature 1..17: note = Synthetic
  source 1..17: mol_type = other RNA
cagactctcggtgatct

SEQ ID NO: 12234 - RNA, 17 nt, synthetic construct
  misc_feature 1..17: note = Synthetic
  source 1..17: mol_type = other RNA
cctttttaacagactct

SEQ ID NO: 12235 - RNA, 17 nt, synthetic construct
  misc_feature 1..17: note = Synthetic
  source 1..17: mol_type = other RNA
gccccatctggagctct

SEQ ID NO: 12236 - RNA, 17 nt, synthetic construct
  misc_feature 1..17: note = Synthetic
  source 1..17: mol_type = other RNA
ctctacctcgcgggtct

SEQ ID NO: 12237 - RNA, 17 nt, synthetic construct
  misc_feature 1..17: note = Synthetic
  source 1..17: mol_type = other RNA
gccgatgtactttttct

SEQ ID NO: 12238 - RNA, 17 nt, synthetic construct
  misc_feature 1..17: note = Synthetic
  source 1..17: mol_type = other RNA
acgtgaaacccggaagt

SEQ ID NO: 12239 - RNA, 17 nt, synthetic construct
  misc_feature 1..17: note = Synthetic
  source 1..17: mol_type = other RNA
gggcccggcggcgtagt

SEQ ID NO: 12240 - RNA, 17 nt, synthetic construct
  misc_feature 1..17: note = Synthetic
  source 1..17: mol_type = other RNA
ctcgtagtagtacacgt

SEQ ID NO: 12241 - RNA, 17 nt, synthetic construct
  misc_feature 1..17: note = Synthetic
  source 1..17: mol_type = other RNA
accgccggcaggcacgt

SEQ ID NO: 12242 - RNA, 17 nt, synthetic construct
  misc_feature 1..17: note = Synthetic
  source 1..17: mol_type = other RNA
gtgatgacggtccccgt

SEQ ID NO: 12243 - RNA, 17 nt, synthetic construct
  misc_feature 1..17: note = Synthetic
  source 1..17: mol_type = other RNA
gttcagggcgacgccgt

SEQ ID NO: 12244 - RNA, 17 nt, synthetic construct
  misc_feature 1..17: note = Synthetic
  source 1..17: mol_type = other RNA
gccgggctgacggccgt

SEQ ID NO: 12245 - RNA, 17 nt, synthetic construct
  misc_feature 1..17: note = Synthetic
  source 1..17: mol_type = other RNA
tccagaaccacgggcgt

SEQ ID NO: 12246 - RNA, 17 nt, synthetic construct
  misc_feature 1..17: note = Synthetic
  source 1..17: mol_type = other RNA
caggtgcgccactgcgt

SEQ ID NO: 12247 - RNA, 17 nt, synthetic construct
  misc_feature 1..17: note = Synthetic
  source 1..17: mol_type = other RNA
gctcgcagagatctcgt

SEQ ID NO: 12248 - RNA, 17 nt, synthetic construct
  misc_feature 1..17: note = Synthetic
  source 1..17: mol_type = other RNA
gtaatacaccgtcaggt

SEQ ID NO: 12249 - RNA, 17 nt, synthetic construct
  misc_feature 1..17: note = Synthetic
  source 1..17: mol_type = other RNA
cgccagctcgttcaggt

SEQ ID NO: 12250 - RNA, 17 nt, synthetic construct
  misc_feature 1..17: note = Synthetic
  source 1..17: mol_type = other RNA
tgagcttgtatgccggt

SEQ ID NO: 12251 - RNA, 17 nt, synthetic construct
  misc_feature 1..17: note = Synthetic
  source 1..17: mol_type = other RNA
gcagggttcggggcggt

SEQ ID NO: 12252 - RNA, 17 nt, synthetic construct
  misc_feature 1..17: note = Synthetic
  source 1..17: mol_type = other RNA
tcaagaagtacgagggt

SEQ ID NO: 12253 - RNA, 17 nt, synthetic construct
  misc_feature 1..17: note = Synthetic
  source 1..17: mol_type = other RNA
gatgtccctctccgggt

SEQ ID NO: 12254 - RNA, 17 nt, synthetic construct
  misc_feature 1..17: note = Synthetic
  source 1..17: mol_type = other RNA
cgcgcctcccggggggt

SEQ ID NO: 12255 - RNA, 17 nt, synthetic construct
  misc_feature 1..17: note = Synthetic
  source 1..17: mol_type = other RNA
caggattccctgctggt

SEQ ID NO: 12256 - RNA, 17 nt, synthetic construct
  misc_feature 1..17: note = Synthetic
  source 1..17: mol_type = other RNA
aataaagcccttctggt

SEQ ID NO: 12257 - RNA, 17 nt, synthetic construct
  misc_feature 1..17: note = Synthetic
  source 1..17: mol_type = other RNA
cccgggggcgcgcatgt

SEQ ID NO: 12258 - RNA, 17 nt, synthetic construct
  misc_feature 1..17: note = Synthetic
  source 1..17: mol_type = other RNA
cgaattcgagatgctgt

SEQ ID NO: 12259 - RNA, 17 nt, synthetic construct
  misc_feature 1..17: note = Synthetic
  source 1..17: mol_type = other RNA
gggcgtgtttcgcgtgt

SEQ ID NO: 12260 - RNA, 17 nt, synthetic construct
  misc_feature 1..17: note = Synthetic
  source 1..17: mol_type = other RNA
gtggggcgcggcattgt

SEQ ID NO: 12261 - RNA, 17 nt, synthetic construct
  misc_feature 1..17: note = Synthetic
  source 1..17: mol_type = other RNA
gtgggccaggcgcttgt

SEQ ID NO: 12262 - RNA, 17 nt, synthetic construct
  misc_feature 1..17: note = Synthetic
  source 1..17: mol_type = other RNA
cgagagcttgatcttgt

SEQ ID NO: 12263 - RNA, 17 nt, synthetic construct
  misc_feature 1..17: note = Synthetic
  source 1..17: mol_type = other RNA
gctgaagcacaggttgt

SEQ ID NO: 12264 - RNA, 17 nt, synthetic construct
  misc_feature 1..17: note = Synthetic
  source 1..17: mol_type = other RNA
cccgggttcgtcacctt

SEQ ID NO: 12265 - RNA, 17 nt, synthetic construct
  misc_feature 1..17: note = Synthetic
  source 1..17: mol_type = other RNA
gctgcggccggacgctt

SEQ ID NO: 12266 - RNA, 17 nt, synthetic construct
  misc_feature 1..17: note = Synthetic
  source 1..17: mol_type = other RNA
acagcacacgcccgctt

SEQ ID NO: 12267 - RNA, 17 nt, synthetic construct
  misc_feature 1..17: note = Synthetic
  source 1..17: mol_type = other RNA
gtccttcaggacggctt

SEQ ID NO: 12268 - RNA, 17 nt, synthetic construct
  misc_feature 1..17: note = Synthetic
  source 1..17: mol_type = other RNA
cgggtgtctgctcagtt

SEQ ID NO: 12269 - RNA, 20 nt, synthetic construct
  misc_feature 1..20: note = Synthetic
  source 1..20: mol_type = other RNA
tcaccgagagtctgttaaaa

SEQ ID NO: 12270 - RNA, 20 nt, synthetic construct
  misc_feature 1..20: note = Synthetic
  source 1..20: mol_type = other RNA
ggggccgtactgtttcacaa

SEQ ID NO: 12271 - RNA, 20 nt, synthetic construct
  misc_feature 1..20: note = Synthetic
  source 1..20: mol_type = other RNA
cagggcgacgccgtgggcaa

SEQ ID NO: 12272 - RNA, 20 nt, synthetic construct
  misc_feature 1..20: note = Synthetic
  source 1..20: mol_type = other RNA
gggggtaagatgctcatcaa

SEQ ID NO: 12273 - RNA, 20 nt, synthetic construct
  misc_feature 1..20: note = Synthetic
  source 1..20: mol_type = other RNA
gtcagcttggccagcaagaa

SEQ ID NO: 12274 - RNA, 20 nt, synthetic construct
  misc_feature 1..20: note = Synthetic
  source 1..20: mol_type = other RNA
ctgcgcctggccgaccagaa

SEQ ID NO: 12275 - RNA, 20 nt, synthetic construct
  misc_feature 1..20: note = Synthetic
  source 1..20: mol_type = other RNA
cgggtgcccggccaccggaa

SEQ ID NO: 12276 - RNA, 20 nt, synthetic construct
  misc_feature 1..20: note = Synthetic
  source 1..20: mol_type = other RNA
gacgggtacggccgcatgaa

SEQ ID NO: 12277 - RNA, 20 nt, synthetic construct
  misc_feature 1..20: note = Synthetic
  source 1..20: mol_type = other RNA
ccgcgtgccgtaaacgtgaa

SEQ ID NO: 12278 - RNA, 20 nt, synthetic construct
  misc_feature 1..20: note = Synthetic
  source 1..20: mol_type = other RNA
cgcagcaagataaaggtgaa

SEQ ID NO: 12279 - RNA, 20 nt, synthetic construct
  misc_feature 1..20: note = Synthetic
  source 1..20: mol_type = other RNA
ccagaagcgcagcaagataa

SEQ ID NO: 12280 - RNA, 20 nt, synthetic construct
  misc_feature 1..20: note = Synthetic
  source 1..20: mol_type = other RNA
cttggcgttattcccaaaca

SEQ ID NO: 12281 - RNA, 20 nt, synthetic construct
  misc_feature 1..20: note = Synthetic
  source 1..20: mol_type = other RNA
ccacggcgtcgccctgaaca

SEQ ID NO: 12282 - RNA, 20 nt, synthetic construct
  misc_feature 1..20: note = Synthetic
  source 1..20: mol_type = other RNA
cggggccgtactgtttcaca

SEQ ID NO: 12283 - RNA, 20 nt, synthetic construct
  misc_feature 1..20: note = Synthetic
  source 1..20: mol_type = other RNA
gcgcatcatctacggggaca

SEQ ID NO: 12284 - RNA, 20 nt, synthetic construct
  misc_feature 1..20: note = Synthetic
  source 1..20: mol_type = other RNA
caagctgacggacatttaca

SEQ ID NO: 12285 - RNA, 20 nt, synthetic construct
  misc_feature 1..20: note = Synthetic
  source 1..20: mol_type = other RNA
gctgtcgaattccagaacca

SEQ ID NO: 12286 - RNA, 20 nt, synthetic construct
  misc_feature 1..20: note = Synthetic
  source 1..20: mol_type = other RNA
gtaaaacagcaggtcgacca

SEQ ID NO: 12287 - RNA, 20 nt, synthetic construct
  misc_feature 1..20: note = Synthetic
  source 1..20: mol_type = other RNA
tttattctgccggacaccca

SEQ ID NO: 12288 - RNA, 20 nt, synthetic construct
  misc_feature 1..20: note = Synthetic
  source 1..20: mol_type = other RNA
gctcgccatcttgtcgccca

SEQ ID NO: 12289 - RNA, 20 nt, synthetic construct
  misc_feature 1..20: note = Synthetic
  source 1..20: mol_type = other RNA
cccgcatacgccattgccca

SEQ ID NO: 12290 - RNA, 20 nt, synthetic construct
  misc_feature 1..20: note = Synthetic
  source 1..20: mol_type = other RNA
cctgaacgagctggcggcca

SEQ ID NO: 12291 - RNA, 20 nt, synthetic construct
  misc_feature 1..20: note = Synthetic
  source 1..20: mol_type = other RNA
cttcaggacggcttcggcca

SEQ ID NO: 12292 - RNA, 20 nt, synthetic construct
  misc_feature 1..20: note = Synthetic
  source 1..20: mol_type = other RNA
cgtggggtaccagggggcca

SEQ ID NO: 12293 - RNA, 20 nt, synthetic construct
  misc_feature 1..20: note = Synthetic
  source 1..20: mol_type = other RNA
gtttatcaaccgcacctcca

SEQ ID NO: 12294 - RNA, 20 nt, synthetic construct
  misc_feature 1..20: note = Synthetic
  source 1..20: mol_type = other RNA
aaacaggaggacgtgctcca

SEQ ID NO: 12295 - RNA, 20 nt, synthetic construct
  misc_feature 1..20: note = Synthetic
  source 1..20: mol_type = other RNA
gggttcacgggagtgcagca

SEQ ID NO: 12296 - RNA, 20 nt, synthetic construct
  misc_feature 1..20: note = Synthetic
  source 1..20: mol_type = other RNA
ctgctgcttgtccaggagca

SEQ ID NO: 12297 - RNA, 20 nt, synthetic construct
  misc_feature 1..20: note = Synthetic
  source 1..20: mol_type = other RNA
ccgcgcggctccggaccgca

SEQ ID NO: 12298 - RNA, 20 nt, synthetic construct
  misc_feature 1..20: note = Synthetic
  source 1..20: mol_type = other RNA
acgagatctctgcgagcgca

SEQ ID NO: 12299 - RNA, 20 nt, synthetic construct
  misc_feature 1..20: note = Synthetic
  source 1..20: mol_type = other RNA
cgcgcccggggactcgcgca

SEQ ID NO: 12300 - RNA, 20 nt, synthetic construct
  misc_feature 1..20: note = Synthetic
  source 1..20: mol_type = other RNA
cgagcggatctgctttcgca

SEQ ID NO: 12301 - RNA, 20 nt, synthetic construct
  misc_feature 1..20: note = Synthetic
  source 1..20: mol_type = other RNA
gtcgcggcaacgtgcaggca

SEQ ID NO: 12302 - RNA, 20 nt, synthetic construct
  misc_feature 1..20: note = Synthetic
  source 1..20: mol_type = other RNA
caagataaaggtgaacggca

SEQ ID NO: 12303 - RNA, 20 nt, synthetic construct
  misc_feature 1..20: note = Synthetic
  source 1..20: mol_type = other RNA
gcgcttggccggggagggca

SEQ ID NO: 12304 - RNA, 20 nt, synthetic construct
  misc_feature 1..20: note = Synthetic
  source 1..20: mol_type = other RNA
ggcgcacctggaggcgggca

SEQ ID NO: 12305 - RNA, 20 nt, synthetic construct
  misc_feature 1..20: note = Synthetic
  source 1..20: mol_type = other RNA
cgcctgcagtccctcgggca

SEQ ID NO: 12306 - RNA, 20 nt, synthetic construct
  misc_feature 1..20: note = Synthetic
  source 1..20: mol_type = other RNA
gtgcttcgatatcgaatgca

SEQ ID NO: 12307 - RNA, 20 nt, synthetic construct
  misc_feature 1..20: note = Synthetic
  source 1..20: mol_type = other RNA
caagcagcaggccgccatca

SEQ ID NO: 12308 - RNA, 20 nt, synthetic construct
  misc_feature 1..20: note = Synthetic
  source 1..20: mol_type = other RNA
cgcgcaggtcccgtccatca

SEQ ID NO: 12309 - RNA, 20 nt, synthetic construct
  misc_feature 1..20: note = Synthetic
  source 1..20: mol_type = other RNA
cgggggtaagatgctcatca

SEQ ID NO: 12310 - RNA, 20 nt, synthetic construct
  misc_feature 1..20: note = Synthetic
  source 1..20: mol_type = other RNA
tgtgctgtgccgcggcctca

SEQ ID NO: 12311 - RNA, 20 nt, synthetic construct
  misc_feature 1..20: note = Synthetic
  source 1..20: mol_type = other RNA
gacggtgtattacaagctca

SEQ ID NO: 12312 - RNA, 20 nt, synthetic construct
  misc_feature 1..20: note = Synthetic
  source 1..20: mol_type = other RNA
gcgacggctgttcttcgtca

SEQ ID NO: 12313 - RNA, 20 nt, synthetic construct
  misc_feature 1..20: note = Synthetic
  source 1..20: mol_type = other RNA
gaaacccggaagtggggtca

SEQ ID NO: 12314 - RNA, 20 nt, synthetic construct
  misc_feature 1..20: note = Synthetic
  source 1..20: mol_type = other RNA
ggcggcgtgcgtgacattca

SEQ ID NO: 12315 - RNA, 20 nt, synthetic construct
  misc_feature 1..20: note = Synthetic
  source 1..20: mol_type = other RNA
gaagtaatagtccgtgttca

SEQ ID NO: 12316 - RNA, 20 nt, synthetic construct
  misc_feature 1..20: note = Synthetic
  source 1..20: mol_type = other RNA
gacggccgtgggcgacaaga

SEQ ID NO: 12317 - RNA, 20 nt, synthetic construct
  misc_feature 1..20: note = Synthetic
  source 1..20: mol_type = other RNA
cgtcagcttggccagcaaga

SEQ ID NO: 12318 - RNA, 20 nt, synthetic construct
  misc_feature 1..20: note = Synthetic
  source 1..20: mol_type = other RNA
cgtcctgaaggacaagaaga

SEQ ID NO: 12319 - RNA, 20 nt, synthetic construct
  misc_feature 1..20: note = Synthetic
  source 1..20: mol_type = other RNA
gctgcgcctggccgaccaga

SEQ ID NO: 12320 - RNA, 20 nt, synthetic construct
  misc_feature 1..20: note = Synthetic
  source 1..20: mol_type = other RNA
gacccgcgaggtagaggaga

SEQ ID NO: 12321 - RNA, 20 nt, synthetic construct
  misc_feature 1..20: note = Synthetic
  source 1..20: mol_type = other RNA
gcgcatcaccgacccggaga

SEQ ID NO: 12322 - RNA, 20 nt, synthetic construct
  misc_feature 1..20: note = Synthetic
  source 1..20: mol_type = other RNA
cgcggcggccgctccggaga

SEQ ID NO: 12323 - RNA, 20 nt, synthetic construct
  misc_feature 1..20: note = Synthetic
  source 1..20: mol_type = other RNA
tgttccggcccggtttgaga

SEQ ID NO: 12324 - RNA, 20 nt, synthetic construct
  misc_feature 1..20: note = Synthetic
  source 1..20: mol_type = other RNA
gatctgctggccgtcgtaga

SEQ ID NO: 12325 - RNA, 20 nt, synthetic construct
  misc_feature 1..20: note = Synthetic
  source 1..20: mol_type = other RNA
atcacccgcaccatctacga

SEQ ID NO: 12326 - RNA, 20 nt, synthetic construct
  misc_feature 1..20: note = Synthetic
  source 1..20: mol_type = other RNA
ccggccatcaagaagtacga

SEQ ID NO: 12327 - RNA, 20 nt, synthetic construct
  misc_feature 1..20: note = Synthetic
  source 1..20: mol_type = other RNA
ctggcgcgacccctgcccga

SEQ ID NO: 12328 - RNA, 20 nt, synthetic construct
  misc_feature 1..20: note = Synthetic
  source 1..20: mol_type = other RNA
gacgtcgctggatgtcccga

SEQ ID NO: 12329 - RNA, 20 nt, synthetic construct
  misc_feature 1..20: note = Synthetic
  source 1..20: mol_type = other RNA
tttgagacggtaccagccga

SEQ ID NO: 12330 - RNA, 20 nt, synthetic construct
  misc_feature 1..20: note = Synthetic
  source 1..20: mol_type = other RNA
ccgggtcggtgatgcgccga

SEQ ID NO: 12331 - RNA, 20 nt, synthetic construct
  misc_feature 1..20: note = Synthetic
  source 1..20: mol_type = other RNA
gagcagcatctcgcggccga

SEQ ID NO: 12332 - RNA, 20 nt, synthetic construct
  misc_feature 1..20: note = Synthetic
  source 1..20: mol_type = other RNA
gtgcctgcacgttgccgcga

SEQ ID NO: 12333 - RNA, 20 nt, synthetic construct
  misc_feature 1..20: note = Synthetic
  source 1..20: mol_type = other RNA
aatacccgccaagcgcgcga

SEQ ID NO: 12334 - RNA, 20 nt, synthetic construct
  misc_feature 1..20: note = Synthetic
  source 1..20: mol_type = other RNA
cccggggggtcggcaggcga

SEQ ID NO: 12335 - RNA, 20 nt, synthetic construct
  misc_feature 1..20: note = Synthetic
  source 1..20: mol_type = other RNA
agatcgaggtgggggggcga

SEQ ID NO: 12336 - RNA, 20 nt, synthetic construct
  misc_feature 1..20: note = Synthetic
  source 1..20: mol_type = other RNA
gtcgctcatgcccccctcga

SEQ ID NO: 12337 - RNA, 20 nt, synthetic construct
  misc_feature 1..20: note = Synthetic
  source 1..20: mol_type = other RNA
atcggccaggagctgttcga

SEQ ID NO: 12338 - RNA, 20 nt, synthetic construct
  misc_feature 1..20: note = Synthetic
  source 1..20: mol_type = other RNA
cttcttcttgtccttcagga

SEQ ID NO: 12339 - RNA, 20 nt, synthetic construct
  misc_feature 1..20: note = Synthetic
  source 1..20: mol_type = other RNA
ccgatgggcgtctacgagga

SEQ ID NO: 12340 - RNA, 20 nt, synthetic construct
  misc_feature 1..20: note = Synthetic
  source 1..20: mol_type = other RNA
ctcctgggcctgactccgga

SEQ ID NO: 12341 - RNA, 20 nt, synthetic construct
  misc_feature 1..20: note = Synthetic
  source 1..20: mol_type = other RNA
ggcggcgtctagctcgcgga

SEQ ID NO: 12342 - RNA, 20 nt, synthetic construct
  misc_feature 1..20: note = Synthetic
  source 1..20: mol_type = other RNA
cgggggcgcttggccgggga

SEQ ID NO: 12343 - RNA, 20 nt, synthetic construct
  misc_feature 1..20: note = Synthetic
  source 1..20: mol_type = other RNA
atttacaaggtccccctgga

SEQ ID NO: 12344 - RNA, 20 nt, synthetic construct
  misc_feature 1..20: note = Synthetic
  source 1..20: mol_type = other RNA
ctgtttcacaagggtcatga

SEQ ID NO: 12345 - RNA, 20 nt, synthetic construct
  misc_feature 1..20: note = Synthetic
  source 1..20: mol_type = other RNA
caggcccaggagcgtgatga

SEQ ID NO: 12346 - RNA, 20 nt, synthetic construct
  misc_feature 1..20: note = Synthetic
  source 1..20: mol_type = other RNA
caagcgcctggcccacctga

SEQ ID NO: 12347 - RNA, 20 nt, synthetic construct
  misc_feature 1..20: note = Synthetic
  source 1..20: mol_type = other RNA
cttcagcacgctctccctga

SEQ ID NO: 12348 - RNA, 20 nt, synthetic construct
  misc_feature 1..20: note = Synthetic
  source 1..20: mol_type = other RNA
cgtggccgaagccgtcctga

SEQ ID NO: 12349 - RNA, 20 nt, synthetic construct
  misc_feature 1..20: note = Synthetic
  source 1..20: mol_type = other RNA
cttcttgctggccaagctga

SEQ ID NO: 12350 - RNA, 20 nt, synthetic construct
  misc_feature 1..20: note = Synthetic
  source 1..20: mol_type = other RNA
cctcacggccgccgggctga

SEQ ID NO: 12351 - RNA, 20 nt, synthetic construct
  misc_feature 1..20: note = Synthetic
  source 1..20: mol_type = other RNA
gacggtccccgtcggtgtga

SEQ ID NO: 12352 - RNA, 20 nt, synthetic construct
  misc_feature 1..20: note = Synthetic
  source 1..20: mol_type = other RNA
cgagttacacacgaccttga

SEQ ID NO: 12353 - RNA, 20 nt, synthetic construct
  misc_feature 1..20: note = Synthetic
  source 1..20: mol_type = other RNA
gtacgggatccggtccttga

SEQ ID NO: 12354 - RNA, 20 nt, synthetic construct
  misc_feature 1..20: note = Synthetic
  source 1..20: mol_type = other RNA
cccaccctcgtacttcttga

SEQ ID NO: 12355 - RNA, 20 nt, synthetic construct
  misc_feature 1..20: note = Synthetic
  source 1..20: mol_type = other RNA
tagatgatgcgcatggaata

SEQ ID NO: 12356 - RNA, 20 nt, synthetic construct
  misc_feature 1..20: note = Synthetic
  source 1..20: mol_type = other RNA
ggcggtgggtgccggcgcta

SEQ ID NO: 12357 - RNA, 20 nt, synthetic construct
  misc_feature 1..20: note = Synthetic
  source 1..20: mol_type = other RNA
atgacccttgtgaaacagta

SEQ ID NO: 12358 - RNA, 20 nt, synthetic construct
  misc_feature 1..20: note = Synthetic
  source 1..20: mol_type = other RNA
aaggtccccctggacgggta

SEQ ID NO: 12359 - RNA, 20 nt, synthetic construct
  misc_feature 1..20: note = Synthetic
  source 1..20: mol_type = other RNA
cgacgtcgagtttaactgta

SEQ ID NO: 12360 - RNA, 20 nt, synthetic construct
  misc_feature 1..20: note = Synthetic
  source 1..20: mol_type = other RNA
gtcgtgtgtaactcggtgta

SEQ ID NO: 12361 - RNA, 20 nt, synthetic construct
  misc_feature 1..20: note = Synthetic
  source 1..20: mol_type = other RNA
ggacacccaggggcgattta

SEQ ID NO: 12362 - RNA, 20 nt, synthetic construct
  misc_feature 1..20: note = Synthetic
  source 1..20: mol_type = other RNA
cgggtggccgttcacgttta

SEQ ID NO: 12363 - RNA, 20 nt, synthetic construct
  misc_feature 1..20: note = Synthetic
  source 1..20: mol_type = other RNA
tcttggcgttattcccaaac

SEQ ID NO: 12364 - RNA, 20 nt, synthetic construct
  misc_feature 1..20: note = Synthetic
  source 1..20: mol_type = other RNA
cggctggtaccgtctcaaac

SEQ ID NO: 12365 - RNA, 20 nt, synthetic construct
  misc_feature 1..20: note = Synthetic
  source 1..20: mol_type = other RNA
tcacgcacgccgcccccaac

SEQ ID NO: 12366 - RNA, 20 nt, synthetic construct
  misc_feature 1..20: note = Synthetic
  source 1..20: mol_type = other RNA
cggggttgtccaggatgaac

SEQ ID NO: 12367 - RNA, 20 nt, synthetic construct
  misc_feature 1..20: note = Synthetic
  source 1..20: mol_type = other RNA
ctgtcgaattccagaaccac

SEQ ID NO: 12368 - RNA, 20 nt, synthetic construct
  misc_feature 1..20: note = Synthetic
  source 1..20: mol_type = other RNA
gcaaagtcgaacaccaccac

SEQ ID NO: 12369 - RNA, 20 nt, synthetic construct
  misc_feature 1..20: note = Synthetic
  source 1..20: mol_type = other RNA
gcctgactccggaaggccac

SEQ ID NO: 12370 - RNA, 20 nt, synthetic construct
  misc_feature 1..20: note = Synthetic
  source 1..20: mol_type = other RNA
gggagagcgtgctgaagcac

SEQ ID NO: 12371 - RNA, 20 nt, synthetic construct
  misc_feature 1..20: note = Synthetic
  source 1..20: mol_type = other RNA
ccgggcagaagttgtcgcac

SEQ ID NO: 12372 - RNA, 20 nt, synthetic construct
  misc_feature 1..20: note = Synthetic
  source 1..20: mol_type = other RNA
ggacaggtcgtagagcagac

SEQ ID NO: 12373 - RNA, 20 nt, synthetic construct
  misc_feature 1..20: note = Synthetic
  source 1..20: mol_type = other RNA
tgaacaaggaggaggtcgac

SEQ ID NO: 12374 - RNA, 20 nt, synthetic construct
  misc_feature 1..20: note = Synthetic
  source 1..20: mol_type = other RNA
acaacatcatcaacttcgac

SEQ ID NO: 12375 - RNA, 20 nt, synthetic construct
  misc_feature 1..20: note = Synthetic
  source 1..20: mol_type = other RNA
aggtcccgtccatcaaggac

SEQ ID NO: 12376 - RNA, 20 nt, synthetic construct
  misc_feature 1..20: note = Synthetic
  source 1..20: mol_type = other RNA
tcagcatcctcctgcgggac

SEQ ID NO: 12377 - RNA, 20 nt, synthetic construct
  misc_feature 1..20: note = Synthetic
  source 1..20: mol_type = other RNA
ggatccggtccttgatggac

SEQ ID NO: 12378 - RNA, 20 nt, synthetic construct
  misc_feature 1..20: note = Synthetic
  source 1..20: mol_type = other RNA
tttacaaggtccccctggac

SEQ ID NO: 12379 - RNA, 20 nt, synthetic construct
  misc_feature 1..20: note = Synthetic
  source 1..20: mol_type = other RNA
gctccagggcggtggtggac

SEQ ID NO: 12380 - RNA, 20 nt, synthetic construct
  misc_feature 1..20: note = Synthetic
  source 1..20: mol_type = other RNA
tacggccccgagttcgtgac

SEQ ID NO: 12381 - RNA, 20 nt, synthetic construct
  misc_feature 1..20: note = Synthetic
  source 1..20: mol_type = other RNA
gatcggcgagtactgcatac

SEQ ID NO: 12382 - RNA, 20 nt, synthetic construct
  misc_feature 1..20: note = Synthetic
  source 1..20: mol_type = other RNA
ggggggcatgagcgacctac

SEQ ID NO: 12383 - RNA, 20 nt, synthetic construct
  misc_feature 1..20: note = Synthetic
  source 1..20: mol_type = other RNA
tctgggccacgatcacgtac

SEQ ID NO: 12384 - RNA, 20 nt, synthetic construct
  misc_feature 1..20: note = Synthetic
  source 1..20: mol_type = other RNA
cctggatgatgctggggtac

SEQ ID NO: 12385 - RNA, 20 nt, synthetic construct
  misc_feature 1..20: note = Synthetic
  source 1..20: mol_type = other RNA
tggtgaacatcgacatgtac

SEQ ID NO: 12386 - RNA, 20 nt, synthetic construct
  misc_feature 1..20: note = Synthetic
  source 1..20: mol_type = other RNA
tcgtgtgtaactcggtgtac

SEQ ID NO: 12387 - RNA, 20 nt, synthetic construct
  misc_feature 1..20: note = Synthetic
  source 1..20: mol_type = other RNA
ggctggtaccgtctcaaacc

SEQ ID NO: 12388 - RNA, 20 nt, synthetic construct
  misc_feature 1..20: note = Synthetic
  source 1..20: mol_type = other RNA
taactgtacggcggacaacc

SEQ ID NO: 12389 - RNA, 20 nt, synthetic construct
  misc_feature 1..20: note = Synthetic
  source 1..20: mol_type = other RNA
ggggttgtccaggatgaacc

SEQ ID NO: 12390 - RNA, 20 nt, synthetic construct
  misc_feature 1..20: note = Synthetic
  source 1..20: mol_type = other RNA
gtggggtcgacgccaccacc

SEQ ID NO: 12391 - RNA, 20 nt, synthetic construct
  misc_feature 1..20: note = Synthetic
  source 1..20: mol_type = other RNA
cctgactccggaaggccacc

SEQ ID NO: 12392 - RNA, 20 nt, synthetic construct
  misc_feature 1..20: note = Synthetic
  source 1..20: mol_type = other RNA
cgtaaacgtgaacggccacc

SEQ ID NO: 12393 - RNA, 20 nt, synthetic construct
  misc_feature 1..20: note = Synthetic
  source 1..20: mol_type = other RNA
cgtaaaacagcaggtcgacc

SEQ ID NO: 12394 - RNA, 20 nt, synthetic construct
  misc_feature 1..20: note = Synthetic
  source 1..20: mol_type = other RNA
gacaggatatctggatgacc

SEQ ID NO: 12395 - RNA, 20 nt, synthetic construct
  misc_feature 1..20: note = Synthetic
  source 1..20: mol_type = other RNA
acggccccgagttcgtgacc

SEQ ID NO: 12396 - RNA, 20 nt, synthetic construct
  misc_feature 1..20: note = Synthetic
  source 1..20: mol_type = other RNA
gaagttgatgatgttgtacc

SEQ ID NO: 12397 - RNA, 20 nt, synthetic construct
  misc_feature 1..20: note = Synthetic
  source 1..20: mol_type = other RNA
cggttcatcctggacaaccc

SEQ ID NO: 12398 - RNA, 20 nt, synthetic construct
  misc_feature 1..20: note = Synthetic
  source 1..20: mol_type = other RNA
cagccgaaggtgacgaaccc

SEQ ID NO: 12399 - RNA, 20 nt, synthetic construct
  misc_feature 1..20: note = Synthetic
  source 1..20: mol_type = other RNA
ggaagtggggtcaaggaccc

SEQ ID NO: 12400 - RNA, 20 nt, synthetic construct
  misc_feature 1..20: note = Synthetic
  source 1..20: mol_type = other RNA
ggttcatcctggacaacccc

SEQ ID NO: 12401 - RNA, 20 nt, synthetic construct
  misc_feature 1..20: note = Synthetic
  source 1..20: mol_type = other RNA
tcccgaagtgtggcaccccc

SEQ ID NO: 12402 - RNA, 20 nt, synthetic construct
  misc_feature 1..20: note = Synthetic
  source 1..20: mol_type = other RNA
acgcttgggcgcctcccccc

SEQ ID NO: 12403 - RNA, 20 nt, synthetic construct
  misc_feature 1..20: note = Synthetic
  source 1..20: mol_type = other RNA
cggccgacatgcgcgccccc

SEQ ID NO: 12404 - RNA, 20 nt, synthetic construct
  misc_feature 1..20: note = Synthetic
  source 1..20: mol_type = other RNA
ggtcaaggaccctggccccc

SEQ ID NO: 12405 - RNA, 20 nt, synthetic construct
  misc_feature 1..20: note = Synthetic
  source 1..20: mol_type = other RNA
ggacatttacaaggtccccc

SEQ ID NO: 12406 - RNA, 20 nt, synthetic construct
  misc_feature 1..20: note = Synthetic
  source 1..20: mol_type = other RNA
gcggccgacatgcgcgcccc

SEQ ID NO: 12407 - RNA, 20 nt, synthetic construct
  misc_feature 1..20: note = Synthetic
  source 1..20: mol_type = other RNA
cggcgcccctaaatcgcccc

SEQ ID NO: 12408 - RNA, 20 nt, synthetic construct
  misc_feature 1..20: note = Synthetic
  source 1..20: mol_type = other RNA
cacgggcgtgggcaggcccc

SEQ ID NO: 12409 - RNA, 20 nt, synthetic construct
  misc_feature 1..20: note = Synthetic
  source 1..20: mol_type = other RNA
gcggccctgcgcgagtcccc

SEQ ID NO: 12410 - RNA, 20 nt, synthetic construct
  misc_feature 1..20: note = Synthetic
  source 1..20: mol_type = other RNA
caaccgcacctccagggccc

SEQ ID NO: 12411 - RNA, 20 nt, synthetic construct
  misc_feature 1..20: note = Synthetic
  source 1..20: mol_type = other RNA
ccccgcggccctgccctccc

SEQ ID NO: 12412 - RNA, 20 nt, synthetic construct
  misc_feature 1..20: note = Synthetic
  source 1..20: mol_type = other RNA
tggccgctcctcgtcctccc

SEQ ID NO: 12413 - RNA, 20 nt, synthetic construct
  misc_feature 1..20: note = Synthetic
  source 1..20: mol_type = other RNA
cgcggccctgcgcgagtccc

SEQ ID NO: 12414 - RNA, 20 nt, synthetic construct
  misc_feature 1..20: note = Synthetic
  source 1..20: mol_type = other RNA
gtcgcccacggccgtcagcc

SEQ ID NO: 12415 - RNA, 20 nt, synthetic construct
  misc_feature 1..20: note = Synthetic
  source 1..20: mol_type = other RNA
tccccgcctactacgccgcc

SEQ ID NO: 12416 - RNA, 20 nt, synthetic construct
  misc_feature 1..20: note = Synthetic
  source 1..20: mol_type = other RNA
gccgcggcctcacggccgcc

SEQ ID NO: 12417 - RNA, 20 nt, synthetic construct
  misc_feature 1..20: note = Synthetic
  source 1..20: mol_type = other RNA
cgcgtacaccaacaagcgcc

SEQ ID NO: 12418 - RNA, 20 nt, synthetic construct
  misc_feature 1..20: note = Synthetic
  source 1..20: mol_type = other RNA
ctttacgtgcctgctgcgcc

SEQ ID NO: 12419 - RNA, 20 nt, synthetic construct
  misc_feature 1..20: note = Synthetic
  source 1..20: mol_type = other RNA
gtacggccgcatgaacggcc

SEQ ID NO: 12420 - RNA, 20 nt, synthetic construct
  misc_feature 1..20: note = Synthetic
  source 1..20: mol_type = other RNA
gctagcgtgttgttccggcc

SEQ ID NO: 12421 - RNA, 20 nt, synthetic construct
  misc_feature 1..20: note = Synthetic
  source 1..20: mol_type = other RNA
taaagcccttctggtcggcc

SEQ ID NO: 12422 - RNA, 20 nt, synthetic construct
  misc_feature 1..20: note = Synthetic
  source 1..20: mol_type = other RNA
caccccgcgttgcgcgggcc

SEQ ID NO: 12423 - RNA, 20 nt, synthetic construct
  misc_feature 1..20: note = Synthetic
  source 1..20: mol_type = other RNA
acgtggggtaccagggggcc

SEQ ID NO: 12424 - RNA, 20 nt, synthetic construct
  misc_feature 1..20: note = Synthetic
  source 1..20: mol_type = other RNA
aatacaccgtcaggtgggcc

SEQ ID NO: 12425 - RNA, 20 nt, synthetic construct
  misc_feature 1..20: note = Synthetic
  source 1..20: mol_type = other RNA
tgaagcacaggttgtgggcc

SEQ ID NO: 12426 - RNA, 20 nt, synthetic construct
  misc_feature 1..20: note = Synthetic
  source 1..20: mol_type = other RNA
tcatgcccccctcgatggcc

SEQ ID NO: 12427 - RNA, 20 nt, synthetic construct
  misc_feature 1..20: note = Synthetic
  source 1..20: mol_type = other RNA
cctcgtacttcttgatggcc

SEQ ID NO: 12428 - RNA, 20 nt, synthetic construct
  misc_feature 1..20: note = Synthetic
  source 1..20: mol_type = other RNA
agctggcctttccggtggcc

SEQ ID NO: 12429 - RNA, 20 nt, synthetic construct
  misc_feature 1..20: note = Synthetic
  source 1..20: mol_type = other RNA
cctgtgcgacaacttctgcc

SEQ ID NO: 12430 - RNA, 20 nt, synthetic construct
  misc_feature 1..20: note = Synthetic
  source 1..20: mol_type = other RNA
gaccaggtcctccgggtgcc

SEQ ID NO: 12431 - RNA, 20 nt, synthetic construct
  misc_feature 1..20: note = Synthetic
  source 1..20: mol_type = other RNA
cgacccggagagggacatcc

SEQ ID NO: 12432 - RNA, 20 nt, synthetic construct
  misc_feature 1..20: note = Synthetic
  source 1..20: mol_type = other RNA
cctgtaccccagcatcatcc

SEQ ID NO: 12433 - RNA, 20 nt, synthetic construct
  misc_feature 1..20: note = Synthetic
  source 1..20: mol_type = other RNA
cgccaccacccggttcatcc

SEQ ID NO: 12434 - RNA, 20 nt, synthetic construct
  misc_feature 1..20: note = Synthetic
  source 1..20: mol_type = other RNA
cgtttatcaaccgcacctcc

SEQ ID NO: 12435 - RNA, 20 nt, synthetic construct
  misc_feature 1..20: note = Synthetic
  source 1..20: mol_type = other RNA
ggtagtccttgcccgcctcc

SEQ ID NO: 12436 - RNA, 20 nt, synthetic construct
  misc_feature 1..20: note = Synthetic
  source 1..20: mol_type = other RNA
ctggccgctcctcgtcctcc

SEQ ID NO: 12437 - RNA, 20 nt, synthetic construct
  misc_feature 1..20: note = Synthetic
  source 1..20: mol_type = other RNA
tctggatgaccaggtcctcc

SEQ ID NO: 12438 - RNA, 20 nt, synthetic construct
  misc_feature 1..20: note = Synthetic
  source 1..20: mol_type = other RNA
ggcggccttcgaacagctcc

SEQ ID NO: 12439 - RNA, 20 nt, synthetic construct
  misc_feature 1..20: note = Synthetic
  source 1..20: mol_type = other RNA
ggggaccgtcatcacgctcc

SEQ ID NO: 12440 - RNA, 20 nt, synthetic construct
  misc_feature 1..20: note = Synthetic
  source 1..20: mol_type = other RNA
aaaacaggaggacgtgctcc

SEQ ID NO: 12441 - RNA, 20 nt, synthetic construct
  misc_feature 1..20: note = Synthetic
  source 1..20: mol_type = other RNA
ccccgaggaggccgtgctcc

SEQ ID NO: 12442 - RNA, 20 nt, synthetic construct
  misc_feature 1..20: note = Synthetic
  source 1..20: mol_type = other RNA
gcccccccacctcgatctcc

SEQ ID NO: 12443 - RNA, 20 nt, synthetic construct
  misc_feature 1..20: note = Synthetic
  source 1..20: mol_type = other RNA
agtcctggatgtccctctcc

SEQ ID NO: 12444 - RNA, 20 nt, synthetic construct
  misc_feature 1..20: note = Synthetic
  source 1..20: mol_type = other RNA
cggcggtgaggacaaagtcc

SEQ ID NO: 12445 - RNA, 20 nt, synthetic construct
  misc_feature 1..20: note = Synthetic
  source 1..20: mol_type = other RNA
tgacgaacccggggttgtcc

SEQ ID NO: 12446 - RNA, 20 nt, synthetic construct
  misc_feature 1..20: note = Synthetic
  source 1..20: mol_type = other RNA
gggtccttgaccccacttcc

SEQ ID NO: 12447 - RNA, 20 nt, synthetic construct
  misc_feature 1..20: note = Synthetic
  source 1..20: mol_type = other RNA
accgcgtctacgtccgaagc

SEQ ID NO: 12448 - RNA, 20 nt, synthetic construct
  misc_feature 1..20: note = Synthetic
  source 1..20: mol_type = other RNA
gcaaaaacttaaaaaacagc

SEQ ID NO: 12449 - RNA, 20 nt, synthetic construct
  misc_feature 1..20: note = Synthetic
  source 1..20: mol_type = other RNA
cggtatcgtcgtaaaacagc

SEQ ID NO: 12450 - RNA, 20 nt, synthetic construct
  misc_feature 1..20: note = Synthetic
  source 1..20: mol_type = other RNA
gaacaacacgctagcccagc

SEQ ID NO: 12451 - RNA, 20 nt, synthetic construct
  misc_feature 1..20: note = Synthetic
  source 1..20: mol_type = other RNA
cgtgctcctggacaagcagc

SEQ ID NO: 12452 - RNA, 20 nt, synthetic construct
  misc_feature 1..20: note = Synthetic
  source 1..20: mol_type = other RNA
tctggtcggccaggcgcagc

SEQ ID NO: 12453 - RNA, 20 nt, synthetic construct
  misc_feature 1..20: note = Synthetic
  source 1..20: mol_type = other RNA
tagacgcggtaaaacagagc

SEQ ID NO: 12454 - RNA, 20 nt, synthetic construct
  misc_feature 1..20: note = Synthetic
  source 1..20: mol_type = other RNA
cgaatcccacctgaacgagc

SEQ ID NO: 12455 - RNA, 20 nt, synthetic construct
  misc_feature 1..20: note = Synthetic
  source 1..20: mol_type = other RNA
caagctgctggtgtccgagc

SEQ ID NO: 12456 - RNA, 20 nt, synthetic construct
  misc_feature 1..20: note = Synthetic
  source 1..20: mol_type = other RNA
gccgcgcggctccggaccgc

SEQ ID NO: 12457 - RNA, 20 nt, synthetic construct
  misc_feature 1..20: note = Synthetic
  source 1..20: mol_type = other RNA
atccccgcctactacgccgc

SEQ ID NO: 12458 - RNA, 20 nt, synthetic construct
  misc_feature 1..20: note = Synthetic
  source 1..20: mol_type = other RNA
tgccgcggcctcacggccgc

SEQ ID NO: 12459 - RNA, 20 nt, synthetic construct
  misc_feature 1..20: note = Synthetic
  source 1..20: mol_type = other RNA
ccgaaggccatcggggccgc

SEQ ID NO: 12460 - RNA, 20 nt, synthetic construct
  misc_feature 1..20: note = Synthetic
  source 1..20: mol_type = other RNA
cgcgccagccactcctccgc

SEQ ID NO: 12461 - RNA, 20 nt, synthetic construct
  misc_feature 1..20: note = Synthetic
  source 1..20: mol_type = other RNA
agtttcctccgccgtagcgc

SEQ ID NO: 12462 - RNA, 20 nt, synthetic construct
  misc_feature 1..20: note = Synthetic
  source 1..20: mol_type = other RNA
gcgagtacgtccacgcgcgc

SEQ ID NO: 12463 - RNA, 20 nt, synthetic construct
  misc_feature 1..20: note = Synthetic
  source 1..20: mol_type = other RNA
gcttgttggtgtacgcgcgc

SEQ ID NO: 12464 - RNA, 20 nt, synthetic construct
  misc_feature 1..20: note = Synthetic
  source 1..20: mol_type = other RNA
gctcatggcccgccgcgcgc

SEQ ID NO: 12465 - RNA, 20 nt, synthetic construct
  misc_feature 1..20: note = Synthetic
  source 1..20: mol_type = other RNA
acgcgcccggggactcgcgc

SEQ ID NO: 12466 - RNA, 20 nt, synthetic construct
  misc_feature 1..20: note = Synthetic
  source 1..20: mol_type = other RNA
ccgatcaccccgcgttgcgc

SEQ ID NO: 12467 - RNA, 20 nt, synthetic construct
  misc_feature 1..20: note = Synthetic
  source 1..20: mol_type = other RNA
gcgcgcgtggacgtactcgc

SEQ ID NO: 12468 - RNA, 20 nt, synthetic construct
  misc_feature 1..20: note = Synthetic
  source 1..20: mol_type = other RNA
gaccgtctcctctacctcgc

SEQ ID NO: 12469 - RNA, 20 nt, synthetic construct
  misc_feature 1..20: note = Synthetic
  source 1..20: mol_type = other RNA
acagttaaactcgacgtcgc

SEQ ID NO: 12470 - RNA, 20 nt, synthetic construct
  misc_feature 1..20: note = Synthetic
  source 1..20: mol_type = other RNA
gatgatgctggggtacaggc

SEQ ID NO: 12471 - RNA, 20 nt, synthetic construct
  misc_feature 1..20: note = Synthetic
  source 1..20: mol_type = other RNA
gcagtggcgcacctggaggc

SEQ ID NO: 12472 - RNA, 20 nt, synthetic construct
  misc_feature 1..20: note = Synthetic
  source 1..20: mol_type = other RNA
aggccatcggggccgccggc

SEQ ID NO: 12473 - RNA, 20 nt, synthetic construct
  misc_feature 1..20: note = Synthetic
  source 1..20: mol_type = other RNA
ggacgggacctgcgcgcggc

SEQ ID NO: 12474 - RNA, 20 nt, synthetic construct
  misc_feature 1..20: note = Synthetic
  source 1..20: mol_type = other RNA
agaggagacggtcgcgcggc

SEQ ID NO: 12475 - RNA, 20 nt, synthetic construct
  misc_feature 1..20: note = Synthetic
  source 1..20: mol_type = other RNA
tcgtcctcccgggctgcggc

SEQ ID NO: 12476 - RNA, 20 nt, synthetic construct
  misc_feature 1..20: note = Synthetic
  source 1..20: mol_type = other RNA
gcgcctcccggggggtcggc

SEQ ID NO: 12477 - RNA, 20 nt, synthetic construct
  misc_feature 1..20: note = Synthetic
  source 1..20: mol_type = other RNA
ccgggttcgtcaccttcggc

SEQ ID NO: 12478 - RNA, 20 nt, synthetic construct
  misc_feature 1..20: note = Synthetic
  source 1..20: mol_type = other RNA
ggcgcttggccggggagggc

SEQ ID NO: 12479 - RNA, 20 nt, synthetic construct
  misc_feature 1..20: note = Synthetic
  source 1..20: mol_type = other RNA
ccagaaccacgggcgtgggc

SEQ ID NO: 12480 - RNA, 20 nt, synthetic construct
  misc_feature 1..20: note = Synthetic
  source 1..20: mol_type = other RNA
ccctcgtacttcttgatggc

SEQ ID NO: 12481 - RNA, 20 nt, synthetic construct
  misc_feature 1..20: note = Synthetic
  source 1..20: mol_type = other RNA
gcgccccgcggaggagtggc

SEQ ID NO: 12482 - RNA, 20 nt, synthetic construct
  misc_feature 1..20: note = Synthetic
  source 1..20: mol_type = other RNA
gagctggcctttccggtggc

SEQ ID NO: 12483 - RNA, 20 nt, synthetic construct
  misc_feature 1..20: note = Synthetic
  source 1..20: mol_type = other RNA
tcggccgtcgcgcgcttggc

SEQ ID NO: 12484 - RNA, 20 nt, synthetic construct
  misc_feature 1..20: note = Synthetic
  source 1..20: mol_type = other RNA
ccgtgggcaatggcgtatgc

SEQ ID NO: 12485 - RNA, 20 nt, synthetic construct
  misc_feature 1..20: note = Synthetic
  source 1..20: mol_type = other RNA
aagcacatgagcttgtatgc

SEQ ID NO: 12486 - RNA, 20 nt, synthetic construct
  misc_feature 1..20: note = Synthetic
  source 1..20: mol_type = other RNA
acccctgcccgagggactgc

SEQ ID NO: 12487 - RNA, 20 nt, synthetic construct
  misc_feature 1..20: note = Synthetic
  source 1..20: mol_type = other RNA
ctgcatacaggattccctgc

SEQ ID NO: 12488 - RNA, 20 nt, synthetic construct
  misc_feature 1..20: note = Synthetic
  source 1..20: mol_type = other RNA
ctggtaccccacgtgcctgc

SEQ ID NO: 12489 - RNA, 20 nt, synthetic construct
  misc_feature 1..20: note = Synthetic
  source 1..20: mol_type = other RNA
cctcctcagcatcctcctgc

SEQ ID NO: 12490 - RNA, 20 nt, synthetic construct
  misc_feature 1..20: note = Synthetic
  source 1..20: mol_type = other RNA
gtccaagccccgcaagctgc

SEQ ID NO: 12491 - RNA, 20 nt, synthetic construct
  misc_feature 1..20: note = Synthetic
  source 1..20: mol_type = other RNA
acgtaaagacgcggatctgc

SEQ ID NO: 12492 - RNA, 20 nt, synthetic construct
  misc_feature 1..20: note = Synthetic
  source 1..20: mol_type = other RNA
ccagaagggctttattctgc

SEQ ID NO: 12493 - RNA, 20 nt, synthetic construct
  misc_feature 1..20: note = Synthetic
  source 1..20: mol_type = other RNA
tcaccgtcgcggcaacgtgc

SEQ ID NO: 12494 - RNA, 20 nt, synthetic construct
  misc_feature 1..20: note = Synthetic
  source 1..20: mol_type = other RNA
gggttcggggcggtgggtgc

SEQ ID NO: 12495 - RNA, 20 nt, synthetic construct
  misc_feature 1..20: note = Synthetic
  source 1..20: mol_type = other RNA
ctggccgtcgtagatggtgc

SEQ ID NO: 12496 - RNA, 20 nt, synthetic construct
  misc_feature 1..20: note = Synthetic
  source 1..20: mol_type = other RNA
ctcggacaccagcagcttgc

SEQ ID NO: 12497 - RNA, 20 nt, synthetic construct
  misc_feature 1..20: note = Synthetic
  source 1..20: mol_type = other RNA
cttcgactggcccttcttgc

SEQ ID NO: 12498 - RNA, 20 nt, synthetic construct
  misc_feature 1..20: note = Synthetic
  source 1..20: mol_type = other RNA
tggatgtcccgaaggccatc

SEQ ID NO: 12499 - RNA, 20 nt, synthetic construct
  misc_feature 1..20: note = Synthetic
  source 1..20: mol_type = other RNA
ccacgatcacgtacgggatc

SEQ ID NO: 12500 - RNA, 20 nt, synthetic construct
  misc_feature 1..20: note = Synthetic
  source 1..20: mol_type = other RNA
gctcatcaagggcgtggatc

SEQ ID NO: 12501 - RNA, 20 nt, synthetic construct
  misc_feature 1..20: note = Synthetic
  source 1..20: mol_type = other RNA
cgtagagcagacaggatatc

SEQ ID NO: 12502 - RNA, 20 nt, synthetic construct
  misc_feature 1..20: note = Synthetic
  source 1..20: mol_type = other RNA
ttgtacccggtcacgaactc

SEQ ID NO: 12503 - RNA, 20 nt, synthetic construct
  misc_feature 1..20: note = Synthetic
  source 1..20: mol_type = other RNA
gcggtctcccgcgcgccctc

SEQ ID NO: 12504 - RNA, 20 nt, synthetic construct
  misc_feature 1..20: note = Synthetic
  source 1..20: mol_type = other RNA
ccgaacgcctgcagtccctc

SEQ ID NO: 12505 - RNA, 20 nt, synthetic construct
  misc_feature 1..20: note = Synthetic
  source 1..20: mol_type = other RNA
tccaggagcacggcctcctc

SEQ ID NO: 12506 - RNA, 20 nt, synthetic construct
  misc_feature 1..20: note = Synthetic
  source 1..20: mol_type = other RNA
tcgtcctccccctcctcctc

SEQ ID NO: 12507 - RNA, 20 nt, synthetic construct
  misc_feature 1..20: note = Synthetic
  source 1..20: mol_type = other RNA
atctggatgaccaggtcctc

SEQ ID NO: 12508 - RNA, 20 nt, synthetic construct
  misc_feature 1..20: note = Synthetic
  source 1..20: mol_type = other RNA
cggggatgtcgcgatagctc

SEQ ID NO: 12509 - RNA, 20 nt, synthetic construct
  misc_feature 1..20: note = Synthetic
  source 1..20: mol_type = other RNA
acgacgtggccgcgcggctc

SEQ ID NO: 12510 - RNA, 20 nt, synthetic construct
  misc_feature 1..20: note = Synthetic
  source 1..20: mol_type = other RNA
tgcgcttctggaagtggctc

SEQ ID NO: 12511 - RNA, 20 nt, synthetic construct
  misc_feature 1..20: note = Synthetic
  source 1..20: mol_type = other RNA
aagtcctggatgtccctctc

SEQ ID NO: 12512 - RNA, 20 nt, synthetic construct
  misc_feature 1..20: note = Synthetic
  source 1..20: mol_type = other RNA
cccggtggccttccggagtc

SEQ ID NO: 12513 - RNA, 20 nt, synthetic construct
  misc_feature 1..20: note = Synthetic
  source 1..20: mol_type = other RNA
tgagcttgtaatacaccgtc

SEQ ID NO: 12514 - RNA, 20 nt, synthetic construct
  misc_feature 1..20: note = Synthetic
  source 1..20: mol_type = other RNA
gggggaggcgcccaagcgtc

SEQ ID NO: 12515 - RNA, 20 nt, synthetic construct
  misc_feature 1..20: note = Synthetic
  source 1..20: mol_type = other RNA
tctcctctacctcgcgggtc

SEQ ID NO: 12516 - RNA, 20 nt, synthetic construct
  misc_feature 1..20: note = Synthetic
  source 1..20: mol_type = other RNA
ctaaatcgcccctgggtgtc

SEQ ID NO: 12517 - RNA, 20 nt, synthetic construct
  misc_feature 1..20: note = Synthetic
  source 1..20: mol_type = other RNA
agggtccttgaccccacttc

SEQ ID NO: 12518 - RNA, 20 nt, synthetic construct
  misc_feature 1..20: note = Synthetic
  source 1..20: mol_type = other RNA
ccggcagaataaagcccttc

SEQ ID NO: 12519 - RNA, 20 nt, synthetic construct
  misc_feature 1..20: note = Synthetic
  source 1..20: mol_type = other RNA
cggcggccccgatggccttc

SEQ ID NO: 12520 - RNA, 20 nt, synthetic construct
  misc_feature 1..20: note = Synthetic
  source 1..20: mol_type = other RNA
ggtccttcttcttgtccttc

SEQ ID NO: 12521 - RNA, 20 nt, synthetic construct
  misc_feature 1..20: note = Synthetic
  source 1..20: mol_type = other RNA
ccgagggactgcaggcgttc

SEQ ID NO: 12522 - RNA, 20 nt, synthetic construct
  misc_feature 1..20: note = Synthetic
  source 1..20: mol_type = other RNA
ccctggccgccagctcgttc

SEQ ID NO: 12523 - RNA, 20 nt, synthetic construct
  misc_feature 1..20: note = Synthetic
  source 1..20: mol_type = other RNA
ggctccggaccgcagggttc

SEQ ID NO: 12524 - RNA, 20 nt, synthetic construct
  misc_feature 1..20: note = Synthetic
  source 1..20: mol_type = other RNA
agaagtaatagtccgtgttc

SEQ ID NO: 12525 - RNA, 20 nt, synthetic construct
  misc_feature 1..20: note = Synthetic
  source 1..20: mol_type = other RNA
gctgggctagcgtgttgttc

SEQ ID NO: 12526 - RNA, 20 nt, synthetic construct
  misc_feature 1..20: note = Synthetic
  source 1..20: mol_type = other RNA
ggaggacgagctggcctttc

SEQ ID NO: 12527 - RNA, 20 nt, synthetic construct
  misc_feature 1..20: note = Synthetic
  source 1..20: mol_type = other RNA
taccgcgtctacgtccgaag

SEQ ID NO: 12528 - RNA, 20 nt, synthetic construct
  misc_feature 1..20: note = Synthetic
  source 1..20: mol_type = other RNA
ccaccacctccgcctcgaag

SEQ ID NO: 12529 - RNA, 20 nt, synthetic construct
  misc_feature 1..20: note = Synthetic
  source 1..20: mol_type = other RNA
tcttgctgcgcttctggaag

SEQ ID NO: 12530 - RNA, 20 nt, synthetic construct
  misc_feature 1..20: note = Synthetic
  source 1..20: mol_type = other RNA
gcaggcacgtggggtaccag

SEQ ID NO: 12531 - RNA, 20 nt, synthetic construct
  misc_feature 1..20: note = Synthetic
  source 1..20: mol_type = other RNA
gctagacgccgccgccccag

SEQ ID NO: 12532 - RNA, 20 nt, synthetic construct
  misc_feature 1..20: note = Synthetic
  source 1..20: mol_type = other RNA
ctgaacgagctggcggccag

SEQ ID NO: 12533 - RNA, 20 nt, synthetic construct
  misc_feature 1..20: note = Synthetic
  source 1..20: mol_type = other RNA
ctccctgagggccgacgcag

SEQ ID NO: 12534 - RNA, 20 nt, synthetic construct
  misc_feature 1..20: note = Synthetic
  source 1..20: mol_type = other RNA
gcctgcagtccctcgggcag

SEQ ID NO: 12535 - RNA, 20 nt, synthetic construct
  misc_feature 1..20: note = Synthetic
  source 1..20: mol_type = other RNA
tgctctggggaatccgcgag

SEQ ID NO: 12536 - RNA, 20 nt, synthetic construct
  misc_feature 1..20: note = Synthetic
  source 1..20: mol_type = other RNA
cgacgataccgtctccggag

SEQ ID NO: 12537 - RNA, 20 nt, synthetic construct
  misc_feature 1..20: note = Synthetic
  source 1..20: mol_type = other RNA
gacacccaggggcgatttag

SEQ ID NO: 12538 - RNA, 20 nt, synthetic construct
  misc_feature 1..20: note = Synthetic
  source 1..20: mol_type = other RNA
cgcggggcgctcggctaacg

SEQ ID NO: 12539 - RNA, 20 nt, synthetic construct
  misc_feature 1..20: note = Synthetic
  source 1..20: mol_type = other RNA
caaagtcgaacaccaccacg

SEQ ID NO: 12540 - RNA, 20 nt, synthetic construct
  misc_feature 1..20: note = Synthetic
  source 1..20: mol_type = other RNA
ccgttcacgtttacggcacg

SEQ ID NO: 12541 - RNA, 20 nt, synthetic construct
  misc_feature 1..20: note = Synthetic
  source 1..20: mol_type = other RNA
gcagcaggcacgtaaagacg

SEQ ID NO: 12542 - RNA, 20 nt, synthetic construct
  misc_feature 1..20: note = Synthetic
  source 1..20: mol_type = other RNA
gcccgcttcggacgtagacg

SEQ ID NO: 12543 - RNA, 20 nt, synthetic construct
  misc_feature 1..20: note = Synthetic
  source 1..20: mol_type = other RNA
gtggcaccccccggacgacg

SEQ ID NO: 12544 - RNA, 20 nt, synthetic construct
  misc_feature 1..20: note = Synthetic
  source 1..20: mol_type = other RNA
tggacgccatcacaccgacg

SEQ ID NO: 12545 - RNA, 20 nt, synthetic construct
  misc_feature 1..20: note = Synthetic
  source 1..20: mol_type = other RNA
ttccatgcgcatcatctacg

SEQ ID NO: 12546 - RNA, 20 nt, synthetic construct
  misc_feature 1..20: note = Synthetic
  source 1..20: mol_type = other RNA
gtacatcggcgtcatctacg

SEQ ID NO: 12547 - RNA, 20 nt, synthetic construct
  misc_feature 1..20: note = Synthetic
  source 1..20: mol_type = other RNA
tgcgccgatgggcgtctacg

SEQ ID NO: 12548 - RNA, 20 nt, synthetic construct
  misc_feature 1..20: note = Synthetic
  source 1..20: mol_type = other RNA
cccggccatcaagaagtacg

SEQ ID NO: 12549 - RNA, 20 nt, synthetic construct
  misc_feature 1..20: note = Synthetic
  source 1..20: mol_type = other RNA
agccgaaggtgacgaacccg

SEQ ID NO: 12550 - RNA, 20 nt, synthetic construct
  misc_feature 1..20: note = Synthetic
  source 1..20: mol_type = other RNA
cgggtttcacgtgaaccccg

SEQ ID NO: 12551 - RNA, 20 nt, synthetic construct
  misc_feature 1..20: note = Synthetic
  source 1..20: mol_type = other RNA
caggggcctgcccacgcccg

SEQ ID NO: 12552 - RNA, 20 nt, synthetic construct
  misc_feature 1..20: note = Synthetic
  source 1..20: mol_type = other RNA
tgcgcatggaatagggcccg

SEQ ID NO: 12553 - RNA, 20 nt, synthetic construct
  misc_feature 1..20: note = Synthetic
  source 1..20: mol_type = other RNA
gcaggcgacggcgtctcccg

SEQ ID NO: 12554 - RNA, 20 nt, synthetic construct
  misc_feature 1..20: note = Synthetic
  source 1..20: mol_type = other RNA
gagctacaagctcaacgccg

SEQ ID NO: 12555 - RNA, 20 nt, synthetic construct
  misc_feature 1..20: note = Synthetic
  source 1..20: mol_type = other RNA
ccgtgttcagggcgacgccg

SEQ ID NO: 12556 - RNA, 20 nt, synthetic construct
  misc_feature 1..20: note = Synthetic
  source 1..20: mol_type = other RNA
gcccggcggccgtgaggccg

SEQ ID NO: 12557 - RNA, 20 nt, synthetic construct
  misc_feature 1..20: note = Synthetic
  source 1..20: mol_type = other RNA
tacggccgcatgaacggccg

SEQ ID NO: 12558 - RNA, 20 nt, synthetic construct
  misc_feature 1..20: note = Synthetic
  source 1..20: mol_type = other RNA
ggccgccgggctgacggccg

SEQ ID NO: 12559 - RNA, 20 nt, synthetic construct
  misc_feature 1..20: note = Synthetic
  source 1..20: mol_type = other RNA
cggggactcgcgcagggccg

SEQ ID NO: 12560 - RNA, 20 nt, synthetic construct
  misc_feature 1..20: note = Synthetic
  source 1..20: mol_type = other RNA
tctctgcgagcgcatggccg

SEQ ID NO: 12561 - RNA, 20 nt, synthetic construct
  misc_feature 1..20: note = Synthetic
  source 1..20: mol_type = other RNA
gctggtgtccgagctggccg

SEQ ID NO: 12562 - RNA, 20 nt, synthetic construct
  misc_feature 1..20: note = Synthetic
  source 1..20: mol_type = other RNA
tccatctttgtgctgtgccg

SEQ ID NO: 12563 - RNA, 20 nt, synthetic construct
  misc_feature 1..20: note = Synthetic
  source 1..20: mol_type = other RNA
gtcgttccgcggcatctccg

SEQ ID NO: 12564 - RNA, 20 nt, synthetic construct
  misc_feature 1..20: note = Synthetic
  source 1..20: mol_type = other RNA
tccccgggcgcgtcgttccg

SEQ ID NO: 12565 - RNA, 20 nt, synthetic construct
  misc_feature 1..20: note = Synthetic
  source 1..20: mol_type = other RNA
agacgcggtaaaacagagcg

SEQ ID NO: 12566 - RNA, 20 nt, synthetic construct
  misc_feature 1..20: note = Synthetic
  source 1..20: mol_type = other RNA
gatcgtggcccagacccgcg

SEQ ID NO: 12567 - RNA, 20 nt, synthetic construct
  misc_feature 1..20: note = Synthetic
  source 1..20: mol_type = other RNA
ccctgcggtccggagccgcg

SEQ ID NO: 12568 - RNA, 20 nt, synthetic construct
  misc_feature 1..20: note = Synthetic
  source 1..20: mol_type = other RNA
ccccggacgacgtggccgcg

SEQ ID NO: 12569 - RNA, 20 nt, synthetic construct
  misc_feature 1..20: note = Synthetic
  source 1..20: mol_type = other RNA
gcgccagccactcctccgcg

SEQ ID NO: 12570 - RNA, 20 nt, synthetic construct
  misc_feature 1..20: note = Synthetic
  source 1..20: mol_type = other RNA
cgcttgttggtgtacgcgcg

SEQ ID NO: 12571 - RNA, 20 nt, synthetic construct
  misc_feature 1..20: note = Synthetic
  source 1..20: mol_type = other RNA
tgatggacgggacctgcgcg

SEQ ID NO: 12572 - RNA, 20 nt, synthetic construct
  misc_feature 1..20: note = Synthetic
  source 1..20: mol_type = other RNA
aggtagaggagacggtcgcg

SEQ ID NO: 12573 - RNA, 20 nt, synthetic construct
  misc_feature 1..20: note = Synthetic
  source 1..20: mol_type = other RNA
gcccggcggcgtagtaggcg

SEQ ID NO: 12574 - RNA, 20 nt, synthetic construct
  misc_feature 1..20: note = Synthetic
  source 1..20: mol_type = other RNA
taagatgctcatcaagggcg

SEQ ID NO: 12575 - RNA, 20 nt, synthetic construct
  misc_feature 1..20: note = Synthetic
  source 1..20: mol_type = other RNA
gaattccagaaccacgggcg

SEQ ID NO: 12576 - RNA, 20 nt, synthetic construct
  misc_feature 1..20: note = Synthetic
  source 1..20: mol_type = other RNA
cgcagagatctcgtggggcg

SEQ ID NO: 12577 - RNA, 20 nt, synthetic construct
  misc_feature 1..20: note = Synthetic
  source 1..20: mol_type = other RNA
tcggacaccagcagcttgcg

SEQ ID NO: 12578 - RNA, 20 nt, synthetic construct
  misc_feature 1..20: note = Synthetic
  source 1..20: mol_type = other RNA
gccgatcaccccgcgttgcg

SEQ ID NO: 12579 - RNA, 20 nt, synthetic construct
  misc_feature 1..20: note = Synthetic
  source 1..20: mol_type = other RNA
ggatgtcccgaaggccatcg

SEQ ID NO: 12580 - RNA, 20 nt, synthetic construct
  misc_feature 1..20: note = Synthetic
  source 1..20: mol_type = other RNA
caaggactacctggagatcg

SEQ ID NO: 12581 - RNA, 20 nt, synthetic construct
  misc_feature 1..20: note = Synthetic
  source 1..20: mol_type = other RNA
ccggatcccgtacgtgatcg

SEQ ID NO: 12582 - RNA, 20 nt, synthetic construct
  misc_feature 1..20: note = Synthetic
  source 1..20: mol_type = other RNA
tgtacccggtcacgaactcg

SEQ ID NO: 12583 - RNA, 20 nt, synthetic construct
  misc_feature 1..20: note = Synthetic
  source 1..20: mol_type = other RNA
agcgcgcgtggacgtactcg

SEQ ID NO: 12584 - RNA, 20 nt, synthetic construct
  misc_feature 1..20: note = Synthetic
  source 1..20: mol_type = other RNA
cgaccgtctcctctacctcg

SEQ ID NO: 12585 - RNA, 20 nt, synthetic construct
  misc_feature 1..20: note = Synthetic
  source 1..20: mol_type = other RNA
ccaggagcacggcctcctcg

SEQ ID NO: 12586 - RNA, 20 nt, synthetic construct
  misc_feature 1..20: note = Synthetic
  source 1..20: mol_type = other RNA
tgcgaaagcagatccgctcg

SEQ ID NO: 12587 - RNA, 20 nt, synthetic construct
  misc_feature 1..20: note = Synthetic
  source 1..20: mol_type = other RNA
gggtcgcgagcagcatctcg

SEQ ID NO: 12588 - RNA, 20 nt, synthetic construct
  misc_feature 1..20: note = Synthetic
  source 1..20: mol_type = other RNA
gccgatggtcgtcaccgtcg

SEQ ID NO: 12589 - RNA, 20 nt, synthetic construct
  misc_feature 1..20: note = Synthetic
  source 1..20: mol_type = other RNA
catctccgcggaccacttcg

SEQ ID NO: 12590 - RNA, 20 nt, synthetic construct
  misc_feature 1..20: note = Synthetic
  source 1..20: mol_type = other RNA
cgagggactgcaggcgttcg

SEQ ID NO: 12591 - RNA, 20 nt, synthetic construct
  misc_feature 1..20: note = Synthetic
  source 1..20: mol_type = other RNA
gctccggaccgcagggttcg

SEQ ID NO: 12592 - RNA, 20 nt, synthetic construct
  misc_feature 1..20: note = Synthetic
  source 1..20: mol_type = other RNA
caggcacgtggggtaccagg

SEQ ID NO: 12593 - RNA, 20 nt, synthetic construct
  misc_feature 1..20: note = Synthetic
  source 1..20: mol_type = other RNA
tgcggccgtacccgtccagg

SEQ ID NO: 12594 - RNA, 20 nt, synthetic construct
  misc_feature 1..20: note = Synthetic
  source 1..20: mol_type = other RNA
tggcgagccagtcccgcagg

SEQ ID NO: 12595 - RNA, 20 nt, synthetic construct
  misc_feature 1..20: note = Synthetic
  source 1..20: mol_type = other RNA
gcttgtaatacaccgtcagg

SEQ ID NO: 12596 - RNA, 20 nt, synthetic construct
  misc_feature 1..20: note = Synthetic
  source 1..20: mol_type = other RNA
tccccagagcagccccgagg

SEQ ID NO: 12597 - RNA, 20 nt, synthetic construct
  misc_feature 1..20: note = Synthetic
  source 1..20: mol_type = other RNA
ggacaacctggccatcgagg

SEQ ID NO: 12598 - RNA, 20 nt, synthetic construct
  misc_feature 1..20: note = Synthetic
  source 1..20: mol_type = other RNA
cttttacatgaacaaggagg

SEQ ID NO: 12599 - RNA, 20 nt, synthetic construct
  misc_feature 1..20: note = Synthetic
  source 1..20: mol_type = other RNA
cctggccgatttcccggagg

SEQ ID NO: 12600 - RNA, 20 nt, synthetic construct
  misc_feature 1..20: note = Synthetic
  source 1..20: mol_type = other RNA
ggaccacttcgaggcggagg

SEQ ID NO: 12601 - RNA, 20 nt, synthetic construct
  misc_feature 1..20: note = Synthetic
  source 1..20: mol_type = other RNA
cgcagtggcgcacctggagg

SEQ ID NO: 12602 - RNA, 20 nt, synthetic construct
  misc_feature 1..20: note = Synthetic
  source 1..20: mol_type = other RNA
cccgcaggaggatgctgagg

SEQ ID NO: 12603 - RNA, 20 nt, synthetic construct
  misc_feature 1..20: note = Synthetic
  source 1..20: mol_type = other RNA
tacatcggcgtcatctacgg

SEQ ID NO: 12604 - RNA, 20 nt, synthetic construct
  misc_feature 1..20: note = Synthetic
  source 1..20: mol_type = other RNA
cgtcgagtttaactgtacgg

SEQ ID NO: 12605 - RNA, 20 nt, synthetic construct
  misc_feature 1..20: note = Synthetic
  source 1..20: mol_type = other RNA
aaacgtgaacggccacccgg

SEQ ID NO: 12606 - RNA, 20 nt, synthetic construct
  misc_feature 1..20: note = Synthetic
  source 1..20: mol_type = other RNA
tccggtggccgggcacccgg

SEQ ID NO: 12607 - RNA, 20 nt, synthetic construct
  misc_feature 1..20: note = Synthetic
  source 1..20: mol_type = other RNA
gcccacggccgtcagcccgg

SEQ ID NO: 12608 - RNA, 20 nt, synthetic construct
  misc_feature 1..20: note = Synthetic
  source 1..20: mol_type = other RNA
gcgcatggaatagggcccgg

SEQ ID NO: 12609 - RNA, 20 nt, synthetic construct
  misc_feature 1..20: note = Synthetic
  source 1..20: mol_type = other RNA
cccgcgttgcgcgggcccgg

SEQ ID NO: 12610 - RNA, 20 nt, synthetic construct
  misc_feature 1..20: note = Synthetic
  source 1..20: mol_type = other RNA
ggcttggacgcgcctcccgg

SEQ ID NO: 12611 - RNA, 20 nt, synthetic construct
  misc_feature 1..20: note = Synthetic
  source 1..20: mol_type = other RNA
caggcgacggcgtctcccgg

SEQ ID NO: 12612 - RNA, 20 nt, synthetic construct
  misc_feature 1..20: note = Synthetic
  source 1..20: mol_type = other RNA
gctcctggccgatttcccgg

SEQ ID NO: 12613 - RNA, 20 nt, synthetic construct
  misc_feature 1..20: note = Synthetic
  source 1..20: mol_type = other RNA
caacacgctagcccagccgg

SEQ ID NO: 12614 - RNA, 20 nt, synthetic construct
  misc_feature 1..20: note = Synthetic
  source 1..20: mol_type = other RNA
gtaccccacgtgcctgccgg

SEQ ID NO: 12615 - RNA, 20 nt, synthetic construct
  misc_feature 1..20: note = Synthetic
  source 1..20: mol_type = other RNA
cgcgcggccacgtcgtccgg

SEQ ID NO: 12616 - RNA, 20 nt, synthetic construct
  misc_feature 1..20: note = Synthetic
  source 1..20: mol_type = other RNA
ggacgagctggcctttccgg

SEQ ID NO: 12617 - RNA, 20 nt, synthetic construct
  misc_feature 1..20: note = Synthetic
  source 1..20: mol_type = other RNA
ggggcgctcggctaacgcgg

SEQ ID NO: 12618 - RNA, 20 nt, synthetic construct
  misc_feature 1..20: note = Synthetic
  source 1..20: mol_type = other RNA
tggacgggacctgcgcgcgg

SEQ ID NO: 12619 - RNA, 20 nt, synthetic construct
  misc_feature 1..20: note = Synthetic
  source 1..20: mol_type = other RNA
cggcggcgtctagctcgcgg

SEQ ID NO: 12620 - RNA, 20 nt, synthetic construct
  misc_feature 1..20: note = Synthetic
  source 1..20: mol_type = other RNA
cgcggaccacttcgaggcgg

SEQ ID NO: 12621 - RNA, 20 nt, synthetic construct
  misc_feature 1..20: note = Synthetic
  source 1..20: mol_type = other RNA
gaggacgtgctccagggcgg

SEQ ID NO: 12622 - RNA, 20 nt, synthetic construct
  misc_feature 1..20: note = Synthetic
  source 1..20: mol_type = other RNA
gaccgcagggttcggggcgg

SEQ ID NO: 12623 - RNA, 20 nt, synthetic construct
  misc_feature 1..20: note = Synthetic
  source 1..20: mol_type = other RNA
gggctcgtcccctggggcgg

SEQ ID NO: 12624 - RNA, 20 nt, synthetic construct
  misc_feature 1..20: note = Synthetic
  source 1..20: mol_type = other RNA
cgggtgtctgctcagttcgg

SEQ ID NO: 12625 - RNA, 20 nt, synthetic construct
  misc_feature 1..20: note = Synthetic
  source 1..20: mol_type = other RNA
caggaggacgtgctccaggg

SEQ ID NO: 12626 - RNA, 20 nt, synthetic construct
  misc_feature 1..20: note = Synthetic
  source 1..20: mol_type = other RNA
gacaacctggccatcgaggg

SEQ ID NO: 12627 - RNA, 20 nt, synthetic construct
  misc_feature 1..20: note = Synthetic
  source 1..20: mol_type = other RNA
ggcgtctagctcgcggaggg

SEQ ID NO: 12628 - RNA, 20 nt, synthetic construct
  misc_feature 1..20: note = Synthetic
  source 1..20: mol_type = other RNA
gttgtccaggatgaaccggg

SEQ ID NO: 12629 - RNA, 20 nt, synthetic construct
  misc_feature 1..20: note = Synthetic
  source 1..20: mol_type = other RNA
gactccggaaggccaccggg

SEQ ID NO: 12630 - RNA, 20 nt, synthetic construct
  misc_feature 1..20: note = Synthetic
  source 1..20: mol_type = other RNA
tcgcctgccgaccccccggg

SEQ ID NO: 12631 - RNA, 20 nt, synthetic construct
  misc_feature 1..20: note = Synthetic
  source 1..20: mol_type = other RNA
gcgtccggccgcagcccggg

SEQ ID NO: 12632 - RNA, 20 nt, synthetic construct
  misc_feature 1..20: note = Synthetic
  source 1..20: mol_type = other RNA
gcttggacgcgcctcccggg

SEQ ID NO: 12633 - RNA, 20 nt, synthetic construct
  misc_feature 1..20: note = Synthetic
  source 1..20: mol_type = other RNA
gcgcggccacgtcgtccggg

SEQ ID NO: 12634 - RNA, 20 nt, synthetic construct
  misc_feature 1..20: note = Synthetic
  source 1..20: mol_type = other RNA
ccgggggcgcttggccgggg

SEQ ID NO: 12635 - RNA, 20 nt, synthetic construct
  misc_feature 1..20: note = Synthetic
  source 1..20: mol_type = other RNA
cgttcaggtgggattcgggg

SEQ ID NO: 12636 - RNA, 20 nt, synthetic construct
  misc_feature 1..20: note = Synthetic
  source 1..20: mol_type = other RNA
ccggaccgcagggttcgggg

SEQ ID NO: 12637 - RNA, 20 nt, synthetic construct
  misc_feature 1..20: note = Synthetic
  source 1..20: mol_type = other RNA
atttaggggcgccggggggg

SEQ ID NO: 12638 - RNA, 20 nt, synthetic construct
  misc_feature 1..20: note = Synthetic
  source 1..20: mol_type = other RNA
cgaatgcaaggcgggggggg

SEQ ID NO: 12639 - RNA, 20 nt, synthetic construct
  misc_feature 1..20: note = Synthetic
  source 1..20: mol_type = other RNA
cttctcccacctgttggggg

SEQ ID NO: 12640 - RNA, 20 nt, synthetic construct
  misc_feature 1..20: note = Synthetic
  source 1..20: mol_type = other RNA
ggcgggctcgtcccctgggg

SEQ ID NO: 12641 - RNA, 20 nt, synthetic construct
  misc_feature 1..20: note = Synthetic
  source 1..20: mol_type = other RNA
acctggagatcgaggtgggg

SEQ ID NO: 12642 - RNA, 20 nt, synthetic construct
  misc_feature 1..20: note = Synthetic
  source 1..20: mol_type = other RNA
tcgcactcgagtttgatggg

SEQ ID NO: 12643 - RNA, 20 nt, synthetic construct
  misc_feature 1..20: note = Synthetic
  source 1..20: mol_type = other RNA
gtacgtccacgcgcgctggg

SEQ ID NO: 12644 - RNA, 20 nt, synthetic construct
  misc_feature 1..20: note = Synthetic
  source 1..20: mol_type = other RNA
tacctggagatcgaggtggg

SEQ ID NO: 12645 - RNA, 20 nt, synthetic construct
  misc_feature 1..20: note = Synthetic
  source 1..20: mol_type = other RNA
gttacacacgaccttgatgg

SEQ ID NO: 12646 - RNA, 20 nt, synthetic construct
  misc_feature 1..20: note = Synthetic
  source 1..20: mol_type = other RNA
ttcgcactcgagtttgatgg

SEQ ID NO: 12647 - RNA, 20 nt, synthetic construct
  misc_feature 1..20: note = Synthetic
  source 1..20: mol_type = other RNA
cgacgcagtggcgcacctgg

SEQ ID NO: 12648 - RNA, 20 nt, synthetic construct
  misc_feature 1..20: note = Synthetic
  source 1..20: mol_type = other RNA
caggtcgaccagggccctgg

SEQ ID NO: 12649 - RNA, 20 nt, synthetic construct
  misc_feature 1..20: note = Synthetic
  source 1..20: mol_type = other RNA
atcccacctgaacgagctgg

SEQ ID NO: 12650 - RNA, 20 nt, synthetic construct
  misc_feature 1..20: note = Synthetic
  source 1..20: mol_type = other RNA
catacaggattccctgctgg

SEQ ID NO: 12651 - RNA, 20 nt, synthetic construct
  misc_feature 1..20: note = Synthetic
  source 1..20: mol_type = other RNA
gtttcacgtgaaccccgtgg

SEQ ID NO: 12652 - RNA, 20 nt, synthetic construct
  misc_feature 1..20: note = Synthetic
  source 1..20: mol_type = other RNA
gacgtgctccagggcggtgg

SEQ ID NO: 12653 - RNA, 20 nt, synthetic construct
  misc_feature 1..20: note = Synthetic
  source 1..20: mol_type = other RNA
gtccaggatgaaccgggtgg

SEQ ID NO: 12654 - RNA, 20 nt, synthetic construct
  misc_feature 1..20: note = Synthetic
  source 1..20: mol_type = other RNA
ctcggccgtcgcgcgcttgg

SEQ ID NO: 12655 - RNA, 20 nt, synthetic construct
  misc_feature 1..20: note = Synthetic
  source 1..20: mol_type = other RNA
ttacttctcccacctgttgg

SEQ ID NO: 12656 - RNA, 20 nt, synthetic construct
  misc_feature 1..20: note = Synthetic
  source 1..20: mol_type = other RNA
acacgccccggccgttcatg

SEQ ID NO: 12657 - RNA, 20 nt, synthetic construct
  misc_feature 1..20: note = Synthetic
  source 1..20: mol_type = other RNA
acggccgagagctccagatg

SEQ ID NO: 12658 - RNA, 20 nt, synthetic construct
  misc_feature 1..20: note = Synthetic
  source 1..20: mol_type = other RNA
gaaacagcgcgcgcgagatg

SEQ ID NO: 12659 - RNA, 20 nt, synthetic construct
  misc_feature 1..20: note = Synthetic
  source 1..20: mol_type = other RNA
acccaccgccccgaaccctg

SEQ ID NO: 12660 - RNA, 20 nt, synthetic construct
  misc_feature 1..20: note = Synthetic
  source 1..20: mol_type = other RNA
gggggcgggctcgtcccctg

SEQ ID NO: 12661 - RNA, 20 nt, synthetic construct
  misc_feature 1..20: note = Synthetic
  source 1..20: mol_type = other RNA
gcttcagcacgctctccctg

SEQ ID NO: 12662 - RNA, 20 nt, synthetic construct
  misc_feature 1..20: note = Synthetic
  source 1..20: mol_type = other RNA
ctcctcgtcctcccgggctg

SEQ ID NO: 12663 - RNA, 20 nt, synthetic construct
  misc_feature 1..20: note = Synthetic
  source 1..20: mol_type = other RNA
tgtgggcctggatgatgctg

SEQ ID NO: 12664 - RNA, 20 nt, synthetic construct
  misc_feature 1..20: note = Synthetic
  source 1..20: mol_type = other RNA
aaaggtttattcccgaagtg

SEQ ID NO: 12665 - RNA, 20 nt, synthetic construct
  misc_feature 1..20: note = Synthetic
  source 1..20: mol_type = other RNA
tcacgtgaaacccggaagtg

SEQ ID NO: 12666 - RNA, 20 nt, synthetic construct
  misc_feature 1..20: note = Synthetic
  source 1..20: mol_type = other RNA
agaccgccggcaggcacgtg

SEQ ID NO: 12667 - RNA, 20 nt, synthetic construct
  misc_feature 1..20: note = Synthetic
  source 1..20: mol_type = other RNA
ccgtcagcccggcggccgtg

SEQ ID NO: 12668 - RNA, 20 nt, synthetic construct
  misc_feature 1..20: note = Synthetic
  source 1..20: mol_type = other RNA
gcgctcgcagagatctcgtg

SEQ ID NO: 12669 - RNA, 20 nt, synthetic construct
  misc_feature 1..20: note = Synthetic
  source 1..20: mol_type = other RNA
cgaccagggccctggaggtg

SEQ ID NO: 12670 - RNA, 20 nt, synthetic construct
  misc_feature 1..20: note = Synthetic
  source 1..20: mol_type = other RNA
gtctgctcagttcggcggtg

SEQ ID NO: 12671 - RNA, 20 nt, synthetic construct
  misc_feature 1..20: note = Synthetic
  source 1..20: mol_type = other RNA
catcaagaagtacgagggtg

SEQ ID NO: 12672 - RNA, 20 nt, synthetic construct
  misc_feature 1..20: note = Synthetic
  source 1..20: mol_type = other RNA
gctggccgtcgtagatggtg

SEQ ID NO: 12673 - RNA, 20 nt, synthetic construct
  misc_feature 1..20: note = Synthetic
  source 1..20: mol_type = other RNA
gcgtgctgaagcacaggttg

SEQ ID NO: 12674 - RNA, 20 nt, synthetic construct
  misc_feature 1..20: note = Synthetic
  source 1..20: mol_type = other RNA
attacttctcccacctgttg

SEQ ID NO: 12675 - RNA, 20 nt, synthetic construct
  misc_feature 1..20: note = Synthetic
  source 1..20: mol_type = other RNA
gtcggccgcctccgggaaat

SEQ ID NO: 12676 - RNA, 20 nt, synthetic construct
  misc_feature 1..20: note = Synthetic
  source 1..20: mol_type = other RNA
gtagatgatgcgcatggaat

SEQ ID NO: 12677 - RNA, 20 nt, synthetic construct
  misc_feature 1..20: note = Synthetic
  source 1..20: mol_type = other RNA
gtgtttcgcgtgtgggacat

SEQ ID NO: 12678 - RNA, 20 nt, synthetic construct
  misc_feature 1..20: note = Synthetic
  source 1..20: mol_type = other RNA
atcgccaagaaaaagtacat

SEQ ID NO: 12679 - RNA, 20 nt, synthetic construct
  misc_feature 1..20: note = Synthetic
  source 1..20: mol_type = other RNA
gccgcgacggtgacgaccat

SEQ ID NO: 12680 - RNA, 20 nt, synthetic construct
  misc_feature 1..20: note = Synthetic
  source 1..20: mol_type = other RNA
ccgtcctcgtagacgcccat

SEQ ID NO: 12681 - RNA, 20 nt, synthetic construct
  misc_feature 1..20: note = Synthetic
  source 1..20: mol_type = other RNA
gacggccgagagctccagat

SEQ ID NO: 12682 - RNA, 20 nt, synthetic construct
  misc_feature 1..20: note = Synthetic
  source 1..20: mol_type = other RNA
cgggtcggtgatgcgccgat

SEQ ID NO: 12683 - RNA, 20 nt, synthetic construct
  misc_feature 1..20: note = Synthetic
  source 1..20: mol_type = other RNA
cccgcgcaacgcggggtgat

SEQ ID NO: 12684 - RNA, 20 nt, synthetic construct
  misc_feature 1..20: note = Synthetic
  source 1..20: mol_type = other RNA
catcaaggtcgtgtgtaact

SEQ ID NO: 12685 - RNA, 20 nt, synthetic construct
  misc_feature 1..20: note = Synthetic
  source 1..20: mol_type = other RNA
ggcgcccctaaatcgcccct

SEQ ID NO: 12686 - RNA, 20 nt, synthetic construct
  misc_feature 1..20: note = Synthetic
  source 1..20: mol_type = other RNA
ggggggcgggctcgtcccct

SEQ ID NO: 12687 - RNA, 20 nt, synthetic construct
  misc_feature 1..20: note = Synthetic
  source 1..20: mol_type = other RNA
cccgaacgcctgcagtccct

SEQ ID NO: 12688 - RNA, 20 nt, synthetic construct
  misc_feature 1..20: note = Synthetic
  source 1..20: mol_type = other RNA
aatggcgtatgcgggatcct

SEQ ID NO: 12689 - RNA, 20 nt, synthetic construct
  misc_feature 1..20: note = Synthetic
  source 1..20: mol_type = other RNA
gggaccgtcatcacgctcct

SEQ ID NO: 12690 - RNA, 20 nt, synthetic construct
  misc_feature 1..20: note = Synthetic
  source 1..20: mol_type = other RNA
tgcgggatcctcggccagct

SEQ ID NO: 12691 - RNA, 20 nt, synthetic construct
  misc_feature 1..20: note = Synthetic
  source 1..20: mol_type = other RNA
cttggcgatcagcagcagct

SEQ ID NO: 12692 - RNA, 20 nt, synthetic construct
  misc_feature 1..20: note = Synthetic
  source 1..20: mol_type = other RNA
cttgtaaatgtccgtcagct

SEQ ID NO: 12693 - RNA, 20 nt, synthetic construct
  misc_feature 1..20: note = Synthetic
  source 1..20: mol_type = other RNA
ccgggctgcggccggacgct

SEQ ID NO: 12694 - RNA, 20 nt, synthetic construct
  misc_feature 1..20: note = Synthetic
  source 1..20: mol_type = other RNA
cgagtacgtccacgcgcgct

SEQ ID NO: 12695 - RNA, 20 nt, synthetic construct
  misc_feature 1..20: note = Synthetic
  source 1..20: mol_type = other RNA
gctctcggccgtcgcgcgct

SEQ ID NO: 12696 - RNA, 20 nt, synthetic construct
  misc_feature 1..20: note = Synthetic
  source 1..20: mol_type = other RNA
ccactcctccgcggggcgct

SEQ ID NO: 12697 - RNA, 20 nt, synthetic construct
  misc_feature 1..20: note = Synthetic
  source 1..20: mol_type = other RNA
cggcgtctcccgggggcgct

SEQ ID NO: 12698 - RNA, 20 nt, synthetic construct
  misc_feature 1..20: note = Synthetic
  source 1..20: mol_type = other RNA
cacgtcctcctgttttcgct

SEQ ID NO: 12699 - RNA, 20 nt, synthetic construct
  misc_feature 1..20: note = Synthetic
  source 1..20: mol_type = other RNA
ggccatcggggccgccggct

SEQ ID NO: 12700 - RNA, 20 nt, synthetic construct
  misc_feature 1..20: note = Synthetic
  source 1..20: mol_type = other RNA
caccagcagcttgcggggct

SEQ ID NO: 12701 - RNA, 20 nt, synthetic construct
  misc_feature 1..20: note = Synthetic
  source 1..20: mol_type = other RNA
ttgtgggcctggatgatgct

SEQ ID NO: 12702 - RNA, 20 nt, synthetic construct
  misc_feature 1..20: note = Synthetic
  source 1..20: mol_type = other RNA
taacagactctcggtgatct

SEQ ID NO: 12703 - RNA, 20 nt, synthetic construct
  misc_feature 1..20: note = Synthetic
  source 1..20: mol_type = other RNA
aaacctttttaacagactct

SEQ ID NO: 12704 - RNA, 20 nt, synthetic construct
  misc_feature 1..20: note = Synthetic
  source 1..20: mol_type = other RNA
tttgccccatctggagctct

SEQ ID NO: 12705 - RNA, 20 nt, synthetic construct
  misc_feature 1..20: note = Synthetic
  source 1..20: mol_type = other RNA
ctcctctacctcgcgggtct

SEQ ID NO: 12706 - RNA, 20 nt, synthetic construct
  misc_feature 1..20: note = Synthetic
  source 1..20: mol_type = other RNA
gacgccgatgtactttttct

SEQ ID NO: 12707 - RNA, 20 nt, synthetic construct
  misc_feature 1..20: note = Synthetic
  source 1..20: mol_type = other RNA
ttcacgtgaaacccggaagt

SEQ ID NO: 12708 - RNA, 20 nt, synthetic construct
  misc_feature 1..20: note = Synthetic
  source 1..20: mol_type = other RNA
cgcgggcccggcggcgtagt

SEQ ID NO: 12709 - RNA, 20 nt, synthetic construct
  misc_feature 1..20: note = Synthetic
  source 1..20: mol_type = other RNA
cgtctcgtagtagtacacgt

SEQ ID NO: 12710 - RNA, 20 nt, synthetic construct
  misc_feature 1..20: note = Synthetic
  source 1..20: mol_type = other RNA
gagaccgccggcaggcacgt

SEQ ID NO: 12711 - RNA, 20 nt, synthetic construct
  misc_feature 1..20: note = Synthetic
  source 1..20: mol_type = other RNA
agcgtgatgacggtccccgt

SEQ ID NO: 12712 - RNA, 20 nt, synthetic construct
  misc_feature 1..20: note = Synthetic
  source 1..20: mol_type = other RNA
cgtgttcagggcgacgccgt

SEQ ID NO: 12713 - RNA, 20 nt, synthetic construct
  misc_feature 1..20: note = Synthetic
  source 1..20: mol_type = other RNA
gccgccgggctgacggccgt

SEQ ID NO: 12714 - RNA, 20 nt, synthetic construct
  misc_feature 1..20: note = Synthetic
  source 1..20: mol_type = other RNA
aattccagaaccacgggcgt

SEQ ID NO: 12715 - RNA, 20 nt, synthetic construct
  misc_feature 1..20: note = Synthetic
  source 1..20: mol_type = other RNA
ctccaggtgcgccactgcgt

SEQ ID NO: 12716 - RNA, 20 nt, synthetic construct
  misc_feature 1..20: note = Synthetic
  source 1..20: mol_type = other RNA
tgcgctcgcagagatctcgt

SEQ ID NO: 12717 - RNA, 20 nt, synthetic construct
  misc_feature 1..20: note = Synthetic
  source 1..20: mol_type = other RNA
cttgtaatacaccgtcaggt

SEQ ID NO: 12718 - RNA, 20 nt, synthetic construct
  misc_feature 1..20: note = Synthetic
  source 1..20: mol_type = other RNA
ggccgccagctcgttcaggt

SEQ ID NO: 12719 - RNA, 20 nt, synthetic construct
  misc_feature 1..20: note = Synthetic
  source 1..20: mol_type = other RNA
acatgagcttgtatgccggt

SEQ ID NO: 12720 - RNA, 20 nt, synthetic construct
  misc_feature 1..20: note = Synthetic
  source 1..20: mol_type = other RNA
accgcagggttcggggcggt

SEQ ID NO: 12721 - RNA, 20 nt, synthetic construct
  misc_feature 1..20: note = Synthetic
  source 1..20: mol_type = other RNA
ccatcaagaagtacgagggt

SEQ ID NO: 12722 - RNA, 20 nt, synthetic construct
  misc_feature 1..20: note = Synthetic
  source 1..20: mol_type = other RNA
ctggatgtccctctccgggt

SEQ ID NO: 12723 - RNA, 20 nt, synthetic construct
  misc_feature 1..20: note = Synthetic
  source 1..20: mol_type = other RNA
ggacgcgcctcccggggggt

SEQ ID NO: 12724 - RNA, 20 nt, synthetic construct
  misc_feature 1..20: note = Synthetic
  source 1..20: mol_type = other RNA
atacaggattccctgctggt

SEQ ID NO: 12725 - RNA, 20 nt, synthetic construct
  misc_feature 1..20: note = Synthetic
  source 1..20: mol_type = other RNA
cagaataaagcccttctggt

SEQ ID NO: 12726 - RNA, 20 nt, synthetic construct
  misc_feature 1..20: note = Synthetic
  source 1..20: mol_type = other RNA
gggcccgggggcgcgcatgt

SEQ ID NO: 12727 - RNA, 20 nt, synthetic construct
  misc_feature 1..20: note = Synthetic
  source 1..20: mol_type = other RNA
cagcgaattcgagatgctgt

SEQ ID NO: 12728 - RNA, 20 nt, synthetic construct
  misc_feature 1..20: note = Synthetic
  source 1..20: mol_type = other RNA
ccggggcgtgtttcgcgtgt

SEQ ID NO: 12729 - RNA, 20 nt, synthetic construct
  misc_feature 1..20: note = Synthetic
  source 1..20: mol_type = other RNA
ctcgtggggcgcggcattgt

SEQ ID NO: 12730 - RNA, 20 nt, synthetic construct
  misc_feature 1..20: note = Synthetic
  source 1..20: mol_type = other RNA
caggtgggccaggcgcttgt

SEQ ID NO: 12731 - RNA, 20 nt, synthetic construct
  misc_feature 1..20: note = Synthetic
  source 1..20: mol_type = other RNA
gctcgagagcttgatcttgt

SEQ ID NO: 12732 - RNA, 20 nt, synthetic construct
  misc_feature 1..20: note = Synthetic
  source 1..20: mol_type = other RNA
cgtgctgaagcacaggttgt

SEQ ID NO: 12733 - RNA, 20 nt, synthetic construct
  misc_feature 1..20: note = Synthetic
  source 1..20: mol_type = other RNA
aaccccgggttcgtcacctt

SEQ ID NO: 12734 - RNA, 20 nt, synthetic construct
  misc_feature 1..20: note = Synthetic
  source 1..20: mol_type = other RNA
cgggctgcggccggacgctt

SEQ ID NO: 12735 - RNA, 20 nt, synthetic construct
  misc_feature 1..20: note = Synthetic
  source 1..20: mol_type = other RNA
acgacagcacacgcccgctt

SEQ ID NO: 12736 - RNA, 20 nt, synthetic construct
  misc_feature 1..20: note = Synthetic
  source 1..20: mol_type = other RNA
cttgtccttcaggacggctt

SEQ ID NO: 12737 - RNA, 20 nt, synthetic construct
  misc_feature 1..20: note = Synthetic
  source 1..20: mol_type = other RNA
gcgcgggtgtctgctcagtt

SEQ ID NO: 12738 - RNA, 19 nt, synthetic construct
  misc_feature 1..19: note = Synthetic
  source 1..19: mol_type = other RNA
gttttgcctcaaacaaggc

SEQ ID NO: 12739 - RNA, 21 nt, synthetic construct
  misc_feature 1..21: note = Synthetic
  source 1..21: mol_type = other RNA
gtacgcgtgctccacgttctc

SEQ ID NO: 12740 - RNA, 24 nt, synthetic construct
  misc_feature 1..24: note = Synthetic
  source 1..24: mol_type = other RNA
gccgtacgcgtgctccacgttctc

SEQ ID NO: 12741 - RNA, 19 nt, synthetic construct
  misc_feature 1..19: note = Synthetic
  source 1..19: mol_type = other RNA
gtccagcacccgcggggcg

SEQ ID NO: 12742 - RNA, 18 nt, synthetic construct
  misc_feature 1..18: note = Synthetic
  source 1..18: mol_type = other RNA
gctatagtacgtatggcg

SEQ ID NO: 12743 - RNA, 24 nt, synthetic construct
  misc_feature 1..24: note = Synthetic
  source 1..24: mol_type = other RNA
gcattcgctatagtacgtatggcg

SEQ ID NO: 12744 - RNA, 23 nt, synthetic construct
  misc_feature 1..23: note = Synthetic
  source 1..23: mol_type = other RNA
gtacacgtgaaagacggtgacgg

SEQ ID NO: 12745 - RNA, 21 nt, synthetic construct
  misc_feature 1..21: note = Synthetic
  source 1..21: mol_type = other RNA
gcgtcccgactggggcgaggt

SEQ ID NO: 12746 - RNA, 24 nt, synthetic construct
  misc_feature 1..24: note = Synthetic
  source 1..24: mol_type = other RNA
gttgcgtcccgactggggcgaggt

SEQ ID NO: 12747 - RNA, 18 nt, synthetic construct
  misc_feature 1..18: note = Synthetic
  source 1..18: mol_type = other RNA
gccccgcgggtgctggac

SEQ ID NO: 12748 - RNA, 23 nt, synthetic construct
  misc_feature 1..23: note = Synthetic
  source 1..23: mol_type = other RNA
gatgaatttcgattcatcgcccc

SEQ ID NO: 12749 - RNA, 23 nt, synthetic construct
  misc_feature 1..23: note = Synthetic
  source 1..23: mol_type = other RNA
gatgcccccccggagaagcgcgc

SEQ ID NO: 12750 - RNA, 24 nt, synthetic construct
  misc_feature 1..24: note = Synthetic
  source 1..24: mol_type = other RNA
ggatgcccccccggagaagcgcgc

SEQ ID NO: 12751 - RNA, 19 nt, synthetic construct
  misc_feature 1..19: note = Synthetic
  source 1..19: mol_type = other RNA
gagcgcgacgtcctccgcg

SEQ ID NO: 12752 - RNA, 22 nt, synthetic construct
  misc_feature 1..22: note = Synthetic
  source 1..22: mol_type = other RNA
gacgagcgcgacgtcctccgcg

SEQ ID NO: 12753 - RNA, 23 nt, synthetic construct
  misc_feature 1..23: note = Synthetic
  source 1..23: mol_type = other RNA
ggacgagcgcgacgtcctccgcg

SEQ ID NO: 12754 - RNA, 24 nt, synthetic construct
  misc_feature 1..24: note = Synthetic
  source 1..24: mol_type = other RNA
gggacgagcgcgacgtcctccgcg

SEQ ID NO: 12755 - RNA, 24 nt, synthetic construct
  misc_feature 1..24: note = Synthetic
  source 1..24: mol_type = other RNA
gccatacgtactatagcgaatgcg

SEQ ID NO: 12756 - RNA, 21 nt, synthetic construct
  misc_feature 1..21: note = Synthetic
  source 1..21: mol_type = other RNA
gcggcgtggaccacgccccgg

SEQ ID NO: 12757 - RNA, 22 nt, synthetic construct
  misc_feature 1..22: note = Synthetic
  source 1..22: mol_type = other RNA
ggcggcgtggaccacgccccgg

SEQ ID NO: 12758 - RNA, 23 nt, synthetic construct
  misc_feature 1..23: note = Synthetic
  source 1..23: mol_type = other RNA
gggcggcgtggaccacgccccgg

SEQ ID NO: 12759 - RNA, 24 nt, synthetic construct
  misc_feature 1..24: note = Synthetic
  source 1..24: mol_type = other RNA
ggggcggcgtggaccacgccccgg

SEQ ID NO: 12760 - RNA, 24 nt, synthetic construct
  misc_feature 1..24: note = Synthetic
  source 1..24: mol_type = other RNA
gaaagtcggcggccagggcggcgt

SEQ ID NO: 12761 - RNA, 18 nt, synthetic construct
  misc_feature 1..18: note = Synthetic
  source 1..18: mol_type = other RNA
ttttgcctcaaacaaggc

SEQ ID NO: 12762 - RNA, 21 nt, synthetic construct
  misc_feature 1..21: note = Synthetic
  source 1..21: mol_type = other RNA
aagttttgcctcaaacaaggc

SEQ ID NO: 12763 - RNA, 22 nt, synthetic construct
  misc_feature 1..22: note = Synthetic
  source 1..22: mol_type = other RNA
aaagttttgcctcaaacaaggc

SEQ ID NO: 12764 - RNA, 23 nt, synthetic construct
  misc_feature 1..23: note = Synthetic
  source 1..23: mol_type = other RNA
aaaagttttgcctcaaacaaggc

SEQ ID NO: 12765 - RNA, 24 nt, synthetic construct
  misc_feature 1..24: note = Synthetic
  source 1..24: mol_type = other RNA
taaaagttttgcctcaaacaaggc

SEQ ID NO: 12766 - RNA, 18 nt, synthetic construct
  misc_feature 1..18: note = Synthetic
  source 1..18: mol_type = other RNA
cgcgtgctccacgttctc

SEQ ID NO: 12767 - RNA, 19 nt, synthetic construct
  misc_feature 1..19: note = Synthetic
  source 1..19: mol_type = other RNA
acgcgtgctccacgttctc

SEQ ID NO: 12768 - RNA, 22 nt, synthetic construct
  misc_feature 1..22: note = Synthetic
  source 1..22: mol_type = other RNA
cgtacgcgtgctccacgttctc

SEQ ID NO: 12769 - RNA, 23 nt, synthetic construct
  misc_feature 1..23: note = Synthetic
  source 1..23: mol_type = other RNA
ccgtacgcgtgctccacgttctc

SEQ ID NO: 12770 - RNA, 18 nt, synthetic construct
  misc_feature 1..18: note = Synthetic
  source 1..18: mol_type = other RNA
tccagcacccgcggggcg

SEQ ID NO: 12771 - RNA, 21 nt, synthetic construct
  misc_feature 1..21: note = Synthetic
  source 1..21: mol_type = other RNA
tcgtccagcacccgcggggcg

SEQ ID NO: 12772 - RNA, 22 nt, synthetic construct
  misc_feature 1..22: note = Synthetic
  source 1..22: mol_type = other RNA
ctcgtccagcacccgcggggcg

SEQ ID NO: 12773 - RNA, 23 nt, synthetic construct
  misc_feature 1..23: note = Synthetic
  source 1..23: mol_type = other RNA
cctcgtccagcacccgcggggcg

SEQ ID NO: 12774 - RNA, 24 nt, synthetic construct
  misc_feature 1..24: note = Synthetic
  source 1..24: mol_type = other RNA
tcctcgtccagcacccgcggggcg

SEQ ID NO: 12775 - RNA, 19 nt, synthetic construct
  misc_feature 1..19: note = Synthetic
  source 1..19: mol_type = other RNA
cgctatagtacgtatggcg

SEQ ID NO: 12776 - RNA, 21 nt, synthetic construct
  misc_feature 1..21: note = Synthetic
  source 1..21: mol_type = other RNA
ttcgctatagtacgtatggcg

SEQ ID NO: 12777 - RNA, 22 nt, synthetic construct
  misc_feature 1..22: note = Synthetic
  source 1..22: mol_type = other RNA
attcgctatagtacgtatggcg

SEQ ID NO: 12778 - RNA, 23 nt, synthetic construct
  misc_feature 1..23: note = Synthetic
  source 1..23: mol_type = other RNA
cattcgctatagtacgtatggcg

SEQ ID NO: 12779 - RNA, 18 nt, synthetic construct
  misc_feature 1..18: note = Synthetic
  source 1..18: mol_type = other RNA
cgtgaaagacggtgacgg

SEQ ID NO: 12780 - RNA, 19 nt, synthetic construct
  misc_feature 1..19: note = Synthetic
  source 1..19: mol_type = other RNA
acgtgaaagacggtgacgg

SEQ ID NO: 12781 - RNA, 21 nt, synthetic construct
  misc_feature 1..21: note = Synthetic
  source 1..21: mol_type = other RNA
acacgtgaaagacggtgacgg

SEQ ID NO: 12782 - RNA, 22 nt, synthetic construct
  misc_feature 1..22: note = Synthetic
  source 1..22: mol_type = other RNA
tacacgtgaaagacggtgacgg

SEQ ID NO: 12783 - RNA, 24 nt, synthetic construct
  misc_feature 1..24: note = Synthetic
  source 1..24: mol_type = other RNA
cgtacacgtgaaagacggtgacgg

SEQ ID NO: 12784 - RNA, 22 nt, synthetic construct
  misc_feature 1..22: note = Synthetic
  source 1..22: mol_type = other RNA
tgcgtcccgactggggcgaggt

SEQ ID NO: 12785 - RNA, 23 nt, synthetic construct
  misc_feature 1..23: note = Synthetic
  source 1..23: mol_type = other RNA
ttgcgtcccgactggggcgaggt

SEQ ID NO: 12786 - RNA, 18 nt, synthetic construct
  misc_feature 1..18: note = Synthetic
  source 1..18: mol_type = other RNA
agcgccatacgtactata

SEQ ID NO: 12787 - RNA, 19 nt, synthetic construct
  misc_feature 1..19: note = Synthetic
  source 1..19: mol_type = other RNA
cagcgccatacgtactata

SEQ ID NO: 12788 - RNA, 21 nt, synthetic construct
  misc_feature 1..21: note = Synthetic
  source 1..21: mol_type = other RNA
cccagcgccatacgtactata

SEQ ID NO: 12789 - RNA, 22 nt, synthetic construct
  misc_feature 1..22: note = Synthetic
  source 1..22: mol_type = other RNA
acccagcgccatacgtactata

SEQ ID NO: 12790 - RNA, 23 nt, synthetic construct
  misc_feature 1..23: note = Synthetic
  source 1..23: mol_type = other RNA
aacccagcgccatacgtactata

SEQ ID NO: 12791 - RNA, 24 nt, synthetic construct
  misc_feature 1..24: note = Synthetic
  source 1..24: mol_type = other RNA
caacccagcgccatacgtactata

SEQ ID NO: 12792 - RNA, 19 nt, synthetic construct
  misc_feature 1..19: note = Synthetic
  source 1..19: mol_type = other RNA
cgccccgcgggtgctggac

SEQ ID NO: 12793 - RNA, 21 nt, synthetic construct
  misc_feature 1..21: note = Synthetic
  source 1..21: mol_type = other RNA
atcgccccgcgggtgctggac

SEQ ID NO: 12794 - RNA, 22 nt, synthetic construct
  misc_feature 1..22: note = Synthetic
  source 1..22: mol_type = other RNA
catcgccccgcgggtgctggac

SEQ ID NO: 12795 - RNA, 23 nt, synthetic construct
  misc_feature 1..23: note = Synthetic
  source 1..23: mol_type = other RNA
tcatcgccccgcgggtgctggac

SEQ ID NO: 12796 - RNA, 24 nt, synthetic construct
  misc_feature 1..24: note = Synthetic
  source 1..24: mol_type = other RNA
ttcatcgccccgcgggtgctggac

SEQ ID NO: 12797 - RNA, 18 nt, synthetic construct
  misc_feature 1..18: note = Synthetic
  source 1..18: mol_type = other RNA
atttcgattcatcgcccc

SEQ ID NO: 12798 - RNA, 19 nt, synthetic construct
  misc_feature 1..19: note = Synthetic
  source 1..19: mol_type = other RNA
aatttcgattcatcgcccc

SEQ ID NO: 12799 - RNA, 21 nt, synthetic construct
  misc_feature 1..21: note = Synthetic
  source 1..21: mol_type = other RNA
tgaatttcgattcatcgcccc

SEQ ID NO: 12800 - RNA, 22 nt, synthetic construct
  misc_feature 1..22: note = Synthetic
  source 1..22: mol_type = other RNA
atgaatttcgattcatcgcccc

SEQ ID NO: 12801 - RNA, 24 nt, synthetic construct
  misc_feature 1..24: note = Synthetic
  source 1..24: mol_type = other RNA
cgatgaatttcgattcatcgcccc

SEQ ID NO: 12802 - RNA, 18 nt, synthetic construct
  misc_feature 1..18: note = Synthetic
  source 1..18: mol_type = other RNA
ccccccggagaagcgcgc

SEQ ID NO: 12803 - RNA, 19 nt, synthetic construct
  misc_feature 1..19: note = Synthetic
  source 1..19: mol_type = other RNA
cccccccggagaagcgcgc

SEQ ID NO: 12804 - RNA, 21 nt, synthetic construct
  misc_feature 1..21: note = Synthetic
  source 1..21: mol_type = other RNA
tgcccccccggagaagcgcgc

SEQ ID NO: 12805 - RNA, 22 nt, synthetic construct
  misc_feature 1..22: note = Synthetic
  source 1..22: mol_type = other RNA
atgcccccccggagaagcgcgc

SEQ ID NO: 12806 - RNA, 18 nt, synthetic construct
  misc_feature 1..18: note = Synthetic
  source 1..18: mol_type = other RNA
agcgcgacgtcctccgcg

SEQ ID NO: 12807 - RNA, 21 nt, synthetic construct
  misc_feature 1..21: note = Synthetic
  source 1..21: mol_type = other RNA
acgagcgcgacgtcctccgcg

SEQ ID NO: 12808 - RNA, 18 nt, synthetic construct
  misc_feature 1..18: note = Synthetic
  source 1..18: mol_type = other RNA
cgtactatagcgaatgcg

SEQ ID NO: 12809 - RNA, 19 nt, synthetic construct
  misc_feature 1..19: note = Synthetic
  source 1..19: mol_type = other RNA
acgtactatagcgaatgcg

SEQ ID NO: 12810 - RNA, 21 nt, synthetic construct
  misc_feature 1..21: note = Synthetic
  source 1..21: mol_type = other RNA
atacgtactatagcgaatgcg

SEQ ID NO: 12811 - RNA, 22 nt, synthetic construct
  misc_feature 1..22: note = Synthetic
  source 1..22: mol_type = other RNA
catacgtactatagcgaatgcg

SEQ ID NO: 12812 - RNA, 23 nt, synthetic construct
  misc_feature 1..23: note = Synthetic
  source 1..23: mol_type = other RNA
ccatacgtactatagcgaatgcg

SEQ ID NO: 12813 - RNA, 21 nt, synthetic construct
  misc_feature 1..21: note = Synthetic
  source 1..21: mol_type = other RNA
agtcggcggccagggcggcgt

SEQ ID NO: 12814 - RNA, 22 nt, synthetic construct
  misc_feature 1..22: note = Synthetic
  source 1..22: mol_type = other RNA
aagtcggcggccagggcggcgt

SEQ ID NO: 12815 - RNA, 23 nt, synthetic construct
  misc_feature 1..23: note = Synthetic
  source 1..23: mol_type = other RNA
aaagtcggcggccagggcggcgt

SEQ ID NO: 12816 - RNA, 18 nt, synthetic construct
  misc_feature 1..18: note = Synthetic
  source 1..18: mol_type = other RNA
tcccgactggggcgaggt

SEQ ID NO: 12817 - RNA, 19 nt, synthetic construct
  misc_feature 1..19: note = Synthetic
  source 1..19: mol_type = other RNA
gtcccgactggggcgaggt

SEQ ID NO: 12818 - RNA, 18 nt, synthetic construct
  misc_feature 1..18: note = Synthetic
  source 1..18: mol_type = other RNA
gcgtggaccacgccccgg

SEQ ID NO: 12819 - RNA, 19 nt, synthetic construct
  misc_feature 1..19: note = Synthetic
  source 1..19: mol_type = other RNA
ggcgtggaccacgccccgg

SEQ ID NO: 12820 - RNA, 18 nt, synthetic construct
  misc_feature 1..18: note = Synthetic
  source 1..18: mol_type = other RNA
cggcggccagggcggcgt

SEQ ID NO: 12821 - RNA, 19 nt, synthetic construct
  misc_feature 1..19: note = Synthetic
  source 1..19: mol_type = other RNA
tcggcggccagggcggcgt

SEQ ID NO: 12822 - RNA, 18 nt, synthetic construct
  misc_feature 1..18: note = Synthetic
  source 1..18: mol_type = other RNA
cataaaccgcgcgtggaa

SEQ ID NO: 12823 - RNA, 19 nt, synthetic construct
  misc_feature 1..19: note = Synthetic
  source 1..19: mol_type = other RNA
ccataaaccgcgcgtggaa

SEQ ID NO: 12824 - RNA, 20 nt, synthetic construct
  misc_feature 1..20: note = Synthetic
  source 1..20: mol_type = other RNA
tccataaaccgcgcgtggaa

SEQ ID NO: 12825 - RNA, 21 nt, synthetic construct
  misc_feature 1..21: note = Synthetic
  source 1..21: mol_type = other RNA
gtccataaaccgcgcgtggaa

SEQ ID NO: 12826 - RNA, 22 nt, synthetic construct
  misc_feature 1..22: note = Synthetic
  source 1..22: mol_type = other RNA
cgtccataaaccgcgcgtggaa

SEQ ID NO: 12827 - RNA, 23 nt, synthetic construct
  misc_feature 1..23: note = Synthetic
  source 1..23: mol_type = other RNA
gcgtccataaaccgcgcgtggaa

SEQ ID NO: 12828 - RNA, 24 nt, synthetic construct
  misc_feature 1..24: note = Synthetic
  source 1..24: mol_type = other RNA
ggcgtccataaaccgcgcgtggaa

SEQ ID NO: 12829 - RNA, 18 nt, synthetic construct
  misc_feature 1..18: note = Synthetic
  source 1..18: mol_type = other RNA
cacccgcggggcgatgaa

SEQ ID NO: 12830 - RNA, 19 nt, synthetic construct
  misc_feature 1..19: note = Synthetic
  source 1..19: mol_type = other RNA
gcacccgcggggcgatgaa

SEQ ID NO: 12831 - RNA, 21 nt, synthetic construct
  misc_feature 1..21: note = Synthetic
  source 1..21: mol_type = other RNA
cagcacccgcggggcgatgaa

SEQ ID NO: 12832 - RNA, 22 nt, synthetic construct
  misc_feature 1..22: note = Synthetic
  source 1..22: mol_type = other RNA
ccagcacccgcggggcgatgaa

SEQ ID NO: 12833 - RNA, 23 nt, synthetic construct
  misc_feature 1..23: note = Synthetic
  source 1..23: mol_type = other RNA
tccagcacccgcggggcgatgaa

SEQ ID NO: 12834 - RNA, 24 nt, synthetic construct
  misc_feature 1..24: note = Synthetic
  source 1..24: mol_type = other RNA
gtccagcacccgcggggcgatgaa

SEQ ID NO: 12835 - RNA, 18 nt, synthetic construct
  misc_feature 1..18: note = Synthetic
  source 1..18: mol_type = other RNA
actttcctccgggggaca

SEQ ID NO: 12836 - RNA, 19 nt, synthetic construct
  misc_feature 1..19: note = Synthetic
  source 1..19: mol_type = other RNA
gactttcctccgggggaca

SEQ ID NO: 12837 - RNA, 21 nt, synthetic construct
  misc_feature 1..21: note = Synthetic
  source 1..21: mol_type = other RNA
ccgactttcctccgggggaca

SEQ ID NO: 12838 - RNA, 22 nt, synthetic construct
  misc_feature 1..22: note = Synthetic
  source 1..22: mol_type = other RNA
gccgactttcctccgggggaca

SEQ ID NO: 12839 - RNA, 23 nt, synthetic construct
  misc_feature 1..23: note = Synthetic
  source 1..23: mol_type = other RNA
cgccgactttcctccgggggaca

SEQ ID NO: 12840 - RNA, 24 nt, synthetic construct
  misc_feature 1..24: note = Synthetic
  source 1..24: mol_type = other RNA
ccgccgactttcctccgggggaca

SEQ ID NO: 12841 - RNA, 18 nt, synthetic construct
  misc_feature 1..18: note = Synthetic
  source 1..18: mol_type = other RNA
gacagcgggccgccgcca

SEQ ID NO: 12842 - RNA, 19 nt, synthetic construct
  misc_feature 1..19: note = Synthetic
  source 1..19: mol_type = other RNA
ggacagcgggccgccgcca

SEQ ID NO: 12843 - RNA, 21 nt, synthetic construct
  misc_feature 1..21: note = Synthetic
  source 1..21: mol_type = other RNA
ggggacagcgggccgccgcca

SEQ ID NO: 12844 - RNA, 22 nt, synthetic construct
  misc_feature 1..22: note = Synthetic
  source 1..22: mol_type = other RNA
gggggacagcgggccgccgcca

SEQ ID NO: 12845 - RNA, 23 nt, synthetic construct
  misc_feature 1..23: note = Synthetic
  source 1..23: mol_type = other RNA
cgggggacagcgggccgccgcca

SEQ ID NO: 12846 - RNA, 24 nt, synthetic construct
  misc_feature 1..24: note = Synthetic
  source 1..24: mol_type = other RNA
ccgggggacagcgggccgccgcca

SEQ ID NO: 12847 - RNA, 18 nt, synthetic construct
  misc_feature 1..18: note = Synthetic
  source 1..18: mol_type = other RNA
gcttctgttgcgtcccga

SEQ ID NO: 12848 - RNA, 19 nt, synthetic construct
  misc_feature 1..19: note = Synthetic
  source 1..19: mol_type = other RNA
ggcttctgttgcgtcccga

SEQ ID NO: 12849 - RNA, 21 nt, synthetic construct
  misc_feature 1..21: note = Synthetic
  source 1..21: mol_type = other RNA
tcggcttctgttgcgtcccga

SEQ ID NO: 12850 - RNA, 22 nt, synthetic construct
  misc_feature 1..22: note = Synthetic
  source 1..22: mol_type = other RNA
gtcggcttctgttgcgtcccga

SEQ ID NO: 12851 - RNA, 23 nt, synthetic construct
  misc_feature 1..23: note = Synthetic
  source 1..23: mol_type = other RNA
ggtcggcttctgttgcgtcccga

SEQ ID NO: 12852 - RNA, 24 nt, synthetic construct
  misc_feature 1..24: note = Synthetic
  source 1..24: mol_type = other RNA
cggtcggcttctgttgcgtcccga

SEQ ID NO: 12853 - RNA, 18 nt, synthetic construct
  misc_feature 1..18: note = Synthetic
  source 1..18: mol_type = other RNA
ccggcgggcgcaaaaaac

SEQ ID NO: 12854 - RNA, 19 nt, synthetic construct
  misc_feature 1..19: note = Synthetic
  source 1..19: mol_type = other RNA
gccggcgggcgcaaaaaac

SEQ ID NO: 12855 - RNA, 21 nt, synthetic construct
  misc_feature 1..21: note = Synthetic
  source 1..21: mol_type = other RNA
gggccggcgggcgcaaaaaac

SEQ ID NO: 12856 - RNA, 22 nt, synthetic construct
  misc_feature 1..22: note = Synthetic
  source 1..22: mol_type = other RNA
agggccggcgggcgcaaaaaac

SEQ ID NO: 12857 - RNA, 23 nt, synthetic construct
  misc_feature 1..23: note = Synthetic
  source 1..23: mol_type = other RNA
gagggccggcgggcgcaaaaaac

SEQ ID NO: 12858 - RNA, 24 nt, synthetic construct
  misc_feature 1..24: note = Synthetic
  source 1..24: mol_type = other RNA
cgagggccggcgggcgcaaaaaac

SEQ ID NO: 12859 - RNA, 18 nt, synthetic construct
  misc_feature 1..18: note = Synthetic
  source 1..18: mol_type = other RNA
ctccaggatgtcgtacac

SEQ ID NO: 12860 - RNA, 19 nt, synthetic construct
  misc_feature 1..19: note = Synthetic
  source 1..19: mol_type = other RNA
tctccaggatgtcgtacac

SEQ ID NO: 12861 - RNA, 21 nt, synthetic construct
  misc_feature 1..21: note = Synthetic
  source 1..21: mol_type = other RNA
gttctccaggatgtcgtacac

SEQ ID NO: 12862 - RNA, 22 nt, synthetic construct
  misc_feature 1..22: note = Synthetic
  source 1..22: mol_type = other RNA
cgttctccaggatgtcgtacac

SEQ ID NO: 12863 - RNA, 23 nt, synthetic construct
  misc_feature 1..23: note = Synthetic
  source 1..23: mol_type = other RNA
acgttctccaggatgtcgtacac

SEQ ID NO: 12864 - RNA, 24 nt, synthetic construct
  misc_feature 1..24: note = Synthetic
  source 1..24: mol_type = other RNA
cacgttctccaggatgtcgtacac

SEQ ID NO: 12865 - RNA, 18 nt, synthetic construct
  misc_feature 1..18: note = Synthetic
  source 1..18: mol_type = other RNA
catcgcggttgttcccac

SEQ ID NO: 12866 - RNA, 19 nt, synthetic construct
  misc_feature 1..19: note = Synthetic
  source 1..19: mol_type = other RNA
acatcgcggttgttcccac

SEQ ID NO: 12867 - RNA, 20 nt, synthetic construct
  misc_feature 1..20: note = Synthetic
  source 1..20: mol_type = other RNA
aacatcgcggttgttcccac

SEQ ID NO: 12868 - RNA, 21 nt, synthetic construct
  misc_feature 1..21: note = Synthetic
  source 1..21: mol_type = other RNA
aaacatcgcggttgttcccac

SEQ ID NO: 12869 - RNA, 22 nt, synthetic construct
  misc_feature 1..22: note = Synthetic
  source 1..22: mol_type = other RNA
aaaacatcgcggttgttcccac

SEQ ID NO: 12870 - RNA, 23 nt, synthetic construct
  misc_feature 1..23: note = Synthetic
  source 1..23: mol_type = other RNA
gaaaacatcgcggttgttcccac

SEQ ID NO: 12871 - RNA, 24 nt, synthetic construct
  misc_feature 1..24: note = Synthetic
  source 1..24: mol_type = other RNA
ggaaaacatcgcggttgttcccac

SEQ ID NO: 12872 - RNA, 18 nt, synthetic construct
  misc_feature 1..18: note = Synthetic
  source 1..18: mol_type = other RNA
acagcgggccgccgccac

SEQ ID NO: 12873 - RNA, 19 nt, synthetic construct
  misc_feature 1..19: note = Synthetic
  source 1..19: mol_type = other RNA
gacagcgggccgccgccac

SEQ ID NO: 12874 - RNA, 21 nt, synthetic construct
  misc_feature 1..21: note = Synthetic
  source 1..21: mol_type = other RNA
gggacagcgggccgccgccac

SEQ ID NO: 12875 - RNA, 22 nt, synthetic construct
  misc_feature 1..22: note = Synthetic
  source 1..22: mol_type = other RNA
ggggacagcgggccgccgccac

SEQ ID NO: 12876 - RNA, 23 nt, synthetic construct
  misc_feature 1..23: note = Synthetic
  source 1..23: mol_type = other RNA
gggggacagcgggccgccgccac

SEQ ID NO: 12877 - RNA, 24 nt, synthetic construct
  misc_feature 1..24: note = Synthetic
  source 1..24: mol_type = other RNA
cgggggacagcgggccgccgccac

SEQ ID NO: 12878 - RNA, 18 nt, synthetic construct
  misc_feature 1..18: note = Synthetic
  source 1..18: mol_type = other RNA
gaagccgcccgacccgac

SEQ ID NO: 12879 - RNA, 19 nt, synthetic construct
  misc_feature 1..19: note = Synthetic
  source 1..19: mol_type = other RNA
agaagccgcccgacccgac

SEQ ID NO: 12880 - RNA, 21 nt, synthetic construct
  misc_feature 1..21: note = Synthetic
  source 1..21: mol_type = other RNA
ccagaagccgcccgacccgac

SEQ ID NO: 12881 - RNA, 22 nt, synthetic construct
  misc_feature 1..22: note = Synthetic
  source 1..22: mol_type = other RNA
gccagaagccgcccgacccgac

SEQ ID NO: 12882 - RNA, 23 nt, synthetic construct
  misc_feature 1..23: note = Synthetic
  source 1..23: mol_type = other RNA
ggccagaagccgcccgacccgac

SEQ ID NO: 12883 - RNA, 24 nt, synthetic construct
  misc_feature 1..24: note = Synthetic
  source 1..24: mol_type = other RNA
cggccagaagccgcccgacccgac

SEQ ID NO: 12884 - RNA, 18 nt, synthetic construct
  misc_feature 1..18: note = Synthetic
  source 1..18: mol_type = other RNA
cttctgttgcgtcccgac

SEQ ID NO: 12885 - RNA, 19 nt, synthetic construct
  misc_feature 1..19: note = Synthetic
  source 1..19: mol_type = other RNA
gcttctgttgcgtcccgac

SEQ ID NO: 12886 - RNA, 21 nt, synthetic construct
  misc_feature 1..21: note = Synthetic
  source 1..21: mol_type = other RNA
cggcttctgttgcgtcccgac

SEQ ID NO: 12887 - RNA, 22 nt, synthetic construct
  misc_feature 1..22: note = Synthetic
  source 1..22: mol_type = other RNA
tcggcttctgttgcgtcccgac

SEQ ID NO: 12888 - RNA, 23 nt, synthetic construct
  misc_feature 1..23: note = Synthetic
  source 1..23: mol_type = other RNA
gtcggcttctgttgcgtcccgac

SEQ ID NO: 12889 - RNA, 24 nt, synthetic construct
  misc_feature 1..24: note = Synthetic
  source 1..24: mol_type = other RNA
ggtcggcttctgttgcgtcccgac

SEQ ID NO: 12890 - RNA, 18 nt, synthetic construct
  misc_feature 1..18: note = Synthetic
  source 1..18: mol_type = other RNA
tcccccccgcagtacacc

SEQ ID NO: 12891 - RNA, 19 nt, synthetic construct
  misc_feature 1..19: note = Synthetic
  source 1..19: mol_type = other RNA
gtcccccccgcagtacacc

SEQ ID NO: 12892 - RNA, 21 nt, synthetic construct
  misc_feature 1..21: note = Synthetic
  source 1..21: mol_type = other RNA
tcgtcccccccgcagtacacc

SEQ ID NO: 12893 - RNA, 22 nt, synthetic construct
  misc_feature 1..22: note = Synthetic
  source 1..22: mol_type = other RNA
ctcgtcccccccgcagtacacc

SEQ ID NO: 12894 - RNA, 23 nt, synthetic construct
  misc_feature 1..23: note = Synthetic
  source 1..23: mol_type = other RNA
gctcgtcccccccgcagtacacc

SEQ ID NO: 12895 - RNA, 24 nt, synthetic construct
  misc_feature 1..24: note = Synthetic
  source 1..24: mol_type = other RNA
cgctcgtcccccccgcagtacacc

SEQ ID NO: 12896 - RNA, 18 nt, synthetic construct
  misc_feature 1..18: note = Synthetic
  source 1..18: mol_type = other RNA
catcctcgtccagcaccc

SEQ ID NO: 12897 - RNA, 19 nt, synthetic construct
  misc_feature 1..19: note = Synthetic
  source 1..19: mol_type = other RNA
gcatcctcgtccagcaccc

SEQ ID NO: 12898 - RNA, 21 nt, synthetic construct
  misc_feature 1..21: note = Synthetic
  source 1..21: mol_type = other RNA
gggcatcctcgtccagcaccc

SEQ ID NO: 12899 - RNA, 22 nt, synthetic construct
  misc_feature 1..22: note = Synthetic
  source 1..22: mol_type = other RNA
ggggcatcctcgtccagcaccc

SEQ ID NO: 12900 - RNA, 23 nt, synthetic construct
  misc_feature 1..23: note = Synthetic
  source 1..23: mol_type = other RNA
gggggcatcctcgtccagcaccc

SEQ ID NO: 12901 - RNA, 24 nt, synthetic construct
  misc_feature 1..24: note = Synthetic
  source 1..24: mol_type = other RNA
ggggggcatcctcgtccagcaccc

SEQ ID NO: 12902 - RNA, 18 nt, synthetic construct
  misc_feature 1..18: note = Synthetic
  source 1..18: mol_type = other RNA
ggccgccgactttcctcc

SEQ ID NO: 12903 - RNA, 19 nt, synthetic construct
  misc_feature 1..19: note = Synthetic
  source 1..19: mol_type = other RNA
tggccgccgactttcctcc

SEQ ID NO: 12904 - RNA, 21 nt, synthetic construct
  misc_feature 1..21: note = Synthetic
  source 1..21: mol_type = other RNA
cctggccgccgactttcctcc

SEQ ID NO: 12905 - RNA, 22 nt, synthetic construct
  misc_feature 1..22: note = Synthetic
  source 1..22: mol_type = other RNA
ccctggccgccgactttcctcc

SEQ ID NO: 12906 - RNA, 23 nt, synthetic construct
  misc_feature 1..23: note = Synthetic
  source 1..23: mol_type = other RNA
gccctggccgccgactttcctcc

SEQ ID NO: 12907 - RNA, 24 nt, synthetic construct
  misc_feature 1..24: note = Synthetic
  source 1..24: mol_type = other RNA
cgccctggccgccgactttcctcc

SEQ ID NO: 12908 - RNA, 18 nt, synthetic construct
  misc_feature 1..18: note = Synthetic
  source 1..18: mol_type = other RNA
gggtccccggctggctcc

SEQ ID NO: 12909 - RNA, 19 nt, synthetic construct
  misc_feature 1..19: note = Synthetic
  source 1..19: mol_type = other RNA
ggggtccccggctggctcc

SEQ ID NO: 12910 - RNA, 21 nt, synthetic construct
  misc_feature 1..21: note = Synthetic
  source 1..21: mol_type = other RNA
cgggggtccccggctggctcc

SEQ ID NO: 12911 - RNA, 22 nt, synthetic construct
  misc_feature 1..22: note = Synthetic
  source 1..22: mol_type = other RNA
gcgggggtccccggctggctcc

SEQ ID NO: 12912 - RNA, 23 nt, synthetic construct
  misc_feature 1..23: note = Synthetic
  source 1..23: mol_type = other RNA
ggcgggggtccccggctggctcc

SEQ ID NO: 12913 - RNA, 24 nt, synthetic construct
  misc_feature 1..24: note = Synthetic
  source 1..24: mol_type = other RNA
aggcgggggtccccggctggctcc

SEQ ID NO: 12914 - RNA, 18 nt, synthetic construct
  misc_feature 1..18: note = Synthetic
  source 1..18: mol_type = other RNA
accccggcgcgcttctcc

SEQ ID NO: 12915 - RNA, 19 nt, synthetic construct
  misc_feature 1..19: note = Synthetic
  source 1..19: mol_type = other RNA
caccccggcgcgcttctcc

SEQ ID NO: 12916 - RNA, 21 nt, synthetic construct
  misc_feature 1..21: note = Synthetic
  source 1..21: mol_type = other RNA
tgcaccccggcgcgcttctcc

SEQ ID NO: 12917 - RNA, 22 nt, synthetic construct
  misc_feature 1..22: note = Synthetic
  source 1..22: mol_type = other RNA
gtgcaccccggcgcgcttctcc

SEQ ID NO: 12918 - RNA, 23 nt, synthetic construct
  misc_feature 1..23: note = Synthetic
  source 1..23: mol_type = other RNA
cgtgcaccccggcgcgcttctcc

SEQ ID NO: 12919 - RNA, 24 nt, synthetic construct
  misc_feature 1..24: note = Synthetic
  source 1..24: mol_type = other RNA
tcgtgcaccccggcgcgcttctcc

SEQ ID NO: 12920 - RNA, 18 nt, synthetic construct
  misc_feature 1..18: note = Synthetic
  source 1..18: mol_type = other RNA
ggtggggttgaaccccgc

SEQ ID NO: 12921 - RNA, 19 nt, synthetic construct
  misc_feature 1..19: note = Synthetic
  source 1..19: mol_type = other RNA
cggtggggttgaaccccgc

SEQ ID NO: 12922 - RNA, 21 nt, synthetic construct
  misc_feature 1..21: note = Synthetic
  source 1..21: mol_type = other RNA
gacggtggggttgaaccccgc

SEQ ID NO: 12923 - RNA, 22 nt, synthetic construct
  misc_feature 1..22: note = Synthetic
  source 1..22: mol_type = other RNA
tgacggtggggttgaaccccgc

SEQ ID NO: 12924 - RNA, 23 nt, synthetic construct
  misc_feature 1..23: note = Synthetic
  source 1..23: mol_type = other RNA
gtgacggtggggttgaaccccgc

SEQ ID NO: 12925 - RNA, 24 nt, synthetic construct
  misc_feature 1..24: note = Synthetic
  source 1..24: mol_type = other RNA
ggtgacggtggggttgaaccccgc

SEQ ID NO: 12926 - RNA, 18 nt, synthetic construct
  misc_feature 1..18: note = Synthetic
  source 1..18: mol_type = other RNA
gtccccggctggctccgc

SEQ ID NO: 12927 - RNA, 19 nt, synthetic construct
  misc_feature 1..19: note = Synthetic
  source 1..19: mol_type = other RNA
ggtccccggctggctccgc

SEQ ID NO: 12928 - RNA, 21 nt, synthetic construct
  misc_feature 1..21: note = Synthetic
  source 1..21: mol_type = other RNA
ggggtccccggctggctccgc

SEQ ID NO: 12929 - RNA, 22 nt, synthetic construct
  misc_feature 1..22: note = Synthetic
  source 1..22: mol_type = other RNA
gggggtccccggctggctccgc

SEQ ID NO: 12930 - RNA, 23 nt, synthetic construct
  misc_feature 1..23: note = Synthetic
  source 1..23: mol_type = other RNA
cgggggtccccggctggctccgc

SEQ ID NO: 12931 - RNA, 24 nt, synthetic construct
  misc_feature 1..24: note = Synthetic
  source 1..24: mol_type = other RNA
gcgggggtccccggctggctccgc

SEQ ID NO: 12932 - RNA, 18 nt, synthetic construct
  misc_feature 1..18: note = Synthetic
  source 1..18: mol_type = other RNA
ggcgtccataaaccgcgc

SEQ ID NO: 12933 - RNA, 19 nt, synthetic construct
  misc_feature 1..19: note = Synthetic
  source 1..19: mol_type = other RNA
tggcgtccataaaccgcgc

SEQ ID NO: 12934 - RNA, 20 nt, synthetic construct
  misc_feature 1..20: note = Synthetic
  source 1..20: mol_type = other RNA
atggcgtccataaaccgcgc

SEQ ID NO: 12935 - RNA, 21 nt, synthetic construct
  misc_feature 1..21: note = Synthetic
  source 1..21: mol_type = other RNA
gatggcgtccataaaccgcgc

SEQ ID NO: 12936 - RNA, 22 nt, synthetic construct
  misc_feature 1..22: note = Synthetic
  source 1..22: mol_type = other RNA
tgatggcgtccataaaccgcgc

SEQ ID NO: 12937 - RNA, 23 nt, synthetic construct
  misc_feature 1..23: note = Synthetic
  source 1..23: mol_type = other RNA
gtgatggcgtccataaaccgcgc

SEQ ID NO: 12938 - RNA, 24 nt, synthetic construct
  misc_feature 1..24: note = Synthetic
  source 1..24: mol_type = other RNA
tgtgatggcgtccataaaccgcgc

SEQ ID NO: 12939 - RNA, 18 nt, synthetic construct
  misc_feature 1..18: note = Synthetic
  source 1..18: mol_type = other RNA
tacaccttgggggcgcgc

SEQ ID NO: 12940 - RNA, 19 nt, synthetic construct
  misc_feature 1..19: note = Synthetic
  source 1..19: mol_type = other RNA
gtacaccttgggggcgcgc

SEQ ID NO: 12941 - RNA, 21 nt, synthetic construct
  misc_feature 1..21: note = Synthetic
  source 1..21: mol_type = other RNA
cagtacaccttgggggcgcgc

SEQ ID NO: 12942 - RNA, 22 nt, synthetic construct
  misc_feature 1..22: note = Synthetic
  source 1..22: mol_type = other RNA
gcagtacaccttgggggcgcgc

SEQ ID NO: 12943 - RNA, 23 nt, synthetic construct
  misc_feature 1..23: note = Synthetic
  source 1..23: mol_type = other RNA
cgcagtacaccttgggggcgcgc

SEQ ID NO: 12944 - RNA, 24 nt, synthetic construct
  misc_feature 1..24: note = Synthetic
  source 1..24: mol_type = other RNA
ccgcagtacaccttgggggcgcgc

SEQ ID NO: 12945 - RNA, 18 nt, synthetic construct
  misc_feature 1..18: note = Synthetic
  source 1..18: mol_type = other RNA
ccacgccgccccacaggc

SEQ ID NO: 12946 - RNA, 19 nt, synthetic construct
  misc_feature 1..19: note = Synthetic
  source 1..19: mol_type = other RNA
tccacgccgccccacaggc

SEQ ID NO: 12947 - RNA, 21 nt, synthetic construct
  misc_feature 1..21: note = Synthetic
  source 1..21: mol_type = other RNA
ggtccacgccgccccacaggc

SEQ ID NO: 12948 - RNA, 22 nt, synthetic construct
  misc_feature 1..22: note = Synthetic
  source 1..22: mol_type = other RNA
tggtccacgccgccccacaggc

SEQ ID NO: 12949 - RNA, 23 nt, synthetic construct
  misc_feature 1..23: note = Synthetic
  source 1..23: mol_type = other RNA
gtggtccacgccgccccacaggc

SEQ ID NO: 12950 - RNA, 24 nt, synthetic construct
  misc_feature 1..24: note = Synthetic
  source 1..24: mol_type = other RNA
cgtggtccacgccgccccacaggc

SEQ ID NO: 12951 - RNA, 18 nt, synthetic construct
  misc_feature 1..18: note = Synthetic
  source 1..18: mol_type = other RNA
aggcgcgagcgccgcggc

SEQ ID NO: 12952 - RNA, 19 nt, synthetic construct
  misc_feature 1..19: note = Synthetic
  source 1..19: mol_type = other RNA
caggcgcgagcgccgcggc

SEQ ID NO: 12953 - RNA, 21 nt, synthetic construct
  misc_feature 1..21: note = Synthetic
  source 1..21: mol_type = other RNA
cacaggcgcgagcgccgcggc

SEQ ID NO: 12954 - RNA, 22 nt, synthetic construct
  misc_feature 1..22: note = Synthetic
  source 1..22: mol_type = other RNA
ccacaggcgcgagcgccgcggc

SEQ ID NO: 12955 - RNA, 23 nt, synthetic construct
  misc_feature 1..23: note = Synthetic
  source 1..23: mol_type = other RNA
cccacaggcgcgagcgccgcggc

SEQ ID NO: 12956 - RNA, 24 nt, synthetic construct
  misc_feature 1..24: note = Synthetic
  source 1..24: mol_type = other RNA
ccccacaggcgcgagcgccgcggc

SEQ ID NO: 12957 - RNA, 18 nt, synthetic construct
  misc_feature 1..18: note = Synthetic
  source 1..18: mol_type = other RNA
tggccgccgactttcctc

SEQ ID NO: 12958 - RNA, 19 nt, synthetic construct
  misc_feature 1..19: note = Synthetic
  source 1..19: mol_type = other RNA
ctggccgccgactttcctc

SEQ ID NO: 12959 - RNA, 21 nt, synthetic construct
  misc_feature 1..21: note = Synthetic
  source 1..21: mol_type = other RNA
ccctggccgccgactttcctc

SEQ ID NO: 12960 - RNA, 22 nt, synthetic construct
  misc_feature 1..22: note = Synthetic
  source 1..22: mol_type = other RNA
gccctggccgccgactttcctc

SEQ ID NO: 12961 - RNA, 23 nt, synthetic construct
  misc_feature 1..23: note = Synthetic
  source 1..23: mol_type = other RNA
cgccctggccgccgactttcctc

SEQ ID NO: 12962 - RNA, 24 nt, synthetic construct
  misc_feature 1..24: note = Synthetic
  source 1..24: mol_type = other RNA
ccgccctggccgccgactttcctc

SEQ ID NO: 12963 - RNA, 18 nt, synthetic construct
  misc_feature 1..18: note = Synthetic
  source 1..18: mol_type = other RNA
caccccggcgcgcttctc

SEQ ID NO: 12964 - RNA, 19 nt, synthetic construct
  misc_feature 1..19: note = Synthetic
  source 1..19: mol_type = other RNA
gcaccccggcgcgcttctc

SEQ ID NO: 12965 - RNA, 21 nt, synthetic construct
  misc_feature 1..21: note = Synthetic
  source 1..21: mol_type = other RNA
gtgcaccccggcgcgcttctc

SEQ ID NO: 12966 - RNA, 22 nt, synthetic construct
  misc_feature 1..22: note = Synthetic
  source 1..22: mol_type = other RNA
cgtgcaccccggcgcgcttctc

SEQ ID NO: 12967 - RNA, 23 nt, synthetic construct
  misc_feature 1..23: note = Synthetic
  source 1..23: mol_type = other RNA
tcgtgcaccccggcgcgcttctc

SEQ ID NO: 12968 - RNA, 24 nt, synthetic construct
  misc_feature 1..24: note = Synthetic
  source 1..24: mol_type = other RNA
gtcgtgcaccccggcgcgcttctc

SEQ ID NO: 12969 - RNA, 18 nt, synthetic construct
  misc_feature 1..18: note = Synthetic
  source 1..18: mol_type = other RNA
agttttgcctcaaacaag

SEQ ID NO: 12970 - RNA, 19 nt, synthetic construct
  misc_feature 1..19: note = Synthetic
  source 1..19: mol_type = other RNA
aagttttgcctcaaacaag

SEQ ID NO: 12971 - RNA, 21 nt, synthetic construct
  misc_feature 1..21: note = Synthetic
  source 1..21: mol_type = other RNA
aaaagttttgcctcaaacaag

SEQ ID NO: 12972 - RNA, 22 nt, synthetic construct
  misc_feature 1..22: note = Synthetic
  source 1..22: mol_type = other RNA
taaaagttttgcctcaaacaag

SEQ ID NO: 12973 - RNA, 23 nt, synthetic construct
  misc_feature 1..23: note = Synthetic
  source 1..23: mol_type = other RNA
gtaaaagttttgcctcaaacaag

SEQ ID NO: 12974 - RNA, 24 nt, synthetic construct
  misc_feature 1..24: note = Synthetic
  source 1..24: mol_type = other RNA
tgtaaaagttttgcctcaaacaag

SEQ ID NO: 12975 - RNA, 18 nt, synthetic construct
  misc_feature 1..18: note = Synthetic
  source 1..18: mol_type = other RNA
aagccgcccgacccgacg

SEQ ID NO: 12976 - RNA, 19 nt, synthetic construct
  misc_feature 1..19: note = Synthetic
  source 1..19: mol_type = other RNA
gaagccgcccgacccgacg

SEQ ID NO: 12977 - RNA, 21 nt, synthetic construct
  misc_feature 1..21: note = Synthetic
  source 1..21: mol_type = other RNA
cagaagccgcccgacccgacg

SEQ ID NO: 12978 - RNA, 22 nt, synthetic construct
  misc_feature 1..22: note = Synthetic
  source 1..22: mol_type = other RNA
ccagaagccgcccgacccgacg

SEQ ID NO: 12979 - RNA, 23 nt, synthetic construct
  misc_feature 1..23: note = Synthetic
  source 1..23: mol_type = other RNA
gccagaagccgcccgacccgacg

SEQ ID NO: 12980 - RNA, 24 nt, synthetic construct
  misc_feature 1..24: note = Synthetic
  source 1..24: mol_type = other RNA
ggccagaagccgcccgacccgacg

SEQ ID NO: 12981 - RNA, 18 nt, synthetic construct
  misc_feature 1..18: note = Synthetic
  source 1..18: mol_type = other RNA
acgtgaaagacggtgacg

SEQ ID NO: 12982 - RNA, 19 nt, synthetic construct
  misc_feature 1..19: note = Synthetic
  source 1..19: mol_type = other RNA
cacgtgaaagacggtgacg

SEQ ID NO: 12983 - RNA, 21 nt, synthetic construct
  misc_feature 1..21: note = Synthetic
  source 1..21: mol_type = other RNA
tacacgtgaaagacggtgacg

SEQ ID NO: 12984 - RNA, 22 nt, synthetic construct
  misc_feature 1..22: note = Synthetic
  source 1..22: mol_type = other RNA
gtacacgtgaaagacggtgacg

SEQ ID NO: 12985 - RNA, 23 nt, synthetic construct
  misc_feature 1..23: note = Synthetic
  source 1..23: mol_type = other RNA
cgtacacgtgaaagacggtgacg

SEQ ID NO: 12986 - RNA, 24 nt, synthetic construct
  misc_feature 1..24: note = Synthetic
  source 1..24: mol_type = other RNA
tcgtacacgtgaaagacggtgacg

SEQ ID NO: 12987 - RNA, 18 nt, synthetic construct
  misc_feature 1..18: note = Synthetic
  source 1..18: mol_type = other RNA
atcctcgtccagcacccg

SEQ ID NO: 12988 - RNA, 19 nt, synthetic construct
  misc_feature 1..19: note = Synthetic
  source 1..19: mol_type = other RNA
catcctcgtccagcacccg

SEQ ID NO: 12989 - RNA, 21 nt, synthetic construct
  misc_feature 1..21: note = Synthetic
  source 1..21: mol_type = other RNA
ggcatcctcgtccagcacccg

SEQ ID NO: 12990 - RNA, 22 nt, synthetic construct
  misc_feature 1..22: note = Synthetic
  source 1..22: mol_type = other RNA
gggcatcctcgtccagcacccg

SEQ ID NO: 12991 - RNA, 23 nt, synthetic construct
  misc_feature 1..23: note = Synthetic
  source 1..23: mol_type = other RNA
ggggcatcctcgtccagcacccg

SEQ ID NO: 12992 - RNA, 24 nt, synthetic construct
  misc_feature 1..24: note = Synthetic
  source 1..24: mol_type = other RNA
gggggcatcctcgtccagcacccg

SEQ ID NO: 12993 - RNA, 18 nt, synthetic construct
  misc_feature 1..18: note = Synthetic
  source 1..18: mol_type = other RNA
cggtggggttgaaccccg

SEQ ID NO: 12994 - RNA, 19 nt, synthetic construct
  misc_feature 1..19: note = Synthetic
  source 1..19: mol_type = other RNA
acggtggggttgaaccccg

SEQ ID NO: 12995 - RNA, 21 nt, synthetic construct
  misc_feature 1..21: note = Synthetic
  source 1..21: mol_type = other RNA
tgacggtggggttgaaccccg

SEQ ID NO: 12996 - RNA, 22 nt, synthetic construct
  misc_feature 1..22: note = Synthetic
  source 1..22: mol_type = other RNA
gtgacggtggggttgaaccccg

SEQ ID NO: 12997 - RNA, 23 nt, synthetic construct
  misc_feature 1..23: note = Synthetic
  source 1..23: mol_type = other RNA
ggtgacggtggggttgaaccccg

SEQ ID NO: 12998 - RNA, 24 nt, synthetic construct
  misc_feature 1..24: note = Synthetic
  source 1..24: mol_type = other RNA
cggtgacggtggggttgaaccccg

SEQ ID NO: 12999 - RNA, 18 nt, synthetic construct
  misc_feature 1..18: note = Synthetic
  source 1..18: mol_type = other RNA
ctggctccgcgagggccg

SEQ ID NO: 13000 - RNA, 19 nt, synthetic construct
  misc_feature 1..19: note = Synthetic
  source 1..19: mol_type = other RNA
gctggctccgcgagggccg

SEQ ID NO: 13001 - RNA, 21 nt, synthetic construct
  misc_feature 1..21: note = Synthetic
  source 1..21: mol_type = other RNA
cggctggctccgcgagggccg

SEQ ID NO: 13002 - RNA, 22 nt, synthetic construct
  misc_feature 1..22: note = Synthetic
  source 1..22: mol_type = other RNA
ccggctggctccgcgagggccg

SEQ ID NO: 13003 - RNA, 23 nt, synthetic construct
  misc_feature 1..23: note = Synthetic
  source 1..23: mol_type = other RNA
cccggctggctccgcgagggccg

SEQ ID NO: 13004 - RNA, 24 nt, synthetic construct
  misc_feature 1..24: note = Synthetic
  source 1..24: mol_type = other RNA
ccccggctggctccgcgagggccg

SEQ ID NO: 13005 - RNA, 18 nt, synthetic construct
  misc_feature 1..18: note = Synthetic
  source 1..18: mol_type = other RNA
gccgccgactttcctccg

SEQ ID NO: 13006 - RNA, 19 nt, synthetic construct
  misc_feature 1..19: note = Synthetic
  source 1..19: mol_type = other RNA
ggccgccgactttcctccg

SEQ ID NO: 13007 - RNA, 21 nt, synthetic construct
  misc_feature 1..21: note = Synthetic
  source 1..21: mol_type = other RNA
ctggccgccgactttcctccg

SEQ ID NO: 13008 - RNA, 22 nt, synthetic construct
  misc_feature 1..22: note = Synthetic
  source 1..22: mol_type = other RNA
cctggccgccgactttcctccg

SEQ ID NO: 13009 - RNA, 23 nt, synthetic construct
  misc_feature 1..23: note = Synthetic
  source 1..23: mol_type = other RNA
ccctggccgccgactttcctccg

SEQ ID NO: 13010 - RNA, 24 nt, synthetic construct
  misc_feature 1..24: note = Synthetic
  source 1..24: mol_type = other RNA
gccctggccgccgactttcctccg

SEQ ID NO: 13011 - RNA, 18 nt, synthetic construct
  misc_feature 1..18: note = Synthetic
  source 1..18: mol_type = other RNA
ccccggcgcgcttctccg

SEQ ID NO: 13012 - RNA, 19 nt, synthetic construct
  misc_feature 1..19: note = Synthetic
  source 1..19: mol_type = other RNA
accccggcgcgcttctccg

SEQ ID NO: 13013 - RNA, 21 nt, synthetic construct
  misc_feature 1..21: note = Synthetic
  source 1..21: mol_type = other RNA
gcaccccggcgcgcttctccg

SEQ ID NO: 13014 - RNA, 22 nt, synthetic construct
  misc_feature 1..22: note = Synthetic
  source 1..22: mol_type = other RNA
tgcaccccggcgcgcttctccg

SEQ ID NO: 13015 - RNA, 23 nt, synthetic construct
  misc_feature 1..23: note = Synthetic
  source 1..23: mol_type = other RNA
gtgcaccccggcgcgcttctccg

SEQ ID NO: 13016 - RNA, 24 nt, synthetic construct
  misc_feature 1..24: note = Synthetic
  source 1..24: mol_type = other RNA
cgtgcaccccggcgcgcttctccg

SEQ ID NO: 13017 - RNA, 18 nt, synthetic construct
  misc_feature 1..18: note = Synthetic
  source 1..18: mol_type = other RNA
gccgcccgacccgacgcg

SEQ ID NO: 13018 - RNA, 19 nt, synthetic construct
  misc_feature 1..19: note = Synthetic
  source 1..19: mol_type = other RNA
agccgcccgacccgacgcg

SEQ ID NO: 13019 - RNA, 21 nt, synthetic construct
  misc_feature 1..21: note = Synthetic
  source 1..21: mol_type = other RNA
gaagccgcccgacccgacgcg

SEQ ID NO: 13020 - RNA, 22 nt, synthetic construct
  misc_feature 1..22: note = Synthetic
  source 1..22: mol_type = other RNA
agaagccgcccgacccgacgcg

SEQ ID NO: 13021 - RNA, 23 nt, synthetic construct
  misc_feature 1..23: note = Synthetic
  source 1..23: mol_type = other RNA
cagaagccgcccgacccgacgcg

SEQ ID NO: 13022 - RNA, 24 nt, synthetic construct
  misc_feature 1..24: note = Synthetic
  source 1..24: mol_type = other RNA
ccagaagccgcccgacccgacgcg

SEQ ID NO: 13023 - RNA, 18 nt, synthetic construct
  misc_feature 1..18: note = Synthetic
  source 1..18: mol_type = other RNA
gcgtccataaaccgcgcg

SEQ ID NO: 13024 - RNA, 19 nt, synthetic construct
  misc_feature 1..19: note = Synthetic
  source 1..19: mol_type = other RNA
ggcgtccataaaccgcgcg

SEQ ID NO: 13025 - RNA, 21 nt, synthetic construct
  misc_feature 1..21: note = Synthetic
  source 1..21: mol_type = other RNA
atggcgtccataaaccgcgcg

SEQ ID NO: 13026 - RNA, 22 nt, synthetic construct
  misc_feature 1..22: note = Synthetic
  source 1..22: mol_type = other RNA
gatggcgtccataaaccgcgcg

SEQ ID NO: 13027 - RNA, 23 nt, synthetic construct
  misc_feature 1..23: note = Synthetic
  source 1..23: mol_type = other RNA
tgatggcgtccataaaccgcgcg

SEQ ID NO: 13028 - RNA, 24 nt, synthetic construct
  misc_feature 1..24: note = Synthetic
  source 1..24: mol_type = other RNA
gtgatggcgtccataaaccgcgcg

SEQ ID NO: 13029 - RNA, 18 nt, synthetic construct
  misc_feature 1..18: note = Synthetic
  source 1..18: mol_type = other RNA
gttttgcctcaaacaagg

SEQ ID NO: 13030 - RNA, 19 nt, synthetic construct
  misc_feature 1..19: note = Synthetic
  source 1..19: mol_type = other RNA
agttttgcctcaaacaagg

SEQ ID NO: 13031 - RNA, 21 nt, synthetic construct
  misc_feature 1..21: note = Synthetic
  source 1..21: mol_type = other RNA
aaagttttgcctcaaacaagg

SEQ ID NO: 13032 - RNA, 22 nt, synthetic construct
  misc_feature 1..22: note = Synthetic
  source 1..22: mol_type = other RNA
aaaagttttgcctcaaacaagg

SEQ ID NO: 13033 - RNA, 23 nt, synthetic construct
  misc_feature 1..23: note = Synthetic
  source 1..23: mol_type = other RNA
taaaagttttgcctcaaacaagg

SEQ ID NO: 13034 - RNA, 24 nt, synthetic construct
  misc_feature 1..24: note = Synthetic
  source 1..24: mol_type = other RNA
gtaaaagttttgcctcaaacaagg

SEQ ID NO: 13035 - RNA, 18 nt, synthetic construct
  misc_feature 1..18: note = Synthetic
  source 1..18: mol_type = other RNA
gtcccgactggggcgagg

SEQ ID NO: 13036 - RNA, 19 nt, synthetic construct
  misc_feature 1..19: note = Synthetic
  source 1..19: mol_type = other RNA
cgtcccgactggggcgagg

SEQ ID NO: 13037 - RNA, 21 nt, synthetic construct
  misc_feature 1..21: note = Synthetic
  source 1..21: mol_type = other RNA
tgcgtcccgactggggcgagg

SEQ ID NO: 13038 - RNA, 22 nt, synthetic construct
  misc_feature 1..22: note = Synthetic
  source 1..22: mol_type = other RNA
ttgcgtcccgactggggcgagg

SEQ ID NO: 13039 - RNA, 23 nt, synthetic construct
  misc_feature 1..23: note = Synthetic
  source 1..23: mol_type = other RNA
gttgcgtcccgactggggcgagg

SEQ ID NO: 13040 - RNA, 24 nt, synthetic construct
  misc_feature 1..24: note = Synthetic
  source 1..24: mol_type = other RNA
tgttgcgtcccgactggggcgagg

SEQ ID NO: 13041 - RNA, 18 nt, synthetic construct
  misc_feature 1..18: note = Synthetic
  source 1..18: mol_type = other RNA
cccggcgcgcttctccgg

SEQ ID NO: 13042 - RNA, 19 nt, synthetic construct
  misc_feature 1..19: note = Synthetic
  source 1..19: mol_type = other RNA
ccccggcgcgcttctccgg

SEQ ID NO: 13043 - RNA, 21 nt, synthetic construct
  misc_feature 1..21: note = Synthetic
  source 1..21: mol_type = other RNA
caccccggcgcgcttctccgg

SEQ ID NO: 13044 - RNA, 22 nt, synthetic construct
  misc_feature 1..22: note = Synthetic
  source 1..22: mol_type = other RNA
gcaccccggcgcgcttctccgg

SEQ ID NO: 13045 - RNA, 23 nt, synthetic construct
  misc_feature 1..23: note = Synthetic
  source 1..23: mol_type = other RNA
tgcaccccggcgcgcttctccgg

SEQ ID NO: 13046 - RNA, 24 nt, synthetic construct
  misc_feature 1..24: note = Synthetic
  source 1..24: mol_type = other RNA
gtgcaccccggcgcgcttctccgg

SEQ ID NO: 13047 - RNA, 18 nt, synthetic construct
  misc_feature 1..18: note = Synthetic
  source 1..18: mol_type = other RNA
aagacggtgacggtgggg

SEQ ID NO: 13048 - RNA, 19 nt, synthetic construct
  misc_feature 1..19: note = Synthetic
  source 1..19: mol_type = other RNA
aaagacggtgacggtgggg

SEQ ID NO: 13049 - RNA, 21 nt, synthetic construct
  misc_feature 1..21: note = Synthetic
  source 1..21: mol_type = other RNA
tgaaagacggtgacggtgggg

SEQ ID NO: 13050 - RNA, 22 nt, synthetic construct
  misc_feature 1..22: note = Synthetic
  source 1..22: mol_type = other RNA
gtgaaagacggtgacggtgggg

SEQ ID NO: 13051 - RNA, 23 nt, synthetic construct
  misc_feature 1..23: note = Synthetic
  source 1..23: mol_type = other RNA
cgtgaaagacggtgacggtgggg

SEQ ID NO: 13052 - RNA, 24 nt, synthetic construct
  misc_feature 1..24: note = Synthetic
  source 1..24: mol_type = other RNA
acgtgaaagacggtgacggtgggg

SEQ ID NO: 13053 - RNA, 18 nt, synthetic construct
  misc_feature 1..18: note = Synthetic
  source 1..18: mol_type = other RNA
tgttgcgtcccgactggg

SEQ ID NO: 13054 - RNA, 19 nt, synthetic construct
  misc_feature 1..19: note = Synthetic
  source 1..19: mol_type = other RNA
ctgttgcgtcccgactggg

SEQ ID NO: 13055 - RNA, 21 nt, synthetic construct
  misc_feature 1..21: note = Synthetic
  source 1..21: mol_type = other RNA
ttctgttgcgtcccgactggg

SEQ ID NO: 13056 - RNA, 22 nt, synthetic construct
  misc_feature 1..22: note = Synthetic
  source 1..22: mol_type = other RNA
cttctgttgcgtcccgactggg

SEQ ID NO: 13057 - RNA, 23 nt, synthetic construct
  misc_feature 1..23: note = Synthetic
  source 1..23: mol_type = other RNA
gcttctgttgcgtcccgactggg

SEQ ID NO: 13058 - RNA, 24 nt, synthetic construct
  misc_feature 1..24: note = Synthetic
  source 1..24: mol_type = other RNA
ggcttctgttgcgtcccgactggg

SEQ ID NO: 13059 - RNA, 18 nt, synthetic construct
  misc_feature 1..18: note = Synthetic
  source 1..18: mol_type = other RNA
cccccccgcagtacacct

SEQ ID NO: 13060 - RNA, 19 nt, synthetic construct
  misc_feature 1..19: note = Synthetic
  source 1..19: mol_type = other RNA
tcccccccgcagtacacct

SEQ ID NO: 13061 - RNA, 21 nt, synthetic construct
  misc_feature 1..21: note = Synthetic
  source 1..21: mol_type = other RNA
cgtcccccccgcagtacacct

SEQ ID NO: 13062 - RNA, 22 nt, synthetic construct
  misc_feature 1..22: note = Synthetic
  source 1..22: mol_type = other RNA
tcgtcccccccgcagtacacct

SEQ ID NO: 13063 - RNA, 23 nt, synthetic construct
  misc_feature 1..23: note = Synthetic
  source 1..23: mol_type = other RNA
ctcgtcccccccgcagtacacct

SEQ ID NO: 13064 - RNA, 24 nt, synthetic construct
  misc_feature 1..24: note = Synthetic
  source 1..24: mol_type = other RNA
gctcgtcccccccgcagtacacct

SEQ ID NO: 13065 - RNA, 18 nt, synthetic construct
  misc_feature 1..18: note = Synthetic
  source 1..18: mol_type = other RNA
ctggccgccgactttcct

SEQ ID NO: 13066 - RNA, 19 nt, synthetic construct
  misc_feature 1..19: note = Synthetic
  source 1..19: mol_type = other RNA
cctggccgccgactttcct

SEQ ID NO: 13067 - RNA, 21 nt, synthetic construct
  misc_feature 1..21: note = Synthetic
  source 1..21: mol_type = other RNA
gccctggccgccgactttcct

SEQ ID NO: 13068 - RNA, 22 nt, synthetic construct
  misc_feature 1..22: note = Synthetic
  source 1..22: mol_type = other RNA
cgccctggccgccgactttcct

SEQ ID NO: 13069 - RNA, 23 nt, synthetic construct
  misc_feature 1..23: note = Synthetic
  source 1..23: mol_type = other RNA
ccgccctggccgccgactttcct

SEQ ID NO: 13070 - RNA, 24 nt, synthetic construct
  misc_feature 1..24: note = Synthetic
  source 1..24: mol_type = other RNA
gccgccctggccgccgactttcct

SEQ ID NO: 13071 - RNA, 18 nt, synthetic construct
  misc_feature 1..18: note = Synthetic
  source 1..18: mol_type = other RNA
gcaccccggcgcgcttct

SEQ ID NO: 13072 - RNA, 19 nt, synthetic construct
  misc_feature 1..19: note = Synthetic
  source 1..19: mol_type = other RNA
tgcaccccggcgcgcttct

SEQ ID NO: 13073 - RNA, 21 nt, synthetic construct
  misc_feature 1..21: note = Synthetic
  source 1..21: mol_type = other RNA
cgtgcaccccggcgcgcttct

SEQ ID NO: 13074 - RNA, 22 nt, synthetic construct
  misc_feature 1..22: note = Synthetic
  source 1..22: mol_type = other RNA
tcgtgcaccccggcgcgcttct

SEQ ID NO: 13075 - RNA, 23 nt, synthetic construct
  misc_feature 1..23: note = Synthetic
  source 1..23: mol_type = other RNA
gtcgtgcaccccggcgcgcttct

SEQ ID NO: 13076 - RNA, 24 nt, synthetic construct
  misc_feature 1..24: note = Synthetic
  source 1..24: mol_type = other RNA
cgtcgtgcaccccggcgcgcttct

SEQ ID NO: 13077 - RNA, 18 nt, synthetic construct
  misc_feature 1..18: note = Synthetic
  source 1..18: mol_type = other RNA
ccccccgcagtacacctt

SEQ ID NO: 13078 - RNA, 19 nt, synthetic construct
  misc_feature 1..19: note = Synthetic
  source 1..19: mol_type = other RNA
cccccccgcagtacacctt

SEQ ID NO: 13079 - RNA, 21 nt, synthetic construct
  misc_feature 1..21: note = Synthetic
  source 1..21: mol_type = other RNA
gtcccccccgcagtacacctt

SEQ ID NO: 13080 - RNA, 22 nt, synthetic construct
  misc_feature 1..22: note = Synthetic
  source 1..22: mol_type = other RNA
cgtcccccccgcagtacacctt

SEQ ID NO: 13081 - RNA, 23 nt, synthetic construct
  misc_feature 1..23: note = Synthetic
  source 1..23: mol_type = other RNA
tcgtcccccccgcagtacacctt

SEQ ID NO: 13082 - RNA, 24 nt, synthetic construct
  misc_feature 1..24: note = Synthetic
  source 1..24: mol_type = other RNA
ctcgtcccccccgcagtacacctt

SEQ ID NO: 13083 - RNA, 18 nt, synthetic construct
  misc_feature 1..18: note = Synthetic
  source 1..18: mol_type = other RNA
gccccagtcgggacgcaa

SEQ ID NO: 13084 - RNA, 19 nt, synthetic construct
  misc_feature 1..19: note = Synthetic
  source 1..19: mol_type = other RNA
cgccccagtcgggacgcaa

SEQ ID NO: 13085 - RNA, 21 nt, synthetic construct
  misc_feature 1..21: note = Synthetic
  source 1..21: mol_type = other RNA
ctcgccccagtcgggacgcaa

SEQ ID NO: 13086 - RNA, 22 nt, synthetic construct
  misc_feature 1..22: note = Synthetic
  source 1..22: mol_type = other RNA
cctcgccccagtcgggacgcaa

SEQ ID NO: 13087 - RNA, 23 nt, synthetic construct
  misc_feature 1..23: note = Synthetic
  source 1..23: mol_type = other RNA
acctcgccccagtcgggacgcaa

SEQ ID NO: 13088 - RNA, 24 nt, synthetic construct
  misc_feature 1..24: note = Synthetic
  source 1..24: mol_type = other RNA
tacctcgccccagtcgggacgcaa

SEQ ID NO: 13089 - RNA, 18 nt, synthetic construct
  misc_feature 1..18: note = Synthetic
  source 1..18: mol_type = other RNA
ggacgcaacagaagccga

SEQ ID NO: 13090 - RNA, 19 nt, synthetic construct
  misc_feature 1..19: note = Synthetic
  source 1..19: mol_type = other RNA
gggacgcaacagaagccga

SEQ ID NO: 13091 - RNA, 21 nt, synthetic construct
  misc_feature 1..21: note = Synthetic
  source 1..21: mol_type = other RNA
tcgggacgcaacagaagccga

SEQ ID NO: 13092 - RNA, 22 nt, synthetic construct
  misc_feature 1..22: note = Synthetic
  source 1..22: mol_type = other RNA
gtcgggacgcaacagaagccga

SEQ ID NO: 13093 - RNA, 23 nt, synthetic construct
  misc_feature 1..23: note = Synthetic
  source 1..23: mol_type = other RNA
agtcgggacgcaacagaagccga

SEQ ID NO: 13094 - RNA, 24 nt, synthetic construct
  misc_feature 1..24: note = Synthetic
  source 1..24: mol_type = other RNA
cagtcgggacgcaacagaagccga

SEQ ID NO: 13095 - RNA, 18 nt, synthetic construct
  misc_feature 1..18: note = Synthetic
  source 1..18: mol_type = other RNA
tacgacatcctggagaac

SEQ ID NO: 13096 - RNA, 19 nt, synthetic construct
  misc_feature 1..19: note = Synthetic
  source 1..19: mol_type = other RNA
gtacgacatcctggagaac

SEQ ID NO: 13097 - RNA, 21 nt, synthetic construct
  misc_feature 1..21: note = Synthetic
  source 1..21: mol_type = other RNA
gtgtacgacatcctggagaac

SEQ ID NO: 13098 - RNA, 22 nt, synthetic construct
  misc_feature 1..22: note = Synthetic
  source 1..22: mol_type = other RNA
cgtgtacgacatcctggagaac

SEQ ID NO: 13099 - RNA, 23 nt, synthetic construct
  misc_feature 1..23: note = Synthetic
  source 1..23: mol_type = other RNA
acgtgtacgacatcctggagaac

SEQ ID NO: 13100 - RNA, 24 nt, synthetic construct
  misc_feature 1..24: note = Synthetic
  source 1..24: mol_type = other RNA
cacgtgtacgacatcctggagaac

SEQ ID NO: 13101 - RNA, 18 nt, synthetic construct
  misc_feature 1..18: note = Synthetic
  source 1..18: mol_type = other RNA
tggacgaggatgcccccc

SEQ ID NO: 13102 - RNA, 19 nt, synthetic construct
  misc_feature 1..19: note = Synthetic
  source 1..19: mol_type = other RNA
ctggacgaggatgcccccc

SEQ ID NO: 13103 - RNA, 21 nt, synthetic construct
  misc_feature 1..21: note = Synthetic
  source 1..21: mol_type = other RNA
tgctggacgaggatgcccccc

SEQ ID NO: 13104 - RNA, 22 nt, synthetic construct
  misc_feature 1..22: note = Synthetic
  source 1..22: mol_type = other RNA
gtgctggacgaggatgcccccc

SEQ ID NO: 13105 - RNA, 23 nt, synthetic construct
  misc_feature 1..23: note = Synthetic
  source 1..23: mol_type = other RNA
ggtgctggacgaggatgcccccc

SEQ ID NO: 13106 - RNA, 24 nt, synthetic construct
  misc_feature 1..24: note = Synthetic
  source 1..24: mol_type = other RNA
gggtgctggacgaggatgcccccc

SEQ ID NO: 13107 - RNA, 18 nt, synthetic construct
  misc_feature 1..18: note = Synthetic
  source 1..18: mol_type = other RNA
ctggacgaggatgccccc

SEQ ID NO: 13108 - RNA, 19 nt, synthetic construct
  misc_feature 1..19: note = Synthetic
  source 1..19: mol_type = other RNA
gctggacgaggatgccccc

SEQ ID NO: 13109 - RNA, 21 nt, synthetic construct
  misc_feature 1..21: note = Synthetic
  source 1..21: mol_type = other RNA
gtgctggacgaggatgccccc

SEQ ID NO: 13110 - RNA, 22 nt, synthetic construct
  misc_feature 1..22: note = Synthetic
  source 1..22: mol_type = other RNA
ggtgctggacgaggatgccccc

SEQ ID NO: 13111 - RNA, 23 nt, synthetic construct
  misc_feature 1..23: note = Synthetic
  source 1..23: mol_type = other RNA
gggtgctggacgaggatgccccc

SEQ ID NO: 13112 - RNA, 24 nt, synthetic construct
  misc_feature 1..24: note = Synthetic
  source 1..24: mol_type = other RNA
cgggtgctggacgaggatgccccc

SEQ ID NO: 13113 - RNA, 18 nt, synthetic construct
  misc_feature 1..18: note = Synthetic
  source 1..18: mol_type = other RNA
cggcggcccgctgtcccc

SEQ ID NO: 13114 - RNA, 19 nt, synthetic construct
  misc_feature 1..19: note = Synthetic
  source 1..19: mol_type = other RNA
gcggcggcccgctgtcccc

SEQ ID NO: 13115 - RNA, 21 nt, synthetic construct
  misc_feature 1..21: note = Synthetic
  source 1..21: mol_type = other RNA
tggcggcggcccgctgtcccc

SEQ ID NO: 13116 - RNA, 22 nt, synthetic construct
  misc_feature 1..22: note = Synthetic
  source 1..22: mol_type = other RNA
gtggcggcggcccgctgtcccc

SEQ ID NO: 13117 - RNA, 23 nt, synthetic construct
  misc_feature 1..23: note = Synthetic
  source 1..23: mol_type = other RNA
ggtggcggcggcccgctgtcccc

SEQ ID NO: 13118 - RNA, 24 nt, synthetic construct
  misc_feature 1..24: note = Synthetic
  source 1..24: mol_type = other RNA
cggtggcggcggcccgctgtcccc

SEQ ID NO: 13119 - RNA, 18 nt, synthetic construct
  misc_feature 1..18: note = Synthetic
  source 1..18: mol_type = other RNA
gcggcggcccgctgtccc

SEQ ID NO: 13120 - RNA, 19 nt, synthetic construct
  misc_feature 1..19: note = Synthetic
  source 1..19: mol_type = other RNA
ggcggcggcccgctgtccc

SEQ ID NO: 13121 - RNA, 21 nt, synthetic construct
  misc_feature 1..21: note = Synthetic
  source 1..21: mol_type = other RNA
gtggcggcggcccgctgtccc

SEQ ID NO: 13122 - RNA, 22 nt, synthetic construct
  misc_feature 1..22: note = Synthetic
  source 1..22: mol_type = other RNA
ggtggcggcggcccgctgtccc

SEQ ID NO: 13123 - RNA, 23 nt, synthetic construct
  misc_feature 1..23: note = Synthetic
  source 1..23: mol_type = other RNA
cggtggcggcggcccgctgtccc

SEQ ID NO: 13124 - RNA, 24 nt, synthetic construct
  misc_feature 1..24: note = Synthetic
  source 1..24: mol_type = other RNA
ccggtggcggcggcccgctgtccc

SEQ ID NO: 13125 - RNA, 18 nt, synthetic construct
  misc_feature 1..18: note = Synthetic
  source 1..18: mol_type = other RNA
gccctcgcggagccagcc

SEQ ID NO: 13126 - RNA, 19 nt, synthetic construct
  misc_feature 1..19: note = Synthetic
  source 1..19: mol_type = other RNA
ggccctcgcggagccagcc

SEQ ID NO: 13127 - RNA, 21 nt, synthetic construct
  misc_feature 1..21: note = Synthetic
  source 1..21: mol_type = other RNA
ccggccctcgcggagccagcc

SEQ ID NO: 13128 - RNA, 22 nt, synthetic construct
  misc_feature 1..22: note = Synthetic
  source 1..22: mol_type = other RNA
gccggccctcgcggagccagcc

SEQ ID NO: 13129 - RNA, 23 nt, synthetic construct
  misc_feature 1..23: note = Synthetic
  source 1..23: mol_type = other RNA
cgccggccctcgcggagccagcc

SEQ ID NO: 13130 - RNA, 24 nt, synthetic construct
  misc_feature 1..24: note = Synthetic
  source 1..24: mol_type = other RNA
ccgccggccctcgcggagccagcc

SEQ ID NO: 13131 - RNA, 18 nt, synthetic construct
  misc_feature 1..18: note = Synthetic
  source 1..18: mol_type = other RNA
ttcacgtgtacgacatcc

SEQ ID NO: 13132 - RNA, 19 nt, synthetic construct
  misc_feature 1..19: note = Synthetic
  source 1..19: mol_type = other RNA
tttcacgtgtacgacatcc

SEQ ID NO: 13133 - RNA, 21 nt, synthetic construct
  misc_feature 1..21: note = Synthetic
  source 1..21: mol_type = other RNA
tctttcacgtgtacgacatcc

SEQ ID NO: 13134 - RNA, 22 nt, synthetic construct
  misc_feature 1..22: note = Synthetic
  source 1..22: mol_type = other RNA
gtctttcacgtgtacgacatcc

SEQ ID NO: 13135 - RNA, 23 nt, synthetic construct
  misc_feature 1..23: note = Synthetic
  source 1..23: mol_type = other RNA
cgtctttcacgtgtacgacatcc

SEQ ID NO: 13136 - RNA, 24 nt, synthetic construct
  misc_feature 1..24: note = Synthetic
  source 1..24: mol_type = other RNA
ccgtctttcacgtgtacgacatcc

SEQ ID NO: 13137 - RNA, 18 nt, synthetic construct
  misc_feature 1..18: note = Synthetic
  source 1..18: mol_type = other RNA
ggccctcgcggagccagc

SEQ ID NO: 13138 - RNA, 19 nt, synthetic construct
  misc_feature 1..19: note = Synthetic
  source 1..19: mol_type = other RNA
cggccctcgcggagccagc

SEQ ID NO: 13139 - RNA, 21 nt, synthetic construct
  misc_feature 1..21: note = Synthetic
  source 1..21: mol_type = other RNA
gccggccctcgcggagccagc

SEQ ID NO: 13140 - RNA, 22 nt, synthetic construct
  misc_feature 1..22: note = Synthetic
  source 1..22: mol_type = other RNA
cgccggccctcgcggagccagc

SEQ ID NO: 13141 - RNA, 23 nt, synthetic construct
  misc_feature 1..23: note = Synthetic
  source 1..23: mol_type = other RNA
ccgccggccctcgcggagccagc

SEQ ID NO: 13142 - RNA, 24 nt, synthetic construct
  misc_feature 1..24: note = Synthetic
  source 1..24: mol_type = other RNA
cccgccggccctcgcggagccagc

SEQ ID NO: 13143 - RNA, 18 nt, synthetic construct
  misc_feature 1..18: note = Synthetic
  source 1..18: mol_type = other RNA
cggaggaaagtcggcggc

SEQ ID NO: 13144 - RNA, 19 nt, synthetic construct
  misc_feature 1..19: note = Synthetic
  source 1..19: mol_type = other RNA
ccggaggaaagtcggcggc

SEQ ID NO: 13145 - RNA, 21 nt, synthetic construct
  misc_feature 1..21: note = Synthetic
  source 1..21: mol_type = other RNA
ccccggaggaaagtcggcggc

SEQ ID NO: 13146 - RNA, 22 nt, synthetic construct
  misc_feature 1..22: note = Synthetic
  source 1..22: mol_type = other RNA
cccccggaggaaagtcggcggc

SEQ ID NO: 13147 - RNA, 23 nt, synthetic construct
  misc_feature 1..23: note = Synthetic
  source 1..23: mol_type = other RNA
tcccccggaggaaagtcggcggc

SEQ ID NO: 13148 - RNA, 24 nt, synthetic construct
  misc_feature 1..24: note = Synthetic
  source 1..24: mol_type = other RNA
gtcccccggaggaaagtcggcggc

SEQ ID NO: 13149 - RNA, 18 nt, synthetic construct
  misc_feature 1..18: note = Synthetic
  source 1..18: mol_type = other RNA
tcgcgcctgtggggcggc

SEQ ID NO: 13150 - RNA, 19 nt, synthetic construct
  misc_feature 1..19: note = Synthetic
  source 1..19: mol_type = other RNA
ctcgcgcctgtggggcggc

SEQ ID NO: 13151 - RNA, 21 nt, synthetic construct
  misc_feature 1..21: note = Synthetic
  source 1..21: mol_type = other RNA
cgctcgcgcctgtggggcggc

SEQ ID NO: 13152 - RNA, 22 nt, synthetic construct
  misc_feature 1..22: note = Synthetic
  source 1..22: mol_type = other RNA
gcgctcgcgcctgtggggcggc

SEQ ID NO: 13153 - RNA, 23 nt, synthetic construct
  misc_feature 1..23: note = Synthetic
  source 1..23: mol_type = other RNA
ggcgctcgcgcctgtggggcggc

SEQ ID NO: 13154 - RNA, 24 nt, synthetic construct
  misc_feature 1..24: note = Synthetic
  source 1..24: mol_type = other RNA
cggcgctcgcgcctgtggggcggc

SEQ ID NO: 13155 - RNA, 18 nt, synthetic construct
  misc_feature 1..18: note = Synthetic
  source 1..18: mol_type = other RNA
gcccccaaggtgtactgc

SEQ ID NO: 13156 - RNA, 19 nt, synthetic construct
  misc_feature 1..19: note = Synthetic
  source 1..19: mol_type = other RNA
cgcccccaaggtgtactgc

SEQ ID NO: 13157 - RNA, 21 nt, synthetic construct
  misc_feature 1..21: note = Synthetic
  source 1..21: mol_type = other RNA
cgcgcccccaaggtgtactgc

SEQ ID NO: 13158 - RNA, 22 nt, synthetic construct
  misc_feature 1..22: note = Synthetic
  source 1..22: mol_type = other RNA
gcgcgcccccaaggtgtactgc

SEQ ID NO: 13159 - RNA, 23 nt, synthetic construct
  misc_feature 1..23: note = Synthetic
  source 1..23: mol_type = other RNA
agcgcgcccccaaggtgtactgc

SEQ ID NO: 13160 - RNA, 24 nt, synthetic construct
  misc_feature 1..24: note = Synthetic
  source 1..24: mol_type = other RNA
aagcgcgcccccaaggtgtactgc

SEQ ID NO: 13161 - RNA, 18 nt, synthetic construct
  misc_feature 1..18: note = Synthetic
  source 1..18: mol_type = other RNA
tttcacgtgtacgacatc

SEQ ID NO: 13162 - RNA, 19 nt, synthetic construct
  misc_feature 1..19: note = Synthetic
  source 1..19: mol_type = other RNA
ctttcacgtgtacgacatc

SEQ ID NO: 13163 - RNA, 21 nt, synthetic construct
  misc_feature 1..21: note = Synthetic
  source 1..21: mol_type = other RNA
gtctttcacgtgtacgacatc

SEQ ID NO: 13164 - RNA, 22 nt, synthetic construct
  misc_feature 1..22: note = Synthetic
  source 1..22: mol_type = other RNA
cgtctttcacgtgtacgacatc

SEQ ID NO: 13165 - RNA, 23 nt, synthetic construct
  misc_feature 1..23: note = Synthetic
  source 1..23: mol_type = other RNA
ccgtctttcacgtgtacgacatc

SEQ ID NO: 13166 - RNA, 24 nt, synthetic construct
  misc_feature 1..24: note = Synthetic
  source 1..24: mol_type = other RNA
accgtctttcacgtgtacgacatc

SEQ ID NO: 13167 - RNA, 18 nt, synthetic construct
  misc_feature 1..18: note = Synthetic
  source 1..18: mol_type = other RNA
ttgcgcccgccggccctc

SEQ ID NO: 13168 - RNA, 19 nt, synthetic construct
  misc_feature 1..19: note = Synthetic
  source 1..19: mol_type = other RNA
tttgcgcccgccggccctc

SEQ ID NO: 13169 - RNA, 21 nt, synthetic construct
  misc_feature 1..21: note = Synthetic
  source 1..21: mol_type = other RNA
tttttgcgcccgccggccctc

SEQ ID NO: 13170 - RNA, 22 nt, synthetic construct
  misc_feature 1..22: note = Synthetic
  source 1..22: mol_type = other RNA
ttttttgcgcccgccggccctc

SEQ ID NO: 13171 - RNA, 23 nt, synthetic construct
  misc_feature 1..23: note = Synthetic
  source 1..23: mol_type = other RNA
gttttttgcgcccgccggccctc

SEQ ID NO: 13172 - RNA, 24 nt, synthetic construct
  misc_feature 1..24: note = Synthetic
  source 1..24: mol_type = other RNA
ggttttttgcgcccgccggccctc

SEQ ID NO: 13173 - RNA, 18 nt, synthetic construct
  misc_feature 1..18: note = Synthetic
  source 1..18: mol_type = other RNA
acccctacctcgccccag

SEQ ID NO: 13174 - RNA, 19 nt, synthetic construct
  misc_feature 1..19: note = Synthetic
  source 1..19: mol_type = other RNA
aacccctacctcgccccag

SEQ ID NO: 13175 - RNA, 21 nt, synthetic construct
  misc_feature 1..21: note = Synthetic
  source 1..21: mol_type = other RNA
acaacccctacctcgccccag

SEQ ID NO: 13176 - RNA, 22 nt, synthetic construct
  misc_feature 1..22: note = Synthetic
  source 1..22: mol_type = other RNA
tacaacccctacctcgccccag

SEQ ID NO: 13177 - RNA, 23 nt, synthetic construct
  misc_feature 1..23: note = Synthetic
  source 1..23: mol_type = other RNA
ttacaacccctacctcgccccag

SEQ ID NO: 13178 - RNA, 24 nt, synthetic construct
  misc_feature 1..24: note = Synthetic
  source 1..24: mol_type = other RNA
tttacaacccctacctcgccccag

SEQ ID NO: 13179 - RNA, 18 nt, synthetic construct
  misc_feature 1..18: note = Synthetic
  source 1..18: mol_type = other RNA
cggccctcgcggagccag

SEQ ID NO: 13180 - RNA, 19 nt, synthetic construct
  misc_feature 1..19: note = Synthetic
  source 1..19: mol_type = other RNA
ccggccctcgcggagccag

SEQ ID NO: 13181 - RNA, 21 nt, synthetic construct
  misc_feature 1..21: note = Synthetic
  source 1..21: mol_type = other RNA
cgccggccctcgcggagccag

SEQ ID NO: 13182 - RNA, 22 nt, synthetic construct
  misc_feature 1..22: note = Synthetic
  source 1..22: mol_type = other RNA
ccgccggccctcgcggagccag

SEQ ID NO: 13183 - RNA, 23 nt, synthetic construct
  misc_feature 1..23: note = Synthetic
  source 1..23: mol_type = other RNA
cccgccggccctcgcggagccag

SEQ ID NO: 13184 - RNA, 24 nt, synthetic construct
  misc_feature 1..24: note = Synthetic
  source 1..24: mol_type = other RNA
gcccgccggccctcgcggagccag

SEQ ID NO: 13185 - RNA, 18 nt, synthetic construct
  misc_feature 1..18: note = Synthetic
  source 1..18: mol_type = other RNA
acgacatcctggagaacg

SEQ ID NO: 13186 - RNA, 19 nt, synthetic construct
  misc_feature 1..19: note = Synthetic
  source 1..19: mol_type = other RNA
tacgacatcctggagaacg

SEQ ID NO: 13187 - RNA, 21 nt, synthetic construct
  misc_feature 1..21: note = Synthetic
  source 1..21: mol_type = other RNA
tgtacgacatcctggagaacg

SEQ ID NO: 13188 - RNA, 22 nt, synthetic construct
  misc_feature 1..22: note = Synthetic
  source 1..22: mol_type = other RNA
gtgtacgacatcctggagaacg

SEQ ID NO: 13189 - RNA, 23 nt, synthetic construct
  misc_feature 1..23: note = Synthetic
  source 1..23: mol_type = other RNA
cgtgtacgacatcctggagaacg

SEQ ID NO: 13190 - RNA, 24 nt, synthetic construct
  misc_feature 1..24: note = Synthetic
  source 1..24: mol_type = other RNA
acgtgtacgacatcctggagaacg

SEQ ID NO: 13191 - RNA, 18 nt, synthetic construct
  misc_feature 1..18: note = Synthetic
  source 1..18: mol_type = other RNA
gacgaggatgcccccccg

SEQ ID NO: 13192 - RNA, 19 nt, synthetic construct
  misc_feature 1..19: note = Synthetic
  source 1..19: mol_type = other RNA
ggacgaggatgcccccccg

SEQ ID NO: 13193 - RNA, 21 nt, synthetic construct
  misc_feature 1..21: note = Synthetic
  source 1..21: mol_type = other RNA
ctggacgaggatgcccccccg

SEQ ID NO: 13194 - RNA, 22 nt, synthetic construct
  misc_feature 1..22: note = Synthetic
  source 1..22: mol_type = other RNA
gctggacgaggatgcccccccg

SEQ ID NO: 13195 - RNA, 23 nt, synthetic construct
  misc_feature 1..23: note = Synthetic
  source 1..23: mol_type = other RNA
tgctggacgaggatgcccccccg

SEQ ID NO: 13196 - RNA, 24 nt, synthetic construct
  misc_feature 1..24: note = Synthetic
  source 1..24: mol_type = other RNA
gtgctggacgaggatgcccccccg

SEQ ID NO: 13197 - RNA, 18 nt, synthetic construct
  misc_feature 1..18: note = Synthetic
  source 1..18: mol_type = other RNA
gcggcccgctgtcccccg

SEQ ID NO: 13198 - RNA, 19 nt, synthetic construct
  misc_feature 1..19: note = Synthetic
  source 1..19: mol_type = other RNA
ggcggcccgctgtcccccg

SEQ ID NO: 13199 - RNA, 21 nt, synthetic construct
  misc_feature 1..21: note = Synthetic
  source 1..21: mol_type = other RNA
gcggcggcccgctgtcccccg

SEQ ID NO: 13200 - RNA, 22 nt, synthetic construct
  misc_feature 1..22: note = Synthetic
  source 1..22: mol_type = other RNA
ggcggcggcccgctgtcccccg

SEQ ID NO: 13201 - RNA, 23 nt, synthetic construct
  misc_feature 1..23: note = Synthetic
  source 1..23: mol_type = other RNA
tggcggcggcccgctgtcccccg

SEQ ID NO: 13202 - RNA, 24 nt, synthetic construct
  misc_feature 1..24: note = Synthetic
  source 1..24: mol_type = other RNA
gtggcggcggcccgctgtcccccg

SEQ ID NO: 13203 - RNA, 18 nt, synthetic construct
  misc_feature 1..18: note = Synthetic
  source 1..18: mol_type = other RNA
ggcgtggaccacgccccg

SEQ ID NO: 13204 - RNA, 19 nt, synthetic construct
  misc_feature 1..19: note = Synthetic
  source 1..19: mol_type = other RNA
cggcgtggaccacgccccg

SEQ ID NO: 13205 - RNA, 21 nt, synthetic construct
  misc_feature 1..21: note = Synthetic
  source 1..21: mol_type = other RNA
ggcggcgtggaccacgccccg

SEQ ID NO: 13206 - RNA, 22 nt, synthetic construct
  misc_feature 1..22: note = Synthetic
  source 1..22: mol_type = other RNA
gggcggcgtggaccacgccccg

SEQ ID NO: 13207 - RNA, 23 nt, synthetic construct
  misc_feature 1..23: note = Synthetic
  source 1..23: mol_type = other RNA
ggggcggcgtggaccacgccccg

SEQ ID NO: 13208 - RNA, 24 nt, synthetic construct
  misc_feature 1..24: note = Synthetic
  source 1..24: mol_type = other RNA
tggggcggcgtggaccacgccccg

SEQ ID NO: 13209 - RNA, 18 nt, synthetic construct
  misc_feature 1..18: note = Synthetic
  source 1..18: mol_type = other RNA
cccccccggagaagcgcg

SEQ ID NO: 13210 - RNA, 19 nt, synthetic construct
  misc_feature 1..19: note = Synthetic
  source 1..19: mol_type = other RNA
gcccccccggagaagcgcg

SEQ ID NO: 13211 - RNA, 21 nt, synthetic construct
  misc_feature 1..21: note = Synthetic
  source 1..21: mol_type = other RNA
atgcccccccggagaagcgcg

SEQ ID NO: 13212 - RNA, 22 nt, synthetic construct
  misc_feature 1..22: note = Synthetic
  source 1..22: mol_type = other RNA
gatgcccccccggagaagcgcg

SEQ ID NO: 13213 - RNA, 23 nt, synthetic construct
  misc_feature 1..23: note = Synthetic
  source 1..23: mol_type = other RNA
ggatgcccccccggagaagcgcg

SEQ ID NO: 13214 - RNA, 24 nt, synthetic construct
  misc_feature 1..24: note = Synthetic
  source 1..24: mol_type = other RNA
aggatgcccccccggagaagcgcg

SEQ ID NO: 13215 - RNA, 18 nt, synthetic construct
  misc_feature 1..18: note = Synthetic
  source 1..18: mol_type = other RNA
cccccaaggtgtactgcg

SEQ ID NO: 13216 - RNA, 19 nt, synthetic construct
  misc_feature 1..19: note = Synthetic
  source 1..19: mol_type = other RNA
gcccccaaggtgtactgcg

SEQ ID NO: 13217 - RNA, 21 nt, synthetic construct
  misc_feature 1..21: note = Synthetic
  source 1..21: mol_type = other RNA
gcgcccccaaggtgtactgcg

SEQ ID NO: 13218 - RNA, 22 nt, synthetic construct
  misc_feature 1..22: note = Synthetic
  source 1..22: mol_type = other RNA
cgcgcccccaaggtgtactgcg

SEQ ID NO: 13219 - RNA, 23 nt, synthetic construct
  misc_feature 1..23: note = Synthetic
  source 1..23: mol_type = other RNA
gcgcgcccccaaggtgtactgcg

SEQ ID NO: 13220 - RNA, 24 nt, synthetic construct
  misc_feature 1..24: note = Synthetic
  source 1..24: mol_type = other RNA
agcgcgcccccaaggtgtactgcg

SEQ ID NO: 13221 - RNA, 18 nt, synthetic construct
  misc_feature 1..18: note = Synthetic
  source 1..18: mol_type = other RNA
tgcgcccgccggccctcg

SEQ ID NO: 13222 - RNA, 19 nt, synthetic construct
  misc_feature 1..19: note = Synthetic
  source 1..19: mol_type = other RNA
ttgcgcccgccggccctcg

SEQ ID NO: 13223 - RNA, 21 nt, synthetic construct
  misc_feature 1..21: note = Synthetic
  source 1..21: mol_type = other RNA
ttttgcgcccgccggccctcg

SEQ ID NO: 13224 - RNA, 22 nt, synthetic construct
  misc_feature 1..22: note = Synthetic
  source 1..22: mol_type = other RNA
tttttgcgcccgccggccctcg

SEQ ID NO: 13225 - RNA, 23 nt, synthetic construct
  misc_feature 1..23: note = Synthetic
  source 1..23: mol_type = other RNA
ttttttgcgcccgccggccctcg

SEQ ID NO: 13226 - RNA, 24 nt, synthetic construct
  misc_feature 1..24: note = Synthetic
  source 1..24: mol_type = other RNA
gttttttgcgcccgccggccctcg

SEQ ID NO: 13227 - RNA, 18 nt, synthetic construct
  misc_feature 1..18: note = Synthetic
  source 1..18: mol_type = other RNA
cggcccgctgtcccccgg

SEQ ID NO: 13228 - RNA, 19 nt, synthetic construct
  misc_feature 1..19: note = Synthetic
  source 1..19: mol_type = other RNA
gcggcccgctgtcccccgg

SEQ ID NO: 13229 - RNA, 21 nt, synthetic construct
  misc_feature 1..21: note = Synthetic
  source 1..21: mol_type = other RNA
cggcggcccgctgtcccccgg

SEQ ID NO: 13230 - RNA, 22 nt, synthetic construct
  misc_feature 1..22: note = Synthetic
  source 1..22: mol_type = other RNA
gcggcggcccgctgtcccccgg

SEQ ID NO: 13231 - RNA, 23 nt, synthetic construct
  misc_feature 1..23: note = Synthetic
  source 1..23: mol_type = other RNA
ggcggcggcccgctgtcccccgg

SEQ ID NO: 13232 - RNA, 24 nt, synthetic construct
  misc_feature 1..24: note = Synthetic
  source 1..24: mol_type = other RNA
tggcggcggcccgctgtcccccgg

SEQ ID NO: 13233 - RNA, 18 nt, synthetic construct
  misc_feature 1..18: note = Synthetic
  source 1..18: mol_type = other RNA
ccccaaggtgtactgcgg

SEQ ID NO: 13234 - RNA, 19 nt, synthetic construct
  misc_feature 1..19: note = Synthetic
  source 1..19: mol_type = other RNA
cccccaaggtgtactgcgg

SEQ ID NO: 13235 - RNA, 21 nt, synthetic construct
  misc_feature 1..21: note = Synthetic
  source 1..21: mol_type = other RNA
cgcccccaaggtgtactgcgg

SEQ ID NO: 13236 - RNA, 22 nt, synthetic construct
  misc_feature 1..22: note = Synthetic
  source 1..22: mol_type = other RNA
gcgcccccaaggtgtactgcgg

SEQ ID NO: 13237 - RNA, 23 nt, synthetic construct
  misc_feature 1..23: note = Synthetic
  source 1..23: mol_type = other RNA
cgcgcccccaaggtgtactgcgg

SEQ ID NO: 13238 - RNA, 24 nt, synthetic construct
  misc_feature 1..24: note = Synthetic
  source 1..24: mol_type = other RNA
gcgcgcccccaaggtgtactgcgg

SEQ ID NO: 13239 - RNA, 18 nt, synthetic construct
  misc_feature 1..18: note = Synthetic
  source 1..18: mol_type = other RNA
cccaaggtgtactgcggg

SEQ ID NO: 13240 - RNA, 19 nt, synthetic construct
  misc_feature 1..19: note = Synthetic
  source 1..19: mol_type = other RNA
ccccaaggtgtactgcggg

SEQ ID NO: 13241 - RNA, 21 nt, synthetic construct
  misc_feature 1..21: note = Synthetic
  source 1..21: mol_type = other RNA
gcccccaaggtgtactgcggg

SEQ ID NO: 13242 - RNA, 22 nt, synthetic construct
  misc_feature 1..22: note = Synthetic
  source 1..22: mol_type = other RNA
cgcccccaaggtgtactgcggg

SEQ ID NO: 13243 - RNA, 23 nt, synthetic construct
  misc_feature 1..23: note = Synthetic
  source 1..23: mol_type = other RNA
gcgcccccaaggtgtactgcggg

SEQ ID NO: 13244 - RNA, 24 nt, synthetic construct
  misc_feature 1..24: note = Synthetic
  source 1..24: mol_type = other RNA
cgcgcccccaaggtgtactgcggg

SEQ ID NO: 13245 - RNA, 18 nt, synthetic construct
  misc_feature 1..18: note = Synthetic
  source 1..18: mol_type = other RNA
gacgtcctccgcgtcggg

SEQ ID NO: 13246 - RNA, 19 nt, synthetic construct
  misc_feature 1..19: note = Synthetic
  source 1..19: mol_type = other RNA
cgacgtcctccgcgtcggg

SEQ ID NO: 13247 - RNA, 21 nt, synthetic construct
  misc_feature 1..21: note = Synthetic
  source 1..21: mol_type = other RNA
cgcgacgtcctccgcgtcggg

SEQ ID NO: 13248 - RNA, 22 nt, synthetic construct
  misc_feature 1..22: note = Synthetic
  source 1..22: mol_type = other RNA
gcgcgacgtcctccgcgtcggg

SEQ ID NO: 13249 - RNA, 23 nt, synthetic construct
  misc_feature 1..23: note = Synthetic
  source 1..23: mol_type = other RNA
agcgcgacgtcctccgcgtcggg

SEQ ID NO: 13250 - RNA, 24 nt, synthetic construct
  misc_feature 1..24: note = Synthetic
  source 1..24: mol_type = other RNA
gagcgcgacgtcctccgcgtcggg

SEQ ID NO: 13251 - RNA, 18 nt, synthetic construct
  misc_feature 1..18: note = Synthetic
  source 1..18: mol_type = other RNA
aggtgtactgcggggggg

SEQ ID NO: 13252 - RNA, 19 nt, synthetic construct
  misc_feature 1..19: note = Synthetic
  source 1..19: mol_type = other RNA
aaggtgtactgcggggggg

SEQ ID NO: 13253 - RNA, 21 nt, synthetic construct
  misc_feature 1..21: note = Synthetic
  source 1..21: mol_type = other RNA
ccaaggtgtactgcggggggg

SEQ ID NO: 13254 - RNA, 22 nt, synthetic construct
  misc_feature 1..22: note = Synthetic
  source 1..22: mol_type = other RNA
cccaaggtgtactgcggggggg

SEQ ID NO: 13255 - RNA, 23 nt, synthetic construct
  misc_feature 1..23: note = Synthetic
  source 1..23: mol_type = other RNA
ccccaaggtgtactgcggggggg

SEQ ID NO: 13256 - RNA, 24 nt, synthetic construct
  misc_feature 1..24: note = Synthetic
  source 1..24: mol_type = other RNA
cccccaaggtgtactgcggggggg

SEQ ID NO: 13257 - RNA, 18 nt, synthetic construct
  misc_feature 1..18: note = Synthetic
  source 1..18: mol_type = other RNA
tcgccccgcgggtgctgg

SEQ ID NO: 13258 - RNA, 19 nt, synthetic construct
  misc_feature 1..19: note = Synthetic
  source 1..19: mol_type = other RNA
atcgccccgcgggtgctgg

SEQ ID NO: 13259 - RNA, 21 nt, synthetic construct
  misc_feature 1..21: note = Synthetic
  source 1..21: mol_type = other RNA
tcatcgccccgcgggtgctgg

SEQ ID NO: 13260 - RNA, 22 nt, synthetic construct
  misc_feature 1..22: note = Synthetic
  source 1..22: mol_type = other RNA
ttcatcgccccgcgggtgctgg

SEQ ID NO: 13261 - RNA, 23 nt, synthetic construct
  misc_feature 1..23: note = Synthetic
  source 1..23: mol_type = other RNA
attcatcgccccgcgggtgctgg

SEQ ID NO: 13262 - RNA, 24 nt, synthetic construct
  misc_feature 1..24: note = Synthetic
  source 1..24: mol_type = other RNA
gattcatcgccccgcgggtgctgg

SEQ ID NO: 13263 - RNA, 18 nt, synthetic construct
  misc_feature 1..18: note = Synthetic
  source 1..18: mol_type = other RNA
cgcccccaaggtgtactg

SEQ ID NO: 13264 - RNA, 19 nt, synthetic construct
  misc_feature 1..19: note = Synthetic
  source 1..19: mol_type = other RNA
gcgcccccaaggtgtactg

SEQ ID NO: 13265 - RNA, 21 nt, synthetic construct
  misc_feature 1..21: note = Synthetic
  source 1..21: mol_type = other RNA
gcgcgcccccaaggtgtactg

SEQ ID NO: 13266 - RNA, 22 nt, synthetic construct
  misc_feature 1..22: note = Synthetic
  source 1..22: mol_type = other RNA
agcgcgcccccaaggtgtactg

SEQ ID NO: 13267 - RNA, 23 nt, synthetic construct
  misc_feature 1..23: note = Synthetic
  source 1..23: mol_type = other RNA
aagcgcgcccccaaggtgtactg

SEQ ID NO: 13268 - RNA, 24 nt, synthetic construct
  misc_feature 1..24: note = Synthetic
  source 1..24: mol_type = other RNA
caagcgcgcccccaaggtgtactg

SEQ ID NO: 13269 - RNA, 18 nt, synthetic construct
  misc_feature 1..18: note = Synthetic
  source 1..18: mol_type = other RNA
ccgcggcgctcgcgcctg

SEQ ID NO: 13270 - RNA, 19 nt, synthetic construct
  misc_feature 1..19: note = Synthetic
  source 1..19: mol_type = other RNA
gccgcggcgctcgcgcctg

SEQ ID NO: 13271 - RNA, 21 nt, synthetic construct
  misc_feature 1..21: note = Synthetic
  source 1..21: mol_type = other RNA
tggccgcggcgctcgcgcctg

SEQ ID NO: 13272 - RNA, 22 nt, synthetic construct
  misc_feature 1..22: note = Synthetic
  source 1..22: mol_type = other RNA
ctggccgcggcgctcgcgcctg

SEQ ID NO: 13273 - RNA, 23 nt, synthetic construct
  misc_feature 1..23: note = Synthetic
  source 1..23: mol_type = other RNA
tctggccgcggcgctcgcgcctg

SEQ ID NO: 13274 - RNA, 24 nt, synthetic construct
  misc_feature 1..24: note = Synthetic
  source 1..24: mol_type = other RNA
ttctggccgcggcgctcgcgcctg

SEQ ID NO: 13275 - RNA, 18 nt, synthetic construct
  misc_feature 1..18: note = Synthetic
  source 1..18: mol_type = other RNA
cacgtgtacgacatcctg

SEQ ID NO: 13276 - RNA, 19 nt, synthetic construct
  misc_feature 1..19: note = Synthetic
  source 1..19: mol_type = other RNA
tcacgtgtacgacatcctg

SEQ ID NO: 13277 - RNA, 21 nt, synthetic construct
  misc_feature 1..21: note = Synthetic
  source 1..21: mol_type = other RNA
tttcacgtgtacgacatcctg

SEQ ID NO: 13278 - RNA, 22 nt, synthetic construct
  misc_feature 1..22: note = Synthetic
  source 1..22: mol_type = other RNA
ctttcacgtgtacgacatcctg

SEQ ID NO: 13279 - RNA, 23 nt, synthetic construct
  misc_feature 1..23: note = Synthetic
  source 1..23: mol_type = other RNA
tctttcacgtgtacgacatcctg

SEQ ID NO: 13280 - RNA, 24 nt, synthetic construct
  misc_feature 1..24: note = Synthetic
  source 1..24: mol_type = other RNA
gtctttcacgtgtacgacatcctg

SEQ ID NO: 13281 - RNA, 18 nt, synthetic construct
  misc_feature 1..18: note = Synthetic
  source 1..18: mol_type = other RNA
ttcatcgccccgcgggtg

SEQ ID NO: 13282 - RNA, 19 nt, synthetic construct
  misc_feature 1..19: note = Synthetic
  source 1..19: mol_type = other RNA
attcatcgccccgcgggtg

SEQ ID NO: 13283 - RNA, 21 nt, synthetic construct
  misc_feature 1..21: note = Synthetic
  source 1..21: mol_type = other RNA
cgattcatcgccccgcgggtg

SEQ ID NO: 13284 - RNA, 22 nt, synthetic construct
  misc_feature 1..22: note = Synthetic
  source 1..22: mol_type = other RNA
tcgattcatcgccccgcgggtg

SEQ ID NO: 13285 - RNA, 23 nt, synthetic construct
  misc_feature 1..23: note = Synthetic
  source 1..23: mol_type = other RNA
ttcgattcatcgccccgcgggtg

SEQ ID NO: 13286 - RNA, 24 nt, synthetic construct
  misc_feature 1..24: note = Synthetic
  source 1..24: mol_type = other RNA
tttcgattcatcgccccgcgggtg

SEQ ID NO: 13287 - RNA, 18 nt, synthetic construct
  misc_feature 1..18: note = Synthetic
  source 1..18: mol_type = other RNA
gcgcccccaaggtgtact

SEQ ID NO: 13288 - RNA, 19 nt, synthetic construct
  misc_feature 1..19: note = Synthetic
  source 1..19: mol_type = other RNA
cgcgcccccaaggtgtact

SEQ ID NO: 13289 - RNA, 21 nt, synthetic construct
  misc_feature 1..21: note = Synthetic
  source 1..21: mol_type = other RNA
agcgcgcccccaaggtgtact

SEQ ID NO: 13290 - RNA, 22 nt, synthetic construct
  misc_feature 1..22: note = Synthetic
  source 1..22: mol_type = other RNA
aagcgcgcccccaaggtgtact

SEQ ID NO: 13291 - RNA, 23 nt, synthetic construct
  misc_feature 1..23: note = Synthetic
  source 1..23: mol_type = other RNA
caagcgcgcccccaaggtgtact

SEQ ID NO: 13292 - RNA, 24 nt, synthetic construct
  misc_feature 1..24: note = Synthetic
  source 1..24: mol_type = other RNA
tcaagcgcgcccccaaggtgtact

SEQ ID NO: 13293 - RNA, 18 nt, synthetic construct
  misc_feature 1..18: note = Synthetic
  source 1..18: mol_type = other RNA
gccgcggcgctcgcgcct

SEQ ID NO: 13294 - RNA, 19 nt, synthetic construct
  misc_feature 1..19: note = Synthetic
  source 1..19: mol_type = other RNA
ggccgcggcgctcgcgcct

SEQ ID NO: 13295 - RNA, 21 nt, synthetic construct
  misc_feature 1..21: note = Synthetic
  source 1..21: mol_type = other RNA
ctggccgcggcgctcgcgcct

SEQ ID NO: 13296 - RNA, 22 nt, synthetic construct
  misc_feature 1..22: note = Synthetic
  source 1..22: mol_type = other RNA
tctggccgcggcgctcgcgcct

SEQ ID NO: 13297 - RNA, 23 nt, synthetic construct
  misc_feature 1..23: note = Synthetic
  source 1..23: mol_type = other RNA
ttctggccgcggcgctcgcgcct

SEQ ID NO: 13298 - RNA, 24 nt, synthetic construct
  misc_feature 1..24: note = Synthetic
  source 1..24: mol_type = other RNA
cttctggccgcggcgctcgcgcct

SEQ ID NO: 13299 - RNA, 18 nt, synthetic construct
  misc_feature 1..18: note = Synthetic
  source 1..18: mol_type = other RNA
cccctacctcgccccagt

SEQ ID NO: 13300 - RNA, 19 nt, synthetic construct
  misc_feature 1..19: note = Synthetic
  source 1..19: mol_type = other RNA
acccctacctcgccccagt

SEQ ID NO: 13301 - RNA, 21 nt, synthetic construct
  misc_feature 1..21: note = Synthetic
  source 1..21: mol_type = other RNA
caacccctacctcgccccagt

SEQ ID NO: 13302 - RNA, 22 nt, synthetic construct
  misc_feature 1..22: note = Synthetic
  source 1..22: mol_type = other RNA
acaacccctacctcgccccagt

SEQ ID NO: 13303 - RNA, 23 nt, synthetic construct
  misc_feature 1..23: note = Synthetic
  source 1..23: mol_type = other RNA
tacaacccctacctcgccccagt

SEQ ID NO: 13304 - RNA, 24 nt, synthetic construct
  misc_feature 1..24: note = Synthetic
  source 1..24: mol_type = other RNA
ttacaacccctacctcgccccagt

SEQ ID NO: 13305 - RNA, 18 nt, synthetic construct
  misc_feature 1..18: note = Synthetic
  source 1..18: mol_type = other RNA
cggggacccccgccttgt

SEQ ID NO: 13306 - RNA, 19 nt, synthetic construct
  misc_feature 1..19: note = Synthetic
  source 1..19: mol_type = other RNA
ccggggacccccgccttgt

SEQ ID NO: 13307 - RNA, 21 nt, synthetic construct
  misc_feature 1..21: note = Synthetic
  source 1..21: mol_type = other RNA
agccggggacccccgccttgt

SEQ ID NO: 13308 - RNA, 22 nt, synthetic construct
  misc_feature 1..22: note = Synthetic
  source 1..22: mol_type = other RNA
cagccggggacccccgccttgt

SEQ ID NO: 13309 - RNA, 23 nt, synthetic construct
  misc_feature 1..23: note = Synthetic
  source 1..23: mol_type = other RNA
ccagccggggacccccgccttgt

SEQ ID NO: 13310 - RNA, 24 nt, synthetic construct
  misc_feature 1..24: note = Synthetic
  source 1..24: mol_type = other RNA
gccagccggggacccccgccttgt

SEQ ID NO: 13311 - RNA, 18 nt, synthetic construct
  misc_feature 1..18: note = Synthetic
  source 1..18: mol_type = other RNA
cagttccacgcgcggttt

SEQ ID NO: 13312 - RNA, 19 nt, synthetic construct
  misc_feature 1..19: note = Synthetic
  source 1..19: mol_type = other RNA
ccagttccacgcgcggttt

SEQ ID NO: 13313 - RNA, 20 nt, synthetic construct
  misc_feature 1..20: note = Synthetic
  source 1..20: mol_type = other RNA
cccagttccacgcgcggttt

SEQ ID NO: 13314 - RNA, 21 nt, synthetic construct
  misc_feature 1..21: note = Synthetic
  source 1..21: mol_type = other RNA
gcccagttccacgcgcggttt

SEQ ID NO: 13315 - RNA, 22 nt, synthetic construct
  misc_feature 1..22: note = Synthetic
  source 1..22: mol_type = other RNA
ggcccagttccacgcgcggttt

SEQ ID NO: 13316 - RNA, 23 nt, synthetic construct
  misc_feature 1..23: note = Synthetic
  source 1..23: mol_type = other RNA
cggcccagttccacgcgcggttt

SEQ ID NO: 13317 - RNA, 24 nt, synthetic construct
  misc_feature 1..24: note = Synthetic
  source 1..24: mol_type = other RNA
gcggcccagttccacgcgcggttt

SEQ ID NO: 13318 - RNA, 18 nt, synthetic construct
  misc_feature 1..18: note = Synthetic
  source 1..18: mol_type = other RNA
ggggttgtccaggatgaa

SEQ ID NO: 13319 - RNA, 24 nt, synthetic construct
  misc_feature 1..24: note = Synthetic
  source 1..24: mol_type = other RNA
gaacccggggttgtccaggatgaa

SEQ ID NO: 13320 - RNA, 21 nt, synthetic construct
  misc_feature 1..21: note = Synthetic
  source 1..21: mol_type = other RNA
gcactcccgtgaacccgtaca

SEQ ID NO: 13321 - RNA, 24 nt, synthetic construct
  misc_feature 1..24: note = Synthetic
  source 1..24: mol_type = other RNA
gctgcactcccgtgaacccgtaca

SEQ ID NO: 13322 - RNA, 19 nt, synthetic construct
  misc_feature 1..19: note = Synthetic
  source 1..19: mol_type = other RNA
gcaaagtcgaacaccacca

SEQ ID NO: 13323 - RNA, 23 nt, synthetic construct
  misc_feature 1..23: note = Synthetic
  source 1..23: mol_type = other RNA
gctggcaaagtcgaacaccacca

SEQ ID NO: 13324 - RNA, 24 nt, synthetic construct
  misc_feature 1..24: note = Synthetic
  source 1..24: mol_type = other RNA
ggctggcaaagtcgaacaccacca

SEQ ID NO: 13325 - RNA, 22 nt, synthetic construct
  misc_feature 1..22: note = Synthetic
  source 1..22: mol_type = other RNA
gtgtccccgtagatgatgcgca

SEQ ID NO: 13326 - RNA, 21 nt, synthetic construct
  misc_feature 1..21: note = Synthetic
  source 1..21: mol_type = other RNA
ggccgcggcacagcacaaaga

SEQ ID NO: 13327 - RNA, 23 nt, synthetic construct
  misc_feature 1..23: note = Synthetic
  source 1..23: mol_type = other RNA
gaggccgcggcacagcacaaaga

SEQ ID NO: 13328 - RNA, 18 nt, synthetic construct
  misc_feature 1..18: note = Synthetic
  source 1..18: mol_type = other RNA
gacaggtcgtagagcaga

SEQ ID NO: 13329 - RNA, 19 nt, synthetic construct
  misc_feature 1..19: note = Synthetic
  source 1..19: mol_type = other RNA
ggacaggtcgtagagcaga

SEQ ID NO: 13330 - RNA, 21 nt, synthetic construct
  misc_feature 1..21: note = Synthetic
  source 1..21: mol_type = other RNA
gtggacaggtcgtagagcaga

SEQ ID NO: 13331 - RNA, 22 nt, synthetic construct
  misc_feature 1..22: note = Synthetic
  source 1..22: mol_type = other RNA
ggtggacaggtcgtagagcaga

SEQ ID NO: 13332 - RNA, 24 nt, synthetic construct
  misc_feature 1..24: note = Synthetic
  source 1..24: mol_type = other RNA
gtggtggacaggtcgtagagcaga

SEQ ID NO: 13333 - RNA, 18 nt, synthetic construct
  misc_feature 1..18: note = Synthetic
  source 1..18: mol_type = other RNA
gctctggggaatccgcga

SEQ ID NO: 13334 - RNA, 21 nt, synthetic construct
  misc_feature 1..21: note = Synthetic
  source 1..21: mol_type = other RNA
gctgctctggggaatccgcga

SEQ ID NO: 13335 - RNA, 22 nt, synthetic construct
  misc_feature 1..22: note = Synthetic
  source 1..22: mol_type = other RNA
ggctgctctggggaatccgcga

SEQ ID NO: 13336 - RNA, 23 nt, synthetic construct
  misc_feature 1..23: note = Synthetic
  source 1..23: mol_type = other RNA
gggctgctctggggaatccgcga

SEQ ID NO: 13337 - RNA, 24 nt, synthetic construct
  misc_feature 1..24: note = Synthetic
  source 1..24: mol_type = other RNA
ggggctgctctggggaatccgcga

SEQ ID NO: 13338 - RNA, 21 nt, synthetic construct
  misc_feature 1..21: note = Synthetic
  source 1..21: mol_type = other RNA
ggtctgggccacgatcacgta

SEQ ID NO: 13339 - RNA, 22 nt, synthetic construct
  misc_feature 1..22: note = Synthetic
  source 1..22: mol_type = other RNA
gggtctgggccacgatcacgta

SEQ ID NO: 13340 - RNA, 24 nt, synthetic construct
  misc_feature 1..24: note = Synthetic
  source 1..24: mol_type = other RNA
gcgggtctgggccacgatcacgta

SEQ ID NO: 13341 - RNA, 18 nt, synthetic construct
  misc_feature 1..18: note = Synthetic
  source 1..18: mol_type = other RNA
gtgaacgtcttttcgcac

SEQ ID NO: 13342 - RNA, 19 nt, synthetic construct
  misc_feature 1..19: note = Synthetic
  source 1..19: mol_type = other RNA
ggtgaacgtcttttcgcac

SEQ ID NO: 13343 - RNA, 23 nt, synthetic construct
  misc_feature 1..23: note = Synthetic
  source 1..23: mol_type = other RNA
gcttggtgaacgtcttttcgcac

SEQ ID NO: 13344 - RNA, 18 nt, synthetic construct
  misc_feature 1..18: note = Synthetic
  source 1..18: mol_type = other RNA
ggggccgtactgtttcac

SEQ ID NO: 13345 - RNA, 24 nt, synthetic construct
  misc_feature 1..24: note = Synthetic
  source 1..24: mol_type = other RNA
gaactcggggccgtactgtttcac

SEQ ID NO: 13346 - RNA, 19 nt, synthetic construct
  misc_feature 1..19: note = Synthetic
  source 1..19: mol_type = other RNA
gcagcaggcacgtaaagac

SEQ ID NO: 13347 - RNA, 21 nt, synthetic construct
  misc_feature 1..21: note = Synthetic
  source 1..21: mol_type = other RNA
gcgcagcaggcacgtaaagac

SEQ ID NO: 13348 - RNA, 22 nt, synthetic construct
  misc_feature 1..22: note = Synthetic
  source 1..22: mol_type = other RNA
ggcgcagcaggcacgtaaagac

SEQ ID NO: 13349 - RNA, 23 nt, synthetic construct
  misc_feature 1..23: note = Synthetic
  source 1..23: mol_type = other RNA
gtaccagccgaaggtgacgaacc

SEQ ID NO: 13350 - RNA, 24 nt, synthetic construct
  misc_feature 1..24: note = Synthetic
  source 1..24: mol_type = other RNA
ggtaccagccgaaggtgacgaacc

SEQ ID NO: 13351 - RNA, 18 nt, synthetic construct
  misc_feature 1..18: note = Synthetic
  source 1..18: mol_type = other RNA
ggcgcccctaaatcgccc

SEQ ID NO: 13352 - RNA, 19 nt, synthetic construct
  misc_feature 1..19: note = Synthetic
  source 1..19: mol_type = other RNA
gttattcccaaacagggcc

SEQ ID NO: 13353 - RNA, 21 nt, synthetic construct
  misc_feature 1..21: note = Synthetic
  source 1..21: mol_type = other RNA
gcgttattcccaaacagggcc

SEQ ID NO: 13354 - RNA, 22 nt, synthetic construct
  misc_feature 1..22: note = Synthetic
  source 1..22: mol_type = other RNA
ggcgttattcccaaacagggcc

SEQ ID NO: 13355 - RNA, 18 nt, synthetic construct
  misc_feature 1..18: note = Synthetic
  source 1..18: mol_type = other RNA
gcttgttggtgtacgcgc

SEQ ID NO: 13356 - RNA, 21 nt, synthetic construct
  misc_feature 1..21: note = Synthetic
  source 1..21: mol_type = other RNA
ggcgcttgttggtgtacgcgc

SEQ ID NO: 13357 - RNA, 19 nt, synthetic construct
  misc_feature 1..19: note = Synthetic
  source 1..19: mol_type = other RNA
gcccggcggcgtagtaggc

SEQ ID NO: 13358 - RNA, 21 nt, synthetic construct
  misc_feature 1..21: note = Synthetic
  source 1..21: mol_type = other RNA
gggcccggcggcgtagtaggc

SEQ ID NO: 13359 - RNA, 23 nt, synthetic construct
  misc_feature 1..23: note = Synthetic
  source 1..23: mol_type = other RNA
gcgggcccggcggcgtagtaggc

SEQ ID NO: 13360 - RNA, 18 nt, synthetic construct
  misc_feature 1..18: note = Synthetic
  source 1..18: mol_type = other RNA
gcaacgtgcaggcacggc

SEQ ID NO: 13361 - RNA, 19 nt, synthetic construct
  misc_feature 1..19: note = Synthetic
  source 1..19: mol_type = other RNA
ggcaacgtgcaggcacggc

SEQ ID NO: 13362 - RNA, 21 nt, synthetic construct
  misc_feature 1..21: note = Synthetic
  source 1..21: mol_type = other RNA
gcggcaacgtgcaggcacggc

SEQ ID NO: 13363 - RNA, 24 nt, synthetic construct
  misc_feature 1..24: note = Synthetic
  source 1..24: mol_type = other RNA
gtcgcggcaacgtgcaggcacggc

SEQ ID NO: 13364 - RNA, 18 nt, synthetic construct
  misc_feature 1..18: note = Synthetic
  source 1..18: mol_type = other RNA
gcctgcagtccctcgggc

SEQ ID NO: 13365 - RNA, 22 nt, synthetic construct
  misc_feature 1..22: note = Synthetic
  source 1..22: mol_type = other RNA
gaacgcctgcagtccctcgggc

SEQ ID NO: 13366 - RNA, 18 nt, synthetic construct
  misc_feature 1..18: note = Synthetic
  source 1..18: mol_type = other RNA
gaagcacaggttgtgggc

SEQ ID NO: 13367 - RNA, 21 nt, synthetic construct
  misc_feature 1..21: note = Synthetic
  source 1..21: mol_type = other RNA
gctgaagcacaggttgtgggc

SEQ ID NO: 13368 - RNA, 23 nt, synthetic construct
  misc_feature 1..23: note = Synthetic
  source 1..23: mol_type = other RNA
gtgctgaagcacaggttgtgggc

SEQ ID NO: 13369 - RNA, 21 nt, synthetic construct
  misc_feature 1..21: note = Synthetic
  source 1..21: mol_type = other RNA
ggttgtgggcctggatgatgc

SEQ ID NO: 13370 - RNA, 21 nt, synthetic construct
  misc_feature 1..21: note = Synthetic
  source 1..21: mol_type = other RNA
gtcatgaaggccaacagcatc

SEQ ID NO: 13371 - RNA, 22 nt, synthetic construct
  misc_feature 1..22: note = Synthetic
  source 1..22: mol_type = other RNA
ggtcatgaaggccaacagcatc

SEQ ID NO: 13372 - RNA, 23 nt, synthetic construct
  misc_feature 1..23: note = Synthetic
  source 1..23: mol_type = other RNA
gggtcatgaaggccaacagcatc

SEQ ID NO: 13373 - RNA, 18 nt, synthetic construct
  misc_feature 1..18: note = Synthetic
  source 1..18: mol_type = other RNA
gcgcgcgtggacgtactc

SEQ ID NO: 13374 - RNA, 23 nt, synthetic construct
  misc_feature 1..23: note = Synthetic
  source 1..23: mol_type = other RNA
gcccagcgcgcgtggacgtactc

SEQ ID NO: 13375 - RNA, 18 nt, synthetic construct
  misc_feature 1..18: note = Synthetic
  source 1..18: mol_type = other RNA
gaccgtctcctctacctc

SEQ ID NO: 13376 - RNA, 22 nt, synthetic construct
  misc_feature 1..22: note = Synthetic
  source 1..22: mol_type = other RNA
gcgcgaccgtctcctctacctc

SEQ ID NO: 13377 - RNA, 18 nt, synthetic construct
  misc_feature 1..18: note = Synthetic
  source 1..18: mol_type = other RNA
ggcggtgaggacaaagtc

SEQ ID NO: 13378 - RNA, 22 nt, synthetic construct
  misc_feature 1..22: note = Synthetic
  source 1..22: mol_type = other RNA
gttcggcggtgaggacaaagtc

SEQ ID NO: 13379 - RNA, 18 nt, synthetic construct
  misc_feature 1..18: note = Synthetic
  source 1..18: mol_type = other RNA
gacgaacccggggttgtc

SEQ ID NO: 13380 - RNA, 21 nt, synthetic construct
  misc_feature 1..21: note = Synthetic
  source 1..21: mol_type = other RNA
ggtgacgaacccggggttgtc

SEQ ID NO: 13381 - RNA, 24 nt, synthetic construct
  misc_feature 1..24: note = Synthetic
  source 1..24: mol_type = other RNA
gaaggtgacgaacccggggttgtc

SEQ ID NO: 13382 - RNA, 21 nt, synthetic construct
  misc_feature 1..21: note = Synthetic
  source 1..21: mol_type = other RNA
gtccggggggtgccacacttc

SEQ ID NO: 13383 - RNA, 24 nt, synthetic construct
  misc_feature 1..24: note = Synthetic
  source 1..24: mol_type = other RNA
gtcgtccggggggtgccacacttc

SEQ ID NO: 13384 - RNA, 18 nt, synthetic construct
  misc_feature 1..18: note = Synthetic
  source 1..18: mol_type = other RNA
ggccacccggtggccttc

SEQ ID NO: 13385 - RNA, 22 nt, synthetic construct
  misc_feature 1..22: note = Synthetic
  source 1..22: mol_type = other RNA
gaacggccacccggtggccttc

SEQ ID NO: 13386 - RNA, 24 nt, synthetic construct
  misc_feature 1..24: note = Synthetic
  source 1..24: mol_type = other RNA
gtgaacggccacccggtggccttc

SEQ ID NO: 13387 - RNA, 21 nt, synthetic construct
  misc_feature 1..21: note = Synthetic
  source 1..21: mol_type = other RNA
ggttcacgtgaaacccggaag

SEQ ID NO: 13388 - RNA, 22 nt, synthetic construct
  misc_feature 1..22: note = Synthetic
  source 1..22: mol_type = other RNA
gggttcacgtgaaacccggaag

SEQ ID NO: 13389 - RNA, 23 nt, synthetic construct
  misc_feature 1..23: note = Synthetic
  source 1..23: mol_type = other RNA
ggggttcacgtgaaacccggaag

SEQ ID NO: 13390 - RNA, 18 nt, synthetic construct
  misc_feature 1..18: note = Synthetic
  source 1..18: mol_type = other RNA
ggcgagccagtcccgcag

SEQ ID NO: 13391 - RNA, 22 nt, synthetic construct
  misc_feature 1..22: note = Synthetic
  source 1..22: mol_type = other RNA
gcatggcgagccagtcccgcag

SEQ ID NO: 13392 - RNA, 18 nt, synthetic construct
  misc_feature 1..18: note = Synthetic
  source 1..18: mol_type = other RNA
gcttggacgcgcctcccg

SEQ ID NO: 13393 - RNA, 19 nt, synthetic construct
  misc_feature 1..19: note = Synthetic
  source 1..19: mol_type = other RNA
ggcttggacgcgcctcccg

SEQ ID NO: 13394 - RNA, 21 nt, synthetic construct
  misc_feature 1..21: note = Synthetic
  source 1..21: mol_type = other RNA
ggggcttggacgcgcctcccg

SEQ ID NO: 13395 - RNA, 23 nt, synthetic construct
  misc_feature 1..23: note = Synthetic
  source 1..23: mol_type = other RNA
gcggggcttggacgcgcctcccg

SEQ ID NO: 13396 - RNA, 18 nt, synthetic construct
  misc_feature 1..18: note = Synthetic
  source 1..18: mol_type = other RNA
gcgcggccacgtcgtccg

SEQ ID NO: 13397 - RNA, 21 nt, synthetic construct
  misc_feature 1..21: note = Synthetic
  source 1..21: mol_type = other RNA
gccgcgcggccacgtcgtccg

SEQ ID NO: 13398 - RNA, 23 nt, synthetic construct
  misc_feature 1..23: note = Synthetic
  source 1..23: mol_type = other RNA
gagccgcgcggccacgtcgtccg

SEQ ID NO: 13399 - RNA, 24 nt, synthetic construct
  misc_feature 1..24: note = Synthetic
  source 1..24: mol_type = other RNA
ggagccgcgcggccacgtcgtccg

SEQ ID NO: 13400 - RNA, 21 nt, synthetic construct
  misc_feature 1..21: note = Synthetic
  source 1..21: mol_type = other RNA
gtacagttaaactcgacgtcg

SEQ ID NO: 13401 - RNA, 24 nt, synthetic construct
  misc_feature 1..24: note = Synthetic
  source 1..24: mol_type = other RNA
gccgtacagttaaactcgacgtcg

SEQ ID NO: 13402 - RNA, 18 nt, synthetic construct
  misc_feature 1..18: note = Synthetic
  source 1..18: mol_type = other RNA
ggctctatgcaacattcg

SEQ ID NO: 13403 - RNA, 18 nt, synthetic construct
  misc_feature 1..18: note = Synthetic
  source 1..18: mol_type = other RNA
gccgccagctcgttcagg

SEQ ID NO: 13404 - RNA, 19 nt, synthetic construct
  misc_feature 1..19: note = Synthetic
  source 1..19: mol_type = other RNA
ggccgccagctcgttcagg

SEQ ID NO: 13405 - RNA, 23 nt, synthetic construct
  misc_feature 1..23: note = Synthetic
  source 1..23: mol_type = other RNA
gacgccgtgggcaatggcgtatg

SEQ ID NO: 13406 - RNA, 24 nt, synthetic construct
  misc_feature 1..24: note = Synthetic
  source 1..24: mol_type = other RNA
gccaacagcatctcgaattcgctg

SEQ ID NO: 13407 - RNA, 21 nt, synthetic construct
  misc_feature 1..21: note = Synthetic
  source 1..21: mol_type = other RNA
ggcctcctcggggctgctctg

SEQ ID NO: 13408 - RNA, 18 nt, synthetic construct
  misc_feature 1..18: note = Synthetic
  source 1..18: mol_type = other RNA
gtagagcagacaggatat

SEQ ID NO: 13409 - RNA, 21 nt, synthetic construct
  misc_feature 1..21: note = Synthetic
  source 1..21: mol_type = other RNA
gtcgtagagcagacaggatat

SEQ ID NO: 13410 - RNA, 22 nt, synthetic construct
  misc_feature 1..22: note = Synthetic
  source 1..22: mol_type = other RNA
ggtcgtagagcagacaggatat

SEQ ID NO: 13411 - RNA, 22 nt, synthetic construct
  misc_feature 1..22: note = Synthetic
  source 1..22: mol_type = other RNA
gatatctggatgaccaggtcct

SEQ ID NO: 13412 - RNA, 23 nt, synthetic construct
  misc_feature 1..23: note = Synthetic
  source 1..23: mol_type = other RNA
ggatatctggatgaccaggtcct

SEQ ID NO: 13413 - RNA, 23 nt, synthetic construct
  misc_feature 1..23: note = Synthetic
  source 1..23: mol_type = other RNA
gacaaagtcctggatgtccctct

SEQ ID NO: 13414 - RNA, 24 nt, synthetic construct
  misc_feature 1..24: note = Synthetic
  source 1..24: mol_type = other RNA
ggacaaagtcctggatgtccctct

SEQ ID NO: 13415 - RNA, 19 nt, synthetic construct
  misc_feature 1..19: note = Synthetic
  source 1..19: mol_type = other RNA
gctggccgtcgtagatggt

SEQ ID NO: 13416 - RNA, 24 nt, synthetic construct
  misc_feature 1..24: note = Synthetic
  source 1..24: mol_type = other RNA
gatctgctggccgtcgtagatggt

SEQ ID NO: 13417 - RNA, 19 nt, synthetic construct
  misc_feature 1..19: note = Synthetic
  source 1..19: mol_type = other RNA
gtggttctggaattcgaca

SEQ ID NO: 13418 - RNA, 23 nt, synthetic construct
  misc_feature 1..23: note = Synthetic
  source 1..23: mol_type = other RNA
gcccgtggttctggaattcgaca

SEQ ID NO: 13419 - RNA, 19 nt, synthetic construct
  misc_feature 1..19: note = Synthetic
  source 1..19: mol_type = other RNA
gcctgactccggaaggcca

SEQ ID NO: 13420 - RNA, 21 nt, synthetic construct
  misc_feature 1..21: note = Synthetic
  source 1..21: mol_type = other RNA
gggcctgactccggaaggcca

SEQ ID NO: 13421 - RNA, 18 nt, synthetic construct
  misc_feature 1..18: note = Synthetic
  source 1..18: mol_type = other RNA
ggtcccgtccatcaagga

SEQ ID NO: 13422 - RNA, 21 nt, synthetic construct
  misc_feature 1..21: note = Synthetic
  source 1..21: mol_type = other RNA
gcaggtcccgtccatcaagga

SEQ ID NO: 13423 - RNA, 23 nt, synthetic construct
  misc_feature 1..23: note = Synthetic
  source 1..23: mol_type = other RNA
gcgcaggtcccgtccatcaagga

SEQ ID NO: 13424 - RNA, 19 nt, synthetic construct
  misc_feature 1..19: note = Synthetic
  source 1..19: mol_type = other RNA
gatcggcgagtactgcata

SEQ ID NO: 13425 - RNA, 21 nt, synthetic construct
  misc_feature 1..21: note = Synthetic
  source 1..21: mol_type = other RNA
gtgatcggcgagtactgcata

SEQ ID NO: 13426 - RNA, 22 nt, synthetic construct
  misc_feature 1..22: note = Synthetic
  source 1..22: mol_type = other RNA
ggtgatcggcgagtactgcata

SEQ ID NO: 13427 - RNA, 23 nt, synthetic construct
  misc_feature 1..23: note = Synthetic
  source 1..23: mol_type = other RNA
gggtgatcggcgagtactgcata

SEQ ID NO: 13428 - RNA, 24 nt, synthetic construct
  misc_feature 1..24: note = Synthetic
  source 1..24: mol_type = other RNA
ggggtgatcggcgagtactgcata

SEQ ID NO: 13429 - RNA, 18 nt, synthetic construct
  misc_feature 1..18: note = Synthetic
  source 1..18: mol_type = other RNA
ggtgaacatcgacatgta

SEQ ID NO: 13430 - RNA, 22 nt, synthetic construct
  misc_feature 1..22: note = Synthetic
  source 1..22: mol_type = other RNA
gcatggtgaacatcgacatgta

SEQ ID NO: 13431 - RNA, 23 nt, synthetic construct
  misc_feature 1..23: note = Synthetic
  source 1..23: mol_type = other RNA
ggcatggtgaacatcgacatgta

SEQ ID NO: 13432 - RNA, 23 nt, synthetic construct
  misc_feature 1..23: note = Synthetic
  source 1..23: mol_type = other RNA
gctgtttctgccccccatcaaac

SEQ ID NO: 13433 - RNA, 22 nt, synthetic construct
  misc_feature 1..22: note = Synthetic
  source 1..22: mol_type = other RNA
gtaactcggtgtacgggttcac

SEQ ID NO: 13434 - RNA, 24 nt, synthetic construct
  misc_feature 1..24: note = Synthetic
  source 1..24: mol_type = other RNA
gtgtaactcggtgtacgggttcac

SEQ ID NO: 13435 - RNA, 19 nt, synthetic construct
  misc_feature 1..19: note = Synthetic
  source 1..19: mol_type = other RNA
gtacatcggcgtcatctac

SEQ ID NO: 13436 - RNA, 18 nt, synthetic construct
  misc_feature 1..18: note = Synthetic
  source 1..18: mol_type = other RNA
ggttcatcctggacaacc

SEQ ID NO: 13437 - RNA, 19 nt, synthetic construct
  misc_feature 1..19: note = Synthetic
  source 1..19: mol_type = other RNA
gaataacgccaagatcacc

SEQ ID NO: 13438 - RNA, 21 nt, synthetic construct
  misc_feature 1..21: note = Synthetic
  source 1..21: mol_type = other RNA
gggaataacgccaagatcacc

SEQ ID NO: 13439 - RNA, 19 nt, synthetic construct
  misc_feature 1..19: note = Synthetic
  source 1..19: mol_type = other RNA
gagatgctgctcgcgaccc

SEQ ID NO: 13440 - RNA, 21 nt, synthetic construct
  misc_feature 1..21: note = Synthetic
  source 1..21: mol_type = other RNA
gcgagatgctgctcgcgaccc

SEQ ID NO: 13441 - RNA, 24 nt, synthetic construct
  misc_feature 1..24: note = Synthetic
  source 1..24: mol_type = other RNA
gccgcgagatgctgctcgcgaccc

SEQ ID NO: 13442 - RNA, 23 nt, synthetic construct
  misc_feature 1..23: note = Synthetic
  source 1..23: mol_type = other RNA
gacccttgtgaaacagtacggcc

SEQ ID NO: 13443 - RNA, 19 nt, synthetic construct
  misc_feature 1..19: note = Synthetic
  source 1..19: mol_type = other RNA
gctggtgtccgagctggcc

SEQ ID NO: 13444 - RNA, 22 nt, synthetic construct
  misc_feature 1..22: note = Synthetic
  source 1..22: mol_type = other RNA
gctgctggtgtccgagctggcc

SEQ ID NO: 13445 - RNA, 21 nt, synthetic construct
  misc_feature 1..21: note = Synthetic
  source 1..21: mol_type = other RNA
ggtaagatgctcatcaagggc

SEQ ID NO: 13446 - RNA, 22 nt, synthetic construct
  misc_feature 1..22: note = Synthetic
  source 1..22: mol_type = other RNA
gggtaagatgctcatcaagggc

SEQ ID NO: 13447 - RNA, 23 nt, synthetic construct
  misc_feature 1..23: note = Synthetic
  source 1..23: mol_type = other RNA
ggggtaagatgctcatcaagggc

SEQ ID NO: 13448 - RNA, 24 nt, synthetic construct
  misc_feature 1..24: note = Synthetic
  source 1..24: mol_type = other RNA
gggggtaagatgctcatcaagggc

SEQ ID NO: 13449 - RNA, 21 nt, synthetic construct
  misc_feature 1..21: note = Synthetic
  source 1..21: mol_type = other RNA
gcacgtggggtaccagggggc

SEQ ID NO: 13450 - RNA, 22 nt, synthetic construct
  misc_feature 1..22: note = Synthetic
  source 1..22: mol_type = other RNA
ggcacgtggggtaccagggggc

SEQ ID NO: 13451 - RNA, 18 nt, synthetic construct
  misc_feature 1..18: note = Synthetic
  source 1..18: mol_type = other RNA
gcatggccgcggccctgc

SEQ ID NO: 13452 - RNA, 22 nt, synthetic construct
  misc_feature 1..22: note = Synthetic
  source 1..22: mol_type = other RNA
gagcgcatggccgcggccctgc

SEQ ID NO: 13453 - RNA, 24 nt, synthetic construct
  misc_feature 1..24: note = Synthetic
  source 1..24: mol_type = other RNA
gcgagcgcatggccgcggccctgc

SEQ ID NO: 13454 - RNA, 18 nt, synthetic construct
  misc_feature 1..18: note = Synthetic
  source 1..18: mol_type = other RNA
gcgaaagcagatccgctc

SEQ ID NO: 13455 - RNA, 23 nt, synthetic construct
  misc_feature 1..23: note = Synthetic
  source 1..23: mol_type = other RNA
gccatgcgaaagcagatccgctc

SEQ ID NO: 13456 - RNA, 21 nt, synthetic construct
  misc_feature 1..21: note = Synthetic
  source 1..21: mol_type = other RNA
gcctgcccacgcccgtggttc

SEQ ID NO: 13457 - RNA, 22 nt, synthetic construct
  misc_feature 1..22: note = Synthetic
  source 1..22: mol_type = other RNA
ggcctgcccacgcccgtggttc

SEQ ID NO: 13458 - RNA, 23 nt, synthetic construct
  misc_feature 1..23: note = Synthetic
  source 1..23: mol_type = other RNA
gggcctgcccacgcccgtggttc

SEQ ID NO: 13459 - RNA, 24 nt, synthetic construct
  misc_feature 1..24: note = Synthetic
  source 1..24: mol_type = other RNA
ggggcctgcccacgcccgtggttc

SEQ ID NO: 13460 - RNA, 19 nt, synthetic construct
  misc_feature 1..19: note = Synthetic
  source 1..19: mol_type = other RNA
gagaccgccggcaggcacg

SEQ ID NO: 13461 - RNA, 21 nt, synthetic construct
  misc_feature 1..21: note = Synthetic
  source 1..21: mol_type = other RNA
gggagaccgccggcaggcacg

SEQ ID NO: 13462 - RNA, 23 nt, synthetic construct
  misc_feature 1..23: note = Synthetic
  source 1..23: mol_type = other RNA
gcgggagaccgccggcaggcacg

SEQ ID NO: 13463 - RNA, 22 nt, synthetic construct
  misc_feature 1..22: note = Synthetic
  source 1..22: mol_type = other RNA
gccttcgggacatccagcgacg

SEQ ID NO: 13464 - RNA, 23 nt, synthetic construct
  misc_feature 1..23: note = Synthetic
  source 1..23: mol_type = other RNA
ggccttcgggacatccagcgacg

SEQ ID NO: 13465 - RNA, 19 nt, synthetic construct
  misc_feature 1..19: note = Synthetic
  source 1..19: mol_type = other RNA
gccgcgcggctccggaccg

SEQ ID NO: 13466 - RNA, 22 nt, synthetic construct
  misc_feature 1..22: note = Synthetic
  source 1..22: mol_type = other RNA
gtggccgcgcggctccggaccg

SEQ ID NO: 13467 - RNA, 19 nt, synthetic construct
  misc_feature 1..19: note = Synthetic
  source 1..19: mol_type = other RNA
gaccgcagggttcggggcg

SEQ ID NO: 13468 - RNA, 19 nt, synthetic construct
  misc_feature 1..19: note = Synthetic
  source 1..19: mol_type = other RNA
gcgcaacgcggggtgatcg

SEQ ID NO: 13469 - RNA, 23 nt, synthetic construct
  misc_feature 1..23: note = Synthetic
  source 1..23: mol_type = other RNA
gcccgcgcaacgcggggtgatcg

SEQ ID NO: 13470 - RNA, 24 nt, synthetic construct
  misc_feature 1..24: note = Synthetic
  source 1..24: mol_type = other RNA
ggcccgcgcaacgcggggtgatcg

SEQ ID NO: 13471 - RNA, 22 nt, synthetic construct
  misc_feature 1..22: note = Synthetic
  source 1..22: mol_type = other RNA
gcgctacggcggaggaaactcg

SEQ ID NO: 13472 - RNA, 23 nt, synthetic construct
  misc_feature 1..23: note = Synthetic
  source 1..23: mol_type = other RNA
ggcgctacggcggaggaaactcg

SEQ ID NO: 13473 - RNA, 22 nt, synthetic construct
  misc_feature 1..22: note = Synthetic
  source 1..22: mol_type = other RNA
gcgttagccgagcgccccgcgg

SEQ ID NO: 13474 - RNA, 21 nt, synthetic construct
  misc_feature 1..21: note = Synthetic
  source 1..21: mol_type = other RNA
ggccatcaagaagtacgaggg

SEQ ID NO: 13475 - RNA, 22 nt, synthetic construct
  misc_feature 1..22: note = Synthetic
  source 1..22: mol_type = other RNA
gacatttacaaggtccccctgg

SEQ ID NO: 13476 - RNA, 23 nt, synthetic construct
  misc_feature 1..23: note = Synthetic
  source 1..23: mol_type = other RNA
ggacatttacaaggtccccctgg

SEQ ID NO: 13477 - RNA, 22 nt, synthetic construct
  misc_feature 1..22: note = Synthetic
  source 1..22: mol_type = other RNA
gctctcggccgtcgcgcgcttg

SEQ ID NO: 13478 - RNA, 24 nt, synthetic construct
  misc_feature 1..24: note = Synthetic
  source 1..24: mol_type = other RNA
gagctctcggccgtcgcgcgcttg

SEQ ID NO: 13479 - RNA, 19 nt, synthetic construct
  misc_feature 1..19: note = Synthetic
  source 1..19: mol_type = other RNA
gtcgtgtgtaactcggtgt

SEQ ID NO: 13480 - RNA, 18 nt, synthetic construct
  misc_feature 1..18: note = Synthetic
  source 1..18: mol_type = other RNA
gggtccttgaccccactt

SEQ ID NO: 13481 - RNA, 22 nt, synthetic construct
  misc_feature 1..22: note = Synthetic
  source 1..22: mol_type = other RNA
gccagggtccttgaccccactt

SEQ ID NO: 13482 - RNA, 23 nt, synthetic construct
  misc_feature 1..23: note = Synthetic
  source 1..23: mol_type = other RNA
ggccagggtccttgaccccactt

SEQ ID NO: 13483 - RNA, 24 nt, synthetic construct
  misc_feature 1..24: note = Synthetic
  source 1..24: mol_type = other RNA
gggccagggtccttgaccccactt

SEQ ID NO: 13484 - RNA, 19 nt, synthetic construct
  misc_feature 1..19: note = Synthetic
  source 1..19: mol_type = other RNA
gacattcaaggccctgttt

SEQ ID NO: 13485 - RNA, 21 nt, synthetic construct
  misc_feature 1..21: note = Synthetic
  source 1..21: mol_type = other RNA
gtgacattcaaggccctgttt

SEQ ID NO: 13486 - RNA, 23 nt, synthetic construct
  misc_feature 1..23: note = Synthetic
  source 1..23: mol_type = other RNA
gcgtgacattcaaggccctgttt

SEQ ID NO: 13487 - RNA, 19 nt, synthetic construct
  misc_feature 1..19: note = Synthetic
  source 1..19: mol_type = other RNA
cggggttgtccaggatgaa

SEQ ID NO: 13488 - RNA, 21 nt, synthetic construct
  misc_feature 1..21: note = Synthetic
  source 1..21: mol_type = other RNA
cccggggttgtccaggatgaa

SEQ ID NO: 13489 - RNA, 22 nt, synthetic construct
  misc_feature 1..22: note = Synthetic
  source 1..22: mol_type = other RNA
acccggggttgtccaggatgaa

SEQ ID NO: 13490 - RNA, 23 nt, synthetic construct
  misc_feature 1..23: note = Synthetic
  source 1..23: mol_type = other RNA
aacccggggttgtccaggatgaa

SEQ ID NO: 13491 - RNA, 18 nt, synthetic construct
  misc_feature 1..18: note = Synthetic
  source 1..18: mol_type = other RNA
ctcccgtgaacccgtaca

SEQ ID NO: 13492 - RNA, 19 nt, synthetic construct
  misc_feature 1..19: note = Synthetic
  source 1..19: mol_type = other RNA
actcccgtgaacccgtaca

SEQ ID NO: 13493 - RNA, 22 nt, synthetic construct
  misc_feature 1..22: note = Synthetic
  source 1..22: mol_type = other RNA
tgcactcccgtgaacccgtaca

SEQ ID NO: 13494 - RNA, 23 nt, synthetic construct
  misc_feature 1..23: note = Synthetic
  source 1..23: mol_type = other RNA
ctgcactcccgtgaacccgtaca

SEQ ID NO: 13495 - RNA, 18 nt, synthetic construct
  misc_feature 1..18: note = Synthetic
  source 1..18: mol_type = other RNA
caaagtcgaacaccacca

SEQ ID NO: 13496 - RNA, 21 nt, synthetic construct
  misc_feature 1..21: note = Synthetic
  source 1..21: mol_type = other RNA
tggcaaagtcgaacaccacca

SEQ ID NO: 13497 - RNA, 22 nt, synthetic construct
  misc_feature 1..22: note = Synthetic
  source 1..22: mol_type = other RNA
ctggcaaagtcgaacaccacca

SEQ ID NO: 13498 - RNA, 18 nt, synthetic construct
  misc_feature 1..18: note = Synthetic
  source 1..18: mol_type = other RNA
acagctggcccaccagca

SEQ ID NO: 13499 - RNA, 19 nt, synthetic construct
  misc_feature 1..19: note = Synthetic
  source 1..19: mol_type = other RNA
aacagctggcccaccagca

SEQ ID NO: 13500 - RNA, 21 nt, synthetic construct
  misc_feature 1..21: note = Synthetic
  source 1..21: mol_type = other RNA
aaaacagctggcccaccagca

SEQ ID NO: 13501 - RNA, 22 nt, synthetic construct
  misc_feature 1..22: note = Synthetic
  source 1..22: mol_type = other RNA
aaaaacagctggcccaccagca

SEQ ID NO: 13502 - RNA, 23 nt, synthetic construct
  misc_feature 1..23: note = Synthetic
  source 1..23: mol_type = other RNA
aaaaaacagctggcccaccagca

SEQ ID NO: 13503 - RNA, 24 nt, synthetic construct
  misc_feature 1..24: note = Synthetic
  source 1..24: mol_type = other RNA
taaaaaacagctggcccaccagca

SEQ ID NO: 13504 - RNA, 18 nt, synthetic construct
  misc_feature 1..18: note = Synthetic
  source 1..18: mol_type = other RNA
ccccgtagatgatgcgca

SEQ ID NO: 13505 - RNA, 19 nt, synthetic construct
  misc_feature 1..19: note = Synthetic
  source 1..19: mol_type = other RNA
tccccgtagatgatgcgca

SEQ ID NO: 13506 - RNA, 21 nt, synthetic construct
  misc_feature 1..21: note = Synthetic
  source 1..21: mol_type = other RNA
tgtccccgtagatgatgcgca

SEQ ID NO: 13507 - RNA, 23 nt, synthetic construct
  misc_feature 1..23: note = Synthetic
  source 1..23: mol_type = other RNA
cgtgtccccgtagatgatgcgca

SEQ ID NO: 13508 - RNA, 24 nt, synthetic construct
  misc_feature 1..24: note = Synthetic
  source 1..24: mol_type = other RNA
ccgtgtccccgtagatgatgcgca

SEQ ID NO: 13509 - RNA, 18 nt, synthetic construct
  misc_feature 1..18: note = Synthetic
  source 1..18: mol_type = other RNA
cgcggcacagcacaaaga

SEQ ID NO: 13510 - RNA, 19 nt, synthetic construct
  misc_feature 1..19: note = Synthetic
  source 1..19: mol_type = other RNA
ccgcggcacagcacaaaga

SEQ ID NO: 13511 - RNA, 22 nt, synthetic construct
  misc_feature 1..22: note = Synthetic
  source 1..22: mol_type = other RNA
aggccgcggcacagcacaaaga

SEQ ID NO: 13512 - RNA, 24 nt, synthetic construct
  misc_feature 1..24: note = Synthetic
  source 1..24: mol_type = other RNA
tgaggccgcggcacagcacaaaga

SEQ ID NO: 13513 - RNA, 23 nt, synthetic construct
  misc_feature 1..23: note = Synthetic
  source 1..23: mol_type = other RNA
tggtggacaggtcgtagagcaga

SEQ ID NO: 13514 - RNA, 19 nt, synthetic construct
  misc_feature 1..19: note = Synthetic
  source 1..19: mol_type = other RNA
tgctctggggaatccgcga

SEQ ID NO: 13515 - RNA, 18 nt, synthetic construct
  misc_feature 1..18: note = Synthetic
  source 1..18: mol_type = other RNA
ctgggccacgatcacgta

SEQ ID NO: 13516 - RNA, 19 nt, synthetic construct
  misc_feature 1..19: note = Synthetic
  source 1..19: mol_type = other RNA
tctgggccacgatcacgta

SEQ ID NO: 13517 - RNA, 23 nt, synthetic construct
  misc_feature 1..23: note = Synthetic
  source 1..23: mol_type = other RNA
cgggtctgggccacgatcacgta

SEQ ID NO: 13518 - RNA, 21 nt, synthetic construct
  misc_feature 1..21: note = Synthetic
  source 1..21: mol_type = other RNA
ttggtgaacgtcttttcgcac

SEQ ID NO: 13519 - RNA, 22 nt, synthetic construct
  misc_feature 1..22: note = Synthetic
  source 1..22: mol_type = other RNA
cttggtgaacgtcttttcgcac

SEQ ID NO: 13520 - RNA, 24 nt, synthetic construct
  misc_feature 1..24: note = Synthetic
  source 1..24: mol_type = other RNA
agcttggtgaacgtcttttcgcac

SEQ ID NO: 13521 - RNA, 19 nt, synthetic construct
  misc_feature 1..19: note = Synthetic
  source 1..19: mol_type = other RNA
cggggccgtactgtttcac

SEQ ID NO: 13522 - RNA, 21 nt, synthetic construct
  misc_feature 1..21: note = Synthetic
  source 1..21: mol_type = other RNA
ctcggggccgtactgtttcac

SEQ ID NO: 13523 - RNA, 22 nt, synthetic construct
  misc_feature 1..22: note = Synthetic
  source 1..22: mol_type = other RNA
actcggggccgtactgtttcac

SEQ ID NO: 13524 - RNA, 23 nt, synthetic construct
  misc_feature 1..23: note = Synthetic
  source 1..23: mol_type = other RNA
aactcggggccgtactgtttcac

SEQ ID NO: 13525 - RNA, 18 nt, synthetic construct
  misc_feature 1..18: note = Synthetic
  source 1..18: mol_type = other RNA
cagcaggcacgtaaagac

SEQ ID NO: 13526 - RNA, 23 nt, synthetic construct
  misc_feature 1..23: note = Synthetic
  source 1..23: mol_type = other RNA
aggcgcagcaggcacgtaaagac

SEQ ID NO: 13527 - RNA, 24 nt, synthetic construct
  misc_feature 1..24: note = Synthetic
  source 1..24: mol_type = other RNA
caggcgcagcaggcacgtaaagac

SEQ ID NO: 13528 - RNA, 18 nt, synthetic construct
  misc_feature 1..18: note = Synthetic
  source 1..18: mol_type = other RNA
agccgaaggtgacgaacc

SEQ ID NO: 13529 - RNA, 19 nt, synthetic construct
  misc_feature 1..19: note = Synthetic
  source 1..19: mol_type = other RNA
cagccgaaggtgacgaacc

SEQ ID NO: 13530 - RNA, 21 nt, synthetic construct
  misc_feature 1..21: note = Synthetic
  source 1..21: mol_type = other RNA
accagccgaaggtgacgaacc

SEQ ID NO: 13531 - RNA, 22 nt, synthetic construct
  misc_feature 1..22: note = Synthetic
  source 1..22: mol_type = other RNA
taccagccgaaggtgacgaacc

SEQ ID NO: 13532 - RNA, 19 nt, synthetic construct
  misc_feature 1..19: note = Synthetic
  source 1..19: mol_type = other RNA
cggcgcccctaaatcgccc

SEQ ID NO: 13533 - RNA, 21 nt, synthetic construct
  misc_feature 1..21: note = Synthetic
  source 1..21: mol_type = other RNA
cccggcgcccctaaatcgccc

SEQ ID NO: 13534 - RNA, 22 nt, synthetic construct
  misc_feature 1..22: note = Synthetic
  source 1..22: mol_type = other RNA
ccccggcgcccctaaatcgccc

SEQ ID NO: 13535 - RNA, 23 nt, synthetic construct
  misc_feature 1..23: note = Synthetic
  source 1..23: mol_type = other RNA
cccccggcgcccctaaatcgccc

SEQ ID NO: 13536 - RNA, 24 nt, synthetic construct
  misc_feature 1..24: note = Synthetic
  source 1..24: mol_type = other RNA
ccccccggcgcccctaaatcgccc

SEQ ID NO: 13537 - RNA, 18 nt, synthetic construct
  misc_feature 1..18: note = Synthetic
  source 1..18: mol_type = other RNA
ttattcccaaacagggcc

SEQ ID NO: 13538 - RNA, 23 nt, synthetic construct
  misc_feature 1..23: note = Synthetic
  source 1..23: mol_type = other RNA
tggcgttattcccaaacagggcc

SEQ ID NO: 13539 - RNA, 24 nt, synthetic construct
  misc_feature 1..24: note = Synthetic
  source 1..24: mol_type = other RNA
ttggcgttattcccaaacagggcc

SEQ ID NO: 13540 - RNA, 19 nt, synthetic construct
  misc_feature 1..19: note = Synthetic
  source 1..19: mol_type = other RNA
cgcttgttggtgtacgcgc

SEQ ID NO: 13541 - RNA, 22 nt, synthetic construct
  misc_feature 1..22: note = Synthetic
  source 1..22: mol_type = other RNA
aggcgcttgttggtgtacgcgc

SEQ ID NO: 13542 - RNA, 23 nt, synthetic construct
  misc_feature 1..23: note = Synthetic
  source 1..23: mol_type = other RNA
caggcgcttgttggtgtacgcgc

SEQ ID NO: 13543 - RNA, 24 nt, synthetic construct
  misc_feature 1..24: note = Synthetic
  source 1..24: mol_type = other RNA
ccaggcgcttgttggtgtacgcgc

SEQ ID NO: 13544 - RNA, 18 nt, synthetic construct
  misc_feature 1..18: note = Synthetic
  source 1..18: mol_type = other RNA
cccggcggcgtagtaggc

SEQ ID NO: 13545 - RNA, 22 nt, synthetic construct
  misc_feature 1..22: note = Synthetic
  source 1..22: mol_type = other RNA
cgggcccggcggcgtagtaggc

SEQ ID NO: 13546 - RNA, 24 nt, synthetic construct
  misc_feature 1..24: note = Synthetic
  source 1..24: mol_type = other RNA
cgcgggcccggcggcgtagtaggc

SEQ ID NO: 13547 - RNA, 22 nt, synthetic construct
  misc_feature 1..22: note = Synthetic
  source 1..22: mol_type = other RNA
cgcggcaacgtgcaggcacggc

SEQ ID NO: 13548 - RNA, 23 nt, synthetic construct
  misc_feature 1..23: note = Synthetic
  source 1..23: mol_type = other RNA
tcgcggcaacgtgcaggcacggc

SEQ ID NO: 13549 - RNA, 19 nt, synthetic construct
  misc_feature 1..19: note = Synthetic
  source 1..19: mol_type = other RNA
cgcctgcagtccctcgggc

SEQ ID NO: 13550 - RNA, 21 nt, synthetic construct
  misc_feature 1..21: note = Synthetic
  source 1..21: mol_type = other RNA
aacgcctgcagtccctcgggc

SEQ ID NO: 13551 - RNA, 23 nt, synthetic construct
  misc_feature 1..23: note = Synthetic
  source 1..23: mol_type = other RNA
cgaacgcctgcagtccctcgggc

SEQ ID NO: 13552 - RNA, 24 nt, synthetic construct
  misc_feature 1..24: note = Synthetic
  source 1..24: mol_type = other RNA
ccgaacgcctgcagtccctcgggc

SEQ ID NO: 13553 - RNA, 19 nt, synthetic construct
  misc_feature 1..19: note = Synthetic
  source 1..19: mol_type = other RNA
tgaagcacaggttgtgggc

SEQ ID NO: 13554 - RNA, 22 nt, synthetic construct
  misc_feature 1..22: note = Synthetic
  source 1..22: mol_type = other RNA
tgctgaagcacaggttgtgggc

SEQ ID NO: 13555 - RNA, 24 nt, synthetic construct
  misc_feature 1..24: note = Synthetic
  source 1..24: mol_type = other RNA
cgtgctgaagcacaggttgtgggc

SEQ ID NO: 13556 - RNA, 18 nt, synthetic construct
  misc_feature 1..18: note = Synthetic
  source 1..18: mol_type = other RNA
tgtgggcctggatgatgc

SEQ ID NO: 13557 - RNA, 19 nt, synthetic construct
  misc_feature 1..19: note = Synthetic
  source 1..19: mol_type = other RNA
ttgtgggcctggatgatgc

SEQ ID NO: 13558 - RNA, 22 nt, synthetic construct
  misc_feature 1..22: note = Synthetic
  source 1..22: mol_type = other RNA
aggttgtgggcctggatgatgc

SEQ ID NO: 13559 - RNA, 23 nt, synthetic construct
  misc_feature 1..23: note = Synthetic
  source 1..23: mol_type = other RNA
caggttgtgggcctggatgatgc

SEQ ID NO: 13560 - RNA, 24 nt, synthetic construct
  misc_feature 1..24: note = Synthetic
  source 1..24: mol_type = other RNA
acaggttgtgggcctggatgatgc

SEQ ID NO: 13561 - RNA, 18 nt, synthetic construct
  misc_feature 1..18: note = Synthetic
  source 1..18: mol_type = other RNA
atgaaggccaacagcatc

SEQ ID NO: 13562 - RNA, 19 nt, synthetic construct
  misc_feature 1..19: note = Synthetic
  source 1..19: mol_type = other RNA
catgaaggccaacagcatc

SEQ ID NO: 13563 - RNA, 24 nt, synthetic construct
  misc_feature 1..24: note = Synthetic
  source 1..24: mol_type = other RNA
agggtcatgaaggccaacagcatc

SEQ ID NO: 13564 - RNA, 19 nt, synthetic construct
  misc_feature 1..19: note = Synthetic
  source 1..19: mol_type = other RNA
agcgcgcgtggacgtactc

SEQ ID NO: 13565 - RNA, 21 nt, synthetic construct
  misc_feature 1..21: note = Synthetic
  source 1..21: mol_type = other RNA
ccagcgcgcgtggacgtactc

SEQ ID NO: 13566 - RNA, 22 nt, synthetic construct
  misc_feature 1..22: note = Synthetic
  source 1..22: mol_type = other RNA
cccagcgcgcgtggacgtactc

SEQ ID NO: 13567 - RNA, 24 nt, synthetic construct
  misc_feature 1..24: note = Synthetic
  source 1..24: mol_type = other RNA
cgcccagcgcgcgtggacgtactc

SEQ ID NO: 13568 - RNA, 19 nt, synthetic construct
  misc_feature 1..19: note = Synthetic
  source 1..19: mol_type = other RNA
cgaccgtctcctctacctc

SEQ ID NO: 13569 - RNA, 21 nt, synthetic construct
  misc_feature 1..21: note = Synthetic
  source 1..21: mol_type = other RNA
cgcgaccgtctcctctacctc

SEQ ID NO: 13570 - RNA, 23 nt, synthetic construct
  misc_feature 1..23: note = Synthetic
  source 1..23: mol_type = other RNA
cgcgcgaccgtctcctctacctc

SEQ ID NO: 13571 - RNA, 24 nt, synthetic construct
  misc_feature 1..24: note = Synthetic
  source 1..24: mol_type = other RNA
ccgcgcgaccgtctcctctacctc

SEQ ID NO: 13572 - RNA, 19 nt, synthetic construct
  misc_feature 1..19: note = Synthetic
  source 1..19: mol_type = other RNA
cggcggtgaggacaaagtc

SEQ ID NO: 13573 - RNA, 21 nt, synthetic construct
  misc_feature 1..21: note = Synthetic
  source 1..21: mol_type = other RNA
ttcggcggtgaggacaaagtc

SEQ ID NO: 13574 - RNA, 23 nt, synthetic construct
  misc_feature 1..23: note = Synthetic
  source 1..23: mol_type = other RNA
agttcggcggtgaggacaaagtc

SEQ ID NO: 13575 - RNA, 24 nt, synthetic construct
  misc_feature 1..24: note = Synthetic
  source 1..24: mol_type = other RNA
cagttcggcggtgaggacaaagtc

SEQ ID NO: 13576 - RNA, 19 nt, synthetic construct
  misc_feature 1..19: note = Synthetic
  source 1..19: mol_type = other RNA
tgacgaacccggggttgtc

SEQ ID NO: 13577 - RNA, 22 nt, synthetic construct
  misc_feature 1..22: note = Synthetic
  source 1..22: mol_type = other RNA
aggtgacgaacccggggttgtc

SEQ ID NO: 13578 - RNA, 23 nt, synthetic construct
  misc_feature 1..23: note = Synthetic
  source 1..23: mol_type = other RNA
aaggtgacgaacccggggttgtc

SEQ ID NO: 13579 - RNA, 18 nt, synthetic construct
  misc_feature 1..18: note = Synthetic
  source 1..18: mol_type = other RNA
cggggggtgccacacttc

SEQ ID NO: 13580 - RNA, 19 nt, synthetic construct
  misc_feature 1..19: note = Synthetic
  source 1..19: mol_type = other RNA
ccggggggtgccacacttc

SEQ ID NO: 13581 - RNA, 22 nt, synthetic construct
  misc_feature 1..22: note = Synthetic
  source 1..22: mol_type = other RNA
cgtccggggggtgccacacttc

SEQ ID NO: 13582 - RNA, 23 nt, synthetic construct
  misc_feature 1..23: note = Synthetic
  source 1..23: mol_type = other RNA
tcgtccggggggtgccacacttc

SEQ ID NO: 13583 - RNA, 19 nt, synthetic construct
  misc_feature 1..19: note = Synthetic
  source 1..19: mol_type = other RNA
cggccacccggtggccttc

SEQ ID NO: 13584 - RNA, 21 nt, synthetic construct
  misc_feature 1..21: note = Synthetic
  source 1..21: mol_type = other RNA
aacggccacccggtggccttc

SEQ ID NO: 13585 - RNA, 23 nt, synthetic construct
  misc_feature 1..23: note = Synthetic
  source 1..23: mol_type = other RNA
tgaacggccacccggtggccttc

SEQ ID NO: 13586 - RNA, 18 nt, synthetic construct
  misc_feature 1..18: note = Synthetic
  source 1..18: mol_type = other RNA
tcacgtgaaacccggaag

SEQ ID NO: 13587 - RNA, 19 nt, synthetic construct
  misc_feature 1..19: note = Synthetic
  source 1..19: mol_type = other RNA
ttcacgtgaaacccggaag

SEQ ID NO: 13588 - RNA, 24 nt, synthetic construct
  misc_feature 1..24: note = Synthetic
  source 1..24: mol_type = other RNA
cggggttcacgtgaaacccggaag

SEQ ID NO: 13589 - RNA, 19 nt, synthetic construct
  misc_feature 1..19: note = Synthetic
  source 1..19: mol_type = other RNA
tggcgagccagtcccgcag

SEQ ID NO: 13590 - RNA, 21 nt, synthetic construct
  misc_feature 1..21: note = Synthetic
  source 1..21: mol_type = other RNA
catggcgagccagtcccgcag

SEQ ID NO: 13591 - RNA, 23 nt, synthetic construct
  misc_feature 1..23: note = Synthetic
  source 1..23: mol_type = other RNA
cgcatggcgagccagtcccgcag

SEQ ID NO: 13592 - RNA, 24 nt, synthetic construct
  misc_feature 1..24: note = Synthetic
  source 1..24: mol_type = other RNA
tcgcatggcgagccagtcccgcag

SEQ ID NO: 13593 - RNA, 22 nt, synthetic construct
  misc_feature 1..22: note = Synthetic
  source 1..22: mol_type = other RNA
cggggcttggacgcgcctcccg

SEQ ID NO: 13594 - RNA, 24 nt, synthetic construct
  misc_feature 1..24: note = Synthetic
  source 1..24: mol_type = other RNA
tgcggggcttggacgcgcctcccg

SEQ ID NO: 13595 - RNA, 19 nt, synthetic construct
  misc_feature 1..19: note = Synthetic
  source 1..19: mol_type = other RNA
cgcgcggccacgtcgtccg

SEQ ID NO: 13596 - RNA, 22 nt, synthetic construct
  misc_feature 1..22: note = Synthetic
  source 1..22: mol_type = other RNA
agccgcgcggccacgtcgtccg

SEQ ID NO: 13597 - RNA, 18 nt, synthetic construct
  misc_feature 1..18: note = Synthetic
  source 1..18: mol_type = other RNA
cagttaaactcgacgtcg

SEQ ID NO: 13598 - RNA, 19 nt, synthetic construct
  misc_feature 1..19: note = Synthetic
  source 1..19: mol_type = other RNA
acagttaaactcgacgtcg

SEQ ID NO: 13599 - RNA, 22 nt, synthetic construct
  misc_feature 1..22: note = Synthetic
  source 1..22: mol_type = other RNA
cgtacagttaaactcgacgtcg

SEQ ID NO: 13600 - RNA, 23 nt, synthetic construct
  misc_feature 1..23: note = Synthetic
  source 1..23: mol_type = other RNA
ccgtacagttaaactcgacgtcg

SEQ ID NO: 13601 - RNA, 19 nt, synthetic construct
  misc_feature 1..19: note = Synthetic
  source 1..19: mol_type = other RNA
aggctctatgcaacattcg

SEQ ID NO: 13602 - RNA, 21 nt, synthetic construct
  misc_feature 1..21: note = Synthetic
  source 1..21: mol_type = other RNA
aaaggctctatgcaacattcg

SEQ ID NO: 13603 - RNA, 22 nt, synthetic construct
  misc_feature 1..22: note = Synthetic
  source 1..22: mol_type = other RNA
caaaggctctatgcaacattcg

SEQ ID NO: 13604 - RNA, 23 nt, synthetic construct
  misc_feature 1..23: note = Synthetic
  source 1..23: mol_type = other RNA
tcaaaggctctatgcaacattcg

SEQ ID NO: 13605 - RNA, 24 nt, synthetic construct
  misc_feature 1..24: note = Synthetic
  source 1..24: mol_type = other RNA
atcaaaggctctatgcaacattcg

SEQ ID NO: 13606 - RNA, 21 nt, synthetic construct
  misc_feature 1..21: note = Synthetic
  source 1..21: mol_type = other RNA
ctggccgccagctcgttcagg

SEQ ID NO: 13607 - RNA, 22 nt, synthetic construct
  misc_feature 1..22: note = Synthetic
  source 1..22: mol_type = other RNA
cctggccgccagctcgttcagg

SEQ ID NO: 13608 - RNA, 23 nt, synthetic construct
  misc_feature 1..23: note = Synthetic
  source 1..23: mol_type = other RNA
ccctggccgccagctcgttcagg

SEQ ID NO: 13609 - RNA, 24 nt, synthetic construct
  misc_feature 1..24: note = Synthetic
  source 1..24: mol_type = other RNA
cccctggccgccagctcgttcagg

SEQ ID NO: 13610 - RNA, 18 nt, synthetic construct
  misc_feature 1..18: note = Synthetic
  source 1..18: mol_type = other RNA
tcgcccctgggtgtccgg

SEQ ID NO: 13611 - RNA, 19 nt, synthetic construct
  misc_feature 1..19: note = Synthetic
  source 1..19: mol_type = other RNA
atcgcccctgggtgtccgg

SEQ ID NO: 13612 - RNA, 21 nt, synthetic construct
  misc_feature 1..21: note = Synthetic
  source 1..21: mol_type = other RNA
aaatcgcccctgggtgtccgg

SEQ ID NO: 13613 - RNA, 22 nt, synthetic construct
  misc_feature 1..22: note = Synthetic
  source 1..22: mol_type = other RNA
taaatcgcccctgggtgtccgg

SEQ ID NO: 13614 - RNA, 23 nt, synthetic construct
  misc_feature 1..23: note = Synthetic
  source 1..23: mol_type = other RNA
ctaaatcgcccctgggtgtccgg

SEQ ID NO: 13615 - RNA, 24 nt, synthetic construct
  misc_feature 1..24: note = Synthetic
  source 1..24: mol_type = other RNA
cctaaatcgcccctgggtgtccgg

SEQ ID NO: 13616 - RNA, 18 nt, synthetic construct
  misc_feature 1..18: note = Synthetic
  source 1..18: mol_type = other RNA
cgtgggcaatggcgtatg

SEQ ID NO: 13617 - RNA, 19 nt, synthetic construct
  misc_feature 1..19: note = Synthetic
  source 1..19: mol_type = other RNA
ccgtgggcaatggcgtatg

SEQ ID NO: 13618 - RNA, 21 nt, synthetic construct
  misc_feature 1..21: note = Synthetic
  source 1..21: mol_type = other RNA
cgccgtgggcaatggcgtatg

SEQ ID NO: 13619 - RNA, 22 nt, synthetic construct
  misc_feature 1..22: note = Synthetic
  source 1..22: mol_type = other RNA
acgccgtgggcaatggcgtatg

SEQ ID NO: 13620 - RNA, 24 nt, synthetic construct
  misc_feature 1..24: note = Synthetic
  source 1..24: mol_type = other RNA
cgacgccgtgggcaatggcgtatg

SEQ ID NO: 13621 - RNA, 18 nt, synthetic construct
  misc_feature 1..18: note = Synthetic
  source 1..18: mol_type = other RNA
agcatctcgaattcgctg

SEQ ID NO: 13622 - RNA, 19 nt, synthetic construct
  misc_feature 1..19: note = Synthetic
  source 1..19: mol_type = other RNA
cagcatctcgaattcgctg

SEQ ID NO: 13623 - RNA, 21 nt, synthetic construct
  misc_feature 1..21: note = Synthetic
  source 1..21: mol_type = other RNA
aacagcatctcgaattcgctg

SEQ ID NO: 13624 - RNA, 22 nt, synthetic construct
  misc_feature 1..22: note = Synthetic
  source 1..22: mol_type = other RNA
caacagcatctcgaattcgctg

SEQ ID NO: 13625 - RNA, 23 nt, synthetic construct
  misc_feature 1..23: note = Synthetic
  source 1..23: mol_type = other RNA
ccaacagcatctcgaattcgctg

SEQ ID NO: 13626 - RNA, 18 nt, synthetic construct
  misc_feature 1..18: note = Synthetic
  source 1..18: mol_type = other RNA
ctcctcggggctgctctg

SEQ ID NO: 13627 - RNA, 19 nt, synthetic construct
  misc_feature 1..19: note = Synthetic
  source 1..19: mol_type = other RNA
cctcctcggggctgctctg

SEQ ID NO: 13628 - RNA, 22 nt, synthetic construct
  misc_feature 1..22: note = Synthetic
  source 1..22: mol_type = other RNA
cggcctcctcggggctgctctg

SEQ ID NO: 13629 - RNA, 23 nt, synthetic construct
  misc_feature 1..23: note = Synthetic
  source 1..23: mol_type = other RNA
acggcctcctcggggctgctctg

SEQ ID NO: 13630 - RNA, 24 nt, synthetic construct
  misc_feature 1..24: note = Synthetic
  source 1..24: mol_type = other RNA
cacggcctcctcggggctgctctg

SEQ ID NO: 13631 - RNA, 19 nt, synthetic construct
  misc_feature 1..19: note = Synthetic
  source 1..19: mol_type = other RNA
cgtagagcagacaggatat

SEQ ID NO: 13632 - RNA, 23 nt, synthetic construct
  misc_feature 1..23: note = Synthetic
  source 1..23: mol_type = other RNA
aggtcgtagagcagacaggatat

SEQ ID NO: 13633 - RNA, 24 nt, synthetic construct
  misc_feature 1..24: note = Synthetic
  source 1..24: mol_type = other RNA
caggtcgtagagcagacaggatat

SEQ ID NO: 13634 - RNA, 18 nt, synthetic construct
  misc_feature 1..18: note = Synthetic
  source 1..18: mol_type = other RNA
tctggatgaccaggtcct

SEQ ID NO: 13635 - RNA, 19 nt, synthetic construct
  misc_feature 1..19: note = Synthetic
  source 1..19: mol_type = other RNA
atctggatgaccaggtcct

SEQ ID NO: 13636 - RNA, 21 nt, synthetic construct
  misc_feature 1..21: note = Synthetic
  source 1..21: mol_type = other RNA
atatctggatgaccaggtcct

SEQ ID NO: 13637 - RNA, 24 nt, synthetic construct
  misc_feature 1..24: note = Synthetic
  source 1..24: mol_type = other RNA
aggatatctggatgaccaggtcct

SEQ ID NO: 13638 - RNA, 18 nt, synthetic construct
  misc_feature 1..18: note = Synthetic
  source 1..18: mol_type = other RNA
agtcctggatgtccctct

SEQ ID NO: 13639 - RNA, 19 nt, synthetic construct
  misc_feature 1..19: note = Synthetic
  source 1..19: mol_type = other RNA
aagtcctggatgtccctct

SEQ ID NO: 13640 - RNA, 21 nt, synthetic construct
  misc_feature 1..21: note = Synthetic
  source 1..21: mol_type = other RNA
caaagtcctggatgtccctct

SEQ ID NO: 13641 - RNA, 22 nt, synthetic construct
  misc_feature 1..22: note = Synthetic
  source 1..22: mol_type = other RNA
acaaagtcctggatgtccctct

SEQ ID NO: 13642 - RNA, 18 nt, synthetic construct
  misc_feature 1..18: note = Synthetic
  source 1..18: mol_type = other RNA
ctggccgtcgtagatggt

SEQ ID NO: 13643 - RNA, 21 nt, synthetic construct
  misc_feature 1..21: note = Synthetic
  source 1..21: mol_type = other RNA
ctgctggccgtcgtagatggt

SEQ ID NO: 13644 - RNA, 22 nt, synthetic construct
  misc_feature 1..22: note = Synthetic
  source 1..22: mol_type = other RNA
tctgctggccgtcgtagatggt

SEQ ID NO: 13645 - RNA, 23 nt, synthetic construct
  misc_feature 1..23: note = Synthetic
  source 1..23: mol_type = other RNA
atctgctggccgtcgtagatggt

SEQ ID NO: 13646 - RNA, 18 nt, synthetic construct
  misc_feature 1..18: note = Synthetic
  source 1..18: mol_type = other RNA
tggttctggaattcgaca

SEQ ID NO: 13647 - RNA, 21 nt, synthetic construct
  misc_feature 1..21: note = Synthetic
  source 1..21: mol_type = other RNA
ccgtggttctggaattcgaca

SEQ ID NO: 13648 - RNA, 22 nt, synthetic construct
  misc_feature 1..22: note = Synthetic
  source 1..22: mol_type = other RNA
cccgtggttctggaattcgaca

SEQ ID NO: 13649 - RNA, 24 nt, synthetic construct
  misc_feature 1..24: note = Synthetic
  source 1..24: mol_type = other RNA
cgcccgtggttctggaattcgaca

SEQ ID NO: 13650 - RNA, 18 nt, synthetic construct
  misc_feature 1..18: note = Synthetic
  source 1..18: mol_type = other RNA
cctgactccggaaggcca

SEQ ID NO: 13651 - RNA, 22 nt, synthetic construct
  misc_feature 1..22: note = Synthetic
  source 1..22: mol_type = other RNA
tgggcctgactccggaaggcca

SEQ ID NO: 13652 - RNA, 23 nt, synthetic construct
  misc_feature 1..23: note = Synthetic
  source 1..23: mol_type = other RNA
ctgggcctgactccggaaggcca

SEQ ID NO: 13653 - RNA, 24 nt, synthetic construct
  misc_feature 1..24: note = Synthetic
  source 1..24: mol_type = other RNA
cctgggcctgactccggaaggcca

SEQ ID NO: 13654 - RNA, 19 nt, synthetic construct
  misc_feature 1..19: note = Synthetic
  source 1..19: mol_type = other RNA
aggtcccgtccatcaagga

SEQ ID NO: 13655 - RNA, 22 nt, synthetic construct
  misc_feature 1..22: note = Synthetic
  source 1..22: mol_type = other RNA
cgcaggtcccgtccatcaagga

SEQ ID NO: 13656 - RNA, 24 nt, synthetic construct
  misc_feature 1..24: note = Synthetic
  source 1..24: mol_type = other RNA
cgcgcaggtcccgtccatcaagga

SEQ ID NO: 13657 - RNA, 18 nt, synthetic construct
  misc_feature 1..18: note = Synthetic
  source 1..18: mol_type = other RNA
acggccccgagttcgtga

SEQ ID NO: 13658 - RNA, 19 nt, synthetic construct
  misc_feature 1..19: note = Synthetic
  source 1..19: mol_type = other RNA
tacggccccgagttcgtga

SEQ ID NO: 13659 - RNA, 21 nt, synthetic construct
  misc_feature 1..21: note = Synthetic
  source 1..21: mol_type = other RNA
agtacggccccgagttcgtga

SEQ ID NO: 13660 - RNA, 22 nt, synthetic construct
  misc_feature 1..22: note = Synthetic
  source 1..22: mol_type = other RNA
cagtacggccccgagttcgtga

SEQ ID NO: 13661 - RNA, 23 nt, synthetic construct
  misc_feature 1..23: note = Synthetic
  source 1..23: mol_type = other RNA
acagtacggccccgagttcgtga

SEQ ID NO: 13662 - RNA, 24 nt, synthetic construct
  misc_feature 1..24: note = Synthetic
  source 1..24: mol_type = other RNA
aacagtacggccccgagttcgtga

SEQ ID NO: 13663 - RNA, 18 nt, synthetic construct
  misc_feature 1..18: note = Synthetic
  source 1..18: mol_type = other RNA
atcggcgagtactgcata

SEQ ID NO: 13664 - RNA, 18 nt, synthetic construct
  misc_feature 1..18: note = Synthetic
  source 1..18: mol_type = other RNA
agctcatgtgcttcgata

SEQ ID NO: 13665 - RNA, 19 nt, synthetic construct
  misc_feature 1..19: note = Synthetic
  source 1..19: mol_type = other RNA
aagctcatgtgcttcgata

SEQ ID NO: 13666 - RNA, 21 nt, synthetic construct
  misc_feature 1..21: note = Synthetic
  source 1..21: mol_type = other RNA
acaagctcatgtgcttcgata

SEQ ID NO: 13667 - RNA, 22 nt, synthetic construct
  misc_feature 1..22: note = Synthetic
  source 1..22: mol_type = other RNA
tacaagctcatgtgcttcgata

SEQ ID NO: 13668 - RNA, 23 nt, synthetic construct
  misc_feature 1..23: note = Synthetic
  source 1..23: mol_type = other RNA
atacaagctcatgtgcttcgata

SEQ ID NO: 13669 - RNA, 24 nt, synthetic construct
  misc_feature 1..24: note = Synthetic
  source 1..24: mol_type = other RNA
catacaagctcatgtgcttcgata

SEQ ID NO: 13670 - RNA, 19 nt, synthetic construct
  misc_feature 1..19: note = Synthetic
  source 1..19: mol_type = other RNA
tggtgaacatcgacatgta

SEQ ID NO: 13671 - RNA, 21 nt, synthetic construct
  misc_feature 1..21: note = Synthetic
  source 1..21: mol_type = other RNA
catggtgaacatcgacatgta

SEQ ID NO: 13672 - RNA, 24 nt, synthetic construct
  misc_feature 1..24: note = Synthetic
  source 1..24: mol_type = other RNA
cggcatggtgaacatcgacatgta

SEQ ID NO: 13673 - RNA, 18 nt, synthetic construct
  misc_feature 1..18: note = Synthetic
  source 1..18: mol_type = other RNA
ttctgccccccatcaaac

SEQ ID NO: 13674 - RNA, 19 nt, synthetic construct
  misc_feature 1..19: note = Synthetic
  source 1..19: mol_type = other RNA
tttctgccccccatcaaac

SEQ ID NO: 13675 - RNA, 21 nt, synthetic construct
  misc_feature 1..21: note = Synthetic
  source 1..21: mol_type = other RNA
tgtttctgccccccatcaaac

SEQ ID NO: 13676 - RNA, 22 nt, synthetic construct
  misc_feature 1..22: note = Synthetic
  source 1..22: mol_type = other RNA
ctgtttctgccccccatcaaac

SEQ ID NO: 13677 - RNA, 24 nt, synthetic construct
  misc_feature 1..24: note = Synthetic
  source 1..24: mol_type = other RNA
cgctgtttctgccccccatcaaac

SEQ ID NO: 13678 - RNA, 18 nt, synthetic construct
  misc_feature 1..18: note = Synthetic
  source 1..18: mol_type = other RNA
ctcggtgtacgggttcac

SEQ ID NO: 13679 - RNA, 19 nt, synthetic construct
  misc_feature 1..19: note = Synthetic
  source 1..19: mol_type = other RNA
actcggtgtacgggttcac

SEQ ID NO: 13680 - RNA, 21 nt, synthetic construct
  misc_feature 1..21: note = Synthetic
  source 1..21: mol_type = other RNA
taactcggtgtacgggttcac

SEQ ID NO: 13681 - RNA, 23 nt, synthetic construct
  misc_feature 1..23: note = Synthetic
  source 1..23: mol_type = other RNA
tgtaactcggtgtacgggttcac

SEQ ID NO: 13682 - RNA, 18 nt, synthetic construct
  misc_feature 1..18: note = Synthetic
  source 1..18: mol_type = other RNA
tacatcggcgtcatctac

SEQ ID NO: 13683 - RNA, 21 nt, synthetic construct
  misc_feature 1..21: note = Synthetic
  source 1..21: mol_type = other RNA
aagtacatcggcgtcatctac

SEQ ID NO: 13684 - RNA, 22 nt, synthetic construct
  misc_feature 1..22: note = Synthetic
  source 1..22: mol_type = other RNA
aaagtacatcggcgtcatctac

SEQ ID NO: 13685 - RNA, 23 nt, synthetic construct
  misc_feature 1..23: note = Synthetic
  source 1..23: mol_type = other RNA
aaaagtacatcggcgtcatctac

SEQ ID NO: 13686 - RNA, 24 nt, synthetic construct
  misc_feature 1..24: note = Synthetic
  source 1..24: mol_type = other RNA
aaaaagtacatcggcgtcatctac

SEQ ID NO: 13687 - RNA, 18 nt, synthetic construct
  misc_feature 1..18: note = Synthetic
  source 1..18: mol_type = other RNA
ccggccatcaagaagtac

SEQ ID NO: 13688 - RNA, 19 nt, synthetic construct
  misc_feature 1..19: note = Synthetic
  source 1..19: mol_type = other RNA
cccggccatcaagaagtac

SEQ ID NO: 13689 - RNA, 21 nt, synthetic construct
  misc_feature 1..21: note = Synthetic
  source 1..21: mol_type = other RNA
tgcccggccatcaagaagtac

SEQ ID NO: 13690 - RNA, 22 nt, synthetic construct
  misc_feature 1..22: note = Synthetic
  source 1..22: mol_type = other RNA
ctgcccggccatcaagaagtac

SEQ ID NO: 13691 - RNA, 23 nt, synthetic construct
  misc_feature 1..23: note = Synthetic
  source 1..23: mol_type = other RNA
tctgcccggccatcaagaagtac

SEQ ID NO: 13692 - RNA, 24 nt, synthetic construct
  misc_feature 1..24: note = Synthetic
  source 1..24: mol_type = other RNA
ttctgcccggccatcaagaagtac

SEQ ID NO: 13693 - RNA, 19 nt, synthetic construct
  misc_feature 1..19: note = Synthetic
  source 1..19: mol_type = other RNA
cggttcatcctggacaacc

SEQ ID NO: 13694 - RNA, 21 nt, synthetic construct
  misc_feature 1..21: note = Synthetic
  source 1..21: mol_type = other RNA
cccggttcatcctggacaacc

SEQ ID NO: 13695 - RNA, 22 nt, synthetic construct
  misc_feature 1..22: note = Synthetic
  source 1..22: mol_type = other RNA
acccggttcatcctggacaacc

SEQ ID NO: 13696 - RNA, 23 nt, synthetic construct
  misc_feature 1..23: note = Synthetic
  source 1..23: mol_type = other RNA
cacccggttcatcctggacaacc

SEQ ID NO: 13697 - RNA, 24 nt, synthetic construct
  misc_feature 1..24: note = Synthetic
  source 1..24: mol_type = other RNA
ccacccggttcatcctggacaacc

SEQ ID NO: 13698 - RNA, 18 nt, synthetic construct
  misc_feature 1..18: note = Synthetic
  source 1..18: mol_type = other RNA
aataacgccaagatcacc

SEQ ID NO: 13699 - RNA, 22 nt, synthetic construct
  misc_feature 1..22: note = Synthetic
  source 1..22: mol_type = other RNA
tgggaataacgccaagatcacc

SEQ ID NO: 13700 - RNA, 23 nt, synthetic construct
  misc_feature 1..23: note = Synthetic
  source 1..23: mol_type = other RNA
ttgggaataacgccaagatcacc

SEQ ID NO: 13701 - RNA, 24 nt, synthetic construct
  misc_feature 1..24: note = Synthetic
  source 1..24: mol_type = other RNA
tttgggaataacgccaagatcacc

SEQ ID NO: 13702 - RNA, 18 nt, synthetic construct
  misc_feature 1..18: note = Synthetic
  source 1..18: mol_type = other RNA
agatgctgctcgcgaccc

SEQ ID NO: 13703 - RNA, 22 nt, synthetic construct
  misc_feature 1..22: note = Synthetic
  source 1..22: mol_type = other RNA
cgcgagatgctgctcgcgaccc

SEQ ID NO: 13704 - RNA, 23 nt, synthetic construct
  misc_feature 1..23: note = Synthetic
  source 1..23: mol_type = other RNA
ccgcgagatgctgctcgcgaccc

SEQ ID NO: 13705 - RNA, 18 nt, synthetic construct
  misc_feature 1..18: note = Synthetic
  source 1..18: mol_type = other RNA
ttgtgaaacagtacggcc

SEQ ID NO: 13706 - RNA, 19 nt, synthetic construct
  misc_feature 1..19: note = Synthetic
  source 1..19: mol_type = other RNA
cttgtgaaacagtacggcc

SEQ ID NO: 13707 - RNA, 21 nt, synthetic construct
  misc_feature 1..21: note = Synthetic
  source 1..21: mol_type = other RNA
cccttgtgaaacagtacggcc

SEQ ID NO: 13708 - RNA, 22 nt, synthetic construct
  misc_feature 1..22: note = Synthetic
  source 1..22: mol_type = other RNA
acccttgtgaaacagtacggcc

SEQ ID NO: 13709 - RNA, 24 nt, synthetic construct
  misc_feature 1..24: note = Synthetic
  source 1..24: mol_type = other RNA
tgacccttgtgaaacagtacggcc

SEQ ID NO: 13710 - RNA, 18 nt, synthetic construct
  misc_feature 1..18: note = Synthetic
  source 1..18: mol_type = other RNA
ctggtgtccgagctggcc

SEQ ID NO: 13711 - RNA, 21 nt, synthetic construct
  misc_feature 1..21: note = Synthetic
  source 1..21: mol_type = other RNA
ctgctggtgtccgagctggcc

SEQ ID NO: 13712 - RNA, 23 nt, synthetic construct
  misc_feature 1..23: note = Synthetic
  source 1..23: mol_type = other RNA
agctgctggtgtccgagctggcc

SEQ ID NO: 13713 - RNA, 24 nt, synthetic construct
  misc_feature 1..24: note = Synthetic
  source 1..24: mol_type = other RNA
aagctgctggtgtccgagctggcc

SEQ ID NO: 13714 - RNA, 18 nt, synthetic construct
  misc_feature 1..18: note = Synthetic
  source 1..18: mol_type = other RNA
tcggttcctgcgacctcc

SEQ ID NO: 13715 - RNA, 19 nt, synthetic construct
  misc_feature 1..19: note = Synthetic
  source 1..19: mol_type = other RNA
ctcggttcctgcgacctcc

SEQ ID NO: 13716 - RNA, 21 nt, synthetic construct
  misc_feature 1..21: note = Synthetic
  source 1..21: mol_type = other RNA
cgctcggttcctgcgacctcc

SEQ ID NO: 13717 - RNA, 22 nt, synthetic construct
  misc_feature 1..22: note = Synthetic
  source 1..22: mol_type = other RNA
tcgctcggttcctgcgacctcc

SEQ ID NO: 13718 - RNA, 23 nt, synthetic construct
  misc_feature 1..23: note = Synthetic
  source 1..23: mol_type = other RNA
ttcgctcggttcctgcgacctcc

SEQ ID NO: 13719 - RNA, 24 nt, synthetic construct
  misc_feature 1..24: note = Synthetic
  source 1..24: mol_type = other RNA
tttcgctcggttcctgcgacctcc

SEQ ID NO: 13720 - RNA, 18 nt, synthetic construct
  misc_feature 1..18: note = Synthetic
  source 1..18: mol_type = other RNA
aagatgctcatcaagggc

SEQ ID NO: 13721 - RNA, 19 nt, synthetic construct
  misc_feature 1..19: note = Synthetic
  source 1..19: mol_type = other RNA
taagatgctcatcaagggc

SEQ ID NO: 13722 - RNA, 18 nt, synthetic construct
  misc_feature 1..18: note = Synthetic
  source 1..18: mol_type = other RNA
cgtggggtaccagggggc

SEQ ID NO: 13723 - RNA, 19 nt, synthetic construct
  misc_feature 1..19: note = Synthetic
  source 1..19: mol_type = other RNA
acgtggggtaccagggggc

SEQ ID NO: 13724 - RNA, 23 nt, synthetic construct
  misc_feature 1..23: note = Synthetic
  source 1..23: mol_type = other RNA
aggcacgtggggtaccagggggc

SEQ ID NO: 13725 - RNA, 24 nt, synthetic construct
  misc_feature 1..24: note = Synthetic
  source 1..24: mol_type = other RNA
caggcacgtggggtaccagggggc

SEQ ID NO: 13726 - RNA, 19 nt, synthetic construct
  misc_feature 1..19: note = Synthetic
  source 1..19: mol_type = other RNA
cgcatggccgcggccctgc

SEQ ID NO: 13727 - RNA, 21 nt, synthetic construct
  misc_feature 1..21: note = Synthetic
  source 1..21: mol_type = other RNA
agcgcatggccgcggccctgc

SEQ ID NO: 13728 - RNA, 23 nt, synthetic construct
  misc_feature 1..23: note = Synthetic
  source 1..23: mol_type = other RNA
cgagcgcatggccgcggccctgc

SEQ ID NO: 13729 - RNA, 19 nt, synthetic construct
  misc_feature 1..19: note = Synthetic
  source 1..19: mol_type = other RNA
tgcgaaagcagatccgctc

SEQ ID NO: 13730 - RNA, 21 nt, synthetic construct
  misc_feature 1..21: note = Synthetic
  source 1..21: mol_type = other RNA
catgcgaaagcagatccgctc

SEQ ID NO: 13731 - RNA, 22 nt, synthetic construct
  misc_feature 1..22: note = Synthetic
  source 1..22: mol_type = other RNA
ccatgcgaaagcagatccgctc

SEQ ID NO: 13732 - RNA, 24 nt, synthetic construct
  misc_feature 1..24: note = Synthetic
  source 1..24: mol_type = other RNA
cgccatgcgaaagcagatccgctc

SEQ ID NO: 13733 - RNA, 18 nt, synthetic construct
  misc_feature 1..18: note = Synthetic
  source 1..18: mol_type = other RNA
tgcccacgcccgtggttc

SEQ ID NO: 13734 - RNA, 19 nt, synthetic construct
  misc_feature 1..19: note = Synthetic
  source 1..19: mol_type = other RNA
ctgcccacgcccgtggttc

SEQ ID NO: 13735 - RNA, 18 nt, synthetic construct
  misc_feature 1..18: note = Synthetic
  source 1..18: mol_type = other RNA
cgccgggcccgcgcaacg

SEQ ID NO: 13736 - RNA, 19 nt, synthetic construct
  misc_feature 1..19: note = Synthetic
  source 1..19: mol_type = other RNA
ccgccgggcccgcgcaacg

SEQ ID NO: 13737 - RNA, 21 nt, synthetic construct
  misc_feature 1..21: note = Synthetic
  source 1..21: mol_type = other RNA
cgccgccgggcccgcgcaacg

SEQ ID NO: 13738 - RNA, 22 nt, synthetic construct
  misc_feature 1..22: note = Synthetic
  source 1..22: mol_type = other RNA
acgccgccgggcccgcgcaacg

SEQ ID NO: 13739 - RNA, 23 nt, synthetic construct
  misc_feature 1..23: note = Synthetic
  source 1..23: mol_type = other RNA
tacgccgccgggcccgcgcaacg

SEQ ID NO: 13740 - RNA, 24 nt, synthetic construct
  misc_feature 1..24: note = Synthetic
  source 1..24: mol_type = other RNA
ctacgccgccgggcccgcgcaacg

SEQ ID NO: 13741 - RNA, 18 nt, synthetic construct
  misc_feature 1..18: note = Synthetic
  source 1..18: mol_type = other RNA
agaccgccggcaggcacg

SEQ ID NO: 13742 - RNA, 22 nt, synthetic construct
  misc_feature 1..22: note = Synthetic
  source 1..22: mol_type = other RNA
cgggagaccgccggcaggcacg

SEQ ID NO: 13743 - RNA, 24 nt, synthetic construct
  misc_feature 1..24: note = Synthetic
  source 1..24: mol_type = other RNA
cgcgggagaccgccggcaggcacg

SEQ ID NO: 13744 - RNA, 18 nt, synthetic construct
  misc_feature 1..18: note = Synthetic
  source 1..18: mol_type = other RNA
tcgggacatccagcgacg

SEQ ID NO: 13745 - RNA, 19 nt, synthetic construct
  misc_feature 1..19: note = Synthetic
  source 1..19: mol_type = other RNA
ttcgggacatccagcgacg

SEQ ID NO: 13746 - RNA, 21 nt, synthetic construct
  misc_feature 1..21: note = Synthetic
  source 1..21: mol_type = other RNA
ccttcgggacatccagcgacg

SEQ ID NO: 13747 - RNA, 24 nt, synthetic construct
  misc_feature 1..24: note = Synthetic
  source 1..24: mol_type = other RNA
tggccttcgggacatccagcgacg

SEQ ID NO: 13748 - RNA, 18 nt, synthetic construct
  misc_feature 1..18: note = Synthetic
  source 1..18: mol_type = other RNA
ccgcgcggctccggaccg

SEQ ID NO: 13749 - RNA, 21 nt, synthetic construct
  misc_feature 1..21: note = Synthetic
  source 1..21: mol_type = other RNA
tggccgcgcggctccggaccg

SEQ ID NO: 13750 - RNA, 23 nt, synthetic construct
  misc_feature 1..23: note = Synthetic
  source 1..23: mol_type = other RNA
cgtggccgcgcggctccggaccg

SEQ ID NO: 13751 - RNA, 24 nt, synthetic construct
  misc_feature 1..24: note = Synthetic
  source 1..24: mol_type = other RNA
acgtggccgcgcggctccggaccg

SEQ ID NO: 13752 - RNA, 18 nt, synthetic construct
  misc_feature 1..18: note = Synthetic
  source 1..18: mol_type = other RNA
accgcagggttcggggcg

SEQ ID NO: 13753 - RNA, 21 nt, synthetic construct
  misc_feature 1..21: note = Synthetic
  source 1..21: mol_type = other RNA
cggaccgcagggttcggggcg

SEQ ID NO: 13754 - RNA, 22 nt, synthetic construct
  misc_feature 1..22: note = Synthetic
  source 1..22: mol_type = other RNA
ccggaccgcagggttcggggcg

SEQ ID NO: 13755 - RNA, 23 nt, synthetic construct
  misc_feature 1..23: note = Synthetic
  source 1..23: mol_type = other RNA
tccggaccgcagggttcggggcg

SEQ ID NO: 13756 - RNA, 24 nt, synthetic construct
  misc_feature 1..24: note = Synthetic
  source 1..24: mol_type = other RNA
ctccggaccgcagggttcggggcg

SEQ ID NO: 13757 - RNA, 18 nt, synthetic construct
  misc_feature 1..18: note = Synthetic
  source 1..18: mol_type = other RNA
cgcaacgcggggtgatcg

SEQ ID NO: 13758 - RNA, 21 nt, synthetic construct
  misc_feature 1..21: note = Synthetic
  source 1..21: mol_type = other RNA
ccgcgcaacgcggggtgatcg

SEQ ID NO: 13759 - RNA, 22 nt, synthetic construct
  misc_feature 1..22: note = Synthetic
  source 1..22: mol_type = other RNA
cccgcgcaacgcggggtgatcg

SEQ ID NO: 13760 - RNA, 18 nt, synthetic construct
  misc_feature 1..18: note = Synthetic
  source 1..18: mol_type = other RNA
tacggcggaggaaactcg

SEQ ID NO: 13761 - RNA, 19 nt, synthetic construct
  misc_feature 1..19: note = Synthetic
  source 1..19: mol_type = other RNA
ctacggcggaggaaactcg

SEQ ID NO: 13762 - RNA, 21 nt, synthetic construct
  misc_feature 1..21: note = Synthetic
  source 1..21: mol_type = other RNA
cgctacggcggaggaaactcg

SEQ ID NO: 13763 - RNA, 24 nt, synthetic construct
  misc_feature 1..24: note = Synthetic
  source 1..24: mol_type = other RNA
cggcgctacggcggaggaaactcg

SEQ ID NO: 13764 - RNA, 18 nt, synthetic construct
  misc_feature 1..18: note = Synthetic
  source 1..18: mol_type = other RNA
tagccgagcgccccgcgg

SEQ ID NO: 13765 - RNA, 19 nt, synthetic construct
  misc_feature 1..19: note = Synthetic
  source 1..19: mol_type = other RNA
ttagccgagcgccccgcgg

SEQ ID NO: 13766 - RNA, 21 nt, synthetic construct
  misc_feature 1..21: note = Synthetic
  source 1..21: mol_type = other RNA
cgttagccgagcgccccgcgg

SEQ ID NO: 13767 - RNA, 23 nt, synthetic construct
  misc_feature 1..23: note = Synthetic
  source 1..23: mol_type = other RNA
cgcgttagccgagcgccccgcgg

SEQ ID NO: 13768 - RNA, 24 nt, synthetic construct
  misc_feature 1..24: note = Synthetic
  source 1..24: mol_type = other RNA
ccgcgttagccgagcgccccgcgg

SEQ ID NO: 13769 - RNA, 18 nt, synthetic construct
  misc_feature 1..18: note = Synthetic
  source 1..18: mol_type = other RNA
catcaagaagtacgaggg

SEQ ID NO: 13770 - RNA, 19 nt, synthetic construct
  misc_feature 1..19: note = Synthetic
  source 1..19: mol_type = other RNA
ccatcaagaagtacgaggg

SEQ ID NO: 13771 - RNA, 22 nt, synthetic construct
  misc_feature 1..22: note = Synthetic
  source 1..22: mol_type = other RNA
cggccatcaagaagtacgaggg

SEQ ID NO: 13772 - RNA, 23 nt, synthetic construct
  misc_feature 1..23: note = Synthetic
  source 1..23: mol_type = other RNA
ccggccatcaagaagtacgaggg

SEQ ID NO: 13773 - RNA, 24 nt, synthetic construct
  misc_feature 1..24: note = Synthetic
  source 1..24: mol_type = other RNA
cccggccatcaagaagtacgaggg

SEQ ID NO: 13774 - RNA, 18 nt, synthetic construct
  misc_feature 1..18: note = Synthetic
  source 1..18: mol_type = other RNA
tttacaaggtccccctgg

SEQ ID NO: 13775 - RNA, 19 nt, synthetic construct
  misc_feature 1..19: note = Synthetic
  source 1..19: mol_type = other RNA
atttacaaggtccccctgg

SEQ ID NO: 13776 - RNA, 21 nt, synthetic construct
  misc_feature 1..21: note = Synthetic
  source 1..21: mol_type = other RNA
acatttacaaggtccccctgg

SEQ ID NO: 13777 - RNA, 24 nt, synthetic construct
  misc_feature 1..24: note = Synthetic
  source 1..24: mol_type = other RNA
cggacatttacaaggtccccctgg

SEQ ID NO: 13778 - RNA, 18 nt, synthetic construct
  misc_feature 1..18: note = Synthetic
  source 1..18: mol_type = other RNA
tcggccgtcgcgcgcttg

SEQ ID NO: 13779 - RNA, 19 nt, synthetic construct
  misc_feature 1..19: note = Synthetic
  source 1..19: mol_type = other RNA
ctcggccgtcgcgcgcttg

SEQ ID NO: 13780 - RNA, 21 nt, synthetic construct
  misc_feature 1..21: note = Synthetic
  source 1..21: mol_type = other RNA
ctctcggccgtcgcgcgcttg

SEQ ID NO: 13781 - RNA, 23 nt, synthetic construct
  misc_feature 1..23: note = Synthetic
  source 1..23: mol_type = other RNA
agctctcggccgtcgcgcgcttg

SEQ ID NO: 13782 - RNA, 18 nt, synthetic construct
  misc_feature 1..18: note = Synthetic
  source 1..18: mol_type = other RNA
tcgtgtgtaactcggtgt

SEQ ID NO: 13783 - RNA, 21 nt, synthetic construct
  misc_feature 1..21: note = Synthetic
  source 1..21: mol_type = other RNA
aggtcgtgtgtaactcggtgt

SEQ ID NO: 13784 - RNA, 22 nt, synthetic construct
  misc_feature 1..22: note = Synthetic
  source 1..22: mol_type = other RNA
aaggtcgtgtgtaactcggtgt

SEQ ID NO: 13785 - RNA, 23 nt, synthetic construct
  misc_feature 1..23: note = Synthetic
  source 1..23: mol_type = other RNA
caaggtcgtgtgtaactcggtgt

SEQ ID NO: 13786 - RNA, 24 nt, synthetic construct
  misc_feature 1..24: note = Synthetic
  source 1..24: mol_type = other RNA
tcaaggtcgtgtgtaactcggtgt

SEQ ID NO: 13787 - RNA, 19 nt, synthetic construct
  misc_feature 1..19: note = Synthetic
  source 1..19: mol_type = other RNA
agggtccttgaccccactt

SEQ ID NO: 13788 - RNA, 21 nt, synthetic construct
  misc_feature 1..21: note = Synthetic
  source 1..21: mol_type = other RNA
ccagggtccttgaccccactt

SEQ ID NO: 13789 - RNA, 18 nt, synthetic construct
  misc_feature 1..18: note = Synthetic
  source 1..18: mol_type = other RNA
acattcaaggccctgttt

SEQ ID NO: 13790 - RNA, 22 nt, synthetic construct
  misc_feature 1..22: note = Synthetic
  source 1..22: mol_type = other RNA
cgtgacattcaaggccctgttt

SEQ ID NO: 13791 - RNA, 24 nt, synthetic construct
  misc_feature 1..24: note = Synthetic
  source 1..24: mol_type = other RNA
tgcgtgacattcaaggccctgttt

SEQ ID NO: 13792 - RNA, 18 nt, synthetic construct
  misc_feature 1..18: note = Synthetic
  source 1..18: mol_type = other RNA
gcaggaaccgagcgaaaa

SEQ ID NO: 13793 - RNA, 19 nt, synthetic construct
  misc_feature 1..19: note = Synthetic
  source 1..19: mol_type = other RNA
cgcaggaaccgagcgaaaa

SEQ ID NO: 13794 - RNA, 21 nt, synthetic construct
  misc_feature 1..21: note = Synthetic
  source 1..21: mol_type = other RNA
gtcgcaggaaccgagcgaaaa

SEQ ID NO: 13795 - RNA, 22 nt, synthetic construct
  misc_feature 1..22: note = Synthetic
  source 1..22: mol_type = other RNA
ggtcgcaggaaccgagcgaaaa

SEQ ID NO: 13796 - RNA, 23 nt, synthetic construct
  misc_feature 1..23: note = Synthetic
  source 1..23: mol_type = other RNA
aggtcgcaggaaccgagcgaaaa

SEQ ID NO: 13797 - RNA, 24 nt, synthetic construct
  misc_feature 1..24: note = Synthetic
  source 1..24: mol_type = other RNA
gaggtcgcaggaaccgagcgaaaa

SEQ ID NO: 13798 - RNA, 18 nt, synthetic construct
  misc_feature 1..18: note = Synthetic
  source 1..18: mol_type = other RNA
gacgtagacgcggtaaaa

SEQ ID NO: 13799 - RNA, 19 nt, synthetic construct
  misc_feature 1..19: note = Synthetic
  source 1..19: mol_type = other RNA
ggacgtagacgcggtaaaa

SEQ ID NO: 13800 - RNA, 21 nt, synthetic construct
  misc_feature 1..21: note = Synthetic
  source 1..21: mol_type = other RNA
tcggacgtagacgcggtaaaa

SEQ ID NO: 13801 - RNA, 22 nt, synthetic construct
  misc_feature 1..22: note = Synthetic
  source 1..22: mol_type = other RNA
ttcggacgtagacgcggtaaaa

SEQ ID NO: 13802 - RNA, 23 nt, synthetic construct
  misc_feature 1..23: note = Synthetic
  source 1..23: mol_type = other RNA
cttcggacgtagacgcggtaaaa

SEQ ID NO: 13803 - RNA, 24 nt, synthetic construct
  misc_feature 1..24: note = Synthetic
  source 1..24: mol_type = other RNA
gcttcggacgtagacgcggtaaaa

SEQ ID NO: 13804 - RNA, 18 nt, synthetic construct
  misc_feature 1..18: note = Synthetic
  source 1..18: mol_type = other RNA
cttggcgttattcccaaa

SEQ ID NO: 13805 - RNA, 19 nt, synthetic construct
  misc_feature 1..19: note = Synthetic
  source 1..19: mol_type = other RNA
tcttggcgttattcccaaa

SEQ ID NO: 13806 - RNA, 21 nt, synthetic construct
  misc_feature 1..21: note = Synthetic
  source 1..21: mol_type = other RNA
gatcttggcgttattcccaaa

SEQ ID NO: 13807 - RNA, 22 nt, synthetic construct
  misc_feature 1..22: note = Synthetic
  source 1..22: mol_type = other RNA
tgatcttggcgttattcccaaa

SEQ ID NO: 13808 - RNA, 23 nt, synthetic construct
  misc_feature 1..23: note = Synthetic
  source 1..23: mol_type = other RNA
gtgatcttggcgttattcccaaa

SEQ ID NO: 13809 - RNA, 24 nt, synthetic construct
  misc_feature 1..24: note = Synthetic
  source 1..24: mol_type = other RNA
ggtgatcttggcgttattcccaaa

SEQ ID NO: 13810 - RNA, 18 nt, synthetic construct
  misc_feature 1..18: note = Synthetic
  source 1..18: mol_type = other RNA
tcggggaggtcgcaggaa

SEQ ID NO: 13811 - RNA, 19 nt, synthetic construct
  misc_feature 1..19: note = Synthetic
  source 1..19: mol_type = other RNA
ttcggggaggtcgcaggaa

SEQ ID NO: 13812 - RNA, 21 nt, synthetic construct
  misc_feature 1..21: note = Synthetic
  source 1..21: mol_type = other RNA
gattcggggaggtcgcaggaa

SEQ ID NO: 13813 - RNA, 22 nt, synthetic construct
  misc_feature 1..22: note = Synthetic
  source 1..22: mol_type = other RNA
ggattcggggaggtcgcaggaa

SEQ ID NO: 13814 - RNA, 23 nt, synthetic construct
  misc_feature 1..23: note = Synthetic
  source 1..23: mol_type = other RNA
gggattcggggaggtcgcaggaa

SEQ ID NO: 13815 - RNA, 24 nt, synthetic construct
  misc_feature 1..24: note = Synthetic
  source 1..24: mol_type = other RNA
tgggattcggggaggtcgcaggaa

SEQ ID NO: 13816 - RNA, 18 nt, synthetic construct
  misc_feature 1..18: note = Synthetic
  source 1..18: mol_type = other RNA
ttcacgtgaaacccggaa

SEQ ID NO: 13817 - RNA, 19 nt, synthetic construct
  misc_feature 1..19: note = Synthetic
  source 1..19: mol_type = other RNA
gttcacgtgaaacccggaa

SEQ ID NO: 13818 - RNA, 21 nt, synthetic construct
  misc_feature 1..21: note = Synthetic
  source 1..21: mol_type = other RNA
gggttcacgtgaaacccggaa

SEQ ID NO: 13819 - RNA, 22 nt, synthetic construct
  misc_feature 1..22: note = Synthetic
  source 1..22: mol_type = other RNA
ggggttcacgtgaaacccggaa

SEQ ID NO: 13820 - RNA, 23 nt, synthetic construct
  misc_feature 1..23: note = Synthetic
  source 1..23: mol_type = other RNA
cggggttcacgtgaaacccggaa

SEQ ID NO: 13821 - RNA, 24 nt, synthetic construct
  misc_feature 1..24: note = Synthetic
  source 1..24: mol_type = other RNA
acggggttcacgtgaaacccggaa

SEQ ID NO: 13822 - RNA, 18 nt, synthetic construct
  misc_feature 1..18: note = Synthetic
  source 1..18: mol_type = other RNA
tagatgatgcgcatggaa

SEQ ID NO: 13823 - RNA, 19 nt, synthetic construct
  misc_feature 1..19: note = Synthetic
  source 1..19: mol_type = other RNA
gtagatgatgcgcatggaa

SEQ ID NO: 13824 - RNA, 21 nt, synthetic construct
  misc_feature 1..21: note = Synthetic
  source 1..21: mol_type = other RNA
ccgtagatgatgcgcatggaa

SEQ ID NO: 13825 - RNA, 22 nt, synthetic construct
  misc_feature 1..22: note = Synthetic
  source 1..22: mol_type = other RNA
cccgtagatgatgcgcatggaa

SEQ ID NO: 13826 - RNA, 23 nt, synthetic construct
  misc_feature 1..23: note = Synthetic
  source 1..23: mol_type = other RNA
ccccgtagatgatgcgcatggaa

SEQ ID NO: 13827 - RNA, 24 nt, synthetic construct
  misc_feature 1..24: note = Synthetic
  source 1..24: mol_type = other RNA
tccccgtagatgatgcgcatggaa

SEQ ID NO: 13828 - RNA, 18 nt, synthetic construct
  misc_feature 1..18: note = Synthetic
  source 1..18: mol_type = other RNA
tggatgtcccgaaggcca

SEQ ID NO: 13829 - RNA, 19 nt, synthetic construct
  misc_feature 1..19: note = Synthetic
  source 1..19: mol_type = other RNA
ctggatgtcccgaaggcca

SEQ ID NO: 13830 - RNA, 21 nt, synthetic construct
  misc_feature 1..21: note = Synthetic
  source 1..21: mol_type = other RNA
cgctggatgtcccgaaggcca

SEQ ID NO: 13831 - RNA, 22 nt, synthetic construct
  misc_feature 1..22: note = Synthetic
  source 1..22: mol_type = other RNA
tcgctggatgtcccgaaggcca

SEQ ID NO: 13832 - RNA, 23 nt, synthetic construct
  misc_feature 1..23: note = Synthetic
  source 1..23: mol_type = other RNA
gtcgctggatgtcccgaaggcca

SEQ ID NO: 13833 - RNA, 24 nt, synthetic construct
  misc_feature 1..24: note = Synthetic
  source 1..24: mol_type = other RNA
cgtcgctggatgtcccgaaggcca

SEQ ID NO: 13834 - RNA, 18 nt, synthetic construct
  misc_feature 1..18: note = Synthetic
  source 1..18: mol_type = other RNA
cctccgggtgcccggcca

SEQ ID NO: 13835 - RNA, 19 nt, synthetic construct
  misc_feature 1..19: note = Synthetic
  source 1..19: mol_type = other RNA
tcctccgggtgcccggcca

SEQ ID NO: 13836 - RNA, 21 nt, synthetic construct
  misc_feature 1..21: note = Synthetic
  source 1..21: mol_type = other RNA
ggtcctccgggtgcccggcca

SEQ ID NO: 13837 - RNA, 22 nt, synthetic construct
  misc_feature 1..22: note = Synthetic
  source 1..22: mol_type = other RNA
aggtcctccgggtgcccggcca

SEQ ID NO: 13838 - RNA, 23 nt, synthetic construct
  misc_feature 1..23: note = Synthetic
  source 1..23: mol_type = other RNA
caggtcctccgggtgcccggcca

SEQ ID NO: 13839 - RNA, 24 nt, synthetic construct
  misc_feature 1..24: note = Synthetic
  source 1..24: mol_type = other RNA
ccaggtcctccgggtgcccggcca

SEQ ID NO: 13840 - RNA, 18 nt, synthetic construct
  misc_feature 1..18: note = Synthetic
  source 1..18: mol_type = other RNA
tgcggccgtacccgtcca

SEQ ID NO: 13841 - RNA, 19 nt, synthetic construct
  misc_feature 1..19: note = Synthetic
  source 1..19: mol_type = other RNA
atgcggccgtacccgtcca

SEQ ID NO: 13842 - RNA, 21 nt, synthetic construct
  misc_feature 1..21: note = Synthetic
  source 1..21: mol_type = other RNA
tcatgcggccgtacccgtcca

SEQ ID NO: 13843 - RNA, 22 nt, synthetic construct
  misc_feature 1..22: note = Synthetic
  source 1..22: mol_type = other RNA
ttcatgcggccgtacccgtcca

SEQ ID NO: 13844 - RNA, 23 nt, synthetic construct
  misc_feature 1..23: note = Synthetic
  source 1..23: mol_type = other RNA
gttcatgcggccgtacccgtcca

SEQ ID NO: 13845 - RNA, 24 nt, synthetic construct
  misc_feature 1..24: note = Synthetic
  source 1..24: mol_type = other RNA
cgttcatgcggccgtacccgtcca

SEQ ID NO: 13846 - RNA, 18 nt, synthetic construct
  misc_feature 1..18: note = Synthetic
  source 1..18: mol_type = other RNA
ccactgcgtcggccctca

SEQ ID NO: 13847 - RNA, 19 nt, synthetic construct
  misc_feature 1..19: note = Synthetic
  source 1..19: mol_type = other RNA
gccactgcgtcggccctca

SEQ ID NO: 13848 - RNA, 21 nt, synthetic construct
  misc_feature 1..21: note = Synthetic
  source 1..21: mol_type = other RNA
gcgccactgcgtcggccctca

SEQ ID NO: 13849 - RNA, 22 nt, synthetic construct
  misc_feature 1..22: note = Synthetic
  source 1..22: mol_type = other RNA
tgcgccactgcgtcggccctca

SEQ ID NO: 13850 - RNA, 23 nt, synthetic construct
  misc_feature 1..23: note = Synthetic
  source 1..23: mol_type = other RNA
gtgcgccactgcgtcggccctca

SEQ ID NO: 13851 - RNA, 24 nt, synthetic construct
  misc_feature 1..24: note = Synthetic
  source 1..24: mol_type = other RNA
ggtgcgccactgcgtcggccctca

SEQ ID NO: 13852 - RNA, 18 nt, synthetic construct
  misc_feature 1..18: note = Synthetic
  source 1..18: mol_type = other RNA
tagacgcggtaaaacaga

SEQ ID NO: 13853 - RNA, 19 nt, synthetic construct
  misc_feature 1..19: note = Synthetic
  source 1..19: mol_type = other RNA
gtagacgcggtaaaacaga

SEQ ID NO: 13854 - RNA, 21 nt, synthetic construct
  misc_feature 1..21: note = Synthetic
  source 1..21: mol_type = other RNA
acgtagacgcggtaaaacaga

SEQ ID NO: 13855 - RNA, 22 nt, synthetic construct
  misc_feature 1..22: note = Synthetic
  source 1..22: mol_type = other RNA
gacgtagacgcggtaaaacaga

SEQ ID NO: 13856 - RNA, 23 nt, synthetic construct
  misc_feature 1..23: note = Synthetic
  source 1..23: mol_type = other RNA
ggacgtagacgcggtaaaacaga

SEQ ID NO: 13857 - RNA, 24 nt, synthetic construct
  misc_feature 1..24: note = Synthetic
  source 1..24: mol_type = other RNA
cggacgtagacgcggtaaaacaga

SEQ ID NO: 13858 - RNA, 18 nt, synthetic construct
  misc_feature 1..18: note = Synthetic
  source 1..18: mol_type = other RNA
acggccgagagctccaga

SEQ ID NO: 13859 - RNA, 19 nt, synthetic construct
  misc_feature 1..19: note = Synthetic
  source 1..19: mol_type = other RNA
gacggccgagagctccaga

SEQ ID NO: 13860 - RNA, 21 nt, synthetic construct
  misc_feature 1..21: note = Synthetic
  source 1..21: mol_type = other RNA
gcgacggccgagagctccaga

SEQ ID NO: 13861 - RNA, 22 nt, synthetic construct
  misc_feature 1..22: note = Synthetic
  source 1..22: mol_type = other RNA
cgcgacggccgagagctccaga

SEQ ID NO: 13862 - RNA, 23 nt, synthetic construct
  misc_feature 1..23: note = Synthetic
  source 1..23: mol_type = other RNA
gcgcgacggccgagagctccaga

SEQ ID NO: 13863 - RNA, 24 nt, synthetic construct
  misc_feature 1..24: note = Synthetic
  source 1..24: mol_type = other RNA
cgcgcgacggccgagagctccaga

SEQ ID NO: 13864 - RNA, 18 nt, synthetic construct
  misc_feature 1..18: note = Synthetic
  source 1..18: mol_type = other RNA
ggaggtcgcaggaaccga

SEQ ID NO: 13865 - RNA, 19 nt, synthetic construct
  misc_feature 1..19: note = Synthetic
  source 1..19: mol_type = other RNA
gggaggtcgcaggaaccga

SEQ ID NO: 13866 - RNA, 21 nt, synthetic construct
  misc_feature 1..21: note = Synthetic
  source 1..21: mol_type = other RNA
cggggaggtcgcaggaaccga

SEQ ID NO: 13867 - RNA, 22 nt, synthetic construct
  misc_feature 1..22: note = Synthetic
  source 1..22: mol_type = other RNA
tcggggaggtcgcaggaaccga

SEQ ID NO: 13868 - RNA, 23 nt, synthetic construct
  misc_feature 1..23: note = Synthetic
  source 1..23: mol_type = other RNA
ttcggggaggtcgcaggaaccga

SEQ ID NO: 13869 - RNA, 24 nt, synthetic construct
  misc_feature 1..24: note = Synthetic
  source 1..24: mol_type = other RNA
attcggggaggtcgcaggaaccga

SEQ ID NO: 13870 - RNA, 18 nt, synthetic construct
  misc_feature 1..18: note = Synthetic
  source 1..18: mol_type = other RNA
gatccggtccttgatgga

SEQ ID NO: 13871 - RNA, 19 nt, synthetic construct
  misc_feature 1..19: note = Synthetic
  source 1..19: mol_type = other RNA
ggatccggtccttgatgga

SEQ ID NO: 13872 - RNA, 21 nt, synthetic construct
  misc_feature 1..21: note = Synthetic
  source 1..21: mol_type = other RNA
cgggatccggtccttgatgga

SEQ ID NO: 13873 - RNA, 22 nt, synthetic construct
  misc_feature 1..22: note = Synthetic
  source 1..22: mol_type = other RNA
acgggatccggtccttgatgga

SEQ ID NO: 13874 - RNA, 23 nt, synthetic construct
  misc_feature 1..23: note = Synthetic
  source 1..23: mol_type = other RNA
tacgggatccggtccttgatgga

SEQ ID NO: 13875 - RNA, 24 nt, synthetic construct
  misc_feature 1..24: note = Synthetic
  source 1..24: mol_type = other RNA
gtacgggatccggtccttgatgga

SEQ ID NO: 13876 - RNA, 18 nt, synthetic construct
  misc_feature 1..18: note = Synthetic
  source 1..18: mol_type = other RNA
tttcgcactcgagtttga

SEQ ID NO: 13877 - RNA, 19 nt, synthetic construct
  misc_feature 1..19: note = Synthetic
  source 1..19: mol_type = other RNA
ttttcgcactcgagtttga

SEQ ID NO: 13878 - RNA, 21 nt, synthetic construct
  misc_feature 1..21: note = Synthetic
  source 1..21: mol_type = other RNA
tcttttcgcactcgagtttga

SEQ ID NO: 13879 - RNA, 22 nt, synthetic construct
  misc_feature 1..22: note = Synthetic
  source 1..22: mol_type = other RNA
gtcttttcgcactcgagtttga

SEQ ID NO: 13880 - RNA, 23 nt, synthetic construct
  misc_feature 1..23: note = Synthetic
  source 1..23: mol_type = other RNA
cgtcttttcgcactcgagtttga

SEQ ID NO: 13881 - RNA, 24 nt, synthetic construct
  misc_feature 1..24: note = Synthetic
  source 1..24: mol_type = other RNA
acgtcttttcgcactcgagtttga

SEQ ID NO: 13882 - RNA, 18 nt, synthetic construct
  misc_feature 1..18: note = Synthetic
  source 1..18: mol_type = other RNA
cccgccttgcattcgata

SEQ ID NO: 13883 - RNA, 19 nt, synthetic construct
  misc_feature 1..19: note = Synthetic
  source 1..19: mol_type = other RNA
ccccgccttgcattcgata

SEQ ID NO: 13884 - RNA, 21 nt, synthetic construct
  misc_feature 1..21: note = Synthetic
  source 1..21: mol_type = other RNA
ccccccgccttgcattcgata

SEQ ID NO: 13885 - RNA, 22 nt, synthetic construct
  misc_feature 1..22: note = Synthetic
  source 1..22: mol_type = other RNA
cccccccgccttgcattcgata

SEQ ID NO: 13886 - RNA, 23 nt, synthetic construct
  misc_feature 1..23: note = Synthetic
  source 1..23: mol_type = other RNA
ccccccccgccttgcattcgata

SEQ ID NO: 13887 - RNA, 24 nt, synthetic construct
  misc_feature 1..24: note = Synthetic
  source 1..24: mol_type = other RNA
tccccccccgccttgcattcgata

SEQ ID NO: 13888 - RNA, 18 nt, synthetic construct
  misc_feature 1..18: note = Synthetic
  source 1..18: mol_type = other RNA
caggaaccgagcgaaaac

SEQ ID NO: 13889 - RNA, 19 nt, synthetic construct
  misc_feature 1..19: note = Synthetic
  source 1..19: mol_type = other RNA
gcaggaaccgagcgaaaac

SEQ ID NO: 13890 - RNA, 21 nt, synthetic construct
  misc_feature 1..21: note = Synthetic
  source 1..21: mol_type = other RNA
tcgcaggaaccgagcgaaaac

SEQ ID NO: 13891 - RNA, 22 nt, synthetic construct
  misc_feature 1..22: note = Synthetic
  source 1..22: mol_type = other RNA
gtcgcaggaaccgagcgaaaac

SEQ ID NO: 13892 - RNA, 23 nt, synthetic construct
  misc_feature 1..23: note = Synthetic
  source 1..23: mol_type = other RNA
ggtcgcaggaaccgagcgaaaac

SEQ ID NO: 13893 - RNA, 24 nt, synthetic construct
  misc_feature 1..24: note = Synthetic
  source 1..24: mol_type = other RNA
aggtcgcaggaaccgagcgaaaac

SEQ ID NO: 13894 - RNA, 18 nt, synthetic construct
  misc_feature 1..18: note = Synthetic
  source 1..18: mol_type = other RNA
acggggttcacgtgaaac

SEQ ID NO: 13895 - RNA, 19 nt, synthetic construct
  misc_feature 1..19: note = Synthetic
  source 1..19: mol_type = other RNA
cacggggttcacgtgaaac

SEQ ID NO: 13896 - RNA, 21 nt, synthetic construct
  misc_feature 1..21: note = Synthetic
  source 1..21: mol_type = other RNA
accacggggttcacgtgaaac

SEQ ID NO: 13897 - RNA, 22 nt, synthetic construct
  misc_feature 1..22: note = Synthetic
  source 1..22: mol_type = other RNA
caccacggggttcacgtgaaac

SEQ ID NO: 13898 - RNA, 23 nt, synthetic construct
  misc_feature 1..23: note = Synthetic
  source 1..23: mol_type = other RNA
ccaccacggggttcacgtgaaac

SEQ ID NO: 13899 - RNA, 24 nt, synthetic construct
  misc_feature 1..24: note = Synthetic
  source 1..24: mol_type = other RNA
accaccacggggttcacgtgaaac

SEQ ID NO: 13900 - RNA, 18 nt, synthetic construct
  misc_feature 1..18: note = Synthetic
  source 1..18: mol_type = other RNA
ctgccgcgtgccgtaaac

SEQ ID NO: 13901 - RNA, 19 nt, synthetic construct
  misc_feature 1..19: note = Synthetic
  source 1..19: mol_type = other RNA
actgccgcgtgccgtaaac

SEQ ID NO: 13902 - RNA, 21 nt, synthetic construct
  misc_feature 1..21: note = Synthetic
  source 1..21: mol_type = other RNA
gtactgccgcgtgccgtaaac

SEQ ID NO: 13903 - RNA, 22 nt, synthetic construct
  misc_feature 1..22: note = Synthetic
  source 1..22: mol_type = other RNA
agtactgccgcgtgccgtaaac

SEQ ID NO: 13904 - RNA, 23 nt, synthetic construct
  misc_feature 1..23: note = Synthetic
  source 1..23: mol_type = other RNA
aagtactgccgcgtgccgtaaac

SEQ ID NO: 13905 - RNA, 24 nt, synthetic construct
  misc_feature 1..24: note = Synthetic
  source 1..24: mol_type = other RNA
aaagtactgccgcgtgccgtaaac

SEQ ID NO: 13906 - RNA, 18 nt, synthetic construct
  misc_feature 1..18: note = Synthetic
  source 1..18: mol_type = other RNA
ttgtacccggtcacgaac

SEQ ID NO: 13907 - RNA, 19 nt, synthetic construct
  misc_feature 1..19: note = Synthetic
  source 1..19: mol_type = other RNA
gttgtacccggtcacgaac

SEQ ID NO: 13908 - RNA, 21 nt, synthetic construct
  misc_feature 1..21: note = Synthetic
  source 1..21: mol_type = other RNA
atgttgtacccggtcacgaac

SEQ ID NO: 13909 - RNA, 22 nt, synthetic construct
  misc_feature 1..22: note = Synthetic
  source 1..22: mol_type = other RNA
gatgttgtacccggtcacgaac

SEQ ID NO: 13910 - RNA, 23 nt, synthetic construct
  misc_feature 1..23: note = Synthetic
  source 1..23: mol_type = other RNA
tgatgttgtacccggtcacgaac

SEQ ID NO: 13911 - RNA, 24 nt, synthetic construct
  misc_feature 1..24: note = Synthetic
  source 1..24: mol_type = other RNA
atgatgttgtacccggtcacgaac

SEQ ID NO: 13912 - RNA, 18 nt, synthetic construct
  misc_feature 1..18: note = Synthetic
  source 1..18: mol_type = other RNA
cagccgaaggtgacgaac

SEQ ID NO: 13913 - RNA, 19 nt, synthetic construct
  misc_feature 1..19: note = Synthetic
  source 1..19: mol_type = other RNA
ccagccgaaggtgacgaac

SEQ ID NO: 13914 - RNA, 21 nt, synthetic construct
  misc_feature 1..21: note = Synthetic
  source 1..21: mol_type = other RNA
taccagccgaaggtgacgaac

SEQ ID NO: 13915 - RNA, 22 nt, synthetic construct
  misc_feature 1..22: note = Synthetic
  source 1..22: mol_type = other RNA
gtaccagccgaaggtgacgaac

SEQ ID NO: 13916 - RNA, 23 nt, synthetic construct
  misc_feature 1..23: note = Synthetic
  source 1..23: mol_type = other RNA
ggtaccagccgaaggtgacgaac

SEQ ID NO: 13917 - RNA, 24 nt, synthetic construct
  misc_feature 1..24: note = Synthetic
  source 1..24: mol_type = other RNA
cggtaccagccgaaggtgacgaac

SEQ ID NO: 13918 - RNA, 18 nt, synthetic construct
  misc_feature 1..18: note = Synthetic
  source 1..18: mol_type = other RNA
ctggcctatgtcccacac

SEQ ID NO: 13919 - RNA, 19 nt, synthetic construct
  misc_feature 1..19: note = Synthetic
  source 1..19: mol_type = other RNA
tctggcctatgtcccacac

SEQ ID NO: 13920 - RNA, 21 nt, synthetic construct
  misc_feature 1..21: note = Synthetic
  source 1..21: mol_type = other RNA
gctctggcctatgtcccacac

SEQ ID NO: 13921 - RNA, 22 nt, synthetic construct
  misc_feature 1..22: note = Synthetic
  source 1..22: mol_type = other RNA
ggctctggcctatgtcccacac

SEQ ID NO: 13922 - RNA, 23 nt, synthetic construct
  misc_feature 1..23: note = Synthetic
  source 1..23: mol_type = other RNA
tggctctggcctatgtcccacac

SEQ ID NO: 13923 - RNA, 24 nt, synthetic construct
  misc_feature 1..24: note = Synthetic
  source 1..24: mol_type = other RNA
gtggctctggcctatgtcccacac

SEQ ID NO: 13924 - RNA, 18 nt, synthetic construct
  misc_feature 1..18: note = Synthetic
  source 1..18: mol_type = other RNA
ctccgggtgcccggccac

SEQ ID NO: 13925 - RNA, 19 nt, synthetic construct
  misc_feature 1..19: note = Synthetic
  source 1..19: mol_type = other RNA
cctccgggtgcccggccac

SEQ ID NO: 13926 - RNA, 21 nt, synthetic construct
  misc_feature 1..21: note = Synthetic
  source 1..21: mol_type = other RNA
gtcctccgggtgcccggccac

SEQ ID NO: 13927 - RNA, 22 nt, synthetic construct
  misc_feature 1..22: note = Synthetic
  source 1..22: mol_type = other RNA
ggtcctccgggtgcccggccac

SEQ ID NO: 13928 - RNA, 23 nt, synthetic construct
  misc_feature 1..23: note = Synthetic
  source 1..23: mol_type = other RNA
aggtcctccgggtgcccggccac

SEQ ID NO: 13929 - RNA, 24 nt, synthetic construct
  misc_feature 1..24: note = Synthetic
  source 1..24: mol_type = other RNA
caggtcctccgggtgcccggccac

SEQ ID NO: 13930 - RNA, 18 nt, synthetic construct
  misc_feature 1..18: note = Synthetic
  source 1..18: mol_type = other RNA
cattcgatatcgaagcac

SEQ ID NO: 13931 - RNA, 19 nt, synthetic construct
  misc_feature 1..19: note = Synthetic
  source 1..19: mol_type = other RNA
gcattcgatatcgaagcac

SEQ ID NO: 13932 - RNA, 21 nt, synthetic construct
  misc_feature 1..21: note = Synthetic
  source 1..21: mol_type = other RNA
ttgcattcgatatcgaagcac

SEQ ID NO: 13933 - RNA, 22 nt, synthetic construct
  misc_feature 1..22: note = Synthetic
  source 1..22: mol_type = other RNA
cttgcattcgatatcgaagcac

SEQ ID NO: 13934 - RNA, 23 nt, synthetic construct
  misc_feature 1..23: note = Synthetic
  source 1..23: mol_type = other RNA
ccttgcattcgatatcgaagcac

SEQ ID NO: 13935 - RNA, 24 nt, synthetic construct
  misc_feature 1..24: note = Synthetic
  source 1..24: mol_type = other RNA
gccttgcattcgatatcgaagcac

SEQ ID NO: 13936 - RNA, 18 nt, synthetic construct
  misc_feature 1..18: note = Synthetic
  source 1..18: mol_type = other RNA
gaggaggctctctcgcac

SEQ ID NO: 13937 - RNA, 19 nt, synthetic construct
  misc_feature 1..19: note = Synthetic
  source 1..19: mol_type = other RNA
tgaggaggctctctcgcac

SEQ ID NO: 13938 - RNA, 21 nt, synthetic construct
  misc_feature 1..21: note = Synthetic
  source 1..21: mol_type = other RNA
gctgaggaggctctctcgcac

SEQ ID NO: 13939 - RNA, 22 nt, synthetic construct
  misc_feature 1..22: note = Synthetic
  source 1..22: mol_type = other RNA
tgctgaggaggctctctcgcac

SEQ ID NO: 13940 - RNA, 23 nt, synthetic construct
  misc_feature 1..23: note = Synthetic
  source 1..23: mol_type = other RNA
atgctgaggaggctctctcgcac

SEQ ID NO: 13941 - RNA, 24 nt, synthetic construct
  misc_feature 1..24: note = Synthetic
  source 1..24: mol_type = other RNA
gatgctgaggaggctctctcgcac

SEQ ID NO: 13942 - RNA, 18 nt, synthetic construct
  misc_feature 1..18: note = Synthetic
  source 1..18: mol_type = other RNA
caccaccacggggttcac

SEQ ID NO: 13943 - RNA, 19 nt, synthetic construct
  misc_feature 1..19: note = Synthetic
  source 1..19: mol_type = other RNA
acaccaccacggggttcac

SEQ ID NO: 13944 - RNA, 21 nt, synthetic construct
  misc_feature 1..21: note = Synthetic
  source 1..21: mol_type = other RNA
gaacaccaccacggggttcac

SEQ ID NO: 13945 - RNA, 22 nt, synthetic construct
  misc_feature 1..22: note = Synthetic
  source 1..22: mol_type = other RNA
cgaacaccaccacggggttcac

SEQ ID NO: 13946 - RNA, 23 nt, synthetic construct
  misc_feature 1..23: note = Synthetic
  source 1..23: mol_type = other RNA
tcgaacaccaccacggggttcac

SEQ ID NO: 13947 - RNA, 24 nt, synthetic construct
  misc_feature 1..24: note = Synthetic
  source 1..24: mol_type = other RNA
gtcgaacaccaccacggggttcac

SEQ ID NO: 13948 - RNA, 18 nt, synthetic construct
  misc_feature 1..18: note = Synthetic
  source 1..18: mol_type = other RNA
gtaaaacagcaggtcgac

SEQ ID NO: 13949 - RNA, 19 nt, synthetic construct
  misc_feature 1..19: note = Synthetic
  source 1..19: mol_type = other RNA
cgtaaaacagcaggtcgac

SEQ ID NO: 13950 - RNA, 21 nt, synthetic construct
  misc_feature 1..21: note = Synthetic
  source 1..21: mol_type = other RNA
gtcgtaaaacagcaggtcgac

SEQ ID NO: 13951 - RNA, 22 nt, synthetic construct
  misc_feature 1..22: note = Synthetic
  source 1..22: mol_type = other RNA
cgtcgtaaaacagcaggtcgac

SEQ ID NO: 13952 - RNA, 23 nt, synthetic construct
  misc_feature 1..23: note = Synthetic
  source 1..23: mol_type = other RNA
tcgtcgtaaaacagcaggtcgac

SEQ ID NO: 13953 - RNA, 24 nt, synthetic construct
  misc_feature 1..24: note = Synthetic
  source 1..24: mol_type = other RNA
atcgtcgtaaaacagcaggtcgac

SEQ ID NO: 13954 - RNA, 18 nt, synthetic construct
  misc_feature 1..18: note = Synthetic
  source 1..18: mol_type = other RNA
gcgccgatgggcgtctac

SEQ ID NO: 13955 - RNA, 19 nt, synthetic construct
  misc_feature 1..19: note = Synthetic
  source 1..19: mol_type = other RNA
tgcgccgatgggcgtctac

SEQ ID NO: 13956 - RNA, 21 nt, synthetic construct
  misc_feature 1..21: note = Synthetic
  source 1..21: mol_type = other RNA
gatgcgccgatgggcgtctac

SEQ ID NO: 13957 - RNA, 22 nt, synthetic construct
  misc_feature 1..22: note = Synthetic
  source 1..22: mol_type = other RNA
tgatgcgccgatgggcgtctac

SEQ ID NO: 13958 - RNA, 23 nt, synthetic construct
  misc_feature 1..23: note = Synthetic
  source 1..23: mol_type = other RNA
gtgatgcgccgatgggcgtctac

SEQ ID NO: 13959 - RNA, 24 nt, synthetic construct
  misc_feature 1..24: note = Synthetic
  source 1..24: mol_type = other RNA
ggtgatgcgccgatgggcgtctac

SEQ ID NO: 13960 - RNA, 18 nt, synthetic construct
  misc_feature 1..18: note = Synthetic
  source 1..18: mol_type = other RNA
cggggttcacgtgaaacc

SEQ ID NO: 13961 - RNA, 19 nt, synthetic construct
  misc_feature 1..19: note = Synthetic
  source 1..19: mol_type = other RNA
acggggttcacgtgaaacc

SEQ ID NO: 13962 - RNA, 21 nt, synthetic construct
  misc_feature 1..21: note = Synthetic
  source 1..21: mol_type = other RNA
ccacggggttcacgtgaaacc

SEQ ID NO: 13963 - RNA, 22 nt, synthetic construct
  misc_feature 1..22: note = Synthetic
  source 1..22: mol_type = other RNA
accacggggttcacgtgaaacc

SEQ ID NO: 13964 - RNA, 23 nt, synthetic construct
  misc_feature 1..23: note = Synthetic
  source 1..23: mol_type = other RNA
caccacggggttcacgtgaaacc

SEQ ID NO: 13965 - RNA, 24 nt, synthetic construct
  misc_feature 1..24: note = Synthetic
  source 1..24: mol_type = other RNA
ccaccacggggttcacgtgaaacc

SEQ ID NO: 13966 - RNA, 18 nt, synthetic construct
  misc_feature 1..18: note = Synthetic
  source 1..18: mol_type = other RNA
ctgtcgaattccagaacc

SEQ ID NO: 13967 - RNA, 19 nt, synthetic construct
  misc_feature 1..19: note = Synthetic
  source 1..19: mol_type = other RNA
gctgtcgaattccagaacc

SEQ ID NO: 13968 - RNA, 21 nt, synthetic construct
  misc_feature 1..21: note = Synthetic
  source 1..21: mol_type = other RNA
tcgctgtcgaattccagaacc

SEQ ID NO: 13969 - RNA, 22 nt, synthetic construct
  misc_feature 1..22: note = Synthetic
  source 1..22: mol_type = other RNA
ttcgctgtcgaattccagaacc

SEQ ID NO: 13970 - RNA, 23 nt, synthetic construct
  misc_feature 1..23: note = Synthetic
  source 1..23: mol_type = other RNA
attcgctgtcgaattccagaacc

SEQ ID NO: 13971 - RNA, 24 nt, synthetic construct
  misc_feature 1..24: note = Synthetic
  source 1..24: mol_type = other RNA
aattcgctgtcgaattccagaacc

SEQ ID NO: 13972 - RNA, 18 nt, synthetic construct
  misc_feature 1..18: note = Synthetic
  source 1..18: mol_type = other RNA
gcaaagtcgaacaccacc

SEQ ID NO: 13973 - RNA, 19 nt, synthetic construct
  misc_feature 1..19: note = Synthetic
  source 1..19: mol_type = other RNA
ggcaaagtcgaacaccacc

SEQ ID NO: 13974 - RNA, 21 nt, synthetic construct
  misc_feature 1..21: note = Synthetic
  source 1..21: mol_type = other RNA
ctggcaaagtcgaacaccacc

SEQ ID NO: 13975 - RNA, 22 nt, synthetic construct
  misc_feature 1..22: note = Synthetic
  source 1..22: mol_type = other RNA
gctggcaaagtcgaacaccacc

SEQ ID NO: 13976 - RNA, 23 nt, synthetic construct
  misc_feature 1..23: note = Synthetic
  source 1..23: mol_type = other RNA
ggctggcaaagtcgaacaccacc

SEQ ID NO: 13977 - RNA, 24 nt, synthetic construct
  misc_feature 1..24: note = Synthetic
  source 1..24: mol_type = other RNA
aggctggcaaagtcgaacaccacc

SEQ ID NO: 13978 - RNA, 18 nt, synthetic construct
  misc_feature 1..18: note = Synthetic
  source 1..18: mol_type = other RNA
gggggcgggctcgtcccc

SEQ ID NO: 13979 - RNA, 19 nt, synthetic construct
  misc_feature 1..19: note = Synthetic
  source 1..19: mol_type = other RNA
ggggggcgggctcgtcccc

SEQ ID NO: 13980 - RNA, 21 nt, synthetic construct
  misc_feature 1..21: note = Synthetic
  source 1..21: mol_type = other RNA
ggggggggcgggctcgtcccc

SEQ ID NO: 13981 - RNA, 22 nt, synthetic construct
  misc_feature 1..22: note = Synthetic
  source 1..22: mol_type = other RNA
cggggggggcgggctcgtcccc

SEQ ID NO: 13982 - RNA, 23 nt, synthetic construct
  misc_feature 1..23: note = Synthetic
  source 1..23: mol_type = other RNA
gcggggggggcgggctcgtcccc

SEQ ID NO: 13983 - RNA, 24 nt, synthetic construct
  misc_feature 1..24: note = Synthetic
  source 1..24: mol_type = other RNA
cgcggggggggcgggctcgtcccc

SEQ ID NO: 13984 - RNA, 18 nt, synthetic construct
  misc_feature 1..18: note = Synthetic
  source 1..18: mol_type = other RNA
ccgcggaacgacgcgccc

SEQ ID NO: 13985 - RNA, 19 nt, synthetic construct
  misc_feature 1..19: note = Synthetic
  source 1..19: mol_type = other RNA
gccgcggaacgacgcgccc

SEQ ID NO: 13986 - RNA, 21 nt, synthetic construct
  misc_feature 1..21: note = Synthetic
  source 1..21: mol_type = other RNA
atgccgcggaacgacgcgccc

SEQ ID NO: 13987 - RNA, 22 nt, synthetic construct
  misc_feature 1..22: note = Synthetic
  source 1..22: mol_type = other RNA
gatgccgcggaacgacgcgccc

SEQ ID NO: 13988 - RNA, 23 nt, synthetic construct
  misc_feature 1..23: note = Synthetic
  source 1..23: mol_type = other RNA
agatgccgcggaacgacgcgccc

SEQ ID NO: 13989 - RNA, 24 nt, synthetic construct
  misc_feature 1..24: note = Synthetic
  source 1..24: mol_type = other RNA
gagatgccgcggaacgacgcgccc

SEQ ID NO: 13990 - RNA, 18 nt, synthetic construct
  misc_feature 1..18: note = Synthetic
  source 1..18: mol_type = other RNA
ccttccggagtcaggccc

SEQ ID NO: 13991 - RNA, 19 nt, synthetic construct
  misc_feature 1..19: note = Synthetic
  source 1..19: mol_type = other RNA
gccttccggagtcaggccc

SEQ ID NO: 13992 - RNA, 21 nt, synthetic construct
  misc_feature 1..21: note = Synthetic
  source 1..21: mol_type = other RNA
tggccttccggagtcaggccc

SEQ ID NO: 13993 - RNA, 22 nt, synthetic construct
  misc_feature 1..22: note = Synthetic
  source 1..22: mol_type = other RNA
gtggccttccggagtcaggccc

SEQ ID NO: 13994 - RNA, 23 nt, synthetic construct
  misc_feature 1..23: note = Synthetic
  source 1..23: mol_type = other RNA
ggtggccttccggagtcaggccc

SEQ ID NO: 13995 - RNA, 24 nt, synthetic construct
  misc_feature 1..24: note = Synthetic
  source 1..24: mol_type = other RNA
cggtggccttccggagtcaggccc

SEQ ID NO: 13996 - RNA, 18 nt, synthetic construct
  misc_feature 1..18: note = Synthetic
  source 1..18: mol_type = other RNA
gcaggtcgaccagggccc

SEQ ID NO: 13997 - RNA, 19 nt, synthetic construct
  misc_feature 1..19: note = Synthetic
  source 1..19: mol_type = other RNA
agcaggtcgaccagggccc

SEQ ID NO: 13998 - RNA, 21 nt, synthetic construct
  misc_feature 1..21: note = Synthetic
  source 1..21: mol_type = other RNA
acagcaggtcgaccagggccc

SEQ ID NO: 13999 - RNA, 22 nt, synthetic construct
  misc_feature 1..22: note = Synthetic
  source 1..22: mol_type = other RNA
aacagcaggtcgaccagggccc

SEQ ID NO: 14000 - RNA, 23 nt, synthetic construct
  misc_feature 1..23: note = Synthetic
  source 1..23: mol_type = other RNA
aaacagcaggtcgaccagggccc

SEQ ID NO: 14001 - RNA, 24 nt, synthetic construct
  misc_feature 1..24: note = Synthetic
  source 1..24: mol_type = other RNA
aaaacagcaggtcgaccagggccc

SEQ ID NO: 14002 - RNA, 18 nt, synthetic construct
  misc_feature 1..18: note = Synthetic
  source 1..18: mol_type = other RNA
gcgcatggaatagggccc

SEQ ID NO: 14003 - RNA, 19 nt, synthetic construct
  misc_feature 1..19: note = Synthetic
  source 1..19: mol_type = other RNA
tgcgcatggaatagggccc

SEQ ID NO: 14004 - RNA, 21 nt, synthetic construct
  misc_feature 1..21: note = Synthetic
  source 1..21: mol_type = other RNA
gatgcgcatggaatagggccc

SEQ ID NO: 14005 - RNA, 22 nt, synthetic construct
  misc_feature 1..22: note = Synthetic
  source 1..22: mol_type = other RNA
tgatgcgcatggaatagggccc

SEQ ID NO: 14006 - RNA, 23 nt, synthetic construct
  misc_feature 1..23: note = Synthetic
  source 1..23: mol_type = other RNA
atgatgcgcatggaatagggccc

SEQ ID NO: 14007 - RNA, 24 nt, synthetic construct
  misc_feature 1..24: note = Synthetic
  source 1..24: mol_type = other RNA
gatgatgcgcatggaatagggccc

SEQ ID NO: 14008 - RNA, 18 nt, synthetic construct
  misc_feature 1..18: note = Synthetic
  source 1..18: mol_type = other RNA
agtccgtgctgcactccc

SEQ ID NO: 14009 - RNA, 19 nt, synthetic construct
  misc_feature 1..19: note = Synthetic
  source 1..19: mol_type = other RNA
gagtccgtgctgcactccc

SEQ ID NO: 14010 - RNA, 21 nt, synthetic construct
  misc_feature 1..21: note = Synthetic
  source 1..21: mol_type = other RNA
aggagtccgtgctgcactccc

SEQ ID NO: 14011 - RNA, 22 nt, synthetic construct
  misc_feature 1..22: note = Synthetic
  source 1..22: mol_type = other RNA
caggagtccgtgctgcactccc

SEQ ID NO: 14012 - RNA, 23 nt, synthetic construct
  misc_feature 1..23: note = Synthetic
  source 1..23: mol_type = other RNA
gcaggagtccgtgctgcactccc

SEQ ID NO: 14013 - RNA, 24 nt, synthetic construct
  misc_feature 1..24: note = Synthetic
  source 1..24: mol_type = other RNA
ggcaggagtccgtgctgcactccc

SEQ ID NO: 14014 - RNA, 18 nt, synthetic construct
  misc_feature 1..18: note = Synthetic
  source 1..18: mol_type = other RNA
ggcttggacgcgcctccc

SEQ ID NO: 14015 - RNA, 19 nt, synthetic construct
  misc_feature 1..19: note = Synthetic
  source 1..19: mol_type = other RNA
gggcttggacgcgcctccc

SEQ ID NO: 14016 - RNA, 21 nt, synthetic construct
  misc_feature 1..21: note = Synthetic
  source 1..21: mol_type = other RNA
cggggcttggacgcgcctccc

SEQ ID NO: 14017 - RNA, 22 nt, synthetic construct
  misc_feature 1..22: note = Synthetic
  source 1..22: mol_type = other RNA
gcggggcttggacgcgcctccc

SEQ ID NO: 14018 - RNA, 23 nt, synthetic construct
  misc_feature 1..23: note = Synthetic
  source 1..23: mol_type = other RNA
tgcggggcttggacgcgcctccc

SEQ ID NO: 14019 - RNA, 24 nt, synthetic construct
  misc_feature 1..24: note = Synthetic
  source 1..24: mol_type = other RNA
ttgcggggcttggacgcgcctccc

SEQ ID NO: 14020 - RNA, 18 nt, synthetic construct
  misc_feature 1..18: note = Synthetic
  source 1..18: mol_type = other RNA
caggcgacggcgtctccc

SEQ ID NO: 14021 - RNA, 19 nt, synthetic construct
  misc_feature 1..19: note = Synthetic
  source 1..19: mol_type = other RNA
gcaggcgacggcgtctccc

SEQ ID NO: 14022 - RNA, 21 nt, synthetic construct
  misc_feature 1..21: note = Synthetic
  source 1..21: mol_type = other RNA
cggcaggcgacggcgtctccc

SEQ ID NO: 14023 - RNA, 22 nt, synthetic construct
  misc_feature 1..22: note = Synthetic
  source 1..22: mol_type = other RNA
tcggcaggcgacggcgtctccc

SEQ ID NO: 14024 - RNA, 23 nt, synthetic construct
  misc_feature 1..23: note = Synthetic
  source 1..23: mol_type = other RNA
gtcggcaggcgacggcgtctccc

SEQ ID NO: 14025 - RNA, 24 nt, synthetic construct
  misc_feature 1..24: note = Synthetic
  source 1..24: mol_type = other RNA
ggtcggcaggcgacggcgtctccc

SEQ ID NO: 14026 - RNA, 18 nt, synthetic construct
  misc_feature 1..18: note = Synthetic
  source 1..18: mol_type = other RNA
ccgaacgcctgcagtccc

SEQ ID NO: 14027 - RNA, 19 nt, synthetic construct
  misc_feature 1..19: note = Synthetic
  source 1..19: mol_type = other RNA
cccgaacgcctgcagtccc

SEQ ID NO: 14028 - RNA, 21 nt, synthetic construct
  misc_feature 1..21: note = Synthetic
  source 1..21: mol_type = other RNA
gccccgaacgcctgcagtccc

SEQ ID NO: 14029 - RNA, 22 nt, synthetic construct
  misc_feature 1..22: note = Synthetic
  source 1..22: mol_type = other RNA
ggccccgaacgcctgcagtccc

SEQ ID NO: 14030 - RNA, 23 nt, synthetic construct
  misc_feature 1..23: note = Synthetic
  source 1..23: mol_type = other RNA
cggccccgaacgcctgcagtccc

SEQ ID NO: 14031 - RNA, 24 nt, synthetic construct
  misc_feature 1..24: note = Synthetic
  source 1..24: mol_type = other RNA
acggccccgaacgcctgcagtccc

SEQ ID NO: 14032 - RNA, 18 nt, synthetic construct
  misc_feature 1..18: note = Synthetic
  source 1..18: mol_type = other RNA
ggggggcgggctcgtccc

SEQ ID NO: 14033 - RNA, 19 nt, synthetic construct
  misc_feature 1..19: note = Synthetic
  source 1..19: mol_type = other RNA
gggggggcgggctcgtccc

SEQ ID NO: 14034 - RNA, 21 nt, synthetic construct
  misc_feature 1..21: note = Synthetic
  source 1..21: mol_type = other RNA
cggggggggcgggctcgtccc

SEQ ID NO: 14035 - RNA, 22 nt, synthetic construct
  misc_feature 1..22: note = Synthetic
  source 1..22: mol_type = other RNA
gcggggggggcgggctcgtccc

SEQ ID NO: 14036 - RNA, 23 nt, synthetic construct
  misc_feature 1..23: note = Synthetic
  source 1..23: mol_type = other RNA
cgcggggggggcgggctcgtccc

SEQ ID NO: 14037 - RNA, 24 nt, synthetic construct
  misc_feature 1..24: note = Synthetic
  source 1..24: mol_type = other RNA
ccgcggggggggcgggctcgtccc

SEQ ID NO: 14038 - RNA, 18 nt, synthetic construct
  misc_feature 1..18: note = Synthetic
  source 1..18: mol_type = other RNA
cgtgttcagggcgacgcc

SEQ ID NO: 14039 - RNA, 19 nt, synthetic construct
  misc_feature 1..19: note = Synthetic
  source 1..19: mol_type = other RNA
ccgtgttcagggcgacgcc

SEQ ID NO: 14040 - RNA, 21 nt, synthetic construct
  misc_feature 1..21: note = Synthetic
  source 1..21: mol_type = other RNA
gtccgtgttcagggcgacgcc

SEQ ID NO: 14041 - RNA, 22 nt, synthetic construct
  misc_feature 1..22: note = Synthetic
  source 1..22: mol_type = other RNA
agtccgtgttcagggcgacgcc

SEQ ID NO: 14042 - RNA, 23 nt, synthetic construct
  misc_feature 1..23: note = Synthetic
  source 1..23: mol_type = other RNA
tagtccgtgttcagggcgacgcc

SEQ ID NO: 14043 - RNA, 24 nt, synthetic construct
  misc_feature 1..24: note = Synthetic
  source 1..24: mol_type = other RNA
atagtccgtgttcagggcgacgcc

SEQ ID NO: 14044 - RNA, 18 nt, synthetic construct
  misc_feature 1..18: note = Synthetic
  source 1..18: mol_type = other RNA
gcgccggcacccaccgcc

SEQ ID NO: 14045 - RNA, 19 nt, synthetic construct
  misc_feature 1..19: note = Synthetic
  source 1..19: mol_type = other RNA
agcgccggcacccaccgcc

SEQ ID NO: 14046 - RNA, 21 nt, synthetic construct
  misc_feature 1..21: note = Synthetic
  source 1..21: mol_type = other RNA
gtagcgccggcacccaccgcc

SEQ ID NO: 14047 - RNA, 22 nt, synthetic construct
  misc_feature 1..22: note = Synthetic
  source 1..22: mol_type = other RNA
cgtagcgccggcacccaccgcc

SEQ ID NO: 14048 - RNA, 23 nt, synthetic construct
  misc_feature 1..23: note = Synthetic
  source 1..23: mol_type = other RNA
ccgtagcgccggcacccaccgcc

SEQ ID NO: 14049 - RNA, 24 nt, synthetic construct
  misc_feature 1..24: note = Synthetic
  source 1..24: mol_type = other RNA
gccgtagcgccggcacccaccgcc

SEQ ID NO: 14050 - RNA, 18 nt, synthetic construct
  misc_feature 1..18: note = Synthetic
  source 1..18: mol_type = other RNA
cgctccaccacctccgcc

SEQ ID NO: 14051 - RNA, 19 nt, synthetic construct
  misc_feature 1..19: note = Synthetic
  source 1..19: mol_type = other RNA
gcgctccaccacctccgcc

SEQ ID NO: 14052 - RNA, 21 nt, synthetic construct
  misc_feature 1..21: note = Synthetic
  source 1..21: mol_type = other RNA
gtgcgctccaccacctccgcc

SEQ ID NO: 14053 - RNA, 22 nt, synthetic construct
  misc_feature 1..22: note = Synthetic
  source 1..22: mol_type = other RNA
ggtgcgctccaccacctccgcc

SEQ ID NO: 14054 - RNA, 23 nt, synthetic construct
  misc_feature 1..23: note = Synthetic
  source 1..23: mol_type = other RNA
cggtgcgctccaccacctccgcc

SEQ ID NO: 14055 - RNA, 24 nt, synthetic construct
  misc_feature 1..24: note = Synthetic
  source 1..24: mol_type = other RNA
tcggtgcgctccaccacctccgcc

SEQ ID NO: 14056 - RNA, 18 nt, synthetic construct
  misc_feature 1..18: note = Synthetic
  source 1..18: mol_type = other RNA
gccgcggaacgacgcgcc

SEQ ID NO: 14057 - RNA, 19 nt, synthetic construct
  misc_feature 1..19: note = Synthetic
  source 1..19: mol_type = other RNA
tgccgcggaacgacgcgcc

SEQ ID NO: 14058 - RNA, 21 nt, synthetic construct
  misc_feature 1..21: note = Synthetic
  source 1..21: mol_type = other RNA
gatgccgcggaacgacgcgcc

SEQ ID NO: 14059 - RNA, 22 nt, synthetic construct
  misc_feature 1..22: note = Synthetic
  source 1..22: mol_type = other RNA
agatgccgcggaacgacgcgcc

SEQ ID NO: 14060 - RNA, 23 nt, synthetic construct
  misc_feature 1..23: note = Synthetic
  source 1..23: mol_type = other RNA
gagatgccgcggaacgacgcgcc

SEQ ID NO: 14061 - RNA, 24 nt, synthetic construct
  misc_feature 1..24: note = Synthetic
  source 1..24: mol_type = other RNA
ggagatgccgcggaacgacgcgcc

SEQ ID NO: 14062 - RNA, 18 nt, synthetic construct
  misc_feature 1..18: note = Synthetic
  source 1..18: mol_type = other RNA
gccttccggagtcaggcc

SEQ ID NO: 14063 - RNA, 19 nt, synthetic construct
  misc_feature 1..19: note = Synthetic
  source 1..19: mol_type = other RNA
ggccttccggagtcaggcc

SEQ ID NO: 14064 - RNA, 21 nt, synthetic construct
  misc_feature 1..21: note = Synthetic
  source 1..21: mol_type = other RNA
gtggccttccggagtcaggcc

SEQ ID NO: 14065 - RNA, 22 nt, synthetic construct
  misc_feature 1..22: note = Synthetic
  source 1..22: mol_type = other RNA
ggtggccttccggagtcaggcc

SEQ ID NO: 14066 - RNA, 23 nt, synthetic construct
  misc_feature 1..23: note = Synthetic
  source 1..23: mol_type = other RNA
cggtggccttccggagtcaggcc

SEQ ID NO: 14067 - RNA, 24 nt, synthetic construct
  misc_feature 1..24: note = Synthetic
  source 1..24: mol_type = other RNA
ccggtggccttccggagtcaggcc

SEQ ID NO: 14068 - RNA, 18 nt, synthetic construct
  misc_feature 1..18: note = Synthetic
  source 1..18: mol_type = other RNA
gccaagcgcgcgacggcc

SEQ ID NO: 14069 - RNA, 19 nt, synthetic construct
  misc_feature 1..19: note = Synthetic
  source 1..19: mol_type = other RNA
cgccaagcgcgcgacggcc

SEQ ID NO: 14070 - RNA, 21 nt, synthetic construct
  misc_feature 1..21: note = Synthetic
  source 1..21: mol_type = other RNA
cccgccaagcgcgcgacggcc

SEQ ID NO: 14071 - RNA, 22 nt, synthetic construct
  misc_feature 1..22: note = Synthetic
  source 1..22: mol_type = other RNA
acccgccaagcgcgcgacggcc

SEQ ID NO: 14072 - RNA, 23 nt, synthetic construct
  misc_feature 1..23: note = Synthetic
  source 1..23: mol_type = other RNA
tacccgccaagcgcgcgacggcc

SEQ ID NO: 14073 - RNA, 24 nt, synthetic construct
  misc_feature 1..24: note = Synthetic
  source 1..24: mol_type = other RNA
atacccgccaagcgcgcgacggcc

SEQ ID NO: 14074 - RNA, 18 nt, synthetic construct
  misc_feature 1..18: note = Synthetic
  source 1..18: mol_type = other RNA
gcgtctacgaggacggcc

SEQ ID NO: 14075 - RNA, 19 nt, synthetic construct
  misc_feature 1..19: note = Synthetic
  source 1..19: mol_type = other RNA
ggcgtctacgaggacggcc

SEQ ID NO: 14076 - RNA, 21 nt, synthetic construct
  misc_feature 1..21: note = Synthetic
  source 1..21: mol_type = other RNA
tgggcgtctacgaggacggcc

SEQ ID NO: 14077 - RNA, 22 nt, synthetic construct
  misc_feature 1..22: note = Synthetic
  source 1..22: mol_type = other RNA
atgggcgtctacgaggacggcc

SEQ ID NO: 14078 - RNA, 23 nt, synthetic construct
  misc_feature 1..23: note = Synthetic
  source 1..23: mol_type = other RNA
gatgggcgtctacgaggacggcc

SEQ ID NO: 14079 - RNA, 24 nt, synthetic construct
  misc_feature 1..24: note = Synthetic
  source 1..24: mol_type = other RNA
cgatgggcgtctacgaggacggcc

SEQ ID NO: 14080 - RNA, 18 nt, synthetic construct
  misc_feature 1..18: note = Synthetic
  source 1..18: mol_type = other RNA
gccgtcagcccggcggcc

SEQ ID NO: 14081 - RNA, 19 nt, synthetic construct
  misc_feature 1..19: note = Synthetic
  source 1..19: mol_type = other RNA
ggccgtcagcccggcggcc

SEQ ID NO: 14082 - RNA, 21 nt, synthetic construct
  misc_feature 1..21: note = Synthetic
  source 1..21: mol_type = other RNA
acggccgtcagcccggcggcc

SEQ ID NO: 14083 - RNA, 22 nt, synthetic construct
  misc_feature 1..22: note = Synthetic
  source 1..22: mol_type = other RNA
cacggccgtcagcccggcggcc

SEQ ID NO: 14084 - RNA, 23 nt, synthetic construct
  misc_feature 1..23: note = Synthetic
  source 1..23: mol_type = other RNA
ccacggccgtcagcccggcggcc

SEQ ID NO: 14085 - RNA, 24 nt, synthetic construct
  misc_feature 1..24: note = Synthetic
  source 1..24: mol_type = other RNA
cccacggccgtcagcccggcggcc

SEQ ID NO: 14086 - RNA, 18 nt, synthetic construct
  misc_feature 1..18: note = Synthetic
  source 1..18: mol_type = other RNA
gcctccgggaaatcggcc

SEQ ID NO: 14087 - RNA, 19 nt, synthetic construct
  misc_feature 1..19: note = Synthetic
  source 1..19: mol_type = other RNA
cgcctccgggaaatcggcc

SEQ ID NO: 14088 - RNA, 21 nt, synthetic construct
  misc_feature 1..21: note = Synthetic
  source 1..21: mol_type = other RNA
gccgcctccgggaaatcggcc

SEQ ID NO: 14089 - RNA, 22 nt, synthetic construct
  misc_feature 1..22: note = Synthetic
  source 1..22: mol_type = other RNA
ggccgcctccgggaaatcggcc

SEQ ID NO: 14090 - RNA, 23 nt, synthetic construct
  misc_feature 1..23: note = Synthetic
  source 1..23: mol_type = other RNA
cggccgcctccgggaaatcggcc

SEQ ID NO: 14091 - RNA, 24 nt, synthetic construct
  misc_feature 1..24: note = Synthetic
  source 1..24: mol_type = other RNA
tcggccgcctccgggaaatcggcc

SEQ ID NO: 14092 - RNA, 18 nt, synthetic construct
  misc_feature 1..18: note = Synthetic
  source 1..18: mol_type = other RNA
agcaggtcgaccagggcc

SEQ ID NO: 14093 - RNA, 19 nt, synthetic construct
  misc_feature 1..19: note = Synthetic
  source 1..19: mol_type = other RNA
cagcaggtcgaccagggcc

SEQ ID NO: 14094 - RNA, 21 nt, synthetic construct
  misc_feature 1..21: note = Synthetic
  source 1..21: mol_type = other RNA
aacagcaggtcgaccagggcc

SEQ ID NO: 14095 - RNA, 22 nt, synthetic construct
  misc_feature 1..22: note = Synthetic
  source 1..22: mol_type = other RNA
aaacagcaggtcgaccagggcc

SEQ ID NO: 14096 - RNA, 23 nt, synthetic construct
  misc_feature 1..23: note = Synthetic
  source 1..23: mol_type = other RNA
aaaacagcaggtcgaccagggcc

SEQ ID NO: 14097 - RNA, 24 nt, synthetic construct
  misc_feature 1..24: note = Synthetic
  source 1..24: mol_type = other RNA
taaaacagcaggtcgaccagggcc

SEQ ID NO: 14098 - RNA, 18 nt, synthetic construct
  misc_feature 1..18: note = Synthetic
  source 1..18: mol_type = other RNA
gccggggagggcagggcc

SEQ ID NO: 14099 - RNA, 19 nt, synthetic construct
  misc_feature 1..19: note = Synthetic
  source 1..19: mol_type = other RNA
ggccggggagggcagggcc

SEQ ID NO: 14100 - RNA, 21 nt, synthetic construct
  misc_feature 1..21: note = Synthetic
  source 1..21: mol_type = other RNA
ttggccggggagggcagggcc

SEQ ID NO: 14101 - RNA, 22 nt, synthetic construct
  misc_feature 1..22: note = Synthetic
  source 1..22: mol_type = other RNA
cttggccggggagggcagggcc

SEQ ID NO: 14102 - RNA, 23 nt, synthetic construct
  misc_feature 1..23: note = Synthetic
  source 1..23: mol_type = other RNA
gcttggccggggagggcagggcc

SEQ ID NO: 14103 - RNA, 24 nt, synthetic construct
  misc_feature 1..24: note = Synthetic
  source 1..24: mol_type = other RNA
cgcttggccggggagggcagggcc

SEQ ID NO: 14104 - RNA, 18 nt, synthetic construct
  misc_feature 1..18: note = Synthetic
  source 1..18: mol_type = other RNA
tgcgcatggaatagggcc

SEQ ID NO: 14105 - RNA, 19 nt, synthetic construct
  misc_feature 1..19: note = Synthetic
  source 1..19: mol_type = other RNA
atgcgcatggaatagggcc

SEQ ID NO: 14106 - RNA, 21 nt, synthetic construct
  misc_feature 1..21: note = Synthetic
  source 1..21: mol_type = other RNA
tgatgcgcatggaatagggcc

SEQ ID NO: 14107 - RNA, 22 nt, synthetic construct
  misc_feature 1..22: note = Synthetic
  source 1..22: mol_type = other RNA
atgatgcgcatggaatagggcc

SEQ ID NO: 14108 - RNA, 23 nt, synthetic construct
  misc_feature 1..23: note = Synthetic
  source 1..23: mol_type = other RNA
gatgatgcgcatggaatagggcc

SEQ ID NO: 14109 - RNA, 24 nt, synthetic construct
  misc_feature 1..24: note = Synthetic
  source 1..24: mol_type = other RNA
agatgatgcgcatggaatagggcc

SEQ ID NO: 14110 - RNA, 18 nt, synthetic construct
  misc_feature 1..18: note = Synthetic
  source 1..18: mol_type = other RNA
acctgcgcgcggcgggcc

SEQ ID NO: 14111 - RNA, 19 nt, synthetic construct
  misc_feature 1..19: note = Synthetic
  source 1..19: mol_type = other RNA
gacctgcgcgcggcgggcc

SEQ ID NO: 14112 - RNA, 21 nt, synthetic construct
  misc_feature 1..21: note = Synthetic
  source 1..21: mol_type = other RNA
gggacctgcgcgcggcgggcc

SEQ ID NO: 14113 - RNA, 22 nt, synthetic construct
  misc_feature 1..22: note = Synthetic
  source 1..22: mol_type = other RNA
cgggacctgcgcgcggcgggcc

SEQ ID NO: 14114 - RNA, 23 nt, synthetic construct
  misc_feature 1..23: note = Synthetic
  source 1..23: mol_type = other RNA
acgggacctgcgcgcggcgggcc

SEQ ID NO: 14115 - RNA, 24 nt, synthetic construct
  misc_feature 1..24: note = Synthetic
  source 1..24: mol_type = other RNA
gacgggacctgcgcgcggcgggcc

SEQ ID NO: 14116 - RNA, 18 nt, synthetic construct
  misc_feature 1..18: note = Synthetic
  source 1..18: mol_type = other RNA
tcccgggggcgcttggcc

SEQ ID NO: 14117 - RNA, 19 nt, synthetic construct
  misc_feature 1..19: note = Synthetic
  source 1..19: mol_type = other RNA
ctcccgggggcgcttggcc

SEQ ID NO: 14118 - RNA, 21 nt, synthetic construct
  misc_feature 1..21: note = Synthetic
  source 1..21: mol_type = other RNA
gtctcccgggggcgcttggcc

SEQ ID NO: 14119 - RNA, 22 nt, synthetic construct
  misc_feature 1..22: note = Synthetic
  source 1..22: mol_type = other RNA
cgtctcccgggggcgcttggcc

SEQ ID NO: 14120 - RNA, 23 nt, synthetic construct
  misc_feature 1..23: note = Synthetic
  source 1..23: mol_type = other RNA
gcgtctcccgggggcgcttggcc

SEQ ID NO: 14121 - RNA, 24 nt, synthetic construct
  misc_feature 1..24: note = Synthetic
  source 1..24: mol_type = other RNA
ggcgtctcccgggggcgcttggcc

SEQ ID NO: 14122 - RNA, 18 nt, synthetic construct
  misc_feature 1..18: note = Synthetic
  source 1..18: mol_type = other RNA
gtggtccgcggagatgcc

SEQ ID NO: 14123 - RNA, 19 nt, synthetic construct
  misc_feature 1..19: note = Synthetic
  source 1..19: mol_type = other RNA
agtggtccgcggagatgcc

SEQ ID NO: 14124 - RNA, 21 nt, synthetic construct
  misc_feature 1..21: note = Synthetic
  source 1..21: mol_type = other RNA
gaagtggtccgcggagatgcc

SEQ ID NO: 14125 - RNA, 22 nt, synthetic construct
  misc_feature 1..22: note = Synthetic
  source 1..22: mol_type = other RNA
cgaagtggtccgcggagatgcc

SEQ ID NO: 14126 - RNA, 23 nt, synthetic construct
  misc_feature 1..23: note = Synthetic
  source 1..23: mol_type = other RNA
tcgaagtggtccgcggagatgcc

SEQ ID NO: 14127 - RNA, 24 nt, synthetic construct
  misc_feature 1..24: note = Synthetic
  source 1..24: mol_type = other RNA
ctcgaagtggtccgcggagatgcc

SEQ ID NO: 14128 - RNA, 18 nt, synthetic construct
  misc_feature 1..18: note = Synthetic
  source 1..18: mol_type = other RNA
ggctgctctggggaatcc

SEQ ID NO: 14129 - RNA, 19 nt, synthetic construct
  misc_feature 1..19: note = Synthetic
  source 1..19: mol_type = other RNA
gggctgctctggggaatcc

SEQ ID NO: 14130 - RNA, 21 nt, synthetic construct
  misc_feature 1..21: note = Synthetic
  source 1..21: mol_type = other RNA
cggggctgctctggggaatcc

SEQ ID NO: 14131 - RNA, 22 nt, synthetic construct
  misc_feature 1..22: note = Synthetic
  source 1..22: mol_type = other RNA
tcggggctgctctggggaatcc

SEQ ID NO: 14132 - RNA, 23 nt, synthetic construct
  misc_feature 1..23: note = Synthetic
  source 1..23: mol_type = other RNA
ctcggggctgctctggggaatcc

SEQ ID NO: 14133 - RNA, 24 nt, synthetic construct
  misc_feature 1..24: note = Synthetic
  source 1..24: mol_type = other RNA
cctcggggctgctctggggaatcc

SEQ ID NO: 14134 - RNA, 18 nt, synthetic construct
  misc_feature 1..18: note = Synthetic
  source 1..18: mol_type = other RNA
cgcatgtcggccgcctcc

SEQ ID NO: 14135 - RNA, 19 nt, synthetic construct
  misc_feature 1..19: note = Synthetic
  source 1..19: mol_type = other RNA
gcgcatgtcggccgcctcc

SEQ ID NO: 14136 - RNA, 21 nt, synthetic construct
  misc_feature 1..21: note = Synthetic
  source 1..21: mol_type = other RNA
gcgcgcatgtcggccgcctcc

SEQ ID NO: 14137 - RNA, 22 nt, synthetic construct
  misc_feature 1..22: note = Synthetic
  source 1..22: mol_type = other RNA
ggcgcgcatgtcggccgcctcc

SEQ ID NO: 14138 - RNA, 23 nt, synthetic construct
  misc_feature 1..23: note = Synthetic
  source 1..23: mol_type = other RNA
gggcgcgcatgtcggccgcctcc

SEQ ID NO: 14139 - RNA, 24 nt, synthetic construct
  misc_feature 1..24: note = Synthetic
  source 1..24: mol_type = other RNA
ggggcgcgcatgtcggccgcctcc

SEQ ID NO: 14140 - RNA, 18 nt, synthetic construct
  misc_feature 1..18: note = Synthetic
  source 1..18: mol_type = other RNA
gggcttggacgcgcctcc

SEQ ID NO: 14141 - RNA, 19 nt, synthetic construct
  misc_feature 1..19: note = Synthetic
  source 1..19: mol_type = other RNA
ggggcttggacgcgcctcc

SEQ ID NO: 14142 - RNA, 21 nt, synthetic construct
  misc_feature 1..21: note = Synthetic
  source 1..21: mol_type = other RNA
gcggggcttggacgcgcctcc

SEQ ID NO: 14143 - RNA, 22 nt, synthetic construct
  misc_feature 1..22: note = Synthetic
  source 1..22: mol_type = other RNA
tgcggggcttggacgcgcctcc

SEQ ID NO: 14144 - RNA, 23 nt, synthetic construct
  misc_feature 1..23: note = Synthetic
  source 1..23: mol_type = other RNA
ttgcggggcttggacgcgcctcc

SEQ ID NO: 14145 - RNA, 24 nt, synthetic construct
  misc_feature 1..24: note = Synthetic
  source 1..24: mol_type = other RNA
cttgcggggcttggacgcgcctcc

SEQ ID NO: 14146 - RNA, 18 nt, synthetic construct
  misc_feature 1..18: note = Synthetic
  source 1..18: mol_type = other RNA
tccaggagcacggcctcc

SEQ ID NO: 14147 - RNA, 19 nt, synthetic construct
  misc_feature 1..19: note = Synthetic
  source 1..19: mol_type = other RNA
gtccaggagcacggcctcc

SEQ ID NO: 14148 - RNA, 21 nt, synthetic construct
  misc_feature 1..21: note = Synthetic
  source 1..21: mol_type = other RNA
ttgtccaggagcacggcctcc

SEQ ID NO: 14149 - RNA, 22 nt, synthetic construct
  misc_feature 1..22: note = Synthetic
  source 1..22: mol_type = other RNA
cttgtccaggagcacggcctcc

SEQ ID NO: 14150 - RNA, 23 nt, synthetic construct
  misc_feature 1..23: note = Synthetic
  source 1..23: mol_type = other RNA
gcttgtccaggagcacggcctcc

SEQ ID NO: 14151 - RNA, 24 nt, synthetic construct
  misc_feature 1..24: note = Synthetic
  source 1..24: mol_type = other RNA
tgcttgtccaggagcacggcctcc

SEQ ID NO: 14152 - RNA, 18 nt, synthetic construct
  misc_feature 1..18: note = Synthetic
  source 1..18: mol_type = other RNA
cgcgccagccactcctcc

SEQ ID NO: 14153 - RNA, 19 nt, synthetic construct
  misc_feature 1..19: note = Synthetic
  source 1..19: mol_type = other RNA
tcgcgccagccactcctcc

SEQ ID NO: 14154 - RNA, 21 nt, synthetic construct
  misc_feature 1..21: note = Synthetic
  source 1..21: mol_type = other RNA
ggtcgcgccagccactcctcc

SEQ ID NO: 14155 - RNA, 22 nt, synthetic construct
  misc_feature 1..22: note = Synthetic
  source 1..22: mol_type = other RNA
gggtcgcgccagccactcctcc

SEQ ID NO: 14156 - RNA, 23 nt, synthetic construct
  misc_feature 1..23: note = Synthetic
  source 1..23: mol_type = other RNA
ggggtcgcgccagccactcctcc

SEQ ID NO: 14157 - RNA, 24 nt, synthetic construct
  misc_feature 1..24: note = Synthetic
  source 1..24: mol_type = other RNA
aggggtcgcgccagccactcctcc

SEQ ID NO: 14158 - RNA, 18 nt, synthetic construct
  misc_feature 1..18: note = Synthetic
  source 1..18: mol_type = other RNA
gcaggcgacggcgtctcc

SEQ ID NO: 14159 - RNA, 19 nt, synthetic construct
  misc_feature 1..19: note = Synthetic
  source 1..19: mol_type = other RNA
ggcaggcgacggcgtctcc

SEQ ID NO: 14160 - RNA, 21 nt, synthetic construct
  misc_feature 1..21: note = Synthetic
  source 1..21: mol_type = other RNA
tcggcaggcgacggcgtctcc

SEQ ID NO: 14161 - RNA, 22 nt, synthetic construct
  misc_feature 1..22: note = Synthetic
  source 1..22: mol_type = other RNA
gtcggcaggcgacggcgtctcc

SEQ ID NO: 14162 - RNA, 23 nt, synthetic construct
  misc_feature 1..23: note = Synthetic
  source 1..23: mol_type = other RNA
ggtcggcaggcgacggcgtctcc

SEQ ID NO: 14163 - RNA, 24 nt, synthetic construct
  misc_feature 1..24: note = Synthetic
  source 1..24: mol_type = other RNA
gggtcggcaggcgacggcgtctcc

SEQ ID NO: 14164 - RNA, 18 nt, synthetic construct
  misc_feature 1..18: note = Synthetic
  source 1..18: mol_type = other RNA
atgcggccgtacccgtcc

SEQ ID NO: 14165 - RNA, 19 nt, synthetic construct
  misc_feature 1..19: note = Synthetic
  source 1..19: mol_type = other RNA
catgcggccgtacccgtcc

SEQ ID NO: 14166 - RNA, 21 nt, synthetic construct
  misc_feature 1..21: note = Synthetic
  source 1..21: mol_type = other RNA
ttcatgcggccgtacccgtcc

SEQ ID NO: 14167 - RNA, 22 nt, synthetic construct
  misc_feature 1..22: note = Synthetic
  source 1..22: mol_type = other RNA
gttcatgcggccgtacccgtcc

SEQ ID NO: 14168 - RNA, 23 nt, synthetic construct
  misc_feature 1..23: note = Synthetic
  source 1..23: mol_type = other RNA
cgttcatgcggccgtacccgtcc

SEQ ID NO: 14169 - RNA, 24 nt, synthetic construct
  misc_feature 1..24: note = Synthetic
  source 1..24: mol_type = other RNA
ccgttcatgcggccgtacccgtcc

SEQ ID NO: 14170 - RNA, 18 nt, synthetic construct
  misc_feature 1..18: note = Synthetic
  source 1..18: mol_type = other RNA
cgcgcggccacgtcgtcc

SEQ ID NO: 14171 - RNA, 19 nt, synthetic construct
  misc_feature 1..19: note = Synthetic
  source 1..19: mol_type = other RNA
ccgcgcggccacgtcgtcc

SEQ ID NO: 14172 - RNA, 21 nt, synthetic construct
  misc_feature 1..21: note = Synthetic
  source 1..21: mol_type = other RNA
agccgcgcggccacgtcgtcc

SEQ ID NO: 14173 - RNA, 22 nt, synthetic construct
  misc_feature 1..22: note = Synthetic
  source 1..22: mol_type = other RNA
gagccgcgcggccacgtcgtcc

SEQ ID NO: 14174 - RNA, 23 nt, synthetic construct
  misc_feature 1..23: note = Synthetic
  source 1..23: mol_type = other RNA
ggagccgcgcggccacgtcgtcc

SEQ ID NO: 14175 - RNA, 24 nt, synthetic construct
  misc_feature 1..24: note = Synthetic
  source 1..24: mol_type = other RNA
cggagccgcgcggccacgtcgtcc

SEQ ID NO: 14176 - RNA, 18 nt, synthetic construct
  misc_feature 1..18: note = Synthetic
  source 1..18: mol_type = other RNA
tccgcctcgaagtggtcc

SEQ ID NO: 14177 - RNA, 19 nt, synthetic construct
  misc_feature 1..19: note = Synthetic
  source 1..19: mol_type = other RNA
ctccgcctcgaagtggtcc

SEQ ID NO: 14178 - RNA, 21 nt, synthetic construct
  misc_feature 1..21: note = Synthetic
  source 1..21: mol_type = other RNA
acctccgcctcgaagtggtcc

SEQ ID NO: 14179 - RNA, 22 nt, synthetic construct
  misc_feature 1..22: note = Synthetic
  source 1..22: mol_type = other RNA
cacctccgcctcgaagtggtcc

SEQ ID NO: 14180 - RNA, 23 nt, synthetic construct
  misc_feature 1..23: note = Synthetic
  source 1..23: mol_type = other RNA
ccacctccgcctcgaagtggtcc

SEQ ID NO: 14181 - RNA, 24 nt, synthetic construct
  misc_feature 1..24: note = Synthetic
  source 1..24: mol_type = other RNA
accacctccgcctcgaagtggtcc

SEQ ID NO: 14182 - RNA, 18 nt, synthetic construct
  misc_feature 1..18: note = Synthetic
  source 1..18: mol_type = other RNA
gcggcctgctgcttgtcc

SEQ ID NO: 14183 - RNA, 19 nt, synthetic construct
  misc_feature 1..19: note = Synthetic
  source 1..19: mol_type = other RNA
ggcggcctgctgcttgtcc

SEQ ID NO: 14184 - RNA, 21 nt, synthetic construct
  misc_feature 1..21: note = Synthetic
  source 1..21: mol_type = other RNA
atggcggcctgctgcttgtcc

SEQ ID NO: 14185 - RNA, 22 nt, synthetic construct
  misc_feature 1..22: note = Synthetic
  source 1..22: mol_type = other RNA
gatggcggcctgctgcttgtcc

SEQ ID NO: 14186 - RNA, 23 nt, synthetic construct
  misc_feature 1..23: note = Synthetic
  source 1..23: mol_type = other RNA
tgatggcggcctgctgcttgtcc

SEQ ID NO: 14187 - RNA, 24 nt, synthetic construct
  misc_feature 1..24: note = Synthetic
  source 1..24: mol_type = other RNA
ttgatggcggcctgctgcttgtcc

SEQ ID NO: 14188 - RNA, 18 nt, synthetic construct
  misc_feature 1..18: note = Synthetic
  source 1..18: mol_type = other RNA
aacagctggcccaccagc

SEQ ID NO: 14189 - RNA, 19 nt, synthetic construct
  misc_feature 1..19: note = Synthetic
  source 1..19: mol_type = other RNA
aaacagctggcccaccagc

SEQ ID NO: 14190 - RNA, 21 nt, synthetic construct
  misc_feature 1..21: note = Synthetic
  source 1..21: mol_type = other RNA
aaaaacagctggcccaccagc

SEQ ID NO: 14191 - RNA, 22 nt, synthetic construct
  misc_feature 1..22: note = Synthetic
  source 1..22: mol_type = other RNA
aaaaaacagctggcccaccagc

SEQ ID NO: 14192 - RNA, 23 nt, synthetic construct
  misc_feature 1..23: note = Synthetic
  source 1..23: mol_type = other RNA
taaaaaacagctggcccaccagc

SEQ ID NO: 14193 - RNA, 24 nt, synthetic construct
  misc_feature 1..24: note = Synthetic
  source 1..24: mol_type = other RNA
ttaaaaaacagctggcccaccagc

SEQ ID NO: 14194 - RNA, 18 nt, synthetic construct
  misc_feature 1..18: note = Synthetic
  source 1..18: mol_type = other RNA
gcgggatcctcggccagc

SEQ ID NO: 14195 - RNA, 19 nt, synthetic construct
  misc_feature 1..19: note = Synthetic
  source 1..19: mol_type = other RNA
tgcgggatcctcggccagc

SEQ ID NO: 14196 - RNA, 21 nt, synthetic construct
  misc_feature 1..21: note = Synthetic
  source 1..21: mol_type = other RNA
tatgcgggatcctcggccagc

SEQ ID NO: 14197 - RNA, 22 nt, synthetic construct
  misc_feature 1..22: note = Synthetic
  source 1..22: mol_type = other RNA
gtatgcgggatcctcggccagc

SEQ ID NO: 14198 - RNA, 23 nt, synthetic construct
  misc_feature 1..23: note = Synthetic
  source 1..23: mol_type = other RNA
cgtatgcgggatcctcggccagc

SEQ ID NO: 14199 - RNA, 24 nt, synthetic construct
  misc_feature 1..24: note = Synthetic
  source 1..24: mol_type = other RNA
gcgtatgcgggatcctcggccagc

SEQ ID NO: 14200 - RNA, 18 nt, synthetic construct
  misc_feature 1..18: note = Synthetic
  source 1..18: mol_type = other RNA
tccgtcagcttggccagc

SEQ ID NO: 14201 - RNA, 19 nt, synthetic construct
  misc_feature 1..19: note = Synthetic
  source 1..19: mol_type = other RNA
gtccgtcagcttggccagc

SEQ ID NO: 14202 - RNA, 21 nt, synthetic construct
  misc_feature 1..21: note = Synthetic
  source 1..21: mol_type = other RNA
atgtccgtcagcttggccagc

SEQ ID NO: 14203 - RNA, 22 nt, synthetic construct
  misc_feature 1..22: note = Synthetic
  source 1..22: mol_type = other RNA
aatgtccgtcagcttggccagc

SEQ ID NO: 14204 - RNA, 23 nt, synthetic construct
  misc_feature 1..23: note = Synthetic
  source 1..23: mol_type = other RNA
aaatgtccgtcagcttggccagc

SEQ ID NO: 14205 - RNA, 24 nt, synthetic construct
  misc_feature 1..24: note = Synthetic
  source 1..24: mol_type = other RNA
taaatgtccgtcagcttggccagc

SEQ ID NO: 14206 - RNA, 18 nt, synthetic construct
  misc_feature 1..18: note = Synthetic
  source 1..18: mol_type = other RNA
cggcgttgagcttgtagc

SEQ ID NO: 14207 - RNA, 19 nt, synthetic construct
  misc_feature 1..19: note = Synthetic
  source 1..19: mol_type = other RNA
acggcgttgagcttgtagc

SEQ ID NO: 14208 - RNA, 21 nt, synthetic construct
  misc_feature 1..21: note = Synthetic
  source 1..21: mol_type = other RNA
ccacggcgttgagcttgtagc

SEQ ID NO: 14209 - RNA, 22 nt, synthetic construct
  misc_feature 1..22: note = Synthetic
  source 1..22: mol_type = other RNA
gccacggcgttgagcttgtagc

SEQ ID NO: 14210 - RNA, 23 nt, synthetic construct
  misc_feature 1..23: note = Synthetic
  source 1..23: mol_type = other RNA
ggccacggcgttgagcttgtagc

SEQ ID NO: 14211 - RNA, 24 nt, synthetic construct
  misc_feature 1..24: note = Synthetic
  source 1..24: mol_type = other RNA
cggccacggcgttgagcttgtagc

SEQ ID NO: 14212 - RNA, 18 nt, synthetic construct
  misc_feature 1..18: note = Synthetic
  source 1..18: mol_type = other RNA
cgggctgcggccggacgc

SEQ ID NO: 14213 - RNA, 19 nt, synthetic construct
  misc_feature 1..19: note = Synthetic
  source 1..19: mol_type = other RNA
ccgggctgcggccggacgc

SEQ ID NO: 14214 - RNA, 21 nt, synthetic construct
  misc_feature 1..21: note = Synthetic
  source 1..21: mol_type = other RNA
tcccgggctgcggccggacgc

SEQ ID NO: 14215 - RNA, 22 nt, synthetic construct
  misc_feature 1..22: note = Synthetic
  source 1..22: mol_type = other RNA
ctcccgggctgcggccggacgc

SEQ ID NO: 14216 - RNA, 23 nt, synthetic construct
  misc_feature 1..23: note = Synthetic
  source 1..23: mol_type = other RNA
cctcccgggctgcggccggacgc

SEQ ID NO: 14217 - RNA, 24 nt, synthetic construct
  misc_feature 1..24: note = Synthetic
  source 1..24: mol_type = other RNA
tcctcccgggctgcggccggacgc

SEQ ID NO: 14218 - RNA, 18 nt, synthetic construct
  misc_feature 1..18: note = Synthetic
  source 1..18: mol_type = other RNA
atggcgagccagtcccgc

SEQ ID NO: 14219 - RNA, 19 nt, synthetic construct
  misc_feature 1..19: note = Synthetic
  source 1..19: mol_type = other RNA
catggcgagccagtcccgc

SEQ ID NO: 14220 - RNA, 21 nt, synthetic construct
  misc_feature 1..21: note = Synthetic
  source 1..21: mol_type = other RNA
cgcatggcgagccagtcccgc

SEQ ID NO: 14221 - RNA, 22 nt, synthetic construct
  misc_feature 1..22: note = Synthetic
  source 1..22: mol_type = other RNA
tcgcatggcgagccagtcccgc

SEQ ID NO: 14222 - RNA, 23 nt, synthetic construct
  misc_feature 1..23: note = Synthetic
  source 1..23: mol_type = other RNA
ttcgcatggcgagccagtcccgc

SEQ ID NO: 14223 - RNA, 24 nt, synthetic construct
  misc_feature 1..24: note = Synthetic
  source 1..24: mol_type = other RNA
tttcgcatggcgagccagtcccgc

SEQ ID NO: 14224 - RNA, 18 nt, synthetic construct
  misc_feature 1..18: note = Synthetic
  source 1..18: mol_type = other RNA
cggggagggcagggccgc

SEQ ID NO: 14225 - RNA, 19 nt, synthetic construct
  misc_feature 1..19: note = Synthetic
  source 1..19: mol_type = other RNA
ccggggagggcagggccgc

SEQ ID NO: 14226 - RNA, 21 nt, synthetic construct
  misc_feature 1..21: note = Synthetic
  source 1..21: mol_type = other RNA
ggccggggagggcagggccgc

SEQ ID NO: 14227 - RNA, 22 nt, synthetic construct
  misc_feature 1..22: note = Synthetic
  source 1..22: mol_type = other RNA
tggccggggagggcagggccgc

SEQ ID NO: 14228 - RNA, 23 nt, synthetic construct
  misc_feature 1..23: note = Synthetic
  source 1..23: mol_type = other RNA
ttggccggggagggcagggccgc

SEQ ID NO: 14229 - RNA, 24 nt, synthetic construct
  misc_feature 1..24: note = Synthetic
  source 1..24: mol_type = other RNA
cttggccggggagggcagggccgc

SEQ ID NO: 14230 - RNA, 18 nt, synthetic construct
  misc_feature 1..18: note = Synthetic
  source 1..18: mol_type = other RNA
tgccgcggaacgacgcgc

SEQ ID NO: 14231 - RNA, 19 nt, synthetic construct
  misc_feature 1..19: note = Synthetic
  source 1..19: mol_type = other RNA
atgccgcggaacgacgcgc

SEQ ID NO: 14232 - RNA, 21 nt, synthetic construct
  misc_feature 1..21: note = Synthetic
  source 1..21: mol_type = other RNA
agatgccgcggaacgacgcgc

SEQ ID NO: 14233 - RNA, 22 nt, synthetic construct
  misc_feature 1..22: note = Synthetic
  source 1..22: mol_type = other RNA
gagatgccgcggaacgacgcgc

SEQ ID NO: 14234 - RNA, 23 nt, synthetic construct
  misc_feature 1..23: note = Synthetic
  source 1..23: mol_type = other RNA
ggagatgccgcggaacgacgcgc

SEQ ID NO: 14235 - RNA, 24 nt, synthetic construct
  misc_feature 1..24: note = Synthetic
  source 1..24: mol_type = other RNA
cggagatgccgcggaacgacgcgc

SEQ ID NO: 14236 - RNA, 18 nt, synthetic construct
  misc_feature 1..18: note = Synthetic
  source 1..18: mol_type = other RNA
ggggcagaaacagcgcgc

SEQ ID NO: 14237 - RNA, 19 nt, synthetic construct
  misc_feature 1..19: note = Synthetic
  source 1..19: mol_type = other RNA
gggggcagaaacagcgcgc

SEQ ID NO: 14238 - RNA, 21 nt, synthetic construct
  misc_feature 1..21: note = Synthetic
  source 1..21: mol_type = other RNA
tggggggcagaaacagcgcgc

SEQ ID NO: 14239 - RNA, 22 nt, synthetic construct
  misc_feature 1..22: note = Synthetic
  source 1..22: mol_type = other RNA
atggggggcagaaacagcgcgc

SEQ ID NO: 14240 - RNA, 23 nt, synthetic construct
  misc_feature 1..23: note = Synthetic
  source 1..23: mol_type = other RNA
gatggggggcagaaacagcgcgc

SEQ ID NO: 14241 - RNA, 24 nt, synthetic construct
  misc_feature 1..24: note = Synthetic
  source 1..24: mol_type = other RNA
tgatggggggcagaaacagcgcgc

SEQ ID NO: 14242 - RNA, 18 nt, synthetic construct
  misc_feature 1..18: note = Synthetic
  source 1..18: mol_type = other RNA
gaaggccgcccagcgcgc

SEQ ID NO: 14243 - RNA, 19 nt, synthetic construct
  misc_feature 1..19: note = Synthetic
  source 1..19: mol_type = other RNA
cgaaggccgcccagcgcgc

SEQ ID NO: 14244 - RNA, 21 nt, synthetic construct
  misc_feature 1..21: note = Synthetic
  source 1..21: mol_type = other RNA
ttcgaaggccgcccagcgcgc

SEQ ID NO: 14245 - RNA, 22 nt, synthetic construct
  misc_feature 1..22: note = Synthetic
  source 1..22: mol_type = other RNA
gttcgaaggccgcccagcgcgc

SEQ ID NO: 14246 - RNA, 23 nt, synthetic construct
  misc_feature 1..23: note = Synthetic
  source 1..23: mol_type = other RNA
tgttcgaaggccgcccagcgcgc

SEQ ID NO: 14247 - RNA, 24 nt, synthetic construct
  misc_feature 1..24: note = Synthetic
  source 1..24: mol_type = other RNA
ctgttcgaaggccgcccagcgcgc

SEQ ID NO: 14248 - RNA, 18 nt, synthetic construct
  misc_feature 1..18: note = Synthetic
  source 1..18: mol_type = other RNA
tccccgtagatgatgcgc

SEQ ID NO: 14249 - RNA, 19 nt, synthetic construct
  misc_feature 1..19: note = Synthetic
  source 1..19: mol_type = other RNA
gtccccgtagatgatgcgc

SEQ ID NO: 14250 - RNA, 21 nt, synthetic construct
  misc_feature 1..21: note = Synthetic
  source 1..21: mol_type = other RNA
gtgtccccgtagatgatgcgc

SEQ ID NO: 14251 - RNA, 22 nt, synthetic construct
  misc_feature 1..22: note = Synthetic
  source 1..22: mol_type = other RNA
cgtgtccccgtagatgatgcgc

SEQ ID NO: 14252 - RNA, 23 nt, synthetic construct
  misc_feature 1..23: note = Synthetic
  source 1..23: mol_type = other RNA
ccgtgtccccgtagatgatgcgc

SEQ ID NO: 14253 - RNA, 24 nt, synthetic construct
  misc_feature 1..24: note = Synthetic
  source 1..24: mol_type = other RNA
tccgtgtccccgtagatgatgcgc

SEQ ID NO: 14254 - RNA, 18 nt, synthetic construct
  misc_feature 1..18: note = Synthetic
  source 1..18: mol_type = other RNA
gggattcggggaggtcgc

SEQ ID NO: 14255 - RNA, 19 nt, synthetic construct
  misc_feature 1..19: note = Synthetic
  source 1..19: mol_type = other RNA
tgggattcggggaggtcgc

SEQ ID NO: 14256 - RNA, 21 nt, synthetic construct
  misc_feature 1..21: note = Synthetic
  source 1..21: mol_type = other RNA
ggtgggattcggggaggtcgc

SEQ ID NO: 14257 - RNA, 22 nt, synthetic construct
  misc_feature 1..22: note = Synthetic
  source 1..22: mol_type = other RNA
aggtgggattcggggaggtcgc

SEQ ID NO: 14258 - RNA, 23 nt, synthetic construct
  misc_feature 1..23: note = Synthetic
  source 1..23: mol_type = other RNA
caggtgggattcggggaggtcgc

SEQ ID NO: 14259 - RNA, 24 nt, synthetic construct
  misc_feature 1..24: note = Synthetic
  source 1..24: mol_type = other RNA
tcaggtgggattcggggaggtcgc

SEQ ID NO: 14260 - RNA, 18 nt, synthetic construct
  misc_feature 1..18: note = Synthetic
  source 1..18: mol_type = other RNA
cgcctccgggaaatcggc

SEQ ID NO: 14261 - RNA, 19 nt, synthetic construct
  misc_feature 1..19: note = Synthetic
  source 1..19: mol_type = other RNA
ccgcctccgggaaatcggc

SEQ ID NO: 14262 - RNA, 21 nt, synthetic construct
  misc_feature 1..21: note = Synthetic
  source 1..21: mol_type = other RNA
ggccgcctccgggaaatcggc

SEQ ID NO: 14263 - RNA, 22 nt, synthetic construct
  misc_feature 1..22: note = Synthetic
  source 1..22: mol_type = other RNA
cggccgcctccgggaaatcggc

SEQ ID NO: 14264 - RNA, 23 nt, synthetic construct
  misc_feature 1..23: note = Synthetic
  source 1..23: mol_type = other RNA
tcggccgcctccgggaaatcggc

SEQ ID NO: 14265 - RNA, 24 nt, synthetic construct
  misc_feature 1..24: note = Synthetic
  source 1..24: mol_type = other RNA
gtcggccgcctccgggaaatcggc

SEQ ID NO: 14266 - RNA, 18 nt, synthetic construct
  misc_feature 1..18: note = Synthetic
  source 1..18: mol_type = other RNA
atgcgcatggaatagggc

SEQ ID NO: 14267 - RNA, 19 nt, synthetic construct
  misc_feature 1..19: note = Synthetic
  source 1..19: mol_type = other RNA
gatgcgcatggaatagggc

SEQ ID NO: 14268 - RNA, 21 nt, synthetic construct
  misc_feature 1..21: note = Synthetic
  source 1..21: mol_type = other RNA
atgatgcgcatggaatagggc

SEQ ID NO: 14269 - RNA, 22 nt, synthetic construct
  misc_feature 1..22: note = Synthetic
  source 1..22: mol_type = other RNA
gatgatgcgcatggaatagggc

SEQ ID NO: 14270 - RNA, 23 nt, synthetic construct
  misc_feature 1..23: note = Synthetic
  source 1..23: mol_type = other RNA
agatgatgcgcatggaatagggc

SEQ ID NO: 14271 - RNA, 24 nt, synthetic construct
  misc_feature 1..24: note = Synthetic
  source 1..24: mol_type = other RNA
tagatgatgcgcatggaatagggc

SEQ ID NO: 14272 - RNA, 18 nt, synthetic construct
  misc_feature 1..18: note = Synthetic
  source 1..18: mol_type = other RNA
aattccagaaccacgggc

SEQ ID NO: 14273 - RNA, 19 nt, synthetic construct
  misc_feature 1..19: note = Synthetic
  source 1..19: mol_type = other RNA
gaattccagaaccacgggc

SEQ ID NO: 14274 - RNA, 21 nt, synthetic construct
  misc_feature 1..21: note = Synthetic
  source 1..21: mol_type = other RNA
tcgaattccagaaccacgggc

SEQ ID NO: 14275 - RNA, 22 nt, synthetic construct
  misc_feature 1..22: note = Synthetic
  source 1..22: mol_type = other RNA
gtcgaattccagaaccacgggc

SEQ ID NO: 14276 - RNA, 23 nt, synthetic construct
  misc_feature 1..23: note = Synthetic
  source 1..23: mol_type = other RNA
tgtcgaattccagaaccacgggc

SEQ ID NO: 14277 - RNA, 24 nt, synthetic construct
  misc_feature 1..24: note = Synthetic
  source 1..24: mol_type = other RNA
ctgtcgaattccagaaccacgggc

SEQ ID NO: 14278 - RNA, 18 nt, synthetic construct
  misc_feature 1..18: note = Synthetic
  source 1..18: mol_type = other RNA
accagcagcttgcggggc

SEQ ID NO: 14279 - RNA, 19 nt, synthetic construct
  misc_feature 1..19: note = Synthetic
  source 1..19: mol_type = other RNA
caccagcagcttgcggggc

SEQ ID NO: 14280 - RNA, 21 nt, synthetic construct
  misc_feature 1..21: note = Synthetic
  source 1..21: mol_type = other RNA
gacaccagcagcttgcggggc

SEQ ID NO: 14281 - RNA, 22 nt, synthetic construct
  misc_feature 1..22: note = Synthetic
  source 1..22: mol_type = other RNA
ggacaccagcagcttgcggggc

SEQ ID NO: 14282 - RNA, 23 nt, synthetic construct
  misc_feature 1..23: note = Synthetic
  source 1..23: mol_type = other RNA
cggacaccagcagcttgcggggc

SEQ ID NO: 14283 - RNA, 24 nt, synthetic construct
  misc_feature 1..24: note = Synthetic
  source 1..24: mol_type = other RNA
tcggacaccagcagcttgcggggc

SEQ ID NO: 14284 - RNA, 18 nt, synthetic construct
  misc_feature 1..18: note = Synthetic
  source 1..18: mol_type = other RNA
ctcccgggggcgcttggc

SEQ ID NO: 14285 - RNA, 19 nt, synthetic construct
  misc_feature 1..19: note = Synthetic
  source 1..19: mol_type = other RNA
tctcccgggggcgcttggc

SEQ ID NO: 14286 - RNA, 21 nt, synthetic construct
  misc_feature 1..21: note = Synthetic
  source 1..21: mol_type = other RNA
cgtctcccgggggcgcttggc

SEQ ID NO: 14287 - RNA, 22 nt, synthetic construct
  misc_feature 1..22: note = Synthetic
  source 1..22: mol_type = other RNA
gcgtctcccgggggcgcttggc

SEQ ID NO: 14288 - RNA, 23 nt, synthetic construct
  misc_feature 1..23: note = Synthetic
  source 1..23: mol_type = other RNA
ggcgtctcccgggggcgcttggc

SEQ ID NO: 14289 - RNA, 24 nt, synthetic construct
  misc_feature 1..24: note = Synthetic
  source 1..24: mol_type = other RNA
cggcgtctcccgggggcgcttggc

SEQ ID NO: 14290 - RNA, 18 nt, synthetic construct
  misc_feature 1..18: note = Synthetic
  source 1..18: mol_type = other RNA
ccgatcaccccgcgttgc

SEQ ID NO: 14291 - RNA, 19 nt, synthetic construct
  misc_feature 1..19: note = Synthetic
  source 1..19: mol_type = other RNA
gccgatcaccccgcgttgc

SEQ ID NO: 14292 - RNA, 21 nt, synthetic construct
  misc_feature 1..21: note = Synthetic
  source 1..21: mol_type = other RNA
tcgccgatcaccccgcgttgc

SEQ ID NO: 14293 - RNA, 22 nt, synthetic construct
  misc_feature 1..22: note = Synthetic
  source 1..22: mol_type = other RNA
ctcgccgatcaccccgcgttgc

SEQ ID NO: 14294 - RNA, 23 nt, synthetic construct
  misc_feature 1..23: note = Synthetic
  source 1..23: mol_type = other RNA
actcgccgatcaccccgcgttgc

SEQ ID NO: 14295 - RNA, 24 nt, synthetic construct
  misc_feature 1..24: note = Synthetic
  source 1..24: mol_type = other RNA
tactcgccgatcaccccgcgttgc

SEQ ID NO: 14296 - RNA, 18 nt, synthetic construct
  misc_feature 1..18: note = Synthetic
  source 1..18: mol_type = other RNA
gccactgcgtcggccctc

SEQ ID NO: 14297 - RNA, 19 nt, synthetic construct
  misc_feature 1..19: note = Synthetic
  source 1..19: mol_type = other RNA
cgccactgcgtcggccctc

SEQ ID NO: 14298 - RNA, 21 nt, synthetic construct
  misc_feature 1..21: note = Synthetic
  source 1..21: mol_type = other RNA
tgcgccactgcgtcggccctc

SEQ ID NO: 14299 - RNA, 22 nt, synthetic construct
  misc_feature 1..22: note = Synthetic
  source 1..22: mol_type = other RNA
gtgcgccactgcgtcggccctc

SEQ ID NO: 14300 - RNA, 23 nt, synthetic construct
  misc_feature 1..23: note = Synthetic
  source 1..23: mol_type = other RNA
ggtgcgccactgcgtcggccctc

SEQ ID NO: 14301 - RNA, 24 nt, synthetic construct
  misc_feature 1..24: note = Synthetic
  source 1..24: mol_type = other RNA
aggtgcgccactgcgtcggccctc

SEQ ID NO: 14302 - RNA, 18 nt, synthetic construct
  misc_feature 1..18: note = Synthetic
  source 1..18: mol_type = other RNA
gcgcatgtcggccgcctc

SEQ ID NO: 14303 - RNA, 19 nt, synthetic construct
  misc_feature 1..19: note = Synthetic
  source 1..19: mol_type = other RNA
cgcgcatgtcggccgcctc

SEQ ID NO: 14304 - RNA, 21 nt, synthetic construct
  misc_feature 1..21: note = Synthetic
  source 1..21: mol_type = other RNA
ggcgcgcatgtcggccgcctc

SEQ ID NO: 14305 - RNA, 22 nt, synthetic construct
  misc_feature 1..22: note = Synthetic
  source 1..22: mol_type = other RNA
gggcgcgcatgtcggccgcctc

SEQ ID NO: 14306 - RNA, 23 nt, synthetic construct
  misc_feature 1..23: note = Synthetic
  source 1..23: mol_type = other RNA
ggggcgcgcatgtcggccgcctc

SEQ ID NO: 14307 - RNA, 24 nt, synthetic construct
  misc_feature 1..24: note = Synthetic
  source 1..24: mol_type = other RNA
gggggcgcgcatgtcggccgcctc

SEQ ID NO: 14308 - RNA, 18 nt, synthetic construct
  misc_feature 1..18: note = Synthetic
  source 1..18: mol_type = other RNA
ggggcttggacgcgcctc

SEQ ID NO: 14309 - RNA, 19 nt, synthetic construct
  misc_feature 1..19: note = Synthetic
  source 1..19: mol_type = other RNA
cggggcttggacgcgcctc

SEQ ID NO: 14310 - RNA, 21 nt, synthetic construct
  misc_feature 1..21: note = Synthetic
  source 1..21: mol_type = other RNA
tgcggggcttggacgcgcctc

SEQ ID NO: 14311 - RNA, 22 nt, synthetic construct
  misc_feature 1..22: note = Synthetic
  source 1..22: mol_type = other RNA
ttgcggggcttggacgcgcctc

SEQ ID NO: 14312 - RNA, 23 nt, synthetic construct
  misc_feature 1..23: note = Synthetic
  source 1..23: mol_type = other RNA
cttgcggggcttggacgcgcctc

SEQ ID NO: 14313 - RNA, 24 nt, synthetic construct
  misc_feature 1..24: note = Synthetic
  source 1..24: mol_type = other RNA
gcttgcggggcttggacgcgcctc

SEQ ID NO: 14314 - RNA, 18 nt, synthetic construct
  misc_feature 1..18: note = Synthetic
  source 1..18: mol_type = other RNA
tggccgctcctcgtcctc

SEQ ID NO: 14315 - RNA, 19 nt, synthetic construct
  misc_feature 1..19: note = Synthetic
  source 1..19: mol_type = other RNA
ctggccgctcctcgtcctc

SEQ ID NO: 14316 - RNA, 21 nt, synthetic construct
  misc_feature 1..21: note = Synthetic
  source 1..21: mol_type = other RNA
ctctggccgctcctcgtcctc

SEQ ID NO: 14317 - RNA, 22 nt, synthetic construct
  misc_feature 1..22: note = Synthetic
  source 1..22: mol_type = other RNA
cctctggccgctcctcgtcctc

SEQ ID NO: 14318 - RNA, 23 nt, synthetic construct
  misc_feature 1..23: note = Synthetic
  source 1..23: mol_type = other RNA
tcctctggccgctcctcgtcctc

SEQ ID NO: 14319 - RNA, 24 nt, synthetic construct
  misc_feature 1..24: note = Synthetic
  source 1..24: mol_type = other RNA
ctcctctggccgctcctcgtcctc

SEQ ID NO: 14320 - RNA, 18 nt, synthetic construct
  misc_feature 1..18: note = Synthetic
  source 1..18: mol_type = other RNA
ggcggcggcgtctagctc

SEQ ID NO: 14321 - RNA, 19 nt, synthetic construct
  misc_feature 1..19: note = Synthetic
  source 1..19: mol_type = other RNA
gggcggcggcgtctagctc

SEQ ID NO: 14322 - RNA, 21 nt, synthetic construct
  misc_feature 1..21: note = Synthetic
  source 1..21: mol_type = other RNA
tggggcggcggcgtctagctc

SEQ ID NO: 14323 - RNA, 22 nt, synthetic construct
  misc_feature 1..22: note = Synthetic
  source 1..22: mol_type = other RNA
ctggggcggcggcgtctagctc

SEQ ID NO: 14324 - RNA, 23 nt, synthetic construct
  misc_feature 1..23: note = Synthetic
  source 1..23: mol_type = other RNA
cctggggcggcggcgtctagctc

SEQ ID NO: 14325 - RNA, 24 nt, synthetic construct
  misc_feature 1..24: note = Synthetic
  source 1..24: mol_type = other RNA
ccctggggcggcggcgtctagctc

SEQ ID NO: 14326 - RNA, 18 nt, synthetic construct
  misc_feature 1..18: note = Synthetic
  source 1..18: mol_type = other RNA
gcgttgagcttgtagctc

SEQ ID NO: 14327 - RNA, 19 nt, synthetic construct
  misc_feature 1..19: note = Synthetic
  source 1..19: mol_type = other RNA
ggcgttgagcttgtagctc

SEQ ID NO: 14328 - RNA, 21 nt, synthetic construct
  misc_feature 1..21: note = Synthetic
  source 1..21: mol_type = other RNA
acggcgttgagcttgtagctc

SEQ ID NO: 14329 - RNA, 22 nt, synthetic construct
  misc_feature 1..22: note = Synthetic
  source 1..22: mol_type = other RNA
cacggcgttgagcttgtagctc

SEQ ID NO: 14330 - RNA, 23 nt, synthetic construct
  misc_feature 1..23: note = Synthetic
  source 1..23: mol_type = other RNA
ccacggcgttgagcttgtagctc

SEQ ID NO: 14331 - RNA, 24 nt, synthetic construct
  misc_feature 1..24: note = Synthetic
  source 1..24: mol_type = other RNA
gccacggcgttgagcttgtagctc

SEQ ID NO: 14332 - RNA, 18 nt, synthetic construct
  misc_feature 1..18: note = Synthetic
  source 1..18: mol_type = other RNA
ctaacgcggcggccgctc

SEQ ID NO: 14333 - RNA, 19 nt, synthetic construct
  misc_feature 1..19: note = Synthetic
  source 1..19: mol_type = other RNA
gctaacgcggcggccgctc

SEQ ID NO: 14334 - RNA, 21 nt, synthetic construct
  misc_feature 1..21: note = Synthetic
  source 1..21: mol_type = other RNA
cggctaacgcggcggccgctc

SEQ ID NO: 14335 - RNA, 22 nt, synthetic construct
  misc_feature 1..22: note = Synthetic
  source 1..22: mol_type = other RNA
tcggctaacgcggcggccgctc

SEQ ID NO: 14336 - RNA, 23 nt, synthetic construct
  misc_feature 1..23: note = Synthetic
  source 1..23: mol_type = other RNA
ctcggctaacgcggcggccgctc

SEQ ID NO: 14337 - RNA, 24 nt, synthetic construct
  misc_feature 1..24: note = Synthetic
  source 1..24: mol_type = other RNA
gctcggctaacgcggcggccgctc

SEQ ID NO: 14338 - RNA, 18 nt, synthetic construct
  misc_feature 1..18: note = Synthetic
  source 1..18: mol_type = other RNA
gcctcctcggggctgctc

SEQ ID NO: 14339 - RNA, 19 nt, synthetic construct
  misc_feature 1..19: note = Synthetic
  source 1..19: mol_type = other RNA
ggcctcctcggggctgctc

SEQ ID NO: 14340 - RNA, 21 nt, synthetic construct
  misc_feature 1..21: note = Synthetic
  source 1..21: mol_type = other RNA
acggcctcctcggggctgctc

SEQ ID NO: 14341 - RNA, 22 nt, synthetic construct
  misc_feature 1..22: note = Synthetic
  source 1..22: mol_type = other RNA
cacggcctcctcggggctgctc

SEQ ID NO: 14342 - RNA, 23 nt, synthetic construct
  misc_feature 1..23: note = Synthetic
  source 1..23: mol_type = other RNA
gcacggcctcctcggggctgctc

SEQ ID NO: 14343 - RNA, 24 nt, synthetic construct
  misc_feature 1..24: note = Synthetic
  source 1..24: mol_type = other RNA
agcacggcctcctcggggctgctc

SEQ ID NO: 14344 - RNA, 18 nt, synthetic construct
  misc_feature 1..18: note = Synthetic
  source 1..18: mol_type = other RNA
aaacaggaggacgtgctc

SEQ ID NO: 14345 - RNA, 19 nt, synthetic construct
  misc_feature 1..19: note = Synthetic
  source 1..19: mol_type = other RNA
aaaacaggaggacgtgctc

SEQ ID NO: 14346 - RNA, 21 nt, synthetic construct
  misc_feature 1..21: note = Synthetic
  source 1..21: mol_type = other RNA
cgaaaacaggaggacgtgctc

SEQ ID NO: 14347 - RNA, 22 nt, synthetic construct
  misc_feature 1..22: note = Synthetic
  source 1..22: mol_type = other RNA
gcgaaaacaggaggacgtgctc

SEQ ID NO: 14348 - RNA, 23 nt, synthetic construct
  misc_feature 1..23: note = Synthetic
  source 1..23: mol_type = other RNA
agcgaaaacaggaggacgtgctc

SEQ ID NO: 14349 - RNA, 24 nt, synthetic construct
  misc_feature 1..24: note = Synthetic
  source 1..24: mol_type = other RNA
gagcgaaaacaggaggacgtgctc

SEQ ID NO: 14350 - RNA, 18 nt, synthetic construct
  misc_feature 1..18: note = Synthetic
  source 1..18: mol_type = other RNA
tgcgctcgcagagatctc

SEQ ID NO: 14351 - RNA, 19 nt, synthetic construct
  misc_feature 1..19: note = Synthetic
  source 1..19: mol_type = other RNA
atgcgctcgcagagatctc

SEQ ID NO: 14352 - RNA, 21 nt, synthetic construct
  misc_feature 1..21: note = Synthetic
  source 1..21: mol_type = other RNA
ccatgcgctcgcagagatctc

SEQ ID NO: 14353 - RNA, 22 nt, synthetic construct
  misc_feature 1..22: note = Synthetic
  source 1..22: mol_type = other RNA
gccatgcgctcgcagagatctc

SEQ ID NO: 14354 - RNA, 23 nt, synthetic construct
  misc_feature 1..23: note = Synthetic
  source 1..23: mol_type = other RNA
ggccatgcgctcgcagagatctc

SEQ ID NO: 14355 - RNA, 24 nt, synthetic construct
  misc_feature 1..24: note = Synthetic
  source 1..24: mol_type = other RNA
cggccatgcgctcgcagagatctc

SEQ ID NO: 14356 - RNA, 18 nt, synthetic construct
  misc_feature 1..18: note = Synthetic
  source 1..18: mol_type = other RNA
ggcaggcgacggcgtctc

SEQ ID NO: 14357 - RNA, 19 nt, synthetic construct
  misc_feature 1..19: note = Synthetic
  source 1..19: mol_type = other RNA
cggcaggcgacggcgtctc

SEQ ID NO: 14358 - RNA, 21 nt, synthetic construct
  misc_feature 1..21: note = Synthetic
  source 1..21: mol_type = other RNA
gtcggcaggcgacggcgtctc

SEQ ID NO: 14359 - RNA, 22 nt, synthetic construct
  misc_feature 1..22: note = Synthetic
  source 1..22: mol_type = other RNA
ggtcggcaggcgacggcgtctc

SEQ ID NO: 14360 - RNA, 23 nt, synthetic construct
  misc_feature 1..23: note = Synthetic
  source 1..23: mol_type = other RNA
gggtcggcaggcgacggcgtctc

SEQ ID NO: 14361 - RNA, 24 nt, synthetic construct
  misc_feature 1..24: note = Synthetic
  source 1..24: mol_type = other RNA
ggggtcggcaggcgacggcgtctc

SEQ ID NO: 14362 - RNA, 18 nt, synthetic construct
  misc_feature 1..18: note = Synthetic
  source 1..18: mol_type = other RNA
catgcggccgtacccgtc

SEQ ID NO: 14363 - RNA, 19 nt, synthetic construct
  misc_feature 1..19: note = Synthetic
  source 1..19: mol_type = other RNA
tcatgcggccgtacccgtc

SEQ ID NO: 14364 - RNA, 21 nt, synthetic construct
  misc_feature 1..21: note = Synthetic
  source 1..21: mol_type = other RNA
gttcatgcggccgtacccgtc

SEQ ID NO: 14365 - RNA, 22 nt, synthetic construct
  misc_feature 1..22: note = Synthetic
  source 1..22: mol_type = other RNA
cgttcatgcggccgtacccgtc

SEQ ID NO: 14366 - RNA, 23 nt, synthetic construct
  misc_feature 1..23: note = Synthetic
  source 1..23: mol_type = other RNA
ccgttcatgcggccgtacccgtc

SEQ ID NO: 14367 - RNA, 24 nt, synthetic construct
  misc_feature 1..24: note = Synthetic
  source 1..24: mol_type = other RNA
gccgttcatgcggccgtacccgtc

SEQ ID NO: 14368 - RNA, 18 nt, synthetic construct
  misc_feature 1..18: note = Synthetic
  source 1..18: mol_type = other RNA
ccgcgcggccacgtcgtc

SEQ ID NO: 14369 - RNA, 19 nt, synthetic construct
  misc_feature 1..19: note = Synthetic
  source 1..19: mol_type = other RNA
gccgcgcggccacgtcgtc

SEQ ID NO: 14370 - RNA, 21 nt, synthetic construct
  misc_feature 1..21: note = Synthetic
  source 1..21: mol_type = other RNA
gagccgcgcggccacgtcgtc

SEQ ID NO: 14371 - RNA, 22 nt, synthetic construct
  misc_feature 1..22: note = Synthetic
  source 1..22: mol_type = other RNA
ggagccgcgcggccacgtcgtc

SEQ ID NO: 14372 - RNA, 23 nt, synthetic construct
  misc_feature 1..23: note = Synthetic
  source 1..23: mol_type = other RNA
cggagccgcgcggccacgtcgtc

SEQ ID NO: 14373 - RNA, 24 nt, synthetic construct
  misc_feature 1..24: note = Synthetic
  source 1..24: mol_type = other RNA
ccggagccgcgcggccacgtcgtc

SEQ ID NO: 14374 - RNA, 18 nt, synthetic construct
  misc_feature 1..18: note = Synthetic
  source 1..18: mol_type = other RNA
atgatgttgtacccggtc

SEQ ID NO: 14375 - RNA, 19 nt, synthetic construct
  misc_feature 1..19: note = Synthetic
  source 1..19: mol_type = other RNA
gatgatgttgtacccggtc

SEQ ID NO: 14376 - RNA, 21 nt, synthetic construct
  misc_feature 1..21: note = Synthetic
  source 1..21: mol_type = other RNA
ttgatgatgttgtacccggtc

SEQ ID NO: 14377 - RNA, 22 nt, synthetic construct
  misc_feature 1..22: note = Synthetic
  source 1..22: mol_type = other RNA
gttgatgatgttgtacccggtc

SEQ ID NO: 14378 - RNA, 23 nt, synthetic construct
  misc_feature 1..23: note = Synthetic
  source 1..23: mol_type = other RNA
agttgatgatgttgtacccggtc

SEQ ID NO: 14379 - RNA, 24 nt, synthetic construct
  misc_feature 1..24: note = Synthetic
  source 1..24: mol_type = other RNA
aagttgatgatgttgtacccggtc

SEQ ID NO: 14380 - RNA, 18 nt, synthetic construct
  misc_feature 1..18: note = Synthetic
  source 1..18: mol_type = other RNA
gccccgaaccctgcggtc

SEQ ID NO: 14381 - RNA, 19 nt, synthetic construct
  misc_feature 1..19: note = Synthetic
  source 1..19: mol_type = other RNA
cgccccgaaccctgcggtc

SEQ ID NO: 14382 - RNA, 21 nt, synthetic construct
  misc_feature 1..21: note = Synthetic
  source 1..21: mol_type = other RNA
accgccccgaaccctgcggtc

SEQ ID NO: 14383 - RNA, 22 nt, synthetic construct
  misc_feature 1..22: note = Synthetic
  source 1..22: mol_type = other RNA
caccgccccgaaccctgcggtc

SEQ ID NO: 14384 - RNA, 23 nt, synthetic construct
  misc_feature 1..23: note = Synthetic
  source 1..23: mol_type = other RNA
ccaccgccccgaaccctgcggtc

SEQ ID NO: 14385 - RNA, 24 nt, synthetic construct
  misc_feature 1..24: note = Synthetic
  source 1..24: mol_type = other RNA
cccaccgccccgaaccctgcggtc

SEQ ID NO: 14386 - RNA, 18 nt, synthetic construct
  misc_feature 1..18: note = Synthetic
  source 1..18: mol_type = other RNA
tactgtttcacaagggtc

SEQ ID NO: 14387 - RNA, 19 nt, synthetic construct
  misc_feature 1..19: note = Synthetic
  source 1..19: mol_type = other RNA
gtactgtttcacaagggtc

SEQ ID NO: 14388 - RNA, 21 nt, synthetic construct
  misc_feature 1..21: note = Synthetic
  source 1..21: mol_type = other RNA
ccgtactgtttcacaagggtc

SEQ ID NO: 14389 - RNA, 22 nt, synthetic construct
  misc_feature 1..22: note = Synthetic
  source 1..22: mol_type = other RNA
gccgtactgtttcacaagggtc

SEQ ID NO: 14390 - RNA, 23 nt, synthetic construct
  misc_feature 1..23: note = Synthetic
  source 1..23: mol_type = other RNA
ggccgtactgtttcacaagggtc

SEQ ID NO: 14391 - RNA, 24 nt, synthetic construct
  misc_feature 1..24: note = Synthetic
  source 1..24: mol_type = other RNA
gggccgtactgtttcacaagggtc

SEQ ID NO: 14392 - RNA, 18 nt, synthetic construct
  misc_feature 1..18: note = Synthetic
  source 1..18: mol_type = other RNA
tggacgtactcgcgggtc

SEQ ID NO: 14393 - RNA, 19 nt, synthetic construct
  misc_feature 1..19: note = Synthetic
  source 1..19: mol_type = other RNA
gtggacgtactcgcgggtc

SEQ ID NO: 14394 - RNA, 21 nt, synthetic construct
  misc_feature 1..21: note = Synthetic
  source 1..21: mol_type = other RNA
gcgtggacgtactcgcgggtc

SEQ ID NO: 14395 - RNA, 22 nt, synthetic construct
  misc_feature 1..22: note = Synthetic
  source 1..22: mol_type = other RNA
cgcgtggacgtactcgcgggtc

SEQ ID NO: 14396 - RNA, 23 nt, synthetic construct
  misc_feature 1..23: note = Synthetic
  source 1..23: mol_type = other RNA
gcgcgtggacgtactcgcgggtc

SEQ ID NO: 14397 - RNA, 24 nt, synthetic construct
  misc_feature 1..24: note = Synthetic
  source 1..24: mol_type = other RNA
cgcgcgtggacgtactcgcgggtc

SEQ ID NO: 14398 - RNA, 18 nt, synthetic construct
  misc_feature 1..18: note = Synthetic
  source 1..18: mol_type = other RNA
aaacccggaagtggggtc

SEQ ID NO: 14399 - RNA, 19 nt, synthetic construct
  misc_feature 1..19: note = Synthetic
  source 1..19: mol_type = other RNA
gaaacccggaagtggggtc

SEQ ID NO: 14400 - RNA, 21 nt, synthetic construct
  misc_feature 1..21: note = Synthetic
  source 1..21: mol_type = other RNA
gtgaaacccggaagtggggtc

SEQ ID NO: 14401 - RNA, 22 nt, synthetic construct
  misc_feature 1..22: note = Synthetic
  source 1..22: mol_type = other RNA
cgtgaaacccggaagtggggtc

SEQ ID NO: 14402 - RNA, 23 nt, synthetic construct
  misc_feature 1..23: note = Synthetic
  source 1..23: mol_type = other RNA
acgtgaaacccggaagtggggtc

SEQ ID NO: 14403 - RNA, 24 nt, synthetic construct
  misc_feature 1..24: note = Synthetic
  source 1..24: mol_type = other RNA
cacgtgaaacccggaagtggggtc

SEQ ID NO: 14404 - RNA, 18 nt, synthetic construct
  misc_feature 1..18: note = Synthetic
  source 1..18: mol_type = other RNA
tcgacgtcgctggatgtc

SEQ ID NO: 14405 - RNA, 19 nt, synthetic construct
  misc_feature 1..19: note = Synthetic
  source 1..19: mol_type = other RNA
ctcgacgtcgctggatgtc

SEQ ID NO: 14406 - RNA, 21 nt, synthetic construct
  misc_feature 1..21: note = Synthetic
  source 1..21: mol_type = other RNA
aactcgacgtcgctggatgtc

SEQ ID NO: 14407 - RNA, 22 nt, synthetic construct
  misc_feature 1..22: note = Synthetic
  source 1..22: mol_type = other RNA
aaactcgacgtcgctggatgtc

SEQ ID NO: 14408 - RNA, 23 nt, synthetic construct
  misc_feature 1..23: note = Synthetic
  source 1..23: mol_type = other RNA
taaactcgacgtcgctggatgtc

SEQ ID NO: 14409 - RNA, 24 nt, synthetic construct
  misc_feature 1..24: note = Synthetic
  source 1..24: mol_type = other RNA
ttaaactcgacgtcgctggatgtc

SEQ ID NO: 14410 - RNA, 18 nt, synthetic construct
  misc_feature 1..18: note = Synthetic
  source 1..18: mol_type = other RNA
ggcggcctgctgcttgtc

SEQ ID NO: 14411 - RNA, 19 nt, synthetic construct
  misc_feature 1..19: note = Synthetic
  source 1..19: mol_type = other RNA
tggcggcctgctgcttgtc

SEQ ID NO: 14412 - RNA, 21 nt, synthetic construct
  misc_feature 1..21: note = Synthetic
  source 1..21: mol_type = other RNA
gatggcggcctgctgcttgtc

SEQ ID NO: 14413 - RNA, 22 nt, synthetic construct
  misc_feature 1..22: note = Synthetic
  source 1..22: mol_type = other RNA
tgatggcggcctgctgcttgtc

SEQ ID NO: 14414 - RNA, 23 nt, synthetic construct
  misc_feature 1..23: note = Synthetic
  source 1..23: mol_type = other RNA
ttgatggcggcctgctgcttgtc

SEQ ID NO: 14415 - RNA, 24 nt, synthetic construct
  misc_feature 1..24: note = Synthetic
  source 1..24: mol_type = other RNA
cttgatggcggcctgctgcttgtc

SEQ ID NO: 14416 - RNA, 18 nt, synthetic construct
  misc_feature 1..18: note = Synthetic
  source 1..18: mol_type = other RNA
gaattcgctgtcgaattc

SEQ ID NO: 14417 - RNA, 19 nt, synthetic construct
  misc_feature 1..19: note = Synthetic
  source 1..19: mol_type = other RNA
cgaattcgctgtcgaattc

SEQ ID NO: 14418 - RNA, 21 nt, synthetic construct
  misc_feature 1..21: note = Synthetic
  source 1..21: mol_type = other RNA
ctcgaattcgctgtcgaattc

SEQ ID NO: 14419 - RNA, 22 nt, synthetic construct
  misc_feature 1..22: note = Synthetic
  source 1..22: mol_type = other RNA
tctcgaattcgctgtcgaattc

SEQ ID NO: 14420 - RNA, 23 nt, synthetic construct
  misc_feature 1..23: note = Synthetic
  source 1..23: mol_type = other RNA
atctcgaattcgctgtcgaattc

SEQ ID NO: 14421 - RNA, 24 nt, synthetic construct
  misc_feature 1..24: note = Synthetic
  source 1..24: mol_type = other RNA
catctcgaattcgctgtcgaattc

SEQ ID NO: 14422 - RNA, 18 nt, synthetic construct
  misc_feature 1..18: note = Synthetic
  source 1..18: mol_type = other RNA
ctcgttcaggtgggattc

SEQ ID NO: 14423 - RNA, 19 nt, synthetic construct
  misc_feature 1..19: note = Synthetic
  source 1..19: mol_type = other RNA
gctcgttcaggtgggattc

SEQ ID NO: 14424 - RNA, 21 nt, synthetic construct
  misc_feature 1..21: note = Synthetic
  source 1..21: mol_type = other RNA
cagctcgttcaggtgggattc

SEQ ID NO: 14425 - RNA, 22 nt, synthetic construct
  misc_feature 1..22: note = Synthetic
  source 1..22: mol_type = other RNA
ccagctcgttcaggtgggattc

SEQ ID NO: 14426 - RNA, 23 nt, synthetic construct
  misc_feature 1..23: note = Synthetic
  source 1..23: mol_type = other RNA
gccagctcgttcaggtgggattc

SEQ ID NO: 14427 - RNA, 24 nt, synthetic construct
  misc_feature 1..24: note = Synthetic
  source 1..24: mol_type = other RNA
cgccagctcgttcaggtgggattc

SEQ ID NO: 14428 - RNA, 18 nt, synthetic construct
  misc_feature 1..18: note = Synthetic
  source 1..18: mol_type = other RNA
tttatcttgctgcgcttc

SEQ ID NO: 14429 - RNA, 19 nt, synthetic construct
  misc_feature 1..19: note = Synthetic
  source 1..19: mol_type = other RNA
ctttatcttgctgcgcttc

SEQ ID NO: 14430 - RNA, 21 nt, synthetic construct
  misc_feature 1..21: note = Synthetic
  source 1..21: mol_type = other RNA
acctttatcttgctgcgcttc

SEQ ID NO: 14431 - RNA, 22 nt, synthetic construct
  misc_feature 1..22: note = Synthetic
  source 1..22: mol_type = other RNA
cacctttatcttgctgcgcttc

SEQ ID NO: 14432 - RNA, 23 nt, synthetic construct
  misc_feature 1..23: note = Synthetic
  source 1..23: mol_type = other RNA
tcacctttatcttgctgcgcttc

SEQ ID NO: 14433 - RNA, 24 nt, synthetic construct
  misc_feature 1..24: note = Synthetic
  source 1..24: mol_type = other RNA
ttcacctttatcttgctgcgcttc

SEQ ID NO: 14434 - RNA, 18 nt, synthetic construct
  misc_feature 1..18: note = Synthetic
  source 1..18: mol_type = other RNA
ccgcggcacagcacaaag

SEQ ID NO: 14435 - RNA, 19 nt, synthetic construct
  misc_feature 1..19: note = Synthetic
  source 1..19: mol_type = other RNA
gccgcggcacagcacaaag

SEQ ID NO: 14436 - RNA, 21 nt, synthetic construct
  misc_feature 1..21: note = Synthetic
  source 1..21: mol_type = other RNA
aggccgcggcacagcacaaag

SEQ ID NO: 14437 - RNA, 22 nt, synthetic construct
  misc_feature 1..22: note = Synthetic
  source 1..22: mol_type = other RNA
gaggccgcggcacagcacaaag

SEQ ID NO: 14438 - RNA, 23 nt, synthetic construct
  misc_feature 1..23: note = Synthetic
  source 1..23: mol_type = other RNA
tgaggccgcggcacagcacaaag

SEQ ID NO: 14439 - RNA, 24 nt, synthetic construct
  misc_feature 1..24: note = Synthetic
  source 1..24: mol_type = other RNA
gtgaggccgcggcacagcacaaag

SEQ ID NO: 14440 - RNA, 18 nt, synthetic construct
  misc_feature 1..18: note = Synthetic
  source 1..18: mol_type = other RNA
gggtacaggctggcaaag

SEQ ID NO: 14441 - RNA, 19 nt, synthetic construct
  misc_feature 1..19: note = Synthetic
  source 1..19: mol_type = other RNA
ggggtacaggctggcaaag

SEQ ID NO: 14442 - RNA, 21 nt, synthetic construct
  misc_feature 1..21: note = Synthetic
  source 1..21: mol_type = other RNA
ctggggtacaggctggcaaag

SEQ ID NO: 14443 - RNA, 22 nt, synthetic construct
  misc_feature 1..22: note = Synthetic
  source 1..22: mol_type = other RNA
gctggggtacaggctggcaaag

SEQ ID NO: 14444 - RNA, 23 nt, synthetic construct
  misc_feature 1..23: note = Synthetic
  source 1..23: mol_type = other RNA
tgctggggtacaggctggcaaag

SEQ ID NO: 14445 - RNA, 24 nt, synthetic construct
  misc_feature 1..24: note = Synthetic
  source 1..24: mol_type = other RNA
atgctggggtacaggctggcaaag

SEQ ID NO: 14446 - RNA, 18 nt, synthetic construct
  misc_feature 1..18: note = Synthetic
  source 1..18: mol_type = other RNA
gtcagcttggccagcaag

SEQ ID NO: 14447 - RNA, 19 nt, synthetic construct
  misc_feature 1..19: note = Synthetic
  source 1..19: mol_type = other RNA
cgtcagcttggccagcaag

SEQ ID NO: 14448 - RNA, 21 nt, synthetic construct
  misc_feature 1..21: note = Synthetic
  source 1..21: mol_type = other RNA
tccgtcagcttggccagcaag

SEQ ID NO: 14449 - RNA, 22 nt, synthetic construct
  misc_feature 1..22: note = Synthetic
  source 1..22: mol_type = other RNA
gtccgtcagcttggccagcaag

SEQ ID NO: 14450 - RNA, 23 nt, synthetic construct
  misc_feature 1..23: note = Synthetic
  source 1..23: mol_type = other RNA
tgtccgtcagcttggccagcaag

SEQ ID NO: 14451 - RNA, 24 nt, synthetic construct
  misc_feature 1..24: note = Synthetic
  source 1..24: mol_type = other RNA
atgtccgtcagcttggccagcaag

SEQ ID NO: 14452 - RNA, 18 nt, synthetic construct
  misc_feature 1..18: note = Synthetic
  source 1..18: mol_type = other RNA
ggaaccgagcgaaaacag

SEQ ID NO: 14453 - RNA, 19 nt, synthetic construct
  misc_feature 1..19: note = Synthetic
  source 1..19: mol_type = other RNA
aggaaccgagcgaaaacag

SEQ ID NO: 14454 - RNA, 21 nt, synthetic construct
  misc_feature 1..21: note = Synthetic
  source 1..21: mol_type = other RNA
gcaggaaccgagcgaaaacag

SEQ ID NO: 14455 - RNA, 22 nt, synthetic construct
  misc_feature 1..22: note = Synthetic
  source 1..22: mol_type = other RNA
cgcaggaaccgagcgaaaacag

SEQ ID NO: 14456 - RNA, 23 nt, synthetic construct
  misc_feature 1..23: note = Synthetic
  source 1..23: mol_type = other RNA
tcgcaggaaccgagcgaaaacag

SEQ ID NO: 14457 - RNA, 24 nt, synthetic construct
  misc_feature 1..24: note = Synthetic
  source 1..24: mol_type = other RNA
gtcgcaggaaccgagcgaaaacag

SEQ ID NO: 14458 - RNA, 18 nt, synthetic construct
  misc_feature 1..18: note = Synthetic
  source 1..18: mol_type = other RNA
gcacgccgcccccaacag

SEQ ID NO: 14459 - RNA, 19 nt, synthetic construct
  misc_feature 1..19: note = Synthetic
  source 1..19: mol_type = other RNA
cgcacgccgcccccaacag

SEQ ID NO: 14460 - RNA, 21 nt, synthetic construct
  misc_feature 1..21: note = Synthetic
  source 1..21: mol_type = other RNA
cacgcacgccgcccccaacag

SEQ ID NO: 14461 - RNA, 22 nt, synthetic construct
  misc_feature 1..22: note = Synthetic
  source 1..22: mol_type = other RNA
tcacgcacgccgcccccaacag

SEQ ID NO: 14462 - RNA, 23 nt, synthetic construct
  misc_feature 1..23: note = Synthetic
  source 1..23: mol_type = other RNA
gtcacgcacgccgcccccaacag

SEQ ID NO: 14463 - RNA, 24 nt, synthetic construct
  misc_feature 1..24: note = Synthetic
  source 1..24: mol_type = other RNA
tgtcacgcacgccgcccccaacag

SEQ ID NO: 14464 - RNA, 18 nt, synthetic construct
  misc_feature 1..18: note = Synthetic
  source 1..18: mol_type = other RNA
aaacagctggcccaccag

SEQ ID NO: 14465 - RNA, 19 nt, synthetic construct
  misc_feature 1..19: note = Synthetic
  source 1..19: mol_type = other RNA
aaaacagctggcccaccag

SEQ ID NO: 14466 - RNA, 21 nt, synthetic construct
  misc_feature 1..21: note = Synthetic
  source 1..21: mol_type = other RNA
aaaaaacagctggcccaccag

SEQ ID NO: 14467 - RNA, 22 nt, synthetic construct
  misc_feature 1..22: note = Synthetic
  source 1..22: mol_type = other RNA
taaaaaacagctggcccaccag

SEQ ID NO: 14468 - RNA, 23 nt, synthetic construct
  misc_feature 1..23: note = Synthetic
  source 1..23: mol_type = other RNA
ttaaaaaacagctggcccaccag

SEQ ID NO: 14469 - RNA, 24 nt, synthetic construct
  misc_feature 1..24: note = Synthetic
  source 1..24: mol_type = other RNA
cttaaaaaacagctggcccaccag

SEQ ID NO: 14470 - RNA, 18 nt, synthetic construct
  misc_feature 1..18: note = Synthetic
  source 1..18: mol_type = other RNA
ggtttgagacggtaccag

SEQ ID NO: 14471 - RNA, 19 nt, synthetic construct
  misc_feature 1..19: note = Synthetic
  source 1..19: mol_type = other RNA
cggtttgagacggtaccag

SEQ ID NO: 14472 - RNA, 21 nt, synthetic construct
  misc_feature 1..21: note = Synthetic
  source 1..21: mol_type = other RNA
cccggtttgagacggtaccag

SEQ ID NO: 14473 - RNA, 22 nt, synthetic construct
  misc_feature 1..22: note = Synthetic
  source 1..22: mol_type = other RNA
gcccggtttgagacggtaccag

SEQ ID NO: 14474 - RNA, 23 nt, synthetic construct
  misc_feature 1..23: note = Synthetic
  source 1..23: mol_type = other RNA
ggcccggtttgagacggtaccag

SEQ ID NO: 14475 - RNA, 24 nt, synthetic construct
  misc_feature 1..24: note = Synthetic
  source 1..24: mol_type = other RNA
cggcccggtttgagacggtaccag

SEQ ID NO: 14476 - RNA, 18 nt, synthetic construct
  misc_feature 1..18: note = Synthetic
  source 1..18: mol_type = other RNA
gccagcaagaagggccag

SEQ ID NO: 14477 - RNA, 19 nt, synthetic construct
  misc_feature 1..19: note = Synthetic
  source 1..19: mol_type = other RNA
ggccagcaagaagggccag

SEQ ID NO: 14478 - RNA, 21 nt, synthetic construct
  misc_feature 1..21: note = Synthetic
  source 1..21: mol_type = other RNA
ttggccagcaagaagggccag

SEQ ID NO: 14479 - RNA, 22 nt, synthetic construct
  misc_feature 1..22: note = Synthetic
  source 1..22: mol_type = other RNA
cttggccagcaagaagggccag

SEQ ID NO: 14480 - RNA, 23 nt, synthetic construct
  misc_feature 1..23: note = Synthetic
  source 1..23: mol_type = other RNA
gcttggccagcaagaagggccag

SEQ ID NO: 14481 - RNA, 24 nt, synthetic construct
  misc_feature 1..24: note = Synthetic
  source 1..24: mol_type = other RNA
agcttggccagcaagaagggccag

SEQ ID NO: 14482 - RNA, 18 nt, synthetic construct
  misc_feature 1..18: note = Synthetic
  source 1..18: mol_type = other RNA
gacggccgagagctccag

SEQ ID NO: 14483 - RNA, 19 nt, synthetic construct
  misc_feature 1..19: note = Synthetic
  source 1..19: mol_type = other RNA
cgacggccgagagctccag

SEQ ID NO: 14484 - RNA, 21 nt, synthetic construct
  misc_feature 1..21: note = Synthetic
  source 1..21: mol_type = other RNA
cgcgacggccgagagctccag

SEQ ID NO: 14485 - RNA, 22 nt, synthetic construct
  misc_feature 1..22: note = Synthetic
  source 1..22: mol_type = other RNA
gcgcgacggccgagagctccag

SEQ ID NO: 14486 - RNA, 23 nt, synthetic construct
  misc_feature 1..23: note = Synthetic
  source 1..23: mol_type = other RNA
cgcgcgacggccgagagctccag

SEQ ID NO: 14487 - RNA, 24 nt, synthetic construct
  misc_feature 1..24: note = Synthetic
  source 1..24: mol_type = other RNA
gcgcgcgacggccgagagctccag

SEQ ID NO: 14488 - RNA, 18 nt, synthetic construct
  misc_feature 1..18: note = Synthetic
  source 1..18: mol_type = other RNA
gcggccgtacccgtccag

SEQ ID NO: 14489 - RNA, 19 nt, synthetic construct
  misc_feature 1..19: note = Synthetic
  source 1..19: mol_type = other RNA
tgcggccgtacccgtccag

SEQ ID NO: 14490 - RNA, 21 nt, synthetic construct
  misc_feature 1..21: note = Synthetic
  source 1..21: mol_type = other RNA
catgcggccgtacccgtccag

SEQ ID NO: 14491 - RNA, 22 nt, synthetic construct
  misc_feature 1..22: note = Synthetic
  source 1..22: mol_type = other RNA
tcatgcggccgtacccgtccag

SEQ ID NO: 14492 - RNA, 23 nt, synthetic construct
  misc_feature 1..23: note = Synthetic
  source 1..23: mol_type = other RNA
ttcatgcggccgtacccgtccag

SEQ ID NO: 14493 - RNA, 24 nt, synthetic construct
  misc_feature 1..24: note = Synthetic
  source 1..24: mol_type = other RNA
gttcatgcggccgtacccgtccag

SEQ ID NO: 14494 - RNA, 18 nt, synthetic construct
  misc_feature 1..18: note = Synthetic
  source 1..18: mol_type = other RNA
cttgtaatacaccgtcag

SEQ ID NO: 14495 - RNA, 19 nt, synthetic construct
  misc_feature 1..19: note = Synthetic
  source 1..19: mol_type = other RNA
gcttgtaatacaccgtcag

SEQ ID NO: 14496 - RNA, 21 nt, synthetic construct
  misc_feature 1..21: note = Synthetic
  source 1..21: mol_type = other RNA
gagcttgtaatacaccgtcag

SEQ ID NO: 14497 - RNA, 22 nt, synthetic construct
  misc_feature 1..22: note = Synthetic
  source 1..22: mol_type = other RNA
tgagcttgtaatacaccgtcag

SEQ ID NO: 14498 - RNA, 23 nt, synthetic construct
  misc_feature 1..23: note = Synthetic
  source 1..23: mol_type = other RNA
atgagcttgtaatacaccgtcag

SEQ ID NO: 14499 - RNA, 24 nt, synthetic construct
  misc_feature 1..24: note = Synthetic
  source 1..24: mol_type = other RNA
catgagcttgtaatacaccgtcag

SEQ ID NO: 14500 - RNA, 18 nt, synthetic construct
  misc_feature 1..18: note = Synthetic
  source 1..18: mol_type = other RNA
ggccgccagctcgttcag

SEQ ID NO: 14501 - RNA, 19 nt, synthetic construct
  misc_feature 1..19: note = Synthetic
  source 1..19: mol_type = other RNA
tggccgccagctcgttcag

SEQ ID NO: 14502 - RNA, 21 nt, synthetic construct
  misc_feature 1..21: note = Synthetic
  source 1..21: mol_type = other RNA
cctggccgccagctcgttcag

SEQ ID NO: 14503 - RNA, 22 nt, synthetic construct
  misc_feature 1..22: note = Synthetic
  source 1..22: mol_type = other RNA
ccctggccgccagctcgttcag

SEQ ID NO: 14504 - RNA, 23 nt, synthetic construct
  misc_feature 1..23: note = Synthetic
  source 1..23: mol_type = other RNA
cccctggccgccagctcgttcag

SEQ ID NO: 14505 - RNA, 24 nt, synthetic construct
  misc_feature 1..24: note = Synthetic
  source 1..24: mol_type = other RNA
gcccctggccgccagctcgttcag

SEQ ID NO: 14506 - RNA, 18 nt, synthetic construct
  misc_feature 1..18: note = Synthetic
  source 1..18: mol_type = other RNA
agacgcggtaaaacagag

SEQ ID NO: 14507 - RNA, 19 nt, synthetic construct
  misc_feature 1..19: note = Synthetic
  source 1..19: mol_type = other RNA
tagacgcggtaaaacagag

SEQ ID NO: 14508 - RNA, 21 nt, synthetic construct
  misc_feature 1..21: note = Synthetic
  source 1..21: mol_type = other RNA
cgtagacgcggtaaaacagag

SEQ ID NO: 14509 - RNA, 22 nt, synthetic construct
  misc_feature 1..22: note = Synthetic
  source 1..22: mol_type = other RNA
acgtagacgcggtaaaacagag

SEQ ID NO: 14510 - RNA, 23 nt, synthetic construct
  misc_feature 1..23: note = Synthetic
  source 1..23: mol_type = other RNA
gacgtagacgcggtaaaacagag

SEQ ID NO: 14511 - RNA, 24 nt, synthetic construct
  misc_feature 1..24: note = Synthetic
  source 1..24: mol_type = other RNA
ggacgtagacgcggtaaaacagag

SEQ ID NO: 14512 - RNA, 18 nt, synthetic construct
  misc_feature 1..18: note = Synthetic
  source 1..18: mol_type = other RNA
ggcccggcggcgtagtag

SEQ ID NO: 14513 - RNA, 19 nt, synthetic construct
  misc_feature 1..19: note = Synthetic
  source 1..19: mol_type = other RNA
gggcccggcggcgtagtag

SEQ ID NO: 14514 - RNA, 21 nt, synthetic construct
  misc_feature 1..21: note = Synthetic
  source 1..21: mol_type = other RNA
gcgggcccggcggcgtagtag

SEQ ID NO: 14515 - RNA, 22 nt, synthetic construct
  misc_feature 1..22: note = Synthetic
  source 1..22: mol_type = other RNA
cgcgggcccggcggcgtagtag

SEQ ID NO: 14516 - RNA, 23 nt, synthetic construct
  misc_feature 1..23: note = Synthetic
  source 1..23: mol_type = other RNA
gcgcgggcccggcggcgtagtag

SEQ ID NO: 14517 - RNA, 24 nt, synthetic construct
  misc_feature 1..24: note = Synthetic
  source 1..24: mol_type = other RNA
tgcgcgggcccggcggcgtagtag

SEQ ID NO: 14518 - RNA, 18 nt, synthetic construct
  misc_feature 1..18: note = Synthetic
  source 1..18: mol_type = other RNA
cgcacgtgagccttgacg

SEQ ID NO: 14519 - RNA, 19 nt, synthetic construct
  misc_feature 1..19: note = Synthetic
  source 1..19: mol_type = other RNA
tcgcacgtgagccttgacg

SEQ ID NO: 14520 - RNA, 21 nt, synthetic construct
  misc_feature 1..21: note = Synthetic
  source 1..21: mol_type = other RNA
tctcgcacgtgagccttgacg

SEQ ID NO: 14521 - RNA, 22 nt, synthetic construct
  misc_feature 1..22: note = Synthetic
  source 1..22: mol_type = other RNA
ctctcgcacgtgagccttgacg

SEQ ID NO: 14522 - RNA, 23 nt, synthetic construct
  misc_feature 1..23: note = Synthetic
  source 1..23: mol_type = other RNA
tctctcgcacgtgagccttgacg

SEQ ID NO: 14523 - RNA, 24 nt, synthetic construct
  misc_feature 1..24: note = Synthetic
  source 1..24: mol_type = other RNA
ctctctcgcacgtgagccttgacg

SEQ ID NO: 14524 - RNA, 18 nt, synthetic construct
  misc_feature 1..18: note = Synthetic
  source 1..18: mol_type = other RNA
catggcgagccagtcccg

SEQ ID NO: 14525 - RNA, 19 nt, synthetic construct
  misc_feature 1..19: note = Synthetic
  source 1..19: mol_type = other RNA
gcatggcgagccagtcccg

SEQ ID NO: 14526 - RNA, 21 nt, synthetic construct
  misc_feature 1..21: note = Synthetic
  source 1..21: mol_type = other RNA
tcgcatggcgagccagtcccg

SEQ ID NO: 14527 - RNA, 22 nt, synthetic construct
  misc_feature 1..22: note = Synthetic
  source 1..22: mol_type = other RNA
ttcgcatggcgagccagtcccg

SEQ ID NO: 14528 - RNA, 23 nt, synthetic construct
  misc_feature 1..23: note = Synthetic
  source 1..23: mol_type = other RNA
tttcgcatggcgagccagtcccg

SEQ ID NO: 14529 - RNA, 24 nt, synthetic construct
  misc_feature 1..24: note = Synthetic
  source 1..24: mol_type = other RNA
ctttcgcatggcgagccagtcccg

SEQ ID NO: 14530 - RNA, 18 nt, synthetic construct
  misc_feature 1..18: note = Synthetic
  source 1..18: mol_type = other RNA
cgggtcggtgatgcgccg

SEQ ID NO: 14531 - RNA, 19 nt, synthetic construct
  misc_feature 1..19: note = Synthetic
  source 1..19: mol_type = other RNA
ccgggtcggtgatgcgccg

SEQ ID NO: 14532 - RNA, 21 nt, synthetic construct
  misc_feature 1..21: note = Synthetic
  source 1..21: mol_type = other RNA
ctccgggtcggtgatgcgccg

SEQ ID NO: 14533 - RNA, 22 nt, synthetic construct
  misc_feature 1..22: note = Synthetic
  source 1..22: mol_type = other RNA
tctccgggtcggtgatgcgccg

SEQ ID NO: 14534 - RNA, 23 nt, synthetic construct
  misc_feature 1..23: note = Synthetic
  source 1..23: mol_type = other RNA
ctctccgggtcggtgatgcgccg

SEQ ID NO: 14535 - RNA, 24 nt, synthetic construct
  misc_feature 1..24: note = Synthetic
  source 1..24: mol_type = other RNA
cctctccgggtcggtgatgcgccg

SEQ ID NO: 14536 - RNA, 18 nt, synthetic construct
  misc_feature 1..18: note = Synthetic
  source 1..18: mol_type = other RNA
ccggggagggcagggccg

SEQ ID NO: 14537 - RNA, 19 nt, synthetic construct
  misc_feature 1..19: note = Synthetic
  source 1..19: mol_type = other RNA
gccggggagggcagggccg

SEQ ID NO: 14538 - RNA, 21 nt, synthetic construct
  misc_feature 1..21: note = Synthetic
  source 1..21: mol_type = other RNA
tggccggggagggcagggccg

SEQ ID NO: 14539 - RNA, 22 nt, synthetic construct
  misc_feature 1..22: note = Synthetic
  source 1..22: mol_type = other RNA
ttggccggggagggcagggccg

SEQ ID NO: 14540 - RNA, 23 nt, synthetic construct
  misc_feature 1..23: note = Synthetic
  source 1..23: mol_type = other RNA
cttggccggggagggcagggccg

SEQ ID NO: 14541 - RNA, 24 nt, synthetic construct
  misc_feature 1..24: note = Synthetic
  source 1..24: mol_type = other RNA
gcttggccggggagggcagggccg

SEQ ID NO: 14542 - RNA, 18 nt, synthetic construct
  misc_feature 1..18: note = Synthetic
  source 1..18: mol_type = other RNA
cccgggggcgcttggccg

SEQ ID NO: 14543 - RNA, 19 nt, synthetic construct
  misc_feature 1..19: note = Synthetic
  source 1..19: mol_type = other RNA
tcccgggggcgcttggccg

SEQ ID NO: 14544 - RNA, 21 nt, synthetic construct
  misc_feature 1..21: note = Synthetic
  source 1..21: mol_type = other RNA
tctcccgggggcgcttggccg

SEQ ID NO: 14545 - RNA, 22 nt, synthetic construct
  misc_feature 1..22: note = Synthetic
  source 1..22: mol_type = other RNA
gtctcccgggggcgcttggccg

SEQ ID NO: 14546 - RNA, 23 nt, synthetic construct
  misc_feature 1..23: note = Synthetic
  source 1..23: mol_type = other RNA
cgtctcccgggggcgcttggccg

SEQ ID NO: 14547 - RNA, 24 nt, synthetic construct
  misc_feature 1..24: note = Synthetic
  source 1..24: mol_type = other RNA
gcgtctcccgggggcgcttggccg

SEQ ID NO: 14548 - RNA, 18 nt, synthetic construct
  misc_feature 1..18: note = Synthetic
  source 1..18: mol_type = other RNA
tggtccgcggagatgccg

SEQ ID NO: 14549 - RNA, 19 nt, synthetic construct
  misc_feature 1..19: note = Synthetic
  source 1..19: mol_type = other RNA
gtggtccgcggagatgccg

SEQ ID NO: 14550 - RNA, 21 nt, synthetic construct
  misc_feature 1..21: note = Synthetic
  source 1..21: mol_type = other RNA
aagtggtccgcggagatgccg

SEQ ID NO: 14551 - RNA, 22 nt, synthetic construct
  misc_feature 1..22: note = Synthetic
  source 1..22: mol_type = other RNA
gaagtggtccgcggagatgccg

SEQ ID NO: 14552 - RNA, 23 nt, synthetic construct
  misc_feature 1..23: note = Synthetic
  source 1..23: mol_type = other RNA
cgaagtggtccgcggagatgccg

SEQ ID NO: 14553 - RNA, 24 nt, synthetic construct
  misc_feature 1..24: note = Synthetic
  source 1..24: mol_type = other RNA
tcgaagtggtccgcggagatgccg

SEQ ID NO: 14554 - RNA, 18 nt, synthetic construct
  misc_feature 1..18: note = Synthetic
  source 1..18: mol_type = other RNA
gcgccagccactcctccg

SEQ ID NO: 14555 - RNA, 19 nt, synthetic construct
  misc_feature 1..19: note = Synthetic
  source 1..19: mol_type = other RNA
cgcgccagccactcctccg

SEQ ID NO: 14556 - RNA, 21 nt, synthetic construct
  misc_feature 1..21: note = Synthetic
  source 1..21: mol_type = other RNA
gtcgcgccagccactcctccg

SEQ ID NO: 14557 - RNA, 22 nt, synthetic construct
  misc_feature 1..22: note = Synthetic
  source 1..22: mol_type = other RNA
ggtcgcgccagccactcctccg

SEQ ID NO: 14558 - RNA, 23 nt, synthetic construct
  misc_feature 1..23: note = Synthetic
  source 1..23: mol_type = other RNA
gggtcgcgccagccactcctccg

SEQ ID NO: 14559 - RNA, 24 nt, synthetic construct
  misc_feature 1..24: note = Synthetic
  source 1..24: mol_type = other RNA
ggggtcgcgccagccactcctccg

SEQ ID NO: 14560 - RNA, 18 nt, synthetic construct
  misc_feature 1..18: note = Synthetic
  source 1..18: mol_type = other RNA
ccgcctcgaagtggtccg

SEQ ID NO: 14561 - RNA, 19 nt, synthetic construct
  misc_feature 1..19: note = Synthetic
  source 1..19: mol_type = other RNA
tccgcctcgaagtggtccg

SEQ ID NO: 14562 - RNA, 21 nt, synthetic construct
  misc_feature 1..21: note = Synthetic
  source 1..21: mol_type = other RNA
cctccgcctcgaagtggtccg

SEQ ID NO: 14563 - RNA, 22 nt, synthetic construct
  misc_feature 1..22: note = Synthetic
  source 1..22: mol_type = other RNA
acctccgcctcgaagtggtccg

SEQ ID NO: 14564 - RNA, 23 nt, synthetic construct
  misc_feature 1..23: note = Synthetic
  source 1..23: mol_type = other RNA
cacctccgcctcgaagtggtccg

SEQ ID NO: 14565 - RNA, 24 nt, synthetic construct
  misc_feature 1..24: note = Synthetic
  source 1..24: mol_type = other RNA
ccacctccgcctcgaagtggtccg

SEQ ID NO: 14566 - RNA, 18 nt, synthetic construct
  misc_feature 1..18: note = Synthetic
  source 1..18: mol_type = other RNA
ggggagggcagggccgcg

SEQ ID NO: 14567 - RNA, 19 nt, synthetic construct
  misc_feature 1..19: note = Synthetic
  source 1..19: mol_type = other RNA
cggggagggcagggccgcg

SEQ ID NO: 14568 - RNA, 21 nt, synthetic construct
  misc_feature 1..21: note = Synthetic
  source 1..21: mol_type = other RNA
gccggggagggcagggccgcg

SEQ ID NO: 14569 - RNA, 22 nt, synthetic construct
  misc_feature 1..22: note = Synthetic
  source 1..22: mol_type = other RNA
ggccggggagggcagggccgcg

SEQ ID NO: 14570 - RNA, 23 nt, synthetic construct
  misc_feature 1..23: note = Synthetic
  source 1..23: mol_type = other RNA
tggccggggagggcagggccgcg

SEQ ID NO: 14571 - RNA, 24 nt, synthetic construct
  misc_feature 1..24: note = Synthetic
  source 1..24: mol_type = other RNA
ttggccggggagggcagggccgcg

SEQ ID NO: 14572 - RNA, 18 nt, synthetic construct
  misc_feature 1..18: note = Synthetic
  source 1..18: mol_type = other RNA
ggacgggacctgcgcgcg

SEQ ID NO: 14573 - RNA, 19 nt, synthetic construct
  misc_feature 1..19: note = Synthetic
  source 1..19: mol_type = other RNA
tggacgggacctgcgcgcg

SEQ ID NO: 14574 - RNA, 21 nt, synthetic construct
  misc_feature 1..21: note = Synthetic
  source 1..21: mol_type = other RNA
gatggacgggacctgcgcgcg

SEQ ID NO: 14575 - RNA, 22 nt, synthetic construct
  misc_feature 1..22: note = Synthetic
  source 1..22: mol_type = other RNA
tgatggacgggacctgcgcgcg

SEQ ID NO: 14576 - RNA, 23 nt, synthetic construct
  misc_feature 1..23: note = Synthetic
  source 1..23: mol_type = other RNA
ttgatggacgggacctgcgcgcg

SEQ ID NO: 14577 - RNA, 24 nt, synthetic construct
  misc_feature 1..24: note = Synthetic
  source 1..24: mol_type = other RNA
cttgatggacgggacctgcgcgcg

SEQ ID NO: 14578 - RNA, 18 nt, synthetic construct
  misc_feature 1..18: note = Synthetic
  source 1..18: mol_type = other RNA
cgcgcccggggactcgcg

SEQ ID NO: 14579 - RNA, 19 nt, synthetic construct
  misc_feature 1..19: note = Synthetic
  source 1..19: mol_type = other RNA
acgcgcccggggactcgcg

SEQ ID NO: 14580 - RNA, 21 nt, synthetic construct
  misc_feature 1..21: note = Synthetic
  source 1..21: mol_type = other RNA
cgacgcgcccggggactcgcg

SEQ ID NO: 14581 - RNA, 22 nt, synthetic construct
  misc_feature 1..22: note = Synthetic
  source 1..22: mol_type = other RNA
acgacgcgcccggggactcgcg

SEQ ID NO: 14582 - RNA, 23 nt, synthetic construct
  misc_feature 1..23: note = Synthetic
  source 1..23: mol_type = other RNA
aacgacgcgcccggggactcgcg

SEQ ID NO: 14583 - RNA, 24 nt, synthetic construct
  misc_feature 1..24: note = Synthetic
  source 1..24: mol_type = other RNA
gaacgacgcgcccggggactcgcg

SEQ ID NO: 14584 - RNA, 18 nt, synthetic construct
  misc_feature 1..18: note = Synthetic
  source 1..18: mol_type = other RNA
ggcggcgtctagctcgcg

SEQ ID NO: 14585 - RNA, 19 nt, synthetic construct
  misc_feature 1..19: note = Synthetic
  source 1..19: mol_type = other RNA
cggcggcgtctagctcgcg

SEQ ID NO: 14586 - RNA, 21 nt, synthetic construct
  misc_feature 1..21: note = Synthetic
  source 1..21: mol_type = other RNA
ggcggcggcgtctagctcgcg

SEQ ID NO: 14587 - RNA, 22 nt, synthetic construct
  misc_feature 1..22: note = Synthetic
  source 1..22: mol_type = other RNA
gggcggcggcgtctagctcgcg

SEQ ID NO: 14588 - RNA, 23 nt, synthetic construct
  misc_feature 1..23: note = Synthetic
  source 1..23: mol_type = other RNA
ggggcggcggcgtctagctcgcg

SEQ ID NO: 14589 - RNA, 24 nt, synthetic construct
  misc_feature 1..24: note = Synthetic
  source 1..24: mol_type = other RNA
tggggcggcggcgtctagctcgcg

SEQ ID NO: 14590 - RNA, 18 nt, synthetic construct
  misc_feature 1..18: note = Synthetic
  source 1..18: mol_type = other RNA
acggcttcggccacggcg

SEQ ID NO: 14591 - RNA, 19 nt, synthetic construct
  misc_feature 1..19: note = Synthetic
  source 1..19: mol_type = other RNA
gacggcttcggccacggcg

SEQ ID NO: 14592 - RNA, 21 nt, synthetic construct
  misc_feature 1..21: note = Synthetic
  source 1..21: mol_type = other RNA
aggacggcttcggccacggcg

SEQ ID NO: 14593 - RNA, 22 nt, synthetic construct
  misc_feature 1..22: note = Synthetic
  source 1..22: mol_type = other RNA
caggacggcttcggccacggcg

SEQ ID NO: 14594 - RNA, 23 nt, synthetic construct
  misc_feature 1..23: note = Synthetic
  source 1..23: mol_type = other RNA
tcaggacggcttcggccacggcg

SEQ ID NO: 14595 - RNA, 24 nt, synthetic construct
  misc_feature 1..24: note = Synthetic
  source 1..24: mol_type = other RNA
ttcaggacggcttcggccacggcg

SEQ ID NO: 14596 - RNA, 18 nt, synthetic construct
  misc_feature 1..18: note = Synthetic
  source 1..18: mol_type = other RNA
tgtctgctcagttcggcg

SEQ ID NO: 14597 - RNA, 19 nt, synthetic construct
  misc_feature 1..19: note = Synthetic
  source 1..19: mol_type = other RNA
gtgtctgctcagttcggcg

SEQ ID NO: 14598 - RNA, 21 nt, synthetic construct
  misc_feature 1..21: note = Synthetic
  source 1..21: mol_type = other RNA
gggtgtctgctcagttcggcg

SEQ ID NO: 14599 - RNA, 22 nt, synthetic construct
  misc_feature 1..22: note = Synthetic
  source 1..22: mol_type = other RNA
cgggtgtctgctcagttcggcg

SEQ ID NO: 14600 - RNA, 23 nt, synthetic construct
  misc_feature 1..23: note = Synthetic
  source 1..23: mol_type = other RNA
gcgggtgtctgctcagttcggcg

SEQ ID NO: 14601 - RNA, 24 nt, synthetic construct
  misc_feature 1..24: note = Synthetic
  source 1..24: mol_type = other RNA
cgcgggtgtctgctcagttcggcg

SEQ ID NO: 14602 - RNA, 18 nt, synthetic construct
  misc_feature 1..18: note = Synthetic
  source 1..18: mol_type = other RNA
gcggcggcgtctagctcg

SEQ ID NO: 14603 - RNA, 19 nt, synthetic construct
  misc_feature 1..19: note = Synthetic
  source 1..19: mol_type = other RNA
ggcggcggcgtctagctcg

SEQ ID NO: 14604 - RNA, 21 nt, synthetic construct
  misc_feature 1..21: note = Synthetic
  source 1..21: mol_type = other RNA
ggggcggcggcgtctagctcg

SEQ ID NO: 14605 - RNA, 22 nt, synthetic construct
  misc_feature 1..22: note = Synthetic
  source 1..22: mol_type = other RNA
tggggcggcggcgtctagctcg

SEQ ID NO: 14606 - RNA, 23 nt, synthetic construct
  misc_feature 1..23: note = Synthetic
  source 1..23: mol_type = other RNA
ctggggcggcggcgtctagctcg

SEQ ID NO: 14607 - RNA, 24 nt, synthetic construct
  misc_feature 1..24: note = Synthetic
  source 1..24: mol_type = other RNA
cctggggcggcggcgtctagctcg

SEQ ID NO: 14608 - RNA, 18 nt, synthetic construct
  misc_feature 1..18: note = Synthetic
  source 1..18: mol_type = other RNA
gccgcggccatgcgctcg

SEQ ID NO: 14609 - RNA, 19 nt, synthetic construct
  misc_feature 1..19: note = Synthetic
  source 1..19: mol_type = other RNA
ggccgcggccatgcgctcg

SEQ ID NO: 14610 - RNA, 21 nt, synthetic construct
  misc_feature 1..21: note = Synthetic
  source 1..21: mol_type = other RNA
agggccgcggccatgcgctcg

SEQ ID NO: 14611 - RNA, 22 nt, synthetic construct
  misc_feature 1..22: note = Synthetic
  source 1..22: mol_type = other RNA
cagggccgcggccatgcgctcg

SEQ ID NO: 14612 - RNA, 23 nt, synthetic construct
  misc_feature 1..23: note = Synthetic
  source 1..23: mol_type = other RNA
gcagggccgcggccatgcgctcg

SEQ ID NO: 14613 - RNA, 24 nt, synthetic construct
  misc_feature 1..24: note = Synthetic
  source 1..24: mol_type = other RNA
cgcagggccgcggccatgcgctcg

SEQ ID NO: 14614 - RNA, 18 nt, synthetic construct
  misc_feature 1..18: note = Synthetic
  source 1..18: mol_type = other RNA
gcgctcgcagagatctcg

SEQ ID NO: 14615 - RNA, 19 nt, synthetic construct
  misc_feature 1..19: note = Synthetic
  source 1..19: mol_type = other RNA
tgcgctcgcagagatctcg

SEQ ID NO: 14616 - RNA, 21 nt, synthetic construct
  misc_feature 1..21: note = Synthetic
  source 1..21: mol_type = other RNA
catgcgctcgcagagatctcg

SEQ ID NO: 14617 - RNA, 22 nt, synthetic construct
  misc_feature 1..22: note = Synthetic
  source 1..22: mol_type = other RNA
ccatgcgctcgcagagatctcg

SEQ ID NO: 14618 - RNA, 23 nt, synthetic construct
  misc_feature 1..23: note = Synthetic
  source 1..23: mol_type = other RNA
gccatgcgctcgcagagatctcg

SEQ ID NO: 14619 - RNA, 24 nt, synthetic construct
  misc_feature 1..24: note = Synthetic
  source 1..24: mol_type = other RNA
ggccatgcgctcgcagagatctcg

SEQ ID NO: 14620 - RNA, 18 nt, synthetic construct
  misc_feature 1..18: note = Synthetic
  source 1..18: mol_type = other RNA
gcggtggtggacaggtcg

SEQ ID NO: 14621 - RNA, 19 nt, synthetic construct
  misc_feature 1..19: note = Synthetic
  source 1..19: mol_type = other RNA
ggcggtggtggacaggtcg

SEQ ID NO: 14622 - RNA, 21 nt, synthetic construct
  misc_feature 1..21: note = Synthetic
  source 1..21: mol_type = other RNA
agggcggtggtggacaggtcg

SEQ ID NO: 14623 - RNA, 22 nt, synthetic construct
  misc_feature 1..22: note = Synthetic
  source 1..22: mol_type = other RNA
cagggcggtggtggacaggtcg

SEQ ID NO: 14624 - RNA, 23 nt, synthetic construct
  misc_feature 1..23: note = Synthetic
  source 1..23: mol_type = other RNA
ccagggcggtggtggacaggtcg

SEQ ID NO: 14625 - RNA, 24 nt, synthetic construct
  misc_feature 1..24: note = Synthetic
  source 1..24: mol_type = other RNA
tccagggcggtggtggacaggtcg

SEQ ID NO: 14626 - RNA, 18 nt, synthetic construct
  misc_feature 1..18: note = Synthetic
  source 1..18: mol_type = other RNA
tgggattcggggaggtcg

SEQ ID NO: 14627 - RNA, 19 nt, synthetic construct
  misc_feature 1..19: note = Synthetic
  source 1..19: mol_type = other RNA
gtgggattcggggaggtcg

SEQ ID NO: 14628 - RNA, 21 nt, synthetic construct
  misc_feature 1..21: note = Synthetic
  source 1..21: mol_type = other RNA
aggtgggattcggggaggtcg

SEQ ID NO: 14629 - RNA, 22 nt, synthetic construct
  misc_feature 1..22: note = Synthetic
  source 1..22: mol_type = other RNA
caggtgggattcggggaggtcg

SEQ ID NO: 14630 - RNA, 23 nt, synthetic construct
  misc_feature 1..23: note = Synthetic
  source 1..23: mol_type = other RNA
tcaggtgggattcggggaggtcg

SEQ ID NO: 14631 - RNA, 24 nt, synthetic construct
  misc_feature 1..24: note = Synthetic
  source 1..24: mol_type = other RNA
ttcaggtgggattcggggaggtcg

SEQ ID NO: 14632 - RNA, 18 nt, synthetic construct
  misc_feature 1..18: note = Synthetic
  source 1..18: mol_type = other RNA
tcgttcaggtgggattcg

SEQ ID NO: 14633 - RNA, 19 nt, synthetic construct
  misc_feature 1..19: note = Synthetic
  source 1..19: mol_type = other RNA
ctcgttcaggtgggattcg

SEQ ID NO: 14634 - RNA, 21 nt, synthetic construct
  misc_feature 1..21: note = Synthetic
  source 1..21: mol_type = other RNA
agctcgttcaggtgggattcg

SEQ ID NO: 14635 - RNA, 22 nt, synthetic construct
  misc_feature 1..22: note = Synthetic
  source 1..22: mol_type = other RNA
cagctcgttcaggtgggattcg

SEQ ID NO: 14636 - RNA, 23 nt, synthetic construct
  misc_feature 1..23: note = Synthetic
  source 1..23: mol_type = other RNA
ccagctcgttcaggtgggattcg

SEQ ID NO: 14637 - RNA, 24 nt, synthetic construct
  misc_feature 1..24: note = Synthetic
  source 1..24: mol_type = other RNA
gccagctcgttcaggtgggattcg

SEQ ID NO: 14638 - RNA, 18 nt, synthetic construct
  misc_feature 1..18: note = Synthetic
  source 1..18: mol_type = other RNA
cacgccgcccccaacagg

SEQ ID NO: 14639 - RNA, 19 nt, synthetic construct
  misc_feature 1..19: note = Synthetic
  source 1..19: mol_type = other RNA
gcacgccgcccccaacagg

SEQ ID NO: 14640 - RNA, 21 nt, synthetic construct
  misc_feature 1..21: note = Synthetic
  source 1..21: mol_type = other RNA
acgcacgccgcccccaacagg

SEQ ID NO: 14641 - RNA, 22 nt, synthetic construct
  misc_feature 1..22: note = Synthetic
  source 1..22: mol_type = other RNA
cacgcacgccgcccccaacagg

SEQ ID NO: 14642 - RNA, 23 nt, synthetic construct
  misc_feature 1..23: note = Synthetic
  source 1..23: mol_type = other RNA
tcacgcacgccgcccccaacagg

SEQ ID NO: 14643 - RNA, 24 nt, synthetic construct
  misc_feature 1..24: note = Synthetic
  source 1..24: mol_type = other RNA
gtcacgcacgccgcccccaacagg

SEQ ID NO: 14644 - RNA, 18 nt, synthetic construct
  misc_feature 1..18: note = Synthetic
  source 1..18: mol_type = other RNA
aacccggggttgtccagg

SEQ ID NO: 14645 - RNA, 19 nt, synthetic construct
  misc_feature 1..19: note = Synthetic
  source 1..19: mol_type = other RNA
gaacccggggttgtccagg

SEQ ID NO: 14646 - RNA, 21 nt, synthetic construct
  misc_feature 1..21: note = Synthetic
  source 1..21: mol_type = other RNA
acgaacccggggttgtccagg

SEQ ID NO: 14647 - RNA, 22 nt, synthetic construct
  misc_feature 1..22: note = Synthetic
  source 1..22: mol_type = other RNA
gacgaacccggggttgtccagg

SEQ ID NO: 14648 - RNA, 23 nt, synthetic construct
  misc_feature 1..23: note = Synthetic
  source 1..23: mol_type = other RNA
tgacgaacccggggttgtccagg

SEQ ID NO: 14649 - RNA, 24 nt, synthetic construct
  misc_feature 1..24: note = Synthetic
  source 1..24: mol_type = other RNA
gtgacgaacccggggttgtccagg

SEQ ID NO: 14650 - RNA, 18 nt, synthetic construct
  misc_feature 1..18: note = Synthetic
  source 1..18: mol_type = other RNA
actgcgtcggccctcagg

SEQ ID NO: 14651 - RNA, 19 nt, synthetic construct
  misc_feature 1..19: note = Synthetic
  source 1..19: mol_type = other RNA
cactgcgtcggccctcagg

SEQ ID NO: 14652 - RNA, 21 nt, synthetic construct
  misc_feature 1..21: note = Synthetic
  source 1..21: mol_type = other RNA
gccactgcgtcggccctcagg

SEQ ID NO: 14653 - RNA, 22 nt, synthetic construct
  misc_feature 1..22: note = Synthetic
  source 1..22: mol_type = other RNA
cgccactgcgtcggccctcagg

SEQ ID NO: 14654 - RNA, 23 nt, synthetic construct
  misc_feature 1..23: note = Synthetic
  source 1..23: mol_type = other RNA
gcgccactgcgtcggccctcagg

SEQ ID NO: 14655 - RNA, 24 nt, synthetic construct
  misc_feature 1..24: note = Synthetic
  source 1..24: mol_type = other RNA
tgcgccactgcgtcggccctcagg

SEQ ID NO: 14656 - RNA, 18 nt, synthetic construct
  misc_feature 1..18: note = Synthetic
  source 1..18: mol_type = other RNA
gcccggcggcgtagtagg

SEQ ID NO: 14657 - RNA, 19 nt, synthetic construct
  misc_feature 1..19: note = Synthetic
  source 1..19: mol_type = other RNA
ggcccggcggcgtagtagg

SEQ ID NO: 14658 - RNA, 21 nt, synthetic construct
  misc_feature 1..21: note = Synthetic
  source 1..21: mol_type = other RNA
cgggcccggcggcgtagtagg

SEQ ID NO: 14659 - RNA, 22 nt, synthetic construct
  misc_feature 1..22: note = Synthetic
  source 1..22: mol_type = other RNA
gcgggcccggcggcgtagtagg

SEQ ID NO: 14660 - RNA, 23 nt, synthetic construct
  misc_feature 1..23: note = Synthetic
  source 1..23: mol_type = other RNA
cgcgggcccggcggcgtagtagg

SEQ ID NO: 14661 - RNA, 24 nt, synthetic construct
  misc_feature 1..24: note = Synthetic
  source 1..24: mol_type = other RNA
gcgcgggcccggcggcgtagtagg

SEQ ID NO: 14662 - RNA, 18 nt, synthetic construct
  misc_feature 1..18: note = Synthetic
  source 1..18: mol_type = other RNA
ggcaacgtgcaggcacgg

SEQ ID NO: 14663 - RNA, 19 nt, synthetic construct
  misc_feature 1..19: note = Synthetic
  source 1..19: mol_type = other RNA
cggcaacgtgcaggcacgg

SEQ ID NO: 14664 - RNA, 21 nt, synthetic construct
  misc_feature 1..21: note = Synthetic
  source 1..21: mol_type = other RNA
cgcggcaacgtgcaggcacgg

SEQ ID NO: 14665 - RNA, 22 nt, synthetic construct
  misc_feature 1..22: note = Synthetic
  source 1..22: mol_type = other RNA
tcgcggcaacgtgcaggcacgg

SEQ ID NO: 14666 - RNA, 23 nt, synthetic construct
  misc_feature 1..23: note = Synthetic
  source 1..23: mol_type = other RNA
gtcgcggcaacgtgcaggcacgg

SEQ ID NO: 14667 - RNA, 24 nt, synthetic construct
  misc_feature 1..24: note = Synthetic
  source 1..24: mol_type = other RNA
cgtcgcggcaacgtgcaggcacgg

SEQ ID NO: 14668 - RNA, 18 nt, synthetic construct
  misc_feature 1..18: note = Synthetic
  source 1..18: mol_type = other RNA
ccgccaagcgcgcgacgg

SEQ ID NO: 14669 - RNA, 19 nt, synthetic construct
  misc_feature 1..19: note = Synthetic
  source 1..19: mol_type = other RNA
cccgccaagcgcgcgacgg

SEQ ID NO: 14670 - RNA, 21 nt, synthetic construct
  misc_feature 1..21: note = Synthetic
  source 1..21: mol_type = other RNA
tacccgccaagcgcgcgacgg

SEQ ID NO: 14671 - RNA, 22 nt, synthetic construct
  misc_feature 1..22: note = Synthetic
  source 1..22: mol_type = other RNA
atacccgccaagcgcgcgacgg

SEQ ID NO: 14672 - RNA, 23 nt, synthetic construct
  misc_feature 1..23: note = Synthetic
  source 1..23: mol_type = other RNA
aatacccgccaagcgcgcgacgg

SEQ ID NO: 14673 - RNA, 24 nt, synthetic construct
  misc_feature 1..24: note = Synthetic
  source 1..24: mol_type = other RNA
taatacccgccaagcgcgcgacgg

SEQ ID NO: 14674 - RNA, 18 nt, synthetic construct
  misc_feature 1..18: note = Synthetic
  source 1..18: mol_type = other RNA
ggccatcggggccgccgg

SEQ ID NO: 14675 - RNA, 19 nt, synthetic construct
  misc_feature 1..19: note = Synthetic
  source 1..19: mol_type = other RNA
aggccatcggggccgccgg

SEQ ID NO: 14676 - RNA, 21 nt, synthetic construct
  misc_feature 1..21: note = Synthetic
  source 1..21: mol_type = other RNA
gaaggccatcggggccgccgg

SEQ ID NO: 14677 - RNA, 22 nt, synthetic construct
  misc_feature 1..22: note = Synthetic
  source 1..22: mol_type = other RNA
cgaaggccatcggggccgccgg

SEQ ID NO: 14678 - RNA, 23 nt, synthetic construct
  misc_feature 1..23: note = Synthetic
  source 1..23: mol_type = other RNA
ccgaaggccatcggggccgccgg

SEQ ID NO: 14679 - RNA, 24 nt, synthetic construct
  misc_feature 1..24: note = Synthetic
  source 1..24: mol_type = other RNA
cccgaaggccatcggggccgccgg

SEQ ID NO: 14680 - RNA, 18 nt, synthetic construct
  misc_feature 1..18: note = Synthetic
  source 1..18: mol_type = other RNA
gggagggcagggccgcgg

SEQ ID NO: 14681 - RNA, 19 nt, synthetic construct
  misc_feature 1..19: note = Synthetic
  source 1..19: mol_type = other RNA
ggggagggcagggccgcgg

SEQ ID NO: 14682 - RNA, 21 nt, synthetic construct
  misc_feature 1..21: note = Synthetic
  source 1..21: mol_type = other RNA
ccggggagggcagggccgcgg

SEQ ID NO: 14683 - RNA, 22 nt, synthetic construct
  misc_feature 1..22: note = Synthetic
  source 1..22: mol_type = other RNA
gccggggagggcagggccgcgg

SEQ ID NO: 14684 - RNA, 23 nt, synthetic construct
  misc_feature 1..23: note = Synthetic
  source 1..23: mol_type = other RNA
ggccggggagggcagggccgcgg

SEQ ID NO: 14685 - RNA, 24 nt, synthetic construct
  misc_feature 1..24: note = Synthetic
  source 1..24: mol_type = other RNA
tggccggggagggcagggccgcgg

SEQ ID NO: 14686 - RNA, 18 nt, synthetic construct
  misc_feature 1..18: note = Synthetic
  source 1..18: mol_type = other RNA
cgtcctcccgggctgcgg

SEQ ID NO: 14687 - RNA, 19 nt, synthetic construct
  misc_feature 1..19: note = Synthetic
  source 1..19: mol_type = other RNA
tcgtcctcccgggctgcgg

SEQ ID NO: 14688 - RNA, 21 nt, synthetic construct
  misc_feature 1..21: note = Synthetic
  source 1..21: mol_type = other RNA
cctcgtcctcccgggctgcgg

SEQ ID NO: 14689 - RNA, 22 nt, synthetic construct
  misc_feature 1..22: note = Synthetic
  source 1..22: mol_type = other RNA
tcctcgtcctcccgggctgcgg

SEQ ID NO: 14690 - RNA, 23 nt, synthetic construct
  misc_feature 1..23: note = Synthetic
  source 1..23: mol_type = other RNA
ctcctcgtcctcccgggctgcgg

SEQ ID NO: 14691 - RNA, 24 nt, synthetic construct
  misc_feature 1..24: note = Synthetic
  source 1..24: mol_type = other RNA
gctcctcgtcctcccgggctgcgg

SEQ ID NO: 14692 - RNA, 18 nt, synthetic construct
  misc_feature 1..18: note = Synthetic
  source 1..18: mol_type = other RNA
gcgcttggccggggaggg

SEQ ID NO: 14693 - RNA, 19 nt, synthetic construct
  misc_feature 1..19: note = Synthetic
  source 1..19: mol_type = other RNA
ggcgcttggccggggaggg

SEQ ID NO: 14694 - RNA, 21 nt, synthetic construct
  misc_feature 1..21: note = Synthetic
  source 1..21: mol_type = other RNA
ggggcgcttggccggggaggg

SEQ ID NO: 14695 - RNA, 22 nt, synthetic construct
  misc_feature 1..22: note = Synthetic
  source 1..22: mol_type = other RNA
gggggcgcttggccggggaggg

SEQ ID NO: 14696 - RNA, 23 nt, synthetic construct
  misc_feature 1..23: note = Synthetic
  source 1..23: mol_type = other RNA
cgggggcgcttggccggggaggg

SEQ ID NO: 14697 - RNA, 24 nt, synthetic construct
  misc_feature 1..24: note = Synthetic
  source 1..24: mol_type = other RNA
ccgggggcgcttggccggggaggg

SEQ ID NO: 14698 - RNA, 18 nt, synthetic construct
  misc_feature 1..18: note = Synthetic
  source 1..18: mol_type = other RNA
tacttcttgatggccggg

SEQ ID NO: 14699 - RNA, 19 nt, synthetic construct
  misc_feature 1..19: note = Synthetic
  source 1..19: mol_type = other RNA
gtacttcttgatggccggg

SEQ ID NO: 14700 - RNA, 21 nt, synthetic construct
  misc_feature 1..21: note = Synthetic
  source 1..21: mol_type = other RNA
tcgtacttcttgatggccggg

SEQ ID NO: 14701 - RNA, 22 nt, synthetic construct
  misc_feature 1..22: note = Synthetic
  source 1..22: mol_type = other RNA
ctcgtacttcttgatggccggg

SEQ ID NO: 14702 - RNA, 23 nt, synthetic construct
  misc_feature 1..23: note = Synthetic
  source 1..23: mol_type = other RNA
cctcgtacttcttgatggccggg

SEQ ID NO: 14703 - RNA, 24 nt, synthetic construct
  misc_feature 1..24: note = Synthetic
  source 1..24: mol_type = other RNA
ccctcgtacttcttgatggccggg

SEQ ID NO: 14704 - RNA, 18 nt, synthetic construct
  misc_feature 1..18: note = Synthetic
  source 1..18: mol_type = other RNA
cgggggcgcttggccggg

SEQ ID NO: 14705 - RNA, 19 nt, synthetic construct
  misc_feature 1..19: note = Synthetic
  source 1..19: mol_type = other RNA
ccgggggcgcttggccggg

SEQ ID NO: 14706 - RNA, 21 nt, synthetic construct
  misc_feature 1..21: note = Synthetic
  source 1..21: mol_type = other RNA
tcccgggggcgcttggccggg

SEQ ID NO: 14707 - RNA, 22 nt, synthetic construct
  misc_feature 1..22: note = Synthetic
  source 1..22: mol_type = other RNA
ctcccgggggcgcttggccggg

SEQ ID NO: 14708 - RNA, 23 nt, synthetic construct
  misc_feature 1..23: note = Synthetic
  source 1..23: mol_type = other RNA
tctcccgggggcgcttggccggg

SEQ ID NO: 14709 - RNA, 24 nt, synthetic construct
  misc_feature 1..24: note = Synthetic
  source 1..24: mol_type = other RNA
gtctcccgggggcgcttggccggg

SEQ ID NO: 14710 - RNA, 18 nt, synthetic construct
  misc_feature 1..18: note = Synthetic
  source 1..18: mol_type = other RNA
ggagggcagggccgcggg

SEQ ID NO: 14711 - RNA, 19 nt, synthetic construct
  misc_feature 1..19: note = Synthetic
  source 1..19: mol_type = other RNA
gggagggcagggccgcggg

SEQ ID NO: 14712 - RNA, 21 nt, synthetic construct
  misc_feature 1..21: note = Synthetic
  source 1..21: mol_type = other RNA
cggggagggcagggccgcggg

SEQ ID NO: 14713 - RNA, 22 nt, synthetic construct
  misc_feature 1..22: note = Synthetic
  source 1..22: mol_type = other RNA
ccggggagggcagggccgcggg

SEQ ID NO: 14714 - RNA, 23 nt, synthetic construct
  misc_feature 1..23: note = Synthetic
  source 1..23: mol_type = other RNA
gccggggagggcagggccgcggg

SEQ ID NO: 14715 - RNA, 24 nt, synthetic construct
  misc_feature 1..24: note = Synthetic
  source 1..24: mol_type = other RNA
ggccggggagggcagggccgcggg

SEQ ID NO: 14716 - RNA, 18 nt, synthetic construct
  misc_feature 1..18: note = Synthetic
  source 1..18: mol_type = other RNA
cgcctgcagtccctcggg

SEQ ID NO: 14717 - RNA, 19 nt, synthetic construct
  misc_feature 1..19: note = Synthetic
  source 1..19: mol_type = other RNA
acgcctgcagtccctcggg

SEQ ID NO: 14718 - RNA, 21 nt, synthetic construct
  misc_feature 1..21: note = Synthetic
  source 1..21: mol_type = other RNA
gaacgcctgcagtccctcggg

SEQ ID NO: 14719 - RNA, 22 nt, synthetic construct
  misc_feature 1..22: note = Synthetic
  source 1..22: mol_type = other RNA
cgaacgcctgcagtccctcggg

SEQ ID NO: 14720 - RNA, 23 nt, synthetic construct
  misc_feature 1..23: note = Synthetic
  source 1..23: mol_type = other RNA
ccgaacgcctgcagtccctcggg

SEQ ID NO: 14721 - RNA, 24 nt, synthetic construct
  misc_feature 1..24: note = Synthetic
  source 1..24: mol_type = other RNA
cccgaacgcctgcagtccctcggg

SEQ ID NO: 14722 - RNA, 18 nt, synthetic construct
  misc_feature 1..18: note = Synthetic
  source 1..18: mol_type = other RNA
ggcagggccgcggggggg

SEQ ID NO: 14723 - RNA, 19 nt, synthetic construct
  misc_feature 1..19: note = Synthetic
  source 1..19: mol_type = other RNA
gggcagggccgcggggggg

SEQ ID NO: 14724 - RNA, 21 nt, synthetic construct
  misc_feature 1..21: note = Synthetic
  source 1..21: mol_type = other RNA
gagggcagggccgcggggggg

SEQ ID NO: 14725 - RNA, 22 nt, synthetic construct
  misc_feature 1..22: note = Synthetic
  source 1..22: mol_type = other RNA
ggagggcagggccgcggggggg

SEQ ID NO: 14726 - RNA, 23 nt, synthetic construct
  misc_feature 1..23: note = Synthetic
  source 1..23: mol_type = other RNA
gggagggcagggccgcggggggg

SEQ ID NO: 14727 - RNA, 24 nt, synthetic construct
  misc_feature 1..24: note = Synthetic
  source 1..24: mol_type = other RNA
ggggagggcagggccgcggggggg

SEQ ID NO: 14728 - RNA, 18 nt, synthetic construct
  misc_feature 1..18: note = Synthetic
  source 1..18: mol_type = other RNA
ctcgagtttgatgggggg

SEQ ID NO: 14729 - RNA, 19 nt, synthetic construct
  misc_feature 1..19: note = Synthetic
  source 1..19: mol_type = other RNA
actcgagtttgatgggggg

SEQ ID NO: 14730 - RNA, 21 nt, synthetic construct
  misc_feature 1..21: note = Synthetic
  source 1..21: mol_type = other RNA
gcactcgagtttgatgggggg

SEQ ID NO: 14731 - RNA, 22 nt, synthetic construct
  misc_feature 1..22: note = Synthetic
  source 1..22: mol_type = other RNA
cgcactcgagtttgatgggggg

SEQ ID NO: 14732 - RNA, 23 nt, synthetic construct
  misc_feature 1..23: note = Synthetic
  source 1..23: mol_type = other RNA
tcgcactcgagtttgatgggggg

SEQ ID NO: 14733 - RNA, 24 nt, synthetic construct
  misc_feature 1..24: note = Synthetic
  source 1..24: mol_type = other RNA
ttcgcactcgagtttgatgggggg

SEQ ID NO: 14734 - RNA, 18 nt, synthetic construct
  misc_feature 1..18: note = Synthetic
  source 1..18: mol_type = other RNA
ggatccggtccttgatgg

SEQ ID NO: 14735 - RNA, 19 nt, synthetic construct
  misc_feature 1..19: note = Synthetic
  source 1..19: mol_type = other RNA
gggatccggtccttgatgg

SEQ ID NO: 14736 - RNA, 21 nt, synthetic construct
  misc_feature 1..21: note = Synthetic
  source 1..21: mol_type = other RNA
acgggatccggtccttgatgg

SEQ ID NO: 14737 - RNA, 22 nt, synthetic construct
  misc_feature 1..22: note = Synthetic
  source 1..22: mol_type = other RNA
tacgggatccggtccttgatgg

SEQ ID NO: 14738 - RNA, 23 nt, synthetic construct
  misc_feature 1..23: note = Synthetic
  source 1..23: mol_type = other RNA
gtacgggatccggtccttgatgg

SEQ ID NO: 14739 - RNA, 24 nt, synthetic construct
  misc_feature 1..24: note = Synthetic
  source 1..24: mol_type = other RNA
cgtacgggatccggtccttgatgg

SEQ ID NO: 14740 - RNA, 18 nt, synthetic construct
  misc_feature 1..18: note = Synthetic
  source 1..18: mol_type = other RNA
cctcgtacttcttgatgg

SEQ ID NO: 14741 - RNA, 19 nt, synthetic construct
  misc_feature 1..19: note = Synthetic
  source 1..19: mol_type = other RNA
ccctcgtacttcttgatgg

SEQ ID NO: 14742 - RNA, 21 nt, synthetic construct
  misc_feature 1..21: note = Synthetic
  source 1..21: mol_type = other RNA
caccctcgtacttcttgatgg

SEQ ID NO: 14743 - RNA, 22 nt, synthetic construct
  misc_feature 1..22: note = Synthetic
  source 1..22: mol_type = other RNA
ccaccctcgtacttcttgatgg

SEQ ID NO: 14744 - RNA, 23 nt, synthetic construct
  misc_feature 1..23: note = Synthetic
  source 1..23: mol_type = other RNA
cccaccctcgtacttcttgatgg

SEQ ID NO: 14745 - RNA, 24 nt, synthetic construct
  misc_feature 1..24: note = Synthetic
  source 1..24: mol_type = other RNA
ccccaccctcgtacttcttgatgg

SEQ ID NO: 14746 - RNA, 18 nt, synthetic construct
  misc_feature 1..18: note = Synthetic
  source 1..18: mol_type = other RNA
gccgcccccaacaggtgg

SEQ ID NO: 14747 - RNA, 19 nt, synthetic construct
  misc_feature 1..19: note = Synthetic
  source 1..19: mol_type = other RNA
cgccgcccccaacaggtgg

SEQ ID NO: 14748 - RNA, 21 nt, synthetic construct
  misc_feature 1..21: note = Synthetic
  source 1..21: mol_type = other RNA
cacgccgcccccaacaggtgg

SEQ ID NO: 14749 - RNA, 22 nt, synthetic construct
  misc_feature 1..22: note = Synthetic
  source 1..22: mol_type = other RNA
gcacgccgcccccaacaggtgg

SEQ ID NO: 14750 - RNA, 23 nt, synthetic construct
  misc_feature 1..23: note = Synthetic
  source 1..23: mol_type = other RNA
cgcacgccgcccccaacaggtgg

SEQ ID NO: 14751 - RNA, 24 nt, synthetic construct
  misc_feature 1..24: note = Synthetic
  source 1..24: mol_type = other RNA
acgcacgccgcccccaacaggtgg

SEQ ID NO: 14752 - RNA, 18 nt, synthetic construct
  misc_feature 1..18: note = Synthetic
  source 1..18: mol_type = other RNA
tctcccgggggcgcttgg

SEQ ID NO: 14753 - RNA, 19 nt, synthetic construct
  misc_feature 1..19: note = Synthetic
  source 1..19: mol_type = other RNA
gtctcccgggggcgcttgg

SEQ ID NO: 14754 - RNA, 21 nt, synthetic construct
  misc_feature 1..21: note = Synthetic
  source 1..21: mol_type = other RNA
gcgtctcccgggggcgcttgg

SEQ ID NO: 14755 - RNA, 22 nt, synthetic construct
  misc_feature 1..22: note = Synthetic
  source 1..22: mol_type = other RNA
ggcgtctcccgggggcgcttgg

SEQ ID NO: 14756 - RNA, 23 nt, synthetic construct
  misc_feature 1..23: note = Synthetic
  source 1..23: mol_type = other RNA
cggcgtctcccgggggcgcttgg

SEQ ID NO: 14757 - RNA, 24 nt, synthetic construct
  misc_feature 1..24: note = Synthetic
  source 1..24: mol_type = other RNA
acggcgtctcccgggggcgcttgg

SEQ ID NO: 14758 - RNA, 18 nt, synthetic construct
  misc_feature 1..18: note = Synthetic
  source 1..18: mol_type = other RNA
cggatctgctttcgcatg

SEQ ID NO: 14759 - RNA, 19 nt, synthetic construct
  misc_feature 1..19: note = Synthetic
  source 1..19: mol_type = other RNA
gcggatctgctttcgcatg

SEQ ID NO: 14760 - RNA, 21 nt, synthetic construct
  misc_feature 1..21: note = Synthetic
  source 1..21: mol_type = other RNA
gagcggatctgctttcgcatg

SEQ ID NO: 14761 - RNA, 22 nt, synthetic construct
  misc_feature 1..22: note = Synthetic
  source 1..22: mol_type = other RNA
cgagcggatctgctttcgcatg

SEQ ID NO: 14762 - RNA, 23 nt, synthetic construct
  misc_feature 1..23: note = Synthetic
  source 1..23: mol_type = other RNA
gcgagcggatctgctttcgcatg

SEQ ID NO: 14763 - RNA, 24 nt, synthetic construct
  misc_feature 1..24: note = Synthetic
  source 1..24: mol_type = other RNA
cgcgagcggatctgctttcgcatg

SEQ ID NO: 14764 - RNA, 18 nt, synthetic construct
  misc_feature 1..18: note = Synthetic
  source 1..18: mol_type = other RNA
cagtcccgcaggaggatg

SEQ ID NO: 14765 - RNA, 19 nt, synthetic construct
  misc_feature 1..19: note = Synthetic
  source 1..19: mol_type = other RNA
ccagtcccgcaggaggatg

SEQ ID NO: 14766 - RNA, 21 nt, synthetic construct
  misc_feature 1..21: note = Synthetic
  source 1..21: mol_type = other RNA
agccagtcccgcaggaggatg

SEQ ID NO: 14767 - RNA, 22 nt, synthetic construct
  misc_feature 1..22: note = Synthetic
  source 1..22: mol_type = other RNA
gagccagtcccgcaggaggatg

SEQ ID NO: 14768 - RNA, 23 nt, synthetic construct
  misc_feature 1..23: note = Synthetic
  source 1..23: mol_type = other RNA
cgagccagtcccgcaggaggatg

SEQ ID NO: 14769 - RNA, 24 nt, synthetic construct
  misc_feature 1..24: note = Synthetic
  source 1..24: mol_type = other RNA
gcgagccagtcccgcaggaggatg

SEQ ID NO: 14770 - RNA, 18 nt, synthetic construct
  misc_feature 1..18: note = Synthetic
  source 1..18: mol_type = other RNA
ttgtgggcctggatgatg

SEQ ID NO: 14771 - RNA, 19 nt, synthetic construct
  misc_feature 1..19: note = Synthetic
  source 1..19: mol_type = other RNA
gttgtgggcctggatgatg

SEQ ID NO: 14772 - RNA, 21 nt, synthetic construct
  misc_feature 1..21: note = Synthetic
  source 1..21: mol_type = other RNA
aggttgtgggcctggatgatg

SEQ ID NO: 14773 - RNA, 22 nt, synthetic construct
  misc_feature 1..22: note = Synthetic
  source 1..22: mol_type = other RNA
caggttgtgggcctggatgatg

SEQ ID NO: 14774 - RNA, 23 nt, synthetic construct
  misc_feature 1..23: note = Synthetic
  source 1..23: mol_type = other RNA
acaggttgtgggcctggatgatg

SEQ ID NO: 14775 - RNA, 24 nt, synthetic construct
  misc_feature 1..24: note = Synthetic
  source 1..24: mol_type = other RNA
cacaggttgtgggcctggatgatg

SEQ ID NO: 14776 - RNA, 18 nt, synthetic construct
  misc_feature 1..18: note = Synthetic
  source 1..18: mol_type = other RNA
tcgcactcgagtttgatg

SEQ ID NO: 14777 - RNA, 19 nt, synthetic construct
  misc_feature 1..19: note = Synthetic
  source 1..19: mol_type = other RNA
ttcgcactcgagtttgatg

SEQ ID NO: 14778 - RNA, 21 nt, synthetic construct
  misc_feature 1..21: note = Synthetic
  source 1..21: mol_type = other RNA
ttttcgcactcgagtttgatg

SEQ ID NO: 14779 - RNA, 22 nt, synthetic construct
  misc_feature 1..22: note = Synthetic
  source 1..22: mol_type = other RNA
cttttcgcactcgagtttgatg

SEQ ID NO: 14780 - RNA, 23 nt, synthetic construct
  misc_feature 1..23: note = Synthetic
  source 1..23: mol_type = other RNA
tcttttcgcactcgagtttgatg

SEQ ID NO: 14781 - RNA, 24 nt, synthetic construct
  misc_feature 1..24: note = Synthetic
  source 1..24: mol_type = other RNA
gtcttttcgcactcgagtttgatg

SEQ ID NO: 14782 - RNA, 18 nt, synthetic construct
  misc_feature 1..18: note = Synthetic
  source 1..18: mol_type = other RNA
tcccgcaggaggatgctg

SEQ ID NO: 14783 - RNA, 19 nt, synthetic construct
  misc_feature 1..19: note = Synthetic
  source 1..19: mol_type = other RNA
gtcccgcaggaggatgctg

SEQ ID NO: 14784 - RNA, 21 nt, synthetic construct
  misc_feature 1..21: note = Synthetic
  source 1..21: mol_type = other RNA
cagtcccgcaggaggatgctg

SEQ ID NO: 14785 - RNA, 22 nt, synthetic construct
  misc_feature 1..22: note = Synthetic
  source 1..22: mol_type = other RNA
ccagtcccgcaggaggatgctg

SEQ ID NO: 14786 - RNA, 23 nt, synthetic construct
  misc_feature 1..23: note = Synthetic
  source 1..23: mol_type = other RNA
gccagtcccgcaggaggatgctg

SEQ ID NO: 14787 - RNA, 24 nt, synthetic construct
  misc_feature 1..24: note = Synthetic
  source 1..24: mol_type = other RNA
agccagtcccgcaggaggatgctg

SEQ ID NO: 14788 - RNA, 18 nt, synthetic construct
  misc_feature 1..18: note = Synthetic
  source 1..18: mol_type = other RNA
gccctcagggagagcgtg

SEQ ID NO: 14789 - RNA, 19 nt, synthetic construct
  misc_feature 1..19: note = Synthetic
  source 1..19: mol_type = other RNA
ggccctcagggagagcgtg

SEQ ID NO: 14790 - RNA, 21 nt, synthetic construct
  misc_feature 1..21: note = Synthetic
  source 1..21: mol_type = other RNA
tcggccctcagggagagcgtg

SEQ ID NO: 14791 - RNA, 22 nt, synthetic construct
  misc_feature 1..22: note = Synthetic
  source 1..22: mol_type = other RNA
gtcggccctcagggagagcgtg

SEQ ID NO: 14792 - RNA, 23 nt, synthetic construct
  misc_feature 1..23: note = Synthetic
  source 1..23: mol_type = other RNA
cgtcggccctcagggagagcgtg

SEQ ID NO: 14793 - RNA, 24 nt, synthetic construct
  misc_feature 1..24: note = Synthetic
  source 1..24: mol_type = other RNA
gcgtcggccctcagggagagcgtg

SEQ ID NO: 14794 - RNA, 18 nt, synthetic construct
  misc_feature 1..18: note = Synthetic
  source 1..18: mol_type = other RNA
cggtaccagccgaaggtg

SEQ ID NO: 14795 - RNA, 19 nt, synthetic construct
  misc_feature 1..19: note = Synthetic
  source 1..19: mol_type = other RNA
acggtaccagccgaaggtg

SEQ ID NO: 14796 - RNA, 21 nt, synthetic construct
  misc_feature 1..21: note = Synthetic
  source 1..21: mol_type = other RNA
agacggtaccagccgaaggtg

SEQ ID NO: 14797 - RNA, 22 nt, synthetic construct
  misc_feature 1..22: note = Synthetic
  source 1..22: mol_type = other RNA
gagacggtaccagccgaaggtg

SEQ ID NO: 14798 - RNA, 23 nt, synthetic construct
  misc_feature 1..23: note = Synthetic
  source 1..23: mol_type = other RNA
tgagacggtaccagccgaaggtg

SEQ ID NO: 14799 - RNA, 24 nt, synthetic construct
  misc_feature 1..24: note = Synthetic
  source 1..24: mol_type = other RNA
ttgagacggtaccagccgaaggtg

SEQ ID NO: 14800 - RNA, 18 nt, synthetic construct
  misc_feature 1..18: note = Synthetic
  source 1..18: mol_type = other RNA
acgtgctccagggcggtg

SEQ ID NO: 14801 - RNA, 19 nt, synthetic construct
  misc_feature 1..19: note = Synthetic
  source 1..19: mol_type = other RNA
gacgtgctccagggcggtg

SEQ ID NO: 14802 - RNA, 21 nt, synthetic construct
  misc_feature 1..21: note = Synthetic
  source 1..21: mol_type = other RNA
aggacgtgctccagggcggtg

SEQ ID NO: 14803 - RNA, 22 nt, synthetic construct
  misc_feature 1..22: note = Synthetic
  source 1..22: mol_type = other RNA
gaggacgtgctccagggcggtg

SEQ ID NO: 14804 - RNA, 23 nt, synthetic construct
  misc_feature 1..23: note = Synthetic
  source 1..23: mol_type = other RNA
ggaggacgtgctccagggcggtg

SEQ ID NO: 14805 - RNA, 24 nt, synthetic construct
  misc_feature 1..24: note = Synthetic
  source 1..24: mol_type = other RNA
aggaggacgtgctccagggcggtg

SEQ ID NO: 14806 - RNA, 18 nt, synthetic construct
  misc_feature 1..18: note = Synthetic
  source 1..18: mol_type = other RNA
accagatccacgcccttg

SEQ ID NO: 14807 - RNA, 19 nt, synthetic construct
  misc_feature 1..19: note = Synthetic
  source 1..19: mol_type = other RNA
caccagatccacgcccttg

SEQ ID NO: 14808 - RNA, 21 nt, synthetic construct
  misc_feature 1..21: note = Synthetic
  source 1..21: mol_type = other RNA
cgcaccagatccacgcccttg

SEQ ID NO: 14809 - RNA, 22 nt, synthetic construct
  misc_feature 1..22: note = Synthetic
  source 1..22: mol_type = other RNA
gcgcaccagatccacgcccttg

SEQ ID NO: 14810 - RNA, 23 nt, synthetic construct
  misc_feature 1..23: note = Synthetic
  source 1..23: mol_type = other RNA
tgcgcaccagatccacgcccttg

SEQ ID NO: 14811 - RNA, 24 nt, synthetic construct
  misc_feature 1..24: note = Synthetic
  source 1..24: mol_type = other RNA
ttgcgcaccagatccacgcccttg

SEQ ID NO: 14812 - RNA, 18 nt, synthetic construct
  misc_feature 1..18: note = Synthetic
  source 1..18: mol_type = other RNA
tctcgcacgtgagccttg

SEQ ID NO: 14813 - RNA, 19 nt, synthetic construct
  misc_feature 1..19: note = Synthetic
  source 1..19: mol_type = other RNA
ctctcgcacgtgagccttg

SEQ ID NO: 14814 - RNA, 21 nt, synthetic construct
  misc_feature 1..21: note = Synthetic
  source 1..21: mol_type = other RNA
ctctctcgcacgtgagccttg

SEQ ID NO: 14815 - RNA, 22 nt, synthetic construct
  misc_feature 1..22: note = Synthetic
  source 1..22: mol_type = other RNA
gctctctcgcacgtgagccttg

SEQ ID NO: 14816 - RNA, 23 nt, synthetic construct
  misc_feature 1..23: note = Synthetic
  source 1..23: mol_type = other RNA
ggctctctcgcacgtgagccttg

SEQ ID NO: 14817 - RNA, 24 nt, synthetic construct
  misc_feature 1..24: note = Synthetic
  source 1..24: mol_type = other RNA
aggctctctcgcacgtgagccttg

SEQ ID NO: 14818 - RNA, 18 nt, synthetic construct
  misc_feature 1..18: note = Synthetic
  source 1..18: mol_type = other RNA
tacgggatccggtccttg

SEQ ID NO: 14819 - RNA, 19 nt, synthetic construct
  misc_feature 1..19: note = Synthetic
  source 1..19: mol_type = other RNA
gtacgggatccggtccttg

SEQ ID NO: 14820 - RNA, 21 nt, synthetic construct
  misc_feature 1..21: note = Synthetic
  source 1..21: mol_type = other RNA
acgtacgggatccggtccttg

SEQ ID NO: 14821 - RNA, 22 nt, synthetic construct
  misc_feature 1..22: note = Synthetic
  source 1..22: mol_type = other RNA
cacgtacgggatccggtccttg

SEQ ID NO: 14822 - RNA, 23 nt, synthetic construct
  misc_feature 1..23: note = Synthetic
  source 1..23: mol_type = other RNA
tcacgtacgggatccggtccttg

SEQ ID NO: 14823 - RNA, 24 nt, synthetic construct
  misc_feature 1..24: note = Synthetic
  source 1..24: mol_type = other RNA
atcacgtacgggatccggtccttg

SEQ ID NO: 14824 - RNA, 18 nt, synthetic construct
  misc_feature 1..18: note = Synthetic
  source 1..18: mol_type = other RNA
tcggacaccagcagcttg

SEQ ID NO: 14825 - RNA, 19 nt, synthetic construct
  misc_feature 1..19: note = Synthetic
  source 1..19: mol_type = other RNA
ctcggacaccagcagcttg

SEQ ID NO: 14826 - RNA, 21 nt, synthetic construct
  misc_feature 1..21: note = Synthetic
  source 1..21: mol_type = other RNA
agctcggacaccagcagcttg

SEQ ID NO: 14827 - RNA, 22 nt, synthetic construct
  misc_feature 1..22: note = Synthetic
  source 1..22: mol_type = other RNA
cagctcggacaccagcagcttg

SEQ ID NO: 14828 - RNA, 23 nt, synthetic construct
  misc_feature 1..23: note = Synthetic
  source 1..23: mol_type = other RNA
ccagctcggacaccagcagcttg

SEQ ID NO: 14829 - RNA, 24 nt, synthetic construct
  misc_feature 1..24: note = Synthetic
  source 1..24: mol_type = other RNA
gccagctcggacaccagcagcttg

SEQ ID NO: 14830 - RNA, 18 nt, synthetic construct
  misc_feature 1..18: note = Synthetic
  source 1..18: mol_type = other RNA
gcgatcagcagcagcttg

SEQ ID NO: 14831 - RNA, 19 nt, synthetic construct
  misc_feature 1..19: note = Synthetic
  source 1..19: mol_type = other RNA
ggcgatcagcagcagcttg

SEQ ID NO: 14832 - RNA, 21 nt, synthetic construct
  misc_feature 1..21: note = Synthetic
  source 1..21: mol_type = other RNA
ttggcgatcagcagcagcttg

SEQ ID NO: 14833 - RNA, 22 nt, synthetic construct
  misc_feature 1..22: note = Synthetic
  source 1..22: mol_type = other RNA
cttggcgatcagcagcagcttg

SEQ ID NO: 14834 - RNA, 23 nt, synthetic construct
  misc_feature 1..23: note = Synthetic
  source 1..23: mol_type = other RNA
tcttggcgatcagcagcagcttg

SEQ ID NO: 14835 - RNA, 24 nt, synthetic construct
  misc_feature 1..24: note = Synthetic
  source 1..24: mol_type = other RNA
ttcttggcgatcagcagcagcttg

SEQ ID NO: 14836 - RNA, 18 nt, synthetic construct
  misc_feature 1..18: note = Synthetic
  source 1..18: mol_type = other RNA
ttttcgcactcgagtttg

SEQ ID NO: 14837 - RNA, 19 nt, synthetic construct
  misc_feature 1..19: note = Synthetic
  source 1..19: mol_type = other RNA
cttttcgcactcgagtttg

SEQ ID NO: 14838 - RNA, 21 nt, synthetic construct
  misc_feature 1..21: note = Synthetic
  source 1..21: mol_type = other RNA
gtcttttcgcactcgagtttg

SEQ ID NO: 14839 - RNA, 22 nt, synthetic construct
  misc_feature 1..22: note = Synthetic
  source 1..22: mol_type = other RNA
cgtcttttcgcactcgagtttg

SEQ ID NO: 14840 - RNA, 23 nt, synthetic construct
  misc_feature 1..23: note = Synthetic
  source 1..23: mol_type = other RNA
acgtcttttcgcactcgagtttg

SEQ ID NO: 14841 - RNA, 24 nt, synthetic construct
  misc_feature 1..24: note = Synthetic
  source 1..24: mol_type = other RNA
aacgtcttttcgcactcgagtttg

SEQ ID NO: 14842 - RNA, 18 nt, synthetic construct
  misc_feature 1..18: note = Synthetic
  source 1..18: mol_type = other RNA
ggatgtcccgaaggccat

SEQ ID NO: 14843 - RNA, 19 nt, synthetic construct
  misc_feature 1..19: note = Synthetic
  source 1..19: mol_type = other RNA
tggatgtcccgaaggccat

SEQ ID NO: 14844 - RNA, 21 nt, synthetic construct
  misc_feature 1..21: note = Synthetic
  source 1..21: mol_type = other RNA
gctggatgtcccgaaggccat

SEQ ID NO: 14845 - RNA, 22 nt, synthetic construct
  misc_feature 1..22: note = Synthetic
  source 1..22: mol_type = other RNA
cgctggatgtcccgaaggccat

SEQ ID NO: 14846 - RNA, 23 nt, synthetic construct
  misc_feature 1..23: note = Synthetic
  source 1..23: mol_type = other RNA
tcgctggatgtcccgaaggccat

SEQ ID NO: 14847 - RNA, 24 nt, synthetic construct
  misc_feature 1..24: note = Synthetic
  source 1..24: mol_type = other RNA
gtcgctggatgtcccgaaggccat

SEQ ID NO: 14848 - RNA, 18 nt, synthetic construct
  misc_feature 1..18: note = Synthetic
  source 1..18: mol_type = other RNA
agctcgttcaggtgggat

SEQ ID NO: 14849 - RNA, 19 nt, synthetic construct
  misc_feature 1..19: note = Synthetic
  source 1..19: mol_type = other RNA
cagctcgttcaggtgggat

SEQ ID NO: 14850 - RNA, 21 nt, synthetic construct
  misc_feature 1..21: note = Synthetic
  source 1..21: mol_type = other RNA
gccagctcgttcaggtgggat

SEQ ID NO: 14851 - RNA, 22 nt, synthetic construct
  misc_feature 1..22: note = Synthetic
  source 1..22: mol_type = other RNA
cgccagctcgttcaggtgggat

SEQ ID NO: 14852 - RNA, 23 nt, synthetic construct
  misc_feature 1..23: note = Synthetic
  source 1..23: mol_type = other RNA
ccgccagctcgttcaggtgggat

SEQ ID NO: 14853 - RNA, 24 nt, synthetic construct
  misc_feature 1..24: note = Synthetic
  source 1..24: mol_type = other RNA
gccgccagctcgttcaggtgggat

SEQ ID NO: 14854 - RNA, 18 nt, synthetic construct
  misc_feature 1..18: note = Synthetic
  source 1..18: mol_type = other RNA
ttcgcactcgagtttgat

SEQ ID NO: 14855 - RNA, 19 nt, synthetic construct
  misc_feature 1..19: note = Synthetic
  source 1..19: mol_type = other RNA
tttcgcactcgagtttgat

SEQ ID NO: 14856 - RNA, 21 nt, synthetic construct
  misc_feature 1..21: note = Synthetic
  source 1..21: mol_type = other RNA
cttttcgcactcgagtttgat

SEQ ID NO: 14857 - RNA, 22 nt, synthetic construct
  misc_feature 1..22: note = Synthetic
  source 1..22: mol_type = other RNA
tcttttcgcactcgagtttgat

SEQ ID NO: 14858 - RNA, 23 nt, synthetic construct
  misc_feature 1..23: note = Synthetic
  source 1..23: mol_type = other RNA
gtcttttcgcactcgagtttgat

SEQ ID NO: 14859 - RNA, 24 nt, synthetic construct
  misc_feature 1..24: note = Synthetic
  source 1..24: mol_type = other RNA
cgtcttttcgcactcgagtttgat

SEQ ID NO: 14860 - RNA, 18 nt, synthetic construct
  misc_feature 1..18: note = Synthetic
  source 1..18: mol_type = other RNA
ccgtgggcaatggcgtat

SEQ ID NO: 14861 - RNA, 19 nt, synthetic construct
  misc_feature 1..19: note = Synthetic
  source 1..19: mol_type = other RNA
gccgtgggcaatggcgtat

SEQ ID NO: 14862 - RNA, 21 nt, synthetic construct
  misc_feature 1..21: note = Synthetic
  source 1..21: mol_type = other RNA
acgccgtgggcaatggcgtat

SEQ ID NO: 14863 - RNA, 22 nt, synthetic construct
  misc_feature 1..22: note = Synthetic
  source 1..22: mol_type = other RNA
gacgccgtgggcaatggcgtat

SEQ ID NO: 14864 - RNA, 23 nt, synthetic construct
  misc_feature 1..23: note = Synthetic
  source 1..23: mol_type = other RNA
cgacgccgtgggcaatggcgtat

SEQ ID NO: 14865 - RNA, 24 nt, synthetic construct
  misc_feature 1..24: note = Synthetic
  source 1..24: mol_type = other RNA
gcgacgccgtgggcaatggcgtat

SEQ ID NO: 14866 - RNA, 18 nt, synthetic construct
  misc_feature 1..18: note = Synthetic
  source 1..18: mol_type = other RNA
tgtacccggtcacgaact

SEQ ID NO: 14867 - RNA, 19 nt, synthetic construct
  misc_feature 1..19: note = Synthetic
  source 1..19: mol_type = other RNA
ttgtacccggtcacgaact

SEQ ID NO: 14868 - RNA, 21 nt, synthetic construct
  misc_feature 1..21: note = Synthetic
  source 1..21: mol_type = other RNA
tgttgtacccggtcacgaact

SEQ ID NO: 14869 - RNA, 22 nt, synthetic construct
  misc_feature 1..22: note = Synthetic
  source 1..22: mol_type = other RNA
atgttgtacccggtcacgaact

SEQ ID NO: 14870 - RNA, 23 nt, synthetic construct
  misc_feature 1..23: note = Synthetic
  source 1..23: mol_type = other RNA
gatgttgtacccggtcacgaact

SEQ ID NO: 14871 - RNA, 24 nt, synthetic construct
  misc_feature 1..24: note = Synthetic
  source 1..24: mol_type = other RNA
tgatgttgtacccggtcacgaact

SEQ ID NO: 14872 - RNA, 18 nt, synthetic construct
  misc_feature 1..18: note = Synthetic
  source 1..18: mol_type = other RNA
tccggggggtgccacact

SEQ ID NO: 14873 - RNA, 19 nt, synthetic construct
  misc_feature 1..19: note = Synthetic
  source 1..19: mol_type = other RNA
gtccggggggtgccacact

SEQ ID NO: 14874 - RNA, 21 nt, synthetic construct
  misc_feature 1..21: note = Synthetic
  source 1..21: mol_type = other RNA
tcgtccggggggtgccacact

SEQ ID NO: 14875 - RNA, 22 nt, synthetic construct
  misc_feature 1..22: note = Synthetic
  source 1..22: mol_type = other RNA
gtcgtccggggggtgccacact

SEQ ID NO: 14876 - RNA, 23 nt, synthetic construct
  misc_feature 1..23: note = Synthetic
  source 1..23: mol_type = other RNA
cgtcgtccggggggtgccacact

SEQ ID NO: 14877 - RNA, 24 nt, synthetic construct
  misc_feature 1..24: note = Synthetic
  source 1..24: mol_type = other RNA
acgtcgtccggggggtgccacact

SEQ ID NO: 14878 - RNA, 18 nt, synthetic construct
  misc_feature 1..18: note = Synthetic
  source 1..18: mol_type = other RNA
cgccactgcgtcggccct

SEQ ID NO: 14879 - RNA, 19 nt, synthetic construct
  misc_feature 1..19: note = Synthetic
  source 1..19: mol_type = other RNA
gcgccactgcgtcggccct

SEQ ID NO: 14880 - RNA, 21 nt, synthetic construct
  misc_feature 1..21: note = Synthetic
  source 1..21: mol_type = other RNA
gtgcgccactgcgtcggccct

SEQ ID NO: 14881 - RNA, 22 nt, synthetic construct
  misc_feature 1..22: note = Synthetic
  source 1..22: mol_type = other RNA
ggtgcgccactgcgtcggccct

SEQ ID NO: 14882 - RNA, 23 nt, synthetic construct
  misc_feature 1..23: note = Synthetic
  source 1..23: mol_type = other RNA
aggtgcgccactgcgtcggccct

SEQ ID NO: 14883 - RNA, 24 nt, synthetic construct
  misc_feature 1..24: note = Synthetic
  source 1..24: mol_type = other RNA
caggtgcgccactgcgtcggccct

SEQ ID NO: 14884 - RNA, 18 nt, synthetic construct
  misc_feature 1..18: note = Synthetic
  source 1..18: mol_type = other RNA
cgcgcatgtcggccgcct

SEQ ID NO: 14885 - RNA, 19 nt, synthetic construct
  misc_feature 1..19: note = Synthetic
  source 1..19: mol_type = other RNA
gcgcgcatgtcggccgcct

SEQ ID NO: 14886 - RNA, 21 nt, synthetic construct
  misc_feature 1..21: note = Synthetic
  source 1..21: mol_type = other RNA
gggcgcgcatgtcggccgcct

SEQ ID NO: 14887 - RNA, 22 nt, synthetic construct
  misc_feature 1..22: note = Synthetic
  source 1..22: mol_type = other RNA
ggggcgcgcatgtcggccgcct

SEQ ID NO: 14888 - RNA, 23 nt, synthetic construct
  misc_feature 1..23: note = Synthetic
  source 1..23: mol_type = other RNA
gggggcgcgcatgtcggccgcct

SEQ ID NO: 14889 - RNA, 24 nt, synthetic construct
  misc_feature 1..24: note = Synthetic
  source 1..24: mol_type = other RNA
cgggggcgcgcatgtcggccgcct

SEQ ID NO: 14890 - RNA, 18 nt, synthetic construct
  misc_feature 1..18: note = Synthetic
  source 1..18: mol_type = other RNA
ccaggagcacggcctcct

SEQ ID NO: 14891 - RNA, 19 nt, synthetic construct
  misc_feature 1..19: note = Synthetic
  source 1..19: mol_type = other RNA
tccaggagcacggcctcct

SEQ ID NO: 14892 - RNA, 21 nt, synthetic construct
  misc_feature 1..21: note = Synthetic
  source 1..21: mol_type = other RNA
tgtccaggagcacggcctcct

SEQ ID NO: 14893 - RNA, 22 nt, synthetic construct
  misc_feature 1..22: note = Synthetic
  source 1..22: mol_type = other RNA
ttgtccaggagcacggcctcct

SEQ ID NO: 14894 - RNA, 23 nt, synthetic construct
  misc_feature 1..23: note = Synthetic
  source 1..23: mol_type = other RNA
cttgtccaggagcacggcctcct

SEQ ID NO: 14895 - RNA, 24 nt, synthetic construct
  misc_feature 1..24: note = Synthetic
  source 1..24: mol_type = other RNA
gcttgtccaggagcacggcctcct

SEQ ID NO: 14896 - RNA, 18 nt, synthetic construct
  misc_feature 1..18: note = Synthetic
  source 1..18: mol_type = other RNA
cgacagcacacgcccgct

SEQ ID NO: 14897 - RNA, 19 nt, synthetic construct
  misc_feature 1..19: note = Synthetic
  source 1..19: mol_type = other RNA
acgacagcacacgcccgct

SEQ ID NO: 14898 - RNA, 21 nt, synthetic construct
  misc_feature 1..21: note = Synthetic
  source 1..21: mol_type = other RNA
gtacgacagcacacgcccgct

SEQ ID NO: 14899 - RNA, 22 nt, synthetic construct
  misc_feature 1..22: note = Synthetic
  source 1..22: mol_type = other RNA
ggtacgacagcacacgcccgct

SEQ ID NO: 14900 - RNA, 23 nt, synthetic construct
  misc_feature 1..23: note = Synthetic
  source 1..23: mol_type = other RNA
aggtacgacagcacacgcccgct

SEQ ID NO: 14901 - RNA, 24 nt, synthetic construct
  misc_feature 1..24: note = Synthetic
  source 1..24: mol_type = other RNA
caggtacgacagcacacgcccgct

SEQ ID NO: 14902 - RNA, 18 nt, synthetic construct
  misc_feature 1..18: note = Synthetic
  source 1..18: mol_type = other RNA
gctaacgcggcggccgct

SEQ ID NO: 14903 - RNA, 19 nt, synthetic construct
  misc_feature 1..19: note = Synthetic
  source 1..19: mol_type = other RNA
ggctaacgcggcggccgct

SEQ ID NO: 14904 - RNA, 21 nt, synthetic construct
  misc_feature 1..21: note = Synthetic
  source 1..21: mol_type = other RNA
tcggctaacgcggcggccgct

SEQ ID NO: 14905 - RNA, 22 nt, synthetic construct
  misc_feature 1..22: note = Synthetic
  source 1..22: mol_type = other RNA
ctcggctaacgcggcggccgct

SEQ ID NO: 14906 - RNA, 23 nt, synthetic construct
  misc_feature 1..23: note = Synthetic
  source 1..23: mol_type = other RNA
gctcggctaacgcggcggccgct

SEQ ID NO: 14907 - RNA, 24 nt, synthetic construct
  misc_feature 1..24: note = Synthetic
  source 1..24: mol_type = other RNA
cgctcggctaacgcggcggccgct

SEQ ID NO: 14908 - RNA, 18 nt, synthetic construct
  misc_feature 1..18: note = Synthetic
  source 1..18: mol_type = other RNA
gtcccgcaggaggatgct

SEQ ID NO: 14909 - RNA, 19 nt, synthetic construct
  misc_feature 1..19: note = Synthetic
  source 1..19: mol_type = other RNA
agtcccgcaggaggatgct

SEQ ID NO: 14910 - RNA, 21 nt, synthetic construct
  misc_feature 1..21: note = Synthetic
  source 1..21: mol_type = other RNA
ccagtcccgcaggaggatgct

SEQ ID NO: 14911 - RNA, 22 nt, synthetic construct
  misc_feature 1..22: note = Synthetic
  source 1..22: mol_type = other RNA
gccagtcccgcaggaggatgct

SEQ ID NO: 14912 - RNA, 23 nt, synthetic construct
  misc_feature 1..23: note = Synthetic
  source 1..23: mol_type = other RNA
agccagtcccgcaggaggatgct

SEQ ID NO: 14913 - RNA, 24 nt, synthetic construct
  misc_feature 1..24: note = Synthetic
  source 1..24: mol_type = other RNA
gagccagtcccgcaggaggatgct

SEQ ID NO: 14914 - RNA, 18 nt, synthetic construct
  misc_feature 1..18: note = Synthetic
  source 1..18: mol_type = other RNA
ggcctcctcggggctgct

SEQ ID NO: 14915 - RNA, 19 nt, synthetic construct
  misc_feature 1..19: note = Synthetic
  source 1..19: mol_type = other RNA
cggcctcctcggggctgct

SEQ ID NO: 14916 - RNA, 21 nt, synthetic construct
  misc_feature 1..21: note = Synthetic
  source 1..21: mol_type = other RNA
cacggcctcctcggggctgct

SEQ ID NO: 14917 - RNA, 22 nt, synthetic construct
  misc_feature 1..22: note = Synthetic
  source 1..22: mol_type = other RNA
gcacggcctcctcggggctgct

SEQ ID NO: 14918 - RNA, 23 nt, synthetic construct
  misc_feature 1..23: note = Synthetic
  source 1..23: mol_type = other RNA
agcacggcctcctcggggctgct

SEQ ID NO: 14919 - RNA, 24 nt, synthetic construct
  misc_feature 1..24: note = Synthetic
  source 1..24: mol_type = other RNA
gagcacggcctcctcggggctgct

SEQ ID NO: 14920 - RNA, 18 nt, synthetic construct
  misc_feature 1..18: note = Synthetic
  source 1..18: mol_type = other RNA
cctcctcggggctgctct

SEQ ID NO: 14921 - RNA, 19 nt, synthetic construct
  misc_feature 1..19: note = Synthetic
  source 1..19: mol_type = other RNA
gcctcctcggggctgctct

SEQ ID NO: 14922 - RNA, 21 nt, synthetic construct
  misc_feature 1..21: note = Synthetic
  source 1..21: mol_type = other RNA
cggcctcctcggggctgctct

SEQ ID NO: 14923 - RNA, 22 nt, synthetic construct
  misc_feature 1..22: note = Synthetic
  source 1..22: mol_type = other RNA
acggcctcctcggggctgctct

SEQ ID NO: 14924 - RNA, 23 nt, synthetic construct
  misc_feature 1..23: note = Synthetic
  source 1..23: mol_type = other RNA
cacggcctcctcggggctgctct

SEQ ID NO: 14925 - RNA, 24 nt, synthetic construct
  misc_feature 1..24: note = Synthetic
  source 1..24: mol_type = other RNA
gcacggcctcctcggggctgctct

SEQ ID NO: 14926 - RNA, 18 nt, synthetic construct
  misc_feature 1..18: note = Synthetic
  source 1..18: mol_type = other RNA
atgcgccgatgggcgtct

SEQ ID NO: 14927 - RNA, 19 nt, synthetic construct
  misc_feature 1..19: note = Synthetic
  source 1..19: mol_type = other RNA
gatgcgccgatgggcgtct

SEQ ID NO: 14928 - RNA, 21 nt, synthetic construct
  misc_feature 1..21: note = Synthetic
  source 1..21: mol_type = other RNA
gtgatgcgccgatgggcgtct

SEQ ID NO: 14929 - RNA, 22 nt, synthetic construct
  misc_feature 1..22: note = Synthetic
  source 1..22: mol_type = other RNA
ggtgatgcgccgatgggcgtct

SEQ ID NO: 14930 - RNA, 23 nt, synthetic construct
  misc_feature 1..23: note = Synthetic
  source 1..23: mol_type = other RNA
cggtgatgcgccgatgggcgtct

SEQ ID NO: 14931 - RNA, 24 nt, synthetic construct
  misc_feature 1..24: note = Synthetic
  source 1..24: mol_type = other RNA
tcggtgatgcgccgatgggcgtct

SEQ ID NO: 14932 - RNA, 18 nt, synthetic construct
  misc_feature 1..18: note = Synthetic
  source 1..18: mol_type = other RNA
tctgggccacgatcacgt

SEQ ID NO: 14933 - RNA, 19 nt, synthetic construct
  misc_feature 1..19: note = Synthetic
  source 1..19: mol_type = other RNA
gtctgggccacgatcacgt

SEQ ID NO: 14934 - RNA, 21 nt, synthetic construct
  misc_feature 1..21: note = Synthetic
  source 1..21: mol_type = other RNA
gggtctgggccacgatcacgt

SEQ ID NO: 14935 - RNA, 22 nt, synthetic construct
  misc_feature 1..22: note = Synthetic
  source 1..22: mol_type = other RNA
cgggtctgggccacgatcacgt

SEQ ID NO: 14936 - RNA, 23 nt, synthetic construct
  misc_feature 1..23: note = Synthetic
  source 1..23: mol_type = other RNA
gcgggtctgggccacgatcacgt

SEQ ID NO: 14937 - RNA, 24 nt, synthetic construct
  misc_feature 1..24: note = Synthetic
  source 1..24: mol_type = other RNA
cgcgggtctgggccacgatcacgt

SEQ ID NO: 14938 - RNA, 18 nt, synthetic construct
  misc_feature 1..18: note = Synthetic
  source 1..18: mol_type = other RNA
gccgcgcggccacgtcgt

SEQ ID NO: 14939 - RNA, 19 nt, synthetic construct
  misc_feature 1..19: note = Synthetic
  source 1..19: mol_type = other RNA
agccgcgcggccacgtcgt

SEQ ID NO: 14940 - RNA, 21 nt, synthetic construct
  misc_feature 1..21: note = Synthetic
  source 1..21: mol_type = other RNA
ggagccgcgcggccacgtcgt

SEQ ID NO: 14941 - RNA, 22 nt, synthetic construct
  misc_feature 1..22: note = Synthetic
  source 1..22: mol_type = other RNA
cggagccgcgcggccacgtcgt

SEQ ID NO: 14942 - RNA, 23 nt, synthetic construct
  misc_feature 1..23: note = Synthetic
  source 1..23: mol_type = other RNA
ccggagccgcgcggccacgtcgt

SEQ ID NO: 14943 - RNA, 24 nt, synthetic construct
  misc_feature 1..24: note = Synthetic
  source 1..24: mol_type = other RNA
tccggagccgcgcggccacgtcgt

SEQ ID NO: 14944 - RNA, 18 nt, synthetic construct
  misc_feature 1..18: note = Synthetic
  source 1..18: mol_type = other RNA
acgccgcccccaacaggt

SEQ ID NO: 14945 - RNA, 19 nt, synthetic construct
  misc_feature 1..19: note = Synthetic
  source 1..19: mol_type = other RNA
cacgccgcccccaacaggt

SEQ ID NO: 14946 - RNA, 21 nt, synthetic construct
  misc_feature 1..21: note = Synthetic
  source 1..21: mol_type = other RNA
cgcacgccgcccccaacaggt

SEQ ID NO: 14947 - RNA, 22 nt, synthetic construct
  misc_feature 1..22: note = Synthetic
  source 1..22: mol_type = other RNA
acgcacgccgcccccaacaggt

SEQ ID NO: 14948 - RNA, 23 nt, synthetic construct
  misc_feature 1..23: note = Synthetic
  source 1..23: mol_type = other RNA
cacgcacgccgcccccaacaggt

SEQ ID NO: 14949 - RNA, 24 nt, synthetic construct
  misc_feature 1..24: note = Synthetic
  source 1..24: mol_type = other RNA
tcacgcacgccgcccccaacaggt

SEQ ID NO: 14950 - RNA, 18 nt, synthetic construct
  misc_feature 1..18: note = Synthetic
  source 1..18: mol_type = other RNA
gtgttgttccggcccggt

SEQ ID NO: 14951 - RNA, 19 nt, synthetic construct
  misc_feature 1..19: note = Synthetic
  source 1..19: mol_type = other RNA
cgtgttgttccggcccggt

SEQ ID NO: 14952 - RNA, 21 nt, synthetic construct
  misc_feature 1..21: note = Synthetic
  source 1..21: mol_type = other RNA
agcgtgttgttccggcccggt

SEQ ID NO: 14953 - RNA, 22 nt, synthetic construct
  misc_feature 1..22: note = Synthetic
  source 1..22: mol_type = other RNA
tagcgtgttgttccggcccggt

SEQ ID NO: 14954 - RNA, 23 nt, synthetic construct
  misc_feature 1..23: note = Synthetic
  source 1..23: mol_type = other RNA
ctagcgtgttgttccggcccggt

SEQ ID NO: 14955 - RNA, 24 nt, synthetic construct
  misc_feature 1..24: note = Synthetic
  source 1..24: mol_type = other RNA
gctagcgtgttgttccggcccggt

SEQ ID NO: 14956 - RNA, 18 nt, synthetic construct
  misc_feature 1..18: note = Synthetic
  source 1..18: mol_type = other RNA
tctgctcagttcggcggt

SEQ ID NO: 14957 - RNA, 19 nt, synthetic construct
  misc_feature 1..19: note = Synthetic
  source 1..19: mol_type = other RNA
gtctgctcagttcggcggt

SEQ ID NO: 14958 - RNA, 21 nt, synthetic construct
  misc_feature 1..21: note = Synthetic
  source 1..21: mol_type = other RNA
gtgtctgctcagttcggcggt

SEQ ID NO: 14959 - RNA, 22 nt, synthetic construct
  misc_feature 1..22: note = Synthetic
  source 1..22: mol_type = other RNA
ggtgtctgctcagttcggcggt

SEQ ID NO: 14960 - RNA, 23 nt, synthetic construct
  misc_feature 1..23: note = Synthetic
  source 1..23: mol_type = other RNA
gggtgtctgctcagttcggcggt

SEQ ID NO: 14961 - RNA, 24 nt, synthetic construct
  misc_feature 1..24: note = Synthetic
  source 1..24: mol_type = other RNA
cgggtgtctgctcagttcggcggt

SEQ ID NO: 14962 - RNA, 18 nt, synthetic construct
  misc_feature 1..18: note = Synthetic
  source 1..18: mol_type = other RNA
cgccccgaaccctgcggt

SEQ ID NO: 14963 - RNA, 19 nt, synthetic construct
  misc_feature 1..19: note = Synthetic
  source 1..19: mol_type = other RNA
ccgccccgaaccctgcggt

SEQ ID NO: 14964 - RNA, 21 nt, synthetic construct
  misc_feature 1..21: note = Synthetic
  source 1..21: mol_type = other RNA
caccgccccgaaccctgcggt

SEQ ID NO: 14965 - RNA, 22 nt, synthetic construct
  misc_feature 1..22: note = Synthetic
  source 1..22: mol_type = other RNA
ccaccgccccgaaccctgcggt

SEQ ID NO: 14966 - RNA, 23 nt, synthetic construct
  misc_feature 1..23: note = Synthetic
  source 1..23: mol_type = other RNA
cccaccgccccgaaccctgcggt

SEQ ID NO: 14967 - RNA, 24 nt, synthetic construct
  misc_feature 1..24: note = Synthetic
  source 1..24: mol_type = other RNA
acccaccgccccgaaccctgcggt

SEQ ID NO: 14968 - RNA, 18 nt, synthetic construct
  misc_feature 1..18: note = Synthetic
  source 1..18: mol_type = other RNA
ctcctctacctcgcgggt

SEQ ID NO: 14969 - RNA, 19 nt, synthetic construct
  misc_feature 1..19: note = Synthetic
  source 1..19: mol_type = other RNA
tctcctctacctcgcgggt

SEQ ID NO: 14970 - RNA, 21 nt, synthetic construct
  misc_feature 1..21: note = Synthetic
  source 1..21: mol_type = other RNA
cgtctcctctacctcgcgggt

SEQ ID NO: 14971 - RNA, 22 nt, synthetic construct
  misc_feature 1..22: note = Synthetic
  source 1..22: mol_type = other RNA
ccgtctcctctacctcgcgggt

SEQ ID NO: 14972 - RNA, 23 nt, synthetic construct
  misc_feature 1..23: note = Synthetic
  source 1..23: mol_type = other RNA
accgtctcctctacctcgcgggt

SEQ ID NO: 14973 - RNA, 24 nt, synthetic construct
  misc_feature 1..24: note = Synthetic
  source 1..24: mol_type = other RNA
gaccgtctcctctacctcgcgggt

SEQ ID NO: 14974 - RNA, 18 nt, synthetic construct
  misc_feature 1..18: note = Synthetic
  source 1..18: mol_type = other RNA
aaatcggccaggagctgt

SEQ ID NO: 14975 - RNA, 19 nt, synthetic construct
  misc_feature 1..19: note = Synthetic
  source 1..19: mol_type = other RNA
gaaatcggccaggagctgt

SEQ ID NO: 14976 - RNA, 21 nt, synthetic construct
  misc_feature 1..21: note = Synthetic
  source 1..21: mol_type = other RNA
gggaaatcggccaggagctgt

SEQ ID NO: 14977 - RNA, 22 nt, synthetic construct
  misc_feature 1..22: note = Synthetic
  source 1..22: mol_type = other RNA
cgggaaatcggccaggagctgt

SEQ ID NO: 14978 - RNA, 23 nt, synthetic construct
  misc_feature 1..23: note = Synthetic
  source 1..23: mol_type = other RNA
ccgggaaatcggccaggagctgt

SEQ ID NO: 14979 - RNA, 24 nt, synthetic construct
  misc_feature 1..24: note = Synthetic
  source 1..24: mol_type = other RNA
tccgggaaatcggccaggagctgt

SEQ ID NO: 14980 - RNA, 18 nt, synthetic construct
  misc_feature 1..18: note = Synthetic
  source 1..18: mol_type = other RNA
gctcgttcaggtgggatt

SEQ ID NO: 14981 - RNA, 19 nt, synthetic construct
  misc_feature 1..19: note = Synthetic
  source 1..19: mol_type = other RNA
agctcgttcaggtgggatt

SEQ ID NO: 14982 - RNA, 21 nt, synthetic construct
  misc_feature 1..21: note = Synthetic
  source 1..21: mol_type = other RNA
ccagctcgttcaggtgggatt

SEQ ID NO: 14983 - RNA, 22 nt, synthetic construct
  misc_feature 1..22: note = Synthetic
  source 1..22: mol_type = other RNA
gccagctcgttcaggtgggatt

SEQ ID NO: 14984 - RNA, 23 nt, synthetic construct
  misc_feature 1..23: note = Synthetic
  source 1..23: mol_type = other RNA
cgccagctcgttcaggtgggatt

SEQ ID NO: 14985 - RNA, 24 nt, synthetic construct
  misc_feature 1..24: note = Synthetic
  source 1..24: mol_type = other RNA
ccgccagctcgttcaggtgggatt

SEQ ID NO: 14986 - RNA, 18 nt, synthetic construct
  misc_feature 1..18: note = Synthetic
  source 1..18: mol_type = other RNA
ccggggggtgccacactt

SEQ ID NO: 14987 - RNA, 19 nt, synthetic construct
  misc_feature 1..19: note = Synthetic
  source 1..19: mol_type = other RNA
tccggggggtgccacactt

SEQ ID NO: 14988 - RNA, 21 nt, synthetic construct
  misc_feature 1..21: note = Synthetic
  source 1..21: mol_type = other RNA
cgtccggggggtgccacactt

SEQ ID NO: 14989 - RNA, 22 nt, synthetic construct
  misc_feature 1..22: note = Synthetic
  source 1..22: mol_type = other RNA
tcgtccggggggtgccacactt

SEQ ID NO: 14990 - RNA, 23 nt, synthetic construct
  misc_feature 1..23: note = Synthetic
  source 1..23: mol_type = other RNA
gtcgtccggggggtgccacactt

SEQ ID NO: 14991 - RNA, 24 nt, synthetic construct
  misc_feature 1..24: note = Synthetic
  source 1..24: mol_type = other RNA
cgtcgtccggggggtgccacactt

SEQ ID NO: 14992 - RNA, 18 nt, synthetic construct
  misc_feature 1..18: note = Synthetic
  source 1..18: mol_type = other RNA
cggccacccggtggcctt

SEQ ID NO: 14993 - RNA, 19 nt, synthetic construct
  misc_feature 1..19: note = Synthetic
  source 1..19: mol_type = other RNA
acggccacccggtggcctt

SEQ ID NO: 14994 - RNA, 21 nt, synthetic construct
  misc_feature 1..21: note = Synthetic
  source 1..21: mol_type = other RNA
gaacggccacccggtggcctt

SEQ ID NO: 14995 - RNA, 22 nt, synthetic construct
  misc_feature 1..22: note = Synthetic
  source 1..22: mol_type = other RNA
tgaacggccacccggtggcctt

SEQ ID NO: 14996 - RNA, 23 nt, synthetic construct
  misc_feature 1..23: note = Synthetic
  source 1..23: mol_type = other RNA
gtgaacggccacccggtggcctt

SEQ ID NO: 14997 - RNA, 24 nt, synthetic construct
  misc_feature 1..24: note = Synthetic
  source 1..24: mol_type = other RNA
cgtgaacggccacccggtggcctt

SEQ ID NO: 14998 - RNA, 18 nt, synthetic construct
  misc_feature 1..18: note = Synthetic
  source 1..18: mol_type = other RNA
gtccttcttcttgtcctt

SEQ ID NO: 14999 - RNA, 19 nt, synthetic construct
  misc_feature 1..19: note = Synthetic
  source 1..19: mol_type = other RNA
ggtccttcttcttgtcctt

SEQ ID NO: 15000 - RNA, 21 nt, synthetic construct
  misc_feature 1..21: note = Synthetic
  source 1..21: mol_type = other RNA
caggtccttcttcttgtcctt

SEQ ID NO: 15001 - RNA, 22 nt, synthetic construct
  misc_feature 1..22: note = Synthetic
  source 1..22: mol_type = other RNA
tcaggtccttcttcttgtcctt

SEQ ID NO: 15002 - RNA, 23 nt, synthetic construct
  misc_feature 1..23: note = Synthetic
  source 1..23: mol_type = other RNA
ctcaggtccttcttcttgtcctt

SEQ ID NO: 15003 - RNA, 24 nt, synthetic construct
  misc_feature 1..24: note = Synthetic
  source 1..24: mol_type = other RNA
gctcaggtccttcttcttgtcctt

SEQ ID NO: 15004 - RNA, 18 nt, synthetic construct
  misc_feature 1..18: note = Synthetic
  source 1..18: mol_type = other RNA
ctcggacaccagcagctt

SEQ ID NO: 15005 - RNA, 19 nt, synthetic construct
  misc_feature 1..19: note = Synthetic
  source 1..19: mol_type = other RNA
gctcggacaccagcagctt

SEQ ID NO: 15006 - RNA, 21 nt, synthetic construct
  misc_feature 1..21: note = Synthetic
  source 1..21: mol_type = other RNA
cagctcggacaccagcagctt

SEQ ID NO: 15007 - RNA, 22 nt, synthetic construct
  misc_feature 1..22: note = Synthetic
  source 1..22: mol_type = other RNA
ccagctcggacaccagcagctt

SEQ ID NO: 15008 - RNA, 23 nt, synthetic construct
  misc_feature 1..23: note = Synthetic
  source 1..23: mol_type = other RNA
gccagctcggacaccagcagctt

SEQ ID NO: 15009 - RNA, 24 nt, synthetic construct
  misc_feature 1..24: note = Synthetic
  source 1..24: mol_type = other RNA
ggccagctcggacaccagcagctt

SEQ ID NO: 15010 - RNA, 18 nt, synthetic construct
  misc_feature 1..18: note = Synthetic
  source 1..18: mol_type = other RNA
ctttatcttgctgcgctt

SEQ ID NO: 15011 - RNA, 19 nt, synthetic construct
  misc_feature 1..19: note = Synthetic
  source 1..19: mol_type = other RNA
cctttatcttgctgcgctt

SEQ ID NO: 15012 - RNA, 21 nt, synthetic construct
  misc_feature 1..21: note = Synthetic
  source 1..21: mol_type = other RNA
cacctttatcttgctgcgctt

SEQ ID NO: 15013 - RNA, 22 nt, synthetic construct
  misc_feature 1..22: note = Synthetic
  source 1..22: mol_type = other RNA
tcacctttatcttgctgcgctt

SEQ ID NO: 15014 - RNA, 23 nt, synthetic construct
  misc_feature 1..23: note = Synthetic
  source 1..23: mol_type = other RNA
ttcacctttatcttgctgcgctt

SEQ ID NO: 15015 - RNA, 24 nt, synthetic construct
  misc_feature 1..24: note = Synthetic
  source 1..24: mol_type = other RNA
gttcacctttatcttgctgcgctt

SEQ ID NO: 15016 - RNA, 18 nt, synthetic construct
  misc_feature 1..18: note = Synthetic
  source 1..18: mol_type = other RNA
cgtgctgaagcacaggtt

SEQ ID NO: 15017 - RNA, 19 nt, synthetic construct
  misc_feature 1..19: note = Synthetic
  source 1..19: mol_type = other RNA
gcgtgctgaagcacaggtt

SEQ ID NO: 15018 - RNA, 21 nt, synthetic construct
  misc_feature 1..21: note = Synthetic
  source 1..21: mol_type = other RNA
gagcgtgctgaagcacaggtt

SEQ ID NO: 15019 - RNA, 22 nt, synthetic construct
  misc_feature 1..22: note = Synthetic
  source 1..22: mol_type = other RNA
agagcgtgctgaagcacaggtt

SEQ ID NO: 15020 - RNA, 23 nt, synthetic construct
  misc_feature 1..23: note = Synthetic
  source 1..23: mol_type = other RNA
gagagcgtgctgaagcacaggtt

SEQ ID NO: 15021 - RNA, 24 nt, synthetic construct
  misc_feature 1..24: note = Synthetic
  source 1..24: mol_type = other RNA
ggagagcgtgctgaagcacaggtt

SEQ ID NO: 15022 - RNA, 18 nt, synthetic construct
  misc_feature 1..18: note = Synthetic
  source 1..18: mol_type = other RNA
gaagtaatagtccgtgtt

SEQ ID NO: 15023 - RNA, 19 nt, synthetic construct
  misc_feature 1..19: note = Synthetic
  source 1..19: mol_type = other RNA
agaagtaatagtccgtgtt

SEQ ID NO: 15024 - RNA, 21 nt, synthetic construct
  misc_feature 1..21: note = Synthetic
  source 1..21: mol_type = other RNA
ggagaagtaatagtccgtgtt

SEQ ID NO: 15025 - RNA, 22 nt, synthetic construct
  misc_feature 1..22: note = Synthetic
  source 1..22: mol_type = other RNA
gggagaagtaatagtccgtgtt

SEQ ID NO: 15026 - RNA, 23 nt, synthetic construct
  misc_feature 1..23: note = Synthetic
  source 1..23: mol_type = other RNA
tgggagaagtaatagtccgtgtt

SEQ ID NO: 15027 - RNA, 24 nt, synthetic construct
  misc_feature 1..24: note = Synthetic
  source 1..24: mol_type = other RNA
gtgggagaagtaatagtccgtgtt

SEQ ID NO: 15028 - RNA, 18 nt, synthetic construct
  misc_feature 1..18: note = Synthetic
  source 1..18: mol_type = other RNA
ggctggtaccgtctcaaa

SEQ ID NO: 15029 - RNA, 19 nt, synthetic construct
  misc_feature 1..19: note = Synthetic
  source 1..19: mol_type = other RNA
cggctggtaccgtctcaaa

SEQ ID NO: 15030 - RNA, 21 nt, synthetic construct
  misc_feature 1..21: note = Synthetic
  source 1..21: mol_type = other RNA
ttcggctggtaccgtctcaaa

SEQ ID NO: 15031 - RNA, 22 nt, synthetic construct
  misc_feature 1..22: note = Synthetic
  source 1..22: mol_type = other RNA
cttcggctggtaccgtctcaaa

SEQ ID NO: 15032 - RNA, 23 nt, synthetic construct
  misc_feature 1..23: note = Synthetic
  source 1..23: mol_type = other RNA
ccttcggctggtaccgtctcaaa

SEQ ID NO: 15033 - RNA, 24 nt, synthetic construct
  misc_feature 1..24: note = Synthetic
  source 1..24: mol_type = other RNA
accttcggctggtaccgtctcaaa

SEQ ID NO: 15034 - RNA, 18 nt, synthetic construct
  misc_feature 1..18: note = Synthetic
  source 1..18: mol_type = other RNA
tttgtcctcaccgccgaa

SEQ ID NO: 15035 - RNA, 19 nt, synthetic construct
  misc_feature 1..19: note = Synthetic
  source 1..19: mol_type = other RNA
ctttgtcctcaccgccgaa

SEQ ID NO: 15036 - RNA, 21 nt, synthetic construct
  misc_feature 1..21: note = Synthetic
  source 1..21: mol_type = other RNA
gactttgtcctcaccgccgaa

SEQ ID NO: 15037 - RNA, 22 nt, synthetic construct
  misc_feature 1..22: note = Synthetic
  source 1..22: mol_type = other RNA
ggactttgtcctcaccgccgaa

SEQ ID NO: 15038 - RNA, 23 nt, synthetic construct
  misc_feature 1..23: note = Synthetic
  source 1..23: mol_type = other RNA
aggactttgtcctcaccgccgaa

SEQ ID NO: 15039 - RNA, 24 nt, synthetic construct
  misc_feature 1..24: note = Synthetic
  source 1..24: mol_type = other RNA
caggactttgtcctcaccgccgaa

SEQ ID NO: 15040 - RNA, 18 nt, synthetic construct
  misc_feature 1..18: note = Synthetic
  source 1..18: mol_type = other RNA
accgcgtctacgtccgaa

SEQ ID NO: 15041 - RNA, 19 nt, synthetic construct
  misc_feature 1..19: note = Synthetic
  source 1..19: mol_type = other RNA
taccgcgtctacgtccgaa

SEQ ID NO: 15042 - RNA, 21 nt, synthetic construct
  misc_feature 1..21: note = Synthetic
  source 1..21: mol_type = other RNA
tttaccgcgtctacgtccgaa

SEQ ID NO: 15043 - RNA, 22 nt, synthetic construct
  misc_feature 1..22: note = Synthetic
  source 1..22: mol_type = other RNA
ttttaccgcgtctacgtccgaa

SEQ ID NO: 15044 - RNA, 23 nt, synthetic construct
  misc_feature 1..23: note = Synthetic
  source 1..23: mol_type = other RNA
gttttaccgcgtctacgtccgaa

SEQ ID NO: 15045 - RNA, 24 nt, synthetic construct
  misc_feature 1..24: note = Synthetic
  source 1..24: mol_type = other RNA
tgttttaccgcgtctacgtccgaa

SEQ ID NO: 15046 - RNA, 18 nt, synthetic construct
  misc_feature 1..18: note = Synthetic
  source 1..18: mol_type = other RNA
agtacttttacatgaaca

SEQ ID NO: 15047 - RNA, 19 nt, synthetic construct
  misc_feature 1..19: note = Synthetic
  source 1..19: mol_type = other RNA
cagtacttttacatgaaca

SEQ ID NO: 15048 - RNA, 21 nt, synthetic construct
  misc_feature 1..21: note = Synthetic
  source 1..21: mol_type = other RNA
ggcagtacttttacatgaaca

SEQ ID NO: 15049 - RNA, 22 nt, synthetic construct
  misc_feature 1..22: note = Synthetic
  source 1..22: mol_type = other RNA
cggcagtacttttacatgaaca

SEQ ID NO: 15050 - RNA, 23 nt, synthetic construct
  misc_feature 1..23: note = Synthetic
  source 1..23: mol_type = other RNA
gcggcagtacttttacatgaaca

SEQ ID NO: 15051 - RNA, 24 nt, synthetic construct
  misc_feature 1..24: note = Synthetic
  source 1..24: mol_type = other RNA
cgcggcagtacttttacatgaaca

SEQ ID NO: 15052 - RNA, 18 nt, synthetic construct
  misc_feature 1..18: note = Synthetic
  source 1..18: mol_type = other RNA
caggcacgtggggtacca

SEQ ID NO: 15053 - RNA, 19 nt, synthetic construct
  misc_feature 1..19: note = Synthetic
  source 1..19: mol_type = other RNA
gcaggcacgtggggtacca

SEQ ID NO: 15054 - RNA, 21 nt, synthetic construct
  misc_feature 1..21: note = Synthetic
  source 1..21: mol_type = other RNA
cggcaggcacgtggggtacca

SEQ ID NO: 15055 - RNA, 22 nt, synthetic construct
  misc_feature 1..22: note = Synthetic
  source 1..22: mol_type = other RNA
ccggcaggcacgtggggtacca

SEQ ID NO: 15056 - RNA, 23 nt, synthetic construct
  misc_feature 1..23: note = Synthetic
  source 1..23: mol_type = other RNA
gccggcaggcacgtggggtacca

SEQ ID NO: 15057 - RNA, 24 nt, synthetic construct
  misc_feature 1..24: note = Synthetic
  source 1..24: mol_type = other RNA
cgccggcaggcacgtggggtacca

SEQ ID NO: 15058 - RNA, 18 nt, synthetic construct
  misc_feature 1..18: note = Synthetic
  source 1..18: mol_type = other RNA
ctagacgccgccgcccca

SEQ ID NO: 15059 - RNA, 19 nt, synthetic construct
  misc_feature 1..19: note = Synthetic
  source 1..19: mol_type = other RNA
gctagacgccgccgcccca

SEQ ID NO: 15060 - RNA, 21 nt, synthetic construct
  misc_feature 1..21: note = Synthetic
  source 1..21: mol_type = other RNA
gagctagacgccgccgcccca

SEQ ID NO: 15061 - RNA, 22 nt, synthetic construct
  misc_feature 1..22: note = Synthetic
  source 1..22: mol_type = other RNA
cgagctagacgccgccgcccca

SEQ ID NO: 15062 - RNA, 23 nt, synthetic construct
  misc_feature 1..23: note = Synthetic
  source 1..23: mol_type = other RNA
gcgagctagacgccgccgcccca

SEQ ID NO: 15063 - RNA, 24 nt, synthetic construct
  misc_feature 1..24: note = Synthetic
  source 1..24: mol_type = other RNA
cgcgagctagacgccgccgcccca

SEQ ID NO: 15064 - RNA, 18 nt, synthetic construct
  misc_feature 1..18: note = Synthetic
  source 1..18: mol_type = other RNA
gaggacgaggagcggcca

SEQ ID NO: 15065 - RNA, 19 nt, synthetic construct
  misc_feature 1..19: note = Synthetic
  source 1..19: mol_type = other RNA
ggaggacgaggagcggcca

SEQ ID NO: 15066 - RNA, 21 nt, synthetic construct
  misc_feature 1..21: note = Synthetic
  source 1..21: mol_type = other RNA
cgggaggacgaggagcggcca

SEQ ID NO: 15067 - RNA, 22 nt, synthetic construct
  misc_feature 1..22: note = Synthetic
  source 1..22: mol_type = other RNA
ccgggaggacgaggagcggcca

SEQ ID NO: 15068 - RNA, 23 nt, synthetic construct
  misc_feature 1..23: note = Synthetic
  source 1..23: mol_type = other RNA
cccgggaggacgaggagcggcca

SEQ ID NO: 15069 - RNA, 24 nt, synthetic construct
  misc_feature 1..24: note = Synthetic
  source 1..24: mol_type = other RNA
gcccgggaggacgaggagcggcca

SEQ ID NO: 15070 - RNA, 18 nt, synthetic construct
  misc_feature 1..18: note = Synthetic
  source 1..18: mol_type = other RNA
cggcggacaacctggcca

SEQ ID NO: 15071 - RNA, 19 nt, synthetic construct
  misc_feature 1..19: note = Synthetic
  source 1..19: mol_type = other RNA
acggcggacaacctggcca

SEQ ID NO: 15072 - RNA, 21 nt, synthetic construct
  misc_feature 1..21: note = Synthetic
  source 1..21: mol_type = other RNA
gtacggcggacaacctggcca

SEQ ID NO: 15073 - RNA, 22 nt, synthetic construct
  misc_feature 1..22: note = Synthetic
  source 1..22: mol_type = other RNA
tgtacggcggacaacctggcca

SEQ ID NO: 15074 - RNA, 23 nt, synthetic construct
  misc_feature 1..23: note = Synthetic
  source 1..23: mol_type = other RNA
ctgtacggcggacaacctggcca

SEQ ID NO: 15075 - RNA, 24 nt, synthetic construct
  misc_feature 1..24: note = Synthetic
  source 1..24: mol_type = other RNA
actgtacggcggacaacctggcca

SEQ ID NO: 15076 - RNA, 18 nt, synthetic construct
  misc_feature 1..18: note = Synthetic
  source 1..18: mol_type = other RNA
aactcgtcgaatgttgca

SEQ ID NO: 15077 - RNA, 19 nt, synthetic construct
  misc_feature 1..19: note = Synthetic
  source 1..19: mol_type = other RNA
aaactcgtcgaatgttgca

SEQ ID NO: 15078 - RNA, 21 nt, synthetic construct
  misc_feature 1..21: note = Synthetic
  source 1..21: mol_type = other RNA
ggaaactcgtcgaatgttgca

SEQ ID NO: 15079 - RNA, 22 nt, synthetic construct
  misc_feature 1..22: note = Synthetic
  source 1..22: mol_type = other RNA
aggaaactcgtcgaatgttgca

SEQ ID NO: 15080 - RNA, 23 nt, synthetic construct
  misc_feature 1..23: note = Synthetic
  source 1..23: mol_type = other RNA
gaggaaactcgtcgaatgttgca

SEQ ID NO: 15081 - RNA, 24 nt, synthetic construct
  misc_feature 1..24: note = Synthetic
  source 1..24: mol_type = other RNA
ggaggaaactcgtcgaatgttgca

SEQ ID NO: 15082 - RNA, 18 nt, synthetic construct
  misc_feature 1..18: note = Synthetic
  source 1..18: mol_type = other RNA
ggaataacgccaagatca

SEQ ID NO: 15083 - RNA, 19 nt, synthetic construct
  misc_feature 1..19: note = Synthetic
  source 1..19: mol_type = other RNA
gggaataacgccaagatca

SEQ ID NO: 15084 - RNA, 21 nt, synthetic construct
  misc_feature 1..21: note = Synthetic
  source 1..21: mol_type = other RNA
ttgggaataacgccaagatca

SEQ ID NO: 15085 - RNA, 22 nt, synthetic construct
  misc_feature 1..22: note = Synthetic
  source 1..22: mol_type = other RNA
tttgggaataacgccaagatca

SEQ ID NO: 15086 - RNA, 23 nt, synthetic construct
  misc_feature 1..23: note = Synthetic
  source 1..23: mol_type = other RNA
gtttgggaataacgccaagatca

SEQ ID NO: 15087 - RNA, 24 nt, synthetic construct
  misc_feature 1..24: note = Synthetic
  source 1..24: mol_type = other RNA
tgtttgggaataacgccaagatca

SEQ ID NO: 15088 - RNA, 18 nt, synthetic construct
  misc_feature 1..18: note = Synthetic
  source 1..18: mol_type = other RNA
actcggtgtacgggttca

SEQ ID NO: 15089 - RNA, 19 nt, synthetic construct
  misc_feature 1..19: note = Synthetic
  source 1..19: mol_type = other RNA
aactcggtgtacgggttca

SEQ ID NO: 15090 - RNA, 21 nt, synthetic construct
  misc_feature 1..21: note = Synthetic
  source 1..21: mol_type = other RNA
gtaactcggtgtacgggttca

SEQ ID NO: 15091 - RNA, 22 nt, synthetic construct
  misc_feature 1..22: note = Synthetic
  source 1..22: mol_type = other RNA
tgtaactcggtgtacgggttca

SEQ ID NO: 15092 - RNA, 23 nt, synthetic construct
  misc_feature 1..23: note = Synthetic
  source 1..23: mol_type = other RNA
gtgtaactcggtgtacgggttca

SEQ ID NO: 15093 - RNA, 24 nt, synthetic construct
  misc_feature 1..24: note = Synthetic
  source 1..24: mol_type = other RNA
tgtgtaactcggtgtacgggttca

SEQ ID NO: 15094 - RNA, 18 nt, synthetic construct
  misc_feature 1..18: note = Synthetic
  source 1..18: mol_type = other RNA
gcaaggactacctggaga

SEQ ID NO: 15095 - RNA, 19 nt, synthetic construct
  misc_feature 1..19: note = Synthetic
  source 1..19: mol_type = other RNA
ggcaaggactacctggaga

SEQ ID NO: 15096 - RNA, 21 nt, synthetic construct
  misc_feature 1..21: note = Synthetic
  source 1..21: mol_type = other RNA
cgggcaaggactacctggaga

SEQ ID NO: 15097 - RNA, 22 nt, synthetic construct
  misc_feature 1..22: note = Synthetic
  source 1..22: mol_type = other RNA
gcgggcaaggactacctggaga

SEQ ID NO: 15098 - RNA, 23 nt, synthetic construct
  misc_feature 1..23: note = Synthetic
  source 1..23: mol_type = other RNA
ggcgggcaaggactacctggaga

SEQ ID NO: 15099 - RNA, 24 nt, synthetic construct
  misc_feature 1..24: note = Synthetic
  source 1..24: mol_type = other RNA
aggcgggcaaggactacctggaga

SEQ ID NO: 15100 - RNA, 18 nt, synthetic construct
  misc_feature 1..18: note = Synthetic
  source 1..18: mol_type = other RNA
tggacgccatcacaccga

SEQ ID NO: 15101 - RNA, 19 nt, synthetic construct
  misc_feature 1..19: note = Synthetic
  source 1..19: mol_type = other RNA
atggacgccatcacaccga

SEQ ID NO: 15102 - RNA, 21 nt, synthetic construct
  misc_feature 1..21: note = Synthetic
  source 1..21: mol_type = other RNA
ttatggacgccatcacaccga

SEQ ID NO: 15103 - RNA, 22 nt, synthetic construct
  misc_feature 1..22: note = Synthetic
  source 1..22: mol_type = other RNA
tttatggacgccatcacaccga

SEQ ID NO: 15104 - RNA, 23 nt, synthetic construct
  misc_feature 1..23: note = Synthetic
  source 1..23: mol_type = other RNA
gtttatggacgccatcacaccga

SEQ ID NO: 15105 - RNA, 24 nt, synthetic construct
  misc_feature 1..24: note = Synthetic
  source 1..24: mol_type = other RNA
ggtttatggacgccatcacaccga

SEQ ID NO: 15106 - RNA, 18 nt, synthetic construct
  misc_feature 1..18: note = Synthetic
  source 1..18: mol_type = other RNA
cgaggagggcgggggcga

SEQ ID NO: 15107 - RNA, 19 nt, synthetic construct
  misc_feature 1..19: note = Synthetic
  source 1..19: mol_type = other RNA
gcgaggagggcgggggcga

SEQ ID NO: 15108 - RNA, 21 nt, synthetic construct
  misc_feature 1..21: note = Synthetic
  source 1..21: mol_type = other RNA
acgcgaggagggcgggggcga

SEQ ID NO: 15109 - RNA, 22 nt, synthetic construct
  misc_feature 1..22: note = Synthetic
  source 1..22: mol_type = other RNA
aacgcgaggagggcgggggcga

SEQ ID NO: 15110 - RNA, 23 nt, synthetic construct
  misc_feature 1..23: note = Synthetic
  source 1..23: mol_type = other RNA
gaacgcgaggagggcgggggcga

SEQ ID NO: 15111 - RNA, 24 nt, synthetic construct
  misc_feature 1..24: note = Synthetic
  source 1..24: mol_type = other RNA
cgaacgcgaggagggcgggggcga

SEQ ID NO: 15112 - RNA, 18 nt, synthetic construct
  misc_feature 1..18: note = Synthetic
  source 1..18: mol_type = other RNA
gtcaaggctcacgtgcga

SEQ ID NO: 15113 - RNA, 19 nt, synthetic construct
  misc_feature 1..19: note = Synthetic
  source 1..19: mol_type = other RNA
cgtcaaggctcacgtgcga

SEQ ID NO: 15114 - RNA, 21 nt, synthetic construct
  misc_feature 1..21: note = Synthetic
  source 1..21: mol_type = other RNA
ttcgtcaaggctcacgtgcga

SEQ ID NO: 15115 - RNA, 22 nt, synthetic construct
  misc_feature 1..22: note = Synthetic
  source 1..22: mol_type = other RNA
cttcgtcaaggctcacgtgcga

SEQ ID NO: 15116 - RNA, 23 nt, synthetic construct
  misc_feature 1..23: note = Synthetic
  source 1..23: mol_type = other RNA
tcttcgtcaaggctcacgtgcga

SEQ ID NO: 15117 - RNA, 24 nt, synthetic construct
  misc_feature 1..24: note = Synthetic
  source 1..24: mol_type = other RNA
ttcttcgtcaaggctcacgtgcga

SEQ ID NO: 15118 - RNA, 18 nt, synthetic construct
  misc_feature 1..18: note = Synthetic
  source 1..18: mol_type = other RNA
ggacaacctggccatcga

SEQ ID NO: 15119 - RNA, 19 nt, synthetic construct
  misc_feature 1..19: note = Synthetic
  source 1..19: mol_type = other RNA
cggacaacctggccatcga

SEQ ID NO: 15120 - RNA, 21 nt, synthetic construct
  misc_feature 1..21: note = Synthetic
  source 1..21: mol_type = other RNA
ggcggacaacctggccatcga

SEQ ID NO: 15121 - RNA, 22 nt, synthetic construct
  misc_feature 1..22: note = Synthetic
  source 1..22: mol_type = other RNA
cggcggacaacctggccatcga

SEQ ID NO: 15122 - RNA, 23 nt, synthetic construct
  misc_feature 1..23: note = Synthetic
  source 1..23: mol_type = other RNA
acggcggacaacctggccatcga

SEQ ID NO: 15123 - RNA, 24 nt, synthetic construct
  misc_feature 1..24: note = Synthetic
  source 1..24: mol_type = other RNA
tacggcggacaacctggccatcga

SEQ ID NO: 15124 - RNA, 18 nt, synthetic construct
  misc_feature 1..18: note = Synthetic
  source 1..18: mol_type = other RNA
ggagcggccagaggagga

SEQ ID NO: 15125 - RNA, 19 nt, synthetic construct
  misc_feature 1..19: note = Synthetic
  source 1..19: mol_type = other RNA
aggagcggccagaggagga

SEQ ID NO: 15126 - RNA, 21 nt, synthetic construct
  misc_feature 1..21: note = Synthetic
  source 1..21: mol_type = other RNA
cgaggagcggccagaggagga

SEQ ID NO: 15127 - RNA, 22 nt, synthetic construct
  misc_feature 1..22: note = Synthetic
  source 1..22: mol_type = other RNA
acgaggagcggccagaggagga

SEQ ID NO: 15128 - RNA, 23 nt, synthetic construct
  misc_feature 1..23: note = Synthetic
  source 1..23: mol_type = other RNA
gacgaggagcggccagaggagga

SEQ ID NO: 15129 - RNA, 24 nt, synthetic construct
  misc_feature 1..24: note = Synthetic
  source 1..24: mol_type = other RNA
ggacgaggagcggccagaggagga

SEQ ID NO: 15130 - RNA, 18 nt, synthetic construct
  misc_feature 1..18: note = Synthetic
  source 1..18: mol_type = other RNA
gcgcatcaccgacccgga

SEQ ID NO: 15131 - RNA, 19 nt, synthetic construct
  misc_feature 1..19: note = Synthetic
  source 1..19: mol_type = other RNA
ggcgcatcaccgacccgga

SEQ ID NO: 15132 - RNA, 21 nt, synthetic construct
  misc_feature 1..21: note = Synthetic
  source 1..21: mol_type = other RNA
tcggcgcatcaccgacccgga

SEQ ID NO: 15133 - RNA, 22 nt, synthetic construct
  misc_feature 1..22: note = Synthetic
  source 1..22: mol_type = other RNA
atcggcgcatcaccgacccgga

SEQ ID NO: 15134 - RNA, 23 nt, synthetic construct
  misc_feature 1..23: note = Synthetic
  source 1..23: mol_type = other RNA
catcggcgcatcaccgacccgga

SEQ ID NO: 15135 - RNA, 24 nt, synthetic construct
  misc_feature 1..24: note = Synthetic
  source 1..24: mol_type = other RNA
ccatcggcgcatcaccgacccgga

SEQ ID NO: 15136 - RNA, 18 nt, synthetic construct
  misc_feature 1..18: note = Synthetic
  source 1..18: mol_type = other RNA
tccccgaatcccacctga

SEQ ID NO: 15137 - RNA, 19 nt, synthetic construct
  misc_feature 1..19: note = Synthetic
  source 1..19: mol_type = other RNA
ctccccgaatcccacctga

SEQ ID NO: 15138 - RNA, 21 nt, synthetic construct
  misc_feature 1..21: note = Synthetic
  source 1..21: mol_type = other RNA
acctccccgaatcccacctga

SEQ ID NO: 15139 - RNA, 22 nt, synthetic construct
  misc_feature 1..22: note = Synthetic
  source 1..22: mol_type = other RNA
gacctccccgaatcccacctga

SEQ ID NO: 15140 - RNA, 23 nt, synthetic construct
  misc_feature 1..23: note = Synthetic
  source 1..23: mol_type = other RNA
cgacctccccgaatcccacctga

SEQ ID NO: 15141 - RNA, 24 nt, synthetic construct
  misc_feature 1..24: note = Synthetic
  source 1..24: mol_type = other RNA
gcgacctccccgaatcccacctga

SEQ ID NO: 15142 - RNA, 18 nt, synthetic construct
  misc_feature 1..18: note = Synthetic
  source 1..18: mol_type = other RNA
ttccatgcgcatcatcta

SEQ ID NO: 15143 - RNA, 19 nt, synthetic construct
  misc_feature 1..19: note = Synthetic
  source 1..19: mol_type = other RNA
attccatgcgcatcatcta

SEQ ID NO: 15144 - RNA, 21 nt, synthetic construct
  misc_feature 1..21: note = Synthetic
  source 1..21: mol_type = other RNA
ctattccatgcgcatcatcta

SEQ ID NO: 15145 - RNA, 22 nt, synthetic construct
  misc_feature 1..22: note = Synthetic
  source 1..22: mol_type = other RNA
cctattccatgcgcatcatcta

SEQ ID NO: 15146 - RNA, 23 nt, synthetic construct
  misc_feature 1..23: note = Synthetic
  source 1..23: mol_type = other RNA
ccctattccatgcgcatcatcta

SEQ ID NO: 15147 - RNA, 24 nt, synthetic construct
  misc_feature 1..24: note = Synthetic
  source 1..24: mol_type = other RNA
gccctattccatgcgcatcatcta

SEQ ID NO: 15148 - RNA, 18 nt, synthetic construct
  misc_feature 1..18: note = Synthetic
  source 1..18: mol_type = other RNA
gtacatcggcgtcatcta

SEQ ID NO: 15149 - RNA, 19 nt, synthetic construct
  misc_feature 1..19: note = Synthetic
  source 1..19: mol_type = other RNA
agtacatcggcgtcatcta

SEQ ID NO: 15150 - RNA, 21 nt, synthetic construct
  misc_feature 1..21: note = Synthetic
  source 1..21: mol_type = other RNA
aaagtacatcggcgtcatcta

SEQ ID NO: 15151 - RNA, 22 nt, synthetic construct
  misc_feature 1..22: note = Synthetic
  source 1..22: mol_type = other RNA
aaaagtacatcggcgtcatcta

SEQ ID NO: 15152 - RNA, 23 nt, synthetic construct
  misc_feature 1..23: note = Synthetic
  source 1..23: mol_type = other RNA
aaaaagtacatcggcgtcatcta

SEQ ID NO: 15153 - RNA, 24 nt, synthetic construct
  misc_feature 1..24: note = Synthetic
  source 1..24: mol_type = other RNA
gaaaaagtacatcggcgtcatcta

SEQ ID NO: 15154 - RNA, 18 nt, synthetic construct
  misc_feature 1..18: note = Synthetic
  source 1..18: mol_type = other RNA
gcccagacccgcgaggta

SEQ ID NO: 15155 - RNA, 19 nt, synthetic construct
  misc_feature 1..19: note = Synthetic
  source 1..19: mol_type = other RNA
ggcccagacccgcgaggta

SEQ ID NO: 15156 - RNA, 21 nt, synthetic construct
  misc_feature 1..21: note = Synthetic
  source 1..21: mol_type = other RNA
gtggcccagacccgcgaggta

SEQ ID NO: 15157 - RNA, 22 nt, synthetic construct
  misc_feature 1..22: note = Synthetic
  source 1..22: mol_type = other RNA
cgtggcccagacccgcgaggta

SEQ ID NO: 15158 - RNA, 23 nt, synthetic construct
  misc_feature 1..23: note = Synthetic
  source 1..23: mol_type = other RNA
tcgtggcccagacccgcgaggta

SEQ ID NO: 15159 - RNA, 24 nt, synthetic construct
  misc_feature 1..24: note = Synthetic
  source 1..24: mol_type = other RNA
atcgtggcccagacccgcgaggta

SEQ ID NO: 15160 - RNA, 18 nt, synthetic construct
  misc_feature 1..18: note = Synthetic
  source 1..18: mol_type = other RNA
ccgccgggcccgcgcaac

SEQ ID NO: 15161 - RNA, 19 nt, synthetic construct
  misc_feature 1..19: note = Synthetic
  source 1..19: mol_type = other RNA
gccgccgggcccgcgcaac

SEQ ID NO: 15162 - RNA, 21 nt, synthetic construct
  misc_feature 1..21: note = Synthetic
  source 1..21: mol_type = other RNA
acgccgccgggcccgcgcaac

SEQ ID NO: 15163 - RNA, 22 nt, synthetic construct
  misc_feature 1..22: note = Synthetic
  source 1..22: mol_type = other RNA
tacgccgccgggcccgcgcaac

SEQ ID NO: 15164 - RNA, 23 nt, synthetic construct
  misc_feature 1..23: note = Synthetic
  source 1..23: mol_type = other RNA
ctacgccgccgggcccgcgcaac

SEQ ID NO: 15165 - RNA, 24 nt, synthetic construct
  misc_feature 1..24: note = Synthetic
  source 1..24: mol_type = other RNA
actacgccgccgggcccgcgcaac

SEQ ID NO: 15166 - RNA, 18 nt, synthetic construct
  misc_feature 1..18: note = Synthetic
  source 1..18: mol_type = other RNA
gggaggacgaggacgaac

SEQ ID NO: 15167 - RNA, 19 nt, synthetic construct
  misc_feature 1..19: note = Synthetic
  source 1..19: mol_type = other RNA
ggggaggacgaggacgaac

SEQ ID NO: 15168 - RNA, 21 nt, synthetic construct
  misc_feature 1..21: note = Synthetic
  source 1..21: mol_type = other RNA
agggggaggacgaggacgaac

SEQ ID NO: 15169 - RNA, 22 nt, synthetic construct
  misc_feature 1..22: note = Synthetic
  source 1..22: mol_type = other RNA
gagggggaggacgaggacgaac

SEQ ID NO: 15170 - RNA, 23 nt, synthetic construct
  misc_feature 1..23: note = Synthetic
  source 1..23: mol_type = other RNA
ggagggggaggacgaggacgaac

SEQ ID NO: 15171 - RNA, 24 nt, synthetic construct
  misc_feature 1..24: note = Synthetic
  source 1..24: mol_type = other RNA
aggagggggaggacgaggacgaac

SEQ ID NO: 15172 - RNA, 18 nt, synthetic construct
  misc_feature 1..18: note = Synthetic
  source 1..18: mol_type = other RNA
cagtacttttacatgaac

SEQ ID NO: 15173 - RNA, 19 nt, synthetic construct
  misc_feature 1..19: note = Synthetic
  source 1..19: mol_type = other RNA
gcagtacttttacatgaac

SEQ ID NO: 15174 - RNA, 21 nt, synthetic construct
  misc_feature 1..21: note = Synthetic
  source 1..21: mol_type = other RNA
cggcagtacttttacatgaac

SEQ ID NO: 15175 - RNA, 22 nt, synthetic construct
  misc_feature 1..22: note = Synthetic
  source 1..22: mol_type = other RNA
gcggcagtacttttacatgaac

SEQ ID NO: 15176 - RNA, 23 nt, synthetic construct
  misc_feature 1..23: note = Synthetic
  source 1..23: mol_type = other RNA
cgcggcagtacttttacatgaac

SEQ ID NO: 15177 - RNA, 24 nt, synthetic construct
  misc_feature 1..24: note = Synthetic
  source 1..24: mol_type = other RNA
acgcggcagtacttttacatgaac

SEQ ID NO: 15178 - RNA, 18 nt, synthetic construct
  misc_feature 1..18: note = Synthetic
  source 1..18: mol_type = other RNA
cacggcgtcgccctgaac

SEQ ID NO: 15179 - RNA, 19 nt, synthetic construct
  misc_feature 1..19: note = Synthetic
  source 1..19: mol_type = other RNA
ccacggcgtcgccctgaac

SEQ ID NO: 15180 - RNA, 21 nt, synthetic construct
  misc_feature 1..21: note = Synthetic
  source 1..21: mol_type = other RNA
gcccacggcgtcgccctgaac

SEQ ID NO: 15181 - RNA, 22 nt, synthetic construct
  misc_feature 1..22: note = Synthetic
  source 1..22: mol_type = other RNA
tgcccacggcgtcgccctgaac

SEQ ID NO: 15182 - RNA, 23 nt, synthetic construct
  misc_feature 1..23: note = Synthetic
  source 1..23: mol_type = other RNA
ttgcccacggcgtcgccctgaac

SEQ ID NO: 15183 - RNA, 24 nt, synthetic construct
  misc_feature 1..24: note = Synthetic
  source 1..24: mol_type = other RNA
attgcccacggcgtcgccctgaac

SEQ ID NO: 15184 - RNA, 18 nt, synthetic construct
  misc_feature 1..18: note = Synthetic
  source 1..18: mol_type = other RNA
gacctccccgaatcccac

SEQ ID NO: 15185 - RNA, 19 nt, synthetic construct
  misc_feature 1..19: note = Synthetic
  source 1..19: mol_type = other RNA
cgacctccccgaatcccac

SEQ ID NO: 15186 - RNA, 21 nt, synthetic construct
  misc_feature 1..21: note = Synthetic
  source 1..21: mol_type = other RNA
tgcgacctccccgaatcccac

SEQ ID NO: 15187 - RNA, 22 nt, synthetic construct
  misc_feature 1..22: note = Synthetic
  source 1..22: mol_type = other RNA
ctgcgacctccccgaatcccac

SEQ ID NO: 15188 - RNA, 23 nt, synthetic construct
  misc_feature 1..23: note = Synthetic
  source 1..23: mol_type = other RNA
cctgcgacctccccgaatcccac

SEQ ID NO: 15189 - RNA, 24 nt, synthetic construct
  misc_feature 1..24: note = Synthetic
  source 1..24: mol_type = other RNA
tcctgcgacctccccgaatcccac

SEQ ID NO: 15190 - RNA, 18 nt, synthetic construct
  misc_feature 1..18: note = Synthetic
  source 1..18: mol_type = other RNA
gccgacgcagtggcgcac

SEQ ID NO: 15191 - RNA, 19 nt, synthetic construct
  misc_feature 1..19: note = Synthetic
  source 1..19: mol_type = other RNA
ggccgacgcagtggcgcac

SEQ ID NO: 15192 - RNA, 21 nt, synthetic construct
  misc_feature 1..21: note = Synthetic
  source 1..21: mol_type = other RNA
agggccgacgcagtggcgcac

SEQ ID NO: 15193 - RNA, 22 nt, synthetic construct
  misc_feature 1..22: note = Synthetic
  source 1..22: mol_type = other RNA
gagggccgacgcagtggcgcac

SEQ ID NO: 15194 - RNA, 23 nt, synthetic construct
  misc_feature 1..23: note = Synthetic
  source 1..23: mol_type = other RNA
tgagggccgacgcagtggcgcac

SEQ ID NO: 15195 - RNA, 24 nt, synthetic construct
  misc_feature 1..24: note = Synthetic
  source 1..24: mol_type = other RNA
ctgagggccgacgcagtggcgcac

SEQ ID NO: 15196 - RNA, 18 nt, synthetic construct
  misc_feature 1..18: note = Synthetic
  source 1..18: mol_type = other RNA
gagaccgccggcaggcac

SEQ ID NO: 15197 - RNA, 19 nt, synthetic construct
  misc_feature 1..19: note = Synthetic
  source 1..19: mol_type = other RNA
ggagaccgccggcaggcac

SEQ ID NO: 15198 - RNA, 21 nt, synthetic construct
  misc_feature 1..21: note = Synthetic
  source 1..21: mol_type = other RNA
cgggagaccgccggcaggcac

SEQ ID NO: 15199 - RNA, 22 nt, synthetic construct
  misc_feature 1..22: note = Synthetic
  source 1..22: mol_type = other RNA
gcgggagaccgccggcaggcac

SEQ ID NO: 15200 - RNA, 23 nt, synthetic construct
  misc_feature 1..23: note = Synthetic
  source 1..23: mol_type = other RNA
cgcgggagaccgccggcaggcac

SEQ ID NO: 15201 - RNA, 24 nt, synthetic construct
  misc_feature 1..24: note = Synthetic
  source 1..24: mol_type = other RNA
gcgcgggagaccgccggcaggcac

SEQ ID NO: 15202 - RNA, 18 nt, synthetic construct
  misc_feature 1..18: note = Synthetic
  source 1..18: mol_type = other RNA
tttccggtggccgggcac

SEQ ID NO: 15203 - RNA, 19 nt, synthetic construct
  misc_feature 1..19: note = Synthetic
  source 1..19: mol_type = other RNA
ctttccggtggccgggcac

SEQ ID NO: 15204 - RNA, 21 nt, synthetic construct
  misc_feature 1..21: note = Synthetic
  source 1..21: mol_type = other RNA
gcctttccggtggccgggcac

SEQ ID NO: 15205 - RNA, 22 nt, synthetic construct
  misc_feature 1..22: note = Synthetic
  source 1..22: mol_type = other RNA
ggcctttccggtggccgggcac

SEQ ID NO: 15206 - RNA, 23 nt, synthetic construct
  misc_feature 1..23: note = Synthetic
  source 1..23: mol_type = other RNA
tggcctttccggtggccgggcac

SEQ ID NO: 15207 - RNA, 24 nt, synthetic construct
  misc_feature 1..24: note = Synthetic
  source 1..24: mol_type = other RNA
ctggcctttccggtggccgggcac

SEQ ID NO: 15208 - RNA, 18 nt, synthetic construct
  misc_feature 1..18: note = Synthetic
  source 1..18: mol_type = other RNA
cccacttccgggtttcac

SEQ ID NO: 15209 - RNA, 19 nt, synthetic construct
  misc_feature 1..19: note = Synthetic
  source 1..19: mol_type = other RNA
ccccacttccgggtttcac

SEQ ID NO: 15210 - RNA, 21 nt, synthetic construct
  misc_feature 1..21: note = Synthetic
  source 1..21: mol_type = other RNA
gaccccacttccgggtttcac

SEQ ID NO: 15211 - RNA, 22 nt, synthetic construct
  misc_feature 1..22: note = Synthetic
  source 1..22: mol_type = other RNA
tgaccccacttccgggtttcac

SEQ ID NO: 15212 - RNA, 23 nt, synthetic construct
  misc_feature 1..23: note = Synthetic
  source 1..23: mol_type = other RNA
ttgaccccacttccgggtttcac

SEQ ID NO: 15213 - RNA, 24 nt, synthetic construct
  misc_feature 1..24: note = Synthetic
  source 1..24: mol_type = other RNA
cttgaccccacttccgggtttcac

SEQ ID NO: 15214 - RNA, 18 nt, synthetic construct
  misc_feature 1..18: note = Synthetic
  source 1..18: mol_type = other RNA
ggacgccatcacaccgac

SEQ ID NO: 15215 - RNA, 19 nt, synthetic construct
  misc_feature 1..19: note = Synthetic
  source 1..19: mol_type = other RNA
tggacgccatcacaccgac

SEQ ID NO: 15216 - RNA, 21 nt, synthetic construct
  misc_feature 1..21: note = Synthetic
  source 1..21: mol_type = other RNA
tatggacgccatcacaccgac

SEQ ID NO: 15217 - RNA, 22 nt, synthetic construct
  misc_feature 1..22: note = Synthetic
  source 1..22: mol_type = other RNA
ttatggacgccatcacaccgac

SEQ ID NO: 15218 - RNA, 23 nt, synthetic construct
  misc_feature 1..23: note = Synthetic
  source 1..23: mol_type = other RNA
tttatggacgccatcacaccgac

SEQ ID NO: 15219 - RNA, 24 nt, synthetic construct
  misc_feature 1..24: note = Synthetic
  source 1..24: mol_type = other RNA
gtttatggacgccatcacaccgac

SEQ ID NO: 15220 - RNA, 18 nt, synthetic construct
  misc_feature 1..18: note = Synthetic
  source 1..18: mol_type = other RNA
catcggcgcatcaccgac

SEQ ID NO: 15221 - RNA, 19 nt, synthetic construct
  misc_feature 1..19: note = Synthetic
  source 1..19: mol_type = other RNA
ccatcggcgcatcaccgac

SEQ ID NO: 15222 - RNA, 21 nt, synthetic construct
  misc_feature 1..21: note = Synthetic
  source 1..21: mol_type = other RNA
gcccatcggcgcatcaccgac

SEQ ID NO: 15223 - RNA, 22 nt, synthetic construct
  misc_feature 1..22: note = Synthetic
  source 1..22: mol_type = other RNA
cgcccatcggcgcatcaccgac

SEQ ID NO: 15224 - RNA, 23 nt, synthetic construct
  misc_feature 1..23: note = Synthetic
  source 1..23: mol_type = other RNA
acgcccatcggcgcatcaccgac

SEQ ID NO: 15225 - RNA, 24 nt, synthetic construct
  misc_feature 1..24: note = Synthetic
  source 1..24: mol_type = other RNA
gacgcccatcggcgcatcaccgac

SEQ ID NO: 15226 - RNA, 18 nt, synthetic construct
  misc_feature 1..18: note = Synthetic
  source 1..18: mol_type = other RNA
ctgctgcgcctggccgac

SEQ ID NO: 15227 - RNA, 19 nt, synthetic construct
  misc_feature 1..19: note = Synthetic
  source 1..19: mol_type = other RNA
cctgctgcgcctggccgac

SEQ ID NO: 15228 - RNA, 21 nt, synthetic construct
  misc_feature 1..21: note = Synthetic
  source 1..21: mol_type = other RNA
tgcctgctgcgcctggccgac

SEQ ID NO: 15229 - RNA, 22 nt, synthetic construct
  misc_feature 1..22: note = Synthetic
  source 1..22: mol_type = other RNA
gtgcctgctgcgcctggccgac

SEQ ID NO: 15230 - RNA, 23 nt, synthetic construct
  misc_feature 1..23: note = Synthetic
  source 1..23: mol_type = other RNA
cgtgcctgctgcgcctggccgac

SEQ ID NO: 15231 - RNA, 24 nt, synthetic construct
  misc_feature 1..24: note = Synthetic
  source 1..24: mol_type = other RNA
acgtgcctgctgcgcctggccgac

SEQ ID NO: 15232 - RNA, 18 nt, synthetic construct
  misc_feature 1..18: note = Synthetic
  source 1..18: mol_type = other RNA
aaggacaagaagaaggac

SEQ ID NO: 15233 - RNA, 19 nt, synthetic construct
  misc_feature 1..19: note = Synthetic
  source 1..19: mol_type = other RNA
gaaggacaagaagaaggac

SEQ ID NO: 15234 - RNA, 21 nt, synthetic construct
  misc_feature 1..21: note = Synthetic
  source 1..21: mol_type = other RNA
ctgaaggacaagaagaaggac

SEQ ID NO: 15235 - RNA, 22 nt, synthetic construct
  misc_feature 1..22: note = Synthetic
  source 1..22: mol_type = other RNA
cctgaaggacaagaagaaggac

SEQ ID NO: 15236 - RNA, 23 nt, synthetic construct
  misc_feature 1..23: note = Synthetic
  source 1..23: mol_type = other RNA
tcctgaaggacaagaagaaggac

SEQ ID NO: 15237 - RNA, 24 nt, synthetic construct
  misc_feature 1..24: note = Synthetic
  source 1..24: mol_type = other RNA
gtcctgaaggacaagaagaaggac

SEQ ID NO: 15238 - RNA, 18 nt, synthetic construct
  misc_feature 1..18: note = Synthetic
  source 1..18: mol_type = other RNA
gaagccgtcctgaaggac

SEQ ID NO: 15239 - RNA, 19 nt, synthetic construct
  misc_feature 1..19: note = Synthetic
  source 1..19: mol_type = other RNA
cgaagccgtcctgaaggac

SEQ ID NO: 15240 - RNA, 21 nt, synthetic construct
  misc_feature 1..21: note = Synthetic
  source 1..21: mol_type = other RNA
gccgaagccgtcctgaaggac

SEQ ID NO: 15241 - RNA, 22 nt, synthetic construct
  misc_feature 1..22: note = Synthetic
  source 1..22: mol_type = other RNA
ggccgaagccgtcctgaaggac

SEQ ID NO: 15242 - RNA, 23 nt, synthetic construct
  misc_feature 1..23: note = Synthetic
  source 1..23: mol_type = other RNA
tggccgaagccgtcctgaaggac

SEQ ID NO: 15243 - RNA, 24 nt, synthetic construct
  misc_feature 1..24: note = Synthetic
  source 1..24: mol_type = other RNA
gtggccgaagccgtcctgaaggac

SEQ ID NO: 15244 - RNA, 18 nt, synthetic construct
  misc_feature 1..18: note = Synthetic
  source 1..18: mol_type = other RNA
gccgcagcccgggaggac

SEQ ID NO: 15245 - RNA, 19 nt, synthetic construct
  misc_feature 1..19: note = Synthetic
  source 1..19: mol_type = other RNA
ggccgcagcccgggaggac

SEQ ID NO: 15246 - RNA, 21 nt, synthetic construct
  misc_feature 1..21: note = Synthetic
  source 1..21: mol_type = other RNA
ccggccgcagcccgggaggac

SEQ ID NO: 15247 - RNA, 22 nt, synthetic construct
  misc_feature 1..22: note = Synthetic
  source 1..22: mol_type = other RNA
tccggccgcagcccgggaggac

SEQ ID NO: 15248 - RNA, 23 nt, synthetic construct
  misc_feature 1..23: note = Synthetic
  source 1..23: mol_type = other RNA
gtccggccgcagcccgggaggac

SEQ ID NO: 15249 - RNA, 24 nt, synthetic construct
  misc_feature 1..24: note = Synthetic
  source 1..24: mol_type = other RNA
cgtccggccgcagcccgggaggac

SEQ ID NO: 15250 - RNA, 18 nt, synthetic construct
  misc_feature 1..18: note = Synthetic
  source 1..18: mol_type = other RNA
gaggaggagggggaggac

SEQ ID NO: 15251 - RNA, 19 nt, synthetic construct
  misc_feature 1..19: note = Synthetic
  source 1..19: mol_type = other RNA
agaggaggagggggaggac

SEQ ID NO: 15252 - RNA, 21 nt, synthetic construct
  misc_feature 1..21: note = Synthetic
  source 1..21: mol_type = other RNA
ccagaggaggagggggaggac

SEQ ID NO: 15253 - RNA, 22 nt, synthetic construct
  misc_feature 1..22: note = Synthetic
  source 1..22: mol_type = other RNA
gccagaggaggagggggaggac

SEQ ID NO: 15254 - RNA, 23 nt, synthetic construct
  misc_feature 1..23: note = Synthetic
  source 1..23: mol_type = other RNA
ggccagaggaggagggggaggac

SEQ ID NO: 15255 - RNA, 24 nt, synthetic construct
  misc_feature 1..24: note = Synthetic
  source 1..24: mol_type = other RNA
cggccagaggaggagggggaggac

SEQ ID NO: 15256 - RNA, 18 nt, synthetic construct
  misc_feature 1..18: note = Synthetic
  source 1..18: mol_type = other RNA
cgcatcatctacggggac

SEQ ID NO: 15257 - RNA, 19 nt, synthetic construct
  misc_feature 1..19: note = Synthetic
  source 1..19: mol_type = other RNA
gcgcatcatctacggggac

SEQ ID NO: 15258 - RNA, 21 nt, synthetic construct
  misc_feature 1..21: note = Synthetic
  source 1..21: mol_type = other RNA
atgcgcatcatctacggggac

SEQ ID NO: 15259 - RNA, 22 nt, synthetic construct
  misc_feature 1..22: note = Synthetic
  source 1..22: mol_type = other RNA
catgcgcatcatctacggggac

SEQ ID NO: 15260 - RNA, 23 nt, synthetic construct
  misc_feature 1..23: note = Synthetic
  source 1..23: mol_type = other RNA
ccatgcgcatcatctacggggac

SEQ ID NO: 15261 - RNA, 24 nt, synthetic construct
  misc_feature 1..24: note = Synthetic
  source 1..24: mol_type = other RNA
tccatgcgcatcatctacggggac

SEQ ID NO: 15262 - RNA, 18 nt, synthetic construct
  misc_feature 1..18: note = Synthetic
  source 1..18: mol_type = other RNA
gaggcgggcaaggactac

SEQ ID NO: 15263 - RNA, 19 nt, synthetic construct
  misc_feature 1..19: note = Synthetic
  source 1..19: mol_type = other RNA
ggaggcgggcaaggactac

SEQ ID NO: 15264 - RNA, 21 nt, synthetic construct
  misc_feature 1..21: note = Synthetic
  source 1..21: mol_type = other RNA
ctggaggcgggcaaggactac

SEQ ID NO: 15265 - RNA, 22 nt, synthetic construct
  misc_feature 1..22: note = Synthetic
  source 1..22: mol_type = other RNA
cctggaggcgggcaaggactac

SEQ ID NO: 15266 - RNA, 23 nt, synthetic construct
  misc_feature 1..23: note = Synthetic
  source 1..23: mol_type = other RNA
acctggaggcgggcaaggactac

SEQ ID NO: 15267 - RNA, 24 nt, synthetic construct
  misc_feature 1..24: note = Synthetic
  source 1..24: mol_type = other RNA
cacctggaggcgggcaaggactac

SEQ ID NO: 15268 - RNA, 18 nt, synthetic construct
  misc_feature 1..18: note = Synthetic
  source 1..18: mol_type = other RNA
tccatgcgcatcatctac

SEQ ID NO: 15269 - RNA, 19 nt, synthetic construct
  misc_feature 1..19: note = Synthetic
  source 1..19: mol_type = other RNA
ttccatgcgcatcatctac

SEQ ID NO: 15270 - RNA, 21 nt, synthetic construct
  misc_feature 1..21: note = Synthetic
  source 1..21: mol_type = other RNA
tattccatgcgcatcatctac

SEQ ID NO: 15271 - RNA, 22 nt, synthetic construct
  misc_feature 1..22: note = Synthetic
  source 1..22: mol_type = other RNA
ctattccatgcgcatcatctac

SEQ ID NO: 15272 - RNA, 23 nt, synthetic construct
  misc_feature 1..23: note = Synthetic
  source 1..23: mol_type = other RNA
cctattccatgcgcatcatctac

SEQ ID NO: 15273 - RNA, 24 nt, synthetic construct
  misc_feature 1..24: note = Synthetic
  source 1..24: mol_type = other RNA
ccctattccatgcgcatcatctac

SEQ ID NO: 15274 - RNA, 18 nt, synthetic construct
  misc_feature 1..18: note = Synthetic
  source 1..18: mol_type = other RNA
ggcaggcacgtggggtac

SEQ ID NO: 15275 - RNA, 19 nt, synthetic construct
  misc_feature 1..19: note = Synthetic
  source 1..19: mol_type = other RNA
cggcaggcacgtggggtac

SEQ ID NO: 15276 - RNA, 21 nt, synthetic construct
  misc_feature 1..21: note = Synthetic
  source 1..21: mol_type = other RNA
gccggcaggcacgtggggtac

SEQ ID NO: 15277 - RNA, 22 nt, synthetic construct
  misc_feature 1..22: note = Synthetic
  source 1..22: mol_type = other RNA
cgccggcaggcacgtggggtac

SEQ ID NO: 15278 - RNA, 23 nt, synthetic construct
  misc_feature 1..23: note = Synthetic
  source 1..23: mol_type = other RNA
ccgccggcaggcacgtggggtac

SEQ ID NO: 15279 - RNA, 24 nt, synthetic construct
  misc_feature 1..24: note = Synthetic
  source 1..24: mol_type = other RNA
accgccggcaggcacgtggggtac

SEQ ID NO: 15280 - RNA, 18 nt, synthetic construct
  misc_feature 1..18: note = Synthetic
  source 1..18: mol_type = other RNA
acgcggcagtacttttac

SEQ ID NO: 15281 - RNA, 19 nt, synthetic construct
  misc_feature 1..19: note = Synthetic
  source 1..19: mol_type = other RNA
cacgcggcagtacttttac

SEQ ID NO: 15282 - RNA, 21 nt, synthetic construct
  misc_feature 1..21: note = Synthetic
  source 1..21: mol_type = other RNA
ggcacgcggcagtacttttac

SEQ ID NO: 15283 - RNA, 22 nt, synthetic construct
  misc_feature 1..22: note = Synthetic
  source 1..22: mol_type = other RNA
cggcacgcggcagtacttttac

SEQ ID NO: 15284 - RNA, 23 nt, synthetic construct
  misc_feature 1..23: note = Synthetic
  source 1..23: mol_type = other RNA
acggcacgcggcagtacttttac

SEQ ID NO: 15285 - RNA, 24 nt, synthetic construct
  misc_feature 1..24: note = Synthetic
  source 1..24: mol_type = other RNA
tacggcacgcggcagtacttttac

SEQ ID NO: 15286 - RNA, 18 nt, synthetic construct
  misc_feature 1..18: note = Synthetic
  source 1..18: mol_type = other RNA
tttattctgccggacacc

SEQ ID NO: 15287 - RNA, 19 nt, synthetic construct
  misc_feature 1..19: note = Synthetic
  source 1..19: mol_type = other RNA
ctttattctgccggacacc

SEQ ID NO: 15288 - RNA, 21 nt, synthetic construct
  misc_feature 1..21: note = Synthetic
  source 1..21: mol_type = other RNA
ggctttattctgccggacacc

SEQ ID NO: 15289 - RNA, 22 nt, synthetic construct
  misc_feature 1..22: note = Synthetic
  source 1..22: mol_type = other RNA
gggctttattctgccggacacc

SEQ ID NO: 15290 - RNA, 23 nt, synthetic construct
  misc_feature 1..23: note = Synthetic
  source 1..23: mol_type = other RNA
agggctttattctgccggacacc

SEQ ID NO: 15291 - RNA, 24 nt, synthetic construct
  misc_feature 1..24: note = Synthetic
  source 1..24: mol_type = other RNA
aagggctttattctgccggacacc

SEQ ID NO: 15292 - RNA, 18 nt, synthetic construct
  misc_feature 1..18: note = Synthetic
  source 1..18: mol_type = other RNA
ccgacgcagtggcgcacc

SEQ ID NO: 15293 - RNA, 19 nt, synthetic construct
  misc_feature 1..19: note = Synthetic
  source 1..19: mol_type = other RNA
gccgacgcagtggcgcacc

SEQ ID NO: 15294 - RNA, 21 nt, synthetic construct
  misc_feature 1..21: note = Synthetic
  source 1..21: mol_type = other RNA
gggccgacgcagtggcgcacc

SEQ ID NO: 15295 - RNA, 22 nt, synthetic construct
  misc_feature 1..22: note = Synthetic
  source 1..22: mol_type = other RNA
agggccgacgcagtggcgcacc

SEQ ID NO: 15296 - RNA, 23 nt, synthetic construct
  misc_feature 1..23: note = Synthetic
  source 1..23: mol_type = other RNA
gagggccgacgcagtggcgcacc

SEQ ID NO: 15297 - RNA, 24 nt, synthetic construct
  misc_feature 1..24: note = Synthetic
  source 1..24: mol_type = other RNA
tgagggccgacgcagtggcgcacc

SEQ ID NO: 15298 - RNA, 18 nt, synthetic construct
  misc_feature 1..18: note = Synthetic
  source 1..18: mol_type = other RNA
ttccggtggccgggcacc

SEQ ID NO: 15299 - RNA, 19 nt, synthetic construct
  misc_feature 1..19: note = Synthetic
  source 1..19: mol_type = other RNA
tttccggtggccgggcacc

(The sequence listing continues in the following parts.)

1. A CRISPR/Cas system, comprising:
a gRNA molecule comprising a targeting domain which is complementary with a target sequence of a herpes simplex virus (HSV) viral gene selected from the group consisting of a UL19 gene, a UL30 gene, a UL48 gene, and a UL54 gene; and
a Cas9 molecule.

2. The system of claim 1, wherein said system is configured to form a double strand break or a single strand break within 500 bp, 450 bp, 400 bp, 350 bp, 300 bp, 250 bp, 200 bp, 150 bp, 100 bp, 50 bp, 25 bp, or 10 bp of a target position within said HSV viral gene, thereby altering said HSV viral gene.

3. The system of claim 1, wherein said Cas9 molecule is an enzymatically active Cas9 (eaCas9) molecule.

4. The system of claim 3, wherein ii) said eaCas9 molecule comprises a nickase molecule, (ii) said eaCas9 molecule comprises N-terminal RuvC-like domain cleavage activity but has no, or no significant, HNH-like domain cleavage activity or (iii) said eaCas9 molecule comprises HNH-like domain cleavage activity but has no, or no significant, N-terminal RuvC-like domain cleavage activity.

5. (canceled)

6. The system of claim 4, wherein (i) said eaCas9 molecule is an HNH-like domain nickase, (ii) said eaCas9 molecule comprises a mutation at D10 and/or (iii) said eaCas9 molecule is an N-terminal RuvC-like domain nickase.

7-9. (canceled)

10. The system of claim 1, wherein said Cas9 molecule is an S. aureus Cas9 molecule, an S. pyogenes Cas9 molecule, or a N. meningitidis Cas9 molecule.

11. (canceled)

12. The system of claim 1, wherein said targeting domain is configured to target a coding region or a non-coding region of said HSV viral gene, wherein said non-coding region comprises a promoter region, an enhancer region, an intron, the 3′ UTR, the 5′ UTR, or a polyadenylation signal region of said HSV viral gene; and said coding region comprises an exon of said HSV viral gene.

13. The system of claim 1, wherein said targeting domain comprises or consists of a nucleotide sequence that is the same as, or differs by no more than 3 nucleotides from, a targeting domain sequence selected from the targeting domain sequences disclosed in Tables 1A-1G, Tables 2A-2G, Tables 3A-3G, Tables 4A-4F, Tables 5A-5E, Tables 6A-6G, Tables 7A-7D, Tables 8A-8E, Tables 9A-9G, Tables 10A-10C, Tables 11A-11E, Tables 12A-12G, Tables 13A-13C, Tables 14A-14E, Tables 15A-15G, Tables 16A-16C and Table 27.

14. The system of claim 1, wherein (i) said gRNA is a modular gRNA molecule or a chimeric gRNA molecule, and/or (ii) said targeting domain has a length of 16, 17, 18, 19, 20, 21, 22, 23, 24, 25, or 26 nucleotides.

15. (canceled)

16. The system of claim 1, wherein said gRNA molecule comprises from 5′ to 3′:
a targeting domain;
a first complementarity domain;
a linking domain;
a second complementarity domain;
a proximal domain; and
a tail domain.

17. The system of claim 16, wherein (i) said linking domain is no more than 25 nucleotides in length and/or (ii) said proximal and tail domain, taken together, are at least 20, at least 25, at least 30, or at least 40 nucleotides in length.

18. (canceled)

19. A cell transfected with the CRISPR/Cas system of claim 1.

20. A gRNA molecule comprising a targeting domain which is complementary with a target sequence of a HSV viral gene selected from the group consisting of a UL19 gene, a UL30 gene, a UL48 gene, and a UL54 gene.

21. The gRNA molecule of claim 20, wherein said targeting domain comprises or consists of a nucleotide sequence that is the same as, or differs by no more than 3 nucleotides from, a targeting domain sequence selected from the targeting domain sequences disclosed Tables 1A-1G, Tables 2A-2G, Tables 3A-3G, Tables 4A-4F, Tables 5A-5E, Tables 6A-6G, Tables 7A-7D, Tables 8A-8E, Tables 9A-9G, Tables 10A-10C, Tables 11A-11E, Tables 12A-12G, Tables 13A-13C, Tables 14A-14E, Tables 15A-15G, Tables 16A-16C and Table 27.

22. A composition comprising the gRNA molecule of claim 20.

23. (canceled)

24. A nucleic acid composition comprising: (a) a first nucleotide sequence that encodes the gRNA molecule of claim 20.

25. The nucleic acid composition of claim 24, further comprising: (b) a second nucleotide sequence that encodes a Cas9 molecule and/or (c) a third nucleotide sequence that encodes a second gRNA molecule comprising a targeting domain that is complementary with a second target sequence of said HSV viral gene.

26. The nucleic acid of claim 25, ii) wherein said Cas9 molecule is an eaCas9 molecule, (ii) wherein said Cas9 molecule is an S. aureus Cas9 molecule, an S. pyogenes Cas9 molecule, or a N. meningitidis Cas9 molecule and/or (iii) wherein (a) and (b) are present on one nucleic acid molecule or (a) is present on a first nucleic acid molecule and (b) is present on a second nucleic acid molecule.

27-29. (canceled)

30. A cell transfected with the nucleic acid composition of claim 24.

31. A method of altering a HSV viral gene selected from the group consisting of a UL19 gene, a UL30 gene, a UL48 gene, and a UL54 gene in a cell, comprising administering to said cell:
(i) a CRISPR/Cas system comprising: (a) a gRNA molecule comprising a targeting domain which is complementary with a target domain sequence of said HSV viral gene and (b) a Cas9 molecule; or
(ii) a nucleic acid composition that comprises: (a) a first nucleotide sequence encoding a gRNA molecule comprising a targeting domain that is complementary with a target sequence of said HSV viral gene and (b) a second nucleotide sequence encoding a Cas9 molecule.

32-36. (canceled)
